United States Patent Application Publication US 2010/0105134 A1 - sequence listing, part 6

SEQ ID NO: 123055 - RNA, 11 nt, Artificial Sequence
  Description of Artificial Sequence: Synthetic oligonucleotide
agcaagguuua

SEQ ID NO: 123056 - RNA, 12 nt, Artificial Sequence
  Description of Artificial Sequence: Synthetic oligonucleotide
uguauuauguug

SEQ ID NO: 123057 - RNA, 15 nt, Artificial Sequence
  Description of Artificial Sequence: Synthetic oligonucleotide
uuuuaaucuuuguga

SEQ ID NO: 123058 - RNA, 14 nt, Artificial Sequence
  Description of Artificial Sequence: Synthetic oligonucleotide
uuaaucuuugugac

SEQ ID NO: 123059 - RNA, 13 nt, Artificial Sequence
  Description of Artificial Sequence: Synthetic oligonucleotide
gcugcuuaugucu

SEQ ID NO: 123060 - RNA, 14 nt, Artificial Sequence
  Description of Artificial Sequence: Synthetic oligonucleotide
aaguguuucagaag

SEQ ID NO: 123061 - RNA, 13 nt, Artificial Sequence
  Description of Artificial Sequence: Synthetic oligonucleotide
gaccaucaauaag

SEQ ID NO: 123062 - RNA, 13 nt, Artificial Sequence
  Description of Artificial Sequence: Synthetic oligonucleotide
ccaucaauaagga

SEQ ID NO: 123063 - RNA, 14 nt, Artificial Sequence
  Description of Artificial Sequence: Synthetic oligonucleotide
ucaauaaggaagaa

SEQ ID NO: 123064 - RNA, 14 nt, Artificial Sequence
  Description of Artificial Sequence: Synthetic oligonucleotide
aauaaggaagaagc

SEQ ID NO: 123065 - RNA, 13 nt, Artificial Sequence
  Description of Artificial Sequence: Synthetic oligonucleotide
aggaagaagcccu

SEQ ID NO: 123066 - RNA, 13 nt, Artificial Sequence
  Description of Artificial Sequence: Synthetic oligonucleotide
gcauaacuaaagg

SEQ ID NO: 123067 - RNA, 14 nt, Artificial Sequence
  Description of Artificial Sequence: Synthetic oligonucleotide
cauaacuaaaggug

SEQ ID NO: 123068 - RNA, 12 nt, Artificial Sequence
  Description of Artificial Sequence: Synthetic oligonucleotide
cuacaucacgcc

SEQ ID NO: 123069 - RNA, 12 nt, Artificial Sequence
  Description of Artificial Sequence: Synthetic oligonucleotide
acuggauuuaag

SEQ ID NO: 123070 - RNA, 12 nt, Artificial Sequence
  Description of Artificial Sequence: Synthetic oligonucleotide
cuggauuuaagc

SEQ ID NO: 123071 - RNA, 13 nt, Artificial Sequence
  Description of Artificial Sequence: Synthetic oligonucleotide
gauuuaagcagag

SEQ ID NO: 123072 - RNA, 13 nt, Artificial Sequence
  Description of Artificial Sequence: Synthetic oligonucleotide
auuuaagcagagu

SEQ ID NO: 123073 - RNA, 13 nt, Artificial Sequence
  Description of Artificial Sequence: Synthetic oligonucleotide
uuaagcagaguuc

SEQ ID NO: 123074 - RNA, 13 nt, Artificial Sequence
  Description of Artificial Sequence: Synthetic oligonucleotide
uaagcagaguuca

SEQ ID NO: 123075 - RNA, 14 nt, Artificial Sequence
  Description of Artificial Sequence: Synthetic oligonucleotide
agcagaguucaaaa

SEQ ID NO: 123076 - RNA, 12 nt, Artificial Sequence
  Description of Artificial Sequence: Synthetic oligonucleotide
cucagggucuga

SEQ ID NO: 123077 - RNA, 13 nt, Artificial Sequence
  Description of Artificial Sequence: Synthetic oligonucleotide
caagcaacuacau

SEQ ID NO: 123078 - RNA, 12 nt, Artificial Sequence
  Description of Artificial Sequence: Synthetic oligonucleotide
aucaauggcagc

SEQ ID NO: 123079 - RNA, 11 nt, Artificial Sequence
  Description of Artificial Sequence: Synthetic oligonucleotide
uuccagcccac

SEQ ID NO: 123080 - RNA, 12 nt, Artificial Sequence
  Description of Artificial Sequence: Synthetic oligonucleotide
cagcugagaaug

SEQ ID NO: 123081 - RNA, 13 nt, Artificial Sequence
  Description of Artificial Sequence: Synthetic oligonucleotide
aacguaucuccua

SEQ ID NO: 123082 - RNA, 14 nt, Artificial Sequence
  Description of Artificial Sequence: Synthetic oligonucleotide
ccuaaaauaauuuc

SEQ ID NO: 123083 - RNA, 13 nt, Artificial Sequence
  Description of Artificial Sequence: Synthetic oligonucleotide
uggaagauucagc

SEQ ID NO: 123084 - RNA, 12 nt, Artificial Sequence
  Description of Artificial Sequence: Synthetic oligonucleotide
uuaaacucuccu

SEQ ID NO: 123085 - RNA, 12 nt, Artificial Sequence
  Description of Artificial Sequence: Synthetic oligonucleotide
cagccuacaguu

SEQ ID NO: 123086 - RNA, 13 nt, Artificial Sequence
  Description of Artificial Sequence: Synthetic oligonucleotide
guuauguucaguc

SEQ ID NO: 123087 - RNA, 13 nt, Artificial Sequence
  Description of Artificial Sequence: Synthetic oligonucleotide
cacauacaaaaug

SEQ ID NO: 123088 - RNA, 9 nt, Artificial Sequence
  Description of Artificial Sequence: Synthetic oligonucleotide
uccuuuugc

SEQ ID NO: 123089 - RNA, 12 nt, Artificial Sequence
  Description of Artificial Sequence: Synthetic oligonucleotide
ugaccugugaag

SEQ ID NO: 123090 - RNA, 12 nt, Artificial Sequence
  Description of Artificial Sequence: Synthetic oligonucleotide
cuaucucacaca

SEQ ID NO: 123091 - RNA, 13 nt, Artificial Sequence
  Description of Artificial Sequence: Synthetic oligonucleotide
uguccucaauugu

SEQ ID NO: 123092 - RNA, 12 nt, Artificial Sequence
  Description of Artificial Sequence: Synthetic oligonucleotide
aaaccguagcug

SEQ ID NO: 123093 - RNA, 12 nt, Artificial Sequence
  Description of Artificial Sequence: Synthetic oligonucleotide
uagcuggcaagc

SEQ ID NO: 123094 - RNA, 14 nt, Artificial Sequence
  Description of Artificial Sequence: Synthetic oligonucleotide
uuguaugguuaaaa

SEQ ID NO: 123095 - RNA, 14 nt, Artificial Sequence
  Description of Artificial Sequence: Synthetic oligonucleotide
ugguuaaaagaugg

SEQ ID NO: 123096 - RNA, 13 nt, Artificial Sequence
  Description of Artificial Sequence: Synthetic oligonucleotide
cagggaauuauac

SEQ ID NO: 123097 - RNA, 12 nt, Artificial Sequence
  Description of Artificial Sequence: Synthetic oligonucleotide
acaaucuugcug

SEQ ID NO: 123098 - RNA, 13 nt, Artificial Sequence
  Description of Artificial Sequence: Synthetic oligonucleotide
ccaauaaugaaga

SEQ ID NO: 123099 - RNA, 13 nt, Artificial Sequence
  Description of Artificial Sequence: Synthetic oligonucleotide
acuuuggauguuc

SEQ ID NO: 123100 - RNA, 12 nt, Artificial Sequence
  Description of Artificial Sequence: Synthetic oligonucleotide
aaugcuuccacu

SEQ ID NO: 123101 - RNA, 11 nt, Artificial Sequence
  Description of Artificial Sequence: Synthetic oligonucleotide
gagaaaguuug

SEQ ID NO: 123102 - RNA, 11 nt, Artificial Sequence
  Description of Artificial Sequence: Synthetic oligonucleotide
aaagaacuacu

SEQ ID NO: 123103 - RNA, 12 nt, Artificial Sequence
  Description of Artificial Sequence: Synthetic oligonucleotide
uuagaaauacgg

SEQ ID NO: 123104 - RNA, 12 nt, Artificial Sequence
  Description of Artificial Sequence: Synthetic oligonucleotide
aacauggguaca

SEQ ID NO: 123105 - RNA, 14 nt, Artificial Sequence
  Description of Artificial Sequence: Synthetic oligonucleotide
aaagacacagaaga

SEQ ID NO: 123106 - RNA, 11 nt, Artificial Sequence
  Description of Artificial Sequence: Synthetic oligonucleotide
uaguagggagg

SEQ ID NO: 123107 - RNA, 12 nt, Artificial Sequence
  Description of Artificial Sequence: Synthetic oligonucleotide
gccuucugcagc

SEQ ID NO: 123108 - RNA, 10 nt, Artificial Sequence
  Description of Artificial Sequence: Synthetic oligonucleotide
ggucugguac

SEQ ID NO: 123109 - RNA, 12 nt, Artificial Sequence
  Description of Artificial Sequence: Synthetic oligonucleotide
cuaguccuuccg

SEQ ID NO: 123110 - RNA, 12 nt, Artificial Sequence
  Description of Artificial Sequence: Synthetic oligonucleotide
ccagugaauauu

SEQ ID NO: 123111 - RNA, 13 nt, Artificial Sequence
  Description of Artificial Sequence: Synthetic oligonucleotide
augaauucaaguu

SEQ ID NO: 123112 - RNA, 12 nt, Artificial Sequence
  Description of Artificial Sequence: Synthetic oligonucleotide
caggacacagau

SEQ ID NO: 123113 - RNA, 12 nt, Artificial Sequence
  Description of Artificial Sequence: Synthetic oligonucleotide
cucaaagcacag

SEQ ID NO: 123114 - RNA, 10 nt, Artificial Sequence
  Description of Artificial Sequence: Synthetic oligonucleotide
accacugcca

SEQ ID NO: 123115 - RNA, 13 nt, Artificial Sequence
  Description of Artificial Sequence: Synthetic oligonucleotide
gaaacuacuagug

SEQ ID NO: 123116 - RNA, 12 nt, Artificial Sequence
  Description of Artificial Sequence: Synthetic oligonucleotide
aagucggacagc

SEQ ID NO: 123117 - RNA, 13 nt, Artificial Sequence
  Description of Artificial Sequence: Synthetic oligonucleotide
gaaagcgaaaaau

SEQ ID NO: 123118 - RNA, 13 nt, Artificial Sequence
  Description of Artificial Sequence: Synthetic oligonucleotide
cccucugauuuag

SEQ ID NO: 123119 - RNA, 12 nt, Artificial Sequence
  Description of Artificial Sequence: Synthetic oligonucleotide
ugagcuauuuaa

SEQ ID NO: 123120 - RNA, 13 nt, Artificial Sequence
  Description of Artificial Sequence: Synthetic oligonucleotide
aaaaggugaaaaa

SEQ ID NO: 123121 - RNA, 14 nt, Artificial Sequence
  Description of Artificial Sequence: Synthetic oligonucleotide
gaaaaagcacuauu

SEQ ID NO: 123122 - RNA, 12 nt, Artificial Sequence
  Description of Artificial Sequence: Synthetic oligonucleotide
ggcugaaaagaa

SEQ ID NO: 123123 - RNA, 12 nt, Artificial Sequence
  Description of Artificial Sequence: Synthetic oligonucleotide
uaaacccuuaua

SEQ ID NO: 123124 - RNA, 13 nt, Artificial Sequence
  Description of Artificial Sequence: Synthetic oligonucleotide
cauacuauuagcc

SEQ ID NO: 123125 - RNA, 12 nt, Artificial Sequence
  Description of Artificial Sequence: Synthetic oligonucleotide
gacagaagcauu

SEQ ID NO: 123126 - RNA, 14 nt, Artificial Sequence
  Description of Artificial Sequence: Synthetic oligonucleotide
agagcaaauaagau

SEQ ID NO: 123127 - RNA, 14 nt, Artificial Sequence
  Description of Artificial Sequence: Synthetic oligonucleotide
ccaacauuuuucuc

SEQ ID NO: 123128 - RNA, 15 nt, Artificial Sequence
  Description of Artificial Sequence: Synthetic oligonucleotide
uuaaguaugagaaaa

SEQ ID NO: 123129 - RNA, 14 nt, Artificial Sequence
  Description of Artificial Sequence: Synthetic oligonucleotide
caggaauaaagaug

SEQ ID NO: 123130 - RNA, 13 nt, Artificial Sequence
  Description of Artificial Sequence: Synthetic oligonucleotide
aauuugaaugacc

SEQ ID NO: 123131 - RNA, 14 nt, Artificial Sequence
  Description of Artificial Sequence: Synthetic oligonucleotide
auguauaaagauag

SEQ ID NO: 123132 - RNA, 12 nt, Artificial Sequence
  Description of Artificial Sequence: Synthetic oligonucleotide
ggcuguaacuau

SEQ ID NO: 123133 - RNA, 11 nt, Artificial Sequence
  Description of Artificial Sequence: Synthetic oligonucleotide
ucugugaagug

SEQ ID NO: 123134 - RNA, 14 nt, Artificial Sequence
  Description of Artificial Sequence: Synthetic oligonucleotide
ccuuuaaggaaaug

SEQ ID NO: 123135 - RNA, 13 nt, Artificial Sequence
  Description of Artificial Sequence: Synthetic oligonucleotide
aaggauacaaaaa

SEQ ID NO: 123136 - RNA, 12 nt, Artificial Sequence
  Description of Artificial Sequence: Synthetic oligonucleotide
agaugcaauuug

SEQ ID NO: 123137 - RNA, 12 nt, Artificial Sequence
  Description of Artificial Sequence: Synthetic oligonucleotide
guucaaaacgaa

SEQ ID NO: 123138 - RNA, 11 nt, Artificial Sequence
  Description of Artificial Sequence: Synthetic oligonucleotide
gugaaaccuca

SEQ ID NO: 123139 - RNA, 13 nt, Artificial Sequence
  Description of Artificial Sequence: Synthetic oligonucleotide
acgaaagagaagc

SEQ ID NO: 123140 - RNA, 12 nt, Artificial Sequence
  Description of Artificial Sequence: Synthetic oligonucleotide
cuccacaagcgc

SEQ ID NO: 123141 - RNA, 14 nt, Artificial Sequence
  Description of Artificial Sequence: Synthetic oligonucleotide
gagaagauuccaaa

SEQ ID NO: 123142 - RNA, 13 nt, Artificial Sequence
  Description of Artificial Sequence: Synthetic oligonucleotide
aaucuggauucaa

SEQ ID NO: 123143 - RNA, 13 nt, Artificial Sequence
  Description of Artificial Sequence: Synthetic oligonucleotide
agaacagauuuga

SEQ ID NO: 123144 - RNA, 11 nt, Artificial Sequence
  Description of Artificial Sequence: Synthetic oligonucleotide
ccagagcugug

SEQ ID NO: 123145 - RNA, 12 nt, Artificial Sequence
  Description of Artificial Sequence: Synthetic oligonucleotide
ccucagauuguu

SEQ ID NO: 123146 - RNA, 12 nt, Artificial Sequence
  Description of Artificial Sequence: Synthetic oligonucleotide
cuauuuuaauua

SEQ ID NO: 123147 - RNA, 13 nt, Artificial Sequence
  Description of Artificial Sequence: Synthetic oligonucleotide
uuuaauuuauuaa

SEQ ID NO: 123148 - RNA, 12 nt, Artificial Sequence
  Description of Artificial Sequence: Synthetic oligonucleotide
augcaguuugaa

SEQ ID NO: 123149 - RNA, 11 nt, Artificial Sequence
  Description of Artificial Sequence: Synthetic oligonucleotide
caugcugcugg

SEQ ID NO: 123150 - RNA, 13 nt, Artificial Sequence
  Description of Artificial Sequence: Synthetic oligonucleotide
agaugugcauuuc

SEQ ID NO: 123151 - RNA, 12 nt, Artificial Sequence
  Description of Artificial Sequence: Synthetic oligonucleotide
ucaaaaccugug

SEQ ID NO: 123152 - RNA, 11 nt, Artificial Sequence
  Description of Artificial Sequence: Synthetic oligonucleotide
gaaugugggua

SEQ ID NO: 123153 - RNA, 10 nt, Artificial Sequence
  Description of Artificial Sequence: Synthetic oligonucleotide
auguggguag

SEQ ID NO: 123154 - RNA, 13 nt, Artificial Sequence
  Description of Artificial Sequence: Synthetic oligonucleotide
ugaaaaugagcau

SEQ ID NO: 123155 - RNA, 13 nt, Artificial Sequence
  Description of Artificial Sequence: Synthetic oligonucleotide
uugcuuuucaugu

SEQ ID NO: 123156 - RNA, 12 nt, Artificial Sequence
  Description of Artificial Sequence: Synthetic oligonucleotide
uguauuucuaua

SEQ ID NO: 123157 - RNA, 13 nt, Artificial Sequence
  Description of Artificial Sequence: Synthetic oligonucleotide
uuugauuaauguu

SEQ ID NO: 123158 - RNA, 12 nt, Artificial Sequence
  Description of Artificial Sequence: Synthetic oligonucleotide
caacguguauag

SEQ ID NO: 123159 - RNA, 12 nt, Artificial Sequence
  Description of Artificial Sequence: Synthetic oligonucleotide
cauauccuuggc

SEQ ID NO: 123160 - RNA, 13 nt, Artificial Sequence
  Description of Artificial Sequence: Synthetic oligonucleotide
uacuaacaucugg

SEQ ID NO: 123161 - RNA, 11 nt, Artificial Sequence
  Description of Artificial Sequence: Synthetic oligonucleotide
cauaaguugug

SEQ ID NO: 123162 - RNA, 12 nt, Artificial Sequence
  Description of Artificial Sequence: Synthetic oligonucleotide
gcaucauuuugg

SEQ ID NO: 123163 - RNA, 10 nt, Artificial Sequence
  Description of Artificial Sequence: Synthetic oligonucleotide
gcucuucuua

SEQ ID NO: 123164 - RNA, 10 nt, Artificial Sequence
  Description of Artificial Sequence: Synthetic oligonucleotide
agauuagguc

SEQ ID NO: 123165 - RNA, 12 nt, Artificial Sequence
  Description of Artificial Sequence: Synthetic oligonucleotide
auggaauugaaa

SEQ ID NO: 123166 - RNA, 13 nt, Artificial Sequence
  Description of Artificial Sequence: Synthetic oligonucleotide
cacacucauuccu

SEQ ID NO: 123167 - RNA, 12 nt, Artificial Sequence
  Description of Artificial Sequence: Synthetic oligonucleotide
uguagagguaac

SEQ ID NO: 123168 - RNA, 11 nt, Artificial Sequence
  Description of Artificial Sequence: Synthetic oligonucleotide
caaccacaugc

SEQ ID NO: 123169 - RNA, 12 nt, Artificial Sequence
  Description of Artificial Sequence: Synthetic oligonucleotide
ucggaaacaagu

SEQ ID NO: 123170 - RNA, 11 nt, Artificial Sequence
  Description of Artificial Sequence: Synthetic oligonucleotide
acucccaauaa

SEQ ID NO: 123171 - RNA, 13 nt, Artificial Sequence
  Description of Artificial Sequence: Synthetic oligonucleotide
aaugcuaagaaau

SEQ ID NO: 123172 - RNA, 11 nt, Artificial Sequence
  Description of Artificial Sequence: Synthetic oligonucleotide
gucuuucucua

SEQ ID NO: 123173 - RNA, 11 nt, Artificial Sequence
  Description of Artificial Sequence: Synthetic oligonucleotide
ugaauuucagg

SEQ ID NO: 123174 - RNA, 13 nt, Artificial Sequence
  Description of Artificial Sequence: Synthetic oligonucleotide
cgauucccucuca

SEQ ID NO: 123175 - RNA, 11 nt, Artificial Sequence
  Description of Artificial Sequence: Synthetic oligonucleotide
aggaaagugaa

SEQ ID NO: 123176 - RNA, 12 nt, Artificial Sequence
  Description of Artificial Sequence: Synthetic oligonucleotide
gaggcugcaugc

SEQ ID NO: 123177 - RNA, 11 nt, Artificial Sequence
  Description of Artificial Sequence: Synthetic oligonucleotide
ucucugaacag

SEQ ID NO: 123178 - RNA, 12 nt, Artificial Sequence
  Description of Artificial Sequence: Synthetic oligonucleotide
aacuuggcugua

SEQ ID NO: 123179 - RNA, 12 nt, Artificial Sequence
  Description of Artificial Sequence: Synthetic oligonucleotide
agaagccaaaau

SEQ ID NO: 123180 - RNA, 14 nt, Artificial Sequence
  Description of Artificial Sequence: Synthetic oligonucleotide
auuaaaagaagucc

SEQ ID NO: 123181 - RNA, 14 nt, Artificial Sequence
  Description of Artificial Sequence: Synthetic oligonucleotide
gaauccggauuauc

SEQ ID NO: 123182 - RNA, 12 nt, Artificial Sequence
  Description of Artificial Sequence: Synthetic oligonucleotide
aaugugacauca

SEQ ID NO: 123183 - RNA, 13 nt, Artificial Sequence
  Description of Artificial Sequence: Synthetic oligonucleotide
caucaaagcaagu

SEQ ID NO: 123184 - RNA, 11 nt, Artificial Sequence
  Description of Artificial Sequence: Synthetic oligonucleotide
agagagagaaa

SEQ ID NO: 123185 - RNA, 13 nt, Artificial Sequence
  Description of Artificial Sequence: Synthetic oligonucleotide
ucgcuguaguauu

SEQ ID NO: 123186 - RNA, 14 nt, Artificial Sequence
  Description of Artificial Sequence: Synthetic oligonucleotide
cgcuguaguauuua

SEQ ID NO: 123187 - RNA, 13 nt, Artificial Sequence
  Description of Artificial Sequence: Synthetic oligonucleotide
auuuaagcccaua

SEQ ID NO: 123188 - RNA, 15 nt, Artificial Sequence
  Description of Artificial Sequence: Synthetic oligonucleotide
auuaaaauaaacaug

SEQ ID NO: 123189 - RNA, 12 nt, Artificial Sequence
  Description of Artificial Sequence: Synthetic oligonucleotide
cuguucugaucg

SEQ ID NO: 123190 - RNA, 16 nt, Artificial Sequence
  Description of Artificial Sequence: Synthetic oligonucleotide
aaauaauuugaacuuu

SEQ ID NO: 123191 - RNA, 12 nt, Artificial Sequence
  Description of Artificial Sequence: Synthetic oligonucleotide
ugcgaccuuaau

SEQ ID NO: 123192 - RNA, 11 nt, Artificial Sequence
  Description of Artificial Sequence: Synthetic oligonucleotide
cugagaaagcu

SEQ ID NO: 123193 - RNA, 13 nt, Artificial Sequence
  Description of Artificial Sequence: Synthetic oligonucleotide
aguaaagaugcua

SEQ ID NO: 123194 - RNA, 12 nt, Artificial Sequence
  Description of Artificial Sequence: Synthetic oligonucleotide
cugcuuaauugc

SEQ ID NO: 123195 - RNA, 14 nt, Artificial Sequence
  Description of Artificial Sequence: Synthetic oligonucleotide
uaccauaugaauga

SEQ ID NO: 123196 - RNA, 12 nt, Artificial Sequence
  Description of Artificial Sequence: Synthetic oligonucleotide
aacuuucuuauc

SEQ ID NO: 123197 - RNA, 13 nt, Artificial Sequence
  Description of Artificial Sequence: Synthetic oligonucleotide
ccuugcaugacau

SEQ ID NO: 123198 - RNA, 14 nt, Artificial Sequence
  Description of Artificial Sequence: Synthetic oligonucleotide
ugaauuuguauaug

SEQ ID NO: 123199 - RNA, 12 nt, Artificial Sequence
  Description of Artificial Sequence: Synthetic oligonucleotide
gaauccuaguag

SEQ ID NO: 123200 - RNA, 10 nt, Artificial Sequence
  Description of Artificial Sequence: Synthetic oligonucleotide
gaaagggaag

SEQ ID NO: 123201 - RNA, 11 nt, Artificial Sequence
  Description of Artificial Sequence: Synthetic oligonucleotide
uaucggcaugc

SEQ ID NO: 123202 - RNA, 12 nt, Artificial Sequence
  Description of Artificial Sequence: Synthetic oligonucleotide
caccucauagua

SEQ ID NO: 123203 - RNA, 11 nt, Artificial Sequence
  Description of Artificial Sequence: Synthetic oligonucleotide
ccagaauugcc

SEQ ID NO: 123204 - RNA, 11 nt, Artificial Sequence
  Description of Artificial Sequence: Synthetic oligonucleotide
uggugaucugg

SEQ ID NO: 123205 - RNA, 12 nt, Artificial Sequence
  Description of Artificial Sequence: Synthetic oligonucleotide
gaucuggguaau

SEQ ID NO: 123206 - RNA, 12 nt, Artificial Sequence
  Description of Artificial Sequence: Synthetic oligonucleotide
ggaugugaugaa

SEQ ID NO: 123207 - RNA, 12 nt, Artificial Sequence
  Description of Artificial Sequence: Synthetic oligonucleotide
cauuuccacagc

SEQ ID NO: 123208 - RNA, 11 nt, Artificial Sequence
  Description of Artificial Sequence: Synthetic oligonucleotide
acagcuacacc

SEQ ID NO: 123209 - RNA, 12 nt, Artificial Sequence
  Description of Artificial Sequence: Synthetic oligonucleotide
ugcaguucuuac

SEQ ID NO: 123210 - RNA, 12 nt, Artificial Sequence
  Description of Artificial Sequence: Synthetic oligonucleotide
acgagaagaaga

SEQ ID NO: 123211 - RNA, 12 nt, Artificial Sequence
  Description of Artificial Sequence: Synthetic oligonucleotide
cgagaagaagau

SEQ ID NO: 123212 - RNA, 15 nt, Artificial Sequence
  Description of Artificial Sequence: Synthetic oligonucleotide
aagaagaucauuuac

SEQ ID NO: 123213 - RNA, 11 nt, Artificial Sequence
  Description of Artificial Sequence: Synthetic oligonucleotide
agaggaagagg

SEQ ID NO: 123214 - RNA, 12 nt, Artificial Sequence
  Description of Artificial Sequence: Synthetic oligonucleotide
gaggaagaggug

SEQ ID NO: 123215 - RNA, 13 nt, Artificial Sequence
  Description of Artificial Sequence: Synthetic oligonucleotide
cuacuuugagggc

SEQ ID NO: 123216 - RNA, 12 nt, Artificial Sequence
  Description of Artificial Sequence: Synthetic oligonucleotide
agggcaucuccu

SEQ ID NO: 123217 - RNA, 10 nt, Artificial Sequence
  Description of Artificial Sequence: Synthetic oligonucleotide
ggagugauau

SEQ ID NO: 123218 - RNA, 11 nt, Artificial Sequence
  Description of Artificial Sequence: Synthetic oligonucleotide
gagugauaugg

SEQ ID NO: 123219 - RNA, 12 nt, Artificial Sequence
  Description of Artificial Sequence: Synthetic oligonucleotide
ugcaguaaagau

SEQ ID NO: 123220 - RNA, 13 nt, Artificial Sequence
  Description of Artificial Sequence: Synthetic oligonucleotide
aguaaagauccua

SEQ ID NO: 123221 - RNA, 12 nt, Artificial Sequence
  Description of Artificial Sequence: Synthetic oligonucleotide
ugacaaaggaca

SEQ ID NO: 123222 - RNA, 13 nt, Artificial Sequence
  Description of Artificial Sequence: Synthetic oligonucleotide
gcaauugugaccc

SEQ ID NO: 123223 - RNA, 12 nt, Artificial Sequence
  Description of Artificial Sequence: Synthetic oligonucleotide
aacaucauccau

SEQ ID NO: 123224 - RNA, 12 nt, Artificial Sequence
  Description of Artificial Sequence: Synthetic oligonucleotide
ugaaauccaaca

SEQ ID NO: 123225 - RNA, 15 nt, Artificial Sequence
  Description of Artificial Sequence: Synthetic oligonucleotide
aacaauauauuucuc

SEQ ID NO: 123226 - RNA, 14 nt, Artificial Sequence
  Description of Artificial Sequence: Synthetic oligonucleotide
aacaguaaagucac

SEQ ID NO: 123227 - RNA, 14 nt, Artificial Sequence
  Description of Artificial Sequence: Synthetic oligonucleotide
ugugaagaaaguaa

SEQ ID NO: 123228 - RNA, 13 nt, Artificial Sequence
  Description of Artificial Sequence: Synthetic oligonucleotide
cuuccgagccauc

SEQ ID NO: 123229 - RNA, 12 nt, Artificial Sequence
  Description of Artificial Sequence: Synthetic oligonucleotide
aauggagguuga

SEQ ID NO: 123230 - RNA, 12 nt, Artificial Sequence
  Description of Artificial Sequence: Synthetic oligonucleotide
ggagguugaaua

SEQ ID NO: 123231 - RNA, 13 nt, Artificial Sequence
  Description of Artificial Sequence: Synthetic oligonucleotide
auuuugaguuuuc

SEQ ID NO: 123232 - RNA, 12 nt, Artificial Sequence
  Description of Artificial Sequence: Synthetic oligonucleotide
uauccuguuugu

SEQ ID NO: 123233 - RNA, 11 nt, Artificial Sequence
  Description of Artificial Sequence: Synthetic oligonucleotide
ccuguuuguuc

SEQ ID NO: 123234 - RNA, 10 nt, Artificial Sequence
  Description of Artificial Sequence: Synthetic oligonucleotide
cucuacagcc

SEQ ID NO: 123235 - RNA, 12 nt, Artificial Sequence
  Description of Artificial Sequence: Synthetic oligonucleotide
ucuuccauagcu

SEQ ID NO: 123236 - RNA, 12 nt, Artificial Sequence
  Description of Artificial Sequence: Synthetic oligonucleotide
auaaucuuccug

SEQ ID NO: 123237 - RNA, 12 nt, Artificial Sequence
  Description of Artificial Sequence: Synthetic oligonucleotide
uaaucuuccugu

SEQ ID NO: 123238 - RNA, 12 nt, Artificial Sequence
  Description of Artificial Sequence: Synthetic oligonucleotide
cuucaugacuug

SEQ ID NO: 123239 - RNA, 12 nt, Artificial Sequence
  Description of Artificial Sequence: Synthetic oligonucleotide
aagagggagaga

SEQ ID NO: 123240 - RNA, 12 nt, Artificial Sequence
  Description of Artificial Sequence: Synthetic oligonucleotide
cgucuccuacca

SEQ ID NO: 123241 - RNA, 12 nt, Artificial Sequence
  Description of Artificial Sequence: Synthetic oligonucleotide
gaucaaucggcc

SEQ ID NO: 123242 - RNA, 12 nt, Artificial Sequence
  Description of Artificial Sequence: Synthetic oligonucleotide
ggacgaacaucc

SEQ ID NO: 123243 - RNA, 11 nt, Artificial Sequence
  Description of Artificial Sequence: Synthetic oligonucleotide
agggucggaac

SEQ ID NO: 123244 - RNA, 10 nt, Artificial Sequence
  Description of Artificial Sequence: Synthetic oligonucleotide
ucggaaccca

SEQ ID NO: 123245 - RNA, 11 nt, Artificial Sequence
  Description of Artificial Sequence: Synthetic oligonucleotide
acccaagcuua

SEQ ID NO: 123246 - RNA, 14 nt, Artificial Sequence
  Description of Artificial Sequence: Synthetic oligonucleotide
gaacuuuaagcaac

SEQ ID NO: 123247 - RNA, 11 nt, Artificial Sequence
  Description of Artificial Sequence: Synthetic oligonucleotide
acuauucagug

SEQ ID NO: 123248 - RNA, 11 nt, Artificial Sequence
  Description of Artificial Sequence: Synthetic oligonucleotide
cuauucagugg

SEQ ID NO: 123249 - RNA, 13 nt, Artificial Sequence
  Description of Artificial Sequence: Synthetic oligonucleotide
aaacacagauaac

SEQ ID NO: 123250 - RNA, 12 nt, Artificial Sequence
  Description of Artificial Sequence: Synthetic oligonucleotide
cuuaagaaaaga

SEQ ID NO: 123251 - RNA, 12 nt, Artificial Sequence
  Description of Artificial Sequence: Synthetic oligonucleotide
cugaaggagugu

SEQ ID NO: 123252 - RNA, 10 nt, Artificial Sequence
  Description of Artificial Sequence: Synthetic oligonucleotide
ucaccgcggg

SEQ ID NO: 123253 - RNA, 14 nt, Artificial Sequence
  Description of Artificial Sequence: Synthetic oligonucleotide
agcagaaauaagcg

SEQ ID NO: 123254 - RNA, 12 nt, Artificial Sequence
  Description of Artificial Sequence: Synthetic oligonucleotide
aagcgugccguu

SEQ ID NO: 123255 - RNA, 12 nt, Artificial Sequence
  Description of Artificial Sequence: Synthetic oligonucleotide
agaaacagucac

SEQ ID NO: 123256 - RNA, 12 nt, Artificial Sequence
  Description of Artificial Sequence: Synthetic oligonucleotide
agaggaagaagg

SEQ ID NO: 123257 - RNA, 14 nt, Artificial Sequence
  Description of Artificial Sequence: Synthetic oligonucleotide
uguauucaaaauau

SEQ ID NO: 123258 - RNA, 13 nt, Artificial Sequence
  Description of Artificial Sequence: Synthetic oligonucleotide
auuuuccucccuu

SEQ ID NO: 123259 - RNA, 13 nt, Artificial Sequence
  Description of Artificial Sequence: Synthetic oligonucleotide
caaagaaagauag

SEQ ID NO: 123260 - RNA, 12 nt, Artificial Sequence
  Description of Artificial Sequence: Synthetic oligonucleotide
aagaaagauaga

SEQ ID NO: 123261 - RNA, 13 nt, Artificial Sequence
  Description of Artificial Sequence: Synthetic oligonucleotide
gaaagcauuuguu

SEQ ID NO: 123262 - RNA, 13 nt, Artificial Sequence
  Description of Artificial Sequence: Synthetic oligonucleotide
ugaguuaaacgaa

SEQ ID NO: 123263 - RNA, 12 nt, Artificial Sequence
  Description of Artificial Sequence: Synthetic oligonucleotide
acugauacagaa

SEQ ID NO: 123264 - RNA, 12 nt, Artificial Sequence
  Description of Artificial Sequence: Synthetic oligonucleotide
auauuauauaua

SEQ ID NO: 123265 - RNA, 12 nt, Artificial Sequence
  Description of Artificial Sequence: Synthetic oligonucleotide
auuauauauaua

SEQ ID NO: 123266 - RNA, 12 nt, Artificial Sequence
  Description of Artificial Sequence: Synthetic oligonucleotide
ucacuggaugua

SEQ ID NO: 123267 - RNA, 12 nt, Artificial Sequence
  Description of Artificial Sequence: Synthetic oligonucleotide
cagggaagagga

SEQ ID NO: 123268 - RNA, 15 nt, Artificial Sequence
  Description of Artificial Sequence: Synthetic oligonucleotide
augaucuuuuuuuug

SEQ ID NO: 123269 - RNA, 11 nt, Artificial Sequence
  Description of Artificial Sequence: Synthetic oligonucleotide
aguucacggcc

SEQ ID NO: 123270 - RNA, 13 nt, Artificial Sequence
  Description of Artificial Sequence: Synthetic oligonucleotide
caccaucacacca

SEQ ID NO: 123271 - RNA, 11 nt, Artificial Sequence
  Description of Artificial Sequence: Synthetic oligonucleotide
ccugcggguuu

SEQ ID NO: 123272 - RNA, 10 nt, Artificial Sequence
  Description of Artificial Sequence: Synthetic oligonucleotide
auccaguuug

SEQ ID NO: 123273 - RNA, 13 nt, Artificial Sequence
  Description of Artificial Sequence: Synthetic oligonucleotide
guuaaggacuucu

SEQ ID NO: 123274 - RNA, 13 nt, Artificial Sequence
  Description of Artificial Sequence: Synthetic oligonucleotide
cagugggacagag

SEQ ID NO: 123275 - RNA, 14 nt, Artificial Sequence
  Description of Artificial Sequence: Synthetic oligonucleotide
aauuuguuauugug

SEQ ID NO: 123276 - RNA, 13 nt, Artificial Sequence
  Description of Artificial Sequence: Synthetic oligonucleotide
uucaaaugcauuu

SEQ ID NO: 123277 - RNA, 10 nt, Artificial Sequence
  Description of Artificial Sequence: Synthetic oligonucleotide
caggaaagcc

SEQ ID NO: 123278 - RNA, 11 nt, Artificial Sequence
  Description of Artificial Sequence: Synthetic oligonucleotide
aggaaagcccu

SEQ ID NO: 123279 - RNA, 12 nt, Artificial Sequence
  Description of Artificial Sequence: Synthetic oligonucleotide
cccagcauggcc

SEQ ID NO: 123280 - RNA, 11 nt, Artificial Sequence
  Description of Artificial Sequence: Synthetic oligonucleotide
cuucucccuga

SEQ ID NO: 123281 - RNA, 12 nt, Artificial Sequence
  Description of Artificial Sequence: Synthetic oligonucleotide
gaagaagcccuu

SEQ ID NO: 123282 - RNA, 12 nt, Artificial Sequence
  Description of Artificial Sequence: Synthetic oligonucleotide
agaagcccuuca

SEQ ID NO: 123283 - RNA, 11 nt, Artificial Sequence
  Description of Artificial Sequence: Synthetic oligonucleotide
gcccuucagcg

SEQ ID NO: 123284 - RNA, 11 nt, Artificial Sequence
  Description of Artificial Sequence: Synthetic oligonucleotide
ccuucagcggc

SEQ ID NO: 123285 - RNA, 12 nt, Artificial Sequence
  Description of Artificial Sequence: Synthetic oligonucleotide
ucagcggccagu

SEQ ID NO: 123286 - RNA, 12 nt, Artificial Sequence
  Description of Artificial Sequence: Synthetic oligonucleotide
ugaaaagcuccg

SEQ ID NO: 123287 - RNA, 11 nt, Artificial Sequence
  Description of Artificial Sequence: Synthetic oligonucleotide
aaaagcuccgg

SEQ ID NO: 123288 - RNA, 13 nt, Artificial Sequence
  Description of Artificial Sequence: Synthetic oligonucleotide
agucaacagucug

SEQ ID NO: 123289 - RNA, 13 nt, Artificial Sequence
  Description of Artificial Sequence: Synthetic oligonucleotide
cagaguucaaaag

SEQ ID NO: 123290 - RNA, 13 nt, Artificial Sequence
  Description of Artificial Sequence: Synthetic oligonucleotide
agaguucaaaagc

SEQ ID NO: 123291 - RNA, 12 nt, Artificial Sequence
  Description of Artificial Sequence: Synthetic oligonucleotide
uucaaaagcccu

SEQ ID NO: 123292 - RNA, 12 nt, Artificial Sequence
  Description of Artificial Sequence: Synthetic oligonucleotide
ucaaaagcccuu

SEQ ID NO: 123293 - RNA, 12 nt, Artificial Sequence
  Description of Artificial Sequence: Synthetic oligonucleotide
aaaagcccuuca

SEQ ID NO: 123294 - RNA, 12 nt, Artificial Sequence
  Description of Artificial Sequence: Synthetic oligonucleotide
aaagcccuucag

SEQ ID NO: 123295 - RNA, 13 nt, Artificial Sequence
  Description of Artificial Sequence: Synthetic oligonucleotide
gugaagccgcucg

SEQ ID NO: 123296 - RNA, 12 nt, Artificial Sequence
  Description of Artificial Sequence: Synthetic oligonucleotide
cacgccagucaa

SEQ ID NO: 123297 - RNA, 13 nt, Artificial Sequence
  Description of Artificial Sequence: Synthetic oligonucleotide
uucuuggugcgug

SEQ ID NO: 123298 - RNA, 14 nt, Artificial Sequence
  Description of Artificial Sequence: Synthetic oligonucleotide
auuggauucaucag

SEQ ID NO: 123299 - RNA, 13 nt, Artificial Sequence
  Description of Artificial Sequence: Synthetic oligonucleotide
uggaauaccuaag

SEQ ID NO: 123300 - RNA, 12 nt, Artificial Sequence
  Description of Artificial Sequence: Synthetic oligonucleotide
auuugaggcuca

SEQ ID NO: 123301 - RNA, 11 nt, Artificial Sequence
  Description of Artificial Sequence: Synthetic oligonucleotide
ucuacaauugg

SEQ ID NO: 123302 - RNA, 12 nt, Artificial Sequence
  Description of Artificial Sequence: Synthetic oligonucleotide
uaguuaggagcc

SEQ ID NO: 123303 - RNA, 13 nt, Artificial Sequence
  Description of Artificial Sequence: Synthetic oligonucleotide
agucaauauccac

SEQ ID NO: 123304 - RNA, 13 nt, Artificial Sequence
  Description of Artificial Sequence: Synthetic oligonucleotide
auguucagucaca

SEQ ID NO: 123305 - RNA, 12 nt, Artificial Sequence
  Description of Artificial Sequence: Synthetic oligonucleotide
acacacacauac

SEQ ID NO: 123306 - RNA, 12 nt, Artificial Sequence
  Description of Artificial Sequence: Synthetic oligonucleotide
uuccuuuugcuu

SEQ ID NO: 123307 - RNA, 16 nt, Artificial Sequence
  Description of Artificial Sequence: Synthetic oligonucleotide
uuuuaaaguaauuuuu

SEQ ID NO: 123308 - RNA, 13 nt, Artificial Sequence
  Description of Artificial Sequence: Synthetic oligonucleotide
caacagucaaugg

SEQ ID NO: 123309 - RNA, 13 nt, Artificial Sequence
  Description of Artificial Sequence: Synthetic oligonucleotide
ucgacaaaccaau

SEQ ID NO: 123310 - RNA, 12 nt, Artificial Sequence
  Description of Artificial Sequence: Synthetic oligonucleotide
acugcuaccacu

SEQ ID NO: 123311 - RNA, 13 nt, Artificial Sequence
  Description of Artificial Sequence: Synthetic oligonucleotide
gcaagcggucuua

SEQ ID NO: 123312 - RNA, 13 nt, Artificial Sequence
  Description of Artificial Sequence: Synthetic oligonucleotide
ggucuuaccggcu

SEQ ID NO: 123313 - RNA, 11 nt, Artificial Sequence
  Description of Artificial Sequence: Synthetic oligonucleotide
gauggguuacc

SEQ ID NO: 123314 - RNA, 11 nt, Artificial Sequence
  Description of Artificial Sequence: Synthetic oligonucleotide
guuaccugcga

SEQ ID NO: 123315 - RNA, 12 nt, Artificial Sequence
  Description of Artificial Sequence: Synthetic oligonucleotide
aaucuugcugag

SEQ ID NO: 123316 - RNA, 13 nt, Artificial Sequence
  Description of Artificial Sequence: Synthetic oligonucleotide
agcauaaaacagu

SEQ ID NO: 123317 - RNA, 12 nt, Artificial Sequence
  Description of Artificial Sequence: Synthetic oligonucleotide
guccuuuauccu

SEQ ID NO: 123318 - RNA, 12 nt, Artificial Sequence
  Description of Artificial Sequence: Synthetic oligonucleotide
caacgcaaguug

SEQ ID NO: 123319 - RNA, 13 nt, Artificial Sequence
  Description of Artificial Sequence: Synthetic oligonucleotide
aaacugaaaccau

SEQ ID NO: 123320 - RNA, 14 nt, Artificial Sequence
  Description of Artificial Sequence: Synthetic oligonucleotide
acuuuguuaaauau

SEQ ID NO: 123321 - RNA, 14 nt, Artificial Sequence
  Description of Artificial Sequence: Synthetic oligonucleotide
guauauuaaaaguu

SEQ ID NO: 123322 - RNA, 13 nt, Artificial Sequence
  Description of Artificial Sequence: Synthetic oligonucleotide
guuuugacuuaac

SEQ ID NO: 123323 - RNA, 13 nt, Artificial Sequence
  Description of Artificial Sequence: Synthetic oligonucleotide
gcaaacucagcac

SEQ ID NO: 123324 - RNA, 11 nt, Artificial Sequence
  Description of Artificial Sequence: Synthetic oligonucleotide
ugcugaccuca

SEQ ID NO: 123325 - RNA, 14 nt, Artificial Sequence
  Description of Artificial Sequence: Synthetic oligonucleotide
uuuauucagaucgc

SEQ ID NO: 123326 - RNA, 13 nt, Artificial Sequence
  Description of Artificial Sequence: Synthetic oligonucleotide
aggguucugggau

SEQ ID NO: 123327 - RNA, 15 nt, Artificial Sequence
  Description of Artificial Sequence: Synthetic oligonucleotide
auauuggaaauuaug

SEQ ID NO: 123328 - RNA, 13 nt, Artificial Sequence
  Description of Artificial Sequence: Synthetic oligonucleotide
auggaagcacuag

SEQ ID NO: 123329 - RNA, 13 nt, Artificial Sequence
  Description of Artificial Sequence: Synthetic oligonucleotide
guuuuuaugugga

SEQ ID NO: 123330 - RNA, 12 nt, Artificial Sequence
  Description of Artificial Sequence: Synthetic oligonucleotide
ggaauugguaga

SEQ ID NO: 123331 - RNA, 13 nt, Artificial Sequence
  Description of Artificial Sequence: Synthetic oligonucleotide
uuagacuuggaga

SEQ ID NO: 123332 - RNA, 13 nt, Artificial Sequence
  Description of Artificial Sequence: Synthetic oligonucleotide
uuacaguauucca

SEQ ID NO: 123333 - RNA, 15 nt, Artificial Sequence
  Description of Artificial Sequence: Synthetic oligonucleotide
ccacugaugaauuaa

SEQ ID NO: 123334 - RNA, 12 nt, Artificial Sequence
  Description of Artificial Sequence: Synthetic oligonucleotide
ccacaucaucac

SEQ ID NO: 123335 - RNA, 13 nt, Artificial Sequence
  Description of Artificial Sequence: Synthetic oligonucleotide
cucaccaaacaga

SEQ ID NO: 123336 - RNA, 12 nt, Artificial Sequence
  Description of Artificial Sequence: Synthetic oligonucleotide
ggaacaugaugg

SEQ ID NO: 123337 - RNA, 12 nt, Artificial Sequence
  Description of Artificial Sequence: Synthetic oligonucleotide
cauguagacugc

SEQ ID NO: 123338 - RNA, 13 nt, Artificial Sequence
  Description of Artificial Sequence: Synthetic oligonucleotide
ggaucuauuuaug

SEQ ID NO: 123339 - RNA, 12 nt, Artificial Sequence
  Description of Artificial Sequence: Synthetic oligonucleotide
gcacuauuauca

SEQ ID NO: 123340 - RNA, 11 nt, Artificial Sequence
  Description of Artificial Sequence: Synthetic oligonucleotide
aucaguucugc

SEQ ID NO: 123341 - RNA, 13 nt, Artificial Sequence
  Description of Artificial Sequence: Synthetic oligonucleotide
agauuaaaccuac

SEQ ID NO: 123342 - RNA, 13 nt, Artificial Sequence
  Description of Artificial Sequence: Synthetic oligonucleotide
auaaaauccuucu

SEQ ID NO: 123343 - RNA, 12 nt, Artificial Sequence
  Description of Artificial Sequence: Synthetic oligonucleotide
aaugcuguagac

SEQ ID NO: 123344 - RNA, 13 nt, Artificial Sequence
  Description of Artificial Sequence: Synthetic oligonucleotide
uugauaggaauag

SEQ ID NO: 123345 - RNA, 11 nt, Artificial Sequence
  Description of Artificial Sequence: Synthetic oligonucleotide
aauggcccuga

SEQ ID NO: 123346 - RNA, 11 nt, Artificial Sequence
  Description of Artificial Sequence: Synthetic oligonucleotide
uuccucaagca

SEQ ID NO: 123347 - RNA, 10 nt, Artificial Sequence
  Description of Artificial Sequence: Synthetic oligonucleotide
guucagccca

SEQ ID NO: 123348 - RNA, 11 nt, Artificial Sequence
  Description of Artificial Sequence: Synthetic oligonucleotide
gcugcugaacc

SEQ ID NO: 123349 - RNA, 12 nt, Artificial Sequence
  Description of Artificial Sequence: Synthetic oligonucleotide
aaguucucuuca

SEQ ID NO: 123350 - RNA, 11 nt, Artificial Sequence
  Description of Artificial Sequence: Synthetic oligonucleotide
ccagccuagag

SEQ ID NO: 123351 - RNA, 13 nt, Artificial Sequence
  Description of Artificial Sequence: Synthetic oligonucleotide
cucugugaagugu

SEQ ID NO: 123352 - RNA, 14 nt, Artificial Sequence
  Description of Artificial Sequence: Synthetic oligonucleotide
ugagaaaauuucaa

SEQ ID NO: 123353 - RNA, 11 nt, Artificial Sequence
  Description of Artificial Sequence: Synthetic oligonucleotide
aauccuccuga

SEQ ID NO: 123354 - RNA, 12 nt, Artificial Sequence
  Description of Artificial Sequence: Synthetic oligonucleotide
gugacaucauau

SEQ ID NO: 123355 - RNA, 13 nt, Artificial Sequence
  Description of Artificial Sequence: Synthetic oligonucleotide
aaucuucaucaua

SEQ ID NO: 123356 - RNA, 13 nt, Artificial Sequence
  Description of Artificial Sequence: Synthetic oligonucleotide
gacuagcuauuaa

SEQ ID NO: 123357 - RNA, 14 nt, Artificial Sequence
  Description of Artificial Sequence: Synthetic oligonucleotide
ucucuacuaaaaau

SEQ ID NO: 123358 - RNA, 12 nt, Artificial Sequence
  Description of Artificial Sequence: Synthetic oligonucleotide
ucuaucucgccu

SEQ ID NO: 123359 - RNA, 13 nt, Artificial Sequence
  Description of Artificial Sequence: Synthetic oligonucleotide
cuucgguccaguu

SEQ ID NO: 123360 - RNA, 11 nt, Artificial Sequence
  Description of Artificial Sequence: Synthetic oligonucleotide
gauguagccgc

SEQ ID NO: 123361 - RNA, 12 nt, Artificial Sequence
  Description of Artificial Sequence: Synthetic oligonucleotide
ugaggagacuug

SEQ ID NO: 123362 - RNA, 12 nt, Artificial Sequence
  Description of Artificial Sequence: Synthetic oligonucleotide
gaguagugagga

SEQ ID NO: 123363 - RNA, 14 nt, Artificial Sequence
  Description of Artificial Sequence: Synthetic oligonucleotide
cagaugaguacaaa

SEQ ID NO: 123364 - RNA, 13 nt, Artificial Sequence
  Description of Artificial Sequence: Synthetic oligonucleotide
guuguuaaugggc

SEQ ID NO: 123365 - RNA, 13 nt, Artificial Sequence
  Description of Artificial Sequence: Synthetic oligonucleotide
uuuuuaauuuauu

SEQ ID NO: 123366 - RNA, 12 nt, Artificial Sequence
  Description of Artificial Sequence: Synthetic oligonucleotide
uauuuaaauaug

SEQ ID NO: 123367 - RNA, 13 nt, Artificial Sequence
  Description of Artificial Sequence: Synthetic oligonucleotide
uauccuuuguuuc

SEQ ID NO: 123368 - RNA, 14 nt, Artificial Sequence
  Description of Artificial Sequence: Synthetic oligonucleotide
cgucuaaguguuug

SEQ ID NO: 123369 - RNA, 12 nt, Artificial Sequence
  Description of Artificial Sequence: Synthetic oligonucleotide
accugugacaaa

SEQ ID NO: 123370 - RNA, 13 nt, Artificial Sequence
  Description of Artificial Sequence: Synthetic oligonucleotide
ccaggcugaauua

SEQ ID NO: 123371 - RNA, 14 nt, Artificial Sequence
  Description of Artificial Sequence: Synthetic oligonucleotide
gucauucuuacaau

SEQ ID NO: 123372 - RNA, 15 nt, Artificial Sequence
  Description of Artificial Sequence: Synthetic oligonucleotide
ucauucuuacaauug

SEQ ID NO: 123373 - RNA, 12 nt, Artificial Sequence
  Description of Artificial Sequence: Synthetic oligonucleotide
cagagaguguac

SEQ ID NO: 123374 - RNA, 12 nt, Artificial Sequence
  Description of Artificial Sequence: Synthetic oligonucleotide
agaacucagcag

SEQ ID NO: 123375 - RNA, 13 nt, Artificial Sequence
  Description of Artificial Sequence: Synthetic oligonucleotide
uuuauuuucagua

SEQ ID NO: 123376 - RNA, 12 nt, Artificial Sequence
  Description of Artificial Sequence: Synthetic oligonucleotide
ucuuaaauggaa

SEQ ID NO: 123377 - RNA, 13 nt, Artificial Sequence
  Description of Artificial Sequence: Synthetic oligonucleotide
ugccuaaaauugu

SEQ ID NO: 123378 - RNA, 12 nt, Artificial Sequence
  Description of Artificial Sequence: Synthetic oligonucleotide
agacugugagcu

SEQ ID NO: 123379 - RNA, 14 nt, Artificial Sequence
  Description of Artificial Sequence: Synthetic oligonucleotide
ugcuuuuuauuaau

SEQ ID NO: 123380 - RNA, 13 nt, Artificial Sequence
  Description of Artificial Sequence: Synthetic oligonucleotide
cucuucuuacauu

SEQ ID NO: 123381 - RNA, 15 nt, Artificial Sequence
  Description of Artificial Sequence: Synthetic oligonucleotide
cauuuguaaaaaugu

SEQ ID NO: 123382 - RNA, 15 nt, Artificial Sequence
  Description of Artificial Sequence: Synthetic oligonucleotide
aucuuaauucauauu

SEQ ID NO: 123383 - RNA, 13 nt, Artificial Sequence
  Description of Artificial Sequence: Synthetic oligonucleotide
gaacuaaucauga

SEQ ID NO: 123384 - RNA, 12 nt, Artificial Sequence
  Description of Artificial Sequence: Synthetic oligonucleotide
ucugcucuuggg

SEQ ID NO: 123385 - RNA, 13 nt, Artificial Sequence
  Description of Artificial Sequence: Synthetic oligonucleotide
caguagcuuugag

SEQ ID NO: 123386 - RNA, 14 nt, Artificial Sequence
  Description of Artificial Sequence: Synthetic oligonucleotide
cacguaauauuuca

SEQ ID NO: 123387 - RNA, 13 nt, Artificial Sequence
  Description of Artificial Sequence: Synthetic oligonucleotide
uauucucuucacu

SEQ ID NO: 123388 - RNA, 14 nt, Artificial Sequence
  Description of Artificial Sequence: Synthetic oligonucleotide
cuaaugcuaagaaa

SEQ ID NO: 123389 - RNA, 12 nt, Artificial Sequence
  Description of Artificial Sequence: Synthetic oligonucleotide
gcugaaaaucaa

SEQ ID NO: 123390 - RNA, 14 nt, Artificial Sequence
  Description of Artificial Sequence: Synthetic oligonucleotide
aauaugauuacuuu

SEQ ID NO: 123391 - RNA, 14 nt, Artificial Sequence
  Description of Artificial Sequence: Synthetic oligonucleotide
cauuuuguucuaca

SEQ ID NO: 123392 - RNA, 12 nt, Artificial Sequence
  Description of Artificial Sequence: Synthetic oligonucleotide
cccgggacucuc

SEQ ID NO: 123393 - RNA, 14 nt, Artificial Sequence
  Description of Artificial Sequence: Synthetic oligonucleotide
ccuuuaaaguaaag

SEQ ID NO: 123394 - RNA, 13 nt, Artificial Sequence
  Description of Artificial Sequence: Synthetic oligonucleotide
ucuggaagccugg

SEQ ID NO: 123395 - RNA, 14 nt, Artificial Sequence
  Description of Artificial Sequence: Synthetic oligonucleotide
aaaacaaaagagag

SEQ ID NO: 123396 - RNA, 13 nt, Artificial Sequence
  Description of Artificial Sequence: Synthetic oligonucleotide
aucaguuaugccg

SEQ ID NO: 123397 - RNA, 13 nt, Artificial Sequence
  Description of Artificial Sequence: Synthetic oligonucleotide
uaaaagaagucca

SEQ ID NO: 123398 - RNA, 11 nt, Artificial Sequence
  Description of Artificial Sequence: Synthetic oligonucleotide
aggugagguua

SEQ ID NO: 123399 - RNA, 11 nt, Artificial Sequence
  Description of Artificial Sequence: Synthetic oligonucleotide
gggaagaggac

SEQ ID NO: 123400 - RNA, 13 nt, Artificial Sequence
  Description of Artificial Sequence: Synthetic oligonucleotide
aagcaaguauugu

SEQ ID NO: 123401 - RNA, 12 nt, Artificial Sequence
  Description of Artificial Sequence: Synthetic oligonucleotide
auuguagcacuc

SEQ ID NO: 123402 - RNA, 14 nt, Artificial Sequence
  Description of Artificial Sequence: Synthetic oligonucleotide
acaaaaccacaaau

SEQ ID NO: 123403 - RNA, 12 nt, Artificial Sequence
  Description of Artificial Sequence: Synthetic oligonucleotide
uaagcccauaca

SEQ ID NO: 123404 - RNA, 11 nt, Artificial Sequence
  Description of Artificial Sequence: Synthetic oligonucleotide
agcccauacag

SEQ ID NO: 123405 - RNA, 12 nt, Artificial Sequence
  Description of Artificial Sequence: Synthetic oligonucleotide
cagaaaccuucc

SEQ ID NO: 123406 - RNA, 10 nt, Artificial Sequence
  Description of Artificial Sequence: Synthetic oligonucleotide
guauaccuac

SEQ ID NO: 123407 - RNA, 13 nt, Artificial Sequence
  Description of Artificial Sequence: Synthetic oligonucleotide
gccaguuuucgga

SEQ ID NO: 123408 - RNA, 9 nt, Artificial Sequence
  Description of Artificial Sequence: Synthetic oligonucleotide
ggaacaggg

SEQ ID NO: 123409 - RNA, 13 nt, Artificial Sequence
  Description of Artificial Sequence: Synthetic oligonucleotide
uuaacuuuccagu

SEQ ID NO: 123410 - RNA, 14 nt, Artificial Sequence
  Description of Artificial Sequence: Synthetic oligonucleotide
aaaguuugguuuug

SEQ ID NO: 123411 - RNA, 12 nt, Artificial Sequence
  Description of Artificial Sequence: Synthetic oligonucleotide
cuucccacugua

SEQ ID NO: 123412 - RNA, 13 nt, Artificial Sequence
  Description of Artificial Sequence: Synthetic oligonucleotide
ugauaccauauga

SEQ ID NO: 123413 - RNA, 11 nt, Artificial Sequence
  Description of Artificial Sequence: Synthetic oligonucleotide
aacaugggcug

SEQ ID NO: 123414 - RNA, 13 nt, Artificial Sequence
  Description of Artificial Sequence: Synthetic oligonucleotide
caacuuuuucaua

SEQ ID NO: 123415 - RNA, 12 nt, Artificial Sequence
  Description of Artificial Sequence: Synthetic oligonucleotide
caugaggccgga

SEQ ID NO: 123416 - RNA, 11 nt, Artificial Sequence
  Description of Artificial Sequence: Synthetic oligonucleotide
acugcauuugu

SEQ ID NO: 123417 - RNA, 13 nt, Artificial Sequence
  Description of Artificial Sequence: Synthetic oligonucleotide
aauguuuacuacc

SEQ ID NO: 123418 - RNA, 15 nt, Artificial Sequence
  Description of Artificial Sequence: Synthetic oligonucleotide
aauuuuuugaugaaa

SEQ ID NO: 123419 - RNA, 14 nt, Artificial Sequence
  Description of Artificial Sequence: Synthetic oligonucleotide
cagugugugaauuu

SEQ ID NO: 123420 - RNA, 13 nt, Artificial Sequence
  Description of Artificial Sequence: Synthetic oligonucleotide
gagcaauguaugu

SEQ ID NO: 123421 - RNA, 14 nt, Artificial Sequence
  Description of Artificial Sequence: Synthetic oligonucleotide
aaagcacauauaua

SEQ ID NO: 123422 - RNA, 14 nt, Artificial Sequence
  Description of Artificial Sequence: Synthetic oligonucleotide
guaauaguuucucc

SEQ ID NO: 123423 - RNA, 13 nt, Artificial Sequence
  Description of Artificial Sequence: Synthetic oligonucleotide
aguuucuccaaau

SEQ ID NO: 123424 - RNA, 13 nt, Artificial Sequence
  Description of Artificial Sequence: Synthetic oligonucleotide
uacuuccuagaaa

SEQ ID NO: 123425 - RNA, 13 nt, Artificial Sequence
  Description of Artificial Sequence: Synthetic oligonucleotide
uacaccauauaug

SEQ ID NO: 123426 - RNA, 14 nt, Artificial Sequence
  Description of Artificial Sequence: Synthetic oligonucleotide
auauaugaauggag

SEQ ID NO: 123427 - RNA, 13 nt, Artificial Sequence
  Description of Artificial Sequence: Synthetic oligonucleotide
acgagaagaagau

SEQ ID NO: 123428 - RNA, 13 nt, Artificial Sequence
  Description of Artificial Sequence: Synthetic oligonucleotide
ucauuuacaggga

SEQ ID NO: 123429 - RNA, 13 nt, Artificial Sequence
  Description of Artificial Sequence: Synthetic oligonucleotide
cauuuacagggac

SEQ ID NO: 123430 - RNA, 10 nt, Artificial Sequence
  Description of Artificial Sequence: Synthetic oligonucleotide
agggaccuga

SEQ ID NO: 123431 - RNA, 14 nt, Artificial Sequence
  Description of Artificial Sequence: Synthetic oligonucleotide
uguuugacugcauc

SEQ ID NO: 123432 - RNA, 13 nt, Artificial Sequence
  Description of Artificial Sequence: Synthetic oligonucleotide
uuugacugcaucg

SEQ ID NO: 123433 - RNA, 12 nt, Artificial Sequence
  Description of Artificial Sequence: Synthetic oligonucleotide
gaguucacaggg

SEQ ID NO: 123434 - RNA, 13 nt, Artificial Sequence
  Description of Artificial Sequence: Synthetic oligonucleotide
ggcaccucugucc

SEQ ID NO: 123435 - RNA, 15 nt, Artificial Sequence
  Description of Artificial Sequence: Synthetic oligonucleotide
gguuugucuuuuuaa

SEQ ID NO: 123436 - RNA, 14 nt, Artificial Sequence
  Description of Artificial Sequence: Synthetic oligonucleotide
uuugucuuuuuaag

SEQ ID NO: 123437 - RNA, 13 nt, Artificial Sequence
  Description of Artificial Sequence: Synthetic oligonucleotide
ccuaaagguuguc

SEQ ID NO: 123438 - RNA, 12 nt, Artificial Sequence
  Description of Artificial Sequence: Synthetic oligonucleotide
aagguugucgac

SEQ ID NO: 123439 - RNA, 13 nt, Artificial Sequence
  Description of Artificial Sequence: Synthetic oligonucleotide
accuggcaauugu

SEQ ID NO: 123440 - RNA, 12 nt, Artificial Sequence
  Description of Artificial Sequence: Synthetic oligonucleotide
aguggugcgagg

SEQ ID NO: 123441 - RNA, 13 nt, Artificial Sequence
  Description of Artificial Sequence: Synthetic oligonucleotide
agagacaugaaau

SEQ ID NO: 123442 - RNA, 13 nt, Artificial Sequence
  Description of Artificial Sequence: Synthetic oligonucleotide
auauauuucucca

SEQ ID NO: 123443 - RNA, 10 nt, Artificial Sequence
  Description of Artificial Sequence: Synthetic oligonucleotide
caugaaggcu

SEQ ID NO: 123444 - RNA, 11 nt, Artificial Sequence
  Description of Artificial Sequence: Synthetic oligonucleotide
gcuggaguggu

SEQ ID NO: 123445 - RNA, 11 nt, Artificial Sequence
  Description of Artificial Sequence: Synthetic oligonucleotide
aggaagagagg

SEQ ID NO: 123446 - RNA, 12 nt, Artificial Sequence
  Description of Artificial Sequence: Synthetic oligonucleotide
cuugcaucgggc

SEQ ID NO: 123447 - RNA, 13 nt, Artificial Sequence
  Description of Artificial Sequence: Synthetic oligonucleotide
auauccuacugug

SEQ ID NO: 123448 - RNA, 13 nt, Artificial Sequence
  Description of Artificial Sequence: Synthetic oligonucleotide
uccuacuguguaa

SEQ ID NO: 123449 - RNA, 12 nt, Artificial Sequence
  Description of Artificial Sequence: Synthetic oligonucleotide
ccuuguagugua

SEQ ID NO: 123450 - RNA, 13 nt, Artificial Sequence
  Description of Artificial Sequence: Synthetic oligonucleotide
ucuuuguugauug

SEQ ID NO: 123451 - RNA, 14 nt, Artificial Sequence
  Description of Artificial Sequence: Synthetic oligonucleotide
uuuguugauugaaa

SEQ ID NO: 123452 - RNA, 15 nt, Artificial Sequence
  Description of Artificial Sequence: Synthetic oligonucleotide
uucuuuuucuuccau

SEQ ID NO: 123453 - RNA, 13 nt, Artificial Sequence
  Description of Artificial Sequence: Synthetic oligonucleotide
aaucuuccuucua

SEQ ID NO: 123454 - RNA, 13 nt, Artificial Sequence
  Description of Artificial Sequence: Synthetic oligonucleotide
uugaaugcuucau

SEQ ID NO: 123455 - RNA, 13 nt, Artificial Sequence
  Description of Artificial Sequence: Synthetic oligonucleotide
ugaaugcuucaug

SEQ ID NO: 123456 - RNA, 13 nt, Artificial Sequence
  Description of Artificial Sequence: Synthetic oligonucleotide
aauucuacuuuga

SEQ ID NO: 123457 - RNA, 13 nt, Artificial Sequence
  Description of Artificial Sequence: Synthetic oligonucleotide
agcaacuacagac

SEQ ID NO: 123458 - RNA, 13 nt, Artificial Sequence
  Description of Artificial Sequence: Synthetic oligonucleotide
gaccaaggucaac

SEQ ID NO: 123459 - RNA, 13 nt, Artificial Sequence
  Description of Artificial Sequence: Synthetic oligonucleotide
cgacuaucucgac

SEQ ID NO: 123460 - RNA, 13 nt, Artificial Sequence
  Description of Artificial Sequence: Synthetic oligonucleotide
aaccuucccaaac

SEQ ID NO: 123461 - RNA, 14 nt, Artificial Sequence
  Description of Artificial Sequence: Synthetic oligonucleotide
ccaagcuuagaacu

SEQ ID NO: 123462 - RNA, 15 nt, Artificial Sequence
  Description of Artificial Sequence: Synthetic oligonucleotide
agcuuagaacuuuaa

SEQ ID NO: 123463 - RNA, 11 nt, Artificial Sequence
  Description of Artificial Sequence: Synthetic oligonucleotide
aagaccaccac

SEQ ID NO: 123464 - RNA, 14 nt, Artificial Sequence
  Description of Artificial Sequence: Synthetic oligonucleotide
gcgagaaauaaagu

SEQ ID NO: 123465 - RNA, 14 nt, Artificial Sequence
  Description of Artificial Sequence: Synthetic oligonucleotide
cgagaaauaaaguu

SEQ ID NO: 123466 - RNA, 12 nt, Artificial Sequence
  Description of Artificial Sequence: Synthetic oligonucleotide
aggaaaugaucc

SEQ ID NO: 123467 - RNA, 13 nt, Artificial Sequence
  Description of Artificial Sequence: Synthetic oligonucleotide
gaagaaaugaaac

SEQ ID NO: 123468 - RNA, 13 nt, Artificial Sequence
  Description of Artificial Sequence: Synthetic oligonucleotide
guuuccauccucc

SEQ ID NO: 123469 - RNA, 15 nt, Artificial Sequence
  Description of Artificial Sequence: Synthetic oligonucleotide
acugaaaaucuuuga

SEQ ID NO: 123470 - RNA, 11 nt, Artificial Sequence
  Description of Artificial Sequence: Synthetic oligonucleotide
ugccguucagg

SEQ ID NO: 123471 - RNA, 13 nt, Artificial Sequence
  Description of Artificial Sequence: Synthetic oligonucleotide
caggguccagaag

SEQ ID NO: 123472 - RNA, 13 nt, Artificial Sequence
  Description of Artificial Sequence: Synthetic oligonucleotide
ucaagacugcuug

SEQ ID NO: 123473 - RNA, 13 nt, Artificial Sequence
  Description of Artificial Sequence: Synthetic oligonucleotide
uccaugucuuugg

SEQ ID NO: 123474 - RNA, 11 nt, Artificial Sequence
  Description of Artificial Sequence: Synthetic oligonucleotide
gccugaaacac

SEQ ID NO: 123475 - RNA, 12 nt, Artificial Sequence
  Description of Artificial Sequence: Synthetic oligonucleotide
ucucuguaccuc

SEQ ID NO: 123476 - RNA, 12 nt, Artificial Sequence
  Description of Artificial Sequence: Synthetic oligonucleotide
agcaagacaaga

SEQ ID NO: 123477 - RNA, 13 nt, Artificial Sequence
  Description of Artificial Sequence: Synthetic oligonucleotide
gcaagacaagaaa

SEQ ID NO: 123478 - RNA, 12 nt, Artificial Sequence
  Description of Artificial Sequence: Synthetic oligonucleotide
uguacaagaucc

SEQ ID NO: 123479 - RNA, 12 nt, Artificial Sequence
  Description of Artificial Sequence: Synthetic oligonucleotide
cguacuugcaga

SEQ ID NO: 123480 - RNA, 13 nt, Artificial Sequence
  Description of Artificial Sequence: Synthetic oligonucleotide
cgaucgauacaga

SEQ ID NO: 123481 - RNA, 13 nt, Artificial Sequence
  Description of Artificial Sequence: Synthetic oligonucleotide
uauaaaaauaaau

SEQ ID NO: 123482 - RNA, 13 nt, Artificial Sequence
  Description of Artificial Sequence: Synthetic oligonucleotide
uaaaaauaaauau

SEQ ID NO: 123483 - RNA, 13 nt, Artificial Sequence
  Description of Artificial Sequence: Synthetic oligonucleotide
uuugacugcugug

SEQ ID NO: 123484 - RNA, 13 nt, Artificial Sequence
  Description of Artificial Sequence: Synthetic oligonucleotide
ggagaugagagac

SEQ ID NO: 123485 - RNA, 10 nt, Artificial Sequence
  Description of Artificial Sequence: Synthetic oligonucleotide
ucccacuugg

SEQ ID NO: 123486 - RNA, 10 nt, Artificial Sequence
  Description of Artificial Sequence: Synthetic oligonucleotide
guucacggcc

SEQ ID NO: 123487 - RNA, 12 nt, Artificial Sequence
  Description of Artificial Sequence: Synthetic oligonucleotide
accaucacacca

SEQ ID NO: 123488 - RNA, 10 nt, Artificial Sequence
  Description of Artificial Sequence: Synthetic oligonucleotide
cugcggguuu

SEQ ID NO: 123489 - RNA, 9 nt, Artificial Sequence
  Description of Artificial Sequence: Synthetic oligonucleotide
uccaguuug

SEQ ID NO: 123490 - RNA, 12 nt, Artificial Sequence
  Description of Artificial Sequence: Synthetic oligonucleotide
uuaaggacuucu

SEQ ID NO: 123491 - RNA, 12 nt, Artificial Sequence
  Description of Artificial Sequence: Synthetic oligonucleotide
agugggacagag

SEQ ID NO: 123492 - RNA, 13 nt, Artificial Sequence
  Description of Artificial Sequence: Synthetic oligonucleotide
auuuguuauugug

SEQ ID NO: 123493 - RNA, 12 nt, Artificial Sequence
  Description of Artificial Sequence: Synthetic oligonucleotide
ucaaaugcauuu

SEQ ID NO: 123494 - RNA, 9 nt, Artificial Sequence
  Description of Artificial Sequence: Synthetic oligonucleotide
aggaaagcc

SEQ ID NO: 123495 - RNA, 10 nt, Artificial Sequence
  Description of Artificial Sequence: Synthetic oligonucleotide
ggaaagcccu

SEQ ID NO: 123496 - RNA, 11 nt, Artificial Sequence
  Description of Artificial Sequence: Synthetic oligonucleotide
ccagcauggcc

SEQ ID NO: 123497 - RNA, 10 nt, Artificial Sequence
  Description of Artificial Sequence: Synthetic oligonucleotide
uucucccuga

SEQ ID NO: 123498 - RNA, 11 nt, Artificial Sequence
  Description of Artificial Sequence: Synthetic oligonucleotide
aagaagcccuu

SEQ ID NO: 123499 - RNA, 11 nt, Artificial Sequence
  Description of Artificial Sequence: Synthetic oligonucleotide
gaagcccuuca

SEQ ID NO: 123500 - RNA, 10 nt, Artificial Sequence
  Description of Artificial Sequence: Synthetic oligonucleotide
cccuucagcg

SEQ ID NO: 123501 - RNA, 10 nt, Artificial Sequence
  Description of Artificial Sequence: Synthetic oligonucleotide
cuucagcggc

SEQ ID NO: 123502 - RNA, 11 nt, Artificial Sequence
  Description of Artificial Sequence: Synthetic oligonucleotide
cagcggccagu

SEQ ID NO: 123503 - RNA, 11 nt, Artificial Sequence
  Description of Artificial Sequence: Synthetic oligonucleotide
gaaaagcuccg

SEQ ID NO: 123504 - RNA, 10 nt, Artificial Sequence
  Description of Artificial Sequence: Synthetic oligonucleotide
aaagcuccgg

SEQ ID NO: 123505 - RNA, 12 nt, Artificial Sequence
  Description of Artificial Sequence: Synthetic oligonucleotide
gucaacagucug

SEQ ID NO: 123506 - RNA, 12 nt, Artificial Sequence
  Description of Artificial Sequence: Synthetic oligonucleotide
agaguucaaaag

SEQ ID NO: 123507 - RNA, 12 nt, Artificial Sequence
  Description of Artificial Sequence: Synthetic oligonucleotide
gaguucaaaagc

SEQ ID NO: 123508 - RNA, 11 nt, Artificial Sequence
  Description of Artificial Sequence: Synthetic oligonucleotide
ucaaaagcccu

SEQ ID NO: 123509 - RNA, 11 nt, Artificial Sequence
  Description of Artificial Sequence: Synthetic oligonucleotide
caaaagcccuu

SEQ ID NO: 123510 - RNA, 11 nt, Artificial Sequence
  Description of Artificial Sequence: Synthetic oligonucleotide
aaagcccuuca

SEQ ID NO: 123511 - RNA, 11 nt, Artificial Sequence
  Description of Artificial Sequence: Synthetic oligonucleotide
aagcccuucag

SEQ ID NO: 123512 - RNA, 12 nt, Artificial Sequence
  Description of Artificial Sequence: Synthetic oligonucleotide
ugaagccgcucg

SEQ ID NO: 123513 - RNA, 11 nt, Artificial Sequence
  Description of Artificial Sequence: Synthetic oligonucleotide
acgccagucaa

SEQ ID NO: 123514 - RNA, 12 nt, Artificial Sequence
  Description of Artificial Sequence: Synthetic oligonucleotide
ucuuggugcgug

SEQ ID NO: 123515 - RNA, 13 nt, Artificial Sequence
  Description of Artificial Sequence: Synthetic oligonucleotide
uuggauucaucag

SEQ ID NO: 123516 - RNA, 12 nt, Artificial Sequence
  Description of Artificial Sequence: Synthetic oligonucleotide
ggaauaccuaag

SEQ ID NO: 123517 - RNA, 11 nt, Artificial Sequence
  Description of Artificial Sequence: Synthetic oligonucleotide
uuugaggcuca

SEQ ID NO: 123518 - RNA, 10 nt, Artificial Sequence
  Description of Artificial Sequence: Synthetic oligonucleotide
cuacaauugg

SEQ ID NO: 123519 - RNA, 11 nt, Artificial Sequence
  Description of Artificial Sequence: Synthetic oligonucleotide
aguuaggagcc

SEQ ID NO: 123520 - RNA, 12 nt, Artificial Sequence
  Description of Artificial Sequence: Synthetic oligonucleotide
gucaauauccac

SEQ ID NO: 123521 - RNA, 12 nt, Artificial Sequence
  Description of Artificial Sequence: Synthetic oligonucleotide
uguucagucaca

SEQ ID NO: 123522 - RNA, 11 nt, Artificial Sequence
  Description of Artificial Sequence: Synthetic oligonucleotide
cacacacauac

SEQ ID NO: 123523 - RNA, 11 nt, Artificial Sequence
  Description of Artificial Sequence: Synthetic oligonucleotide
uccuuuugcuu

SEQ ID NO: 123524 - RNA, 15 nt, Artificial Sequence
  Description of Artificial Sequence: Synthetic oligonucleotide
uuuaaaguaauuuuu

SEQ ID NO: 123525 - RNA, 12 nt, Artificial Sequence
  Description of Artificial Sequence: Synthetic oligonucleotide
aacagucaaugg

SEQ ID NO: 123526 - RNA, 12 nt, Artificial Sequence
  Description of Artificial Sequence: Synthetic oligonucleotide
cgacaaaccaau

SEQ ID NO: 123527 - RNA, 11 nt, Artificial Sequence
  Description of Artificial Sequence: Synthetic oligonucleotide
cugcuaccacu

SEQ ID NO: 123528 - RNA, 12 nt, Artificial Sequence
  Description of Artificial Sequence: Synthetic oligonucleotide
caagcggucuua

SEQ ID NO: 123529 - RNA, 12 nt, Artificial Sequence
  Description of Artificial Sequence: Synthetic oligonucleotide
gucuuaccggcu

SEQ ID NO: 123530 - RNA, 10 nt, Artificial Sequence
  Description of Artificial Sequence: Synthetic oligonucleotide
auggguuacc

SEQ ID NO: 123531 - RNA, 10 nt, Artificial Sequence
  Description of Artificial Sequence: Synthetic oligonucleotide
uuaccugcga

SEQ ID NO: 123532 - RNA, 11 nt, Artificial Sequence
  Description of Artificial Sequence: Synthetic oligonucleotide
aucuugcugag

SEQ ID NO: 123533 - RNA, 12 nt, Artificial Sequence
  Description of Artificial Sequence: Synthetic oligonucleotide
gcauaaaacagu

SEQ ID NO: 123534 - RNA, 11 nt, Artificial Sequence
  Description of Artificial Sequence: Synthetic oligonucleotide
uccuuuauccu

SEQ ID NO: 123535 - RNA, 11 nt, Artificial Sequence
  Description of Artificial Sequence: Synthetic oligonucleotide
aacgcaaguug

SEQ ID NO: 123536 - RNA, 12 nt, Artificial Sequence
  Description of Artificial Sequence: Synthetic oligonucleotide
aacugaaaccau

SEQ ID NO: 123537 - RNA, 13 nt, Artificial Sequence
  Description of Artificial Sequence: Synthetic oligonucleotide
cuuuguuaaauau

SEQ ID NO: 123538 - RNA, 13 nt, Artificial Sequence
  Description of Artificial Sequence: Synthetic oligonucleotide
uauauuaaaaguu

SEQ ID NO: 123539 - RNA, 12 nt, Artificial Sequence
  Description of Artificial Sequence: Synthetic oligonucleotide
uuuugacuuaac

SEQ ID NO: 123540 - RNA, 12 nt, Artificial Sequence
  Description of Artificial Sequence: Synthetic oligonucleotide
caaacucagcac

SEQ ID NO: 123541 - RNA, 10 nt, Artificial Sequence
  Description of Artificial Sequence: Synthetic oligonucleotide
gcugaccuca

SEQ ID NO: 123542 - RNA, 13 nt, Artificial Sequence
  Description of Artificial Sequence: Synthetic oligonucleotide
uuauucagaucgc

SEQ ID NO: 123543 - RNA, 12 nt, Artificial Sequence
  Description of Artificial Sequence: Synthetic oligonucleotide
ggguucugggau

SEQ ID NO: 123544 - RNA, 14 nt, Artificial Sequence
  Description of Artificial Sequence: Synthetic oligonucleotide
uauuggaaauuaug

SEQ ID NO: 123545 - RNA, 12 nt, Artificial Sequence
  Description of Artificial Sequence: Synthetic oligonucleotide
uggaagcacuag

SEQ ID NO: 123546 - RNA, 12 nt, Artificial Sequence
  Description of Artificial Sequence: Synthetic oligonucleotide
uuuuuaugugga

SEQ ID NO: 123547 - RNA, 11 nt, Artificial Sequence
  Description of Artificial Sequence: Synthetic oligonucleotide
gaauugguaga

SEQ ID NO: 123548 - RNA, 12 nt, Artificial Sequence
  Description of Artificial Sequence: Synthetic oligonucleotide
uagacuuggaga

SEQ ID NO: 123549 - RNA, 12 nt, Artificial Sequence
  Description of Artificial Sequence: Synthetic oligonucleotide
uacaguauucca

SEQ ID NO: 123550 - RNA, 14 nt, Artificial Sequence
  Description of Artificial Sequence: Synthetic oligonucleotide
cacugaugaauuaa

SEQ ID NO: 123551 - RNA, 11 nt, Artificial Sequence
  Description of Artificial Sequence: Synthetic oligonucleotide
cacaucaucac

SEQ ID NO: 123552 - RNA, 12 nt, Artificial Sequence
  Description of Artificial Sequence: Synthetic oligonucleotide
ucaccaaacaga

SEQ ID NO: 123553 - RNA, 11 nt, Artificial Sequence
  Description of Artificial Sequence: Synthetic oligonucleotide
gaacaugaugg

SEQ ID NO: 123554 - RNA, 11 nt, Artificial Sequence
  Description of Artificial Sequence: Synthetic oligonucleotide
auguagacugc

SEQ ID NO: 123555 - RNA, 12 nt, Artificial Sequence
  Description of Artificial Sequence: Synthetic oligonucleotide
gaucuauuuaug

SEQ ID NO: 123556 - RNA, 11 nt, Artificial Sequence
  Description of Artificial Sequence: Synthetic oligonucleotide
cacuauuauca

SEQ ID NO: 123557 - RNA, 10 nt, Artificial Sequence
  Description of Artificial Sequence: Synthetic oligonucleotide
ucaguucugc

SEQ ID NO: 123558 - RNA, 12 nt, Artificial Sequence
  Description of Artificial Sequence: Synthetic oligonucleotide
gauuaaaccuac

SEQ ID NO: 123559 - RNA, 12 nt, Artificial Sequence
  Description of Artificial Sequence: Synthetic oligonucleotide
uaaaauccuucu

SEQ ID NO: 123560 - RNA, 11 nt, Artificial Sequence
  Description of Artificial Sequence: Synthetic oligonucleotide
augcuguagac

SEQ ID NO: 123561 - RNA, 12 nt, Artificial Sequence
  Description of Artificial Sequence: Synthetic oligonucleotide
ugauaggaauag

SEQ ID NO: 123562 - RNA, 10 nt, Artificial Sequence
  Description of Artificial Sequence: Synthetic oligonucleotide
auggcccuga

SEQ ID NO: 123563 - RNA, 10 nt, Artificial Sequence
  Description of Artificial Sequence: Synthetic oligonucleotide
uccucaagca

SEQ ID NO: 123564 - RNA, 9 nt, Artificial Sequence
  Description of Artificial Sequence: Synthetic oligonucleotide
uucagccca

SEQ ID NO: 123565 - RNA, 10 nt, Artificial Sequence
  Description of Artificial Sequence: Synthetic oligonucleotide
cugcugaacc

SEQ ID NO: 123566 - RNA, 11 nt, Artificial Sequence
  Description of Artificial Sequence: Synthetic oligonucleotide
aguucucuuca

SEQ ID NO: 123567 - RNA, 10 nt, Artificial Sequence
  Description of Artificial Sequence: Synthetic oligonucleotide
cagccuagag

SEQ ID NO: 123568 - RNA, 12 nt, Artificial Sequence
  Description of Artificial Sequence: Synthetic oligonucleotide
ucugugaagugu

SEQ ID NO: 123569 - RNA, 13 nt, Artificial Sequence
  Description of Artificial Sequence: Synthetic oligonucleotide
gagaaaauuucaa

SEQ ID NO: 123570 - RNA, 10 nt, Artificial Sequence
  Description of Artificial Sequence: Synthetic oligonucleotide
auccuccuga

SEQ ID NO: 123571 - RNA, 11 nt, Artificial Sequence
  Description of Artificial Sequence: Synthetic oligonucleotide
ugacaucauau

SEQ ID NO: 123572 - RNA, 12 nt, Artificial Sequence
  Description of Artificial Sequence: Synthetic oligonucleotide
aucuucaucaua

SEQ ID NO: 123573 - RNA, 12 nt, Artificial Sequence
  Description of Artificial Sequence: Synthetic oligonucleotide
acuagcuauuaa

SEQ ID NO: 123574 - RNA, 13 nt, Artificial Sequence
  Description of Artificial Sequence: Synthetic oligonucleotide
cucuacuaaaaau

SEQ ID NO: 123575 - RNA, 11 nt, Artificial Sequence
  Description of Artificial Sequence: Synthetic oligonucleotide
cuaucucgccu

SEQ ID NO: 123576 - RNA, 12 nt, Artificial Sequence
  Description of Artificial Sequence: Synthetic oligonucleotide
uucgguccaguu

SEQ ID NO: 123577 - RNA, 10 nt, Artificial Sequence
  Description of Artificial Sequence: Synthetic oligonucleotide
auguagccgc

SEQ ID NO: 123578 - RNA, 11 nt, Artificial Sequence
  Description of Artificial Sequence: Synthetic oligonucleotide
gaggagacuug

SEQ ID NO: 123579 - RNA, 11 nt, Artificial Sequence
  Description of Artificial Sequence: Synthetic oligonucleotide
aguagugagga

SEQ ID NO: 123580 - RNA, 13 nt, Artificial Sequence
  Description of Artificial Sequence: Synthetic oligonucleotide
agaugaguacaaa

SEQ ID NO: 123581 - RNA, 12 nt, Artificial Sequence
  Description of Artificial Sequence: Synthetic oligonucleotide
uuguuaaugggc

SEQ ID NO: 123582 - RNA, 12 nt, Artificial Sequence
  Description of Artificial Sequence: Synthetic oligonucleotide
uuuuaauuuauu

SEQ ID NO: 123583 - RNA, 11 nt, Artificial Sequence
  Description of Artificial Sequence: Synthetic oligonucleotide
auuuaaauaug

SEQ ID NO: 123584 - RNA, 12 nt, Artificial Sequence
  Description of Artificial Sequence: Synthetic oligonucleotide
auccuuuguuuc

SEQ ID NO: 123585 - RNA, 13 nt, Artificial Sequence
  Description of Artificial Sequence: Synthetic oligonucleotide
gucuaaguguuug

SEQ ID NO: 123586 - RNA, 11 nt, Artificial Sequence
  Description of Artificial Sequence: Synthetic oligonucleotide
ccugugacaaa

SEQ ID NO: 123587 - RNA, 12 nt, Artificial Sequence
  Description of Artificial Sequence: Synthetic oligonucleotide
caggcugaauua

SEQ ID NO: 123588 - RNA, 13 nt, Artificial Sequence
  Description of Artificial Sequence: Synthetic oligonucleotide
ucauucuuacaau

SEQ ID NO: 123589 - RNA, 14 nt, Artificial Sequence
  Description of Artificial Sequence: Synthetic oligonucleotide
cauucuuacaauug

SEQ ID NO: 123590 - RNA, 11 nt, Artificial Sequence
  Description of Artificial Sequence: Synthetic oligonucleotide
agagaguguac

SEQ ID NO: 123591 - RNA, 11 nt, Artificial Sequence
  Description of Artificial Sequence: Synthetic oligonucleotide
gaacucagcag

SEQ ID NO: 123592 - RNA, 12 nt, Artificial Sequence
  Description of Artificial Sequence: Synthetic oligonucleotide
uuauuuucagua

SEQ ID NO: 123593 - RNA, 11 nt, Artificial Sequence
  Description of Artificial Sequence: Synthetic oligonucleotide
cuuaaauggaa

SEQ ID NO: 123594 - RNA, 12 nt, Artificial Sequence
  Description of Artificial Sequence: Synthetic oligonucleotide
gccuaaaauugu

SEQ ID NO: 123595 - RNA, 12 nt, Artificial Sequence
  Description of Artificial Sequence: Synthetic oligonucleotide
acuaacaucugg

SEQ ID NO: 123596 - RNA, 11 nt, Artificial Sequence
  Description of Artificial Sequence: Synthetic oligonucleotide
gacugugagcu

SEQ ID NO: 123597 - RNA, 13 nt, Artificial Sequence
  Description of Artificial Sequence: Synthetic oligonucleotide
gcuuuuuauuaau

SEQ ID NO: 123598 - RNA, 12 nt, Artificial Sequence
  Description of Artificial Sequence: Synthetic oligonucleotide
ucuucuuacauu

SEQ ID NO: 123599 - RNA, 14 nt, Artificial Sequence
  Description of Artificial Sequence: Synthetic oligonucleotide
auuuguaaaaaugu

SEQ ID NO: 123600 - RNA, 14 nt, Artificial Sequence
  Description of Artificial Sequence: Synthetic oligonucleotide
ucuuaauucauauu

SEQ ID NO: 123601 - RNA, 12 nt, Artificial Sequence
  Description of Artificial Sequence: Synthetic oligonucleotide
aacuaaucauga

SEQ ID NO: 123602 - RNA, 11 nt, Artificial Sequence
  Description of Artificial Sequence: Synthetic oligonucleotide
cugcucuuggg

SEQ ID NO: 123603 - RNA, 12 nt, Artificial Sequence
  Description of Artificial Sequence: Synthetic oligonucleotide
aguagcuuugag

SEQ ID NO: 123604 - RNA, 13 nt, Artificial Sequence
  Description of Artificial Sequence: Synthetic oligonucleotide
acguaauauuuca

SEQ ID NO: 123605 - RNA, 12 nt, Artificial Sequence
  Description of Artificial Sequence: Synthetic oligonucleotide
auucucuucacu

SEQ ID NO: 123606 - RNA, 13 nt, Artificial Sequence
  Description of Artificial Sequence: Synthetic oligonucleotide
uaaugcuaagaaa

SEQ ID NO: 123607 - RNA, 11 nt, Artificial Sequence
  Description of Artificial Sequence: Synthetic oligonucleotide
cugaaaaucaa

SEQ ID NO: 123608 - RNA, 13 nt, Artificial Sequence
  Description of Artificial Sequence: Synthetic oligonucleotide
auaugauuacuuu

SEQ ID NO: 123609 - RNA, 13 nt, Artificial Sequence
  Description of Artificial Sequence: Synthetic oligonucleotide
auuuuguucuaca

SEQ ID NO: 123610 - RNA, 11 nt, Artificial Sequence
  Description of Artificial Sequence: Synthetic oligonucleotide
ccgggacucuc

SEQ ID NO: 123611 - RNA, 13 nt, Artificial Sequence
  Description of Artificial Sequence: Synthetic oligonucleotide
cuuuaaaguaaag

SEQ ID NO: 123612 - RNA, 12 nt, Artificial Sequence
  Description of Artificial Sequence: Synthetic oligonucleotide
cuggaagccugg

SEQ ID NO: 123613 - RNA, 13 nt, Artificial Sequence
  Description of Artificial Sequence: Synthetic oligonucleotide
aaacaaaagagag

SEQ ID NO: 123614 - RNA, 12 nt, Artificial Sequence
  Description of Artificial Sequence: Synthetic oligonucleotide
ucaguuaugccg

SEQ ID NO: 123615 - RNA, 12 nt, Artificial Sequence
  Description of Artificial Sequence: Synthetic oligonucleotide
aaaagaagucca

SEQ ID NO: 123616 - RNA, 10 nt, Artificial Sequence
  Description of Artificial Sequence: Synthetic oligonucleotide
ggugagguua

SEQ ID NO: 123617 - RNA, 10 nt, Artificial Sequence
  Description of Artificial Sequence: Synthetic oligonucleotide
ggaagaggac

SEQ ID NO: 123618 - RNA, 12 nt, Artificial Sequence
  Description of Artificial Sequence: Synthetic oligonucleotide
agcaaguauugu

SEQ ID NO: 123619 - RNA, 11 nt, Artificial Sequence
  Description of Artificial Sequence: Synthetic oligonucleotide
uuguagcacuc

SEQ ID NO: 123620 - RNA, 13 nt, Artificial Sequence
  Description of Artificial Sequence: Synthetic oligonucleotide
caaaaccacaaau

SEQ ID NO: 123621 - RNA, 11 nt, Artificial Sequence
  Description of Artificial Sequence: Synthetic oligonucleotide
aagcccauaca

SEQ ID NO: 123622 - RNA, 10 nt, Artificial Sequence
  Description of Artificial Sequence: Synthetic oligonucleotide
gcccauacag

SEQ ID NO: 123623 - RNA, 11 nt, Artificial Sequence
  Description of Artificial Sequence: Synthetic oligonucleotide
agaaaccuucc

SEQ ID NO: 123624 - RNA, 9 nt, Artificial Sequence
  Description of Artificial Sequence: Synthetic oligonucleotide
uauaccuac

SEQ ID NO: 123625 - RNA, 12 nt, Artificial Sequence
  Description of Artificial Sequence: Synthetic oligonucleotide
ccaguuuucgga

SEQ ID NO: 123626 - RNA, 8 nt, Artificial Sequence
  Description of Artificial Sequence: Synthetic oligonucleotide
gaacaggg

SEQ ID NO: 123627 - RNA, 12 nt, Artificial Sequence
  Description of Artificial Sequence: Synthetic oligonucleotide
uaacuuuccagu

SEQ ID NO: 123628 - RNA, 13 nt, Artificial Sequence
  Description of Artificial Sequence: Synthetic oligonucleotide
aaguuugguuuug

SEQ ID NO: 123629 - RNA, 11 nt, Artificial Sequence
  Description of Artificial Sequence: Synthetic oligonucleotide
uucccacugua

SEQ ID NO: 123630 - RNA, 12 nt, Artificial Sequence
  Description of Artificial Sequence: Synthetic oligonucleotide
gauaccauauga

SEQ ID NO: 123631 - RNA, 10 nt, Artificial Sequence
  Description of Artificial Sequence: Synthetic oligonucleotide
acaugggcug

SEQ ID NO: 123632 - RNA, 12 nt, Artificial Sequence
  Description of Artificial Sequence: Synthetic oligonucleotide
aacuuuuucaua

SEQ ID NO: 123633 - RNA, 11 nt, Artificial Sequence
  Description of Artificial Sequence: Synthetic oligonucleotide
augaggccgga

SEQ ID NO: 123634 - RNA, 10 nt, Artificial Sequence
  Description of Artificial Sequence: Synthetic oligonucleotide
cugcauuugu

SEQ ID NO: 123635 - RNA, 12 nt, Artificial Sequence
  Description of Artificial Sequence: Synthetic oligonucleotide
auguuuacuacc

SEQ ID NO: 123636 - RNA, 14 nt, Artificial Sequence
  Description of Artificial Sequence: Synthetic oligonucleotide
auuuuuugaugaaa

SEQ ID NO: 123637 - RNA, 13 nt, Artificial Sequence
  Description of Artificial Sequence: Synthetic oligonucleotide
agugugugaauuu

SEQ ID NO: 123638 - RNA, 12 nt, Artificial Sequence
  Description of Artificial Sequence: Synthetic oligonucleotide
agcaauguaugu

SEQ ID NO: 123639 - RNA, 13 nt, Artificial Sequence
  Description of Artificial Sequence: Synthetic oligonucleotide
aagcacauauaua

SEQ ID NO: 123640 - RNA, 13 nt, Artificial Sequence
  Description of Artificial Sequence: Synthetic oligonucleotide
uaauaguuucucc

SEQ ID NO: 123641 - RNA, 12 nt, Artificial Sequence
  Description of Artificial Sequence: Synthetic oligonucleotide
guuucuccaaau

SEQ ID NO: 123642 - RNA, 12 nt, Artificial Sequence
  Description of Artificial Sequence: Synthetic oligonucleotide
acuuccuagaaa

SEQ ID NO: 123643 - RNA, 12 nt, Artificial Sequence
  Description of Artificial Sequence: Synthetic oligonucleotide
acaccauauaug

SEQ ID NO: 123644 - RNA, 13 nt, Artificial Sequence
  Description of Artificial Sequence: Synthetic oligonucleotide
uauaugaauggag

SEQ ID NO: 123645 - RNA, 12 nt, Artificial Sequence
  Description of Artificial Sequence: Synthetic oligonucleotide
cauuuacaggga

SEQ ID NO: 123646 - RNA, 12 nt, Artificial Sequence
  Description of Artificial Sequence: Synthetic oligonucleotide
auuuacagggac

SEQ ID NO: 123647 - RNA, 9 nt, Artificial Sequence
  Description of Artificial Sequence: Synthetic oligonucleotide
gggaccuga

SEQ ID NO: 123648 - RNA, 13 nt, Artificial Sequence
  Description of Artificial Sequence: Synthetic oligonucleotide
guuugacugcauc

SEQ ID NO: 123649 - RNA, 12 nt, Artificial Sequence
  Description of Artificial Sequence: Synthetic oligonucleotide
uugacugcaucg

SEQ ID NO: 123650 - RNA, 11 nt, Artificial Sequence
  Description of Artificial Sequence: Synthetic oligonucleotide
aguucacaggg

SEQ ID NO: 123651 - RNA, 12 nt, Artificial Sequence
  Description of Artificial Sequence: Synthetic oligonucleotide
gcaccucugucc

SEQ ID NO: 123652 - RNA, 14 nt, Artificial Sequence
  Description of Artificial Sequence: Synthetic oligonucleotide
guuugucuuuuuaa

SEQ ID NO: 123653 - RNA, 13 nt, Artificial Sequence
  Description of Artificial Sequence: Synthetic oligonucleotide
uugucuuuuuaag

SEQ ID NO: 123654 - RNA, 12 nt, Artificial Sequence
  Description of Artificial Sequence: Synthetic oligonucleotide
cuaaagguuguc

SEQ ID NO: 123655 - RNA, 11 nt, Artificial Sequence
  Description of Artificial Sequence: Synthetic oligonucleotide
agguugucgac

SEQ ID NO: 123656 - RNA, 12 nt, Artificial Sequence
  Description of Artificial Sequence: Synthetic oligonucleotide
ccuggcaauugu

SEQ ID NO: 123657 - RNA, 11 nt, Artificial Sequence
  Description of Artificial Sequence: Synthetic oligonucleotide
guggugcgagg

SEQ ID NO: 123658 - RNA, 12 nt, Artificial Sequence
  Description of Artificial Sequence: Synthetic oligonucleotide
gagacaugaaau

SEQ ID NO: 123659 - RNA, 12 nt, Artificial Sequence
  Description of Artificial Sequence: Synthetic oligonucleotide
uauauuucucca

SEQ ID NO: 123660 - RNA, 9 nt, Artificial Sequence
  Description of Artificial Sequence: Synthetic oligonucleotide
augaaggcu

SEQ ID NO: 123661 - RNA, 10 nt, Artificial Sequence
  Description of Artificial Sequence: Synthetic oligonucleotide
cuggaguggu

SEQ ID NO: 123662 - RNA, 10 nt, Artificial Sequence
  Description of Artificial Sequence: Synthetic oligonucleotide
ggaagagagg

SEQ ID NO: 123663 - RNA, 11 nt, Artificial Sequence
  Description of Artificial Sequence: Synthetic oligonucleotide
uugcaucgggc

SEQ ID NO: 123664 - RNA, 12 nt, Artificial Sequence
  Description of Artificial Sequence: Synthetic oligonucleotide
uauccuacugug

SEQ ID NO: 123665 - RNA, 12 nt, Artificial Sequence
  Description of Artificial Sequence: Synthetic oligonucleotide
ccuacuguguaa

SEQ ID NO: 123666 - RNA, 11 nt, Artificial Sequence
  Description of Artificial Sequence: Synthetic oligonucleotide
cuuguagugua

SEQ ID NO: 123667 - RNA, 12 nt, Artificial Sequence
  Description of Artificial Sequence: Synthetic oligonucleotide
cuuuguugauug

SEQ ID NO: 123668 - RNA, 13 nt, Artificial Sequence
  Description of Artificial Sequence: Synthetic oligonucleotide
uuguugauugaaa

SEQ ID NO: 123669 - RNA, 14 nt, Artificial Sequence
  Description of Artificial Sequence: Synthetic oligonucleotide
ucuuuuucuuccau

SEQ ID NO: 123670 - RNA, 12 nt, Artificial Sequence
  Description of Artificial Sequence: Synthetic oligonucleotide
aucuuccuucua

SEQ ID NO: 123671 - RNA, 12 nt, Artificial Sequence
  Description of Artificial Sequence: Synthetic oligonucleotide
ugaaugcuucau

SEQ ID NO: 123672 - RNA, 12 nt, Artificial Sequence
  Description of Artificial Sequence: Synthetic oligonucleotide
gaaugcuucaug

SEQ ID NO: 123673 - RNA, 12 nt, Artificial Sequence
  Description of Artificial Sequence: Synthetic oligonucleotide
auucuacuuuga

SEQ ID NO: 123674 - RNA, 12 nt, Artificial Sequence
  Description of Artificial Sequence: Synthetic oligonucleotide
gcaacuacagac

SEQ ID NO: 123675 - RNA, 12 nt, Artificial Sequence
  Description of Artificial Sequence: Synthetic oligonucleotide
accaaggucaac

SEQ ID NO: 123676 - RNA, 12 nt, Artificial Sequence
  Description of Artificial Sequence: Synthetic oligonucleotide
gacuaucucgac

SEQ ID NO: 123677 - RNA, 12 nt, Artificial Sequence
  Description of Artificial Sequence: Synthetic oligonucleotide
accuucccaaac

SEQ ID NO: 123678 - RNA, 13 nt, Artificial Sequence
  Description of Artificial Sequence: Synthetic oligonucleotide
caagcuuagaacu

SEQ ID NO: 123679 - RNA, 14 nt, Artificial Sequence
  Description of Artificial Sequence: Synthetic oligonucleotide
gcuuagaacuuuaa

SEQ ID NO: 123680 - RNA, 13 nt, Artificial Sequence
  Description of Artificial Sequence: Synthetic oligonucleotide
aacuuuaagcaac

SEQ ID NO: 123681 - RNA, 10 nt, Artificial Sequence
  Description of Artificial Sequence: Synthetic oligonucleotide
agaccaccac

SEQ ID NO: 123682 - RNA, 13 nt, Artificial Sequence
  Description of Artificial Sequence: Synthetic oligonucleotide
cgagaaauaaagu

SEQ ID NO: 123683 - RNA, 13 nt, Artificial Sequence
  Description of Artificial Sequence: Synthetic oligonucleotide
gagaaauaaaguu

SEQ ID NO: 123684 - RNA, 11 nt, Artificial Sequence
  Description of Artificial Sequence: Synthetic oligonucleotide
ggaaaugaucc

SEQ ID NO: 123685 - RNA, 12 nt, Artificial Sequence
  Description of Artificial Sequence: Synthetic oligonucleotide
aagaaaugaaac

SEQ ID NO: 123686 - RNA, 12 nt, Artificial Sequence
  Description of Artificial Sequence: Synthetic oligonucleotide
uuuccauccucc

SEQ ID NO: 123687 - RNA, 14 nt, Artificial Sequence
  Description of Artificial Sequence: Synthetic oligonucleotide
cugaaaaucuuuga

SEQ ID NO: 123688 - RNA, 10 nt, Artificial Sequence
  Description of Artificial Sequence: Synthetic oligonucleotide
gccguucagg

SEQ ID NO: 123689 - RNA, 12 nt, Artificial Sequence
  Description of Artificial Sequence: Synthetic oligonucleotide
aggguccagaag

SEQ ID NO: 123690 - RNA, 12 nt, Artificial Sequence
  Description of Artificial Sequence: Synthetic oligonucleotide
caagacugcuug

SEQ ID NO: 123691 - RNA, 12 nt, Artificial Sequence
  Description of Artificial Sequence: Synthetic oligonucleotide
ccaugucuuugg

SEQ ID NO: 123692 - RNA, 10 nt, Artificial Sequence
  Description of Artificial Sequence: Synthetic oligonucleotide
ccugaaacac

SEQ ID NO: 123693 - RNA, 11 nt, Artificial Sequence
  Description of Artificial Sequence: Synthetic oligonucleotide
cucuguaccuc

SEQ ID NO: 123694 - RNA, 11 nt, Artificial Sequence
  Description of Artificial Sequence: Synthetic oligonucleotide
gcaagacaaga

SEQ ID NO: 123695 - RNA, 12 nt, Artificial Sequence
  Description of Artificial Sequence: Synthetic oligonucleotide
caagacaagaaa

SEQ ID NO: 123696 - RNA, 11 nt, Artificial Sequence
  Description of Artificial Sequence: Synthetic oligonucleotide
guacaagaucc

SEQ ID NO: 123697 - RNA, 11 nt, Artificial Sequence
  Description of Artificial Sequence: Synthetic oligonucleotide
guacuugcaga

SEQ ID NO: 123698 - RNA, 12 nt, Artificial Sequence
  Description of Artificial Sequence: Synthetic oligonucleotide
gaucgauacaga

SEQ ID NO: 123699 - RNA, 12 nt, Artificial Sequence
  Description of Artificial Sequence: Synthetic oligonucleotide
auaaaaauaaau

SEQ ID NO: 123700 - RNA, 12 nt, Artificial Sequence
  Description of Artificial Sequence: Synthetic oligonucleotide
aaaaauaaauau

SEQ ID NO: 123701 - RNA, 12 nt, Artificial Sequence
  Description of Artificial Sequence: Synthetic oligonucleotide
uugacugcugug

SEQ ID NO: 123702 - RNA, 12 nt, Artificial Sequence
  Description of Artificial Sequence: Synthetic oligonucleotide
gagaugagagac

SEQ ID NO: 123703 - RNA, 9 nt, Artificial Sequence
  Description of Artificial Sequence: Synthetic oligonucleotide
cccacuugg

SEQ ID NO: 123704 - RNA, 2568 nt, Homo sapiens
gcgccugccuccaaccugcgggcgggagguggguggcugcggggcaauugaaaaagagccggcgaggaguuccccgaaacuuguuggaacuccgggcucgcgcggaggccaggagcugagcggcggcggcugccggacgaugggagcgugagcaggacggugauaaccucuccccgaucggguugcgagggcgccgggcagaggccaggacgcgagccgccagcggugggacccaucgacgacuucccggggcgacaggagcagccccgagagccagggcgagcgcccguuccagguggccggaccgcccgccgcguccgcgccgcgcucccugcaggcaacgggagacgcccccgcgcagcgcgagcgccucagcgcggccgcucgcucucccccucgagggacaaacuuuucccaaacccgauccgagcccuuggaccaaacucgccugcgccgagagccguccgcguagagcgcuccgucuccggcgagauguccgagcgcaaagaaggcagaggcaaagggaagggcaagaagaaggagcgaggcuccggcaagaagccggaguccgcggcgggcagccagagcccagccuugccuccccgauugaaagagaugaaaagccaggaaucggcugcagguuccaaacuaguccuucggugugaaaccaguucugaauacuccucucucagauucaagugguucaagaaugggaaugaauugaaucgaaaaaacaaaccacaaaauaucaagauacaaaaaaagccagggaagucagaacuucgcauuaacaaagcaucacuggcugauucuggagaguauaugugcaaagugaucagcaaauuaggaaaugacagugccucugccaauaucaccaucguggaaucaaacgagaucaucacugguaugccagccucaacugaaggagcauaugugucuucagagucucccauuagaauaucaguauccacagaaggagcaaauacuucuucaucuacaucuacauccaccacugggacaagccaucuuguaaaaugugcggagaaggagaaaacuuucugugugaauggaggggagugcuucauggugaaagaccuuucaaaccccucgagauacuugugcaagugccaaccuggauucacuggagcaagauguacugagaaugugcccaugaaaguccaaaaccaagaaaaggcggaggagcuguaccagaagagagugcugaccauaaccggcaucugcaucgcccuccuuguggucggcaucaugugugugguggccuacugcaaaaccaagaaacagcggaaaaagcugcaugaccgucuucggcagagccuucggucugaacgaaacaauaugaugaacauugccaaugggccucaccauccuaacccaccccccgagaauguccagcuggugaaucaauacguaucuaaaaacgucaucuccagugagcauauuguugagagagaagcagagacauccuuuuccaccagucacuauacuuccacagcccaucacuccacuacugucacccagacuccuagccacagcuggagcaacggacacacugaaagcauccuuuccgaaagccacucuguaaucgugaugucauccguagaaaacaguaggcacagcagcccaacugggggcccaagaggacgucuuaauggcacaggaggcccucgugaauguaacagcuuccucaggcaugccagagaaaccccugauuccuaccgagacucuccucauagugaaagguaugugucagccaugaccaccccggcucguaugucaccuguagauuuccacacgccaagcucccccaaaucgcccccuucggaaaugucuccacccguguccagcaugacgguguccaugccuuccauggcggucagccccuucauggaagaagagagaccucuacuucucgugacaccaccaaggcugcgggagaagaaguuugaccaucacccucagcaguucagcuccuuccaccacaaccccgcgcaugacaguaacagccucccugcuagccccuugaggauaguggaggaugaggaguaugaaacgacccaagaguacgagccagcccaagagccuguuaagaaacucgccaauagccggcgggccaaaagaaccaagcccaauggccacauugcuaacagauuggaaguggacagcaacacaagcucccagagcaguaacucagagagugaaacagaagaugaaagaguaggugaagauacgccuuuccugggcauacagaacccccuggcagccagucuugaggcaacaccugccuuccgccuggcugacagcaggacuaacccagcaggccgcuucucgacacaggaagaaauccaggccaggcugucuaguguaauugcuaaccaagacccuauugcuguauaaaaccuaaauaaacacauagauucaccuguaaaacuuuauuuuauauaauaaaguauuccaccuuaaauuaaacaauuuauuuuauuuuagcaguucugcaaauagaaaacaggaaaaaaacuuuuauaaauuaaauauauguauguaaaaaug

SEQ ID NO: 123705 - RNA, 2559 nt, Homo sapiens
gcgccugccuccaaccugcgggcgggagguggguggcugcggggcaauugaaaaagagccggcgaggaguuccccgaaacuuguuggaacuccgggcucgcgcggaggccaggagcugagcggcggcggcugccggacgaugggagcgugagcaggacggugauaaccucuccccgaucggguugcgagggcgccgggcagaggccaggacgcgagccgccagcggugggacccaucgacgacuucccggggcgacaggagcagccccgagagccagggcgagcgcccguuccagguggccggaccgcccgccgcguccgcgccgcgcucccugcaggcaacgggagacgcccccgcgcagcgcgagcgccucagcgcggccgcucgcucucccccucgagggacaaacuuuucccaaacccgauccgagcccuuggaccaaacucgccugcgccgagagccguccgcguagagcgcuccgucuccggcgagauguccgagcgcaaagaaggcagaggcaaagggaagggcaagaagaaggagcgaggcuccggcaagaagccggaguccgcggcgggcagccagagcccagccuugccuccccgauugaaagagaugaaaagccaggaaucggcugcagguuccaaacuaguccuucggugugaaaccaguucugaauacuccucucucagauucaagugguucaagaaugggaaugaauugaaucgaaaaaacaaaccacaaaauaucaagauacaaaaaaagccagggaagucagaacuucgcauuaacaaagcaucacuggcugauucuggagaguauaugugcaaagugaucagcaaauuaggaaaugacagugccucugccaauaucaccaucguggaaucaaacgagaucaucacugguaugccagccucaacugaaggagcauaugugucuucagagucucccauuagaauaucaguauccacagaaggagcaaauacuucuucaucuacaucuacauccaccacugggacaagccaucuuguaaaaugugcggagaaggagaaaacuuucugugugaauggaggggagugcuucauggugaaagaccuuucaaaccccucgagauacuugugcaagugcccaaaugaguuuacuggugaucgcugccaaaacuacguaauggccagcuucuacaaggcggaggagcuguaccagaagagagugcugaccauaaccggcaucugcaucgcccuccuuguggucggcaucaugugugugguggccuacugcaaaaccaagaaacagcggaaaaagcugcaugaccgucuucggcagagccuucggucugaacgaaacaauaugaugaacauugccaaugggccucaccauccuaacccaccccccgagaauguccagcuggugaaucaauacguaucuaaaaacgucaucuccagugagcauauuguugagagagaagcagagacauccuuuuccaccagucacuauacuuccacagcccaucacuccacuacugucacccagacuccuagccacagcuggagcaacggacacacugaaagcauccuuuccgaaagccacucuguaaucgugaugucauccguagaaaacaguaggcacagcagcccaacugggggcccaagaggacgucuuaauggcacaggaggcccucgugaauguaacagcuuccucaggcaugccagagaaaccccugauuccuaccgagacucuccucauagugaaagguaugugucagccaugaccaccccggcucguaugucaccuguagauuuccacacgccaagcucccccaaaucgcccccuucggaaaugucuccacccguguccagcaugacgguguccaugccuuccauggcggucagccccuucauggaagaagagagaccucuacuucucgugacaccaccaaggcugcgggagaagaaguuugaccaucacccucagcaguucagcuccuuccaccacaaccccgcgcaugacaguaacagccucccugcuagccccuugaggauaguggaggaugaggaguaugaaacgacccaagaguacgagccagcccaagagccuguuaagaaacucgccaauagccggcgggccaaaagaaccaagcccaauggccacauugcuaacagauuggaaguggacagcaacacaagcucccagagcaguaacucagagagugaaacagaagaugaaagaguaggugaagauacgccuuuccugggcauacagaacccccuggcagccagucuugaggcaacaccugccuuccgccuggcugacagcaggacuaacccagcaggccgcuucucgacacaggaagaaauccaggccaggcugucuaguguaauugcuaaccaagacccuauugcuguauaaaaccuaaauaaacacauagauucaccuguaaaacuuuauuuuauauaauaaaguauuccaccuuaaauuaaacaauuuauuuuauuuuagcaguucugcaaauagaaaacaggaaaaaaacuuuuauaaauuaaauauauguauguaaaaaug

SEQ ID NO: 123706 - RNA, 1703 nt, Homo sapiens
gcgccugccuccaaccugcgggcgggagguggguggcugcggggcaauugaaaaagagccggcgaggaguuccccgaaacuuguuggaacuccgggcucgcgcggaggccaggagcugagcggcggcggcugccggacgaugggagcgugagcaggacggugauaaccucuccccgaucggguugcgagggcgccgggcagaggccaggacgcgagccgccagcggugggacccaucgacgacuucccggggcgacaggagcagccccgagagccagggcgagcgcccguuccagguggccggaccgcccgccgcguccgcgccgcgcucccugcaggcaacgggagacgcccccgcgcagcgcgagcgccucagcgcggccgcucgcucucccccucgagggacaaacuuuucccaaacccgauccgagcccuuggaccaaacucgccugcgccgagagccguccgcguagagcgcuccgucuccggcgagauguccgagcgcaaagaaggcagaggcaaagggaagggcaagaagaaggagcgaggcuccggcaagaagccggaguccgcggcgggcagccagagcccagccuugccuccccgauugaaagagaugaaaagccaggaaucggcugcagguuccaaacuaguccuucggugugaaaccaguucugaauacuccucucucagauucaagugguucaagaaugggaaugaauugaaucgaaaaaacaaaccacaaaauaucaagauacaaaaaaagccagggaagucagaacuucgcauuaacaaagcaucacuggcugauucuggagaguauaugugcaaagugaucagcaaauuaggaaaugacagugccucugccaauaucaccaucguggaaucaaacgagaucaucacugguaugccagccucaacugaaggagcauaugugucuucagagucucccauuagaauaucaguauccacagaaggagcaaauacuucuucaucuacaucuacauccaccacugggacaagccaucuuguaaaaugugcggagaaggagaaaacuuucugugugaauggaggggagugcuucauggugaaagaccuuucaaaccccucgagauacuugugcaagugcccaaaugaguuuacuggugaucgcugccaaaacuacguaauggccagcuucuacaguacguccacucccuuucugucucugccugaauaggagcaugcucaguuggugcugcuuucuuguugcugcaucuccccucagauuccaccuagagcuagaugugucuuaccagaucuaauauugacugccucugccugucgcaugagaacauuaacaaaagcaauuguauuacuuccucuguucgcgacuaguuggcucugagauacuaauaggugugugaggcuccggauguuucuggaauugauauugaaugaugugauacaaauugauagucaauaucaagcagugaaauaugauaauaaaggcauuucaaagucucacuuuuauugauaaaauaaaaaucauucuacugaacaguccaucuucuuuauacaaugaccacauccugaaaaggguguugcuaagcuguaaccgauaugcacuugaaaugaugguaaguuaauuuugauucagaauguguuauuugucacaaauaaacauaauaaaaggaguucagauguuuuucuucauuaaccaaa

SEQ ID NO: 123707 - RNA, 1669 nt, Homo sapiens
gcgccugccuccaaccugcgggcgggagguggguggcugcggggcaauugaaaaagagccggcgaggaguuccccgaaacuuguuggaacuccgggcucgcgcggaggccaggagcugagcggcggcggcugccggacgaugggagcgugagcaggacggugauaaccucuccccgaucggguugcgagggcgccgggcagaggccaggacgcgagccgccagcggugggacccaucgacgacuucccggggcgacaggagcagccccgagagccagggcgagcgcccguuccagguggccggaccgcccgccgcguccgcgccgcgcucccugcaggcaacgggagacgcccccgcgcagcgcgagcgccucagcgcggccgcucgcucucccccucgagggacaaacuuuucccaaacccgauccgagcccuuggaccaaacucgccugcgccgagagccguccgcguagagcgcuccgucuccggcgagauguccgagcgcaaagaaggcagaggcaaagggaagggcaagaagaaggagcgaggcuccggcaagaagccggaguccgcggcgggcagccagagcccagccuugccuccccgauugaaagagaugaaaagccaggaaucggcugcagguuccaaacuaguccuucggugugaaaccaguucugaauacuccucucucagauucaagugguucaagaaugggaaugaauugaaucgaaaaaacaaaccacaaaauaucaagauacaaaaaaagccagggaagucagaacuucgcauuaacaaagcaucacuggcugauucuggagaguauaugugcaaagugaucagcaaauuaggaaaugacagugccucugccaauaucaccaucguggaaucaaacgagaucaucacugguaugccagccucaacugaaggagcauaugugucuucagagucucccauuagaauaucaguauccacagaaggagcaaauacuucuucaucuacaucuacauccaccacugggacaagccaucuuguaaaaugugcggagaaggagaaaacuuucugugugaauggaggggagugcuucauggugaaagaccuuucaaaccccucgagauacuugugcaaguaagaaaagaaauccugugugucgcuuaugucuauaacuccuuguuucagaugauucuaugucucaugauguauuguugcuuuuuuuccaauuuuguugcaucauguugaauaaugcuguuuuauauguagaguguuuuaaaacauucacaccauucgucaucacuccucugucauaugcagaauuguuuuuugcucuuuucaaugugugugagguguuuuuuguuuuuguuuuuguuuuuugccauguuauuuauaguguugcuuuccuugugguuuuucuuguuguuauucagaaaagaugugcagauaucacagaggccuauaacuuuugguaucuacuucuacauccaauguaugaauuaagcuguaagauaauguugcuuucuuaucccagugaucaccugccaaaugaauaagacaacaaagagaagcagaagggcagaagauuauuuacugacauauaucuauuacacuugggauugucuuacuguugcauaacuauuuuuuaaacggaguuuaguuuuauauugcuaguaaaaaaa

SEQ ID NO: 123708 - RNA, 2710 nt, Homo sapiens
gcgccugccuccaaccugcgggcgggagguggguggcugcggggcaauugaaaaagagccggcgaggaguuccccgaaacuuguuggaacuccgggcucgcgcggaggccaggagcugagcggcggcggcugccggacgaugggagcgugagcaggacggugauaaccucuccccgaucggguugcgagggcgccgggcagaggccaggacgcgagccgccagcggugggacccaucgacgacuucccggggcgacaggagcagccccgagagccagggcgagcgcccguuccagguggccggaccgcccgccgcguccgcgccgcgcucccugcaggcaacgggagacgcccccgcgcagcgcgagcgccucagcgcggccgcucgcucucccccucgagggacaaacuuuucccaaacccgauccgagcccuuggaccaaacucgccugcgccgagagccguccgcguagagcgcuccgucuccggcgagauguccgagcgcaaagaaggcagaggcaaagggaagggcaagaagaaggagcgaggcuccggcaagaagccggaguccgcggcgggcagccagagcccagccuugccuccccgauugaaagagaugaaaagccaggaaucggcugcagguuccaaacuaguccuucggugugaaaccaguucugaauacuccucucucagauucaagugguucaagaaugggaaugaauugaaucgaaaaaacaaaccacaaaauaucaagauacaaaaaaagccagggaagucagaacuucgcauuaacaaagcaucacuggcugauucuggagaguauaugugcaaagugaucagcaaauuaggaaaugacagugccucugccaauaucaccaucguggaaucaaacgagaucaucacugguaugccagccucaacugaaggagcauaugugucuucagagucucccauuagaauaucaguauccacagaaggagcaaauacuucuucaucuacaucuacauccaccacugggacaagccaucuuguaaaaugugcggagaaggagaaaacuuucugugugaauggaggggagugcuucauggugaaagaccuuucaaaccccucgagauacuugugcaagugccaaccuggauucacuggagcaagauguacugagaaugugcccaugaaaguccaaaaccaagaaaaggcggaggagcuguaccagaagagagugcugaccauaaccggcaucugcaucgcccuccuuguggucggcaucaugugugugguggccuacugcaaaaccaagaaacagcggaaaaagcugcaugaccgucuucggcagagccuucggucugaacgaaacaauaugaugaacauugccaaugggccucaccauccuaacccaccccccgagaauguccagcuggugaaucaauacguaucuaaaaacgucaucuccagugagcauauuguugagagagaagcagagacauccuuuuccaccagucacuauacuuccacagcccaucacuccacuacugucacccagacuccuagccacagcuggagcaacggacacacugaaagcauccuuuccgaaagccacucuguaaucgugaugucauccguagaaaacaguaggcacagcagcccaacugggggcccaagaggacgucuuaauggcacaggaggcccucgugaauguaacagcuuccucaggcaugccagagaaaccccugauuccuaccgagacucuccucauagugaaagacauaaccuuauagcugagcuaaggagaaacaaggcacacagauccaaaugcaugcagauccagcuaucagcaacucaucuuagaucuucuuccauuccccauuugggcuucauucucuaagaccccuuggccuuuaggaagguaugugucagccaugaccaccccggcucguaugucaccuguagauuuccacacgccaagcucccccaaaucgcccccuucggaaaugucuccacccguguccagcaugacgguguccaugccuuccauggcggucagccccuucauggaagaagagagaccucuacuucucgugacaccaccaaggcugcgggagaagaaguuugaccaucacccucagcaguucagcuccuuccaccacaaccccgcgcaugacaguaacagccucccugcuagccccuugaggauaguggaggaugaggaguaugaaacgacccaagaguacgagccagcccaagagccuguuaagaaacucgccaauagccggcgggccaaaagaaccaagcccaauggccacauugcuaacagauuggaaguggacagcaacacaagcucccagagcaguaacucagagagugaaacagaagaugaaagaguaggugaagauacgccuuuccugggcauacagaacccccuggcagccagucuugaggcaacaccugccuuccgccuggcugacagcaggacuaacccagcaggccgcuucucgacacaggaagaaauccaggccaggcugucuaguguaauugcuaaccaagacccuauugcuguauaaaaccuaaauaaacacauagauucaccuguaaaacuuuauuuuauauaauaaaguauuccaccuuaaauuaaacaauuuauuuuauuuuagcaguucugcaaauagaaaacaggaaaaaaacuuuuauaaauuaaauauauguauguaaaaaug

SEQ ID NO: 123709 - RNA, 2084 nt, Homo sapiens
cucaagaaggacaaagaggaguagucgggggugggguggaggcagggcggggaagggagugaccgccccuccuggcugcacucuugccuccggagcccucugauccuguuugcagugaugcuccgagggcaggcaccugcugcucuguaaugauucagccccuuucagccgucgucgcguuaacacaacaggaugcuguugcuauugucacuacugccucuccugccgccgcugcugcugccgccgccgccaccgccgcugguccuccuucugcuuuuacuucuccugcaugacaguuguuuucuucaucugagcagacaccagcuucagaugcucgaggugagaaacaugccuuucaguuugggcuacugguuuacuuaauuaaucagccggcagcuccgucgaucuauuuucgucccuguccucuugacgagcccgggaugguuuggaguagcauuuaaaagaacuagaaaaguggcccagaaacagcagcuuaaagaauuauuacgauauacuuugauuuuguaguugcuaggagcuuuucuuccccccuugcaucuuucugaacucuucuugauuuuaauaauggccuuggacuuggacgauuuaucgauuucccccuguaagaugcuguaucauuugguugggggggccucugcgugguaauggaccgugagagcggccaggccuucuucuggaggugagccgauggagauuuauuccccagacaugucugaggucgccgccgagagguccuccagccccuccacucagcugagugcagacccaucucuugaugggcuuccggcagcagaagacaugccagagccccagacugaagaugggagaaccccuggacucgugggccuggccgugcccugcugugcgugccuagaagcugagcgccugagagguugccucaacucagagaaaaucugcauuguccccauccuggcuugccuggucagccucugccucugcaucgccggccucaaguggguauuuguggacaagaucuuugaauaugacucuccuacucaccuugacccugggggguuaggccaggacccuauuauuucucuggacgcaacugcugccucagcugugugggugucgucugaggcauacacuucaccugucucuagggcucaaucugaaagugagguucaaguuacagugcaaggugacaaggcuguugucuccuuugaaccaucagcggcaccgacaccgaagaaucguauuuuugccuuuucuuucuugccguccacugcgccauccuucccuucacccacccggaacccugaggugagaacgcccaagucagcaacucagccacaaacaacagaaacuaaucuccaaacugcuccuaaacuuucuacaucuacauccaccacugggacaagccaucuuguaaaaugugcggagaaggagaaaacuuucugugugaauggaggggagugcuucauggugaaagaccuuucaaaccccucgagauacuugugcaagugcccaaaugaguuuacuggugaucgcugccaaaacuacguaauggccagcuucuacaguacguccacucccuuucugucucugccugaauaggagcaugcucaguuggugcugcuuucuuguugcugcaucuccccucagauuccaccuagagcuagaugugucuuaccagaucuaauauugacugccucugccugucgcaugagaacauuaacaaaagcaauuguauuacuuccucuguucgcgacuaguuggcucugagauacuaauaggugugugaggcuccggauguuucuggaauugauauugaaugaugugauacaaauugauagucaauaucaagcagugaaauaugauaauaaaggcauuucaaagucucacuuuuauugauaaaauaaaaaucauucuacugaacaguccaucuucuuuauacaaugaccacauccugaaaaggguguugcuaagcuguaaccgauaugcacuugaaaugaugguaaguuaauuuugauucagaauguguuauuugucacaaauaaacauaauaaaaggaguucagauguuuuucuucauuaaccaaa

SEQ ID NO: 123710 - RNA, 2583 nt, Homo sapiens
gcgccugccuccaaccugcgggcgggagguggguggcugcggggcaauugaaaaagagccggcgaggaguuccccgaaacuuguuggaacuccgggcucgcgcggaggccaggagcugagcggcggcggcugccggacgaugggagcgugagcaggacggugauaaccucuccccgaucggguugcgagggcgccgggcagaggccaggacgcgagccgccagcggugggacccaucgacgacuucccggggcgacaggagcagccccgagagccagggcgagcgcccguuccagguggccggaccgcccgccgcguccgcgccgcgcucccugcaggcaacgggagacgcccccgcgcagcgcgagcgccucagcgcggccgcucgcucucccccucgagggacaaacuuuucccaaacccgauccgagcccuuggaccaaacucgccugcgccgagagccguccgcguagagcgcuccgucuccggcgagauguccgagcgcaaagaaggcagaggcaaagggaagggcaagaagaaggagcgaggcuccggcaagaagccggaguccgcggcgggcagccagagcccagccuugccuccccgauugaaagagaugaaaagccaggaaucggcugcagguuccaaacuaguccuucggugugaaaccaguucugaauacuccucucucagauucaagugguucaagaaugggaaugaauugaaucgaaaaaacaaaccacaaaauaucaagauacaaaaaaagccagggaagucagaacuucgcauuaacaaagcaucacuggcugauucuggagaguauaugugcaaagugaucagcaaauuaggaaaugacagugccucugccaauaucaccaucguggaaucaaacgagaucaucacugguaugccagccucaacugaaggagcauaugugucuucagagucucccauuagaauaucaguauccacagaaggagcaaauacuucuucaucuacaucuacauccaccacugggacaagccaucuuguaaaaugugcggagaaggagaaaacuuucugugugaauggaggggagugcuucauggugaaagaccuuucaaaccccucgagauacuugugcaagugcccaaaugaguuuacuggugaucgcugccaaaacuacguaauggccagcuucuacaagcaucuugggauugaauuuauggaggcggaggagcuguaccagaagagagugcugaccauaaccggcaucugcaucgcccuccuuguggucggcaucaugugugugguggccuacugcaaaaccaagaaacagcggaaaaagcugcaugaccgucuucggcagagccuucggucugaacgaaacaauaugaugaacauugccaaugggccucaccauccuaacccaccccccgagaauguccagcuggugaaucaauacguaucuaaaaacgucaucuccagugagcauauuguugagagagaagcagagacauccuuuuccaccagucacuauacuuccacagcccaucacuccacuacugucacccagacuccuagccacagcuggagcaacggacacacugaaagcauccuuuccgaaagccacucuguaaucgugaugucauccguagaaaacaguaggcacagcagcccaacugggggcccaagaggacgucuuaauggcacaggaggcccucgugaauguaacagcuuccucaggcaugccagagaaaccccugauuccuaccgagacucuccucauagugaaagguaugugucagccaugaccaccccggcucguaugucaccuguagauuuccacacgccaagcucccccaaaucgcccccuucggaaaugucuccacccguguccagcaugacgguguccaugccuuccauggcggucagccccuucauggaagaagagagaccucuacuucucgugacaccaccaaggcugcgggagaagaaguuugaccaucacccucagcaguucagcuccuuccaccacaaccccgcgcaugacaguaacagccucccugcuagccccuugaggauaguggaggaugaggaguaugaaacgacccaagaguacgagccagcccaagagccuguuaagaaacucgccaauagccggcgggccaaaagaaccaagcccaauggccacauugcuaacagauuggaaguggacagcaacacaagcucccagagcaguaacucagagagugaaacagaagaugaaagaguaggugaagauacgccuuuccugggcauacagaacccccuggcagccagucuugaggcaacaccugccuuccgccuggcugacagcaggacuaacccagcaggccgcuucucgacacaggaagaaauccaggccaggcugucuaguguaauugcuaaccaagacccuauugcuguauaaaaccuaaauaaacacauagauucaccuguaaaacuuuauuuuauauaauaaaguauuccaccuuaaauuaaacaauuuauuuuauuuuagcaguucugcaaauagaaaacaggaaaaaaacuuuuauaaauuaaauauauguauguaaaaaug

SEQ ID NO: 123711 - RNA, 19 nt, Artificial Sequence
  Description of Artificial Sequence: Synthetic oligonucleotide
gcgccugccuccaaccugc

SEQ ID NO: 123712 - RNA, 19 nt, Artificial Sequence
  Description of Artificial Sequence: Synthetic oligonucleotide
cgggcgggagguggguggc

SEQ ID NO: 123713 - RNA, 19 nt, Artificial Sequence
  Description of Artificial Sequence: Synthetic oligonucleotide
cugcggggcaauugaaaaa

SEQ ID NO: 123714 - RNA, 19 nt, Artificial Sequence
  Description of Artificial Sequence: Synthetic oligonucleotide
agagccggcgaggaguucc

SEQ ID NO: 123715 - RNA, 19 nt, Artificial Sequence
  Description of Artificial Sequence: Synthetic oligonucleotide
cccgaaacuuguuggaacu

SEQ ID NO: 123716 - RNA, 19 nt, Artificial Sequence
  Description of Artificial Sequence: Synthetic oligonucleotide
uccgggcucgcgcggaggc

SEQ ID NO: 123717 - RNA, 19 nt, Artificial Sequence
  Description of Artificial Sequence: Synthetic oligonucleotide
ccaggagcugagcggcggc

SEQ ID NO: 123718 - RNA, 19 nt, Artificial Sequence
  Description of Artificial Sequence: Synthetic oligonucleotide
cggcugccggacgauggga

SEQ ID NO: 123719 - RNA, 19 nt, Artificial Sequence
  Description of Artificial Sequence: Synthetic oligonucleotide
agcgugagcaggacgguga

SEQ ID NO: 123720 - RNA, 19 nt, Artificial Sequence
  Description of Artificial Sequence: Synthetic oligonucleotide
auaaccucuccccgaucgg

SEQ ID NO: 123721 - RNA, 19 nt, Artificial Sequence
  Description of Artificial Sequence: Synthetic oligonucleotide
gguugcgagggcgccgggc

SEQ ID NO: 123722 - RNA, 19 nt, Artificial Sequence
  Description of Artificial Sequence: Synthetic oligonucleotide
cagaggccaggacgcgagc

SEQ ID NO: 123723 - RNA, 19 nt, Artificial Sequence
  Description of Artificial Sequence: Synthetic oligonucleotide
ccgccagcggugggaccca

SEQ ID NO: 123724 - RNA, 19 nt, Artificial Sequence
  Description of Artificial Sequence: Synthetic oligonucleotide
aucgacgacuucccggggc

SEQ ID NO: 123725 - RNA, 19 nt, Artificial Sequence
  Description of Artificial Sequence: Synthetic oligonucleotide
cgacaggagcagccccgag

SEQ ID NO: 123726 - RNA, 19 nt, Artificial Sequence
  Description of Artificial Sequence: Synthetic oligonucleotide
gagccagggcgagcgcccg

SEQ ID NO: 123727 - RNA, 19 nt, Artificial Sequence
  Description of Artificial Sequence: Synthetic oligonucleotide
guuccagguggccggaccg

SEQ ID NO: 123728 - RNA, 19 nt, Artificial Sequence
  Description of Artificial Sequence: Synthetic oligonucleotide
gcccgccgcguccgcgccg

SEQ ID NO: 123729 - RNA, 19 nt, Artificial Sequence
  Description of Artificial Sequence: Synthetic oligonucleotide
gcgcucccugcaggcaacg

SEQ ID NO: 123730 - RNA, 19 nt, Artificial Sequence
  Description of Artificial Sequence: Synthetic oligonucleotide
gggagacgcccccgcgcag

SEQ ID NO: 123731 - RNA, 19 nt, Artificial Sequence
  Description of Artificial Sequence: Synthetic oligonucleotide
gcgcgagcgccucagcgcg

SEQ ID NO: 123732 - RNA, 19 nt, Artificial Sequence
  Description of Artificial Sequence: Synthetic oligonucleotide
ggccgcucgcucucccccu

SEQ ID NO: 123733 - RNA, 19 nt, Artificial Sequence
  Description of Artificial Sequence: Synthetic oligonucleotide
ucgagggacaaacuuuucc

SEQ ID NO: 123734 - RNA, 19 nt, Artificial Sequence
  Description of Artificial Sequence: Synthetic oligonucleotide
ccaaacccgauccgagccc

SEQ ID NO: 123735 - RNA, 19 nt, Artificial Sequence
  Description of Artificial Sequence: Synthetic oligonucleotide
cuuggaccaaacucgccug

SEQ ID NO: 123736 - RNA, 19 nt, Artificial Sequence
  Description of Artificial Sequence: Synthetic oligonucleotide
gcgccgagagccguccgcg

SEQ ID NO: 123737 - RNA, 19 nt, Artificial Sequence
  Description of Artificial Sequence: Synthetic oligonucleotide
guagagcgcuccgucuccg

SEQ ID NO: 123738 - RNA, 19 nt, Artificial Sequence
  Description of Artificial Sequence: Synthetic oligonucleotide
ggcgagauguccgagcgca

SEQ ID NO: 123739 - RNA, 19 nt, Artificial Sequence
  Description of Artificial Sequence: Synthetic oligonucleotide
aaagaaggcagaggcaaag

SEQ ID NO: 123740 - RNA, 19 nt, Artificial Sequence
  Description of Artificial Sequence: Synthetic oligonucleotide
gggaagggcaagaagaagg

SEQ ID NO: 123741 - RNA, 19 nt, Artificial Sequence
  Description of Artificial Sequence: Synthetic oligonucleotide
gagcgaggcuccggcaaga

SEQ ID NO: 123742 - RNA, 19 nt, Artificial Sequence
  Description of Artificial Sequence: Synthetic oligonucleotide
aagccggaguccgcggcgg

SEQ ID NO: 123743 - RNA, 19 nt, Artificial Sequence
  Description of Artificial Sequence: Synthetic oligonucleotide
ggcagccagagcccagccu

SEQ ID NO: 123744 - RNA, 19 nt, Artificial Sequence
  Description of Artificial Sequence: Synthetic oligonucleotide
uugccuccccgauugaaag

SEQ ID NO: 123745 - RNA, 19 nt, Artificial Sequence
  Description of Artificial Sequence: Synthetic oligonucleotide
gagaugaaaagccaggaau

SEQ ID NO: 123746 - RNA, 19 nt, Artificial Sequence
  Description of Artificial Sequence: Synthetic oligonucleotide
ucggcugcagguuccaaac

SEQ ID NO: 123747 - RNA, 19 nt, Artificial Sequence
  Description of Artificial Sequence: Synthetic oligonucleotide
cuaguccuucggugugaaa

SEQ ID NO: 123748 - RNA, 19 nt, Artificial Sequence
  Description of Artificial Sequence: Synthetic oligonucleotide
accaguucugaauacuccu

SEQ ID NO: 123749 - RNA, 19 nt, Artificial Sequence
  Description of Artificial Sequence: Synthetic oligonucleotide
ucucucagauucaaguggu

SEQ ID NO: 123750 - RNA, 19 nt, Artificial Sequence
  Description of Artificial Sequence: Synthetic oligonucleotide
uucaagaaugggaaugaau

SEQ ID NO: 123751 - RNA, 19 nt, Artificial Sequence
  Description of Artificial Sequence: Synthetic oligonucleotide
uugaaucgaaaaaacaaac

SEQ ID NO: 123752 - RNA, 19 nt, Artificial Sequence
  Description of Artificial Sequence: Synthetic oligonucleotide
ccacaaaauaucaagauac

SEQ ID NO: 123753 - RNA, 19 nt, Artificial Sequence
  Description of Artificial Sequence: Synthetic oligonucleotide
caaaaaaagccagggaagu

SEQ ID NO: 123754 - RNA, 19 nt, Artificial Sequence
  Description of Artificial Sequence: Synthetic oligonucleotide
ucagaacuucgcauuaaca

SEQ ID NO: 123755 - RNA, 19 nt, Artificial Sequence
  Description of Artificial Sequence: Synthetic oligonucleotide
aaagcaucacuggcugauu

SEQ ID NO: 123756 - RNA, 19 nt, Artificial Sequence
  Description of Artificial Sequence: Synthetic oligonucleotide
ucuggagaguauaugugca

SEQ ID NO: 123757 - RNA, 19 nt, Artificial Sequence
  Description of Artificial Sequence: Synthetic oligonucleotide
aaagugaucagcaaauuag

SEQ ID NO: 123758 - RNA, 19 nt, Artificial Sequence
  Description of Artificial Sequence: Synthetic oligonucleotide
ggaaaugacagugccucug

SEQ ID NO: 123759 - RNA, 19 nt, Artificial Sequence
  Description of Artificial Sequence: Synthetic oligonucleotide
gccaauaucaccaucgugg

SEQ ID NO: 123760 - RNA, 19 nt, Artificial Sequence
  Description of Artificial Sequence: Synthetic oligonucleotide
gaaucaaacgagaucauca

SEQ ID NO: 123761 - RNA, 19 nt, Artificial Sequence
  Description of Artificial Sequence: Synthetic oligonucleotide
acugguaugccagccucaa

SEQ ID NO: 123762 - RNA, 19 nt, Artificial Sequence
  Description of Artificial Sequence: Synthetic oligonucleotide
acugaaggagcauaugugu

SEQ ID NO: 123763 - RNA, 19 nt, Artificial Sequence
  Description of Artificial Sequence: Synthetic oligonucleotide
ucuucagagucucccauua

SEQ ID NO: 123764 - RNA, 19 nt, Artificial Sequence
  Description of Artificial Sequence: Synthetic oligonucleotide
agaauaucaguauccacag

SEQ ID NO: 123765 - RNA, 19 nt, Artificial Sequence
  Description of Artificial Sequence: Synthetic oligonucleotide
gaaggagcaaauacuucuu

SEQ ID NO: 123766 - RNA, 19 nt, Artificial Sequence
  Description of Artificial Sequence: Synthetic oligonucleotide
ucaucuacaucuacaucca

SEQ ID NO: 123767 - RNA, 19 nt, Artificial Sequence
  Description of Artificial Sequence: Synthetic oligonucleotide
accacugggacaagccauc

SEQ ID NO: 123768 - RNA, 19 nt, Artificial Sequence
  Description of Artificial Sequence: Synthetic oligonucleotide
cuuguaaaaugugcggaga

SEQ ID NO: 123769 - RNA, 19 nt, Artificial Sequence
  Description of Artificial Sequence: Synthetic oligonucleotide
aaggagaaaacuuucugug

SEQ ID NO: 123770 - RNA, 19 nt, Artificial Sequence
  Description of Artificial Sequence: Synthetic oligonucleotide
gugaauggaggggagugcu

SEQ ID NO: 123771 - RNA, 19 nt, Artificial Sequence
  Description of Artificial Sequence: Synthetic oligonucleotide
uucauggugaaagaccuuu

SEQ ID NO: 123772 - RNA, 19 nt, Artificial Sequence
  Description of Artificial Sequence: Synthetic oligonucleotide
ucaaaccccucgagauacu

SEQ ID NO: 123773 - RNA, 19 nt, Artificial Sequence
  Description of Artificial Sequence: Synthetic oligonucleotide
uugugcaagugcccaaaug

SEQ ID NO: 123774 - RNA, 19 nt, Artificial Sequence
  Description of Artificial Sequence: Synthetic oligonucleotide
gaguuuacuggugaucgcu

SEQ ID NO: 123775 - RNA, 19 nt, Artificial Sequence
  Description of Artificial Sequence: Synthetic oligonucleotide
ugccaaaacuacguaaugg

SEQ ID NO: 123776 - RNA, 19 nt, Artificial Sequence
  Description of Artificial Sequence: Synthetic oligonucleotide
gccagcuucuacaaggcgg

SEQ ID NO: 123777 - RNA, 19 nt, Artificial Sequence
  Description of Artificial Sequence: Synthetic oligonucleotide
gaggagcuguaccagaaga

SEQ ID NO: 123778 - RNA, 19 nt, Artificial Sequence
  Description of Artificial Sequence: Synthetic oligonucleotide
agagugcugaccauaaccg

SEQ ID NO: 123779 - RNA, 19 nt, Artificial Sequence
  Description of Artificial Sequence: Synthetic oligonucleotide
ggcaucugcaucgcccucc

SEQ ID NO: 123780 - RNA, 19 nt, Artificial Sequence
  Description of Artificial Sequence: Synthetic oligonucleotide
cuuguggucggcaucaugu

SEQ ID NO: 123781 - RNA, 19 nt, Artificial Sequence
  Description of Artificial Sequence: Synthetic oligonucleotide
ugugugguggccuacugca

SEQ ID NO: 123782 - RNA, 19 nt, Artificial Sequence
  Description of Artificial Sequence: Synthetic oligonucleotide
aaaaccaagaaacagcgga

SEQ ID NO: 123783 - RNA, 19 nt, Artificial Sequence
  Description of Artificial Sequence: Synthetic oligonucleotide
aaaaagcugcaugaccguc

SEQ ID NO: 123784 - RNA, 19 nt, Artificial Sequence
  Description of Artificial Sequence: Synthetic oligonucleotide
cuucggcagagccuucggu

SEQ ID NO: 123785 - RNA, 19 nt, Artificial Sequence
  Description of Artificial Sequence: Synthetic oligonucleotide
ucugaacgaaacaauauga

SEQ ID NO: 123786 - RNA, 19 nt, Artificial Sequence
  Description of Artificial Sequence: Synthetic oligonucleotide
augaacauugccaaugggc

SEQ ID NO: 123787 - RNA, 19 nt, Artificial Sequence
  Description of Artificial Sequence: Synthetic oligonucleotide
ccucaccauccuaacccac

SEQ ID NO: 123788 - RNA, 19 nt, Artificial Sequence
  Description of Artificial Sequence: Synthetic oligonucleotide
ccccccgagaauguccagc

SEQ ID NO: 123789 - RNA, 19 nt, Artificial Sequence
  Description of Artificial Sequence: Synthetic oligonucleotide
cuggugaaucaauacguau

SEQ ID NO: 123790 - RNA, 19 nt, Artificial Sequence
  Description of Artificial Sequence: Synthetic oligonucleotide
ucuaaaaacgucaucucca

SEQ ID NO: 123791 - RNA, 19 nt, Artificial Sequence
  Description of Artificial Sequence: Synthetic oligonucleotide
agugagcauauuguugaga

SEQ ID NO: 123792 - RNA, 19 nt, Artificial Sequence
  Description of Artificial Sequence: Synthetic oligonucleotide
agagaagcagagacauccu

SEQ ID NO: 123793 - RNA, 19 nt, Artificial Sequence
  Description of Artificial Sequence: Synthetic oligonucleotide
uuuuccaccagucacuaua

SEQ ID NO: 123794 - RNA, 19 nt, Artificial Sequence
  Description of Artificial Sequence: Synthetic oligonucleotide
acuuccacagcccaucacu

SEQ ID NO: 123795 - RNA, 19 nt, Artificial Sequence
  Description of Artificial Sequence: Synthetic oligonucleotide
uccacuacugucacccaga

SEQ ID NO: 123796 - RNA, 19 nt, Artificial Sequence
  Description of Artificial Sequence: Synthetic oligonucleotide
acuccuagccacagcugga

SEQ ID NO: 123797 - RNA, 19 nt, Artificial Sequence
  Description of Artificial Sequence: Synthetic oligonucleotide
agcaacggacacacugaaa

SEQ ID NO: 123798 - RNA, 19 nt, Artificial Sequence
  Description of Artificial Sequence: Synthetic oligonucleotide
agcauccuuuccgaaagcc

SEQ ID NO: 123799 - RNA, 19 nt, Artificial Sequence
  Description of Artificial Sequence: Synthetic oligonucleotide
cacucuguaaucgugaugu

SEQ ID NO: 123800 - RNA, 19 nt, Artificial Sequence
  Description of Artificial Sequence: Synthetic oligonucleotide
ucauccguagaaaacagua

SEQ ID NO: 123801 - RNA, 19 nt, Artificial Sequence
  Description of Artificial Sequence: Synthetic oligonucleotide
aggcacagcagcccaacug

SEQ ID NO: 123802 - RNA, 19 nt, Artificial Sequence
  Description of Artificial Sequence: Synthetic oligonucleotide
gggggcccaagaggacguc

SEQ ID NO: 123803 - RNA, 19 nt, Artificial Sequence
  Description of Artificial Sequence: Synthetic oligonucleotide
cuuaauggcacaggaggcc

SEQ ID NO: 123804 - RNA, 19 nt, Artificial Sequence
  Description of Artificial Sequence: Synthetic oligonucleotide
ccucgugaauguaacagcu

SEQ ID NO: 123805 - RNA, 19 nt, Artificial Sequence
  Description of Artificial Sequence: Synthetic oligonucleotide
uuccucaggcaugccagag

SEQ ID NO: 123806 - RNA, 19 nt, Artificial Sequence
  Description of Artificial Sequence: Synthetic oligonucleotide
gaaaccccugauuccuacc

SEQ ID NO: 123807 - RNA, 19 nt, Artificial Sequence
  Description of Artificial Sequence: Synthetic oligonucleotide
cgagacucuccucauagug

SEQ ID NO: 123808 - RNA, 19 nt, Artificial Sequence
  Description of Artificial Sequence: Synthetic oligonucleotide
gaaagguaugugucagcca

SEQ ID NO: 123809 - RNA, 19 nt, Artificial Sequence
  Description of Artificial Sequence: Synthetic oligonucleotide
augaccaccccggcucgua

SEQ ID NO: 123810 - RNA, 19 nt, Artificial Sequence
  Description of Artificial Sequence: Synthetic oligonucleotide
augucaccuguagauuucc

SEQ ID NO: 123811 - RNA, 19 nt, Artificial Sequence
  Description of Artificial Sequence: Synthetic oligonucleotide
cacacgccaagcuccccca

SEQ ID NO: 123812 - RNA, 19 nt, Artificial Sequence
  Description of Artificial Sequence: Synthetic oligonucleotide
aaaucgcccccuucggaaa

SEQ ID NO: 123813 - RNA, 19 nt, Artificial Sequence
  Description of Artificial Sequence: Synthetic oligonucleotide
augucuccacccgugucca

SEQ ID NO: 123814 - RNA, 19 nt, Artificial Sequence
  Description of Artificial Sequence: Synthetic oligonucleotide
agcaugacgguguccaugc

SEQ ID NO: 123815 - RNA, 19 nt, Artificial Sequence
  Description of Artificial Sequence: Synthetic oligonucleotide
ccuuccauggcggucagcc

SEQ ID NO: 123816 - RNA, 19 nt, Artificial Sequence
  Description of Artificial Sequence: Synthetic oligonucleotide
cccuucauggaagaagaga

SEQ ID NO: 123817 - RNA, 19 nt, Artificial Sequence
  Description of Artificial Sequence: Synthetic oligonucleotide
agaccucuacuucucguga

SEQ ID NO: 123818 - RNA, 19 nt, Artificial Sequence
  Description of Artificial Sequence: Synthetic oligonucleotide
acaccaccaaggcugcggg

SEQ ID NO: 123819 - RNA, 19 nt, Artificial Sequence
  Description of Artificial Sequence: Synthetic oligonucleotide
gagaagaaguuugaccauc

SEQ ID NO: 123820 - RNA, 19 nt, Artificial Sequence
  Description of Artificial Sequence: Synthetic oligonucleotide
cacccucagcaguucagcu

SEQ ID NO: 123821 - RNA, 19 nt, Artificial Sequence
  Description of Artificial Sequence: Synthetic oligonucleotide
uccuuccaccacaaccccg

SEQ ID NO: 123822 - RNA, 19 nt, Artificial Sequence
  Description of Artificial Sequence: Synthetic oligonucleotide
gcgcaugacaguaacagcc

SEQ ID NO: 123823 - RNA, 19 nt, Artificial Sequence
  Description of Artificial Sequence: Synthetic oligonucleotide
cucccugcuagccccuuga

SEQ ID NO: 123824 - RNA, 19 nt, Artificial Sequence
  Description of Artificial Sequence: Synthetic oligonucleotide
aggauaguggaggaugagg

SEQ ID NO: 123825 - RNA, 19 nt, Artificial Sequence
  Description of Artificial Sequence: Synthetic oligonucleotide
gaguaugaaacgacccaag

SEQ ID NO: 123826 - RNA, 19 nt, Artificial Sequence
  Description of Artificial Sequence: Synthetic oligonucleotide
gaguacgagccagcccaag

SEQ ID NO: 123827 - RNA, 19 nt, Artificial Sequence
  Description of Artificial Sequence: Synthetic oligonucleotide
gagccuguuaagaaacucg

SEQ ID NO: 123828 - RNA, 19 nt, Artificial Sequence
  Description of Artificial Sequence: Synthetic oligonucleotide
gccaauagccggcgggcca

SEQ ID NO: 123829 - RNA, 19 nt, Artificial Sequence
  Description of Artificial Sequence: Synthetic oligonucleotide
aaaagaaccaagcccaaug

SEQ ID NO: 123830 - RNA, 19 nt, Artificial Sequence
  Description of Artificial Sequence: Synthetic oligonucleotide
ggccacauugcuaacagau

SEQ ID NO: 123831 - RNA, 19 nt, Artificial Sequence
  Description of Artificial Sequence: Synthetic oligonucleotide
uuggaaguggacagcaaca

SEQ ID NO: 123832 - RNA, 19 nt, Artificial Sequence
  Description of Artificial Sequence: Synthetic oligonucleotide
acaagcucccagagcagua

SEQ ID NO: 123833 - RNA, 19 nt, Artificial Sequence
  Description of Artificial Sequence: Synthetic oligonucleotide
aacucagagagugaaacag

SEQ ID NO: 123834 - RNA, 19 nt, Artificial Sequence
  Description of Artificial Sequence: Synthetic oligonucleotide
gaagaugaaagaguaggug

SEQ ID NO: 123835 - RNA, 19 nt, Artificial Sequence
  Description of Artificial Sequence: Synthetic oligonucleotide
gaagauacgccuuuccugg

SEQ ID NO: 123836 - RNA, 19 nt, Artificial Sequence
  Description of Artificial Sequence: Synthetic oligonucleotide
ggcauacagaacccccugg

SEQ ID NO: 123837 - RNA, 19 nt, Artificial Sequence
  Description of Artificial Sequence: Synthetic oligonucleotide
gcagccagucuugaggcaa

SEQ ID NO: 123838 - RNA, 19 nt, Artificial Sequence
  Description of Artificial Sequence: Synthetic oligonucleotide
acaccugccuuccgccugg

SEQ ID NO: 123839 - RNA, 19 nt, Artificial Sequence
  Description of Artificial Sequence: Synthetic oligonucleotide
gcugacagcaggacuaacc

SEQ ID NO: 123840 - RNA, 19 nt, Artificial Sequence
  Description of Artificial Sequence: Synthetic oligonucleotide
ccagcaggccgcuucucga

SEQ ID NO: 123841 - RNA, 19 nt, Artificial Sequence
  Description of Artificial Sequence: Synthetic oligonucleotide
acacaggaagaaauccagg

SEQ ID NO: 123842 - RNA, 19 nt, Artificial Sequence
  Description of Artificial Sequence: Synthetic oligonucleotide
gccaggcugucuaguguaa

SEQ ID NO: 123843 - RNA, 19 nt, Artificial Sequence
  Description of Artificial Sequence: Synthetic oligonucleotide
auugcuaaccaagacccua

SEQ ID NO: 123844 - RNA, 19 nt, Artificial Sequence
  Description of Artificial Sequence: Synthetic oligonucleotide
auugcuguauaaaaccuaa

SEQ ID NO: 123845 - RNA, 19 nt, Artificial Sequence
  Description of Artificial Sequence: Synthetic oligonucleotide
aauaaacacauagauucac

SEQ ID NO: 123846 - RNA, 19 nt, Artificial Sequence
  Description of Artificial Sequence: Synthetic oligonucleotide
ccuguaaaacuuuauuuua

SEQ ID NO: 123847 - RNA, 19 nt, Artificial Sequence
  Description of Artificial Sequence: Synthetic oligonucleotide
auauaauaaaguauuccac

SEQ ID NO: 123848 - RNA, 19 nt, Artificial Sequence
  Description of Artificial Sequence: Synthetic oligonucleotide
ccuuaaauuaaacaauuua

SEQ ID NO: 123849 - RNA, 19 nt, Artificial Sequence
  Description of Artificial Sequence: Synthetic oligonucleotide
auuuuauuuuagcaguucu

SEQ ID NO: 123850 - RNA, 19 nt, Artificial Sequence
  Description of Artificial Sequence: Synthetic oligonucleotide
ugcaaauagaaaacaggaa

SEQ ID NO: 123851 - RNA, 19 nt, Artificial Sequence
  Description of Artificial Sequence: Synthetic oligonucleotide
aaaaaacuuuuauaaauua

SEQ ID NO: 123852 - RNA, 19 nt, Artificial Sequence
  Description of Artificial Sequence: Synthetic oligonucleotide
aaauauauguauguaaaaa

SEQ ID NO: 123853 - RNA, 19 nt, Artificial Sequence
  Description of Artificial Sequence: Synthetic oligonucleotide
auauauguauguaaaaaug

SEQ ID NO: 123854 - RNA, 19 nt, Artificial Sequence
  Description of Artificial Sequence: Synthetic oligonucleotide
cucaagaaggacaaagagg

SEQ ID NO: 123855 - RNA, 19 nt, Artificial Sequence
  Description of Artificial Sequence: Synthetic oligonucleotide
gaguagucggggguggggu

SEQ ID NO: 123856 - RNA, 19 nt, Artificial Sequence
  Description of Artificial Sequence: Synthetic oligonucleotide
uggaggcagggcggggaag

SEQ ID NO: 123857 - RNA, 19 nt, Artificial Sequence
  Description of Artificial Sequence: Synthetic oligonucleotide
gggagugaccgccccuccu

SEQ ID NO: 123858 - RNA, 19 nt, Artificial Sequence
  Description of Artificial Sequence: Synthetic oligonucleotide
uggcugcacucuugccucc

SEQ ID NO: 123859 - RNA, 19 nt, Artificial Sequence
  Description of Artificial Sequence: Synthetic oligonucleotide
cggagcccucugauccugu

SEQ ID NO: 123860 - RNA, 19 nt, Artificial Sequence
  Description of Artificial Sequence: Synthetic oligonucleotide
uuugcagugaugcuccgag

SEQ ID NO: 123861 - RNA, 19 nt, Artificial Sequence
  Description of Artificial Sequence: Synthetic oligonucleotide
gggcaggcaccugcugcuc

SEQ ID NO: 123862 - RNA, 19 nt, Artificial Sequence
  Description of Artificial Sequence: Synthetic oligonucleotide
cuguaaugauucagccccu

SEQ ID NO: 123863 - RNA, 19 nt, Artificial Sequence
  Description of Artificial Sequence: Synthetic oligonucleotide
uuucagccgucgucgcguu

SEQ ID NO: 123864 - RNA, 19 nt, Artificial Sequence
  Description of Artificial Sequence: Synthetic oligonucleotide
uaacacaacaggaugcugu

SEQ ID NO: 123865 - RNA, 19 nt, Artificial Sequence
  Description of Artificial Sequence: Synthetic oligonucleotide
uugcuauugucacuacugc

SEQ ID NO: 123866 - RNA, 19 nt, Artificial Sequence
  Description of Artificial Sequence: Synthetic oligonucleotide
ccucuccugccgccgcugc

SEQ ID NO: 123867 - RNA, 19 nt, Artificial Sequence
  Description of Artificial Sequence: Synthetic oligonucleotide
cugcugccgccgccgccac

SEQ ID NO: 123868 - RNA, 19 nt, Artificial Sequence
  Description of Artificial Sequence: Synthetic oligonucleotide
ccgccgcugguccuccuuc

SEQ ID NO: 123869 - RNA, 19 nt, Artificial Sequence
  Description of Artificial Sequence: Synthetic oligonucleotide
cugcuuuuacuucuccugc

SEQ ID NO: 123870 - RNA, 19 nt, Artificial Sequence
  Description of Artificial Sequence: Synthetic oligonucleotide
caugacaguuguuuucuuc

SEQ ID NO: 123871 - RNA, 19 nt, Artificial Sequence
  Description of Artificial Sequence: Synthetic oligonucleotide
caucugagcagacaccagc

SEQ ID NO: 123872 - RNA, 19 nt, Artificial Sequence
  Description of Artificial Sequence: Synthetic oligonucleotide
cuucagaugcucgagguga

SEQ ID NO: 123873 - RNA, 19 nt, Artificial Sequence
  Description of Artificial Sequence: Synthetic oligonucleotide
agaaacaugccuuucaguu

SEQ ID NO: 123874 - RNA, 19 nt, Artificial Sequence
  Description of Artificial Sequence: Synthetic oligonucleotide
uugggcuacugguuuacuu

SEQ ID NO: 123875 - RNA, 19 nt, Artificial Sequence
  Description of Artificial Sequence: Synthetic oligonucleotide
uaauuaaucagccggcagc

SEQ ID NO: 123876 - RNA, 19 nt, Artificial Sequence
  Description of Artificial Sequence: Synthetic oligonucleotide
cuccgucgaucuauuuucg

SEQ ID NO: 123877 - RNA, 19 nt, Artificial Sequence
  Description of Artificial Sequence: Synthetic oligonucleotide
gucccuguccucuugacga

SEQ ID NO: 123878 - RNA, 19 nt, Artificial Sequence
  Description of Artificial Sequence: Synthetic oligonucleotide
agcccgggaugguuuggag

SEQ ID NO: 123879 - RNA, 19 nt, Artificial Sequence
  Description of Artificial Sequence: Synthetic oligonucleotide
guagcauuuaaaagaacua

SEQ ID NO: 123880 - RNA, 19 nt, Artificial Sequence
  Description of Artificial Sequence: Synthetic oligonucleotide
agaaaaguggcccagaaac

SEQ ID NO: 123881 - RNA, 19 nt, Artificial Sequence
  Description of Artificial Sequence: Synthetic oligonucleotide
cagcagcuuaaagaauuau

SEQ ID NO: 123882 - RNA, 19 nt, Artificial Sequence
  Description of Artificial Sequence: Synthetic oligonucleotide
uuacgauauacuuugauuu

SEQ ID NO: 123883 - RNA, 19 nt, Artificial Sequence
  Description of Artificial Sequence: Synthetic oligonucleotide
uuguaguugcuaggagcuu

SEQ ID NO: 123884 - RNA, 19 nt, Artificial Sequence
  Description of Artificial Sequence: Synthetic oligonucleotide
uuucuuccccccuugcauc

SEQ ID NO: 123885 - RNA, 19 nt, Artificial Sequence
  Description of Artificial Sequence: Synthetic oligonucleotide
cuuucugaacucuucuuga

SEQ ID NO: 123886 - RNA, 19 nt, Artificial Sequence
  Description of Artificial Sequence: Synthetic oligonucleotide
auuuuaauaauggccuugg

SEQ ID NO: 123887 - RNA, 19 nt, Artificial Sequence
  Description of Artificial Sequence: Synthetic oligonucleotide
gacuuggacgauuuaucga

SEQ ID NO: 123888 - RNA, 19 nt, Artificial Sequence
  Description of Artificial Sequence: Synthetic oligonucleotide
auuucccccuguaagaugc

SEQ ID NO: 123889 - RNA, 19 nt, Artificial Sequence
  Description of Artificial Sequence: Synthetic oligonucleotide
cuguaucauuugguugggg

SEQ ID NO: 123890 - RNA, 19 nt, Artificial Sequence
  Description of Artificial Sequence: Synthetic oligonucleotide
ggggccucugcgugguaau

SEQ ID NO: 123891 - RNA, 19 nt, Artificial Sequence
  Description of Artificial Sequence: Synthetic oligonucleotide
uggaccgugagagcggcca

SEQ ID NO: 123892 - RNA, 19 nt, Artificial Sequence
  Description of Artificial Sequence: Synthetic oligonucleotide
aggccuucuucuggaggug

SEQ ID NO: 123893 - RNA, 19 nt, Artificial Sequence
  Description of Artificial Sequence: Synthetic oligonucleotide
gagccgauggagauuuauu

SEQ ID NO: 123894 - RNA, 19 nt, Artificial Sequence
  Description of Artificial Sequence: Synthetic oligonucleotide
uccccagacaugucugagg

SEQ ID NO: 123895 - RNA, 19 nt, Artificial Sequence
  Description of Artificial Sequence: Synthetic oligonucleotide
gucgccgccgagagguccu

SEQ ID NO: 123896 - RNA, 19 nt, Artificial Sequence
  Description of Artificial Sequence: Synthetic oligonucleotide
uccagccccuccacucagc

SEQ ID NO: 123897 - RNA, 19 nt, Artificial Sequence
  Description of Artificial Sequence: Synthetic oligonucleotide
cugagugcagacccaucuc

SEQ ID NO: 123898 - RNA, 19 nt, Artificial Sequence
  Description of Artificial Sequence: Synthetic oligonucleotide
cuugaugggcuuccggcag

SEQ ID NO: 123899 - RNA, 19 nt, Artificial Sequence
  Description of Artificial Sequence: Synthetic oligonucleotide
gcagaagacaugccagagc

SEQ ID NO: 123900 - RNA, 19 nt, Artificial Sequence
  Description of Artificial Sequence: Synthetic oligonucleotide
ccccagacugaagauggga

SEQ ID NO: 123901 - RNA, 19 nt, Artificial Sequence
  Description of Artificial Sequence: Synthetic oligonucleotide
agaaccccuggacucgugg

SEQ ID NO: 123902 - RNA, 19 nt, Artificial Sequence
  Description of Artificial Sequence: Synthetic oligonucleotide
ggccuggccgugcccugcu

SEQ ID NO: 123903 - RNA, 19 nt, Artificial Sequence
  Description of Artificial Sequence: Synthetic oligonucleotide
ugugcgugccuagaagcug

SEQ ID NO: 123904 - RNA, 19 nt, Artificial Sequence
  Description of Artificial Sequence: Synthetic oligonucleotide
gagcgccugagagguugcc

SEQ ID NO: 123905 - RNA, 19 nt, Artificial Sequence
  Description of Artificial Sequence: Synthetic oligonucleotide
cucaacucagagaaaaucu

SEQ ID NO: 123906 - RNA, 19 nt, Artificial Sequence
  Description of Artificial Sequence: Synthetic oligonucleotide
ugcauuguccccauccugg

SEQ ID NO: 123907 - RNA, 19 nt, Artificial Sequence
  Description of Artificial Sequence: Synthetic oligonucleotide
gcuugccuggucagccucu

SEQ ID NO: 123908 - RNA, 19 nt, Artificial Sequence
  Description of Artificial Sequence: Synthetic oligonucleotide
ugccucugcaucgccggcc

SEQ ID NO: 123909 - RNA, 19 nt, Artificial Sequence
  Description of Artificial Sequence: Synthetic oligonucleotide
cucaaguggguauuugugg

SEQ ID NO: 123910 - RNA, 19 nt, Artificial Sequence
  Description of Artificial Sequence: Synthetic oligonucleotide
gacaagaucuuugaauaug

SEQ ID NO: 123911 - RNA, 19 nt, Artificial Sequence
  Description of Artificial Sequence: Synthetic oligonucleotide
gacucuccuacucaccuug

SEQ ID NO: 123912 - RNA, 19 nt, Artificial Sequence
  Description of Artificial Sequence: Synthetic oligonucleotide
gacccugggggguuaggcc

SEQ ID NO: 123913 - RNA, 19 nt, Artificial Sequence
  Description of Artificial Sequence: Synthetic oligonucleotide
caggacccuauuauuucuc

SEQ ID NO: 123914 - RNA, 19 nt, Artificial Sequence
  Description of Artificial Sequence: Synthetic oligonucleotide
cuggacgcaacugcugccu

SEQ ID NO: 123915 - RNA, 19 nt, Artificial Sequence
  Description of Artificial Sequence: Synthetic oligonucleotide
ucagcugugugggugucgu

SEQ ID NO: 123916 - RNA, 19 nt, Artificial Sequence
  Description of Artificial Sequence: Synthetic oligonucleotide
ucugaggcauacacuucac

SEQ ID NO: 123917 - RNA, 19 nt, Artificial Sequence
  Description of Artificial Sequence: Synthetic oligonucleotide
ccugucucuagggcucaau

SEQ ID NO: 123918 - RNA, 19 nt, Artificial Sequence
  Description of Artificial Sequence: Synthetic oligonucleotide
ucugaaagugagguucaag

SEQ ID NO: 123919 - RNA, 19 nt, Artificial Sequence
  Description of Artificial Sequence: Synthetic oligonucleotide
guuacagugcaaggugaca

SEQ ID NO: 123920 - RNA, 19 nt, Artificial Sequence
  Description of Artificial Sequence: Synthetic oligonucleotide
aaggcuguugucuccuuug

SEQ ID NO: 123921 - RNA, 19 nt, Artificial Sequence
  Description of Artificial Sequence: Synthetic oligonucleotide
gaaccaucagcggcaccga

SEQ ID NO: 123922 - RNA, 19 nt, Artificial Sequence
  Description of Artificial Sequence: Synthetic oligonucleotide
acaccgaagaaucguauuu

SEQ ID NO: 123923 - RNA, 19 nt, Artificial Sequence
  Description of Artificial Sequence: Synthetic oligonucleotide
uuugccuuuucuuucuugc

SEQ ID NO: 123924 - RNA, 19 nt, Artificial Sequence
  Description of Artificial Sequence: Synthetic oligonucleotide
ccguccacugcgccauccu

SEQ ID NO: 123925 - RNA, 19 nt, Artificial Sequence
  Description of Artificial Sequence: Synthetic oligonucleotide
uucccuucacccacccgga

SEQ ID NO: 123926 - RNA, 19 nt, Artificial Sequence
  Description of Artificial Sequence: Synthetic oligonucleotide
aacccugaggugagaacgc

SEQ ID NO: 123927 - RNA, 19 nt, Artificial Sequence
  Description of Artificial Sequence: Synthetic oligonucleotide
cccaagucagcaacucagc

SEQ ID NO: 123928 - RNA, 19 nt, Artificial Sequence
  Description of Artificial Sequence: Synthetic oligonucleotide
ccacaaacaacagaaacua

SEQ ID NO: 123929 - RNA, 19 nt, Artificial Sequence
  Description of Artificial Sequence: Synthetic oligonucleotide
aaucuccaaacugcuccua

SEQ ID NO: 123930 - RNA, 19 nt, Artificial Sequence
  Description of Artificial Sequence: Synthetic oligonucleotide
aaacuuucuacaucuacau

SEQ ID NO: 123931 - RNA, 19 nt, Artificial Sequence
  Description of Artificial Sequence: Synthetic oligonucleotide
uccaccacugggacaagcc

SEQ ID NO: 123932 - RNA, 19 nt, Artificial Sequence
  Description of Artificial Sequence: Synthetic oligonucleotide
caucuuguaaaaugugcgg

SEQ ID NO: 123933 - RNA, 19 nt, Artificial Sequence
  Description of Artificial Sequence: Synthetic oligonucleotide
gagaaggagaaaacuuucu

SEQ ID NO: 123934 - RNA, 19 nt, Artificial Sequence
  Description of Artificial Sequence: Synthetic oligonucleotide
ugugugaauggaggggagu

SEQ ID NO: 123935 - RNA, 19 nt, Artificial Sequence
  Description of Artificial Sequence: Synthetic oligonucleotide
ugcuucauggugaaagacc

SEQ ID NO: 123936 - RNA, 19 nt, Artificial Sequence
  Description of Artificial Sequence: Synthetic oligonucleotide
cuuucaaaccccucgagau

SEQ ID NO: 123937 - RNA, 19 nt, Artificial Sequence
  Description of Artificial Sequence: Synthetic oligonucleotide
uacuugugcaagugcccaa

SEQ ID NO: 123938 - RNA, 19 nt, Artificial Sequence
  Description of Artificial Sequence: Synthetic oligonucleotide
aaugaguuuacuggugauc

SEQ ID NO: 123939 - RNA, 19 nt, Artificial Sequence
  Description of Artificial Sequence: Synthetic oligonucleotide
cgcugccaaaacuacguaa

SEQ ID NO: 123940 - RNA, 19 nt, Artificial Sequence
  Description of Artificial Sequence: Synthetic oligonucleotide
auggccagcuucuacagua

SEQ ID NO: 123941 - RNA, 19 nt, Artificial Sequence
  Description of Artificial Sequence: Synthetic oligonucleotide
acguccacucccuuucugu

SEQ ID NO: 123942 - RNA, 19 nt, Artificial Sequence
  Description of Artificial Sequence: Synthetic oligonucleotide
ucucugccugaauaggagc

SEQ ID NO: 123943 - RNA, 19 nt, Artificial Sequence
  Description of Artificial Sequence: Synthetic oligonucleotide
caugcucaguuggugcugc

SEQ ID NO: 123944 - RNA, 19 nt, Artificial Sequence
  Description of Artificial Sequence: Synthetic oligonucleotide
cuuucuuguugcugcaucu

SEQ ID NO: 123945 - RNA, 19 nt, Artificial Sequence
  Description of Artificial Sequence: Synthetic oligonucleotide
uccccucagauuccaccua

SEQ ID NO: 123946 - RNA, 19 nt, Artificial Sequence
  Description of Artificial Sequence: Synthetic oligonucleotide
agagcuagaugugucuuac

SEQ ID NO: 123947 - RNA, 19 nt, Artificial Sequence
  Description of Artificial Sequence: Synthetic oligonucleotide
ccagaucuaauauugacug

SEQ ID NO: 123948 - RNA, 19 nt, Artificial Sequence
  Description of Artificial Sequence: Synthetic oligonucleotide
gccucugccugucgcauga

SEQ ID NO: 123949 - RNA, 19 nt, Artificial Sequence
  Description of Artificial Sequence: Synthetic oligonucleotide
agaacauuaacaaaagcaa

SEQ ID NO: 123950 - RNA, 19 nt, Artificial Sequence
  Description of Artificial Sequence: Synthetic oligonucleotide
auuguauuacuuccucugu

SEQ ID NO: 123951 - RNA, 19 nt, Artificial Sequence
  Description of Artificial Sequence: Synthetic oligonucleotide
uucgcgacuaguuggcucu

SEQ ID NO: 123952 - RNA, 19 nt, Artificial Sequence
  Description of Artificial Sequence: Synthetic oligonucleotide
ugagauacuaauaggugug

SEQ ID NO: 123953 - RNA, 19 nt, Artificial Sequence
  Description of Artificial Sequence: Synthetic oligonucleotide
gugaggcuccggauguuuc

SEQ ID NO: 123954 - RNA, 19 nt, Artificial Sequence
  Description of Artificial Sequence: Synthetic oligonucleotide
cuggaauugauauugaaug

SEQ ID NO: 123955 - RNA, 19 nt, Artificial Sequence
  Description of Artificial Sequence: Synthetic oligonucleotide
gaugugauacaaauugaua

SEQ ID NO: 123956 - RNA, 19 nt, Artificial Sequence
  Description of Artificial Sequence: Synthetic oligonucleotide
agucaauaucaagcaguga

SEQ ID NO: 123957 - RNA, 19 nt, Artificial Sequence
  Description of Artificial Sequence: Synthetic oligonucleotide
aaauaugauaauaaaggca

SEQ ID NO: 123958 - RNA, 19 nt, Artificial Sequence
  Description of Artificial Sequence: Synthetic oligonucleotide
auuucaaagucucacuuuu

SEQ ID NO: 123959 - RNA, 19 nt, Artificial Sequence
  Description of Artificial Sequence: Synthetic oligonucleotide
uauugauaaaauaaaaauc

SEQ ID NO: 123960 - RNA, 19 nt, Artificial Sequence
  Description of Artificial Sequence: Synthetic oligonucleotide
cauucuacugaacagucca

SEQ ID NO: 123961 - RNA, 19 nt, Artificial Sequence
  Description of Artificial Sequence: Synthetic oligonucleotide
aucuucuuuauacaaugac

SEQ ID NO: 123962 - RNA, 19 nt, Artificial Sequence
  Description of Artificial Sequence: Synthetic oligonucleotide
ccacauccugaaaagggug

SEQ ID NO: 123963 - RNA, 19 nt, Artificial Sequence
  Description of Artificial Sequence: Synthetic oligonucleotide
guugcuaagcuguaaccga

SEQ ID NO: 123964 - RNA, 19 nt, Artificial Sequence
  Description of Artificial Sequence: Synthetic oligonucleotide
auaugcacuugaaaugaug

SEQ ID NO: 123965 - RNA, 19 nt, Artificial Sequence
  Description of Artificial Sequence: Synthetic oligonucleotide
gguaaguuaauuuugauuc

SEQ ID NO: 123966 - RNA, 19 nt, Artificial Sequence
  Description of Artificial Sequence: Synthetic oligonucleotide
cagaauguguuauuuguca

SEQ ID NO: 123967 - RNA, 19 nt, Artificial Sequence
  Description of Artificial Sequence: Synthetic oligonucleotide
acaaauaaacauaauaaaa

SEQ ID NO: 123968 - RNA, 19 nt, Artificial Sequence
  Description of Artificial Sequence: Synthetic oligonucleotide
aggaguucagauguuuuuc

SEQ ID NO: 123969 - RNA, 19 nt, Artificial Sequence
  Description of Artificial Sequence: Synthetic oligonucleotide
uuuuucuucauuaaccaaa

SEQ ID NO: 123970 - RNA, 19 nt, Artificial Sequence
  Description of Artificial Sequence: Synthetic oligonucleotide
uugugcaagugccaaccug

SEQ ID NO: 123971 - RNA, 19 nt, Artificial Sequence
  Description of Artificial Sequence: Synthetic oligonucleotide
ggauucacuggagcaagau

SEQ ID NO: 123972 - RNA, 19 nt, Artificial Sequence
  Description of Artificial Sequence: Synthetic oligonucleotide
uguacugagaaugugccca

SEQ ID NO: 123973 - RNA, 19 nt, Artificial Sequence
  Description of Artificial Sequence: Synthetic oligonucleotide
augaaaguccaaaaccaag

SEQ ID NO: 123974 - RNA, 19 nt, Artificial Sequence
  Description of Artificial Sequence: Synthetic oligonucleotide
gaaaaggcggaggagcugu

SEQ ID NO: 123975 - RNA, 19 nt, Artificial Sequence
  Description of Artificial Sequence: Synthetic oligonucleotide
uaccagaagagagugcuga

SEQ ID NO: 123976 - RNA, 19 nt, Artificial Sequence
  Description of Artificial Sequence: Synthetic oligonucleotide
accauaaccggcaucugca

SEQ ID NO: 123977 - RNA, 19 nt, Artificial Sequence
  Description of Artificial Sequence: Synthetic oligonucleotide
aucgcccuccuuguggucg

SEQ ID NO: 123978 - RNA, 19 nt, Artificial Sequence
  Description of Artificial Sequence: Synthetic oligonucleotide
ggcaucauguguguggugg

SEQ ID NO: 123979 - RNA, 19 nt, Artificial Sequence
  Description of Artificial Sequence: Synthetic oligonucleotide
gccuacugcaaaaccaaga

SEQ ID NO: 123980 - RNA, 19 nt, Artificial Sequence
  Description of Artificial Sequence: Synthetic oligonucleotide
aaacagcggaaaaagcugc

SEQ ID NO: 123981 - RNA, 19 nt, Artificial Sequence
  Description of Artificial Sequence: Synthetic oligonucleotide
caugaccgucuucggcaga

SEQ ID NO: 123982 - RNA, 19 nt, Artificial Sequence
  Description of Artificial Sequence: Synthetic oligonucleotide
agccuucggucugaacgaa

SEQ ID NO: 123983 - RNA, 19 nt, Artificial Sequence
  Description of Artificial Sequence: Synthetic oligonucleotide
aacaauaugaugaacauug

SEQ ID NO: 123984 - RNA, 19 nt, Artificial Sequence
  Description of Artificial Sequence: Synthetic oligonucleotide
gccaaugggccucaccauc

SEQ ID NO: 123985 - RNA, 19 nt, Artificial Sequence
  Description of Artificial Sequence: Synthetic oligonucleotide
ccuaacccaccccccgaga

SEQ ID NO: 123986 - RNA, 19 nt, Artificial Sequence
  Description of Artificial Sequence: Synthetic oligonucleotide
aauguccagcuggugaauc

SEQ ID NO: 123987 - RNA, 19 nt, Artificial Sequence
  Description of Artificial Sequence: Synthetic oligonucleotide
caauacguaucuaaaaacg

SEQ ID NO: 123988 - RNA, 19 nt, Artificial Sequence
  Description of Artificial Sequence: Synthetic oligonucleotide
gucaucuccagugagcaua

SEQ ID NO: 123989 - RNA, 19 nt, Artificial Sequence
  Description of Artificial Sequence: Synthetic oligonucleotide
auuguugagagagaagcag

SEQ ID NO: 123990 - RNA, 19 nt, Artificial Sequence
  Description of Artificial Sequence: Synthetic oligonucleotide
gagacauccuuuuccacca

SEQ ID NO: 123991 - RNA, 19 nt, Artificial Sequence
  Description of Artificial Sequence: Synthetic oligonucleotide
agucacuauacuuccacag

SEQ ID NO: 123992 - RNA, 19 nt, Artificial Sequence
  Description of Artificial Sequence: Synthetic oligonucleotide
gcccaucacuccacuacug

SEQ ID NO: 123993 - RNA, 19 nt, Artificial Sequence
  Description of Artificial Sequence: Synthetic oligonucleotide
gucacccagacuccuagcc

SEQ ID NO: 123994 - RNA, 19 nt, Artificial Sequence
  Description of Artificial Sequence: Synthetic oligonucleotide
cacagcuggagcaacggac

SEQ ID NO: 123995 - RNA, 19 nt, Artificial Sequence
  Description of Artificial Sequence: Synthetic oligonucleotide
cacacugaaagcauccuuu

SEQ ID NO: 123996 - RNA, 19 nt, Artificial Sequence
  Description of Artificial Sequence: Synthetic oligonucleotide
uccgaaagccacucuguaa

SEQ ID NO: 123997 - RNA, 19 nt, Artificial Sequence
  Description of Artificial Sequence: Synthetic oligonucleotide
aucgugaugucauccguag

SEQ ID NO: 123998 - RNA, 19 nt, Artificial Sequence
  Description of Artificial Sequence: Synthetic oligonucleotide
gaaaacaguaggcacagca

SEQ ID NO: 123999 - RNA, 19 nt, Artificial Sequence
  Description of Artificial Sequence: Synthetic oligonucleotide
agcccaacugggggcccaa

SEQ ID NO: 124000 - RNA, 19 nt, Artificial Sequence
  Description of Artificial Sequence: Synthetic oligonucleotide
agaggacgucuuaauggca

SEQ ID NO: 124001 - RNA, 19 nt, Artificial Sequence
  Description of Artificial Sequence: Synthetic oligonucleotide
acaggaggcccucgugaau

SEQ ID NO: 124002 - RNA, 19 nt, Artificial Sequence
  Description of Artificial Sequence: Synthetic oligonucleotide
uguaacagcuuccucaggc

SEQ ID NO: 124003 - RNA, 19 nt, Artificial Sequence
  Description of Artificial Sequence: Synthetic oligonucleotide
caugccagagaaaccccug

SEQ ID NO: 124004 - RNA, 19 nt, Artificial Sequence
  Description of Artificial Sequence: Synthetic oligonucleotide
gauuccuaccgagacucuc

SEQ ID NO: 124005 - RNA, 19 nt, Artificial Sequence
  Description of Artificial Sequence: Synthetic oligonucleotide
ccucauagugaaagacaua

SEQ ID NO: 124006 - RNA, 19 nt, Artificial Sequence
  Description of Artificial Sequence: Synthetic oligonucleotide
aaccuuauagcugagcuaa

SEQ ID NO: 124007 - RNA, 19 nt, Artificial Sequence
  Description of Artificial Sequence: Synthetic oligonucleotide
aggagaaacaaggcacaca

SEQ ID NO: 124008 - RNA, 19 nt, Artificial Sequence
  Description of Artificial Sequence: Synthetic oligonucleotide
agauccaaaugcaugcaga

SEQ ID NO: 124009 - RNA, 19 nt, Artificial Sequence
  Description of Artificial Sequence: Synthetic oligonucleotide
auccagcuaucagcaacuc

SEQ ID NO: 124010 - RNA, 19 nt, Artificial Sequence
  Description of Artificial Sequence: Synthetic oligonucleotide
caucuuagaucuucuucca

SEQ ID NO: 124011 - RNA, 19 nt, Artificial Sequence
  Description of Artificial Sequence: Synthetic oligonucleotide
auuccccauuugggcuuca

SEQ ID NO: 124012 - RNA, 19 nt, Artificial Sequence
  Description of Artificial Sequence: Synthetic oligonucleotide
auucucuaagaccccuugg

SEQ ID NO: 124013 - RNA, 19 nt, Artificial Sequence
  Description of Artificial Sequence: Synthetic oligonucleotide
gccuuuaggaagguaugug

SEQ ID NO: 124014 - RNA, 19 nt, Artificial Sequence
  Description of Artificial Sequence: Synthetic oligonucleotide
gucagccaugaccaccccg

SEQ ID NO: 124015 - RNA, 19 nt, Artificial Sequence
  Description of Artificial Sequence: Synthetic oligonucleotide
ggcucguaugucaccugua

SEQ ID NO: 124016 - RNA, 19 nt, Artificial Sequence
  Description of Artificial Sequence: Synthetic oligonucleotide
agauuuccacacgccaagc

SEQ ID NO: 124017 - RNA, 19 nt, Artificial Sequence
  Description of Artificial Sequence: Synthetic oligonucleotide
cucccccaaaucgcccccu

SEQ ID NO: 124018 - RNA, 19 nt, Artificial Sequence
  Description of Artificial Sequence: Synthetic oligonucleotide
uucggaaaugucuccaccc

SEQ ID NO: 124019 - RNA, 19 nt, Artificial Sequence
  Description of Artificial Sequence: Synthetic oligonucleotide
cguguccagcaugacggug

SEQ ID NO: 124020 - RNA, 19 nt, Artificial Sequence
  Description of Artificial Sequence: Synthetic oligonucleotide
guccaugccuuccauggcg

SEQ ID NO: 124021 - RNA, 19 nt, Artificial Sequence
  Description of Artificial Sequence: Synthetic oligonucleotide
ggucagccccuucauggaa

SEQ ID NO: 124022 - RNA, 19 nt, Artificial Sequence
  Description of Artificial Sequence: Synthetic oligonucleotide
agaagagagaccucuacuu

SEQ ID NO: 124023 - RNA, 19 nt, Artificial Sequence
  Description of Artificial Sequence: Synthetic oligonucleotide
ucucgugacaccaccaagg

SEQ ID NO: 124024 - RNA, 19 nt, Artificial Sequence
  Description of Artificial Sequence: Synthetic oligonucleotide
gcugcgggagaagaaguuu

SEQ ID NO: 124025 - RNA, 19 nt, Artificial Sequence
  Description of Artificial Sequence: Synthetic oligonucleotide
ugaccaucacccucagcag

SEQ ID NO: 124026 - RNA, 19 nt, Artificial Sequence
  Description of Artificial Sequence: Synthetic oligonucleotide
guucagcuccuuccaccac

SEQ ID NO: 124027 - RNA, 19 nt, Artificial Sequence
  Description of Artificial Sequence: Synthetic oligonucleotide
caaccccgcgcaugacagu

SEQ ID NO: 124028 - RNA, 19 nt, Artificial Sequence
  Description of Artificial Sequence: Synthetic oligonucleotide
uaacagccucccugcuagc

SEQ ID NO: 124029 - RNA, 19 nt, Artificial Sequence
  Description of Artificial Sequence: Synthetic oligonucleotide
ccccuugaggauaguggag

SEQ ID NO: 124030 - RNA, 19 nt, Artificial Sequence
  Description of Artificial Sequence: Synthetic oligonucleotide
ggaugaggaguaugaaacg

SEQ ID NO: 124031 - RNA, 19 nt, Artificial Sequence
  Description of Artificial Sequence: Synthetic oligonucleotide
gacccaagaguacgagcca

SEQ ID NO: 124032 - RNA, 19 nt, Artificial Sequence
  Description of Artificial Sequence: Synthetic oligonucleotide
agcccaagagccuguuaag

SEQ ID NO: 124033 - RNA, 19 nt, Artificial Sequence
  Description of Artificial Sequence: Synthetic oligonucleotide
gaaacucgccaauagccgg

SEQ ID NO: 124034 - RNA, 19 nt, Artificial Sequence
  Description of Artificial Sequence: Synthetic oligonucleotide
gcgggccaaaagaaccaag

SEQ ID NO: 124035 - RNA, 19 nt, Artificial Sequence
  Description of Artificial Sequence: Synthetic oligonucleotide
gcccaauggccacauugcu

SEQ ID NO: 124036 - RNA, 19 nt, Artificial Sequence
  Description of Artificial Sequence: Synthetic oligonucleotide
uaacagauuggaaguggac

SEQ ID NO: 124037 - RNA, 19 nt, Artificial Sequence
  Description of Artificial Sequence: Synthetic oligonucleotide
cagcaacacaagcucccag

SEQ ID NO: 124038 - RNA, 19 nt, Artificial Sequence
  Description of Artificial Sequence: Synthetic oligonucleotide
gagcaguaacucagagagu

SEQ ID NO: 124039 - RNA, 19 nt, Artificial Sequence
  Description of Artificial Sequence: Synthetic oligonucleotide
ugaaacagaagaugaaaga

SEQ ID NO: 124040 - RNA, 19 nt, Artificial Sequence
  Description of Artificial Sequence: Synthetic oligonucleotide
aguaggugaagauacgccu

SEQ ID NO: 124041 - RNA, 19 nt, Artificial Sequence
  Description of Artificial Sequence: Synthetic oligonucleotide
uuuccugggcauacagaac

SEQ ID NO: 124042 - RNA, 19 nt, Artificial Sequence
  Description of Artificial Sequence: Synthetic oligonucleotide
cccccuggcagccagucuu

SEQ ID NO: 124043 - RNA, 19 nt, Artificial Sequence
  Description of Artificial Sequence: Synthetic oligonucleotide
ugaggcaacaccugccuuc

SEQ ID NO: 124044 - RNA, 19 nt, Artificial Sequence
  Description of Artificial Sequence: Synthetic oligonucleotide
ccgccuggcugacagcagg

SEQ ID NO: 124045 - RNA, 19 nt, Artificial Sequence
  Description of Artificial Sequence: Synthetic oligonucleotide
gacuaacccagcaggccgc

SEQ ID NO: 124046 - RNA, 19 nt, Artificial Sequence
  Description of Artificial Sequence: Synthetic oligonucleotide
cuucucgacacaggaagaa

SEQ ID NO: 124047 - RNA, 19 nt, Artificial Sequence
  Description of Artificial Sequence: Synthetic oligonucleotide
aauccaggccaggcugucu

SEQ ID NO: 124048 - RNA, 19 nt, Artificial Sequence
  Description of Artificial Sequence: Synthetic oligonucleotide
uaguguaauugcuaaccaa

SEQ ID NO: 124049 - RNA, 19 nt, Artificial Sequence
  Description of Artificial Sequence: Synthetic oligonucleotide
agacccuauugcuguauaa

SEQ ID NO: 124050 - RNA, 19 nt, Artificial Sequence
  Description of Artificial Sequence: Synthetic oligonucleotide
aaaccuaaauaaacacaua

SEQ ID NO: 124051 - RNA, 19 nt, Artificial Sequence
  Description of Artificial Sequence: Synthetic oligonucleotide
agauucaccuguaaaacuu

SEQ ID NO: 124052 - RNA, 19 nt, Artificial Sequence
  Description of Artificial Sequence: Synthetic oligonucleotide
uuauuuuauauaauaaagu

SEQ ID NO: 124053 - RNA, 19 nt, Artificial Sequence
  Description of Artificial Sequence: Synthetic oligonucleotide
uauuccaccuuaaauuaaa

SEQ ID NO: 124054 - RNA, 19 nt, Artificial Sequence
  Description of Artificial Sequence: Synthetic oligonucleotide
acaauuuauuuuauuuuag

SEQ ID NO: 124055 - RNA, 19 nt, Artificial Sequence
  Description of Artificial Sequence: Synthetic oligonucleotide
gcaguucugcaaauagaaa

SEQ ID NO: 124056 - RNA, 19 nt, Artificial Sequence
  Description of Artificial Sequence: Synthetic oligonucleotide
aacaggaaaaaaacuuuua

SEQ ID NO: 124057 - RNA, 19 nt, Artificial Sequence
  Description of Artificial Sequence: Synthetic oligonucleotide
auaaauuaaauauauguau

SEQ ID NO: 124058 - RNA, 19 nt, Artificial Sequence
  Description of Artificial Sequence: Synthetic oligonucleotide
ccucauagugaaagguaug

SEQ ID NO: 124059 - RNA, 19 nt, Artificial Sequence
  Description of Artificial Sequence: Synthetic oligonucleotide
gugucagccaugaccaccc

SEQ ID NO: 124060 - RNA, 19 nt, Artificial Sequence
  Description of Artificial Sequence: Synthetic oligonucleotide
ccggcucguaugucaccug

SEQ ID NO: 124061 - RNA, 19 nt, Artificial Sequence
  Description of Artificial Sequence: Synthetic oligonucleotide
guagauuuccacacgccaa

SEQ ID NO: 124062 - RNA, 19 nt, Artificial Sequence
  Description of Artificial Sequence: Synthetic oligonucleotide
agcucccccaaaucgcccc

SEQ ID NO: 124063 - RNA, 19 nt, Artificial Sequence
  Description of Artificial Sequence: Synthetic oligonucleotide
ccuucggaaaugucuccac

SEQ ID NO: 124064 - RNA, 19 nt, Artificial Sequence
  Description of Artificial Sequence: Synthetic oligonucleotide
cccguguccagcaugacgg

SEQ ID NO: 124065 - RNA, 19 nt, Artificial Sequence
  Description of Artificial Sequence: Synthetic oligonucleotide
guguccaugccuuccaugg

SEQ ID NO: 124066 - RNA, 19 nt, Artificial Sequence
  Description of Artificial Sequence: Synthetic oligonucleotide
gcggucagccccuucaugg

SEQ ID NO: 124067 - RNA, 19 nt, Artificial Sequence
  Description of Artificial Sequence: Synthetic oligonucleotide
gaagaagagagaccucuac

SEQ ID NO: 124068 - RNA, 19 nt, Artificial Sequence
  Description of Artificial Sequence: Synthetic oligonucleotide
cuucucgugacaccaccaa

SEQ ID NO: 124069 - RNA, 19 nt, Artificial Sequence
  Description of Artificial Sequence: Synthetic oligonucleotide
aggcugcgggagaagaagu

SEQ ID NO: 124070 - RNA, 19 nt, Artificial Sequence
  Description of Artificial Sequence: Synthetic oligonucleotide
uuugaccaucacccucagc

SEQ ID NO: 124071 - RNA, 19 nt, Artificial Sequence
  Description of Artificial Sequence: Synthetic oligonucleotide
caguucagcuccuuccacc

SEQ ID NO: 124072 - RNA, 19 nt, Artificial Sequence
  Description of Artificial Sequence: Synthetic oligonucleotide
cacaaccccgcgcaugaca

SEQ ID NO: 124073 - RNA, 19 nt, Artificial Sequence
  Description of Artificial Sequence: Synthetic oligonucleotide
aguaacagccucccugcua

SEQ ID NO: 124074 - RNA, 19 nt, Artificial Sequence
  Description of Artificial Sequence: Synthetic oligonucleotide
agccccuugaggauagugg

SEQ ID NO: 124075 - RNA, 19 nt, Artificial Sequence
  Description of Artificial Sequence: Synthetic oligonucleotide
gaggaugaggaguaugaaa

SEQ ID NO: 124076 - RNA, 19 nt, Artificial Sequence
  Description of Artificial Sequence: Synthetic oligonucleotide
acgacccaagaguacgagc

SEQ ID NO: 124077 - RNA, 19 nt, Artificial Sequence
  Description of Artificial Sequence: Synthetic oligonucleotide
ccagcccaagagccuguua

SEQ ID NO: 124078 - RNA, 19 nt, Artificial Sequence
  Description of Artificial Sequence: Synthetic oligonucleotide
aagaaacucgccaauagcc

SEQ ID NO: 124079 - RNA, 19 nt, Artificial Sequence
  Description of Artificial Sequence: Synthetic oligonucleotide
cggcgggccaaaagaacca

SEQ ID NO: 124080 - RNA, 19 nt, Artificial Sequence
  Description of Artificial Sequence: Synthetic oligonucleotide
aagcccaauggccacauug

SEQ ID NO: 124081 - RNA, 19 nt, Artificial Sequence
  Description of Artificial Sequence: Synthetic oligonucleotide
gcuaacagauuggaagugg

SEQ ID NO: 124082 - RNA, 19 nt, Artificial Sequence
  Description of Artificial Sequence: Synthetic oligonucleotide
gacagcaacacaagcuccc

SEQ ID NO: 124083 - RNA, 19 nt, Artificial Sequence
  Description of Artificial Sequence: Synthetic oligonucleotide
cagagcaguaacucagaga

SEQ ID NO: 124084 - RNA, 19 nt, Artificial Sequence
  Description of Artificial Sequence: Synthetic oligonucleotide
agugaaacagaagaugaaa

SEQ ID NO: 124085 - RNA, 19 nt, Artificial Sequence
  Description of Artificial Sequence: Synthetic oligonucleotide
agaguaggugaagauacgc

SEQ ID NO: 124086 - RNA, 19 nt, Artificial Sequence
  Description of Artificial Sequence: Synthetic oligonucleotide
ccuuuccugggcauacaga

SEQ ID NO: 124087 - RNA, 19 nt, Artificial Sequence
  Description of Artificial Sequence: Synthetic oligonucleotide
aacccccuggcagccaguc

SEQ ID NO: 124088 - RNA, 19 nt, Artificial Sequence
  Description of Artificial Sequence: Synthetic oligonucleotide
cuugaggcaacaccugccu

SEQ ID NO: 124089 - RNA, 19 nt, Artificial Sequence
  Description of Artificial Sequence: Synthetic oligonucleotide
uuccgccuggcugacagca

SEQ ID NO: 124090 - RNA, 19 nt, Artificial Sequence
  Description of Artificial Sequence: Synthetic oligonucleotide
aggacuaacccagcaggcc

SEQ ID NO: 124091 - RNA, 19 nt, Artificial Sequence
  Description of Artificial Sequence: Synthetic oligonucleotide
cgcuucucgacacaggaag

SEQ ID NO: 124092 - RNA, 19 nt, Artificial Sequence
  Description of Artificial Sequence: Synthetic oligonucleotide
gaaauccaggccaggcugu

SEQ ID NO: 124093 - RNA, 19 nt, Artificial Sequence
  Description of Artificial Sequence: Synthetic oligonucleotide
ucuaguguaauugcuaacc

SEQ ID NO: 124094 - RNA, 19 nt, Artificial Sequence
  Description of Artificial Sequence: Synthetic oligonucleotide
caagacccuauugcuguau

SEQ ID NO: 124095 - RNA, 19 nt, Artificial Sequence
  Description of Artificial Sequence: Synthetic oligonucleotide
uaaaaccuaaauaaacaca

SEQ ID NO: 124096 - RNA, 19 nt, Artificial Sequence
  Description of Artificial Sequence: Synthetic oligonucleotide
auagauucaccuguaaaac

SEQ ID NO: 124097 - RNA, 19 nt, Artificial Sequence
  Description of Artificial Sequence: Synthetic oligonucleotide
cuuuauuuuauauaauaaa

SEQ ID NO: 124098 - RNA, 19 nt, Artificial Sequence
  Description of Artificial Sequence: Synthetic oligonucleotide
aguauuccaccuuaaauua

SEQ ID NO: 124099 - RNA, 19 nt, Artificial Sequence
  Description of Artificial Sequence: Synthetic oligonucleotide
aaacaauuuauuuuauuuu

SEQ ID NO: 124100 - RNA, 19 nt, Artificial Sequence
  Description of Artificial Sequence: Synthetic oligonucleotide
uagcaguucugcaaauaga

SEQ ID NO: 124101 - RNA, 19 nt, Artificial Sequence
  Description of Artificial Sequence: Synthetic oligonucleotide
aaaacaggaaaaaaacuuu

SEQ ID NO: 124102 - RNA, 19 nt, Artificial Sequence
  Description of Artificial Sequence: Synthetic oligonucleotide
uuauaaauuaaauauaugu

SEQ ID NO: 124103 - RNA, 19 nt, Artificial Sequence
  Description of Artificial Sequence: Synthetic oligonucleotide
uugugcaaguaagaaaaga

SEQ ID NO: 124104 - RNA, 19 nt, Artificial Sequence
  Description of Artificial Sequence: Synthetic oligonucleotide
aaauccugugugucgcuua

SEQ ID NO: 124105 - RNA, 19 nt, Artificial Sequence
  Description of Artificial Sequence: Synthetic oligonucleotide
augucuauaacuccuuguu

SEQ ID NO: 124106 - RNA, 19 nt, Artificial Sequence
  Description of Artificial Sequence: Synthetic oligonucleotide
uucagaugauucuaugucu

SEQ ID NO: 124107 - RNA, 19 nt, Artificial Sequence
  Description of Artificial Sequence: Synthetic oligonucleotide
ucaugauguauuguugcuu

SEQ ID NO: 124108 - RNA, 19 nt, Artificial Sequence
  Description of Artificial Sequence: Synthetic oligonucleotide
uuuuuuccaauuuuguugc

SEQ ID NO: 124109 - RNA, 19 nt, Artificial Sequence
  Description of Artificial Sequence: Synthetic oligonucleotide
caucauguugaauaaugcu

SEQ ID NO: 124110 - RNA, 19 nt, Artificial Sequence
  Description of Artificial Sequence: Synthetic oligonucleotide
uguuuuauauguagagugu

SEQ ID NO: 124111 - RNA, 19 nt, Artificial Sequence
  Description of Artificial Sequence: Synthetic oligonucleotide
uuuuaaaacauucacacca

SEQ ID NO: 124112 - RNA, 19 nt, Artificial Sequence
  Description of Artificial Sequence: Synthetic oligonucleotide
auucgucaucacuccucug

SEQ ID NO: 124113 - RNA, 19 nt, Artificial Sequence
  Description of Artificial Sequence: Synthetic oligonucleotide
gucauaugcagaauuguuu

SEQ ID NO: 124114 - RNA, 19 nt, Artificial Sequence
  Description of Artificial Sequence: Synthetic oligonucleotide
uuuugcucuuuucaaugug

SEQ ID NO: 124115 - RNA, 19 nt, Artificial Sequence
  Description of Artificial Sequence: Synthetic oligonucleotide
gugugagguguuuuuuguu

SEQ ID NO: 124116 - RNA, 19 nt, Artificial Sequence
  Description of Artificial Sequence: Synthetic oligonucleotide
uuuuguuuuuguuuuuugc

SEQ ID NO: 124117 - RNA, 19 nt, Artificial Sequence
  Description of Artificial Sequence: Synthetic oligonucleotide
ccauguuauuuauaguguu

SEQ ID NO: 124118 - RNA, 19 nt, Artificial Sequence
  Description of Artificial Sequence: Synthetic oligonucleotide
ugcuuuccuugugguuuuu

SEQ ID NO: 124119 - RNA, 19 nt, Artificial Sequence
  Description of Artificial Sequence: Synthetic oligonucleotide
ucuuguuguuauucagaaa

SEQ ID NO: 124120 - RNA, 19 nt, Artificial Sequence
  Description of Artificial Sequence: Synthetic oligonucleotide
aagaugugcagauaucaca

SEQ ID NO: 124121 - RNA, 19 nt, Artificial Sequence
  Description of Artificial Sequence: Synthetic oligonucleotide
agaggccuauaacuuuugg

SEQ ID NO: 124122 - RNA, 19 nt, Artificial Sequence
  Description of Artificial Sequence: Synthetic oligonucleotide
guaucuacuucuacaucca

SEQ ID NO: 124123 - RNA, 19 nt, Artificial Sequence
  Description of Artificial Sequence: Synthetic oligonucleotide
aauguaugaauuaagcugu

SEQ ID NO: 124124 - RNA, 19 nt, Artificial Sequence
  Description of Artificial Sequence: Synthetic oligonucleotide
uaagauaauguugcuuucu

SEQ ID NO: 124125 - RNA, 19 nt, Artificial Sequence
  Description of Artificial Sequence: Synthetic oligonucleotide
uuaucccagugaucaccug

SEQ ID NO: 124126 - RNA, 19 nt, Artificial Sequence
  Description of Artificial Sequence: Synthetic oligonucleotide
gccaaaugaauaagacaac

SEQ ID NO: 124127 - RNA, 19 nt, Artificial Sequence
  Description of Artificial Sequence: Synthetic oligonucleotide
caaagagaagcagaagggc

SEQ ID NO: 124128 - RNA, 19 nt, Artificial Sequence
  Description of Artificial Sequence: Synthetic oligonucleotide
cagaagauuauuuacugac

SEQ ID NO: 124129 - RNA, 19 nt, Artificial Sequence
  Description of Artificial Sequence: Synthetic oligonucleotide
cauauaucuauuacacuug

SEQ ID NO: 124130 - RNA, 19 nt, Artificial Sequence
  Description of Artificial Sequence: Synthetic oligonucleotide
gggauugucuuacuguugc

SEQ ID NO: 124131 - RNA, 19 nt, Artificial Sequence
  Description of Artificial Sequence: Synthetic oligonucleotide
cauaacuauuuuuuaaacg

SEQ ID NO: 124132 - RNA, 19 nt, Artificial Sequence
  Description of Artificial Sequence: Synthetic oligonucleotide
ggaguuuaguuuuauauug

SEQ ID NO: 124133 - RNA, 19 nt, Artificial Sequence
  Description of Artificial Sequence: Synthetic oligonucleotide
uauauugcuaguaaaaaaa

SEQ ID NO: 124134 - RNA, 19 nt, Artificial Sequence
  Description of Artificial Sequence: Synthetic oligonucleotide
gccagcuucuacaguacgu

SEQ ID NO: 124135 - RNA, 19 nt, Artificial Sequence
  Description of Artificial Sequence: Synthetic oligonucleotide
uccacucccuuucugucuc

SEQ ID NO: 124136 - RNA, 19 nt, Artificial Sequence
  Description of Artificial Sequence: Synthetic oligonucleotide
cugccugaauaggagcaug

SEQ ID NO: 124137 - RNA, 19 nt, Artificial Sequence
  Description of Artificial Sequence: Synthetic oligonucleotide
gcucaguuggugcugcuuu

SEQ ID NO: 124138 - RNA, 19 nt, Artificial Sequence
  Description of Artificial Sequence: Synthetic oligonucleotide
ucuuguugcugcaucuccc

SEQ ID NO: 124139 - RNA, 19 nt, Artificial Sequence
  Description of Artificial Sequence: Synthetic oligonucleotide
ccucagauuccaccuagag

SEQ ID NO: 124140 - RNA, 19 nt, Artificial Sequence
  Description of Artificial Sequence: Synthetic oligonucleotide
gcuagaugugucuuaccag

SEQ ID NO: 124141 - RNA, 19 nt, Artificial Sequence
  Description of Artificial Sequence: Synthetic oligonucleotide
gaucuaauauugacugccu

SEQ ID NO: 124142 - RNA, 19 nt, Artificial Sequence
  Description of Artificial Sequence: Synthetic oligonucleotide
ucugccugucgcaugagaa

SEQ ID NO: 124143 - RNA, 19 nt, Artificial Sequence
  Description of Artificial Sequence: Synthetic oligonucleotide
acauuaacaaaagcaauug

SEQ ID NO: 124144 - RNA, 19 nt, Artificial Sequence
  Description of Artificial Sequence: Synthetic oligonucleotide
guauuacuuccucuguucg

SEQ ID NO: 124145 - RNA, 19 nt, Artificial Sequence
  Description of Artificial Sequence: Synthetic oligonucleotide
gcgacuaguuggcucugag

SEQ ID NO: 124146 - RNA, 19 nt, Artificial Sequence
  Description of Artificial Sequence: Synthetic oligonucleotide
gauacuaauagguguguga

SEQ ID NO: 124147 - RNA, 19 nt, Artificial Sequence
  Description of Artificial Sequence: Synthetic oligonucleotide
aggcuccggauguuucugg

SEQ ID NO: 124148 - RNA, 19 nt, Artificial Sequence
  Description of Artificial Sequence: Synthetic oligonucleotide
gaauugauauugaaugaug

SEQ ID NO: 124149 - RNA, 19 nt, Artificial Sequence
  Description of Artificial Sequence: Synthetic oligonucleotide
gugauacaaauugauaguc

SEQ ID NO: 124150 - RNA, 19 nt, Artificial Sequence
  Description of Artificial Sequence: Synthetic oligonucleotide
caauaucaagcagugaaau

SEQ ID NO: 124151 - RNA, 19 nt, Artificial Sequence
  Description of Artificial Sequence: Synthetic oligonucleotide
uaugauaauaaaggcauuu

SEQ ID NO: 124152 - RNA, 19 nt, Artificial Sequence
  Description of Artificial Sequence: Synthetic oligonucleotide
ucaaagucucacuuuuauu

SEQ ID NO: 124153 - RNA, 19 nt, Artificial Sequence
  Description of Artificial Sequence: Synthetic oligonucleotide
ugauaaaauaaaaaucauu

SEQ ID NO: 124154 - RNA, 19 nt, Artificial Sequence
  Description of Artificial Sequence: Synthetic oligonucleotide
ucuacugaacaguccaucu

SEQ ID NO: 124155 - RNA, 19 nt, Artificial Sequence
  Description of Artificial Sequence: Synthetic oligonucleotide
uucuuuauacaaugaccac

SEQ ID NO: 124156 - RNA, 19 nt, Artificial Sequence
  Description of Artificial Sequence: Synthetic oligonucleotide
cauccugaaaaggguguug

SEQ ID NO: 124157 - RNA, 19 nt, Artificial Sequence
  Description of Artificial Sequence: Synthetic oligonucleotide
gcuaagcuguaaccgauau

SEQ ID NO: 124158 - RNA, 19 nt, Artificial Sequence
  Description of Artificial Sequence: Synthetic oligonucleotide
ugcacuugaaaugauggua

SEQ ID NO: 124159 - RNA, 19 nt, Artificial Sequence
  Description of Artificial Sequence: Synthetic oligonucleotide
aaguuaauuuugauucaga

SEQ ID NO: 124160 - RNA, 19 nt, Artificial Sequence
  Description of Artificial Sequence: Synthetic oligonucleotide
aauguguuauuugucacaa

SEQ ID NO: 124161 - RNA, 19 nt, Artificial Sequence
  Description of Artificial Sequence: Synthetic oligonucleotide
aauaaacauaauaaaagga

SEQ ID NO: 124162 - RNA, 19 nt, Artificial Sequence
  Description of Artificial Sequence: Synthetic oligonucleotide
aguucagauguuuuucuuc

SEQ ID NO: 124163 - RNA, 25 nt, Artificial Sequence
  Description of Artificial Sequence: Synthetic oligonucleotide
gcgccugccuccaaccugcgggcgg

SEQ ID NO: 124164 - RNA, 25 nt, Artificial Sequence
  Description of Artificial Sequence: Synthetic oligonucleotide
ggagguggguggcugcggggcaauu

SEQ ID NO: 124165 - RNA, 25 nt, Artificial Sequence
  Description of Artificial Sequence: Synthetic oligonucleotide
ugaaaaagagccggcgaggaguucc

SEQ ID NO: 124166 - RNA, 25 nt, Artificial Sequence
  Description of Artificial Sequence: Synthetic oligonucleotide
cccgaaacuuguuggaacuccgggc

SEQ ID NO: 124167 - RNA, 25 nt, Artificial Sequence
  Description of Artificial Sequence: Synthetic oligonucleotide
cucgcgcggaggccaggagcugagc

SEQ ID NO: 124168 - RNA, 25 nt, Artificial Sequence
  Description of Artificial Sequence: Synthetic oligonucleotide
cggcggcggcugccggacgauggga

SEQ ID NO: 124169 - RNA, 25 nt, Artificial Sequence
  Description of Artificial Sequence: Synthetic oligonucleotide
agcgugagcaggacggugauaaccu

SEQ ID NO: 124170 - RNA, 25 nt, Artificial Sequence
  Description of Artificial Sequence: Synthetic oligonucleotide
ucuccccgaucggguugcgagggcg

SEQ ID NO: 124171 - RNA, 25 nt, Artificial Sequence
  Description of Artificial Sequence: Synthetic oligonucleotide
gccgggcagaggccaggacgcgagc

SEQ ID NO: 124172 - RNA, 25 nt, Artificial Sequence
  Description of Artificial Sequence: Synthetic oligonucleotide
ccgccagcggugggacccaucgacg

SEQ ID NO: 124173 - RNA, 25 nt, Artificial Sequence
  Description of Artificial Sequence: Synthetic oligonucleotide
gacuucccggggcgacaggagcagc

SEQ ID NO: 124174 - RNA, 25 nt, Artificial Sequence
  Description of Artificial Sequence: Synthetic oligonucleotide
ccccgagagccagggcgagcgcccg

SEQ ID NO: 124175 - RNA, 25 nt, Artificial Sequence
  Description of Artificial Sequence: Synthetic oligonucleotide
guuccagguggccggaccgcccgcc

SEQ ID NO: 124176 - RNA, 25 nt, Artificial Sequence
  Description of Artificial Sequence: Synthetic oligonucleotide
cgcguccgcgccgcgcucccugcag

SEQ ID NO: 124177 - RNA, 25 nt, Artificial Sequence
  Description of Artificial Sequence: Synthetic oligonucleotide
ggcaacgggagacgcccccgcgcag

SEQ ID NO: 124178 - RNA, 25 nt, Artificial Sequence
  Description of Artificial Sequence: Synthetic oligonucleotide
gcgcgagcgccucagcgcggccgcu

SEQ ID NO: 124179 - RNA, 25 nt, Artificial Sequence
  Description of Artificial Sequence: Synthetic oligonucleotide
ucgcucucccccucgagggacaaac

SEQ ID NO: 124180 - RNA, 25 nt, Artificial Sequence
  Description of Artificial Sequence: Synthetic oligonucleotide
cuuuucccaaacccgauccgagccc

SEQ ID NO: 124181 - RNA, 25 nt, Artificial Sequence
  Description of Artificial Sequence: Synthetic oligonucleotide
cuuggaccaaacucgccugcgccga

SEQ ID NO: 124182 - RNA, 25 nt, Artificial Sequence
  Description of Artificial Sequence: Synthetic oligonucleotide
agagccguccgcguagagcgcuccg

SEQ ID NO: 124183 - RNA, 25 nt, Artificial Sequence
  Description of Artificial Sequence: Synthetic oligonucleotide
gucuccggcgagauguccgagcgca

SEQ ID NO: 124184 - RNA, 25 nt, Artificial Sequence
  Description of Artificial Sequence: Synthetic oligonucleotide
aaagaaggcagaggcaaagggaagg

SEQ ID NO: 124185 - RNA, 25 nt, Artificial Sequence
  Description of Artificial Sequence: Synthetic oligonucleotide
ggcaagaagaaggagcgaggcuccg

SEQ ID NO: 124186 - RNA, 25 nt, Artificial Sequence
  Description of Artificial Sequence: Synthetic oligonucleotide
ggcaagaagccggaguccgcggcgg

SEQ ID NO: 124187 - RNA, 25 nt, Artificial Sequence
  Description of Artificial Sequence: Synthetic oligonucleotide
ggcagccagagcccagccuugccuc

SEQ ID NO: 124188 - RNA, 25 nt, Artificial Sequence
  Description of Artificial Sequence: Synthetic oligonucleotide
ccccgauugaaagagaugaaaagcc

SEQ ID NO: 124189 - RNA, 25 nt, Artificial Sequence
  Description of Artificial Sequence: Synthetic oligonucleotide
caggaaucggcugcagguuccaaac

SEQ ID NO: 124190 - RNA, 25 nt, Artificial Sequence
  Description of Artificial Sequence: Synthetic oligonucleotide
cuaguccuucggugugaaaccaguu

SEQ ID NO: 124191 - RNA, 25 nt, Artificial Sequence
  Description of Artificial Sequence: Synthetic oligonucleotide
ucugaauacuccucucucagauuca

SEQ ID NO: 124192 - RNA, 25 nt, Artificial Sequence
  Description of Artificial Sequence: Synthetic oligonucleotide
aagugguucaagaaugggaaugaau

SEQ ID NO: 124193 - RNA, 25 nt, Artificial Sequence
  Description of Artificial Sequence: Synthetic oligonucleotide
uugaaucgaaaaaacaaaccacaaa

SEQ ID NO: 124194 - RNA, 25 nt, Artificial Sequence
  Description of Artificial Sequence: Synthetic oligonucleotide
aauaucaagauacaaaaaaagccag

SEQ ID NO: 124195 - RNA, 25 nt, Artificial Sequence
  Description of Artificial Sequence: Synthetic oligonucleotide
gggaagucagaacuucgcauuaaca

SEQ ID NO: 124196 - RNA, 25 nt, Artificial Sequence
  Description of Artificial Sequence: Synthetic oligonucleotide
aaagcaucacuggcugauucuggag

SEQ ID NO: 124197 - RNA, 25 nt, Artificial Sequence
  Description of Artificial Sequence: Synthetic oligonucleotide
gaguauaugugcaaagugaucagca

SEQ ID NO: 124198 - RNA, 25 nt, Artificial Sequence
  Description of Artificial Sequence: Synthetic oligonucleotide
aaauuaggaaaugacagugccucug

SEQ ID NO: 124199 - RNA, 25 nt, Artificial Sequence
  Description of Artificial Sequence: Synthetic oligonucleotide
gccaauaucaccaucguggaaucaa

SEQ ID NO: 124200 - RNA, 25 nt, Artificial Sequence
  Description of Artificial Sequence: Synthetic oligonucleotide
aacgagaucaucacugguaugccag

SEQ ID NO: 124201 - RNA, 25 nt, Artificial Sequence
  Description of Artificial Sequence: Synthetic oligonucleotide
gccucaacugaaggagcauaugugu

SEQ ID NO: 124202 - RNA, 25 nt, Artificial Sequence
  Description of Artificial Sequence: Synthetic oligonucleotide
ucuucagagucucccauuagaauau

SEQ ID NO: 124203 - RNA, 25 nt, Artificial Sequence
  Description of Artificial Sequence: Synthetic oligonucleotide
ucaguauccacagaaggagcaaaua

SEQ ID NO: 124204 - RNA, 25 nt, Artificial Sequence
  Description of Artificial Sequence: Synthetic oligonucleotide
acuucuucaucuacaucuacaucca

SEQ ID NO: 124205 - RNA, 25 nt, Artificial Sequence
  Description of Artificial Sequence: Synthetic oligonucleotide
accacugggacaagccaucuuguaa

SEQ ID NO: 124206 - RNA, 25 nt, Artificial Sequence
  Description of Artificial Sequence: Synthetic oligonucleotide
aaaugugcggagaaggagaaaacuu

SEQ ID NO: 124207 - RNA, 25 nt, Artificial Sequence
  Description of Artificial Sequence: Synthetic oligonucleotide
uucugugugaauggaggggagugcu

SEQ ID NO: 124208 - RNA, 25 nt, Artificial Sequence
  Description of Artificial Sequence: Synthetic oligonucleotide
uucauggugaaagaccuuucaaacc

SEQ ID NO: 124209 - RNA, 25 nt, Artificial Sequence
  Description of Artificial Sequence: Synthetic oligonucleotide
cccucgagauacuugugcaagugcc

SEQ ID NO: 124210 - RNA, 25 nt, Artificial Sequence
  Description of Artificial Sequence: Synthetic oligonucleotide
ccaaaugaguuuacuggugaucgcu

SEQ ID NO: 124211 - RNA, 25 nt, Artificial Sequence
  Description of Artificial Sequence: Synthetic oligonucleotide
ugccaaaacuacguaauggccagcu

SEQ ID NO: 124212 - RNA, 25 nt, Artificial Sequence
  Description of Artificial Sequence: Synthetic oligonucleotide
uucuacaaggcggaggagcuguacc

SEQ ID NO: 124213 - RNA, 25 nt, Artificial Sequence
  Description of Artificial Sequence: Synthetic oligonucleotide
cagaagagagugcugaccauaaccg

SEQ ID NO: 124214 - RNA, 25 nt, Artificial Sequence
  Description of Artificial Sequence: Synthetic oligonucleotide
ggcaucugcaucgcccuccuugugg

SEQ ID NO: 124215 - RNA, 25 nt, Artificial Sequence
  Description of Artificial Sequence: Synthetic oligonucleotide
gucggcaucaugugugugguggccu

SEQ ID NO: 124216 - RNA, 25 nt, Artificial Sequence
  Description of Artificial Sequence: Synthetic oligonucleotide
uacugcaaaaccaagaaacagcgga

SEQ ID NO: 124217 - RNA, 25 nt, Artificial Sequence
  Description of Artificial Sequence: Synthetic oligonucleotide
aaaaagcugcaugaccgucuucggc

SEQ ID NO: 124218 - RNA, 25 nt, Artificial Sequence
  Description of Artificial Sequence: Synthetic oligonucleotide
cagagccuucggucugaacgaaaca

SEQ ID NO: 124219 - RNA, 25 nt, Artificial Sequence
  Description of Artificial Sequence: Synthetic oligonucleotide
aauaugaugaacauugccaaugggc

SEQ ID NO: 124220 - RNA, 25 nt, Artificial Sequence
  Description of Artificial Sequence: Synthetic oligonucleotide
ccucaccauccuaacccaccccccg

SEQ ID NO: 124221 - RNA, 25 nt, Artificial Sequence
  Description of Artificial Sequence: Synthetic oligonucleotide
gagaauguccagcuggugaaucaau

SEQ ID NO: 124222 - RNA, 25 nt, Artificial Sequence
  Description of Artificial Sequence: Synthetic oligonucleotide
uacguaucuaaaaacgucaucucca

SEQ ID NO: 124223 - RNA, 25 nt, Artificial Sequence
  Description of Artificial Sequence: Synthetic oligonucleotide
agugagcauauuguugagagagaag

SEQ ID NO: 124224 - RNA, 25 nt, Artificial Sequence
  Description of Artificial Sequence: Synthetic oligonucleotide
gcagagacauccuuuuccaccaguc

SEQ ID NO: 124225 - RNA, 25 nt, Artificial Sequence
  Description of Artificial Sequence: Synthetic oligonucleotide
cacuauacuuccacagcccaucacu

SEQ ID NO: 124226 - RNA, 25 nt, Artificial Sequence
  Description of Artificial Sequence: Synthetic oligonucleotide
uccacuacugucacccagacuccua

SEQ ID NO: 124227 - RNA, 25 nt, Artificial Sequence
  Description of Artificial Sequence: Synthetic oligonucleotide
agccacagcuggagcaacggacaca

SEQ ID NO: 124228 - RNA, 25 nt, Artificial Sequence
  Description of Artificial Sequence: Synthetic oligonucleotide
acugaaagcauccuuuccgaaagcc

SEQ ID NO: 124229 - RNA, 25 nt, Artificial Sequence
  Description of Artificial Sequence: Synthetic oligonucleotide
cacucuguaaucgugaugucauccg

SEQ ID NO: 124230 - RNA, 25 nt, Artificial Sequence
  Description of Artificial Sequence: Synthetic oligonucleotide
guagaaaacaguaggcacagcagcc

SEQ ID NO: 124231 - RNA, 25 nt, Artificial Sequence
  Description of Artificial Sequence: Synthetic oligonucleotide
ccaacugggggcccaagaggacguc

SEQ ID NO: 124232 - RNA, 25 nt, Artificial Sequence
  Description of Artificial Sequence: Synthetic oligonucleotide
cuuaauggcacaggaggcccucgug

SEQ ID NO: 124233 - RNA, 25 nt, Artificial Sequence
  Description of Artificial Sequence: Synthetic oligonucleotide
gaauguaacagcuuccucaggcaug

SEQ ID NO: 124234 - RNA, 25 nt, Artificial Sequence
  Description of Artificial Sequence: Synthetic oligonucleotide
gccagagaaaccccugauuccuacc

SEQ ID NO: 124235 - RNA, 25 nt, Artificial Sequence
  Description of Artificial Sequence: Synthetic oligonucleotide
cgagacucuccucauagugaaaggu

SEQ ID NO: 124236 - RNA, 25 nt, Artificial Sequence
  Description of Artificial Sequence: Synthetic oligonucleotide
uaugugucagccaugaccaccccgg

SEQ ID NO: 124237 - RNA, 25 nt, Artificial Sequence
  Description of Artificial Sequence: Synthetic oligonucleotide
gcucguaugucaccuguagauuucc

SEQ ID NO: 124238 - RNA, 25 nt, Artificial Sequence
  Description of Artificial Sequence: Synthetic oligonucleotide
cacacgccaagcucccccaaaucgc

SEQ ID NO: 124239 - RNA, 25 nt, Artificial Sequence
  Description of Artificial Sequence: Synthetic oligonucleotide
cccccuucggaaaugucuccacccg

SEQ ID NO: 124240 - RNA, 25 nt, Artificial Sequence
  Description of Artificial Sequence: Synthetic oligonucleotide
guguccagcaugacgguguccaugc

SEQ ID NO: 124241 - RNA, 25 nt, Artificial Sequence
  Description of Artificial Sequence: Synthetic oligonucleotide
ccuuccauggcggucagccccuuca

SEQ ID NO: 124242 - RNA, 25 nt, Artificial Sequence
  Description of Artificial Sequence: Synthetic oligonucleotide
auggaagaagagagaccucuacuuc

SEQ ID NO: 124243 - RNA, 25 nt, Artificial Sequence
  Description of Artificial Sequence: Synthetic oligonucleotide
cucgugacaccaccaaggcugcggg

SEQ ID NO: 124244 - RNA, 25 nt, Artificial Sequence
  Description of Artificial Sequence: Synthetic oligonucleotide
gagaagaaguuugaccaucacccuc

SEQ ID NO: 124245 - RNA, 25 nt, Artificial Sequence
  Description of Artificial Sequence: Synthetic oligonucleotide
cagcaguucagcuccuuccaccaca

SEQ ID NO: 124246 - RNA, 25 nt, Artificial Sequence
  Description of Artificial Sequence: Synthetic oligonucleotide
aaccccgcgcaugacaguaacagcc

SEQ ID NO: 124247 - RNA, 25 nt, Artificial Sequence
  Description of Artificial Sequence: Synthetic oligonucleotide
cucccugcuagccccuugaggauag

SEQ ID NO: 124248 - RNA, 25 nt, Artificial Sequence
  Description of Artificial Sequence: Synthetic oligonucleotide
guggaggaugaggaguaugaaacga

SEQ ID NO: 124249 - RNA, 25 nt, Artificial Sequence
  Description of Artificial Sequence: Synthetic oligonucleotide
acccaagaguacgagccagcccaag

SEQ ID NO: 124250 - RNA, 25 nt, Artificial Sequence
  Description of Artificial Sequence: Synthetic oligonucleotide
gagccuguuaagaaacucgccaaua

SEQ ID NO: 124251 - RNA, 25 nt, Artificial Sequence
  Description of Artificial Sequence: Synthetic oligonucleotide
agccggcgggccaaaagaaccaagc

SEQ ID NO: 124252 - RNA, 25 nt, Artificial Sequence
  Description of Artificial Sequence: Synthetic oligonucleotide
cccaauggccacauugcuaacagau

SEQ ID NO: 124253 - RNA, 25 nt, Artificial Sequence
  Description of Artificial Sequence: Synthetic oligonucleotide
uuggaaguggacagcaacacaagcu

SEQ ID NO: 124254 - RNA, 25 nt, Artificial Sequence
  Description of Artificial Sequence: Synthetic oligonucleotide
ucccagagcaguaacucagagagug

SEQ ID NO: 124255 - RNA, 25 nt, Artificial Sequence
  Description of Artificial Sequence: Synthetic oligonucleotide
gaaacagaagaugaaagaguaggug

SEQ ID NO: 124256 - RNA, 25 nt, Artificial Sequence
  Description of Artificial Sequence: Synthetic oligonucleotide
gaagauacgccuuuccugggcauac

SEQ ID NO: 124257 - RNA, 25 nt, Artificial Sequence
  Description of Artificial Sequence: Synthetic oligonucleotide
cagaacccccuggcagccagucuug

SEQ ID NO: 124258 - RNA, 25 nt, Artificial Sequence
  Description of Artificial Sequence: Synthetic oligonucleotide
gaggcaacaccugccuuccgccugg

SEQ ID NO: 124259 - RNA, 25 nt, Artificial Sequence
  Description of Artificial Sequence: Synthetic oligonucleotide
gcugacagcaggacuaacccagcag

SEQ ID NO: 124260 - RNA, 25 nt, Artificial Sequence
  Description of Artificial Sequence: Synthetic oligonucleotide
ggccgcuucucgacacaggaagaaa

SEQ ID NO: 124261 - RNA, 25 nt, Artificial Sequence
  Description of Artificial Sequence: Synthetic oligonucleotide
auccaggccaggcugucuaguguaa

SEQ ID NO: 124262 - RNA, 25 nt, Artificial Sequence
  Description of Artificial Sequence: Synthetic oligonucleotide
auugcuaaccaagacccuauugcug

SEQ ID NO: 124263 - RNA, 25 nt, Artificial Sequence
  Description of Artificial Sequence: Synthetic oligonucleotide
guauaaaaccuaaauaaacacauag

SEQ ID NO: 124264 - RNA, 25 nt, Artificial Sequence
  Description of Artificial Sequence: Synthetic oligonucleotide
gauucaccuguaaaacuuuauuuua

SEQ ID NO: 124265 - RNA, 25 nt, Artificial Sequence
  Description of Artificial Sequence: Synthetic oligonucleotide
auauaauaaaguauuccaccuuaaa

SEQ ID NO: 124266 - RNA, 25 nt, Artificial Sequence
  Description of Artificial Sequence: Synthetic oligonucleotide
auuaaacaauuuauuuuauuuuagc

SEQ ID NO: 124267 - RNA, 25 nt, Artificial Sequence
  Description of Artificial Sequence: Synthetic oligonucleotide
caguucugcaaauagaaaacaggaa

SEQ ID NO: 124268 - RNA, 25 nt, Artificial Sequence
  Description of Artificial Sequence: Synthetic oligonucleotide
aaaaaacuuuuauaaauuaaauaua

SEQ ID NO: 124269 - RNA, 25 nt, Artificial Sequence
  Description of Artificial Sequence: Synthetic oligonucleotide
aauuaaauauauguauguaaaaaug

SEQ ID NO: 124270 - RNA, 25 nt, Artificial Sequence
  Description of Artificial Sequence: Synthetic oligonucleotide
cucaagaaggacaaagaggaguagu

SEQ ID NO: 124271 - RNA, 25 nt, Artificial Sequence
  Description of Artificial Sequence: Synthetic oligonucleotide
ucgggggugggguggaggcagggcg

SEQ ID NO: 124272 - RNA, 25 nt, Artificial Sequence
  Description of Artificial Sequence: Synthetic oligonucleotide
ggggaagggagugaccgccccuccu

SEQ ID NO: 124273 - RNA, 25 nt, Artificial Sequence
  Description of Artificial Sequence: Synthetic oligonucleotide
uggcugcacucuugccuccggagcc

SEQ ID NO: 124274 - RNA, 25 nt, Artificial Sequence
  Description of Artificial Sequence: Synthetic oligonucleotide
ccucugauccuguuugcagugaugc

SEQ ID NO: 124275 - RNA, 25 nt, Artificial Sequence
  Description of Artificial Sequence: Synthetic oligonucleotide
cuccgagggcaggcaccugcugcuc

SEQ ID NO: 124276 - RNA, 25 nt, Artificial Sequence
  Description of Artificial Sequence: Synthetic oligonucleotide
cuguaaugauucagccccuuucagc

SEQ ID NO: 124277 - RNA, 25 nt, Artificial Sequence
  Description of Artificial Sequence: Synthetic oligonucleotide
ccgucgucgcguuaacacaacagga

SEQ ID NO: 124278 - RNA, 25 nt, Artificial Sequence
  Description of Artificial Sequence: Synthetic oligonucleotide
augcuguugcuauugucacuacugc

SEQ ID NO: 124279 - RNA, 25 nt, Artificial Sequence
  Description of Artificial Sequence: Synthetic oligonucleotide
ccucuccugccgccgcugcugcugc

SEQ ID NO: 124280 - RNA, 25 nt, Artificial Sequence
  Description of Artificial Sequence: Synthetic oligonucleotide
ccgccgccgccaccgccgcuggucc

SEQ ID NO: 124281 - RNA, 25 nt, Artificial Sequence
  Description of Artificial Sequence: Synthetic oligonucleotide
cuccuucugcuuuuacuucuccugc

SEQ ID NO: 124282 - RNA, 25 nt, Artificial Sequence
  Description of Artificial Sequence: Synthetic oligonucleotide
caugacaguuguuuucuucaucuga

SEQ ID NO: 124283 - RNA, 25 nt, Artificial Sequence
  Description of Artificial Sequence: Synthetic oligonucleotide
agcagacaccagcuucagaugcucg

SEQ ID NO: 124284 - RNA, 25 nt, Artificial Sequence
  Description of Artificial Sequence: Synthetic oligonucleotide
gaggugagaaacaugccuuucaguu

SEQ ID NO: 124285 - RNA, 25 nt, Artificial Sequence
  Description of Artificial Sequence: Synthetic oligonucleotide
uugggcuacugguuuacuuaauuaa

SEQ ID NO: 124286 - RNA, 25 nt, Artificial Sequence
  Description of Artificial Sequence: Synthetic oligonucleotide
aucagccggcagcuccgucgaucua

SEQ ID NO: 124287 - RNA, 25 nt, Artificial Sequence
  Description of Artificial Sequence: Synthetic oligonucleotide
auuuucgucccuguccucuugacga

SEQ ID NO: 124288 - RNA, 25 nt, Artificial Sequence
  Description of Artificial Sequence: Synthetic oligonucleotide
agcccgggaugguuuggaguagcau

SEQ ID NO: 124289 - RNA, 25 nt, Artificial Sequence
  Description of Artificial Sequence: Synthetic oligonucleotide
uuuaaaagaacuagaaaaguggccc

SEQ ID NO: 124290 - RNA, 25 nt, Artificial Sequence
  Description of Artificial Sequence: Synthetic oligonucleotide
cagaaacagcagcuuaaagaauuau

SEQ ID NO: 124291 - RNA, 25 nt, Artificial Sequence
  Description of Artificial Sequence: Synthetic oligonucleotide
uuacgauauacuuugauuuuguagu

SEQ ID NO: 124292 - RNA, 25 nt, Artificial Sequence
  Description of Artificial Sequence: Synthetic oligonucleotide
uugcuaggagcuuuucuuccccccu

SEQ ID NO: 124293 - RNA, 25 nt, Artificial Sequence
  Description of Artificial Sequence: Synthetic oligonucleotide
uugcaucuuucugaacucuucuuga

SEQ ID NO: 124294 - RNA, 25 nt, Artificial Sequence
  Description of Artificial Sequence: Synthetic oligonucleotide
auuuuaauaauggccuuggacuugg

SEQ ID NO: 124295 - RNA, 25 nt, Artificial Sequence
  Description of Artificial Sequence: Synthetic oligonucleotide
gacgauuuaucgauuucccccugua

SEQ ID NO: 124296 - RNA, 25 nt, Artificial Sequence
  Description of Artificial Sequence: Synthetic oligonucleotide
aagaugcuguaucauuugguugggg

SEQ ID NO: 124297 - RNA, 25 nt, Artificial Sequence
  Description of Artificial Sequence: Synthetic oligonucleotide
ggggccucugcgugguaauggaccg

SEQ ID NO: 124298 - RNA, 25 nt, Artificial Sequence
  Description of Artificial Sequence: Synthetic oligonucleotide
gugagagcggccaggccuucuucug

SEQ ID NO: 124299 - RNA, 25 nt, Artificial Sequence
  Description of Artificial Sequence: Synthetic oligonucleotide
ggaggugagccgauggagauuuauu

SEQ ID NO: 124300 - RNA, 25 nt, Artificial Sequence
  Description of Artificial Sequence: Synthetic oligonucleotide
uccccagacaugucugaggucgccg

SEQ ID NO: 124301 - RNA, 25 nt, Artificial Sequence
  Description of Artificial Sequence: Synthetic oligonucleotide
gccgagagguccuccagccccucca

SEQ ID NO: 124302 - RNA, 25 nt, Artificial Sequence
  Description of Artificial Sequence: Synthetic oligonucleotide
acucagcugagugcagacccaucuc

SEQ ID NO: 124303 - RNA, 25 nt, Artificial Sequence
  Description of Artificial Sequence: Synthetic oligonucleotide
cuugaugggcuuccggcagcagaag

SEQ ID NO: 124304 - RNA, 25 nt, Artificial Sequence
  Description of Artificial Sequence: Synthetic oligonucleotide
gacaugccagagccccagacugaag

SEQ ID NO: 124305 - RNA, 25 nt, Artificial Sequence
  Description of Artificial Sequence: Synthetic oligonucleotide
gaugggagaaccccuggacucgugg

SEQ ID NO: 124306 - RNA, 25 nt, Artificial Sequence
  Description of Artificial Sequence: Synthetic oligonucleotide
ggccuggccgugcccugcugugcgu

SEQ ID NO: 124307 - RNA, 25 nt, Artificial Sequence
  Description of Artificial Sequence: Synthetic oligonucleotide
ugccuagaagcugagcgccugagag

SEQ ID NO: 124308 - RNA, 25 nt, Artificial Sequence
  Description of Artificial Sequence: Synthetic oligonucleotide
gguugccucaacucagagaaaaucu

SEQ ID NO: 124309 - RNA, 25 nt, Artificial Sequence
  Description of Artificial Sequence: Synthetic oligonucleotide
ugcauuguccccauccuggcuugcc

SEQ ID NO: 124310 - RNA, 25 nt, Artificial Sequence
  Description of Artificial Sequence: Synthetic oligonucleotide
cuggucagccucugccucugcaucg

SEQ ID NO: 124311 - RNA, 25 nt, Artificial Sequence
  Description of Artificial Sequence: Synthetic oligonucleotide
gccggccucaaguggguauuugugg

SEQ ID NO: 124312 - RNA, 25 nt, Artificial Sequence
  Description of Artificial Sequence: Synthetic oligonucleotide
gacaagaucuuugaauaugacucuc

SEQ ID NO: 124313 - RNA, 25 nt, Artificial Sequence
  Description of Artificial Sequence: Synthetic oligonucleotide
ccuacucaccuugacccuggggggu

SEQ ID NO: 124314 - RNA, 25 nt, Artificial Sequence
  Description of Artificial Sequence: Synthetic oligonucleotide
uuaggccaggacccuauuauuucuc

SEQ ID NO: 124315 - RNA, 25 nt, Artificial Sequence
  Description of Artificial Sequence: Synthetic oligonucleotide
cuggacgcaacugcugccucagcug

SEQ ID NO: 124316 - RNA, 25 nt, Artificial Sequence
  Description of Artificial Sequence: Synthetic oligonucleotide
gugugggugucgucugaggcauaca

SEQ ID NO: 124317 - RNA, 25 nt, Artificial Sequence
  Description of Artificial Sequence: Synthetic oligonucleotide
acuucaccugucucuagggcucaau

SEQ ID NO: 124318 - RNA, 25 nt, Artificial Sequence
  Description of Artificial Sequence: Synthetic oligonucleotide
ucugaaagugagguucaaguuacag

SEQ ID NO: 124319 - RNA, 25 nt, Artificial Sequence
  Description of Artificial Sequence: Synthetic oligonucleotide
gugcaaggugacaaggcuguugucu

SEQ ID NO: 124320 - RNA, 25 nt, Artificial Sequence
  Description of Artificial Sequence: Synthetic oligonucleotide
uccuuugaaccaucagcggcaccga

SEQ ID NO: 124321 - RNA, 25 nt, Artificial Sequence
  Description of Artificial Sequence: Synthetic oligonucleotide
acaccgaagaaucguauuuuugccu

SEQ ID NO: 124322 - RNA, 25 nt, Artificial Sequence
  Description of Artificial Sequence: Synthetic oligonucleotide
uuuucuuucuugccguccacugcgc

SEQ ID NO: 124323 - RNA, 25 nt, Artificial Sequence
  Description of Artificial Sequence: Synthetic oligonucleotide
ccauccuucccuucacccacccgga

SEQ ID NO: 124324 - RNA, 25 nt, Artificial Sequence
  Description of Artificial Sequence: Synthetic oligonucleotide
aacccugaggugagaacgcccaagu

SEQ ID NO: 124325 - RNA, 25 nt, Artificial Sequence
  Description of Artificial Sequence: Synthetic oligonucleotide
ucagcaacucagccacaaacaacag

SEQ ID NO: 124326 - RNA, 25 nt, Artificial Sequence
  Description of Artificial Sequence: Synthetic oligonucleotide
gaaacuaaucuccaaacugcuccua

SEQ ID NO: 124327 - RNA, 25 nt, Artificial Sequence
  Description of Artificial Sequence: Synthetic oligonucleotide
aaacuuucuacaucuacauccacca

SEQ ID NO: 124328 - RNA, 25 nt, Artificial Sequence
  Description of Artificial Sequence: Synthetic oligonucleotide
acugggacaagccaucuuguaaaau

SEQ ID NO: 124329 - RNA, 25 nt, Artificial Sequence
  Description of Artificial Sequence: Synthetic oligonucleotide
ugugcggagaaggagaaaacuuucu

SEQ ID NO: 124330 - RNA, 25 nt, Artificial Sequence
  Description of Artificial Sequence: Synthetic oligonucleotide
ugugugaauggaggggagugcuuca

SEQ ID NO: 124331 - RNA, 25 nt, Artificial Sequence
  Description of Artificial Sequence: Synthetic oligonucleotide
auggugaaagaccuuucaaaccccu

SEQ ID NO: 124332 - RNA, 25 nt, Artificial Sequence
  Description of Artificial Sequence: Synthetic oligonucleotide
ucgagauacuugugcaagugcccaa

SEQ ID NO: 124333 - RNA, 25 nt, Artificial Sequence
  Description of Artificial Sequence: Synthetic oligonucleotide
aaugaguuuacuggugaucgcugcc

SEQ ID NO: 124334 - RNA, 25 nt, Artificial Sequence
  Description of Artificial Sequence: Synthetic oligonucleotide
caaaacuacguaauggccagcuucu

SEQ ID NO: 124335 - RNA, 25 nt, Artificial Sequence
  Description of Artificial Sequence: Synthetic oligonucleotide
uacaguacguccacucccuuucugu

SEQ ID NO: 124336 - RNA, 25 nt, Artificial Sequence
  Description of Artificial Sequence: Synthetic oligonucleotide
ucucugccugaauaggagcaugcuc

SEQ ID NO: 124337 - RNA, 25 nt, Artificial Sequence
  Description of Artificial Sequence: Synthetic oligonucleotide
caguuggugcugcuuucuuguugcu

SEQ ID NO: 124338 - RNA, 25 nt, Artificial Sequence
  Description of Artificial Sequence: Synthetic oligonucleotide
ugcaucuccccucagauuccaccua

SEQ ID NO: 124339 - RNA, 25 nt, Artificial Sequence
  Description of Artificial Sequence: Synthetic oligonucleotide
agagcuagaugugucuuaccagauc

SEQ ID NO: 124340 - RNA, 25 nt, Artificial Sequence
  Description of Artificial Sequence: Synthetic oligonucleotide
cuaauauugacugccucugccuguc

SEQ ID NO: 124341 - RNA, 25 nt, Artificial Sequence
  Description of Artificial Sequence: Synthetic oligonucleotide
cgcaugagaacauuaacaaaagcaa

SEQ ID NO: 124342 - RNA, 25 nt, Artificial Sequence
  Description of Artificial Sequence: Synthetic oligonucleotide
auuguauuacuuccucuguucgcga

SEQ ID NO: 124343 - RNA, 25 nt, Artificial Sequence
  Description of Artificial Sequence: Synthetic oligonucleotide
acuaguuggcucugagauacuaaua

SEQ ID NO: 124344 - RNA, 25 nt, Artificial Sequence
  Description of Artificial Sequence: Synthetic oligonucleotide
aggugugugaggcuccggauguuuc

SEQ ID NO: 124345 - RNA, 25 nt, Artificial Sequence
  Description of Artificial Sequence: Synthetic oligonucleotide
cuggaauugauauugaaugauguga

SEQ ID NO: 124346 - RNA, 25 nt, Artificial Sequence
  Description of Artificial Sequence: Synthetic oligonucleotide
auacaaauugauagucaauaucaag

SEQ ID NO: 124347 - RNA, 25 nt, Artificial Sequence
  Description of Artificial Sequence: Synthetic oligonucleotide
gcagugaaauaugauaauaaaggca

SEQ ID NO: 124348 - RNA, 25 nt, Artificial Sequence
  Description of Artificial Sequence: Synthetic oligonucleotide
auuucaaagucucacuuuuauugau

SEQ ID NO: 124349 - RNA, 25 nt, Artificial Sequence
  Description of Artificial Sequence: Synthetic oligonucleotide
uaaaauaaaaaucauucuacugaac

SEQ ID NO: 124350 - RNA, 25 nt, Artificial Sequence
  Description of Artificial Sequence: Synthetic oligonucleotide
caguccaucuucuuuauacaaugac

SEQ ID NO: 124351 - RNA, 25 nt, Artificial Sequence
  Description of Artificial Sequence: Synthetic oligonucleotide
ccacauccugaaaaggguguugcua

SEQ ID NO: 124352 - RNA, 25 nt, Artificial Sequence
  Description of Artificial Sequence: Synthetic oligonucleotide
aagcuguaaccgauaugcacuugaa

SEQ ID NO: 124353 - RNA, 25 nt, Artificial Sequence
  Description of Artificial Sequence: Synthetic oligonucleotide
aaugaugguaaguuaauuuugauuc

SEQ ID NO: 124354 - RNA, 25 nt, Artificial Sequence
  Description of Artificial Sequence: Synthetic oligonucleotide
cagaauguguuauuugucacaaaua

SEQ ID NO: 124355 - RNA, 25 nt, Artificial Sequence
  Description of Artificial Sequence: Synthetic oligonucleotide
aaacauaauaaaaggaguucagaug

SEQ ID NO: 124356 - RNA, 25 nt, Artificial Sequence
  Description of Artificial Sequence: Synthetic oligonucleotide
cagauguuuuucuucauuaaccaaa

SEQ ID NO: 124357 - RNA, 25 nt, Artificial Sequence
  Description of Artificial Sequence: Synthetic oligonucleotide
caaccuggauucacuggagcaagau

SEQ ID NO: 124358 - RNA, 25 nt, Artificial Sequence
  Description of Artificial Sequence: Synthetic oligonucleotide
uguacugagaaugugcccaugaaag

SEQ ID NO: 124359 - RNA, 25 nt, Artificial Sequence
  Description of Artificial Sequence: Synthetic oligonucleotide
guccaaaaccaagaaaaggcggagg

SEQ ID NO: 124360 - RNA, 25 nt, Artificial Sequence
  Description of Artificial Sequence: Synthetic oligonucleotide
gagcuguaccagaagagagugcuga

SEQ ID NO: 124361 - RNA, 25 nt, Artificial Sequence
  Description of Artificial Sequence: Synthetic oligonucleotide
accauaaccggcaucugcaucgccc

SEQ ID NO: 124362 - RNA, 25 nt, Artificial Sequence
  Description of Artificial Sequence: Synthetic oligonucleotide
cuccuuguggucggcaucaugugug

SEQ ID NO: 124363 - RNA, 25 nt, Artificial Sequence
  Description of Artificial Sequence: Synthetic oligonucleotide
gugguggccuacugcaaaaccaaga

SEQ ID NO: 124364 - RNA, 25 nt, Artificial Sequence
  Description of Artificial Sequence: Synthetic oligonucleotide
aaacagcggaaaaagcugcaugacc

SEQ ID NO: 124365 - RNA, 25 nt, Artificial Sequence
  Description of Artificial Sequence: Synthetic oligonucleotide
cgucuucggcagagccuucggucug

SEQ ID NO: 124366 - RNA, 25 nt, Artificial Sequence
  Description of Artificial Sequence: Synthetic oligonucleotide
gaacgaaacaauaugaugaacauug

SEQ ID NO: 124367 - RNA, 25 nt, Artificial Sequence
  Description of Artificial Sequence: Synthetic oligonucleotide
gccaaugggccucaccauccuaacc

SEQ ID NO: 124368 - RNA, 25 nt, Artificial Sequence
  Description of Artificial Sequence: Synthetic oligonucleotide
ccaccccccgagaauguccagcugg

SEQ ID NO: 124369 - RNA, 25 nt, Artificial Sequence
  Description of Artificial Sequence: Synthetic oligonucleotide
gugaaucaauacguaucuaaaaacg

SEQ ID NO: 124370 - RNA, 25 nt, Artificial Sequence
  Description of Artificial Sequence: Synthetic oligonucleotide
gucaucuccagugagcauauuguug

SEQ ID NO: 124371 - RNA, 25 nt, Artificial Sequence
  Description of Artificial Sequence: Synthetic oligonucleotide
gagagagaagcagagacauccuuuu

SEQ ID NO: 124372 - RNA, 25 nt, Artificial Sequence
  Description of Artificial Sequence: Synthetic oligonucleotide
uccaccagucacuauacuuccacag

SEQ ID NO: 124373 - RNA, 25 nt, Artificial Sequence
  Description of Artificial Sequence: Synthetic oligonucleotide
gcccaucacuccacuacugucaccc

SEQ ID NO: 124374 - RNA, 25 nt, Artificial Sequence
  Description of Artificial Sequence: Synthetic oligonucleotide
cagacuccuagccacagcuggagca

SEQ ID NO: 124375 - RNA, 25 nt, Artificial Sequence
  Description of Artificial Sequence: Synthetic oligonucleotide
aacggacacacugaaagcauccuuu

SEQ ID NO: 124376 - RNA, 25 nt, Artificial Sequence
  Description of Artificial Sequence: Synthetic oligonucleotide
uccgaaagccacucuguaaucguga

SEQ ID NO: 124377 - RNA, 25 nt, Artificial Sequence
  Description of Artificial Sequence: Synthetic oligonucleotide
augucauccguagaaaacaguaggc

SEQ ID NO: 124378 - RNA, 25 nt, Artificial Sequence
  Description of Artificial Sequence: Synthetic oligonucleotide
cacagcagcccaacugggggcccaa

SEQ ID NO: 124379 - RNA, 25 nt, Artificial Sequence
  Description of Artificial Sequence: Synthetic oligonucleotide
agaggacgucuuaauggcacaggag

SEQ ID NO: 124380 - RNA, 25 nt, Artificial Sequence
  Description of Artificial Sequence: Synthetic oligonucleotide
ggcccucgugaauguaacagcuucc

SEQ ID NO: 124381 - RNA, 25 nt, Artificial Sequence
  Description of Artificial Sequence: Synthetic oligonucleotide
cucaggcaugccagagaaaccccug

SEQ ID NO: 124382 - RNA, 25 nt, Artificial Sequence
  Description of Artificial Sequence: Synthetic oligonucleotide
gauuccuaccgagacucuccucaua

SEQ ID NO: 124383 - RNA, 25 nt, Artificial Sequence
  Description of Artificial Sequence: Synthetic oligonucleotide
agugaaagacauaaccuuauagcug

SEQ ID NO: 124384 - RNA, 25 nt, Artificial Sequence
  Description of Artificial Sequence: Synthetic oligonucleotide
gagcuaaggagaaacaaggcacaca

SEQ ID NO: 124385 - RNA, 25 nt, Artificial Sequence
  Description of Artificial Sequence: Synthetic oligonucleotide
agauccaaaugcaugcagauccagc

SEQ ID NO: 124386 - RNA, 25 nt, Artificial Sequence
  Description of Artificial Sequence: Synthetic oligonucleotide
cuaucagcaacucaucuuagaucuu

SEQ ID NO: 124387 - RNA, 25 nt, Artificial Sequence
  Description of Artificial Sequence: Synthetic oligonucleotide
ucuuccauuccccauuugggcuuca

SEQ ID NO: 124388 - RNA, 25 nt, Artificial Sequence
  Description of Artificial Sequence: Synthetic oligonucleotide
auucucuaagaccccuuggccuuua

SEQ ID NO: 124389 - RNA, 25 nt, Artificial Sequence
  Description of Artificial Sequence: Synthetic oligonucleotide
aggaagguaugugucagccaugacc

SEQ ID NO: 124390 - RNA, 25 nt, Artificial Sequence
  Description of Artificial Sequence: Synthetic oligonucleotide
caccccggcucguaugucaccugua

SEQ ID NO: 124391 - RNA, 25 nt, Artificial Sequence
  Description of Artificial Sequence: Synthetic oligonucleotide
agauuuccacacgccaagcuccccc

SEQ ID NO: 124392 - RNA, 25 nt, Artificial Sequence
  Description of Artificial Sequence: Synthetic oligonucleotide
caaaucgcccccuucggaaaugucu

SEQ ID NO: 124393 - RNA, 25 nt, Artificial Sequence
  Description of Artificial Sequence: Synthetic oligonucleotide
uccacccguguccagcaugacggug

SEQ ID NO: 124394 - RNA, 25 nt, Artificial Sequence
  Description of Artificial Sequence: Synthetic oligonucleotide
guccaugccuuccauggcggucagc

SEQ ID NO: 124395 - RNA, 25 nt, Artificial Sequence
  Description of Artificial Sequence: Synthetic oligonucleotide
ccccuucauggaagaagagagaccu

SEQ ID NO: 124396 - RNA, 25 nt, Artificial Sequence
  Description of Artificial Sequence: Synthetic oligonucleotide
ucuacuucucgugacaccaccaagg

SEQ ID NO: 124397 - RNA, 25 nt, Artificial Sequence
  Description of Artificial Sequence: Synthetic oligonucleotide
gcugcgggagaagaaguuugaccau

SEQ ID NO: 124398 - RNA, 25 nt, Artificial Sequence
  Description of Artificial Sequence: Synthetic oligonucleotide
ucacccucagcaguucagcuccuuc

SEQ ID NO: 124399 - RNA, 25 nt, Artificial Sequence
  Description of Artificial Sequence: Synthetic oligonucleotide
ccaccacaaccccgcgcaugacagu

SEQ ID NO: 124400 - RNA, 25 nt, Artificial Sequence
  Description of Artificial Sequence: Synthetic oligonucleotide
uaacagccucccugcuagccccuug

SEQ ID NO: 124401 - RNA, 25 nt, Artificial Sequence
  Description of Artificial Sequence: Synthetic oligonucleotide
gaggauaguggaggaugaggaguau

SEQ ID NO: 124402 - RNA, 25 nt, Artificial Sequence
  Description of Artificial Sequence: Synthetic oligonucleotide
ugaaacgacccaagaguacgagcca

SEQ ID NO: 124403 - RNA, 25 nt, Artificial Sequence
  Description of Artificial Sequence: Synthetic oligonucleotide
agcccaagagccuguuaagaaacuc

SEQ ID NO: 124404 - RNA, 25 nt, Artificial Sequence
  Description of Artificial Sequence: Synthetic oligonucleotide
cgccaauagccggcgggccaaaaga

SEQ ID NO: 124405 - RNA, 25 nt, Artificial Sequence
  Description of Artificial Sequence: Synthetic oligonucleotide
aaccaagcccaauggccacauugcu

SEQ ID NO: 124406 - RNA, 25 nt, Artificial Sequence
  Description of Artificial Sequence: Synthetic oligonucleotide
uaacagauuggaaguggacagcaac

SEQ ID NO: 124407 - RNA, 25 nt, Artificial Sequence
  Description of Artificial Sequence: Synthetic oligonucleotide
cacaagcucccagagcaguaacuca

SEQ ID NO: 124408 - RNA, 25 nt, Artificial Sequence
  Description of Artificial Sequence: Synthetic oligonucleotide
agagagugaaacagaagaugaaaga

SEQ ID NO: 124409 - RNA, 25 nt, Artificial Sequence
  Description of Artificial Sequence: Synthetic oligonucleotide
aguaggugaagauacgccuuuccug

SEQ ID NO: 124410 - RNA, 25 nt, Artificial Sequence
  Description of Artificial Sequence: Synthetic oligonucleotide
gggcauacagaacccccuggcagcc

SEQ ID NO: 124411 - RNA, 25 nt, Artificial Sequence
  Description of Artificial Sequence: Synthetic oligonucleotide
cagucuugaggcaacaccugccuuc

SEQ ID NO: 124412 - RNA, 25 nt, Artificial Sequence
  Description of Artificial Sequence: Synthetic oligonucleotide
ccgccuggcugacagcaggacuaac

SEQ ID NO: 124413 - RNA, 25 nt, Artificial Sequence
  Description of Artificial Sequence: Synthetic oligonucleotide
cccagcaggccgcuucucgacacag

SEQ ID NO: 124414 - RNA, 25 nt, Artificial Sequence
  Description of Artificial Sequence: Synthetic oligonucleotide
ggaagaaauccaggccaggcugucu

SEQ ID NO: 124415 - RNA, 25 nt, Artificial Sequence
  Description of Artificial Sequence: Synthetic oligonucleotide
uaguguaauugcuaaccaagacccu

SEQ ID NO: 124416 - RNA, 25 nt, Artificial Sequence
  Description of Artificial Sequence: Synthetic oligonucleotide
uauugcuguauaaaaccuaaauaaa

SEQ ID NO: 124417 - RNA, 25 nt, Artificial Sequence
  Description of Artificial Sequence: Synthetic oligonucleotide
acacauagauucaccuguaaaacuu

SEQ ID NO: 124418 - RNA, 25 nt, Artificial Sequence
  Description of Artificial Sequence: Synthetic oligonucleotide
uuauuuuauauaauaaaguauucca

SEQ ID NO: 124419 - RNA, 25 nt, Artificial Sequence
  Description of Artificial Sequence: Synthetic oligonucleotide
accuuaaauuaaacaauuuauuuua

SEQ ID NO: 124420 - RNA, 25 nt, Artificial Sequence
  Description of Artificial Sequence: Synthetic oligonucleotide
auuuuagcaguucugcaaauagaaa

SEQ ID NO: 124421 - RNA, 25 nt, Artificial Sequence
  Description of Artificial Sequence: Synthetic oligonucleotide
aacaggaaaaaaacuuuuauaaauu

SEQ ID NO: 124422 - RNA, 25 nt, Artificial Sequence
  Description of Artificial Sequence: Synthetic oligonucleotide
agugaaagguaugugucagccauga

SEQ ID NO: 124423 - RNA, 25 nt, Artificial Sequence
  Description of Artificial Sequence: Synthetic oligonucleotide
accaccccggcucguaugucaccug

SEQ ID NO: 124424 - RNA, 25 nt, Artificial Sequence
  Description of Artificial Sequence: Synthetic oligonucleotide
guagauuuccacacgccaagcuccc

SEQ ID NO: 124425 - RNA, 25 nt, Artificial Sequence
  Description of Artificial Sequence: Synthetic oligonucleotide
cccaaaucgcccccuucggaaaugu

SEQ ID NO: 124426 - RNA, 25 nt, Artificial Sequence
  Description of Artificial Sequence: Synthetic oligonucleotide
ucuccacccguguccagcaugacgg

SEQ ID NO: 124427 - RNA, 25 nt, Artificial Sequence
  Description of Artificial Sequence: Synthetic oligonucleotide
guguccaugccuuccauggcgguca

SEQ ID NO: 124428 - RNA, 25 nt, Artificial Sequence
  Description of Artificial Sequence: Synthetic oligonucleotide
agccccuucauggaagaagagagac

SEQ ID NO: 124429 - RNA, 25 nt, Artificial Sequence
  Description of Artificial Sequence: Synthetic oligonucleotide
ccucuacuucucgugacaccaccaa

SEQ ID NO: 124430 - RNA, 25 nt, Artificial Sequence
  Description of Artificial Sequence: Synthetic oligonucleotide
aggcugcgggagaagaaguuugacc

SEQ ID NO: 124431 - RNA, 25 nt, Artificial Sequence
  Description of Artificial Sequence: Synthetic oligonucleotide
caucacccucagcaguucagcuccu

SEQ ID NO: 124432 - RNA, 25 nt, Artificial Sequence
  Description of Artificial Sequence: Synthetic oligonucleotide
uuccaccacaaccccgcgcaugaca

SEQ ID NO: 124433 - RNA, 25 nt, Artificial Sequence
  Description of Artificial Sequence: Synthetic oligonucleotide
aguaacagccucccugcuagccccu

SEQ ID NO: 124434 - RNA, 25 nt, Artificial Sequence
  Description of Artificial Sequence: Synthetic oligonucleotide
uugaggauaguggaggaugaggagu

SEQ ID NO: 124435 - RNA, 25 nt, Artificial Sequence
  Description of Artificial Sequence: Synthetic oligonucleotide
uaugaaacgacccaagaguacgagc

SEQ ID NO: 124436 - RNA, 25 nt, Artificial Sequence
  Description of Artificial Sequence: Synthetic oligonucleotide
ccagcccaagagccuguuaagaaac

SEQ ID NO: 124437 - RNA, 25 nt, Artificial Sequence
  Description of Artificial Sequence: Synthetic oligonucleotide
cucgccaauagccggcgggccaaaa

SEQ ID NO: 124438 - RNA, 25 nt, Artificial Sequence
  Description of Artificial Sequence: Synthetic oligonucleotide
agaaccaagcccaauggccacauug

SEQ ID NO: 124439 - RNA, 25 nt, Artificial Sequence
  Description of Artificial Sequence: Synthetic oligonucleotide
gcuaacagauuggaaguggacagca

SEQ ID NO: 124440 - RNA, 25 nt, Artificial Sequence
  Description of Artificial Sequence: Synthetic oligonucleotide
aacacaagcucccagagcaguaacu

SEQ ID NO: 124441 - RNA, 25 nt, Artificial Sequence
  Description of Artificial Sequence: Synthetic oligonucleotide
ucagagagugaaacagaagaugaaa

SEQ ID NO: 124442 - RNA, 25 nt, Artificial Sequence
  Description of Artificial Sequence: Synthetic oligonucleotide
agaguaggugaagauacgccuuucc

SEQ ID NO: 124443 - RNA, 25 nt, Artificial Sequence
  Description of Artificial Sequence: Synthetic oligonucleotide
cugggcauacagaacccccuggcag

SEQ ID NO: 124444 - RNA, 25 nt, Artificial Sequence
  Description of Artificial Sequence: Synthetic oligonucleotide
gccagucuugaggcaacaccugccu

SEQ ID NO: 124445 - RNA, 25 nt, Artificial Sequence
  Description of Artificial Sequence: Synthetic oligonucleotide
uuccgccuggcugacagcaggacua

SEQ ID NO: 124446 - RNA, 25 nt, Artificial Sequence
  Description of Artificial Sequence: Synthetic oligonucleotide
aacccagcaggccgcuucucgacac

SEQ ID NO: 124447 - RNA, 25 nt, Artificial Sequence
  Description of Artificial Sequence: Synthetic oligonucleotide
caggaagaaauccaggccaggcugu

SEQ ID NO: 124448 - RNA, 25 nt, Artificial Sequence
  Description of Artificial Sequence: Synthetic oligonucleotide
ucuaguguaauugcuaaccaagacc

SEQ ID NO: 124449 - RNA, 25 nt, Artificial Sequence
  Description of Artificial Sequence: Synthetic oligonucleotide
ccuauugcuguauaaaaccuaaaua

SEQ ID NO: 124450 - RNA, 25 nt, Artificial Sequence
  Description of Artificial Sequence: Synthetic oligonucleotide
aaacacauagauucaccuguaaaac

SEQ ID NO: 124451 - RNA, 25 nt, Artificial Sequence
  Description of Artificial Sequence: Synthetic oligonucleotide
cuuuauuuuauauaauaaaguauuc

SEQ ID NO: 124452 - RNA, 25 nt, Artificial Sequence
  Description of Artificial Sequence: Synthetic oligonucleotide
ccaccuuaaauuaaacaauuuauuu

SEQ ID NO: 124453 - RNA, 25 nt, Artificial Sequence
  Description of Artificial Sequence: Synthetic oligonucleotide
uuauuuuagcaguucugcaaauaga

SEQ ID NO: 124454 - RNA, 25 nt, Artificial Sequence
  Description of Artificial Sequence: Synthetic oligonucleotide
aaaacaggaaaaaaacuuuuauaaa

SEQ ID NO: 124455 - RNA, 25 nt, Artificial Sequence
  Description of Artificial Sequence: Synthetic oligonucleotide
cccucgagauacuugugcaaguaag

SEQ ID NO: 124456 - RNA, 25 nt, Artificial Sequence
  Description of Artificial Sequence: Synthetic oligonucleotide
gaaaagaaauccugugugucgcuua

SEQ ID NO: 124457 - RNA, 25 nt, Artificial Sequence
  Description of Artificial Sequence: Synthetic oligonucleotide
augucuauaacuccuuguuucagau

SEQ ID NO: 124458 - RNA, 25 nt, Artificial Sequence
  Description of Artificial Sequence: Synthetic oligonucleotide
ugauucuaugucucaugauguauug

SEQ ID NO: 124459 - RNA, 25 nt, Artificial Sequence
  Description of Artificial Sequence: Synthetic oligonucleotide
guugcuuuuuuuccaauuuuguugc

SEQ ID NO: 124460 - RNA, 25 nt, Artificial Sequence
  Description of Artificial Sequence: Synthetic oligonucleotide
caucauguugaauaaugcuguuuua

SEQ ID NO: 124461 - RNA, 25 nt, Artificial Sequence
  Description of Artificial Sequence: Synthetic oligonucleotide
auauguagaguguuuuaaaacauuc

SEQ ID NO: 124462 - RNA, 25 nt, Artificial Sequence
  Description of Artificial Sequence: Synthetic oligonucleotide
cacaccauucgucaucacuccucug

SEQ ID NO: 124463 - RNA, 25 nt, Artificial Sequence
  Description of Artificial Sequence: Synthetic oligonucleotide
gucauaugcagaauuguuuuuugcu

SEQ ID NO: 124464 - RNA, 25 nt, Artificial Sequence
  Description of Artificial Sequence: Synthetic oligonucleotide
ucuuuucaaugugugugagguguuu

SEQ ID NO: 124465 - RNA, 25 nt, Artificial Sequence
  Description of Artificial Sequence: Synthetic oligonucleotide
uuuuguuuuuguuuuuguuuuuugc

SEQ ID NO: 124466 - RNA, 25 nt, Artificial Sequence
  Description of Artificial Sequence: Synthetic oligonucleotide
ccauguuauuuauaguguugcuuuc

SEQ ID NO: 124467 - RNA, 25 nt, Artificial Sequence
  Description of Artificial Sequence: Synthetic oligonucleotide
ccuugugguuuuucuuguuguuauu

SEQ ID NO: 124468 - RNA, 25 nt, Artificial Sequence
  Description of Artificial Sequence: Synthetic oligonucleotide
ucagaaaagaugugcagauaucaca

SEQ ID NO: 124469 - RNA, 25 nt, Artificial Sequence
  Description of Artificial Sequence: Synthetic oligonucleotide
agaggccuauaacuuuugguaucua

SEQ ID NO: 124470 - RNA, 25 nt, Artificial Sequence
  Description of Artificial Sequence: Synthetic oligonucleotide
acuucuacauccaauguaugaauua

SEQ ID NO: 124471 - RNA, 25 nt, Artificial Sequence
  Description of Artificial Sequence: Synthetic oligonucleotide
aagcuguaagauaauguugcuuucu

SEQ ID NO: 124472 - RNA, 25 nt, Artificial Sequence
  Description of Artificial Sequence: Synthetic oligonucleotide
uuaucccagugaucaccugccaaau

SEQ ID NO: 124473 - RNA, 25 nt, Artificial Sequence
  Description of Artificial Sequence: Synthetic oligonucleotide
ugaauaagacaacaaagagaagcag

SEQ ID NO: 124474 - RNA, 25 nt, Artificial Sequence
  Description of Artificial Sequence: Synthetic oligonucleotide
gaagggcagaagauuauuuacugac

SEQ ID NO: 124475 - RNA, 25 nt, Artificial Sequence
  Description of Artificial Sequence: Synthetic oligonucleotide
cauauaucuauuacacuugggauug

SEQ ID NO: 124476 - RNA, 25 nt, Artificial Sequence
  Description of Artificial Sequence: Synthetic oligonucleotide
gucuuacuguugcauaacuauuuuu

SEQ ID NO: 124477 - RNA, 25 nt, Artificial Sequence
  Description of Artificial Sequence: Synthetic oligonucleotide
uuaaacggaguuuaguuuuauauug

SEQ ID NO: 124478 - RNA, 25 nt, Artificial Sequence
  Description of Artificial Sequence: Synthetic oligonucleotide
uaguuuuauauugcuaguaaaaaaa

SEQ ID NO: 124479 - RNA, 25 nt, Artificial Sequence
  Description of Artificial Sequence: Synthetic oligonucleotide
uucuacaguacguccacucccuuuc

SEQ ID NO: 124480 - RNA, 25 nt, Artificial Sequence
  Description of Artificial Sequence: Synthetic oligonucleotide
cugucucugccugaauaggagcaug

SEQ ID NO: 124481 - RNA, 25 nt, Artificial Sequence
  Description of Artificial Sequence: Synthetic oligonucleotide
gcucaguuggugcugcuuucuuguu

SEQ ID NO: 124482 - RNA, 25 nt, Artificial Sequence
  Description of Artificial Sequence: Synthetic oligonucleotide
ugcugcaucuccccucagauuccac

SEQ ID NO: 124483 - RNA, 25 nt, Artificial Sequence
  Description of Artificial Sequence: Synthetic oligonucleotide
ccuagagcuagaugugucuuaccag

SEQ ID NO: 124484 - RNA, 25 nt, Artificial Sequence
  Description of Artificial Sequence: Synthetic oligonucleotide
gaucuaauauugacugccucugccu

SEQ ID NO: 124485 - RNA, 25 nt, Artificial Sequence
  Description of Artificial Sequence: Synthetic oligonucleotide
ugucgcaugagaacauuaacaaaag

SEQ ID NO: 124486 - RNA, 25 nt, Artificial Sequence
  Description of Artificial Sequence: Synthetic oligonucleotide
gcaauuguauuacuuccucuguucg

SEQ ID NO: 124487 - RNA, 25 nt, Artificial Sequence
  Description of Artificial Sequence: Synthetic oligonucleotide
gcgacuaguuggcucugagauacua

SEQ ID NO: 124488 - RNA, 25 nt, Artificial Sequence
  Description of Artificial Sequence: Synthetic oligonucleotide
aauaggugugugaggcuccggaugu

SEQ ID NO: 124489 - RNA, 25 nt, Artificial Sequence
  Description of Artificial Sequence: Synthetic oligonucleotide
uuucuggaauugauauugaaugaug

SEQ ID NO: 124490 - RNA, 25 nt, Artificial Sequence
  Description of Artificial Sequence: Synthetic oligonucleotide
gugauacaaauugauagucaauauc

SEQ ID NO: 124491 - RNA, 25 nt, Artificial Sequence
  Description of Artificial Sequence: Synthetic oligonucleotide
caagcagugaaauaugauaauaaag

SEQ ID NO: 124492 - RNA, 25 nt, Artificial Sequence
  Description of Artificial Sequence: Synthetic oligonucleotide
ggcauuucaaagucucacuuuuauu

SEQ ID NO: 124493 - RNA, 25 nt, Artificial Sequence
  Description of Artificial Sequence: Synthetic oligonucleotide
ugauaaaauaaaaaucauucuacug

SEQ ID NO: 124494 - RNA, 25 nt, Artificial Sequence
  Description of Artificial Sequence: Synthetic oligonucleotide
gaacaguccaucuucuuuauacaau

SEQ ID NO: 124495 - RNA, 25 nt, Artificial Sequence
  Description of Artificial Sequence: Synthetic oligonucleotide
ugaccacauccugaaaaggguguug

SEQ ID NO: 124496 - RNA, 25 nt, Artificial Sequence
  Description of Artificial Sequence: Synthetic oligonucleotide
gcuaagcuguaaccgauaugcacuu

SEQ ID NO: 124497 - RNA, 25 nt, Artificial Sequence
  Description of Artificial Sequence: Synthetic oligonucleotide
ugaaaugaugguaaguuaauuuuga

SEQ ID NO: 124498 - RNA, 25 nt, Artificial Sequence
  Description of Artificial Sequence: Synthetic oligonucleotide
auucagaauguguuauuugucacaa

SEQ ID NO: 124499 - RNA, 25 nt, Artificial Sequence
  Description of Artificial Sequence: Synthetic oligonucleotide
aauaaacauaauaaaaggaguucag

SEQ ID NO: 124500 - DNA, 21 bp, Artificial Sequence
  Description of Artificial Sequence: Synthetic oligonucleotide
  Description of Combined DNA/RNA Molecule: Synthetic oligonucleotide
cuacacaaaucagcgauuutt

SEQ ID NO: 124501 - DNA, 21 bp, Artificial Sequence
  Description of Artificial Sequence: Synthetic oligonucleotide
  Description of Combined DNA/RNA Molecule: Synthetic oligonucleotide
aaaucgcugauuuguguagtt

SEQ ID NO: 124502 - DNA, 25 bp, Artificial Sequence
  Description of Artificial Sequence: Synthetic oligonucleotide
  Description of Combined DNA/RNA Molecule: Synthetic oligonucleotide
cuacacaaaucagcgauuuccaugt

SEQ ID NO: 124503 - RNA, 27 nt, Artificial Sequence
  Description of Artificial Sequence: Synthetic oligonucleotide
acauggaaaucgcugauuuguguaguc

SEQ ID NO: 124504 - RNA, 13 nt, Artificial Sequence
  Description of Artificial Sequence: Synthetic oligonucleotide
cuacacaaaucag

SEQ ID NO: 124505 - DNA, 11 bp, Artificial Sequence
  Description of Artificial Sequence: Synthetic oligonucleotide
  Description of Combined DNA/RNA Molecule: Synthetic oligonucleotide
gauuuccaugt

SEQ ID NO: 124506 - DNA, 21 bp, Artificial Sequence
  Description of Artificial Sequence: Synthetic oligonucleotide
  Description of Combined DNA/RNA Molecule: Synthetic oligonucleotide
ggaucuuauuucuucggagtt

SEQ ID NO: 124507 - DNA, 21 bp, Artificial Sequence
  Description of Artificial Sequence: Synthetic oligonucleotide
  Description of Combined DNA/RNA Molecule: Synthetic oligonucleotide
cuccgaagaaauaagaucctt

SEQ ID NO: 124508 - RNA, 11 nt, Artificial Sequence
  Description of Artificial Sequence: Synthetic oligonucleotide
ggaucuuauuu

SEQ ID NO: 124509 - DNA, 10 bp, Artificial Sequence
  Description of Artificial Sequence: Synthetic oligonucleotide
  Description of Combined DNA/RNA Molecule: Synthetic oligonucleotide
cuucggagtt

SEQ ID NO: 124510 - RNA, 27 nt, Artificial Sequence
  Description of Artificial Sequence: Synthetic oligonucleotide
cauugucuccgaagaaauaagauccuu

SEQ ID NO: 124511 - RNA, 8 nt, Artificial Sequence
  Description of Artificial Sequence: Synthetic oligonucleotide
  modified_base (2): LNA-G
ggaucuua

SEQ ID NO: 124512 - DNA, 17 bp, Artificial Sequence
  Description of Artificial Sequence: Synthetic oligonucleotide
  Description of Combined DNA/RNA Molecule: Synthetic oligonucleotide
uuucuucggagacaatg

SEQ ID NO: 124513 - DNA, 16 bp, Artificial Sequence
  Description of Artificial Sequence: Synthetic oligonucleotide
  Description of Combined DNA/RNA Molecule: Synthetic oligonucleotide
uucuucggagacaatg

SEQ ID NO: 124514 - DNA, 15 bp, Artificial Sequence
  Description of Artificial Sequence: Synthetic oligonucleotide
  Description of Combined DNA/RNA Molecule: Synthetic oligonucleotide
ucuucggagacaatg

SEQ ID NO: 124515 - DNA, 14 bp, Artificial Sequence
  Description of Artificial Sequence: Synthetic oligonucleotide
  Description of Combined DNA/RNA Molecule: Synthetic oligonucleotide
cuucggagacaatg

SEQ ID NO: 124516 - DNA, 13 bp, Artificial Sequence
  Description of Artificial Sequence: Synthetic oligonucleotide
  Description of Combined DNA/RNA Molecule: Synthetic oligonucleotide
uucggagacaatg

SEQ ID NO: 124517 - DNA, 12 bp, Artificial Sequence
  Description of Artificial Sequence: Synthetic oligonucleotide
  Description of Combined DNA/RNA Molecule: Synthetic oligonucleotide
ucggagacaatg

SEQ ID NO: 124518 - DNA, 11 bp, Artificial Sequence
  Description of Artificial Sequence: Synthetic oligonucleotide
  Description of Combined DNA/RNA Molecule: Synthetic oligonucleotide
cggagacaatg

SEQ ID NO: 124519 - RNA, 9 nt, Artificial Sequence
  Description of Artificial Sequence: Synthetic oligonucleotide
  modified_base (2): LNA-G
ggaucuuau

SEQ ID NO: 124520 - RNA, 10 nt, Artificial Sequence
  Description of Artificial Sequence: Synthetic oligonucleotide
  modified_base (2): LNA-G
ggaucuuauu

SEQ ID NO: 124521 - RNA, 11 nt, Artificial Sequence
  Description of Artificial Sequence: Synthetic oligonucleotide
  modified_base (2): LNA-G
ggaucuuauuu

SEQ ID NO: 124522 - RNA, 12 nt, Artificial Sequence
  Description of Artificial Sequence: Synthetic oligonucleotide
  modified_base (2): LNA-G
ggaucuuauuuc

SEQ ID NO: 124523 - RNA, 8 nt, Artificial Sequence
  Description of Artificial Sequence: Synthetic oligonucleotide
  modified_base (3): LNA-A
cuacacaa

SEQ ID NO: 124524 - DNA, 13 bp, Artificial Sequence
  Description of Artificial Sequence: Synthetic oligonucleotide
  Description of Combined DNA/RNA Molecule: Synthetic oligonucleotide
  modified_base (8): LNA-A
aucagcgauuutt

SEQ ID NO: 124525 - DNA, 12 bp, Artificial Sequence
  Description of Artificial Sequence: Synthetic oligonucleotide
  Description of Combined DNA/RNA Molecule: Synthetic oligonucleotide
  modified_base (7): LNA-A
ucagcgauuutt

SEQ ID NO: 124526 - DNA, 11 bp, Artificial Sequence
  Description of Artificial Sequence: Synthetic oligonucleotide
  Description of Combined DNA/RNA Molecule: Synthetic oligonucleotide
  modified_base (6): LNA-A
cagcgauuutt

SEQ ID NO: 124527 - DNA, 10 bp, Artificial Sequence
  Description of Artificial Sequence: Synthetic oligonucleotide
  Description of Combined DNA/RNA Molecule: Synthetic oligonucleotide
  modified_base (5): LNA-A
agcgauuutt

SEQ ID NO: 124528 - DNA, 9 bp, Artificial Sequence
  Description of Artificial Sequence: Synthetic oligonucleotide
  Description of Combined DNA/RNA Molecule: Synthetic oligonucleotide
  modified_base (4): LNA-A
gcgauuutt

SEQ ID NO: 124529 - DNA, 8 bp, Artificial Sequence
  Description of Artificial Sequence: Synthetic oligonucleotide
  Description of Combined DNA/RNA Molecule: Synthetic oligonucleotide
  modified_base (3): LNA-A
cgauuutt

SEQ ID NO: 124530 - DNA, 7 bp, Artificial Sequence
  Description of Artificial Sequence: Synthetic oligonucleotide
  Description of Combined DNA/RNA Molecule: Synthetic oligonucleotide
  modified_base (2): LNA-A
gauuutt

SEQ ID NO: 124531 - RNA, 9 nt, Artificial Sequence
  Description of Artificial Sequence: Synthetic oligonucleotide
  modified_base (3): LNA-A
cuacacaaa

SEQ ID NO: 124532 - RNA, 10 nt, Artificial Sequence
  Description of Artificial Sequence: Synthetic oligonucleotide
  modified_base (3): LNA-A
cuacacaaau

SEQ ID NO: 124533 - RNA, 11 nt, Artificial Sequence
  Description of Artificial Sequence: Synthetic oligonucleotide
  modified_base (3): LNA-A
cuacacaaauc

SEQ ID NO: 124534 - RNA, 12 nt, Artificial Sequence
  Description of Artificial Sequence: Synthetic oligonucleotide
  modified_base (3): LNA-A
cuacacaaauca

SEQ ID NO: 124535 - RNA, 13 nt, Artificial Sequence
  Description of Artificial Sequence: Synthetic oligonucleotide
  modified_base (3): LNA-A
cuacacaaaucag

SEQ ID NO: 124536 - RNA, 14 nt, Artificial Sequence
  Description of Artificial Sequence: Synthetic oligonucleotide
  modified_base (3): LNA-A
cuacacaaaucagc

SEQ ID NO: 124537 - RNA, 13 nt, Artificial Sequence
  Description of Artificial Sequence: Synthetic oligonucleotide
  modified_base (2): LNA-G
ggaucuuauuucu

SEQ ID NO: 124538 - RNA, 14 nt, Artificial Sequence
  Description of Artificial Sequence: Synthetic oligonucleotide
  modified_base (2): LNA-G
ggaucuuauuucuu

SEQ ID NO: 124539 - RNA, 8 nt, Artificial Sequence
  Description of Artificial Sequence: Synthetic oligonucleotide
  modified_base (2): LNA-G
  modified_base (8): LNA-A
ggaucuua

SEQ ID NO: 124540 - RNA, 9 nt, Artificial Sequence
  Description of Artificial Sequence: Synthetic oligonucleotide
  modified_base (2): LNA-G
  modified_base (9): LNA-U
ggaucuuau

SEQ ID NO: 124541 - RNA, 10 nt, Artificial Sequence
  Description of Artificial Sequence: Synthetic oligonucleotide
  modified_base (2): LNA-G
  modified_base (10): LNA-U
ggaucuuauu

SEQ ID NO: 124542 - RNA, 11 nt, Artificial Sequence
  Description of Artificial Sequence: Synthetic oligonucleotide
  modified_base (2): LNA-G
  modified_base (11): LNA-U
ggaucuuauuu

SEQ ID NO: 124543 - RNA, 12 nt, Artificial Sequence
  Description of Artificial Sequence: Synthetic oligonucleotide
  modified_base (2): LNA-G
  modified_base (12): LNA-C
ggaucuuauuuc

SEQ ID NO: 124544 - RNA, 13 nt, Artificial Sequence
  Description of Artificial Sequence: Synthetic oligonucleotide
  modified_base (2): LNA-G
  modified_base (13): LNA-U
ggaucuuauuucu

SEQ ID NO: 124545 - RNA, 14 nt, Artificial Sequence
  Description of Artificial Sequence: Synthetic oligonucleotide
  modified_base (2): LNA-G
  modified_base (14): LNA-U
ggaucuuauuucuu

SEQ ID NO: 124546 - DNA, 13 bp, Artificial Sequence
  Description of Artificial Sequence: Synthetic oligonucleotide
  Description of Combined DNA/RNA Molecule: Synthetic oligonucleotide
  modified_base (8): LNA-G
uuucuucggagtt

SEQ ID NO: 124547 - DNA, 12 bp, Artificial Sequence
  Description of Artificial Sequence: Synthetic oligonucleotide
  Description of Combined DNA/RNA Molecule: Synthetic oligonucleotide
  modified_base (7): LNA-G
uucuucggagtt

SEQ ID NO: 124548 - DNA, 11 bp, Artificial Sequence
  Description of Artificial Sequence: Synthetic oligonucleotide
  Description of Combined DNA/RNA Molecule: Synthetic oligonucleotide
  modified_base (6): LNA-G
ucuucggagtt

SEQ ID NO: 124549 - DNA, 10 bp, Artificial Sequence
  Description of Artificial Sequence: Synthetic oligonucleotide
  Description of Combined DNA/RNA Molecule: Synthetic oligonucleotide
  modified_base (5): LNA-G
cuucggagtt

SEQ ID NO: 124550 - DNA, 9 bp, Artificial Sequence
  Description of Artificial Sequence: Synthetic oligonucleotide
  Description of Combined DNA/RNA Molecule: Synthetic oligonucleotide
  modified_base (4): LNA-G
uucggagtt

SEQ ID NO: 124551 - DNA, 8 bp, Artificial Sequence
  Description of Artificial Sequence: Synthetic oligonucleotide
  Description of Combined DNA/RNA Molecule: Synthetic oligonucleotide
  modified_base (3): LNA-G
ucggagtt

SEQ ID NO: 124552 - DNA, 7 bp, Artificial Sequence
  Description of Artificial Sequence: Synthetic oligonucleotide
  Description of Combined DNA/RNA Molecule: Synthetic oligonucleotide
  modified_base (2): LNA-G
cggagtt

SEQ ID NO: 124553 - DNA, 13 bp, Artificial Sequence
  Description of Artificial Sequence: Synthetic oligonucleotide
  Description of Combined DNA/RNA Molecule: Synthetic oligonucleotide
  modified_base (1): LNA-U
  modified_base (8): LNA-G
uuucuucggagtt

SEQ ID NO: 124554 - DNA, 12 bp, Artificial Sequence
  Description of Artificial Sequence: Synthetic oligonucleotide
  Description of Combined DNA/RNA Molecule: Synthetic oligonucleotide
  modified_base (1): LNA-U
  modified_base (7): LNA-G
uucuucggagtt

SEQ ID NO: 124555 - DNA, 11 bp, Artificial Sequence
  Description of Artificial Sequence: Synthetic oligonucleotide
  Description of Combined DNA/RNA Molecule: Synthetic oligonucleotide
  modified_base (1): LNA-U
  modified_base (6): LNA-G
ucuucggagtt

SEQ ID NO: 124556 - DNA, 10 bp, Artificial Sequence
  Description of Artificial Sequence: Synthetic oligonucleotide
  Description of Combined DNA/RNA Molecule: Synthetic oligonucleotide
  modified_base (1): LNA-C
  modified_base (5): LNA-G
cuucggagtt

SEQ ID NO: 124557 - DNA, 9 bp, Artificial Sequence
  Description of Artificial Sequence: Synthetic oligonucleotide
  Description of Combined DNA/RNA Molecule: Synthetic oligonucleotide
  modified_base (1): LNA-U
  modified_base (4): LNA-G
uucggagtt

SEQ ID NO: 124558 - DNA, 8 bp, Artificial Sequence
  Description of Artificial Sequence: Synthetic oligonucleotide
  Description of Combined DNA/RNA Molecule: Synthetic oligonucleotide
  modified_base (1): LNA-U
  modified_base (3): LNA-G
ucggagtt

SEQ ID NO: 124559 - DNA, 7 bp, Artificial Sequence
  Description of Artificial Sequence: Synthetic oligonucleotide
  Description of Combined DNA/RNA Molecule: Synthetic oligonucleotide
  modified_base (1): LNA-C
  modified_base (2): LNA-G
cggagtt

SEQ ID NO: 124560 - DNA, 21 bp, Artificial Sequence
  Description of Artificial Sequence: Synthetic oligonucleotide
  Description of Combined DNA/RNA Molecule: Synthetic oligonucleotide
  modified_base (2): LNA-G
  modified_base (16): LNA-G
ggaucuuauuucuucggagtt

SEQ ID NO: 124561 - DNA, 25 bp, Artificial Sequence
  Description of Artificial Sequence: Synthetic oligonucleotide
  Description of Combined DNA/RNA Molecule: Synthetic oligonucleotide
ggaucuuauuucuucggagacaatg

SEQ ID NO: 124562 - RNA, 25 nt, Artificial Sequence
  Description of Artificial Sequence: Synthetic oligonucleotide
guauuuugaugaggaguucacggcc

SEQ ID NO: 124563 - RNA, 25 nt, Artificial Sequence
  Description of Artificial Sequence: Synthetic oligonucleotide
ggcccagaugaucaccaucacacca

SEQ ID NO: 124564 - RNA, 25 nt, Artificial Sequence
  Description of Artificial Sequence: Synthetic oligonucleotide
gggaagaaaacuauccugcggguuu

SEQ ID NO: 124565 - RNA, 25 nt, Artificial Sequence
  Description of Artificial Sequence: Synthetic oligonucleotide
guuuuaauuuauuucauccaguuug

SEQ ID NO: 124566 - RNA, 25 nt, Artificial Sequence
  Description of Artificial Sequence: Synthetic oligonucleotide
acguagggaaauguuaaggacuucu

SEQ ID NO: 124567 - RNA, 25 nt, Artificial Sequence
  Description of Artificial Sequence: Synthetic oligonucleotide
ccaggguuuacccagugggacagag

SEQ ID NO: 124568 - RNA, 25 nt, Artificial Sequence
  Description of Artificial Sequence: Synthetic oligonucleotide
agcaagguuuaaauuuguuauugug

SEQ ID NO: 124569 - RNA, 25 nt, Artificial Sequence
  Description of Artificial Sequence: Synthetic oligonucleotide
uguauuauguuguucaaaugcauuu

SEQ ID NO: 124570 - RNA, 25 nt, Artificial Sequence
  Description of Artificial Sequence: Synthetic oligonucleotide
uuuuaaucuuugugacaggaaagcc

SEQ ID NO: 124571 - RNA, 25 nt, Artificial Sequence
  Description of Artificial Sequence: Synthetic oligonucleotide
uuaaucuuugugacaggaaagcccu

SEQ ID NO: 124572 - RNA, 25 nt, Artificial Sequence
  Description of Artificial Sequence: Synthetic oligonucleotide
gcugcuuaugucucccagcauggcc

SEQ ID NO: 124573 - RNA, 25 nt, Artificial Sequence
  Description of Artificial Sequence: Synthetic oligonucleotide
aaguguuucagaagcuucucccuga

SEQ ID NO: 124574 - RNA, 25 nt, Artificial Sequence
  Description of Artificial Sequence: Synthetic oligonucleotide
gaccaucaauaaggaagaagcccuu

SEQ ID NO: 124575 - RNA, 25 nt, Artificial Sequence
  Description of Artificial Sequence: Synthetic oligonucleotide
ccaucaauaaggaagaagcccuuca

SEQ ID NO: 124576 - RNA, 25 nt, Artificial Sequence
  Description of Artificial Sequence: Synthetic oligonucleotide
ucaauaaggaagaagcccuucagcg

SEQ ID NO: 124577 - RNA, 25 nt, Artificial Sequence
  Description of Artificial Sequence: Synthetic oligonucleotide
aauaaggaagaagcccuucagcggc

SEQ ID NO: 124578 - RNA, 25 nt, Artificial Sequence
  Description of Artificial Sequence: Synthetic oligonucleotide
aggaagaagcccuucagcggccagu

SEQ ID NO: 124579 - RNA, 25 nt, Artificial Sequence
  Description of Artificial Sequence: Synthetic oligonucleotide
gcauaacuaaaggugaaaagcuccg

SEQ ID NO: 124580 - RNA, 25 nt, Artificial Sequence
  Description of Artificial Sequence: Synthetic oligonucleotide
cauaacuaaaggugaaaagcuccgg

SEQ ID NO: 124581 - RNA, 25 nt, Artificial Sequence
  Description of Artificial Sequence: Synthetic oligonucleotide
cuacaucacgccagucaacagucug

SEQ ID NO: 124582 - RNA, 25 nt, Artificial Sequence
  Description of Artificial Sequence: Synthetic oligonucleotide
acuggauuuaagcagaguucaaaag

SEQ ID NO: 124583 - RNA, 25 nt, Artificial Sequence
  Description of Artificial Sequence: Synthetic oligonucleotide
cuggauuuaagcagaguucaaaagc

SEQ ID NO: 124584 - RNA, 25 nt, Artificial Sequence
  Description of Artificial Sequence: Synthetic oligonucleotide
gauuuaagcagaguucaaaagcccu

SEQ ID NO: 124585 - RNA, 25 nt, Artificial Sequence
  Description of Artificial Sequence: Synthetic oligonucleotide
auuuaagcagaguucaaaagcccuu

SEQ ID NO: 124586 - RNA, 25 nt, Artificial Sequence
  Description of Artificial Sequence: Synthetic oligonucleotide
uuaagcagaguucaaaagcccuuca

SEQ ID NO: 124587 - RNA, 25 nt, Artificial Sequence
  Description of Artificial Sequence: Synthetic oligonucleotide
uaagcagaguucaaaagcccuucag

SEQ ID NO: 124588 - RNA, 25 nt, Artificial Sequence
  Description of Artificial Sequence: Synthetic oligonucleotide
agcagaguucaaaagcccuucagcg

SEQ ID NO: 124589 - RNA, 25 nt, Artificial Sequence
  Description of Artificial Sequence: Synthetic oligonucleotide
cucagggucugagugaagccgcucg

SEQ ID NO: 124590 - RNA, 25 nt, Artificial Sequence
  Description of Artificial Sequence: Synthetic oligonucleotide
caagcaacuacaucacgccagucaa

SEQ ID NO: 124591 - RNA, 25 nt, Artificial Sequence
  Description of Artificial Sequence: Synthetic oligonucleotide
aucaauggcagcuucuuggugcgug

SEQ ID NO: 124592 - RNA, 25 nt, Artificial Sequence
  Description of Artificial Sequence: Synthetic oligonucleotide
uuccagcccacauuggauucaucag

SEQ ID NO: 124593 - RNA, 25 nt, Artificial Sequence
  Description of Artificial Sequence: Synthetic oligonucleotide
cagcugagaauguggaauaccuaag

SEQ ID NO: 124594 - RNA, 25 nt, Artificial Sequence
  Description of Artificial Sequence: Synthetic oligonucleotide
aacguaucuccuaauuugaggcuca

SEQ ID NO: 124595 - RNA, 25 nt, Artificial Sequence
  Description of Artificial Sequence: Synthetic oligonucleotide
ccuaaaauaauuucucuacaauugg

SEQ ID NO: 124596 - RNA, 25 nt, Artificial Sequence
  Description of Artificial Sequence: Synthetic oligonucleotide
uggaagauucagcuaguuaggagcc

SEQ ID NO: 124597 - RNA, 25 nt, Artificial Sequence
  Description of Artificial Sequence: Synthetic oligonucleotide
uuaaacucuccuagucaauauccac

SEQ ID NO: 124598 - RNA, 25 nt, Artificial Sequence
  Description of Artificial Sequence: Synthetic oligonucleotide
cagccuacaguuauguucagucaca

SEQ ID NO: 124599 - RNA, 25 nt, Artificial Sequence
  Description of Artificial Sequence: Synthetic oligonucleotide
guuauguucagucacacacacauac

SEQ ID NO: 124600 - RNA, 25 nt, Artificial Sequence
  Description of Artificial Sequence: Synthetic oligonucleotide
cacauacaaaauguuccuuuugcuu

SEQ ID NO: 124601 - RNA, 25 nt, Artificial Sequence
  Description of Artificial Sequence: Synthetic oligonucleotide
uccuuuugcuuuuaaaguaauuuuu

SEQ ID NO: 124602 - RNA, 25 nt, Artificial Sequence
  Description of Artificial Sequence: Synthetic oligonucleotide
ugaccugugaagcaacagucaaugg

SEQ ID NO: 124603 - RNA, 25 nt, Artificial Sequence
  Description of Artificial Sequence: Synthetic oligonucleotide
cuaucucacacaucgacaaaccaau

SEQ ID NO: 124604 - RNA, 25 nt, Artificial Sequence
  Description of Artificial Sequence: Synthetic oligonucleotide
uguccucaauuguacugcuaccacu

SEQ ID NO: 124605 - RNA, 25 nt, Artificial Sequence
  Description of Artificial Sequence: Synthetic oligonucleotide
aaaccguagcuggcaagcggucuua

SEQ ID NO: 124606 - RNA, 25 nt, Artificial Sequence
  Description of Artificial Sequence: Synthetic oligonucleotide
uagcuggcaagcggucuuaccggcu

SEQ ID NO: 124607 - RNA, 25 nt, Artificial Sequence
  Description of Artificial Sequence: Synthetic oligonucleotide
uuguaugguuaaaagauggguuacc

SEQ ID NO: 124608 - RNA, 25 nt, Artificial Sequence
  Description of Artificial Sequence: Synthetic oligonucleotide
ugguuaaaagauggguuaccugcga

SEQ ID NO: 124609 - RNA, 25 nt, Artificial Sequence
  Description of Artificial Sequence: Synthetic oligonucleotide
cagggaauuauacaaucuugcugag

SEQ ID NO: 124610 - RNA, 25 nt, Artificial Sequence
  Description of Artificial Sequence: Synthetic oligonucleotide
acaaucuugcugagcauaaaacagu

SEQ ID NO: 124611 - RNA, 25 nt, Artificial Sequence
  Description of Artificial Sequence: Synthetic oligonucleotide
ccaauaaugaagaguccuuuauccu

SEQ ID NO: 124612 - RNA, 25 nt, Artificial Sequence
  Description of Artificial Sequence: Synthetic oligonucleotide
acuuuggauguuccaacgcaaguug

SEQ ID NO: 124613 - RNA, 25 nt, Artificial Sequence
  Description of Artificial Sequence: Synthetic oligonucleotide
aaugcuuccacuaaacugaaaccau

SEQ ID NO: 124614 - RNA, 25 nt, Artificial Sequence
  Description of Artificial Sequence: Synthetic oligonucleotide
gagaaaguuugacuuuguuaaauau

SEQ ID NO: 124615 - RNA, 25 nt, Artificial Sequence
  Description of Artificial Sequence: Synthetic oligonucleotide
aaagaacuacuguauauuaaaaguu

SEQ ID NO: 124616 - RNA, 25 nt, Artificial Sequence
  Description of Artificial Sequence: Synthetic oligonucleotide
uuagaaauacggguuuugacuuaac

SEQ ID NO: 124617 - RNA, 25 nt, Artificial Sequence
  Description of Artificial Sequence: Synthetic oligonucleotide
aacauggguacagcaaacucagcac

SEQ ID NO: 124618 - RNA, 25 nt, Artificial Sequence
  Description of Artificial Sequence: Synthetic oligonucleotide
aaagacacagaagaugcugaccuca

SEQ ID NO: 124619 - RNA, 25 nt, Artificial Sequence
  Description of Artificial Sequence: Synthetic oligonucleotide
uaguagggagguuuauucagaucgc

SEQ ID NO: 124620 - RNA, 25 nt, Artificial Sequence
  Description of Artificial Sequence: Synthetic oligonucleotide
gccuucugcagcaggguucugggau

SEQ ID NO: 124621 - RNA, 25 nt, Artificial Sequence
  Description of Artificial Sequence: Synthetic oligonucleotide
ggucugguacauauuggaaauuaug

SEQ ID NO: 124622 - RNA, 25 nt, Artificial Sequence
  Description of Artificial Sequence: Synthetic oligonucleotide
cuaguccuuccgauggaagcacuag

SEQ ID NO: 124623 - RNA, 25 nt, Artificial Sequence
  Description of Artificial Sequence: Synthetic oligonucleotide
ccagugaauauuguuuuuaugugga

SEQ ID NO: 124624 - RNA, 25 nt, Artificial Sequence
  Description of Artificial Sequence: Synthetic oligonucleotide
augaauucaaguuggaauugguaga

SEQ ID NO: 124625 - RNA, 25 nt, Artificial Sequence
  Description of Artificial Sequence: Synthetic oligonucleotide
caggacacagauuuagacuuggaga

SEQ ID NO: 124626 - RNA, 25 nt, Artificial Sequence
  Description of Artificial Sequence: Synthetic oligonucleotide
cucaaagcacaguuacaguauucca

SEQ ID NO: 124627 - RNA, 25 nt, Artificial Sequence
  Description of Artificial Sequence: Synthetic oligonucleotide
accacugccaccacugaugaauuaa

SEQ ID NO: 124628 - RNA, 25 nt, Artificial Sequence
  Description of Artificial Sequence: Synthetic oligonucleotide
gaaacuacuagugccacaucaucac

SEQ ID NO: 124629 - RNA, 25 nt, Artificial Sequence
  Description of Artificial Sequence: Synthetic oligonucleotide
aagucggacagccucaccaaacaga

SEQ ID NO: 124630 - RNA, 25 nt, Artificial Sequence
  Description of Artificial Sequence: Synthetic oligonucleotide
gaaagcgaaaaauggaacaugaugg

SEQ ID NO: 124631 - RNA, 25 nt, Artificial Sequence
  Description of Artificial Sequence: Synthetic oligonucleotide
cccucugauuuagcauguagacugc

SEQ ID NO: 124632 - RNA, 25 nt, Artificial Sequence
  Description of Artificial Sequence: Synthetic oligonucleotide
ugagcuauuuaaggaucuauuuaug

SEQ ID NO: 124633 - RNA, 25 nt, Artificial Sequence
  Description of Artificial Sequence: Synthetic oligonucleotide
aaaaggugaaaaagcacuauuauca

SEQ ID NO: 124634 - RNA, 25 nt, Artificial Sequence
  Description of Artificial Sequence: Synthetic oligonucleotide
gaaaaagcacuauuaucaguucugc

SEQ ID NO: 124635 - RNA, 25 nt, Artificial Sequence
  Description of Artificial Sequence: Synthetic oligonucleotide
ggcugaaaagaaagauuaaaccuac

SEQ ID NO: 124636 - RNA, 25 nt, Artificial Sequence
  Description of Artificial Sequence: Synthetic oligonucleotide
uaaacccuuauaauaaaauccuucu

SEQ ID NO: 124637 - RNA, 25 nt, Artificial Sequence
  Description of Artificial Sequence: Synthetic oligonucleotide
cauacuauuagccaaugcuguagac

SEQ ID NO: 124638 - RNA, 25 nt, Artificial Sequence
  Description of Artificial Sequence: Synthetic oligonucleotide
gacagaagcauuuugauaggaauag

SEQ ID NO: 124639 - RNA, 25 nt, Artificial Sequence
  Description of Artificial Sequence: Synthetic oligonucleotide
agagcaaauaagauaauggcccuga

SEQ ID NO: 124640 - RNA, 25 nt, Artificial Sequence
  Description of Artificial Sequence: Synthetic oligonucleotide
ccaacauuuuucucuuccucaagca

SEQ ID NO: 124641 - RNA, 25 nt, Artificial Sequence
  Description of Artificial Sequence: Synthetic oligonucleotide
uuaaguaugagaaaaguucagccca

SEQ ID NO: 124642 - RNA, 25 nt, Artificial Sequence
  Description of Artificial Sequence: Synthetic oligonucleotide
caggaauaaagauggcugcugaacc

SEQ ID NO: 124643 - RNA, 25 nt, Artificial Sequence
  Description of Artificial Sequence: Synthetic oligonucleotide
aauuugaaugaccaaguucucuuca

SEQ ID NO: 124644 - RNA, 25 nt, Artificial Sequence
  Description of Artificial Sequence: Synthetic oligonucleotide
auguauaaagauagccagccuagag

SEQ ID NO: 124645 - RNA, 25 nt, Artificial Sequence
  Description of Artificial Sequence: Synthetic oligonucleotide
ggcuguaacuaucucugugaagugu

SEQ ID NO: 124646 - RNA, 25 nt, Artificial Sequence
  Description of Artificial Sequence: Synthetic oligonucleotide
ucugugaagugugagaaaauuucaa

SEQ ID NO: 124647 - RNA, 25 nt, Artificial Sequence
  Description of Artificial Sequence: Synthetic oligonucleotide
ccuuuaaggaaaugaauccuccuga

SEQ ID NO: 124648 - RNA, 25 nt, Artificial Sequence
  Description of Artificial Sequence: Synthetic oligonucleotide
aaggauacaaaaagugacaucauau

SEQ ID NO: 124649 - RNA, 25 nt, Artificial Sequence
  Description of Artificial Sequence: Synthetic oligonucleotide
agaugcaauuugaaucuucaucaua

SEQ ID NO: 124650 - RNA, 25 nt, Artificial Sequence
  Description of Artificial Sequence: Synthetic oligonucleotide
guucaaaacgaagacuagcuauuaa

SEQ ID NO: 124651 - RNA, 25 nt, Artificial Sequence
  Description of Artificial Sequence: Synthetic oligonucleotide
gugaaaccucaucucuacuaaaaau

SEQ ID NO: 124652 - RNA, 25 nt, Artificial Sequence
  Description of Artificial Sequence: Synthetic oligonucleotide
acgaaagagaagcucuaucucgccu

SEQ ID NO: 124653 - RNA, 25 nt, Artificial Sequence
  Description of Artificial Sequence: Synthetic oligonucleotide
cuccacaagcgccuucgguccaguu

SEQ ID NO: 124654 - RNA, 25 nt, Artificial Sequence
  Description of Artificial Sequence: Synthetic oligonucleotide
gagaagauuccaaagauguagccgc

SEQ ID NO: 124655 - RNA, 25 nt, Artificial Sequence
  Description of Artificial Sequence: Synthetic oligonucleotide
aaucuggauucaaugaggagacuug

SEQ ID NO: 124656 - RNA, 25 nt, Artificial Sequence
  Description of Artificial Sequence: Synthetic oligonucleotide
agaacagauuugagaguagugagga

SEQ ID NO: 124657 - RNA, 25 nt, Artificial Sequence
  Description of Artificial Sequence: Synthetic oligonucleotide
ccagagcugugcagaugaguacaaa

SEQ ID NO: 124658 - RNA, 25 nt, Artificial Sequence
  Description of Artificial Sequence: Synthetic oligonucleotide
ccucagauuguuguuguuaaugggc

SEQ ID NO: 124659 - RNA, 25 nt, Artificial Sequence
  Description of Artificial Sequence: Synthetic oligonucleotide
cuauuuuaauuauuuuuaauuuauu

SEQ ID NO: 124660 - RNA, 25 nt, Artificial Sequence
  Description of Artificial Sequence: Synthetic oligonucleotide
uuuaauuuauuaauauuuaaauaug

SEQ ID NO: 124661 - RNA, 25 nt, Artificial Sequence
  Description of Artificial Sequence: Synthetic oligonucleotide
augcaguuugaauauccuuuguuuc

SEQ ID NO: 124662 - RNA, 25 nt, Artificial Sequence
  Description of Artificial Sequence: Synthetic oligonucleotide
caugcugcuggcgucuaaguguuug

SEQ ID NO: 124663 - RNA, 25 nt, Artificial Sequence
  Description of Artificial Sequence: Synthetic oligonucleotide
agaugugcauuucaccugugacaaa

SEQ ID NO: 124664 - RNA, 25 nt, Artificial Sequence
  Description of Artificial Sequence: Synthetic oligonucleotide
ucaaaaccugugccaggcugaauua

SEQ ID NO: 124665 - RNA, 25 nt, Artificial Sequence
  Description of Artificial Sequence: Synthetic oligonucleotide
gaauguggguagucauucuuacaau

SEQ ID NO: 124666 - RNA, 25 nt, Artificial Sequence
  Description of Artificial Sequence: Synthetic oligonucleotide
auguggguagucauucuuacaauug

SEQ ID NO: 124667 - RNA, 25 nt, Artificial Sequence
  Description of Artificial Sequence: Synthetic oligonucleotide
ugaaaaugagcaucagagaguguac

SEQ ID NO: 124668 - RNA, 25 nt, Artificial Sequence
  Description of Artificial Sequence: Synthetic oligonucleotide
uugcuuuucauguagaacucagcag

SEQ ID NO: 124669 - RNA, 25 nt, Artificial Sequence
  Description of Artificial Sequence: Synthetic oligonucleotide
uguauuucuauauuuauuuucagua

SEQ ID NO: 124670 - RNA, 25 nt, Artificial Sequence
  Description of Artificial Sequence: Synthetic oligonucleotide
uuugauuaauguuucuuaaauggaa

SEQ ID NO: 124671 - RNA, 25 nt, Artificial Sequence
  Description of Artificial Sequence: Synthetic oligonucleotide
caacguguauagugccuaaaauugu

SEQ ID NO: 124672 - RNA, 25 nt, Artificial Sequence
  Description of Artificial Sequence: Synthetic oligonucleotide
cauauccuuggcuacuaacaucugg

SEQ ID NO: 124673 - RNA, 25 nt, Artificial Sequence
  Description of Artificial Sequence: Synthetic oligonucleotide
uacuaacaucuggagacugugagcu

SEQ ID NO: 124674 - RNA, 25 nt, Artificial Sequence
  Description of Artificial Sequence: Synthetic oligonucleotide
cauaaguugugugcuuuuuauuaau

SEQ ID NO: 124675 - RNA, 25 nt, Artificial Sequence
  Description of Artificial Sequence: Synthetic oligonucleotide
gcaucauuuuggcucuucuuacauu

SEQ ID NO: 124676 - RNA, 25 nt, Artificial Sequence
  Description of Artificial Sequence: Synthetic oligonucleotide
gcucuucuuacauuuguaaaaaugu

SEQ ID NO: 124677 - RNA, 25 nt, Artificial Sequence
  Description of Artificial Sequence: Synthetic oligonucleotide
agauuaggucaucuuaauucauauu

SEQ ID NO: 124678 - RNA, 25 nt, Artificial Sequence
  Description of Artificial Sequence: Synthetic oligonucleotide
auggaauugaaagaacuaaucauga

SEQ ID NO: 124679 - RNA, 25 nt, Artificial Sequence
  Description of Artificial Sequence: Synthetic oligonucleotide
cacacucauuccuucugcucuuggg

SEQ ID NO: 124680 - RNA, 25 nt, Artificial Sequence
  Description of Artificial Sequence: Synthetic oligonucleotide
uguagagguaaccaguagcuuugag

SEQ ID NO: 124681 - RNA, 25 nt, Artificial Sequence
  Description of Artificial Sequence: Synthetic oligonucleotide
caaccacaugccacguaauauuuca

SEQ ID NO: 124682 - RNA, 25 nt, Artificial Sequence
  Description of Artificial Sequence: Synthetic oligonucleotide
ucggaaacaaguuauucucuucacu

SEQ ID NO: 124683 - RNA, 25 nt, Artificial Sequence
  Description of Artificial Sequence: Synthetic oligonucleotide
acucccaauaacuaaugcuaagaaa

SEQ ID NO: 124684 - RNA, 25 nt, Artificial Sequence
  Description of Artificial Sequence: Synthetic oligonucleotide
aaugcuaagaaaugcugaaaaucaa

SEQ ID NO: 124685 - RNA, 25 nt, Artificial Sequence
  Description of Artificial Sequence: Synthetic oligonucleotide
gucuuucucuaaauaugauuacuuu

SEQ ID NO: 124686 - RNA, 25 nt, Artificial Sequence
  Description of Artificial Sequence: Synthetic oligonucleotide
ugaauuucaggcauuuuguucuaca

SEQ ID NO: 124687 - RNA, 25 nt, Artificial Sequence
  Description of Artificial Sequence: Synthetic oligonucleotide
cgauucccucucacccgggacucuc

SEQ ID NO: 124688 - RNA, 25 nt, Artificial Sequence
  Description of Artificial Sequence: Synthetic oligonucleotide
aggaaagugaaccuuuaaaguaaag

SEQ ID NO: 124689 - RNA, 25 nt, Artificial Sequence
  Description of Artificial Sequence: Synthetic oligonucleotide
gaggcugcaugcucuggaagccugg

SEQ ID NO: 124690 - RNA, 25 nt, Artificial Sequence
  Description of Artificial Sequence: Synthetic oligonucleotide
ucucugaacagaaaacaaaagagag

SEQ ID NO: 124691 - RNA, 25 nt, Artificial Sequence
  Description of Artificial Sequence: Synthetic oligonucleotide
aacuuggcuguaaucaguuaugccg

SEQ ID NO: 124692 - RNA, 25 nt, Artificial Sequence
  Description of Artificial Sequence: Synthetic oligonucleotide
agaagccaaaauuaaaagaagucca

SEQ ID NO: 124693 - RNA, 25 nt, Artificial Sequence
  Description of Artificial Sequence: Synthetic oligonucleotide
auuaaaagaaguccaggugagguua

SEQ ID NO: 124694 - RNA, 25 nt, Artificial Sequence
  Description of Artificial Sequence: Synthetic oligonucleotide
gaauccggauuaucgggaagaggac

SEQ ID NO: 124695 - RNA, 25 nt, Artificial Sequence
  Description of Artificial Sequence: Synthetic oligonucleotide
aaugugacaucaaagcaaguauugu

SEQ ID NO: 124696 - RNA, 25 nt, Artificial Sequence
  Description of Artificial Sequence: Synthetic oligonucleotide
caucaaagcaaguauuguagcacuc

SEQ ID NO: 124697 - RNA, 25 nt, Artificial Sequence
  Description of Artificial Sequence: Synthetic oligonucleotide
agagagagaaaacaaaaccacaaau

SEQ ID NO: 124698 - RNA, 25 nt, Artificial Sequence
  Description of Artificial Sequence: Synthetic oligonucleotide
ucgcuguaguauuuaagcccauaca

SEQ ID NO: 124699 - RNA, 25 nt, Artificial Sequence
  Description of Artificial Sequence: Synthetic oligonucleotide
cgcuguaguauuuaagcccauacag

SEQ ID NO: 124700 - RNA, 25 nt, Artificial Sequence
  Description of Artificial Sequence: Synthetic oligonucleotide
auuuaagcccauacagaaaccuucc

SEQ ID NO: 124701 - RNA, 25 nt, Artificial Sequence
  Description of Artificial Sequence: Synthetic oligonucleotide
auuaaaauaaacaugguauaccuac

SEQ ID NO: 124702 - RNA, 25 nt, Artificial Sequence
  Description of Artificial Sequence: Synthetic oligonucleotide
cuguucugaucggccaguuuucgga

SEQ ID NO: 124703 - RNA, 25 nt, Artificial Sequence
  Description of Artificial Sequence: Synthetic oligonucleotide
aaauaauuugaacuuuggaacaggg

SEQ ID NO: 124704 - RNA, 25 nt, Artificial Sequence
  Description of Artificial Sequence: Synthetic oligonucleotide
ugcgaccuuaauuuaacuuuccagu

SEQ ID NO: 124705 - RNA, 25 nt, Artificial Sequence
  Description of Artificial Sequence: Synthetic oligonucleotide
cugagaaagcuaaaguuugguuuug

SEQ ID NO: 124706 - RNA, 25 nt, Artificial Sequence
  Description of Artificial Sequence: Synthetic oligonucleotide
aguaaagaugcuacuucccacugua

SEQ ID NO: 124707 - RNA, 25 nt, Artificial Sequence
  Description of Artificial Sequence: Synthetic oligonucleotide
cugcuuaauugcugauaccauauga

SEQ ID NO: 124708 - RNA, 25 nt, Artificial Sequence
  Description of Artificial Sequence: Synthetic oligonucleotide
uaccauaugaaugaaacaugggcug

SEQ ID NO: 124709 - RNA, 25 nt, Artificial Sequence
  Description of Artificial Sequence: Synthetic oligonucleotide
aacuuucuuauccaacuuuuucaua

SEQ ID NO: 124710 - RNA, 25 nt, Artificial Sequence
  Description of Artificial Sequence: Synthetic oligonucleotide
ccuugcaugacaucaugaggccgga

SEQ ID NO: 124711 - RNA, 25 nt, Artificial Sequence
  Description of Artificial Sequence: Synthetic oligonucleotide
ugaauuuguauaugacugcauuugu

SEQ ID NO: 124712 - RNA, 25 nt, Artificial Sequence
  Description of Artificial Sequence: Synthetic oligonucleotide
gaauccuaguagaauguuuacuacc

SEQ ID NO: 124713 - RNA, 25 nt, Artificial Sequence
  Description of Artificial Sequence: Synthetic oligonucleotide
gaaagggaagaauuuuuugaugaaa

SEQ ID NO: 124714 - RNA, 25 nt, Artificial Sequence
  Description of Artificial Sequence: Synthetic oligonucleotide
uaucggcaugccagugugugaauuu

SEQ ID NO: 124715 - RNA, 25 nt, Artificial Sequence
  Description of Artificial Sequence: Synthetic oligonucleotide
caccucauaguagagcaauguaugu

SEQ ID NO: 124716 - RNA, 25 nt, Artificial Sequence
  Description of Artificial Sequence: Synthetic oligonucleotide
ccagaauugccaaagcacauauaua

SEQ ID NO: 124717 - RNA, 25 nt, Artificial Sequence
  Description of Artificial Sequence: Synthetic oligonucleotide
uggugaucuggguaauaguuucucc

SEQ ID NO: 124718 - RNA, 25 nt, Artificial Sequence
  Description of Artificial Sequence: Synthetic oligonucleotide
gaucuggguaauaguuucuccaaau

SEQ ID NO: 124719 - RNA, 25 nt, Artificial Sequence
  Description of Artificial Sequence: Synthetic oligonucleotide
ggaugugaugaauacuuccuagaaa

SEQ ID NO: 124720 - RNA, 25 nt, Artificial Sequence
  Description of Artificial Sequence: Synthetic oligonucleotide
cauuuccacagcuacaccauauaug

SEQ ID NO: 124721 - RNA, 25 nt, Artificial Sequence
  Description of Artificial Sequence: Synthetic oligonucleotide
acagcuacaccauauaugaauggag

SEQ ID NO: 124722 - RNA, 25 nt, Artificial Sequence
  Description of Artificial Sequence: Synthetic oligonucleotide
ugcaguucuuacacgagaagaagau

SEQ ID NO: 124723 - RNA, 25 nt, Artificial Sequence
  Description of Artificial Sequence: Synthetic oligonucleotide
acgagaagaagaucauuuacaggga

SEQ ID NO: 124724 - RNA, 25 nt, Artificial Sequence
  Description of Artificial Sequence: Synthetic oligonucleotide
cgagaagaagaucauuuacagggac

SEQ ID NO: 124725 - RNA, 25 nt, Artificial Sequence
  Description of Artificial Sequence: Synthetic oligonucleotide
aagaagaucauuuacagggaccuga

SEQ ID NO: 124726 - RNA, 25 nt, Artificial Sequence
  Description of Artificial Sequence: Synthetic oligonucleotide
agaggaagagguguuugacugcauc

SEQ ID NO: 124727 - RNA, 25 nt, Artificial Sequence
  Description of Artificial Sequence: Synthetic oligonucleotide
gaggaagagguguuugacugcaucg

SEQ ID NO: 124728 - RNA, 25 nt, Artificial Sequence
  Description of Artificial Sequence: Synthetic oligonucleotide
cuacuuugagggcgaguucacaggg

SEQ ID NO: 124729 - RNA, 25 nt, Artificial Sequence
  Description of Artificial Sequence: Synthetic oligonucleotide
agggcaucuccuggcaccucugucc

SEQ ID NO: 124730 - RNA, 25 nt, Artificial Sequence
  Description of Artificial Sequence: Synthetic oligonucleotide
ggagugauaugguuugucuuuuuaa

SEQ ID NO: 124731 - RNA, 25 nt, Artificial Sequence
  Description of Artificial Sequence: Synthetic oligonucleotide
gagugauaugguuugucuuuuuaag

SEQ ID NO: 124732 - RNA, 25 nt, Artificial Sequence
  Description of Artificial Sequence: Synthetic oligonucleotide
ugcaguaaagauccuaaagguuguc

SEQ ID NO: 124733 - RNA, 25 nt, Artificial Sequence
  Description of Artificial Sequence: Synthetic oligonucleotide
aguaaagauccuaaagguugucgac

SEQ ID NO: 124734 - RNA, 25 nt, Artificial Sequence
  Description of Artificial Sequence: Synthetic oligonucleotide
ugacaaaggacaaccuggcaauugu

SEQ ID NO: 124735 - RNA, 25 nt, Artificial Sequence
  Description of Artificial Sequence: Synthetic oligonucleotide
gcaauugugacccaguggugcgagg

SEQ ID NO: 124736 - RNA, 25 nt, Artificial Sequence
  Description of Artificial Sequence: Synthetic oligonucleotide
aacaucauccauagagacaugaaau

SEQ ID NO: 124737 - RNA, 25 nt, Artificial Sequence
  Description of Artificial Sequence: Synthetic oligonucleotide
ugaaauccaacaauauauuucucca

SEQ ID NO: 124738 - RNA, 25 nt, Artificial Sequence
  Description of Artificial Sequence: Synthetic oligonucleotide
aacaauauauuucuccaugaaggcu

SEQ ID NO: 124739 - RNA, 25 nt, Artificial Sequence
  Description of Artificial Sequence: Synthetic oligonucleotide
aacaguaaagucacgcuggaguggu

SEQ ID NO: 124740 - RNA, 25 nt, Artificial Sequence
  Description of Artificial Sequence: Synthetic oligonucleotide
ugugaagaaaguaaaggaagagagg

SEQ ID NO: 124741 - RNA, 25 nt, Artificial Sequence
  Description of Artificial Sequence: Synthetic oligonucleotide
cuuccgagccauccuugcaucgggc

SEQ ID NO: 124742 - RNA, 25 nt, Artificial Sequence
  Description of Artificial Sequence: Synthetic oligonucleotide
aauggagguugaauauccuacugug

SEQ ID NO: 124743 - RNA, 25 nt, Artificial Sequence
  Description of Artificial Sequence: Synthetic oligonucleotide
ggagguugaauauccuacuguguaa

SEQ ID NO: 124744 - RNA, 25 nt, Artificial Sequence
  Description of Artificial Sequence: Synthetic oligonucleotide
auuuugaguuuucccuuguagugua

SEQ ID NO: 124745 - RNA, 25 nt, Artificial Sequence
  Description of Artificial Sequence: Synthetic oligonucleotide
uauccuguuuguucuuuguugauug

SEQ ID NO: 124746 - RNA, 25 nt, Artificial Sequence
  Description of Artificial Sequence: Synthetic oligonucleotide
ccuguuuguucuuuguugauugaaa

SEQ ID NO: 124747 - RNA, 25 nt, Artificial Sequence
  Description of Artificial Sequence: Synthetic oligonucleotide
cucuacagccuucuuuuucuuccau

SEQ ID NO: 124748 - RNA, 25 nt, Artificial Sequence
  Description of Artificial Sequence: Synthetic oligonucleotide
ucuuccauagcuaaucuuccuucua

SEQ ID NO: 124749 - RNA, 25 nt, Artificial Sequence
  Description of Artificial Sequence: Synthetic oligonucleotide
auaaucuuccuguugaaugcuucau

SEQ ID NO: 124750 - RNA, 25 nt, Artificial Sequence
  Description of Artificial Sequence: Synthetic oligonucleotide
uaaucuuccuguugaaugcuucaug

SEQ ID NO: 124751 - RNA, 25 nt, Artificial Sequence
  Description of Artificial Sequence: Synthetic oligonucleotide
cuucaugacuugaauucuacuuuga

SEQ ID NO: 124752 - RNA, 25 nt, Artificial Sequence
  Description of Artificial Sequence: Synthetic oligonucleotide
aagagggagagaagcaacuacagac

SEQ ID NO: 124753 - RNA, 25 nt, Artificial Sequence
  Description of Artificial Sequence: Synthetic oligonucleotide
cgucuccuaccagaccaaggucaac

SEQ ID NO: 124754 - RNA, 25 nt, Artificial Sequence
  Description of Artificial Sequence: Synthetic oligonucleotide
gaucaaucggcccgacuaucucgac

SEQ ID NO: 124755 - RNA, 25 nt, Artificial Sequence
  Description of Artificial Sequence: Synthetic oligonucleotide
ggacgaacauccaaccuucccaaac

SEQ ID NO: 124756 - RNA, 25 nt, Artificial Sequence
  Description of Artificial Sequence: Synthetic oligonucleotide
agggucggaacccaagcuuagaacu

SEQ ID NO: 124757 - RNA, 25 nt, Artificial Sequence
  Description of Artificial Sequence: Synthetic oligonucleotide
ucggaacccaagcuuagaacuuuaa

SEQ ID NO: 124758 - RNA, 25 nt, Artificial Sequence
  Description of Artificial Sequence: Synthetic oligonucleotide
acccaagcuuagaacuuuaagcaac

SEQ ID NO: 124759 - RNA, 25 nt, Artificial Sequence
  Description of Artificial Sequence: Synthetic oligonucleotide
gaacuuuaagcaacaagaccaccac

SEQ ID NO: 124760 - RNA, 25 nt, Artificial Sequence
  Description of Artificial Sequence: Synthetic oligonucleotide
acuauucaguggcgagaaauaaagu

SEQ ID NO: 124761 - RNA, 25 nt, Artificial Sequence
  Description of Artificial Sequence: Synthetic oligonucleotide
cuauucaguggcgagaaauaaaguu

SEQ ID NO: 124762 - RNA, 25 nt, Artificial Sequence
  Description of Artificial Sequence: Synthetic oligonucleotide
aaacacagauaacaggaaaugaucc

SEQ ID NO: 124763 - RNA, 25 nt, Artificial Sequence
  Description of Artificial Sequence: Synthetic oligonucleotide
cuuaagaaaagagaagaaaugaaac

SEQ ID NO: 124764 - RNA, 25 nt, Artificial Sequence
  Description of Artificial Sequence: Synthetic oligonucleotide
cugaaggaguguguuuccauccucc

SEQ ID NO: 124765 - RNA, 25 nt, Artificial Sequence
  Description of Artificial Sequence: Synthetic oligonucleotide
ucaccgcgggacugaaaaucuuuga

SEQ ID NO: 124766 - RNA, 25 nt, Artificial Sequence
  Description of Artificial Sequence: Synthetic oligonucleotide
agcagaaauaagcgugccguucagg

SEQ ID NO: 124767 - RNA, 25 nt, Artificial Sequence
  Description of Artificial Sequence: Synthetic oligonucleotide
aagcgugccguucaggguccagaag

SEQ ID NO: 124768 - RNA, 25 nt, Artificial Sequence
  Description of Artificial Sequence: Synthetic oligonucleotide
agaaacagucacucaagacugcuug

SEQ ID NO: 124769 - RNA, 25 nt, Artificial Sequence
  Description of Artificial Sequence: Synthetic oligonucleotide
agaggaagaagguccaugucuuugg

SEQ ID NO: 124770 - RNA, 25 nt, Artificial Sequence
  Description of Artificial Sequence: Synthetic oligonucleotide
uguauucaaaauaugccugaaacac

SEQ ID NO: 124771 - RNA, 25 nt, Artificial Sequence
  Description of Artificial Sequence: Synthetic oligonucleotide
auuuuccucccuuucucuguaccuc

SEQ ID NO: 124772 - RNA, 25 nt, Artificial Sequence
  Description of Artificial Sequence: Synthetic oligonucleotide
caaagaaagauagagcaagacaaga

SEQ ID NO: 124773 - RNA, 25 nt, Artificial Sequence
  Description of Artificial Sequence: Synthetic oligonucleotide
aagaaagauagagcaagacaagaaa

SEQ ID NO: 124774 - RNA, 25 nt, Artificial Sequence
  Description of Artificial Sequence: Synthetic oligonucleotide
gaaagcauuuguuuguacaagaucc

SEQ ID NO: 124775 - RNA, 25 nt, Artificial Sequence
  Description of Artificial Sequence: Synthetic oligonucleotide
ugaguuaaacgaacguacuugcaga

SEQ ID NO: 124776 - RNA, 25 nt, Artificial Sequence
  Description of Artificial Sequence: Synthetic oligonucleotide
acugauacagaacgaucgauacaga

SEQ ID NO: 124777 - RNA, 25 nt, Artificial Sequence
  Description of Artificial Sequence: Synthetic oligonucleotide
auauuauauauauauaaaaauaaau

SEQ ID NO: 124778 - RNA, 25 nt, Artificial Sequence
  Description of Artificial Sequence: Synthetic oligonucleotide
auuauauauauauaaaaauaaauau

SEQ ID NO: 124779 - RNA, 25 nt, Artificial Sequence
  Description of Artificial Sequence: Synthetic oligonucleotide
ucacuggauguauuugacugcugug

SEQ ID NO: 124780 - RNA, 25 nt, Artificial Sequence
  Description of Artificial Sequence: Synthetic oligonucleotide
cagggaagaggaggagaugagagac

SEQ ID NO: 124781 - RNA, 25 nt, Artificial Sequence
  Description of Artificial Sequence: Synthetic oligonucleotide
augaucuuuuuuuugucccacuugg

SEQ ID NO: 124782 - RNA, 27 nt, Artificial Sequence
  Description of Artificial Sequence: Synthetic oligonucleotide
ggccgugaacuccucaucaaaauaccu

SEQ ID NO: 124783 - RNA, 27 nt, Artificial Sequence
  Description of Artificial Sequence: Synthetic oligonucleotide
uggugugauggugaucaucugggccgu

SEQ ID NO: 124784 - RNA, 27 nt, Artificial Sequence
  Description of Artificial Sequence: Synthetic oligonucleotide
aaacccgcaggauaguuuucuucccua

SEQ ID NO: 124785 - RNA, 27 nt, Artificial Sequence
  Description of Artificial Sequence: Synthetic oligonucleotide
caaacuggaugaaauaaauuaaaaccc

SEQ ID NO: 124786 - RNA, 27 nt, Artificial Sequence
  Description of Artificial Sequence: Synthetic oligonucleotide
agaaguccuuaacauuucccuacguga

SEQ ID NO: 124787 - RNA, 27 nt, Artificial Sequence
  Description of Artificial Sequence: Synthetic oligonucleotide
cucugucccacuggguaaacccuggcc

SEQ ID NO: 124788 - RNA, 27 nt, Artificial Sequence
  Description of Artificial Sequence: Synthetic oligonucleotide
cacaauaacaaauuuaaaccuugcucc

SEQ ID NO: 124789 - RNA, 27 nt, Artificial Sequence
  Description of Artificial Sequence: Synthetic oligonucleotide
aaaugcauuugaacaacauaauacaca

SEQ ID NO: 124790 - RNA, 27 nt, Artificial Sequence
  Description of Artificial Sequence: Synthetic oligonucleotide
ggcuuuccugucacaaagauuaaaaac

SEQ ID NO: 124791 - RNA, 27 nt, Artificial Sequence
  Description of Artificial Sequence: Synthetic oligonucleotide
agggcuuuccugucacaaagauuaaaa

SEQ ID NO: 124792 - RNA, 27 nt, Artificial Sequence
  Description of Artificial Sequence: Synthetic oligonucleotide
ggccaugcugggagacauaagcagcag

SEQ ID NO: 124793 - RNA, 27 nt, Artificial Sequence
  Description of Artificial Sequence: Synthetic oligonucleotide
ucagggagaagcuucugaaacacuucu

SEQ ID NO: 124794 - RNA, 27 nt, Artificial Sequence
  Description of Artificial Sequence: Synthetic oligonucleotide
aagggcuucuuccuuauugauggucag

SEQ ID NO: 124795 - RNA, 27 nt, Artificial Sequence
  Description of Artificial Sequence: Synthetic oligonucleotide
ugaagggcuucuuccuuauugaugguc

SEQ ID NO: 124796 - RNA, 27 nt, Artificial Sequence
  Description of Artificial Sequence: Synthetic oligonucleotide
cgcugaagggcuucuuccuuauugaug

SEQ ID NO: 124797 - RNA, 27 nt, Artificial Sequence
  Description of Artificial Sequence: Synthetic oligonucleotide
gccgcugaagggcuucuuccuuauuga

SEQ ID NO: 124798 - RNA, 27 nt, Artificial Sequence
  Description of Artificial Sequence: Synthetic oligonucleotide
acuggccgcugaagggcuucuuccuua

SEQ ID NO: 124799 - RNA, 27 nt, Artificial Sequence
  Description of Artificial Sequence: Synthetic oligonucleotide
cggagcuuuucaccuuuaguuaugcuu

SEQ ID NO: 124800 - RNA, 27 nt, Artificial Sequence
  Description of Artificial Sequence: Synthetic oligonucleotide
ccggagcuuuucaccuuuaguuaugcu

SEQ ID NO: 124801 - RNA, 27 nt, Artificial Sequence
  Description of Artificial Sequence: Synthetic oligonucleotide
cagacuguugacuggcgugauguaguu

SEQ ID NO: 124802 - RNA, 27 nt, Artificial Sequence
  Description of Artificial Sequence: Synthetic oligonucleotide
cuuuugaacucugcuuaaauccagugg

SEQ ID NO: 124803 - RNA, 27 nt, Artificial Sequence
  Description of Artificial Sequence: Synthetic oligonucleotide
gcuuuugaacucugcuuaaauccagug

SEQ ID NO: 124804 - RNA, 27 nt, Artificial Sequence
  Description of Artificial Sequence: Synthetic oligonucleotide
agggcuuuugaacucugcuuaaaucca

SEQ ID NO: 124805 - RNA, 27 nt, Artificial Sequence
  Description of Artificial Sequence: Synthetic oligonucleotide
aagggcuuuugaacucugcuuaaaucc

SEQ ID NO: 124806 - RNA, 27 nt, Artificial Sequence
  Description of Artificial Sequence: Synthetic oligonucleotide
ugaagggcuuuugaacucugcuuaaau

SEQ ID NO: 124807 - RNA, 27 nt, Artificial Sequence
  Description of Artificial Sequence: Synthetic oligonucleotide
cugaagggcuuuugaacucugcuuaaa

SEQ ID NO: 124808 - RNA, 27 nt, Artificial Sequence
  Description of Artificial Sequence: Synthetic oligonucleotide
cgcugaagggcuuuugaacucugcuua

SEQ ID NO: 124809 - RNA, 27 nt, Artificial Sequence
  Description of Artificial Sequence: Synthetic oligonucleotide
cgagcggcuucacucagacccugaggc

SEQ ID NO: 124810 - RNA, 27 nt, Artificial Sequence
  Description of Artificial Sequence: Synthetic oligonucleotide
uugacuggcgugauguaguugcuuggg

SEQ ID NO: 124811 - RNA, 27 nt, Artificial Sequence
  Description of Artificial Sequence: Synthetic oligonucleotide
cacgcaccaagaagcugccauugaucc

SEQ ID NO: 124812 - RNA, 27 nt, Artificial Sequence
  Description of Artificial Sequence: Synthetic oligonucleotide
cugaugaauccaaugugggcuggaauc

SEQ ID NO: 124813 - RNA, 27 nt, Artificial Sequence
  Description of Artificial Sequence: Synthetic oligonucleotide
cuuagguauuccacauucucagcugug

SEQ ID NO: 124814 - RNA, 27 nt, Artificial Sequence
  Description of Artificial Sequence: Synthetic oligonucleotide
ugagccucaaauuaggagauacguuuu

SEQ ID NO: 124815 - RNA, 27 nt, Artificial Sequence
  Description of Artificial Sequence: Synthetic oligonucleotide
ccaauuguagagaaauuauuuuaggaa

SEQ ID NO: 124816 - RNA, 27 nt, Artificial Sequence
  Description of Artificial Sequence: Synthetic oligonucleotide
ggcuccuaacuagcugaaucuuccaau

SEQ ID NO: 124817 - RNA, 27 nt, Artificial Sequence
  Description of Artificial Sequence: Synthetic oligonucleotide
guggauauugacuaggagaguuuaaaa

SEQ ID NO: 124818 - RNA, 27 nt, Artificial Sequence
  Description of Artificial Sequence: Synthetic oligonucleotide
ugugacugaacauaacuguaggcugaa

SEQ ID NO: 124819 - RNA, 27 nt, Artificial Sequence
  Description of Artificial Sequence: Synthetic oligonucleotide
guaugugugugugacugaacauaacug

SEQ ID NO: 124820 - RNA, 27 nt, Artificial Sequence
  Description of Artificial Sequence: Synthetic oligonucleotide
aagcaaaaggaacauuuuguaugugug

SEQ ID NO: 124821 - RNA, 27 nt, Artificial Sequence
  Description of Artificial Sequence: Synthetic oligonucleotide
aaaaauuacuuuaaaagcaaaaggaac

SEQ ID NO: 124822 - RNA, 27 nt, Artificial Sequence
  Description of Artificial Sequence: Synthetic oligonucleotide
ccauugacuguugcuucacaggucaga

SEQ ID NO: 124823 - RNA, 27 nt, Artificial Sequence
  Description of Artificial Sequence: Synthetic oligonucleotide
auugguuugucgaugugugagauaguu

SEQ ID NO: 124824 - RNA, 27 nt, Artificial Sequence
  Description of Artificial Sequence: Synthetic oligonucleotide
agugguagcaguacaauugaggacaag

SEQ ID NO: 124825 - RNA, 27 nt, Artificial Sequence
  Description of Artificial Sequence: Synthetic oligonucleotide
uaagaccgcuugccagcuacgguuuca

SEQ ID NO: 124826 - RNA, 27 nt, Artificial Sequence
  Description of Artificial Sequence: Synthetic oligonucleotide
agccgguaagaccgcuugccagcuacg

SEQ ID NO: 124827 - RNA, 27 nt, Artificial Sequence
  Description of Artificial Sequence: Synthetic oligonucleotide
gguaacccaucuuuuaaccauacaacu

SEQ ID NO: 124828 - RNA, 27 nt, Artificial Sequence
  Description of Artificial Sequence: Synthetic oligonucleotide
ucgcagguaacccaucuuuuaaccaua

SEQ ID NO: 124829 - RNA, 27 nt, Artificial Sequence
  Description of Artificial Sequence: Synthetic oligonucleotide
cucagcaagauuguauaauucccugca

SEQ ID NO: 124830 - RNA, 27 nt, Artificial Sequence
  Description of Artificial Sequence: Synthetic oligonucleotide
acuguuuuaugcucagcaagauuguau

SEQ ID NO: 124831 - RNA, 27 nt, Artificial Sequence
  Description of Artificial Sequence: Synthetic oligonucleotide
aggauaaaggacucuucauuauuggaa

SEQ ID NO: 124832 - RNA, 27 nt, Artificial Sequence
  Description of Artificial Sequence: Synthetic oligonucleotide
caacuugcguuggaacauccaaagugu

SEQ ID NO: 124833 - RNA, 27 nt, Artificial Sequence
  Description of Artificial Sequence: Synthetic oligonucleotide
augguuucaguuuaguggaagcauuua

SEQ ID NO: 124834 - RNA, 27 nt, Artificial Sequence
  Description of Artificial Sequence: Synthetic oligonucleotide
auauuuaacaaagucaaacuuucucac

SEQ ID NO: 124835 - RNA, 27 nt, Artificial Sequence
  Description of Artificial Sequence: Synthetic oligonucleotide
aacuuuuaauauacaguaguucuuuuc

SEQ ID NO: 124836 - RNA, 27 nt, Artificial Sequence
  Description of Artificial Sequence: Synthetic oligonucleotide
guuaagucaaaacccguauuucuaaag

SEQ ID NO: 124837 - RNA, 27 nt, Artificial Sequence
  Description of Artificial Sequence: Synthetic oligonucleotide
gugcugaguuugcuguacccauguuga

SEQ ID NO: 124838 - RNA, 27 nt, Artificial Sequence
  Description of Artificial Sequence: Synthetic oligonucleotide
ugaggucagcaucuucugugucuuuac

SEQ ID NO: 124839 - RNA, 27 nt, Artificial Sequence
  Description of Artificial Sequence: Synthetic oligonucleotide
gcgaucugaauaaaccucccuacuagc

SEQ ID NO: 124840 - RNA, 27 nt, Artificial Sequence
  Description of Artificial Sequence: Synthetic oligonucleotide
aucccagaacccugcugcagaaggcca

SEQ ID NO: 124841 - RNA, 27 nt, Artificial Sequence
  Description of Artificial Sequence: Synthetic oligonucleotide
cauaauuuccaauauguaccagaccuu

SEQ ID NO: 124842 - RNA, 27 nt, Artificial Sequence
  Description of Artificial Sequence: Synthetic oligonucleotide
cuagugcuuccaucggaaggacuaggu

SEQ ID NO: 124843 - RNA, 27 nt, Artificial Sequence
  Description of Artificial Sequence: Synthetic oligonucleotide
uccacauaaaaacaauauucacuggga

SEQ ID NO: 124844 - RNA, 27 nt, Artificial Sequence
  Description of Artificial Sequence: Synthetic oligonucleotide
ucuaccaauuccaacuugaauucauug

SEQ ID NO: 124845 - RNA, 27 nt, Artificial Sequence
  Description of Artificial Sequence: Synthetic oligonucleotide
ucuccaagucuaaaucuguguccugag

SEQ ID NO: 124846 - RNA, 27 nt, Artificial Sequence
  Description of Artificial Sequence: Synthetic oligonucleotide
uggaauacuguaacugugcuuugagga

SEQ ID NO: 124847 - RNA, 27 nt, Artificial Sequence
  Description of Artificial Sequence: Synthetic oligonucleotide
uuaauucaucagugguggcagugguag

SEQ ID NO: 124848 - RNA, 27 nt, Artificial Sequence
  Description of Artificial Sequence: Synthetic oligonucleotide
gugaugauguggcacuaguaguuucuu

SEQ ID NO: 124849 - RNA, 27 nt, Artificial Sequence
  Description of Artificial Sequence: Synthetic oligonucleotide
ucuguuuggugaggcuguccgacuuug

SEQ ID NO: 124850 - RNA, 27 nt, Artificial Sequence
  Description of Artificial Sequence: Synthetic oligonucleotide
ccaucauguuccauuuuucgcuuucuc

SEQ ID NO: 124851 - RNA, 27 nt, Artificial Sequence
  Description of Artificial Sequence: Synthetic oligonucleotide
gcagucuacaugcuaaaucagagggua

SEQ ID NO: 124852 - RNA, 27 nt, Artificial Sequence
  Description of Artificial Sequence: Synthetic oligonucleotide
cauaaauagauccuuaaauagcucaaa

SEQ ID NO: 124853 - RNA, 27 nt, Artificial Sequence
  Description of Artificial Sequence: Synthetic oligonucleotide
ugauaauagugcuuuuucaccuuuuuc

SEQ ID NO: 124854 - RNA, 27 nt, Artificial Sequence
  Description of Artificial Sequence: Synthetic oligonucleotide
gcagaacugauaauagugcuuuuucac

SEQ ID NO: 124855 - RNA, 27 nt, Artificial Sequence
  Description of Artificial Sequence: Synthetic oligonucleotide
guagguuuaaucuuucuuuucagccau

SEQ ID NO: 124856 - RNA, 27 nt, Artificial Sequence
  Description of Artificial Sequence: Synthetic oligonucleotide
agaaggauuuuauuauaaggguuuaau

SEQ ID NO: 124857 - RNA, 27 nt, Artificial Sequence
  Description of Artificial Sequence: Synthetic oligonucleotide
gucuacagcauuggcuaauaguaugaa

SEQ ID NO: 124858 - RNA, 27 nt, Artificial Sequence
  Description of Artificial Sequence: Synthetic oligonucleotide
cuauuccuaucaaaaugcuucugucua

SEQ ID NO: 124859 - RNA, 27 nt, Artificial Sequence
  Description of Artificial Sequence: Synthetic oligonucleotide
ucagggccauuaucuuauuugcucuau

SEQ ID NO: 124860 - RNA, 27 nt, Artificial Sequence
  Description of Artificial Sequence: Synthetic oligonucleotide
ugcuugaggaagagaaaaauguugguc

SEQ ID NO: 124861 - RNA, 27 nt, Artificial Sequence
  Description of Artificial Sequence: Synthetic oligonucleotide
ugggcugaacuuuucucauacuuaaag

SEQ ID NO: 124862 - RNA, 27 nt, Artificial Sequence
  Description of Artificial Sequence: Synthetic oligonucleotide
gguucagcagccaucuuuauuccugcg

SEQ ID NO: 124863 - RNA, 27 nt, Artificial Sequence
  Description of Artificial Sequence: Synthetic oligonucleotide
ugaagagaacuuggucauucaaauuuc

SEQ ID NO: 124864 - RNA, 27 nt, Artificial Sequence
  Description of Artificial Sequence: Synthetic oligonucleotide
cucuaggcuggcuaucuuuauacauac

SEQ ID NO: 124865 - RNA, 27 nt, Artificial Sequence
  Description of Artificial Sequence: Synthetic oligonucleotide
acacuucacagagauaguuacagccau

SEQ ID NO: 124866 - RNA, 27 nt, Artificial Sequence
  Description of Artificial Sequence: Synthetic oligonucleotide
uugaaauuuucucacacuucacagaga

SEQ ID NO: 124867 - RNA, 27 nt, Artificial Sequence
  Description of Artificial Sequence: Synthetic oligonucleotide
ucaggaggauucauuuccuuaaaggaa

SEQ ID NO: 124868 - RNA, 27 nt, Artificial Sequence
  Description of Artificial Sequence: Synthetic oligonucleotide
auaugaugucacuuuuuguauccuuga

SEQ ID NO: 124869 - RNA, 27 nt, Artificial Sequence
  Description of Artificial Sequence: Synthetic oligonucleotide
uaugaugaagauucaaauugcaucuua

SEQ ID NO: 124870 - RNA, 27 nt, Artificial Sequence
  Description of Artificial Sequence: Synthetic oligonucleotide
uuaauagcuagucuucguuuugaacag

SEQ ID NO: 124871 - RNA, 27 nt, Artificial Sequence
  Description of Artificial Sequence: Synthetic oligonucleotide
auuuuuaguagagaugagguuucacca

SEQ ID NO: 124872 - RNA, 27 nt, Artificial Sequence
  Description of Artificial Sequence: Synthetic oligonucleotide
aggcgagauagagcuucucuuucguuc

SEQ ID NO: 124873 - RNA, 27 nt, Artificial Sequence
  Description of Artificial Sequence: Synthetic oligonucleotide
aacuggaccgaaggcgcuuguggagaa

SEQ ID NO: 124874 - RNA, 27 nt, Artificial Sequence
  Description of Artificial Sequence: Synthetic oligonucleotide
gcggcuacaucuuuggaaucuucuccu

SEQ ID NO: 124875 - RNA, 27 nt, Artificial Sequence
  Description of Artificial Sequence: Synthetic oligonucleotide
caagucuccucauugaauccagauugg

SEQ ID NO: 124876 - RNA, 27 nt, Artificial Sequence
  Description of Artificial Sequence: Synthetic oligonucleotide
uccucacuacucucaaaucuguucugg

SEQ ID NO: 124877 - RNA, 27 nt, Artificial Sequence
  Description of Artificial Sequence: Synthetic oligonucleotide
uuuguacucaucugcacagcucuggcu

SEQ ID NO: 124878 - RNA, 27 nt, Artificial Sequence
  Description of Artificial Sequence: Synthetic oligonucleotide
gcccauuaacaacaacaaucugaggug

SEQ ID NO: 124879 - RNA, 27 nt, Artificial Sequence
  Description of Artificial Sequence: Synthetic oligonucleotide
aauaaauuaaaaauaauuaaaauagug

SEQ ID NO: 124880 - RNA, 27 nt, Artificial Sequence
  Description of Artificial Sequence: Synthetic oligonucleotide
cauauuuaaauauuaauaaauuaaaaa

SEQ ID NO: 124881 - RNA, 27 nt, Artificial Sequence
  Description of Artificial Sequence: Synthetic oligonucleotide
gaaacaaaggauauucaaacugcauag

SEQ ID NO: 124882 - RNA, 27 nt, Artificial Sequence
  Description of Artificial Sequence: Synthetic oligonucleotide
caaacacuuagacgccagcagcauggg

SEQ ID NO: 124883 - RNA, 27 nt, Artificial Sequence
  Description of Artificial Sequence: Synthetic oligonucleotide
uuugucacaggugaaaugcacaucuga

SEQ ID NO: 124884 - RNA, 27 nt, Artificial Sequence
  Description of Artificial Sequence: Synthetic oligonucleotide
uaauucagccuggcacagguuuugauc

SEQ ID NO: 124885 - RNA, 27 nt, Artificial Sequence
  Description of Artificial Sequence: Synthetic oligonucleotide
auuguaagaaugacuacccacauucac

SEQ ID NO: 124886 - RNA, 27 nt, Artificial Sequence
  Description of Artificial Sequence: Synthetic oligonucleotide
caauuguaagaaugacuacccacauuc

SEQ ID NO: 124887 - RNA, 27 nt, Artificial Sequence
  Description of Artificial Sequence: Synthetic oligonucleotide
guacacucucugaugcucauuuucaua

SEQ ID NO: 124888 - RNA, 27 nt, Artificial Sequence
  Description of Artificial Sequence: Synthetic oligonucleotide
cugcugaguucuacaugaaaagcaaau

SEQ ID NO: 124889 - RNA, 27 nt, Artificial Sequence
  Description of Artificial Sequence: Synthetic oligonucleotide
uacugaaaauaaauauagaaauacaac

SEQ ID NO: 124890 - RNA, 27 nt, Artificial Sequence
  Description of Artificial Sequence: Synthetic oligonucleotide
uuccauuuaagaaacauuaaucaaaac

SEQ ID NO: 124891 - RNA, 27 nt, Artificial Sequence
  Description of Artificial Sequence: Synthetic oligonucleotide
acaauuuuaggcacuauacacguuguu

SEQ ID NO: 124892 - RNA, 27 nt, Artificial Sequence
  Description of Artificial Sequence: Synthetic oligonucleotide
ccagauguuaguagccaaggauauggu

SEQ ID NO: 124893 - RNA, 27 nt, Artificial Sequence
  Description of Artificial Sequence: Synthetic oligonucleotide
agcucacagucuccagauguuaguagc

SEQ ID NO: 124894 - RNA, 27 nt, Artificial Sequence
  Description of Artificial Sequence: Synthetic oligonucleotide
auuaauaaaaagcacacaacuuauggc

SEQ ID NO: 124895 - RNA, 27 nt, Artificial Sequence
  Description of Artificial Sequence: Synthetic oligonucleotide
aauguaagaagagccaaaaugaugcau

SEQ ID NO: 124896 - RNA, 27 nt, Artificial Sequence
  Description of Artificial Sequence: Synthetic oligonucleotide
acauuuuuacaaauguaagaagagcca

SEQ ID NO: 124897 - RNA, 27 nt, Artificial Sequence
  Description of Artificial Sequence: Synthetic oligonucleotide
aauaugaauuaagaugaccuaaucugu

SEQ ID NO: 124898 - RNA, 27 nt, Artificial Sequence
  Description of Artificial Sequence: Synthetic oligonucleotide
ucaugauuaguucuuucaauuccaucc

SEQ ID NO: 124899 - RNA, 27 nt, Artificial Sequence
  Description of Artificial Sequence: Synthetic oligonucleotide
cccaagagcagaaggaaugagugugca

SEQ ID NO: 124900 - RNA, 27 nt, Artificial Sequence
  Description of Artificial Sequence: Synthetic oligonucleotide
cucaaagcuacugguuaccucuacacc

SEQ ID NO: 124901 - RNA, 27 nt, Artificial Sequence
  Description of Artificial Sequence: Synthetic oligonucleotide
ugaaauauuacguggcaugugguuggg

SEQ ID NO: 124902 - RNA, 27 nt, Artificial Sequence
  Description of Artificial Sequence: Synthetic oligonucleotide
agugaagagaauaacuuguuuccgaag

SEQ ID NO: 124903 - RNA, 27 nt, Artificial Sequence
  Description of Artificial Sequence: Synthetic oligonucleotide
uuucuuagcauuaguuauugggaguga

SEQ ID NO: 124904 - RNA, 27 nt, Artificial Sequence
  Description of Artificial Sequence: Synthetic oligonucleotide
uugauuuucagcauuucuuagcauuag

SEQ ID NO: 124905 - RNA, 27 nt, Artificial Sequence
  Description of Artificial Sequence: Synthetic oligonucleotide
aaaguaaucauauuuagagaaagacag

SEQ ID NO: 124906 - RNA, 27 nt, Artificial Sequence
  Description of Artificial Sequence: Synthetic oligonucleotide
uguagaacaaaaugccugaaauucagc

SEQ ID NO: 124907 - RNA, 27 nt, Artificial Sequence
  Description of Artificial Sequence: Synthetic oligonucleotide
gagagucccgggugagagggaaucgcc

SEQ ID NO: 124908 - RNA, 27 nt, Artificial Sequence
  Description of Artificial Sequence: Synthetic oligonucleotide
cuuuacuuuaaagguucacuuuccuug

SEQ ID NO: 124909 - RNA, 27 nt, Artificial Sequence
  Description of Artificial Sequence: Synthetic oligonucleotide
ccaggcuuccagagcaugcagccuccu

SEQ ID NO: 124910 - RNA, 27 nt, Artificial Sequence
  Description of Artificial Sequence: Synthetic oligonucleotide
cucucuuuuguuuucuguucagagaaa

SEQ ID NO: 124911 - RNA, 27 nt, Artificial Sequence
  Description of Artificial Sequence: Synthetic oligonucleotide
cggcauaacugauuacagccaaguuca

SEQ ID NO: 124912 - RNA, 27 nt, Artificial Sequence
  Description of Artificial Sequence: Synthetic oligonucleotide
uggacuucuuuuaauuuuggcuucuuc

SEQ ID NO: 124913 - RNA, 27 nt, Artificial Sequence
  Description of Artificial Sequence: Synthetic oligonucleotide
uaaccucaccuggacuucuuuuaauuu

SEQ ID NO: 124914 - RNA, 27 nt, Artificial Sequence
  Description of Artificial Sequence: Synthetic oligonucleotide
guccucuucccgauaauccggauucag

SEQ ID NO: 124915 - RNA, 27 nt, Artificial Sequence
  Description of Artificial Sequence: Synthetic oligonucleotide
acaauacuugcuuugaugucacauuaa

SEQ ID NO: 124916 - RNA, 27 nt, Artificial Sequence
  Description of Artificial Sequence: Synthetic oligonucleotide
gagugcuacaauacuugcuuugauguc

SEQ ID NO: 124917 - RNA, 27 nt, Artificial Sequence
  Description of Artificial Sequence: Synthetic oligonucleotide
auuugugguuuuguuuucucucucucu

SEQ ID NO: 124918 - RNA, 27 nt, Artificial Sequence
  Description of Artificial Sequence: Synthetic oligonucleotide
uguaugggcuuaaauacuacagcgagg

SEQ ID NO: 124919 - RNA, 27 nt, Artificial Sequence
  Description of Artificial Sequence: Synthetic oligonucleotide
cuguaugggcuuaaauacuacagcgag

SEQ ID NO: 124920 - RNA, 27 nt, Artificial Sequence
  Description of Artificial Sequence: Synthetic oligonucleotide
ggaagguuucuguaugggcuuaaauac

SEQ ID NO: 124921 - RNA, 27 nt, Artificial Sequence
  Description of Artificial Sequence: Synthetic oligonucleotide
guagguauaccauguuuauuuuaauac

SEQ ID NO: 124922 - RNA, 27 nt, Artificial Sequence
  Description of Artificial Sequence: Synthetic oligonucleotide
uccgaaaacuggccgaucagaacagcc

SEQ ID NO: 124923 - RNA, 27 nt, Artificial Sequence
  Description of Artificial Sequence: Synthetic oligonucleotide
cccuguuccaaaguucaaauuauuugu

SEQ ID NO: 124924 - RNA, 27 nt, Artificial Sequence
  Description of Artificial Sequence: Synthetic oligonucleotide
acuggaaaguuaaauuaaggucgcaau

SEQ ID NO: 124925 - RNA, 27 nt, Artificial Sequence
  Description of Artificial Sequence: Synthetic oligonucleotide
caaaaccaaacuuuagcuuucucagcc

SEQ ID NO: 124926 - RNA, 27 nt, Artificial Sequence
  Description of Artificial Sequence: Synthetic oligonucleotide
uacagugggaaguagcaucuuuacuuu

SEQ ID NO: 124927 - RNA, 27 nt, Artificial Sequence
  Description of Artificial Sequence: Synthetic oligonucleotide
ucauaugguaucagcaauuaagcagua

SEQ ID NO: 124928 - RNA, 27 nt, Artificial Sequence
  Description of Artificial Sequence: Synthetic oligonucleotide
cagcccauguuucauucauaugguauc

SEQ ID NO: 124929 - RNA, 27 nt, Artificial Sequence
  Description of Artificial Sequence: Synthetic oligonucleotide
uaugaaaaaguuggauaagaaaguugg

SEQ ID NO: 124930 - RNA, 27 nt, Artificial Sequence
  Description of Artificial Sequence: Synthetic oligonucleotide
uccggccucaugaugucaugcaaggcu

SEQ ID NO: 124931 - RNA, 27 nt, Artificial Sequence
  Description of Artificial Sequence: Synthetic oligonucleotide
acaaaugcagucauauacaaauucagg

SEQ ID NO: 124932 - RNA, 27 nt, Artificial Sequence
  Description of Artificial Sequence: Synthetic oligonucleotide
gguaguaaacauucuacuaggauucuu

SEQ ID NO: 124933 - RNA, 27 nt, Artificial Sequence
  Description of Artificial Sequence: Synthetic oligonucleotide
uuucaucaaaaaauucuucccuuucug

SEQ ID NO: 124934 - RNA, 27 nt, Artificial Sequence
  Description of Artificial Sequence: Synthetic oligonucleotide
aaauucacacacuggcaugccgauagc

SEQ ID NO: 124935 - RNA, 27 nt, Artificial Sequence
  Description of Artificial Sequence: Synthetic oligonucleotide
acauacauugcucuacuaugaggugaa

SEQ ID NO: 124936 - RNA, 27 nt, Artificial Sequence
  Description of Artificial Sequence: Synthetic oligonucleotide
uauauaugugcuuuggcaauucuggug

SEQ ID NO: 124937 - RNA, 27 nt, Artificial Sequence
  Description of Artificial Sequence: Synthetic oligonucleotide
ggagaaacuauuacccagaucaccacu

SEQ ID NO: 124938 - RNA, 27 nt, Artificial Sequence
  Description of Artificial Sequence: Synthetic oligonucleotide
auuuggagaaacuauuacccagaucac

SEQ ID NO: 124939 - RNA, 27 nt, Artificial Sequence
  Description of Artificial Sequence: Synthetic oligonucleotide
uuucuaggaaguauucaucacauccac

SEQ ID NO: 124940 - RNA, 27 nt, Artificial Sequence
  Description of Artificial Sequence: Synthetic oligonucleotide
cauauaugguguagcuguggaaaugcg

SEQ ID NO: 124941 - RNA, 27 nt, Artificial Sequence
  Description of Artificial Sequence: Synthetic oligonucleotide
cuccauucauauaugguguagcugugg

SEQ ID NO: 124942 - RNA, 27 nt, Artificial Sequence
  Description of Artificial Sequence: Synthetic oligonucleotide
aucuucuucucguguaagaacugcagc

SEQ ID NO: 124943 - RNA, 27 nt, Artificial Sequence
  Description of Artificial Sequence: Synthetic oligonucleotide
ucccuguaaaugaucuucuucucgugu

SEQ ID NO: 124944 - RNA, 27 nt, Artificial Sequence
  Description of Artificial Sequence: Synthetic oligonucleotide
gucccuguaaaugaucuucuucucgug

SEQ ID NO: 124945 - RNA, 27 nt, Artificial Sequence
  Description of Artificial Sequence: Synthetic oligonucleotide
ucaggucccuguaaaugaucuucuucu

SEQ ID NO: 124946 - RNA, 27 nt, Artificial Sequence
  Description of Artificial Sequence: Synthetic oligonucleotide
gaugcagucaaacaccucuuccucugu

SEQ ID NO: 124947 - RNA, 27 nt, Artificial Sequence
  Description of Artificial Sequence: Synthetic oligonucleotide
cgaugcagucaaacaccucuuccucug

SEQ ID NO: 124948 - RNA, 27 nt, Artificial Sequence
  Description of Artificial Sequence: Synthetic oligonucleotide
cccugugaacucgcccucaaaguagcg

SEQ ID NO: 124949 - RNA, 27 nt, Artificial Sequence
  Description of Artificial Sequence: Synthetic oligonucleotide
ggacagaggugccaggagaugcccuca

SEQ ID NO: 124950 - RNA, 27 nt, Artificial Sequence
  Description of Artificial Sequence: Synthetic oligonucleotide
uuaaaaagacaaaccauaucacuccuu

SEQ ID NO: 124951 - RNA, 27 nt, Artificial Sequence
  Description of Artificial Sequence: Synthetic oligonucleotide
cuuaaaaagacaaaccauaucacuccu

SEQ ID NO: 124952 - RNA, 27 nt, Artificial Sequence
  Description of Artificial Sequence: Synthetic oligonucleotide
gacaaccuuuaggaucuuuacugcaac

SEQ ID NO: 124953 - RNA, 27 nt, Artificial Sequence
  Description of Artificial Sequence: Synthetic oligonucleotide
gucgacaaccuuuaggaucuuuacugc

SEQ ID NO: 124954 - RNA, 27 nt, Artificial Sequence
  Description of Artificial Sequence: Synthetic oligonucleotide
acaauugccagguuguccuuugucaug

SEQ ID NO: 124955 - RNA, 27 nt, Artificial Sequence
  Description of Artificial Sequence: Synthetic oligonucleotide
ccucgcaccacugggucacaauugcca

SEQ ID NO: 124956 - RNA, 27 nt, Artificial Sequence
  Description of Artificial Sequence: Synthetic oligonucleotide
auuucaugucucuauggaugauguucu

SEQ ID NO: 124957 - RNA, 27 nt, Artificial Sequence
  Description of Artificial Sequence: Synthetic oligonucleotide
uggagaaauauauuguuggauuucaug

SEQ ID NO: 124958 - RNA, 27 nt, Artificial Sequence
  Description of Artificial Sequence: Synthetic oligonucleotide
agccuucauggagaaauauauuguugg

SEQ ID NO: 124959 - RNA, 27 nt, Artificial Sequence
  Description of Artificial Sequence: Synthetic oligonucleotide
accacuccagcgugacuuuacuguugc

SEQ ID NO: 124960 - RNA, 27 nt, Artificial Sequence
  Description of Artificial Sequence: Synthetic oligonucleotide
ccucucuuccuuuacuuucuucacaca

SEQ ID NO: 124961 - RNA, 27 nt, Artificial Sequence
  Description of Artificial Sequence: Synthetic oligonucleotide
gcccgaugcaaggauggcucggaagcg

SEQ ID NO: 124962 - RNA, 27 nt, Artificial Sequence
  Description of Artificial Sequence: Synthetic oligonucleotide
cacaguaggauauucaaccuccauuuc

SEQ ID NO: 124963 - RNA, 27 nt, Artificial Sequence
  Description of Artificial Sequence: Synthetic oligonucleotide
uuacacaguaggauauucaaccuccau

SEQ ID NO: 124964 - RNA, 27 nt, Artificial Sequence
  Description of Artificial Sequence: Synthetic oligonucleotide
uacacuacaagggaaaacucaaaaucu

SEQ ID NO: 124965 - RNA, 27 nt, Artificial Sequence
  Description of Artificial Sequence: Synthetic oligonucleotide
caaucaacaaagaacaaacaggauaaa

SEQ ID NO: 124966 - RNA, 27 nt, Artificial Sequence
  Description of Artificial Sequence: Synthetic oligonucleotide
uuucaaucaacaaagaacaaacaggau

SEQ ID NO: 124967 - RNA, 27 nt, Artificial Sequence
  Description of Artificial Sequence: Synthetic oligonucleotide
auggaagaaaaagaaggcuguagagaa

SEQ ID NO: 124968 - RNA, 27 nt, Artificial Sequence
  Description of Artificial Sequence: Synthetic oligonucleotide
uagaaggaagauuagcuauggaagaaa

SEQ ID NO: 124969 - RNA, 27 nt, Artificial Sequence
  Description of Artificial Sequence: Synthetic oligonucleotide
augaagcauucaacaggaagauuauuu

SEQ ID NO: 124970 - RNA, 27 nt, Artificial Sequence
  Description of Artificial Sequence: Synthetic oligonucleotide
caugaagcauucaacaggaagauuauu

SEQ ID NO: 124971 - RNA, 27 nt, Artificial Sequence
  Description of Artificial Sequence: Synthetic oligonucleotide
ucaaaguagaauucaagucaugaagca

SEQ ID NO: 124972 - RNA, 27 nt, Artificial Sequence
  Description of Artificial Sequence: Synthetic oligonucleotide
gucuguaguugcuucucucccucuuag

SEQ ID NO: 124973 - RNA, 27 nt, Artificial Sequence
  Description of Artificial Sequence: Synthetic oligonucleotide
guugaccuuggucugguaggagacggc

SEQ ID NO: 124974 - RNA, 27 nt, Artificial Sequence
  Description of Artificial Sequence: Synthetic oligonucleotide
gucgagauagucgggccgauugaucuc

SEQ ID NO: 124975 - RNA, 27 nt, Artificial Sequence
  Description of Artificial Sequence: Synthetic oligonucleotide
guuugggaagguuggauguucguccuc

SEQ ID NO: 124976 - RNA, 27 nt, Artificial Sequence
  Description of Artificial Sequence: Synthetic oligonucleotide
aguucuaagcuuggguuccgacccuaa

SEQ ID NO: 124977 - RNA, 27 nt, Artificial Sequence
  Description of Artificial Sequence: Synthetic oligonucleotide
uuaaaguucuaagcuuggguuccgacc

SEQ ID NO: 124978 - RNA, 27 nt, Artificial Sequence
  Description of Artificial Sequence: Synthetic oligonucleotide
guugcuuaaaguucuaagcuuggguuc

SEQ ID NO: 124979 - RNA, 27 nt, Artificial Sequence
  Description of Artificial Sequence: Synthetic oligonucleotide
gugguggucuuguugcuuaaaguucua

SEQ ID NO: 124980 - RNA, 27 nt, Artificial Sequence
  Description of Artificial Sequence: Synthetic oligonucleotide
acuuuauuucucgccacugaauaguag

SEQ ID NO: 124981 - RNA, 27 nt, Artificial Sequence
  Description of Artificial Sequence: Synthetic oligonucleotide
aacuuuauuucucgccacugaauagua

SEQ ID NO: 124982 - RNA, 27 nt, Artificial Sequence
  Description of Artificial Sequence: Synthetic oligonucleotide
ggaucauuuccuguuaucuguguuugu

SEQ ID NO: 124983 - RNA, 27 nt, Artificial Sequence
  Description of Artificial Sequence: Synthetic oligonucleotide
guuucauuucuucucuuuucuuaaggc

SEQ ID NO: 124984 - RNA, 27 nt, Artificial Sequence
  Description of Artificial Sequence: Synthetic oligonucleotide
ggaggauggaaacacacuccuucaguu

SEQ ID NO: 124985 - RNA, 27 nt, Artificial Sequence
  Description of Artificial Sequence: Synthetic oligonucleotide
ucaaagauuuucagucccgcggugaca

SEQ ID NO: 124986 - RNA, 27 nt, Artificial Sequence
  Description of Artificial Sequence: Synthetic oligonucleotide
ccugaacggcacgcuuauuucugcugu

SEQ ID NO: 124987 - RNA, 27 nt, Artificial Sequence
  Description of Artificial Sequence: Synthetic oligonucleotide
cuucuggacccugaacggcacgcuuau

SEQ ID NO: 124988 - RNA, 27 nt, Artificial Sequence
  Description of Artificial Sequence: Synthetic oligonucleotide
caagcagucuugagugacuguuucuuc

SEQ ID NO: 124989 - RNA, 27 nt, Artificial Sequence
  Description of Artificial Sequence: Synthetic oligonucleotide
ccaaagacauggaccuucuuccucuga

SEQ ID NO: 124990 - RNA, 27 nt, Artificial Sequence
  Description of Artificial Sequence: Synthetic oligonucleotide
guguuucaggcauauuuugaauacauc

SEQ ID NO: 124991 - RNA, 27 nt, Artificial Sequence
  Description of Artificial Sequence: Synthetic oligonucleotide
gagguacagagaaagggaggaaaauag

SEQ ID NO: 124992 - RNA, 27 nt, Artificial Sequence
  Description of Artificial Sequence: Synthetic oligonucleotide
ucuugucuugcucuaucuuucuuuggu

SEQ ID NO: 124993 - RNA, 27 nt, Artificial Sequence
  Description of Artificial Sequence: Synthetic oligonucleotide
uuucuugucuugcucuaucuuucuuug

SEQ ID NO: 124994 - RNA, 27 nt, Artificial Sequence
  Description of Artificial Sequence: Synthetic oligonucleotide
ggaucuuguacaaacaaaugcuuucuc

SEQ ID NO: 124995 - RNA, 27 nt, Artificial Sequence
  Description of Artificial Sequence: Synthetic oligonucleotide
ucugcaaguacguucguuuaacucaag

SEQ ID NO: 124996 - RNA, 27 nt, Artificial Sequence
  Description of Artificial Sequence: Synthetic oligonucleotide
ucuguaucgaucguucuguaucagucu

SEQ ID NO: 124997 - RNA, 27 nt, Artificial Sequence
  Description of Artificial Sequence: Synthetic oligonucleotide
auuuauuuuuauauauauauaauauau

SEQ ID NO: 124998 - RNA, 27 nt, Artificial Sequence
  Description of Artificial Sequence: Synthetic oligonucleotide
auauuuauuuuuauauauauauaauau

SEQ ID NO: 124999 - RNA, 27 nt, Artificial Sequence
  Description of Artificial Sequence: Synthetic oligonucleotide
cacagcagucaaauacauccagugaag

SEQ ID NO: 125000 - RNA, 27 nt, Artificial Sequence
  Description of Artificial Sequence: Synthetic oligonucleotide
gucucucaucuccuccucuucccuguc

SEQ ID NO: 125001 - RNA, 27 nt, Artificial Sequence
  Description of Artificial Sequence: Synthetic oligonucleotide
ccaagugggacaaaaaaaagaucaugc

SEQ ID NO: 125002 - RNA, 14 nt, Artificial Sequence
  Description of Artificial Sequence: Synthetic oligonucleotide
guauuuugaugagg

SEQ ID NO: 125003 - RNA, 12 nt, Artificial Sequence
  Description of Artificial Sequence: Synthetic oligonucleotide
ggcccagaugau

SEQ ID NO: 125004 - RNA, 14 nt, Artificial Sequence
  Description of Artificial Sequence: Synthetic oligonucleotide
gggaagaaaacuau

SEQ ID NO: 125005 - RNA, 15 nt, Artificial Sequence
  Description of Artificial Sequence: Synthetic oligonucleotide
guuuuaauuuauuuc

SEQ ID NO: 125006 - RNA, 12 nt, Artificial Sequence
  Description of Artificial Sequence: Synthetic oligonucleotide
acguagggaaau

SEQ ID NO: 125007 - RNA, 12 nt, Artificial Sequence
  Description of Artificial Sequence: Synthetic oligonucleotide
ccaggguuuacc

SEQ ID NO: 125008 - RNA, 11 nt, Artificial Sequence
  Description of Artificial Sequence: Synthetic oligonucleotide
agcaagguuua

SEQ ID NO: 125009 - RNA, 12 nt, Artificial Sequence
  Description of Artificial Sequence: Synthetic oligonucleotide
uguauuauguug

SEQ ID NO: 125010 - RNA, 15 nt, Artificial Sequence
  Description of Artificial Sequence: Synthetic oligonucleotide
uuuuaaucuuuguga

SEQ ID NO: 125011 - RNA, 14 nt, Artificial Sequence
  Description of Artificial Sequence: Synthetic oligonucleotide
uuaaucuuugugac

SEQ ID NO: 125012 - RNA, 13 nt, Artificial Sequence
  Description of Artificial Sequence: Synthetic oligonucleotide
gcugcuuaugucu

SEQ ID NO: 125013 - RNA, 14 nt, Artificial Sequence
  Description of Artificial Sequence: Synthetic oligonucleotide
aaguguuucagaag

SEQ ID NO: 125014 - RNA, 13 nt, Artificial Sequence
  Description of Artificial Sequence: Synthetic oligonucleotide
gaccaucaauaag

SEQ ID NO: 125015 - RNA, 13 nt, Artificial Sequence
  Description of Artificial Sequence: Synthetic oligonucleotide
ccaucaauaagga

SEQ ID NO: 125016 - RNA, 14 nt, Artificial Sequence
  Description of Artificial Sequence: Synthetic oligonucleotide
ucaauaaggaagaa

SEQ ID NO: 125017 - RNA, 14 nt, Artificial Sequence
  Description of Artificial Sequence: Synthetic oligonucleotide
aauaaggaagaagc

SEQ ID NO: 125018 - RNA, 13 nt, Artificial Sequence
  Description of Artificial Sequence: Synthetic oligonucleotide
aggaagaagcccu

SEQ ID NO: 125019 - RNA, 13 nt, Artificial Sequence
  Description of Artificial Sequence: Synthetic oligonucleotide
gcauaacuaaagg

SEQ ID NO: 125020 - RNA, 14 nt, Artificial Sequence
  Description of Artificial Sequence: Synthetic oligonucleotide
cauaacuaaaggug

SEQ ID NO: 125021 - RNA, 12 nt, Artificial Sequence
  Description of Artificial Sequence: Synthetic oligonucleotide
cuacaucacgcc

SEQ ID NO: 125022 - RNA, 12 nt, Artificial Sequence
  Description of Artificial Sequence: Synthetic oligonucleotide
acuggauuuaag

SEQ ID NO: 125023 - RNA, 12 nt, Artificial Sequence
  Description of Artificial Sequence: Synthetic oligonucleotide
cuggauuuaagc

SEQ ID NO: 125024 - RNA, 13 nt, Artificial Sequence
  Description of Artificial Sequence: Synthetic oligonucleotide
gauuuaagcagag

SEQ ID NO: 125025 - RNA, 13 nt, Artificial Sequence
  Description of Artificial Sequence: Synthetic oligonucleotide
auuuaagcagagu

SEQ ID NO: 125026 - RNA, 13 nt, Artificial Sequence
  Description of Artificial Sequence: Synthetic oligonucleotide
uuaagcagaguuc

SEQ ID NO: 125027 - RNA, 13 nt, Artificial Sequence
  Description of Artificial Sequence: Synthetic oligonucleotide
uaagcagaguuca

SEQ ID NO: 125028 - RNA, 14 nt, Artificial Sequence
  Description of Artificial Sequence: Synthetic oligonucleotide
agcagaguucaaaa

SEQ ID NO: 125029 - RNA, 12 nt, Artificial Sequence
  Description of Artificial Sequence: Synthetic oligonucleotide
cucagggucuga

SEQ ID NO: 125030 - RNA, 13 nt, Artificial Sequence
  Description of Artificial Sequence: Synthetic oligonucleotide
caagcaacuacau

SEQ ID NO: 125031 - RNA, 12 nt, Artificial Sequence
  Description of Artificial Sequence: Synthetic oligonucleotide
aucaauggcagc

SEQ ID NO: 125032 - RNA, 11 nt, Artificial Sequence
  Description of Artificial Sequence: Synthetic oligonucleotide
uuccagcccac

SEQ ID NO: 125033 - RNA, 12 nt, Artificial Sequence
  Description of Artificial Sequence: Synthetic oligonucleotide
cagcugagaaug

SEQ ID NO: 125034 - RNA, 13 nt, Artificial Sequence
  Description of Artificial Sequence: Synthetic oligonucleotide
aacguaucuccua

SEQ ID NO: 125035 - RNA, 14 nt, Artificial Sequence
  Description of Artificial Sequence: Synthetic oligonucleotide
ccuaaaauaauuuc

SEQ ID NO: 125036 - RNA, 13 nt, Artificial Sequence
  Description of Artificial Sequence: Synthetic oligonucleotide
uggaagauucagc

SEQ ID NO: 125037 - RNA, 12 nt, Artificial Sequence
  Description of Artificial Sequence: Synthetic oligonucleotide
uuaaacucuccu

SEQ ID NO: 125038 - RNA, 12 nt, Artificial Sequence
  Description of Artificial Sequence: Synthetic oligonucleotide
cagccuacaguu

SEQ ID NO: 125039 - RNA, 13 nt, Artificial Sequence
  Description of Artificial Sequence: Synthetic oligonucleotide
guuauguucaguc

SEQ ID NO: 125040 - RNA, 13 nt, Artificial Sequence
  Description of Artificial Sequence: Synthetic oligonucleotide
cacauacaaaaug

SEQ ID NO: 125041 - RNA, 9 nt, Artificial Sequence
  Description of Artificial Sequence: Synthetic oligonucleotide
uccuuuugc

SEQ ID NO: 125042 - RNA, 12 nt, Artificial Sequence
  Description of Artificial Sequence: Synthetic oligonucleotide
ugaccugugaag

SEQ ID NO: 125043 - RNA, 12 nt, Artificial Sequence
  Description of Artificial Sequence: Synthetic oligonucleotide
cuaucucacaca

SEQ ID NO: 125044 - RNA, 13 nt, Artificial Sequence
  Description of Artificial Sequence: Synthetic oligonucleotide
uguccucaauugu

SEQ ID NO: 125045 - RNA, 12 nt, Artificial Sequence
  Description of Artificial Sequence: Synthetic oligonucleotide
aaaccguagcug

SEQ ID NO: 125046 - RNA, 12 nt, Artificial Sequence
  Description of Artificial Sequence: Synthetic oligonucleotide
uagcuggcaagc

SEQ ID NO: 125047 - RNA, 14 nt, Artificial Sequence
  Description of Artificial Sequence: Synthetic oligonucleotide
uuguaugguuaaaa

SEQ ID NO: 125048 - RNA, 14 nt, Artificial Sequence
  Description of Artificial Sequence: Synthetic oligonucleotide
ugguuaaaagaugg

SEQ ID NO: 125049 - RNA, 13 nt, Artificial Sequence
  Description of Artificial Sequence: Synthetic oligonucleotide
cagggaauuauac

SEQ ID NO: 125050 - RNA, 12 nt, Artificial Sequence
  Description of Artificial Sequence: Synthetic oligonucleotide
acaaucuugcug

SEQ ID NO: 125051 - RNA, 13 nt, Artificial Sequence
  Description of Artificial Sequence: Synthetic oligonucleotide
ccaauaaugaaga

SEQ ID NO: 125052 - RNA, 13 nt, Artificial Sequence
  Description of Artificial Sequence: Synthetic oligonucleotide
acuuuggauguuc

SEQ ID NO: 125053 - RNA, 12 nt, Artificial Sequence
  Description of Artificial Sequence: Synthetic oligonucleotide
aaugcuuccacu

SEQ ID NO: 125054 - RNA, 11 nt, Artificial Sequence
  Description of Artificial Sequence: Synthetic oligonucleotide
gagaaaguuug

SEQ ID NO: 125055 - RNA, 11 nt, Artificial Sequence
  Description of Artificial Sequence: Synthetic oligonucleotide
aaagaacuacu

SEQ ID NO: 125056 - RNA, 12 nt, Artificial Sequence
  Description of Artificial Sequence: Synthetic oligonucleotide
uuagaaauacgg

SEQ ID NO: 125057 - RNA, 12 nt, Artificial Sequence
  Description of Artificial Sequence: Synthetic oligonucleotide
aacauggguaca

SEQ ID NO: 125058 - RNA, 14 nt, Artificial Sequence
  Description of Artificial Sequence: Synthetic oligonucleotide
aaagacacagaaga

SEQ ID NO: 125059 - RNA, 11 nt, Artificial Sequence
  Description of Artificial Sequence: Synthetic oligonucleotide
uaguagggagg

SEQ ID NO: 125060 - RNA, 12 nt, Artificial Sequence
  Description of Artificial Sequence: Synthetic oligonucleotide
gccuucugcagc

SEQ ID NO: 125061 - RNA, 10 nt, Artificial Sequence
  Description of Artificial Sequence: Synthetic oligonucleotide
ggucugguac

SEQ ID NO: 125062 - RNA, 12 nt, Artificial Sequence
  Description of Artificial Sequence: Synthetic oligonucleotide
cuaguccuuccg

SEQ ID NO: 125063 - RNA, 12 nt, Artificial Sequence
  Description of Artificial Sequence: Synthetic oligonucleotide
ccagugaauauu

SEQ ID NO: 125064 - RNA, 13 nt, Artificial Sequence
  Description of Artificial Sequence: Synthetic oligonucleotide
augaauucaaguu

SEQ ID NO: 125065 - RNA, 12 nt, Artificial Sequence
  Description of Artificial Sequence: Synthetic oligonucleotide
caggacacagau

SEQ ID NO: 125066 - RNA, 12 nt, Artificial Sequence
  Description of Artificial Sequence: Synthetic oligonucleotide
cucaaagcacag

SEQ ID NO: 125067 - RNA, 10 nt, Artificial Sequence
  Description of Artificial Sequence: Synthetic oligonucleotide
accacugcca

SEQ ID NO: 125068 - RNA, 13 nt, Artificial Sequence
  Description of Artificial Sequence: Synthetic oligonucleotide
gaaacuacuagug

SEQ ID NO: 125069 - RNA, 12 nt, Artificial Sequence
  Description of Artificial Sequence: Synthetic oligonucleotide
aagucggacagc

SEQ ID NO: 125070 - RNA, 13 nt, Artificial Sequence
  Description of Artificial Sequence: Synthetic oligonucleotide
gaaagcgaaaaau

SEQ ID NO: 125071 - RNA, 13 nt, Artificial Sequence
  Description of Artificial Sequence: Synthetic oligonucleotide
cccucugauuuag

SEQ ID NO: 125072 - RNA, 12 nt, Artificial Sequence
  Description of Artificial Sequence: Synthetic oligonucleotide
ugagcuauuuaa

SEQ ID NO: 125073 - RNA, 13 nt, Artificial Sequence
  Description of Artificial Sequence: Synthetic oligonucleotide
aaaaggugaaaaa

SEQ ID NO: 125074 - RNA, 14 nt, Artificial Sequence
  Description of Artificial Sequence: Synthetic oligonucleotide
gaaaaagcacuauu

SEQ ID NO: 125075 - RNA, 12 nt, Artificial Sequence
  Description of Artificial Sequence: Synthetic oligonucleotide
ggcugaaaagaa

SEQ ID NO: 125076 - RNA, 12 nt, Artificial Sequence
  Description of Artificial Sequence: Synthetic oligonucleotide
uaaacccuuaua

SEQ ID NO: 125077 - RNA, 13 nt, Artificial Sequence
  Description of Artificial Sequence: Synthetic oligonucleotide
cauacuauuagcc

SEQ ID NO: 125078 - RNA, 12 nt, Artificial Sequence
  Description of Artificial Sequence: Synthetic oligonucleotide
gacagaagcauu

SEQ ID NO: 125079 - RNA, 14 nt, Artificial Sequence
  Description of Artificial Sequence: Synthetic oligonucleotide
agagcaaauaagau

SEQ ID NO: 125080 - RNA, 14 nt, Artificial Sequence
  Description of Artificial Sequence: Synthetic oligonucleotide
ccaacauuuuucuc

SEQ ID NO: 125081 - RNA, 15 nt, Artificial Sequence
  Description of Artificial Sequence: Synthetic oligonucleotide
uuaaguaugagaaaa

SEQ ID NO: 125082 - RNA, 14 nt, Artificial Sequence
  Description of Artificial Sequence: Synthetic oligonucleotide
caggaauaaagaug

SEQ ID NO: 125083 - RNA, 13 nt, Artificial Sequence
  Description of Artificial Sequence: Synthetic oligonucleotide
aauuugaaugacc

SEQ ID NO: 125084 - RNA, 14 nt, Artificial Sequence
  Description of Artificial Sequence: Synthetic oligonucleotide
auguauaaagauag

SEQ ID NO: 125085 - RNA, 12 nt, Artificial Sequence
  Description of Artificial Sequence: Synthetic oligonucleotide
ggcuguaacuau

SEQ ID NO: 125086 - RNA, 11 nt, Artificial Sequence
  Description of Artificial Sequence: Synthetic oligonucleotide
ucugugaagug

SEQ ID NO: 125087 - RNA, 14 nt, Artificial Sequence
  Description of Artificial Sequence: Synthetic oligonucleotide
ccuuuaaggaaaug

SEQ ID NO: 125088 - RNA, 13 nt, Artificial Sequence
  Description of Artificial Sequence: Synthetic oligonucleotide
aaggauacaaaaa

SEQ ID NO: 125089 - RNA, 12 nt, Artificial Sequence
  Description of Artificial Sequence: Synthetic oligonucleotide
agaugcaauuug

SEQ ID NO: 125090 - RNA, 12 nt, Artificial Sequence
  Description of Artificial Sequence: Synthetic oligonucleotide
guucaaaacgaa

SEQ ID NO: 125091 - RNA, 11 nt, Artificial Sequence
  Description of Artificial Sequence: Synthetic oligonucleotide
gugaaaccuca

SEQ ID NO: 125092 - RNA, 13 nt, Artificial Sequence
  Description of Artificial Sequence: Synthetic oligonucleotide
acgaaagagaagc

SEQ ID NO: 125093 - RNA, 12 nt, Artificial Sequence
  Description of Artificial Sequence: Synthetic oligonucleotide
cuccacaagcgc

SEQ ID NO: 125094 - RNA, 14 nt, Artificial Sequence
  Description of Artificial Sequence: Synthetic oligonucleotide
gagaagauuccaaa

SEQ ID NO: 125095 - RNA, 13 nt, Artificial Sequence
  Description of Artificial Sequence: Synthetic oligonucleotide
aaucuggauucaa

SEQ ID NO: 125096 - RNA, 13 nt, Artificial Sequence
  Description of Artificial Sequence: Synthetic oligonucleotide
agaacagauuuga

SEQ ID NO: 125097 - RNA, 11 nt, Artificial Sequence
  Description of Artificial Sequence: Synthetic oligonucleotide
ccagagcugug

SEQ ID NO: 125098 - RNA, 12 nt, Artificial Sequence
  Description of Artificial Sequence: Synthetic oligonucleotide
ccucagauuguu

SEQ ID NO: 125099 - RNA, 12 nt, Artificial Sequence
  Description of Artificial Sequence: Synthetic oligonucleotide
cuauuuuaauua

SEQ ID NO: 125100 - RNA, 13 nt, Artificial Sequence
  Description of Artificial Sequence: Synthetic oligonucleotide
uuuaauuuauuaa

SEQ ID NO: 125101 - RNA, 12 nt, Artificial Sequence
  Description of Artificial Sequence: Synthetic oligonucleotide
augcaguuugaa

SEQ ID NO: 125102 - RNA, 11 nt, Artificial Sequence
  Description of Artificial Sequence: Synthetic oligonucleotide
caugcugcugg

SEQ ID NO: 125103 - RNA, 13 nt, Artificial Sequence
  Description of Artificial Sequence: Synthetic oligonucleotide
agaugugcauuuc

SEQ ID NO: 125104 - RNA, 12 nt, Artificial Sequence
  Description of Artificial Sequence: Synthetic oligonucleotide
ucaaaaccugug

SEQ ID NO: 125105 - RNA, 11 nt, Artificial Sequence
  Description of Artificial Sequence: Synthetic oligonucleotide
gaaugugggua

SEQ ID NO: 125106 - RNA, 10 nt, Artificial Sequence
  Description of Artificial Sequence: Synthetic oligonucleotide
auguggguag

SEQ ID NO: 125107 - RNA, 13 nt, Artificial Sequence
  Description of Artificial Sequence: Synthetic oligonucleotide
ugaaaaugagcau

SEQ ID NO: 125108 - RNA, 13 nt, Artificial Sequence
  Description of Artificial Sequence: Synthetic oligonucleotide
uugcuuuucaugu

SEQ ID NO: 125109 - RNA, 12 nt, Artificial Sequence
  Description of Artificial Sequence: Synthetic oligonucleotide
uguauuucuaua

SEQ ID NO: 125110 - RNA, 13 nt, Artificial Sequence
  Description of Artificial Sequence: Synthetic oligonucleotide
uuugauuaauguu

SEQ ID NO: 125111 - RNA, 12 nt, Artificial Sequence
  Description of Artificial Sequence: Synthetic oligonucleotide
caacguguauag

SEQ ID NO: 125112 - RNA, 12 nt, Artificial Sequence
  Description of Artificial Sequence: Synthetic oligonucleotide
cauauccuuggc

SEQ ID NO: 125113 - RNA, 13 nt, Artificial Sequence
  Description of Artificial Sequence: Synthetic oligonucleotide
uacuaacaucugg

SEQ ID NO: 125114 - RNA, 11 nt, Artificial Sequence
  Description of Artificial Sequence: Synthetic oligonucleotide
cauaaguugug

SEQ ID NO: 125115 - RNA, 12 nt, Artificial Sequence
  Description of Artificial Sequence: Synthetic oligonucleotide
gcaucauuuugg

SEQ ID NO: 125116 - RNA, 10 nt, Artificial Sequence
  Description of Artificial Sequence: Synthetic oligonucleotide
gcucuucuua

SEQ ID NO: 125117 - RNA, 10 nt, Artificial Sequence
  Description of Artificial Sequence: Synthetic oligonucleotide
agauuagguc

SEQ ID NO: 125118 - RNA, 12 nt, Artificial Sequence
  Description of Artificial Sequence: Synthetic oligonucleotide
auggaauugaaa

SEQ ID NO: 125119 - RNA, 13 nt, Artificial Sequence
  Description of Artificial Sequence: Synthetic oligonucleotide
cacacucauuccu

SEQ ID NO: 125120 - RNA, 12 nt, Artificial Sequence
  Description of Artificial Sequence: Synthetic oligonucleotide
uguagagguaac

SEQ ID NO: 125121 - RNA, 11 nt, Artificial Sequence
  Description of Artificial Sequence: Synthetic oligonucleotide
caaccacaugc

SEQ ID NO: 125122 - RNA, 12 nt, Artificial Sequence
  Description of Artificial Sequence: Synthetic oligonucleotide
ucggaaacaagu

SEQ ID NO: 125123 - RNA, 11 nt, Artificial Sequence
  Description of Artificial Sequence: Synthetic oligonucleotide
acucccaauaa

SEQ ID NO: 125124 - RNA, 13 nt, Artificial Sequence
  Description of Artificial Sequence: Synthetic oligonucleotide
aaugcuaagaaau

SEQ ID NO: 125125 - RNA, 11 nt, Artificial Sequence
  Description of Artificial Sequence: Synthetic oligonucleotide
gucuuucucua

SEQ ID NO: 125126 - RNA, 11 nt, Artificial Sequence
  Description of Artificial Sequence: Synthetic oligonucleotide
ugaauuucagg

SEQ ID NO: 125127 - RNA, 13 nt, Artificial Sequence
  Description of Artificial Sequence: Synthetic oligonucleotide
cgauucccucuca

SEQ ID NO: 125128 - RNA, 11 nt, Artificial Sequence
  Description of Artificial Sequence: Synthetic oligonucleotide
aggaaagugaa

SEQ ID NO: 125129 - RNA, 12 nt, Artificial Sequence
  Description of Artificial Sequence: Synthetic oligonucleotide
gaggcugcaugc

SEQ ID NO: 125130 - RNA, 11 nt, Artificial Sequence
  Description of Artificial Sequence: Synthetic oligonucleotide
ucucugaacag

SEQ ID NO: 125131 - RNA, 12 nt, Artificial Sequence
  Description of Artificial Sequence: Synthetic oligonucleotide
aacuuggcugua

SEQ ID NO: 125132 - RNA, 12 nt, Artificial Sequence
  Description of Artificial Sequence: Synthetic oligonucleotide
agaagccaaaau

SEQ ID NO: 125133 - RNA, 14 nt, Artificial Sequence
  Description of Artificial Sequence: Synthetic oligonucleotide
auuaaaagaagucc

SEQ ID NO: 125134 - RNA, 14 nt, Artificial Sequence
  Description of Artificial Sequence: Synthetic oligonucleotide
gaauccggauuauc

SEQ ID NO: 125135 - RNA, 12 nt, Artificial Sequence
  Description of Artificial Sequence: Synthetic oligonucleotide
aaugugacauca

SEQ ID NO: 125136 - RNA, 13 nt, Artificial Sequence
  Description of Artificial Sequence: Synthetic oligonucleotide
caucaaagcaagu

SEQ ID NO: 125137 - RNA, 11 nt, Artificial Sequence
  Description of Artificial Sequence: Synthetic oligonucleotide
agagagagaaa

SEQ ID NO: 125138 - RNA, 13 nt, Artificial Sequence
  Description of Artificial Sequence: Synthetic oligonucleotide
ucgcuguaguauu

SEQ ID NO: 125139 - RNA, 14 nt, Artificial Sequence
  Description of Artificial Sequence: Synthetic oligonucleotide
cgcuguaguauuua

SEQ ID NO: 125140 - RNA, 13 nt, Artificial Sequence
  Description of Artificial Sequence: Synthetic oligonucleotide
auuuaagcccaua

SEQ ID NO: 125141 - RNA, 15 nt, Artificial Sequence
  Description of Artificial Sequence: Synthetic oligonucleotide
auuaaaauaaacaug

SEQ ID NO: 125142 - RNA, 12 nt, Artificial Sequence
  Description of Artificial Sequence: Synthetic oligonucleotide
cuguucugaucg

SEQ ID NO: 125143 - RNA, 16 nt, Artificial Sequence
  Description of Artificial Sequence: Synthetic oligonucleotide
aaauaauuugaacuuu

SEQ ID NO: 125144 - RNA, 12 nt, Artificial Sequence
  Description of Artificial Sequence: Synthetic oligonucleotide
ugcgaccuuaau

SEQ ID NO: 125145 - RNA, 11 nt, Artificial Sequence
  Description of Artificial Sequence: Synthetic oligonucleotide
cugagaaagcu

SEQ ID NO: 125146 - RNA, 13 nt, Artificial Sequence
  Description of Artificial Sequence: Synthetic oligonucleotide
aguaaagaugcua

SEQ ID NO: 125147 - RNA, 12 nt, Artificial Sequence
  Description of Artificial Sequence: Synthetic oligonucleotide
cugcuuaauugc

SEQ ID NO: 125148 - RNA, 14 nt, Artificial Sequence
  Description of Artificial Sequence: Synthetic oligonucleotide
uaccauaugaauga

SEQ ID NO: 125149 - RNA, 12 nt, Artificial Sequence
  Description of Artificial Sequence: Synthetic oligonucleotide
aacuuucuuauc

SEQ ID NO: 125150 - RNA, 13 nt, Artificial Sequence
  Description of Artificial Sequence: Synthetic oligonucleotide
ccuugcaugacau

SEQ ID NO: 125151 - RNA, 14 nt, Artificial Sequence
  Description of Artificial Sequence: Synthetic oligonucleotide
ugaauuuguauaug

SEQ ID NO: 125152 - RNA, 12 nt, Artificial Sequence
  Description of Artificial Sequence: Synthetic oligonucleotide
gaauccuaguag

SEQ ID NO: 125153 - RNA, 10 nt, Artificial Sequence
  Description of Artificial Sequence: Synthetic oligonucleotide
gaaagggaag

SEQ ID NO: 125154 - RNA, 11 nt, Artificial Sequence
  Description of Artificial Sequence: Synthetic oligonucleotide
uaucggcaugc

SEQ ID NO: 125155 - RNA, 12 nt, Artificial Sequence
  Description of Artificial Sequence: Synthetic oligonucleotide
caccucauagua

SEQ ID NO: 125156 - RNA, 11 nt, Artificial Sequence
  Description of Artificial Sequence: Synthetic oligonucleotide
ccagaauugcc

SEQ ID NO: 125157 - RNA, 11 nt, Artificial Sequence
  Description of Artificial Sequence: Synthetic oligonucleotide
uggugaucugg

SEQ ID NO: 125158 - RNA, 12 nt, Artificial Sequence
  Description of Artificial Sequence: Synthetic oligonucleotide
gaucuggguaau

SEQ ID NO: 125159 - RNA, 12 nt, Artificial Sequence
  Description of Artificial Sequence: Synthetic oligonucleotide
ggaugugaugaa

SEQ ID NO: 125160 - RNA, 12 nt, Artificial Sequence
  Description of Artificial Sequence: Synthetic oligonucleotide
cauuuccacagc

SEQ ID NO: 125161 - RNA, 11 nt, Artificial Sequence
  Description of Artificial Sequence: Synthetic oligonucleotide
acagcuacacc

SEQ ID NO: 125162 - RNA, 12 nt, Artificial Sequence
  Description of Artificial Sequence: Synthetic oligonucleotide
ugcaguucuuac

SEQ ID NO: 125163 - RNA, 12 nt, Artificial Sequence
  Description of Artificial Sequence: Synthetic oligonucleotide
acgagaagaaga

SEQ ID NO: 125164 - RNA, 12 nt, Artificial Sequence
  Description of Artificial Sequence: Synthetic oligonucleotide
cgagaagaagau

SEQ ID NO: 125165 - RNA, 15 nt, Artificial Sequence
  Description of Artificial Sequence: Synthetic oligonucleotide
aagaagaucauuuac

SEQ ID NO: 125166 - RNA, 11 nt, Artificial Sequence
  Description of Artificial Sequence: Synthetic oligonucleotide
agaggaagagg

SEQ ID NO: 125167 - RNA, 12 nt, Artificial Sequence
  Description of Artificial Sequence: Synthetic oligonucleotide
gaggaagaggug

SEQ ID NO: 125168 - RNA, 13 nt, Artificial Sequence
  Description of Artificial Sequence: Synthetic oligonucleotide
cuacuuugagggc

SEQ ID NO: 125169 - RNA, 12 nt, Artificial Sequence
  Description of Artificial Sequence: Synthetic oligonucleotide
agggcaucuccu

SEQ ID NO: 125170 - RNA, 10 nt, Artificial Sequence
  Description of Artificial Sequence: Synthetic oligonucleotide
ggagugauau

SEQ ID NO: 125171 - RNA, 11 nt, Artificial Sequence
  Description of Artificial Sequence: Synthetic oligonucleotide
gagugauaugg

SEQ ID NO: 125172 - RNA, 12 nt, Artificial Sequence
  Description of Artificial Sequence: Synthetic oligonucleotide
ugcaguaaagau

SEQ ID NO: 125173 - RNA, 13 nt, Artificial Sequence
  Description of Artificial Sequence: Synthetic oligonucleotide
aguaaagauccua

SEQ ID NO: 125174 - RNA, 12 nt, Artificial Sequence
  Description of Artificial Sequence: Synthetic oligonucleotide
ugacaaaggaca

SEQ ID NO: 125175 - RNA, 13 nt, Artificial Sequence
  Description of Artificial Sequence: Synthetic oligonucleotide
gcaauugugaccc

SEQ ID NO: 125176 - RNA, 12 nt, Artificial Sequence
  Description of Artificial Sequence: Synthetic oligonucleotide
aacaucauccau

SEQ ID NO: 125177 - RNA, 12 nt, Artificial Sequence
  Description of Artificial Sequence: Synthetic oligonucleotide
ugaaauccaaca

SEQ ID NO: 125178 - RNA, 15 nt, Artificial Sequence
  Description of Artificial Sequence: Synthetic oligonucleotide
aacaauauauuucuc

SEQ ID NO: 125179 - RNA, 14 nt, Artificial Sequence
  Description of Artificial Sequence: Synthetic oligonucleotide
aacaguaaagucac

SEQ ID NO: 125180 - RNA, 14 nt, Artificial Sequence
  Description of Artificial Sequence: Synthetic oligonucleotide
ugugaagaaaguaa

SEQ ID NO: 125181 - RNA, 13 nt, Artificial Sequence
  Description of Artificial Sequence: Synthetic oligonucleotide
cuuccgagccauc

SEQ ID NO: 125182 - RNA, 12 nt, Artificial Sequence
  Description of Artificial Sequence: Synthetic oligonucleotide
aauggagguuga

SEQ ID NO: 125183 - RNA, 12 nt, Artificial Sequence
  Description of Artificial Sequence: Synthetic oligonucleotide
ggagguugaaua

SEQ ID NO: 125184 - RNA, 13 nt, Artificial Sequence
  Description of Artificial Sequence: Synthetic oligonucleotide
auuuugaguuuuc

SEQ ID NO: 125185 - RNA, 12 nt, Artificial Sequence
  Description of Artificial Sequence: Synthetic oligonucleotide
uauccuguuugu

SEQ ID NO: 125186 - RNA, 11 nt, Artificial Sequence
  Description of Artificial Sequence: Synthetic oligonucleotide
ccuguuuguuc

SEQ ID NO: 125187 - RNA, 10 nt, Artificial Sequence
  Description of Artificial Sequence: Synthetic oligonucleotide
cucuacagcc

SEQ ID NO: 125188 - RNA, 12 nt, Artificial Sequence
  Description of Artificial Sequence: Synthetic oligonucleotide
ucuuccauagcu

SEQ ID NO: 125189 - RNA, 12 nt, Artificial Sequence
  Description of Artificial Sequence: Synthetic oligonucleotide
auaaucuuccug

SEQ ID NO: 125190 - RNA, 12 nt, Artificial Sequence
  Description of Artificial Sequence: Synthetic oligonucleotide
uaaucuuccugu

SEQ ID NO: 125191 - RNA, 12 nt, Artificial Sequence
  Description of Artificial Sequence: Synthetic oligonucleotide
cuucaugacuug

SEQ ID NO: 125192 - RNA, 12 nt, Artificial Sequence
  Description of Artificial Sequence: Synthetic oligonucleotide
aagagggagaga

SEQ ID NO: 125193 - RNA, 12 nt, Artificial Sequence
  Description of Artificial Sequence: Synthetic oligonucleotide
cgucuccuacca

SEQ ID NO: 125194 - RNA, 12 nt, Artificial Sequence
  Description of Artificial Sequence: Synthetic oligonucleotide
gaucaaucggcc

SEQ ID NO: 125195 - RNA, 12 nt, Artificial Sequence
  Description of Artificial Sequence: Synthetic oligonucleotide
ggacgaacaucc

SEQ ID NO: 125196 - RNA, 11 nt, Artificial Sequence
  Description of Artificial Sequence: Synthetic oligonucleotide
agggucggaac

SEQ ID NO: 125197 - RNA, 10 nt, Artificial Sequence
  Description of Artificial Sequence: Synthetic oligonucleotide
ucggaaccca

SEQ ID NO: 125198 - RNA, 11 nt, Artificial Sequence
  Description of Artificial Sequence: Synthetic oligonucleotide
acccaagcuua

SEQ ID NO: 125199 - RNA, 14 nt, Artificial Sequence
  Description of Artificial Sequence: Synthetic oligonucleotide
gaacuuuaagcaac

SEQ ID NO: 125200 - RNA, 11 nt, Artificial Sequence
  Description of Artificial Sequence: Synthetic oligonucleotide
acuauucagug

SEQ ID NO: 125201 - RNA, 11 nt, Artificial Sequence
  Description of Artificial Sequence: Synthetic oligonucleotide
cuauucagugg

SEQ ID NO: 125202 - RNA, 13 nt, Artificial Sequence
  Description of Artificial Sequence: Synthetic oligonucleotide
aaacacagauaac

SEQ ID NO: 125203 - RNA, 12 nt, Artificial Sequence
  Description of Artificial Sequence: Synthetic oligonucleotide
cuuaagaaaaga

SEQ ID NO: 125204 - RNA, 12 nt, Artificial Sequence
  Description of Artificial Sequence: Synthetic oligonucleotide
cugaaggagugu

SEQ ID NO: 125205 - RNA, 10 nt, Artificial Sequence
  Description of Artificial Sequence: Synthetic oligonucleotide
ucaccgcggg

SEQ ID NO: 125206 - RNA, 14 nt, Artificial Sequence
  Description of Artificial Sequence: Synthetic oligonucleotide
agcagaaauaagcg

SEQ ID NO: 125207 - RNA, 12 nt, Artificial Sequence
  Description of Artificial Sequence: Synthetic oligonucleotide
aagcgugccguu

SEQ ID NO: 125208 - RNA, 12 nt, Artificial Sequence
  Description of Artificial Sequence: Synthetic oligonucleotide
agaaacagucac

SEQ ID NO: 125209 - RNA, 12 nt, Artificial Sequence
  Description of Artificial Sequence: Synthetic oligonucleotide
agaggaagaagg

SEQ ID NO: 125210 - RNA, 14 nt, Artificial Sequence
  Description of Artificial Sequence: Synthetic oligonucleotide
uguauucaaaauau

SEQ ID NO: 125211 - RNA, 13 nt, Artificial Sequence
  Description of Artificial Sequence: Synthetic oligonucleotide
auuuuccucccuu

SEQ ID NO: 125212 - RNA, 13 nt, Artificial Sequence
  Description of Artificial Sequence: Synthetic oligonucleotide
caaagaaagauag

SEQ ID NO: 125213 - RNA, 12 nt, Artificial Sequence
  Description of Artificial Sequence: Synthetic oligonucleotide
aagaaagauaga

SEQ ID NO: 125214 - RNA, 13 nt, Artificial Sequence
  Description of Artificial Sequence: Synthetic oligonucleotide
gaaagcauuuguu

SEQ ID NO: 125215 - RNA, 13 nt, Artificial Sequence
  Description of Artificial Sequence: Synthetic oligonucleotide
ugaguuaaacgaa

SEQ ID NO: 125216 - RNA, 12 nt, Artificial Sequence
  Description of Artificial Sequence: Synthetic oligonucleotide
acugauacagaa

SEQ ID NO: 125217 - RNA, 12 nt, Artificial Sequence
  Description of Artificial Sequence: Synthetic oligonucleotide
auauuauauaua

SEQ ID NO: 125218 - RNA, 12 nt, Artificial Sequence
  Description of Artificial Sequence: Synthetic oligonucleotide
auuauauauaua

SEQ ID NO: 125219 - RNA, 12 nt, Artificial Sequence
  Description of Artificial Sequence: Synthetic oligonucleotide
ucacuggaugua

SEQ ID NO: 125220 - RNA, 12 nt, Artificial Sequence
  Description of Artificial Sequence: Synthetic oligonucleotide
cagggaagagga

SEQ ID NO: 125221 - RNA, 15 nt, Artificial Sequence
  Description of Artificial Sequence: Synthetic oligonucleotide
augaucuuuuuuuug

SEQ ID NO: 125222 - RNA, 11 nt, Artificial Sequence
  Description of Artificial Sequence: Synthetic oligonucleotide
aguucacggcc

SEQ ID NO: 125223 - RNA, 13 nt, Artificial Sequence
  Description of Artificial Sequence: Synthetic oligonucleotide
caccaucacacca

SEQ ID NO: 125224 - RNA, 11 nt, Artificial Sequence
  Description of Artificial Sequence: Synthetic oligonucleotide
ccugcggguuu

SEQ ID NO: 125225 - RNA, 10 nt, Artificial Sequence
  Description of Artificial Sequence: Synthetic oligonucleotide
auccaguuug

SEQ ID NO: 125226 - RNA, 13 nt, Artificial Sequence
  Description of Artificial Sequence: Synthetic oligonucleotide
guuaaggacuucu

SEQ ID NO: 125227 - RNA, 13 nt, Artificial Sequence
  Description of Artificial Sequence: Synthetic oligonucleotide
cagugggacagag

SEQ ID NO: 125228 - RNA, 14 nt, Artificial Sequence
  Description of Artificial Sequence: Synthetic oligonucleotide
aauuuguuauugug

SEQ ID NO: 125229 - RNA, 13 nt, Artificial Sequence
  Description of Artificial Sequence: Synthetic oligonucleotide
uucaaaugcauuu

SEQ ID NO: 125230 - RNA, 10 nt, Artificial Sequence
  Description of Artificial Sequence: Synthetic oligonucleotide
caggaaagcc

SEQ ID NO: 125231 - RNA, 11 nt, Artificial Sequence
  Description of Artificial Sequence: Synthetic oligonucleotide
aggaaagcccu

SEQ ID NO: 125232 - RNA, 12 nt, Artificial Sequence
  Description of Artificial Sequence: Synthetic oligonucleotide
cccagcauggcc

SEQ ID NO: 125233 - RNA, 11 nt, Artificial Sequence
  Description of Artificial Sequence: Synthetic oligonucleotide
cuucucccuga

SEQ ID NO: 125234 - RNA, 12 nt, Artificial Sequence
  Description of Artificial Sequence: Synthetic oligonucleotide
gaagaagcccuu

SEQ ID NO: 125235 - RNA, 12 nt, Artificial Sequence
  Description of Artificial Sequence: Synthetic oligonucleotide
agaagcccuuca

SEQ ID NO: 125236 - RNA, 11 nt, Artificial Sequence
  Description of Artificial Sequence: Synthetic oligonucleotide
gcccuucagcg

SEQ ID NO: 125237 - RNA, 11 nt, Artificial Sequence
  Description of Artificial Sequence: Synthetic oligonucleotide
ccuucagcggc

SEQ ID NO: 125238 - RNA, 12 nt, Artificial Sequence
  Description of Artificial Sequence: Synthetic oligonucleotide
ucagcggccagu

SEQ ID NO: 125239 - RNA, 12 nt, Artificial Sequence
  Description of Artificial Sequence: Synthetic oligonucleotide
ugaaaagcuccg

SEQ ID NO: 125240 - RNA, 11 nt, Artificial Sequence
  Description of Artificial Sequence: Synthetic oligonucleotide
aaaagcuccgg

SEQ ID NO: 125241 - RNA, 13 nt, Artificial Sequence
  Description of Artificial Sequence: Synthetic oligonucleotide
agucaacagucug

SEQ ID NO: 125242 - RNA, 13 nt, Artificial Sequence
  Description of Artificial Sequence: Synthetic oligonucleotide
cagaguucaaaag

SEQ ID NO: 125243 - RNA, 13 nt, Artificial Sequence
  Description of Artificial Sequence: Synthetic oligonucleotide
agaguucaaaagc

SEQ ID NO: 125244 - RNA, 12 nt, Artificial Sequence
  Description of Artificial Sequence: Synthetic oligonucleotide
uucaaaagcccu

SEQ ID NO: 125245 - RNA, 12 nt, Artificial Sequence
  Description of Artificial Sequence: Synthetic oligonucleotide
ucaaaagcccuu

SEQ ID NO: 125246 - RNA, 12 nt, Artificial Sequence
  Description of Artificial Sequence: Synthetic oligonucleotide
aaaagcccuuca

SEQ ID NO: 125247 - RNA, 12 nt, Artificial Sequence
  Description of Artificial Sequence: Synthetic oligonucleotide
aaagcccuucag

SEQ ID NO: 125248 - RNA, 13 nt, Artificial Sequence
  Description of Artificial Sequence: Synthetic oligonucleotide
gugaagccgcucg

SEQ ID NO: 125249 - RNA, 12 nt, Artificial Sequence
  Description of Artificial Sequence: Synthetic oligonucleotide
cacgccagucaa

SEQ ID NO: 125250 - RNA, 13 nt, Artificial Sequence
  Description of Artificial Sequence: Synthetic oligonucleotide
uucuuggugcgug

SEQ ID NO: 125251 - RNA, 14 nt, Artificial Sequence
  Description of Artificial Sequence: Synthetic oligonucleotide
auuggauucaucag

SEQ ID NO: 125252 - RNA, 13 nt, Artificial Sequence
  Description of Artificial Sequence: Synthetic oligonucleotide
uggaauaccuaag

SEQ ID NO: 125253 - RNA, 12 nt, Artificial Sequence
  Description of Artificial Sequence: Synthetic oligonucleotide
auuugaggcuca

SEQ ID NO: 125254 - RNA, 11 nt, Artificial Sequence
  Description of Artificial Sequence: Synthetic oligonucleotide
ucuacaauugg

SEQ ID NO: 125255 - RNA, 12 nt, Artificial Sequence
  Description of Artificial Sequence: Synthetic oligonucleotide
uaguuaggagcc

SEQ ID NO: 125256 - RNA, 13 nt, Artificial Sequence
  Description of Artificial Sequence: Synthetic oligonucleotide
agucaauauccac

SEQ ID NO: 125257 - RNA, 13 nt, Artificial Sequence
  Description of Artificial Sequence: Synthetic oligonucleotide
auguucagucaca

SEQ ID NO: 125258 - RNA, 12 nt, Artificial Sequence
  Description of Artificial Sequence: Synthetic oligonucleotide
acacacacauac

SEQ ID NO: 125259 - RNA, 12 nt, Artificial Sequence
  Description of Artificial Sequence: Synthetic oligonucleotide
uuccuuuugcuu

SEQ ID NO: 125260 - RNA, 16 nt, Artificial Sequence
  Description of Artificial Sequence: Synthetic oligonucleotide
uuuuaaaguaauuuuu

SEQ ID NO: 125261 - RNA, 13 nt, Artificial Sequence
  Description of Artificial Sequence: Synthetic oligonucleotide
caacagucaaugg

SEQ ID NO: 125262 - RNA, 13 nt, Artificial Sequence
  Description of Artificial Sequence: Synthetic oligonucleotide
ucgacaaaccaau

SEQ ID NO: 125263 - RNA, 12 nt, Artificial Sequence
  Description of Artificial Sequence: Synthetic oligonucleotide
acugcuaccacu

SEQ ID NO: 125264 - RNA, 13 nt, Artificial Sequence
  Description of Artificial Sequence: Synthetic oligonucleotide
gcaagcggucuua

SEQ ID NO: 125265 - RNA, 13 nt, Artificial Sequence
  Description of Artificial Sequence: Synthetic oligonucleotide
ggucuuaccggcu

SEQ ID NO: 125266 - RNA, 11 nt, Artificial Sequence
  Description of Artificial Sequence: Synthetic oligonucleotide
gauggguuacc

SEQ ID NO: 125267 - RNA, 11 nt, Artificial Sequence
  Description of Artificial Sequence: Synthetic oligonucleotide
guuaccugcga

SEQ ID NO: 125268 - RNA, 12 nt, Artificial Sequence
  Description of Artificial Sequence: Synthetic oligonucleotide
aaucuugcugag

SEQ ID NO: 125269 - RNA, 13 nt, Artificial Sequence
  Description of Artificial Sequence: Synthetic oligonucleotide
agcauaaaacagu

SEQ ID NO: 125270 - RNA, 12 nt, Artificial Sequence
  Description of Artificial Sequence: Synthetic oligonucleotide
guccuuuauccu

SEQ ID NO: 125271 - RNA, 12 nt, Artificial Sequence
  Description of Artificial Sequence: Synthetic oligonucleotide
caacgcaaguug

SEQ ID NO: 125272 - RNA, 13 nt, Artificial Sequence
  Description of Artificial Sequence: Synthetic oligonucleotide
aaacugaaaccau

SEQ ID NO: 125273 - RNA, 14 nt, Artificial Sequence
  Description of Artificial Sequence: Synthetic oligonucleotide
acuuuguuaaauau

SEQ ID NO: 125274 - RNA, 14 nt, Artificial Sequence
  Description of Artificial Sequence: Synthetic oligonucleotide
guauauuaaaaguu

SEQ ID NO: 125275 - RNA, 13 nt, Artificial Sequence
  Description of Artificial Sequence: Synthetic oligonucleotide
guuuugacuuaac

SEQ ID NO: 125276 - RNA, 13 nt, Artificial Sequence
  Description of Artificial Sequence: Synthetic oligonucleotide
gcaaacucagcac

SEQ ID NO: 125277 - RNA, 11 nt, Artificial Sequence
  Description of Artificial Sequence: Synthetic oligonucleotide
ugcugaccuca

SEQ ID NO: 125278 - RNA, 14 nt, Artificial Sequence
  Description of Artificial Sequence: Synthetic oligonucleotide
uuuauucagaucgc

SEQ ID NO: 125279 - RNA, 13 nt, Artificial Sequence
  Description of Artificial Sequence: Synthetic oligonucleotide
aggguucugggau

SEQ ID NO: 125280 - RNA, 15 nt, Artificial Sequence
  Description of Artificial Sequence: Synthetic oligonucleotide
auauuggaaauuaug

SEQ ID NO: 125281 - RNA, 13 nt, Artificial Sequence
  Description of Artificial Sequence: Synthetic oligonucleotide
auggaagcacuag

SEQ ID NO: 125282 - RNA, 13 nt, Artificial Sequence
  Description of Artificial Sequence: Synthetic oligonucleotide
guuuuuaugugga

SEQ ID NO: 125283 - RNA, 12 nt, Artificial Sequence
  Description of Artificial Sequence: Synthetic oligonucleotide
ggaauugguaga

SEQ ID NO: 125284 - RNA, 13 nt, Artificial Sequence
  Description of Artificial Sequence: Synthetic oligonucleotide
uuagacuuggaga

SEQ ID NO: 125285 - RNA, 13 nt, Artificial Sequence
  Description of Artificial Sequence: Synthetic oligonucleotide
uuacaguauucca

SEQ ID NO: 125286 - RNA, 15 nt, Artificial Sequence
  Description of Artificial Sequence: Synthetic oligonucleotide
ccacugaugaauuaa

SEQ ID NO: 125287 - RNA, 12 nt, Artificial Sequence
  Description of Artificial Sequence: Synthetic oligonucleotide
ccacaucaucac

SEQ ID NO: 125288 - RNA, 13 nt, Artificial Sequence
  Description of Artificial Sequence: Synthetic oligonucleotide
cucaccaaacaga

SEQ ID NO: 125289 - RNA, 12 nt, Artificial Sequence
  Description of Artificial Sequence: Synthetic oligonucleotide
ggaacaugaugg

SEQ ID NO: 125290 - RNA, 12 nt, Artificial Sequence
  Description of Artificial Sequence: Synthetic oligonucleotide
cauguagacugc

SEQ ID NO: 125291 - RNA, 13 nt, Artificial Sequence
  Description of Artificial Sequence: Synthetic oligonucleotide
ggaucuauuuaug

SEQ ID NO: 125292 - RNA, 12 nt, Artificial Sequence
  Description of Artificial Sequence: Synthetic oligonucleotide
gcacuauuauca

SEQ ID NO: 125293 - RNA, 11 nt, Artificial Sequence
  Description of Artificial Sequence: Synthetic oligonucleotide
aucaguucugc

SEQ ID NO: 125294 - RNA, 13 nt, Artificial Sequence
  Description of Artificial Sequence: Synthetic oligonucleotide
agauuaaaccuac

SEQ ID NO: 125295 - RNA, 13 nt, Artificial Sequence
  Description of Artificial Sequence: Synthetic oligonucleotide
auaaaauccuucu

SEQ ID NO: 125296 - RNA, 12 nt, Artificial Sequence
  Description of Artificial Sequence: Synthetic oligonucleotide
aaugcuguagac

SEQ ID NO: 125297 - RNA, 13 nt, Artificial Sequence
  Description of Artificial Sequence: Synthetic oligonucleotide
uugauaggaauag

SEQ ID NO: 125298 - RNA, 11 nt, Artificial Sequence
  Description of Artificial Sequence: Synthetic oligonucleotide
aauggcccuga

SEQ ID NO: 125299 - RNA, 11 nt, Artificial Sequence
  Description of Artificial Sequence: Synthetic oligonucleotide
uuccucaagca

SEQ ID NO: 125300 - RNA, 10 nt, Artificial Sequence
  Description of Artificial Sequence: Synthetic oligonucleotide
guucagccca

SEQ ID NO: 125301 - RNA, 11 nt, Artificial Sequence
  Description of Artificial Sequence: Synthetic oligonucleotide
gcugcugaacc

SEQ ID NO: 125302 - RNA, 12 nt, Artificial Sequence
  Description of Artificial Sequence: Synthetic oligonucleotide
aaguucucuuca

SEQ ID NO: 125303 - RNA, 11 nt, Artificial Sequence
  Description of Artificial Sequence: Synthetic oligonucleotide
ccagccuagag

SEQ ID NO: 125304 - RNA, 13 nt, Artificial Sequence
  Description of Artificial Sequence: Synthetic oligonucleotide
cucugugaagugu

SEQ ID NO: 125305 - RNA, 14 nt, Artificial Sequence
  Description of Artificial Sequence: Synthetic oligonucleotide
ugagaaaauuucaa

SEQ ID NO: 125306 - RNA, 11 nt, Artificial Sequence
  Description of Artificial Sequence: Synthetic oligonucleotide
aauccuccuga

SEQ ID NO: 125307 - RNA, 12 nt, Artificial Sequence
  Description of Artificial Sequence: Synthetic oligonucleotide
gugacaucauau

SEQ ID NO: 125308 - RNA, 13 nt, Artificial Sequence
  Description of Artificial Sequence: Synthetic oligonucleotide
aaucuucaucaua

SEQ ID NO: 125309 - RNA, 13 nt, Artificial Sequence
  Description of Artificial Sequence: Synthetic oligonucleotide
gacuagcuauuaa

SEQ ID NO: 125310 - RNA, 14 nt, Artificial Sequence
  Description of Artificial Sequence: Synthetic oligonucleotide
ucucuacuaaaaau

SEQ ID NO: 125311 - RNA, 12 nt, Artificial Sequence
  Description of Artificial Sequence: Synthetic oligonucleotide
ucuaucucgccu

SEQ ID NO: 125312 - RNA, 13 nt, Artificial Sequence
  Description of Artificial Sequence: Synthetic oligonucleotide
cuucgguccaguu

SEQ ID NO: 125313 - RNA, 11 nt, Artificial Sequence
  Description of Artificial Sequence: Synthetic oligonucleotide
gauguagccgc

SEQ ID NO: 125314 - RNA, 12 nt, Artificial Sequence
  Description of Artificial Sequence: Synthetic oligonucleotide
ugaggagacuug

SEQ ID NO: 125315 - RNA, 12 nt, Artificial Sequence
  Description of Artificial Sequence: Synthetic oligonucleotide
gaguagugagga

SEQ ID NO: 125316 - RNA, 14 nt, Artificial Sequence
  Description of Artificial Sequence: Synthetic oligonucleotide
cagaugaguacaaa

SEQ ID NO: 125317 - RNA, 13 nt, Artificial Sequence
  Description of Artificial Sequence: Synthetic oligonucleotide
guuguuaaugggc

SEQ ID NO: 125318 - RNA, 13 nt, Artificial Sequence
  Description of Artificial Sequence: Synthetic oligonucleotide
uuuuuaauuuauu

SEQ ID NO: 125319 - RNA, 12 nt, Artificial Sequence
  Description of Artificial Sequence: Synthetic oligonucleotide
uauuuaaauaug

SEQ ID NO: 125320 - RNA, 13 nt, Artificial Sequence
  Description of Artificial Sequence: Synthetic oligonucleotide
uauccuuuguuuc

SEQ ID NO: 125321 - RNA, 14 nt, Artificial Sequence
  Description of Artificial Sequence: Synthetic oligonucleotide
cgucuaaguguuug

SEQ ID NO: 125322 - RNA, 12 nt, Artificial Sequence
  Description of Artificial Sequence: Synthetic oligonucleotide
accugugacaaa

SEQ ID NO: 125323 - RNA, 13 nt, Artificial Sequence
  Description of Artificial Sequence: Synthetic oligonucleotide
ccaggcugaauua

SEQ ID NO: 125324 - RNA, 14 nt, Artificial Sequence
  Description of Artificial Sequence: Synthetic oligonucleotide
gucauucuuacaau

SEQ ID NO: 125325 - RNA, 15 nt, Artificial Sequence
  Description of Artificial Sequence: Synthetic oligonucleotide
ucauucuuacaauug

SEQ ID NO: 125326 - RNA, 12 nt, Artificial Sequence
  Description of Artificial Sequence: Synthetic oligonucleotide
cagagaguguac

SEQ ID NO: 125327 - RNA, 12 nt, Artificial Sequence
  Description of Artificial Sequence: Synthetic oligonucleotide
agaacucagcag

SEQ ID NO: 125328 - RNA, 13 nt, Artificial Sequence
  Description of Artificial Sequence: Synthetic oligonucleotide
uuuauuuucagua

SEQ ID NO: 125329 - RNA, 12 nt, Artificial Sequence
  Description of Artificial Sequence: Synthetic oligonucleotide
ucuuaaauggaa

SEQ ID NO: 125330 - RNA, 13 nt, Artificial Sequence
  Description of Artificial Sequence: Synthetic oligonucleotide
ugccuaaaauugu

SEQ ID NO: 125331 - RNA, 12 nt, Artificial Sequence
  Description of Artificial Sequence: Synthetic oligonucleotide
agacugugagcu

SEQ ID NO: 125332 - RNA, 14 nt, Artificial Sequence
  Description of Artificial Sequence: Synthetic oligonucleotide
ugcuuuuuauuaau

SEQ ID NO: 125333 - RNA, 13 nt, Artificial Sequence
  Description of Artificial Sequence: Synthetic oligonucleotide
cucuucuuacauu

SEQ ID NO: 125334 - RNA, 15 nt, Artificial Sequence
  Description of Artificial Sequence: Synthetic oligonucleotide
cauuuguaaaaaugu

SEQ ID NO: 125335 - RNA, 15 nt, Artificial Sequence
  Description of Artificial Sequence: Synthetic oligonucleotide
aucuuaauucauauu

SEQ ID NO: 125336 - RNA, 13 nt, Artificial Sequence
  Description of Artificial Sequence: Synthetic oligonucleotide
gaacuaaucauga

SEQ ID NO: 125337 - RNA, 12 nt, Artificial Sequence
  Description of Artificial Sequence: Synthetic oligonucleotide
ucugcucuuggg

SEQ ID NO: 125338 - RNA, 13 nt, Artificial Sequence
  Description of Artificial Sequence: Synthetic oligonucleotide
caguagcuuugag

SEQ ID NO: 125339 - RNA, 14 nt, Artificial Sequence
  Description of Artificial Sequence: Synthetic oligonucleotide
cacguaauauuuca

SEQ ID NO: 125340 - RNA, 13 nt, Artificial Sequence
  Description of Artificial Sequence: Synthetic oligonucleotide
uauucucuucacu

SEQ ID NO: 125341 - RNA, 14 nt, Artificial Sequence
  Description of Artificial Sequence: Synthetic oligonucleotide
cuaaugcuaagaaa

SEQ ID NO: 125342 - RNA, 12 nt, Artificial Sequence
  Description of Artificial Sequence: Synthetic oligonucleotide
gcugaaaaucaa

SEQ ID NO: 125343 - RNA, 14 nt, Artificial Sequence
  Description of Artificial Sequence: Synthetic oligonucleotide
aauaugauuacuuu

SEQ ID NO: 125344 - RNA, 14 nt, Artificial Sequence
  Description of Artificial Sequence: Synthetic oligonucleotide
cauuuuguucuaca

SEQ ID NO: 125345 - RNA, 12 nt, Artificial Sequence
  Description of Artificial Sequence: Synthetic oligonucleotide
cccgggacucuc

SEQ ID NO: 125346 - RNA, 14 nt, Artificial Sequence
  Description of Artificial Sequence: Synthetic oligonucleotide
ccuuuaaaguaaag

SEQ ID NO: 125347 - RNA, 13 nt, Artificial Sequence
  Description of Artificial Sequence: Synthetic oligonucleotide
ucuggaagccugg

SEQ ID NO: 125348 - RNA, 14 nt, Artificial Sequence
  Description of Artificial Sequence: Synthetic oligonucleotide
aaaacaaaagagag

SEQ ID NO: 125349 - RNA, 13 nt, Artificial Sequence
  Description of Artificial Sequence: Synthetic oligonucleotide
aucaguuaugccg

SEQ ID NO: 125350 - RNA, 13 nt, Artificial Sequence
  Description of Artificial Sequence: Synthetic oligonucleotide
uaaaagaagucca

SEQ ID NO: 125351 - RNA, 11 nt, Artificial Sequence
  Description of Artificial Sequence: Synthetic oligonucleotide
aggugagguua

SEQ ID NO: 125352 - RNA, 11 nt, Artificial Sequence
  Description of Artificial Sequence: Synthetic oligonucleotide
gggaagaggac

SEQ ID NO: 125353 - RNA, 13 nt, Artificial Sequence
  Description of Artificial Sequence: Synthetic oligonucleotide
aagcaaguauugu

SEQ ID NO: 125354 - RNA, 12 nt, Artificial Sequence
  Description of Artificial Sequence: Synthetic oligonucleotide
auuguagcacuc

SEQ ID NO: 125355 - RNA, 14 nt, Artificial Sequence
  Description of Artificial Sequence: Synthetic oligonucleotide
acaaaaccacaaau

SEQ ID NO: 125356 - RNA, 12 nt, Artificial Sequence
  Description of Artificial Sequence: Synthetic oligonucleotide
uaagcccauaca

SEQ ID NO: 125357 - RNA, 11 nt, Artificial Sequence
  Description of Artificial Sequence: Synthetic oligonucleotide
agcccauacag

SEQ ID NO: 125358 - RNA, 12 nt, Artificial Sequence
  Description of Artificial Sequence: Synthetic oligonucleotide
cagaaaccuucc

SEQ ID NO: 125359 - RNA, 10 nt, Artificial Sequence
  Description of Artificial Sequence: Synthetic oligonucleotide
guauaccuac

SEQ ID NO: 125360 - RNA, 13 nt, Artificial Sequence
  Description of Artificial Sequence: Synthetic oligonucleotide
gccaguuuucgga

SEQ ID NO: 125361 - RNA, 9 nt, Artificial Sequence
  Description of Artificial Sequence: Synthetic oligonucleotide
ggaacaggg

SEQ ID NO: 125362 - RNA, 13 nt, Artificial Sequence
  Description of Artificial Sequence: Synthetic oligonucleotide
uuaacuuuccagu

SEQ ID NO: 125363 - RNA, 14 nt, Artificial Sequence
  Description of Artificial Sequence: Synthetic oligonucleotide
aaaguuugguuuug

SEQ ID NO: 125364 - RNA, 12 nt, Artificial Sequence
  Description of Artificial Sequence: Synthetic oligonucleotide
cuucccacugua

SEQ ID NO: 125365 - RNA, 13 nt, Artificial Sequence
  Description of Artificial Sequence: Synthetic oligonucleotide
ugauaccauauga

SEQ ID NO: 125366 - RNA, 11 nt, Artificial Sequence
  Description of Artificial Sequence: Synthetic oligonucleotide
aacaugggcug

SEQ ID NO: 125367 - RNA, 13 nt, Artificial Sequence
  Description of Artificial Sequence: Synthetic oligonucleotide
caacuuuuucaua

SEQ ID NO: 125368 - RNA, 12 nt, Artificial Sequence
  Description of Artificial Sequence: Synthetic oligonucleotide
caugaggccgga

SEQ ID NO: 125369 - RNA, 11 nt, Artificial Sequence
  Description of Artificial Sequence: Synthetic oligonucleotide
acugcauuugu

SEQ ID NO: 125370 - RNA, 13 nt, Artificial Sequence
  Description of Artificial Sequence: Synthetic oligonucleotide
aauguuuacuacc

SEQ ID NO: 125371 - RNA, 15 nt, Artificial Sequence
  Description of Artificial Sequence: Synthetic oligonucleotide
aauuuuuugaugaaa

SEQ ID NO: 125372 - RNA, 14 nt, Artificial Sequence
  Description of Artificial Sequence: Synthetic oligonucleotide
cagugugugaauuu

SEQ ID NO: 125373 - RNA, 13 nt, Artificial Sequence
  Description of Artificial Sequence: Synthetic oligonucleotide
gagcaauguaugu

SEQ ID NO: 125374 - RNA, 14 nt, Artificial Sequence
  Description of Artificial Sequence: Synthetic oligonucleotide
aaagcacauauaua

SEQ ID NO: 125375 - RNA, 14 nt, Artificial Sequence
  Description of Artificial Sequence: Synthetic oligonucleotide
guaauaguuucucc

SEQ ID NO: 125376 - RNA, 13 nt, Artificial Sequence
  Description of Artificial Sequence: Synthetic oligonucleotide
aguuucuccaaau

SEQ ID NO: 125377 - RNA, 13 nt, Artificial Sequence
  Description of Artificial Sequence: Synthetic oligonucleotide
uacuuccuagaaa

SEQ ID NO: 125378 - RNA, 13 nt, Artificial Sequence
  Description of Artificial Sequence: Synthetic oligonucleotide
uacaccauauaug

SEQ ID NO: 125379 - RNA, 14 nt, Artificial Sequence
  Description of Artificial Sequence: Synthetic oligonucleotide
auauaugaauggag

SEQ ID NO: 125380 - RNA, 13 nt, Artificial Sequence
  Description of Artificial Sequence: Synthetic oligonucleotide
acgagaagaagau

SEQ ID NO: 125381 - RNA, 13 nt, Artificial Sequence
  Description of Artificial Sequence: Synthetic oligonucleotide
ucauuuacaggga

SEQ ID NO: 125382 - RNA, 13 nt, Artificial Sequence
  Description of Artificial Sequence: Synthetic oligonucleotide
cauuuacagggac

SEQ ID NO: 125383 - RNA, 10 nt, Artificial Sequence
  Description of Artificial Sequence: Synthetic oligonucleotide
agggaccuga

SEQ ID NO: 125384 - RNA, 14 nt, Artificial Sequence
  Description of Artificial Sequence: Synthetic oligonucleotide
uguuugacugcauc

SEQ ID NO: 125385 - RNA, 13 nt, Artificial Sequence
  Description of Artificial Sequence: Synthetic oligonucleotide
uuugacugcaucg

SEQ ID NO: 125386 - RNA, 12 nt, Artificial Sequence
  Description of Artificial Sequence: Synthetic oligonucleotide
gaguucacaggg

SEQ ID NO: 125387 - RNA, 13 nt, Artificial Sequence
  Description of Artificial Sequence: Synthetic oligonucleotide
ggcaccucugucc

SEQ ID NO: 125388 - RNA, 15 nt, Artificial Sequence
  Description of Artificial Sequence: Synthetic oligonucleotide
gguuugucuuuuuaa

SEQ ID NO: 125389 - RNA, 14 nt, Artificial Sequence
  Description of Artificial Sequence: Synthetic oligonucleotide
uuugucuuuuuaag

SEQ ID NO: 125390 - RNA, 13 nt, Artificial Sequence
  Description of Artificial Sequence: Synthetic oligonucleotide
ccuaaagguuguc

SEQ ID NO: 125391 - RNA, 12 nt, Artificial Sequence
  Description of Artificial Sequence: Synthetic oligonucleotide
aagguugucgac

SEQ ID NO: 125392 - RNA, 13 nt, Artificial Sequence
  Description of Artificial Sequence: Synthetic oligonucleotide
accuggcaauugu

SEQ ID NO: 125393 - RNA, 12 nt, Artificial Sequence
  Description of Artificial Sequence: Synthetic oligonucleotide
aguggugcgagg

SEQ ID NO: 125394 - RNA, 13 nt, Artificial Sequence
  Description of Artificial Sequence: Synthetic oligonucleotide
agagacaugaaau

SEQ ID NO: 125395 - RNA, 13 nt, Artificial Sequence
  Description of Artificial Sequence: Synthetic oligonucleotide
auauauuucucca

SEQ ID NO: 125396 - RNA, 10 nt, Artificial Sequence
  Description of Artificial Sequence: Synthetic oligonucleotide
caugaaggcu

SEQ ID NO: 125397 - RNA, 11 nt, Artificial Sequence
  Description of Artificial Sequence: Synthetic oligonucleotide
gcuggaguggu

SEQ ID NO: 125398 - RNA, 11 nt, Artificial Sequence
  Description of Artificial Sequence: Synthetic oligonucleotide
aggaagagagg

SEQ ID NO: 125399 - RNA, 12 nt, Artificial Sequence
  Description of Artificial Sequence: Synthetic oligonucleotide
cuugcaucgggc

SEQ ID NO: 125400 - RNA, 13 nt, Artificial Sequence
  Description of Artificial Sequence: Synthetic oligonucleotide
auauccuacugug

SEQ ID NO: 125401 - RNA, 13 nt, Artificial Sequence
  Description of Artificial Sequence: Synthetic oligonucleotide
uccuacuguguaa

SEQ ID NO: 125402 - RNA, 12 nt, Artificial Sequence
  Description of Artificial Sequence: Synthetic oligonucleotide
ccuuguagugua

SEQ ID NO: 125403 - RNA, 13 nt, Artificial Sequence
  Description of Artificial Sequence: Synthetic oligonucleotide
ucuuuguugauug

SEQ ID NO: 125404 - RNA, 14 nt, Artificial Sequence
  Description of Artificial Sequence: Synthetic oligonucleotide
uuuguugauugaaa

SEQ ID NO: 125405 - RNA, 15 nt, Artificial Sequence
  Description of Artificial Sequence: Synthetic oligonucleotide
uucuuuuucuuccau

SEQ ID NO: 125406 - RNA, 13 nt, Artificial Sequence
  Description of Artificial Sequence: Synthetic oligonucleotide
aaucuuccuucua

SEQ ID NO: 125407 - RNA, 13 nt, Artificial Sequence
  Description of Artificial Sequence: Synthetic oligonucleotide
uugaaugcuucau

SEQ ID NO: 125408 - RNA, 13 nt, Artificial Sequence
  Description of Artificial Sequence: Synthetic oligonucleotide
ugaaugcuucaug

SEQ ID NO: 125409 - RNA, 13 nt, Artificial Sequence
  Description of Artificial Sequence: Synthetic oligonucleotide
aauucuacuuuga

SEQ ID NO: 125410 - RNA, 13 nt, Artificial Sequence
  Description of Artificial Sequence: Synthetic oligonucleotide
agcaacuacagac

SEQ ID NO: 125411 - RNA, 13 nt, Artificial Sequence
  Description of Artificial Sequence: Synthetic oligonucleotide
gaccaaggucaac

SEQ ID NO: 125412 - RNA, 13 nt, Artificial Sequence
  Description of Artificial Sequence: Synthetic oligonucleotide
cgacuaucucgac

SEQ ID NO: 125413 - RNA, 13 nt, Artificial Sequence
  Description of Artificial Sequence: Synthetic oligonucleotide
aaccuucccaaac

SEQ ID NO: 125414 - RNA, 14 nt, Artificial Sequence
  Description of Artificial Sequence: Synthetic oligonucleotide
ccaagcuuagaacu

SEQ ID NO: 125415 - RNA, 15 nt, Artificial Sequence
  Description of Artificial Sequence: Synthetic oligonucleotide
agcuuagaacuuuaa

SEQ ID NO: 125416 - RNA, 11 nt, Artificial Sequence
  Description of Artificial Sequence: Synthetic oligonucleotide
aagaccaccac

SEQ ID NO: 125417 - RNA, 14 nt, Artificial Sequence
  Description of Artificial Sequence: Synthetic oligonucleotide
gcgagaaauaaagu

SEQ ID NO: 125418 - RNA, 14 nt, Artificial Sequence
  Description of Artificial Sequence: Synthetic oligonucleotide
cgagaaauaaaguu

SEQ ID NO: 125419 - RNA, 12 nt, Artificial Sequence
  Description of Artificial Sequence: Synthetic oligonucleotide
aggaaaugaucc

SEQ ID NO: 125420 - RNA, 13 nt, Artificial Sequence
  Description of Artificial Sequence: Synthetic oligonucleotide
gaagaaaugaaac

SEQ ID NO: 125421 - RNA, 13 nt, Artificial Sequence
  Description of Artificial Sequence: Synthetic oligonucleotide
guuuccauccucc

SEQ ID NO: 125422 - RNA, 15 nt, Artificial Sequence
  Description of Artificial Sequence: Synthetic oligonucleotide
acugaaaaucuuuga

SEQ ID NO: 125423 - RNA, 11 nt, Artificial Sequence
  Description of Artificial Sequence: Synthetic oligonucleotide
ugccguucagg

SEQ ID NO: 125424 - RNA, 13 nt, Artificial Sequence
  Description of Artificial Sequence: Synthetic oligonucleotide
caggguccagaag

SEQ ID NO: 125425 - RNA, 13 nt, Artificial Sequence
  Description of Artificial Sequence: Synthetic oligonucleotide
ucaagacugcuug

SEQ ID NO: 125426 - RNA, 13 nt, Artificial Sequence
  Description of Artificial Sequence: Synthetic oligonucleotide
uccaugucuuugg

SEQ ID NO: 125427 - RNA, 11 nt, Artificial Sequence
  Description of Artificial Sequence: Synthetic oligonucleotide
gccugaaacac

SEQ ID NO: 125428 - RNA, 12 nt, Artificial Sequence
  Description of Artificial Sequence: Synthetic oligonucleotide
ucucuguaccuc

SEQ ID NO: 125429 - RNA, 12 nt, Artificial Sequence
  Description of Artificial Sequence: Synthetic oligonucleotide
agcaagacaaga

SEQ ID NO: 125430 - RNA, 13 nt, Artificial Sequence
  Description of Artificial Sequence: Synthetic oligonucleotide
gcaagacaagaaa

SEQ ID NO: 125431 - RNA, 12 nt, Artificial Sequence
  Description of Artificial Sequence: Synthetic oligonucleotide
uguacaagaucc

SEQ ID NO: 125432 - RNA, 12 nt, Artificial Sequence
  Description of Artificial Sequence: Synthetic oligonucleotide
cguacuugcaga

SEQ ID NO: 125433 - RNA, 13 nt, Artificial Sequence
  Description of Artificial Sequence: Synthetic oligonucleotide
cgaucgauacaga

SEQ ID NO: 125434 - RNA, 13 nt, Artificial Sequence
  Description of Artificial Sequence: Synthetic oligonucleotide
uauaaaaauaaau

SEQ ID NO: 125435 - RNA, 13 nt, Artificial Sequence
  Description of Artificial Sequence: Synthetic oligonucleotide
uaaaaauaaauau

SEQ ID NO: 125436 - RNA, 13 nt, Artificial Sequence
  Description of Artificial Sequence: Synthetic oligonucleotide
uuugacugcugug

SEQ ID NO: 125437 - RNA, 13 nt, Artificial Sequence
  Description of Artificial Sequence: Synthetic oligonucleotide
ggagaugagagac

SEQ ID NO: 125438 - RNA, 10 nt, Artificial Sequence
  Description of Artificial Sequence: Synthetic oligonucleotide
ucccacuugg

SEQ ID NO: 125439 - RNA, 10 nt, Artificial Sequence
  Description of Artificial Sequence: Synthetic oligonucleotide
guucacggcc

SEQ ID NO: 125440 - RNA, 12 nt, Artificial Sequence
  Description of Artificial Sequence: Synthetic oligonucleotide
accaucacacca

SEQ ID NO: 125441 - RNA, 10 nt, Artificial Sequence
  Description of Artificial Sequence: Synthetic oligonucleotide
cugcggguuu

SEQ ID NO: 125442 - RNA, 9 nt, Artificial Sequence
  Description of Artificial Sequence: Synthetic oligonucleotide
uccaguuug

SEQ ID NO: 125443 - RNA, 12 nt, Artificial Sequence
  Description of Artificial Sequence: Synthetic oligonucleotide
uuaaggacuucu

SEQ ID NO: 125444 - RNA, 12 nt, Artificial Sequence
  Description of Artificial Sequence: Synthetic oligonucleotide
agugggacagag

SEQ ID NO: 125445 - RNA, 13 nt, Artificial Sequence
  Description of Artificial Sequence: Synthetic oligonucleotide
auuuguuauugug

SEQ ID NO: 125446 - RNA, 12 nt, Artificial Sequence
  Description of Artificial Sequence: Synthetic oligonucleotide
ucaaaugcauuu

SEQ ID NO: 125447 - RNA, 9 nt, Artificial Sequence
  Description of Artificial Sequence: Synthetic oligonucleotide
aggaaagcc

SEQ ID NO: 125448 - RNA, 10 nt, Artificial Sequence
  Description of Artificial Sequence: Synthetic oligonucleotide
ggaaagcccu

SEQ ID NO: 125449 - RNA, 11 nt, Artificial Sequence
  Description of Artificial Sequence: Synthetic oligonucleotide
ccagcauggcc

SEQ ID NO: 125450 - RNA, 10 nt, Artificial Sequence
  Description of Artificial Sequence: Synthetic oligonucleotide
uucucccuga

SEQ ID NO: 125451 - RNA, 11 nt, Artificial Sequence
  Description of Artificial Sequence: Synthetic oligonucleotide
aagaagcccuu

SEQ ID NO: 125452 - RNA, 11 nt, Artificial Sequence
  Description of Artificial Sequence: Synthetic oligonucleotide
gaagcccuuca

SEQ ID NO: 125453 - RNA, 10 nt, Artificial Sequence
  Description of Artificial Sequence: Synthetic oligonucleotide
cccuucagcg

SEQ ID NO: 125454 - RNA, 10 nt, Artificial Sequence
  Description of Artificial Sequence: Synthetic oligonucleotide
cuucagcggc

SEQ ID NO: 125455 - RNA, 11 nt, Artificial Sequence
  Description of Artificial Sequence: Synthetic oligonucleotide
cagcggccagu

SEQ ID NO: 125456 - RNA, 11 nt, Artificial Sequence
  Description of Artificial Sequence: Synthetic oligonucleotide
gaaaagcuccg

SEQ ID NO: 125457 - RNA, 10 nt, Artificial Sequence
  Description of Artificial Sequence: Synthetic oligonucleotide
aaagcuccgg

SEQ ID NO: 125458 - RNA, 12 nt, Artificial Sequence
  Description of Artificial Sequence: Synthetic oligonucleotide
gucaacagucug

SEQ ID NO: 125459 - RNA, 12 nt, Artificial Sequence
  Description of Artificial Sequence: Synthetic oligonucleotide
agaguucaaaag

SEQ ID NO: 125460 - RNA, 12 nt, Artificial Sequence
  Description of Artificial Sequence: Synthetic oligonucleotide
gaguucaaaagc

SEQ ID NO: 125461 - RNA, 11 nt, Artificial Sequence
  Description of Artificial Sequence: Synthetic oligonucleotide
ucaaaagcccu

SEQ ID NO: 125462 - RNA, 11 nt, Artificial Sequence
  Description of Artificial Sequence: Synthetic oligonucleotide
caaaagcccuu

SEQ ID NO: 125463 - RNA, 11 nt, Artificial Sequence
  Description of Artificial Sequence: Synthetic oligonucleotide
aaagcccuuca

SEQ ID NO: 125464 - RNA, 11 nt, Artificial Sequence
  Description of Artificial Sequence: Synthetic oligonucleotide
aagcccuucag

SEQ ID NO: 125465 - RNA, 12 nt, Artificial Sequence
  Description of Artificial Sequence: Synthetic oligonucleotide
ugaagccgcucg

SEQ ID NO: 125466 - RNA, 11 nt, Artificial Sequence
  Description of Artificial Sequence: Synthetic oligonucleotide
acgccagucaa

SEQ ID NO: 125467 - RNA, 12 nt, Artificial Sequence
  Description of Artificial Sequence: Synthetic oligonucleotide
ucuuggugcgug

SEQ ID NO: 125468 - RNA, 13 nt, Artificial Sequence
  Description of Artificial Sequence: Synthetic oligonucleotide
uuggauucaucag

SEQ ID NO: 125469 - RNA, 12 nt, Artificial Sequence
  Description of Artificial Sequence: Synthetic oligonucleotide
ggaauaccuaag

SEQ ID NO: 125470 - RNA, 11 nt, Artificial Sequence
  Description of Artificial Sequence: Synthetic oligonucleotide
uuugaggcuca

SEQ ID NO: 125471 - RNA, 10 nt, Artificial Sequence
  Description of Artificial Sequence: Synthetic oligonucleotide
cuacaauugg

SEQ ID NO: 125472 - RNA, 11 nt, Artificial Sequence
  Description of Artificial Sequence: Synthetic oligonucleotide
aguuaggagcc

SEQ ID NO: 125473 - RNA, 12 nt, Artificial Sequence
  Description of Artificial Sequence: Synthetic oligonucleotide
gucaauauccac

SEQ ID NO: 125474 - RNA, 12 nt, Artificial Sequence
  Description of Artificial Sequence: Synthetic oligonucleotide
uguucagucaca

SEQ ID NO: 125475 - RNA, 11 nt, Artificial Sequence
  Description of Artificial Sequence: Synthetic oligonucleotide
cacacacauac

SEQ ID NO: 125476 - RNA, 11 nt, Artificial Sequence
  Description of Artificial Sequence: Synthetic oligonucleotide
uccuuuugcuu

SEQ ID NO: 125477 - RNA, 15 nt, Artificial Sequence
  Description of Artificial Sequence: Synthetic oligonucleotide
uuuaaaguaauuuuu

SEQ ID NO: 125478 - RNA, 12 nt, Artificial Sequence
  Description of Artificial Sequence: Synthetic oligonucleotide
aacagucaaugg

SEQ ID NO: 125479 - RNA, 12 nt, Artificial Sequence
  Description of Artificial Sequence: Synthetic oligonucleotide
cgacaaaccaau

SEQ ID NO: 125480 - RNA, 11 nt, Artificial Sequence
  Description of Artificial Sequence: Synthetic oligonucleotide
cugcuaccacu

SEQ ID NO: 125481 - RNA, 12 nt, Artificial Sequence
  Description of Artificial Sequence: Synthetic oligonucleotide
caagcggucuua

SEQ ID NO: 125482 - RNA, 12 nt, Artificial Sequence
  Description of Artificial Sequence: Synthetic oligonucleotide
gucuuaccggcu

SEQ ID NO: 125483 - RNA, 10 nt, Artificial Sequence
  Description of Artificial Sequence: Synthetic oligonucleotide
auggguuacc

SEQ ID NO: 125484 - RNA, 10 nt, Artificial Sequence
  Description of Artificial Sequence: Synthetic oligonucleotide
uuaccugcga

SEQ ID NO: 125485 - RNA, 11 nt, Artificial Sequence
  Description of Artificial Sequence: Synthetic oligonucleotide
aucuugcugag

SEQ ID NO: 125486 - RNA, 12 nt, Artificial Sequence
  Description of Artificial Sequence: Synthetic oligonucleotide
gcauaaaacagu

SEQ ID NO: 125487 - RNA, 11 nt, Artificial Sequence
  Description of Artificial Sequence: Synthetic oligonucleotide
uccuuuauccu

SEQ ID NO: 125488 - RNA, 11 nt, Artificial Sequence
  Description of Artificial Sequence: Synthetic oligonucleotide
aacgcaaguug

SEQ ID NO: 125489 - RNA, 12 nt, Artificial Sequence
  Description of Artificial Sequence: Synthetic oligonucleotide
aacugaaaccau

SEQ ID NO: 125490 - RNA, 13 nt, Artificial Sequence
  Description of Artificial Sequence: Synthetic oligonucleotide
cuuuguuaaauau

SEQ ID NO: 125491 - RNA, 13 nt, Artificial Sequence
  Description of Artificial Sequence: Synthetic oligonucleotide
uauauuaaaaguu

SEQ ID NO: 125492 - RNA, 12 nt, Artificial Sequence
  Description of Artificial Sequence: Synthetic oligonucleotide
uuuugacuuaac

SEQ ID NO: 125493 - RNA, 12 nt, Artificial Sequence
  Description of Artificial Sequence: Synthetic oligonucleotide
caaacucagcac

SEQ ID NO: 125494 - RNA, 10 nt, Artificial Sequence
  Description of Artificial Sequence: Synthetic oligonucleotide
gcugaccuca

SEQ ID NO: 125495 - RNA, 13 nt, Artificial Sequence
  Description of Artificial Sequence: Synthetic oligonucleotide
uuauucagaucgc

SEQ ID NO: 125496 - RNA, 12 nt, Artificial Sequence
  Description of Artificial Sequence: Synthetic oligonucleotide
ggguucugggau

SEQ ID NO: 125497 - RNA, 14 nt, Artificial Sequence
  Description of Artificial Sequence: Synthetic oligonucleotide
uauuggaaauuaug

SEQ ID NO: 125498 - RNA, 12 nt, Artificial Sequence
  Description of Artificial Sequence: Synthetic oligonucleotide
uggaagcacuag

SEQ ID NO: 125499 - RNA, 12 nt, Artificial Sequence
  Description of Artificial Sequence: Synthetic oligonucleotide
uuuuuaugugga

SEQ ID NO: 125500 - RNA, 11 nt, Artificial Sequence
  Description of Artificial Sequence: Synthetic oligonucleotide
gaauugguaga

SEQ ID NO: 125501 - RNA, 12 nt, Artificial Sequence
  Description of Artificial Sequence: Synthetic oligonucleotide
uagacuuggaga

SEQ ID NO: 125502 - RNA, 12 nt, Artificial Sequence
  Description of Artificial Sequence: Synthetic oligonucleotide
uacaguauucca

SEQ ID NO: 125503 - RNA, 14 nt, Artificial Sequence
  Description of Artificial Sequence: Synthetic oligonucleotide
cacugaugaauuaa

SEQ ID NO: 125504 - RNA, 11 nt, Artificial Sequence
  Description of Artificial Sequence: Synthetic oligonucleotide
cacaucaucac

SEQ ID NO: 125505 - RNA, 12 nt, Artificial Sequence
  Description of Artificial Sequence: Synthetic oligonucleotide
ucaccaaacaga

SEQ ID NO: 125506 - RNA, 11 nt, Artificial Sequence
  Description of Artificial Sequence: Synthetic oligonucleotide
gaacaugaugg

SEQ ID NO: 125507 - RNA, 11 nt, Artificial Sequence
  Description of Artificial Sequence: Synthetic oligonucleotide
auguagacugc

SEQ ID NO: 125508 - RNA, 12 nt, Artificial Sequence
  Description of Artificial Sequence: Synthetic oligonucleotide
gaucuauuuaug

SEQ ID NO: 125509 - RNA, 11 nt, Artificial Sequence
  Description of Artificial Sequence: Synthetic oligonucleotide
cacuauuauca

SEQ ID NO: 125510 - RNA, 10 nt, Artificial Sequence
  Description of Artificial Sequence: Synthetic oligonucleotide
ucaguucugc

SEQ ID NO: 125511 - RNA, 12 nt, Artificial Sequence
  Description of Artificial Sequence: Synthetic oligonucleotide
gauuaaaccuac

SEQ ID NO: 125512 - RNA, 12 nt, Artificial Sequence
  Description of Artificial Sequence: Synthetic oligonucleotide
uaaaauccuucu

SEQ ID NO: 125513 - RNA, 11 nt, Artificial Sequence
  Description of Artificial Sequence: Synthetic oligonucleotide
augcuguagac

SEQ ID NO: 125514 - RNA, 12 nt, Artificial Sequence
  Description of Artificial Sequence: Synthetic oligonucleotide
ugauaggaauag

SEQ ID NO: 125515 - RNA, 10 nt, Artificial Sequence
  Description of Artificial Sequence: Synthetic oligonucleotide
auggcccuga

SEQ ID NO: 125516 - RNA, 10 nt, Artificial Sequence
  Description of Artificial Sequence: Synthetic oligonucleotide
uccucaagca

SEQ ID NO: 125517 - RNA, 9 nt, Artificial Sequence
  Description of Artificial Sequence: Synthetic oligonucleotide
uucagccca

SEQ ID NO: 125518 - RNA, 10 nt, Artificial Sequence
  Description of Artificial Sequence: Synthetic oligonucleotide
cugcugaacc

SEQ ID NO: 125519 - RNA, 11 nt, Artificial Sequence
  Description of Artificial Sequence: Synthetic oligonucleotide
aguucucuuca

SEQ ID NO: 125520 - RNA, 10 nt, Artificial Sequence
  Description of Artificial Sequence: Synthetic oligonucleotide
cagccuagag

SEQ ID NO: 125521 - RNA, 12 nt, Artificial Sequence
  Description of Artificial Sequence: Synthetic oligonucleotide
ucugugaagugu

SEQ ID NO: 125522 - RNA, 13 nt, Artificial Sequence
  Description of Artificial Sequence: Synthetic oligonucleotide
gagaaaauuucaa

SEQ ID NO: 125523 - RNA, 10 nt, Artificial Sequence
  Description of Artificial Sequence: Synthetic oligonucleotide
auccuccuga

SEQ ID NO: 125524 - RNA, 11 nt, Artificial Sequence
  Description of Artificial Sequence: Synthetic oligonucleotide
ugacaucauau

SEQ ID NO: 125525 - RNA, 12 nt, Artificial Sequence
  Description of Artificial Sequence: Synthetic oligonucleotide
aucuucaucaua

SEQ ID NO: 125526 - RNA, 12 nt, Artificial Sequence
  Description of Artificial Sequence: Synthetic oligonucleotide
acuagcuauuaa

SEQ ID NO: 125527 - RNA, 13 nt, Artificial Sequence
  Description of Artificial Sequence: Synthetic oligonucleotide
cucuacuaaaaau

SEQ ID NO: 125528 - RNA, 11 nt, Artificial Sequence
  Description of Artificial Sequence: Synthetic oligonucleotide
cuaucucgccu

SEQ ID NO: 125529 - RNA, 12 nt, Artificial Sequence
  Description of Artificial Sequence: Synthetic oligonucleotide
uucgguccaguu

SEQ ID NO: 125530 - RNA, 10 nt, Artificial Sequence
  Description of Artificial Sequence: Synthetic oligonucleotide
auguagccgc

SEQ ID NO: 125531 - RNA, 11 nt, Artificial Sequence
  Description of Artificial Sequence: Synthetic oligonucleotide
gaggagacuug

SEQ ID NO: 125532 - RNA, 11 nt, Artificial Sequence
  Description of Artificial Sequence: Synthetic oligonucleotide
aguagugagga

SEQ ID NO: 125533 - RNA, 13 nt, Artificial Sequence
  Description of Artificial Sequence: Synthetic oligonucleotide
agaugaguacaaa

SEQ ID NO: 125534 - RNA, 12 nt, Artificial Sequence
  Description of Artificial Sequence: Synthetic oligonucleotide
uuguuaaugggc

SEQ ID NO: 125535 - RNA, 12 nt, Artificial Sequence
  Description of Artificial Sequence: Synthetic oligonucleotide
uuuuaauuuauu

SEQ ID NO: 125536 - RNA, 11 nt, Artificial Sequence
  Description of Artificial Sequence: Synthetic oligonucleotide
auuuaaauaug

SEQ ID NO: 125537 - RNA, 12 nt, Artificial Sequence
  Description of Artificial Sequence: Synthetic oligonucleotide
auccuuuguuuc

SEQ ID NO: 125538 - RNA, 13 nt, Artificial Sequence
  Description of Artificial Sequence: Synthetic oligonucleotide
gucuaaguguuug

SEQ ID NO: 125539 - RNA, 11 nt, Artificial Sequence
  Description of Artificial Sequence: Synthetic oligonucleotide
ccugugacaaa

SEQ ID NO: 125540 - RNA, 12 nt, Artificial Sequence
  Description of Artificial Sequence: Synthetic oligonucleotide
caggcugaauua

SEQ ID NO: 125541 - RNA, 13 nt, Artificial Sequence
  Description of Artificial Sequence: Synthetic oligonucleotide
ucauucuuacaau

SEQ ID NO: 125542 - RNA, 14 nt, Artificial Sequence
  Description of Artificial Sequence: Synthetic oligonucleotide
cauucuuacaauug

SEQ ID NO: 125543 - RNA, 11 nt, Artificial Sequence
  Description of Artificial Sequence: Synthetic oligonucleotide
agagaguguac

SEQ ID NO: 125544 - RNA, 11 nt, Artificial Sequence
  Description of Artificial Sequence: Synthetic oligonucleotide
gaacucagcag

SEQ ID NO: 125545 - RNA, 12 nt, Artificial Sequence
  Description of Artificial Sequence: Synthetic oligonucleotide
uuauuuucagua

SEQ ID NO: 125546 - RNA, 11 nt, Artificial Sequence
  Description of Artificial Sequence: Synthetic oligonucleotide
cuuaaauggaa

SEQ ID NO: 125547 - RNA, 12 nt, Artificial Sequence
  Description of Artificial Sequence: Synthetic oligonucleotide
gccuaaaauugu

SEQ ID NO: 125548 - RNA, 12 nt, Artificial Sequence
  Description of Artificial Sequence: Synthetic oligonucleotide
acuaacaucugg

SEQ ID NO: 125549 - RNA, 11 nt, Artificial Sequence
  Description of Artificial Sequence: Synthetic oligonucleotide
gacugugagcu

SEQ ID NO: 125550 - RNA, 13 nt, Artificial Sequence
  Description of Artificial Sequence: Synthetic oligonucleotide
gcuuuuuauuaau

SEQ ID NO: 125551 - RNA, 12 nt, Artificial Sequence
  Description of Artificial Sequence: Synthetic oligonucleotide
ucuucuuacauu

SEQ ID NO: 125552 - RNA, 14 nt, Artificial Sequence
  Description of Artificial Sequence: Synthetic oligonucleotide
auuuguaaaaaugu

SEQ ID NO: 125553 - RNA, 14 nt, Artificial Sequence
  Description of Artificial Sequence: Synthetic oligonucleotide
ucuuaauucauauu

SEQ ID NO: 125554 - RNA, 12 nt, Artificial Sequence
  Description of Artificial Sequence: Synthetic oligonucleotide
aacuaaucauga

SEQ ID NO: 125555 - RNA, 11 nt, Artificial Sequence
  Description of Artificial Sequence: Synthetic oligonucleotide
cugcucuuggg

SEQ ID NO: 125556 - RNA, 12 nt, Artificial Sequence
  Description of Artificial Sequence: Synthetic oligonucleotide
aguagcuuugag

SEQ ID NO: 125557 - RNA, 13 nt, Artificial Sequence
  Description of Artificial Sequence: Synthetic oligonucleotide
acguaauauuuca

SEQ ID NO: 125558 - RNA, 12 nt, Artificial Sequence
  Description of Artificial Sequence: Synthetic oligonucleotide
auucucuucacu

SEQ ID NO: 125559 - RNA, 13 nt, Artificial Sequence
  Description of Artificial Sequence: Synthetic oligonucleotide
uaaugcuaagaaa

SEQ ID NO: 125560 - RNA, 11 nt, Artificial Sequence
  Description of Artificial Sequence: Synthetic oligonucleotide
cugaaaaucaa

SEQ ID NO: 125561 - RNA, 13 nt, Artificial Sequence
  Description of Artificial Sequence: Synthetic oligonucleotide
auaugauuacuuu

SEQ ID NO: 125562 - RNA, 13 nt, Artificial Sequence
  Description of Artificial Sequence: Synthetic oligonucleotide
auuuuguucuaca

SEQ ID NO: 125563 - RNA, 11 nt, Artificial Sequence
  Description of Artificial Sequence: Synthetic oligonucleotide
ccgggacucuc

SEQ ID NO: 125564 - RNA, 13 nt, Artificial Sequence
  Description of Artificial Sequence: Synthetic oligonucleotide
cuuuaaaguaaag

SEQ ID NO: 125565 - RNA, 12 nt, Artificial Sequence
  Description of Artificial Sequence: Synthetic oligonucleotide
cuggaagccugg

SEQ ID NO: 125566 - RNA, 13 nt, Artificial Sequence
  Description of Artificial Sequence: Synthetic oligonucleotide
aaacaaaagagag

SEQ ID NO: 125567 - RNA, 12 nt, Artificial Sequence
  Description of Artificial Sequence: Synthetic oligonucleotide
ucaguuaugccg

SEQ ID NO: 125568 - RNA, 12 nt, Artificial Sequence
  Description of Artificial Sequence: Synthetic oligonucleotide
aaaagaagucca

SEQ ID NO: 125569 - RNA, 10 nt, Artificial Sequence
  Description of Artificial Sequence: Synthetic oligonucleotide
ggugagguua

SEQ ID NO: 125570 - RNA, 10 nt, Artificial Sequence
  Description of Artificial Sequence: Synthetic oligonucleotide
ggaagaggac

SEQ ID NO: 125571 - RNA, 12 nt, Artificial Sequence
  Description of Artificial Sequence: Synthetic oligonucleotide
agcaaguauugu

SEQ ID NO: 125572 - RNA, 11 nt, Artificial Sequence
  Description of Artificial Sequence: Synthetic oligonucleotide
uuguagcacuc

SEQ ID NO: 125573 - RNA, 13 nt, Artificial Sequence
  Description of Artificial Sequence: Synthetic oligonucleotide
caaaaccacaaau

SEQ ID NO: 125574 - RNA, 11 nt, Artificial Sequence
  Description of Artificial Sequence: Synthetic oligonucleotide
aagcccauaca

SEQ ID NO: 125575 - RNA, 10 nt, Artificial Sequence
  Description of Artificial Sequence: Synthetic oligonucleotide
gcccauacag

SEQ ID NO: 125576 - RNA, 11 nt, Artificial Sequence
  Description of Artificial Sequence: Synthetic oligonucleotide
agaaaccuucc

SEQ ID NO: 125577 - RNA, 9 nt, Artificial Sequence
  Description of Artificial Sequence: Synthetic oligonucleotide
uauaccuac

SEQ ID NO: 125578 - RNA, 12 nt, Artificial Sequence
  Description of Artificial Sequence: Synthetic oligonucleotide
ccaguuuucgga

SEQ ID NO: 125579 - RNA, 8 nt, Artificial Sequence
  Description of Artificial Sequence: Synthetic oligonucleotide
gaacaggg

SEQ ID NO: 125580 - RNA, 12 nt, Artificial Sequence
  Description of Artificial Sequence: Synthetic oligonucleotide
uaacuuuccagu

SEQ ID NO: 125581 - RNA, 13 nt, Artificial Sequence
  Description of Artificial Sequence: Synthetic oligonucleotide
aaguuugguuuug

SEQ ID NO: 125582 - RNA, 11 nt, Artificial Sequence
  Description of Artificial Sequence: Synthetic oligonucleotide
uucccacugua

SEQ ID NO: 125583 - RNA, 12 nt, Artificial Sequence
  Description of Artificial Sequence: Synthetic oligonucleotide
gauaccauauga

SEQ ID NO: 125584 - RNA, 10 nt, Artificial Sequence
  Description of Artificial Sequence: Synthetic oligonucleotide
acaugggcug

SEQ ID NO: 125585 - RNA, 12 nt, Artificial Sequence
  Description of Artificial Sequence: Synthetic oligonucleotide
aacuuuuucaua

SEQ ID NO: 125586 - RNA, 11 nt, Artificial Sequence
  Description of Artificial Sequence: Synthetic oligonucleotide
augaggccgga

SEQ ID NO: 125587 - RNA, 10 nt, Artificial Sequence
  Description of Artificial Sequence: Synthetic oligonucleotide
cugcauuugu

SEQ ID NO: 125588 - RNA, 12 nt, Artificial Sequence
  Description of Artificial Sequence: Synthetic oligonucleotide
auguuuacuacc

SEQ ID NO: 125589 - RNA, 14 nt, Artificial Sequence
  Description of Artificial Sequence: Synthetic oligonucleotide
auuuuuugaugaaa

SEQ ID NO: 125590 - RNA, 13 nt, Artificial Sequence
  Description of Artificial Sequence: Synthetic oligonucleotide
agugugugaauuu

SEQ ID NO: 125591 - RNA, 12 nt, Artificial Sequence
  Description of Artificial Sequence: Synthetic oligonucleotide
agcaauguaugu

SEQ ID NO: 125592 - RNA, 13 nt, Artificial Sequence
  Description of Artificial Sequence: Synthetic oligonucleotide
aagcacauauaua

SEQ ID NO: 125593 - RNA, 13 nt, Artificial Sequence
  Description of Artificial Sequence: Synthetic oligonucleotide
uaauaguuucucc

SEQ ID NO: 125594 - RNA, 12 nt, Artificial Sequence
  Description of Artificial Sequence: Synthetic oligonucleotide
guuucuccaaau

SEQ ID NO: 125595 - RNA, 12 nt, Artificial Sequence
  Description of Artificial Sequence: Synthetic oligonucleotide
acuuccuagaaa

SEQ ID NO: 125596 - RNA, 12 nt, Artificial Sequence
  Description of Artificial Sequence: Synthetic oligonucleotide
acaccauauaug

SEQ ID NO: 125597 - RNA, 13 nt, Artificial Sequence
  Description of Artificial Sequence: Synthetic oligonucleotide
uauaugaauggag

SEQ ID NO: 125598 - RNA, 12 nt, Artificial Sequence
  Description of Artificial Sequence: Synthetic oligonucleotide
cauuuacaggga

SEQ ID NO: 125599 - RNA, 12 nt, Artificial Sequence
  Description of Artificial Sequence: Synthetic oligonucleotide
auuuacagggac

SEQ ID NO: 125600 - RNA, 9 nt, Artificial Sequence
  Description of Artificial Sequence: Synthetic oligonucleotide
gggaccuga

SEQ ID NO: 125601 - RNA, 13 nt, Artificial Sequence
  Description of Artificial Sequence: Synthetic oligonucleotide
guuugacugcauc

SEQ ID NO: 125602 - RNA, 12 nt, Artificial Sequence
  Description of Artificial Sequence: Synthetic oligonucleotide
uugacugcaucg

SEQ ID NO: 125603 - RNA, 11 nt, Artificial Sequence
  Description of Artificial Sequence: Synthetic oligonucleotide
aguucacaggg

SEQ ID NO: 125604 - RNA, 12 nt, Artificial Sequence
  Description of Artificial Sequence: Synthetic oligonucleotide
gcaccucugucc

SEQ ID NO: 125605 - RNA, 14 nt, Artificial Sequence
  Description of Artificial Sequence: Synthetic oligonucleotide
guuugucuuuuuaa

SEQ ID NO: 125606 - RNA, 13 nt, Artificial Sequence
  Description of Artificial Sequence: Synthetic oligonucleotide
uugucuuuuuaag

SEQ ID NO: 125607 - RNA, 12 nt, Artificial Sequence
  Description of Artificial Sequence: Synthetic oligonucleotide
cuaaagguuguc

SEQ ID NO: 125608 - RNA, 11 nt, Artificial Sequence
  Description of Artificial Sequence: Synthetic oligonucleotide
agguugucgac

SEQ ID NO: 125609 - RNA, 12 nt, Artificial Sequence
  Description of Artificial Sequence: Synthetic oligonucleotide
ccuggcaauugu

SEQ ID NO: 125610 - RNA, 11 nt, Artificial Sequence
  Description of Artificial Sequence: Synthetic oligonucleotide
guggugcgagg

SEQ ID NO: 125611 - RNA, 12 nt, Artificial Sequence
  Description of Artificial Sequence: Synthetic oligonucleotide
gagacaugaaau

SEQ ID NO: 125612 - RNA, 12 nt, Artificial Sequence
  Description of Artificial Sequence: Synthetic oligonucleotide
uauauuucucca

SEQ ID NO: 125613 - RNA, 9 nt, Artificial Sequence
  Description of Artificial Sequence: Synthetic oligonucleotide
augaaggcu

SEQ ID NO: 125614 - RNA, 10 nt, Artificial Sequence
  Description of Artificial Sequence: Synthetic oligonucleotide
cuggaguggu

SEQ ID NO: 125615 - RNA, 10 nt, Artificial Sequence
  Description of Artificial Sequence: Synthetic oligonucleotide
ggaagagagg

SEQ ID NO: 125616 - RNA, 11 nt, Artificial Sequence
  Description of Artificial Sequence: Synthetic oligonucleotide
uugcaucgggc

SEQ ID NO: 125617 - RNA, 12 nt, Artificial Sequence
  Description of Artificial Sequence: Synthetic oligonucleotide
uauccuacugug

SEQ ID NO: 125618 - RNA, 12 nt, Artificial Sequence
  Description of Artificial Sequence: Synthetic oligonucleotide
ccuacuguguaa

SEQ ID NO: 125619 - RNA, 11 nt, Artificial Sequence
  Description of Artificial Sequence: Synthetic oligonucleotide
cuuguagugua

SEQ ID NO: 125620 - RNA, 12 nt, Artificial Sequence
  Description of Artificial Sequence: Synthetic oligonucleotide
cuuuguugauug

SEQ ID NO: 125621 - RNA, 13 nt, Artificial Sequence
  Description of Artificial Sequence: Synthetic oligonucleotide
uuguugauugaaa

SEQ ID NO: 125622 - RNA, 14 nt, Artificial Sequence
  Description of Artificial Sequence: Synthetic oligonucleotide
ucuuuuucuuccau

SEQ ID NO: 125623 - RNA, 12 nt, Artificial Sequence
  Description of Artificial Sequence: Synthetic oligonucleotide
aucuuccuucua

SEQ ID NO: 125624 - RNA, 12 nt, Artificial Sequence
  Description of Artificial Sequence: Synthetic oligonucleotide
ugaaugcuucau

SEQ ID NO: 125625 - RNA, 12 nt, Artificial Sequence
  Description of Artificial Sequence: Synthetic oligonucleotide
gaaugcuucaug

SEQ ID NO: 125626 - RNA, 12 nt, Artificial Sequence
  Description of Artificial Sequence: Synthetic oligonucleotide
auucuacuuuga

SEQ ID NO: 125627 - RNA, 12 nt, Artificial Sequence
  Description of Artificial Sequence: Synthetic oligonucleotide
gcaacuacagac

SEQ ID NO: 125628 - RNA, 12 nt, Artificial Sequence
  Description of Artificial Sequence: Synthetic oligonucleotide
accaaggucaac

SEQ ID NO: 125629 - RNA, 12 nt, Artificial Sequence
  Description of Artificial Sequence: Synthetic oligonucleotide
gacuaucucgac

SEQ ID NO: 125630 - RNA, 12 nt, Artificial Sequence
  Description of Artificial Sequence: Synthetic oligonucleotide
accuucccaaac

SEQ ID NO: 125631 - RNA, 13 nt, Artificial Sequence
  Description of Artificial Sequence: Synthetic oligonucleotide
caagcuuagaacu

SEQ ID NO: 125632 - RNA, 14 nt, Artificial Sequence
  Description of Artificial Sequence: Synthetic oligonucleotide
gcuuagaacuuuaa

SEQ ID NO: 125633 - RNA, 13 nt, Artificial Sequence
  Description of Artificial Sequence: Synthetic oligonucleotide
aacuuuaagcaac

SEQ ID NO: 125634 - RNA, 10 nt, Artificial Sequence
  Description of Artificial Sequence: Synthetic oligonucleotide
agaccaccac

SEQ ID NO: 125635 - RNA, 13 nt, Artificial Sequence
  Description of Artificial Sequence: Synthetic oligonucleotide
cgagaaauaaagu

SEQ ID NO: 125636 - RNA, 13 nt, Artificial Sequence
  Description of Artificial Sequence: Synthetic oligonucleotide
gagaaauaaaguu

SEQ ID NO: 125637 - RNA, 11 nt, Artificial Sequence
  Description of Artificial Sequence: Synthetic oligonucleotide
ggaaaugaucc

SEQ ID NO: 125638 - RNA, 12 nt, Artificial Sequence
  Description of Artificial Sequence: Synthetic oligonucleotide
aagaaaugaaac

SEQ ID NO: 125639 - RNA, 12 nt, Artificial Sequence
  Description of Artificial Sequence: Synthetic oligonucleotide
uuuccauccucc

SEQ ID NO: 125640 - RNA, 14 nt, Artificial Sequence
  Description of Artificial Sequence: Synthetic oligonucleotide
cugaaaaucuuuga

SEQ ID NO: 125641 - RNA, 10 nt, Artificial Sequence
  Description of Artificial Sequence: Synthetic oligonucleotide
gccguucagg

SEQ ID NO: 125642 - RNA, 12 nt, Artificial Sequence
  Description of Artificial Sequence: Synthetic oligonucleotide
aggguccagaag

SEQ ID NO: 125643 - RNA, 12 nt, Artificial Sequence
  Description of Artificial Sequence: Synthetic oligonucleotide
caagacugcuug

SEQ ID NO: 125644 - RNA, 12 nt, Artificial Sequence
  Description of Artificial Sequence: Synthetic oligonucleotide
ccaugucuuugg

SEQ ID NO: 125645 - RNA, 10 nt, Artificial Sequence
  Description of Artificial Sequence: Synthetic oligonucleotide
ccugaaacac

SEQ ID NO: 125646 - RNA, 11 nt, Artificial Sequence
  Description of Artificial Sequence: Synthetic oligonucleotide
cucuguaccuc

SEQ ID NO: 125647 - RNA, 11 nt, Artificial Sequence
  Description of Artificial Sequence: Synthetic oligonucleotide
gcaagacaaga

SEQ ID NO: 125648 - RNA, 12 nt, Artificial Sequence
  Description of Artificial Sequence: Synthetic oligonucleotide
caagacaagaaa

SEQ ID NO: 125649 - RNA, 11 nt, Artificial Sequence
  Description of Artificial Sequence: Synthetic oligonucleotide
guacaagaucc

SEQ ID NO: 125650 - RNA, 11 nt, Artificial Sequence
  Description of Artificial Sequence: Synthetic oligonucleotide
guacuugcaga

SEQ ID NO: 125651 - RNA, 12 nt, Artificial Sequence
  Description of Artificial Sequence: Synthetic oligonucleotide
gaucgauacaga

SEQ ID NO: 125652 - RNA, 12 nt, Artificial Sequence
  Description of Artificial Sequence: Synthetic oligonucleotide
auaaaaauaaau

SEQ ID NO: 125653 - RNA, 12 nt, Artificial Sequence
  Description of Artificial Sequence: Synthetic oligonucleotide
aaaaauaaauau

SEQ ID NO: 125654 - RNA, 12 nt, Artificial Sequence
  Description of Artificial Sequence: Synthetic oligonucleotide
uugacugcugug

SEQ ID NO: 125655 - RNA, 12 nt, Artificial Sequence
  Description of Artificial Sequence: Synthetic oligonucleotide
gagaugagagac

SEQ ID NO: 125656 - RNA, 9 nt, Artificial Sequence
  Description of Artificial Sequence: Synthetic oligonucleotide
cccacuugg

SEQ ID NO: 125657 - RNA, 5643 nt, Homo sapiens
gagagcgccgagacgcgcggggcgcggagaugugcaaguggcgaagcuugaccgagagcaggcuggagcagccgcccaacuccuggcgcgggaucugcugaggggucacgauuuuaggugaugggcaagucagaaagucagauggauauaacugauaucaacacuccaaagccaaagaagaaacagcgauggacuccacuggagaucagccucucgguccuuguccugcuccucaccaucauagcugugacaaugaucgcacucuaugcaaccuacgaugaugguauuugcaagucaucagacugcauaaaaucagcugcucgacugauccaaaacauggaugccaccacugagccuuguacagacuuuuucaaauaugcuugcggaggcugguugaaacguaaugucauucccgagaccagcucccguuacggcaacuuugacauuuuaagagaugaacuagaagucguuuugaaagauguccuucaagaacccaaaacugaagauauaguagcagugcagaaagcaaaagcauuguacaggucuuguauaaaugaaucugcuauugauagcagagguggagaaccucuacucaaacuguuaccagacauauauggguggccaguagcaacagaaaacugggagcaaaaauauggugcuucuuggacagcugaaaaagcuauugcacaacugaauucuaaauaugggaaaaaaguccuuauuaauuuguuuguuggcacugaugauaagaauucugugaaucauguaauucauauugaccaaccucgacuuggccucccuucuagagauuacuaugaaugcacuggaaucuauaaagaggcuuguacagcauauguggauuuuaugauuucuguggccagauugauucgucaggaagaaagauugcccaucgaugaaaaccagcuugcuuuggaaaugaauaaaguuauggaauuggaaaaagaaauugccaaugcuacggcuaaaccugaagaucgaaaugauccaaugcuucuguauaacaagaugacauuggcccagauccaaaauaacuuuucacuagagaucaaugggaagccauucagcugguugaauuucacaaaugaaaucaugucaacugugaauauuaguauuacaaaugaggaagaugugguuguuuaugcuccagaauauuuaaccaaacuuaagcccauucuuaccaaauauucugccagagaucuucaaaauuuaauguccuggagauucauaauggaucuuguaagcagccucagccgaaccuacaaggaguccagaaaugcuuuccgcaaggcccuuuaugguacaaccucagaaacagcaacuuggagacguugugcaaacuaugucaaugggaauauggaaaaugcuguggggaggcuuuauguggaagcagcauuugcuggagagaguaaacauguggucgaggauuugauugcacagauccgagaaguuuuuauucagacuuuagaugaccucacuuggauggaugccgagacaaaaaagagagcugaagaaaaggccuuagcaauuaaagaaaggaucggcuauccugaugacauuguuucaaaugauaacaaacugaauaaugaguaccucgaguugaacuacaaagaagaugaauacuucgagaacauaauucaaaauuugaaauucagccaaaguaaacaacugaagaagcuccgagaaaagguggacaaagaugaguggauaaguggagcagcuguagucaaugcauuuuacucuucaggaagaaaucagauagucuucccagccggcauucugcagccccccuucuuuagugcccagcaguccaacucauugaacuaugggggcaucggcauggucauaggacacgaaaucacccauggcuucgaugacaauggcagaaacuuuaacaaagauggagaccucguugacugguggacucaacagucugcaaguaacuuuaaggagcaaucccagugcaugguguaucaguauggaaacuuuuccugggaccuggcagguggacagcaccuuaauggaauuaauacacugggagaaaacauugcugauaauggaggucuuggucaagcauacagagccuaucagaauuauauuaaaaagaauggcgaagaaaaauuacuuccuggacuugaccuaaaucacaaacaacuauuuuucuugaacuuugcacaggugugguguggaaccuauaggccagaguaugcgguuaacuccauuaaaacagaugugcacaguccaggcaauuucaggauuauugggacuuugcagaacucugcagaguuuucagaagccuuucacugccgcaagaauucauacaugaauccagaaaagaagugccggguuuggugaucuucaaaagaagcauugcagcccuuggcuagacuugccaacaccacagaaauggggaauucucuaaucgaaagaaaaugggcccuaggggucacuguacugacuugagggugauuaacagagagggcaccaucacaauacagauaacauuagguuguccuagaaaggguguggagggaggaagggggucuaaggucuaucaagucaaucauuucucacuguguacauaaugcuuaauuucuaaagauaauauuacuguuuauuucuguuucucauauggucuaccaguuugcugaugucccuagaaaacaaugcaaaaccuuugagguagaccaggauuucuaaucaaaagggaaaagaagauguugaagaauacaguuaggcaccagaagaacaguaggugacacuauaguuuaaaacacauugccuaacuacuaguuuuuacuuuuauuugcaacauuuacaguccuucaaaauccuuccaaagaauucuuauacacauuggggccuuggagcuuacauaguuuuaaacucauuuuugccauacaucaguuauucauucugugaucauuuauuuuaagcacucuuaaagcaaaaaaugaaugucuaaaauuguuuuuuguuguaccugcuuugacugaugcugagauucuucaggcuuccugcaauuuucuaagcaauuucuugcucuaucucucaaaacuugguauuuuucagagauuuauauaaauguaaaaauaauaauuuuuauauuuaauuauuaacuacauuuaugaguaacuauuauuauagguaaucaaugaauauugaaguuucagcuuaaaauaaacaguugugaaccaagaucuauaaagcgauauacagaugaaaauuugagacuauuuaaacuuauaaaucauauugaugaaaagauuuaagcacaaacuuuaggguaaaaauugccauuggacaguugucuagagauauauauacuugugguuuucaaauuggacuuucaaaauuaaaucugucccugagagugucucugauaaaagggcaaaucugcaccuauguagcucugcaucuccugucuuuucagguuugucaucagauggaaauauuuugauaauaaauugaaauugugaacucauugcucccuaagacugugacaacugucuaacuuuagaagugcauuucugaauagaaaugggaggccucugauggaccuucuagaauuauaagucacaaagaguucuggaaaagaacuguuuacugcuugauaggaauucaucuuuugaggcuucuguuccucucuuuuccuguuguauugacuauuuucguucauuacuugauuaagauuuuacaaaagaggagcacuuccaaaauucuuauuuuuccuaacaaaagaugaaagcagggaauuucuaucuaaaugaugaguauuaguucccugucucuugaaaaaugcccauuugccuuuaaaaaaaaaaguuacagaaauacuauaacauauguacauaaauugcauaaagcauaaguauacaguucaauaaacuuaacuuuaacugaacaauggcccuguagccagcaccuguaagaaacagagcaguaccagcgcucuaaaagcaccuccuugucacuuuauuacucccagaacaacaacuauccugacuucuaauaucauucacuagcuuugccugguuuugucuuuuaugcagauagaaucaaucaguauguauucuuuugugccuggcuucuuucucucagccuuacauuugugagauuccucuguauugugcugauuguggaucuuuucauucucauugcagaauaauguucuauugugggacuuauuacaauuuguucauccuauuguugaugggcacuugagaacuuuccauuuuggcgcuauuacaaauagugcaacuaugaauguacugcauguuaccaucuuacuugagccuuuaauggacuuauuucuucaaauccuuccaaaaauuauuauaagcauugaaauuauaguuucaagccaacuguggauacccuuacccuuuccuccuuuaucacaaccaccguuacaaguauacuuauauuucccuaaaauacauuuaaaacuuaccuaagugacauuuguaguuggaguaauaggagcuuccagcucuaauaaaacagcugucucuaacuuauuuuauuuccaucaugucagagcaggugaagagccagaagugaagagugacuaguacaaauuauaaaaagccacuagacucuucacuguuagcuuuuuaaaacauuaggcucccaucccuauggaggaacaacucuccagugccuggauccccucugucuacaaauauaagauuuucugggccuaaaggauagaucaaagucaaaaauagcaaugccucccuaucccucacacauccagacaucaugaauuuuacaugguacucuuguugaguucuguagagccuucugaugucucuaaagcacuaccgauucuuuggaguugucacaucagauaagacauaucucuaauuccauccauaaauccaguucuacuauggcugaguucuggucaaagaaagaaaguuuagaagcugagacacaaaggguugggagcugaugaaacucacaaaugaugguaggaagaagcucucgacaauacccguuggcaaggagucugccuccaugcugcaguguucgaguggauuguaggugcaagauggaaaggauuguaggugcaagcuguccagagaaaagaguccuuguuccagcccuauucugccacuccugacagggugaccuuggguauuugcaauauuccuuugggccucugcuucucucaccuaaaaaaagagaauuagauuauauuggugguucucagcaagagaaggaguauguguccaaugcugccuucccaugaaucugucucccaguuaugaaucagugggcaggauaaacugaaaacucccauuuacgugucugaaucgagugagacaaaauuuuaguccaaauaacaaguaccaaaguuuuaucaaguuugggucugugcugcuguuacuguuaaccauuuaaguggggcaaaaccuugcuaauuuucucaaaagcauuuaucauucuuguugccacagcuggagcucucaaacuaaaagacauuuguuauuuuggaaagaagaaagacucuauucucaaaguuuccuaaucagaaauuuuuaucaguuuccagucucaaaaauacaaaauaaaaacaaacguuuuuaauacuauugcuuuuaugccuagucaacucug

SEQ ID NO: 125658 - RNA, 5619 nt, Homo sapiens
cagcccgccacugccacccggccccgugcgcucauuggucgggaugugucggcucagcagccuccaacuucucccgaaucccacugauuuuaggugaugggcaagucagaaagucagauggauauaacugauaucaacacuccaaagccaaagaagaaacagcgauggacuccacuggagaucagccucucgguccuuguccugcuccucaccaucauagcugugacaaugaucgcacucuaugcaaccuacgaugaugguauuugcaagucaucagacugcauaaaaucagcugcucgacugauccaaaacauggaugccaccacugagccuuguacagacuuuuucaaauaugcuugcggaggcugguugaaacguaaugucauucccgagaccagcucccguuacggcaacuuugacauuuuaagagaugaacuagaagucguuuugaaagauguccuucaagaacccaaaacugaagauauaguagcagugcagaaagcaaaagcauuguacaggucuuguauaaaugaaucugcuauugauagcagagguggagaaccucuacucaaacuguuaccagacauauauggguggccaguagcaacagaaaacugggagcaaaaauauggugcuucuuggacagcugaaaaagcuauugcacaacugaauucuaaauaugggaaaaaaguccuuauuaauuuguuuguuggcacugaugauaagaauucugugaaucauguaauucauauugaccaaccucgacuuggccucccuucuagagauuacuaugaaugcacuggaaucuauaaagaggcuuguacagcauauguggauuuuaugauuucuguggccagauugauucgucaggaagaaagauugcccaucgaugaaaaccagcuugcuuuggaaaugaauaaaguuauggaauuggaaaaagaaauugccaaugcuacggcuaaaccugaagaucgaaaugauccaaugcuucuguauaacaagaugacauuggcccagauccaaaauaacuuuucacuagagaucaaugggaagccauucagcugguugaauuucacaaaugaaaucaugucaacugugaauauuaguauuacaaaugaggaagaugugguuguuuaugcuccagaauauuuaaccaaacuuaagcccauucuuaccaaauauucugccagagaucuucaaaauuuaauguccuggagauucauaauggaucuuguaagcagccucagccgaaccuacaaggaguccagaaaugcuuuccgcaaggcccuuuaugguacaaccucagaaacagcaacuuggagacguugugcaaacuaugucaaugggaauauggaaaaugcuguggggaggcuuuauguggaagcagcauuugcuggagagaguaaacauguggucgaggauuugauugcacagauccgagaaguuuuuauucagacuuuagaugaccucacuuggauggaugccgagacaaaaaagagagcugaagaaaaggccuuagcaauuaaagaaaggaucggcuauccugaugacauuguuucaaaugauaacaaacugaauaaugaguaccucgaguugaacuacaaagaagaugaauacuucgagaacauaauucaaaauuugaaauucagccaaaguaaacaacugaagaagcuccgagaaaagguggacaaagaugaguggauaaguggagcagcuguagucaaugcauuuuacucuucaggaagaaaucagauagucuucccagccggcauucugcagccccccuucuuuagugcccagcaguccaacucauugaacuaugggggcaucggcauggucauaggacacgaaaucacccauggcuucgaugacaauggcagaaacuuuaacaaagauggagaccucguugacugguggacucaacagucugcaaguaacuuuaaggagcaaucccagugcaugguguaucaguauggaaacuuuuccugggaccuggcagguggacagcaccuuaauggaauuaauacacugggagaaaacauugcugauaauggaggucuuggucaagcauacagagccuaucagaauuauauuaaaaagaauggcgaagaaaaauuacuuccuggacuugaccuaaaucacaaacaacuauuuuucuugaacuuugcacaggugugguguggaaccuauaggccagaguaugcgguuaacuccauuaaaacagaugugcacaguccaggcaauuucaggauuauugggacuuugcagaacucugcagaguuuucagaagccuuucacugccgcaagaauucauacaugaauccagaaaagaagugccggguuuggugaucuucaaaagaagcauugcagcccuuggcuagacuugccaacaccacagaaauggggaauucucuaaucgaaagaaaaugggcccuaggggucacuguacugacuugagggugauuaacagagagggcaccaucacaauacagauaacauuagguuguccuagaaaggguguggagggaggaagggggucuaaggucuaucaagucaaucauuucucacuguguacauaaugcuuaauuucuaaagauaauauuacuguuuauuucuguuucucauauggucuaccaguuugcugaugucccuagaaaacaaugcaaaaccuuugagguagaccaggauuucuaaucaaaagggaaaagaagauguugaagaauacaguuaggcaccagaagaacaguaggugacacuauaguuuaaaacacauugccuaacuacuaguuuuuacuuuuauuugcaacauuuacaguccuucaaaauccuuccaaagaauucuuauacacauuggggccuuggagcuuacauaguuuuaaacucauuuuugccauacaucaguuauucauucugugaucauuuauuuuaagcacucuuaaagcaaaaaaugaaugucuaaaauuguuuuuuguuguaccugcuuugacugaugcugagauucuucaggcuuccugcaauuuucuaagcaauuucuugcucuaucucucaaaacuugguauuuuucagagauuuauauaaauguaaaaauaauaauuuuuauauuuaauuauuaacuacauuuaugaguaacuauuauuauagguaaucaaugaauauugaaguuucagcuuaaaauaaacaguugugaaccaagaucuauaaagcgauauacagaugaaaauuugagacuauuuaaacuuauaaaucauauugaugaaaagauuuaagcacaaacuuuaggguaaaaauugccauuggacaguugucuagagauauauauacuugugguuuucaaauuggacuuucaaaauuaaaucugucccugagagugucucugauaaaagggcaaaucugcaccuauguagcucugcaucuccugucuuuucagguuugucaucagauggaaauauuuugauaauaaauugaaauugugaacucauugcucccuaagacugugacaacugucuaacuuuagaagugcauuucugaauagaaaugggaggccucugauggaccuucuagaauuauaagucacaaagaguucuggaaaagaacuguuuacugcuugauaggaauucaucuuuugaggcuucuguuccucucuuuuccuguuguauugacuauuuucguucauuacuugauuaagauuuuacaaaagaggagcacuuccaaaauucuuauuuuuccuaacaaaagaugaaagcagggaauuucuaucuaaaugaugaguauuaguucccugucucuugaaaaaugcccauuugccuuuaaaaaaaaaaguuacagaaauacuauaacauauguacauaaauugcauaaagcauaaguauacaguucaauaaacuuaacuuuaacugaacaauggcccuguagccagcaccuguaagaaacagagcaguaccagcgcucuaaaagcaccuccuugucacuuuauuacucccagaacaacaacuauccugacuucuaauaucauucacuagcuuugccugguuuugucuuuuaugcagauagaaucaaucaguauguauucuuuugugccuggcuucuuucucucagccuuacauuugugagauuccucuguauugugcugauuguggaucuuuucauucucauugcagaauaauguucuauugugggacuuauuacaauuuguucauccuauuguugaugggcacuugagaacuuuccauuuuggcgcuauuacaaauagugcaacuaugaauguacugcauguuaccaucuuacuugagccuuuaauggacuuauuucuucaaauccuuccaaaaauuauuauaagcauugaaauuauaguuucaagccaacuguggauacccuuacccuuuccuccuuuaucacaaccaccguuacaaguauacuuauauuucccuaaaauacauuuaaaacuuaccuaagugacauuuguaguuggaguaauaggagcuuccagcucuaauaaaacagcugucucuaacuuauuuuauuuccaucaugucagagcaggugaagagccagaagugaagagugacuaguacaaauuauaaaaagccacuagacucuucacuguuagcuuuuuaaaacauuaggcucccaucccuauggaggaacaacucuccagugccuggauccccucugucuacaaauauaagauuuucugggccuaaaggauagaucaaagucaaaaauagcaaugccucccuaucccucacacauccagacaucaugaauuuuacaugguacucuuguugaguucuguagagccuucugaugucucuaaagcacuaccgauucuuuggaguugucacaucagauaagacauaucucuaauuccauccauaaauccaguucuacuauggcugaguucuggucaaagaaagaaaguuuagaagcugagacacaaaggguugggagcugaugaaacucacaaaugaugguaggaagaagcucucgacaauacccguuggcaaggagucugccuccaugcugcaguguucgaguggauuguaggugcaagauggaaaggauuguaggugcaagcuguccagagaaaagaguccuuguuccagcccuauucugccacuccugacagggugaccuuggguauuugcaauauuccuuugggccucugcuucucucaccuaaaaaaagagaauuagauuauauuggugguucucagcaagagaaggaguauguguccaaugcugccuucccaugaaucugucucccaguuaugaaucagugggcaggauaaacugaaaacucccauuuacgugucugaaucgagugagacaaaauuuuaguccaaauaacaaguaccaaaguuuuaucaaguuugggucugugcugcuguuacuguuaaccauuuaaguggggcaaaaccuugcuaauuuucucaaaagcauuuaucauucuuguugccacagcuggagcucucaaacuaaaagacauuuguuauuuuggaaagaagaaagacucuauucucaaaguuuccuaaucagaaauuuuuaucaguuuccagucucaaaaauacaaaauaaaaacaaacguuuuuaauacuauugcuuuuaugccuagucaacucug

SEQ ID NO: 125659 - RNA, 5665 nt, Homo sapiens
ccgagcgcccaggacccugcggccguggaggaggcgugcccugggaaggagccgcuacugggaccugaagagugaggggagggagaggggcccagagggugaccuggaggagggcucuggaagucacgucagauuuuaggugaugggcaagucagaaagucagauggauauaacugauaucaacacuccaaagccaaagaagaaacagcgauggacuccacuggagaucagccucucgguccuuguccugcuccucaccaucauagcugugacaaugaucgcacucuaugcaaccuacgaugaugguauuugcaagucaucagacugcauaaaaucagcugcucgacugauccaaaacauggaugccaccacugagccuuguacagacuuuuucaaauaugcuugcggaggcugguugaaacguaaugucauucccgagaccagcucccguuacggcaacuuugacauuuuaagagaugaacuagaagucguuuugaaagauguccuucaagaacccaaaacugaagauauaguagcagugcagaaagcaaaagcauuguacaggucuuguauaaaugaaucugcuauugauagcagagguggagaaccucuacucaaacuguuaccagacauauauggguggccaguagcaacagaaaacugggagcaaaaauauggugcuucuuggacagcugaaaaagcuauugcacaacugaauucuaaauaugggaaaaaaguccuuauuaauuuguuuguuggcacugaugauaagaauucugugaaucauguaauucauauugaccaaccucgacuuggccucccuucuagagauuacuaugaaugcacuggaaucuauaaagaggcuuguacagcauauguggauuuuaugauuucuguggccagauugauucgucaggaagaaagauugcccaucgaugaaaaccagcuugcuuuggaaaugaauaaaguuauggaauuggaaaaagaaauugccaaugcuacggcuaaaccugaagaucgaaaugauccaaugcuucuguauaacaagaugacauuggcccagauccaaaauaacuuuucacuagagaucaaugggaagccauucagcugguugaauuucacaaaugaaaucaugucaacugugaauauuaguauuacaaaugaggaagaugugguuguuuaugcuccagaauauuuaaccaaacuuaagcccauucuuaccaaauauucugccagagaucuucaaaauuuaauguccuggagauucauaauggaucuuguaagcagccucagccgaaccuacaaggaguccagaaaugcuuuccgcaaggcccuuuaugguacaaccucagaaacagcaacuuggagacguugugcaaacuaugucaaugggaauauggaaaaugcuguggggaggcuuuauguggaagcagcauuugcuggagagaguaaacauguggucgaggauuugauugcacagauccgagaaguuuuuauucagacuuuagaugaccucacuuggauggaugccgagacaaaaaagagagcugaagaaaaggccuuagcaauuaaagaaaggaucggcuauccugaugacauuguuucaaaugauaacaaacugaauaaugaguaccucgaguugaacuacaaagaagaugaauacuucgagaacauaauucaaaauuugaaauucagccaaaguaaacaacugaagaagcuccgagaaaagguggacaaagaugaguggauaaguggagcagcuguagucaaugcauuuuacucuucaggaagaaaucagauagucuucccagccggcauucugcagccccccuucuuuagugcccagcaguccaacucauugaacuaugggggcaucggcauggucauaggacacgaaaucacccauggcuucgaugacaauggcagaaacuuuaacaaagauggagaccucguugacugguggacucaacagucugcaaguaacuuuaaggagcaaucccagugcaugguguaucaguauggaaacuuuuccugggaccuggcagguggacagcaccuuaauggaauuaauacacugggagaaaacauugcugauaauggaggucuuggucaagcauacagagccuaucagaauuauauuaaaaagaauggcgaagaaaaauuacuuccuggacuugaccuaaaucacaaacaacuauuuuucuugaacuuugcacaggugugguguggaaccuauaggccagaguaugcgguuaacuccauuaaaacagaugugcacaguccaggcaauuucaggauuauugggacuuugcagaacucugcagaguuuucagaagccuuucacugccgcaagaauucauacaugaauccagaaaagaagugccggguuuggugaucuucaaaagaagcauugcagcccuuggcuagacuugccaacaccacagaaauggggaauucucuaaucgaaagaaaaugggcccuaggggucacuguacugacuugagggugauuaacagagagggcaccaucacaauacagauaacauuagguuguccuagaaaggguguggagggaggaagggggucuaaggucuaucaagucaaucauuucucacuguguacauaaugcuuaauuucuaaagauaauauuacuguuuauuucuguuucucauauggucuaccaguuugcugaugucccuagaaaacaaugcaaaaccuuugagguagaccaggauuucuaaucaaaagggaaaagaagauguugaagaauacaguuaggcaccagaagaacaguaggugacacuauaguuuaaaacacauugccuaacuacuaguuuuuacuuuuauuugcaacauuuacaguccuucaaaauccuuccaaagaauucuuauacacauuggggccuuggagcuuacauaguuuuaaacucauuuuugccauacaucaguuauucauucugugaucauuuauuuuaagcacucuuaaagcaaaaaaugaaugucuaaaauuguuuuuuguuguaccugcuuugacugaugcugagauucuucaggcuuccugcaauuuucuaagcaauuucuugcucuaucucucaaaacuugguauuuuucagagauuuauauaaauguaaaaauaauaauuuuuauauuuaauuauuaacuacauuuaugaguaacuauuauuauagguaaucaaugaauauugaaguuucagcuuaaaauaaacaguugugaaccaagaucuauaaagcgauauacagaugaaaauuugagacuauuuaaacuuauaaaucauauugaugaaaagauuuaagcacaaacuuuaggguaaaaauugccauuggacaguugucuagagauauauauacuugugguuuucaaauuggacuuucaaaauuaaaucugucccugagagugucucugauaaaagggcaaaucugcaccuauguagcucugcaucuccugucuuuucagguuugucaucagauggaaauauuuugauaauaaauugaaauugugaacucauugcucccuaagacugugacaacugucuaacuuuagaagugcauuucugaauagaaaugggaggccucugauggaccuucuagaauuauaagucacaaagaguucuggaaaagaacuguuuacugcuugauaggaauucaucuuuugaggcuucuguuccucucuuuuccuguuguauugacuauuuucguucauuacuugauuaagauuuuacaaaagaggagcacuuccaaaauucuuauuuuuccuaacaaaagaugaaagcagggaauuucuaucuaaaugaugaguauuaguucccugucucuugaaaaaugcccauuugccuuuaaaaaaaaaaguuacagaaauacuauaacauauguacauaaauugcauaaagcauaaguauacaguucaauaaacuuaacuuuaacugaacaauggcccuguagccagcaccuguaagaaacagagcaguaccagcgcucuaaaagcaccuccuugucacuuuauuacucccagaacaacaacuauccugacuucuaauaucauucacuagcuuugccugguuuugucuuuuaugcagauagaaucaaucaguauguauucuuuugugccuggcuucuuucucucagccuuacauuugugagauuccucuguauugugcugauuguggaucuuuucauucucauugcagaauaauguucuauugugggacuuauuacaauuuguucauccuauuguugaugggcacuugagaacuuuccauuuuggcgcuauuacaaauagugcaacuaugaauguacugcauguuaccaucuuacuugagccuuuaauggacuuauuucuucaaauccuuccaaaaauuauuauaagcauugaaauuauaguuucaagccaacuguggauacccuuacccuuuccuccuuuaucacaaccaccguuacaaguauacuuauauuucccuaaaauacauuuaaaacuuaccuaagugacauuuguaguuggaguaauaggagcuuccagcucuaauaaaacagcugucucuaacuuauuuuauuuccaucaugucagagcaggugaagagccagaagugaagagugacuaguacaaauuauaaaaagccacuagacucuucacuguuagcuuuuuaaaacauuaggcucccaucccuauggaggaacaacucuccagugccuggauccccucugucuacaaauauaagauuuucugggccuaaaggauagaucaaagucaaaaauagcaaugccucccuaucccucacacauccagacaucaugaauuuuacaugguacucuuguugaguucuguagagccuucugaugucucuaaagcacuaccgauucuuuggaguugucacaucagauaagacauaucucuaauuccauccauaaauccaguucuacuauggcugaguucuggucaaagaaagaaaguuuagaagcugagacacaaaggguugggagcugaugaaacucacaaaugaugguaggaagaagcucucgacaauacccguuggcaaggagucugccuccaugcugcaguguucgaguggauuguaggugcaagauggaaaggauuguaggugcaagcuguccagagaaaagaguccuuguuccagcccuauucugccacuccugacagggugaccuuggguauuugcaauauuccuuugggccucugcuucucucaccuaaaaaaagagaauuagauuauauuggugguucucagcaagagaaggaguauguguccaaugcugccuucccaugaaucugucucccaguuaugaaucagugggcaggauaaacugaaaacucccauuuacgugucugaaucgagugagacaaaauuuuaguccaaauaacaaguaccaaaguuuuaucaaguuugggucugugcugcuguuacuguuaaccauuuaaguggggcaaaaccuugcuaauuuucucaaaagcauuuaucauucuuguugccacagcuggagcucucaaacuaaaagacauuuguuauuuuggaaagaagaaagacucuauucucaaaguuuccuaaucagaaauuuuuaucaguuuccagucucaaaaauacaaaauaaaaacaaacguuuuuaauacuauugcuuuuaugccuagucaacucug

SEQ ID NO: 125660 - RNA, 5710 nt, Homo sapiens
cgucagguuggcucuucagguucauuuccauaguucccugcggccucugccuuggggaguuauguuuuguuaccgagauccgcgcuaccagauugcaccggggcugauuugggggcugggaauuugccauucugcuguacagacacugauuuuuuuuucuucuuuuuaaaaagcaagauuuuaggugaugggcaagucagaaagucagauggauauaacugauaucaacacuccaaagccaaagaagaaacagcgauggacuccacuggagaucagccucucgguccuuguccugcuccucaccaucauagcugugacaaugaucgcacucuaugcaaccuacgaugaugguauuugcaagucaucagacugcauaaaaucagcugcucgacugauccaaaacauggaugccaccacugagccuuguacagacuuuuucaaauaugcuugcggaggcugguugaaacguaaugucauucccgagaccagcucccguuacggcaacuuugacauuuuaagagaugaacuagaagucguuuugaaagauguccuucaagaacccaaaacugaagauauaguagcagugcagaaagcaaaagcauuguacaggucuuguauaaaugaaucugcuauugauagcagagguggagaaccucuacucaaacuguuaccagacauauauggguggccaguagcaacagaaaacugggagcaaaaauauggugcuucuuggacagcugaaaaagcuauugcacaacugaauucuaaauaugggaaaaaaguccuuauuaauuuguuuguuggcacugaugauaagaauucugugaaucauguaauucauauugaccaaccucgacuuggccucccuucuagagauuacuaugaaugcacuggaaucuauaaagaggcuuguacagcauauguggauuuuaugauuucuguggccagauugauucgucaggaagaaagauugcccaucgaugaaaaccagcuugcuuuggaaaugaauaaaguuauggaauuggaaaaagaaauugccaaugcuacggcuaaaccugaagaucgaaaugauccaaugcuucuguauaacaagaugacauuggcccagauccaaaauaacuuuucacuagagaucaaugggaagccauucagcugguugaauuucacaaaugaaaucaugucaacugugaauauuaguauuacaaaugaggaagaugugguuguuuaugcuccagaauauuuaaccaaacuuaagcccauucuuaccaaauauucugccagagaucuucaaaauuuaauguccuggagauucauaauggaucuuguaagcagccucagccgaaccuacaaggaguccagaaaugcuuuccgcaaggcccuuuaugguacaaccucagaaacagcaacuuggagacguugugcaaacuaugucaaugggaauauggaaaaugcuguggggaggcuuuauguggaagcagcauuugcuggagagaguaaacauguggucgaggauuugauugcacagauccgagaaguuuuuauucagacuuuagaugaccucacuuggauggaugccgagacaaaaaagagagcugaagaaaaggccuuagcaauuaaagaaaggaucggcuauccugaugacauuguuucaaaugauaacaaacugaauaaugaguaccucgaguugaacuacaaagaagaugaauacuucgagaacauaauucaaaauuugaaauucagccaaaguaaacaacugaagaagcuccgagaaaagguggacaaagaugaguggauaaguggagcagcuguagucaaugcauuuuacucuucaggaagaaaucagauagucuucccagccggcauucugcagccccccuucuuuagugcccagcaguccaacucauugaacuaugggggcaucggcauggucauaggacacgaaaucacccauggcuucgaugacaauggcagaaacuuuaacaaagauggagaccucguugacugguggacucaacagucugcaaguaacuuuaaggagcaaucccagugcaugguguaucaguauggaaacuuuuccugggaccuggcagguggacagcaccuuaauggaauuaauacacugggagaaaacauugcugauaauggaggucuuggucaagcauacagagccuaucagaauuauauuaaaaagaauggcgaagaaaaauuacuuccuggacuugaccuaaaucacaaacaacuauuuuucuugaacuuugcacaggugugguguggaaccuauaggccagaguaugcgguuaacuccauuaaaacagaugugcacaguccaggcaauuucaggauuauugggacuuugcagaacucugcagaguuuucagaagccuuucacugccgcaagaauucauacaugaauccagaaaagaagugccggguuuggugaucuucaaaagaagcauugcagcccuuggcuagacuugccaacaccacagaaauggggaauucucuaaucgaaagaaaaugggcccuaggggucacuguacugacuugagggugauuaacagagagggcaccaucacaauacagauaacauuagguuguccuagaaaggguguggagggaggaagggggucuaaggucuaucaagucaaucauuucucacuguguacauaaugcuuaauuucuaaagauaauauuacuguuuauuucuguuucucauauggucuaccaguuugcugaugucccuagaaaacaaugcaaaaccuuugagguagaccaggauuucuaaucaaaagggaaaagaagauguugaagaauacaguuaggcaccagaagaacaguaggugacacuauaguuuaaaacacauugccuaacuacuaguuuuuacuuuuauuugcaacauuuacaguccuucaaaauccuuccaaagaauucuuauacacauuggggccuuggagcuuacauaguuuuaaacucauuuuugccauacaucaguuauucauucugugaucauuuauuuuaagcacucuuaaagcaaaaaaugaaugucuaaaauuguuuuuuguuguaccugcuuugacugaugcugagauucuucaggcuuccugcaauuuucuaagcaauuucuugcucuaucucucaaaacuugguauuuuucagagauuuauauaaauguaaaaauaauaauuuuuauauuuaauuauuaacuacauuuaugaguaacuauuauuauagguaaucaaugaauauugaaguuucagcuuaaaauaaacaguugugaaccaagaucuauaaagcgauauacagaugaaaauuugagacuauuuaaacuuauaaaucauauugaugaaaagauuuaagcacaaacuuuaggguaaaaauugccauuggacaguugucuagagauauauauacuugugguuuucaaauuggacuuucaaaauuaaaucugucccugagagugucucugauaaaagggcaaaucugcaccuauguagcucugcaucuccugucuuuucagguuugucaucagauggaaauauuuugauaauaaauugaaauugugaacucauugcucccuaagacugugacaacugucuaacuuuagaagugcauuucugaauagaaaugggaggccucugauggaccuucuagaauuauaagucacaaagaguucuggaaaagaacuguuuacugcuugauaggaauucaucuuuugaggcuucuguuccucucuuuuccuguuguauugacuauuuucguucauuacuugauuaagauuuuacaaaagaggagcacuuccaaaauucuuauuuuuccuaacaaaagaugaaagcagggaauuucuaucuaaaugaugaguauuaguucccugucucuugaaaaaugcccauuugccuuuaaaaaaaaaaguuacagaaauacuauaacauauguacauaaauugcauaaagcauaaguauacaguucaauaaacuuaacuuuaacugaacaauggcccuguagccagcaccuguaagaaacagagcaguaccagcgcucuaaaagcaccuccuugucacuuuauuacucccagaacaacaacuauccugacuucuaauaucauucacuagcuuugccugguuuugucuuuuaugcagauagaaucaaucaguauguauucuuuugugccuggcuucuuucucucagccuuacauuugugagauuccucuguauugugcugauuguggaucuuuucauucucauugcagaauaauguucuauugugggacuuauuacaauuuguucauccuauuguugaugggcacuugagaacuuuccauuuuggcgcuauuacaaauagugcaacuaugaauguacugcauguuaccaucuuacuugagccuuuaauggacuuauuucuucaaauccuuccaaaaauuauuauaagcauugaaauuauaguuucaagccaacuguggauacccuuacccuuuccuccuuuaucacaaccaccguuacaaguauacuuauauuucccuaaaauacauuuaaaacuuaccuaagugacauuuguaguuggaguaauaggagcuuccagcucuaauaaaacagcugucucuaacuuauuuuauuuccaucaugucagagcaggugaagagccagaagugaagagugacuaguacaaauuauaaaaagccacuagacucuucacuguuagcuuuuuaaaacauuaggcucccaucccuauggaggaacaacucuccagugccuggauccccucugucuacaaauauaagauuuucugggccuaaaggauagaucaaagucaaaaauagcaaugccucccuaucccucacacauccagacaucaugaauuuuacaugguacucuuguugaguucuguagagccuucugaugucucuaaagcacuaccgauucuuuggaguugucacaucagauaagacauaucucuaauuccauccauaaauccaguucuacuauggcugaguucuggucaaagaaagaaaguuuagaagcugagacacaaaggguugggagcugaugaaacucacaaaugaugguaggaagaagcucucgacaauacccguuggcaaggagucugccuccaugcugcaguguucgaguggauuguaggugcaagauggaaaggauuguaggugcaagcuguccagagaaaagaguccuuguuccagcccuauucugccacuccugacagggugaccuuggguauuugcaauauuccuuugggccucugcuucucucaccuaaaaaaagagaauuagauuauauuggugguucucagcaagagaaggaguauguguccaaugcugccuucccaugaaucugucucccaguuaugaaucagugggcaggauaaacugaaaacucccauuuacgugucugaaucgagugagacaaaauuuuaguccaaauaacaaguaccaaaguuuuaucaaguuugggucugugcugcuguuacuguuaaccauuuaaguggggcaaaaccuugcuaauuuucucaaaagcauuuaucauucuuguugccacagcuggagcucucaaacuaaaagacauuuguuauuuuggaaagaagaaagacucuauucucaaaguuuccuaaucagaaauuuuuaucaguuuccagucucaaaaauacaaaauaaaaacaaacguuuuuaauacuauugcuuuuaugccuagucaacucug

SEQ ID NO: 125661 - RNA, 19 nt, Artificial Sequence
  Description of Artificial Sequence: Synthetic oligonucleotide
ccgagcgcccaggacccug

SEQ ID NO: 125662 - RNA, 19 nt, Artificial Sequence
  Description of Artificial Sequence: Synthetic oligonucleotide
gcggccguggaggaggcgu

SEQ ID NO: 125663 - RNA, 19 nt, Artificial Sequence
  Description of Artificial Sequence: Synthetic oligonucleotide
ugcccugggaaggagccgc

SEQ ID NO: 125664 - RNA, 19 nt, Artificial Sequence
  Description of Artificial Sequence: Synthetic oligonucleotide
cuacugggaccugaagagu

SEQ ID NO: 125665 - RNA, 19 nt, Artificial Sequence
  Description of Artificial Sequence: Synthetic oligonucleotide
ugaggggagggagaggggc

SEQ ID NO: 125666 - RNA, 19 nt, Artificial Sequence
  Description of Artificial Sequence: Synthetic oligonucleotide
cccagagggugaccuggag

SEQ ID NO: 125667 - RNA, 19 nt, Artificial Sequence
  Description of Artificial Sequence: Synthetic oligonucleotide
ggagggcucuggaagucac

SEQ ID NO: 125668 - RNA, 19 nt, Artificial Sequence
  Description of Artificial Sequence: Synthetic oligonucleotide
cgucagauuuuaggugaug

SEQ ID NO: 125669 - RNA, 19 nt, Artificial Sequence
  Description of Artificial Sequence: Synthetic oligonucleotide
gggcaagucagaaagucag

SEQ ID NO: 125670 - RNA, 19 nt, Artificial Sequence
  Description of Artificial Sequence: Synthetic oligonucleotide
gauggauauaacugauauc

SEQ ID NO: 125671 - RNA, 19 nt, Artificial Sequence
  Description of Artificial Sequence: Synthetic oligonucleotide
caacacuccaaagccaaag

SEQ ID NO: 125672 - RNA, 19 nt, Artificial Sequence
  Description of Artificial Sequence: Synthetic oligonucleotide
gaagaaacagcgauggacu

SEQ ID NO: 125673 - RNA, 19 nt, Artificial Sequence
  Description of Artificial Sequence: Synthetic oligonucleotide
uccacuggagaucagccuc

SEQ ID NO: 125674 - RNA, 19 nt, Artificial Sequence
  Description of Artificial Sequence: Synthetic oligonucleotide
cucgguccuuguccugcuc

SEQ ID NO: 125675 - RNA, 19 nt, Artificial Sequence
  Description of Artificial Sequence: Synthetic oligonucleotide
ccucaccaucauagcugug

SEQ ID NO: 125676 - RNA, 19 nt, Artificial Sequence
  Description of Artificial Sequence: Synthetic oligonucleotide
gacaaugaucgcacucuau

SEQ ID NO: 125677 - RNA, 19 nt, Artificial Sequence
  Description of Artificial Sequence: Synthetic oligonucleotide
ugcaaccuacgaugauggu

SEQ ID NO: 125678 - RNA, 19 nt, Artificial Sequence
  Description of Artificial Sequence: Synthetic oligonucleotide
uauuugcaagucaucagac

SEQ ID NO: 125679 - RNA, 19 nt, Artificial Sequence
  Description of Artificial Sequence: Synthetic oligonucleotide
cugcauaaaaucagcugcu

SEQ ID NO: 125680 - RNA, 19 nt, Artificial Sequence
  Description of Artificial Sequence: Synthetic oligonucleotide
ucgacugauccaaaacaug

SEQ ID NO: 125681 - RNA, 19 nt, Artificial Sequence
  Description of Artificial Sequence: Synthetic oligonucleotide
ggaugccaccacugagccu

SEQ ID NO: 125682 - RNA, 19 nt, Artificial Sequence
  Description of Artificial Sequence: Synthetic oligonucleotide
uuguacagacuuuuucaaa

SEQ ID NO: 125683 - RNA, 19 nt, Artificial Sequence
  Description of Artificial Sequence: Synthetic oligonucleotide
auaugcuugcggaggcugg

SEQ ID NO: 125684 - RNA, 19 nt, Artificial Sequence
  Description of Artificial Sequence: Synthetic oligonucleotide
guugaaacguaaugucauu

SEQ ID NO: 125685 - RNA, 19 nt, Artificial Sequence
  Description of Artificial Sequence: Synthetic oligonucleotide
ucccgagaccagcucccgu

SEQ ID NO: 125686 - RNA, 19 nt, Artificial Sequence
  Description of Artificial Sequence: Synthetic oligonucleotide
uuacggcaacuuugacauu

SEQ ID NO: 125687 - RNA, 19 nt, Artificial Sequence
  Description of Artificial Sequence: Synthetic oligonucleotide
uuuaagagaugaacuagaa

SEQ ID NO: 125688 - RNA, 19 nt, Artificial Sequence
  Description of Artificial Sequence: Synthetic oligonucleotide
agucguuuugaaagauguc

SEQ ID NO: 125689 - RNA, 19 nt, Artificial Sequence
  Description of Artificial Sequence: Synthetic oligonucleotide
ccuucaagaacccaaaacu

SEQ ID NO: 125690 - RNA, 19 nt, Artificial Sequence
  Description of Artificial Sequence: Synthetic oligonucleotide
ugaagauauaguagcagug

SEQ ID NO: 125691 - RNA, 19 nt, Artificial Sequence
  Description of Artificial Sequence: Synthetic oligonucleotide
gcagaaagcaaaagcauug

SEQ ID NO: 125692 - RNA, 19 nt, Artificial Sequence
  Description of Artificial Sequence: Synthetic oligonucleotide
guacaggucuuguauaaau

SEQ ID NO: 125693 - RNA, 19 nt, Artificial Sequence
  Description of Artificial Sequence: Synthetic oligonucleotide
ugaaucugcuauugauagc

SEQ ID NO: 125694 - RNA, 19 nt, Artificial Sequence
  Description of Artificial Sequence: Synthetic oligonucleotide
cagagguggagaaccucua

SEQ ID NO: 125695 - RNA, 19 nt, Artificial Sequence
  Description of Artificial Sequence: Synthetic oligonucleotide
acucaaacuguuaccagac

SEQ ID NO: 125696 - RNA, 19 nt, Artificial Sequence
  Description of Artificial Sequence: Synthetic oligonucleotide
cauauauggguggccagua

SEQ ID NO: 125697 - RNA, 19 nt, Artificial Sequence
  Description of Artificial Sequence: Synthetic oligonucleotide
agcaacagaaaacugggag

SEQ ID NO: 125698 - RNA, 19 nt, Artificial Sequence
  Description of Artificial Sequence: Synthetic oligonucleotide
gcaaaaauauggugcuucu

SEQ ID NO: 125699 - RNA, 19 nt, Artificial Sequence
  Description of Artificial Sequence: Synthetic oligonucleotide
uuggacagcugaaaaagcu

SEQ ID NO: 125700 - RNA, 19 nt, Artificial Sequence
  Description of Artificial Sequence: Synthetic oligonucleotide
uauugcacaacugaauucu

SEQ ID NO: 125701 - RNA, 19 nt, Artificial Sequence
  Description of Artificial Sequence: Synthetic oligonucleotide
uaaauaugggaaaaaaguc

SEQ ID NO: 125702 - RNA, 19 nt, Artificial Sequence
  Description of Artificial Sequence: Synthetic oligonucleotide
ccuuauuaauuuguuuguu

SEQ ID NO: 125703 - RNA, 19 nt, Artificial Sequence
  Description of Artificial Sequence: Synthetic oligonucleotide
uggcacugaugauaagaau

SEQ ID NO: 125704 - RNA, 19 nt, Artificial Sequence
  Description of Artificial Sequence: Synthetic oligonucleotide
uucugugaaucauguaauu

SEQ ID NO: 125705 - RNA, 19 nt, Artificial Sequence
  Description of Artificial Sequence: Synthetic oligonucleotide
ucauauugaccaaccucga

SEQ ID NO: 125706 - RNA, 19 nt, Artificial Sequence
  Description of Artificial Sequence: Synthetic oligonucleotide
acuuggccucccuucuaga

SEQ ID NO: 125707 - RNA, 19 nt, Artificial Sequence
  Description of Artificial Sequence: Synthetic oligonucleotide
agauuacuaugaaugcacu

SEQ ID NO: 125708 - RNA, 19 nt, Artificial Sequence
  Description of Artificial Sequence: Synthetic oligonucleotide
uggaaucuauaaagaggcu

SEQ ID NO: 125709 - RNA, 19 nt, Artificial Sequence
  Description of Artificial Sequence: Synthetic oligonucleotide
uuguacagcauauguggau

SEQ ID NO: 125710 - RNA, 19 nt, Artificial Sequence
  Description of Artificial Sequence: Synthetic oligonucleotide
uuuuaugauuucuguggcc

SEQ ID NO: 125711 - RNA, 19 nt, Artificial Sequence
  Description of Artificial Sequence: Synthetic oligonucleotide
cagauugauucgucaggaa

SEQ ID NO: 125712 - RNA, 19 nt, Artificial Sequence
  Description of Artificial Sequence: Synthetic oligonucleotide
agaaagauugcccaucgau

SEQ ID NO: 125713 - RNA, 19 nt, Artificial Sequence
  Description of Artificial Sequence: Synthetic oligonucleotide
ugaaaaccagcuugcuuug

SEQ ID NO: 125714 - RNA, 19 nt, Artificial Sequence
  Description of Artificial Sequence: Synthetic oligonucleotide
ggaaaugaauaaaguuaug

SEQ ID NO: 125715 - RNA, 19 nt, Artificial Sequence
  Description of Artificial Sequence: Synthetic oligonucleotide
ggaauuggaaaaagaaauu

SEQ ID NO: 125716 - RNA, 19 nt, Artificial Sequence
  Description of Artificial Sequence: Synthetic oligonucleotide
ugccaaugcuacggcuaaa

SEQ ID NO: 125717 - RNA, 19 nt, Artificial Sequence
  Description of Artificial Sequence: Synthetic oligonucleotide
accugaagaucgaaaugau

SEQ ID NO: 125718 - RNA, 19 nt, Artificial Sequence
  Description of Artificial Sequence: Synthetic oligonucleotide
uccaaugcuucuguauaac

SEQ ID NO: 125719 - RNA, 19 nt, Artificial Sequence
  Description of Artificial Sequence: Synthetic oligonucleotide
caagaugacauuggcccag

SEQ ID NO: 125720 - RNA, 19 nt, Artificial Sequence
  Description of Artificial Sequence: Synthetic oligonucleotide
gauccaaaauaacuuuuca

SEQ ID NO: 125721 - RNA, 19 nt, Artificial Sequence
  Description of Artificial Sequence: Synthetic oligonucleotide
acuagagaucaaugggaag

SEQ ID NO: 125722 - RNA, 19 nt, Artificial Sequence
  Description of Artificial Sequence: Synthetic oligonucleotide
gccauucagcugguugaau

SEQ ID NO: 125723 - RNA, 19 nt, Artificial Sequence
  Description of Artificial Sequence: Synthetic oligonucleotide
uuucacaaaugaaaucaug

SEQ ID NO: 125724 - RNA, 19 nt, Artificial Sequence
  Description of Artificial Sequence: Synthetic oligonucleotide
gucaacugugaauauuagu

SEQ ID NO: 125725 - RNA, 19 nt, Artificial Sequence
  Description of Artificial Sequence: Synthetic oligonucleotide
uauuacaaaugaggaagau

SEQ ID NO: 125726 - RNA, 19 nt, Artificial Sequence
  Description of Artificial Sequence: Synthetic oligonucleotide
ugugguuguuuaugcucca

SEQ ID NO: 125727 - RNA, 19 nt, Artificial Sequence
  Description of Artificial Sequence: Synthetic oligonucleotide
agaauauuuaaccaaacuu

SEQ ID NO: 125728 - RNA, 19 nt, Artificial Sequence
  Description of Artificial Sequence: Synthetic oligonucleotide
uaagcccauucuuaccaaa

SEQ ID NO: 125729 - RNA, 19 nt, Artificial Sequence
  Description of Artificial Sequence: Synthetic oligonucleotide
auauucugccagagaucuu

SEQ ID NO: 125730 - RNA, 19 nt, Artificial Sequence
  Description of Artificial Sequence: Synthetic oligonucleotide
ucaaaauuuaauguccugg

SEQ ID NO: 125731 - RNA, 19 nt, Artificial Sequence
  Description of Artificial Sequence: Synthetic oligonucleotide
gagauucauaauggaucuu

SEQ ID NO: 125732 - RNA, 19 nt, Artificial Sequence
  Description of Artificial Sequence: Synthetic oligonucleotide
uguaagcagccucagccga

SEQ ID NO: 125733 - RNA, 19 nt, Artificial Sequence
  Description of Artificial Sequence: Synthetic oligonucleotide
aaccuacaaggaguccaga

SEQ ID NO: 125734 - RNA, 19 nt, Artificial Sequence
  Description of Artificial Sequence: Synthetic oligonucleotide
aaaugcuuuccgcaaggcc

SEQ ID NO: 125735 - RNA, 19 nt, Artificial Sequence
  Description of Artificial Sequence: Synthetic oligonucleotide
ccuuuaugguacaaccuca

SEQ ID NO: 125736 - RNA, 19 nt, Artificial Sequence
  Description of Artificial Sequence: Synthetic oligonucleotide
agaaacagcaacuuggaga

SEQ ID NO: 125737 - RNA, 19 nt, Artificial Sequence
  Description of Artificial Sequence: Synthetic oligonucleotide
acguugugcaaacuauguc

SEQ ID NO: 125738 - RNA, 19 nt, Artificial Sequence
  Description of Artificial Sequence: Synthetic oligonucleotide
caaugggaauauggaaaau

SEQ ID NO: 125739 - RNA, 19 nt, Artificial Sequence
  Description of Artificial Sequence: Synthetic oligonucleotide
ugcuguggggaggcuuuau

SEQ ID NO: 125740 - RNA, 19 nt, Artificial Sequence
  Description of Artificial Sequence: Synthetic oligonucleotide
uguggaagcagcauuugcu

SEQ ID NO: 125741 - RNA, 19 nt, Artificial Sequence
  Description of Artificial Sequence: Synthetic oligonucleotide
uggagagaguaaacaugug

SEQ ID NO: 125742 - RNA, 19 nt, Artificial Sequence
  Description of Artificial Sequence: Synthetic oligonucleotide
ggucgaggauuugauugca

SEQ ID NO: 125743 - RNA, 19 nt, Artificial Sequence
  Description of Artificial Sequence: Synthetic oligonucleotide
acagauccgagaaguuuuu

SEQ ID NO: 125744 - RNA, 19 nt, Artificial Sequence
  Description of Artificial Sequence: Synthetic oligonucleotide
uauucagacuuuagaugac

SEQ ID NO: 125745 - RNA, 19 nt, Artificial Sequence
  Description of Artificial Sequence: Synthetic oligonucleotide
ccucacuuggauggaugcc

SEQ ID NO: 125746 - RNA, 19 nt, Artificial Sequence
  Description of Artificial Sequence: Synthetic oligonucleotide
cgagacaaaaaagagagcu

SEQ ID NO: 125747 - RNA, 19 nt, Artificial Sequence
  Description of Artificial Sequence: Synthetic oligonucleotide
ugaagaaaaggccuuagca

SEQ ID NO: 125748 - RNA, 19 nt, Artificial Sequence
  Description of Artificial Sequence: Synthetic oligonucleotide
aauuaaagaaaggaucggc

SEQ ID NO: 125749 - RNA, 19 nt, Artificial Sequence
  Description of Artificial Sequence: Synthetic oligonucleotide
cuauccugaugacauuguu

SEQ ID NO: 125750 - RNA, 19 nt, Artificial Sequence
  Description of Artificial Sequence: Synthetic oligonucleotide
uucaaaugauaacaaacug

SEQ ID NO: 125751 - RNA, 19 nt, Artificial Sequence
  Description of Artificial Sequence: Synthetic oligonucleotide
gaauaaugaguaccucgag

SEQ ID NO: 125752 - RNA, 19 nt, Artificial Sequence
  Description of Artificial Sequence: Synthetic oligonucleotide
guugaacuacaaagaagau

SEQ ID NO: 125753 - RNA, 19 nt, Artificial Sequence
  Description of Artificial Sequence: Synthetic oligonucleotide
ugaauacuucgagaacaua

SEQ ID NO: 125754 - RNA, 19 nt, Artificial Sequence
  Description of Artificial Sequence: Synthetic oligonucleotide
aauucaaaauuugaaauuc

SEQ ID NO: 125755 - RNA, 19 nt, Artificial Sequence
  Description of Artificial Sequence: Synthetic oligonucleotide
cagccaaaguaaacaacug

SEQ ID NO: 125756 - RNA, 19 nt, Artificial Sequence
  Description of Artificial Sequence: Synthetic oligonucleotide
gaagaagcuccgagaaaag

SEQ ID NO: 125757 - RNA, 19 nt, Artificial Sequence
  Description of Artificial Sequence: Synthetic oligonucleotide
gguggacaaagaugagugg

SEQ ID NO: 125758 - RNA, 19 nt, Artificial Sequence
  Description of Artificial Sequence: Synthetic oligonucleotide
gauaaguggagcagcugua

SEQ ID NO: 125759 - RNA, 19 nt, Artificial Sequence
  Description of Artificial Sequence: Synthetic oligonucleotide
agucaaugcauuuuacucu

SEQ ID NO: 125760 - RNA, 19 nt, Artificial Sequence
  Description of Artificial Sequence: Synthetic oligonucleotide
uucaggaagaaaucagaua

SEQ ID NO: 125761 - RNA, 19 nt, Artificial Sequence
  Description of Artificial Sequence: Synthetic oligonucleotide
agucuucccagccggcauu

SEQ ID NO: 125762 - RNA, 19 nt, Artificial Sequence
  Description of Artificial Sequence: Synthetic oligonucleotide
ucugcagccccccuucuuu

SEQ ID NO: 125763 - RNA, 19 nt, Artificial Sequence
  Description of Artificial Sequence: Synthetic oligonucleotide
uagugcccagcaguccaac

SEQ ID NO: 125764 - RNA, 19 nt, Artificial Sequence
  Description of Artificial Sequence: Synthetic oligonucleotide
cucauugaacuaugggggc

SEQ ID NO: 125765 - RNA, 19 nt, Artificial Sequence
  Description of Artificial Sequence: Synthetic oligonucleotide
caucggcauggucauagga

SEQ ID NO: 125766 - RNA, 19 nt, Artificial Sequence
  Description of Artificial Sequence: Synthetic oligonucleotide
acacgaaaucacccauggc

SEQ ID NO: 125767 - RNA, 19 nt, Artificial Sequence
  Description of Artificial Sequence: Synthetic oligonucleotide
cuucgaugacaauggcaga

SEQ ID NO: 125768 - RNA, 19 nt, Artificial Sequence
  Description of Artificial Sequence: Synthetic oligonucleotide
aaacuuuaacaaagaugga

SEQ ID NO: 125769 - RNA, 19 nt, Artificial Sequence
  Description of Artificial Sequence: Synthetic oligonucleotide
agaccucguugacuggugg

SEQ ID NO: 125770 - RNA, 19 nt, Artificial Sequence
  Description of Artificial Sequence: Synthetic oligonucleotide
gacucaacagucugcaagu

SEQ ID NO: 125771 - RNA, 19 nt, Artificial Sequence
  Description of Artificial Sequence: Synthetic oligonucleotide
uaacuuuaaggagcaaucc

SEQ ID NO: 125772 - RNA, 19 nt, Artificial Sequence
  Description of Artificial Sequence: Synthetic oligonucleotide
ccagugcaugguguaucag

SEQ ID NO: 125773 - RNA, 19 nt, Artificial Sequence
  Description of Artificial Sequence: Synthetic oligonucleotide
guauggaaacuuuuccugg

SEQ ID NO: 125774 - RNA, 19 nt, Artificial Sequence
  Description of Artificial Sequence: Synthetic oligonucleotide
ggaccuggcagguggacag

SEQ ID NO: 125775 - RNA, 19 nt, Artificial Sequence
  Description of Artificial Sequence: Synthetic oligonucleotide
gcaccuuaauggaauuaau

SEQ ID NO: 125776 - RNA, 19 nt, Artificial Sequence
  Description of Artificial Sequence: Synthetic oligonucleotide
uacacugggagaaaacauu

SEQ ID NO: 125777 - RNA, 19 nt, Artificial Sequence
  Description of Artificial Sequence: Synthetic oligonucleotide
ugcugauaauggaggucuu

SEQ ID NO: 125778 - RNA, 19 nt, Artificial Sequence
  Description of Artificial Sequence: Synthetic oligonucleotide
uggucaagcauacagagcc

SEQ ID NO: 125779 - RNA, 19 nt, Artificial Sequence
  Description of Artificial Sequence: Synthetic oligonucleotide
cuaucagaauuauauuaaa

SEQ ID NO: 125780 - RNA, 19 nt, Artificial Sequence
  Description of Artificial Sequence: Synthetic oligonucleotide
aaagaauggcgaagaaaaa

SEQ ID NO: 125781 - RNA, 19 nt, Artificial Sequence
  Description of Artificial Sequence: Synthetic oligonucleotide
auuacuuccuggacuugac

SEQ ID NO: 125782 - RNA, 19 nt, Artificial Sequence
  Description of Artificial Sequence: Synthetic oligonucleotide
ccuaaaucacaaacaacua

SEQ ID NO: 125783 - RNA, 19 nt, Artificial Sequence
  Description of Artificial Sequence: Synthetic oligonucleotide
auuuuucuugaacuuugca

SEQ ID NO: 125784 - RNA, 19 nt, Artificial Sequence
  Description of Artificial Sequence: Synthetic oligonucleotide
acaggugugguguggaacc

SEQ ID NO: 125785 - RNA, 19 nt, Artificial Sequence
  Description of Artificial Sequence: Synthetic oligonucleotide
cuauaggccagaguaugcg

SEQ ID NO: 125786 - RNA, 19 nt, Artificial Sequence
  Description of Artificial Sequence: Synthetic oligonucleotide
gguuaacuccauuaaaaca

SEQ ID NO: 125787 - RNA, 19 nt, Artificial Sequence
  Description of Artificial Sequence: Synthetic oligonucleotide
agaugugcacaguccaggc

SEQ ID NO: 125788 - RNA, 19 nt, Artificial Sequence
  Description of Artificial Sequence: Synthetic oligonucleotide
caauuucaggauuauuggg

SEQ ID NO: 125789 - RNA, 19 nt, Artificial Sequence
  Description of Artificial Sequence: Synthetic oligonucleotide
gacuuugcagaacucugca

SEQ ID NO: 125790 - RNA, 19 nt, Artificial Sequence
  Description of Artificial Sequence: Synthetic oligonucleotide
agaguuuucagaagccuuu

SEQ ID NO: 125791 - RNA, 19 nt, Artificial Sequence
  Description of Artificial Sequence: Synthetic oligonucleotide
ucacugccgcaagaauuca

SEQ ID NO: 125792 - RNA, 19 nt, Artificial Sequence
  Description of Artificial Sequence: Synthetic oligonucleotide
auacaugaauccagaaaag

SEQ ID NO: 125793 - RNA, 19 nt, Artificial Sequence
  Description of Artificial Sequence: Synthetic oligonucleotide
gaagugccggguuugguga

SEQ ID NO: 125794 - RNA, 19 nt, Artificial Sequence
  Description of Artificial Sequence: Synthetic oligonucleotide
aucuucaaaagaagcauug

SEQ ID NO: 125795 - RNA, 19 nt, Artificial Sequence
  Description of Artificial Sequence: Synthetic oligonucleotide
gcagcccuuggcuagacuu

SEQ ID NO: 125796 - RNA, 19 nt, Artificial Sequence
  Description of Artificial Sequence: Synthetic oligonucleotide
ugccaacaccacagaaaug

SEQ ID NO: 125797 - RNA, 19 nt, Artificial Sequence
  Description of Artificial Sequence: Synthetic oligonucleotide
ggggaauucucuaaucgaa

SEQ ID NO: 125798 - RNA, 19 nt, Artificial Sequence
  Description of Artificial Sequence: Synthetic oligonucleotide
aagaaaaugggcccuaggg

SEQ ID NO: 125799 - RNA, 19 nt, Artificial Sequence
  Description of Artificial Sequence: Synthetic oligonucleotide
ggucacuguacugacuuga

SEQ ID NO: 125800 - RNA, 19 nt, Artificial Sequence
  Description of Artificial Sequence: Synthetic oligonucleotide
agggugauuaacagagagg

SEQ ID NO: 125801 - RNA, 19 nt, Artificial Sequence
  Description of Artificial Sequence: Synthetic oligonucleotide
ggcaccaucacaauacaga

SEQ ID NO: 125802 - RNA, 19 nt, Artificial Sequence
  Description of Artificial Sequence: Synthetic oligonucleotide
auaacauuagguuguccua

SEQ ID NO: 125803 - RNA, 19 nt, Artificial Sequence
  Description of Artificial Sequence: Synthetic oligonucleotide
agaaaggguguggagggag

SEQ ID NO: 125804 - RNA, 19 nt, Artificial Sequence
  Description of Artificial Sequence: Synthetic oligonucleotide
ggaagggggucuaaggucu

SEQ ID NO: 125805 - RNA, 19 nt, Artificial Sequence
  Description of Artificial Sequence: Synthetic oligonucleotide
uaucaagucaaucauuucu

SEQ ID NO: 125806 - RNA, 19 nt, Artificial Sequence
  Description of Artificial Sequence: Synthetic oligonucleotide
ucacuguguacauaaugcu

SEQ ID NO: 125807 - RNA, 19 nt, Artificial Sequence
  Description of Artificial Sequence: Synthetic oligonucleotide
uuaauuucuaaagauaaua

SEQ ID NO: 125808 - RNA, 19 nt, Artificial Sequence
  Description of Artificial Sequence: Synthetic oligonucleotide
auuacuguuuauuucuguu

SEQ ID NO: 125809 - RNA, 19 nt, Artificial Sequence
  Description of Artificial Sequence: Synthetic oligonucleotide
uucucauauggucuaccag

SEQ ID NO: 125810 - RNA, 19 nt, Artificial Sequence
  Description of Artificial Sequence: Synthetic oligonucleotide
guuugcugaugucccuaga

SEQ ID NO: 125811 - RNA, 19 nt, Artificial Sequence
  Description of Artificial Sequence: Synthetic oligonucleotide
aaaacaaugcaaaaccuuu

SEQ ID NO: 125812 - RNA, 19 nt, Artificial Sequence
  Description of Artificial Sequence: Synthetic oligonucleotide
ugagguagaccaggauuuc

SEQ ID NO: 125813 - RNA, 19 nt, Artificial Sequence
  Description of Artificial Sequence: Synthetic oligonucleotide
cuaaucaaaagggaaaaga

SEQ ID NO: 125814 - RNA, 19 nt, Artificial Sequence
  Description of Artificial Sequence: Synthetic oligonucleotide
aagauguugaagaauacag

SEQ ID NO: 125815 - RNA, 19 nt, Artificial Sequence
  Description of Artificial Sequence: Synthetic oligonucleotide
guuaggcaccagaagaaca

SEQ ID NO: 125816 - RNA, 19 nt, Artificial Sequence
  Description of Artificial Sequence: Synthetic oligonucleotide
aguaggugacacuauaguu

SEQ ID NO: 125817 - RNA, 19 nt, Artificial Sequence
  Description of Artificial Sequence: Synthetic oligonucleotide
uuaaaacacauugccuaac

SEQ ID NO: 125818 - RNA, 19 nt, Artificial Sequence
  Description of Artificial Sequence: Synthetic oligonucleotide
cuacuaguuuuuacuuuua

SEQ ID NO: 125819 - RNA, 19 nt, Artificial Sequence
  Description of Artificial Sequence: Synthetic oligonucleotide
auuugcaacauuuacaguc

SEQ ID NO: 125820 - RNA, 19 nt, Artificial Sequence
  Description of Artificial Sequence: Synthetic oligonucleotide
ccuucaaaauccuuccaaa

SEQ ID NO: 125821 - RNA, 19 nt, Artificial Sequence
  Description of Artificial Sequence: Synthetic oligonucleotide
agaauucuuauacacauug

SEQ ID NO: 125822 - RNA, 19 nt, Artificial Sequence
  Description of Artificial Sequence: Synthetic oligonucleotide
ggggccuuggagcuuacau

SEQ ID NO: 125823 - RNA, 19 nt, Artificial Sequence
  Description of Artificial Sequence: Synthetic oligonucleotide
uaguuuuaaacucauuuuu

SEQ ID NO: 125824 - RNA, 19 nt, Artificial Sequence
  Description of Artificial Sequence: Synthetic oligonucleotide
ugccauacaucaguuauuc

SEQ ID NO: 125825 - RNA, 19 nt, Artificial Sequence
  Description of Artificial Sequence: Synthetic oligonucleotide
cauucugugaucauuuauu

SEQ ID NO: 125826 - RNA, 19 nt, Artificial Sequence
  Description of Artificial Sequence: Synthetic oligonucleotide
uuuaagcacucuuaaagca

SEQ ID NO: 125827 - RNA, 19 nt, Artificial Sequence
  Description of Artificial Sequence: Synthetic oligonucleotide
aaaaaaugaaugucuaaaa

SEQ ID NO: 125828 - RNA, 19 nt, Artificial Sequence
  Description of Artificial Sequence: Synthetic oligonucleotide
auuguuuuuuguuguaccu

SEQ ID NO: 125829 - RNA, 19 nt, Artificial Sequence
  Description of Artificial Sequence: Synthetic oligonucleotide
ugcuuugacugaugcugag

SEQ ID NO: 125830 - RNA, 19 nt, Artificial Sequence
  Description of Artificial Sequence: Synthetic oligonucleotide
gauucuucaggcuuccugc

SEQ ID NO: 125831 - RNA, 19 nt, Artificial Sequence
  Description of Artificial Sequence: Synthetic oligonucleotide
caauuuucuaagcaauuuc

SEQ ID NO: 125832 - RNA, 19 nt, Artificial Sequence
  Description of Artificial Sequence: Synthetic oligonucleotide
cuugcucuaucucucaaaa

SEQ ID NO: 125833 - RNA, 19 nt, Artificial Sequence
  Description of Artificial Sequence: Synthetic oligonucleotide
acuugguauuuuucagaga

SEQ ID NO: 125834 - RNA, 19 nt, Artificial Sequence
  Description of Artificial Sequence: Synthetic oligonucleotide
auuuauauaaauguaaaaa

SEQ ID NO: 125835 - RNA, 19 nt, Artificial Sequence
  Description of Artificial Sequence: Synthetic oligonucleotide
auaauaauuuuuauauuua

SEQ ID NO: 125836 - RNA, 19 nt, Artificial Sequence
  Description of Artificial Sequence: Synthetic oligonucleotide
aauuauuaacuacauuuau

SEQ ID NO: 125837 - RNA, 19 nt, Artificial Sequence
  Description of Artificial Sequence: Synthetic oligonucleotide
ugaguaacuauuauuauag

SEQ ID NO: 125838 - RNA, 19 nt, Artificial Sequence
  Description of Artificial Sequence: Synthetic oligonucleotide
gguaaucaaugaauauuga

SEQ ID NO: 125839 - RNA, 19 nt, Artificial Sequence
  Description of Artificial Sequence: Synthetic oligonucleotide
aaguuucagcuuaaaauaa

SEQ ID NO: 125840 - RNA, 19 nt, Artificial Sequence
  Description of Artificial Sequence: Synthetic oligonucleotide
aacaguugugaaccaagau

SEQ ID NO: 125841 - RNA, 19 nt, Artificial Sequence
  Description of Artificial Sequence: Synthetic oligonucleotide
ucuauaaagcgauauacag

SEQ ID NO: 125842 - RNA, 19 nt, Artificial Sequence
  Description of Artificial Sequence: Synthetic oligonucleotide
gaugaaaauuugagacuau

SEQ ID NO: 125843 - RNA, 19 nt, Artificial Sequence
  Description of Artificial Sequence: Synthetic oligonucleotide
uuuaaacuuauaaaucaua

SEQ ID NO: 125844 - RNA, 19 nt, Artificial Sequence
  Description of Artificial Sequence: Synthetic oligonucleotide
auugaugaaaagauuuaag

SEQ ID NO: 125845 - RNA, 19 nt, Artificial Sequence
  Description of Artificial Sequence: Synthetic oligonucleotide
gcacaaacuuuaggguaaa

SEQ ID NO: 125846 - RNA, 19 nt, Artificial Sequence
  Description of Artificial Sequence: Synthetic oligonucleotide
aaauugccauuggacaguu

SEQ ID NO: 125847 - RNA, 19 nt, Artificial Sequence
  Description of Artificial Sequence: Synthetic oligonucleotide
ugucuagagauauauauac

SEQ ID NO: 125848 - RNA, 19 nt, Artificial Sequence
  Description of Artificial Sequence: Synthetic oligonucleotide
cuugugguuuucaaauugg

SEQ ID NO: 125849 - RNA, 19 nt, Artificial Sequence
  Description of Artificial Sequence: Synthetic oligonucleotide
gacuuucaaaauuaaaucu

SEQ ID NO: 125850 - RNA, 19 nt, Artificial Sequence
  Description of Artificial Sequence: Synthetic oligonucleotide
ugucccugagagugucucu

SEQ ID NO: 125851 - RNA, 19 nt, Artificial Sequence
  Description of Artificial Sequence: Synthetic oligonucleotide
ugauaaaagggcaaaucug

SEQ ID NO: 125852 - RNA, 19 nt, Artificial Sequence
  Description of Artificial Sequence: Synthetic oligonucleotide
gcaccuauguagcucugca

SEQ ID NO: 125853 - RNA, 19 nt, Artificial Sequence
  Description of Artificial Sequence: Synthetic oligonucleotide
aucuccugucuuuucaggu

SEQ ID NO: 125854 - RNA, 19 nt, Artificial Sequence
  Description of Artificial Sequence: Synthetic oligonucleotide
uuugucaucagauggaaau

SEQ ID NO: 125855 - RNA, 19 nt, Artificial Sequence
  Description of Artificial Sequence: Synthetic oligonucleotide
uauuuugauaauaaauuga

SEQ ID NO: 125856 - RNA, 19 nt, Artificial Sequence
  Description of Artificial Sequence: Synthetic oligonucleotide
aaauugugaacucauugcu

SEQ ID NO: 125857 - RNA, 19 nt, Artificial Sequence
  Description of Artificial Sequence: Synthetic oligonucleotide
ucccuaagacugugacaac

SEQ ID NO: 125858 - RNA, 19 nt, Artificial Sequence
  Description of Artificial Sequence: Synthetic oligonucleotide
cugucuaacuuuagaagug

SEQ ID NO: 125859 - RNA, 19 nt, Artificial Sequence
  Description of Artificial Sequence: Synthetic oligonucleotide
gcauuucugaauagaaaug

SEQ ID NO: 125860 - RNA, 19 nt, Artificial Sequence
  Description of Artificial Sequence: Synthetic oligonucleotide
gggaggccucugauggacc

SEQ ID NO: 125861 - RNA, 19 nt, Artificial Sequence
  Description of Artificial Sequence: Synthetic oligonucleotide
cuucuagaauuauaaguca

SEQ ID NO: 125862 - RNA, 19 nt, Artificial Sequence
  Description of Artificial Sequence: Synthetic oligonucleotide
acaaagaguucuggaaaag

SEQ ID NO: 125863 - RNA, 19 nt, Artificial Sequence
  Description of Artificial Sequence: Synthetic oligonucleotide
gaacuguuuacugcuugau

SEQ ID NO: 125864 - RNA, 19 nt, Artificial Sequence
  Description of Artificial Sequence: Synthetic oligonucleotide
uaggaauucaucuuuugag

SEQ ID NO: 125865 - RNA, 19 nt, Artificial Sequence
  Description of Artificial Sequence: Synthetic oligonucleotide
ggcuucuguuccucucuuu

SEQ ID NO: 125866 - RNA, 19 nt, Artificial Sequence
  Description of Artificial Sequence: Synthetic oligonucleotide
uuccuguuguauugacuau

SEQ ID NO: 125867 - RNA, 19 nt, Artificial Sequence
  Description of Artificial Sequence: Synthetic oligonucleotide
uuuucguucauuacuugau

SEQ ID NO: 125868 - RNA, 19 nt, Artificial Sequence
  Description of Artificial Sequence: Synthetic oligonucleotide
uuaagauuuuacaaaagag

SEQ ID NO: 125869 - RNA, 19 nt, Artificial Sequence
  Description of Artificial Sequence: Synthetic oligonucleotide
ggagcacuuccaaaauucu

SEQ ID NO: 125870 - RNA, 19 nt, Artificial Sequence
  Description of Artificial Sequence: Synthetic oligonucleotide
uuauuuuuccuaacaaaag

SEQ ID NO: 125871 - RNA, 19 nt, Artificial Sequence
  Description of Artificial Sequence: Synthetic oligonucleotide
gaugaaagcagggaauuuc

SEQ ID NO: 125872 - RNA, 19 nt, Artificial Sequence
  Description of Artificial Sequence: Synthetic oligonucleotide
cuaucuaaaugaugaguau

SEQ ID NO: 125873 - RNA, 19 nt, Artificial Sequence
  Description of Artificial Sequence: Synthetic oligonucleotide
uuaguucccugucucuuga

SEQ ID NO: 125874 - RNA, 19 nt, Artificial Sequence
  Description of Artificial Sequence: Synthetic oligonucleotide
aaaaaugcccauuugccuu

SEQ ID NO: 125875 - RNA, 19 nt, Artificial Sequence
  Description of Artificial Sequence: Synthetic oligonucleotide
gaaauacuauaacauaugu

SEQ ID NO: 125876 - RNA, 19 nt, Artificial Sequence
  Description of Artificial Sequence: Synthetic oligonucleotide
uacauaaauugcauaaagc

SEQ ID NO: 125877 - RNA, 19 nt, Artificial Sequence
  Description of Artificial Sequence: Synthetic oligonucleotide
cauaaguauacaguucaau

SEQ ID NO: 125878 - RNA, 19 nt, Artificial Sequence
  Description of Artificial Sequence: Synthetic oligonucleotide
uaaacuuaacuuuaacuga

SEQ ID NO: 125879 - RNA, 19 nt, Artificial Sequence
  Description of Artificial Sequence: Synthetic oligonucleotide
aacaauggcccuguagcca

SEQ ID NO: 125880 - RNA, 19 nt, Artificial Sequence
  Description of Artificial Sequence: Synthetic oligonucleotide
agcaccuguaagaaacaga

SEQ ID NO: 125881 - RNA, 19 nt, Artificial Sequence
  Description of Artificial Sequence: Synthetic oligonucleotide
agcaguaccagcgcucuaa

SEQ ID NO: 125882 - RNA, 19 nt, Artificial Sequence
  Description of Artificial Sequence: Synthetic oligonucleotide
aaagcaccuccuugucacu

SEQ ID NO: 125883 - RNA, 19 nt, Artificial Sequence
  Description of Artificial Sequence: Synthetic oligonucleotide
uuuauuacucccagaacaa

SEQ ID NO: 125884 - RNA, 19 nt, Artificial Sequence
  Description of Artificial Sequence: Synthetic oligonucleotide
acaacuauccugacuucua

SEQ ID NO: 125885 - RNA, 19 nt, Artificial Sequence
  Description of Artificial Sequence: Synthetic oligonucleotide
aauaucauucacuagcuuu

SEQ ID NO: 125886 - RNA, 19 nt, Artificial Sequence
  Description of Artificial Sequence: Synthetic oligonucleotide
ugccugguuuugucuuuua

SEQ ID NO: 125887 - RNA, 19 nt, Artificial Sequence
  Description of Artificial Sequence: Synthetic oligonucleotide
augcagauagaaucaauca

SEQ ID NO: 125888 - RNA, 19 nt, Artificial Sequence
  Description of Artificial Sequence: Synthetic oligonucleotide
aguauguauucuuuugugc

SEQ ID NO: 125889 - RNA, 19 nt, Artificial Sequence
  Description of Artificial Sequence: Synthetic oligonucleotide
ccuggcuucuuucucucag

SEQ ID NO: 125890 - RNA, 19 nt, Artificial Sequence
  Description of Artificial Sequence: Synthetic oligonucleotide
gccuuacauuugugagauu

SEQ ID NO: 125891 - RNA, 19 nt, Artificial Sequence
  Description of Artificial Sequence: Synthetic oligonucleotide
uccucuguauugugcugau

SEQ ID NO: 125892 - RNA, 19 nt, Artificial Sequence
  Description of Artificial Sequence: Synthetic oligonucleotide
uuguggaucuuuucauucu

SEQ ID NO: 125893 - RNA, 19 nt, Artificial Sequence
  Description of Artificial Sequence: Synthetic oligonucleotide
ucauugcagaauaauguuc

SEQ ID NO: 125894 - RNA, 19 nt, Artificial Sequence
  Description of Artificial Sequence: Synthetic oligonucleotide
cuauugugggacuuauuac

SEQ ID NO: 125895 - RNA, 19 nt, Artificial Sequence
  Description of Artificial Sequence: Synthetic oligonucleotide
caauuuguucauccuauug

SEQ ID NO: 125896 - RNA, 19 nt, Artificial Sequence
  Description of Artificial Sequence: Synthetic oligonucleotide
guugaugggcacuugagaa

SEQ ID NO: 125897 - RNA, 19 nt, Artificial Sequence
  Description of Artificial Sequence: Synthetic oligonucleotide
acuuuccauuuuggcgcua

SEQ ID NO: 125898 - RNA, 19 nt, Artificial Sequence
  Description of Artificial Sequence: Synthetic oligonucleotide
auuacaaauagugcaacua

SEQ ID NO: 125899 - RNA, 19 nt, Artificial Sequence
  Description of Artificial Sequence: Synthetic oligonucleotide
augaauguacugcauguua

SEQ ID NO: 125900 - RNA, 19 nt, Artificial Sequence
  Description of Artificial Sequence: Synthetic oligonucleotide
accaucuuacuugagccuu

SEQ ID NO: 125901 - RNA, 19 nt, Artificial Sequence
  Description of Artificial Sequence: Synthetic oligonucleotide
uuaauggacuuauuucuuc

SEQ ID NO: 125902 - RNA, 19 nt, Artificial Sequence
  Description of Artificial Sequence: Synthetic oligonucleotide
caaauccuuccaaaaauua

SEQ ID NO: 125903 - RNA, 19 nt, Artificial Sequence
  Description of Artificial Sequence: Synthetic oligonucleotide
auuauaagcauugaaauua

SEQ ID NO: 125904 - RNA, 19 nt, Artificial Sequence
  Description of Artificial Sequence: Synthetic oligonucleotide
auaguuucaagccaacugu

SEQ ID NO: 125905 - RNA, 19 nt, Artificial Sequence
  Description of Artificial Sequence: Synthetic oligonucleotide
uggauacccuuacccuuuc

SEQ ID NO: 125906 - RNA, 19 nt, Artificial Sequence
  Description of Artificial Sequence: Synthetic oligonucleotide
ccuccuuuaucacaaccac

SEQ ID NO: 125907 - RNA, 19 nt, Artificial Sequence
  Description of Artificial Sequence: Synthetic oligonucleotide
ccguuacaaguauacuuau

SEQ ID NO: 125908 - RNA, 19 nt, Artificial Sequence
  Description of Artificial Sequence: Synthetic oligonucleotide
uauuucccuaaaauacauu

SEQ ID NO: 125909 - RNA, 19 nt, Artificial Sequence
  Description of Artificial Sequence: Synthetic oligonucleotide
uuaaaacuuaccuaaguga

SEQ ID NO: 125910 - RNA, 19 nt, Artificial Sequence
  Description of Artificial Sequence: Synthetic oligonucleotide
acauuuguaguuggaguaa

SEQ ID NO: 125911 - RNA, 19 nt, Artificial Sequence
  Description of Artificial Sequence: Synthetic oligonucleotide
auaggagcuuccagcucua

SEQ ID NO: 125912 - RNA, 19 nt, Artificial Sequence
  Description of Artificial Sequence: Synthetic oligonucleotide
aauaaaacagcugucucua

SEQ ID NO: 125913 - RNA, 19 nt, Artificial Sequence
  Description of Artificial Sequence: Synthetic oligonucleotide
aacuuauuuuauuuccauc

SEQ ID NO: 125914 - RNA, 19 nt, Artificial Sequence
  Description of Artificial Sequence: Synthetic oligonucleotide
caugucagagcaggugaag

SEQ ID NO: 125915 - RNA, 19 nt, Artificial Sequence
  Description of Artificial Sequence: Synthetic oligonucleotide
gagccagaagugaagagug

SEQ ID NO: 125916 - RNA, 19 nt, Artificial Sequence
  Description of Artificial Sequence: Synthetic oligonucleotide
gacuaguacaaauuauaaa

SEQ ID NO: 125917 - RNA, 19 nt, Artificial Sequence
  Description of Artificial Sequence: Synthetic oligonucleotide
aaagccacuagacucuuca

SEQ ID NO: 125918 - RNA, 19 nt, Artificial Sequence
  Description of Artificial Sequence: Synthetic oligonucleotide
acuguuagcuuuuuaaaac

SEQ ID NO: 125919 - RNA, 19 nt, Artificial Sequence
  Description of Artificial Sequence: Synthetic oligonucleotide
cauuaggcucccaucccua

SEQ ID NO: 125920 - RNA, 19 nt, Artificial Sequence
  Description of Artificial Sequence: Synthetic oligonucleotide
auggaggaacaacucucca

SEQ ID NO: 125921 - RNA, 19 nt, Artificial Sequence
  Description of Artificial Sequence: Synthetic oligonucleotide
agugccuggauccccucug

SEQ ID NO: 125922 - RNA, 19 nt, Artificial Sequence
  Description of Artificial Sequence: Synthetic oligonucleotide
gucuacaaauauaagauuu

SEQ ID NO: 125923 - RNA, 19 nt, Artificial Sequence
  Description of Artificial Sequence: Synthetic oligonucleotide
uucugggccuaaaggauag

SEQ ID NO: 125924 - RNA, 19 nt, Artificial Sequence
  Description of Artificial Sequence: Synthetic oligonucleotide
gaucaaagucaaaaauagc

SEQ ID NO: 125925 - RNA, 19 nt, Artificial Sequence
  Description of Artificial Sequence: Synthetic oligonucleotide
caaugccucccuaucccuc

SEQ ID NO: 125926 - RNA, 19 nt, Artificial Sequence
  Description of Artificial Sequence: Synthetic oligonucleotide
cacacauccagacaucaug

SEQ ID NO: 125927 - RNA, 19 nt, Artificial Sequence
  Description of Artificial Sequence: Synthetic oligonucleotide
gaauuuuacaugguacucu

SEQ ID NO: 125928 - RNA, 19 nt, Artificial Sequence
  Description of Artificial Sequence: Synthetic oligonucleotide
uuguugaguucuguagagc

SEQ ID NO: 125929 - RNA, 19 nt, Artificial Sequence
  Description of Artificial Sequence: Synthetic oligonucleotide
ccuucugaugucucuaaag

SEQ ID NO: 125930 - RNA, 19 nt, Artificial Sequence
  Description of Artificial Sequence: Synthetic oligonucleotide
gcacuaccgauucuuugga

SEQ ID NO: 125931 - RNA, 19 nt, Artificial Sequence
  Description of Artificial Sequence: Synthetic oligonucleotide
aguugucacaucagauaag

SEQ ID NO: 125932 - RNA, 19 nt, Artificial Sequence
  Description of Artificial Sequence: Synthetic oligonucleotide
gacauaucucuaauuccau

SEQ ID NO: 125933 - RNA, 19 nt, Artificial Sequence
  Description of Artificial Sequence: Synthetic oligonucleotide
uccauaaauccaguucuac

SEQ ID NO: 125934 - RNA, 19 nt, Artificial Sequence
  Description of Artificial Sequence: Synthetic oligonucleotide
cuauggcugaguucugguc

SEQ ID NO: 125935 - RNA, 19 nt, Artificial Sequence
  Description of Artificial Sequence: Synthetic oligonucleotide
caaagaaagaaaguuuaga

SEQ ID NO: 125936 - RNA, 19 nt, Artificial Sequence
  Description of Artificial Sequence: Synthetic oligonucleotide
aagcugagacacaaagggu

SEQ ID NO: 125937 - RNA, 19 nt, Artificial Sequence
  Description of Artificial Sequence: Synthetic oligonucleotide
uugggagcugaugaaacuc

SEQ ID NO: 125938 - RNA, 19 nt, Artificial Sequence
  Description of Artificial Sequence: Synthetic oligonucleotide
cacaaaugaugguaggaag

SEQ ID NO: 125939 - RNA, 19 nt, Artificial Sequence
  Description of Artificial Sequence: Synthetic oligonucleotide
gaagcucucgacaauaccc

SEQ ID NO: 125940 - RNA, 19 nt, Artificial Sequence
  Description of Artificial Sequence: Synthetic oligonucleotide
cguuggcaaggagucugcc

SEQ ID NO: 125941 - RNA, 19 nt, Artificial Sequence
  Description of Artificial Sequence: Synthetic oligonucleotide
cuccaugcugcaguguucg

SEQ ID NO: 125942 - RNA, 19 nt, Artificial Sequence
  Description of Artificial Sequence: Synthetic oligonucleotide
gaguggauuguaggugcaa

SEQ ID NO: 125943 - RNA, 19 nt, Artificial Sequence
  Description of Artificial Sequence: Synthetic oligonucleotide
agauggaaaggauuguagg

SEQ ID NO: 125944 - RNA, 19 nt, Artificial Sequence
  Description of Artificial Sequence: Synthetic oligonucleotide
gugcaagcuguccagagaa

SEQ ID NO: 125945 - RNA, 19 nt, Artificial Sequence
  Description of Artificial Sequence: Synthetic oligonucleotide
aaagaguccuuguuccagc

SEQ ID NO: 125946 - RNA, 19 nt, Artificial Sequence
  Description of Artificial Sequence: Synthetic oligonucleotide
cccuauucugccacuccug

SEQ ID NO: 125947 - RNA, 19 nt, Artificial Sequence
  Description of Artificial Sequence: Synthetic oligonucleotide
gacagggugaccuugggua

SEQ ID NO: 125948 - RNA, 19 nt, Artificial Sequence
  Description of Artificial Sequence: Synthetic oligonucleotide
auuugcaauauuccuuugg

SEQ ID NO: 125949 - RNA, 19 nt, Artificial Sequence
  Description of Artificial Sequence: Synthetic oligonucleotide
ggccucugcuucucucacc

SEQ ID NO: 125950 - RNA, 19 nt, Artificial Sequence
  Description of Artificial Sequence: Synthetic oligonucleotide
cuaaaaaaagagaauuaga

SEQ ID NO: 125951 - RNA, 19 nt, Artificial Sequence
  Description of Artificial Sequence: Synthetic oligonucleotide
auuauauuggugguucuca

SEQ ID NO: 125952 - RNA, 19 nt, Artificial Sequence
  Description of Artificial Sequence: Synthetic oligonucleotide
agcaagagaaggaguaugu

SEQ ID NO: 125953 - RNA, 19 nt, Artificial Sequence
  Description of Artificial Sequence: Synthetic oligonucleotide
uguccaaugcugccuuccc

SEQ ID NO: 125954 - RNA, 19 nt, Artificial Sequence
  Description of Artificial Sequence: Synthetic oligonucleotide
caugaaucugucucccagu

SEQ ID NO: 125955 - RNA, 19 nt, Artificial Sequence
  Description of Artificial Sequence: Synthetic oligonucleotide
uuaugaaucagugggcagg

SEQ ID NO: 125956 - RNA, 19 nt, Artificial Sequence
  Description of Artificial Sequence: Synthetic oligonucleotide
gauaaacugaaaacuccca

SEQ ID NO: 125957 - RNA, 19 nt, Artificial Sequence
  Description of Artificial Sequence: Synthetic oligonucleotide
auuuacgugucugaaucga

SEQ ID NO: 125958 - RNA, 19 nt, Artificial Sequence
  Description of Artificial Sequence: Synthetic oligonucleotide
agugagacaaaauuuuagu

SEQ ID NO: 125959 - RNA, 19 nt, Artificial Sequence
  Description of Artificial Sequence: Synthetic oligonucleotide
uccaaauaacaaguaccaa

SEQ ID NO: 125960 - RNA, 19 nt, Artificial Sequence
  Description of Artificial Sequence: Synthetic oligonucleotide
aaguuuuaucaaguuuggg

SEQ ID NO: 125961 - RNA, 19 nt, Artificial Sequence
  Description of Artificial Sequence: Synthetic oligonucleotide
gucugugcugcuguuacug

SEQ ID NO: 125962 - RNA, 19 nt, Artificial Sequence
  Description of Artificial Sequence: Synthetic oligonucleotide
guuaaccauuuaagugggg

SEQ ID NO: 125963 - RNA, 19 nt, Artificial Sequence
  Description of Artificial Sequence: Synthetic oligonucleotide
gcaaaaccuugcuaauuuu

SEQ ID NO: 125964 - RNA, 19 nt, Artificial Sequence
  Description of Artificial Sequence: Synthetic oligonucleotide
ucucaaaagcauuuaucau

SEQ ID NO: 125965 - RNA, 19 nt, Artificial Sequence
  Description of Artificial Sequence: Synthetic oligonucleotide
uucuuguugccacagcugg

SEQ ID NO: 125966 - RNA, 19 nt, Artificial Sequence
  Description of Artificial Sequence: Synthetic oligonucleotide
gagcucucaaacuaaaaga

SEQ ID NO: 125967 - RNA, 19 nt, Artificial Sequence
  Description of Artificial Sequence: Synthetic oligonucleotide
acauuuguuauuuuggaaa

SEQ ID NO: 125968 - RNA, 19 nt, Artificial Sequence
  Description of Artificial Sequence: Synthetic oligonucleotide
agaagaaagacucuauucu

SEQ ID NO: 125969 - RNA, 19 nt, Artificial Sequence
  Description of Artificial Sequence: Synthetic oligonucleotide
ucaaaguuuccuaaucaga

SEQ ID NO: 125970 - RNA, 19 nt, Artificial Sequence
  Description of Artificial Sequence: Synthetic oligonucleotide
aaauuuuuaucaguuucca

SEQ ID NO: 125971 - RNA, 19 nt, Artificial Sequence
  Description of Artificial Sequence: Synthetic oligonucleotide
agucucaaaaauacaaaau

SEQ ID NO: 125972 - RNA, 19 nt, Artificial Sequence
  Description of Artificial Sequence: Synthetic oligonucleotide
uaaaaacaaacguuuuuaa

SEQ ID NO: 125973 - RNA, 19 nt, Artificial Sequence
  Description of Artificial Sequence: Synthetic oligonucleotide
auacuauugcuuuuaugcc

SEQ ID NO: 125974 - RNA, 19 nt, Artificial Sequence
  Description of Artificial Sequence: Synthetic oligonucleotide
uuaugccuagucaacucug

SEQ ID NO: 125975 - RNA, 19 nt, Artificial Sequence
  Description of Artificial Sequence: Synthetic oligonucleotide
cagcccgccacugccaccc

SEQ ID NO: 125976 - RNA, 19 nt, Artificial Sequence
  Description of Artificial Sequence: Synthetic oligonucleotide
cggccccgugcgcucauug

SEQ ID NO: 125977 - RNA, 19 nt, Artificial Sequence
  Description of Artificial Sequence: Synthetic oligonucleotide
ggucgggaugugucggcuc

SEQ ID NO: 125978 - RNA, 19 nt, Artificial Sequence
  Description of Artificial Sequence: Synthetic oligonucleotide
cagcagccuccaacuucuc

SEQ ID NO: 125979 - RNA, 19 nt, Artificial Sequence
  Description of Artificial Sequence: Synthetic oligonucleotide
cccgaaucccacugauuuu

SEQ ID NO: 125980 - RNA, 19 nt, Artificial Sequence
  Description of Artificial Sequence: Synthetic oligonucleotide
uaggugaugggcaagucag

SEQ ID NO: 125981 - RNA, 19 nt, Artificial Sequence
  Description of Artificial Sequence: Synthetic oligonucleotide
gaaagucagauggauauaa

SEQ ID NO: 125982 - RNA, 19 nt, Artificial Sequence
  Description of Artificial Sequence: Synthetic oligonucleotide
acugauaucaacacuccaa

SEQ ID NO: 125983 - RNA, 19 nt, Artificial Sequence
  Description of Artificial Sequence: Synthetic oligonucleotide
aagccaaagaagaaacagc

SEQ ID NO: 125984 - RNA, 19 nt, Artificial Sequence
  Description of Artificial Sequence: Synthetic oligonucleotide
cgauggacuccacuggaga

SEQ ID NO: 125985 - RNA, 19 nt, Artificial Sequence
  Description of Artificial Sequence: Synthetic oligonucleotide
aucagccucucgguccuug

SEQ ID NO: 125986 - RNA, 19 nt, Artificial Sequence
  Description of Artificial Sequence: Synthetic oligonucleotide
guccugcuccucaccauca

SEQ ID NO: 125987 - RNA, 19 nt, Artificial Sequence
  Description of Artificial Sequence: Synthetic oligonucleotide
auagcugugacaaugaucg

SEQ ID NO: 125988 - RNA, 19 nt, Artificial Sequence
  Description of Artificial Sequence: Synthetic oligonucleotide
gcacucuaugcaaccuacg

SEQ ID NO: 125989 - RNA, 19 nt, Artificial Sequence
  Description of Artificial Sequence: Synthetic oligonucleotide
gaugaugguauuugcaagu

SEQ ID NO: 125990 - RNA, 19 nt, Artificial Sequence
  Description of Artificial Sequence: Synthetic oligonucleotide
ucaucagacugcauaaaau

SEQ ID NO: 125991 - RNA, 19 nt, Artificial Sequence
  Description of Artificial Sequence: Synthetic oligonucleotide
ucagcugcucgacugaucc

SEQ ID NO: 125992 - RNA, 19 nt, Artificial Sequence
  Description of Artificial Sequence: Synthetic oligonucleotide
caaaacauggaugccacca

SEQ ID NO: 125993 - RNA, 19 nt, Artificial Sequence
  Description of Artificial Sequence: Synthetic oligonucleotide
acugagccuuguacagacu

SEQ ID NO: 125994 - RNA, 19 nt, Artificial Sequence
  Description of Artificial Sequence: Synthetic oligonucleotide
uuuuucaaauaugcuugcg

SEQ ID NO: 125995 - RNA, 19 nt, Artificial Sequence
  Description of Artificial Sequence: Synthetic oligonucleotide
ggaggcugguugaaacgua

SEQ ID NO: 125996 - RNA, 19 nt, Artificial Sequence
  Description of Artificial Sequence: Synthetic oligonucleotide
aaugucauucccgagacca

SEQ ID NO: 125997 - RNA, 19 nt, Artificial Sequence
  Description of Artificial Sequence: Synthetic oligonucleotide
agcucccguuacggcaacu

SEQ ID NO: 125998 - RNA, 19 nt, Artificial Sequence
  Description of Artificial Sequence: Synthetic oligonucleotide
uuugacauuuuaagagaug

SEQ ID NO: 125999 - RNA, 19 nt, Artificial Sequence
  Description of Artificial Sequence: Synthetic oligonucleotide
gaacuagaagucguuuuga

SEQ ID NO: 126000 - RNA, 19 nt, Artificial Sequence
  Description of Artificial Sequence: Synthetic oligonucleotide
aaagauguccuucaagaac

SEQ ID NO: 126001 - RNA, 19 nt, Artificial Sequence
  Description of Artificial Sequence: Synthetic oligonucleotide
cccaaaacugaagauauag

SEQ ID NO: 126002 - RNA, 19 nt, Artificial Sequence
  Description of Artificial Sequence: Synthetic oligonucleotide
guagcagugcagaaagcaa

SEQ ID NO: 126003 - RNA, 19 nt, Artificial Sequence
  Description of Artificial Sequence: Synthetic oligonucleotide
aaagcauuguacaggucuu

SEQ ID NO: 126004 - RNA, 19 nt, Artificial Sequence
  Description of Artificial Sequence: Synthetic oligonucleotide
uguauaaaugaaucugcua

SEQ ID NO: 126005 - RNA, 19 nt, Artificial Sequence
  Description of Artificial Sequence: Synthetic oligonucleotide
auugauagcagagguggag

SEQ ID NO: 126006 - RNA, 19 nt, Artificial Sequence
  Description of Artificial Sequence: Synthetic oligonucleotide
gaaccucuacucaaacugu

SEQ ID NO: 126007 - RNA, 19 nt, Artificial Sequence
  Description of Artificial Sequence: Synthetic oligonucleotide
uuaccagacauauaugggu

SEQ ID NO: 126008 - RNA, 19 nt, Artificial Sequence
  Description of Artificial Sequence: Synthetic oligonucleotide
uggccaguagcaacagaaa

SEQ ID NO: 126009 - RNA, 19 nt, Artificial Sequence
  Description of Artificial Sequence: Synthetic oligonucleotide
aacugggagcaaaaauaug

SEQ ID NO: 126010 - RNA, 19 nt, Artificial Sequence
  Description of Artificial Sequence: Synthetic oligonucleotide
ggugcuucuuggacagcug

SEQ ID NO: 126011 - RNA, 19 nt, Artificial Sequence
  Description of Artificial Sequence: Synthetic oligonucleotide
gaaaaagcuauugcacaac

SEQ ID NO: 126012 - RNA, 19 nt, Artificial Sequence
  Description of Artificial Sequence: Synthetic oligonucleotide
cugaauucuaaauauggga

SEQ ID NO: 126013 - RNA, 19 nt, Artificial Sequence
  Description of Artificial Sequence: Synthetic oligonucleotide
aaaaaaguccuuauuaauu

SEQ ID NO: 126014 - RNA, 19 nt, Artificial Sequence
  Description of Artificial Sequence: Synthetic oligonucleotide
uuguuuguuggcacugaug

SEQ ID NO: 126015 - RNA, 19 nt, Artificial Sequence
  Description of Artificial Sequence: Synthetic oligonucleotide
gauaagaauucugugaauc

SEQ ID NO: 126016 - RNA, 19 nt, Artificial Sequence
  Description of Artificial Sequence: Synthetic oligonucleotide
cauguaauucauauugacc

SEQ ID NO: 126017 - RNA, 19 nt, Artificial Sequence
  Description of Artificial Sequence: Synthetic oligonucleotide
caaccucgacuuggccucc

SEQ ID NO: 126018 - RNA, 19 nt, Artificial Sequence
  Description of Artificial Sequence: Synthetic oligonucleotide
ccuucuagagauuacuaug

SEQ ID NO: 126019 - RNA, 19 nt, Artificial Sequence
  Description of Artificial Sequence: Synthetic oligonucleotide
gaaugcacuggaaucuaua

SEQ ID NO: 126020 - RNA, 19 nt, Artificial Sequence
  Description of Artificial Sequence: Synthetic oligonucleotide
aaagaggcuuguacagcau

SEQ ID NO: 126021 - RNA, 19 nt, Artificial Sequence
  Description of Artificial Sequence: Synthetic oligonucleotide
uauguggauuuuaugauuu

SEQ ID NO: 126022 - RNA, 19 nt, Artificial Sequence
  Description of Artificial Sequence: Synthetic oligonucleotide
ucuguggccagauugauuc

SEQ ID NO: 126023 - RNA, 19 nt, Artificial Sequence
  Description of Artificial Sequence: Synthetic oligonucleotide
cgucaggaagaaagauugc

SEQ ID NO: 126024 - RNA, 19 nt, Artificial Sequence
  Description of Artificial Sequence: Synthetic oligonucleotide
cccaucgaugaaaaccagc

SEQ ID NO: 126025 - RNA, 19 nt, Artificial Sequence
  Description of Artificial Sequence: Synthetic oligonucleotide
cuugcuuuggaaaugaaua

SEQ ID NO: 126026 - RNA, 19 nt, Artificial Sequence
  Description of Artificial Sequence: Synthetic oligonucleotide
aaaguuauggaauuggaaa

SEQ ID NO: 126027 - RNA, 19 nt, Artificial Sequence
  Description of Artificial Sequence: Synthetic oligonucleotide
aaagaaauugccaaugcua

SEQ ID NO: 126028 - RNA, 19 nt, Artificial Sequence
  Description of Artificial Sequence: Synthetic oligonucleotide
acggcuaaaccugaagauc

SEQ ID NO: 126029 - RNA, 19 nt, Artificial Sequence
  Description of Artificial Sequence: Synthetic oligonucleotide
cgaaaugauccaaugcuuc

SEQ ID NO: 126030 - RNA, 19 nt, Artificial Sequence
  Description of Artificial Sequence: Synthetic oligonucleotide
cuguauaacaagaugacau

SEQ ID NO: 126031 - RNA, 19 nt, Artificial Sequence
  Description of Artificial Sequence: Synthetic oligonucleotide
uuggcccagauccaaaaua

SEQ ID NO: 126032 - RNA, 19 nt, Artificial Sequence
  Description of Artificial Sequence: Synthetic oligonucleotide
aacuuuucacuagagauca

SEQ ID NO: 126033 - RNA, 19 nt, Artificial Sequence
  Description of Artificial Sequence: Synthetic oligonucleotide
aaugggaagccauucagcu

SEQ ID NO: 126034 - RNA, 19 nt, Artificial Sequence
  Description of Artificial Sequence: Synthetic oligonucleotide
ugguugaauuucacaaaug

SEQ ID NO: 126035 - RNA, 19 nt, Artificial Sequence
  Description of Artificial Sequence: Synthetic oligonucleotide
gaaaucaugucaacuguga

SEQ ID NO: 126036 - RNA, 19 nt, Artificial Sequence
  Description of Artificial Sequence: Synthetic oligonucleotide
aauauuaguauuacaaaug

SEQ ID NO: 126037 - RNA, 19 nt, Artificial Sequence
  Description of Artificial Sequence: Synthetic oligonucleotide
gaggaagaugugguuguuu

SEQ ID NO: 126038 - RNA, 19 nt, Artificial Sequence
  Description of Artificial Sequence: Synthetic oligonucleotide
uaugcuccagaauauuuaa

SEQ ID NO: 126039 - RNA, 19 nt, Artificial Sequence
  Description of Artificial Sequence: Synthetic oligonucleotide
accaaacuuaagcccauuc

SEQ ID NO: 126040 - RNA, 19 nt, Artificial Sequence
  Description of Artificial Sequence: Synthetic oligonucleotide
cuuaccaaauauucugcca

SEQ ID NO: 126041 - RNA, 19 nt, Artificial Sequence
  Description of Artificial Sequence: Synthetic oligonucleotide
agagaucuucaaaauuuaa

SEQ ID NO: 126042 - RNA, 19 nt, Artificial Sequence
  Description of Artificial Sequence: Synthetic oligonucleotide
auguccuggagauucauaa

SEQ ID NO: 126043 - RNA, 19 nt, Artificial Sequence
  Description of Artificial Sequence: Synthetic oligonucleotide
auggaucuuguaagcagcc

SEQ ID NO: 126044 - RNA, 19 nt, Artificial Sequence
  Description of Artificial Sequence: Synthetic oligonucleotide
cucagccgaaccuacaagg

SEQ ID NO: 126045 - RNA, 19 nt, Artificial Sequence
  Description of Artificial Sequence: Synthetic oligonucleotide
gaguccagaaaugcuuucc

SEQ ID NO: 126046 - RNA, 19 nt, Artificial Sequence
  Description of Artificial Sequence: Synthetic oligonucleotide
cgcaaggcccuuuauggua

SEQ ID NO: 126047 - RNA, 19 nt, Artificial Sequence
  Description of Artificial Sequence: Synthetic oligonucleotide
acaaccucagaaacagcaa

SEQ ID NO: 126048 - RNA, 19 nt, Artificial Sequence
  Description of Artificial Sequence: Synthetic oligonucleotide
acuuggagacguugugcaa

SEQ ID NO: 126049 - RNA, 19 nt, Artificial Sequence
  Description of Artificial Sequence: Synthetic oligonucleotide
aacuaugucaaugggaaua

SEQ ID NO: 126050 - RNA, 19 nt, Artificial Sequence
  Description of Artificial Sequence: Synthetic oligonucleotide
auggaaaaugcugugggga

SEQ ID NO: 126051 - RNA, 19 nt, Artificial Sequence
  Description of Artificial Sequence: Synthetic oligonucleotide
aggcuuuauguggaagcag

SEQ ID NO: 126052 - RNA, 19 nt, Artificial Sequence
  Description of Artificial Sequence: Synthetic oligonucleotide
gcauuugcuggagagagua

SEQ ID NO: 126053 - RNA, 19 nt, Artificial Sequence
  Description of Artificial Sequence: Synthetic oligonucleotide
aaacauguggucgaggauu

SEQ ID NO: 126054 - RNA, 19 nt, Artificial Sequence
  Description of Artificial Sequence: Synthetic oligonucleotide
uugauugcacagauccgag

SEQ ID NO: 126055 - RNA, 19 nt, Artificial Sequence
  Description of Artificial Sequence: Synthetic oligonucleotide
gaaguuuuuauucagacuu

SEQ ID NO: 126056 - RNA, 19 nt, Artificial Sequence
  Description of Artificial Sequence: Synthetic oligonucleotide
uuagaugaccucacuugga

SEQ ID NO: 126057 - RNA, 19 nt, Artificial Sequence
  Description of Artificial Sequence: Synthetic oligonucleotide
auggaugccgagacaaaaa

SEQ ID NO: 126058 - RNA, 19 nt, Artificial Sequence
  Description of Artificial Sequence: Synthetic oligonucleotide
aagagagcugaagaaaagg

SEQ ID NO: 126059 - RNA, 19 nt, Artificial Sequence
  Description of Artificial Sequence: Synthetic oligonucleotide
gccuuagcaauuaaagaaa

SEQ ID NO: 126060 - RNA, 19 nt, Artificial Sequence
  Description of Artificial Sequence: Synthetic oligonucleotide
aggaucggcuauccugaug

SEQ ID NO: 126061 - RNA, 19 nt, Artificial Sequence
  Description of Artificial Sequence: Synthetic oligonucleotide
gacauuguuucaaaugaua

SEQ ID NO: 126062 - RNA, 19 nt, Artificial Sequence
  Description of Artificial Sequence: Synthetic oligonucleotide
aacaaacugaauaaugagu

SEQ ID NO: 126063 - RNA, 19 nt, Artificial Sequence
  Description of Artificial Sequence: Synthetic oligonucleotide
uaccucgaguugaacuaca

SEQ ID NO: 126064 - RNA, 19 nt, Artificial Sequence
  Description of Artificial Sequence: Synthetic oligonucleotide
aaagaagaugaauacuucg

SEQ ID NO: 126065 - RNA, 19 nt, Artificial Sequence
  Description of Artificial Sequence: Synthetic oligonucleotide
gagaacauaauucaaaauu

SEQ ID NO: 126066 - RNA, 19 nt, Artificial Sequence
  Description of Artificial Sequence: Synthetic oligonucleotide
uugaaauucagccaaagua

SEQ ID NO: 126067 - RNA, 19 nt, Artificial Sequence
  Description of Artificial Sequence: Synthetic oligonucleotide
aaacaacugaagaagcucc

SEQ ID NO: 126068 - RNA, 19 nt, Artificial Sequence
  Description of Artificial Sequence: Synthetic oligonucleotide
cgagaaaagguggacaaag

SEQ ID NO: 126069 - RNA, 19 nt, Artificial Sequence
  Description of Artificial Sequence: Synthetic oligonucleotide
gaugaguggauaaguggag

SEQ ID NO: 126070 - RNA, 19 nt, Artificial Sequence
  Description of Artificial Sequence: Synthetic oligonucleotide
gcagcuguagucaaugcau

SEQ ID NO: 126071 - RNA, 19 nt, Artificial Sequence
  Description of Artificial Sequence: Synthetic oligonucleotide
uuuuacucuucaggaagaa

SEQ ID NO: 126072 - RNA, 19 nt, Artificial Sequence
  Description of Artificial Sequence: Synthetic oligonucleotide
aaucagauagucuucccag

SEQ ID NO: 126073 - RNA, 19 nt, Artificial Sequence
  Description of Artificial Sequence: Synthetic oligonucleotide
gccggcauucugcagcccc

SEQ ID NO: 126074 - RNA, 19 nt, Artificial Sequence
  Description of Artificial Sequence: Synthetic oligonucleotide
cccuucuuuagugcccagc

SEQ ID NO: 126075 - RNA, 19 nt, Artificial Sequence
  Description of Artificial Sequence: Synthetic oligonucleotide
caguccaacucauugaacu

SEQ ID NO: 126076 - RNA, 19 nt, Artificial Sequence
  Description of Artificial Sequence: Synthetic oligonucleotide
uaugggggcaucggcaugg

SEQ ID NO: 126077 - RNA, 19 nt, Artificial Sequence
  Description of Artificial Sequence: Synthetic oligonucleotide
gucauaggacacgaaauca

SEQ ID NO: 126078 - RNA, 19 nt, Artificial Sequence
  Description of Artificial Sequence: Synthetic oligonucleotide
acccauggcuucgaugaca

SEQ ID NO: 126079 - RNA, 19 nt, Artificial Sequence
  Description of Artificial Sequence: Synthetic oligonucleotide
aauggcagaaacuuuaaca

SEQ ID NO: 126080 - RNA, 19 nt, Artificial Sequence
  Description of Artificial Sequence: Synthetic oligonucleotide
aaagauggagaccucguug

SEQ ID NO: 126081 - RNA, 19 nt, Artificial Sequence
  Description of Artificial Sequence: Synthetic oligonucleotide
gacugguggacucaacagu

SEQ ID NO: 126082 - RNA, 19 nt, Artificial Sequence
  Description of Artificial Sequence: Synthetic oligonucleotide
ucugcaaguaacuuuaagg

SEQ ID NO: 126083 - RNA, 19 nt, Artificial Sequence
  Description of Artificial Sequence: Synthetic oligonucleotide
gagcaaucccagugcaugg

SEQ ID NO: 126084 - RNA, 19 nt, Artificial Sequence
  Description of Artificial Sequence: Synthetic oligonucleotide
guguaucaguauggaaacu

SEQ ID NO: 126085 - RNA, 19 nt, Artificial Sequence
  Description of Artificial Sequence: Synthetic oligonucleotide
uuuuccugggaccuggcag

SEQ ID NO: 126086 - RNA, 19 nt, Artificial Sequence
  Description of Artificial Sequence: Synthetic oligonucleotide
gguggacagcaccuuaaug

SEQ ID NO: 126087 - RNA, 19 nt, Artificial Sequence
  Description of Artificial Sequence: Synthetic oligonucleotide
ggaauuaauacacugggag

SEQ ID NO: 126088 - RNA, 19 nt, Artificial Sequence
  Description of Artificial Sequence: Synthetic oligonucleotide
gaaaacauugcugauaaug

SEQ ID NO: 126089 - RNA, 19 nt, Artificial Sequence
  Description of Artificial Sequence: Synthetic oligonucleotide
ggaggucuuggucaagcau

SEQ ID NO: 126090 - RNA, 19 nt, Artificial Sequence
  Description of Artificial Sequence: Synthetic oligonucleotide
uacagagccuaucagaauu

SEQ ID NO: 126091 - RNA, 19 nt, Artificial Sequence
  Description of Artificial Sequence: Synthetic oligonucleotide
uauauuaaaaagaauggcg

SEQ ID NO: 126092 - RNA, 19 nt, Artificial Sequence
  Description of Artificial Sequence: Synthetic oligonucleotide
gaagaaaaauuacuuccug

SEQ ID NO: 126093 - RNA, 19 nt, Artificial Sequence
  Description of Artificial Sequence: Synthetic oligonucleotide
ggacuugaccuaaaucaca

SEQ ID NO: 126094 - RNA, 19 nt, Artificial Sequence
  Description of Artificial Sequence: Synthetic oligonucleotide
aaacaacuauuuuucuuga

SEQ ID NO: 126095 - RNA, 19 nt, Artificial Sequence
  Description of Artificial Sequence: Synthetic oligonucleotide
aacuuugcacagguguggu

SEQ ID NO: 126096 - RNA, 19 nt, Artificial Sequence
  Description of Artificial Sequence: Synthetic oligonucleotide
uguggaaccuauaggccag

SEQ ID NO: 126097 - RNA, 19 nt, Artificial Sequence
  Description of Artificial Sequence: Synthetic oligonucleotide
gaguaugcgguuaacucca

SEQ ID NO: 126098 - RNA, 19 nt, Artificial Sequence
  Description of Artificial Sequence: Synthetic oligonucleotide
auuaaaacagaugugcaca

SEQ ID NO: 126099 - RNA, 19 nt, Artificial Sequence
  Description of Artificial Sequence: Synthetic oligonucleotide
aguccaggcaauuucagga

SEQ ID NO: 126100 - RNA, 19 nt, Artificial Sequence
  Description of Artificial Sequence: Synthetic oligonucleotide
auuauugggacuuugcaga

SEQ ID NO: 126101 - RNA, 19 nt, Artificial Sequence
  Description of Artificial Sequence: Synthetic oligonucleotide
aacucugcagaguuuucag

SEQ ID NO: 126102 - RNA, 19 nt, Artificial Sequence
  Description of Artificial Sequence: Synthetic oligonucleotide
gaagccuuucacugccgca

SEQ ID NO: 126103 - RNA, 19 nt, Artificial Sequence
  Description of Artificial Sequence: Synthetic oligonucleotide
aagaauucauacaugaauc

SEQ ID NO: 126104 - RNA, 19 nt, Artificial Sequence
  Description of Artificial Sequence: Synthetic oligonucleotide
ccagaaaagaagugccggg

SEQ ID NO: 126105 - RNA, 19 nt, Artificial Sequence
  Description of Artificial Sequence: Synthetic oligonucleotide
guuuggugaucuucaaaag

SEQ ID NO: 126106 - RNA, 19 nt, Artificial Sequence
  Description of Artificial Sequence: Synthetic oligonucleotide
gaagcauugcagcccuugg

SEQ ID NO: 126107 - RNA, 19 nt, Artificial Sequence
  Description of Artificial Sequence: Synthetic oligonucleotide
gcuagacuugccaacacca

SEQ ID NO: 126108 - RNA, 19 nt, Artificial Sequence
  Description of Artificial Sequence: Synthetic oligonucleotide
acagaaauggggaauucuc

SEQ ID NO: 126109 - RNA, 19 nt, Artificial Sequence
  Description of Artificial Sequence: Synthetic oligonucleotide
cuaaucgaaagaaaauggg

SEQ ID NO: 126110 - RNA, 19 nt, Artificial Sequence
  Description of Artificial Sequence: Synthetic oligonucleotide
gcccuaggggucacuguac

SEQ ID NO: 126111 - RNA, 19 nt, Artificial Sequence
  Description of Artificial Sequence: Synthetic oligonucleotide
cugacuugagggugauuaa

SEQ ID NO: 126112 - RNA, 19 nt, Artificial Sequence
  Description of Artificial Sequence: Synthetic oligonucleotide
acagagagggcaccaucac

SEQ ID NO: 126113 - RNA, 19 nt, Artificial Sequence
  Description of Artificial Sequence: Synthetic oligonucleotide
caauacagauaacauuagg

SEQ ID NO: 126114 - RNA, 19 nt, Artificial Sequence
  Description of Artificial Sequence: Synthetic oligonucleotide
guuguccuagaaagggugu

SEQ ID NO: 126115 - RNA, 19 nt, Artificial Sequence
  Description of Artificial Sequence: Synthetic oligonucleotide
uggagggaggaaggggguc

SEQ ID NO: 126116 - RNA, 19 nt, Artificial Sequence
  Description of Artificial Sequence: Synthetic oligonucleotide
cuaaggucuaucaagucaa

SEQ ID NO: 126117 - RNA, 19 nt, Artificial Sequence
  Description of Artificial Sequence: Synthetic oligonucleotide
aucauuucucacuguguac

SEQ ID NO: 126118 - RNA, 19 nt, Artificial Sequence
  Description of Artificial Sequence: Synthetic oligonucleotide
cauaaugcuuaauuucuaa

SEQ ID NO: 126119 - RNA, 19 nt, Artificial Sequence
  Description of Artificial Sequence: Synthetic oligonucleotide
aagauaauauuacuguuua

SEQ ID NO: 126120 - RNA, 19 nt, Artificial Sequence
  Description of Artificial Sequence: Synthetic oligonucleotide
auuucuguuucucauaugg

SEQ ID NO: 126121 - RNA, 19 nt, Artificial Sequence
  Description of Artificial Sequence: Synthetic oligonucleotide
gucuaccaguuugcugaug

SEQ ID NO: 126122 - RNA, 19 nt, Artificial Sequence
  Description of Artificial Sequence: Synthetic oligonucleotide
gucccuagaaaacaaugca

SEQ ID NO: 126123 - RNA, 19 nt, Artificial Sequence
  Description of Artificial Sequence: Synthetic oligonucleotide
aaaaccuuugagguagacc

SEQ ID NO: 126124 - RNA, 19 nt, Artificial Sequence
  Description of Artificial Sequence: Synthetic oligonucleotide
caggauuucuaaucaaaag

SEQ ID NO: 126125 - RNA, 19 nt, Artificial Sequence
  Description of Artificial Sequence: Synthetic oligonucleotide
gggaaaagaagauguugaa

SEQ ID NO: 126126 - RNA, 19 nt, Artificial Sequence
  Description of Artificial Sequence: Synthetic oligonucleotide
agaauacaguuaggcacca

SEQ ID NO: 126127 - RNA, 19 nt, Artificial Sequence
  Description of Artificial Sequence: Synthetic oligonucleotide
agaagaacaguaggugaca

SEQ ID NO: 126128 - RNA, 19 nt, Artificial Sequence
  Description of Artificial Sequence: Synthetic oligonucleotide
acuauaguuuaaaacacau

SEQ ID NO: 126129 - RNA, 19 nt, Artificial Sequence
  Description of Artificial Sequence: Synthetic oligonucleotide
uugccuaacuacuaguuuu

SEQ ID NO: 126130 - RNA, 19 nt, Artificial Sequence
  Description of Artificial Sequence: Synthetic oligonucleotide
uuacuuuuauuugcaacau

SEQ ID NO: 126131 - RNA, 19 nt, Artificial Sequence
  Description of Artificial Sequence: Synthetic oligonucleotide
uuuacaguccuucaaaauc

SEQ ID NO: 126132 - RNA, 19 nt, Artificial Sequence
  Description of Artificial Sequence: Synthetic oligonucleotide
ccuuccaaagaauucuuau

SEQ ID NO: 126133 - RNA, 19 nt, Artificial Sequence
  Description of Artificial Sequence: Synthetic oligonucleotide
uacacauuggggccuugga

SEQ ID NO: 126134 - RNA, 19 nt, Artificial Sequence
  Description of Artificial Sequence: Synthetic oligonucleotide
agcuuacauaguuuuaaac

SEQ ID NO: 126135 - RNA, 19 nt, Artificial Sequence
  Description of Artificial Sequence: Synthetic oligonucleotide
cucauuuuugccauacauc

SEQ ID NO: 126136 - RNA, 19 nt, Artificial Sequence
  Description of Artificial Sequence: Synthetic oligonucleotide
caguuauucauucugugau

SEQ ID NO: 126137 - RNA, 19 nt, Artificial Sequence
  Description of Artificial Sequence: Synthetic oligonucleotide
ucauuuauuuuaagcacuc

SEQ ID NO: 126138 - RNA, 19 nt, Artificial Sequence
  Description of Artificial Sequence: Synthetic oligonucleotide
cuuaaagcaaaaaaugaau

SEQ ID NO: 126139 - RNA, 19 nt, Artificial Sequence
  Description of Artificial Sequence: Synthetic oligonucleotide
ugucuaaaauuguuuuuug

SEQ ID NO: 126140 - RNA, 19 nt, Artificial Sequence
  Description of Artificial Sequence: Synthetic oligonucleotide
guuguaccugcuuugacug

SEQ ID NO: 126141 - RNA, 19 nt, Artificial Sequence
  Description of Artificial Sequence: Synthetic oligonucleotide
gaugcugagauucuucagg

SEQ ID NO: 126142 - RNA, 19 nt, Artificial Sequence
  Description of Artificial Sequence: Synthetic oligonucleotide
gcuuccugcaauuuucuaa

SEQ ID NO: 126143 - RNA, 19 nt, Artificial Sequence
  Description of Artificial Sequence: Synthetic oligonucleotide
agcaauuucuugcucuauc

SEQ ID NO: 126144 - RNA, 19 nt, Artificial Sequence
  Description of Artificial Sequence: Synthetic oligonucleotide
cucucaaaacuugguauuu

SEQ ID NO: 126145 - RNA, 19 nt, Artificial Sequence
  Description of Artificial Sequence: Synthetic oligonucleotide
uuucagagauuuauauaaa

SEQ ID NO: 126146 - RNA, 19 nt, Artificial Sequence
  Description of Artificial Sequence: Synthetic oligonucleotide
auguaaaaauaauaauuuu

SEQ ID NO: 126147 - RNA, 19 nt, Artificial Sequence
  Description of Artificial Sequence: Synthetic oligonucleotide
uuauauuuaauuauuaacu

SEQ ID NO: 126148 - RNA, 19 nt, Artificial Sequence
  Description of Artificial Sequence: Synthetic oligonucleotide
uacauuuaugaguaacuau

SEQ ID NO: 126149 - RNA, 19 nt, Artificial Sequence
  Description of Artificial Sequence: Synthetic oligonucleotide
uuauuauagguaaucaaug

SEQ ID NO: 126150 - RNA, 19 nt, Artificial Sequence
  Description of Artificial Sequence: Synthetic oligonucleotide
gaauauugaaguuucagcu

SEQ ID NO: 126151 - RNA, 19 nt, Artificial Sequence
  Description of Artificial Sequence: Synthetic oligonucleotide
uuaaaauaaacaguuguga

SEQ ID NO: 126152 - RNA, 19 nt, Artificial Sequence
  Description of Artificial Sequence: Synthetic oligonucleotide
aaccaagaucuauaaagcg

SEQ ID NO: 126153 - RNA, 19 nt, Artificial Sequence
  Description of Artificial Sequence: Synthetic oligonucleotide
gauauacagaugaaaauuu

SEQ ID NO: 126154 - RNA, 19 nt, Artificial Sequence
  Description of Artificial Sequence: Synthetic oligonucleotide
ugagacuauuuaaacuuau

SEQ ID NO: 126155 - RNA, 19 nt, Artificial Sequence
  Description of Artificial Sequence: Synthetic oligonucleotide
uaaaucauauugaugaaaa

SEQ ID NO: 126156 - RNA, 19 nt, Artificial Sequence
  Description of Artificial Sequence: Synthetic oligonucleotide
agauuuaagcacaaacuuu

SEQ ID NO: 126157 - RNA, 19 nt, Artificial Sequence
  Description of Artificial Sequence: Synthetic oligonucleotide
uaggguaaaaauugccauu

SEQ ID NO: 126158 - RNA, 19 nt, Artificial Sequence
  Description of Artificial Sequence: Synthetic oligonucleotide
uggacaguugucuagagau

SEQ ID NO: 126159 - RNA, 19 nt, Artificial Sequence
  Description of Artificial Sequence: Synthetic oligonucleotide
uauauauacuugugguuuu

SEQ ID NO: 126160 - RNA, 19 nt, Artificial Sequence
  Description of Artificial Sequence: Synthetic oligonucleotide
ucaaauuggacuuucaaaa

SEQ ID NO: 126161 - RNA, 19 nt, Artificial Sequence
  Description of Artificial Sequence: Synthetic oligonucleotide
auuaaaucugucccugaga

SEQ ID NO: 126162 - RNA, 19 nt, Artificial Sequence
  Description of Artificial Sequence: Synthetic oligonucleotide
agugucucugauaaaaggg

SEQ ID NO: 126163 - RNA, 19 nt, Artificial Sequence
  Description of Artificial Sequence: Synthetic oligonucleotide
gcaaaucugcaccuaugua

SEQ ID NO: 126164 - RNA, 19 nt, Artificial Sequence
  Description of Artificial Sequence: Synthetic oligonucleotide
agcucugcaucuccugucu

SEQ ID NO: 126165 - RNA, 19 nt, Artificial Sequence
  Description of Artificial Sequence: Synthetic oligonucleotide
uuuucagguuugucaucag

SEQ ID NO: 126166 - RNA, 19 nt, Artificial Sequence
  Description of Artificial Sequence: Synthetic oligonucleotide
gauggaaauauuuugauaa

SEQ ID NO: 126167 - RNA, 19 nt, Artificial Sequence
  Description of Artificial Sequence: Synthetic oligonucleotide
auaaauugaaauugugaac

SEQ ID NO: 126168 - RNA, 19 nt, Artificial Sequence
  Description of Artificial Sequence: Synthetic oligonucleotide
cucauugcucccuaagacu

SEQ ID NO: 126169 - RNA, 19 nt, Artificial Sequence
  Description of Artificial Sequence: Synthetic oligonucleotide
ugugacaacugucuaacuu

SEQ ID NO: 126170 - RNA, 19 nt, Artificial Sequence
  Description of Artificial Sequence: Synthetic oligonucleotide
uuagaagugcauuucugaa

SEQ ID NO: 126171 - RNA, 19 nt, Artificial Sequence
  Description of Artificial Sequence: Synthetic oligonucleotide
auagaaaugggaggccucu

SEQ ID NO: 126172 - RNA, 19 nt, Artificial Sequence
  Description of Artificial Sequence: Synthetic oligonucleotide
ugauggaccuucuagaauu

SEQ ID NO: 126173 - RNA, 19 nt, Artificial Sequence
  Description of Artificial Sequence: Synthetic oligonucleotide
uauaagucacaaagaguuc

SEQ ID NO: 126174 - RNA, 19 nt, Artificial Sequence
  Description of Artificial Sequence: Synthetic oligonucleotide
cuggaaaagaacuguuuac

SEQ ID NO: 126175 - RNA, 19 nt, Artificial Sequence
  Description of Artificial Sequence: Synthetic oligonucleotide
cugcuugauaggaauucau

SEQ ID NO: 126176 - RNA, 19 nt, Artificial Sequence
  Description of Artificial Sequence: Synthetic oligonucleotide
ucuuuugaggcuucuguuc

SEQ ID NO: 126177 - RNA, 19 nt, Artificial Sequence
  Description of Artificial Sequence: Synthetic oligonucleotide
ccucucuuuuccuguugua

SEQ ID NO: 126178 - RNA, 19 nt, Artificial Sequence
  Description of Artificial Sequence: Synthetic oligonucleotide
auugacuauuuucguucau

SEQ ID NO: 126179 - RNA, 19 nt, Artificial Sequence
  Description of Artificial Sequence: Synthetic oligonucleotide
uuacuugauuaagauuuua

SEQ ID NO: 126180 - RNA, 19 nt, Artificial Sequence
  Description of Artificial Sequence: Synthetic oligonucleotide
acaaaagaggagcacuucc

SEQ ID NO: 126181 - RNA, 19 nt, Artificial Sequence
  Description of Artificial Sequence: Synthetic oligonucleotide
caaaauucuuauuuuuccu

SEQ ID NO: 126182 - RNA, 19 nt, Artificial Sequence
  Description of Artificial Sequence: Synthetic oligonucleotide
uaacaaaagaugaaagcag

SEQ ID NO: 126183 - RNA, 19 nt, Artificial Sequence
  Description of Artificial Sequence: Synthetic oligonucleotide
gggaauuucuaucuaaaug

SEQ ID NO: 126184 - RNA, 19 nt, Artificial Sequence
  Description of Artificial Sequence: Synthetic oligonucleotide
gaugaguauuaguucccug

SEQ ID NO: 126185 - RNA, 19 nt, Artificial Sequence
  Description of Artificial Sequence: Synthetic oligonucleotide
gucucuugaaaaaugccca

SEQ ID NO: 126186 - RNA, 19 nt, Artificial Sequence
  Description of Artificial Sequence: Synthetic oligonucleotide
auuugccuuuaaaaaaaaa

SEQ ID NO: 126187 - RNA, 19 nt, Artificial Sequence
  Description of Artificial Sequence: Synthetic oligonucleotide
aaguuacagaaauacuaua

SEQ ID NO: 126188 - RNA, 19 nt, Artificial Sequence
  Description of Artificial Sequence: Synthetic oligonucleotide
aacauauguacauaaauug

SEQ ID NO: 126189 - RNA, 19 nt, Artificial Sequence
  Description of Artificial Sequence: Synthetic oligonucleotide
gcauaaagcauaaguauac

SEQ ID NO: 126190 - RNA, 19 nt, Artificial Sequence
  Description of Artificial Sequence: Synthetic oligonucleotide
caguucaauaaacuuaacu

SEQ ID NO: 126191 - RNA, 19 nt, Artificial Sequence
  Description of Artificial Sequence: Synthetic oligonucleotide
uuuaacugaacaauggccc

SEQ ID NO: 126192 - RNA, 19 nt, Artificial Sequence
  Description of Artificial Sequence: Synthetic oligonucleotide
cuguagccagcaccuguaa

SEQ ID NO: 126193 - RNA, 19 nt, Artificial Sequence
  Description of Artificial Sequence: Synthetic oligonucleotide
agaaacagagcaguaccag

SEQ ID NO: 126194 - RNA, 19 nt, Artificial Sequence
  Description of Artificial Sequence: Synthetic oligonucleotide
gcgcucuaaaagcaccucc

SEQ ID NO: 126195 - RNA, 19 nt, Artificial Sequence
  Description of Artificial Sequence: Synthetic oligonucleotide
cuugucacuuuauuacucc

SEQ ID NO: 126196 - RNA, 19 nt, Artificial Sequence
  Description of Artificial Sequence: Synthetic oligonucleotide
ccagaacaacaacuauccu

SEQ ID NO: 126197 - RNA, 19 nt, Artificial Sequence
  Description of Artificial Sequence: Synthetic oligonucleotide
ugacuucuaauaucauuca

SEQ ID NO: 126198 - RNA, 19 nt, Artificial Sequence
  Description of Artificial Sequence: Synthetic oligonucleotide
acuagcuuugccugguuuu

SEQ ID NO: 126199 - RNA, 19 nt, Artificial Sequence
  Description of Artificial Sequence: Synthetic oligonucleotide
ugucuuuuaugcagauaga

SEQ ID NO: 126200 - RNA, 19 nt, Artificial Sequence
  Description of Artificial Sequence: Synthetic oligonucleotide
aaucaaucaguauguauuc

SEQ ID NO: 126201 - RNA, 19 nt, Artificial Sequence
  Description of Artificial Sequence: Synthetic oligonucleotide
cuuuugugccuggcuucuu

SEQ ID NO: 126202 - RNA, 19 nt, Artificial Sequence
  Description of Artificial Sequence: Synthetic oligonucleotide
uucucucagccuuacauuu

SEQ ID NO: 126203 - RNA, 19 nt, Artificial Sequence
  Description of Artificial Sequence: Synthetic oligonucleotide
ugugagauuccucuguauu

SEQ ID NO: 126204 - RNA, 19 nt, Artificial Sequence
  Description of Artificial Sequence: Synthetic oligonucleotide
ugugcugauuguggaucuu

SEQ ID NO: 126205 - RNA, 19 nt, Artificial Sequence
  Description of Artificial Sequence: Synthetic oligonucleotide
uuucauucucauugcagaa

SEQ ID NO: 126206 - RNA, 19 nt, Artificial Sequence
  Description of Artificial Sequence: Synthetic oligonucleotide
auaauguucuauuguggga

SEQ ID NO: 126207 - RNA, 19 nt, Artificial Sequence
  Description of Artificial Sequence: Synthetic oligonucleotide
acuuauuacaauuuguuca

SEQ ID NO: 126208 - RNA, 19 nt, Artificial Sequence
  Description of Artificial Sequence: Synthetic oligonucleotide
auccuauuguugaugggca

SEQ ID NO: 126209 - RNA, 19 nt, Artificial Sequence
  Description of Artificial Sequence: Synthetic oligonucleotide
acuugagaacuuuccauuu

SEQ ID NO: 126210 - RNA, 19 nt, Artificial Sequence
  Description of Artificial Sequence: Synthetic oligonucleotide
uuggcgcuauuacaaauag

SEQ ID NO: 126211 - RNA, 19 nt, Artificial Sequence
  Description of Artificial Sequence: Synthetic oligonucleotide
gugcaacuaugaauguacu

SEQ ID NO: 126212 - RNA, 19 nt, Artificial Sequence
  Description of Artificial Sequence: Synthetic oligonucleotide
ugcauguuaccaucuuacu

SEQ ID NO: 126213 - RNA, 19 nt, Artificial Sequence
  Description of Artificial Sequence: Synthetic oligonucleotide
uugagccuuuaauggacuu

SEQ ID NO: 126214 - RNA, 19 nt, Artificial Sequence
  Description of Artificial Sequence: Synthetic oligonucleotide
uauuucuucaaauccuucc

SEQ ID NO: 126215 - RNA, 19 nt, Artificial Sequence
  Description of Artificial Sequence: Synthetic oligonucleotide
caaaaauuauuauaagcau

SEQ ID NO: 126216 - RNA, 19 nt, Artificial Sequence
  Description of Artificial Sequence: Synthetic oligonucleotide
uugaaauuauaguuucaag

SEQ ID NO: 126217 - RNA, 19 nt, Artificial Sequence
  Description of Artificial Sequence: Synthetic oligonucleotide
gccaacuguggauacccuu

SEQ ID NO: 126218 - RNA, 19 nt, Artificial Sequence
  Description of Artificial Sequence: Synthetic oligonucleotide
uacccuuuccuccuuuauc

SEQ ID NO: 126219 - RNA, 19 nt, Artificial Sequence
  Description of Artificial Sequence: Synthetic oligonucleotide
cacaaccaccguuacaagu

SEQ ID NO: 126220 - RNA, 19 nt, Artificial Sequence
  Description of Artificial Sequence: Synthetic oligonucleotide
uauacuuauauuucccuaa

SEQ ID NO: 126221 - RNA, 19 nt, Artificial Sequence
  Description of Artificial Sequence: Synthetic oligonucleotide
aaauacauuuaaaacuuac

SEQ ID NO: 126222 - RNA, 19 nt, Artificial Sequence
  Description of Artificial Sequence: Synthetic oligonucleotide
ccuaagugacauuuguagu

SEQ ID NO: 126223 - RNA, 19 nt, Artificial Sequence
  Description of Artificial Sequence: Synthetic oligonucleotide
uuggaguaauaggagcuuc

SEQ ID NO: 126224 - RNA, 19 nt, Artificial Sequence
  Description of Artificial Sequence: Synthetic oligonucleotide
ccagcucuaauaaaacagc

SEQ ID NO: 126225 - RNA, 19 nt, Artificial Sequence
  Description of Artificial Sequence: Synthetic oligonucleotide
cugucucuaacuuauuuua

SEQ ID NO: 126226 - RNA, 19 nt, Artificial Sequence
  Description of Artificial Sequence: Synthetic oligonucleotide
auuuccaucaugucagagc

SEQ ID NO: 126227 - RNA, 19 nt, Artificial Sequence
  Description of Artificial Sequence: Synthetic oligonucleotide
caggugaagagccagaagu

SEQ ID NO: 126228 - RNA, 19 nt, Artificial Sequence
  Description of Artificial Sequence: Synthetic oligonucleotide
ugaagagugacuaguacaa

SEQ ID NO: 126229 - RNA, 19 nt, Artificial Sequence
  Description of Artificial Sequence: Synthetic oligonucleotide
aauuauaaaaagccacuag

SEQ ID NO: 126230 - RNA, 19 nt, Artificial Sequence
  Description of Artificial Sequence: Synthetic oligonucleotide
gacucuucacuguuagcuu

SEQ ID NO: 126231 - RNA, 19 nt, Artificial Sequence
  Description of Artificial Sequence: Synthetic oligonucleotide
uuuuaaaacauuaggcucc

SEQ ID NO: 126232 - RNA, 19 nt, Artificial Sequence
  Description of Artificial Sequence: Synthetic oligonucleotide
ccaucccuauggaggaaca

SEQ ID NO: 126233 - RNA, 19 nt, Artificial Sequence
  Description of Artificial Sequence: Synthetic oligonucleotide
aacucuccagugccuggau

SEQ ID NO: 126234 - RNA, 19 nt, Artificial Sequence
  Description of Artificial Sequence: Synthetic oligonucleotide
uccccucugucuacaaaua

SEQ ID NO: 126235 - RNA, 19 nt, Artificial Sequence
  Description of Artificial Sequence: Synthetic oligonucleotide
auaagauuuucugggccua

SEQ ID NO: 126236 - RNA, 19 nt, Artificial Sequence
  Description of Artificial Sequence: Synthetic oligonucleotide
aaaggauagaucaaaguca

SEQ ID NO: 126237 - RNA, 19 nt, Artificial Sequence
  Description of Artificial Sequence: Synthetic oligonucleotide
aaaaauagcaaugccuccc

SEQ ID NO: 126238 - RNA, 19 nt, Artificial Sequence
  Description of Artificial Sequence: Synthetic oligonucleotide
cuaucccucacacauccag

SEQ ID NO: 126239 - RNA, 19 nt, Artificial Sequence
  Description of Artificial Sequence: Synthetic oligonucleotide
gacaucaugaauuuuacau

SEQ ID NO: 126240 - RNA, 19 nt, Artificial Sequence
  Description of Artificial Sequence: Synthetic oligonucleotide
ugguacucuuguugaguuc

SEQ ID NO: 126241 - RNA, 19 nt, Artificial Sequence
  Description of Artificial Sequence: Synthetic oligonucleotide
cuguagagccuucugaugu

SEQ ID NO: 126242 - RNA, 19 nt, Artificial Sequence
  Description of Artificial Sequence: Synthetic oligonucleotide
ucucuaaagcacuaccgau

SEQ ID NO: 126243 - RNA, 19 nt, Artificial Sequence
  Description of Artificial Sequence: Synthetic oligonucleotide
uucuuuggaguugucacau

SEQ ID NO: 126244 - RNA, 19 nt, Artificial Sequence
  Description of Artificial Sequence: Synthetic oligonucleotide
ucagauaagacauaucucu

SEQ ID NO: 126245 - RNA, 19 nt, Artificial Sequence
  Description of Artificial Sequence: Synthetic oligonucleotide
uaauuccauccauaaaucc

SEQ ID NO: 126246 - RNA, 19 nt, Artificial Sequence
  Description of Artificial Sequence: Synthetic oligonucleotide
caguucuacuauggcugag

SEQ ID NO: 126247 - RNA, 19 nt, Artificial Sequence
  Description of Artificial Sequence: Synthetic oligonucleotide
guucuggucaaagaaagaa

SEQ ID NO: 126248 - RNA, 19 nt, Artificial Sequence
  Description of Artificial Sequence: Synthetic oligonucleotide
aaguuuagaagcugagaca

SEQ ID NO: 126249 - RNA, 19 nt, Artificial Sequence
  Description of Artificial Sequence: Synthetic oligonucleotide
acaaaggguugggagcuga

SEQ ID NO: 126250 - RNA, 19 nt, Artificial Sequence
  Description of Artificial Sequence: Synthetic oligonucleotide
augaaacucacaaaugaug

SEQ ID NO: 126251 - RNA, 19 nt, Artificial Sequence
  Description of Artificial Sequence: Synthetic oligonucleotide
gguaggaagaagcucucga

SEQ ID NO: 126252 - RNA, 19 nt, Artificial Sequence
  Description of Artificial Sequence: Synthetic oligonucleotide
acaauacccguuggcaagg

SEQ ID NO: 126253 - RNA, 19 nt, Artificial Sequence
  Description of Artificial Sequence: Synthetic oligonucleotide
gagucugccuccaugcugc

SEQ ID NO: 126254 - RNA, 19 nt, Artificial Sequence
  Description of Artificial Sequence: Synthetic oligonucleotide
caguguucgaguggauugu

SEQ ID NO: 126255 - RNA, 19 nt, Artificial Sequence
  Description of Artificial Sequence: Synthetic oligonucleotide
uaggugcaagauggaaagg

SEQ ID NO: 126256 - RNA, 19 nt, Artificial Sequence
  Description of Artificial Sequence: Synthetic oligonucleotide
gauuguaggugcaagcugu

SEQ ID NO: 126257 - RNA, 19 nt, Artificial Sequence
  Description of Artificial Sequence: Synthetic oligonucleotide
uccagagaaaagaguccuu

SEQ ID NO: 126258 - RNA, 19 nt, Artificial Sequence
  Description of Artificial Sequence: Synthetic oligonucleotide
uguuccagcccuauucugc

SEQ ID NO: 126259 - RNA, 19 nt, Artificial Sequence
  Description of Artificial Sequence: Synthetic oligonucleotide
ccacuccugacagggugac

SEQ ID NO: 126260 - RNA, 19 nt, Artificial Sequence
  Description of Artificial Sequence: Synthetic oligonucleotide
ccuuggguauuugcaauau

SEQ ID NO: 126261 - RNA, 19 nt, Artificial Sequence
  Description of Artificial Sequence: Synthetic oligonucleotide
uuccuuugggccucugcuu

SEQ ID NO: 126262 - RNA, 19 nt, Artificial Sequence
  Description of Artificial Sequence: Synthetic oligonucleotide
ucucucaccuaaaaaaaga

SEQ ID NO: 126263 - RNA, 19 nt, Artificial Sequence
  Description of Artificial Sequence: Synthetic oligonucleotide
agaauuagauuauauuggu

SEQ ID NO: 126264 - RNA, 19 nt, Artificial Sequence
  Description of Artificial Sequence: Synthetic oligonucleotide
ugguucucagcaagagaag

SEQ ID NO: 126265 - RNA, 19 nt, Artificial Sequence
  Description of Artificial Sequence: Synthetic oligonucleotide
ggaguauguguccaaugcu

SEQ ID NO: 126266 - RNA, 19 nt, Artificial Sequence
  Description of Artificial Sequence: Synthetic oligonucleotide
ugccuucccaugaaucugu

SEQ ID NO: 126267 - RNA, 19 nt, Artificial Sequence
  Description of Artificial Sequence: Synthetic oligonucleotide
ucucccaguuaugaaucag

SEQ ID NO: 126268 - RNA, 19 nt, Artificial Sequence
  Description of Artificial Sequence: Synthetic oligonucleotide
gugggcaggauaaacugaa

SEQ ID NO: 126269 - RNA, 19 nt, Artificial Sequence
  Description of Artificial Sequence: Synthetic oligonucleotide
aaacucccauuuacguguc

SEQ ID NO: 126270 - RNA, 19 nt, Artificial Sequence
  Description of Artificial Sequence: Synthetic oligonucleotide
cugaaucgagugagacaaa

SEQ ID NO: 126271 - RNA, 19 nt, Artificial Sequence
  Description of Artificial Sequence: Synthetic oligonucleotide
aauuuuaguccaaauaaca

SEQ ID NO: 126272 - RNA, 19 nt, Artificial Sequence
  Description of Artificial Sequence: Synthetic oligonucleotide
aaguaccaaaguuuuauca

SEQ ID NO: 126273 - RNA, 19 nt, Artificial Sequence
  Description of Artificial Sequence: Synthetic oligonucleotide
aaguuugggucugugcugc

SEQ ID NO: 126274 - RNA, 19 nt, Artificial Sequence
  Description of Artificial Sequence: Synthetic oligonucleotide
cuguuacuguuaaccauuu

SEQ ID NO: 126275 - RNA, 19 nt, Artificial Sequence
  Description of Artificial Sequence: Synthetic oligonucleotide
uaaguggggcaaaaccuug

SEQ ID NO: 126276 - RNA, 19 nt, Artificial Sequence
  Description of Artificial Sequence: Synthetic oligonucleotide
gcuaauuuucucaaaagca

SEQ ID NO: 126277 - RNA, 19 nt, Artificial Sequence
  Description of Artificial Sequence: Synthetic oligonucleotide
auuuaucauucuuguugcc

SEQ ID NO: 126278 - RNA, 19 nt, Artificial Sequence
  Description of Artificial Sequence: Synthetic oligonucleotide
cacagcuggagcucucaaa

SEQ ID NO: 126279 - RNA, 19 nt, Artificial Sequence
  Description of Artificial Sequence: Synthetic oligonucleotide
acuaaaagacauuuguuau

SEQ ID NO: 126280 - RNA, 19 nt, Artificial Sequence
  Description of Artificial Sequence: Synthetic oligonucleotide
uuuuggaaagaagaaagac

SEQ ID NO: 126281 - RNA, 19 nt, Artificial Sequence
  Description of Artificial Sequence: Synthetic oligonucleotide
cucuauucucaaaguuucc

SEQ ID NO: 126282 - RNA, 19 nt, Artificial Sequence
  Description of Artificial Sequence: Synthetic oligonucleotide
cuaaucagaaauuuuuauc

SEQ ID NO: 126283 - RNA, 19 nt, Artificial Sequence
  Description of Artificial Sequence: Synthetic oligonucleotide
caguuuccagucucaaaaa

SEQ ID NO: 126284 - RNA, 19 nt, Artificial Sequence
  Description of Artificial Sequence: Synthetic oligonucleotide
auacaaaauaaaaacaaac

SEQ ID NO: 126285 - RNA, 19 nt, Artificial Sequence
  Description of Artificial Sequence: Synthetic oligonucleotide
cguuuuuaauacuauugcu

SEQ ID NO: 126286 - RNA, 19 nt, Artificial Sequence
  Description of Artificial Sequence: Synthetic oligonucleotide
uuuuaugccuagucaacuc

SEQ ID NO: 126287 - RNA, 19 nt, Artificial Sequence
  Description of Artificial Sequence: Synthetic oligonucleotide
cgucagguuggcucuucag

SEQ ID NO: 126288 - RNA, 19 nt, Artificial Sequence
  Description of Artificial Sequence: Synthetic oligonucleotide
gguucauuuccauaguucc

SEQ ID NO: 126289 - RNA, 19 nt, Artificial Sequence
  Description of Artificial Sequence: Synthetic oligonucleotide
ccugcggccucugccuugg

SEQ ID NO: 126290 - RNA, 19 nt, Artificial Sequence
  Description of Artificial Sequence: Synthetic oligonucleotide
gggaguuauguuuuguuac

SEQ ID NO: 126291 - RNA, 19 nt, Artificial Sequence
  Description of Artificial Sequence: Synthetic oligonucleotide
ccgagauccgcgcuaccag

SEQ ID NO: 126292 - RNA, 19 nt, Artificial Sequence
  Description of Artificial Sequence: Synthetic oligonucleotide
gauugcaccggggcugauu

SEQ ID NO: 126293 - RNA, 19 nt, Artificial Sequence
  Description of Artificial Sequence: Synthetic oligonucleotide
uugggggcugggaauuugc

SEQ ID NO: 126294 - RNA, 19 nt, Artificial Sequence
  Description of Artificial Sequence: Synthetic oligonucleotide
ccauucugcuguacagaca

SEQ ID NO: 126295 - RNA, 19 nt, Artificial Sequence
  Description of Artificial Sequence: Synthetic oligonucleotide
acugauuuuuuuuucuucu

SEQ ID NO: 126296 - RNA, 19 nt, Artificial Sequence
  Description of Artificial Sequence: Synthetic oligonucleotide
uuuuuaaaaagcaagauuu

SEQ ID NO: 126297 - RNA, 19 nt, Artificial Sequence
  Description of Artificial Sequence: Synthetic oligonucleotide
uuaggugaugggcaaguca

SEQ ID NO: 126298 - RNA, 19 nt, Artificial Sequence
  Description of Artificial Sequence: Synthetic oligonucleotide
agaaagucagauggauaua

SEQ ID NO: 126299 - RNA, 19 nt, Artificial Sequence
  Description of Artificial Sequence: Synthetic oligonucleotide
aacugauaucaacacucca

SEQ ID NO: 126300 - RNA, 19 nt, Artificial Sequence
  Description of Artificial Sequence: Synthetic oligonucleotide
aaagccaaagaagaaacag

SEQ ID NO: 126301 - RNA, 19 nt, Artificial Sequence
  Description of Artificial Sequence: Synthetic oligonucleotide
gcgauggacuccacuggag

SEQ ID NO: 126302 - RNA, 19 nt, Artificial Sequence
  Description of Artificial Sequence: Synthetic oligonucleotide
gaucagccucucgguccuu

SEQ ID NO: 126303 - RNA, 19 nt, Artificial Sequence
  Description of Artificial Sequence: Synthetic oligonucleotide
uguccugcuccucaccauc

SEQ ID NO: 126304 - RNA, 19 nt, Artificial Sequence
  Description of Artificial Sequence: Synthetic oligonucleotide
cauagcugugacaaugauc

SEQ ID NO: 126305 - RNA, 19 nt, Artificial Sequence
  Description of Artificial Sequence: Synthetic oligonucleotide
cgcacucuaugcaaccuac

SEQ ID NO: 126306 - RNA, 19 nt, Artificial Sequence
  Description of Artificial Sequence: Synthetic oligonucleotide
cgaugaugguauuugcaag

SEQ ID NO: 126307 - RNA, 19 nt, Artificial Sequence
  Description of Artificial Sequence: Synthetic oligonucleotide
gucaucagacugcauaaaa

SEQ ID NO: 126308 - RNA, 19 nt, Artificial Sequence
  Description of Artificial Sequence: Synthetic oligonucleotide
aucagcugcucgacugauc

SEQ ID NO: 126309 - RNA, 19 nt, Artificial Sequence
  Description of Artificial Sequence: Synthetic oligonucleotide
ccaaaacauggaugccacc

SEQ ID NO: 126310 - RNA, 19 nt, Artificial Sequence
  Description of Artificial Sequence: Synthetic oligonucleotide
cacugagccuuguacagac

SEQ ID NO: 126311 - RNA, 19 nt, Artificial Sequence
  Description of Artificial Sequence: Synthetic oligonucleotide
cuuuuucaaauaugcuugc

SEQ ID NO: 126312 - RNA, 19 nt, Artificial Sequence
  Description of Artificial Sequence: Synthetic oligonucleotide
cggaggcugguugaaacgu

SEQ ID NO: 126313 - RNA, 19 nt, Artificial Sequence
  Description of Artificial Sequence: Synthetic oligonucleotide
uaaugucauucccgagacc

SEQ ID NO: 126314 - RNA, 19 nt, Artificial Sequence
  Description of Artificial Sequence: Synthetic oligonucleotide
cagcucccguuacggcaac

SEQ ID NO: 126315 - RNA, 19 nt, Artificial Sequence
  Description of Artificial Sequence: Synthetic oligonucleotide
cuuugacauuuuaagagau

SEQ ID NO: 126316 - RNA, 19 nt, Artificial Sequence
  Description of Artificial Sequence: Synthetic oligonucleotide
ugaacuagaagucguuuug

SEQ ID NO: 126317 - RNA, 19 nt, Artificial Sequence
  Description of Artificial Sequence: Synthetic oligonucleotide
gaaagauguccuucaagaa

SEQ ID NO: 126318 - RNA, 19 nt, Artificial Sequence
  Description of Artificial Sequence: Synthetic oligonucleotide
acccaaaacugaagauaua

SEQ ID NO: 126319 - RNA, 19 nt, Artificial Sequence
  Description of Artificial Sequence: Synthetic oligonucleotide
aguagcagugcagaaagca

SEQ ID NO: 126320 - RNA, 19 nt, Artificial Sequence
  Description of Artificial Sequence: Synthetic oligonucleotide
aaaagcauuguacaggucu

SEQ ID NO: 126321 - RNA, 19 nt, Artificial Sequence
  Description of Artificial Sequence: Synthetic oligonucleotide
uuguauaaaugaaucugcu

SEQ ID NO: 126322 - RNA, 19 nt, Artificial Sequence
  Description of Artificial Sequence: Synthetic oligonucleotide
uauugauagcagaggugga

SEQ ID NO: 126323 - RNA, 19 nt, Artificial Sequence
  Description of Artificial Sequence: Synthetic oligonucleotide
agaaccucuacucaaacug

SEQ ID NO: 126324 - RNA, 19 nt, Artificial Sequence
  Description of Artificial Sequence: Synthetic oligonucleotide
guuaccagacauauauggg

SEQ ID NO: 126325 - RNA, 19 nt, Artificial Sequence
  Description of Artificial Sequence: Synthetic oligonucleotide
guggccaguagcaacagaa

SEQ ID NO: 126326 - RNA, 19 nt, Artificial Sequence
  Description of Artificial Sequence: Synthetic oligonucleotide
aaacugggagcaaaaauau

SEQ ID NO: 126327 - RNA, 19 nt, Artificial Sequence
  Description of Artificial Sequence: Synthetic oligonucleotide
uggugcuucuuggacagcu

SEQ ID NO: 126328 - RNA, 19 nt, Artificial Sequence
  Description of Artificial Sequence: Synthetic oligonucleotide
ugaaaaagcuauugcacaa

SEQ ID NO: 126329 - RNA, 19 nt, Artificial Sequence
  Description of Artificial Sequence: Synthetic oligonucleotide
acugaauucuaaauauggg

SEQ ID NO: 126330 - RNA, 19 nt, Artificial Sequence
  Description of Artificial Sequence: Synthetic oligonucleotide
gaaaaaaguccuuauuaau

SEQ ID NO: 126331 - RNA, 19 nt, Artificial Sequence
  Description of Artificial Sequence: Synthetic oligonucleotide
uuuguuuguuggcacugau

SEQ ID NO: 126332 - RNA, 19 nt, Artificial Sequence
  Description of Artificial Sequence: Synthetic oligonucleotide
ugauaagaauucugugaau

SEQ ID NO: 126333 - RNA, 19 nt, Artificial Sequence
  Description of Artificial Sequence: Synthetic oligonucleotide
ucauguaauucauauugac

SEQ ID NO: 126334 - RNA, 19 nt, Artificial Sequence
  Description of Artificial Sequence: Synthetic oligonucleotide
ccaaccucgacuuggccuc

SEQ ID NO: 126335 - RNA, 19 nt, Artificial Sequence
  Description of Artificial Sequence: Synthetic oligonucleotide
cccuucuagagauuacuau

SEQ ID NO: 126336 - RNA, 19 nt, Artificial Sequence
  Description of Artificial Sequence: Synthetic oligonucleotide
ugaaugcacuggaaucuau

SEQ ID NO: 126337 - RNA, 19 nt, Artificial Sequence
  Description of Artificial Sequence: Synthetic oligonucleotide
uaaagaggcuuguacagca

SEQ ID NO: 126338 - RNA, 19 nt, Artificial Sequence
  Description of Artificial Sequence: Synthetic oligonucleotide
auauguggauuuuaugauu

SEQ ID NO: 126339 - RNA, 19 nt, Artificial Sequence
  Description of Artificial Sequence: Synthetic oligonucleotide
uucuguggccagauugauu

SEQ ID NO: 126340 - RNA, 19 nt, Artificial Sequence
  Description of Artificial Sequence: Synthetic oligonucleotide
ucgucaggaagaaagauug

SEQ ID NO: 126341 - RNA, 19 nt, Artificial Sequence
  Description of Artificial Sequence: Synthetic oligonucleotide
gcccaucgaugaaaaccag

SEQ ID NO: 126342 - RNA, 19 nt, Artificial Sequence
  Description of Artificial Sequence: Synthetic oligonucleotide
gcuugcuuuggaaaugaau

SEQ ID NO: 126343 - RNA, 19 nt, Artificial Sequence
  Description of Artificial Sequence: Synthetic oligonucleotide
uaaaguuauggaauuggaa

SEQ ID NO: 126344 - RNA, 19 nt, Artificial Sequence
  Description of Artificial Sequence: Synthetic oligonucleotide
aaaagaaauugccaaugcu

SEQ ID NO: 126345 - RNA, 19 nt, Artificial Sequence
  Description of Artificial Sequence: Synthetic oligonucleotide
uacggcuaaaccugaagau

SEQ ID NO: 126346 - RNA, 19 nt, Artificial Sequence
  Description of Artificial Sequence: Synthetic oligonucleotide
ucgaaaugauccaaugcuu

SEQ ID NO: 126347 - RNA, 19 nt, Artificial Sequence
  Description of Artificial Sequence: Synthetic oligonucleotide
ucuguauaacaagaugaca

SEQ ID NO: 126348 - RNA, 19 nt, Artificial Sequence
  Description of Artificial Sequence: Synthetic oligonucleotide
auuggcccagauccaaaau

SEQ ID NO: 126349 - RNA, 19 nt, Artificial Sequence
  Description of Artificial Sequence: Synthetic oligonucleotide
uaacuuuucacuagagauc

SEQ ID NO: 126350 - RNA, 19 nt, Artificial Sequence
  Description of Artificial Sequence: Synthetic oligonucleotide
caaugggaagccauucagc

SEQ ID NO: 126351 - RNA, 19 nt, Artificial Sequence
  Description of Artificial Sequence: Synthetic oligonucleotide
cugguugaauuucacaaau

SEQ ID NO: 126352 - RNA, 19 nt, Artificial Sequence
  Description of Artificial Sequence: Synthetic oligonucleotide
ugaaaucaugucaacugug

SEQ ID NO: 126353 - RNA, 19 nt, Artificial Sequence
  Description of Artificial Sequence: Synthetic oligonucleotide
gaauauuaguauuacaaau

SEQ ID NO: 126354 - RNA, 19 nt, Artificial Sequence
  Description of Artificial Sequence: Synthetic oligonucleotide
ugaggaagaugugguuguu

SEQ ID NO: 126355 - RNA, 19 nt, Artificial Sequence
  Description of Artificial Sequence: Synthetic oligonucleotide
uuaugcuccagaauauuua

SEQ ID NO: 126356 - RNA, 19 nt, Artificial Sequence
  Description of Artificial Sequence: Synthetic oligonucleotide
aaccaaacuuaagcccauu

SEQ ID NO: 126357 - RNA, 19 nt, Artificial Sequence
  Description of Artificial Sequence: Synthetic oligonucleotide
ucuuaccaaauauucugcc

SEQ ID NO: 126358 - RNA, 19 nt, Artificial Sequence
  Description of Artificial Sequence: Synthetic oligonucleotide
cagagaucuucaaaauuua

SEQ ID NO: 126359 - RNA, 19 nt, Artificial Sequence
  Description of Artificial Sequence: Synthetic oligonucleotide
aauguccuggagauucaua

SEQ ID NO: 126360 - RNA, 19 nt, Artificial Sequence
  Description of Artificial Sequence: Synthetic oligonucleotide
aauggaucuuguaagcagc

SEQ ID NO: 126361 - RNA, 19 nt, Artificial Sequence
  Description of Artificial Sequence: Synthetic oligonucleotide
ccucagccgaaccuacaag

SEQ ID NO: 126362 - RNA, 19 nt, Artificial Sequence
  Description of Artificial Sequence: Synthetic oligonucleotide
ggaguccagaaaugcuuuc

SEQ ID NO: 126363 - RNA, 19 nt, Artificial Sequence
  Description of Artificial Sequence: Synthetic oligonucleotide
ccgcaaggcccuuuauggu

SEQ ID NO: 126364 - RNA, 19 nt, Artificial Sequence
  Description of Artificial Sequence: Synthetic oligonucleotide
uacaaccucagaaacagca

SEQ ID NO: 126365 - RNA, 19 nt, Artificial Sequence
  Description of Artificial Sequence: Synthetic oligonucleotide
aacuuggagacguugugca

SEQ ID NO: 126366 - RNA, 19 nt, Artificial Sequence
  Description of Artificial Sequence: Synthetic oligonucleotide
aaacuaugucaaugggaau

SEQ ID NO: 126367 - RNA, 19 nt, Artificial Sequence
  Description of Artificial Sequence: Synthetic oligonucleotide
uauggaaaaugcugugggg

SEQ ID NO: 126368 - RNA, 19 nt, Artificial Sequence
  Description of Artificial Sequence: Synthetic oligonucleotide
gaggcuuuauguggaagca

SEQ ID NO: 126369 - RNA, 19 nt, Artificial Sequence
  Description of Artificial Sequence: Synthetic oligonucleotide
agcauuugcuggagagagu

SEQ ID NO: 126370 - RNA, 19 nt, Artificial Sequence
  Description of Artificial Sequence: Synthetic oligonucleotide
uaaacauguggucgaggau

SEQ ID NO: 126371 - RNA, 19 nt, Artificial Sequence
  Description of Artificial Sequence: Synthetic oligonucleotide
uuugauugcacagauccga

SEQ ID NO: 126372 - RNA, 19 nt, Artificial Sequence
  Description of Artificial Sequence: Synthetic oligonucleotide
agaaguuuuuauucagacu

SEQ ID NO: 126373 - RNA, 19 nt, Artificial Sequence
  Description of Artificial Sequence: Synthetic oligonucleotide
uuuagaugaccucacuugg

SEQ ID NO: 126374 - RNA, 19 nt, Artificial Sequence
  Description of Artificial Sequence: Synthetic oligonucleotide
gauggaugccgagacaaaa

SEQ ID NO: 126375 - RNA, 19 nt, Artificial Sequence
  Description of Artificial Sequence: Synthetic oligonucleotide
aaagagagcugaagaaaag

SEQ ID NO: 126376 - RNA, 19 nt, Artificial Sequence
  Description of Artificial Sequence: Synthetic oligonucleotide
ggccuuagcaauuaaagaa

SEQ ID NO: 126377 - RNA, 19 nt, Artificial Sequence
  Description of Artificial Sequence: Synthetic oligonucleotide
aaggaucggcuauccugau

SEQ ID NO: 126378 - RNA, 19 nt, Artificial Sequence
  Description of Artificial Sequence: Synthetic oligonucleotide
ugacauuguuucaaaugau

SEQ ID NO: 126379 - RNA, 19 nt, Artificial Sequence
  Description of Artificial Sequence: Synthetic oligonucleotide
uaacaaacugaauaaugag

SEQ ID NO: 126380 - RNA, 19 nt, Artificial Sequence
  Description of Artificial Sequence: Synthetic oligonucleotide
guaccucgaguugaacuac

SEQ ID NO: 126381 - RNA, 19 nt, Artificial Sequence
  Description of Artificial Sequence: Synthetic oligonucleotide
caaagaagaugaauacuuc

SEQ ID NO: 126382 - RNA, 19 nt, Artificial Sequence
  Description of Artificial Sequence: Synthetic oligonucleotide
cgagaacauaauucaaaau

SEQ ID NO: 126383 - RNA, 19 nt, Artificial Sequence
  Description of Artificial Sequence: Synthetic oligonucleotide
uuugaaauucagccaaagu

SEQ ID NO: 126384 - RNA, 19 nt, Artificial Sequence
  Description of Artificial Sequence: Synthetic oligonucleotide
uaaacaacugaagaagcuc

SEQ ID NO: 126385 - RNA, 19 nt, Artificial Sequence
  Description of Artificial Sequence: Synthetic oligonucleotide
ccgagaaaagguggacaaa

SEQ ID NO: 126386 - RNA, 19 nt, Artificial Sequence
  Description of Artificial Sequence: Synthetic oligonucleotide
agaugaguggauaagugga

SEQ ID NO: 126387 - RNA, 19 nt, Artificial Sequence
  Description of Artificial Sequence: Synthetic oligonucleotide
agcagcuguagucaaugca

SEQ ID NO: 126388 - RNA, 19 nt, Artificial Sequence
  Description of Artificial Sequence: Synthetic oligonucleotide
auuuuacucuucaggaaga

SEQ ID NO: 126389 - RNA, 19 nt, Artificial Sequence
  Description of Artificial Sequence: Synthetic oligonucleotide
aaaucagauagucuuccca

SEQ ID NO: 126390 - RNA, 19 nt, Artificial Sequence
  Description of Artificial Sequence: Synthetic oligonucleotide
agccggcauucugcagccc

SEQ ID NO: 126391 - RNA, 19 nt, Artificial Sequence
  Description of Artificial Sequence: Synthetic oligonucleotide
ccccuucuuuagugcccag

SEQ ID NO: 126392 - RNA, 19 nt, Artificial Sequence
  Description of Artificial Sequence: Synthetic oligonucleotide
gcaguccaacucauugaac

SEQ ID NO: 126393 - RNA, 19 nt, Artificial Sequence
  Description of Artificial Sequence: Synthetic oligonucleotide
cuaugggggcaucggcaug

SEQ ID NO: 126394 - RNA, 19 nt, Artificial Sequence
  Description of Artificial Sequence: Synthetic oligonucleotide
ggucauaggacacgaaauc

SEQ ID NO: 126395 - RNA, 19 nt, Artificial Sequence
  Description of Artificial Sequence: Synthetic oligonucleotide
cacccauggcuucgaugac

SEQ ID NO: 126396 - RNA, 19 nt, Artificial Sequence
  Description of Artificial Sequence: Synthetic oligonucleotide
caauggcagaaacuuuaac

SEQ ID NO: 126397 - RNA, 19 nt, Artificial Sequence
  Description of Artificial Sequence: Synthetic oligonucleotide
caaagauggagaccucguu

SEQ ID NO: 126398 - RNA, 19 nt, Artificial Sequence
  Description of Artificial Sequence: Synthetic oligonucleotide
ugacugguggacucaacag

SEQ ID NO: 126399 - RNA, 19 nt, Artificial Sequence
  Description of Artificial Sequence: Synthetic oligonucleotide
gucugcaaguaacuuuaag

SEQ ID NO: 126400 - RNA, 19 nt, Artificial Sequence
  Description of Artificial Sequence: Synthetic oligonucleotide
ggagcaaucccagugcaug

SEQ ID NO: 126401 - RNA, 19 nt, Artificial Sequence
  Description of Artificial Sequence: Synthetic oligonucleotide
gguguaucaguauggaaac

SEQ ID NO: 126402 - RNA, 19 nt, Artificial Sequence
  Description of Artificial Sequence: Synthetic oligonucleotide
cuuuuccugggaccuggca

SEQ ID NO: 126403 - RNA, 19 nt, Artificial Sequence
  Description of Artificial Sequence: Synthetic oligonucleotide
agguggacagcaccuuaau

SEQ ID NO: 126404 - RNA, 19 nt, Artificial Sequence
  Description of Artificial Sequence: Synthetic oligonucleotide
uggaauuaauacacuggga

SEQ ID NO: 126405 - RNA, 19 nt, Artificial Sequence
  Description of Artificial Sequence: Synthetic oligonucleotide
agaaaacauugcugauaau

SEQ ID NO: 126406 - RNA, 19 nt, Artificial Sequence
  Description of Artificial Sequence: Synthetic oligonucleotide
uggaggucuuggucaagca

SEQ ID NO: 126407 - RNA, 19 nt, Artificial Sequence
  Description of Artificial Sequence: Synthetic oligonucleotide
auacagagccuaucagaau

SEQ ID NO: 126408 - RNA, 19 nt, Artificial Sequence
  Description of Artificial Sequence: Synthetic oligonucleotide
uuauauuaaaaagaauggc

SEQ ID NO: 126409 - RNA, 19 nt, Artificial Sequence
  Description of Artificial Sequence: Synthetic oligonucleotide
cgaagaaaaauuacuuccu

SEQ ID NO: 126410 - RNA, 19 nt, Artificial Sequence
  Description of Artificial Sequence: Synthetic oligonucleotide
uggacuugaccuaaaucac

SEQ ID NO: 126411 - RNA, 19 nt, Artificial Sequence
  Description of Artificial Sequence: Synthetic oligonucleotide
caaacaacuauuuuucuug

SEQ ID NO: 126412 - RNA, 19 nt, Artificial Sequence
  Description of Artificial Sequence: Synthetic oligonucleotide
gaacuuugcacaggugugg

SEQ ID NO: 126413 - RNA, 19 nt, Artificial Sequence
  Description of Artificial Sequence: Synthetic oligonucleotide
guguggaaccuauaggcca

SEQ ID NO: 126414 - RNA, 19 nt, Artificial Sequence
  Description of Artificial Sequence: Synthetic oligonucleotide
agaguaugcgguuaacucc

SEQ ID NO: 126415 - RNA, 19 nt, Artificial Sequence
  Description of Artificial Sequence: Synthetic oligonucleotide
cauuaaaacagaugugcac

SEQ ID NO: 126416 - RNA, 19 nt, Artificial Sequence
  Description of Artificial Sequence: Synthetic oligonucleotide
caguccaggcaauuucagg

SEQ ID NO: 126417 - RNA, 19 nt, Artificial Sequence
  Description of Artificial Sequence: Synthetic oligonucleotide
gauuauugggacuuugcag

SEQ ID NO: 126418 - RNA, 19 nt, Artificial Sequence
  Description of Artificial Sequence: Synthetic oligonucleotide
gaacucugcagaguuuuca

SEQ ID NO: 126419 - RNA, 19 nt, Artificial Sequence
  Description of Artificial Sequence: Synthetic oligonucleotide
agaagccuuucacugccgc

SEQ ID NO: 126420 - RNA, 19 nt, Artificial Sequence
  Description of Artificial Sequence: Synthetic oligonucleotide
caagaauucauacaugaau

SEQ ID NO: 126421 - RNA, 19 nt, Artificial Sequence
  Description of Artificial Sequence: Synthetic oligonucleotide
uccagaaaagaagugccgg

SEQ ID NO: 126422 - RNA, 19 nt, Artificial Sequence
  Description of Artificial Sequence: Synthetic oligonucleotide
gguuuggugaucuucaaaa

SEQ ID NO: 126423 - RNA, 19 nt, Artificial Sequence
  Description of Artificial Sequence: Synthetic oligonucleotide
agaagcauugcagcccuug

SEQ ID NO: 126424 - RNA, 19 nt, Artificial Sequence
  Description of Artificial Sequence: Synthetic oligonucleotide
ggcuagacuugccaacacc

SEQ ID NO: 126425 - RNA, 19 nt, Artificial Sequence
  Description of Artificial Sequence: Synthetic oligonucleotide
cacagaaauggggaauucu

SEQ ID NO: 126426 - RNA, 19 nt, Artificial Sequence
  Description of Artificial Sequence: Synthetic oligonucleotide
ucuaaucgaaagaaaaugg

SEQ ID NO: 126427 - RNA, 19 nt, Artificial Sequence
  Description of Artificial Sequence: Synthetic oligonucleotide
ggcccuaggggucacugua

SEQ ID NO: 126428 - RNA, 19 nt, Artificial Sequence
  Description of Artificial Sequence: Synthetic oligonucleotide
acugacuugagggugauua

SEQ ID NO: 126429 - RNA, 19 nt, Artificial Sequence
  Description of Artificial Sequence: Synthetic oligonucleotide
aacagagagggcaccauca

SEQ ID NO: 126430 - RNA, 19 nt, Artificial Sequence
  Description of Artificial Sequence: Synthetic oligonucleotide
acaauacagauaacauuag

SEQ ID NO: 126431 - RNA, 19 nt, Artificial Sequence
  Description of Artificial Sequence: Synthetic oligonucleotide
gguuguccuagaaagggug

SEQ ID NO: 126432 - RNA, 19 nt, Artificial Sequence
  Description of Artificial Sequence: Synthetic oligonucleotide
guggagggaggaagggggu

SEQ ID NO: 126433 - RNA, 19 nt, Artificial Sequence
  Description of Artificial Sequence: Synthetic oligonucleotide
ucuaaggucuaucaaguca

SEQ ID NO: 126434 - RNA, 19 nt, Artificial Sequence
  Description of Artificial Sequence: Synthetic oligonucleotide
aaucauuucucacugugua

SEQ ID NO: 126435 - RNA, 19 nt, Artificial Sequence
  Description of Artificial Sequence: Synthetic oligonucleotide
acauaaugcuuaauuucua

SEQ ID NO: 126436 - RNA, 19 nt, Artificial Sequence
  Description of Artificial Sequence: Synthetic oligonucleotide
aaagauaauauuacuguuu

SEQ ID NO: 126437 - RNA, 19 nt, Artificial Sequence
  Description of Artificial Sequence: Synthetic oligonucleotide
uauuucuguuucucauaug

SEQ ID NO: 126438 - RNA, 19 nt, Artificial Sequence
  Description of Artificial Sequence: Synthetic oligonucleotide
ggucuaccaguuugcugau

SEQ ID NO: 126439 - RNA, 19 nt, Artificial Sequence
  Description of Artificial Sequence: Synthetic oligonucleotide
ugucccuagaaaacaaugc

SEQ ID NO: 126440 - RNA, 19 nt, Artificial Sequence
  Description of Artificial Sequence: Synthetic oligonucleotide
caaaaccuuugagguagac

SEQ ID NO: 126441 - RNA, 19 nt, Artificial Sequence
  Description of Artificial Sequence: Synthetic oligonucleotide
ccaggauuucuaaucaaaa

SEQ ID NO: 126442 - RNA, 19 nt, Artificial Sequence
  Description of Artificial Sequence: Synthetic oligonucleotide
agggaaaagaagauguuga

SEQ ID NO: 126443 - RNA, 19 nt, Artificial Sequence
  Description of Artificial Sequence: Synthetic oligonucleotide
aagaauacaguuaggcacc

SEQ ID NO: 126444 - RNA, 19 nt, Artificial Sequence
  Description of Artificial Sequence: Synthetic oligonucleotide
cagaagaacaguaggugac

SEQ ID NO: 126445 - RNA, 19 nt, Artificial Sequence
  Description of Artificial Sequence: Synthetic oligonucleotide
cacuauaguuuaaaacaca

SEQ ID NO: 126446 - RNA, 19 nt, Artificial Sequence
  Description of Artificial Sequence: Synthetic oligonucleotide
auugccuaacuacuaguuu

SEQ ID NO: 126447 - RNA, 19 nt, Artificial Sequence
  Description of Artificial Sequence: Synthetic oligonucleotide
uuuacuuuuauuugcaaca

SEQ ID NO: 126448 - RNA, 19 nt, Artificial Sequence
  Description of Artificial Sequence: Synthetic oligonucleotide
auuuacaguccuucaaaau

SEQ ID NO: 126449 - RNA, 19 nt, Artificial Sequence
  Description of Artificial Sequence: Synthetic oligonucleotide
uccuuccaaagaauucuua

SEQ ID NO: 126450 - RNA, 19 nt, Artificial Sequence
  Description of Artificial Sequence: Synthetic oligonucleotide
auacacauuggggccuugg

SEQ ID NO: 126451 - RNA, 19 nt, Artificial Sequence
  Description of Artificial Sequence: Synthetic oligonucleotide
gagcuuacauaguuuuaaa

SEQ ID NO: 126452 - RNA, 19 nt, Artificial Sequence
  Description of Artificial Sequence: Synthetic oligonucleotide
acucauuuuugccauacau

SEQ ID NO: 126453 - RNA, 19 nt, Artificial Sequence
  Description of Artificial Sequence: Synthetic oligonucleotide
ucaguuauucauucuguga

SEQ ID NO: 126454 - RNA, 19 nt, Artificial Sequence
  Description of Artificial Sequence: Synthetic oligonucleotide
aucauuuauuuuaagcacu

SEQ ID NO: 126455 - RNA, 19 nt, Artificial Sequence
  Description of Artificial Sequence: Synthetic oligonucleotide
ucuuaaagcaaaaaaugaa

SEQ ID NO: 126456 - RNA, 19 nt, Artificial Sequence
  Description of Artificial Sequence: Synthetic oligonucleotide
augucuaaaauuguuuuuu

SEQ ID NO: 126457 - RNA, 19 nt, Artificial Sequence
  Description of Artificial Sequence: Synthetic oligonucleotide
uguuguaccugcuuugacu

SEQ ID NO: 126458 - RNA, 19 nt, Artificial Sequence
  Description of Artificial Sequence: Synthetic oligonucleotide
ugaugcugagauucuucag

SEQ ID NO: 126459 - RNA, 19 nt, Artificial Sequence
  Description of Artificial Sequence: Synthetic oligonucleotide
ggcuuccugcaauuuucua

SEQ ID NO: 126460 - RNA, 19 nt, Artificial Sequence
  Description of Artificial Sequence: Synthetic oligonucleotide
aagcaauuucuugcucuau

SEQ ID NO: 126461 - RNA, 19 nt, Artificial Sequence
  Description of Artificial Sequence: Synthetic oligonucleotide
ucucucaaaacuugguauu

SEQ ID NO: 126462 - RNA, 19 nt, Artificial Sequence
  Description of Artificial Sequence: Synthetic oligonucleotide
uuuucagagauuuauauaa

SEQ ID NO: 126463 - RNA, 19 nt, Artificial Sequence
  Description of Artificial Sequence: Synthetic oligonucleotide
aauguaaaaauaauaauuu

SEQ ID NO: 126464 - RNA, 19 nt, Artificial Sequence
  Description of Artificial Sequence: Synthetic oligonucleotide
uuuauauuuaauuauuaac

SEQ ID NO: 126465 - RNA, 19 nt, Artificial Sequence
  Description of Artificial Sequence: Synthetic oligonucleotide
cuacauuuaugaguaacua

SEQ ID NO: 126466 - RNA, 19 nt, Artificial Sequence
  Description of Artificial Sequence: Synthetic oligonucleotide
auuauuauagguaaucaau

SEQ ID NO: 126467 - RNA, 19 nt, Artificial Sequence
  Description of Artificial Sequence: Synthetic oligonucleotide
ugaauauugaaguuucagc

SEQ ID NO: 126468 - RNA, 19 nt, Artificial Sequence
  Description of Artificial Sequence: Synthetic oligonucleotide
cuuaaaauaaacaguugug

SEQ ID NO: 126469 - RNA, 19 nt, Artificial Sequence
  Description of Artificial Sequence: Synthetic oligonucleotide
gaaccaagaucuauaaagc

SEQ ID NO: 126470 - RNA, 19 nt, Artificial Sequence
  Description of Artificial Sequence: Synthetic oligonucleotide
cgauauacagaugaaaauu

SEQ ID NO: 126471 - RNA, 19 nt, Artificial Sequence
  Description of Artificial Sequence: Synthetic oligonucleotide
uugagacuauuuaaacuua

SEQ ID NO: 126472 - RNA, 19 nt, Artificial Sequence
  Description of Artificial Sequence: Synthetic oligonucleotide
auaaaucauauugaugaaa

SEQ ID NO: 126473 - RNA, 19 nt, Artificial Sequence
  Description of Artificial Sequence: Synthetic oligonucleotide
aagauuuaagcacaaacuu

SEQ ID NO: 126474 - RNA, 19 nt, Artificial Sequence
  Description of Artificial Sequence: Synthetic oligonucleotide
uuaggguaaaaauugccau

SEQ ID NO: 126475 - RNA, 19 nt, Artificial Sequence
  Description of Artificial Sequence: Synthetic oligonucleotide
uuggacaguugucuagaga

SEQ ID NO: 126476 - RNA, 19 nt, Artificial Sequence
  Description of Artificial Sequence: Synthetic oligonucleotide
auauauauacuugugguuu

SEQ ID NO: 126477 - RNA, 19 nt, Artificial Sequence
  Description of Artificial Sequence: Synthetic oligonucleotide
uucaaauuggacuuucaaa

SEQ ID NO: 126478 - RNA, 19 nt, Artificial Sequence
  Description of Artificial Sequence: Synthetic oligonucleotide
aauuaaaucugucccugag

SEQ ID NO: 126479 - RNA, 19 nt, Artificial Sequence
  Description of Artificial Sequence: Synthetic oligonucleotide
gagugucucugauaaaagg

SEQ ID NO: 126480 - RNA, 19 nt, Artificial Sequence
  Description of Artificial Sequence: Synthetic oligonucleotide
ggcaaaucugcaccuaugu

SEQ ID NO: 126481 - RNA, 19 nt, Artificial Sequence
  Description of Artificial Sequence: Synthetic oligonucleotide
uagcucugcaucuccuguc

SEQ ID NO: 126482 - RNA, 19 nt, Artificial Sequence
  Description of Artificial Sequence: Synthetic oligonucleotide
cuuuucagguuugucauca

SEQ ID NO: 126483 - RNA, 19 nt, Artificial Sequence
  Description of Artificial Sequence: Synthetic oligonucleotide
agauggaaauauuuugaua

SEQ ID NO: 126484 - RNA, 19 nt, Artificial Sequence
  Description of Artificial Sequence: Synthetic oligonucleotide
aauaaauugaaauugugaa

SEQ ID NO: 126485 - RNA, 19 nt, Artificial Sequence
  Description of Artificial Sequence: Synthetic oligonucleotide
acucauugcucccuaagac

SEQ ID NO: 126486 - RNA, 19 nt, Artificial Sequence
  Description of Artificial Sequence: Synthetic oligonucleotide
cugugacaacugucuaacu

SEQ ID NO: 126487 - RNA, 19 nt, Artificial Sequence
  Description of Artificial Sequence: Synthetic oligonucleotide
uuuagaagugcauuucuga

SEQ ID NO: 126488 - RNA, 19 nt, Artificial Sequence
  Description of Artificial Sequence: Synthetic oligonucleotide
aauagaaaugggaggccuc

SEQ ID NO: 126489 - RNA, 19 nt, Artificial Sequence
  Description of Artificial Sequence: Synthetic oligonucleotide
cugauggaccuucuagaau

SEQ ID NO: 126490 - RNA, 19 nt, Artificial Sequence
  Description of Artificial Sequence: Synthetic oligonucleotide
uuauaagucacaaagaguu

SEQ ID NO: 126491 - RNA, 19 nt, Artificial Sequence
  Description of Artificial Sequence: Synthetic oligonucleotide
ucuggaaaagaacuguuua

SEQ ID NO: 126492 - RNA, 19 nt, Artificial Sequence
  Description of Artificial Sequence: Synthetic oligonucleotide
acugcuugauaggaauuca

SEQ ID NO: 126493 - RNA, 19 nt, Artificial Sequence
  Description of Artificial Sequence: Synthetic oligonucleotide
aucuuuugaggcuucuguu

SEQ ID NO: 126494 - RNA, 19 nt, Artificial Sequence
  Description of Artificial Sequence: Synthetic oligonucleotide
uccucucuuuuccuguugu

SEQ ID NO: 126495 - RNA, 19 nt, Artificial Sequence
  Description of Artificial Sequence: Synthetic oligonucleotide
uauugacuauuuucguuca

SEQ ID NO: 126496 - RNA, 19 nt, Artificial Sequence
  Description of Artificial Sequence: Synthetic oligonucleotide
auuacuugauuaagauuuu

SEQ ID NO: 126497 - RNA, 19 nt, Artificial Sequence
  Description of Artificial Sequence: Synthetic oligonucleotide
uacaaaagaggagcacuuc

SEQ ID NO: 126498 - RNA, 19 nt, Artificial Sequence
  Description of Artificial Sequence: Synthetic oligonucleotide
ccaaaauucuuauuuuucc

SEQ ID NO: 126499 - RNA, 19 nt, Artificial Sequence
  Description of Artificial Sequence: Synthetic oligonucleotide
cuaacaaaagaugaaagca

SEQ ID NO: 126500 - RNA, 19 nt, Artificial Sequence
  Description of Artificial Sequence: Synthetic oligonucleotide
agggaauuucuaucuaaau

SEQ ID NO: 126501 - RNA, 19 nt, Artificial Sequence
  Description of Artificial Sequence: Synthetic oligonucleotide
ugaugaguauuaguucccu

SEQ ID NO: 126502 - RNA, 19 nt, Artificial Sequence
  Description of Artificial Sequence: Synthetic oligonucleotide
ugucucuugaaaaaugccc

SEQ ID NO: 126503 - RNA, 19 nt, Artificial Sequence
  Description of Artificial Sequence: Synthetic oligonucleotide
cauuugccuuuaaaaaaaa

SEQ ID NO: 126504 - RNA, 19 nt, Artificial Sequence
  Description of Artificial Sequence: Synthetic oligonucleotide
aaaguuacagaaauacuau

SEQ ID NO: 126505 - RNA, 19 nt, Artificial Sequence
  Description of Artificial Sequence: Synthetic oligonucleotide
uaacauauguacauaaauu

SEQ ID NO: 126506 - RNA, 19 nt, Artificial Sequence
  Description of Artificial Sequence: Synthetic oligonucleotide
ugcauaaagcauaaguaua

SEQ ID NO: 126507 - RNA, 19 nt, Artificial Sequence
  Description of Artificial Sequence: Synthetic oligonucleotide
acaguucaauaaacuuaac

SEQ ID NO: 126508 - RNA, 19 nt, Artificial Sequence
  Description of Artificial Sequence: Synthetic oligonucleotide
cuuuaacugaacaauggcc

SEQ ID NO: 126509 - RNA, 19 nt, Artificial Sequence
  Description of Artificial Sequence: Synthetic oligonucleotide
ccuguagccagcaccugua

SEQ ID NO: 126510 - RNA, 19 nt, Artificial Sequence
  Description of Artificial Sequence: Synthetic oligonucleotide
aagaaacagagcaguacca

SEQ ID NO: 126511 - RNA, 19 nt, Artificial Sequence
  Description of Artificial Sequence: Synthetic oligonucleotide
agcgcucuaaaagcaccuc

SEQ ID NO: 126512 - RNA, 19 nt, Artificial Sequence
  Description of Artificial Sequence: Synthetic oligonucleotide
ccuugucacuuuauuacuc

SEQ ID NO: 126513 - RNA, 19 nt, Artificial Sequence
  Description of Artificial Sequence: Synthetic oligonucleotide
cccagaacaacaacuaucc

SEQ ID NO: 126514 - RNA, 19 nt, Artificial Sequence
  Description of Artificial Sequence: Synthetic oligonucleotide
cugacuucuaauaucauuc

SEQ ID NO: 126515 - RNA, 19 nt, Artificial Sequence
  Description of Artificial Sequence: Synthetic oligonucleotide
cacuagcuuugccugguuu

SEQ ID NO: 126516 - RNA, 19 nt, Artificial Sequence
  Description of Artificial Sequence: Synthetic oligonucleotide
uugucuuuuaugcagauag

SEQ ID NO: 126517 - RNA, 19 nt, Artificial Sequence
  Description of Artificial Sequence: Synthetic oligonucleotide
gaaucaaucaguauguauu

SEQ ID NO: 126518 - RNA, 19 nt, Artificial Sequence
  Description of Artificial Sequence: Synthetic oligonucleotide
ucuuuugugccuggcuucu

SEQ ID NO: 126519 - RNA, 19 nt, Artificial Sequence
  Description of Artificial Sequence: Synthetic oligonucleotide
uuucucucagccuuacauu

SEQ ID NO: 126520 - RNA, 19 nt, Artificial Sequence
  Description of Artificial Sequence: Synthetic oligonucleotide
uugugagauuccucuguau

SEQ ID NO: 126521 - RNA, 19 nt, Artificial Sequence
  Description of Artificial Sequence: Synthetic oligonucleotide
uugugcugauuguggaucu

SEQ ID NO: 126522 - RNA, 19 nt, Artificial Sequence
  Description of Artificial Sequence: Synthetic oligonucleotide
uuuucauucucauugcaga

SEQ ID NO: 126523 - RNA, 19 nt, Artificial Sequence
  Description of Artificial Sequence: Synthetic oligonucleotide
aauaauguucuauuguggg

SEQ ID NO: 126524 - RNA, 19 nt, Artificial Sequence
  Description of Artificial Sequence: Synthetic oligonucleotide
gacuuauuacaauuuguuc

SEQ ID NO: 126525 - RNA, 19 nt, Artificial Sequence
  Description of Artificial Sequence: Synthetic oligonucleotide
cauccuauuguugaugggc

SEQ ID NO: 126526 - RNA, 19 nt, Artificial Sequence
  Description of Artificial Sequence: Synthetic oligonucleotide
cacuugagaacuuuccauu

SEQ ID NO: 126527 - RNA, 19 nt, Artificial Sequence
  Description of Artificial Sequence: Synthetic oligonucleotide
uuuggcgcuauuacaaaua

SEQ ID NO: 126528 - RNA, 19 nt, Artificial Sequence
  Description of Artificial Sequence: Synthetic oligonucleotide
agugcaacuaugaauguac

SEQ ID NO: 126529 - RNA, 19 nt, Artificial Sequence
  Description of Artificial Sequence: Synthetic oligonucleotide
cugcauguuaccaucuuac

SEQ ID NO: 126530 - RNA, 19 nt, Artificial Sequence
  Description of Artificial Sequence: Synthetic oligonucleotide
cuugagccuuuaauggacu

SEQ ID NO: 126531 - RNA, 19 nt, Artificial Sequence
  Description of Artificial Sequence: Synthetic oligonucleotide
uuauuucuucaaauccuuc

SEQ ID NO: 126532 - RNA, 19 nt, Artificial Sequence
  Description of Artificial Sequence: Synthetic oligonucleotide
ccaaaaauuauuauaagca

SEQ ID NO: 126533 - RNA, 19 nt, Artificial Sequence
  Description of Artificial Sequence: Synthetic oligonucleotide
auugaaauuauaguuucaa

SEQ ID NO: 126534 - RNA, 19 nt, Artificial Sequence
  Description of Artificial Sequence: Synthetic oligonucleotide
agccaacuguggauacccu

SEQ ID NO: 126535 - RNA, 19 nt, Artificial Sequence
  Description of Artificial Sequence: Synthetic oligonucleotide
uuacccuuuccuccuuuau

SEQ ID NO: 126536 - RNA, 19 nt, Artificial Sequence
  Description of Artificial Sequence: Synthetic oligonucleotide
ucacaaccaccguuacaag

SEQ ID NO: 126537 - RNA, 19 nt, Artificial Sequence
  Description of Artificial Sequence: Synthetic oligonucleotide
guauacuuauauuucccua

SEQ ID NO: 126538 - RNA, 19 nt, Artificial Sequence
  Description of Artificial Sequence: Synthetic oligonucleotide
aaaauacauuuaaaacuua

SEQ ID NO: 126539 - RNA, 19 nt, Artificial Sequence
  Description of Artificial Sequence: Synthetic oligonucleotide
accuaagugacauuuguag

SEQ ID NO: 126540 - RNA, 19 nt, Artificial Sequence
  Description of Artificial Sequence: Synthetic oligonucleotide
guuggaguaauaggagcuu

SEQ ID NO: 126541 - RNA, 19 nt, Artificial Sequence
  Description of Artificial Sequence: Synthetic oligonucleotide
uccagcucuaauaaaacag

SEQ ID NO: 126542 - RNA, 19 nt, Artificial Sequence
  Description of Artificial Sequence: Synthetic oligonucleotide
gcugucucuaacuuauuuu

SEQ ID NO: 126543 - RNA, 19 nt, Artificial Sequence
  Description of Artificial Sequence: Synthetic oligonucleotide
uauuuccaucaugucagag

SEQ ID NO: 126544 - RNA, 19 nt, Artificial Sequence
  Description of Artificial Sequence: Synthetic oligonucleotide
gcaggugaagagccagaag

SEQ ID NO: 126545 - RNA, 19 nt, Artificial Sequence
  Description of Artificial Sequence: Synthetic oligonucleotide
gugaagagugacuaguaca

SEQ ID NO: 126546 - RNA, 19 nt, Artificial Sequence
  Description of Artificial Sequence: Synthetic oligonucleotide
aaauuauaaaaagccacua

SEQ ID NO: 126547 - RNA, 19 nt, Artificial Sequence
  Description of Artificial Sequence: Synthetic oligonucleotide
agacucuucacuguuagcu

SEQ ID NO: 126548 - RNA, 19 nt, Artificial Sequence
  Description of Artificial Sequence: Synthetic oligonucleotide
uuuuuaaaacauuaggcuc

SEQ ID NO: 126549 - RNA, 19 nt, Artificial Sequence
  Description of Artificial Sequence: Synthetic oligonucleotide
cccaucccuauggaggaac

SEQ ID NO: 126550 - RNA, 19 nt, Artificial Sequence
  Description of Artificial Sequence: Synthetic oligonucleotide
caacucuccagugccugga

SEQ ID NO: 126551 - RNA, 19 nt, Artificial Sequence
  Description of Artificial Sequence: Synthetic oligonucleotide
auccccucugucuacaaau

SEQ ID NO: 126552 - RNA, 19 nt, Artificial Sequence
  Description of Artificial Sequence: Synthetic oligonucleotide
uauaagauuuucugggccu

SEQ ID NO: 126553 - RNA, 19 nt, Artificial Sequence
  Description of Artificial Sequence: Synthetic oligonucleotide
uaaaggauagaucaaaguc

SEQ ID NO: 126554 - RNA, 19 nt, Artificial Sequence
  Description of Artificial Sequence: Synthetic oligonucleotide
caaaaauagcaaugccucc

SEQ ID NO: 126555 - RNA, 19 nt, Artificial Sequence
  Description of Artificial Sequence: Synthetic oligonucleotide
ccuaucccucacacaucca

SEQ ID NO: 126556 - RNA, 19 nt, Artificial Sequence
  Description of Artificial Sequence: Synthetic oligonucleotide
agacaucaugaauuuuaca

SEQ ID NO: 126557 - RNA, 19 nt, Artificial Sequence
  Description of Artificial Sequence: Synthetic oligonucleotide
augguacucuuguugaguu

SEQ ID NO: 126558 - RNA, 19 nt, Artificial Sequence
  Description of Artificial Sequence: Synthetic oligonucleotide
ucuguagagccuucugaug

SEQ ID NO: 126559 - RNA, 19 nt, Artificial Sequence
  Description of Artificial Sequence: Synthetic oligonucleotide
gucucuaaagcacuaccga

SEQ ID NO: 126560 - RNA, 19 nt, Artificial Sequence
  Description of Artificial Sequence: Synthetic oligonucleotide
auucuuuggaguugucaca

SEQ ID NO: 126561 - RNA, 19 nt, Artificial Sequence
  Description of Artificial Sequence: Synthetic oligonucleotide
aucagauaagacauaucuc

SEQ ID NO: 126562 - RNA, 19 nt, Artificial Sequence
  Description of Artificial Sequence: Synthetic oligonucleotide
cuaauuccauccauaaauc

SEQ ID NO: 126563 - RNA, 19 nt, Artificial Sequence
  Description of Artificial Sequence: Synthetic oligonucleotide
ccaguucuacuauggcuga

SEQ ID NO: 126564 - RNA, 19 nt, Artificial Sequence
  Description of Artificial Sequence: Synthetic oligonucleotide
aguucuggucaaagaaaga

SEQ ID NO: 126565 - RNA, 19 nt, Artificial Sequence
  Description of Artificial Sequence: Synthetic oligonucleotide
aaaguuuagaagcugagac

SEQ ID NO: 126566 - RNA, 19 nt, Artificial Sequence
  Description of Artificial Sequence: Synthetic oligonucleotide
cacaaaggguugggagcug

SEQ ID NO: 126567 - RNA, 19 nt, Artificial Sequence
  Description of Artificial Sequence: Synthetic oligonucleotide
gaugaaacucacaaaugau

SEQ ID NO: 126568 - RNA, 19 nt, Artificial Sequence
  Description of Artificial Sequence: Synthetic oligonucleotide
ugguaggaagaagcucucg

SEQ ID NO: 126569 - RNA, 19 nt, Artificial Sequence
  Description of Artificial Sequence: Synthetic oligonucleotide
gacaauacccguuggcaag

SEQ ID NO: 126570 - RNA, 19 nt, Artificial Sequence
  Description of Artificial Sequence: Synthetic oligonucleotide
ggagucugccuccaugcug

SEQ ID NO: 126571 - RNA, 19 nt, Artificial Sequence
  Description of Artificial Sequence: Synthetic oligonucleotide
gcaguguucgaguggauug

SEQ ID NO: 126572 - RNA, 19 nt, Artificial Sequence
  Description of Artificial Sequence: Synthetic oligonucleotide
guaggugcaagauggaaag

SEQ ID NO: 126573 - RNA, 19 nt, Artificial Sequence
  Description of Artificial Sequence: Synthetic oligonucleotide
ggauuguaggugcaagcug

SEQ ID NO: 126574 - RNA, 19 nt, Artificial Sequence
  Description of Artificial Sequence: Synthetic oligonucleotide
guccagagaaaagaguccu

SEQ ID NO: 126575 - RNA, 19 nt, Artificial Sequence
  Description of Artificial Sequence: Synthetic oligonucleotide
uuguuccagcccuauucug

SEQ ID NO: 126576 - RNA, 19 nt, Artificial Sequence
  Description of Artificial Sequence: Synthetic oligonucleotide
gccacuccugacaggguga

SEQ ID NO: 126577 - RNA, 19 nt, Artificial Sequence
  Description of Artificial Sequence: Synthetic oligonucleotide
accuuggguauuugcaaua

SEQ ID NO: 126578 - RNA, 19 nt, Artificial Sequence
  Description of Artificial Sequence: Synthetic oligonucleotide
auuccuuugggccucugcu

SEQ ID NO: 126579 - RNA, 19 nt, Artificial Sequence
  Description of Artificial Sequence: Synthetic oligonucleotide
uucucucaccuaaaaaaag

SEQ ID NO: 126580 - RNA, 19 nt, Artificial Sequence
  Description of Artificial Sequence: Synthetic oligonucleotide
gagaauuagauuauauugg

SEQ ID NO: 126581 - RNA, 19 nt, Artificial Sequence
  Description of Artificial Sequence: Synthetic oligonucleotide
gugguucucagcaagagaa

SEQ ID NO: 126582 - RNA, 19 nt, Artificial Sequence
  Description of Artificial Sequence: Synthetic oligonucleotide
aggaguauguguccaaugc

SEQ ID NO: 126583 - RNA, 19 nt, Artificial Sequence
  Description of Artificial Sequence: Synthetic oligonucleotide
cugccuucccaugaaucug

SEQ ID NO: 126584 - RNA, 19 nt, Artificial Sequence
  Description of Artificial Sequence: Synthetic oligonucleotide
gucucccaguuaugaauca

SEQ ID NO: 126585 - RNA, 19 nt, Artificial Sequence
  Description of Artificial Sequence: Synthetic oligonucleotide
agugggcaggauaaacuga

SEQ ID NO: 126586 - RNA, 19 nt, Artificial Sequence
  Description of Artificial Sequence: Synthetic oligonucleotide
aaaacucccauuuacgugu

SEQ ID NO: 126587 - RNA, 19 nt, Artificial Sequence
  Description of Artificial Sequence: Synthetic oligonucleotide
ucugaaucgagugagacaa

SEQ ID NO: 126588 - RNA, 19 nt, Artificial Sequence
  Description of Artificial Sequence: Synthetic oligonucleotide
aaauuuuaguccaaauaac

SEQ ID NO: 126589 - RNA, 19 nt, Artificial Sequence
  Description of Artificial Sequence: Synthetic oligonucleotide
caaguaccaaaguuuuauc

SEQ ID NO: 126590 - RNA, 19 nt, Artificial Sequence
  Description of Artificial Sequence: Synthetic oligonucleotide
caaguuugggucugugcug

SEQ ID NO: 126591 - RNA, 19 nt, Artificial Sequence
  Description of Artificial Sequence: Synthetic oligonucleotide
gcuguuacuguuaaccauu

SEQ ID NO: 126592 - RNA, 19 nt, Artificial Sequence
  Description of Artificial Sequence: Synthetic oligonucleotide
uuaaguggggcaaaaccuu

SEQ ID NO: 126593 - RNA, 19 nt, Artificial Sequence
  Description of Artificial Sequence: Synthetic oligonucleotide
ugcuaauuuucucaaaagc

SEQ ID NO: 126594 - RNA, 19 nt, Artificial Sequence
  Description of Artificial Sequence: Synthetic oligonucleotide
cauuuaucauucuuguugc

SEQ ID NO: 126595 - RNA, 19 nt, Artificial Sequence
  Description of Artificial Sequence: Synthetic oligonucleotide
ccacagcuggagcucucaa

SEQ ID NO: 126596 - RNA, 19 nt, Artificial Sequence
  Description of Artificial Sequence: Synthetic oligonucleotide
aacuaaaagacauuuguua

SEQ ID NO: 126597 - RNA, 19 nt, Artificial Sequence
  Description of Artificial Sequence: Synthetic oligonucleotide
auuuuggaaagaagaaaga

SEQ ID NO: 126598 - RNA, 19 nt, Artificial Sequence
  Description of Artificial Sequence: Synthetic oligonucleotide
acucuauucucaaaguuuc

SEQ ID NO: 126599 - RNA, 19 nt, Artificial Sequence
  Description of Artificial Sequence: Synthetic oligonucleotide
ccuaaucagaaauuuuuau

SEQ ID NO: 126600 - RNA, 19 nt, Artificial Sequence
  Description of Artificial Sequence: Synthetic oligonucleotide
ucaguuuccagucucaaaa

SEQ ID NO: 126601 - RNA, 19 nt, Artificial Sequence
  Description of Artificial Sequence: Synthetic oligonucleotide
aauacaaaauaaaaacaaa

SEQ ID NO: 126602 - RNA, 19 nt, Artificial Sequence
  Description of Artificial Sequence: Synthetic oligonucleotide
acguuuuuaauacuauugc

SEQ ID NO: 126603 - RNA, 19 nt, Artificial Sequence
  Description of Artificial Sequence: Synthetic oligonucleotide
cuuuuaugccuagucaacu

SEQ ID NO: 126604 - RNA, 19 nt, Artificial Sequence
  Description of Artificial Sequence: Synthetic oligonucleotide
gagagcgccgagacgcgcg

SEQ ID NO: 126605 - RNA, 19 nt, Artificial Sequence
  Description of Artificial Sequence: Synthetic oligonucleotide
ggggcgcggagaugugcaa

SEQ ID NO: 126606 - RNA, 19 nt, Artificial Sequence
  Description of Artificial Sequence: Synthetic oligonucleotide
aguggcgaagcuugaccga

SEQ ID NO: 126607 - RNA, 19 nt, Artificial Sequence
  Description of Artificial Sequence: Synthetic oligonucleotide
agagcaggcuggagcagcc

SEQ ID NO: 126608 - RNA, 19 nt, Artificial Sequence
  Description of Artificial Sequence: Synthetic oligonucleotide
cgcccaacuccuggcgcgg

SEQ ID NO: 126609 - RNA, 19 nt, Artificial Sequence
  Description of Artificial Sequence: Synthetic oligonucleotide
ggaucugcugaggggucac

SEQ ID NO: 126610 - RNA, 19 nt, Artificial Sequence
  Description of Artificial Sequence: Synthetic oligonucleotide
cgauuuuaggugaugggca

SEQ ID NO: 126611 - RNA, 19 nt, Artificial Sequence
  Description of Artificial Sequence: Synthetic oligonucleotide
aagucagaaagucagaugg

SEQ ID NO: 126612 - RNA, 19 nt, Artificial Sequence
  Description of Artificial Sequence: Synthetic oligonucleotide
gauauaacugauaucaaca

SEQ ID NO: 126613 - RNA, 19 nt, Artificial Sequence
  Description of Artificial Sequence: Synthetic oligonucleotide
acuccaaagccaaagaaga

SEQ ID NO: 126614 - RNA, 19 nt, Artificial Sequence
  Description of Artificial Sequence: Synthetic oligonucleotide
aaacagcgauggacuccac

SEQ ID NO: 126615 - RNA, 19 nt, Artificial Sequence
  Description of Artificial Sequence: Synthetic oligonucleotide
cuggagaucagccucucgg

SEQ ID NO: 126616 - RNA, 19 nt, Artificial Sequence
  Description of Artificial Sequence: Synthetic oligonucleotide
guccuuguccugcuccuca

SEQ ID NO: 126617 - RNA, 19 nt, Artificial Sequence
  Description of Artificial Sequence: Synthetic oligonucleotide
accaucauagcugugacaa

SEQ ID NO: 126618 - RNA, 19 nt, Artificial Sequence
  Description of Artificial Sequence: Synthetic oligonucleotide
augaucgcacucuaugcaa

SEQ ID NO: 126619 - RNA, 19 nt, Artificial Sequence
  Description of Artificial Sequence: Synthetic oligonucleotide
accuacgaugaugguauuu

SEQ ID NO: 126620 - RNA, 19 nt, Artificial Sequence
  Description of Artificial Sequence: Synthetic oligonucleotide
ugcaagucaucagacugca

SEQ ID NO: 126621 - RNA, 19 nt, Artificial Sequence
  Description of Artificial Sequence: Synthetic oligonucleotide
auaaaaucagcugcucgac

SEQ ID NO: 126622 - RNA, 19 nt, Artificial Sequence
  Description of Artificial Sequence: Synthetic oligonucleotide
cugauccaaaacauggaug

SEQ ID NO: 126623 - RNA, 19 nt, Artificial Sequence
  Description of Artificial Sequence: Synthetic oligonucleotide
gccaccacugagccuugua

SEQ ID NO: 126624 - RNA, 19 nt, Artificial Sequence
  Description of Artificial Sequence: Synthetic oligonucleotide
acagacuuuuucaaauaug

SEQ ID NO: 126625 - RNA, 19 nt, Artificial Sequence
  Description of Artificial Sequence: Synthetic oligonucleotide
gcuugcggaggcugguuga

SEQ ID NO: 126626 - RNA, 19 nt, Artificial Sequence
  Description of Artificial Sequence: Synthetic oligonucleotide
aaacguaaugucauucccg

SEQ ID NO: 126627 - RNA, 19 nt, Artificial Sequence
  Description of Artificial Sequence: Synthetic oligonucleotide
gagaccagcucccguuacg

SEQ ID NO: 126628 - RNA, 19 nt, Artificial Sequence
  Description of Artificial Sequence: Synthetic oligonucleotide
ggcaacuuugacauuuuaa

SEQ ID NO: 126629 - RNA, 19 nt, Artificial Sequence
  Description of Artificial Sequence: Synthetic oligonucleotide
agagaugaacuagaagucg

SEQ ID NO: 126630 - RNA, 19 nt, Artificial Sequence
  Description of Artificial Sequence: Synthetic oligonucleotide
guuuugaaagauguccuuc

SEQ ID NO: 126631 - RNA, 19 nt, Artificial Sequence
  Description of Artificial Sequence: Synthetic oligonucleotide
caagaacccaaaacugaag

SEQ ID NO: 126632 - RNA, 19 nt, Artificial Sequence
  Description of Artificial Sequence: Synthetic oligonucleotide
gauauaguagcagugcaga

SEQ ID NO: 126633 - RNA, 19 nt, Artificial Sequence
  Description of Artificial Sequence: Synthetic oligonucleotide
aaagcaaaagcauuguaca

SEQ ID NO: 126634 - RNA, 19 nt, Artificial Sequence
  Description of Artificial Sequence: Synthetic oligonucleotide
aggucuuguauaaaugaau

SEQ ID NO: 126635 - RNA, 19 nt, Artificial Sequence
  Description of Artificial Sequence: Synthetic oligonucleotide
ucugcuauugauagcagag

SEQ ID NO: 126636 - RNA, 19 nt, Artificial Sequence
  Description of Artificial Sequence: Synthetic oligonucleotide
gguggagaaccucuacuca

SEQ ID NO: 126637 - RNA, 19 nt, Artificial Sequence
  Description of Artificial Sequence: Synthetic oligonucleotide
aaacuguuaccagacauau

SEQ ID NO: 126638 - RNA, 19 nt, Artificial Sequence
  Description of Artificial Sequence: Synthetic oligonucleotide
uauggguggccaguagcaa

SEQ ID NO: 126639 - RNA, 19 nt, Artificial Sequence
  Description of Artificial Sequence: Synthetic oligonucleotide
acagaaaacugggagcaaa

SEQ ID NO: 126640 - RNA, 19 nt, Artificial Sequence
  Description of Artificial Sequence: Synthetic oligonucleotide
aaauauggugcuucuugga

SEQ ID NO: 126641 - RNA, 19 nt, Artificial Sequence
  Description of Artificial Sequence: Synthetic oligonucleotide
acagcugaaaaagcuauug

SEQ ID NO: 126642 - RNA, 19 nt, Artificial Sequence
  Description of Artificial Sequence: Synthetic oligonucleotide
gcacaacugaauucuaaau

SEQ ID NO: 126643 - RNA, 19 nt, Artificial Sequence
  Description of Artificial Sequence: Synthetic oligonucleotide
uaugggaaaaaaguccuua

SEQ ID NO: 126644 - RNA, 19 nt, Artificial Sequence
  Description of Artificial Sequence: Synthetic oligonucleotide
auuaauuuguuuguuggca

SEQ ID NO: 126645 - RNA, 19 nt, Artificial Sequence
  Description of Artificial Sequence: Synthetic oligonucleotide
acugaugauaagaauucug

SEQ ID NO: 126646 - RNA, 19 nt, Artificial Sequence
  Description of Artificial Sequence: Synthetic oligonucleotide
gugaaucauguaauucaua

SEQ ID NO: 126647 - RNA, 19 nt, Artificial Sequence
  Description of Artificial Sequence: Synthetic oligonucleotide
auugaccaaccucgacuug

SEQ ID NO: 126648 - RNA, 19 nt, Artificial Sequence
  Description of Artificial Sequence: Synthetic oligonucleotide
ggccucccuucuagagauu

SEQ ID NO: 126649 - RNA, 19 nt, Artificial Sequence
  Description of Artificial Sequence: Synthetic oligonucleotide
uacuaugaaugcacuggaa

SEQ ID NO: 126650 - RNA, 19 nt, Artificial Sequence
  Description of Artificial Sequence: Synthetic oligonucleotide
aucuauaaagaggcuugua

SEQ ID NO: 126651 - RNA, 19 nt, Artificial Sequence
  Description of Artificial Sequence: Synthetic oligonucleotide
acagcauauguggauuuua

SEQ ID NO: 126652 - RNA, 19 nt, Artificial Sequence
  Description of Artificial Sequence: Synthetic oligonucleotide
augauuucuguggccagau

SEQ ID NO: 126653 - RNA, 19 nt, Artificial Sequence
  Description of Artificial Sequence: Synthetic oligonucleotide
uugauucgucaggaagaaa

SEQ ID NO: 126654 - RNA, 19 nt, Artificial Sequence
  Description of Artificial Sequence: Synthetic oligonucleotide
agauugcccaucgaugaaa

SEQ ID NO: 126655 - RNA, 19 nt, Artificial Sequence
  Description of Artificial Sequence: Synthetic oligonucleotide
aaccagcuugcuuuggaaa

SEQ ID NO: 126656 - RNA, 19 nt, Artificial Sequence
  Description of Artificial Sequence: Synthetic oligonucleotide
augaauaaaguuauggaau

SEQ ID NO: 126657 - RNA, 19 nt, Artificial Sequence
  Description of Artificial Sequence: Synthetic oligonucleotide
uuggaaaaagaaauugcca

SEQ ID NO: 126658 - RNA, 19 nt, Artificial Sequence
  Description of Artificial Sequence: Synthetic oligonucleotide
aaugcuacggcuaaaccug

SEQ ID NO: 126659 - RNA, 19 nt, Artificial Sequence
  Description of Artificial Sequence: Synthetic oligonucleotide
gaagaucgaaaugauccaa

SEQ ID NO: 126660 - RNA, 19 nt, Artificial Sequence
  Description of Artificial Sequence: Synthetic oligonucleotide
augcuucuguauaacaaga

SEQ ID NO: 126661 - RNA, 19 nt, Artificial Sequence
  Description of Artificial Sequence: Synthetic oligonucleotide
augacauuggcccagaucc

SEQ ID NO: 126662 - RNA, 19 nt, Artificial Sequence
  Description of Artificial Sequence: Synthetic oligonucleotide
caaaauaacuuuucacuag

SEQ ID NO: 126663 - RNA, 19 nt, Artificial Sequence
  Description of Artificial Sequence: Synthetic oligonucleotide
gagaucaaugggaagccau

SEQ ID NO: 126664 - RNA, 19 nt, Artificial Sequence
  Description of Artificial Sequence: Synthetic oligonucleotide
uucagcugguugaauuuca

SEQ ID NO: 126665 - RNA, 19 nt, Artificial Sequence
  Description of Artificial Sequence: Synthetic oligonucleotide
acaaaugaaaucaugucaa

SEQ ID NO: 126666 - RNA, 19 nt, Artificial Sequence
  Description of Artificial Sequence: Synthetic oligonucleotide
acugugaauauuaguauua

SEQ ID NO: 126667 - RNA, 19 nt, Artificial Sequence
  Description of Artificial Sequence: Synthetic oligonucleotide
acaaaugaggaagaugugg

SEQ ID NO: 126668 - RNA, 19 nt, Artificial Sequence
  Description of Artificial Sequence: Synthetic oligonucleotide
guuguuuaugcuccagaau

SEQ ID NO: 126669 - RNA, 19 nt, Artificial Sequence
  Description of Artificial Sequence: Synthetic oligonucleotide
uauuuaaccaaacuuaagc

SEQ ID NO: 126670 - RNA, 19 nt, Artificial Sequence
  Description of Artificial Sequence: Synthetic oligonucleotide
cccauucuuaccaaauauu

SEQ ID NO: 126671 - RNA, 19 nt, Artificial Sequence
  Description of Artificial Sequence: Synthetic oligonucleotide
ucugccagagaucuucaaa

SEQ ID NO: 126672 - RNA, 19 nt, Artificial Sequence
  Description of Artificial Sequence: Synthetic oligonucleotide
aauuuaauguccuggagau

SEQ ID NO: 126673 - RNA, 19 nt, Artificial Sequence
  Description of Artificial Sequence: Synthetic oligonucleotide
uucauaauggaucuuguaa

SEQ ID NO: 126674 - RNA, 19 nt, Artificial Sequence
  Description of Artificial Sequence: Synthetic oligonucleotide
agcagccucagccgaaccu

SEQ ID NO: 126675 - RNA, 19 nt, Artificial Sequence
  Description of Artificial Sequence: Synthetic oligonucleotide
uacaaggaguccagaaaug

SEQ ID NO: 126676 - RNA, 19 nt, Artificial Sequence
  Description of Artificial Sequence: Synthetic oligonucleotide
gcuuuccgcaaggcccuuu

SEQ ID NO: 126677 - RNA, 19 nt, Artificial Sequence
  Description of Artificial Sequence: Synthetic oligonucleotide
uaugguacaaccucagaaa

SEQ ID NO: 126678 - RNA, 19 nt, Artificial Sequence
  Description of Artificial Sequence: Synthetic oligonucleotide
acagcaacuuggagacguu

SEQ ID NO: 126679 - RNA, 19 nt, Artificial Sequence
  Description of Artificial Sequence: Synthetic oligonucleotide
ugugcaaacuaugucaaug

SEQ ID NO: 126680 - RNA, 19 nt, Artificial Sequence
  Description of Artificial Sequence: Synthetic oligonucleotide
gggaauauggaaaaugcug

SEQ ID NO: 126681 - RNA, 19 nt, Artificial Sequence
  Description of Artificial Sequence: Synthetic oligonucleotide
guggggaggcuuuaugugg

SEQ ID NO: 126682 - RNA, 19 nt, Artificial Sequence
  Description of Artificial Sequence: Synthetic oligonucleotide
gaagcagcauuugcuggag

SEQ ID NO: 126683 - RNA, 19 nt, Artificial Sequence
  Description of Artificial Sequence: Synthetic oligonucleotide
gagaguaaacauguggucg

SEQ ID NO: 126684 - RNA, 19 nt, Artificial Sequence
  Description of Artificial Sequence: Synthetic oligonucleotide
gaggauuugauugcacaga

SEQ ID NO: 126685 - RNA, 19 nt, Artificial Sequence
  Description of Artificial Sequence: Synthetic oligonucleotide
auccgagaaguuuuuauuc

SEQ ID NO: 126686 - RNA, 19 nt, Artificial Sequence
  Description of Artificial Sequence: Synthetic oligonucleotide
cagacuuuagaugaccuca

SEQ ID NO: 126687 - RNA, 19 nt, Artificial Sequence
  Description of Artificial Sequence: Synthetic oligonucleotide
acuuggauggaugccgaga

SEQ ID NO: 126688 - RNA, 19 nt, Artificial Sequence
  Description of Artificial Sequence: Synthetic oligonucleotide
acaaaaaagagagcugaag

SEQ ID NO: 126689 - RNA, 19 nt, Artificial Sequence
  Description of Artificial Sequence: Synthetic oligonucleotide
gaaaaggccuuagcaauua

SEQ ID NO: 126690 - RNA, 19 nt, Artificial Sequence
  Description of Artificial Sequence: Synthetic oligonucleotide
aaagaaaggaucggcuauc

SEQ ID NO: 126691 - RNA, 19 nt, Artificial Sequence
  Description of Artificial Sequence: Synthetic oligonucleotide
ccugaugacauuguuucaa

SEQ ID NO: 126692 - RNA, 19 nt, Artificial Sequence
  Description of Artificial Sequence: Synthetic oligonucleotide
aaugauaacaaacugaaua

SEQ ID NO: 126693 - RNA, 19 nt, Artificial Sequence
  Description of Artificial Sequence: Synthetic oligonucleotide
aaugaguaccucgaguuga

SEQ ID NO: 126694 - RNA, 19 nt, Artificial Sequence
  Description of Artificial Sequence: Synthetic oligonucleotide
aacuacaaagaagaugaau

SEQ ID NO: 126695 - RNA, 19 nt, Artificial Sequence
  Description of Artificial Sequence: Synthetic oligonucleotide
uacuucgagaacauaauuc

SEQ ID NO: 126696 - RNA, 19 nt, Artificial Sequence
  Description of Artificial Sequence: Synthetic oligonucleotide
caaaauuugaaauucagcc

SEQ ID NO: 126697 - RNA, 19 nt, Artificial Sequence
  Description of Artificial Sequence: Synthetic oligonucleotide
caaaguaaacaacugaaga

SEQ ID NO: 126698 - RNA, 19 nt, Artificial Sequence
  Description of Artificial Sequence: Synthetic oligonucleotide
aagcuccgagaaaaggugg

SEQ ID NO: 126699 - RNA, 19 nt, Artificial Sequence
  Description of Artificial Sequence: Synthetic oligonucleotide
gacaaagaugaguggauaa

SEQ ID NO: 126700 - RNA, 19 nt, Artificial Sequence
  Description of Artificial Sequence: Synthetic oligonucleotide
aguggagcagcuguaguca

SEQ ID NO: 126701 - RNA, 19 nt, Artificial Sequence
  Description of Artificial Sequence: Synthetic oligonucleotide
aaugcauuuuacucuucag

SEQ ID NO: 126702 - RNA, 19 nt, Artificial Sequence
  Description of Artificial Sequence: Synthetic oligonucleotide
ggaagaaaucagauagucu

SEQ ID NO: 126703 - RNA, 19 nt, Artificial Sequence
  Description of Artificial Sequence: Synthetic oligonucleotide
uucccagccggcauucugc

SEQ ID NO: 126704 - RNA, 19 nt, Artificial Sequence
  Description of Artificial Sequence: Synthetic oligonucleotide
cagccccccuucuuuagug

SEQ ID NO: 126705 - RNA, 19 nt, Artificial Sequence
  Description of Artificial Sequence: Synthetic oligonucleotide
gcccagcaguccaacucau

SEQ ID NO: 126706 - RNA, 19 nt, Artificial Sequence
  Description of Artificial Sequence: Synthetic oligonucleotide
uugaacuaugggggcaucg

SEQ ID NO: 126707 - RNA, 19 nt, Artificial Sequence
  Description of Artificial Sequence: Synthetic oligonucleotide
ggcauggucauaggacacg

SEQ ID NO: 126708 - RNA, 19 nt, Artificial Sequence
  Description of Artificial Sequence: Synthetic oligonucleotide
gaaaucacccauggcuucg

SEQ ID NO: 126709 - RNA, 19 nt, Artificial Sequence
  Description of Artificial Sequence: Synthetic oligonucleotide
gaugacaauggcagaaacu

SEQ ID NO: 126710 - RNA, 19 nt, Artificial Sequence
  Description of Artificial Sequence: Synthetic oligonucleotide
uuuaacaaagauggagacc

SEQ ID NO: 126711 - RNA, 19 nt, Artificial Sequence
  Description of Artificial Sequence: Synthetic oligonucleotide
cucguugacugguggacuc

SEQ ID NO: 126712 - RNA, 19 nt, Artificial Sequence
  Description of Artificial Sequence: Synthetic oligonucleotide
caacagucugcaaguaacu

SEQ ID NO: 126713 - RNA, 19 nt, Artificial Sequence
  Description of Artificial Sequence: Synthetic oligonucleotide
uuuaaggagcaaucccagu

SEQ ID NO: 126714 - RNA, 19 nt, Artificial Sequence
  Description of Artificial Sequence: Synthetic oligonucleotide
ugcaugguguaucaguaug

SEQ ID NO: 126715 - RNA, 19 nt, Artificial Sequence
  Description of Artificial Sequence: Synthetic oligonucleotide
ggaaacuuuuccugggacc

SEQ ID NO: 126716 - RNA, 19 nt, Artificial Sequence
  Description of Artificial Sequence: Synthetic oligonucleotide
cuggcagguggacagcacc

SEQ ID NO: 126717 - RNA, 19 nt, Artificial Sequence
  Description of Artificial Sequence: Synthetic oligonucleotide
cuuaauggaauuaauacac

SEQ ID NO: 126718 - RNA, 19 nt, Artificial Sequence
  Description of Artificial Sequence: Synthetic oligonucleotide
cugggagaaaacauugcug

SEQ ID NO: 126719 - RNA, 19 nt, Artificial Sequence
  Description of Artificial Sequence: Synthetic oligonucleotide
gauaauggaggucuugguc

SEQ ID NO: 126720 - RNA, 19 nt, Artificial Sequence
  Description of Artificial Sequence: Synthetic oligonucleotide
caagcauacagagccuauc

SEQ ID NO: 126721 - RNA, 19 nt, Artificial Sequence
  Description of Artificial Sequence: Synthetic oligonucleotide
cagaauuauauuaaaaaga

SEQ ID NO: 126722 - RNA, 19 nt, Artificial Sequence
  Description of Artificial Sequence: Synthetic oligonucleotide
aauggcgaagaaaaauuac

SEQ ID NO: 126723 - RNA, 19 nt, Artificial Sequence
  Description of Artificial Sequence: Synthetic oligonucleotide
cuuccuggacuugaccuaa

SEQ ID NO: 126724 - RNA, 19 nt, Artificial Sequence
  Description of Artificial Sequence: Synthetic oligonucleotide
aaucacaaacaacuauuuu

SEQ ID NO: 126725 - RNA, 19 nt, Artificial Sequence
  Description of Artificial Sequence: Synthetic oligonucleotide
uucuugaacuuugcacagg

SEQ ID NO: 126726 - RNA, 19 nt, Artificial Sequence
  Description of Artificial Sequence: Synthetic oligonucleotide
gugugguguggaaccuaua

SEQ ID NO: 126727 - RNA, 19 nt, Artificial Sequence
  Description of Artificial Sequence: Synthetic oligonucleotide
aggccagaguaugcgguua

SEQ ID NO: 126728 - RNA, 19 nt, Artificial Sequence
  Description of Artificial Sequence: Synthetic oligonucleotide
aacuccauuaaaacagaug

SEQ ID NO: 126729 - RNA, 19 nt, Artificial Sequence
  Description of Artificial Sequence: Synthetic oligonucleotide
gugcacaguccaggcaauu

SEQ ID NO: 126730 - RNA, 19 nt, Artificial Sequence
  Description of Artificial Sequence: Synthetic oligonucleotide
uucaggauuauugggacuu

SEQ ID NO: 126731 - RNA, 19 nt, Artificial Sequence
  Description of Artificial Sequence: Synthetic oligonucleotide
uugcagaacucugcagagu

SEQ ID NO: 126732 - RNA, 19 nt, Artificial Sequence
  Description of Artificial Sequence: Synthetic oligonucleotide
uuuucagaagccuuucacu

SEQ ID NO: 126733 - RNA, 19 nt, Artificial Sequence
  Description of Artificial Sequence: Synthetic oligonucleotide
ugccgcaagaauucauaca

SEQ ID NO: 126734 - RNA, 19 nt, Artificial Sequence
  Description of Artificial Sequence: Synthetic oligonucleotide
augaauccagaaaagaagu

SEQ ID NO: 126735 - RNA, 19 nt, Artificial Sequence
  Description of Artificial Sequence: Synthetic oligonucleotide
ugccggguuuggugaucuu

SEQ ID NO: 126736 - RNA, 19 nt, Artificial Sequence
  Description of Artificial Sequence: Synthetic oligonucleotide
ucaaaagaagcauugcagc

SEQ ID NO: 126737 - RNA, 19 nt, Artificial Sequence
  Description of Artificial Sequence: Synthetic oligonucleotide
cccuuggcuagacuugcca

SEQ ID NO: 126738 - RNA, 19 nt, Artificial Sequence
  Description of Artificial Sequence: Synthetic oligonucleotide
aacaccacagaaaugggga

SEQ ID NO: 126739 - RNA, 19 nt, Artificial Sequence
  Description of Artificial Sequence: Synthetic oligonucleotide
aauucucuaaucgaaagaa

SEQ ID NO: 126740 - RNA, 19 nt, Artificial Sequence
  Description of Artificial Sequence: Synthetic oligonucleotide
aaaugggcccuagggguca

SEQ ID NO: 126741 - RNA, 19 nt, Artificial Sequence
  Description of Artificial Sequence: Synthetic oligonucleotide
acuguacugacuugagggu

SEQ ID NO: 126742 - RNA, 19 nt, Artificial Sequence
  Description of Artificial Sequence: Synthetic oligonucleotide
ugauuaacagagagggcac

SEQ ID NO: 126743 - RNA, 19 nt, Artificial Sequence
  Description of Artificial Sequence: Synthetic oligonucleotide
ccaucacaauacagauaac

SEQ ID NO: 126744 - RNA, 19 nt, Artificial Sequence
  Description of Artificial Sequence: Synthetic oligonucleotide
cauuagguuguccuagaaa

SEQ ID NO: 126745 - RNA, 19 nt, Artificial Sequence
  Description of Artificial Sequence: Synthetic oligonucleotide
aggguguggagggaggaag

SEQ ID NO: 126746 - RNA, 19 nt, Artificial Sequence
  Description of Artificial Sequence: Synthetic oligonucleotide
gggggucuaaggucuauca

SEQ ID NO: 126747 - RNA, 19 nt, Artificial Sequence
  Description of Artificial Sequence: Synthetic oligonucleotide
aagucaaucauuucucacu

SEQ ID NO: 126748 - RNA, 19 nt, Artificial Sequence
  Description of Artificial Sequence: Synthetic oligonucleotide
uguguacauaaugcuuaau

SEQ ID NO: 126749 - RNA, 19 nt, Artificial Sequence
  Description of Artificial Sequence: Synthetic oligonucleotide
uuucuaaagauaauauuac

SEQ ID NO: 126750 - RNA, 19 nt, Artificial Sequence
  Description of Artificial Sequence: Synthetic oligonucleotide
cuguuuauuucuguuucuc

SEQ ID NO: 126751 - RNA, 19 nt, Artificial Sequence
  Description of Artificial Sequence: Synthetic oligonucleotide
cauauggucuaccaguuug

SEQ ID NO: 126752 - RNA, 19 nt, Artificial Sequence
  Description of Artificial Sequence: Synthetic oligonucleotide
gcugaugucccuagaaaac

SEQ ID NO: 126753 - RNA, 19 nt, Artificial Sequence
  Description of Artificial Sequence: Synthetic oligonucleotide
caaugcaaaaccuuugagg

SEQ ID NO: 126754 - RNA, 19 nt, Artificial Sequence
  Description of Artificial Sequence: Synthetic oligonucleotide
guagaccaggauuucuaau

SEQ ID NO: 126755 - RNA, 19 nt, Artificial Sequence
  Description of Artificial Sequence: Synthetic oligonucleotide
ucaaaagggaaaagaagau

SEQ ID NO: 126756 - RNA, 19 nt, Artificial Sequence
  Description of Artificial Sequence: Synthetic oligonucleotide
uguugaagaauacaguuag

SEQ ID NO: 126757 - RNA, 19 nt, Artificial Sequence
  Description of Artificial Sequence: Synthetic oligonucleotide
ggcaccagaagaacaguag

SEQ ID NO: 126758 - RNA, 19 nt, Artificial Sequence
  Description of Artificial Sequence: Synthetic oligonucleotide
ggugacacuauaguuuaaa

SEQ ID NO: 126759 - RNA, 19 nt, Artificial Sequence
  Description of Artificial Sequence: Synthetic oligonucleotide
aacacauugccuaacuacu

SEQ ID NO: 126760 - RNA, 19 nt, Artificial Sequence
  Description of Artificial Sequence: Synthetic oligonucleotide
uaguuuuuacuuuuauuug

SEQ ID NO: 126761 - RNA, 19 nt, Artificial Sequence
  Description of Artificial Sequence: Synthetic oligonucleotide
gcaacauuuacaguccuuc

SEQ ID NO: 126762 - RNA, 19 nt, Artificial Sequence
  Description of Artificial Sequence: Synthetic oligonucleotide
caaaauccuuccaaagaau

SEQ ID NO: 126763 - RNA, 19 nt, Artificial Sequence
  Description of Artificial Sequence: Synthetic oligonucleotide
uucuuauacacauuggggc

SEQ ID NO: 126764 - RNA, 19 nt, Artificial Sequence
  Description of Artificial Sequence: Synthetic oligonucleotide
ccuuggagcuuacauaguu

SEQ ID NO: 126765 - RNA, 19 nt, Artificial Sequence
  Description of Artificial Sequence: Synthetic oligonucleotide
uuuaaacucauuuuugcca

SEQ ID NO: 126766 - RNA, 19 nt, Artificial Sequence
  Description of Artificial Sequence: Synthetic oligonucleotide
auacaucaguuauucauuc

SEQ ID NO: 126767 - RNA, 19 nt, Artificial Sequence
  Description of Artificial Sequence: Synthetic oligonucleotide
cugugaucauuuauuuuaa

SEQ ID NO: 126768 - RNA, 19 nt, Artificial Sequence
  Description of Artificial Sequence: Synthetic oligonucleotide
agcacucuuaaagcaaaaa

SEQ ID NO: 126769 - RNA, 19 nt, Artificial Sequence
  Description of Artificial Sequence: Synthetic oligonucleotide
aaugaaugucuaaaauugu

SEQ ID NO: 126770 - RNA, 19 nt, Artificial Sequence
  Description of Artificial Sequence: Synthetic oligonucleotide
uuuuuuguuguaccugcuu

SEQ ID NO: 126771 - RNA, 19 nt, Artificial Sequence
  Description of Artificial Sequence: Synthetic oligonucleotide
uugacugaugcugagauuc

SEQ ID NO: 126772 - RNA, 19 nt, Artificial Sequence
  Description of Artificial Sequence: Synthetic oligonucleotide
cuucaggcuuccugcaauu

SEQ ID NO: 126773 - RNA, 19 nt, Artificial Sequence
  Description of Artificial Sequence: Synthetic oligonucleotide
uuucuaagcaauuucuugc

SEQ ID NO: 126774 - RNA, 19 nt, Artificial Sequence
  Description of Artificial Sequence: Synthetic oligonucleotide
cucuaucucucaaaacuug

SEQ ID NO: 126775 - RNA, 19 nt, Artificial Sequence
  Description of Artificial Sequence: Synthetic oligonucleotide
gguauuuuucagagauuua

SEQ ID NO: 126776 - RNA, 19 nt, Artificial Sequence
  Description of Artificial Sequence: Synthetic oligonucleotide
auauaaauguaaaaauaau

SEQ ID NO: 126777 - RNA, 19 nt, Artificial Sequence
  Description of Artificial Sequence: Synthetic oligonucleotide
uaauuuuuauauuuaauua

SEQ ID NO: 126778 - RNA, 19 nt, Artificial Sequence
  Description of Artificial Sequence: Synthetic oligonucleotide
auuaacuacauuuaugagu

SEQ ID NO: 126779 - RNA, 19 nt, Artificial Sequence
  Description of Artificial Sequence: Synthetic oligonucleotide
uaacuauuauuauagguaa

SEQ ID NO: 126780 - RNA, 19 nt, Artificial Sequence
  Description of Artificial Sequence: Synthetic oligonucleotide
aucaaugaauauugaaguu

SEQ ID NO: 126781 - RNA, 19 nt, Artificial Sequence
  Description of Artificial Sequence: Synthetic oligonucleotide
uucagcuuaaaauaaacag

SEQ ID NO: 126782 - RNA, 19 nt, Artificial Sequence
  Description of Artificial Sequence: Synthetic oligonucleotide
guugugaaccaagaucuau

SEQ ID NO: 126783 - RNA, 19 nt, Artificial Sequence
  Description of Artificial Sequence: Synthetic oligonucleotide
uaaagcgauauacagauga

SEQ ID NO: 126784 - RNA, 19 nt, Artificial Sequence
  Description of Artificial Sequence: Synthetic oligonucleotide
aaaauuugagacuauuuaa

SEQ ID NO: 126785 - RNA, 19 nt, Artificial Sequence
  Description of Artificial Sequence: Synthetic oligonucleotide
aacuuauaaaucauauuga

SEQ ID NO: 126786 - RNA, 19 nt, Artificial Sequence
  Description of Artificial Sequence: Synthetic oligonucleotide
augaaaagauuuaagcaca

SEQ ID NO: 126787 - RNA, 19 nt, Artificial Sequence
  Description of Artificial Sequence: Synthetic oligonucleotide
aaacuuuaggguaaaaauu

SEQ ID NO: 126788 - RNA, 19 nt, Artificial Sequence
  Description of Artificial Sequence: Synthetic oligonucleotide
ugccauuggacaguugucu

SEQ ID NO: 126789 - RNA, 19 nt, Artificial Sequence
  Description of Artificial Sequence: Synthetic oligonucleotide
uagagauauauauacuugu

SEQ ID NO: 126790 - RNA, 19 nt, Artificial Sequence
  Description of Artificial Sequence: Synthetic oligonucleotide
ugguuuucaaauuggacuu

SEQ ID NO: 126791 - RNA, 19 nt, Artificial Sequence
  Description of Artificial Sequence: Synthetic oligonucleotide
uucaaaauuaaaucugucc

SEQ ID NO: 126792 - RNA, 19 nt, Artificial Sequence
  Description of Artificial Sequence: Synthetic oligonucleotide
ccugagagugucucugaua

SEQ ID NO: 126793 - RNA, 19 nt, Artificial Sequence
  Description of Artificial Sequence: Synthetic oligonucleotide
aaaagggcaaaucugcacc

SEQ ID NO: 126794 - RNA, 19 nt, Artificial Sequence
  Description of Artificial Sequence: Synthetic oligonucleotide
cuauguagcucugcaucuc

SEQ ID NO: 126795 - RNA, 19 nt, Artificial Sequence
  Description of Artificial Sequence: Synthetic oligonucleotide
ccugucuuuucagguuugu

SEQ ID NO: 126796 - RNA, 19 nt, Artificial Sequence
  Description of Artificial Sequence: Synthetic oligonucleotide
ucaucagauggaaauauuu

SEQ ID NO: 126797 - RNA, 19 nt, Artificial Sequence
  Description of Artificial Sequence: Synthetic oligonucleotide
uugauaauaaauugaaauu

SEQ ID NO: 126798 - RNA, 19 nt, Artificial Sequence
  Description of Artificial Sequence: Synthetic oligonucleotide
ugugaacucauugcucccu

SEQ ID NO: 126799 - RNA, 19 nt, Artificial Sequence
  Description of Artificial Sequence: Synthetic oligonucleotide
uaagacugugacaacuguc

SEQ ID NO: 126800 - RNA, 19 nt, Artificial Sequence
  Description of Artificial Sequence: Synthetic oligonucleotide
cuaacuuuagaagugcauu

SEQ ID NO: 126801 - RNA, 19 nt, Artificial Sequence
  Description of Artificial Sequence: Synthetic oligonucleotide
uucugaauagaaaugggag

SEQ ID NO: 126802 - RNA, 19 nt, Artificial Sequence
  Description of Artificial Sequence: Synthetic oligonucleotide
ggccucugauggaccuucu

SEQ ID NO: 126803 - RNA, 19 nt, Artificial Sequence
  Description of Artificial Sequence: Synthetic oligonucleotide
uagaauuauaagucacaaa

SEQ ID NO: 126804 - RNA, 19 nt, Artificial Sequence
  Description of Artificial Sequence: Synthetic oligonucleotide
agaguucuggaaaagaacu

SEQ ID NO: 126805 - RNA, 19 nt, Artificial Sequence
  Description of Artificial Sequence: Synthetic oligonucleotide
uguuuacugcuugauagga

SEQ ID NO: 126806 - RNA, 19 nt, Artificial Sequence
  Description of Artificial Sequence: Synthetic oligonucleotide
aauucaucuuuugaggcuu

SEQ ID NO: 126807 - RNA, 19 nt, Artificial Sequence
  Description of Artificial Sequence: Synthetic oligonucleotide
ucuguuccucucuuuuccu

SEQ ID NO: 126808 - RNA, 19 nt, Artificial Sequence
  Description of Artificial Sequence: Synthetic oligonucleotide
uguuguauugacuauuuuc

SEQ ID NO: 126809 - RNA, 19 nt, Artificial Sequence
  Description of Artificial Sequence: Synthetic oligonucleotide
cguucauuacuugauuaag

SEQ ID NO: 126810 - RNA, 19 nt, Artificial Sequence
  Description of Artificial Sequence: Synthetic oligonucleotide
gauuuuacaaaagaggagc

SEQ ID NO: 126811 - RNA, 19 nt, Artificial Sequence
  Description of Artificial Sequence: Synthetic oligonucleotide
cacuuccaaaauucuuauu

SEQ ID NO: 126812 - RNA, 19 nt, Artificial Sequence
  Description of Artificial Sequence: Synthetic oligonucleotide
uuuuccuaacaaaagauga

SEQ ID NO: 126813 - RNA, 19 nt, Artificial Sequence
  Description of Artificial Sequence: Synthetic oligonucleotide
aaagcagggaauuucuauc

SEQ ID NO: 126814 - RNA, 19 nt, Artificial Sequence
  Description of Artificial Sequence: Synthetic oligonucleotide
cuaaaugaugaguauuagu

SEQ ID NO: 126815 - RNA, 19 nt, Artificial Sequence
  Description of Artificial Sequence: Synthetic oligonucleotide
uucccugucucuugaaaaa

SEQ ID NO: 126816 - RNA, 19 nt, Artificial Sequence
  Description of Artificial Sequence: Synthetic oligonucleotide
augcccauuugccuuuaaa

SEQ ID NO: 126817 - RNA, 19 nt, Artificial Sequence
  Description of Artificial Sequence: Synthetic oligonucleotide
aaaaaaaaguuacagaaau

SEQ ID NO: 126818 - RNA, 19 nt, Artificial Sequence
  Description of Artificial Sequence: Synthetic oligonucleotide
uacuauaacauauguacau

SEQ ID NO: 126819 - RNA, 19 nt, Artificial Sequence
  Description of Artificial Sequence: Synthetic oligonucleotide
uaaauugcauaaagcauaa

SEQ ID NO: 126820 - RNA, 19 nt, Artificial Sequence
  Description of Artificial Sequence: Synthetic oligonucleotide
aguauacaguucaauaaac

SEQ ID NO: 126821 - RNA, 19 nt, Artificial Sequence
  Description of Artificial Sequence: Synthetic oligonucleotide
cuuaacuuuaacugaacaa

SEQ ID NO: 126822 - RNA, 19 nt, Artificial Sequence
  Description of Artificial Sequence: Synthetic oligonucleotide
auggcccuguagccagcac

SEQ ID NO: 126823 - RNA, 19 nt, Artificial Sequence
  Description of Artificial Sequence: Synthetic oligonucleotide
ccuguaagaaacagagcag

SEQ ID NO: 126824 - RNA, 19 nt, Artificial Sequence
  Description of Artificial Sequence: Synthetic oligonucleotide
guaccagcgcucuaaaagc

SEQ ID NO: 126825 - RNA, 19 nt, Artificial Sequence
  Description of Artificial Sequence: Synthetic oligonucleotide
caccuccuugucacuuuau

SEQ ID NO: 126826 - RNA, 19 nt, Artificial Sequence
  Description of Artificial Sequence: Synthetic oligonucleotide
uuacucccagaacaacaac

SEQ ID NO: 126827 - RNA, 19 nt, Artificial Sequence
  Description of Artificial Sequence: Synthetic oligonucleotide
cuauccugacuucuaauau

SEQ ID NO: 126828 - RNA, 19 nt, Artificial Sequence
  Description of Artificial Sequence: Synthetic oligonucleotide
ucauucacuagcuuugccu

SEQ ID NO: 126829 - RNA, 19 nt, Artificial Sequence
  Description of Artificial Sequence: Synthetic oligonucleotide
ugguuuugucuuuuaugca

SEQ ID NO: 126830 - RNA, 19 nt, Artificial Sequence
  Description of Artificial Sequence: Synthetic oligonucleotide
agauagaaucaaucaguau

SEQ ID NO: 126831 - RNA, 19 nt, Artificial Sequence
  Description of Artificial Sequence: Synthetic oligonucleotide
uguauucuuuugugccugg

SEQ ID NO: 126832 - RNA, 19 nt, Artificial Sequence
  Description of Artificial Sequence: Synthetic oligonucleotide
gcuucuuucucucagccuu

SEQ ID NO: 126833 - RNA, 19 nt, Artificial Sequence
  Description of Artificial Sequence: Synthetic oligonucleotide
uacauuugugagauuccuc

SEQ ID NO: 126834 - RNA, 19 nt, Artificial Sequence
  Description of Artificial Sequence: Synthetic oligonucleotide
cuguauugugcugauugug

SEQ ID NO: 126835 - RNA, 19 nt, Artificial Sequence
  Description of Artificial Sequence: Synthetic oligonucleotide
ggaucuuuucauucucauu

SEQ ID NO: 126836 - RNA, 19 nt, Artificial Sequence
  Description of Artificial Sequence: Synthetic oligonucleotide
ugcagaauaauguucuauu

SEQ ID NO: 126837 - RNA, 19 nt, Artificial Sequence
  Description of Artificial Sequence: Synthetic oligonucleotide
ugugggacuuauuacaauu

SEQ ID NO: 126838 - RNA, 19 nt, Artificial Sequence
  Description of Artificial Sequence: Synthetic oligonucleotide
uuguucauccuauuguuga

SEQ ID NO: 126839 - RNA, 19 nt, Artificial Sequence
  Description of Artificial Sequence: Synthetic oligonucleotide
augggcacuugagaacuuu

SEQ ID NO: 126840 - RNA, 19 nt, Artificial Sequence
  Description of Artificial Sequence: Synthetic oligonucleotide
uccauuuuggcgcuauuac

SEQ ID NO: 126841 - RNA, 19 nt, Artificial Sequence
  Description of Artificial Sequence: Synthetic oligonucleotide
caaauagugcaacuaugaa

SEQ ID NO: 126842 - RNA, 19 nt, Artificial Sequence
  Description of Artificial Sequence: Synthetic oligonucleotide
auguacugcauguuaccau

SEQ ID NO: 126843 - RNA, 19 nt, Artificial Sequence
  Description of Artificial Sequence: Synthetic oligonucleotide
ucuuacuugagccuuuaau

SEQ ID NO: 126844 - RNA, 19 nt, Artificial Sequence
  Description of Artificial Sequence: Synthetic oligonucleotide
uggacuuauuucuucaaau

SEQ ID NO: 126845 - RNA, 19 nt, Artificial Sequence
  Description of Artificial Sequence: Synthetic oligonucleotide
uccuuccaaaaauuauuau

SEQ ID NO: 126846 - RNA, 19 nt, Artificial Sequence
  Description of Artificial Sequence: Synthetic oligonucleotide
uaagcauugaaauuauagu

SEQ ID NO: 126847 - RNA, 19 nt, Artificial Sequence
  Description of Artificial Sequence: Synthetic oligonucleotide
uuucaagccaacuguggau

SEQ ID NO: 126848 - RNA, 19 nt, Artificial Sequence
  Description of Artificial Sequence: Synthetic oligonucleotide
uacccuuacccuuuccucc

SEQ ID NO: 126849 - RNA, 19 nt, Artificial Sequence
  Description of Artificial Sequence: Synthetic oligonucleotide
cuuuaucacaaccaccguu

SEQ ID NO: 126850 - RNA, 19 nt, Artificial Sequence
  Description of Artificial Sequence: Synthetic oligonucleotide
uacaaguauacuuauauuu

SEQ ID NO: 126851 - RNA, 19 nt, Artificial Sequence
  Description of Artificial Sequence: Synthetic oligonucleotide
ucccuaaaauacauuuaaa

SEQ ID NO: 126852 - RNA, 19 nt, Artificial Sequence
  Description of Artificial Sequence: Synthetic oligonucleotide
aacuuaccuaagugacauu

SEQ ID NO: 126853 - RNA, 19 nt, Artificial Sequence
  Description of Artificial Sequence: Synthetic oligonucleotide
uuguaguuggaguaauagg

SEQ ID NO: 126854 - RNA, 19 nt, Artificial Sequence
  Description of Artificial Sequence: Synthetic oligonucleotide
gagcuuccagcucuaauaa

SEQ ID NO: 126855 - RNA, 19 nt, Artificial Sequence
  Description of Artificial Sequence: Synthetic oligonucleotide
aaacagcugucucuaacuu

SEQ ID NO: 126856 - RNA, 19 nt, Artificial Sequence
  Description of Artificial Sequence: Synthetic oligonucleotide
uauuuuauuuccaucaugu

SEQ ID NO: 126857 - RNA, 19 nt, Artificial Sequence
  Description of Artificial Sequence: Synthetic oligonucleotide
ucagagcaggugaagagcc

SEQ ID NO: 126858 - RNA, 19 nt, Artificial Sequence
  Description of Artificial Sequence: Synthetic oligonucleotide
cagaagugaagagugacua

SEQ ID NO: 126859 - RNA, 19 nt, Artificial Sequence
  Description of Artificial Sequence: Synthetic oligonucleotide
aguacaaauuauaaaaagc

SEQ ID NO: 126860 - RNA, 19 nt, Artificial Sequence
  Description of Artificial Sequence: Synthetic oligonucleotide
ccacuagacucuucacugu

SEQ ID NO: 126861 - RNA, 19 nt, Artificial Sequence
  Description of Artificial Sequence: Synthetic oligonucleotide
uuagcuuuuuaaaacauua

SEQ ID NO: 126862 - RNA, 19 nt, Artificial Sequence
  Description of Artificial Sequence: Synthetic oligonucleotide
aggcucccaucccuaugga

SEQ ID NO: 126863 - RNA, 19 nt, Artificial Sequence
  Description of Artificial Sequence: Synthetic oligonucleotide
aggaacaacucuccagugc

SEQ ID NO: 126864 - RNA, 19 nt, Artificial Sequence
  Description of Artificial Sequence: Synthetic oligonucleotide
ccuggauccccucugucua

SEQ ID NO: 126865 - RNA, 19 nt, Artificial Sequence
  Description of Artificial Sequence: Synthetic oligonucleotide
acaaauauaagauuuucug

SEQ ID NO: 126866 - RNA, 19 nt, Artificial Sequence
  Description of Artificial Sequence: Synthetic oligonucleotide
gggccuaaaggauagauca

SEQ ID NO: 126867 - RNA, 19 nt, Artificial Sequence
  Description of Artificial Sequence: Synthetic oligonucleotide
aaagucaaaaauagcaaug

SEQ ID NO: 126868 - RNA, 19 nt, Artificial Sequence
  Description of Artificial Sequence: Synthetic oligonucleotide
gccucccuaucccucacac

SEQ ID NO: 126869 - RNA, 19 nt, Artificial Sequence
  Description of Artificial Sequence: Synthetic oligonucleotide
cauccagacaucaugaauu

SEQ ID NO: 126870 - RNA, 19 nt, Artificial Sequence
  Description of Artificial Sequence: Synthetic oligonucleotide
uuuacaugguacucuuguu

SEQ ID NO: 126871 - RNA, 19 nt, Artificial Sequence
  Description of Artificial Sequence: Synthetic oligonucleotide
ugaguucuguagagccuuc

SEQ ID NO: 126872 - RNA, 19 nt, Artificial Sequence
  Description of Artificial Sequence: Synthetic oligonucleotide
cugaugucucuaaagcacu

SEQ ID NO: 126873 - RNA, 19 nt, Artificial Sequence
  Description of Artificial Sequence: Synthetic oligonucleotide
uaccgauucuuuggaguug

SEQ ID NO: 126874 - RNA, 19 nt, Artificial Sequence
  Description of Artificial Sequence: Synthetic oligonucleotide
gucacaucagauaagacau

SEQ ID NO: 126875 - RNA, 19 nt, Artificial Sequence
  Description of Artificial Sequence: Synthetic oligonucleotide
uaucucuaauuccauccau

SEQ ID NO: 126876 - RNA, 19 nt, Artificial Sequence
  Description of Artificial Sequence: Synthetic oligonucleotide
uaaauccaguucuacuaug

SEQ ID NO: 126877 - RNA, 19 nt, Artificial Sequence
  Description of Artificial Sequence: Synthetic oligonucleotide
ggcugaguucuggucaaag

SEQ ID NO: 126878 - RNA, 19 nt, Artificial Sequence
  Description of Artificial Sequence: Synthetic oligonucleotide
gaaagaaaguuuagaagcu

SEQ ID NO: 126879 - RNA, 19 nt, Artificial Sequence
  Description of Artificial Sequence: Synthetic oligonucleotide
ugagacacaaaggguuggg

SEQ ID NO: 126880 - RNA, 19 nt, Artificial Sequence
  Description of Artificial Sequence: Synthetic oligonucleotide
gagcugaugaaacucacaa

SEQ ID NO: 126881 - RNA, 19 nt, Artificial Sequence
  Description of Artificial Sequence: Synthetic oligonucleotide
aaugaugguaggaagaagc

SEQ ID NO: 126882 - RNA, 19 nt, Artificial Sequence
  Description of Artificial Sequence: Synthetic oligonucleotide
cucucgacaauacccguug

SEQ ID NO: 126883 - RNA, 19 nt, Artificial Sequence
  Description of Artificial Sequence: Synthetic oligonucleotide
ggcaaggagucugccucca

SEQ ID NO: 126884 - RNA, 19 nt, Artificial Sequence
  Description of Artificial Sequence: Synthetic oligonucleotide
augcugcaguguucgagug

SEQ ID NO: 126885 - RNA, 19 nt, Artificial Sequence
  Description of Artificial Sequence: Synthetic oligonucleotide
ggauuguaggugcaagaug

SEQ ID NO: 126886 - RNA, 19 nt, Artificial Sequence
  Description of Artificial Sequence: Synthetic oligonucleotide
ggaaaggauuguaggugca

SEQ ID NO: 126887 - RNA, 19 nt, Artificial Sequence
  Description of Artificial Sequence: Synthetic oligonucleotide
aagcuguccagagaaaaga

SEQ ID NO: 126888 - RNA, 19 nt, Artificial Sequence
  Description of Artificial Sequence: Synthetic oligonucleotide
aguccuuguuccagcccua

SEQ ID NO: 126889 - RNA, 19 nt, Artificial Sequence
  Description of Artificial Sequence: Synthetic oligonucleotide
auucugccacuccugacag

SEQ ID NO: 126890 - RNA, 19 nt, Artificial Sequence
  Description of Artificial Sequence: Synthetic oligonucleotide
gggugaccuuggguauuug

SEQ ID NO: 126891 - RNA, 19 nt, Artificial Sequence
  Description of Artificial Sequence: Synthetic oligonucleotide
gcaauauuccuuugggccu

SEQ ID NO: 126892 - RNA, 19 nt, Artificial Sequence
  Description of Artificial Sequence: Synthetic oligonucleotide
ucugcuucucucaccuaaa

SEQ ID NO: 126893 - RNA, 19 nt, Artificial Sequence
  Description of Artificial Sequence: Synthetic oligonucleotide
aaaaagagaauuagauuau

SEQ ID NO: 126894 - RNA, 19 nt, Artificial Sequence
  Description of Artificial Sequence: Synthetic oligonucleotide
uauuggugguucucagcaa

SEQ ID NO: 126895 - RNA, 19 nt, Artificial Sequence
  Description of Artificial Sequence: Synthetic oligonucleotide
agagaaggaguaugugucc

SEQ ID NO: 126896 - RNA, 19 nt, Artificial Sequence
  Description of Artificial Sequence: Synthetic oligonucleotide
caaugcugccuucccauga

SEQ ID NO: 126897 - RNA, 19 nt, Artificial Sequence
  Description of Artificial Sequence: Synthetic oligonucleotide
aaucugucucccaguuaug

SEQ ID NO: 126898 - RNA, 19 nt, Artificial Sequence
  Description of Artificial Sequence: Synthetic oligonucleotide
gaaucagugggcaggauaa

SEQ ID NO: 126899 - RNA, 19 nt, Artificial Sequence
  Description of Artificial Sequence: Synthetic oligonucleotide
aacugaaaacucccauuua

SEQ ID NO: 126900 - RNA, 19 nt, Artificial Sequence
  Description of Artificial Sequence: Synthetic oligonucleotide
acgugucugaaucgaguga

SEQ ID NO: 126901 - RNA, 19 nt, Artificial Sequence
  Description of Artificial Sequence: Synthetic oligonucleotide
agacaaaauuuuaguccaa

SEQ ID NO: 126902 - RNA, 19 nt, Artificial Sequence
  Description of Artificial Sequence: Synthetic oligonucleotide
aauaacaaguaccaaaguu

SEQ ID NO: 126903 - RNA, 19 nt, Artificial Sequence
  Description of Artificial Sequence: Synthetic oligonucleotide
uuuaucaaguuugggucug

SEQ ID NO: 126904 - RNA, 19 nt, Artificial Sequence
  Description of Artificial Sequence: Synthetic oligonucleotide
gugcugcuguuacuguuaa

SEQ ID NO: 126905 - RNA, 19 nt, Artificial Sequence
  Description of Artificial Sequence: Synthetic oligonucleotide
accauuuaaguggggcaaa

SEQ ID NO: 126906 - RNA, 19 nt, Artificial Sequence
  Description of Artificial Sequence: Synthetic oligonucleotide
aaccuugcuaauuuucuca

SEQ ID NO: 126907 - RNA, 19 nt, Artificial Sequence
  Description of Artificial Sequence: Synthetic oligonucleotide
aaaagcauuuaucauucuu

SEQ ID NO: 126908 - RNA, 19 nt, Artificial Sequence
  Description of Artificial Sequence: Synthetic oligonucleotide
uguugccacagcuggagcu

SEQ ID NO: 126909 - RNA, 19 nt, Artificial Sequence
  Description of Artificial Sequence: Synthetic oligonucleotide
ucucaaacuaaaagacauu

SEQ ID NO: 126910 - RNA, 19 nt, Artificial Sequence
  Description of Artificial Sequence: Synthetic oligonucleotide
uuguuauuuuggaaagaag

SEQ ID NO: 126911 - RNA, 19 nt, Artificial Sequence
  Description of Artificial Sequence: Synthetic oligonucleotide
gaaagacucuauucucaaa

SEQ ID NO: 126912 - RNA, 19 nt, Artificial Sequence
  Description of Artificial Sequence: Synthetic oligonucleotide
aguuuccuaaucagaaauu

SEQ ID NO: 126913 - RNA, 19 nt, Artificial Sequence
  Description of Artificial Sequence: Synthetic oligonucleotide
uuuuaucaguuuccagucu

SEQ ID NO: 126914 - RNA, 19 nt, Artificial Sequence
  Description of Artificial Sequence: Synthetic oligonucleotide
ucaaaaauacaaaauaaaa

SEQ ID NO: 126915 - RNA, 19 nt, Artificial Sequence
  Description of Artificial Sequence: Synthetic oligonucleotide
aacaaacguuuuuaauacu

SEQ ID NO: 126916 - RNA, 19 nt, Artificial Sequence
  Description of Artificial Sequence: Synthetic oligonucleotide
uauugcuuuuaugccuagu

SEQ ID NO: 126917 - RNA, 25 nt, Artificial Sequence
  Description of Artificial Sequence: Synthetic oligonucleotide
ccgagcgcccaggacccugcggccg

SEQ ID NO: 126918 - RNA, 25 nt, Artificial Sequence
  Description of Artificial Sequence: Synthetic oligonucleotide
guggaggaggcgugcccugggaagg

SEQ ID NO: 126919 - RNA, 25 nt, Artificial Sequence
  Description of Artificial Sequence: Synthetic oligonucleotide
gagccgcuacugggaccugaagagu

SEQ ID NO: 126920 - RNA, 25 nt, Artificial Sequence
  Description of Artificial Sequence: Synthetic oligonucleotide
ugaggggagggagaggggcccagag

SEQ ID NO: 126921 - RNA, 25 nt, Artificial Sequence
  Description of Artificial Sequence: Synthetic oligonucleotide
gggugaccuggaggagggcucugga

SEQ ID NO: 126922 - RNA, 25 nt, Artificial Sequence
  Description of Artificial Sequence: Synthetic oligonucleotide
aagucacgucagauuuuaggugaug

SEQ ID NO: 126923 - RNA, 25 nt, Artificial Sequence
  Description of Artificial Sequence: Synthetic oligonucleotide
gggcaagucagaaagucagauggau

SEQ ID NO: 126924 - RNA, 25 nt, Artificial Sequence
  Description of Artificial Sequence: Synthetic oligonucleotide
uauaacugauaucaacacuccaaag

SEQ ID NO: 126925 - RNA, 25 nt, Artificial Sequence
  Description of Artificial Sequence: Synthetic oligonucleotide
gccaaagaagaaacagcgauggacu

SEQ ID NO: 126926 - RNA, 25 nt, Artificial Sequence
  Description of Artificial Sequence: Synthetic oligonucleotide
uccacuggagaucagccucucgguc

SEQ ID NO: 126927 - RNA, 25 nt, Artificial Sequence
  Description of Artificial Sequence: Synthetic oligonucleotide
ccuuguccugcuccucaccaucaua

SEQ ID NO: 126928 - RNA, 25 nt, Artificial Sequence
  Description of Artificial Sequence: Synthetic oligonucleotide
agcugugacaaugaucgcacucuau

SEQ ID NO: 126929 - RNA, 25 nt, Artificial Sequence
  Description of Artificial Sequence: Synthetic oligonucleotide
ugcaaccuacgaugaugguauuugc

SEQ ID NO: 126930 - RNA, 25 nt, Artificial Sequence
  Description of Artificial Sequence: Synthetic oligonucleotide
caagucaucagacugcauaaaauca

SEQ ID NO: 126931 - RNA, 25 nt, Artificial Sequence
  Description of Artificial Sequence: Synthetic oligonucleotide
agcugcucgacugauccaaaacaug

SEQ ID NO: 126932 - RNA, 25 nt, Artificial Sequence
  Description of Artificial Sequence: Synthetic oligonucleotide
ggaugccaccacugagccuuguaca

SEQ ID NO: 126933 - RNA, 25 nt, Artificial Sequence
  Description of Artificial Sequence: Synthetic oligonucleotide
agacuuuuucaaauaugcuugcgga

SEQ ID NO: 126934 - RNA, 25 nt, Artificial Sequence
  Description of Artificial Sequence: Synthetic oligonucleotide
aggcugguugaaacguaaugucauu

SEQ ID NO: 126935 - RNA, 25 nt, Artificial Sequence
  Description of Artificial Sequence: Synthetic oligonucleotide
ucccgagaccagcucccguuacggc

SEQ ID NO: 126936 - RNA, 25 nt, Artificial Sequence
  Description of Artificial Sequence: Synthetic oligonucleotide
caacuuugacauuuuaagagaugaa

SEQ ID NO: 126937 - RNA, 25 nt, Artificial Sequence
  Description of Artificial Sequence: Synthetic oligonucleotide
acuagaagucguuuugaaagauguc

SEQ ID NO: 126938 - RNA, 25 nt, Artificial Sequence
  Description of Artificial Sequence: Synthetic oligonucleotide
ccuucaagaacccaaaacugaagau

SEQ ID NO: 126939 - RNA, 25 nt, Artificial Sequence
  Description of Artificial Sequence: Synthetic oligonucleotide
uauaguagcagugcagaaagcaaaa

SEQ ID NO: 126940 - RNA, 25 nt, Artificial Sequence
  Description of Artificial Sequence: Synthetic oligonucleotide
agcauuguacaggucuuguauaaau

SEQ ID NO: 126941 - RNA, 25 nt, Artificial Sequence
  Description of Artificial Sequence: Synthetic oligonucleotide
ugaaucugcuauugauagcagaggu

SEQ ID NO: 126942 - RNA, 25 nt, Artificial Sequence
  Description of Artificial Sequence: Synthetic oligonucleotide
uggagaaccucuacucaaacuguua

SEQ ID NO: 126943 - RNA, 25 nt, Artificial Sequence
  Description of Artificial Sequence: Synthetic oligonucleotide
accagacauauauggguggccagua

SEQ ID NO: 126944 - RNA, 25 nt, Artificial Sequence
  Description of Artificial Sequence: Synthetic oligonucleotide
agcaacagaaaacugggagcaaaaa

SEQ ID NO: 126945 - RNA, 25 nt, Artificial Sequence
  Description of Artificial Sequence: Synthetic oligonucleotide
auauggugcuucuuggacagcugaa

SEQ ID NO: 126946 - RNA, 25 nt, Artificial Sequence
  Description of Artificial Sequence: Synthetic oligonucleotide
aaaagcuauugcacaacugaauucu

SEQ ID NO: 126947 - RNA, 25 nt, Artificial Sequence
  Description of Artificial Sequence: Synthetic oligonucleotide
uaaauaugggaaaaaaguccuuauu

SEQ ID NO: 126948 - RNA, 25 nt, Artificial Sequence
  Description of Artificial Sequence: Synthetic oligonucleotide
uaauuuguuuguuggcacugaugau

SEQ ID NO: 126949 - RNA, 25 nt, Artificial Sequence
  Description of Artificial Sequence: Synthetic oligonucleotide
uaagaauucugugaaucauguaauu

SEQ ID NO: 126950 - RNA, 25 nt, Artificial Sequence
  Description of Artificial Sequence: Synthetic oligonucleotide
ucauauugaccaaccucgacuuggc

SEQ ID NO: 126951 - RNA, 25 nt, Artificial Sequence
  Description of Artificial Sequence: Synthetic oligonucleotide
ccucccuucuagagauuacuaugaa

SEQ ID NO: 126952 - RNA, 25 nt, Artificial Sequence
  Description of Artificial Sequence: Synthetic oligonucleotide
augcacuggaaucuauaaagaggcu

SEQ ID NO: 126953 - RNA, 25 nt, Artificial Sequence
  Description of Artificial Sequence: Synthetic oligonucleotide
uuguacagcauauguggauuuuaug

SEQ ID NO: 126954 - RNA, 25 nt, Artificial Sequence
  Description of Artificial Sequence: Synthetic oligonucleotide
gauuucuguggccagauugauucgu

SEQ ID NO: 126955 - RNA, 25 nt, Artificial Sequence
  Description of Artificial Sequence: Synthetic oligonucleotide
ucaggaagaaagauugcccaucgau

SEQ ID NO: 126956 - RNA, 25 nt, Artificial Sequence
  Description of Artificial Sequence: Synthetic oligonucleotide
ugaaaaccagcuugcuuuggaaaug

SEQ ID NO: 126957 - RNA, 25 nt, Artificial Sequence
  Description of Artificial Sequence: Synthetic oligonucleotide
gaauaaaguuauggaauuggaaaaa

SEQ ID NO: 126958 - RNA, 25 nt, Artificial Sequence
  Description of Artificial Sequence: Synthetic oligonucleotide
agaaauugccaaugcuacggcuaaa

SEQ ID NO: 126959 - RNA, 25 nt, Artificial Sequence
  Description of Artificial Sequence: Synthetic oligonucleotide
accugaagaucgaaaugauccaaug

SEQ ID NO: 126960 - RNA, 25 nt, Artificial Sequence
  Description of Artificial Sequence: Synthetic oligonucleotide
gcuucuguauaacaagaugacauug

SEQ ID NO: 126961 - RNA, 25 nt, Artificial Sequence
  Description of Artificial Sequence: Synthetic oligonucleotide
ggcccagauccaaaauaacuuuuca

SEQ ID NO: 126962 - RNA, 25 nt, Artificial Sequence
  Description of Artificial Sequence: Synthetic oligonucleotide
acuagagaucaaugggaagccauuc

SEQ ID NO: 126963 - RNA, 25 nt, Artificial Sequence
  Description of Artificial Sequence: Synthetic oligonucleotide
cagcugguugaauuucacaaaugaa

SEQ ID NO: 126964 - RNA, 25 nt, Artificial Sequence
  Description of Artificial Sequence: Synthetic oligonucleotide
aaucaugucaacugugaauauuagu

SEQ ID NO: 126965 - RNA, 25 nt, Artificial Sequence
  Description of Artificial Sequence: Synthetic oligonucleotide
uauuacaaaugaggaagaugugguu

SEQ ID NO: 126966 - RNA, 25 nt, Artificial Sequence
  Description of Artificial Sequence: Synthetic oligonucleotide
uguuuaugcuccagaauauuuaacc

SEQ ID NO: 126967 - RNA, 25 nt, Artificial Sequence
  Description of Artificial Sequence: Synthetic oligonucleotide
caaacuuaagcccauucuuaccaaa

SEQ ID NO: 126968 - RNA, 25 nt, Artificial Sequence
  Description of Artificial Sequence: Synthetic oligonucleotide
auauucugccagagaucuucaaaau

SEQ ID NO: 126969 - RNA, 25 nt, Artificial Sequence
  Description of Artificial Sequence: Synthetic oligonucleotide
uuuaauguccuggagauucauaaug

SEQ ID NO: 126970 - RNA, 25 nt, Artificial Sequence
  Description of Artificial Sequence: Synthetic oligonucleotide
ggaucuuguaagcagccucagccga

SEQ ID NO: 126971 - RNA, 25 nt, Artificial Sequence
  Description of Artificial Sequence: Synthetic oligonucleotide
aaccuacaaggaguccagaaaugcu

SEQ ID NO: 126972 - RNA, 25 nt, Artificial Sequence
  Description of Artificial Sequence: Synthetic oligonucleotide
uuuccgcaaggcccuuuaugguaca

SEQ ID NO: 126973 - RNA, 25 nt, Artificial Sequence
  Description of Artificial Sequence: Synthetic oligonucleotide
aaccucagaaacagcaacuuggaga

SEQ ID NO: 126974 - RNA, 25 nt, Artificial Sequence
  Description of Artificial Sequence: Synthetic oligonucleotide
acguugugcaaacuaugucaauggg

SEQ ID NO: 126975 - RNA, 25 nt, Artificial Sequence
  Description of Artificial Sequence: Synthetic oligonucleotide
gaauauggaaaaugcuguggggagg

SEQ ID NO: 126976 - RNA, 25 nt, Artificial Sequence
  Description of Artificial Sequence: Synthetic oligonucleotide
gcuuuauguggaagcagcauuugcu

SEQ ID NO: 126977 - RNA, 25 nt, Artificial Sequence
  Description of Artificial Sequence: Synthetic oligonucleotide
uggagagaguaaacauguggucgag

SEQ ID NO: 126978 - RNA, 25 nt, Artificial Sequence
  Description of Artificial Sequence: Synthetic oligonucleotide
ggauuugauugcacagauccgagaa

SEQ ID NO: 126979 - RNA, 25 nt, Artificial Sequence
  Description of Artificial Sequence: Synthetic oligonucleotide
aguuuuuauucagacuuuagaugac

SEQ ID NO: 126980 - RNA, 25 nt, Artificial Sequence
  Description of Artificial Sequence: Synthetic oligonucleotide
ccucacuuggauggaugccgagaca

SEQ ID NO: 126981 - RNA, 25 nt, Artificial Sequence
  Description of Artificial Sequence: Synthetic oligonucleotide
aaaaaagagagcugaagaaaaggcc

SEQ ID NO: 126982 - RNA, 25 nt, Artificial Sequence
  Description of Artificial Sequence: Synthetic oligonucleotide
cuuagcaauuaaagaaaggaucggc

SEQ ID NO: 126983 - RNA, 25 nt, Artificial Sequence
  Description of Artificial Sequence: Synthetic oligonucleotide
cuauccugaugacauuguuucaaau

SEQ ID NO: 126984 - RNA, 25 nt, Artificial Sequence
  Description of Artificial Sequence: Synthetic oligonucleotide
ugauaacaaacugaauaaugaguac

SEQ ID NO: 126985 - RNA, 25 nt, Artificial Sequence
  Description of Artificial Sequence: Synthetic oligonucleotide
ccucgaguugaacuacaaagaagau

SEQ ID NO: 126986 - RNA, 25 nt, Artificial Sequence
  Description of Artificial Sequence: Synthetic oligonucleotide
ugaauacuucgagaacauaauucaa

SEQ ID NO: 126987 - RNA, 25 nt, Artificial Sequence
  Description of Artificial Sequence: Synthetic oligonucleotide
aaauuugaaauucagccaaaguaaa

SEQ ID NO: 126988 - RNA, 25 nt, Artificial Sequence
  Description of Artificial Sequence: Synthetic oligonucleotide
acaacugaagaagcuccgagaaaag

SEQ ID NO: 126989 - RNA, 25 nt, Artificial Sequence
  Description of Artificial Sequence: Synthetic oligonucleotide
gguggacaaagaugaguggauaagu

SEQ ID NO: 126990 - RNA, 25 nt, Artificial Sequence
  Description of Artificial Sequence: Synthetic oligonucleotide
uggagcagcuguagucaaugcauuu

SEQ ID NO: 126991 - RNA, 25 nt, Artificial Sequence
  Description of Artificial Sequence: Synthetic oligonucleotide
uuacucuucaggaagaaaucagaua

SEQ ID NO: 126992 - RNA, 25 nt, Artificial Sequence
  Description of Artificial Sequence: Synthetic oligonucleotide
agucuucccagccggcauucugcag

SEQ ID NO: 126993 - RNA, 25 nt, Artificial Sequence
  Description of Artificial Sequence: Synthetic oligonucleotide
gccccccuucuuuagugcccagcag

SEQ ID NO: 126994 - RNA, 25 nt, Artificial Sequence
  Description of Artificial Sequence: Synthetic oligonucleotide
guccaacucauugaacuaugggggc

SEQ ID NO: 126995 - RNA, 25 nt, Artificial Sequence
  Description of Artificial Sequence: Synthetic oligonucleotide
caucggcauggucauaggacacgaa

SEQ ID NO: 126996 - RNA, 25 nt, Artificial Sequence
  Description of Artificial Sequence: Synthetic oligonucleotide
aaucacccauggcuucgaugacaau

SEQ ID NO: 126997 - RNA, 25 nt, Artificial Sequence
  Description of Artificial Sequence: Synthetic oligonucleotide
uggcagaaacuuuaacaaagaugga

SEQ ID NO: 126998 - RNA, 25 nt, Artificial Sequence
  Description of Artificial Sequence: Synthetic oligonucleotide
agaccucguugacugguggacucaa

SEQ ID NO: 126999 - RNA, 25 nt, Artificial Sequence
  Description of Artificial Sequence: Synthetic oligonucleotide
acagucugcaaguaacuuuaaggag

SEQ ID NO: 127000 - RNA, 25 nt, Artificial Sequence
  Description of Artificial Sequence: Synthetic oligonucleotide
gcaaucccagugcaugguguaucag

SEQ ID NO: 127001 - RNA, 25 nt, Artificial Sequence
  Description of Artificial Sequence: Synthetic oligonucleotide
guauggaaacuuuuccugggaccug

SEQ ID NO: 127002 - RNA, 25 nt, Artificial Sequence
  Description of Artificial Sequence: Synthetic oligonucleotide
ggcagguggacagcaccuuaaugga

SEQ ID NO: 127003 - RNA, 25 nt, Artificial Sequence
  Description of Artificial Sequence: Synthetic oligonucleotide
aauuaauacacugggagaaaacauu

SEQ ID NO: 127004 - RNA, 25 nt, Artificial Sequence
  Description of Artificial Sequence: Synthetic oligonucleotide
ugcugauaauggaggucuuggucaa

SEQ ID NO: 127005 - RNA, 25 nt, Artificial Sequence
  Description of Artificial Sequence: Synthetic oligonucleotide
agcauacagagccuaucagaauuau

SEQ ID NO: 127006 - RNA, 25 nt, Artificial Sequence
  Description of Artificial Sequence: Synthetic oligonucleotide
uauuaaaaagaauggcgaagaaaaa

SEQ ID NO: 127007 - RNA, 25 nt, Artificial Sequence
  Description of Artificial Sequence: Synthetic oligonucleotide
auuacuuccuggacuugaccuaaau

SEQ ID NO: 127008 - RNA, 25 nt, Artificial Sequence
  Description of Artificial Sequence: Synthetic oligonucleotide
ucacaaacaacuauuuuucuugaac

SEQ ID NO: 127009 - RNA, 25 nt, Artificial Sequence
  Description of Artificial Sequence: Synthetic oligonucleotide
cuuugcacaggugugguguggaacc

SEQ ID NO: 127010 - RNA, 25 nt, Artificial Sequence
  Description of Artificial Sequence: Synthetic oligonucleotide
cuauaggccagaguaugcgguuaac

SEQ ID NO: 127011 - RNA, 25 nt, Artificial Sequence
  Description of Artificial Sequence: Synthetic oligonucleotide
cuccauuaaaacagaugugcacagu

SEQ ID NO: 127012 - RNA, 25 nt, Artificial Sequence
  Description of Artificial Sequence: Synthetic oligonucleotide
uccaggcaauuucaggauuauuggg

SEQ ID NO: 127013 - RNA, 25 nt, Artificial Sequence
  Description of Artificial Sequence: Synthetic oligonucleotide
gacuuugcagaacucugcagaguuu

SEQ ID NO: 127014 - RNA, 25 nt, Artificial Sequence
  Description of Artificial Sequence: Synthetic oligonucleotide
uucagaagccuuucacugccgcaag

SEQ ID NO: 127015 - RNA, 25 nt, Artificial Sequence
  Description of Artificial Sequence: Synthetic oligonucleotide
gaauucauacaugaauccagaaaag

SEQ ID NO: 127016 - RNA, 25 nt, Artificial Sequence
  Description of Artificial Sequence: Synthetic oligonucleotide
gaagugccggguuuggugaucuuca

SEQ ID NO: 127017 - RNA, 25 nt, Artificial Sequence
  Description of Artificial Sequence: Synthetic oligonucleotide
aaaagaagcauugcagcccuuggcu

SEQ ID NO: 127018 - RNA, 25 nt, Artificial Sequence
  Description of Artificial Sequence: Synthetic oligonucleotide
uagacuugccaacaccacagaaaug

SEQ ID NO: 127019 - RNA, 25 nt, Artificial Sequence
  Description of Artificial Sequence: Synthetic oligonucleotide
ggggaauucucuaaucgaaagaaaa

SEQ ID NO: 127020 - RNA, 25 nt, Artificial Sequence
  Description of Artificial Sequence: Synthetic oligonucleotide
augggcccuaggggucacuguacug

SEQ ID NO: 127021 - RNA, 25 nt, Artificial Sequence
  Description of Artificial Sequence: Synthetic oligonucleotide
gacuugagggugauuaacagagagg

SEQ ID NO: 127022 - RNA, 25 nt, Artificial Sequence
  Description of Artificial Sequence: Synthetic oligonucleotide
ggcaccaucacaauacagauaacau

SEQ ID NO: 127023 - RNA, 25 nt, Artificial Sequence
  Description of Artificial Sequence: Synthetic oligonucleotide
uuagguuguccuagaaagggugugg

SEQ ID NO: 127024 - RNA, 25 nt, Artificial Sequence
  Description of Artificial Sequence: Synthetic oligonucleotide
gagggaggaagggggucuaaggucu

SEQ ID NO: 127025 - RNA, 25 nt, Artificial Sequence
  Description of Artificial Sequence: Synthetic oligonucleotide
uaucaagucaaucauuucucacugu

SEQ ID NO: 127026 - RNA, 25 nt, Artificial Sequence
  Description of Artificial Sequence: Synthetic oligonucleotide
uguacauaaugcuuaauuucuaaag

SEQ ID NO: 127027 - RNA, 25 nt, Artificial Sequence
  Description of Artificial Sequence: Synthetic oligonucleotide
gauaauauuacuguuuauuucuguu

SEQ ID NO: 127028 - RNA, 25 nt, Artificial Sequence
  Description of Artificial Sequence: Synthetic oligonucleotide
uucucauauggucuaccaguuugcu

SEQ ID NO: 127029 - RNA, 25 nt, Artificial Sequence
  Description of Artificial Sequence: Synthetic oligonucleotide
ugaugucccuagaaaacaaugcaaa

SEQ ID NO: 127030 - RNA, 25 nt, Artificial Sequence
  Description of Artificial Sequence: Synthetic oligonucleotide
aaccuuugagguagaccaggauuuc

SEQ ID NO: 127031 - RNA, 25 nt, Artificial Sequence
  Description of Artificial Sequence: Synthetic oligonucleotide
cuaaucaaaagggaaaagaagaugu

SEQ ID NO: 127032 - RNA, 25 nt, Artificial Sequence
  Description of Artificial Sequence: Synthetic oligonucleotide
uugaagaauacaguuaggcaccaga

SEQ ID NO: 127033 - RNA, 25 nt, Artificial Sequence
  Description of Artificial Sequence: Synthetic oligonucleotide
aagaacaguaggugacacuauaguu

SEQ ID NO: 127034 - RNA, 25 nt, Artificial Sequence
  Description of Artificial Sequence: Synthetic oligonucleotide
uuaaaacacauugccuaacuacuag

SEQ ID NO: 127035 - RNA, 25 nt, Artificial Sequence
  Description of Artificial Sequence: Synthetic oligonucleotide
guuuuuacuuuuauuugcaacauuu

SEQ ID NO: 127036 - RNA, 25 nt, Artificial Sequence
  Description of Artificial Sequence: Synthetic oligonucleotide
uacaguccuucaaaauccuuccaaa

SEQ ID NO: 127037 - RNA, 25 nt, Artificial Sequence
  Description of Artificial Sequence: Synthetic oligonucleotide
agaauucuuauacacauuggggccu

SEQ ID NO: 127038 - RNA, 25 nt, Artificial Sequence
  Description of Artificial Sequence: Synthetic oligonucleotide
uuggagcuuacauaguuuuaaacuc

SEQ ID NO: 127039 - RNA, 25 nt, Artificial Sequence
  Description of Artificial Sequence: Synthetic oligonucleotide
cauuuuugccauacaucaguuauuc

SEQ ID NO: 127040 - RNA, 25 nt, Artificial Sequence
  Description of Artificial Sequence: Synthetic oligonucleotide
cauucugugaucauuuauuuuaagc

SEQ ID NO: 127041 - RNA, 25 nt, Artificial Sequence
  Description of Artificial Sequence: Synthetic oligonucleotide
cacucuuaaagcaaaaaaugaaugu

SEQ ID NO: 127042 - RNA, 25 nt, Artificial Sequence
  Description of Artificial Sequence: Synthetic oligonucleotide
ucuaaaauuguuuuuuguuguaccu

SEQ ID NO: 127043 - RNA, 25 nt, Artificial Sequence
  Description of Artificial Sequence: Synthetic oligonucleotide
ugcuuugacugaugcugagauucuu

SEQ ID NO: 127044 - RNA, 25 nt, Artificial Sequence
  Description of Artificial Sequence: Synthetic oligonucleotide
ucaggcuuccugcaauuuucuaagc

SEQ ID NO: 127045 - RNA, 25 nt, Artificial Sequence
  Description of Artificial Sequence: Synthetic oligonucleotide
caauuucuugcucuaucucucaaaa

SEQ ID NO: 127046 - RNA, 25 nt, Artificial Sequence
  Description of Artificial Sequence: Synthetic oligonucleotide
acuugguauuuuucagagauuuaua

SEQ ID NO: 127047 - RNA, 25 nt, Artificial Sequence
  Description of Artificial Sequence: Synthetic oligonucleotide
auaaauguaaaaauaauaauuuuua

SEQ ID NO: 127048 - RNA, 25 nt, Artificial Sequence
  Description of Artificial Sequence: Synthetic oligonucleotide
auauuuaauuauuaacuacauuuau

SEQ ID NO: 127049 - RNA, 25 nt, Artificial Sequence
  Description of Artificial Sequence: Synthetic oligonucleotide
ugaguaacuauuauuauagguaauc

SEQ ID NO: 127050 - RNA, 25 nt, Artificial Sequence
  Description of Artificial Sequence: Synthetic oligonucleotide
caaugaauauugaaguuucagcuua

SEQ ID NO: 127051 - RNA, 25 nt, Artificial Sequence
  Description of Artificial Sequence: Synthetic oligonucleotide
aaaauaaacaguugugaaccaagau

SEQ ID NO: 127052 - RNA, 25 nt, Artificial Sequence
  Description of Artificial Sequence: Synthetic oligonucleotide
ucuauaaagcgauauacagaugaaa

SEQ ID NO: 127053 - RNA, 25 nt, Artificial Sequence
  Description of Artificial Sequence: Synthetic oligonucleotide
aauuugagacuauuuaaacuuauaa

SEQ ID NO: 127054 - RNA, 25 nt, Artificial Sequence
  Description of Artificial Sequence: Synthetic oligonucleotide
aaucauauugaugaaaagauuuaag

SEQ ID NO: 127055 - RNA, 25 nt, Artificial Sequence
  Description of Artificial Sequence: Synthetic oligonucleotide
gcacaaacuuuaggguaaaaauugc

SEQ ID NO: 127056 - RNA, 25 nt, Artificial Sequence
  Description of Artificial Sequence: Synthetic oligonucleotide
ccauuggacaguugucuagagauau

SEQ ID NO: 127057 - RNA, 25 nt, Artificial Sequence
  Description of Artificial Sequence: Synthetic oligonucleotide
uauauacuugugguuuucaaauugg

SEQ ID NO: 127058 - RNA, 25 nt, Artificial Sequence
  Description of Artificial Sequence: Synthetic oligonucleotide
gacuuucaaaauuaaaucugucccu

SEQ ID NO: 127059 - RNA, 25 nt, Artificial Sequence
  Description of Artificial Sequence: Synthetic oligonucleotide
ugagagugucucugauaaaagggca

SEQ ID NO: 127060 - RNA, 25 nt, Artificial Sequence
  Description of Artificial Sequence: Synthetic oligonucleotide
aaaucugcaccuauguagcucugca

SEQ ID NO: 127061 - RNA, 25 nt, Artificial Sequence
  Description of Artificial Sequence: Synthetic oligonucleotide
aucuccugucuuuucagguuuguca

SEQ ID NO: 127062 - RNA, 25 nt, Artificial Sequence
  Description of Artificial Sequence: Synthetic oligonucleotide
aucagauggaaauauuuugauaaua

SEQ ID NO: 127063 - RNA, 25 nt, Artificial Sequence
  Description of Artificial Sequence: Synthetic oligonucleotide
aaauugaaauugugaacucauugcu

SEQ ID NO: 127064 - RNA, 25 nt, Artificial Sequence
  Description of Artificial Sequence: Synthetic oligonucleotide
ucccuaagacugugacaacugucua

SEQ ID NO: 127065 - RNA, 25 nt, Artificial Sequence
  Description of Artificial Sequence: Synthetic oligonucleotide
aacuuuagaagugcauuucugaaua

SEQ ID NO: 127066 - RNA, 25 nt, Artificial Sequence
  Description of Artificial Sequence: Synthetic oligonucleotide
agaaaugggaggccucugauggacc

SEQ ID NO: 127067 - RNA, 25 nt, Artificial Sequence
  Description of Artificial Sequence: Synthetic oligonucleotide
cuucuagaauuauaagucacaaaga

SEQ ID NO: 127068 - RNA, 25 nt, Artificial Sequence
  Description of Artificial Sequence: Synthetic oligonucleotide
aguucuggaaaagaacuguuuacug

SEQ ID NO: 127069 - RNA, 25 nt, Artificial Sequence
  Description of Artificial Sequence: Synthetic oligonucleotide
gcuugauaggaauucaucuuuugag

SEQ ID NO: 127070 - RNA, 25 nt, Artificial Sequence
  Description of Artificial Sequence: Synthetic oligonucleotide
ggcuucuguuccucucuuuuccugu

SEQ ID NO: 127071 - RNA, 25 nt, Artificial Sequence
  Description of Artificial Sequence: Synthetic oligonucleotide
uuguauugacuauuuucguucauua

SEQ ID NO: 127072 - RNA, 25 nt, Artificial Sequence
  Description of Artificial Sequence: Synthetic oligonucleotide
acuugauuaagauuuuacaaaagag

SEQ ID NO: 127073 - RNA, 25 nt, Artificial Sequence
  Description of Artificial Sequence: Synthetic oligonucleotide
ggagcacuuccaaaauucuuauuuu

SEQ ID NO: 127074 - RNA, 25 nt, Artificial Sequence
  Description of Artificial Sequence: Synthetic oligonucleotide
uuccuaacaaaagaugaaagcaggg

SEQ ID NO: 127075 - RNA, 25 nt, Artificial Sequence
  Description of Artificial Sequence: Synthetic oligonucleotide
gaauuucuaucuaaaugaugaguau

SEQ ID NO: 127076 - RNA, 25 nt, Artificial Sequence
  Description of Artificial Sequence: Synthetic oligonucleotide
uuaguucccugucucuugaaaaaug

SEQ ID NO: 127077 - RNA, 25 nt, Artificial Sequence
  Description of Artificial Sequence: Synthetic oligonucleotide
guuacagaaauacuauaacauaugu

SEQ ID NO: 127078 - RNA, 25 nt, Artificial Sequence
  Description of Artificial Sequence: Synthetic oligonucleotide
uacauaaauugcauaaagcauaagu

SEQ ID NO: 127079 - RNA, 25 nt, Artificial Sequence
  Description of Artificial Sequence: Synthetic oligonucleotide
uauacaguucaauaaacuuaacuuu

SEQ ID NO: 127080 - RNA, 25 nt, Artificial Sequence
  Description of Artificial Sequence: Synthetic oligonucleotide
uaacugaacaauggcccuguagcca

SEQ ID NO: 127081 - RNA, 25 nt, Artificial Sequence
  Description of Artificial Sequence: Synthetic oligonucleotide
agcaccuguaagaaacagagcagua

SEQ ID NO: 127082 - RNA, 25 nt, Artificial Sequence
  Description of Artificial Sequence: Synthetic oligonucleotide
accagcgcucuaaaagcaccuccuu

SEQ ID NO: 127083 - RNA, 25 nt, Artificial Sequence
  Description of Artificial Sequence: Synthetic oligonucleotide
ugucacuuuauuacucccagaacaa

SEQ ID NO: 127084 - RNA, 25 nt, Artificial Sequence
  Description of Artificial Sequence: Synthetic oligonucleotide
acaacuauccugacuucuaauauca

SEQ ID NO: 127085 - RNA, 25 nt, Artificial Sequence
  Description of Artificial Sequence: Synthetic oligonucleotide
auucacuagcuuugccugguuuugu

SEQ ID NO: 127086 - RNA, 25 nt, Artificial Sequence
  Description of Artificial Sequence: Synthetic oligonucleotide
ucuuuuaugcagauagaaucaauca

SEQ ID NO: 127087 - RNA, 25 nt, Artificial Sequence
  Description of Artificial Sequence: Synthetic oligonucleotide
aguauguauucuuuugugccuggcu

SEQ ID NO: 127088 - RNA, 25 nt, Artificial Sequence
  Description of Artificial Sequence: Synthetic oligonucleotide
uucuuucucucagccuuacauuugu

SEQ ID NO: 127089 - RNA, 25 nt, Artificial Sequence
  Description of Artificial Sequence: Synthetic oligonucleotide
ugagauuccucuguauugugcugau

SEQ ID NO: 127090 - RNA, 25 nt, Artificial Sequence
  Description of Artificial Sequence: Synthetic oligonucleotide
uuguggaucuuuucauucucauugc

SEQ ID NO: 127091 - RNA, 25 nt, Artificial Sequence
  Description of Artificial Sequence: Synthetic oligonucleotide
cagaauaauguucuauugugggacu

SEQ ID NO: 127092 - RNA, 25 nt, Artificial Sequence
  Description of Artificial Sequence: Synthetic oligonucleotide
uuauuacaauuuguucauccuauug

SEQ ID NO: 127093 - RNA, 25 nt, Artificial Sequence
  Description of Artificial Sequence: Synthetic oligonucleotide
guugaugggcacuugagaacuuucc

SEQ ID NO: 127094 - RNA, 25 nt, Artificial Sequence
  Description of Artificial Sequence: Synthetic oligonucleotide
cauuuuggcgcuauuacaaauagug

SEQ ID NO: 127095 - RNA, 25 nt, Artificial Sequence
  Description of Artificial Sequence: Synthetic oligonucleotide
gcaacuaugaauguacugcauguua

SEQ ID NO: 127096 - RNA, 25 nt, Artificial Sequence
  Description of Artificial Sequence: Synthetic oligonucleotide
accaucuuacuugagccuuuaaugg

SEQ ID NO: 127097 - RNA, 25 nt, Artificial Sequence
  Description of Artificial Sequence: Synthetic oligonucleotide
gacuuauuucuucaaauccuuccaa

SEQ ID NO: 127098 - RNA, 25 nt, Artificial Sequence
  Description of Artificial Sequence: Synthetic oligonucleotide
aaaauuauuauaagcauugaaauua

SEQ ID NO: 127099 - RNA, 25 nt, Artificial Sequence
  Description of Artificial Sequence: Synthetic oligonucleotide
auaguuucaagccaacuguggauac

SEQ ID NO: 127100 - RNA, 25 nt, Artificial Sequence
  Description of Artificial Sequence: Synthetic oligonucleotide
cccuuacccuuuccuccuuuaucac

SEQ ID NO: 127101 - RNA, 25 nt, Artificial Sequence
  Description of Artificial Sequence: Synthetic oligonucleotide
caaccaccguuacaaguauacuuau

SEQ ID NO: 127102 - RNA, 25 nt, Artificial Sequence
  Description of Artificial Sequence: Synthetic oligonucleotide
uauuucccuaaaauacauuuaaaac

SEQ ID NO: 127103 - RNA, 25 nt, Artificial Sequence
  Description of Artificial Sequence: Synthetic oligonucleotide
cuuaccuaagugacauuuguaguug

SEQ ID NO: 127104 - RNA, 25 nt, Artificial Sequence
  Description of Artificial Sequence: Synthetic oligonucleotide
ggaguaauaggagcuuccagcucua

SEQ ID NO: 127105 - RNA, 25 nt, Artificial Sequence
  Description of Artificial Sequence: Synthetic oligonucleotide
aauaaaacagcugucucuaacuuau

SEQ ID NO: 127106 - RNA, 25 nt, Artificial Sequence
  Description of Artificial Sequence: Synthetic oligonucleotide
uuuuauuuccaucaugucagagcag

SEQ ID NO: 127107 - RNA, 25 nt, Artificial Sequence
  Description of Artificial Sequence: Synthetic oligonucleotide
ggugaagagccagaagugaagagug

SEQ ID NO: 127108 - RNA, 25 nt, Artificial Sequence
  Description of Artificial Sequence: Synthetic oligonucleotide
gacuaguacaaauuauaaaaagcca

SEQ ID NO: 127109 - RNA, 25 nt, Artificial Sequence
  Description of Artificial Sequence: Synthetic oligonucleotide
acuagacucuucacuguuagcuuuu

SEQ ID NO: 127110 - RNA, 25 nt, Artificial Sequence
  Description of Artificial Sequence: Synthetic oligonucleotide
uuaaaacauuaggcucccaucccua

SEQ ID NO: 127111 - RNA, 25 nt, Artificial Sequence
  Description of Artificial Sequence: Synthetic oligonucleotide
auggaggaacaacucuccagugccu

SEQ ID NO: 127112 - RNA, 25 nt, Artificial Sequence
  Description of Artificial Sequence: Synthetic oligonucleotide
uggauccccucugucuacaaauaua

SEQ ID NO: 127113 - RNA, 25 nt, Artificial Sequence
  Description of Artificial Sequence: Synthetic oligonucleotide
aagauuuucugggccuaaaggauag

SEQ ID NO: 127114 - RNA, 25 nt, Artificial Sequence
  Description of Artificial Sequence: Synthetic oligonucleotide
gaucaaagucaaaaauagcaaugcc

SEQ ID NO: 127115 - RNA, 25 nt, Artificial Sequence
  Description of Artificial Sequence: Synthetic oligonucleotide
cucccuaucccucacacauccagac

SEQ ID NO: 127116 - RNA, 25 nt, Artificial Sequence
  Description of Artificial Sequence: Synthetic oligonucleotide
caucaugaauuuuacaugguacucu

SEQ ID NO: 127117 - RNA, 25 nt, Artificial Sequence
  Description of Artificial Sequence: Synthetic oligonucleotide
uuguugaguucuguagagccuucug

SEQ ID NO: 127118 - RNA, 25 nt, Artificial Sequence
  Description of Artificial Sequence: Synthetic oligonucleotide
gaugucucuaaagcacuaccgauuc

SEQ ID NO: 127119 - RNA, 25 nt, Artificial Sequence
  Description of Artificial Sequence: Synthetic oligonucleotide
cuuuggaguugucacaucagauaag

SEQ ID NO: 127120 - RNA, 25 nt, Artificial Sequence
  Description of Artificial Sequence: Synthetic oligonucleotide
gacauaucucuaauuccauccauaa

SEQ ID NO: 127121 - RNA, 25 nt, Artificial Sequence
  Description of Artificial Sequence: Synthetic oligonucleotide
aauccaguucuacuauggcugaguu

SEQ ID NO: 127122 - RNA, 25 nt, Artificial Sequence
  Description of Artificial Sequence: Synthetic oligonucleotide
ucuggucaaagaaagaaaguuuaga

SEQ ID NO: 127123 - RNA, 25 nt, Artificial Sequence
  Description of Artificial Sequence: Synthetic oligonucleotide
aagcugagacacaaaggguugggag

SEQ ID NO: 127124 - RNA, 25 nt, Artificial Sequence
  Description of Artificial Sequence: Synthetic oligonucleotide
gcugaugaaacucacaaaugauggu

SEQ ID NO: 127125 - RNA, 25 nt, Artificial Sequence
  Description of Artificial Sequence: Synthetic oligonucleotide
uaggaagaagcucucgacaauaccc

SEQ ID NO: 127126 - RNA, 25 nt, Artificial Sequence
  Description of Artificial Sequence: Synthetic oligonucleotide
cguuggcaaggagucugccuccaug

SEQ ID NO: 127127 - RNA, 25 nt, Artificial Sequence
  Description of Artificial Sequence: Synthetic oligonucleotide
gcugcaguguucgaguggauuguag

SEQ ID NO: 127128 - RNA, 25 nt, Artificial Sequence
  Description of Artificial Sequence: Synthetic oligonucleotide
ggugcaagauggaaaggauuguagg

SEQ ID NO: 127129 - RNA, 25 nt, Artificial Sequence
  Description of Artificial Sequence: Synthetic oligonucleotide
gugcaagcuguccagagaaaagagu

SEQ ID NO: 127130 - RNA, 25 nt, Artificial Sequence
  Description of Artificial Sequence: Synthetic oligonucleotide
uccuuguuccagcccuauucugcca

SEQ ID NO: 127131 - RNA, 25 nt, Artificial Sequence
  Description of Artificial Sequence: Synthetic oligonucleotide
acuccugacagggugaccuugggua

SEQ ID NO: 127132 - RNA, 25 nt, Artificial Sequence
  Description of Artificial Sequence: Synthetic oligonucleotide
auuugcaauauuccuuugggccucu

SEQ ID NO: 127133 - RNA, 25 nt, Artificial Sequence
  Description of Artificial Sequence: Synthetic oligonucleotide
ugcuucucucaccuaaaaaaagaga

SEQ ID NO: 127134 - RNA, 25 nt, Artificial Sequence
  Description of Artificial Sequence: Synthetic oligonucleotide
aauuagauuauauuggugguucuca

SEQ ID NO: 127135 - RNA, 25 nt, Artificial Sequence
  Description of Artificial Sequence: Synthetic oligonucleotide
agcaagagaaggaguauguguccaa

SEQ ID NO: 127136 - RNA, 25 nt, Artificial Sequence
  Description of Artificial Sequence: Synthetic oligonucleotide
augcugccuucccaugaaucugucu

SEQ ID NO: 127137 - RNA, 25 nt, Artificial Sequence
  Description of Artificial Sequence: Synthetic oligonucleotide
ucccaguuaugaaucagugggcagg

SEQ ID NO: 127138 - RNA, 25 nt, Artificial Sequence
  Description of Artificial Sequence: Synthetic oligonucleotide
gauaaacugaaaacucccauuuacg

SEQ ID NO: 127139 - RNA, 25 nt, Artificial Sequence
  Description of Artificial Sequence: Synthetic oligonucleotide
gugucugaaucgagugagacaaaau

SEQ ID NO: 127140 - RNA, 25 nt, Artificial Sequence
  Description of Artificial Sequence: Synthetic oligonucleotide
uuuuaguccaaauaacaaguaccaa

SEQ ID NO: 127141 - RNA, 25 nt, Artificial Sequence
  Description of Artificial Sequence: Synthetic oligonucleotide
aaguuuuaucaaguuugggucugug

SEQ ID NO: 127142 - RNA, 25 nt, Artificial Sequence
  Description of Artificial Sequence: Synthetic oligonucleotide
gcugcuguuacuguuaaccauuuaa

SEQ ID NO: 127143 - RNA, 25 nt, Artificial Sequence
  Description of Artificial Sequence: Synthetic oligonucleotide
aguggggcaaaaccuugcuaauuuu

SEQ ID NO: 127144 - RNA, 25 nt, Artificial Sequence
  Description of Artificial Sequence: Synthetic oligonucleotide
ucucaaaagcauuuaucauucuugu

SEQ ID NO: 127145 - RNA, 25 nt, Artificial Sequence
  Description of Artificial Sequence: Synthetic oligonucleotide
uugccacagcuggagcucucaaacu

SEQ ID NO: 127146 - RNA, 25 nt, Artificial Sequence
  Description of Artificial Sequence: Synthetic oligonucleotide
uaaaagacauuuguuauuuuggaaa

SEQ ID NO: 127147 - RNA, 25 nt, Artificial Sequence
  Description of Artificial Sequence: Synthetic oligonucleotide
agaagaaagacucuauucucaaagu

SEQ ID NO: 127148 - RNA, 25 nt, Artificial Sequence
  Description of Artificial Sequence: Synthetic oligonucleotide
uuuccuaaucagaaauuuuuaucag

SEQ ID NO: 127149 - RNA, 25 nt, Artificial Sequence
  Description of Artificial Sequence: Synthetic oligonucleotide
guuuccagucucaaaaauacaaaau

SEQ ID NO: 127150 - RNA, 25 nt, Artificial Sequence
  Description of Artificial Sequence: Synthetic oligonucleotide
uaaaaacaaacguuuuuaauacuau

SEQ ID NO: 127151 - RNA, 25 nt, Artificial Sequence
  Description of Artificial Sequence: Synthetic oligonucleotide
uugcuuuuaugccuagucaacucug

SEQ ID NO: 127152 - RNA, 25 nt, Artificial Sequence
  Description of Artificial Sequence: Synthetic oligonucleotide
cagcccgccacugccacccggcccc

SEQ ID NO: 127153 - RNA, 25 nt, Artificial Sequence
  Description of Artificial Sequence: Synthetic oligonucleotide
cgugcgcucauuggucgggaugugu

SEQ ID NO: 127154 - RNA, 25 nt, Artificial Sequence
  Description of Artificial Sequence: Synthetic oligonucleotide
ucggcucagcagccuccaacuucuc

SEQ ID NO: 127155 - RNA, 25 nt, Artificial Sequence
  Description of Artificial Sequence: Synthetic oligonucleotide
cccgaaucccacugauuuuagguga

SEQ ID NO: 127156 - RNA, 25 nt, Artificial Sequence
  Description of Artificial Sequence: Synthetic oligonucleotide
augggcaagucagaaagucagaugg

SEQ ID NO: 127157 - RNA, 25 nt, Artificial Sequence
  Description of Artificial Sequence: Synthetic oligonucleotide
gauauaacugauaucaacacuccaa

SEQ ID NO: 127158 - RNA, 25 nt, Artificial Sequence
  Description of Artificial Sequence: Synthetic oligonucleotide
aagccaaagaagaaacagcgaugga

SEQ ID NO: 127159 - RNA, 25 nt, Artificial Sequence
  Description of Artificial Sequence: Synthetic oligonucleotide
acuccacuggagaucagccucucgg

SEQ ID NO: 127160 - RNA, 25 nt, Artificial Sequence
  Description of Artificial Sequence: Synthetic oligonucleotide
guccuuguccugcuccucaccauca

SEQ ID NO: 127161 - RNA, 25 nt, Artificial Sequence
  Description of Artificial Sequence: Synthetic oligonucleotide
auagcugugacaaugaucgcacucu

SEQ ID NO: 127162 - RNA, 25 nt, Artificial Sequence
  Description of Artificial Sequence: Synthetic oligonucleotide
uaugcaaccuacgaugaugguauuu

SEQ ID NO: 127163 - RNA, 25 nt, Artificial Sequence
  Description of Artificial Sequence: Synthetic oligonucleotide
ugcaagucaucagacugcauaaaau

SEQ ID NO: 127164 - RNA, 25 nt, Artificial Sequence
  Description of Artificial Sequence: Synthetic oligonucleotide
ucagcugcucgacugauccaaaaca

SEQ ID NO: 127165 - RNA, 25 nt, Artificial Sequence
  Description of Artificial Sequence: Synthetic oligonucleotide
auggaugccaccacugagccuugua

SEQ ID NO: 127166 - RNA, 25 nt, Artificial Sequence
  Description of Artificial Sequence: Synthetic oligonucleotide
acagacuuuuucaaauaugcuugcg

SEQ ID NO: 127167 - RNA, 25 nt, Artificial Sequence
  Description of Artificial Sequence: Synthetic oligonucleotide
ggaggcugguugaaacguaauguca

SEQ ID NO: 127168 - RNA, 25 nt, Artificial Sequence
  Description of Artificial Sequence: Synthetic oligonucleotide
auucccgagaccagcucccguuacg

SEQ ID NO: 127169 - RNA, 25 nt, Artificial Sequence
  Description of Artificial Sequence: Synthetic oligonucleotide
ggcaacuuugacauuuuaagagaug

SEQ ID NO: 127170 - RNA, 25 nt, Artificial Sequence
  Description of Artificial Sequence: Synthetic oligonucleotide
gaacuagaagucguuuugaaagaug

SEQ ID NO: 127171 - RNA, 25 nt, Artificial Sequence
  Description of Artificial Sequence: Synthetic oligonucleotide
guccuucaagaacccaaaacugaag

SEQ ID NO: 127172 - RNA, 25 nt, Artificial Sequence
  Description of Artificial Sequence: Synthetic oligonucleotide
gauauaguagcagugcagaaagcaa

SEQ ID NO: 127173 - RNA, 25 nt, Artificial Sequence
  Description of Artificial Sequence: Synthetic oligonucleotide
aaagcauuguacaggucuuguauaa

SEQ ID NO: 127174 - RNA, 25 nt, Artificial Sequence
  Description of Artificial Sequence: Synthetic oligonucleotide
aaugaaucugcuauugauagcagag

SEQ ID NO: 127175 - RNA, 25 nt, Artificial Sequence
  Description of Artificial Sequence: Synthetic oligonucleotide
gguggagaaccucuacucaaacugu

SEQ ID NO: 127176 - RNA, 25 nt, Artificial Sequence
  Description of Artificial Sequence: Synthetic oligonucleotide
uuaccagacauauauggguggccag

SEQ ID NO: 127177 - RNA, 25 nt, Artificial Sequence
  Description of Artificial Sequence: Synthetic oligonucleotide
guagcaacagaaaacugggagcaaa

SEQ ID NO: 127178 - RNA, 25 nt, Artificial Sequence
  Description of Artificial Sequence: Synthetic oligonucleotide
aaauauggugcuucuuggacagcug

SEQ ID NO: 127179 - RNA, 25 nt, Artificial Sequence
  Description of Artificial Sequence: Synthetic oligonucleotide
gaaaaagcuauugcacaacugaauu

SEQ ID NO: 127180 - RNA, 25 nt, Artificial Sequence
  Description of Artificial Sequence: Synthetic oligonucleotide
ucuaaauaugggaaaaaaguccuua

SEQ ID NO: 127181 - RNA, 25 nt, Artificial Sequence
  Description of Artificial Sequence: Synthetic oligonucleotide
auuaauuuguuuguuggcacugaug

SEQ ID NO: 127182 - RNA, 25 nt, Artificial Sequence
  Description of Artificial Sequence: Synthetic oligonucleotide
gauaagaauucugugaaucauguaa

SEQ ID NO: 127183 - RNA, 25 nt, Artificial Sequence
  Description of Artificial Sequence: Synthetic oligonucleotide
auucauauugaccaaccucgacuug

SEQ ID NO: 127184 - RNA, 25 nt, Artificial Sequence
  Description of Artificial Sequence: Synthetic oligonucleotide
ggccucccuucuagagauuacuaug

SEQ ID NO: 127185 - RNA, 25 nt, Artificial Sequence
  Description of Artificial Sequence: Synthetic oligonucleotide
gaaugcacuggaaucuauaaagagg

SEQ ID NO: 127186 - RNA, 25 nt, Artificial Sequence
  Description of Artificial Sequence: Synthetic oligonucleotide
gcuuguacagcauauguggauuuua

SEQ ID NO: 127187 - RNA, 25 nt, Artificial Sequence
  Description of Artificial Sequence: Synthetic oligonucleotide
augauuucuguggccagauugauuc

SEQ ID NO: 127188 - RNA, 25 nt, Artificial Sequence
  Description of Artificial Sequence: Synthetic oligonucleotide
cgucaggaagaaagauugcccaucg

SEQ ID NO: 127189 - RNA, 25 nt, Artificial Sequence
  Description of Artificial Sequence: Synthetic oligonucleotide
gaugaaaaccagcuugcuuuggaaa

SEQ ID NO: 127190 - RNA, 25 nt, Artificial Sequence
  Description of Artificial Sequence: Synthetic oligonucleotide
augaauaaaguuauggaauuggaaa

SEQ ID NO: 127191 - RNA, 25 nt, Artificial Sequence
  Description of Artificial Sequence: Synthetic oligonucleotide
aaagaaauugccaaugcuacggcua

SEQ ID NO: 127192 - RNA, 25 nt, Artificial Sequence
  Description of Artificial Sequence: Synthetic oligonucleotide
aaaccugaagaucgaaaugauccaa

SEQ ID NO: 127193 - RNA, 25 nt, Artificial Sequence
  Description of Artificial Sequence: Synthetic oligonucleotide
augcuucuguauaacaagaugacau

SEQ ID NO: 127194 - RNA, 25 nt, Artificial Sequence
  Description of Artificial Sequence: Synthetic oligonucleotide
uuggcccagauccaaaauaacuuuu

SEQ ID NO: 127195 - RNA, 25 nt, Artificial Sequence
  Description of Artificial Sequence: Synthetic oligonucleotide
ucacuagagaucaaugggaagccau

SEQ ID NO: 127196 - RNA, 25 nt, Artificial Sequence
  Description of Artificial Sequence: Synthetic oligonucleotide
uucagcugguugaauuucacaaaug

SEQ ID NO: 127197 - RNA, 25 nt, Artificial Sequence
  Description of Artificial Sequence: Synthetic oligonucleotide
gaaaucaugucaacugugaauauua

SEQ ID NO: 127198 - RNA, 25 nt, Artificial Sequence
  Description of Artificial Sequence: Synthetic oligonucleotide
aguauuacaaaugaggaagaugugg

SEQ ID NO: 127199 - RNA, 25 nt, Artificial Sequence
  Description of Artificial Sequence: Synthetic oligonucleotide
guuguuuaugcuccagaauauuuaa

SEQ ID NO: 127200 - RNA, 25 nt, Artificial Sequence
  Description of Artificial Sequence: Synthetic oligonucleotide
accaaacuuaagcccauucuuacca

SEQ ID NO: 127201 - RNA, 25 nt, Artificial Sequence
  Description of Artificial Sequence: Synthetic oligonucleotide
aaauauucugccagagaucuucaaa

SEQ ID NO: 127202 - RNA, 25 nt, Artificial Sequence
  Description of Artificial Sequence: Synthetic oligonucleotide
aauuuaauguccuggagauucauaa

SEQ ID NO: 127203 - RNA, 25 nt, Artificial Sequence
  Description of Artificial Sequence: Synthetic oligonucleotide
auggaucuuguaagcagccucagcc

SEQ ID NO: 127204 - RNA, 25 nt, Artificial Sequence
  Description of Artificial Sequence: Synthetic oligonucleotide
cgaaccuacaaggaguccagaaaug

SEQ ID NO: 127205 - RNA, 25 nt, Artificial Sequence
  Description of Artificial Sequence: Synthetic oligonucleotide
gcuuuccgcaaggcccuuuauggua

SEQ ID NO: 127206 - RNA, 25 nt, Artificial Sequence
  Description of Artificial Sequence: Synthetic oligonucleotide
acaaccucagaaacagcaacuugga

SEQ ID NO: 127207 - RNA, 25 nt, Artificial Sequence
  Description of Artificial Sequence: Synthetic oligonucleotide
agacguugugcaaacuaugucaaug

SEQ ID NO: 127208 - RNA, 25 nt, Artificial Sequence
  Description of Artificial Sequence: Synthetic oligonucleotide
gggaauauggaaaaugcugugggga

SEQ ID NO: 127209 - RNA, 25 nt, Artificial Sequence
  Description of Artificial Sequence: Synthetic oligonucleotide
aggcuuuauguggaagcagcauuug

SEQ ID NO: 127210 - RNA, 25 nt, Artificial Sequence
  Description of Artificial Sequence: Synthetic oligonucleotide
gcuggagagaguaaacauguggucg

SEQ ID NO: 127211 - RNA, 25 nt, Artificial Sequence
  Description of Artificial Sequence: Synthetic oligonucleotide
gaggauuugauugcacagauccgag

SEQ ID NO: 127212 - RNA, 25 nt, Artificial Sequence
  Description of Artificial Sequence: Synthetic oligonucleotide
gaaguuuuuauucagacuuuagaug

SEQ ID NO: 127213 - RNA, 25 nt, Artificial Sequence
  Description of Artificial Sequence: Synthetic oligonucleotide
gaccucacuuggauggaugccgaga

SEQ ID NO: 127214 - RNA, 25 nt, Artificial Sequence
  Description of Artificial Sequence: Synthetic oligonucleotide
acaaaaaagagagcugaagaaaagg

SEQ ID NO: 127215 - RNA, 25 nt, Artificial Sequence
  Description of Artificial Sequence: Synthetic oligonucleotide
gccuuagcaauuaaagaaaggaucg

SEQ ID NO: 127216 - RNA, 25 nt, Artificial Sequence
  Description of Artificial Sequence: Synthetic oligonucleotide
ggcuauccugaugacauuguuucaa

SEQ ID NO: 127217 - RNA, 25 nt, Artificial Sequence
  Description of Artificial Sequence: Synthetic oligonucleotide
aaugauaacaaacugaauaaugagu

SEQ ID NO: 127218 - RNA, 25 nt, Artificial Sequence
  Description of Artificial Sequence: Synthetic oligonucleotide
uaccucgaguugaacuacaaagaag

SEQ ID NO: 127219 - RNA, 25 nt, Artificial Sequence
  Description of Artificial Sequence: Synthetic oligonucleotide
gaugaauacuucgagaacauaauuc

SEQ ID NO: 127220 - RNA, 25 nt, Artificial Sequence
  Description of Artificial Sequence: Synthetic oligonucleotide
caaaauuugaaauucagccaaagua

SEQ ID NO: 127221 - RNA, 25 nt, Artificial Sequence
  Description of Artificial Sequence: Synthetic oligonucleotide
aaacaacugaagaagcuccgagaaa

SEQ ID NO: 127222 - RNA, 25 nt, Artificial Sequence
  Description of Artificial Sequence: Synthetic oligonucleotide
aagguggacaaagaugaguggauaa

SEQ ID NO: 127223 - RNA, 25 nt, Artificial Sequence
  Description of Artificial Sequence: Synthetic oligonucleotide
aguggagcagcuguagucaaugcau

SEQ ID NO: 127224 - RNA, 25 nt, Artificial Sequence
  Description of Artificial Sequence: Synthetic oligonucleotide
uuuuacucuucaggaagaaaucaga

SEQ ID NO: 127225 - RNA, 25 nt, Artificial Sequence
  Description of Artificial Sequence: Synthetic oligonucleotide
auagucuucccagccggcauucugc

SEQ ID NO: 127226 - RNA, 25 nt, Artificial Sequence
  Description of Artificial Sequence: Synthetic oligonucleotide
cagccccccuucuuuagugcccagc

SEQ ID NO: 127227 - RNA, 25 nt, Artificial Sequence
  Description of Artificial Sequence: Synthetic oligonucleotide
caguccaacucauugaacuaugggg

SEQ ID NO: 127228 - RNA, 25 nt, Artificial Sequence
  Description of Artificial Sequence: Synthetic oligonucleotide
ggcaucggcauggucauaggacacg

SEQ ID NO: 127229 - RNA, 25 nt, Artificial Sequence
  Description of Artificial Sequence: Synthetic oligonucleotide
gaaaucacccauggcuucgaugaca

SEQ ID NO: 127230 - RNA, 25 nt, Artificial Sequence
  Description of Artificial Sequence: Synthetic oligonucleotide
aauggcagaaacuuuaacaaagaug

SEQ ID NO: 127231 - RNA, 25 nt, Artificial Sequence
  Description of Artificial Sequence: Synthetic oligonucleotide
ggagaccucguugacugguggacuc

SEQ ID NO: 127232 - RNA, 25 nt, Artificial Sequence
  Description of Artificial Sequence: Synthetic oligonucleotide
caacagucugcaaguaacuuuaagg

SEQ ID NO: 127233 - RNA, 25 nt, Artificial Sequence
  Description of Artificial Sequence: Synthetic oligonucleotide
gagcaaucccagugcaugguguauc

SEQ ID NO: 127234 - RNA, 25 nt, Artificial Sequence
  Description of Artificial Sequence: Synthetic oligonucleotide
caguauggaaacuuuuccugggacc

SEQ ID NO: 127235 - RNA, 25 nt, Artificial Sequence
  Description of Artificial Sequence: Synthetic oligonucleotide
cuggcagguggacagcaccuuaaug

SEQ ID NO: 127236 - RNA, 25 nt, Artificial Sequence
  Description of Artificial Sequence: Synthetic oligonucleotide
ggaauuaauacacugggagaaaaca

SEQ ID NO: 127237 - RNA, 25 nt, Artificial Sequence
  Description of Artificial Sequence: Synthetic oligonucleotide
auugcugauaauggaggucuugguc

SEQ ID NO: 127238 - RNA, 25 nt, Artificial Sequence
  Description of Artificial Sequence: Synthetic oligonucleotide
caagcauacagagccuaucagaauu

SEQ ID NO: 127239 - RNA, 25 nt, Artificial Sequence
  Description of Artificial Sequence: Synthetic oligonucleotide
uauauuaaaaagaauggcgaagaaa

SEQ ID NO: 127240 - RNA, 25 nt, Artificial Sequence
  Description of Artificial Sequence: Synthetic oligonucleotide
aaauuacuuccuggacuugaccuaa

SEQ ID NO: 127241 - RNA, 25 nt, Artificial Sequence
  Description of Artificial Sequence: Synthetic oligonucleotide
aaucacaaacaacuauuuuucuuga

SEQ ID NO: 127242 - RNA, 25 nt, Artificial Sequence
  Description of Artificial Sequence: Synthetic oligonucleotide
aacuuugcacaggugugguguggaa

SEQ ID NO: 127243 - RNA, 25 nt, Artificial Sequence
  Description of Artificial Sequence: Synthetic oligonucleotide
accuauaggccagaguaugcgguua

SEQ ID NO: 127244 - RNA, 25 nt, Artificial Sequence
  Description of Artificial Sequence: Synthetic oligonucleotide
aacuccauuaaaacagaugugcaca

SEQ ID NO: 127245 - RNA, 25 nt, Artificial Sequence
  Description of Artificial Sequence: Synthetic oligonucleotide
aguccaggcaauuucaggauuauug

SEQ ID NO: 127246 - RNA, 25 nt, Artificial Sequence
  Description of Artificial Sequence: Synthetic oligonucleotide
gggacuuugcagaacucugcagagu

SEQ ID NO: 127247 - RNA, 25 nt, Artificial Sequence
  Description of Artificial Sequence: Synthetic oligonucleotide
uuuucagaagccuuucacugccgca

SEQ ID NO: 127248 - RNA, 25 nt, Artificial Sequence
  Description of Artificial Sequence: Synthetic oligonucleotide
aagaauucauacaugaauccagaaa

SEQ ID NO: 127249 - RNA, 25 nt, Artificial Sequence
  Description of Artificial Sequence: Synthetic oligonucleotide
aagaagugccggguuuggugaucuu

SEQ ID NO: 127250 - RNA, 25 nt, Artificial Sequence
  Description of Artificial Sequence: Synthetic oligonucleotide
ucaaaagaagcauugcagcccuugg

SEQ ID NO: 127251 - RNA, 25 nt, Artificial Sequence
  Description of Artificial Sequence: Synthetic oligonucleotide
gcuagacuugccaacaccacagaaa

SEQ ID NO: 127252 - RNA, 25 nt, Artificial Sequence
  Description of Artificial Sequence: Synthetic oligonucleotide
auggggaauucucuaaucgaaagaa

SEQ ID NO: 127253 - RNA, 25 nt, Artificial Sequence
  Description of Artificial Sequence: Synthetic oligonucleotide
aaaugggcccuaggggucacuguac

SEQ ID NO: 127254 - RNA, 25 nt, Artificial Sequence
  Description of Artificial Sequence: Synthetic oligonucleotide
cugacuugagggugauuaacagaga

SEQ ID NO: 127255 - RNA, 25 nt, Artificial Sequence
  Description of Artificial Sequence: Synthetic oligonucleotide
agggcaccaucacaauacagauaac

SEQ ID NO: 127256 - RNA, 25 nt, Artificial Sequence
  Description of Artificial Sequence: Synthetic oligonucleotide
cauuagguuguccuagaaagggugu

SEQ ID NO: 127257 - RNA, 25 nt, Artificial Sequence
  Description of Artificial Sequence: Synthetic oligonucleotide
uggagggaggaagggggucuaaggu

SEQ ID NO: 127258 - RNA, 25 nt, Artificial Sequence
  Description of Artificial Sequence: Synthetic oligonucleotide
ucuaucaagucaaucauuucucacu

SEQ ID NO: 127259 - RNA, 25 nt, Artificial Sequence
  Description of Artificial Sequence: Synthetic oligonucleotide
uguguacauaaugcuuaauuucuaa

SEQ ID NO: 127260 - RNA, 25 nt, Artificial Sequence
  Description of Artificial Sequence: Synthetic oligonucleotide
aagauaauauuacuguuuauuucug

SEQ ID NO: 127261 - RNA, 25 nt, Artificial Sequence
  Description of Artificial Sequence: Synthetic oligonucleotide
guuucucauauggucuaccaguuug

SEQ ID NO: 127262 - RNA, 25 nt, Artificial Sequence
  Description of Artificial Sequence: Synthetic oligonucleotide
gcugaugucccuagaaaacaaugca

SEQ ID NO: 127263 - RNA, 25 nt, Artificial Sequence
  Description of Artificial Sequence: Synthetic oligonucleotide
aaaaccuuugagguagaccaggauu

SEQ ID NO: 127264 - RNA, 25 nt, Artificial Sequence
  Description of Artificial Sequence: Synthetic oligonucleotide
uucuaaucaaaagggaaaagaagau

SEQ ID NO: 127265 - RNA, 25 nt, Artificial Sequence
  Description of Artificial Sequence: Synthetic oligonucleotide
uguugaagaauacaguuaggcacca

SEQ ID NO: 127266 - RNA, 25 nt, Artificial Sequence
  Description of Artificial Sequence: Synthetic oligonucleotide
agaagaacaguaggugacacuauag

SEQ ID NO: 127267 - RNA, 25 nt, Artificial Sequence
  Description of Artificial Sequence: Synthetic oligonucleotide
guuuaaaacacauugccuaacuacu

SEQ ID NO: 127268 - RNA, 25 nt, Artificial Sequence
  Description of Artificial Sequence: Synthetic oligonucleotide
uaguuuuuacuuuuauuugcaacau

SEQ ID NO: 127269 - RNA, 25 nt, Artificial Sequence
  Description of Artificial Sequence: Synthetic oligonucleotide
uuuacaguccuucaaaauccuucca

SEQ ID NO: 127270 - RNA, 25 nt, Artificial Sequence
  Description of Artificial Sequence: Synthetic oligonucleotide
aaagaauucuuauacacauuggggc

SEQ ID NO: 127271 - RNA, 25 nt, Artificial Sequence
  Description of Artificial Sequence: Synthetic oligonucleotide
ccuuggagcuuacauaguuuuaaac

SEQ ID NO: 127272 - RNA, 25 nt, Artificial Sequence
  Description of Artificial Sequence: Synthetic oligonucleotide
cucauuuuugccauacaucaguuau

SEQ ID NO: 127273 - RNA, 25 nt, Artificial Sequence
  Description of Artificial Sequence: Synthetic oligonucleotide
uucauucugugaucauuuauuuuaa

SEQ ID NO: 127274 - RNA, 25 nt, Artificial Sequence
  Description of Artificial Sequence: Synthetic oligonucleotide
agcacucuuaaagcaaaaaaugaau

SEQ ID NO: 127275 - RNA, 25 nt, Artificial Sequence
  Description of Artificial Sequence: Synthetic oligonucleotide
ugucuaaaauuguuuuuuguuguac

SEQ ID NO: 127276 - RNA, 25 nt, Artificial Sequence
  Description of Artificial Sequence: Synthetic oligonucleotide
ccugcuuugacugaugcugagauuc

SEQ ID NO: 127277 - RNA, 25 nt, Artificial Sequence
  Description of Artificial Sequence: Synthetic oligonucleotide
cuucaggcuuccugcaauuuucuaa

SEQ ID NO: 127278 - RNA, 25 nt, Artificial Sequence
  Description of Artificial Sequence: Synthetic oligonucleotide
agcaauuucuugcucuaucucucaa

SEQ ID NO: 127279 - RNA, 25 nt, Artificial Sequence
  Description of Artificial Sequence: Synthetic oligonucleotide
aaacuugguauuuuucagagauuua

SEQ ID NO: 127280 - RNA, 25 nt, Artificial Sequence
  Description of Artificial Sequence: Synthetic oligonucleotide
auauaaauguaaaaauaauaauuuu

SEQ ID NO: 127281 - RNA, 25 nt, Artificial Sequence
  Description of Artificial Sequence: Synthetic oligonucleotide
uuauauuuaauuauuaacuacauuu

SEQ ID NO: 127282 - RNA, 25 nt, Artificial Sequence
  Description of Artificial Sequence: Synthetic oligonucleotide
uaugaguaacuauuauuauagguaa

SEQ ID NO: 127283 - RNA, 25 nt, Artificial Sequence
  Description of Artificial Sequence: Synthetic oligonucleotide
aucaaugaauauugaaguuucagcu

SEQ ID NO: 127284 - RNA, 25 nt, Artificial Sequence
  Description of Artificial Sequence: Synthetic oligonucleotide
uuaaaauaaacaguugugaaccaag

SEQ ID NO: 127285 - RNA, 25 nt, Artificial Sequence
  Description of Artificial Sequence: Synthetic oligonucleotide
gaucuauaaagcgauauacagauga

SEQ ID NO: 127286 - RNA, 25 nt, Artificial Sequence
  Description of Artificial Sequence: Synthetic oligonucleotide
aaaauuugagacuauuuaaacuuau

SEQ ID NO: 127287 - RNA, 25 nt, Artificial Sequence
  Description of Artificial Sequence: Synthetic oligonucleotide
uaaaucauauugaugaaaagauuua

SEQ ID NO: 127288 - RNA, 25 nt, Artificial Sequence
  Description of Artificial Sequence: Synthetic oligonucleotide
aagcacaaacuuuaggguaaaaauu

SEQ ID NO: 127289 - RNA, 25 nt, Artificial Sequence
  Description of Artificial Sequence: Synthetic oligonucleotide
ugccauuggacaguugucuagagau

SEQ ID NO: 127290 - RNA, 25 nt, Artificial Sequence
  Description of Artificial Sequence: Synthetic oligonucleotide
uauauauacuugugguuuucaaauu

SEQ ID NO: 127291 - RNA, 25 nt, Artificial Sequence
  Description of Artificial Sequence: Synthetic oligonucleotide
uggacuuucaaaauuaaaucugucc

SEQ ID NO: 127292 - RNA, 25 nt, Artificial Sequence
  Description of Artificial Sequence: Synthetic oligonucleotide
ccugagagugucucugauaaaaggg

SEQ ID NO: 127293 - RNA, 25 nt, Artificial Sequence
  Description of Artificial Sequence: Synthetic oligonucleotide
gcaaaucugcaccuauguagcucug

SEQ ID NO: 127294 - RNA, 25 nt, Artificial Sequence
  Description of Artificial Sequence: Synthetic oligonucleotide
gcaucuccugucuuuucagguuugu

SEQ ID NO: 127295 - RNA, 25 nt, Artificial Sequence
  Description of Artificial Sequence: Synthetic oligonucleotide
ucaucagauggaaauauuuugauaa

SEQ ID NO: 127296 - RNA, 25 nt, Artificial Sequence
  Description of Artificial Sequence: Synthetic oligonucleotide
auaaauugaaauugugaacucauug

SEQ ID NO: 127297 - RNA, 25 nt, Artificial Sequence
  Description of Artificial Sequence: Synthetic oligonucleotide
gcucccuaagacugugacaacuguc

SEQ ID NO: 127298 - RNA, 25 nt, Artificial Sequence
  Description of Artificial Sequence: Synthetic oligonucleotide
cuaacuuuagaagugcauuucugaa

SEQ ID NO: 127299 - RNA, 25 nt, Artificial Sequence
  Description of Artificial Sequence: Synthetic oligonucleotide
auagaaaugggaggccucugaugga

SEQ ID NO: 127300 - RNA, 25 nt, Artificial Sequence
  Description of Artificial Sequence: Synthetic oligonucleotide
accuucuagaauuauaagucacaaa

SEQ ID NO: 127301 - RNA, 25 nt, Artificial Sequence
  Description of Artificial Sequence: Synthetic oligonucleotide
agaguucuggaaaagaacuguuuac

SEQ ID NO: 127302 - RNA, 25 nt, Artificial Sequence
  Description of Artificial Sequence: Synthetic oligonucleotide
cugcuugauaggaauucaucuuuug

SEQ ID NO: 127303 - RNA, 25 nt, Artificial Sequence
  Description of Artificial Sequence: Synthetic oligonucleotide
gaggcuucuguuccucucuuuuccu

SEQ ID NO: 127304 - RNA, 25 nt, Artificial Sequence
  Description of Artificial Sequence: Synthetic oligonucleotide
uguuguauugacuauuuucguucau

SEQ ID NO: 127305 - RNA, 25 nt, Artificial Sequence
  Description of Artificial Sequence: Synthetic oligonucleotide
uuacuugauuaagauuuuacaaaag

SEQ ID NO: 127306 - RNA, 25 nt, Artificial Sequence
  Description of Artificial Sequence: Synthetic oligonucleotide
gaggagcacuuccaaaauucuuauu

SEQ ID NO: 127307 - RNA, 25 nt, Artificial Sequence
  Description of Artificial Sequence: Synthetic oligonucleotide
uuuuccuaacaaaagaugaaagcag

SEQ ID NO: 127308 - RNA, 25 nt, Artificial Sequence
  Description of Artificial Sequence: Synthetic oligonucleotide
gggaauuucuaucuaaaugaugagu

SEQ ID NO: 127309 - RNA, 25 nt, Artificial Sequence
  Description of Artificial Sequence: Synthetic oligonucleotide
uauuaguucccugucucuugaaaaa

SEQ ID NO: 127310 - RNA, 25 nt, Artificial Sequence
  Description of Artificial Sequence: Synthetic oligonucleotide
augcccauuugccuuuaaaaaaaaa

SEQ ID NO: 127311 - RNA, 25 nt, Artificial Sequence
  Description of Artificial Sequence: Synthetic oligonucleotide
aaguuacagaaauacuauaacauau

SEQ ID NO: 127312 - RNA, 25 nt, Artificial Sequence
  Description of Artificial Sequence: Synthetic oligonucleotide
uguacauaaauugcauaaagcauaa

SEQ ID NO: 127313 - RNA, 25 nt, Artificial Sequence
  Description of Artificial Sequence: Synthetic oligonucleotide
aguauacaguucaauaaacuuaacu

SEQ ID NO: 127314 - RNA, 25 nt, Artificial Sequence
  Description of Artificial Sequence: Synthetic oligonucleotide
uuuaacugaacaauggcccuguagc

SEQ ID NO: 127315 - RNA, 25 nt, Artificial Sequence
  Description of Artificial Sequence: Synthetic oligonucleotide
ccagcaccuguaagaaacagagcag

SEQ ID NO: 127316 - RNA, 25 nt, Artificial Sequence
  Description of Artificial Sequence: Synthetic oligonucleotide
guaccagcgcucuaaaagcaccucc

SEQ ID NO: 127317 - RNA, 25 nt, Artificial Sequence
  Description of Artificial Sequence: Synthetic oligonucleotide
cuugucacuuuauuacucccagaac

SEQ ID NO: 127318 - RNA, 25 nt, Artificial Sequence
  Description of Artificial Sequence: Synthetic oligonucleotide
caacaacuauccugacuucuaauau

SEQ ID NO: 127319 - RNA, 25 nt, Artificial Sequence
  Description of Artificial Sequence: Synthetic oligonucleotide
ucauucacuagcuuugccugguuuu

SEQ ID NO: 127320 - RNA, 25 nt, Artificial Sequence
  Description of Artificial Sequence: Synthetic oligonucleotide
ugucuuuuaugcagauagaaucaau

SEQ ID NO: 127321 - RNA, 25 nt, Artificial Sequence
  Description of Artificial Sequence: Synthetic oligonucleotide
ucaguauguauucuuuugugccugg

SEQ ID NO: 127322 - RNA, 25 nt, Artificial Sequence
  Description of Artificial Sequence: Synthetic oligonucleotide
gcuucuuucucucagccuuacauuu

SEQ ID NO: 127323 - RNA, 25 nt, Artificial Sequence
  Description of Artificial Sequence: Synthetic oligonucleotide
ugugagauuccucuguauugugcug

SEQ ID NO: 127324 - RNA, 25 nt, Artificial Sequence
  Description of Artificial Sequence: Synthetic oligonucleotide
gauuguggaucuuuucauucucauu

SEQ ID NO: 127325 - RNA, 25 nt, Artificial Sequence
  Description of Artificial Sequence: Synthetic oligonucleotide
ugcagaauaauguucuauuguggga

SEQ ID NO: 127326 - RNA, 25 nt, Artificial Sequence
  Description of Artificial Sequence: Synthetic oligonucleotide
acuuauuacaauuuguucauccuau

SEQ ID NO: 127327 - RNA, 25 nt, Artificial Sequence
  Description of Artificial Sequence: Synthetic oligonucleotide
uuguugaugggcacuugagaacuuu

SEQ ID NO: 127328 - RNA, 25 nt, Artificial Sequence
  Description of Artificial Sequence: Synthetic oligonucleotide
uccauuuuggcgcuauuacaaauag

SEQ ID NO: 127329 - RNA, 25 nt, Artificial Sequence
  Description of Artificial Sequence: Synthetic oligonucleotide
gugcaacuaugaauguacugcaugu

SEQ ID NO: 127330 - RNA, 25 nt, Artificial Sequence
  Description of Artificial Sequence: Synthetic oligonucleotide
uuaccaucuuacuugagccuuuaau

SEQ ID NO: 127331 - RNA, 25 nt, Artificial Sequence
  Description of Artificial Sequence: Synthetic oligonucleotide
uggacuuauuucuucaaauccuucc

SEQ ID NO: 127332 - RNA, 25 nt, Artificial Sequence
  Description of Artificial Sequence: Synthetic oligonucleotide
caaaaauuauuauaagcauugaaau

SEQ ID NO: 127333 - RNA, 25 nt, Artificial Sequence
  Description of Artificial Sequence: Synthetic oligonucleotide
uuauaguuucaagccaacuguggau

SEQ ID NO: 127334 - RNA, 25 nt, Artificial Sequence
  Description of Artificial Sequence: Synthetic oligonucleotide
uacccuuacccuuuccuccuuuauc

SEQ ID NO: 127335 - RNA, 25 nt, Artificial Sequence
  Description of Artificial Sequence: Synthetic oligonucleotide
cacaaccaccguuacaaguauacuu

SEQ ID NO: 127336 - RNA, 25 nt, Artificial Sequence
  Description of Artificial Sequence: Synthetic oligonucleotide
uauauuucccuaaaauacauuuaaa

SEQ ID NO: 127337 - RNA, 25 nt, Artificial Sequence
  Description of Artificial Sequence: Synthetic oligonucleotide
aacuuaccuaagugacauuuguagu

SEQ ID NO: 127338 - RNA, 25 nt, Artificial Sequence
  Description of Artificial Sequence: Synthetic oligonucleotide
uuggaguaauaggagcuuccagcuc

SEQ ID NO: 127339 - RNA, 25 nt, Artificial Sequence
  Description of Artificial Sequence: Synthetic oligonucleotide
cuaauaaaacagcugucucuaacuu

SEQ ID NO: 127340 - RNA, 25 nt, Artificial Sequence
  Description of Artificial Sequence: Synthetic oligonucleotide
uauuuuauuuccaucaugucagagc

SEQ ID NO: 127341 - RNA, 25 nt, Artificial Sequence
  Description of Artificial Sequence: Synthetic oligonucleotide
caggugaagagccagaagugaagag

SEQ ID NO: 127342 - RNA, 25 nt, Artificial Sequence
  Description of Artificial Sequence: Synthetic oligonucleotide
gugacuaguacaaauuauaaaaagc

SEQ ID NO: 127343 - RNA, 25 nt, Artificial Sequence
  Description of Artificial Sequence: Synthetic oligonucleotide
ccacuagacucuucacuguuagcuu

SEQ ID NO: 127344 - RNA, 25 nt, Artificial Sequence
  Description of Artificial Sequence: Synthetic oligonucleotide
uuuuaaaacauuaggcucccauccc

SEQ ID NO: 127345 - RNA, 25 nt, Artificial Sequence
  Description of Artificial Sequence: Synthetic oligonucleotide
cuauggaggaacaacucuccagugc

SEQ ID NO: 127346 - RNA, 25 nt, Artificial Sequence
  Description of Artificial Sequence: Synthetic oligonucleotide
ccuggauccccucugucuacaaaua

SEQ ID NO: 127347 - RNA, 25 nt, Artificial Sequence
  Description of Artificial Sequence: Synthetic oligonucleotide
auaagauuuucugggccuaaaggau

SEQ ID NO: 127348 - RNA, 25 nt, Artificial Sequence
  Description of Artificial Sequence: Synthetic oligonucleotide
uagaucaaagucaaaaauagcaaug

SEQ ID NO: 127349 - RNA, 25 nt, Artificial Sequence
  Description of Artificial Sequence: Synthetic oligonucleotide
gccucccuaucccucacacauccag

SEQ ID NO: 127350 - RNA, 25 nt, Artificial Sequence
  Description of Artificial Sequence: Synthetic oligonucleotide
gacaucaugaauuuuacaugguacu

SEQ ID NO: 127351 - RNA, 25 nt, Artificial Sequence
  Description of Artificial Sequence: Synthetic oligonucleotide
ucuuguugaguucuguagagccuuc

SEQ ID NO: 127352 - RNA, 25 nt, Artificial Sequence
  Description of Artificial Sequence: Synthetic oligonucleotide
cugaugucucuaaagcacuaccgau

SEQ ID NO: 127353 - RNA, 25 nt, Artificial Sequence
  Description of Artificial Sequence: Synthetic oligonucleotide
uucuuuggaguugucacaucagaua

SEQ ID NO: 127354 - RNA, 25 nt, Artificial Sequence
  Description of Artificial Sequence: Synthetic oligonucleotide
aagacauaucucuaauuccauccau

SEQ ID NO: 127355 - RNA, 25 nt, Artificial Sequence
  Description of Artificial Sequence: Synthetic oligonucleotide
uaaauccaguucuacuauggcugag

SEQ ID NO: 127356 - RNA, 25 nt, Artificial Sequence
  Description of Artificial Sequence: Synthetic oligonucleotide
guucuggucaaagaaagaaaguuua

SEQ ID NO: 127357 - RNA, 25 nt, Artificial Sequence
  Description of Artificial Sequence: Synthetic oligonucleotide
agaagcugagacacaaaggguuggg

SEQ ID NO: 127358 - RNA, 25 nt, Artificial Sequence
  Description of Artificial Sequence: Synthetic oligonucleotide
gagcugaugaaacucacaaaugaug

SEQ ID NO: 127359 - RNA, 25 nt, Artificial Sequence
  Description of Artificial Sequence: Synthetic oligonucleotide
gguaggaagaagcucucgacaauac

SEQ ID NO: 127360 - RNA, 25 nt, Artificial Sequence
  Description of Artificial Sequence: Synthetic oligonucleotide
cccguuggcaaggagucugccucca

SEQ ID NO: 127361 - RNA, 25 nt, Artificial Sequence
  Description of Artificial Sequence: Synthetic oligonucleotide
augcugcaguguucgaguggauugu

SEQ ID NO: 127362 - RNA, 25 nt, Artificial Sequence
  Description of Artificial Sequence: Synthetic oligonucleotide
uaggugcaagauggaaaggauugua

SEQ ID NO: 127363 - RNA, 25 nt, Artificial Sequence
  Description of Artificial Sequence: Synthetic oligonucleotide
aggugcaagcuguccagagaaaaga

SEQ ID NO: 127364 - RNA, 25 nt, Artificial Sequence
  Description of Artificial Sequence: Synthetic oligonucleotide
aguccuuguuccagcccuauucugc

SEQ ID NO: 127365 - RNA, 25 nt, Artificial Sequence
  Description of Artificial Sequence: Synthetic oligonucleotide
ccacuccugacagggugaccuuggg

SEQ ID NO: 127366 - RNA, 25 nt, Artificial Sequence
  Description of Artificial Sequence: Synthetic oligonucleotide
guauuugcaauauuccuuugggccu

SEQ ID NO: 127367 - RNA, 25 nt, Artificial Sequence
  Description of Artificial Sequence: Synthetic oligonucleotide
ucugcuucucucaccuaaaaaaaga

SEQ ID NO: 127368 - RNA, 25 nt, Artificial Sequence
  Description of Artificial Sequence: Synthetic oligonucleotide
agaauuagauuauauuggugguucu

SEQ ID NO: 127369 - RNA, 25 nt, Artificial Sequence
  Description of Artificial Sequence: Synthetic oligonucleotide
ucagcaagagaaggaguaugugucc

SEQ ID NO: 127370 - RNA, 25 nt, Artificial Sequence
  Description of Artificial Sequence: Synthetic oligonucleotide
caaugcugccuucccaugaaucugu

SEQ ID NO: 127371 - RNA, 25 nt, Artificial Sequence
  Description of Artificial Sequence: Synthetic oligonucleotide
ucucccaguuaugaaucagugggca

SEQ ID NO: 127372 - RNA, 25 nt, Artificial Sequence
  Description of Artificial Sequence: Synthetic oligonucleotide
aggauaaacugaaaacucccauuua

SEQ ID NO: 127373 - RNA, 25 nt, Artificial Sequence
  Description of Artificial Sequence: Synthetic oligonucleotide
acgugucugaaucgagugagacaaa

SEQ ID NO: 127374 - RNA, 25 nt, Artificial Sequence
  Description of Artificial Sequence: Synthetic oligonucleotide
aauuuuaguccaaauaacaaguacc

SEQ ID NO: 127375 - RNA, 25 nt, Artificial Sequence
  Description of Artificial Sequence: Synthetic oligonucleotide
caaaguuuuaucaaguuugggucug

SEQ ID NO: 127376 - RNA, 25 nt, Artificial Sequence
  Description of Artificial Sequence: Synthetic oligonucleotide
gugcugcuguuacuguuaaccauuu

SEQ ID NO: 127377 - RNA, 25 nt, Artificial Sequence
  Description of Artificial Sequence: Synthetic oligonucleotide
uaaguggggcaaaaccuugcuaauu

SEQ ID NO: 127378 - RNA, 25 nt, Artificial Sequence
  Description of Artificial Sequence: Synthetic oligonucleotide
uuucucaaaagcauuuaucauucuu

SEQ ID NO: 127379 - RNA, 25 nt, Artificial Sequence
  Description of Artificial Sequence: Synthetic oligonucleotide
uguugccacagcuggagcucucaaa

SEQ ID NO: 127380 - RNA, 25 nt, Artificial Sequence
  Description of Artificial Sequence: Synthetic oligonucleotide
acuaaaagacauuuguuauuuugga

SEQ ID NO: 127381 - RNA, 25 nt, Artificial Sequence
  Description of Artificial Sequence: Synthetic oligonucleotide
aaagaagaaagacucuauucucaaa

SEQ ID NO: 127382 - RNA, 25 nt, Artificial Sequence
  Description of Artificial Sequence: Synthetic oligonucleotide
aguuuccuaaucagaaauuuuuauc

SEQ ID NO: 127383 - RNA, 25 nt, Artificial Sequence
  Description of Artificial Sequence: Synthetic oligonucleotide
caguuuccagucucaaaaauacaaa

SEQ ID NO: 127384 - RNA, 25 nt, Artificial Sequence
  Description of Artificial Sequence: Synthetic oligonucleotide
aauaaaaacaaacguuuuuaauacu

SEQ ID NO: 127385 - RNA, 25 nt, Artificial Sequence
  Description of Artificial Sequence: Synthetic oligonucleotide
uauugcuuuuaugccuagucaacuc

SEQ ID NO: 127386 - RNA, 25 nt, Artificial Sequence
  Description of Artificial Sequence: Synthetic oligonucleotide
cgucagguuggcucuucagguucau

SEQ ID NO: 127387 - RNA, 25 nt, Artificial Sequence
  Description of Artificial Sequence: Synthetic oligonucleotide
uuuccauaguucccugcggccucug

SEQ ID NO: 127388 - RNA, 25 nt, Artificial Sequence
  Description of Artificial Sequence: Synthetic oligonucleotide
gccuuggggaguuauguuuuguuac

SEQ ID NO: 127389 - RNA, 25 nt, Artificial Sequence
  Description of Artificial Sequence: Synthetic oligonucleotide
ccgagauccgcgcuaccagauugca

SEQ ID NO: 127390 - RNA, 25 nt, Artificial Sequence
  Description of Artificial Sequence: Synthetic oligonucleotide
accggggcugauuugggggcuggga

SEQ ID NO: 127391 - RNA, 25 nt, Artificial Sequence
  Description of Artificial Sequence: Synthetic oligonucleotide
aauuugccauucugcuguacagaca

SEQ ID NO: 127392 - RNA, 25 nt, Artificial Sequence
  Description of Artificial Sequence: Synthetic oligonucleotide
acugauuuuuuuuucuucuuuuuaa

SEQ ID NO: 127393 - RNA, 25 nt, Artificial Sequence
  Description of Artificial Sequence: Synthetic oligonucleotide
aaaagcaagauuuuaggugaugggc

SEQ ID NO: 127394 - RNA, 25 nt, Artificial Sequence
  Description of Artificial Sequence: Synthetic oligonucleotide
caagucagaaagucagauggauaua

SEQ ID NO: 127395 - RNA, 25 nt, Artificial Sequence
  Description of Artificial Sequence: Synthetic oligonucleotide
aacugauaucaacacuccaaagcca

SEQ ID NO: 127396 - RNA, 25 nt, Artificial Sequence
  Description of Artificial Sequence: Synthetic oligonucleotide
aaagaagaaacagcgauggacucca

SEQ ID NO: 127397 - RNA, 25 nt, Artificial Sequence
  Description of Artificial Sequence: Synthetic oligonucleotide
acuggagaucagccucucgguccuu

SEQ ID NO: 127398 - RNA, 25 nt, Artificial Sequence
  Description of Artificial Sequence: Synthetic oligonucleotide
uguccugcuccucaccaucauagcu

SEQ ID NO: 127399 - RNA, 25 nt, Artificial Sequence
  Description of Artificial Sequence: Synthetic oligonucleotide
ugugacaaugaucgcacucuaugca

SEQ ID NO: 127400 - RNA, 25 nt, Artificial Sequence
  Description of Artificial Sequence: Synthetic oligonucleotide
aaccuacgaugaugguauuugcaag

SEQ ID NO: 127401 - RNA, 25 nt, Artificial Sequence
  Description of Artificial Sequence: Synthetic oligonucleotide
gucaucagacugcauaaaaucagcu

SEQ ID NO: 127402 - RNA, 25 nt, Artificial Sequence
  Description of Artificial Sequence: Synthetic oligonucleotide
ugcucgacugauccaaaacauggau

SEQ ID NO: 127403 - RNA, 25 nt, Artificial Sequence
  Description of Artificial Sequence: Synthetic oligonucleotide
ugccaccacugagccuuguacagac

SEQ ID NO: 127404 - RNA, 25 nt, Artificial Sequence
  Description of Artificial Sequence: Synthetic oligonucleotide
cuuuuucaaauaugcuugcggaggc

SEQ ID NO: 127405 - RNA, 25 nt, Artificial Sequence
  Description of Artificial Sequence: Synthetic oligonucleotide
cugguugaaacguaaugucauuccc

SEQ ID NO: 127406 - RNA, 25 nt, Artificial Sequence
  Description of Artificial Sequence: Synthetic oligonucleotide
cgagaccagcucccguuacggcaac

SEQ ID NO: 127407 - RNA, 25 nt, Artificial Sequence
  Description of Artificial Sequence: Synthetic oligonucleotide
cuuugacauuuuaagagaugaacua

SEQ ID NO: 127408 - RNA, 25 nt, Artificial Sequence
  Description of Artificial Sequence: Synthetic oligonucleotide
agaagucguuuugaaagauguccuu

SEQ ID NO: 127409 - RNA, 25 nt, Artificial Sequence
  Description of Artificial Sequence: Synthetic oligonucleotide
ucaagaacccaaaacugaagauaua

SEQ ID NO: 127410 - RNA, 25 nt, Artificial Sequence
  Description of Artificial Sequence: Synthetic oligonucleotide
aguagcagugcagaaagcaaaagca

SEQ ID NO: 127411 - RNA, 25 nt, Artificial Sequence
  Description of Artificial Sequence: Synthetic oligonucleotide
auuguacaggucuuguauaaaugaa

SEQ ID NO: 127412 - RNA, 25 nt, Artificial Sequence
  Description of Artificial Sequence: Synthetic oligonucleotide
aucugcuauugauagcagaggugga

SEQ ID NO: 127413 - RNA, 25 nt, Artificial Sequence
  Description of Artificial Sequence: Synthetic oligonucleotide
agaaccucuacucaaacuguuacca

SEQ ID NO: 127414 - RNA, 25 nt, Artificial Sequence
  Description of Artificial Sequence: Synthetic oligonucleotide
agacauauauggguggccaguagca

SEQ ID NO: 127415 - RNA, 25 nt, Artificial Sequence
  Description of Artificial Sequence: Synthetic oligonucleotide
aacagaaaacugggagcaaaaauau

SEQ ID NO: 127416 - RNA, 25 nt, Artificial Sequence
  Description of Artificial Sequence: Synthetic oligonucleotide
uggugcuucuuggacagcugaaaaa

SEQ ID NO: 127417 - RNA, 25 nt, Artificial Sequence
  Description of Artificial Sequence: Synthetic oligonucleotide
agcuauugcacaacugaauucuaaa

SEQ ID NO: 127418 - RNA, 25 nt, Artificial Sequence
  Description of Artificial Sequence: Synthetic oligonucleotide
auaugggaaaaaaguccuuauuaau

SEQ ID NO: 127419 - RNA, 25 nt, Artificial Sequence
  Description of Artificial Sequence: Synthetic oligonucleotide
uuuguuuguuggcacugaugauaag

SEQ ID NO: 127420 - RNA, 25 nt, Artificial Sequence
  Description of Artificial Sequence: Synthetic oligonucleotide
gaauucugugaaucauguaauucau

SEQ ID NO: 127421 - RNA, 25 nt, Artificial Sequence
  Description of Artificial Sequence: Synthetic oligonucleotide
uauugaccaaccucgacuuggccuc

SEQ ID NO: 127422 - RNA, 25 nt, Artificial Sequence
  Description of Artificial Sequence: Synthetic oligonucleotide
cccuucuagagauuacuaugaaugc

SEQ ID NO: 127423 - RNA, 25 nt, Artificial Sequence
  Description of Artificial Sequence: Synthetic oligonucleotide
cacuggaaucuauaaagaggcuugu

SEQ ID NO: 127424 - RNA, 25 nt, Artificial Sequence
  Description of Artificial Sequence: Synthetic oligonucleotide
uacagcauauguggauuuuaugauu

SEQ ID NO: 127425 - RNA, 25 nt, Artificial Sequence
  Description of Artificial Sequence: Synthetic oligonucleotide
uucuguggccagauugauucgucag

SEQ ID NO: 127426 - RNA, 25 nt, Artificial Sequence
  Description of Artificial Sequence: Synthetic oligonucleotide
ggaagaaagauugcccaucgaugaa

SEQ ID NO: 127427 - RNA, 25 nt, Artificial Sequence
  Description of Artificial Sequence: Synthetic oligonucleotide
aaaccagcuugcuuuggaaaugaau

SEQ ID NO: 127428 - RNA, 25 nt, Artificial Sequence
  Description of Artificial Sequence: Synthetic oligonucleotide
uaaaguuauggaauuggaaaaagaa

SEQ ID NO: 127429 - RNA, 25 nt, Artificial Sequence
  Description of Artificial Sequence: Synthetic oligonucleotide
aauugccaaugcuacggcuaaaccu

SEQ ID NO: 127430 - RNA, 25 nt, Artificial Sequence
  Description of Artificial Sequence: Synthetic oligonucleotide
ugaagaucgaaaugauccaaugcuu

SEQ ID NO: 127431 - RNA, 25 nt, Artificial Sequence
  Description of Artificial Sequence: Synthetic oligonucleotide
ucuguauaacaagaugacauuggcc

SEQ ID NO: 127432 - RNA, 25 nt, Artificial Sequence
  Description of Artificial Sequence: Synthetic oligonucleotide
ccagauccaaaauaacuuuucacua

SEQ ID NO: 127433 - RNA, 25 nt, Artificial Sequence
  Description of Artificial Sequence: Synthetic oligonucleotide
agagaucaaugggaagccauucagc

SEQ ID NO: 127434 - RNA, 25 nt, Artificial Sequence
  Description of Artificial Sequence: Synthetic oligonucleotide
cugguugaauuucacaaaugaaauc

SEQ ID NO: 127435 - RNA, 25 nt, Artificial Sequence
  Description of Artificial Sequence: Synthetic oligonucleotide
caugucaacugugaauauuaguauu

SEQ ID NO: 127436 - RNA, 25 nt, Artificial Sequence
  Description of Artificial Sequence: Synthetic oligonucleotide
uacaaaugaggaagaugugguuguu

SEQ ID NO: 127437 - RNA, 25 nt, Artificial Sequence
  Description of Artificial Sequence: Synthetic oligonucleotide
uuaugcuccagaauauuuaaccaaa

SEQ ID NO: 127438 - RNA, 25 nt, Artificial Sequence
  Description of Artificial Sequence: Synthetic oligonucleotide
acuuaagcccauucuuaccaaauau

SEQ ID NO: 127439 - RNA, 25 nt, Artificial Sequence
  Description of Artificial Sequence: Synthetic oligonucleotide
uucugccagagaucuucaaaauuua

SEQ ID NO: 127440 - RNA, 25 nt, Artificial Sequence
  Description of Artificial Sequence: Synthetic oligonucleotide
aauguccuggagauucauaauggau

SEQ ID NO: 127441 - RNA, 25 nt, Artificial Sequence
  Description of Artificial Sequence: Synthetic oligonucleotide
ucuuguaagcagccucagccgaacc

SEQ ID NO: 127442 - RNA, 25 nt, Artificial Sequence
  Description of Artificial Sequence: Synthetic oligonucleotide
cuacaaggaguccagaaaugcuuuc

SEQ ID NO: 127443 - RNA, 25 nt, Artificial Sequence
  Description of Artificial Sequence: Synthetic oligonucleotide
ccgcaaggcccuuuaugguacaacc

SEQ ID NO: 127444 - RNA, 25 nt, Artificial Sequence
  Description of Artificial Sequence: Synthetic oligonucleotide
cucagaaacagcaacuuggagacgu

SEQ ID NO: 127445 - RNA, 25 nt, Artificial Sequence
  Description of Artificial Sequence: Synthetic oligonucleotide
uugugcaaacuaugucaaugggaau

SEQ ID NO: 127446 - RNA, 25 nt, Artificial Sequence
  Description of Artificial Sequence: Synthetic oligonucleotide
uauggaaaaugcuguggggaggcuu

SEQ ID NO: 127447 - RNA, 25 nt, Artificial Sequence
  Description of Artificial Sequence: Synthetic oligonucleotide
uuauguggaagcagcauuugcugga

SEQ ID NO: 127448 - RNA, 25 nt, Artificial Sequence
  Description of Artificial Sequence: Synthetic oligonucleotide
agagaguaaacauguggucgaggau

SEQ ID NO: 127449 - RNA, 25 nt, Artificial Sequence
  Description of Artificial Sequence: Synthetic oligonucleotide
uuugauugcacagauccgagaaguu

SEQ ID NO: 127450 - RNA, 25 nt, Artificial Sequence
  Description of Artificial Sequence: Synthetic oligonucleotide
uuuuauucagacuuuagaugaccuc

SEQ ID NO: 127451 - RNA, 25 nt, Artificial Sequence
  Description of Artificial Sequence: Synthetic oligonucleotide
cacuuggauggaugccgagacaaaa

SEQ ID NO: 127452 - RNA, 25 nt, Artificial Sequence
  Description of Artificial Sequence: Synthetic oligonucleotide
aaagagagcugaagaaaaggccuua

SEQ ID NO: 127453 - RNA, 25 nt, Artificial Sequence
  Description of Artificial Sequence: Synthetic oligonucleotide
agcaauuaaagaaaggaucggcuau

SEQ ID NO: 127454 - RNA, 25 nt, Artificial Sequence
  Description of Artificial Sequence: Synthetic oligonucleotide
uccugaugacauuguuucaaaugau

SEQ ID NO: 127455 - RNA, 25 nt, Artificial Sequence
  Description of Artificial Sequence: Synthetic oligonucleotide
uaacaaacugaauaaugaguaccuc

SEQ ID NO: 127456 - RNA, 25 nt, Artificial Sequence
  Description of Artificial Sequence: Synthetic oligonucleotide
cgaguugaacuacaaagaagaugaa

SEQ ID NO: 127457 - RNA, 25 nt, Artificial Sequence
  Description of Artificial Sequence: Synthetic oligonucleotide
auacuucgagaacauaauucaaaau

SEQ ID NO: 127458 - RNA, 25 nt, Artificial Sequence
  Description of Artificial Sequence: Synthetic oligonucleotide
uuugaaauucagccaaaguaaacaa

SEQ ID NO: 127459 - RNA, 25 nt, Artificial Sequence
  Description of Artificial Sequence: Synthetic oligonucleotide
acugaagaagcuccgagaaaaggug

SEQ ID NO: 127460 - RNA, 25 nt, Artificial Sequence
  Description of Artificial Sequence: Synthetic oligonucleotide
ggacaaagaugaguggauaagugga

SEQ ID NO: 127461 - RNA, 25 nt, Artificial Sequence
  Description of Artificial Sequence: Synthetic oligonucleotide
agcagcuguagucaaugcauuuuac

SEQ ID NO: 127462 - RNA, 25 nt, Artificial Sequence
  Description of Artificial Sequence: Synthetic oligonucleotide
cucuucaggaagaaaucagauaguc

SEQ ID NO: 127463 - RNA, 25 nt, Artificial Sequence
  Description of Artificial Sequence: Synthetic oligonucleotide
cuucccagccggcauucugcagccc

SEQ ID NO: 127464 - RNA, 25 nt, Artificial Sequence
  Description of Artificial Sequence: Synthetic oligonucleotide
ccccuucuuuagugcccagcagucc

SEQ ID NO: 127465 - RNA, 25 nt, Artificial Sequence
  Description of Artificial Sequence: Synthetic oligonucleotide
caacucauugaacuaugggggcauc

SEQ ID NO: 127466 - RNA, 25 nt, Artificial Sequence
  Description of Artificial Sequence: Synthetic oligonucleotide
cggcauggucauaggacacgaaauc

SEQ ID NO: 127467 - RNA, 25 nt, Artificial Sequence
  Description of Artificial Sequence: Synthetic oligonucleotide
cacccauggcuucgaugacaauggc

SEQ ID NO: 127468 - RNA, 25 nt, Artificial Sequence
  Description of Artificial Sequence: Synthetic oligonucleotide
cagaaacuuuaacaaagauggagac

SEQ ID NO: 127469 - RNA, 25 nt, Artificial Sequence
  Description of Artificial Sequence: Synthetic oligonucleotide
ccucguugacugguggacucaacag

SEQ ID NO: 127470 - RNA, 25 nt, Artificial Sequence
  Description of Artificial Sequence: Synthetic oligonucleotide
gucugcaaguaacuuuaaggagcaa

SEQ ID NO: 127471 - RNA, 25 nt, Artificial Sequence
  Description of Artificial Sequence: Synthetic oligonucleotide
aucccagugcaugguguaucaguau

SEQ ID NO: 127472 - RNA, 25 nt, Artificial Sequence
  Description of Artificial Sequence: Synthetic oligonucleotide
uggaaacuuuuccugggaccuggca

SEQ ID NO: 127473 - RNA, 25 nt, Artificial Sequence
  Description of Artificial Sequence: Synthetic oligonucleotide
agguggacagcaccuuaauggaauu

SEQ ID NO: 127474 - RNA, 25 nt, Artificial Sequence
  Description of Artificial Sequence: Synthetic oligonucleotide
uaauacacugggagaaaacauugcu

SEQ ID NO: 127475 - RNA, 25 nt, Artificial Sequence
  Description of Artificial Sequence: Synthetic oligonucleotide
ugauaauggaggucuuggucaagca

SEQ ID NO: 127476 - RNA, 25 nt, Artificial Sequence
  Description of Artificial Sequence: Synthetic oligonucleotide
auacagagccuaucagaauuauauu

SEQ ID NO: 127477 - RNA, 25 nt, Artificial Sequence
  Description of Artificial Sequence: Synthetic oligonucleotide
uaaaaagaauggcgaagaaaaauua

SEQ ID NO: 127478 - RNA, 25 nt, Artificial Sequence
  Description of Artificial Sequence: Synthetic oligonucleotide
acuuccuggacuugaccuaaaucac

SEQ ID NO: 127479 - RNA, 25 nt, Artificial Sequence
  Description of Artificial Sequence: Synthetic oligonucleotide
caaacaacuauuuuucuugaacuuu

SEQ ID NO: 127480 - RNA, 25 nt, Artificial Sequence
  Description of Artificial Sequence: Synthetic oligonucleotide
ugcacaggugugguguggaaccuau

SEQ ID NO: 127481 - RNA, 25 nt, Artificial Sequence
  Description of Artificial Sequence: Synthetic oligonucleotide
uaggccagaguaugcgguuaacucc

SEQ ID NO: 127482 - RNA, 25 nt, Artificial Sequence
  Description of Artificial Sequence: Synthetic oligonucleotide
cauuaaaacagaugugcacagucca

SEQ ID NO: 127483 - RNA, 25 nt, Artificial Sequence
  Description of Artificial Sequence: Synthetic oligonucleotide
aggcaauuucaggauuauugggacu

SEQ ID NO: 127484 - RNA, 25 nt, Artificial Sequence
  Description of Artificial Sequence: Synthetic oligonucleotide
uuugcagaacucugcagaguuuuca

SEQ ID NO: 127485 - RNA, 25 nt, Artificial Sequence
  Description of Artificial Sequence: Synthetic oligonucleotide
agaagccuuucacugccgcaagaau

SEQ ID NO: 127486 - RNA, 25 nt, Artificial Sequence
  Description of Artificial Sequence: Synthetic oligonucleotide
uucauacaugaauccagaaaagaag

SEQ ID NO: 127487 - RNA, 25 nt, Artificial Sequence
  Description of Artificial Sequence: Synthetic oligonucleotide
gugccggguuuggugaucuucaaaa

SEQ ID NO: 127488 - RNA, 25 nt, Artificial Sequence
  Description of Artificial Sequence: Synthetic oligonucleotide
agaagcauugcagcccuuggcuaga

SEQ ID NO: 127489 - RNA, 25 nt, Artificial Sequence
  Description of Artificial Sequence: Synthetic oligonucleotide
acuugccaacaccacagaaaugggg

SEQ ID NO: 127490 - RNA, 25 nt, Artificial Sequence
  Description of Artificial Sequence: Synthetic oligonucleotide
gaauucucuaaucgaaagaaaaugg

SEQ ID NO: 127491 - RNA, 25 nt, Artificial Sequence
  Description of Artificial Sequence: Synthetic oligonucleotide
ggcccuaggggucacuguacugacu

SEQ ID NO: 127492 - RNA, 25 nt, Artificial Sequence
  Description of Artificial Sequence: Synthetic oligonucleotide
uugagggugauuaacagagagggca

SEQ ID NO: 127493 - RNA, 25 nt, Artificial Sequence
  Description of Artificial Sequence: Synthetic oligonucleotide
accaucacaauacagauaacauuag

SEQ ID NO: 127494 - RNA, 25 nt, Artificial Sequence
  Description of Artificial Sequence: Synthetic oligonucleotide
gguuguccuagaaaggguguggagg

SEQ ID NO: 127495 - RNA, 25 nt, Artificial Sequence
  Description of Artificial Sequence: Synthetic oligonucleotide
ggaggaagggggucuaaggucuauc

SEQ ID NO: 127496 - RNA, 25 nt, Artificial Sequence
  Description of Artificial Sequence: Synthetic oligonucleotide
caagucaaucauuucucacugugua

SEQ ID NO: 127497 - RNA, 25 nt, Artificial Sequence
  Description of Artificial Sequence: Synthetic oligonucleotide
acauaaugcuuaauuucuaaagaua

SEQ ID NO: 127498 - RNA, 25 nt, Artificial Sequence
  Description of Artificial Sequence: Synthetic oligonucleotide
aauauuacuguuuauuucuguuucu

SEQ ID NO: 127499 - RNA, 25 nt, Artificial Sequence
  Description of Artificial Sequence: Synthetic oligonucleotide
ucauauggucuaccaguuugcugau

SEQ ID NO: 127500 - RNA, 25 nt, Artificial Sequence
  Description of Artificial Sequence: Synthetic oligonucleotide
ugucccuagaaaacaaugcaaaacc

SEQ ID NO: 127501 - RNA, 25 nt, Artificial Sequence
  Description of Artificial Sequence: Synthetic oligonucleotide
cuuugagguagaccaggauuucuaa

SEQ ID NO: 127502 - RNA, 25 nt, Artificial Sequence
  Description of Artificial Sequence: Synthetic oligonucleotide
aucaaaagggaaaagaagauguuga

SEQ ID NO: 127503 - RNA, 25 nt, Artificial Sequence
  Description of Artificial Sequence: Synthetic oligonucleotide
aagaauacaguuaggcaccagaaga

SEQ ID NO: 127504 - RNA, 25 nt, Artificial Sequence
  Description of Artificial Sequence: Synthetic oligonucleotide
aacaguaggugacacuauaguuuaa

SEQ ID NO: 127505 - RNA, 25 nt, Artificial Sequence
  Description of Artificial Sequence: Synthetic oligonucleotide
aaacacauugccuaacuacuaguuu

SEQ ID NO: 127506 - RNA, 25 nt, Artificial Sequence
  Description of Artificial Sequence: Synthetic oligonucleotide
uuuacuuuuauuugcaacauuuaca

SEQ ID NO: 127507 - RNA, 25 nt, Artificial Sequence
  Description of Artificial Sequence: Synthetic oligonucleotide
aguccuucaaaauccuuccaaagaa

SEQ ID NO: 127508 - RNA, 25 nt, Artificial Sequence
  Description of Artificial Sequence: Synthetic oligonucleotide
auucuuauacacauuggggccuugg

SEQ ID NO: 127509 - RNA, 25 nt, Artificial Sequence
  Description of Artificial Sequence: Synthetic oligonucleotide
gagcuuacauaguuuuaaacucauu

SEQ ID NO: 127510 - RNA, 25 nt, Artificial Sequence
  Description of Artificial Sequence: Synthetic oligonucleotide
uuuugccauacaucaguuauucauu

SEQ ID NO: 127511 - RNA, 25 nt, Artificial Sequence
  Description of Artificial Sequence: Synthetic oligonucleotide
ucugugaucauuuauuuuaagcacu

SEQ ID NO: 127512 - RNA, 25 nt, Artificial Sequence
  Description of Artificial Sequence: Synthetic oligonucleotide
ucuuaaagcaaaaaaugaaugucua

SEQ ID NO: 127513 - RNA, 25 nt, Artificial Sequence
  Description of Artificial Sequence: Synthetic oligonucleotide
aaaauuguuuuuuguuguaccugcu

SEQ ID NO: 127514 - RNA, 25 nt, Artificial Sequence
  Description of Artificial Sequence: Synthetic oligonucleotide
uuugacugaugcugagauucuucag

SEQ ID NO: 127515 - RNA, 25 nt, Artificial Sequence
  Description of Artificial Sequence: Synthetic oligonucleotide
ggcuuccugcaauuuucuaagcaau

SEQ ID NO: 127516 - RNA, 25 nt, Artificial Sequence
  Description of Artificial Sequence: Synthetic oligonucleotide
uuucuugcucuaucucucaaaacuu

SEQ ID NO: 127517 - RNA, 25 nt, Artificial Sequence
  Description of Artificial Sequence: Synthetic oligonucleotide
ugguauuuuucagagauuuauauaa

SEQ ID NO: 127518 - RNA, 25 nt, Artificial Sequence
  Description of Artificial Sequence: Synthetic oligonucleotide
aauguaaaaauaauaauuuuuauau

SEQ ID NO: 127519 - RNA, 25 nt, Artificial Sequence
  Description of Artificial Sequence: Synthetic oligonucleotide
uuuaauuauuaacuacauuuaugag

SEQ ID NO: 127520 - RNA, 25 nt, Artificial Sequence
  Description of Artificial Sequence: Synthetic oligonucleotide
guaacuauuauuauagguaaucaau

SEQ ID NO: 127521 - RNA, 25 nt, Artificial Sequence
  Description of Artificial Sequence: Synthetic oligonucleotide
ugaauauugaaguuucagcuuaaaa

SEQ ID NO: 127522 - RNA, 25 nt, Artificial Sequence
  Description of Artificial Sequence: Synthetic oligonucleotide
auaaacaguugugaaccaagaucua

SEQ ID NO: 127523 - RNA, 25 nt, Artificial Sequence
  Description of Artificial Sequence: Synthetic oligonucleotide
auaaagcgauauacagaugaaaauu

SEQ ID NO: 127524 - RNA, 25 nt, Artificial Sequence
  Description of Artificial Sequence: Synthetic oligonucleotide
uugagacuauuuaaacuuauaaauc

SEQ ID NO: 127525 - RNA, 25 nt, Artificial Sequence
  Description of Artificial Sequence: Synthetic oligonucleotide
cauauugaugaaaagauuuaagcac

SEQ ID NO: 127526 - RNA, 25 nt, Artificial Sequence
  Description of Artificial Sequence: Synthetic oligonucleotide
caaacuuuaggguaaaaauugccau

SEQ ID NO: 127527 - RNA, 25 nt, Artificial Sequence
  Description of Artificial Sequence: Synthetic oligonucleotide
uuggacaguugucuagagauauaua

SEQ ID NO: 127528 - RNA, 25 nt, Artificial Sequence
  Description of Artificial Sequence: Synthetic oligonucleotide
auacuugugguuuucaaauuggacu

SEQ ID NO: 127529 - RNA, 25 nt, Artificial Sequence
  Description of Artificial Sequence: Synthetic oligonucleotide
uuucaaaauuaaaucugucccugag

SEQ ID NO: 127530 - RNA, 25 nt, Artificial Sequence
  Description of Artificial Sequence: Synthetic oligonucleotide
gagugucucugauaaaagggcaaau

SEQ ID NO: 127531 - RNA, 25 nt, Artificial Sequence
  Description of Artificial Sequence: Synthetic oligonucleotide
ucugcaccuauguagcucugcaucu

SEQ ID NO: 127532 - RNA, 25 nt, Artificial Sequence
  Description of Artificial Sequence: Synthetic oligonucleotide
uccugucuuuucagguuugucauca

SEQ ID NO: 127533 - RNA, 25 nt, Artificial Sequence
  Description of Artificial Sequence: Synthetic oligonucleotide
agauggaaauauuuugauaauaaau

SEQ ID NO: 127534 - RNA, 25 nt, Artificial Sequence
  Description of Artificial Sequence: Synthetic oligonucleotide
uugaaauugugaacucauugcuccc

SEQ ID NO: 127535 - RNA, 25 nt, Artificial Sequence
  Description of Artificial Sequence: Synthetic oligonucleotide
cuaagacugugacaacugucuaacu

SEQ ID NO: 127536 - RNA, 25 nt, Artificial Sequence
  Description of Artificial Sequence: Synthetic oligonucleotide
uuuagaagugcauuucugaauagaa

SEQ ID NO: 127537 - RNA, 25 nt, Artificial Sequence
  Description of Artificial Sequence: Synthetic oligonucleotide
aaugggaggccucugauggaccuuc

SEQ ID NO: 127538 - RNA, 25 nt, Artificial Sequence
  Description of Artificial Sequence: Synthetic oligonucleotide
cuagaauuauaagucacaaagaguu

SEQ ID NO: 127539 - RNA, 25 nt, Artificial Sequence
  Description of Artificial Sequence: Synthetic oligonucleotide
ucuggaaaagaacuguuuacugcuu

SEQ ID NO: 127540 - RNA, 25 nt, Artificial Sequence
  Description of Artificial Sequence: Synthetic oligonucleotide
ugauaggaauucaucuuuugaggcu

SEQ ID NO: 127541 - RNA, 25 nt, Artificial Sequence
  Description of Artificial Sequence: Synthetic oligonucleotide
uucuguuccucucuuuuccuguugu

SEQ ID NO: 127542 - RNA, 25 nt, Artificial Sequence
  Description of Artificial Sequence: Synthetic oligonucleotide
uauugacuauuuucguucauuacuu

SEQ ID NO: 127543 - RNA, 25 nt, Artificial Sequence
  Description of Artificial Sequence: Synthetic oligonucleotide
ugauuaagauuuuacaaaagaggag

SEQ ID NO: 127544 - RNA, 25 nt, Artificial Sequence
  Description of Artificial Sequence: Synthetic oligonucleotide
gcacuuccaaaauucuuauuuuucc

SEQ ID NO: 127545 - RNA, 25 nt, Artificial Sequence
  Description of Artificial Sequence: Synthetic oligonucleotide
cuaacaaaagaugaaagcagggaau

SEQ ID NO: 127546 - RNA, 25 nt, Artificial Sequence
  Description of Artificial Sequence: Synthetic oligonucleotide
uuucuaucuaaaugaugaguauuag

SEQ ID NO: 127547 - RNA, 25 nt, Artificial Sequence
  Description of Artificial Sequence: Synthetic oligonucleotide
guucccugucucuugaaaaaugccc

SEQ ID NO: 127548 - RNA, 25 nt, Artificial Sequence
  Description of Artificial Sequence: Synthetic oligonucleotide
acagaaauacuauaacauauguaca

SEQ ID NO: 127549 - RNA, 25 nt, Artificial Sequence
  Description of Artificial Sequence: Synthetic oligonucleotide
auaaauugcauaaagcauaaguaua

SEQ ID NO: 127550 - RNA, 25 nt, Artificial Sequence
  Description of Artificial Sequence: Synthetic oligonucleotide
acaguucaauaaacuuaacuuuaac

SEQ ID NO: 127551 - RNA, 25 nt, Artificial Sequence
  Description of Artificial Sequence: Synthetic oligonucleotide
cugaacaauggcccuguagccagca

SEQ ID NO: 127552 - RNA, 25 nt, Artificial Sequence
  Description of Artificial Sequence: Synthetic oligonucleotide
accuguaagaaacagagcaguacca

SEQ ID NO: 127553 - RNA, 25 nt, Artificial Sequence
  Description of Artificial Sequence: Synthetic oligonucleotide
agcgcucuaaaagcaccuccuuguc

SEQ ID NO: 127554 - RNA, 25 nt, Artificial Sequence
  Description of Artificial Sequence: Synthetic oligonucleotide
cacuuuauuacucccagaacaacaa

SEQ ID NO: 127555 - RNA, 25 nt, Artificial Sequence
  Description of Artificial Sequence: Synthetic oligonucleotide
acuauccugacuucuaauaucauuc

SEQ ID NO: 127556 - RNA, 25 nt, Artificial Sequence
  Description of Artificial Sequence: Synthetic oligonucleotide
cacuagcuuugccugguuuugucuu

SEQ ID NO: 127557 - RNA, 25 nt, Artificial Sequence
  Description of Artificial Sequence: Synthetic oligonucleotide
uuuaugcagauagaaucaaucagua

SEQ ID NO: 127558 - RNA, 25 nt, Artificial Sequence
  Description of Artificial Sequence: Synthetic oligonucleotide
auguauucuuuugugccuggcuucu

SEQ ID NO: 127559 - RNA, 25 nt, Artificial Sequence
  Description of Artificial Sequence: Synthetic oligonucleotide
uuucucucagccuuacauuugugag

SEQ ID NO: 127560 - RNA, 25 nt, Artificial Sequence
  Description of Artificial Sequence: Synthetic oligonucleotide
gauuccucuguauugugcugauugu

SEQ ID NO: 127561 - RNA, 25 nt, Artificial Sequence
  Description of Artificial Sequence: Synthetic oligonucleotide
uggaucuuuucauucucauugcaga

SEQ ID NO: 127562 - RNA, 25 nt, Artificial Sequence
  Description of Artificial Sequence: Synthetic oligonucleotide
aauaauguucuauugugggacuuau

SEQ ID NO: 127563 - RNA, 25 nt, Artificial Sequence
  Description of Artificial Sequence: Synthetic oligonucleotide
uuacaauuuguucauccuauuguug

SEQ ID NO: 127564 - RNA, 25 nt, Artificial Sequence
  Description of Artificial Sequence: Synthetic oligonucleotide
gaugggcacuugagaacuuuccauu

SEQ ID NO: 127565 - RNA, 25 nt, Artificial Sequence
  Description of Artificial Sequence: Synthetic oligonucleotide
uuuggcgcuauuacaaauagugcaa

SEQ ID NO: 127566 - RNA, 25 nt, Artificial Sequence
  Description of Artificial Sequence: Synthetic oligonucleotide
acuaugaauguacugcauguuacca

SEQ ID NO: 127567 - RNA, 25 nt, Artificial Sequence
  Description of Artificial Sequence: Synthetic oligonucleotide
aucuuacuugagccuuuaauggacu

SEQ ID NO: 127568 - RNA, 25 nt, Artificial Sequence
  Description of Artificial Sequence: Synthetic oligonucleotide
uuauuucuucaaauccuuccaaaaa

SEQ ID NO: 127569 - RNA, 25 nt, Artificial Sequence
  Description of Artificial Sequence: Synthetic oligonucleotide
auuauuauaagcauugaaauuauag

SEQ ID NO: 127570 - RNA, 25 nt, Artificial Sequence
  Description of Artificial Sequence: Synthetic oligonucleotide
guuucaagccaacuguggauacccu

SEQ ID NO: 127571 - RNA, 25 nt, Artificial Sequence
  Description of Artificial Sequence: Synthetic oligonucleotide
uuacccuuuccuccuuuaucacaac

SEQ ID NO: 127572 - RNA, 25 nt, Artificial Sequence
  Description of Artificial Sequence: Synthetic oligonucleotide
ccaccguuacaaguauacuuauauu

SEQ ID NO: 127573 - RNA, 25 nt, Artificial Sequence
  Description of Artificial Sequence: Synthetic oligonucleotide
uucccuaaaauacauuuaaaacuua

SEQ ID NO: 127574 - RNA, 25 nt, Artificial Sequence
  Description of Artificial Sequence: Synthetic oligonucleotide
accuaagugacauuuguaguuggag

SEQ ID NO: 127575 - RNA, 25 nt, Artificial Sequence
  Description of Artificial Sequence: Synthetic oligonucleotide
guaauaggagcuuccagcucuaaua

SEQ ID NO: 127576 - RNA, 25 nt, Artificial Sequence
  Description of Artificial Sequence: Synthetic oligonucleotide
aaaacagcugucucuaacuuauuuu

SEQ ID NO: 127577 - RNA, 25 nt, Artificial Sequence
  Description of Artificial Sequence: Synthetic oligonucleotide
uauuuccaucaugucagagcaggug

SEQ ID NO: 127578 - RNA, 25 nt, Artificial Sequence
  Description of Artificial Sequence: Synthetic oligonucleotide
gaagagccagaagugaagagugacu

SEQ ID NO: 127579 - RNA, 25 nt, Artificial Sequence
  Description of Artificial Sequence: Synthetic oligonucleotide
uaguacaaauuauaaaaagccacua

SEQ ID NO: 127580 - RNA, 25 nt, Artificial Sequence
  Description of Artificial Sequence: Synthetic oligonucleotide
agacucuucacuguuagcuuuuuaa

SEQ ID NO: 127581 - RNA, 25 nt, Artificial Sequence
  Description of Artificial Sequence: Synthetic oligonucleotide
aaacauuaggcucccaucccuaugg

SEQ ID NO: 127582 - RNA, 25 nt, Artificial Sequence
  Description of Artificial Sequence: Synthetic oligonucleotide
gaggaacaacucuccagugccugga

SEQ ID NO: 127583 - RNA, 25 nt, Artificial Sequence
  Description of Artificial Sequence: Synthetic oligonucleotide
auccccucugucuacaaauauaaga

SEQ ID NO: 127584 - RNA, 25 nt, Artificial Sequence
  Description of Artificial Sequence: Synthetic oligonucleotide
auuuucugggccuaaaggauagauc

SEQ ID NO: 127585 - RNA, 25 nt, Artificial Sequence
  Description of Artificial Sequence: Synthetic oligonucleotide
caaagucaaaaauagcaaugccucc

SEQ ID NO: 127586 - RNA, 25 nt, Artificial Sequence
  Description of Artificial Sequence: Synthetic oligonucleotide
ccuaucccucacacauccagacauc

SEQ ID NO: 127587 - RNA, 25 nt, Artificial Sequence
  Description of Artificial Sequence: Synthetic oligonucleotide
caugaauuuuacaugguacucuugu

SEQ ID NO: 127588 - RNA, 25 nt, Artificial Sequence
  Description of Artificial Sequence: Synthetic oligonucleotide
uugaguucuguagagccuucugaug

SEQ ID NO: 127589 - RNA, 25 nt, Artificial Sequence
  Description of Artificial Sequence: Synthetic oligonucleotide
gucucuaaagcacuaccgauucuuu

SEQ ID NO: 127590 - RNA, 25 nt, Artificial Sequence
  Description of Artificial Sequence: Synthetic oligonucleotide
uggaguugucacaucagauaagaca

SEQ ID NO: 127591 - RNA, 25 nt, Artificial Sequence
  Description of Artificial Sequence: Synthetic oligonucleotide
auaucucuaauuccauccauaaauc

SEQ ID NO: 127592 - RNA, 25 nt, Artificial Sequence
  Description of Artificial Sequence: Synthetic oligonucleotide
ccaguucuacuauggcugaguucug

SEQ ID NO: 127593 - RNA, 25 nt, Artificial Sequence
  Description of Artificial Sequence: Synthetic oligonucleotide
ggucaaagaaagaaaguuuagaagc

SEQ ID NO: 127594 - RNA, 25 nt, Artificial Sequence
  Description of Artificial Sequence: Synthetic oligonucleotide
cugagacacaaaggguugggagcug

SEQ ID NO: 127595 - RNA, 25 nt, Artificial Sequence
  Description of Artificial Sequence: Synthetic oligonucleotide
gaugaaacucacaaaugaugguagg

SEQ ID NO: 127596 - RNA, 25 nt, Artificial Sequence
  Description of Artificial Sequence: Synthetic oligonucleotide
gaagaagcucucgacaauacccguu

SEQ ID NO: 127597 - RNA, 25 nt, Artificial Sequence
  Description of Artificial Sequence: Synthetic oligonucleotide
uggcaaggagucugccuccaugcug

SEQ ID NO: 127598 - RNA, 25 nt, Artificial Sequence
  Description of Artificial Sequence: Synthetic oligonucleotide
gcaguguucgaguggauuguaggug

SEQ ID NO: 127599 - RNA, 25 nt, Artificial Sequence
  Description of Artificial Sequence: Synthetic oligonucleotide
gcaagauggaaaggauuguaggugc

SEQ ID NO: 127600 - RNA, 25 nt, Artificial Sequence
  Description of Artificial Sequence: Synthetic oligonucleotide
caagcuguccagagaaaagaguccu

SEQ ID NO: 127601 - RNA, 25 nt, Artificial Sequence
  Description of Artificial Sequence: Synthetic oligonucleotide
uuguuccagcccuauucugccacuc

SEQ ID NO: 127602 - RNA, 25 nt, Artificial Sequence
  Description of Artificial Sequence: Synthetic oligonucleotide
ccugacagggugaccuuggguauuu

SEQ ID NO: 127603 - RNA, 25 nt, Artificial Sequence
  Description of Artificial Sequence: Synthetic oligonucleotide
ugcaauauuccuuugggccucugcu

SEQ ID NO: 127604 - RNA, 25 nt, Artificial Sequence
  Description of Artificial Sequence: Synthetic oligonucleotide
uucucucaccuaaaaaaagagaauu

SEQ ID NO: 127605 - RNA, 25 nt, Artificial Sequence
  Description of Artificial Sequence: Synthetic oligonucleotide
uagauuauauuggugguucucagca

SEQ ID NO: 127606 - RNA, 25 nt, Artificial Sequence
  Description of Artificial Sequence: Synthetic oligonucleotide
aagagaaggaguauguguccaaugc

SEQ ID NO: 127607 - RNA, 25 nt, Artificial Sequence
  Description of Artificial Sequence: Synthetic oligonucleotide
cugccuucccaugaaucugucuccc

SEQ ID NO: 127608 - RNA, 25 nt, Artificial Sequence
  Description of Artificial Sequence: Synthetic oligonucleotide
caguuaugaaucagugggcaggaua

SEQ ID NO: 127609 - RNA, 25 nt, Artificial Sequence
  Description of Artificial Sequence: Synthetic oligonucleotide
aaacugaaaacucccauuuacgugu

SEQ ID NO: 127610 - RNA, 25 nt, Artificial Sequence
  Description of Artificial Sequence: Synthetic oligonucleotide
ucugaaucgagugagacaaaauuuu

SEQ ID NO: 127611 - RNA, 25 nt, Artificial Sequence
  Description of Artificial Sequence: Synthetic oligonucleotide
uaguccaaauaacaaguaccaaagu

SEQ ID NO: 127612 - RNA, 25 nt, Artificial Sequence
  Description of Artificial Sequence: Synthetic oligonucleotide
uuuuaucaaguuugggucugugcug

SEQ ID NO: 127613 - RNA, 25 nt, Artificial Sequence
  Description of Artificial Sequence: Synthetic oligonucleotide
gcuguuacuguuaaccauuuaagug

SEQ ID NO: 127614 - RNA, 25 nt, Artificial Sequence
  Description of Artificial Sequence: Synthetic oligonucleotide
ggggcaaaaccuugcuaauuuucuc

SEQ ID NO: 127615 - RNA, 25 nt, Artificial Sequence
  Description of Artificial Sequence: Synthetic oligonucleotide
caaaagcauuuaucauucuuguugc

SEQ ID NO: 127616 - RNA, 25 nt, Artificial Sequence
  Description of Artificial Sequence: Synthetic oligonucleotide
ccacagcuggagcucucaaacuaaa

SEQ ID NO: 127617 - RNA, 25 nt, Artificial Sequence
  Description of Artificial Sequence: Synthetic oligonucleotide
aagacauuuguuauuuuggaaagaa

SEQ ID NO: 127618 - RNA, 25 nt, Artificial Sequence
  Description of Artificial Sequence: Synthetic oligonucleotide
agaaagacucuauucucaaaguuuc

SEQ ID NO: 127619 - RNA, 25 nt, Artificial Sequence
  Description of Artificial Sequence: Synthetic oligonucleotide
ccuaaucagaaauuuuuaucaguuu

SEQ ID NO: 127620 - RNA, 25 nt, Artificial Sequence
  Description of Artificial Sequence: Synthetic oligonucleotide
uccagucucaaaaauacaaaauaaa

SEQ ID NO: 127621 - RNA, 25 nt, Artificial Sequence
  Description of Artificial Sequence: Synthetic oligonucleotide
aaacaaacguuuuuaauacuauugc

SEQ ID NO: 127622 - RNA, 25 nt, Artificial Sequence
  Description of Artificial Sequence: Synthetic oligonucleotide
gagagcgccgagacgcgcggggcgc

SEQ ID NO: 127623 - RNA, 25 nt, Artificial Sequence
  Description of Artificial Sequence: Synthetic oligonucleotide
cggagaugugcaaguggcgaagcuu

SEQ ID NO: 127624 - RNA, 25 nt, Artificial Sequence
  Description of Artificial Sequence: Synthetic oligonucleotide
ugaccgagagcaggcuggagcagcc

SEQ ID NO: 127625 - RNA, 25 nt, Artificial Sequence
  Description of Artificial Sequence: Synthetic oligonucleotide
cgcccaacuccuggcgcgggaucug

SEQ ID NO: 127626 - RNA, 25 nt, Artificial Sequence
  Description of Artificial Sequence: Synthetic oligonucleotide
gcugaggggucacgauuuuagguga

SEQ ID NO: 127627 - DNA, 21 bp, Artificial Sequence
  Description of Artificial Sequence: Synthetic oligonucleotide
  Description of Combined DNA/RNA Molecule: Synthetic oligonucleotide
cuacacaaaucagcgauuutt

SEQ ID NO: 127628 - DNA, 21 bp, Artificial Sequence
  Description of Artificial Sequence: Synthetic oligonucleotide
  Description of Combined DNA/RNA Molecule: Synthetic oligonucleotide
aaaucgcugauuuguguagtt

SEQ ID NO: 127629 - DNA, 25 bp, Artificial Sequence
  Description of Artificial Sequence: Synthetic oligonucleotide
  Description of Combined DNA/RNA Molecule: Synthetic oligonucleotide
cuacacaaaucagcgauuuccaugt

SEQ ID NO: 127630 - RNA, 27 nt, Artificial Sequence
  Description of Artificial Sequence: Synthetic oligonucleotide
acauggaaaucgcugauuuguguaguc

SEQ ID NO: 127631 - RNA, 13 nt, Artificial Sequence
  Description of Artificial Sequence: Synthetic oligonucleotide
cuacacaaaucag

SEQ ID NO: 127632 - DNA, 11 bp, Artificial Sequence
  Description of Artificial Sequence: Synthetic oligonucleotide
  Description of Combined DNA/RNA Molecule: Synthetic oligonucleotide
gauuuccaugt

SEQ ID NO: 127633 - DNA, 21 bp, Artificial Sequence
  Description of Artificial Sequence: Synthetic oligonucleotide
  Description of Combined DNA/RNA Molecule: Synthetic oligonucleotide
ggaucuuauuucuucggagtt

SEQ ID NO: 127634 - DNA, 21 bp, Artificial Sequence
  Description of Artificial Sequence: Synthetic oligonucleotide
  Description of Combined DNA/RNA Molecule: Synthetic oligonucleotide
cuccgaagaaauaagaucctt

SEQ ID NO: 127635 - RNA, 11 nt, Artificial Sequence
  Description of Artificial Sequence: Synthetic oligonucleotide
ggaucuuauuu

SEQ ID NO: 127636 - DNA, 10 bp, Artificial Sequence
  Description of Artificial Sequence: Synthetic oligonucleotide
  Description of Combined DNA/RNA Molecule: Synthetic oligonucleotide
cuucggagtt

SEQ ID NO: 127637 - RNA, 27 nt, Artificial Sequence
  Description of Artificial Sequence: Synthetic oligonucleotide
cauugucuccgaagaaauaagauccuu

SEQ ID NO: 127638 - RNA, 8 nt, Artificial Sequence
  Description of Artificial Sequence: Synthetic oligonucleotide
  modified_base (2): LNA-G
ggaucuua

SEQ ID NO: 127639 - DNA, 17 bp, Artificial Sequence
  Description of Artificial Sequence: Synthetic oligonucleotide
  Description of Combined DNA/RNA Molecule: Synthetic oligonucleotide
uuucuucggagacaatg

SEQ ID NO: 127640 - DNA, 16 bp, Artificial Sequence
  Description of Artificial Sequence: Synthetic oligonucleotide
  Description of Combined DNA/RNA Molecule: Synthetic oligonucleotide
uucuucggagacaatg

SEQ ID NO: 127641 - DNA, 15 bp, Artificial Sequence
  Description of Artificial Sequence: Synthetic oligonucleotide
  Description of Combined DNA/RNA Molecule: Synthetic oligonucleotide
ucuucggagacaatg

SEQ ID NO: 127642 - DNA, 14 bp, Artificial Sequence
  Description of Artificial Sequence: Synthetic oligonucleotide
  Description of Combined DNA/RNA Molecule: Synthetic oligonucleotide
cuucggagacaatg

SEQ ID NO: 127643 - DNA, 13 bp, Artificial Sequence
  Description of Artificial Sequence: Synthetic oligonucleotide
  Description of Combined DNA/RNA Molecule: Synthetic oligonucleotide
uucggagacaatg

SEQ ID NO: 127644 - DNA, 12 bp, Artificial Sequence
  Description of Artificial Sequence: Synthetic oligonucleotide
  Description of Combined DNA/RNA Molecule: Synthetic oligonucleotide
ucggagacaatg

SEQ ID NO: 127645 - DNA, 11 bp, Artificial Sequence
  Description of Artificial Sequence: Synthetic oligonucleotide
  Description of Combined DNA/RNA Molecule: Synthetic oligonucleotide
cggagacaatg

SEQ ID NO: 127646 - RNA, 9 nt, Artificial Sequence
  Description of Artificial Sequence: Synthetic oligonucleotide
  modified_base (2): LNA-G
ggaucuuau

SEQ ID NO: 127647 - RNA, 10 nt, Artificial Sequence
  Description of Artificial Sequence: Synthetic oligonucleotide
  modified_base (2): LNA-G
ggaucuuauu

SEQ ID NO: 127648 - RNA, 11 nt, Artificial Sequence
  Description of Artificial Sequence: Synthetic oligonucleotide
  modified_base (2): LNA-G
ggaucuuauuu

SEQ ID NO: 127649 - RNA, 12 nt, Artificial Sequence
  Description of Artificial Sequence: Synthetic oligonucleotide
  modified_base (2): LNA-G
ggaucuuauuuc

SEQ ID NO: 127650 - RNA, 8 nt, Artificial Sequence
  Description of Artificial Sequence: Synthetic oligonucleotide
  modified_base (3): LNA-A
cuacacaa

SEQ ID NO: 127651 - DNA, 13 bp, Artificial Sequence
  Description of Artificial Sequence: Synthetic oligonucleotide
  Description of Combined DNA/RNA Molecule: Synthetic oligonucleotide
  modified_base (8): LNA-A
aucagcgauuutt

SEQ ID NO: 127652 - DNA, 12 bp, Artificial Sequence
  Description of Artificial Sequence: Synthetic oligonucleotide
  Description of Combined DNA/RNA Molecule: Synthetic oligonucleotide
  modified_base (7): LNA-A
ucagcgauuutt

SEQ ID NO: 127653 - DNA, 11 bp, Artificial Sequence
  Description of Artificial Sequence: Synthetic oligonucleotide
  Description of Combined DNA/RNA Molecule: Synthetic oligonucleotide
  modified_base (6): LNA-A
cagcgauuutt

SEQ ID NO: 127654 - DNA, 10 bp, Artificial Sequence
  Description of Artificial Sequence: Synthetic oligonucleotide
  Description of Combined DNA/RNA Molecule: Synthetic oligonucleotide
  modified_base (5): LNA-A
agcgauuutt

SEQ ID NO: 127655 - DNA, 9 bp, Artificial Sequence
  Description of Artificial Sequence: Synthetic oligonucleotide
  Description of Combined DNA/RNA Molecule: Synthetic oligonucleotide
  modified_base (4): LNA-A
gcgauuutt

SEQ ID NO: 127656 - DNA, 8 bp, Artificial Sequence
  Description of Artificial Sequence: Synthetic oligonucleotide
  Description of Combined DNA/RNA Molecule: Synthetic oligonucleotide
  modified_base (3): LNA-A
cgauuutt

SEQ ID NO: 127657 - DNA, 7 bp, Artificial Sequence
  Description of Artificial Sequence: Synthetic oligonucleotide
  Description of Combined DNA/RNA Molecule: Synthetic oligonucleotide
  modified_base (2): LNA-A
gauuutt

SEQ ID NO: 127658 - RNA, 9 nt, Artificial Sequence
  Description of Artificial Sequence: Synthetic oligonucleotide
  modified_base (3): LNA-A
cuacacaaa

SEQ ID NO: 127659 - RNA, 10 nt, Artificial Sequence
  Description of Artificial Sequence: Synthetic oligonucleotide
  modified_base (3): LNA-A
cuacacaaau

SEQ ID NO: 127660 - RNA, 11 nt, Artificial Sequence
  Description of Artificial Sequence: Synthetic oligonucleotide
  modified_base (3): LNA-A
cuacacaaauc

SEQ ID NO: 127661 - RNA, 12 nt, Artificial Sequence
  Description of Artificial Sequence: Synthetic oligonucleotide
  modified_base (3): LNA-A
cuacacaaauca

SEQ ID NO: 127662 - RNA, 13 nt, Artificial Sequence
  Description of Artificial Sequence: Synthetic oligonucleotide
  modified_base (3): LNA-A
cuacacaaaucag

SEQ ID NO: 127663 - RNA, 14 nt, Artificial Sequence
  Description of Artificial Sequence: Synthetic oligonucleotide
  modified_base (3): LNA-A
cuacacaaaucagc

SEQ ID NO: 127664 - RNA, 13 nt, Artificial Sequence
  Description of Artificial Sequence: Synthetic oligonucleotide
  modified_base (2): LNA-G
ggaucuuauuucu

SEQ ID NO: 127665 - RNA, 14 nt, Artificial Sequence
  Description of Artificial Sequence: Synthetic oligonucleotide
  modified_base (2): LNA-G
ggaucuuauuucuu

SEQ ID NO: 127666 - RNA, 8 nt, Artificial Sequence
  Description of Artificial Sequence: Synthetic oligonucleotide
  modified_base (2): LNA-G
  modified_base (8): LNA-A
ggaucuua

SEQ ID NO: 127667 - RNA, 9 nt, Artificial Sequence
  Description of Artificial Sequence: Synthetic oligonucleotide
  modified_base (2): LNA-G
  modified_base (9): LNA-U
ggaucuuau

SEQ ID NO: 127668 - RNA, 10 nt, Artificial Sequence
  Description of Artificial Sequence: Synthetic oligonucleotide
  modified_base (2): LNA-G
  modified_base (10): LNA-U
ggaucuuauu

SEQ ID NO: 127669 - RNA, 11 nt, Artificial Sequence
  Description of Artificial Sequence: Synthetic oligonucleotide
  modified_base (2): LNA-G
  modified_base (11): LNA-U
ggaucuuauuu

SEQ ID NO: 127670 - RNA, 12 nt, Artificial Sequence
  Description of Artificial Sequence: Synthetic oligonucleotide
  modified_base (2): LNA-G
  modified_base (12): LNA-C
ggaucuuauuuc

SEQ ID NO: 127671 - RNA, 13 nt, Artificial Sequence
  Description of Artificial Sequence: Synthetic oligonucleotide
  modified_base (2): LNA-G
  modified_base (13): LNA-U
ggaucuuauuucu

SEQ ID NO: 127672 - RNA, 14 nt, Artificial Sequence
  Description of Artificial Sequence: Synthetic oligonucleotide
  modified_base (2): LNA-G
  modified_base (14): LNA-U
ggaucuuauuucuu

SEQ ID NO: 127673 - DNA, 13 bp, Artificial Sequence
  Description of Artificial Sequence: Synthetic oligonucleotide
  Description of Combined DNA/RNA Molecule: Synthetic oligonucleotide
  modified_base (8): LNA-G
uuucuucggagtt

SEQ ID NO: 127674 - DNA, 12 bp, Artificial Sequence
  Description of Artificial Sequence: Synthetic oligonucleotide
  Description of Combined DNA/RNA Molecule: Synthetic oligonucleotide
  modified_base (7): LNA-G
uucuucggagtt

SEQ ID NO: 127675 - DNA, 11 bp, Artificial Sequence
  Description of Artificial Sequence: Synthetic oligonucleotide
  Description of Combined DNA/RNA Molecule: Synthetic oligonucleotide
  modified_base (6): LNA-G
ucuucggagtt

SEQ ID NO: 127676 - DNA, 10 bp, Artificial Sequence
  Description of Artificial Sequence: Synthetic oligonucleotide
  Description of Combined DNA/RNA Molecule: Synthetic oligonucleotide
  modified_base (5): LNA-G
cuucggagtt

SEQ ID NO: 127677 - DNA, 9 bp, Artificial Sequence
  Description of Artificial Sequence: Synthetic oligonucleotide
  Description of Combined DNA/RNA Molecule: Synthetic oligonucleotide
  modified_base (4): LNA-G
uucggagtt

SEQ ID NO: 127678 - DNA, 8 bp, Artificial Sequence
  Description of Artificial Sequence: Synthetic oligonucleotide
  Description of Combined DNA/RNA Molecule: Synthetic oligonucleotide
  modified_base (3): LNA-G
ucggagtt

SEQ ID NO: 127679 - DNA, 7 bp, Artificial Sequence
  Description of Artificial Sequence: Synthetic oligonucleotide
  Description of Combined DNA/RNA Molecule: Synthetic oligonucleotide
  modified_base (2): LNA-G
cggagtt

SEQ ID NO: 127680 - DNA, 13 bp, Artificial Sequence
  Description of Artificial Sequence: Synthetic oligonucleotide
  Description of Combined DNA/RNA Molecule: Synthetic oligonucleotide
  modified_base (1): LNA-U
  modified_base (8): LNA-G
uuucuucggagtt

SEQ ID NO: 127681 - DNA, 12 bp, Artificial Sequence
  Description of Artificial Sequence: Synthetic oligonucleotide
  Description of Combined DNA/RNA Molecule: Synthetic oligonucleotide
  modified_base (1): LNA-U
  modified_base (7): LNA-G
uucuucggagtt

SEQ ID NO: 127682 - DNA, 11 bp, Artificial Sequence
  Description of Artificial Sequence: Synthetic oligonucleotide
  Description of Combined DNA/RNA Molecule: Synthetic oligonucleotide
  modified_base (1): LNA-U
  modified_base (6): LNA-G
ucuucggagtt

SEQ ID NO: 127683 - DNA, 10 bp, Artificial Sequence
  Description of Artificial Sequence: Synthetic oligonucleotide
  Description of Combined DNA/RNA Molecule: Synthetic oligonucleotide
  modified_base (1): LNA-C
  modified_base (5): LNA-G
cuucggagtt

SEQ ID NO: 127684 - DNA, 9 bp, Artificial Sequence
  Description of Artificial Sequence: Synthetic oligonucleotide
  Description of Combined DNA/RNA Molecule: Synthetic oligonucleotide
  modified_base (1): LNA-U
  modified_base (4): LNA-G
uucggagtt

SEQ ID NO: 127685 - DNA, 8 bp, Artificial Sequence
  Description of Artificial Sequence: Synthetic oligonucleotide
  Description of Combined DNA/RNA Molecule: Synthetic oligonucleotide
  modified_base (1): LNA-U
  modified_base (3): LNA-G
ucggagtt

SEQ ID NO: 127686 - DNA, 7 bp, Artificial Sequence
  Description of Artificial Sequence: Synthetic oligonucleotide
  Description of Combined DNA/RNA Molecule: Synthetic oligonucleotide
  modified_base (1): LNA-C
  modified_base (2): LNA-G
cggagtt

SEQ ID NO: 127687 - DNA, 21 bp, Artificial Sequence
  Description of Artificial Sequence: Synthetic oligonucleotide
  Description of Combined DNA/RNA Molecule: Synthetic oligonucleotide
  modified_base (2): LNA-G
  modified_base (16): LNA-G
ggaucuuauuucuucggagtt

SEQ ID NO: 127688 - DNA, 25 bp, Artificial Sequence
  Description of Artificial Sequence: Synthetic oligonucleotide
  Description of Combined DNA/RNA Molecule: Synthetic oligonucleotide
ggaucuuauuucuucggagacaatg

SEQ ID NO: 127689 - RNA, 25 nt, Artificial Sequence
  Description of Artificial Sequence: Synthetic oligonucleotide
guauuuugaugaggaguucacggcc

SEQ ID NO: 127690 - RNA, 25 nt, Artificial Sequence
  Description of Artificial Sequence: Synthetic oligonucleotide
ggcccagaugaucaccaucacacca

SEQ ID NO: 127691 - RNA, 25 nt, Artificial Sequence
  Description of Artificial Sequence: Synthetic oligonucleotide
gggaagaaaacuauccugcggguuu

SEQ ID NO: 127692 - RNA, 25 nt, Artificial Sequence
  Description of Artificial Sequence: Synthetic oligonucleotide
guuuuaauuuauuucauccaguuug

SEQ ID NO: 127693 - RNA, 25 nt, Artificial Sequence
  Description of Artificial Sequence: Synthetic oligonucleotide
acguagggaaauguuaaggacuucu

SEQ ID NO: 127694 - RNA, 25 nt, Artificial Sequence
  Description of Artificial Sequence: Synthetic oligonucleotide
ccaggguuuacccagugggacagag

SEQ ID NO: 127695 - RNA, 25 nt, Artificial Sequence
  Description of Artificial Sequence: Synthetic oligonucleotide
agcaagguuuaaauuuguuauugug

SEQ ID NO: 127696 - RNA, 25 nt, Artificial Sequence
  Description of Artificial Sequence: Synthetic oligonucleotide
uguauuauguuguucaaaugcauuu

SEQ ID NO: 127697 - RNA, 25 nt, Artificial Sequence
  Description of Artificial Sequence: Synthetic oligonucleotide
uuuuaaucuuugugacaggaaagcc

SEQ ID NO: 127698 - RNA, 25 nt, Artificial Sequence
  Description of Artificial Sequence: Synthetic oligonucleotide
uuaaucuuugugacaggaaagcccu

SEQ ID NO: 127699 - RNA, 25 nt, Artificial Sequence
  Description of Artificial Sequence: Synthetic oligonucleotide
gcugcuuaugucucccagcauggcc

SEQ ID NO: 127700 - RNA, 25 nt, Artificial Sequence
  Description of Artificial Sequence: Synthetic oligonucleotide
aaguguuucagaagcuucucccuga

SEQ ID NO: 127701 - RNA, 25 nt, Artificial Sequence
  Description of Artificial Sequence: Synthetic oligonucleotide
gaccaucaauaaggaagaagcccuu

SEQ ID NO: 127702 - RNA, 25 nt, Artificial Sequence
  Description of Artificial Sequence: Synthetic oligonucleotide
ccaucaauaaggaagaagcccuuca

SEQ ID NO: 127703 - RNA, 25 nt, Artificial Sequence
  Description of Artificial Sequence: Synthetic oligonucleotide
ucaauaaggaagaagcccuucagcg

SEQ ID NO: 127704 - RNA, 25 nt, Artificial Sequence
  Description of Artificial Sequence: Synthetic oligonucleotide
aauaaggaagaagcccuucagcggc

SEQ ID NO: 127705 - RNA, 25 nt, Artificial Sequence
  Description of Artificial Sequence: Synthetic oligonucleotide
aggaagaagcccuucagcggccagu

SEQ ID NO: 127706 - RNA, 25 nt, Artificial Sequence
  Description of Artificial Sequence: Synthetic oligonucleotide
gcauaacuaaaggugaaaagcuccg

SEQ ID NO: 127707 - RNA, 25 nt, Artificial Sequence
  Description of Artificial Sequence: Synthetic oligonucleotide
cauaacuaaaggugaaaagcuccgg

SEQ ID NO: 127708 - RNA, 25 nt, Artificial Sequence
  Description of Artificial Sequence: Synthetic oligonucleotide
cuacaucacgccagucaacagucug

SEQ ID NO: 127709 - RNA, 25 nt, Artificial Sequence
  Description of Artificial Sequence: Synthetic oligonucleotide
acuggauuuaagcagaguucaaaag

SEQ ID NO: 127710 - RNA, 25 nt, Artificial Sequence
  Description of Artificial Sequence: Synthetic oligonucleotide
cuggauuuaagcagaguucaaaagc

SEQ ID NO: 127711 - RNA, 25 nt, Artificial Sequence
  Description of Artificial Sequence: Synthetic oligonucleotide
gauuuaagcagaguucaaaagcccu

SEQ ID NO: 127712 - RNA, 25 nt, Artificial Sequence
  Description of Artificial Sequence: Synthetic oligonucleotide
auuuaagcagaguucaaaagcccuu

SEQ ID NO: 127713 - RNA, 25 nt, Artificial Sequence
  Description of Artificial Sequence: Synthetic oligonucleotide
uuaagcagaguucaaaagcccuuca

SEQ ID NO: 127714 - RNA, 25 nt, Artificial Sequence
  Description of Artificial Sequence: Synthetic oligonucleotide
uaagcagaguucaaaagcccuucag

SEQ ID NO: 127715 - RNA, 25 nt, Artificial Sequence
  Description of Artificial Sequence: Synthetic oligonucleotide
agcagaguucaaaagcccuucagcg

SEQ ID NO: 127716 - RNA, 25 nt, Artificial Sequence
  Description of Artificial Sequence: Synthetic oligonucleotide
cucagggucugagugaagccgcucg

SEQ ID NO: 127717 - RNA, 25 nt, Artificial Sequence
  Description of Artificial Sequence: Synthetic oligonucleotide
caagcaacuacaucacgccagucaa

SEQ ID NO: 127718 - RNA, 25 nt, Artificial Sequence
  Description of Artificial Sequence: Synthetic oligonucleotide
aucaauggcagcuucuuggugcgug

SEQ ID NO: 127719 - RNA, 25 nt, Artificial Sequence
  Description of Artificial Sequence: Synthetic oligonucleotide
uuccagcccacauuggauucaucag

SEQ ID NO: 127720 - RNA, 25 nt, Artificial Sequence
  Description of Artificial Sequence: Synthetic oligonucleotide
cagcugagaauguggaauaccuaag

SEQ ID NO: 127721 - RNA, 25 nt, Artificial Sequence
  Description of Artificial Sequence: Synthetic oligonucleotide
aacguaucuccuaauuugaggcuca

SEQ ID NO: 127722 - RNA, 25 nt, Artificial Sequence
  Description of Artificial Sequence: Synthetic oligonucleotide
ccuaaaauaauuucucuacaauugg

SEQ ID NO: 127723 - RNA, 25 nt, Artificial Sequence
  Description of Artificial Sequence: Synthetic oligonucleotide
uggaagauucagcuaguuaggagcc

SEQ ID NO: 127724 - RNA, 25 nt, Artificial Sequence
  Description of Artificial Sequence: Synthetic oligonucleotide
uuaaacucuccuagucaauauccac

SEQ ID NO: 127725 - RNA, 25 nt, Artificial Sequence
  Description of Artificial Sequence: Synthetic oligonucleotide
cagccuacaguuauguucagucaca

SEQ ID NO: 127726 - RNA, 25 nt, Artificial Sequence
  Description of Artificial Sequence: Synthetic oligonucleotide
guuauguucagucacacacacauac

SEQ ID NO: 127727 - RNA, 25 nt, Artificial Sequence
  Description of Artificial Sequence: Synthetic oligonucleotide
cacauacaaaauguuccuuuugcuu

SEQ ID NO: 127728 - RNA, 25 nt, Artificial Sequence
  Description of Artificial Sequence: Synthetic oligonucleotide
uccuuuugcuuuuaaaguaauuuuu

SEQ ID NO: 127729 - RNA, 25 nt, Artificial Sequence
  Description of Artificial Sequence: Synthetic oligonucleotide
ugaccugugaagcaacagucaaugg

SEQ ID NO: 127730 - RNA, 25 nt, Artificial Sequence
  Description of Artificial Sequence: Synthetic oligonucleotide
cuaucucacacaucgacaaaccaau

SEQ ID NO: 127731 - RNA, 25 nt, Artificial Sequence
  Description of Artificial Sequence: Synthetic oligonucleotide
uguccucaauuguacugcuaccacu

SEQ ID NO: 127732 - RNA, 25 nt, Artificial Sequence
  Description of Artificial Sequence: Synthetic oligonucleotide
aaaccguagcuggcaagcggucuua

SEQ ID NO: 127733 - RNA, 25 nt, Artificial Sequence
  Description of Artificial Sequence: Synthetic oligonucleotide
uagcuggcaagcggucuuaccggcu

SEQ ID NO: 127734 - RNA, 25 nt, Artificial Sequence
  Description of Artificial Sequence: Synthetic oligonucleotide
uuguaugguuaaaagauggguuacc

SEQ ID NO: 127735 - RNA, 25 nt, Artificial Sequence
  Description of Artificial Sequence: Synthetic oligonucleotide
ugguuaaaagauggguuaccugcga

SEQ ID NO: 127736 - RNA, 25 nt, Artificial Sequence
  Description of Artificial Sequence: Synthetic oligonucleotide
cagggaauuauacaaucuugcugag

SEQ ID NO: 127737 - RNA, 25 nt, Artificial Sequence
  Description of Artificial Sequence: Synthetic oligonucleotide
acaaucuugcugagcauaaaacagu

SEQ ID NO: 127738 - RNA, 25 nt, Artificial Sequence
  Description of Artificial Sequence: Synthetic oligonucleotide
ccaauaaugaagaguccuuuauccu

SEQ ID NO: 127739 - RNA, 25 nt, Artificial Sequence
  Description of Artificial Sequence: Synthetic oligonucleotide
acuuuggauguuccaacgcaaguug

SEQ ID NO: 127740 - RNA, 25 nt, Artificial Sequence
  Description of Artificial Sequence: Synthetic oligonucleotide
aaugcuuccacuaaacugaaaccau

SEQ ID NO: 127741 - RNA, 25 nt, Artificial Sequence
  Description of Artificial Sequence: Synthetic oligonucleotide
gagaaaguuugacuuuguuaaauau

SEQ ID NO: 127742 - RNA, 25 nt, Artificial Sequence
  Description of Artificial Sequence: Synthetic oligonucleotide
aaagaacuacuguauauuaaaaguu

SEQ ID NO: 127743 - RNA, 25 nt, Artificial Sequence
  Description of Artificial Sequence: Synthetic oligonucleotide
uuagaaauacggguuuugacuuaac

SEQ ID NO: 127744 - RNA, 25 nt, Artificial Sequence
  Description of Artificial Sequence: Synthetic oligonucleotide
aacauggguacagcaaacucagcac

SEQ ID NO: 127745 - RNA, 25 nt, Artificial Sequence
  Description of Artificial Sequence: Synthetic oligonucleotide
aaagacacagaagaugcugaccuca

SEQ ID NO: 127746 - RNA, 25 nt, Artificial Sequence
  Description of Artificial Sequence: Synthetic oligonucleotide
uaguagggagguuuauucagaucgc

SEQ ID NO: 127747 - RNA, 25 nt, Artificial Sequence
  Description of Artificial Sequence: Synthetic oligonucleotide
gccuucugcagcaggguucugggau

SEQ ID NO: 127748 - RNA, 25 nt, Artificial Sequence
  Description of Artificial Sequence: Synthetic oligonucleotide
ggucugguacauauuggaaauuaug

SEQ ID NO: 127749 - RNA, 25 nt, Artificial Sequence
  Description of Artificial Sequence: Synthetic oligonucleotide
cuaguccuuccgauggaagcacuag

SEQ ID NO: 127750 - RNA, 25 nt, Artificial Sequence
  Description of Artificial Sequence: Synthetic oligonucleotide
ccagugaauauuguuuuuaugugga

SEQ ID NO: 127751 - RNA, 25 nt, Artificial Sequence
  Description of Artificial Sequence: Synthetic oligonucleotide
augaauucaaguuggaauugguaga

SEQ ID NO: 127752 - RNA, 25 nt, Artificial Sequence
  Description of Artificial Sequence: Synthetic oligonucleotide
caggacacagauuuagacuuggaga

SEQ ID NO: 127753 - RNA, 25 nt, Artificial Sequence
  Description of Artificial Sequence: Synthetic oligonucleotide
cucaaagcacaguuacaguauucca

SEQ ID NO: 127754 - RNA, 25 nt, Artificial Sequence
  Description of Artificial Sequence: Synthetic oligonucleotide
accacugccaccacugaugaauuaa

SEQ ID NO: 127755 - RNA, 25 nt, Artificial Sequence
  Description of Artificial Sequence: Synthetic oligonucleotide
gaaacuacuagugccacaucaucac

SEQ ID NO: 127756 - RNA, 25 nt, Artificial Sequence
  Description of Artificial Sequence: Synthetic oligonucleotide
aagucggacagccucaccaaacaga

SEQ ID NO: 127757 - RNA, 25 nt, Artificial Sequence
  Description of Artificial Sequence: Synthetic oligonucleotide
gaaagcgaaaaauggaacaugaugg

SEQ ID NO: 127758 - RNA, 25 nt, Artificial Sequence
  Description of Artificial Sequence: Synthetic oligonucleotide
cccucugauuuagcauguagacugc

SEQ ID NO: 127759 - RNA, 25 nt, Artificial Sequence
  Description of Artificial Sequence: Synthetic oligonucleotide
ugagcuauuuaaggaucuauuuaug

SEQ ID NO: 127760 - RNA, 25 nt, Artificial Sequence
  Description of Artificial Sequence: Synthetic oligonucleotide
aaaaggugaaaaagcacuauuauca

SEQ ID NO: 127761 - RNA, 25 nt, Artificial Sequence
  Description of Artificial Sequence: Synthetic oligonucleotide
gaaaaagcacuauuaucaguucugc

SEQ ID NO: 127762 - RNA, 25 nt, Artificial Sequence
  Description of Artificial Sequence: Synthetic oligonucleotide
ggcugaaaagaaagauuaaaccuac

SEQ ID NO: 127763 - RNA, 25 nt, Artificial Sequence
  Description of Artificial Sequence: Synthetic oligonucleotide
uaaacccuuauaauaaaauccuucu

SEQ ID NO: 127764 - RNA, 25 nt, Artificial Sequence
  Description of Artificial Sequence: Synthetic oligonucleotide
cauacuauuagccaaugcuguagac

SEQ ID NO: 127765 - RNA, 25 nt, Artificial Sequence
  Description of Artificial Sequence: Synthetic oligonucleotide
gacagaagcauuuugauaggaauag

SEQ ID NO: 127766 - RNA, 25 nt, Artificial Sequence
  Description of Artificial Sequence: Synthetic oligonucleotide
agagcaaauaagauaauggcccuga

SEQ ID NO: 127767 - RNA, 25 nt, Artificial Sequence
  Description of Artificial Sequence: Synthetic oligonucleotide
ccaacauuuuucucuuccucaagca

SEQ ID NO: 127768 - RNA, 25 nt, Artificial Sequence
  Description of Artificial Sequence: Synthetic oligonucleotide
uuaaguaugagaaaaguucagccca

SEQ ID NO: 127769 - RNA, 25 nt, Artificial Sequence
  Description of Artificial Sequence: Synthetic oligonucleotide
caggaauaaagauggcugcugaacc

SEQ ID NO: 127770 - RNA, 25 nt, Artificial Sequence
  Description of Artificial Sequence: Synthetic oligonucleotide
aauuugaaugaccaaguucucuuca

SEQ ID NO: 127771 - RNA, 25 nt, Artificial Sequence
  Description of Artificial Sequence: Synthetic oligonucleotide
auguauaaagauagccagccuagag

SEQ ID NO: 127772 - RNA, 25 nt, Artificial Sequence
  Description of Artificial Sequence: Synthetic oligonucleotide
ggcuguaacuaucucugugaagugu

SEQ ID NO: 127773 - RNA, 25 nt, Artificial Sequence
  Description of Artificial Sequence: Synthetic oligonucleotide
ucugugaagugugagaaaauuucaa

SEQ ID NO: 127774 - RNA, 25 nt, Artificial Sequence
  Description of Artificial Sequence: Synthetic oligonucleotide
ccuuuaaggaaaugaauccuccuga

SEQ ID NO: 127775 - RNA, 25 nt, Artificial Sequence
  Description of Artificial Sequence: Synthetic oligonucleotide
aaggauacaaaaagugacaucauau

SEQ ID NO: 127776 - RNA, 25 nt, Artificial Sequence
  Description of Artificial Sequence: Synthetic oligonucleotide
agaugcaauuugaaucuucaucaua

SEQ ID NO: 127777 - RNA, 25 nt, Artificial Sequence
  Description of Artificial Sequence: Synthetic oligonucleotide
guucaaaacgaagacuagcuauuaa

SEQ ID NO: 127778 - RNA, 25 nt, Artificial Sequence
  Description of Artificial Sequence: Synthetic oligonucleotide
gugaaaccucaucucuacuaaaaau

SEQ ID NO: 127779 - RNA, 25 nt, Artificial Sequence
  Description of Artificial Sequence: Synthetic oligonucleotide
acgaaagagaagcucuaucucgccu

SEQ ID NO: 127780 - RNA, 25 nt, Artificial Sequence
  Description of Artificial Sequence: Synthetic oligonucleotide
cuccacaagcgccuucgguccaguu

SEQ ID NO: 127781 - RNA, 25 nt, Artificial Sequence
  Description of Artificial Sequence: Synthetic oligonucleotide
gagaagauuccaaagauguagccgc

SEQ ID NO: 127782 - RNA, 25 nt, Artificial Sequence
  Description of Artificial Sequence: Synthetic oligonucleotide
aaucuggauucaaugaggagacuug

SEQ ID NO: 127783 - RNA, 25 nt, Artificial Sequence
  Description of Artificial Sequence: Synthetic oligonucleotide
agaacagauuugagaguagugagga

SEQ ID NO: 127784 - RNA, 25 nt, Artificial Sequence
  Description of Artificial Sequence: Synthetic oligonucleotide
ccagagcugugcagaugaguacaaa

SEQ ID NO: 127785 - RNA, 25 nt, Artificial Sequence
  Description of Artificial Sequence: Synthetic oligonucleotide
ccucagauuguuguuguuaaugggc

SEQ ID NO: 127786 - RNA, 25 nt, Artificial Sequence
  Description of Artificial Sequence: Synthetic oligonucleotide
cuauuuuaauuauuuuuaauuuauu

SEQ ID NO: 127787 - RNA, 25 nt, Artificial Sequence
  Description of Artificial Sequence: Synthetic oligonucleotide
uuuaauuuauuaauauuuaaauaug

SEQ ID NO: 127788 - RNA, 25 nt, Artificial Sequence
  Description of Artificial Sequence: Synthetic oligonucleotide
augcaguuugaauauccuuuguuuc

SEQ ID NO: 127789 - RNA, 25 nt, Artificial Sequence
  Description of Artificial Sequence: Synthetic oligonucleotide
caugcugcuggcgucuaaguguuug

SEQ ID NO: 127790 - RNA, 25 nt, Artificial Sequence
  Description of Artificial Sequence: Synthetic oligonucleotide
agaugugcauuucaccugugacaaa

SEQ ID NO: 127791 - RNA, 25 nt, Artificial Sequence
  Description of Artificial Sequence: Synthetic oligonucleotide
ucaaaaccugugccaggcugaauua

SEQ ID NO: 127792 - RNA, 25 nt, Artificial Sequence
  Description of Artificial Sequence: Synthetic oligonucleotide
gaauguggguagucauucuuacaau

SEQ ID NO: 127793 - RNA, 25 nt, Artificial Sequence
  Description of Artificial Sequence: Synthetic oligonucleotide
auguggguagucauucuuacaauug

SEQ ID NO: 127794 - RNA, 25 nt, Artificial Sequence
  Description of Artificial Sequence: Synthetic oligonucleotide
ugaaaaugagcaucagagaguguac

SEQ ID NO: 127795 - RNA, 25 nt, Artificial Sequence
  Description of Artificial Sequence: Synthetic oligonucleotide
uugcuuuucauguagaacucagcag

SEQ ID NO: 127796 - RNA, 25 nt, Artificial Sequence
  Description of Artificial Sequence: Synthetic oligonucleotide
uguauuucuauauuuauuuucagua

SEQ ID NO: 127797 - RNA, 25 nt, Artificial Sequence
  Description of Artificial Sequence: Synthetic oligonucleotide
uuugauuaauguuucuuaaauggaa

SEQ ID NO: 127798 - RNA, 25 nt, Artificial Sequence
  Description of Artificial Sequence: Synthetic oligonucleotide
caacguguauagugccuaaaauugu

SEQ ID NO: 127799 - RNA, 25 nt, Artificial Sequence
  Description of Artificial Sequence: Synthetic oligonucleotide
cauauccuuggcuacuaacaucugg

SEQ ID NO: 127800 - RNA, 25 nt, Artificial Sequence
  Description of Artificial Sequence: Synthetic oligonucleotide
uacuaacaucuggagacugugagcu

SEQ ID NO: 127801 - RNA, 25 nt, Artificial Sequence
  Description of Artificial Sequence: Synthetic oligonucleotide
cauaaguugugugcuuuuuauuaau

SEQ ID NO: 127802 - RNA, 25 nt, Artificial Sequence
  Description of Artificial Sequence: Synthetic oligonucleotide
gcaucauuuuggcucuucuuacauu

SEQ ID NO: 127803 - RNA, 25 nt, Artificial Sequence
  Description of Artificial Sequence: Synthetic oligonucleotide
gcucuucuuacauuuguaaaaaugu

SEQ ID NO: 127804 - RNA, 25 nt, Artificial Sequence
  Description of Artificial Sequence: Synthetic oligonucleotide
agauuaggucaucuuaauucauauu

SEQ ID NO: 127805 - RNA, 25 nt, Artificial Sequence
  Description of Artificial Sequence: Synthetic oligonucleotide
auggaauugaaagaacuaaucauga

SEQ ID NO: 127806 - RNA, 25 nt, Artificial Sequence
  Description of Artificial Sequence: Synthetic oligonucleotide
cacacucauuccuucugcucuuggg

SEQ ID NO: 127807 - RNA, 25 nt, Artificial Sequence
  Description of Artificial Sequence: Synthetic oligonucleotide
uguagagguaaccaguagcuuugag

SEQ ID NO: 127808 - RNA, 25 nt, Artificial Sequence
  Description of Artificial Sequence: Synthetic oligonucleotide
caaccacaugccacguaauauuuca

SEQ ID NO: 127809 - RNA, 25 nt, Artificial Sequence
  Description of Artificial Sequence: Synthetic oligonucleotide
ucggaaacaaguuauucucuucacu

SEQ ID NO: 127810 - RNA, 25 nt, Artificial Sequence
  Description of Artificial Sequence: Synthetic oligonucleotide
acucccaauaacuaaugcuaagaaa

SEQ ID NO: 127811 - RNA, 25 nt, Artificial Sequence
  Description of Artificial Sequence: Synthetic oligonucleotide
aaugcuaagaaaugcugaaaaucaa

SEQ ID NO: 127812 - RNA, 25 nt, Artificial Sequence
  Description of Artificial Sequence: Synthetic oligonucleotide
gucuuucucuaaauaugauuacuuu

SEQ ID NO: 127813 - RNA, 25 nt, Artificial Sequence
  Description of Artificial Sequence: Synthetic oligonucleotide
ugaauuucaggcauuuuguucuaca

SEQ ID NO: 127814 - RNA, 25 nt, Artificial Sequence
  Description of Artificial Sequence: Synthetic oligonucleotide
cgauucccucucacccgggacucuc

SEQ ID NO: 127815 - RNA, 25 nt, Artificial Sequence
  Description of Artificial Sequence: Synthetic oligonucleotide
aggaaagugaaccuuuaaaguaaag

SEQ ID NO: 127816 - RNA, 25 nt, Artificial Sequence
  Description of Artificial Sequence: Synthetic oligonucleotide
gaggcugcaugcucuggaagccugg

SEQ ID NO: 127817 - RNA, 25 nt, Artificial Sequence
  Description of Artificial Sequence: Synthetic oligonucleotide
ucucugaacagaaaacaaaagagag

SEQ ID NO: 127818 - RNA, 25 nt, Artificial Sequence
  Description of Artificial Sequence: Synthetic oligonucleotide
aacuuggcuguaaucaguuaugccg

SEQ ID NO: 127819 - RNA, 25 nt, Artificial Sequence
  Description of Artificial Sequence: Synthetic oligonucleotide
agaagccaaaauuaaaagaagucca

SEQ ID NO: 127820 - RNA, 25 nt, Artificial Sequence
  Description of Artificial Sequence: Synthetic oligonucleotide
auuaaaagaaguccaggugagguua

SEQ ID NO: 127821 - RNA, 25 nt, Artificial Sequence
  Description of Artificial Sequence: Synthetic oligonucleotide
gaauccggauuaucgggaagaggac

SEQ ID NO: 127822 - RNA, 25 nt, Artificial Sequence
  Description of Artificial Sequence: Synthetic oligonucleotide
aaugugacaucaaagcaaguauugu

SEQ ID NO: 127823 - RNA, 25 nt, Artificial Sequence
  Description of Artificial Sequence: Synthetic oligonucleotide
caucaaagcaaguauuguagcacuc

SEQ ID NO: 127824 - RNA, 25 nt, Artificial Sequence
  Description of Artificial Sequence: Synthetic oligonucleotide
agagagagaaaacaaaaccacaaau

SEQ ID NO: 127825 - RNA, 25 nt, Artificial Sequence
  Description of Artificial Sequence: Synthetic oligonucleotide
ucgcuguaguauuuaagcccauaca

SEQ ID NO: 127826 - RNA, 25 nt, Artificial Sequence
  Description of Artificial Sequence: Synthetic oligonucleotide
cgcuguaguauuuaagcccauacag

SEQ ID NO: 127827 - RNA, 25 nt, Artificial Sequence
  Description of Artificial Sequence: Synthetic oligonucleotide
auuuaagcccauacagaaaccuucc

SEQ ID NO: 127828 - RNA, 25 nt, Artificial Sequence
  Description of Artificial Sequence: Synthetic oligonucleotide
auuaaaauaaacaugguauaccuac

SEQ ID NO: 127829 - RNA, 25 nt, Artificial Sequence
  Description of Artificial Sequence: Synthetic oligonucleotide
cuguucugaucggccaguuuucgga

SEQ ID NO: 127830 - RNA, 25 nt, Artificial Sequence
  Description of Artificial Sequence: Synthetic oligonucleotide
aaauaauuugaacuuuggaacaggg

SEQ ID NO: 127831 - RNA, 25 nt, Artificial Sequence
  Description of Artificial Sequence: Synthetic oligonucleotide
ugcgaccuuaauuuaacuuuccagu

SEQ ID NO: 127832 - RNA, 25 nt, Artificial Sequence
  Description of Artificial Sequence: Synthetic oligonucleotide
cugagaaagcuaaaguuugguuuug

SEQ ID NO: 127833 - RNA, 25 nt, Artificial Sequence
  Description of Artificial Sequence: Synthetic oligonucleotide
aguaaagaugcuacuucccacugua

SEQ ID NO: 127834 - RNA, 25 nt, Artificial Sequence
  Description of Artificial Sequence: Synthetic oligonucleotide
cugcuuaauugcugauaccauauga

SEQ ID NO: 127835 - RNA, 25 nt, Artificial Sequence
  Description of Artificial Sequence: Synthetic oligonucleotide
uaccauaugaaugaaacaugggcug

SEQ ID NO: 127836 - RNA, 25 nt, Artificial Sequence
  Description of Artificial Sequence: Synthetic oligonucleotide
aacuuucuuauccaacuuuuucaua

SEQ ID NO: 127837 - RNA, 25 nt, Artificial Sequence
  Description of Artificial Sequence: Synthetic oligonucleotide
ccuugcaugacaucaugaggccgga

SEQ ID NO: 127838 - RNA, 25 nt, Artificial Sequence
  Description of Artificial Sequence: Synthetic oligonucleotide
ugaauuuguauaugacugcauuugu

SEQ ID NO: 127839 - RNA, 25 nt, Artificial Sequence
  Description of Artificial Sequence: Synthetic oligonucleotide
gaauccuaguagaauguuuacuacc

SEQ ID NO: 127840 - RNA, 25 nt, Artificial Sequence
  Description of Artificial Sequence: Synthetic oligonucleotide
gaaagggaagaauuuuuugaugaaa

SEQ ID NO: 127841 - RNA, 25 nt, Artificial Sequence
  Description of Artificial Sequence: Synthetic oligonucleotide
uaucggcaugccagugugugaauuu

SEQ ID NO: 127842 - RNA, 25 nt, Artificial Sequence
  Description of Artificial Sequence: Synthetic oligonucleotide
caccucauaguagagcaauguaugu

SEQ ID NO: 127843 - RNA, 25 nt, Artificial Sequence
  Description of Artificial Sequence: Synthetic oligonucleotide
ccagaauugccaaagcacauauaua

SEQ ID NO: 127844 - RNA, 25 nt, Artificial Sequence
  Description of Artificial Sequence: Synthetic oligonucleotide
uggugaucuggguaauaguuucucc

SEQ ID NO: 127845 - RNA, 25 nt, Artificial Sequence
  Description of Artificial Sequence: Synthetic oligonucleotide
gaucuggguaauaguuucuccaaau

SEQ ID NO: 127846 - RNA, 25 nt, Artificial Sequence
  Description of Artificial Sequence: Synthetic oligonucleotide
ggaugugaugaauacuuccuagaaa

SEQ ID NO: 127847 - RNA, 25 nt, Artificial Sequence
  Description of Artificial Sequence: Synthetic oligonucleotide
cauuuccacagcuacaccauauaug

SEQ ID NO: 127848 - RNA, 25 nt, Artificial Sequence
  Description of Artificial Sequence: Synthetic oligonucleotide
acagcuacaccauauaugaauggag

SEQ ID NO: 127849 - RNA, 25 nt, Artificial Sequence
  Description of Artificial Sequence: Synthetic oligonucleotide
ugcaguucuuacacgagaagaagau

SEQ ID NO: 127850 - RNA, 25 nt, Artificial Sequence
  Description of Artificial Sequence: Synthetic oligonucleotide
acgagaagaagaucauuuacaggga

SEQ ID NO: 127851 - RNA, 25 nt, Artificial Sequence
  Description of Artificial Sequence: Synthetic oligonucleotide
cgagaagaagaucauuuacagggac

SEQ ID NO: 127852 - RNA, 25 nt, Artificial Sequence
  Description of Artificial Sequence: Synthetic oligonucleotide
aagaagaucauuuacagggaccuga

SEQ ID NO: 127853 - RNA, 25 nt, Artificial Sequence
  Description of Artificial Sequence: Synthetic oligonucleotide
agaggaagagguguuugacugcauc

SEQ ID NO: 127854 - RNA, 25 nt, Artificial Sequence
  Description of Artificial Sequence: Synthetic oligonucleotide
gaggaagagguguuugacugcaucg

SEQ ID NO: 127855 - RNA, 25 nt, Artificial Sequence
  Description of Artificial Sequence: Synthetic oligonucleotide
cuacuuugagggcgaguucacaggg

SEQ ID NO: 127856 - RNA, 25 nt, Artificial Sequence
  Description of Artificial Sequence: Synthetic oligonucleotide
agggcaucuccuggcaccucugucc

SEQ ID NO: 127857 - RNA, 25 nt, Artificial Sequence
  Description of Artificial Sequence: Synthetic oligonucleotide
ggagugauaugguuugucuuuuuaa

SEQ ID NO: 127858 - RNA, 25 nt, Artificial Sequence
  Description of Artificial Sequence: Synthetic oligonucleotide
gagugauaugguuugucuuuuuaag

SEQ ID NO: 127859 - RNA, 25 nt, Artificial Sequence
  Description of Artificial Sequence: Synthetic oligonucleotide
ugcaguaaagauccuaaagguuguc

SEQ ID NO: 127860 - RNA, 25 nt, Artificial Sequence
  Description of Artificial Sequence: Synthetic oligonucleotide
aguaaagauccuaaagguugucgac

SEQ ID NO: 127861 - RNA, 25 nt, Artificial Sequence
  Description of Artificial Sequence: Synthetic oligonucleotide
ugacaaaggacaaccuggcaauugu

SEQ ID NO: 127862 - RNA, 25 nt, Artificial Sequence
  Description of Artificial Sequence: Synthetic oligonucleotide
gcaauugugacccaguggugcgagg

SEQ ID NO: 127863 - RNA, 25 nt, Artificial Sequence
  Description of Artificial Sequence: Synthetic oligonucleotide
aacaucauccauagagacaugaaau

SEQ ID NO: 127864 - RNA, 25 nt, Artificial Sequence
  Description of Artificial Sequence: Synthetic oligonucleotide
ugaaauccaacaauauauuucucca

SEQ ID NO: 127865 - RNA, 25 nt, Artificial Sequence
  Description of Artificial Sequence: Synthetic oligonucleotide
aacaauauauuucuccaugaaggcu

SEQ ID NO: 127866 - RNA, 25 nt, Artificial Sequence
  Description of Artificial Sequence: Synthetic oligonucleotide
aacaguaaagucacgcuggaguggu

SEQ ID NO: 127867 - RNA, 25 nt, Artificial Sequence
  Description of Artificial Sequence: Synthetic oligonucleotide
ugugaagaaaguaaaggaagagagg

SEQ ID NO: 127868 - RNA, 25 nt, Artificial Sequence
  Description of Artificial Sequence: Synthetic oligonucleotide
cuuccgagccauccuugcaucgggc

SEQ ID NO: 127869 - RNA, 25 nt, Artificial Sequence
  Description of Artificial Sequence: Synthetic oligonucleotide
aauggagguugaauauccuacugug

SEQ ID NO: 127870 - RNA, 25 nt, Artificial Sequence
  Description of Artificial Sequence: Synthetic oligonucleotide
ggagguugaauauccuacuguguaa

SEQ ID NO: 127871 - RNA, 25 nt, Artificial Sequence
  Description of Artificial Sequence: Synthetic oligonucleotide
auuuugaguuuucccuuguagugua

SEQ ID NO: 127872 - RNA, 25 nt, Artificial Sequence
  Description of Artificial Sequence: Synthetic oligonucleotide
uauccuguuuguucuuuguugauug

SEQ ID NO: 127873 - RNA, 25 nt, Artificial Sequence
  Description of Artificial Sequence: Synthetic oligonucleotide
ccuguuuguucuuuguugauugaaa

SEQ ID NO: 127874 - RNA, 25 nt, Artificial Sequence
  Description of Artificial Sequence: Synthetic oligonucleotide
cucuacagccuucuuuuucuuccau

SEQ ID NO: 127875 - RNA, 25 nt, Artificial Sequence
  Description of Artificial Sequence: Synthetic oligonucleotide
ucuuccauagcuaaucuuccuucua

SEQ ID NO: 127876 - RNA, 25 nt, Artificial Sequence
  Description of Artificial Sequence: Synthetic oligonucleotide
auaaucuuccuguugaaugcuucau

SEQ ID NO: 127877 - RNA, 25 nt, Artificial Sequence
  Description of Artificial Sequence: Synthetic oligonucleotide
uaaucuuccuguugaaugcuucaug

SEQ ID NO: 127878 - RNA, 25 nt, Artificial Sequence
  Description of Artificial Sequence: Synthetic oligonucleotide
cuucaugacuugaauucuacuuuga

SEQ ID NO: 127879 - RNA, 25 nt, Artificial Sequence
  Description of Artificial Sequence: Synthetic oligonucleotide
aagagggagagaagcaacuacagac

SEQ ID NO: 127880 - RNA, 25 nt, Artificial Sequence
  Description of Artificial Sequence: Synthetic oligonucleotide
cgucuccuaccagaccaaggucaac

SEQ ID NO: 127881 - RNA, 25 nt, Artificial Sequence
  Description of Artificial Sequence: Synthetic oligonucleotide
gaucaaucggcccgacuaucucgac

SEQ ID NO: 127882 - RNA, 25 nt, Artificial Sequence
  Description of Artificial Sequence: Synthetic oligonucleotide
ggacgaacauccaaccuucccaaac

SEQ ID NO: 127883 - RNA, 25 nt, Artificial Sequence
  Description of Artificial Sequence: Synthetic oligonucleotide
agggucggaacccaagcuuagaacu

SEQ ID NO: 127884 - RNA, 25 nt, Artificial Sequence
  Description of Artificial Sequence: Synthetic oligonucleotide
ucggaacccaagcuuagaacuuuaa

SEQ ID NO: 127885 - RNA, 25 nt, Artificial Sequence
  Description of Artificial Sequence: Synthetic oligonucleotide
acccaagcuuagaacuuuaagcaac

SEQ ID NO: 127886 - RNA, 25 nt, Artificial Sequence
  Description of Artificial Sequence: Synthetic oligonucleotide
gaacuuuaagcaacaagaccaccac

SEQ ID NO: 127887 - RNA, 25 nt, Artificial Sequence
  Description of Artificial Sequence: Synthetic oligonucleotide
acuauucaguggcgagaaauaaagu

SEQ ID NO: 127888 - RNA, 25 nt, Artificial Sequence
  Description of Artificial Sequence: Synthetic oligonucleotide
cuauucaguggcgagaaauaaaguu

SEQ ID NO: 127889 - RNA, 25 nt, Artificial Sequence
  Description of Artificial Sequence: Synthetic oligonucleotide
aaacacagauaacaggaaaugaucc

SEQ ID NO: 127890 - RNA, 25 nt, Artificial Sequence
  Description of Artificial Sequence: Synthetic oligonucleotide
cuuaagaaaagagaagaaaugaaac

SEQ ID NO: 127891 - RNA, 25 nt, Artificial Sequence
  Description of Artificial Sequence: Synthetic oligonucleotide
cugaaggaguguguuuccauccucc

SEQ ID NO: 127892 - RNA, 25 nt, Artificial Sequence
  Description of Artificial Sequence: Synthetic oligonucleotide
ucaccgcgggacugaaaaucuuuga

SEQ ID NO: 127893 - RNA, 25 nt, Artificial Sequence
  Description of Artificial Sequence: Synthetic oligonucleotide
agcagaaauaagcgugccguucagg

SEQ ID NO: 127894 - RNA, 25 nt, Artificial Sequence
  Description of Artificial Sequence: Synthetic oligonucleotide
aagcgugccguucaggguccagaag

SEQ ID NO: 127895 - RNA, 25 nt, Artificial Sequence
  Description of Artificial Sequence: Synthetic oligonucleotide
agaaacagucacucaagacugcuug

SEQ ID NO: 127896 - RNA, 25 nt, Artificial Sequence
  Description of Artificial Sequence: Synthetic oligonucleotide
agaggaagaagguccaugucuuugg

SEQ ID NO: 127897 - RNA, 25 nt, Artificial Sequence
  Description of Artificial Sequence: Synthetic oligonucleotide
uguauucaaaauaugccugaaacac

SEQ ID NO: 127898 - RNA, 25 nt, Artificial Sequence
  Description of Artificial Sequence: Synthetic oligonucleotide
auuuuccucccuuucucuguaccuc

SEQ ID NO: 127899 - RNA, 25 nt, Artificial Sequence
  Description of Artificial Sequence: Synthetic oligonucleotide
caaagaaagauagagcaagacaaga

SEQ ID NO: 127900 - RNA, 25 nt, Artificial Sequence
  Description of Artificial Sequence: Synthetic oligonucleotide
aagaaagauagagcaagacaagaaa

SEQ ID NO: 127901 - RNA, 25 nt, Artificial Sequence
  Description of Artificial Sequence: Synthetic oligonucleotide
gaaagcauuuguuuguacaagaucc

SEQ ID NO: 127902 - RNA, 25 nt, Artificial Sequence
  Description of Artificial Sequence: Synthetic oligonucleotide
ugaguuaaacgaacguacuugcaga

SEQ ID NO: 127903 - RNA, 25 nt, Artificial Sequence
  Description of Artificial Sequence: Synthetic oligonucleotide
acugauacagaacgaucgauacaga

SEQ ID NO: 127904 - RNA, 25 nt, Artificial Sequence
  Description of Artificial Sequence: Synthetic oligonucleotide
auauuauauauauauaaaaauaaau

SEQ ID NO: 127905 - RNA, 25 nt, Artificial Sequence
  Description of Artificial Sequence: Synthetic oligonucleotide
auuauauauauauaaaaauaaauau

SEQ ID NO: 127906 - RNA, 25 nt, Artificial Sequence
  Description of Artificial Sequence: Synthetic oligonucleotide
ucacuggauguauuugacugcugug

SEQ ID NO: 127907 - RNA, 25 nt, Artificial Sequence
  Description of Artificial Sequence: Synthetic oligonucleotide
cagggaagaggaggagaugagagac

SEQ ID NO: 127908 - RNA, 25 nt, Artificial Sequence
  Description of Artificial Sequence: Synthetic oligonucleotide
augaucuuuuuuuugucccacuugg

SEQ ID NO: 127909 - RNA, 27 nt, Artificial Sequence
  Description of Artificial Sequence: Synthetic oligonucleotide
ggccgugaacuccucaucaaaauaccu

SEQ ID NO: 127910 - RNA, 27 nt, Artificial Sequence
  Description of Artificial Sequence: Synthetic oligonucleotide
uggugugauggugaucaucugggccgu

SEQ ID NO: 127911 - RNA, 27 nt, Artificial Sequence
  Description of Artificial Sequence: Synthetic oligonucleotide
aaacccgcaggauaguuuucuucccua

SEQ ID NO: 127912 - RNA, 27 nt, Artificial Sequence
  Description of Artificial Sequence: Synthetic oligonucleotide
caaacuggaugaaauaaauuaaaaccc

SEQ ID NO: 127913 - RNA, 27 nt, Artificial Sequence
  Description of Artificial Sequence: Synthetic oligonucleotide
agaaguccuuaacauuucccuacguga

SEQ ID NO: 127914 - RNA, 27 nt, Artificial Sequence
  Description of Artificial Sequence: Synthetic oligonucleotide
cucugucccacuggguaaacccuggcc

SEQ ID NO: 127915 - RNA, 27 nt, Artificial Sequence
  Description of Artificial Sequence: Synthetic oligonucleotide
cacaauaacaaauuuaaaccuugcucc

SEQ ID NO: 127916 - RNA, 27 nt, Artificial Sequence
  Description of Artificial Sequence: Synthetic oligonucleotide
aaaugcauuugaacaacauaauacaca

SEQ ID NO: 127917 - RNA, 27 nt, Artificial Sequence
  Description of Artificial Sequence: Synthetic oligonucleotide
ggcuuuccugucacaaagauuaaaaac

SEQ ID NO: 127918 - RNA, 27 nt, Artificial Sequence
  Description of Artificial Sequence: Synthetic oligonucleotide
agggcuuuccugucacaaagauuaaaa

SEQ ID NO: 127919 - RNA, 27 nt, Artificial Sequence
  Description of Artificial Sequence: Synthetic oligonucleotide
ggccaugcugggagacauaagcagcag

SEQ ID NO: 127920 - RNA, 27 nt, Artificial Sequence
  Description of Artificial Sequence: Synthetic oligonucleotide
ucagggagaagcuucugaaacacuucu

SEQ ID NO: 127921 - RNA, 27 nt, Artificial Sequence
  Description of Artificial Sequence: Synthetic oligonucleotide
aagggcuucuuccuuauugauggucag

SEQ ID NO: 127922 - RNA, 27 nt, Artificial Sequence
  Description of Artificial Sequence: Synthetic oligonucleotide
ugaagggcuucuuccuuauugaugguc

SEQ ID NO: 127923 - RNA, 27 nt, Artificial Sequence
  Description of Artificial Sequence: Synthetic oligonucleotide
cgcugaagggcuucuuccuuauugaug

SEQ ID NO: 127924 - RNA, 27 nt, Artificial Sequence
  Description of Artificial Sequence: Synthetic oligonucleotide
gccgcugaagggcuucuuccuuauuga

SEQ ID NO: 127925 - RNA, 27 nt, Artificial Sequence
  Description of Artificial Sequence: Synthetic oligonucleotide
acuggccgcugaagggcuucuuccuua

SEQ ID NO: 127926 - RNA, 27 nt, Artificial Sequence
  Description of Artificial Sequence: Synthetic oligonucleotide
cggagcuuuucaccuuuaguuaugcuu

SEQ ID NO: 127927 - RNA, 27 nt, Artificial Sequence
  Description of Artificial Sequence: Synthetic oligonucleotide
ccggagcuuuucaccuuuaguuaugcu

SEQ ID NO: 127928 - RNA, 27 nt, Artificial Sequence
  Description of Artificial Sequence: Synthetic oligonucleotide
cagacuguugacuggcgugauguaguu

SEQ ID NO: 127929 - RNA, 27 nt, Artificial Sequence
  Description of Artificial Sequence: Synthetic oligonucleotide
cuuuugaacucugcuuaaauccagugg

SEQ ID NO: 127930 - RNA, 27 nt, Artificial Sequence
  Description of Artificial Sequence: Synthetic oligonucleotide
gcuuuugaacucugcuuaaauccagug

SEQ ID NO: 127931 - RNA, 27 nt, Artificial Sequence
  Description of Artificial Sequence: Synthetic oligonucleotide
agggcuuuugaacucugcuuaaaucca

SEQ ID NO: 127932 - RNA, 27 nt, Artificial Sequence
  Description of Artificial Sequence: Synthetic oligonucleotide
aagggcuuuugaacucugcuuaaaucc

SEQ ID NO: 127933 - RNA, 27 nt, Artificial Sequence
  Description of Artificial Sequence: Synthetic oligonucleotide
ugaagggcuuuugaacucugcuuaaau

SEQ ID NO: 127934 - RNA, 27 nt, Artificial Sequence
  Description of Artificial Sequence: Synthetic oligonucleotide
cugaagggcuuuugaacucugcuuaaa

SEQ ID NO: 127935 - RNA, 27 nt, Artificial Sequence
  Description of Artificial Sequence: Synthetic oligonucleotide
cgcugaagggcuuuugaacucugcuua

SEQ ID NO: 127936 - RNA, 27 nt, Artificial Sequence
  Description of Artificial Sequence: Synthetic oligonucleotide
cgagcggcuucacucagacccugaggc

SEQ ID NO: 127937 - RNA, 27 nt, Artificial Sequence
  Description of Artificial Sequence: Synthetic oligonucleotide
uugacuggcgugauguaguugcuuggg

SEQ ID NO: 127938 - RNA, 27 nt, Artificial Sequence
  Description of Artificial Sequence: Synthetic oligonucleotide
cacgcaccaagaagcugccauugaucc

SEQ ID NO: 127939 - RNA, 27 nt, Artificial Sequence
  Description of Artificial Sequence: Synthetic oligonucleotide
cugaugaauccaaugugggcuggaauc

SEQ ID NO: 127940 - RNA, 27 nt, Artificial Sequence
  Description of Artificial Sequence: Synthetic oligonucleotide
cuuagguauuccacauucucagcugug

SEQ ID NO: 127941 - RNA, 27 nt, Artificial Sequence
  Description of Artificial Sequence: Synthetic oligonucleotide
ugagccucaaauuaggagauacguuuu

SEQ ID NO: 127942 - RNA, 27 nt, Artificial Sequence
  Description of Artificial Sequence: Synthetic oligonucleotide
ccaauuguagagaaauuauuuuaggaa

SEQ ID NO: 127943 - RNA, 27 nt, Artificial Sequence
  Description of Artificial Sequence: Synthetic oligonucleotide
ggcuccuaacuagcugaaucuuccaau

SEQ ID NO: 127944 - RNA, 27 nt, Artificial Sequence
  Description of Artificial Sequence: Synthetic oligonucleotide
guggauauugacuaggagaguuuaaaa

SEQ ID NO: 127945 - RNA, 27 nt, Artificial Sequence
  Description of Artificial Sequence: Synthetic oligonucleotide
ugugacugaacauaacuguaggcugaa

SEQ ID NO: 127946 - RNA, 27 nt, Artificial Sequence
  Description of Artificial Sequence: Synthetic oligonucleotide
guaugugugugugacugaacauaacug

SEQ ID NO: 127947 - RNA, 27 nt, Artificial Sequence
  Description of Artificial Sequence: Synthetic oligonucleotide
aagcaaaaggaacauuuuguaugugug

SEQ ID NO: 127948 - RNA, 27 nt, Artificial Sequence
  Description of Artificial Sequence: Synthetic oligonucleotide
aaaaauuacuuuaaaagcaaaaggaac

SEQ ID NO: 127949 - RNA, 27 nt, Artificial Sequence
  Description of Artificial Sequence: Synthetic oligonucleotide
ccauugacuguugcuucacaggucaga

SEQ ID NO: 127950 - RNA, 27 nt, Artificial Sequence
  Description of Artificial Sequence: Synthetic oligonucleotide
auugguuugucgaugugugagauaguu

SEQ ID NO: 127951 - RNA, 27 nt, Artificial Sequence
  Description of Artificial Sequence: Synthetic oligonucleotide
agugguagcaguacaauugaggacaag

SEQ ID NO: 127952 - RNA, 27 nt, Artificial Sequence
  Description of Artificial Sequence: Synthetic oligonucleotide
uaagaccgcuugccagcuacgguuuca

SEQ ID NO: 127953 - RNA, 27 nt, Artificial Sequence
  Description of Artificial Sequence: Synthetic oligonucleotide
agccgguaagaccgcuugccagcuacg

SEQ ID NO: 127954 - RNA, 27 nt, Artificial Sequence
  Description of Artificial Sequence: Synthetic oligonucleotide
gguaacccaucuuuuaaccauacaacu

SEQ ID NO: 127955 - RNA, 27 nt, Artificial Sequence
  Description of Artificial Sequence: Synthetic oligonucleotide
ucgcagguaacccaucuuuuaaccaua

SEQ ID NO: 127956 - RNA, 27 nt, Artificial Sequence
  Description of Artificial Sequence: Synthetic oligonucleotide
cucagcaagauuguauaauucccugca

SEQ ID NO: 127957 - RNA, 27 nt, Artificial Sequence
  Description of Artificial Sequence: Synthetic oligonucleotide
acuguuuuaugcucagcaagauuguau

SEQ ID NO: 127958 - RNA, 27 nt, Artificial Sequence
  Description of Artificial Sequence: Synthetic oligonucleotide
aggauaaaggacucuucauuauuggaa

SEQ ID NO: 127959 - RNA, 27 nt, Artificial Sequence
  Description of Artificial Sequence: Synthetic oligonucleotide
caacuugcguuggaacauccaaagugu

SEQ ID NO: 127960 - RNA, 27 nt, Artificial Sequence
  Description of Artificial Sequence: Synthetic oligonucleotide
augguuucaguuuaguggaagcauuua

SEQ ID NO: 127961 - RNA, 27 nt, Artificial Sequence
  Description of Artificial Sequence: Synthetic oligonucleotide
auauuuaacaaagucaaacuuucucac

SEQ ID NO: 127962 - RNA, 27 nt, Artificial Sequence
  Description of Artificial Sequence: Synthetic oligonucleotide
aacuuuuaauauacaguaguucuuuuc

SEQ ID NO: 127963 - RNA, 27 nt, Artificial Sequence
  Description of Artificial Sequence: Synthetic oligonucleotide
guuaagucaaaacccguauuucuaaag

SEQ ID NO: 127964 - RNA, 27 nt, Artificial Sequence
  Description of Artificial Sequence: Synthetic oligonucleotide
gugcugaguuugcuguacccauguuga

SEQ ID NO: 127965 - RNA, 27 nt, Artificial Sequence
  Description of Artificial Sequence: Synthetic oligonucleotide
ugaggucagcaucuucugugucuuuac

SEQ ID NO: 127966 - RNA, 27 nt, Artificial Sequence
  Description of Artificial Sequence: Synthetic oligonucleotide
gcgaucugaauaaaccucccuacuagc

SEQ ID NO: 127967 - RNA, 27 nt, Artificial Sequence
  Description of Artificial Sequence: Synthetic oligonucleotide
aucccagaacccugcugcagaaggcca

SEQ ID NO: 127968 - RNA, 27 nt, Artificial Sequence
  Description of Artificial Sequence: Synthetic oligonucleotide
cauaauuuccaauauguaccagaccuu

SEQ ID NO: 127969 - RNA, 27 nt, Artificial Sequence
  Description of Artificial Sequence: Synthetic oligonucleotide
cuagugcuuccaucggaaggacuaggu

SEQ ID NO: 127970 - RNA, 27 nt, Artificial Sequence
  Description of Artificial Sequence: Synthetic oligonucleotide
uccacauaaaaacaauauucacuggga

SEQ ID NO: 127971 - RNA, 27 nt, Artificial Sequence
  Description of Artificial Sequence: Synthetic oligonucleotide
ucuaccaauuccaacuugaauucauug

SEQ ID NO: 127972 - RNA, 27 nt, Artificial Sequence
  Description of Artificial Sequence: Synthetic oligonucleotide
ucuccaagucuaaaucuguguccugag

SEQ ID NO: 127973 - RNA, 27 nt, Artificial Sequence
  Description of Artificial Sequence: Synthetic oligonucleotide
uggaauacuguaacugugcuuugagga

SEQ ID NO: 127974 - RNA, 27 nt, Artificial Sequence
  Description of Artificial Sequence: Synthetic oligonucleotide
uuaauucaucagugguggcagugguag

SEQ ID NO: 127975 - RNA, 27 nt, Artificial Sequence
  Description of Artificial Sequence: Synthetic oligonucleotide
gugaugauguggcacuaguaguuucuu

SEQ ID NO: 127976 - RNA, 27 nt, Artificial Sequence
  Description of Artificial Sequence: Synthetic oligonucleotide
ucuguuuggugaggcuguccgacuuug

SEQ ID NO: 127977 - RNA, 27 nt, Artificial Sequence
  Description of Artificial Sequence: Synthetic oligonucleotide
ccaucauguuccauuuuucgcuuucuc

SEQ ID NO: 127978 - RNA, 27 nt, Artificial Sequence
  Description of Artificial Sequence: Synthetic oligonucleotide
gcagucuacaugcuaaaucagagggua

SEQ ID NO: 127979 - RNA, 27 nt, Artificial Sequence
  Description of Artificial Sequence: Synthetic oligonucleotide
cauaaauagauccuuaaauagcucaaa

SEQ ID NO: 127980 - RNA, 27 nt, Artificial Sequence
  Description of Artificial Sequence: Synthetic oligonucleotide
ugauaauagugcuuuuucaccuuuuuc

SEQ ID NO: 127981 - RNA, 27 nt, Artificial Sequence
  Description of Artificial Sequence: Synthetic oligonucleotide
gcagaacugauaauagugcuuuuucac

SEQ ID NO: 127982 - RNA, 27 nt, Artificial Sequence
  Description of Artificial Sequence: Synthetic oligonucleotide
guagguuuaaucuuucuuuucagccau

SEQ ID NO: 127983 - RNA, 27 nt, Artificial Sequence
  Description of Artificial Sequence: Synthetic oligonucleotide
agaaggauuuuauuauaaggguuuaau

SEQ ID NO: 127984 - RNA, 27 nt, Artificial Sequence
  Description of Artificial Sequence: Synthetic oligonucleotide
gucuacagcauuggcuaauaguaugaa

SEQ ID NO: 127985 - RNA, 27 nt, Artificial Sequence
  Description of Artificial Sequence: Synthetic oligonucleotide
cuauuccuaucaaaaugcuucugucua

SEQ ID NO: 127986 - RNA, 27 nt, Artificial Sequence
  Description of Artificial Sequence: Synthetic oligonucleotide
ucagggccauuaucuuauuugcucuau

SEQ ID NO: 127987 - RNA, 27 nt, Artificial Sequence
  Description of Artificial Sequence: Synthetic oligonucleotide
ugcuugaggaagagaaaaauguugguc

SEQ ID NO: 127988 - RNA, 27 nt, Artificial Sequence
  Description of Artificial Sequence: Synthetic oligonucleotide
ugggcugaacuuuucucauacuuaaag

SEQ ID NO: 127989 - RNA, 27 nt, Artificial Sequence
  Description of Artificial Sequence: Synthetic oligonucleotide
gguucagcagccaucuuuauuccugcg

SEQ ID NO: 127990 - RNA, 27 nt, Artificial Sequence
  Description of Artificial Sequence: Synthetic oligonucleotide
ugaagagaacuuggucauucaaauuuc

SEQ ID NO: 127991 - RNA, 27 nt, Artificial Sequence
  Description of Artificial Sequence: Synthetic oligonucleotide
cucuaggcuggcuaucuuuauacauac

SEQ ID NO: 127992 - RNA, 27 nt, Artificial Sequence
  Description of Artificial Sequence: Synthetic oligonucleotide
acacuucacagagauaguuacagccau

SEQ ID NO: 127993 - RNA, 27 nt, Artificial Sequence
  Description of Artificial Sequence: Synthetic oligonucleotide
uugaaauuuucucacacuucacagaga

SEQ ID NO: 127994 - RNA, 27 nt, Artificial Sequence
  Description of Artificial Sequence: Synthetic oligonucleotide
ucaggaggauucauuuccuuaaaggaa

SEQ ID NO: 127995 - RNA, 27 nt, Artificial Sequence
  Description of Artificial Sequence: Synthetic oligonucleotide
auaugaugucacuuuuuguauccuuga

SEQ ID NO: 127996 - RNA, 27 nt, Artificial Sequence
  Description of Artificial Sequence: Synthetic oligonucleotide
uaugaugaagauucaaauugcaucuua

SEQ ID NO: 127997 - RNA, 27 nt, Artificial Sequence
  Description of Artificial Sequence: Synthetic oligonucleotide
uuaauagcuagucuucguuuugaacag

SEQ ID NO: 127998 - RNA, 27 nt, Artificial Sequence
  Description of Artificial Sequence: Synthetic oligonucleotide
auuuuuaguagagaugagguuucacca

SEQ ID NO: 127999 - RNA, 27 nt, Artificial Sequence
  Description of Artificial Sequence: Synthetic oligonucleotide
aggcgagauagagcuucucuuucguuc

SEQ ID NO: 128000 - RNA, 27 nt, Artificial Sequence
  Description of Artificial Sequence: Synthetic oligonucleotide
aacuggaccgaaggcgcuuguggagaa

SEQ ID NO: 128001 - RNA, 27 nt, Artificial Sequence
  Description of Artificial Sequence: Synthetic oligonucleotide
gcggcuacaucuuuggaaucuucuccu

SEQ ID NO: 128002 - RNA, 27 nt, Artificial Sequence
  Description of Artificial Sequence: Synthetic oligonucleotide
caagucuccucauugaauccagauugg

SEQ ID NO: 128003 - RNA, 27 nt, Artificial Sequence
  Description of Artificial Sequence: Synthetic oligonucleotide
uccucacuacucucaaaucuguucugg

SEQ ID NO: 128004 - RNA, 27 nt, Artificial Sequence
  Description of Artificial Sequence: Synthetic oligonucleotide
uuuguacucaucugcacagcucuggcu

SEQ ID NO: 128005 - RNA, 27 nt, Artificial Sequence
  Description of Artificial Sequence: Synthetic oligonucleotide
gcccauuaacaacaacaaucugaggug

SEQ ID NO: 128006 - RNA, 27 nt, Artificial Sequence
  Description of Artificial Sequence: Synthetic oligonucleotide
aauaaauuaaaaauaauuaaaauagug

SEQ ID NO: 128007 - RNA, 27 nt, Artificial Sequence
  Description of Artificial Sequence: Synthetic oligonucleotide
cauauuuaaauauuaauaaauuaaaaa

SEQ ID NO: 128008 - RNA, 27 nt, Artificial Sequence
  Description of Artificial Sequence: Synthetic oligonucleotide
gaaacaaaggauauucaaacugcauag

SEQ ID NO: 128009 - RNA, 27 nt, Artificial Sequence
  Description of Artificial Sequence: Synthetic oligonucleotide
caaacacuuagacgccagcagcauggg

SEQ ID NO: 128010 - RNA, 27 nt, Artificial Sequence
  Description of Artificial Sequence: Synthetic oligonucleotide
uuugucacaggugaaaugcacaucuga

SEQ ID NO: 128011 - RNA, 27 nt, Artificial Sequence
  Description of Artificial Sequence: Synthetic oligonucleotide
uaauucagccuggcacagguuuugauc

SEQ ID NO: 128012 - RNA, 27 nt, Artificial Sequence
  Description of Artificial Sequence: Synthetic oligonucleotide
auuguaagaaugacuacccacauucac

SEQ ID NO: 128013 - RNA, 27 nt, Artificial Sequence
  Description of Artificial Sequence: Synthetic oligonucleotide
caauuguaagaaugacuacccacauuc

SEQ ID NO: 128014 - RNA, 27 nt, Artificial Sequence
  Description of Artificial Sequence: Synthetic oligonucleotide
guacacucucugaugcucauuuucaua

SEQ ID NO: 128015 - RNA, 27 nt, Artificial Sequence
  Description of Artificial Sequence: Synthetic oligonucleotide
cugcugaguucuacaugaaaagcaaau

SEQ ID NO: 128016 - RNA, 27 nt, Artificial Sequence
  Description of Artificial Sequence: Synthetic oligonucleotide
uacugaaaauaaauauagaaauacaac

SEQ ID NO: 128017 - RNA, 27 nt, Artificial Sequence
  Description of Artificial Sequence: Synthetic oligonucleotide
uuccauuuaagaaacauuaaucaaaac

SEQ ID NO: 128018 - RNA, 27 nt, Artificial Sequence
  Description of Artificial Sequence: Synthetic oligonucleotide
acaauuuuaggcacuauacacguuguu

SEQ ID NO: 128019 - RNA, 27 nt, Artificial Sequence
  Description of Artificial Sequence: Synthetic oligonucleotide
ccagauguuaguagccaaggauauggu

SEQ ID NO: 128020 - RNA, 27 nt, Artificial Sequence
  Description of Artificial Sequence: Synthetic oligonucleotide
agcucacagucuccagauguuaguagc

SEQ ID NO: 128021 - RNA, 27 nt, Artificial Sequence
  Description of Artificial Sequence: Synthetic oligonucleotide
auuaauaaaaagcacacaacuuauggc

SEQ ID NO: 128022 - RNA, 27 nt, Artificial Sequence
  Description of Artificial Sequence: Synthetic oligonucleotide
aauguaagaagagccaaaaugaugcau

SEQ ID NO: 128023 - RNA, 27 nt, Artificial Sequence
  Description of Artificial Sequence: Synthetic oligonucleotide
acauuuuuacaaauguaagaagagcca

SEQ ID NO: 128024 - RNA, 27 nt, Artificial Sequence
  Description of Artificial Sequence: Synthetic oligonucleotide
aauaugaauuaagaugaccuaaucugu

SEQ ID NO: 128025 - RNA, 27 nt, Artificial Sequence
  Description of Artificial Sequence: Synthetic oligonucleotide
ucaugauuaguucuuucaauuccaucc

SEQ ID NO: 128026 - RNA, 27 nt, Artificial Sequence
  Description of Artificial Sequence: Synthetic oligonucleotide
cccaagagcagaaggaaugagugugca

SEQ ID NO: 128027 - RNA, 27 nt, Artificial Sequence
  Description of Artificial Sequence: Synthetic oligonucleotide
cucaaagcuacugguuaccucuacacc

SEQ ID NO: 128028 - RNA, 27 nt, Artificial Sequence
  Description of Artificial Sequence: Synthetic oligonucleotide
ugaaauauuacguggcaugugguuggg

SEQ ID NO: 128029 - RNA, 27 nt, Artificial Sequence
  Description of Artificial Sequence: Synthetic oligonucleotide
agugaagagaauaacuuguuuccgaag

SEQ ID NO: 128030 - RNA, 27 nt, Artificial Sequence
  Description of Artificial Sequence: Synthetic oligonucleotide
uuucuuagcauuaguuauugggaguga

SEQ ID NO: 128031 - RNA, 27 nt, Artificial Sequence
  Description of Artificial Sequence: Synthetic oligonucleotide
uugauuuucagcauuucuuagcauuag

SEQ ID NO: 128032 - RNA, 27 nt, Artificial Sequence
  Description of Artificial Sequence: Synthetic oligonucleotide
aaaguaaucauauuuagagaaagacag

SEQ ID NO: 128033 - RNA, 27 nt, Artificial Sequence
  Description of Artificial Sequence: Synthetic oligonucleotide
uguagaacaaaaugccugaaauucagc

SEQ ID NO: 128034 - RNA, 27 nt, Artificial Sequence
  Description of Artificial Sequence: Synthetic oligonucleotide
gagagucccgggugagagggaaucgcc

SEQ ID NO: 128035 - RNA, 27 nt, Artificial Sequence
  Description of Artificial Sequence: Synthetic oligonucleotide
cuuuacuuuaaagguucacuuuccuug

SEQ ID NO: 128036 - RNA, 27 nt, Artificial Sequence
  Description of Artificial Sequence: Synthetic oligonucleotide
ccaggcuuccagagcaugcagccuccu

SEQ ID NO: 128037 - RNA, 27 nt, Artificial Sequence
  Description of Artificial Sequence: Synthetic oligonucleotide
cucucuuuuguuuucuguucagagaaa

SEQ ID NO: 128038 - RNA, 27 nt, Artificial Sequence
  Description of Artificial Sequence: Synthetic oligonucleotide
cggcauaacugauuacagccaaguuca

SEQ ID NO: 128039 - RNA, 27 nt, Artificial Sequence
  Description of Artificial Sequence: Synthetic oligonucleotide
uggacuucuuuuaauuuuggcuucuuc

SEQ ID NO: 128040 - RNA, 27 nt, Artificial Sequence
  Description of Artificial Sequence: Synthetic oligonucleotide
uaaccucaccuggacuucuuuuaauuu

SEQ ID NO: 128041 - RNA, 27 nt, Artificial Sequence
  Description of Artificial Sequence: Synthetic oligonucleotide
guccucuucccgauaauccggauucag

SEQ ID NO: 128042 - RNA, 27 nt, Artificial Sequence
  Description of Artificial Sequence: Synthetic oligonucleotide
acaauacuugcuuugaugucacauuaa

SEQ ID NO: 128043 - RNA, 27 nt, Artificial Sequence
  Description of Artificial Sequence: Synthetic oligonucleotide
gagugcuacaauacuugcuuugauguc

SEQ ID NO: 128044 - RNA, 27 nt, Artificial Sequence
  Description of Artificial Sequence: Synthetic oligonucleotide
auuugugguuuuguuuucucucucucu

SEQ ID NO: 128045 - RNA, 27 nt, Artificial Sequence
  Description of Artificial Sequence: Synthetic oligonucleotide
uguaugggcuuaaauacuacagcgagg

SEQ ID NO: 128046 - RNA, 27 nt, Artificial Sequence
  Description of Artificial Sequence: Synthetic oligonucleotide
cuguaugggcuuaaauacuacagcgag

SEQ ID NO: 128047 - RNA, 27 nt, Artificial Sequence
  Description of Artificial Sequence: Synthetic oligonucleotide
ggaagguuucuguaugggcuuaaauac

SEQ ID NO: 128048 - RNA, 27 nt, Artificial Sequence
  Description of Artificial Sequence: Synthetic oligonucleotide
guagguauaccauguuuauuuuaauac

SEQ ID NO: 128049 - RNA, 27 nt, Artificial Sequence
  Description of Artificial Sequence: Synthetic oligonucleotide
uccgaaaacuggccgaucagaacagcc

SEQ ID NO: 128050 - RNA, 27 nt, Artificial Sequence
  Description of Artificial Sequence: Synthetic oligonucleotide
cccuguuccaaaguucaaauuauuugu

SEQ ID NO: 128051 - RNA, 27 nt, Artificial Sequence
  Description of Artificial Sequence: Synthetic oligonucleotide
acuggaaaguuaaauuaaggucgcaau

SEQ ID NO: 128052 - RNA, 27 nt, Artificial Sequence
  Description of Artificial Sequence: Synthetic oligonucleotide
caaaaccaaacuuuagcuuucucagcc

SEQ ID NO: 128053 - RNA, 27 nt, Artificial Sequence
  Description of Artificial Sequence: Synthetic oligonucleotide
uacagugggaaguagcaucuuuacuuu

SEQ ID NO: 128054 - RNA, 27 nt, Artificial Sequence
  Description of Artificial Sequence: Synthetic oligonucleotide
ucauaugguaucagcaauuaagcagua

SEQ ID NO: 128055 - RNA, 27 nt, Artificial Sequence
  Description of Artificial Sequence: Synthetic oligonucleotide
cagcccauguuucauucauaugguauc

SEQ ID NO: 128056 - RNA, 27 nt, Artificial Sequence
  Description of Artificial Sequence: Synthetic oligonucleotide
uaugaaaaaguuggauaagaaaguugg

SEQ ID NO: 128057 - RNA, 27 nt, Artificial Sequence
  Description of Artificial Sequence: Synthetic oligonucleotide
uccggccucaugaugucaugcaaggcu

SEQ ID NO: 128058 - RNA, 27 nt, Artificial Sequence
  Description of Artificial Sequence: Synthetic oligonucleotide
acaaaugcagucauauacaaauucagg

SEQ ID NO: 128059 - RNA, 27 nt, Artificial Sequence
  Description of Artificial Sequence: Synthetic oligonucleotide
gguaguaaacauucuacuaggauucuu

SEQ ID NO: 128060 - RNA, 27 nt, Artificial Sequence
  Description of Artificial Sequence: Synthetic oligonucleotide
uuucaucaaaaaauucuucccuuucug

SEQ ID NO: 128061 - RNA, 27 nt, Artificial Sequence
  Description of Artificial Sequence: Synthetic oligonucleotide
aaauucacacacuggcaugccgauagc

SEQ ID NO: 128062 - RNA, 27 nt, Artificial Sequence
  Description of Artificial Sequence: Synthetic oligonucleotide
acauacauugcucuacuaugaggugaa

SEQ ID NO: 128063 - RNA, 27 nt, Artificial Sequence
  Description of Artificial Sequence: Synthetic oligonucleotide
uauauaugugcuuuggcaauucuggug

SEQ ID NO: 128064 - RNA, 27 nt, Artificial Sequence
  Description of Artificial Sequence: Synthetic oligonucleotide
ggagaaacuauuacccagaucaccacu

SEQ ID NO: 128065 - RNA, 27 nt, Artificial Sequence
  Description of Artificial Sequence: Synthetic oligonucleotide
auuuggagaaacuauuacccagaucac

SEQ ID NO: 128066 - RNA, 27 nt, Artificial Sequence
  Description of Artificial Sequence: Synthetic oligonucleotide
uuucuaggaaguauucaucacauccac

SEQ ID NO: 128067 - RNA, 27 nt, Artificial Sequence
  Description of Artificial Sequence: Synthetic oligonucleotide
cauauaugguguagcuguggaaaugcg

SEQ ID NO: 128068 - RNA, 27 nt, Artificial Sequence
  Description of Artificial Sequence: Synthetic oligonucleotide
cuccauucauauaugguguagcugugg

SEQ ID NO: 128069 - RNA, 27 nt, Artificial Sequence
  Description of Artificial Sequence: Synthetic oligonucleotide
aucuucuucucguguaagaacugcagc

SEQ ID NO: 128070 - RNA, 27 nt, Artificial Sequence
  Description of Artificial Sequence: Synthetic oligonucleotide
ucccuguaaaugaucuucuucucgugu

SEQ ID NO: 128071 - RNA, 27 nt, Artificial Sequence
  Description of Artificial Sequence: Synthetic oligonucleotide
gucccuguaaaugaucuucuucucgug

SEQ ID NO: 128072 - RNA, 27 nt, Artificial Sequence
  Description of Artificial Sequence: Synthetic oligonucleotide
ucaggucccuguaaaugaucuucuucu

SEQ ID NO: 128073 - RNA, 27 nt, Artificial Sequence
  Description of Artificial Sequence: Synthetic oligonucleotide
gaugcagucaaacaccucuuccucugu

SEQ ID NO: 128074 - RNA, 27 nt, Artificial Sequence
  Description of Artificial Sequence: Synthetic oligonucleotide
cgaugcagucaaacaccucuuccucug

SEQ ID NO: 128075 - RNA, 27 nt, Artificial Sequence
  Description of Artificial Sequence: Synthetic oligonucleotide
cccugugaacucgcccucaaaguagcg

SEQ ID NO: 128076 - RNA, 27 nt, Artificial Sequence
  Description of Artificial Sequence: Synthetic oligonucleotide
ggacagaggugccaggagaugcccuca

SEQ ID NO: 128077 - RNA, 27 nt, Artificial Sequence
  Description of Artificial Sequence: Synthetic oligonucleotide
uuaaaaagacaaaccauaucacuccuu

SEQ ID NO: 128078 - RNA, 27 nt, Artificial Sequence
  Description of Artificial Sequence: Synthetic oligonucleotide
cuuaaaaagacaaaccauaucacuccu

SEQ ID NO: 128079 - RNA, 27 nt, Artificial Sequence
  Description of Artificial Sequence: Synthetic oligonucleotide
gacaaccuuuaggaucuuuacugcaac

SEQ ID NO: 128080 - RNA, 27 nt, Artificial Sequence
  Description of Artificial Sequence: Synthetic oligonucleotide
gucgacaaccuuuaggaucuuuacugc

SEQ ID NO: 128081 - RNA, 27 nt, Artificial Sequence
  Description of Artificial Sequence: Synthetic oligonucleotide
acaauugccagguuguccuuugucaug

SEQ ID NO: 128082 - RNA, 27 nt, Artificial Sequence
  Description of Artificial Sequence: Synthetic oligonucleotide
ccucgcaccacugggucacaauugcca

SEQ ID NO: 128083 - RNA, 27 nt, Artificial Sequence
  Description of Artificial Sequence: Synthetic oligonucleotide
auuucaugucucuauggaugauguucu

SEQ ID NO: 128084 - RNA, 27 nt, Artificial Sequence
  Description of Artificial Sequence: Synthetic oligonucleotide
uggagaaauauauuguuggauuucaug

SEQ ID NO: 128085 - RNA, 27 nt, Artificial Sequence
  Description of Artificial Sequence: Synthetic oligonucleotide
agccuucauggagaaauauauuguugg

SEQ ID NO: 128086 - RNA, 27 nt, Artificial Sequence
  Description of Artificial Sequence: Synthetic oligonucleotide
accacuccagcgugacuuuacuguugc

SEQ ID NO: 128087 - RNA, 27 nt, Artificial Sequence
  Description of Artificial Sequence: Synthetic oligonucleotide
ccucucuuccuuuacuuucuucacaca

SEQ ID NO: 128088 - RNA, 27 nt, Artificial Sequence
  Description of Artificial Sequence: Synthetic oligonucleotide
gcccgaugcaaggauggcucggaagcg

SEQ ID NO: 128089 - RNA, 27 nt, Artificial Sequence
  Description of Artificial Sequence: Synthetic oligonucleotide
cacaguaggauauucaaccuccauuuc

SEQ ID NO: 128090 - RNA, 27 nt, Artificial Sequence
  Description of Artificial Sequence: Synthetic oligonucleotide
uuacacaguaggauauucaaccuccau

SEQ ID NO: 128091 - RNA, 27 nt, Artificial Sequence
  Description of Artificial Sequence: Synthetic oligonucleotide
uacacuacaagggaaaacucaaaaucu

SEQ ID NO: 128092 - RNA, 27 nt, Artificial Sequence
  Description of Artificial Sequence: Synthetic oligonucleotide
caaucaacaaagaacaaacaggauaaa

SEQ ID NO: 128093 - RNA, 27 nt, Artificial Sequence
  Description of Artificial Sequence: Synthetic oligonucleotide
uuucaaucaacaaagaacaaacaggau

SEQ ID NO: 128094 - RNA, 27 nt, Artificial Sequence
  Description of Artificial Sequence: Synthetic oligonucleotide
auggaagaaaaagaaggcuguagagaa

SEQ ID NO: 128095 - RNA, 27 nt, Artificial Sequence
  Description of Artificial Sequence: Synthetic oligonucleotide
uagaaggaagauuagcuauggaagaaa

SEQ ID NO: 128096 - RNA, 27 nt, Artificial Sequence
  Description of Artificial Sequence: Synthetic oligonucleotide
augaagcauucaacaggaagauuauuu

SEQ ID NO: 128097 - RNA, 27 nt, Artificial Sequence
  Description of Artificial Sequence: Synthetic oligonucleotide
caugaagcauucaacaggaagauuauu

SEQ ID NO: 128098 - RNA, 27 nt, Artificial Sequence
  Description of Artificial Sequence: Synthetic oligonucleotide
ucaaaguagaauucaagucaugaagca

SEQ ID NO: 128099 - RNA, 27 nt, Artificial Sequence
  Description of Artificial Sequence: Synthetic oligonucleotide
gucuguaguugcuucucucccucuuag

SEQ ID NO: 128100 - RNA, 27 nt, Artificial Sequence
  Description of Artificial Sequence: Synthetic oligonucleotide
guugaccuuggucugguaggagacggc

SEQ ID NO: 128101 - RNA, 27 nt, Artificial Sequence
  Description of Artificial Sequence: Synthetic oligonucleotide
gucgagauagucgggccgauugaucuc

SEQ ID NO: 128102 - RNA, 27 nt, Artificial Sequence
  Description of Artificial Sequence: Synthetic oligonucleotide
guuugggaagguuggauguucguccuc

SEQ ID NO: 128103 - RNA, 27 nt, Artificial Sequence
  Description of Artificial Sequence: Synthetic oligonucleotide
aguucuaagcuuggguuccgacccuaa

SEQ ID NO: 128104 - RNA, 27 nt, Artificial Sequence
  Description of Artificial Sequence: Synthetic oligonucleotide
uuaaaguucuaagcuuggguuccgacc

SEQ ID NO: 128105 - RNA, 27 nt, Artificial Sequence
  Description of Artificial Sequence: Synthetic oligonucleotide
guugcuuaaaguucuaagcuuggguuc

SEQ ID NO: 128106 - RNA, 27 nt, Artificial Sequence
  Description of Artificial Sequence: Synthetic oligonucleotide
gugguggucuuguugcuuaaaguucua

SEQ ID NO: 128107 - RNA, 27 nt, Artificial Sequence
  Description of Artificial Sequence: Synthetic oligonucleotide
acuuuauuucucgccacugaauaguag

SEQ ID NO: 128108 - RNA, 27 nt, Artificial Sequence
  Description of Artificial Sequence: Synthetic oligonucleotide
aacuuuauuucucgccacugaauagua

SEQ ID NO: 128109 - RNA, 27 nt, Artificial Sequence
  Description of Artificial Sequence: Synthetic oligonucleotide
ggaucauuuccuguuaucuguguuugu

SEQ ID NO: 128110 - RNA, 27 nt, Artificial Sequence
  Description of Artificial Sequence: Synthetic oligonucleotide
guuucauuucuucucuuuucuuaaggc

SEQ ID NO: 128111 - RNA, 27 nt, Artificial Sequence
  Description of Artificial Sequence: Synthetic oligonucleotide
ggaggauggaaacacacuccuucaguu

SEQ ID NO: 128112 - RNA, 27 nt, Artificial Sequence
  Description of Artificial Sequence: Synthetic oligonucleotide
ucaaagauuuucagucccgcggugaca

SEQ ID NO: 128113 - RNA, 27 nt, Artificial Sequence
  Description of Artificial Sequence: Synthetic oligonucleotide
ccugaacggcacgcuuauuucugcugu

SEQ ID NO: 128114 - RNA, 27 nt, Artificial Sequence
  Description of Artificial Sequence: Synthetic oligonucleotide
cuucuggacccugaacggcacgcuuau

SEQ ID NO: 128115 - RNA, 27 nt, Artificial Sequence
  Description of Artificial Sequence: Synthetic oligonucleotide
caagcagucuugagugacuguuucuuc

SEQ ID NO: 128116 - RNA, 27 nt, Artificial Sequence
  Description of Artificial Sequence: Synthetic oligonucleotide
ccaaagacauggaccuucuuccucuga

SEQ ID NO: 128117 - RNA, 27 nt, Artificial Sequence
  Description of Artificial Sequence: Synthetic oligonucleotide
guguuucaggcauauuuugaauacauc

SEQ ID NO: 128118 - RNA, 27 nt, Artificial Sequence
  Description of Artificial Sequence: Synthetic oligonucleotide
gagguacagagaaagggaggaaaauag

SEQ ID NO: 128119 - RNA, 27 nt, Artificial Sequence
  Description of Artificial Sequence: Synthetic oligonucleotide
ucuugucuugcucuaucuuucuuuggu

SEQ ID NO: 128120 - RNA, 27 nt, Artificial Sequence
  Description of Artificial Sequence: Synthetic oligonucleotide
uuucuugucuugcucuaucuuucuuug

SEQ ID NO: 128121 - RNA, 27 nt, Artificial Sequence
  Description of Artificial Sequence: Synthetic oligonucleotide
ggaucuuguacaaacaaaugcuuucuc

SEQ ID NO: 128122 - RNA, 27 nt, Artificial Sequence
  Description of Artificial Sequence: Synthetic oligonucleotide
ucugcaaguacguucguuuaacucaag

SEQ ID NO: 128123 - RNA, 27 nt, Artificial Sequence
  Description of Artificial Sequence: Synthetic oligonucleotide
ucuguaucgaucguucuguaucagucu

SEQ ID NO: 128124 - RNA, 27 nt, Artificial Sequence
  Description of Artificial Sequence: Synthetic oligonucleotide
auuuauuuuuauauauauauaauauau

SEQ ID NO: 128125 - RNA, 27 nt, Artificial Sequence
  Description of Artificial Sequence: Synthetic oligonucleotide
auauuuauuuuuauauauauauaauau

SEQ ID NO: 128126 - RNA, 27 nt, Artificial Sequence
  Description of Artificial Sequence: Synthetic oligonucleotide
cacagcagucaaauacauccagugaag

SEQ ID NO: 128127 - RNA, 27 nt, Artificial Sequence
  Description of Artificial Sequence: Synthetic oligonucleotide
gucucucaucuccuccucuucccuguc

SEQ ID NO: 128128 - RNA, 27 nt, Artificial Sequence
  Description of Artificial Sequence: Synthetic oligonucleotide
ccaagugggacaaaaaaaagaucaugc

SEQ ID NO: 128129 - RNA, 14 nt, Artificial Sequence
  Description of Artificial Sequence: Synthetic oligonucleotide
guauuuugaugagg

SEQ ID NO: 128130 - RNA, 12 nt, Artificial Sequence
  Description of Artificial Sequence: Synthetic oligonucleotide
ggcccagaugau

SEQ ID NO: 128131 - RNA, 14 nt, Artificial Sequence
  Description of Artificial Sequence: Synthetic oligonucleotide
gggaagaaaacuau

SEQ ID NO: 128132 - RNA, 15 nt, Artificial Sequence
  Description of Artificial Sequence: Synthetic oligonucleotide
guuuuaauuuauuuc

SEQ ID NO: 128133 - RNA, 12 nt, Artificial Sequence
  Description of Artificial Sequence: Synthetic oligonucleotide
acguagggaaau

SEQ ID NO: 128134 - RNA, 12 nt, Artificial Sequence
  Description of Artificial Sequence: Synthetic oligonucleotide
ccaggguuuacc

SEQ ID NO: 128135 - RNA, 11 nt, Artificial Sequence
  Description of Artificial Sequence: Synthetic oligonucleotide
agcaagguuua

SEQ ID NO: 128136 - RNA, 12 nt, Artificial Sequence
  Description of Artificial Sequence: Synthetic oligonucleotide
uguauuauguug

SEQ ID NO: 128137 - RNA, 15 nt, Artificial Sequence
  Description of Artificial Sequence: Synthetic oligonucleotide
uuuuaaucuuuguga

SEQ ID NO: 128138 - RNA, 14 nt, Artificial Sequence
  Description of Artificial Sequence: Synthetic oligonucleotide
uuaaucuuugugac

SEQ ID NO: 128139 - RNA, 13 nt, Artificial Sequence
  Description of Artificial Sequence: Synthetic oligonucleotide
gcugcuuaugucu

SEQ ID NO: 128140 - RNA, 14 nt, Artificial Sequence
  Description of Artificial Sequence: Synthetic oligonucleotide
aaguguuucagaag

SEQ ID NO: 128141 - RNA, 13 nt, Artificial Sequence
  Description of Artificial Sequence: Synthetic oligonucleotide
gaccaucaauaag

SEQ ID NO: 128142 - RNA, 13 nt, Artificial Sequence
  Description of Artificial Sequence: Synthetic oligonucleotide
ccaucaauaagga

SEQ ID NO: 128143 - RNA, 14 nt, Artificial Sequence
  Description of Artificial Sequence: Synthetic oligonucleotide
ucaauaaggaagaa

SEQ ID NO: 128144 - RNA, 14 nt, Artificial Sequence
  Description of Artificial Sequence: Synthetic oligonucleotide
aauaaggaagaagc

SEQ ID NO: 128145 - RNA, 13 nt, Artificial Sequence
  Description of Artificial Sequence: Synthetic oligonucleotide
aggaagaagcccu

SEQ ID NO: 128146 - RNA, 13 nt, Artificial Sequence
  Description of Artificial Sequence: Synthetic oligonucleotide
gcauaacuaaagg

SEQ ID NO: 128147 - RNA, 14 nt, Artificial Sequence
  Description of Artificial Sequence: Synthetic oligonucleotide
cauaacuaaaggug

SEQ ID NO: 128148 - RNA, 12 nt, Artificial Sequence
  Description of Artificial Sequence: Synthetic oligonucleotide
cuacaucacgcc

SEQ ID NO: 128149 - RNA, 12 nt, Artificial Sequence
  Description of Artificial Sequence: Synthetic oligonucleotide
acuggauuuaag

SEQ ID NO: 128150 - RNA, 12 nt, Artificial Sequence
  Description of Artificial Sequence: Synthetic oligonucleotide
cuggauuuaagc

SEQ ID NO: 128151 - RNA, 13 nt, Artificial Sequence
  Description of Artificial Sequence: Synthetic oligonucleotide
gauuuaagcagag

SEQ ID NO: 128152 - RNA, 13 nt, Artificial Sequence
  Description of Artificial Sequence: Synthetic oligonucleotide
auuuaagcagagu

SEQ ID NO: 128153 - RNA, 13 nt, Artificial Sequence
  Description of Artificial Sequence: Synthetic oligonucleotide
uuaagcagaguuc

SEQ ID NO: 128154 - RNA, 13 nt, Artificial Sequence
  Description of Artificial Sequence: Synthetic oligonucleotide
uaagcagaguuca

SEQ ID NO: 128155 - RNA, 14 nt, Artificial Sequence
  Description of Artificial Sequence: Synthetic oligonucleotide
agcagaguucaaaa

SEQ ID NO: 128156 - RNA, 12 nt, Artificial Sequence
  Description of Artificial Sequence: Synthetic oligonucleotide
cucagggucuga

SEQ ID NO: 128157 - RNA, 13 nt, Artificial Sequence
  Description of Artificial Sequence: Synthetic oligonucleotide
caagcaacuacau

SEQ ID NO: 128158 - RNA, 12 nt, Artificial Sequence
  Description of Artificial Sequence: Synthetic oligonucleotide
aucaauggcagc

SEQ ID NO: 128159 - RNA, 11 nt, Artificial Sequence
  Description of Artificial Sequence: Synthetic oligonucleotide
uuccagcccac

SEQ ID NO: 128160 - RNA, 12 nt, Artificial Sequence
  Description of Artificial Sequence: Synthetic oligonucleotide
cagcugagaaug

SEQ ID NO: 128161 - RNA, 13 nt, Artificial Sequence
  Description of Artificial Sequence: Synthetic oligonucleotide
aacguaucuccua

SEQ ID NO: 128162 - RNA, 14 nt, Artificial Sequence
  Description of Artificial Sequence: Synthetic oligonucleotide
ccuaaaauaauuuc

SEQ ID NO: 128163 - RNA, 13 nt, Artificial Sequence
  Description of Artificial Sequence: Synthetic oligonucleotide
uggaagauucagc

SEQ ID NO: 128164 - RNA, 12 nt, Artificial Sequence
  Description of Artificial Sequence: Synthetic oligonucleotide
uuaaacucuccu

SEQ ID NO: 128165 - RNA, 12 nt, Artificial Sequence
  Description of Artificial Sequence: Synthetic oligonucleotide
cagccuacaguu

SEQ ID NO: 128166 - RNA, 13 nt, Artificial Sequence
  Description of Artificial Sequence: Synthetic oligonucleotide
guuauguucaguc

SEQ ID NO: 128167 - RNA, 13 nt, Artificial Sequence
  Description of Artificial Sequence: Synthetic oligonucleotide
cacauacaaaaug

SEQ ID NO: 128168 - RNA, 9 nt, Artificial Sequence
  Description of Artificial Sequence: Synthetic oligonucleotide
uccuuuugc

SEQ ID NO: 128169 - RNA, 12 nt, Artificial Sequence
  Description of Artificial Sequence: Synthetic oligonucleotide
ugaccugugaag

SEQ ID NO: 128170 - RNA, 12 nt, Artificial Sequence
  Description of Artificial Sequence: Synthetic oligonucleotide
cuaucucacaca

SEQ ID NO: 128171 - RNA, 13 nt, Artificial Sequence
  Description of Artificial Sequence: Synthetic oligonucleotide
uguccucaauugu

SEQ ID NO: 128172 - RNA, 12 nt, Artificial Sequence
  Description of Artificial Sequence: Synthetic oligonucleotide
aaaccguagcug

SEQ ID NO: 128173 - RNA, 12 nt, Artificial Sequence
  Description of Artificial Sequence: Synthetic oligonucleotide
uagcuggcaagc

SEQ ID NO: 128174 - RNA, 14 nt, Artificial Sequence
  Description of Artificial Sequence: Synthetic oligonucleotide
uuguaugguuaaaa

SEQ ID NO: 128175 - RNA, 14 nt, Artificial Sequence
  Description of Artificial Sequence: Synthetic oligonucleotide
ugguuaaaagaugg

SEQ ID NO: 128176 - RNA, 13 nt, Artificial Sequence
  Description of Artificial Sequence: Synthetic oligonucleotide
cagggaauuauac

SEQ ID NO: 128177 - RNA, 12 nt, Artificial Sequence
  Description of Artificial Sequence: Synthetic oligonucleotide
acaaucuugcug

SEQ ID NO: 128178 - RNA, 13 nt, Artificial Sequence
  Description of Artificial Sequence: Synthetic oligonucleotide
ccaauaaugaaga

SEQ ID NO: 128179 - RNA, 13 nt, Artificial Sequence
  Description of Artificial Sequence: Synthetic oligonucleotide
acuuuggauguuc

SEQ ID NO: 128180 - RNA, 12 nt, Artificial Sequence
  Description of Artificial Sequence: Synthetic oligonucleotide
aaugcuuccacu

SEQ ID NO: 128181 - RNA, 11 nt, Artificial Sequence
  Description of Artificial Sequence: Synthetic oligonucleotide
gagaaaguuug

SEQ ID NO: 128182 - RNA, 11 nt, Artificial Sequence
  Description of Artificial Sequence: Synthetic oligonucleotide
aaagaacuacu

SEQ ID NO: 128183 - RNA, 12 nt, Artificial Sequence
  Description of Artificial Sequence: Synthetic oligonucleotide
uuagaaauacgg

SEQ ID NO: 128184 - RNA, 12 nt, Artificial Sequence
  Description of Artificial Sequence: Synthetic oligonucleotide
aacauggguaca

SEQ ID NO: 128185 - RNA, 14 nt, Artificial Sequence
  Description of Artificial Sequence: Synthetic oligonucleotide
aaagacacagaaga

SEQ ID NO: 128186 - RNA, 11 nt, Artificial Sequence
  Description of Artificial Sequence: Synthetic oligonucleotide
uaguagggagg

SEQ ID NO: 128187 - RNA, 12 nt, Artificial Sequence
  Description of Artificial Sequence: Synthetic oligonucleotide
gccuucugcagc

SEQ ID NO: 128188 - RNA, 10 nt, Artificial Sequence
  Description of Artificial Sequence: Synthetic oligonucleotide
ggucugguac

SEQ ID NO: 128189 - RNA, 12 nt, Artificial Sequence
  Description of Artificial Sequence: Synthetic oligonucleotide
cuaguccuuccg

SEQ ID NO: 128190 - RNA, 12 nt, Artificial Sequence
  Description of Artificial Sequence: Synthetic oligonucleotide
ccagugaauauu

SEQ ID NO: 128191 - RNA, 13 nt, Artificial Sequence
  Description of Artificial Sequence: Synthetic oligonucleotide
augaauucaaguu

SEQ ID NO: 128192 - RNA, 12 nt, Artificial Sequence
  Description of Artificial Sequence: Synthetic oligonucleotide
caggacacagau

SEQ ID NO: 128193 - RNA, 12 nt, Artificial Sequence
  Description of Artificial Sequence: Synthetic oligonucleotide
cucaaagcacag

SEQ ID NO: 128194 - RNA, 10 nt, Artificial Sequence
  Description of Artificial Sequence: Synthetic oligonucleotide
accacugcca

SEQ ID NO: 128195 - RNA, 13 nt, Artificial Sequence
  Description of Artificial Sequence: Synthetic oligonucleotide
gaaacuacuagug

SEQ ID NO: 128196 - RNA, 12 nt, Artificial Sequence
  Description of Artificial Sequence: Synthetic oligonucleotide
aagucggacagc

SEQ ID NO: 128197 - RNA, 13 nt, Artificial Sequence
  Description of Artificial Sequence: Synthetic oligonucleotide
gaaagcgaaaaau

SEQ ID NO: 128198 - RNA, 13 nt, Artificial Sequence
  Description of Artificial Sequence: Synthetic oligonucleotide
cccucugauuuag

SEQ ID NO: 128199 - RNA, 12 nt, Artificial Sequence
  Description of Artificial Sequence: Synthetic oligonucleotide
ugagcuauuuaa

SEQ ID NO: 128200 - RNA, 13 nt, Artificial Sequence
  Description of Artificial Sequence: Synthetic oligonucleotide
aaaaggugaaaaa

SEQ ID NO: 128201 - RNA, 14 nt, Artificial Sequence
  Description of Artificial Sequence: Synthetic oligonucleotide
gaaaaagcacuauu

SEQ ID NO: 128202 - RNA, 12 nt, Artificial Sequence
  Description of Artificial Sequence: Synthetic oligonucleotide
ggcugaaaagaa

SEQ ID NO: 128203 - RNA, 12 nt, Artificial Sequence
  Description of Artificial Sequence: Synthetic oligonucleotide
uaaacccuuaua

SEQ ID NO: 128204 - RNA, 13 nt, Artificial Sequence
  Description of Artificial Sequence: Synthetic oligonucleotide
cauacuauuagcc

SEQ ID NO: 128205 - RNA, 12 nt, Artificial Sequence
  Description of Artificial Sequence: Synthetic oligonucleotide
gacagaagcauu

SEQ ID NO: 128206 - RNA, 14 nt, Artificial Sequence
  Description of Artificial Sequence: Synthetic oligonucleotide
agagcaaauaagau

SEQ ID NO: 128207 - RNA, 14 nt, Artificial Sequence
  Description of Artificial Sequence: Synthetic oligonucleotide
ccaacauuuuucuc

SEQ ID NO: 128208 - RNA, 15 nt, Artificial Sequence
  Description of Artificial Sequence: Synthetic oligonucleotide
uuaaguaugagaaaa

SEQ ID NO: 128209 - RNA, 14 nt, Artificial Sequence
  Description of Artificial Sequence: Synthetic oligonucleotide
caggaauaaagaug

SEQ ID NO: 128210 - RNA, 13 nt, Artificial Sequence
  Description of Artificial Sequence: Synthetic oligonucleotide
aauuugaaugacc

SEQ ID NO: 128211 - RNA, 14 nt, Artificial Sequence
  Description of Artificial Sequence: Synthetic oligonucleotide
auguauaaagauag

SEQ ID NO: 128212 - RNA, 12 nt, Artificial Sequence
  Description of Artificial Sequence: Synthetic oligonucleotide
ggcuguaacuau

SEQ ID NO: 128213 - RNA, 11 nt, Artificial Sequence
  Description of Artificial Sequence: Synthetic oligonucleotide
ucugugaagug

SEQ ID NO: 128214 - RNA, 14 nt, Artificial Sequence
  Description of Artificial Sequence: Synthetic oligonucleotide
ccuuuaaggaaaug

SEQ ID NO: 128215 - RNA, 13 nt, Artificial Sequence
  Description of Artificial Sequence: Synthetic oligonucleotide
aaggauacaaaaa

SEQ ID NO: 128216 - RNA, 12 nt, Artificial Sequence
  Description of Artificial Sequence: Synthetic oligonucleotide
agaugcaauuug

SEQ ID NO: 128217 - RNA, 12 nt, Artificial Sequence
  Description of Artificial Sequence: Synthetic oligonucleotide
guucaaaacgaa

SEQ ID NO: 128218 - RNA, 11 nt, Artificial Sequence
  Description of Artificial Sequence: Synthetic oligonucleotide
gugaaaccuca

SEQ ID NO: 128219 - RNA, 13 nt, Artificial Sequence
  Description of Artificial Sequence: Synthetic oligonucleotide
acgaaagagaagc

SEQ ID NO: 128220 - RNA, 12 nt, Artificial Sequence
  Description of Artificial Sequence: Synthetic oligonucleotide
cuccacaagcgc

SEQ ID NO: 128221 - RNA, 14 nt, Artificial Sequence
  Description of Artificial Sequence: Synthetic oligonucleotide
gagaagauuccaaa

SEQ ID NO: 128222 - RNA, 13 nt, Artificial Sequence
  Description of Artificial Sequence: Synthetic oligonucleotide
aaucuggauucaa

SEQ ID NO: 128223 - RNA, 13 nt, Artificial Sequence
  Description of Artificial Sequence: Synthetic oligonucleotide
agaacagauuuga

SEQ ID NO: 128224 - RNA, 11 nt, Artificial Sequence
  Description of Artificial Sequence: Synthetic oligonucleotide
ccagagcugug

SEQ ID NO: 128225 - RNA, 12 nt, Artificial Sequence
  Description of Artificial Sequence: Synthetic oligonucleotide
ccucagauuguu

SEQ ID NO: 128226 - RNA, 12 nt, Artificial Sequence
  Description of Artificial Sequence: Synthetic oligonucleotide
cuauuuuaauua

SEQ ID NO: 128227 - RNA, 13 nt, Artificial Sequence
  Description of Artificial Sequence: Synthetic oligonucleotide
uuuaauuuauuaa

SEQ ID NO: 128228 - RNA, 12 nt, Artificial Sequence
  Description of Artificial Sequence: Synthetic oligonucleotide
augcaguuugaa

SEQ ID NO: 128229 - RNA, 11 nt, Artificial Sequence
  Description of Artificial Sequence: Synthetic oligonucleotide
caugcugcugg

SEQ ID NO: 128230 - RNA, 13 nt, Artificial Sequence
  Description of Artificial Sequence: Synthetic oligonucleotide
agaugugcauuuc

SEQ ID NO: 128231 - RNA, 12 nt, Artificial Sequence
  Description of Artificial Sequence: Synthetic oligonucleotide
ucaaaaccugug

SEQ ID NO: 128232 - RNA, 11 nt, Artificial Sequence
  Description of Artificial Sequence: Synthetic oligonucleotide
gaaugugggua

SEQ ID NO: 128233 - RNA, 10 nt, Artificial Sequence
  Description of Artificial Sequence: Synthetic oligonucleotide
auguggguag

SEQ ID NO: 128234 - RNA, 13 nt, Artificial Sequence
  Description of Artificial Sequence: Synthetic oligonucleotide
ugaaaaugagcau

SEQ ID NO: 128235 - RNA, 13 nt, Artificial Sequence
  Description of Artificial Sequence: Synthetic oligonucleotide
uugcuuuucaugu

SEQ ID NO: 128236 - RNA, 12 nt, Artificial Sequence
  Description of Artificial Sequence: Synthetic oligonucleotide
uguauuucuaua

SEQ ID NO: 128237 - RNA, 13 nt, Artificial Sequence
  Description of Artificial Sequence: Synthetic oligonucleotide
uuugauuaauguu

SEQ ID NO: 128238 - RNA, 12 nt, Artificial Sequence
  Description of Artificial Sequence: Synthetic oligonucleotide
caacguguauag

SEQ ID NO: 128239 - RNA, 12 nt, Artificial Sequence
  Description of Artificial Sequence: Synthetic oligonucleotide
cauauccuuggc

SEQ ID NO: 128240 - RNA, 13 nt, Artificial Sequence
  Description of Artificial Sequence: Synthetic oligonucleotide
uacuaacaucugg

SEQ ID NO: 128241 - RNA, 11 nt, Artificial Sequence
  Description of Artificial Sequence: Synthetic oligonucleotide
cauaaguugug

SEQ ID NO: 128242 - RNA, 12 nt, Artificial Sequence
  Description of Artificial Sequence: Synthetic oligonucleotide
gcaucauuuugg

SEQ ID NO: 128243 - RNA, 10 nt, Artificial Sequence
  Description of Artificial Sequence: Synthetic oligonucleotide
gcucuucuua

SEQ ID NO: 128244 - RNA, 10 nt, Artificial Sequence
  Description of Artificial Sequence: Synthetic oligonucleotide
agauuagguc

SEQ ID NO: 128245 - RNA, 12 nt, Artificial Sequence
  Description of Artificial Sequence: Synthetic oligonucleotide
auggaauugaaa

SEQ ID NO: 128246 - RNA, 13 nt, Artificial Sequence
  Description of Artificial Sequence: Synthetic oligonucleotide
cacacucauuccu

SEQ ID NO: 128247 - RNA, 12 nt, Artificial Sequence
  Description of Artificial Sequence: Synthetic oligonucleotide
uguagagguaac

SEQ ID NO: 128248 - RNA, 11 nt, Artificial Sequence
  Description of Artificial Sequence: Synthetic oligonucleotide
caaccacaugc

SEQ ID NO: 128249 - RNA, 12 nt, Artificial Sequence
  Description of Artificial Sequence: Synthetic oligonucleotide
ucggaaacaagu

SEQ ID NO: 128250 - RNA, 11 nt, Artificial Sequence
  Description of Artificial Sequence: Synthetic oligonucleotide
acucccaauaa

SEQ ID NO: 128251 - RNA, 13 nt, Artificial Sequence
  Description of Artificial Sequence: Synthetic oligonucleotide
aaugcuaagaaau

SEQ ID NO: 128252 - RNA, 11 nt, Artificial Sequence
  Description of Artificial Sequence: Synthetic oligonucleotide
gucuuucucua

SEQ ID NO: 128253 - RNA, 11 nt, Artificial Sequence
  Description of Artificial Sequence: Synthetic oligonucleotide
ugaauuucagg

SEQ ID NO: 128254 - RNA, 13 nt, Artificial Sequence
  Description of Artificial Sequence: Synthetic oligonucleotide
cgauucccucuca

SEQ ID NO: 128255 - RNA, 11 nt, Artificial Sequence
  Description of Artificial Sequence: Synthetic oligonucleotide
aggaaagugaa

SEQ ID NO: 128256 - RNA, 12 nt, Artificial Sequence
  Description of Artificial Sequence: Synthetic oligonucleotide
gaggcugcaugc

SEQ ID NO: 128257 - RNA, 11 nt, Artificial Sequence
  Description of Artificial Sequence: Synthetic oligonucleotide
ucucugaacag

SEQ ID NO: 128258 - RNA, 12 nt, Artificial Sequence
  Description of Artificial Sequence: Synthetic oligonucleotide
aacuuggcugua

SEQ ID NO: 128259 - RNA, 12 nt, Artificial Sequence
  Description of Artificial Sequence: Synthetic oligonucleotide
agaagccaaaau

SEQ ID NO: 128260 - RNA, 14 nt, Artificial Sequence
  Description of Artificial Sequence: Synthetic oligonucleotide
auuaaaagaagucc

SEQ ID NO: 128261 - RNA, 14 nt, Artificial Sequence
  Description of Artificial Sequence: Synthetic oligonucleotide
gaauccggauuauc

SEQ ID NO: 128262 - RNA, 12 nt, Artificial Sequence
  Description of Artificial Sequence: Synthetic oligonucleotide
aaugugacauca

SEQ ID NO: 128263 - RNA, 13 nt, Artificial Sequence
  Description of Artificial Sequence: Synthetic oligonucleotide
caucaaagcaagu

SEQ ID NO: 128264 - RNA, 11 nt, Artificial Sequence
  Description of Artificial Sequence: Synthetic oligonucleotide
agagagagaaa

SEQ ID NO: 128265 - RNA, 13 nt, Artificial Sequence
  Description of Artificial Sequence: Synthetic oligonucleotide
ucgcuguaguauu

SEQ ID NO: 128266 - RNA, 14 nt, Artificial Sequence
  Description of Artificial Sequence: Synthetic oligonucleotide
cgcuguaguauuua

SEQ ID NO: 128267 - RNA, 13 nt, Artificial Sequence
  Description of Artificial Sequence: Synthetic oligonucleotide
auuuaagcccaua

SEQ ID NO: 128268 - RNA, 15 nt, Artificial Sequence
  Description of Artificial Sequence: Synthetic oligonucleotide
auuaaaauaaacaug

SEQ ID NO: 128269 - RNA, 12 nt, Artificial Sequence
  Description of Artificial Sequence: Synthetic oligonucleotide
cuguucugaucg

SEQ ID NO: 128270 - RNA, 16 nt, Artificial Sequence
  Description of Artificial Sequence: Synthetic oligonucleotide
aaauaauuugaacuuu

SEQ ID NO: 128271 - RNA, 12 nt, Artificial Sequence
  Description of Artificial Sequence: Synthetic oligonucleotide
ugcgaccuuaau

SEQ ID NO: 128272 - RNA, 11 nt, Artificial Sequence
  Description of Artificial Sequence: Synthetic oligonucleotide
cugagaaagcu

SEQ ID NO: 128273 - RNA, 13 nt, Artificial Sequence
  Description of Artificial Sequence: Synthetic oligonucleotide
aguaaagaugcua

SEQ ID NO: 128274 - RNA, 12 nt, Artificial Sequence
  Description of Artificial Sequence: Synthetic oligonucleotide
cugcuuaauugc

SEQ ID NO: 128275 - RNA, 14 nt, Artificial Sequence
  Description of Artificial Sequence: Synthetic oligonucleotide
uaccauaugaauga

SEQ ID NO: 128276 - RNA, 12 nt, Artificial Sequence
  Description of Artificial Sequence: Synthetic oligonucleotide
aacuuucuuauc

SEQ ID NO: 128277 - RNA, 13 nt, Artificial Sequence
  Description of Artificial Sequence: Synthetic oligonucleotide
ccuugcaugacau

SEQ ID NO: 128278 - RNA, 14 nt, Artificial Sequence
  Description of Artificial Sequence: Synthetic oligonucleotide
ugaauuuguauaug

SEQ ID NO: 128279 - RNA, 12 nt, Artificial Sequence
  Description of Artificial Sequence: Synthetic oligonucleotide
gaauccuaguag

SEQ ID NO: 128280 - RNA, 10 nt, Artificial Sequence
  Description of Artificial Sequence: Synthetic oligonucleotide
gaaagggaag

SEQ ID NO: 128281 - RNA, 11 nt, Artificial Sequence
  Description of Artificial Sequence: Synthetic oligonucleotide
uaucggcaugc

SEQ ID NO: 128282 - RNA, 12 nt, Artificial Sequence
  Description of Artificial Sequence: Synthetic oligonucleotide
caccucauagua

SEQ ID NO: 128283 - RNA, 11 nt, Artificial Sequence
  Description of Artificial Sequence: Synthetic oligonucleotide
ccagaauugcc

SEQ ID NO: 128284 - RNA, 11 nt, Artificial Sequence
  Description of Artificial Sequence: Synthetic oligonucleotide
uggugaucugg

SEQ ID NO: 128285 - RNA, 12 nt, Artificial Sequence
  Description of Artificial Sequence: Synthetic oligonucleotide
gaucuggguaau

SEQ ID NO: 128286 - RNA, 12 nt, Artificial Sequence
  Description of Artificial Sequence: Synthetic oligonucleotide
ggaugugaugaa

SEQ ID NO: 128287 - RNA, 12 nt, Artificial Sequence
  Description of Artificial Sequence: Synthetic oligonucleotide
cauuuccacagc

SEQ ID NO: 128288 - RNA, 11 nt, Artificial Sequence
  Description of Artificial Sequence: Synthetic oligonucleotide
acagcuacacc

SEQ ID NO: 128289 - RNA, 12 nt, Artificial Sequence
  Description of Artificial Sequence: Synthetic oligonucleotide
ugcaguucuuac

SEQ ID NO: 128290 - RNA, 12 nt, Artificial Sequence
  Description of Artificial Sequence: Synthetic oligonucleotide
acgagaagaaga

SEQ ID NO: 128291 - RNA, 12 nt, Artificial Sequence
  Description of Artificial Sequence: Synthetic oligonucleotide
cgagaagaagau

SEQ ID NO: 128292 - RNA, 15 nt, Artificial Sequence
  Description of Artificial Sequence: Synthetic oligonucleotide
aagaagaucauuuac

SEQ ID NO: 128293 - RNA, 11 nt, Artificial Sequence
  Description of Artificial Sequence: Synthetic oligonucleotide
agaggaagagg

SEQ ID NO: 128294 - RNA, 12 nt, Artificial Sequence
  Description of Artificial Sequence: Synthetic oligonucleotide
gaggaagaggug

SEQ ID NO: 128295 - RNA, 13 nt, Artificial Sequence
  Description of Artificial Sequence: Synthetic oligonucleotide
cuacuuugagggc

SEQ ID NO: 128296 - RNA, 12 nt, Artificial Sequence
  Description of Artificial Sequence: Synthetic oligonucleotide
agggcaucuccu

SEQ ID NO: 128297 - RNA, 10 nt, Artificial Sequence
  Description of Artificial Sequence: Synthetic oligonucleotide
ggagugauau

SEQ ID NO: 128298 - RNA, 11 nt, Artificial Sequence
  Description of Artificial Sequence: Synthetic oligonucleotide
gagugauaugg

SEQ ID NO: 128299 - RNA, 12 nt, Artificial Sequence
  Description of Artificial Sequence: Synthetic oligonucleotide
ugcaguaaagau

SEQ ID NO: 128300 - RNA, 13 nt, Artificial Sequence
  Description of Artificial Sequence: Synthetic oligonucleotide
aguaaagauccua

SEQ ID NO: 128301 - RNA, 12 nt, Artificial Sequence
  Description of Artificial Sequence: Synthetic oligonucleotide
ugacaaaggaca

SEQ ID NO: 128302 - RNA, 13 nt, Artificial Sequence
  Description of Artificial Sequence: Synthetic oligonucleotide
gcaauugugaccc

SEQ ID NO: 128303 - RNA, 12 nt, Artificial Sequence
  Description of Artificial Sequence: Synthetic oligonucleotide
aacaucauccau

SEQ ID NO: 128304 - RNA, 12 nt, Artificial Sequence
  Description of Artificial Sequence: Synthetic oligonucleotide
ugaaauccaaca

SEQ ID NO: 128305 - RNA, 15 nt, Artificial Sequence
  Description of Artificial Sequence: Synthetic oligonucleotide
aacaauauauuucuc

SEQ ID NO: 128306 - RNA, 14 nt, Artificial Sequence
  Description of Artificial Sequence: Synthetic oligonucleotide
aacaguaaagucac

SEQ ID NO: 128307 - RNA, 14 nt, Artificial Sequence
  Description of Artificial Sequence: Synthetic oligonucleotide
ugugaagaaaguaa

SEQ ID NO: 128308 - RNA, 13 nt, Artificial Sequence
  Description of Artificial Sequence: Synthetic oligonucleotide
cuuccgagccauc

SEQ ID NO: 128309 - RNA, 12 nt, Artificial Sequence
  Description of Artificial Sequence: Synthetic oligonucleotide
aauggagguuga

SEQ ID NO: 128310 - RNA, 12 nt, Artificial Sequence
  Description of Artificial Sequence: Synthetic oligonucleotide
ggagguugaaua

SEQ ID NO: 128311 - RNA, 13 nt, Artificial Sequence
  Description of Artificial Sequence: Synthetic oligonucleotide
auuuugaguuuuc

SEQ ID NO: 128312 - RNA, 12 nt, Artificial Sequence
  Description of Artificial Sequence: Synthetic oligonucleotide
uauccuguuugu

SEQ ID NO: 128313 - RNA, 11 nt, Artificial Sequence
  Description of Artificial Sequence: Synthetic oligonucleotide
ccuguuuguuc

SEQ ID NO: 128314 - RNA, 10 nt, Artificial Sequence
  Description of Artificial Sequence: Synthetic oligonucleotide
cucuacagcc

SEQ ID NO: 128315 - RNA, 12 nt, Artificial Sequence
  Description of Artificial Sequence: Synthetic oligonucleotide
ucuuccauagcu

SEQ ID NO: 128316 - RNA, 12 nt, Artificial Sequence
  Description of Artificial Sequence: Synthetic oligonucleotide
auaaucuuccug

SEQ ID NO: 128317 - RNA, 12 nt, Artificial Sequence
  Description of Artificial Sequence: Synthetic oligonucleotide
uaaucuuccugu

SEQ ID NO: 128318 - RNA, 12 nt, Artificial Sequence
  Description of Artificial Sequence: Synthetic oligonucleotide
cuucaugacuug

SEQ ID NO: 128319 - RNA, 12 nt, Artificial Sequence
  Description of Artificial Sequence: Synthetic oligonucleotide
aagagggagaga

SEQ ID NO: 128320 - RNA, 12 nt, Artificial Sequence
  Description of Artificial Sequence: Synthetic oligonucleotide
cgucuccuacca

SEQ ID NO: 128321 - RNA, 12 nt, Artificial Sequence
  Description of Artificial Sequence: Synthetic oligonucleotide
gaucaaucggcc

SEQ ID NO: 128322 - RNA, 12 nt, Artificial Sequence
  Description of Artificial Sequence: Synthetic oligonucleotide
ggacgaacaucc

SEQ ID NO: 128323 - RNA, 11 nt, Artificial Sequence
  Description of Artificial Sequence: Synthetic oligonucleotide
agggucggaac

SEQ ID NO: 128324 - RNA, 10 nt, Artificial Sequence
  Description of Artificial Sequence: Synthetic oligonucleotide
ucggaaccca

SEQ ID NO: 128325 - RNA, 11 nt, Artificial Sequence
  Description of Artificial Sequence: Synthetic oligonucleotide
acccaagcuua

SEQ ID NO: 128326 - RNA, 14 nt, Artificial Sequence
  Description of Artificial Sequence: Synthetic oligonucleotide
gaacuuuaagcaac

SEQ ID NO: 128327 - RNA, 11 nt, Artificial Sequence
  Description of Artificial Sequence: Synthetic oligonucleotide
acuauucagug

SEQ ID NO: 128328 - RNA, 11 nt, Artificial Sequence
  Description of Artificial Sequence: Synthetic oligonucleotide
cuauucagugg

SEQ ID NO: 128329 - RNA, 13 nt, Artificial Sequence
  Description of Artificial Sequence: Synthetic oligonucleotide
aaacacagauaac

SEQ ID NO: 128330 - RNA, 12 nt, Artificial Sequence
  Description of Artificial Sequence: Synthetic oligonucleotide
cuuaagaaaaga

SEQ ID NO: 128331 - RNA, 12 nt, Artificial Sequence
  Description of Artificial Sequence: Synthetic oligonucleotide
cugaaggagugu

SEQ ID NO: 128332 - RNA, 10 nt, Artificial Sequence
  Description of Artificial Sequence: Synthetic oligonucleotide
ucaccgcggg

SEQ ID NO: 128333 - RNA, 14 nt, Artificial Sequence
  Description of Artificial Sequence: Synthetic oligonucleotide
agcagaaauaagcg

SEQ ID NO: 128334 - RNA, 12 nt, Artificial Sequence
  Description of Artificial Sequence: Synthetic oligonucleotide
aagcgugccguu

SEQ ID NO: 128335 - RNA, 12 nt, Artificial Sequence
  Description of Artificial Sequence: Synthetic oligonucleotide
agaaacagucac

SEQ ID NO: 128336 - RNA, 12 nt, Artificial Sequence
  Description of Artificial Sequence: Synthetic oligonucleotide
agaggaagaagg

SEQ ID NO: 128337 - RNA, 14 nt, Artificial Sequence
  Description of Artificial Sequence: Synthetic oligonucleotide
uguauucaaaauau

SEQ ID NO: 128338 - RNA, 13 nt, Artificial Sequence
  Description of Artificial Sequence: Synthetic oligonucleotide
auuuuccucccuu

SEQ ID NO: 128339 - RNA, 13 nt, Artificial Sequence
  Description of Artificial Sequence: Synthetic oligonucleotide
caaagaaagauag

SEQ ID NO: 128340 - RNA, 12 nt, Artificial Sequence
  Description of Artificial Sequence: Synthetic oligonucleotide
aagaaagauaga

SEQ ID NO: 128341 - RNA, 13 nt, Artificial Sequence
  Description of Artificial Sequence: Synthetic oligonucleotide
gaaagcauuuguu

SEQ ID NO: 128342 - RNA, 13 nt, Artificial Sequence
  Description of Artificial Sequence: Synthetic oligonucleotide
ugaguuaaacgaa

SEQ ID NO: 128343 - RNA, 12 nt, Artificial Sequence
  Description of Artificial Sequence: Synthetic oligonucleotide
acugauacagaa

SEQ ID NO: 128344 - RNA, 12 nt, Artificial Sequence
  Description of Artificial Sequence: Synthetic oligonucleotide
auauuauauaua

SEQ ID NO: 128345 - RNA, 12 nt, Artificial Sequence
  Description of Artificial Sequence: Synthetic oligonucleotide
auuauauauaua

SEQ ID NO: 128346 - RNA, 12 nt, Artificial Sequence
  Description of Artificial Sequence: Synthetic oligonucleotide
ucacuggaugua

SEQ ID NO: 128347 - RNA, 12 nt, Artificial Sequence
  Description of Artificial Sequence: Synthetic oligonucleotide
cagggaagagga

SEQ ID NO: 128348 - RNA, 15 nt, Artificial Sequence
  Description of Artificial Sequence: Synthetic oligonucleotide
augaucuuuuuuuug

SEQ ID NO: 128349 - RNA, 11 nt, Artificial Sequence
  Description of Artificial Sequence: Synthetic oligonucleotide
aguucacggcc

SEQ ID NO: 128350 - RNA, 13 nt, Artificial Sequence
  Description of Artificial Sequence: Synthetic oligonucleotide
caccaucacacca

SEQ ID NO: 128351 - RNA, 11 nt, Artificial Sequence
  Description of Artificial Sequence: Synthetic oligonucleotide
ccugcggguuu

SEQ ID NO: 128352 - RNA, 10 nt, Artificial Sequence
  Description of Artificial Sequence: Synthetic oligonucleotide
auccaguuug

SEQ ID NO: 128353 - RNA, 13 nt, Artificial Sequence
  Description of Artificial Sequence: Synthetic oligonucleotide
guuaaggacuucu

SEQ ID NO: 128354 - RNA, 13 nt, Artificial Sequence
  Description of Artificial Sequence: Synthetic oligonucleotide
cagugggacagag

SEQ ID NO: 128355 - RNA, 14 nt, Artificial Sequence
  Description of Artificial Sequence: Synthetic oligonucleotide
aauuuguuauugug

SEQ ID NO: 128356 - RNA, 13 nt, Artificial Sequence
  Description of Artificial Sequence: Synthetic oligonucleotide
uucaaaugcauuu

SEQ ID NO: 128357 - RNA, 10 nt, Artificial Sequence
  Description of Artificial Sequence: Synthetic oligonucleotide
caggaaagcc

SEQ ID NO: 128358 - RNA, 11 nt, Artificial Sequence
  Description of Artificial Sequence: Synthetic oligonucleotide
aggaaagcccu

SEQ ID NO: 128359 - RNA, 12 nt, Artificial Sequence
  Description of Artificial Sequence: Synthetic oligonucleotide
cccagcauggcc

SEQ ID NO: 128360 - RNA, 11 nt, Artificial Sequence
  Description of Artificial Sequence: Synthetic oligonucleotide
cuucucccuga

SEQ ID NO: 128361 - RNA, 12 nt, Artificial Sequence
  Description of Artificial Sequence: Synthetic oligonucleotide
gaagaagcccuu

SEQ ID NO: 128362 - RNA, 12 nt, Artificial Sequence
  Description of Artificial Sequence: Synthetic oligonucleotide
agaagcccuuca

SEQ ID NO: 128363 - RNA, 11 nt, Artificial Sequence
  Description of Artificial Sequence: Synthetic oligonucleotide
gcccuucagcg

SEQ ID NO: 128364 - RNA, 11 nt, Artificial Sequence
  Description of Artificial Sequence: Synthetic oligonucleotide
ccuucagcggc

SEQ ID NO: 128365 - RNA, 12 nt, Artificial Sequence
  Description of Artificial Sequence: Synthetic oligonucleotide
ucagcggccagu

SEQ ID NO: 128366 - RNA, 12 nt, Artificial Sequence
  Description of Artificial Sequence: Synthetic oligonucleotide
ugaaaagcuccg

SEQ ID NO: 128367 - RNA, 11 nt, Artificial Sequence
  Description of Artificial Sequence: Synthetic oligonucleotide
aaaagcuccgg

SEQ ID NO: 128368 - RNA, 13 nt, Artificial Sequence
  Description of Artificial Sequence: Synthetic oligonucleotide
agucaacagucug

SEQ ID NO: 128369 - RNA, 13 nt, Artificial Sequence
  Description of Artificial Sequence: Synthetic oligonucleotide
cagaguucaaaag

SEQ ID NO: 128370 - RNA, 13 nt, Artificial Sequence
  Description of Artificial Sequence: Synthetic oligonucleotide
agaguucaaaagc

SEQ ID NO: 128371 - RNA, 12 nt, Artificial Sequence
  Description of Artificial Sequence: Synthetic oligonucleotide
uucaaaagcccu

SEQ ID NO: 128372 - RNA, 12 nt, Artificial Sequence
  Description of Artificial Sequence: Synthetic oligonucleotide
ucaaaagcccuu

SEQ ID NO: 128373 - RNA, 12 nt, Artificial Sequence
  Description of Artificial Sequence: Synthetic oligonucleotide
aaaagcccuuca

SEQ ID NO: 128374 - RNA, 12 nt, Artificial Sequence
  Description of Artificial Sequence: Synthetic oligonucleotide
aaagcccuucag

SEQ ID NO: 128375 - RNA, 13 nt, Artificial Sequence
  Description of Artificial Sequence: Synthetic oligonucleotide
gugaagccgcucg

SEQ ID NO: 128376 - RNA, 12 nt, Artificial Sequence
  Description of Artificial Sequence: Synthetic oligonucleotide
cacgccagucaa

SEQ ID NO: 128377 - RNA, 13 nt, Artificial Sequence
  Description of Artificial Sequence: Synthetic oligonucleotide
uucuuggugcgug

SEQ ID NO: 128378 - RNA, 14 nt, Artificial Sequence
  Description of Artificial Sequence: Synthetic oligonucleotide
auuggauucaucag

SEQ ID NO: 128379 - RNA, 13 nt, Artificial Sequence
  Description of Artificial Sequence: Synthetic oligonucleotide
uggaauaccuaag

SEQ ID NO: 128380 - RNA, 12 nt, Artificial Sequence
  Description of Artificial Sequence: Synthetic oligonucleotide
auuugaggcuca

SEQ ID NO: 128381 - RNA, 11 nt, Artificial Sequence
  Description of Artificial Sequence: Synthetic oligonucleotide
ucuacaauugg

SEQ ID NO: 128382 - RNA, 12 nt, Artificial Sequence
  Description of Artificial Sequence: Synthetic oligonucleotide
uaguuaggagcc

SEQ ID NO: 128383 - RNA, 13 nt, Artificial Sequence
  Description of Artificial Sequence: Synthetic oligonucleotide
agucaauauccac

SEQ ID NO: 128384 - RNA, 13 nt, Artificial Sequence
  Description of Artificial Sequence: Synthetic oligonucleotide
auguucagucaca

SEQ ID NO: 128385 - RNA, 12 nt, Artificial Sequence
  Description of Artificial Sequence: Synthetic oligonucleotide
acacacacauac

SEQ ID NO: 128386 - RNA, 12 nt, Artificial Sequence
  Description of Artificial Sequence: Synthetic oligonucleotide
uuccuuuugcuu

SEQ ID NO: 128387 - RNA, 16 nt, Artificial Sequence
  Description of Artificial Sequence: Synthetic oligonucleotide
uuuuaaaguaauuuuu

SEQ ID NO: 128388 - RNA, 13 nt, Artificial Sequence
  Description of Artificial Sequence: Synthetic oligonucleotide
caacagucaaugg

SEQ ID NO: 128389 - RNA, 13 nt, Artificial Sequence
  Description of Artificial Sequence: Synthetic oligonucleotide
ucgacaaaccaau

SEQ ID NO: 128390 - RNA, 12 nt, Artificial Sequence
  Description of Artificial Sequence: Synthetic oligonucleotide
acugcuaccacu

SEQ ID NO: 128391 - RNA, 13 nt, Artificial Sequence
  Description of Artificial Sequence: Synthetic oligonucleotide
gcaagcggucuua

SEQ ID NO: 128392 - RNA, 13 nt, Artificial Sequence
  Description of Artificial Sequence: Synthetic oligonucleotide
ggucuuaccggcu

SEQ ID NO: 128393 - RNA, 11 nt, Artificial Sequence
  Description of Artificial Sequence: Synthetic oligonucleotide
gauggguuacc

SEQ ID NO: 128394 - RNA, 11 nt, Artificial Sequence
  Description of Artificial Sequence: Synthetic oligonucleotide
guuaccugcga

SEQ ID NO: 128395 - RNA, 12 nt, Artificial Sequence
  Description of Artificial Sequence: Synthetic oligonucleotide
aaucuugcugag

SEQ ID NO: 128396 - RNA, 13 nt, Artificial Sequence
  Description of Artificial Sequence: Synthetic oligonucleotide
agcauaaaacagu

SEQ ID NO: 128397 - RNA, 12 nt, Artificial Sequence
  Description of Artificial Sequence: Synthetic oligonucleotide
guccuuuauccu

SEQ ID NO: 128398 - RNA, 12 nt, Artificial Sequence
  Description of Artificial Sequence: Synthetic oligonucleotide
caacgcaaguug

SEQ ID NO: 128399 - RNA, 13 nt, Artificial Sequence
  Description of Artificial Sequence: Synthetic oligonucleotide
aaacugaaaccau

SEQ ID NO: 128400 - RNA, 14 nt, Artificial Sequence
  Description of Artificial Sequence: Synthetic oligonucleotide
acuuuguuaaauau

SEQ ID NO: 128401 - RNA, 14 nt, Artificial Sequence
  Description of Artificial Sequence: Synthetic oligonucleotide
guauauuaaaaguu

SEQ ID NO: 128402 - RNA, 13 nt, Artificial Sequence
  Description of Artificial Sequence: Synthetic oligonucleotide
guuuugacuuaac

SEQ ID NO: 128403 - RNA, 13 nt, Artificial Sequence
  Description of Artificial Sequence: Synthetic oligonucleotide
gcaaacucagcac

SEQ ID NO: 128404 - RNA, 11 nt, Artificial Sequence
  Description of Artificial Sequence: Synthetic oligonucleotide
ugcugaccuca

SEQ ID NO: 128405 - RNA, 14 nt, Artificial Sequence
  Description of Artificial Sequence: Synthetic oligonucleotide
uuuauucagaucgc

SEQ ID NO: 128406 - RNA, 13 nt, Artificial Sequence
  Description of Artificial Sequence: Synthetic oligonucleotide
aggguucugggau

SEQ ID NO: 128407 - RNA, 15 nt, Artificial Sequence
  Description of Artificial Sequence: Synthetic oligonucleotide
auauuggaaauuaug

SEQ ID NO: 128408 - RNA, 13 nt, Artificial Sequence
  Description of Artificial Sequence: Synthetic oligonucleotide
auggaagcacuag

SEQ ID NO: 128409 - RNA, 13 nt, Artificial Sequence
  Description of Artificial Sequence: Synthetic oligonucleotide
guuuuuaugugga

SEQ ID NO: 128410 - RNA, 12 nt, Artificial Sequence
  Description of Artificial Sequence: Synthetic oligonucleotide
ggaauugguaga

SEQ ID NO: 128411 - RNA, 13 nt, Artificial Sequence
  Description of Artificial Sequence: Synthetic oligonucleotide
uuagacuuggaga

SEQ ID NO: 128412 - RNA, 13 nt, Artificial Sequence
  Description of Artificial Sequence: Synthetic oligonucleotide
uuacaguauucca

SEQ ID NO: 128413 - RNA, 15 nt, Artificial Sequence
  Description of Artificial Sequence: Synthetic oligonucleotide
ccacugaugaauuaa

SEQ ID NO: 128414 - RNA, 12 nt, Artificial Sequence
  Description of Artificial Sequence: Synthetic oligonucleotide
ccacaucaucac

SEQ ID NO: 128415 - RNA, 13 nt, Artificial Sequence
  Description of Artificial Sequence: Synthetic oligonucleotide
cucaccaaacaga

SEQ ID NO: 128416 - RNA, 12 nt, Artificial Sequence
  Description of Artificial Sequence: Synthetic oligonucleotide
ggaacaugaugg

SEQ ID NO: 128417 - RNA, 12 nt, Artificial Sequence
  Description of Artificial Sequence: Synthetic oligonucleotide
cauguagacugc

SEQ ID NO: 128418 - RNA, 13 nt, Artificial Sequence
  Description of Artificial Sequence: Synthetic oligonucleotide
ggaucuauuuaug

SEQ ID NO: 128419 - RNA, 12 nt, Artificial Sequence
  Description of Artificial Sequence: Synthetic oligonucleotide
gcacuauuauca

SEQ ID NO: 128420 - RNA, 11 nt, Artificial Sequence
  Description of Artificial Sequence: Synthetic oligonucleotide
aucaguucugc

SEQ ID NO: 128421 - RNA, 13 nt, Artificial Sequence
  Description of Artificial Sequence: Synthetic oligonucleotide
agauuaaaccuac

SEQ ID NO: 128422 - RNA, 13 nt, Artificial Sequence
  Description of Artificial Sequence: Synthetic oligonucleotide
auaaaauccuucu

SEQ ID NO: 128423 - RNA, 12 nt, Artificial Sequence
  Description of Artificial Sequence: Synthetic oligonucleotide
aaugcuguagac

SEQ ID NO: 128424 - RNA, 13 nt, Artificial Sequence
  Description of Artificial Sequence: Synthetic oligonucleotide
uugauaggaauag

SEQ ID NO: 128425 - RNA, 11 nt, Artificial Sequence
  Description of Artificial Sequence: Synthetic oligonucleotide
aauggcccuga

SEQ ID NO: 128426 - RNA, 11 nt, Artificial Sequence
  Description of Artificial Sequence: Synthetic oligonucleotide
uuccucaagca

SEQ ID NO: 128427 - RNA, 10 nt, Artificial Sequence
  Description of Artificial Sequence: Synthetic oligonucleotide
guucagccca

SEQ ID NO: 128428 - RNA, 11 nt, Artificial Sequence
  Description of Artificial Sequence: Synthetic oligonucleotide
gcugcugaacc

SEQ ID NO: 128429 - RNA, 12 nt, Artificial Sequence
  Description of Artificial Sequence: Synthetic oligonucleotide
aaguucucuuca

SEQ ID NO: 128430 - RNA, 11 nt, Artificial Sequence
  Description of Artificial Sequence: Synthetic oligonucleotide
ccagccuagag

SEQ ID NO: 128431 - RNA, 13 nt, Artificial Sequence
  Description of Artificial Sequence: Synthetic oligonucleotide
cucugugaagugu

SEQ ID NO: 128432 - RNA, 14 nt, Artificial Sequence
  Description of Artificial Sequence: Synthetic oligonucleotide
ugagaaaauuucaa

SEQ ID NO: 128433 - RNA, 11 nt, Artificial Sequence
  Description of Artificial Sequence: Synthetic oligonucleotide
aauccuccuga

SEQ ID NO: 128434 - RNA, 12 nt, Artificial Sequence
  Description of Artificial Sequence: Synthetic oligonucleotide
gugacaucauau

SEQ ID NO: 128435 - RNA, 13 nt, Artificial Sequence
  Description of Artificial Sequence: Synthetic oligonucleotide
aaucuucaucaua

SEQ ID NO: 128436 - RNA, 13 nt, Artificial Sequence
  Description of Artificial Sequence: Synthetic oligonucleotide
gacuagcuauuaa

SEQ ID NO: 128437 - RNA, 14 nt, Artificial Sequence
  Description of Artificial Sequence: Synthetic oligonucleotide
ucucuacuaaaaau

SEQ ID NO: 128438 - RNA, 12 nt, Artificial Sequence
  Description of Artificial Sequence: Synthetic oligonucleotide
ucuaucucgccu

SEQ ID NO: 128439 - RNA, 13 nt, Artificial Sequence
  Description of Artificial Sequence: Synthetic oligonucleotide
cuucgguccaguu

SEQ ID NO: 128440 - RNA, 11 nt, Artificial Sequence
  Description of Artificial Sequence: Synthetic oligonucleotide
gauguagccgc

SEQ ID NO: 128441 - RNA, 12 nt, Artificial Sequence
  Description of Artificial Sequence: Synthetic oligonucleotide
ugaggagacuug

SEQ ID NO: 128442 - RNA, 12 nt, Artificial Sequence
  Description of Artificial Sequence: Synthetic oligonucleotide
gaguagugagga

SEQ ID NO: 128443 - RNA, 14 nt, Artificial Sequence
  Description of Artificial Sequence: Synthetic oligonucleotide
cagaugaguacaaa

SEQ ID NO: 128444 - RNA, 13 nt, Artificial Sequence
  Description of Artificial Sequence: Synthetic oligonucleotide
guuguuaaugggc

SEQ ID NO: 128445 - RNA, 13 nt, Artificial Sequence
  Description of Artificial Sequence: Synthetic oligonucleotide
uuuuuaauuuauu

SEQ ID NO: 128446 - RNA, 12 nt, Artificial Sequence
  Description of Artificial Sequence: Synthetic oligonucleotide
uauuuaaauaug

SEQ ID NO: 128447 - RNA, 13 nt, Artificial Sequence
  Description of Artificial Sequence: Synthetic oligonucleotide
uauccuuuguuuc

SEQ ID NO: 128448 - RNA, 14 nt, Artificial Sequence
  Description of Artificial Sequence: Synthetic oligonucleotide
cgucuaaguguuug

SEQ ID NO: 128449 - RNA, 12 nt, Artificial Sequence
  Description of Artificial Sequence: Synthetic oligonucleotide
accugugacaaa

SEQ ID NO: 128450 - RNA, 13 nt, Artificial Sequence
  Description of Artificial Sequence: Synthetic oligonucleotide
ccaggcugaauua

SEQ ID NO: 128451 - RNA, 14 nt, Artificial Sequence
  Description of Artificial Sequence: Synthetic oligonucleotide
gucauucuuacaau

SEQ ID NO: 128452 - RNA, 15 nt, Artificial Sequence
  Description of Artificial Sequence: Synthetic oligonucleotide
ucauucuuacaauug

SEQ ID NO: 128453 - RNA, 12 nt, Artificial Sequence
  Description of Artificial Sequence: Synthetic oligonucleotide
cagagaguguac

SEQ ID NO: 128454 - RNA, 12 nt, Artificial Sequence
  Description of Artificial Sequence: Synthetic oligonucleotide
agaacucagcag

SEQ ID NO: 128455 - RNA, 13 nt, Artificial Sequence
  Description of Artificial Sequence: Synthetic oligonucleotide
uuuauuuucagua

SEQ ID NO: 128456 - RNA, 12 nt, Artificial Sequence
  Description of Artificial Sequence: Synthetic oligonucleotide
ucuuaaauggaa

SEQ ID NO: 128457 - RNA, 13 nt, Artificial Sequence
  Description of Artificial Sequence: Synthetic oligonucleotide
ugccuaaaauugu

SEQ ID NO: 128458 - RNA, 12 nt, Artificial Sequence
  Description of Artificial Sequence: Synthetic oligonucleotide
agacugugagcu

SEQ ID NO: 128459 - RNA, 14 nt, Artificial Sequence
  Description of Artificial Sequence: Synthetic oligonucleotide
ugcuuuuuauuaau

SEQ ID NO: 128460 - RNA, 13 nt, Artificial Sequence
  Description of Artificial Sequence: Synthetic oligonucleotide
cucuucuuacauu

SEQ ID NO: 128461 - RNA, 15 nt, Artificial Sequence
  Description of Artificial Sequence: Synthetic oligonucleotide
cauuuguaaaaaugu

SEQ ID NO: 128462 - RNA, 15 nt, Artificial Sequence
  Description of Artificial Sequence: Synthetic oligonucleotide
aucuuaauucauauu

SEQ ID NO: 128463 - RNA, 13 nt, Artificial Sequence
  Description of Artificial Sequence: Synthetic oligonucleotide
gaacuaaucauga

SEQ ID NO: 128464 - RNA, 12 nt, Artificial Sequence
  Description of Artificial Sequence: Synthetic oligonucleotide
ucugcucuuggg

SEQ ID NO: 128465 - RNA, 13 nt, Artificial Sequence
  Description of Artificial Sequence: Synthetic oligonucleotide
caguagcuuugag

SEQ ID NO: 128466 - RNA, 14 nt, Artificial Sequence
  Description of Artificial Sequence: Synthetic oligonucleotide
cacguaauauuuca

SEQ ID NO: 128467 - RNA, 13 nt, Artificial Sequence
  Description of Artificial Sequence: Synthetic oligonucleotide
uauucucuucacu

SEQ ID NO: 128468 - RNA, 14 nt, Artificial Sequence
  Description of Artificial Sequence: Synthetic oligonucleotide
cuaaugcuaagaaa

SEQ ID NO: 128469 - RNA, 12 nt, Artificial Sequence
  Description of Artificial Sequence: Synthetic oligonucleotide
gcugaaaaucaa

SEQ ID NO: 128470 - RNA, 14 nt, Artificial Sequence
  Description of Artificial Sequence: Synthetic oligonucleotide
aauaugauuacuuu

SEQ ID NO: 128471 - RNA, 14 nt, Artificial Sequence
  Description of Artificial Sequence: Synthetic oligonucleotide
cauuuuguucuaca

SEQ ID NO: 128472 - RNA, 12 nt, Artificial Sequence
  Description of Artificial Sequence: Synthetic oligonucleotide
cccgggacucuc

SEQ ID NO: 128473 - RNA, 14 nt, Artificial Sequence
  Description of Artificial Sequence: Synthetic oligonucleotide
ccuuuaaaguaaag

SEQ ID NO: 128474 - RNA, 13 nt, Artificial Sequence
  Description of Artificial Sequence: Synthetic oligonucleotide
ucuggaagccugg

SEQ ID NO: 128475 - RNA, 14 nt, Artificial Sequence
  Description of Artificial Sequence: Synthetic oligonucleotide
aaaacaaaagagag

SEQ ID NO: 128476 - RNA, 13 nt, Artificial Sequence
  Description of Artificial Sequence: Synthetic oligonucleotide
aucaguuaugccg

SEQ ID NO: 128477 - RNA, 13 nt, Artificial Sequence
  Description of Artificial Sequence: Synthetic oligonucleotide
uaaaagaagucca

SEQ ID NO: 128478 - RNA, 11 nt, Artificial Sequence
  Description of Artificial Sequence: Synthetic oligonucleotide
aggugagguua

SEQ ID NO: 128479 - RNA, 11 nt, Artificial Sequence
  Description of Artificial Sequence: Synthetic oligonucleotide
gggaagaggac

SEQ ID NO: 128480 - RNA, 13 nt, Artificial Sequence
  Description of Artificial Sequence: Synthetic oligonucleotide
aagcaaguauugu

SEQ ID NO: 128481 - RNA, 12 nt, Artificial Sequence
  Description of Artificial Sequence: Synthetic oligonucleotide
auuguagcacuc

SEQ ID NO: 128482 - RNA, 14 nt, Artificial Sequence
  Description of Artificial Sequence: Synthetic oligonucleotide
acaaaaccacaaau

SEQ ID NO: 128483 - RNA, 12 nt, Artificial Sequence
  Description of Artificial Sequence: Synthetic oligonucleotide
uaagcccauaca

SEQ ID NO: 128484 - RNA, 11 nt, Artificial Sequence
  Description of Artificial Sequence: Synthetic oligonucleotide
agcccauacag

SEQ ID NO: 128485 - RNA, 12 nt, Artificial Sequence
  Description of Artificial Sequence: Synthetic oligonucleotide
cagaaaccuucc

SEQ ID NO: 128486 - RNA, 10 nt, Artificial Sequence
  Description of Artificial Sequence: Synthetic oligonucleotide
guauaccuac

SEQ ID NO: 128487 - RNA, 13 nt, Artificial Sequence
  Description of Artificial Sequence: Synthetic oligonucleotide
gccaguuuucgga

SEQ ID NO: 128488 - RNA, 9 nt, Artificial Sequence
  Description of Artificial Sequence: Synthetic oligonucleotide
ggaacaggg

SEQ ID NO: 128489 - RNA, 13 nt, Artificial Sequence
  Description of Artificial Sequence: Synthetic oligonucleotide
uuaacuuuccagu

SEQ ID NO: 128490 - RNA, 14 nt, Artificial Sequence
  Description of Artificial Sequence: Synthetic oligonucleotide
aaaguuugguuuug

SEQ ID NO: 128491 - RNA, 12 nt, Artificial Sequence
  Description of Artificial Sequence: Synthetic oligonucleotide
cuucccacugua

SEQ ID NO: 128492 - RNA, 13 nt, Artificial Sequence
  Description of Artificial Sequence: Synthetic oligonucleotide
ugauaccauauga

SEQ ID NO: 128493 - RNA, 11 nt, Artificial Sequence
  Description of Artificial Sequence: Synthetic oligonucleotide
aacaugggcug

SEQ ID NO: 128494 - RNA, 13 nt, Artificial Sequence
  Description of Artificial Sequence: Synthetic oligonucleotide
caacuuuuucaua

SEQ ID NO: 128495 - RNA, 12 nt, Artificial Sequence
  Description of Artificial Sequence: Synthetic oligonucleotide
caugaggccgga

SEQ ID NO: 128496 - RNA, 11 nt, Artificial Sequence
  Description of Artificial Sequence: Synthetic oligonucleotide
acugcauuugu

SEQ ID NO: 128497 - RNA, 13 nt, Artificial Sequence
  Description of Artificial Sequence: Synthetic oligonucleotide
aauguuuacuacc

SEQ ID NO: 128498 - RNA, 15 nt, Artificial Sequence
  Description of Artificial Sequence: Synthetic oligonucleotide
aauuuuuugaugaaa

SEQ ID NO: 128499 - RNA, 14 nt, Artificial Sequence
  Description of Artificial Sequence: Synthetic oligonucleotide
cagugugugaauuu

SEQ ID NO: 128500 - RNA, 13 nt, Artificial Sequence
  Description of Artificial Sequence: Synthetic oligonucleotide
gagcaauguaugu

SEQ ID NO: 128501 - RNA, 14 nt, Artificial Sequence
  Description of Artificial Sequence: Synthetic oligonucleotide
aaagcacauauaua

SEQ ID NO: 128502 - RNA, 14 nt, Artificial Sequence
  Description of Artificial Sequence: Synthetic oligonucleotide
guaauaguuucucc

SEQ ID NO: 128503 - RNA, 13 nt, Artificial Sequence
  Description of Artificial Sequence: Synthetic oligonucleotide
aguuucuccaaau

SEQ ID NO: 128504 - RNA, 13 nt, Artificial Sequence
  Description of Artificial Sequence: Synthetic oligonucleotide
uacuuccuagaaa

SEQ ID NO: 128505 - RNA, 13 nt, Artificial Sequence
  Description of Artificial Sequence: Synthetic oligonucleotide
uacaccauauaug

SEQ ID NO: 128506 - RNA, 14 nt, Artificial Sequence
  Description of Artificial Sequence: Synthetic oligonucleotide
auauaugaauggag

SEQ ID NO: 128507 - RNA, 13 nt, Artificial Sequence
  Description of Artificial Sequence: Synthetic oligonucleotide
acgagaagaagau

SEQ ID NO: 128508 - RNA, 13 nt, Artificial Sequence
  Description of Artificial Sequence: Synthetic oligonucleotide
ucauuuacaggga

SEQ ID NO: 128509 - RNA, 13 nt, Artificial Sequence
  Description of Artificial Sequence: Synthetic oligonucleotide
cauuuacagggac

SEQ ID NO: 128510 - RNA, 10 nt, Artificial Sequence
  Description of Artificial Sequence: Synthetic oligonucleotide
agggaccuga

SEQ ID NO: 128511 - RNA, 14 nt, Artificial Sequence
  Description of Artificial Sequence: Synthetic oligonucleotide
uguuugacugcauc

SEQ ID NO: 128512 - RNA, 13 nt, Artificial Sequence
  Description of Artificial Sequence: Synthetic oligonucleotide
uuugacugcaucg

SEQ ID NO: 128513 - RNA, 12 nt, Artificial Sequence
  Description of Artificial Sequence: Synthetic oligonucleotide
gaguucacaggg

SEQ ID NO: 128514 - RNA, 13 nt, Artificial Sequence
  Description of Artificial Sequence: Synthetic oligonucleotide
ggcaccucugucc

SEQ ID NO: 128515 - RNA, 15 nt, Artificial Sequence
  Description of Artificial Sequence: Synthetic oligonucleotide
gguuugucuuuuuaa

SEQ ID NO: 128516 - RNA, 14 nt, Artificial Sequence
  Description of Artificial Sequence: Synthetic oligonucleotide
uuugucuuuuuaag

SEQ ID NO: 128517 - RNA, 13 nt, Artificial Sequence
  Description of Artificial Sequence: Synthetic oligonucleotide
ccuaaagguuguc

SEQ ID NO: 128518 - RNA, 12 nt, Artificial Sequence
  Description of Artificial Sequence: Synthetic oligonucleotide
aagguugucgac

SEQ ID NO: 128519 - RNA, 13 nt, Artificial Sequence
  Description of Artificial Sequence: Synthetic oligonucleotide
accuggcaauugu

SEQ ID NO: 128520 - RNA, 12 nt, Artificial Sequence
  Description of Artificial Sequence: Synthetic oligonucleotide
aguggugcgagg

SEQ ID NO: 128521 - RNA, 13 nt, Artificial Sequence
  Description of Artificial Sequence: Synthetic oligonucleotide
agagacaugaaau

SEQ ID NO: 128522 - RNA, 13 nt, Artificial Sequence
  Description of Artificial Sequence: Synthetic oligonucleotide
auauauuucucca

SEQ ID NO: 128523 - RNA, 10 nt, Artificial Sequence
  Description of Artificial Sequence: Synthetic oligonucleotide
caugaaggcu

SEQ ID NO: 128524 - RNA, 11 nt, Artificial Sequence
  Description of Artificial Sequence: Synthetic oligonucleotide
gcuggaguggu

SEQ ID NO: 128525 - RNA, 11 nt, Artificial Sequence
  Description of Artificial Sequence: Synthetic oligonucleotide
aggaagagagg

SEQ ID NO: 128526 - RNA, 12 nt, Artificial Sequence
  Description of Artificial Sequence: Synthetic oligonucleotide
cuugcaucgggc

SEQ ID NO: 128527 - RNA, 13 nt, Artificial Sequence
  Description of Artificial Sequence: Synthetic oligonucleotide
auauccuacugug

SEQ ID NO: 128528 - RNA, 13 nt, Artificial Sequence
  Description of Artificial Sequence: Synthetic oligonucleotide
uccuacuguguaa

SEQ ID NO: 128529 - RNA, 12 nt, Artificial Sequence
  Description of Artificial Sequence: Synthetic oligonucleotide
ccuuguagugua

SEQ ID NO: 128530 - RNA, 13 nt, Artificial Sequence
  Description of Artificial Sequence: Synthetic oligonucleotide
ucuuuguugauug

SEQ ID NO: 128531 - RNA, 14 nt, Artificial Sequence
  Description of Artificial Sequence: Synthetic oligonucleotide
uuuguugauugaaa

SEQ ID NO: 128532 - RNA, 15 nt, Artificial Sequence
  Description of Artificial Sequence: Synthetic oligonucleotide
uucuuuuucuuccau

SEQ ID NO: 128533 - RNA, 13 nt, Artificial Sequence
  Description of Artificial Sequence: Synthetic oligonucleotide
aaucuuccuucua

SEQ ID NO: 128534 - RNA, 13 nt, Artificial Sequence
  Description of Artificial Sequence: Synthetic oligonucleotide
uugaaugcuucau

SEQ ID NO: 128535 - RNA, 13 nt, Artificial Sequence
  Description of Artificial Sequence: Synthetic oligonucleotide
ugaaugcuucaug

SEQ ID NO: 128536 - RNA, 13 nt, Artificial Sequence
  Description of Artificial Sequence: Synthetic oligonucleotide
aauucuacuuuga

SEQ ID NO: 128537 - RNA, 13 nt, Artificial Sequence
  Description of Artificial Sequence: Synthetic oligonucleotide
agcaacuacagac

SEQ ID NO: 128538 - RNA, 13 nt, Artificial Sequence
  Description of Artificial Sequence: Synthetic oligonucleotide
gaccaaggucaac

SEQ ID NO: 128539 - RNA, 13 nt, Artificial Sequence
  Description of Artificial Sequence: Synthetic oligonucleotide
cgacuaucucgac

SEQ ID NO: 128540 - RNA, 13 nt, Artificial Sequence
  Description of Artificial Sequence: Synthetic oligonucleotide
aaccuucccaaac

SEQ ID NO: 128541 - RNA, 14 nt, Artificial Sequence
  Description of Artificial Sequence: Synthetic oligonucleotide
ccaagcuuagaacu

SEQ ID NO: 128542 - RNA, 15 nt, Artificial Sequence
  Description of Artificial Sequence: Synthetic oligonucleotide
agcuuagaacuuuaa

SEQ ID NO: 128543 - RNA, 11 nt, Artificial Sequence
  Description of Artificial Sequence: Synthetic oligonucleotide
aagaccaccac

SEQ ID NO: 128544 - RNA, 14 nt, Artificial Sequence
  Description of Artificial Sequence: Synthetic oligonucleotide
gcgagaaauaaagu

SEQ ID NO: 128545 - RNA, 14 nt, Artificial Sequence
  Description of Artificial Sequence: Synthetic oligonucleotide
cgagaaauaaaguu

SEQ ID NO: 128546 - RNA, 12 nt, Artificial Sequence
  Description of Artificial Sequence: Synthetic oligonucleotide
aggaaaugaucc

SEQ ID NO: 128547 - RNA, 13 nt, Artificial Sequence
  Description of Artificial Sequence: Synthetic oligonucleotide
gaagaaaugaaac

SEQ ID NO: 128548 - RNA, 13 nt, Artificial Sequence
  Description of Artificial Sequence: Synthetic oligonucleotide
guuuccauccucc

SEQ ID NO: 128549 - RNA, 15 nt, Artificial Sequence
  Description of Artificial Sequence: Synthetic oligonucleotide
acugaaaaucuuuga

SEQ ID NO: 128550 - RNA, 11 nt, Artificial Sequence
  Description of Artificial Sequence: Synthetic oligonucleotide
ugccguucagg

SEQ ID NO: 128551 - RNA, 13 nt, Artificial Sequence
  Description of Artificial Sequence: Synthetic oligonucleotide
caggguccagaag

SEQ ID NO: 128552 - RNA, 13 nt, Artificial Sequence
  Description of Artificial Sequence: Synthetic oligonucleotide
ucaagacugcuug

SEQ ID NO: 128553 - RNA, 13 nt, Artificial Sequence
  Description of Artificial Sequence: Synthetic oligonucleotide
uccaugucuuugg

SEQ ID NO: 128554 - RNA, 11 nt, Artificial Sequence
  Description of Artificial Sequence: Synthetic oligonucleotide
gccugaaacac

SEQ ID NO: 128555 - RNA, 12 nt, Artificial Sequence
  Description of Artificial Sequence: Synthetic oligonucleotide
ucucuguaccuc

SEQ ID NO: 128556 - RNA, 12 nt, Artificial Sequence
  Description of Artificial Sequence: Synthetic oligonucleotide
agcaagacaaga

SEQ ID NO: 128557 - RNA, 13 nt, Artificial Sequence
  Description of Artificial Sequence: Synthetic oligonucleotide
gcaagacaagaaa

SEQ ID NO: 128558 - RNA, 12 nt, Artificial Sequence
  Description of Artificial Sequence: Synthetic oligonucleotide
uguacaagaucc

SEQ ID NO: 128559 - RNA, 12 nt, Artificial Sequence
  Description of Artificial Sequence: Synthetic oligonucleotide
cguacuugcaga

SEQ ID NO: 128560 - RNA, 13 nt, Artificial Sequence
  Description of Artificial Sequence: Synthetic oligonucleotide
cgaucgauacaga

SEQ ID NO: 128561 - RNA, 13 nt, Artificial Sequence
  Description of Artificial Sequence: Synthetic oligonucleotide
uauaaaaauaaau

SEQ ID NO: 128562 - RNA, 13 nt, Artificial Sequence
  Description of Artificial Sequence: Synthetic oligonucleotide
uaaaaauaaauau

SEQ ID NO: 128563 - RNA, 13 nt, Artificial Sequence
  Description of Artificial Sequence: Synthetic oligonucleotide
uuugacugcugug

SEQ ID NO: 128564 - RNA, 13 nt, Artificial Sequence
  Description of Artificial Sequence: Synthetic oligonucleotide
ggagaugagagac

SEQ ID NO: 128565 - RNA, 10 nt, Artificial Sequence
  Description of Artificial Sequence: Synthetic oligonucleotide
ucccacuugg

SEQ ID NO: 128566 - RNA, 10 nt, Artificial Sequence
  Description of Artificial Sequence: Synthetic oligonucleotide
guucacggcc

SEQ ID NO: 128567 - RNA, 12 nt, Artificial Sequence
  Description of Artificial Sequence: Synthetic oligonucleotide
accaucacacca

SEQ ID NO: 128568 - RNA, 10 nt, Artificial Sequence
  Description of Artificial Sequence: Synthetic oligonucleotide
cugcggguuu

SEQ ID NO: 128569 - RNA, 9 nt, Artificial Sequence
  Description of Artificial Sequence: Synthetic oligonucleotide
uccaguuug

SEQ ID NO: 128570 - RNA, 12 nt, Artificial Sequence
  Description of Artificial Sequence: Synthetic oligonucleotide
uuaaggacuucu

SEQ ID NO: 128571 - RNA, 12 nt, Artificial Sequence
  Description of Artificial Sequence: Synthetic oligonucleotide
agugggacagag

SEQ ID NO: 128572 - RNA, 13 nt, Artificial Sequence
  Description of Artificial Sequence: Synthetic oligonucleotide
auuuguuauugug

SEQ ID NO: 128573 - RNA, 12 nt, Artificial Sequence
  Description of Artificial Sequence: Synthetic oligonucleotide
ucaaaugcauuu

SEQ ID NO: 128574 - RNA, 9 nt, Artificial Sequence
  Description of Artificial Sequence: Synthetic oligonucleotide
aggaaagcc

SEQ ID NO: 128575 - RNA, 10 nt, Artificial Sequence
  Description of Artificial Sequence: Synthetic oligonucleotide
ggaaagcccu

SEQ ID NO: 128576 - RNA, 11 nt, Artificial Sequence
  Description of Artificial Sequence: Synthetic oligonucleotide
ccagcauggcc

SEQ ID NO: 128577 - RNA, 10 nt, Artificial Sequence
  Description of Artificial Sequence: Synthetic oligonucleotide
uucucccuga

SEQ ID NO: 128578 - RNA, 11 nt, Artificial Sequence
  Description of Artificial Sequence: Synthetic oligonucleotide
aagaagcccuu

SEQ ID NO: 128579 - RNA, 11 nt, Artificial Sequence
  Description of Artificial Sequence: Synthetic oligonucleotide
gaagcccuuca

SEQ ID NO: 128580 - RNA, 10 nt, Artificial Sequence
  Description of Artificial Sequence: Synthetic oligonucleotide
cccuucagcg

SEQ ID NO: 128581 - RNA, 10 nt, Artificial Sequence
  Description of Artificial Sequence: Synthetic oligonucleotide
cuucagcggc

SEQ ID NO: 128582 - RNA, 11 nt, Artificial Sequence
  Description of Artificial Sequence: Synthetic oligonucleotide
cagcggccagu

SEQ ID NO: 128583 - RNA, 11 nt, Artificial Sequence
  Description of Artificial Sequence: Synthetic oligonucleotide
gaaaagcuccg

SEQ ID NO: 128584 - RNA, 10 nt, Artificial Sequence
  Description of Artificial Sequence: Synthetic oligonucleotide
aaagcuccgg

SEQ ID NO: 128585 - RNA, 12 nt, Artificial Sequence
  Description of Artificial Sequence: Synthetic oligonucleotide
gucaacagucug

SEQ ID NO: 128586 - RNA, 12 nt, Artificial Sequence
  Description of Artificial Sequence: Synthetic oligonucleotide
agaguucaaaag

SEQ ID NO: 128587 - RNA, 12 nt, Artificial Sequence
  Description of Artificial Sequence: Synthetic oligonucleotide
gaguucaaaagc

SEQ ID NO: 128588 - RNA, 11 nt, Artificial Sequence
  Description of Artificial Sequence: Synthetic oligonucleotide
ucaaaagcccu

SEQ ID NO: 128589 - RNA, 11 nt, Artificial Sequence
  Description of Artificial Sequence: Synthetic oligonucleotide
caaaagcccuu

SEQ ID NO: 128590 - RNA, 11 nt, Artificial Sequence
  Description of Artificial Sequence: Synthetic oligonucleotide
aaagcccuuca

SEQ ID NO: 128591 - RNA, 11 nt, Artificial Sequence
  Description of Artificial Sequence: Synthetic oligonucleotide
aagcccuucag

SEQ ID NO: 128592 - RNA, 12 nt, Artificial Sequence
  Description of Artificial Sequence: Synthetic oligonucleotide
ugaagccgcucg

SEQ ID NO: 128593 - RNA, 11 nt, Artificial Sequence
  Description of Artificial Sequence: Synthetic oligonucleotide
acgccagucaa

SEQ ID NO: 128594 - RNA, 12 nt, Artificial Sequence
  Description of Artificial Sequence: Synthetic oligonucleotide
ucuuggugcgug

SEQ ID NO: 128595 - RNA, 13 nt, Artificial Sequence
  Description of Artificial Sequence: Synthetic oligonucleotide
uuggauucaucag

SEQ ID NO: 128596 - RNA, 12 nt, Artificial Sequence
  Description of Artificial Sequence: Synthetic oligonucleotide
ggaauaccuaag

SEQ ID NO: 128597 - RNA, 11 nt, Artificial Sequence
  Description of Artificial Sequence: Synthetic oligonucleotide
uuugaggcuca

SEQ ID NO: 128598 - RNA, 10 nt, Artificial Sequence
  Description of Artificial Sequence: Synthetic oligonucleotide
cuacaauugg

SEQ ID NO: 128599 - RNA, 11 nt, Artificial Sequence
  Description of Artificial Sequence: Synthetic oligonucleotide
aguuaggagcc

SEQ ID NO: 128600 - RNA, 12 nt, Artificial Sequence
  Description of Artificial Sequence: Synthetic oligonucleotide
gucaauauccac

SEQ ID NO: 128601 - RNA, 12 nt, Artificial Sequence
  Description of Artificial Sequence: Synthetic oligonucleotide
uguucagucaca

SEQ ID NO: 128602 - RNA, 11 nt, Artificial Sequence
  Description of Artificial Sequence: Synthetic oligonucleotide
cacacacauac

SEQ ID NO: 128603 - RNA, 11 nt, Artificial Sequence
  Description of Artificial Sequence: Synthetic oligonucleotide
uccuuuugcuu

SEQ ID NO: 128604 - RNA, 15 nt, Artificial Sequence
  Description of Artificial Sequence: Synthetic oligonucleotide
uuuaaaguaauuuuu

SEQ ID NO: 128605 - RNA, 12 nt, Artificial Sequence
  Description of Artificial Sequence: Synthetic oligonucleotide
aacagucaaugg

SEQ ID NO: 128606 - RNA, 12 nt, Artificial Sequence
  Description of Artificial Sequence: Synthetic oligonucleotide
cgacaaaccaau

SEQ ID NO: 128607 - RNA, 11 nt, Artificial Sequence
  Description of Artificial Sequence: Synthetic oligonucleotide
cugcuaccacu

SEQ ID NO: 128608 - RNA, 12 nt, Artificial Sequence
  Description of Artificial Sequence: Synthetic oligonucleotide
caagcggucuua

SEQ ID NO: 128609 - RNA, 12 nt, Artificial Sequence
  Description of Artificial Sequence: Synthetic oligonucleotide
gucuuaccggcu

SEQ ID NO: 128610 - RNA, 10 nt, Artificial Sequence
  Description of Artificial Sequence: Synthetic oligonucleotide
auggguuacc

SEQ ID NO: 128611 - RNA, 10 nt, Artificial Sequence
  Description of Artificial Sequence: Synthetic oligonucleotide
uuaccugcga

SEQ ID NO: 128612 - RNA, 11 nt, Artificial Sequence
  Description of Artificial Sequence: Synthetic oligonucleotide
aucuugcugag

SEQ ID NO: 128613 - RNA, 12 nt, Artificial Sequence
  Description of Artificial Sequence: Synthetic oligonucleotide
gcauaaaacagu

SEQ ID NO: 128614 - RNA, 11 nt, Artificial Sequence
  Description of Artificial Sequence: Synthetic oligonucleotide
uccuuuauccu

SEQ ID NO: 128615 - RNA, 11 nt, Artificial Sequence
  Description of Artificial Sequence: Synthetic oligonucleotide
aacgcaaguug

SEQ ID NO: 128616 - RNA, 12 nt, Artificial Sequence
  Description of Artificial Sequence: Synthetic oligonucleotide
aacugaaaccau

SEQ ID NO: 128617 - RNA, 13 nt, Artificial Sequence
  Description of Artificial Sequence: Synthetic oligonucleotide
cuuuguuaaauau

SEQ ID NO: 128618 - RNA, 13 nt, Artificial Sequence
  Description of Artificial Sequence: Synthetic oligonucleotide
uauauuaaaaguu

SEQ ID NO: 128619 - RNA, 12 nt, Artificial Sequence
  Description of Artificial Sequence: Synthetic oligonucleotide
uuuugacuuaac

SEQ ID NO: 128620 - RNA, 12 nt, Artificial Sequence
  Description of Artificial Sequence: Synthetic oligonucleotide
caaacucagcac

SEQ ID NO: 128621 - RNA, 10 nt, Artificial Sequence
  Description of Artificial Sequence: Synthetic oligonucleotide
gcugaccuca

SEQ ID NO: 128622 - RNA, 13 nt, Artificial Sequence
  Description of Artificial Sequence: Synthetic oligonucleotide
uuauucagaucgc

SEQ ID NO: 128623 - RNA, 12 nt, Artificial Sequence
  Description of Artificial Sequence: Synthetic oligonucleotide
ggguucugggau

SEQ ID NO: 128624 - RNA, 14 nt, Artificial Sequence
  Description of Artificial Sequence: Synthetic oligonucleotide
uauuggaaauuaug

SEQ ID NO: 128625 - RNA, 12 nt, Artificial Sequence
  Description of Artificial Sequence: Synthetic oligonucleotide
uggaagcacuag

SEQ ID NO: 128626 - RNA, 12 nt, Artificial Sequence
  Description of Artificial Sequence: Synthetic oligonucleotide
uuuuuaugugga

SEQ ID NO: 128627 - RNA, 11 nt, Artificial Sequence
  Description of Artificial Sequence: Synthetic oligonucleotide
gaauugguaga

SEQ ID NO: 128628 - RNA, 12 nt, Artificial Sequence
  Description of Artificial Sequence: Synthetic oligonucleotide
uagacuuggaga

SEQ ID NO: 128629 - RNA, 12 nt, Artificial Sequence
  Description of Artificial Sequence: Synthetic oligonucleotide
uacaguauucca

SEQ ID NO: 128630 - RNA, 14 nt, Artificial Sequence
  Description of Artificial Sequence: Synthetic oligonucleotide
cacugaugaauuaa

SEQ ID NO: 128631 - RNA, 11 nt, Artificial Sequence
  Description of Artificial Sequence: Synthetic oligonucleotide
cacaucaucac

SEQ ID NO: 128632 - RNA, 12 nt, Artificial Sequence
  Description of Artificial Sequence: Synthetic oligonucleotide
ucaccaaacaga

SEQ ID NO: 128633 - RNA, 11 nt, Artificial Sequence
  Description of Artificial Sequence: Synthetic oligonucleotide
gaacaugaugg

SEQ ID NO: 128634 - RNA, 11 nt, Artificial Sequence
  Description of Artificial Sequence: Synthetic oligonucleotide
auguagacugc

SEQ ID NO: 128635 - RNA, 12 nt, Artificial Sequence
  Description of Artificial Sequence: Synthetic oligonucleotide
gaucuauuuaug

SEQ ID NO: 128636 - RNA, 11 nt, Artificial Sequence
  Description of Artificial Sequence: Synthetic oligonucleotide
cacuauuauca

SEQ ID NO: 128637 - RNA, 10 nt, Artificial Sequence
  Description of Artificial Sequence: Synthetic oligonucleotide
ucaguucugc

SEQ ID NO: 128638 - RNA, 12 nt, Artificial Sequence
  Description of Artificial Sequence: Synthetic oligonucleotide
gauuaaaccuac

SEQ ID NO: 128639 - RNA, 12 nt, Artificial Sequence
  Description of Artificial Sequence: Synthetic oligonucleotide
uaaaauccuucu

SEQ ID NO: 128640 - RNA, 11 nt, Artificial Sequence
  Description of Artificial Sequence: Synthetic oligonucleotide
augcuguagac

SEQ ID NO: 128641 - RNA, 12 nt, Artificial Sequence
  Description of Artificial Sequence: Synthetic oligonucleotide
ugauaggaauag

SEQ ID NO: 128642 - RNA, 10 nt, Artificial Sequence
  Description of Artificial Sequence: Synthetic oligonucleotide
auggcccuga

SEQ ID NO: 128643 - RNA, 10 nt, Artificial Sequence
  Description of Artificial Sequence: Synthetic oligonucleotide
uccucaagca

SEQ ID NO: 128644 - RNA, 9 nt, Artificial Sequence
  Description of Artificial Sequence: Synthetic oligonucleotide
uucagccca

SEQ ID NO: 128645 - RNA, 10 nt, Artificial Sequence
  Description of Artificial Sequence: Synthetic oligonucleotide
cugcugaacc

SEQ ID NO: 128646 - RNA, 11 nt, Artificial Sequence
  Description of Artificial Sequence: Synthetic oligonucleotide
aguucucuuca

SEQ ID NO: 128647 - RNA, 10 nt, Artificial Sequence
  Description of Artificial Sequence: Synthetic oligonucleotide
cagccuagag

SEQ ID NO: 128648 - RNA, 12 nt, Artificial Sequence
  Description of Artificial Sequence: Synthetic oligonucleotide
ucugugaagugu

SEQ ID NO: 128649 - RNA, 13 nt, Artificial Sequence
  Description of Artificial Sequence: Synthetic oligonucleotide
gagaaaauuucaa

SEQ ID NO: 128650 - RNA, 10 nt, Artificial Sequence
  Description of Artificial Sequence: Synthetic oligonucleotide
auccuccuga

SEQ ID NO: 128651 - RNA, 11 nt, Artificial Sequence
  Description of Artificial Sequence: Synthetic oligonucleotide
ugacaucauau

SEQ ID NO: 128652 - RNA, 12 nt, Artificial Sequence
  Description of Artificial Sequence: Synthetic oligonucleotide
aucuucaucaua

SEQ ID NO: 128653 - RNA, 12 nt, Artificial Sequence
  Description of Artificial Sequence: Synthetic oligonucleotide
acuagcuauuaa

SEQ ID NO: 128654 - RNA, 13 nt, Artificial Sequence
  Description of Artificial Sequence: Synthetic oligonucleotide
cucuacuaaaaau

SEQ ID NO: 128655 - RNA, 11 nt, Artificial Sequence
  Description of Artificial Sequence: Synthetic oligonucleotide
cuaucucgccu

SEQ ID NO: 128656 - RNA, 12 nt, Artificial Sequence
  Description of Artificial Sequence: Synthetic oligonucleotide
uucgguccaguu

SEQ ID NO: 128657 - RNA, 10 nt, Artificial Sequence
  Description of Artificial Sequence: Synthetic oligonucleotide
auguagccgc

SEQ ID NO: 128658 - RNA, 11 nt, Artificial Sequence
  Description of Artificial Sequence: Synthetic oligonucleotide
gaggagacuug

SEQ ID NO: 128659 - RNA, 11 nt, Artificial Sequence
  Description of Artificial Sequence: Synthetic oligonucleotide
aguagugagga

SEQ ID NO: 128660 - RNA, 13 nt, Artificial Sequence
  Description of Artificial Sequence: Synthetic oligonucleotide
agaugaguacaaa

SEQ ID NO: 128661 - RNA, 12 nt, Artificial Sequence
  Description of Artificial Sequence: Synthetic oligonucleotide
uuguuaaugggc

SEQ ID NO: 128662 - RNA, 12 nt, Artificial Sequence
  Description of Artificial Sequence: Synthetic oligonucleotide
uuuuaauuuauu

SEQ ID NO: 128663 - RNA, 11 nt, Artificial Sequence
  Description of Artificial Sequence: Synthetic oligonucleotide
auuuaaauaug

SEQ ID NO: 128664 - RNA, 12 nt, Artificial Sequence
  Description of Artificial Sequence: Synthetic oligonucleotide
auccuuuguuuc

SEQ ID NO: 128665 - RNA, 13 nt, Artificial Sequence
  Description of Artificial Sequence: Synthetic oligonucleotide
gucuaaguguuug

SEQ ID NO: 128666 - RNA, 11 nt, Artificial Sequence
  Description of Artificial Sequence: Synthetic oligonucleotide
ccugugacaaa

SEQ ID NO: 128667 - RNA, 12 nt, Artificial Sequence
  Description of Artificial Sequence: Synthetic oligonucleotide
caggcugaauua

SEQ ID NO: 128668 - RNA, 13 nt, Artificial Sequence
  Description of Artificial Sequence: Synthetic oligonucleotide
ucauucuuacaau

SEQ ID NO: 128669 - RNA, 14 nt, Artificial Sequence
  Description of Artificial Sequence: Synthetic oligonucleotide
cauucuuacaauug

SEQ ID NO: 128670 - RNA, 11 nt, Artificial Sequence
  Description of Artificial Sequence: Synthetic oligonucleotide
agagaguguac

SEQ ID NO: 128671 - RNA, 11 nt, Artificial Sequence
  Description of Artificial Sequence: Synthetic oligonucleotide
gaacucagcag

SEQ ID NO: 128672 - RNA, 12 nt, Artificial Sequence
  Description of Artificial Sequence: Synthetic oligonucleotide
uuauuuucagua

SEQ ID NO: 128673 - RNA, 11 nt, Artificial Sequence
  Description of Artificial Sequence: Synthetic oligonucleotide
cuuaaauggaa

SEQ ID NO: 128674 - RNA, 12 nt, Artificial Sequence
  Description of Artificial Sequence: Synthetic oligonucleotide
gccuaaaauugu

SEQ ID NO: 128675 - RNA, 12 nt, Artificial Sequence
  Description of Artificial Sequence: Synthetic oligonucleotide
acuaacaucugg

SEQ ID NO: 128676 - RNA, 11 nt, Artificial Sequence
  Description of Artificial Sequence: Synthetic oligonucleotide
gacugugagcu

SEQ ID NO: 128677 - RNA, 13 nt, Artificial Sequence
  Description of Artificial Sequence: Synthetic oligonucleotide
gcuuuuuauuaau

SEQ ID NO: 128678 - RNA, 12 nt, Artificial Sequence
  Description of Artificial Sequence: Synthetic oligonucleotide
ucuucuuacauu

SEQ ID NO: 128679 - RNA, 14 nt, Artificial Sequence
  Description of Artificial Sequence: Synthetic oligonucleotide
auuuguaaaaaugu

SEQ ID NO: 128680 - RNA, 14 nt, Artificial Sequence
  Description of Artificial Sequence: Synthetic oligonucleotide
ucuuaauucauauu

SEQ ID NO: 128681 - RNA, 12 nt, Artificial Sequence
  Description of Artificial Sequence: Synthetic oligonucleotide
aacuaaucauga

SEQ ID NO: 128682 - RNA, 11 nt, Artificial Sequence
  Description of Artificial Sequence: Synthetic oligonucleotide
cugcucuuggg

SEQ ID NO: 128683 - RNA, 12 nt, Artificial Sequence
  Description of Artificial Sequence: Synthetic oligonucleotide
aguagcuuugag

SEQ ID NO: 128684 - RNA, 13 nt, Artificial Sequence
  Description of Artificial Sequence: Synthetic oligonucleotide
acguaauauuuca

SEQ ID NO: 128685 - RNA, 12 nt, Artificial Sequence
  Description of Artificial Sequence: Synthetic oligonucleotide
auucucuucacu

SEQ ID NO: 128686 - RNA, 13 nt, Artificial Sequence
  Description of Artificial Sequence: Synthetic oligonucleotide
uaaugcuaagaaa

SEQ ID NO: 128687 - RNA, 11 nt, Artificial Sequence
  Description of Artificial Sequence: Synthetic oligonucleotide
cugaaaaucaa

SEQ ID NO: 128688 - RNA, 13 nt, Artificial Sequence
  Description of Artificial Sequence: Synthetic oligonucleotide
auaugauuacuuu

SEQ ID NO: 128689 - RNA, 13 nt, Artificial Sequence
  Description of Artificial Sequence: Synthetic oligonucleotide
auuuuguucuaca

SEQ ID NO: 128690 - RNA, 11 nt, Artificial Sequence
  Description of Artificial Sequence: Synthetic oligonucleotide
ccgggacucuc

SEQ ID NO: 128691 - RNA, 13 nt, Artificial Sequence
  Description of Artificial Sequence: Synthetic oligonucleotide
cuuuaaaguaaag

SEQ ID NO: 128692 - RNA, 12 nt, Artificial Sequence
  Description of Artificial Sequence: Synthetic oligonucleotide
cuggaagccugg

SEQ ID NO: 128693 - RNA, 13 nt, Artificial Sequence
  Description of Artificial Sequence: Synthetic oligonucleotide
aaacaaaagagag

SEQ ID NO: 128694 - RNA, 12 nt, Artificial Sequence
  Description of Artificial Sequence: Synthetic oligonucleotide
ucaguuaugccg

SEQ ID NO: 128695 - RNA, 12 nt, Artificial Sequence
  Description of Artificial Sequence: Synthetic oligonucleotide
aaaagaagucca

SEQ ID NO: 128696 - RNA, 10 nt, Artificial Sequence
  Description of Artificial Sequence: Synthetic oligonucleotide
ggugagguua

SEQ ID NO: 128697 - RNA, 10 nt, Artificial Sequence
  Description of Artificial Sequence: Synthetic oligonucleotide
ggaagaggac

SEQ ID NO: 128698 - RNA, 12 nt, Artificial Sequence
  Description of Artificial Sequence: Synthetic oligonucleotide
agcaaguauugu

SEQ ID NO: 128699 - RNA, 11 nt, Artificial Sequence
  Description of Artificial Sequence: Synthetic oligonucleotide
uuguagcacuc

SEQ ID NO: 128700 - RNA, 13 nt, Artificial Sequence
  Description of Artificial Sequence: Synthetic oligonucleotide
caaaaccacaaau

SEQ ID NO: 128701 - RNA, 11 nt, Artificial Sequence
  Description of Artificial Sequence: Synthetic oligonucleotide
aagcccauaca

SEQ ID NO: 128702 - RNA, 10 nt, Artificial Sequence
  Description of Artificial Sequence: Synthetic oligonucleotide
gcccauacag

SEQ ID NO: 128703 - RNA, 11 nt, Artificial Sequence
  Description of Artificial Sequence: Synthetic oligonucleotide
agaaaccuucc

SEQ ID NO: 128704 - RNA, 9 nt, Artificial Sequence
  Description of Artificial Sequence: Synthetic oligonucleotide
uauaccuac

SEQ ID NO: 128705 - RNA, 12 nt, Artificial Sequence
  Description of Artificial Sequence: Synthetic oligonucleotide
ccaguuuucgga

SEQ ID NO: 128706 - RNA, 8 nt, Artificial Sequence
  Description of Artificial Sequence: Synthetic oligonucleotide
gaacaggg

SEQ ID NO: 128707 - RNA, 12 nt, Artificial Sequence
  Description of Artificial Sequence: Synthetic oligonucleotide
uaacuuuccagu

SEQ ID NO: 128708 - RNA, 13 nt, Artificial Sequence
  Description of Artificial Sequence: Synthetic oligonucleotide
aaguuugguuuug

SEQ ID NO: 128709 - RNA, 11 nt, Artificial Sequence
  Description of Artificial Sequence: Synthetic oligonucleotide
uucccacugua

SEQ ID NO: 128710 - RNA, 12 nt, Artificial Sequence
  Description of Artificial Sequence: Synthetic oligonucleotide
gauaccauauga

SEQ ID NO: 128711 - RNA, 10 nt, Artificial Sequence
  Description of Artificial Sequence: Synthetic oligonucleotide
acaugggcug

SEQ ID NO: 128712 - RNA, 12 nt, Artificial Sequence
  Description of Artificial Sequence: Synthetic oligonucleotide
aacuuuuucaua

SEQ ID NO: 128713 - RNA, 11 nt, Artificial Sequence
  Description of Artificial Sequence: Synthetic oligonucleotide
augaggccgga

SEQ ID NO: 128714 - RNA, 10 nt, Artificial Sequence
  Description of Artificial Sequence: Synthetic oligonucleotide
cugcauuugu

SEQ ID NO: 128715 - RNA, 12 nt, Artificial Sequence
  Description of Artificial Sequence: Synthetic oligonucleotide
auguuuacuacc

SEQ ID NO: 128716 - RNA, 14 nt, Artificial Sequence
  Description of Artificial Sequence: Synthetic oligonucleotide
auuuuuugaugaaa

SEQ ID NO: 128717 - RNA, 13 nt, Artificial Sequence
  Description of Artificial Sequence: Synthetic oligonucleotide
agugugugaauuu

SEQ ID NO: 128718 - RNA, 12 nt, Artificial Sequence
  Description of Artificial Sequence: Synthetic oligonucleotide
agcaauguaugu

SEQ ID NO: 128719 - RNA, 13 nt, Artificial Sequence
  Description of Artificial Sequence: Synthetic oligonucleotide
aagcacauauaua

SEQ ID NO: 128720 - RNA, 13 nt, Artificial Sequence
  Description of Artificial Sequence: Synthetic oligonucleotide
uaauaguuucucc

SEQ ID NO: 128721 - RNA, 12 nt, Artificial Sequence
  Description of Artificial Sequence: Synthetic oligonucleotide
guuucuccaaau

SEQ ID NO: 128722 - RNA, 12 nt, Artificial Sequence
  Description of Artificial Sequence: Synthetic oligonucleotide
acuuccuagaaa

SEQ ID NO: 128723 - RNA, 12 nt, Artificial Sequence
  Description of Artificial Sequence: Synthetic oligonucleotide
acaccauauaug

SEQ ID NO: 128724 - RNA, 13 nt, Artificial Sequence
  Description of Artificial Sequence: Synthetic oligonucleotide
uauaugaauggag

SEQ ID NO: 128725 - RNA, 12 nt, Artificial Sequence
  Description of Artificial Sequence: Synthetic oligonucleotide
cauuuacaggga

SEQ ID NO: 128726 - RNA, 12 nt, Artificial Sequence
  Description of Artificial Sequence: Synthetic oligonucleotide
auuuacagggac

SEQ ID NO: 128727 - RNA, 9 nt, Artificial Sequence
  Description of Artificial Sequence: Synthetic oligonucleotide
gggaccuga

SEQ ID NO: 128728 - RNA, 13 nt, Artificial Sequence
  Description of Artificial Sequence: Synthetic oligonucleotide
guuugacugcauc

SEQ ID NO: 128729 - RNA, 12 nt, Artificial Sequence
  Description of Artificial Sequence: Synthetic oligonucleotide
uugacugcaucg

SEQ ID NO: 128730 - RNA, 11 nt, Artificial Sequence
  Description of Artificial Sequence: Synthetic oligonucleotide
aguucacaggg

SEQ ID NO: 128731 - RNA, 12 nt, Artificial Sequence
  Description of Artificial Sequence: Synthetic oligonucleotide
gcaccucugucc

SEQ ID NO: 128732 - RNA, 14 nt, Artificial Sequence
  Description of Artificial Sequence: Synthetic oligonucleotide
guuugucuuuuuaa

SEQ ID NO: 128733 - RNA, 13 nt, Artificial Sequence
  Description of Artificial Sequence: Synthetic oligonucleotide
uugucuuuuuaag

SEQ ID NO: 128734 - RNA, 12 nt, Artificial Sequence
  Description of Artificial Sequence: Synthetic oligonucleotide
cuaaagguuguc

SEQ ID NO: 128735 - RNA, 11 nt, Artificial Sequence
  Description of Artificial Sequence: Synthetic oligonucleotide
agguugucgac

SEQ ID NO: 128736 - RNA, 12 nt, Artificial Sequence
  Description of Artificial Sequence: Synthetic oligonucleotide
ccuggcaauugu

SEQ ID NO: 128737 - RNA, 11 nt, Artificial Sequence
  Description of Artificial Sequence: Synthetic oligonucleotide
guggugcgagg

SEQ ID NO: 128738 - RNA, 12 nt, Artificial Sequence
  Description of Artificial Sequence: Synthetic oligonucleotide
gagacaugaaau

SEQ ID NO: 128739 - RNA, 12 nt, Artificial Sequence
  Description of Artificial Sequence: Synthetic oligonucleotide
uauauuucucca

SEQ ID NO: 128740 - RNA, 9 nt, Artificial Sequence
  Description of Artificial Sequence: Synthetic oligonucleotide
augaaggcu

SEQ ID NO: 128741 - RNA, 10 nt, Artificial Sequence
  Description of Artificial Sequence: Synthetic oligonucleotide
cuggaguggu

SEQ ID NO: 128742 - RNA, 10 nt, Artificial Sequence
  Description of Artificial Sequence: Synthetic oligonucleotide
ggaagagagg

SEQ ID NO: 128743 - RNA, 11 nt, Artificial Sequence
  Description of Artificial Sequence: Synthetic oligonucleotide
uugcaucgggc

SEQ ID NO: 128744 - RNA, 12 nt, Artificial Sequence
  Description of Artificial Sequence: Synthetic oligonucleotide
uauccuacugug

SEQ ID NO: 128745 - RNA, 12 nt, Artificial Sequence
  Description of Artificial Sequence: Synthetic oligonucleotide
ccuacuguguaa

SEQ ID NO: 128746 - RNA, 11 nt, Artificial Sequence
  Description of Artificial Sequence: Synthetic oligonucleotide
cuuguagugua

SEQ ID NO: 128747 - RNA, 12 nt, Artificial Sequence
  Description of Artificial Sequence: Synthetic oligonucleotide
cuuuguugauug

SEQ ID NO: 128748 - RNA, 13 nt, Artificial Sequence
  Description of Artificial Sequence: Synthetic oligonucleotide
uuguugauugaaa

SEQ ID NO: 128749 - RNA, 14 nt, Artificial Sequence
  Description of Artificial Sequence: Synthetic oligonucleotide
ucuuuuucuuccau

SEQ ID NO: 128750 - RNA, 12 nt, Artificial Sequence
  Description of Artificial Sequence: Synthetic oligonucleotide
aucuuccuucua

SEQ ID NO: 128751 - RNA, 12 nt, Artificial Sequence
  Description of Artificial Sequence: Synthetic oligonucleotide
ugaaugcuucau

SEQ ID NO: 128752 - RNA, 12 nt, Artificial Sequence
  Description of Artificial Sequence: Synthetic oligonucleotide
gaaugcuucaug

SEQ ID NO: 128753 - RNA, 12 nt, Artificial Sequence
  Description of Artificial Sequence: Synthetic oligonucleotide
auucuacuuuga

SEQ ID NO: 128754 - RNA, 12 nt, Artificial Sequence
  Description of Artificial Sequence: Synthetic oligonucleotide
gcaacuacagac

SEQ ID NO: 128755 - RNA, 12 nt, Artificial Sequence
  Description of Artificial Sequence: Synthetic oligonucleotide
accaaggucaac

SEQ ID NO: 128756 - RNA, 12 nt, Artificial Sequence
  Description of Artificial Sequence: Synthetic oligonucleotide
gacuaucucgac

SEQ ID NO: 128757 - RNA, 12 nt, Artificial Sequence
  Description of Artificial Sequence: Synthetic oligonucleotide
accuucccaaac

SEQ ID NO: 128758 - RNA, 13 nt, Artificial Sequence
  Description of Artificial Sequence: Synthetic oligonucleotide
caagcuuagaacu

SEQ ID NO: 128759 - RNA, 14 nt, Artificial Sequence
  Description of Artificial Sequence: Synthetic oligonucleotide
gcuuagaacuuuaa

SEQ ID NO: 128760 - RNA, 13 nt, Artificial Sequence
  Description of Artificial Sequence: Synthetic oligonucleotide
aacuuuaagcaac

SEQ ID NO: 128761 - RNA, 10 nt, Artificial Sequence
  Description of Artificial Sequence: Synthetic oligonucleotide
agaccaccac

SEQ ID NO: 128762 - RNA, 13 nt, Artificial Sequence
  Description of Artificial Sequence: Synthetic oligonucleotide
cgagaaauaaagu

SEQ ID NO: 128763 - RNA, 13 nt, Artificial Sequence
  Description of Artificial Sequence: Synthetic oligonucleotide
gagaaauaaaguu

SEQ ID NO: 128764 - RNA, 11 nt, Artificial Sequence
  Description of Artificial Sequence: Synthetic oligonucleotide
ggaaaugaucc

SEQ ID NO: 128765 - RNA, 12 nt, Artificial Sequence
  Description of Artificial Sequence: Synthetic oligonucleotide
aagaaaugaaac

SEQ ID NO: 128766 - RNA, 12 nt, Artificial Sequence
  Description of Artificial Sequence: Synthetic oligonucleotide
uuuccauccucc

SEQ ID NO: 128767 - RNA, 14 nt, Artificial Sequence
  Description of Artificial Sequence: Synthetic oligonucleotide
cugaaaaucuuuga

SEQ ID NO: 128768 - RNA, 10 nt, Artificial Sequence
  Description of Artificial Sequence: Synthetic oligonucleotide
gccguucagg

SEQ ID NO: 128769 - RNA, 12 nt, Artificial Sequence
  Description of Artificial Sequence: Synthetic oligonucleotide
aggguccagaag

SEQ ID NO: 128770 - RNA, 12 nt, Artificial Sequence
  Description of Artificial Sequence: Synthetic oligonucleotide
caagacugcuug

SEQ ID NO: 128771 - RNA, 12 nt, Artificial Sequence
  Description of Artificial Sequence: Synthetic oligonucleotide
ccaugucuuugg

SEQ ID NO: 128772 - RNA, 10 nt, Artificial Sequence
  Description of Artificial Sequence: Synthetic oligonucleotide
ccugaaacac

SEQ ID NO: 128773 - RNA, 11 nt, Artificial Sequence
  Description of Artificial Sequence: Synthetic oligonucleotide
cucuguaccuc

SEQ ID NO: 128774 - RNA, 11 nt, Artificial Sequence
  Description of Artificial Sequence: Synthetic oligonucleotide
gcaagacaaga

SEQ ID NO: 128775 - RNA, 12 nt, Artificial Sequence
  Description of Artificial Sequence: Synthetic oligonucleotide
caagacaagaaa

SEQ ID NO: 128776 - RNA, 11 nt, Artificial Sequence
  Description of Artificial Sequence: Synthetic oligonucleotide
guacaagaucc

SEQ ID NO: 128777 - RNA, 11 nt, Artificial Sequence
  Description of Artificial Sequence: Synthetic oligonucleotide
guacuugcaga

SEQ ID NO: 128778 - RNA, 12 nt, Artificial Sequence
  Description of Artificial Sequence: Synthetic oligonucleotide
gaucgauacaga

SEQ ID NO: 128779 - RNA, 12 nt, Artificial Sequence
  Description of Artificial Sequence: Synthetic oligonucleotide
auaaaaauaaau

SEQ ID NO: 128780 - RNA, 12 nt, Artificial Sequence
  Description of Artificial Sequence: Synthetic oligonucleotide
aaaaauaaauau

SEQ ID NO: 128781 - RNA, 12 nt, Artificial Sequence
  Description of Artificial Sequence: Synthetic oligonucleotide
uugacugcugug

SEQ ID NO: 128782 - RNA, 12 nt, Artificial Sequence
  Description of Artificial Sequence: Synthetic oligonucleotide
gagaugagagac

SEQ ID NO: 128783 - RNA, 9 nt, Artificial Sequence
  Description of Artificial Sequence: Synthetic oligonucleotide
cccacuugg

SEQ ID NO: 128784 - RNA, 1966 nt, Homo sapiens
aggccccugccugccccagcauccccugcgcgaagcugggugccccggagagucugaccaccaugccaccuccucgccuccucuucuuccuccucuuccucacccccauggaagucaggcccgaggaaccucuaguggugaagguggaagagggagauaacgcugugcugcagugccucaaggggaccucagauggccccacucagcagcugaccuggucucgggaguccccgcuuaaacccuucuuaaaacucagccuggggcugccaggccugggaauccacaugaggccccuggccaucuggcuuuucaucuucaacgucucucaacagauggggggcuucuaccugugccagccggggccccccucugagaaggccuggcagccuggcuggacagucaauguggagggcagcggggagcuguuccgguggaauguuucggaccuagguggccugggcuguggccugaagaacagguccucagagggccccagcuccccuuccgggaagcucaugagccccaagcuguaugugugggccaaagaccgcccugagaucugggagggagagccuccgugucucccaccgagggacagccugaaccagagccucagccaggaccucaccauggccccuggcuccacacucuggcuguccugugggguacccccugacucuguguccaggggcccccucuccuggacccaugugcaccccaaggggccuaagucauugcugagccuagagcugaaggacgaucgcccggccagagauauguggguaauggagacgggucuguuguugccccgggccacagcucaagacgcuggaaaguauuauugucaccguggcaaccugaccaugucauuccaccuggagaucacugcucggccaguacuauggcacuggcugcugaggacugguggcuggaaggucucagcugugacuuuggcuuaucugaucuucugccuguguucccuugugggcauucuucaucuucaaagagcccugguccugaggaggaaaagaaagcgaaugacugaccccaccaggagauucuucaaagugacgccucccccaggaagcgggccccagaaccaguacgggaacgugcugucucuccccacacccaccucaggccucggacgcgcccagcguugggccgcaggccuggggggcacugccccgucuuauggaaacccgagcagcgacguccaggcggauggagccuuggggucccggagcccgccgggagugggcccagaagaagaggaaggggagggcuaugaggaaccugacagugaggaggacuccgaguucuaugagaacgacuccaaccuugggcaggaccagcucucccaggauggcagcggcuacgagaacccugaggaugagccccuggguccugaggaugaagacuccuucuccaacgcugagucuuaugagaacgaggaugaagagcugacccagccggucgccaggacaauggacuuccugagcccucaugggucagccugggaccccagccgggaagcaaccucccuggggucccaguccuaugaggauaugagaggaauccuguaugcagccccccagcuccgcuccauucggggccagccuggacccaaucaugaggaagaugcagacucuuaugagaacauggauaaucccgaugggccagacccagccuggggaggagggggccgcaugggcaccuggagcaccaggugauccucagguggccagccuggaucuccucaaguccccaagauucacaccugacucugaaaucugaagaccucgagcagaugaugccaaccucuggagcaauguugcuuaggaugugugcauguguguaaguguguguguguguguguguguguauacaugccagugacacuuccaguccccuuuguauuccuuaaauaaacucaaugagcucuuccaaaaaaaaaaaaaaaaaa

SEQ ID NO: 128785 - RNA, 19 nt, Artificial Sequence
  Description of Artificial Sequence: Synthetic oligonucleotide
aggccccugccugccccag

SEQ ID NO: 128786 - RNA, 19 nt, Artificial Sequence
  Description of Artificial Sequence: Synthetic oligonucleotide
gcauccccugcgcgaagcu

SEQ ID NO: 128787 - RNA, 19 nt, Artificial Sequence
  Description of Artificial Sequence: Synthetic oligonucleotide
ugggugccccggagagucu

SEQ ID NO: 128788 - RNA, 19 nt, Artificial Sequence
  Description of Artificial Sequence: Synthetic oligonucleotide
ugaccaccaugccaccucc

SEQ ID NO: 128789 - RNA, 19 nt, Artificial Sequence
  Description of Artificial Sequence: Synthetic oligonucleotide
cucgccuccucuucuuccu

SEQ ID NO: 128790 - RNA, 19 nt, Artificial Sequence
  Description of Artificial Sequence: Synthetic oligonucleotide
uccucuuccucacccccau

SEQ ID NO: 128791 - RNA, 19 nt, Artificial Sequence
  Description of Artificial Sequence: Synthetic oligonucleotide
uggaagucaggcccgagga

SEQ ID NO: 128792 - RNA, 19 nt, Artificial Sequence
  Description of Artificial Sequence: Synthetic oligonucleotide
aaccucuaguggugaaggu

SEQ ID NO: 128793 - RNA, 19 nt, Artificial Sequence
  Description of Artificial Sequence: Synthetic oligonucleotide
uggaagagggagauaacgc

SEQ ID NO: 128794 - RNA, 19 nt, Artificial Sequence
  Description of Artificial Sequence: Synthetic oligonucleotide
cugugcugcagugccucaa

SEQ ID NO: 128795 - RNA, 19 nt, Artificial Sequence
  Description of Artificial Sequence: Synthetic oligonucleotide
aggggaccucagauggccc

SEQ ID NO: 128796 - RNA, 19 nt, Artificial Sequence
  Description of Artificial Sequence: Synthetic oligonucleotide
ccacucagcagcugaccug

SEQ ID NO: 128797 - RNA, 19 nt, Artificial Sequence
  Description of Artificial Sequence: Synthetic oligonucleotide
ggucucgggaguccccgcu

SEQ ID NO: 128798 - RNA, 19 nt, Artificial Sequence
  Description of Artificial Sequence: Synthetic oligonucleotide
uuaaacccuucuuaaaacu

SEQ ID NO: 128799 - RNA, 19 nt, Artificial Sequence
  Description of Artificial Sequence: Synthetic oligonucleotide
ucagccuggggcugccagg

SEQ ID NO: 128800 - RNA, 19 nt, Artificial Sequence
  Description of Artificial Sequence: Synthetic oligonucleotide
gccugggaauccacaugag

SEQ ID NO: 128801 - RNA, 19 nt, Artificial Sequence
  Description of Artificial Sequence: Synthetic oligonucleotide
ggccccuggccaucuggcu

SEQ ID NO: 128802 - RNA, 19 nt, Artificial Sequence
  Description of Artificial Sequence: Synthetic oligonucleotide
uuuucaucuucaacgucuc

SEQ ID NO: 128803 - RNA, 19 nt, Artificial Sequence
  Description of Artificial Sequence: Synthetic oligonucleotide
cucaacagauggggggcuu

SEQ ID NO: 128804 - RNA, 19 nt, Artificial Sequence
  Description of Artificial Sequence: Synthetic oligonucleotide
ucuaccugugccagccggg

SEQ ID NO: 128805 - RNA, 19 nt, Artificial Sequence
  Description of Artificial Sequence: Synthetic oligonucleotide
ggccccccucugagaaggc

SEQ ID NO: 128806 - RNA, 19 nt, Artificial Sequence
  Description of Artificial Sequence: Synthetic oligonucleotide
ccuggcagccuggcuggac

SEQ ID NO: 128807 - RNA, 19 nt, Artificial Sequence
  Description of Artificial Sequence: Synthetic oligonucleotide
cagucaauguggagggcag

SEQ ID NO: 128808 - RNA, 19 nt, Artificial Sequence
  Description of Artificial Sequence: Synthetic oligonucleotide
gcggggagcuguuccggug

SEQ ID NO: 128809 - RNA, 19 nt, Artificial Sequence
  Description of Artificial Sequence: Synthetic oligonucleotide
ggaauguuucggaccuagg

SEQ ID NO: 128810 - RNA, 19 nt, Artificial Sequence
  Description of Artificial Sequence: Synthetic oligonucleotide
guggccugggcuguggccu

SEQ ID NO: 128811 - RNA, 19 nt, Artificial Sequence
  Description of Artificial Sequence: Synthetic oligonucleotide
ugaagaacagguccucaga

SEQ ID NO: 128812 - RNA, 19 nt, Artificial Sequence
  Description of Artificial Sequence: Synthetic oligonucleotide
agggccccagcuccccuuc

SEQ ID NO: 128813 - RNA, 19 nt, Artificial Sequence
  Description of Artificial Sequence: Synthetic oligonucleotide
ccgggaagcucaugagccc

SEQ ID NO: 128814 - RNA, 19 nt, Artificial Sequence
  Description of Artificial Sequence: Synthetic oligonucleotide
ccaagcuguaugugugggc

SEQ ID NO: 128815 - RNA, 19 nt, Artificial Sequence
  Description of Artificial Sequence: Synthetic oligonucleotide
ccaaagaccgcccugagau

SEQ ID NO: 128816 - RNA, 19 nt, Artificial Sequence
  Description of Artificial Sequence: Synthetic oligonucleotide
ucugggagggagagccucc

SEQ ID NO: 128817 - RNA, 19 nt, Artificial Sequence
  Description of Artificial Sequence: Synthetic oligonucleotide
cgugucucccaccgaggga

SEQ ID NO: 128818 - RNA, 19 nt, Artificial Sequence
  Description of Artificial Sequence: Synthetic oligonucleotide
acagccugaaccagagccu

SEQ ID NO: 128819 - RNA, 19 nt, Artificial Sequence
  Description of Artificial Sequence: Synthetic oligonucleotide
ucagccaggaccucaccau

SEQ ID NO: 128820 - RNA, 19 nt, Artificial Sequence
  Description of Artificial Sequence: Synthetic oligonucleotide
uggccccuggcuccacacu

SEQ ID NO: 128821 - RNA, 19 nt, Artificial Sequence
  Description of Artificial Sequence: Synthetic oligonucleotide
ucuggcuguccuguggggu

SEQ ID NO: 128822 - RNA, 19 nt, Artificial Sequence
  Description of Artificial Sequence: Synthetic oligonucleotide
uacccccugacucuguguc

SEQ ID NO: 128823 - RNA, 19 nt, Artificial Sequence
  Description of Artificial Sequence: Synthetic oligonucleotide
ccaggggcccccucuccug

SEQ ID NO: 128824 - RNA, 19 nt, Artificial Sequence
  Description of Artificial Sequence: Synthetic oligonucleotide
ggacccaugugcaccccaa

SEQ ID NO: 128825 - RNA, 19 nt, Artificial Sequence
  Description of Artificial Sequence: Synthetic oligonucleotide
aggggccuaagucauugcu

SEQ ID NO: 128826 - RNA, 19 nt, Artificial Sequence
  Description of Artificial Sequence: Synthetic oligonucleotide
ugagccuagagcugaagga

SEQ ID NO: 128827 - RNA, 19 nt, Artificial Sequence
  Description of Artificial Sequence: Synthetic oligonucleotide
acgaucgcccggccagaga

SEQ ID NO: 128828 - RNA, 19 nt, Artificial Sequence
  Description of Artificial Sequence: Synthetic oligonucleotide
auauguggguaauggagac

SEQ ID NO: 128829 - RNA, 19 nt, Artificial Sequence
  Description of Artificial Sequence: Synthetic oligonucleotide
cgggucuguuguugccccg

SEQ ID NO: 128830 - RNA, 19 nt, Artificial Sequence
  Description of Artificial Sequence: Synthetic oligonucleotide
gggccacagcucaagacgc

SEQ ID NO: 128831 - RNA, 19 nt, Artificial Sequence
  Description of Artificial Sequence: Synthetic oligonucleotide
cuggaaaguauuauuguca

SEQ ID NO: 128832 - RNA, 19 nt, Artificial Sequence
  Description of Artificial Sequence: Synthetic oligonucleotide
accguggcaaccugaccau

SEQ ID NO: 128833 - RNA, 19 nt, Artificial Sequence
  Description of Artificial Sequence: Synthetic oligonucleotide
ugucauuccaccuggagau

SEQ ID NO: 128834 - RNA, 19 nt, Artificial Sequence
  Description of Artificial Sequence: Synthetic oligonucleotide
ucacugcucggccaguacu

SEQ ID NO: 128835 - RNA, 19 nt, Artificial Sequence
  Description of Artificial Sequence: Synthetic oligonucleotide
uauggcacuggcugcugag

SEQ ID NO: 128836 - RNA, 19 nt, Artificial Sequence
  Description of Artificial Sequence: Synthetic oligonucleotide
ggacugguggcuggaaggu

SEQ ID NO: 128837 - RNA, 19 nt, Artificial Sequence
  Description of Artificial Sequence: Synthetic oligonucleotide
ucucagcugugacuuuggc

SEQ ID NO: 128838 - RNA, 19 nt, Artificial Sequence
  Description of Artificial Sequence: Synthetic oligonucleotide
cuuaucugaucuucugccu

SEQ ID NO: 128839 - RNA, 19 nt, Artificial Sequence
  Description of Artificial Sequence: Synthetic oligonucleotide
uguguucccuugugggcau

SEQ ID NO: 128840 - RNA, 19 nt, Artificial Sequence
  Description of Artificial Sequence: Synthetic oligonucleotide
uucuucaucuucaaagagc

SEQ ID NO: 128841 - RNA, 19 nt, Artificial Sequence
  Description of Artificial Sequence: Synthetic oligonucleotide
cccugguccugaggaggaa

SEQ ID NO: 128842 - RNA, 19 nt, Artificial Sequence
  Description of Artificial Sequence: Synthetic oligonucleotide
aaagaaagcgaaugacuga

SEQ ID NO: 128843 - RNA, 19 nt, Artificial Sequence
  Description of Artificial Sequence: Synthetic oligonucleotide
accccaccaggagauucuu

SEQ ID NO: 128844 - RNA, 19 nt, Artificial Sequence
  Description of Artificial Sequence: Synthetic oligonucleotide
ucaaagugacgccuccccc

SEQ ID NO: 128845 - RNA, 19 nt, Artificial Sequence
  Description of Artificial Sequence: Synthetic oligonucleotide
caggaagcgggccccagaa

SEQ ID NO: 128846 - RNA, 19 nt, Artificial Sequence
  Description of Artificial Sequence: Synthetic oligonucleotide
accaguacgggaacgugcu

SEQ ID NO: 128847 - RNA, 19 nt, Artificial Sequence
  Description of Artificial Sequence: Synthetic oligonucleotide
ugucucuccccacacccac

SEQ ID NO: 128848 - RNA, 19 nt, Artificial Sequence
  Description of Artificial Sequence: Synthetic oligonucleotide
ccucaggccucggacgcgc

SEQ ID NO: 128849 - RNA, 19 nt, Artificial Sequence
  Description of Artificial Sequence: Synthetic oligonucleotide
cccagcguugggccgcagg

SEQ ID NO: 128850 - RNA, 19 nt, Artificial Sequence
  Description of Artificial Sequence: Synthetic oligonucleotide
gccuggggggcacugcccc

SEQ ID NO: 128851 - RNA, 19 nt, Artificial Sequence
  Description of Artificial Sequence: Synthetic oligonucleotide
cgucuuauggaaacccgag

SEQ ID NO: 128852 - RNA, 19 nt, Artificial Sequence
  Description of Artificial Sequence: Synthetic oligonucleotide
gcagcgacguccaggcgga

SEQ ID NO: 128853 - RNA, 19 nt, Artificial Sequence
  Description of Artificial Sequence: Synthetic oligonucleotide
auggagccuuggggucccg

SEQ ID NO: 128854 - RNA, 19 nt, Artificial Sequence
  Description of Artificial Sequence: Synthetic oligonucleotide
ggagcccgccgggaguggg

SEQ ID NO: 128855 - RNA, 19 nt, Artificial Sequence
  Description of Artificial Sequence: Synthetic oligonucleotide
gcccagaagaagaggaagg

SEQ ID NO: 128856 - RNA, 19 nt, Artificial Sequence
  Description of Artificial Sequence: Synthetic oligonucleotide
gggagggcuaugaggaacc

SEQ ID NO: 128857 - RNA, 19 nt, Artificial Sequence
  Description of Artificial Sequence: Synthetic oligonucleotide
cugacagugaggaggacuc

SEQ ID NO: 128858 - RNA, 19 nt, Artificial Sequence
  Description of Artificial Sequence: Synthetic oligonucleotide
ccgaguucuaugagaacga

SEQ ID NO: 128859 - RNA, 19 nt, Artificial Sequence
  Description of Artificial Sequence: Synthetic oligonucleotide
acuccaaccuugggcagga

SEQ ID NO: 128860 - RNA, 19 nt, Artificial Sequence
  Description of Artificial Sequence: Synthetic oligonucleotide
accagcucucccaggaugg

SEQ ID NO: 128861 - RNA, 19 nt, Artificial Sequence
  Description of Artificial Sequence: Synthetic oligonucleotide
gcagcggcuacgagaaccc

SEQ ID NO: 128862 - RNA, 19 nt, Artificial Sequence
  Description of Artificial Sequence: Synthetic oligonucleotide
cugaggaugagccccuggg

SEQ ID NO: 128863 - RNA, 19 nt, Artificial Sequence
  Description of Artificial Sequence: Synthetic oligonucleotide
guccugaggaugaagacuc

SEQ ID NO: 128864 - RNA, 19 nt, Artificial Sequence
  Description of Artificial Sequence: Synthetic oligonucleotide
ccuucuccaacgcugaguc

SEQ ID NO: 128865 - RNA, 19 nt, Artificial Sequence
  Description of Artificial Sequence: Synthetic oligonucleotide
cuuaugagaacgaggauga

SEQ ID NO: 128866 - RNA, 19 nt, Artificial Sequence
  Description of Artificial Sequence: Synthetic oligonucleotide
aagagcugacccagccggu

SEQ ID NO: 128867 - RNA, 19 nt, Artificial Sequence
  Description of Artificial Sequence: Synthetic oligonucleotide
ucgccaggacaauggacuu

SEQ ID NO: 128868 - RNA, 19 nt, Artificial Sequence
  Description of Artificial Sequence: Synthetic oligonucleotide
uccugagcccucauggguc

SEQ ID NO: 128869 - RNA, 19 nt, Artificial Sequence
  Description of Artificial Sequence: Synthetic oligonucleotide
cagccugggaccccagccg

SEQ ID NO: 128870 - RNA, 19 nt, Artificial Sequence
  Description of Artificial Sequence: Synthetic oligonucleotide
gggaagcaaccucccuggg

SEQ ID NO: 128871 - RNA, 19 nt, Artificial Sequence
  Description of Artificial Sequence: Synthetic oligonucleotide
ggucccaguccuaugagga

SEQ ID NO: 128872 - RNA, 19 nt, Artificial Sequence
  Description of Artificial Sequence: Synthetic oligonucleotide
auaugagaggaauccugua

SEQ ID NO: 128873 - RNA, 19 nt, Artificial Sequence
  Description of Artificial Sequence: Synthetic oligonucleotide
augcagccccccagcuccg

SEQ ID NO: 128874 - RNA, 19 nt, Artificial Sequence
  Description of Artificial Sequence: Synthetic oligonucleotide
gcuccauucggggccagcc

SEQ ID NO: 128875 - RNA, 19 nt, Artificial Sequence
  Description of Artificial Sequence: Synthetic oligonucleotide
cuggacccaaucaugagga

SEQ ID NO: 128876 - RNA, 19 nt, Artificial Sequence
  Description of Artificial Sequence: Synthetic oligonucleotide
aagaugcagacucuuauga

SEQ ID NO: 128877 - RNA, 19 nt, Artificial Sequence
  Description of Artificial Sequence: Synthetic oligonucleotide
agaacauggauaaucccga

SEQ ID NO: 128878 - RNA, 19 nt, Artificial Sequence
  Description of Artificial Sequence: Synthetic oligonucleotide
augggccagacccagccug

SEQ ID NO: 128879 - RNA, 19 nt, Artificial Sequence
  Description of Artificial Sequence: Synthetic oligonucleotide
ggggaggagggggccgcau

SEQ ID NO: 128880 - RNA, 19 nt, Artificial Sequence
  Description of Artificial Sequence: Synthetic oligonucleotide
ugggcaccuggagcaccag

SEQ ID NO: 128881 - RNA, 19 nt, Artificial Sequence
  Description of Artificial Sequence: Synthetic oligonucleotide
ggugauccucagguggcca

SEQ ID NO: 128882 - RNA, 19 nt, Artificial Sequence
  Description of Artificial Sequence: Synthetic oligonucleotide
agccuggaucuccucaagu

SEQ ID NO: 128883 - RNA, 19 nt, Artificial Sequence
  Description of Artificial Sequence: Synthetic oligonucleotide
uccccaagauucacaccug

SEQ ID NO: 128884 - RNA, 19 nt, Artificial Sequence
  Description of Artificial Sequence: Synthetic oligonucleotide
gacucugaaaucugaagac

SEQ ID NO: 128885 - RNA, 19 nt, Artificial Sequence
  Description of Artificial Sequence: Synthetic oligonucleotide
ccucgagcagaugaugcca

SEQ ID NO: 128886 - RNA, 19 nt, Artificial Sequence
  Description of Artificial Sequence: Synthetic oligonucleotide
aaccucuggagcaauguug

SEQ ID NO: 128887 - RNA, 19 nt, Artificial Sequence
  Description of Artificial Sequence: Synthetic oligonucleotide
gcuuaggaugugugcaugu

SEQ ID NO: 128888 - RNA, 19 nt, Artificial Sequence
  Description of Artificial Sequence: Synthetic oligonucleotide
uguguaagugugugugugu

SEQ ID NO: 128889 - RNA, 19 nt, Artificial Sequence
  Description of Artificial Sequence: Synthetic oligonucleotide
uguguguguguguauacau

SEQ ID NO: 128890 - RNA, 19 nt, Artificial Sequence
  Description of Artificial Sequence: Synthetic oligonucleotide
ugccagugacacuuccagu

SEQ ID NO: 128891 - RNA, 19 nt, Artificial Sequence
  Description of Artificial Sequence: Synthetic oligonucleotide
uccccuuuguauuccuuaa

SEQ ID NO: 128892 - RNA, 19 nt, Artificial Sequence
  Description of Artificial Sequence: Synthetic oligonucleotide
aauaaacucaaugagcucu

SEQ ID NO: 128893 - RNA, 25 nt, Artificial Sequence
  Description of Artificial Sequence: Synthetic oligonucleotide
aggccccugccugccccagcauccc

SEQ ID NO: 128894 - RNA, 25 nt, Artificial Sequence
  Description of Artificial Sequence: Synthetic oligonucleotide
ccugcgcgaagcugggugccccgga

SEQ ID NO: 128895 - RNA, 25 nt, Artificial Sequence
  Description of Artificial Sequence: Synthetic oligonucleotide
agagucugaccaccaugccaccucc

SEQ ID NO: 128896 - RNA, 25 nt, Artificial Sequence
  Description of Artificial Sequence: Synthetic oligonucleotide
cucgccuccucuucuuccuccucuu

SEQ ID NO: 128897 - RNA, 25 nt, Artificial Sequence
  Description of Artificial Sequence: Synthetic oligonucleotide
uccucacccccauggaagucaggcc

SEQ ID NO: 128898 - RNA, 25 nt, Artificial Sequence
  Description of Artificial Sequence: Synthetic oligonucleotide
ccgaggaaccucuaguggugaaggu

SEQ ID NO: 128899 - RNA, 25 nt, Artificial Sequence
  Description of Artificial Sequence: Synthetic oligonucleotide
uggaagagggagauaacgcugugcu

SEQ ID NO: 128900 - RNA, 25 nt, Artificial Sequence
  Description of Artificial Sequence: Synthetic oligonucleotide
ugcagugccucaaggggaccucaga

SEQ ID NO: 128901 - RNA, 25 nt, Artificial Sequence
  Description of Artificial Sequence: Synthetic oligonucleotide
auggccccacucagcagcugaccug

SEQ ID NO: 128902 - RNA, 25 nt, Artificial Sequence
  Description of Artificial Sequence: Synthetic oligonucleotide
ggucucgggaguccccgcuuaaacc

SEQ ID NO: 128903 - RNA, 25 nt, Artificial Sequence
  Description of Artificial Sequence: Synthetic oligonucleotide
ccuucuuaaaacucagccuggggcu

SEQ ID NO: 128904 - RNA, 25 nt, Artificial Sequence
  Description of Artificial Sequence: Synthetic oligonucleotide
ugccaggccugggaauccacaugag

SEQ ID NO: 128905 - RNA, 25 nt, Artificial Sequence
  Description of Artificial Sequence: Synthetic oligonucleotide
ggccccuggccaucuggcuuuucau

SEQ ID NO: 128906 - RNA, 25 nt, Artificial Sequence
  Description of Artificial Sequence: Synthetic oligonucleotide
ucuucaacgucucucaacagauggg

SEQ ID NO: 128907 - RNA, 25 nt, Artificial Sequence
  Description of Artificial Sequence: Synthetic oligonucleotide
ggggcuucuaccugugccagccggg

SEQ ID NO: 128908 - RNA, 25 nt, Artificial Sequence
  Description of Artificial Sequence: Synthetic oligonucleotide
ggccccccucugagaaggccuggca

SEQ ID NO: 128909 - RNA, 25 nt, Artificial Sequence
  Description of Artificial Sequence: Synthetic oligonucleotide
agccuggcuggacagucaaugugga

SEQ ID NO: 128910 - RNA, 25 nt, Artificial Sequence
  Description of Artificial Sequence: Synthetic oligonucleotide
agggcagcggggagcuguuccggug

SEQ ID NO: 128911 - RNA, 25 nt, Artificial Sequence
  Description of Artificial Sequence: Synthetic oligonucleotide
ggaauguuucggaccuagguggccu

SEQ ID NO: 128912 - RNA, 25 nt, Artificial Sequence
  Description of Artificial Sequence: Synthetic oligonucleotide
ugggcuguggccugaagaacagguc

SEQ ID NO: 128913 - RNA, 25 nt, Artificial Sequence
  Description of Artificial Sequence: Synthetic oligonucleotide
ccucagagggccccagcuccccuuc

SEQ ID NO: 128914 - RNA, 25 nt, Artificial Sequence
  Description of Artificial Sequence: Synthetic oligonucleotide
ccgggaagcucaugagccccaagcu

SEQ ID NO: 128915 - RNA, 25 nt, Artificial Sequence
  Description of Artificial Sequence: Synthetic oligonucleotide
uguaugugugggccaaagaccgccc

SEQ ID NO: 128916 - RNA, 25 nt, Artificial Sequence
  Description of Artificial Sequence: Synthetic oligonucleotide
cugagaucugggagggagagccucc

SEQ ID NO: 128917 - RNA, 25 nt, Artificial Sequence
  Description of Artificial Sequence: Synthetic oligonucleotide
cgugucucccaccgagggacagccu

SEQ ID NO: 128918 - RNA, 25 nt, Artificial Sequence
  Description of Artificial Sequence: Synthetic oligonucleotide
ugaaccagagccucagccaggaccu

SEQ ID NO: 128919 - RNA, 25 nt, Artificial Sequence
  Description of Artificial Sequence: Synthetic oligonucleotide
ucaccauggccccuggcuccacacu

SEQ ID NO: 128920 - RNA, 25 nt, Artificial Sequence
  Description of Artificial Sequence: Synthetic oligonucleotide
ucuggcuguccugugggguaccccc

SEQ ID NO: 128921 - RNA, 25 nt, Artificial Sequence
  Description of Artificial Sequence: Synthetic oligonucleotide
cugacucuguguccaggggcccccu

SEQ ID NO: 128922 - RNA, 25 nt, Artificial Sequence
  Description of Artificial Sequence: Synthetic oligonucleotide
ucuccuggacccaugugcaccccaa

SEQ ID NO: 128923 - RNA, 25 nt, Artificial Sequence
  Description of Artificial Sequence: Synthetic oligonucleotide
aggggccuaagucauugcugagccu

SEQ ID NO: 128924 - RNA, 25 nt, Artificial Sequence
  Description of Artificial Sequence: Synthetic oligonucleotide
uagagcugaaggacgaucgcccggc

SEQ ID NO: 128925 - RNA, 25 nt, Artificial Sequence
  Description of Artificial Sequence: Synthetic oligonucleotide
ccagagauauguggguaauggagac

SEQ ID NO: 128926 - RNA, 25 nt, Artificial Sequence
  Description of Artificial Sequence: Synthetic oligonucleotide
cgggucuguuguugccccgggccac

SEQ ID NO: 128927 - RNA, 25 nt, Artificial Sequence
  Description of Artificial Sequence: Synthetic oligonucleotide
cagcucaagacgcuggaaaguauua

SEQ ID NO: 128928 - RNA, 25 nt, Artificial Sequence
  Description of Artificial Sequence: Synthetic oligonucleotide
auugucaccguggcaaccugaccau

SEQ ID NO: 128929 - RNA, 25 nt, Artificial Sequence
  Description of Artificial Sequence: Synthetic oligonucleotide
ugucauuccaccuggagaucacugc

SEQ ID NO: 128930 - RNA, 25 nt, Artificial Sequence
  Description of Artificial Sequence: Synthetic oligonucleotide
cucggccaguacuauggcacuggcu

SEQ ID NO: 128931 - RNA, 25 nt, Artificial Sequence
  Description of Artificial Sequence: Synthetic oligonucleotide
ugcugaggacugguggcuggaaggu

SEQ ID NO: 128932 - RNA, 25 nt, Artificial Sequence
  Description of Artificial Sequence: Synthetic oligonucleotide
ucucagcugugacuuuggcuuaucu

SEQ ID NO: 128933 - RNA, 25 nt, Artificial Sequence
  Description of Artificial Sequence: Synthetic oligonucleotide
ugaucuucugccuguguucccuugu

SEQ ID NO: 128934 - RNA, 25 nt, Artificial Sequence
  Description of Artificial Sequence: Synthetic oligonucleotide
ugggcauucuucaucuucaaagagc

SEQ ID NO: 128935 - RNA, 25 nt, Artificial Sequence
  Description of Artificial Sequence: Synthetic oligonucleotide
cccugguccugaggaggaaaagaaa

SEQ ID NO: 128936 - RNA, 25 nt, Artificial Sequence
  Description of Artificial Sequence: Synthetic oligonucleotide
agcgaaugacugaccccaccaggag

SEQ ID NO: 128937 - RNA, 25 nt, Artificial Sequence
  Description of Artificial Sequence: Synthetic oligonucleotide
gauucuucaaagugacgccuccccc

SEQ ID NO: 128938 - RNA, 25 nt, Artificial Sequence
  Description of Artificial Sequence: Synthetic oligonucleotide
caggaagcgggccccagaaccagua

SEQ ID NO: 128939 - RNA, 25 nt, Artificial Sequence
  Description of Artificial Sequence: Synthetic oligonucleotide
acgggaacgugcugucucuccccac

SEQ ID NO: 128940 - RNA, 25 nt, Artificial Sequence
  Description of Artificial Sequence: Synthetic oligonucleotide
cacccaccucaggccucggacgcgc

SEQ ID NO: 128941 - RNA, 25 nt, Artificial Sequence
  Description of Artificial Sequence: Synthetic oligonucleotide
cccagcguugggccgcaggccuggg

SEQ ID NO: 128942 - RNA, 25 nt, Artificial Sequence
  Description of Artificial Sequence: Synthetic oligonucleotide
ggggcacugccccgucuuauggaaa

SEQ ID NO: 128943 - RNA, 25 nt, Artificial Sequence
  Description of Artificial Sequence: Synthetic oligonucleotide
acccgagcagcgacguccaggcgga

SEQ ID NO: 128944 - RNA, 25 nt, Artificial Sequence
  Description of Artificial Sequence: Synthetic oligonucleotide
auggagccuuggggucccggagccc

SEQ ID NO: 128945 - RNA, 25 nt, Artificial Sequence
  Description of Artificial Sequence: Synthetic oligonucleotide
cgccgggagugggcccagaagaaga

SEQ ID NO: 128946 - RNA, 25 nt, Artificial Sequence
  Description of Artificial Sequence: Synthetic oligonucleotide
aggaaggggagggcuaugaggaacc

SEQ ID NO: 128947 - RNA, 25 nt, Artificial Sequence
  Description of Artificial Sequence: Synthetic oligonucleotide
cugacagugaggaggacuccgaguu

SEQ ID NO: 128948 - RNA, 25 nt, Artificial Sequence
  Description of Artificial Sequence: Synthetic oligonucleotide
ucuaugagaacgacuccaaccuugg

SEQ ID NO: 128949 - RNA, 25 nt, Artificial Sequence
  Description of Artificial Sequence: Synthetic oligonucleotide
ggcaggaccagcucucccaggaugg

SEQ ID NO: 128950 - RNA, 25 nt, Artificial Sequence
  Description of Artificial Sequence: Synthetic oligonucleotide
gcagcggcuacgagaacccugagga

SEQ ID NO: 128951 - RNA, 25 nt, Artificial Sequence
  Description of Artificial Sequence: Synthetic oligonucleotide
augagccccuggguccugaggauga

SEQ ID NO: 128952 - RNA, 25 nt, Artificial Sequence
  Description of Artificial Sequence: Synthetic oligonucleotide
aagacuccuucuccaacgcugaguc

SEQ ID NO: 128953 - RNA, 25 nt, Artificial Sequence
  Description of Artificial Sequence: Synthetic oligonucleotide
cuuaugagaacgaggaugaagagcu

SEQ ID NO: 128954 - RNA, 25 nt, Artificial Sequence
  Description of Artificial Sequence: Synthetic oligonucleotide
ugacccagccggucgccaggacaau

SEQ ID NO: 128955 - RNA, 25 nt, Artificial Sequence
  Description of Artificial Sequence: Synthetic oligonucleotide
uggacuuccugagcccucauggguc

SEQ ID NO: 128956 - RNA, 25 nt, Artificial Sequence
  Description of Artificial Sequence: Synthetic oligonucleotide
cagccugggaccccagccgggaagc

SEQ ID NO: 128957 - RNA, 25 nt, Artificial Sequence
  Description of Artificial Sequence: Synthetic oligonucleotide
caaccucccuggggucccaguccua

SEQ ID NO: 128958 - RNA, 25 nt, Artificial Sequence
  Description of Artificial Sequence: Synthetic oligonucleotide
augaggauaugagaggaauccugua

SEQ ID NO: 128959 - RNA, 25 nt, Artificial Sequence
  Description of Artificial Sequence: Synthetic oligonucleotide
augcagccccccagcuccgcuccau

SEQ ID NO: 128960 - RNA, 25 nt, Artificial Sequence
  Description of Artificial Sequence: Synthetic oligonucleotide
uucggggccagccuggacccaauca

SEQ ID NO: 128961 - RNA, 25 nt, Artificial Sequence
  Description of Artificial Sequence: Synthetic oligonucleotide
augaggaagaugcagacucuuauga

SEQ ID NO: 128962 - RNA, 25 nt, Artificial Sequence
  Description of Artificial Sequence: Synthetic oligonucleotide
agaacauggauaaucccgaugggcc

SEQ ID NO: 128963 - RNA, 25 nt, Artificial Sequence
  Description of Artificial Sequence: Synthetic oligonucleotide
cagacccagccuggggaggaggggg

SEQ ID NO: 128964 - RNA, 25 nt, Artificial Sequence
  Description of Artificial Sequence: Synthetic oligonucleotide
gccgcaugggcaccuggagcaccag

SEQ ID NO: 128965 - RNA, 25 nt, Artificial Sequence
  Description of Artificial Sequence: Synthetic oligonucleotide
ggugauccucagguggccagccugg

SEQ ID NO: 128966 - RNA, 25 nt, Artificial Sequence
  Description of Artificial Sequence: Synthetic oligonucleotide
gaucuccucaaguccccaagauuca

SEQ ID NO: 128967 - RNA, 25 nt, Artificial Sequence
  Description of Artificial Sequence: Synthetic oligonucleotide
acaccugacucugaaaucugaagac

SEQ ID NO: 128968 - RNA, 25 nt, Artificial Sequence
  Description of Artificial Sequence: Synthetic oligonucleotide
ccucgagcagaugaugccaaccucu

SEQ ID NO: 128969 - RNA, 25 nt, Artificial Sequence
  Description of Artificial Sequence: Synthetic oligonucleotide
uggagcaauguugcuuaggaugugu

SEQ ID NO: 128970 - RNA, 25 nt, Artificial Sequence
  Description of Artificial Sequence: Synthetic oligonucleotide
ugcauguguguaagugugugugugu

SEQ ID NO: 128971 - RNA, 25 nt, Artificial Sequence
  Description of Artificial Sequence: Synthetic oligonucleotide
uguguguguguguauacaugccagu

SEQ ID NO: 128972 - RNA, 25 nt, Artificial Sequence
  Description of Artificial Sequence: Synthetic oligonucleotide
ugacacuuccaguccccuuuguauu

SEQ ID NO: 128973 - RNA, 25 nt, Artificial Sequence
  Description of Artificial Sequence: Synthetic oligonucleotide
uccuuaaauaaacucaaugagcucu

SEQ ID NO: 128974 - DNA, 21 bp, Artificial Sequence
  Description of Artificial Sequence: Synthetic oligonucleotide
  Description of Combined DNA/RNA Molecule: Synthetic oligonucleotide
cuacacaaaucagcgauuutt

SEQ ID NO: 128975 - DNA, 21 bp, Artificial Sequence
  Description of Artificial Sequence: Synthetic oligonucleotide
  Description of Combined DNA/RNA Molecule: Synthetic oligonucleotide
aaaucgcugauuuguguagtt

SEQ ID NO: 128976 - DNA, 25 bp, Artificial Sequence
  Description of Artificial Sequence: Synthetic oligonucleotide
  Description of Combined DNA/RNA Molecule: Synthetic oligonucleotide
cuacacaaaucagcgauuuccaugt

SEQ ID NO: 128977 - RNA, 27 nt, Artificial Sequence
  Description of Artificial Sequence: Synthetic oligonucleotide
acauggaaaucgcugauuuguguaguc

SEQ ID NO: 128978 - RNA, 13 nt, Artificial Sequence
  Description of Artificial Sequence: Synthetic oligonucleotide
cuacacaaaucag

SEQ ID NO: 128979 - DNA, 11 bp, Artificial Sequence
  Description of Artificial Sequence: Synthetic oligonucleotide
  Description of Combined DNA/RNA Molecule: Synthetic oligonucleotide
gauuuccaugt

SEQ ID NO: 128980 - DNA, 21 bp, Artificial Sequence
  Description of Artificial Sequence: Synthetic oligonucleotide
  Description of Combined DNA/RNA Molecule: Synthetic oligonucleotide
ggaucuuauuucuucggagtt

SEQ ID NO: 128981 - DNA, 21 bp, Artificial Sequence
  Description of Artificial Sequence: Synthetic oligonucleotide
  Description of Combined DNA/RNA Molecule: Synthetic oligonucleotide
cuccgaagaaauaagaucctt

SEQ ID NO: 128982 - RNA, 11 nt, Artificial Sequence
  Description of Artificial Sequence: Synthetic oligonucleotide
ggaucuuauuu

SEQ ID NO: 128983 - DNA, 10 bp, Artificial Sequence
  Description of Artificial Sequence: Synthetic oligonucleotide
  Description of Combined DNA/RNA Molecule: Synthetic oligonucleotide
cuucggagtt

SEQ ID NO: 128984 - RNA, 27 nt, Artificial Sequence
  Description of Artificial Sequence: Synthetic oligonucleotide
cauugucuccgaagaaauaagauccuu

SEQ ID NO: 128985 - RNA, 8 nt, Artificial Sequence
  Description of Artificial Sequence: Synthetic oligonucleotide
  modified_base (2): LNA-G
ggaucuua

SEQ ID NO: 128986 - DNA, 17 bp, Artificial Sequence
  Description of Artificial Sequence: Synthetic oligonucleotide
  Description of Combined DNA/RNA Molecule: Synthetic oligonucleotide
uuucuucggagacaatg

SEQ ID NO: 128987 - DNA, 16 bp, Artificial Sequence
  Description of Artificial Sequence: Synthetic oligonucleotide
  Description of Combined DNA/RNA Molecule: Synthetic oligonucleotide
uucuucggagacaatg

SEQ ID NO: 128988 - DNA, 15 bp, Artificial Sequence
  Description of Artificial Sequence: Synthetic oligonucleotide
  Description of Combined DNA/RNA Molecule: Synthetic oligonucleotide
ucuucggagacaatg

SEQ ID NO: 128989 - DNA, 14 bp, Artificial Sequence
  Description of Artificial Sequence: Synthetic oligonucleotide
  Description of Combined DNA/RNA Molecule: Synthetic oligonucleotide
cuucggagacaatg

SEQ ID NO: 128990 - DNA, 13 bp, Artificial Sequence
  Description of Artificial Sequence: Synthetic oligonucleotide
  Description of Combined DNA/RNA Molecule: Synthetic oligonucleotide
uucggagacaatg

SEQ ID NO: 128991 - DNA, 12 bp, Artificial Sequence
  Description of Artificial Sequence: Synthetic oligonucleotide
  Description of Combined DNA/RNA Molecule: Synthetic oligonucleotide
ucggagacaatg

SEQ ID NO: 128992 - DNA, 11 bp, Artificial Sequence
  Description of Artificial Sequence: Synthetic oligonucleotide
  Description of Combined DNA/RNA Molecule: Synthetic oligonucleotide
cggagacaatg

SEQ ID NO: 128993 - RNA, 9 nt, Artificial Sequence
  Description of Artificial Sequence: Synthetic oligonucleotide
  modified_base (2): LNA-G
ggaucuuau

SEQ ID NO: 128994 - RNA, 10 nt, Artificial Sequence
  Description of Artificial Sequence: Synthetic oligonucleotide
  modified_base (2): LNA-G
ggaucuuauu

SEQ ID NO: 128995 - RNA, 11 nt, Artificial Sequence
  Description of Artificial Sequence: Synthetic oligonucleotide
  modified_base (2): LNA-G
ggaucuuauuu

SEQ ID NO: 128996 - RNA, 12 nt, Artificial Sequence
  Description of Artificial Sequence: Synthetic oligonucleotide
  modified_base (2): LNA-G
ggaucuuauuuc

SEQ ID NO: 128997 - RNA, 8 nt, Artificial Sequence
  Description of Artificial Sequence: Synthetic oligonucleotide
  modified_base (3): LNA-A
cuacacaa

SEQ ID NO: 128998 - DNA, 13 bp, Artificial Sequence
  Description of Artificial Sequence: Synthetic oligonucleotide
  Description of Combined DNA/RNA Molecule: Synthetic oligonucleotide
  modified_base (8): LNA-A
aucagcgauuutt

SEQ ID NO: 128999 - DNA, 12 bp, Artificial Sequence
  Description of Artificial Sequence: Synthetic oligonucleotide
  Description of Combined DNA/RNA Molecule: Synthetic oligonucleotide
  modified_base (7): LNA-A
ucagcgauuutt

SEQ ID NO: 129000 - DNA, 11 bp, Artificial Sequence
  Description of Artificial Sequence: Synthetic oligonucleotide
  Description of Combined DNA/RNA Molecule: Synthetic oligonucleotide
  modified_base (6): LNA-A
cagcgauuutt

SEQ ID NO: 129001 - DNA, 10 bp, Artificial Sequence
  Description of Artificial Sequence: Synthetic oligonucleotide
  Description of Combined DNA/RNA Molecule: Synthetic oligonucleotide
  modified_base (5): LNA-A
agcgauuutt

SEQ ID NO: 129002 - DNA, 9 bp, Artificial Sequence
  Description of Artificial Sequence: Synthetic oligonucleotide
  Description of Combined DNA/RNA Molecule: Synthetic oligonucleotide
  modified_base (4): LNA-A
gcgauuutt

SEQ ID NO: 129003 - DNA, 8 bp, Artificial Sequence
  Description of Artificial Sequence: Synthetic oligonucleotide
  Description of Combined DNA/RNA Molecule: Synthetic oligonucleotide
  modified_base (3): LNA-A
cgauuutt

SEQ ID NO: 129004 - DNA, 7 bp, Artificial Sequence
  Description of Artificial Sequence: Synthetic oligonucleotide
  Description of Combined DNA/RNA Molecule: Synthetic oligonucleotide
  modified_base (2): LNA-A
gauuutt

SEQ ID NO: 129005 - RNA, 9 nt, Artificial Sequence
  Description of Artificial Sequence: Synthetic oligonucleotide
  modified_base (3): LNA-A
cuacacaaa

SEQ ID NO: 129006 - RNA, 10 nt, Artificial Sequence
  Description of Artificial Sequence: Synthetic oligonucleotide
  modified_base (3): LNA-A
cuacacaaau

SEQ ID NO: 129007 - RNA, 11 nt, Artificial Sequence
  Description of Artificial Sequence: Synthetic oligonucleotide
  modified_base (3): LNA-A
cuacacaaauc

SEQ ID NO: 129008 - RNA, 12 nt, Artificial Sequence
  Description of Artificial Sequence: Synthetic oligonucleotide
  modified_base (3): LNA-A
cuacacaaauca

SEQ ID NO: 129009 - RNA, 13 nt, Artificial Sequence
  Description of Artificial Sequence: Synthetic oligonucleotide
  modified_base (3): LNA-A
cuacacaaaucag

SEQ ID NO: 129010 - RNA, 14 nt, Artificial Sequence
  Description of Artificial Sequence: Synthetic oligonucleotide
  modified_base (3): LNA-A
cuacacaaaucagc

SEQ ID NO: 129011 - RNA, 13 nt, Artificial Sequence
  Description of Artificial Sequence: Synthetic oligonucleotide
  modified_base (2): LNA-G
ggaucuuauuucu

SEQ ID NO: 129012 - RNA, 14 nt, Artificial Sequence
  Description of Artificial Sequence: Synthetic oligonucleotide
  modified_base (2): LNA-G
ggaucuuauuucuu

SEQ ID NO: 129013 - RNA, 8 nt, Artificial Sequence
  Description of Artificial Sequence: Synthetic oligonucleotide
  modified_base (2): LNA-G
  modified_base (8): LNA-A
ggaucuua

SEQ ID NO: 129014 - RNA, 9 nt, Artificial Sequence
  Description of Artificial Sequence: Synthetic oligonucleotide
  modified_base (2): LNA-G
  modified_base (9): LNA-U
ggaucuuau

SEQ ID NO: 129015 - RNA, 10 nt, Artificial Sequence
  Description of Artificial Sequence: Synthetic oligonucleotide
  modified_base (2): LNA-G
  modified_base (10): LNA-U
ggaucuuauu

SEQ ID NO: 129016 - RNA, 11 nt, Artificial Sequence
  Description of Artificial Sequence: Synthetic oligonucleotide
  modified_base (2): LNA-G
  modified_base (11): LNA-U
ggaucuuauuu

SEQ ID NO: 129017 - RNA, 12 nt, Artificial Sequence
  Description of Artificial Sequence: Synthetic oligonucleotide
  modified_base (2): LNA-G
  modified_base (12): LNA-C
ggaucuuauuuc

SEQ ID NO: 129018 - RNA, 13 nt, Artificial Sequence
  Description of Artificial Sequence: Synthetic oligonucleotide
  modified_base (2): LNA-G
  modified_base (13): LNA-U
ggaucuuauuucu

SEQ ID NO: 129019 - RNA, 14 nt, Artificial Sequence
  Description of Artificial Sequence: Synthetic oligonucleotide
  modified_base (2): LNA-G
  modified_base (14): LNA-U
ggaucuuauuucuu

SEQ ID NO: 129020 - DNA, 13 bp, Artificial Sequence
  Description of Artificial Sequence: Synthetic oligonucleotide
  Description of Combined DNA/RNA Molecule: Synthetic oligonucleotide
  modified_base (8): LNA-G
uuucuucggagtt

SEQ ID NO: 129021 - DNA, 12 bp, Artificial Sequence
  Description of Artificial Sequence: Synthetic oligonucleotide
  Description of Combined DNA/RNA Molecule: Synthetic oligonucleotide
  modified_base (7): LNA-G
uucuucggagtt

SEQ ID NO: 129022 - DNA, 11 bp, Artificial Sequence
  Description of Artificial Sequence: Synthetic oligonucleotide
  Description of Combined DNA/RNA Molecule: Synthetic oligonucleotide
  modified_base (6): LNA-G
ucuucggagtt

SEQ ID NO: 129023 - DNA, 10 bp, Artificial Sequence
  Description of Artificial Sequence: Synthetic oligonucleotide
  Description of Combined DNA/RNA Molecule: Synthetic oligonucleotide
  modified_base (5): LNA-G
cuucggagtt

SEQ ID NO: 129024 - DNA, 9 bp, Artificial Sequence
  Description of Artificial Sequence: Synthetic oligonucleotide
  Description of Combined DNA/RNA Molecule: Synthetic oligonucleotide
  modified_base (4): LNA-G
uucggagtt

SEQ ID NO: 129025 - DNA, 8 bp, Artificial Sequence
  Description of Artificial Sequence: Synthetic oligonucleotide
  Description of Combined DNA/RNA Molecule: Synthetic oligonucleotide
  modified_base (3): LNA-G
ucggagtt

SEQ ID NO: 129026 - DNA, 7 bp, Artificial Sequence
  Description of Artificial Sequence: Synthetic oligonucleotide
  Description of Combined DNA/RNA Molecule: Synthetic oligonucleotide
  modified_base (2): LNA-G
cggagtt

SEQ ID NO: 129027 - DNA, 13 bp, Artificial Sequence
  Description of Artificial Sequence: Synthetic oligonucleotide
  Description of Combined DNA/RNA Molecule: Synthetic oligonucleotide
  modified_base (1): LNA-U
  modified_base (8): LNA-G
uuucuucggagtt

SEQ ID NO: 129028 - DNA, 12 bp, Artificial Sequence
  Description of Artificial Sequence: Synthetic oligonucleotide
  Description of Combined DNA/RNA Molecule: Synthetic oligonucleotide
  modified_base (1): LNA-U
  modified_base (7): LNA-G
uucuucggagtt

SEQ ID NO: 129029 - DNA, 11 bp, Artificial Sequence
  Description of Artificial Sequence: Synthetic oligonucleotide
  Description of Combined DNA/RNA Molecule: Synthetic oligonucleotide
  modified_base (1): LNA-U
  modified_base (6): LNA-G
ucuucggagtt

SEQ ID NO: 129030 - DNA, 10 bp, Artificial Sequence
  Description of Artificial Sequence: Synthetic oligonucleotide
  Description of Combined DNA/RNA Molecule: Synthetic oligonucleotide
  modified_base (1): LNA-C
  modified_base (5): LNA-G
cuucggagtt

SEQ ID NO: 129031 - DNA, 9 bp, Artificial Sequence
  Description of Artificial Sequence: Synthetic oligonucleotide
  Description of Combined DNA/RNA Molecule: Synthetic oligonucleotide
  modified_base (1): LNA-U
  modified_base (4): LNA-G
uucggagtt

SEQ ID NO: 129032 - DNA, 8 bp, Artificial Sequence
  Description of Artificial Sequence: Synthetic oligonucleotide
  Description of Combined DNA/RNA Molecule: Synthetic oligonucleotide
  modified_base (1): LNA-U
  modified_base (3): LNA-G
ucggagtt

SEQ ID NO: 129033 - DNA, 7 bp, Artificial Sequence
  Description of Artificial Sequence: Synthetic oligonucleotide
  Description of Combined DNA/RNA Molecule: Synthetic oligonucleotide
  modified_base (1): LNA-C
  modified_base (2): LNA-G
cggagtt

SEQ ID NO: 129034 - DNA, 21 bp, Artificial Sequence
  Description of Artificial Sequence: Synthetic oligonucleotide
  Description of Combined DNA/RNA Molecule: Synthetic oligonucleotide
  modified_base (2): LNA-G
  modified_base (16): LNA-G
ggaucuuauuucuucggagtt

SEQ ID NO: 129035 - DNA, 25 bp, Artificial Sequence
  Description of Artificial Sequence: Synthetic oligonucleotide
  Description of Combined DNA/RNA Molecule: Synthetic oligonucleotide
ggaucuuauuucuucggagacaatg

SEQ ID NO: 129036 - RNA, 25 nt, Artificial Sequence
  Description of Artificial Sequence: Synthetic oligonucleotide
guauuuugaugaggaguucacggcc

SEQ ID NO: 129037 - RNA, 25 nt, Artificial Sequence
  Description of Artificial Sequence: Synthetic oligonucleotide
ggcccagaugaucaccaucacacca

SEQ ID NO: 129038 - RNA, 25 nt, Artificial Sequence
  Description of Artificial Sequence: Synthetic oligonucleotide
gggaagaaaacuauccugcggguuu

SEQ ID NO: 129039 - RNA, 25 nt, Artificial Sequence
  Description of Artificial Sequence: Synthetic oligonucleotide
guuuuaauuuauuucauccaguuug

SEQ ID NO: 129040 - RNA, 25 nt, Artificial Sequence
  Description of Artificial Sequence: Synthetic oligonucleotide
acguagggaaauguuaaggacuucu

SEQ ID NO: 129041 - RNA, 25 nt, Artificial Sequence
  Description of Artificial Sequence: Synthetic oligonucleotide
ccaggguuuacccagugggacagag

SEQ ID NO: 129042 - RNA, 25 nt, Artificial Sequence
  Description of Artificial Sequence: Synthetic oligonucleotide
agcaagguuuaaauuuguuauugug

SEQ ID NO: 129043 - RNA, 25 nt, Artificial Sequence
  Description of Artificial Sequence: Synthetic oligonucleotide
uguauuauguuguucaaaugcauuu

SEQ ID NO: 129044 - RNA, 25 nt, Artificial Sequence
  Description of Artificial Sequence: Synthetic oligonucleotide
uuuuaaucuuugugacaggaaagcc

SEQ ID NO: 129045 - RNA, 25 nt, Artificial Sequence
  Description of Artificial Sequence: Synthetic oligonucleotide
uuaaucuuugugacaggaaagcccu

SEQ ID NO: 129046 - RNA, 25 nt, Artificial Sequence
  Description of Artificial Sequence: Synthetic oligonucleotide
gcugcuuaugucucccagcauggcc

SEQ ID NO: 129047 - RNA, 25 nt, Artificial Sequence
  Description of Artificial Sequence: Synthetic oligonucleotide
aaguguuucagaagcuucucccuga

SEQ ID NO: 129048 - RNA, 25 nt, Artificial Sequence
  Description of Artificial Sequence: Synthetic oligonucleotide
gaccaucaauaaggaagaagcccuu

SEQ ID NO: 129049 - RNA, 25 nt, Artificial Sequence
  Description of Artificial Sequence: Synthetic oligonucleotide
ccaucaauaaggaagaagcccuuca

SEQ ID NO: 129050 - RNA, 25 nt, Artificial Sequence
  Description of Artificial Sequence: Synthetic oligonucleotide
ucaauaaggaagaagcccuucagcg

SEQ ID NO: 129051 - RNA, 25 nt, Artificial Sequence
  Description of Artificial Sequence: Synthetic oligonucleotide
aauaaggaagaagcccuucagcggc

SEQ ID NO: 129052 - RNA, 25 nt, Artificial Sequence
  Description of Artificial Sequence: Synthetic oligonucleotide
aggaagaagcccuucagcggccagu

SEQ ID NO: 129053 - RNA, 25 nt, Artificial Sequence
  Description of Artificial Sequence: Synthetic oligonucleotide
gcauaacuaaaggugaaaagcuccg

SEQ ID NO: 129054 - RNA, 25 nt, Artificial Sequence
  Description of Artificial Sequence: Synthetic oligonucleotide
cauaacuaaaggugaaaagcuccgg

SEQ ID NO: 129055 - RNA, 25 nt, Artificial Sequence
  Description of Artificial Sequence: Synthetic oligonucleotide
cuacaucacgccagucaacagucug

SEQ ID NO: 129056 - RNA, 25 nt, Artificial Sequence
  Description of Artificial Sequence: Synthetic oligonucleotide
acuggauuuaagcagaguucaaaag

SEQ ID NO: 129057 - RNA, 25 nt, Artificial Sequence
  Description of Artificial Sequence: Synthetic oligonucleotide
cuggauuuaagcagaguucaaaagc

SEQ ID NO: 129058 - RNA, 25 nt, Artificial Sequence
  Description of Artificial Sequence: Synthetic oligonucleotide
gauuuaagcagaguucaaaagcccu

SEQ ID NO: 129059 - RNA, 25 nt, Artificial Sequence
  Description of Artificial Sequence: Synthetic oligonucleotide
auuuaagcagaguucaaaagcccuu

SEQ ID NO: 129060 - RNA, 25 nt, Artificial Sequence
  Description of Artificial Sequence: Synthetic oligonucleotide
uuaagcagaguucaaaagcccuuca

SEQ ID NO: 129061 - RNA, 25 nt, Artificial Sequence
  Description of Artificial Sequence: Synthetic oligonucleotide
uaagcagaguucaaaagcccuucag

SEQ ID NO: 129062 - RNA, 25 nt, Artificial Sequence
  Description of Artificial Sequence: Synthetic oligonucleotide
agcagaguucaaaagcccuucagcg

SEQ ID NO: 129063 - RNA, 25 nt, Artificial Sequence
  Description of Artificial Sequence: Synthetic oligonucleotide
cucagggucugagugaagccgcucg

SEQ ID NO: 129064 - RNA, 25 nt, Artificial Sequence
  Description of Artificial Sequence: Synthetic oligonucleotide
caagcaacuacaucacgccagucaa

SEQ ID NO: 129065 - RNA, 25 nt, Artificial Sequence
  Description of Artificial Sequence: Synthetic oligonucleotide
aucaauggcagcuucuuggugcgug

SEQ ID NO: 129066 - RNA, 25 nt, Artificial Sequence
  Description of Artificial Sequence: Synthetic oligonucleotide
uuccagcccacauuggauucaucag

SEQ ID NO: 129067 - RNA, 25 nt, Artificial Sequence
  Description of Artificial Sequence: Synthetic oligonucleotide
cagcugagaauguggaauaccuaag

SEQ ID NO: 129068 - RNA, 25 nt, Artificial Sequence
  Description of Artificial Sequence: Synthetic oligonucleotide
aacguaucuccuaauuugaggcuca

SEQ ID NO: 129069 - RNA, 25 nt, Artificial Sequence
  Description of Artificial Sequence: Synthetic oligonucleotide
ccuaaaauaauuucucuacaauugg

SEQ ID NO: 129070 - RNA, 25 nt, Artificial Sequence
  Description of Artificial Sequence: Synthetic oligonucleotide
uggaagauucagcuaguuaggagcc

SEQ ID NO: 129071 - RNA, 25 nt, Artificial Sequence
  Description of Artificial Sequence: Synthetic oligonucleotide
uuaaacucuccuagucaauauccac

SEQ ID NO: 129072 - RNA, 25 nt, Artificial Sequence
  Description of Artificial Sequence: Synthetic oligonucleotide
cagccuacaguuauguucagucaca

SEQ ID NO: 129073 - RNA, 25 nt, Artificial Sequence
  Description of Artificial Sequence: Synthetic oligonucleotide
guuauguucagucacacacacauac

SEQ ID NO: 129074 - RNA, 25 nt, Artificial Sequence
  Description of Artificial Sequence: Synthetic oligonucleotide
cacauacaaaauguuccuuuugcuu

SEQ ID NO: 129075 - RNA, 25 nt, Artificial Sequence
  Description of Artificial Sequence: Synthetic oligonucleotide
uccuuuugcuuuuaaaguaauuuuu

SEQ ID NO: 129076 - RNA, 25 nt, Artificial Sequence
  Description of Artificial Sequence: Synthetic oligonucleotide
ugaccugugaagcaacagucaaugg

SEQ ID NO: 129077 - RNA, 25 nt, Artificial Sequence
  Description of Artificial Sequence: Synthetic oligonucleotide
cuaucucacacaucgacaaaccaau

SEQ ID NO: 129078 - RNA, 25 nt, Artificial Sequence
  Description of Artificial Sequence: Synthetic oligonucleotide
uguccucaauuguacugcuaccacu

SEQ ID NO: 129079 - RNA, 25 nt, Artificial Sequence
  Description of Artificial Sequence: Synthetic oligonucleotide
aaaccguagcuggcaagcggucuua

SEQ ID NO: 129080 - RNA, 25 nt, Artificial Sequence
  Description of Artificial Sequence: Synthetic oligonucleotide
uagcuggcaagcggucuuaccggcu

SEQ ID NO: 129081 - RNA, 25 nt, Artificial Sequence
  Description of Artificial Sequence: Synthetic oligonucleotide
uuguaugguuaaaagauggguuacc

SEQ ID NO: 129082 - RNA, 25 nt, Artificial Sequence
  Description of Artificial Sequence: Synthetic oligonucleotide
ugguuaaaagauggguuaccugcga

SEQ ID NO: 129083 - RNA, 25 nt, Artificial Sequence
  Description of Artificial Sequence: Synthetic oligonucleotide
cagggaauuauacaaucuugcugag

SEQ ID NO: 129084 - RNA, 25 nt, Artificial Sequence
  Description of Artificial Sequence: Synthetic oligonucleotide
acaaucuugcugagcauaaaacagu

SEQ ID NO: 129085 - RNA, 25 nt, Artificial Sequence
  Description of Artificial Sequence: Synthetic oligonucleotide
ccaauaaugaagaguccuuuauccu

SEQ ID NO: 129086 - RNA, 25 nt, Artificial Sequence
  Description of Artificial Sequence: Synthetic oligonucleotide
acuuuggauguuccaacgcaaguug

SEQ ID NO: 129087 - RNA, 25 nt, Artificial Sequence
  Description of Artificial Sequence: Synthetic oligonucleotide
aaugcuuccacuaaacugaaaccau

SEQ ID NO: 129088 - RNA, 25 nt, Artificial Sequence
  Description of Artificial Sequence: Synthetic oligonucleotide
gagaaaguuugacuuuguuaaauau

SEQ ID NO: 129089 - RNA, 25 nt, Artificial Sequence
  Description of Artificial Sequence: Synthetic oligonucleotide
aaagaacuacuguauauuaaaaguu

SEQ ID NO: 129090 - RNA, 25 nt, Artificial Sequence
  Description of Artificial Sequence: Synthetic oligonucleotide
uuagaaauacggguuuugacuuaac

SEQ ID NO: 129091 - RNA, 25 nt, Artificial Sequence
  Description of Artificial Sequence: Synthetic oligonucleotide
aacauggguacagcaaacucagcac

SEQ ID NO: 129092 - RNA, 25 nt, Artificial Sequence
  Description of Artificial Sequence: Synthetic oligonucleotide
aaagacacagaagaugcugaccuca

SEQ ID NO: 129093 - RNA, 25 nt, Artificial Sequence
  Description of Artificial Sequence: Synthetic oligonucleotide
uaguagggagguuuauucagaucgc

SEQ ID NO: 129094 - RNA, 25 nt, Artificial Sequence
  Description of Artificial Sequence: Synthetic oligonucleotide
gccuucugcagcaggguucugggau

SEQ ID NO: 129095 - RNA, 25 nt, Artificial Sequence
  Description of Artificial Sequence: Synthetic oligonucleotide
ggucugguacauauuggaaauuaug

SEQ ID NO: 129096 - RNA, 25 nt, Artificial Sequence
  Description of Artificial Sequence: Synthetic oligonucleotide
cuaguccuuccgauggaagcacuag

SEQ ID NO: 129097 - RNA, 25 nt, Artificial Sequence
  Description of Artificial Sequence: Synthetic oligonucleotide
ccagugaauauuguuuuuaugugga

SEQ ID NO: 129098 - RNA, 25 nt, Artificial Sequence
  Description of Artificial Sequence: Synthetic oligonucleotide
augaauucaaguuggaauugguaga

SEQ ID NO: 129099 - RNA, 25 nt, Artificial Sequence
  Description of Artificial Sequence: Synthetic oligonucleotide
caggacacagauuuagacuuggaga

SEQ ID NO: 129100 - RNA, 25 nt, Artificial Sequence
  Description of Artificial Sequence: Synthetic oligonucleotide
cucaaagcacaguuacaguauucca

SEQ ID NO: 129101 - RNA, 25 nt, Artificial Sequence
  Description of Artificial Sequence: Synthetic oligonucleotide
accacugccaccacugaugaauuaa

SEQ ID NO: 129102 - RNA, 25 nt, Artificial Sequence
  Description of Artificial Sequence: Synthetic oligonucleotide
gaaacuacuagugccacaucaucac

SEQ ID NO: 129103 - RNA, 25 nt, Artificial Sequence
  Description of Artificial Sequence: Synthetic oligonucleotide
aagucggacagccucaccaaacaga

SEQ ID NO: 129104 - RNA, 25 nt, Artificial Sequence
  Description of Artificial Sequence: Synthetic oligonucleotide
gaaagcgaaaaauggaacaugaugg

SEQ ID NO: 129105 - RNA, 25 nt, Artificial Sequence
  Description of Artificial Sequence: Synthetic oligonucleotide
cccucugauuuagcauguagacugc

SEQ ID NO: 129106 - RNA, 25 nt, Artificial Sequence
  Description of Artificial Sequence: Synthetic oligonucleotide
ugagcuauuuaaggaucuauuuaug

SEQ ID NO: 129107 - RNA, 25 nt, Artificial Sequence
  Description of Artificial Sequence: Synthetic oligonucleotide
aaaaggugaaaaagcacuauuauca

SEQ ID NO: 129108 - RNA, 25 nt, Artificial Sequence
  Description of Artificial Sequence: Synthetic oligonucleotide
gaaaaagcacuauuaucaguucugc

SEQ ID NO: 129109 - RNA, 25 nt, Artificial Sequence
  Description of Artificial Sequence: Synthetic oligonucleotide
ggcugaaaagaaagauuaaaccuac

SEQ ID NO: 129110 - RNA, 25 nt, Artificial Sequence
  Description of Artificial Sequence: Synthetic oligonucleotide
uaaacccuuauaauaaaauccuucu

SEQ ID NO: 129111 - RNA, 25 nt, Artificial Sequence
  Description of Artificial Sequence: Synthetic oligonucleotide
cauacuauuagccaaugcuguagac

SEQ ID NO: 129112 - RNA, 25 nt, Artificial Sequence
  Description of Artificial Sequence: Synthetic oligonucleotide
gacagaagcauuuugauaggaauag

SEQ ID NO: 129113 - RNA, 25 nt, Artificial Sequence
  Description of Artificial Sequence: Synthetic oligonucleotide
agagcaaauaagauaauggcccuga

SEQ ID NO: 129114 - RNA, 25 nt, Artificial Sequence
  Description of Artificial Sequence: Synthetic oligonucleotide
ccaacauuuuucucuuccucaagca

SEQ ID NO: 129115 - RNA, 25 nt, Artificial Sequence
  Description of Artificial Sequence: Synthetic oligonucleotide
uuaaguaugagaaaaguucagccca

SEQ ID NO: 129116 - RNA, 25 nt, Artificial Sequence
  Description of Artificial Sequence: Synthetic oligonucleotide
caggaauaaagauggcugcugaacc

SEQ ID NO: 129117 - RNA, 25 nt, Artificial Sequence
  Description of Artificial Sequence: Synthetic oligonucleotide
aauuugaaugaccaaguucucuuca

SEQ ID NO: 129118 - RNA, 25 nt, Artificial Sequence
  Description of Artificial Sequence: Synthetic oligonucleotide
auguauaaagauagccagccuagag

SEQ ID NO: 129119 - RNA, 25 nt, Artificial Sequence
  Description of Artificial Sequence: Synthetic oligonucleotide
ggcuguaacuaucucugugaagugu

SEQ ID NO: 129120 - RNA, 25 nt, Artificial Sequence
  Description of Artificial Sequence: Synthetic oligonucleotide
ucugugaagugugagaaaauuucaa

SEQ ID NO: 129121 - RNA, 25 nt, Artificial Sequence
  Description of Artificial Sequence: Synthetic oligonucleotide
ccuuuaaggaaaugaauccuccuga

SEQ ID NO: 129122 - RNA, 25 nt, Artificial Sequence
  Description of Artificial Sequence: Synthetic oligonucleotide
aaggauacaaaaagugacaucauau

SEQ ID NO: 129123 - RNA, 25 nt, Artificial Sequence
  Description of Artificial Sequence: Synthetic oligonucleotide
agaugcaauuugaaucuucaucaua

SEQ ID NO: 129124 - RNA, 25 nt, Artificial Sequence
  Description of Artificial Sequence: Synthetic oligonucleotide
guucaaaacgaagacuagcuauuaa

SEQ ID NO: 129125 - RNA, 25 nt, Artificial Sequence
  Description of Artificial Sequence: Synthetic oligonucleotide
gugaaaccucaucucuacuaaaaau

SEQ ID NO: 129126 - RNA, 25 nt, Artificial Sequence
  Description of Artificial Sequence: Synthetic oligonucleotide
acgaaagagaagcucuaucucgccu

SEQ ID NO: 129127 - RNA, 25 nt, Artificial Sequence
  Description of Artificial Sequence: Synthetic oligonucleotide
cuccacaagcgccuucgguccaguu

SEQ ID NO: 129128 - RNA, 25 nt, Artificial Sequence
  Description of Artificial Sequence: Synthetic oligonucleotide
gagaagauuccaaagauguagccgc

SEQ ID NO: 129129 - RNA, 25 nt, Artificial Sequence
  Description of Artificial Sequence: Synthetic oligonucleotide
aaucuggauucaaugaggagacuug

SEQ ID NO: 129130 - RNA, 25 nt, Artificial Sequence
  Description of Artificial Sequence: Synthetic oligonucleotide
agaacagauuugagaguagugagga

SEQ ID NO: 129131 - RNA, 25 nt, Artificial Sequence
  Description of Artificial Sequence: Synthetic oligonucleotide
ccagagcugugcagaugaguacaaa

SEQ ID NO: 129132 - RNA, 25 nt, Artificial Sequence
  Description of Artificial Sequence: Synthetic oligonucleotide
ccucagauuguuguuguuaaugggc

SEQ ID NO: 129133 - RNA, 25 nt, Artificial Sequence
  Description of Artificial Sequence: Synthetic oligonucleotide
cuauuuuaauuauuuuuaauuuauu

SEQ ID NO: 129134 - RNA, 25 nt, Artificial Sequence
  Description of Artificial Sequence: Synthetic oligonucleotide
uuuaauuuauuaauauuuaaauaug

SEQ ID NO: 129135 - RNA, 25 nt, Artificial Sequence
  Description of Artificial Sequence: Synthetic oligonucleotide
augcaguuugaauauccuuuguuuc

SEQ ID NO: 129136 - RNA, 25 nt, Artificial Sequence
  Description of Artificial Sequence: Synthetic oligonucleotide
caugcugcuggcgucuaaguguuug

SEQ ID NO: 129137 - RNA, 25 nt, Artificial Sequence
  Description of Artificial Sequence: Synthetic oligonucleotide
agaugugcauuucaccugugacaaa

SEQ ID NO: 129138 - RNA, 25 nt, Artificial Sequence
  Description of Artificial Sequence: Synthetic oligonucleotide
ucaaaaccugugccaggcugaauua

SEQ ID NO: 129139 - RNA, 25 nt, Artificial Sequence
  Description of Artificial Sequence: Synthetic oligonucleotide
gaauguggguagucauucuuacaau

SEQ ID NO: 129140 - RNA, 25 nt, Artificial Sequence
  Description of Artificial Sequence: Synthetic oligonucleotide
auguggguagucauucuuacaauug

SEQ ID NO: 129141 - RNA, 25 nt, Artificial Sequence
  Description of Artificial Sequence: Synthetic oligonucleotide
ugaaaaugagcaucagagaguguac

SEQ ID NO: 129142 - RNA, 25 nt, Artificial Sequence
  Description of Artificial Sequence: Synthetic oligonucleotide
uugcuuuucauguagaacucagcag

SEQ ID NO: 129143 - RNA, 25 nt, Artificial Sequence
  Description of Artificial Sequence: Synthetic oligonucleotide
uguauuucuauauuuauuuucagua

SEQ ID NO: 129144 - RNA, 25 nt, Artificial Sequence
  Description of Artificial Sequence: Synthetic oligonucleotide
uuugauuaauguuucuuaaauggaa

SEQ ID NO: 129145 - RNA, 25 nt, Artificial Sequence
  Description of Artificial Sequence: Synthetic oligonucleotide
caacguguauagugccuaaaauugu

SEQ ID NO: 129146 - RNA, 25 nt, Artificial Sequence
  Description of Artificial Sequence: Synthetic oligonucleotide
cauauccuuggcuacuaacaucugg

SEQ ID NO: 129147 - RNA, 25 nt, Artificial Sequence
  Description of Artificial Sequence: Synthetic oligonucleotide
uacuaacaucuggagacugugagcu

SEQ ID NO: 129148 - RNA, 25 nt, Artificial Sequence
  Description of Artificial Sequence: Synthetic oligonucleotide
cauaaguugugugcuuuuuauuaau

SEQ ID NO: 129149 - RNA, 25 nt, Artificial Sequence
  Description of Artificial Sequence: Synthetic oligonucleotide
gcaucauuuuggcucuucuuacauu

SEQ ID NO: 129150 - RNA, 25 nt, Artificial Sequence
  Description of Artificial Sequence: Synthetic oligonucleotide
gcucuucuuacauuuguaaaaaugu

SEQ ID NO: 129151 - RNA, 25 nt, Artificial Sequence
  Description of Artificial Sequence: Synthetic oligonucleotide
agauuaggucaucuuaauucauauu

SEQ ID NO: 129152 - RNA, 25 nt, Artificial Sequence
  Description of Artificial Sequence: Synthetic oligonucleotide
auggaauugaaagaacuaaucauga

SEQ ID NO: 129153 - RNA, 25 nt, Artificial Sequence
  Description of Artificial Sequence: Synthetic oligonucleotide
cacacucauuccuucugcucuuggg

SEQ ID NO: 129154 - RNA, 25 nt, Artificial Sequence
  Description of Artificial Sequence: Synthetic oligonucleotide
uguagagguaaccaguagcuuugag

SEQ ID NO: 129155 - RNA, 25 nt, Artificial Sequence
  Description of Artificial Sequence: Synthetic oligonucleotide
caaccacaugccacguaauauuuca

SEQ ID NO: 129156 - RNA, 25 nt, Artificial Sequence
  Description of Artificial Sequence: Synthetic oligonucleotide
ucggaaacaaguuauucucuucacu

SEQ ID NO: 129157 - RNA, 25 nt, Artificial Sequence
  Description of Artificial Sequence: Synthetic oligonucleotide
acucccaauaacuaaugcuaagaaa

SEQ ID NO: 129158 - RNA, 25 nt, Artificial Sequence
  Description of Artificial Sequence: Synthetic oligonucleotide
aaugcuaagaaaugcugaaaaucaa

SEQ ID NO: 129159 - RNA, 25 nt, Artificial Sequence
  Description of Artificial Sequence: Synthetic oligonucleotide
gucuuucucuaaauaugauuacuuu

SEQ ID NO: 129160 - RNA, 25 nt, Artificial Sequence
  Description of Artificial Sequence: Synthetic oligonucleotide
ugaauuucaggcauuuuguucuaca

SEQ ID NO: 129161 - RNA, 25 nt, Artificial Sequence
  Description of Artificial Sequence: Synthetic oligonucleotide
cgauucccucucacccgggacucuc

SEQ ID NO: 129162 - RNA, 25 nt, Artificial Sequence
  Description of Artificial Sequence: Synthetic oligonucleotide
aggaaagugaaccuuuaaaguaaag

SEQ ID NO: 129163 - RNA, 25 nt, Artificial Sequence
  Description of Artificial Sequence: Synthetic oligonucleotide
gaggcugcaugcucuggaagccugg

SEQ ID NO: 129164 - RNA, 25 nt, Artificial Sequence
  Description of Artificial Sequence: Synthetic oligonucleotide
ucucugaacagaaaacaaaagagag

SEQ ID NO: 129165 - RNA, 25 nt, Artificial Sequence
  Description of Artificial Sequence: Synthetic oligonucleotide
aacuuggcuguaaucaguuaugccg

SEQ ID NO: 129166 - RNA, 25 nt, Artificial Sequence
  Description of Artificial Sequence: Synthetic oligonucleotide
agaagccaaaauuaaaagaagucca

SEQ ID NO: 129167 - RNA, 25 nt, Artificial Sequence
  Description of Artificial Sequence: Synthetic oligonucleotide
auuaaaagaaguccaggugagguua

SEQ ID NO: 129168 - RNA, 25 nt, Artificial Sequence
  Description of Artificial Sequence: Synthetic oligonucleotide
gaauccggauuaucgggaagaggac

SEQ ID NO: 129169 - RNA, 25 nt, Artificial Sequence
  Description of Artificial Sequence: Synthetic oligonucleotide
aaugugacaucaaagcaaguauugu

SEQ ID NO: 129170 - RNA, 25 nt, Artificial Sequence
  Description of Artificial Sequence: Synthetic oligonucleotide
caucaaagcaaguauuguagcacuc

SEQ ID NO: 129171 - RNA, 25 nt, Artificial Sequence
  Description of Artificial Sequence: Synthetic oligonucleotide
agagagagaaaacaaaaccacaaau

SEQ ID NO: 129172 - RNA, 25 nt, Artificial Sequence
  Description of Artificial Sequence: Synthetic oligonucleotide
ucgcuguaguauuuaagcccauaca

SEQ ID NO: 129173 - RNA, 25 nt, Artificial Sequence
  Description of Artificial Sequence: Synthetic oligonucleotide
cgcuguaguauuuaagcccauacag

SEQ ID NO: 129174 - RNA, 25 nt, Artificial Sequence
  Description of Artificial Sequence: Synthetic oligonucleotide
auuuaagcccauacagaaaccuucc

SEQ ID NO: 129175 - RNA, 25 nt, Artificial Sequence
  Description of Artificial Sequence: Synthetic oligonucleotide
auuaaaauaaacaugguauaccuac

SEQ ID NO: 129176 - RNA, 25 nt, Artificial Sequence
  Description of Artificial Sequence: Synthetic oligonucleotide
cuguucugaucggccaguuuucgga

SEQ ID NO: 129177 - RNA, 25 nt, Artificial Sequence
  Description of Artificial Sequence: Synthetic oligonucleotide
aaauaauuugaacuuuggaacaggg

SEQ ID NO: 129178 - RNA, 25 nt, Artificial Sequence
  Description of Artificial Sequence: Synthetic oligonucleotide
ugcgaccuuaauuuaacuuuccagu

SEQ ID NO: 129179 - RNA, 25 nt, Artificial Sequence
  Description of Artificial Sequence: Synthetic oligonucleotide
cugagaaagcuaaaguuugguuuug

SEQ ID NO: 129180 - RNA, 25 nt, Artificial Sequence
  Description of Artificial Sequence: Synthetic oligonucleotide
aguaaagaugcuacuucccacugua

SEQ ID NO: 129181 - RNA, 25 nt, Artificial Sequence
  Description of Artificial Sequence: Synthetic oligonucleotide
cugcuuaauugcugauaccauauga

SEQ ID NO: 129182 - RNA, 25 nt, Artificial Sequence
  Description of Artificial Sequence: Synthetic oligonucleotide
uaccauaugaaugaaacaugggcug

SEQ ID NO: 129183 - RNA, 25 nt, Artificial Sequence
  Description of Artificial Sequence: Synthetic oligonucleotide
aacuuucuuauccaacuuuuucaua

SEQ ID NO: 129184 - RNA, 25 nt, Artificial Sequence
  Description of Artificial Sequence: Synthetic oligonucleotide
ccuugcaugacaucaugaggccgga

SEQ ID NO: 129185 - RNA, 25 nt, Artificial Sequence
  Description of Artificial Sequence: Synthetic oligonucleotide
ugaauuuguauaugacugcauuugu

SEQ ID NO: 129186 - RNA, 25 nt, Artificial Sequence
  Description of Artificial Sequence: Synthetic oligonucleotide
gaauccuaguagaauguuuacuacc

SEQ ID NO: 129187 - RNA, 25 nt, Artificial Sequence
  Description of Artificial Sequence: Synthetic oligonucleotide
gaaagggaagaauuuuuugaugaaa

SEQ ID NO: 129188 - RNA, 25 nt, Artificial Sequence
  Description of Artificial Sequence: Synthetic oligonucleotide
uaucggcaugccagugugugaauuu

SEQ ID NO: 129189 - RNA, 25 nt, Artificial Sequence
  Description of Artificial Sequence: Synthetic oligonucleotide
caccucauaguagagcaauguaugu

SEQ ID NO: 129190 - RNA, 25 nt, Artificial Sequence
  Description of Artificial Sequence: Synthetic oligonucleotide
ccagaauugccaaagcacauauaua

SEQ ID NO: 129191 - RNA, 25 nt, Artificial Sequence
  Description of Artificial Sequence: Synthetic oligonucleotide
uggugaucuggguaauaguuucucc

SEQ ID NO: 129192 - RNA, 25 nt, Artificial Sequence
  Description of Artificial Sequence: Synthetic oligonucleotide
gaucuggguaauaguuucuccaaau

SEQ ID NO: 129193 - RNA, 25 nt, Artificial Sequence
  Description of Artificial Sequence: Synthetic oligonucleotide
ggaugugaugaauacuuccuagaaa

SEQ ID NO: 129194 - RNA, 25 nt, Artificial Sequence
  Description of Artificial Sequence: Synthetic oligonucleotide
cauuuccacagcuacaccauauaug

SEQ ID NO: 129195 - RNA, 25 nt, Artificial Sequence
  Description of Artificial Sequence: Synthetic oligonucleotide
acagcuacaccauauaugaauggag

SEQ ID NO: 129196 - RNA, 25 nt, Artificial Sequence
  Description of Artificial Sequence: Synthetic oligonucleotide
ugcaguucuuacacgagaagaagau

SEQ ID NO: 129197 - RNA, 25 nt, Artificial Sequence
  Description of Artificial Sequence: Synthetic oligonucleotide
acgagaagaagaucauuuacaggga

SEQ ID NO: 129198 - RNA, 25 nt, Artificial Sequence
  Description of Artificial Sequence: Synthetic oligonucleotide
cgagaagaagaucauuuacagggac

SEQ ID NO: 129199 - RNA, 25 nt, Artificial Sequence
  Description of Artificial Sequence: Synthetic oligonucleotide
aagaagaucauuuacagggaccuga

SEQ ID NO: 129200 - RNA, 25 nt, Artificial Sequence
  Description of Artificial Sequence: Synthetic oligonucleotide
agaggaagagguguuugacugcauc

SEQ ID NO: 129201 - RNA, 25 nt, Artificial Sequence
  Description of Artificial Sequence: Synthetic oligonucleotide
gaggaagagguguuugacugcaucg

SEQ ID NO: 129202 - RNA, 25 nt, Artificial Sequence
  Description of Artificial Sequence: Synthetic oligonucleotide
cuacuuugagggcgaguucacaggg

SEQ ID NO: 129203 - RNA, 25 nt, Artificial Sequence
  Description of Artificial Sequence: Synthetic oligonucleotide
agggcaucuccuggcaccucugucc

SEQ ID NO: 129204 - RNA, 25 nt, Artificial Sequence
  Description of Artificial Sequence: Synthetic oligonucleotide
ggagugauaugguuugucuuuuuaa

SEQ ID NO: 129205 - RNA, 25 nt, Artificial Sequence
  Description of Artificial Sequence: Synthetic oligonucleotide
gagugauaugguuugucuuuuuaag

SEQ ID NO: 129206 - RNA, 25 nt, Artificial Sequence
  Description of Artificial Sequence: Synthetic oligonucleotide
ugcaguaaagauccuaaagguuguc

SEQ ID NO: 129207 - RNA, 25 nt, Artificial Sequence
  Description of Artificial Sequence: Synthetic oligonucleotide
aguaaagauccuaaagguugucgac

SEQ ID NO: 129208 - RNA, 25 nt, Artificial Sequence
  Description of Artificial Sequence: Synthetic oligonucleotide
ugacaaaggacaaccuggcaauugu

SEQ ID NO: 129209 - RNA, 25 nt, Artificial Sequence
  Description of Artificial Sequence: Synthetic oligonucleotide
gcaauugugacccaguggugcgagg

SEQ ID NO: 129210 - RNA, 25 nt, Artificial Sequence
  Description of Artificial Sequence: Synthetic oligonucleotide
aacaucauccauagagacaugaaau

SEQ ID NO: 129211 - RNA, 25 nt, Artificial Sequence
  Description of Artificial Sequence: Synthetic oligonucleotide
ugaaauccaacaauauauuucucca

SEQ ID NO: 129212 - RNA, 25 nt, Artificial Sequence
  Description of Artificial Sequence: Synthetic oligonucleotide
aacaauauauuucuccaugaaggcu

SEQ ID NO: 129213 - RNA, 25 nt, Artificial Sequence
  Description of Artificial Sequence: Synthetic oligonucleotide
aacaguaaagucacgcuggaguggu

SEQ ID NO: 129214 - RNA, 25 nt, Artificial Sequence
  Description of Artificial Sequence: Synthetic oligonucleotide
ugugaagaaaguaaaggaagagagg

SEQ ID NO: 129215 - RNA, 25 nt, Artificial Sequence
  Description of Artificial Sequence: Synthetic oligonucleotide
cuuccgagccauccuugcaucgggc

SEQ ID NO: 129216 - RNA, 25 nt, Artificial Sequence
  Description of Artificial Sequence: Synthetic oligonucleotide
aauggagguugaauauccuacugug

SEQ ID NO: 129217 - RNA, 25 nt, Artificial Sequence
  Description of Artificial Sequence: Synthetic oligonucleotide
ggagguugaauauccuacuguguaa

SEQ ID NO: 129218 - RNA, 25 nt, Artificial Sequence
  Description of Artificial Sequence: Synthetic oligonucleotide
auuuugaguuuucccuuguagugua

SEQ ID NO: 129219 - RNA, 25 nt, Artificial Sequence
  Description of Artificial Sequence: Synthetic oligonucleotide
uauccuguuuguucuuuguugauug

SEQ ID NO: 129220 - RNA, 25 nt, Artificial Sequence
  Description of Artificial Sequence: Synthetic oligonucleotide
ccuguuuguucuuuguugauugaaa

SEQ ID NO: 129221 - RNA, 25 nt, Artificial Sequence
  Description of Artificial Sequence: Synthetic oligonucleotide
cucuacagccuucuuuuucuuccau

SEQ ID NO: 129222 - RNA, 25 nt, Artificial Sequence
  Description of Artificial Sequence: Synthetic oligonucleotide
ucuuccauagcuaaucuuccuucua

SEQ ID NO: 129223 - RNA, 25 nt, Artificial Sequence
  Description of Artificial Sequence: Synthetic oligonucleotide
auaaucuuccuguugaaugcuucau

SEQ ID NO: 129224 - RNA, 25 nt, Artificial Sequence
  Description of Artificial Sequence: Synthetic oligonucleotide
uaaucuuccuguugaaugcuucaug

SEQ ID NO: 129225 - RNA, 25 nt, Artificial Sequence
  Description of Artificial Sequence: Synthetic oligonucleotide
cuucaugacuugaauucuacuuuga

SEQ ID NO: 129226 - RNA, 25 nt, Artificial Sequence
  Description of Artificial Sequence: Synthetic oligonucleotide
aagagggagagaagcaacuacagac

SEQ ID NO: 129227 - RNA, 25 nt, Artificial Sequence
  Description of Artificial Sequence: Synthetic oligonucleotide
cgucuccuaccagaccaaggucaac

SEQ ID NO: 129228 - RNA, 25 nt, Artificial Sequence
  Description of Artificial Sequence: Synthetic oligonucleotide
gaucaaucggcccgacuaucucgac

SEQ ID NO: 129229 - RNA, 25 nt, Artificial Sequence
  Description of Artificial Sequence: Synthetic oligonucleotide
ggacgaacauccaaccuucccaaac

SEQ ID NO: 129230 - RNA, 25 nt, Artificial Sequence
  Description of Artificial Sequence: Synthetic oligonucleotide
agggucggaacccaagcuuagaacu

SEQ ID NO: 129231 - RNA, 25 nt, Artificial Sequence
  Description of Artificial Sequence: Synthetic oligonucleotide
ucggaacccaagcuuagaacuuuaa

SEQ ID NO: 129232 - RNA, 25 nt, Artificial Sequence
  Description of Artificial Sequence: Synthetic oligonucleotide
acccaagcuuagaacuuuaagcaac

SEQ ID NO: 129233 - RNA, 25 nt, Artificial Sequence
  Description of Artificial Sequence: Synthetic oligonucleotide
gaacuuuaagcaacaagaccaccac

SEQ ID NO: 129234 - RNA, 25 nt, Artificial Sequence
  Description of Artificial Sequence: Synthetic oligonucleotide
acuauucaguggcgagaaauaaagu

SEQ ID NO: 129235 - RNA, 25 nt, Artificial Sequence
  Description of Artificial Sequence: Synthetic oligonucleotide
cuauucaguggcgagaaauaaaguu

SEQ ID NO: 129236 - RNA, 25 nt, Artificial Sequence
  Description of Artificial Sequence: Synthetic oligonucleotide
aaacacagauaacaggaaaugaucc

SEQ ID NO: 129237 - RNA, 25 nt, Artificial Sequence
  Description of Artificial Sequence: Synthetic oligonucleotide
cuuaagaaaagagaagaaaugaaac

SEQ ID NO: 129238 - RNA, 25 nt, Artificial Sequence
  Description of Artificial Sequence: Synthetic oligonucleotide
cugaaggaguguguuuccauccucc

SEQ ID NO: 129239 - RNA, 25 nt, Artificial Sequence
  Description of Artificial Sequence: Synthetic oligonucleotide
ucaccgcgggacugaaaaucuuuga

SEQ ID NO: 129240 - RNA, 25 nt, Artificial Sequence
  Description of Artificial Sequence: Synthetic oligonucleotide
agcagaaauaagcgugccguucagg

SEQ ID NO: 129241 - RNA, 25 nt, Artificial Sequence
  Description of Artificial Sequence: Synthetic oligonucleotide
aagcgugccguucaggguccagaag

SEQ ID NO: 129242 - RNA, 25 nt, Artificial Sequence
  Description of Artificial Sequence: Synthetic oligonucleotide
agaaacagucacucaagacugcuug

SEQ ID NO: 129243 - RNA, 25 nt, Artificial Sequence
  Description of Artificial Sequence: Synthetic oligonucleotide
agaggaagaagguccaugucuuugg

SEQ ID NO: 129244 - RNA, 25 nt, Artificial Sequence
  Description of Artificial Sequence: Synthetic oligonucleotide
uguauucaaaauaugccugaaacac

SEQ ID NO: 129245 - RNA, 25 nt, Artificial Sequence
  Description of Artificial Sequence: Synthetic oligonucleotide
auuuuccucccuuucucuguaccuc

SEQ ID NO: 129246 - RNA, 25 nt, Artificial Sequence
  Description of Artificial Sequence: Synthetic oligonucleotide
caaagaaagauagagcaagacaaga

SEQ ID NO: 129247 - RNA, 25 nt, Artificial Sequence
  Description of Artificial Sequence: Synthetic oligonucleotide
aagaaagauagagcaagacaagaaa

SEQ ID NO: 129248 - RNA, 25 nt, Artificial Sequence
  Description of Artificial Sequence: Synthetic oligonucleotide
gaaagcauuuguuuguacaagaucc

SEQ ID NO: 129249 - RNA, 25 nt, Artificial Sequence
  Description of Artificial Sequence: Synthetic oligonucleotide
ugaguuaaacgaacguacuugcaga

SEQ ID NO: 129250 - RNA, 25 nt, Artificial Sequence
  Description of Artificial Sequence: Synthetic oligonucleotide
acugauacagaacgaucgauacaga

SEQ ID NO: 129251 - RNA, 25 nt, Artificial Sequence
  Description of Artificial Sequence: Synthetic oligonucleotide
auauuauauauauauaaaaauaaau

SEQ ID NO: 129252 - RNA, 25 nt, Artificial Sequence
  Description of Artificial Sequence: Synthetic oligonucleotide
auuauauauauauaaaaauaaauau

SEQ ID NO: 129253 - RNA, 25 nt, Artificial Sequence
  Description of Artificial Sequence: Synthetic oligonucleotide
ucacuggauguauuugacugcugug

SEQ ID NO: 129254 - RNA, 25 nt, Artificial Sequence
  Description of Artificial Sequence: Synthetic oligonucleotide
cagggaagaggaggagaugagagac

SEQ ID NO: 129255 - RNA, 25 nt, Artificial Sequence
  Description of Artificial Sequence: Synthetic oligonucleotide
augaucuuuuuuuugucccacuugg

SEQ ID NO: 129256 - RNA, 27 nt, Artificial Sequence
  Description of Artificial Sequence: Synthetic oligonucleotide
ggccgugaacuccucaucaaaauaccu

SEQ ID NO: 129257 - RNA, 27 nt, Artificial Sequence
  Description of Artificial Sequence: Synthetic oligonucleotide
uggugugauggugaucaucugggccgu

SEQ ID NO: 129258 - RNA, 27 nt, Artificial Sequence
  Description of Artificial Sequence: Synthetic oligonucleotide
aaacccgcaggauaguuuucuucccua

SEQ ID NO: 129259 - RNA, 27 nt, Artificial Sequence
  Description of Artificial Sequence: Synthetic oligonucleotide
caaacuggaugaaauaaauuaaaaccc

SEQ ID NO: 129260 - RNA, 27 nt, Artificial Sequence
  Description of Artificial Sequence: Synthetic oligonucleotide
agaaguccuuaacauuucccuacguga

SEQ ID NO: 129261 - RNA, 27 nt, Artificial Sequence
  Description of Artificial Sequence: Synthetic oligonucleotide
cucugucccacuggguaaacccuggcc

SEQ ID NO: 129262 - RNA, 27 nt, Artificial Sequence
  Description of Artificial Sequence: Synthetic oligonucleotide
cacaauaacaaauuuaaaccuugcucc

SEQ ID NO: 129263 - RNA, 27 nt, Artificial Sequence
  Description of Artificial Sequence: Synthetic oligonucleotide
aaaugcauuugaacaacauaauacaca

SEQ ID NO: 129264 - RNA, 27 nt, Artificial Sequence
  Description of Artificial Sequence: Synthetic oligonucleotide
ggcuuuccugucacaaagauuaaaaac

SEQ ID NO: 129265 - RNA, 27 nt, Artificial Sequence
  Description of Artificial Sequence: Synthetic oligonucleotide
agggcuuuccugucacaaagauuaaaa

SEQ ID NO: 129266 - RNA, 27 nt, Artificial Sequence
  Description of Artificial Sequence: Synthetic oligonucleotide
ggccaugcugggagacauaagcagcag

SEQ ID NO: 129267 - RNA, 27 nt, Artificial Sequence
  Description of Artificial Sequence: Synthetic oligonucleotide
ucagggagaagcuucugaaacacuucu

SEQ ID NO: 129268 - RNA, 27 nt, Artificial Sequence
  Description of Artificial Sequence: Synthetic oligonucleotide
aagggcuucuuccuuauugauggucag

SEQ ID NO: 129269 - RNA, 27 nt, Artificial Sequence
  Description of Artificial Sequence: Synthetic oligonucleotide
ugaagggcuucuuccuuauugaugguc

SEQ ID NO: 129270 - RNA, 27 nt, Artificial Sequence
  Description of Artificial Sequence: Synthetic oligonucleotide
cgcugaagggcuucuuccuuauugaug

SEQ ID NO: 129271 - RNA, 27 nt, Artificial Sequence
  Description of Artificial Sequence: Synthetic oligonucleotide
gccgcugaagggcuucuuccuuauuga

SEQ ID NO: 129272 - RNA, 27 nt, Artificial Sequence
  Description of Artificial Sequence: Synthetic oligonucleotide
acuggccgcugaagggcuucuuccuua

SEQ ID NO: 129273 - RNA, 27 nt, Artificial Sequence
  Description of Artificial Sequence: Synthetic oligonucleotide
cggagcuuuucaccuuuaguuaugcuu

SEQ ID NO: 129274 - RNA, 27 nt, Artificial Sequence
  Description of Artificial Sequence: Synthetic oligonucleotide
ccggagcuuuucaccuuuaguuaugcu

SEQ ID NO: 129275 - RNA, 27 nt, Artificial Sequence
  Description of Artificial Sequence: Synthetic oligonucleotide
cagacuguugacuggcgugauguaguu

SEQ ID NO: 129276 - RNA, 27 nt, Artificial Sequence
  Description of Artificial Sequence: Synthetic oligonucleotide
cuuuugaacucugcuuaaauccagugg

SEQ ID NO: 129277 - RNA, 27 nt, Artificial Sequence
  Description of Artificial Sequence: Synthetic oligonucleotide
gcuuuugaacucugcuuaaauccagug

SEQ ID NO: 129278 - RNA, 27 nt, Artificial Sequence
  Description of Artificial Sequence: Synthetic oligonucleotide
agggcuuuugaacucugcuuaaaucca

SEQ ID NO: 129279 - RNA, 27 nt, Artificial Sequence
  Description of Artificial Sequence: Synthetic oligonucleotide
aagggcuuuugaacucugcuuaaaucc

SEQ ID NO: 129280 - RNA, 27 nt, Artificial Sequence
  Description of Artificial Sequence: Synthetic oligonucleotide
ugaagggcuuuugaacucugcuuaaau

SEQ ID NO: 129281 - RNA, 27 nt, Artificial Sequence
  Description of Artificial Sequence: Synthetic oligonucleotide
cugaagggcuuuugaacucugcuuaaa

SEQ ID NO: 129282 - RNA, 27 nt, Artificial Sequence
  Description of Artificial Sequence: Synthetic oligonucleotide
cgcugaagggcuuuugaacucugcuua

SEQ ID NO: 129283 - RNA, 27 nt, Artificial Sequence
  Description of Artificial Sequence: Synthetic oligonucleotide
cgagcggcuucacucagacccugaggc

SEQ ID NO: 129284 - RNA, 27 nt, Artificial Sequence
  Description of Artificial Sequence: Synthetic oligonucleotide
uugacuggcgugauguaguugcuuggg

SEQ ID NO: 129285 - RNA, 27 nt, Artificial Sequence
  Description of Artificial Sequence: Synthetic oligonucleotide
cacgcaccaagaagcugccauugaucc

SEQ ID NO: 129286 - RNA, 27 nt, Artificial Sequence
  Description of Artificial Sequence: Synthetic oligonucleotide
cugaugaauccaaugugggcuggaauc

SEQ ID NO: 129287 - RNA, 27 nt, Artificial Sequence
  Description of Artificial Sequence: Synthetic oligonucleotide
cuuagguauuccacauucucagcugug

SEQ ID NO: 129288 - RNA, 27 nt, Artificial Sequence
  Description of Artificial Sequence: Synthetic oligonucleotide
ugagccucaaauuaggagauacguuuu

SEQ ID NO: 129289 - RNA, 27 nt, Artificial Sequence
  Description of Artificial Sequence: Synthetic oligonucleotide
ccaauuguagagaaauuauuuuaggaa

SEQ ID NO: 129290 - RNA, 27 nt, Artificial Sequence
  Description of Artificial Sequence: Synthetic oligonucleotide
ggcuccuaacuagcugaaucuuccaau

SEQ ID NO: 129291 - RNA, 27 nt, Artificial Sequence
  Description of Artificial Sequence: Synthetic oligonucleotide
guggauauugacuaggagaguuuaaaa

SEQ ID NO: 129292 - RNA, 27 nt, Artificial Sequence
  Description of Artificial Sequence: Synthetic oligonucleotide
ugugacugaacauaacuguaggcugaa

SEQ ID NO: 129293 - RNA, 27 nt, Artificial Sequence
  Description of Artificial Sequence: Synthetic oligonucleotide
guaugugugugugacugaacauaacug

SEQ ID NO: 129294 - RNA, 27 nt, Artificial Sequence
  Description of Artificial Sequence: Synthetic oligonucleotide
aagcaaaaggaacauuuuguaugugug

SEQ ID NO: 129295 - RNA, 27 nt, Artificial Sequence
  Description of Artificial Sequence: Synthetic oligonucleotide
aaaaauuacuuuaaaagcaaaaggaac

SEQ ID NO: 129296 - RNA, 27 nt, Artificial Sequence
  Description of Artificial Sequence: Synthetic oligonucleotide
ccauugacuguugcuucacaggucaga

SEQ ID NO: 129297 - RNA, 27 nt, Artificial Sequence
  Description of Artificial Sequence: Synthetic oligonucleotide
auugguuugucgaugugugagauaguu

SEQ ID NO: 129298 - RNA, 27 nt, Artificial Sequence
  Description of Artificial Sequence: Synthetic oligonucleotide
agugguagcaguacaauugaggacaag

SEQ ID NO: 129299 - RNA, 27 nt, Artificial Sequence
  Description of Artificial Sequence: Synthetic oligonucleotide
uaagaccgcuugccagcuacgguuuca

SEQ ID NO: 129300 - RNA, 27 nt, Artificial Sequence
  Description of Artificial Sequence: Synthetic oligonucleotide
agccgguaagaccgcuugccagcuacg

SEQ ID NO: 129301 - RNA, 27 nt, Artificial Sequence
  Description of Artificial Sequence: Synthetic oligonucleotide
gguaacccaucuuuuaaccauacaacu

SEQ ID NO: 129302 - RNA, 27 nt, Artificial Sequence
  Description of Artificial Sequence: Synthetic oligonucleotide
ucgcagguaacccaucuuuuaaccaua

SEQ ID NO: 129303 - RNA, 27 nt, Artificial Sequence
  Description of Artificial Sequence: Synthetic oligonucleotide
cucagcaagauuguauaauucccugca

SEQ ID NO: 129304 - RNA, 27 nt, Artificial Sequence
  Description of Artificial Sequence: Synthetic oligonucleotide
acuguuuuaugcucagcaagauuguau

SEQ ID NO: 129305 - RNA, 27 nt, Artificial Sequence
  Description of Artificial Sequence: Synthetic oligonucleotide
aggauaaaggacucuucauuauuggaa

SEQ ID NO: 129306 - RNA, 27 nt, Artificial Sequence
  Description of Artificial Sequence: Synthetic oligonucleotide
caacuugcguuggaacauccaaagugu

SEQ ID NO: 129307 - RNA, 27 nt, Artificial Sequence
  Description of Artificial Sequence: Synthetic oligonucleotide
augguuucaguuuaguggaagcauuua

SEQ ID NO: 129308 - RNA, 27 nt, Artificial Sequence
  Description of Artificial Sequence: Synthetic oligonucleotide
auauuuaacaaagucaaacuuucucac

SEQ ID NO: 129309 - RNA, 27 nt, Artificial Sequence
  Description of Artificial Sequence: Synthetic oligonucleotide
aacuuuuaauauacaguaguucuuuuc

SEQ ID NO: 129310 - RNA, 27 nt, Artificial Sequence
  Description of Artificial Sequence: Synthetic oligonucleotide
guuaagucaaaacccguauuucuaaag

SEQ ID NO: 129311 - RNA, 27 nt, Artificial Sequence
  Description of Artificial Sequence: Synthetic oligonucleotide
gugcugaguuugcuguacccauguuga

SEQ ID NO: 129312 - RNA, 27 nt, Artificial Sequence
  Description of Artificial Sequence: Synthetic oligonucleotide
ugaggucagcaucuucugugucuuuac

SEQ ID NO: 129313 - RNA, 27 nt, Artificial Sequence
  Description of Artificial Sequence: Synthetic oligonucleotide
gcgaucugaauaaaccucccuacuagc

SEQ ID NO: 129314 - RNA, 27 nt, Artificial Sequence
  Description of Artificial Sequence: Synthetic oligonucleotide
aucccagaacccugcugcagaaggcca

SEQ ID NO: 129315 - RNA, 27 nt, Artificial Sequence
  Description of Artificial Sequence: Synthetic oligonucleotide
cauaauuuccaauauguaccagaccuu

SEQ ID NO: 129316 - RNA, 27 nt, Artificial Sequence
  Description of Artificial Sequence: Synthetic oligonucleotide
cuagugcuuccaucggaaggacuaggu

SEQ ID NO: 129317 - RNA, 27 nt, Artificial Sequence
  Description of Artificial Sequence: Synthetic oligonucleotide
uccacauaaaaacaauauucacuggga

SEQ ID NO: 129318 - RNA, 27 nt, Artificial Sequence
  Description of Artificial Sequence: Synthetic oligonucleotide
ucuaccaauuccaacuugaauucauug

SEQ ID NO: 129319 - RNA, 27 nt, Artificial Sequence
  Description of Artificial Sequence: Synthetic oligonucleotide
ucuccaagucuaaaucuguguccugag

SEQ ID NO: 129320 - RNA, 27 nt, Artificial Sequence
  Description of Artificial Sequence: Synthetic oligonucleotide
uggaauacuguaacugugcuuugagga

SEQ ID NO: 129321 - RNA, 27 nt, Artificial Sequence
  Description of Artificial Sequence: Synthetic oligonucleotide
uuaauucaucagugguggcagugguag

SEQ ID NO: 129322 - RNA, 27 nt, Artificial Sequence
  Description of Artificial Sequence: Synthetic oligonucleotide
gugaugauguggcacuaguaguuucuu

SEQ ID NO: 129323 - RNA, 27 nt, Artificial Sequence
  Description of Artificial Sequence: Synthetic oligonucleotide
ucuguuuggugaggcuguccgacuuug

SEQ ID NO: 129324 - RNA, 27 nt, Artificial Sequence
  Description of Artificial Sequence: Synthetic oligonucleotide
ccaucauguuccauuuuucgcuuucuc

SEQ ID NO: 129325 - RNA, 27 nt, Artificial Sequence
  Description of Artificial Sequence: Synthetic oligonucleotide
gcagucuacaugcuaaaucagagggua

SEQ ID NO: 129326 - RNA, 27 nt, Artificial Sequence
  Description of Artificial Sequence: Synthetic oligonucleotide
cauaaauagauccuuaaauagcucaaa

SEQ ID NO: 129327 - RNA, 27 nt, Artificial Sequence
  Description of Artificial Sequence: Synthetic oligonucleotide
ugauaauagugcuuuuucaccuuuuuc

SEQ ID NO: 129328 - RNA, 27 nt, Artificial Sequence
  Description of Artificial Sequence: Synthetic oligonucleotide
gcagaacugauaauagugcuuuuucac

SEQ ID NO: 129329 - RNA, 27 nt, Artificial Sequence
  Description of Artificial Sequence: Synthetic oligonucleotide
guagguuuaaucuuucuuuucagccau

SEQ ID NO: 129330 - RNA, 27 nt, Artificial Sequence
  Description of Artificial Sequence: Synthetic oligonucleotide
agaaggauuuuauuauaaggguuuaau

SEQ ID NO: 129331 - RNA, 27 nt, Artificial Sequence
  Description of Artificial Sequence: Synthetic oligonucleotide
gucuacagcauuggcuaauaguaugaa

SEQ ID NO: 129332 - RNA, 27 nt, Artificial Sequence
  Description of Artificial Sequence: Synthetic oligonucleotide
cuauuccuaucaaaaugcuucugucua

SEQ ID NO: 129333 - RNA, 27 nt, Artificial Sequence
  Description of Artificial Sequence: Synthetic oligonucleotide
ucagggccauuaucuuauuugcucuau

SEQ ID NO: 129334 - RNA, 27 nt, Artificial Sequence
  Description of Artificial Sequence: Synthetic oligonucleotide
ugcuugaggaagagaaaaauguugguc

SEQ ID NO: 129335 - RNA, 27 nt, Artificial Sequence
  Description of Artificial Sequence: Synthetic oligonucleotide
ugggcugaacuuuucucauacuuaaag

SEQ ID NO: 129336 - RNA, 27 nt, Artificial Sequence
  Description of Artificial Sequence: Synthetic oligonucleotide
gguucagcagccaucuuuauuccugcg

SEQ ID NO: 129337 - RNA, 27 nt, Artificial Sequence
  Description of Artificial Sequence: Synthetic oligonucleotide
ugaagagaacuuggucauucaaauuuc

SEQ ID NO: 129338 - RNA, 27 nt, Artificial Sequence
  Description of Artificial Sequence: Synthetic oligonucleotide
cucuaggcuggcuaucuuuauacauac

SEQ ID NO: 129339 - RNA, 27 nt, Artificial Sequence
  Description of Artificial Sequence: Synthetic oligonucleotide
acacuucacagagauaguuacagccau

SEQ ID NO: 129340 - RNA, 27 nt, Artificial Sequence
  Description of Artificial Sequence: Synthetic oligonucleotide
uugaaauuuucucacacuucacagaga

SEQ ID NO: 129341 - RNA, 27 nt, Artificial Sequence
  Description of Artificial Sequence: Synthetic oligonucleotide
ucaggaggauucauuuccuuaaaggaa

SEQ ID NO: 129342 - RNA, 27 nt, Artificial Sequence
  Description of Artificial Sequence: Synthetic oligonucleotide
auaugaugucacuuuuuguauccuuga

SEQ ID NO: 129343 - RNA, 27 nt, Artificial Sequence
  Description of Artificial Sequence: Synthetic oligonucleotide
uaugaugaagauucaaauugcaucuua

SEQ ID NO: 129344 - RNA, 27 nt, Artificial Sequence
  Description of Artificial Sequence: Synthetic oligonucleotide
uuaauagcuagucuucguuuugaacag

SEQ ID NO: 129345 - RNA, 27 nt, Artificial Sequence
  Description of Artificial Sequence: Synthetic oligonucleotide
auuuuuaguagagaugagguuucacca

SEQ ID NO: 129346 - RNA, 27 nt, Artificial Sequence
  Description of Artificial Sequence: Synthetic oligonucleotide
aggcgagauagagcuucucuuucguuc

SEQ ID NO: 129347 - RNA, 27 nt, Artificial Sequence
  Description of Artificial Sequence: Synthetic oligonucleotide
aacuggaccgaaggcgcuuguggagaa

SEQ ID NO: 129348 - RNA, 27 nt, Artificial Sequence
  Description of Artificial Sequence: Synthetic oligonucleotide
gcggcuacaucuuuggaaucuucuccu

SEQ ID NO: 129349 - RNA, 27 nt, Artificial Sequence
  Description of Artificial Sequence: Synthetic oligonucleotide
caagucuccucauugaauccagauugg

SEQ ID NO: 129350 - RNA, 27 nt, Artificial Sequence
  Description of Artificial Sequence: Synthetic oligonucleotide
uccucacuacucucaaaucuguucugg

SEQ ID NO: 129351 - RNA, 27 nt, Artificial Sequence
  Description of Artificial Sequence: Synthetic oligonucleotide
uuuguacucaucugcacagcucuggcu

SEQ ID NO: 129352 - RNA, 27 nt, Artificial Sequence
  Description of Artificial Sequence: Synthetic oligonucleotide
gcccauuaacaacaacaaucugaggug

SEQ ID NO: 129353 - RNA, 27 nt, Artificial Sequence
  Description of Artificial Sequence: Synthetic oligonucleotide
aauaaauuaaaaauaauuaaaauagug

SEQ ID NO: 129354 - RNA, 27 nt, Artificial Sequence
  Description of Artificial Sequence: Synthetic oligonucleotide
cauauuuaaauauuaauaaauuaaaaa

SEQ ID NO: 129355 - RNA, 27 nt, Artificial Sequence
  Description of Artificial Sequence: Synthetic oligonucleotide
gaaacaaaggauauucaaacugcauag

SEQ ID NO: 129356 - RNA, 27 nt, Artificial Sequence
  Description of Artificial Sequence: Synthetic oligonucleotide
caaacacuuagacgccagcagcauggg

SEQ ID NO: 129357 - RNA, 27 nt, Artificial Sequence
  Description of Artificial Sequence: Synthetic oligonucleotide
uuugucacaggugaaaugcacaucuga

SEQ ID NO: 129358 - RNA, 27 nt, Artificial Sequence
  Description of Artificial Sequence: Synthetic oligonucleotide
uaauucagccuggcacagguuuugauc

SEQ ID NO: 129359 - RNA, 27 nt, Artificial Sequence
  Description of Artificial Sequence: Synthetic oligonucleotide
auuguaagaaugacuacccacauucac

SEQ ID NO: 129360 - RNA, 27 nt, Artificial Sequence
  Description of Artificial Sequence: Synthetic oligonucleotide
caauuguaagaaugacuacccacauuc

SEQ ID NO: 129361 - RNA, 27 nt, Artificial Sequence
  Description of Artificial Sequence: Synthetic oligonucleotide
guacacucucugaugcucauuuucaua

SEQ ID NO: 129362 - RNA, 27 nt, Artificial Sequence
  Description of Artificial Sequence: Synthetic oligonucleotide
cugcugaguucuacaugaaaagcaaau

SEQ ID NO: 129363 - RNA, 27 nt, Artificial Sequence
  Description of Artificial Sequence: Synthetic oligonucleotide
uacugaaaauaaauauagaaauacaac

SEQ ID NO: 129364 - RNA, 27 nt, Artificial Sequence
  Description of Artificial Sequence: Synthetic oligonucleotide
uuccauuuaagaaacauuaaucaaaac

SEQ ID NO: 129365 - RNA, 27 nt, Artificial Sequence
  Description of Artificial Sequence: Synthetic oligonucleotide
acaauuuuaggcacuauacacguuguu

SEQ ID NO: 129366 - RNA, 27 nt, Artificial Sequence
  Description of Artificial Sequence: Synthetic oligonucleotide
ccagauguuaguagccaaggauauggu

SEQ ID NO: 129367 - RNA, 27 nt, Artificial Sequence
  Description of Artificial Sequence: Synthetic oligonucleotide
agcucacagucuccagauguuaguagc

SEQ ID NO: 129368 - RNA, 27 nt, Artificial Sequence
  Description of Artificial Sequence: Synthetic oligonucleotide
auuaauaaaaagcacacaacuuauggc

SEQ ID NO: 129369 - RNA, 27 nt, Artificial Sequence
  Description of Artificial Sequence: Synthetic oligonucleotide
aauguaagaagagccaaaaugaugcau

SEQ ID NO: 129370 - RNA, 27 nt, Artificial Sequence
  Description of Artificial Sequence: Synthetic oligonucleotide
acauuuuuacaaauguaagaagagcca

SEQ ID NO: 129371 - RNA, 27 nt, Artificial Sequence
  Description of Artificial Sequence: Synthetic oligonucleotide
aauaugaauuaagaugaccuaaucugu

SEQ ID NO: 129372 - RNA, 27 nt, Artificial Sequence
  Description of Artificial Sequence: Synthetic oligonucleotide
ucaugauuaguucuuucaauuccaucc

SEQ ID NO: 129373 - RNA, 27 nt, Artificial Sequence
  Description of Artificial Sequence: Synthetic oligonucleotide
cccaagagcagaaggaaugagugugca

SEQ ID NO: 129374 - RNA, 27 nt, Artificial Sequence
  Description of Artificial Sequence: Synthetic oligonucleotide
cucaaagcuacugguuaccucuacacc

SEQ ID NO: 129375 - RNA, 27 nt, Artificial Sequence
  Description of Artificial Sequence: Synthetic oligonucleotide
ugaaauauuacguggcaugugguuggg

SEQ ID NO: 129376 - RNA, 27 nt, Artificial Sequence
  Description of Artificial Sequence: Synthetic oligonucleotide
agugaagagaauaacuuguuuccgaag

SEQ ID NO: 129377 - RNA, 27 nt, Artificial Sequence
  Description of Artificial Sequence: Synthetic oligonucleotide
uuucuuagcauuaguuauugggaguga

SEQ ID NO: 129378 - RNA, 27 nt, Artificial Sequence
  Description of Artificial Sequence: Synthetic oligonucleotide
uugauuuucagcauuucuuagcauuag

SEQ ID NO: 129379 - RNA, 27 nt, Artificial Sequence
  Description of Artificial Sequence: Synthetic oligonucleotide
aaaguaaucauauuuagagaaagacag

SEQ ID NO: 129380 - RNA, 27 nt, Artificial Sequence
  Description of Artificial Sequence: Synthetic oligonucleotide
uguagaacaaaaugccugaaauucagc

SEQ ID NO: 129381 - RNA, 27 nt, Artificial Sequence
  Description of Artificial Sequence: Synthetic oligonucleotide
gagagucccgggugagagggaaucgcc

SEQ ID NO: 129382 - RNA, 27 nt, Artificial Sequence
  Description of Artificial Sequence: Synthetic oligonucleotide
cuuuacuuuaaagguucacuuuccuug

SEQ ID NO: 129383 - RNA, 27 nt, Artificial Sequence
  Description of Artificial Sequence: Synthetic oligonucleotide
ccaggcuuccagagcaugcagccuccu

SEQ ID NO: 129384 - RNA, 27 nt, Artificial Sequence
  Description of Artificial Sequence: Synthetic oligonucleotide
cucucuuuuguuuucuguucagagaaa

SEQ ID NO: 129385 - RNA, 27 nt, Artificial Sequence
  Description of Artificial Sequence: Synthetic oligonucleotide
cggcauaacugauuacagccaaguuca

SEQ ID NO: 129386 - RNA, 27 nt, Artificial Sequence
  Description of Artificial Sequence: Synthetic oligonucleotide
uggacuucuuuuaauuuuggcuucuuc

SEQ ID NO: 129387 - RNA, 27 nt, Artificial Sequence
  Description of Artificial Sequence: Synthetic oligonucleotide
uaaccucaccuggacuucuuuuaauuu

SEQ ID NO: 129388 - RNA, 27 nt, Artificial Sequence
  Description of Artificial Sequence: Synthetic oligonucleotide
guccucuucccgauaauccggauucag

SEQ ID NO: 129389 - RNA, 27 nt, Artificial Sequence
  Description of Artificial Sequence: Synthetic oligonucleotide
acaauacuugcuuugaugucacauuaa

SEQ ID NO: 129390 - RNA, 27 nt, Artificial Sequence
  Description of Artificial Sequence: Synthetic oligonucleotide
gagugcuacaauacuugcuuugauguc

SEQ ID NO: 129391 - RNA, 27 nt, Artificial Sequence
  Description of Artificial Sequence: Synthetic oligonucleotide
auuugugguuuuguuuucucucucucu

SEQ ID NO: 129392 - RNA, 27 nt, Artificial Sequence
  Description of Artificial Sequence: Synthetic oligonucleotide
uguaugggcuuaaauacuacagcgagg

SEQ ID NO: 129393 - RNA, 27 nt, Artificial Sequence
  Description of Artificial Sequence: Synthetic oligonucleotide
cuguaugggcuuaaauacuacagcgag

SEQ ID NO: 129394 - RNA, 27 nt, Artificial Sequence
  Description of Artificial Sequence: Synthetic oligonucleotide
ggaagguuucuguaugggcuuaaauac

SEQ ID NO: 129395 - RNA, 27 nt, Artificial Sequence
  Description of Artificial Sequence: Synthetic oligonucleotide
guagguauaccauguuuauuuuaauac

SEQ ID NO: 129396 - RNA, 27 nt, Artificial Sequence
  Description of Artificial Sequence: Synthetic oligonucleotide
uccgaaaacuggccgaucagaacagcc

SEQ ID NO: 129397 - RNA, 27 nt, Artificial Sequence
  Description of Artificial Sequence: Synthetic oligonucleotide
cccuguuccaaaguucaaauuauuugu

SEQ ID NO: 129398 - RNA, 27 nt, Artificial Sequence
  Description of Artificial Sequence: Synthetic oligonucleotide
acuggaaaguuaaauuaaggucgcaau

SEQ ID NO: 129399 - RNA, 27 nt, Artificial Sequence
  Description of Artificial Sequence: Synthetic oligonucleotide
caaaaccaaacuuuagcuuucucagcc

SEQ ID NO: 129400 - RNA, 27 nt, Artificial Sequence
  Description of Artificial Sequence: Synthetic oligonucleotide
uacagugggaaguagcaucuuuacuuu

SEQ ID NO: 129401 - RNA, 27 nt, Artificial Sequence
  Description of Artificial Sequence: Synthetic oligonucleotide
ucauaugguaucagcaauuaagcagua

SEQ ID NO: 129402 - RNA, 27 nt, Artificial Sequence
  Description of Artificial Sequence: Synthetic oligonucleotide
cagcccauguuucauucauaugguauc

SEQ ID NO: 129403 - RNA, 27 nt, Artificial Sequence
  Description of Artificial Sequence: Synthetic oligonucleotide
uaugaaaaaguuggauaagaaaguugg

SEQ ID NO: 129404 - RNA, 27 nt, Artificial Sequence
  Description of Artificial Sequence: Synthetic oligonucleotide
uccggccucaugaugucaugcaaggcu

SEQ ID NO: 129405 - RNA, 27 nt, Artificial Sequence
  Description of Artificial Sequence: Synthetic oligonucleotide
acaaaugcagucauauacaaauucagg

SEQ ID NO: 129406 - RNA, 27 nt, Artificial Sequence
  Description of Artificial Sequence: Synthetic oligonucleotide
gguaguaaacauucuacuaggauucuu

SEQ ID NO: 129407 - RNA, 27 nt, Artificial Sequence
  Description of Artificial Sequence: Synthetic oligonucleotide
uuucaucaaaaaauucuucccuuucug

SEQ ID NO: 129408 - RNA, 27 nt, Artificial Sequence
  Description of Artificial Sequence: Synthetic oligonucleotide
aaauucacacacuggcaugccgauagc

SEQ ID NO: 129409 - RNA, 27 nt, Artificial Sequence
  Description of Artificial Sequence: Synthetic oligonucleotide
acauacauugcucuacuaugaggugaa

SEQ ID NO: 129410 - RNA, 27 nt, Artificial Sequence
  Description of Artificial Sequence: Synthetic oligonucleotide
uauauaugugcuuuggcaauucuggug

SEQ ID NO: 129411 - RNA, 27 nt, Artificial Sequence
  Description of Artificial Sequence: Synthetic oligonucleotide
ggagaaacuauuacccagaucaccacu

SEQ ID NO: 129412 - RNA, 27 nt, Artificial Sequence
  Description of Artificial Sequence: Synthetic oligonucleotide
auuuggagaaacuauuacccagaucac

SEQ ID NO: 129413 - RNA, 27 nt, Artificial Sequence
  Description of Artificial Sequence: Synthetic oligonucleotide
uuucuaggaaguauucaucacauccac

SEQ ID NO: 129414 - RNA, 27 nt, Artificial Sequence
  Description of Artificial Sequence: Synthetic oligonucleotide
cauauaugguguagcuguggaaaugcg

SEQ ID NO: 129415 - RNA, 27 nt, Artificial Sequence
  Description of Artificial Sequence: Synthetic oligonucleotide
cuccauucauauaugguguagcugugg

SEQ ID NO: 129416 - RNA, 27 nt, Artificial Sequence
  Description of Artificial Sequence: Synthetic oligonucleotide
aucuucuucucguguaagaacugcagc

SEQ ID NO: 129417 - RNA, 27 nt, Artificial Sequence
  Description of Artificial Sequence: Synthetic oligonucleotide
ucccuguaaaugaucuucuucucgugu

SEQ ID NO: 129418 - RNA, 27 nt, Artificial Sequence
  Description of Artificial Sequence: Synthetic oligonucleotide
gucccuguaaaugaucuucuucucgug

SEQ ID NO: 129419 - RNA, 27 nt, Artificial Sequence
  Description of Artificial Sequence: Synthetic oligonucleotide
ucaggucccuguaaaugaucuucuucu

SEQ ID NO: 129420 - RNA, 27 nt, Artificial Sequence
  Description of Artificial Sequence: Synthetic oligonucleotide
gaugcagucaaacaccucuuccucugu

SEQ ID NO: 129421 - RNA, 27 nt, Artificial Sequence
  Description of Artificial Sequence: Synthetic oligonucleotide
cgaugcagucaaacaccucuuccucug

SEQ ID NO: 129422 - RNA, 27 nt, Artificial Sequence
  Description of Artificial Sequence: Synthetic oligonucleotide
cccugugaacucgcccucaaaguagcg

SEQ ID NO: 129423 - RNA, 27 nt, Artificial Sequence
  Description of Artificial Sequence: Synthetic oligonucleotide
ggacagaggugccaggagaugcccuca

SEQ ID NO: 129424 - RNA, 27 nt, Artificial Sequence
  Description of Artificial Sequence: Synthetic oligonucleotide
uuaaaaagacaaaccauaucacuccuu

SEQ ID NO: 129425 - RNA, 27 nt, Artificial Sequence
  Description of Artificial Sequence: Synthetic oligonucleotide
cuuaaaaagacaaaccauaucacuccu

SEQ ID NO: 129426 - RNA, 27 nt, Artificial Sequence
  Description of Artificial Sequence: Synthetic oligonucleotide
gacaaccuuuaggaucuuuacugcaac

SEQ ID NO: 129427 - RNA, 27 nt, Artificial Sequence
  Description of Artificial Sequence: Synthetic oligonucleotide
gucgacaaccuuuaggaucuuuacugc

SEQ ID NO: 129428 - RNA, 27 nt, Artificial Sequence
  Description of Artificial Sequence: Synthetic oligonucleotide
acaauugccagguuguccuuugucaug

SEQ ID NO: 129429 - RNA, 27 nt, Artificial Sequence
  Description of Artificial Sequence: Synthetic oligonucleotide
ccucgcaccacugggucacaauugcca

SEQ ID NO: 129430 - RNA, 27 nt, Artificial Sequence
  Description of Artificial Sequence: Synthetic oligonucleotide
auuucaugucucuauggaugauguucu

SEQ ID NO: 129431 - RNA, 27 nt, Artificial Sequence
  Description of Artificial Sequence: Synthetic oligonucleotide
uggagaaauauauuguuggauuucaug

SEQ ID NO: 129432 - RNA, 27 nt, Artificial Sequence
  Description of Artificial Sequence: Synthetic oligonucleotide
agccuucauggagaaauauauuguugg

SEQ ID NO: 129433 - RNA, 27 nt, Artificial Sequence
  Description of Artificial Sequence: Synthetic oligonucleotide
accacuccagcgugacuuuacuguugc

SEQ ID NO: 129434 - RNA, 27 nt, Artificial Sequence
  Description of Artificial Sequence: Synthetic oligonucleotide
ccucucuuccuuuacuuucuucacaca

SEQ ID NO: 129435 - RNA, 27 nt, Artificial Sequence
  Description of Artificial Sequence: Synthetic oligonucleotide
gcccgaugcaaggauggcucggaagcg

SEQ ID NO: 129436 - RNA, 27 nt, Artificial Sequence
  Description of Artificial Sequence: Synthetic oligonucleotide
cacaguaggauauucaaccuccauuuc

SEQ ID NO: 129437 - RNA, 27 nt, Artificial Sequence
  Description of Artificial Sequence: Synthetic oligonucleotide
uuacacaguaggauauucaaccuccau

SEQ ID NO: 129438 - RNA, 27 nt, Artificial Sequence
  Description of Artificial Sequence: Synthetic oligonucleotide
uacacuacaagggaaaacucaaaaucu

SEQ ID NO: 129439 - RNA, 27 nt, Artificial Sequence
  Description of Artificial Sequence: Synthetic oligonucleotide
caaucaacaaagaacaaacaggauaaa

SEQ ID NO: 129440 - RNA, 27 nt, Artificial Sequence
  Description of Artificial Sequence: Synthetic oligonucleotide
uuucaaucaacaaagaacaaacaggau

SEQ ID NO: 129441 - RNA, 27 nt, Artificial Sequence
  Description of Artificial Sequence: Synthetic oligonucleotide
auggaagaaaaagaaggcuguagagaa

SEQ ID NO: 129442 - RNA, 27 nt, Artificial Sequence
  Description of Artificial Sequence: Synthetic oligonucleotide
uagaaggaagauuagcuauggaagaaa

SEQ ID NO: 129443 - RNA, 27 nt, Artificial Sequence
  Description of Artificial Sequence: Synthetic oligonucleotide
augaagcauucaacaggaagauuauuu

SEQ ID NO: 129444 - RNA, 27 nt, Artificial Sequence
  Description of Artificial Sequence: Synthetic oligonucleotide
caugaagcauucaacaggaagauuauu

SEQ ID NO: 129445 - RNA, 27 nt, Artificial Sequence
  Description of Artificial Sequence: Synthetic oligonucleotide
ucaaaguagaauucaagucaugaagca

SEQ ID NO: 129446 - RNA, 27 nt, Artificial Sequence
  Description of Artificial Sequence: Synthetic oligonucleotide
gucuguaguugcuucucucccucuuag

SEQ ID NO: 129447 - RNA, 27 nt, Artificial Sequence
  Description of Artificial Sequence: Synthetic oligonucleotide
guugaccuuggucugguaggagacggc

SEQ ID NO: 129448 - RNA, 27 nt, Artificial Sequence
  Description of Artificial Sequence: Synthetic oligonucleotide
gucgagauagucgggccgauugaucuc

SEQ ID NO: 129449 - RNA, 27 nt, Artificial Sequence
  Description of Artificial Sequence: Synthetic oligonucleotide
guuugggaagguuggauguucguccuc

SEQ ID NO: 129450 - RNA, 27 nt, Artificial Sequence
  Description of Artificial Sequence: Synthetic oligonucleotide
aguucuaagcuuggguuccgacccuaa

SEQ ID NO: 129451 - RNA, 27 nt, Artificial Sequence
  Description of Artificial Sequence: Synthetic oligonucleotide
uuaaaguucuaagcuuggguuccgacc

SEQ ID NO: 129452 - RNA, 27 nt, Artificial Sequence
  Description of Artificial Sequence: Synthetic oligonucleotide
guugcuuaaaguucuaagcuuggguuc

SEQ ID NO: 129453 - RNA, 27 nt, Artificial Sequence
  Description of Artificial Sequence: Synthetic oligonucleotide
gugguggucuuguugcuuaaaguucua

SEQ ID NO: 129454 - RNA, 27 nt, Artificial Sequence
  Description of Artificial Sequence: Synthetic oligonucleotide
acuuuauuucucgccacugaauaguag

SEQ ID NO: 129455 - RNA, 27 nt, Artificial Sequence
  Description of Artificial Sequence: Synthetic oligonucleotide
aacuuuauuucucgccacugaauagua

SEQ ID NO: 129456 - RNA, 27 nt, Artificial Sequence
  Description of Artificial Sequence: Synthetic oligonucleotide
ggaucauuuccuguuaucuguguuugu

SEQ ID NO: 129457 - RNA, 27 nt, Artificial Sequence
  Description of Artificial Sequence: Synthetic oligonucleotide
guuucauuucuucucuuuucuuaaggc

SEQ ID NO: 129458 - RNA, 27 nt, Artificial Sequence
  Description of Artificial Sequence: Synthetic oligonucleotide
ggaggauggaaacacacuccuucaguu

SEQ ID NO: 129459 - RNA, 27 nt, Artificial Sequence
  Description of Artificial Sequence: Synthetic oligonucleotide
ucaaagauuuucagucccgcggugaca

SEQ ID NO: 129460 - RNA, 27 nt, Artificial Sequence
  Description of Artificial Sequence: Synthetic oligonucleotide
ccugaacggcacgcuuauuucugcugu

SEQ ID NO: 129461 - RNA, 27 nt, Artificial Sequence
  Description of Artificial Sequence: Synthetic oligonucleotide
cuucuggacccugaacggcacgcuuau

SEQ ID NO: 129462 - RNA, 27 nt, Artificial Sequence
  Description of Artificial Sequence: Synthetic oligonucleotide
caagcagucuugagugacuguuucuuc

SEQ ID NO: 129463 - RNA, 27 nt, Artificial Sequence
  Description of Artificial Sequence: Synthetic oligonucleotide
ccaaagacauggaccuucuuccucuga

SEQ ID NO: 129464 - RNA, 27 nt, Artificial Sequence
  Description of Artificial Sequence: Synthetic oligonucleotide
guguuucaggcauauuuugaauacauc

SEQ ID NO: 129465 - RNA, 27 nt, Artificial Sequence
  Description of Artificial Sequence: Synthetic oligonucleotide
gagguacagagaaagggaggaaaauag

SEQ ID NO: 129466 - RNA, 27 nt, Artificial Sequence
  Description of Artificial Sequence: Synthetic oligonucleotide
ucuugucuugcucuaucuuucuuuggu

SEQ ID NO: 129467 - RNA, 27 nt, Artificial Sequence
  Description of Artificial Sequence: Synthetic oligonucleotide
uuucuugucuugcucuaucuuucuuug

SEQ ID NO: 129468 - RNA, 27 nt, Artificial Sequence
  Description of Artificial Sequence: Synthetic oligonucleotide
ggaucuuguacaaacaaaugcuuucuc

SEQ ID NO: 129469 - RNA, 27 nt, Artificial Sequence
  Description of Artificial Sequence: Synthetic oligonucleotide
ucugcaaguacguucguuuaacucaag

SEQ ID NO: 129470 - RNA, 27 nt, Artificial Sequence
  Description of Artificial Sequence: Synthetic oligonucleotide
ucuguaucgaucguucuguaucagucu

SEQ ID NO: 129471 - RNA, 27 nt, Artificial Sequence
  Description of Artificial Sequence: Synthetic oligonucleotide
auuuauuuuuauauauauauaauauau

SEQ ID NO: 129472 - RNA, 27 nt, Artificial Sequence
  Description of Artificial Sequence: Synthetic oligonucleotide
auauuuauuuuuauauauauauaauau

SEQ ID NO: 129473 - RNA, 27 nt, Artificial Sequence
  Description of Artificial Sequence: Synthetic oligonucleotide
cacagcagucaaauacauccagugaag

SEQ ID NO: 129474 - RNA, 27 nt, Artificial Sequence
  Description of Artificial Sequence: Synthetic oligonucleotide
gucucucaucuccuccucuucccuguc

SEQ ID NO: 129475 - RNA, 27 nt, Artificial Sequence
  Description of Artificial Sequence: Synthetic oligonucleotide
ccaagugggacaaaaaaaagaucaugc

SEQ ID NO: 129476 - RNA, 14 nt, Artificial Sequence
  Description of Artificial Sequence: Synthetic oligonucleotide
guauuuugaugagg

SEQ ID NO: 129477 - RNA, 12 nt, Artificial Sequence
  Description of Artificial Sequence: Synthetic oligonucleotide
ggcccagaugau

SEQ ID NO: 129478 - RNA, 14 nt, Artificial Sequence
  Description of Artificial Sequence: Synthetic oligonucleotide
gggaagaaaacuau

SEQ ID NO: 129479 - RNA, 15 nt, Artificial Sequence
  Description of Artificial Sequence: Synthetic oligonucleotide
guuuuaauuuauuuc

SEQ ID NO: 129480 - RNA, 12 nt, Artificial Sequence
  Description of Artificial Sequence: Synthetic oligonucleotide
acguagggaaau

SEQ ID NO: 129481 - RNA, 12 nt, Artificial Sequence
  Description of Artificial Sequence: Synthetic oligonucleotide
ccaggguuuacc

SEQ ID NO: 129482 - RNA, 11 nt, Artificial Sequence
  Description of Artificial Sequence: Synthetic oligonucleotide
agcaagguuua

SEQ ID NO: 129483 - RNA, 12 nt, Artificial Sequence
  Description of Artificial Sequence: Synthetic oligonucleotide
uguauuauguug

SEQ ID NO: 129484 - RNA, 15 nt, Artificial Sequence
  Description of Artificial Sequence: Synthetic oligonucleotide
uuuuaaucuuuguga

SEQ ID NO: 129485 - RNA, 14 nt, Artificial Sequence
  Description of Artificial Sequence: Synthetic oligonucleotide
uuaaucuuugugac

SEQ ID NO: 129486 - RNA, 13 nt, Artificial Sequence
  Description of Artificial Sequence: Synthetic oligonucleotide
gcugcuuaugucu

SEQ ID NO: 129487 - RNA, 14 nt, Artificial Sequence
  Description of Artificial Sequence: Synthetic oligonucleotide
aaguguuucagaag

SEQ ID NO: 129488 - RNA, 13 nt, Artificial Sequence
  Description of Artificial Sequence: Synthetic oligonucleotide
gaccaucaauaag

SEQ ID NO: 129489 - RNA, 13 nt, Artificial Sequence
  Description of Artificial Sequence: Synthetic oligonucleotide
ccaucaauaagga

SEQ ID NO: 129490 - RNA, 14 nt, Artificial Sequence
  Description of Artificial Sequence: Synthetic oligonucleotide
ucaauaaggaagaa

SEQ ID NO: 129491 - RNA, 14 nt, Artificial Sequence
  Description of Artificial Sequence: Synthetic oligonucleotide
aauaaggaagaagc

SEQ ID NO: 129492 - RNA, 13 nt, Artificial Sequence
  Description of Artificial Sequence: Synthetic oligonucleotide
aggaagaagcccu

SEQ ID NO: 129493 - RNA, 13 nt, Artificial Sequence
  Description of Artificial Sequence: Synthetic oligonucleotide
gcauaacuaaagg

SEQ ID NO: 129494 - RNA, 14 nt, Artificial Sequence
  Description of Artificial Sequence: Synthetic oligonucleotide
cauaacuaaaggug

SEQ ID NO: 129495 - RNA, 12 nt, Artificial Sequence
  Description of Artificial Sequence: Synthetic oligonucleotide
cuacaucacgcc

SEQ ID NO: 129496 - RNA, 12 nt, Artificial Sequence
  Description of Artificial Sequence: Synthetic oligonucleotide
acuggauuuaag

SEQ ID NO: 129497 - RNA, 12 nt, Artificial Sequence
  Description of Artificial Sequence: Synthetic oligonucleotide
cuggauuuaagc

SEQ ID NO: 129498 - RNA, 13 nt, Artificial Sequence
  Description of Artificial Sequence: Synthetic oligonucleotide
gauuuaagcagag

SEQ ID NO: 129499 - RNA, 13 nt, Artificial Sequence
  Description of Artificial Sequence: Synthetic oligonucleotide
auuuaagcagagu

SEQ ID NO: 129500 - RNA, 13 nt, Artificial Sequence
  Description of Artificial Sequence: Synthetic oligonucleotide
uuaagcagaguuc

SEQ ID NO: 129501 - RNA, 13 nt, Artificial Sequence
  Description of Artificial Sequence: Synthetic oligonucleotide
uaagcagaguuca

SEQ ID NO: 129502 - RNA, 14 nt, Artificial Sequence
  Description of Artificial Sequence: Synthetic oligonucleotide
agcagaguucaaaa

SEQ ID NO: 129503 - RNA, 12 nt, Artificial Sequence
  Description of Artificial Sequence: Synthetic oligonucleotide
cucagggucuga

SEQ ID NO: 129504 - RNA, 13 nt, Artificial Sequence
  Description of Artificial Sequence: Synthetic oligonucleotide
caagcaacuacau

SEQ ID NO: 129505 - RNA, 12 nt, Artificial Sequence
  Description of Artificial Sequence: Synthetic oligonucleotide
aucaauggcagc

SEQ ID NO: 129506 - RNA, 11 nt, Artificial Sequence
  Description of Artificial Sequence: Synthetic oligonucleotide
uuccagcccac

SEQ ID NO: 129507 - RNA, 12 nt, Artificial Sequence
  Description of Artificial Sequence: Synthetic oligonucleotide
cagcugagaaug

SEQ ID NO: 129508 - RNA, 13 nt, Artificial Sequence
  Description of Artificial Sequence: Synthetic oligonucleotide
aacguaucuccua

SEQ ID NO: 129509 - RNA, 14 nt, Artificial Sequence
  Description of Artificial Sequence: Synthetic oligonucleotide
ccuaaaauaauuuc

SEQ ID NO: 129510 - RNA, 13 nt, Artificial Sequence
  Description of Artificial Sequence: Synthetic oligonucleotide
uggaagauucagc

SEQ ID NO: 129511 - RNA, 12 nt, Artificial Sequence
  Description of Artificial Sequence: Synthetic oligonucleotide
uuaaacucuccu

SEQ ID NO: 129512 - RNA, 12 nt, Artificial Sequence
  Description of Artificial Sequence: Synthetic oligonucleotide
cagccuacaguu

SEQ ID NO: 129513 - RNA, 13 nt, Artificial Sequence
  Description of Artificial Sequence: Synthetic oligonucleotide
guuauguucaguc

SEQ ID NO: 129514 - RNA, 13 nt, Artificial Sequence
  Description of Artificial Sequence: Synthetic oligonucleotide
cacauacaaaaug

SEQ ID NO: 129515 - RNA, 9 nt, Artificial Sequence
  Description of Artificial Sequence: Synthetic oligonucleotide
uccuuuugc

SEQ ID NO: 129516 - RNA, 12 nt, Artificial Sequence
  Description of Artificial Sequence: Synthetic oligonucleotide
ugaccugugaag

SEQ ID NO: 129517 - RNA, 12 nt, Artificial Sequence
  Description of Artificial Sequence: Synthetic oligonucleotide
cuaucucacaca

SEQ ID NO: 129518 - RNA, 13 nt, Artificial Sequence
  Description of Artificial Sequence: Synthetic oligonucleotide
uguccucaauugu

SEQ ID NO: 129519 - RNA, 12 nt, Artificial Sequence
  Description of Artificial Sequence: Synthetic oligonucleotide
aaaccguagcug

SEQ ID NO: 129520 - RNA, 12 nt, Artificial Sequence
  Description of Artificial Sequence: Synthetic oligonucleotide
uagcuggcaagc

SEQ ID NO: 129521 - RNA, 14 nt, Artificial Sequence
  Description of Artificial Sequence: Synthetic oligonucleotide
uuguaugguuaaaa

SEQ ID NO: 129522 - RNA, 14 nt, Artificial Sequence
  Description of Artificial Sequence: Synthetic oligonucleotide
ugguuaaaagaugg

SEQ ID NO: 129523 - RNA, 13 nt, Artificial Sequence
  Description of Artificial Sequence: Synthetic oligonucleotide
cagggaauuauac

SEQ ID NO: 129524 - RNA, 12 nt, Artificial Sequence
  Description of Artificial Sequence: Synthetic oligonucleotide
acaaucuugcug

SEQ ID NO: 129525 - RNA, 13 nt, Artificial Sequence
  Description of Artificial Sequence: Synthetic oligonucleotide
ccaauaaugaaga

SEQ ID NO: 129526 - RNA, 13 nt, Artificial Sequence
  Description of Artificial Sequence: Synthetic oligonucleotide
acuuuggauguuc

SEQ ID NO: 129527 - RNA, 12 nt, Artificial Sequence
  Description of Artificial Sequence: Synthetic oligonucleotide
aaugcuuccacu

SEQ ID NO: 129528 - RNA, 11 nt, Artificial Sequence
  Description of Artificial Sequence: Synthetic oligonucleotide
gagaaaguuug

SEQ ID NO: 129529 - RNA, 11 nt, Artificial Sequence
  Description of Artificial Sequence: Synthetic oligonucleotide
aaagaacuacu

SEQ ID NO: 129530 - RNA, 12 nt, Artificial Sequence
  Description of Artificial Sequence: Synthetic oligonucleotide
uuagaaauacgg

SEQ ID NO: 129531 - RNA, 12 nt, Artificial Sequence
  Description of Artificial Sequence: Synthetic oligonucleotide
aacauggguaca

SEQ ID NO: 129532 - RNA, 14 nt, Artificial Sequence
  Description of Artificial Sequence: Synthetic oligonucleotide
aaagacacagaaga

SEQ ID NO: 129533 - RNA, 11 nt, Artificial Sequence
  Description of Artificial Sequence: Synthetic oligonucleotide
uaguagggagg

SEQ ID NO: 129534 - RNA, 12 nt, Artificial Sequence
  Description of Artificial Sequence: Synthetic oligonucleotide
gccuucugcagc

SEQ ID NO: 129535 - RNA, 10 nt, Artificial Sequence
  Description of Artificial Sequence: Synthetic oligonucleotide
ggucugguac

SEQ ID NO: 129536 - RNA, 12 nt, Artificial Sequence
  Description of Artificial Sequence: Synthetic oligonucleotide
cuaguccuuccg

SEQ ID NO: 129537 - RNA, 12 nt, Artificial Sequence
  Description of Artificial Sequence: Synthetic oligonucleotide
ccagugaauauu

SEQ ID NO: 129538 - RNA, 13 nt, Artificial Sequence
  Description of Artificial Sequence: Synthetic oligonucleotide
augaauucaaguu

SEQ ID NO: 129539 - RNA, 12 nt, Artificial Sequence
  Description of Artificial Sequence: Synthetic oligonucleotide
caggacacagau

SEQ ID NO: 129540 - RNA, 12 nt, Artificial Sequence
  Description of Artificial Sequence: Synthetic oligonucleotide
cucaaagcacag

SEQ ID NO: 129541 - RNA, 10 nt, Artificial Sequence
  Description of Artificial Sequence: Synthetic oligonucleotide
accacugcca

SEQ ID NO: 129542 - RNA, 13 nt, Artificial Sequence
  Description of Artificial Sequence: Synthetic oligonucleotide
gaaacuacuagug

SEQ ID NO: 129543 - RNA, 12 nt, Artificial Sequence
  Description of Artificial Sequence: Synthetic oligonucleotide
aagucggacagc

SEQ ID NO: 129544 - RNA, 13 nt, Artificial Sequence
  Description of Artificial Sequence: Synthetic oligonucleotide
gaaagcgaaaaau

SEQ ID NO: 129545 - RNA, 13 nt, Artificial Sequence
  Description of Artificial Sequence: Synthetic oligonucleotide
cccucugauuuag

SEQ ID NO: 129546 - RNA, 12 nt, Artificial Sequence
  Description of Artificial Sequence: Synthetic oligonucleotide
ugagcuauuuaa

SEQ ID NO: 129547 - RNA, 13 nt, Artificial Sequence
  Description of Artificial Sequence: Synthetic oligonucleotide
aaaaggugaaaaa

SEQ ID NO: 129548 - RNA, 14 nt, Artificial Sequence
  Description of Artificial Sequence: Synthetic oligonucleotide
gaaaaagcacuauu

SEQ ID NO: 129549 - RNA, 12 nt, Artificial Sequence
  Description of Artificial Sequence: Synthetic oligonucleotide
ggcugaaaagaa

SEQ ID NO: 129550 - RNA, 12 nt, Artificial Sequence
  Description of Artificial Sequence: Synthetic oligonucleotide
uaaacccuuaua

SEQ ID NO: 129551 - RNA, 13 nt, Artificial Sequence
  Description of Artificial Sequence: Synthetic oligonucleotide
cauacuauuagcc

SEQ ID NO: 129552 - RNA, 12 nt, Artificial Sequence
  Description of Artificial Sequence: Synthetic oligonucleotide
gacagaagcauu

SEQ ID NO: 129553 - RNA, 14 nt, Artificial Sequence
  Description of Artificial Sequence: Synthetic oligonucleotide
agagcaaauaagau

SEQ ID NO: 129554 - RNA, 14 nt, Artificial Sequence
  Description of Artificial Sequence: Synthetic oligonucleotide
ccaacauuuuucuc

SEQ ID NO: 129555 - RNA, 15 nt, Artificial Sequence
  Description of Artificial Sequence: Synthetic oligonucleotide
uuaaguaugagaaaa

SEQ ID NO: 129556 - RNA, 14 nt, Artificial Sequence
  Description of Artificial Sequence: Synthetic oligonucleotide
caggaauaaagaug

SEQ ID NO: 129557 - RNA, 13 nt, Artificial Sequence
  Description of Artificial Sequence: Synthetic oligonucleotide
aauuugaaugacc

SEQ ID NO: 129558 - RNA, 14 nt, Artificial Sequence
  Description of Artificial Sequence: Synthetic oligonucleotide
auguauaaagauag

SEQ ID NO: 129559 - RNA, 12 nt, Artificial Sequence
  Description of Artificial Sequence: Synthetic oligonucleotide
ggcuguaacuau

SEQ ID NO: 129560 - RNA, 11 nt, Artificial Sequence
  Description of Artificial Sequence: Synthetic oligonucleotide
ucugugaagug

SEQ ID NO: 129561 - RNA, 14 nt, Artificial Sequence
  Description of Artificial Sequence: Synthetic oligonucleotide
ccuuuaaggaaaug

SEQ ID NO: 129562 - RNA, 13 nt, Artificial Sequence
  Description of Artificial Sequence: Synthetic oligonucleotide
aaggauacaaaaa

SEQ ID NO: 129563 - RNA, 12 nt, Artificial Sequence
  Description of Artificial Sequence: Synthetic oligonucleotide
agaugcaauuug

SEQ ID NO: 129564 - RNA, 12 nt, Artificial Sequence
  Description of Artificial Sequence: Synthetic oligonucleotide
guucaaaacgaa

SEQ ID NO: 129565 - RNA, 11 nt, Artificial Sequence
  Description of Artificial Sequence: Synthetic oligonucleotide
gugaaaccuca

SEQ ID NO: 129566 - RNA, 13 nt, Artificial Sequence
  Description of Artificial Sequence: Synthetic oligonucleotide
acgaaagagaagc

SEQ ID NO: 129567 - RNA, 12 nt, Artificial Sequence
  Description of Artificial Sequence: Synthetic oligonucleotide
cuccacaagcgc

SEQ ID NO: 129568 - RNA, 14 nt, Artificial Sequence
  Description of Artificial Sequence: Synthetic oligonucleotide
gagaagauuccaaa

SEQ ID NO: 129569 - RNA, 13 nt, Artificial Sequence
  Description of Artificial Sequence: Synthetic oligonucleotide
aaucuggauucaa

SEQ ID NO: 129570 - RNA, 13 nt, Artificial Sequence
  Description of Artificial Sequence: Synthetic oligonucleotide
agaacagauuuga

SEQ ID NO: 129571 - RNA, 11 nt, Artificial Sequence
  Description of Artificial Sequence: Synthetic oligonucleotide
ccagagcugug

SEQ ID NO: 129572 - RNA, 12 nt, Artificial Sequence
  Description of Artificial Sequence: Synthetic oligonucleotide
ccucagauuguu

SEQ ID NO: 129573 - RNA, 12 nt, Artificial Sequence
  Description of Artificial Sequence: Synthetic oligonucleotide
cuauuuuaauua

SEQ ID NO: 129574 - RNA, 13 nt, Artificial Sequence
  Description of Artificial Sequence: Synthetic oligonucleotide
uuuaauuuauuaa

SEQ ID NO: 129575 - RNA, 12 nt, Artificial Sequence
  Description of Artificial Sequence: Synthetic oligonucleotide
augcaguuugaa

SEQ ID NO: 129576 - RNA, 11 nt, Artificial Sequence
  Description of Artificial Sequence: Synthetic oligonucleotide
caugcugcugg

SEQ ID NO: 129577 - RNA, 13 nt, Artificial Sequence
  Description of Artificial Sequence: Synthetic oligonucleotide
agaugugcauuuc

SEQ ID NO: 129578 - RNA, 12 nt, Artificial Sequence
  Description of Artificial Sequence: Synthetic oligonucleotide
ucaaaaccugug

SEQ ID NO: 129579 - RNA, 11 nt, Artificial Sequence
  Description of Artificial Sequence: Synthetic oligonucleotide
gaaugugggua

SEQ ID NO: 129580 - RNA, 10 nt, Artificial Sequence
  Description of Artificial Sequence: Synthetic oligonucleotide
auguggguag

SEQ ID NO: 129581 - RNA, 13 nt, Artificial Sequence
  Description of Artificial Sequence: Synthetic oligonucleotide
ugaaaaugagcau

SEQ ID NO: 129582 - RNA, 13 nt, Artificial Sequence
  Description of Artificial Sequence: Synthetic oligonucleotide
uugcuuuucaugu

SEQ ID NO: 129583 - RNA, 12 nt, Artificial Sequence
  Description of Artificial Sequence: Synthetic oligonucleotide
uguauuucuaua

SEQ ID NO: 129584 - RNA, 13 nt, Artificial Sequence
  Description of Artificial Sequence: Synthetic oligonucleotide
uuugauuaauguu

SEQ ID NO: 129585 - RNA, 12 nt, Artificial Sequence
  Description of Artificial Sequence: Synthetic oligonucleotide
caacguguauag

SEQ ID NO: 129586 - RNA, 12 nt, Artificial Sequence
  Description of Artificial Sequence: Synthetic oligonucleotide
cauauccuuggc

SEQ ID NO: 129587 - RNA, 13 nt, Artificial Sequence
  Description of Artificial Sequence: Synthetic oligonucleotide
uacuaacaucugg

SEQ ID NO: 129588 - RNA, 11 nt, Artificial Sequence
  Description of Artificial Sequence: Synthetic oligonucleotide
cauaaguugug

SEQ ID NO: 129589 - RNA, 12 nt, Artificial Sequence
  Description of Artificial Sequence: Synthetic oligonucleotide
gcaucauuuugg

SEQ ID NO: 129590 - RNA, 10 nt, Artificial Sequence
  Description of Artificial Sequence: Synthetic oligonucleotide
gcucuucuua

SEQ ID NO: 129591 - RNA, 10 nt, Artificial Sequence
  Description of Artificial Sequence: Synthetic oligonucleotide
agauuagguc

SEQ ID NO: 129592 - RNA, 12 nt, Artificial Sequence
  Description of Artificial Sequence: Synthetic oligonucleotide
auggaauugaaa

SEQ ID NO: 129593 - RNA, 13 nt, Artificial Sequence
  Description of Artificial Sequence: Synthetic oligonucleotide
cacacucauuccu

SEQ ID NO: 129594 - RNA, 12 nt, Artificial Sequence
  Description of Artificial Sequence: Synthetic oligonucleotide
uguagagguaac

SEQ ID NO: 129595 - RNA, 11 nt, Artificial Sequence
  Description of Artificial Sequence: Synthetic oligonucleotide
caaccacaugc

SEQ ID NO: 129596 - RNA, 12 nt, Artificial Sequence
  Description of Artificial Sequence: Synthetic oligonucleotide
ucggaaacaagu

SEQ ID NO: 129597 - RNA, 11 nt, Artificial Sequence
  Description of Artificial Sequence: Synthetic oligonucleotide
acucccaauaa

SEQ ID NO: 129598 - RNA, 13 nt, Artificial Sequence
  Description of Artificial Sequence: Synthetic oligonucleotide
aaugcuaagaaau

SEQ ID NO: 129599 - RNA, 11 nt, Artificial Sequence
  Description of Artificial Sequence: Synthetic oligonucleotide
gucuuucucua

SEQ ID NO: 129600 - RNA, 11 nt, Artificial Sequence
  Description of Artificial Sequence: Synthetic oligonucleotide
ugaauuucagg

SEQ ID NO: 129601 - RNA, 13 nt, Artificial Sequence
  Description of Artificial Sequence: Synthetic oligonucleotide
cgauucccucuca

SEQ ID NO: 129602 - RNA, 11 nt, Artificial Sequence
  Description of Artificial Sequence: Synthetic oligonucleotide
aggaaagugaa

SEQ ID NO: 129603 - RNA, 12 nt, Artificial Sequence
  Description of Artificial Sequence: Synthetic oligonucleotide
gaggcugcaugc

SEQ ID NO: 129604 - RNA, 11 nt, Artificial Sequence
  Description of Artificial Sequence: Synthetic oligonucleotide
ucucugaacag

SEQ ID NO: 129605 - RNA, 12 nt, Artificial Sequence
  Description of Artificial Sequence: Synthetic oligonucleotide
aacuuggcugua

SEQ ID NO: 129606 - RNA, 12 nt, Artificial Sequence
  Description of Artificial Sequence: Synthetic oligonucleotide
agaagccaaaau

SEQ ID NO: 129607 - RNA, 14 nt, Artificial Sequence
  Description of Artificial Sequence: Synthetic oligonucleotide
auuaaaagaagucc

SEQ ID NO: 129608 - RNA, 14 nt, Artificial Sequence
  Description of Artificial Sequence: Synthetic oligonucleotide
gaauccggauuauc

SEQ ID NO: 129609 - RNA, 12 nt, Artificial Sequence
  Description of Artificial Sequence: Synthetic oligonucleotide
aaugugacauca

SEQ ID NO: 129610 - RNA, 13 nt, Artificial Sequence
  Description of Artificial Sequence: Synthetic oligonucleotide
caucaaagcaagu

SEQ ID NO: 129611 - RNA, 11 nt, Artificial Sequence
  Description of Artificial Sequence: Synthetic oligonucleotide
agagagagaaa

SEQ ID NO: 129612 - RNA, 13 nt, Artificial Sequence
  Description of Artificial Sequence: Synthetic oligonucleotide
ucgcuguaguauu

SEQ ID NO: 129613 - RNA, 14 nt, Artificial Sequence
  Description of Artificial Sequence: Synthetic oligonucleotide
cgcuguaguauuua

SEQ ID NO: 129614 - RNA, 13 nt, Artificial Sequence
  Description of Artificial Sequence: Synthetic oligonucleotide
auuuaagcccaua

SEQ ID NO: 129615 - RNA, 15 nt, Artificial Sequence
  Description of Artificial Sequence: Synthetic oligonucleotide
auuaaaauaaacaug

SEQ ID NO: 129616 - RNA, 12 nt, Artificial Sequence
  Description of Artificial Sequence: Synthetic oligonucleotide
cuguucugaucg

SEQ ID NO: 129617 - RNA, 16 nt, Artificial Sequence
  Description of Artificial Sequence: Synthetic oligonucleotide
aaauaauuugaacuuu

SEQ ID NO: 129618 - RNA, 12 nt, Artificial Sequence
  Description of Artificial Sequence: Synthetic oligonucleotide
ugcgaccuuaau

SEQ ID NO: 129619 - RNA, 11 nt, Artificial Sequence
  Description of Artificial Sequence: Synthetic oligonucleotide
cugagaaagcu

SEQ ID NO: 129620 - RNA, 13 nt, Artificial Sequence
  Description of Artificial Sequence: Synthetic oligonucleotide
aguaaagaugcua

SEQ ID NO: 129621 - RNA, 12 nt, Artificial Sequence
  Description of Artificial Sequence: Synthetic oligonucleotide
cugcuuaauugc

SEQ ID NO: 129622 - RNA, 14 nt, Artificial Sequence
  Description of Artificial Sequence: Synthetic oligonucleotide
uaccauaugaauga

SEQ ID NO: 129623 - RNA, 12 nt, Artificial Sequence
  Description of Artificial Sequence: Synthetic oligonucleotide
aacuuucuuauc

SEQ ID NO: 129624 - RNA, 13 nt, Artificial Sequence
  Description of Artificial Sequence: Synthetic oligonucleotide
ccuugcaugacau

SEQ ID NO: 129625 - RNA, 14 nt, Artificial Sequence
  Description of Artificial Sequence: Synthetic oligonucleotide
ugaauuuguauaug

SEQ ID NO: 129626 - RNA, 12 nt, Artificial Sequence
  Description of Artificial Sequence: Synthetic oligonucleotide
gaauccuaguag

SEQ ID NO: 129627 - RNA, 10 nt, Artificial Sequence
  Description of Artificial Sequence: Synthetic oligonucleotide
gaaagggaag

SEQ ID NO: 129628 - RNA, 11 nt, Artificial Sequence
  Description of Artificial Sequence: Synthetic oligonucleotide
uaucggcaugc

SEQ ID NO: 129629 - RNA, 12 nt, Artificial Sequence
  Description of Artificial Sequence: Synthetic oligonucleotide
caccucauagua

SEQ ID NO: 129630 - RNA, 11 nt, Artificial Sequence
  Description of Artificial Sequence: Synthetic oligonucleotide
ccagaauugcc

SEQ ID NO: 129631 - RNA, 11 nt, Artificial Sequence
  Description of Artificial Sequence: Synthetic oligonucleotide
uggugaucugg

SEQ ID NO: 129632 - RNA, 12 nt, Artificial Sequence
  Description of Artificial Sequence: Synthetic oligonucleotide
gaucuggguaau

SEQ ID NO: 129633 - RNA, 12 nt, Artificial Sequence
  Description of Artificial Sequence: Synthetic oligonucleotide
ggaugugaugaa

SEQ ID NO: 129634 - RNA, 12 nt, Artificial Sequence
  Description of Artificial Sequence: Synthetic oligonucleotide
cauuuccacagc

SEQ ID NO: 129635 - RNA, 11 nt, Artificial Sequence
  Description of Artificial Sequence: Synthetic oligonucleotide
acagcuacacc

SEQ ID NO: 129636 - RNA, 12 nt, Artificial Sequence
  Description of Artificial Sequence: Synthetic oligonucleotide
ugcaguucuuac

SEQ ID NO: 129637 - RNA, 12 nt, Artificial Sequence
  Description of Artificial Sequence: Synthetic oligonucleotide
acgagaagaaga

SEQ ID NO: 129638 - RNA, 12 nt, Artificial Sequence
  Description of Artificial Sequence: Synthetic oligonucleotide
cgagaagaagau

SEQ ID NO: 129639 - RNA, 15 nt, Artificial Sequence
  Description of Artificial Sequence: Synthetic oligonucleotide
aagaagaucauuuac

SEQ ID NO: 129640 - RNA, 11 nt, Artificial Sequence
  Description of Artificial Sequence: Synthetic oligonucleotide
agaggaagagg

SEQ ID NO: 129641 - RNA, 12 nt, Artificial Sequence
  Description of Artificial Sequence: Synthetic oligonucleotide
gaggaagaggug

SEQ ID NO: 129642 - RNA, 13 nt, Artificial Sequence
  Description of Artificial Sequence: Synthetic oligonucleotide
cuacuuugagggc

SEQ ID NO: 129643 - RNA, 12 nt, Artificial Sequence
  Description of Artificial Sequence: Synthetic oligonucleotide
agggcaucuccu

SEQ ID NO: 129644 - RNA, 10 nt, Artificial Sequence
  Description of Artificial Sequence: Synthetic oligonucleotide
ggagugauau

SEQ ID NO: 129645 - RNA, 11 nt, Artificial Sequence
  Description of Artificial Sequence: Synthetic oligonucleotide
gagugauaugg

SEQ ID NO: 129646 - RNA, 12 nt, Artificial Sequence
  Description of Artificial Sequence: Synthetic oligonucleotide
ugcaguaaagau

SEQ ID NO: 129647 - RNA, 13 nt, Artificial Sequence
  Description of Artificial Sequence: Synthetic oligonucleotide
aguaaagauccua

SEQ ID NO: 129648 - RNA, 12 nt, Artificial Sequence
  Description of Artificial Sequence: Synthetic oligonucleotide
ugacaaaggaca

SEQ ID NO: 129649 - RNA, 13 nt, Artificial Sequence
  Description of Artificial Sequence: Synthetic oligonucleotide
gcaauugugaccc

SEQ ID NO: 129650 - RNA, 12 nt, Artificial Sequence
  Description of Artificial Sequence: Synthetic oligonucleotide
aacaucauccau

SEQ ID NO: 129651 - RNA, 12 nt, Artificial Sequence
  Description of Artificial Sequence: Synthetic oligonucleotide
ugaaauccaaca

SEQ ID NO: 129652 - RNA, 15 nt, Artificial Sequence
  Description of Artificial Sequence: Synthetic oligonucleotide
aacaauauauuucuc

SEQ ID NO: 129653 - RNA, 14 nt, Artificial Sequence
  Description of Artificial Sequence: Synthetic oligonucleotide
aacaguaaagucac

SEQ ID NO: 129654 - RNA, 14 nt, Artificial Sequence
  Description of Artificial Sequence: Synthetic oligonucleotide
ugugaagaaaguaa

SEQ ID NO: 129655 - RNA, 13 nt, Artificial Sequence
  Description of Artificial Sequence: Synthetic oligonucleotide
cuuccgagccauc

SEQ ID NO: 129656 - RNA, 12 nt, Artificial Sequence
  Description of Artificial Sequence: Synthetic oligonucleotide
aauggagguuga

SEQ ID NO: 129657 - RNA, 12 nt, Artificial Sequence
  Description of Artificial Sequence: Synthetic oligonucleotide
ggagguugaaua

SEQ ID NO: 129658 - RNA, 13 nt, Artificial Sequence
  Description of Artificial Sequence: Synthetic oligonucleotide
auuuugaguuuuc

SEQ ID NO: 129659 - RNA, 12 nt, Artificial Sequence
  Description of Artificial Sequence: Synthetic oligonucleotide
uauccuguuugu

SEQ ID NO: 129660 - RNA, 11 nt, Artificial Sequence
  Description of Artificial Sequence: Synthetic oligonucleotide
ccuguuuguuc

SEQ ID NO: 129661 - RNA, 10 nt, Artificial Sequence
  Description of Artificial Sequence: Synthetic oligonucleotide
cucuacagcc

SEQ ID NO: 129662 - RNA, 12 nt, Artificial Sequence
  Description of Artificial Sequence: Synthetic oligonucleotide
ucuuccauagcu

SEQ ID NO: 129663 - RNA, 12 nt, Artificial Sequence
  Description of Artificial Sequence: Synthetic oligonucleotide
auaaucuuccug

SEQ ID NO: 129664 - RNA, 12 nt, Artificial Sequence
  Description of Artificial Sequence: Synthetic oligonucleotide
uaaucuuccugu

SEQ ID NO: 129665 - RNA, 12 nt, Artificial Sequence
  Description of Artificial Sequence: Synthetic oligonucleotide
cuucaugacuug

SEQ ID NO: 129666 - RNA, 12 nt, Artificial Sequence
  Description of Artificial Sequence: Synthetic oligonucleotide
aagagggagaga

SEQ ID NO: 129667 - RNA, 12 nt, Artificial Sequence
  Description of Artificial Sequence: Synthetic oligonucleotide
cgucuccuacca

SEQ ID NO: 129668 - RNA, 12 nt, Artificial Sequence
  Description of Artificial Sequence: Synthetic oligonucleotide
gaucaaucggcc

SEQ ID NO: 129669 - RNA, 12 nt, Artificial Sequence
  Description of Artificial Sequence: Synthetic oligonucleotide
ggacgaacaucc

SEQ ID NO: 129670 - RNA, 11 nt, Artificial Sequence
  Description of Artificial Sequence: Synthetic oligonucleotide
agggucggaac

SEQ ID NO: 129671 - RNA, 10 nt, Artificial Sequence
  Description of Artificial Sequence: Synthetic oligonucleotide
ucggaaccca

SEQ ID NO: 129672 - RNA, 11 nt, Artificial Sequence
  Description of Artificial Sequence: Synthetic oligonucleotide
acccaagcuua

SEQ ID NO: 129673 - RNA, 14 nt, Artificial Sequence
  Description of Artificial Sequence: Synthetic oligonucleotide
gaacuuuaagcaac

SEQ ID NO: 129674 - RNA, 11 nt, Artificial Sequence
  Description of Artificial Sequence: Synthetic oligonucleotide
acuauucagug

SEQ ID NO: 129675 - RNA, 11 nt, Artificial Sequence
  Description of Artificial Sequence: Synthetic oligonucleotide
cuauucagugg

SEQ ID NO: 129676 - RNA, 13 nt, Artificial Sequence
  Description of Artificial Sequence: Synthetic oligonucleotide
aaacacagauaac

SEQ ID NO: 129677 - RNA, 12 nt, Artificial Sequence
  Description of Artificial Sequence: Synthetic oligonucleotide
cuuaagaaaaga

SEQ ID NO: 129678 - RNA, 12 nt, Artificial Sequence
  Description of Artificial Sequence: Synthetic oligonucleotide
cugaaggagugu

SEQ ID NO: 129679 - RNA, 10 nt, Artificial Sequence
  Description of Artificial Sequence: Synthetic oligonucleotide
ucaccgcggg

SEQ ID NO: 129680 - RNA, 14 nt, Artificial Sequence
  Description of Artificial Sequence: Synthetic oligonucleotide
agcagaaauaagcg

SEQ ID NO: 129681 - RNA, 12 nt, Artificial Sequence
  Description of Artificial Sequence: Synthetic oligonucleotide
aagcgugccguu

SEQ ID NO: 129682 - RNA, 12 nt, Artificial Sequence
  Description of Artificial Sequence: Synthetic oligonucleotide
agaaacagucac

SEQ ID NO: 129683 - RNA, 12 nt, Artificial Sequence
  Description of Artificial Sequence: Synthetic oligonucleotide
agaggaagaagg

SEQ ID NO: 129684 - RNA, 14 nt, Artificial Sequence
  Description of Artificial Sequence: Synthetic oligonucleotide
uguauucaaaauau

SEQ ID NO: 129685 - RNA, 13 nt, Artificial Sequence
  Description of Artificial Sequence: Synthetic oligonucleotide
auuuuccucccuu

SEQ ID NO: 129686 - RNA, 13 nt, Artificial Sequence
  Description of Artificial Sequence: Synthetic oligonucleotide
caaagaaagauag

SEQ ID NO: 129687 - RNA, 12 nt, Artificial Sequence
  Description of Artificial Sequence: Synthetic oligonucleotide
aagaaagauaga

SEQ ID NO: 129688 - RNA, 13 nt, Artificial Sequence
  Description of Artificial Sequence: Synthetic oligonucleotide
gaaagcauuuguu

SEQ ID NO: 129689 - RNA, 13 nt, Artificial Sequence
  Description of Artificial Sequence: Synthetic oligonucleotide
ugaguuaaacgaa

SEQ ID NO: 129690 - RNA, 12 nt, Artificial Sequence
  Description of Artificial Sequence: Synthetic oligonucleotide
acugauacagaa

SEQ ID NO: 129691 - RNA, 12 nt, Artificial Sequence
  Description of Artificial Sequence: Synthetic oligonucleotide
auauuauauaua

SEQ ID NO: 129692 - RNA, 12 nt, Artificial Sequence
  Description of Artificial Sequence: Synthetic oligonucleotide
auuauauauaua

SEQ ID NO: 129693 - RNA, 12 nt, Artificial Sequence
  Description of Artificial Sequence: Synthetic oligonucleotide
ucacuggaugua

SEQ ID NO: 129694 - RNA, 12 nt, Artificial Sequence
  Description of Artificial Sequence: Synthetic oligonucleotide
cagggaagagga

SEQ ID NO: 129695 - RNA, 15 nt, Artificial Sequence
  Description of Artificial Sequence: Synthetic oligonucleotide
augaucuuuuuuuug

SEQ ID NO: 129696 - RNA, 11 nt, Artificial Sequence
  Description of Artificial Sequence: Synthetic oligonucleotide
aguucacggcc

SEQ ID NO: 129697 - RNA, 13 nt, Artificial Sequence
  Description of Artificial Sequence: Synthetic oligonucleotide
caccaucacacca

SEQ ID NO: 129698 - RNA, 11 nt, Artificial Sequence
  Description of Artificial Sequence: Synthetic oligonucleotide
ccugcggguuu

SEQ ID NO: 129699 - RNA, 10 nt, Artificial Sequence
  Description of Artificial Sequence: Synthetic oligonucleotide
auccaguuug

SEQ ID NO: 129700 - RNA, 13 nt, Artificial Sequence
  Description of Artificial Sequence: Synthetic oligonucleotide
guuaaggacuucu

SEQ ID NO: 129701 - RNA, 13 nt, Artificial Sequence
  Description of Artificial Sequence: Synthetic oligonucleotide
cagugggacagag

SEQ ID NO: 129702 - RNA, 14 nt, Artificial Sequence
  Description of Artificial Sequence: Synthetic oligonucleotide
aauuuguuauugug

SEQ ID NO: 129703 - RNA, 13 nt, Artificial Sequence
  Description of Artificial Sequence: Synthetic oligonucleotide
uucaaaugcauuu

SEQ ID NO: 129704 - RNA, 10 nt, Artificial Sequence
  Description of Artificial Sequence: Synthetic oligonucleotide
caggaaagcc

SEQ ID NO: 129705 - RNA, 11 nt, Artificial Sequence
  Description of Artificial Sequence: Synthetic oligonucleotide
aggaaagcccu

SEQ ID NO: 129706 - RNA, 12 nt, Artificial Sequence
  Description of Artificial Sequence: Synthetic oligonucleotide
cccagcauggcc

SEQ ID NO: 129707 - RNA, 11 nt, Artificial Sequence
  Description of Artificial Sequence: Synthetic oligonucleotide
cuucucccuga

SEQ ID NO: 129708 - RNA, 12 nt, Artificial Sequence
  Description of Artificial Sequence: Synthetic oligonucleotide
gaagaagcccuu

SEQ ID NO: 129709 - RNA, 12 nt, Artificial Sequence
  Description of Artificial Sequence: Synthetic oligonucleotide
agaagcccuuca

SEQ ID NO: 129710 - RNA, 11 nt, Artificial Sequence
  Description of Artificial Sequence: Synthetic oligonucleotide
gcccuucagcg

SEQ ID NO: 129711 - RNA, 11 nt, Artificial Sequence
  Description of Artificial Sequence: Synthetic oligonucleotide
ccuucagcggc

SEQ ID NO: 129712 - RNA, 12 nt, Artificial Sequence
  Description of Artificial Sequence: Synthetic oligonucleotide
ucagcggccagu

SEQ ID NO: 129713 - RNA, 12 nt, Artificial Sequence
  Description of Artificial Sequence: Synthetic oligonucleotide
ugaaaagcuccg

SEQ ID NO: 129714 - RNA, 11 nt, Artificial Sequence
  Description of Artificial Sequence: Synthetic oligonucleotide
aaaagcuccgg

SEQ ID NO: 129715 - RNA, 13 nt, Artificial Sequence
  Description of Artificial Sequence: Synthetic oligonucleotide
agucaacagucug

SEQ ID NO: 129716 - RNA, 13 nt, Artificial Sequence
  Description of Artificial Sequence: Synthetic oligonucleotide
cagaguucaaaag

SEQ ID NO: 129717 - RNA, 13 nt, Artificial Sequence
  Description of Artificial Sequence: Synthetic oligonucleotide
agaguucaaaagc

SEQ ID NO: 129718 - RNA, 12 nt, Artificial Sequence
  Description of Artificial Sequence: Synthetic oligonucleotide
uucaaaagcccu

SEQ ID NO: 129719 - RNA, 12 nt, Artificial Sequence
  Description of Artificial Sequence: Synthetic oligonucleotide
ucaaaagcccuu

SEQ ID NO: 129720 - RNA, 12 nt, Artificial Sequence
  Description of Artificial Sequence: Synthetic oligonucleotide
aaaagcccuuca

SEQ ID NO: 129721 - RNA, 12 nt, Artificial Sequence
  Description of Artificial Sequence: Synthetic oligonucleotide
aaagcccuucag

SEQ ID NO: 129722 - RNA, 13 nt, Artificial Sequence
  Description of Artificial Sequence: Synthetic oligonucleotide
gugaagccgcucg

SEQ ID NO: 129723 - RNA, 12 nt, Artificial Sequence
  Description of Artificial Sequence: Synthetic oligonucleotide
cacgccagucaa

SEQ ID NO: 129724 - RNA, 13 nt, Artificial Sequence
  Description of Artificial Sequence: Synthetic oligonucleotide
uucuuggugcgug

SEQ ID NO: 129725 - RNA, 14 nt, Artificial Sequence
  Description of Artificial Sequence: Synthetic oligonucleotide
auuggauucaucag

SEQ ID NO: 129726 - RNA, 13 nt, Artificial Sequence
  Description of Artificial Sequence: Synthetic oligonucleotide
uggaauaccuaag

SEQ ID NO: 129727 - RNA, 12 nt, Artificial Sequence
  Description of Artificial Sequence: Synthetic oligonucleotide
auuugaggcuca

SEQ ID NO: 129728 - RNA, 11 nt, Artificial Sequence
  Description of Artificial Sequence: Synthetic oligonucleotide
ucuacaauugg

SEQ ID NO: 129729 - RNA, 12 nt, Artificial Sequence
  Description of Artificial Sequence: Synthetic oligonucleotide
uaguuaggagcc

SEQ ID NO: 129730 - RNA, 13 nt, Artificial Sequence
  Description of Artificial Sequence: Synthetic oligonucleotide
agucaauauccac

SEQ ID NO: 129731 - RNA, 13 nt, Artificial Sequence
  Description of Artificial Sequence: Synthetic oligonucleotide
auguucagucaca

SEQ ID NO: 129732 - RNA, 12 nt, Artificial Sequence
  Description of Artificial Sequence: Synthetic oligonucleotide
acacacacauac

SEQ ID NO: 129733 - RNA, 12 nt, Artificial Sequence
  Description of Artificial Sequence: Synthetic oligonucleotide
uuccuuuugcuu

SEQ ID NO: 129734 - RNA, 16 nt, Artificial Sequence
  Description of Artificial Sequence: Synthetic oligonucleotide
uuuuaaaguaauuuuu

SEQ ID NO: 129735 - RNA, 13 nt, Artificial Sequence
  Description of Artificial Sequence: Synthetic oligonucleotide
caacagucaaugg

SEQ ID NO: 129736 - RNA, 13 nt, Artificial Sequence
  Description of Artificial Sequence: Synthetic oligonucleotide
ucgacaaaccaau

SEQ ID NO: 129737 - RNA, 12 nt, Artificial Sequence
  Description of Artificial Sequence: Synthetic oligonucleotide
acugcuaccacu

SEQ ID NO: 129738 - RNA, 13 nt, Artificial Sequence
  Description of Artificial Sequence: Synthetic oligonucleotide
gcaagcggucuua

SEQ ID NO: 129739 - RNA, 13 nt, Artificial Sequence
  Description of Artificial Sequence: Synthetic oligonucleotide
ggucuuaccggcu

SEQ ID NO: 129740 - RNA, 11 nt, Artificial Sequence
  Description of Artificial Sequence: Synthetic oligonucleotide
gauggguuacc

SEQ ID NO: 129741 - RNA, 11 nt, Artificial Sequence
  Description of Artificial Sequence: Synthetic oligonucleotide
guuaccugcga

SEQ ID NO: 129742 - RNA, 12 nt, Artificial Sequence
  Description of Artificial Sequence: Synthetic oligonucleotide
aaucuugcugag

SEQ ID NO: 129743 - RNA, 13 nt, Artificial Sequence
  Description of Artificial Sequence: Synthetic oligonucleotide
agcauaaaacagu

SEQ ID NO: 129744 - RNA, 12 nt, Artificial Sequence
  Description of Artificial Sequence: Synthetic oligonucleotide
guccuuuauccu

SEQ ID NO: 129745 - RNA, 12 nt, Artificial Sequence
  Description of Artificial Sequence: Synthetic oligonucleotide
caacgcaaguug

SEQ ID NO: 129746 - RNA, 13 nt, Artificial Sequence
  Description of Artificial Sequence: Synthetic oligonucleotide
aaacugaaaccau

SEQ ID NO: 129747 - RNA, 14 nt, Artificial Sequence
  Description of Artificial Sequence: Synthetic oligonucleotide
acuuuguuaaauau

SEQ ID NO: 129748 - RNA, 14 nt, Artificial Sequence
  Description of Artificial Sequence: Synthetic oligonucleotide
guauauuaaaaguu

SEQ ID NO: 129749 - RNA, 13 nt, Artificial Sequence
  Description of Artificial Sequence: Synthetic oligonucleotide
guuuugacuuaac

SEQ ID NO: 129750 - RNA, 13 nt, Artificial Sequence
  Description of Artificial Sequence: Synthetic oligonucleotide
gcaaacucagcac

SEQ ID NO: 129751 - RNA, 11 nt, Artificial Sequence
  Description of Artificial Sequence: Synthetic oligonucleotide
ugcugaccuca

SEQ ID NO: 129752 - RNA, 14 nt, Artificial Sequence
  Description of Artificial Sequence: Synthetic oligonucleotide
uuuauucagaucgc

SEQ ID NO: 129753 - RNA, 13 nt, Artificial Sequence
  Description of Artificial Sequence: Synthetic oligonucleotide
aggguucugggau

SEQ ID NO: 129754 - RNA, 15 nt, Artificial Sequence
  Description of Artificial Sequence: Synthetic oligonucleotide
auauuggaaauuaug

SEQ ID NO: 129755 - RNA, 13 nt, Artificial Sequence
  Description of Artificial Sequence: Synthetic oligonucleotide
auggaagcacuag

SEQ ID NO: 129756 - RNA, 13 nt, Artificial Sequence
  Description of Artificial Sequence: Synthetic oligonucleotide
guuuuuaugugga

SEQ ID NO: 129757 - RNA, 12 nt, Artificial Sequence
  Description of Artificial Sequence: Synthetic oligonucleotide
ggaauugguaga

SEQ ID NO: 129758 - RNA, 13 nt, Artificial Sequence
  Description of Artificial Sequence: Synthetic oligonucleotide
uuagacuuggaga

SEQ ID NO: 129759 - RNA, 13 nt, Artificial Sequence
  Description of Artificial Sequence: Synthetic oligonucleotide
uuacaguauucca

SEQ ID NO: 129760 - RNA, 15 nt, Artificial Sequence
  Description of Artificial Sequence: Synthetic oligonucleotide
ccacugaugaauuaa

SEQ ID NO: 129761 - RNA, 12 nt, Artificial Sequence
  Description of Artificial Sequence: Synthetic oligonucleotide
ccacaucaucac

SEQ ID NO: 129762 - RNA, 13 nt, Artificial Sequence
  Description of Artificial Sequence: Synthetic oligonucleotide
cucaccaaacaga

SEQ ID NO: 129763 - RNA, 12 nt, Artificial Sequence
  Description of Artificial Sequence: Synthetic oligonucleotide
ggaacaugaugg

SEQ ID NO: 129764 - RNA, 12 nt, Artificial Sequence
  Description of Artificial Sequence: Synthetic oligonucleotide
cauguagacugc

SEQ ID NO: 129765 - RNA, 13 nt, Artificial Sequence
  Description of Artificial Sequence: Synthetic oligonucleotide
ggaucuauuuaug

SEQ ID NO: 129766 - RNA, 12 nt, Artificial Sequence
  Description of Artificial Sequence: Synthetic oligonucleotide
gcacuauuauca

SEQ ID NO: 129767 - RNA, 11 nt, Artificial Sequence
  Description of Artificial Sequence: Synthetic oligonucleotide
aucaguucugc

SEQ ID NO: 129768 - RNA, 13 nt, Artificial Sequence
  Description of Artificial Sequence: Synthetic oligonucleotide
agauuaaaccuac

SEQ ID NO: 129769 - RNA, 13 nt, Artificial Sequence
  Description of Artificial Sequence: Synthetic oligonucleotide
auaaaauccuucu

SEQ ID NO: 129770 - RNA, 12 nt, Artificial Sequence
  Description of Artificial Sequence: Synthetic oligonucleotide
aaugcuguagac

SEQ ID NO: 129771 - RNA, 13 nt, Artificial Sequence
  Description of Artificial Sequence: Synthetic oligonucleotide
uugauaggaauag

SEQ ID NO: 129772 - RNA, 11 nt, Artificial Sequence
  Description of Artificial Sequence: Synthetic oligonucleotide
aauggcccuga

SEQ ID NO: 129773 - RNA, 11 nt, Artificial Sequence
  Description of Artificial Sequence: Synthetic oligonucleotide
uuccucaagca

SEQ ID NO: 129774 - RNA, 10 nt, Artificial Sequence
  Description of Artificial Sequence: Synthetic oligonucleotide
guucagccca

SEQ ID NO: 129775 - RNA, 11 nt, Artificial Sequence
  Description of Artificial Sequence: Synthetic oligonucleotide
gcugcugaacc

SEQ ID NO: 129776 - RNA, 12 nt, Artificial Sequence
  Description of Artificial Sequence: Synthetic oligonucleotide
aaguucucuuca

SEQ ID NO: 129777 - RNA, 11 nt, Artificial Sequence
  Description of Artificial Sequence: Synthetic oligonucleotide
ccagccuagag

SEQ ID NO: 129778 - RNA, 13 nt, Artificial Sequence
  Description of Artificial Sequence: Synthetic oligonucleotide
cucugugaagugu

SEQ ID NO: 129779 - RNA, 14 nt, Artificial Sequence
  Description of Artificial Sequence: Synthetic oligonucleotide
ugagaaaauuucaa

SEQ ID NO: 129780 - RNA, 11 nt, Artificial Sequence
  Description of Artificial Sequence: Synthetic oligonucleotide
aauccuccuga

SEQ ID NO: 129781 - RNA, 12 nt, Artificial Sequence
  Description of Artificial Sequence: Synthetic oligonucleotide
gugacaucauau

SEQ ID NO: 129782 - RNA, 13 nt, Artificial Sequence
  Description of Artificial Sequence: Synthetic oligonucleotide
aaucuucaucaua

SEQ ID NO: 129783 - RNA, 13 nt, Artificial Sequence
  Description of Artificial Sequence: Synthetic oligonucleotide
gacuagcuauuaa

SEQ ID NO: 129784 - RNA, 14 nt, Artificial Sequence
  Description of Artificial Sequence: Synthetic oligonucleotide
ucucuacuaaaaau

SEQ ID NO: 129785 - RNA, 12 nt, Artificial Sequence
  Description of Artificial Sequence: Synthetic oligonucleotide
ucuaucucgccu

SEQ ID NO: 129786 - RNA, 13 nt, Artificial Sequence
  Description of Artificial Sequence: Synthetic oligonucleotide
cuucgguccaguu

SEQ ID NO: 129787 - RNA, 11 nt, Artificial Sequence
  Description of Artificial Sequence: Synthetic oligonucleotide
gauguagccgc

SEQ ID NO: 129788 - RNA, 12 nt, Artificial Sequence
  Description of Artificial Sequence: Synthetic oligonucleotide
ugaggagacuug

SEQ ID NO: 129789 - RNA, 12 nt, Artificial Sequence
  Description of Artificial Sequence: Synthetic oligonucleotide
gaguagugagga

SEQ ID NO: 129790 - RNA, 14 nt, Artificial Sequence
  Description of Artificial Sequence: Synthetic oligonucleotide
cagaugaguacaaa

SEQ ID NO: 129791 - RNA, 13 nt, Artificial Sequence
  Description of Artificial Sequence: Synthetic oligonucleotide
guuguuaaugggc

SEQ ID NO: 129792 - RNA, 13 nt, Artificial Sequence
  Description of Artificial Sequence: Synthetic oligonucleotide
uuuuuaauuuauu

SEQ ID NO: 129793 - RNA, 12 nt, Artificial Sequence
  Description of Artificial Sequence: Synthetic oligonucleotide
uauuuaaauaug

SEQ ID NO: 129794 - RNA, 13 nt, Artificial Sequence
  Description of Artificial Sequence: Synthetic oligonucleotide
uauccuuuguuuc

SEQ ID NO: 129795 - RNA, 14 nt, Artificial Sequence
  Description of Artificial Sequence: Synthetic oligonucleotide
cgucuaaguguuug

SEQ ID NO: 129796 - RNA, 12 nt, Artificial Sequence
  Description of Artificial Sequence: Synthetic oligonucleotide
accugugacaaa

SEQ ID NO: 129797 - RNA, 13 nt, Artificial Sequence
  Description of Artificial Sequence: Synthetic oligonucleotide
ccaggcugaauua

SEQ ID NO: 129798 - RNA, 14 nt, Artificial Sequence
  Description of Artificial Sequence: Synthetic oligonucleotide
gucauucuuacaau

SEQ ID NO: 129799 - RNA, 15 nt, Artificial Sequence
  Description of Artificial Sequence: Synthetic oligonucleotide
ucauucuuacaauug

SEQ ID NO: 129800 - RNA, 12 nt, Artificial Sequence
  Description of Artificial Sequence: Synthetic oligonucleotide
cagagaguguac

SEQ ID NO: 129801 - RNA, 12 nt, Artificial Sequence
  Description of Artificial Sequence: Synthetic oligonucleotide
agaacucagcag

SEQ ID NO: 129802 - RNA, 13 nt, Artificial Sequence
  Description of Artificial Sequence: Synthetic oligonucleotide
uuuauuuucagua

SEQ ID NO: 129803 - RNA, 12 nt, Artificial Sequence
  Description of Artificial Sequence: Synthetic oligonucleotide
ucuuaaauggaa

SEQ ID NO: 129804 - RNA, 13 nt, Artificial Sequence
  Description of Artificial Sequence: Synthetic oligonucleotide
ugccuaaaauugu

SEQ ID NO: 129805 - RNA, 12 nt, Artificial Sequence
  Description of Artificial Sequence: Synthetic oligonucleotide
agacugugagcu

SEQ ID NO: 129806 - RNA, 14 nt, Artificial Sequence
  Description of Artificial Sequence: Synthetic oligonucleotide
ugcuuuuuauuaau

SEQ ID NO: 129807 - RNA, 13 nt, Artificial Sequence
  Description of Artificial Sequence: Synthetic oligonucleotide
cucuucuuacauu

SEQ ID NO: 129808 - RNA, 15 nt, Artificial Sequence
  Description of Artificial Sequence: Synthetic oligonucleotide
cauuuguaaaaaugu

SEQ ID NO: 129809 - RNA, 15 nt, Artificial Sequence
  Description of Artificial Sequence: Synthetic oligonucleotide
aucuuaauucauauu

SEQ ID NO: 129810 - RNA, 13 nt, Artificial Sequence
  Description of Artificial Sequence: Synthetic oligonucleotide
gaacuaaucauga

SEQ ID NO: 129811 - RNA, 12 nt, Artificial Sequence
  Description of Artificial Sequence: Synthetic oligonucleotide
ucugcucuuggg

SEQ ID NO: 129812 - RNA, 13 nt, Artificial Sequence
  Description of Artificial Sequence: Synthetic oligonucleotide
caguagcuuugag

SEQ ID NO: 129813 - RNA, 14 nt, Artificial Sequence
  Description of Artificial Sequence: Synthetic oligonucleotide
cacguaauauuuca

SEQ ID NO: 129814 - RNA, 13 nt, Artificial Sequence
  Description of Artificial Sequence: Synthetic oligonucleotide
uauucucuucacu

SEQ ID NO: 129815 - RNA, 14 nt, Artificial Sequence
  Description of Artificial Sequence: Synthetic oligonucleotide
cuaaugcuaagaaa

SEQ ID NO: 129816 - RNA, 12 nt, Artificial Sequence
  Description of Artificial Sequence: Synthetic oligonucleotide
gcugaaaaucaa

SEQ ID NO: 129817 - RNA, 14 nt, Artificial Sequence
  Description of Artificial Sequence: Synthetic oligonucleotide
aauaugauuacuuu

SEQ ID NO: 129818 - RNA, 14 nt, Artificial Sequence
  Description of Artificial Sequence: Synthetic oligonucleotide
cauuuuguucuaca

SEQ ID NO: 129819 - RNA, 12 nt, Artificial Sequence
  Description of Artificial Sequence: Synthetic oligonucleotide
cccgggacucuc

SEQ ID NO: 129820 - RNA, 14 nt, Artificial Sequence
  Description of Artificial Sequence: Synthetic oligonucleotide
ccuuuaaaguaaag

SEQ ID NO: 129821 - RNA, 13 nt, Artificial Sequence
  Description of Artificial Sequence: Synthetic oligonucleotide
ucuggaagccugg

SEQ ID NO: 129822 - RNA, 14 nt, Artificial Sequence
  Description of Artificial Sequence: Synthetic oligonucleotide
aaaacaaaagagag

SEQ ID NO: 129823 - RNA, 13 nt, Artificial Sequence
  Description of Artificial Sequence: Synthetic oligonucleotide
aucaguuaugccg

SEQ ID NO: 129824 - RNA, 13 nt, Artificial Sequence
  Description of Artificial Sequence: Synthetic oligonucleotide
uaaaagaagucca

SEQ ID NO: 129825 - RNA, 11 nt, Artificial Sequence
  Description of Artificial Sequence: Synthetic oligonucleotide
aggugagguua

SEQ ID NO: 129826 - RNA, 11 nt, Artificial Sequence
  Description of Artificial Sequence: Synthetic oligonucleotide
gggaagaggac

SEQ ID NO: 129827 - RNA, 13 nt, Artificial Sequence
  Description of Artificial Sequence: Synthetic oligonucleotide
aagcaaguauugu

SEQ ID NO: 129828 - RNA, 12 nt, Artificial Sequence
  Description of Artificial Sequence: Synthetic oligonucleotide
auuguagcacuc

SEQ ID NO: 129829 - RNA, 14 nt, Artificial Sequence
  Description of Artificial Sequence: Synthetic oligonucleotide
acaaaaccacaaau

SEQ ID NO: 129830 - RNA, 12 nt, Artificial Sequence
  Description of Artificial Sequence: Synthetic oligonucleotide
uaagcccauaca

SEQ ID NO: 129831 - RNA, 11 nt, Artificial Sequence
  Description of Artificial Sequence: Synthetic oligonucleotide
agcccauacag

SEQ ID NO: 129832 - RNA, 12 nt, Artificial Sequence
  Description of Artificial Sequence: Synthetic oligonucleotide
cagaaaccuucc

SEQ ID NO: 129833 - RNA, 10 nt, Artificial Sequence
  Description of Artificial Sequence: Synthetic oligonucleotide
guauaccuac

SEQ ID NO: 129834 - RNA, 13 nt, Artificial Sequence
  Description of Artificial Sequence: Synthetic oligonucleotide
gccaguuuucgga

SEQ ID NO: 129835 - RNA, 9 nt, Artificial Sequence
  Description of Artificial Sequence: Synthetic oligonucleotide
ggaacaggg

SEQ ID NO: 129836 - RNA, 13 nt, Artificial Sequence
  Description of Artificial Sequence: Synthetic oligonucleotide
uuaacuuuccagu

SEQ ID NO: 129837 - RNA, 14 nt, Artificial Sequence
  Description of Artificial Sequence: Synthetic oligonucleotide
aaaguuugguuuug

SEQ ID NO: 129838 - RNA, 12 nt, Artificial Sequence
  Description of Artificial Sequence: Synthetic oligonucleotide
cuucccacugua

SEQ ID NO: 129839 - RNA, 13 nt, Artificial Sequence
  Description of Artificial Sequence: Synthetic oligonucleotide
ugauaccauauga

SEQ ID NO: 129840 - RNA, 11 nt, Artificial Sequence
  Description of Artificial Sequence: Synthetic oligonucleotide
aacaugggcug

SEQ ID NO: 129841 - RNA, 13 nt, Artificial Sequence
  Description of Artificial Sequence: Synthetic oligonucleotide
caacuuuuucaua

SEQ ID NO: 129842 - RNA, 12 nt, Artificial Sequence
  Description of Artificial Sequence: Synthetic oligonucleotide
caugaggccgga

SEQ ID NO: 129843 - RNA, 11 nt, Artificial Sequence
  Description of Artificial Sequence: Synthetic oligonucleotide
acugcauuugu

SEQ ID NO: 129844 - RNA, 13 nt, Artificial Sequence
  Description of Artificial Sequence: Synthetic oligonucleotide
aauguuuacuacc

SEQ ID NO: 129845 - RNA, 15 nt, Artificial Sequence
  Description of Artificial Sequence: Synthetic oligonucleotide
aauuuuuugaugaaa

SEQ ID NO: 129846 - RNA, 14 nt, Artificial Sequence
  Description of Artificial Sequence: Synthetic oligonucleotide
cagugugugaauuu

SEQ ID NO: 129847 - RNA, 13 nt, Artificial Sequence
  Description of Artificial Sequence: Synthetic oligonucleotide
gagcaauguaugu

SEQ ID NO: 129848 - RNA, 14 nt, Artificial Sequence
  Description of Artificial Sequence: Synthetic oligonucleotide
aaagcacauauaua

SEQ ID NO: 129849 - RNA, 14 nt, Artificial Sequence
  Description of Artificial Sequence: Synthetic oligonucleotide
guaauaguuucucc

SEQ ID NO: 129850 - RNA, 13 nt, Artificial Sequence
  Description of Artificial Sequence: Synthetic oligonucleotide
aguuucuccaaau

SEQ ID NO: 129851 - RNA, 13 nt, Artificial Sequence
  Description of Artificial Sequence: Synthetic oligonucleotide
uacuuccuagaaa

SEQ ID NO: 129852 - RNA, 13 nt, Artificial Sequence
  Description of Artificial Sequence: Synthetic oligonucleotide
uacaccauauaug

SEQ ID NO: 129853 - RNA, 14 nt, Artificial Sequence
  Description of Artificial Sequence: Synthetic oligonucleotide
auauaugaauggag

SEQ ID NO: 129854 - RNA, 13 nt, Artificial Sequence
  Description of Artificial Sequence: Synthetic oligonucleotide
acgagaagaagau

SEQ ID NO: 129855 - RNA, 13 nt, Artificial Sequence
  Description of Artificial Sequence: Synthetic oligonucleotide
ucauuuacaggga

SEQ ID NO: 129856 - RNA, 13 nt, Artificial Sequence
  Description of Artificial Sequence: Synthetic oligonucleotide
cauuuacagggac

SEQ ID NO: 129857 - RNA, 10 nt, Artificial Sequence
  Description of Artificial Sequence: Synthetic oligonucleotide
agggaccuga

SEQ ID NO: 129858 - RNA, 14 nt, Artificial Sequence
  Description of Artificial Sequence: Synthetic oligonucleotide
uguuugacugcauc

SEQ ID NO: 129859 - RNA, 13 nt, Artificial Sequence
  Description of Artificial Sequence: Synthetic oligonucleotide
uuugacugcaucg

SEQ ID NO: 129860 - RNA, 12 nt, Artificial Sequence
  Description of Artificial Sequence: Synthetic oligonucleotide
gaguucacaggg

SEQ ID NO: 129861 - RNA, 13 nt, Artificial Sequence
  Description of Artificial Sequence: Synthetic oligonucleotide
ggcaccucugucc

SEQ ID NO: 129862 - RNA, 15 nt, Artificial Sequence
  Description of Artificial Sequence: Synthetic oligonucleotide
gguuugucuuuuuaa

SEQ ID NO: 129863 - RNA, 14 nt, Artificial Sequence
  Description of Artificial Sequence: Synthetic oligonucleotide
uuugucuuuuuaag

SEQ ID NO: 129864 - RNA, 13 nt, Artificial Sequence
  Description of Artificial Sequence: Synthetic oligonucleotide
ccuaaagguuguc

SEQ ID NO: 129865 - RNA, 12 nt, Artificial Sequence
  Description of Artificial Sequence: Synthetic oligonucleotide
aagguugucgac

SEQ ID NO: 129866 - RNA, 13 nt, Artificial Sequence
  Description of Artificial Sequence: Synthetic oligonucleotide
accuggcaauugu

SEQ ID NO: 129867 - RNA, 12 nt, Artificial Sequence
  Description of Artificial Sequence: Synthetic oligonucleotide
aguggugcgagg

SEQ ID NO: 129868 - RNA, 13 nt, Artificial Sequence
  Description of Artificial Sequence: Synthetic oligonucleotide
agagacaugaaau

SEQ ID NO: 129869 - RNA, 13 nt, Artificial Sequence
  Description of Artificial Sequence: Synthetic oligonucleotide
auauauuucucca

SEQ ID NO: 129870 - RNA, 10 nt, Artificial Sequence
  Description of Artificial Sequence: Synthetic oligonucleotide
caugaaggcu

SEQ ID NO: 129871 - RNA, 11 nt, Artificial Sequence
  Description of Artificial Sequence: Synthetic oligonucleotide
gcuggaguggu

SEQ ID NO: 129872 - RNA, 11 nt, Artificial Sequence
  Description of Artificial Sequence: Synthetic oligonucleotide
aggaagagagg

SEQ ID NO: 129873 - RNA, 12 nt, Artificial Sequence
  Description of Artificial Sequence: Synthetic oligonucleotide
cuugcaucgggc

SEQ ID NO: 129874 - RNA, 13 nt, Artificial Sequence
  Description of Artificial Sequence: Synthetic oligonucleotide
auauccuacugug

SEQ ID NO: 129875 - RNA, 13 nt, Artificial Sequence
  Description of Artificial Sequence: Synthetic oligonucleotide
uccuacuguguaa

SEQ ID NO: 129876 - RNA, 12 nt, Artificial Sequence
  Description of Artificial Sequence: Synthetic oligonucleotide
ccuuguagugua

SEQ ID NO: 129877 - RNA, 13 nt, Artificial Sequence
  Description of Artificial Sequence: Synthetic oligonucleotide
ucuuuguugauug

SEQ ID NO: 129878 - RNA, 14 nt, Artificial Sequence
  Description of Artificial Sequence: Synthetic oligonucleotide
uuuguugauugaaa

SEQ ID NO: 129879 - RNA, 15 nt, Artificial Sequence
  Description of Artificial Sequence: Synthetic oligonucleotide
uucuuuuucuuccau

SEQ ID NO: 129880 - RNA, 13 nt, Artificial Sequence
  Description of Artificial Sequence: Synthetic oligonucleotide
aaucuuccuucua

SEQ ID NO: 129881 - RNA, 13 nt, Artificial Sequence
  Description of Artificial Sequence: Synthetic oligonucleotide
uugaaugcuucau

SEQ ID NO: 129882 - RNA, 13 nt, Artificial Sequence
  Description of Artificial Sequence: Synthetic oligonucleotide
ugaaugcuucaug

SEQ ID NO: 129883 - RNA, 13 nt, Artificial Sequence
  Description of Artificial Sequence: Synthetic oligonucleotide
aauucuacuuuga

SEQ ID NO: 129884 - RNA, 13 nt, Artificial Sequence
  Description of Artificial Sequence: Synthetic oligonucleotide
agcaacuacagac

SEQ ID NO: 129885 - RNA, 13 nt, Artificial Sequence
  Description of Artificial Sequence: Synthetic oligonucleotide
gaccaaggucaac

SEQ ID NO: 129886 - RNA, 13 nt, Artificial Sequence
  Description of Artificial Sequence: Synthetic oligonucleotide
cgacuaucucgac

SEQ ID NO: 129887 - RNA, 13 nt, Artificial Sequence
  Description of Artificial Sequence: Synthetic oligonucleotide
aaccuucccaaac

SEQ ID NO: 129888 - RNA, 14 nt, Artificial Sequence
  Description of Artificial Sequence: Synthetic oligonucleotide
ccaagcuuagaacu

SEQ ID NO: 129889 - RNA, 15 nt, Artificial Sequence
  Description of Artificial Sequence: Synthetic oligonucleotide
agcuuagaacuuuaa

SEQ ID NO: 129890 - RNA, 11 nt, Artificial Sequence
  Description of Artificial Sequence: Synthetic oligonucleotide
aagaccaccac

SEQ ID NO: 129891 - RNA, 14 nt, Artificial Sequence
  Description of Artificial Sequence: Synthetic oligonucleotide
gcgagaaauaaagu

SEQ ID NO: 129892 - RNA, 14 nt, Artificial Sequence
  Description of Artificial Sequence: Synthetic oligonucleotide
cgagaaauaaaguu

SEQ ID NO: 129893 - RNA, 12 nt, Artificial Sequence
  Description of Artificial Sequence: Synthetic oligonucleotide
aggaaaugaucc

SEQ ID NO: 129894 - RNA, 13 nt, Artificial Sequence
  Description of Artificial Sequence: Synthetic oligonucleotide
gaagaaaugaaac

SEQ ID NO: 129895 - RNA, 13 nt, Artificial Sequence
  Description of Artificial Sequence: Synthetic oligonucleotide
guuuccauccucc

SEQ ID NO: 129896 - RNA, 15 nt, Artificial Sequence
  Description of Artificial Sequence: Synthetic oligonucleotide
acugaaaaucuuuga

SEQ ID NO: 129897 - RNA, 11 nt, Artificial Sequence
  Description of Artificial Sequence: Synthetic oligonucleotide
ugccguucagg

SEQ ID NO: 129898 - RNA, 13 nt, Artificial Sequence
  Description of Artificial Sequence: Synthetic oligonucleotide
caggguccagaag

SEQ ID NO: 129899 - RNA, 13 nt, Artificial Sequence
  Description of Artificial Sequence: Synthetic oligonucleotide
ucaagacugcuug

SEQ ID NO: 129900 - RNA, 13 nt, Artificial Sequence
  Description of Artificial Sequence: Synthetic oligonucleotide
uccaugucuuugg

SEQ ID NO: 129901 - RNA, 11 nt, Artificial Sequence
  Description of Artificial Sequence: Synthetic oligonucleotide
gccugaaacac

SEQ ID NO: 129902 - RNA, 12 nt, Artificial Sequence
  Description of Artificial Sequence: Synthetic oligonucleotide
ucucuguaccuc

SEQ ID NO: 129903 - RNA, 12 nt, Artificial Sequence
  Description of Artificial Sequence: Synthetic oligonucleotide
agcaagacaaga

SEQ ID NO: 129904 - RNA, 13 nt, Artificial Sequence
  Description of Artificial Sequence: Synthetic oligonucleotide
gcaagacaagaaa

SEQ ID NO: 129905 - RNA, 12 nt, Artificial Sequence
  Description of Artificial Sequence: Synthetic oligonucleotide
uguacaagaucc

SEQ ID NO: 129906 - RNA, 12 nt, Artificial Sequence
  Description of Artificial Sequence: Synthetic oligonucleotide
cguacuugcaga

SEQ ID NO: 129907 - RNA, 13 nt, Artificial Sequence
  Description of Artificial Sequence: Synthetic oligonucleotide
cgaucgauacaga

SEQ ID NO: 129908 - RNA, 13 nt, Artificial Sequence
  Description of Artificial Sequence: Synthetic oligonucleotide
uauaaaaauaaau

SEQ ID NO: 129909 - RNA, 13 nt, Artificial Sequence
  Description of Artificial Sequence: Synthetic oligonucleotide
uaaaaauaaauau

SEQ ID NO: 129910 - RNA, 13 nt, Artificial Sequence
  Description of Artificial Sequence: Synthetic oligonucleotide
uuugacugcugug

SEQ ID NO: 129911 - RNA, 13 nt, Artificial Sequence
  Description of Artificial Sequence: Synthetic oligonucleotide
ggagaugagagac

SEQ ID NO: 129912 - RNA, 10 nt, Artificial Sequence
  Description of Artificial Sequence: Synthetic oligonucleotide
ucccacuugg

SEQ ID NO: 129913 - RNA, 10 nt, Artificial Sequence
  Description of Artificial Sequence: Synthetic oligonucleotide
guucacggcc

SEQ ID NO: 129914 - RNA, 12 nt, Artificial Sequence
  Description of Artificial Sequence: Synthetic oligonucleotide
accaucacacca

SEQ ID NO: 129915 - RNA, 10 nt, Artificial Sequence
  Description of Artificial Sequence: Synthetic oligonucleotide
cugcggguuu

SEQ ID NO: 129916 - RNA, 9 nt, Artificial Sequence
  Description of Artificial Sequence: Synthetic oligonucleotide
uccaguuug

SEQ ID NO: 129917 - RNA, 12 nt, Artificial Sequence
  Description of Artificial Sequence: Synthetic oligonucleotide
uuaaggacuucu

SEQ ID NO: 129918 - RNA, 12 nt, Artificial Sequence
  Description of Artificial Sequence: Synthetic oligonucleotide
agugggacagag

SEQ ID NO: 129919 - RNA, 13 nt, Artificial Sequence
  Description of Artificial Sequence: Synthetic oligonucleotide
auuuguuauugug

SEQ ID NO: 129920 - RNA, 12 nt, Artificial Sequence
  Description of Artificial Sequence: Synthetic oligonucleotide
ucaaaugcauuu

SEQ ID NO: 129921 - RNA, 9 nt, Artificial Sequence
  Description of Artificial Sequence: Synthetic oligonucleotide
aggaaagcc

SEQ ID NO: 129922 - RNA, 10 nt, Artificial Sequence
  Description of Artificial Sequence: Synthetic oligonucleotide
ggaaagcccu

SEQ ID NO: 129923 - RNA, 11 nt, Artificial Sequence
  Description of Artificial Sequence: Synthetic oligonucleotide
ccagcauggcc

SEQ ID NO: 129924 - RNA, 10 nt, Artificial Sequence
  Description of Artificial Sequence: Synthetic oligonucleotide
uucucccuga

SEQ ID NO: 129925 - RNA, 11 nt, Artificial Sequence
  Description of Artificial Sequence: Synthetic oligonucleotide
aagaagcccuu

SEQ ID NO: 129926 - RNA, 11 nt, Artificial Sequence
  Description of Artificial Sequence: Synthetic oligonucleotide
gaagcccuuca

SEQ ID NO: 129927 - RNA, 10 nt, Artificial Sequence
  Description of Artificial Sequence: Synthetic oligonucleotide
cccuucagcg

SEQ ID NO: 129928 - RNA, 10 nt, Artificial Sequence
  Description of Artificial Sequence: Synthetic oligonucleotide
cuucagcggc

SEQ ID NO: 129929 - RNA, 11 nt, Artificial Sequence
  Description of Artificial Sequence: Synthetic oligonucleotide
cagcggccagu

SEQ ID NO: 129930 - RNA, 11 nt, Artificial Sequence
  Description of Artificial Sequence: Synthetic oligonucleotide
gaaaagcuccg

SEQ ID NO: 129931 - RNA, 10 nt, Artificial Sequence
  Description of Artificial Sequence: Synthetic oligonucleotide
aaagcuccgg

SEQ ID NO: 129932 - RNA, 12 nt, Artificial Sequence
  Description of Artificial Sequence: Synthetic oligonucleotide
gucaacagucug

SEQ ID NO: 129933 - RNA, 12 nt, Artificial Sequence
  Description of Artificial Sequence: Synthetic oligonucleotide
agaguucaaaag

SEQ ID NO: 129934 - RNA, 12 nt, Artificial Sequence
  Description of Artificial Sequence: Synthetic oligonucleotide
gaguucaaaagc

SEQ ID NO: 129935 - RNA, 11 nt, Artificial Sequence
  Description of Artificial Sequence: Synthetic oligonucleotide
ucaaaagcccu

SEQ ID NO: 129936 - RNA, 11 nt, Artificial Sequence
  Description of Artificial Sequence: Synthetic oligonucleotide
caaaagcccuu

SEQ ID NO: 129937 - RNA, 11 nt, Artificial Sequence
  Description of Artificial Sequence: Synthetic oligonucleotide
aaagcccuuca

SEQ ID NO: 129938 - RNA, 11 nt, Artificial Sequence
  Description of Artificial Sequence: Synthetic oligonucleotide
aagcccuucag

SEQ ID NO: 129939 - RNA, 12 nt, Artificial Sequence
  Description of Artificial Sequence: Synthetic oligonucleotide
ugaagccgcucg

SEQ ID NO: 129940 - RNA, 11 nt, Artificial Sequence
  Description of Artificial Sequence: Synthetic oligonucleotide
acgccagucaa

SEQ ID NO: 129941 - RNA, 12 nt, Artificial Sequence
  Description of Artificial Sequence: Synthetic oligonucleotide
ucuuggugcgug

SEQ ID NO: 129942 - RNA, 13 nt, Artificial Sequence
  Description of Artificial Sequence: Synthetic oligonucleotide
uuggauucaucag

SEQ ID NO: 129943 - RNA, 12 nt, Artificial Sequence
  Description of Artificial Sequence: Synthetic oligonucleotide
ggaauaccuaag

SEQ ID NO: 129944 - RNA, 11 nt, Artificial Sequence
  Description of Artificial Sequence: Synthetic oligonucleotide
uuugaggcuca

SEQ ID NO: 129945 - RNA, 10 nt, Artificial Sequence
  Description of Artificial Sequence: Synthetic oligonucleotide
cuacaauugg

SEQ ID NO: 129946 - RNA, 11 nt, Artificial Sequence
  Description of Artificial Sequence: Synthetic oligonucleotide
aguuaggagcc

SEQ ID NO: 129947 - RNA, 12 nt, Artificial Sequence
  Description of Artificial Sequence: Synthetic oligonucleotide
gucaauauccac

SEQ ID NO: 129948 - RNA, 12 nt, Artificial Sequence
  Description of Artificial Sequence: Synthetic oligonucleotide
uguucagucaca

SEQ ID NO: 129949 - RNA, 11 nt, Artificial Sequence
  Description of Artificial Sequence: Synthetic oligonucleotide
cacacacauac

SEQ ID NO: 129950 - RNA, 11 nt, Artificial Sequence
  Description of Artificial Sequence: Synthetic oligonucleotide
uccuuuugcuu

SEQ ID NO: 129951 - RNA, 15 nt, Artificial Sequence
  Description of Artificial Sequence: Synthetic oligonucleotide
uuuaaaguaauuuuu

SEQ ID NO: 129952 - RNA, 12 nt, Artificial Sequence
  Description of Artificial Sequence: Synthetic oligonucleotide
aacagucaaugg

SEQ ID NO: 129953 - RNA, 12 nt, Artificial Sequence
  Description of Artificial Sequence: Synthetic oligonucleotide
cgacaaaccaau

SEQ ID NO: 129954 - RNA, 11 nt, Artificial Sequence
  Description of Artificial Sequence: Synthetic oligonucleotide
cugcuaccacu

SEQ ID NO: 129955 - RNA, 12 nt, Artificial Sequence
  Description of Artificial Sequence: Synthetic oligonucleotide
caagcggucuua

SEQ ID NO: 129956 - RNA, 12 nt, Artificial Sequence
  Description of Artificial Sequence: Synthetic oligonucleotide
gucuuaccggcu

SEQ ID NO: 129957 - RNA, 10 nt, Artificial Sequence
  Description of Artificial Sequence: Synthetic oligonucleotide
auggguuacc

SEQ ID NO: 129958 - RNA, 10 nt, Artificial Sequence
  Description of Artificial Sequence: Synthetic oligonucleotide
uuaccugcga

SEQ ID NO: 129959 - RNA, 11 nt, Artificial Sequence
  Description of Artificial Sequence: Synthetic oligonucleotide
aucuugcugag

SEQ ID NO: 129960 - RNA, 12 nt, Artificial Sequence
  Description of Artificial Sequence: Synthetic oligonucleotide
gcauaaaacagu

SEQ ID NO: 129961 - RNA, 11 nt, Artificial Sequence
  Description of Artificial Sequence: Synthetic oligonucleotide
uccuuuauccu

SEQ ID NO: 129962 - RNA, 11 nt, Artificial Sequence
  Description of Artificial Sequence: Synthetic oligonucleotide
aacgcaaguug

SEQ ID NO: 129963 - RNA, 12 nt, Artificial Sequence
  Description of Artificial Sequence: Synthetic oligonucleotide
aacugaaaccau

SEQ ID NO: 129964 - RNA, 13 nt, Artificial Sequence
  Description of Artificial Sequence: Synthetic oligonucleotide
cuuuguuaaauau

SEQ ID NO: 129965 - RNA, 13 nt, Artificial Sequence
  Description of Artificial Sequence: Synthetic oligonucleotide
uauauuaaaaguu

SEQ ID NO: 129966 - RNA, 12 nt, Artificial Sequence
  Description of Artificial Sequence: Synthetic oligonucleotide
uuuugacuuaac

SEQ ID NO: 129967 - RNA, 12 nt, Artificial Sequence
  Description of Artificial Sequence: Synthetic oligonucleotide
caaacucagcac

SEQ ID NO: 129968 - RNA, 10 nt, Artificial Sequence
  Description of Artificial Sequence: Synthetic oligonucleotide
gcugaccuca

SEQ ID NO: 129969 - RNA, 13 nt, Artificial Sequence
  Description of Artificial Sequence: Synthetic oligonucleotide
uuauucagaucgc

SEQ ID NO: 129970 - RNA, 12 nt, Artificial Sequence
  Description of Artificial Sequence: Synthetic oligonucleotide
ggguucugggau

SEQ ID NO: 129971 - RNA, 14 nt, Artificial Sequence
  Description of Artificial Sequence: Synthetic oligonucleotide
uauuggaaauuaug

SEQ ID NO: 129972 - RNA, 12 nt, Artificial Sequence
  Description of Artificial Sequence: Synthetic oligonucleotide
uggaagcacuag

SEQ ID NO: 129973 - RNA, 12 nt, Artificial Sequence
  Description of Artificial Sequence: Synthetic oligonucleotide
uuuuuaugugga

SEQ ID NO: 129974 - RNA, 11 nt, Artificial Sequence
  Description of Artificial Sequence: Synthetic oligonucleotide
gaauugguaga

SEQ ID NO: 129975 - RNA, 12 nt, Artificial Sequence
  Description of Artificial Sequence: Synthetic oligonucleotide
uagacuuggaga

SEQ ID NO: 129976 - RNA, 12 nt, Artificial Sequence
  Description of Artificial Sequence: Synthetic oligonucleotide
uacaguauucca

SEQ ID NO: 129977 - RNA, 14 nt, Artificial Sequence
  Description of Artificial Sequence: Synthetic oligonucleotide
cacugaugaauuaa

SEQ ID NO: 129978 - RNA, 11 nt, Artificial Sequence
  Description of Artificial Sequence: Synthetic oligonucleotide
cacaucaucac

SEQ ID NO: 129979 - RNA, 12 nt, Artificial Sequence
  Description of Artificial Sequence: Synthetic oligonucleotide
ucaccaaacaga

SEQ ID NO: 129980 - RNA, 11 nt, Artificial Sequence
  Description of Artificial Sequence: Synthetic oligonucleotide
gaacaugaugg

SEQ ID NO: 129981 - RNA, 11 nt, Artificial Sequence
  Description of Artificial Sequence: Synthetic oligonucleotide
auguagacugc

SEQ ID NO: 129982 - RNA, 12 nt, Artificial Sequence
  Description of Artificial Sequence: Synthetic oligonucleotide
gaucuauuuaug

SEQ ID NO: 129983 - RNA, 11 nt, Artificial Sequence
  Description of Artificial Sequence: Synthetic oligonucleotide
cacuauuauca

SEQ ID NO: 129984 - RNA, 10 nt, Artificial Sequence
  Description of Artificial Sequence: Synthetic oligonucleotide
ucaguucugc

SEQ ID NO: 129985 - RNA, 12 nt, Artificial Sequence
  Description of Artificial Sequence: Synthetic oligonucleotide
gauuaaaccuac

SEQ ID NO: 129986 - RNA, 12 nt, Artificial Sequence
  Description of Artificial Sequence: Synthetic oligonucleotide
uaaaauccuucu

SEQ ID NO: 129987 - RNA, 11 nt, Artificial Sequence
  Description of Artificial Sequence: Synthetic oligonucleotide
augcuguagac

SEQ ID NO: 129988 - RNA, 12 nt, Artificial Sequence
  Description of Artificial Sequence: Synthetic oligonucleotide
ugauaggaauag

SEQ ID NO: 129989 - RNA, 10 nt, Artificial Sequence
  Description of Artificial Sequence: Synthetic oligonucleotide
auggcccuga

SEQ ID NO: 129990 - RNA, 10 nt, Artificial Sequence
  Description of Artificial Sequence: Synthetic oligonucleotide
uccucaagca

SEQ ID NO: 129991 - RNA, 9 nt, Artificial Sequence
  Description of Artificial Sequence: Synthetic oligonucleotide
uucagccca

SEQ ID NO: 129992 - RNA, 10 nt, Artificial Sequence
  Description of Artificial Sequence: Synthetic oligonucleotide
cugcugaacc

SEQ ID NO: 129993 - RNA, 11 nt, Artificial Sequence
  Description of Artificial Sequence: Synthetic oligonucleotide
aguucucuuca

SEQ ID NO: 129994 - RNA, 10 nt, Artificial Sequence
  Description of Artificial Sequence: Synthetic oligonucleotide
cagccuagag

SEQ ID NO: 129995 - RNA, 12 nt, Artificial Sequence
  Description of Artificial Sequence: Synthetic oligonucleotide
ucugugaagugu

SEQ ID NO: 129996 - RNA, 13 nt, Artificial Sequence
  Description of Artificial Sequence: Synthetic oligonucleotide
gagaaaauuucaa

SEQ ID NO: 129997 - RNA, 10 nt, Artificial Sequence
  Description of Artificial Sequence: Synthetic oligonucleotide
auccuccuga

SEQ ID NO: 129998 - RNA, 11 nt, Artificial Sequence
  Description of Artificial Sequence: Synthetic oligonucleotide
ugacaucauau

SEQ ID NO: 129999 - RNA, 12 nt, Artificial Sequence
  Description of Artificial Sequence: Synthetic oligonucleotide
aucuucaucaua

SEQ ID NO: 130000 - RNA, 12 nt, Artificial Sequence
  Description of Artificial Sequence: Synthetic oligonucleotide
acuagcuauuaa

SEQ ID NO: 130001 - RNA, 13 nt, Artificial Sequence
  Description of Artificial Sequence: Synthetic oligonucleotide
cucuacuaaaaau

SEQ ID NO: 130002 - RNA, 11 nt, Artificial Sequence
  Description of Artificial Sequence: Synthetic oligonucleotide
cuaucucgccu

SEQ ID NO: 130003 - RNA, 12 nt, Artificial Sequence
  Description of Artificial Sequence: Synthetic oligonucleotide
uucgguccaguu

SEQ ID NO: 130004 - RNA, 10 nt, Artificial Sequence
  Description of Artificial Sequence: Synthetic oligonucleotide
auguagccgc

SEQ ID NO: 130005 - RNA, 11 nt, Artificial Sequence
  Description of Artificial Sequence: Synthetic oligonucleotide
gaggagacuug

SEQ ID NO: 130006 - RNA, 11 nt, Artificial Sequence
  Description of Artificial Sequence: Synthetic oligonucleotide
aguagugagga

SEQ ID NO: 130007 - RNA, 13 nt, Artificial Sequence
  Description of Artificial Sequence: Synthetic oligonucleotide
agaugaguacaaa

SEQ ID NO: 130008 - RNA, 12 nt, Artificial Sequence
  Description of Artificial Sequence: Synthetic oligonucleotide
uuguuaaugggc

SEQ ID NO: 130009 - RNA, 12 nt, Artificial Sequence
  Description of Artificial Sequence: Synthetic oligonucleotide
uuuuaauuuauu

SEQ ID NO: 130010 - RNA, 11 nt, Artificial Sequence
  Description of Artificial Sequence: Synthetic oligonucleotide
auuuaaauaug

SEQ ID NO: 130011 - RNA, 12 nt, Artificial Sequence
  Description of Artificial Sequence: Synthetic oligonucleotide
auccuuuguuuc

SEQ ID NO: 130012 - RNA, 13 nt, Artificial Sequence
  Description of Artificial Sequence: Synthetic oligonucleotide
gucuaaguguuug

SEQ ID NO: 130013 - RNA, 11 nt, Artificial Sequence
  Description of Artificial Sequence: Synthetic oligonucleotide
ccugugacaaa

SEQ ID NO: 130014 - RNA, 12 nt, Artificial Sequence
  Description of Artificial Sequence: Synthetic oligonucleotide
caggcugaauua

SEQ ID NO: 130015 - RNA, 13 nt, Artificial Sequence
  Description of Artificial Sequence: Synthetic oligonucleotide
ucauucuuacaau

SEQ ID NO: 130016 - RNA, 14 nt, Artificial Sequence
  Description of Artificial Sequence: Synthetic oligonucleotide
cauucuuacaauug

SEQ ID NO: 130017 - RNA, 11 nt, Artificial Sequence
  Description of Artificial Sequence: Synthetic oligonucleotide
agagaguguac

SEQ ID NO: 130018 - RNA, 11 nt, Artificial Sequence
  Description of Artificial Sequence: Synthetic oligonucleotide
gaacucagcag

SEQ ID NO: 130019 - RNA, 12 nt, Artificial Sequence
  Description of Artificial Sequence: Synthetic oligonucleotide
uuauuuucagua

SEQ ID NO: 130020 - RNA, 11 nt, Artificial Sequence
  Description of Artificial Sequence: Synthetic oligonucleotide
cuuaaauggaa

SEQ ID NO: 130021 - RNA, 12 nt, Artificial Sequence
  Description of Artificial Sequence: Synthetic oligonucleotide
gccuaaaauugu

SEQ ID NO: 130022 - RNA, 12 nt, Artificial Sequence
  Description of Artificial Sequence: Synthetic oligonucleotide
acuaacaucugg

SEQ ID NO: 130023 - RNA, 11 nt, Artificial Sequence
  Description of Artificial Sequence: Synthetic oligonucleotide
gacugugagcu

SEQ ID NO: 130024 - RNA, 13 nt, Artificial Sequence
  Description of Artificial Sequence: Synthetic oligonucleotide
gcuuuuuauuaau

SEQ ID NO: 130025 - RNA, 12 nt, Artificial Sequence
  Description of Artificial Sequence: Synthetic oligonucleotide
ucuucuuacauu

SEQ ID NO: 130026 - RNA, 14 nt, Artificial Sequence
  Description of Artificial Sequence: Synthetic oligonucleotide
auuuguaaaaaugu

SEQ ID NO: 130027 - RNA, 14 nt, Artificial Sequence
  Description of Artificial Sequence: Synthetic oligonucleotide
ucuuaauucauauu

SEQ ID NO: 130028 - RNA, 12 nt, Artificial Sequence
  Description of Artificial Sequence: Synthetic oligonucleotide
aacuaaucauga

SEQ ID NO: 130029 - RNA, 11 nt, Artificial Sequence
  Description of Artificial Sequence: Synthetic oligonucleotide
cugcucuuggg

SEQ ID NO: 130030 - RNA, 12 nt, Artificial Sequence
  Description of Artificial Sequence: Synthetic oligonucleotide
aguagcuuugag

SEQ ID NO: 130031 - RNA, 13 nt, Artificial Sequence
  Description of Artificial Sequence: Synthetic oligonucleotide
acguaauauuuca

SEQ ID NO: 130032 - RNA, 12 nt, Artificial Sequence
  Description of Artificial Sequence: Synthetic oligonucleotide
auucucuucacu

SEQ ID NO: 130033 - RNA, 13 nt, Artificial Sequence
  Description of Artificial Sequence: Synthetic oligonucleotide
uaaugcuaagaaa

SEQ ID NO: 130034 - RNA, 11 nt, Artificial Sequence
  Description of Artificial Sequence: Synthetic oligonucleotide
cugaaaaucaa

SEQ ID NO: 130035 - RNA, 13 nt, Artificial Sequence
  Description of Artificial Sequence: Synthetic oligonucleotide
auaugauuacuuu

SEQ ID NO: 130036 - RNA, 13 nt, Artificial Sequence
  Description of Artificial Sequence: Synthetic oligonucleotide
auuuuguucuaca

SEQ ID NO: 130037 - RNA, 11 nt, Artificial Sequence
  Description of Artificial Sequence: Synthetic oligonucleotide
ccgggacucuc

SEQ ID NO: 130038 - RNA, 13 nt, Artificial Sequence
  Description of Artificial Sequence: Synthetic oligonucleotide
cuuuaaaguaaag

SEQ ID NO: 130039 - RNA, 12 nt, Artificial Sequence
  Description of Artificial Sequence: Synthetic oligonucleotide
cuggaagccugg

SEQ ID NO: 130040 - RNA, 13 nt, Artificial Sequence
  Description of Artificial Sequence: Synthetic oligonucleotide
aaacaaaagagag

SEQ ID NO: 130041 - RNA, 12 nt, Artificial Sequence
  Description of Artificial Sequence: Synthetic oligonucleotide
ucaguuaugccg

SEQ ID NO: 130042 - RNA, 12 nt, Artificial Sequence
  Description of Artificial Sequence: Synthetic oligonucleotide
aaaagaagucca

SEQ ID NO: 130043 - RNA, 10 nt, Artificial Sequence
  Description of Artificial Sequence: Synthetic oligonucleotide
ggugagguua

SEQ ID NO: 130044 - RNA, 10 nt, Artificial Sequence
  Description of Artificial Sequence: Synthetic oligonucleotide
ggaagaggac

SEQ ID NO: 130045 - RNA, 12 nt, Artificial Sequence
  Description of Artificial Sequence: Synthetic oligonucleotide
agcaaguauugu

SEQ ID NO: 130046 - RNA, 11 nt, Artificial Sequence
  Description of Artificial Sequence: Synthetic oligonucleotide
uuguagcacuc

SEQ ID NO: 130047 - RNA, 13 nt, Artificial Sequence
  Description of Artificial Sequence: Synthetic oligonucleotide
caaaaccacaaau

SEQ ID NO: 130048 - RNA, 11 nt, Artificial Sequence
  Description of Artificial Sequence: Synthetic oligonucleotide
aagcccauaca

SEQ ID NO: 130049 - RNA, 10 nt, Artificial Sequence
  Description of Artificial Sequence: Synthetic oligonucleotide
gcccauacag

SEQ ID NO: 130050 - RNA, 11 nt, Artificial Sequence
  Description of Artificial Sequence: Synthetic oligonucleotide
agaaaccuucc

SEQ ID NO: 130051 - RNA, 9 nt, Artificial Sequence
  Description of Artificial Sequence: Synthetic oligonucleotide
uauaccuac

SEQ ID NO: 130052 - RNA, 12 nt, Artificial Sequence
  Description of Artificial Sequence: Synthetic oligonucleotide
ccaguuuucgga

SEQ ID NO: 130053 - RNA, 8 nt, Artificial Sequence
  Description of Artificial Sequence: Synthetic oligonucleotide
gaacaggg

SEQ ID NO: 130054 - RNA, 12 nt, Artificial Sequence
  Description of Artificial Sequence: Synthetic oligonucleotide
uaacuuuccagu

SEQ ID NO: 130055 - RNA, 13 nt, Artificial Sequence
  Description of Artificial Sequence: Synthetic oligonucleotide
aaguuugguuuug

SEQ ID NO: 130056 - RNA, 11 nt, Artificial Sequence
  Description of Artificial Sequence: Synthetic oligonucleotide
uucccacugua

SEQ ID NO: 130057 - RNA, 12 nt, Artificial Sequence
  Description of Artificial Sequence: Synthetic oligonucleotide
gauaccauauga

SEQ ID NO: 130058 - RNA, 10 nt, Artificial Sequence
  Description of Artificial Sequence: Synthetic oligonucleotide
acaugggcug

SEQ ID NO: 130059 - RNA, 12 nt, Artificial Sequence
  Description of Artificial Sequence: Synthetic oligonucleotide
aacuuuuucaua

SEQ ID NO: 130060 - RNA, 11 nt, Artificial Sequence
  Description of Artificial Sequence: Synthetic oligonucleotide
augaggccgga

SEQ ID NO: 130061 - RNA, 10 nt, Artificial Sequence
  Description of Artificial Sequence: Synthetic oligonucleotide
cugcauuugu

SEQ ID NO: 130062 - RNA, 12 nt, Artificial Sequence
  Description of Artificial Sequence: Synthetic oligonucleotide
auguuuacuacc

SEQ ID NO: 130063 - RNA, 14 nt, Artificial Sequence
  Description of Artificial Sequence: Synthetic oligonucleotide
auuuuuugaugaaa

SEQ ID NO: 130064 - RNA, 13 nt, Artificial Sequence
  Description of Artificial Sequence: Synthetic oligonucleotide
agugugugaauuu

SEQ ID NO: 130065 - RNA, 12 nt, Artificial Sequence
  Description of Artificial Sequence: Synthetic oligonucleotide
agcaauguaugu

SEQ ID NO: 130066 - RNA, 13 nt, Artificial Sequence
  Description of Artificial Sequence: Synthetic oligonucleotide
aagcacauauaua

SEQ ID NO: 130067 - RNA, 13 nt, Artificial Sequence
  Description of Artificial Sequence: Synthetic oligonucleotide
uaauaguuucucc

SEQ ID NO: 130068 - RNA, 12 nt, Artificial Sequence
  Description of Artificial Sequence: Synthetic oligonucleotide
guuucuccaaau

SEQ ID NO: 130069 - RNA, 12 nt, Artificial Sequence
  Description of Artificial Sequence: Synthetic oligonucleotide
acuuccuagaaa

SEQ ID NO: 130070 - RNA, 12 nt, Artificial Sequence
  Description of Artificial Sequence: Synthetic oligonucleotide
acaccauauaug

SEQ ID NO: 130071 - RNA, 13 nt, Artificial Sequence
  Description of Artificial Sequence: Synthetic oligonucleotide
uauaugaauggag

SEQ ID NO: 130072 - RNA, 12 nt, Artificial Sequence
  Description of Artificial Sequence: Synthetic oligonucleotide
cauuuacaggga

SEQ ID NO: 130073 - RNA, 12 nt, Artificial Sequence
  Description of Artificial Sequence: Synthetic oligonucleotide
auuuacagggac

SEQ ID NO: 130074 - RNA, 9 nt, Artificial Sequence
  Description of Artificial Sequence: Synthetic oligonucleotide
gggaccuga

SEQ ID NO: 130075 - RNA, 13 nt, Artificial Sequence
  Description of Artificial Sequence: Synthetic oligonucleotide
guuugacugcauc

SEQ ID NO: 130076 - RNA, 12 nt, Artificial Sequence
  Description of Artificial Sequence: Synthetic oligonucleotide
uugacugcaucg

SEQ ID NO: 130077 - RNA, 11 nt, Artificial Sequence
  Description of Artificial Sequence: Synthetic oligonucleotide
aguucacaggg

SEQ ID NO: 130078 - RNA, 12 nt, Artificial Sequence
  Description of Artificial Sequence: Synthetic oligonucleotide
gcaccucugucc

SEQ ID NO: 130079 - RNA, 14 nt, Artificial Sequence
  Description of Artificial Sequence: Synthetic oligonucleotide
guuugucuuuuuaa

SEQ ID NO: 130080 - RNA, 13 nt, Artificial Sequence
  Description of Artificial Sequence: Synthetic oligonucleotide
uugucuuuuuaag

SEQ ID NO: 130081 - RNA, 12 nt, Artificial Sequence
  Description of Artificial Sequence: Synthetic oligonucleotide
cuaaagguuguc

SEQ ID NO: 130082 - RNA, 11 nt, Artificial Sequence
  Description of Artificial Sequence: Synthetic oligonucleotide
agguugucgac

SEQ ID NO: 130083 - RNA, 12 nt, Artificial Sequence
  Description of Artificial Sequence: Synthetic oligonucleotide
ccuggcaauugu

SEQ ID NO: 130084 - RNA, 11 nt, Artificial Sequence
  Description of Artificial Sequence: Synthetic oligonucleotide
guggugcgagg

SEQ ID NO: 130085 - RNA, 12 nt, Artificial Sequence
  Description of Artificial Sequence: Synthetic oligonucleotide
gagacaugaaau

SEQ ID NO: 130086 - RNA, 12 nt, Artificial Sequence
  Description of Artificial Sequence: Synthetic oligonucleotide
uauauuucucca

SEQ ID NO: 130087 - RNA, 9 nt, Artificial Sequence
  Description of Artificial Sequence: Synthetic oligonucleotide
augaaggcu

SEQ ID NO: 130088 - RNA, 10 nt, Artificial Sequence
  Description of Artificial Sequence: Synthetic oligonucleotide
cuggaguggu

SEQ ID NO: 130089 - RNA, 10 nt, Artificial Sequence
  Description of Artificial Sequence: Synthetic oligonucleotide
ggaagagagg

SEQ ID NO: 130090 - RNA, 11 nt, Artificial Sequence
  Description of Artificial Sequence: Synthetic oligonucleotide
uugcaucgggc

SEQ ID NO: 130091 - RNA, 12 nt, Artificial Sequence
  Description of Artificial Sequence: Synthetic oligonucleotide
uauccuacugug

SEQ ID NO: 130092 - RNA, 12 nt, Artificial Sequence
  Description of Artificial Sequence: Synthetic oligonucleotide
ccuacuguguaa

SEQ ID NO: 130093 - RNA, 11 nt, Artificial Sequence
  Description of Artificial Sequence: Synthetic oligonucleotide
cuuguagugua

SEQ ID NO: 130094 - RNA, 12 nt, Artificial Sequence
  Description of Artificial Sequence: Synthetic oligonucleotide
cuuuguugauug

SEQ ID NO: 130095 - RNA, 13 nt, Artificial Sequence
  Description of Artificial Sequence: Synthetic oligonucleotide
uuguugauugaaa

SEQ ID NO: 130096 - RNA, 14 nt, Artificial Sequence
  Description of Artificial Sequence: Synthetic oligonucleotide
ucuuuuucuuccau

SEQ ID NO: 130097 - RNA, 12 nt, Artificial Sequence
  Description of Artificial Sequence: Synthetic oligonucleotide
aucuuccuucua

SEQ ID NO: 130098 - RNA, 12 nt, Artificial Sequence
  Description of Artificial Sequence: Synthetic oligonucleotide
ugaaugcuucau

SEQ ID NO: 130099 - RNA, 12 nt, Artificial Sequence
  Description of Artificial Sequence: Synthetic oligonucleotide
gaaugcuucaug

SEQ ID NO: 130100 - RNA, 12 nt, Artificial Sequence
  Description of Artificial Sequence: Synthetic oligonucleotide
auucuacuuuga

SEQ ID NO: 130101 - RNA, 12 nt, Artificial Sequence
  Description of Artificial Sequence: Synthetic oligonucleotide
gcaacuacagac

SEQ ID NO: 130102 - RNA, 12 nt, Artificial Sequence
  Description of Artificial Sequence: Synthetic oligonucleotide
accaaggucaac

SEQ ID NO: 130103 - RNA, 12 nt, Artificial Sequence
  Description of Artificial Sequence: Synthetic oligonucleotide
gacuaucucgac

SEQ ID NO: 130104 - RNA, 12 nt, Artificial Sequence
  Description of Artificial Sequence: Synthetic oligonucleotide
accuucccaaac

SEQ ID NO: 130105 - RNA, 13 nt, Artificial Sequence
  Description of Artificial Sequence: Synthetic oligonucleotide
caagcuuagaacu

SEQ ID NO: 130106 - RNA, 14 nt, Artificial Sequence
  Description of Artificial Sequence: Synthetic oligonucleotide
gcuuagaacuuuaa

SEQ ID NO: 130107 - RNA, 13 nt, Artificial Sequence
  Description of Artificial Sequence: Synthetic oligonucleotide
aacuuuaagcaac

SEQ ID NO: 130108 - RNA, 10 nt, Artificial Sequence
  Description of Artificial Sequence: Synthetic oligonucleotide
agaccaccac

SEQ ID NO: 130109 - RNA, 13 nt, Artificial Sequence
  Description of Artificial Sequence: Synthetic oligonucleotide
cgagaaauaaagu

SEQ ID NO: 130110 - RNA, 13 nt, Artificial Sequence
  Description of Artificial Sequence: Synthetic oligonucleotide
gagaaauaaaguu

SEQ ID NO: 130111 - RNA, 11 nt, Artificial Sequence
  Description of Artificial Sequence: Synthetic oligonucleotide
ggaaaugaucc

SEQ ID NO: 130112 - RNA, 12 nt, Artificial Sequence
  Description of Artificial Sequence: Synthetic oligonucleotide
aagaaaugaaac

SEQ ID NO: 130113 - RNA, 12 nt, Artificial Sequence
  Description of Artificial Sequence: Synthetic oligonucleotide
uuuccauccucc

SEQ ID NO: 130114 - RNA, 14 nt, Artificial Sequence
  Description of Artificial Sequence: Synthetic oligonucleotide
cugaaaaucuuuga

SEQ ID NO: 130115 - RNA, 10 nt, Artificial Sequence
  Description of Artificial Sequence: Synthetic oligonucleotide
gccguucagg

SEQ ID NO: 130116 - RNA, 12 nt, Artificial Sequence
  Description of Artificial Sequence: Synthetic oligonucleotide
aggguccagaag

SEQ ID NO: 130117 - RNA, 12 nt, Artificial Sequence
  Description of Artificial Sequence: Synthetic oligonucleotide
caagacugcuug

SEQ ID NO: 130118 - RNA, 12 nt, Artificial Sequence
  Description of Artificial Sequence: Synthetic oligonucleotide
ccaugucuuugg

SEQ ID NO: 130119 - RNA, 10 nt, Artificial Sequence
  Description of Artificial Sequence: Synthetic oligonucleotide
ccugaaacac

SEQ ID NO: 130120 - RNA, 11 nt, Artificial Sequence
  Description of Artificial Sequence: Synthetic oligonucleotide
cucuguaccuc

SEQ ID NO: 130121 - RNA, 11 nt, Artificial Sequence
  Description of Artificial Sequence: Synthetic oligonucleotide
gcaagacaaga

SEQ ID NO: 130122 - RNA, 12 nt, Artificial Sequence
  Description of Artificial Sequence: Synthetic oligonucleotide
caagacaagaaa

SEQ ID NO: 130123 - RNA, 11 nt, Artificial Sequence
  Description of Artificial Sequence: Synthetic oligonucleotide
guacaagaucc

SEQ ID NO: 130124 - RNA, 11 nt, Artificial Sequence
  Description of Artificial Sequence: Synthetic oligonucleotide
guacuugcaga

SEQ ID NO: 130125 - RNA, 12 nt, Artificial Sequence
  Description of Artificial Sequence: Synthetic oligonucleotide
gaucgauacaga

SEQ ID NO: 130126 - RNA, 12 nt, Artificial Sequence
  Description of Artificial Sequence: Synthetic oligonucleotide
auaaaaauaaau

SEQ ID NO: 130127 - RNA, 12 nt, Artificial Sequence
  Description of Artificial Sequence: Synthetic oligonucleotide
aaaaauaaauau

SEQ ID NO: 130128 - RNA, 12 nt, Artificial Sequence
  Description of Artificial Sequence: Synthetic oligonucleotide
uugacugcugug

SEQ ID NO: 130129 - RNA, 12 nt, Artificial Sequence
  Description of Artificial Sequence: Synthetic oligonucleotide
gagaugagagac

SEQ ID NO: 130130 - RNA, 9 nt, Artificial Sequence
  Description of Artificial Sequence: Synthetic oligonucleotide
cccacuugg

SEQ ID NO: 130131 - RNA, 1616 nt, Homo sapiens
gccaaggcuggggcaggggagucagcagaggccucgcucgggcgcccagugguccugccgccuggucucaccucgcuaugguucgucugccucugcagugcguccucuggggcugcuugcugaccgcuguccauccagaaccacccacugcaugcagagaaaaacaguaccuaauaaacagucagugcuguucuuugugccagccaggacagaaacuggugagugacugcacagaguucacugaaacggaaugccuuccuugcggugaaagcgaauuccuagacaccuggaacagagagacacacugccaccagcacaaauacugcgaccccaaccuagggcuucggguccagcagaagggcaccucagaaacagacaccaucugcaccugugaagaaggcuggcacuguacgagugaggccugugagagcuguguccugcaccgcucaugcucgcccggcuuuggggucaagcagauugcuacagggguuucugauaccaucugcgagcccugcccagucggcuucuucuccaaugugucaucugcuuucgaaaaaugucacccuuggacaagcugugagaccaaagaccugguugugcaacaggcaggcacaaacaagacugauguugucugugguccccaggaucggcugagagcccugguggugauccccaucaucuucgggauccuguuugccauccucuuggugcuggucuuuaucaaaaagguggccaagaagccaaccaauaaggccccccaccccaagcaggaaccccaggagaucaauuuucccgacgaucuuccuggcuccaacacugcugcuccagugcaggagacuuuacauggaugccaaccggucacccaggaggauggcaaagagagucgcaucucagugcaggagagacagugaggcugcacccacccaggaguguggccacgugggcaaacaggcaguuggccagagagccuggugcugcugcugcuguggcgugagggugaggggcuggcacugacugggcauagcuccccgcuucugccugcaccccugcaguuugagacaggagaccuggcacuggaugcagaaacaguucaccuugaagaaccucucacuucacccuggagcccauccagucucccaacuuguauuaaagacagaggcagaaguuuggugguggugguguugggguaugguuuaguaauauccaccagaccuuccgauccagcaguuuggugcccagagaggcaucaugguggcuucccugcgcccaggaagccauauacacagaugcccauugcagcauuguuugugauagugaacaacuggaagcugcuuaacuguccaucagcaggagacuggcuaaauaaaauuagaauauauuuauacaacagaaucucaaaaacacuguugaguaaggaaaaaaaggcaugcugcugaaugauggguauggaacuuuuuaaaaaaguacaugcuuuuauguauguauauugccuauggauauauguauaaauacaauaugcaucauauauugauauaacaaggguucuggaaggguacacagaaaacccacagcucgaagaguggugacgucugggguggggaagaagggucuggggg

SEQ ID NO: 130132 - RNA, 1554 nt, Homo sapiens
gccaaggcuggggcaggggagucagcagaggccucgcucgggcgcccagugguccugccgccuggucucaccucgcuaugguucgucugccucugcagugcguccucuggggcugcuugcugaccgcuguccauccagaaccacccacugcaugcagagaaaaacaguaccuaauaaacagucagugcuguucuuugugccagccaggacagaaacuggugagugacugcacagaguucacugaaacggaaugccuuccuugcggugaaagcgaauuccuagacaccuggaacagagagacacacugccaccagcacaaauacugcgaccccaaccuagggcuucggguccagcagaagggcaccucagaaacagacaccaucugcaccugugaagaaggcuggcacuguacgagugaggccugugagagcuguguccugcaccgcucaugcucgcccggcuuuggggucaagcagauugcuacagggguuucugauaccaucugcgagcccugcccagucggcuucuucuccaaugugucaucugcuuucgaaaaaugucacccuuggacaagguccccaggaucggcugagagcccugguggugauccccaucaucuucgggauccuguuugccauccucuuggugcuggucuuuaucaaaaagguggccaagaagccaaccaauaaggccccccaccccaagcaggaaccccaggagaucaauuuucccgacgaucuuccuggcuccaacacugcugcuccagugcaggagacuuuacauggaugccaaccggucacccaggaggauggcaaagagagucgcaucucagugcaggagagacagugaggcugcacccacccaggaguguggccacgugggcaaacaggcaguuggccagagagccuggugcugcugcugcuguggcgugagggugaggggcuggcacugacugggcauagcuccccgcuucugccugcaccccugcaguuugagacaggagaccuggcacuggaugcagaaacaguucaccuugaagaaccucucacuucacccuggagcccauccagucucccaacuuguauuaaagacagaggcagaaguuuggugguggugguguugggguaugguuuaguaauauccaccagaccuuccgauccagcaguuuggugcccagagaggcaucaugguggcuucccugcgcccaggaagccauauacacagaugcccauugcagcauuguuugugauagugaacaacuggaagcugcuuaacuguccaucagcaggagacuggcuaaauaaaauuagaauauauuuauacaacagaaucucaaaaacacuguugaguaaggaaaaaaaggcaugcugcugaaugauggguauggaacuuuuuaaaaaaguacaugcuuuuauguauguauauugccuauggauauauguauaaauacaauaugcaucauauauugauauaacaaggguucuggaaggguacacagaaaacccacagcucgaagaguggugacgucugggguggggaagaagggucuggggg

SEQ ID NO: 130133 - RNA, 19 nt, Artificial Sequence
  Description of Artificial Sequence: Synthetic oligonucleotide
gccaaggcuggggcagggg

SEQ ID NO: 130134 - RNA, 19 nt, Artificial Sequence
  Description of Artificial Sequence: Synthetic oligonucleotide
gagucagcagaggccucgc

SEQ ID NO: 130135 - RNA, 19 nt, Artificial Sequence
  Description of Artificial Sequence: Synthetic oligonucleotide
cucgggcgcccaguggucc

SEQ ID NO: 130136 - RNA, 19 nt, Artificial Sequence
  Description of Artificial Sequence: Synthetic oligonucleotide
cugccgccuggucucaccu

SEQ ID NO: 130137 - RNA, 19 nt, Artificial Sequence
  Description of Artificial Sequence: Synthetic oligonucleotide
ucgcuaugguucgucugcc

SEQ ID NO: 130138 - RNA, 19 nt, Artificial Sequence
  Description of Artificial Sequence: Synthetic oligonucleotide
cucugcagugcguccucug

SEQ ID NO: 130139 - RNA, 19 nt, Artificial Sequence
  Description of Artificial Sequence: Synthetic oligonucleotide
ggggcugcuugcugaccgc

SEQ ID NO: 130140 - RNA, 19 nt, Artificial Sequence
  Description of Artificial Sequence: Synthetic oligonucleotide
cuguccauccagaaccacc

SEQ ID NO: 130141 - RNA, 19 nt, Artificial Sequence
  Description of Artificial Sequence: Synthetic oligonucleotide
ccacugcaugcagagaaaa

SEQ ID NO: 130142 - RNA, 19 nt, Artificial Sequence
  Description of Artificial Sequence: Synthetic oligonucleotide
aacaguaccuaauaaacag

SEQ ID NO: 130143 - RNA, 19 nt, Artificial Sequence
  Description of Artificial Sequence: Synthetic oligonucleotide
gucagugcuguucuuugug

SEQ ID NO: 130144 - RNA, 19 nt, Artificial Sequence
  Description of Artificial Sequence: Synthetic oligonucleotide
gccagccaggacagaaacu

SEQ ID NO: 130145 - RNA, 19 nt, Artificial Sequence
  Description of Artificial Sequence: Synthetic oligonucleotide
uggugagugacugcacaga

SEQ ID NO: 130146 - RNA, 19 nt, Artificial Sequence
  Description of Artificial Sequence: Synthetic oligonucleotide
aguucacugaaacggaaug

SEQ ID NO: 130147 - RNA, 19 nt, Artificial Sequence
  Description of Artificial Sequence: Synthetic oligonucleotide
gccuuccuugcggugaaag

SEQ ID NO: 130148 - RNA, 19 nt, Artificial Sequence
  Description of Artificial Sequence: Synthetic oligonucleotide
gcgaauuccuagacaccug

SEQ ID NO: 130149 - RNA, 19 nt, Artificial Sequence
  Description of Artificial Sequence: Synthetic oligonucleotide
ggaacagagagacacacug

SEQ ID NO: 130150 - RNA, 19 nt, Artificial Sequence
  Description of Artificial Sequence: Synthetic oligonucleotide
gccaccagcacaaauacug

SEQ ID NO: 130151 - RNA, 19 nt, Artificial Sequence
  Description of Artificial Sequence: Synthetic oligonucleotide
gcgaccccaaccuagggcu

SEQ ID NO: 130152 - RNA, 19 nt, Artificial Sequence
  Description of Artificial Sequence: Synthetic oligonucleotide
uucggguccagcagaaggg

SEQ ID NO: 130153 - RNA, 19 nt, Artificial Sequence
  Description of Artificial Sequence: Synthetic oligonucleotide
gcaccucagaaacagacac

SEQ ID NO: 130154 - RNA, 19 nt, Artificial Sequence
  Description of Artificial Sequence: Synthetic oligonucleotide
ccaucugcaccugugaaga

SEQ ID NO: 130155 - RNA, 19 nt, Artificial Sequence
  Description of Artificial Sequence: Synthetic oligonucleotide
aaggcuggcacuguacgag

SEQ ID NO: 130156 - RNA, 19 nt, Artificial Sequence
  Description of Artificial Sequence: Synthetic oligonucleotide
gugaggccugugagagcug

SEQ ID NO: 130157 - RNA, 19 nt, Artificial Sequence
  Description of Artificial Sequence: Synthetic oligonucleotide
guguccugcaccgcucaug

SEQ ID NO: 130158 - RNA, 19 nt, Artificial Sequence
  Description of Artificial Sequence: Synthetic oligonucleotide
gcucgcccggcuuuggggu

SEQ ID NO: 130159 - RNA, 19 nt, Artificial Sequence
  Description of Artificial Sequence: Synthetic oligonucleotide
ucaagcagauugcuacagg

SEQ ID NO: 130160 - RNA, 19 nt, Artificial Sequence
  Description of Artificial Sequence: Synthetic oligonucleotide
ggguuucugauaccaucug

SEQ ID NO: 130161 - RNA, 19 nt, Artificial Sequence
  Description of Artificial Sequence: Synthetic oligonucleotide
gcgagcccugcccagucgg

SEQ ID NO: 130162 - RNA, 19 nt, Artificial Sequence
  Description of Artificial Sequence: Synthetic oligonucleotide
gcuucuucuccaauguguc

SEQ ID NO: 130163 - RNA, 19 nt, Artificial Sequence
  Description of Artificial Sequence: Synthetic oligonucleotide
caucugcuuucgaaaaaug

SEQ ID NO: 130164 - RNA, 19 nt, Artificial Sequence
  Description of Artificial Sequence: Synthetic oligonucleotide
gucacccuuggacaagcug

SEQ ID NO: 130165 - RNA, 19 nt, Artificial Sequence
  Description of Artificial Sequence: Synthetic oligonucleotide
gugagaccaaagaccuggu

SEQ ID NO: 130166 - RNA, 19 nt, Artificial Sequence
  Description of Artificial Sequence: Synthetic oligonucleotide
uugugcaacaggcaggcac

SEQ ID NO: 130167 - RNA, 19 nt, Artificial Sequence
  Description of Artificial Sequence: Synthetic oligonucleotide
caaacaagacugauguugu

SEQ ID NO: 130168 - RNA, 19 nt, Artificial Sequence
  Description of Artificial Sequence: Synthetic oligonucleotide
ucugugguccccaggaucg

SEQ ID NO: 130169 - RNA, 19 nt, Artificial Sequence
  Description of Artificial Sequence: Synthetic oligonucleotide
ggcugagagcccugguggu

SEQ ID NO: 130170 - RNA, 19 nt, Artificial Sequence
  Description of Artificial Sequence: Synthetic oligonucleotide
ugauccccaucaucuucgg

SEQ ID NO: 130171 - RNA, 19 nt, Artificial Sequence
  Description of Artificial Sequence: Synthetic oligonucleotide
ggauccuguuugccauccu

SEQ ID NO: 130172 - RNA, 19 nt, Artificial Sequence
  Description of Artificial Sequence: Synthetic oligonucleotide
ucuuggugcuggucuuuau

SEQ ID NO: 130173 - RNA, 19 nt, Artificial Sequence
  Description of Artificial Sequence: Synthetic oligonucleotide
ucaaaaagguggccaagaa

SEQ ID NO: 130174 - RNA, 19 nt, Artificial Sequence
  Description of Artificial Sequence: Synthetic oligonucleotide
agccaaccaauaaggcccc

SEQ ID NO: 130175 - RNA, 19 nt, Artificial Sequence
  Description of Artificial Sequence: Synthetic oligonucleotide
cccaccccaagcaggaacc

SEQ ID NO: 130176 - RNA, 19 nt, Artificial Sequence
  Description of Artificial Sequence: Synthetic oligonucleotide
cccaggagaucaauuuucc

SEQ ID NO: 130177 - RNA, 19 nt, Artificial Sequence
  Description of Artificial Sequence: Synthetic oligonucleotide
ccgacgaucuuccuggcuc

SEQ ID NO: 130178 - RNA, 19 nt, Artificial Sequence
  Description of Artificial Sequence: Synthetic oligonucleotide
ccaacacugcugcuccagu

SEQ ID NO: 130179 - RNA, 19 nt, Artificial Sequence
  Description of Artificial Sequence: Synthetic oligonucleotide
ugcaggagacuuuacaugg

SEQ ID NO: 130180 - RNA, 19 nt, Artificial Sequence
  Description of Artificial Sequence: Synthetic oligonucleotide
gaugccaaccggucaccca

SEQ ID NO: 130181 - RNA, 19 nt, Artificial Sequence
  Description of Artificial Sequence: Synthetic oligonucleotide
aggaggauggcaaagagag

SEQ ID NO: 130182 - RNA, 19 nt, Artificial Sequence
  Description of Artificial Sequence: Synthetic oligonucleotide
gucgcaucucagugcagga

SEQ ID NO: 130183 - RNA, 19 nt, Artificial Sequence
  Description of Artificial Sequence: Synthetic oligonucleotide
agagacagugaggcugcac

SEQ ID NO: 130184 - RNA, 19 nt, Artificial Sequence
  Description of Artificial Sequence: Synthetic oligonucleotide
cccacccaggaguguggcc

SEQ ID NO: 130185 - RNA, 19 nt, Artificial Sequence
  Description of Artificial Sequence: Synthetic oligonucleotide
cacgugggcaaacaggcag

SEQ ID NO: 130186 - RNA, 19 nt, Artificial Sequence
  Description of Artificial Sequence: Synthetic oligonucleotide
guuggccagagagccuggu

SEQ ID NO: 130187 - RNA, 19 nt, Artificial Sequence
  Description of Artificial Sequence: Synthetic oligonucleotide
ugcugcugcugcuguggcg

SEQ ID NO: 130188 - RNA, 19 nt, Artificial Sequence
  Description of Artificial Sequence: Synthetic oligonucleotide
gugagggugaggggcuggc

SEQ ID NO: 130189 - RNA, 19 nt, Artificial Sequence
  Description of Artificial Sequence: Synthetic oligonucleotide
cacugacugggcauagcuc

SEQ ID NO: 130190 - RNA, 19 nt, Artificial Sequence
  Description of Artificial Sequence: Synthetic oligonucleotide
ccccgcuucugccugcacc

SEQ ID NO: 130191 - RNA, 19 nt, Artificial Sequence
  Description of Artificial Sequence: Synthetic oligonucleotide
cccugcaguuugagacagg

SEQ ID NO: 130192 - RNA, 19 nt, Artificial Sequence
  Description of Artificial Sequence: Synthetic oligonucleotide
gagaccuggcacuggaugc

SEQ ID NO: 130193 - RNA, 19 nt, Artificial Sequence
  Description of Artificial Sequence: Synthetic oligonucleotide
cagaaacaguucaccuuga

SEQ ID NO: 130194 - RNA, 19 nt, Artificial Sequence
  Description of Artificial Sequence: Synthetic oligonucleotide
aagaaccucucacuucacc

SEQ ID NO: 130195 - RNA, 19 nt, Artificial Sequence
  Description of Artificial Sequence: Synthetic oligonucleotide
ccuggagcccauccagucu

SEQ ID NO: 130196 - RNA, 19 nt, Artificial Sequence
  Description of Artificial Sequence: Synthetic oligonucleotide
ucccaacuuguauuaaaga

SEQ ID NO: 130197 - RNA, 19 nt, Artificial Sequence
  Description of Artificial Sequence: Synthetic oligonucleotide
acagaggcagaaguuuggu

SEQ ID NO: 130198 - RNA, 19 nt, Artificial Sequence
  Description of Artificial Sequence: Synthetic oligonucleotide
ugguggugguguuggggua

SEQ ID NO: 130199 - RNA, 19 nt, Artificial Sequence
  Description of Artificial Sequence: Synthetic oligonucleotide
augguuuaguaauauccac

SEQ ID NO: 130200 - RNA, 19 nt, Artificial Sequence
  Description of Artificial Sequence: Synthetic oligonucleotide
ccagaccuuccgauccagc

SEQ ID NO: 130201 - RNA, 19 nt, Artificial Sequence
  Description of Artificial Sequence: Synthetic oligonucleotide
caguuuggugcccagagag

SEQ ID NO: 130202 - RNA, 19 nt, Artificial Sequence
  Description of Artificial Sequence: Synthetic oligonucleotide
ggcaucaugguggcuuccc

SEQ ID NO: 130203 - RNA, 19 nt, Artificial Sequence
  Description of Artificial Sequence: Synthetic oligonucleotide
cugcgcccaggaagccaua

SEQ ID NO: 130204 - RNA, 19 nt, Artificial Sequence
  Description of Artificial Sequence: Synthetic oligonucleotide
auacacagaugcccauugc

SEQ ID NO: 130205 - RNA, 19 nt, Artificial Sequence
  Description of Artificial Sequence: Synthetic oligonucleotide
cagcauuguuugugauagu

SEQ ID NO: 130206 - RNA, 19 nt, Artificial Sequence
  Description of Artificial Sequence: Synthetic oligonucleotide
ugaacaacuggaagcugcu

SEQ ID NO: 130207 - RNA, 19 nt, Artificial Sequence
  Description of Artificial Sequence: Synthetic oligonucleotide
uuaacuguccaucagcagg

SEQ ID NO: 130208 - RNA, 19 nt, Artificial Sequence
  Description of Artificial Sequence: Synthetic oligonucleotide
gagacuggcuaaauaaaau

SEQ ID NO: 130209 - RNA, 19 nt, Artificial Sequence
  Description of Artificial Sequence: Synthetic oligonucleotide
uuagaauauauuuauacaa

SEQ ID NO: 130210 - RNA, 19 nt, Artificial Sequence
  Description of Artificial Sequence: Synthetic oligonucleotide
acagaaucucaaaaacacu

SEQ ID NO: 130211 - RNA, 19 nt, Artificial Sequence
  Description of Artificial Sequence: Synthetic oligonucleotide
uguugaguaaggaaaaaaa

SEQ ID NO: 130212 - RNA, 19 nt, Artificial Sequence
  Description of Artificial Sequence: Synthetic oligonucleotide
aggcaugcugcugaaugau

SEQ ID NO: 130213 - RNA, 19 nt, Artificial Sequence
  Description of Artificial Sequence: Synthetic oligonucleotide
uggguauggaacuuuuuaa

SEQ ID NO: 130214 - RNA, 19 nt, Artificial Sequence
  Description of Artificial Sequence: Synthetic oligonucleotide
aaaaaguacaugcuuuuau

SEQ ID NO: 130215 - RNA, 19 nt, Artificial Sequence
  Description of Artificial Sequence: Synthetic oligonucleotide
uguauguauauugccuaug

SEQ ID NO: 130216 - RNA, 19 nt, Artificial Sequence
  Description of Artificial Sequence: Synthetic oligonucleotide
ggauauauguauaaauaca

SEQ ID NO: 130217 - RNA, 19 nt, Artificial Sequence
  Description of Artificial Sequence: Synthetic oligonucleotide
aauaugcaucauauauuga

SEQ ID NO: 130218 - RNA, 19 nt, Artificial Sequence
  Description of Artificial Sequence: Synthetic oligonucleotide
auauaacaaggguucugga

SEQ ID NO: 130219 - RNA, 19 nt, Artificial Sequence
  Description of Artificial Sequence: Synthetic oligonucleotide
aaggguacacagaaaaccc

SEQ ID NO: 130220 - RNA, 19 nt, Artificial Sequence
  Description of Artificial Sequence: Synthetic oligonucleotide
cacagcucgaagaguggug

SEQ ID NO: 130221 - RNA, 19 nt, Artificial Sequence
  Description of Artificial Sequence: Synthetic oligonucleotide
gacgucugggguggggaag

SEQ ID NO: 130222 - RNA, 19 nt, Artificial Sequence
  Description of Artificial Sequence: Synthetic oligonucleotide
gggaagaagggucuggggg

SEQ ID NO: 130223 - RNA, 19 nt, Artificial Sequence
  Description of Artificial Sequence: Synthetic oligonucleotide
gucacccuuggacaagguc

SEQ ID NO: 130224 - RNA, 19 nt, Artificial Sequence
  Description of Artificial Sequence: Synthetic oligonucleotide
ccccaggaucggcugagag

SEQ ID NO: 130225 - RNA, 19 nt, Artificial Sequence
  Description of Artificial Sequence: Synthetic oligonucleotide
gcccugguggugaucccca

SEQ ID NO: 130226 - RNA, 19 nt, Artificial Sequence
  Description of Artificial Sequence: Synthetic oligonucleotide
aucaucuucgggauccugu

SEQ ID NO: 130227 - RNA, 19 nt, Artificial Sequence
  Description of Artificial Sequence: Synthetic oligonucleotide
uuugccauccucuuggugc

SEQ ID NO: 130228 - RNA, 19 nt, Artificial Sequence
  Description of Artificial Sequence: Synthetic oligonucleotide
cuggucuuuaucaaaaagg

SEQ ID NO: 130229 - RNA, 19 nt, Artificial Sequence
  Description of Artificial Sequence: Synthetic oligonucleotide
guggccaagaagccaacca

SEQ ID NO: 130230 - RNA, 19 nt, Artificial Sequence
  Description of Artificial Sequence: Synthetic oligonucleotide
aauaaggccccccacccca

SEQ ID NO: 130231 - RNA, 19 nt, Artificial Sequence
  Description of Artificial Sequence: Synthetic oligonucleotide
aagcaggaaccccaggaga

SEQ ID NO: 130232 - RNA, 19 nt, Artificial Sequence
  Description of Artificial Sequence: Synthetic oligonucleotide
aucaauuuucccgacgauc

SEQ ID NO: 130233 - RNA, 19 nt, Artificial Sequence
  Description of Artificial Sequence: Synthetic oligonucleotide
cuuccuggcuccaacacug

SEQ ID NO: 130234 - RNA, 19 nt, Artificial Sequence
  Description of Artificial Sequence: Synthetic oligonucleotide
gcugcuccagugcaggaga

SEQ ID NO: 130235 - RNA, 19 nt, Artificial Sequence
  Description of Artificial Sequence: Synthetic oligonucleotide
acuuuacauggaugccaac

SEQ ID NO: 130236 - RNA, 19 nt, Artificial Sequence
  Description of Artificial Sequence: Synthetic oligonucleotide
ccggucacccaggaggaug

SEQ ID NO: 130237 - RNA, 19 nt, Artificial Sequence
  Description of Artificial Sequence: Synthetic oligonucleotide
ggcaaagagagucgcaucu

SEQ ID NO: 130238 - RNA, 19 nt, Artificial Sequence
  Description of Artificial Sequence: Synthetic oligonucleotide
ucagugcaggagagacagu

SEQ ID NO: 130239 - RNA, 19 nt, Artificial Sequence
  Description of Artificial Sequence: Synthetic oligonucleotide
ugaggcugcacccacccag

SEQ ID NO: 130240 - RNA, 19 nt, Artificial Sequence
  Description of Artificial Sequence: Synthetic oligonucleotide
ggaguguggccacgugggc

SEQ ID NO: 130241 - RNA, 19 nt, Artificial Sequence
  Description of Artificial Sequence: Synthetic oligonucleotide
caaacaggcaguuggccag

SEQ ID NO: 130242 - RNA, 19 nt, Artificial Sequence
  Description of Artificial Sequence: Synthetic oligonucleotide
gagagccuggugcugcugc

SEQ ID NO: 130243 - RNA, 19 nt, Artificial Sequence
  Description of Artificial Sequence: Synthetic oligonucleotide
cugcuguggcgugagggug

SEQ ID NO: 130244 - RNA, 19 nt, Artificial Sequence
  Description of Artificial Sequence: Synthetic oligonucleotide
gaggggcuggcacugacug

SEQ ID NO: 130245 - RNA, 19 nt, Artificial Sequence
  Description of Artificial Sequence: Synthetic oligonucleotide
gggcauagcuccccgcuuc

SEQ ID NO: 130246 - RNA, 19 nt, Artificial Sequence
  Description of Artificial Sequence: Synthetic oligonucleotide
cugccugcaccccugcagu

SEQ ID NO: 130247 - RNA, 19 nt, Artificial Sequence
  Description of Artificial Sequence: Synthetic oligonucleotide
uuugagacaggagaccugg

SEQ ID NO: 130248 - RNA, 19 nt, Artificial Sequence
  Description of Artificial Sequence: Synthetic oligonucleotide
gcacuggaugcagaaacag

SEQ ID NO: 130249 - RNA, 19 nt, Artificial Sequence
  Description of Artificial Sequence: Synthetic oligonucleotide
guucaccuugaagaaccuc

SEQ ID NO: 130250 - RNA, 19 nt, Artificial Sequence
  Description of Artificial Sequence: Synthetic oligonucleotide
cucacuucacccuggagcc

SEQ ID NO: 130251 - RNA, 19 nt, Artificial Sequence
  Description of Artificial Sequence: Synthetic oligonucleotide
ccauccagucucccaacuu

SEQ ID NO: 130252 - RNA, 19 nt, Artificial Sequence
  Description of Artificial Sequence: Synthetic oligonucleotide
uguauuaaagacagaggca

SEQ ID NO: 130253 - RNA, 19 nt, Artificial Sequence
  Description of Artificial Sequence: Synthetic oligonucleotide
agaaguuuggugguggugg

SEQ ID NO: 130254 - RNA, 19 nt, Artificial Sequence
  Description of Artificial Sequence: Synthetic oligonucleotide
guguugggguaugguuuag

SEQ ID NO: 130255 - RNA, 19 nt, Artificial Sequence
  Description of Artificial Sequence: Synthetic oligonucleotide
guaauauccaccagaccuu

SEQ ID NO: 130256 - RNA, 19 nt, Artificial Sequence
  Description of Artificial Sequence: Synthetic oligonucleotide
uccgauccagcaguuuggu

SEQ ID NO: 130257 - RNA, 19 nt, Artificial Sequence
  Description of Artificial Sequence: Synthetic oligonucleotide
ugcccagagaggcaucaug

SEQ ID NO: 130258 - RNA, 19 nt, Artificial Sequence
  Description of Artificial Sequence: Synthetic oligonucleotide
gguggcuucccugcgccca

SEQ ID NO: 130259 - RNA, 19 nt, Artificial Sequence
  Description of Artificial Sequence: Synthetic oligonucleotide
aggaagccauauacacaga

SEQ ID NO: 130260 - RNA, 19 nt, Artificial Sequence
  Description of Artificial Sequence: Synthetic oligonucleotide
augcccauugcagcauugu

SEQ ID NO: 130261 - RNA, 19 nt, Artificial Sequence
  Description of Artificial Sequence: Synthetic oligonucleotide
uuugugauagugaacaacu

SEQ ID NO: 130262 - RNA, 19 nt, Artificial Sequence
  Description of Artificial Sequence: Synthetic oligonucleotide
uggaagcugcuuaacuguc

SEQ ID NO: 130263 - RNA, 19 nt, Artificial Sequence
  Description of Artificial Sequence: Synthetic oligonucleotide
ccaucagcaggagacuggc

SEQ ID NO: 130264 - RNA, 19 nt, Artificial Sequence
  Description of Artificial Sequence: Synthetic oligonucleotide
cuaaauaaaauuagaauau

SEQ ID NO: 130265 - RNA, 19 nt, Artificial Sequence
  Description of Artificial Sequence: Synthetic oligonucleotide
uauuuauacaacagaaucu

SEQ ID NO: 130266 - RNA, 19 nt, Artificial Sequence
  Description of Artificial Sequence: Synthetic oligonucleotide
ucaaaaacacuguugagua

SEQ ID NO: 130267 - RNA, 19 nt, Artificial Sequence
  Description of Artificial Sequence: Synthetic oligonucleotide
aaggaaaaaaaggcaugcu

SEQ ID NO: 130268 - RNA, 19 nt, Artificial Sequence
  Description of Artificial Sequence: Synthetic oligonucleotide
ugcugaaugauggguaugg

SEQ ID NO: 130269 - RNA, 19 nt, Artificial Sequence
  Description of Artificial Sequence: Synthetic oligonucleotide
gaacuuuuuaaaaaaguac

SEQ ID NO: 130270 - RNA, 19 nt, Artificial Sequence
  Description of Artificial Sequence: Synthetic oligonucleotide
caugcuuuuauguauguau

SEQ ID NO: 130271 - RNA, 19 nt, Artificial Sequence
  Description of Artificial Sequence: Synthetic oligonucleotide
uauugccuauggauauaug

SEQ ID NO: 130272 - RNA, 19 nt, Artificial Sequence
  Description of Artificial Sequence: Synthetic oligonucleotide
guauaaauacaauaugcau

SEQ ID NO: 130273 - RNA, 19 nt, Artificial Sequence
  Description of Artificial Sequence: Synthetic oligonucleotide
ucauauauugauauaacaa

SEQ ID NO: 130274 - RNA, 19 nt, Artificial Sequence
  Description of Artificial Sequence: Synthetic oligonucleotide
aggguucuggaaggguaca

SEQ ID NO: 130275 - RNA, 19 nt, Artificial Sequence
  Description of Artificial Sequence: Synthetic oligonucleotide
acagaaaacccacagcucg

SEQ ID NO: 130276 - RNA, 19 nt, Artificial Sequence
  Description of Artificial Sequence: Synthetic oligonucleotide
gaagaguggugacgucugg

SEQ ID NO: 130277 - RNA, 19 nt, Artificial Sequence
  Description of Artificial Sequence: Synthetic oligonucleotide
ggguggggaagaagggucu

SEQ ID NO: 130278 - RNA, 25 nt, Artificial Sequence
  Description of Artificial Sequence: Synthetic oligonucleotide
gccaaggcuggggcaggggagucag

SEQ ID NO: 130279 - RNA, 25 nt, Artificial Sequence
  Description of Artificial Sequence: Synthetic oligonucleotide
gcagaggccucgcucgggcgcccag

SEQ ID NO: 130280 - RNA, 25 nt, Artificial Sequence
  Description of Artificial Sequence: Synthetic oligonucleotide
gugguccugccgccuggucucaccu

SEQ ID NO: 130281 - RNA, 25 nt, Artificial Sequence
  Description of Artificial Sequence: Synthetic oligonucleotide
ucgcuaugguucgucugccucugca

SEQ ID NO: 130282 - RNA, 25 nt, Artificial Sequence
  Description of Artificial Sequence: Synthetic oligonucleotide
agugcguccucuggggcugcuugcu

SEQ ID NO: 130283 - RNA, 25 nt, Artificial Sequence
  Description of Artificial Sequence: Synthetic oligonucleotide
ugaccgcuguccauccagaaccacc

SEQ ID NO: 130284 - RNA, 25 nt, Artificial Sequence
  Description of Artificial Sequence: Synthetic oligonucleotide
ccacugcaugcagagaaaaacagua

SEQ ID NO: 130285 - RNA, 25 nt, Artificial Sequence
  Description of Artificial Sequence: Synthetic oligonucleotide
accuaauaaacagucagugcuguuc

SEQ ID NO: 130286 - RNA, 25 nt, Artificial Sequence
  Description of Artificial Sequence: Synthetic oligonucleotide
cuuugugccagccaggacagaaacu

SEQ ID NO: 130287 - RNA, 25 nt, Artificial Sequence
  Description of Artificial Sequence: Synthetic oligonucleotide
uggugagugacugcacagaguucac

SEQ ID NO: 130288 - RNA, 25 nt, Artificial Sequence
  Description of Artificial Sequence: Synthetic oligonucleotide
cugaaacggaaugccuuccuugcgg

SEQ ID NO: 130289 - RNA, 25 nt, Artificial Sequence
  Description of Artificial Sequence: Synthetic oligonucleotide
gugaaagcgaauuccuagacaccug

SEQ ID NO: 130290 - RNA, 25 nt, Artificial Sequence
  Description of Artificial Sequence: Synthetic oligonucleotide
ggaacagagagacacacugccacca

SEQ ID NO: 130291 - RNA, 25 nt, Artificial Sequence
  Description of Artificial Sequence: Synthetic oligonucleotide
agcacaaauacugcgaccccaaccu

SEQ ID NO: 130292 - RNA, 25 nt, Artificial Sequence
  Description of Artificial Sequence: Synthetic oligonucleotide
uagggcuucggguccagcagaaggg

SEQ ID NO: 130293 - RNA, 25 nt, Artificial Sequence
  Description of Artificial Sequence: Synthetic oligonucleotide
gcaccucagaaacagacaccaucug

SEQ ID NO: 130294 - RNA, 25 nt, Artificial Sequence
  Description of Artificial Sequence: Synthetic oligonucleotide
gcaccugugaagaaggcuggcacug

SEQ ID NO: 130295 - RNA, 25 nt, Artificial Sequence
  Description of Artificial Sequence: Synthetic oligonucleotide
guacgagugaggccugugagagcug

SEQ ID NO: 130296 - RNA, 25 nt, Artificial Sequence
  Description of Artificial Sequence: Synthetic oligonucleotide
guguccugcaccgcucaugcucgcc

SEQ ID NO: 130297 - RNA, 25 nt, Artificial Sequence
  Description of Artificial Sequence: Synthetic oligonucleotide
ccggcuuuggggucaagcagauugc

SEQ ID NO: 130298 - RNA, 25 nt, Artificial Sequence
  Description of Artificial Sequence: Synthetic oligonucleotide
cuacagggguuucugauaccaucug

SEQ ID NO: 130299 - RNA, 25 nt, Artificial Sequence
  Description of Artificial Sequence: Synthetic oligonucleotide
gcgagcccugcccagucggcuucuu

SEQ ID NO: 130300 - RNA, 25 nt, Artificial Sequence
  Description of Artificial Sequence: Synthetic oligonucleotide
ucuccaaugugucaucugcuuucga

SEQ ID NO: 130301 - RNA, 25 nt, Artificial Sequence
  Description of Artificial Sequence: Synthetic oligonucleotide
aaaaaugucacccuuggacaagguc

SEQ ID NO: 130302 - RNA, 25 nt, Artificial Sequence
  Description of Artificial Sequence: Synthetic oligonucleotide
ccccaggaucggcugagagcccugg

SEQ ID NO: 130303 - RNA, 25 nt, Artificial Sequence
  Description of Artificial Sequence: Synthetic oligonucleotide
guggugauccccaucaucuucggga

SEQ ID NO: 130304 - RNA, 25 nt, Artificial Sequence
  Description of Artificial Sequence: Synthetic oligonucleotide
auccuguuugccauccucuuggugc

SEQ ID NO: 130305 - RNA, 25 nt, Artificial Sequence
  Description of Artificial Sequence: Synthetic oligonucleotide
cuggucuuuaucaaaaagguggcca

SEQ ID NO: 130306 - RNA, 25 nt, Artificial Sequence
  Description of Artificial Sequence: Synthetic oligonucleotide
aagaagccaaccaauaaggcccccc

SEQ ID NO: 130307 - RNA, 25 nt, Artificial Sequence
  Description of Artificial Sequence: Synthetic oligonucleotide
caccccaagcaggaaccccaggaga

SEQ ID NO: 130308 - RNA, 25 nt, Artificial Sequence
  Description of Artificial Sequence: Synthetic oligonucleotide
aucaauuuucccgacgaucuuccug

SEQ ID NO: 130309 - RNA, 25 nt, Artificial Sequence
  Description of Artificial Sequence: Synthetic oligonucleotide
ggcuccaacacugcugcuccagugc

SEQ ID NO: 130310 - RNA, 25 nt, Artificial Sequence
  Description of Artificial Sequence: Synthetic oligonucleotide
caggagacuuuacauggaugccaac

SEQ ID NO: 130311 - RNA, 25 nt, Artificial Sequence
  Description of Artificial Sequence: Synthetic oligonucleotide
ccggucacccaggaggauggcaaag

SEQ ID NO: 130312 - RNA, 25 nt, Artificial Sequence
  Description of Artificial Sequence: Synthetic oligonucleotide
gagagucgcaucucagugcaggaga

SEQ ID NO: 130313 - RNA, 25 nt, Artificial Sequence
  Description of Artificial Sequence: Synthetic oligonucleotide
agacagugaggcugcacccacccag

SEQ ID NO: 130314 - RNA, 25 nt, Artificial Sequence
  Description of Artificial Sequence: Synthetic oligonucleotide
ggaguguggccacgugggcaaacag

SEQ ID NO: 130315 - RNA, 25 nt, Artificial Sequence
  Description of Artificial Sequence: Synthetic oligonucleotide
ggcaguuggccagagagccuggugc

SEQ ID NO: 130316 - RNA, 25 nt, Artificial Sequence
  Description of Artificial Sequence: Synthetic oligonucleotide
cugcugcugcuguggcgugagggug

SEQ ID NO: 130317 - RNA, 25 nt, Artificial Sequence
  Description of Artificial Sequence: Synthetic oligonucleotide
gaggggcuggcacugacugggcaua

SEQ ID NO: 130318 - RNA, 25 nt, Artificial Sequence
  Description of Artificial Sequence: Synthetic oligonucleotide
agcuccccgcuucugccugcacccc

SEQ ID NO: 130319 - RNA, 25 nt, Artificial Sequence
  Description of Artificial Sequence: Synthetic oligonucleotide
cugcaguuugagacaggagaccugg

SEQ ID NO: 130320 - RNA, 25 nt, Artificial Sequence
  Description of Artificial Sequence: Synthetic oligonucleotide
gcacuggaugcagaaacaguucacc

SEQ ID NO: 130321 - RNA, 25 nt, Artificial Sequence
  Description of Artificial Sequence: Synthetic oligonucleotide
cuugaagaaccucucacuucacccu

SEQ ID NO: 130322 - RNA, 25 nt, Artificial Sequence
  Description of Artificial Sequence: Synthetic oligonucleotide
uggagcccauccagucucccaacuu

SEQ ID NO: 130323 - RNA, 25 nt, Artificial Sequence
  Description of Artificial Sequence: Synthetic oligonucleotide
uguauuaaagacagaggcagaaguu

SEQ ID NO: 130324 - RNA, 25 nt, Artificial Sequence
  Description of Artificial Sequence: Synthetic oligonucleotide
uuggugguggugguguugggguaug

SEQ ID NO: 130325 - RNA, 25 nt, Artificial Sequence
  Description of Artificial Sequence: Synthetic oligonucleotide
gguuuaguaauauccaccagaccuu

SEQ ID NO: 130326 - RNA, 25 nt, Artificial Sequence
  Description of Artificial Sequence: Synthetic oligonucleotide
uccgauccagcaguuuggugcccag

SEQ ID NO: 130327 - RNA, 25 nt, Artificial Sequence
  Description of Artificial Sequence: Synthetic oligonucleotide
gagaggcaucaugguggcuucccug

SEQ ID NO: 130328 - RNA, 25 nt, Artificial Sequence
  Description of Artificial Sequence: Synthetic oligonucleotide
gcgcccaggaagccauauacacaga

SEQ ID NO: 130329 - RNA, 25 nt, Artificial Sequence
  Description of Artificial Sequence: Synthetic oligonucleotide
augcccauugcagcauuguuuguga

SEQ ID NO: 130330 - RNA, 25 nt, Artificial Sequence
  Description of Artificial Sequence: Synthetic oligonucleotide
auagugaacaacuggaagcugcuua

SEQ ID NO: 130331 - RNA, 25 nt, Artificial Sequence
  Description of Artificial Sequence: Synthetic oligonucleotide
aacuguccaucagcaggagacuggc

SEQ ID NO: 130332 - RNA, 25 nt, Artificial Sequence
  Description of Artificial Sequence: Synthetic oligonucleotide
cuaaauaaaauuagaauauauuuau

SEQ ID NO: 130333 - RNA, 25 nt, Artificial Sequence
  Description of Artificial Sequence: Synthetic oligonucleotide
uacaacagaaucucaaaaacacugu

SEQ ID NO: 130334 - RNA, 25 nt, Artificial Sequence
  Description of Artificial Sequence: Synthetic oligonucleotide
uugaguaaggaaaaaaaggcaugcu

SEQ ID NO: 130335 - RNA, 25 nt, Artificial Sequence
  Description of Artificial Sequence: Synthetic oligonucleotide
ugcugaaugauggguauggaacuuu

SEQ ID NO: 130336 - RNA, 25 nt, Artificial Sequence
  Description of Artificial Sequence: Synthetic oligonucleotide
uuuaaaaaaguacaugcuuuuaugu

SEQ ID NO: 130337 - RNA, 25 nt, Artificial Sequence
  Description of Artificial Sequence: Synthetic oligonucleotide
uauguauauugccuauggauauaug

SEQ ID NO: 130338 - RNA, 25 nt, Artificial Sequence
  Description of Artificial Sequence: Synthetic oligonucleotide
guauaaauacaauaugcaucauaua

SEQ ID NO: 130339 - RNA, 25 nt, Artificial Sequence
  Description of Artificial Sequence: Synthetic oligonucleotide
auugauauaacaaggguucuggaag

SEQ ID NO: 130340 - RNA, 25 nt, Artificial Sequence
  Description of Artificial Sequence: Synthetic oligonucleotide
ggguacacagaaaacccacagcucg

SEQ ID NO: 130341 - RNA, 25 nt, Artificial Sequence
  Description of Artificial Sequence: Synthetic oligonucleotide
gaagaguggugacgucugggguggg

SEQ ID NO: 130342 - RNA, 25 nt, Artificial Sequence
  Description of Artificial Sequence: Synthetic oligonucleotide
gggguggggaagaagggucuggggg

SEQ ID NO: 130343 - RNA, 25 nt, Artificial Sequence
  Description of Artificial Sequence: Synthetic oligonucleotide
aaaaaugucacccuuggacaagcug

SEQ ID NO: 130344 - RNA, 25 nt, Artificial Sequence
  Description of Artificial Sequence: Synthetic oligonucleotide
gugagaccaaagaccugguugugca

SEQ ID NO: 130345 - RNA, 25 nt, Artificial Sequence
  Description of Artificial Sequence: Synthetic oligonucleotide
aacaggcaggcacaaacaagacuga

SEQ ID NO: 130346 - RNA, 25 nt, Artificial Sequence
  Description of Artificial Sequence: Synthetic oligonucleotide
auguugucugugguccccaggaucg

SEQ ID NO: 130347 - RNA, 25 nt, Artificial Sequence
  Description of Artificial Sequence: Synthetic oligonucleotide
ggcugagagcccugguggugauccc

SEQ ID NO: 130348 - RNA, 25 nt, Artificial Sequence
  Description of Artificial Sequence: Synthetic oligonucleotide
ccaucaucuucgggauccuguuugc

SEQ ID NO: 130349 - RNA, 25 nt, Artificial Sequence
  Description of Artificial Sequence: Synthetic oligonucleotide
ccauccucuuggugcuggucuuuau

SEQ ID NO: 130350 - RNA, 25 nt, Artificial Sequence
  Description of Artificial Sequence: Synthetic oligonucleotide
ucaaaaagguggccaagaagccaac

SEQ ID NO: 130351 - RNA, 25 nt, Artificial Sequence
  Description of Artificial Sequence: Synthetic oligonucleotide
ccaauaaggccccccaccccaagca

SEQ ID NO: 130352 - RNA, 25 nt, Artificial Sequence
  Description of Artificial Sequence: Synthetic oligonucleotide
aggaaccccaggagaucaauuuucc

SEQ ID NO: 130353 - RNA, 25 nt, Artificial Sequence
  Description of Artificial Sequence: Synthetic oligonucleotide
ccgacgaucuuccuggcuccaacac

SEQ ID NO: 130354 - RNA, 25 nt, Artificial Sequence
  Description of Artificial Sequence: Synthetic oligonucleotide
cugcugcuccagugcaggagacuuu

SEQ ID NO: 130355 - RNA, 25 nt, Artificial Sequence
  Description of Artificial Sequence: Synthetic oligonucleotide
uacauggaugccaaccggucaccca

SEQ ID NO: 130356 - RNA, 25 nt, Artificial Sequence
  Description of Artificial Sequence: Synthetic oligonucleotide
aggaggauggcaaagagagucgcau

SEQ ID NO: 130357 - RNA, 25 nt, Artificial Sequence
  Description of Artificial Sequence: Synthetic oligonucleotide
ucucagugcaggagagacagugagg

SEQ ID NO: 130358 - RNA, 25 nt, Artificial Sequence
  Description of Artificial Sequence: Synthetic oligonucleotide
gcugcacccacccaggaguguggcc

SEQ ID NO: 130359 - RNA, 25 nt, Artificial Sequence
  Description of Artificial Sequence: Synthetic oligonucleotide
cacgugggcaaacaggcaguuggcc

SEQ ID NO: 130360 - RNA, 25 nt, Artificial Sequence
  Description of Artificial Sequence: Synthetic oligonucleotide
cagagagccuggugcugcugcugcu

SEQ ID NO: 130361 - RNA, 25 nt, Artificial Sequence
  Description of Artificial Sequence: Synthetic oligonucleotide
uguggcgugagggugaggggcuggc

SEQ ID NO: 130362 - RNA, 25 nt, Artificial Sequence
  Description of Artificial Sequence: Synthetic oligonucleotide
cacugacugggcauagcuccccgcu

SEQ ID NO: 130363 - RNA, 25 nt, Artificial Sequence
  Description of Artificial Sequence: Synthetic oligonucleotide
uucugccugcaccccugcaguuuga

SEQ ID NO: 130364 - RNA, 25 nt, Artificial Sequence
  Description of Artificial Sequence: Synthetic oligonucleotide
agacaggagaccuggcacuggaugc

SEQ ID NO: 130365 - RNA, 25 nt, Artificial Sequence
  Description of Artificial Sequence: Synthetic oligonucleotide
cagaaacaguucaccuugaagaacc

SEQ ID NO: 130366 - RNA, 25 nt, Artificial Sequence
  Description of Artificial Sequence: Synthetic oligonucleotide
cucucacuucacccuggagcccauc

SEQ ID NO: 130367 - RNA, 25 nt, Artificial Sequence
  Description of Artificial Sequence: Synthetic oligonucleotide
ccagucucccaacuuguauuaaaga

SEQ ID NO: 130368 - RNA, 25 nt, Artificial Sequence
  Description of Artificial Sequence: Synthetic oligonucleotide
acagaggcagaaguuuggugguggu

SEQ ID NO: 130369 - RNA, 25 nt, Artificial Sequence
  Description of Artificial Sequence: Synthetic oligonucleotide
ugguguugggguaugguuuaguaau

SEQ ID NO: 130370 - RNA, 25 nt, Artificial Sequence
  Description of Artificial Sequence: Synthetic oligonucleotide
uauccaccagaccuuccgauccagc

SEQ ID NO: 130371 - RNA, 25 nt, Artificial Sequence
  Description of Artificial Sequence: Synthetic oligonucleotide
caguuuggugcccagagaggcauca

SEQ ID NO: 130372 - RNA, 25 nt, Artificial Sequence
  Description of Artificial Sequence: Synthetic oligonucleotide
augguggcuucccugcgcccaggaa

SEQ ID NO: 130373 - RNA, 25 nt, Artificial Sequence
  Description of Artificial Sequence: Synthetic oligonucleotide
agccauauacacagaugcccauugc

SEQ ID NO: 130374 - RNA, 25 nt, Artificial Sequence
  Description of Artificial Sequence: Synthetic oligonucleotide
cagcauuguuugugauagugaacaa

SEQ ID NO: 130375 - RNA, 25 nt, Artificial Sequence
  Description of Artificial Sequence: Synthetic oligonucleotide
acuggaagcugcuuaacuguccauc

SEQ ID NO: 130376 - RNA, 25 nt, Artificial Sequence
  Description of Artificial Sequence: Synthetic oligonucleotide
cagcaggagacuggcuaaauaaaau

SEQ ID NO: 130377 - RNA, 25 nt, Artificial Sequence
  Description of Artificial Sequence: Synthetic oligonucleotide
uuagaauauauuuauacaacagaau

SEQ ID NO: 130378 - RNA, 25 nt, Artificial Sequence
  Description of Artificial Sequence: Synthetic oligonucleotide
ucucaaaaacacuguugaguaagga

SEQ ID NO: 130379 - RNA, 25 nt, Artificial Sequence
  Description of Artificial Sequence: Synthetic oligonucleotide
aaaaaaaggcaugcugcugaaugau

SEQ ID NO: 130380 - RNA, 25 nt, Artificial Sequence
  Description of Artificial Sequence: Synthetic oligonucleotide
uggguauggaacuuuuuaaaaaagu

SEQ ID NO: 130381 - RNA, 25 nt, Artificial Sequence
  Description of Artificial Sequence: Synthetic oligonucleotide
uacaugcuuuuauguauguauauug

SEQ ID NO: 130382 - RNA, 25 nt, Artificial Sequence
  Description of Artificial Sequence: Synthetic oligonucleotide
gccuauggauauauguauaaauaca

SEQ ID NO: 130383 - RNA, 25 nt, Artificial Sequence
  Description of Artificial Sequence: Synthetic oligonucleotide
aauaugcaucauauauugauauaac

SEQ ID NO: 130384 - RNA, 25 nt, Artificial Sequence
  Description of Artificial Sequence: Synthetic oligonucleotide
caaggguucuggaaggguacacaga

SEQ ID NO: 130385 - RNA, 25 nt, Artificial Sequence
  Description of Artificial Sequence: Synthetic oligonucleotide
aaaacccacagcucgaagaguggug

SEQ ID NO: 130386 - RNA, 25 nt, Artificial Sequence
  Description of Artificial Sequence: Synthetic oligonucleotide
gacgucugggguggggaagaagggu

SEQ ID NO: 130387 - DNA, 21 bp, Artificial Sequence
  Description of Artificial Sequence: Synthetic oligonucleotide
  Description of Combined DNA/RNA Molecule: Synthetic oligonucleotide
cuacacaaaucagcgauuutt

SEQ ID NO: 130388 - DNA, 21 bp, Artificial Sequence
  Description of Artificial Sequence: Synthetic oligonucleotide
  Description of Combined DNA/RNA Molecule: Synthetic oligonucleotide
aaaucgcugauuuguguagtt

SEQ ID NO: 130389 - DNA, 25 bp, Artificial Sequence
  Description of Artificial Sequence: Synthetic oligonucleotide
  Description of Combined DNA/RNA Molecule: Synthetic oligonucleotide
cuacacaaaucagcgauuuccaugt

SEQ ID NO: 130390 - RNA, 27 nt, Artificial Sequence
  Description of Artificial Sequence: Synthetic oligonucleotide
acauggaaaucgcugauuuguguaguc

SEQ ID NO: 130391 - RNA, 13 nt, Artificial Sequence
  Description of Artificial Sequence: Synthetic oligonucleotide
cuacacaaaucag

SEQ ID NO: 130392 - DNA, 11 bp, Artificial Sequence
  Description of Artificial Sequence: Synthetic oligonucleotide
  Description of Combined DNA/RNA Molecule: Synthetic oligonucleotide
gauuuccaugt

SEQ ID NO: 130393 - DNA, 21 bp, Artificial Sequence
  Description of Artificial Sequence: Synthetic oligonucleotide
  Description of Combined DNA/RNA Molecule: Synthetic oligonucleotide
ggaucuuauuucuucggagtt

SEQ ID NO: 130394 - DNA, 21 bp, Artificial Sequence
  Description of Artificial Sequence: Synthetic oligonucleotide
  Description of Combined DNA/RNA Molecule: Synthetic oligonucleotide
cuccgaagaaauaagaucctt

SEQ ID NO: 130395 - RNA, 11 nt, Artificial Sequence
  Description of Artificial Sequence: Synthetic oligonucleotide
ggaucuuauuu

SEQ ID NO: 130396 - DNA, 10 bp, Artificial Sequence
  Description of Artificial Sequence: Synthetic oligonucleotide
  Description of Combined DNA/RNA Molecule: Synthetic oligonucleotide
cuucggagtt

SEQ ID NO: 130397 - RNA, 27 nt, Artificial Sequence
  Description of Artificial Sequence: Synthetic oligonucleotide
cauugucuccgaagaaauaagauccuu

SEQ ID NO: 130398 - RNA, 8 nt, Artificial Sequence
  Description of Artificial Sequence: Synthetic oligonucleotide
  modified_base (2): LNA-G
ggaucuua

SEQ ID NO: 130399 - DNA, 17 bp, Artificial Sequence
  Description of Artificial Sequence: Synthetic oligonucleotide
  Description of Combined DNA/RNA Molecule: Synthetic oligonucleotide
uuucuucggagacaatg

SEQ ID NO: 130400 - DNA, 16 bp, Artificial Sequence
  Description of Artificial Sequence: Synthetic oligonucleotide
  Description of Combined DNA/RNA Molecule: Synthetic oligonucleotide
uucuucggagacaatg

SEQ ID NO: 130401 - DNA, 15 bp, Artificial Sequence
  Description of Artificial Sequence: Synthetic oligonucleotide
  Description of Combined DNA/RNA Molecule: Synthetic oligonucleotide
ucuucggagacaatg

SEQ ID NO: 130402 - DNA, 14 bp, Artificial Sequence
  Description of Artificial Sequence: Synthetic oligonucleotide
  Description of Combined DNA/RNA Molecule: Synthetic oligonucleotide
cuucggagacaatg

SEQ ID NO: 130403 - DNA, 13 bp, Artificial Sequence
  Description of Artificial Sequence: Synthetic oligonucleotide
  Description of Combined DNA/RNA Molecule: Synthetic oligonucleotide
uucggagacaatg

SEQ ID NO: 130404 - DNA, 12 bp, Artificial Sequence
  Description of Artificial Sequence: Synthetic oligonucleotide
  Description of Combined DNA/RNA Molecule: Synthetic oligonucleotide
ucggagacaatg

SEQ ID NO: 130405 - DNA, 11 bp, Artificial Sequence
  Description of Artificial Sequence: Synthetic oligonucleotide
  Description of Combined DNA/RNA Molecule: Synthetic oligonucleotide
cggagacaatg

SEQ ID NO: 130406 - RNA, 9 nt, Artificial Sequence
  Description of Artificial Sequence: Synthetic oligonucleotide
  modified_base (2): LNA-G
ggaucuuau

SEQ ID NO: 130407 - RNA, 10 nt, Artificial Sequence
  Description of Artificial Sequence: Synthetic oligonucleotide
  modified_base (2): LNA-G
ggaucuuauu

SEQ ID NO: 130408 - RNA, 11 nt, Artificial Sequence
  Description of Artificial Sequence: Synthetic oligonucleotide
  modified_base (2): LNA-G
ggaucuuauuu

SEQ ID NO: 130409 - RNA, 12 nt, Artificial Sequence
  Description of Artificial Sequence: Synthetic oligonucleotide
  modified_base (2): LNA-G
ggaucuuauuuc

SEQ ID NO: 130410 - RNA, 8 nt, Artificial Sequence
  Description of Artificial Sequence: Synthetic oligonucleotide
  modified_base (3): LNA-A
cuacacaa

SEQ ID NO: 130411 - DNA, 13 bp, Artificial Sequence
  Description of Artificial Sequence: Synthetic oligonucleotide
  Description of Combined DNA/RNA Molecule: Synthetic oligonucleotide
  modified_base (8): LNA-A
aucagcgauuutt

SEQ ID NO: 130412 - DNA, 12 bp, Artificial Sequence
  Description of Artificial Sequence: Synthetic oligonucleotide
  Description of Combined DNA/RNA Molecule: Synthetic oligonucleotide
  modified_base (7): LNA-A
ucagcgauuutt

SEQ ID NO: 130413 - DNA, 11 bp, Artificial Sequence
  Description of Artificial Sequence: Synthetic oligonucleotide
  Description of Combined DNA/RNA Molecule: Synthetic oligonucleotide
  modified_base (6): LNA-A
cagcgauuutt

SEQ ID NO: 130414 - DNA, 10 bp, Artificial Sequence
  Description of Artificial Sequence: Synthetic oligonucleotide
  Description of Combined DNA/RNA Molecule: Synthetic oligonucleotide
  modified_base (5): LNA-A
agcgauuutt

SEQ ID NO: 130415 - DNA, 9 bp, Artificial Sequence
  Description of Artificial Sequence: Synthetic oligonucleotide
  Description of Combined DNA/RNA Molecule: Synthetic oligonucleotide
  modified_base (4): LNA-A
gcgauuutt

SEQ ID NO: 130416 - DNA, 8 bp, Artificial Sequence
  Description of Artificial Sequence: Synthetic oligonucleotide
  Description of Combined DNA/RNA Molecule: Synthetic oligonucleotide
  modified_base (3): LNA-A
cgauuutt

SEQ ID NO: 130417 - DNA, 7 bp, Artificial Sequence
  Description of Artificial Sequence: Synthetic oligonucleotide
  Description of Combined DNA/RNA Molecule: Synthetic oligonucleotide
  modified_base (2): LNA-A
gauuutt

SEQ ID NO: 130418 - RNA, 9 nt, Artificial Sequence
  Description of Artificial Sequence: Synthetic oligonucleotide
  modified_base (3): LNA-A
cuacacaaa

SEQ ID NO: 130419 - RNA, 10 nt, Artificial Sequence
  Description of Artificial Sequence: Synthetic oligonucleotide
  modified_base (3): LNA-A
cuacacaaau

SEQ ID NO: 130420 - RNA, 11 nt, Artificial Sequence
  Description of Artificial Sequence: Synthetic oligonucleotide
  modified_base (3): LNA-A
cuacacaaauc

SEQ ID NO: 130421 - RNA, 12 nt, Artificial Sequence
  Description of Artificial Sequence: Synthetic oligonucleotide
  modified_base (3): LNA-A
cuacacaaauca

SEQ ID NO: 130422 - RNA, 13 nt, Artificial Sequence
  Description of Artificial Sequence: Synthetic oligonucleotide
  modified_base (3): LNA-A
cuacacaaaucag

SEQ ID NO: 130423 - RNA, 14 nt, Artificial Sequence
  Description of Artificial Sequence: Synthetic oligonucleotide
  modified_base (3): LNA-A
cuacacaaaucagc

SEQ ID NO: 130424 - RNA, 13 nt, Artificial Sequence
  Description of Artificial Sequence: Synthetic oligonucleotide
  modified_base (2): LNA-G
ggaucuuauuucu

SEQ ID NO: 130425 - RNA, 14 nt, Artificial Sequence
  Description of Artificial Sequence: Synthetic oligonucleotide
  modified_base (2): LNA-G
ggaucuuauuucuu

SEQ ID NO: 130426 - RNA, 8 nt, Artificial Sequence
  Description of Artificial Sequence: Synthetic oligonucleotide
  modified_base (2): LNA-G
  modified_base (8): LNA-A
ggaucuua

SEQ ID NO: 130427 - RNA, 9 nt, Artificial Sequence
  Description of Artificial Sequence: Synthetic oligonucleotide
  modified_base (2): LNA-G
  modified_base (9): LNA-U
ggaucuuau

SEQ ID NO: 130428 - RNA, 10 nt, Artificial Sequence
  Description of Artificial Sequence: Synthetic oligonucleotide
  modified_base (2): LNA-G
  modified_base (10): LNA-U
ggaucuuauu

SEQ ID NO: 130429 - RNA, 11 nt, Artificial Sequence
  Description of Artificial Sequence: Synthetic oligonucleotide
  modified_base (2): LNA-G
  modified_base (11): LNA-U
ggaucuuauuu

SEQ ID NO: 130430 - RNA, 12 nt, Artificial Sequence
  Description of Artificial Sequence: Synthetic oligonucleotide
  modified_base (2): LNA-G
  modified_base (12): LNA-C
ggaucuuauuuc

SEQ ID NO: 130431 - RNA, 13 nt, Artificial Sequence
  Description of Artificial Sequence: Synthetic oligonucleotide
  modified_base (2): LNA-G
  modified_base (13): LNA-U
ggaucuuauuucu

SEQ ID NO: 130432 - RNA, 14 nt, Artificial Sequence
  Description of Artificial Sequence: Synthetic oligonucleotide
  modified_base (2): LNA-G
  modified_base (14): LNA-U
ggaucuuauuucuu

SEQ ID NO: 130433 - DNA, 13 bp, Artificial Sequence
  Description of Artificial Sequence: Synthetic oligonucleotide
  Description of Combined DNA/RNA Molecule: Synthetic oligonucleotide
  modified_base (8): LNA-G
uuucuucggagtt

SEQ ID NO: 130434 - DNA, 12 bp, Artificial Sequence
  Description of Artificial Sequence: Synthetic oligonucleotide
  Description of Combined DNA/RNA Molecule: Synthetic oligonucleotide
  modified_base (7): LNA-G
uucuucggagtt

SEQ ID NO: 130435 - DNA, 11 bp, Artificial Sequence
  Description of Artificial Sequence: Synthetic oligonucleotide
  Description of Combined DNA/RNA Molecule: Synthetic oligonucleotide
  modified_base (6): LNA-G
ucuucggagtt

SEQ ID NO: 130436 - DNA, 10 bp, Artificial Sequence
  Description of Artificial Sequence: Synthetic oligonucleotide
  Description of Combined DNA/RNA Molecule: Synthetic oligonucleotide
  modified_base (5): LNA-G
cuucggagtt

SEQ ID NO: 130437 - DNA, 9 bp, Artificial Sequence
  Description of Artificial Sequence: Synthetic oligonucleotide
  Description of Combined DNA/RNA Molecule: Synthetic oligonucleotide
  modified_base (4): LNA-G
uucggagtt

SEQ ID NO: 130438 - DNA, 8 bp, Artificial Sequence
  Description of Artificial Sequence: Synthetic oligonucleotide
  Description of Combined DNA/RNA Molecule: Synthetic oligonucleotide
  modified_base (3): LNA-G
ucggagtt

SEQ ID NO: 130439 - DNA, 7 bp, Artificial Sequence
  Description of Artificial Sequence: Synthetic oligonucleotide
  Description of Combined DNA/RNA Molecule: Synthetic oligonucleotide
  modified_base (2): LNA-G
cggagtt

SEQ ID NO: 130440 - DNA, 13 bp, Artificial Sequence
  Description of Artificial Sequence: Synthetic oligonucleotide
  Description of Combined DNA/RNA Molecule: Synthetic oligonucleotide
  modified_base (1): LNA-U
  modified_base (8): LNA-G
uuucuucggagtt

SEQ ID NO: 130441 - DNA, 12 bp, Artificial Sequence
  Description of Artificial Sequence: Synthetic oligonucleotide
  Description of Combined DNA/RNA Molecule: Synthetic oligonucleotide
  modified_base (1): LNA-U
  modified_base (7): LNA-G
uucuucggagtt

SEQ ID NO: 130442 - DNA, 11 bp, Artificial Sequence
  Description of Artificial Sequence: Synthetic oligonucleotide
  Description of Combined DNA/RNA Molecule: Synthetic oligonucleotide
  modified_base (1): LNA-U
  modified_base (6): LNA-G
ucuucggagtt

SEQ ID NO: 130443 - DNA, 10 bp, Artificial Sequence
  Description of Artificial Sequence: Synthetic oligonucleotide
  Description of Combined DNA/RNA Molecule: Synthetic oligonucleotide
  modified_base (1): LNA-C
  modified_base (5): LNA-G
cuucggagtt

SEQ ID NO: 130444 - DNA, 9 bp, Artificial Sequence
  Description of Artificial Sequence: Synthetic oligonucleotide
  Description of Combined DNA/RNA Molecule: Synthetic oligonucleotide
  modified_base (1): LNA-U
  modified_base (4): LNA-G
uucggagtt

SEQ ID NO: 130445 - DNA, 8 bp, Artificial Sequence
  Description of Artificial Sequence: Synthetic oligonucleotide
  Description of Combined DNA/RNA Molecule: Synthetic oligonucleotide
  modified_base (1): LNA-U
  modified_base (3): LNA-G
ucggagtt

SEQ ID NO: 130446 - DNA, 7 bp, Artificial Sequence
  Description of Artificial Sequence: Synthetic oligonucleotide
  Description of Combined DNA/RNA Molecule: Synthetic oligonucleotide
  modified_base (1): LNA-C
  modified_base (2): LNA-G
cggagtt

SEQ ID NO: 130447 - DNA, 21 bp, Artificial Sequence
  Description of Artificial Sequence: Synthetic oligonucleotide
  Description of Combined DNA/RNA Molecule: Synthetic oligonucleotide
  modified_base (2): LNA-G
  modified_base (16): LNA-G
ggaucuuauuucuucggagtt

SEQ ID NO: 130448 - DNA, 25 bp, Artificial Sequence
  Description of Artificial Sequence: Synthetic oligonucleotide
  Description of Combined DNA/RNA Molecule: Synthetic oligonucleotide
ggaucuuauuucuucggagacaatg

SEQ ID NO: 130449 - RNA, 25 nt, Artificial Sequence
  Description of Artificial Sequence: Synthetic oligonucleotide
guauuuugaugaggaguucacggcc

SEQ ID NO: 130450 - RNA, 25 nt, Artificial Sequence
  Description of Artificial Sequence: Synthetic oligonucleotide
ggcccagaugaucaccaucacacca

SEQ ID NO: 130451 - RNA, 25 nt, Artificial Sequence
  Description of Artificial Sequence: Synthetic oligonucleotide
gggaagaaaacuauccugcggguuu

SEQ ID NO: 130452 - RNA, 25 nt, Artificial Sequence
  Description of Artificial Sequence: Synthetic oligonucleotide
guuuuaauuuauuucauccaguuug

SEQ ID NO: 130453 - RNA, 25 nt, Artificial Sequence
  Description of Artificial Sequence: Synthetic oligonucleotide
acguagggaaauguuaaggacuucu

SEQ ID NO: 130454 - RNA, 25 nt, Artificial Sequence
  Description of Artificial Sequence: Synthetic oligonucleotide
ccaggguuuacccagugggacagag

SEQ ID NO: 130455 - RNA, 25 nt, Artificial Sequence
  Description of Artificial Sequence: Synthetic oligonucleotide
agcaagguuuaaauuuguuauugug

SEQ ID NO: 130456 - RNA, 25 nt, Artificial Sequence
  Description of Artificial Sequence: Synthetic oligonucleotide
uguauuauguuguucaaaugcauuu

SEQ ID NO: 130457 - RNA, 25 nt, Artificial Sequence
  Description of Artificial Sequence: Synthetic oligonucleotide
uuuuaaucuuugugacaggaaagcc

SEQ ID NO: 130458 - RNA, 25 nt, Artificial Sequence
  Description of Artificial Sequence: Synthetic oligonucleotide
uuaaucuuugugacaggaaagcccu

SEQ ID NO: 130459 - RNA, 25 nt, Artificial Sequence
  Description of Artificial Sequence: Synthetic oligonucleotide
gcugcuuaugucucccagcauggcc

SEQ ID NO: 130460 - RNA, 25 nt, Artificial Sequence
  Description of Artificial Sequence: Synthetic oligonucleotide
aaguguuucagaagcuucucccuga

SEQ ID NO: 130461 - RNA, 25 nt, Artificial Sequence
  Description of Artificial Sequence: Synthetic oligonucleotide
gaccaucaauaaggaagaagcccuu

SEQ ID NO: 130462 - RNA, 25 nt, Artificial Sequence
  Description of Artificial Sequence: Synthetic oligonucleotide
ccaucaauaaggaagaagcccuuca

SEQ ID NO: 130463 - RNA, 25 nt, Artificial Sequence
  Description of Artificial Sequence: Synthetic oligonucleotide
ucaauaaggaagaagcccuucagcg

SEQ ID NO: 130464 - RNA, 25 nt, Artificial Sequence
  Description of Artificial Sequence: Synthetic oligonucleotide
aauaaggaagaagcccuucagcggc

SEQ ID NO: 130465 - RNA, 25 nt, Artificial Sequence
  Description of Artificial Sequence: Synthetic oligonucleotide
aggaagaagcccuucagcggccagu

SEQ ID NO: 130466 - RNA, 25 nt, Artificial Sequence
  Description of Artificial Sequence: Synthetic oligonucleotide
gcauaacuaaaggugaaaagcuccg

SEQ ID NO: 130467 - RNA, 25 nt, Artificial Sequence
  Description of Artificial Sequence: Synthetic oligonucleotide
cauaacuaaaggugaaaagcuccgg

SEQ ID NO: 130468 - RNA, 25 nt, Artificial Sequence
  Description of Artificial Sequence: Synthetic oligonucleotide
cuacaucacgccagucaacagucug

SEQ ID NO: 130469 - RNA, 25 nt, Artificial Sequence
  Description of Artificial Sequence: Synthetic oligonucleotide
acuggauuuaagcagaguucaaaag

SEQ ID NO: 130470 - RNA, 25 nt, Artificial Sequence
  Description of Artificial Sequence: Synthetic oligonucleotide
cuggauuuaagcagaguucaaaagc

SEQ ID NO: 130471 - RNA, 25 nt, Artificial Sequence
  Description of Artificial Sequence: Synthetic oligonucleotide
gauuuaagcagaguucaaaagcccu

SEQ ID NO: 130472 - RNA, 25 nt, Artificial Sequence
  Description of Artificial Sequence: Synthetic oligonucleotide
auuuaagcagaguucaaaagcccuu

SEQ ID NO: 130473 - RNA, 25 nt, Artificial Sequence
  Description of Artificial Sequence: Synthetic oligonucleotide
uuaagcagaguucaaaagcccuuca

SEQ ID NO: 130474 - RNA, 25 nt, Artificial Sequence
  Description of Artificial Sequence: Synthetic oligonucleotide
uaagcagaguucaaaagcccuucag

SEQ ID NO: 130475 - RNA, 25 nt, Artificial Sequence
  Description of Artificial Sequence: Synthetic oligonucleotide
agcagaguucaaaagcccuucagcg

SEQ ID NO: 130476 - RNA, 25 nt, Artificial Sequence
  Description of Artificial Sequence: Synthetic oligonucleotide
cucagggucugagugaagccgcucg

SEQ ID NO: 130477 - RNA, 25 nt, Artificial Sequence
  Description of Artificial Sequence: Synthetic oligonucleotide
caagcaacuacaucacgccagucaa

SEQ ID NO: 130478 - RNA, 25 nt, Artificial Sequence
  Description of Artificial Sequence: Synthetic oligonucleotide
aucaauggcagcuucuuggugcgug

SEQ ID NO: 130479 - RNA, 25 nt, Artificial Sequence
  Description of Artificial Sequence: Synthetic oligonucleotide
uuccagcccacauuggauucaucag

SEQ ID NO: 130480 - RNA, 25 nt, Artificial Sequence
  Description of Artificial Sequence: Synthetic oligonucleotide
cagcugagaauguggaauaccuaag

SEQ ID NO: 130481 - RNA, 25 nt, Artificial Sequence
  Description of Artificial Sequence: Synthetic oligonucleotide
aacguaucuccuaauuugaggcuca

SEQ ID NO: 130482 - RNA, 25 nt, Artificial Sequence
  Description of Artificial Sequence: Synthetic oligonucleotide
ccuaaaauaauuucucuacaauugg

SEQ ID NO: 130483 - RNA, 25 nt, Artificial Sequence
  Description of Artificial Sequence: Synthetic oligonucleotide
uggaagauucagcuaguuaggagcc

SEQ ID NO: 130484 - RNA, 25 nt, Artificial Sequence
  Description of Artificial Sequence: Synthetic oligonucleotide
uuaaacucuccuagucaauauccac

SEQ ID NO: 130485 - RNA, 25 nt, Artificial Sequence
  Description of Artificial Sequence: Synthetic oligonucleotide
cagccuacaguuauguucagucaca

SEQ ID NO: 130486 - RNA, 25 nt, Artificial Sequence
  Description of Artificial Sequence: Synthetic oligonucleotide
guuauguucagucacacacacauac

SEQ ID NO: 130487 - RNA, 25 nt, Artificial Sequence
  Description of Artificial Sequence: Synthetic oligonucleotide
cacauacaaaauguuccuuuugcuu

SEQ ID NO: 130488 - RNA, 25 nt, Artificial Sequence
  Description of Artificial Sequence: Synthetic oligonucleotide
uccuuuugcuuuuaaaguaauuuuu

SEQ ID NO: 130489 - RNA, 25 nt, Artificial Sequence
  Description of Artificial Sequence: Synthetic oligonucleotide
ugaccugugaagcaacagucaaugg

SEQ ID NO: 130490 - RNA, 25 nt, Artificial Sequence
  Description of Artificial Sequence: Synthetic oligonucleotide
cuaucucacacaucgacaaaccaau

SEQ ID NO: 130491 - RNA, 25 nt, Artificial Sequence
  Description of Artificial Sequence: Synthetic oligonucleotide
uguccucaauuguacugcuaccacu

SEQ ID NO: 130492 - RNA, 25 nt, Artificial Sequence
  Description of Artificial Sequence: Synthetic oligonucleotide
aaaccguagcuggcaagcggucuua

SEQ ID NO: 130493 - RNA, 25 nt, Artificial Sequence
  Description of Artificial Sequence: Synthetic oligonucleotide
uagcuggcaagcggucuuaccggcu

SEQ ID NO: 130494 - RNA, 25 nt, Artificial Sequence
  Description of Artificial Sequence: Synthetic oligonucleotide
uuguaugguuaaaagauggguuacc

SEQ ID NO: 130495 - RNA, 25 nt, Artificial Sequence
  Description of Artificial Sequence: Synthetic oligonucleotide
ugguuaaaagauggguuaccugcga

SEQ ID NO: 130496 - RNA, 25 nt, Artificial Sequence
  Description of Artificial Sequence: Synthetic oligonucleotide
cagggaauuauacaaucuugcugag

SEQ ID NO: 130497 - RNA, 25 nt, Artificial Sequence
  Description of Artificial Sequence: Synthetic oligonucleotide
acaaucuugcugagcauaaaacagu

SEQ ID NO: 130498 - RNA, 25 nt, Artificial Sequence
  Description of Artificial Sequence: Synthetic oligonucleotide
ccaauaaugaagaguccuuuauccu

SEQ ID NO: 130499 - RNA, 25 nt, Artificial Sequence
  Description of Artificial Sequence: Synthetic oligonucleotide
acuuuggauguuccaacgcaaguug

SEQ ID NO: 130500 - RNA, 25 nt, Artificial Sequence
  Description of Artificial Sequence: Synthetic oligonucleotide
aaugcuuccacuaaacugaaaccau

SEQ ID NO: 130501 - RNA, 25 nt, Artificial Sequence
  Description of Artificial Sequence: Synthetic oligonucleotide
gagaaaguuugacuuuguuaaauau

SEQ ID NO: 130502 - RNA, 25 nt, Artificial Sequence
  Description of Artificial Sequence: Synthetic oligonucleotide
aaagaacuacuguauauuaaaaguu

SEQ ID NO: 130503 - RNA, 25 nt, Artificial Sequence
  Description of Artificial Sequence: Synthetic oligonucleotide
uuagaaauacggguuuugacuuaac

SEQ ID NO: 130504 - RNA, 25 nt, Artificial Sequence
  Description of Artificial Sequence: Synthetic oligonucleotide
aacauggguacagcaaacucagcac

SEQ ID NO: 130505 - RNA, 25 nt, Artificial Sequence
  Description of Artificial Sequence: Synthetic oligonucleotide
aaagacacagaagaugcugaccuca

SEQ ID NO: 130506 - RNA, 25 nt, Artificial Sequence
  Description of Artificial Sequence: Synthetic oligonucleotide
uaguagggagguuuauucagaucgc

SEQ ID NO: 130507 - RNA, 25 nt, Artificial Sequence
  Description of Artificial Sequence: Synthetic oligonucleotide
gccuucugcagcaggguucugggau

SEQ ID NO: 130508 - RNA, 25 nt, Artificial Sequence
  Description of Artificial Sequence: Synthetic oligonucleotide
ggucugguacauauuggaaauuaug

SEQ ID NO: 130509 - RNA, 25 nt, Artificial Sequence
  Description of Artificial Sequence: Synthetic oligonucleotide
cuaguccuuccgauggaagcacuag

SEQ ID NO: 130510 - RNA, 25 nt, Artificial Sequence
  Description of Artificial Sequence: Synthetic oligonucleotide
ccagugaauauuguuuuuaugugga

SEQ ID NO: 130511 - RNA, 25 nt, Artificial Sequence
  Description of Artificial Sequence: Synthetic oligonucleotide
augaauucaaguuggaauugguaga

SEQ ID NO: 130512 - RNA, 25 nt, Artificial Sequence
  Description of Artificial Sequence: Synthetic oligonucleotide
caggacacagauuuagacuuggaga

SEQ ID NO: 130513 - RNA, 25 nt, Artificial Sequence
  Description of Artificial Sequence: Synthetic oligonucleotide
cucaaagcacaguuacaguauucca

SEQ ID NO: 130514 - RNA, 25 nt, Artificial Sequence
  Description of Artificial Sequence: Synthetic oligonucleotide
accacugccaccacugaugaauuaa

SEQ ID NO: 130515 - RNA, 25 nt, Artificial Sequence
  Description of Artificial Sequence: Synthetic oligonucleotide
gaaacuacuagugccacaucaucac

SEQ ID NO: 130516 - RNA, 25 nt, Artificial Sequence
  Description of Artificial Sequence: Synthetic oligonucleotide
aagucggacagccucaccaaacaga

SEQ ID NO: 130517 - RNA, 25 nt, Artificial Sequence
  Description of Artificial Sequence: Synthetic oligonucleotide
gaaagcgaaaaauggaacaugaugg

SEQ ID NO: 130518 - RNA, 25 nt, Artificial Sequence
  Description of Artificial Sequence: Synthetic oligonucleotide
cccucugauuuagcauguagacugc

SEQ ID NO: 130519 - RNA, 25 nt, Artificial Sequence
  Description of Artificial Sequence: Synthetic oligonucleotide
ugagcuauuuaaggaucuauuuaug

SEQ ID NO: 130520 - RNA, 25 nt, Artificial Sequence
  Description of Artificial Sequence: Synthetic oligonucleotide
aaaaggugaaaaagcacuauuauca

SEQ ID NO: 130521 - RNA, 25 nt, Artificial Sequence
  Description of Artificial Sequence: Synthetic oligonucleotide
gaaaaagcacuauuaucaguucugc

SEQ ID NO: 130522 - RNA, 25 nt, Artificial Sequence
  Description of Artificial Sequence: Synthetic oligonucleotide
ggcugaaaagaaagauuaaaccuac

SEQ ID NO: 130523 - RNA, 25 nt, Artificial Sequence
  Description of Artificial Sequence: Synthetic oligonucleotide
uaaacccuuauaauaaaauccuucu

SEQ ID NO: 130524 - RNA, 25 nt, Artificial Sequence
  Description of Artificial Sequence: Synthetic oligonucleotide
cauacuauuagccaaugcuguagac

SEQ ID NO: 130525 - RNA, 25 nt, Artificial Sequence
  Description of Artificial Sequence: Synthetic oligonucleotide
gacagaagcauuuugauaggaauag

SEQ ID NO: 130526 - RNA, 25 nt, Artificial Sequence
  Description of Artificial Sequence: Synthetic oligonucleotide
agagcaaauaagauaauggcccuga

SEQ ID NO: 130527 - RNA, 25 nt, Artificial Sequence
  Description of Artificial Sequence: Synthetic oligonucleotide
ccaacauuuuucucuuccucaagca

SEQ ID NO: 130528 - RNA, 25 nt, Artificial Sequence
  Description of Artificial Sequence: Synthetic oligonucleotide
uuaaguaugagaaaaguucagccca

SEQ ID NO: 130529 - RNA, 25 nt, Artificial Sequence
  Description of Artificial Sequence: Synthetic oligonucleotide
caggaauaaagauggcugcugaacc

SEQ ID NO: 130530 - RNA, 25 nt, Artificial Sequence
  Description of Artificial Sequence: Synthetic oligonucleotide
aauuugaaugaccaaguucucuuca

SEQ ID NO: 130531 - RNA, 25 nt, Artificial Sequence
  Description of Artificial Sequence: Synthetic oligonucleotide
auguauaaagauagccagccuagag

SEQ ID NO: 130532 - RNA, 25 nt, Artificial Sequence
  Description of Artificial Sequence: Synthetic oligonucleotide
ggcuguaacuaucucugugaagugu

SEQ ID NO: 130533 - RNA, 25 nt, Artificial Sequence
  Description of Artificial Sequence: Synthetic oligonucleotide
ucugugaagugugagaaaauuucaa

SEQ ID NO: 130534 - RNA, 25 nt, Artificial Sequence
  Description of Artificial Sequence: Synthetic oligonucleotide
ccuuuaaggaaaugaauccuccuga

SEQ ID NO: 130535 - RNA, 25 nt, Artificial Sequence
  Description of Artificial Sequence: Synthetic oligonucleotide
aaggauacaaaaagugacaucauau

SEQ ID NO: 130536 - RNA, 25 nt, Artificial Sequence
  Description of Artificial Sequence: Synthetic oligonucleotide
agaugcaauuugaaucuucaucaua

SEQ ID NO: 130537 - RNA, 25 nt, Artificial Sequence
  Description of Artificial Sequence: Synthetic oligonucleotide
guucaaaacgaagacuagcuauuaa

SEQ ID NO: 130538 - RNA, 25 nt, Artificial Sequence
  Description of Artificial Sequence: Synthetic oligonucleotide
gugaaaccucaucucuacuaaaaau

SEQ ID NO: 130539 - RNA, 25 nt, Artificial Sequence
  Description of Artificial Sequence: Synthetic oligonucleotide
acgaaagagaagcucuaucucgccu

SEQ ID NO: 130540 - RNA, 25 nt, Artificial Sequence
  Description of Artificial Sequence: Synthetic oligonucleotide
cuccacaagcgccuucgguccaguu

SEQ ID NO: 130541 - RNA, 25 nt, Artificial Sequence
  Description of Artificial Sequence: Synthetic oligonucleotide
gagaagauuccaaagauguagccgc

SEQ ID NO: 130542 - RNA, 25 nt, Artificial Sequence
  Description of Artificial Sequence: Synthetic oligonucleotide
aaucuggauucaaugaggagacuug

SEQ ID NO: 130543 - RNA, 25 nt, Artificial Sequence
  Description of Artificial Sequence: Synthetic oligonucleotide
agaacagauuugagaguagugagga

SEQ ID NO: 130544 - RNA, 25 nt, Artificial Sequence
  Description of Artificial Sequence: Synthetic oligonucleotide
ccagagcugugcagaugaguacaaa

SEQ ID NO: 130545 - RNA, 25 nt, Artificial Sequence
  Description of Artificial Sequence: Synthetic oligonucleotide
ccucagauuguuguuguuaaugggc

SEQ ID NO: 130546 - RNA, 25 nt, Artificial Sequence
  Description of Artificial Sequence: Synthetic oligonucleotide
cuauuuuaauuauuuuuaauuuauu

SEQ ID NO: 130547 - RNA, 25 nt, Artificial Sequence
  Description of Artificial Sequence: Synthetic oligonucleotide
uuuaauuuauuaauauuuaaauaug

SEQ ID NO: 130548 - RNA, 25 nt, Artificial Sequence
  Description of Artificial Sequence: Synthetic oligonucleotide
augcaguuugaauauccuuuguuuc

SEQ ID NO: 130549 - RNA, 25 nt, Artificial Sequence
  Description of Artificial Sequence: Synthetic oligonucleotide
caugcugcuggcgucuaaguguuug

SEQ ID NO: 130550 - RNA, 25 nt, Artificial Sequence
  Description of Artificial Sequence: Synthetic oligonucleotide
agaugugcauuucaccugugacaaa

SEQ ID NO: 130551 - RNA, 25 nt, Artificial Sequence
  Description of Artificial Sequence: Synthetic oligonucleotide
ucaaaaccugugccaggcugaauua

SEQ ID NO: 130552 - RNA, 25 nt, Artificial Sequence
  Description of Artificial Sequence: Synthetic oligonucleotide
gaauguggguagucauucuuacaau

SEQ ID NO: 130553 - RNA, 25 nt, Artificial Sequence
  Description of Artificial Sequence: Synthetic oligonucleotide
auguggguagucauucuuacaauug

SEQ ID NO: 130554 - RNA, 25 nt, Artificial Sequence
  Description of Artificial Sequence: Synthetic oligonucleotide
ugaaaaugagcaucagagaguguac

SEQ ID NO: 130555 - RNA, 25 nt, Artificial Sequence
  Description of Artificial Sequence: Synthetic oligonucleotide
uugcuuuucauguagaacucagcag

SEQ ID NO: 130556 - RNA, 25 nt, Artificial Sequence
  Description of Artificial Sequence: Synthetic oligonucleotide
uguauuucuauauuuauuuucagua

SEQ ID NO: 130557 - RNA, 25 nt, Artificial Sequence
  Description of Artificial Sequence: Synthetic oligonucleotide
uuugauuaauguuucuuaaauggaa

SEQ ID NO: 130558 - RNA, 25 nt, Artificial Sequence
  Description of Artificial Sequence: Synthetic oligonucleotide
caacguguauagugccuaaaauugu

SEQ ID NO: 130559 - RNA, 25 nt, Artificial Sequence
  Description of Artificial Sequence: Synthetic oligonucleotide
cauauccuuggcuacuaacaucugg

SEQ ID NO: 130560 - RNA, 25 nt, Artificial Sequence
  Description of Artificial Sequence: Synthetic oligonucleotide
uacuaacaucuggagacugugagcu

SEQ ID NO: 130561 - RNA, 25 nt, Artificial Sequence
  Description of Artificial Sequence: Synthetic oligonucleotide
cauaaguugugugcuuuuuauuaau

SEQ ID NO: 130562 - RNA, 25 nt, Artificial Sequence
  Description of Artificial Sequence: Synthetic oligonucleotide
gcaucauuuuggcucuucuuacauu

SEQ ID NO: 130563 - RNA, 25 nt, Artificial Sequence
  Description of Artificial Sequence: Synthetic oligonucleotide
gcucuucuuacauuuguaaaaaugu

SEQ ID NO: 130564 - RNA, 25 nt, Artificial Sequence
  Description of Artificial Sequence: Synthetic oligonucleotide
agauuaggucaucuuaauucauauu

SEQ ID NO: 130565 - RNA, 25 nt, Artificial Sequence
  Description of Artificial Sequence: Synthetic oligonucleotide
auggaauugaaagaacuaaucauga

SEQ ID NO: 130566 - RNA, 25 nt, Artificial Sequence
  Description of Artificial Sequence: Synthetic oligonucleotide
cacacucauuccuucugcucuuggg

SEQ ID NO: 130567 - RNA, 25 nt, Artificial Sequence
  Description of Artificial Sequence: Synthetic oligonucleotide
uguagagguaaccaguagcuuugag

SEQ ID NO: 130568 - RNA, 25 nt, Artificial Sequence
  Description of Artificial Sequence: Synthetic oligonucleotide
caaccacaugccacguaauauuuca

SEQ ID NO: 130569 - RNA, 25 nt, Artificial Sequence
  Description of Artificial Sequence: Synthetic oligonucleotide
ucggaaacaaguuauucucuucacu

SEQ ID NO: 130570 - RNA, 25 nt, Artificial Sequence
  Description of Artificial Sequence: Synthetic oligonucleotide
acucccaauaacuaaugcuaagaaa

SEQ ID NO: 130571 - RNA, 25 nt, Artificial Sequence
  Description of Artificial Sequence: Synthetic oligonucleotide
aaugcuaagaaaugcugaaaaucaa

SEQ ID NO: 130572 - RNA, 25 nt, Artificial Sequence
  Description of Artificial Sequence: Synthetic oligonucleotide
gucuuucucuaaauaugauuacuuu

SEQ ID NO: 130573 - RNA, 25 nt, Artificial Sequence
  Description of Artificial Sequence: Synthetic oligonucleotide
ugaauuucaggcauuuuguucuaca

SEQ ID NO: 130574 - RNA, 25 nt, Artificial Sequence
  Description of Artificial Sequence: Synthetic oligonucleotide
cgauucccucucacccgggacucuc

SEQ ID NO: 130575 - RNA, 25 nt, Artificial Sequence
  Description of Artificial Sequence: Synthetic oligonucleotide
aggaaagugaaccuuuaaaguaaag

SEQ ID NO: 130576 - RNA, 25 nt, Artificial Sequence
  Description of Artificial Sequence: Synthetic oligonucleotide
gaggcugcaugcucuggaagccugg

SEQ ID NO: 130577 - RNA, 25 nt, Artificial Sequence
  Description of Artificial Sequence: Synthetic oligonucleotide
ucucugaacagaaaacaaaagagag

SEQ ID NO: 130578 - RNA, 25 nt, Artificial Sequence
  Description of Artificial Sequence: Synthetic oligonucleotide
aacuuggcuguaaucaguuaugccg

SEQ ID NO: 130579 - RNA, 25 nt, Artificial Sequence
  Description of Artificial Sequence: Synthetic oligonucleotide
agaagccaaaauuaaaagaagucca

SEQ ID NO: 130580 - RNA, 25 nt, Artificial Sequence
  Description of Artificial Sequence: Synthetic oligonucleotide
auuaaaagaaguccaggugagguua

SEQ ID NO: 130581 - RNA, 25 nt, Artificial Sequence
  Description of Artificial Sequence: Synthetic oligonucleotide
gaauccggauuaucgggaagaggac

SEQ ID NO: 130582 - RNA, 25 nt, Artificial Sequence
  Description of Artificial Sequence: Synthetic oligonucleotide
aaugugacaucaaagcaaguauugu

SEQ ID NO: 130583 - RNA, 25 nt, Artificial Sequence
  Description of Artificial Sequence: Synthetic oligonucleotide
caucaaagcaaguauuguagcacuc

SEQ ID NO: 130584 - RNA, 25 nt, Artificial Sequence
  Description of Artificial Sequence: Synthetic oligonucleotide
agagagagaaaacaaaaccacaaau

SEQ ID NO: 130585 - RNA, 25 nt, Artificial Sequence
  Description of Artificial Sequence: Synthetic oligonucleotide
ucgcuguaguauuuaagcccauaca

SEQ ID NO: 130586 - RNA, 25 nt, Artificial Sequence
  Description of Artificial Sequence: Synthetic oligonucleotide
cgcuguaguauuuaagcccauacag

SEQ ID NO: 130587 - RNA, 25 nt, Artificial Sequence
  Description of Artificial Sequence: Synthetic oligonucleotide
auuuaagcccauacagaaaccuucc

SEQ ID NO: 130588 - RNA, 25 nt, Artificial Sequence
  Description of Artificial Sequence: Synthetic oligonucleotide
auuaaaauaaacaugguauaccuac

SEQ ID NO: 130589 - RNA, 25 nt, Artificial Sequence
  Description of Artificial Sequence: Synthetic oligonucleotide
cuguucugaucggccaguuuucgga

SEQ ID NO: 130590 - RNA, 25 nt, Artificial Sequence
  Description of Artificial Sequence: Synthetic oligonucleotide
aaauaauuugaacuuuggaacaggg

SEQ ID NO: 130591 - RNA, 25 nt, Artificial Sequence
  Description of Artificial Sequence: Synthetic oligonucleotide
ugcgaccuuaauuuaacuuuccagu

SEQ ID NO: 130592 - RNA, 25 nt, Artificial Sequence
  Description of Artificial Sequence: Synthetic oligonucleotide
cugagaaagcuaaaguuugguuuug

SEQ ID NO: 130593 - RNA, 25 nt, Artificial Sequence
  Description of Artificial Sequence: Synthetic oligonucleotide
aguaaagaugcuacuucccacugua

SEQ ID NO: 130594 - RNA, 25 nt, Artificial Sequence
  Description of Artificial Sequence: Synthetic oligonucleotide
cugcuuaauugcugauaccauauga

SEQ ID NO: 130595 - RNA, 25 nt, Artificial Sequence
  Description of Artificial Sequence: Synthetic oligonucleotide
uaccauaugaaugaaacaugggcug

SEQ ID NO: 130596 - RNA, 25 nt, Artificial Sequence
  Description of Artificial Sequence: Synthetic oligonucleotide
aacuuucuuauccaacuuuuucaua

SEQ ID NO: 130597 - RNA, 25 nt, Artificial Sequence
  Description of Artificial Sequence: Synthetic oligonucleotide
ccuugcaugacaucaugaggccgga

SEQ ID NO: 130598 - RNA, 25 nt, Artificial Sequence
  Description of Artificial Sequence: Synthetic oligonucleotide
ugaauuuguauaugacugcauuugu

SEQ ID NO: 130599 - RNA, 25 nt, Artificial Sequence
  Description of Artificial Sequence: Synthetic oligonucleotide
gaauccuaguagaauguuuacuacc

SEQ ID NO: 130600 - RNA, 25 nt, Artificial Sequence
  Description of Artificial Sequence: Synthetic oligonucleotide
gaaagggaagaauuuuuugaugaaa

SEQ ID NO: 130601 - RNA, 25 nt, Artificial Sequence
  Description of Artificial Sequence: Synthetic oligonucleotide
uaucggcaugccagugugugaauuu

SEQ ID NO: 130602 - RNA, 25 nt, Artificial Sequence
  Description of Artificial Sequence: Synthetic oligonucleotide
caccucauaguagagcaauguaugu

SEQ ID NO: 130603 - RNA, 25 nt, Artificial Sequence
  Description of Artificial Sequence: Synthetic oligonucleotide
ccagaauugccaaagcacauauaua

SEQ ID NO: 130604 - RNA, 25 nt, Artificial Sequence
  Description of Artificial Sequence: Synthetic oligonucleotide
uggugaucuggguaauaguuucucc

SEQ ID NO: 130605 - RNA, 25 nt, Artificial Sequence
  Description of Artificial Sequence: Synthetic oligonucleotide
gaucuggguaauaguuucuccaaau

SEQ ID NO: 130606 - RNA, 25 nt, Artificial Sequence
  Description of Artificial Sequence: Synthetic oligonucleotide
ggaugugaugaauacuuccuagaaa

SEQ ID NO: 130607 - RNA, 25 nt, Artificial Sequence
  Description of Artificial Sequence: Synthetic oligonucleotide
cauuuccacagcuacaccauauaug

SEQ ID NO: 130608 - RNA, 25 nt, Artificial Sequence
  Description of Artificial Sequence: Synthetic oligonucleotide
acagcuacaccauauaugaauggag

SEQ ID NO: 130609 - RNA, 25 nt, Artificial Sequence
  Description of Artificial Sequence: Synthetic oligonucleotide
ugcaguucuuacacgagaagaagau

SEQ ID NO: 130610 - RNA, 25 nt, Artificial Sequence
  Description of Artificial Sequence: Synthetic oligonucleotide
acgagaagaagaucauuuacaggga

SEQ ID NO: 130611 - RNA, 25 nt, Artificial Sequence
  Description of Artificial Sequence: Synthetic oligonucleotide
cgagaagaagaucauuuacagggac

SEQ ID NO: 130612 - RNA, 25 nt, Artificial Sequence
  Description of Artificial Sequence: Synthetic oligonucleotide
aagaagaucauuuacagggaccuga

SEQ ID NO: 130613 - RNA, 25 nt, Artificial Sequence
  Description of Artificial Sequence: Synthetic oligonucleotide
agaggaagagguguuugacugcauc

SEQ ID NO: 130614 - RNA, 25 nt, Artificial Sequence
  Description of Artificial Sequence: Synthetic oligonucleotide
gaggaagagguguuugacugcaucg

SEQ ID NO: 130615 - RNA, 25 nt, Artificial Sequence
  Description of Artificial Sequence: Synthetic oligonucleotide
cuacuuugagggcgaguucacaggg

SEQ ID NO: 130616 - RNA, 25 nt, Artificial Sequence
  Description of Artificial Sequence: Synthetic oligonucleotide
agggcaucuccuggcaccucugucc

SEQ ID NO: 130617 - RNA, 25 nt, Artificial Sequence
  Description of Artificial Sequence: Synthetic oligonucleotide
ggagugauaugguuugucuuuuuaa

SEQ ID NO: 130618 - RNA, 25 nt, Artificial Sequence
  Description of Artificial Sequence: Synthetic oligonucleotide
gagugauaugguuugucuuuuuaag

SEQ ID NO: 130619 - RNA, 25 nt, Artificial Sequence
  Description of Artificial Sequence: Synthetic oligonucleotide
ugcaguaaagauccuaaagguuguc

SEQ ID NO: 130620 - RNA, 25 nt, Artificial Sequence
  Description of Artificial Sequence: Synthetic oligonucleotide
aguaaagauccuaaagguugucgac

SEQ ID NO: 130621 - RNA, 25 nt, Artificial Sequence
  Description of Artificial Sequence: Synthetic oligonucleotide
ugacaaaggacaaccuggcaauugu

SEQ ID NO: 130622 - RNA, 25 nt, Artificial Sequence
  Description of Artificial Sequence: Synthetic oligonucleotide
gcaauugugacccaguggugcgagg

SEQ ID NO: 130623 - RNA, 25 nt, Artificial Sequence
  Description of Artificial Sequence: Synthetic oligonucleotide
aacaucauccauagagacaugaaau

SEQ ID NO: 130624 - RNA, 25 nt, Artificial Sequence
  Description of Artificial Sequence: Synthetic oligonucleotide
ugaaauccaacaauauauuucucca

SEQ ID NO: 130625 - RNA, 25 nt, Artificial Sequence
  Description of Artificial Sequence: Synthetic oligonucleotide
aacaauauauuucuccaugaaggcu

SEQ ID NO: 130626 - RNA, 25 nt, Artificial Sequence
  Description of Artificial Sequence: Synthetic oligonucleotide
aacaguaaagucacgcuggaguggu

SEQ ID NO: 130627 - RNA, 25 nt, Artificial Sequence
  Description of Artificial Sequence: Synthetic oligonucleotide
ugugaagaaaguaaaggaagagagg

SEQ ID NO: 130628 - RNA, 25 nt, Artificial Sequence
  Description of Artificial Sequence: Synthetic oligonucleotide
cuuccgagccauccuugcaucgggc

SEQ ID NO: 130629 - RNA, 25 nt, Artificial Sequence
  Description of Artificial Sequence: Synthetic oligonucleotide
aauggagguugaauauccuacugug

SEQ ID NO: 130630 - RNA, 25 nt, Artificial Sequence
  Description of Artificial Sequence: Synthetic oligonucleotide
ggagguugaauauccuacuguguaa

SEQ ID NO: 130631 - RNA, 25 nt, Artificial Sequence
  Description of Artificial Sequence: Synthetic oligonucleotide
auuuugaguuuucccuuguagugua

SEQ ID NO: 130632 - RNA, 25 nt, Artificial Sequence
  Description of Artificial Sequence: Synthetic oligonucleotide
uauccuguuuguucuuuguugauug

SEQ ID NO: 130633 - RNA, 25 nt, Artificial Sequence
  Description of Artificial Sequence: Synthetic oligonucleotide
ccuguuuguucuuuguugauugaaa

SEQ ID NO: 130634 - RNA, 25 nt, Artificial Sequence
  Description of Artificial Sequence: Synthetic oligonucleotide
cucuacagccuucuuuuucuuccau

SEQ ID NO: 130635 - RNA, 25 nt, Artificial Sequence
  Description of Artificial Sequence: Synthetic oligonucleotide
ucuuccauagcuaaucuuccuucua

SEQ ID NO: 130636 - RNA, 25 nt, Artificial Sequence
  Description of Artificial Sequence: Synthetic oligonucleotide
auaaucuuccuguugaaugcuucau

SEQ ID NO: 130637 - RNA, 25 nt, Artificial Sequence
  Description of Artificial Sequence: Synthetic oligonucleotide
uaaucuuccuguugaaugcuucaug

SEQ ID NO: 130638 - RNA, 25 nt, Artificial Sequence
  Description of Artificial Sequence: Synthetic oligonucleotide
cuucaugacuugaauucuacuuuga

SEQ ID NO: 130639 - RNA, 25 nt, Artificial Sequence
  Description of Artificial Sequence: Synthetic oligonucleotide
aagagggagagaagcaacuacagac

SEQ ID NO: 130640 - RNA, 25 nt, Artificial Sequence
  Description of Artificial Sequence: Synthetic oligonucleotide
cgucuccuaccagaccaaggucaac

SEQ ID NO: 130641 - RNA, 25 nt, Artificial Sequence
  Description of Artificial Sequence: Synthetic oligonucleotide
gaucaaucggcccgacuaucucgac

SEQ ID NO: 130642 - RNA, 25 nt, Artificial Sequence
  Description of Artificial Sequence: Synthetic oligonucleotide
ggacgaacauccaaccuucccaaac

SEQ ID NO: 130643 - RNA, 25 nt, Artificial Sequence
  Description of Artificial Sequence: Synthetic oligonucleotide
agggucggaacccaagcuuagaacu

SEQ ID NO: 130644 - RNA, 25 nt, Artificial Sequence
  Description of Artificial Sequence: Synthetic oligonucleotide
ucggaacccaagcuuagaacuuuaa

SEQ ID NO: 130645 - RNA, 25 nt, Artificial Sequence
  Description of Artificial Sequence: Synthetic oligonucleotide
acccaagcuuagaacuuuaagcaac

SEQ ID NO: 130646 - RNA, 25 nt, Artificial Sequence
  Description of Artificial Sequence: Synthetic oligonucleotide
gaacuuuaagcaacaagaccaccac

SEQ ID NO: 130647 - RNA, 25 nt, Artificial Sequence
  Description of Artificial Sequence: Synthetic oligonucleotide
acuauucaguggcgagaaauaaagu

SEQ ID NO: 130648 - RNA, 25 nt, Artificial Sequence
  Description of Artificial Sequence: Synthetic oligonucleotide
cuauucaguggcgagaaauaaaguu

SEQ ID NO: 130649 - RNA, 25 nt, Artificial Sequence
  Description of Artificial Sequence: Synthetic oligonucleotide
aaacacagauaacaggaaaugaucc

SEQ ID NO: 130650 - RNA, 25 nt, Artificial Sequence
  Description of Artificial Sequence: Synthetic oligonucleotide
cuuaagaaaagagaagaaaugaaac

SEQ ID NO: 130651 - RNA, 25 nt, Artificial Sequence
  Description of Artificial Sequence: Synthetic oligonucleotide
cugaaggaguguguuuccauccucc

SEQ ID NO: 130652 - RNA, 25 nt, Artificial Sequence
  Description of Artificial Sequence: Synthetic oligonucleotide
ucaccgcgggacugaaaaucuuuga

SEQ ID NO: 130653 - RNA, 25 nt, Artificial Sequence
  Description of Artificial Sequence: Synthetic oligonucleotide
agcagaaauaagcgugccguucagg

SEQ ID NO: 130654 - RNA, 25 nt, Artificial Sequence
  Description of Artificial Sequence: Synthetic oligonucleotide
aagcgugccguucaggguccagaag

SEQ ID NO: 130655 - RNA, 25 nt, Artificial Sequence
  Description of Artificial Sequence: Synthetic oligonucleotide
agaaacagucacucaagacugcuug

SEQ ID NO: 130656 - RNA, 25 nt, Artificial Sequence
  Description of Artificial Sequence: Synthetic oligonucleotide
agaggaagaagguccaugucuuugg

SEQ ID NO: 130657 - RNA, 25 nt, Artificial Sequence
  Description of Artificial Sequence: Synthetic oligonucleotide
uguauucaaaauaugccugaaacac

SEQ ID NO: 130658 - RNA, 25 nt, Artificial Sequence
  Description of Artificial Sequence: Synthetic oligonucleotide
auuuuccucccuuucucuguaccuc

SEQ ID NO: 130659 - RNA, 25 nt, Artificial Sequence
  Description of Artificial Sequence: Synthetic oligonucleotide
caaagaaagauagagcaagacaaga

SEQ ID NO: 130660 - RNA, 25 nt, Artificial Sequence
  Description of Artificial Sequence: Synthetic oligonucleotide
aagaaagauagagcaagacaagaaa

SEQ ID NO: 130661 - RNA, 25 nt, Artificial Sequence
  Description of Artificial Sequence: Synthetic oligonucleotide
gaaagcauuuguuuguacaagaucc

SEQ ID NO: 130662 - RNA, 25 nt, Artificial Sequence
  Description of Artificial Sequence: Synthetic oligonucleotide
ugaguuaaacgaacguacuugcaga

SEQ ID NO: 130663 - RNA, 25 nt, Artificial Sequence
  Description of Artificial Sequence: Synthetic oligonucleotide
acugauacagaacgaucgauacaga

SEQ ID NO: 130664 - RNA, 25 nt, Artificial Sequence
  Description of Artificial Sequence: Synthetic oligonucleotide
auauuauauauauauaaaaauaaau

SEQ ID NO: 130665 - RNA, 25 nt, Artificial Sequence
  Description of Artificial Sequence: Synthetic oligonucleotide
auuauauauauauaaaaauaaauau

SEQ ID NO: 130666 - RNA, 25 nt, Artificial Sequence
  Description of Artificial Sequence: Synthetic oligonucleotide
ucacuggauguauuugacugcugug

SEQ ID NO: 130667 - RNA, 25 nt, Artificial Sequence
  Description of Artificial Sequence: Synthetic oligonucleotide
cagggaagaggaggagaugagagac

SEQ ID NO: 130668 - RNA, 25 nt, Artificial Sequence
  Description of Artificial Sequence: Synthetic oligonucleotide
augaucuuuuuuuugucccacuugg

SEQ ID NO: 130669 - RNA, 27 nt, Artificial Sequence
  Description of Artificial Sequence: Synthetic oligonucleotide
ggccgugaacuccucaucaaaauaccu

SEQ ID NO: 130670 - RNA, 27 nt, Artificial Sequence
  Description of Artificial Sequence: Synthetic oligonucleotide
uggugugauggugaucaucugggccgu

SEQ ID NO: 130671 - RNA, 27 nt, Artificial Sequence
  Description of Artificial Sequence: Synthetic oligonucleotide
aaacccgcaggauaguuuucuucccua

SEQ ID NO: 130672 - RNA, 27 nt, Artificial Sequence
  Description of Artificial Sequence: Synthetic oligonucleotide
caaacuggaugaaauaaauuaaaaccc

SEQ ID NO: 130673 - RNA, 27 nt, Artificial Sequence
  Description of Artificial Sequence: Synthetic oligonucleotide
agaaguccuuaacauuucccuacguga

SEQ ID NO: 130674 - RNA, 27 nt, Artificial Sequence
  Description of Artificial Sequence: Synthetic oligonucleotide
cucugucccacuggguaaacccuggcc

SEQ ID NO: 130675 - RNA, 27 nt, Artificial Sequence
  Description of Artificial Sequence: Synthetic oligonucleotide
cacaauaacaaauuuaaaccuugcucc

SEQ ID NO: 130676 - RNA, 27 nt, Artificial Sequence
  Description of Artificial Sequence: Synthetic oligonucleotide
aaaugcauuugaacaacauaauacaca

SEQ ID NO: 130677 - RNA, 27 nt, Artificial Sequence
  Description of Artificial Sequence: Synthetic oligonucleotide
ggcuuuccugucacaaagauuaaaaac

SEQ ID NO: 130678 - RNA, 27 nt, Artificial Sequence
  Description of Artificial Sequence: Synthetic oligonucleotide
agggcuuuccugucacaaagauuaaaa

SEQ ID NO: 130679 - RNA, 27 nt, Artificial Sequence
  Description of Artificial Sequence: Synthetic oligonucleotide
ggccaugcugggagacauaagcagcag

SEQ ID NO: 130680 - RNA, 27 nt, Artificial Sequence
  Description of Artificial Sequence: Synthetic oligonucleotide
ucagggagaagcuucugaaacacuucu

SEQ ID NO: 130681 - RNA, 27 nt, Artificial Sequence
  Description of Artificial Sequence: Synthetic oligonucleotide
aagggcuucuuccuuauugauggucag

SEQ ID NO: 130682 - RNA, 27 nt, Artificial Sequence
  Description of Artificial Sequence: Synthetic oligonucleotide
ugaagggcuucuuccuuauugaugguc

SEQ ID NO: 130683 - RNA, 27 nt, Artificial Sequence
  Description of Artificial Sequence: Synthetic oligonucleotide
cgcugaagggcuucuuccuuauugaug

SEQ ID NO: 130684 - RNA, 27 nt, Artificial Sequence
  Description of Artificial Sequence: Synthetic oligonucleotide
gccgcugaagggcuucuuccuuauuga

SEQ ID NO: 130685 - RNA, 27 nt, Artificial Sequence
  Description of Artificial Sequence: Synthetic oligonucleotide
acuggccgcugaagggcuucuuccuua

SEQ ID NO: 130686 - RNA, 27 nt, Artificial Sequence
  Description of Artificial Sequence: Synthetic oligonucleotide
cggagcuuuucaccuuuaguuaugcuu

SEQ ID NO: 130687 - RNA, 27 nt, Artificial Sequence
  Description of Artificial Sequence: Synthetic oligonucleotide
ccggagcuuuucaccuuuaguuaugcu

SEQ ID NO: 130688 - RNA, 27 nt, Artificial Sequence
  Description of Artificial Sequence: Synthetic oligonucleotide
cagacuguugacuggcgugauguaguu

SEQ ID NO: 130689 - RNA, 27 nt, Artificial Sequence
  Description of Artificial Sequence: Synthetic oligonucleotide
cuuuugaacucugcuuaaauccagugg

SEQ ID NO: 130690 - RNA, 27 nt, Artificial Sequence
  Description of Artificial Sequence: Synthetic oligonucleotide
gcuuuugaacucugcuuaaauccagug

SEQ ID NO: 130691 - RNA, 27 nt, Artificial Sequence
  Description of Artificial Sequence: Synthetic oligonucleotide
agggcuuuugaacucugcuuaaaucca

SEQ ID NO: 130692 - RNA, 27 nt, Artificial Sequence
  Description of Artificial Sequence: Synthetic oligonucleotide
aagggcuuuugaacucugcuuaaaucc

SEQ ID NO: 130693 - RNA, 27 nt, Artificial Sequence
  Description of Artificial Sequence: Synthetic oligonucleotide
ugaagggcuuuugaacucugcuuaaau

SEQ ID NO: 130694 - RNA, 27 nt, Artificial Sequence
  Description of Artificial Sequence: Synthetic oligonucleotide
cugaagggcuuuugaacucugcuuaaa

SEQ ID NO: 130695 - RNA, 27 nt, Artificial Sequence
  Description of Artificial Sequence: Synthetic oligonucleotide
cgcugaagggcuuuugaacucugcuua

SEQ ID NO: 130696 - RNA, 27 nt, Artificial Sequence
  Description of Artificial Sequence: Synthetic oligonucleotide
cgagcggcuucacucagacccugaggc

SEQ ID NO: 130697 - RNA, 27 nt, Artificial Sequence
  Description of Artificial Sequence: Synthetic oligonucleotide
uugacuggcgugauguaguugcuuggg

SEQ ID NO: 130698 - RNA, 27 nt, Artificial Sequence
  Description of Artificial Sequence: Synthetic oligonucleotide
cacgcaccaagaagcugccauugaucc

SEQ ID NO: 130699 - RNA, 27 nt, Artificial Sequence
  Description of Artificial Sequence: Synthetic oligonucleotide
cugaugaauccaaugugggcuggaauc

SEQ ID NO: 130700 - RNA, 27 nt, Artificial Sequence
  Description of Artificial Sequence: Synthetic oligonucleotide
cuuagguauuccacauucucagcugug

SEQ ID NO: 130701 - RNA, 27 nt, Artificial Sequence
  Description of Artificial Sequence: Synthetic oligonucleotide
ugagccucaaauuaggagauacguuuu

SEQ ID NO: 130702 - RNA, 27 nt, Artificial Sequence
  Description of Artificial Sequence: Synthetic oligonucleotide
ccaauuguagagaaauuauuuuaggaa

SEQ ID NO: 130703 - RNA, 27 nt, Artificial Sequence
  Description of Artificial Sequence: Synthetic oligonucleotide
ggcuccuaacuagcugaaucuuccaau

SEQ ID NO: 130704 - RNA, 27 nt, Artificial Sequence
  Description of Artificial Sequence: Synthetic oligonucleotide
guggauauugacuaggagaguuuaaaa

SEQ ID NO: 130705 - RNA, 27 nt, Artificial Sequence
  Description of Artificial Sequence: Synthetic oligonucleotide
ugugacugaacauaacuguaggcugaa

SEQ ID NO: 130706 - RNA, 27 nt, Artificial Sequence
  Description of Artificial Sequence: Synthetic oligonucleotide
guaugugugugugacugaacauaacug

SEQ ID NO: 130707 - RNA, 27 nt, Artificial Sequence
  Description of Artificial Sequence: Synthetic oligonucleotide
aagcaaaaggaacauuuuguaugugug

SEQ ID NO: 130708 - RNA, 27 nt, Artificial Sequence
  Description of Artificial Sequence: Synthetic oligonucleotide
aaaaauuacuuuaaaagcaaaaggaac

SEQ ID NO: 130709 - RNA, 27 nt, Artificial Sequence
  Description of Artificial Sequence: Synthetic oligonucleotide
ccauugacuguugcuucacaggucaga

SEQ ID NO: 130710 - RNA, 27 nt, Artificial Sequence
  Description of Artificial Sequence: Synthetic oligonucleotide
auugguuugucgaugugugagauaguu

SEQ ID NO: 130711 - RNA, 27 nt, Artificial Sequence
  Description of Artificial Sequence: Synthetic oligonucleotide
agugguagcaguacaauugaggacaag

SEQ ID NO: 130712 - RNA, 27 nt, Artificial Sequence
  Description of Artificial Sequence: Synthetic oligonucleotide
uaagaccgcuugccagcuacgguuuca

SEQ ID NO: 130713 - RNA, 27 nt, Artificial Sequence
  Description of Artificial Sequence: Synthetic oligonucleotide
agccgguaagaccgcuugccagcuacg

SEQ ID NO: 130714 - RNA, 27 nt, Artificial Sequence
  Description of Artificial Sequence: Synthetic oligonucleotide
gguaacccaucuuuuaaccauacaacu

SEQ ID NO: 130715 - RNA, 27 nt, Artificial Sequence
  Description of Artificial Sequence: Synthetic oligonucleotide
ucgcagguaacccaucuuuuaaccaua

SEQ ID NO: 130716 - RNA, 27 nt, Artificial Sequence
  Description of Artificial Sequence: Synthetic oligonucleotide
cucagcaagauuguauaauucccugca

SEQ ID NO: 130717 - RNA, 27 nt, Artificial Sequence
  Description of Artificial Sequence: Synthetic oligonucleotide
acuguuuuaugcucagcaagauuguau

SEQ ID NO: 130718 - RNA, 27 nt, Artificial Sequence
  Description of Artificial Sequence: Synthetic oligonucleotide
aggauaaaggacucuucauuauuggaa

SEQ ID NO: 130719 - RNA, 27 nt, Artificial Sequence
  Description of Artificial Sequence: Synthetic oligonucleotide
caacuugcguuggaacauccaaagugu

SEQ ID NO: 130720 - RNA, 27 nt, Artificial Sequence
  Description of Artificial Sequence: Synthetic oligonucleotide
augguuucaguuuaguggaagcauuua

SEQ ID NO: 130721 - RNA, 27 nt, Artificial Sequence
  Description of Artificial Sequence: Synthetic oligonucleotide
auauuuaacaaagucaaacuuucucac

SEQ ID NO: 130722 - RNA, 27 nt, Artificial Sequence
  Description of Artificial Sequence: Synthetic oligonucleotide
aacuuuuaauauacaguaguucuuuuc

SEQ ID NO: 130723 - RNA, 27 nt, Artificial Sequence
  Description of Artificial Sequence: Synthetic oligonucleotide
guuaagucaaaacccguauuucuaaag

SEQ ID NO: 130724 - RNA, 27 nt, Artificial Sequence
  Description of Artificial Sequence: Synthetic oligonucleotide
gugcugaguuugcuguacccauguuga

SEQ ID NO: 130725 - RNA, 27 nt, Artificial Sequence
  Description of Artificial Sequence: Synthetic oligonucleotide
ugaggucagcaucuucugugucuuuac

SEQ ID NO: 130726 - RNA, 27 nt, Artificial Sequence
  Description of Artificial Sequence: Synthetic oligonucleotide
gcgaucugaauaaaccucccuacuagc

SEQ ID NO: 130727 - RNA, 27 nt, Artificial Sequence
  Description of Artificial Sequence: Synthetic oligonucleotide
aucccagaacccugcugcagaaggcca

SEQ ID NO: 130728 - RNA, 27 nt, Artificial Sequence
  Description of Artificial Sequence: Synthetic oligonucleotide
cauaauuuccaauauguaccagaccuu

SEQ ID NO: 130729 - RNA, 27 nt, Artificial Sequence
  Description of Artificial Sequence: Synthetic oligonucleotide
cuagugcuuccaucggaaggacuaggu

SEQ ID NO: 130730 - RNA, 27 nt, Artificial Sequence
  Description of Artificial Sequence: Synthetic oligonucleotide
uccacauaaaaacaauauucacuggga

SEQ ID NO: 130731 - RNA, 27 nt, Artificial Sequence
  Description of Artificial Sequence: Synthetic oligonucleotide
ucuaccaauuccaacuugaauucauug

SEQ ID NO: 130732 - RNA, 27 nt, Artificial Sequence
  Description of Artificial Sequence: Synthetic oligonucleotide
ucuccaagucuaaaucuguguccugag

SEQ ID NO: 130733 - RNA, 27 nt, Artificial Sequence
  Description of Artificial Sequence: Synthetic oligonucleotide
uggaauacuguaacugugcuuugagga

SEQ ID NO: 130734 - RNA, 27 nt, Artificial Sequence
  Description of Artificial Sequence: Synthetic oligonucleotide
uuaauucaucagugguggcagugguag

SEQ ID NO: 130735 - RNA, 27 nt, Artificial Sequence
  Description of Artificial Sequence: Synthetic oligonucleotide
gugaugauguggcacuaguaguuucuu

SEQ ID NO: 130736 - RNA, 27 nt, Artificial Sequence
  Description of Artificial Sequence: Synthetic oligonucleotide
ucuguuuggugaggcuguccgacuuug

SEQ ID NO: 130737 - RNA, 27 nt, Artificial Sequence
  Description of Artificial Sequence: Synthetic oligonucleotide
ccaucauguuccauuuuucgcuuucuc

SEQ ID NO: 130738 - RNA, 27 nt, Artificial Sequence
  Description of Artificial Sequence: Synthetic oligonucleotide
gcagucuacaugcuaaaucagagggua

SEQ ID NO: 130739 - RNA, 27 nt, Artificial Sequence
  Description of Artificial Sequence: Synthetic oligonucleotide
cauaaauagauccuuaaauagcucaaa

SEQ ID NO: 130740 - RNA, 27 nt, Artificial Sequence
  Description of Artificial Sequence: Synthetic oligonucleotide
ugauaauagugcuuuuucaccuuuuuc

SEQ ID NO: 130741 - RNA, 27 nt, Artificial Sequence
  Description of Artificial Sequence: Synthetic oligonucleotide
gcagaacugauaauagugcuuuuucac

SEQ ID NO: 130742 - RNA, 27 nt, Artificial Sequence
  Description of Artificial Sequence: Synthetic oligonucleotide
guagguuuaaucuuucuuuucagccau

SEQ ID NO: 130743 - RNA, 27 nt, Artificial Sequence
  Description of Artificial Sequence: Synthetic oligonucleotide
agaaggauuuuauuauaaggguuuaau

SEQ ID NO: 130744 - RNA, 27 nt, Artificial Sequence
  Description of Artificial Sequence: Synthetic oligonucleotide
gucuacagcauuggcuaauaguaugaa

SEQ ID NO: 130745 - RNA, 27 nt, Artificial Sequence
  Description of Artificial Sequence: Synthetic oligonucleotide
cuauuccuaucaaaaugcuucugucua

SEQ ID NO: 130746 - RNA, 27 nt, Artificial Sequence
  Description of Artificial Sequence: Synthetic oligonucleotide
ucagggccauuaucuuauuugcucuau

SEQ ID NO: 130747 - RNA, 27 nt, Artificial Sequence
  Description of Artificial Sequence: Synthetic oligonucleotide
ugcuugaggaagagaaaaauguugguc

SEQ ID NO: 130748 - RNA, 27 nt, Artificial Sequence
  Description of Artificial Sequence: Synthetic oligonucleotide
ugggcugaacuuuucucauacuuaaag

SEQ ID NO: 130749 - RNA, 27 nt, Artificial Sequence
  Description of Artificial Sequence: Synthetic oligonucleotide
gguucagcagccaucuuuauuccugcg

SEQ ID NO: 130750 - RNA, 27 nt, Artificial Sequence
  Description of Artificial Sequence: Synthetic oligonucleotide
ugaagagaacuuggucauucaaauuuc

SEQ ID NO: 130751 - RNA, 27 nt, Artificial Sequence
  Description of Artificial Sequence: Synthetic oligonucleotide
cucuaggcuggcuaucuuuauacauac

SEQ ID NO: 130752 - RNA, 27 nt, Artificial Sequence
  Description of Artificial Sequence: Synthetic oligonucleotide
acacuucacagagauaguuacagccau

SEQ ID NO: 130753 - RNA, 27 nt, Artificial Sequence
  Description of Artificial Sequence: Synthetic oligonucleotide
uugaaauuuucucacacuucacagaga

SEQ ID NO: 130754 - RNA, 27 nt, Artificial Sequence
  Description of Artificial Sequence: Synthetic oligonucleotide
ucaggaggauucauuuccuuaaaggaa

SEQ ID NO: 130755 - RNA, 27 nt, Artificial Sequence
  Description of Artificial Sequence: Synthetic oligonucleotide
auaugaugucacuuuuuguauccuuga

SEQ ID NO: 130756 - RNA, 27 nt, Artificial Sequence
  Description of Artificial Sequence: Synthetic oligonucleotide
uaugaugaagauucaaauugcaucuua

SEQ ID NO: 130757 - RNA, 27 nt, Artificial Sequence
  Description of Artificial Sequence: Synthetic oligonucleotide
uuaauagcuagucuucguuuugaacag

SEQ ID NO: 130758 - RNA, 27 nt, Artificial Sequence
  Description of Artificial Sequence: Synthetic oligonucleotide
auuuuuaguagagaugagguuucacca

SEQ ID NO: 130759 - RNA, 27 nt, Artificial Sequence
  Description of Artificial Sequence: Synthetic oligonucleotide
aggcgagauagagcuucucuuucguuc

SEQ ID NO: 130760 - RNA, 27 nt, Artificial Sequence
  Description of Artificial Sequence: Synthetic oligonucleotide
aacuggaccgaaggcgcuuguggagaa

SEQ ID NO: 130761 - RNA, 27 nt, Artificial Sequence
  Description of Artificial Sequence: Synthetic oligonucleotide
gcggcuacaucuuuggaaucuucuccu

SEQ ID NO: 130762 - RNA, 27 nt, Artificial Sequence
  Description of Artificial Sequence: Synthetic oligonucleotide
caagucuccucauugaauccagauugg

SEQ ID NO: 130763 - RNA, 27 nt, Artificial Sequence
  Description of Artificial Sequence: Synthetic oligonucleotide
uccucacuacucucaaaucuguucugg

SEQ ID NO: 130764 - RNA, 27 nt, Artificial Sequence
  Description of Artificial Sequence: Synthetic oligonucleotide
uuuguacucaucugcacagcucuggcu

SEQ ID NO: 130765 - RNA, 27 nt, Artificial Sequence
  Description of Artificial Sequence: Synthetic oligonucleotide
gcccauuaacaacaacaaucugaggug

SEQ ID NO: 130766 - RNA, 27 nt, Artificial Sequence
  Description of Artificial Sequence: Synthetic oligonucleotide
aauaaauuaaaaauaauuaaaauagug

SEQ ID NO: 130767 - RNA, 27 nt, Artificial Sequence
  Description of Artificial Sequence: Synthetic oligonucleotide
cauauuuaaauauuaauaaauuaaaaa

SEQ ID NO: 130768 - RNA, 27 nt, Artificial Sequence
  Description of Artificial Sequence: Synthetic oligonucleotide
gaaacaaaggauauucaaacugcauag

SEQ ID NO: 130769 - RNA, 27 nt, Artificial Sequence
  Description of Artificial Sequence: Synthetic oligonucleotide
caaacacuuagacgccagcagcauggg

SEQ ID NO: 130770 - RNA, 27 nt, Artificial Sequence
  Description of Artificial Sequence: Synthetic oligonucleotide
uuugucacaggugaaaugcacaucuga

SEQ ID NO: 130771 - RNA, 27 nt, Artificial Sequence
  Description of Artificial Sequence: Synthetic oligonucleotide
uaauucagccuggcacagguuuugauc

SEQ ID NO: 130772 - RNA, 27 nt, Artificial Sequence
  Description of Artificial Sequence: Synthetic oligonucleotide
auuguaagaaugacuacccacauucac

SEQ ID NO: 130773 - RNA, 27 nt, Artificial Sequence
  Description of Artificial Sequence: Synthetic oligonucleotide
caauuguaagaaugacuacccacauuc

SEQ ID NO: 130774 - RNA, 27 nt, Artificial Sequence
  Description of Artificial Sequence: Synthetic oligonucleotide
guacacucucugaugcucauuuucaua

SEQ ID NO: 130775 - RNA, 27 nt, Artificial Sequence
  Description of Artificial Sequence: Synthetic oligonucleotide
cugcugaguucuacaugaaaagcaaau

SEQ ID NO: 130776 - RNA, 27 nt, Artificial Sequence
  Description of Artificial Sequence: Synthetic oligonucleotide
uacugaaaauaaauauagaaauacaac

SEQ ID NO: 130777 - RNA, 27 nt, Artificial Sequence
  Description of Artificial Sequence: Synthetic oligonucleotide
uuccauuuaagaaacauuaaucaaaac

SEQ ID NO: 130778 - RNA, 27 nt, Artificial Sequence
  Description of Artificial Sequence: Synthetic oligonucleotide
acaauuuuaggcacuauacacguuguu

SEQ ID NO: 130779 - RNA, 27 nt, Artificial Sequence
  Description of Artificial Sequence: Synthetic oligonucleotide
ccagauguuaguagccaaggauauggu

SEQ ID NO: 130780 - RNA, 27 nt, Artificial Sequence
  Description of Artificial Sequence: Synthetic oligonucleotide
agcucacagucuccagauguuaguagc

SEQ ID NO: 130781 - RNA, 27 nt, Artificial Sequence
  Description of Artificial Sequence: Synthetic oligonucleotide
auuaauaaaaagcacacaacuuauggc

SEQ ID NO: 130782 - RNA, 27 nt, Artificial Sequence
  Description of Artificial Sequence: Synthetic oligonucleotide
aauguaagaagagccaaaaugaugcau

SEQ ID NO: 130783 - RNA, 27 nt, Artificial Sequence
  Description of Artificial Sequence: Synthetic oligonucleotide
acauuuuuacaaauguaagaagagcca

SEQ ID NO: 130784 - RNA, 27 nt, Artificial Sequence
  Description of Artificial Sequence: Synthetic oligonucleotide
aauaugaauuaagaugaccuaaucugu

SEQ ID NO: 130785 - RNA, 27 nt, Artificial Sequence
  Description of Artificial Sequence: Synthetic oligonucleotide
ucaugauuaguucuuucaauuccaucc

SEQ ID NO: 130786 - RNA, 27 nt, Artificial Sequence
  Description of Artificial Sequence: Synthetic oligonucleotide
cccaagagcagaaggaaugagugugca

SEQ ID NO: 130787 - RNA, 27 nt, Artificial Sequence
  Description of Artificial Sequence: Synthetic oligonucleotide
cucaaagcuacugguuaccucuacacc

SEQ ID NO: 130788 - RNA, 27 nt, Artificial Sequence
  Description of Artificial Sequence: Synthetic oligonucleotide
ugaaauauuacguggcaugugguuggg

SEQ ID NO: 130789 - RNA, 27 nt, Artificial Sequence
  Description of Artificial Sequence: Synthetic oligonucleotide
agugaagagaauaacuuguuuccgaag

SEQ ID NO: 130790 - RNA, 27 nt, Artificial Sequence
  Description of Artificial Sequence: Synthetic oligonucleotide
uuucuuagcauuaguuauugggaguga

SEQ ID NO: 130791 - RNA, 27 nt, Artificial Sequence
  Description of Artificial Sequence: Synthetic oligonucleotide
uugauuuucagcauuucuuagcauuag

SEQ ID NO: 130792 - RNA, 27 nt, Artificial Sequence
  Description of Artificial Sequence: Synthetic oligonucleotide
aaaguaaucauauuuagagaaagacag

SEQ ID NO: 130793 - RNA, 27 nt, Artificial Sequence
  Description of Artificial Sequence: Synthetic oligonucleotide
uguagaacaaaaugccugaaauucagc

SEQ ID NO: 130794 - RNA, 27 nt, Artificial Sequence
  Description of Artificial Sequence: Synthetic oligonucleotide
gagagucccgggugagagggaaucgcc

SEQ ID NO: 130795 - RNA, 27 nt, Artificial Sequence
  Description of Artificial Sequence: Synthetic oligonucleotide
cuuuacuuuaaagguucacuuuccuug

SEQ ID NO: 130796 - RNA, 27 nt, Artificial Sequence
  Description of Artificial Sequence: Synthetic oligonucleotide
ccaggcuuccagagcaugcagccuccu

SEQ ID NO: 130797 - RNA, 27 nt, Artificial Sequence
  Description of Artificial Sequence: Synthetic oligonucleotide
cucucuuuuguuuucuguucagagaaa

SEQ ID NO: 130798 - RNA, 27 nt, Artificial Sequence
  Description of Artificial Sequence: Synthetic oligonucleotide
cggcauaacugauuacagccaaguuca

SEQ ID NO: 130799 - RNA, 27 nt, Artificial Sequence
  Description of Artificial Sequence: Synthetic oligonucleotide
uggacuucuuuuaauuuuggcuucuuc

SEQ ID NO: 130800 - RNA, 27 nt, Artificial Sequence
  Description of Artificial Sequence: Synthetic oligonucleotide
uaaccucaccuggacuucuuuuaauuu

SEQ ID NO: 130801 - RNA, 27 nt, Artificial Sequence
  Description of Artificial Sequence: Synthetic oligonucleotide
guccucuucccgauaauccggauucag

SEQ ID NO: 130802 - RNA, 27 nt, Artificial Sequence
  Description of Artificial Sequence: Synthetic oligonucleotide
acaauacuugcuuugaugucacauuaa

SEQ ID NO: 130803 - RNA, 27 nt, Artificial Sequence
  Description of Artificial Sequence: Synthetic oligonucleotide
gagugcuacaauacuugcuuugauguc

SEQ ID NO: 130804 - RNA, 27 nt, Artificial Sequence
  Description of Artificial Sequence: Synthetic oligonucleotide
auuugugguuuuguuuucucucucucu

SEQ ID NO: 130805 - RNA, 27 nt, Artificial Sequence
  Description of Artificial Sequence: Synthetic oligonucleotide
uguaugggcuuaaauacuacagcgagg

SEQ ID NO: 130806 - RNA, 27 nt, Artificial Sequence
  Description of Artificial Sequence: Synthetic oligonucleotide
cuguaugggcuuaaauacuacagcgag

SEQ ID NO: 130807 - RNA, 27 nt, Artificial Sequence
  Description of Artificial Sequence: Synthetic oligonucleotide
ggaagguuucuguaugggcuuaaauac

SEQ ID NO: 130808 - RNA, 27 nt, Artificial Sequence
  Description of Artificial Sequence: Synthetic oligonucleotide
guagguauaccauguuuauuuuaauac

SEQ ID NO: 130809 - RNA, 27 nt, Artificial Sequence
  Description of Artificial Sequence: Synthetic oligonucleotide
uccgaaaacuggccgaucagaacagcc

SEQ ID NO: 130810 - RNA, 27 nt, Artificial Sequence
  Description of Artificial Sequence: Synthetic oligonucleotide
cccuguuccaaaguucaaauuauuugu

SEQ ID NO: 130811 - RNA, 27 nt, Artificial Sequence
  Description of Artificial Sequence: Synthetic oligonucleotide
acuggaaaguuaaauuaaggucgcaau

SEQ ID NO: 130812 - RNA, 27 nt, Artificial Sequence
  Description of Artificial Sequence: Synthetic oligonucleotide
caaaaccaaacuuuagcuuucucagcc

SEQ ID NO: 130813 - RNA, 27 nt, Artificial Sequence
  Description of Artificial Sequence: Synthetic oligonucleotide
uacagugggaaguagcaucuuuacuuu

SEQ ID NO: 130814 - RNA, 27 nt, Artificial Sequence
  Description of Artificial Sequence: Synthetic oligonucleotide
ucauaugguaucagcaauuaagcagua

SEQ ID NO: 130815 - RNA, 27 nt, Artificial Sequence
  Description of Artificial Sequence: Synthetic oligonucleotide
cagcccauguuucauucauaugguauc

SEQ ID NO: 130816 - RNA, 27 nt, Artificial Sequence
  Description of Artificial Sequence: Synthetic oligonucleotide
uaugaaaaaguuggauaagaaaguugg

SEQ ID NO: 130817 - RNA, 27 nt, Artificial Sequence
  Description of Artificial Sequence: Synthetic oligonucleotide
uccggccucaugaugucaugcaaggcu

SEQ ID NO: 130818 - RNA, 27 nt, Artificial Sequence
  Description of Artificial Sequence: Synthetic oligonucleotide
acaaaugcagucauauacaaauucagg

SEQ ID NO: 130819 - RNA, 27 nt, Artificial Sequence
  Description of Artificial Sequence: Synthetic oligonucleotide
gguaguaaacauucuacuaggauucuu

SEQ ID NO: 130820 - RNA, 27 nt, Artificial Sequence
  Description of Artificial Sequence: Synthetic oligonucleotide
uuucaucaaaaaauucuucccuuucug

SEQ ID NO: 130821 - RNA, 27 nt, Artificial Sequence
  Description of Artificial Sequence: Synthetic oligonucleotide
aaauucacacacuggcaugccgauagc

SEQ ID NO: 130822 - RNA, 27 nt, Artificial Sequence
  Description of Artificial Sequence: Synthetic oligonucleotide
acauacauugcucuacuaugaggugaa

SEQ ID NO: 130823 - RNA, 27 nt, Artificial Sequence
  Description of Artificial Sequence: Synthetic oligonucleotide
uauauaugugcuuuggcaauucuggug

SEQ ID NO: 130824 - RNA, 27 nt, Artificial Sequence
  Description of Artificial Sequence: Synthetic oligonucleotide
ggagaaacuauuacccagaucaccacu

SEQ ID NO: 130825 - RNA, 27 nt, Artificial Sequence
  Description of Artificial Sequence: Synthetic oligonucleotide
auuuggagaaacuauuacccagaucac

SEQ ID NO: 130826 - RNA, 27 nt, Artificial Sequence
  Description of Artificial Sequence: Synthetic oligonucleotide
uuucuaggaaguauucaucacauccac

SEQ ID NO: 130827 - RNA, 27 nt, Artificial Sequence
  Description of Artificial Sequence: Synthetic oligonucleotide
cauauaugguguagcuguggaaaugcg

SEQ ID NO: 130828 - RNA, 27 nt, Artificial Sequence
  Description of Artificial Sequence: Synthetic oligonucleotide
cuccauucauauaugguguagcugugg

SEQ ID NO: 130829 - RNA, 27 nt, Artificial Sequence
  Description of Artificial Sequence: Synthetic oligonucleotide
aucuucuucucguguaagaacugcagc

SEQ ID NO: 130830 - RNA, 27 nt, Artificial Sequence
  Description of Artificial Sequence: Synthetic oligonucleotide
ucccuguaaaugaucuucuucucgugu

SEQ ID NO: 130831 - RNA, 27 nt, Artificial Sequence
  Description of Artificial Sequence: Synthetic oligonucleotide
gucccuguaaaugaucuucuucucgug

SEQ ID NO: 130832 - RNA, 27 nt, Artificial Sequence
  Description of Artificial Sequence: Synthetic oligonucleotide
ucaggucccuguaaaugaucuucuucu

SEQ ID NO: 130833 - RNA, 27 nt, Artificial Sequence
  Description of Artificial Sequence: Synthetic oligonucleotide
gaugcagucaaacaccucuuccucugu

SEQ ID NO: 130834 - RNA, 27 nt, Artificial Sequence
  Description of Artificial Sequence: Synthetic oligonucleotide
cgaugcagucaaacaccucuuccucug

SEQ ID NO: 130835 - RNA, 27 nt, Artificial Sequence
  Description of Artificial Sequence: Synthetic oligonucleotide
cccugugaacucgcccucaaaguagcg

SEQ ID NO: 130836 - RNA, 27 nt, Artificial Sequence
  Description of Artificial Sequence: Synthetic oligonucleotide
ggacagaggugccaggagaugcccuca

SEQ ID NO: 130837 - RNA, 27 nt, Artificial Sequence
  Description of Artificial Sequence: Synthetic oligonucleotide
uuaaaaagacaaaccauaucacuccuu

SEQ ID NO: 130838 - RNA, 27 nt, Artificial Sequence
  Description of Artificial Sequence: Synthetic oligonucleotide
cuuaaaaagacaaaccauaucacuccu

SEQ ID NO: 130839 - RNA, 27 nt, Artificial Sequence
  Description of Artificial Sequence: Synthetic oligonucleotide
gacaaccuuuaggaucuuuacugcaac

SEQ ID NO: 130840 - RNA, 27 nt, Artificial Sequence
  Description of Artificial Sequence: Synthetic oligonucleotide
gucgacaaccuuuaggaucuuuacugc

SEQ ID NO: 130841 - RNA, 27 nt, Artificial Sequence
  Description of Artificial Sequence: Synthetic oligonucleotide
acaauugccagguuguccuuugucaug

SEQ ID NO: 130842 - RNA, 27 nt, Artificial Sequence
  Description of Artificial Sequence: Synthetic oligonucleotide
ccucgcaccacugggucacaauugcca

SEQ ID NO: 130843 - RNA, 27 nt, Artificial Sequence
  Description of Artificial Sequence: Synthetic oligonucleotide
auuucaugucucuauggaugauguucu

SEQ ID NO: 130844 - RNA, 27 nt, Artificial Sequence
  Description of Artificial Sequence: Synthetic oligonucleotide
uggagaaauauauuguuggauuucaug

SEQ ID NO: 130845 - RNA, 27 nt, Artificial Sequence
  Description of Artificial Sequence: Synthetic oligonucleotide
agccuucauggagaaauauauuguugg

SEQ ID NO: 130846 - RNA, 27 nt, Artificial Sequence
  Description of Artificial Sequence: Synthetic oligonucleotide
accacuccagcgugacuuuacuguugc

SEQ ID NO: 130847 - RNA, 27 nt, Artificial Sequence
  Description of Artificial Sequence: Synthetic oligonucleotide
ccucucuuccuuuacuuucuucacaca

SEQ ID NO: 130848 - RNA, 27 nt, Artificial Sequence
  Description of Artificial Sequence: Synthetic oligonucleotide
gcccgaugcaaggauggcucggaagcg

SEQ ID NO: 130849 - RNA, 27 nt, Artificial Sequence
  Description of Artificial Sequence: Synthetic oligonucleotide
cacaguaggauauucaaccuccauuuc

SEQ ID NO: 130850 - RNA, 27 nt, Artificial Sequence
  Description of Artificial Sequence: Synthetic oligonucleotide
uuacacaguaggauauucaaccuccau

SEQ ID NO: 130851 - RNA, 27 nt, Artificial Sequence
  Description of Artificial Sequence: Synthetic oligonucleotide
uacacuacaagggaaaacucaaaaucu

SEQ ID NO: 130852 - RNA, 27 nt, Artificial Sequence
  Description of Artificial Sequence: Synthetic oligonucleotide
caaucaacaaagaacaaacaggauaaa

SEQ ID NO: 130853 - RNA, 27 nt, Artificial Sequence
  Description of Artificial Sequence: Synthetic oligonucleotide
uuucaaucaacaaagaacaaacaggau

SEQ ID NO: 130854 - RNA, 27 nt, Artificial Sequence
  Description of Artificial Sequence: Synthetic oligonucleotide
auggaagaaaaagaaggcuguagagaa

SEQ ID NO: 130855 - RNA, 27 nt, Artificial Sequence
  Description of Artificial Sequence: Synthetic oligonucleotide
uagaaggaagauuagcuauggaagaaa

SEQ ID NO: 130856 - RNA, 27 nt, Artificial Sequence
  Description of Artificial Sequence: Synthetic oligonucleotide
augaagcauucaacaggaagauuauuu

SEQ ID NO: 130857 - RNA, 27 nt, Artificial Sequence
  Description of Artificial Sequence: Synthetic oligonucleotide
caugaagcauucaacaggaagauuauu

SEQ ID NO: 130858 - RNA, 27 nt, Artificial Sequence
  Description of Artificial Sequence: Synthetic oligonucleotide
ucaaaguagaauucaagucaugaagca

SEQ ID NO: 130859 - RNA, 27 nt, Artificial Sequence
  Description of Artificial Sequence: Synthetic oligonucleotide
gucuguaguugcuucucucccucuuag

SEQ ID NO: 130860 - RNA, 27 nt, Artificial Sequence
  Description of Artificial Sequence: Synthetic oligonucleotide
guugaccuuggucugguaggagacggc

SEQ ID NO: 130861 - RNA, 27 nt, Artificial Sequence
  Description of Artificial Sequence: Synthetic oligonucleotide
gucgagauagucgggccgauugaucuc

SEQ ID NO: 130862 - RNA, 27 nt, Artificial Sequence
  Description of Artificial Sequence: Synthetic oligonucleotide
guuugggaagguuggauguucguccuc

SEQ ID NO: 130863 - RNA, 27 nt, Artificial Sequence
  Description of Artificial Sequence: Synthetic oligonucleotide
aguucuaagcuuggguuccgacccuaa

SEQ ID NO: 130864 - RNA, 27 nt, Artificial Sequence
  Description of Artificial Sequence: Synthetic oligonucleotide
uuaaaguucuaagcuuggguuccgacc

SEQ ID NO: 130865 - RNA, 27 nt, Artificial Sequence
  Description of Artificial Sequence: Synthetic oligonucleotide
guugcuuaaaguucuaagcuuggguuc

SEQ ID NO: 130866 - RNA, 27 nt, Artificial Sequence
  Description of Artificial Sequence: Synthetic oligonucleotide
gugguggucuuguugcuuaaaguucua

SEQ ID NO: 130867 - RNA, 27 nt, Artificial Sequence
  Description of Artificial Sequence: Synthetic oligonucleotide
acuuuauuucucgccacugaauaguag

SEQ ID NO: 130868 - RNA, 27 nt, Artificial Sequence
  Description of Artificial Sequence: Synthetic oligonucleotide
aacuuuauuucucgccacugaauagua

SEQ ID NO: 130869 - RNA, 27 nt, Artificial Sequence
  Description of Artificial Sequence: Synthetic oligonucleotide
ggaucauuuccuguuaucuguguuugu

SEQ ID NO: 130870 - RNA, 27 nt, Artificial Sequence
  Description of Artificial Sequence: Synthetic oligonucleotide
guuucauuucuucucuuuucuuaaggc

SEQ ID NO: 130871 - RNA, 27 nt, Artificial Sequence
  Description of Artificial Sequence: Synthetic oligonucleotide
ggaggauggaaacacacuccuucaguu

SEQ ID NO: 130872 - RNA, 27 nt, Artificial Sequence
  Description of Artificial Sequence: Synthetic oligonucleotide
ucaaagauuuucagucccgcggugaca

SEQ ID NO: 130873 - RNA, 27 nt, Artificial Sequence
  Description of Artificial Sequence: Synthetic oligonucleotide
ccugaacggcacgcuuauuucugcugu

SEQ ID NO: 130874 - RNA, 27 nt, Artificial Sequence
  Description of Artificial Sequence: Synthetic oligonucleotide
cuucuggacccugaacggcacgcuuau

SEQ ID NO: 130875 - RNA, 27 nt, Artificial Sequence
  Description of Artificial Sequence: Synthetic oligonucleotide
caagcagucuugagugacuguuucuuc

SEQ ID NO: 130876 - RNA, 27 nt, Artificial Sequence
  Description of Artificial Sequence: Synthetic oligonucleotide
ccaaagacauggaccuucuuccucuga

SEQ ID NO: 130877 - RNA, 27 nt, Artificial Sequence
  Description of Artificial Sequence: Synthetic oligonucleotide
guguuucaggcauauuuugaauacauc

SEQ ID NO: 130878 - RNA, 27 nt, Artificial Sequence
  Description of Artificial Sequence: Synthetic oligonucleotide
gagguacagagaaagggaggaaaauag

SEQ ID NO: 130879 - RNA, 27 nt, Artificial Sequence
  Description of Artificial Sequence: Synthetic oligonucleotide
ucuugucuugcucuaucuuucuuuggu

SEQ ID NO: 130880 - RNA, 27 nt, Artificial Sequence
  Description of Artificial Sequence: Synthetic oligonucleotide
uuucuugucuugcucuaucuuucuuug

SEQ ID NO: 130881 - RNA, 27 nt, Artificial Sequence
  Description of Artificial Sequence: Synthetic oligonucleotide
ggaucuuguacaaacaaaugcuuucuc

SEQ ID NO: 130882 - RNA, 27 nt, Artificial Sequence
  Description of Artificial Sequence: Synthetic oligonucleotide
ucugcaaguacguucguuuaacucaag

SEQ ID NO: 130883 - RNA, 27 nt, Artificial Sequence
  Description of Artificial Sequence: Synthetic oligonucleotide
ucuguaucgaucguucuguaucagucu

SEQ ID NO: 130884 - RNA, 27 nt, Artificial Sequence
  Description of Artificial Sequence: Synthetic oligonucleotide
auuuauuuuuauauauauauaauauau

SEQ ID NO: 130885 - RNA, 27 nt, Artificial Sequence
  Description of Artificial Sequence: Synthetic oligonucleotide
auauuuauuuuuauauauauauaauau

SEQ ID NO: 130886 - RNA, 27 nt, Artificial Sequence
  Description of Artificial Sequence: Synthetic oligonucleotide
cacagcagucaaauacauccagugaag

SEQ ID NO: 130887 - RNA, 27 nt, Artificial Sequence
  Description of Artificial Sequence: Synthetic oligonucleotide
gucucucaucuccuccucuucccuguc

SEQ ID NO: 130888 - RNA, 27 nt, Artificial Sequence
  Description of Artificial Sequence: Synthetic oligonucleotide
ccaagugggacaaaaaaaagaucaugc

SEQ ID NO: 130889 - RNA, 14 nt, Artificial Sequence
  Description of Artificial Sequence: Synthetic oligonucleotide
guauuuugaugagg

SEQ ID NO: 130890 - RNA, 12 nt, Artificial Sequence
  Description of Artificial Sequence: Synthetic oligonucleotide
ggcccagaugau

SEQ ID NO: 130891 - RNA, 14 nt, Artificial Sequence
  Description of Artificial Sequence: Synthetic oligonucleotide
gggaagaaaacuau

SEQ ID NO: 130892 - RNA, 15 nt, Artificial Sequence
  Description of Artificial Sequence: Synthetic oligonucleotide
guuuuaauuuauuuc

SEQ ID NO: 130893 - RNA, 12 nt, Artificial Sequence
  Description of Artificial Sequence: Synthetic oligonucleotide
acguagggaaau

SEQ ID NO: 130894 - RNA, 12 nt, Artificial Sequence
  Description of Artificial Sequence: Synthetic oligonucleotide
ccaggguuuacc

SEQ ID NO: 130895 - RNA, 11 nt, Artificial Sequence
  Description of Artificial Sequence: Synthetic oligonucleotide
agcaagguuua

SEQ ID NO: 130896 - RNA, 12 nt, Artificial Sequence
  Description of Artificial Sequence: Synthetic oligonucleotide
uguauuauguug

SEQ ID NO: 130897 - RNA, 15 nt, Artificial Sequence
  Description of Artificial Sequence: Synthetic oligonucleotide
uuuuaaucuuuguga

SEQ ID NO: 130898 - RNA, 14 nt, Artificial Sequence
  Description of Artificial Sequence: Synthetic oligonucleotide
uuaaucuuugugac

SEQ ID NO: 130899 - RNA, 13 nt, Artificial Sequence
  Description of Artificial Sequence: Synthetic oligonucleotide
gcugcuuaugucu

SEQ ID NO: 130900 - RNA, 14 nt, Artificial Sequence
  Description of Artificial Sequence: Synthetic oligonucleotide
aaguguuucagaag

SEQ ID NO: 130901 - RNA, 13 nt, Artificial Sequence
  Description of Artificial Sequence: Synthetic oligonucleotide
gaccaucaauaag

SEQ ID NO: 130902 - RNA, 13 nt, Artificial Sequence
  Description of Artificial Sequence: Synthetic oligonucleotide
ccaucaauaagga

SEQ ID NO: 130903 - RNA, 14 nt, Artificial Sequence
  Description of Artificial Sequence: Synthetic oligonucleotide
ucaauaaggaagaa

SEQ ID NO: 130904 - RNA, 14 nt, Artificial Sequence
  Description of Artificial Sequence: Synthetic oligonucleotide
aauaaggaagaagc

SEQ ID NO: 130905 - RNA, 13 nt, Artificial Sequence
  Description of Artificial Sequence: Synthetic oligonucleotide
aggaagaagcccu

SEQ ID NO: 130906 - RNA, 13 nt, Artificial Sequence
  Description of Artificial Sequence: Synthetic oligonucleotide
gcauaacuaaagg

SEQ ID NO: 130907 - RNA, 14 nt, Artificial Sequence
  Description of Artificial Sequence: Synthetic oligonucleotide
cauaacuaaaggug

SEQ ID NO: 130908 - RNA, 12 nt, Artificial Sequence
  Description of Artificial Sequence: Synthetic oligonucleotide
cuacaucacgcc

SEQ ID NO: 130909 - RNA, 12 nt, Artificial Sequence
  Description of Artificial Sequence: Synthetic oligonucleotide
acuggauuuaag

SEQ ID NO: 130910 - RNA, 12 nt, Artificial Sequence
  Description of Artificial Sequence: Synthetic oligonucleotide
cuggauuuaagc

SEQ ID NO: 130911 - RNA, 13 nt, Artificial Sequence
  Description of Artificial Sequence: Synthetic oligonucleotide
gauuuaagcagag

SEQ ID NO: 130912 - RNA, 13 nt, Artificial Sequence
  Description of Artificial Sequence: Synthetic oligonucleotide
auuuaagcagagu

SEQ ID NO: 130913 - RNA, 13 nt, Artificial Sequence
  Description of Artificial Sequence: Synthetic oligonucleotide
uuaagcagaguuc

SEQ ID NO: 130914 - RNA, 13 nt, Artificial Sequence
  Description of Artificial Sequence: Synthetic oligonucleotide
uaagcagaguuca

SEQ ID NO: 130915 - RNA, 14 nt, Artificial Sequence
  Description of Artificial Sequence: Synthetic oligonucleotide
agcagaguucaaaa

SEQ ID NO: 130916 - RNA, 12 nt, Artificial Sequence
  Description of Artificial Sequence: Synthetic oligonucleotide
cucagggucuga

SEQ ID NO: 130917 - RNA, 13 nt, Artificial Sequence
  Description of Artificial Sequence: Synthetic oligonucleotide
caagcaacuacau

SEQ ID NO: 130918 - RNA, 12 nt, Artificial Sequence
  Description of Artificial Sequence: Synthetic oligonucleotide
aucaauggcagc

SEQ ID NO: 130919 - RNA, 11 nt, Artificial Sequence
  Description of Artificial Sequence: Synthetic oligonucleotide
uuccagcccac

SEQ ID NO: 130920 - RNA, 12 nt, Artificial Sequence
  Description of Artificial Sequence: Synthetic oligonucleotide
cagcugagaaug

SEQ ID NO: 130921 - RNA, 13 nt, Artificial Sequence
  Description of Artificial Sequence: Synthetic oligonucleotide
aacguaucuccua

SEQ ID NO: 130922 - RNA, 14 nt, Artificial Sequence
  Description of Artificial Sequence: Synthetic oligonucleotide
ccuaaaauaauuuc

SEQ ID NO: 130923 - RNA, 13 nt, Artificial Sequence
  Description of Artificial Sequence: Synthetic oligonucleotide
uggaagauucagc

SEQ ID NO: 130924 - RNA, 12 nt, Artificial Sequence
  Description of Artificial Sequence: Synthetic oligonucleotide
uuaaacucuccu

SEQ ID NO: 130925 - RNA, 12 nt, Artificial Sequence
  Description of Artificial Sequence: Synthetic oligonucleotide
cagccuacaguu

SEQ ID NO: 130926 - RNA, 13 nt, Artificial Sequence
  Description of Artificial Sequence: Synthetic oligonucleotide
guuauguucaguc

SEQ ID NO: 130927 - RNA, 13 nt, Artificial Sequence
  Description of Artificial Sequence: Synthetic oligonucleotide
cacauacaaaaug

SEQ ID NO: 130928 - RNA, 9 nt, Artificial Sequence
  Description of Artificial Sequence: Synthetic oligonucleotide
uccuuuugc

SEQ ID NO: 130929 - RNA, 12 nt, Artificial Sequence
  Description of Artificial Sequence: Synthetic oligonucleotide
ugaccugugaag

SEQ ID NO: 130930 - RNA, 12 nt, Artificial Sequence
  Description of Artificial Sequence: Synthetic oligonucleotide
cuaucucacaca

SEQ ID NO: 130931 - RNA, 13 nt, Artificial Sequence
  Description of Artificial Sequence: Synthetic oligonucleotide
uguccucaauugu

SEQ ID NO: 130932 - RNA, 12 nt, Artificial Sequence
  Description of Artificial Sequence: Synthetic oligonucleotide
aaaccguagcug

SEQ ID NO: 130933 - RNA, 12 nt, Artificial Sequence
  Description of Artificial Sequence: Synthetic oligonucleotide
uagcuggcaagc

SEQ ID NO: 130934 - RNA, 14 nt, Artificial Sequence
  Description of Artificial Sequence: Synthetic oligonucleotide
uuguaugguuaaaa

SEQ ID NO: 130935 - RNA, 14 nt, Artificial Sequence
  Description of Artificial Sequence: Synthetic oligonucleotide
ugguuaaaagaugg

SEQ ID NO: 130936 - RNA, 13 nt, Artificial Sequence
  Description of Artificial Sequence: Synthetic oligonucleotide
cagggaauuauac

SEQ ID NO: 130937 - RNA, 12 nt, Artificial Sequence
  Description of Artificial Sequence: Synthetic oligonucleotide
acaaucuugcug

SEQ ID NO: 130938 - RNA, 13 nt, Artificial Sequence
  Description of Artificial Sequence: Synthetic oligonucleotide
ccaauaaugaaga

SEQ ID NO: 130939 - RNA, 13 nt, Artificial Sequence
  Description of Artificial Sequence: Synthetic oligonucleotide
acuuuggauguuc

SEQ ID NO: 130940 - RNA, 12 nt, Artificial Sequence
  Description of Artificial Sequence: Synthetic oligonucleotide
aaugcuuccacu

SEQ ID NO: 130941 - RNA, 11 nt, Artificial Sequence
  Description of Artificial Sequence: Synthetic oligonucleotide
gagaaaguuug

SEQ ID NO: 130942 - RNA, 11 nt, Artificial Sequence
  Description of Artificial Sequence: Synthetic oligonucleotide
aaagaacuacu

SEQ ID NO: 130943 - RNA, 12 nt, Artificial Sequence
  Description of Artificial Sequence: Synthetic oligonucleotide
uuagaaauacgg

SEQ ID NO: 130944 - RNA, 12 nt, Artificial Sequence
  Description of Artificial Sequence: Synthetic oligonucleotide
aacauggguaca

SEQ ID NO: 130945 - RNA, 14 nt, Artificial Sequence
  Description of Artificial Sequence: Synthetic oligonucleotide
aaagacacagaaga

SEQ ID NO: 130946 - RNA, 11 nt, Artificial Sequence
  Description of Artificial Sequence: Synthetic oligonucleotide
uaguagggagg

SEQ ID NO: 130947 - RNA, 12 nt, Artificial Sequence
  Description of Artificial Sequence: Synthetic oligonucleotide
gccuucugcagc

SEQ ID NO: 130948 - RNA, 10 nt, Artificial Sequence
  Description of Artificial Sequence: Synthetic oligonucleotide
ggucugguac

SEQ ID NO: 130949 - RNA, 12 nt, Artificial Sequence
  Description of Artificial Sequence: Synthetic oligonucleotide
cuaguccuuccg

SEQ ID NO: 130950 - RNA, 12 nt, Artificial Sequence
  Description of Artificial Sequence: Synthetic oligonucleotide
ccagugaauauu

SEQ ID NO: 130951 - RNA, 13 nt, Artificial Sequence
  Description of Artificial Sequence: Synthetic oligonucleotide
augaauucaaguu

SEQ ID NO: 130952 - RNA, 12 nt, Artificial Sequence
  Description of Artificial Sequence: Synthetic oligonucleotide
caggacacagau

SEQ ID NO: 130953 - RNA, 12 nt, Artificial Sequence
  Description of Artificial Sequence: Synthetic oligonucleotide
cucaaagcacag

SEQ ID NO: 130954 - RNA, 10 nt, Artificial Sequence
  Description of Artificial Sequence: Synthetic oligonucleotide
accacugcca

SEQ ID NO: 130955 - RNA, 13 nt, Artificial Sequence
  Description of Artificial Sequence: Synthetic oligonucleotide
gaaacuacuagug

SEQ ID NO: 130956 - RNA, 12 nt, Artificial Sequence
  Description of Artificial Sequence: Synthetic oligonucleotide
aagucggacagc

SEQ ID NO: 130957 - RNA, 13 nt, Artificial Sequence
  Description of Artificial Sequence: Synthetic oligonucleotide
gaaagcgaaaaau

SEQ ID NO: 130958 - RNA, 13 nt, Artificial Sequence
  Description of Artificial Sequence: Synthetic oligonucleotide
cccucugauuuag

SEQ ID NO: 130959 - RNA, 12 nt, Artificial Sequence
  Description of Artificial Sequence: Synthetic oligonucleotide
ugagcuauuuaa

SEQ ID NO: 130960 - RNA, 13 nt, Artificial Sequence
  Description of Artificial Sequence: Synthetic oligonucleotide
aaaaggugaaaaa

SEQ ID NO: 130961 - RNA, 14 nt, Artificial Sequence
  Description of Artificial Sequence: Synthetic oligonucleotide
gaaaaagcacuauu

SEQ ID NO: 130962 - RNA, 12 nt, Artificial Sequence
  Description of Artificial Sequence: Synthetic oligonucleotide
ggcugaaaagaa

SEQ ID NO: 130963 - RNA, 12 nt, Artificial Sequence
  Description of Artificial Sequence: Synthetic oligonucleotide
uaaacccuuaua

SEQ ID NO: 130964 - RNA, 13 nt, Artificial Sequence
  Description of Artificial Sequence: Synthetic oligonucleotide
cauacuauuagcc

SEQ ID NO: 130965 - RNA, 12 nt, Artificial Sequence
  Description of Artificial Sequence: Synthetic oligonucleotide
gacagaagcauu

SEQ ID NO: 130966 - RNA, 14 nt, Artificial Sequence
  Description of Artificial Sequence: Synthetic oligonucleotide
agagcaaauaagau

SEQ ID NO: 130967 - RNA, 14 nt, Artificial Sequence
  Description of Artificial Sequence: Synthetic oligonucleotide
ccaacauuuuucuc

SEQ ID NO: 130968 - RNA, 15 nt, Artificial Sequence
  Description of Artificial Sequence: Synthetic oligonucleotide
uuaaguaugagaaaa

SEQ ID NO: 130969 - RNA, 14 nt, Artificial Sequence
  Description of Artificial Sequence: Synthetic oligonucleotide
caggaauaaagaug

SEQ ID NO: 130970 - RNA, 13 nt, Artificial Sequence
  Description of Artificial Sequence: Synthetic oligonucleotide
aauuugaaugacc

SEQ ID NO: 130971 - RNA, 14 nt, Artificial Sequence
  Description of Artificial Sequence: Synthetic oligonucleotide
auguauaaagauag

SEQ ID NO: 130972 - RNA, 12 nt, Artificial Sequence
  Description of Artificial Sequence: Synthetic oligonucleotide
ggcuguaacuau

SEQ ID NO: 130973 - RNA, 11 nt, Artificial Sequence
  Description of Artificial Sequence: Synthetic oligonucleotide
ucugugaagug

SEQ ID NO: 130974 - RNA, 14 nt, Artificial Sequence
  Description of Artificial Sequence: Synthetic oligonucleotide
ccuuuaaggaaaug

SEQ ID NO: 130975 - RNA, 13 nt, Artificial Sequence
  Description of Artificial Sequence: Synthetic oligonucleotide
aaggauacaaaaa

SEQ ID NO: 130976 - RNA, 12 nt, Artificial Sequence
  Description of Artificial Sequence: Synthetic oligonucleotide
agaugcaauuug

SEQ ID NO: 130977 - RNA, 12 nt, Artificial Sequence
  Description of Artificial Sequence: Synthetic oligonucleotide
guucaaaacgaa

SEQ ID NO: 130978 - RNA, 11 nt, Artificial Sequence
  Description of Artificial Sequence: Synthetic oligonucleotide
gugaaaccuca

SEQ ID NO: 130979 - RNA, 13 nt, Artificial Sequence
  Description of Artificial Sequence: Synthetic oligonucleotide
acgaaagagaagc

SEQ ID NO: 130980 - RNA, 12 nt, Artificial Sequence
  Description of Artificial Sequence: Synthetic oligonucleotide
cuccacaagcgc

SEQ ID NO: 130981 - RNA, 14 nt, Artificial Sequence
  Description of Artificial Sequence: Synthetic oligonucleotide
gagaagauuccaaa

SEQ ID NO: 130982 - RNA, 13 nt, Artificial Sequence
  Description of Artificial Sequence: Synthetic oligonucleotide
aaucuggauucaa

SEQ ID NO: 130983 - RNA, 13 nt, Artificial Sequence
  Description of Artificial Sequence: Synthetic oligonucleotide
agaacagauuuga

SEQ ID NO: 130984 - RNA, 11 nt, Artificial Sequence
  Description of Artificial Sequence: Synthetic oligonucleotide
ccagagcugug

SEQ ID NO: 130985 - RNA, 12 nt, Artificial Sequence
  Description of Artificial Sequence: Synthetic oligonucleotide
ccucagauuguu

SEQ ID NO: 130986 - RNA, 12 nt, Artificial Sequence
  Description of Artificial Sequence: Synthetic oligonucleotide
cuauuuuaauua

SEQ ID NO: 130987 - RNA, 13 nt, Artificial Sequence
  Description of Artificial Sequence: Synthetic oligonucleotide
uuuaauuuauuaa

SEQ ID NO: 130988 - RNA, 12 nt, Artificial Sequence
  Description of Artificial Sequence: Synthetic oligonucleotide
augcaguuugaa

SEQ ID NO: 130989 - RNA, 11 nt, Artificial Sequence
  Description of Artificial Sequence: Synthetic oligonucleotide
caugcugcugg

SEQ ID NO: 130990 - RNA, 13 nt, Artificial Sequence
  Description of Artificial Sequence: Synthetic oligonucleotide
agaugugcauuuc

SEQ ID NO: 130991 - RNA, 12 nt, Artificial Sequence
  Description of Artificial Sequence: Synthetic oligonucleotide
ucaaaaccugug

SEQ ID NO: 130992 - RNA, 11 nt, Artificial Sequence
  Description of Artificial Sequence: Synthetic oligonucleotide
gaaugugggua

SEQ ID NO: 130993 - RNA, 10 nt, Artificial Sequence
  Description of Artificial Sequence: Synthetic oligonucleotide
auguggguag

SEQ ID NO: 130994 - RNA, 13 nt, Artificial Sequence
  Description of Artificial Sequence: Synthetic oligonucleotide
ugaaaaugagcau

SEQ ID NO: 130995 - RNA, 13 nt, Artificial Sequence
  Description of Artificial Sequence: Synthetic oligonucleotide
uugcuuuucaugu

SEQ ID NO: 130996 - RNA, 12 nt, Artificial Sequence
  Description of Artificial Sequence: Synthetic oligonucleotide
uguauuucuaua

SEQ ID NO: 130997 - RNA, 13 nt, Artificial Sequence
  Description of Artificial Sequence: Synthetic oligonucleotide
uuugauuaauguu

SEQ ID NO: 130998 - RNA, 12 nt, Artificial Sequence
  Description of Artificial Sequence: Synthetic oligonucleotide
caacguguauag

SEQ ID NO: 130999 - RNA, 12 nt, Artificial Sequence
  Description of Artificial Sequence: Synthetic oligonucleotide
cauauccuuggc

SEQ ID NO: 131000 - RNA, 13 nt, Artificial Sequence
  Description of Artificial Sequence: Synthetic oligonucleotide
uacuaacaucugg

SEQ ID NO: 131001 - RNA, 11 nt, Artificial Sequence
  Description of Artificial Sequence: Synthetic oligonucleotide
cauaaguugug

SEQ ID NO: 131002 - RNA, 12 nt, Artificial Sequence
  Description of Artificial Sequence: Synthetic oligonucleotide
gcaucauuuugg

SEQ ID NO: 131003 - RNA, 10 nt, Artificial Sequence
  Description of Artificial Sequence: Synthetic oligonucleotide
gcucuucuua

SEQ ID NO: 131004 - RNA, 10 nt, Artificial Sequence
  Description of Artificial Sequence: Synthetic oligonucleotide
agauuagguc

SEQ ID NO: 131005 - RNA, 12 nt, Artificial Sequence
  Description of Artificial Sequence: Synthetic oligonucleotide
auggaauugaaa

SEQ ID NO: 131006 - RNA, 13 nt, Artificial Sequence
  Description of Artificial Sequence: Synthetic oligonucleotide
cacacucauuccu

SEQ ID NO: 131007 - RNA, 12 nt, Artificial Sequence
  Description of Artificial Sequence: Synthetic oligonucleotide
uguagagguaac

SEQ ID NO: 131008 - RNA, 11 nt, Artificial Sequence
  Description of Artificial Sequence: Synthetic oligonucleotide
caaccacaugc

SEQ ID NO: 131009 - RNA, 12 nt, Artificial Sequence
  Description of Artificial Sequence: Synthetic oligonucleotide
ucggaaacaagu

SEQ ID NO: 131010 - RNA, 11 nt, Artificial Sequence
  Description of Artificial Sequence: Synthetic oligonucleotide
acucccaauaa

SEQ ID NO: 131011 - RNA, 13 nt, Artificial Sequence
  Description of Artificial Sequence: Synthetic oligonucleotide
aaugcuaagaaau

SEQ ID NO: 131012 - RNA, 11 nt, Artificial Sequence
  Description of Artificial Sequence: Synthetic oligonucleotide
gucuuucucua

SEQ ID NO: 131013 - RNA, 11 nt, Artificial Sequence
  Description of Artificial Sequence: Synthetic oligonucleotide
ugaauuucagg

SEQ ID NO: 131014 - RNA, 13 nt, Artificial Sequence
  Description of Artificial Sequence: Synthetic oligonucleotide
cgauucccucuca

SEQ ID NO: 131015 - RNA, 11 nt, Artificial Sequence
  Description of Artificial Sequence: Synthetic oligonucleotide
aggaaagugaa

SEQ ID NO: 131016 - RNA, 12 nt, Artificial Sequence
  Description of Artificial Sequence: Synthetic oligonucleotide
gaggcugcaugc

SEQ ID NO: 131017 - RNA, 11 nt, Artificial Sequence
  Description of Artificial Sequence: Synthetic oligonucleotide
ucucugaacag

SEQ ID NO: 131018 - RNA, 12 nt, Artificial Sequence
  Description of Artificial Sequence: Synthetic oligonucleotide
aacuuggcugua

SEQ ID NO: 131019 - RNA, 12 nt, Artificial Sequence
  Description of Artificial Sequence: Synthetic oligonucleotide
agaagccaaaau

SEQ ID NO: 131020 - RNA, 14 nt, Artificial Sequence
  Description of Artificial Sequence: Synthetic oligonucleotide
auuaaaagaagucc

SEQ ID NO: 131021 - RNA, 14 nt, Artificial Sequence
  Description of Artificial Sequence: Synthetic oligonucleotide
gaauccggauuauc

SEQ ID NO: 131022 - RNA, 12 nt, Artificial Sequence
  Description of Artificial Sequence: Synthetic oligonucleotide
aaugugacauca

SEQ ID NO: 131023 - RNA, 13 nt, Artificial Sequence
  Description of Artificial Sequence: Synthetic oligonucleotide
caucaaagcaagu

SEQ ID NO: 131024 - RNA, 11 nt, Artificial Sequence
  Description of Artificial Sequence: Synthetic oligonucleotide
agagagagaaa

SEQ ID NO: 131025 - RNA, 13 nt, Artificial Sequence
  Description of Artificial Sequence: Synthetic oligonucleotide
ucgcuguaguauu

SEQ ID NO: 131026 - RNA, 14 nt, Artificial Sequence
  Description of Artificial Sequence: Synthetic oligonucleotide
cgcuguaguauuua

SEQ ID NO: 131027 - RNA, 13 nt, Artificial Sequence
  Description of Artificial Sequence: Synthetic oligonucleotide
auuuaagcccaua

SEQ ID NO: 131028 - RNA, 15 nt, Artificial Sequence
  Description of Artificial Sequence: Synthetic oligonucleotide
auuaaaauaaacaug

SEQ ID NO: 131029 - RNA, 12 nt, Artificial Sequence
  Description of Artificial Sequence: Synthetic oligonucleotide
cuguucugaucg

SEQ ID NO: 131030 - RNA, 16 nt, Artificial Sequence
  Description of Artificial Sequence: Synthetic oligonucleotide
aaauaauuugaacuuu

SEQ ID NO: 131031 - RNA, 12 nt, Artificial Sequence
  Description of Artificial Sequence: Synthetic oligonucleotide
ugcgaccuuaau

SEQ ID NO: 131032 - RNA, 11 nt, Artificial Sequence
  Description of Artificial Sequence: Synthetic oligonucleotide
cugagaaagcu

SEQ ID NO: 131033 - RNA, 13 nt, Artificial Sequence
  Description of Artificial Sequence: Synthetic oligonucleotide
aguaaagaugcua

SEQ ID NO: 131034 - RNA, 12 nt, Artificial Sequence
  Description of Artificial Sequence: Synthetic oligonucleotide
cugcuuaauugc

SEQ ID NO: 131035 - RNA, 14 nt, Artificial Sequence
  Description of Artificial Sequence: Synthetic oligonucleotide
uaccauaugaauga

SEQ ID NO: 131036 - RNA, 12 nt, Artificial Sequence
  Description of Artificial Sequence: Synthetic oligonucleotide
aacuuucuuauc

SEQ ID NO: 131037 - RNA, 13 nt, Artificial Sequence
  Description of Artificial Sequence: Synthetic oligonucleotide
ccuugcaugacau

SEQ ID NO: 131038 - RNA, 14 nt, Artificial Sequence
  Description of Artificial Sequence: Synthetic oligonucleotide
ugaauuuguauaug

SEQ ID NO: 131039 - RNA, 12 nt, Artificial Sequence
  Description of Artificial Sequence: Synthetic oligonucleotide
gaauccuaguag

SEQ ID NO: 131040 - RNA, 10 nt, Artificial Sequence
  Description of Artificial Sequence: Synthetic oligonucleotide
gaaagggaag

SEQ ID NO: 131041 - RNA, 11 nt, Artificial Sequence
  Description of Artificial Sequence: Synthetic oligonucleotide
uaucggcaugc

SEQ ID NO: 131042 - RNA, 12 nt, Artificial Sequence
  Description of Artificial Sequence: Synthetic oligonucleotide
caccucauagua

SEQ ID NO: 131043 - RNA, 11 nt, Artificial Sequence
  Description of Artificial Sequence: Synthetic oligonucleotide
ccagaauugcc

SEQ ID NO: 131044 - RNA, 11 nt, Artificial Sequence
  Description of Artificial Sequence: Synthetic oligonucleotide
uggugaucugg

SEQ ID NO: 131045 - RNA, 12 nt, Artificial Sequence
  Description of Artificial Sequence: Synthetic oligonucleotide
gaucuggguaau

SEQ ID NO: 131046 - RNA, 12 nt, Artificial Sequence
  Description of Artificial Sequence: Synthetic oligonucleotide
ggaugugaugaa

SEQ ID NO: 131047 - RNA, 12 nt, Artificial Sequence
  Description of Artificial Sequence: Synthetic oligonucleotide
cauuuccacagc

SEQ ID NO: 131048 - RNA, 11 nt, Artificial Sequence
  Description of Artificial Sequence: Synthetic oligonucleotide
acagcuacacc

SEQ ID NO: 131049 - RNA, 12 nt, Artificial Sequence
  Description of Artificial Sequence: Synthetic oligonucleotide
ugcaguucuuac

SEQ ID NO: 131050 - RNA, 12 nt, Artificial Sequence
  Description of Artificial Sequence: Synthetic oligonucleotide
acgagaagaaga

SEQ ID NO: 131051 - RNA, 12 nt, Artificial Sequence
  Description of Artificial Sequence: Synthetic oligonucleotide
cgagaagaagau

SEQ ID NO: 131052 - RNA, 15 nt, Artificial Sequence
  Description of Artificial Sequence: Synthetic oligonucleotide
aagaagaucauuuac

SEQ ID NO: 131053 - RNA, 11 nt, Artificial Sequence
  Description of Artificial Sequence: Synthetic oligonucleotide
agaggaagagg

SEQ ID NO: 131054 - RNA, 12 nt, Artificial Sequence
  Description of Artificial Sequence: Synthetic oligonucleotide
gaggaagaggug

SEQ ID NO: 131055 - RNA, 13 nt, Artificial Sequence
  Description of Artificial Sequence: Synthetic oligonucleotide
cuacuuugagggc

SEQ ID NO: 131056 - RNA, 12 nt, Artificial Sequence
  Description of Artificial Sequence: Synthetic oligonucleotide
agggcaucuccu

SEQ ID NO: 131057 - RNA, 10 nt, Artificial Sequence
  Description of Artificial Sequence: Synthetic oligonucleotide
ggagugauau

SEQ ID NO: 131058 - RNA, 11 nt, Artificial Sequence
  Description of Artificial Sequence: Synthetic oligonucleotide
gagugauaugg

SEQ ID NO: 131059 - RNA, 12 nt, Artificial Sequence
  Description of Artificial Sequence: Synthetic oligonucleotide
ugcaguaaagau

SEQ ID NO: 131060 - RNA, 13 nt, Artificial Sequence
  Description of Artificial Sequence: Synthetic oligonucleotide
aguaaagauccua

SEQ ID NO: 131061 - RNA, 12 nt, Artificial Sequence
  Description of Artificial Sequence: Synthetic oligonucleotide
ugacaaaggaca

SEQ ID NO: 131062 - RNA, 13 nt, Artificial Sequence
  Description of Artificial Sequence: Synthetic oligonucleotide
gcaauugugaccc

SEQ ID NO: 131063 - RNA, 12 nt, Artificial Sequence
  Description of Artificial Sequence: Synthetic oligonucleotide
aacaucauccau

SEQ ID NO: 131064 - RNA, 12 nt, Artificial Sequence
  Description of Artificial Sequence: Synthetic oligonucleotide
ugaaauccaaca

SEQ ID NO: 131065 - RNA, 15 nt, Artificial Sequence
  Description of Artificial Sequence: Synthetic oligonucleotide
aacaauauauuucuc

SEQ ID NO: 131066 - RNA, 14 nt, Artificial Sequence
  Description of Artificial Sequence: Synthetic oligonucleotide
aacaguaaagucac

SEQ ID NO: 131067 - RNA, 14 nt, Artificial Sequence
  Description of Artificial Sequence: Synthetic oligonucleotide
ugugaagaaaguaa

SEQ ID NO: 131068 - RNA, 13 nt, Artificial Sequence
  Description of Artificial Sequence: Synthetic oligonucleotide
cuuccgagccauc

SEQ ID NO: 131069 - RNA, 12 nt, Artificial Sequence
  Description of Artificial Sequence: Synthetic oligonucleotide
aauggagguuga

SEQ ID NO: 131070 - RNA, 12 nt, Artificial Sequence
  Description of Artificial Sequence: Synthetic oligonucleotide
ggagguugaaua

SEQ ID NO: 131071 - RNA, 13 nt, Artificial Sequence
  Description of Artificial Sequence: Synthetic oligonucleotide
auuuugaguuuuc

SEQ ID NO: 131072 - RNA, 12 nt, Artificial Sequence
  Description of Artificial Sequence: Synthetic oligonucleotide
uauccuguuugu

SEQ ID NO: 131073 - RNA, 11 nt, Artificial Sequence
  Description of Artificial Sequence: Synthetic oligonucleotide
ccuguuuguuc

SEQ ID NO: 131074 - RNA, 10 nt, Artificial Sequence
  Description of Artificial Sequence: Synthetic oligonucleotide
cucuacagcc

SEQ ID NO: 131075 - RNA, 12 nt, Artificial Sequence
  Description of Artificial Sequence: Synthetic oligonucleotide
ucuuccauagcu

SEQ ID NO: 131076 - RNA, 12 nt, Artificial Sequence
  Description of Artificial Sequence: Synthetic oligonucleotide
auaaucuuccug

SEQ ID NO: 131077 - RNA, 12 nt, Artificial Sequence
  Description of Artificial Sequence: Synthetic oligonucleotide
uaaucuuccugu

SEQ ID NO: 131078 - RNA, 12 nt, Artificial Sequence
  Description of Artificial Sequence: Synthetic oligonucleotide
cuucaugacuug

SEQ ID NO: 131079 - RNA, 12 nt, Artificial Sequence
  Description of Artificial Sequence: Synthetic oligonucleotide
aagagggagaga

SEQ ID NO: 131080 - RNA, 12 nt, Artificial Sequence
  Description of Artificial Sequence: Synthetic oligonucleotide
cgucuccuacca

SEQ ID NO: 131081 - RNA, 12 nt, Artificial Sequence
  Description of Artificial Sequence: Synthetic oligonucleotide
gaucaaucggcc

SEQ ID NO: 131082 - RNA, 12 nt, Artificial Sequence
  Description of Artificial Sequence: Synthetic oligonucleotide
ggacgaacaucc

SEQ ID NO: 131083 - RNA, 11 nt, Artificial Sequence
  Description of Artificial Sequence: Synthetic oligonucleotide
agggucggaac

SEQ ID NO: 131084 - RNA, 10 nt, Artificial Sequence
  Description of Artificial Sequence: Synthetic oligonucleotide
ucggaaccca

SEQ ID NO: 131085 - RNA, 11 nt, Artificial Sequence
  Description of Artificial Sequence: Synthetic oligonucleotide
acccaagcuua

SEQ ID NO: 131086 - RNA, 14 nt, Artificial Sequence
  Description of Artificial Sequence: Synthetic oligonucleotide
gaacuuuaagcaac

SEQ ID NO: 131087 - RNA, 11 nt, Artificial Sequence
  Description of Artificial Sequence: Synthetic oligonucleotide
acuauucagug

SEQ ID NO: 131088 - RNA, 11 nt, Artificial Sequence
  Description of Artificial Sequence: Synthetic oligonucleotide
cuauucagugg

SEQ ID NO: 131089 - RNA, 13 nt, Artificial Sequence
  Description of Artificial Sequence: Synthetic oligonucleotide
aaacacagauaac

SEQ ID NO: 131090 - RNA, 12 nt, Artificial Sequence
  Description of Artificial Sequence: Synthetic oligonucleotide
cuuaagaaaaga

SEQ ID NO: 131091 - RNA, 12 nt, Artificial Sequence
  Description of Artificial Sequence: Synthetic oligonucleotide
cugaaggagugu

SEQ ID NO: 131092 - RNA, 10 nt, Artificial Sequence
  Description of Artificial Sequence: Synthetic oligonucleotide
ucaccgcggg

SEQ ID NO: 131093 - RNA, 14 nt, Artificial Sequence
  Description of Artificial Sequence: Synthetic oligonucleotide
agcagaaauaagcg

SEQ ID NO: 131094 - RNA, 12 nt, Artificial Sequence
  Description of Artificial Sequence: Synthetic oligonucleotide
aagcgugccguu

SEQ ID NO: 131095 - RNA, 12 nt, Artificial Sequence
  Description of Artificial Sequence: Synthetic oligonucleotide
agaaacagucac

SEQ ID NO: 131096 - RNA, 12 nt, Artificial Sequence
  Description of Artificial Sequence: Synthetic oligonucleotide
agaggaagaagg

SEQ ID NO: 131097 - RNA, 14 nt, Artificial Sequence
  Description of Artificial Sequence: Synthetic oligonucleotide
uguauucaaaauau

SEQ ID NO: 131098 - RNA, 13 nt, Artificial Sequence
  Description of Artificial Sequence: Synthetic oligonucleotide
auuuuccucccuu

SEQ ID NO: 131099 - RNA, 13 nt, Artificial Sequence
  Description of Artificial Sequence: Synthetic oligonucleotide
caaagaaagauag

SEQ ID NO: 131100 - RNA, 12 nt, Artificial Sequence
  Description of Artificial Sequence: Synthetic oligonucleotide
aagaaagauaga

SEQ ID NO: 131101 - RNA, 13 nt, Artificial Sequence
  Description of Artificial Sequence: Synthetic oligonucleotide
gaaagcauuuguu

SEQ ID NO: 131102 - RNA, 13 nt, Artificial Sequence
  Description of Artificial Sequence: Synthetic oligonucleotide
ugaguuaaacgaa

SEQ ID NO: 131103 - RNA, 12 nt, Artificial Sequence
  Description of Artificial Sequence: Synthetic oligonucleotide
acugauacagaa

SEQ ID NO: 131104 - RNA, 12 nt, Artificial Sequence
  Description of Artificial Sequence: Synthetic oligonucleotide
auauuauauaua

SEQ ID NO: 131105 - RNA, 12 nt, Artificial Sequence
  Description of Artificial Sequence: Synthetic oligonucleotide
auuauauauaua

SEQ ID NO: 131106 - RNA, 12 nt, Artificial Sequence
  Description of Artificial Sequence: Synthetic oligonucleotide
ucacuggaugua

SEQ ID NO: 131107 - RNA, 12 nt, Artificial Sequence
  Description of Artificial Sequence: Synthetic oligonucleotide
cagggaagagga

SEQ ID NO: 131108 - RNA, 15 nt, Artificial Sequence
  Description of Artificial Sequence: Synthetic oligonucleotide
augaucuuuuuuuug

SEQ ID NO: 131109 - RNA, 11 nt, Artificial Sequence
  Description of Artificial Sequence: Synthetic oligonucleotide
aguucacggcc

SEQ ID NO: 131110 - RNA, 13 nt, Artificial Sequence
  Description of Artificial Sequence: Synthetic oligonucleotide
caccaucacacca

SEQ ID NO: 131111 - RNA, 11 nt, Artificial Sequence
  Description of Artificial Sequence: Synthetic oligonucleotide
ccugcggguuu

SEQ ID NO: 131112 - RNA, 10 nt, Artificial Sequence
  Description of Artificial Sequence: Synthetic oligonucleotide
auccaguuug

SEQ ID NO: 131113 - RNA, 13 nt, Artificial Sequence
  Description of Artificial Sequence: Synthetic oligonucleotide
guuaaggacuucu

SEQ ID NO: 131114 - RNA, 13 nt, Artificial Sequence
  Description of Artificial Sequence: Synthetic oligonucleotide
cagugggacagag

SEQ ID NO: 131115 - RNA, 14 nt, Artificial Sequence
  Description of Artificial Sequence: Synthetic oligonucleotide
aauuuguuauugug

SEQ ID NO: 131116 - RNA, 13 nt, Artificial Sequence
  Description of Artificial Sequence: Synthetic oligonucleotide
uucaaaugcauuu

SEQ ID NO: 131117 - RNA, 10 nt, Artificial Sequence
  Description of Artificial Sequence: Synthetic oligonucleotide
caggaaagcc

SEQ ID NO: 131118 - RNA, 11 nt, Artificial Sequence
  Description of Artificial Sequence: Synthetic oligonucleotide
aggaaagcccu

SEQ ID NO: 131119 - RNA, 12 nt, Artificial Sequence
  Description of Artificial Sequence: Synthetic oligonucleotide
cccagcauggcc

SEQ ID NO: 131120 - RNA, 11 nt, Artificial Sequence
  Description of Artificial Sequence: Synthetic oligonucleotide
cuucucccuga

SEQ ID NO: 131121 - RNA, 12 nt, Artificial Sequence
  Description of Artificial Sequence: Synthetic oligonucleotide
gaagaagcccuu

SEQ ID NO: 131122 - RNA, 12 nt, Artificial Sequence
  Description of Artificial Sequence: Synthetic oligonucleotide
agaagcccuuca

SEQ ID NO: 131123 - RNA, 11 nt, Artificial Sequence
  Description of Artificial Sequence: Synthetic oligonucleotide
gcccuucagcg

SEQ ID NO: 131124 - RNA, 11 nt, Artificial Sequence
  Description of Artificial Sequence: Synthetic oligonucleotide
ccuucagcggc

SEQ ID NO: 131125 - RNA, 12 nt, Artificial Sequence
  Description of Artificial Sequence: Synthetic oligonucleotide
ucagcggccagu

SEQ ID NO: 131126 - RNA, 12 nt, Artificial Sequence
  Description of Artificial Sequence: Synthetic oligonucleotide
ugaaaagcuccg

SEQ ID NO: 131127 - RNA, 11 nt, Artificial Sequence
  Description of Artificial Sequence: Synthetic oligonucleotide
aaaagcuccgg

SEQ ID NO: 131128 - RNA, 13 nt, Artificial Sequence
  Description of Artificial Sequence: Synthetic oligonucleotide
agucaacagucug

SEQ ID NO: 131129 - RNA, 13 nt, Artificial Sequence
  Description of Artificial Sequence: Synthetic oligonucleotide
cagaguucaaaag

SEQ ID NO: 131130 - RNA, 13 nt, Artificial Sequence
  Description of Artificial Sequence: Synthetic oligonucleotide
agaguucaaaagc

SEQ ID NO: 131131 - RNA, 12 nt, Artificial Sequence
  Description of Artificial Sequence: Synthetic oligonucleotide
uucaaaagcccu

SEQ ID NO: 131132 - RNA, 12 nt, Artificial Sequence
  Description of Artificial Sequence: Synthetic oligonucleotide
ucaaaagcccuu

SEQ ID NO: 131133 - RNA, 12 nt, Artificial Sequence
  Description of Artificial Sequence: Synthetic oligonucleotide
aaaagcccuuca

SEQ ID NO: 131134 - RNA, 12 nt, Artificial Sequence
  Description of Artificial Sequence: Synthetic oligonucleotide
aaagcccuucag

SEQ ID NO: 131135 - RNA, 13 nt, Artificial Sequence
  Description of Artificial Sequence: Synthetic oligonucleotide
gugaagccgcucg

SEQ ID NO: 131136 - RNA, 12 nt, Artificial Sequence
  Description of Artificial Sequence: Synthetic oligonucleotide
cacgccagucaa

SEQ ID NO: 131137 - RNA, 13 nt, Artificial Sequence
  Description of Artificial Sequence: Synthetic oligonucleotide
uucuuggugcgug

SEQ ID NO: 131138 - RNA, 14 nt, Artificial Sequence
  Description of Artificial Sequence: Synthetic oligonucleotide
auuggauucaucag

SEQ ID NO: 131139 - RNA, 13 nt, Artificial Sequence
  Description of Artificial Sequence: Synthetic oligonucleotide
uggaauaccuaag

SEQ ID NO: 131140 - RNA, 12 nt, Artificial Sequence
  Description of Artificial Sequence: Synthetic oligonucleotide
auuugaggcuca

SEQ ID NO: 131141 - RNA, 11 nt, Artificial Sequence
  Description of Artificial Sequence: Synthetic oligonucleotide
ucuacaauugg

SEQ ID NO: 131142 - RNA, 12 nt, Artificial Sequence
  Description of Artificial Sequence: Synthetic oligonucleotide
uaguuaggagcc

SEQ ID NO: 131143 - RNA, 13 nt, Artificial Sequence
  Description of Artificial Sequence: Synthetic oligonucleotide
agucaauauccac

SEQ ID NO: 131144 - RNA, 13 nt, Artificial Sequence
  Description of Artificial Sequence: Synthetic oligonucleotide
auguucagucaca

SEQ ID NO: 131145 - RNA, 12 nt, Artificial Sequence
  Description of Artificial Sequence: Synthetic oligonucleotide
acacacacauac

SEQ ID NO: 131146 - RNA, 12 nt, Artificial Sequence
  Description of Artificial Sequence: Synthetic oligonucleotide
uuccuuuugcuu

SEQ ID NO: 131147 - RNA, 16 nt, Artificial Sequence
  Description of Artificial Sequence: Synthetic oligonucleotide
uuuuaaaguaauuuuu

SEQ ID NO: 131148 - RNA, 13 nt, Artificial Sequence
  Description of Artificial Sequence: Synthetic oligonucleotide
caacagucaaugg

SEQ ID NO: 131149 - RNA, 13 nt, Artificial Sequence
  Description of Artificial Sequence: Synthetic oligonucleotide
ucgacaaaccaau

SEQ ID NO: 131150 - RNA, 12 nt, Artificial Sequence
  Description of Artificial Sequence: Synthetic oligonucleotide
acugcuaccacu

SEQ ID NO: 131151 - RNA, 13 nt, Artificial Sequence
  Description of Artificial Sequence: Synthetic oligonucleotide
gcaagcggucuua

SEQ ID NO: 131152 - RNA, 13 nt, Artificial Sequence
  Description of Artificial Sequence: Synthetic oligonucleotide
ggucuuaccggcu

SEQ ID NO: 131153 - RNA, 11 nt, Artificial Sequence
  Description of Artificial Sequence: Synthetic oligonucleotide
gauggguuacc

SEQ ID NO: 131154 - RNA, 11 nt, Artificial Sequence
  Description of Artificial Sequence: Synthetic oligonucleotide
guuaccugcga

SEQ ID NO: 131155 - RNA, 12 nt, Artificial Sequence
  Description of Artificial Sequence: Synthetic oligonucleotide
aaucuugcugag

SEQ ID NO: 131156 - RNA, 13 nt, Artificial Sequence
  Description of Artificial Sequence: Synthetic oligonucleotide
agcauaaaacagu

SEQ ID NO: 131157 - RNA, 12 nt, Artificial Sequence
  Description of Artificial Sequence: Synthetic oligonucleotide
guccuuuauccu

SEQ ID NO: 131158 - RNA, 12 nt, Artificial Sequence
  Description of Artificial Sequence: Synthetic oligonucleotide
caacgcaaguug

SEQ ID NO: 131159 - RNA, 13 nt, Artificial Sequence
  Description of Artificial Sequence: Synthetic oligonucleotide
aaacugaaaccau

SEQ ID NO: 131160 - RNA, 14 nt, Artificial Sequence
  Description of Artificial Sequence: Synthetic oligonucleotide
acuuuguuaaauau

SEQ ID NO: 131161 - RNA, 14 nt, Artificial Sequence
  Description of Artificial Sequence: Synthetic oligonucleotide
guauauuaaaaguu

SEQ ID NO: 131162 - RNA, 13 nt, Artificial Sequence
  Description of Artificial Sequence: Synthetic oligonucleotide
guuuugacuuaac

SEQ ID NO: 131163 - RNA, 13 nt, Artificial Sequence
  Description of Artificial Sequence: Synthetic oligonucleotide
gcaaacucagcac

SEQ ID NO: 131164 - RNA, 11 nt, Artificial Sequence
  Description of Artificial Sequence: Synthetic oligonucleotide
ugcugaccuca

SEQ ID NO: 131165 - RNA, 14 nt, Artificial Sequence
  Description of Artificial Sequence: Synthetic oligonucleotide
uuuauucagaucgc

SEQ ID NO: 131166 - RNA, 13 nt, Artificial Sequence
  Description of Artificial Sequence: Synthetic oligonucleotide
aggguucugggau

SEQ ID NO: 131167 - RNA, 15 nt, Artificial Sequence
  Description of Artificial Sequence: Synthetic oligonucleotide
auauuggaaauuaug

SEQ ID NO: 131168 - RNA, 13 nt, Artificial Sequence
  Description of Artificial Sequence: Synthetic oligonucleotide
auggaagcacuag

SEQ ID NO: 131169 - RNA, 13 nt, Artificial Sequence
  Description of Artificial Sequence: Synthetic oligonucleotide
guuuuuaugugga

SEQ ID NO: 131170 - RNA, 12 nt, Artificial Sequence
  Description of Artificial Sequence: Synthetic oligonucleotide
ggaauugguaga

SEQ ID NO: 131171 - RNA, 13 nt, Artificial Sequence
  Description of Artificial Sequence: Synthetic oligonucleotide
uuagacuuggaga

SEQ ID NO: 131172 - RNA, 13 nt, Artificial Sequence
  Description of Artificial Sequence: Synthetic oligonucleotide
uuacaguauucca

SEQ ID NO: 131173 - RNA, 15 nt, Artificial Sequence
  Description of Artificial Sequence: Synthetic oligonucleotide
ccacugaugaauuaa

SEQ ID NO: 131174 - RNA, 12 nt, Artificial Sequence
  Description of Artificial Sequence: Synthetic oligonucleotide
ccacaucaucac

SEQ ID NO: 131175 - RNA, 13 nt, Artificial Sequence
  Description of Artificial Sequence: Synthetic oligonucleotide
cucaccaaacaga

SEQ ID NO: 131176 - RNA, 12 nt, Artificial Sequence
  Description of Artificial Sequence: Synthetic oligonucleotide
ggaacaugaugg

SEQ ID NO: 131177 - RNA, 12 nt, Artificial Sequence
  Description of Artificial Sequence: Synthetic oligonucleotide
cauguagacugc

SEQ ID NO: 131178 - RNA, 13 nt, Artificial Sequence
  Description of Artificial Sequence: Synthetic oligonucleotide
ggaucuauuuaug

SEQ ID NO: 131179 - RNA, 12 nt, Artificial Sequence
  Description of Artificial Sequence: Synthetic oligonucleotide
gcacuauuauca

SEQ ID NO: 131180 - RNA, 11 nt, Artificial Sequence
  Description of Artificial Sequence: Synthetic oligonucleotide
aucaguucugc

SEQ ID NO: 131181 - RNA, 13 nt, Artificial Sequence
  Description of Artificial Sequence: Synthetic oligonucleotide
agauuaaaccuac

SEQ ID NO: 131182 - RNA, 13 nt, Artificial Sequence
  Description of Artificial Sequence: Synthetic oligonucleotide
auaaaauccuucu

SEQ ID NO: 131183 - RNA, 12 nt, Artificial Sequence
  Description of Artificial Sequence: Synthetic oligonucleotide
aaugcuguagac

SEQ ID NO: 131184 - RNA, 13 nt, Artificial Sequence
  Description of Artificial Sequence: Synthetic oligonucleotide
uugauaggaauag

SEQ ID NO: 131185 - RNA, 11 nt, Artificial Sequence
  Description of Artificial Sequence: Synthetic oligonucleotide
aauggcccuga

SEQ ID NO: 131186 - RNA, 11 nt, Artificial Sequence
  Description of Artificial Sequence: Synthetic oligonucleotide
uuccucaagca

SEQ ID NO: 131187 - RNA, 10 nt, Artificial Sequence
  Description of Artificial Sequence: Synthetic oligonucleotide
guucagccca

SEQ ID NO: 131188 - RNA, 11 nt, Artificial Sequence
  Description of Artificial Sequence: Synthetic oligonucleotide
gcugcugaacc

SEQ ID NO: 131189 - RNA, 12 nt, Artificial Sequence
  Description of Artificial Sequence: Synthetic oligonucleotide
aaguucucuuca

SEQ ID NO: 131190 - RNA, 11 nt, Artificial Sequence
  Description of Artificial Sequence: Synthetic oligonucleotide
ccagccuagag

SEQ ID NO: 131191 - RNA, 13 nt, Artificial Sequence
  Description of Artificial Sequence: Synthetic oligonucleotide
cucugugaagugu

SEQ ID NO: 131192 - RNA, 14 nt, Artificial Sequence
  Description of Artificial Sequence: Synthetic oligonucleotide
ugagaaaauuucaa

SEQ ID NO: 131193 - RNA, 11 nt, Artificial Sequence
  Description of Artificial Sequence: Synthetic oligonucleotide
aauccuccuga

SEQ ID NO: 131194 - RNA, 12 nt, Artificial Sequence
  Description of Artificial Sequence: Synthetic oligonucleotide
gugacaucauau

SEQ ID NO: 131195 - RNA, 13 nt, Artificial Sequence
  Description of Artificial Sequence: Synthetic oligonucleotide
aaucuucaucaua

SEQ ID NO: 131196 - RNA, 13 nt, Artificial Sequence
  Description of Artificial Sequence: Synthetic oligonucleotide
gacuagcuauuaa

SEQ ID NO: 131197 - RNA, 14 nt, Artificial Sequence
  Description of Artificial Sequence: Synthetic oligonucleotide
ucucuacuaaaaau

SEQ ID NO: 131198 - RNA, 12 nt, Artificial Sequence
  Description of Artificial Sequence: Synthetic oligonucleotide
ucuaucucgccu

SEQ ID NO: 131199 - RNA, 13 nt, Artificial Sequence
  Description of Artificial Sequence: Synthetic oligonucleotide
cuucgguccaguu

SEQ ID NO: 131200 - RNA, 11 nt, Artificial Sequence
  Description of Artificial Sequence: Synthetic oligonucleotide
gauguagccgc

SEQ ID NO: 131201 - RNA, 12 nt, Artificial Sequence
  Description of Artificial Sequence: Synthetic oligonucleotide
ugaggagacuug

SEQ ID NO: 131202 - RNA, 12 nt, Artificial Sequence
  Description of Artificial Sequence: Synthetic oligonucleotide
gaguagugagga

SEQ ID NO: 131203 - RNA, 14 nt, Artificial Sequence
  Description of Artificial Sequence: Synthetic oligonucleotide
cagaugaguacaaa

SEQ ID NO: 131204 - RNA, 13 nt, Artificial Sequence
  Description of Artificial Sequence: Synthetic oligonucleotide
guuguuaaugggc

SEQ ID NO: 131205 - RNA, 13 nt, Artificial Sequence
  Description of Artificial Sequence: Synthetic oligonucleotide
uuuuuaauuuauu

SEQ ID NO: 131206 - RNA, 12 nt, Artificial Sequence
  Description of Artificial Sequence: Synthetic oligonucleotide
uauuuaaauaug

SEQ ID NO: 131207 - RNA, 13 nt, Artificial Sequence
  Description of Artificial Sequence: Synthetic oligonucleotide
uauccuuuguuuc

SEQ ID NO: 131208 - RNA, 14 nt, Artificial Sequence
  Description of Artificial Sequence: Synthetic oligonucleotide
cgucuaaguguuug

SEQ ID NO: 131209 - RNA, 12 nt, Artificial Sequence
  Description of Artificial Sequence: Synthetic oligonucleotide
accugugacaaa

SEQ ID NO: 131210 - RNA, 13 nt, Artificial Sequence
  Description of Artificial Sequence: Synthetic oligonucleotide
ccaggcugaauua

SEQ ID NO: 131211 - RNA, 14 nt, Artificial Sequence
  Description of Artificial Sequence: Synthetic oligonucleotide
gucauucuuacaau

SEQ ID NO: 131212 - RNA, 15 nt, Artificial Sequence
  Description of Artificial Sequence: Synthetic oligonucleotide
ucauucuuacaauug

SEQ ID NO: 131213 - RNA, 12 nt, Artificial Sequence
  Description of Artificial Sequence: Synthetic oligonucleotide
cagagaguguac

SEQ ID NO: 131214 - RNA, 12 nt, Artificial Sequence
  Description of Artificial Sequence: Synthetic oligonucleotide
agaacucagcag

SEQ ID NO: 131215 - RNA, 13 nt, Artificial Sequence
  Description of Artificial Sequence: Synthetic oligonucleotide
uuuauuuucagua

SEQ ID NO: 131216 - RNA, 12 nt, Artificial Sequence
  Description of Artificial Sequence: Synthetic oligonucleotide
ucuuaaauggaa

SEQ ID NO: 131217 - RNA, 13 nt, Artificial Sequence
  Description of Artificial Sequence: Synthetic oligonucleotide
ugccuaaaauugu

SEQ ID NO: 131218 - RNA, 12 nt, Artificial Sequence
  Description of Artificial Sequence: Synthetic oligonucleotide
agacugugagcu

SEQ ID NO: 131219 - RNA, 14 nt, Artificial Sequence
  Description of Artificial Sequence: Synthetic oligonucleotide
ugcuuuuuauuaau

SEQ ID NO: 131220 - RNA, 13 nt, Artificial Sequence
  Description of Artificial Sequence: Synthetic oligonucleotide
cucuucuuacauu

SEQ ID NO: 131221 - RNA, 15 nt, Artificial Sequence
  Description of Artificial Sequence: Synthetic oligonucleotide
cauuuguaaaaaugu

SEQ ID NO: 131222 - RNA, 15 nt, Artificial Sequence
  Description of Artificial Sequence: Synthetic oligonucleotide
aucuuaauucauauu

SEQ ID NO: 131223 - RNA, 13 nt, Artificial Sequence
  Description of Artificial Sequence: Synthetic oligonucleotide
gaacuaaucauga

SEQ ID NO: 131224 - RNA, 12 nt, Artificial Sequence
  Description of Artificial Sequence: Synthetic oligonucleotide
ucugcucuuggg

SEQ ID NO: 131225 - RNA, 13 nt, Artificial Sequence
  Description of Artificial Sequence: Synthetic oligonucleotide
caguagcuuugag

SEQ ID NO: 131226 - RNA, 14 nt, Artificial Sequence
  Description of Artificial Sequence: Synthetic oligonucleotide
cacguaauauuuca

SEQ ID NO: 131227 - RNA, 13 nt, Artificial Sequence
  Description of Artificial Sequence: Synthetic oligonucleotide
uauucucuucacu

SEQ ID NO: 131228 - RNA, 14 nt, Artificial Sequence
  Description of Artificial Sequence: Synthetic oligonucleotide
cuaaugcuaagaaa

SEQ ID NO: 131229 - RNA, 12 nt, Artificial Sequence
  Description of Artificial Sequence: Synthetic oligonucleotide
gcugaaaaucaa

SEQ ID NO: 131230 - RNA, 14 nt, Artificial Sequence
  Description of Artificial Sequence: Synthetic oligonucleotide
aauaugauuacuuu

SEQ ID NO: 131231 - RNA, 14 nt, Artificial Sequence
  Description of Artificial Sequence: Synthetic oligonucleotide
cauuuuguucuaca

SEQ ID NO: 131232 - RNA, 12 nt, Artificial Sequence
  Description of Artificial Sequence: Synthetic oligonucleotide
cccgggacucuc

SEQ ID NO: 131233 - RNA, 14 nt, Artificial Sequence
  Description of Artificial Sequence: Synthetic oligonucleotide
ccuuuaaaguaaag

SEQ ID NO: 131234 - RNA, 13 nt, Artificial Sequence
  Description of Artificial Sequence: Synthetic oligonucleotide
ucuggaagccugg

SEQ ID NO: 131235 - RNA, 14 nt, Artificial Sequence
  Description of Artificial Sequence: Synthetic oligonucleotide
aaaacaaaagagag

SEQ ID NO: 131236 - RNA, 13 nt, Artificial Sequence
  Description of Artificial Sequence: Synthetic oligonucleotide
aucaguuaugccg

SEQ ID NO: 131237 - RNA, 13 nt, Artificial Sequence
  Description of Artificial Sequence: Synthetic oligonucleotide
uaaaagaagucca

SEQ ID NO: 131238 - RNA, 11 nt, Artificial Sequence
  Description of Artificial Sequence: Synthetic oligonucleotide
aggugagguua

SEQ ID NO: 131239 - RNA, 11 nt, Artificial Sequence
  Description of Artificial Sequence: Synthetic oligonucleotide
gggaagaggac

SEQ ID NO: 131240 - RNA, 13 nt, Artificial Sequence
  Description of Artificial Sequence: Synthetic oligonucleotide
aagcaaguauugu

SEQ ID NO: 131241 - RNA, 12 nt, Artificial Sequence
  Description of Artificial Sequence: Synthetic oligonucleotide
auuguagcacuc

SEQ ID NO: 131242 - RNA, 14 nt, Artificial Sequence
  Description of Artificial Sequence: Synthetic oligonucleotide
acaaaaccacaaau

SEQ ID NO: 131243 - RNA, 12 nt, Artificial Sequence
  Description of Artificial Sequence: Synthetic oligonucleotide
uaagcccauaca

SEQ ID NO: 131244 - RNA, 11 nt, Artificial Sequence
  Description of Artificial Sequence: Synthetic oligonucleotide
agcccauacag

SEQ ID NO: 131245 - RNA, 12 nt, Artificial Sequence
  Description of Artificial Sequence: Synthetic oligonucleotide
cagaaaccuucc

SEQ ID NO: 131246 - RNA, 10 nt, Artificial Sequence
  Description of Artificial Sequence: Synthetic oligonucleotide
guauaccuac

SEQ ID NO: 131247 - RNA, 13 nt, Artificial Sequence
  Description of Artificial Sequence: Synthetic oligonucleotide
gccaguuuucgga

SEQ ID NO: 131248 - RNA, 9 nt, Artificial Sequence
  Description of Artificial Sequence: Synthetic oligonucleotide
ggaacaggg

SEQ ID NO: 131249 - RNA, 13 nt, Artificial Sequence
  Description of Artificial Sequence: Synthetic oligonucleotide
uuaacuuuccagu

SEQ ID NO: 131250 - RNA, 14 nt, Artificial Sequence
  Description of Artificial Sequence: Synthetic oligonucleotide
aaaguuugguuuug

SEQ ID NO: 131251 - RNA, 12 nt, Artificial Sequence
  Description of Artificial Sequence: Synthetic oligonucleotide
cuucccacugua

SEQ ID NO: 131252 - RNA, 13 nt, Artificial Sequence
  Description of Artificial Sequence: Synthetic oligonucleotide
ugauaccauauga

SEQ ID NO: 131253 - RNA, 11 nt, Artificial Sequence
  Description of Artificial Sequence: Synthetic oligonucleotide
aacaugggcug

SEQ ID NO: 131254 - RNA, 13 nt, Artificial Sequence
  Description of Artificial Sequence: Synthetic oligonucleotide
caacuuuuucaua

SEQ ID NO: 131255 - RNA, 12 nt, Artificial Sequence
  Description of Artificial Sequence: Synthetic oligonucleotide
caugaggccgga

SEQ ID NO: 131256 - RNA, 11 nt, Artificial Sequence
  Description of Artificial Sequence: Synthetic oligonucleotide
acugcauuugu

SEQ ID NO: 131257 - RNA, 13 nt, Artificial Sequence
  Description of Artificial Sequence: Synthetic oligonucleotide
aauguuuacuacc

SEQ ID NO: 131258 - RNA, 15 nt, Artificial Sequence
  Description of Artificial Sequence: Synthetic oligonucleotide
aauuuuuugaugaaa

SEQ ID NO: 131259 - RNA, 14 nt, Artificial Sequence
  Description of Artificial Sequence: Synthetic oligonucleotide
cagugugugaauuu

SEQ ID NO: 131260 - RNA, 13 nt, Artificial Sequence
  Description of Artificial Sequence: Synthetic oligonucleotide
gagcaauguaugu

SEQ ID NO: 131261 - RNA, 14 nt, Artificial Sequence
  Description of Artificial Sequence: Synthetic oligonucleotide
aaagcacauauaua

SEQ ID NO: 131262 - RNA, 14 nt, Artificial Sequence
  Description of Artificial Sequence: Synthetic oligonucleotide
guaauaguuucucc

SEQ ID NO: 131263 - RNA, 13 nt, Artificial Sequence
  Description of Artificial Sequence: Synthetic oligonucleotide
aguuucuccaaau

SEQ ID NO: 131264 - RNA, 13 nt, Artificial Sequence
  Description of Artificial Sequence: Synthetic oligonucleotide
uacuuccuagaaa

SEQ ID NO: 131265 - RNA, 13 nt, Artificial Sequence
  Description of Artificial Sequence: Synthetic oligonucleotide
uacaccauauaug

SEQ ID NO: 131266 - RNA, 14 nt, Artificial Sequence
  Description of Artificial Sequence: Synthetic oligonucleotide
auauaugaauggag

SEQ ID NO: 131267 - RNA, 13 nt, Artificial Sequence
  Description of Artificial Sequence: Synthetic oligonucleotide
acgagaagaagau

SEQ ID NO: 131268 - RNA, 13 nt, Artificial Sequence
  Description of Artificial Sequence: Synthetic oligonucleotide
ucauuuacaggga

SEQ ID NO: 131269 - RNA, 13 nt, Artificial Sequence
  Description of Artificial Sequence: Synthetic oligonucleotide
cauuuacagggac

SEQ ID NO: 131270 - RNA, 10 nt, Artificial Sequence
  Description of Artificial Sequence: Synthetic oligonucleotide
agggaccuga

SEQ ID NO: 131271 - RNA, 14 nt, Artificial Sequence
  Description of Artificial Sequence: Synthetic oligonucleotide
uguuugacugcauc

SEQ ID NO: 131272 - RNA, 13 nt, Artificial Sequence
  Description of Artificial Sequence: Synthetic oligonucleotide
uuugacugcaucg

SEQ ID NO: 131273 - RNA, 12 nt, Artificial Sequence
  Description of Artificial Sequence: Synthetic oligonucleotide
gaguucacaggg

SEQ ID NO: 131274 - RNA, 13 nt, Artificial Sequence
  Description of Artificial Sequence: Synthetic oligonucleotide
ggcaccucugucc

SEQ ID NO: 131275 - RNA, 15 nt, Artificial Sequence
  Description of Artificial Sequence: Synthetic oligonucleotide
gguuugucuuuuuaa

SEQ ID NO: 131276 - RNA, 14 nt, Artificial Sequence
  Description of Artificial Sequence: Synthetic oligonucleotide
uuugucuuuuuaag

SEQ ID NO: 131277 - RNA, 13 nt, Artificial Sequence
  Description of Artificial Sequence: Synthetic oligonucleotide
ccuaaagguuguc

SEQ ID NO: 131278 - RNA, 12 nt, Artificial Sequence
  Description of Artificial Sequence: Synthetic oligonucleotide
aagguugucgac

SEQ ID NO: 131279 - RNA, 13 nt, Artificial Sequence
  Description of Artificial Sequence: Synthetic oligonucleotide
accuggcaauugu

SEQ ID NO: 131280 - RNA, 12 nt, Artificial Sequence
  Description of Artificial Sequence: Synthetic oligonucleotide
aguggugcgagg

SEQ ID NO: 131281 - RNA, 13 nt, Artificial Sequence
  Description of Artificial Sequence: Synthetic oligonucleotide
agagacaugaaau

SEQ ID NO: 131282 - RNA, 13 nt, Artificial Sequence
  Description of Artificial Sequence: Synthetic oligonucleotide
auauauuucucca

SEQ ID NO: 131283 - RNA, 10 nt, Artificial Sequence
  Description of Artificial Sequence: Synthetic oligonucleotide
caugaaggcu

SEQ ID NO: 131284 - RNA, 11 nt, Artificial Sequence
  Description of Artificial Sequence: Synthetic oligonucleotide
gcuggaguggu

SEQ ID NO: 131285 - RNA, 11 nt, Artificial Sequence
  Description of Artificial Sequence: Synthetic oligonucleotide
aggaagagagg

SEQ ID NO: 131286 - RNA, 12 nt, Artificial Sequence
  Description of Artificial Sequence: Synthetic oligonucleotide
cuugcaucgggc

SEQ ID NO: 131287 - RNA, 13 nt, Artificial Sequence
  Description of Artificial Sequence: Synthetic oligonucleotide
auauccuacugug

SEQ ID NO: 131288 - RNA, 13 nt, Artificial Sequence
  Description of Artificial Sequence: Synthetic oligonucleotide
uccuacuguguaa

SEQ ID NO: 131289 - RNA, 12 nt, Artificial Sequence
  Description of Artificial Sequence: Synthetic oligonucleotide
ccuuguagugua

SEQ ID NO: 131290 - RNA, 13 nt, Artificial Sequence
  Description of Artificial Sequence: Synthetic oligonucleotide
ucuuuguugauug

SEQ ID NO: 131291 - RNA, 14 nt, Artificial Sequence
  Description of Artificial Sequence: Synthetic oligonucleotide
uuuguugauugaaa

SEQ ID NO: 131292 - RNA, 15 nt, Artificial Sequence
  Description of Artificial Sequence: Synthetic oligonucleotide
uucuuuuucuuccau

SEQ ID NO: 131293 - RNA, 13 nt, Artificial Sequence
  Description of Artificial Sequence: Synthetic oligonucleotide
aaucuuccuucua

SEQ ID NO: 131294 - RNA, 13 nt, Artificial Sequence
  Description of Artificial Sequence: Synthetic oligonucleotide
uugaaugcuucau

SEQ ID NO: 131295 - RNA, 13 nt, Artificial Sequence
  Description of Artificial Sequence: Synthetic oligonucleotide
ugaaugcuucaug

SEQ ID NO: 131296 - RNA, 13 nt, Artificial Sequence
  Description of Artificial Sequence: Synthetic oligonucleotide
aauucuacuuuga

SEQ ID NO: 131297 - RNA, 13 nt, Artificial Sequence
  Description of Artificial Sequence: Synthetic oligonucleotide
agcaacuacagac

SEQ ID NO: 131298 - RNA, 13 nt, Artificial Sequence
  Description of Artificial Sequence: Synthetic oligonucleotide
gaccaaggucaac

SEQ ID NO: 131299 - RNA, 13 nt, Artificial Sequence
  Description of Artificial Sequence: Synthetic oligonucleotide
cgacuaucucgac

SEQ ID NO: 131300 - RNA, 13 nt, Artificial Sequence
  Description of Artificial Sequence: Synthetic oligonucleotide
aaccuucccaaac

SEQ ID NO: 131301 - RNA, 14 nt, Artificial Sequence
  Description of Artificial Sequence: Synthetic oligonucleotide
ccaagcuuagaacu

SEQ ID NO: 131302 - RNA, 15 nt, Artificial Sequence
  Description of Artificial Sequence: Synthetic oligonucleotide
agcuuagaacuuuaa

SEQ ID NO: 131303 - RNA, 11 nt, Artificial Sequence
  Description of Artificial Sequence: Synthetic oligonucleotide
aagaccaccac

SEQ ID NO: 131304 - RNA, 14 nt, Artificial Sequence
  Description of Artificial Sequence: Synthetic oligonucleotide
gcgagaaauaaagu

SEQ ID NO: 131305 - RNA, 14 nt, Artificial Sequence
  Description of Artificial Sequence: Synthetic oligonucleotide
cgagaaauaaaguu

SEQ ID NO: 131306 - RNA, 12 nt, Artificial Sequence
  Description of Artificial Sequence: Synthetic oligonucleotide
aggaaaugaucc

SEQ ID NO: 131307 - RNA, 13 nt, Artificial Sequence
  Description of Artificial Sequence: Synthetic oligonucleotide
gaagaaaugaaac

SEQ ID NO: 131308 - RNA, 13 nt, Artificial Sequence
  Description of Artificial Sequence: Synthetic oligonucleotide
guuuccauccucc

SEQ ID NO: 131309 - RNA, 15 nt, Artificial Sequence
  Description of Artificial Sequence: Synthetic oligonucleotide
acugaaaaucuuuga

SEQ ID NO: 131310 - RNA, 11 nt, Artificial Sequence
  Description of Artificial Sequence: Synthetic oligonucleotide
ugccguucagg

SEQ ID NO: 131311 - RNA, 13 nt, Artificial Sequence
  Description of Artificial Sequence: Synthetic oligonucleotide
caggguccagaag

SEQ ID NO: 131312 - RNA, 13 nt, Artificial Sequence
  Description of Artificial Sequence: Synthetic oligonucleotide
ucaagacugcuug

SEQ ID NO: 131313 - RNA, 13 nt, Artificial Sequence
  Description of Artificial Sequence: Synthetic oligonucleotide
uccaugucuuugg

SEQ ID NO: 131314 - RNA, 11 nt, Artificial Sequence
  Description of Artificial Sequence: Synthetic oligonucleotide
gccugaaacac

SEQ ID NO: 131315 - RNA, 12 nt, Artificial Sequence
  Description of Artificial Sequence: Synthetic oligonucleotide
ucucuguaccuc

SEQ ID NO: 131316 - RNA, 12 nt, Artificial Sequence
  Description of Artificial Sequence: Synthetic oligonucleotide
agcaagacaaga

SEQ ID NO: 131317 - RNA, 13 nt, Artificial Sequence
  Description of Artificial Sequence: Synthetic oligonucleotide
gcaagacaagaaa

SEQ ID NO: 131318 - RNA, 12 nt, Artificial Sequence
  Description of Artificial Sequence: Synthetic oligonucleotide
uguacaagaucc

SEQ ID NO: 131319 - RNA, 12 nt, Artificial Sequence
  Description of Artificial Sequence: Synthetic oligonucleotide
cguacuugcaga

SEQ ID NO: 131320 - RNA, 13 nt, Artificial Sequence
  Description of Artificial Sequence: Synthetic oligonucleotide
cgaucgauacaga

SEQ ID NO: 131321 - RNA, 13 nt, Artificial Sequence
  Description of Artificial Sequence: Synthetic oligonucleotide
uauaaaaauaaau

SEQ ID NO: 131322 - RNA, 13 nt, Artificial Sequence
  Description of Artificial Sequence: Synthetic oligonucleotide
uaaaaauaaauau

SEQ ID NO: 131323 - RNA, 13 nt, Artificial Sequence
  Description of Artificial Sequence: Synthetic oligonucleotide
uuugacugcugug

SEQ ID NO: 131324 - RNA, 13 nt, Artificial Sequence
  Description of Artificial Sequence: Synthetic oligonucleotide
ggagaugagagac

SEQ ID NO: 131325 - RNA, 10 nt, Artificial Sequence
  Description of Artificial Sequence: Synthetic oligonucleotide
ucccacuugg

SEQ ID NO: 131326 - RNA, 10 nt, Artificial Sequence
  Description of Artificial Sequence: Synthetic oligonucleotide
guucacggcc

SEQ ID NO: 131327 - RNA, 12 nt, Artificial Sequence
  Description of Artificial Sequence: Synthetic oligonucleotide
accaucacacca

SEQ ID NO: 131328 - RNA, 10 nt, Artificial Sequence
  Description of Artificial Sequence: Synthetic oligonucleotide
cugcggguuu

SEQ ID NO: 131329 - RNA, 9 nt, Artificial Sequence
  Description of Artificial Sequence: Synthetic oligonucleotide
uccaguuug

SEQ ID NO: 131330 - RNA, 12 nt, Artificial Sequence
  Description of Artificial Sequence: Synthetic oligonucleotide
uuaaggacuucu

SEQ ID NO: 131331 - RNA, 12 nt, Artificial Sequence
  Description of Artificial Sequence: Synthetic oligonucleotide
agugggacagag

SEQ ID NO: 131332 - RNA, 13 nt, Artificial Sequence
  Description of Artificial Sequence: Synthetic oligonucleotide
auuuguuauugug

SEQ ID NO: 131333 - RNA, 12 nt, Artificial Sequence
  Description of Artificial Sequence: Synthetic oligonucleotide
ucaaaugcauuu

SEQ ID NO: 131334 - RNA, 9 nt, Artificial Sequence
  Description of Artificial Sequence: Synthetic oligonucleotide
aggaaagcc

SEQ ID NO: 131335 - RNA, 10 nt, Artificial Sequence
  Description of Artificial Sequence: Synthetic oligonucleotide
ggaaagcccu

SEQ ID NO: 131336 - RNA, 11 nt, Artificial Sequence
  Description of Artificial Sequence: Synthetic oligonucleotide
ccagcauggcc

SEQ ID NO: 131337 - RNA, 10 nt, Artificial Sequence
  Description of Artificial Sequence: Synthetic oligonucleotide
uucucccuga

SEQ ID NO: 131338 - RNA, 11 nt, Artificial Sequence
  Description of Artificial Sequence: Synthetic oligonucleotide
aagaagcccuu

SEQ ID NO: 131339 - RNA, 11 nt, Artificial Sequence
  Description of Artificial Sequence: Synthetic oligonucleotide
gaagcccuuca

SEQ ID NO: 131340 - RNA, 10 nt, Artificial Sequence
  Description of Artificial Sequence: Synthetic oligonucleotide
cccuucagcg

SEQ ID NO: 131341 - RNA, 10 nt, Artificial Sequence
  Description of Artificial Sequence: Synthetic oligonucleotide
cuucagcggc

SEQ ID NO: 131342 - RNA, 11 nt, Artificial Sequence
  Description of Artificial Sequence: Synthetic oligonucleotide
cagcggccagu

SEQ ID NO: 131343 - RNA, 11 nt, Artificial Sequence
  Description of Artificial Sequence: Synthetic oligonucleotide
gaaaagcuccg

SEQ ID NO: 131344 - RNA, 10 nt, Artificial Sequence
  Description of Artificial Sequence: Synthetic oligonucleotide
aaagcuccgg

SEQ ID NO: 131345 - RNA, 12 nt, Artificial Sequence
  Description of Artificial Sequence: Synthetic oligonucleotide
gucaacagucug

SEQ ID NO: 131346 - RNA, 12 nt, Artificial Sequence
  Description of Artificial Sequence: Synthetic oligonucleotide
agaguucaaaag

SEQ ID NO: 131347 - RNA, 12 nt, Artificial Sequence
  Description of Artificial Sequence: Synthetic oligonucleotide
gaguucaaaagc

SEQ ID NO: 131348 - RNA, 11 nt, Artificial Sequence
  Description of Artificial Sequence: Synthetic oligonucleotide
ucaaaagcccu

SEQ ID NO: 131349 - RNA, 11 nt, Artificial Sequence
  Description of Artificial Sequence: Synthetic oligonucleotide
caaaagcccuu

SEQ ID NO: 131350 - RNA, 11 nt, Artificial Sequence
  Description of Artificial Sequence: Synthetic oligonucleotide
aaagcccuuca

SEQ ID NO: 131351 - RNA, 11 nt, Artificial Sequence
  Description of Artificial Sequence: Synthetic oligonucleotide
aagcccuucag

SEQ ID NO: 131352 - RNA, 12 nt, Artificial Sequence
  Description of Artificial Sequence: Synthetic oligonucleotide
ugaagccgcucg

SEQ ID NO: 131353 - RNA, 11 nt, Artificial Sequence
  Description of Artificial Sequence: Synthetic oligonucleotide
acgccagucaa

SEQ ID NO: 131354 - RNA, 12 nt, Artificial Sequence
  Description of Artificial Sequence: Synthetic oligonucleotide
ucuuggugcgug

SEQ ID NO: 131355 - RNA, 13 nt, Artificial Sequence
  Description of Artificial Sequence: Synthetic oligonucleotide
uuggauucaucag

SEQ ID NO: 131356 - RNA, 12 nt, Artificial Sequence
  Description of Artificial Sequence: Synthetic oligonucleotide
ggaauaccuaag

SEQ ID NO: 131357 - RNA, 11 nt, Artificial Sequence
  Description of Artificial Sequence: Synthetic oligonucleotide
uuugaggcuca

SEQ ID NO: 131358 - RNA, 10 nt, Artificial Sequence
  Description of Artificial Sequence: Synthetic oligonucleotide
cuacaauugg

SEQ ID NO: 131359 - RNA, 11 nt, Artificial Sequence
  Description of Artificial Sequence: Synthetic oligonucleotide
aguuaggagcc

SEQ ID NO: 131360 - RNA, 12 nt, Artificial Sequence
  Description of Artificial Sequence: Synthetic oligonucleotide
gucaauauccac

SEQ ID NO: 131361 - RNA, 12 nt, Artificial Sequence
  Description of Artificial Sequence: Synthetic oligonucleotide
uguucagucaca

SEQ ID NO: 131362 - RNA, 11 nt, Artificial Sequence
  Description of Artificial Sequence: Synthetic oligonucleotide
cacacacauac

SEQ ID NO: 131363 - RNA, 11 nt, Artificial Sequence
  Description of Artificial Sequence: Synthetic oligonucleotide
uccuuuugcuu

SEQ ID NO: 131364 - RNA, 15 nt, Artificial Sequence
  Description of Artificial Sequence: Synthetic oligonucleotide
uuuaaaguaauuuuu

SEQ ID NO: 131365 - RNA, 12 nt, Artificial Sequence
  Description of Artificial Sequence: Synthetic oligonucleotide
aacagucaaugg

SEQ ID NO: 131366 - RNA, 12 nt, Artificial Sequence
  Description of Artificial Sequence: Synthetic oligonucleotide
cgacaaaccaau

SEQ ID NO: 131367 - RNA, 11 nt, Artificial Sequence
  Description of Artificial Sequence: Synthetic oligonucleotide
cugcuaccacu

SEQ ID NO: 131368 - RNA, 12 nt, Artificial Sequence
  Description of Artificial Sequence: Synthetic oligonucleotide
caagcggucuua

SEQ ID NO: 131369 - RNA, 12 nt, Artificial Sequence
  Description of Artificial Sequence: Synthetic oligonucleotide
gucuuaccggcu

SEQ ID NO: 131370 - RNA, 10 nt, Artificial Sequence
  Description of Artificial Sequence: Synthetic oligonucleotide
auggguuacc

SEQ ID NO: 131371 - RNA, 10 nt, Artificial Sequence
  Description of Artificial Sequence: Synthetic oligonucleotide
uuaccugcga

SEQ ID NO: 131372 - RNA, 11 nt, Artificial Sequence
  Description of Artificial Sequence: Synthetic oligonucleotide
aucuugcugag

SEQ ID NO: 131373 - RNA, 12 nt, Artificial Sequence
  Description of Artificial Sequence: Synthetic oligonucleotide
gcauaaaacagu

SEQ ID NO: 131374 - RNA, 11 nt, Artificial Sequence
  Description of Artificial Sequence: Synthetic oligonucleotide
uccuuuauccu

SEQ ID NO: 131375 - RNA, 11 nt, Artificial Sequence
  Description of Artificial Sequence: Synthetic oligonucleotide
aacgcaaguug

SEQ ID NO: 131376 - RNA, 12 nt, Artificial Sequence
  Description of Artificial Sequence: Synthetic oligonucleotide
aacugaaaccau

SEQ ID NO: 131377 - RNA, 13 nt, Artificial Sequence
  Description of Artificial Sequence: Synthetic oligonucleotide
cuuuguuaaauau

SEQ ID NO: 131378 - RNA, 13 nt, Artificial Sequence
  Description of Artificial Sequence: Synthetic oligonucleotide
uauauuaaaaguu

SEQ ID NO: 131379 - RNA, 12 nt, Artificial Sequence
  Description of Artificial Sequence: Synthetic oligonucleotide
uuuugacuuaac

SEQ ID NO: 131380 - RNA, 12 nt, Artificial Sequence
  Description of Artificial Sequence: Synthetic oligonucleotide
caaacucagcac

SEQ ID NO: 131381 - RNA, 10 nt, Artificial Sequence
  Description of Artificial Sequence: Synthetic oligonucleotide
gcugaccuca

SEQ ID NO: 131382 - RNA, 13 nt, Artificial Sequence
  Description of Artificial Sequence: Synthetic oligonucleotide
uuauucagaucgc

SEQ ID NO: 131383 - RNA, 12 nt, Artificial Sequence
  Description of Artificial Sequence: Synthetic oligonucleotide
ggguucugggau

SEQ ID NO: 131384 - RNA, 14 nt, Artificial Sequence
  Description of Artificial Sequence: Synthetic oligonucleotide
uauuggaaauuaug

SEQ ID NO: 131385 - RNA, 12 nt, Artificial Sequence
  Description of Artificial Sequence: Synthetic oligonucleotide
uggaagcacuag

SEQ ID NO: 131386 - RNA, 12 nt, Artificial Sequence
  Description of Artificial Sequence: Synthetic oligonucleotide
uuuuuaugugga

SEQ ID NO: 131387 - RNA, 11 nt, Artificial Sequence
  Description of Artificial Sequence: Synthetic oligonucleotide
gaauugguaga

SEQ ID NO: 131388 - RNA, 12 nt, Artificial Sequence
  Description of Artificial Sequence: Synthetic oligonucleotide
uagacuuggaga

SEQ ID NO: 131389 - RNA, 12 nt, Artificial Sequence
  Description of Artificial Sequence: Synthetic oligonucleotide
uacaguauucca

SEQ ID NO: 131390 - RNA, 14 nt, Artificial Sequence
  Description of Artificial Sequence: Synthetic oligonucleotide
cacugaugaauuaa

SEQ ID NO: 131391 - RNA, 11 nt, Artificial Sequence
  Description of Artificial Sequence: Synthetic oligonucleotide
cacaucaucac

SEQ ID NO: 131392 - RNA, 12 nt, Artificial Sequence
  Description of Artificial Sequence: Synthetic oligonucleotide
ucaccaaacaga

SEQ ID NO: 131393 - RNA, 11 nt, Artificial Sequence
  Description of Artificial Sequence: Synthetic oligonucleotide
gaacaugaugg

SEQ ID NO: 131394 - RNA, 11 nt, Artificial Sequence
  Description of Artificial Sequence: Synthetic oligonucleotide
auguagacugc

SEQ ID NO: 131395 - RNA, 12 nt, Artificial Sequence
  Description of Artificial Sequence: Synthetic oligonucleotide
gaucuauuuaug

SEQ ID NO: 131396 - RNA, 11 nt, Artificial Sequence
  Description of Artificial Sequence: Synthetic oligonucleotide
cacuauuauca

SEQ ID NO: 131397 - RNA, 10 nt, Artificial Sequence
  Description of Artificial Sequence: Synthetic oligonucleotide
ucaguucugc

SEQ ID NO: 131398 - RNA, 12 nt, Artificial Sequence
  Description of Artificial Sequence: Synthetic oligonucleotide
gauuaaaccuac

SEQ ID NO: 131399 - RNA, 12 nt, Artificial Sequence
  Description of Artificial Sequence: Synthetic oligonucleotide
uaaaauccuucu

SEQ ID NO: 131400 - RNA, 11 nt, Artificial Sequence
  Description of Artificial Sequence: Synthetic oligonucleotide
augcuguagac

SEQ ID NO: 131401 - RNA, 12 nt, Artificial Sequence
  Description of Artificial Sequence: Synthetic oligonucleotide
ugauaggaauag

SEQ ID NO: 131402 - RNA, 10 nt, Artificial Sequence
  Description of Artificial Sequence: Synthetic oligonucleotide
auggcccuga

SEQ ID NO: 131403 - RNA, 10 nt, Artificial Sequence
  Description of Artificial Sequence: Synthetic oligonucleotide
uccucaagca

SEQ ID NO: 131404 - RNA, 9 nt, Artificial Sequence
  Description of Artificial Sequence: Synthetic oligonucleotide
uucagccca

SEQ ID NO: 131405 - RNA, 10 nt, Artificial Sequence
  Description of Artificial Sequence: Synthetic oligonucleotide
cugcugaacc

SEQ ID NO: 131406 - RNA, 11 nt, Artificial Sequence
  Description of Artificial Sequence: Synthetic oligonucleotide
aguucucuuca

SEQ ID NO: 131407 - RNA, 10 nt, Artificial Sequence
  Description of Artificial Sequence: Synthetic oligonucleotide
cagccuagag

SEQ ID NO: 131408 - RNA, 12 nt, Artificial Sequence
  Description of Artificial Sequence: Synthetic oligonucleotide
ucugugaagugu

SEQ ID NO: 131409 - RNA, 13 nt, Artificial Sequence
  Description of Artificial Sequence: Synthetic oligonucleotide
gagaaaauuucaa

SEQ ID NO: 131410 - RNA, 10 nt, Artificial Sequence
  Description of Artificial Sequence: Synthetic oligonucleotide
auccuccuga

SEQ ID NO: 131411 - RNA, 11 nt, Artificial Sequence
  Description of Artificial Sequence: Synthetic oligonucleotide
ugacaucauau

SEQ ID NO: 131412 - RNA, 12 nt, Artificial Sequence
  Description of Artificial Sequence: Synthetic oligonucleotide
aucuucaucaua

SEQ ID NO: 131413 - RNA, 12 nt, Artificial Sequence
  Description of Artificial Sequence: Synthetic oligonucleotide
acuagcuauuaa

SEQ ID NO: 131414 - RNA, 13 nt, Artificial Sequence
  Description of Artificial Sequence: Synthetic oligonucleotide
cucuacuaaaaau

SEQ ID NO: 131415 - RNA, 11 nt, Artificial Sequence
  Description of Artificial Sequence: Synthetic oligonucleotide
cuaucucgccu

SEQ ID NO: 131416 - RNA, 12 nt, Artificial Sequence
  Description of Artificial Sequence: Synthetic oligonucleotide
uucgguccaguu

SEQ ID NO: 131417 - RNA, 10 nt, Artificial Sequence
  Description of Artificial Sequence: Synthetic oligonucleotide
auguagccgc

SEQ ID NO: 131418 - RNA, 11 nt, Artificial Sequence
  Description of Artificial Sequence: Synthetic oligonucleotide
gaggagacuug

SEQ ID NO: 131419 - RNA, 11 nt, Artificial Sequence
  Description of Artificial Sequence: Synthetic oligonucleotide
aguagugagga

SEQ ID NO: 131420 - RNA, 13 nt, Artificial Sequence
  Description of Artificial Sequence: Synthetic oligonucleotide
agaugaguacaaa

SEQ ID NO: 131421 - RNA, 12 nt, Artificial Sequence
  Description of Artificial Sequence: Synthetic oligonucleotide
uuguuaaugggc

SEQ ID NO: 131422 - RNA, 12 nt, Artificial Sequence
  Description of Artificial Sequence: Synthetic oligonucleotide
uuuuaauuuauu

SEQ ID NO: 131423 - RNA, 11 nt, Artificial Sequence
  Description of Artificial Sequence: Synthetic oligonucleotide
auuuaaauaug

SEQ ID NO: 131424 - RNA, 12 nt, Artificial Sequence
  Description of Artificial Sequence: Synthetic oligonucleotide
auccuuuguuuc

SEQ ID NO: 131425 - RNA, 13 nt, Artificial Sequence
  Description of Artificial Sequence: Synthetic oligonucleotide
gucuaaguguuug

SEQ ID NO: 131426 - RNA, 11 nt, Artificial Sequence
  Description of Artificial Sequence: Synthetic oligonucleotide
ccugugacaaa

SEQ ID NO: 131427 - RNA, 12 nt, Artificial Sequence
  Description of Artificial Sequence: Synthetic oligonucleotide
caggcugaauua

SEQ ID NO: 131428 - RNA, 13 nt, Artificial Sequence
  Description of Artificial Sequence: Synthetic oligonucleotide
ucauucuuacaau

SEQ ID NO: 131429 - RNA, 14 nt, Artificial Sequence
  Description of Artificial Sequence: Synthetic oligonucleotide
cauucuuacaauug

SEQ ID NO: 131430 - RNA, 11 nt, Artificial Sequence
  Description of Artificial Sequence: Synthetic oligonucleotide
agagaguguac

SEQ ID NO: 131431 - RNA, 11 nt, Artificial Sequence
  Description of Artificial Sequence: Synthetic oligonucleotide
gaacucagcag

SEQ ID NO: 131432 - RNA, 12 nt, Artificial Sequence
  Description of Artificial Sequence: Synthetic oligonucleotide
uuauuuucagua

SEQ ID NO: 131433 - RNA, 11 nt, Artificial Sequence
  Description of Artificial Sequence: Synthetic oligonucleotide
cuuaaauggaa

SEQ ID NO: 131434 - RNA, 12 nt, Artificial Sequence
  Description of Artificial Sequence: Synthetic oligonucleotide
gccuaaaauugu

SEQ ID NO: 131435 - RNA, 12 nt, Artificial Sequence
  Description of Artificial Sequence: Synthetic oligonucleotide
acuaacaucugg

SEQ ID NO: 131436 - RNA, 11 nt, Artificial Sequence
  Description of Artificial Sequence: Synthetic oligonucleotide
gacugugagcu

SEQ ID NO: 131437 - RNA, 13 nt, Artificial Sequence
  Description of Artificial Sequence: Synthetic oligonucleotide
gcuuuuuauuaau

SEQ ID NO: 131438 - RNA, 12 nt, Artificial Sequence
  Description of Artificial Sequence: Synthetic oligonucleotide
ucuucuuacauu

SEQ ID NO: 131439 - RNA, 14 nt, Artificial Sequence
  Description of Artificial Sequence: Synthetic oligonucleotide
auuuguaaaaaugu

SEQ ID NO: 131440 - RNA, 14 nt, Artificial Sequence
  Description of Artificial Sequence: Synthetic oligonucleotide
ucuuaauucauauu

SEQ ID NO: 131441 - RNA, 12 nt, Artificial Sequence
  Description of Artificial Sequence: Synthetic oligonucleotide
aacuaaucauga

SEQ ID NO: 131442 - RNA, 11 nt, Artificial Sequence
  Description of Artificial Sequence: Synthetic oligonucleotide
cugcucuuggg

SEQ ID NO: 131443 - RNA, 12 nt, Artificial Sequence
  Description of Artificial Sequence: Synthetic oligonucleotide
aguagcuuugag

SEQ ID NO: 131444 - RNA, 13 nt, Artificial Sequence
  Description of Artificial Sequence: Synthetic oligonucleotide
acguaauauuuca

SEQ ID NO: 131445 - RNA, 12 nt, Artificial Sequence
  Description of Artificial Sequence: Synthetic oligonucleotide
auucucuucacu

SEQ ID NO: 131446 - RNA, 13 nt, Artificial Sequence
  Description of Artificial Sequence: Synthetic oligonucleotide
uaaugcuaagaaa

SEQ ID NO: 131447 - RNA, 11 nt, Artificial Sequence
  Description of Artificial Sequence: Synthetic oligonucleotide
cugaaaaucaa

SEQ ID NO: 131448 - RNA, 13 nt, Artificial Sequence
  Description of Artificial Sequence: Synthetic oligonucleotide
auaugauuacuuu

SEQ ID NO: 131449 - RNA, 13 nt, Artificial Sequence
  Description of Artificial Sequence: Synthetic oligonucleotide
auuuuguucuaca

SEQ ID NO: 131450 - RNA, 11 nt, Artificial Sequence
  Description of Artificial Sequence: Synthetic oligonucleotide
ccgggacucuc

SEQ ID NO: 131451 - RNA, 13 nt, Artificial Sequence
  Description of Artificial Sequence: Synthetic oligonucleotide
cuuuaaaguaaag

SEQ ID NO: 131452 - RNA, 12 nt, Artificial Sequence
  Description of Artificial Sequence: Synthetic oligonucleotide
cuggaagccugg

SEQ ID NO: 131453 - RNA, 13 nt, Artificial Sequence
  Description of Artificial Sequence: Synthetic oligonucleotide
aaacaaaagagag

SEQ ID NO: 131454 - RNA, 12 nt, Artificial Sequence
  Description of Artificial Sequence: Synthetic oligonucleotide
ucaguuaugccg

SEQ ID NO: 131455 - RNA, 12 nt, Artificial Sequence
  Description of Artificial Sequence: Synthetic oligonucleotide
aaaagaagucca

SEQ ID NO: 131456 - RNA, 10 nt, Artificial Sequence
  Description of Artificial Sequence: Synthetic oligonucleotide
ggugagguua

SEQ ID NO: 131457 - RNA, 10 nt, Artificial Sequence
  Description of Artificial Sequence: Synthetic oligonucleotide
ggaagaggac

SEQ ID NO: 131458 - RNA, 12 nt, Artificial Sequence
  Description of Artificial Sequence: Synthetic oligonucleotide
agcaaguauugu

SEQ ID NO: 131459 - RNA, 11 nt, Artificial Sequence
  Description of Artificial Sequence: Synthetic oligonucleotide
uuguagcacuc

SEQ ID NO: 131460 - RNA, 13 nt, Artificial Sequence
  Description of Artificial Sequence: Synthetic oligonucleotide
caaaaccacaaau

SEQ ID NO: 131461 - RNA, 11 nt, Artificial Sequence
  Description of Artificial Sequence: Synthetic oligonucleotide
aagcccauaca

SEQ ID NO: 131462 - RNA, 10 nt, Artificial Sequence
  Description of Artificial Sequence: Synthetic oligonucleotide
gcccauacag

SEQ ID NO: 131463 - RNA, 11 nt, Artificial Sequence
  Description of Artificial Sequence: Synthetic oligonucleotide
agaaaccuucc

SEQ ID NO: 131464 - RNA, 9 nt, Artificial Sequence
  Description of Artificial Sequence: Synthetic oligonucleotide
uauaccuac

SEQ ID NO: 131465 - RNA, 12 nt, Artificial Sequence
  Description of Artificial Sequence: Synthetic oligonucleotide
ccaguuuucgga

SEQ ID NO: 131466 - RNA, 8 nt, Artificial Sequence
  Description of Artificial Sequence: Synthetic oligonucleotide
gaacaggg

SEQ ID NO: 131467 - RNA, 12 nt, Artificial Sequence
  Description of Artificial Sequence: Synthetic oligonucleotide
uaacuuuccagu

SEQ ID NO: 131468 - RNA, 13 nt, Artificial Sequence
  Description of Artificial Sequence: Synthetic oligonucleotide
aaguuugguuuug

SEQ ID NO: 131469 - RNA, 11 nt, Artificial Sequence
  Description of Artificial Sequence: Synthetic oligonucleotide
uucccacugua

SEQ ID NO: 131470 - RNA, 12 nt, Artificial Sequence
  Description of Artificial Sequence: Synthetic oligonucleotide
gauaccauauga

SEQ ID NO: 131471 - RNA, 10 nt, Artificial Sequence
  Description of Artificial Sequence: Synthetic oligonucleotide
acaugggcug

SEQ ID NO: 131472 - RNA, 12 nt, Artificial Sequence
  Description of Artificial Sequence: Synthetic oligonucleotide
aacuuuuucaua

SEQ ID NO: 131473 - RNA, 11 nt, Artificial Sequence
  Description of Artificial Sequence: Synthetic oligonucleotide
augaggccgga

SEQ ID NO: 131474 - RNA, 10 nt, Artificial Sequence
  Description of Artificial Sequence: Synthetic oligonucleotide
cugcauuugu

SEQ ID NO: 131475 - RNA, 12 nt, Artificial Sequence
  Description of Artificial Sequence: Synthetic oligonucleotide
auguuuacuacc

SEQ ID NO: 131476 - RNA, 14 nt, Artificial Sequence
  Description of Artificial Sequence: Synthetic oligonucleotide
auuuuuugaugaaa

SEQ ID NO: 131477 - RNA, 13 nt, Artificial Sequence
  Description of Artificial Sequence: Synthetic oligonucleotide
agugugugaauuu

SEQ ID NO: 131478 - RNA, 12 nt, Artificial Sequence
  Description of Artificial Sequence: Synthetic oligonucleotide
agcaauguaugu

SEQ ID NO: 131479 - RNA, 13 nt, Artificial Sequence
  Description of Artificial Sequence: Synthetic oligonucleotide
aagcacauauaua

SEQ ID NO: 131480 - RNA, 13 nt, Artificial Sequence
  Description of Artificial Sequence: Synthetic oligonucleotide
uaauaguuucucc

SEQ ID NO: 131481 - RNA, 12 nt, Artificial Sequence
  Description of Artificial Sequence: Synthetic oligonucleotide
guuucuccaaau

SEQ ID NO: 131482 - RNA, 12 nt, Artificial Sequence
  Description of Artificial Sequence: Synthetic oligonucleotide
acuuccuagaaa

SEQ ID NO: 131483 - RNA, 12 nt, Artificial Sequence
  Description of Artificial Sequence: Synthetic oligonucleotide
acaccauauaug

SEQ ID NO: 131484 - RNA, 13 nt, Artificial Sequence
  Description of Artificial Sequence: Synthetic oligonucleotide
uauaugaauggag

SEQ ID NO: 131485 - RNA, 12 nt, Artificial Sequence
  Description of Artificial Sequence: Synthetic oligonucleotide
cauuuacaggga

SEQ ID NO: 131486 - RNA, 12 nt, Artificial Sequence
  Description of Artificial Sequence: Synthetic oligonucleotide
auuuacagggac

SEQ ID NO: 131487 - RNA, 9 nt, Artificial Sequence
  Description of Artificial Sequence: Synthetic oligonucleotide
gggaccuga

SEQ ID NO: 131488 - RNA, 13 nt, Artificial Sequence
  Description of Artificial Sequence: Synthetic oligonucleotide
guuugacugcauc

SEQ ID NO: 131489 - RNA, 12 nt, Artificial Sequence
  Description of Artificial Sequence: Synthetic oligonucleotide
uugacugcaucg

SEQ ID NO: 131490 - RNA, 11 nt, Artificial Sequence
  Description of Artificial Sequence: Synthetic oligonucleotide
aguucacaggg

SEQ ID NO: 131491 - RNA, 12 nt, Artificial Sequence
  Description of Artificial Sequence: Synthetic oligonucleotide
gcaccucugucc

SEQ ID NO: 131492 - RNA, 14 nt, Artificial Sequence
  Description of Artificial Sequence: Synthetic oligonucleotide
guuugucuuuuuaa

SEQ ID NO: 131493 - RNA, 13 nt, Artificial Sequence
  Description of Artificial Sequence: Synthetic oligonucleotide
uugucuuuuuaag

SEQ ID NO: 131494 - RNA, 12 nt, Artificial Sequence
  Description of Artificial Sequence: Synthetic oligonucleotide
cuaaagguuguc

SEQ ID NO: 131495 - RNA, 11 nt, Artificial Sequence
  Description of Artificial Sequence: Synthetic oligonucleotide
agguugucgac

SEQ ID NO: 131496 - RNA, 12 nt, Artificial Sequence
  Description of Artificial Sequence: Synthetic oligonucleotide
ccuggcaauugu

SEQ ID NO: 131497 - RNA, 11 nt, Artificial Sequence
  Description of Artificial Sequence: Synthetic oligonucleotide
guggugcgagg

SEQ ID NO: 131498 - RNA, 12 nt, Artificial Sequence
  Description of Artificial Sequence: Synthetic oligonucleotide
gagacaugaaau

SEQ ID NO: 131499 - RNA, 12 nt, Artificial Sequence
  Description of Artificial Sequence: Synthetic oligonucleotide
uauauuucucca

SEQ ID NO: 131500 - RNA, 9 nt, Artificial Sequence
  Description of Artificial Sequence: Synthetic oligonucleotide
augaaggcu

SEQ ID NO: 131501 - RNA, 10 nt, Artificial Sequence
  Description of Artificial Sequence: Synthetic oligonucleotide
cuggaguggu

SEQ ID NO: 131502 - RNA, 10 nt, Artificial Sequence
  Description of Artificial Sequence: Synthetic oligonucleotide
ggaagagagg

SEQ ID NO: 131503 - RNA, 11 nt, Artificial Sequence
  Description of Artificial Sequence: Synthetic oligonucleotide
uugcaucgggc

SEQ ID NO: 131504 - RNA, 12 nt, Artificial Sequence
  Description of Artificial Sequence: Synthetic oligonucleotide
uauccuacugug

SEQ ID NO: 131505 - RNA, 12 nt, Artificial Sequence
  Description of Artificial Sequence: Synthetic oligonucleotide
ccuacuguguaa

SEQ ID NO: 131506 - RNA, 11 nt, Artificial Sequence
  Description of Artificial Sequence: Synthetic oligonucleotide
cuuguagugua

SEQ ID NO: 131507 - RNA, 12 nt, Artificial Sequence
  Description of Artificial Sequence: Synthetic oligonucleotide
cuuuguugauug

SEQ ID NO: 131508 - RNA, 13 nt, Artificial Sequence
  Description of Artificial Sequence: Synthetic oligonucleotide
uuguugauugaaa

SEQ ID NO: 131509 - RNA, 14 nt, Artificial Sequence
  Description of Artificial Sequence: Synthetic oligonucleotide
ucuuuuucuuccau

SEQ ID NO: 131510 - RNA, 12 nt, Artificial Sequence
  Description of Artificial Sequence: Synthetic oligonucleotide
aucuuccuucua

SEQ ID NO: 131511 - RNA, 12 nt, Artificial Sequence
  Description of Artificial Sequence: Synthetic oligonucleotide
ugaaugcuucau

SEQ ID NO: 131512 - RNA, 12 nt, Artificial Sequence
  Description of Artificial Sequence: Synthetic oligonucleotide
gaaugcuucaug

SEQ ID NO: 131513 - RNA, 12 nt, Artificial Sequence
  Description of Artificial Sequence: Synthetic oligonucleotide
auucuacuuuga

SEQ ID NO: 131514 - RNA, 12 nt, Artificial Sequence
  Description of Artificial Sequence: Synthetic oligonucleotide
gcaacuacagac

SEQ ID NO: 131515 - RNA, 12 nt, Artificial Sequence
  Description of Artificial Sequence: Synthetic oligonucleotide
accaaggucaac

SEQ ID NO: 131516 - RNA, 12 nt, Artificial Sequence
  Description of Artificial Sequence: Synthetic oligonucleotide
gacuaucucgac

SEQ ID NO: 131517 - RNA, 12 nt, Artificial Sequence
  Description of Artificial Sequence: Synthetic oligonucleotide
accuucccaaac

SEQ ID NO: 131518 - RNA, 13 nt, Artificial Sequence
  Description of Artificial Sequence: Synthetic oligonucleotide
caagcuuagaacu

SEQ ID NO: 131519 - RNA, 14 nt, Artificial Sequence
  Description of Artificial Sequence: Synthetic oligonucleotide
gcuuagaacuuuaa

SEQ ID NO: 131520 - RNA, 13 nt, Artificial Sequence
  Description of Artificial Sequence: Synthetic oligonucleotide
aacuuuaagcaac

SEQ ID NO: 131521 - RNA, 10 nt, Artificial Sequence
  Description of Artificial Sequence: Synthetic oligonucleotide
agaccaccac

SEQ ID NO: 131522 - RNA, 13 nt, Artificial Sequence
  Description of Artificial Sequence: Synthetic oligonucleotide
cgagaaauaaagu

SEQ ID NO: 131523 - RNA, 13 nt, Artificial Sequence
  Description of Artificial Sequence: Synthetic oligonucleotide
gagaaauaaaguu

SEQ ID NO: 131524 - RNA, 11 nt, Artificial Sequence
  Description of Artificial Sequence: Synthetic oligonucleotide
ggaaaugaucc

SEQ ID NO: 131525 - RNA, 12 nt, Artificial Sequence
  Description of Artificial Sequence: Synthetic oligonucleotide
aagaaaugaaac

SEQ ID NO: 131526 - RNA, 12 nt, Artificial Sequence
  Description of Artificial Sequence: Synthetic oligonucleotide
uuuccauccucc

SEQ ID NO: 131527 - RNA, 14 nt, Artificial Sequence
  Description of Artificial Sequence: Synthetic oligonucleotide
cugaaaaucuuuga

SEQ ID NO: 131528 - RNA, 10 nt, Artificial Sequence
  Description of Artificial Sequence: Synthetic oligonucleotide
gccguucagg

SEQ ID NO: 131529 - RNA, 12 nt, Artificial Sequence
  Description of Artificial Sequence: Synthetic oligonucleotide
aggguccagaag

SEQ ID NO: 131530 - RNA, 12 nt, Artificial Sequence
  Description of Artificial Sequence: Synthetic oligonucleotide
caagacugcuug

SEQ ID NO: 131531 - RNA, 12 nt, Artificial Sequence
  Description of Artificial Sequence: Synthetic oligonucleotide
ccaugucuuugg

SEQ ID NO: 131532 - RNA, 10 nt, Artificial Sequence
  Description of Artificial Sequence: Synthetic oligonucleotide
ccugaaacac

SEQ ID NO: 131533 - RNA, 11 nt, Artificial Sequence
  Description of Artificial Sequence: Synthetic oligonucleotide
cucuguaccuc

SEQ ID NO: 131534 - RNA, 11 nt, Artificial Sequence
  Description of Artificial Sequence: Synthetic oligonucleotide
gcaagacaaga

SEQ ID NO: 131535 - RNA, 12 nt, Artificial Sequence
  Description of Artificial Sequence: Synthetic oligonucleotide
caagacaagaaa

SEQ ID NO: 131536 - RNA, 11 nt, Artificial Sequence
  Description of Artificial Sequence: Synthetic oligonucleotide
guacaagaucc

SEQ ID NO: 131537 - RNA, 11 nt, Artificial Sequence
  Description of Artificial Sequence: Synthetic oligonucleotide
guacuugcaga

SEQ ID NO: 131538 - RNA, 12 nt, Artificial Sequence
  Description of Artificial Sequence: Synthetic oligonucleotide
gaucgauacaga

SEQ ID NO: 131539 - RNA, 12 nt, Artificial Sequence
  Description of Artificial Sequence: Synthetic oligonucleotide
auaaaaauaaau

SEQ ID NO: 131540 - RNA, 12 nt, Artificial Sequence
  Description of Artificial Sequence: Synthetic oligonucleotide
aaaaauaaauau

SEQ ID NO: 131541 - RNA, 12 nt, Artificial Sequence
  Description of Artificial Sequence: Synthetic oligonucleotide
uugacugcugug

SEQ ID NO: 131542 - RNA, 12 nt, Artificial Sequence
  Description of Artificial Sequence: Synthetic oligonucleotide
gagaugagagac

SEQ ID NO: 131543 - RNA, 9 nt, Artificial Sequence
  Description of Artificial Sequence: Synthetic oligonucleotide
cccacuugg

SEQ ID NO: 131544 - RNA, 14121 nt, Homo sapiens
auucccaccgggaccugcggggcugagugcccuucucgguugcugccgcugaggagcccgcccagccagccagggccgcgaggccgaggccaggccgcagcccaggagccgccccaccgcagcuggcgauggacccgccgaggcccgcgcugcuggcgcugcuggcgcugccugcgcugcugcugcugcugcuggcgggcgccagggccgaagaggaaaugcuggaaaaugucagccuggucuguccaaaagaugcgacccgauucaagcaccuccggaaguacacauacaacuaugaggcugagaguuccaguggagucccugggacugcugauucaagaagugccaccaggaucaacugcaagguugagcuggagguuccccagcucugcagcuucauccugaagaccagccagugcacccugaaagagguguauggcuucaacccugagggcaaagccuugcugaagaaaaccaagaacucugaggaguuugcugcagccauguccagguaugagcucaagcuggccauuccagaagggaagcagguuuuccuuuacccggagaaagaugaaccuacuuacauccugaacaucaagaggggcaucauuucugcccuccugguucccccagagacagaagaagccaagcaaguguuguuucuggauaccguguauggaaacugcuccacucacuuuaccgucaagacgaggaagggcaauguggcaacagaaauauccacugaaagagaccuggggcagugugaucgcuucaagcccauccgcacaggcaucagcccacuugcucucaucaaaggcaugacccgccccuugucaacucugaucagcagcagccaguccugucaguacacacuggacgcuaagaggaagcauguggcagaagccaucugcaaggagcaacaccucuuccugccuuucuccuacaagaauaaguaugggaugguagcacaagugacacagacuuugaaacuugaagacacaccaaagaucaacagccgcuucuuuggugaagguacuaagaagaugggccucgcauuugagagcaccaaauccacaucaccuccaaagcaggccgaagcuguuuugaagacucuccaggaacugaaaaaacuaaccaucucugagcaaaauauccagagagcuaaucucuucaauaagcugguuacugagcugagaggccucagugaugaagcagucacaucucucuugccacagcugauugagguguccagccccaucacuuuacaagccuugguucaguguggacagccucagugcuccacucacauccuccaguggcugaaacgugugcaugccaacccccuucugauagauguggucaccuaccugguggcccugauccccgagcccucagcacagcagcugcgagagaucuucaacauggcgagggaucagcgcagccgagccaccuuguaugcgcugagccacgcggucaacaacuaucauaagacaaacccuacagggacccaggagcugcuggacauugcuaauuaccugauggaacagauucaagaugacugcacuggggaugaagauuacaccuauuugauucugcgggucauuggaaauaugggccaaaccauggagcaguuaacuccagaacucaagucuucaauccugaaauguguccaaaguacaaagccaucacugaugauccagaaagcugccauccaggcucugcggaaaauggagccuaaagacaaggaccaggagguucuucuucagacuuuccuugaugaugcuucuccgggagauaagcgacuggcugccuaucuuauguugaugaggaguccuucacaggcagauauuaacaaaauuguccaaauucuaccaugggaacagaaugagcaagugaagaacuuuguggcuucccauauugccaauaucuugaacucagaagaauuggauauccaagaucugaaaaaguuagugaaagaagcucugaaagaaucucaacuuccaacugucauggacuucagaaaauucucucggaacuaucaacucuacaaaucuguuucucuuccaucacuugacccagccucagccaaaauagaagggaaucuuauauuugauccaaauaacuaccuuccuaaagaaagcaugcugaaaacuacccucacugccuuuggauuugcuucagcugaccucaucgagauuggcuuggaaggaaaaggcuuugagccaacauuggaagcucuuuuugggaagcaaggauuuuucccagacagugucaacaaagcuuuguacuggguuaauggucaaguuccugauggugucucuaaggucuuaguggaccacuuuggcuauaccaaagaugauaaacaugagcaggauaugguaaauggaauaaugcucaguguugagaagcugauuaaagauuugaaauccaaagaagucccggaagccagagccuaccuccgcaucuugggagaggagcuugguuuugccagucuccaugaccuccagcuccugggaaagcugcuucugaugggugcccgcacucugcaggggaucccccagaugauuggagaggucaucaggaagggcucaaagaaugacuuuuuucuucacuacaucuucauggagaaugccuuugaacuccccacuggagcuggauuacaguugcaaauaucuucaucuggagucauugcucccggagccaaggcuggaguaaaacuggaaguagccaacaugcaggcugaacugguggcaaaacccuccgugucuguggaguuugugacaaauaugggcaucaucauuccggacuucgcuaggagugggguccagaugaacaccaacuucuuccacgagucgggucuggaggcucauguugcccuaaaagcugggaagcugaaguuuaucauuccuuccccaaagagaccagucaagcugcucaguggaggcaacacauuacauuuggucucuaccaccaaaacggaggugaucccaccucucauugagaacaggcaguccuggucaguuugcaagcaagucuuuccuggccugaauuacugcaccucaggcgcuuacuccaacgccagcuccacagacuccgccuccuacuauccgcugaccggggacaccagauuagagcuggaacugaggccuacaggagagauugagcaguauucugucagcgcaaccuaugagcuccagagagaggacagagccuugguggauacccugaaguuuguaacucaagcagaaggugcgaagcagacugaggcuaccaugacauucaaauauaaucggcagaguaugaccuuguccagugaaguccaaauuccggauuuugauguugaccucggaacaauccucagaguuaaugaugaaucuacugagggcaaaacgucuuacagacucacccuggacauucagaacaagaaaauuacugaggucgcccucaugggccaccuaaguugugacacaaaggaagaaagaaaaaucaaggguguuauuuccauaccccguuugcaagcagaagccagaagugagauccucgcccacuggucgccugccaaacugcuucuccaaauggacucaucugcuacagcuuauggcuccacaguuuccaagaggguggcauggcauuaugaugaagagaagauugaauuugaauggaacacaggcaccaauguagauaccaaaaaaaugacuuccaauuucccuguggaucucuccgauuauccuaagagcuugcauauguaugcuaauagacuccuggaucacagagucccucaaacagacaugacuuuccggcacguggguuccaaauuaauaguugcaaugagcucauggcuucagaaggcaucugggagucuuccuuauacccagacuuugcaagaccaccucaauagccugaaggaguucaaccuccagaacaugggauugccagacuuccacaucccagaaaaccucuucuuaaaaagcgauggccgggucaaauauaccuugaacaagaacaguuugaaaauugagauuccuuugccuuuugguggcaaauccuccagagaucuaaagauguuagagacuguuaggacaccagcccuccacuucaagucugugggauuccaucugccaucucgagaguuccaagucccuacuuuuaccauucccaaguuguaucaacugcaagugccucuccuggguguucuagaccucuccacgaaugucuacagcaacuuguacaacugguccgccuccuacagugguggcaacaccagcacagaccauuucagccuucgggcucguuaccacaugaaggcugacucugugguugaccugcuuuccuacaaugugcaaggaucuggagaaacaacauaugaccacaagaauacguucacacuaucaugugaugggucucuacgccacaaauuucuagauucgaauaucaaauucagucauguagaaaaacuuggaaacaacccagucucaaaagguuuacuaauauucgaugcaucuaguuccuggggaccacagaugucugcuucaguucauuuggacuccaaaaagaaacagcauuuguuugucaaagaagucaagauugaugggcaguucagagucucuucguucuaugcuaaaggcacauauggccugucuugucagagggauccuaacacuggccggcucaauggagaguccaaccugagguuuaacuccuccuaccuccaaggcaccaaccagauaacaggaagauaugaagauggaacccucucccucaccuccaccucugaucugcaaaguggcaucauuaaaaauacugcuucccuaaaguaugagaacuacgagcugacuuuaaaaucugacaccaaugggaaguauaagaacuuugccacuucuaacaagauggauaugaccuucucuaagcaaaaugcacugcugcguucugaauaucaggcugauuacgagucauugagguucuucagccugcuuucuggaucacuaaauucccauggucuugaguuaaaugcugacaucuuaggcacugacaaaauuaauaguggugcucacaaggcgacacuaaggauuggccaagauggaauaucuaccagugcaacgaccaacuugaaguguagucuccuggugcuggagaaugagcugaaugcagagcuuggccucucuggggcaucuaugaaauuaacaacaaauggccgcuucagggaacacaaugcaaaauucagucuggaugggaaagccgcccucacagagcuaucacugggaagugcuuaucaggccaugauucugggugucgacagcaaaaacauuuucaacuucaaggucagucaagaaggacuuaagcucucaaaugacaugaugggcucauaugcugaaaugaaauuugaccacacaaacagucugaacauugcaggcuuaucacuggacuucucuucaaaacuugacaacauuuacagcucugacaaguuuuauaagcaaacuguuaauuuacagcuacagcccuauucucugguaacuacuuuaaacagugaccugaaauacaaugcucuggaucucaccaacaaugggaaacuacggcuagaaccccugaagcugcauguggcugguaaccuaaaaggagccuaccaaaauaaugaaauaaaacacaucuaugccaucucuucugcugccuuaucagcaagcuauaaagcagacacuguugcuaagguucaggguguggaguuuagccaucggcucaacacagacaucgcugggcuggcuucagccauugacaugagcacaaacuauaauucagacucacugcauuucagcaaugucuuccguucuguaauggccccguuuaccaugaccaucgaugcacauacaaauggcaaugggaaacucgcucucuggggagaacauacugggcagcuguauagcaaauuccuguugaaagcagaaccucuggcauuuacuuucucucaugauuacaaaggcuccacaagucaucaucucgugucuaggaaaagcaucagugcagcucuugaacacaaagucagugcccugcuuacuccagcugagcagacaggcaccuggaaacucaagacccaauuuaacaacaaugaauacagccaggacuuggaugcuuacaacacuaaagauaaaauuggcguggagcuuacuggacgaacucuggcugaccuaacucuacuagacuccccaauuaaagugccacuuuuacucagugagcccaucaauaucauugaugcuuuagagaugagagaugccguugagaagccccaagaauuuacaauuguugcuuuuguaaaguaugauaaaaaccaagauguucacuccauuaaccucccauuuuuugagaccuugcaagaauauuuugagaggaaucgacaaaccauuauaguuguacuggaaaacguacagagaaaccugaagcacaucaauauugaucaauuuguaagaaaauacagagcagcccugggaaaacucccacagcaagcuaaugauuaucugaauucauucaauugggagagacaaguuucacaugccaaggagaaacugacugcucucacaaaaaaguauagaauuacagaaaaugauauacaaauugcauuagaugaugccaaaaucaacuuuaaugaaaaacuaucucaacugcagacauauaugauacaauuugaucaguauauuaaagauaguuaugauuuacaugauuugaaaauagcuauugcuaauauuauugaugaaaucauugaaaaauuaaaaagucuugaugagcacuaucauauccguguaaauuuaguaaaaacaauccaugaucuacauuuguuuauugaaaauauugauuuuaacaaaaguggaaguaguacugcauccuggauucaaaauguggauacuaaguaccaaaucagaauccagauacaagaaaaacugcagcagcuuaagagacacauacagaauauagacauccagcaccuagcuggaaaguuaaaacaacacauugaggcuauugauguuagagugcuuuuagaucaauugggaacuacaauuucauuugaaagaauaaaugacguucuugagcaugucaaacacuuuguuauaaaucuuauuggggauuuugaaguagcugagaaaaucaaugccuucagagccaaaguccaugaguuaaucgagagguaugaaguagaccaacaaauccagguuuuaauggauaaauuaguagaguuggcccaccaauacaaguugaaggagacuauucagaagcuaagcaauguccuacaacaaguuaagauaaaagauuacuuugagaaauugguuggauuuauugaugaugcugucaagaagcuuaaugaauuaucuuuuaaaacauucauugaagauguuaacaaauuccuugacauguugauaaagaaauuaaagucauuugauuaccaccaguuuguagaugaaaccaaugacaaaauccgugaggugacucagagacucaauggugaaauucaggcucuggaacuaccacaaaaagcugaagcauuaaaacuguuuuuagaggaaaccaaggccacaguugcaguguaucuggaaagccuacaggacaccaaaauaaccuuaaucaucaauugguuacaggaggcuuuaaguucagcaucuuuggcucacaugaaggccaaauuccgagagacccuagaagauacacgagaccgaauguaucaaauggacauucagcaggaacuucaacgauaccugucucugguaggccagguuuauagcacacuugucaccuacauuucugauugguggacucuugcugcuaagaaccuuacugacuuugcagagcaauauucuauccaagauugggcuaaacguaugaaagcauugguagagcaaggguucacuguuccugaaaucaagaccauccuugggaccaugccugccuuugaagucagucuucaggcucuucagaaagcuaccuuccagacaccugauuuuauagucccccuaacagauuugaggauuccaucaguucagauaaacuucaaagacuuaaaaaauauaaaaaucccauccagguuuuccacaccagaauuuaccauccuuaacaccuuccacauuccuuccuuuacaauugacuuuguagaaaugaaaguaaagaucaucagaaccauugaccagaugcugaacagugagcugcaguggcccguuccagauauauaucucagggaucugaagguggaggacauuccucuagcgagaaucacccugccagacuuccguuuaccagaaaucgcaauuccagaauucauaaucccaacucucaaccuuaaugauuuucaaguuccugaccuucacauaccagaauuccagcuuccccacaucucacacacaauugaaguaccuacuuuuggcaagcuauacaguauucugaaaauccaaucuccucuuuucacauuagaugcaaaugcugacauagggaauggaaccaccucagcaaacgaagcagguaucgcagcuuccaucacugccaaaggagaguccaaauuagaaguucucaauuuugauuuucaagcaaaugcacaacucucaaacccuaagauuaauccgcuggcucugaaggagucagugaaguucuccagcaaguaccugagaacggagcaugggagugaaaugcuguuuuuuggaaaugcuauugagggaaaaucaaacacaguggcaaguuuacacacagaaaaaaauacacuggagcuuaguaauggagugauugucaagauaaacaaucagcuuacccuggauagcaacacuaaauacuuccacaaauugaacauccccaaacuggacuucucuagucaggcugaccugcgcaacgagaucaagacacuguugaaagcuggccacauagcauggacuucuucuggaaaagggucauggaaaugggccugccccagauucucagaugagggaacacaugaaucacaaauuaguuucaccauagaaggaccccucacuuccuuuggacuguccaauaagaucaauagcaaacaccuaagaguaaaccaaaacuugguuuaugaaucuggcucccucaacuuuucuaaacuugaaauucaaucacaagucgauucccagcaugugggccacaguguucuaacugcuaaaggcauggcacuguuuggagaagggaaggcagaguuuacugggaggcaugaugcucauuuaaauggaaagguuauuggaacuuugaaaaauucucuuuucuuuucagcccagccauuugagaucacggcauccacaaacaaugaagggaauuugaaaguucguuuuccauuaagguuaacagggaagauagacuuccugaauaacuaugcacuguuucugagucccagugcccagcaagcaaguuggcaaguaagugcuagguucaaucaguauaaguacaaccaaaauuucucugcuggaaacaacgagaacauuauggaggcccauguaggaauaaauggagaagcaaaucuggauuucuuaaacauuccuuuaacaauuccugaaaugcgucuaccuuacacaauaaucacaacuccuccacugaaagauuucucucuaugggaaaaaacaggcuugaaggaauucuugaaaacgacaaagcaaucauuugauuuaaguguaaaagcucaguauaagaaaaacaaacacaggcauuccaucacaaauccuuuggcugugcuuugugaguuuaucagucagagcaucaaauccuuugacaggcauuuugaaaaaaacagaaacaaugcauuagauuuugucaccaaauccuauaaugaaacaaaaauuaaguuugauaaguacaaagcugaaaaaucucacgacgagcuccccaggaccuuucaaauuccuggauacacuguuccaguugucaauguugaagugucuccauucaccauagagaugucggcauucggcuauguguucccaaaagcagucagcaugccuaguuucuccauccuagguucugacguccgugugccuucauacacauuaauccugccaucauuagagcugccaguccuucaugucccuagaaaucucaagcuuucucuuccagauuucaaggaauuguguaccauaagccauauuuuuauuccugccaugggcaauauuaccuaugauuucuccuuuaaaucaagugucaucacacugaauaccaaugcugaacuuuuuaaccagucagauauuguugcucaucuccuuucuucaucuucaucugucauugaugcacugcaguacaaauuagagggcaccacaagauugacaagaaaaaggggauugaaguuagccacagcucugucucugagcaacaaauuuguggaggguagucauaacaguacugugagcuuaaccacgaaaaauauggaagugucaguggcaacaaccacaaaagcccaaauuccaauuuugagaaugaauuucaagcaagaacuuaauggaaauaccaagucaaaaccuacugucucuuccuccauggaauuuaaguaugauuucaauucuucaaugcuguacucuaccgcuaaaggagcaguugaccacaagcuuagcuuggaaagccucaccucuuacuuuuccauugagucaucuaccaaaggagaugucaaggguucgguucuuucucgggaauauucaggaacuauugcuagugaggccaacacuuacuugaauuccaagagcacacggucuucagugaagcugcagggcacuuccaaaauugaugauaucuggaaccuugaaguaaaagaaaauuuugcuggagaagccacacuccaacgcauauauucccucugggagcacaguacgaaaaaccacuuacagcuagagggccucuuuuucaccaacggagaacauacaagcaaagccacccuggaacucucuccauggcaaaugucagcucuuguucagguccaugcaagucagcccaguuccuuccaugauuucccugaccuuggccaggaaguggcccugaaugcuaacacuaagaaccagaagaucagauggaaaaaugaaguccggauucauucugggucuuuccagagccaggucgagcuuuccaaugaccaagaaaaggcacaccuugacauugcaggauccuuagaaggacaccuaagguuccucaaaaauaucauccuaccagucuaugacaagagcuuaugggauuuccuaaagcuggauguaaccaccagcauugguaggagacagcaucuucguguuucaacugccuuuguguacaccaaaaaccccaauggcuauucauucuccaucccuguaaaaguuuuggcugauaaauucauuauuccugggcugaaacuaaaugaucuaaauucaguucuugucaugccuacguuccaugucccauuuacagaucuucagguuccaucgugcaaacuugacuucagagaaauacaaaucuauaagaagcugagaacuucaucauuugcccucaaccuaccaacacuccccgagguaaaauucccugaaguugauguguuaacaaaauauucucaaccagaagacuccuugauucccuuuuuugagauaaccgugccugaaucucaguuaacugugucccaguucacgcuuccaaaaaguguuucagauggcauugcugcuuuggaucuaaaugcaguagccaacaagaucgcagacuuugaguugcccaccaucaucgugccugagcagaccauugagauucccuccauuaaguucucuguaccugcuggaauugucauuccuuccuuucaagcacugacugcacgcuuugagguagacucucccguguauaaugccacuuggagugccaguuugaaaaacaaagcagauuauguugaaacaguccuggauuccacaugcagcucaaccguacaguuccuagaauaugaacuaaauguuuugggaacacacaaaaucgaagaugguacguuagccucuaagacuaaaggaacauuugcacaccgugacuucagugcagaauaugaagaagauggcaaauaugaaggacuucaggaaugggaaggaaaagcgcaccucaauaucaaaagcccagcguucaccgaucuccaucugcgcuaccagaaagacaagaaaggcaucuccaccucagcagccuccccagccguaggcaccgugggcauggauauggaugaagaugacgacuuuucuaaauggaacuucuacuacagcccucaguccucuccagauaaaaaacucaccauauucaaaacugaguugaggguccgggaaucugaugaggaaacucagaucaaaguuaauugggaagaagaggcagcuucuggcuugcuaaccucucugaaagacaacgugcccaaggccacagggguccuuuaugauuaugucaacaaguaccacugggaacacacagggcucacccugagagaagugucuucaaagcugagaagaaaucugcagaacaaugcugaguggguuuaucaaggggccauuaggcaaauugaugauaucgacgugagguuccagaaagcagccaguggcaccacugggaccuaccaagaguggaaggacaaggcccagaaucuguaccaggaacuguugacucaggaaggccaagccaguuuccagggacucaaggauaacguguuugauggcuugguacgaguuacucaagaauuccauaugaaagucaagcaucugauugacucacucauugauuuucugaacuuccccagauuccaguuuccggggaaaccugggauauacacuagggaggaacuuugcacuauguucauaagggagguagggacgguacugucccagguauauucgaaaguccauaaugguucagaaauacuguuuuccuauuuccaagaccuagugauuacacuuccuuucgaguuaaggaaacauaaacuaauagauguaaucucgauguauagggaacuguugaaagauuuaucaaaagaagcccaagagguauuuaaagccauucagucucucaagaccacagaggugcuacguaaucuucaggaccuuuuacaauucauuuuccaacuaauagaagauaacauuaaacagcugaaagagaugaaauuuacuuaucuuauuaauuauauccaagaugagaucaacacaaucuucagugauuauaucccauauguuuuuaaauuguugaaagaaaaccuaugccuuaaucuucauaaguucaaugaauuuauucaaaacgagcuucaggaagcuucucaagaguuacagcagauccaucaauacauuauggcccuucgugaagaauauuuugauccaaguauaguuggcuggacagugaaauauuaugaacuugaagaaaagauagucagucugaucaagaaccuguuaguugcucuuaaggacuuccauucugaauauauugucagugccucuaacuuuacuucccaacucucaagucaaguugagcaauuucugcacagaaauauucaggaauaucuuagcauccuuaccgauccagauggaaaagggaaagagaagauugcagagcuuucugccacugcucaggaaauaauuaaaagccaggccauugcgacgaagaaaauaauuucugauuaccaccagcaguuuagauauaaacugcaagauuuuucagaccaacucucugauuacuaugaaaaauuuauugcugaauccaaaagauugauugaccuguccauucaaaacuaccacacauuucugauauacaucacggaguuacugaaaaagcugcaaucaaccacagucaugaaccccuacaugaagcuugcuccaggagaacuuacuaucauccucuaauuuuuuaaaagaaaucuucauuuauucuucuuuuccaauugaacuuucacauagcacagaaaaaauucaaacugccuauauugauaaaaccauacagugagccagccuugcaguaggcaguagacuauaagcagaagcacauaugaacuggaccugcaccaaagcuggcaccagggcucggaaggucucugaacucagaaggauggcauuuuuugcaaguuaaagaaaaucaggaucugaguuauuuugcuaaacuugggggaggaggaacaaauaaauggagucuuuauuguguaucaua

SEQ ID NO: 131545 - RNA, 19 nt, Artificial Sequence
  Description of Artificial Sequence: Synthetic oligonucleotide
auucccaccgggaccugcg

SEQ ID NO: 131546 - RNA, 19 nt, Artificial Sequence
  Description of Artificial Sequence: Synthetic oligonucleotide
ggggcugagugcccuucuc

SEQ ID NO: 131547 - RNA, 19 nt, Artificial Sequence
  Description of Artificial Sequence: Synthetic oligonucleotide
cgguugcugccgcugagga

SEQ ID NO: 131548 - RNA, 19 nt, Artificial Sequence
  Description of Artificial Sequence: Synthetic oligonucleotide
agcccgcccagccagccag

SEQ ID NO: 131549 - RNA, 19 nt, Artificial Sequence
  Description of Artificial Sequence: Synthetic oligonucleotide
gggccgcgaggccgaggcc

SEQ ID NO: 131550 - RNA, 19 nt, Artificial Sequence
  Description of Artificial Sequence: Synthetic oligonucleotide
caggccgcagcccaggagc

SEQ ID NO: 131551 - RNA, 19 nt, Artificial Sequence
  Description of Artificial Sequence: Synthetic oligonucleotide
ccgccccaccgcagcuggc

SEQ ID NO: 131552 - RNA, 19 nt, Artificial Sequence
  Description of Artificial Sequence: Synthetic oligonucleotide
cgauggacccgccgaggcc

SEQ ID NO: 131553 - RNA, 19 nt, Artificial Sequence
  Description of Artificial Sequence: Synthetic oligonucleotide
ccgcgcugcuggcgcugcu

SEQ ID NO: 131554 - RNA, 19 nt, Artificial Sequence
  Description of Artificial Sequence: Synthetic oligonucleotide
uggcgcugccugcgcugcu

SEQ ID NO: 131555 - RNA, 19 nt, Artificial Sequence
  Description of Artificial Sequence: Synthetic oligonucleotide
ugcugcugcugcuggcggg

SEQ ID NO: 131556 - RNA, 19 nt, Artificial Sequence
  Description of Artificial Sequence: Synthetic oligonucleotide
gcgccagggccgaagagga

SEQ ID NO: 131557 - RNA, 19 nt, Artificial Sequence
  Description of Artificial Sequence: Synthetic oligonucleotide
aaaugcuggaaaaugucag

SEQ ID NO: 131558 - RNA, 19 nt, Artificial Sequence
  Description of Artificial Sequence: Synthetic oligonucleotide
gccuggucuguccaaaaga

SEQ ID NO: 131559 - RNA, 19 nt, Artificial Sequence
  Description of Artificial Sequence: Synthetic oligonucleotide
augcgacccgauucaagca

SEQ ID NO: 131560 - RNA, 19 nt, Artificial Sequence
  Description of Artificial Sequence: Synthetic oligonucleotide
accuccggaaguacacaua

SEQ ID NO: 131561 - RNA, 19 nt, Artificial Sequence
  Description of Artificial Sequence: Synthetic oligonucleotide
acaacuaugaggcugagag

SEQ ID NO: 131562 - RNA, 19 nt, Artificial Sequence
  Description of Artificial Sequence: Synthetic oligonucleotide
guuccaguggagucccugg

SEQ ID NO: 131563 - RNA, 19 nt, Artificial Sequence
  Description of Artificial Sequence: Synthetic oligonucleotide
ggacugcugauucaagaag

SEQ ID NO: 131564 - RNA, 19 nt, Artificial Sequence
  Description of Artificial Sequence: Synthetic oligonucleotide
gugccaccaggaucaacug

SEQ ID NO: 131565 - RNA, 19 nt, Artificial Sequence
  Description of Artificial Sequence: Synthetic oligonucleotide
gcaagguugagcuggaggu

SEQ ID NO: 131566 - RNA, 19 nt, Artificial Sequence
  Description of Artificial Sequence: Synthetic oligonucleotide
uuccccagcucugcagcuu

SEQ ID NO: 131567 - RNA, 19 nt, Artificial Sequence
  Description of Artificial Sequence: Synthetic oligonucleotide
ucauccugaagaccagcca

SEQ ID NO: 131568 - RNA, 19 nt, Artificial Sequence
  Description of Artificial Sequence: Synthetic oligonucleotide
agugcacccugaaagaggu

SEQ ID NO: 131569 - RNA, 19 nt, Artificial Sequence
  Description of Artificial Sequence: Synthetic oligonucleotide
uguauggcuucaacccuga

SEQ ID NO: 131570 - RNA, 19 nt, Artificial Sequence
  Description of Artificial Sequence: Synthetic oligonucleotide
agggcaaagccuugcugaa

SEQ ID NO: 131571 - RNA, 19 nt, Artificial Sequence
  Description of Artificial Sequence: Synthetic oligonucleotide
agaaaaccaagaacucuga

SEQ ID NO: 131572 - RNA, 19 nt, Artificial Sequence
  Description of Artificial Sequence: Synthetic oligonucleotide
aggaguuugcugcagccau

SEQ ID NO: 131573 - RNA, 19 nt, Artificial Sequence
  Description of Artificial Sequence: Synthetic oligonucleotide
uguccagguaugagcucaa

SEQ ID NO: 131574 - RNA, 19 nt, Artificial Sequence
  Description of Artificial Sequence: Synthetic oligonucleotide
agcuggccauuccagaagg

SEQ ID NO: 131575 - RNA, 19 nt, Artificial Sequence
  Description of Artificial Sequence: Synthetic oligonucleotide
ggaagcagguuuuccuuua

SEQ ID NO: 131576 - RNA, 19 nt, Artificial Sequence
  Description of Artificial Sequence: Synthetic oligonucleotide
acccggagaaagaugaacc

SEQ ID NO: 131577 - RNA, 19 nt, Artificial Sequence
  Description of Artificial Sequence: Synthetic oligonucleotide
cuacuuacauccugaacau

SEQ ID NO: 131578 - RNA, 19 nt, Artificial Sequence
  Description of Artificial Sequence: Synthetic oligonucleotide
ucaagaggggcaucauuuc

SEQ ID NO: 131579 - RNA, 19 nt, Artificial Sequence
  Description of Artificial Sequence: Synthetic oligonucleotide
cugcccuccugguuccccc

SEQ ID NO: 131580 - RNA, 19 nt, Artificial Sequence
  Description of Artificial Sequence: Synthetic oligonucleotide
cagagacagaagaagccaa

SEQ ID NO: 131581 - RNA, 19 nt, Artificial Sequence
  Description of Artificial Sequence: Synthetic oligonucleotide
agcaaguguuguuucugga

SEQ ID NO: 131582 - RNA, 19 nt, Artificial Sequence
  Description of Artificial Sequence: Synthetic oligonucleotide
auaccguguauggaaacug

SEQ ID NO: 131583 - RNA, 19 nt, Artificial Sequence
  Description of Artificial Sequence: Synthetic oligonucleotide
gcuccacucacuuuaccgu

SEQ ID NO: 131584 - RNA, 19 nt, Artificial Sequence
  Description of Artificial Sequence: Synthetic oligonucleotide
ucaagacgaggaagggcaa

SEQ ID NO: 131585 - RNA, 19 nt, Artificial Sequence
  Description of Artificial Sequence: Synthetic oligonucleotide
auguggcaacagaaauauc

SEQ ID NO: 131586 - RNA, 19 nt, Artificial Sequence
  Description of Artificial Sequence: Synthetic oligonucleotide
ccacugaaagagaccuggg

SEQ ID NO: 131587 - RNA, 19 nt, Artificial Sequence
  Description of Artificial Sequence: Synthetic oligonucleotide
ggcagugugaucgcuucaa

SEQ ID NO: 131588 - RNA, 19 nt, Artificial Sequence
  Description of Artificial Sequence: Synthetic oligonucleotide
agcccauccgcacaggcau

SEQ ID NO: 131589 - RNA, 19 nt, Artificial Sequence
  Description of Artificial Sequence: Synthetic oligonucleotide
ucagcccacuugcucucau

SEQ ID NO: 131590 - RNA, 19 nt, Artificial Sequence
  Description of Artificial Sequence: Synthetic oligonucleotide
ucaaaggcaugacccgccc

SEQ ID NO: 131591 - RNA, 19 nt, Artificial Sequence
  Description of Artificial Sequence: Synthetic oligonucleotide
ccuugucaacucugaucag

SEQ ID NO: 131592 - RNA, 19 nt, Artificial Sequence
  Description of Artificial Sequence: Synthetic oligonucleotide
gcagcagccaguccuguca

SEQ ID NO: 131593 - RNA, 19 nt, Artificial Sequence
  Description of Artificial Sequence: Synthetic oligonucleotide
aguacacacuggacgcuaa

SEQ ID NO: 131594 - RNA, 19 nt, Artificial Sequence
  Description of Artificial Sequence: Synthetic oligonucleotide
agaggaagcauguggcaga

SEQ ID NO: 131595 - RNA, 19 nt, Artificial Sequence
  Description of Artificial Sequence: Synthetic oligonucleotide
aagccaucugcaaggagca

SEQ ID NO: 131596 - RNA, 19 nt, Artificial Sequence
  Description of Artificial Sequence: Synthetic oligonucleotide
aacaccucuuccugccuuu

SEQ ID NO: 131597 - RNA, 19 nt, Artificial Sequence
  Description of Artificial Sequence: Synthetic oligonucleotide
ucuccuacaagaauaagua

SEQ ID NO: 131598 - RNA, 19 nt, Artificial Sequence
  Description of Artificial Sequence: Synthetic oligonucleotide
augggaugguagcacaagu

SEQ ID NO: 131599 - RNA, 19 nt, Artificial Sequence
  Description of Artificial Sequence: Synthetic oligonucleotide
ugacacagacuuugaaacu

SEQ ID NO: 131600 - RNA, 19 nt, Artificial Sequence
  Description of Artificial Sequence: Synthetic oligonucleotide
uugaagacacaccaaagau

SEQ ID NO: 131601 - RNA, 19 nt, Artificial Sequence
  Description of Artificial Sequence: Synthetic oligonucleotide
ucaacagccgcuucuuugg

SEQ ID NO: 131602 - RNA, 19 nt, Artificial Sequence
  Description of Artificial Sequence: Synthetic oligonucleotide
gugaagguacuaagaagau

SEQ ID NO: 131603 - RNA, 19 nt, Artificial Sequence
  Description of Artificial Sequence: Synthetic oligonucleotide
ugggccucgcauuugagag

SEQ ID NO: 131604 - RNA, 19 nt, Artificial Sequence
  Description of Artificial Sequence: Synthetic oligonucleotide
gcaccaaauccacaucacc

SEQ ID NO: 131605 - RNA, 19 nt, Artificial Sequence
  Description of Artificial Sequence: Synthetic oligonucleotide
cuccaaagcaggccgaagc

SEQ ID NO: 131606 - RNA, 19 nt, Artificial Sequence
  Description of Artificial Sequence: Synthetic oligonucleotide
cuguuuugaagacucucca

SEQ ID NO: 131607 - RNA, 19 nt, Artificial Sequence
  Description of Artificial Sequence: Synthetic oligonucleotide
aggaacugaaaaaacuaac

SEQ ID NO: 131608 - RNA, 19 nt, Artificial Sequence
  Description of Artificial Sequence: Synthetic oligonucleotide
ccaucucugagcaaaauau

SEQ ID NO: 131609 - RNA, 19 nt, Artificial Sequence
  Description of Artificial Sequence: Synthetic oligonucleotide
uccagagagcuaaucucuu

SEQ ID NO: 131610 - RNA, 19 nt, Artificial Sequence
  Description of Artificial Sequence: Synthetic oligonucleotide
ucaauaagcugguuacuga

SEQ ID NO: 131611 - RNA, 19 nt, Artificial Sequence
  Description of Artificial Sequence: Synthetic oligonucleotide
agcugagaggccucaguga

SEQ ID NO: 131612 - RNA, 19 nt, Artificial Sequence
  Description of Artificial Sequence: Synthetic oligonucleotide
augaagcagucacaucucu

SEQ ID NO: 131613 - RNA, 19 nt, Artificial Sequence
  Description of Artificial Sequence: Synthetic oligonucleotide
ucuugccacagcugauuga

SEQ ID NO: 131614 - RNA, 19 nt, Artificial Sequence
  Description of Artificial Sequence: Synthetic oligonucleotide
agguguccagccccaucac

SEQ ID NO: 131615 - RNA, 19 nt, Artificial Sequence
  Description of Artificial Sequence: Synthetic oligonucleotide
cuuuacaagccuugguuca

SEQ ID NO: 131616 - RNA, 19 nt, Artificial Sequence
  Description of Artificial Sequence: Synthetic oligonucleotide
aguguggacagccucagug

SEQ ID NO: 131617 - RNA, 19 nt, Artificial Sequence
  Description of Artificial Sequence: Synthetic oligonucleotide
gcuccacucacauccucca

SEQ ID NO: 131618 - RNA, 19 nt, Artificial Sequence
  Description of Artificial Sequence: Synthetic oligonucleotide
aguggcugaaacgugugca

SEQ ID NO: 131619 - RNA, 19 nt, Artificial Sequence
  Description of Artificial Sequence: Synthetic oligonucleotide
augccaacccccuucugau

SEQ ID NO: 131620 - RNA, 19 nt, Artificial Sequence
  Description of Artificial Sequence: Synthetic oligonucleotide
uagauguggucaccuaccu

SEQ ID NO: 131621 - RNA, 19 nt, Artificial Sequence
  Description of Artificial Sequence: Synthetic oligonucleotide
ugguggcccugauccccga

SEQ ID NO: 131622 - RNA, 19 nt, Artificial Sequence
  Description of Artificial Sequence: Synthetic oligonucleotide
agcccucagcacagcagcu

SEQ ID NO: 131623 - RNA, 19 nt, Artificial Sequence
  Description of Artificial Sequence: Synthetic oligonucleotide
ugcgagagaucuucaacau

SEQ ID NO: 131624 - RNA, 19 nt, Artificial Sequence
  Description of Artificial Sequence: Synthetic oligonucleotide
uggcgagggaucagcgcag

SEQ ID NO: 131625 - RNA, 19 nt, Artificial Sequence
  Description of Artificial Sequence: Synthetic oligonucleotide
gccgagccaccuuguaugc

SEQ ID NO: 131626 - RNA, 19 nt, Artificial Sequence
  Description of Artificial Sequence: Synthetic oligonucleotide
cgcugagccacgcggucaa

SEQ ID NO: 131627 - RNA, 19 nt, Artificial Sequence
  Description of Artificial Sequence: Synthetic oligonucleotide
acaacuaucauaagacaaa

SEQ ID NO: 131628 - RNA, 19 nt, Artificial Sequence
  Description of Artificial Sequence: Synthetic oligonucleotide
acccuacagggacccagga

SEQ ID NO: 131629 - RNA, 19 nt, Artificial Sequence
  Description of Artificial Sequence: Synthetic oligonucleotide
agcugcuggacauugcuaa

SEQ ID NO: 131630 - RNA, 19 nt, Artificial Sequence
  Description of Artificial Sequence: Synthetic oligonucleotide
auuaccugauggaacagau

SEQ ID NO: 131631 - RNA, 19 nt, Artificial Sequence
  Description of Artificial Sequence: Synthetic oligonucleotide
uucaagaugacugcacugg

SEQ ID NO: 131632 - RNA, 19 nt, Artificial Sequence
  Description of Artificial Sequence: Synthetic oligonucleotide
gggaugaagauuacaccua

SEQ ID NO: 131633 - RNA, 19 nt, Artificial Sequence
  Description of Artificial Sequence: Synthetic oligonucleotide
auuugauucugcgggucau

SEQ ID NO: 131634 - RNA, 19 nt, Artificial Sequence
  Description of Artificial Sequence: Synthetic oligonucleotide
uuggaaauaugggccaaac

SEQ ID NO: 131635 - RNA, 19 nt, Artificial Sequence
  Description of Artificial Sequence: Synthetic oligonucleotide
ccauggagcaguuaacucc

SEQ ID NO: 131636 - RNA, 19 nt, Artificial Sequence
  Description of Artificial Sequence: Synthetic oligonucleotide
cagaacucaagucuucaau

SEQ ID NO: 131637 - RNA, 19 nt, Artificial Sequence
  Description of Artificial Sequence: Synthetic oligonucleotide
uccugaaauguguccaaag

SEQ ID NO: 131638 - RNA, 19 nt, Artificial Sequence
  Description of Artificial Sequence: Synthetic oligonucleotide
guacaaagccaucacugau

SEQ ID NO: 131639 - RNA, 19 nt, Artificial Sequence
  Description of Artificial Sequence: Synthetic oligonucleotide
ugauccagaaagcugccau

SEQ ID NO: 131640 - RNA, 19 nt, Artificial Sequence
  Description of Artificial Sequence: Synthetic oligonucleotide
uccaggcucugcggaaaau

SEQ ID NO: 131641 - RNA, 19 nt, Artificial Sequence
  Description of Artificial Sequence: Synthetic oligonucleotide
uggagccuaaagacaagga

SEQ ID NO: 131642 - RNA, 19 nt, Artificial Sequence
  Description of Artificial Sequence: Synthetic oligonucleotide
accaggagguucuucuuca

SEQ ID NO: 131643 - RNA, 19 nt, Artificial Sequence
  Description of Artificial Sequence: Synthetic oligonucleotide
agacuuuccuugaugaugc

SEQ ID NO: 131644 - RNA, 19 nt, Artificial Sequence
  Description of Artificial Sequence: Synthetic oligonucleotide
cuucuccgggagauaagcg

SEQ ID NO: 131645 - RNA, 19 nt, Artificial Sequence
  Description of Artificial Sequence: Synthetic oligonucleotide
gacuggcugccuaucuuau

SEQ ID NO: 131646 - RNA, 19 nt, Artificial Sequence
  Description of Artificial Sequence: Synthetic oligonucleotide
uguugaugaggaguccuuc

SEQ ID NO: 131647 - RNA, 19 nt, Artificial Sequence
  Description of Artificial Sequence: Synthetic oligonucleotide
cacaggcagauauuaacaa

SEQ ID NO: 131648 - RNA, 19 nt, Artificial Sequence
  Description of Artificial Sequence: Synthetic oligonucleotide
aaauuguccaaauucuacc

SEQ ID NO: 131649 - RNA, 19 nt, Artificial Sequence
  Description of Artificial Sequence: Synthetic oligonucleotide
caugggaacagaaugagca

SEQ ID NO: 131650 - RNA, 19 nt, Artificial Sequence
  Description of Artificial Sequence: Synthetic oligonucleotide
aagugaagaacuuuguggc

SEQ ID NO: 131651 - RNA, 19 nt, Artificial Sequence
  Description of Artificial Sequence: Synthetic oligonucleotide
cuucccauauugccaauau

SEQ ID NO: 131652 - RNA, 19 nt, Artificial Sequence
  Description of Artificial Sequence: Synthetic oligonucleotide
ucuugaacucagaagaauu

SEQ ID NO: 131653 - RNA, 19 nt, Artificial Sequence
  Description of Artificial Sequence: Synthetic oligonucleotide
uggauauccaagaucugaa

SEQ ID NO: 131654 - RNA, 19 nt, Artificial Sequence
  Description of Artificial Sequence: Synthetic oligonucleotide
aaaaguuagugaaagaagc

SEQ ID NO: 131655 - RNA, 19 nt, Artificial Sequence
  Description of Artificial Sequence: Synthetic oligonucleotide
cucugaaagaaucucaacu

SEQ ID NO: 131656 - RNA, 19 nt, Artificial Sequence
  Description of Artificial Sequence: Synthetic oligonucleotide
uuccaacugucauggacuu

SEQ ID NO: 131657 - RNA, 19 nt, Artificial Sequence
  Description of Artificial Sequence: Synthetic oligonucleotide
ucagaaaauucucucggaa

SEQ ID NO: 131658 - RNA, 19 nt, Artificial Sequence
  Description of Artificial Sequence: Synthetic oligonucleotide
acuaucaacucuacaaauc

SEQ ID NO: 131659 - RNA, 19 nt, Artificial Sequence
  Description of Artificial Sequence: Synthetic oligonucleotide
cuguuucucuuccaucacu

SEQ ID NO: 131660 - RNA, 19 nt, Artificial Sequence
  Description of Artificial Sequence: Synthetic oligonucleotide
uugacccagccucagccaa

SEQ ID NO: 131661 - RNA, 19 nt, Artificial Sequence
  Description of Artificial Sequence: Synthetic oligonucleotide
aaauagaagggaaucuuau

SEQ ID NO: 131662 - RNA, 19 nt, Artificial Sequence
  Description of Artificial Sequence: Synthetic oligonucleotide
uauuugauccaaauaacua

SEQ ID NO: 131663 - RNA, 19 nt, Artificial Sequence
  Description of Artificial Sequence: Synthetic oligonucleotide
accuuccuaaagaaagcau

SEQ ID NO: 131664 - RNA, 19 nt, Artificial Sequence
  Description of Artificial Sequence: Synthetic oligonucleotide
ugcugaaaacuacccucac

SEQ ID NO: 131665 - RNA, 19 nt, Artificial Sequence
  Description of Artificial Sequence: Synthetic oligonucleotide
cugccuuuggauuugcuuc

SEQ ID NO: 131666 - RNA, 19 nt, Artificial Sequence
  Description of Artificial Sequence: Synthetic oligonucleotide
cagcugaccucaucgagau

SEQ ID NO: 131667 - RNA, 19 nt, Artificial Sequence
  Description of Artificial Sequence: Synthetic oligonucleotide
uuggcuuggaaggaaaagg

SEQ ID NO: 131668 - RNA, 19 nt, Artificial Sequence
  Description of Artificial Sequence: Synthetic oligonucleotide
gcuuugagccaacauugga

SEQ ID NO: 131669 - RNA, 19 nt, Artificial Sequence
  Description of Artificial Sequence: Synthetic oligonucleotide
aagcucuuuuugggaagca

SEQ ID NO: 131670 - RNA, 19 nt, Artificial Sequence
  Description of Artificial Sequence: Synthetic oligonucleotide
aaggauuuuucccagacag

SEQ ID NO: 131671 - RNA, 19 nt, Artificial Sequence
  Description of Artificial Sequence: Synthetic oligonucleotide
gugucaacaaagcuuugua

SEQ ID NO: 131672 - RNA, 19 nt, Artificial Sequence
  Description of Artificial Sequence: Synthetic oligonucleotide
acuggguuaauggucaagu

SEQ ID NO: 131673 - RNA, 19 nt, Artificial Sequence
  Description of Artificial Sequence: Synthetic oligonucleotide
uuccugauggugucucuaa

SEQ ID NO: 131674 - RNA, 19 nt, Artificial Sequence
  Description of Artificial Sequence: Synthetic oligonucleotide
aggucuuaguggaccacuu

SEQ ID NO: 131675 - RNA, 19 nt, Artificial Sequence
  Description of Artificial Sequence: Synthetic oligonucleotide
uuggcuauaccaaagauga

SEQ ID NO: 131676 - RNA, 19 nt, Artificial Sequence
  Description of Artificial Sequence: Synthetic oligonucleotide
auaaacaugagcaggauau

SEQ ID NO: 131677 - RNA, 19 nt, Artificial Sequence
  Description of Artificial Sequence: Synthetic oligonucleotide
ugguaaauggaauaaugcu

SEQ ID NO: 131678 - RNA, 19 nt, Artificial Sequence
  Description of Artificial Sequence: Synthetic oligonucleotide
ucaguguugagaagcugau

SEQ ID NO: 131679 - RNA, 19 nt, Artificial Sequence
  Description of Artificial Sequence: Synthetic oligonucleotide
uuaaagauuugaaauccaa

SEQ ID NO: 131680 - RNA, 19 nt, Artificial Sequence
  Description of Artificial Sequence: Synthetic oligonucleotide
aagaagucccggaagccag

SEQ ID NO: 131681 - RNA, 19 nt, Artificial Sequence
  Description of Artificial Sequence: Synthetic oligonucleotide
gagccuaccuccgcaucuu

SEQ ID NO: 131682 - RNA, 19 nt, Artificial Sequence
  Description of Artificial Sequence: Synthetic oligonucleotide
ugggagaggagcuugguuu

SEQ ID NO: 131683 - RNA, 19 nt, Artificial Sequence
  Description of Artificial Sequence: Synthetic oligonucleotide
uugccagucuccaugaccu

SEQ ID NO: 131684 - RNA, 19 nt, Artificial Sequence
  Description of Artificial Sequence: Synthetic oligonucleotide
uccagcuccugggaaagcu

SEQ ID NO: 131685 - RNA, 19 nt, Artificial Sequence
  Description of Artificial Sequence: Synthetic oligonucleotide
ugcuucugaugggugcccg

SEQ ID NO: 131686 - RNA, 19 nt, Artificial Sequence
  Description of Artificial Sequence: Synthetic oligonucleotide
gcacucugcaggggauccc

SEQ ID NO: 131687 - RNA, 19 nt, Artificial Sequence
  Description of Artificial Sequence: Synthetic oligonucleotide
cccagaugauuggagaggu

SEQ ID NO: 131688 - RNA, 19 nt, Artificial Sequence
  Description of Artificial Sequence: Synthetic oligonucleotide
ucaucaggaagggcucaaa

SEQ ID NO: 131689 - RNA, 19 nt, Artificial Sequence
  Description of Artificial Sequence: Synthetic oligonucleotide
agaaugacuuuuuucuuca

SEQ ID NO: 131690 - RNA, 19 nt, Artificial Sequence
  Description of Artificial Sequence: Synthetic oligonucleotide
acuacaucuucauggagaa

SEQ ID NO: 131691 - RNA, 19 nt, Artificial Sequence
  Description of Artificial Sequence: Synthetic oligonucleotide
augccuuugaacuccccac

SEQ ID NO: 131692 - RNA, 19 nt, Artificial Sequence
  Description of Artificial Sequence: Synthetic oligonucleotide
cuggagcuggauuacaguu

SEQ ID NO: 131693 - RNA, 19 nt, Artificial Sequence
  Description of Artificial Sequence: Synthetic oligonucleotide
ugcaaauaucuucaucugg

SEQ ID NO: 131694 - RNA, 19 nt, Artificial Sequence
  Description of Artificial Sequence: Synthetic oligonucleotide
gagucauugcucccggagc

SEQ ID NO: 131695 - RNA, 19 nt, Artificial Sequence
  Description of Artificial Sequence: Synthetic oligonucleotide
ccaaggcuggaguaaaacu

SEQ ID NO: 131696 - RNA, 19 nt, Artificial Sequence
  Description of Artificial Sequence: Synthetic oligonucleotide
uggaaguagccaacaugca

SEQ ID NO: 131697 - RNA, 19 nt, Artificial Sequence
  Description of Artificial Sequence: Synthetic oligonucleotide
aggcugaacugguggcaaa

SEQ ID NO: 131698 - RNA, 19 nt, Artificial Sequence
  Description of Artificial Sequence: Synthetic oligonucleotide
aacccuccgugucugugga

SEQ ID NO: 131699 - RNA, 19 nt, Artificial Sequence
  Description of Artificial Sequence: Synthetic oligonucleotide
aguuugugacaaauauggg

SEQ ID NO: 131700 - RNA, 19 nt, Artificial Sequence
  Description of Artificial Sequence: Synthetic oligonucleotide
gcaucaucauuccggacuu

SEQ ID NO: 131701 - RNA, 19 nt, Artificial Sequence
  Description of Artificial Sequence: Synthetic oligonucleotide
ucgcuaggaguggggucca

SEQ ID NO: 131702 - RNA, 19 nt, Artificial Sequence
  Description of Artificial Sequence: Synthetic oligonucleotide
agaugaacaccaacuucuu

SEQ ID NO: 131703 - RNA, 19 nt, Artificial Sequence
  Description of Artificial Sequence: Synthetic oligonucleotide
uccacgagucgggucugga

SEQ ID NO: 131704 - RNA, 19 nt, Artificial Sequence
  Description of Artificial Sequence: Synthetic oligonucleotide
aggcucauguugcccuaaa

SEQ ID NO: 131705 - RNA, 19 nt, Artificial Sequence
  Description of Artificial Sequence: Synthetic oligonucleotide
aagcugggaagcugaaguu

SEQ ID NO: 131706 - RNA, 19 nt, Artificial Sequence
  Description of Artificial Sequence: Synthetic oligonucleotide
uuaucauuccuuccccaaa

SEQ ID NO: 131707 - RNA, 19 nt, Artificial Sequence
  Description of Artificial Sequence: Synthetic oligonucleotide
agagaccagucaagcugcu

SEQ ID NO: 131708 - RNA, 19 nt, Artificial Sequence
  Description of Artificial Sequence: Synthetic oligonucleotide
ucaguggaggcaacacauu

SEQ ID NO: 131709 - RNA, 19 nt, Artificial Sequence
  Description of Artificial Sequence: Synthetic oligonucleotide
uacauuuggucucuaccac

SEQ ID NO: 131710 - RNA, 19 nt, Artificial Sequence
  Description of Artificial Sequence: Synthetic oligonucleotide
ccaaaacggaggugauccc

SEQ ID NO: 131711 - RNA, 19 nt, Artificial Sequence
  Description of Artificial Sequence: Synthetic oligonucleotide
caccucucauugagaacag

SEQ ID NO: 131712 - RNA, 19 nt, Artificial Sequence
  Description of Artificial Sequence: Synthetic oligonucleotide
ggcaguccuggucaguuug

SEQ ID NO: 131713 - RNA, 19 nt, Artificial Sequence
  Description of Artificial Sequence: Synthetic oligonucleotide
gcaagcaagucuuuccugg

SEQ ID NO: 131714 - RNA, 19 nt, Artificial Sequence
  Description of Artificial Sequence: Synthetic oligonucleotide
gccugaauuacugcaccuc

SEQ ID NO: 131715 - RNA, 19 nt, Artificial Sequence
  Description of Artificial Sequence: Synthetic oligonucleotide
caggcgcuuacuccaacgc

SEQ ID NO: 131716 - RNA, 19 nt, Artificial Sequence
  Description of Artificial Sequence: Synthetic oligonucleotide
ccagcuccacagacuccgc

SEQ ID NO: 131717 - RNA, 19 nt, Artificial Sequence
  Description of Artificial Sequence: Synthetic oligonucleotide
ccuccuacuauccgcugac

SEQ ID NO: 131718 - RNA, 19 nt, Artificial Sequence
  Description of Artificial Sequence: Synthetic oligonucleotide
ccggggacaccagauuaga

SEQ ID NO: 131719 - RNA, 19 nt, Artificial Sequence
  Description of Artificial Sequence: Synthetic oligonucleotide
agcuggaacugaggccuac

SEQ ID NO: 131720 - RNA, 19 nt, Artificial Sequence
  Description of Artificial Sequence: Synthetic oligonucleotide
caggagagauugagcagua

SEQ ID NO: 131721 - RNA, 19 nt, Artificial Sequence
  Description of Artificial Sequence: Synthetic oligonucleotide
auucugucagcgcaaccua

SEQ ID NO: 131722 - RNA, 19 nt, Artificial Sequence
  Description of Artificial Sequence: Synthetic oligonucleotide
augagcuccagagagagga

SEQ ID NO: 131723 - RNA, 19 nt, Artificial Sequence
  Description of Artificial Sequence: Synthetic oligonucleotide
acagagccuugguggauac

SEQ ID NO: 131724 - RNA, 19 nt, Artificial Sequence
  Description of Artificial Sequence: Synthetic oligonucleotide
cccugaaguuuguaacuca

SEQ ID NO: 131725 - RNA, 19 nt, Artificial Sequence
  Description of Artificial Sequence: Synthetic oligonucleotide
aagcagaaggugcgaagca

SEQ ID NO: 131726 - RNA, 19 nt, Artificial Sequence
  Description of Artificial Sequence: Synthetic oligonucleotide
agacugaggcuaccaugac

SEQ ID NO: 131727 - RNA, 19 nt, Artificial Sequence
  Description of Artificial Sequence: Synthetic oligonucleotide
cauucaaauauaaucggca

SEQ ID NO: 131728 - RNA, 19 nt, Artificial Sequence
  Description of Artificial Sequence: Synthetic oligonucleotide
agaguaugaccuuguccag

SEQ ID NO: 131729 - RNA, 19 nt, Artificial Sequence
  Description of Artificial Sequence: Synthetic oligonucleotide
gugaaguccaaauuccgga

SEQ ID NO: 131730 - RNA, 19 nt, Artificial Sequence
  Description of Artificial Sequence: Synthetic oligonucleotide
auuuugauguugaccucgg

SEQ ID NO: 131731 - RNA, 19 nt, Artificial Sequence
  Description of Artificial Sequence: Synthetic oligonucleotide
gaacaauccucagaguuaa

SEQ ID NO: 131732 - RNA, 19 nt, Artificial Sequence
  Description of Artificial Sequence: Synthetic oligonucleotide
augaugaaucuacugaggg

SEQ ID NO: 131733 - RNA, 19 nt, Artificial Sequence
  Description of Artificial Sequence: Synthetic oligonucleotide
gcaaaacgucuuacagacu

SEQ ID NO: 131734 - RNA, 19 nt, Artificial Sequence
  Description of Artificial Sequence: Synthetic oligonucleotide
ucacccuggacauucagaa

SEQ ID NO: 131735 - RNA, 19 nt, Artificial Sequence
  Description of Artificial Sequence: Synthetic oligonucleotide
acaagaaaauuacugaggu

SEQ ID NO: 131736 - RNA, 19 nt, Artificial Sequence
  Description of Artificial Sequence: Synthetic oligonucleotide
ucgcccucaugggccaccu

SEQ ID NO: 131737 - RNA, 19 nt, Artificial Sequence
  Description of Artificial Sequence: Synthetic oligonucleotide
uaaguugugacacaaagga

SEQ ID NO: 131738 - RNA, 19 nt, Artificial Sequence
  Description of Artificial Sequence: Synthetic oligonucleotide
aagaaagaaaaaucaaggg

SEQ ID NO: 131739 - RNA, 19 nt, Artificial Sequence
  Description of Artificial Sequence: Synthetic oligonucleotide
guguuauuuccauaccccg

SEQ ID NO: 131740 - RNA, 19 nt, Artificial Sequence
  Description of Artificial Sequence: Synthetic oligonucleotide
guuugcaagcagaagccag

SEQ ID NO: 131741 - RNA, 19 nt, Artificial Sequence
  Description of Artificial Sequence: Synthetic oligonucleotide
gaagugagauccucgccca

SEQ ID NO: 131742 - RNA, 19 nt, Artificial Sequence
  Description of Artificial Sequence: Synthetic oligonucleotide
acuggucgccugccaaacu

SEQ ID NO: 131743 - RNA, 19 nt, Artificial Sequence
  Description of Artificial Sequence: Synthetic oligonucleotide
ugcuucuccaaauggacuc

SEQ ID NO: 131744 - RNA, 19 nt, Artificial Sequence
  Description of Artificial Sequence: Synthetic oligonucleotide
caucugcuacagcuuaugg

SEQ ID NO: 131745 - RNA, 19 nt, Artificial Sequence
  Description of Artificial Sequence: Synthetic oligonucleotide
gcuccacaguuuccaagag

SEQ ID NO: 131746 - RNA, 19 nt, Artificial Sequence
  Description of Artificial Sequence: Synthetic oligonucleotide
ggguggcauggcauuauga

SEQ ID NO: 131747 - RNA, 19 nt, Artificial Sequence
  Description of Artificial Sequence: Synthetic oligonucleotide
augaagagaagauugaauu

SEQ ID NO: 131748 - RNA, 19 nt, Artificial Sequence
  Description of Artificial Sequence: Synthetic oligonucleotide
uugaauggaacacaggcac

SEQ ID NO: 131749 - RNA, 19 nt, Artificial Sequence
  Description of Artificial Sequence: Synthetic oligonucleotide
ccaauguagauaccaaaaa

SEQ ID NO: 131750 - RNA, 19 nt, Artificial Sequence
  Description of Artificial Sequence: Synthetic oligonucleotide
aaaugacuuccaauuuccc

SEQ ID NO: 131751 - RNA, 19 nt, Artificial Sequence
  Description of Artificial Sequence: Synthetic oligonucleotide
cuguggaucucuccgauua

SEQ ID NO: 131752 - RNA, 19 nt, Artificial Sequence
  Description of Artificial Sequence: Synthetic oligonucleotide
auccuaagagcuugcauau

SEQ ID NO: 131753 - RNA, 19 nt, Artificial Sequence
  Description of Artificial Sequence: Synthetic oligonucleotide
uguaugcuaauagacuccu

SEQ ID NO: 131754 - RNA, 19 nt, Artificial Sequence
  Description of Artificial Sequence: Synthetic oligonucleotide
uggaucacagagucccuca

SEQ ID NO: 131755 - RNA, 19 nt, Artificial Sequence
  Description of Artificial Sequence: Synthetic oligonucleotide
aaacagacaugacuuuccg

SEQ ID NO: 131756 - RNA, 19 nt, Artificial Sequence
  Description of Artificial Sequence: Synthetic oligonucleotide
ggcacguggguuccaaauu

SEQ ID NO: 131757 - RNA, 19 nt, Artificial Sequence
  Description of Artificial Sequence: Synthetic oligonucleotide
uaauaguugcaaugagcuc

SEQ ID NO: 131758 - RNA, 19 nt, Artificial Sequence
  Description of Artificial Sequence: Synthetic oligonucleotide
cauggcuucagaaggcauc

SEQ ID NO: 131759 - RNA, 19 nt, Artificial Sequence
  Description of Artificial Sequence: Synthetic oligonucleotide
cugggagucuuccuuauac

SEQ ID NO: 131760 - RNA, 19 nt, Artificial Sequence
  Description of Artificial Sequence: Synthetic oligonucleotide
cccagacuuugcaagacca

SEQ ID NO: 131761 - RNA, 19 nt, Artificial Sequence
  Description of Artificial Sequence: Synthetic oligonucleotide
accucaauagccugaagga

SEQ ID NO: 131762 - RNA, 19 nt, Artificial Sequence
  Description of Artificial Sequence: Synthetic oligonucleotide
aguucaaccuccagaacau

SEQ ID NO: 131763 - RNA, 19 nt, Artificial Sequence
  Description of Artificial Sequence: Synthetic oligonucleotide
ugggauugccagacuucca

SEQ ID NO: 131764 - RNA, 19 nt, Artificial Sequence
  Description of Artificial Sequence: Synthetic oligonucleotide
acaucccagaaaaccucuu

SEQ ID NO: 131765 - RNA, 19 nt, Artificial Sequence
  Description of Artificial Sequence: Synthetic oligonucleotide
ucuuaaaaagcgauggccg

SEQ ID NO: 131766 - RNA, 19 nt, Artificial Sequence
  Description of Artificial Sequence: Synthetic oligonucleotide
gggucaaauauaccuugaa

SEQ ID NO: 131767 - RNA, 19 nt, Artificial Sequence
  Description of Artificial Sequence: Synthetic oligonucleotide
acaagaacaguuugaaaau

SEQ ID NO: 131768 - RNA, 19 nt, Artificial Sequence
  Description of Artificial Sequence: Synthetic oligonucleotide
uugagauuccuuugccuuu

SEQ ID NO: 131769 - RNA, 19 nt, Artificial Sequence
  Description of Artificial Sequence: Synthetic oligonucleotide
uugguggcaaauccuccag

SEQ ID NO: 131770 - RNA, 19 nt, Artificial Sequence
  Description of Artificial Sequence: Synthetic oligonucleotide
gagaucuaaagauguuaga

SEQ ID NO: 131771 - RNA, 19 nt, Artificial Sequence
  Description of Artificial Sequence: Synthetic oligonucleotide
agacuguuaggacaccagc

SEQ ID NO: 131772 - RNA, 19 nt, Artificial Sequence
  Description of Artificial Sequence: Synthetic oligonucleotide
cccuccacuucaagucugu

SEQ ID NO: 131773 - RNA, 19 nt, Artificial Sequence
  Description of Artificial Sequence: Synthetic oligonucleotide
ugggauuccaucugccauc

SEQ ID NO: 131774 - RNA, 19 nt, Artificial Sequence
  Description of Artificial Sequence: Synthetic oligonucleotide
cucgagaguuccaaguccc

SEQ ID NO: 131775 - RNA, 19 nt, Artificial Sequence
  Description of Artificial Sequence: Synthetic oligonucleotide
cuacuuuuaccauucccaa

SEQ ID NO: 131776 - RNA, 19 nt, Artificial Sequence
  Description of Artificial Sequence: Synthetic oligonucleotide
aguuguaucaacugcaagu

SEQ ID NO: 131777 - RNA, 19 nt, Artificial Sequence
  Description of Artificial Sequence: Synthetic oligonucleotide
ugccucuccuggguguucu

SEQ ID NO: 131778 - RNA, 19 nt, Artificial Sequence
  Description of Artificial Sequence: Synthetic oligonucleotide
uagaccucuccacgaaugu

SEQ ID NO: 131779 - RNA, 19 nt, Artificial Sequence
  Description of Artificial Sequence: Synthetic oligonucleotide
ucuacagcaacuuguacaa

SEQ ID NO: 131780 - RNA, 19 nt, Artificial Sequence
  Description of Artificial Sequence: Synthetic oligonucleotide
acugguccgccuccuacag

SEQ ID NO: 131781 - RNA, 19 nt, Artificial Sequence
  Description of Artificial Sequence: Synthetic oligonucleotide
gugguggcaacaccagcac

SEQ ID NO: 131782 - RNA, 19 nt, Artificial Sequence
  Description of Artificial Sequence: Synthetic oligonucleotide
cagaccauuucagccuucg

SEQ ID NO: 131783 - RNA, 19 nt, Artificial Sequence
  Description of Artificial Sequence: Synthetic oligonucleotide
gggcucguuaccacaugaa

SEQ ID NO: 131784 - RNA, 19 nt, Artificial Sequence
  Description of Artificial Sequence: Synthetic oligonucleotide
aggcugacucugugguuga

SEQ ID NO: 131785 - RNA, 19 nt, Artificial Sequence
  Description of Artificial Sequence: Synthetic oligonucleotide
accugcuuuccuacaaugu

SEQ ID NO: 131786 - RNA, 19 nt, Artificial Sequence
  Description of Artificial Sequence: Synthetic oligonucleotide
ugcaaggaucuggagaaac

SEQ ID NO: 131787 - RNA, 19 nt, Artificial Sequence
  Description of Artificial Sequence: Synthetic oligonucleotide
caacauaugaccacaagaa

SEQ ID NO: 131788 - RNA, 19 nt, Artificial Sequence
  Description of Artificial Sequence: Synthetic oligonucleotide
auacguucacacuaucaug

SEQ ID NO: 131789 - RNA, 19 nt, Artificial Sequence
  Description of Artificial Sequence: Synthetic oligonucleotide
gugaugggucucuacgcca

SEQ ID NO: 131790 - RNA, 19 nt, Artificial Sequence
  Description of Artificial Sequence: Synthetic oligonucleotide
acaaauuucuagauucgaa

SEQ ID NO: 131791 - RNA, 19 nt, Artificial Sequence
  Description of Artificial Sequence: Synthetic oligonucleotide
auaucaaauucagucaugu

SEQ ID NO: 131792 - RNA, 19 nt, Artificial Sequence
  Description of Artificial Sequence: Synthetic oligonucleotide
uagaaaaacuuggaaacaa

SEQ ID NO: 131793 - RNA, 19 nt, Artificial Sequence
  Description of Artificial Sequence: Synthetic oligonucleotide
acccagucucaaaagguuu

SEQ ID NO: 131794 - RNA, 19 nt, Artificial Sequence
  Description of Artificial Sequence: Synthetic oligonucleotide
uacuaauauucgaugcauc

SEQ ID NO: 131795 - RNA, 19 nt, Artificial Sequence
  Description of Artificial Sequence: Synthetic oligonucleotide
cuaguuccuggggaccaca

SEQ ID NO: 131796 - RNA, 19 nt, Artificial Sequence
  Description of Artificial Sequence: Synthetic oligonucleotide
agaugucugcuucaguuca

SEQ ID NO: 131797 - RNA, 19 nt, Artificial Sequence
  Description of Artificial Sequence: Synthetic oligonucleotide
auuuggacuccaaaaagaa

SEQ ID NO: 131798 - RNA, 19 nt, Artificial Sequence
  Description of Artificial Sequence: Synthetic oligonucleotide
aacagcauuuguuugucaa

SEQ ID NO: 131799 - RNA, 19 nt, Artificial Sequence
  Description of Artificial Sequence: Synthetic oligonucleotide
aagaagucaagauugaugg

SEQ ID NO: 131800 - RNA, 19 nt, Artificial Sequence
  Description of Artificial Sequence: Synthetic oligonucleotide
ggcaguucagagucucuuc

SEQ ID NO: 131801 - RNA, 19 nt, Artificial Sequence
  Description of Artificial Sequence: Synthetic oligonucleotide
cguucuaugcuaaaggcac

SEQ ID NO: 131802 - RNA, 19 nt, Artificial Sequence
  Description of Artificial Sequence: Synthetic oligonucleotide
cauauggccugucuuguca

SEQ ID NO: 131803 - RNA, 19 nt, Artificial Sequence
  Description of Artificial Sequence: Synthetic oligonucleotide
agagggauccuaacacugg

SEQ ID NO: 131804 - RNA, 19 nt, Artificial Sequence
  Description of Artificial Sequence: Synthetic oligonucleotide
gccggcucaauggagaguc

SEQ ID NO: 131805 - RNA, 19 nt, Artificial Sequence
  Description of Artificial Sequence: Synthetic oligonucleotide
ccaaccugagguuuaacuc

SEQ ID NO: 131806 - RNA, 19 nt, Artificial Sequence
  Description of Artificial Sequence: Synthetic oligonucleotide
ccuccuaccuccaaggcac

SEQ ID NO: 131807 - RNA, 19 nt, Artificial Sequence
  Description of Artificial Sequence: Synthetic oligonucleotide
ccaaccagauaacaggaag

SEQ ID NO: 131808 - RNA, 19 nt, Artificial Sequence
  Description of Artificial Sequence: Synthetic oligonucleotide
gauaugaagauggaacccu

SEQ ID NO: 131809 - RNA, 19 nt, Artificial Sequence
  Description of Artificial Sequence: Synthetic oligonucleotide
ucucccucaccuccaccuc

SEQ ID NO: 131810 - RNA, 19 nt, Artificial Sequence
  Description of Artificial Sequence: Synthetic oligonucleotide
cugaucugcaaaguggcau

SEQ ID NO: 131811 - RNA, 19 nt, Artificial Sequence
  Description of Artificial Sequence: Synthetic oligonucleotide
ucauuaaaaauacugcuuc

SEQ ID NO: 131812 - RNA, 19 nt, Artificial Sequence
  Description of Artificial Sequence: Synthetic oligonucleotide
cccuaaaguaugagaacua

SEQ ID NO: 131813 - RNA, 19 nt, Artificial Sequence
  Description of Artificial Sequence: Synthetic oligonucleotide
acgagcugacuuuaaaauc

SEQ ID NO: 131814 - RNA, 19 nt, Artificial Sequence
  Description of Artificial Sequence: Synthetic oligonucleotide
cugacaccaaugggaagua

SEQ ID NO: 131815 - RNA, 19 nt, Artificial Sequence
  Description of Artificial Sequence: Synthetic oligonucleotide
auaagaacuuugccacuuc

SEQ ID NO: 131816 - RNA, 19 nt, Artificial Sequence
  Description of Artificial Sequence: Synthetic oligonucleotide
cuaacaagauggauaugac

SEQ ID NO: 131817 - RNA, 19 nt, Artificial Sequence
  Description of Artificial Sequence: Synthetic oligonucleotide
ccuucucuaagcaaaaugc

SEQ ID NO: 131818 - RNA, 19 nt, Artificial Sequence
  Description of Artificial Sequence: Synthetic oligonucleotide
cacugcugcguucugaaua

SEQ ID NO: 131819 - RNA, 19 nt, Artificial Sequence
  Description of Artificial Sequence: Synthetic oligonucleotide
aucaggcugauuacgaguc

SEQ ID NO: 131820 - RNA, 19 nt, Artificial Sequence
  Description of Artificial Sequence: Synthetic oligonucleotide
cauugagguucuucagccu

SEQ ID NO: 131821 - RNA, 19 nt, Artificial Sequence
  Description of Artificial Sequence: Synthetic oligonucleotide
ugcuuucuggaucacuaaa

SEQ ID NO: 131822 - RNA, 19 nt, Artificial Sequence
  Description of Artificial Sequence: Synthetic oligonucleotide
auucccauggucuugaguu

SEQ ID NO: 131823 - RNA, 19 nt, Artificial Sequence
  Description of Artificial Sequence: Synthetic oligonucleotide
uaaaugcugacaucuuagg

SEQ ID NO: 131824 - RNA, 19 nt, Artificial Sequence
  Description of Artificial Sequence: Synthetic oligonucleotide
gcacugacaaaauuaauag

SEQ ID NO: 131825 - RNA, 19 nt, Artificial Sequence
  Description of Artificial Sequence: Synthetic oligonucleotide
guggugcucacaaggcgac

SEQ ID NO: 131826 - RNA, 19 nt, Artificial Sequence
  Description of Artificial Sequence: Synthetic oligonucleotide
cacuaaggauuggccaaga

SEQ ID NO: 131827 - RNA, 19 nt, Artificial Sequence
  Description of Artificial Sequence: Synthetic oligonucleotide
auggaauaucuaccagugc

SEQ ID NO: 131828 - RNA, 19 nt, Artificial Sequence
  Description of Artificial Sequence: Synthetic oligonucleotide
caacgaccaacuugaagug

SEQ ID NO: 131829 - RNA, 19 nt, Artificial Sequence
  Description of Artificial Sequence: Synthetic oligonucleotide
guagucuccuggugcugga

SEQ ID NO: 131830 - RNA, 19 nt, Artificial Sequence
  Description of Artificial Sequence: Synthetic oligonucleotide
agaaugagcugaaugcaga

SEQ ID NO: 131831 - RNA, 19 nt, Artificial Sequence
  Description of Artificial Sequence: Synthetic oligonucleotide
agcuuggccucucuggggc

SEQ ID NO: 131832 - RNA, 19 nt, Artificial Sequence
  Description of Artificial Sequence: Synthetic oligonucleotide
caucuaugaaauuaacaac

SEQ ID NO: 131833 - RNA, 19 nt, Artificial Sequence
  Description of Artificial Sequence: Synthetic oligonucleotide
caaauggccgcuucaggga

SEQ ID NO: 131834 - RNA, 19 nt, Artificial Sequence
  Description of Artificial Sequence: Synthetic oligonucleotide
aacacaaugcaaaauucag

SEQ ID NO: 131835 - RNA, 19 nt, Artificial Sequence
  Description of Artificial Sequence: Synthetic oligonucleotide
gucuggaugggaaagccgc

SEQ ID NO: 131836 - RNA, 19 nt, Artificial Sequence
  Description of Artificial Sequence: Synthetic oligonucleotide
cccucacagagcuaucacu

SEQ ID NO: 131837 - RNA, 19 nt, Artificial Sequence
  Description of Artificial Sequence: Synthetic oligonucleotide
ugggaagugcuuaucaggc

SEQ ID NO: 131838 - RNA, 19 nt, Artificial Sequence
  Description of Artificial Sequence: Synthetic oligonucleotide
ccaugauucugggugucga

SEQ ID NO: 131839 - RNA, 19 nt, Artificial Sequence
  Description of Artificial Sequence: Synthetic oligonucleotide
acagcaaaaacauuuucaa

SEQ ID NO: 131840 - RNA, 19 nt, Artificial Sequence
  Description of Artificial Sequence: Synthetic oligonucleotide
acuucaaggucagucaaga

SEQ ID NO: 131841 - RNA, 19 nt, Artificial Sequence
  Description of Artificial Sequence: Synthetic oligonucleotide
aaggacuuaagcucucaaa

SEQ ID NO: 131842 - RNA, 19 nt, Artificial Sequence
  Description of Artificial Sequence: Synthetic oligonucleotide
augacaugaugggcucaua

SEQ ID NO: 131843 - RNA, 19 nt, Artificial Sequence
  Description of Artificial Sequence: Synthetic oligonucleotide
augcugaaaugaaauuuga

SEQ ID NO: 131844 - RNA, 19 nt, Artificial Sequence
  Description of Artificial Sequence: Synthetic oligonucleotide
accacacaaacagucugaa

SEQ ID NO: 131845 - RNA, 19 nt, Artificial Sequence
  Description of Artificial Sequence: Synthetic oligonucleotide
acauugcaggcuuaucacu

SEQ ID NO: 131846 - RNA, 19 nt, Artificial Sequence
  Description of Artificial Sequence: Synthetic oligonucleotide
uggacuucucuucaaaacu

SEQ ID NO: 131847 - RNA, 19 nt, Artificial Sequence
  Description of Artificial Sequence: Synthetic oligonucleotide
uugacaacauuuacagcuc

SEQ ID NO: 131848 - RNA, 19 nt, Artificial Sequence
  Description of Artificial Sequence: Synthetic oligonucleotide
cugacaaguuuuauaagca

SEQ ID NO: 131849 - RNA, 19 nt, Artificial Sequence
  Description of Artificial Sequence: Synthetic oligonucleotide
aaacuguuaauuuacagcu

SEQ ID NO: 131850 - RNA, 19 nt, Artificial Sequence
  Description of Artificial Sequence: Synthetic oligonucleotide
uacagcccuauucucuggu

SEQ ID NO: 131851 - RNA, 19 nt, Artificial Sequence
  Description of Artificial Sequence: Synthetic oligonucleotide
uaacuacuuuaaacaguga

SEQ ID NO: 131852 - RNA, 19 nt, Artificial Sequence
  Description of Artificial Sequence: Synthetic oligonucleotide
accugaaauacaaugcucu

SEQ ID NO: 131853 - RNA, 19 nt, Artificial Sequence
  Description of Artificial Sequence: Synthetic oligonucleotide
uggaucucaccaacaaugg

SEQ ID NO: 131854 - RNA, 19 nt, Artificial Sequence
  Description of Artificial Sequence: Synthetic oligonucleotide
ggaaacuacggcuagaacc

SEQ ID NO: 131855 - RNA, 19 nt, Artificial Sequence
  Description of Artificial Sequence: Synthetic oligonucleotide
cccugaagcugcauguggc

SEQ ID NO: 131856 - RNA, 19 nt, Artificial Sequence
  Description of Artificial Sequence: Synthetic oligonucleotide
cugguaaccuaaaaggagc

SEQ ID NO: 131857 - RNA, 19 nt, Artificial Sequence
  Description of Artificial Sequence: Synthetic oligonucleotide
ccuaccaaaauaaugaaau

SEQ ID NO: 131858 - RNA, 19 nt, Artificial Sequence
  Description of Artificial Sequence: Synthetic oligonucleotide
uaaaacacaucuaugccau

SEQ ID NO: 131859 - RNA, 19 nt, Artificial Sequence
  Description of Artificial Sequence: Synthetic oligonucleotide
ucucuucugcugccuuauc

SEQ ID NO: 131860 - RNA, 19 nt, Artificial Sequence
  Description of Artificial Sequence: Synthetic oligonucleotide
cagcaagcuauaaagcaga

SEQ ID NO: 131861 - RNA, 19 nt, Artificial Sequence
  Description of Artificial Sequence: Synthetic oligonucleotide
acacuguugcuaagguuca

SEQ ID NO: 131862 - RNA, 19 nt, Artificial Sequence
  Description of Artificial Sequence: Synthetic oligonucleotide
aggguguggaguuuagcca

SEQ ID NO: 131863 - RNA, 19 nt, Artificial Sequence
  Description of Artificial Sequence: Synthetic oligonucleotide
aucggcucaacacagacau

SEQ ID NO: 131864 - RNA, 19 nt, Artificial Sequence
  Description of Artificial Sequence: Synthetic oligonucleotide
ucgcugggcuggcuucagc

SEQ ID NO: 131865 - RNA, 19 nt, Artificial Sequence
  Description of Artificial Sequence: Synthetic oligonucleotide
ccauugacaugagcacaaa

SEQ ID NO: 131866 - RNA, 19 nt, Artificial Sequence
  Description of Artificial Sequence: Synthetic oligonucleotide
acuauaauucagacucacu

SEQ ID NO: 131867 - RNA, 19 nt, Artificial Sequence
  Description of Artificial Sequence: Synthetic oligonucleotide
ugcauuucagcaaugucuu

SEQ ID NO: 131868 - RNA, 19 nt, Artificial Sequence
  Description of Artificial Sequence: Synthetic oligonucleotide
uccguucuguaauggcccc

SEQ ID NO: 131869 - RNA, 19 nt, Artificial Sequence
  Description of Artificial Sequence: Synthetic oligonucleotide
cguuuaccaugaccaucga

SEQ ID NO: 131870 - RNA, 19 nt, Artificial Sequence
  Description of Artificial Sequence: Synthetic oligonucleotide
augcacauacaaauggcaa

SEQ ID NO: 131871 - RNA, 19 nt, Artificial Sequence
  Description of Artificial Sequence: Synthetic oligonucleotide
augggaaacucgcucucug

SEQ ID NO: 131872 - RNA, 19 nt, Artificial Sequence
  Description of Artificial Sequence: Synthetic oligonucleotide
ggggagaacauacugggca

SEQ ID NO: 131873 - RNA, 19 nt, Artificial Sequence
  Description of Artificial Sequence: Synthetic oligonucleotide
agcuguauagcaaauuccu

SEQ ID NO: 131874 - RNA, 19 nt, Artificial Sequence
  Description of Artificial Sequence: Synthetic oligonucleotide
uguugaaagcagaaccucu

SEQ ID NO: 131875 - RNA, 19 nt, Artificial Sequence
  Description of Artificial Sequence: Synthetic oligonucleotide
uggcauuuacuuucucuca

SEQ ID NO: 131876 - RNA, 19 nt, Artificial Sequence
  Description of Artificial Sequence: Synthetic oligonucleotide
augauuacaaaggcuccac

SEQ ID NO: 131877 - RNA, 19 nt, Artificial Sequence
  Description of Artificial Sequence: Synthetic oligonucleotide
caagucaucaucucguguc

SEQ ID NO: 131878 - RNA, 19 nt, Artificial Sequence
  Description of Artificial Sequence: Synthetic oligonucleotide
cuaggaaaagcaucagugc

SEQ ID NO: 131879 - RNA, 19 nt, Artificial Sequence
  Description of Artificial Sequence: Synthetic oligonucleotide
cagcucuugaacacaaagu

SEQ ID NO: 131880 - RNA, 19 nt, Artificial Sequence
  Description of Artificial Sequence: Synthetic oligonucleotide
ucagugcccugcuuacucc

SEQ ID NO: 131881 - RNA, 19 nt, Artificial Sequence
  Description of Artificial Sequence: Synthetic oligonucleotide
cagcugagcagacaggcac

SEQ ID NO: 131882 - RNA, 19 nt, Artificial Sequence
  Description of Artificial Sequence: Synthetic oligonucleotide
ccuggaaacucaagaccca

SEQ ID NO: 131883 - RNA, 19 nt, Artificial Sequence
  Description of Artificial Sequence: Synthetic oligonucleotide
aauuuaacaacaaugaaua

SEQ ID NO: 131884 - RNA, 19 nt, Artificial Sequence
  Description of Artificial Sequence: Synthetic oligonucleotide
acagccaggacuuggaugc

SEQ ID NO: 131885 - RNA, 19 nt, Artificial Sequence
  Description of Artificial Sequence: Synthetic oligonucleotide
cuuacaacacuaaagauaa

SEQ ID NO: 131886 - RNA, 19 nt, Artificial Sequence
  Description of Artificial Sequence: Synthetic oligonucleotide
aaauuggcguggagcuuac

SEQ ID NO: 131887 - RNA, 19 nt, Artificial Sequence
  Description of Artificial Sequence: Synthetic oligonucleotide
cuggacgaacucuggcuga

SEQ ID NO: 131888 - RNA, 19 nt, Artificial Sequence
  Description of Artificial Sequence: Synthetic oligonucleotide
accuaacucuacuagacuc

SEQ ID NO: 131889 - RNA, 19 nt, Artificial Sequence
  Description of Artificial Sequence: Synthetic oligonucleotide
ccccaauuaaagugccacu

SEQ ID NO: 131890 - RNA, 19 nt, Artificial Sequence
  Description of Artificial Sequence: Synthetic oligonucleotide
uuuuacucagugagcccau

SEQ ID NO: 131891 - RNA, 19 nt, Artificial Sequence
  Description of Artificial Sequence: Synthetic oligonucleotide
ucaauaucauugaugcuuu

SEQ ID NO: 131892 - RNA, 19 nt, Artificial Sequence
  Description of Artificial Sequence: Synthetic oligonucleotide
uagagaugagagaugccgu

SEQ ID NO: 131893 - RNA, 19 nt, Artificial Sequence
  Description of Artificial Sequence: Synthetic oligonucleotide
uugagaagccccaagaauu

SEQ ID NO: 131894 - RNA, 19 nt, Artificial Sequence
  Description of Artificial Sequence: Synthetic oligonucleotide
uuacaauuguugcuuuugu

SEQ ID NO: 131895 - RNA, 19 nt, Artificial Sequence
  Description of Artificial Sequence: Synthetic oligonucleotide
uaaaguaugauaaaaacca

SEQ ID NO: 131896 - RNA, 19 nt, Artificial Sequence
  Description of Artificial Sequence: Synthetic oligonucleotide
aagauguucacuccauuaa

SEQ ID NO: 131897 - RNA, 19 nt, Artificial Sequence
  Description of Artificial Sequence: Synthetic oligonucleotide
accucccauuuuuugagac

SEQ ID NO: 131898 - RNA, 19 nt, Artificial Sequence
  Description of Artificial Sequence: Synthetic oligonucleotide
ccuugcaagaauauuuuga

SEQ ID NO: 131899 - RNA, 19 nt, Artificial Sequence
  Description of Artificial Sequence: Synthetic oligonucleotide
agaggaaucgacaaaccau

SEQ ID NO: 131900 - RNA, 19 nt, Artificial Sequence
  Description of Artificial Sequence: Synthetic oligonucleotide
uuauaguuguacuggaaaa

SEQ ID NO: 131901 - RNA, 19 nt, Artificial Sequence
  Description of Artificial Sequence: Synthetic oligonucleotide
acguacagagaaaccugaa

SEQ ID NO: 131902 - RNA, 19 nt, Artificial Sequence
  Description of Artificial Sequence: Synthetic oligonucleotide
agcacaucaauauugauca

SEQ ID NO: 131903 - RNA, 19 nt, Artificial Sequence
  Description of Artificial Sequence: Synthetic oligonucleotide
aauuuguaagaaaauacag

SEQ ID NO: 131904 - RNA, 19 nt, Artificial Sequence
  Description of Artificial Sequence: Synthetic oligonucleotide
gagcagcccugggaaaacu

SEQ ID NO: 131905 - RNA, 19 nt, Artificial Sequence
  Description of Artificial Sequence: Synthetic oligonucleotide
ucccacagcaagcuaauga

SEQ ID NO: 131906 - RNA, 19 nt, Artificial Sequence
  Description of Artificial Sequence: Synthetic oligonucleotide
auuaucugaauucauucaa

SEQ ID NO: 131907 - RNA, 19 nt, Artificial Sequence
  Description of Artificial Sequence: Synthetic oligonucleotide
auugggagagacaaguuuc

SEQ ID NO: 131908 - RNA, 19 nt, Artificial Sequence
  Description of Artificial Sequence: Synthetic oligonucleotide
cacaugccaaggagaaacu

SEQ ID NO: 131909 - RNA, 19 nt, Artificial Sequence
  Description of Artificial Sequence: Synthetic oligonucleotide
ugacugcucucacaaaaaa

SEQ ID NO: 131910 - RNA, 19 nt, Artificial Sequence
  Description of Artificial Sequence: Synthetic oligonucleotide
aguauagaauuacagaaaa

SEQ ID NO: 131911 - RNA, 19 nt, Artificial Sequence
  Description of Artificial Sequence: Synthetic oligonucleotide
augauauacaaauugcauu

SEQ ID NO: 131912 - RNA, 19 nt, Artificial Sequence
  Description of Artificial Sequence: Synthetic oligonucleotide
uagaugaugccaaaaucaa

SEQ ID NO: 131913 - RNA, 19 nt, Artificial Sequence
  Description of Artificial Sequence: Synthetic oligonucleotide
acuuuaaugaaaaacuauc

SEQ ID NO: 131914 - RNA, 19 nt, Artificial Sequence
  Description of Artificial Sequence: Synthetic oligonucleotide
cucaacugcagacauauau

SEQ ID NO: 131915 - RNA, 19 nt, Artificial Sequence
  Description of Artificial Sequence: Synthetic oligonucleotide
ugauacaauuugaucagua

SEQ ID NO: 131916 - RNA, 19 nt, Artificial Sequence
  Description of Artificial Sequence: Synthetic oligonucleotide
auauuaaagauaguuauga

SEQ ID NO: 131917 - RNA, 19 nt, Artificial Sequence
  Description of Artificial Sequence: Synthetic oligonucleotide
auuuacaugauuugaaaau

SEQ ID NO: 131918 - RNA, 19 nt, Artificial Sequence
  Description of Artificial Sequence: Synthetic oligonucleotide
uagcuauugcuaauauuau

SEQ ID NO: 131919 - RNA, 19 nt, Artificial Sequence
  Description of Artificial Sequence: Synthetic oligonucleotide
uugaugaaaucauugaaaa

SEQ ID NO: 131920 - RNA, 19 nt, Artificial Sequence
  Description of Artificial Sequence: Synthetic oligonucleotide
aauuaaaaagucuugauga

SEQ ID NO: 131921 - RNA, 19 nt, Artificial Sequence
  Description of Artificial Sequence: Synthetic oligonucleotide
agcacuaucauauccgugu

SEQ ID NO: 131922 - RNA, 19 nt, Artificial Sequence
  Description of Artificial Sequence: Synthetic oligonucleotide
uaaauuuaguaaaaacaau

SEQ ID NO: 131923 - RNA, 19 nt, Artificial Sequence
  Description of Artificial Sequence: Synthetic oligonucleotide
uccaugaucuacauuuguu

SEQ ID NO: 131924 - RNA, 19 nt, Artificial Sequence
  Description of Artificial Sequence: Synthetic oligonucleotide
uuauugaaaauauugauuu

SEQ ID NO: 131925 - RNA, 19 nt, Artificial Sequence
  Description of Artificial Sequence: Synthetic oligonucleotide
uuaacaaaaguggaaguag

SEQ ID NO: 131926 - RNA, 19 nt, Artificial Sequence
  Description of Artificial Sequence: Synthetic oligonucleotide
guacugcauccuggauuca

SEQ ID NO: 131927 - RNA, 19 nt, Artificial Sequence
  Description of Artificial Sequence: Synthetic oligonucleotide
aaaauguggauacuaagua

SEQ ID NO: 131928 - RNA, 19 nt, Artificial Sequence
  Description of Artificial Sequence: Synthetic oligonucleotide
accaaaucagaauccagau

SEQ ID NO: 131929 - RNA, 19 nt, Artificial Sequence
  Description of Artificial Sequence: Synthetic oligonucleotide
uacaagaaaaacugcagca

SEQ ID NO: 131930 - RNA, 19 nt, Artificial Sequence
  Description of Artificial Sequence: Synthetic oligonucleotide
agcuuaagagacacauaca

SEQ ID NO: 131931 - RNA, 19 nt, Artificial Sequence
  Description of Artificial Sequence: Synthetic oligonucleotide
agaauauagacauccagca

SEQ ID NO: 131932 - RNA, 19 nt, Artificial Sequence
  Description of Artificial Sequence: Synthetic oligonucleotide
accuagcuggaaaguuaaa

SEQ ID NO: 131933 - RNA, 19 nt, Artificial Sequence
  Description of Artificial Sequence: Synthetic oligonucleotide
aacaacacauugaggcuau

SEQ ID NO: 131934 - RNA, 19 nt, Artificial Sequence
  Description of Artificial Sequence: Synthetic oligonucleotide
uugauguuagagugcuuuu

SEQ ID NO: 131935 - RNA, 19 nt, Artificial Sequence
  Description of Artificial Sequence: Synthetic oligonucleotide
uagaucaauugggaacuac

SEQ ID NO: 131936 - RNA, 19 nt, Artificial Sequence
  Description of Artificial Sequence: Synthetic oligonucleotide
caauuucauuugaaagaau

SEQ ID NO: 131937 - RNA, 19 nt, Artificial Sequence
  Description of Artificial Sequence: Synthetic oligonucleotide
uaaaugacguucuugagca

SEQ ID NO: 131938 - RNA, 19 nt, Artificial Sequence
  Description of Artificial Sequence: Synthetic oligonucleotide
augucaaacacuuuguuau

SEQ ID NO: 131939 - RNA, 19 nt, Artificial Sequence
  Description of Artificial Sequence: Synthetic oligonucleotide
uaaaucuuauuggggauuu

SEQ ID NO: 131940 - RNA, 19 nt, Artificial Sequence
  Description of Artificial Sequence: Synthetic oligonucleotide
uugaaguagcugagaaaau

SEQ ID NO: 131941 - RNA, 19 nt, Artificial Sequence
  Description of Artificial Sequence: Synthetic oligonucleotide
ucaaugccuucagagccaa

SEQ ID NO: 131942 - RNA, 19 nt, Artificial Sequence
  Description of Artificial Sequence: Synthetic oligonucleotide
aaguccaugaguuaaucga

SEQ ID NO: 131943 - RNA, 19 nt, Artificial Sequence
  Description of Artificial Sequence: Synthetic oligonucleotide
agagguaugaaguagacca

SEQ ID NO: 131944 - RNA, 19 nt, Artificial Sequence
  Description of Artificial Sequence: Synthetic oligonucleotide
aacaaauccagguuuuaau

SEQ ID NO: 131945 - RNA, 19 nt, Artificial Sequence
  Description of Artificial Sequence: Synthetic oligonucleotide
uggauaaauuaguagaguu

SEQ ID NO: 131946 - RNA, 19 nt, Artificial Sequence
  Description of Artificial Sequence: Synthetic oligonucleotide
uggcccaccaauacaaguu

SEQ ID NO: 131947 - RNA, 19 nt, Artificial Sequence
  Description of Artificial Sequence: Synthetic oligonucleotide
ugaaggagacuauucagaa

SEQ ID NO: 131948 - RNA, 19 nt, Artificial Sequence
  Description of Artificial Sequence: Synthetic oligonucleotide
agcuaagcaauguccuaca

SEQ ID NO: 131949 - RNA, 19 nt, Artificial Sequence
  Description of Artificial Sequence: Synthetic oligonucleotide
aacaaguuaagauaaaaga

SEQ ID NO: 131950 - RNA, 19 nt, Artificial Sequence
  Description of Artificial Sequence: Synthetic oligonucleotide
auuacuuugagaaauuggu

SEQ ID NO: 131951 - RNA, 19 nt, Artificial Sequence
  Description of Artificial Sequence: Synthetic oligonucleotide
uuggauuuauugaugaugc

SEQ ID NO: 131952 - RNA, 19 nt, Artificial Sequence
  Description of Artificial Sequence: Synthetic oligonucleotide
cugucaagaagcuuaauga

SEQ ID NO: 131953 - RNA, 19 nt, Artificial Sequence
  Description of Artificial Sequence: Synthetic oligonucleotide
aauuaucuuuuaaaacauu

SEQ ID NO: 131954 - RNA, 19 nt, Artificial Sequence
  Description of Artificial Sequence: Synthetic oligonucleotide
ucauugaagauguuaacaa

SEQ ID NO: 131955 - RNA, 19 nt, Artificial Sequence
  Description of Artificial Sequence: Synthetic oligonucleotide
aauuccuugacauguugau

SEQ ID NO: 131956 - RNA, 19 nt, Artificial Sequence
  Description of Artificial Sequence: Synthetic oligonucleotide
uaaagaaauuaaagucauu

SEQ ID NO: 131957 - RNA, 19 nt, Artificial Sequence
  Description of Artificial Sequence: Synthetic oligonucleotide
uugauuaccaccaguuugu

SEQ ID NO: 131958 - RNA, 19 nt, Artificial Sequence
  Description of Artificial Sequence: Synthetic oligonucleotide
uagaugaaaccaaugacaa

SEQ ID NO: 131959 - RNA, 19 nt, Artificial Sequence
  Description of Artificial Sequence: Synthetic oligonucleotide
aaauccgugaggugacuca

SEQ ID NO: 131960 - RNA, 19 nt, Artificial Sequence
  Description of Artificial Sequence: Synthetic oligonucleotide
agagacucaauggugaaau

SEQ ID NO: 131961 - RNA, 19 nt, Artificial Sequence
  Description of Artificial Sequence: Synthetic oligonucleotide
uucaggcucuggaacuacc

SEQ ID NO: 131962 - RNA, 19 nt, Artificial Sequence
  Description of Artificial Sequence: Synthetic oligonucleotide
cacaaaaagcugaagcauu

SEQ ID NO: 131963 - RNA, 19 nt, Artificial Sequence
  Description of Artificial Sequence: Synthetic oligonucleotide
uaaaacuguuuuuagagga

SEQ ID NO: 131964 - RNA, 19 nt, Artificial Sequence
  Description of Artificial Sequence: Synthetic oligonucleotide
aaaccaaggccacaguugc

SEQ ID NO: 131965 - RNA, 19 nt, Artificial Sequence
  Description of Artificial Sequence: Synthetic oligonucleotide
caguguaucuggaaagccu

SEQ ID NO: 131966 - RNA, 19 nt, Artificial Sequence
  Description of Artificial Sequence: Synthetic oligonucleotide
uacaggacaccaaaauaac

SEQ ID NO: 131967 - RNA, 19 nt, Artificial Sequence
  Description of Artificial Sequence: Synthetic oligonucleotide
ccuuaaucaucaauugguu

SEQ ID NO: 131968 - RNA, 19 nt, Artificial Sequence
  Description of Artificial Sequence: Synthetic oligonucleotide
uacaggaggcuuuaaguuc

SEQ ID NO: 131969 - RNA, 19 nt, Artificial Sequence
  Description of Artificial Sequence: Synthetic oligonucleotide
cagcaucuuuggcucacau

SEQ ID NO: 131970 - RNA, 19 nt, Artificial Sequence
  Description of Artificial Sequence: Synthetic oligonucleotide
ugaaggccaaauuccgaga

SEQ ID NO: 131971 - RNA, 19 nt, Artificial Sequence
  Description of Artificial Sequence: Synthetic oligonucleotide
agacccuagaagauacacg

SEQ ID NO: 131972 - RNA, 19 nt, Artificial Sequence
  Description of Artificial Sequence: Synthetic oligonucleotide
gagaccgaauguaucaaau

SEQ ID NO: 131973 - RNA, 19 nt, Artificial Sequence
  Description of Artificial Sequence: Synthetic oligonucleotide
uggacauucagcaggaacu

SEQ ID NO: 131974 - RNA, 19 nt, Artificial Sequence
  Description of Artificial Sequence: Synthetic oligonucleotide
uucaacgauaccugucucu

SEQ ID NO: 131975 - RNA, 19 nt, Artificial Sequence
  Description of Artificial Sequence: Synthetic oligonucleotide
ugguaggccagguuuauag

SEQ ID NO: 131976 - RNA, 19 nt, Artificial Sequence
  Description of Artificial Sequence: Synthetic oligonucleotide
gcacacuugucaccuacau

SEQ ID NO: 131977 - RNA, 19 nt, Artificial Sequence
  Description of Artificial Sequence: Synthetic oligonucleotide
uuucugauugguggacucu

SEQ ID NO: 131978 - RNA, 19 nt, Artificial Sequence
  Description of Artificial Sequence: Synthetic oligonucleotide
uugcugcuaagaaccuuac

SEQ ID NO: 131979 - RNA, 19 nt, Artificial Sequence
  Description of Artificial Sequence: Synthetic oligonucleotide
cugacuuugcagagcaaua

SEQ ID NO: 131980 - RNA, 19 nt, Artificial Sequence
  Description of Artificial Sequence: Synthetic oligonucleotide
auucuauccaagauugggc

SEQ ID NO: 131981 - RNA, 19 nt, Artificial Sequence
  Description of Artificial Sequence: Synthetic oligonucleotide
cuaaacguaugaaagcauu

SEQ ID NO: 131982 - RNA, 19 nt, Artificial Sequence
  Description of Artificial Sequence: Synthetic oligonucleotide
ugguagagcaaggguucac

SEQ ID NO: 131983 - RNA, 19 nt, Artificial Sequence
  Description of Artificial Sequence: Synthetic oligonucleotide
cuguuccugaaaucaagac

SEQ ID NO: 131984 - RNA, 19 nt, Artificial Sequence
  Description of Artificial Sequence: Synthetic oligonucleotide
ccauccuugggaccaugcc

SEQ ID NO: 131985 - RNA, 19 nt, Artificial Sequence
  Description of Artificial Sequence: Synthetic oligonucleotide
cugccuuugaagucagucu

SEQ ID NO: 131986 - RNA, 19 nt, Artificial Sequence
  Description of Artificial Sequence: Synthetic oligonucleotide
uucaggcucuucagaaagc

SEQ ID NO: 131987 - RNA, 19 nt, Artificial Sequence
  Description of Artificial Sequence: Synthetic oligonucleotide
cuaccuuccagacaccuga

SEQ ID NO: 131988 - RNA, 19 nt, Artificial Sequence
  Description of Artificial Sequence: Synthetic oligonucleotide
auuuuauagucccccuaac

SEQ ID NO: 131989 - RNA, 19 nt, Artificial Sequence
  Description of Artificial Sequence: Synthetic oligonucleotide
cagauuugaggauuccauc

SEQ ID NO: 131990 - RNA, 19 nt, Artificial Sequence
  Description of Artificial Sequence: Synthetic oligonucleotide
caguucagauaaacuucaa

SEQ ID NO: 131991 - RNA, 19 nt, Artificial Sequence
  Description of Artificial Sequence: Synthetic oligonucleotide
aagacuuaaaaaauauaaa

SEQ ID NO: 131992 - RNA, 19 nt, Artificial Sequence
  Description of Artificial Sequence: Synthetic oligonucleotide
aaaucccauccagguuuuc

SEQ ID NO: 131993 - RNA, 19 nt, Artificial Sequence
  Description of Artificial Sequence: Synthetic oligonucleotide
ccacaccagaauuuaccau

SEQ ID NO: 131994 - RNA, 19 nt, Artificial Sequence
  Description of Artificial Sequence: Synthetic oligonucleotide
uccuuaacaccuuccacau

SEQ ID NO: 131995 - RNA, 19 nt, Artificial Sequence
  Description of Artificial Sequence: Synthetic oligonucleotide
uuccuuccuuuacaauuga

SEQ ID NO: 131996 - RNA, 19 nt, Artificial Sequence
  Description of Artificial Sequence: Synthetic oligonucleotide
acuuuguagaaaugaaagu

SEQ ID NO: 131997 - RNA, 19 nt, Artificial Sequence
  Description of Artificial Sequence: Synthetic oligonucleotide
uaaagaucaucagaaccau

SEQ ID NO: 131998 - RNA, 19 nt, Artificial Sequence
  Description of Artificial Sequence: Synthetic oligonucleotide
uugaccagaugcugaacag

SEQ ID NO: 131999 - RNA, 19 nt, Artificial Sequence
  Description of Artificial Sequence: Synthetic oligonucleotide
gugagcugcaguggcccgu

SEQ ID NO: 132000 - RNA, 19 nt, Artificial Sequence
  Description of Artificial Sequence: Synthetic oligonucleotide
uuccagauauauaucucag

SEQ ID NO: 132001 - RNA, 19 nt, Artificial Sequence
  Description of Artificial Sequence: Synthetic oligonucleotide
gggaucugaagguggagga

SEQ ID NO: 132002 - RNA, 19 nt, Artificial Sequence
  Description of Artificial Sequence: Synthetic oligonucleotide
acauuccucuagcgagaau

SEQ ID NO: 132003 - RNA, 19 nt, Artificial Sequence
  Description of Artificial Sequence: Synthetic oligonucleotide
ucacccugccagacuuccg

SEQ ID NO: 132004 - RNA, 19 nt, Artificial Sequence
  Description of Artificial Sequence: Synthetic oligonucleotide
guuuaccagaaaucgcaau

SEQ ID NO: 132005 - RNA, 19 nt, Artificial Sequence
  Description of Artificial Sequence: Synthetic oligonucleotide
uuccagaauucauaauccc

SEQ ID NO: 132006 - RNA, 19 nt, Artificial Sequence
  Description of Artificial Sequence: Synthetic oligonucleotide
caacucucaaccuuaauga

SEQ ID NO: 132007 - RNA, 19 nt, Artificial Sequence
  Description of Artificial Sequence: Synthetic oligonucleotide
auuuucaaguuccugaccu

SEQ ID NO: 132008 - RNA, 19 nt, Artificial Sequence
  Description of Artificial Sequence: Synthetic oligonucleotide
uucacauaccagaauucca

SEQ ID NO: 132009 - RNA, 19 nt, Artificial Sequence
  Description of Artificial Sequence: Synthetic oligonucleotide
agcuuccccacaucucaca

SEQ ID NO: 132010 - RNA, 19 nt, Artificial Sequence
  Description of Artificial Sequence: Synthetic oligonucleotide
acacaauugaaguaccuac

SEQ ID NO: 132011 - RNA, 19 nt, Artificial Sequence
  Description of Artificial Sequence: Synthetic oligonucleotide
cuuuuggcaagcuauacag

SEQ ID NO: 132012 - RNA, 19 nt, Artificial Sequence
  Description of Artificial Sequence: Synthetic oligonucleotide
guauucugaaaauccaauc

SEQ ID NO: 132013 - RNA, 19 nt, Artificial Sequence
  Description of Artificial Sequence: Synthetic oligonucleotide
cuccucuuuucacauuaga

SEQ ID NO: 132014 - RNA, 19 nt, Artificial Sequence
  Description of Artificial Sequence: Synthetic oligonucleotide
augcaaaugcugacauagg

SEQ ID NO: 132015 - RNA, 19 nt, Artificial Sequence
  Description of Artificial Sequence: Synthetic oligonucleotide
ggaauggaaccaccucagc

SEQ ID NO: 132016 - RNA, 19 nt, Artificial Sequence
  Description of Artificial Sequence: Synthetic oligonucleotide
caaacgaagcagguaucgc

SEQ ID NO: 132017 - RNA, 19 nt, Artificial Sequence
  Description of Artificial Sequence: Synthetic oligonucleotide
cagcuuccaucacugccaa

SEQ ID NO: 132018 - RNA, 19 nt, Artificial Sequence
  Description of Artificial Sequence: Synthetic oligonucleotide
aaggagaguccaaauuaga

SEQ ID NO: 132019 - RNA, 19 nt, Artificial Sequence
  Description of Artificial Sequence: Synthetic oligonucleotide
aaguucucaauuuugauuu

SEQ ID NO: 132020 - RNA, 19 nt, Artificial Sequence
  Description of Artificial Sequence: Synthetic oligonucleotide
uucaagcaaaugcacaacu

SEQ ID NO: 132021 - RNA, 19 nt, Artificial Sequence
  Description of Artificial Sequence: Synthetic oligonucleotide
ucucaaacccuaagauuaa

SEQ ID NO: 132022 - RNA, 19 nt, Artificial Sequence
  Description of Artificial Sequence: Synthetic oligonucleotide
auccgcuggcucugaagga

SEQ ID NO: 132023 - RNA, 19 nt, Artificial Sequence
  Description of Artificial Sequence: Synthetic oligonucleotide
agucagugaaguucuccag

SEQ ID NO: 132024 - RNA, 19 nt, Artificial Sequence
  Description of Artificial Sequence: Synthetic oligonucleotide
gcaaguaccugagaacgga

SEQ ID NO: 132025 - RNA, 19 nt, Artificial Sequence
  Description of Artificial Sequence: Synthetic oligonucleotide
agcaugggagugaaaugcu

SEQ ID NO: 132026 - RNA, 19 nt, Artificial Sequence
  Description of Artificial Sequence: Synthetic oligonucleotide
uguuuuuuggaaaugcuau

SEQ ID NO: 132027 - RNA, 19 nt, Artificial Sequence
  Description of Artificial Sequence: Synthetic oligonucleotide
uugagggaaaaucaaacac

SEQ ID NO: 132028 - RNA, 19 nt, Artificial Sequence
  Description of Artificial Sequence: Synthetic oligonucleotide
caguggcaaguuuacacac

SEQ ID NO: 132029 - RNA, 19 nt, Artificial Sequence
  Description of Artificial Sequence: Synthetic oligonucleotide
cagaaaaaaauacacugga

SEQ ID NO: 132030 - RNA, 19 nt, Artificial Sequence
  Description of Artificial Sequence: Synthetic oligonucleotide
agcuuaguaauggagugau

SEQ ID NO: 132031 - RNA, 19 nt, Artificial Sequence
  Description of Artificial Sequence: Synthetic oligonucleotide
uugucaagauaaacaauca

SEQ ID NO: 132032 - RNA, 19 nt, Artificial Sequence
  Description of Artificial Sequence: Synthetic oligonucleotide
agcuuacccuggauagcaa

SEQ ID NO: 132033 - RNA, 19 nt, Artificial Sequence
  Description of Artificial Sequence: Synthetic oligonucleotide
acacuaaauacuuccacaa

SEQ ID NO: 132034 - RNA, 19 nt, Artificial Sequence
  Description of Artificial Sequence: Synthetic oligonucleotide
aauugaacauccccaaacu

SEQ ID NO: 132035 - RNA, 19 nt, Artificial Sequence
  Description of Artificial Sequence: Synthetic oligonucleotide
uggacuucucuagucaggc

SEQ ID NO: 132036 - RNA, 19 nt, Artificial Sequence
  Description of Artificial Sequence: Synthetic oligonucleotide
cugaccugcgcaacgagau

SEQ ID NO: 132037 - RNA, 19 nt, Artificial Sequence
  Description of Artificial Sequence: Synthetic oligonucleotide
ucaagacacuguugaaagc

SEQ ID NO: 132038 - RNA, 19 nt, Artificial Sequence
  Description of Artificial Sequence: Synthetic oligonucleotide
cuggccacauagcauggac

SEQ ID NO: 132039 - RNA, 19 nt, Artificial Sequence
  Description of Artificial Sequence: Synthetic oligonucleotide
cuucuucuggaaaaggguc

SEQ ID NO: 132040 - RNA, 19 nt, Artificial Sequence
  Description of Artificial Sequence: Synthetic oligonucleotide
cauggaaaugggccugccc

SEQ ID NO: 132041 - RNA, 19 nt, Artificial Sequence
  Description of Artificial Sequence: Synthetic oligonucleotide
ccagauucucagaugaggg

SEQ ID NO: 132042 - RNA, 19 nt, Artificial Sequence
  Description of Artificial Sequence: Synthetic oligonucleotide
gaacacaugaaucacaaau

SEQ ID NO: 132043 - RNA, 19 nt, Artificial Sequence
  Description of Artificial Sequence: Synthetic oligonucleotide
uuaguuucaccauagaagg

SEQ ID NO: 132044 - RNA, 19 nt, Artificial Sequence
  Description of Artificial Sequence: Synthetic oligonucleotide
gaccccucacuuccuuugg

SEQ ID NO: 132045 - RNA, 19 nt, Artificial Sequence
  Description of Artificial Sequence: Synthetic oligonucleotide
gacuguccaauaagaucaa

SEQ ID NO: 132046 - RNA, 19 nt, Artificial Sequence
  Description of Artificial Sequence: Synthetic oligonucleotide
auagcaaacaccuaagagu

SEQ ID NO: 132047 - RNA, 19 nt, Artificial Sequence
  Description of Artificial Sequence: Synthetic oligonucleotide
uaaaccaaaacuugguuua

SEQ ID NO: 132048 - RNA, 19 nt, Artificial Sequence
  Description of Artificial Sequence: Synthetic oligonucleotide
augaaucuggcucccucaa

SEQ ID NO: 132049 - RNA, 19 nt, Artificial Sequence
  Description of Artificial Sequence: Synthetic oligonucleotide
acuuuucuaaacuugaaau

SEQ ID NO: 132050 - RNA, 19 nt, Artificial Sequence
  Description of Artificial Sequence: Synthetic oligonucleotide
uucaaucacaagucgauuc

SEQ ID NO: 132051 - RNA, 19 nt, Artificial Sequence
  Description of Artificial Sequence: Synthetic oligonucleotide
cccagcaugugggccacag

SEQ ID NO: 132052 - RNA, 19 nt, Artificial Sequence
  Description of Artificial Sequence: Synthetic oligonucleotide
guguucuaacugcuaaagg

SEQ ID NO: 132053 - RNA, 19 nt, Artificial Sequence
  Description of Artificial Sequence: Synthetic oligonucleotide
gcauggcacuguuuggaga

SEQ ID NO: 132054 - RNA, 19 nt, Artificial Sequence
  Description of Artificial Sequence: Synthetic oligonucleotide
aagggaaggcagaguuuac

SEQ ID NO: 132055 - RNA, 19 nt, Artificial Sequence
  Description of Artificial Sequence: Synthetic oligonucleotide
cugggaggcaugaugcuca

SEQ ID NO: 132056 - RNA, 19 nt, Artificial Sequence
  Description of Artificial Sequence: Synthetic oligonucleotide
auuuaaauggaaagguuau

SEQ ID NO: 132057 - RNA, 19 nt, Artificial Sequence
  Description of Artificial Sequence: Synthetic oligonucleotide
uuggaacuuugaaaaauuc

SEQ ID NO: 132058 - RNA, 19 nt, Artificial Sequence
  Description of Artificial Sequence: Synthetic oligonucleotide
cucuuuucuuuucagccca

SEQ ID NO: 132059 - RNA, 19 nt, Artificial Sequence
  Description of Artificial Sequence: Synthetic oligonucleotide
agccauuugagaucacggc

SEQ ID NO: 132060 - RNA, 19 nt, Artificial Sequence
  Description of Artificial Sequence: Synthetic oligonucleotide
cauccacaaacaaugaagg

SEQ ID NO: 132061 - RNA, 19 nt, Artificial Sequence
  Description of Artificial Sequence: Synthetic oligonucleotide
ggaauuugaaaguucguuu

SEQ ID NO: 132062 - RNA, 19 nt, Artificial Sequence
  Description of Artificial Sequence: Synthetic oligonucleotide
uuccauuaagguuaacagg

SEQ ID NO: 132063 - RNA, 19 nt, Artificial Sequence
  Description of Artificial Sequence: Synthetic oligonucleotide
ggaagauagacuuccugaa

SEQ ID NO: 132064 - RNA, 19 nt, Artificial Sequence
  Description of Artificial Sequence: Synthetic oligonucleotide
auaacuaugcacuguuucu

SEQ ID NO: 132065 - RNA, 19 nt, Artificial Sequence
  Description of Artificial Sequence: Synthetic oligonucleotide
ugagucccagugcccagca

SEQ ID NO: 132066 - RNA, 19 nt, Artificial Sequence
  Description of Artificial Sequence: Synthetic oligonucleotide
aagcaaguuggcaaguaag

SEQ ID NO: 132067 - RNA, 19 nt, Artificial Sequence
  Description of Artificial Sequence: Synthetic oligonucleotide
gugcuagguucaaucagua

SEQ ID NO: 132068 - RNA, 19 nt, Artificial Sequence
  Description of Artificial Sequence: Synthetic oligonucleotide
auaaguacaaccaaaauuu

SEQ ID NO: 132069 - RNA, 19 nt, Artificial Sequence
  Description of Artificial Sequence: Synthetic oligonucleotide
ucucugcuggaaacaacga

SEQ ID NO: 132070 - RNA, 19 nt, Artificial Sequence
  Description of Artificial Sequence: Synthetic oligonucleotide
agaacauuauggaggccca

SEQ ID NO: 132071 - RNA, 19 nt, Artificial Sequence
  Description of Artificial Sequence: Synthetic oligonucleotide
auguaggaauaaauggaga

SEQ ID NO: 132072 - RNA, 19 nt, Artificial Sequence
  Description of Artificial Sequence: Synthetic oligonucleotide
aagcaaaucuggauuucuu

SEQ ID NO: 132073 - RNA, 19 nt, Artificial Sequence
  Description of Artificial Sequence: Synthetic oligonucleotide
uaaacauuccuuuaacaau

SEQ ID NO: 132074 - RNA, 19 nt, Artificial Sequence
  Description of Artificial Sequence: Synthetic oligonucleotide
uuccugaaaugcgucuacc

SEQ ID NO: 132075 - RNA, 19 nt, Artificial Sequence
  Description of Artificial Sequence: Synthetic oligonucleotide
cuuacacaauaaucacaac

SEQ ID NO: 132076 - RNA, 19 nt, Artificial Sequence
  Description of Artificial Sequence: Synthetic oligonucleotide
cuccuccacugaaagauuu

SEQ ID NO: 132077 - RNA, 19 nt, Artificial Sequence
  Description of Artificial Sequence: Synthetic oligonucleotide
ucucucuaugggaaaaaac

SEQ ID NO: 132078 - RNA, 19 nt, Artificial Sequence
  Description of Artificial Sequence: Synthetic oligonucleotide
caggcuugaaggaauucuu

SEQ ID NO: 132079 - RNA, 19 nt, Artificial Sequence
  Description of Artificial Sequence: Synthetic oligonucleotide
ugaaaacgacaaagcaauc

SEQ ID NO: 132080 - RNA, 19 nt, Artificial Sequence
  Description of Artificial Sequence: Synthetic oligonucleotide
cauuugauuuaaguguaaa

SEQ ID NO: 132081 - RNA, 19 nt, Artificial Sequence
  Description of Artificial Sequence: Synthetic oligonucleotide
aagcucaguauaagaaaaa

SEQ ID NO: 132082 - RNA, 19 nt, Artificial Sequence
  Description of Artificial Sequence: Synthetic oligonucleotide
acaaacacaggcauuccau

SEQ ID NO: 132083 - RNA, 19 nt, Artificial Sequence
  Description of Artificial Sequence: Synthetic oligonucleotide
ucacaaauccuuuggcugu

SEQ ID NO: 132084 - RNA, 19 nt, Artificial Sequence
  Description of Artificial Sequence: Synthetic oligonucleotide
ugcuuugugaguuuaucag

SEQ ID NO: 132085 - RNA, 19 nt, Artificial Sequence
  Description of Artificial Sequence: Synthetic oligonucleotide
gucagagcaucaaauccuu

SEQ ID NO: 132086 - RNA, 19 nt, Artificial Sequence
  Description of Artificial Sequence: Synthetic oligonucleotide
uugacaggcauuuugaaaa

SEQ ID NO: 132087 - RNA, 19 nt, Artificial Sequence
  Description of Artificial Sequence: Synthetic oligonucleotide
aaaacagaaacaaugcauu

SEQ ID NO: 132088 - RNA, 19 nt, Artificial Sequence
  Description of Artificial Sequence: Synthetic oligonucleotide
uagauuuugucaccaaauc

SEQ ID NO: 132089 - RNA, 19 nt, Artificial Sequence
  Description of Artificial Sequence: Synthetic oligonucleotide
ccuauaaugaaacaaaaau

SEQ ID NO: 132090 - RNA, 19 nt, Artificial Sequence
  Description of Artificial Sequence: Synthetic oligonucleotide
uuaaguuugauaaguacaa

SEQ ID NO: 132091 - RNA, 19 nt, Artificial Sequence
  Description of Artificial Sequence: Synthetic oligonucleotide
aagcugaaaaaucucacga

SEQ ID NO: 132092 - RNA, 19 nt, Artificial Sequence
  Description of Artificial Sequence: Synthetic oligonucleotide
acgagcuccccaggaccuu

SEQ ID NO: 132093 - RNA, 19 nt, Artificial Sequence
  Description of Artificial Sequence: Synthetic oligonucleotide
uucaaauuccuggauacac

SEQ ID NO: 132094 - RNA, 19 nt, Artificial Sequence
  Description of Artificial Sequence: Synthetic oligonucleotide
cuguuccaguugucaaugu

SEQ ID NO: 132095 - RNA, 19 nt, Artificial Sequence
  Description of Artificial Sequence: Synthetic oligonucleotide
uugaagugucuccauucac

SEQ ID NO: 132096 - RNA, 19 nt, Artificial Sequence
  Description of Artificial Sequence: Synthetic oligonucleotide
ccauagagaugucggcauu

SEQ ID NO: 132097 - RNA, 19 nt, Artificial Sequence
  Description of Artificial Sequence: Synthetic oligonucleotide
ucggcuauguguucccaaa

SEQ ID NO: 132098 - RNA, 19 nt, Artificial Sequence
  Description of Artificial Sequence: Synthetic oligonucleotide
aagcagucagcaugccuag

SEQ ID NO: 132099 - RNA, 19 nt, Artificial Sequence
  Description of Artificial Sequence: Synthetic oligonucleotide
guuucuccauccuagguuc

SEQ ID NO: 132100 - RNA, 19 nt, Artificial Sequence
  Description of Artificial Sequence: Synthetic oligonucleotide
cugacguccgugugccuuc

SEQ ID NO: 132101 - RNA, 19 nt, Artificial Sequence
  Description of Artificial Sequence: Synthetic oligonucleotide
cauacacauuaauccugcc

SEQ ID NO: 132102 - RNA, 19 nt, Artificial Sequence
  Description of Artificial Sequence: Synthetic oligonucleotide
caucauuagagcugccagu

SEQ ID NO: 132103 - RNA, 19 nt, Artificial Sequence
  Description of Artificial Sequence: Synthetic oligonucleotide
uccuucaugucccuagaaa

SEQ ID NO: 132104 - RNA, 19 nt, Artificial Sequence
  Description of Artificial Sequence: Synthetic oligonucleotide
aucucaagcuuucucuucc

SEQ ID NO: 132105 - RNA, 19 nt, Artificial Sequence
  Description of Artificial Sequence: Synthetic oligonucleotide
cagauuucaaggaauugug

SEQ ID NO: 132106 - RNA, 19 nt, Artificial Sequence
  Description of Artificial Sequence: Synthetic oligonucleotide
guaccauaagccauauuuu

SEQ ID NO: 132107 - RNA, 19 nt, Artificial Sequence
  Description of Artificial Sequence: Synthetic oligonucleotide
uuauuccugccaugggcaa

SEQ ID NO: 132108 - RNA, 19 nt, Artificial Sequence
  Description of Artificial Sequence: Synthetic oligonucleotide
auauuaccuaugauuucuc

SEQ ID NO: 132109 - RNA, 19 nt, Artificial Sequence
  Description of Artificial Sequence: Synthetic oligonucleotide
ccuuuaaaucaagugucau

SEQ ID NO: 132110 - RNA, 19 nt, Artificial Sequence
  Description of Artificial Sequence: Synthetic oligonucleotide
ucacacugaauaccaaugc

SEQ ID NO: 132111 - RNA, 19 nt, Artificial Sequence
  Description of Artificial Sequence: Synthetic oligonucleotide
cugaacuuuuuaaccaguc

SEQ ID NO: 132112 - RNA, 19 nt, Artificial Sequence
  Description of Artificial Sequence: Synthetic oligonucleotide
cagauauuguugcucaucu

SEQ ID NO: 132113 - RNA, 19 nt, Artificial Sequence
  Description of Artificial Sequence: Synthetic oligonucleotide
uccuuucuucaucuucauc

SEQ ID NO: 132114 - RNA, 19 nt, Artificial Sequence
  Description of Artificial Sequence: Synthetic oligonucleotide
cugucauugaugcacugca

SEQ ID NO: 132115 - RNA, 19 nt, Artificial Sequence
  Description of Artificial Sequence: Synthetic oligonucleotide
aguacaaauuagagggcac

SEQ ID NO: 132116 - RNA, 19 nt, Artificial Sequence
  Description of Artificial Sequence: Synthetic oligonucleotide
ccacaagauugacaagaaa

SEQ ID NO: 132117 - RNA, 19 nt, Artificial Sequence
  Description of Artificial Sequence: Synthetic oligonucleotide
aaaggggauugaaguuagc

SEQ ID NO: 132118 - RNA, 19 nt, Artificial Sequence
  Description of Artificial Sequence: Synthetic oligonucleotide
ccacagcucugucucugag

SEQ ID NO: 132119 - RNA, 19 nt, Artificial Sequence
  Description of Artificial Sequence: Synthetic oligonucleotide
gcaacaaauuuguggaggg

SEQ ID NO: 132120 - RNA, 19 nt, Artificial Sequence
  Description of Artificial Sequence: Synthetic oligonucleotide
guagucauaacaguacugu

SEQ ID NO: 132121 - RNA, 19 nt, Artificial Sequence
  Description of Artificial Sequence: Synthetic oligonucleotide
ugagcuuaaccacgaaaaa

SEQ ID NO: 132122 - RNA, 19 nt, Artificial Sequence
  Description of Artificial Sequence: Synthetic oligonucleotide
auauggaagugucaguggc

SEQ ID NO: 132123 - RNA, 19 nt, Artificial Sequence
  Description of Artificial Sequence: Synthetic oligonucleotide
caacaaccacaaaagccca

SEQ ID NO: 132124 - RNA, 19 nt, Artificial Sequence
  Description of Artificial Sequence: Synthetic oligonucleotide
aaauuccaauuuugagaau

SEQ ID NO: 132125 - RNA, 19 nt, Artificial Sequence
  Description of Artificial Sequence: Synthetic oligonucleotide
ugaauuucaagcaagaacu

SEQ ID NO: 132126 - RNA, 19 nt, Artificial Sequence
  Description of Artificial Sequence: Synthetic oligonucleotide
uuaauggaaauaccaaguc

SEQ ID NO: 132127 - RNA, 19 nt, Artificial Sequence
  Description of Artificial Sequence: Synthetic oligonucleotide
caaaaccuacugucucuuc

SEQ ID NO: 132128 - RNA, 19 nt, Artificial Sequence
  Description of Artificial Sequence: Synthetic oligonucleotide
ccuccauggaauuuaagua

SEQ ID NO: 132129 - RNA, 19 nt, Artificial Sequence
  Description of Artificial Sequence: Synthetic oligonucleotide
augauuucaauucuucaau

SEQ ID NO: 132130 - RNA, 19 nt, Artificial Sequence
  Description of Artificial Sequence: Synthetic oligonucleotide
ugcuguacucuaccgcuaa

SEQ ID NO: 132131 - RNA, 19 nt, Artificial Sequence
  Description of Artificial Sequence: Synthetic oligonucleotide
aaggagcaguugaccacaa

SEQ ID NO: 132132 - RNA, 19 nt, Artificial Sequence
  Description of Artificial Sequence: Synthetic oligonucleotide
agcuuagcuuggaaagccu

SEQ ID NO: 132133 - RNA, 19 nt, Artificial Sequence
  Description of Artificial Sequence: Synthetic oligonucleotide
ucaccucuuacuuuuccau

SEQ ID NO: 132134 - RNA, 19 nt, Artificial Sequence
  Description of Artificial Sequence: Synthetic oligonucleotide
uugagucaucuaccaaagg

SEQ ID NO: 132135 - RNA, 19 nt, Artificial Sequence
  Description of Artificial Sequence: Synthetic oligonucleotide
gagaugucaaggguucggu

SEQ ID NO: 132136 - RNA, 19 nt, Artificial Sequence
  Description of Artificial Sequence: Synthetic oligonucleotide
uucuuucucgggaauauuc

SEQ ID NO: 132137 - RNA, 19 nt, Artificial Sequence
  Description of Artificial Sequence: Synthetic oligonucleotide
caggaacuauugcuaguga

SEQ ID NO: 132138 - RNA, 19 nt, Artificial Sequence
  Description of Artificial Sequence: Synthetic oligonucleotide
aggccaacacuuacuugaa

SEQ ID NO: 132139 - RNA, 19 nt, Artificial Sequence
  Description of Artificial Sequence: Synthetic oligonucleotide
auuccaagagcacacgguc

SEQ ID NO: 132140 - RNA, 19 nt, Artificial Sequence
  Description of Artificial Sequence: Synthetic oligonucleotide
cuucagugaagcugcaggg

SEQ ID NO: 132141 - RNA, 19 nt, Artificial Sequence
  Description of Artificial Sequence: Synthetic oligonucleotide
gcacuuccaaaauugauga

SEQ ID NO: 132142 - RNA, 19 nt, Artificial Sequence
  Description of Artificial Sequence: Synthetic oligonucleotide
auaucuggaaccuugaagu

SEQ ID NO: 132143 - RNA, 19 nt, Artificial Sequence
  Description of Artificial Sequence: Synthetic oligonucleotide
uaaaagaaaauuuugcugg

SEQ ID NO: 132144 - RNA, 19 nt, Artificial Sequence
  Description of Artificial Sequence: Synthetic oligonucleotide
gagaagccacacuccaacg

SEQ ID NO: 132145 - RNA, 19 nt, Artificial Sequence
  Description of Artificial Sequence: Synthetic oligonucleotide
gcauauauucccucuggga

SEQ ID NO: 132146 - RNA, 19 nt, Artificial Sequence
  Description of Artificial Sequence: Synthetic oligonucleotide
agcacaguacgaaaaacca

SEQ ID NO: 132147 - RNA, 19 nt, Artificial Sequence
  Description of Artificial Sequence: Synthetic oligonucleotide
acuuacagcuagagggccu

SEQ ID NO: 132148 - RNA, 19 nt, Artificial Sequence
  Description of Artificial Sequence: Synthetic oligonucleotide
ucuuuuucaccaacggaga

SEQ ID NO: 132149 - RNA, 19 nt, Artificial Sequence
  Description of Artificial Sequence: Synthetic oligonucleotide
aacauacaagcaaagccac

SEQ ID NO: 132150 - RNA, 19 nt, Artificial Sequence
  Description of Artificial Sequence: Synthetic oligonucleotide
cccuggaacucucuccaug

SEQ ID NO: 132151 - RNA, 19 nt, Artificial Sequence
  Description of Artificial Sequence: Synthetic oligonucleotide
ggcaaaugucagcucuugu

SEQ ID NO: 132152 - RNA, 19 nt, Artificial Sequence
  Description of Artificial Sequence: Synthetic oligonucleotide
uucagguccaugcaaguca

SEQ ID NO: 132153 - RNA, 19 nt, Artificial Sequence
  Description of Artificial Sequence: Synthetic oligonucleotide
agcccaguuccuuccauga

SEQ ID NO: 132154 - RNA, 19 nt, Artificial Sequence
  Description of Artificial Sequence: Synthetic oligonucleotide
auuucccugaccuuggcca

SEQ ID NO: 132155 - RNA, 19 nt, Artificial Sequence
  Description of Artificial Sequence: Synthetic oligonucleotide
aggaaguggcccugaaugc

SEQ ID NO: 132156 - RNA, 19 nt, Artificial Sequence
  Description of Artificial Sequence: Synthetic oligonucleotide
cuaacacuaagaaccagaa

SEQ ID NO: 132157 - RNA, 19 nt, Artificial Sequence
  Description of Artificial Sequence: Synthetic oligonucleotide
agaucagauggaaaaauga

SEQ ID NO: 132158 - RNA, 19 nt, Artificial Sequence
  Description of Artificial Sequence: Synthetic oligonucleotide
aaguccggauucauucugg

SEQ ID NO: 132159 - RNA, 19 nt, Artificial Sequence
  Description of Artificial Sequence: Synthetic oligonucleotide
ggucuuuccagagccaggu

SEQ ID NO: 132160 - RNA, 19 nt, Artificial Sequence
  Description of Artificial Sequence: Synthetic oligonucleotide
ucgagcuuuccaaugacca

SEQ ID NO: 132161 - RNA, 19 nt, Artificial Sequence
  Description of Artificial Sequence: Synthetic oligonucleotide
aagaaaaggcacaccuuga

SEQ ID NO: 132162 - RNA, 19 nt, Artificial Sequence
  Description of Artificial Sequence: Synthetic oligonucleotide
acauugcaggauccuuaga

SEQ ID NO: 132163 - RNA, 19 nt, Artificial Sequence
  Description of Artificial Sequence: Synthetic oligonucleotide
aaggacaccuaagguuccu

SEQ ID NO: 132164 - RNA, 19 nt, Artificial Sequence
  Description of Artificial Sequence: Synthetic oligonucleotide
ucaaaaauaucauccuacc

SEQ ID NO: 132165 - RNA, 19 nt, Artificial Sequence
  Description of Artificial Sequence: Synthetic oligonucleotide
cagucuaugacaagagcuu

SEQ ID NO: 132166 - RNA, 19 nt, Artificial Sequence
  Description of Artificial Sequence: Synthetic oligonucleotide
uaugggauuuccuaaagcu

SEQ ID NO: 132167 - RNA, 19 nt, Artificial Sequence
  Description of Artificial Sequence: Synthetic oligonucleotide
uggauguaaccaccagcau

SEQ ID NO: 132168 - RNA, 19 nt, Artificial Sequence
  Description of Artificial Sequence: Synthetic oligonucleotide
uugguaggagacagcaucu

SEQ ID NO: 132169 - RNA, 19 nt, Artificial Sequence
  Description of Artificial Sequence: Synthetic oligonucleotide
uucguguuucaacugccuu

SEQ ID NO: 132170 - RNA, 19 nt, Artificial Sequence
  Description of Artificial Sequence: Synthetic oligonucleotide
uuguguacaccaaaaaccc

SEQ ID NO: 132171 - RNA, 19 nt, Artificial Sequence
  Description of Artificial Sequence: Synthetic oligonucleotide
ccaauggcuauucauucuc

SEQ ID NO: 132172 - RNA, 19 nt, Artificial Sequence
  Description of Artificial Sequence: Synthetic oligonucleotide
ccaucccuguaaaaguuuu

SEQ ID NO: 132173 - RNA, 19 nt, Artificial Sequence
  Description of Artificial Sequence: Synthetic oligonucleotide
uggcugauaaauucauuau

SEQ ID NO: 132174 - RNA, 19 nt, Artificial Sequence
  Description of Artificial Sequence: Synthetic oligonucleotide
uuccugggcugaaacuaaa

SEQ ID NO: 132175 - RNA, 19 nt, Artificial Sequence
  Description of Artificial Sequence: Synthetic oligonucleotide
augaucuaaauucaguucu

SEQ ID NO: 132176 - RNA, 19 nt, Artificial Sequence
  Description of Artificial Sequence: Synthetic oligonucleotide
uugucaugccuacguucca

SEQ ID NO: 132177 - RNA, 19 nt, Artificial Sequence
  Description of Artificial Sequence: Synthetic oligonucleotide
augucccauuuacagaucu

SEQ ID NO: 132178 - RNA, 19 nt, Artificial Sequence
  Description of Artificial Sequence: Synthetic oligonucleotide
uucagguuccaucgugcaa

SEQ ID NO: 132179 - RNA, 19 nt, Artificial Sequence
  Description of Artificial Sequence: Synthetic oligonucleotide
aacuugacuucagagaaau

SEQ ID NO: 132180 - RNA, 19 nt, Artificial Sequence
  Description of Artificial Sequence: Synthetic oligonucleotide
uacaaaucuauaagaagcu

SEQ ID NO: 132181 - RNA, 19 nt, Artificial Sequence
  Description of Artificial Sequence: Synthetic oligonucleotide
ugagaacuucaucauuugc

SEQ ID NO: 132182 - RNA, 19 nt, Artificial Sequence
  Description of Artificial Sequence: Synthetic oligonucleotide
cccucaaccuaccaacacu

SEQ ID NO: 132183 - RNA, 19 nt, Artificial Sequence
  Description of Artificial Sequence: Synthetic oligonucleotide
uccccgagguaaaauuccc

SEQ ID NO: 132184 - RNA, 19 nt, Artificial Sequence
  Description of Artificial Sequence: Synthetic oligonucleotide
cugaaguugauguguuaac

SEQ ID NO: 132185 - RNA, 19 nt, Artificial Sequence
  Description of Artificial Sequence: Synthetic oligonucleotide
caaaauauucucaaccaga

SEQ ID NO: 132186 - RNA, 19 nt, Artificial Sequence
  Description of Artificial Sequence: Synthetic oligonucleotide
aagacuccuugauucccuu

SEQ ID NO: 132187 - RNA, 19 nt, Artificial Sequence
  Description of Artificial Sequence: Synthetic oligonucleotide
uuuuugagauaaccgugcc

SEQ ID NO: 132188 - RNA, 19 nt, Artificial Sequence
  Description of Artificial Sequence: Synthetic oligonucleotide
cugaaucucaguuaacugu

SEQ ID NO: 132189 - RNA, 19 nt, Artificial Sequence
  Description of Artificial Sequence: Synthetic oligonucleotide
ugucccaguucacgcuucc

SEQ ID NO: 132190 - RNA, 19 nt, Artificial Sequence
  Description of Artificial Sequence: Synthetic oligonucleotide
caaaaaguguuucagaugg

SEQ ID NO: 132191 - RNA, 19 nt, Artificial Sequence
  Description of Artificial Sequence: Synthetic oligonucleotide
gcauugcugcuuuggaucu

SEQ ID NO: 132192 - RNA, 19 nt, Artificial Sequence
  Description of Artificial Sequence: Synthetic oligonucleotide
uaaaugcaguagccaacaa

SEQ ID NO: 132193 - RNA, 19 nt, Artificial Sequence
  Description of Artificial Sequence: Synthetic oligonucleotide
agaucgcagacuuugaguu

SEQ ID NO: 132194 - RNA, 19 nt, Artificial Sequence
  Description of Artificial Sequence: Synthetic oligonucleotide
ugcccaccaucaucgugcc

SEQ ID NO: 132195 - RNA, 19 nt, Artificial Sequence
  Description of Artificial Sequence: Synthetic oligonucleotide
cugagcagaccauugagau

SEQ ID NO: 132196 - RNA, 19 nt, Artificial Sequence
  Description of Artificial Sequence: Synthetic oligonucleotide
uucccuccauuaaguucuc

SEQ ID NO: 132197 - RNA, 19 nt, Artificial Sequence
  Description of Artificial Sequence: Synthetic oligonucleotide
cuguaccugcuggaauugu

SEQ ID NO: 132198 - RNA, 19 nt, Artificial Sequence
  Description of Artificial Sequence: Synthetic oligonucleotide
ucauuccuuccuuucaagc

SEQ ID NO: 132199 - RNA, 19 nt, Artificial Sequence
  Description of Artificial Sequence: Synthetic oligonucleotide
cacugacugcacgcuuuga

SEQ ID NO: 132200 - RNA, 19 nt, Artificial Sequence
  Description of Artificial Sequence: Synthetic oligonucleotide
agguagacucucccgugua

SEQ ID NO: 132201 - RNA, 19 nt, Artificial Sequence
  Description of Artificial Sequence: Synthetic oligonucleotide
auaaugccacuuggagugc

SEQ ID NO: 132202 - RNA, 19 nt, Artificial Sequence
  Description of Artificial Sequence: Synthetic oligonucleotide
ccaguuugaaaaacaaagc

SEQ ID NO: 132203 - RNA, 19 nt, Artificial Sequence
  Description of Artificial Sequence: Synthetic oligonucleotide
cagauuauguugaaacagu

SEQ ID NO: 132204 - RNA, 19 nt, Artificial Sequence
  Description of Artificial Sequence: Synthetic oligonucleotide
uccuggauuccacaugcag

SEQ ID NO: 132205 - RNA, 19 nt, Artificial Sequence
  Description of Artificial Sequence: Synthetic oligonucleotide
gcucaaccguacaguuccu

SEQ ID NO: 132206 - RNA, 19 nt, Artificial Sequence
  Description of Artificial Sequence: Synthetic oligonucleotide
uagaauaugaacuaaaugu

SEQ ID NO: 132207 - RNA, 19 nt, Artificial Sequence
  Description of Artificial Sequence: Synthetic oligonucleotide
uuuugggaacacacaaaau

SEQ ID NO: 132208 - RNA, 19 nt, Artificial Sequence
  Description of Artificial Sequence: Synthetic oligonucleotide
ucgaagaugguacguuagc

SEQ ID NO: 132209 - RNA, 19 nt, Artificial Sequence
  Description of Artificial Sequence: Synthetic oligonucleotide
ccucuaagacuaaaggaac

SEQ ID NO: 132210 - RNA, 19 nt, Artificial Sequence
  Description of Artificial Sequence: Synthetic oligonucleotide
cauuugcacaccgugacuu

SEQ ID NO: 132211 - RNA, 19 nt, Artificial Sequence
  Description of Artificial Sequence: Synthetic oligonucleotide
ucagugcagaauaugaaga

SEQ ID NO: 132212 - RNA, 19 nt, Artificial Sequence
  Description of Artificial Sequence: Synthetic oligonucleotide
aagauggcaaauaugaagg

SEQ ID NO: 132213 - RNA, 19 nt, Artificial Sequence
  Description of Artificial Sequence: Synthetic oligonucleotide
gacuucaggaaugggaagg

SEQ ID NO: 132214 - RNA, 19 nt, Artificial Sequence
  Description of Artificial Sequence: Synthetic oligonucleotide
gaaaagcgcaccucaauau

SEQ ID NO: 132215 - RNA, 19 nt, Artificial Sequence
  Description of Artificial Sequence: Synthetic oligonucleotide
ucaaaagcccagcguucac

SEQ ID NO: 132216 - RNA, 19 nt, Artificial Sequence
  Description of Artificial Sequence: Synthetic oligonucleotide
ccgaucuccaucugcgcua

SEQ ID NO: 132217 - RNA, 19 nt, Artificial Sequence
  Description of Artificial Sequence: Synthetic oligonucleotide
accagaaagacaagaaagg

SEQ ID NO: 132218 - RNA, 19 nt, Artificial Sequence
  Description of Artificial Sequence: Synthetic oligonucleotide
gcaucuccaccucagcagc

SEQ ID NO: 132219 - RNA, 19 nt, Artificial Sequence
  Description of Artificial Sequence: Synthetic oligonucleotide
ccuccccagccguaggcac

SEQ ID NO: 132220 - RNA, 19 nt, Artificial Sequence
  Description of Artificial Sequence: Synthetic oligonucleotide
ccgugggcauggauaugga

SEQ ID NO: 132221 - RNA, 19 nt, Artificial Sequence
  Description of Artificial Sequence: Synthetic oligonucleotide
augaagaugacgacuuuuc

SEQ ID NO: 132222 - RNA, 19 nt, Artificial Sequence
  Description of Artificial Sequence: Synthetic oligonucleotide
cuaaauggaacuucuacua

SEQ ID NO: 132223 - RNA, 19 nt, Artificial Sequence
  Description of Artificial Sequence: Synthetic oligonucleotide
acagcccucaguccucucc

SEQ ID NO: 132224 - RNA, 19 nt, Artificial Sequence
  Description of Artificial Sequence: Synthetic oligonucleotide
cagauaaaaaacucaccau

SEQ ID NO: 132225 - RNA, 19 nt, Artificial Sequence
  Description of Artificial Sequence: Synthetic oligonucleotide
uauucaaaacugaguugag

SEQ ID NO: 132226 - RNA, 19 nt, Artificial Sequence
  Description of Artificial Sequence: Synthetic oligonucleotide
ggguccgggaaucugauga

SEQ ID NO: 132227 - RNA, 19 nt, Artificial Sequence
  Description of Artificial Sequence: Synthetic oligonucleotide
aggaaacucagaucaaagu

SEQ ID NO: 132228 - RNA, 19 nt, Artificial Sequence
  Description of Artificial Sequence: Synthetic oligonucleotide
uuaauugggaagaagaggc

SEQ ID NO: 132229 - RNA, 19 nt, Artificial Sequence
  Description of Artificial Sequence: Synthetic oligonucleotide
cagcuucuggcuugcuaac

SEQ ID NO: 132230 - RNA, 19 nt, Artificial Sequence
  Description of Artificial Sequence: Synthetic oligonucleotide
ccucucugaaagacaacgu

SEQ ID NO: 132231 - RNA, 19 nt, Artificial Sequence
  Description of Artificial Sequence: Synthetic oligonucleotide
ugcccaaggccacaggggu

SEQ ID NO: 132232 - RNA, 19 nt, Artificial Sequence
  Description of Artificial Sequence: Synthetic oligonucleotide
uccuuuaugauuaugucaa

SEQ ID NO: 132233 - RNA, 19 nt, Artificial Sequence
  Description of Artificial Sequence: Synthetic oligonucleotide
acaaguaccacugggaaca

SEQ ID NO: 132234 - RNA, 19 nt, Artificial Sequence
  Description of Artificial Sequence: Synthetic oligonucleotide
acacagggcucacccugag

SEQ ID NO: 132235 - RNA, 19 nt, Artificial Sequence
  Description of Artificial Sequence: Synthetic oligonucleotide
gagaagugucuucaaagcu

SEQ ID NO: 132236 - RNA, 19 nt, Artificial Sequence
  Description of Artificial Sequence: Synthetic oligonucleotide
ugagaagaaaucugcagaa

SEQ ID NO: 132237 - RNA, 19 nt, Artificial Sequence
  Description of Artificial Sequence: Synthetic oligonucleotide
acaaugcugaguggguuua

SEQ ID NO: 132238 - RNA, 19 nt, Artificial Sequence
  Description of Artificial Sequence: Synthetic oligonucleotide
aucaaggggccauuaggca

SEQ ID NO: 132239 - RNA, 19 nt, Artificial Sequence
  Description of Artificial Sequence: Synthetic oligonucleotide
aaauugaugauaucgacgu

SEQ ID NO: 132240 - RNA, 19 nt, Artificial Sequence
  Description of Artificial Sequence: Synthetic oligonucleotide
ugagguuccagaaagcagc

SEQ ID NO: 132241 - RNA, 19 nt, Artificial Sequence
  Description of Artificial Sequence: Synthetic oligonucleotide
ccaguggcaccacugggac

SEQ ID NO: 132242 - RNA, 19 nt, Artificial Sequence
  Description of Artificial Sequence: Synthetic oligonucleotide
ccuaccaagaguggaagga

SEQ ID NO: 132243 - RNA, 19 nt, Artificial Sequence
  Description of Artificial Sequence: Synthetic oligonucleotide
acaaggcccagaaucugua

SEQ ID NO: 132244 - RNA, 19 nt, Artificial Sequence
  Description of Artificial Sequence: Synthetic oligonucleotide
accaggaacuguugacuca

SEQ ID NO: 132245 - RNA, 19 nt, Artificial Sequence
  Description of Artificial Sequence: Synthetic oligonucleotide
aggaaggccaagccaguuu

SEQ ID NO: 132246 - RNA, 19 nt, Artificial Sequence
  Description of Artificial Sequence: Synthetic oligonucleotide
uccagggacucaaggauaa

SEQ ID NO: 132247 - RNA, 19 nt, Artificial Sequence
  Description of Artificial Sequence: Synthetic oligonucleotide
acguguuugauggcuuggu

SEQ ID NO: 132248 - RNA, 19 nt, Artificial Sequence
  Description of Artificial Sequence: Synthetic oligonucleotide
uacgaguuacucaagaauu

SEQ ID NO: 132249 - RNA, 19 nt, Artificial Sequence
  Description of Artificial Sequence: Synthetic oligonucleotide
uccauaugaaagucaagca

SEQ ID NO: 132250 - RNA, 19 nt, Artificial Sequence
  Description of Artificial Sequence: Synthetic oligonucleotide
aucugauugacucacucau

SEQ ID NO: 132251 - RNA, 19 nt, Artificial Sequence
  Description of Artificial Sequence: Synthetic oligonucleotide
uugauuuucugaacuuccc

SEQ ID NO: 132252 - RNA, 19 nt, Artificial Sequence
  Description of Artificial Sequence: Synthetic oligonucleotide
ccagauuccaguuuccggg

SEQ ID NO: 132253 - RNA, 19 nt, Artificial Sequence
  Description of Artificial Sequence: Synthetic oligonucleotide
ggaaaccugggauauacac

SEQ ID NO: 132254 - RNA, 19 nt, Artificial Sequence
  Description of Artificial Sequence: Synthetic oligonucleotide
cuagggaggaacuuugcac

SEQ ID NO: 132255 - RNA, 19 nt, Artificial Sequence
  Description of Artificial Sequence: Synthetic oligonucleotide
cuauguucauaagggaggu

SEQ ID NO: 132256 - RNA, 19 nt, Artificial Sequence
  Description of Artificial Sequence: Synthetic oligonucleotide
uagggacgguacuguccca

SEQ ID NO: 132257 - RNA, 19 nt, Artificial Sequence
  Description of Artificial Sequence: Synthetic oligonucleotide
agguauauucgaaagucca

SEQ ID NO: 132258 - RNA, 19 nt, Artificial Sequence
  Description of Artificial Sequence: Synthetic oligonucleotide
auaaugguucagaaauacu

SEQ ID NO: 132259 - RNA, 19 nt, Artificial Sequence
  Description of Artificial Sequence: Synthetic oligonucleotide
uguuuuccuauuuccaaga

SEQ ID NO: 132260 - RNA, 19 nt, Artificial Sequence
  Description of Artificial Sequence: Synthetic oligonucleotide
accuagugauuacacuucc

SEQ ID NO: 132261 - RNA, 19 nt, Artificial Sequence
  Description of Artificial Sequence: Synthetic oligonucleotide
cuuucgaguuaaggaaaca

SEQ ID NO: 132262 - RNA, 19 nt, Artificial Sequence
  Description of Artificial Sequence: Synthetic oligonucleotide
auaaacuaauagauguaau

SEQ ID NO: 132263 - RNA, 19 nt, Artificial Sequence
  Description of Artificial Sequence: Synthetic oligonucleotide
ucucgauguauagggaacu

SEQ ID NO: 132264 - RNA, 19 nt, Artificial Sequence
  Description of Artificial Sequence: Synthetic oligonucleotide
uguugaaagauuuaucaaa

SEQ ID NO: 132265 - RNA, 19 nt, Artificial Sequence
  Description of Artificial Sequence: Synthetic oligonucleotide
aagaagcccaagagguauu

SEQ ID NO: 132266 - RNA, 19 nt, Artificial Sequence
  Description of Artificial Sequence: Synthetic oligonucleotide
uuaaagccauucagucucu

SEQ ID NO: 132267 - RNA, 19 nt, Artificial Sequence
  Description of Artificial Sequence: Synthetic oligonucleotide
ucaagaccacagaggugcu

SEQ ID NO: 132268 - RNA, 19 nt, Artificial Sequence
  Description of Artificial Sequence: Synthetic oligonucleotide
uacguaaucuucaggaccu

SEQ ID NO: 132269 - RNA, 19 nt, Artificial Sequence
  Description of Artificial Sequence: Synthetic oligonucleotide
uuuuacaauucauuuucca

SEQ ID NO: 132270 - RNA, 19 nt, Artificial Sequence
  Description of Artificial Sequence: Synthetic oligonucleotide
aacuaauagaagauaacau

SEQ ID NO: 132271 - RNA, 19 nt, Artificial Sequence
  Description of Artificial Sequence: Synthetic oligonucleotide
uuaaacagcugaaagagau

SEQ ID NO: 132272 - RNA, 19 nt, Artificial Sequence
  Description of Artificial Sequence: Synthetic oligonucleotide
ugaaauuuacuuaucuuau

SEQ ID NO: 132273 - RNA, 19 nt, Artificial Sequence
  Description of Artificial Sequence: Synthetic oligonucleotide
uuaauuauauccaagauga

SEQ ID NO: 132274 - RNA, 19 nt, Artificial Sequence
  Description of Artificial Sequence: Synthetic oligonucleotide
agaucaacacaaucuucag

SEQ ID NO: 132275 - RNA, 19 nt, Artificial Sequence
  Description of Artificial Sequence: Synthetic oligonucleotide
gugauuauaucccauaugu

SEQ ID NO: 132276 - RNA, 19 nt, Artificial Sequence
  Description of Artificial Sequence: Synthetic oligonucleotide
uuuuuaaauuguugaaaga

SEQ ID NO: 132277 - RNA, 19 nt, Artificial Sequence
  Description of Artificial Sequence: Synthetic oligonucleotide
aaaaccuaugccuuaaucu

SEQ ID NO: 132278 - RNA, 19 nt, Artificial Sequence
  Description of Artificial Sequence: Synthetic oligonucleotide
uucauaaguucaaugaauu

SEQ ID NO: 132279 - RNA, 19 nt, Artificial Sequence
  Description of Artificial Sequence: Synthetic oligonucleotide
uuauucaaaacgagcuuca

SEQ ID NO: 132280 - RNA, 19 nt, Artificial Sequence
  Description of Artificial Sequence: Synthetic oligonucleotide
aggaagcuucucaagaguu

SEQ ID NO: 132281 - RNA, 19 nt, Artificial Sequence
  Description of Artificial Sequence: Synthetic oligonucleotide
uacagcagauccaucaaua

SEQ ID NO: 132282 - RNA, 19 nt, Artificial Sequence
  Description of Artificial Sequence: Synthetic oligonucleotide
acauuauggcccuucguga

SEQ ID NO: 132283 - RNA, 19 nt, Artificial Sequence
  Description of Artificial Sequence: Synthetic oligonucleotide
aagaauauuuugauccaag

SEQ ID NO: 132284 - RNA, 19 nt, Artificial Sequence
  Description of Artificial Sequence: Synthetic oligonucleotide
guauaguuggcuggacagu

SEQ ID NO: 132285 - RNA, 19 nt, Artificial Sequence
  Description of Artificial Sequence: Synthetic oligonucleotide
ugaaauauuaugaacuuga

SEQ ID NO: 132286 - RNA, 19 nt, Artificial Sequence
  Description of Artificial Sequence: Synthetic oligonucleotide
aagaaaagauagucagucu

SEQ ID NO: 132287 - RNA, 19 nt, Artificial Sequence
  Description of Artificial Sequence: Synthetic oligonucleotide
ugaucaagaaccuguuagu

SEQ ID NO: 132288 - RNA, 19 nt, Artificial Sequence
  Description of Artificial Sequence: Synthetic oligonucleotide
uugcucuuaaggacuucca

SEQ ID NO: 132289 - RNA, 19 nt, Artificial Sequence
  Description of Artificial Sequence: Synthetic oligonucleotide
auucugaauauauugucag

SEQ ID NO: 132290 - RNA, 19 nt, Artificial Sequence
  Description of Artificial Sequence: Synthetic oligonucleotide
gugccucuaacuuuacuuc

SEQ ID NO: 132291 - RNA, 19 nt, Artificial Sequence
  Description of Artificial Sequence: Synthetic oligonucleotide
cccaacucucaagucaagu

SEQ ID NO: 132292 - RNA, 19 nt, Artificial Sequence
  Description of Artificial Sequence: Synthetic oligonucleotide
uugagcaauuucugcacag

SEQ ID NO: 132293 - RNA, 19 nt, Artificial Sequence
  Description of Artificial Sequence: Synthetic oligonucleotide
gaaauauucaggaauaucu

SEQ ID NO: 132294 - RNA, 19 nt, Artificial Sequence
  Description of Artificial Sequence: Synthetic oligonucleotide
uuagcauccuuaccgaucc

SEQ ID NO: 132295 - RNA, 19 nt, Artificial Sequence
  Description of Artificial Sequence: Synthetic oligonucleotide
cagauggaaaagggaaaga

SEQ ID NO: 132296 - RNA, 19 nt, Artificial Sequence
  Description of Artificial Sequence: Synthetic oligonucleotide
agaagauugcagagcuuuc

SEQ ID NO: 132297 - RNA, 19 nt, Artificial Sequence
  Description of Artificial Sequence: Synthetic oligonucleotide
cugccacugcucaggaaau

SEQ ID NO: 132298 - RNA, 19 nt, Artificial Sequence
  Description of Artificial Sequence: Synthetic oligonucleotide
uaauuaaaagccaggccau

SEQ ID NO: 132299 - RNA, 19 nt, Artificial Sequence
  Description of Artificial Sequence: Synthetic oligonucleotide
uugcgacgaagaaaauaau

SEQ ID NO: 132300 - RNA, 19 nt, Artificial Sequence
  Description of Artificial Sequence: Synthetic oligonucleotide
uuucugauuaccaccagca

SEQ ID NO: 132301 - RNA, 19 nt, Artificial Sequence
  Description of Artificial Sequence: Synthetic oligonucleotide
aguuuagauauaaacugca

SEQ ID NO: 132302 - RNA, 19 nt, Artificial Sequence
  Description of Artificial Sequence: Synthetic oligonucleotide
aagauuuuucagaccaacu

SEQ ID NO: 132303 - RNA, 19 nt, Artificial Sequence
  Description of Artificial Sequence: Synthetic oligonucleotide
ucucugauuacuaugaaaa

SEQ ID NO: 132304 - RNA, 19 nt, Artificial Sequence
  Description of Artificial Sequence: Synthetic oligonucleotide
aauuuauugcugaauccaa

SEQ ID NO: 132305 - RNA, 19 nt, Artificial Sequence
  Description of Artificial Sequence: Synthetic oligonucleotide
aaagauugauugaccuguc

SEQ ID NO: 132306 - RNA, 19 nt, Artificial Sequence
  Description of Artificial Sequence: Synthetic oligonucleotide
ccauucaaaacuaccacac

SEQ ID NO: 132307 - RNA, 19 nt, Artificial Sequence
  Description of Artificial Sequence: Synthetic oligonucleotide
cauuucugauauacaucac

SEQ ID NO: 132308 - RNA, 19 nt, Artificial Sequence
  Description of Artificial Sequence: Synthetic oligonucleotide
cggaguuacugaaaaagcu

SEQ ID NO: 132309 - RNA, 19 nt, Artificial Sequence
  Description of Artificial Sequence: Synthetic oligonucleotide
ugcaaucaaccacagucau

SEQ ID NO: 132310 - RNA, 19 nt, Artificial Sequence
  Description of Artificial Sequence: Synthetic oligonucleotide
ugaaccccuacaugaagcu

SEQ ID NO: 132311 - RNA, 19 nt, Artificial Sequence
  Description of Artificial Sequence: Synthetic oligonucleotide
uugcuccaggagaacuuac

SEQ ID NO: 132312 - RNA, 19 nt, Artificial Sequence
  Description of Artificial Sequence: Synthetic oligonucleotide
cuaucauccucuaauuuuu

SEQ ID NO: 132313 - RNA, 19 nt, Artificial Sequence
  Description of Artificial Sequence: Synthetic oligonucleotide
uuaaaagaaaucuucauuu

SEQ ID NO: 132314 - RNA, 19 nt, Artificial Sequence
  Description of Artificial Sequence: Synthetic oligonucleotide
uauucuucuuuuccaauug

SEQ ID NO: 132315 - RNA, 19 nt, Artificial Sequence
  Description of Artificial Sequence: Synthetic oligonucleotide
gaacuuucacauagcacag

SEQ ID NO: 132316 - RNA, 19 nt, Artificial Sequence
  Description of Artificial Sequence: Synthetic oligonucleotide
gaaaaaauucaaacugccu

SEQ ID NO: 132317 - RNA, 19 nt, Artificial Sequence
  Description of Artificial Sequence: Synthetic oligonucleotide
uauauugauaaaaccauac

SEQ ID NO: 132318 - RNA, 19 nt, Artificial Sequence
  Description of Artificial Sequence: Synthetic oligonucleotide
cagugagccagccuugcag

SEQ ID NO: 132319 - RNA, 19 nt, Artificial Sequence
  Description of Artificial Sequence: Synthetic oligonucleotide
guaggcaguagacuauaag

SEQ ID NO: 132320 - RNA, 19 nt, Artificial Sequence
  Description of Artificial Sequence: Synthetic oligonucleotide
gcagaagcacauaugaacu

SEQ ID NO: 132321 - RNA, 19 nt, Artificial Sequence
  Description of Artificial Sequence: Synthetic oligonucleotide
uggaccugcaccaaagcug

SEQ ID NO: 132322 - RNA, 19 nt, Artificial Sequence
  Description of Artificial Sequence: Synthetic oligonucleotide
ggcaccagggcucggaagg

SEQ ID NO: 132323 - RNA, 19 nt, Artificial Sequence
  Description of Artificial Sequence: Synthetic oligonucleotide
gucucugaacucagaagga

SEQ ID NO: 132324 - RNA, 19 nt, Artificial Sequence
  Description of Artificial Sequence: Synthetic oligonucleotide
auggcauuuuuugcaaguu

SEQ ID NO: 132325 - RNA, 19 nt, Artificial Sequence
  Description of Artificial Sequence: Synthetic oligonucleotide
uaaagaaaaucaggaucug

SEQ ID NO: 132326 - RNA, 19 nt, Artificial Sequence
  Description of Artificial Sequence: Synthetic oligonucleotide
gaguuauuuugcuaaacuu

SEQ ID NO: 132327 - RNA, 19 nt, Artificial Sequence
  Description of Artificial Sequence: Synthetic oligonucleotide
ugggggaggaggaacaaau

SEQ ID NO: 132328 - RNA, 19 nt, Artificial Sequence
  Description of Artificial Sequence: Synthetic oligonucleotide
uaaauggagucuuuauugu

SEQ ID NO: 132329 - RNA, 19 nt, Artificial Sequence
  Description of Artificial Sequence: Synthetic oligonucleotide
gucuuuauuguguaucaua

SEQ ID NO: 132330 - RNA, 25 nt, Artificial Sequence
  Description of Artificial Sequence: Synthetic oligonucleotide
auucccaccgggaccugcggggcug

SEQ ID NO: 132331 - RNA, 25 nt, Artificial Sequence
  Description of Artificial Sequence: Synthetic oligonucleotide
gagugcccuucucgguugcugccgc

SEQ ID NO: 132332 - RNA, 25 nt, Artificial Sequence
  Description of Artificial Sequence: Synthetic oligonucleotide
cugaggagcccgcccagccagccag

SEQ ID NO: 132333 - RNA, 25 nt, Artificial Sequence
  Description of Artificial Sequence: Synthetic oligonucleotide
gggccgcgaggccgaggccaggccg

SEQ ID NO: 132334 - RNA, 25 nt, Artificial Sequence
  Description of Artificial Sequence: Synthetic oligonucleotide
gcagcccaggagccgccccaccgca

SEQ ID NO: 132335 - RNA, 25 nt, Artificial Sequence
  Description of Artificial Sequence: Synthetic oligonucleotide
agcuggcgauggacccgccgaggcc

SEQ ID NO: 132336 - RNA, 25 nt, Artificial Sequence
  Description of Artificial Sequence: Synthetic oligonucleotide
ccgcgcugcuggcgcugcuggcgcu

SEQ ID NO: 132337 - RNA, 25 nt, Artificial Sequence
  Description of Artificial Sequence: Synthetic oligonucleotide
ugccugcgcugcugcugcugcugcu

SEQ ID NO: 132338 - RNA, 25 nt, Artificial Sequence
  Description of Artificial Sequence: Synthetic oligonucleotide
uggcgggcgccagggccgaagagga

SEQ ID NO: 132339 - RNA, 25 nt, Artificial Sequence
  Description of Artificial Sequence: Synthetic oligonucleotide
aaaugcuggaaaaugucagccuggu

SEQ ID NO: 132340 - RNA, 25 nt, Artificial Sequence
  Description of Artificial Sequence: Synthetic oligonucleotide
ucuguccaaaagaugcgacccgauu

SEQ ID NO: 132341 - RNA, 25 nt, Artificial Sequence
  Description of Artificial Sequence: Synthetic oligonucleotide
ucaagcaccuccggaaguacacaua

SEQ ID NO: 132342 - RNA, 25 nt, Artificial Sequence
  Description of Artificial Sequence: Synthetic oligonucleotide
acaacuaugaggcugagaguuccag

SEQ ID NO: 132343 - RNA, 25 nt, Artificial Sequence
  Description of Artificial Sequence: Synthetic oligonucleotide
guggagucccugggacugcugauuc

SEQ ID NO: 132344 - RNA, 25 nt, Artificial Sequence
  Description of Artificial Sequence: Synthetic oligonucleotide
caagaagugccaccaggaucaacug

SEQ ID NO: 132345 - RNA, 25 nt, Artificial Sequence
  Description of Artificial Sequence: Synthetic oligonucleotide
gcaagguugagcuggagguucccca

SEQ ID NO: 132346 - RNA, 25 nt, Artificial Sequence
  Description of Artificial Sequence: Synthetic oligonucleotide
agcucugcagcuucauccugaagac

SEQ ID NO: 132347 - RNA, 25 nt, Artificial Sequence
  Description of Artificial Sequence: Synthetic oligonucleotide
ccagccagugcacccugaaagaggu

SEQ ID NO: 132348 - RNA, 25 nt, Artificial Sequence
  Description of Artificial Sequence: Synthetic oligonucleotide
uguauggcuucaacccugagggcaa

SEQ ID NO: 132349 - RNA, 25 nt, Artificial Sequence
  Description of Artificial Sequence: Synthetic oligonucleotide
aagccuugcugaagaaaaccaagaa

SEQ ID NO: 132350 - RNA, 25 nt, Artificial Sequence
  Description of Artificial Sequence: Synthetic oligonucleotide
acucugaggaguuugcugcagccau

SEQ ID NO: 132351 - RNA, 25 nt, Artificial Sequence
  Description of Artificial Sequence: Synthetic oligonucleotide
uguccagguaugagcucaagcuggc

SEQ ID NO: 132352 - RNA, 25 nt, Artificial Sequence
  Description of Artificial Sequence: Synthetic oligonucleotide
ccauuccagaagggaagcagguuuu

SEQ ID NO: 132353 - RNA, 25 nt, Artificial Sequence
  Description of Artificial Sequence: Synthetic oligonucleotide
uccuuuacccggagaaagaugaacc

SEQ ID NO: 132354 - RNA, 25 nt, Artificial Sequence
  Description of Artificial Sequence: Synthetic oligonucleotide
cuacuuacauccugaacaucaagag

SEQ ID NO: 132355 - RNA, 25 nt, Artificial Sequence
  Description of Artificial Sequence: Synthetic oligonucleotide
ggggcaucauuucugcccuccuggu

SEQ ID NO: 132356 - RNA, 25 nt, Artificial Sequence
  Description of Artificial Sequence: Synthetic oligonucleotide
uucccccagagacagaagaagccaa

SEQ ID NO: 132357 - RNA, 25 nt, Artificial Sequence
  Description of Artificial Sequence: Synthetic oligonucleotide
agcaaguguuguuucuggauaccgu

SEQ ID NO: 132358 - RNA, 25 nt, Artificial Sequence
  Description of Artificial Sequence: Synthetic oligonucleotide
uguauggaaacugcuccacucacuu

SEQ ID NO: 132359 - RNA, 25 nt, Artificial Sequence
  Description of Artificial Sequence: Synthetic oligonucleotide
uuaccgucaagacgaggaagggcaa

SEQ ID NO: 132360 - RNA, 25 nt, Artificial Sequence
  Description of Artificial Sequence: Synthetic oligonucleotide
auguggcaacagaaauauccacuga

SEQ ID NO: 132361 - RNA, 25 nt, Artificial Sequence
  Description of Artificial Sequence: Synthetic oligonucleotide
aaagagaccuggggcagugugaucg

SEQ ID NO: 132362 - RNA, 25 nt, Artificial Sequence
  Description of Artificial Sequence: Synthetic oligonucleotide
gcuucaagcccauccgcacaggcau

SEQ ID NO: 132363 - RNA, 25 nt, Artificial Sequence
  Description of Artificial Sequence: Synthetic oligonucleotide
ucagcccacuugcucucaucaaagg

SEQ ID NO: 132364 - RNA, 25 nt, Artificial Sequence
  Description of Artificial Sequence: Synthetic oligonucleotide
gcaugacccgccccuugucaacucu

SEQ ID NO: 132365 - RNA, 25 nt, Artificial Sequence
  Description of Artificial Sequence: Synthetic oligonucleotide
ugaucagcagcagccaguccuguca

SEQ ID NO: 132366 - RNA, 25 nt, Artificial Sequence
  Description of Artificial Sequence: Synthetic oligonucleotide
aguacacacuggacgcuaagaggaa

SEQ ID NO: 132367 - RNA, 25 nt, Artificial Sequence
  Description of Artificial Sequence: Synthetic oligonucleotide
agcauguggcagaagccaucugcaa

SEQ ID NO: 132368 - RNA, 25 nt, Artificial Sequence
  Description of Artificial Sequence: Synthetic oligonucleotide
aggagcaacaccucuuccugccuuu

SEQ ID NO: 132369 - RNA, 25 nt, Artificial Sequence
  Description of Artificial Sequence: Synthetic oligonucleotide
ucuccuacaagaauaaguaugggau

SEQ ID NO: 132370 - RNA, 25 nt, Artificial Sequence
  Description of Artificial Sequence: Synthetic oligonucleotide
ugguagcacaagugacacagacuuu

SEQ ID NO: 132371 - RNA, 25 nt, Artificial Sequence
  Description of Artificial Sequence: Synthetic oligonucleotide
ugaaacuugaagacacaccaaagau

SEQ ID NO: 132372 - RNA, 25 nt, Artificial Sequence
  Description of Artificial Sequence: Synthetic oligonucleotide
ucaacagccgcuucuuuggugaagg

SEQ ID NO: 132373 - RNA, 25 nt, Artificial Sequence
  Description of Artificial Sequence: Synthetic oligonucleotide
guacuaagaagaugggccucgcauu

SEQ ID NO: 132374 - RNA, 25 nt, Artificial Sequence
  Description of Artificial Sequence: Synthetic oligonucleotide
uugagagcaccaaauccacaucacc

SEQ ID NO: 132375 - RNA, 25 nt, Artificial Sequence
  Description of Artificial Sequence: Synthetic oligonucleotide
cuccaaagcaggccgaagcuguuuu

SEQ ID NO: 132376 - RNA, 25 nt, Artificial Sequence
  Description of Artificial Sequence: Synthetic oligonucleotide
ugaagacucuccaggaacugaaaaa

SEQ ID NO: 132377 - RNA, 25 nt, Artificial Sequence
  Description of Artificial Sequence: Synthetic oligonucleotide
aacuaaccaucucugagcaaaauau

SEQ ID NO: 132378 - RNA, 25 nt, Artificial Sequence
  Description of Artificial Sequence: Synthetic oligonucleotide
uccagagagcuaaucucuucaauaa

SEQ ID NO: 132379 - RNA, 25 nt, Artificial Sequence
  Description of Artificial Sequence: Synthetic oligonucleotide
agcugguuacugagcugagaggccu

SEQ ID NO: 132380 - RNA, 25 nt, Artificial Sequence
  Description of Artificial Sequence: Synthetic oligonucleotide
ucagugaugaagcagucacaucucu

SEQ ID NO: 132381 - RNA, 25 nt, Artificial Sequence
  Description of Artificial Sequence: Synthetic oligonucleotide
ucuugccacagcugauugagguguc

SEQ ID NO: 132382 - RNA, 25 nt, Artificial Sequence
  Description of Artificial Sequence: Synthetic oligonucleotide
ccagccccaucacuuuacaagccuu

SEQ ID NO: 132383 - RNA, 25 nt, Artificial Sequence
  Description of Artificial Sequence: Synthetic oligonucleotide
ugguucaguguggacagccucagug

SEQ ID NO: 132384 - RNA, 25 nt, Artificial Sequence
  Description of Artificial Sequence: Synthetic oligonucleotide
gcuccacucacauccuccaguggcu

SEQ ID NO: 132385 - RNA, 25 nt, Artificial Sequence
  Description of Artificial Sequence: Synthetic oligonucleotide
ugaaacgugugcaugccaacccccu

SEQ ID NO: 132386 - RNA, 25 nt, Artificial Sequence
  Description of Artificial Sequence: Synthetic oligonucleotide
uucugauagauguggucaccuaccu

SEQ ID NO: 132387 - RNA, 25 nt, Artificial Sequence
  Description of Artificial Sequence: Synthetic oligonucleotide
ugguggcccugauccccgagcccuc

SEQ ID NO: 132388 - RNA, 25 nt, Artificial Sequence
  Description of Artificial Sequence: Synthetic oligonucleotide
cagcacagcagcugcgagagaucuu

SEQ ID NO: 132389 - RNA, 25 nt, Artificial Sequence
  Description of Artificial Sequence: Synthetic oligonucleotide
ucaacauggcgagggaucagcgcag

SEQ ID NO: 132390 - RNA, 25 nt, Artificial Sequence
  Description of Artificial Sequence: Synthetic oligonucleotide
gccgagccaccuuguaugcgcugag

SEQ ID NO: 132391 - RNA, 25 nt, Artificial Sequence
  Description of Artificial Sequence: Synthetic oligonucleotide
gccacgcggucaacaacuaucauaa

SEQ ID NO: 132392 - RNA, 25 nt, Artificial Sequence
  Description of Artificial Sequence: Synthetic oligonucleotide
agacaaacccuacagggacccagga

SEQ ID NO: 132393 - RNA, 25 nt, Artificial Sequence
  Description of Artificial Sequence: Synthetic oligonucleotide
agcugcuggacauugcuaauuaccu

SEQ ID NO: 132394 - RNA, 25 nt, Artificial Sequence
  Description of Artificial Sequence: Synthetic oligonucleotide
ugauggaacagauucaagaugacug

SEQ ID NO: 132395 - RNA, 25 nt, Artificial Sequence
  Description of Artificial Sequence: Synthetic oligonucleotide
gcacuggggaugaagauuacaccua

SEQ ID NO: 132396 - RNA, 25 nt, Artificial Sequence
  Description of Artificial Sequence: Synthetic oligonucleotide
auuugauucugcgggucauuggaaa

SEQ ID NO: 132397 - RNA, 25 nt, Artificial Sequence
  Description of Artificial Sequence: Synthetic oligonucleotide
auaugggccaaaccauggagcaguu

SEQ ID NO: 132398 - RNA, 25 nt, Artificial Sequence
  Description of Artificial Sequence: Synthetic oligonucleotide
uaacuccagaacucaagucuucaau

SEQ ID NO: 132399 - RNA, 25 nt, Artificial Sequence
  Description of Artificial Sequence: Synthetic oligonucleotide
uccugaaauguguccaaaguacaaa

SEQ ID NO: 132400 - RNA, 25 nt, Artificial Sequence
  Description of Artificial Sequence: Synthetic oligonucleotide
agccaucacugaugauccagaaagc

SEQ ID NO: 132401 - RNA, 25 nt, Artificial Sequence
  Description of Artificial Sequence: Synthetic oligonucleotide
cugccauccaggcucugcggaaaau

SEQ ID NO: 132402 - RNA, 25 nt, Artificial Sequence
  Description of Artificial Sequence: Synthetic oligonucleotide
uggagccuaaagacaaggaccagga

SEQ ID NO: 132403 - RNA, 25 nt, Artificial Sequence
  Description of Artificial Sequence: Synthetic oligonucleotide
agguucuucuucagacuuuccuuga

SEQ ID NO: 132404 - RNA, 25 nt, Artificial Sequence
  Description of Artificial Sequence: Synthetic oligonucleotide
augaugcuucuccgggagauaagcg

SEQ ID NO: 132405 - RNA, 25 nt, Artificial Sequence
  Description of Artificial Sequence: Synthetic oligonucleotide
gacuggcugccuaucuuauguugau

SEQ ID NO: 132406 - RNA, 25 nt, Artificial Sequence
  Description of Artificial Sequence: Synthetic oligonucleotide
ugaggaguccuucacaggcagauau

SEQ ID NO: 132407 - RNA, 25 nt, Artificial Sequence
  Description of Artificial Sequence: Synthetic oligonucleotide
uuaacaaaauuguccaaauucuacc

SEQ ID NO: 132408 - RNA, 25 nt, Artificial Sequence
  Description of Artificial Sequence: Synthetic oligonucleotide
caugggaacagaaugagcaagugaa

SEQ ID NO: 132409 - RNA, 25 nt, Artificial Sequence
  Description of Artificial Sequence: Synthetic oligonucleotide
agaacuuuguggcuucccauauugc

SEQ ID NO: 132410 - RNA, 25 nt, Artificial Sequence
  Description of Artificial Sequence: Synthetic oligonucleotide
ccaauaucuugaacucagaagaauu

SEQ ID NO: 132411 - RNA, 25 nt, Artificial Sequence
  Description of Artificial Sequence: Synthetic oligonucleotide
uggauauccaagaucugaaaaaguu

SEQ ID NO: 132412 - RNA, 25 nt, Artificial Sequence
  Description of Artificial Sequence: Synthetic oligonucleotide
uagugaaagaagcucugaaagaauc

SEQ ID NO: 132413 - RNA, 25 nt, Artificial Sequence
  Description of Artificial Sequence: Synthetic oligonucleotide
cucaacuuccaacugucauggacuu

SEQ ID NO: 132414 - RNA, 25 nt, Artificial Sequence
  Description of Artificial Sequence: Synthetic oligonucleotide
ucagaaaauucucucggaacuauca

SEQ ID NO: 132415 - RNA, 25 nt, Artificial Sequence
  Description of Artificial Sequence: Synthetic oligonucleotide
aacucuacaaaucuguuucucuucc

SEQ ID NO: 132416 - RNA, 25 nt, Artificial Sequence
  Description of Artificial Sequence: Synthetic oligonucleotide
caucacuugacccagccucagccaa

SEQ ID NO: 132417 - RNA, 25 nt, Artificial Sequence
  Description of Artificial Sequence: Synthetic oligonucleotide
aaauagaagggaaucuuauauuuga

SEQ ID NO: 132418 - RNA, 25 nt, Artificial Sequence
  Description of Artificial Sequence: Synthetic oligonucleotide
auccaaauaacuaccuuccuaaaga

SEQ ID NO: 132419 - RNA, 25 nt, Artificial Sequence
  Description of Artificial Sequence: Synthetic oligonucleotide
aaagcaugcugaaaacuacccucac

SEQ ID NO: 132420 - RNA, 25 nt, Artificial Sequence
  Description of Artificial Sequence: Synthetic oligonucleotide
cugccuuuggauuugcuucagcuga

SEQ ID NO: 132421 - RNA, 25 nt, Artificial Sequence
  Description of Artificial Sequence: Synthetic oligonucleotide
accucaucgagauuggcuuggaagg

SEQ ID NO: 132422 - RNA, 25 nt, Artificial Sequence
  Description of Artificial Sequence: Synthetic oligonucleotide
gaaaaggcuuugagccaacauugga

SEQ ID NO: 132423 - RNA, 25 nt, Artificial Sequence
  Description of Artificial Sequence: Synthetic oligonucleotide
aagcucuuuuugggaagcaaggauu

SEQ ID NO: 132424 - RNA, 25 nt, Artificial Sequence
  Description of Artificial Sequence: Synthetic oligonucleotide
uuuucccagacagugucaacaaagc

SEQ ID NO: 132425 - RNA, 25 nt, Artificial Sequence
  Description of Artificial Sequence: Synthetic oligonucleotide
cuuuguacuggguuaauggucaagu

SEQ ID NO: 132426 - RNA, 25 nt, Artificial Sequence
  Description of Artificial Sequence: Synthetic oligonucleotide
uuccugauggugucucuaaggucuu

SEQ ID NO: 132427 - RNA, 25 nt, Artificial Sequence
  Description of Artificial Sequence: Synthetic oligonucleotide
uaguggaccacuuuggcuauaccaa

SEQ ID NO: 132428 - RNA, 25 nt, Artificial Sequence
  Description of Artificial Sequence: Synthetic oligonucleotide
aagaugauaaacaugagcaggauau

SEQ ID NO: 132429 - RNA, 25 nt, Artificial Sequence
  Description of Artificial Sequence: Synthetic oligonucleotide
ugguaaauggaauaaugcucagugu

SEQ ID NO: 132430 - RNA, 25 nt, Artificial Sequence
  Description of Artificial Sequence: Synthetic oligonucleotide
uugagaagcugauuaaagauuugaa

SEQ ID NO: 132431 - RNA, 25 nt, Artificial Sequence
  Description of Artificial Sequence: Synthetic oligonucleotide
aauccaaagaagucccggaagccag

SEQ ID NO: 132432 - RNA, 25 nt, Artificial Sequence
  Description of Artificial Sequence: Synthetic oligonucleotide
gagccuaccuccgcaucuugggaga

SEQ ID NO: 132433 - RNA, 25 nt, Artificial Sequence
  Description of Artificial Sequence: Synthetic oligonucleotide
aggagcuugguuuugccagucucca

SEQ ID NO: 132434 - RNA, 25 nt, Artificial Sequence
  Description of Artificial Sequence: Synthetic oligonucleotide
augaccuccagcuccugggaaagcu

SEQ ID NO: 132435 - RNA, 25 nt, Artificial Sequence
  Description of Artificial Sequence: Synthetic oligonucleotide
ugcuucugaugggugcccgcacucu

SEQ ID NO: 132436 - RNA, 25 nt, Artificial Sequence
  Description of Artificial Sequence: Synthetic oligonucleotide
ugcaggggaucccccagaugauugg

SEQ ID NO: 132437 - RNA, 25 nt, Artificial Sequence
  Description of Artificial Sequence: Synthetic oligonucleotide
gagaggucaucaggaagggcucaaa

SEQ ID NO: 132438 - RNA, 25 nt, Artificial Sequence
  Description of Artificial Sequence: Synthetic oligonucleotide
agaaugacuuuuuucuucacuacau

SEQ ID NO: 132439 - RNA, 25 nt, Artificial Sequence
  Description of Artificial Sequence: Synthetic oligonucleotide
ucuucauggagaaugccuuugaacu

SEQ ID NO: 132440 - RNA, 25 nt, Artificial Sequence
  Description of Artificial Sequence: Synthetic oligonucleotide
uccccacuggagcuggauuacaguu

SEQ ID NO: 132441 - RNA, 25 nt, Artificial Sequence
  Description of Artificial Sequence: Synthetic oligonucleotide
ugcaaauaucuucaucuggagucau

SEQ ID NO: 132442 - RNA, 25 nt, Artificial Sequence
  Description of Artificial Sequence: Synthetic oligonucleotide
uugcucccggagccaaggcuggagu

SEQ ID NO: 132443 - RNA, 25 nt, Artificial Sequence
  Description of Artificial Sequence: Synthetic oligonucleotide
uaaaacuggaaguagccaacaugca

SEQ ID NO: 132444 - RNA, 25 nt, Artificial Sequence
  Description of Artificial Sequence: Synthetic oligonucleotide
aggcugaacugguggcaaaacccuc

SEQ ID NO: 132445 - RNA, 25 nt, Artificial Sequence
  Description of Artificial Sequence: Synthetic oligonucleotide
ccgugucuguggaguuugugacaaa

SEQ ID NO: 132446 - RNA, 25 nt, Artificial Sequence
  Description of Artificial Sequence: Synthetic oligonucleotide
auaugggcaucaucauuccggacuu

SEQ ID NO: 132447 - RNA, 25 nt, Artificial Sequence
  Description of Artificial Sequence: Synthetic oligonucleotide
ucgcuaggagugggguccagaugaa

SEQ ID NO: 132448 - RNA, 25 nt, Artificial Sequence
  Description of Artificial Sequence: Synthetic oligonucleotide
acaccaacuucuuccacgagucggg

SEQ ID NO: 132449 - RNA, 25 nt, Artificial Sequence
  Description of Artificial Sequence: Synthetic oligonucleotide
gucuggaggcucauguugcccuaaa

SEQ ID NO: 132450 - RNA, 25 nt, Artificial Sequence
  Description of Artificial Sequence: Synthetic oligonucleotide
aagcugggaagcugaaguuuaucau

SEQ ID NO: 132451 - RNA, 25 nt, Artificial Sequence
  Description of Artificial Sequence: Synthetic oligonucleotide
uuccuuccccaaagagaccagucaa

SEQ ID NO: 132452 - RNA, 25 nt, Artificial Sequence
  Description of Artificial Sequence: Synthetic oligonucleotide
agcugcucaguggaggcaacacauu

SEQ ID NO: 132453 - RNA, 25 nt, Artificial Sequence
  Description of Artificial Sequence: Synthetic oligonucleotide
uacauuuggucucuaccaccaaaac

SEQ ID NO: 132454 - RNA, 25 nt, Artificial Sequence
  Description of Artificial Sequence: Synthetic oligonucleotide
cggaggugaucccaccucucauuga

SEQ ID NO: 132455 - RNA, 25 nt, Artificial Sequence
  Description of Artificial Sequence: Synthetic oligonucleotide
agaacaggcaguccuggucaguuug

SEQ ID NO: 132456 - RNA, 25 nt, Artificial Sequence
  Description of Artificial Sequence: Synthetic oligonucleotide
gcaagcaagucuuuccuggccugaa

SEQ ID NO: 132457 - RNA, 25 nt, Artificial Sequence
  Description of Artificial Sequence: Synthetic oligonucleotide
auuacugcaccucaggcgcuuacuc

SEQ ID NO: 132458 - RNA, 25 nt, Artificial Sequence
  Description of Artificial Sequence: Synthetic oligonucleotide
ccaacgccagcuccacagacuccgc

SEQ ID NO: 132459 - RNA, 25 nt, Artificial Sequence
  Description of Artificial Sequence: Synthetic oligonucleotide
ccuccuacuauccgcugaccgggga

SEQ ID NO: 132460 - RNA, 25 nt, Artificial Sequence
  Description of Artificial Sequence: Synthetic oligonucleotide
acaccagauuagagcuggaacugag

SEQ ID NO: 132461 - RNA, 25 nt, Artificial Sequence
  Description of Artificial Sequence: Synthetic oligonucleotide
ggccuacaggagagauugagcagua

SEQ ID NO: 132462 - RNA, 25 nt, Artificial Sequence
  Description of Artificial Sequence: Synthetic oligonucleotide
auucugucagcgcaaccuaugagcu

SEQ ID NO: 132463 - RNA, 25 nt, Artificial Sequence
  Description of Artificial Sequence: Synthetic oligonucleotide
uccagagagaggacagagccuuggu

SEQ ID NO: 132464 - RNA, 25 nt, Artificial Sequence
  Description of Artificial Sequence: Synthetic oligonucleotide
uggauacccugaaguuuguaacuca

SEQ ID NO: 132465 - RNA, 25 nt, Artificial Sequence
  Description of Artificial Sequence: Synthetic oligonucleotide
aagcagaaggugcgaagcagacuga

SEQ ID NO: 132466 - RNA, 25 nt, Artificial Sequence
  Description of Artificial Sequence: Synthetic oligonucleotide
aggcuaccaugacauucaaauauaa

SEQ ID NO: 132467 - RNA, 25 nt, Artificial Sequence
  Description of Artificial Sequence: Synthetic oligonucleotide
aucggcagaguaugaccuuguccag

SEQ ID NO: 132468 - RNA, 25 nt, Artificial Sequence
  Description of Artificial Sequence: Synthetic oligonucleotide
gugaaguccaaauuccggauuuuga

SEQ ID NO: 132469 - RNA, 25 nt, Artificial Sequence
  Description of Artificial Sequence: Synthetic oligonucleotide
auguugaccucggaacaauccucag

SEQ ID NO: 132470 - RNA, 25 nt, Artificial Sequence
  Description of Artificial Sequence: Synthetic oligonucleotide
gaguuaaugaugaaucuacugaggg

SEQ ID NO: 132471 - RNA, 25 nt, Artificial Sequence
  Description of Artificial Sequence: Synthetic oligonucleotide
gcaaaacgucuuacagacucacccu

SEQ ID NO: 132472 - RNA, 25 nt, Artificial Sequence
  Description of Artificial Sequence: Synthetic oligonucleotide
uggacauucagaacaagaaaauuac

SEQ ID NO: 132473 - RNA, 25 nt, Artificial Sequence
  Description of Artificial Sequence: Synthetic oligonucleotide
cugaggucgcccucaugggccaccu

SEQ ID NO: 132474 - RNA, 25 nt, Artificial Sequence
  Description of Artificial Sequence: Synthetic oligonucleotide
uaaguugugacacaaaggaagaaag

SEQ ID NO: 132475 - RNA, 25 nt, Artificial Sequence
  Description of Artificial Sequence: Synthetic oligonucleotide
gaaaaaucaaggguguuauuuccau

SEQ ID NO: 132476 - RNA, 25 nt, Artificial Sequence
  Description of Artificial Sequence: Synthetic oligonucleotide
uaccccguuugcaagcagaagccag

SEQ ID NO: 132477 - RNA, 25 nt, Artificial Sequence
  Description of Artificial Sequence: Synthetic oligonucleotide
gaagugagauccucgcccacugguc

SEQ ID NO: 132478 - RNA, 25 nt, Artificial Sequence
  Description of Artificial Sequence: Synthetic oligonucleotide
cgccugccaaacugcuucuccaaau

SEQ ID NO: 132479 - RNA, 25 nt, Artificial Sequence
  Description of Artificial Sequence: Synthetic oligonucleotide
uggacucaucugcuacagcuuaugg

SEQ ID NO: 132480 - RNA, 25 nt, Artificial Sequence
  Description of Artificial Sequence: Synthetic oligonucleotide
gcuccacaguuuccaagaggguggc

SEQ ID NO: 132481 - RNA, 25 nt, Artificial Sequence
  Description of Artificial Sequence: Synthetic oligonucleotide
cauggcauuaugaugaagagaagau

SEQ ID NO: 132482 - RNA, 25 nt, Artificial Sequence
  Description of Artificial Sequence: Synthetic oligonucleotide
uugaauuugaauggaacacaggcac

SEQ ID NO: 132483 - RNA, 25 nt, Artificial Sequence
  Description of Artificial Sequence: Synthetic oligonucleotide
ccaauguagauaccaaaaaaaugac

SEQ ID NO: 132484 - RNA, 25 nt, Artificial Sequence
  Description of Artificial Sequence: Synthetic oligonucleotide
cuuccaauuucccuguggaucucuc

SEQ ID NO: 132485 - RNA, 25 nt, Artificial Sequence
  Description of Artificial Sequence: Synthetic oligonucleotide
ccgauuauccuaagagcuugcauau

SEQ ID NO: 132486 - RNA, 25 nt, Artificial Sequence
  Description of Artificial Sequence: Synthetic oligonucleotide
uguaugcuaauagacuccuggauca

SEQ ID NO: 132487 - RNA, 25 nt, Artificial Sequence
  Description of Artificial Sequence: Synthetic oligonucleotide
acagagucccucaaacagacaugac

SEQ ID NO: 132488 - RNA, 25 nt, Artificial Sequence
  Description of Artificial Sequence: Synthetic oligonucleotide
cuuuccggcacguggguuccaaauu

SEQ ID NO: 132489 - RNA, 25 nt, Artificial Sequence
  Description of Artificial Sequence: Synthetic oligonucleotide
uaauaguugcaaugagcucauggcu

SEQ ID NO: 132490 - RNA, 25 nt, Artificial Sequence
  Description of Artificial Sequence: Synthetic oligonucleotide
uucagaaggcaucugggagucuucc

SEQ ID NO: 132491 - RNA, 25 nt, Artificial Sequence
  Description of Artificial Sequence: Synthetic oligonucleotide
cuuauacccagacuuugcaagacca

SEQ ID NO: 132492 - RNA, 25 nt, Artificial Sequence
  Description of Artificial Sequence: Synthetic oligonucleotide
accucaauagccugaaggaguucaa

SEQ ID NO: 132493 - RNA, 25 nt, Artificial Sequence
  Description of Artificial Sequence: Synthetic oligonucleotide
accuccagaacaugggauugccaga

SEQ ID NO: 132494 - RNA, 25 nt, Artificial Sequence
  Description of Artificial Sequence: Synthetic oligonucleotide
acuuccacaucccagaaaaccucuu

SEQ ID NO: 132495 - RNA, 25 nt, Artificial Sequence
  Description of Artificial Sequence: Synthetic oligonucleotide
ucuuaaaaagcgauggccgggucaa

SEQ ID NO: 132496 - RNA, 25 nt, Artificial Sequence
  Description of Artificial Sequence: Synthetic oligonucleotide
aauauaccuugaacaagaacaguuu

SEQ ID NO: 132497 - RNA, 25 nt, Artificial Sequence
  Description of Artificial Sequence: Synthetic oligonucleotide
ugaaaauugagauuccuuugccuuu

SEQ ID NO: 132498 - RNA, 25 nt, Artificial Sequence
  Description of Artificial Sequence: Synthetic oligonucleotide
uugguggcaaauccuccagagaucu

SEQ ID NO: 132499 - RNA, 25 nt, Artificial Sequence
  Description of Artificial Sequence: Synthetic oligonucleotide
uaaagauguuagagacuguuaggac

SEQ ID NO: 132500 - RNA, 25 nt, Artificial Sequence
  Description of Artificial Sequence: Synthetic oligonucleotide
caccagcccuccacuucaagucugu

SEQ ID NO: 132501 - RNA, 25 nt, Artificial Sequence
  Description of Artificial Sequence: Synthetic oligonucleotide
ugggauuccaucugccaucucgaga

SEQ ID NO: 132502 - RNA, 25 nt, Artificial Sequence
  Description of Artificial Sequence: Synthetic oligonucleotide
aguuccaagucccuacuuuuaccau

SEQ ID NO: 132503 - RNA, 25 nt, Artificial Sequence
  Description of Artificial Sequence: Synthetic oligonucleotide
uucccaaguuguaucaacugcaagu

SEQ ID NO: 132504 - RNA, 25 nt, Artificial Sequence
  Description of Artificial Sequence: Synthetic oligonucleotide
ugccucuccuggguguucuagaccu

SEQ ID NO: 132505 - RNA, 25 nt, Artificial Sequence
  Description of Artificial Sequence: Synthetic oligonucleotide
ucuccacgaaugucuacagcaacuu

SEQ ID NO: 132506 - RNA, 25 nt, Artificial Sequence
  Description of Artificial Sequence: Synthetic oligonucleotide
uguacaacugguccgccuccuacag

SEQ ID NO: 132507 - RNA, 25 nt, Artificial Sequence
  Description of Artificial Sequence: Synthetic oligonucleotide
gugguggcaacaccagcacagacca

SEQ ID NO: 132508 - RNA, 25 nt, Artificial Sequence
  Description of Artificial Sequence: Synthetic oligonucleotide
auuucagccuucgggcucguuacca

SEQ ID NO: 132509 - RNA, 25 nt, Artificial Sequence
  Description of Artificial Sequence: Synthetic oligonucleotide
acaugaaggcugacucugugguuga

SEQ ID NO: 132510 - RNA, 25 nt, Artificial Sequence
  Description of Artificial Sequence: Synthetic oligonucleotide
accugcuuuccuacaaugugcaagg

SEQ ID NO: 132511 - RNA, 25 nt, Artificial Sequence
  Description of Artificial Sequence: Synthetic oligonucleotide
gaucuggagaaacaacauaugacca

SEQ ID NO: 132512 - RNA, 25 nt, Artificial Sequence
  Description of Artificial Sequence: Synthetic oligonucleotide
acaagaauacguucacacuaucaug

SEQ ID NO: 132513 - RNA, 25 nt, Artificial Sequence
  Description of Artificial Sequence: Synthetic oligonucleotide
gugaugggucucuacgccacaaauu

SEQ ID NO: 132514 - RNA, 25 nt, Artificial Sequence
  Description of Artificial Sequence: Synthetic oligonucleotide
uucuagauucgaauaucaaauucag

SEQ ID NO: 132515 - RNA, 25 nt, Artificial Sequence
  Description of Artificial Sequence: Synthetic oligonucleotide
gucauguagaaaaacuuggaaacaa

SEQ ID NO: 132516 - RNA, 25 nt, Artificial Sequence
  Description of Artificial Sequence: Synthetic oligonucleotide
acccagucucaaaagguuuacuaau

SEQ ID NO: 132517 - RNA, 25 nt, Artificial Sequence
  Description of Artificial Sequence: Synthetic oligonucleotide
uauucgaugcaucuaguuccugggg

SEQ ID NO: 132518 - RNA, 25 nt, Artificial Sequence
  Description of Artificial Sequence: Synthetic oligonucleotide
gaccacagaugucugcuucaguuca

SEQ ID NO: 132519 - RNA, 25 nt, Artificial Sequence
  Description of Artificial Sequence: Synthetic oligonucleotide
auuuggacuccaaaaagaaacagca

SEQ ID NO: 132520 - RNA, 25 nt, Artificial Sequence
  Description of Artificial Sequence: Synthetic oligonucleotide
auuuguuugucaaagaagucaagau

SEQ ID NO: 132521 - RNA, 25 nt, Artificial Sequence
  Description of Artificial Sequence: Synthetic oligonucleotide
uugaugggcaguucagagucucuuc

SEQ ID NO: 132522 - RNA, 25 nt, Artificial Sequence
  Description of Artificial Sequence: Synthetic oligonucleotide
cguucuaugcuaaaggcacauaugg

SEQ ID NO: 132523 - RNA, 25 nt, Artificial Sequence
  Description of Artificial Sequence: Synthetic oligonucleotide
gccugucuugucagagggauccuaa

SEQ ID NO: 132524 - RNA, 25 nt, Artificial Sequence
  Description of Artificial Sequence: Synthetic oligonucleotide
acacuggccggcucaauggagaguc

SEQ ID NO: 132525 - RNA, 25 nt, Artificial Sequence
  Description of Artificial Sequence: Synthetic oligonucleotide
ccaaccugagguuuaacuccuccua

SEQ ID NO: 132526 - RNA, 25 nt, Artificial Sequence
  Description of Artificial Sequence: Synthetic oligonucleotide
accuccaaggcaccaaccagauaac

SEQ ID NO: 132527 - RNA, 25 nt, Artificial Sequence
  Description of Artificial Sequence: Synthetic oligonucleotide
caggaagauaugaagauggaacccu

SEQ ID NO: 132528 - RNA, 25 nt, Artificial Sequence
  Description of Artificial Sequence: Synthetic oligonucleotide
ucucccucaccuccaccucugaucu

SEQ ID NO: 132529 - RNA, 25 nt, Artificial Sequence
  Description of Artificial Sequence: Synthetic oligonucleotide
ugcaaaguggcaucauuaaaaauac

SEQ ID NO: 132530 - RNA, 25 nt, Artificial Sequence
  Description of Artificial Sequence: Synthetic oligonucleotide
cugcuucccuaaaguaugagaacua

SEQ ID NO: 132531 - RNA, 25 nt, Artificial Sequence
  Description of Artificial Sequence: Synthetic oligonucleotide
acgagcugacuuuaaaaucugacac

SEQ ID NO: 132532 - RNA, 25 nt, Artificial Sequence
  Description of Artificial Sequence: Synthetic oligonucleotide
ccaaugggaaguauaagaacuuugc

SEQ ID NO: 132533 - RNA, 25 nt, Artificial Sequence
  Description of Artificial Sequence: Synthetic oligonucleotide
ccacuucuaacaagauggauaugac

SEQ ID NO: 132534 - RNA, 25 nt, Artificial Sequence
  Description of Artificial Sequence: Synthetic oligonucleotide
ccuucucuaagcaaaaugcacugcu

SEQ ID NO: 132535 - RNA, 25 nt, Artificial Sequence
  Description of Artificial Sequence: Synthetic oligonucleotide
ugcguucugaauaucaggcugauua

SEQ ID NO: 132536 - RNA, 25 nt, Artificial Sequence
  Description of Artificial Sequence: Synthetic oligonucleotide
acgagucauugagguucuucagccu

SEQ ID NO: 132537 - RNA, 25 nt, Artificial Sequence
  Description of Artificial Sequence: Synthetic oligonucleotide
ugcuuucuggaucacuaaauuccca

SEQ ID NO: 132538 - RNA, 25 nt, Artificial Sequence
  Description of Artificial Sequence: Synthetic oligonucleotide
auggucuugaguuaaaugcugacau

SEQ ID NO: 132539 - RNA, 25 nt, Artificial Sequence
  Description of Artificial Sequence: Synthetic oligonucleotide
ucuuaggcacugacaaaauuaauag

SEQ ID NO: 132540 - RNA, 25 nt, Artificial Sequence
  Description of Artificial Sequence: Synthetic oligonucleotide
guggugcucacaaggcgacacuaag

SEQ ID NO: 132541 - RNA, 25 nt, Artificial Sequence
  Description of Artificial Sequence: Synthetic oligonucleotide
ggauuggccaagauggaauaucuac

SEQ ID NO: 132542 - RNA, 25 nt, Artificial Sequence
  Description of Artificial Sequence: Synthetic oligonucleotide
ccagugcaacgaccaacuugaagug

SEQ ID NO: 132543 - RNA, 25 nt, Artificial Sequence
  Description of Artificial Sequence: Synthetic oligonucleotide
guagucuccuggugcuggagaauga

SEQ ID NO: 132544 - RNA, 25 nt, Artificial Sequence
  Description of Artificial Sequence: Synthetic oligonucleotide
agcugaaugcagagcuuggccucuc

SEQ ID NO: 132545 - RNA, 25 nt, Artificial Sequence
  Description of Artificial Sequence: Synthetic oligonucleotide
cuggggcaucuaugaaauuaacaac

SEQ ID NO: 132546 - RNA, 25 nt, Artificial Sequence
  Description of Artificial Sequence: Synthetic oligonucleotide
caaauggccgcuucagggaacacaa

SEQ ID NO: 132547 - RNA, 25 nt, Artificial Sequence
  Description of Artificial Sequence: Synthetic oligonucleotide
augcaaaauucagucuggaugggaa

SEQ ID NO: 132548 - RNA, 25 nt, Artificial Sequence
  Description of Artificial Sequence: Synthetic oligonucleotide
aagccgcccucacagagcuaucacu

SEQ ID NO: 132549 - RNA, 25 nt, Artificial Sequence
  Description of Artificial Sequence: Synthetic oligonucleotide
ugggaagugcuuaucaggccaugau

SEQ ID NO: 132550 - RNA, 25 nt, Artificial Sequence
  Description of Artificial Sequence: Synthetic oligonucleotide
uucugggugucgacagcaaaaacau

SEQ ID NO: 132551 - RNA, 25 nt, Artificial Sequence
  Description of Artificial Sequence: Synthetic oligonucleotide
uuuucaacuucaaggucagucaaga

SEQ ID NO: 132552 - RNA, 25 nt, Artificial Sequence
  Description of Artificial Sequence: Synthetic oligonucleotide
aaggacuuaagcucucaaaugacau

SEQ ID NO: 132553 - RNA, 25 nt, Artificial Sequence
  Description of Artificial Sequence: Synthetic oligonucleotide
ugaugggcucauaugcugaaaugaa

SEQ ID NO: 132554 - RNA, 25 nt, Artificial Sequence
  Description of Artificial Sequence: Synthetic oligonucleotide
aauuugaccacacaaacagucugaa

SEQ ID NO: 132555 - RNA, 25 nt, Artificial Sequence
  Description of Artificial Sequence: Synthetic oligonucleotide
acauugcaggcuuaucacuggacuu

SEQ ID NO: 132556 - RNA, 25 nt, Artificial Sequence
  Description of Artificial Sequence: Synthetic oligonucleotide
ucucuucaaaacuugacaacauuua

SEQ ID NO: 132557 - RNA, 25 nt, Artificial Sequence
  Description of Artificial Sequence: Synthetic oligonucleotide
acagcucugacaaguuuuauaagca

SEQ ID NO: 132558 - RNA, 25 nt, Artificial Sequence
  Description of Artificial Sequence: Synthetic oligonucleotide
aaacuguuaauuuacagcuacagcc

SEQ ID NO: 132559 - RNA, 25 nt, Artificial Sequence
  Description of Artificial Sequence: Synthetic oligonucleotide
ccuauucucugguaacuacuuuaaa

SEQ ID NO: 132560 - RNA, 25 nt, Artificial Sequence
  Description of Artificial Sequence: Synthetic oligonucleotide
acagugaccugaaauacaaugcucu

SEQ ID NO: 132561 - RNA, 25 nt, Artificial Sequence
  Description of Artificial Sequence: Synthetic oligonucleotide
uggaucucaccaacaaugggaaacu

SEQ ID NO: 132562 - RNA, 25 nt, Artificial Sequence
  Description of Artificial Sequence: Synthetic oligonucleotide
uacggcuagaaccccugaagcugca

SEQ ID NO: 132563 - RNA, 25 nt, Artificial Sequence
  Description of Artificial Sequence: Synthetic oligonucleotide
auguggcugguaaccuaaaaggagc

SEQ ID NO: 132564 - RNA, 25 nt, Artificial Sequence
  Description of Artificial Sequence: Synthetic oligonucleotide
ccuaccaaaauaaugaaauaaaaca

SEQ ID NO: 132565 - RNA, 25 nt, Artificial Sequence
  Description of Artificial Sequence: Synthetic oligonucleotide
acaucuaugccaucucuucugcugc

SEQ ID NO: 132566 - RNA, 25 nt, Artificial Sequence
  Description of Artificial Sequence: Synthetic oligonucleotide
ccuuaucagcaagcuauaaagcaga

SEQ ID NO: 132567 - RNA, 25 nt, Artificial Sequence
  Description of Artificial Sequence: Synthetic oligonucleotide
acacuguugcuaagguucagggugu

SEQ ID NO: 132568 - RNA, 25 nt, Artificial Sequence
  Description of Artificial Sequence: Synthetic oligonucleotide
uggaguuuagccaucggcucaacac

SEQ ID NO: 132569 - RNA, 25 nt, Artificial Sequence
  Description of Artificial Sequence: Synthetic oligonucleotide
cagacaucgcugggcuggcuucagc

SEQ ID NO: 132570 - RNA, 25 nt, Artificial Sequence
  Description of Artificial Sequence: Synthetic oligonucleotide
ccauugacaugagcacaaacuauaa

SEQ ID NO: 132571 - RNA, 25 nt, Artificial Sequence
  Description of Artificial Sequence: Synthetic oligonucleotide
auucagacucacugcauuucagcaa

SEQ ID NO: 132572 - RNA, 25 nt, Artificial Sequence
  Description of Artificial Sequence: Synthetic oligonucleotide
augucuuccguucuguaauggcccc

SEQ ID NO: 132573 - RNA, 25 nt, Artificial Sequence
  Description of Artificial Sequence: Synthetic oligonucleotide
cguuuaccaugaccaucgaugcaca

SEQ ID NO: 132574 - RNA, 25 nt, Artificial Sequence
  Description of Artificial Sequence: Synthetic oligonucleotide
auacaaauggcaaugggaaacucgc

SEQ ID NO: 132575 - RNA, 25 nt, Artificial Sequence
  Description of Artificial Sequence: Synthetic oligonucleotide
cucucuggggagaacauacugggca

SEQ ID NO: 132576 - RNA, 25 nt, Artificial Sequence
  Description of Artificial Sequence: Synthetic oligonucleotide
agcuguauagcaaauuccuguugaa

SEQ ID NO: 132577 - RNA, 25 nt, Artificial Sequence
  Description of Artificial Sequence: Synthetic oligonucleotide
aagcagaaccucuggcauuuacuuu

SEQ ID NO: 132578 - RNA, 25 nt, Artificial Sequence
  Description of Artificial Sequence: Synthetic oligonucleotide
ucucucaugauuacaaaggcuccac

SEQ ID NO: 132579 - RNA, 25 nt, Artificial Sequence
  Description of Artificial Sequence: Synthetic oligonucleotide
caagucaucaucucgugucuaggaa

SEQ ID NO: 132580 - RNA, 25 nt, Artificial Sequence
  Description of Artificial Sequence: Synthetic oligonucleotide
aaagcaucagugcagcucuugaaca

SEQ ID NO: 132581 - RNA, 25 nt, Artificial Sequence
  Description of Artificial Sequence: Synthetic oligonucleotide
acaaagucagugcccugcuuacucc

SEQ ID NO: 132582 - RNA, 25 nt, Artificial Sequence
  Description of Artificial Sequence: Synthetic oligonucleotide
cagcugagcagacaggcaccuggaa

SEQ ID NO: 132583 - RNA, 25 nt, Artificial Sequence
  Description of Artificial Sequence: Synthetic oligonucleotide
aacucaagacccaauuuaacaacaa

SEQ ID NO: 132584 - RNA, 25 nt, Artificial Sequence
  Description of Artificial Sequence: Synthetic oligonucleotide
augaauacagccaggacuuggaugc

SEQ ID NO: 132585 - RNA, 25 nt, Artificial Sequence
  Description of Artificial Sequence: Synthetic oligonucleotide
cuuacaacacuaaagauaaaauugg

SEQ ID NO: 132586 - RNA, 25 nt, Artificial Sequence
  Description of Artificial Sequence: Synthetic oligonucleotide
gcguggagcuuacuggacgaacucu

SEQ ID NO: 132587 - RNA, 25 nt, Artificial Sequence
  Description of Artificial Sequence: Synthetic oligonucleotide
uggcugaccuaacucuacuagacuc

SEQ ID NO: 132588 - RNA, 25 nt, Artificial Sequence
  Description of Artificial Sequence: Synthetic oligonucleotide
ccccaauuaaagugccacuuuuacu

SEQ ID NO: 132589 - RNA, 25 nt, Artificial Sequence
  Description of Artificial Sequence: Synthetic oligonucleotide
ucagugagcccaucaauaucauuga

SEQ ID NO: 132590 - RNA, 25 nt, Artificial Sequence
  Description of Artificial Sequence: Synthetic oligonucleotide
augcuuuagagaugagagaugccgu

SEQ ID NO: 132591 - RNA, 25 nt, Artificial Sequence
  Description of Artificial Sequence: Synthetic oligonucleotide
uugagaagccccaagaauuuacaau

SEQ ID NO: 132592 - RNA, 25 nt, Artificial Sequence
  Description of Artificial Sequence: Synthetic oligonucleotide
uuguugcuuuuguaaaguaugauaa

SEQ ID NO: 132593 - RNA, 25 nt, Artificial Sequence
  Description of Artificial Sequence: Synthetic oligonucleotide
aaaaccaagauguucacuccauuaa

SEQ ID NO: 132594 - RNA, 25 nt, Artificial Sequence
  Description of Artificial Sequence: Synthetic oligonucleotide
accucccauuuuuugagaccuugca

SEQ ID NO: 132595 - RNA, 25 nt, Artificial Sequence
  Description of Artificial Sequence: Synthetic oligonucleotide
aagaauauuuugagaggaaucgaca

SEQ ID NO: 132596 - RNA, 25 nt, Artificial Sequence
  Description of Artificial Sequence: Synthetic oligonucleotide
aaaccauuauaguuguacuggaaaa

SEQ ID NO: 132597 - RNA, 25 nt, Artificial Sequence
  Description of Artificial Sequence: Synthetic oligonucleotide
acguacagagaaaccugaagcacau

SEQ ID NO: 132598 - RNA, 25 nt, Artificial Sequence
  Description of Artificial Sequence: Synthetic oligonucleotide
ucaauauugaucaauuuguaagaaa

SEQ ID NO: 132599 - RNA, 25 nt, Artificial Sequence
  Description of Artificial Sequence: Synthetic oligonucleotide
aauacagagcagcccugggaaaacu

SEQ ID NO: 132600 - RNA, 25 nt, Artificial Sequence
  Description of Artificial Sequence: Synthetic oligonucleotide
ucccacagcaagcuaaugauuaucu

SEQ ID NO: 132601 - RNA, 25 nt, Artificial Sequence
  Description of Artificial Sequence: Synthetic oligonucleotide
ugaauucauucaauugggagagaca

SEQ ID NO: 132602 - RNA, 25 nt, Artificial Sequence
  Description of Artificial Sequence: Synthetic oligonucleotide
aaguuucacaugccaaggagaaacu

SEQ ID NO: 132603 - RNA, 25 nt, Artificial Sequence
  Description of Artificial Sequence: Synthetic oligonucleotide
ugacugcucucacaaaaaaguauag

SEQ ID NO: 132604 - RNA, 25 nt, Artificial Sequence
  Description of Artificial Sequence: Synthetic oligonucleotide
gaauuacagaaaaugauauacaaau

SEQ ID NO: 132605 - RNA, 25 nt, Artificial Sequence
  Description of Artificial Sequence: Synthetic oligonucleotide
uugcauuagaugaugccaaaaucaa

SEQ ID NO: 132606 - RNA, 25 nt, Artificial Sequence
  Description of Artificial Sequence: Synthetic oligonucleotide
acuuuaaugaaaaacuaucucaacu

SEQ ID NO: 132607 - RNA, 25 nt, Artificial Sequence
  Description of Artificial Sequence: Synthetic oligonucleotide
ugcagacauauaugauacaauuuga

SEQ ID NO: 132608 - RNA, 25 nt, Artificial Sequence
  Description of Artificial Sequence: Synthetic oligonucleotide
aucaguauauuaaagauaguuauga

SEQ ID NO: 132609 - RNA, 25 nt, Artificial Sequence
  Description of Artificial Sequence: Synthetic oligonucleotide
auuuacaugauuugaaaauagcuau

SEQ ID NO: 132610 - RNA, 25 nt, Artificial Sequence
  Description of Artificial Sequence: Synthetic oligonucleotide
uugcuaauauuauugaugaaaucau

SEQ ID NO: 132611 - RNA, 25 nt, Artificial Sequence
  Description of Artificial Sequence: Synthetic oligonucleotide
uugaaaaauuaaaaagucuugauga

SEQ ID NO: 132612 - RNA, 25 nt, Artificial Sequence
  Description of Artificial Sequence: Synthetic oligonucleotide
agcacuaucauauccguguaaauuu

SEQ ID NO: 132613 - RNA, 25 nt, Artificial Sequence
  Description of Artificial Sequence: Synthetic oligonucleotide
uaguaaaaacaauccaugaucuaca

SEQ ID NO: 132614 - RNA, 25 nt, Artificial Sequence
  Description of Artificial Sequence: Synthetic oligonucleotide
auuuguuuauugaaaauauugauuu

SEQ ID NO: 132615 - RNA, 25 nt, Artificial Sequence
  Description of Artificial Sequence: Synthetic oligonucleotide
uuaacaaaaguggaaguaguacugc

SEQ ID NO: 132616 - RNA, 25 nt, Artificial Sequence
  Description of Artificial Sequence: Synthetic oligonucleotide
cauccuggauucaaaauguggauac

SEQ ID NO: 132617 - RNA, 25 nt, Artificial Sequence
  Description of Artificial Sequence: Synthetic oligonucleotide
cuaaguaccaaaucagaauccagau

SEQ ID NO: 132618 - RNA, 25 nt, Artificial Sequence
  Description of Artificial Sequence: Synthetic oligonucleotide
uacaagaaaaacugcagcagcuuaa

SEQ ID NO: 132619 - RNA, 25 nt, Artificial Sequence
  Description of Artificial Sequence: Synthetic oligonucleotide
agagacacauacagaauauagacau

SEQ ID NO: 132620 - RNA, 25 nt, Artificial Sequence
  Description of Artificial Sequence: Synthetic oligonucleotide
uccagcaccuagcuggaaaguuaaa

SEQ ID NO: 132621 - RNA, 25 nt, Artificial Sequence
  Description of Artificial Sequence: Synthetic oligonucleotide
aacaacacauugaggcuauugaugu

SEQ ID NO: 132622 - RNA, 25 nt, Artificial Sequence
  Description of Artificial Sequence: Synthetic oligonucleotide
uuagagugcuuuuagaucaauuggg

SEQ ID NO: 132623 - RNA, 25 nt, Artificial Sequence
  Description of Artificial Sequence: Synthetic oligonucleotide
gaacuacaauuucauuugaaagaau

SEQ ID NO: 132624 - RNA, 25 nt, Artificial Sequence
  Description of Artificial Sequence: Synthetic oligonucleotide
uaaaugacguucuugagcaugucaa

SEQ ID NO: 132625 - RNA, 25 nt, Artificial Sequence
  Description of Artificial Sequence: Synthetic oligonucleotide
aacacuuuguuauaaaucuuauugg

SEQ ID NO: 132626 - RNA, 25 nt, Artificial Sequence
  Description of Artificial Sequence: Synthetic oligonucleotide
gggauuuugaaguagcugagaaaau

SEQ ID NO: 132627 - RNA, 25 nt, Artificial Sequence
  Description of Artificial Sequence: Synthetic oligonucleotide
ucaaugccuucagagccaaagucca

SEQ ID NO: 132628 - RNA, 25 nt, Artificial Sequence
  Description of Artificial Sequence: Synthetic oligonucleotide
augaguuaaucgagagguaugaagu

SEQ ID NO: 132629 - RNA, 25 nt, Artificial Sequence
  Description of Artificial Sequence: Synthetic oligonucleotide
uagaccaacaaauccagguuuuaau

SEQ ID NO: 132630 - RNA, 25 nt, Artificial Sequence
  Description of Artificial Sequence: Synthetic oligonucleotide
uggauaaauuaguagaguuggccca

SEQ ID NO: 132631 - RNA, 25 nt, Artificial Sequence
  Description of Artificial Sequence: Synthetic oligonucleotide
accaauacaaguugaaggagacuau

SEQ ID NO: 132632 - RNA, 25 nt, Artificial Sequence
  Description of Artificial Sequence: Synthetic oligonucleotide
uucagaagcuaagcaauguccuaca

SEQ ID NO: 132633 - RNA, 25 nt, Artificial Sequence
  Description of Artificial Sequence: Synthetic oligonucleotide
aacaaguuaagauaaaagauuacuu

SEQ ID NO: 132634 - RNA, 25 nt, Artificial Sequence
  Description of Artificial Sequence: Synthetic oligonucleotide
uugagaaauugguuggauuuauuga

SEQ ID NO: 132635 - RNA, 25 nt, Artificial Sequence
  Description of Artificial Sequence: Synthetic oligonucleotide
augaugcugucaagaagcuuaauga

SEQ ID NO: 132636 - RNA, 25 nt, Artificial Sequence
  Description of Artificial Sequence: Synthetic oligonucleotide
aauuaucuuuuaaaacauucauuga

SEQ ID NO: 132637 - RNA, 25 nt, Artificial Sequence
  Description of Artificial Sequence: Synthetic oligonucleotide
aagauguuaacaaauuccuugacau

SEQ ID NO: 132638 - RNA, 25 nt, Artificial Sequence
  Description of Artificial Sequence: Synthetic oligonucleotide
uguugauaaagaaauuaaagucauu

SEQ ID NO: 132639 - RNA, 25 nt, Artificial Sequence
  Description of Artificial Sequence: Synthetic oligonucleotide
uugauuaccaccaguuuguagauga

SEQ ID NO: 132640 - RNA, 25 nt, Artificial Sequence
  Description of Artificial Sequence: Synthetic oligonucleotide
aaaccaaugacaaaauccgugaggu

SEQ ID NO: 132641 - RNA, 25 nt, Artificial Sequence
  Description of Artificial Sequence: Synthetic oligonucleotide
ugacucagagacucaauggugaaau

SEQ ID NO: 132642 - RNA, 25 nt, Artificial Sequence
  Description of Artificial Sequence: Synthetic oligonucleotide
uucaggcucuggaacuaccacaaaa

SEQ ID NO: 132643 - RNA, 25 nt, Artificial Sequence
  Description of Artificial Sequence: Synthetic oligonucleotide
aagcugaagcauuaaaacuguuuuu

SEQ ID NO: 132644 - RNA, 25 nt, Artificial Sequence
  Description of Artificial Sequence: Synthetic oligonucleotide
uagaggaaaccaaggccacaguugc

SEQ ID NO: 132645 - RNA, 25 nt, Artificial Sequence
  Description of Artificial Sequence: Synthetic oligonucleotide
caguguaucuggaaagccuacagga

SEQ ID NO: 132646 - RNA, 25 nt, Artificial Sequence
  Description of Artificial Sequence: Synthetic oligonucleotide
acaccaaaauaaccuuaaucaucaa

SEQ ID NO: 132647 - RNA, 25 nt, Artificial Sequence
  Description of Artificial Sequence: Synthetic oligonucleotide
auugguuacaggaggcuuuaaguuc

SEQ ID NO: 132648 - RNA, 25 nt, Artificial Sequence
  Description of Artificial Sequence: Synthetic oligonucleotide
cagcaucuuuggcucacaugaaggc

SEQ ID NO: 132649 - RNA, 25 nt, Artificial Sequence
  Description of Artificial Sequence: Synthetic oligonucleotide
ccaaauuccgagagacccuagaaga

SEQ ID NO: 132650 - RNA, 25 nt, Artificial Sequence
  Description of Artificial Sequence: Synthetic oligonucleotide
auacacgagaccgaauguaucaaau

SEQ ID NO: 132651 - RNA, 25 nt, Artificial Sequence
  Description of Artificial Sequence: Synthetic oligonucleotide
uggacauucagcaggaacuucaacg

SEQ ID NO: 132652 - RNA, 25 nt, Artificial Sequence
  Description of Artificial Sequence: Synthetic oligonucleotide
gauaccugucucugguaggccaggu

SEQ ID NO: 132653 - RNA, 25 nt, Artificial Sequence
  Description of Artificial Sequence: Synthetic oligonucleotide
uuuauagcacacuugucaccuacau

SEQ ID NO: 132654 - RNA, 25 nt, Artificial Sequence
  Description of Artificial Sequence: Synthetic oligonucleotide
uuucugauugguggacucuugcugc

SEQ ID NO: 132655 - RNA, 25 nt, Artificial Sequence
  Description of Artificial Sequence: Synthetic oligonucleotide
cuaagaaccuuacugacuuugcaga

SEQ ID NO: 132656 - RNA, 25 nt, Artificial Sequence
  Description of Artificial Sequence: Synthetic oligonucleotide
agcaauauucuauccaagauugggc

SEQ ID NO: 132657 - RNA, 25 nt, Artificial Sequence
  Description of Artificial Sequence: Synthetic oligonucleotide
cuaaacguaugaaagcauugguaga

SEQ ID NO: 132658 - RNA, 25 nt, Artificial Sequence
  Description of Artificial Sequence: Synthetic oligonucleotide
agcaaggguucacuguuccugaaau

SEQ ID NO: 132659 - RNA, 25 nt, Artificial Sequence
  Description of Artificial Sequence: Synthetic oligonucleotide
ucaagaccauccuugggaccaugcc

SEQ ID NO: 132660 - RNA, 25 nt, Artificial Sequence
  Description of Artificial Sequence: Synthetic oligonucleotide
cugccuuugaagucagucuucaggc

SEQ ID NO: 132661 - RNA, 25 nt, Artificial Sequence
  Description of Artificial Sequence: Synthetic oligonucleotide
cucuucagaaagcuaccuuccagac

SEQ ID NO: 132662 - RNA, 25 nt, Artificial Sequence
  Description of Artificial Sequence: Synthetic oligonucleotide
caccugauuuuauagucccccuaac

SEQ ID NO: 132663 - RNA, 25 nt, Artificial Sequence
  Description of Artificial Sequence: Synthetic oligonucleotide
cagauuugaggauuccaucaguuca

SEQ ID NO: 132664 - RNA, 25 nt, Artificial Sequence
  Description of Artificial Sequence: Synthetic oligonucleotide
agauaaacuucaaagacuuaaaaaa

SEQ ID NO: 132665 - RNA, 25 nt, Artificial Sequence
  Description of Artificial Sequence: Synthetic oligonucleotide
auauaaaaaucccauccagguuuuc

SEQ ID NO: 132666 - RNA, 25 nt, Artificial Sequence
  Description of Artificial Sequence: Synthetic oligonucleotide
ccacaccagaauuuaccauccuuaa

SEQ ID NO: 132667 - RNA, 25 nt, Artificial Sequence
  Description of Artificial Sequence: Synthetic oligonucleotide
acaccuuccacauuccuuccuuuac

SEQ ID NO: 132668 - RNA, 25 nt, Artificial Sequence
  Description of Artificial Sequence: Synthetic oligonucleotide
caauugacuuuguagaaaugaaagu

SEQ ID NO: 132669 - RNA, 25 nt, Artificial Sequence
  Description of Artificial Sequence: Synthetic oligonucleotide
uaaagaucaucagaaccauugacca

SEQ ID NO: 132670 - RNA, 25 nt, Artificial Sequence
  Description of Artificial Sequence: Synthetic oligonucleotide
agaugcugaacagugagcugcagug

SEQ ID NO: 132671 - RNA, 25 nt, Artificial Sequence
  Description of Artificial Sequence: Synthetic oligonucleotide
ggcccguuccagauauauaucucag

SEQ ID NO: 132672 - RNA, 25 nt, Artificial Sequence
  Description of Artificial Sequence: Synthetic oligonucleotide
gggaucugaagguggaggacauucc

SEQ ID NO: 132673 - RNA, 25 nt, Artificial Sequence
  Description of Artificial Sequence: Synthetic oligonucleotide
cucuagcgagaaucacccugccaga

SEQ ID NO: 132674 - RNA, 25 nt, Artificial Sequence
  Description of Artificial Sequence: Synthetic oligonucleotide
acuuccguuuaccagaaaucgcaau

SEQ ID NO: 132675 - RNA, 25 nt, Artificial Sequence
  Description of Artificial Sequence: Synthetic oligonucleotide
uuccagaauucauaaucccaacucu

SEQ ID NO: 132676 - RNA, 25 nt, Artificial Sequence
  Description of Artificial Sequence: Synthetic oligonucleotide
ucaaccuuaaugauuuucaaguucc

SEQ ID NO: 132677 - RNA, 25 nt, Artificial Sequence
  Description of Artificial Sequence: Synthetic oligonucleotide
cugaccuucacauaccagaauucca

SEQ ID NO: 132678 - RNA, 25 nt, Artificial Sequence
  Description of Artificial Sequence: Synthetic oligonucleotide
agcuuccccacaucucacacacaau

SEQ ID NO: 132679 - RNA, 25 nt, Artificial Sequence
  Description of Artificial Sequence: Synthetic oligonucleotide
uugaaguaccuacuuuuggcaagcu

SEQ ID NO: 132680 - RNA, 25 nt, Artificial Sequence
  Description of Artificial Sequence: Synthetic oligonucleotide
uauacaguauucugaaaauccaauc

SEQ ID NO: 132681 - RNA, 25 nt, Artificial Sequence
  Description of Artificial Sequence: Synthetic oligonucleotide
cuccucuuuucacauuagaugcaaa

SEQ ID NO: 132682 - RNA, 25 nt, Artificial Sequence
  Description of Artificial Sequence: Synthetic oligonucleotide
augcugacauagggaauggaaccac

SEQ ID NO: 132683 - RNA, 25 nt, Artificial Sequence
  Description of Artificial Sequence: Synthetic oligonucleotide
ccucagcaaacgaagcagguaucgc

SEQ ID NO: 132684 - RNA, 25 nt, Artificial Sequence
  Description of Artificial Sequence: Synthetic oligonucleotide
cagcuuccaucacugccaaaggaga

SEQ ID NO: 132685 - RNA, 25 nt, Artificial Sequence
  Description of Artificial Sequence: Synthetic oligonucleotide
aguccaaauuagaaguucucaauuu

SEQ ID NO: 132686 - RNA, 25 nt, Artificial Sequence
  Description of Artificial Sequence: Synthetic oligonucleotide
uugauuuucaagcaaaugcacaacu

SEQ ID NO: 132687 - RNA, 25 nt, Artificial Sequence
  Description of Artificial Sequence: Synthetic oligonucleotide
ucucaaacccuaagauuaauccgcu

SEQ ID NO: 132688 - RNA, 25 nt, Artificial Sequence
  Description of Artificial Sequence: Synthetic oligonucleotide
uggcucugaaggagucagugaaguu

SEQ ID NO: 132689 - RNA, 25 nt, Artificial Sequence
  Description of Artificial Sequence: Synthetic oligonucleotide
ucuccagcaaguaccugagaacgga

SEQ ID NO: 132690 - RNA, 25 nt, Artificial Sequence
  Description of Artificial Sequence: Synthetic oligonucleotide
agcaugggagugaaaugcuguuuuu

SEQ ID NO: 132691 - RNA, 25 nt, Artificial Sequence
  Description of Artificial Sequence: Synthetic oligonucleotide
uuggaaaugcuauugagggaaaauc

SEQ ID NO: 132692 - RNA, 25 nt, Artificial Sequence
  Description of Artificial Sequence: Synthetic oligonucleotide
caaacacaguggcaaguuuacacac

SEQ ID NO: 132693 - RNA, 25 nt, Artificial Sequence
  Description of Artificial Sequence: Synthetic oligonucleotide
cagaaaaaaauacacuggagcuuag

SEQ ID NO: 132694 - RNA, 25 nt, Artificial Sequence
  Description of Artificial Sequence: Synthetic oligonucleotide
guaauggagugauugucaagauaaa

SEQ ID NO: 132695 - RNA, 25 nt, Artificial Sequence
  Description of Artificial Sequence: Synthetic oligonucleotide
acaaucagcuuacccuggauagcaa

SEQ ID NO: 132696 - RNA, 25 nt, Artificial Sequence
  Description of Artificial Sequence: Synthetic oligonucleotide
acacuaaauacuuccacaaauugaa

SEQ ID NO: 132697 - RNA, 25 nt, Artificial Sequence
  Description of Artificial Sequence: Synthetic oligonucleotide
acauccccaaacuggacuucucuag

SEQ ID NO: 132698 - RNA, 25 nt, Artificial Sequence
  Description of Artificial Sequence: Synthetic oligonucleotide
gucaggcugaccugcgcaacgagau

SEQ ID NO: 132699 - RNA, 25 nt, Artificial Sequence
  Description of Artificial Sequence: Synthetic oligonucleotide
ucaagacacuguugaaagcuggcca

SEQ ID NO: 132700 - RNA, 25 nt, Artificial Sequence
  Description of Artificial Sequence: Synthetic oligonucleotide
acauagcauggacuucuucuggaaa

SEQ ID NO: 132701 - RNA, 25 nt, Artificial Sequence
  Description of Artificial Sequence: Synthetic oligonucleotide
aagggucauggaaaugggccugccc

SEQ ID NO: 132702 - RNA, 25 nt, Artificial Sequence
  Description of Artificial Sequence: Synthetic oligonucleotide
ccagauucucagaugagggaacaca

SEQ ID NO: 132703 - RNA, 25 nt, Artificial Sequence
  Description of Artificial Sequence: Synthetic oligonucleotide
augaaucacaaauuaguuucaccau

SEQ ID NO: 132704 - RNA, 25 nt, Artificial Sequence
  Description of Artificial Sequence: Synthetic oligonucleotide
uagaaggaccccucacuuccuuugg

SEQ ID NO: 132705 - RNA, 25 nt, Artificial Sequence
  Description of Artificial Sequence: Synthetic oligonucleotide
gacuguccaauaagaucaauagcaa

SEQ ID NO: 132706 - RNA, 25 nt, Artificial Sequence
  Description of Artificial Sequence: Synthetic oligonucleotide
aacaccuaagaguaaaccaaaacuu

SEQ ID NO: 132707 - RNA, 25 nt, Artificial Sequence
  Description of Artificial Sequence: Synthetic oligonucleotide
ugguuuaugaaucuggcucccucaa

SEQ ID NO: 132708 - RNA, 25 nt, Artificial Sequence
  Description of Artificial Sequence: Synthetic oligonucleotide
acuuuucuaaacuugaaauucaauc

SEQ ID NO: 132709 - RNA, 25 nt, Artificial Sequence
  Description of Artificial Sequence: Synthetic oligonucleotide
cacaagucgauucccagcauguggg

SEQ ID NO: 132710 - RNA, 25 nt, Artificial Sequence
  Description of Artificial Sequence: Synthetic oligonucleotide
gccacaguguucuaacugcuaaagg

SEQ ID NO: 132711 - RNA, 25 nt, Artificial Sequence
  Description of Artificial Sequence: Synthetic oligonucleotide
gcauggcacuguuuggagaagggaa

SEQ ID NO: 132712 - RNA, 25 nt, Artificial Sequence
  Description of Artificial Sequence: Synthetic oligonucleotide
aggcagaguuuacugggaggcauga

SEQ ID NO: 132713 - RNA, 25 nt, Artificial Sequence
  Description of Artificial Sequence: Synthetic oligonucleotide
augcucauuuaaauggaaagguuau

SEQ ID NO: 132714 - RNA, 25 nt, Artificial Sequence
  Description of Artificial Sequence: Synthetic oligonucleotide
uuggaacuuugaaaaauucucuuuu

SEQ ID NO: 132715 - RNA, 25 nt, Artificial Sequence
  Description of Artificial Sequence: Synthetic oligonucleotide
ucuuuucagcccagccauuugagau

SEQ ID NO: 132716 - RNA, 25 nt, Artificial Sequence
  Description of Artificial Sequence: Synthetic oligonucleotide
ucacggcauccacaaacaaugaagg

SEQ ID NO: 132717 - RNA, 25 nt, Artificial Sequence
  Description of Artificial Sequence: Synthetic oligonucleotide
ggaauuugaaaguucguuuuccauu

SEQ ID NO: 132718 - RNA, 25 nt, Artificial Sequence
  Description of Artificial Sequence: Synthetic oligonucleotide
uaagguuaacagggaagauagacuu

SEQ ID NO: 132719 - RNA, 25 nt, Artificial Sequence
  Description of Artificial Sequence: Synthetic oligonucleotide
uccugaauaacuaugcacuguuucu

SEQ ID NO: 132720 - RNA, 25 nt, Artificial Sequence
  Description of Artificial Sequence: Synthetic oligonucleotide
ugagucccagugcccagcaagcaag

SEQ ID NO: 132721 - RNA, 25 nt, Artificial Sequence
  Description of Artificial Sequence: Synthetic oligonucleotide
guuggcaaguaagugcuagguucaa

SEQ ID NO: 132722 - RNA, 25 nt, Artificial Sequence
  Description of Artificial Sequence: Synthetic oligonucleotide
aucaguauaaguacaaccaaaauuu

SEQ ID NO: 132723 - RNA, 25 nt, Artificial Sequence
  Description of Artificial Sequence: Synthetic oligonucleotide
ucucugcuggaaacaacgagaacau

SEQ ID NO: 132724 - RNA, 25 nt, Artificial Sequence
  Description of Artificial Sequence: Synthetic oligonucleotide
uuauggaggcccauguaggaauaaa

SEQ ID NO: 132725 - RNA, 25 nt, Artificial Sequence
  Description of Artificial Sequence: Synthetic oligonucleotide
auggagaagcaaaucuggauuucuu

SEQ ID NO: 132726 - RNA, 25 nt, Artificial Sequence
  Description of Artificial Sequence: Synthetic oligonucleotide
uaaacauuccuuuaacaauuccuga

SEQ ID NO: 132727 - RNA, 25 nt, Artificial Sequence
  Description of Artificial Sequence: Synthetic oligonucleotide
aaaugcgucuaccuuacacaauaau

SEQ ID NO: 132728 - RNA, 25 nt, Artificial Sequence
  Description of Artificial Sequence: Synthetic oligonucleotide
ucacaacuccuccacugaaagauuu

SEQ ID NO: 132729 - RNA, 25 nt, Artificial Sequence
  Description of Artificial Sequence: Synthetic oligonucleotide
ucucucuaugggaaaaaacaggcuu

SEQ ID NO: 132730 - RNA, 25 nt, Artificial Sequence
  Description of Artificial Sequence: Synthetic oligonucleotide
ugaaggaauucuugaaaacgacaaa

SEQ ID NO: 132731 - RNA, 25 nt, Artificial Sequence
  Description of Artificial Sequence: Synthetic oligonucleotide
agcaaucauuugauuuaaguguaaa

SEQ ID NO: 132732 - RNA, 25 nt, Artificial Sequence
  Description of Artificial Sequence: Synthetic oligonucleotide
aagcucaguauaagaaaaacaaaca

SEQ ID NO: 132733 - RNA, 25 nt, Artificial Sequence
  Description of Artificial Sequence: Synthetic oligonucleotide
acaggcauuccaucacaaauccuuu

SEQ ID NO: 132734 - RNA, 25 nt, Artificial Sequence
  Description of Artificial Sequence: Synthetic oligonucleotide
uggcugugcuuugugaguuuaucag

SEQ ID NO: 132735 - RNA, 25 nt, Artificial Sequence
  Description of Artificial Sequence: Synthetic oligonucleotide
gucagagcaucaaauccuuugacag

SEQ ID NO: 132736 - RNA, 25 nt, Artificial Sequence
  Description of Artificial Sequence: Synthetic oligonucleotide
ggcauuuugaaaaaaacagaaacaa

SEQ ID NO: 132737 - RNA, 25 nt, Artificial Sequence
  Description of Artificial Sequence: Synthetic oligonucleotide
augcauuagauuuugucaccaaauc

SEQ ID NO: 132738 - RNA, 25 nt, Artificial Sequence
  Description of Artificial Sequence: Synthetic oligonucleotide
ccuauaaugaaacaaaaauuaaguu

SEQ ID NO: 132739 - RNA, 25 nt, Artificial Sequence
  Description of Artificial Sequence: Synthetic oligonucleotide
uugauaaguacaaagcugaaaaauc

SEQ ID NO: 132740 - RNA, 25 nt, Artificial Sequence
  Description of Artificial Sequence: Synthetic oligonucleotide
cucacgacgagcuccccaggaccuu

SEQ ID NO: 132741 - RNA, 25 nt, Artificial Sequence
  Description of Artificial Sequence: Synthetic oligonucleotide
uucaaauuccuggauacacuguucc

SEQ ID NO: 132742 - RNA, 25 nt, Artificial Sequence
  Description of Artificial Sequence: Synthetic oligonucleotide
caguugucaauguugaagugucucc

SEQ ID NO: 132743 - RNA, 25 nt, Artificial Sequence
  Description of Artificial Sequence: Synthetic oligonucleotide
cauucaccauagagaugucggcauu

SEQ ID NO: 132744 - RNA, 25 nt, Artificial Sequence
  Description of Artificial Sequence: Synthetic oligonucleotide
ucggcuauguguucccaaaagcagu

SEQ ID NO: 132745 - RNA, 25 nt, Artificial Sequence
  Description of Artificial Sequence: Synthetic oligonucleotide
ucagcaugccuaguuucuccauccu

SEQ ID NO: 132746 - RNA, 25 nt, Artificial Sequence
  Description of Artificial Sequence: Synthetic oligonucleotide
uagguucugacguccgugugccuuc

SEQ ID NO: 132747 - RNA, 25 nt, Artificial Sequence
  Description of Artificial Sequence: Synthetic oligonucleotide
cauacacauuaauccugccaucauu

SEQ ID NO: 132748 - RNA, 25 nt, Artificial Sequence
  Description of Artificial Sequence: Synthetic oligonucleotide
uagagcugccaguccuucauguccc

SEQ ID NO: 132749 - RNA, 25 nt, Artificial Sequence
  Description of Artificial Sequence: Synthetic oligonucleotide
cuagaaaucucaagcuuucucuucc

SEQ ID NO: 132750 - RNA, 25 nt, Artificial Sequence
  Description of Artificial Sequence: Synthetic oligonucleotide
cagauuucaaggaauuguguaccau

SEQ ID NO: 132751 - RNA, 25 nt, Artificial Sequence
  Description of Artificial Sequence: Synthetic oligonucleotide
uaagccauauuuuuauuccugccau

SEQ ID NO: 132752 - RNA, 25 nt, Artificial Sequence
  Description of Artificial Sequence: Synthetic oligonucleotide
ugggcaauauuaccuaugauuucuc

SEQ ID NO: 132753 - RNA, 25 nt, Artificial Sequence
  Description of Artificial Sequence: Synthetic oligonucleotide
ccuuuaaaucaagugucaucacacu

SEQ ID NO: 132754 - RNA, 25 nt, Artificial Sequence
  Description of Artificial Sequence: Synthetic oligonucleotide
ugaauaccaaugcugaacuuuuuaa

SEQ ID NO: 132755 - RNA, 25 nt, Artificial Sequence
  Description of Artificial Sequence: Synthetic oligonucleotide
accagucagauauuguugcucaucu

SEQ ID NO: 132756 - RNA, 25 nt, Artificial Sequence
  Description of Artificial Sequence: Synthetic oligonucleotide
uccuuucuucaucuucaucugucau

SEQ ID NO: 132757 - RNA, 25 nt, Artificial Sequence
  Description of Artificial Sequence: Synthetic oligonucleotide
uugaugcacugcaguacaaauuaga

SEQ ID NO: 132758 - RNA, 25 nt, Artificial Sequence
  Description of Artificial Sequence: Synthetic oligonucleotide
agggcaccacaagauugacaagaaa

SEQ ID NO: 132759 - RNA, 25 nt, Artificial Sequence
  Description of Artificial Sequence: Synthetic oligonucleotide
aaaggggauugaaguuagccacagc

SEQ ID NO: 132760 - RNA, 25 nt, Artificial Sequence
  Description of Artificial Sequence: Synthetic oligonucleotide
cucugucucugagcaacaaauuugu

SEQ ID NO: 132761 - RNA, 25 nt, Artificial Sequence
  Description of Artificial Sequence: Synthetic oligonucleotide
uggaggguagucauaacaguacugu

SEQ ID NO: 132762 - RNA, 25 nt, Artificial Sequence
  Description of Artificial Sequence: Synthetic oligonucleotide
ugagcuuaaccacgaaaaauaugga

SEQ ID NO: 132763 - RNA, 25 nt, Artificial Sequence
  Description of Artificial Sequence: Synthetic oligonucleotide
aagugucaguggcaacaaccacaaa

SEQ ID NO: 132764 - RNA, 25 nt, Artificial Sequence
  Description of Artificial Sequence: Synthetic oligonucleotide
aagcccaaauuccaauuuugagaau

SEQ ID NO: 132765 - RNA, 25 nt, Artificial Sequence
  Description of Artificial Sequence: Synthetic oligonucleotide
ugaauuucaagcaagaacuuaaugg

SEQ ID NO: 132766 - RNA, 25 nt, Artificial Sequence
  Description of Artificial Sequence: Synthetic oligonucleotide
gaaauaccaagucaaaaccuacugu

SEQ ID NO: 132767 - RNA, 25 nt, Artificial Sequence
  Description of Artificial Sequence: Synthetic oligonucleotide
ucucuuccuccauggaauuuaagua

SEQ ID NO: 132768 - RNA, 25 nt, Artificial Sequence
  Description of Artificial Sequence: Synthetic oligonucleotide
augauuucaauucuucaaugcugua

SEQ ID NO: 132769 - RNA, 25 nt, Artificial Sequence
  Description of Artificial Sequence: Synthetic oligonucleotide
acucuaccgcuaaaggagcaguuga

SEQ ID NO: 132770 - RNA, 25 nt, Artificial Sequence
  Description of Artificial Sequence: Synthetic oligonucleotide
accacaagcuuagcuuggaaagccu

SEQ ID NO: 132771 - RNA, 25 nt, Artificial Sequence
  Description of Artificial Sequence: Synthetic oligonucleotide
ucaccucuuacuuuuccauugaguc

SEQ ID NO: 132772 - RNA, 25 nt, Artificial Sequence
  Description of Artificial Sequence: Synthetic oligonucleotide
caucuaccaaaggagaugucaaggg

SEQ ID NO: 132773 - RNA, 25 nt, Artificial Sequence
  Description of Artificial Sequence: Synthetic oligonucleotide
guucgguucuuucucgggaauauuc

SEQ ID NO: 132774 - RNA, 25 nt, Artificial Sequence
  Description of Artificial Sequence: Synthetic oligonucleotide
caggaacuauugcuagugaggccaa

SEQ ID NO: 132775 - RNA, 25 nt, Artificial Sequence
  Description of Artificial Sequence: Synthetic oligonucleotide
acacuuacuugaauuccaagagcac

SEQ ID NO: 132776 - RNA, 25 nt, Artificial Sequence
  Description of Artificial Sequence: Synthetic oligonucleotide
cacggucuucagugaagcugcaggg

SEQ ID NO: 132777 - RNA, 25 nt, Artificial Sequence
  Description of Artificial Sequence: Synthetic oligonucleotide
gcacuuccaaaauugaugauaucug

SEQ ID NO: 132778 - RNA, 25 nt, Artificial Sequence
  Description of Artificial Sequence: Synthetic oligonucleotide
ggaaccuugaaguaaaagaaaauuu

SEQ ID NO: 132779 - RNA, 25 nt, Artificial Sequence
  Description of Artificial Sequence: Synthetic oligonucleotide
uugcuggagaagccacacuccaacg

SEQ ID NO: 132780 - RNA, 25 nt, Artificial Sequence
  Description of Artificial Sequence: Synthetic oligonucleotide
gcauauauucccucugggagcacag

SEQ ID NO: 132781 - RNA, 25 nt, Artificial Sequence
  Description of Artificial Sequence: Synthetic oligonucleotide
guacgaaaaaccacuuacagcuaga

SEQ ID NO: 132782 - RNA, 25 nt, Artificial Sequence
  Description of Artificial Sequence: Synthetic oligonucleotide
agggccucuuuuucaccaacggaga

SEQ ID NO: 132783 - RNA, 25 nt, Artificial Sequence
  Description of Artificial Sequence: Synthetic oligonucleotide
aacauacaagcaaagccacccugga

SEQ ID NO: 132784 - RNA, 25 nt, Artificial Sequence
  Description of Artificial Sequence: Synthetic oligonucleotide
aacucucuccauggcaaaugucagc

SEQ ID NO: 132785 - RNA, 25 nt, Artificial Sequence
  Description of Artificial Sequence: Synthetic oligonucleotide
cucuuguucagguccaugcaaguca

SEQ ID NO: 132786 - RNA, 25 nt, Artificial Sequence
  Description of Artificial Sequence: Synthetic oligonucleotide
agcccaguuccuuccaugauuuccc

SEQ ID NO: 132787 - RNA, 25 nt, Artificial Sequence
  Description of Artificial Sequence: Synthetic oligonucleotide
cugaccuuggccaggaaguggcccu

SEQ ID NO: 132788 - RNA, 25 nt, Artificial Sequence
  Description of Artificial Sequence: Synthetic oligonucleotide
ugaaugcuaacacuaagaaccagaa

SEQ ID NO: 132789 - RNA, 25 nt, Artificial Sequence
  Description of Artificial Sequence: Synthetic oligonucleotide
agaucagauggaaaaaugaaguccg

SEQ ID NO: 132790 - RNA, 25 nt, Artificial Sequence
  Description of Artificial Sequence: Synthetic oligonucleotide
ggauucauucugggucuuuccagag

SEQ ID NO: 132791 - RNA, 25 nt, Artificial Sequence
  Description of Artificial Sequence: Synthetic oligonucleotide
gccaggucgagcuuuccaaugacca

SEQ ID NO: 132792 - RNA, 25 nt, Artificial Sequence
  Description of Artificial Sequence: Synthetic oligonucleotide
aagaaaaggcacaccuugacauugc

SEQ ID NO: 132793 - RNA, 25 nt, Artificial Sequence
  Description of Artificial Sequence: Synthetic oligonucleotide
caggauccuuagaaggacaccuaag

SEQ ID NO: 132794 - RNA, 25 nt, Artificial Sequence
  Description of Artificial Sequence: Synthetic oligonucleotide
gguuccucaaaaauaucauccuacc

SEQ ID NO: 132795 - RNA, 25 nt, Artificial Sequence
  Description of Artificial Sequence: Synthetic oligonucleotide
cagucuaugacaagagcuuauggga

SEQ ID NO: 132796 - RNA, 25 nt, Artificial Sequence
  Description of Artificial Sequence: Synthetic oligonucleotide
auuuccuaaagcuggauguaaccac

SEQ ID NO: 132797 - RNA, 25 nt, Artificial Sequence
  Description of Artificial Sequence: Synthetic oligonucleotide
ccagcauugguaggagacagcaucu

SEQ ID NO: 132798 - RNA, 25 nt, Artificial Sequence
  Description of Artificial Sequence: Synthetic oligonucleotide
uucguguuucaacugccuuugugua

SEQ ID NO: 132799 - RNA, 25 nt, Artificial Sequence
  Description of Artificial Sequence: Synthetic oligonucleotide
acaccaaaaaccccaauggcuauuc

SEQ ID NO: 132800 - RNA, 25 nt, Artificial Sequence
  Description of Artificial Sequence: Synthetic oligonucleotide
cauucuccaucccuguaaaaguuuu

SEQ ID NO: 132801 - RNA, 25 nt, Artificial Sequence
  Description of Artificial Sequence: Synthetic oligonucleotide
uggcugauaaauucauuauuccugg

SEQ ID NO: 132802 - RNA, 25 nt, Artificial Sequence
  Description of Artificial Sequence: Synthetic oligonucleotide
ggcugaaacuaaaugaucuaaauuc

SEQ ID NO: 132803 - RNA, 25 nt, Artificial Sequence
  Description of Artificial Sequence: Synthetic oligonucleotide
caguucuugucaugccuacguucca

SEQ ID NO: 132804 - RNA, 25 nt, Artificial Sequence
  Description of Artificial Sequence: Synthetic oligonucleotide
augucccauuuacagaucuucaggu

SEQ ID NO: 132805 - RNA, 25 nt, Artificial Sequence
  Description of Artificial Sequence: Synthetic oligonucleotide
uuccaucgugcaaacuugacuucag

SEQ ID NO: 132806 - RNA, 25 nt, Artificial Sequence
  Description of Artificial Sequence: Synthetic oligonucleotide
gagaaauacaaaucuauaagaagcu

SEQ ID NO: 132807 - RNA, 25 nt, Artificial Sequence
  Description of Artificial Sequence: Synthetic oligonucleotide
ugagaacuucaucauuugcccucaa

SEQ ID NO: 132808 - RNA, 25 nt, Artificial Sequence
  Description of Artificial Sequence: Synthetic oligonucleotide
accuaccaacacuccccgagguaaa

SEQ ID NO: 132809 - RNA, 25 nt, Artificial Sequence
  Description of Artificial Sequence: Synthetic oligonucleotide
aauucccugaaguugauguguuaac

SEQ ID NO: 132810 - RNA, 25 nt, Artificial Sequence
  Description of Artificial Sequence: Synthetic oligonucleotide
caaaauauucucaaccagaagacuc

SEQ ID NO: 132811 - RNA, 25 nt, Artificial Sequence
  Description of Artificial Sequence: Synthetic oligonucleotide
ccuugauucccuuuuuugagauaac

SEQ ID NO: 132812 - RNA, 25 nt, Artificial Sequence
  Description of Artificial Sequence: Synthetic oligonucleotide
ccgugccugaaucucaguuaacugu

SEQ ID NO: 132813 - RNA, 25 nt, Artificial Sequence
  Description of Artificial Sequence: Synthetic oligonucleotide
ugucccaguucacgcuuccaaaaag

SEQ ID NO: 132814 - RNA, 25 nt, Artificial Sequence
  Description of Artificial Sequence: Synthetic oligonucleotide
guguuucagauggcauugcugcuuu

SEQ ID NO: 132815 - RNA, 25 nt, Artificial Sequence
  Description of Artificial Sequence: Synthetic oligonucleotide
uggaucuaaaugcaguagccaacaa

SEQ ID NO: 132816 - RNA, 25 nt, Artificial Sequence
  Description of Artificial Sequence: Synthetic oligonucleotide
agaucgcagacuuugaguugcccac

SEQ ID NO: 132817 - RNA, 25 nt, Artificial Sequence
  Description of Artificial Sequence: Synthetic oligonucleotide
ccaucaucgugccugagcagaccau

SEQ ID NO: 132818 - RNA, 25 nt, Artificial Sequence
  Description of Artificial Sequence: Synthetic oligonucleotide
uugagauucccuccauuaaguucuc

SEQ ID NO: 132819 - RNA, 25 nt, Artificial Sequence
  Description of Artificial Sequence: Synthetic oligonucleotide
cuguaccugcuggaauugucauucc

SEQ ID NO: 132820 - RNA, 25 nt, Artificial Sequence
  Description of Artificial Sequence: Synthetic oligonucleotide
cuuccuuucaagcacugacugcacg

SEQ ID NO: 132821 - RNA, 25 nt, Artificial Sequence
  Description of Artificial Sequence: Synthetic oligonucleotide
gcuuugagguagacucucccgugua

SEQ ID NO: 132822 - RNA, 25 nt, Artificial Sequence
  Description of Artificial Sequence: Synthetic oligonucleotide
auaaugccacuuggagugccaguuu

SEQ ID NO: 132823 - RNA, 25 nt, Artificial Sequence
  Description of Artificial Sequence: Synthetic oligonucleotide
ugaaaaacaaagcagauuauguuga

SEQ ID NO: 132824 - RNA, 25 nt, Artificial Sequence
  Description of Artificial Sequence: Synthetic oligonucleotide
aaacaguccuggauuccacaugcag

SEQ ID NO: 132825 - RNA, 25 nt, Artificial Sequence
  Description of Artificial Sequence: Synthetic oligonucleotide
gcucaaccguacaguuccuagaaua

SEQ ID NO: 132826 - RNA, 25 nt, Artificial Sequence
  Description of Artificial Sequence: Synthetic oligonucleotide
augaacuaaauguuuugggaacaca

SEQ ID NO: 132827 - RNA, 25 nt, Artificial Sequence
  Description of Artificial Sequence: Synthetic oligonucleotide
acaaaaucgaagaugguacguuagc

SEQ ID NO: 132828 - RNA, 25 nt, Artificial Sequence
  Description of Artificial Sequence: Synthetic oligonucleotide
ccucuaagacuaaaggaacauuugc

SEQ ID NO: 132829 - RNA, 25 nt, Artificial Sequence
  Description of Artificial Sequence: Synthetic oligonucleotide
cacaccgugacuucagugcagaaua

SEQ ID NO: 132830 - RNA, 25 nt, Artificial Sequence
  Description of Artificial Sequence: Synthetic oligonucleotide
augaagaagauggcaaauaugaagg

SEQ ID NO: 132831 - RNA, 25 nt, Artificial Sequence
  Description of Artificial Sequence: Synthetic oligonucleotide
gacuucaggaaugggaaggaaaagc

SEQ ID NO: 132832 - RNA, 25 nt, Artificial Sequence
  Description of Artificial Sequence: Synthetic oligonucleotide
cgcaccucaauaucaaaagcccagc

SEQ ID NO: 132833 - RNA, 25 nt, Artificial Sequence
  Description of Artificial Sequence: Synthetic oligonucleotide
cguucaccgaucuccaucugcgcua

SEQ ID NO: 132834 - RNA, 25 nt, Artificial Sequence
  Description of Artificial Sequence: Synthetic oligonucleotide
accagaaagacaagaaaggcaucuc

SEQ ID NO: 132835 - RNA, 25 nt, Artificial Sequence
  Description of Artificial Sequence: Synthetic oligonucleotide
ccaccucagcagccuccccagccgu

SEQ ID NO: 132836 - RNA, 25 nt, Artificial Sequence
  Description of Artificial Sequence: Synthetic oligonucleotide
uaggcaccgugggcauggauaugga

SEQ ID NO: 132837 - RNA, 25 nt, Artificial Sequence
  Description of Artificial Sequence: Synthetic oligonucleotide
augaagaugacgacuuuucuaaaug

SEQ ID NO: 132838 - RNA, 25 nt, Artificial Sequence
  Description of Artificial Sequence: Synthetic oligonucleotide
ggaacuucuacuacagcccucaguc

SEQ ID NO: 132839 - RNA, 25 nt, Artificial Sequence
  Description of Artificial Sequence: Synthetic oligonucleotide
ccucuccagauaaaaaacucaccau

SEQ ID NO: 132840 - RNA, 25 nt, Artificial Sequence
  Description of Artificial Sequence: Synthetic oligonucleotide
uauucaaaacugaguugaggguccg

SEQ ID NO: 132841 - RNA, 25 nt, Artificial Sequence
  Description of Artificial Sequence: Synthetic oligonucleotide
gggaaucugaugaggaaacucagau

SEQ ID NO: 132842 - RNA, 25 nt, Artificial Sequence
  Description of Artificial Sequence: Synthetic oligonucleotide
ucaaaguuaauugggaagaagaggc

SEQ ID NO: 132843 - RNA, 25 nt, Artificial Sequence
  Description of Artificial Sequence: Synthetic oligonucleotide
cagcuucuggcuugcuaaccucucu

SEQ ID NO: 132844 - RNA, 25 nt, Artificial Sequence
  Description of Artificial Sequence: Synthetic oligonucleotide
ugaaagacaacgugcccaaggccac

SEQ ID NO: 132845 - RNA, 25 nt, Artificial Sequence
  Description of Artificial Sequence: Synthetic oligonucleotide
cagggguccuuuaugauuaugucaa

SEQ ID NO: 132846 - RNA, 25 nt, Artificial Sequence
  Description of Artificial Sequence: Synthetic oligonucleotide
acaaguaccacugggaacacacagg

SEQ ID NO: 132847 - RNA, 25 nt, Artificial Sequence
  Description of Artificial Sequence: Synthetic oligonucleotide
ggcucacccugagagaagugucuuc

SEQ ID NO: 132848 - RNA, 25 nt, Artificial Sequence
  Description of Artificial Sequence: Synthetic oligonucleotide
caaagcugagaagaaaucugcagaa

SEQ ID NO: 132849 - RNA, 25 nt, Artificial Sequence
  Description of Artificial Sequence: Synthetic oligonucleotide
acaaugcugaguggguuuaucaagg

SEQ ID NO: 132850 - RNA, 25 nt, Artificial Sequence
  Description of Artificial Sequence: Synthetic oligonucleotide
gggccauuaggcaaauugaugauau

SEQ ID NO: 132851 - RNA, 25 nt, Artificial Sequence
  Description of Artificial Sequence: Synthetic oligonucleotide
ucgacgugagguuccagaaagcagc

SEQ ID NO: 132852 - RNA, 25 nt, Artificial Sequence
  Description of Artificial Sequence: Synthetic oligonucleotide
ccaguggcaccacugggaccuacca

SEQ ID NO: 132853 - RNA, 25 nt, Artificial Sequence
  Description of Artificial Sequence: Synthetic oligonucleotide
aagaguggaaggacaaggcccagaa

SEQ ID NO: 132854 - RNA, 25 nt, Artificial Sequence
  Description of Artificial Sequence: Synthetic oligonucleotide
aucuguaccaggaacuguugacuca

SEQ ID NO: 132855 - RNA, 25 nt, Artificial Sequence
  Description of Artificial Sequence: Synthetic oligonucleotide
aggaaggccaagccaguuuccaggg

SEQ ID NO: 132856 - RNA, 25 nt, Artificial Sequence
  Description of Artificial Sequence: Synthetic oligonucleotide
gacucaaggauaacguguuugaugg

SEQ ID NO: 132857 - RNA, 25 nt, Artificial Sequence
  Description of Artificial Sequence: Synthetic oligonucleotide
gcuugguacgaguuacucaagaauu

SEQ ID NO: 132858 - RNA, 25 nt, Artificial Sequence
  Description of Artificial Sequence: Synthetic oligonucleotide
uccauaugaaagucaagcaucugau

SEQ ID NO: 132859 - RNA, 25 nt, Artificial Sequence
  Description of Artificial Sequence: Synthetic oligonucleotide
uugacucacucauugauuuucugaa

SEQ ID NO: 132860 - RNA, 25 nt, Artificial Sequence
  Description of Artificial Sequence: Synthetic oligonucleotide
acuuccccagauuccaguuuccggg

SEQ ID NO: 132861 - RNA, 25 nt, Artificial Sequence
  Description of Artificial Sequence: Synthetic oligonucleotide
ggaaaccugggauauacacuaggga

SEQ ID NO: 132862 - RNA, 25 nt, Artificial Sequence
  Description of Artificial Sequence: Synthetic oligonucleotide
aggaacuuugcacuauguucauaag

SEQ ID NO: 132863 - RNA, 25 nt, Artificial Sequence
  Description of Artificial Sequence: Synthetic oligonucleotide
gggagguagggacgguacuguccca

SEQ ID NO: 132864 - RNA, 25 nt, Artificial Sequence
  Description of Artificial Sequence: Synthetic oligonucleotide
agguauauucgaaaguccauaaugg

SEQ ID NO: 132865 - RNA, 25 nt, Artificial Sequence
  Description of Artificial Sequence: Synthetic oligonucleotide
guucagaaauacuguuuuccuauuu

SEQ ID NO: 132866 - RNA, 25 nt, Artificial Sequence
  Description of Artificial Sequence: Synthetic oligonucleotide
uccaagaccuagugauuacacuucc

SEQ ID NO: 132867 - RNA, 25 nt, Artificial Sequence
  Description of Artificial Sequence: Synthetic oligonucleotide
cuuucgaguuaaggaaacauaaacu

SEQ ID NO: 132868 - RNA, 25 nt, Artificial Sequence
  Description of Artificial Sequence: Synthetic oligonucleotide
uaauagauguaaucucgauguauag

SEQ ID NO: 132869 - RNA, 25 nt, Artificial Sequence
  Description of Artificial Sequence: Synthetic oligonucleotide
gggaacuguugaaagauuuaucaaa

SEQ ID NO: 132870 - RNA, 25 nt, Artificial Sequence
  Description of Artificial Sequence: Synthetic oligonucleotide
aagaagcccaagagguauuuaaagc

SEQ ID NO: 132871 - RNA, 25 nt, Artificial Sequence
  Description of Artificial Sequence: Synthetic oligonucleotide
ccauucagucucucaagaccacaga

SEQ ID NO: 132872 - RNA, 25 nt, Artificial Sequence
  Description of Artificial Sequence: Synthetic oligonucleotide
aggugcuacguaaucuucaggaccu

SEQ ID NO: 132873 - RNA, 25 nt, Artificial Sequence
  Description of Artificial Sequence: Synthetic oligonucleotide
uuuuacaauucauuuuccaacuaau

SEQ ID NO: 132874 - RNA, 25 nt, Artificial Sequence
  Description of Artificial Sequence: Synthetic oligonucleotide
uagaagauaacauuaaacagcugaa

SEQ ID NO: 132875 - RNA, 25 nt, Artificial Sequence
  Description of Artificial Sequence: Synthetic oligonucleotide
aagagaugaaauuuacuuaucuuau

SEQ ID NO: 132876 - RNA, 25 nt, Artificial Sequence
  Description of Artificial Sequence: Synthetic oligonucleotide
uuaauuauauccaagaugagaucaa

SEQ ID NO: 132877 - RNA, 25 nt, Artificial Sequence
  Description of Artificial Sequence: Synthetic oligonucleotide
acacaaucuucagugauuauauccc

SEQ ID NO: 132878 - RNA, 25 nt, Artificial Sequence
  Description of Artificial Sequence: Synthetic oligonucleotide
cauauguuuuuaaauuguugaaaga

SEQ ID NO: 132879 - RNA, 25 nt, Artificial Sequence
  Description of Artificial Sequence: Synthetic oligonucleotide
aaaaccuaugccuuaaucuucauaa

SEQ ID NO: 132880 - RNA, 25 nt, Artificial Sequence
  Description of Artificial Sequence: Synthetic oligonucleotide
aguucaaugaauuuauucaaaacga

SEQ ID NO: 132881 - RNA, 25 nt, Artificial Sequence
  Description of Artificial Sequence: Synthetic oligonucleotide
agcuucaggaagcuucucaagaguu

SEQ ID NO: 132882 - RNA, 25 nt, Artificial Sequence
  Description of Artificial Sequence: Synthetic oligonucleotide
uacagcagauccaucaauacauuau

SEQ ID NO: 132883 - RNA, 25 nt, Artificial Sequence
  Description of Artificial Sequence: Synthetic oligonucleotide
uggcccuucgugaagaauauuuuga

SEQ ID NO: 132884 - RNA, 25 nt, Artificial Sequence
  Description of Artificial Sequence: Synthetic oligonucleotide
auccaaguauaguuggcuggacagu

SEQ ID NO: 132885 - RNA, 25 nt, Artificial Sequence
  Description of Artificial Sequence: Synthetic oligonucleotide
ugaaauauuaugaacuugaagaaaa

SEQ ID NO: 132886 - RNA, 25 nt, Artificial Sequence
  Description of Artificial Sequence: Synthetic oligonucleotide
agauagucagucugaucaagaaccu

SEQ ID NO: 132887 - RNA, 25 nt, Artificial Sequence
  Description of Artificial Sequence: Synthetic oligonucleotide
uguuaguugcucuuaaggacuucca

SEQ ID NO: 132888 - RNA, 25 nt, Artificial Sequence
  Description of Artificial Sequence: Synthetic oligonucleotide
auucugaauauauugucagugccuc

SEQ ID NO: 132889 - RNA, 25 nt, Artificial Sequence
  Description of Artificial Sequence: Synthetic oligonucleotide
cuaacuuuacuucccaacucucaag

SEQ ID NO: 132890 - RNA, 25 nt, Artificial Sequence
  Description of Artificial Sequence: Synthetic oligonucleotide
gucaaguugagcaauuucugcacag

SEQ ID NO: 132891 - RNA, 25 nt, Artificial Sequence
  Description of Artificial Sequence: Synthetic oligonucleotide
gaaauauucaggaauaucuuagcau

SEQ ID NO: 132892 - RNA, 25 nt, Artificial Sequence
  Description of Artificial Sequence: Synthetic oligonucleotide
uccuuaccgauccagauggaaaagg

SEQ ID NO: 132893 - RNA, 25 nt, Artificial Sequence
  Description of Artificial Sequence: Synthetic oligonucleotide
ggaaagagaagauugcagagcuuuc

SEQ ID NO: 132894 - RNA, 25 nt, Artificial Sequence
  Description of Artificial Sequence: Synthetic oligonucleotide
cugccacugcucaggaaauaauuaa

SEQ ID NO: 132895 - RNA, 25 nt, Artificial Sequence
  Description of Artificial Sequence: Synthetic oligonucleotide
aaagccaggccauugcgacgaagaa

SEQ ID NO: 132896 - RNA, 25 nt, Artificial Sequence
  Description of Artificial Sequence: Synthetic oligonucleotide
aaauaauuucugauuaccaccagca

SEQ ID NO: 132897 - RNA, 25 nt, Artificial Sequence
  Description of Artificial Sequence: Synthetic oligonucleotide
aguuuagauauaaacugcaagauuu

SEQ ID NO: 132898 - RNA, 25 nt, Artificial Sequence
  Description of Artificial Sequence: Synthetic oligonucleotide
uuucagaccaacucucugauuacua

SEQ ID NO: 132899 - RNA, 25 nt, Artificial Sequence
  Description of Artificial Sequence: Synthetic oligonucleotide
augaaaaauuuauugcugaauccaa

SEQ ID NO: 132900 - RNA, 25 nt, Artificial Sequence
  Description of Artificial Sequence: Synthetic oligonucleotide
aaagauugauugaccuguccauuca

SEQ ID NO: 132901 - RNA, 25 nt, Artificial Sequence
  Description of Artificial Sequence: Synthetic oligonucleotide
aaaacuaccacacauuucugauaua

SEQ ID NO: 132902 - RNA, 25 nt, Artificial Sequence
  Description of Artificial Sequence: Synthetic oligonucleotide
acaucacggaguuacugaaaaagcu

SEQ ID NO: 132903 - RNA, 25 nt, Artificial Sequence
  Description of Artificial Sequence: Synthetic oligonucleotide
ugcaaucaaccacagucaugaaccc

SEQ ID NO: 132904 - RNA, 25 nt, Artificial Sequence
  Description of Artificial Sequence: Synthetic oligonucleotide
ccuacaugaagcuugcuccaggaga

SEQ ID NO: 132905 - RNA, 25 nt, Artificial Sequence
  Description of Artificial Sequence: Synthetic oligonucleotide
aacuuacuaucauccucuaauuuuu

SEQ ID NO: 132906 - RNA, 25 nt, Artificial Sequence
  Description of Artificial Sequence: Synthetic oligonucleotide
uuaaaagaaaucuucauuuauucuu

SEQ ID NO: 132907 - RNA, 25 nt, Artificial Sequence
  Description of Artificial Sequence: Synthetic oligonucleotide
ucuuuuccaauugaacuuucacaua

SEQ ID NO: 132908 - RNA, 25 nt, Artificial Sequence
  Description of Artificial Sequence: Synthetic oligonucleotide
agcacagaaaaaauucaaacugccu

SEQ ID NO: 132909 - RNA, 25 nt, Artificial Sequence
  Description of Artificial Sequence: Synthetic oligonucleotide
uauauugauaaaaccauacagugag

SEQ ID NO: 132910 - RNA, 25 nt, Artificial Sequence
  Description of Artificial Sequence: Synthetic oligonucleotide
gccagccuugcaguaggcaguagac

SEQ ID NO: 132911 - RNA, 25 nt, Artificial Sequence
  Description of Artificial Sequence: Synthetic oligonucleotide
cuauaagcagaagcacauaugaacu

SEQ ID NO: 132912 - RNA, 25 nt, Artificial Sequence
  Description of Artificial Sequence: Synthetic oligonucleotide
uggaccugcaccaaagcuggcacca

SEQ ID NO: 132913 - RNA, 25 nt, Artificial Sequence
  Description of Artificial Sequence: Synthetic oligonucleotide
agggcucggaaggucucugaacuca

SEQ ID NO: 132914 - RNA, 25 nt, Artificial Sequence
  Description of Artificial Sequence: Synthetic oligonucleotide
agaaggauggcauuuuuugcaaguu

SEQ ID NO: 132915 - RNA, 25 nt, Artificial Sequence
  Description of Artificial Sequence: Synthetic oligonucleotide
uaaagaaaaucaggaucugaguuau

SEQ ID NO: 132916 - RNA, 25 nt, Artificial Sequence
  Description of Artificial Sequence: Synthetic oligonucleotide
uuuugcuaaacuugggggaggagga

SEQ ID NO: 132917 - RNA, 25 nt, Artificial Sequence
  Description of Artificial Sequence: Synthetic oligonucleotide
aacaaauaaauggagucuuuauugu

SEQ ID NO: 132918 - RNA, 25 nt, Artificial Sequence
  Description of Artificial Sequence: Synthetic oligonucleotide
aauggagucuuuauuguguaucaua

SEQ ID NO: 132919 - DNA, 21 bp, Artificial Sequence
  Description of Artificial Sequence: Synthetic oligonucleotide
  Description of Combined DNA/RNA Molecule: Synthetic oligonucleotide
cuacacaaaucagcgauuutt

SEQ ID NO: 132920 - DNA, 21 bp, Artificial Sequence
  Description of Artificial Sequence: Synthetic oligonucleotide
  Description of Combined DNA/RNA Molecule: Synthetic oligonucleotide
aaaucgcugauuuguguagtt

SEQ ID NO: 132921 - DNA, 25 bp, Artificial Sequence
  Description of Artificial Sequence: Synthetic oligonucleotide
  Description of Combined DNA/RNA Molecule: Synthetic oligonucleotide
cuacacaaaucagcgauuuccaugt

SEQ ID NO: 132922 - RNA, 27 nt, Artificial Sequence
  Description of Artificial Sequence: Synthetic oligonucleotide
acauggaaaucgcugauuuguguaguc

SEQ ID NO: 132923 - RNA, 13 nt, Artificial Sequence
  Description of Artificial Sequence: Synthetic oligonucleotide
cuacacaaaucag

SEQ ID NO: 132924 - DNA, 11 bp, Artificial Sequence
  Description of Artificial Sequence: Synthetic oligonucleotide
  Description of Combined DNA/RNA Molecule: Synthetic oligonucleotide
gauuuccaugt

SEQ ID NO: 132925 - DNA, 21 bp, Artificial Sequence
  Description of Artificial Sequence: Synthetic oligonucleotide
  Description of Combined DNA/RNA Molecule: Synthetic oligonucleotide
ggaucuuauuucuucggagtt

SEQ ID NO: 132926 - DNA, 21 bp, Artificial Sequence
  Description of Artificial Sequence: Synthetic oligonucleotide
  Description of Combined DNA/RNA Molecule: Synthetic oligonucleotide
cuccgaagaaauaagaucctt

SEQ ID NO: 132927 - RNA, 11 nt, Artificial Sequence
  Description of Artificial Sequence: Synthetic oligonucleotide
ggaucuuauuu

SEQ ID NO: 132928 - DNA, 10 bp, Artificial Sequence
  Description of Artificial Sequence: Synthetic oligonucleotide
  Description of Combined DNA/RNA Molecule: Synthetic oligonucleotide
cuucggagtt

SEQ ID NO: 132929 - RNA, 27 nt, Artificial Sequence
  Description of Artificial Sequence: Synthetic oligonucleotide
cauugucuccgaagaaauaagauccuu

SEQ ID NO: 132930 - RNA, 8 nt, Artificial Sequence
  Description of Artificial Sequence: Synthetic oligonucleotide
  modified_base (2): LNA-G
ggaucuua

SEQ ID NO: 132931 - DNA, 17 bp, Artificial Sequence
  Description of Artificial Sequence: Synthetic oligonucleotide
  Description of Combined DNA/RNA Molecule: Synthetic oligonucleotide
uuucuucggagacaatg

SEQ ID NO: 132932 - DNA, 16 bp, Artificial Sequence
  Description of Artificial Sequence: Synthetic oligonucleotide
  Description of Combined DNA/RNA Molecule: Synthetic oligonucleotide
uucuucggagacaatg

SEQ ID NO: 132933 - DNA, 15 bp, Artificial Sequence
  Description of Artificial Sequence: Synthetic oligonucleotide
  Description of Combined DNA/RNA Molecule: Synthetic oligonucleotide
ucuucggagacaatg

SEQ ID NO: 132934 - DNA, 14 bp, Artificial Sequence
  Description of Artificial Sequence: Synthetic oligonucleotide
  Description of Combined DNA/RNA Molecule: Synthetic oligonucleotide
cuucggagacaatg

SEQ ID NO: 132935 - DNA, 13 bp, Artificial Sequence
  Description of Artificial Sequence: Synthetic oligonucleotide
  Description of Combined DNA/RNA Molecule: Synthetic oligonucleotide
uucggagacaatg

SEQ ID NO: 132936 - DNA, 12 bp, Artificial Sequence
  Description of Artificial Sequence: Synthetic oligonucleotide
  Description of Combined DNA/RNA Molecule: Synthetic oligonucleotide
ucggagacaatg

SEQ ID NO: 132937 - DNA, 11 bp, Artificial Sequence
  Description of Artificial Sequence: Synthetic oligonucleotide
  Description of Combined DNA/RNA Molecule: Synthetic oligonucleotide
cggagacaatg

SEQ ID NO: 132938 - RNA, 9 nt, Artificial Sequence
  Description of Artificial Sequence: Synthetic oligonucleotide
  modified_base (2): LNA-G
ggaucuuau

SEQ ID NO: 132939 - RNA, 10 nt, Artificial Sequence
  Description of Artificial Sequence: Synthetic oligonucleotide
  modified_base (2): LNA-G
ggaucuuauu

SEQ ID NO: 132940 - RNA, 11 nt, Artificial Sequence
  Description of Artificial Sequence: Synthetic oligonucleotide
  modified_base (2): LNA-G
ggaucuuauuu

SEQ ID NO: 132941 - RNA, 12 nt, Artificial Sequence
  Description of Artificial Sequence: Synthetic oligonucleotide
  modified_base (2): LNA-G
ggaucuuauuuc

SEQ ID NO: 132942 - RNA, 8 nt, Artificial Sequence
  Description of Artificial Sequence: Synthetic oligonucleotide
  modified_base (3): LNA-A
cuacacaa

SEQ ID NO: 132943 - DNA, 13 bp, Artificial Sequence
  Description of Artificial Sequence: Synthetic oligonucleotide
  Description of Combined DNA/RNA Molecule: Synthetic oligonucleotide
  modified_base (8): LNA-A
aucagcgauuutt

SEQ ID NO: 132944 - DNA, 12 bp, Artificial Sequence
  Description of Artificial Sequence: Synthetic oligonucleotide
  Description of Combined DNA/RNA Molecule: Synthetic oligonucleotide
  modified_base (7): LNA-A
ucagcgauuutt

SEQ ID NO: 132945 - DNA, 11 bp, Artificial Sequence
  Description of Artificial Sequence: Synthetic oligonucleotide
  Description of Combined DNA/RNA Molecule: Synthetic oligonucleotide
  modified_base (6): LNA-A
cagcgauuutt

SEQ ID NO: 132946 - DNA, 10 bp, Artificial Sequence
  Description of Artificial Sequence: Synthetic oligonucleotide
  Description of Combined DNA/RNA Molecule: Synthetic oligonucleotide
  modified_base (5): LNA-A
agcgauuutt

SEQ ID NO: 132947 - DNA, 9 bp, Artificial Sequence
  Description of Artificial Sequence: Synthetic oligonucleotide
  Description of Combined DNA/RNA Molecule: Synthetic oligonucleotide
  modified_base (4): LNA-A
gcgauuutt

SEQ ID NO: 132948 - DNA, 8 bp, Artificial Sequence
  Description of Artificial Sequence: Synthetic oligonucleotide
  Description of Combined DNA/RNA Molecule: Synthetic oligonucleotide
  modified_base (3): LNA-A
cgauuutt

SEQ ID NO: 132949 - DNA, 7 bp, Artificial Sequence
  Description of Artificial Sequence: Synthetic oligonucleotide
  Description of Combined DNA/RNA Molecule: Synthetic oligonucleotide
  modified_base (2): LNA-A
gauuutt

SEQ ID NO: 132950 - RNA, 9 nt, Artificial Sequence
  Description of Artificial Sequence: Synthetic oligonucleotide
  modified_base (3): LNA-A
cuacacaaa

SEQ ID NO: 132951 - RNA, 10 nt, Artificial Sequence
  Description of Artificial Sequence: Synthetic oligonucleotide
  modified_base (3): LNA-A
cuacacaaau

SEQ ID NO: 132952 - RNA, 11 nt, Artificial Sequence
  Description of Artificial Sequence: Synthetic oligonucleotide
  modified_base (3): LNA-A
cuacacaaauc

SEQ ID NO: 132953 - RNA, 12 nt, Artificial Sequence
  Description of Artificial Sequence: Synthetic oligonucleotide
  modified_base (3): LNA-A
cuacacaaauca

SEQ ID NO: 132954 - RNA, 13 nt, Artificial Sequence
  Description of Artificial Sequence: Synthetic oligonucleotide
  modified_base (3): LNA-A
cuacacaaaucag

SEQ ID NO: 132955 - RNA, 14 nt, Artificial Sequence
  Description of Artificial Sequence: Synthetic oligonucleotide
  modified_base (3): LNA-A
cuacacaaaucagc

SEQ ID NO: 132956 - RNA, 13 nt, Artificial Sequence
  Description of Artificial Sequence: Synthetic oligonucleotide
  modified_base (2): LNA-G
ggaucuuauuucu

SEQ ID NO: 132957 - RNA, 14 nt, Artificial Sequence
  Description of Artificial Sequence: Synthetic oligonucleotide
  modified_base (2): LNA-G
ggaucuuauuucuu

SEQ ID NO: 132958 - RNA, 8 nt, Artificial Sequence
  Description of Artificial Sequence: Synthetic oligonucleotide
  modified_base (2): LNA-G
  modified_base (8): LNA-A
ggaucuua

SEQ ID NO: 132959 - RNA, 9 nt, Artificial Sequence
  Description of Artificial Sequence: Synthetic oligonucleotide
  modified_base (2): LNA-G
  modified_base (9): LNA-U
ggaucuuau

SEQ ID NO: 132960 - RNA, 10 nt, Artificial Sequence
  Description of Artificial Sequence: Synthetic oligonucleotide
  modified_base (2): LNA-G
  modified_base (10): LNA-U
ggaucuuauu

SEQ ID NO: 132961 - RNA, 11 nt, Artificial Sequence
  Description of Artificial Sequence: Synthetic oligonucleotide
  modified_base (2): LNA-G
  modified_base (11): LNA-U
ggaucuuauuu

SEQ ID NO: 132962 - RNA, 12 nt, Artificial Sequence
  Description of Artificial Sequence: Synthetic oligonucleotide
  modified_base (2): LNA-G
  modified_base (12): LNA-C
ggaucuuauuuc

SEQ ID NO: 132963 - RNA, 13 nt, Artificial Sequence
  Description of Artificial Sequence: Synthetic oligonucleotide
  modified_base (2): LNA-G
  modified_base (13): LNA-U
ggaucuuauuucu

SEQ ID NO: 132964 - RNA, 14 nt, Artificial Sequence
  Description of Artificial Sequence: Synthetic oligonucleotide
  modified_base (2): LNA-G
  modified_base (14): LNA-U
ggaucuuauuucuu

SEQ ID NO: 132965 - DNA, 13 bp, Artificial Sequence
  Description of Artificial Sequence: Synthetic oligonucleotide
  Description of Combined DNA/RNA Molecule: Synthetic oligonucleotide
  modified_base (8): LNA-G
uuucuucggagtt

SEQ ID NO: 132966 - DNA, 12 bp, Artificial Sequence
  Description of Artificial Sequence: Synthetic oligonucleotide
  Description of Combined DNA/RNA Molecule: Synthetic oligonucleotide
  modified_base (7): LNA-G
uucuucggagtt

SEQ ID NO: 132967 - DNA, 11 bp, Artificial Sequence
  Description of Artificial Sequence: Synthetic oligonucleotide
  Description of Combined DNA/RNA Molecule: Synthetic oligonucleotide
  modified_base (6): LNA-G
ucuucggagtt

SEQ ID NO: 132968 - DNA, 10 bp, Artificial Sequence
  Description of Artificial Sequence: Synthetic oligonucleotide
  Description of Combined DNA/RNA Molecule: Synthetic oligonucleotide
  modified_base (5): LNA-G
cuucggagtt

SEQ ID NO: 132969 - DNA, 9 bp, Artificial Sequence
  Description of Artificial Sequence: Synthetic oligonucleotide
  Description of Combined DNA/RNA Molecule: Synthetic oligonucleotide
  modified_base (4): LNA-G
uucggagtt

SEQ ID NO: 132970 - DNA, 8 bp, Artificial Sequence
  Description of Artificial Sequence: Synthetic oligonucleotide
  Description of Combined DNA/RNA Molecule: Synthetic oligonucleotide
  modified_base (3): LNA-G
ucggagtt

SEQ ID NO: 132971 - DNA, 7 bp, Artificial Sequence
  Description of Artificial Sequence: Synthetic oligonucleotide
  Description of Combined DNA/RNA Molecule: Synthetic oligonucleotide
  modified_base (2): LNA-G
cggagtt

SEQ ID NO: 132972 - DNA, 13 bp, Artificial Sequence
  Description of Artificial Sequence: Synthetic oligonucleotide
  Description of Combined DNA/RNA Molecule: Synthetic oligonucleotide
  modified_base (1): LNA-U
  modified_base (8): LNA-G
uuucuucggagtt

SEQ ID NO: 132973 - DNA, 12 bp, Artificial Sequence
  Description of Artificial Sequence: Synthetic oligonucleotide
  Description of Combined DNA/RNA Molecule: Synthetic oligonucleotide
  modified_base (1): LNA-U
  modified_base (7): LNA-G
uucuucggagtt

SEQ ID NO: 132974 - DNA, 11 bp, Artificial Sequence
  Description of Artificial Sequence: Synthetic oligonucleotide
  Description of Combined DNA/RNA Molecule: Synthetic oligonucleotide
  modified_base (1): LNA-U
  modified_base (6): LNA-G
ucuucggagtt

SEQ ID NO: 132975 - DNA, 10 bp, Artificial Sequence
  Description of Artificial Sequence: Synthetic oligonucleotide
  Description of Combined DNA/RNA Molecule: Synthetic oligonucleotide
  modified_base (1): LNA-C
  modified_base (5): LNA-G
cuucggagtt

SEQ ID NO: 132976 - DNA, 9 bp, Artificial Sequence
  Description of Artificial Sequence: Synthetic oligonucleotide
  Description of Combined DNA/RNA Molecule: Synthetic oligonucleotide
  modified_base (1): LNA-U
  modified_base (4): LNA-G
uucggagtt

SEQ ID NO: 132977 - DNA, 8 bp, Artificial Sequence
  Description of Artificial Sequence: Synthetic oligonucleotide
  Description of Combined DNA/RNA Molecule: Synthetic oligonucleotide
  modified_base (1): LNA-U
  modified_base (3): LNA-G
ucggagtt

SEQ ID NO: 132978 - DNA, 7 bp, Artificial Sequence
  Description of Artificial Sequence: Synthetic oligonucleotide
  Description of Combined DNA/RNA Molecule: Synthetic oligonucleotide
  modified_base (1): LNA-C
  modified_base (2): LNA-G
cggagtt

SEQ ID NO: 132979 - DNA, 21 bp, Artificial Sequence
  Description of Artificial Sequence: Synthetic oligonucleotide
  Description of Combined DNA/RNA Molecule: Synthetic oligonucleotide
  modified_base (2): LNA-G
  modified_base (16): LNA-G
ggaucuuauuucuucggagtt

SEQ ID NO: 132980 - DNA, 25 bp, Artificial Sequence
  Description of Artificial Sequence: Synthetic oligonucleotide
  Description of Combined DNA/RNA Molecule: Synthetic oligonucleotide
ggaucuuauuucuucggagacaatg

SEQ ID NO: 132981 - RNA, 25 nt, Artificial Sequence
  Description of Artificial Sequence: Synthetic oligonucleotide
guauuuugaugaggaguucacggcc

SEQ ID NO: 132982 - RNA, 25 nt, Artificial Sequence
  Description of Artificial Sequence: Synthetic oligonucleotide
ggcccagaugaucaccaucacacca

SEQ ID NO: 132983 - RNA, 25 nt, Artificial Sequence
  Description of Artificial Sequence: Synthetic oligonucleotide
gggaagaaaacuauccugcggguuu

SEQ ID NO: 132984 - RNA, 25 nt, Artificial Sequence
  Description of Artificial Sequence: Synthetic oligonucleotide
guuuuaauuuauuucauccaguuug

SEQ ID NO: 132985 - RNA, 25 nt, Artificial Sequence
  Description of Artificial Sequence: Synthetic oligonucleotide
acguagggaaauguuaaggacuucu

SEQ ID NO: 132986 - RNA, 25 nt, Artificial Sequence
  Description of Artificial Sequence: Synthetic oligonucleotide
ccaggguuuacccagugggacagag

SEQ ID NO: 132987 - RNA, 25 nt, Artificial Sequence
  Description of Artificial Sequence: Synthetic oligonucleotide
agcaagguuuaaauuuguuauugug

SEQ ID NO: 132988 - RNA, 25 nt, Artificial Sequence
  Description of Artificial Sequence: Synthetic oligonucleotide
uguauuauguuguucaaaugcauuu

SEQ ID NO: 132989 - RNA, 25 nt, Artificial Sequence
  Description of Artificial Sequence: Synthetic oligonucleotide
uuuuaaucuuugugacaggaaagcc

SEQ ID NO: 132990 - RNA, 25 nt, Artificial Sequence
  Description of Artificial Sequence: Synthetic oligonucleotide
uuaaucuuugugacaggaaagcccu

SEQ ID NO: 132991 - RNA, 25 nt, Artificial Sequence
  Description of Artificial Sequence: Synthetic oligonucleotide
gcugcuuaugucucccagcauggcc

SEQ ID NO: 132992 - RNA, 25 nt, Artificial Sequence
  Description of Artificial Sequence: Synthetic oligonucleotide
aaguguuucagaagcuucucccuga

SEQ ID NO: 132993 - RNA, 25 nt, Artificial Sequence
  Description of Artificial Sequence: Synthetic oligonucleotide
gaccaucaauaaggaagaagcccuu

SEQ ID NO: 132994 - RNA, 25 nt, Artificial Sequence
  Description of Artificial Sequence: Synthetic oligonucleotide
ccaucaauaaggaagaagcccuuca

SEQ ID NO: 132995 - RNA, 25 nt, Artificial Sequence
  Description of Artificial Sequence: Synthetic oligonucleotide
ucaauaaggaagaagcccuucagcg

SEQ ID NO: 132996 - RNA, 25 nt, Artificial Sequence
  Description of Artificial Sequence: Synthetic oligonucleotide
aauaaggaagaagcccuucagcggc

SEQ ID NO: 132997 - RNA, 25 nt, Artificial Sequence
  Description of Artificial Sequence: Synthetic oligonucleotide
aggaagaagcccuucagcggccagu

SEQ ID NO: 132998 - RNA, 25 nt, Artificial Sequence
  Description of Artificial Sequence: Synthetic oligonucleotide
gcauaacuaaaggugaaaagcuccg

SEQ ID NO: 132999 - RNA, 25 nt, Artificial Sequence
  Description of Artificial Sequence: Synthetic oligonucleotide
cauaacuaaaggugaaaagcuccgg

SEQ ID NO: 133000 - RNA, 25 nt, Artificial Sequence
  Description of Artificial Sequence: Synthetic oligonucleotide
cuacaucacgccagucaacagucug

SEQ ID NO: 133001 - RNA, 25 nt, Artificial Sequence
  Description of Artificial Sequence: Synthetic oligonucleotide
acuggauuuaagcagaguucaaaag

SEQ ID NO: 133002 - RNA, 25 nt, Artificial Sequence
  Description of Artificial Sequence: Synthetic oligonucleotide
cuggauuuaagcagaguucaaaagc

SEQ ID NO: 133003 - RNA, 25 nt, Artificial Sequence
  Description of Artificial Sequence: Synthetic oligonucleotide
gauuuaagcagaguucaaaagcccu

SEQ ID NO: 133004 - RNA, 25 nt, Artificial Sequence
  Description of Artificial Sequence: Synthetic oligonucleotide
auuuaagcagaguucaaaagcccuu

SEQ ID NO: 133005 - RNA, 25 nt, Artificial Sequence
  Description of Artificial Sequence: Synthetic oligonucleotide
uuaagcagaguucaaaagcccuuca

SEQ ID NO: 133006 - RNA, 25 nt, Artificial Sequence
  Description of Artificial Sequence: Synthetic oligonucleotide
uaagcagaguucaaaagcccuucag

SEQ ID NO: 133007 - RNA, 25 nt, Artificial Sequence
  Description of Artificial Sequence: Synthetic oligonucleotide
agcagaguucaaaagcccuucagcg

SEQ ID NO: 133008 - RNA, 25 nt, Artificial Sequence
  Description of Artificial Sequence: Synthetic oligonucleotide
cucagggucugagugaagccgcucg

SEQ ID NO: 133009 - RNA, 25 nt, Artificial Sequence
  Description of Artificial Sequence: Synthetic oligonucleotide
caagcaacuacaucacgccagucaa

SEQ ID NO: 133010 - RNA, 25 nt, Artificial Sequence
  Description of Artificial Sequence: Synthetic oligonucleotide
aucaauggcagcuucuuggugcgug

SEQ ID NO: 133011 - RNA, 25 nt, Artificial Sequence
  Description of Artificial Sequence: Synthetic oligonucleotide
uuccagcccacauuggauucaucag

SEQ ID NO: 133012 - RNA, 25 nt, Artificial Sequence
  Description of Artificial Sequence: Synthetic oligonucleotide
cagcugagaauguggaauaccuaag

SEQ ID NO: 133013 - RNA, 25 nt, Artificial Sequence
  Description of Artificial Sequence: Synthetic oligonucleotide
aacguaucuccuaauuugaggcuca

SEQ ID NO: 133014 - RNA, 25 nt, Artificial Sequence
  Description of Artificial Sequence: Synthetic oligonucleotide
ccuaaaauaauuucucuacaauugg

SEQ ID NO: 133015 - RNA, 25 nt, Artificial Sequence
  Description of Artificial Sequence: Synthetic oligonucleotide
uggaagauucagcuaguuaggagcc

SEQ ID NO: 133016 - RNA, 25 nt, Artificial Sequence
  Description of Artificial Sequence: Synthetic oligonucleotide
uuaaacucuccuagucaauauccac

SEQ ID NO: 133017 - RNA, 25 nt, Artificial Sequence
  Description of Artificial Sequence: Synthetic oligonucleotide
cagccuacaguuauguucagucaca

SEQ ID NO: 133018 - RNA, 25 nt, Artificial Sequence
  Description of Artificial Sequence: Synthetic oligonucleotide
guuauguucagucacacacacauac

SEQ ID NO: 133019 - RNA, 25 nt, Artificial Sequence
  Description of Artificial Sequence: Synthetic oligonucleotide
cacauacaaaauguuccuuuugcuu

SEQ ID NO: 133020 - RNA, 25 nt, Artificial Sequence
  Description of Artificial Sequence: Synthetic oligonucleotide
uccuuuugcuuuuaaaguaauuuuu

SEQ ID NO: 133021 - RNA, 25 nt, Artificial Sequence
  Description of Artificial Sequence: Synthetic oligonucleotide
ugaccugugaagcaacagucaaugg

SEQ ID NO: 133022 - RNA, 25 nt, Artificial Sequence
  Description of Artificial Sequence: Synthetic oligonucleotide
cuaucucacacaucgacaaaccaau

SEQ ID NO: 133023 - RNA, 25 nt, Artificial Sequence
  Description of Artificial Sequence: Synthetic oligonucleotide
uguccucaauuguacugcuaccacu

SEQ ID NO: 133024 - RNA, 25 nt, Artificial Sequence
  Description of Artificial Sequence: Synthetic oligonucleotide
aaaccguagcuggcaagcggucuua

SEQ ID NO: 133025 - RNA, 25 nt, Artificial Sequence
  Description of Artificial Sequence: Synthetic oligonucleotide
uagcuggcaagcggucuuaccggcu

SEQ ID NO: 133026 - RNA, 25 nt, Artificial Sequence
  Description of Artificial Sequence: Synthetic oligonucleotide
uuguaugguuaaaagauggguuacc

SEQ ID NO: 133027 - RNA, 25 nt, Artificial Sequence
  Description of Artificial Sequence: Synthetic oligonucleotide
ugguuaaaagauggguuaccugcga

SEQ ID NO: 133028 - RNA, 25 nt, Artificial Sequence
  Description of Artificial Sequence: Synthetic oligonucleotide
cagggaauuauacaaucuugcugag

SEQ ID NO: 133029 - RNA, 25 nt, Artificial Sequence
  Description of Artificial Sequence: Synthetic oligonucleotide
acaaucuugcugagcauaaaacagu

SEQ ID NO: 133030 - RNA, 25 nt, Artificial Sequence
  Description of Artificial Sequence: Synthetic oligonucleotide
ccaauaaugaagaguccuuuauccu

SEQ ID NO: 133031 - RNA, 25 nt, Artificial Sequence
  Description of Artificial Sequence: Synthetic oligonucleotide
acuuuggauguuccaacgcaaguug

SEQ ID NO: 133032 - RNA, 25 nt, Artificial Sequence
  Description of Artificial Sequence: Synthetic oligonucleotide
aaugcuuccacuaaacugaaaccau

SEQ ID NO: 133033 - RNA, 25 nt, Artificial Sequence
  Description of Artificial Sequence: Synthetic oligonucleotide
gagaaaguuugacuuuguuaaauau

SEQ ID NO: 133034 - RNA, 25 nt, Artificial Sequence
  Description of Artificial Sequence: Synthetic oligonucleotide
aaagaacuacuguauauuaaaaguu

SEQ ID NO: 133035 - RNA, 25 nt, Artificial Sequence
  Description of Artificial Sequence: Synthetic oligonucleotide
uuagaaauacggguuuugacuuaac

SEQ ID NO: 133036 - RNA, 25 nt, Artificial Sequence
  Description of Artificial Sequence: Synthetic oligonucleotide
aacauggguacagcaaacucagcac

SEQ ID NO: 133037 - RNA, 25 nt, Artificial Sequence
  Description of Artificial Sequence: Synthetic oligonucleotide
aaagacacagaagaugcugaccuca

SEQ ID NO: 133038 - RNA, 25 nt, Artificial Sequence
  Description of Artificial Sequence: Synthetic oligonucleotide
uaguagggagguuuauucagaucgc

SEQ ID NO: 133039 - RNA, 25 nt, Artificial Sequence
  Description of Artificial Sequence: Synthetic oligonucleotide
gccuucugcagcaggguucugggau

SEQ ID NO: 133040 - RNA, 25 nt, Artificial Sequence
  Description of Artificial Sequence: Synthetic oligonucleotide
ggucugguacauauuggaaauuaug

SEQ ID NO: 133041 - RNA, 25 nt, Artificial Sequence
  Description of Artificial Sequence: Synthetic oligonucleotide
cuaguccuuccgauggaagcacuag

SEQ ID NO: 133042 - RNA, 25 nt, Artificial Sequence
  Description of Artificial Sequence: Synthetic oligonucleotide
ccagugaauauuguuuuuaugugga

SEQ ID NO: 133043 - RNA, 25 nt, Artificial Sequence
  Description of Artificial Sequence: Synthetic oligonucleotide
augaauucaaguuggaauugguaga

SEQ ID NO: 133044 - RNA, 25 nt, Artificial Sequence
  Description of Artificial Sequence: Synthetic oligonucleotide
caggacacagauuuagacuuggaga

SEQ ID NO: 133045 - RNA, 25 nt, Artificial Sequence
  Description of Artificial Sequence: Synthetic oligonucleotide
cucaaagcacaguuacaguauucca

SEQ ID NO: 133046 - RNA, 25 nt, Artificial Sequence
  Description of Artificial Sequence: Synthetic oligonucleotide
accacugccaccacugaugaauuaa

SEQ ID NO: 133047 - RNA, 25 nt, Artificial Sequence
  Description of Artificial Sequence: Synthetic oligonucleotide
gaaacuacuagugccacaucaucac

SEQ ID NO: 133048 - RNA, 25 nt, Artificial Sequence
  Description of Artificial Sequence: Synthetic oligonucleotide
aagucggacagccucaccaaacaga

SEQ ID NO: 133049 - RNA, 25 nt, Artificial Sequence
  Description of Artificial Sequence: Synthetic oligonucleotide
gaaagcgaaaaauggaacaugaugg

SEQ ID NO: 133050 - RNA, 25 nt, Artificial Sequence
  Description of Artificial Sequence: Synthetic oligonucleotide
cccucugauuuagcauguagacugc

SEQ ID NO: 133051 - RNA, 25 nt, Artificial Sequence
  Description of Artificial Sequence: Synthetic oligonucleotide
ugagcuauuuaaggaucuauuuaug

SEQ ID NO: 133052 - RNA, 25 nt, Artificial Sequence
  Description of Artificial Sequence: Synthetic oligonucleotide
aaaaggugaaaaagcacuauuauca

SEQ ID NO: 133053 - RNA, 25 nt, Artificial Sequence
  Description of Artificial Sequence: Synthetic oligonucleotide
gaaaaagcacuauuaucaguucugc

SEQ ID NO: 133054 - RNA, 25 nt, Artificial Sequence
  Description of Artificial Sequence: Synthetic oligonucleotide
ggcugaaaagaaagauuaaaccuac

SEQ ID NO: 133055 - RNA, 25 nt, Artificial Sequence
  Description of Artificial Sequence: Synthetic oligonucleotide
uaaacccuuauaauaaaauccuucu

SEQ ID NO: 133056 - RNA, 25 nt, Artificial Sequence
  Description of Artificial Sequence: Synthetic oligonucleotide
cauacuauuagccaaugcuguagac

SEQ ID NO: 133057 - RNA, 25 nt, Artificial Sequence
  Description of Artificial Sequence: Synthetic oligonucleotide
gacagaagcauuuugauaggaauag

SEQ ID NO: 133058 - RNA, 25 nt, Artificial Sequence
  Description of Artificial Sequence: Synthetic oligonucleotide
agagcaaauaagauaauggcccuga

SEQ ID NO: 133059 - RNA, 25 nt, Artificial Sequence
  Description of Artificial Sequence: Synthetic oligonucleotide
ccaacauuuuucucuuccucaagca

SEQ ID NO: 133060 - RNA, 25 nt, Artificial Sequence
  Description of Artificial Sequence: Synthetic oligonucleotide
uuaaguaugagaaaaguucagccca

SEQ ID NO: 133061 - RNA, 25 nt, Artificial Sequence
  Description of Artificial Sequence: Synthetic oligonucleotide
caggaauaaagauggcugcugaacc

SEQ ID NO: 133062 - RNA, 25 nt, Artificial Sequence
  Description of Artificial Sequence: Synthetic oligonucleotide
aauuugaaugaccaaguucucuuca

SEQ ID NO: 133063 - RNA, 25 nt, Artificial Sequence
  Description of Artificial Sequence: Synthetic oligonucleotide
auguauaaagauagccagccuagag

SEQ ID NO: 133064 - RNA, 25 nt, Artificial Sequence
  Description of Artificial Sequence: Synthetic oligonucleotide
ggcuguaacuaucucugugaagugu

SEQ ID NO: 133065 - RNA, 25 nt, Artificial Sequence
  Description of Artificial Sequence: Synthetic oligonucleotide
ucugugaagugugagaaaauuucaa

SEQ ID NO: 133066 - RNA, 25 nt, Artificial Sequence
  Description of Artificial Sequence: Synthetic oligonucleotide
ccuuuaaggaaaugaauccuccuga

SEQ ID NO: 133067 - RNA, 25 nt, Artificial Sequence
  Description of Artificial Sequence: Synthetic oligonucleotide
aaggauacaaaaagugacaucauau

SEQ ID NO: 133068 - RNA, 25 nt, Artificial Sequence
  Description of Artificial Sequence: Synthetic oligonucleotide
agaugcaauuugaaucuucaucaua

SEQ ID NO: 133069 - RNA, 25 nt, Artificial Sequence
  Description of Artificial Sequence: Synthetic oligonucleotide
guucaaaacgaagacuagcuauuaa

SEQ ID NO: 133070 - RNA, 25 nt, Artificial Sequence
  Description of Artificial Sequence: Synthetic oligonucleotide
gugaaaccucaucucuacuaaaaau

SEQ ID NO: 133071 - RNA, 25 nt, Artificial Sequence
  Description of Artificial Sequence: Synthetic oligonucleotide
acgaaagagaagcucuaucucgccu

SEQ ID NO: 133072 - RNA, 25 nt, Artificial Sequence
  Description of Artificial Sequence: Synthetic oligonucleotide
cuccacaagcgccuucgguccaguu

SEQ ID NO: 133073 - RNA, 25 nt, Artificial Sequence
  Description of Artificial Sequence: Synthetic oligonucleotide
gagaagauuccaaagauguagccgc

SEQ ID NO: 133074 - RNA, 25 nt, Artificial Sequence
  Description of Artificial Sequence: Synthetic oligonucleotide
aaucuggauucaaugaggagacuug

SEQ ID NO: 133075 - RNA, 25 nt, Artificial Sequence
  Description of Artificial Sequence: Synthetic oligonucleotide
agaacagauuugagaguagugagga

SEQ ID NO: 133076 - RNA, 25 nt, Artificial Sequence
  Description of Artificial Sequence: Synthetic oligonucleotide
ccagagcugugcagaugaguacaaa

SEQ ID NO: 133077 - RNA, 25 nt, Artificial Sequence
  Description of Artificial Sequence: Synthetic oligonucleotide
ccucagauuguuguuguuaaugggc

SEQ ID NO: 133078 - RNA, 25 nt, Artificial Sequence
  Description of Artificial Sequence: Synthetic oligonucleotide
cuauuuuaauuauuuuuaauuuauu

SEQ ID NO: 133079 - RNA, 25 nt, Artificial Sequence
  Description of Artificial Sequence: Synthetic oligonucleotide
uuuaauuuauuaauauuuaaauaug

SEQ ID NO: 133080 - RNA, 25 nt, Artificial Sequence
  Description of Artificial Sequence: Synthetic oligonucleotide
augcaguuugaauauccuuuguuuc

SEQ ID NO: 133081 - RNA, 25 nt, Artificial Sequence
  Description of Artificial Sequence: Synthetic oligonucleotide
caugcugcuggcgucuaaguguuug

SEQ ID NO: 133082 - RNA, 25 nt, Artificial Sequence
  Description of Artificial Sequence: Synthetic oligonucleotide
agaugugcauuucaccugugacaaa

SEQ ID NO: 133083 - RNA, 25 nt, Artificial Sequence
  Description of Artificial Sequence: Synthetic oligonucleotide
ucaaaaccugugccaggcugaauua

SEQ ID NO: 133084 - RNA, 25 nt, Artificial Sequence
  Description of Artificial Sequence: Synthetic oligonucleotide
gaauguggguagucauucuuacaau

SEQ ID NO: 133085 - RNA, 25 nt, Artificial Sequence
  Description of Artificial Sequence: Synthetic oligonucleotide
auguggguagucauucuuacaauug

SEQ ID NO: 133086 - RNA, 25 nt, Artificial Sequence
  Description of Artificial Sequence: Synthetic oligonucleotide
ugaaaaugagcaucagagaguguac

SEQ ID NO: 133087 - RNA, 25 nt, Artificial Sequence
  Description of Artificial Sequence: Synthetic oligonucleotide
uugcuuuucauguagaacucagcag

SEQ ID NO: 133088 - RNA, 25 nt, Artificial Sequence
  Description of Artificial Sequence: Synthetic oligonucleotide
uguauuucuauauuuauuuucagua

SEQ ID NO: 133089 - RNA, 25 nt, Artificial Sequence
  Description of Artificial Sequence: Synthetic oligonucleotide
uuugauuaauguuucuuaaauggaa

SEQ ID NO: 133090 - RNA, 25 nt, Artificial Sequence
  Description of Artificial Sequence: Synthetic oligonucleotide
caacguguauagugccuaaaauugu

SEQ ID NO: 133091 - RNA, 25 nt, Artificial Sequence
  Description of Artificial Sequence: Synthetic oligonucleotide
cauauccuuggcuacuaacaucugg

SEQ ID NO: 133092 - RNA, 25 nt, Artificial Sequence
  Description of Artificial Sequence: Synthetic oligonucleotide
uacuaacaucuggagacugugagcu

SEQ ID NO: 133093 - RNA, 25 nt, Artificial Sequence
  Description of Artificial Sequence: Synthetic oligonucleotide
cauaaguugugugcuuuuuauuaau

SEQ ID NO: 133094 - RNA, 25 nt, Artificial Sequence
  Description of Artificial Sequence: Synthetic oligonucleotide
gcaucauuuuggcucuucuuacauu

SEQ ID NO: 133095 - RNA, 25 nt, Artificial Sequence
  Description of Artificial Sequence: Synthetic oligonucleotide
gcucuucuuacauuuguaaaaaugu

SEQ ID NO: 133096 - RNA, 25 nt, Artificial Sequence
  Description of Artificial Sequence: Synthetic oligonucleotide
agauuaggucaucuuaauucauauu

SEQ ID NO: 133097 - RNA, 25 nt, Artificial Sequence
  Description of Artificial Sequence: Synthetic oligonucleotide
auggaauugaaagaacuaaucauga

SEQ ID NO: 133098 - RNA, 25 nt, Artificial Sequence
  Description of Artificial Sequence: Synthetic oligonucleotide
cacacucauuccuucugcucuuggg

SEQ ID NO: 133099 - RNA, 25 nt, Artificial Sequence
  Description of Artificial Sequence: Synthetic oligonucleotide
uguagagguaaccaguagcuuugag

SEQ ID NO: 133100 - RNA, 25 nt, Artificial Sequence
  Description of Artificial Sequence: Synthetic oligonucleotide
caaccacaugccacguaauauuuca

SEQ ID NO: 133101 - RNA, 25 nt, Artificial Sequence
  Description of Artificial Sequence: Synthetic oligonucleotide
ucggaaacaaguuauucucuucacu

SEQ ID NO: 133102 - RNA, 25 nt, Artificial Sequence
  Description of Artificial Sequence: Synthetic oligonucleotide
acucccaauaacuaaugcuaagaaa

SEQ ID NO: 133103 - RNA, 25 nt, Artificial Sequence
  Description of Artificial Sequence: Synthetic oligonucleotide
aaugcuaagaaaugcugaaaaucaa

SEQ ID NO: 133104 - RNA, 25 nt, Artificial Sequence
  Description of Artificial Sequence: Synthetic oligonucleotide
gucuuucucuaaauaugauuacuuu

SEQ ID NO: 133105 - RNA, 25 nt, Artificial Sequence
  Description of Artificial Sequence: Synthetic oligonucleotide
ugaauuucaggcauuuuguucuaca

SEQ ID NO: 133106 - RNA, 25 nt, Artificial Sequence
  Description of Artificial Sequence: Synthetic oligonucleotide
cgauucccucucacccgggacucuc

SEQ ID NO: 133107 - RNA, 25 nt, Artificial Sequence
  Description of Artificial Sequence: Synthetic oligonucleotide
aggaaagugaaccuuuaaaguaaag

SEQ ID NO: 133108 - RNA, 25 nt, Artificial Sequence
  Description of Artificial Sequence: Synthetic oligonucleotide
gaggcugcaugcucuggaagccugg

SEQ ID NO: 133109 - RNA, 25 nt, Artificial Sequence
  Description of Artificial Sequence: Synthetic oligonucleotide
ucucugaacagaaaacaaaagagag

SEQ ID NO: 133110 - RNA, 25 nt, Artificial Sequence
  Description of Artificial Sequence: Synthetic oligonucleotide
aacuuggcuguaaucaguuaugccg

SEQ ID NO: 133111 - RNA, 25 nt, Artificial Sequence
  Description of Artificial Sequence: Synthetic oligonucleotide
agaagccaaaauuaaaagaagucca

SEQ ID NO: 133112 - RNA, 25 nt, Artificial Sequence
  Description of Artificial Sequence: Synthetic oligonucleotide
auuaaaagaaguccaggugagguua

SEQ ID NO: 133113 - RNA, 25 nt, Artificial Sequence
  Description of Artificial Sequence: Synthetic oligonucleotide
gaauccggauuaucgggaagaggac

SEQ ID NO: 133114 - RNA, 25 nt, Artificial Sequence
  Description of Artificial Sequence: Synthetic oligonucleotide
aaugugacaucaaagcaaguauugu

SEQ ID NO: 133115 - RNA, 25 nt, Artificial Sequence
  Description of Artificial Sequence: Synthetic oligonucleotide
caucaaagcaaguauuguagcacuc

SEQ ID NO: 133116 - RNA, 25 nt, Artificial Sequence
  Description of Artificial Sequence: Synthetic oligonucleotide
agagagagaaaacaaaaccacaaau

SEQ ID NO: 133117 - RNA, 25 nt, Artificial Sequence
  Description of Artificial Sequence: Synthetic oligonucleotide
ucgcuguaguauuuaagcccauaca

SEQ ID NO: 133118 - RNA, 25 nt, Artificial Sequence
  Description of Artificial Sequence: Synthetic oligonucleotide
cgcuguaguauuuaagcccauacag

SEQ ID NO: 133119 - RNA, 25 nt, Artificial Sequence
  Description of Artificial Sequence: Synthetic oligonucleotide
auuuaagcccauacagaaaccuucc

SEQ ID NO: 133120 - RNA, 25 nt, Artificial Sequence
  Description of Artificial Sequence: Synthetic oligonucleotide
auuaaaauaaacaugguauaccuac

SEQ ID NO: 133121 - RNA, 25 nt, Artificial Sequence
  Description of Artificial Sequence: Synthetic oligonucleotide
cuguucugaucggccaguuuucgga

SEQ ID NO: 133122 - RNA, 25 nt, Artificial Sequence
  Description of Artificial Sequence: Synthetic oligonucleotide
aaauaauuugaacuuuggaacaggg

SEQ ID NO: 133123 - RNA, 25 nt, Artificial Sequence
  Description of Artificial Sequence: Synthetic oligonucleotide
ugcgaccuuaauuuaacuuuccagu

SEQ ID NO: 133124 - RNA, 25 nt, Artificial Sequence
  Description of Artificial Sequence: Synthetic oligonucleotide
cugagaaagcuaaaguuugguuuug

SEQ ID NO: 133125 - RNA, 25 nt, Artificial Sequence
  Description of Artificial Sequence: Synthetic oligonucleotide
aguaaagaugcuacuucccacugua

SEQ ID NO: 133126 - RNA, 25 nt, Artificial Sequence
  Description of Artificial Sequence: Synthetic oligonucleotide
cugcuuaauugcugauaccauauga

SEQ ID NO: 133127 - RNA, 25 nt, Artificial Sequence
  Description of Artificial Sequence: Synthetic oligonucleotide
uaccauaugaaugaaacaugggcug

SEQ ID NO: 133128 - RNA, 25 nt, Artificial Sequence
  Description of Artificial Sequence: Synthetic oligonucleotide
aacuuucuuauccaacuuuuucaua

SEQ ID NO: 133129 - RNA, 25 nt, Artificial Sequence
  Description of Artificial Sequence: Synthetic oligonucleotide
ccuugcaugacaucaugaggccgga

SEQ ID NO: 133130 - RNA, 25 nt, Artificial Sequence
  Description of Artificial Sequence: Synthetic oligonucleotide
ugaauuuguauaugacugcauuugu

SEQ ID NO: 133131 - RNA, 25 nt, Artificial Sequence
  Description of Artificial Sequence: Synthetic oligonucleotide
gaauccuaguagaauguuuacuacc

SEQ ID NO: 133132 - RNA, 25 nt, Artificial Sequence
  Description of Artificial Sequence: Synthetic oligonucleotide
gaaagggaagaauuuuuugaugaaa

SEQ ID NO: 133133 - RNA, 25 nt, Artificial Sequence
  Description of Artificial Sequence: Synthetic oligonucleotide
uaucggcaugccagugugugaauuu

SEQ ID NO: 133134 - RNA, 25 nt, Artificial Sequence
  Description of Artificial Sequence: Synthetic oligonucleotide
caccucauaguagagcaauguaugu

SEQ ID NO: 133135 - RNA, 25 nt, Artificial Sequence
  Description of Artificial Sequence: Synthetic oligonucleotide
ccagaauugccaaagcacauauaua

SEQ ID NO: 133136 - RNA, 25 nt, Artificial Sequence
  Description of Artificial Sequence: Synthetic oligonucleotide
uggugaucuggguaauaguuucucc

SEQ ID NO: 133137 - RNA, 25 nt, Artificial Sequence
  Description of Artificial Sequence: Synthetic oligonucleotide
gaucuggguaauaguuucuccaaau

SEQ ID NO: 133138 - RNA, 25 nt, Artificial Sequence
  Description of Artificial Sequence: Synthetic oligonucleotide
ggaugugaugaauacuuccuagaaa

SEQ ID NO: 133139 - RNA, 25 nt, Artificial Sequence
  Description of Artificial Sequence: Synthetic oligonucleotide
cauuuccacagcuacaccauauaug

SEQ ID NO: 133140 - RNA, 25 nt, Artificial Sequence
  Description of Artificial Sequence: Synthetic oligonucleotide
acagcuacaccauauaugaauggag

SEQ ID NO: 133141 - RNA, 25 nt, Artificial Sequence
  Description of Artificial Sequence: Synthetic oligonucleotide
ugcaguucuuacacgagaagaagau

SEQ ID NO: 133142 - RNA, 25 nt, Artificial Sequence
  Description of Artificial Sequence: Synthetic oligonucleotide
acgagaagaagaucauuuacaggga

SEQ ID NO: 133143 - RNA, 25 nt, Artificial Sequence
  Description of Artificial Sequence: Synthetic oligonucleotide
cgagaagaagaucauuuacagggac

SEQ ID NO: 133144 - RNA, 25 nt, Artificial Sequence
  Description of Artificial Sequence: Synthetic oligonucleotide
aagaagaucauuuacagggaccuga

SEQ ID NO: 133145 - RNA, 25 nt, Artificial Sequence
  Description of Artificial Sequence: Synthetic oligonucleotide
agaggaagagguguuugacugcauc

SEQ ID NO: 133146 - RNA, 25 nt, Artificial Sequence
  Description of Artificial Sequence: Synthetic oligonucleotide
gaggaagagguguuugacugcaucg

SEQ ID NO: 133147 - RNA, 25 nt, Artificial Sequence
  Description of Artificial Sequence: Synthetic oligonucleotide
cuacuuugagggcgaguucacaggg

SEQ ID NO: 133148 - RNA, 25 nt, Artificial Sequence
  Description of Artificial Sequence: Synthetic oligonucleotide
agggcaucuccuggcaccucugucc

SEQ ID NO: 133149 - RNA, 25 nt, Artificial Sequence
  Description of Artificial Sequence: Synthetic oligonucleotide
ggagugauaugguuugucuuuuuaa

SEQ ID NO: 133150 - RNA, 25 nt, Artificial Sequence
  Description of Artificial Sequence: Synthetic oligonucleotide
gagugauaugguuugucuuuuuaag

SEQ ID NO: 133151 - RNA, 25 nt, Artificial Sequence
  Description of Artificial Sequence: Synthetic oligonucleotide
ugcaguaaagauccuaaagguuguc

SEQ ID NO: 133152 - RNA, 25 nt, Artificial Sequence
  Description of Artificial Sequence: Synthetic oligonucleotide
aguaaagauccuaaagguugucgac

SEQ ID NO: 133153 - RNA, 25 nt, Artificial Sequence
  Description of Artificial Sequence: Synthetic oligonucleotide
ugacaaaggacaaccuggcaauugu

SEQ ID NO: 133154 - RNA, 25 nt, Artificial Sequence
  Description of Artificial Sequence: Synthetic oligonucleotide
gcaauugugacccaguggugcgagg

SEQ ID NO: 133155 - RNA, 25 nt, Artificial Sequence
  Description of Artificial Sequence: Synthetic oligonucleotide
aacaucauccauagagacaugaaau

SEQ ID NO: 133156 - RNA, 25 nt, Artificial Sequence
  Description of Artificial Sequence: Synthetic oligonucleotide
ugaaauccaacaauauauuucucca

SEQ ID NO: 133157 - RNA, 25 nt, Artificial Sequence
  Description of Artificial Sequence: Synthetic oligonucleotide
aacaauauauuucuccaugaaggcu

SEQ ID NO: 133158 - RNA, 25 nt, Artificial Sequence
  Description of Artificial Sequence: Synthetic oligonucleotide
aacaguaaagucacgcuggaguggu

SEQ ID NO: 133159 - RNA, 25 nt, Artificial Sequence
  Description of Artificial Sequence: Synthetic oligonucleotide
ugugaagaaaguaaaggaagagagg

SEQ ID NO: 133160 - RNA, 25 nt, Artificial Sequence
  Description of Artificial Sequence: Synthetic oligonucleotide
cuuccgagccauccuugcaucgggc

SEQ ID NO: 133161 - RNA, 25 nt, Artificial Sequence
  Description of Artificial Sequence: Synthetic oligonucleotide
aauggagguugaauauccuacugug

SEQ ID NO: 133162 - RNA, 25 nt, Artificial Sequence
  Description of Artificial Sequence: Synthetic oligonucleotide
ggagguugaauauccuacuguguaa

SEQ ID NO: 133163 - RNA, 25 nt, Artificial Sequence
  Description of Artificial Sequence: Synthetic oligonucleotide
auuuugaguuuucccuuguagugua

SEQ ID NO: 133164 - RNA, 25 nt, Artificial Sequence
  Description of Artificial Sequence: Synthetic oligonucleotide
uauccuguuuguucuuuguugauug

SEQ ID NO: 133165 - RNA, 25 nt, Artificial Sequence
  Description of Artificial Sequence: Synthetic oligonucleotide
ccuguuuguucuuuguugauugaaa

SEQ ID NO: 133166 - RNA, 25 nt, Artificial Sequence
  Description of Artificial Sequence: Synthetic oligonucleotide
cucuacagccuucuuuuucuuccau

SEQ ID NO: 133167 - RNA, 25 nt, Artificial Sequence
  Description of Artificial Sequence: Synthetic oligonucleotide
ucuuccauagcuaaucuuccuucua

SEQ ID NO: 133168 - RNA, 25 nt, Artificial Sequence
  Description of Artificial Sequence: Synthetic oligonucleotide
auaaucuuccuguugaaugcuucau

SEQ ID NO: 133169 - RNA, 25 nt, Artificial Sequence
  Description of Artificial Sequence: Synthetic oligonucleotide
uaaucuuccuguugaaugcuucaug

SEQ ID NO: 133170 - RNA, 25 nt, Artificial Sequence
  Description of Artificial Sequence: Synthetic oligonucleotide
cuucaugacuugaauucuacuuuga

SEQ ID NO: 133171 - RNA, 25 nt, Artificial Sequence
  Description of Artificial Sequence: Synthetic oligonucleotide
aagagggagagaagcaacuacagac

SEQ ID NO: 133172 - RNA, 25 nt, Artificial Sequence
  Description of Artificial Sequence: Synthetic oligonucleotide
cgucuccuaccagaccaaggucaac

SEQ ID NO: 133173 - RNA, 25 nt, Artificial Sequence
  Description of Artificial Sequence: Synthetic oligonucleotide
gaucaaucggcccgacuaucucgac

SEQ ID NO: 133174 - RNA, 25 nt, Artificial Sequence
  Description of Artificial Sequence: Synthetic oligonucleotide
ggacgaacauccaaccuucccaaac

SEQ ID NO: 133175 - RNA, 25 nt, Artificial Sequence
  Description of Artificial Sequence: Synthetic oligonucleotide
agggucggaacccaagcuuagaacu

SEQ ID NO: 133176 - RNA, 25 nt, Artificial Sequence
  Description of Artificial Sequence: Synthetic oligonucleotide
ucggaacccaagcuuagaacuuuaa

SEQ ID NO: 133177 - RNA, 25 nt, Artificial Sequence
  Description of Artificial Sequence: Synthetic oligonucleotide
acccaagcuuagaacuuuaagcaac

SEQ ID NO: 133178 - RNA, 25 nt, Artificial Sequence
  Description of Artificial Sequence: Synthetic oligonucleotide
gaacuuuaagcaacaagaccaccac

SEQ ID NO: 133179 - RNA, 25 nt, Artificial Sequence
  Description of Artificial Sequence: Synthetic oligonucleotide
acuauucaguggcgagaaauaaagu

SEQ ID NO: 133180 - RNA, 25 nt, Artificial Sequence
  Description of Artificial Sequence: Synthetic oligonucleotide
cuauucaguggcgagaaauaaaguu

SEQ ID NO: 133181 - RNA, 25 nt, Artificial Sequence
  Description of Artificial Sequence: Synthetic oligonucleotide
aaacacagauaacaggaaaugaucc

SEQ ID NO: 133182 - RNA, 25 nt, Artificial Sequence
  Description of Artificial Sequence: Synthetic oligonucleotide
cuuaagaaaagagaagaaaugaaac

SEQ ID NO: 133183 - RNA, 25 nt, Artificial Sequence
  Description of Artificial Sequence: Synthetic oligonucleotide
cugaaggaguguguuuccauccucc

SEQ ID NO: 133184 - RNA, 25 nt, Artificial Sequence
  Description of Artificial Sequence: Synthetic oligonucleotide
ucaccgcgggacugaaaaucuuuga

SEQ ID NO: 133185 - RNA, 25 nt, Artificial Sequence
  Description of Artificial Sequence: Synthetic oligonucleotide
agcagaaauaagcgugccguucagg

SEQ ID NO: 133186 - RNA, 25 nt, Artificial Sequence
  Description of Artificial Sequence: Synthetic oligonucleotide
aagcgugccguucaggguccagaag

SEQ ID NO: 133187 - RNA, 25 nt, Artificial Sequence
  Description of Artificial Sequence: Synthetic oligonucleotide
agaaacagucacucaagacugcuug

SEQ ID NO: 133188 - RNA, 25 nt, Artificial Sequence
  Description of Artificial Sequence: Synthetic oligonucleotide
agaggaagaagguccaugucuuugg

SEQ ID NO: 133189 - RNA, 25 nt, Artificial Sequence
  Description of Artificial Sequence: Synthetic oligonucleotide
uguauucaaaauaugccugaaacac

SEQ ID NO: 133190 - RNA, 25 nt, Artificial Sequence
  Description of Artificial Sequence: Synthetic oligonucleotide
auuuuccucccuuucucuguaccuc

SEQ ID NO: 133191 - RNA, 25 nt, Artificial Sequence
  Description of Artificial Sequence: Synthetic oligonucleotide
caaagaaagauagagcaagacaaga

SEQ ID NO: 133192 - RNA, 25 nt, Artificial Sequence
  Description of Artificial Sequence: Synthetic oligonucleotide
aagaaagauagagcaagacaagaaa

SEQ ID NO: 133193 - RNA, 25 nt, Artificial Sequence
  Description of Artificial Sequence: Synthetic oligonucleotide
gaaagcauuuguuuguacaagaucc

SEQ ID NO: 133194 - RNA, 25 nt, Artificial Sequence
  Description of Artificial Sequence: Synthetic oligonucleotide
ugaguuaaacgaacguacuugcaga

SEQ ID NO: 133195 - RNA, 25 nt, Artificial Sequence
  Description of Artificial Sequence: Synthetic oligonucleotide
acugauacagaacgaucgauacaga

SEQ ID NO: 133196 - RNA, 25 nt, Artificial Sequence
  Description of Artificial Sequence: Synthetic oligonucleotide
auauuauauauauauaaaaauaaau

SEQ ID NO: 133197 - RNA, 25 nt, Artificial Sequence
  Description of Artificial Sequence: Synthetic oligonucleotide
auuauauauauauaaaaauaaauau

SEQ ID NO: 133198 - RNA, 25 nt, Artificial Sequence
  Description of Artificial Sequence: Synthetic oligonucleotide
ucacuggauguauuugacugcugug

SEQ ID NO: 133199 - RNA, 25 nt, Artificial Sequence
  Description of Artificial Sequence: Synthetic oligonucleotide
cagggaagaggaggagaugagagac

SEQ ID NO: 133200 - RNA, 25 nt, Artificial Sequence
  Description of Artificial Sequence: Synthetic oligonucleotide
augaucuuuuuuuugucccacuugg

SEQ ID NO: 133201 - RNA, 27 nt, Artificial Sequence
  Description of Artificial Sequence: Synthetic oligonucleotide
ggccgugaacuccucaucaaaauaccu

SEQ ID NO: 133202 - RNA, 27 nt, Artificial Sequence
  Description of Artificial Sequence: Synthetic oligonucleotide
uggugugauggugaucaucugggccgu

SEQ ID NO: 133203 - RNA, 27 nt, Artificial Sequence
  Description of Artificial Sequence: Synthetic oligonucleotide
aaacccgcaggauaguuuucuucccua

SEQ ID NO: 133204 - RNA, 27 nt, Artificial Sequence
  Description of Artificial Sequence: Synthetic oligonucleotide
caaacuggaugaaauaaauuaaaaccc

SEQ ID NO: 133205 - RNA, 27 nt, Artificial Sequence
  Description of Artificial Sequence: Synthetic oligonucleotide
agaaguccuuaacauuucccuacguga

SEQ ID NO: 133206 - RNA, 27 nt, Artificial Sequence
  Description of Artificial Sequence: Synthetic oligonucleotide
cucugucccacuggguaaacccuggcc

SEQ ID NO: 133207 - RNA, 27 nt, Artificial Sequence
  Description of Artificial Sequence: Synthetic oligonucleotide
cacaauaacaaauuuaaaccuugcucc

SEQ ID NO: 133208 - RNA, 27 nt, Artificial Sequence
  Description of Artificial Sequence: Synthetic oligonucleotide
aaaugcauuugaacaacauaauacaca

SEQ ID NO: 133209 - RNA, 27 nt, Artificial Sequence
  Description of Artificial Sequence: Synthetic oligonucleotide
ggcuuuccugucacaaagauuaaaaac

SEQ ID NO: 133210 - RNA, 27 nt, Artificial Sequence
  Description of Artificial Sequence: Synthetic oligonucleotide
agggcuuuccugucacaaagauuaaaa

SEQ ID NO: 133211 - RNA, 27 nt, Artificial Sequence
  Description of Artificial Sequence: Synthetic oligonucleotide
ggccaugcugggagacauaagcagcag

SEQ ID NO: 133212 - RNA, 27 nt, Artificial Sequence
  Description of Artificial Sequence: Synthetic oligonucleotide
ucagggagaagcuucugaaacacuucu

SEQ ID NO: 133213 - RNA, 27 nt, Artificial Sequence
  Description of Artificial Sequence: Synthetic oligonucleotide
aagggcuucuuccuuauugauggucag

SEQ ID NO: 133214 - RNA, 27 nt, Artificial Sequence
  Description of Artificial Sequence: Synthetic oligonucleotide
ugaagggcuucuuccuuauugaugguc

SEQ ID NO: 133215 - RNA, 27 nt, Artificial Sequence
  Description of Artificial Sequence: Synthetic oligonucleotide
cgcugaagggcuucuuccuuauugaug

SEQ ID NO: 133216 - RNA, 27 nt, Artificial Sequence
  Description of Artificial Sequence: Synthetic oligonucleotide
gccgcugaagggcuucuuccuuauuga

SEQ ID NO: 133217 - RNA, 27 nt, Artificial Sequence
  Description of Artificial Sequence: Synthetic oligonucleotide
acuggccgcugaagggcuucuuccuua

SEQ ID NO: 133218 - RNA, 27 nt, Artificial Sequence
  Description of Artificial Sequence: Synthetic oligonucleotide
cggagcuuuucaccuuuaguuaugcuu

SEQ ID NO: 133219 - RNA, 27 nt, Artificial Sequence
  Description of Artificial Sequence: Synthetic oligonucleotide
ccggagcuuuucaccuuuaguuaugcu

SEQ ID NO: 133220 - RNA, 27 nt, Artificial Sequence
  Description of Artificial Sequence: Synthetic oligonucleotide
cagacuguugacuggcgugauguaguu

SEQ ID NO: 133221 - RNA, 27 nt, Artificial Sequence
  Description of Artificial Sequence: Synthetic oligonucleotide
cuuuugaacucugcuuaaauccagugg

SEQ ID NO: 133222 - RNA, 27 nt, Artificial Sequence
  Description of Artificial Sequence: Synthetic oligonucleotide
gcuuuugaacucugcuuaaauccagug

SEQ ID NO: 133223 - RNA, 27 nt, Artificial Sequence
  Description of Artificial Sequence: Synthetic oligonucleotide
agggcuuuugaacucugcuuaaaucca

SEQ ID NO: 133224 - RNA, 27 nt, Artificial Sequence
  Description of Artificial Sequence: Synthetic oligonucleotide
aagggcuuuugaacucugcuuaaaucc

SEQ ID NO: 133225 - RNA, 27 nt, Artificial Sequence
  Description of Artificial Sequence: Synthetic oligonucleotide
ugaagggcuuuugaacucugcuuaaau

SEQ ID NO: 133226 - RNA, 27 nt, Artificial Sequence
  Description of Artificial Sequence: Synthetic oligonucleotide
cugaagggcuuuugaacucugcuuaaa

SEQ ID NO: 133227 - RNA, 27 nt, Artificial Sequence
  Description of Artificial Sequence: Synthetic oligonucleotide
cgcugaagggcuuuugaacucugcuua

SEQ ID NO: 133228 - RNA, 27 nt, Artificial Sequence
  Description of Artificial Sequence: Synthetic oligonucleotide
cgagcggcuucacucagacccugaggc

SEQ ID NO: 133229 - RNA, 27 nt, Artificial Sequence
  Description of Artificial Sequence: Synthetic oligonucleotide
uugacuggcgugauguaguugcuuggg

SEQ ID NO: 133230 - RNA, 27 nt, Artificial Sequence
  Description of Artificial Sequence: Synthetic oligonucleotide
cacgcaccaagaagcugccauugaucc

SEQ ID NO: 133231 - RNA, 27 nt, Artificial Sequence
  Description of Artificial Sequence: Synthetic oligonucleotide
cugaugaauccaaugugggcuggaauc

SEQ ID NO: 133232 - RNA, 27 nt, Artificial Sequence
  Description of Artificial Sequence: Synthetic oligonucleotide
cuuagguauuccacauucucagcugug

SEQ ID NO: 133233 - RNA, 27 nt, Artificial Sequence
  Description of Artificial Sequence: Synthetic oligonucleotide
ugagccucaaauuaggagauacguuuu

SEQ ID NO: 133234 - RNA, 27 nt, Artificial Sequence
  Description of Artificial Sequence: Synthetic oligonucleotide
ccaauuguagagaaauuauuuuaggaa

SEQ ID NO: 133235 - RNA, 27 nt, Artificial Sequence
  Description of Artificial Sequence: Synthetic oligonucleotide
ggcuccuaacuagcugaaucuuccaau

SEQ ID NO: 133236 - RNA, 27 nt, Artificial Sequence
  Description of Artificial Sequence: Synthetic oligonucleotide
guggauauugacuaggagaguuuaaaa

SEQ ID NO: 133237 - RNA, 27 nt, Artificial Sequence
  Description of Artificial Sequence: Synthetic oligonucleotide
ugugacugaacauaacuguaggcugaa

SEQ ID NO: 133238 - RNA, 27 nt, Artificial Sequence
  Description of Artificial Sequence: Synthetic oligonucleotide
guaugugugugugacugaacauaacug

SEQ ID NO: 133239 - RNA, 27 nt, Artificial Sequence
  Description of Artificial Sequence: Synthetic oligonucleotide
aagcaaaaggaacauuuuguaugugug

SEQ ID NO: 133240 - RNA, 27 nt, Artificial Sequence
  Description of Artificial Sequence: Synthetic oligonucleotide
aaaaauuacuuuaaaagcaaaaggaac

SEQ ID NO: 133241 - RNA, 27 nt, Artificial Sequence
  Description of Artificial Sequence: Synthetic oligonucleotide
ccauugacuguugcuucacaggucaga

SEQ ID NO: 133242 - RNA, 27 nt, Artificial Sequence
  Description of Artificial Sequence: Synthetic oligonucleotide
auugguuugucgaugugugagauaguu

SEQ ID NO: 133243 - RNA, 27 nt, Artificial Sequence
  Description of Artificial Sequence: Synthetic oligonucleotide
agugguagcaguacaauugaggacaag

SEQ ID NO: 133244 - RNA, 27 nt, Artificial Sequence
  Description of Artificial Sequence: Synthetic oligonucleotide
uaagaccgcuugccagcuacgguuuca

SEQ ID NO: 133245 - RNA, 27 nt, Artificial Sequence
  Description of Artificial Sequence: Synthetic oligonucleotide
agccgguaagaccgcuugccagcuacg

SEQ ID NO: 133246 - RNA, 27 nt, Artificial Sequence
  Description of Artificial Sequence: Synthetic oligonucleotide
gguaacccaucuuuuaaccauacaacu

SEQ ID NO: 133247 - RNA, 27 nt, Artificial Sequence
  Description of Artificial Sequence: Synthetic oligonucleotide
ucgcagguaacccaucuuuuaaccaua

SEQ ID NO: 133248 - RNA, 27 nt, Artificial Sequence
  Description of Artificial Sequence: Synthetic oligonucleotide
cucagcaagauuguauaauucccugca

SEQ ID NO: 133249 - RNA, 27 nt, Artificial Sequence
  Description of Artificial Sequence: Synthetic oligonucleotide
acuguuuuaugcucagcaagauuguau

SEQ ID NO: 133250 - RNA, 27 nt, Artificial Sequence
  Description of Artificial Sequence: Synthetic oligonucleotide
aggauaaaggacucuucauuauuggaa

SEQ ID NO: 133251 - RNA, 27 nt, Artificial Sequence
  Description of Artificial Sequence: Synthetic oligonucleotide
caacuugcguuggaacauccaaagugu

SEQ ID NO: 133252 - RNA, 27 nt, Artificial Sequence
  Description of Artificial Sequence: Synthetic oligonucleotide
augguuucaguuuaguggaagcauuua

SEQ ID NO: 133253 - RNA, 27 nt, Artificial Sequence
  Description of Artificial Sequence: Synthetic oligonucleotide
auauuuaacaaagucaaacuuucucac

SEQ ID NO: 133254 - RNA, 27 nt, Artificial Sequence
  Description of Artificial Sequence: Synthetic oligonucleotide
aacuuuuaauauacaguaguucuuuuc

SEQ ID NO: 133255 - RNA, 27 nt, Artificial Sequence
  Description of Artificial Sequence: Synthetic oligonucleotide
guuaagucaaaacccguauuucuaaag

SEQ ID NO: 133256 - RNA, 27 nt, Artificial Sequence
  Description of Artificial Sequence: Synthetic oligonucleotide
gugcugaguuugcuguacccauguuga

SEQ ID NO: 133257 - RNA, 27 nt, Artificial Sequence
  Description of Artificial Sequence: Synthetic oligonucleotide
ugaggucagcaucuucugugucuuuac

SEQ ID NO: 133258 - RNA, 27 nt, Artificial Sequence
  Description of Artificial Sequence: Synthetic oligonucleotide
gcgaucugaauaaaccucccuacuagc

SEQ ID NO: 133259 - RNA, 27 nt, Artificial Sequence
  Description of Artificial Sequence: Synthetic oligonucleotide
aucccagaacccugcugcagaaggcca

SEQ ID NO: 133260 - RNA, 27 nt, Artificial Sequence
  Description of Artificial Sequence: Synthetic oligonucleotide
cauaauuuccaauauguaccagaccuu

SEQ ID NO: 133261 - RNA, 27 nt, Artificial Sequence
  Description of Artificial Sequence: Synthetic oligonucleotide
cuagugcuuccaucggaaggacuaggu

SEQ ID NO: 133262 - RNA, 27 nt, Artificial Sequence
  Description of Artificial Sequence: Synthetic oligonucleotide
uccacauaaaaacaauauucacuggga

SEQ ID NO: 133263 - RNA, 27 nt, Artificial Sequence
  Description of Artificial Sequence: Synthetic oligonucleotide
ucuaccaauuccaacuugaauucauug

SEQ ID NO: 133264 - RNA, 27 nt, Artificial Sequence
  Description of Artificial Sequence: Synthetic oligonucleotide
ucuccaagucuaaaucuguguccugag

SEQ ID NO: 133265 - RNA, 27 nt, Artificial Sequence
  Description of Artificial Sequence: Synthetic oligonucleotide
uggaauacuguaacugugcuuugagga

SEQ ID NO: 133266 - RNA, 27 nt, Artificial Sequence
  Description of Artificial Sequence: Synthetic oligonucleotide
uuaauucaucagugguggcagugguag

SEQ ID NO: 133267 - RNA, 27 nt, Artificial Sequence
  Description of Artificial Sequence: Synthetic oligonucleotide
gugaugauguggcacuaguaguuucuu

SEQ ID NO: 133268 - RNA, 27 nt, Artificial Sequence
  Description of Artificial Sequence: Synthetic oligonucleotide
ucuguuuggugaggcuguccgacuuug

SEQ ID NO: 133269 - RNA, 27 nt, Artificial Sequence
  Description of Artificial Sequence: Synthetic oligonucleotide
ccaucauguuccauuuuucgcuuucuc

SEQ ID NO: 133270 - RNA, 27 nt, Artificial Sequence
  Description of Artificial Sequence: Synthetic oligonucleotide
gcagucuacaugcuaaaucagagggua

SEQ ID NO: 133271 - RNA, 27 nt, Artificial Sequence
  Description of Artificial Sequence: Synthetic oligonucleotide
cauaaauagauccuuaaauagcucaaa

SEQ ID NO: 133272 - RNA, 27 nt, Artificial Sequence
  Description of Artificial Sequence: Synthetic oligonucleotide
ugauaauagugcuuuuucaccuuuuuc

SEQ ID NO: 133273 - RNA, 27 nt, Artificial Sequence
  Description of Artificial Sequence: Synthetic oligonucleotide
gcagaacugauaauagugcuuuuucac

SEQ ID NO: 133274 - RNA, 27 nt, Artificial Sequence
  Description of Artificial Sequence: Synthetic oligonucleotide
guagguuuaaucuuucuuuucagccau

SEQ ID NO: 133275 - RNA, 27 nt, Artificial Sequence
  Description of Artificial Sequence: Synthetic oligonucleotide
agaaggauuuuauuauaaggguuuaau

SEQ ID NO: 133276 - RNA, 27 nt, Artificial Sequence
  Description of Artificial Sequence: Synthetic oligonucleotide
gucuacagcauuggcuaauaguaugaa

SEQ ID NO: 133277 - RNA, 27 nt, Artificial Sequence
  Description of Artificial Sequence: Synthetic oligonucleotide
cuauuccuaucaaaaugcuucugucua

SEQ ID NO: 133278 - RNA, 27 nt, Artificial Sequence
  Description of Artificial Sequence: Synthetic oligonucleotide
ucagggccauuaucuuauuugcucuau

SEQ ID NO: 133279 - RNA, 27 nt, Artificial Sequence
  Description of Artificial Sequence: Synthetic oligonucleotide
ugcuugaggaagagaaaaauguugguc

SEQ ID NO: 133280 - RNA, 27 nt, Artificial Sequence
  Description of Artificial Sequence: Synthetic oligonucleotide
ugggcugaacuuuucucauacuuaaag

SEQ ID NO: 133281 - RNA, 27 nt, Artificial Sequence
  Description of Artificial Sequence: Synthetic oligonucleotide
gguucagcagccaucuuuauuccugcg

SEQ ID NO: 133282 - RNA, 27 nt, Artificial Sequence
  Description of Artificial Sequence: Synthetic oligonucleotide
ugaagagaacuuggucauucaaauuuc

SEQ ID NO: 133283 - RNA, 27 nt, Artificial Sequence
  Description of Artificial Sequence: Synthetic oligonucleotide
cucuaggcuggcuaucuuuauacauac

SEQ ID NO: 133284 - RNA, 27 nt, Artificial Sequence
  Description of Artificial Sequence: Synthetic oligonucleotide
acacuucacagagauaguuacagccau

SEQ ID NO: 133285 - RNA, 27 nt, Artificial Sequence
  Description of Artificial Sequence: Synthetic oligonucleotide
uugaaauuuucucacacuucacagaga

SEQ ID NO: 133286 - RNA, 27 nt, Artificial Sequence
  Description of Artificial Sequence: Synthetic oligonucleotide
ucaggaggauucauuuccuuaaaggaa

SEQ ID NO: 133287 - RNA, 27 nt, Artificial Sequence
  Description of Artificial Sequence: Synthetic oligonucleotide
auaugaugucacuuuuuguauccuuga

SEQ ID NO: 133288 - RNA, 27 nt, Artificial Sequence
  Description of Artificial Sequence: Synthetic oligonucleotide
uaugaugaagauucaaauugcaucuua

SEQ ID NO: 133289 - RNA, 27 nt, Artificial Sequence
  Description of Artificial Sequence: Synthetic oligonucleotide
uuaauagcuagucuucguuuugaacag

SEQ ID NO: 133290 - RNA, 27 nt, Artificial Sequence
  Description of Artificial Sequence: Synthetic oligonucleotide
auuuuuaguagagaugagguuucacca

SEQ ID NO: 133291 - RNA, 27 nt, Artificial Sequence
  Description of Artificial Sequence: Synthetic oligonucleotide
aggcgagauagagcuucucuuucguuc

SEQ ID NO: 133292 - RNA, 27 nt, Artificial Sequence
  Description of Artificial Sequence: Synthetic oligonucleotide
aacuggaccgaaggcgcuuguggagaa

SEQ ID NO: 133293 - RNA, 27 nt, Artificial Sequence
  Description of Artificial Sequence: Synthetic oligonucleotide
gcggcuacaucuuuggaaucuucuccu

SEQ ID NO: 133294 - RNA, 27 nt, Artificial Sequence
  Description of Artificial Sequence: Synthetic oligonucleotide
caagucuccucauugaauccagauugg

SEQ ID NO: 133295 - RNA, 27 nt, Artificial Sequence
  Description of Artificial Sequence: Synthetic oligonucleotide
uccucacuacucucaaaucuguucugg

SEQ ID NO: 133296 - RNA, 27 nt, Artificial Sequence
  Description of Artificial Sequence: Synthetic oligonucleotide
uuuguacucaucugcacagcucuggcu

SEQ ID NO: 133297 - RNA, 27 nt, Artificial Sequence
  Description of Artificial Sequence: Synthetic oligonucleotide
gcccauuaacaacaacaaucugaggug

SEQ ID NO: 133298 - RNA, 27 nt, Artificial Sequence
  Description of Artificial Sequence: Synthetic oligonucleotide
aauaaauuaaaaauaauuaaaauagug

SEQ ID NO: 133299 - RNA, 27 nt, Artificial Sequence
  Description of Artificial Sequence: Synthetic oligonucleotide
cauauuuaaauauuaauaaauuaaaaa

SEQ ID NO: 133300 - RNA, 27 nt, Artificial Sequence
  Description of Artificial Sequence: Synthetic oligonucleotide
gaaacaaaggauauucaaacugcauag

SEQ ID NO: 133301 - RNA, 27 nt, Artificial Sequence
  Description of Artificial Sequence: Synthetic oligonucleotide
caaacacuuagacgccagcagcauggg

SEQ ID NO: 133302 - RNA, 27 nt, Artificial Sequence
  Description of Artificial Sequence: Synthetic oligonucleotide
uuugucacaggugaaaugcacaucuga

SEQ ID NO: 133303 - RNA, 27 nt, Artificial Sequence
  Description of Artificial Sequence: Synthetic oligonucleotide
uaauucagccuggcacagguuuugauc

SEQ ID NO: 133304 - RNA, 27 nt, Artificial Sequence
  Description of Artificial Sequence: Synthetic oligonucleotide
auuguaagaaugacuacccacauucac

SEQ ID NO: 133305 - RNA, 27 nt, Artificial Sequence
  Description of Artificial Sequence: Synthetic oligonucleotide
caauuguaagaaugacuacccacauuc

SEQ ID NO: 133306 - RNA, 27 nt, Artificial Sequence
  Description of Artificial Sequence: Synthetic oligonucleotide
guacacucucugaugcucauuuucaua

SEQ ID NO: 133307 - RNA, 27 nt, Artificial Sequence
  Description of Artificial Sequence: Synthetic oligonucleotide
cugcugaguucuacaugaaaagcaaau

SEQ ID NO: 133308 - RNA, 27 nt, Artificial Sequence
  Description of Artificial Sequence: Synthetic oligonucleotide
uacugaaaauaaauauagaaauacaac

SEQ ID NO: 133309 - RNA, 27 nt, Artificial Sequence
  Description of Artificial Sequence: Synthetic oligonucleotide
uuccauuuaagaaacauuaaucaaaac

SEQ ID NO: 133310 - RNA, 27 nt, Artificial Sequence
  Description of Artificial Sequence: Synthetic oligonucleotide
acaauuuuaggcacuauacacguuguu

SEQ ID NO: 133311 - RNA, 27 nt, Artificial Sequence
  Description of Artificial Sequence: Synthetic oligonucleotide
ccagauguuaguagccaaggauauggu

SEQ ID NO: 133312 - RNA, 27 nt, Artificial Sequence
  Description of Artificial Sequence: Synthetic oligonucleotide
agcucacagucuccagauguuaguagc

SEQ ID NO: 133313 - RNA, 27 nt, Artificial Sequence
  Description of Artificial Sequence: Synthetic oligonucleotide
auuaauaaaaagcacacaacuuauggc

SEQ ID NO: 133314 - RNA, 27 nt, Artificial Sequence
  Description of Artificial Sequence: Synthetic oligonucleotide
aauguaagaagagccaaaaugaugcau

SEQ ID NO: 133315 - RNA, 27 nt, Artificial Sequence
  Description of Artificial Sequence: Synthetic oligonucleotide
acauuuuuacaaauguaagaagagcca

SEQ ID NO: 133316 - RNA, 27 nt, Artificial Sequence
  Description of Artificial Sequence: Synthetic oligonucleotide
aauaugaauuaagaugaccuaaucugu

SEQ ID NO: 133317 - RNA, 27 nt, Artificial Sequence
  Description of Artificial Sequence: Synthetic oligonucleotide
ucaugauuaguucuuucaauuccaucc

SEQ ID NO: 133318 - RNA, 27 nt, Artificial Sequence
  Description of Artificial Sequence: Synthetic oligonucleotide
cccaagagcagaaggaaugagugugca

SEQ ID NO: 133319 - RNA, 27 nt, Artificial Sequence
  Description of Artificial Sequence: Synthetic oligonucleotide
cucaaagcuacugguuaccucuacacc

SEQ ID NO: 133320 - RNA, 27 nt, Artificial Sequence
  Description of Artificial Sequence: Synthetic oligonucleotide
ugaaauauuacguggcaugugguuggg

SEQ ID NO: 133321 - RNA, 27 nt, Artificial Sequence
  Description of Artificial Sequence: Synthetic oligonucleotide
agugaagagaauaacuuguuuccgaag

SEQ ID NO: 133322 - RNA, 27 nt, Artificial Sequence
  Description of Artificial Sequence: Synthetic oligonucleotide
uuucuuagcauuaguuauugggaguga

SEQ ID NO: 133323 - RNA, 27 nt, Artificial Sequence
  Description of Artificial Sequence: Synthetic oligonucleotide
uugauuuucagcauuucuuagcauuag

SEQ ID NO: 133324 - RNA, 27 nt, Artificial Sequence
  Description of Artificial Sequence: Synthetic oligonucleotide
aaaguaaucauauuuagagaaagacag

SEQ ID NO: 133325 - RNA, 27 nt, Artificial Sequence
  Description of Artificial Sequence: Synthetic oligonucleotide
uguagaacaaaaugccugaaauucagc

SEQ ID NO: 133326 - RNA, 27 nt, Artificial Sequence
  Description of Artificial Sequence: Synthetic oligonucleotide
gagagucccgggugagagggaaucgcc

SEQ ID NO: 133327 - RNA, 27 nt, Artificial Sequence
  Description of Artificial Sequence: Synthetic oligonucleotide
cuuuacuuuaaagguucacuuuccuug

SEQ ID NO: 133328 - RNA, 27 nt, Artificial Sequence
  Description of Artificial Sequence: Synthetic oligonucleotide
ccaggcuuccagagcaugcagccuccu

SEQ ID NO: 133329 - RNA, 27 nt, Artificial Sequence
  Description of Artificial Sequence: Synthetic oligonucleotide
cucucuuuuguuuucuguucagagaaa

SEQ ID NO: 133330 - RNA, 27 nt, Artificial Sequence
  Description of Artificial Sequence: Synthetic oligonucleotide
cggcauaacugauuacagccaaguuca

SEQ ID NO: 133331 - RNA, 27 nt, Artificial Sequence
  Description of Artificial Sequence: Synthetic oligonucleotide
uggacuucuuuuaauuuuggcuucuuc

SEQ ID NO: 133332 - RNA, 27 nt, Artificial Sequence
  Description of Artificial Sequence: Synthetic oligonucleotide
uaaccucaccuggacuucuuuuaauuu

SEQ ID NO: 133333 - RNA, 27 nt, Artificial Sequence
  Description of Artificial Sequence: Synthetic oligonucleotide
guccucuucccgauaauccggauucag

SEQ ID NO: 133334 - RNA, 27 nt, Artificial Sequence
  Description of Artificial Sequence: Synthetic oligonucleotide
acaauacuugcuuugaugucacauuaa

SEQ ID NO: 133335 - RNA, 27 nt, Artificial Sequence
  Description of Artificial Sequence: Synthetic oligonucleotide
gagugcuacaauacuugcuuugauguc

SEQ ID NO: 133336 - RNA, 27 nt, Artificial Sequence
  Description of Artificial Sequence: Synthetic oligonucleotide
auuugugguuuuguuuucucucucucu

SEQ ID NO: 133337 - RNA, 27 nt, Artificial Sequence
  Description of Artificial Sequence: Synthetic oligonucleotide
uguaugggcuuaaauacuacagcgagg

SEQ ID NO: 133338 - RNA, 27 nt, Artificial Sequence
  Description of Artificial Sequence: Synthetic oligonucleotide
cuguaugggcuuaaauacuacagcgag

SEQ ID NO: 133339 - RNA, 27 nt, Artificial Sequence
  Description of Artificial Sequence: Synthetic oligonucleotide
ggaagguuucuguaugggcuuaaauac

SEQ ID NO: 133340 - RNA, 27 nt, Artificial Sequence
  Description of Artificial Sequence: Synthetic oligonucleotide
guagguauaccauguuuauuuuaauac

SEQ ID NO: 133341 - RNA, 27 nt, Artificial Sequence
  Description of Artificial Sequence: Synthetic oligonucleotide
uccgaaaacuggccgaucagaacagcc

SEQ ID NO: 133342 - RNA, 27 nt, Artificial Sequence
  Description of Artificial Sequence: Synthetic oligonucleotide
cccuguuccaaaguucaaauuauuugu

SEQ ID NO: 133343 - RNA, 27 nt, Artificial Sequence
  Description of Artificial Sequence: Synthetic oligonucleotide
acuggaaaguuaaauuaaggucgcaau

SEQ ID NO: 133344 - RNA, 27 nt, Artificial Sequence
  Description of Artificial Sequence: Synthetic oligonucleotide
caaaaccaaacuuuagcuuucucagcc

SEQ ID NO: 133345 - RNA, 27 nt, Artificial Sequence
  Description of Artificial Sequence: Synthetic oligonucleotide
uacagugggaaguagcaucuuuacuuu

SEQ ID NO: 133346 - RNA, 27 nt, Artificial Sequence
  Description of Artificial Sequence: Synthetic oligonucleotide
ucauaugguaucagcaauuaagcagua

SEQ ID NO: 133347 - RNA, 27 nt, Artificial Sequence
  Description of Artificial Sequence: Synthetic oligonucleotide
cagcccauguuucauucauaugguauc

SEQ ID NO: 133348 - RNA, 27 nt, Artificial Sequence
  Description of Artificial Sequence: Synthetic oligonucleotide
uaugaaaaaguuggauaagaaaguugg

SEQ ID NO: 133349 - RNA, 27 nt, Artificial Sequence
  Description of Artificial Sequence: Synthetic oligonucleotide
uccggccucaugaugucaugcaaggcu

SEQ ID NO: 133350 - RNA, 27 nt, Artificial Sequence
  Description of Artificial Sequence: Synthetic oligonucleotide
acaaaugcagucauauacaaauucagg

SEQ ID NO: 133351 - RNA, 27 nt, Artificial Sequence
  Description of Artificial Sequence: Synthetic oligonucleotide
gguaguaaacauucuacuaggauucuu

SEQ ID NO: 133352 - RNA, 27 nt, Artificial Sequence
  Description of Artificial Sequence: Synthetic oligonucleotide
uuucaucaaaaaauucuucccuuucug

SEQ ID NO: 133353 - RNA, 27 nt, Artificial Sequence
  Description of Artificial Sequence: Synthetic oligonucleotide
aaauucacacacuggcaugccgauagc

SEQ ID NO: 133354 - RNA, 27 nt, Artificial Sequence
  Description of Artificial Sequence: Synthetic oligonucleotide
acauacauugcucuacuaugaggugaa

SEQ ID NO: 133355 - RNA, 27 nt, Artificial Sequence
  Description of Artificial Sequence: Synthetic oligonucleotide
uauauaugugcuuuggcaauucuggug

SEQ ID NO: 133356 - RNA, 27 nt, Artificial Sequence
  Description of Artificial Sequence: Synthetic oligonucleotide
ggagaaacuauuacccagaucaccacu

SEQ ID NO: 133357 - RNA, 27 nt, Artificial Sequence
  Description of Artificial Sequence: Synthetic oligonucleotide
auuuggagaaacuauuacccagaucac

SEQ ID NO: 133358 - RNA, 27 nt, Artificial Sequence
  Description of Artificial Sequence: Synthetic oligonucleotide
uuucuaggaaguauucaucacauccac

SEQ ID NO: 133359 - RNA, 27 nt, Artificial Sequence
  Description of Artificial Sequence: Synthetic oligonucleotide
cauauaugguguagcuguggaaaugcg

SEQ ID NO: 133360 - RNA, 27 nt, Artificial Sequence
  Description of Artificial Sequence: Synthetic oligonucleotide
cuccauucauauaugguguagcugugg

SEQ ID NO: 133361 - RNA, 27 nt, Artificial Sequence
  Description of Artificial Sequence: Synthetic oligonucleotide
aucuucuucucguguaagaacugcagc

SEQ ID NO: 133362 - RNA, 27 nt, Artificial Sequence
  Description of Artificial Sequence: Synthetic oligonucleotide
ucccuguaaaugaucuucuucucgugu

SEQ ID NO: 133363 - RNA, 27 nt, Artificial Sequence
  Description of Artificial Sequence: Synthetic oligonucleotide
gucccuguaaaugaucuucuucucgug

SEQ ID NO: 133364 - RNA, 27 nt, Artificial Sequence
  Description of Artificial Sequence: Synthetic oligonucleotide
ucaggucccuguaaaugaucuucuucu

SEQ ID NO: 133365 - RNA, 27 nt, Artificial Sequence
  Description of Artificial Sequence: Synthetic oligonucleotide
gaugcagucaaacaccucuuccucugu

SEQ ID NO: 133366 - RNA, 27 nt, Artificial Sequence
  Description of Artificial Sequence: Synthetic oligonucleotide
cgaugcagucaaacaccucuuccucug

SEQ ID NO: 133367 - RNA, 27 nt, Artificial Sequence
  Description of Artificial Sequence: Synthetic oligonucleotide
cccugugaacucgcccucaaaguagcg

SEQ ID NO: 133368 - RNA, 27 nt, Artificial Sequence
  Description of Artificial Sequence: Synthetic oligonucleotide
ggacagaggugccaggagaugcccuca

SEQ ID NO: 133369 - RNA, 27 nt, Artificial Sequence
  Description of Artificial Sequence: Synthetic oligonucleotide
uuaaaaagacaaaccauaucacuccuu

SEQ ID NO: 133370 - RNA, 27 nt, Artificial Sequence
  Description of Artificial Sequence: Synthetic oligonucleotide
cuuaaaaagacaaaccauaucacuccu

SEQ ID NO: 133371 - RNA, 27 nt, Artificial Sequence
  Description of Artificial Sequence: Synthetic oligonucleotide
gacaaccuuuaggaucuuuacugcaac

SEQ ID NO: 133372 - RNA, 27 nt, Artificial Sequence
  Description of Artificial Sequence: Synthetic oligonucleotide
gucgacaaccuuuaggaucuuuacugc

SEQ ID NO: 133373 - RNA, 27 nt, Artificial Sequence
  Description of Artificial Sequence: Synthetic oligonucleotide
acaauugccagguuguccuuugucaug

SEQ ID NO: 133374 - RNA, 27 nt, Artificial Sequence
  Description of Artificial Sequence: Synthetic oligonucleotide
ccucgcaccacugggucacaauugcca

SEQ ID NO: 133375 - RNA, 27 nt, Artificial Sequence
  Description of Artificial Sequence: Synthetic oligonucleotide
auuucaugucucuauggaugauguucu

SEQ ID NO: 133376 - RNA, 27 nt, Artificial Sequence
  Description of Artificial Sequence: Synthetic oligonucleotide
uggagaaauauauuguuggauuucaug

SEQ ID NO: 133377 - RNA, 27 nt, Artificial Sequence
  Description of Artificial Sequence: Synthetic oligonucleotide
agccuucauggagaaauauauuguugg

SEQ ID NO: 133378 - RNA, 27 nt, Artificial Sequence
  Description of Artificial Sequence: Synthetic oligonucleotide
accacuccagcgugacuuuacuguugc

SEQ ID NO: 133379 - RNA, 27 nt, Artificial Sequence
  Description of Artificial Sequence: Synthetic oligonucleotide
ccucucuuccuuuacuuucuucacaca

SEQ ID NO: 133380 - RNA, 27 nt, Artificial Sequence
  Description of Artificial Sequence: Synthetic oligonucleotide
gcccgaugcaaggauggcucggaagcg

SEQ ID NO: 133381 - RNA, 27 nt, Artificial Sequence
  Description of Artificial Sequence: Synthetic oligonucleotide
cacaguaggauauucaaccuccauuuc

SEQ ID NO: 133382 - RNA, 27 nt, Artificial Sequence
  Description of Artificial Sequence: Synthetic oligonucleotide
uuacacaguaggauauucaaccuccau

SEQ ID NO: 133383 - RNA, 27 nt, Artificial Sequence
  Description of Artificial Sequence: Synthetic oligonucleotide
uacacuacaagggaaaacucaaaaucu

SEQ ID NO: 133384 - RNA, 27 nt, Artificial Sequence
  Description of Artificial Sequence: Synthetic oligonucleotide
caaucaacaaagaacaaacaggauaaa

SEQ ID NO: 133385 - RNA, 27 nt, Artificial Sequence
  Description of Artificial Sequence: Synthetic oligonucleotide
uuucaaucaacaaagaacaaacaggau

SEQ ID NO: 133386 - RNA, 27 nt, Artificial Sequence
  Description of Artificial Sequence: Synthetic oligonucleotide
auggaagaaaaagaaggcuguagagaa

SEQ ID NO: 133387 - RNA, 27 nt, Artificial Sequence
  Description of Artificial Sequence: Synthetic oligonucleotide
uagaaggaagauuagcuauggaagaaa

SEQ ID NO: 133388 - RNA, 27 nt, Artificial Sequence
  Description of Artificial Sequence: Synthetic oligonucleotide
augaagcauucaacaggaagauuauuu

SEQ ID NO: 133389 - RNA, 27 nt, Artificial Sequence
  Description of Artificial Sequence: Synthetic oligonucleotide
caugaagcauucaacaggaagauuauu

SEQ ID NO: 133390 - RNA, 27 nt, Artificial Sequence
  Description of Artificial Sequence: Synthetic oligonucleotide
ucaaaguagaauucaagucaugaagca

SEQ ID NO: 133391 - RNA, 27 nt, Artificial Sequence
  Description of Artificial Sequence: Synthetic oligonucleotide
gucuguaguugcuucucucccucuuag

SEQ ID NO: 133392 - RNA, 27 nt, Artificial Sequence
  Description of Artificial Sequence: Synthetic oligonucleotide
guugaccuuggucugguaggagacggc

SEQ ID NO: 133393 - RNA, 27 nt, Artificial Sequence
  Description of Artificial Sequence: Synthetic oligonucleotide
gucgagauagucgggccgauugaucuc

SEQ ID NO: 133394 - RNA, 27 nt, Artificial Sequence
  Description of Artificial Sequence: Synthetic oligonucleotide
guuugggaagguuggauguucguccuc

SEQ ID NO: 133395 - RNA, 27 nt, Artificial Sequence
  Description of Artificial Sequence: Synthetic oligonucleotide
aguucuaagcuuggguuccgacccuaa

SEQ ID NO: 133396 - RNA, 27 nt, Artificial Sequence
  Description of Artificial Sequence: Synthetic oligonucleotide
uuaaaguucuaagcuuggguuccgacc

SEQ ID NO: 133397 - RNA, 27 nt, Artificial Sequence
  Description of Artificial Sequence: Synthetic oligonucleotide
guugcuuaaaguucuaagcuuggguuc

SEQ ID NO: 133398 - RNA, 27 nt, Artificial Sequence
  Description of Artificial Sequence: Synthetic oligonucleotide
gugguggucuuguugcuuaaaguucua

SEQ ID NO: 133399 - RNA, 27 nt, Artificial Sequence
  Description of Artificial Sequence: Synthetic oligonucleotide
acuuuauuucucgccacugaauaguag

SEQ ID NO: 133400 - RNA, 27 nt, Artificial Sequence
  Description of Artificial Sequence: Synthetic oligonucleotide
aacuuuauuucucgccacugaauagua

SEQ ID NO: 133401 - RNA, 27 nt, Artificial Sequence
  Description of Artificial Sequence: Synthetic oligonucleotide
ggaucauuuccuguuaucuguguuugu

SEQ ID NO: 133402 - RNA, 27 nt, Artificial Sequence
  Description of Artificial Sequence: Synthetic oligonucleotide
guuucauuucuucucuuuucuuaaggc

SEQ ID NO: 133403 - RNA, 27 nt, Artificial Sequence
  Description of Artificial Sequence: Synthetic oligonucleotide
ggaggauggaaacacacuccuucaguu

SEQ ID NO: 133404 - RNA, 27 nt, Artificial Sequence
  Description of Artificial Sequence: Synthetic oligonucleotide
ucaaagauuuucagucccgcggugaca

SEQ ID NO: 133405 - RNA, 27 nt, Artificial Sequence
  Description of Artificial Sequence: Synthetic oligonucleotide
ccugaacggcacgcuuauuucugcugu

SEQ ID NO: 133406 - RNA, 27 nt, Artificial Sequence
  Description of Artificial Sequence: Synthetic oligonucleotide
cuucuggacccugaacggcacgcuuau

SEQ ID NO: 133407 - RNA, 27 nt, Artificial Sequence
  Description of Artificial Sequence: Synthetic oligonucleotide
caagcagucuugagugacuguuucuuc

SEQ ID NO: 133408 - RNA, 27 nt, Artificial Sequence
  Description of Artificial Sequence: Synthetic oligonucleotide
ccaaagacauggaccuucuuccucuga

SEQ ID NO: 133409 - RNA, 27 nt, Artificial Sequence
  Description of Artificial Sequence: Synthetic oligonucleotide
guguuucaggcauauuuugaauacauc

SEQ ID NO: 133410 - RNA, 27 nt, Artificial Sequence
  Description of Artificial Sequence: Synthetic oligonucleotide
gagguacagagaaagggaggaaaauag

SEQ ID NO: 133411 - RNA, 27 nt, Artificial Sequence
  Description of Artificial Sequence: Synthetic oligonucleotide
ucuugucuugcucuaucuuucuuuggu

SEQ ID NO: 133412 - RNA, 27 nt, Artificial Sequence
  Description of Artificial Sequence: Synthetic oligonucleotide
uuucuugucuugcucuaucuuucuuug

SEQ ID NO: 133413 - RNA, 27 nt, Artificial Sequence
  Description of Artificial Sequence: Synthetic oligonucleotide
ggaucuuguacaaacaaaugcuuucuc

SEQ ID NO: 133414 - RNA, 27 nt, Artificial Sequence
  Description of Artificial Sequence: Synthetic oligonucleotide
ucugcaaguacguucguuuaacucaag

SEQ ID NO: 133415 - RNA, 27 nt, Artificial Sequence
  Description of Artificial Sequence: Synthetic oligonucleotide
ucuguaucgaucguucuguaucagucu

SEQ ID NO: 133416 - RNA, 27 nt, Artificial Sequence
  Description of Artificial Sequence: Synthetic oligonucleotide
auuuauuuuuauauauauauaauauau

SEQ ID NO: 133417 - RNA, 27 nt, Artificial Sequence
  Description of Artificial Sequence: Synthetic oligonucleotide
auauuuauuuuuauauauauauaauau

SEQ ID NO: 133418 - RNA, 27 nt, Artificial Sequence
  Description of Artificial Sequence: Synthetic oligonucleotide
cacagcagucaaauacauccagugaag

SEQ ID NO: 133419 - RNA, 27 nt, Artificial Sequence
  Description of Artificial Sequence: Synthetic oligonucleotide
gucucucaucuccuccucuucccuguc

SEQ ID NO: 133420 - RNA, 27 nt, Artificial Sequence
  Description of Artificial Sequence: Synthetic oligonucleotide
ccaagugggacaaaaaaaagaucaugc

SEQ ID NO: 133421 - RNA, 14 nt, Artificial Sequence
  Description of Artificial Sequence: Synthetic oligonucleotide
guauuuugaugagg

SEQ ID NO: 133422 - RNA, 12 nt, Artificial Sequence
  Description of Artificial Sequence: Synthetic oligonucleotide
ggcccagaugau

SEQ ID NO: 133423 - RNA, 14 nt, Artificial Sequence
  Description of Artificial Sequence: Synthetic oligonucleotide
gggaagaaaacuau

SEQ ID NO: 133424 - RNA, 15 nt, Artificial Sequence
  Description of Artificial Sequence: Synthetic oligonucleotide
guuuuaauuuauuuc

SEQ ID NO: 133425 - RNA, 12 nt, Artificial Sequence
  Description of Artificial Sequence: Synthetic oligonucleotide
acguagggaaau

SEQ ID NO: 133426 - RNA, 12 nt, Artificial Sequence
  Description of Artificial Sequence: Synthetic oligonucleotide
ccaggguuuacc

SEQ ID NO: 133427 - RNA, 11 nt, Artificial Sequence
  Description of Artificial Sequence: Synthetic oligonucleotide
agcaagguuua

SEQ ID NO: 133428 - RNA, 12 nt, Artificial Sequence
  Description of Artificial Sequence: Synthetic oligonucleotide
uguauuauguug

SEQ ID NO: 133429 - RNA, 15 nt, Artificial Sequence
  Description of Artificial Sequence: Synthetic oligonucleotide
uuuuaaucuuuguga

SEQ ID NO: 133430 - RNA, 14 nt, Artificial Sequence
  Description of Artificial Sequence: Synthetic oligonucleotide
uuaaucuuugugac

SEQ ID NO: 133431 - RNA, 13 nt, Artificial Sequence
  Description of Artificial Sequence: Synthetic oligonucleotide
gcugcuuaugucu

SEQ ID NO: 133432 - RNA, 14 nt, Artificial Sequence
  Description of Artificial Sequence: Synthetic oligonucleotide
aaguguuucagaag

SEQ ID NO: 133433 - RNA, 13 nt, Artificial Sequence
  Description of Artificial Sequence: Synthetic oligonucleotide
gaccaucaauaag

SEQ ID NO: 133434 - RNA, 13 nt, Artificial Sequence
  Description of Artificial Sequence: Synthetic oligonucleotide
ccaucaauaagga

SEQ ID NO: 133435 - RNA, 14 nt, Artificial Sequence
  Description of Artificial Sequence: Synthetic oligonucleotide
ucaauaaggaagaa

SEQ ID NO: 133436 - RNA, 14 nt, Artificial Sequence
  Description of Artificial Sequence: Synthetic oligonucleotide
aauaaggaagaagc

SEQ ID NO: 133437 - RNA, 13 nt, Artificial Sequence
  Description of Artificial Sequence: Synthetic oligonucleotide
aggaagaagcccu

SEQ ID NO: 133438 - RNA, 13 nt, Artificial Sequence
  Description of Artificial Sequence: Synthetic oligonucleotide
gcauaacuaaagg

SEQ ID NO: 133439 - RNA, 14 nt, Artificial Sequence
  Description of Artificial Sequence: Synthetic oligonucleotide
cauaacuaaaggug

SEQ ID NO: 133440 - RNA, 12 nt, Artificial Sequence
  Description of Artificial Sequence: Synthetic oligonucleotide
cuacaucacgcc

SEQ ID NO: 133441 - RNA, 12 nt, Artificial Sequence
  Description of Artificial Sequence: Synthetic oligonucleotide
acuggauuuaag

SEQ ID NO: 133442 - RNA, 12 nt, Artificial Sequence
  Description of Artificial Sequence: Synthetic oligonucleotide
cuggauuuaagc

SEQ ID NO: 133443 - RNA, 13 nt, Artificial Sequence
  Description of Artificial Sequence: Synthetic oligonucleotide
gauuuaagcagag

SEQ ID NO: 133444 - RNA, 13 nt, Artificial Sequence
  Description of Artificial Sequence: Synthetic oligonucleotide
auuuaagcagagu

SEQ ID NO: 133445 - RNA, 13 nt, Artificial Sequence
  Description of Artificial Sequence: Synthetic oligonucleotide
uuaagcagaguuc

SEQ ID NO: 133446 - RNA, 13 nt, Artificial Sequence
  Description of Artificial Sequence: Synthetic oligonucleotide
uaagcagaguuca

SEQ ID NO: 133447 - RNA, 14 nt, Artificial Sequence
  Description of Artificial Sequence: Synthetic oligonucleotide
agcagaguucaaaa

SEQ ID NO: 133448 - RNA, 12 nt, Artificial Sequence
  Description of Artificial Sequence: Synthetic oligonucleotide
cucagggucuga

SEQ ID NO: 133449 - RNA, 13 nt, Artificial Sequence
  Description of Artificial Sequence: Synthetic oligonucleotide
caagcaacuacau

SEQ ID NO: 133450 - RNA, 12 nt, Artificial Sequence
  Description of Artificial Sequence: Synthetic oligonucleotide
aucaauggcagc

SEQ ID NO: 133451 - RNA, 11 nt, Artificial Sequence
  Description of Artificial Sequence: Synthetic oligonucleotide
uuccagcccac

SEQ ID NO: 133452 - RNA, 12 nt, Artificial Sequence
  Description of Artificial Sequence: Synthetic oligonucleotide
cagcugagaaug

SEQ ID NO: 133453 - RNA, 13 nt, Artificial Sequence
  Description of Artificial Sequence: Synthetic oligonucleotide
aacguaucuccua

SEQ ID NO: 133454 - RNA, 14 nt, Artificial Sequence
  Description of Artificial Sequence: Synthetic oligonucleotide
ccuaaaauaauuuc

SEQ ID NO: 133455 - RNA, 13 nt, Artificial Sequence
  Description of Artificial Sequence: Synthetic oligonucleotide
uggaagauucagc

SEQ ID NO: 133456 - RNA, 12 nt, Artificial Sequence
  Description of Artificial Sequence: Synthetic oligonucleotide
uuaaacucuccu

SEQ ID NO: 133457 - RNA, 12 nt, Artificial Sequence
  Description of Artificial Sequence: Synthetic oligonucleotide
cagccuacaguu

SEQ ID NO: 133458 - RNA, 13 nt, Artificial Sequence
  Description of Artificial Sequence: Synthetic oligonucleotide
guuauguucaguc

SEQ ID NO: 133459 - RNA, 13 nt, Artificial Sequence
  Description of Artificial Sequence: Synthetic oligonucleotide
cacauacaaaaug

SEQ ID NO: 133460 - RNA, 9 nt, Artificial Sequence
  Description of Artificial Sequence: Synthetic oligonucleotide
uccuuuugc

SEQ ID NO: 133461 - RNA, 12 nt, Artificial Sequence
  Description of Artificial Sequence: Synthetic oligonucleotide
ugaccugugaag

SEQ ID NO: 133462 - RNA, 12 nt, Artificial Sequence
  Description of Artificial Sequence: Synthetic oligonucleotide
cuaucucacaca

SEQ ID NO: 133463 - RNA, 13 nt, Artificial Sequence
  Description of Artificial Sequence: Synthetic oligonucleotide
uguccucaauugu

SEQ ID NO: 133464 - RNA, 12 nt, Artificial Sequence
  Description of Artificial Sequence: Synthetic oligonucleotide
aaaccguagcug

SEQ ID NO: 133465 - RNA, 12 nt, Artificial Sequence
  Description of Artificial Sequence: Synthetic oligonucleotide
uagcuggcaagc

SEQ ID NO: 133466 - RNA, 14 nt, Artificial Sequence
  Description of Artificial Sequence: Synthetic oligonucleotide
uuguaugguuaaaa

SEQ ID NO: 133467 - RNA, 14 nt, Artificial Sequence
  Description of Artificial Sequence: Synthetic oligonucleotide
ugguuaaaagaugg

SEQ ID NO: 133468 - RNA, 13 nt, Artificial Sequence
  Description of Artificial Sequence: Synthetic oligonucleotide
cagggaauuauac

SEQ ID NO: 133469 - RNA, 12 nt, Artificial Sequence
  Description of Artificial Sequence: Synthetic oligonucleotide
acaaucuugcug

SEQ ID NO: 133470 - RNA, 13 nt, Artificial Sequence
  Description of Artificial Sequence: Synthetic oligonucleotide
ccaauaaugaaga

SEQ ID NO: 133471 - RNA, 13 nt, Artificial Sequence
  Description of Artificial Sequence: Synthetic oligonucleotide
acuuuggauguuc

SEQ ID NO: 133472 - RNA, 12 nt, Artificial Sequence
  Description of Artificial Sequence: Synthetic oligonucleotide
aaugcuuccacu

SEQ ID NO: 133473 - RNA, 11 nt, Artificial Sequence
  Description of Artificial Sequence: Synthetic oligonucleotide
gagaaaguuug

SEQ ID NO: 133474 - RNA, 11 nt, Artificial Sequence
  Description of Artificial Sequence: Synthetic oligonucleotide
aaagaacuacu

SEQ ID NO: 133475 - RNA, 12 nt, Artificial Sequence
  Description of Artificial Sequence: Synthetic oligonucleotide
uuagaaauacgg

SEQ ID NO: 133476 - RNA, 12 nt, Artificial Sequence
  Description of Artificial Sequence: Synthetic oligonucleotide
aacauggguaca

SEQ ID NO: 133477 - RNA, 14 nt, Artificial Sequence
  Description of Artificial Sequence: Synthetic oligonucleotide
aaagacacagaaga

SEQ ID NO: 133478 - RNA, 11 nt, Artificial Sequence
  Description of Artificial Sequence: Synthetic oligonucleotide
uaguagggagg

SEQ ID NO: 133479 - RNA, 12 nt, Artificial Sequence
  Description of Artificial Sequence: Synthetic oligonucleotide
gccuucugcagc

SEQ ID NO: 133480 - RNA, 10 nt, Artificial Sequence
  Description of Artificial Sequence: Synthetic oligonucleotide
ggucugguac

SEQ ID NO: 133481 - RNA, 12 nt, Artificial Sequence
  Description of Artificial Sequence: Synthetic oligonucleotide
cuaguccuuccg

SEQ ID NO: 133482 - RNA, 12 nt, Artificial Sequence
  Description of Artificial Sequence: Synthetic oligonucleotide
ccagugaauauu

SEQ ID NO: 133483 - RNA, 13 nt, Artificial Sequence
  Description of Artificial Sequence: Synthetic oligonucleotide
augaauucaaguu

SEQ ID NO: 133484 - RNA, 12 nt, Artificial Sequence
  Description of Artificial Sequence: Synthetic oligonucleotide
caggacacagau

SEQ ID NO: 133485 - RNA, 12 nt, Artificial Sequence
  Description of Artificial Sequence: Synthetic oligonucleotide
cucaaagcacag

SEQ ID NO: 133486 - RNA, 10 nt, Artificial Sequence
  Description of Artificial Sequence: Synthetic oligonucleotide
accacugcca

SEQ ID NO: 133487 - RNA, 13 nt, Artificial Sequence
  Description of Artificial Sequence: Synthetic oligonucleotide
gaaacuacuagug

SEQ ID NO: 133488 - RNA, 12 nt, Artificial Sequence
  Description of Artificial Sequence: Synthetic oligonucleotide
aagucggacagc

SEQ ID NO: 133489 - RNA, 13 nt, Artificial Sequence
  Description of Artificial Sequence: Synthetic oligonucleotide
gaaagcgaaaaau

SEQ ID NO: 133490 - RNA, 13 nt, Artificial Sequence
  Description of Artificial Sequence: Synthetic oligonucleotide
cccucugauuuag

SEQ ID NO: 133491 - RNA, 12 nt, Artificial Sequence
  Description of Artificial Sequence: Synthetic oligonucleotide
ugagcuauuuaa

SEQ ID NO: 133492 - RNA, 13 nt, Artificial Sequence
  Description of Artificial Sequence: Synthetic oligonucleotide
aaaaggugaaaaa

SEQ ID NO: 133493 - RNA, 14 nt, Artificial Sequence
  Description of Artificial Sequence: Synthetic oligonucleotide
gaaaaagcacuauu

SEQ ID NO: 133494 - RNA, 12 nt, Artificial Sequence
  Description of Artificial Sequence: Synthetic oligonucleotide
ggcugaaaagaa

SEQ ID NO: 133495 - RNA, 12 nt, Artificial Sequence
  Description of Artificial Sequence: Synthetic oligonucleotide
uaaacccuuaua

SEQ ID NO: 133496 - RNA, 13 nt, Artificial Sequence
  Description of Artificial Sequence: Synthetic oligonucleotide
cauacuauuagcc

SEQ ID NO: 133497 - RNA, 12 nt, Artificial Sequence
  Description of Artificial Sequence: Synthetic oligonucleotide
gacagaagcauu

SEQ ID NO: 133498 - RNA, 14 nt, Artificial Sequence
  Description of Artificial Sequence: Synthetic oligonucleotide
agagcaaauaagau

SEQ ID NO: 133499 - RNA, 14 nt, Artificial Sequence
  Description of Artificial Sequence: Synthetic oligonucleotide
ccaacauuuuucuc

SEQ ID NO: 133500 - RNA, 15 nt, Artificial Sequence
  Description of Artificial Sequence: Synthetic oligonucleotide
uuaaguaugagaaaa

SEQ ID NO: 133501 - RNA, 14 nt, Artificial Sequence
  Description of Artificial Sequence: Synthetic oligonucleotide
caggaauaaagaug

SEQ ID NO: 133502 - RNA, 13 nt, Artificial Sequence
  Description of Artificial Sequence: Synthetic oligonucleotide
aauuugaaugacc

SEQ ID NO: 133503 - RNA, 14 nt, Artificial Sequence
  Description of Artificial Sequence: Synthetic oligonucleotide
auguauaaagauag

SEQ ID NO: 133504 - RNA, 12 nt, Artificial Sequence
  Description of Artificial Sequence: Synthetic oligonucleotide
ggcuguaacuau

SEQ ID NO: 133505 - RNA, 11 nt, Artificial Sequence
  Description of Artificial Sequence: Synthetic oligonucleotide
ucugugaagug

SEQ ID NO: 133506 - RNA, 14 nt, Artificial Sequence
  Description of Artificial Sequence: Synthetic oligonucleotide
ccuuuaaggaaaug

SEQ ID NO: 133507 - RNA, 13 nt, Artificial Sequence
  Description of Artificial Sequence: Synthetic oligonucleotide
aaggauacaaaaa

SEQ ID NO: 133508 - RNA, 12 nt, Artificial Sequence
  Description of Artificial Sequence: Synthetic oligonucleotide
agaugcaauuug

SEQ ID NO: 133509 - RNA, 12 nt, Artificial Sequence
  Description of Artificial Sequence: Synthetic oligonucleotide
guucaaaacgaa

SEQ ID NO: 133510 - RNA, 11 nt, Artificial Sequence
  Description of Artificial Sequence: Synthetic oligonucleotide
gugaaaccuca

SEQ ID NO: 133511 - RNA, 13 nt, Artificial Sequence
  Description of Artificial Sequence: Synthetic oligonucleotide
acgaaagagaagc

SEQ ID NO: 133512 - RNA, 12 nt, Artificial Sequence
  Description of Artificial Sequence: Synthetic oligonucleotide
cuccacaagcgc

SEQ ID NO: 133513 - RNA, 14 nt, Artificial Sequence
  Description of Artificial Sequence: Synthetic oligonucleotide
gagaagauuccaaa

SEQ ID NO: 133514 - RNA, 13 nt, Artificial Sequence
  Description of Artificial Sequence: Synthetic oligonucleotide
aaucuggauucaa

SEQ ID NO: 133515 - RNA, 13 nt, Artificial Sequence
  Description of Artificial Sequence: Synthetic oligonucleotide
agaacagauuuga

SEQ ID NO: 133516 - RNA, 11 nt, Artificial Sequence
  Description of Artificial Sequence: Synthetic oligonucleotide
ccagagcugug

SEQ ID NO: 133517 - RNA, 12 nt, Artificial Sequence
  Description of Artificial Sequence: Synthetic oligonucleotide
ccucagauuguu

SEQ ID NO: 133518 - RNA, 12 nt, Artificial Sequence
  Description of Artificial Sequence: Synthetic oligonucleotide
cuauuuuaauua

SEQ ID NO: 133519 - RNA, 13 nt, Artificial Sequence
  Description of Artificial Sequence: Synthetic oligonucleotide
uuuaauuuauuaa

SEQ ID NO: 133520 - RNA, 12 nt, Artificial Sequence
  Description of Artificial Sequence: Synthetic oligonucleotide
augcaguuugaa

SEQ ID NO: 133521 - RNA, 11 nt, Artificial Sequence
  Description of Artificial Sequence: Synthetic oligonucleotide
caugcugcugg

SEQ ID NO: 133522 - RNA, 13 nt, Artificial Sequence
  Description of Artificial Sequence: Synthetic oligonucleotide
agaugugcauuuc

SEQ ID NO: 133523 - RNA, 12 nt, Artificial Sequence
  Description of Artificial Sequence: Synthetic oligonucleotide
ucaaaaccugug

SEQ ID NO: 133524 - RNA, 11 nt, Artificial Sequence
  Description of Artificial Sequence: Synthetic oligonucleotide
gaaugugggua

SEQ ID NO: 133525 - RNA, 10 nt, Artificial Sequence
  Description of Artificial Sequence: Synthetic oligonucleotide
auguggguag

SEQ ID NO: 133526 - RNA, 13 nt, Artificial Sequence
  Description of Artificial Sequence: Synthetic oligonucleotide
ugaaaaugagcau

SEQ ID NO: 133527 - RNA, 13 nt, Artificial Sequence
  Description of Artificial Sequence: Synthetic oligonucleotide
uugcuuuucaugu

SEQ ID NO: 133528 - RNA, 12 nt, Artificial Sequence
  Description of Artificial Sequence: Synthetic oligonucleotide
uguauuucuaua

SEQ ID NO: 133529 - RNA, 13 nt, Artificial Sequence
  Description of Artificial Sequence: Synthetic oligonucleotide
uuugauuaauguu

SEQ ID NO: 133530 - RNA, 12 nt, Artificial Sequence
  Description of Artificial Sequence: Synthetic oligonucleotide
caacguguauag

SEQ ID NO: 133531 - RNA, 12 nt, Artificial Sequence
  Description of Artificial Sequence: Synthetic oligonucleotide
cauauccuuggc

SEQ ID NO: 133532 - RNA, 13 nt, Artificial Sequence
  Description of Artificial Sequence: Synthetic oligonucleotide
uacuaacaucugg

SEQ ID NO: 133533 - RNA, 11 nt, Artificial Sequence
  Description of Artificial Sequence: Synthetic oligonucleotide
cauaaguugug

SEQ ID NO: 133534 - RNA, 12 nt, Artificial Sequence
  Description of Artificial Sequence: Synthetic oligonucleotide
gcaucauuuugg

SEQ ID NO: 133535 - RNA, 10 nt, Artificial Sequence
  Description of Artificial Sequence: Synthetic oligonucleotide
gcucuucuua

SEQ ID NO: 133536 - RNA, 10 nt, Artificial Sequence
  Description of Artificial Sequence: Synthetic oligonucleotide
agauuagguc

SEQ ID NO: 133537 - RNA, 12 nt, Artificial Sequence
  Description of Artificial Sequence: Synthetic oligonucleotide
auggaauugaaa

SEQ ID NO: 133538 - RNA, 13 nt, Artificial Sequence
  Description of Artificial Sequence: Synthetic oligonucleotide
cacacucauuccu

SEQ ID NO: 133539 - RNA, 12 nt, Artificial Sequence
  Description of Artificial Sequence: Synthetic oligonucleotide
uguagagguaac

SEQ ID NO: 133540 - RNA, 11 nt, Artificial Sequence
  Description of Artificial Sequence: Synthetic oligonucleotide
caaccacaugc

SEQ ID NO: 133541 - RNA, 12 nt, Artificial Sequence
  Description of Artificial Sequence: Synthetic oligonucleotide
ucggaaacaagu

SEQ ID NO: 133542 - RNA, 11 nt, Artificial Sequence
  Description of Artificial Sequence: Synthetic oligonucleotide
acucccaauaa

SEQ ID NO: 133543 - RNA, 13 nt, Artificial Sequence
  Description of Artificial Sequence: Synthetic oligonucleotide
aaugcuaagaaau

SEQ ID NO: 133544 - RNA, 11 nt, Artificial Sequence
  Description of Artificial Sequence: Synthetic oligonucleotide
gucuuucucua

SEQ ID NO: 133545 - RNA, 11 nt, Artificial Sequence
  Description of Artificial Sequence: Synthetic oligonucleotide
ugaauuucagg

SEQ ID NO: 133546 - RNA, 13 nt, Artificial Sequence
  Description of Artificial Sequence: Synthetic oligonucleotide
cgauucccucuca

SEQ ID NO: 133547 - RNA, 11 nt, Artificial Sequence
  Description of Artificial Sequence: Synthetic oligonucleotide
aggaaagugaa

SEQ ID NO: 133548 - RNA, 12 nt, Artificial Sequence
  Description of Artificial Sequence: Synthetic oligonucleotide
gaggcugcaugc

SEQ ID NO: 133549 - RNA, 11 nt, Artificial Sequence
  Description of Artificial Sequence: Synthetic oligonucleotide
ucucugaacag

SEQ ID NO: 133550 - RNA, 12 nt, Artificial Sequence
  Description of Artificial Sequence: Synthetic oligonucleotide
aacuuggcugua

SEQ ID NO: 133551 - RNA, 12 nt, Artificial Sequence
  Description of Artificial Sequence: Synthetic oligonucleotide
agaagccaaaau

SEQ ID NO: 133552 - RNA, 14 nt, Artificial Sequence
  Description of Artificial Sequence: Synthetic oligonucleotide
auuaaaagaagucc

SEQ ID NO: 133553 - RNA, 14 nt, Artificial Sequence
  Description of Artificial Sequence: Synthetic oligonucleotide
gaauccggauuauc

SEQ ID NO: 133554 - RNA, 12 nt, Artificial Sequence
  Description of Artificial Sequence: Synthetic oligonucleotide
aaugugacauca

SEQ ID NO: 133555 - RNA, 13 nt, Artificial Sequence
  Description of Artificial Sequence: Synthetic oligonucleotide
caucaaagcaagu

SEQ ID NO: 133556 - RNA, 11 nt, Artificial Sequence
  Description of Artificial Sequence: Synthetic oligonucleotide
agagagagaaa

SEQ ID NO: 133557 - RNA, 13 nt, Artificial Sequence
  Description of Artificial Sequence: Synthetic oligonucleotide
ucgcuguaguauu

SEQ ID NO: 133558 - RNA, 14 nt, Artificial Sequence
  Description of Artificial Sequence: Synthetic oligonucleotide
cgcuguaguauuua

SEQ ID NO: 133559 - RNA, 13 nt, Artificial Sequence
  Description of Artificial Sequence: Synthetic oligonucleotide
auuuaagcccaua

SEQ ID NO: 133560 - RNA, 15 nt, Artificial Sequence
  Description of Artificial Sequence: Synthetic oligonucleotide
auuaaaauaaacaug

SEQ ID NO: 133561 - RNA, 12 nt, Artificial Sequence
  Description of Artificial Sequence: Synthetic oligonucleotide
cuguucugaucg

SEQ ID NO: 133562 - RNA, 16 nt, Artificial Sequence
  Description of Artificial Sequence: Synthetic oligonucleotide
aaauaauuugaacuuu

SEQ ID NO: 133563 - RNA, 12 nt, Artificial Sequence
  Description of Artificial Sequence: Synthetic oligonucleotide
ugcgaccuuaau

SEQ ID NO: 133564 - RNA, 11 nt, Artificial Sequence
  Description of Artificial Sequence: Synthetic oligonucleotide
cugagaaagcu

SEQ ID NO: 133565 - RNA, 13 nt, Artificial Sequence
  Description of Artificial Sequence: Synthetic oligonucleotide
aguaaagaugcua

SEQ ID NO: 133566 - RNA, 12 nt, Artificial Sequence
  Description of Artificial Sequence: Synthetic oligonucleotide
cugcuuaauugc

SEQ ID NO: 133567 - RNA, 14 nt, Artificial Sequence
  Description of Artificial Sequence: Synthetic oligonucleotide
uaccauaugaauga

SEQ ID NO: 133568 - RNA, 12 nt, Artificial Sequence
  Description of Artificial Sequence: Synthetic oligonucleotide
aacuuucuuauc

SEQ ID NO: 133569 - RNA, 13 nt, Artificial Sequence
  Description of Artificial Sequence: Synthetic oligonucleotide
ccuugcaugacau

SEQ ID NO: 133570 - RNA, 14 nt, Artificial Sequence
  Description of Artificial Sequence: Synthetic oligonucleotide
ugaauuuguauaug

SEQ ID NO: 133571 - RNA, 12 nt, Artificial Sequence
  Description of Artificial Sequence: Synthetic oligonucleotide
gaauccuaguag

SEQ ID NO: 133572 - RNA, 10 nt, Artificial Sequence
  Description of Artificial Sequence: Synthetic oligonucleotide
gaaagggaag

SEQ ID NO: 133573 - RNA, 11 nt, Artificial Sequence
  Description of Artificial Sequence: Synthetic oligonucleotide
uaucggcaugc

SEQ ID NO: 133574 - RNA, 12 nt, Artificial Sequence
  Description of Artificial Sequence: Synthetic oligonucleotide
caccucauagua

SEQ ID NO: 133575 - RNA, 11 nt, Artificial Sequence
  Description of Artificial Sequence: Synthetic oligonucleotide
ccagaauugcc

SEQ ID NO: 133576 - RNA, 11 nt, Artificial Sequence
  Description of Artificial Sequence: Synthetic oligonucleotide
uggugaucugg

SEQ ID NO: 133577 - RNA, 12 nt, Artificial Sequence
  Description of Artificial Sequence: Synthetic oligonucleotide
gaucuggguaau

SEQ ID NO: 133578 - RNA, 12 nt, Artificial Sequence
  Description of Artificial Sequence: Synthetic oligonucleotide
ggaugugaugaa

SEQ ID NO: 133579 - RNA, 12 nt, Artificial Sequence
  Description of Artificial Sequence: Synthetic oligonucleotide
cauuuccacagc

SEQ ID NO: 133580 - RNA, 11 nt, Artificial Sequence
  Description of Artificial Sequence: Synthetic oligonucleotide
acagcuacacc

SEQ ID NO: 133581 - RNA, 12 nt, Artificial Sequence
  Description of Artificial Sequence: Synthetic oligonucleotide
ugcaguucuuac

SEQ ID NO: 133582 - RNA, 12 nt, Artificial Sequence
  Description of Artificial Sequence: Synthetic oligonucleotide
acgagaagaaga

SEQ ID NO: 133583 - RNA, 12 nt, Artificial Sequence
  Description of Artificial Sequence: Synthetic oligonucleotide
cgagaagaagau

SEQ ID NO: 133584 - RNA, 15 nt, Artificial Sequence
  Description of Artificial Sequence: Synthetic oligonucleotide
aagaagaucauuuac

SEQ ID NO: 133585 - RNA, 11 nt, Artificial Sequence
  Description of Artificial Sequence: Synthetic oligonucleotide
agaggaagagg

SEQ ID NO: 133586 - RNA, 12 nt, Artificial Sequence
  Description of Artificial Sequence: Synthetic oligonucleotide
gaggaagaggug

SEQ ID NO: 133587 - RNA, 13 nt, Artificial Sequence
  Description of Artificial Sequence: Synthetic oligonucleotide
cuacuuugagggc

SEQ ID NO: 133588 - RNA, 12 nt, Artificial Sequence
  Description of Artificial Sequence: Synthetic oligonucleotide
agggcaucuccu

SEQ ID NO: 133589 - RNA, 10 nt, Artificial Sequence
  Description of Artificial Sequence: Synthetic oligonucleotide
ggagugauau

SEQ ID NO: 133590 - RNA, 11 nt, Artificial Sequence
  Description of Artificial Sequence: Synthetic oligonucleotide
gagugauaugg

SEQ ID NO: 133591 - RNA, 12 nt, Artificial Sequence
  Description of Artificial Sequence: Synthetic oligonucleotide
ugcaguaaagau

SEQ ID NO: 133592 - RNA, 13 nt, Artificial Sequence
  Description of Artificial Sequence: Synthetic oligonucleotide
aguaaagauccua

SEQ ID NO: 133593 - RNA, 12 nt, Artificial Sequence
  Description of Artificial Sequence: Synthetic oligonucleotide
ugacaaaggaca

SEQ ID NO: 133594 - RNA, 13 nt, Artificial Sequence
  Description of Artificial Sequence: Synthetic oligonucleotide
gcaauugugaccc

SEQ ID NO: 133595 - RNA, 12 nt, Artificial Sequence
  Description of Artificial Sequence: Synthetic oligonucleotide
aacaucauccau

SEQ ID NO: 133596 - RNA, 12 nt, Artificial Sequence
  Description of Artificial Sequence: Synthetic oligonucleotide
ugaaauccaaca

SEQ ID NO: 133597 - RNA, 15 nt, Artificial Sequence
  Description of Artificial Sequence: Synthetic oligonucleotide
aacaauauauuucuc

SEQ ID NO: 133598 - RNA, 14 nt, Artificial Sequence
  Description of Artificial Sequence: Synthetic oligonucleotide
aacaguaaagucac

SEQ ID NO: 133599 - RNA, 14 nt, Artificial Sequence
  Description of Artificial Sequence: Synthetic oligonucleotide
ugugaagaaaguaa

SEQ ID NO: 133600 - RNA, 13 nt, Artificial Sequence
  Description of Artificial Sequence: Synthetic oligonucleotide
cuuccgagccauc

SEQ ID NO: 133601 - RNA, 12 nt, Artificial Sequence
  Description of Artificial Sequence: Synthetic oligonucleotide
aauggagguuga

SEQ ID NO: 133602 - RNA, 12 nt, Artificial Sequence
  Description of Artificial Sequence: Synthetic oligonucleotide
ggagguugaaua

SEQ ID NO: 133603 - RNA, 13 nt, Artificial Sequence
  Description of Artificial Sequence: Synthetic oligonucleotide
auuuugaguuuuc

SEQ ID NO: 133604 - RNA, 12 nt, Artificial Sequence
  Description of Artificial Sequence: Synthetic oligonucleotide
uauccuguuugu

SEQ ID NO: 133605 - RNA, 11 nt, Artificial Sequence
  Description of Artificial Sequence: Synthetic oligonucleotide
ccuguuuguuc

SEQ ID NO: 133606 - RNA, 10 nt, Artificial Sequence
  Description of Artificial Sequence: Synthetic oligonucleotide
cucuacagcc

SEQ ID NO: 133607 - RNA, 12 nt, Artificial Sequence
  Description of Artificial Sequence: Synthetic oligonucleotide
ucuuccauagcu

SEQ ID NO: 133608 - RNA, 12 nt, Artificial Sequence
  Description of Artificial Sequence: Synthetic oligonucleotide
auaaucuuccug

SEQ ID NO: 133609 - RNA, 12 nt, Artificial Sequence
  Description of Artificial Sequence: Synthetic oligonucleotide
uaaucuuccugu

SEQ ID NO: 133610 - RNA, 12 nt, Artificial Sequence
  Description of Artificial Sequence: Synthetic oligonucleotide
cuucaugacuug

SEQ ID NO: 133611 - RNA, 12 nt, Artificial Sequence
  Description of Artificial Sequence: Synthetic oligonucleotide
aagagggagaga

SEQ ID NO: 133612 - RNA, 12 nt, Artificial Sequence
  Description of Artificial Sequence: Synthetic oligonucleotide
cgucuccuacca

SEQ ID NO: 133613 - RNA, 12 nt, Artificial Sequence
  Description of Artificial Sequence: Synthetic oligonucleotide
gaucaaucggcc

SEQ ID NO: 133614 - RNA, 12 nt, Artificial Sequence
  Description of Artificial Sequence: Synthetic oligonucleotide
ggacgaacaucc

SEQ ID NO: 133615 - RNA, 11 nt, Artificial Sequence
  Description of Artificial Sequence: Synthetic oligonucleotide
agggucggaac

SEQ ID NO: 133616 - RNA, 10 nt, Artificial Sequence
  Description of Artificial Sequence: Synthetic oligonucleotide
ucggaaccca

SEQ ID NO: 133617 - RNA, 11 nt, Artificial Sequence
  Description of Artificial Sequence: Synthetic oligonucleotide
acccaagcuua

SEQ ID NO: 133618 - RNA, 14 nt, Artificial Sequence
  Description of Artificial Sequence: Synthetic oligonucleotide
gaacuuuaagcaac

SEQ ID NO: 133619 - RNA, 11 nt, Artificial Sequence
  Description of Artificial Sequence: Synthetic oligonucleotide
acuauucagug

SEQ ID NO: 133620 - RNA, 11 nt, Artificial Sequence
  Description of Artificial Sequence: Synthetic oligonucleotide
cuauucagugg

SEQ ID NO: 133621 - RNA, 13 nt, Artificial Sequence
  Description of Artificial Sequence: Synthetic oligonucleotide
aaacacagauaac

SEQ ID NO: 133622 - RNA, 12 nt, Artificial Sequence
  Description of Artificial Sequence: Synthetic oligonucleotide
cuuaagaaaaga

SEQ ID NO: 133623 - RNA, 12 nt, Artificial Sequence
  Description of Artificial Sequence: Synthetic oligonucleotide
cugaaggagugu

SEQ ID NO: 133624 - RNA, 10 nt, Artificial Sequence
  Description of Artificial Sequence: Synthetic oligonucleotide
ucaccgcggg

SEQ ID NO: 133625 - RNA, 14 nt, Artificial Sequence
  Description of Artificial Sequence: Synthetic oligonucleotide
agcagaaauaagcg

SEQ ID NO: 133626 - RNA, 12 nt, Artificial Sequence
  Description of Artificial Sequence: Synthetic oligonucleotide
aagcgugccguu

SEQ ID NO: 133627 - RNA, 12 nt, Artificial Sequence
  Description of Artificial Sequence: Synthetic oligonucleotide
agaaacagucac

SEQ ID NO: 133628 - RNA, 12 nt, Artificial Sequence
  Description of Artificial Sequence: Synthetic oligonucleotide
agaggaagaagg

SEQ ID NO: 133629 - RNA, 14 nt, Artificial Sequence
  Description of Artificial Sequence: Synthetic oligonucleotide
uguauucaaaauau

SEQ ID NO: 133630 - RNA, 13 nt, Artificial Sequence
  Description of Artificial Sequence: Synthetic oligonucleotide
auuuuccucccuu

SEQ ID NO: 133631 - RNA, 13 nt, Artificial Sequence
  Description of Artificial Sequence: Synthetic oligonucleotide
caaagaaagauag

SEQ ID NO: 133632 - RNA, 12 nt, Artificial Sequence
  Description of Artificial Sequence: Synthetic oligonucleotide
aagaaagauaga

SEQ ID NO: 133633 - RNA, 13 nt, Artificial Sequence
  Description of Artificial Sequence: Synthetic oligonucleotide
gaaagcauuuguu

SEQ ID NO: 133634 - RNA, 13 nt, Artificial Sequence
  Description of Artificial Sequence: Synthetic oligonucleotide
ugaguuaaacgaa

SEQ ID NO: 133635 - RNA, 12 nt, Artificial Sequence
  Description of Artificial Sequence: Synthetic oligonucleotide
acugauacagaa

SEQ ID NO: 133636 - RNA, 12 nt, Artificial Sequence
  Description of Artificial Sequence: Synthetic oligonucleotide
auauuauauaua

SEQ ID NO: 133637 - RNA, 12 nt, Artificial Sequence
  Description of Artificial Sequence: Synthetic oligonucleotide
auuauauauaua

SEQ ID NO: 133638 - RNA, 12 nt, Artificial Sequence
  Description of Artificial Sequence: Synthetic oligonucleotide
ucacuggaugua

SEQ ID NO: 133639 - RNA, 12 nt, Artificial Sequence
  Description of Artificial Sequence: Synthetic oligonucleotide
cagggaagagga

SEQ ID NO: 133640 - RNA, 15 nt, Artificial Sequence
  Description of Artificial Sequence: Synthetic oligonucleotide
augaucuuuuuuuug

SEQ ID NO: 133641 - RNA, 11 nt, Artificial Sequence
  Description of Artificial Sequence: Synthetic oligonucleotide
aguucacggcc

SEQ ID NO: 133642 - RNA, 13 nt, Artificial Sequence
  Description of Artificial Sequence: Synthetic oligonucleotide
caccaucacacca

SEQ ID NO: 133643 - RNA, 11 nt, Artificial Sequence
  Description of Artificial Sequence: Synthetic oligonucleotide
ccugcggguuu

SEQ ID NO: 133644 - RNA, 10 nt, Artificial Sequence
  Description of Artificial Sequence: Synthetic oligonucleotide
auccaguuug

SEQ ID NO: 133645 - RNA, 13 nt, Artificial Sequence
  Description of Artificial Sequence: Synthetic oligonucleotide
guuaaggacuucu

SEQ ID NO: 133646 - RNA, 13 nt, Artificial Sequence
  Description of Artificial Sequence: Synthetic oligonucleotide
cagugggacagag

SEQ ID NO: 133647 - RNA, 14 nt, Artificial Sequence
  Description of Artificial Sequence: Synthetic oligonucleotide
aauuuguuauugug

SEQ ID NO: 133648 - RNA, 13 nt, Artificial Sequence
  Description of Artificial Sequence: Synthetic oligonucleotide
uucaaaugcauuu

SEQ ID NO: 133649 - RNA, 10 nt, Artificial Sequence
  Description of Artificial Sequence: Synthetic oligonucleotide
caggaaagcc

SEQ ID NO: 133650 - RNA, 11 nt, Artificial Sequence
  Description of Artificial Sequence: Synthetic oligonucleotide
aggaaagcccu

SEQ ID NO: 133651 - RNA, 12 nt, Artificial Sequence
  Description of Artificial Sequence: Synthetic oligonucleotide
cccagcauggcc

SEQ ID NO: 133652 - RNA, 11 nt, Artificial Sequence
  Description of Artificial Sequence: Synthetic oligonucleotide
cuucucccuga

SEQ ID NO: 133653 - RNA, 12 nt, Artificial Sequence
  Description of Artificial Sequence: Synthetic oligonucleotide
gaagaagcccuu

SEQ ID NO: 133654 - RNA, 12 nt, Artificial Sequence
  Description of Artificial Sequence: Synthetic oligonucleotide
agaagcccuuca

SEQ ID NO: 133655 - RNA, 11 nt, Artificial Sequence
  Description of Artificial Sequence: Synthetic oligonucleotide
gcccuucagcg

SEQ ID NO: 133656 - RNA, 11 nt, Artificial Sequence
  Description of Artificial Sequence: Synthetic oligonucleotide
ccuucagcggc

SEQ ID NO: 133657 - RNA, 12 nt, Artificial Sequence
  Description of Artificial Sequence: Synthetic oligonucleotide
ucagcggccagu

SEQ ID NO: 133658 - RNA, 12 nt, Artificial Sequence
  Description of Artificial Sequence: Synthetic oligonucleotide
ugaaaagcuccg

SEQ ID NO: 133659 - RNA, 11 nt, Artificial Sequence
  Description of Artificial Sequence: Synthetic oligonucleotide
aaaagcuccgg

SEQ ID NO: 133660 - RNA, 13 nt, Artificial Sequence
  Description of Artificial Sequence: Synthetic oligonucleotide
agucaacagucug

SEQ ID NO: 133661 - RNA, 13 nt, Artificial Sequence
  Description of Artificial Sequence: Synthetic oligonucleotide
cagaguucaaaag

SEQ ID NO: 133662 - RNA, 13 nt, Artificial Sequence
  Description of Artificial Sequence: Synthetic oligonucleotide
agaguucaaaagc

SEQ ID NO: 133663 - RNA, 12 nt, Artificial Sequence
  Description of Artificial Sequence: Synthetic oligonucleotide
uucaaaagcccu

SEQ ID NO: 133664 - RNA, 12 nt, Artificial Sequence
  Description of Artificial Sequence: Synthetic oligonucleotide
ucaaaagcccuu

SEQ ID NO: 133665 - RNA, 12 nt, Artificial Sequence
  Description of Artificial Sequence: Synthetic oligonucleotide
aaaagcccuuca

SEQ ID NO: 133666 - RNA, 12 nt, Artificial Sequence
  Description of Artificial Sequence: Synthetic oligonucleotide
aaagcccuucag

SEQ ID NO: 133667 - RNA, 13 nt, Artificial Sequence
  Description of Artificial Sequence: Synthetic oligonucleotide
gugaagccgcucg

SEQ ID NO: 133668 - RNA, 12 nt, Artificial Sequence
  Description of Artificial Sequence: Synthetic oligonucleotide
cacgccagucaa

SEQ ID NO: 133669 - RNA, 13 nt, Artificial Sequence
  Description of Artificial Sequence: Synthetic oligonucleotide
uucuuggugcgug

SEQ ID NO: 133670 - RNA, 14 nt, Artificial Sequence
  Description of Artificial Sequence: Synthetic oligonucleotide
auuggauucaucag

SEQ ID NO: 133671 - RNA, 13 nt, Artificial Sequence
  Description of Artificial Sequence: Synthetic oligonucleotide
uggaauaccuaag

SEQ ID NO: 133672 - RNA, 12 nt, Artificial Sequence
  Description of Artificial Sequence: Synthetic oligonucleotide
auuugaggcuca

SEQ ID NO: 133673 - RNA, 11 nt, Artificial Sequence
  Description of Artificial Sequence: Synthetic oligonucleotide
ucuacaauugg

SEQ ID NO: 133674 - RNA, 12 nt, Artificial Sequence
  Description of Artificial Sequence: Synthetic oligonucleotide
uaguuaggagcc

SEQ ID NO: 133675 - RNA, 13 nt, Artificial Sequence
  Description of Artificial Sequence: Synthetic oligonucleotide
agucaauauccac

SEQ ID NO: 133676 - RNA, 13 nt, Artificial Sequence
  Description of Artificial Sequence: Synthetic oligonucleotide
auguucagucaca

SEQ ID NO: 133677 - RNA, 12 nt, Artificial Sequence
  Description of Artificial Sequence: Synthetic oligonucleotide
acacacacauac

SEQ ID NO: 133678 - RNA, 12 nt, Artificial Sequence
  Description of Artificial Sequence: Synthetic oligonucleotide
uuccuuuugcuu

SEQ ID NO: 133679 - RNA, 16 nt, Artificial Sequence
  Description of Artificial Sequence: Synthetic oligonucleotide
uuuuaaaguaauuuuu

SEQ ID NO: 133680 - RNA, 13 nt, Artificial Sequence
  Description of Artificial Sequence: Synthetic oligonucleotide
caacagucaaugg

SEQ ID NO: 133681 - RNA, 13 nt, Artificial Sequence
  Description of Artificial Sequence: Synthetic oligonucleotide
ucgacaaaccaau

SEQ ID NO: 133682 - RNA, 12 nt, Artificial Sequence
  Description of Artificial Sequence: Synthetic oligonucleotide
acugcuaccacu

SEQ ID NO: 133683 - RNA, 13 nt, Artificial Sequence
  Description of Artificial Sequence: Synthetic oligonucleotide
gcaagcggucuua

SEQ ID NO: 133684 - RNA, 13 nt, Artificial Sequence
  Description of Artificial Sequence: Synthetic oligonucleotide
ggucuuaccggcu

SEQ ID NO: 133685 - RNA, 11 nt, Artificial Sequence
  Description of Artificial Sequence: Synthetic oligonucleotide
gauggguuacc

SEQ ID NO: 133686 - RNA, 11 nt, Artificial Sequence
  Description of Artificial Sequence: Synthetic oligonucleotide
guuaccugcga

SEQ ID NO: 133687 - RNA, 12 nt, Artificial Sequence
  Description of Artificial Sequence: Synthetic oligonucleotide
aaucuugcugag

SEQ ID NO: 133688 - RNA, 13 nt, Artificial Sequence
  Description of Artificial Sequence: Synthetic oligonucleotide
agcauaaaacagu

SEQ ID NO: 133689 - RNA, 12 nt, Artificial Sequence
  Description of Artificial Sequence: Synthetic oligonucleotide
guccuuuauccu

SEQ ID NO: 133690 - RNA, 12 nt, Artificial Sequence
  Description of Artificial Sequence: Synthetic oligonucleotide
caacgcaaguug

SEQ ID NO: 133691 - RNA, 13 nt, Artificial Sequence
  Description of Artificial Sequence: Synthetic oligonucleotide
aaacugaaaccau

SEQ ID NO: 133692 - RNA, 14 nt, Artificial Sequence
  Description of Artificial Sequence: Synthetic oligonucleotide
acuuuguuaaauau

SEQ ID NO: 133693 - RNA, 14 nt, Artificial Sequence
  Description of Artificial Sequence: Synthetic oligonucleotide
guauauuaaaaguu

SEQ ID NO: 133694 - RNA, 13 nt, Artificial Sequence
  Description of Artificial Sequence: Synthetic oligonucleotide
guuuugacuuaac

SEQ ID NO: 133695 - RNA, 13 nt, Artificial Sequence
  Description of Artificial Sequence: Synthetic oligonucleotide
gcaaacucagcac

SEQ ID NO: 133696 - RNA, 11 nt, Artificial Sequence
  Description of Artificial Sequence: Synthetic oligonucleotide
ugcugaccuca

SEQ ID NO: 133697 - RNA, 14 nt, Artificial Sequence
  Description of Artificial Sequence: Synthetic oligonucleotide
uuuauucagaucgc

SEQ ID NO: 133698 - RNA, 13 nt, Artificial Sequence
  Description of Artificial Sequence: Synthetic oligonucleotide
aggguucugggau

SEQ ID NO: 133699 - RNA, 15 nt, Artificial Sequence
  Description of Artificial Sequence: Synthetic oligonucleotide
auauuggaaauuaug

SEQ ID NO: 133700 - RNA, 13 nt, Artificial Sequence
  Description of Artificial Sequence: Synthetic oligonucleotide
auggaagcacuag

SEQ ID NO: 133701 - RNA, 13 nt, Artificial Sequence
  Description of Artificial Sequence: Synthetic oligonucleotide
guuuuuaugugga

SEQ ID NO: 133702 - RNA, 12 nt, Artificial Sequence
  Description of Artificial Sequence: Synthetic oligonucleotide
ggaauugguaga

SEQ ID NO: 133703 - RNA, 13 nt, Artificial Sequence
  Description of Artificial Sequence: Synthetic oligonucleotide
uuagacuuggaga

SEQ ID NO: 133704 - RNA, 13 nt, Artificial Sequence
  Description of Artificial Sequence: Synthetic oligonucleotide
uuacaguauucca

SEQ ID NO: 133705 - RNA, 15 nt, Artificial Sequence
  Description of Artificial Sequence: Synthetic oligonucleotide
ccacugaugaauuaa

SEQ ID NO: 133706 - RNA, 12 nt, Artificial Sequence
  Description of Artificial Sequence: Synthetic oligonucleotide
ccacaucaucac

SEQ ID NO: 133707 - RNA, 13 nt, Artificial Sequence
  Description of Artificial Sequence: Synthetic oligonucleotide
cucaccaaacaga

SEQ ID NO: 133708 - RNA, 12 nt, Artificial Sequence
  Description of Artificial Sequence: Synthetic oligonucleotide
ggaacaugaugg

SEQ ID NO: 133709 - RNA, 12 nt, Artificial Sequence
  Description of Artificial Sequence: Synthetic oligonucleotide
cauguagacugc

SEQ ID NO: 133710 - RNA, 13 nt, Artificial Sequence
  Description of Artificial Sequence: Synthetic oligonucleotide
ggaucuauuuaug

SEQ ID NO: 133711 - RNA, 12 nt, Artificial Sequence
  Description of Artificial Sequence: Synthetic oligonucleotide
gcacuauuauca

SEQ ID NO: 133712 - RNA, 11 nt, Artificial Sequence
  Description of Artificial Sequence: Synthetic oligonucleotide
aucaguucugc

SEQ ID NO: 133713 - RNA, 13 nt, Artificial Sequence
  Description of Artificial Sequence: Synthetic oligonucleotide
agauuaaaccuac

SEQ ID NO: 133714 - RNA, 13 nt, Artificial Sequence
  Description of Artificial Sequence: Synthetic oligonucleotide
auaaaauccuucu

SEQ ID NO: 133715 - RNA, 12 nt, Artificial Sequence
  Description of Artificial Sequence: Synthetic oligonucleotide
aaugcuguagac

SEQ ID NO: 133716 - RNA, 13 nt, Artificial Sequence
  Description of Artificial Sequence: Synthetic oligonucleotide
uugauaggaauag

SEQ ID NO: 133717 - RNA, 11 nt, Artificial Sequence
  Description of Artificial Sequence: Synthetic oligonucleotide
aauggcccuga

SEQ ID NO: 133718 - RNA, 11 nt, Artificial Sequence
  Description of Artificial Sequence: Synthetic oligonucleotide
uuccucaagca

SEQ ID NO: 133719 - RNA, 10 nt, Artificial Sequence
  Description of Artificial Sequence: Synthetic oligonucleotide
guucagccca

SEQ ID NO: 133720 - RNA, 11 nt, Artificial Sequence
  Description of Artificial Sequence: Synthetic oligonucleotide
gcugcugaacc

SEQ ID NO: 133721 - RNA, 12 nt, Artificial Sequence
  Description of Artificial Sequence: Synthetic oligonucleotide
aaguucucuuca

SEQ ID NO: 133722 - RNA, 11 nt, Artificial Sequence
  Description of Artificial Sequence: Synthetic oligonucleotide
ccagccuagag

SEQ ID NO: 133723 - RNA, 13 nt, Artificial Sequence
  Description of Artificial Sequence: Synthetic oligonucleotide
cucugugaagugu

SEQ ID NO: 133724 - RNA, 14 nt, Artificial Sequence
  Description of Artificial Sequence: Synthetic oligonucleotide
ugagaaaauuucaa

SEQ ID NO: 133725 - RNA, 11 nt, Artificial Sequence
  Description of Artificial Sequence: Synthetic oligonucleotide
aauccuccuga

SEQ ID NO: 133726 - RNA, 12 nt, Artificial Sequence
  Description of Artificial Sequence: Synthetic oligonucleotide
gugacaucauau

SEQ ID NO: 133727 - RNA, 13 nt, Artificial Sequence
  Description of Artificial Sequence: Synthetic oligonucleotide
aaucuucaucaua

SEQ ID NO: 133728 - RNA, 13 nt, Artificial Sequence
  Description of Artificial Sequence: Synthetic oligonucleotide
gacuagcuauuaa

SEQ ID NO: 133729 - RNA, 14 nt, Artificial Sequence
  Description of Artificial Sequence: Synthetic oligonucleotide
ucucuacuaaaaau

SEQ ID NO: 133730 - RNA, 12 nt, Artificial Sequence
  Description of Artificial Sequence: Synthetic oligonucleotide
ucuaucucgccu

SEQ ID NO: 133731 - RNA, 13 nt, Artificial Sequence
  Description of Artificial Sequence: Synthetic oligonucleotide
cuucgguccaguu

SEQ ID NO: 133732 - RNA, 11 nt, Artificial Sequence
  Description of Artificial Sequence: Synthetic oligonucleotide
gauguagccgc

SEQ ID NO: 133733 - RNA, 12 nt, Artificial Sequence
  Description of Artificial Sequence: Synthetic oligonucleotide
ugaggagacuug

SEQ ID NO: 133734 - RNA, 12 nt, Artificial Sequence
  Description of Artificial Sequence: Synthetic oligonucleotide
gaguagugagga

SEQ ID NO: 133735 - RNA, 14 nt, Artificial Sequence
  Description of Artificial Sequence: Synthetic oligonucleotide
cagaugaguacaaa

SEQ ID NO: 133736 - RNA, 13 nt, Artificial Sequence
  Description of Artificial Sequence: Synthetic oligonucleotide
guuguuaaugggc

SEQ ID NO: 133737 - RNA, 13 nt, Artificial Sequence
  Description of Artificial Sequence: Synthetic oligonucleotide
uuuuuaauuuauu

SEQ ID NO: 133738 - RNA, 12 nt, Artificial Sequence
  Description of Artificial Sequence: Synthetic oligonucleotide
uauuuaaauaug

SEQ ID NO: 133739 - RNA, 13 nt, Artificial Sequence
  Description of Artificial Sequence: Synthetic oligonucleotide
uauccuuuguuuc

SEQ ID NO: 133740 - RNA, 14 nt, Artificial Sequence
  Description of Artificial Sequence: Synthetic oligonucleotide
cgucuaaguguuug

SEQ ID NO: 133741 - RNA, 12 nt, Artificial Sequence
  Description of Artificial Sequence: Synthetic oligonucleotide
accugugacaaa

SEQ ID NO: 133742 - RNA, 13 nt, Artificial Sequence
  Description of Artificial Sequence: Synthetic oligonucleotide
ccaggcugaauua

SEQ ID NO: 133743 - RNA, 14 nt, Artificial Sequence
  Description of Artificial Sequence: Synthetic oligonucleotide
gucauucuuacaau

SEQ ID NO: 133744 - RNA, 15 nt, Artificial Sequence
  Description of Artificial Sequence: Synthetic oligonucleotide
ucauucuuacaauug

SEQ ID NO: 133745 - RNA, 12 nt, Artificial Sequence
  Description of Artificial Sequence: Synthetic oligonucleotide
cagagaguguac

SEQ ID NO: 133746 - RNA, 12 nt, Artificial Sequence
  Description of Artificial Sequence: Synthetic oligonucleotide
agaacucagcag

SEQ ID NO: 133747 - RNA, 13 nt, Artificial Sequence
  Description of Artificial Sequence: Synthetic oligonucleotide
uuuauuuucagua

SEQ ID NO: 133748 - RNA, 12 nt, Artificial Sequence
  Description of Artificial Sequence: Synthetic oligonucleotide
ucuuaaauggaa

SEQ ID NO: 133749 - RNA, 13 nt, Artificial Sequence
  Description of Artificial Sequence: Synthetic oligonucleotide
ugccuaaaauugu

SEQ ID NO: 133750 - RNA, 12 nt, Artificial Sequence
  Description of Artificial Sequence: Synthetic oligonucleotide
agacugugagcu

SEQ ID NO: 133751 - RNA, 14 nt, Artificial Sequence
  Description of Artificial Sequence: Synthetic oligonucleotide
ugcuuuuuauuaau

SEQ ID NO: 133752 - RNA, 13 nt, Artificial Sequence
  Description of Artificial Sequence: Synthetic oligonucleotide
cucuucuuacauu

SEQ ID NO: 133753 - RNA, 15 nt, Artificial Sequence
  Description of Artificial Sequence: Synthetic oligonucleotide
cauuuguaaaaaugu

SEQ ID NO: 133754 - RNA, 15 nt, Artificial Sequence
  Description of Artificial Sequence: Synthetic oligonucleotide
aucuuaauucauauu

SEQ ID NO: 133755 - RNA, 13 nt, Artificial Sequence
  Description of Artificial Sequence: Synthetic oligonucleotide
gaacuaaucauga

SEQ ID NO: 133756 - RNA, 12 nt, Artificial Sequence
  Description of Artificial Sequence: Synthetic oligonucleotide
ucugcucuuggg

SEQ ID NO: 133757 - RNA, 13 nt, Artificial Sequence
  Description of Artificial Sequence: Synthetic oligonucleotide
caguagcuuugag

SEQ ID NO: 133758 - RNA, 14 nt, Artificial Sequence
  Description of Artificial Sequence: Synthetic oligonucleotide
cacguaauauuuca

SEQ ID NO: 133759 - RNA, 13 nt, Artificial Sequence
  Description of Artificial Sequence: Synthetic oligonucleotide
uauucucuucacu

SEQ ID NO: 133760 - RNA, 14 nt, Artificial Sequence
  Description of Artificial Sequence: Synthetic oligonucleotide
cuaaugcuaagaaa

SEQ ID NO: 133761 - RNA, 12 nt, Artificial Sequence
  Description of Artificial Sequence: Synthetic oligonucleotide
gcugaaaaucaa

SEQ ID NO: 133762 - RNA, 14 nt, Artificial Sequence
  Description of Artificial Sequence: Synthetic oligonucleotide
aauaugauuacuuu

SEQ ID NO: 133763 - RNA, 14 nt, Artificial Sequence
  Description of Artificial Sequence: Synthetic oligonucleotide
cauuuuguucuaca

SEQ ID NO: 133764 - RNA, 12 nt, Artificial Sequence
  Description of Artificial Sequence: Synthetic oligonucleotide
cccgggacucuc

SEQ ID NO: 133765 - RNA, 14 nt, Artificial Sequence
  Description of Artificial Sequence: Synthetic oligonucleotide
ccuuuaaaguaaag

SEQ ID NO: 133766 - RNA, 13 nt, Artificial Sequence
  Description of Artificial Sequence: Synthetic oligonucleotide
ucuggaagccugg

SEQ ID NO: 133767 - RNA, 14 nt, Artificial Sequence
  Description of Artificial Sequence: Synthetic oligonucleotide
aaaacaaaagagag

SEQ ID NO: 133768 - RNA, 13 nt, Artificial Sequence
  Description of Artificial Sequence: Synthetic oligonucleotide
aucaguuaugccg

SEQ ID NO: 133769 - RNA, 13 nt, Artificial Sequence
  Description of Artificial Sequence: Synthetic oligonucleotide
uaaaagaagucca

SEQ ID NO: 133770 - RNA, 11 nt, Artificial Sequence
  Description of Artificial Sequence: Synthetic oligonucleotide
aggugagguua

SEQ ID NO: 133771 - RNA, 11 nt, Artificial Sequence
  Description of Artificial Sequence: Synthetic oligonucleotide
gggaagaggac

SEQ ID NO: 133772 - RNA, 13 nt, Artificial Sequence
  Description of Artificial Sequence: Synthetic oligonucleotide
aagcaaguauugu

SEQ ID NO: 133773 - RNA, 12 nt, Artificial Sequence
  Description of Artificial Sequence: Synthetic oligonucleotide
auuguagcacuc

SEQ ID NO: 133774 - RNA, 14 nt, Artificial Sequence
  Description of Artificial Sequence: Synthetic oligonucleotide
acaaaaccacaaau

SEQ ID NO: 133775 - RNA, 12 nt, Artificial Sequence
  Description of Artificial Sequence: Synthetic oligonucleotide
uaagcccauaca

SEQ ID NO: 133776 - RNA, 11 nt, Artificial Sequence
  Description of Artificial Sequence: Synthetic oligonucleotide
agcccauacag

SEQ ID NO: 133777 - RNA, 12 nt, Artificial Sequence
  Description of Artificial Sequence: Synthetic oligonucleotide
cagaaaccuucc

SEQ ID NO: 133778 - RNA, 10 nt, Artificial Sequence
  Description of Artificial Sequence: Synthetic oligonucleotide
guauaccuac

SEQ ID NO: 133779 - RNA, 13 nt, Artificial Sequence
  Description of Artificial Sequence: Synthetic oligonucleotide
gccaguuuucgga

SEQ ID NO: 133780 - RNA, 9 nt, Artificial Sequence
  Description of Artificial Sequence: Synthetic oligonucleotide
ggaacaggg

SEQ ID NO: 133781 - RNA, 13 nt, Artificial Sequence
  Description of Artificial Sequence: Synthetic oligonucleotide
uuaacuuuccagu

SEQ ID NO: 133782 - RNA, 14 nt, Artificial Sequence
  Description of Artificial Sequence: Synthetic oligonucleotide
aaaguuugguuuug

SEQ ID NO: 133783 - RNA, 12 nt, Artificial Sequence
  Description of Artificial Sequence: Synthetic oligonucleotide
cuucccacugua

SEQ ID NO: 133784 - RNA, 13 nt, Artificial Sequence
  Description of Artificial Sequence: Synthetic oligonucleotide
ugauaccauauga

SEQ ID NO: 133785 - RNA, 11 nt, Artificial Sequence
  Description of Artificial Sequence: Synthetic oligonucleotide
aacaugggcug

SEQ ID NO: 133786 - RNA, 13 nt, Artificial Sequence
  Description of Artificial Sequence: Synthetic oligonucleotide
caacuuuuucaua

SEQ ID NO: 133787 - RNA, 12 nt, Artificial Sequence
  Description of Artificial Sequence: Synthetic oligonucleotide
caugaggccgga

SEQ ID NO: 133788 - RNA, 11 nt, Artificial Sequence
  Description of Artificial Sequence: Synthetic oligonucleotide
acugcauuugu

SEQ ID NO: 133789 - RNA, 13 nt, Artificial Sequence
  Description of Artificial Sequence: Synthetic oligonucleotide
aauguuuacuacc

SEQ ID NO: 133790 - RNA, 15 nt, Artificial Sequence
  Description of Artificial Sequence: Synthetic oligonucleotide
aauuuuuugaugaaa

SEQ ID NO: 133791 - RNA, 14 nt, Artificial Sequence
  Description of Artificial Sequence: Synthetic oligonucleotide
cagugugugaauuu

SEQ ID NO: 133792 - RNA, 13 nt, Artificial Sequence
  Description of Artificial Sequence: Synthetic oligonucleotide
gagcaauguaugu

SEQ ID NO: 133793 - RNA, 14 nt, Artificial Sequence
  Description of Artificial Sequence: Synthetic oligonucleotide
aaagcacauauaua

SEQ ID NO: 133794 - RNA, 14 nt, Artificial Sequence
  Description of Artificial Sequence: Synthetic oligonucleotide
guaauaguuucucc

SEQ ID NO: 133795 - RNA, 13 nt, Artificial Sequence
  Description of Artificial Sequence: Synthetic oligonucleotide
aguuucuccaaau

SEQ ID NO: 133796 - RNA, 13 nt, Artificial Sequence
  Description of Artificial Sequence: Synthetic oligonucleotide
uacuuccuagaaa

SEQ ID NO: 133797 - RNA, 13 nt, Artificial Sequence
  Description of Artificial Sequence: Synthetic oligonucleotide
uacaccauauaug

SEQ ID NO: 133798 - RNA, 14 nt, Artificial Sequence
  Description of Artificial Sequence: Synthetic oligonucleotide
auauaugaauggag

SEQ ID NO: 133799 - RNA, 13 nt, Artificial Sequence
  Description of Artificial Sequence: Synthetic oligonucleotide
acgagaagaagau

SEQ ID NO: 133800 - RNA, 13 nt, Artificial Sequence
  Description of Artificial Sequence: Synthetic oligonucleotide
ucauuuacaggga

SEQ ID NO: 133801 - RNA, 13 nt, Artificial Sequence
  Description of Artificial Sequence: Synthetic oligonucleotide
cauuuacagggac

SEQ ID NO: 133802 - RNA, 10 nt, Artificial Sequence
  Description of Artificial Sequence: Synthetic oligonucleotide
agggaccuga

SEQ ID NO: 133803 - RNA, 14 nt, Artificial Sequence
  Description of Artificial Sequence: Synthetic oligonucleotide
uguuugacugcauc

SEQ ID NO: 133804 - RNA, 13 nt, Artificial Sequence
  Description of Artificial Sequence: Synthetic oligonucleotide
uuugacugcaucg

SEQ ID NO: 133805 - RNA, 12 nt, Artificial Sequence
  Description of Artificial Sequence: Synthetic oligonucleotide
gaguucacaggg

SEQ ID NO: 133806 - RNA, 13 nt, Artificial Sequence
  Description of Artificial Sequence: Synthetic oligonucleotide
ggcaccucugucc

SEQ ID NO: 133807 - RNA, 15 nt, Artificial Sequence
  Description of Artificial Sequence: Synthetic oligonucleotide
gguuugucuuuuuaa

SEQ ID NO: 133808 - RNA, 14 nt, Artificial Sequence
  Description of Artificial Sequence: Synthetic oligonucleotide
uuugucuuuuuaag

SEQ ID NO: 133809 - RNA, 13 nt, Artificial Sequence
  Description of Artificial Sequence: Synthetic oligonucleotide
ccuaaagguuguc

SEQ ID NO: 133810 - RNA, 12 nt, Artificial Sequence
  Description of Artificial Sequence: Synthetic oligonucleotide
aagguugucgac

SEQ ID NO: 133811 - RNA, 13 nt, Artificial Sequence
  Description of Artificial Sequence: Synthetic oligonucleotide
accuggcaauugu

SEQ ID NO: 133812 - RNA, 12 nt, Artificial Sequence
  Description of Artificial Sequence: Synthetic oligonucleotide
aguggugcgagg

SEQ ID NO: 133813 - RNA, 13 nt, Artificial Sequence
  Description of Artificial Sequence: Synthetic oligonucleotide
agagacaugaaau

SEQ ID NO: 133814 - RNA, 13 nt, Artificial Sequence
  Description of Artificial Sequence: Synthetic oligonucleotide
auauauuucucca

SEQ ID NO: 133815 - RNA, 10 nt, Artificial Sequence
  Description of Artificial Sequence: Synthetic oligonucleotide
caugaaggcu

SEQ ID NO: 133816 - RNA, 11 nt, Artificial Sequence
  Description of Artificial Sequence: Synthetic oligonucleotide
gcuggaguggu

SEQ ID NO: 133817 - RNA, 11 nt, Artificial Sequence
  Description of Artificial Sequence: Synthetic oligonucleotide
aggaagagagg

SEQ ID NO: 133818 - RNA, 12 nt, Artificial Sequence
  Description of Artificial Sequence: Synthetic oligonucleotide
cuugcaucgggc

SEQ ID NO: 133819 - RNA, 13 nt, Artificial Sequence
  Description of Artificial Sequence: Synthetic oligonucleotide
auauccuacugug

SEQ ID NO: 133820 - RNA, 13 nt, Artificial Sequence
  Description of Artificial Sequence: Synthetic oligonucleotide
uccuacuguguaa

SEQ ID NO: 133821 - RNA, 12 nt, Artificial Sequence
  Description of Artificial Sequence: Synthetic oligonucleotide
ccuuguagugua

SEQ ID NO: 133822 - RNA, 13 nt, Artificial Sequence
  Description of Artificial Sequence: Synthetic oligonucleotide
ucuuuguugauug

SEQ ID NO: 133823 - RNA, 14 nt, Artificial Sequence
  Description of Artificial Sequence: Synthetic oligonucleotide
uuuguugauugaaa

SEQ ID NO: 133824 - RNA, 15 nt, Artificial Sequence
  Description of Artificial Sequence: Synthetic oligonucleotide
uucuuuuucuuccau

SEQ ID NO: 133825 - RNA, 13 nt, Artificial Sequence
  Description of Artificial Sequence: Synthetic oligonucleotide
aaucuuccuucua

SEQ ID NO: 133826 - RNA, 13 nt, Artificial Sequence
  Description of Artificial Sequence: Synthetic oligonucleotide
uugaaugcuucau

SEQ ID NO: 133827 - RNA, 13 nt, Artificial Sequence
  Description of Artificial Sequence: Synthetic oligonucleotide
ugaaugcuucaug

SEQ ID NO: 133828 - RNA, 13 nt, Artificial Sequence
  Description of Artificial Sequence: Synthetic oligonucleotide
aauucuacuuuga

SEQ ID NO: 133829 - RNA, 13 nt, Artificial Sequence
  Description of Artificial Sequence: Synthetic oligonucleotide
agcaacuacagac

SEQ ID NO: 133830 - RNA, 13 nt, Artificial Sequence
  Description of Artificial Sequence: Synthetic oligonucleotide
gaccaaggucaac

SEQ ID NO: 133831 - RNA, 13 nt, Artificial Sequence
  Description of Artificial Sequence: Synthetic oligonucleotide
cgacuaucucgac

SEQ ID NO: 133832 - RNA, 13 nt, Artificial Sequence
  Description of Artificial Sequence: Synthetic oligonucleotide
aaccuucccaaac

SEQ ID NO: 133833 - RNA, 14 nt, Artificial Sequence
  Description of Artificial Sequence: Synthetic oligonucleotide
ccaagcuuagaacu

SEQ ID NO: 133834 - RNA, 15 nt, Artificial Sequence
  Description of Artificial Sequence: Synthetic oligonucleotide
agcuuagaacuuuaa

SEQ ID NO: 133835 - RNA, 11 nt, Artificial Sequence
  Description of Artificial Sequence: Synthetic oligonucleotide
aagaccaccac

SEQ ID NO: 133836 - RNA, 14 nt, Artificial Sequence
  Description of Artificial Sequence: Synthetic oligonucleotide
gcgagaaauaaagu

SEQ ID NO: 133837 - RNA, 14 nt, Artificial Sequence
  Description of Artificial Sequence: Synthetic oligonucleotide
cgagaaauaaaguu

SEQ ID NO: 133838 - RNA, 12 nt, Artificial Sequence
  Description of Artificial Sequence: Synthetic oligonucleotide
aggaaaugaucc

SEQ ID NO: 133839 - RNA, 13 nt, Artificial Sequence
  Description of Artificial Sequence: Synthetic oligonucleotide
gaagaaaugaaac

SEQ ID NO: 133840 - RNA, 13 nt, Artificial Sequence
  Description of Artificial Sequence: Synthetic oligonucleotide
guuuccauccucc

SEQ ID NO: 133841 - RNA, 15 nt, Artificial Sequence
  Description of Artificial Sequence: Synthetic oligonucleotide
acugaaaaucuuuga

SEQ ID NO: 133842 - RNA, 11 nt, Artificial Sequence
  Description of Artificial Sequence: Synthetic oligonucleotide
ugccguucagg

SEQ ID NO: 133843 - RNA, 13 nt, Artificial Sequence
  Description of Artificial Sequence: Synthetic oligonucleotide
caggguccagaag

SEQ ID NO: 133844 - RNA, 13 nt, Artificial Sequence
  Description of Artificial Sequence: Synthetic oligonucleotide
ucaagacugcuug

SEQ ID NO: 133845 - RNA, 13 nt, Artificial Sequence
  Description of Artificial Sequence: Synthetic oligonucleotide
uccaugucuuugg

SEQ ID NO: 133846 - RNA, 11 nt, Artificial Sequence
  Description of Artificial Sequence: Synthetic oligonucleotide
gccugaaacac

SEQ ID NO: 133847 - RNA, 12 nt, Artificial Sequence
  Description of Artificial Sequence: Synthetic oligonucleotide
ucucuguaccuc

SEQ ID NO: 133848 - RNA, 12 nt, Artificial Sequence
  Description of Artificial Sequence: Synthetic oligonucleotide
agcaagacaaga

SEQ ID NO: 133849 - RNA, 13 nt, Artificial Sequence
  Description of Artificial Sequence: Synthetic oligonucleotide
gcaagacaagaaa

SEQ ID NO: 133850 - RNA, 12 nt, Artificial Sequence
  Description of Artificial Sequence: Synthetic oligonucleotide
uguacaagaucc

SEQ ID NO: 133851 - RNA, 12 nt, Artificial Sequence
  Description of Artificial Sequence: Synthetic oligonucleotide
cguacuugcaga

SEQ ID NO: 133852 - RNA, 13 nt, Artificial Sequence
  Description of Artificial Sequence: Synthetic oligonucleotide
cgaucgauacaga

SEQ ID NO: 133853 - RNA, 13 nt, Artificial Sequence
  Description of Artificial Sequence: Synthetic oligonucleotide
uauaaaaauaaau

SEQ ID NO: 133854 - RNA, 13 nt, Artificial Sequence
  Description of Artificial Sequence: Synthetic oligonucleotide
uaaaaauaaauau

SEQ ID NO: 133855 - RNA, 13 nt, Artificial Sequence
  Description of Artificial Sequence: Synthetic oligonucleotide
uuugacugcugug

SEQ ID NO: 133856 - RNA, 13 nt, Artificial Sequence
  Description of Artificial Sequence: Synthetic oligonucleotide
ggagaugagagac

SEQ ID NO: 133857 - RNA, 10 nt, Artificial Sequence
  Description of Artificial Sequence: Synthetic oligonucleotide
ucccacuugg

SEQ ID NO: 133858 - RNA, 10 nt, Artificial Sequence
  Description of Artificial Sequence: Synthetic oligonucleotide
guucacggcc

SEQ ID NO: 133859 - RNA, 12 nt, Artificial Sequence
  Description of Artificial Sequence: Synthetic oligonucleotide
accaucacacca

SEQ ID NO: 133860 - RNA, 10 nt, Artificial Sequence
  Description of Artificial Sequence: Synthetic oligonucleotide
cugcggguuu

SEQ ID NO: 133861 - RNA, 9 nt, Artificial Sequence
  Description of Artificial Sequence: Synthetic oligonucleotide
uccaguuug

SEQ ID NO: 133862 - RNA, 12 nt, Artificial Sequence
  Description of Artificial Sequence: Synthetic oligonucleotide
uuaaggacuucu

SEQ ID NO: 133863 - RNA, 12 nt, Artificial Sequence
  Description of Artificial Sequence: Synthetic oligonucleotide
agugggacagag

SEQ ID NO: 133864 - RNA, 13 nt, Artificial Sequence
  Description of Artificial Sequence: Synthetic oligonucleotide
auuuguuauugug

SEQ ID NO: 133865 - RNA, 12 nt, Artificial Sequence
  Description of Artificial Sequence: Synthetic oligonucleotide
ucaaaugcauuu

SEQ ID NO: 133866 - RNA, 9 nt, Artificial Sequence
  Description of Artificial Sequence: Synthetic oligonucleotide
aggaaagcc

SEQ ID NO: 133867 - RNA, 10 nt, Artificial Sequence
  Description of Artificial Sequence: Synthetic oligonucleotide
ggaaagcccu

SEQ ID NO: 133868 - RNA, 11 nt, Artificial Sequence
  Description of Artificial Sequence: Synthetic oligonucleotide
ccagcauggcc

SEQ ID NO: 133869 - RNA, 10 nt, Artificial Sequence
  Description of Artificial Sequence: Synthetic oligonucleotide
uucucccuga

SEQ ID NO: 133870 - RNA, 11 nt, Artificial Sequence
  Description of Artificial Sequence: Synthetic oligonucleotide
aagaagcccuu

SEQ ID NO: 133871 - RNA, 11 nt, Artificial Sequence
  Description of Artificial Sequence: Synthetic oligonucleotide
gaagcccuuca

SEQ ID NO: 133872 - RNA, 10 nt, Artificial Sequence
  Description of Artificial Sequence: Synthetic oligonucleotide
cccuucagcg

SEQ ID NO: 133873 - RNA, 10 nt, Artificial Sequence
  Description of Artificial Sequence: Synthetic oligonucleotide
cuucagcggc

SEQ ID NO: 133874 - RNA, 11 nt, Artificial Sequence
  Description of Artificial Sequence: Synthetic oligonucleotide
cagcggccagu

SEQ ID NO: 133875 - RNA, 11 nt, Artificial Sequence
  Description of Artificial Sequence: Synthetic oligonucleotide
gaaaagcuccg

SEQ ID NO: 133876 - RNA, 10 nt, Artificial Sequence
  Description of Artificial Sequence: Synthetic oligonucleotide
aaagcuccgg

SEQ ID NO: 133877 - RNA, 12 nt, Artificial Sequence
  Description of Artificial Sequence: Synthetic oligonucleotide
gucaacagucug

SEQ ID NO: 133878 - RNA, 12 nt, Artificial Sequence
  Description of Artificial Sequence: Synthetic oligonucleotide
agaguucaaaag

SEQ ID NO: 133879 - RNA, 12 nt, Artificial Sequence
  Description of Artificial Sequence: Synthetic oligonucleotide
gaguucaaaagc

SEQ ID NO: 133880 - RNA, 11 nt, Artificial Sequence
  Description of Artificial Sequence: Synthetic oligonucleotide
ucaaaagcccu

SEQ ID NO: 133881 - RNA, 11 nt, Artificial Sequence
  Description of Artificial Sequence: Synthetic oligonucleotide
caaaagcccuu

SEQ ID NO: 133882 - RNA, 11 nt, Artificial Sequence
  Description of Artificial Sequence: Synthetic oligonucleotide
aaagcccuuca

SEQ ID NO: 133883 - RNA, 11 nt, Artificial Sequence
  Description of Artificial Sequence: Synthetic oligonucleotide
aagcccuucag

SEQ ID NO: 133884 - RNA, 12 nt, Artificial Sequence
  Description of Artificial Sequence: Synthetic oligonucleotide
ugaagccgcucg

SEQ ID NO: 133885 - RNA, 11 nt, Artificial Sequence
  Description of Artificial Sequence: Synthetic oligonucleotide
acgccagucaa

SEQ ID NO: 133886 - RNA, 12 nt, Artificial Sequence
  Description of Artificial Sequence: Synthetic oligonucleotide
ucuuggugcgug

SEQ ID NO: 133887 - RNA, 13 nt, Artificial Sequence
  Description of Artificial Sequence: Synthetic oligonucleotide
uuggauucaucag

SEQ ID NO: 133888 - RNA, 12 nt, Artificial Sequence
  Description of Artificial Sequence: Synthetic oligonucleotide
ggaauaccuaag

SEQ ID NO: 133889 - RNA, 11 nt, Artificial Sequence
  Description of Artificial Sequence: Synthetic oligonucleotide
uuugaggcuca

SEQ ID NO: 133890 - RNA, 10 nt, Artificial Sequence
  Description of Artificial Sequence: Synthetic oligonucleotide
cuacaauugg

SEQ ID NO: 133891 - RNA, 11 nt, Artificial Sequence
  Description of Artificial Sequence: Synthetic oligonucleotide
aguuaggagcc

SEQ ID NO: 133892 - RNA, 12 nt, Artificial Sequence
  Description of Artificial Sequence: Synthetic oligonucleotide
gucaauauccac

SEQ ID NO: 133893 - RNA, 12 nt, Artificial Sequence
  Description of Artificial Sequence: Synthetic oligonucleotide
uguucagucaca

SEQ ID NO: 133894 - RNA, 11 nt, Artificial Sequence
  Description of Artificial Sequence: Synthetic oligonucleotide
cacacacauac

SEQ ID NO: 133895 - RNA, 11 nt, Artificial Sequence
  Description of Artificial Sequence: Synthetic oligonucleotide
uccuuuugcuu

SEQ ID NO: 133896 - RNA, 15 nt, Artificial Sequence
  Description of Artificial Sequence: Synthetic oligonucleotide
uuuaaaguaauuuuu

SEQ ID NO: 133897 - RNA, 12 nt, Artificial Sequence
  Description of Artificial Sequence: Synthetic oligonucleotide
aacagucaaugg

SEQ ID NO: 133898 - RNA, 12 nt, Artificial Sequence
  Description of Artificial Sequence: Synthetic oligonucleotide
cgacaaaccaau

SEQ ID NO: 133899 - RNA, 11 nt, Artificial Sequence
  Description of Artificial Sequence: Synthetic oligonucleotide
cugcuaccacu

SEQ ID NO: 133900 - RNA, 12 nt, Artificial Sequence
  Description of Artificial Sequence: Synthetic oligonucleotide
caagcggucuua

SEQ ID NO: 133901 - RNA, 12 nt, Artificial Sequence
  Description of Artificial Sequence: Synthetic oligonucleotide
gucuuaccggcu

SEQ ID NO: 133902 - RNA, 10 nt, Artificial Sequence
  Description of Artificial Sequence: Synthetic oligonucleotide
auggguuacc

SEQ ID NO: 133903 - RNA, 10 nt, Artificial Sequence
  Description of Artificial Sequence: Synthetic oligonucleotide
uuaccugcga

SEQ ID NO: 133904 - RNA, 11 nt, Artificial Sequence
  Description of Artificial Sequence: Synthetic oligonucleotide
aucuugcugag

SEQ ID NO: 133905 - RNA, 12 nt, Artificial Sequence
  Description of Artificial Sequence: Synthetic oligonucleotide
gcauaaaacagu

SEQ ID NO: 133906 - RNA, 11 nt, Artificial Sequence
  Description of Artificial Sequence: Synthetic oligonucleotide
uccuuuauccu

SEQ ID NO: 133907 - RNA, 11 nt, Artificial Sequence
  Description of Artificial Sequence: Synthetic oligonucleotide
aacgcaaguug

SEQ ID NO: 133908 - RNA, 12 nt, Artificial Sequence
  Description of Artificial Sequence: Synthetic oligonucleotide
aacugaaaccau

SEQ ID NO: 133909 - RNA, 13 nt, Artificial Sequence
  Description of Artificial Sequence: Synthetic oligonucleotide
cuuuguuaaauau

SEQ ID NO: 133910 - RNA, 13 nt, Artificial Sequence
  Description of Artificial Sequence: Synthetic oligonucleotide
uauauuaaaaguu

SEQ ID NO: 133911 - RNA, 12 nt, Artificial Sequence
  Description of Artificial Sequence: Synthetic oligonucleotide
uuuugacuuaac

SEQ ID NO: 133912 - RNA, 12 nt, Artificial Sequence
  Description of Artificial Sequence: Synthetic oligonucleotide
caaacucagcac

SEQ ID NO: 133913 - RNA, 10 nt, Artificial Sequence
  Description of Artificial Sequence: Synthetic oligonucleotide
gcugaccuca

SEQ ID NO: 133914 - RNA, 13 nt, Artificial Sequence
  Description of Artificial Sequence: Synthetic oligonucleotide
uuauucagaucgc

SEQ ID NO: 133915 - RNA, 12 nt, Artificial Sequence
  Description of Artificial Sequence: Synthetic oligonucleotide
ggguucugggau

SEQ ID NO: 133916 - RNA, 14 nt, Artificial Sequence
  Description of Artificial Sequence: Synthetic oligonucleotide
uauuggaaauuaug

SEQ ID NO: 133917 - RNA, 12 nt, Artificial Sequence
  Description of Artificial Sequence: Synthetic oligonucleotide
uggaagcacuag

SEQ ID NO: 133918 - RNA, 12 nt, Artificial Sequence
  Description of Artificial Sequence: Synthetic oligonucleotide
uuuuuaugugga

SEQ ID NO: 133919 - RNA, 11 nt, Artificial Sequence
  Description of Artificial Sequence: Synthetic oligonucleotide
gaauugguaga

SEQ ID NO: 133920 - RNA, 12 nt, Artificial Sequence
  Description of Artificial Sequence: Synthetic oligonucleotide
uagacuuggaga

SEQ ID NO: 133921 - RNA, 12 nt, Artificial Sequence
  Description of Artificial Sequence: Synthetic oligonucleotide
uacaguauucca

SEQ ID NO: 133922 - RNA, 14 nt, Artificial Sequence
  Description of Artificial Sequence: Synthetic oligonucleotide
cacugaugaauuaa

SEQ ID NO: 133923 - RNA, 11 nt, Artificial Sequence
  Description of Artificial Sequence: Synthetic oligonucleotide
cacaucaucac

SEQ ID NO: 133924 - RNA, 12 nt, Artificial Sequence
  Description of Artificial Sequence: Synthetic oligonucleotide
ucaccaaacaga

SEQ ID NO: 133925 - RNA, 11 nt, Artificial Sequence
  Description of Artificial Sequence: Synthetic oligonucleotide
gaacaugaugg

SEQ ID NO: 133926 - RNA, 11 nt, Artificial Sequence
  Description of Artificial Sequence: Synthetic oligonucleotide
auguagacugc

SEQ ID NO: 133927 - RNA, 12 nt, Artificial Sequence
  Description of Artificial Sequence: Synthetic oligonucleotide
gaucuauuuaug

SEQ ID NO: 133928 - RNA, 11 nt, Artificial Sequence
  Description of Artificial Sequence: Synthetic oligonucleotide
cacuauuauca

SEQ ID NO: 133929 - RNA, 10 nt, Artificial Sequence
  Description of Artificial Sequence: Synthetic oligonucleotide
ucaguucugc

SEQ ID NO: 133930 - RNA, 12 nt, Artificial Sequence
  Description of Artificial Sequence: Synthetic oligonucleotide
gauuaaaccuac

SEQ ID NO: 133931 - RNA, 12 nt, Artificial Sequence
  Description of Artificial Sequence: Synthetic oligonucleotide
uaaaauccuucu

SEQ ID NO: 133932 - RNA, 11 nt, Artificial Sequence
  Description of Artificial Sequence: Synthetic oligonucleotide
augcuguagac

SEQ ID NO: 133933 - RNA, 12 nt, Artificial Sequence
  Description of Artificial Sequence: Synthetic oligonucleotide
ugauaggaauag

SEQ ID NO: 133934 - RNA, 10 nt, Artificial Sequence
  Description of Artificial Sequence: Synthetic oligonucleotide
auggcccuga

SEQ ID NO: 133935 - RNA, 10 nt, Artificial Sequence
  Description of Artificial Sequence: Synthetic oligonucleotide
uccucaagca

SEQ ID NO: 133936 - RNA, 9 nt, Artificial Sequence
  Description of Artificial Sequence: Synthetic oligonucleotide
uucagccca

SEQ ID NO: 133937 - RNA, 10 nt, Artificial Sequence
  Description of Artificial Sequence: Synthetic oligonucleotide
cugcugaacc

SEQ ID NO: 133938 - RNA, 11 nt, Artificial Sequence
  Description of Artificial Sequence: Synthetic oligonucleotide
aguucucuuca

SEQ ID NO: 133939 - RNA, 10 nt, Artificial Sequence
  Description of Artificial Sequence: Synthetic oligonucleotide
cagccuagag

SEQ ID NO: 133940 - RNA, 12 nt, Artificial Sequence
  Description of Artificial Sequence: Synthetic oligonucleotide
ucugugaagugu

SEQ ID NO: 133941 - RNA, 13 nt, Artificial Sequence
  Description of Artificial Sequence: Synthetic oligonucleotide
gagaaaauuucaa

SEQ ID NO: 133942 - RNA, 10 nt, Artificial Sequence
  Description of Artificial Sequence: Synthetic oligonucleotide
auccuccuga

SEQ ID NO: 133943 - RNA, 11 nt, Artificial Sequence
  Description of Artificial Sequence: Synthetic oligonucleotide
ugacaucauau

SEQ ID NO: 133944 - RNA, 12 nt, Artificial Sequence
  Description of Artificial Sequence: Synthetic oligonucleotide
aucuucaucaua

SEQ ID NO: 133945 - RNA, 12 nt, Artificial Sequence
  Description of Artificial Sequence: Synthetic oligonucleotide
acuagcuauuaa

SEQ ID NO: 133946 - RNA, 13 nt, Artificial Sequence
  Description of Artificial Sequence: Synthetic oligonucleotide
cucuacuaaaaau

SEQ ID NO: 133947 - RNA, 11 nt, Artificial Sequence
  Description of Artificial Sequence: Synthetic oligonucleotide
cuaucucgccu

SEQ ID NO: 133948 - RNA, 12 nt, Artificial Sequence
  Description of Artificial Sequence: Synthetic oligonucleotide
uucgguccaguu

SEQ ID NO: 133949 - RNA, 10 nt, Artificial Sequence
  Description of Artificial Sequence: Synthetic oligonucleotide
auguagccgc

SEQ ID NO: 133950 - RNA, 11 nt, Artificial Sequence
  Description of Artificial Sequence: Synthetic oligonucleotide
gaggagacuug

SEQ ID NO: 133951 - RNA, 11 nt, Artificial Sequence
  Description of Artificial Sequence: Synthetic oligonucleotide
aguagugagga

SEQ ID NO: 133952 - RNA, 13 nt, Artificial Sequence
  Description of Artificial Sequence: Synthetic oligonucleotide
agaugaguacaaa

SEQ ID NO: 133953 - RNA, 12 nt, Artificial Sequence
  Description of Artificial Sequence: Synthetic oligonucleotide
uuguuaaugggc

SEQ ID NO: 133954 - RNA, 12 nt, Artificial Sequence
  Description of Artificial Sequence: Synthetic oligonucleotide
uuuuaauuuauu

SEQ ID NO: 133955 - RNA, 11 nt, Artificial Sequence
  Description of Artificial Sequence: Synthetic oligonucleotide
auuuaaauaug

SEQ ID NO: 133956 - RNA, 12 nt, Artificial Sequence
  Description of Artificial Sequence: Synthetic oligonucleotide
auccuuuguuuc

SEQ ID NO: 133957 - RNA, 13 nt, Artificial Sequence
  Description of Artificial Sequence: Synthetic oligonucleotide
gucuaaguguuug

SEQ ID NO: 133958 - RNA, 11 nt, Artificial Sequence
  Description of Artificial Sequence: Synthetic oligonucleotide
ccugugacaaa

SEQ ID NO: 133959 - RNA, 12 nt, Artificial Sequence
  Description of Artificial Sequence: Synthetic oligonucleotide
caggcugaauua

SEQ ID NO: 133960 - RNA, 13 nt, Artificial Sequence
  Description of Artificial Sequence: Synthetic oligonucleotide
ucauucuuacaau

SEQ ID NO: 133961 - RNA, 14 nt, Artificial Sequence
  Description of Artificial Sequence: Synthetic oligonucleotide
cauucuuacaauug

SEQ ID NO: 133962 - RNA, 11 nt, Artificial Sequence
  Description of Artificial Sequence: Synthetic oligonucleotide
agagaguguac

SEQ ID NO: 133963 - RNA, 11 nt, Artificial Sequence
  Description of Artificial Sequence: Synthetic oligonucleotide
gaacucagcag

SEQ ID NO: 133964 - RNA, 12 nt, Artificial Sequence
  Description of Artificial Sequence: Synthetic oligonucleotide
uuauuuucagua

SEQ ID NO: 133965 - RNA, 11 nt, Artificial Sequence
  Description of Artificial Sequence: Synthetic oligonucleotide
cuuaaauggaa

SEQ ID NO: 133966 - RNA, 12 nt, Artificial Sequence
  Description of Artificial Sequence: Synthetic oligonucleotide
gccuaaaauugu

SEQ ID NO: 133967 - RNA, 12 nt, Artificial Sequence
  Description of Artificial Sequence: Synthetic oligonucleotide
acuaacaucugg

SEQ ID NO: 133968 - RNA, 11 nt, Artificial Sequence
  Description of Artificial Sequence: Synthetic oligonucleotide
gacugugagcu

SEQ ID NO: 133969 - RNA, 13 nt, Artificial Sequence
  Description of Artificial Sequence: Synthetic oligonucleotide
gcuuuuuauuaau

SEQ ID NO: 133970 - RNA, 12 nt, Artificial Sequence
  Description of Artificial Sequence: Synthetic oligonucleotide
ucuucuuacauu

SEQ ID NO: 133971 - RNA, 14 nt, Artificial Sequence
  Description of Artificial Sequence: Synthetic oligonucleotide
auuuguaaaaaugu

SEQ ID NO: 133972 - RNA, 14 nt, Artificial Sequence
  Description of Artificial Sequence: Synthetic oligonucleotide
ucuuaauucauauu

SEQ ID NO: 133973 - RNA, 12 nt, Artificial Sequence
  Description of Artificial Sequence: Synthetic oligonucleotide
aacuaaucauga

SEQ ID NO: 133974 - RNA, 11 nt, Artificial Sequence
  Description of Artificial Sequence: Synthetic oligonucleotide
cugcucuuggg

SEQ ID NO: 133975 - RNA, 12 nt, Artificial Sequence
  Description of Artificial Sequence: Synthetic oligonucleotide
aguagcuuugag

SEQ ID NO: 133976 - RNA, 13 nt, Artificial Sequence
  Description of Artificial Sequence: Synthetic oligonucleotide
acguaauauuuca

SEQ ID NO: 133977 - RNA, 12 nt, Artificial Sequence
  Description of Artificial Sequence: Synthetic oligonucleotide
auucucuucacu

SEQ ID NO: 133978 - RNA, 13 nt, Artificial Sequence
  Description of Artificial Sequence: Synthetic oligonucleotide
uaaugcuaagaaa

SEQ ID NO: 133979 - RNA, 11 nt, Artificial Sequence
  Description of Artificial Sequence: Synthetic oligonucleotide
cugaaaaucaa

SEQ ID NO: 133980 - RNA, 13 nt, Artificial Sequence
  Description of Artificial Sequence: Synthetic oligonucleotide
auaugauuacuuu

SEQ ID NO: 133981 - RNA, 13 nt, Artificial Sequence
  Description of Artificial Sequence: Synthetic oligonucleotide
auuuuguucuaca

SEQ ID NO: 133982 - RNA, 11 nt, Artificial Sequence
  Description of Artificial Sequence: Synthetic oligonucleotide
ccgggacucuc

SEQ ID NO: 133983 - RNA, 13 nt, Artificial Sequence
  Description of Artificial Sequence: Synthetic oligonucleotide
cuuuaaaguaaag

SEQ ID NO: 133984 - RNA, 12 nt, Artificial Sequence
  Description of Artificial Sequence: Synthetic oligonucleotide
cuggaagccugg

SEQ ID NO: 133985 - RNA, 13 nt, Artificial Sequence
  Description of Artificial Sequence: Synthetic oligonucleotide
aaacaaaagagag

SEQ ID NO: 133986 - RNA, 12 nt, Artificial Sequence
  Description of Artificial Sequence: Synthetic oligonucleotide
ucaguuaugccg

SEQ ID NO: 133987 - RNA, 12 nt, Artificial Sequence
  Description of Artificial Sequence: Synthetic oligonucleotide
aaaagaagucca

SEQ ID NO: 133988 - RNA, 10 nt, Artificial Sequence
  Description of Artificial Sequence: Synthetic oligonucleotide
ggugagguua

SEQ ID NO: 133989 - RNA, 10 nt, Artificial Sequence
  Description of Artificial Sequence: Synthetic oligonucleotide
ggaagaggac

SEQ ID NO: 133990 - RNA, 12 nt, Artificial Sequence
  Description of Artificial Sequence: Synthetic oligonucleotide
agcaaguauugu

SEQ ID NO: 133991 - RNA, 11 nt, Artificial Sequence
  Description of Artificial Sequence: Synthetic oligonucleotide
uuguagcacuc

SEQ ID NO: 133992 - RNA, 13 nt, Artificial Sequence
  Description of Artificial Sequence: Synthetic oligonucleotide
caaaaccacaaau

SEQ ID NO: 133993 - RNA, 11 nt, Artificial Sequence
  Description of Artificial Sequence: Synthetic oligonucleotide
aagcccauaca

SEQ ID NO: 133994 - RNA, 10 nt, Artificial Sequence
  Description of Artificial Sequence: Synthetic oligonucleotide
gcccauacag

SEQ ID NO: 133995 - RNA, 11 nt, Artificial Sequence
  Description of Artificial Sequence: Synthetic oligonucleotide
agaaaccuucc

SEQ ID NO: 133996 - RNA, 9 nt, Artificial Sequence
  Description of Artificial Sequence: Synthetic oligonucleotide
uauaccuac

SEQ ID NO: 133997 - RNA, 12 nt, Artificial Sequence
  Description of Artificial Sequence: Synthetic oligonucleotide
ccaguuuucgga

SEQ ID NO: 133998 - RNA, 8 nt, Artificial Sequence
  Description of Artificial Sequence: Synthetic oligonucleotide
gaacaggg

SEQ ID NO: 133999 - RNA, 12 nt, Artificial Sequence
  Description of Artificial Sequence: Synthetic oligonucleotide
uaacuuuccagu

SEQ ID NO: 134000 - RNA, 13 nt, Artificial Sequence
  Description of Artificial Sequence: Synthetic oligonucleotide
aaguuugguuuug

SEQ ID NO: 134001 - RNA, 11 nt, Artificial Sequence
  Description of Artificial Sequence: Synthetic oligonucleotide
uucccacugua

SEQ ID NO: 134002 - RNA, 12 nt, Artificial Sequence
  Description of Artificial Sequence: Synthetic oligonucleotide
gauaccauauga

SEQ ID NO: 134003 - RNA, 10 nt, Artificial Sequence
  Description of Artificial Sequence: Synthetic oligonucleotide
acaugggcug

SEQ ID NO: 134004 - RNA, 12 nt, Artificial Sequence
  Description of Artificial Sequence: Synthetic oligonucleotide
aacuuuuucaua

SEQ ID NO: 134005 - RNA, 11 nt, Artificial Sequence
  Description of Artificial Sequence: Synthetic oligonucleotide
augaggccgga

SEQ ID NO: 134006 - RNA, 10 nt, Artificial Sequence
  Description of Artificial Sequence: Synthetic oligonucleotide
cugcauuugu

SEQ ID NO: 134007 - RNA, 12 nt, Artificial Sequence
  Description of Artificial Sequence: Synthetic oligonucleotide
auguuuacuacc

SEQ ID NO: 134008 - RNA, 14 nt, Artificial Sequence
  Description of Artificial Sequence: Synthetic oligonucleotide
auuuuuugaugaaa

SEQ ID NO: 134009 - RNA, 13 nt, Artificial Sequence
  Description of Artificial Sequence: Synthetic oligonucleotide
agugugugaauuu

SEQ ID NO: 134010 - RNA, 12 nt, Artificial Sequence
  Description of Artificial Sequence: Synthetic oligonucleotide
agcaauguaugu

SEQ ID NO: 134011 - RNA, 13 nt, Artificial Sequence
  Description of Artificial Sequence: Synthetic oligonucleotide
aagcacauauaua

SEQ ID NO: 134012 - RNA, 13 nt, Artificial Sequence
  Description of Artificial Sequence: Synthetic oligonucleotide
uaauaguuucucc

SEQ ID NO: 134013 - RNA, 12 nt, Artificial Sequence
  Description of Artificial Sequence: Synthetic oligonucleotide
guuucuccaaau

SEQ ID NO: 134014 - RNA, 12 nt, Artificial Sequence
  Description of Artificial Sequence: Synthetic oligonucleotide
acuuccuagaaa

SEQ ID NO: 134015 - RNA, 12 nt, Artificial Sequence
  Description of Artificial Sequence: Synthetic oligonucleotide
acaccauauaug

SEQ ID NO: 134016 - RNA, 13 nt, Artificial Sequence
  Description of Artificial Sequence: Synthetic oligonucleotide
uauaugaauggag

SEQ ID NO: 134017 - RNA, 12 nt, Artificial Sequence
  Description of Artificial Sequence: Synthetic oligonucleotide
cauuuacaggga

SEQ ID NO: 134018 - RNA, 12 nt, Artificial Sequence
  Description of Artificial Sequence: Synthetic oligonucleotide
auuuacagggac

SEQ ID NO: 134019 - RNA, 9 nt, Artificial Sequence
  Description of Artificial Sequence: Synthetic oligonucleotide
gggaccuga

SEQ ID NO: 134020 - RNA, 13 nt, Artificial Sequence
  Description of Artificial Sequence: Synthetic oligonucleotide
guuugacugcauc

SEQ ID NO: 134021 - RNA, 12 nt, Artificial Sequence
  Description of Artificial Sequence: Synthetic oligonucleotide
uugacugcaucg

SEQ ID NO: 134022 - RNA, 11 nt, Artificial Sequence
  Description of Artificial Sequence: Synthetic oligonucleotide
aguucacaggg

SEQ ID NO: 134023 - RNA, 12 nt, Artificial Sequence
  Description of Artificial Sequence: Synthetic oligonucleotide
gcaccucugucc

SEQ ID NO: 134024 - RNA, 14 nt, Artificial Sequence
  Description of Artificial Sequence: Synthetic oligonucleotide
guuugucuuuuuaa

SEQ ID NO: 134025 - RNA, 13 nt, Artificial Sequence
  Description of Artificial Sequence: Synthetic oligonucleotide
uugucuuuuuaag

SEQ ID NO: 134026 - RNA, 12 nt, Artificial Sequence
  Description of Artificial Sequence: Synthetic oligonucleotide
cuaaagguuguc

SEQ ID NO: 134027 - RNA, 11 nt, Artificial Sequence
  Description of Artificial Sequence: Synthetic oligonucleotide
agguugucgac

SEQ ID NO: 134028 - RNA, 12 nt, Artificial Sequence
  Description of Artificial Sequence: Synthetic oligonucleotide
ccuggcaauugu

SEQ ID NO: 134029 - RNA, 11 nt, Artificial Sequence
  Description of Artificial Sequence: Synthetic oligonucleotide
guggugcgagg

SEQ ID NO: 134030 - RNA, 12 nt, Artificial Sequence
  Description of Artificial Sequence: Synthetic oligonucleotide
gagacaugaaau

SEQ ID NO: 134031 - RNA, 12 nt, Artificial Sequence
  Description of Artificial Sequence: Synthetic oligonucleotide
uauauuucucca

SEQ ID NO: 134032 - RNA, 9 nt, Artificial Sequence
  Description of Artificial Sequence: Synthetic oligonucleotide
augaaggcu

SEQ ID NO: 134033 - RNA, 10 nt, Artificial Sequence
  Description of Artificial Sequence: Synthetic oligonucleotide
cuggaguggu

SEQ ID NO: 134034 - RNA, 10 nt, Artificial Sequence
  Description of Artificial Sequence: Synthetic oligonucleotide
ggaagagagg

SEQ ID NO: 134035 - RNA, 11 nt, Artificial Sequence
  Description of Artificial Sequence: Synthetic oligonucleotide
uugcaucgggc

SEQ ID NO: 134036 - RNA, 12 nt, Artificial Sequence
  Description of Artificial Sequence: Synthetic oligonucleotide
uauccuacugug

SEQ ID NO: 134037 - RNA, 12 nt, Artificial Sequence
  Description of Artificial Sequence: Synthetic oligonucleotide
ccuacuguguaa

SEQ ID NO: 134038 - RNA, 11 nt, Artificial Sequence
  Description of Artificial Sequence: Synthetic oligonucleotide
cuuguagugua

SEQ ID NO: 134039 - RNA, 12 nt, Artificial Sequence
  Description of Artificial Sequence: Synthetic oligonucleotide
cuuuguugauug

SEQ ID NO: 134040 - RNA, 13 nt, Artificial Sequence
  Description of Artificial Sequence: Synthetic oligonucleotide
uuguugauugaaa

SEQ ID NO: 134041 - RNA, 14 nt, Artificial Sequence
  Description of Artificial Sequence: Synthetic oligonucleotide
ucuuuuucuuccau

SEQ ID NO: 134042 - RNA, 12 nt, Artificial Sequence
  Description of Artificial Sequence: Synthetic oligonucleotide
aucuuccuucua

SEQ ID NO: 134043 - RNA, 12 nt, Artificial Sequence
  Description of Artificial Sequence: Synthetic oligonucleotide
ugaaugcuucau

SEQ ID NO: 134044 - RNA, 12 nt, Artificial Sequence
  Description of Artificial Sequence: Synthetic oligonucleotide
gaaugcuucaug

SEQ ID NO: 134045 - RNA, 12 nt, Artificial Sequence
  Description of Artificial Sequence: Synthetic oligonucleotide
auucuacuuuga

SEQ ID NO: 134046 - RNA, 12 nt, Artificial Sequence
  Description of Artificial Sequence: Synthetic oligonucleotide
gcaacuacagac

SEQ ID NO: 134047 - RNA, 12 nt, Artificial Sequence
  Description of Artificial Sequence: Synthetic oligonucleotide
accaaggucaac

SEQ ID NO: 134048 - RNA, 12 nt, Artificial Sequence
  Description of Artificial Sequence: Synthetic oligonucleotide
gacuaucucgac

SEQ ID NO: 134049 - RNA, 12 nt, Artificial Sequence
  Description of Artificial Sequence: Synthetic oligonucleotide
accuucccaaac

SEQ ID NO: 134050 - RNA, 13 nt, Artificial Sequence
  Description of Artificial Sequence: Synthetic oligonucleotide
caagcuuagaacu

SEQ ID NO: 134051 - RNA, 14 nt, Artificial Sequence
  Description of Artificial Sequence: Synthetic oligonucleotide
gcuuagaacuuuaa

SEQ ID NO: 134052 - RNA, 13 nt, Artificial Sequence
  Description of Artificial Sequence: Synthetic oligonucleotide
aacuuuaagcaac

SEQ ID NO: 134053 - RNA, 10 nt, Artificial Sequence
  Description of Artificial Sequence: Synthetic oligonucleotide
agaccaccac

SEQ ID NO: 134054 - RNA, 13 nt, Artificial Sequence
  Description of Artificial Sequence: Synthetic oligonucleotide
cgagaaauaaagu

SEQ ID NO: 134055 - RNA, 13 nt, Artificial Sequence
  Description of Artificial Sequence: Synthetic oligonucleotide
gagaaauaaaguu

SEQ ID NO: 134056 - RNA, 11 nt, Artificial Sequence
  Description of Artificial Sequence: Synthetic oligonucleotide
ggaaaugaucc

SEQ ID NO: 134057 - RNA, 12 nt, Artificial Sequence
  Description of Artificial Sequence: Synthetic oligonucleotide
aagaaaugaaac

SEQ ID NO: 134058 - RNA, 12 nt, Artificial Sequence
  Description of Artificial Sequence: Synthetic oligonucleotide
uuuccauccucc

SEQ ID NO: 134059 - RNA, 14 nt, Artificial Sequence
  Description of Artificial Sequence: Synthetic oligonucleotide
cugaaaaucuuuga

SEQ ID NO: 134060 - RNA, 10 nt, Artificial Sequence
  Description of Artificial Sequence: Synthetic oligonucleotide
gccguucagg

SEQ ID NO: 134061 - RNA, 12 nt, Artificial Sequence
  Description of Artificial Sequence: Synthetic oligonucleotide
aggguccagaag

SEQ ID NO: 134062 - RNA, 12 nt, Artificial Sequence
  Description of Artificial Sequence: Synthetic oligonucleotide
caagacugcuug

SEQ ID NO: 134063 - RNA, 12 nt, Artificial Sequence
  Description of Artificial Sequence: Synthetic oligonucleotide
ccaugucuuugg

SEQ ID NO: 134064 - RNA, 10 nt, Artificial Sequence
  Description of Artificial Sequence: Synthetic oligonucleotide
ccugaaacac

SEQ ID NO: 134065 - RNA, 11 nt, Artificial Sequence
  Description of Artificial Sequence: Synthetic oligonucleotide
cucuguaccuc

SEQ ID NO: 134066 - RNA, 11 nt, Artificial Sequence
  Description of Artificial Sequence: Synthetic oligonucleotide
gcaagacaaga

SEQ ID NO: 134067 - RNA, 12 nt, Artificial Sequence
  Description of Artificial Sequence: Synthetic oligonucleotide
caagacaagaaa

SEQ ID NO: 134068 - RNA, 11 nt, Artificial Sequence
  Description of Artificial Sequence: Synthetic oligonucleotide
guacaagaucc

SEQ ID NO: 134069 - RNA, 11 nt, Artificial Sequence
  Description of Artificial Sequence: Synthetic oligonucleotide
guacuugcaga

SEQ ID NO: 134070 - RNA, 12 nt, Artificial Sequence
  Description of Artificial Sequence: Synthetic oligonucleotide
gaucgauacaga

SEQ ID NO: 134071 - RNA, 12 nt, Artificial Sequence
  Description of Artificial Sequence: Synthetic oligonucleotide
auaaaaauaaau

SEQ ID NO: 134072 - RNA, 12 nt, Artificial Sequence
  Description of Artificial Sequence: Synthetic oligonucleotide
aaaaauaaauau

SEQ ID NO: 134073 - RNA, 12 nt, Artificial Sequence
  Description of Artificial Sequence: Synthetic oligonucleotide
uugacugcugug

SEQ ID NO: 134074 - RNA, 12 nt, Artificial Sequence
  Description of Artificial Sequence: Synthetic oligonucleotide
gagaugagagac

SEQ ID NO: 134075 - RNA, 9 nt, Artificial Sequence
  Description of Artificial Sequence: Synthetic oligonucleotide
cccacuugg

SEQ ID NO: 134076 - RNA, 1543 nt, Homo sapiens
ggaguggccauucgacgacagugugguguaaaggaauucauuagccauggauguauucaugaaaggacuuucaaaggccaaggagggaguuguggcugcugcugagaaaaccaaacaggguguggcagaagcagcaggaaagacaaaagaggguguucucuauguaggcuccaaaaccaaggagggaguggugcaugguguggcaacaguggcugagaagaccaaagagcaagugacaaauguuggaggagcaguggugacgggugugacagcaguagcccagaagacaguggagggagcagggagcauugcagcagccacuggcuuugucaaaaaggaccaguugggcaagaaugaagaaggagccccacaggaaggaauucuggaagauaugccuguggauccugacaaugaggcuuaugaaaugccuucugaggaaggguaucaagacuacgaaccugaagccuaagaaauaucuuugcucccaguuucuugagaucugcugacagauguuccauccuguacaagugcucaguuccaaugugcccagucaugacauuucucaaaguuuuuacaguguaucucgaagucuuccaucagcagugauugaaguaucuguaccugcccccacucagcauuucggugcuucccuuucacugaagugaauacaugguagcagggucuuugugugcuguggauuuuguggcuucaaucuacgauguuaaaacaaauuaaaaacaccuaagugacuaccacuuauuucuaaauccucacuauuuuuuuguugcuguuguucagaaguuguuagugauuugcuaucauauauuauaagauuuuuaggugucuuuuaaugauacugucuaagaauaaugacguauugugaaauuuguuaauauauauaauacuuaaaaauaugugagcaugaaacuaugcaccuauaaauacuaaauaugaaauuuuaccauuuugcgauguguuuuauucacuuguguuuguauauaaauggugagaauuaaaauaaaacguuaucucauugcaaaaauauuuuauuuuuaucccaucucacuuuaauaauaaaaaucaugcuuauaagcaacaugaauuaagaacugacacaaaggacaaaaauauaaaguuauuaauagccauuugaagaaggaggaauuuuagaagagguagagaaaauggaacauuaacccuacacucggaauucccugaagcaacacugccagaaguguguuuugguaugcacugguuccuuaaguggcugugauuaauuauugaaagugggguguugaagaccccaacuacuauuguagaguggucuauuucucccuucaauccugucaauguuugcuuuauguauuuuggggaacuguuguuugauguguauguguuuauaauuguuauacauuuuuaauugagccuuuuauuaacauauauuguuauuuuugucucgaaauaauuuuuuaguuaaaaucuauuuugucugauauuggugugaaugcuguaccuuucugacaauaaauaauauucgaccaug

SEQ ID NO: 134077 - RNA, 1096 nt, Homo sapiens
gaauucauuagccauggauguauucaugaaaggacuuucaaaggccaaggagggaguuguggcugcugcugagaaaaccaaacaggguguggcagaagcagcaggaaagacaaaagaggguguucucuauguaggcuccaaaaccaaggagggaguggugcaugguguggcaacaguggcugagaagaccaaagagcaagugacaaauguuggaggagcaguggugacgggugugacagcaguagcccagaagacaguggagggagcagggagcauugcagcagccacuggcuuugucaaaaaggaccaguugggcaaggaaggguaucaagacuacgaaccugaagccuaagaaauaucuuugcucccaguuucuugagaucugcugacagauguuccauccuguacaagugcucaguuccaaugugcccagucaugacauuucucaaaguuuuuacaguguaucucgaagucuuccaucagcagugauugaaguaucuguaccugcccccacucagcauuucggugcuucccuuucacugaagugaauacaugguagcagggucuuugugugcuguggauuuuguggcuucaaucuacgauguuaaaacaaauuaaaaacaccuaagugacuaccacuuauuucuaaauccucacuauuuuuuuguugcuguuguucagaaguuguuagugauuugcuaucauauauuauaagauuuuuaggugucuuuuaaugauacugucuaagaauaaugacguauugugaaauuuguuaauauauauaauacuuaaaaauaugugagcaugaaacuaugcaccuauaaauacuaaauaugaaauuuuaccauuuugcgauguguuuuauucacuuguguuuguauauaaauggugagaauuaaaauaaaacguuaucucauugcaaaaauauuuuauuuuuaucccaucucacuuuaauaauaaaaaucaugcuuauaagcaacaugaauuaagaacugacacaaaggacaaaaauauaaaguuauuaauagccauuugaagaaggaggaauuuuagaagagguagagaaaauggaacauuaacccuacacucggaauuc

SEQ ID NO: 134078 - RNA, 19 nt, Artificial Sequence
  Description of Artificial Sequence: Synthetic oligonucleotide
gaauucauuagccauggau

SEQ ID NO: 134079 - RNA, 19 nt, Artificial Sequence
  Description of Artificial Sequence: Synthetic oligonucleotide
uguauucaugaaaggacuu

SEQ ID NO: 134080 - RNA, 19 nt, Artificial Sequence
  Description of Artificial Sequence: Synthetic oligonucleotide
uucaaaggccaaggaggga

SEQ ID NO: 134081 - RNA, 19 nt, Artificial Sequence
  Description of Artificial Sequence: Synthetic oligonucleotide
aguuguggcugcugcugag

SEQ ID NO: 134082 - RNA, 19 nt, Artificial Sequence
  Description of Artificial Sequence: Synthetic oligonucleotide
gaaaaccaaacagggugug

SEQ ID NO: 134083 - RNA, 19 nt, Artificial Sequence
  Description of Artificial Sequence: Synthetic oligonucleotide
ggcagaagcagcaggaaag

SEQ ID NO: 134084 - RNA, 19 nt, Artificial Sequence
  Description of Artificial Sequence: Synthetic oligonucleotide
gacaaaagaggguguucuc

SEQ ID NO: 134085 - RNA, 19 nt, Artificial Sequence
  Description of Artificial Sequence: Synthetic oligonucleotide
cuauguaggcuccaaaacc

SEQ ID NO: 134086 - RNA, 19 nt, Artificial Sequence
  Description of Artificial Sequence: Synthetic oligonucleotide
caaggagggaguggugcau

SEQ ID NO: 134087 - RNA, 19 nt, Artificial Sequence
  Description of Artificial Sequence: Synthetic oligonucleotide
ugguguggcaacaguggcu

SEQ ID NO: 134088 - RNA, 19 nt, Artificial Sequence
  Description of Artificial Sequence: Synthetic oligonucleotide
ugagaagaccaaagagcaa

SEQ ID NO: 134089 - RNA, 19 nt, Artificial Sequence
  Description of Artificial Sequence: Synthetic oligonucleotide
agugacaaauguuggagga

SEQ ID NO: 134090 - RNA, 19 nt, Artificial Sequence
  Description of Artificial Sequence: Synthetic oligonucleotide
agcaguggugacgggugug

SEQ ID NO: 134091 - RNA, 19 nt, Artificial Sequence
  Description of Artificial Sequence: Synthetic oligonucleotide
gacagcaguagcccagaag

SEQ ID NO: 134092 - RNA, 19 nt, Artificial Sequence
  Description of Artificial Sequence: Synthetic oligonucleotide
gacaguggagggagcaggg

SEQ ID NO: 134093 - RNA, 19 nt, Artificial Sequence
  Description of Artificial Sequence: Synthetic oligonucleotide
gagcauugcagcagccacu

SEQ ID NO: 134094 - RNA, 19 nt, Artificial Sequence
  Description of Artificial Sequence: Synthetic oligonucleotide
uggcuuugucaaaaaggac

SEQ ID NO: 134095 - RNA, 19 nt, Artificial Sequence
  Description of Artificial Sequence: Synthetic oligonucleotide
ccaguugggcaaggaaggg

SEQ ID NO: 134096 - RNA, 19 nt, Artificial Sequence
  Description of Artificial Sequence: Synthetic oligonucleotide
guaucaagacuacgaaccu

SEQ ID NO: 134097 - RNA, 19 nt, Artificial Sequence
  Description of Artificial Sequence: Synthetic oligonucleotide
ugaagccuaagaaauaucu

SEQ ID NO: 134098 - RNA, 19 nt, Artificial Sequence
  Description of Artificial Sequence: Synthetic oligonucleotide
uuugcucccaguuucuuga

SEQ ID NO: 134099 - RNA, 19 nt, Artificial Sequence
  Description of Artificial Sequence: Synthetic oligonucleotide
agaucugcugacagauguu

SEQ ID NO: 134100 - RNA, 19 nt, Artificial Sequence
  Description of Artificial Sequence: Synthetic oligonucleotide
uccauccuguacaagugcu

SEQ ID NO: 134101 - RNA, 19 nt, Artificial Sequence
  Description of Artificial Sequence: Synthetic oligonucleotide
ucaguuccaaugugcccag

SEQ ID NO: 134102 - RNA, 19 nt, Artificial Sequence
  Description of Artificial Sequence: Synthetic oligonucleotide
gucaugacauuucucaaag

SEQ ID NO: 134103 - RNA, 19 nt, Artificial Sequence
  Description of Artificial Sequence: Synthetic oligonucleotide
guuuuuacaguguaucucg

SEQ ID NO: 134104 - RNA, 19 nt, Artificial Sequence
  Description of Artificial Sequence: Synthetic oligonucleotide
gaagucuuccaucagcagu

SEQ ID NO: 134105 - RNA, 19 nt, Artificial Sequence
  Description of Artificial Sequence: Synthetic oligonucleotide
ugauugaaguaucuguacc

SEQ ID NO: 134106 - RNA, 19 nt, Artificial Sequence
  Description of Artificial Sequence: Synthetic oligonucleotide
cugcccccacucagcauuu

SEQ ID NO: 134107 - RNA, 19 nt, Artificial Sequence
  Description of Artificial Sequence: Synthetic oligonucleotide
ucggugcuucccuuucacu

SEQ ID NO: 134108 - RNA, 19 nt, Artificial Sequence
  Description of Artificial Sequence: Synthetic oligonucleotide
ugaagugaauacaugguag

SEQ ID NO: 134109 - RNA, 19 nt, Artificial Sequence
  Description of Artificial Sequence: Synthetic oligonucleotide
gcagggucuuugugugcug

SEQ ID NO: 134110 - RNA, 19 nt, Artificial Sequence
  Description of Artificial Sequence: Synthetic oligonucleotide
guggauuuuguggcuucaa

SEQ ID NO: 134111 - RNA, 19 nt, Artificial Sequence
  Description of Artificial Sequence: Synthetic oligonucleotide
aucuacgauguuaaaacaa

SEQ ID NO: 134112 - RNA, 19 nt, Artificial Sequence
  Description of Artificial Sequence: Synthetic oligonucleotide
aauuaaaaacaccuaagug

SEQ ID NO: 134113 - RNA, 19 nt, Artificial Sequence
  Description of Artificial Sequence: Synthetic oligonucleotide
gacuaccacuuauuucuaa

SEQ ID NO: 134114 - RNA, 19 nt, Artificial Sequence
  Description of Artificial Sequence: Synthetic oligonucleotide
aauccucacuauuuuuuug

SEQ ID NO: 134115 - RNA, 19 nt, Artificial Sequence
  Description of Artificial Sequence: Synthetic oligonucleotide
guugcuguuguucagaagu

SEQ ID NO: 134116 - RNA, 19 nt, Artificial Sequence
  Description of Artificial Sequence: Synthetic oligonucleotide
uuguuagugauuugcuauc

SEQ ID NO: 134117 - RNA, 19 nt, Artificial Sequence
  Description of Artificial Sequence: Synthetic oligonucleotide
cauauauuauaagauuuuu

SEQ ID NO: 134118 - RNA, 19 nt, Artificial Sequence
  Description of Artificial Sequence: Synthetic oligonucleotide
uaggugucuuuuaaugaua

SEQ ID NO: 134119 - RNA, 19 nt, Artificial Sequence
  Description of Artificial Sequence: Synthetic oligonucleotide
acugucuaagaauaaugac

SEQ ID NO: 134120 - RNA, 19 nt, Artificial Sequence
  Description of Artificial Sequence: Synthetic oligonucleotide
cguauugugaaauuuguua

SEQ ID NO: 134121 - RNA, 19 nt, Artificial Sequence
  Description of Artificial Sequence: Synthetic oligonucleotide
aauauauauaauacuuaaa

SEQ ID NO: 134122 - RNA, 19 nt, Artificial Sequence
  Description of Artificial Sequence: Synthetic oligonucleotide
aaauaugugagcaugaaac

SEQ ID NO: 134123 - RNA, 19 nt, Artificial Sequence
  Description of Artificial Sequence: Synthetic oligonucleotide
cuaugcaccuauaaauacu

SEQ ID NO: 134124 - RNA, 19 nt, Artificial Sequence
  Description of Artificial Sequence: Synthetic oligonucleotide
uaaauaugaaauuuuacca

SEQ ID NO: 134125 - RNA, 19 nt, Artificial Sequence
  Description of Artificial Sequence: Synthetic oligonucleotide
auuuugcgauguguuuuau

SEQ ID NO: 134126 - RNA, 19 nt, Artificial Sequence
  Description of Artificial Sequence: Synthetic oligonucleotide
uucacuuguguuuguauau

SEQ ID NO: 134127 - RNA, 19 nt, Artificial Sequence
  Description of Artificial Sequence: Synthetic oligonucleotide
uaaauggugagaauuaaaa

SEQ ID NO: 134128 - RNA, 19 nt, Artificial Sequence
  Description of Artificial Sequence: Synthetic oligonucleotide
auaaaacguuaucucauug

SEQ ID NO: 134129 - RNA, 19 nt, Artificial Sequence
  Description of Artificial Sequence: Synthetic oligonucleotide
gcaaaaauauuuuauuuuu

SEQ ID NO: 134130 - RNA, 19 nt, Artificial Sequence
  Description of Artificial Sequence: Synthetic oligonucleotide
uaucccaucucacuuuaau

SEQ ID NO: 134131 - RNA, 19 nt, Artificial Sequence
  Description of Artificial Sequence: Synthetic oligonucleotide
uaauaaaaaucaugcuuau

SEQ ID NO: 134132 - RNA, 19 nt, Artificial Sequence
  Description of Artificial Sequence: Synthetic oligonucleotide
uaagcaacaugaauuaaga

SEQ ID NO: 134133 - RNA, 19 nt, Artificial Sequence
  Description of Artificial Sequence: Synthetic oligonucleotide
aacugacacaaaggacaaa

SEQ ID NO: 134134 - RNA, 19 nt, Artificial Sequence
  Description of Artificial Sequence: Synthetic oligonucleotide
aaauauaaaguuauuaaua

SEQ ID NO: 134135 - RNA, 19 nt, Artificial Sequence
  Description of Artificial Sequence: Synthetic oligonucleotide
agccauuugaagaaggagg

SEQ ID NO: 134136 - RNA, 19 nt, Artificial Sequence
  Description of Artificial Sequence: Synthetic oligonucleotide
gaauuuuagaagagguaga

SEQ ID NO: 134137 - RNA, 19 nt, Artificial Sequence
  Description of Artificial Sequence: Synthetic oligonucleotide
agaaaauggaacauuaacc

SEQ ID NO: 134138 - RNA, 19 nt, Artificial Sequence
  Description of Artificial Sequence: Synthetic oligonucleotide
aacccuacacucggaauuc

SEQ ID NO: 134139 - RNA, 19 nt, Artificial Sequence
  Description of Artificial Sequence: Synthetic oligonucleotide
ggaguggccauucgacgac

SEQ ID NO: 134140 - RNA, 19 nt, Artificial Sequence
  Description of Artificial Sequence: Synthetic oligonucleotide
cagugugguguaaaggaau

SEQ ID NO: 134141 - RNA, 19 nt, Artificial Sequence
  Description of Artificial Sequence: Synthetic oligonucleotide
uucauuagccauggaugua

SEQ ID NO: 134142 - RNA, 19 nt, Artificial Sequence
  Description of Artificial Sequence: Synthetic oligonucleotide
auucaugaaaggacuuuca

SEQ ID NO: 134143 - RNA, 19 nt, Artificial Sequence
  Description of Artificial Sequence: Synthetic oligonucleotide
aaaggccaaggagggaguu

SEQ ID NO: 134144 - RNA, 19 nt, Artificial Sequence
  Description of Artificial Sequence: Synthetic oligonucleotide
uguggcugcugcugagaaa

SEQ ID NO: 134145 - RNA, 19 nt, Artificial Sequence
  Description of Artificial Sequence: Synthetic oligonucleotide
aaccaaacaggguguggca

SEQ ID NO: 134146 - RNA, 19 nt, Artificial Sequence
  Description of Artificial Sequence: Synthetic oligonucleotide
agaagcagcaggaaagaca

SEQ ID NO: 134147 - RNA, 19 nt, Artificial Sequence
  Description of Artificial Sequence: Synthetic oligonucleotide
aaaagaggguguucucuau

SEQ ID NO: 134148 - RNA, 19 nt, Artificial Sequence
  Description of Artificial Sequence: Synthetic oligonucleotide
uguaggcuccaaaaccaag

SEQ ID NO: 134149 - RNA, 19 nt, Artificial Sequence
  Description of Artificial Sequence: Synthetic oligonucleotide
ggagggaguggugcauggu

SEQ ID NO: 134150 - RNA, 19 nt, Artificial Sequence
  Description of Artificial Sequence: Synthetic oligonucleotide
uguggcaacaguggcugag

SEQ ID NO: 134151 - RNA, 19 nt, Artificial Sequence
  Description of Artificial Sequence: Synthetic oligonucleotide
gaagaccaaagagcaagug

SEQ ID NO: 134152 - RNA, 19 nt, Artificial Sequence
  Description of Artificial Sequence: Synthetic oligonucleotide
gacaaauguuggaggagca

SEQ ID NO: 134153 - RNA, 19 nt, Artificial Sequence
  Description of Artificial Sequence: Synthetic oligonucleotide
aguggugacgggugugaca

SEQ ID NO: 134154 - RNA, 19 nt, Artificial Sequence
  Description of Artificial Sequence: Synthetic oligonucleotide
agcaguagcccagaagaca

SEQ ID NO: 134155 - RNA, 19 nt, Artificial Sequence
  Description of Artificial Sequence: Synthetic oligonucleotide
aguggagggagcagggagc

SEQ ID NO: 134156 - RNA, 19 nt, Artificial Sequence
  Description of Artificial Sequence: Synthetic oligonucleotide
cauugcagcagccacuggc

SEQ ID NO: 134157 - RNA, 19 nt, Artificial Sequence
  Description of Artificial Sequence: Synthetic oligonucleotide
cuuugucaaaaaggaccag

SEQ ID NO: 134158 - RNA, 19 nt, Artificial Sequence
  Description of Artificial Sequence: Synthetic oligonucleotide
guugggcaagaaugaagaa

SEQ ID NO: 134159 - RNA, 19 nt, Artificial Sequence
  Description of Artificial Sequence: Synthetic oligonucleotide
aggagccccacaggaagga

SEQ ID NO: 134160 - RNA, 19 nt, Artificial Sequence
  Description of Artificial Sequence: Synthetic oligonucleotide
aauucuggaagauaugccu

SEQ ID NO: 134161 - RNA, 19 nt, Artificial Sequence
  Description of Artificial Sequence: Synthetic oligonucleotide
uguggauccugacaaugag

SEQ ID NO: 134162 - RNA, 19 nt, Artificial Sequence
  Description of Artificial Sequence: Synthetic oligonucleotide
ggcuuaugaaaugccuucu

SEQ ID NO: 134163 - RNA, 19 nt, Artificial Sequence
  Description of Artificial Sequence: Synthetic oligonucleotide
ugaggaaggguaucaagac

SEQ ID NO: 134164 - RNA, 19 nt, Artificial Sequence
  Description of Artificial Sequence: Synthetic oligonucleotide
cuacgaaccugaagccuaa

SEQ ID NO: 134165 - RNA, 19 nt, Artificial Sequence
  Description of Artificial Sequence: Synthetic oligonucleotide
agaaauaucuuugcuccca

SEQ ID NO: 134166 - RNA, 19 nt, Artificial Sequence
  Description of Artificial Sequence: Synthetic oligonucleotide
aguuucuugagaucugcug

SEQ ID NO: 134167 - RNA, 19 nt, Artificial Sequence
  Description of Artificial Sequence: Synthetic oligonucleotide
gacagauguuccauccugu

SEQ ID NO: 134168 - RNA, 19 nt, Artificial Sequence
  Description of Artificial Sequence: Synthetic oligonucleotide
uacaagugcucaguuccaa

SEQ ID NO: 134169 - RNA, 19 nt, Artificial Sequence
  Description of Artificial Sequence: Synthetic oligonucleotide
augugcccagucaugacau

SEQ ID NO: 134170 - RNA, 19 nt, Artificial Sequence
  Description of Artificial Sequence: Synthetic oligonucleotide
uuucucaaaguuuuuacag

SEQ ID NO: 134171 - RNA, 19 nt, Artificial Sequence
  Description of Artificial Sequence: Synthetic oligonucleotide
guguaucucgaagucuucc

SEQ ID NO: 134172 - RNA, 19 nt, Artificial Sequence
  Description of Artificial Sequence: Synthetic oligonucleotide
caucagcagugauugaagu

SEQ ID NO: 134173 - RNA, 19 nt, Artificial Sequence
  Description of Artificial Sequence: Synthetic oligonucleotide
uaucuguaccugcccccac

SEQ ID NO: 134174 - RNA, 19 nt, Artificial Sequence
  Description of Artificial Sequence: Synthetic oligonucleotide
cucagcauuucggugcuuc

SEQ ID NO: 134175 - RNA, 19 nt, Artificial Sequence
  Description of Artificial Sequence: Synthetic oligonucleotide
cccuuucacugaagugaau

SEQ ID NO: 134176 - RNA, 19 nt, Artificial Sequence
  Description of Artificial Sequence: Synthetic oligonucleotide
uacaugguagcagggucuu

SEQ ID NO: 134177 - RNA, 19 nt, Artificial Sequence
  Description of Artificial Sequence: Synthetic oligonucleotide
uugugugcuguggauuuug

SEQ ID NO: 134178 - RNA, 19 nt, Artificial Sequence
  Description of Artificial Sequence: Synthetic oligonucleotide
guggcuucaaucuacgaug

SEQ ID NO: 134179 - RNA, 19 nt, Artificial Sequence
  Description of Artificial Sequence: Synthetic oligonucleotide
guuaaaacaaauuaaaaac

SEQ ID NO: 134180 - RNA, 19 nt, Artificial Sequence
  Description of Artificial Sequence: Synthetic oligonucleotide
caccuaagugacuaccacu

SEQ ID NO: 134181 - RNA, 19 nt, Artificial Sequence
  Description of Artificial Sequence: Synthetic oligonucleotide
uuauuucuaaauccucacu

SEQ ID NO: 134182 - RNA, 19 nt, Artificial Sequence
  Description of Artificial Sequence: Synthetic oligonucleotide
uauuuuuuuguugcuguug

SEQ ID NO: 134183 - RNA, 19 nt, Artificial Sequence
  Description of Artificial Sequence: Synthetic oligonucleotide
guucagaaguuguuaguga

SEQ ID NO: 134184 - RNA, 19 nt, Artificial Sequence
  Description of Artificial Sequence: Synthetic oligonucleotide
auuugcuaucauauauuau

SEQ ID NO: 134185 - RNA, 19 nt, Artificial Sequence
  Description of Artificial Sequence: Synthetic oligonucleotide
uaagauuuuuaggugucuu

SEQ ID NO: 134186 - RNA, 19 nt, Artificial Sequence
  Description of Artificial Sequence: Synthetic oligonucleotide
uuuaaugauacugucuaag

SEQ ID NO: 134187 - RNA, 19 nt, Artificial Sequence
  Description of Artificial Sequence: Synthetic oligonucleotide
gaauaaugacguauuguga

SEQ ID NO: 134188 - RNA, 19 nt, Artificial Sequence
  Description of Artificial Sequence: Synthetic oligonucleotide
aaauuuguuaauauauaua

SEQ ID NO: 134189 - RNA, 19 nt, Artificial Sequence
  Description of Artificial Sequence: Synthetic oligonucleotide
aauacuuaaaaauauguga

SEQ ID NO: 134190 - RNA, 19 nt, Artificial Sequence
  Description of Artificial Sequence: Synthetic oligonucleotide
agcaugaaacuaugcaccu

SEQ ID NO: 134191 - RNA, 19 nt, Artificial Sequence
  Description of Artificial Sequence: Synthetic oligonucleotide
uauaaauacuaaauaugaa

SEQ ID NO: 134192 - RNA, 19 nt, Artificial Sequence
  Description of Artificial Sequence: Synthetic oligonucleotide
aauuuuaccauuuugcgau

SEQ ID NO: 134193 - RNA, 19 nt, Artificial Sequence
  Description of Artificial Sequence: Synthetic oligonucleotide
uguguuuuauucacuugug

SEQ ID NO: 134194 - RNA, 19 nt, Artificial Sequence
  Description of Artificial Sequence: Synthetic oligonucleotide
guuuguauauaaaugguga

SEQ ID NO: 134195 - RNA, 19 nt, Artificial Sequence
  Description of Artificial Sequence: Synthetic oligonucleotide
agaauuaaaauaaaacguu

SEQ ID NO: 134196 - RNA, 19 nt, Artificial Sequence
  Description of Artificial Sequence: Synthetic oligonucleotide
uaucucauugcaaaaauau

SEQ ID NO: 134197 - RNA, 19 nt, Artificial Sequence
  Description of Artificial Sequence: Synthetic oligonucleotide
uuuuauuuuuaucccaucu

SEQ ID NO: 134198 - RNA, 19 nt, Artificial Sequence
  Description of Artificial Sequence: Synthetic oligonucleotide
ucacuuuaauaauaaaaau

SEQ ID NO: 134199 - RNA, 19 nt, Artificial Sequence
  Description of Artificial Sequence: Synthetic oligonucleotide
ucaugcuuauaagcaacau

SEQ ID NO: 134200 - RNA, 19 nt, Artificial Sequence
  Description of Artificial Sequence: Synthetic oligonucleotide
ugaauuaagaacugacaca

SEQ ID NO: 134201 - RNA, 19 nt, Artificial Sequence
  Description of Artificial Sequence: Synthetic oligonucleotide
aaaggacaaaaauauaaag

SEQ ID NO: 134202 - RNA, 19 nt, Artificial Sequence
  Description of Artificial Sequence: Synthetic oligonucleotide
guuauuaauagccauuuga

SEQ ID NO: 134203 - RNA, 19 nt, Artificial Sequence
  Description of Artificial Sequence: Synthetic oligonucleotide
aagaaggaggaauuuuaga

SEQ ID NO: 134204 - RNA, 19 nt, Artificial Sequence
  Description of Artificial Sequence: Synthetic oligonucleotide
aagagguagagaaaaugga

SEQ ID NO: 134205 - RNA, 19 nt, Artificial Sequence
  Description of Artificial Sequence: Synthetic oligonucleotide
aacauuaacccuacacucg

SEQ ID NO: 134206 - RNA, 19 nt, Artificial Sequence
  Description of Artificial Sequence: Synthetic oligonucleotide
ggaauucccugaagcaaca

SEQ ID NO: 134207 - RNA, 19 nt, Artificial Sequence
  Description of Artificial Sequence: Synthetic oligonucleotide
acugccagaaguguguuuu

SEQ ID NO: 134208 - RNA, 19 nt, Artificial Sequence
  Description of Artificial Sequence: Synthetic oligonucleotide
ugguaugcacugguuccuu

SEQ ID NO: 134209 - RNA, 19 nt, Artificial Sequence
  Description of Artificial Sequence: Synthetic oligonucleotide
uaaguggcugugauuaauu

SEQ ID NO: 134210 - RNA, 19 nt, Artificial Sequence
  Description of Artificial Sequence: Synthetic oligonucleotide
uauugaaagugggguguug

SEQ ID NO: 134211 - RNA, 19 nt, Artificial Sequence
  Description of Artificial Sequence: Synthetic oligonucleotide
gaagaccccaacuacuauu

SEQ ID NO: 134212 - RNA, 19 nt, Artificial Sequence
  Description of Artificial Sequence: Synthetic oligonucleotide
uguagaguggucuauuucu

SEQ ID NO: 134213 - RNA, 19 nt, Artificial Sequence
  Description of Artificial Sequence: Synthetic oligonucleotide
ucccuucaauccugucaau

SEQ ID NO: 134214 - RNA, 19 nt, Artificial Sequence
  Description of Artificial Sequence: Synthetic oligonucleotide
uguuugcuuuauguauuuu

SEQ ID NO: 134215 - RNA, 19 nt, Artificial Sequence
  Description of Artificial Sequence: Synthetic oligonucleotide
uggggaacuguuguuugau

SEQ ID NO: 134216 - RNA, 19 nt, Artificial Sequence
  Description of Artificial Sequence: Synthetic oligonucleotide
uguguauguguuuauaauu

SEQ ID NO: 134217 - RNA, 19 nt, Artificial Sequence
  Description of Artificial Sequence: Synthetic oligonucleotide
uguuauacauuuuuaauug

SEQ ID NO: 134218 - RNA, 19 nt, Artificial Sequence
  Description of Artificial Sequence: Synthetic oligonucleotide
gagccuuuuauuaacauau

SEQ ID NO: 134219 - RNA, 19 nt, Artificial Sequence
  Description of Artificial Sequence: Synthetic oligonucleotide
uauuguuauuuuugucucg

SEQ ID NO: 134220 - RNA, 19 nt, Artificial Sequence
  Description of Artificial Sequence: Synthetic oligonucleotide
gaaauaauuuuuuaguuaa

SEQ ID NO: 134221 - RNA, 19 nt, Artificial Sequence
  Description of Artificial Sequence: Synthetic oligonucleotide
aaaucuauuuugucugaua

SEQ ID NO: 134222 - RNA, 19 nt, Artificial Sequence
  Description of Artificial Sequence: Synthetic oligonucleotide
auuggugugaaugcuguac

SEQ ID NO: 134223 - RNA, 19 nt, Artificial Sequence
  Description of Artificial Sequence: Synthetic oligonucleotide
ccuuucugacaauaaauaa

SEQ ID NO: 134224 - RNA, 19 nt, Artificial Sequence
  Description of Artificial Sequence: Synthetic oligonucleotide
uaaauaauauucgaccaug

SEQ ID NO: 134225 - RNA, 25 nt, Artificial Sequence
  Description of Artificial Sequence: Synthetic oligonucleotide
gaauucauuagccauggauguauuc

SEQ ID NO: 134226 - RNA, 25 nt, Artificial Sequence
  Description of Artificial Sequence: Synthetic oligonucleotide
caugaaaggacuuucaaaggccaag

SEQ ID NO: 134227 - RNA, 25 nt, Artificial Sequence
  Description of Artificial Sequence: Synthetic oligonucleotide
ggagggaguuguggcugcugcugag

SEQ ID NO: 134228 - RNA, 25 nt, Artificial Sequence
  Description of Artificial Sequence: Synthetic oligonucleotide
gaaaaccaaacaggguguggcagaa

SEQ ID NO: 134229 - RNA, 25 nt, Artificial Sequence
  Description of Artificial Sequence: Synthetic oligonucleotide
agcagcaggaaagacaaaagagggu

SEQ ID NO: 134230 - RNA, 25 nt, Artificial Sequence
  Description of Artificial Sequence: Synthetic oligonucleotide
uguucucuauguaggcuccaaaacc

SEQ ID NO: 134231 - RNA, 25 nt, Artificial Sequence
  Description of Artificial Sequence: Synthetic oligonucleotide
caaggagggaguggugcauggugug

SEQ ID NO: 134232 - RNA, 25 nt, Artificial Sequence
  Description of Artificial Sequence: Synthetic oligonucleotide
ggcaacaguggcugagaagaccaaa

SEQ ID NO: 134233 - RNA, 25 nt, Artificial Sequence
  Description of Artificial Sequence: Synthetic oligonucleotide
agagcaagugacaaauguuggagga

SEQ ID NO: 134234 - RNA, 25 nt, Artificial Sequence
  Description of Artificial Sequence: Synthetic oligonucleotide
agcaguggugacgggugugacagca

SEQ ID NO: 134235 - RNA, 25 nt, Artificial Sequence
  Description of Artificial Sequence: Synthetic oligonucleotide
aguagcccagaagacaguggaggga

SEQ ID NO: 134236 - RNA, 25 nt, Artificial Sequence
  Description of Artificial Sequence: Synthetic oligonucleotide
agcagggagcauugcagcagccacu

SEQ ID NO: 134237 - RNA, 25 nt, Artificial Sequence
  Description of Artificial Sequence: Synthetic oligonucleotide
uggcuuugucaaaaaggaccaguug

SEQ ID NO: 134238 - RNA, 25 nt, Artificial Sequence
  Description of Artificial Sequence: Synthetic oligonucleotide
gggcaaggaaggguaucaagacuac

SEQ ID NO: 134239 - RNA, 25 nt, Artificial Sequence
  Description of Artificial Sequence: Synthetic oligonucleotide
cgaaccugaagccuaagaaauaucu

SEQ ID NO: 134240 - RNA, 25 nt, Artificial Sequence
  Description of Artificial Sequence: Synthetic oligonucleotide
uuugcucccaguuucuugagaucug

SEQ ID NO: 134241 - RNA, 25 nt, Artificial Sequence
  Description of Artificial Sequence: Synthetic oligonucleotide
gcugacagauguuccauccuguaca

SEQ ID NO: 134242 - RNA, 25 nt, Artificial Sequence
  Description of Artificial Sequence: Synthetic oligonucleotide
aagugcucaguuccaaugugcccag

SEQ ID NO: 134243 - RNA, 25 nt, Artificial Sequence
  Description of Artificial Sequence: Synthetic oligonucleotide
gucaugacauuucucaaaguuuuua

SEQ ID NO: 134244 - RNA, 25 nt, Artificial Sequence
  Description of Artificial Sequence: Synthetic oligonucleotide
acaguguaucucgaagucuuccauc

SEQ ID NO: 134245 - RNA, 25 nt, Artificial Sequence
  Description of Artificial Sequence: Synthetic oligonucleotide
cagcagugauugaaguaucuguacc

SEQ ID NO: 134246 - RNA, 25 nt, Artificial Sequence
  Description of Artificial Sequence: Synthetic oligonucleotide
cugcccccacucagcauuucggugc

SEQ ID NO: 134247 - RNA, 25 nt, Artificial Sequence
  Description of Artificial Sequence: Synthetic oligonucleotide
cuucccuuucacugaagugaauaca

SEQ ID NO: 134248 - RNA, 25 nt, Artificial Sequence
  Description of Artificial Sequence: Synthetic oligonucleotide
augguagcagggucuuugugugcug

SEQ ID NO: 134249 - RNA, 25 nt, Artificial Sequence
  Description of Artificial Sequence: Synthetic oligonucleotide
guggauuuuguggcuucaaucuacg

SEQ ID NO: 134250 - RNA, 25 nt, Artificial Sequence
  Description of Artificial Sequence: Synthetic oligonucleotide
gauguuaaaacaaauuaaaaacacc

SEQ ID NO: 134251 - RNA, 25 nt, Artificial Sequence
  Description of Artificial Sequence: Synthetic oligonucleotide
cuaagugacuaccacuuauuucuaa

SEQ ID NO: 134252 - RNA, 25 nt, Artificial Sequence
  Description of Artificial Sequence: Synthetic oligonucleotide
aauccucacuauuuuuuuguugcug

SEQ ID NO: 134253 - RNA, 25 nt, Artificial Sequence
  Description of Artificial Sequence: Synthetic oligonucleotide
guuguucagaaguuguuagugauuu

SEQ ID NO: 134254 - RNA, 25 nt, Artificial Sequence
  Description of Artificial Sequence: Synthetic oligonucleotide
ugcuaucauauauuauaagauuuuu

SEQ ID NO: 134255 - RNA, 25 nt, Artificial Sequence
  Description of Artificial Sequence: Synthetic oligonucleotide
uaggugucuuuuaaugauacugucu

SEQ ID NO: 134256 - RNA, 25 nt, Artificial Sequence
  Description of Artificial Sequence: Synthetic oligonucleotide
uaagaauaaugacguauugugaaau

SEQ ID NO: 134257 - RNA, 25 nt, Artificial Sequence
  Description of Artificial Sequence: Synthetic oligonucleotide
uuuguuaauauauauaauacuuaaa

SEQ ID NO: 134258 - RNA, 25 nt, Artificial Sequence
  Description of Artificial Sequence: Synthetic oligonucleotide
aaauaugugagcaugaaacuaugca

SEQ ID NO: 134259 - RNA, 25 nt, Artificial Sequence
  Description of Artificial Sequence: Synthetic oligonucleotide
accuauaaauacuaaauaugaaauu

SEQ ID NO: 134260 - RNA, 25 nt, Artificial Sequence
  Description of Artificial Sequence: Synthetic oligonucleotide
uuuaccauuuugcgauguguuuuau

SEQ ID NO: 134261 - RNA, 25 nt, Artificial Sequence
  Description of Artificial Sequence: Synthetic oligonucleotide
uucacuuguguuuguauauaaaugg

SEQ ID NO: 134262 - RNA, 25 nt, Artificial Sequence
  Description of Artificial Sequence: Synthetic oligonucleotide
gugagaauuaaaauaaaacguuauc

SEQ ID NO: 134263 - RNA, 25 nt, Artificial Sequence
  Description of Artificial Sequence: Synthetic oligonucleotide
cucauugcaaaaauauuuuauuuuu

SEQ ID NO: 134264 - RNA, 25 nt, Artificial Sequence
  Description of Artificial Sequence: Synthetic oligonucleotide
uaucccaucucacuuuaauaauaaa

SEQ ID NO: 134265 - RNA, 25 nt, Artificial Sequence
  Description of Artificial Sequence: Synthetic oligonucleotide
aaaucaugcuuauaagcaacaugaa

SEQ ID NO: 134266 - RNA, 25 nt, Artificial Sequence
  Description of Artificial Sequence: Synthetic oligonucleotide
auuaagaacugacacaaaggacaaa

SEQ ID NO: 134267 - RNA, 25 nt, Artificial Sequence
  Description of Artificial Sequence: Synthetic oligonucleotide
aaauauaaaguuauuaauagccauu

SEQ ID NO: 134268 - RNA, 25 nt, Artificial Sequence
  Description of Artificial Sequence: Synthetic oligonucleotide
uugaagaaggaggaauuuuagaaga

SEQ ID NO: 134269 - RNA, 25 nt, Artificial Sequence
  Description of Artificial Sequence: Synthetic oligonucleotide
agguagagaaaauggaacauuaacc

SEQ ID NO: 134270 - RNA, 25 nt, Artificial Sequence
  Description of Artificial Sequence: Synthetic oligonucleotide
aacauuaacccuacacucggaauuc

SEQ ID NO: 134271 - RNA, 25 nt, Artificial Sequence
  Description of Artificial Sequence: Synthetic oligonucleotide
ggaguggccauucgacgacagugug

SEQ ID NO: 134272 - RNA, 25 nt, Artificial Sequence
  Description of Artificial Sequence: Synthetic oligonucleotide
gguguaaaggaauucauuagccaug

SEQ ID NO: 134273 - RNA, 25 nt, Artificial Sequence
  Description of Artificial Sequence: Synthetic oligonucleotide
ggauguauucaugaaaggacuuuca

SEQ ID NO: 134274 - RNA, 25 nt, Artificial Sequence
  Description of Artificial Sequence: Synthetic oligonucleotide
aaaggccaaggagggaguuguggcu

SEQ ID NO: 134275 - RNA, 25 nt, Artificial Sequence
  Description of Artificial Sequence: Synthetic oligonucleotide
ugcugcugagaaaaccaaacagggu

SEQ ID NO: 134276 - RNA, 25 nt, Artificial Sequence
  Description of Artificial Sequence: Synthetic oligonucleotide
uguggcagaagcagcaggaaagaca

SEQ ID NO: 134277 - RNA, 25 nt, Artificial Sequence
  Description of Artificial Sequence: Synthetic oligonucleotide
aaaagaggguguucucuauguaggc

SEQ ID NO: 134278 - RNA, 25 nt, Artificial Sequence
  Description of Artificial Sequence: Synthetic oligonucleotide
cuccaaaaccaaggagggaguggug

SEQ ID NO: 134279 - RNA, 25 nt, Artificial Sequence
  Description of Artificial Sequence: Synthetic oligonucleotide
gcaugguguggcaacaguggcugag

SEQ ID NO: 134280 - RNA, 25 nt, Artificial Sequence
  Description of Artificial Sequence: Synthetic oligonucleotide
gaagaccaaagagcaagugacaaau

SEQ ID NO: 134281 - RNA, 25 nt, Artificial Sequence
  Description of Artificial Sequence: Synthetic oligonucleotide
uguuggaggagcaguggugacgggu

SEQ ID NO: 134282 - RNA, 25 nt, Artificial Sequence
  Description of Artificial Sequence: Synthetic oligonucleotide
ugugacagcaguagcccagaagaca

SEQ ID NO: 134283 - RNA, 25 nt, Artificial Sequence
  Description of Artificial Sequence: Synthetic oligonucleotide
aguggagggagcagggagcauugca

SEQ ID NO: 134284 - RNA, 25 nt, Artificial Sequence
  Description of Artificial Sequence: Synthetic oligonucleotide
agcagccacuggcuuugucaaaaag

SEQ ID NO: 134285 - RNA, 25 nt, Artificial Sequence
  Description of Artificial Sequence: Synthetic oligonucleotide
ggaccaguugggcaagaaugaagaa

SEQ ID NO: 134286 - RNA, 25 nt, Artificial Sequence
  Description of Artificial Sequence: Synthetic oligonucleotide
aggagccccacaggaaggaauucug

SEQ ID NO: 134287 - RNA, 25 nt, Artificial Sequence
  Description of Artificial Sequence: Synthetic oligonucleotide
ggaagauaugccuguggauccugac

SEQ ID NO: 134288 - RNA, 25 nt, Artificial Sequence
  Description of Artificial Sequence: Synthetic oligonucleotide
caaugaggcuuaugaaaugccuucu

SEQ ID NO: 134289 - RNA, 25 nt, Artificial Sequence
  Description of Artificial Sequence: Synthetic oligonucleotide
ugaggaaggguaucaagacuacgaa

SEQ ID NO: 134290 - RNA, 25 nt, Artificial Sequence
  Description of Artificial Sequence: Synthetic oligonucleotide
accugaagccuaagaaauaucuuug

SEQ ID NO: 134291 - RNA, 25 nt, Artificial Sequence
  Description of Artificial Sequence: Synthetic oligonucleotide
gcucccaguuucuugagaucugcug

SEQ ID NO: 134292 - RNA, 25 nt, Artificial Sequence
  Description of Artificial Sequence: Synthetic oligonucleotide
gacagauguuccauccuguacaagu

SEQ ID NO: 134293 - RNA, 25 nt, Artificial Sequence
  Description of Artificial Sequence: Synthetic oligonucleotide
ugcucaguuccaaugugcccaguca

SEQ ID NO: 134294 - RNA, 25 nt, Artificial Sequence
  Description of Artificial Sequence: Synthetic oligonucleotide
augacauuucucaaaguuuuuacag

SEQ ID NO: 134295 - RNA, 25 nt, Artificial Sequence
  Description of Artificial Sequence: Synthetic oligonucleotide
guguaucucgaagucuuccaucagc

SEQ ID NO: 134296 - RNA, 25 nt, Artificial Sequence
  Description of Artificial Sequence: Synthetic oligonucleotide
cagugauugaaguaucuguaccugc

SEQ ID NO: 134297 - RNA, 25 nt, Artificial Sequence
  Description of Artificial Sequence: Synthetic oligonucleotide
cccccacucagcauuucggugcuuc

SEQ ID NO: 134298 - RNA, 25 nt, Artificial Sequence
  Description of Artificial Sequence: Synthetic oligonucleotide
cccuuucacugaagugaauacaugg

SEQ ID NO: 134299 - RNA, 25 nt, Artificial Sequence
  Description of Artificial Sequence: Synthetic oligonucleotide
guagcagggucuuugugugcugugg

SEQ ID NO: 134300 - RNA, 25 nt, Artificial Sequence
  Description of Artificial Sequence: Synthetic oligonucleotide
gauuuuguggcuucaaucuacgaug

SEQ ID NO: 134301 - RNA, 25 nt, Artificial Sequence
  Description of Artificial Sequence: Synthetic oligonucleotide
guuaaaacaaauuaaaaacaccuaa

SEQ ID NO: 134302 - RNA, 25 nt, Artificial Sequence
  Description of Artificial Sequence: Synthetic oligonucleotide
agugacuaccacuuauuucuaaauc

SEQ ID NO: 134303 - RNA, 25 nt, Artificial Sequence
  Description of Artificial Sequence: Synthetic oligonucleotide
ccucacuauuuuuuuguugcuguug

SEQ ID NO: 134304 - RNA, 25 nt, Artificial Sequence
  Description of Artificial Sequence: Synthetic oligonucleotide
guucagaaguuguuagugauuugcu

SEQ ID NO: 134305 - RNA, 25 nt, Artificial Sequence
  Description of Artificial Sequence: Synthetic oligonucleotide
uaucauauauuauaagauuuuuagg

SEQ ID NO: 134306 - RNA, 25 nt, Artificial Sequence
  Description of Artificial Sequence: Synthetic oligonucleotide
gugucuuuuaaugauacugucuaag

SEQ ID NO: 134307 - RNA, 25 nt, Artificial Sequence
  Description of Artificial Sequence: Synthetic oligonucleotide
gaauaaugacguauugugaaauuug

SEQ ID NO: 134308 - RNA, 25 nt, Artificial Sequence
  Description of Artificial Sequence: Synthetic oligonucleotide
guuaauauauauaauacuuaaaaau

SEQ ID NO: 134309 - RNA, 25 nt, Artificial Sequence
  Description of Artificial Sequence: Synthetic oligonucleotide
uaugugagcaugaaacuaugcaccu

SEQ ID NO: 134310 - RNA, 25 nt, Artificial Sequence
  Description of Artificial Sequence: Synthetic oligonucleotide
uauaaauacuaaauaugaaauuuua

SEQ ID NO: 134311 - RNA, 25 nt, Artificial Sequence
  Description of Artificial Sequence: Synthetic oligonucleotide
accauuuugcgauguguuuuauuca

SEQ ID NO: 134312 - RNA, 25 nt, Artificial Sequence
  Description of Artificial Sequence: Synthetic oligonucleotide
acuuguguuuguauauaaaugguga

SEQ ID NO: 134313 - RNA, 25 nt, Artificial Sequence
  Description of Artificial Sequence: Synthetic oligonucleotide
agaauuaaaauaaaacguuaucuca

SEQ ID NO: 134314 - RNA, 25 nt, Artificial Sequence
  Description of Artificial Sequence: Synthetic oligonucleotide
auugcaaaaauauuuuauuuuuauc

SEQ ID NO: 134315 - RNA, 25 nt, Artificial Sequence
  Description of Artificial Sequence: Synthetic oligonucleotide
cccaucucacuuuaauaauaaaaau

SEQ ID NO: 134316 - RNA, 25 nt, Artificial Sequence
  Description of Artificial Sequence: Synthetic oligonucleotide
ucaugcuuauaagcaacaugaauua

SEQ ID NO: 134317 - RNA, 25 nt, Artificial Sequence
  Description of Artificial Sequence: Synthetic oligonucleotide
aagaacugacacaaaggacaaaaau

SEQ ID NO: 134318 - RNA, 25 nt, Artificial Sequence
  Description of Artificial Sequence: Synthetic oligonucleotide
uauaaaguuauuaauagccauuuga

SEQ ID NO: 134319 - RNA, 25 nt, Artificial Sequence
  Description of Artificial Sequence: Synthetic oligonucleotide
aagaaggaggaauuuuagaagaggu

SEQ ID NO: 134320 - RNA, 25 nt, Artificial Sequence
  Description of Artificial Sequence: Synthetic oligonucleotide
uagagaaaauggaacauuaacccua

SEQ ID NO: 134321 - RNA, 25 nt, Artificial Sequence
  Description of Artificial Sequence: Synthetic oligonucleotide
acacucggaauucccugaagcaaca

SEQ ID NO: 134322 - RNA, 25 nt, Artificial Sequence
  Description of Artificial Sequence: Synthetic oligonucleotide
acugccagaaguguguuuugguaug

SEQ ID NO: 134323 - RNA, 25 nt, Artificial Sequence
  Description of Artificial Sequence: Synthetic oligonucleotide
gcacugguuccuuaaguggcuguga

SEQ ID NO: 134324 - RNA, 25 nt, Artificial Sequence
  Description of Artificial Sequence: Synthetic oligonucleotide
auuaauuauugaaagugggguguug

SEQ ID NO: 134325 - RNA, 25 nt, Artificial Sequence
  Description of Artificial Sequence: Synthetic oligonucleotide
gaagaccccaacuacuauuguagag

SEQ ID NO: 134326 - RNA, 25 nt, Artificial Sequence
  Description of Artificial Sequence: Synthetic oligonucleotide
guggucuauuucucccuucaauccu

SEQ ID NO: 134327 - RNA, 25 nt, Artificial Sequence
  Description of Artificial Sequence: Synthetic oligonucleotide
ugucaauguuugcuuuauguauuuu

SEQ ID NO: 134328 - RNA, 25 nt, Artificial Sequence
  Description of Artificial Sequence: Synthetic oligonucleotide
uggggaacuguuguuugauguguau

SEQ ID NO: 134329 - RNA, 25 nt, Artificial Sequence
  Description of Artificial Sequence: Synthetic oligonucleotide
uguguuuauaauuguuauacauuuu

SEQ ID NO: 134330 - RNA, 25 nt, Artificial Sequence
  Description of Artificial Sequence: Synthetic oligonucleotide
uuaauugagccuuuuauuaacauau

SEQ ID NO: 134331 - RNA, 25 nt, Artificial Sequence
  Description of Artificial Sequence: Synthetic oligonucleotide
uauuguuauuuuugucucgaaauaa

SEQ ID NO: 134332 - RNA, 25 nt, Artificial Sequence
  Description of Artificial Sequence: Synthetic oligonucleotide
auuuuuuaguuaaaaucuauuuugu

SEQ ID NO: 134333 - RNA, 25 nt, Artificial Sequence
  Description of Artificial Sequence: Synthetic oligonucleotide
ucugauauuggugugaaugcuguac

SEQ ID NO: 134334 - RNA, 25 nt, Artificial Sequence
  Description of Artificial Sequence: Synthetic oligonucleotide
ccuuucugacaauaaauaauauucg

SEQ ID NO: 134335 - RNA, 25 nt, Artificial Sequence
  Description of Artificial Sequence: Synthetic oligonucleotide
ugacaauaaauaauauucgaccaug

SEQ ID NO: 134336 - DNA, 21 bp, Artificial Sequence
  Description of Artificial Sequence: Synthetic oligonucleotide
  Description of Combined DNA/RNA Molecule: Synthetic oligonucleotide
cuacacaaaucagcgauuutt

SEQ ID NO: 134337 - DNA, 21 bp, Artificial Sequence
  Description of Artificial Sequence: Synthetic oligonucleotide
  Description of Combined DNA/RNA Molecule: Synthetic oligonucleotide
aaaucgcugauuuguguagtt

SEQ ID NO: 134338 - DNA, 25 bp, Artificial Sequence
  Description of Artificial Sequence: Synthetic oligonucleotide
  Description of Combined DNA/RNA Molecule: Synthetic oligonucleotide
cuacacaaaucagcgauuuccaugt

SEQ ID NO: 134339 - RNA, 27 nt, Artificial Sequence
  Description of Artificial Sequence: Synthetic oligonucleotide
acauggaaaucgcugauuuguguaguc

SEQ ID NO: 134340 - RNA, 13 nt, Artificial Sequence
  Description of Artificial Sequence: Synthetic oligonucleotide
cuacacaaaucag

SEQ ID NO: 134341 - DNA, 11 bp, Artificial Sequence
  Description of Artificial Sequence: Synthetic oligonucleotide
  Description of Combined DNA/RNA Molecule: Synthetic oligonucleotide
gauuuccaugt

SEQ ID NO: 134342 - DNA, 21 bp, Artificial Sequence
  Description of Artificial Sequence: Synthetic oligonucleotide
  Description of Combined DNA/RNA Molecule: Synthetic oligonucleotide
ggaucuuauuucuucggagtt

SEQ ID NO: 134343 - DNA, 21 bp, Artificial Sequence
  Description of Artificial Sequence: Synthetic oligonucleotide
  Description of Combined DNA/RNA Molecule: Synthetic oligonucleotide
cuccgaagaaauaagaucctt

SEQ ID NO: 134344 - RNA, 11 nt, Artificial Sequence
  Description of Artificial Sequence: Synthetic oligonucleotide
ggaucuuauuu

SEQ ID NO: 134345 - DNA, 10 bp, Artificial Sequence
  Description of Artificial Sequence: Synthetic oligonucleotide
  Description of Combined DNA/RNA Molecule: Synthetic oligonucleotide
cuucggagtt

SEQ ID NO: 134346 - RNA, 27 nt, Artificial Sequence
  Description of Artificial Sequence: Synthetic oligonucleotide
cauugucuccgaagaaauaagauccuu

SEQ ID NO: 134347 - RNA, 8 nt, Artificial Sequence
  Description of Artificial Sequence: Synthetic oligonucleotide
  modified_base (2): LNA-G
ggaucuua

SEQ ID NO: 134348 - DNA, 17 bp, Artificial Sequence
  Description of Artificial Sequence: Synthetic oligonucleotide
  Description of Combined DNA/RNA Molecule: Synthetic oligonucleotide
uuucuucggagacaatg

SEQ ID NO: 134349 - DNA, 16 bp, Artificial Sequence
  Description of Artificial Sequence: Synthetic oligonucleotide
  Description of Combined DNA/RNA Molecule: Synthetic oligonucleotide
uucuucggagacaatg

SEQ ID NO: 134350 - DNA, 15 bp, Artificial Sequence
  Description of Artificial Sequence: Synthetic oligonucleotide
  Description of Combined DNA/RNA Molecule: Synthetic oligonucleotide
ucuucggagacaatg

SEQ ID NO: 134351 - DNA, 14 bp, Artificial Sequence
  Description of Artificial Sequence: Synthetic oligonucleotide
  Description of Combined DNA/RNA Molecule: Synthetic oligonucleotide
cuucggagacaatg

SEQ ID NO: 134352 - DNA, 13 bp, Artificial Sequence
  Description of Artificial Sequence: Synthetic oligonucleotide
  Description of Combined DNA/RNA Molecule: Synthetic oligonucleotide
uucggagacaatg

SEQ ID NO: 134353 - DNA, 12 bp, Artificial Sequence
  Description of Artificial Sequence: Synthetic oligonucleotide
  Description of Combined DNA/RNA Molecule: Synthetic oligonucleotide
ucggagacaatg

SEQ ID NO: 134354 - DNA, 11 bp, Artificial Sequence
  Description of Artificial Sequence: Synthetic oligonucleotide
  Description of Combined DNA/RNA Molecule: Synthetic oligonucleotide
cggagacaatg

SEQ ID NO: 134355 - RNA, 9 nt, Artificial Sequence
  Description of Artificial Sequence: Synthetic oligonucleotide
  modified_base (2): LNA-G
ggaucuuau

SEQ ID NO: 134356 - RNA, 10 nt, Artificial Sequence
  Description of Artificial Sequence: Synthetic oligonucleotide
  modified_base (2): LNA-G
ggaucuuauu

SEQ ID NO: 134357 - RNA, 11 nt, Artificial Sequence
  Description of Artificial Sequence: Synthetic oligonucleotide
  modified_base (2): LNA-G
ggaucuuauuu

SEQ ID NO: 134358 - RNA, 12 nt, Artificial Sequence
  Description of Artificial Sequence: Synthetic oligonucleotide
  modified_base (2): LNA-G
ggaucuuauuuc

SEQ ID NO: 134359 - RNA, 8 nt, Artificial Sequence
  Description of Artificial Sequence: Synthetic oligonucleotide
  modified_base (3): LNA-A
cuacacaa

SEQ ID NO: 134360 - DNA, 13 bp, Artificial Sequence
  Description of Artificial Sequence: Synthetic oligonucleotide
  Description of Combined DNA/RNA Molecule: Synthetic oligonucleotide
  modified_base (8): LNA-A
aucagcgauuutt

SEQ ID NO: 134361 - DNA, 12 bp, Artificial Sequence
  Description of Artificial Sequence: Synthetic oligonucleotide
  Description of Combined DNA/RNA Molecule: Synthetic oligonucleotide
  modified_base (7): LNA-A
ucagcgauuutt

SEQ ID NO: 134362 - DNA, 11 bp, Artificial Sequence
  Description of Artificial Sequence: Synthetic oligonucleotide
  Description of Combined DNA/RNA Molecule: Synthetic oligonucleotide
  modified_base (6): LNA-A
cagcgauuutt

SEQ ID NO: 134363 - DNA, 10 bp, Artificial Sequence
  Description of Artificial Sequence: Synthetic oligonucleotide
  Description of Combined DNA/RNA Molecule: Synthetic oligonucleotide
  modified_base (5): LNA-A
agcgauuutt

SEQ ID NO: 134364 - DNA, 9 bp, Artificial Sequence
  Description of Artificial Sequence: Synthetic oligonucleotide
  Description of Combined DNA/RNA Molecule: Synthetic oligonucleotide
  modified_base (4): LNA-A
gcgauuutt

SEQ ID NO: 134365 - DNA, 8 bp, Artificial Sequence
  Description of Artificial Sequence: Synthetic oligonucleotide
  Description of Combined DNA/RNA Molecule: Synthetic oligonucleotide
  modified_base (3): LNA-A
cgauuutt

SEQ ID NO: 134366 - DNA, 7 bp, Artificial Sequence
  Description of Artificial Sequence: Synthetic oligonucleotide
  Description of Combined DNA/RNA Molecule: Synthetic oligonucleotide
  modified_base (2): LNA-A
gauuutt

SEQ ID NO: 134367 - RNA, 9 nt, Artificial Sequence
  Description of Artificial Sequence: Synthetic oligonucleotide
  modified_base (3): LNA-A
cuacacaaa

SEQ ID NO: 134368 - RNA, 10 nt, Artificial Sequence
  Description of Artificial Sequence: Synthetic oligonucleotide
  modified_base (3): LNA-A
cuacacaaau

SEQ ID NO: 134369 - RNA, 11 nt, Artificial Sequence
  Description of Artificial Sequence: Synthetic oligonucleotide
  modified_base (3): LNA-A
cuacacaaauc

SEQ ID NO: 134370 - RNA, 12 nt, Artificial Sequence
  Description of Artificial Sequence: Synthetic oligonucleotide
  modified_base (3): LNA-A
cuacacaaauca

SEQ ID NO: 134371 - RNA, 13 nt, Artificial Sequence
  Description of Artificial Sequence: Synthetic oligonucleotide
  modified_base (3): LNA-A
cuacacaaaucag

SEQ ID NO: 134372 - RNA, 14 nt, Artificial Sequence
  Description of Artificial Sequence: Synthetic oligonucleotide
  modified_base (3): LNA-A
cuacacaaaucagc

SEQ ID NO: 134373 - RNA, 13 nt, Artificial Sequence
  Description of Artificial Sequence: Synthetic oligonucleotide
  modified_base (2): LNA-G
ggaucuuauuucu

SEQ ID NO: 134374 - RNA, 14 nt, Artificial Sequence
  Description of Artificial Sequence: Synthetic oligonucleotide
  modified_base (2): LNA-G
ggaucuuauuucuu

SEQ ID NO: 134375 - RNA, 8 nt, Artificial Sequence
  Description of Artificial Sequence: Synthetic oligonucleotide
  modified_base (2): LNA-G
  modified_base (8): LNA-A
ggaucuua

SEQ ID NO: 134376 - RNA, 9 nt, Artificial Sequence
  Description of Artificial Sequence: Synthetic oligonucleotide
  modified_base (2): LNA-G
  modified_base (9): LNA-U
ggaucuuau

SEQ ID NO: 134377 - RNA, 10 nt, Artificial Sequence
  Description of Artificial Sequence: Synthetic oligonucleotide
  modified_base (2): LNA-G
  modified_base (10): LNA-U
ggaucuuauu

SEQ ID NO: 134378 - RNA, 11 nt, Artificial Sequence
  Description of Artificial Sequence: Synthetic oligonucleotide
  modified_base (2): LNA-G
  modified_base (11): LNA-U
ggaucuuauuu

SEQ ID NO: 134379 - RNA, 12 nt, Artificial Sequence
  Description of Artificial Sequence: Synthetic oligonucleotide
  modified_base (2): LNA-G
  modified_base (12): LNA-C
ggaucuuauuuc

SEQ ID NO: 134380 - RNA, 13 nt, Artificial Sequence
  Description of Artificial Sequence: Synthetic oligonucleotide
  modified_base (2): LNA-G
  modified_base (13): LNA-U
ggaucuuauuucu

SEQ ID NO: 134381 - RNA, 14 nt, Artificial Sequence
  Description of Artificial Sequence: Synthetic oligonucleotide
  modified_base (2): LNA-G
  modified_base (14): LNA-U
ggaucuuauuucuu

SEQ ID NO: 134382 - DNA, 13 bp, Artificial Sequence
  Description of Artificial Sequence: Synthetic oligonucleotide
  Description of Combined DNA/RNA Molecule: Synthetic oligonucleotide
  modified_base (8): LNA-G
uuucuucggagtt

SEQ ID NO: 134383 - DNA, 12 bp, Artificial Sequence
  Description of Artificial Sequence: Synthetic oligonucleotide
  Description of Combined DNA/RNA Molecule: Synthetic oligonucleotide
  modified_base (7): LNA-G
uucuucggagtt

SEQ ID NO: 134384 - DNA, 11 bp, Artificial Sequence
  Description of Artificial Sequence: Synthetic oligonucleotide
  Description of Combined DNA/RNA Molecule: Synthetic oligonucleotide
  modified_base (6): LNA-G
ucuucggagtt

SEQ ID NO: 134385 - DNA, 10 bp, Artificial Sequence
  Description of Artificial Sequence: Synthetic oligonucleotide
  Description of Combined DNA/RNA Molecule: Synthetic oligonucleotide
  modified_base (5): LNA-G
cuucggagtt

SEQ ID NO: 134386 - DNA, 9 bp, Artificial Sequence
  Description of Artificial Sequence: Synthetic oligonucleotide
  Description of Combined DNA/RNA Molecule: Synthetic oligonucleotide
  modified_base (4): LNA-G
uucggagtt

SEQ ID NO: 134387 - DNA, 8 bp, Artificial Sequence
  Description of Artificial Sequence: Synthetic oligonucleotide
  Description of Combined DNA/RNA Molecule: Synthetic oligonucleotide
  modified_base (3): LNA-G
ucggagtt

SEQ ID NO: 134388 - DNA, 7 bp, Artificial Sequence
  Description of Artificial Sequence: Synthetic oligonucleotide
  Description of Combined DNA/RNA Molecule: Synthetic oligonucleotide
  modified_base (2): LNA-G
cggagtt

SEQ ID NO: 134389 - DNA, 13 bp, Artificial Sequence
  Description of Artificial Sequence: Synthetic oligonucleotide
  Description of Combined DNA/RNA Molecule: Synthetic oligonucleotide
  modified_base (1): LNA-U
  modified_base (8): LNA-G
uuucuucggagtt

SEQ ID NO: 134390 - DNA, 12 bp, Artificial Sequence
  Description of Artificial Sequence: Synthetic oligonucleotide
  Description of Combined DNA/RNA Molecule: Synthetic oligonucleotide
  modified_base (1): LNA-U
  modified_base (7): LNA-G
uucuucggagtt

SEQ ID NO: 134391 - DNA, 11 bp, Artificial Sequence
  Description of Artificial Sequence: Synthetic oligonucleotide
  Description of Combined DNA/RNA Molecule: Synthetic oligonucleotide
  modified_base (1): LNA-U
  modified_base (6): LNA-G
ucuucggagtt

SEQ ID NO: 134392 - DNA, 10 bp, Artificial Sequence
  Description of Artificial Sequence: Synthetic oligonucleotide
  Description of Combined DNA/RNA Molecule: Synthetic oligonucleotide
  modified_base (1): LNA-C
  modified_base (5): LNA-G
cuucggagtt

SEQ ID NO: 134393 - DNA, 9 bp, Artificial Sequence
  Description of Artificial Sequence: Synthetic oligonucleotide
  Description of Combined DNA/RNA Molecule: Synthetic oligonucleotide
  modified_base (1): LNA-U
  modified_base (4): LNA-G
uucggagtt

SEQ ID NO: 134394 - DNA, 8 bp, Artificial Sequence
  Description of Artificial Sequence: Synthetic oligonucleotide
  Description of Combined DNA/RNA Molecule: Synthetic oligonucleotide
  modified_base (1): LNA-U
  modified_base (3): LNA-G
ucggagtt

SEQ ID NO: 134395 - DNA, 7 bp, Artificial Sequence
  Description of Artificial Sequence: Synthetic oligonucleotide
  Description of Combined DNA/RNA Molecule: Synthetic oligonucleotide
  modified_base (1): LNA-C
  modified_base (2): LNA-G
cggagtt

SEQ ID NO: 134396 - DNA, 21 bp, Artificial Sequence
  Description of Artificial Sequence: Synthetic oligonucleotide
  Description of Combined DNA/RNA Molecule: Synthetic oligonucleotide
  modified_base (2): LNA-G
  modified_base (16): LNA-G
ggaucuuauuucuucggagtt

SEQ ID NO: 134397 - DNA, 25 bp, Artificial Sequence
  Description of Artificial Sequence: Synthetic oligonucleotide
  Description of Combined DNA/RNA Molecule: Synthetic oligonucleotide
ggaucuuauuucuucggagacaatg

SEQ ID NO: 134398 - RNA, 25 nt, Artificial Sequence
  Description of Artificial Sequence: Synthetic oligonucleotide
guauuuugaugaggaguucacggcc

SEQ ID NO: 134399 - RNA, 25 nt, Artificial Sequence
  Description of Artificial Sequence: Synthetic oligonucleotide
ggcccagaugaucaccaucacacca

SEQ ID NO: 134400 - RNA, 25 nt, Artificial Sequence
  Description of Artificial Sequence: Synthetic oligonucleotide
gggaagaaaacuauccugcggguuu

SEQ ID NO: 134401 - RNA, 25 nt, Artificial Sequence
  Description of Artificial Sequence: Synthetic oligonucleotide
guuuuaauuuauuucauccaguuug

SEQ ID NO: 134402 - RNA, 25 nt, Artificial Sequence
  Description of Artificial Sequence: Synthetic oligonucleotide
acguagggaaauguuaaggacuucu

SEQ ID NO: 134403 - RNA, 25 nt, Artificial Sequence
  Description of Artificial Sequence: Synthetic oligonucleotide
ccaggguuuacccagugggacagag

SEQ ID NO: 134404 - RNA, 25 nt, Artificial Sequence
  Description of Artificial Sequence: Synthetic oligonucleotide
agcaagguuuaaauuuguuauugug

SEQ ID NO: 134405 - RNA, 25 nt, Artificial Sequence
  Description of Artificial Sequence: Synthetic oligonucleotide
uguauuauguuguucaaaugcauuu

SEQ ID NO: 134406 - RNA, 25 nt, Artificial Sequence
  Description of Artificial Sequence: Synthetic oligonucleotide
uuuuaaucuuugugacaggaaagcc

SEQ ID NO: 134407 - RNA, 25 nt, Artificial Sequence
  Description of Artificial Sequence: Synthetic oligonucleotide
uuaaucuuugugacaggaaagcccu

SEQ ID NO: 134408 - RNA, 25 nt, Artificial Sequence
  Description of Artificial Sequence: Synthetic oligonucleotide
gcugcuuaugucucccagcauggcc

SEQ ID NO: 134409 - RNA, 25 nt, Artificial Sequence
  Description of Artificial Sequence: Synthetic oligonucleotide
aaguguuucagaagcuucucccuga

SEQ ID NO: 134410 - RNA, 25 nt, Artificial Sequence
  Description of Artificial Sequence: Synthetic oligonucleotide
gaccaucaauaaggaagaagcccuu

SEQ ID NO: 134411 - RNA, 25 nt, Artificial Sequence
  Description of Artificial Sequence: Synthetic oligonucleotide
ccaucaauaaggaagaagcccuuca

SEQ ID NO: 134412 - RNA, 25 nt, Artificial Sequence
  Description of Artificial Sequence: Synthetic oligonucleotide
ucaauaaggaagaagcccuucagcg

SEQ ID NO: 134413 - RNA, 25 nt, Artificial Sequence
  Description of Artificial Sequence: Synthetic oligonucleotide
aauaaggaagaagcccuucagcggc

SEQ ID NO: 134414 - RNA, 25 nt, Artificial Sequence
  Description of Artificial Sequence: Synthetic oligonucleotide
aggaagaagcccuucagcggccagu

SEQ ID NO: 134415 - RNA, 25 nt, Artificial Sequence
  Description of Artificial Sequence: Synthetic oligonucleotide
gcauaacuaaaggugaaaagcuccg

SEQ ID NO: 134416 - RNA, 25 nt, Artificial Sequence
  Description of Artificial Sequence: Synthetic oligonucleotide
cauaacuaaaggugaaaagcuccgg

SEQ ID NO: 134417 - RNA, 25 nt, Artificial Sequence
  Description of Artificial Sequence: Synthetic oligonucleotide
cuacaucacgccagucaacagucug

SEQ ID NO: 134418 - RNA, 25 nt, Artificial Sequence
  Description of Artificial Sequence: Synthetic oligonucleotide
acuggauuuaagcagaguucaaaag

SEQ ID NO: 134419 - RNA, 25 nt, Artificial Sequence
  Description of Artificial Sequence: Synthetic oligonucleotide
cuggauuuaagcagaguucaaaagc

SEQ ID NO: 134420 - RNA, 25 nt, Artificial Sequence
  Description of Artificial Sequence: Synthetic oligonucleotide
gauuuaagcagaguucaaaagcccu

SEQ ID NO: 134421 - RNA, 25 nt, Artificial Sequence
  Description of Artificial Sequence: Synthetic oligonucleotide
auuuaagcagaguucaaaagcccuu

SEQ ID NO: 134422 - RNA, 25 nt, Artificial Sequence
  Description of Artificial Sequence: Synthetic oligonucleotide
uuaagcagaguucaaaagcccuuca

SEQ ID NO: 134423 - RNA, 25 nt, Artificial Sequence
  Description of Artificial Sequence: Synthetic oligonucleotide
uaagcagaguucaaaagcccuucag

SEQ ID NO: 134424 - RNA, 25 nt, Artificial Sequence
  Description of Artificial Sequence: Synthetic oligonucleotide
agcagaguucaaaagcccuucagcg

SEQ ID NO: 134425 - RNA, 25 nt, Artificial Sequence
  Description of Artificial Sequence: Synthetic oligonucleotide
cucagggucugagugaagccgcucg

SEQ ID NO: 134426 - RNA, 25 nt, Artificial Sequence
  Description of Artificial Sequence: Synthetic oligonucleotide
caagcaacuacaucacgccagucaa

SEQ ID NO: 134427 - RNA, 25 nt, Artificial Sequence
  Description of Artificial Sequence: Synthetic oligonucleotide
aucaauggcagcuucuuggugcgug

SEQ ID NO: 134428 - RNA, 25 nt, Artificial Sequence
  Description of Artificial Sequence: Synthetic oligonucleotide
uuccagcccacauuggauucaucag

SEQ ID NO: 134429 - RNA, 25 nt, Artificial Sequence
  Description of Artificial Sequence: Synthetic oligonucleotide
cagcugagaauguggaauaccuaag

SEQ ID NO: 134430 - RNA, 25 nt, Artificial Sequence
  Description of Artificial Sequence: Synthetic oligonucleotide
aacguaucuccuaauuugaggcuca

SEQ ID NO: 134431 - RNA, 25 nt, Artificial Sequence
  Description of Artificial Sequence: Synthetic oligonucleotide
ccuaaaauaauuucucuacaauugg

SEQ ID NO: 134432 - RNA, 25 nt, Artificial Sequence
  Description of Artificial Sequence: Synthetic oligonucleotide
uggaagauucagcuaguuaggagcc

SEQ ID NO: 134433 - RNA, 25 nt, Artificial Sequence
  Description of Artificial Sequence: Synthetic oligonucleotide
uuaaacucuccuagucaauauccac

SEQ ID NO: 134434 - RNA, 25 nt, Artificial Sequence
  Description of Artificial Sequence: Synthetic oligonucleotide
cagccuacaguuauguucagucaca

SEQ ID NO: 134435 - RNA, 25 nt, Artificial Sequence
  Description of Artificial Sequence: Synthetic oligonucleotide
guuauguucagucacacacacauac

SEQ ID NO: 134436 - RNA, 25 nt, Artificial Sequence
  Description of Artificial Sequence: Synthetic oligonucleotide
cacauacaaaauguuccuuuugcuu

SEQ ID NO: 134437 - RNA, 25 nt, Artificial Sequence
  Description of Artificial Sequence: Synthetic oligonucleotide
uccuuuugcuuuuaaaguaauuuuu

SEQ ID NO: 134438 - RNA, 25 nt, Artificial Sequence
  Description of Artificial Sequence: Synthetic oligonucleotide
ugaccugugaagcaacagucaaugg

SEQ ID NO: 134439 - RNA, 25 nt, Artificial Sequence
  Description of Artificial Sequence: Synthetic oligonucleotide
cuaucucacacaucgacaaaccaau

SEQ ID NO: 134440 - RNA, 25 nt, Artificial Sequence
  Description of Artificial Sequence: Synthetic oligonucleotide
uguccucaauuguacugcuaccacu

SEQ ID NO: 134441 - RNA, 25 nt, Artificial Sequence
  Description of Artificial Sequence: Synthetic oligonucleotide
aaaccguagcuggcaagcggucuua

SEQ ID NO: 134442 - RNA, 25 nt, Artificial Sequence
  Description of Artificial Sequence: Synthetic oligonucleotide
uagcuggcaagcggucuuaccggcu

SEQ ID NO: 134443 - RNA, 25 nt, Artificial Sequence
  Description of Artificial Sequence: Synthetic oligonucleotide
uuguaugguuaaaagauggguuacc

SEQ ID NO: 134444 - RNA, 25 nt, Artificial Sequence
  Description of Artificial Sequence: Synthetic oligonucleotide
ugguuaaaagauggguuaccugcga

SEQ ID NO: 134445 - RNA, 25 nt, Artificial Sequence
  Description of Artificial Sequence: Synthetic oligonucleotide
cagggaauuauacaaucuugcugag

SEQ ID NO: 134446 - RNA, 25 nt, Artificial Sequence
  Description of Artificial Sequence: Synthetic oligonucleotide
acaaucuugcugagcauaaaacagu

SEQ ID NO: 134447 - RNA, 25 nt, Artificial Sequence
  Description of Artificial Sequence: Synthetic oligonucleotide
ccaauaaugaagaguccuuuauccu

SEQ ID NO: 134448 - RNA, 25 nt, Artificial Sequence
  Description of Artificial Sequence: Synthetic oligonucleotide
acuuuggauguuccaacgcaaguug

SEQ ID NO: 134449 - RNA, 25 nt, Artificial Sequence
  Description of Artificial Sequence: Synthetic oligonucleotide
aaugcuuccacuaaacugaaaccau

SEQ ID NO: 134450 - RNA, 25 nt, Artificial Sequence
  Description of Artificial Sequence: Synthetic oligonucleotide
gagaaaguuugacuuuguuaaauau

SEQ ID NO: 134451 - RNA, 25 nt, Artificial Sequence
  Description of Artificial Sequence: Synthetic oligonucleotide
aaagaacuacuguauauuaaaaguu

SEQ ID NO: 134452 - RNA, 25 nt, Artificial Sequence
  Description of Artificial Sequence: Synthetic oligonucleotide
uuagaaauacggguuuugacuuaac

SEQ ID NO: 134453 - RNA, 25 nt, Artificial Sequence
  Description of Artificial Sequence: Synthetic oligonucleotide
aacauggguacagcaaacucagcac

SEQ ID NO: 134454 - RNA, 25 nt, Artificial Sequence
  Description of Artificial Sequence: Synthetic oligonucleotide
aaagacacagaagaugcugaccuca

SEQ ID NO: 134455 - RNA, 25 nt, Artificial Sequence
  Description of Artificial Sequence: Synthetic oligonucleotide
uaguagggagguuuauucagaucgc

SEQ ID NO: 134456 - RNA, 25 nt, Artificial Sequence
  Description of Artificial Sequence: Synthetic oligonucleotide
gccuucugcagcaggguucugggau

SEQ ID NO: 134457 - RNA, 25 nt, Artificial Sequence
  Description of Artificial Sequence: Synthetic oligonucleotide
ggucugguacauauuggaaauuaug

SEQ ID NO: 134458 - RNA, 25 nt, Artificial Sequence
  Description of Artificial Sequence: Synthetic oligonucleotide
cuaguccuuccgauggaagcacuag

SEQ ID NO: 134459 - RNA, 25 nt, Artificial Sequence
  Description of Artificial Sequence: Synthetic oligonucleotide
ccagugaauauuguuuuuaugugga

SEQ ID NO: 134460 - RNA, 25 nt, Artificial Sequence
  Description of Artificial Sequence: Synthetic oligonucleotide
augaauucaaguuggaauugguaga

SEQ ID NO: 134461 - RNA, 25 nt, Artificial Sequence
  Description of Artificial Sequence: Synthetic oligonucleotide
caggacacagauuuagacuuggaga

SEQ ID NO: 134462 - RNA, 25 nt, Artificial Sequence
  Description of Artificial Sequence: Synthetic oligonucleotide
cucaaagcacaguuacaguauucca

SEQ ID NO: 134463 - RNA, 25 nt, Artificial Sequence
  Description of Artificial Sequence: Synthetic oligonucleotide
accacugccaccacugaugaauuaa

SEQ ID NO: 134464 - RNA, 25 nt, Artificial Sequence
  Description of Artificial Sequence: Synthetic oligonucleotide
gaaacuacuagugccacaucaucac

SEQ ID NO: 134465 - RNA, 25 nt, Artificial Sequence
  Description of Artificial Sequence: Synthetic oligonucleotide
aagucggacagccucaccaaacaga

SEQ ID NO: 134466 - RNA, 25 nt, Artificial Sequence
  Description of Artificial Sequence: Synthetic oligonucleotide
gaaagcgaaaaauggaacaugaugg

SEQ ID NO: 134467 - RNA, 25 nt, Artificial Sequence
  Description of Artificial Sequence: Synthetic oligonucleotide
cccucugauuuagcauguagacugc

SEQ ID NO: 134468 - RNA, 25 nt, Artificial Sequence
  Description of Artificial Sequence: Synthetic oligonucleotide
ugagcuauuuaaggaucuauuuaug

SEQ ID NO: 134469 - RNA, 25 nt, Artificial Sequence
  Description of Artificial Sequence: Synthetic oligonucleotide
aaaaggugaaaaagcacuauuauca

SEQ ID NO: 134470 - RNA, 25 nt, Artificial Sequence
  Description of Artificial Sequence: Synthetic oligonucleotide
gaaaaagcacuauuaucaguucugc

SEQ ID NO: 134471 - RNA, 25 nt, Artificial Sequence
  Description of Artificial Sequence: Synthetic oligonucleotide
ggcugaaaagaaagauuaaaccuac

SEQ ID NO: 134472 - RNA, 25 nt, Artificial Sequence
  Description of Artificial Sequence: Synthetic oligonucleotide
uaaacccuuauaauaaaauccuucu

SEQ ID NO: 134473 - RNA, 25 nt, Artificial Sequence
  Description of Artificial Sequence: Synthetic oligonucleotide
cauacuauuagccaaugcuguagac

SEQ ID NO: 134474 - RNA, 25 nt, Artificial Sequence
  Description of Artificial Sequence: Synthetic oligonucleotide
gacagaagcauuuugauaggaauag

SEQ ID NO: 134475 - RNA, 25 nt, Artificial Sequence
  Description of Artificial Sequence: Synthetic oligonucleotide
agagcaaauaagauaauggcccuga

SEQ ID NO: 134476 - RNA, 25 nt, Artificial Sequence
  Description of Artificial Sequence: Synthetic oligonucleotide
ccaacauuuuucucuuccucaagca

SEQ ID NO: 134477 - RNA, 25 nt, Artificial Sequence
  Description of Artificial Sequence: Synthetic oligonucleotide
uuaaguaugagaaaaguucagccca

SEQ ID NO: 134478 - RNA, 25 nt, Artificial Sequence
  Description of Artificial Sequence: Synthetic oligonucleotide
caggaauaaagauggcugcugaacc

SEQ ID NO: 134479 - RNA, 25 nt, Artificial Sequence
  Description of Artificial Sequence: Synthetic oligonucleotide
aauuugaaugaccaaguucucuuca

SEQ ID NO: 134480 - RNA, 25 nt, Artificial Sequence
  Description of Artificial Sequence: Synthetic oligonucleotide
auguauaaagauagccagccuagag

SEQ ID NO: 134481 - RNA, 25 nt, Artificial Sequence
  Description of Artificial Sequence: Synthetic oligonucleotide
ggcuguaacuaucucugugaagugu

SEQ ID NO: 134482 - RNA, 25 nt, Artificial Sequence
  Description of Artificial Sequence: Synthetic oligonucleotide
ucugugaagugugagaaaauuucaa

SEQ ID NO: 134483 - RNA, 25 nt, Artificial Sequence
  Description of Artificial Sequence: Synthetic oligonucleotide
ccuuuaaggaaaugaauccuccuga

SEQ ID NO: 134484 - RNA, 25 nt, Artificial Sequence
  Description of Artificial Sequence: Synthetic oligonucleotide
aaggauacaaaaagugacaucauau

SEQ ID NO: 134485 - RNA, 25 nt, Artificial Sequence
  Description of Artificial Sequence: Synthetic oligonucleotide
agaugcaauuugaaucuucaucaua

SEQ ID NO: 134486 - RNA, 25 nt, Artificial Sequence
  Description of Artificial Sequence: Synthetic oligonucleotide
guucaaaacgaagacuagcuauuaa

SEQ ID NO: 134487 - RNA, 25 nt, Artificial Sequence
  Description of Artificial Sequence: Synthetic oligonucleotide
gugaaaccucaucucuacuaaaaau

SEQ ID NO: 134488 - RNA, 25 nt, Artificial Sequence
  Description of Artificial Sequence: Synthetic oligonucleotide
acgaaagagaagcucuaucucgccu

SEQ ID NO: 134489 - RNA, 25 nt, Artificial Sequence
  Description of Artificial Sequence: Synthetic oligonucleotide
cuccacaagcgccuucgguccaguu

SEQ ID NO: 134490 - RNA, 25 nt, Artificial Sequence
  Description of Artificial Sequence: Synthetic oligonucleotide
gagaagauuccaaagauguagccgc

SEQ ID NO: 134491 - RNA, 25 nt, Artificial Sequence
  Description of Artificial Sequence: Synthetic oligonucleotide
aaucuggauucaaugaggagacuug

SEQ ID NO: 134492 - RNA, 25 nt, Artificial Sequence
  Description of Artificial Sequence: Synthetic oligonucleotide
agaacagauuugagaguagugagga

SEQ ID NO: 134493 - RNA, 25 nt, Artificial Sequence
  Description of Artificial Sequence: Synthetic oligonucleotide
ccagagcugugcagaugaguacaaa

SEQ ID NO: 134494 - RNA, 25 nt, Artificial Sequence
  Description of Artificial Sequence: Synthetic oligonucleotide
ccucagauuguuguuguuaaugggc

SEQ ID NO: 134495 - RNA, 25 nt, Artificial Sequence
  Description of Artificial Sequence: Synthetic oligonucleotide
cuauuuuaauuauuuuuaauuuauu

SEQ ID NO: 134496 - RNA, 25 nt, Artificial Sequence
  Description of Artificial Sequence: Synthetic oligonucleotide
uuuaauuuauuaauauuuaaauaug

SEQ ID NO: 134497 - RNA, 25 nt, Artificial Sequence
  Description of Artificial Sequence: Synthetic oligonucleotide
augcaguuugaauauccuuuguuuc

SEQ ID NO: 134498 - RNA, 25 nt, Artificial Sequence
  Description of Artificial Sequence: Synthetic oligonucleotide
caugcugcuggcgucuaaguguuug

SEQ ID NO: 134499 - RNA, 25 nt, Artificial Sequence
  Description of Artificial Sequence: Synthetic oligonucleotide
agaugugcauuucaccugugacaaa

SEQ ID NO: 134500 - RNA, 25 nt, Artificial Sequence
  Description of Artificial Sequence: Synthetic oligonucleotide
ucaaaaccugugccaggcugaauua

SEQ ID NO: 134501 - RNA, 25 nt, Artificial Sequence
  Description of Artificial Sequence: Synthetic oligonucleotide
gaauguggguagucauucuuacaau

SEQ ID NO: 134502 - RNA, 25 nt, Artificial Sequence
  Description of Artificial Sequence: Synthetic oligonucleotide
auguggguagucauucuuacaauug

SEQ ID NO: 134503 - RNA, 25 nt, Artificial Sequence
  Description of Artificial Sequence: Synthetic oligonucleotide
ugaaaaugagcaucagagaguguac

SEQ ID NO: 134504 - RNA, 25 nt, Artificial Sequence
  Description of Artificial Sequence: Synthetic oligonucleotide
uugcuuuucauguagaacucagcag

SEQ ID NO: 134505 - RNA, 25 nt, Artificial Sequence
  Description of Artificial Sequence: Synthetic oligonucleotide
uguauuucuauauuuauuuucagua

SEQ ID NO: 134506 - RNA, 25 nt, Artificial Sequence
  Description of Artificial Sequence: Synthetic oligonucleotide
uuugauuaauguuucuuaaauggaa

SEQ ID NO: 134507 - RNA, 25 nt, Artificial Sequence
  Description of Artificial Sequence: Synthetic oligonucleotide
caacguguauagugccuaaaauugu

SEQ ID NO: 134508 - RNA, 25 nt, Artificial Sequence
  Description of Artificial Sequence: Synthetic oligonucleotide
cauauccuuggcuacuaacaucugg

SEQ ID NO: 134509 - RNA, 25 nt, Artificial Sequence
  Description of Artificial Sequence: Synthetic oligonucleotide
uacuaacaucuggagacugugagcu

SEQ ID NO: 134510 - RNA, 25 nt, Artificial Sequence
  Description of Artificial Sequence: Synthetic oligonucleotide
cauaaguugugugcuuuuuauuaau

SEQ ID NO: 134511 - RNA, 25 nt, Artificial Sequence
  Description of Artificial Sequence: Synthetic oligonucleotide
gcaucauuuuggcucuucuuacauu

SEQ ID NO: 134512 - RNA, 25 nt, Artificial Sequence
  Description of Artificial Sequence: Synthetic oligonucleotide
gcucuucuuacauuuguaaaaaugu

SEQ ID NO: 134513 - RNA, 25 nt, Artificial Sequence
  Description of Artificial Sequence: Synthetic oligonucleotide
agauuaggucaucuuaauucauauu

SEQ ID NO: 134514 - RNA, 25 nt, Artificial Sequence
  Description of Artificial Sequence: Synthetic oligonucleotide
auggaauugaaagaacuaaucauga

SEQ ID NO: 134515 - RNA, 25 nt, Artificial Sequence
  Description of Artificial Sequence: Synthetic oligonucleotide
cacacucauuccuucugcucuuggg

SEQ ID NO: 134516 - RNA, 25 nt, Artificial Sequence
  Description of Artificial Sequence: Synthetic oligonucleotide
uguagagguaaccaguagcuuugag

SEQ ID NO: 134517 - RNA, 25 nt, Artificial Sequence
  Description of Artificial Sequence: Synthetic oligonucleotide
caaccacaugccacguaauauuuca

SEQ ID NO: 134518 - RNA, 25 nt, Artificial Sequence
  Description of Artificial Sequence: Synthetic oligonucleotide
ucggaaacaaguuauucucuucacu

SEQ ID NO: 134519 - RNA, 25 nt, Artificial Sequence
  Description of Artificial Sequence: Synthetic oligonucleotide
acucccaauaacuaaugcuaagaaa

SEQ ID NO: 134520 - RNA, 25 nt, Artificial Sequence
  Description of Artificial Sequence: Synthetic oligonucleotide
aaugcuaagaaaugcugaaaaucaa

SEQ ID NO: 134521 - RNA, 25 nt, Artificial Sequence
  Description of Artificial Sequence: Synthetic oligonucleotide
gucuuucucuaaauaugauuacuuu

SEQ ID NO: 134522 - RNA, 25 nt, Artificial Sequence
  Description of Artificial Sequence: Synthetic oligonucleotide
ugaauuucaggcauuuuguucuaca

SEQ ID NO: 134523 - RNA, 25 nt, Artificial Sequence
  Description of Artificial Sequence: Synthetic oligonucleotide
cgauucccucucacccgggacucuc

SEQ ID NO: 134524 - RNA, 25 nt, Artificial Sequence
  Description of Artificial Sequence: Synthetic oligonucleotide
aggaaagugaaccuuuaaaguaaag

SEQ ID NO: 134525 - RNA, 25 nt, Artificial Sequence
  Description of Artificial Sequence: Synthetic oligonucleotide
gaggcugcaugcucuggaagccugg

SEQ ID NO: 134526 - RNA, 25 nt, Artificial Sequence
  Description of Artificial Sequence: Synthetic oligonucleotide
ucucugaacagaaaacaaaagagag

SEQ ID NO: 134527 - RNA, 25 nt, Artificial Sequence
  Description of Artificial Sequence: Synthetic oligonucleotide
aacuuggcuguaaucaguuaugccg

SEQ ID NO: 134528 - RNA, 25 nt, Artificial Sequence
  Description of Artificial Sequence: Synthetic oligonucleotide
agaagccaaaauuaaaagaagucca

SEQ ID NO: 134529 - RNA, 25 nt, Artificial Sequence
  Description of Artificial Sequence: Synthetic oligonucleotide
auuaaaagaaguccaggugagguua

SEQ ID NO: 134530 - RNA, 25 nt, Artificial Sequence
  Description of Artificial Sequence: Synthetic oligonucleotide
gaauccggauuaucgggaagaggac

SEQ ID NO: 134531 - RNA, 25 nt, Artificial Sequence
  Description of Artificial Sequence: Synthetic oligonucleotide
aaugugacaucaaagcaaguauugu

SEQ ID NO: 134532 - RNA, 25 nt, Artificial Sequence
  Description of Artificial Sequence: Synthetic oligonucleotide
caucaaagcaaguauuguagcacuc

SEQ ID NO: 134533 - RNA, 25 nt, Artificial Sequence
  Description of Artificial Sequence: Synthetic oligonucleotide
agagagagaaaacaaaaccacaaau

SEQ ID NO: 134534 - RNA, 25 nt, Artificial Sequence
  Description of Artificial Sequence: Synthetic oligonucleotide
ucgcuguaguauuuaagcccauaca

SEQ ID NO: 134535 - RNA, 25 nt, Artificial Sequence
  Description of Artificial Sequence: Synthetic oligonucleotide
cgcuguaguauuuaagcccauacag

SEQ ID NO: 134536 - RNA, 25 nt, Artificial Sequence
  Description of Artificial Sequence: Synthetic oligonucleotide
auuuaagcccauacagaaaccuucc

SEQ ID NO: 134537 - RNA, 25 nt, Artificial Sequence
  Description of Artificial Sequence: Synthetic oligonucleotide
auuaaaauaaacaugguauaccuac

SEQ ID NO: 134538 - RNA, 25 nt, Artificial Sequence
  Description of Artificial Sequence: Synthetic oligonucleotide
cuguucugaucggccaguuuucgga

SEQ ID NO: 134539 - RNA, 25 nt, Artificial Sequence
  Description of Artificial Sequence: Synthetic oligonucleotide
aaauaauuugaacuuuggaacaggg

SEQ ID NO: 134540 - RNA, 25 nt, Artificial Sequence
  Description of Artificial Sequence: Synthetic oligonucleotide
ugcgaccuuaauuuaacuuuccagu

SEQ ID NO: 134541 - RNA, 25 nt, Artificial Sequence
  Description of Artificial Sequence: Synthetic oligonucleotide
cugagaaagcuaaaguuugguuuug

SEQ ID NO: 134542 - RNA, 25 nt, Artificial Sequence
  Description of Artificial Sequence: Synthetic oligonucleotide
aguaaagaugcuacuucccacugua

SEQ ID NO: 134543 - RNA, 25 nt, Artificial Sequence
  Description of Artificial Sequence: Synthetic oligonucleotide
cugcuuaauugcugauaccauauga

SEQ ID NO: 134544 - RNA, 25 nt, Artificial Sequence
  Description of Artificial Sequence: Synthetic oligonucleotide
uaccauaugaaugaaacaugggcug

SEQ ID NO: 134545 - RNA, 25 nt, Artificial Sequence
  Description of Artificial Sequence: Synthetic oligonucleotide
aacuuucuuauccaacuuuuucaua

SEQ ID NO: 134546 - RNA, 25 nt, Artificial Sequence
  Description of Artificial Sequence: Synthetic oligonucleotide
ccuugcaugacaucaugaggccgga

SEQ ID NO: 134547 - RNA, 25 nt, Artificial Sequence
  Description of Artificial Sequence: Synthetic oligonucleotide
ugaauuuguauaugacugcauuugu

SEQ ID NO: 134548 - RNA, 25 nt, Artificial Sequence
  Description of Artificial Sequence: Synthetic oligonucleotide
gaauccuaguagaauguuuacuacc

SEQ ID NO: 134549 - RNA, 25 nt, Artificial Sequence
  Description of Artificial Sequence: Synthetic oligonucleotide
gaaagggaagaauuuuuugaugaaa

SEQ ID NO: 134550 - RNA, 25 nt, Artificial Sequence
  Description of Artificial Sequence: Synthetic oligonucleotide
uaucggcaugccagugugugaauuu

SEQ ID NO: 134551 - RNA, 25 nt, Artificial Sequence
  Description of Artificial Sequence: Synthetic oligonucleotide
caccucauaguagagcaauguaugu

SEQ ID NO: 134552 - RNA, 25 nt, Artificial Sequence
  Description of Artificial Sequence: Synthetic oligonucleotide
ccagaauugccaaagcacauauaua

SEQ ID NO: 134553 - RNA, 25 nt, Artificial Sequence
  Description of Artificial Sequence: Synthetic oligonucleotide
uggugaucuggguaauaguuucucc

SEQ ID NO: 134554 - RNA, 25 nt, Artificial Sequence
  Description of Artificial Sequence: Synthetic oligonucleotide
gaucuggguaauaguuucuccaaau

SEQ ID NO: 134555 - RNA, 25 nt, Artificial Sequence
  Description of Artificial Sequence: Synthetic oligonucleotide
ggaugugaugaauacuuccuagaaa

SEQ ID NO: 134556 - RNA, 25 nt, Artificial Sequence
  Description of Artificial Sequence: Synthetic oligonucleotide
cauuuccacagcuacaccauauaug

SEQ ID NO: 134557 - RNA, 25 nt, Artificial Sequence
  Description of Artificial Sequence: Synthetic oligonucleotide
acagcuacaccauauaugaauggag

SEQ ID NO: 134558 - RNA, 25 nt, Artificial Sequence
  Description of Artificial Sequence: Synthetic oligonucleotide
ugcaguucuuacacgagaagaagau

SEQ ID NO: 134559 - RNA, 25 nt, Artificial Sequence
  Description of Artificial Sequence: Synthetic oligonucleotide
acgagaagaagaucauuuacaggga

SEQ ID NO: 134560 - RNA, 25 nt, Artificial Sequence
  Description of Artificial Sequence: Synthetic oligonucleotide
cgagaagaagaucauuuacagggac

SEQ ID NO: 134561 - RNA, 25 nt, Artificial Sequence
  Description of Artificial Sequence: Synthetic oligonucleotide
aagaagaucauuuacagggaccuga

SEQ ID NO: 134562 - RNA, 25 nt, Artificial Sequence
  Description of Artificial Sequence: Synthetic oligonucleotide
agaggaagagguguuugacugcauc

SEQ ID NO: 134563 - RNA, 25 nt, Artificial Sequence
  Description of Artificial Sequence: Synthetic oligonucleotide
gaggaagagguguuugacugcaucg

SEQ ID NO: 134564 - RNA, 25 nt, Artificial Sequence
  Description of Artificial Sequence: Synthetic oligonucleotide
cuacuuugagggcgaguucacaggg

SEQ ID NO: 134565 - RNA, 25 nt, Artificial Sequence
  Description of Artificial Sequence: Synthetic oligonucleotide
agggcaucuccuggcaccucugucc

SEQ ID NO: 134566 - RNA, 25 nt, Artificial Sequence
  Description of Artificial Sequence: Synthetic oligonucleotide
ggagugauaugguuugucuuuuuaa

SEQ ID NO: 134567 - RNA, 25 nt, Artificial Sequence
  Description of Artificial Sequence: Synthetic oligonucleotide
gagugauaugguuugucuuuuuaag

SEQ ID NO: 134568 - RNA, 25 nt, Artificial Sequence
  Description of Artificial Sequence: Synthetic oligonucleotide
ugcaguaaagauccuaaagguuguc

SEQ ID NO: 134569 - RNA, 25 nt, Artificial Sequence
  Description of Artificial Sequence: Synthetic oligonucleotide
aguaaagauccuaaagguugucgac

SEQ ID NO: 134570 - RNA, 25 nt, Artificial Sequence
  Description of Artificial Sequence: Synthetic oligonucleotide
ugacaaaggacaaccuggcaauugu

SEQ ID NO: 134571 - RNA, 25 nt, Artificial Sequence
  Description of Artificial Sequence: Synthetic oligonucleotide
gcaauugugacccaguggugcgagg

SEQ ID NO: 134572 - RNA, 25 nt, Artificial Sequence
  Description of Artificial Sequence: Synthetic oligonucleotide
aacaucauccauagagacaugaaau

SEQ ID NO: 134573 - RNA, 25 nt, Artificial Sequence
  Description of Artificial Sequence: Synthetic oligonucleotide
ugaaauccaacaauauauuucucca

SEQ ID NO: 134574 - RNA, 25 nt, Artificial Sequence
  Description of Artificial Sequence: Synthetic oligonucleotide
aacaauauauuucuccaugaaggcu

SEQ ID NO: 134575 - RNA, 25 nt, Artificial Sequence
  Description of Artificial Sequence: Synthetic oligonucleotide
aacaguaaagucacgcuggaguggu

SEQ ID NO: 134576 - RNA, 25 nt, Artificial Sequence
  Description of Artificial Sequence: Synthetic oligonucleotide
ugugaagaaaguaaaggaagagagg

SEQ ID NO: 134577 - RNA, 25 nt, Artificial Sequence
  Description of Artificial Sequence: Synthetic oligonucleotide
cuuccgagccauccuugcaucgggc

SEQ ID NO: 134578 - RNA, 25 nt, Artificial Sequence
  Description of Artificial Sequence: Synthetic oligonucleotide
aauggagguugaauauccuacugug

SEQ ID NO: 134579 - RNA, 25 nt, Artificial Sequence
  Description of Artificial Sequence: Synthetic oligonucleotide
ggagguugaauauccuacuguguaa

SEQ ID NO: 134580 - RNA, 25 nt, Artificial Sequence
  Description of Artificial Sequence: Synthetic oligonucleotide
auuuugaguuuucccuuguagugua

SEQ ID NO: 134581 - RNA, 25 nt, Artificial Sequence
  Description of Artificial Sequence: Synthetic oligonucleotide
uauccuguuuguucuuuguugauug

SEQ ID NO: 134582 - RNA, 25 nt, Artificial Sequence
  Description of Artificial Sequence: Synthetic oligonucleotide
ccuguuuguucuuuguugauugaaa

SEQ ID NO: 134583 - RNA, 25 nt, Artificial Sequence
  Description of Artificial Sequence: Synthetic oligonucleotide
cucuacagccuucuuuuucuuccau

SEQ ID NO: 134584 - RNA, 25 nt, Artificial Sequence
  Description of Artificial Sequence: Synthetic oligonucleotide
ucuuccauagcuaaucuuccuucua

SEQ ID NO: 134585 - RNA, 25 nt, Artificial Sequence
  Description of Artificial Sequence: Synthetic oligonucleotide
auaaucuuccuguugaaugcuucau

SEQ ID NO: 134586 - RNA, 25 nt, Artificial Sequence
  Description of Artificial Sequence: Synthetic oligonucleotide
uaaucuuccuguugaaugcuucaug

SEQ ID NO: 134587 - RNA, 25 nt, Artificial Sequence
  Description of Artificial Sequence: Synthetic oligonucleotide
cuucaugacuugaauucuacuuuga

SEQ ID NO: 134588 - RNA, 25 nt, Artificial Sequence
  Description of Artificial Sequence: Synthetic oligonucleotide
aagagggagagaagcaacuacagac

SEQ ID NO: 134589 - RNA, 25 nt, Artificial Sequence
  Description of Artificial Sequence: Synthetic oligonucleotide
cgucuccuaccagaccaaggucaac

SEQ ID NO: 134590 - RNA, 25 nt, Artificial Sequence
  Description of Artificial Sequence: Synthetic oligonucleotide
gaucaaucggcccgacuaucucgac

SEQ ID NO: 134591 - RNA, 25 nt, Artificial Sequence
  Description of Artificial Sequence: Synthetic oligonucleotide
ggacgaacauccaaccuucccaaac

SEQ ID NO: 134592 - RNA, 25 nt, Artificial Sequence
  Description of Artificial Sequence: Synthetic oligonucleotide
agggucggaacccaagcuuagaacu

SEQ ID NO: 134593 - RNA, 25 nt, Artificial Sequence
  Description of Artificial Sequence: Synthetic oligonucleotide
ucggaacccaagcuuagaacuuuaa

SEQ ID NO: 134594 - RNA, 25 nt, Artificial Sequence
  Description of Artificial Sequence: Synthetic oligonucleotide
acccaagcuuagaacuuuaagcaac

SEQ ID NO: 134595 - RNA, 25 nt, Artificial Sequence
  Description of Artificial Sequence: Synthetic oligonucleotide
gaacuuuaagcaacaagaccaccac

SEQ ID NO: 134596 - RNA, 25 nt, Artificial Sequence
  Description of Artificial Sequence: Synthetic oligonucleotide
acuauucaguggcgagaaauaaagu

SEQ ID NO: 134597 - RNA, 25 nt, Artificial Sequence
  Description of Artificial Sequence: Synthetic oligonucleotide
cuauucaguggcgagaaauaaaguu

SEQ ID NO: 134598 - RNA, 25 nt, Artificial Sequence
  Description of Artificial Sequence: Synthetic oligonucleotide
aaacacagauaacaggaaaugaucc

SEQ ID NO: 134599 - RNA, 25 nt, Artificial Sequence
  Description of Artificial Sequence: Synthetic oligonucleotide
cuuaagaaaagagaagaaaugaaac

SEQ ID NO: 134600 - RNA, 25 nt, Artificial Sequence
  Description of Artificial Sequence: Synthetic oligonucleotide
cugaaggaguguguuuccauccucc

SEQ ID NO: 134601 - RNA, 25 nt, Artificial Sequence
  Description of Artificial Sequence: Synthetic oligonucleotide
ucaccgcgggacugaaaaucuuuga

SEQ ID NO: 134602 - RNA, 25 nt, Artificial Sequence
  Description of Artificial Sequence: Synthetic oligonucleotide
agcagaaauaagcgugccguucagg

SEQ ID NO: 134603 - RNA, 25 nt, Artificial Sequence
  Description of Artificial Sequence: Synthetic oligonucleotide
aagcgugccguucaggguccagaag

SEQ ID NO: 134604 - RNA, 25 nt, Artificial Sequence
  Description of Artificial Sequence: Synthetic oligonucleotide
agaaacagucacucaagacugcuug

SEQ ID NO: 134605 - RNA, 25 nt, Artificial Sequence
  Description of Artificial Sequence: Synthetic oligonucleotide
agaggaagaagguccaugucuuugg

SEQ ID NO: 134606 - RNA, 25 nt, Artificial Sequence
  Description of Artificial Sequence: Synthetic oligonucleotide
uguauucaaaauaugccugaaacac

SEQ ID NO: 134607 - RNA, 25 nt, Artificial Sequence
  Description of Artificial Sequence: Synthetic oligonucleotide
auuuuccucccuuucucuguaccuc

SEQ ID NO: 134608 - RNA, 25 nt, Artificial Sequence
  Description of Artificial Sequence: Synthetic oligonucleotide
caaagaaagauagagcaagacaaga

SEQ ID NO: 134609 - RNA, 25 nt, Artificial Sequence
  Description of Artificial Sequence: Synthetic oligonucleotide
aagaaagauagagcaagacaagaaa

SEQ ID NO: 134610 - RNA, 25 nt, Artificial Sequence
  Description of Artificial Sequence: Synthetic oligonucleotide
gaaagcauuuguuuguacaagaucc

SEQ ID NO: 134611 - RNA, 25 nt, Artificial Sequence
  Description of Artificial Sequence: Synthetic oligonucleotide
ugaguuaaacgaacguacuugcaga

SEQ ID NO: 134612 - RNA, 25 nt, Artificial Sequence
  Description of Artificial Sequence: Synthetic oligonucleotide
acugauacagaacgaucgauacaga

SEQ ID NO: 134613 - RNA, 25 nt, Artificial Sequence
  Description of Artificial Sequence: Synthetic oligonucleotide
auauuauauauauauaaaaauaaau

SEQ ID NO: 134614 - RNA, 25 nt, Artificial Sequence
  Description of Artificial Sequence: Synthetic oligonucleotide
auuauauauauauaaaaauaaauau

SEQ ID NO: 134615 - RNA, 25 nt, Artificial Sequence
  Description of Artificial Sequence: Synthetic oligonucleotide
ucacuggauguauuugacugcugug

SEQ ID NO: 134616 - RNA, 25 nt, Artificial Sequence
  Description of Artificial Sequence: Synthetic oligonucleotide
cagggaagaggaggagaugagagac

SEQ ID NO: 134617 - RNA, 25 nt, Artificial Sequence
  Description of Artificial Sequence: Synthetic oligonucleotide
augaucuuuuuuuugucccacuugg

SEQ ID NO: 134618 - RNA, 27 nt, Artificial Sequence
  Description of Artificial Sequence: Synthetic oligonucleotide
ggccgugaacuccucaucaaaauaccu

SEQ ID NO: 134619 - RNA, 27 nt, Artificial Sequence
  Description of Artificial Sequence: Synthetic oligonucleotide
uggugugauggugaucaucugggccgu

SEQ ID NO: 134620 - RNA, 27 nt, Artificial Sequence
  Description of Artificial Sequence: Synthetic oligonucleotide
aaacccgcaggauaguuuucuucccua

SEQ ID NO: 134621 - RNA, 27 nt, Artificial Sequence
  Description of Artificial Sequence: Synthetic oligonucleotide
caaacuggaugaaauaaauuaaaaccc

SEQ ID NO: 134622 - RNA, 27 nt, Artificial Sequence
  Description of Artificial Sequence: Synthetic oligonucleotide
agaaguccuuaacauuucccuacguga

SEQ ID NO: 134623 - RNA, 27 nt, Artificial Sequence
  Description of Artificial Sequence: Synthetic oligonucleotide
cucugucccacuggguaaacccuggcc

SEQ ID NO: 134624 - RNA, 27 nt, Artificial Sequence
  Description of Artificial Sequence: Synthetic oligonucleotide
cacaauaacaaauuuaaaccuugcucc

SEQ ID NO: 134625 - RNA, 27 nt, Artificial Sequence
  Description of Artificial Sequence: Synthetic oligonucleotide
aaaugcauuugaacaacauaauacaca

SEQ ID NO: 134626 - RNA, 27 nt, Artificial Sequence
  Description of Artificial Sequence: Synthetic oligonucleotide
ggcuuuccugucacaaagauuaaaaac

SEQ ID NO: 134627 - RNA, 27 nt, Artificial Sequence
  Description of Artificial Sequence: Synthetic oligonucleotide
agggcuuuccugucacaaagauuaaaa

SEQ ID NO: 134628 - RNA, 27 nt, Artificial Sequence
  Description of Artificial Sequence: Synthetic oligonucleotide
ggccaugcugggagacauaagcagcag

SEQ ID NO: 134629 - RNA, 27 nt, Artificial Sequence
  Description of Artificial Sequence: Synthetic oligonucleotide
ucagggagaagcuucugaaacacuucu

SEQ ID NO: 134630 - RNA, 27 nt, Artificial Sequence
  Description of Artificial Sequence: Synthetic oligonucleotide
aagggcuucuuccuuauugauggucag

SEQ ID NO: 134631 - RNA, 27 nt, Artificial Sequence
  Description of Artificial Sequence: Synthetic oligonucleotide
ugaagggcuucuuccuuauugaugguc

SEQ ID NO: 134632 - RNA, 27 nt, Artificial Sequence
  Description of Artificial Sequence: Synthetic oligonucleotide
cgcugaagggcuucuuccuuauugaug

SEQ ID NO: 134633 - RNA, 27 nt, Artificial Sequence
  Description of Artificial Sequence: Synthetic oligonucleotide
gccgcugaagggcuucuuccuuauuga

SEQ ID NO: 134634 - RNA, 27 nt, Artificial Sequence
  Description of Artificial Sequence: Synthetic oligonucleotide
acuggccgcugaagggcuucuuccuua

SEQ ID NO: 134635 - RNA, 27 nt, Artificial Sequence
  Description of Artificial Sequence: Synthetic oligonucleotide
cggagcuuuucaccuuuaguuaugcuu

SEQ ID NO: 134636 - RNA, 27 nt, Artificial Sequence
  Description of Artificial Sequence: Synthetic oligonucleotide
ccggagcuuuucaccuuuaguuaugcu

SEQ ID NO: 134637 - RNA, 27 nt, Artificial Sequence
  Description of Artificial Sequence: Synthetic oligonucleotide
cagacuguugacuggcgugauguaguu

SEQ ID NO: 134638 - RNA, 27 nt, Artificial Sequence
  Description of Artificial Sequence: Synthetic oligonucleotide
cuuuugaacucugcuuaaauccagugg

SEQ ID NO: 134639 - RNA, 27 nt, Artificial Sequence
  Description of Artificial Sequence: Synthetic oligonucleotide
gcuuuugaacucugcuuaaauccagug

SEQ ID NO: 134640 - RNA, 27 nt, Artificial Sequence
  Description of Artificial Sequence: Synthetic oligonucleotide
agggcuuuugaacucugcuuaaaucca

SEQ ID NO: 134641 - RNA, 27 nt, Artificial Sequence
  Description of Artificial Sequence: Synthetic oligonucleotide
aagggcuuuugaacucugcuuaaaucc

SEQ ID NO: 134642 - RNA, 27 nt, Artificial Sequence
  Description of Artificial Sequence: Synthetic oligonucleotide
ugaagggcuuuugaacucugcuuaaau

SEQ ID NO: 134643 - RNA, 27 nt, Artificial Sequence
  Description of Artificial Sequence: Synthetic oligonucleotide
cugaagggcuuuugaacucugcuuaaa

SEQ ID NO: 134644 - RNA, 27 nt, Artificial Sequence
  Description of Artificial Sequence: Synthetic oligonucleotide
cgcugaagggcuuuugaacucugcuua

SEQ ID NO: 134645 - RNA, 27 nt, Artificial Sequence
  Description of Artificial Sequence: Synthetic oligonucleotide
cgagcggcuucacucagacccugaggc

SEQ ID NO: 134646 - RNA, 27 nt, Artificial Sequence
  Description of Artificial Sequence: Synthetic oligonucleotide
uugacuggcgugauguaguugcuuggg

SEQ ID NO: 134647 - RNA, 27 nt, Artificial Sequence
  Description of Artificial Sequence: Synthetic oligonucleotide
cacgcaccaagaagcugccauugaucc

SEQ ID NO: 134648 - RNA, 27 nt, Artificial Sequence
  Description of Artificial Sequence: Synthetic oligonucleotide
cugaugaauccaaugugggcuggaauc

SEQ ID NO: 134649 - RNA, 27 nt, Artificial Sequence
  Description of Artificial Sequence: Synthetic oligonucleotide
cuuagguauuccacauucucagcugug

SEQ ID NO: 134650 - RNA, 27 nt, Artificial Sequence
  Description of Artificial Sequence: Synthetic oligonucleotide
ugagccucaaauuaggagauacguuuu

SEQ ID NO: 134651 - RNA, 27 nt, Artificial Sequence
  Description of Artificial Sequence: Synthetic oligonucleotide
ccaauuguagagaaauuauuuuaggaa

SEQ ID NO: 134652 - RNA, 27 nt, Artificial Sequence
  Description of Artificial Sequence: Synthetic oligonucleotide
ggcuccuaacuagcugaaucuuccaau

SEQ ID NO: 134653 - RNA, 27 nt, Artificial Sequence
  Description of Artificial Sequence: Synthetic oligonucleotide
guggauauugacuaggagaguuuaaaa

SEQ ID NO: 134654 - RNA, 27 nt, Artificial Sequence
  Description of Artificial Sequence: Synthetic oligonucleotide
ugugacugaacauaacuguaggcugaa

SEQ ID NO: 134655 - RNA, 27 nt, Artificial Sequence
  Description of Artificial Sequence: Synthetic oligonucleotide
guaugugugugugacugaacauaacug

SEQ ID NO: 134656 - RNA, 27 nt, Artificial Sequence
  Description of Artificial Sequence: Synthetic oligonucleotide
aagcaaaaggaacauuuuguaugugug

SEQ ID NO: 134657 - RNA, 27 nt, Artificial Sequence
  Description of Artificial Sequence: Synthetic oligonucleotide
aaaaauuacuuuaaaagcaaaaggaac

SEQ ID NO: 134658 - RNA, 27 nt, Artificial Sequence
  Description of Artificial Sequence: Synthetic oligonucleotide
ccauugacuguugcuucacaggucaga

SEQ ID NO: 134659 - RNA, 27 nt, Artificial Sequence
  Description of Artificial Sequence: Synthetic oligonucleotide
auugguuugucgaugugugagauaguu

SEQ ID NO: 134660 - RNA, 27 nt, Artificial Sequence
  Description of Artificial Sequence: Synthetic oligonucleotide
agugguagcaguacaauugaggacaag

SEQ ID NO: 134661 - RNA, 27 nt, Artificial Sequence
  Description of Artificial Sequence: Synthetic oligonucleotide
uaagaccgcuugccagcuacgguuuca

SEQ ID NO: 134662 - RNA, 27 nt, Artificial Sequence
  Description of Artificial Sequence: Synthetic oligonucleotide
agccgguaagaccgcuugccagcuacg

SEQ ID NO: 134663 - RNA, 27 nt, Artificial Sequence
  Description of Artificial Sequence: Synthetic oligonucleotide
gguaacccaucuuuuaaccauacaacu

SEQ ID NO: 134664 - RNA, 27 nt, Artificial Sequence
  Description of Artificial Sequence: Synthetic oligonucleotide
ucgcagguaacccaucuuuuaaccaua

SEQ ID NO: 134665 - RNA, 27 nt, Artificial Sequence
  Description of Artificial Sequence: Synthetic oligonucleotide
cucagcaagauuguauaauucccugca

SEQ ID NO: 134666 - RNA, 27 nt, Artificial Sequence
  Description of Artificial Sequence: Synthetic oligonucleotide
acuguuuuaugcucagcaagauuguau

SEQ ID NO: 134667 - RNA, 27 nt, Artificial Sequence
  Description of Artificial Sequence: Synthetic oligonucleotide
aggauaaaggacucuucauuauuggaa

SEQ ID NO: 134668 - RNA, 27 nt, Artificial Sequence
  Description of Artificial Sequence: Synthetic oligonucleotide
caacuugcguuggaacauccaaagugu

SEQ ID NO: 134669 - RNA, 27 nt, Artificial Sequence
  Description of Artificial Sequence: Synthetic oligonucleotide
augguuucaguuuaguggaagcauuua

SEQ ID NO: 134670 - RNA, 27 nt, Artificial Sequence
  Description of Artificial Sequence: Synthetic oligonucleotide
auauuuaacaaagucaaacuuucucac

SEQ ID NO: 134671 - RNA, 27 nt, Artificial Sequence
  Description of Artificial Sequence: Synthetic oligonucleotide
aacuuuuaauauacaguaguucuuuuc

SEQ ID NO: 134672 - RNA, 27 nt, Artificial Sequence
  Description of Artificial Sequence: Synthetic oligonucleotide
guuaagucaaaacccguauuucuaaag

SEQ ID NO: 134673 - RNA, 27 nt, Artificial Sequence
  Description of Artificial Sequence: Synthetic oligonucleotide
gugcugaguuugcuguacccauguuga

SEQ ID NO: 134674 - RNA, 27 nt, Artificial Sequence
  Description of Artificial Sequence: Synthetic oligonucleotide
ugaggucagcaucuucugugucuuuac

SEQ ID NO: 134675 - RNA, 27 nt, Artificial Sequence
  Description of Artificial Sequence: Synthetic oligonucleotide
gcgaucugaauaaaccucccuacuagc

SEQ ID NO: 134676 - RNA, 27 nt, Artificial Sequence
  Description of Artificial Sequence: Synthetic oligonucleotide
aucccagaacccugcugcagaaggcca

SEQ ID NO: 134677 - RNA, 27 nt, Artificial Sequence
  Description of Artificial Sequence: Synthetic oligonucleotide
cauaauuuccaauauguaccagaccuu

SEQ ID NO: 134678 - RNA, 27 nt, Artificial Sequence
  Description of Artificial Sequence: Synthetic oligonucleotide
cuagugcuuccaucggaaggacuaggu

SEQ ID NO: 134679 - RNA, 27 nt, Artificial Sequence
  Description of Artificial Sequence: Synthetic oligonucleotide
uccacauaaaaacaauauucacuggga

SEQ ID NO: 134680 - RNA, 27 nt, Artificial Sequence
  Description of Artificial Sequence: Synthetic oligonucleotide
ucuaccaauuccaacuugaauucauug

SEQ ID NO: 134681 - RNA, 27 nt, Artificial Sequence
  Description of Artificial Sequence: Synthetic oligonucleotide
ucuccaagucuaaaucuguguccugag

SEQ ID NO: 134682 - RNA, 27 nt, Artificial Sequence
  Description of Artificial Sequence: Synthetic oligonucleotide
uggaauacuguaacugugcuuugagga

SEQ ID NO: 134683 - RNA, 27 nt, Artificial Sequence
  Description of Artificial Sequence: Synthetic oligonucleotide
uuaauucaucagugguggcagugguag

SEQ ID NO: 134684 - RNA, 27 nt, Artificial Sequence
  Description of Artificial Sequence: Synthetic oligonucleotide
gugaugauguggcacuaguaguuucuu

SEQ ID NO: 134685 - RNA, 27 nt, Artificial Sequence
  Description of Artificial Sequence: Synthetic oligonucleotide
ucuguuuggugaggcuguccgacuuug

SEQ ID NO: 134686 - RNA, 27 nt, Artificial Sequence
  Description of Artificial Sequence: Synthetic oligonucleotide
ccaucauguuccauuuuucgcuuucuc

SEQ ID NO: 134687 - RNA, 27 nt, Artificial Sequence
  Description of Artificial Sequence: Synthetic oligonucleotide
gcagucuacaugcuaaaucagagggua

SEQ ID NO: 134688 - RNA, 27 nt, Artificial Sequence
  Description of Artificial Sequence: Synthetic oligonucleotide
cauaaauagauccuuaaauagcucaaa

SEQ ID NO: 134689 - RNA, 27 nt, Artificial Sequence
  Description of Artificial Sequence: Synthetic oligonucleotide
ugauaauagugcuuuuucaccuuuuuc

SEQ ID NO: 134690 - RNA, 27 nt, Artificial Sequence
  Description of Artificial Sequence: Synthetic oligonucleotide
gcagaacugauaauagugcuuuuucac

SEQ ID NO: 134691 - RNA, 27 nt, Artificial Sequence
  Description of Artificial Sequence: Synthetic oligonucleotide
guagguuuaaucuuucuuuucagccau

SEQ ID NO: 134692 - RNA, 27 nt, Artificial Sequence
  Description of Artificial Sequence: Synthetic oligonucleotide
agaaggauuuuauuauaaggguuuaau

SEQ ID NO: 134693 - RNA, 27 nt, Artificial Sequence
  Description of Artificial Sequence: Synthetic oligonucleotide
gucuacagcauuggcuaauaguaugaa

SEQ ID NO: 134694 - RNA, 27 nt, Artificial Sequence
  Description of Artificial Sequence: Synthetic oligonucleotide
cuauuccuaucaaaaugcuucugucua

SEQ ID NO: 134695 - RNA, 27 nt, Artificial Sequence
  Description of Artificial Sequence: Synthetic oligonucleotide
ucagggccauuaucuuauuugcucuau

SEQ ID NO: 134696 - RNA, 27 nt, Artificial Sequence
  Description of Artificial Sequence: Synthetic oligonucleotide
ugcuugaggaagagaaaaauguugguc

SEQ ID NO: 134697 - RNA, 27 nt, Artificial Sequence
  Description of Artificial Sequence: Synthetic oligonucleotide
ugggcugaacuuuucucauacuuaaag

SEQ ID NO: 134698 - RNA, 27 nt, Artificial Sequence
  Description of Artificial Sequence: Synthetic oligonucleotide
gguucagcagccaucuuuauuccugcg

SEQ ID NO: 134699 - RNA, 27 nt, Artificial Sequence
  Description of Artificial Sequence: Synthetic oligonucleotide
ugaagagaacuuggucauucaaauuuc

SEQ ID NO: 134700 - RNA, 27 nt, Artificial Sequence
  Description of Artificial Sequence: Synthetic oligonucleotide
cucuaggcuggcuaucuuuauacauac

SEQ ID NO: 134701 - RNA, 27 nt, Artificial Sequence
  Description of Artificial Sequence: Synthetic oligonucleotide
acacuucacagagauaguuacagccau

SEQ ID NO: 134702 - RNA, 27 nt, Artificial Sequence
  Description of Artificial Sequence: Synthetic oligonucleotide
uugaaauuuucucacacuucacagaga

SEQ ID NO: 134703 - RNA, 27 nt, Artificial Sequence
  Description of Artificial Sequence: Synthetic oligonucleotide
ucaggaggauucauuuccuuaaaggaa

SEQ ID NO: 134704 - RNA, 27 nt, Artificial Sequence
  Description of Artificial Sequence: Synthetic oligonucleotide
auaugaugucacuuuuuguauccuuga

SEQ ID NO: 134705 - RNA, 27 nt, Artificial Sequence
  Description of Artificial Sequence: Synthetic oligonucleotide
uaugaugaagauucaaauugcaucuua

SEQ ID NO: 134706 - RNA, 27 nt, Artificial Sequence
  Description of Artificial Sequence: Synthetic oligonucleotide
uuaauagcuagucuucguuuugaacag

SEQ ID NO: 134707 - RNA, 27 nt, Artificial Sequence
  Description of Artificial Sequence: Synthetic oligonucleotide
auuuuuaguagagaugagguuucacca

SEQ ID NO: 134708 - RNA, 27 nt, Artificial Sequence
  Description of Artificial Sequence: Synthetic oligonucleotide
aggcgagauagagcuucucuuucguuc

SEQ ID NO: 134709 - RNA, 27 nt, Artificial Sequence
  Description of Artificial Sequence: Synthetic oligonucleotide
aacuggaccgaaggcgcuuguggagaa

SEQ ID NO: 134710 - RNA, 27 nt, Artificial Sequence
  Description of Artificial Sequence: Synthetic oligonucleotide
gcggcuacaucuuuggaaucuucuccu

SEQ ID NO: 134711 - RNA, 27 nt, Artificial Sequence
  Description of Artificial Sequence: Synthetic oligonucleotide
caagucuccucauugaauccagauugg

SEQ ID NO: 134712 - RNA, 27 nt, Artificial Sequence
  Description of Artificial Sequence: Synthetic oligonucleotide
uccucacuacucucaaaucuguucugg

SEQ ID NO: 134713 - RNA, 27 nt, Artificial Sequence
  Description of Artificial Sequence: Synthetic oligonucleotide
uuuguacucaucugcacagcucuggcu

SEQ ID NO: 134714 - RNA, 27 nt, Artificial Sequence
  Description of Artificial Sequence: Synthetic oligonucleotide
gcccauuaacaacaacaaucugaggug

SEQ ID NO: 134715 - RNA, 27 nt, Artificial Sequence
  Description of Artificial Sequence: Synthetic oligonucleotide
aauaaauuaaaaauaauuaaaauagug

SEQ ID NO: 134716 - RNA, 27 nt, Artificial Sequence
  Description of Artificial Sequence: Synthetic oligonucleotide
cauauuuaaauauuaauaaauuaaaaa

SEQ ID NO: 134717 - RNA, 27 nt, Artificial Sequence
  Description of Artificial Sequence: Synthetic oligonucleotide
gaaacaaaggauauucaaacugcauag

SEQ ID NO: 134718 - RNA, 27 nt, Artificial Sequence
  Description of Artificial Sequence: Synthetic oligonucleotide
caaacacuuagacgccagcagcauggg

SEQ ID NO: 134719 - RNA, 27 nt, Artificial Sequence
  Description of Artificial Sequence: Synthetic oligonucleotide
uuugucacaggugaaaugcacaucuga

SEQ ID NO: 134720 - RNA, 27 nt, Artificial Sequence
  Description of Artificial Sequence: Synthetic oligonucleotide
uaauucagccuggcacagguuuugauc

SEQ ID NO: 134721 - RNA, 27 nt, Artificial Sequence
  Description of Artificial Sequence: Synthetic oligonucleotide
auuguaagaaugacuacccacauucac

SEQ ID NO: 134722 - RNA, 27 nt, Artificial Sequence
  Description of Artificial Sequence: Synthetic oligonucleotide
caauuguaagaaugacuacccacauuc

SEQ ID NO: 134723 - RNA, 27 nt, Artificial Sequence
  Description of Artificial Sequence: Synthetic oligonucleotide
guacacucucugaugcucauuuucaua

SEQ ID NO: 134724 - RNA, 27 nt, Artificial Sequence
  Description of Artificial Sequence: Synthetic oligonucleotide
cugcugaguucuacaugaaaagcaaau

SEQ ID NO: 134725 - RNA, 27 nt, Artificial Sequence
  Description of Artificial Sequence: Synthetic oligonucleotide
uacugaaaauaaauauagaaauacaac

SEQ ID NO: 134726 - RNA, 27 nt, Artificial Sequence
  Description of Artificial Sequence: Synthetic oligonucleotide
uuccauuuaagaaacauuaaucaaaac

SEQ ID NO: 134727 - RNA, 27 nt, Artificial Sequence
  Description of Artificial Sequence: Synthetic oligonucleotide
acaauuuuaggcacuauacacguuguu

SEQ ID NO: 134728 - RNA, 27 nt, Artificial Sequence
  Description of Artificial Sequence: Synthetic oligonucleotide
ccagauguuaguagccaaggauauggu

SEQ ID NO: 134729 - RNA, 27 nt, Artificial Sequence
  Description of Artificial Sequence: Synthetic oligonucleotide
agcucacagucuccagauguuaguagc

SEQ ID NO: 134730 - RNA, 27 nt, Artificial Sequence
  Description of Artificial Sequence: Synthetic oligonucleotide
auuaauaaaaagcacacaacuuauggc

SEQ ID NO: 134731 - RNA, 27 nt, Artificial Sequence
  Description of Artificial Sequence: Synthetic oligonucleotide
aauguaagaagagccaaaaugaugcau

SEQ ID NO: 134732 - RNA, 27 nt, Artificial Sequence
  Description of Artificial Sequence: Synthetic oligonucleotide
acauuuuuacaaauguaagaagagcca

SEQ ID NO: 134733 - RNA, 27 nt, Artificial Sequence
  Description of Artificial Sequence: Synthetic oligonucleotide
aauaugaauuaagaugaccuaaucugu

SEQ ID NO: 134734 - RNA, 27 nt, Artificial Sequence
  Description of Artificial Sequence: Synthetic oligonucleotide
ucaugauuaguucuuucaauuccaucc

SEQ ID NO: 134735 - RNA, 27 nt, Artificial Sequence
  Description of Artificial Sequence: Synthetic oligonucleotide
cccaagagcagaaggaaugagugugca

SEQ ID NO: 134736 - RNA, 27 nt, Artificial Sequence
  Description of Artificial Sequence: Synthetic oligonucleotide
cucaaagcuacugguuaccucuacacc

SEQ ID NO: 134737 - RNA, 27 nt, Artificial Sequence
  Description of Artificial Sequence: Synthetic oligonucleotide
ugaaauauuacguggcaugugguuggg

SEQ ID NO: 134738 - RNA, 27 nt, Artificial Sequence
  Description of Artificial Sequence: Synthetic oligonucleotide
agugaagagaauaacuuguuuccgaag

SEQ ID NO: 134739 - RNA, 27 nt, Artificial Sequence
  Description of Artificial Sequence: Synthetic oligonucleotide
uuucuuagcauuaguuauugggaguga

SEQ ID NO: 134740 - RNA, 27 nt, Artificial Sequence
  Description of Artificial Sequence: Synthetic oligonucleotide
uugauuuucagcauuucuuagcauuag

SEQ ID NO: 134741 - RNA, 27 nt, Artificial Sequence
  Description of Artificial Sequence: Synthetic oligonucleotide
aaaguaaucauauuuagagaaagacag

SEQ ID NO: 134742 - RNA, 27 nt, Artificial Sequence
  Description of Artificial Sequence: Synthetic oligonucleotide
uguagaacaaaaugccugaaauucagc

SEQ ID NO: 134743 - RNA, 27 nt, Artificial Sequence
  Description of Artificial Sequence: Synthetic oligonucleotide
gagagucccgggugagagggaaucgcc

SEQ ID NO: 134744 - RNA, 27 nt, Artificial Sequence
  Description of Artificial Sequence: Synthetic oligonucleotide
cuuuacuuuaaagguucacuuuccuug

SEQ ID NO: 134745 - RNA, 27 nt, Artificial Sequence
  Description of Artificial Sequence: Synthetic oligonucleotide
ccaggcuuccagagcaugcagccuccu

SEQ ID NO: 134746 - RNA, 27 nt, Artificial Sequence
  Description of Artificial Sequence: Synthetic oligonucleotide
cucucuuuuguuuucuguucagagaaa

SEQ ID NO: 134747 - RNA, 27 nt, Artificial Sequence
  Description of Artificial Sequence: Synthetic oligonucleotide
cggcauaacugauuacagccaaguuca

SEQ ID NO: 134748 - RNA, 27 nt, Artificial Sequence
  Description of Artificial Sequence: Synthetic oligonucleotide
uggacuucuuuuaauuuuggcuucuuc

SEQ ID NO: 134749 - RNA, 27 nt, Artificial Sequence
  Description of Artificial Sequence: Synthetic oligonucleotide
uaaccucaccuggacuucuuuuaauuu

SEQ ID NO: 134750 - RNA, 27 nt, Artificial Sequence
  Description of Artificial Sequence: Synthetic oligonucleotide
guccucuucccgauaauccggauucag

SEQ ID NO: 134751 - RNA, 27 nt, Artificial Sequence
  Description of Artificial Sequence: Synthetic oligonucleotide
acaauacuugcuuugaugucacauuaa

SEQ ID NO: 134752 - RNA, 27 nt, Artificial Sequence
  Description of Artificial Sequence: Synthetic oligonucleotide
gagugcuacaauacuugcuuugauguc

SEQ ID NO: 134753 - RNA, 27 nt, Artificial Sequence
  Description of Artificial Sequence: Synthetic oligonucleotide
auuugugguuuuguuuucucucucucu

SEQ ID NO: 134754 - RNA, 27 nt, Artificial Sequence
  Description of Artificial Sequence: Synthetic oligonucleotide
uguaugggcuuaaauacuacagcgagg

SEQ ID NO: 134755 - RNA, 27 nt, Artificial Sequence
  Description of Artificial Sequence: Synthetic oligonucleotide
cuguaugggcuuaaauacuacagcgag

SEQ ID NO: 134756 - RNA, 27 nt, Artificial Sequence
  Description of Artificial Sequence: Synthetic oligonucleotide
ggaagguuucuguaugggcuuaaauac

SEQ ID NO: 134757 - RNA, 27 nt, Artificial Sequence
  Description of Artificial Sequence: Synthetic oligonucleotide
guagguauaccauguuuauuuuaauac

SEQ ID NO: 134758 - RNA, 27 nt, Artificial Sequence
  Description of Artificial Sequence: Synthetic oligonucleotide
uccgaaaacuggccgaucagaacagcc

SEQ ID NO: 134759 - RNA, 27 nt, Artificial Sequence
  Description of Artificial Sequence: Synthetic oligonucleotide
cccuguuccaaaguucaaauuauuugu

SEQ ID NO: 134760 - RNA, 27 nt, Artificial Sequence
  Description of Artificial Sequence: Synthetic oligonucleotide
acuggaaaguuaaauuaaggucgcaau

SEQ ID NO: 134761 - RNA, 27 nt, Artificial Sequence
  Description of Artificial Sequence: Synthetic oligonucleotide
caaaaccaaacuuuagcuuucucagcc

SEQ ID NO: 134762 - RNA, 27 nt, Artificial Sequence
  Description of Artificial Sequence: Synthetic oligonucleotide
uacagugggaaguagcaucuuuacuuu

SEQ ID NO: 134763 - RNA, 27 nt, Artificial Sequence
  Description of Artificial Sequence: Synthetic oligonucleotide
ucauaugguaucagcaauuaagcagua

SEQ ID NO: 134764 - RNA, 27 nt, Artificial Sequence
  Description of Artificial Sequence: Synthetic oligonucleotide
cagcccauguuucauucauaugguauc

SEQ ID NO: 134765 - RNA, 27 nt, Artificial Sequence
  Description of Artificial Sequence: Synthetic oligonucleotide
uaugaaaaaguuggauaagaaaguugg

SEQ ID NO: 134766 - RNA, 27 nt, Artificial Sequence
  Description of Artificial Sequence: Synthetic oligonucleotide
uccggccucaugaugucaugcaaggcu

SEQ ID NO: 134767 - RNA, 27 nt, Artificial Sequence
  Description of Artificial Sequence: Synthetic oligonucleotide
acaaaugcagucauauacaaauucagg

SEQ ID NO: 134768 - RNA, 27 nt, Artificial Sequence
  Description of Artificial Sequence: Synthetic oligonucleotide
gguaguaaacauucuacuaggauucuu

SEQ ID NO: 134769 - RNA, 27 nt, Artificial Sequence
  Description of Artificial Sequence: Synthetic oligonucleotide
uuucaucaaaaaauucuucccuuucug

SEQ ID NO: 134770 - RNA, 27 nt, Artificial Sequence
  Description of Artificial Sequence: Synthetic oligonucleotide
aaauucacacacuggcaugccgauagc

SEQ ID NO: 134771 - RNA, 27 nt, Artificial Sequence
  Description of Artificial Sequence: Synthetic oligonucleotide
acauacauugcucuacuaugaggugaa

SEQ ID NO: 134772 - RNA, 27 nt, Artificial Sequence
  Description of Artificial Sequence: Synthetic oligonucleotide
uauauaugugcuuuggcaauucuggug

SEQ ID NO: 134773 - RNA, 27 nt, Artificial Sequence
  Description of Artificial Sequence: Synthetic oligonucleotide
ggagaaacuauuacccagaucaccacu

SEQ ID NO: 134774 - RNA, 27 nt, Artificial Sequence
  Description of Artificial Sequence: Synthetic oligonucleotide
auuuggagaaacuauuacccagaucac

SEQ ID NO: 134775 - RNA, 27 nt, Artificial Sequence
  Description of Artificial Sequence: Synthetic oligonucleotide
uuucuaggaaguauucaucacauccac

SEQ ID NO: 134776 - RNA, 27 nt, Artificial Sequence
  Description of Artificial Sequence: Synthetic oligonucleotide
cauauaugguguagcuguggaaaugcg

SEQ ID NO: 134777 - RNA, 27 nt, Artificial Sequence
  Description of Artificial Sequence: Synthetic oligonucleotide
cuccauucauauaugguguagcugugg

SEQ ID NO: 134778 - RNA, 27 nt, Artificial Sequence
  Description of Artificial Sequence: Synthetic oligonucleotide
aucuucuucucguguaagaacugcagc

SEQ ID NO: 134779 - RNA, 27 nt, Artificial Sequence
  Description of Artificial Sequence: Synthetic oligonucleotide
ucccuguaaaugaucuucuucucgugu

SEQ ID NO: 134780 - RNA, 27 nt, Artificial Sequence
  Description of Artificial Sequence: Synthetic oligonucleotide
gucccuguaaaugaucuucuucucgug

SEQ ID NO: 134781 - RNA, 27 nt, Artificial Sequence
  Description of Artificial Sequence: Synthetic oligonucleotide
ucaggucccuguaaaugaucuucuucu

SEQ ID NO: 134782 - RNA, 27 nt, Artificial Sequence
  Description of Artificial Sequence: Synthetic oligonucleotide
gaugcagucaaacaccucuuccucugu

SEQ ID NO: 134783 - RNA, 27 nt, Artificial Sequence
  Description of Artificial Sequence: Synthetic oligonucleotide
cgaugcagucaaacaccucuuccucug

SEQ ID NO: 134784 - RNA, 27 nt, Artificial Sequence
  Description of Artificial Sequence: Synthetic oligonucleotide
cccugugaacucgcccucaaaguagcg

SEQ ID NO: 134785 - RNA, 27 nt, Artificial Sequence
  Description of Artificial Sequence: Synthetic oligonucleotide
ggacagaggugccaggagaugcccuca

SEQ ID NO: 134786 - RNA, 27 nt, Artificial Sequence
  Description of Artificial Sequence: Synthetic oligonucleotide
uuaaaaagacaaaccauaucacuccuu

SEQ ID NO: 134787 - RNA, 27 nt, Artificial Sequence
  Description of Artificial Sequence: Synthetic oligonucleotide
cuuaaaaagacaaaccauaucacuccu

SEQ ID NO: 134788 - RNA, 27 nt, Artificial Sequence
  Description of Artificial Sequence: Synthetic oligonucleotide
gacaaccuuuaggaucuuuacugcaac

SEQ ID NO: 134789 - RNA, 27 nt, Artificial Sequence
  Description of Artificial Sequence: Synthetic oligonucleotide
gucgacaaccuuuaggaucuuuacugc

SEQ ID NO: 134790 - RNA, 27 nt, Artificial Sequence
  Description of Artificial Sequence: Synthetic oligonucleotide
acaauugccagguuguccuuugucaug

SEQ ID NO: 134791 - RNA, 27 nt, Artificial Sequence
  Description of Artificial Sequence: Synthetic oligonucleotide
ccucgcaccacugggucacaauugcca

SEQ ID NO: 134792 - RNA, 27 nt, Artificial Sequence
  Description of Artificial Sequence: Synthetic oligonucleotide
auuucaugucucuauggaugauguucu

SEQ ID NO: 134793 - RNA, 27 nt, Artificial Sequence
  Description of Artificial Sequence: Synthetic oligonucleotide
uggagaaauauauuguuggauuucaug

SEQ ID NO: 134794 - RNA, 27 nt, Artificial Sequence
  Description of Artificial Sequence: Synthetic oligonucleotide
agccuucauggagaaauauauuguugg

SEQ ID NO: 134795 - RNA, 27 nt, Artificial Sequence
  Description of Artificial Sequence: Synthetic oligonucleotide
accacuccagcgugacuuuacuguugc

SEQ ID NO: 134796 - RNA, 27 nt, Artificial Sequence
  Description of Artificial Sequence: Synthetic oligonucleotide
ccucucuuccuuuacuuucuucacaca

SEQ ID NO: 134797 - RNA, 27 nt, Artificial Sequence
  Description of Artificial Sequence: Synthetic oligonucleotide
gcccgaugcaaggauggcucggaagcg

SEQ ID NO: 134798 - RNA, 27 nt, Artificial Sequence
  Description of Artificial Sequence: Synthetic oligonucleotide
cacaguaggauauucaaccuccauuuc

SEQ ID NO: 134799 - RNA, 27 nt, Artificial Sequence
  Description of Artificial Sequence: Synthetic oligonucleotide
uuacacaguaggauauucaaccuccau

SEQ ID NO: 134800 - RNA, 27 nt, Artificial Sequence
  Description of Artificial Sequence: Synthetic oligonucleotide
uacacuacaagggaaaacucaaaaucu

SEQ ID NO: 134801 - RNA, 27 nt, Artificial Sequence
  Description of Artificial Sequence: Synthetic oligonucleotide
caaucaacaaagaacaaacaggauaaa

SEQ ID NO: 134802 - RNA, 27 nt, Artificial Sequence
  Description of Artificial Sequence: Synthetic oligonucleotide
uuucaaucaacaaagaacaaacaggau

SEQ ID NO: 134803 - RNA, 27 nt, Artificial Sequence
  Description of Artificial Sequence: Synthetic oligonucleotide
auggaagaaaaagaaggcuguagagaa

SEQ ID NO: 134804 - RNA, 27 nt, Artificial Sequence
  Description of Artificial Sequence: Synthetic oligonucleotide
uagaaggaagauuagcuauggaagaaa

SEQ ID NO: 134805 - RNA, 27 nt, Artificial Sequence
  Description of Artificial Sequence: Synthetic oligonucleotide
augaagcauucaacaggaagauuauuu

SEQ ID NO: 134806 - RNA, 27 nt, Artificial Sequence
  Description of Artificial Sequence: Synthetic oligonucleotide
caugaagcauucaacaggaagauuauu

SEQ ID NO: 134807 - RNA, 27 nt, Artificial Sequence
  Description of Artificial Sequence: Synthetic oligonucleotide
ucaaaguagaauucaagucaugaagca

SEQ ID NO: 134808 - RNA, 27 nt, Artificial Sequence
  Description of Artificial Sequence: Synthetic oligonucleotide
gucuguaguugcuucucucccucuuag

SEQ ID NO: 134809 - RNA, 27 nt, Artificial Sequence
  Description of Artificial Sequence: Synthetic oligonucleotide
guugaccuuggucugguaggagacggc

SEQ ID NO: 134810 - RNA, 27 nt, Artificial Sequence
  Description of Artificial Sequence: Synthetic oligonucleotide
gucgagauagucgggccgauugaucuc

SEQ ID NO: 134811 - RNA, 27 nt, Artificial Sequence
  Description of Artificial Sequence: Synthetic oligonucleotide
guuugggaagguuggauguucguccuc

SEQ ID NO: 134812 - RNA, 27 nt, Artificial Sequence
  Description of Artificial Sequence: Synthetic oligonucleotide
aguucuaagcuuggguuccgacccuaa

SEQ ID NO: 134813 - RNA, 27 nt, Artificial Sequence
  Description of Artificial Sequence: Synthetic oligonucleotide
uuaaaguucuaagcuuggguuccgacc

SEQ ID NO: 134814 - RNA, 27 nt, Artificial Sequence
  Description of Artificial Sequence: Synthetic oligonucleotide
guugcuuaaaguucuaagcuuggguuc

SEQ ID NO: 134815 - RNA, 27 nt, Artificial Sequence
  Description of Artificial Sequence: Synthetic oligonucleotide
gugguggucuuguugcuuaaaguucua

SEQ ID NO: 134816 - RNA, 27 nt, Artificial Sequence
  Description of Artificial Sequence: Synthetic oligonucleotide
acuuuauuucucgccacugaauaguag

SEQ ID NO: 134817 - RNA, 27 nt, Artificial Sequence
  Description of Artificial Sequence: Synthetic oligonucleotide
aacuuuauuucucgccacugaauagua

SEQ ID NO: 134818 - RNA, 27 nt, Artificial Sequence
  Description of Artificial Sequence: Synthetic oligonucleotide
ggaucauuuccuguuaucuguguuugu

SEQ ID NO: 134819 - RNA, 27 nt, Artificial Sequence
  Description of Artificial Sequence: Synthetic oligonucleotide
guuucauuucuucucuuuucuuaaggc

SEQ ID NO: 134820 - RNA, 27 nt, Artificial Sequence
  Description of Artificial Sequence: Synthetic oligonucleotide
ggaggauggaaacacacuccuucaguu

SEQ ID NO: 134821 - RNA, 27 nt, Artificial Sequence
  Description of Artificial Sequence: Synthetic oligonucleotide
ucaaagauuuucagucccgcggugaca

SEQ ID NO: 134822 - RNA, 27 nt, Artificial Sequence
  Description of Artificial Sequence: Synthetic oligonucleotide
ccugaacggcacgcuuauuucugcugu

SEQ ID NO: 134823 - RNA, 27 nt, Artificial Sequence
  Description of Artificial Sequence: Synthetic oligonucleotide
cuucuggacccugaacggcacgcuuau

SEQ ID NO: 134824 - RNA, 27 nt, Artificial Sequence
  Description of Artificial Sequence: Synthetic oligonucleotide
caagcagucuugagugacuguuucuuc

SEQ ID NO: 134825 - RNA, 27 nt, Artificial Sequence
  Description of Artificial Sequence: Synthetic oligonucleotide
ccaaagacauggaccuucuuccucuga

SEQ ID NO: 134826 - RNA, 27 nt, Artificial Sequence
  Description of Artificial Sequence: Synthetic oligonucleotide
guguuucaggcauauuuugaauacauc

SEQ ID NO: 134827 - RNA, 27 nt, Artificial Sequence
  Description of Artificial Sequence: Synthetic oligonucleotide
gagguacagagaaagggaggaaaauag

SEQ ID NO: 134828 - RNA, 27 nt, Artificial Sequence
  Description of Artificial Sequence: Synthetic oligonucleotide
ucuugucuugcucuaucuuucuuuggu

SEQ ID NO: 134829 - RNA, 27 nt, Artificial Sequence
  Description of Artificial Sequence: Synthetic oligonucleotide
uuucuugucuugcucuaucuuucuuug

SEQ ID NO: 134830 - RNA, 27 nt, Artificial Sequence
  Description of Artificial Sequence: Synthetic oligonucleotide
ggaucuuguacaaacaaaugcuuucuc

SEQ ID NO: 134831 - RNA, 27 nt, Artificial Sequence
  Description of Artificial Sequence: Synthetic oligonucleotide
ucugcaaguacguucguuuaacucaag

SEQ ID NO: 134832 - RNA, 27 nt, Artificial Sequence
  Description of Artificial Sequence: Synthetic oligonucleotide
ucuguaucgaucguucuguaucagucu

SEQ ID NO: 134833 - RNA, 27 nt, Artificial Sequence
  Description of Artificial Sequence: Synthetic oligonucleotide
auuuauuuuuauauauauauaauauau

SEQ ID NO: 134834 - RNA, 27 nt, Artificial Sequence
  Description of Artificial Sequence: Synthetic oligonucleotide
auauuuauuuuuauauauauauaauau

SEQ ID NO: 134835 - RNA, 27 nt, Artificial Sequence
  Description of Artificial Sequence: Synthetic oligonucleotide
cacagcagucaaauacauccagugaag

SEQ ID NO: 134836 - RNA, 27 nt, Artificial Sequence
  Description of Artificial Sequence: Synthetic oligonucleotide
gucucucaucuccuccucuucccuguc

SEQ ID NO: 134837 - RNA, 27 nt, Artificial Sequence
  Description of Artificial Sequence: Synthetic oligonucleotide
ccaagugggacaaaaaaaagaucaugc

SEQ ID NO: 134838 - RNA, 14 nt, Artificial Sequence
  Description of Artificial Sequence: Synthetic oligonucleotide
guauuuugaugagg

SEQ ID NO: 134839 - RNA, 12 nt, Artificial Sequence
  Description of Artificial Sequence: Synthetic oligonucleotide
ggcccagaugau

SEQ ID NO: 134840 - RNA, 14 nt, Artificial Sequence
  Description of Artificial Sequence: Synthetic oligonucleotide
gggaagaaaacuau

SEQ ID NO: 134841 - RNA, 15 nt, Artificial Sequence
  Description of Artificial Sequence: Synthetic oligonucleotide
guuuuaauuuauuuc

SEQ ID NO: 134842 - RNA, 12 nt, Artificial Sequence
  Description of Artificial Sequence: Synthetic oligonucleotide
acguagggaaau

SEQ ID NO: 134843 - RNA, 12 nt, Artificial Sequence
  Description of Artificial Sequence: Synthetic oligonucleotide
ccaggguuuacc

SEQ ID NO: 134844 - RNA, 11 nt, Artificial Sequence
  Description of Artificial Sequence: Synthetic oligonucleotide
agcaagguuua

SEQ ID NO: 134845 - RNA, 12 nt, Artificial Sequence
  Description of Artificial Sequence: Synthetic oligonucleotide
uguauuauguug

SEQ ID NO: 134846 - RNA, 15 nt, Artificial Sequence
  Description of Artificial Sequence: Synthetic oligonucleotide
uuuuaaucuuuguga

SEQ ID NO: 134847 - RNA, 14 nt, Artificial Sequence
  Description of Artificial Sequence: Synthetic oligonucleotide
uuaaucuuugugac

SEQ ID NO: 134848 - RNA, 13 nt, Artificial Sequence
  Description of Artificial Sequence: Synthetic oligonucleotide
gcugcuuaugucu

SEQ ID NO: 134849 - RNA, 14 nt, Artificial Sequence
  Description of Artificial Sequence: Synthetic oligonucleotide
aaguguuucagaag

SEQ ID NO: 134850 - RNA, 13 nt, Artificial Sequence
  Description of Artificial Sequence: Synthetic oligonucleotide
gaccaucaauaag

SEQ ID NO: 134851 - RNA, 13 nt, Artificial Sequence
  Description of Artificial Sequence: Synthetic oligonucleotide
ccaucaauaagga

SEQ ID NO: 134852 - RNA, 14 nt, Artificial Sequence
  Description of Artificial Sequence: Synthetic oligonucleotide
ucaauaaggaagaa

SEQ ID NO: 134853 - RNA, 14 nt, Artificial Sequence
  Description of Artificial Sequence: Synthetic oligonucleotide
aauaaggaagaagc

SEQ ID NO: 134854 - RNA, 13 nt, Artificial Sequence
  Description of Artificial Sequence: Synthetic oligonucleotide
aggaagaagcccu

SEQ ID NO: 134855 - RNA, 13 nt, Artificial Sequence
  Description of Artificial Sequence: Synthetic oligonucleotide
gcauaacuaaagg

SEQ ID NO: 134856 - RNA, 14 nt, Artificial Sequence
  Description of Artificial Sequence: Synthetic oligonucleotide
cauaacuaaaggug

SEQ ID NO: 134857 - RNA, 12 nt, Artificial Sequence
  Description of Artificial Sequence: Synthetic oligonucleotide
cuacaucacgcc

SEQ ID NO: 134858 - RNA, 12 nt, Artificial Sequence
  Description of Artificial Sequence: Synthetic oligonucleotide
acuggauuuaag

SEQ ID NO: 134859 - RNA, 12 nt, Artificial Sequence
  Description of Artificial Sequence: Synthetic oligonucleotide
cuggauuuaagc

SEQ ID NO: 134860 - RNA, 13 nt, Artificial Sequence
  Description of Artificial Sequence: Synthetic oligonucleotide
gauuuaagcagag

SEQ ID NO: 134861 - RNA, 13 nt, Artificial Sequence
  Description of Artificial Sequence: Synthetic oligonucleotide
auuuaagcagagu

SEQ ID NO: 134862 - RNA, 13 nt, Artificial Sequence
  Description of Artificial Sequence: Synthetic oligonucleotide
uuaagcagaguuc

SEQ ID NO: 134863 - RNA, 13 nt, Artificial Sequence
  Description of Artificial Sequence: Synthetic oligonucleotide
uaagcagaguuca

SEQ ID NO: 134864 - RNA, 14 nt, Artificial Sequence
  Description of Artificial Sequence: Synthetic oligonucleotide
agcagaguucaaaa

SEQ ID NO: 134865 - RNA, 12 nt, Artificial Sequence
  Description of Artificial Sequence: Synthetic oligonucleotide
cucagggucuga

SEQ ID NO: 134866 - RNA, 13 nt, Artificial Sequence
  Description of Artificial Sequence: Synthetic oligonucleotide
caagcaacuacau

SEQ ID NO: 134867 - RNA, 12 nt, Artificial Sequence
  Description of Artificial Sequence: Synthetic oligonucleotide
aucaauggcagc

SEQ ID NO: 134868 - RNA, 11 nt, Artificial Sequence
  Description of Artificial Sequence: Synthetic oligonucleotide
uuccagcccac

SEQ ID NO: 134869 - RNA, 12 nt, Artificial Sequence
  Description of Artificial Sequence: Synthetic oligonucleotide
cagcugagaaug

SEQ ID NO: 134870 - RNA, 13 nt, Artificial Sequence
  Description of Artificial Sequence: Synthetic oligonucleotide
aacguaucuccua

SEQ ID NO: 134871 - RNA, 14 nt, Artificial Sequence
  Description of Artificial Sequence: Synthetic oligonucleotide
ccuaaaauaauuuc

SEQ ID NO: 134872 - RNA, 13 nt, Artificial Sequence
  Description of Artificial Sequence: Synthetic oligonucleotide
uggaagauucagc

SEQ ID NO: 134873 - RNA, 12 nt, Artificial Sequence
  Description of Artificial Sequence: Synthetic oligonucleotide
uuaaacucuccu

SEQ ID NO: 134874 - RNA, 12 nt, Artificial Sequence
  Description of Artificial Sequence: Synthetic oligonucleotide
cagccuacaguu

SEQ ID NO: 134875 - RNA, 13 nt, Artificial Sequence
  Description of Artificial Sequence: Synthetic oligonucleotide
guuauguucaguc

SEQ ID NO: 134876 - RNA, 13 nt, Artificial Sequence
  Description of Artificial Sequence: Synthetic oligonucleotide
cacauacaaaaug

SEQ ID NO: 134877 - RNA, 9 nt, Artificial Sequence
  Description of Artificial Sequence: Synthetic oligonucleotide
uccuuuugc

SEQ ID NO: 134878 - RNA, 12 nt, Artificial Sequence
  Description of Artificial Sequence: Synthetic oligonucleotide
ugaccugugaag

SEQ ID NO: 134879 - RNA, 12 nt, Artificial Sequence
  Description of Artificial Sequence: Synthetic oligonucleotide
cuaucucacaca

SEQ ID NO: 134880 - RNA, 13 nt, Artificial Sequence
  Description of Artificial Sequence: Synthetic oligonucleotide
uguccucaauugu

SEQ ID NO: 134881 - RNA, 12 nt, Artificial Sequence
  Description of Artificial Sequence: Synthetic oligonucleotide
aaaccguagcug

SEQ ID NO: 134882 - RNA, 12 nt, Artificial Sequence
  Description of Artificial Sequence: Synthetic oligonucleotide
uagcuggcaagc

SEQ ID NO: 134883 - RNA, 14 nt, Artificial Sequence
  Description of Artificial Sequence: Synthetic oligonucleotide
uuguaugguuaaaa

SEQ ID NO: 134884 - RNA, 14 nt, Artificial Sequence
  Description of Artificial Sequence: Synthetic oligonucleotide
ugguuaaaagaugg

SEQ ID NO: 134885 - RNA, 13 nt, Artificial Sequence
  Description of Artificial Sequence: Synthetic oligonucleotide
cagggaauuauac

SEQ ID NO: 134886 - RNA, 12 nt, Artificial Sequence
  Description of Artificial Sequence: Synthetic oligonucleotide
acaaucuugcug

SEQ ID NO: 134887 - RNA, 13 nt, Artificial Sequence
  Description of Artificial Sequence: Synthetic oligonucleotide
ccaauaaugaaga

SEQ ID NO: 134888 - RNA, 13 nt, Artificial Sequence
  Description of Artificial Sequence: Synthetic oligonucleotide
acuuuggauguuc

SEQ ID NO: 134889 - RNA, 12 nt, Artificial Sequence
  Description of Artificial Sequence: Synthetic oligonucleotide
aaugcuuccacu

SEQ ID NO: 134890 - RNA, 11 nt, Artificial Sequence
  Description of Artificial Sequence: Synthetic oligonucleotide
gagaaaguuug

SEQ ID NO: 134891 - RNA, 11 nt, Artificial Sequence
  Description of Artificial Sequence: Synthetic oligonucleotide
aaagaacuacu

SEQ ID NO: 134892 - RNA, 12 nt, Artificial Sequence
  Description of Artificial Sequence: Synthetic oligonucleotide
uuagaaauacgg

SEQ ID NO: 134893 - RNA, 12 nt, Artificial Sequence
  Description of Artificial Sequence: Synthetic oligonucleotide
aacauggguaca

SEQ ID NO: 134894 - RNA, 14 nt, Artificial Sequence
  Description of Artificial Sequence: Synthetic oligonucleotide
aaagacacagaaga

SEQ ID NO: 134895 - RNA, 11 nt, Artificial Sequence
  Description of Artificial Sequence: Synthetic oligonucleotide
uaguagggagg

SEQ ID NO: 134896 - RNA, 12 nt, Artificial Sequence
  Description of Artificial Sequence: Synthetic oligonucleotide
gccuucugcagc

SEQ ID NO: 134897 - RNA, 10 nt, Artificial Sequence
  Description of Artificial Sequence: Synthetic oligonucleotide
ggucugguac

SEQ ID NO: 134898 - RNA, 12 nt, Artificial Sequence
  Description of Artificial Sequence: Synthetic oligonucleotide
cuaguccuuccg

SEQ ID NO: 134899 - RNA, 12 nt, Artificial Sequence
  Description of Artificial Sequence: Synthetic oligonucleotide
ccagugaauauu

SEQ ID NO: 134900 - RNA, 13 nt, Artificial Sequence
  Description of Artificial Sequence: Synthetic oligonucleotide
augaauucaaguu

SEQ ID NO: 134901 - RNA, 12 nt, Artificial Sequence
  Description of Artificial Sequence: Synthetic oligonucleotide
caggacacagau

SEQ ID NO: 134902 - RNA, 12 nt, Artificial Sequence
  Description of Artificial Sequence: Synthetic oligonucleotide
cucaaagcacag

SEQ ID NO: 134903 - RNA, 10 nt, Artificial Sequence
  Description of Artificial Sequence: Synthetic oligonucleotide
accacugcca

SEQ ID NO: 134904 - RNA, 13 nt, Artificial Sequence
  Description of Artificial Sequence: Synthetic oligonucleotide
gaaacuacuagug

SEQ ID NO: 134905 - RNA, 12 nt, Artificial Sequence
  Description of Artificial Sequence: Synthetic oligonucleotide
aagucggacagc

SEQ ID NO: 134906 - RNA, 13 nt, Artificial Sequence
  Description of Artificial Sequence: Synthetic oligonucleotide
gaaagcgaaaaau

SEQ ID NO: 134907 - RNA, 13 nt, Artificial Sequence
  Description of Artificial Sequence: Synthetic oligonucleotide
cccucugauuuag

SEQ ID NO: 134908 - RNA, 12 nt, Artificial Sequence
  Description of Artificial Sequence: Synthetic oligonucleotide
ugagcuauuuaa

SEQ ID NO: 134909 - RNA, 13 nt, Artificial Sequence
  Description of Artificial Sequence: Synthetic oligonucleotide
aaaaggugaaaaa

SEQ ID NO: 134910 - RNA, 14 nt, Artificial Sequence
  Description of Artificial Sequence: Synthetic oligonucleotide
gaaaaagcacuauu

SEQ ID NO: 134911 - RNA, 12 nt, Artificial Sequence
  Description of Artificial Sequence: Synthetic oligonucleotide
ggcugaaaagaa

SEQ ID NO: 134912 - RNA, 12 nt, Artificial Sequence
  Description of Artificial Sequence: Synthetic oligonucleotide
uaaacccuuaua

SEQ ID NO: 134913 - RNA, 13 nt, Artificial Sequence
  Description of Artificial Sequence: Synthetic oligonucleotide
cauacuauuagcc

SEQ ID NO: 134914 - RNA, 12 nt, Artificial Sequence
  Description of Artificial Sequence: Synthetic oligonucleotide
gacagaagcauu

SEQ ID NO: 134915 - RNA, 14 nt, Artificial Sequence
  Description of Artificial Sequence: Synthetic oligonucleotide
agagcaaauaagau

SEQ ID NO: 134916 - RNA, 14 nt, Artificial Sequence
  Description of Artificial Sequence: Synthetic oligonucleotide
ccaacauuuuucuc

SEQ ID NO: 134917 - RNA, 15 nt, Artificial Sequence
  Description of Artificial Sequence: Synthetic oligonucleotide
uuaaguaugagaaaa

SEQ ID NO: 134918 - RNA, 14 nt, Artificial Sequence
  Description of Artificial Sequence: Synthetic oligonucleotide
caggaauaaagaug

SEQ ID NO: 134919 - RNA, 13 nt, Artificial Sequence
  Description of Artificial Sequence: Synthetic oligonucleotide
aauuugaaugacc

SEQ ID NO: 134920 - RNA, 14 nt, Artificial Sequence
  Description of Artificial Sequence: Synthetic oligonucleotide
auguauaaagauag

SEQ ID NO: 134921 - RNA, 12 nt, Artificial Sequence
  Description of Artificial Sequence: Synthetic oligonucleotide
ggcuguaacuau

SEQ ID NO: 134922 - RNA, 11 nt, Artificial Sequence
  Description of Artificial Sequence: Synthetic oligonucleotide
ucugugaagug

SEQ ID NO: 134923 - RNA, 14 nt, Artificial Sequence
  Description of Artificial Sequence: Synthetic oligonucleotide
ccuuuaaggaaaug

SEQ ID NO: 134924 - RNA, 13 nt, Artificial Sequence
  Description of Artificial Sequence: Synthetic oligonucleotide
aaggauacaaaaa

SEQ ID NO: 134925 - RNA, 12 nt, Artificial Sequence
  Description of Artificial Sequence: Synthetic oligonucleotide
agaugcaauuug

SEQ ID NO: 134926 - RNA, 12 nt, Artificial Sequence
  Description of Artificial Sequence: Synthetic oligonucleotide
guucaaaacgaa

SEQ ID NO: 134927 - RNA, 11 nt, Artificial Sequence
  Description of Artificial Sequence: Synthetic oligonucleotide
gugaaaccuca

SEQ ID NO: 134928 - RNA, 13 nt, Artificial Sequence
  Description of Artificial Sequence: Synthetic oligonucleotide
acgaaagagaagc

SEQ ID NO: 134929 - RNA, 12 nt, Artificial Sequence
  Description of Artificial Sequence: Synthetic oligonucleotide
cuccacaagcgc

SEQ ID NO: 134930 - RNA, 14 nt, Artificial Sequence
  Description of Artificial Sequence: Synthetic oligonucleotide
gagaagauuccaaa

SEQ ID NO: 134931 - RNA, 13 nt, Artificial Sequence
  Description of Artificial Sequence: Synthetic oligonucleotide
aaucuggauucaa

SEQ ID NO: 134932 - RNA, 13 nt, Artificial Sequence
  Description of Artificial Sequence: Synthetic oligonucleotide
agaacagauuuga

SEQ ID NO: 134933 - RNA, 11 nt, Artificial Sequence
  Description of Artificial Sequence: Synthetic oligonucleotide
ccagagcugug

SEQ ID NO: 134934 - RNA, 12 nt, Artificial Sequence
  Description of Artificial Sequence: Synthetic oligonucleotide
ccucagauuguu

SEQ ID NO: 134935 - RNA, 12 nt, Artificial Sequence
  Description of Artificial Sequence: Synthetic oligonucleotide
cuauuuuaauua

SEQ ID NO: 134936 - RNA, 13 nt, Artificial Sequence
  Description of Artificial Sequence: Synthetic oligonucleotide
uuuaauuuauuaa

SEQ ID NO: 134937 - RNA, 12 nt, Artificial Sequence
  Description of Artificial Sequence: Synthetic oligonucleotide
augcaguuugaa

SEQ ID NO: 134938 - RNA, 11 nt, Artificial Sequence
  Description of Artificial Sequence: Synthetic oligonucleotide
caugcugcugg

SEQ ID NO: 134939 - RNA, 13 nt, Artificial Sequence
  Description of Artificial Sequence: Synthetic oligonucleotide
agaugugcauuuc

SEQ ID NO: 134940 - RNA, 12 nt, Artificial Sequence
  Description of Artificial Sequence: Synthetic oligonucleotide
ucaaaaccugug

SEQ ID NO: 134941 - RNA, 11 nt, Artificial Sequence
  Description of Artificial Sequence: Synthetic oligonucleotide
gaaugugggua

SEQ ID NO: 134942 - RNA, 10 nt, Artificial Sequence
  Description of Artificial Sequence: Synthetic oligonucleotide
auguggguag

SEQ ID NO: 134943 - RNA, 13 nt, Artificial Sequence
  Description of Artificial Sequence: Synthetic oligonucleotide
ugaaaaugagcau

SEQ ID NO: 134944 - RNA, 13 nt, Artificial Sequence
  Description of Artificial Sequence: Synthetic oligonucleotide
uugcuuuucaugu

SEQ ID NO: 134945 - RNA, 12 nt, Artificial Sequence
  Description of Artificial Sequence: Synthetic oligonucleotide
uguauuucuaua

SEQ ID NO: 134946 - RNA, 13 nt, Artificial Sequence
  Description of Artificial Sequence: Synthetic oligonucleotide
uuugauuaauguu

SEQ ID NO: 134947 - RNA, 12 nt, Artificial Sequence
  Description of Artificial Sequence: Synthetic oligonucleotide
caacguguauag

SEQ ID NO: 134948 - RNA, 12 nt, Artificial Sequence
  Description of Artificial Sequence: Synthetic oligonucleotide
cauauccuuggc

SEQ ID NO: 134949 - RNA, 13 nt, Artificial Sequence
  Description of Artificial Sequence: Synthetic oligonucleotide
uacuaacaucugg

SEQ ID NO: 134950 - RNA, 11 nt, Artificial Sequence
  Description of Artificial Sequence: Synthetic oligonucleotide
cauaaguugug

SEQ ID NO: 134951 - RNA, 12 nt, Artificial Sequence
  Description of Artificial Sequence: Synthetic oligonucleotide
gcaucauuuugg

SEQ ID NO: 134952 - RNA, 10 nt, Artificial Sequence
  Description of Artificial Sequence: Synthetic oligonucleotide
gcucuucuua

SEQ ID NO: 134953 - RNA, 10 nt, Artificial Sequence
  Description of Artificial Sequence: Synthetic oligonucleotide
agauuagguc

SEQ ID NO: 134954 - RNA, 12 nt, Artificial Sequence
  Description of Artificial Sequence: Synthetic oligonucleotide
auggaauugaaa

SEQ ID NO: 134955 - RNA, 13 nt, Artificial Sequence
  Description of Artificial Sequence: Synthetic oligonucleotide
cacacucauuccu

SEQ ID NO: 134956 - RNA, 12 nt, Artificial Sequence
  Description of Artificial Sequence: Synthetic oligonucleotide
uguagagguaac

SEQ ID NO: 134957 - RNA, 11 nt, Artificial Sequence
  Description of Artificial Sequence: Synthetic oligonucleotide
caaccacaugc

SEQ ID NO: 134958 - RNA, 12 nt, Artificial Sequence
  Description of Artificial Sequence: Synthetic oligonucleotide
ucggaaacaagu

SEQ ID NO: 134959 - RNA, 11 nt, Artificial Sequence
  Description of Artificial Sequence: Synthetic oligonucleotide
acucccaauaa

SEQ ID NO: 134960 - RNA, 13 nt, Artificial Sequence
  Description of Artificial Sequence: Synthetic oligonucleotide
aaugcuaagaaau

SEQ ID NO: 134961 - RNA, 11 nt, Artificial Sequence
  Description of Artificial Sequence: Synthetic oligonucleotide
gucuuucucua

SEQ ID NO: 134962 - RNA, 11 nt, Artificial Sequence
  Description of Artificial Sequence: Synthetic oligonucleotide
ugaauuucagg

SEQ ID NO: 134963 - RNA, 13 nt, Artificial Sequence
  Description of Artificial Sequence: Synthetic oligonucleotide
cgauucccucuca

SEQ ID NO: 134964 - RNA, 11 nt, Artificial Sequence
  Description of Artificial Sequence: Synthetic oligonucleotide
aggaaagugaa

SEQ ID NO: 134965 - RNA, 12 nt, Artificial Sequence
  Description of Artificial Sequence: Synthetic oligonucleotide
gaggcugcaugc

SEQ ID NO: 134966 - RNA, 11 nt, Artificial Sequence
  Description of Artificial Sequence: Synthetic oligonucleotide
ucucugaacag

SEQ ID NO: 134967 - RNA, 12 nt, Artificial Sequence
  Description of Artificial Sequence: Synthetic oligonucleotide
aacuuggcugua

SEQ ID NO: 134968 - RNA, 12 nt, Artificial Sequence
  Description of Artificial Sequence: Synthetic oligonucleotide
agaagccaaaau

SEQ ID NO: 134969 - RNA, 14 nt, Artificial Sequence
  Description of Artificial Sequence: Synthetic oligonucleotide
auuaaaagaagucc

SEQ ID NO: 134970 - RNA, 14 nt, Artificial Sequence
  Description of Artificial Sequence: Synthetic oligonucleotide
gaauccggauuauc

SEQ ID NO: 134971 - RNA, 12 nt, Artificial Sequence
  Description of Artificial Sequence: Synthetic oligonucleotide
aaugugacauca

SEQ ID NO: 134972 - RNA, 13 nt, Artificial Sequence
  Description of Artificial Sequence: Synthetic oligonucleotide
caucaaagcaagu

SEQ ID NO: 134973 - RNA, 11 nt, Artificial Sequence
  Description of Artificial Sequence: Synthetic oligonucleotide
agagagagaaa

SEQ ID NO: 134974 - RNA, 13 nt, Artificial Sequence
  Description of Artificial Sequence: Synthetic oligonucleotide
ucgcuguaguauu

SEQ ID NO: 134975 - RNA, 14 nt, Artificial Sequence
  Description of Artificial Sequence: Synthetic oligonucleotide
cgcuguaguauuua

SEQ ID NO: 134976 - RNA, 13 nt, Artificial Sequence
  Description of Artificial Sequence: Synthetic oligonucleotide
auuuaagcccaua

SEQ ID NO: 134977 - RNA, 15 nt, Artificial Sequence
  Description of Artificial Sequence: Synthetic oligonucleotide
auuaaaauaaacaug

SEQ ID NO: 134978 - RNA, 12 nt, Artificial Sequence
  Description of Artificial Sequence: Synthetic oligonucleotide
cuguucugaucg

SEQ ID NO: 134979 - RNA, 16 nt, Artificial Sequence
  Description of Artificial Sequence: Synthetic oligonucleotide
aaauaauuugaacuuu

SEQ ID NO: 134980 - RNA, 12 nt, Artificial Sequence
  Description of Artificial Sequence: Synthetic oligonucleotide
ugcgaccuuaau

SEQ ID NO: 134981 - RNA, 11 nt, Artificial Sequence
  Description of Artificial Sequence: Synthetic oligonucleotide
cugagaaagcu

SEQ ID NO: 134982 - RNA, 13 nt, Artificial Sequence
  Description of Artificial Sequence: Synthetic oligonucleotide
aguaaagaugcua

SEQ ID NO: 134983 - RNA, 12 nt, Artificial Sequence
  Description of Artificial Sequence: Synthetic oligonucleotide
cugcuuaauugc

SEQ ID NO: 134984 - RNA, 14 nt, Artificial Sequence
  Description of Artificial Sequence: Synthetic oligonucleotide
uaccauaugaauga

SEQ ID NO: 134985 - RNA, 12 nt, Artificial Sequence
  Description of Artificial Sequence: Synthetic oligonucleotide
aacuuucuuauc

SEQ ID NO: 134986 - RNA, 13 nt, Artificial Sequence
  Description of Artificial Sequence: Synthetic oligonucleotide
ccuugcaugacau

SEQ ID NO: 134987 - RNA, 14 nt, Artificial Sequence
  Description of Artificial Sequence: Synthetic oligonucleotide
ugaauuuguauaug

SEQ ID NO: 134988 - RNA, 12 nt, Artificial Sequence
  Description of Artificial Sequence: Synthetic oligonucleotide
gaauccuaguag

SEQ ID NO: 134989 - RNA, 10 nt, Artificial Sequence
  Description of Artificial Sequence: Synthetic oligonucleotide
gaaagggaag

SEQ ID NO: 134990 - RNA, 11 nt, Artificial Sequence
  Description of Artificial Sequence: Synthetic oligonucleotide
uaucggcaugc

SEQ ID NO: 134991 - RNA, 12 nt, Artificial Sequence
  Description of Artificial Sequence: Synthetic oligonucleotide
caccucauagua

SEQ ID NO: 134992 - RNA, 11 nt, Artificial Sequence
  Description of Artificial Sequence: Synthetic oligonucleotide
ccagaauugcc

SEQ ID NO: 134993 - RNA, 11 nt, Artificial Sequence
  Description of Artificial Sequence: Synthetic oligonucleotide
uggugaucugg

SEQ ID NO: 134994 - RNA, 12 nt, Artificial Sequence
  Description of Artificial Sequence: Synthetic oligonucleotide
gaucuggguaau

SEQ ID NO: 134995 - RNA, 12 nt, Artificial Sequence
  Description of Artificial Sequence: Synthetic oligonucleotide
ggaugugaugaa

SEQ ID NO: 134996 - RNA, 12 nt, Artificial Sequence
  Description of Artificial Sequence: Synthetic oligonucleotide
cauuuccacagc

SEQ ID NO: 134997 - RNA, 11 nt, Artificial Sequence
  Description of Artificial Sequence: Synthetic oligonucleotide
acagcuacacc

SEQ ID NO: 134998 - RNA, 12 nt, Artificial Sequence
  Description of Artificial Sequence: Synthetic oligonucleotide
ugcaguucuuac

SEQ ID NO: 134999 - RNA, 12 nt, Artificial Sequence
  Description of Artificial Sequence: Synthetic oligonucleotide
acgagaagaaga

SEQ ID NO: 135000 - RNA, 12 nt, Artificial Sequence
  Description of Artificial Sequence: Synthetic oligonucleotide
cgagaagaagau

SEQ ID NO: 135001 - RNA, 15 nt, Artificial Sequence
  Description of Artificial Sequence: Synthetic oligonucleotide
aagaagaucauuuac

SEQ ID NO: 135002 - RNA, 11 nt, Artificial Sequence
  Description of Artificial Sequence: Synthetic oligonucleotide
agaggaagagg

SEQ ID NO: 135003 - RNA, 12 nt, Artificial Sequence
  Description of Artificial Sequence: Synthetic oligonucleotide
gaggaagaggug

SEQ ID NO: 135004 - RNA, 13 nt, Artificial Sequence
  Description of Artificial Sequence: Synthetic oligonucleotide
cuacuuugagggc

SEQ ID NO: 135005 - RNA, 12 nt, Artificial Sequence
  Description of Artificial Sequence: Synthetic oligonucleotide
agggcaucuccu

SEQ ID NO: 135006 - RNA, 10 nt, Artificial Sequence
  Description of Artificial Sequence: Synthetic oligonucleotide
ggagugauau

SEQ ID NO: 135007 - RNA, 11 nt, Artificial Sequence
  Description of Artificial Sequence: Synthetic oligonucleotide
gagugauaugg

SEQ ID NO: 135008 - RNA, 12 nt, Artificial Sequence
  Description of Artificial Sequence: Synthetic oligonucleotide
ugcaguaaagau

SEQ ID NO: 135009 - RNA, 13 nt, Artificial Sequence
  Description of Artificial Sequence: Synthetic oligonucleotide
aguaaagauccua

SEQ ID NO: 135010 - RNA, 12 nt, Artificial Sequence
  Description of Artificial Sequence: Synthetic oligonucleotide
ugacaaaggaca

SEQ ID NO: 135011 - RNA, 13 nt, Artificial Sequence
  Description of Artificial Sequence: Synthetic oligonucleotide
gcaauugugaccc

SEQ ID NO: 135012 - RNA, 12 nt, Artificial Sequence
  Description of Artificial Sequence: Synthetic oligonucleotide
aacaucauccau

SEQ ID NO: 135013 - RNA, 12 nt, Artificial Sequence
  Description of Artificial Sequence: Synthetic oligonucleotide
ugaaauccaaca

SEQ ID NO: 135014 - RNA, 15 nt, Artificial Sequence
  Description of Artificial Sequence: Synthetic oligonucleotide
aacaauauauuucuc

SEQ ID NO: 135015 - RNA, 14 nt, Artificial Sequence
  Description of Artificial Sequence: Synthetic oligonucleotide
aacaguaaagucac

SEQ ID NO: 135016 - RNA, 14 nt, Artificial Sequence
  Description of Artificial Sequence: Synthetic oligonucleotide
ugugaagaaaguaa

SEQ ID NO: 135017 - RNA, 13 nt, Artificial Sequence
  Description of Artificial Sequence: Synthetic oligonucleotide
cuuccgagccauc

SEQ ID NO: 135018 - RNA, 12 nt, Artificial Sequence
  Description of Artificial Sequence: Synthetic oligonucleotide
aauggagguuga

SEQ ID NO: 135019 - RNA, 12 nt, Artificial Sequence
  Description of Artificial Sequence: Synthetic oligonucleotide
ggagguugaaua

SEQ ID NO: 135020 - RNA, 13 nt, Artificial Sequence
  Description of Artificial Sequence: Synthetic oligonucleotide
auuuugaguuuuc

SEQ ID NO: 135021 - RNA, 12 nt, Artificial Sequence
  Description of Artificial Sequence: Synthetic oligonucleotide
uauccuguuugu

SEQ ID NO: 135022 - RNA, 11 nt, Artificial Sequence
  Description of Artificial Sequence: Synthetic oligonucleotide
ccuguuuguuc

SEQ ID NO: 135023 - RNA, 10 nt, Artificial Sequence
  Description of Artificial Sequence: Synthetic oligonucleotide
cucuacagcc

SEQ ID NO: 135024 - RNA, 12 nt, Artificial Sequence
  Description of Artificial Sequence: Synthetic oligonucleotide
ucuuccauagcu

SEQ ID NO: 135025 - RNA, 12 nt, Artificial Sequence
  Description of Artificial Sequence: Synthetic oligonucleotide
auaaucuuccug

SEQ ID NO: 135026 - RNA, 12 nt, Artificial Sequence
  Description of Artificial Sequence: Synthetic oligonucleotide
uaaucuuccugu

SEQ ID NO: 135027 - RNA, 12 nt, Artificial Sequence
  Description of Artificial Sequence: Synthetic oligonucleotide
cuucaugacuug

SEQ ID NO: 135028 - RNA, 12 nt, Artificial Sequence
  Description of Artificial Sequence: Synthetic oligonucleotide
aagagggagaga

SEQ ID NO: 135029 - RNA, 12 nt, Artificial Sequence
  Description of Artificial Sequence: Synthetic oligonucleotide
cgucuccuacca

SEQ ID NO: 135030 - RNA, 12 nt, Artificial Sequence
  Description of Artificial Sequence: Synthetic oligonucleotide
gaucaaucggcc

SEQ ID NO: 135031 - RNA, 12 nt, Artificial Sequence
  Description of Artificial Sequence: Synthetic oligonucleotide
ggacgaacaucc

SEQ ID NO: 135032 - RNA, 11 nt, Artificial Sequence
  Description of Artificial Sequence: Synthetic oligonucleotide
agggucggaac

SEQ ID NO: 135033 - RNA, 10 nt, Artificial Sequence
  Description of Artificial Sequence: Synthetic oligonucleotide
ucggaaccca

SEQ ID NO: 135034 - RNA, 11 nt, Artificial Sequence
  Description of Artificial Sequence: Synthetic oligonucleotide
acccaagcuua

SEQ ID NO: 135035 - RNA, 14 nt, Artificial Sequence
  Description of Artificial Sequence: Synthetic oligonucleotide
gaacuuuaagcaac

SEQ ID NO: 135036 - RNA, 11 nt, Artificial Sequence
  Description of Artificial Sequence: Synthetic oligonucleotide
acuauucagug

SEQ ID NO: 135037 - RNA, 11 nt, Artificial Sequence
  Description of Artificial Sequence: Synthetic oligonucleotide
cuauucagugg

SEQ ID NO: 135038 - RNA, 13 nt, Artificial Sequence
  Description of Artificial Sequence: Synthetic oligonucleotide
aaacacagauaac

SEQ ID NO: 135039 - RNA, 12 nt, Artificial Sequence
  Description of Artificial Sequence: Synthetic oligonucleotide
cuuaagaaaaga

SEQ ID NO: 135040 - RNA, 12 nt, Artificial Sequence
  Description of Artificial Sequence: Synthetic oligonucleotide
cugaaggagugu

SEQ ID NO: 135041 - RNA, 10 nt, Artificial Sequence
  Description of Artificial Sequence: Synthetic oligonucleotide
ucaccgcggg

SEQ ID NO: 135042 - RNA, 14 nt, Artificial Sequence
  Description of Artificial Sequence: Synthetic oligonucleotide
agcagaaauaagcg

SEQ ID NO: 135043 - RNA, 12 nt, Artificial Sequence
  Description of Artificial Sequence: Synthetic oligonucleotide
aagcgugccguu

SEQ ID NO: 135044 - RNA, 12 nt, Artificial Sequence
  Description of Artificial Sequence: Synthetic oligonucleotide
agaaacagucac

SEQ ID NO: 135045 - RNA, 12 nt, Artificial Sequence
  Description of Artificial Sequence: Synthetic oligonucleotide
agaggaagaagg

SEQ ID NO: 135046 - RNA, 14 nt, Artificial Sequence
  Description of Artificial Sequence: Synthetic oligonucleotide
uguauucaaaauau

SEQ ID NO: 135047 - RNA, 13 nt, Artificial Sequence
  Description of Artificial Sequence: Synthetic oligonucleotide
auuuuccucccuu

SEQ ID NO: 135048 - RNA, 13 nt, Artificial Sequence
  Description of Artificial Sequence: Synthetic oligonucleotide
caaagaaagauag

SEQ ID NO: 135049 - RNA, 12 nt, Artificial Sequence
  Description of Artificial Sequence: Synthetic oligonucleotide
aagaaagauaga

SEQ ID NO: 135050 - RNA, 13 nt, Artificial Sequence
  Description of Artificial Sequence: Synthetic oligonucleotide
gaaagcauuuguu

SEQ ID NO: 135051 - RNA, 13 nt, Artificial Sequence
  Description of Artificial Sequence: Synthetic oligonucleotide
ugaguuaaacgaa

SEQ ID NO: 135052 - RNA, 12 nt, Artificial Sequence
  Description of Artificial Sequence: Synthetic oligonucleotide
acugauacagaa

SEQ ID NO: 135053 - RNA, 12 nt, Artificial Sequence
  Description of Artificial Sequence: Synthetic oligonucleotide
auauuauauaua

SEQ ID NO: 135054 - RNA, 12 nt, Artificial Sequence
  Description of Artificial Sequence: Synthetic oligonucleotide
auuauauauaua

SEQ ID NO: 135055 - RNA, 12 nt, Artificial Sequence
  Description of Artificial Sequence: Synthetic oligonucleotide
ucacuggaugua

SEQ ID NO: 135056 - RNA, 12 nt, Artificial Sequence
  Description of Artificial Sequence: Synthetic oligonucleotide
cagggaagagga

SEQ ID NO: 135057 - RNA, 15 nt, Artificial Sequence
  Description of Artificial Sequence: Synthetic oligonucleotide
augaucuuuuuuuug

SEQ ID NO: 135058 - RNA, 11 nt, Artificial Sequence
  Description of Artificial Sequence: Synthetic oligonucleotide
aguucacggcc

SEQ ID NO: 135059 - RNA, 13 nt, Artificial Sequence
  Description of Artificial Sequence: Synthetic oligonucleotide
caccaucacacca

SEQ ID NO: 135060 - RNA, 11 nt, Artificial Sequence
  Description of Artificial Sequence: Synthetic oligonucleotide
ccugcggguuu

SEQ ID NO: 135061 - RNA, 10 nt, Artificial Sequence
  Description of Artificial Sequence: Synthetic oligonucleotide
auccaguuug

SEQ ID NO: 135062 - RNA, 13 nt, Artificial Sequence
  Description of Artificial Sequence: Synthetic oligonucleotide
guuaaggacuucu

SEQ ID NO: 135063 - RNA, 13 nt, Artificial Sequence
  Description of Artificial Sequence: Synthetic oligonucleotide
cagugggacagag

SEQ ID NO: 135064 - RNA, 14 nt, Artificial Sequence
  Description of Artificial Sequence: Synthetic oligonucleotide
aauuuguuauugug

SEQ ID NO: 135065 - RNA, 13 nt, Artificial Sequence
  Description of Artificial Sequence: Synthetic oligonucleotide
uucaaaugcauuu

SEQ ID NO: 135066 - RNA, 10 nt, Artificial Sequence
  Description of Artificial Sequence: Synthetic oligonucleotide
caggaaagcc

SEQ ID NO: 135067 - RNA, 11 nt, Artificial Sequence
  Description of Artificial Sequence: Synthetic oligonucleotide
aggaaagcccu

SEQ ID NO: 135068 - RNA, 12 nt, Artificial Sequence
  Description of Artificial Sequence: Synthetic oligonucleotide
cccagcauggcc

SEQ ID NO: 135069 - RNA, 11 nt, Artificial Sequence
  Description of Artificial Sequence: Synthetic oligonucleotide
cuucucccuga

SEQ ID NO: 135070 - RNA, 12 nt, Artificial Sequence
  Description of Artificial Sequence: Synthetic oligonucleotide
gaagaagcccuu

SEQ ID NO: 135071 - RNA, 12 nt, Artificial Sequence
  Description of Artificial Sequence: Synthetic oligonucleotide
agaagcccuuca

SEQ ID NO: 135072 - RNA, 11 nt, Artificial Sequence
  Description of Artificial Sequence: Synthetic oligonucleotide
gcccuucagcg

SEQ ID NO: 135073 - RNA, 11 nt, Artificial Sequence
  Description of Artificial Sequence: Synthetic oligonucleotide
ccuucagcggc

SEQ ID NO: 135074 - RNA, 12 nt, Artificial Sequence
  Description of Artificial Sequence: Synthetic oligonucleotide
ucagcggccagu

SEQ ID NO: 135075 - RNA, 12 nt, Artificial Sequence
  Description of Artificial Sequence: Synthetic oligonucleotide
ugaaaagcuccg

SEQ ID NO: 135076 - RNA, 11 nt, Artificial Sequence
  Description of Artificial Sequence: Synthetic oligonucleotide
aaaagcuccgg

SEQ ID NO: 135077 - RNA, 13 nt, Artificial Sequence
  Description of Artificial Sequence: Synthetic oligonucleotide
agucaacagucug

SEQ ID NO: 135078 - RNA, 13 nt, Artificial Sequence
  Description of Artificial Sequence: Synthetic oligonucleotide
cagaguucaaaag

SEQ ID NO: 135079 - RNA, 13 nt, Artificial Sequence
  Description of Artificial Sequence: Synthetic oligonucleotide
agaguucaaaagc

SEQ ID NO: 135080 - RNA, 12 nt, Artificial Sequence
  Description of Artificial Sequence: Synthetic oligonucleotide
uucaaaagcccu

SEQ ID NO: 135081 - RNA, 12 nt, Artificial Sequence
  Description of Artificial Sequence: Synthetic oligonucleotide
ucaaaagcccuu

SEQ ID NO: 135082 - RNA, 12 nt, Artificial Sequence
  Description of Artificial Sequence: Synthetic oligonucleotide
aaaagcccuuca

SEQ ID NO: 135083 - RNA, 12 nt, Artificial Sequence
  Description of Artificial Sequence: Synthetic oligonucleotide
aaagcccuucag

SEQ ID NO: 135084 - RNA, 13 nt, Artificial Sequence
  Description of Artificial Sequence: Synthetic oligonucleotide
gugaagccgcucg

SEQ ID NO: 135085 - RNA, 12 nt, Artificial Sequence
  Description of Artificial Sequence: Synthetic oligonucleotide
cacgccagucaa

SEQ ID NO: 135086 - RNA, 13 nt, Artificial Sequence
  Description of Artificial Sequence: Synthetic oligonucleotide
uucuuggugcgug

SEQ ID NO: 135087 - RNA, 14 nt, Artificial Sequence
  Description of Artificial Sequence: Synthetic oligonucleotide
auuggauucaucag

SEQ ID NO: 135088 - RNA, 13 nt, Artificial Sequence
  Description of Artificial Sequence: Synthetic oligonucleotide
uggaauaccuaag

SEQ ID NO: 135089 - RNA, 12 nt, Artificial Sequence
  Description of Artificial Sequence: Synthetic oligonucleotide
auuugaggcuca

SEQ ID NO: 135090 - RNA, 11 nt, Artificial Sequence
  Description of Artificial Sequence: Synthetic oligonucleotide
ucuacaauugg

SEQ ID NO: 135091 - RNA, 12 nt, Artificial Sequence
  Description of Artificial Sequence: Synthetic oligonucleotide
uaguuaggagcc

SEQ ID NO: 135092 - RNA, 13 nt, Artificial Sequence
  Description of Artificial Sequence: Synthetic oligonucleotide
agucaauauccac

SEQ ID NO: 135093 - RNA, 13 nt, Artificial Sequence
  Description of Artificial Sequence: Synthetic oligonucleotide
auguucagucaca

SEQ ID NO: 135094 - RNA, 12 nt, Artificial Sequence
  Description of Artificial Sequence: Synthetic oligonucleotide
acacacacauac

SEQ ID NO: 135095 - RNA, 12 nt, Artificial Sequence
  Description of Artificial Sequence: Synthetic oligonucleotide
uuccuuuugcuu

SEQ ID NO: 135096 - RNA, 16 nt, Artificial Sequence
  Description of Artificial Sequence: Synthetic oligonucleotide
uuuuaaaguaauuuuu

SEQ ID NO: 135097 - RNA, 13 nt, Artificial Sequence
  Description of Artificial Sequence: Synthetic oligonucleotide
caacagucaaugg

SEQ ID NO: 135098 - RNA, 13 nt, Artificial Sequence
  Description of Artificial Sequence: Synthetic oligonucleotide
ucgacaaaccaau

SEQ ID NO: 135099 - RNA, 12 nt, Artificial Sequence
  Description of Artificial Sequence: Synthetic oligonucleotide
acugcuaccacu

SEQ ID NO: 135100 - RNA, 13 nt, Artificial Sequence
  Description of Artificial Sequence: Synthetic oligonucleotide
gcaagcggucuua

SEQ ID NO: 135101 - RNA, 13 nt, Artificial Sequence
  Description of Artificial Sequence: Synthetic oligonucleotide
ggucuuaccggcu

SEQ ID NO: 135102 - RNA, 11 nt, Artificial Sequence
  Description of Artificial Sequence: Synthetic oligonucleotide
gauggguuacc

SEQ ID NO: 135103 - RNA, 11 nt, Artificial Sequence
  Description of Artificial Sequence: Synthetic oligonucleotide
guuaccugcga

SEQ ID NO: 135104 - RNA, 12 nt, Artificial Sequence
  Description of Artificial Sequence: Synthetic oligonucleotide
aaucuugcugag

SEQ ID NO: 135105 - RNA, 13 nt, Artificial Sequence
  Description of Artificial Sequence: Synthetic oligonucleotide
agcauaaaacagu

SEQ ID NO: 135106 - RNA, 12 nt, Artificial Sequence
  Description of Artificial Sequence: Synthetic oligonucleotide
guccuuuauccu

SEQ ID NO: 135107 - RNA, 12 nt, Artificial Sequence
  Description of Artificial Sequence: Synthetic oligonucleotide
caacgcaaguug

SEQ ID NO: 135108 - RNA, 13 nt, Artificial Sequence
  Description of Artificial Sequence: Synthetic oligonucleotide
aaacugaaaccau

SEQ ID NO: 135109 - RNA, 14 nt, Artificial Sequence
  Description of Artificial Sequence: Synthetic oligonucleotide
acuuuguuaaauau

SEQ ID NO: 135110 - RNA, 14 nt, Artificial Sequence
  Description of Artificial Sequence: Synthetic oligonucleotide
guauauuaaaaguu

SEQ ID NO: 135111 - RNA, 13 nt, Artificial Sequence
  Description of Artificial Sequence: Synthetic oligonucleotide
guuuugacuuaac

SEQ ID NO: 135112 - RNA, 13 nt, Artificial Sequence
  Description of Artificial Sequence: Synthetic oligonucleotide
gcaaacucagcac

SEQ ID NO: 135113 - RNA, 11 nt, Artificial Sequence
  Description of Artificial Sequence: Synthetic oligonucleotide
ugcugaccuca

SEQ ID NO: 135114 - RNA, 14 nt, Artificial Sequence
  Description of Artificial Sequence: Synthetic oligonucleotide
uuuauucagaucgc

SEQ ID NO: 135115 - RNA, 13 nt, Artificial Sequence
  Description of Artificial Sequence: Synthetic oligonucleotide
aggguucugggau

SEQ ID NO: 135116 - RNA, 15 nt, Artificial Sequence
  Description of Artificial Sequence: Synthetic oligonucleotide
auauuggaaauuaug

SEQ ID NO: 135117 - RNA, 13 nt, Artificial Sequence
  Description of Artificial Sequence: Synthetic oligonucleotide
auggaagcacuag

SEQ ID NO: 135118 - RNA, 13 nt, Artificial Sequence
  Description of Artificial Sequence: Synthetic oligonucleotide
guuuuuaugugga

SEQ ID NO: 135119 - RNA, 12 nt, Artificial Sequence
  Description of Artificial Sequence: Synthetic oligonucleotide
ggaauugguaga

SEQ ID NO: 135120 - RNA, 13 nt, Artificial Sequence
  Description of Artificial Sequence: Synthetic oligonucleotide
uuagacuuggaga

SEQ ID NO: 135121 - RNA, 13 nt, Artificial Sequence
  Description of Artificial Sequence: Synthetic oligonucleotide
uuacaguauucca

SEQ ID NO: 135122 - RNA, 15 nt, Artificial Sequence
  Description of Artificial Sequence: Synthetic oligonucleotide
ccacugaugaauuaa

SEQ ID NO: 135123 - RNA, 12 nt, Artificial Sequence
  Description of Artificial Sequence: Synthetic oligonucleotide
ccacaucaucac

SEQ ID NO: 135124 - RNA, 13 nt, Artificial Sequence
  Description of Artificial Sequence: Synthetic oligonucleotide
cucaccaaacaga

SEQ ID NO: 135125 - RNA, 12 nt, Artificial Sequence
  Description of Artificial Sequence: Synthetic oligonucleotide
ggaacaugaugg

SEQ ID NO: 135126 - RNA, 12 nt, Artificial Sequence
  Description of Artificial Sequence: Synthetic oligonucleotide
cauguagacugc

SEQ ID NO: 135127 - RNA, 13 nt, Artificial Sequence
  Description of Artificial Sequence: Synthetic oligonucleotide
ggaucuauuuaug

SEQ ID NO: 135128 - RNA, 12 nt, Artificial Sequence
  Description of Artificial Sequence: Synthetic oligonucleotide
gcacuauuauca

SEQ ID NO: 135129 - RNA, 11 nt, Artificial Sequence
  Description of Artificial Sequence: Synthetic oligonucleotide
aucaguucugc

SEQ ID NO: 135130 - RNA, 13 nt, Artificial Sequence
  Description of Artificial Sequence: Synthetic oligonucleotide
agauuaaaccuac

SEQ ID NO: 135131 - RNA, 13 nt, Artificial Sequence
  Description of Artificial Sequence: Synthetic oligonucleotide
auaaaauccuucu

SEQ ID NO: 135132 - RNA, 12 nt, Artificial Sequence
  Description of Artificial Sequence: Synthetic oligonucleotide
aaugcuguagac

SEQ ID NO: 135133 - RNA, 13 nt, Artificial Sequence
  Description of Artificial Sequence: Synthetic oligonucleotide
uugauaggaauag

SEQ ID NO: 135134 - RNA, 11 nt, Artificial Sequence
  Description of Artificial Sequence: Synthetic oligonucleotide
aauggcccuga

SEQ ID NO: 135135 - RNA, 11 nt, Artificial Sequence
  Description of Artificial Sequence: Synthetic oligonucleotide
uuccucaagca

SEQ ID NO: 135136 - RNA, 10 nt, Artificial Sequence
  Description of Artificial Sequence: Synthetic oligonucleotide
guucagccca

SEQ ID NO: 135137 - RNA, 11 nt, Artificial Sequence
  Description of Artificial Sequence: Synthetic oligonucleotide
gcugcugaacc

SEQ ID NO: 135138 - RNA, 12 nt, Artificial Sequence
  Description of Artificial Sequence: Synthetic oligonucleotide
aaguucucuuca

SEQ ID NO: 135139 - RNA, 11 nt, Artificial Sequence
  Description of Artificial Sequence: Synthetic oligonucleotide
ccagccuagag

SEQ ID NO: 135140 - RNA, 13 nt, Artificial Sequence
  Description of Artificial Sequence: Synthetic oligonucleotide
cucugugaagugu

SEQ ID NO: 135141 - RNA, 14 nt, Artificial Sequence
  Description of Artificial Sequence: Synthetic oligonucleotide
ugagaaaauuucaa

SEQ ID NO: 135142 - RNA, 11 nt, Artificial Sequence
  Description of Artificial Sequence: Synthetic oligonucleotide
aauccuccuga

SEQ ID NO: 135143 - RNA, 12 nt, Artificial Sequence
  Description of Artificial Sequence: Synthetic oligonucleotide
gugacaucauau

SEQ ID NO: 135144 - RNA, 13 nt, Artificial Sequence
  Description of Artificial Sequence: Synthetic oligonucleotide
aaucuucaucaua

SEQ ID NO: 135145 - RNA, 13 nt, Artificial Sequence
  Description of Artificial Sequence: Synthetic oligonucleotide
gacuagcuauuaa

SEQ ID NO: 135146 - RNA, 14 nt, Artificial Sequence
  Description of Artificial Sequence: Synthetic oligonucleotide
ucucuacuaaaaau

SEQ ID NO: 135147 - RNA, 12 nt, Artificial Sequence
  Description of Artificial Sequence: Synthetic oligonucleotide
ucuaucucgccu

SEQ ID NO: 135148 - RNA, 13 nt, Artificial Sequence
  Description of Artificial Sequence: Synthetic oligonucleotide
cuucgguccaguu

SEQ ID NO: 135149 - RNA, 11 nt, Artificial Sequence
  Description of Artificial Sequence: Synthetic oligonucleotide
gauguagccgc

SEQ ID NO: 135150 - RNA, 12 nt, Artificial Sequence
  Description of Artificial Sequence: Synthetic oligonucleotide
ugaggagacuug

SEQ ID NO: 135151 - RNA, 12 nt, Artificial Sequence
  Description of Artificial Sequence: Synthetic oligonucleotide
gaguagugagga

SEQ ID NO: 135152 - RNA, 14 nt, Artificial Sequence
  Description of Artificial Sequence: Synthetic oligonucleotide
cagaugaguacaaa

SEQ ID NO: 135153 - RNA, 13 nt, Artificial Sequence
  Description of Artificial Sequence: Synthetic oligonucleotide
guuguuaaugggc

SEQ ID NO: 135154 - RNA, 13 nt, Artificial Sequence
  Description of Artificial Sequence: Synthetic oligonucleotide
uuuuuaauuuauu

SEQ ID NO: 135155 - RNA, 12 nt, Artificial Sequence
  Description of Artificial Sequence: Synthetic oligonucleotide
uauuuaaauaug

SEQ ID NO: 135156 - RNA, 13 nt, Artificial Sequence
  Description of Artificial Sequence: Synthetic oligonucleotide
uauccuuuguuuc

SEQ ID NO: 135157 - RNA, 14 nt, Artificial Sequence
  Description of Artificial Sequence: Synthetic oligonucleotide
cgucuaaguguuug

SEQ ID NO: 135158 - RNA, 12 nt, Artificial Sequence
  Description of Artificial Sequence: Synthetic oligonucleotide
accugugacaaa

SEQ ID NO: 135159 - RNA, 13 nt, Artificial Sequence
  Description of Artificial Sequence: Synthetic oligonucleotide
ccaggcugaauua

SEQ ID NO: 135160 - RNA, 14 nt, Artificial Sequence
  Description of Artificial Sequence: Synthetic oligonucleotide
gucauucuuacaau

SEQ ID NO: 135161 - RNA, 15 nt, Artificial Sequence
  Description of Artificial Sequence: Synthetic oligonucleotide
ucauucuuacaauug

SEQ ID NO: 135162 - RNA, 12 nt, Artificial Sequence
  Description of Artificial Sequence: Synthetic oligonucleotide
cagagaguguac

SEQ ID NO: 135163 - RNA, 12 nt, Artificial Sequence
  Description of Artificial Sequence: Synthetic oligonucleotide
agaacucagcag

SEQ ID NO: 135164 - RNA, 13 nt, Artificial Sequence
  Description of Artificial Sequence: Synthetic oligonucleotide
uuuauuuucagua

SEQ ID NO: 135165 - RNA, 12 nt, Artificial Sequence
  Description of Artificial Sequence: Synthetic oligonucleotide
ucuuaaauggaa

SEQ ID NO: 135166 - RNA, 13 nt, Artificial Sequence
  Description of Artificial Sequence: Synthetic oligonucleotide
ugccuaaaauugu

SEQ ID NO: 135167 - RNA, 12 nt, Artificial Sequence
  Description of Artificial Sequence: Synthetic oligonucleotide
agacugugagcu

SEQ ID NO: 135168 - RNA, 14 nt, Artificial Sequence
  Description of Artificial Sequence: Synthetic oligonucleotide
ugcuuuuuauuaau

SEQ ID NO: 135169 - RNA, 13 nt, Artificial Sequence
  Description of Artificial Sequence: Synthetic oligonucleotide
cucuucuuacauu

SEQ ID NO: 135170 - RNA, 15 nt, Artificial Sequence
  Description of Artificial Sequence: Synthetic oligonucleotide
cauuuguaaaaaugu

SEQ ID NO: 135171 - RNA, 15 nt, Artificial Sequence
  Description of Artificial Sequence: Synthetic oligonucleotide
aucuuaauucauauu

SEQ ID NO: 135172 - RNA, 13 nt, Artificial Sequence
  Description of Artificial Sequence: Synthetic oligonucleotide
gaacuaaucauga

SEQ ID NO: 135173 - RNA, 12 nt, Artificial Sequence
  Description of Artificial Sequence: Synthetic oligonucleotide
ucugcucuuggg

SEQ ID NO: 135174 - RNA, 13 nt, Artificial Sequence
  Description of Artificial Sequence: Synthetic oligonucleotide
caguagcuuugag

SEQ ID NO: 135175 - RNA, 14 nt, Artificial Sequence
  Description of Artificial Sequence: Synthetic oligonucleotide
cacguaauauuuca

SEQ ID NO: 135176 - RNA, 13 nt, Artificial Sequence
  Description of Artificial Sequence: Synthetic oligonucleotide
uauucucuucacu

SEQ ID NO: 135177 - RNA, 14 nt, Artificial Sequence
  Description of Artificial Sequence: Synthetic oligonucleotide
cuaaugcuaagaaa

SEQ ID NO: 135178 - RNA, 12 nt, Artificial Sequence
  Description of Artificial Sequence: Synthetic oligonucleotide
gcugaaaaucaa

SEQ ID NO: 135179 - RNA, 14 nt, Artificial Sequence
  Description of Artificial Sequence: Synthetic oligonucleotide
aauaugauuacuuu

SEQ ID NO: 135180 - RNA, 14 nt, Artificial Sequence
  Description of Artificial Sequence: Synthetic oligonucleotide
cauuuuguucuaca

SEQ ID NO: 135181 - RNA, 12 nt, Artificial Sequence
  Description of Artificial Sequence: Synthetic oligonucleotide
cccgggacucuc

SEQ ID NO: 135182 - RNA, 14 nt, Artificial Sequence
  Description of Artificial Sequence: Synthetic oligonucleotide
ccuuuaaaguaaag

SEQ ID NO: 135183 - RNA, 13 nt, Artificial Sequence
  Description of Artificial Sequence: Synthetic oligonucleotide
ucuggaagccugg

SEQ ID NO: 135184 - RNA, 14 nt, Artificial Sequence
  Description of Artificial Sequence: Synthetic oligonucleotide
aaaacaaaagagag

SEQ ID NO: 135185 - RNA, 13 nt, Artificial Sequence
  Description of Artificial Sequence: Synthetic oligonucleotide
aucaguuaugccg

SEQ ID NO: 135186 - RNA, 13 nt, Artificial Sequence
  Description of Artificial Sequence: Synthetic oligonucleotide
uaaaagaagucca

SEQ ID NO: 135187 - RNA, 11 nt, Artificial Sequence
  Description of Artificial Sequence: Synthetic oligonucleotide
aggugagguua

SEQ ID NO: 135188 - RNA, 11 nt, Artificial Sequence
  Description of Artificial Sequence: Synthetic oligonucleotide
gggaagaggac

SEQ ID NO: 135189 - RNA, 13 nt, Artificial Sequence
  Description of Artificial Sequence: Synthetic oligonucleotide
aagcaaguauugu

SEQ ID NO: 135190 - RNA, 12 nt, Artificial Sequence
  Description of Artificial Sequence: Synthetic oligonucleotide
auuguagcacuc

SEQ ID NO: 135191 - RNA, 14 nt, Artificial Sequence
  Description of Artificial Sequence: Synthetic oligonucleotide
acaaaaccacaaau

SEQ ID NO: 135192 - RNA, 12 nt, Artificial Sequence
  Description of Artificial Sequence: Synthetic oligonucleotide
uaagcccauaca

SEQ ID NO: 135193 - RNA, 11 nt, Artificial Sequence
  Description of Artificial Sequence: Synthetic oligonucleotide
agcccauacag

SEQ ID NO: 135194 - RNA, 12 nt, Artificial Sequence
  Description of Artificial Sequence: Synthetic oligonucleotide
cagaaaccuucc

SEQ ID NO: 135195 - RNA, 10 nt, Artificial Sequence
  Description of Artificial Sequence: Synthetic oligonucleotide
guauaccuac

SEQ ID NO: 135196 - RNA, 13 nt, Artificial Sequence
  Description of Artificial Sequence: Synthetic oligonucleotide
gccaguuuucgga

SEQ ID NO: 135197 - RNA, 9 nt, Artificial Sequence
  Description of Artificial Sequence: Synthetic oligonucleotide
ggaacaggg

SEQ ID NO: 135198 - RNA, 13 nt, Artificial Sequence
  Description of Artificial Sequence: Synthetic oligonucleotide
uuaacuuuccagu

SEQ ID NO: 135199 - RNA, 14 nt, Artificial Sequence
  Description of Artificial Sequence: Synthetic oligonucleotide
aaaguuugguuuug

SEQ ID NO: 135200 - RNA, 12 nt, Artificial Sequence
  Description of Artificial Sequence: Synthetic oligonucleotide
cuucccacugua

SEQ ID NO: 135201 - RNA, 13 nt, Artificial Sequence
  Description of Artificial Sequence: Synthetic oligonucleotide
ugauaccauauga

SEQ ID NO: 135202 - RNA, 11 nt, Artificial Sequence
  Description of Artificial Sequence: Synthetic oligonucleotide
aacaugggcug

SEQ ID NO: 135203 - RNA, 13 nt, Artificial Sequence
  Description of Artificial Sequence: Synthetic oligonucleotide
caacuuuuucaua

SEQ ID NO: 135204 - RNA, 12 nt, Artificial Sequence
  Description of Artificial Sequence: Synthetic oligonucleotide
caugaggccgga

SEQ ID NO: 135205 - RNA, 11 nt, Artificial Sequence
  Description of Artificial Sequence: Synthetic oligonucleotide
acugcauuugu

SEQ ID NO: 135206 - RNA, 13 nt, Artificial Sequence
  Description of Artificial Sequence: Synthetic oligonucleotide
aauguuuacuacc

SEQ ID NO: 135207 - RNA, 15 nt, Artificial Sequence
  Description of Artificial Sequence: Synthetic oligonucleotide
aauuuuuugaugaaa

SEQ ID NO: 135208 - RNA, 14 nt, Artificial Sequence
  Description of Artificial Sequence: Synthetic oligonucleotide
cagugugugaauuu

SEQ ID NO: 135209 - RNA, 13 nt, Artificial Sequence
  Description of Artificial Sequence: Synthetic oligonucleotide
gagcaauguaugu

SEQ ID NO: 135210 - RNA, 14 nt, Artificial Sequence
  Description of Artificial Sequence: Synthetic oligonucleotide
aaagcacauauaua

SEQ ID NO: 135211 - RNA, 14 nt, Artificial Sequence
  Description of Artificial Sequence: Synthetic oligonucleotide
guaauaguuucucc

SEQ ID NO: 135212 - RNA, 13 nt, Artificial Sequence
  Description of Artificial Sequence: Synthetic oligonucleotide
aguuucuccaaau

SEQ ID NO: 135213 - RNA, 13 nt, Artificial Sequence
  Description of Artificial Sequence: Synthetic oligonucleotide
uacuuccuagaaa

SEQ ID NO: 135214 - RNA, 13 nt, Artificial Sequence
  Description of Artificial Sequence: Synthetic oligonucleotide
uacaccauauaug

SEQ ID NO: 135215 - RNA, 14 nt, Artificial Sequence
  Description of Artificial Sequence: Synthetic oligonucleotide
auauaugaauggag

SEQ ID NO: 135216 - RNA, 13 nt, Artificial Sequence
  Description of Artificial Sequence: Synthetic oligonucleotide
acgagaagaagau

SEQ ID NO: 135217 - RNA, 13 nt, Artificial Sequence
  Description of Artificial Sequence: Synthetic oligonucleotide
ucauuuacaggga

SEQ ID NO: 135218 - RNA, 13 nt, Artificial Sequence
  Description of Artificial Sequence: Synthetic oligonucleotide
cauuuacagggac

SEQ ID NO: 135219 - RNA, 10 nt, Artificial Sequence
  Description of Artificial Sequence: Synthetic oligonucleotide
agggaccuga

SEQ ID NO: 135220 - RNA, 14 nt, Artificial Sequence
  Description of Artificial Sequence: Synthetic oligonucleotide
uguuugacugcauc

SEQ ID NO: 135221 - RNA, 13 nt, Artificial Sequence
  Description of Artificial Sequence: Synthetic oligonucleotide
uuugacugcaucg

SEQ ID NO: 135222 - RNA, 12 nt, Artificial Sequence
  Description of Artificial Sequence: Synthetic oligonucleotide
gaguucacaggg

SEQ ID NO: 135223 - RNA, 13 nt, Artificial Sequence
  Description of Artificial Sequence: Synthetic oligonucleotide
ggcaccucugucc

SEQ ID NO: 135224 - RNA, 15 nt, Artificial Sequence
  Description of Artificial Sequence: Synthetic oligonucleotide
gguuugucuuuuuaa

SEQ ID NO: 135225 - RNA, 14 nt, Artificial Sequence
  Description of Artificial Sequence: Synthetic oligonucleotide
uuugucuuuuuaag

SEQ ID NO: 135226 - RNA, 13 nt, Artificial Sequence
  Description of Artificial Sequence: Synthetic oligonucleotide
ccuaaagguuguc

SEQ ID NO: 135227 - RNA, 12 nt, Artificial Sequence
  Description of Artificial Sequence: Synthetic oligonucleotide
aagguugucgac

SEQ ID NO: 135228 - RNA, 13 nt, Artificial Sequence
  Description of Artificial Sequence: Synthetic oligonucleotide
accuggcaauugu

SEQ ID NO: 135229 - RNA, 12 nt, Artificial Sequence
  Description of Artificial Sequence: Synthetic oligonucleotide
aguggugcgagg

SEQ ID NO: 135230 - RNA, 13 nt, Artificial Sequence
  Description of Artificial Sequence: Synthetic oligonucleotide
agagacaugaaau

SEQ ID NO: 135231 - RNA, 13 nt, Artificial Sequence
  Description of Artificial Sequence: Synthetic oligonucleotide
auauauuucucca

SEQ ID NO: 135232 - RNA, 10 nt, Artificial Sequence
  Description of Artificial Sequence: Synthetic oligonucleotide
caugaaggcu

SEQ ID NO: 135233 - RNA, 11 nt, Artificial Sequence
  Description of Artificial Sequence: Synthetic oligonucleotide
gcuggaguggu

SEQ ID NO: 135234 - RNA, 11 nt, Artificial Sequence
  Description of Artificial Sequence: Synthetic oligonucleotide
aggaagagagg

SEQ ID NO: 135235 - RNA, 12 nt, Artificial Sequence
  Description of Artificial Sequence: Synthetic oligonucleotide
cuugcaucgggc

SEQ ID NO: 135236 - RNA, 13 nt, Artificial Sequence
  Description of Artificial Sequence: Synthetic oligonucleotide
auauccuacugug

SEQ ID NO: 135237 - RNA, 13 nt, Artificial Sequence
  Description of Artificial Sequence: Synthetic oligonucleotide
uccuacuguguaa

SEQ ID NO: 135238 - RNA, 12 nt, Artificial Sequence
  Description of Artificial Sequence: Synthetic oligonucleotide
ccuuguagugua

SEQ ID NO: 135239 - RNA, 13 nt, Artificial Sequence
  Description of Artificial Sequence: Synthetic oligonucleotide
ucuuuguugauug

SEQ ID NO: 135240 - RNA, 14 nt, Artificial Sequence
  Description of Artificial Sequence: Synthetic oligonucleotide
uuuguugauugaaa

SEQ ID NO: 135241 - RNA, 15 nt, Artificial Sequence
  Description of Artificial Sequence: Synthetic oligonucleotide
uucuuuuucuuccau

SEQ ID NO: 135242 - RNA, 13 nt, Artificial Sequence
  Description of Artificial Sequence: Synthetic oligonucleotide
aaucuuccuucua

SEQ ID NO: 135243 - RNA, 13 nt, Artificial Sequence
  Description of Artificial Sequence: Synthetic oligonucleotide
uugaaugcuucau

SEQ ID NO: 135244 - RNA, 13 nt, Artificial Sequence
  Description of Artificial Sequence: Synthetic oligonucleotide
ugaaugcuucaug

SEQ ID NO: 135245 - RNA, 13 nt, Artificial Sequence
  Description of Artificial Sequence: Synthetic oligonucleotide
aauucuacuuuga

SEQ ID NO: 135246 - RNA, 13 nt, Artificial Sequence
  Description of Artificial Sequence: Synthetic oligonucleotide
agcaacuacagac

SEQ ID NO: 135247 - RNA, 13 nt, Artificial Sequence
  Description of Artificial Sequence: Synthetic oligonucleotide
gaccaaggucaac

SEQ ID NO: 135248 - RNA, 13 nt, Artificial Sequence
  Description of Artificial Sequence: Synthetic oligonucleotide
cgacuaucucgac

SEQ ID NO: 135249 - RNA, 13 nt, Artificial Sequence
  Description of Artificial Sequence: Synthetic oligonucleotide
aaccuucccaaac

SEQ ID NO: 135250 - RNA, 14 nt, Artificial Sequence
  Description of Artificial Sequence: Synthetic oligonucleotide
ccaagcuuagaacu

SEQ ID NO: 135251 - RNA, 15 nt, Artificial Sequence
  Description of Artificial Sequence: Synthetic oligonucleotide
agcuuagaacuuuaa

SEQ ID NO: 135252 - RNA, 11 nt, Artificial Sequence
  Description of Artificial Sequence: Synthetic oligonucleotide
aagaccaccac

SEQ ID NO: 135253 - RNA, 14 nt, Artificial Sequence
  Description of Artificial Sequence: Synthetic oligonucleotide
gcgagaaauaaagu

SEQ ID NO: 135254 - RNA, 14 nt, Artificial Sequence
  Description of Artificial Sequence: Synthetic oligonucleotide
cgagaaauaaaguu

SEQ ID NO: 135255 - RNA, 12 nt, Artificial Sequence
  Description of Artificial Sequence: Synthetic oligonucleotide
aggaaaugaucc

SEQ ID NO: 135256 - RNA, 13 nt, Artificial Sequence
  Description of Artificial Sequence: Synthetic oligonucleotide
gaagaaaugaaac

SEQ ID NO: 135257 - RNA, 13 nt, Artificial Sequence
  Description of Artificial Sequence: Synthetic oligonucleotide
guuuccauccucc

SEQ ID NO: 135258 - RNA, 15 nt, Artificial Sequence
  Description of Artificial Sequence: Synthetic oligonucleotide
acugaaaaucuuuga

SEQ ID NO: 135259 - RNA, 11 nt, Artificial Sequence
  Description of Artificial Sequence: Synthetic oligonucleotide
ugccguucagg

SEQ ID NO: 135260 - RNA, 13 nt, Artificial Sequence
  Description of Artificial Sequence: Synthetic oligonucleotide
caggguccagaag

SEQ ID NO: 135261 - RNA, 13 nt, Artificial Sequence
  Description of Artificial Sequence: Synthetic oligonucleotide
ucaagacugcuug

SEQ ID NO: 135262 - RNA, 13 nt, Artificial Sequence
  Description of Artificial Sequence: Synthetic oligonucleotide
uccaugucuuugg

SEQ ID NO: 135263 - RNA, 11 nt, Artificial Sequence
  Description of Artificial Sequence: Synthetic oligonucleotide
gccugaaacac

SEQ ID NO: 135264 - RNA, 12 nt, Artificial Sequence
  Description of Artificial Sequence: Synthetic oligonucleotide
ucucuguaccuc

SEQ ID NO: 135265 - RNA, 12 nt, Artificial Sequence
  Description of Artificial Sequence: Synthetic oligonucleotide
agcaagacaaga

SEQ ID NO: 135266 - RNA, 13 nt, Artificial Sequence
  Description of Artificial Sequence: Synthetic oligonucleotide
gcaagacaagaaa

SEQ ID NO: 135267 - RNA, 12 nt, Artificial Sequence
  Description of Artificial Sequence: Synthetic oligonucleotide
uguacaagaucc

SEQ ID NO: 135268 - RNA, 12 nt, Artificial Sequence
  Description of Artificial Sequence: Synthetic oligonucleotide
cguacuugcaga

SEQ ID NO: 135269 - RNA, 13 nt, Artificial Sequence
  Description of Artificial Sequence: Synthetic oligonucleotide
cgaucgauacaga

SEQ ID NO: 135270 - RNA, 13 nt, Artificial Sequence
  Description of Artificial Sequence: Synthetic oligonucleotide
uauaaaaauaaau

SEQ ID NO: 135271 - RNA, 13 nt, Artificial Sequence
  Description of Artificial Sequence: Synthetic oligonucleotide
uaaaaauaaauau

SEQ ID NO: 135272 - RNA, 13 nt, Artificial Sequence
  Description of Artificial Sequence: Synthetic oligonucleotide
uuugacugcugug

SEQ ID NO: 135273 - RNA, 13 nt, Artificial Sequence
  Description of Artificial Sequence: Synthetic oligonucleotide
ggagaugagagac

SEQ ID NO: 135274 - RNA, 10 nt, Artificial Sequence
  Description of Artificial Sequence: Synthetic oligonucleotide
ucccacuugg

SEQ ID NO: 135275 - RNA, 10 nt, Artificial Sequence
  Description of Artificial Sequence: Synthetic oligonucleotide
guucacggcc

SEQ ID NO: 135276 - RNA, 12 nt, Artificial Sequence
  Description of Artificial Sequence: Synthetic oligonucleotide
accaucacacca

SEQ ID NO: 135277 - RNA, 10 nt, Artificial Sequence
  Description of Artificial Sequence: Synthetic oligonucleotide
cugcggguuu

SEQ ID NO: 135278 - RNA, 9 nt, Artificial Sequence
  Description of Artificial Sequence: Synthetic oligonucleotide
uccaguuug

SEQ ID NO: 135279 - RNA, 12 nt, Artificial Sequence
  Description of Artificial Sequence: Synthetic oligonucleotide
uuaaggacuucu

SEQ ID NO: 135280 - RNA, 12 nt, Artificial Sequence
  Description of Artificial Sequence: Synthetic oligonucleotide
agugggacagag

SEQ ID NO: 135281 - RNA, 13 nt, Artificial Sequence
  Description of Artificial Sequence: Synthetic oligonucleotide
auuuguuauugug

SEQ ID NO: 135282 - RNA, 12 nt, Artificial Sequence
  Description of Artificial Sequence: Synthetic oligonucleotide
ucaaaugcauuu

SEQ ID NO: 135283 - RNA, 9 nt, Artificial Sequence
  Description of Artificial Sequence: Synthetic oligonucleotide
aggaaagcc

SEQ ID NO: 135284 - RNA, 10 nt, Artificial Sequence
  Description of Artificial Sequence: Synthetic oligonucleotide
ggaaagcccu

SEQ ID NO: 135285 - RNA, 11 nt, Artificial Sequence
  Description of Artificial Sequence: Synthetic oligonucleotide
ccagcauggcc

SEQ ID NO: 135286 - RNA, 10 nt, Artificial Sequence
  Description of Artificial Sequence: Synthetic oligonucleotide
uucucccuga

SEQ ID NO: 135287 - RNA, 11 nt, Artificial Sequence
  Description of Artificial Sequence: Synthetic oligonucleotide
aagaagcccuu

SEQ ID NO: 135288 - RNA, 11 nt, Artificial Sequence
  Description of Artificial Sequence: Synthetic oligonucleotide
gaagcccuuca

SEQ ID NO: 135289 - RNA, 10 nt, Artificial Sequence
  Description of Artificial Sequence: Synthetic oligonucleotide
cccuucagcg

SEQ ID NO: 135290 - RNA, 10 nt, Artificial Sequence
  Description of Artificial Sequence: Synthetic oligonucleotide
cuucagcggc

SEQ ID NO: 135291 - RNA, 11 nt, Artificial Sequence
  Description of Artificial Sequence: Synthetic oligonucleotide
cagcggccagu

SEQ ID NO: 135292 - RNA, 11 nt, Artificial Sequence
  Description of Artificial Sequence: Synthetic oligonucleotide
gaaaagcuccg

SEQ ID NO: 135293 - RNA, 10 nt, Artificial Sequence
  Description of Artificial Sequence: Synthetic oligonucleotide
aaagcuccgg

SEQ ID NO: 135294 - RNA, 12 nt, Artificial Sequence
  Description of Artificial Sequence: Synthetic oligonucleotide
gucaacagucug

SEQ ID NO: 135295 - RNA, 12 nt, Artificial Sequence
  Description of Artificial Sequence: Synthetic oligonucleotide
agaguucaaaag

SEQ ID NO: 135296 - RNA, 12 nt, Artificial Sequence
  Description of Artificial Sequence: Synthetic oligonucleotide
gaguucaaaagc

SEQ ID NO: 135297 - RNA, 11 nt, Artificial Sequence
  Description of Artificial Sequence: Synthetic oligonucleotide
ucaaaagcccu

SEQ ID NO: 135298 - RNA, 11 nt, Artificial Sequence
  Description of Artificial Sequence: Synthetic oligonucleotide
caaaagcccuu

SEQ ID NO: 135299 - RNA, 11 nt, Artificial Sequence
  Description of Artificial Sequence: Synthetic oligonucleotide
aaagcccuuca

SEQ ID NO: 135300 - RNA, 11 nt, Artificial Sequence
  Description of Artificial Sequence: Synthetic oligonucleotide
aagcccuucag

SEQ ID NO: 135301 - RNA, 12 nt, Artificial Sequence
  Description of Artificial Sequence: Synthetic oligonucleotide
ugaagccgcucg

SEQ ID NO: 135302 - RNA, 11 nt, Artificial Sequence
  Description of Artificial Sequence: Synthetic oligonucleotide
acgccagucaa

SEQ ID NO: 135303 - RNA, 12 nt, Artificial Sequence
  Description of Artificial Sequence: Synthetic oligonucleotide
ucuuggugcgug

SEQ ID NO: 135304 - RNA, 13 nt, Artificial Sequence
  Description of Artificial Sequence: Synthetic oligonucleotide
uuggauucaucag

SEQ ID NO: 135305 - RNA, 12 nt, Artificial Sequence
  Description of Artificial Sequence: Synthetic oligonucleotide
ggaauaccuaag

SEQ ID NO: 135306 - RNA, 11 nt, Artificial Sequence
  Description of Artificial Sequence: Synthetic oligonucleotide
uuugaggcuca

SEQ ID NO: 135307 - RNA, 10 nt, Artificial Sequence
  Description of Artificial Sequence: Synthetic oligonucleotide
cuacaauugg

SEQ ID NO: 135308 - RNA, 11 nt, Artificial Sequence
  Description of Artificial Sequence: Synthetic oligonucleotide
aguuaggagcc

SEQ ID NO: 135309 - RNA, 12 nt, Artificial Sequence
  Description of Artificial Sequence: Synthetic oligonucleotide
gucaauauccac

SEQ ID NO: 135310 - RNA, 12 nt, Artificial Sequence
  Description of Artificial Sequence: Synthetic oligonucleotide
uguucagucaca

SEQ ID NO: 135311 - RNA, 11 nt, Artificial Sequence
  Description of Artificial Sequence: Synthetic oligonucleotide
cacacacauac

SEQ ID NO: 135312 - RNA, 11 nt, Artificial Sequence
  Description of Artificial Sequence: Synthetic oligonucleotide
uccuuuugcuu

SEQ ID NO: 135313 - RNA, 15 nt, Artificial Sequence
  Description of Artificial Sequence: Synthetic oligonucleotide
uuuaaaguaauuuuu

SEQ ID NO: 135314 - RNA, 12 nt, Artificial Sequence
  Description of Artificial Sequence: Synthetic oligonucleotide
aacagucaaugg

SEQ ID NO: 135315 - RNA, 12 nt, Artificial Sequence
  Description of Artificial Sequence: Synthetic oligonucleotide
cgacaaaccaau

SEQ ID NO: 135316 - RNA, 11 nt, Artificial Sequence
  Description of Artificial Sequence: Synthetic oligonucleotide
cugcuaccacu

SEQ ID NO: 135317 - RNA, 12 nt, Artificial Sequence
  Description of Artificial Sequence: Synthetic oligonucleotide
caagcggucuua

SEQ ID NO: 135318 - RNA, 12 nt, Artificial Sequence
  Description of Artificial Sequence: Synthetic oligonucleotide
gucuuaccggcu

SEQ ID NO: 135319 - RNA, 10 nt, Artificial Sequence
  Description of Artificial Sequence: Synthetic oligonucleotide
auggguuacc

SEQ ID NO: 135320 - RNA, 10 nt, Artificial Sequence
  Description of Artificial Sequence: Synthetic oligonucleotide
uuaccugcga

SEQ ID NO: 135321 - RNA, 11 nt, Artificial Sequence
  Description of Artificial Sequence: Synthetic oligonucleotide
aucuugcugag

SEQ ID NO: 135322 - RNA, 12 nt, Artificial Sequence
  Description of Artificial Sequence: Synthetic oligonucleotide
gcauaaaacagu

SEQ ID NO: 135323 - RNA, 11 nt, Artificial Sequence
  Description of Artificial Sequence: Synthetic oligonucleotide
uccuuuauccu

SEQ ID NO: 135324 - RNA, 11 nt, Artificial Sequence
  Description of Artificial Sequence: Synthetic oligonucleotide
aacgcaaguug

SEQ ID NO: 135325 - RNA, 12 nt, Artificial Sequence
  Description of Artificial Sequence: Synthetic oligonucleotide
aacugaaaccau

SEQ ID NO: 135326 - RNA, 13 nt, Artificial Sequence
  Description of Artificial Sequence: Synthetic oligonucleotide
cuuuguuaaauau

SEQ ID NO: 135327 - RNA, 13 nt, Artificial Sequence
  Description of Artificial Sequence: Synthetic oligonucleotide
uauauuaaaaguu

SEQ ID NO: 135328 - RNA, 12 nt, Artificial Sequence
  Description of Artificial Sequence: Synthetic oligonucleotide
uuuugacuuaac

SEQ ID NO: 135329 - RNA, 12 nt, Artificial Sequence
  Description of Artificial Sequence: Synthetic oligonucleotide
caaacucagcac

SEQ ID NO: 135330 - RNA, 10 nt, Artificial Sequence
  Description of Artificial Sequence: Synthetic oligonucleotide
gcugaccuca

SEQ ID NO: 135331 - RNA, 13 nt, Artificial Sequence
  Description of Artificial Sequence: Synthetic oligonucleotide
uuauucagaucgc

SEQ ID NO: 135332 - RNA, 12 nt, Artificial Sequence
  Description of Artificial Sequence: Synthetic oligonucleotide
ggguucugggau

SEQ ID NO: 135333 - RNA, 14 nt, Artificial Sequence
  Description of Artificial Sequence: Synthetic oligonucleotide
uauuggaaauuaug

SEQ ID NO: 135334 - RNA, 12 nt, Artificial Sequence
  Description of Artificial Sequence: Synthetic oligonucleotide
uggaagcacuag

SEQ ID NO: 135335 - RNA, 12 nt, Artificial Sequence
  Description of Artificial Sequence: Synthetic oligonucleotide
uuuuuaugugga

SEQ ID NO: 135336 - RNA, 11 nt, Artificial Sequence
  Description of Artificial Sequence: Synthetic oligonucleotide
gaauugguaga

SEQ ID NO: 135337 - RNA, 12 nt, Artificial Sequence
  Description of Artificial Sequence: Synthetic oligonucleotide
uagacuuggaga

SEQ ID NO: 135338 - RNA, 12 nt, Artificial Sequence
  Description of Artificial Sequence: Synthetic oligonucleotide
uacaguauucca

SEQ ID NO: 135339 - RNA, 14 nt, Artificial Sequence
  Description of Artificial Sequence: Synthetic oligonucleotide
cacugaugaauuaa

SEQ ID NO: 135340 - RNA, 11 nt, Artificial Sequence
  Description of Artificial Sequence: Synthetic oligonucleotide
cacaucaucac

SEQ ID NO: 135341 - RNA, 12 nt, Artificial Sequence
  Description of Artificial Sequence: Synthetic oligonucleotide
ucaccaaacaga

SEQ ID NO: 135342 - RNA, 11 nt, Artificial Sequence
  Description of Artificial Sequence: Synthetic oligonucleotide
gaacaugaugg

SEQ ID NO: 135343 - RNA, 11 nt, Artificial Sequence
  Description of Artificial Sequence: Synthetic oligonucleotide
auguagacugc

SEQ ID NO: 135344 - RNA, 12 nt, Artificial Sequence
  Description of Artificial Sequence: Synthetic oligonucleotide
gaucuauuuaug

SEQ ID NO: 135345 - RNA, 11 nt, Artificial Sequence
  Description of Artificial Sequence: Synthetic oligonucleotide
cacuauuauca

SEQ ID NO: 135346 - RNA, 10 nt, Artificial Sequence
  Description of Artificial Sequence: Synthetic oligonucleotide
ucaguucugc

SEQ ID NO: 135347 - RNA, 12 nt, Artificial Sequence
  Description of Artificial Sequence: Synthetic oligonucleotide
gauuaaaccuac

SEQ ID NO: 135348 - RNA, 12 nt, Artificial Sequence
  Description of Artificial Sequence: Synthetic oligonucleotide
uaaaauccuucu

SEQ ID NO: 135349 - RNA, 11 nt, Artificial Sequence
  Description of Artificial Sequence: Synthetic oligonucleotide
augcuguagac

SEQ ID NO: 135350 - RNA, 12 nt, Artificial Sequence
  Description of Artificial Sequence: Synthetic oligonucleotide
ugauaggaauag

SEQ ID NO: 135351 - RNA, 10 nt, Artificial Sequence
  Description of Artificial Sequence: Synthetic oligonucleotide
auggcccuga

SEQ ID NO: 135352 - RNA, 10 nt, Artificial Sequence
  Description of Artificial Sequence: Synthetic oligonucleotide
uccucaagca

SEQ ID NO: 135353 - RNA, 9 nt, Artificial Sequence
  Description of Artificial Sequence: Synthetic oligonucleotide
uucagccca

SEQ ID NO: 135354 - RNA, 10 nt, Artificial Sequence
  Description of Artificial Sequence: Synthetic oligonucleotide
cugcugaacc

SEQ ID NO: 135355 - RNA, 11 nt, Artificial Sequence
  Description of Artificial Sequence: Synthetic oligonucleotide
aguucucuuca

SEQ ID NO: 135356 - RNA, 10 nt, Artificial Sequence
  Description of Artificial Sequence: Synthetic oligonucleotide
cagccuagag

SEQ ID NO: 135357 - RNA, 12 nt, Artificial Sequence
  Description of Artificial Sequence: Synthetic oligonucleotide
ucugugaagugu

SEQ ID NO: 135358 - RNA, 13 nt, Artificial Sequence
  Description of Artificial Sequence: Synthetic oligonucleotide
gagaaaauuucaa

SEQ ID NO: 135359 - RNA, 10 nt, Artificial Sequence
  Description of Artificial Sequence: Synthetic oligonucleotide
auccuccuga

SEQ ID NO: 135360 - RNA, 11 nt, Artificial Sequence
  Description of Artificial Sequence: Synthetic oligonucleotide
ugacaucauau

SEQ ID NO: 135361 - RNA, 12 nt, Artificial Sequence
  Description of Artificial Sequence: Synthetic oligonucleotide
aucuucaucaua

SEQ ID NO: 135362 - RNA, 12 nt, Artificial Sequence
  Description of Artificial Sequence: Synthetic oligonucleotide
acuagcuauuaa

SEQ ID NO: 135363 - RNA, 13 nt, Artificial Sequence
  Description of Artificial Sequence: Synthetic oligonucleotide
cucuacuaaaaau

SEQ ID NO: 135364 - RNA, 11 nt, Artificial Sequence
  Description of Artificial Sequence: Synthetic oligonucleotide
cuaucucgccu

SEQ ID NO: 135365 - RNA, 12 nt, Artificial Sequence
  Description of Artificial Sequence: Synthetic oligonucleotide
uucgguccaguu

SEQ ID NO: 135366 - RNA, 10 nt, Artificial Sequence
  Description of Artificial Sequence: Synthetic oligonucleotide
auguagccgc

SEQ ID NO: 135367 - RNA, 11 nt, Artificial Sequence
  Description of Artificial Sequence: Synthetic oligonucleotide
gaggagacuug

SEQ ID NO: 135368 - RNA, 11 nt, Artificial Sequence
  Description of Artificial Sequence: Synthetic oligonucleotide
aguagugagga

SEQ ID NO: 135369 - RNA, 13 nt, Artificial Sequence
  Description of Artificial Sequence: Synthetic oligonucleotide
agaugaguacaaa

SEQ ID NO: 135370 - RNA, 12 nt, Artificial Sequence
  Description of Artificial Sequence: Synthetic oligonucleotide
uuguuaaugggc

SEQ ID NO: 135371 - RNA, 12 nt, Artificial Sequence
  Description of Artificial Sequence: Synthetic oligonucleotide
uuuuaauuuauu

SEQ ID NO: 135372 - RNA, 11 nt, Artificial Sequence
  Description of Artificial Sequence: Synthetic oligonucleotide
auuuaaauaug

SEQ ID NO: 135373 - RNA, 12 nt, Artificial Sequence
  Description of Artificial Sequence: Synthetic oligonucleotide
auccuuuguuuc

SEQ ID NO: 135374 - RNA, 13 nt, Artificial Sequence
  Description of Artificial Sequence: Synthetic oligonucleotide
gucuaaguguuug

SEQ ID NO: 135375 - RNA, 11 nt, Artificial Sequence
  Description of Artificial Sequence: Synthetic oligonucleotide
ccugugacaaa

SEQ ID NO: 135376 - RNA, 12 nt, Artificial Sequence
  Description of Artificial Sequence: Synthetic oligonucleotide
caggcugaauua

SEQ ID NO: 135377 - RNA, 13 nt, Artificial Sequence
  Description of Artificial Sequence: Synthetic oligonucleotide
ucauucuuacaau

SEQ ID NO: 135378 - RNA, 14 nt, Artificial Sequence
  Description of Artificial Sequence: Synthetic oligonucleotide
cauucuuacaauug

SEQ ID NO: 135379 - RNA, 11 nt, Artificial Sequence
  Description of Artificial Sequence: Synthetic oligonucleotide
agagaguguac

SEQ ID NO: 135380 - RNA, 11 nt, Artificial Sequence
  Description of Artificial Sequence: Synthetic oligonucleotide
gaacucagcag

SEQ ID NO: 135381 - RNA, 12 nt, Artificial Sequence
  Description of Artificial Sequence: Synthetic oligonucleotide
uuauuuucagua

SEQ ID NO: 135382 - RNA, 11 nt, Artificial Sequence
  Description of Artificial Sequence: Synthetic oligonucleotide
cuuaaauggaa

SEQ ID NO: 135383 - RNA, 12 nt, Artificial Sequence
  Description of Artificial Sequence: Synthetic oligonucleotide
gccuaaaauugu

SEQ ID NO: 135384 - RNA, 12 nt, Artificial Sequence
  Description of Artificial Sequence: Synthetic oligonucleotide
acuaacaucugg

SEQ ID NO: 135385 - RNA, 11 nt, Artificial Sequence
  Description of Artificial Sequence: Synthetic oligonucleotide
gacugugagcu

SEQ ID NO: 135386 - RNA, 13 nt, Artificial Sequence
  Description of Artificial Sequence: Synthetic oligonucleotide
gcuuuuuauuaau

SEQ ID NO: 135387 - RNA, 12 nt, Artificial Sequence
  Description of Artificial Sequence: Synthetic oligonucleotide
ucuucuuacauu

SEQ ID NO: 135388 - RNA, 14 nt, Artificial Sequence
  Description of Artificial Sequence: Synthetic oligonucleotide
auuuguaaaaaugu

SEQ ID NO: 135389 - RNA, 14 nt, Artificial Sequence
  Description of Artificial Sequence: Synthetic oligonucleotide
ucuuaauucauauu

SEQ ID NO: 135390 - RNA, 12 nt, Artificial Sequence
  Description of Artificial Sequence: Synthetic oligonucleotide
aacuaaucauga

SEQ ID NO: 135391 - RNA, 11 nt, Artificial Sequence
  Description of Artificial Sequence: Synthetic oligonucleotide
cugcucuuggg

SEQ ID NO: 135392 - RNA, 12 nt, Artificial Sequence
  Description of Artificial Sequence: Synthetic oligonucleotide
aguagcuuugag

SEQ ID NO: 135393 - RNA, 13 nt, Artificial Sequence
  Description of Artificial Sequence: Synthetic oligonucleotide
acguaauauuuca

SEQ ID NO: 135394 - RNA, 12 nt, Artificial Sequence
  Description of Artificial Sequence: Synthetic oligonucleotide
auucucuucacu

SEQ ID NO: 135395 - RNA, 13 nt, Artificial Sequence
  Description of Artificial Sequence: Synthetic oligonucleotide
uaaugcuaagaaa

SEQ ID NO: 135396 - RNA, 11 nt, Artificial Sequence
  Description of Artificial Sequence: Synthetic oligonucleotide
cugaaaaucaa

SEQ ID NO: 135397 - RNA, 13 nt, Artificial Sequence
  Description of Artificial Sequence: Synthetic oligonucleotide
auaugauuacuuu

SEQ ID NO: 135398 - RNA, 13 nt, Artificial Sequence
  Description of Artificial Sequence: Synthetic oligonucleotide
auuuuguucuaca

SEQ ID NO: 135399 - RNA, 11 nt, Artificial Sequence
  Description of Artificial Sequence: Synthetic oligonucleotide
ccgggacucuc

SEQ ID NO: 135400 - RNA, 13 nt, Artificial Sequence
  Description of Artificial Sequence: Synthetic oligonucleotide
cuuuaaaguaaag

SEQ ID NO: 135401 - RNA, 12 nt, Artificial Sequence
  Description of Artificial Sequence: Synthetic oligonucleotide
cuggaagccugg

SEQ ID NO: 135402 - RNA, 13 nt, Artificial Sequence
  Description of Artificial Sequence: Synthetic oligonucleotide
aaacaaaagagag

SEQ ID NO: 135403 - RNA, 12 nt, Artificial Sequence
  Description of Artificial Sequence: Synthetic oligonucleotide
ucaguuaugccg

SEQ ID NO: 135404 - RNA, 12 nt, Artificial Sequence
  Description of Artificial Sequence: Synthetic oligonucleotide
aaaagaagucca

SEQ ID NO: 135405 - RNA, 10 nt, Artificial Sequence
  Description of Artificial Sequence: Synthetic oligonucleotide
ggugagguua

SEQ ID NO: 135406 - RNA, 10 nt, Artificial Sequence
  Description of Artificial Sequence: Synthetic oligonucleotide
ggaagaggac

SEQ ID NO: 135407 - RNA, 12 nt, Artificial Sequence
  Description of Artificial Sequence: Synthetic oligonucleotide
agcaaguauugu

SEQ ID NO: 135408 - RNA, 11 nt, Artificial Sequence
  Description of Artificial Sequence: Synthetic oligonucleotide
uuguagcacuc

SEQ ID NO: 135409 - RNA, 13 nt, Artificial Sequence
  Description of Artificial Sequence: Synthetic oligonucleotide
caaaaccacaaau

SEQ ID NO: 135410 - RNA, 11 nt, Artificial Sequence
  Description of Artificial Sequence: Synthetic oligonucleotide
aagcccauaca

SEQ ID NO: 135411 - RNA, 10 nt, Artificial Sequence
  Description of Artificial Sequence: Synthetic oligonucleotide
gcccauacag

SEQ ID NO: 135412 - RNA, 11 nt, Artificial Sequence
  Description of Artificial Sequence: Synthetic oligonucleotide
agaaaccuucc

SEQ ID NO: 135413 - RNA, 9 nt, Artificial Sequence
  Description of Artificial Sequence: Synthetic oligonucleotide
uauaccuac

SEQ ID NO: 135414 - RNA, 12 nt, Artificial Sequence
  Description of Artificial Sequence: Synthetic oligonucleotide
ccaguuuucgga

SEQ ID NO: 135415 - RNA, 8 nt, Artificial Sequence
  Description of Artificial Sequence: Synthetic oligonucleotide
gaacaggg

SEQ ID NO: 135416 - RNA, 12 nt, Artificial Sequence
  Description of Artificial Sequence: Synthetic oligonucleotide
uaacuuuccagu

SEQ ID NO: 135417 - RNA, 13 nt, Artificial Sequence
  Description of Artificial Sequence: Synthetic oligonucleotide
aaguuugguuuug

SEQ ID NO: 135418 - RNA, 11 nt, Artificial Sequence
  Description of Artificial Sequence: Synthetic oligonucleotide
uucccacugua

SEQ ID NO: 135419 - RNA, 12 nt, Artificial Sequence
  Description of Artificial Sequence: Synthetic oligonucleotide
gauaccauauga

SEQ ID NO: 135420 - RNA, 10 nt, Artificial Sequence
  Description of Artificial Sequence: Synthetic oligonucleotide
acaugggcug

SEQ ID NO: 135421 - RNA, 12 nt, Artificial Sequence
  Description of Artificial Sequence: Synthetic oligonucleotide
aacuuuuucaua

SEQ ID NO: 135422 - RNA, 11 nt, Artificial Sequence
  Description of Artificial Sequence: Synthetic oligonucleotide
augaggccgga

SEQ ID NO: 135423 - RNA, 10 nt, Artificial Sequence
  Description of Artificial Sequence: Synthetic oligonucleotide
cugcauuugu

SEQ ID NO: 135424 - RNA, 12 nt, Artificial Sequence
  Description of Artificial Sequence: Synthetic oligonucleotide
auguuuacuacc

SEQ ID NO: 135425 - RNA, 14 nt, Artificial Sequence
  Description of Artificial Sequence: Synthetic oligonucleotide
auuuuuugaugaaa

SEQ ID NO: 135426 - RNA, 13 nt, Artificial Sequence
  Description of Artificial Sequence: Synthetic oligonucleotide
agugugugaauuu

SEQ ID NO: 135427 - RNA, 12 nt, Artificial Sequence
  Description of Artificial Sequence: Synthetic oligonucleotide
agcaauguaugu

SEQ ID NO: 135428 - RNA, 13 nt, Artificial Sequence
  Description of Artificial Sequence: Synthetic oligonucleotide
aagcacauauaua

SEQ ID NO: 135429 - RNA, 13 nt, Artificial Sequence
  Description of Artificial Sequence: Synthetic oligonucleotide
uaauaguuucucc

SEQ ID NO: 135430 - RNA, 12 nt, Artificial Sequence
  Description of Artificial Sequence: Synthetic oligonucleotide
guuucuccaaau

SEQ ID NO: 135431 - RNA, 12 nt, Artificial Sequence
  Description of Artificial Sequence: Synthetic oligonucleotide
acuuccuagaaa

SEQ ID NO: 135432 - RNA, 12 nt, Artificial Sequence
  Description of Artificial Sequence: Synthetic oligonucleotide
acaccauauaug

SEQ ID NO: 135433 - RNA, 13 nt, Artificial Sequence
  Description of Artificial Sequence: Synthetic oligonucleotide
uauaugaauggag

SEQ ID NO: 135434 - RNA, 12 nt, Artificial Sequence
  Description of Artificial Sequence: Synthetic oligonucleotide
cauuuacaggga

SEQ ID NO: 135435 - RNA, 12 nt, Artificial Sequence
  Description of Artificial Sequence: Synthetic oligonucleotide
auuuacagggac

SEQ ID NO: 135436 - RNA, 9 nt, Artificial Sequence
  Description of Artificial Sequence: Synthetic oligonucleotide
gggaccuga

SEQ ID NO: 135437 - RNA, 13 nt, Artificial Sequence
  Description of Artificial Sequence: Synthetic oligonucleotide
guuugacugcauc

SEQ ID NO: 135438 - RNA, 12 nt, Artificial Sequence
  Description of Artificial Sequence: Synthetic oligonucleotide
uugacugcaucg

SEQ ID NO: 135439 - RNA, 11 nt, Artificial Sequence
  Description of Artificial Sequence: Synthetic oligonucleotide
aguucacaggg

SEQ ID NO: 135440 - RNA, 12 nt, Artificial Sequence
  Description of Artificial Sequence: Synthetic oligonucleotide
gcaccucugucc

SEQ ID NO: 135441 - RNA, 14 nt, Artificial Sequence
  Description of Artificial Sequence: Synthetic oligonucleotide
guuugucuuuuuaa

SEQ ID NO: 135442 - RNA, 13 nt, Artificial Sequence
  Description of Artificial Sequence: Synthetic oligonucleotide
uugucuuuuuaag

SEQ ID NO: 135443 - RNA, 12 nt, Artificial Sequence
  Description of Artificial Sequence: Synthetic oligonucleotide
cuaaagguuguc

SEQ ID NO: 135444 - RNA, 11 nt, Artificial Sequence
  Description of Artificial Sequence: Synthetic oligonucleotide
agguugucgac

SEQ ID NO: 135445 - RNA, 12 nt, Artificial Sequence
  Description of Artificial Sequence: Synthetic oligonucleotide
ccuggcaauugu

SEQ ID NO: 135446 - RNA, 11 nt, Artificial Sequence
  Description of Artificial Sequence: Synthetic oligonucleotide
guggugcgagg

SEQ ID NO: 135447 - RNA, 12 nt, Artificial Sequence
  Description of Artificial Sequence: Synthetic oligonucleotide
gagacaugaaau

SEQ ID NO: 135448 - RNA, 12 nt, Artificial Sequence
  Description of Artificial Sequence: Synthetic oligonucleotide
uauauuucucca

SEQ ID NO: 135449 - RNA, 9 nt, Artificial Sequence
  Description of Artificial Sequence: Synthetic oligonucleotide
augaaggcu

SEQ ID NO: 135450 - RNA, 10 nt, Artificial Sequence
  Description of Artificial Sequence: Synthetic oligonucleotide
cuggaguggu

SEQ ID NO: 135451 - RNA, 10 nt, Artificial Sequence
  Description of Artificial Sequence: Synthetic oligonucleotide
ggaagagagg

SEQ ID NO: 135452 - RNA, 11 nt, Artificial Sequence
  Description of Artificial Sequence: Synthetic oligonucleotide
uugcaucgggc

SEQ ID NO: 135453 - RNA, 12 nt, Artificial Sequence
  Description of Artificial Sequence: Synthetic oligonucleotide
uauccuacugug

SEQ ID NO: 135454 - RNA, 12 nt, Artificial Sequence
  Description of Artificial Sequence: Synthetic oligonucleotide
ccuacuguguaa

SEQ ID NO: 135455 - RNA, 11 nt, Artificial Sequence
  Description of Artificial Sequence: Synthetic oligonucleotide
cuuguagugua

SEQ ID NO: 135456 - RNA, 12 nt, Artificial Sequence
  Description of Artificial Sequence: Synthetic oligonucleotide
cuuuguugauug

SEQ ID NO: 135457 - RNA, 13 nt, Artificial Sequence
  Description of Artificial Sequence: Synthetic oligonucleotide
uuguugauugaaa

SEQ ID NO: 135458 - RNA, 14 nt, Artificial Sequence
  Description of Artificial Sequence: Synthetic oligonucleotide
ucuuuuucuuccau

SEQ ID NO: 135459 - RNA, 12 nt, Artificial Sequence
  Description of Artificial Sequence: Synthetic oligonucleotide
aucuuccuucua

SEQ ID NO: 135460 - RNA, 12 nt, Artificial Sequence
  Description of Artificial Sequence: Synthetic oligonucleotide
ugaaugcuucau

SEQ ID NO: 135461 - RNA, 12 nt, Artificial Sequence
  Description of Artificial Sequence: Synthetic oligonucleotide
gaaugcuucaug

SEQ ID NO: 135462 - RNA, 12 nt, Artificial Sequence
  Description of Artificial Sequence: Synthetic oligonucleotide
auucuacuuuga

SEQ ID NO: 135463 - RNA, 12 nt, Artificial Sequence
  Description of Artificial Sequence: Synthetic oligonucleotide
gcaacuacagac

SEQ ID NO: 135464 - RNA, 12 nt, Artificial Sequence
  Description of Artificial Sequence: Synthetic oligonucleotide
accaaggucaac

SEQ ID NO: 135465 - RNA, 12 nt, Artificial Sequence
  Description of Artificial Sequence: Synthetic oligonucleotide
gacuaucucgac

SEQ ID NO: 135466 - RNA, 12 nt, Artificial Sequence
  Description of Artificial Sequence: Synthetic oligonucleotide
accuucccaaac

SEQ ID NO: 135467 - RNA, 13 nt, Artificial Sequence
  Description of Artificial Sequence: Synthetic oligonucleotide
caagcuuagaacu

SEQ ID NO: 135468 - RNA, 14 nt, Artificial Sequence
  Description of Artificial Sequence: Synthetic oligonucleotide
gcuuagaacuuuaa

SEQ ID NO: 135469 - RNA, 13 nt, Artificial Sequence
  Description of Artificial Sequence: Synthetic oligonucleotide
aacuuuaagcaac

SEQ ID NO: 135470 - RNA, 10 nt, Artificial Sequence
  Description of Artificial Sequence: Synthetic oligonucleotide
agaccaccac

SEQ ID NO: 135471 - RNA, 13 nt, Artificial Sequence
  Description of Artificial Sequence: Synthetic oligonucleotide
cgagaaauaaagu

SEQ ID NO: 135472 - RNA, 13 nt, Artificial Sequence
  Description of Artificial Sequence: Synthetic oligonucleotide
gagaaauaaaguu

SEQ ID NO: 135473 - RNA, 11 nt, Artificial Sequence
  Description of Artificial Sequence: Synthetic oligonucleotide
ggaaaugaucc

SEQ ID NO: 135474 - RNA, 12 nt, Artificial Sequence
  Description of Artificial Sequence: Synthetic oligonucleotide
aagaaaugaaac

SEQ ID NO: 135475 - RNA, 12 nt, Artificial Sequence
  Description of Artificial Sequence: Synthetic oligonucleotide
uuuccauccucc

SEQ ID NO: 135476 - RNA, 14 nt, Artificial Sequence
  Description of Artificial Sequence: Synthetic oligonucleotide
cugaaaaucuuuga

SEQ ID NO: 135477 - RNA, 10 nt, Artificial Sequence
  Description of Artificial Sequence: Synthetic oligonucleotide
gccguucagg

SEQ ID NO: 135478 - RNA, 12 nt, Artificial Sequence
  Description of Artificial Sequence: Synthetic oligonucleotide
aggguccagaag

SEQ ID NO: 135479 - RNA, 12 nt, Artificial Sequence
  Description of Artificial Sequence: Synthetic oligonucleotide
caagacugcuug

SEQ ID NO: 135480 - RNA, 12 nt, Artificial Sequence
  Description of Artificial Sequence: Synthetic oligonucleotide
ccaugucuuugg

SEQ ID NO: 135481 - RNA, 10 nt, Artificial Sequence
  Description of Artificial Sequence: Synthetic oligonucleotide
ccugaaacac

SEQ ID NO: 135482 - RNA, 11 nt, Artificial Sequence
  Description of Artificial Sequence: Synthetic oligonucleotide
cucuguaccuc

SEQ ID NO: 135483 - RNA, 11 nt, Artificial Sequence
  Description of Artificial Sequence: Synthetic oligonucleotide
gcaagacaaga

SEQ ID NO: 135484 - RNA, 12 nt, Artificial Sequence
  Description of Artificial Sequence: Synthetic oligonucleotide
caagacaagaaa

SEQ ID NO: 135485 - RNA, 11 nt, Artificial Sequence
  Description of Artificial Sequence: Synthetic oligonucleotide
guacaagaucc

SEQ ID NO: 135486 - RNA, 11 nt, Artificial Sequence
  Description of Artificial Sequence: Synthetic oligonucleotide
guacuugcaga

SEQ ID NO: 135487 - RNA, 12 nt, Artificial Sequence
  Description of Artificial Sequence: Synthetic oligonucleotide
gaucgauacaga

SEQ ID NO: 135488 - RNA, 12 nt, Artificial Sequence
  Description of Artificial Sequence: Synthetic oligonucleotide
auaaaaauaaau

SEQ ID NO: 135489 - RNA, 12 nt, Artificial Sequence
  Description of Artificial Sequence: Synthetic oligonucleotide
aaaaauaaauau

SEQ ID NO: 135490 - RNA, 12 nt, Artificial Sequence
  Description of Artificial Sequence: Synthetic oligonucleotide
uugacugcugug

SEQ ID NO: 135491 - RNA, 12 nt, Artificial Sequence
  Description of Artificial Sequence: Synthetic oligonucleotide
gagaugagagac

SEQ ID NO: 135492 - RNA, 9 nt, Artificial Sequence
  Description of Artificial Sequence: Synthetic oligonucleotide
cccacuugg

SEQ ID NO: 135493 - RNA, 1963 nt, Homo sapiens
guguuguacgaaagcgcgucugcggccgcaaugucugcugagaguuguaguucugugcccuaucacggccacucccauuucuggugccgucacgggacagagcagucggugacaggacagagcagucggugacgggacacagugguuggugacgggacagagcggucggugacagccucaagggcuucagcaccgcgcccauggcagagccagaccccucucacccucuggagacccaggcagggaaggugcaggaggcucaggacucagauucagacucugagggaggagccgcugguggagaagcagacauggacuuccugcggaacuuauucucccagacgcucagccugggcagccagaaggagcgucugcuggacgagcugaccuuggaagggguggcccgguacaugcagagcgaacgcugucgcagagucaucuguuuggugggagcuggaaucuccacauccgcaggcauccccgacuuucgcucuccauccaccggccucuaugacaaccuagagaaguaccaucuucccuacccagaggccaucuuugagaucagcuauuucaagaaacauccggaacccuucuucgcccucgccaaggaacucuauccugggcaguucaagccaaccaucugucacuacuucaugcgccugcugaaggacaaggggcuacuccugcgcugcuacacgcagaacauagauacccuggagcgaauagccgggcuggaacaggaggacuugguggaggcgcacggcaccuucuacacaucacacugcgucagcgccagcugccggcacgaauacccgcuaagcuggaugaaagagaagaucuucucugaggugacgcccaagugugaagacugucagagccuggugaagccugauaucgucuuuuuuggugagagccucccagcgcguuucuucuccuguaugcagucagacuuccugaagguggaccuccuccuggucauggguaccuccuugcaggugcagcccuuugccucccucaucagcaaggcaccccucuccaccccucgccugcucaucaacaaggagaaagcuggccagucggacccuuuccuggggaugauuaugggccucggaggaggcauggacuuugacuccaagaaggccuacagggacguggccuggcugggugaaugcgaccagggcugccuggcccuugcugagcuccuuggauggaagaaggagcuggaggaccuuguccggagggagcacgccagcauagaugcccagucgggggcggggguccccaaccccagcacuucagcuucccccaagaaguccccgccaccugccaaggacgaggccaggacaacagagagggagaaaccccagugacagcugcaucucccaggcgggaugccgagcuccucagggacagcugagccccaaccgggccuggcccccucuuaaccagcaguucuugucuggggagcucagaacaucccccaaucucuuacagcucccuccccaaaacuggggucccagcaacccuggcccccaaccccagcaaaucucuaacaccuccuagaggccaaggcuuaaacaggcaucucuaccagccccacugucucuaaccacuccugggcuaaggaguaaccucccucaucucuaacugcccccacggggccagggcuaccccagaacuuuuaacucuuccaggacagggagcuucgggcccccacucugucuccugcccccgggggccuguggcuaaguaaaccauaccuaaccuaccccagugugggugugggccucugaauauaacccacacccagcguagggggagucugagccgggagggcucccgagucucugccuucagcucccaaaguggguggugggcccccuucacgugggacccacuucccaugcuggaugggcagaagacauugcuuauuggagacaaauuaaaaacaaaaacaacuaac

SEQ ID NO: 135494 - RNA, 1931 nt, Homo sapiens
cgaaagcgcgucugcggccgcaaugucugcugagaguuguaguucugugcccuaucacggccacucccauuucuggugccgucacgggacagagcagucggugacaggacagagcagucggugacgggacacagugguuggugacgggacagagcggucggugacagccucaagggcuucagcaccgcgcccauggcagagccagaccgacucagauucagacucugagggaggagccgcugguggagaagcagacauggacuuccugcggaacuuauucucccagacgcucagccugggcagccagaaggagcgucugcuggacgagcugaccuuggaagggguggcccgguacaugcagagcgaacgcugucgcagagucaucuguuuggugggagcuggaaucuccacauccgcaggcauccccgacuuucgcucuccauccaccggccucuaugacaaccuagagaaguaccaucuucccuacccagaggccaucuuugagaucagcuauuucaagaaacauccggaacccuucuucgcccucgccaaggaacucuauccugggcaguucaagccaaccaucugucacuacuucaugcgccugcugaaggacaaggggcuacuccugcgcugcuacacgcagaacauagauacccuggagcgaauagccgggcuggaacaggaggacuugguggaggcgcacggcaccuucuacacaucacacugcgucagcgccagcugccggcacgaauacccgcuaagcuggaugaaagagaagaucuucucugaggugacgcccaagugugaagacugucagagccuggugaagccugauaucgucuuuuuuggugagagccucccagcgcguuucuucuccuguaugcagucagacuuccugaagguggaccuccuccuggucauggguaccuccuugcaggugcagcccuuugccucccucaucagcaaggcaccccucuccaccccucgccugcucaucaacaaggagaaagcuggccagucggacccuuuccuggggaugauuaugggccucggaggaggcauggacuuugacuccaagaaggccuacagggacguggccuggcugggugaaugcgaccagggcugccuggcccuugcugagcuccuuggauggaagaaggagcuggaggaccuuguccggagggagcacgccagcauagaugcccagucgggggcggggguccccaaccccagcacuucagcuucccccaagaaguccccgccaccugccaaggacgaggccaggacaacagagagggagaaaccccagugacagcugcaucucccaggcgggaugccgagcuccucagggacagcugagccccaaccgggccuggcccccucuuaaccagcaguucuugucuggggagcucagaacaucccccaaucucuuacagcucccuccccaaaacuggggucccagcaacccuggcccccaaccccagcaaaucucuaacaccuccuagaggccaaggcuuaaacaggcaucucuaccagccccacugucucuaaccacuccugggcuaaggaguaaccucccucaucucuaacugcccccacggggccagggcuaccccagaacuuuuaacucuuccaggacagggagcuucgggcccccacucugucuccugcccccgggggccuguggcuaaguaaaccauaccuaaccuaccccagugugggugugggccucugaauauaacccacacccagcguagggggagucugagccgggagggcucccgagucucugccuucagcucccaaaguggguggugggcccccuucacgugggacccacuucccaugcuggaugggcagaagacauugcuuauuggagacaaauuaaaaacaaaaacaacuaacaaaaaaaaaaaaaaaaaaaaaaa

SEQ ID NO: 135495 - RNA, 19 nt, Artificial Sequence
  Description of Artificial Sequence: Synthetic oligonucleotide
guguuguacgaaagcgcgu

SEQ ID NO: 135496 - RNA, 19 nt, Artificial Sequence
  Description of Artificial Sequence: Synthetic oligonucleotide
ucugcggccgcaaugucug

SEQ ID NO: 135497 - RNA, 19 nt, Artificial Sequence
  Description of Artificial Sequence: Synthetic oligonucleotide
gcugagaguuguaguucug

SEQ ID NO: 135498 - RNA, 19 nt, Artificial Sequence
  Description of Artificial Sequence: Synthetic oligonucleotide
gugcccuaucacggccacu

SEQ ID NO: 135499 - RNA, 19 nt, Artificial Sequence
  Description of Artificial Sequence: Synthetic oligonucleotide
ucccauuucuggugccguc

SEQ ID NO: 135500 - RNA, 19 nt, Artificial Sequence
  Description of Artificial Sequence: Synthetic oligonucleotide
cacgggacagagcagucgg

SEQ ID NO: 135501 - RNA, 19 nt, Artificial Sequence
  Description of Artificial Sequence: Synthetic oligonucleotide
gugacaggacagagcaguc

SEQ ID NO: 135502 - RNA, 19 nt, Artificial Sequence
  Description of Artificial Sequence: Synthetic oligonucleotide
cggugacgggacacagugg

SEQ ID NO: 135503 - RNA, 19 nt, Artificial Sequence
  Description of Artificial Sequence: Synthetic oligonucleotide
guuggugacgggacagagc

SEQ ID NO: 135504 - RNA, 19 nt, Artificial Sequence
  Description of Artificial Sequence: Synthetic oligonucleotide
cggucggugacagccucaa

SEQ ID NO: 135505 - RNA, 19 nt, Artificial Sequence
  Description of Artificial Sequence: Synthetic oligonucleotide
agggcuucagcaccgcgcc

SEQ ID NO: 135506 - RNA, 19 nt, Artificial Sequence
  Description of Artificial Sequence: Synthetic oligonucleotide
ccauggcagagccagaccc

SEQ ID NO: 135507 - RNA, 19 nt, Artificial Sequence
  Description of Artificial Sequence: Synthetic oligonucleotide
ccucucacccucuggagac

SEQ ID NO: 135508 - RNA, 19 nt, Artificial Sequence
  Description of Artificial Sequence: Synthetic oligonucleotide
cccaggcagggaaggugca

SEQ ID NO: 135509 - RNA, 19 nt, Artificial Sequence
  Description of Artificial Sequence: Synthetic oligonucleotide
aggaggcucaggacucaga

SEQ ID NO: 135510 - RNA, 19 nt, Artificial Sequence
  Description of Artificial Sequence: Synthetic oligonucleotide
auucagacucugagggagg

SEQ ID NO: 135511 - RNA, 19 nt, Artificial Sequence
  Description of Artificial Sequence: Synthetic oligonucleotide
gagccgcugguggagaagc

SEQ ID NO: 135512 - RNA, 19 nt, Artificial Sequence
  Description of Artificial Sequence: Synthetic oligonucleotide
cagacauggacuuccugcg

SEQ ID NO: 135513 - RNA, 19 nt, Artificial Sequence
  Description of Artificial Sequence: Synthetic oligonucleotide
ggaacuuauucucccagac

SEQ ID NO: 135514 - RNA, 19 nt, Artificial Sequence
  Description of Artificial Sequence: Synthetic oligonucleotide
cgcucagccugggcagcca

SEQ ID NO: 135515 - RNA, 19 nt, Artificial Sequence
  Description of Artificial Sequence: Synthetic oligonucleotide
agaaggagcgucugcugga

SEQ ID NO: 135516 - RNA, 19 nt, Artificial Sequence
  Description of Artificial Sequence: Synthetic oligonucleotide
acgagcugaccuuggaagg

SEQ ID NO: 135517 - RNA, 19 nt, Artificial Sequence
  Description of Artificial Sequence: Synthetic oligonucleotide
ggguggcccgguacaugca

SEQ ID NO: 135518 - RNA, 19 nt, Artificial Sequence
  Description of Artificial Sequence: Synthetic oligonucleotide
agagcgaacgcugucgcag

SEQ ID NO: 135519 - RNA, 19 nt, Artificial Sequence
  Description of Artificial Sequence: Synthetic oligonucleotide
gagucaucuguuugguggg

SEQ ID NO: 135520 - RNA, 19 nt, Artificial Sequence
  Description of Artificial Sequence: Synthetic oligonucleotide
gagcuggaaucuccacauc

SEQ ID NO: 135521 - RNA, 19 nt, Artificial Sequence
  Description of Artificial Sequence: Synthetic oligonucleotide
ccgcaggcauccccgacuu

SEQ ID NO: 135522 - RNA, 19 nt, Artificial Sequence
  Description of Artificial Sequence: Synthetic oligonucleotide
uucgcucuccauccaccgg

SEQ ID NO: 135523 - RNA, 19 nt, Artificial Sequence
  Description of Artificial Sequence: Synthetic oligonucleotide
gccucuaugacaaccuaga

SEQ ID NO: 135524 - RNA, 19 nt, Artificial Sequence
  Description of Artificial Sequence: Synthetic oligonucleotide
agaaguaccaucuucccua

SEQ ID NO: 135525 - RNA, 19 nt, Artificial Sequence
  Description of Artificial Sequence: Synthetic oligonucleotide
acccagaggccaucuuuga

SEQ ID NO: 135526 - RNA, 19 nt, Artificial Sequence
  Description of Artificial Sequence: Synthetic oligonucleotide
agaucagcuauuucaagaa

SEQ ID NO: 135527 - RNA, 19 nt, Artificial Sequence
  Description of Artificial Sequence: Synthetic oligonucleotide
aacauccggaacccuucuu

SEQ ID NO: 135528 - RNA, 19 nt, Artificial Sequence
  Description of Artificial Sequence: Synthetic oligonucleotide
ucgcccucgccaaggaacu

SEQ ID NO: 135529 - RNA, 19 nt, Artificial Sequence
  Description of Artificial Sequence: Synthetic oligonucleotide
ucuauccugggcaguucaa

SEQ ID NO: 135530 - RNA, 19 nt, Artificial Sequence
  Description of Artificial Sequence: Synthetic oligonucleotide
agccaaccaucugucacua

SEQ ID NO: 135531 - RNA, 19 nt, Artificial Sequence
  Description of Artificial Sequence: Synthetic oligonucleotide
acuucaugcgccugcugaa

SEQ ID NO: 135532 - RNA, 19 nt, Artificial Sequence
  Description of Artificial Sequence: Synthetic oligonucleotide
aggacaaggggcuacuccu

SEQ ID NO: 135533 - RNA, 19 nt, Artificial Sequence
  Description of Artificial Sequence: Synthetic oligonucleotide
ugcgcugcuacacgcagaa

SEQ ID NO: 135534 - RNA, 19 nt, Artificial Sequence
  Description of Artificial Sequence: Synthetic oligonucleotide
acauagauacccuggagcg

SEQ ID NO: 135535 - RNA, 19 nt, Artificial Sequence
  Description of Artificial Sequence: Synthetic oligonucleotide
gaauagccgggcuggaaca

SEQ ID NO: 135536 - RNA, 19 nt, Artificial Sequence
  Description of Artificial Sequence: Synthetic oligonucleotide
aggaggacuugguggaggc

SEQ ID NO: 135537 - RNA, 19 nt, Artificial Sequence
  Description of Artificial Sequence: Synthetic oligonucleotide
cgcacggcaccuucuacac

SEQ ID NO: 135538 - RNA, 19 nt, Artificial Sequence
  Description of Artificial Sequence: Synthetic oligonucleotide
caucacacugcgucagcgc

SEQ ID NO: 135539 - RNA, 19 nt, Artificial Sequence
  Description of Artificial Sequence: Synthetic oligonucleotide
ccagcugccggcacgaaua

SEQ ID NO: 135540 - RNA, 19 nt, Artificial Sequence
  Description of Artificial Sequence: Synthetic oligonucleotide
acccgcuaagcuggaugaa

SEQ ID NO: 135541 - RNA, 19 nt, Artificial Sequence
  Description of Artificial Sequence: Synthetic oligonucleotide
aagagaagaucuucucuga

SEQ ID NO: 135542 - RNA, 19 nt, Artificial Sequence
  Description of Artificial Sequence: Synthetic oligonucleotide
aggugacgcccaaguguga

SEQ ID NO: 135543 - RNA, 19 nt, Artificial Sequence
  Description of Artificial Sequence: Synthetic oligonucleotide
aagacugucagagccuggu

SEQ ID NO: 135544 - RNA, 19 nt, Artificial Sequence
  Description of Artificial Sequence: Synthetic oligonucleotide
ugaagccugauaucgucuu

SEQ ID NO: 135545 - RNA, 19 nt, Artificial Sequence
  Description of Artificial Sequence: Synthetic oligonucleotide
uuuuuggugagagccuccc

SEQ ID NO: 135546 - RNA, 19 nt, Artificial Sequence
  Description of Artificial Sequence: Synthetic oligonucleotide
cagcgcguuucuucuccug

SEQ ID NO: 135547 - RNA, 19 nt, Artificial Sequence
  Description of Artificial Sequence: Synthetic oligonucleotide
guaugcagucagacuuccu

SEQ ID NO: 135548 - RNA, 19 nt, Artificial Sequence
  Description of Artificial Sequence: Synthetic oligonucleotide
ugaagguggaccuccuccu

SEQ ID NO: 135549 - RNA, 19 nt, Artificial Sequence
  Description of Artificial Sequence: Synthetic oligonucleotide
uggucauggguaccuccuu

SEQ ID NO: 135550 - RNA, 19 nt, Artificial Sequence
  Description of Artificial Sequence: Synthetic oligonucleotide
ugcaggugcagcccuuugc

SEQ ID NO: 135551 - RNA, 19 nt, Artificial Sequence
  Description of Artificial Sequence: Synthetic oligonucleotide
ccucccucaucagcaaggc

SEQ ID NO: 135552 - RNA, 19 nt, Artificial Sequence
  Description of Artificial Sequence: Synthetic oligonucleotide
caccccucuccaccccucg

SEQ ID NO: 135553 - RNA, 19 nt, Artificial Sequence
  Description of Artificial Sequence: Synthetic oligonucleotide
gccugcucaucaacaagga

SEQ ID NO: 135554 - RNA, 19 nt, Artificial Sequence
  Description of Artificial Sequence: Synthetic oligonucleotide
agaaagcuggccagucgga

SEQ ID NO: 135555 - RNA, 19 nt, Artificial Sequence
  Description of Artificial Sequence: Synthetic oligonucleotide
acccuuuccuggggaugau

SEQ ID NO: 135556 - RNA, 19 nt, Artificial Sequence
  Description of Artificial Sequence: Synthetic oligonucleotide
uuaugggccucggaggagg

SEQ ID NO: 135557 - RNA, 19 nt, Artificial Sequence
  Description of Artificial Sequence: Synthetic oligonucleotide
gcauggacuuugacuccaa

SEQ ID NO: 135558 - RNA, 19 nt, Artificial Sequence
  Description of Artificial Sequence: Synthetic oligonucleotide
agaaggccuacagggacgu

SEQ ID NO: 135559 - RNA, 19 nt, Artificial Sequence
  Description of Artificial Sequence: Synthetic oligonucleotide
uggccuggcugggugaaug

SEQ ID NO: 135560 - RNA, 19 nt, Artificial Sequence
  Description of Artificial Sequence: Synthetic oligonucleotide
gcgaccagggcugccuggc

SEQ ID NO: 135561 - RNA, 19 nt, Artificial Sequence
  Description of Artificial Sequence: Synthetic oligonucleotide
cccuugcugagcuccuugg

SEQ ID NO: 135562 - RNA, 19 nt, Artificial Sequence
  Description of Artificial Sequence: Synthetic oligonucleotide
gauggaagaaggagcugga

SEQ ID NO: 135563 - RNA, 19 nt, Artificial Sequence
  Description of Artificial Sequence: Synthetic oligonucleotide
aggaccuuguccggaggga

SEQ ID NO: 135564 - RNA, 19 nt, Artificial Sequence
  Description of Artificial Sequence: Synthetic oligonucleotide
agcacgccagcauagaugc

SEQ ID NO: 135565 - RNA, 19 nt, Artificial Sequence
  Description of Artificial Sequence: Synthetic oligonucleotide
cccagucgggggcgggggu

SEQ ID NO: 135566 - RNA, 19 nt, Artificial Sequence
  Description of Artificial Sequence: Synthetic oligonucleotide
uccccaaccccagcacuuc

SEQ ID NO: 135567 - RNA, 19 nt, Artificial Sequence
  Description of Artificial Sequence: Synthetic oligonucleotide
cagcuucccccaagaaguc

SEQ ID NO: 135568 - RNA, 19 nt, Artificial Sequence
  Description of Artificial Sequence: Synthetic oligonucleotide
ccccgccaccugccaagga

SEQ ID NO: 135569 - RNA, 19 nt, Artificial Sequence
  Description of Artificial Sequence: Synthetic oligonucleotide
acgaggccaggacaacaga

SEQ ID NO: 135570 - RNA, 19 nt, Artificial Sequence
  Description of Artificial Sequence: Synthetic oligonucleotide
agagggagaaaccccagug

SEQ ID NO: 135571 - RNA, 19 nt, Artificial Sequence
  Description of Artificial Sequence: Synthetic oligonucleotide
gacagcugcaucucccagg

SEQ ID NO: 135572 - RNA, 19 nt, Artificial Sequence
  Description of Artificial Sequence: Synthetic oligonucleotide
gcgggaugccgagcuccuc

SEQ ID NO: 135573 - RNA, 19 nt, Artificial Sequence
  Description of Artificial Sequence: Synthetic oligonucleotide
cagggacagcugagcccca

SEQ ID NO: 135574 - RNA, 19 nt, Artificial Sequence
  Description of Artificial Sequence: Synthetic oligonucleotide
aaccgggccuggcccccuc

SEQ ID NO: 135575 - RNA, 19 nt, Artificial Sequence
  Description of Artificial Sequence: Synthetic oligonucleotide
cuuaaccagcaguucuugu

SEQ ID NO: 135576 - RNA, 19 nt, Artificial Sequence
  Description of Artificial Sequence: Synthetic oligonucleotide
ucuggggagcucagaacau

SEQ ID NO: 135577 - RNA, 19 nt, Artificial Sequence
  Description of Artificial Sequence: Synthetic oligonucleotide
ucccccaaucucuuacagc

SEQ ID NO: 135578 - RNA, 19 nt, Artificial Sequence
  Description of Artificial Sequence: Synthetic oligonucleotide
cucccuccccaaaacuggg

SEQ ID NO: 135579 - RNA, 19 nt, Artificial Sequence
  Description of Artificial Sequence: Synthetic oligonucleotide
ggucccagcaacccuggcc

SEQ ID NO: 135580 - RNA, 19 nt, Artificial Sequence
  Description of Artificial Sequence: Synthetic oligonucleotide
ccccaaccccagcaaaucu

SEQ ID NO: 135581 - RNA, 19 nt, Artificial Sequence
  Description of Artificial Sequence: Synthetic oligonucleotide
ucuaacaccuccuagaggc

SEQ ID NO: 135582 - RNA, 19 nt, Artificial Sequence
  Description of Artificial Sequence: Synthetic oligonucleotide
ccaaggcuuaaacaggcau

SEQ ID NO: 135583 - RNA, 19 nt, Artificial Sequence
  Description of Artificial Sequence: Synthetic oligonucleotide
ucucuaccagccccacugu

SEQ ID NO: 135584 - RNA, 19 nt, Artificial Sequence
  Description of Artificial Sequence: Synthetic oligonucleotide
ucucuaaccacuccugggc

SEQ ID NO: 135585 - RNA, 19 nt, Artificial Sequence
  Description of Artificial Sequence: Synthetic oligonucleotide
cuaaggaguaaccucccuc

SEQ ID NO: 135586 - RNA, 19 nt, Artificial Sequence
  Description of Artificial Sequence: Synthetic oligonucleotide
caucucuaacugcccccac

SEQ ID NO: 135587 - RNA, 19 nt, Artificial Sequence
  Description of Artificial Sequence: Synthetic oligonucleotide
cggggccagggcuacccca

SEQ ID NO: 135588 - RNA, 19 nt, Artificial Sequence
  Description of Artificial Sequence: Synthetic oligonucleotide
agaacuuuuaacucuucca

SEQ ID NO: 135589 - RNA, 19 nt, Artificial Sequence
  Description of Artificial Sequence: Synthetic oligonucleotide
aggacagggagcuucgggc

SEQ ID NO: 135590 - RNA, 19 nt, Artificial Sequence
  Description of Artificial Sequence: Synthetic oligonucleotide
cccccacucugucuccugc

SEQ ID NO: 135591 - RNA, 19 nt, Artificial Sequence
  Description of Artificial Sequence: Synthetic oligonucleotide
cccccgggggccuguggcu

SEQ ID NO: 135592 - RNA, 19 nt, Artificial Sequence
  Description of Artificial Sequence: Synthetic oligonucleotide
uaaguaaaccauaccuaac

SEQ ID NO: 135593 - RNA, 19 nt, Artificial Sequence
  Description of Artificial Sequence: Synthetic oligonucleotide
ccuaccccagugugggugu

SEQ ID NO: 135594 - RNA, 19 nt, Artificial Sequence
  Description of Artificial Sequence: Synthetic oligonucleotide
ugggccucugaauauaacc

SEQ ID NO: 135595 - RNA, 19 nt, Artificial Sequence
  Description of Artificial Sequence: Synthetic oligonucleotide
ccacacccagcguaggggg

SEQ ID NO: 135596 - RNA, 19 nt, Artificial Sequence
  Description of Artificial Sequence: Synthetic oligonucleotide
gagucugagccgggagggc

SEQ ID NO: 135597 - RNA, 19 nt, Artificial Sequence
  Description of Artificial Sequence: Synthetic oligonucleotide
cucccgagucucugccuuc

SEQ ID NO: 135598 - RNA, 19 nt, Artificial Sequence
  Description of Artificial Sequence: Synthetic oligonucleotide
cagcucccaaagugggugg

SEQ ID NO: 135599 - RNA, 19 nt, Artificial Sequence
  Description of Artificial Sequence: Synthetic oligonucleotide
gugggcccccuucacgugg

SEQ ID NO: 135600 - RNA, 19 nt, Artificial Sequence
  Description of Artificial Sequence: Synthetic oligonucleotide
ggacccacuucccaugcug

SEQ ID NO: 135601 - RNA, 19 nt, Artificial Sequence
  Description of Artificial Sequence: Synthetic oligonucleotide
ggaugggcagaagacauug

SEQ ID NO: 135602 - RNA, 19 nt, Artificial Sequence
  Description of Artificial Sequence: Synthetic oligonucleotide
gcuuauuggagacaaauua

SEQ ID NO: 135603 - RNA, 19 nt, Artificial Sequence
  Description of Artificial Sequence: Synthetic oligonucleotide
aaaaacaaaaacaacuaac

SEQ ID NO: 135604 - RNA, 19 nt, Artificial Sequence
  Description of Artificial Sequence: Synthetic oligonucleotide
cgaaagcgcgucugcggcc

SEQ ID NO: 135605 - RNA, 19 nt, Artificial Sequence
  Description of Artificial Sequence: Synthetic oligonucleotide
cgcaaugucugcugagagu

SEQ ID NO: 135606 - RNA, 19 nt, Artificial Sequence
  Description of Artificial Sequence: Synthetic oligonucleotide
uuguaguucugugcccuau

SEQ ID NO: 135607 - RNA, 19 nt, Artificial Sequence
  Description of Artificial Sequence: Synthetic oligonucleotide
ucacggccacucccauuuc

SEQ ID NO: 135608 - RNA, 19 nt, Artificial Sequence
  Description of Artificial Sequence: Synthetic oligonucleotide
cuggugccgucacgggaca

SEQ ID NO: 135609 - RNA, 19 nt, Artificial Sequence
  Description of Artificial Sequence: Synthetic oligonucleotide
agagcagucggugacagga

SEQ ID NO: 135610 - RNA, 19 nt, Artificial Sequence
  Description of Artificial Sequence: Synthetic oligonucleotide
acagagcagucggugacgg

SEQ ID NO: 135611 - RNA, 19 nt, Artificial Sequence
  Description of Artificial Sequence: Synthetic oligonucleotide
ggacacagugguuggugac

SEQ ID NO: 135612 - RNA, 19 nt, Artificial Sequence
  Description of Artificial Sequence: Synthetic oligonucleotide
cgggacagagcggucggug

SEQ ID NO: 135613 - RNA, 19 nt, Artificial Sequence
  Description of Artificial Sequence: Synthetic oligonucleotide
gacagccucaagggcuuca

SEQ ID NO: 135614 - RNA, 19 nt, Artificial Sequence
  Description of Artificial Sequence: Synthetic oligonucleotide
agcaccgcgcccauggcag

SEQ ID NO: 135615 - RNA, 19 nt, Artificial Sequence
  Description of Artificial Sequence: Synthetic oligonucleotide
gagccagaccgacucagau

SEQ ID NO: 135616 - RNA, 19 nt, Artificial Sequence
  Description of Artificial Sequence: Synthetic oligonucleotide
uucagacucugagggagga

SEQ ID NO: 135617 - RNA, 19 nt, Artificial Sequence
  Description of Artificial Sequence: Synthetic oligonucleotide
agccgcugguggagaagca

SEQ ID NO: 135618 - RNA, 19 nt, Artificial Sequence
  Description of Artificial Sequence: Synthetic oligonucleotide
agacauggacuuccugcgg

SEQ ID NO: 135619 - RNA, 19 nt, Artificial Sequence
  Description of Artificial Sequence: Synthetic oligonucleotide
gaacuuauucucccagacg

SEQ ID NO: 135620 - RNA, 19 nt, Artificial Sequence
  Description of Artificial Sequence: Synthetic oligonucleotide
gcucagccugggcagccag

SEQ ID NO: 135621 - RNA, 19 nt, Artificial Sequence
  Description of Artificial Sequence: Synthetic oligonucleotide
gaaggagcgucugcuggac

SEQ ID NO: 135622 - RNA, 19 nt, Artificial Sequence
  Description of Artificial Sequence: Synthetic oligonucleotide
cgagcugaccuuggaaggg

SEQ ID NO: 135623 - RNA, 19 nt, Artificial Sequence
  Description of Artificial Sequence: Synthetic oligonucleotide
gguggcccgguacaugcag

SEQ ID NO: 135624 - RNA, 19 nt, Artificial Sequence
  Description of Artificial Sequence: Synthetic oligonucleotide
gagcgaacgcugucgcaga

SEQ ID NO: 135625 - RNA, 19 nt, Artificial Sequence
  Description of Artificial Sequence: Synthetic oligonucleotide
agucaucuguuugguggga

SEQ ID NO: 135626 - RNA, 19 nt, Artificial Sequence
  Description of Artificial Sequence: Synthetic oligonucleotide
agcuggaaucuccacaucc

SEQ ID NO: 135627 - RNA, 19 nt, Artificial Sequence
  Description of Artificial Sequence: Synthetic oligonucleotide
cgcaggcauccccgacuuu

SEQ ID NO: 135628 - RNA, 19 nt, Artificial Sequence
  Description of Artificial Sequence: Synthetic oligonucleotide
ucgcucuccauccaccggc

SEQ ID NO: 135629 - RNA, 19 nt, Artificial Sequence
  Description of Artificial Sequence: Synthetic oligonucleotide
ccucuaugacaaccuagag

SEQ ID NO: 135630 - RNA, 19 nt, Artificial Sequence
  Description of Artificial Sequence: Synthetic oligonucleotide
gaaguaccaucuucccuac

SEQ ID NO: 135631 - RNA, 19 nt, Artificial Sequence
  Description of Artificial Sequence: Synthetic oligonucleotide
cccagaggccaucuuugag

SEQ ID NO: 135632 - RNA, 19 nt, Artificial Sequence
  Description of Artificial Sequence: Synthetic oligonucleotide
gaucagcuauuucaagaaa

SEQ ID NO: 135633 - RNA, 19 nt, Artificial Sequence
  Description of Artificial Sequence: Synthetic oligonucleotide
acauccggaacccuucuuc

SEQ ID NO: 135634 - RNA, 19 nt, Artificial Sequence
  Description of Artificial Sequence: Synthetic oligonucleotide
cgcccucgccaaggaacuc

SEQ ID NO: 135635 - RNA, 19 nt, Artificial Sequence
  Description of Artificial Sequence: Synthetic oligonucleotide
cuauccugggcaguucaag

SEQ ID NO: 135636 - RNA, 19 nt, Artificial Sequence
  Description of Artificial Sequence: Synthetic oligonucleotide
gccaaccaucugucacuac

SEQ ID NO: 135637 - RNA, 19 nt, Artificial Sequence
  Description of Artificial Sequence: Synthetic oligonucleotide
cuucaugcgccugcugaag

SEQ ID NO: 135638 - RNA, 19 nt, Artificial Sequence
  Description of Artificial Sequence: Synthetic oligonucleotide
ggacaaggggcuacuccug

SEQ ID NO: 135639 - RNA, 19 nt, Artificial Sequence
  Description of Artificial Sequence: Synthetic oligonucleotide
gcgcugcuacacgcagaac

SEQ ID NO: 135640 - RNA, 19 nt, Artificial Sequence
  Description of Artificial Sequence: Synthetic oligonucleotide
cauagauacccuggagcga

SEQ ID NO: 135641 - RNA, 19 nt, Artificial Sequence
  Description of Artificial Sequence: Synthetic oligonucleotide
aauagccgggcuggaacag

SEQ ID NO: 135642 - RNA, 19 nt, Artificial Sequence
  Description of Artificial Sequence: Synthetic oligonucleotide
ggaggacuugguggaggcg

SEQ ID NO: 135643 - RNA, 19 nt, Artificial Sequence
  Description of Artificial Sequence: Synthetic oligonucleotide
gcacggcaccuucuacaca

SEQ ID NO: 135644 - RNA, 19 nt, Artificial Sequence
  Description of Artificial Sequence: Synthetic oligonucleotide
aucacacugcgucagcgcc

SEQ ID NO: 135645 - RNA, 19 nt, Artificial Sequence
  Description of Artificial Sequence: Synthetic oligonucleotide
cagcugccggcacgaauac

SEQ ID NO: 135646 - RNA, 19 nt, Artificial Sequence
  Description of Artificial Sequence: Synthetic oligonucleotide
cccgcuaagcuggaugaaa

SEQ ID NO: 135647 - RNA, 19 nt, Artificial Sequence
  Description of Artificial Sequence: Synthetic oligonucleotide
agagaagaucuucucugag

SEQ ID NO: 135648 - RNA, 19 nt, Artificial Sequence
  Description of Artificial Sequence: Synthetic oligonucleotide
ggugacgcccaagugugaa

SEQ ID NO: 135649 - RNA, 19 nt, Artificial Sequence
  Description of Artificial Sequence: Synthetic oligonucleotide
agacugucagagccuggug

SEQ ID NO: 135650 - RNA, 19 nt, Artificial Sequence
  Description of Artificial Sequence: Synthetic oligonucleotide
gaagccugauaucgucuuu

SEQ ID NO: 135651 - RNA, 19 nt, Artificial Sequence
  Description of Artificial Sequence: Synthetic oligonucleotide
uuuuggugagagccuccca

SEQ ID NO: 135652 - RNA, 19 nt, Artificial Sequence
  Description of Artificial Sequence: Synthetic oligonucleotide
agcgcguuucuucuccugu

SEQ ID NO: 135653 - RNA, 19 nt, Artificial Sequence
  Description of Artificial Sequence: Synthetic oligonucleotide
uaugcagucagacuuccug

SEQ ID NO: 135654 - RNA, 19 nt, Artificial Sequence
  Description of Artificial Sequence: Synthetic oligonucleotide
gaagguggaccuccuccug

SEQ ID NO: 135655 - RNA, 19 nt, Artificial Sequence
  Description of Artificial Sequence: Synthetic oligonucleotide
ggucauggguaccuccuug

SEQ ID NO: 135656 - RNA, 19 nt, Artificial Sequence
  Description of Artificial Sequence: Synthetic oligonucleotide
gcaggugcagcccuuugcc

SEQ ID NO: 135657 - RNA, 19 nt, Artificial Sequence
  Description of Artificial Sequence: Synthetic oligonucleotide
cucccucaucagcaaggca

SEQ ID NO: 135658 - RNA, 19 nt, Artificial Sequence
  Description of Artificial Sequence: Synthetic oligonucleotide
accccucuccaccccucgc

SEQ ID NO: 135659 - RNA, 19 nt, Artificial Sequence
  Description of Artificial Sequence: Synthetic oligonucleotide
ccugcucaucaacaaggag

SEQ ID NO: 135660 - RNA, 19 nt, Artificial Sequence
  Description of Artificial Sequence: Synthetic oligonucleotide
gaaagcuggccagucggac

SEQ ID NO: 135661 - RNA, 19 nt, Artificial Sequence
  Description of Artificial Sequence: Synthetic oligonucleotide
cccuuuccuggggaugauu

SEQ ID NO: 135662 - RNA, 19 nt, Artificial Sequence
  Description of Artificial Sequence: Synthetic oligonucleotide
uaugggccucggaggaggc

SEQ ID NO: 135663 - RNA, 19 nt, Artificial Sequence
  Description of Artificial Sequence: Synthetic oligonucleotide
cauggacuuugacuccaag

SEQ ID NO: 135664 - RNA, 19 nt, Artificial Sequence
  Description of Artificial Sequence: Synthetic oligonucleotide
gaaggccuacagggacgug

SEQ ID NO: 135665 - RNA, 19 nt, Artificial Sequence
  Description of Artificial Sequence: Synthetic oligonucleotide
ggccuggcugggugaaugc

SEQ ID NO: 135666 - RNA, 19 nt, Artificial Sequence
  Description of Artificial Sequence: Synthetic oligonucleotide
cgaccagggcugccuggcc

SEQ ID NO: 135667 - RNA, 19 nt, Artificial Sequence
  Description of Artificial Sequence: Synthetic oligonucleotide
ccuugcugagcuccuugga

SEQ ID NO: 135668 - RNA, 19 nt, Artificial Sequence
  Description of Artificial Sequence: Synthetic oligonucleotide
auggaagaaggagcuggag

SEQ ID NO: 135669 - RNA, 19 nt, Artificial Sequence
  Description of Artificial Sequence: Synthetic oligonucleotide
ggaccuuguccggagggag

SEQ ID NO: 135670 - RNA, 19 nt, Artificial Sequence
  Description of Artificial Sequence: Synthetic oligonucleotide
gcacgccagcauagaugcc

SEQ ID NO: 135671 - RNA, 19 nt, Artificial Sequence
  Description of Artificial Sequence: Synthetic oligonucleotide
ccagucgggggcggggguc

SEQ ID NO: 135672 - RNA, 19 nt, Artificial Sequence
  Description of Artificial Sequence: Synthetic oligonucleotide
ccccaaccccagcacuuca

SEQ ID NO: 135673 - RNA, 19 nt, Artificial Sequence
  Description of Artificial Sequence: Synthetic oligonucleotide
agcuucccccaagaagucc

SEQ ID NO: 135674 - RNA, 19 nt, Artificial Sequence
  Description of Artificial Sequence: Synthetic oligonucleotide
cccgccaccugccaaggac

SEQ ID NO: 135675 - RNA, 19 nt, Artificial Sequence
  Description of Artificial Sequence: Synthetic oligonucleotide
cgaggccaggacaacagag

SEQ ID NO: 135676 - RNA, 19 nt, Artificial Sequence
  Description of Artificial Sequence: Synthetic oligonucleotide
gagggagaaaccccaguga

SEQ ID NO: 135677 - RNA, 19 nt, Artificial Sequence
  Description of Artificial Sequence: Synthetic oligonucleotide
acagcugcaucucccaggc

SEQ ID NO: 135678 - RNA, 19 nt, Artificial Sequence
  Description of Artificial Sequence: Synthetic oligonucleotide
cgggaugccgagcuccuca

SEQ ID NO: 135679 - RNA, 19 nt, Artificial Sequence
  Description of Artificial Sequence: Synthetic oligonucleotide
agggacagcugagccccaa

SEQ ID NO: 135680 - RNA, 19 nt, Artificial Sequence
  Description of Artificial Sequence: Synthetic oligonucleotide
accgggccuggcccccucu

SEQ ID NO: 135681 - RNA, 19 nt, Artificial Sequence
  Description of Artificial Sequence: Synthetic oligonucleotide
uuaaccagcaguucuuguc

SEQ ID NO: 135682 - RNA, 19 nt, Artificial Sequence
  Description of Artificial Sequence: Synthetic oligonucleotide
cuggggagcucagaacauc

SEQ ID NO: 135683 - RNA, 19 nt, Artificial Sequence
  Description of Artificial Sequence: Synthetic oligonucleotide
cccccaaucucuuacagcu

SEQ ID NO: 135684 - RNA, 19 nt, Artificial Sequence
  Description of Artificial Sequence: Synthetic oligonucleotide
ucccuccccaaaacugggg

SEQ ID NO: 135685 - RNA, 19 nt, Artificial Sequence
  Description of Artificial Sequence: Synthetic oligonucleotide
gucccagcaacccuggccc

SEQ ID NO: 135686 - RNA, 19 nt, Artificial Sequence
  Description of Artificial Sequence: Synthetic oligonucleotide
cccaaccccagcaaaucuc

SEQ ID NO: 135687 - RNA, 19 nt, Artificial Sequence
  Description of Artificial Sequence: Synthetic oligonucleotide
cuaacaccuccuagaggcc

SEQ ID NO: 135688 - RNA, 19 nt, Artificial Sequence
  Description of Artificial Sequence: Synthetic oligonucleotide
caaggcuuaaacaggcauc

SEQ ID NO: 135689 - RNA, 19 nt, Artificial Sequence
  Description of Artificial Sequence: Synthetic oligonucleotide
cucuaccagccccacuguc

SEQ ID NO: 135690 - RNA, 19 nt, Artificial Sequence
  Description of Artificial Sequence: Synthetic oligonucleotide
cucuaaccacuccugggcu

SEQ ID NO: 135691 - RNA, 19 nt, Artificial Sequence
  Description of Artificial Sequence: Synthetic oligonucleotide
uaaggaguaaccucccuca

SEQ ID NO: 135692 - RNA, 19 nt, Artificial Sequence
  Description of Artificial Sequence: Synthetic oligonucleotide
aucucuaacugcccccacg

SEQ ID NO: 135693 - RNA, 19 nt, Artificial Sequence
  Description of Artificial Sequence: Synthetic oligonucleotide
ggggccagggcuaccccag

SEQ ID NO: 135694 - RNA, 19 nt, Artificial Sequence
  Description of Artificial Sequence: Synthetic oligonucleotide
gaacuuuuaacucuuccag

SEQ ID NO: 135695 - RNA, 19 nt, Artificial Sequence
  Description of Artificial Sequence: Synthetic oligonucleotide
ggacagggagcuucgggcc

SEQ ID NO: 135696 - RNA, 19 nt, Artificial Sequence
  Description of Artificial Sequence: Synthetic oligonucleotide
ccccacucugucuccugcc

SEQ ID NO: 135697 - RNA, 19 nt, Artificial Sequence
  Description of Artificial Sequence: Synthetic oligonucleotide
ccccgggggccuguggcua

SEQ ID NO: 135698 - RNA, 19 nt, Artificial Sequence
  Description of Artificial Sequence: Synthetic oligonucleotide
aaguaaaccauaccuaacc

SEQ ID NO: 135699 - RNA, 19 nt, Artificial Sequence
  Description of Artificial Sequence: Synthetic oligonucleotide
cuaccccagugugggugug

SEQ ID NO: 135700 - RNA, 19 nt, Artificial Sequence
  Description of Artificial Sequence: Synthetic oligonucleotide
gggccucugaauauaaccc

SEQ ID NO: 135701 - RNA, 19 nt, Artificial Sequence
  Description of Artificial Sequence: Synthetic oligonucleotide
cacacccagcguaggggga

SEQ ID NO: 135702 - RNA, 19 nt, Artificial Sequence
  Description of Artificial Sequence: Synthetic oligonucleotide
agucugagccgggagggcu

SEQ ID NO: 135703 - RNA, 19 nt, Artificial Sequence
  Description of Artificial Sequence: Synthetic oligonucleotide
ucccgagucucugccuuca

SEQ ID NO: 135704 - RNA, 19 nt, Artificial Sequence
  Description of Artificial Sequence: Synthetic oligonucleotide
agcucccaaaguggguggu

SEQ ID NO: 135705 - RNA, 19 nt, Artificial Sequence
  Description of Artificial Sequence: Synthetic oligonucleotide
ugggcccccuucacguggg

SEQ ID NO: 135706 - RNA, 19 nt, Artificial Sequence
  Description of Artificial Sequence: Synthetic oligonucleotide
gacccacuucccaugcugg

SEQ ID NO: 135707 - RNA, 19 nt, Artificial Sequence
  Description of Artificial Sequence: Synthetic oligonucleotide
gaugggcagaagacauugc

SEQ ID NO: 135708 - RNA, 19 nt, Artificial Sequence
  Description of Artificial Sequence: Synthetic oligonucleotide
cuuauuggagacaaauuaa

SEQ ID NO: 135709 - RNA, 19 nt, Artificial Sequence
  Description of Artificial Sequence: Synthetic oligonucleotide
aaaacaaaaacaacuaaca

SEQ ID NO: 135710 - RNA, 25 nt, Artificial Sequence
  Description of Artificial Sequence: Synthetic oligonucleotide
guguuguacgaaagcgcgucugcgg

SEQ ID NO: 135711 - RNA, 25 nt, Artificial Sequence
  Description of Artificial Sequence: Synthetic oligonucleotide
gccgcaaugucugcugagaguugua

SEQ ID NO: 135712 - RNA, 25 nt, Artificial Sequence
  Description of Artificial Sequence: Synthetic oligonucleotide
aguucugugcccuaucacggccacu

SEQ ID NO: 135713 - RNA, 25 nt, Artificial Sequence
  Description of Artificial Sequence: Synthetic oligonucleotide
ucccauuucuggugccgucacggga

SEQ ID NO: 135714 - RNA, 25 nt, Artificial Sequence
  Description of Artificial Sequence: Synthetic oligonucleotide
acagagcagucggugacaggacaga

SEQ ID NO: 135715 - RNA, 25 nt, Artificial Sequence
  Description of Artificial Sequence: Synthetic oligonucleotide
agcagucggugacgggacacagugg

SEQ ID NO: 135716 - RNA, 25 nt, Artificial Sequence
  Description of Artificial Sequence: Synthetic oligonucleotide
guuggugacgggacagagcggucgg

SEQ ID NO: 135717 - RNA, 25 nt, Artificial Sequence
  Description of Artificial Sequence: Synthetic oligonucleotide
gugacagccucaagggcuucagcac

SEQ ID NO: 135718 - RNA, 25 nt, Artificial Sequence
  Description of Artificial Sequence: Synthetic oligonucleotide
ccgcgcccauggcagagccagaccc

SEQ ID NO: 135719 - RNA, 25 nt, Artificial Sequence
  Description of Artificial Sequence: Synthetic oligonucleotide
ccucucacccucuggagacccaggc

SEQ ID NO: 135720 - RNA, 25 nt, Artificial Sequence
  Description of Artificial Sequence: Synthetic oligonucleotide
cagggaaggugcaggaggcucagga

SEQ ID NO: 135721 - RNA, 25 nt, Artificial Sequence
  Description of Artificial Sequence: Synthetic oligonucleotide
acucagauucagacucugagggagg

SEQ ID NO: 135722 - RNA, 25 nt, Artificial Sequence
  Description of Artificial Sequence: Synthetic oligonucleotide
gagccgcugguggagaagcagacau

SEQ ID NO: 135723 - RNA, 25 nt, Artificial Sequence
  Description of Artificial Sequence: Synthetic oligonucleotide
uggacuuccugcggaacuuauucuc

SEQ ID NO: 135724 - RNA, 25 nt, Artificial Sequence
  Description of Artificial Sequence: Synthetic oligonucleotide
cccagacgcucagccugggcagcca

SEQ ID NO: 135725 - RNA, 25 nt, Artificial Sequence
  Description of Artificial Sequence: Synthetic oligonucleotide
agaaggagcgucugcuggacgagcu

SEQ ID NO: 135726 - RNA, 25 nt, Artificial Sequence
  Description of Artificial Sequence: Synthetic oligonucleotide
ugaccuuggaagggguggcccggua

SEQ ID NO: 135727 - RNA, 25 nt, Artificial Sequence
  Description of Artificial Sequence: Synthetic oligonucleotide
acaugcagagcgaacgcugucgcag

SEQ ID NO: 135728 - RNA, 25 nt, Artificial Sequence
  Description of Artificial Sequence: Synthetic oligonucleotide
gagucaucuguuuggugggagcugg

SEQ ID NO: 135729 - RNA, 25 nt, Artificial Sequence
  Description of Artificial Sequence: Synthetic oligonucleotide
gaaucuccacauccgcaggcauccc

SEQ ID NO: 135730 - RNA, 25 nt, Artificial Sequence
  Description of Artificial Sequence: Synthetic oligonucleotide
ccgacuuucgcucuccauccaccgg

SEQ ID NO: 135731 - RNA, 25 nt, Artificial Sequence
  Description of Artificial Sequence: Synthetic oligonucleotide
gccucuaugacaaccuagagaagua

SEQ ID NO: 135732 - RNA, 25 nt, Artificial Sequence
  Description of Artificial Sequence: Synthetic oligonucleotide
accaucuucccuacccagaggccau

SEQ ID NO: 135733 - RNA, 25 nt, Artificial Sequence
  Description of Artificial Sequence: Synthetic oligonucleotide
ucuuugagaucagcuauuucaagaa

SEQ ID NO: 135734 - RNA, 25 nt, Artificial Sequence
  Description of Artificial Sequence: Synthetic oligonucleotide
aacauccggaacccuucuucgcccu

SEQ ID NO: 135735 - RNA, 25 nt, Artificial Sequence
  Description of Artificial Sequence: Synthetic oligonucleotide
ucgccaaggaacucuauccugggca

SEQ ID NO: 135736 - RNA, 25 nt, Artificial Sequence
  Description of Artificial Sequence: Synthetic oligonucleotide
aguucaagccaaccaucugucacua

SEQ ID NO: 135737 - RNA, 25 nt, Artificial Sequence
  Description of Artificial Sequence: Synthetic oligonucleotide
acuucaugcgccugcugaaggacaa

SEQ ID NO: 135738 - RNA, 25 nt, Artificial Sequence
  Description of Artificial Sequence: Synthetic oligonucleotide
aggggcuacuccugcgcugcuacac

SEQ ID NO: 135739 - RNA, 25 nt, Artificial Sequence
  Description of Artificial Sequence: Synthetic oligonucleotide
cgcagaacauagauacccuggagcg

SEQ ID NO: 135740 - RNA, 25 nt, Artificial Sequence
  Description of Artificial Sequence: Synthetic oligonucleotide
gaauagccgggcuggaacaggagga

SEQ ID NO: 135741 - RNA, 25 nt, Artificial Sequence
  Description of Artificial Sequence: Synthetic oligonucleotide
acuugguggaggcgcacggcaccuu

SEQ ID NO: 135742 - RNA, 25 nt, Artificial Sequence
  Description of Artificial Sequence: Synthetic oligonucleotide
ucuacacaucacacugcgucagcgc

SEQ ID NO: 135743 - RNA, 25 nt, Artificial Sequence
  Description of Artificial Sequence: Synthetic oligonucleotide
ccagcugccggcacgaauacccgcu

SEQ ID NO: 135744 - RNA, 25 nt, Artificial Sequence
  Description of Artificial Sequence: Synthetic oligonucleotide
uaagcuggaugaaagagaagaucuu

SEQ ID NO: 135745 - RNA, 25 nt, Artificial Sequence
  Description of Artificial Sequence: Synthetic oligonucleotide
ucucugaggugacgcccaaguguga

SEQ ID NO: 135746 - RNA, 25 nt, Artificial Sequence
  Description of Artificial Sequence: Synthetic oligonucleotide
aagacugucagagccuggugaagcc

SEQ ID NO: 135747 - RNA, 25 nt, Artificial Sequence
  Description of Artificial Sequence: Synthetic oligonucleotide
cugauaucgucuuuuuuggugagag

SEQ ID NO: 135748 - RNA, 25 nt, Artificial Sequence
  Description of Artificial Sequence: Synthetic oligonucleotide
gccucccagcgcguuucuucuccug

SEQ ID NO: 135749 - RNA, 25 nt, Artificial Sequence
  Description of Artificial Sequence: Synthetic oligonucleotide
guaugcagucagacuuccugaaggu

SEQ ID NO: 135750 - RNA, 25 nt, Artificial Sequence
  Description of Artificial Sequence: Synthetic oligonucleotide
uggaccuccuccuggucauggguac

SEQ ID NO: 135751 - RNA, 25 nt, Artificial Sequence
  Description of Artificial Sequence: Synthetic oligonucleotide
ccuccuugcaggugcagcccuuugc

SEQ ID NO: 135752 - RNA, 25 nt, Artificial Sequence
  Description of Artificial Sequence: Synthetic oligonucleotide
ccucccucaucagcaaggcaccccu

SEQ ID NO: 135753 - RNA, 25 nt, Artificial Sequence
  Description of Artificial Sequence: Synthetic oligonucleotide
ucuccaccccucgccugcucaucaa

SEQ ID NO: 135754 - RNA, 25 nt, Artificial Sequence
  Description of Artificial Sequence: Synthetic oligonucleotide
acaaggagaaagcuggccagucgga

SEQ ID NO: 135755 - RNA, 25 nt, Artificial Sequence
  Description of Artificial Sequence: Synthetic oligonucleotide
acccuuuccuggggaugauuauggg

SEQ ID NO: 135756 - RNA, 25 nt, Artificial Sequence
  Description of Artificial Sequence: Synthetic oligonucleotide
gccucggaggaggcauggacuuuga

SEQ ID NO: 135757 - RNA, 25 nt, Artificial Sequence
  Description of Artificial Sequence: Synthetic oligonucleotide
acuccaagaaggccuacagggacgu

SEQ ID NO: 135758 - RNA, 25 nt, Artificial Sequence
  Description of Artificial Sequence: Synthetic oligonucleotide
uggccuggcugggugaaugcgacca

SEQ ID NO: 135759 - RNA, 25 nt, Artificial Sequence
  Description of Artificial Sequence: Synthetic oligonucleotide
agggcugccuggcccuugcugagcu

SEQ ID NO: 135760 - RNA, 25 nt, Artificial Sequence
  Description of Artificial Sequence: Synthetic oligonucleotide
uccuuggauggaagaaggagcugga

SEQ ID NO: 135761 - RNA, 25 nt, Artificial Sequence
  Description of Artificial Sequence: Synthetic oligonucleotide
aggaccuuguccggagggagcacgc

SEQ ID NO: 135762 - RNA, 25 nt, Artificial Sequence
  Description of Artificial Sequence: Synthetic oligonucleotide
ccagcauagaugcccagucgggggc

SEQ ID NO: 135763 - RNA, 25 nt, Artificial Sequence
  Description of Artificial Sequence: Synthetic oligonucleotide
cggggguccccaaccccagcacuuc

SEQ ID NO: 135764 - RNA, 25 nt, Artificial Sequence
  Description of Artificial Sequence: Synthetic oligonucleotide
cagcuucccccaagaaguccccgcc

SEQ ID NO: 135765 - RNA, 25 nt, Artificial Sequence
  Description of Artificial Sequence: Synthetic oligonucleotide
caccugccaaggacgaggccaggac

SEQ ID NO: 135766 - RNA, 25 nt, Artificial Sequence
  Description of Artificial Sequence: Synthetic oligonucleotide
caacagagagggagaaaccccagug

SEQ ID NO: 135767 - RNA, 25 nt, Artificial Sequence
  Description of Artificial Sequence: Synthetic oligonucleotide
gacagcugcaucucccaggcgggau

SEQ ID NO: 135768 - RNA, 25 nt, Artificial Sequence
  Description of Artificial Sequence: Synthetic oligonucleotide
ugccgagcuccucagggacagcuga

SEQ ID NO: 135769 - RNA, 25 nt, Artificial Sequence
  Description of Artificial Sequence: Synthetic oligonucleotide
agccccaaccgggccuggcccccuc

SEQ ID NO: 135770 - RNA, 25 nt, Artificial Sequence
  Description of Artificial Sequence: Synthetic oligonucleotide
cuuaaccagcaguucuugucugggg

SEQ ID NO: 135771 - RNA, 25 nt, Artificial Sequence
  Description of Artificial Sequence: Synthetic oligonucleotide
gagcucagaacaucccccaaucucu

SEQ ID NO: 135772 - RNA, 25 nt, Artificial Sequence
  Description of Artificial Sequence: Synthetic oligonucleotide
uuacagcucccuccccaaaacuggg

SEQ ID NO: 135773 - RNA, 25 nt, Artificial Sequence
  Description of Artificial Sequence: Synthetic oligonucleotide
ggucccagcaacccuggcccccaac

SEQ ID NO: 135774 - RNA, 25 nt, Artificial Sequence
  Description of Artificial Sequence: Synthetic oligonucleotide
ccccagcaaaucucuaacaccuccu

SEQ ID NO: 135775 - RNA, 25 nt, Artificial Sequence
  Description of Artificial Sequence: Synthetic oligonucleotide
uagaggccaaggcuuaaacaggcau

SEQ ID NO: 135776 - RNA, 25 nt, Artificial Sequence
  Description of Artificial Sequence: Synthetic oligonucleotide
ucucuaccagccccacugucucuaa

SEQ ID NO: 135777 - RNA, 25 nt, Artificial Sequence
  Description of Artificial Sequence: Synthetic oligonucleotide
accacuccugggcuaaggaguaacc

SEQ ID NO: 135778 - RNA, 25 nt, Artificial Sequence
  Description of Artificial Sequence: Synthetic oligonucleotide
cucccucaucucuaacugcccccac

SEQ ID NO: 135779 - RNA, 25 nt, Artificial Sequence
  Description of Artificial Sequence: Synthetic oligonucleotide
cggggccagggcuaccccagaacuu

SEQ ID NO: 135780 - RNA, 25 nt, Artificial Sequence
  Description of Artificial Sequence: Synthetic oligonucleotide
uuuaacucuuccaggacagggagcu

SEQ ID NO: 135781 - RNA, 25 nt, Artificial Sequence
  Description of Artificial Sequence: Synthetic oligonucleotide
uucgggcccccacucugucuccugc

SEQ ID NO: 135782 - RNA, 25 nt, Artificial Sequence
  Description of Artificial Sequence: Synthetic oligonucleotide
cccccgggggccuguggcuaaguaa

SEQ ID NO: 135783 - RNA, 25 nt, Artificial Sequence
  Description of Artificial Sequence: Synthetic oligonucleotide
aaccauaccuaaccuaccccagugu

SEQ ID NO: 135784 - RNA, 25 nt, Artificial Sequence
  Description of Artificial Sequence: Synthetic oligonucleotide
ugggugugggccucugaauauaacc

SEQ ID NO: 135785 - RNA, 25 nt, Artificial Sequence
  Description of Artificial Sequence: Synthetic oligonucleotide
ccacacccagcguagggggagucug

SEQ ID NO: 135786 - RNA, 25 nt, Artificial Sequence
  Description of Artificial Sequence: Synthetic oligonucleotide
gagccgggagggcucccgagucucu

SEQ ID NO: 135787 - RNA, 25 nt, Artificial Sequence
  Description of Artificial Sequence: Synthetic oligonucleotide
ugccuucagcucccaaagugggugg

SEQ ID NO: 135788 - RNA, 25 nt, Artificial Sequence
  Description of Artificial Sequence: Synthetic oligonucleotide
gugggcccccuucacgugggaccca

SEQ ID NO: 135789 - RNA, 25 nt, Artificial Sequence
  Description of Artificial Sequence: Synthetic oligonucleotide
acuucccaugcuggaugggcagaag

SEQ ID NO: 135790 - RNA, 25 nt, Artificial Sequence
  Description of Artificial Sequence: Synthetic oligonucleotide
gacauugcuuauuggagacaaauua

SEQ ID NO: 135791 - RNA, 25 nt, Artificial Sequence
  Description of Artificial Sequence: Synthetic oligonucleotide
caaauuaaaaacaaaaacaacuaac

SEQ ID NO: 135792 - RNA, 25 nt, Artificial Sequence
  Description of Artificial Sequence: Synthetic oligonucleotide
cgaaagcgcgucugcggccgcaaug

SEQ ID NO: 135793 - RNA, 25 nt, Artificial Sequence
  Description of Artificial Sequence: Synthetic oligonucleotide
gucugcugagaguuguaguucugug

SEQ ID NO: 135794 - RNA, 25 nt, Artificial Sequence
  Description of Artificial Sequence: Synthetic oligonucleotide
gcccuaucacggccacucccauuuc

SEQ ID NO: 135795 - RNA, 25 nt, Artificial Sequence
  Description of Artificial Sequence: Synthetic oligonucleotide
cuggugccgucacgggacagagcag

SEQ ID NO: 135796 - RNA, 25 nt, Artificial Sequence
  Description of Artificial Sequence: Synthetic oligonucleotide
gucggugacaggacagagcagucgg

SEQ ID NO: 135797 - RNA, 25 nt, Artificial Sequence
  Description of Artificial Sequence: Synthetic oligonucleotide
gugacgggacacagugguuggugac

SEQ ID NO: 135798 - RNA, 25 nt, Artificial Sequence
  Description of Artificial Sequence: Synthetic oligonucleotide
cgggacagagcggucggugacagcc

SEQ ID NO: 135799 - RNA, 25 nt, Artificial Sequence
  Description of Artificial Sequence: Synthetic oligonucleotide
cucaagggcuucagcaccgcgccca

SEQ ID NO: 135800 - RNA, 25 nt, Artificial Sequence
  Description of Artificial Sequence: Synthetic oligonucleotide
auggcagagccagaccgacucagau

SEQ ID NO: 135801 - RNA, 25 nt, Artificial Sequence
  Description of Artificial Sequence: Synthetic oligonucleotide
uucagacucugagggaggagccgcu

SEQ ID NO: 135802 - RNA, 25 nt, Artificial Sequence
  Description of Artificial Sequence: Synthetic oligonucleotide
ugguggagaagcagacauggacuuc

SEQ ID NO: 135803 - RNA, 25 nt, Artificial Sequence
  Description of Artificial Sequence: Synthetic oligonucleotide
ccugcggaacuuauucucccagacg

SEQ ID NO: 135804 - RNA, 25 nt, Artificial Sequence
  Description of Artificial Sequence: Synthetic oligonucleotide
gcucagccugggcagccagaaggag

SEQ ID NO: 135805 - RNA, 25 nt, Artificial Sequence
  Description of Artificial Sequence: Synthetic oligonucleotide
gcgucugcuggacgagcugaccuug

SEQ ID NO: 135806 - RNA, 25 nt, Artificial Sequence
  Description of Artificial Sequence: Synthetic oligonucleotide
ggaagggguggcccgguacaugcag

SEQ ID NO: 135807 - RNA, 25 nt, Artificial Sequence
  Description of Artificial Sequence: Synthetic oligonucleotide
gagcgaacgcugucgcagagucauc

SEQ ID NO: 135808 - RNA, 25 nt, Artificial Sequence
  Description of Artificial Sequence: Synthetic oligonucleotide
cuguuuggugggagcuggaaucucc

SEQ ID NO: 135809 - RNA, 25 nt, Artificial Sequence
  Description of Artificial Sequence: Synthetic oligonucleotide
cacauccgcaggcauccccgacuuu

SEQ ID NO: 135810 - RNA, 25 nt, Artificial Sequence
  Description of Artificial Sequence: Synthetic oligonucleotide
ucgcucuccauccaccggccucuau

SEQ ID NO: 135811 - RNA, 25 nt, Artificial Sequence
  Description of Artificial Sequence: Synthetic oligonucleotide
ugacaaccuagagaaguaccaucuu

SEQ ID NO: 135812 - RNA, 25 nt, Artificial Sequence
  Description of Artificial Sequence: Synthetic oligonucleotide
ucccuacccagaggccaucuuugag

SEQ ID NO: 135813 - RNA, 25 nt, Artificial Sequence
  Description of Artificial Sequence: Synthetic oligonucleotide
gaucagcuauuucaagaaacauccg

SEQ ID NO: 135814 - RNA, 25 nt, Artificial Sequence
  Description of Artificial Sequence: Synthetic oligonucleotide
ggaacccuucuucgcccucgccaag

SEQ ID NO: 135815 - RNA, 25 nt, Artificial Sequence
  Description of Artificial Sequence: Synthetic oligonucleotide
ggaacucuauccugggcaguucaag

SEQ ID NO: 135816 - RNA, 25 nt, Artificial Sequence
  Description of Artificial Sequence: Synthetic oligonucleotide
gccaaccaucugucacuacuucaug

SEQ ID NO: 135817 - RNA, 25 nt, Artificial Sequence
  Description of Artificial Sequence: Synthetic oligonucleotide
gcgccugcugaaggacaaggggcua

SEQ ID NO: 135818 - RNA, 25 nt, Artificial Sequence
  Description of Artificial Sequence: Synthetic oligonucleotide
acuccugcgcugcuacacgcagaac

SEQ ID NO: 135819 - RNA, 25 nt, Artificial Sequence
  Description of Artificial Sequence: Synthetic oligonucleotide
cauagauacccuggagcgaauagcc

SEQ ID NO: 135820 - RNA, 25 nt, Artificial Sequence
  Description of Artificial Sequence: Synthetic oligonucleotide
cgggcuggaacaggaggacuuggug

SEQ ID NO: 135821 - RNA, 25 nt, Artificial Sequence
  Description of Artificial Sequence: Synthetic oligonucleotide
ggaggcgcacggcaccuucuacaca

SEQ ID NO: 135822 - RNA, 25 nt, Artificial Sequence
  Description of Artificial Sequence: Synthetic oligonucleotide
aucacacugcgucagcgccagcugc

SEQ ID NO: 135823 - RNA, 25 nt, Artificial Sequence
  Description of Artificial Sequence: Synthetic oligonucleotide
ccggcacgaauacccgcuaagcugg

SEQ ID NO: 135824 - RNA, 25 nt, Artificial Sequence
  Description of Artificial Sequence: Synthetic oligonucleotide
gaugaaagagaagaucuucucugag

SEQ ID NO: 135825 - RNA, 25 nt, Artificial Sequence
  Description of Artificial Sequence: Synthetic oligonucleotide
ggugacgcccaagugugaagacugu

SEQ ID NO: 135826 - RNA, 25 nt, Artificial Sequence
  Description of Artificial Sequence: Synthetic oligonucleotide
ucagagccuggugaagccugauauc

SEQ ID NO: 135827 - RNA, 25 nt, Artificial Sequence
  Description of Artificial Sequence: Synthetic oligonucleotide
cgucuuuuuuggugagagccuccca

SEQ ID NO: 135828 - RNA, 25 nt, Artificial Sequence
  Description of Artificial Sequence: Synthetic oligonucleotide
agcgcguuucuucuccuguaugcag

SEQ ID NO: 135829 - RNA, 25 nt, Artificial Sequence
  Description of Artificial Sequence: Synthetic oligonucleotide
gucagacuuccugaagguggaccuc

SEQ ID NO: 135830 - RNA, 25 nt, Artificial Sequence
  Description of Artificial Sequence: Synthetic oligonucleotide
ccuccuggucauggguaccuccuug

SEQ ID NO: 135831 - RNA, 25 nt, Artificial Sequence
  Description of Artificial Sequence: Synthetic oligonucleotide
gcaggugcagcccuuugccucccuc

SEQ ID NO: 135832 - RNA, 25 nt, Artificial Sequence
  Description of Artificial Sequence: Synthetic oligonucleotide
caucagcaaggcaccccucuccacc

SEQ ID NO: 135833 - RNA, 25 nt, Artificial Sequence
  Description of Artificial Sequence: Synthetic oligonucleotide
cccucgccugcucaucaacaaggag

SEQ ID NO: 135834 - RNA, 25 nt, Artificial Sequence
  Description of Artificial Sequence: Synthetic oligonucleotide
gaaagcuggccagucggacccuuuc

SEQ ID NO: 135835 - RNA, 25 nt, Artificial Sequence
  Description of Artificial Sequence: Synthetic oligonucleotide
ccuggggaugauuaugggccucgga

SEQ ID NO: 135836 - RNA, 25 nt, Artificial Sequence
  Description of Artificial Sequence: Synthetic oligonucleotide
aggaggcauggacuuugacuccaag

SEQ ID NO: 135837 - RNA, 25 nt, Artificial Sequence
  Description of Artificial Sequence: Synthetic oligonucleotide
gaaggccuacagggacguggccugg

SEQ ID NO: 135838 - RNA, 25 nt, Artificial Sequence
  Description of Artificial Sequence: Synthetic oligonucleotide
gcugggugaaugcgaccagggcugc

SEQ ID NO: 135839 - RNA, 25 nt, Artificial Sequence
  Description of Artificial Sequence: Synthetic oligonucleotide
ccuggcccuugcugagcuccuugga

SEQ ID NO: 135840 - RNA, 25 nt, Artificial Sequence
  Description of Artificial Sequence: Synthetic oligonucleotide
auggaagaaggagcuggaggaccuu

SEQ ID NO: 135841 - RNA, 25 nt, Artificial Sequence
  Description of Artificial Sequence: Synthetic oligonucleotide
uguccggagggagcacgccagcaua

SEQ ID NO: 135842 - RNA, 25 nt, Artificial Sequence
  Description of Artificial Sequence: Synthetic oligonucleotide
agaugcccagucgggggcggggguc

SEQ ID NO: 135843 - RNA, 25 nt, Artificial Sequence
  Description of Artificial Sequence: Synthetic oligonucleotide
ccccaaccccagcacuucagcuucc

SEQ ID NO: 135844 - RNA, 25 nt, Artificial Sequence
  Description of Artificial Sequence: Synthetic oligonucleotide
ccccaagaaguccccgccaccugcc

SEQ ID NO: 135845 - RNA, 25 nt, Artificial Sequence
  Description of Artificial Sequence: Synthetic oligonucleotide
caaggacgaggccaggacaacagag

SEQ ID NO: 135846 - RNA, 25 nt, Artificial Sequence
  Description of Artificial Sequence: Synthetic oligonucleotide
gagggagaaaccccagugacagcug

SEQ ID NO: 135847 - RNA, 25 nt, Artificial Sequence
  Description of Artificial Sequence: Synthetic oligonucleotide
gcaucucccaggcgggaugccgagc

SEQ ID NO: 135848 - RNA, 25 nt, Artificial Sequence
  Description of Artificial Sequence: Synthetic oligonucleotide
cuccucagggacagcugagccccaa

SEQ ID NO: 135849 - RNA, 25 nt, Artificial Sequence
  Description of Artificial Sequence: Synthetic oligonucleotide
accgggccuggcccccucuuaacca

SEQ ID NO: 135850 - RNA, 25 nt, Artificial Sequence
  Description of Artificial Sequence: Synthetic oligonucleotide
agcaguucuugucuggggagcucag

SEQ ID NO: 135851 - RNA, 25 nt, Artificial Sequence
  Description of Artificial Sequence: Synthetic oligonucleotide
gaacaucccccaaucucuuacagcu

SEQ ID NO: 135852 - RNA, 25 nt, Artificial Sequence
  Description of Artificial Sequence: Synthetic oligonucleotide
ucccuccccaaaacuggggucccag

SEQ ID NO: 135853 - RNA, 25 nt, Artificial Sequence
  Description of Artificial Sequence: Synthetic oligonucleotide
gcaacccuggcccccaaccccagca

SEQ ID NO: 135854 - RNA, 25 nt, Artificial Sequence
  Description of Artificial Sequence: Synthetic oligonucleotide
aaaucucuaacaccuccuagaggcc

SEQ ID NO: 135855 - RNA, 25 nt, Artificial Sequence
  Description of Artificial Sequence: Synthetic oligonucleotide
caaggcuuaaacaggcaucucuacc

SEQ ID NO: 135856 - RNA, 25 nt, Artificial Sequence
  Description of Artificial Sequence: Synthetic oligonucleotide
cagccccacugucucuaaccacucc

SEQ ID NO: 135857 - RNA, 25 nt, Artificial Sequence
  Description of Artificial Sequence: Synthetic oligonucleotide
cugggcuaaggaguaaccucccuca

SEQ ID NO: 135858 - RNA, 25 nt, Artificial Sequence
  Description of Artificial Sequence: Synthetic oligonucleotide
aucucuaacugcccccacggggcca

SEQ ID NO: 135859 - RNA, 25 nt, Artificial Sequence
  Description of Artificial Sequence: Synthetic oligonucleotide
agggcuaccccagaacuuuuaacuc

SEQ ID NO: 135860 - RNA, 25 nt, Artificial Sequence
  Description of Artificial Sequence: Synthetic oligonucleotide
cuuccaggacagggagcuucgggcc

SEQ ID NO: 135861 - RNA, 25 nt, Artificial Sequence
  Description of Artificial Sequence: Synthetic oligonucleotide
ccccacucugucuccugcccccggg

SEQ ID NO: 135862 - RNA, 25 nt, Artificial Sequence
  Description of Artificial Sequence: Synthetic oligonucleotide
gggccuguggcuaaguaaaccauac

SEQ ID NO: 135863 - RNA, 25 nt, Artificial Sequence
  Description of Artificial Sequence: Synthetic oligonucleotide
ccuaaccuaccccagugugggugug

SEQ ID NO: 135864 - RNA, 25 nt, Artificial Sequence
  Description of Artificial Sequence: Synthetic oligonucleotide
gggccucugaauauaacccacaccc

SEQ ID NO: 135865 - RNA, 25 nt, Artificial Sequence
  Description of Artificial Sequence: Synthetic oligonucleotide
cagcguagggggagucugagccggg

SEQ ID NO: 135866 - RNA, 25 nt, Artificial Sequence
  Description of Artificial Sequence: Synthetic oligonucleotide
gagggcucccgagucucugccuuca

SEQ ID NO: 135867 - RNA, 25 nt, Artificial Sequence
  Description of Artificial Sequence: Synthetic oligonucleotide
agcucccaaaguggguggugggccc

SEQ ID NO: 135868 - RNA, 25 nt, Artificial Sequence
  Description of Artificial Sequence: Synthetic oligonucleotide
cccuucacgugggacccacuuccca

SEQ ID NO: 135869 - RNA, 25 nt, Artificial Sequence
  Description of Artificial Sequence: Synthetic oligonucleotide
augcuggaugggcagaagacauugc

SEQ ID NO: 135870 - RNA, 25 nt, Artificial Sequence
  Description of Artificial Sequence: Synthetic oligonucleotide
cuuauuggagacaaauuaaaaacaa

SEQ ID NO: 135871 - DNA, 21 bp, Artificial Sequence
  Description of Artificial Sequence: Synthetic oligonucleotide
  Description of Combined DNA/RNA Molecule: Synthetic oligonucleotide
cuacacaaaucagcgauuutt

SEQ ID NO: 135872 - DNA, 21 bp, Artificial Sequence
  Description of Artificial Sequence: Synthetic oligonucleotide
  Description of Combined DNA/RNA Molecule: Synthetic oligonucleotide
aaaucgcugauuuguguagtt

SEQ ID NO: 135873 - DNA, 25 bp, Artificial Sequence
  Description of Artificial Sequence: Synthetic oligonucleotide
  Description of Combined DNA/RNA Molecule: Synthetic oligonucleotide
cuacacaaaucagcgauuuccaugt

SEQ ID NO: 135874 - RNA, 27 nt, Artificial Sequence
  Description of Artificial Sequence: Synthetic oligonucleotide
acauggaaaucgcugauuuguguaguc

SEQ ID NO: 135875 - RNA, 13 nt, Artificial Sequence
  Description of Artificial Sequence: Synthetic oligonucleotide
cuacacaaaucag

SEQ ID NO: 135876 - DNA, 11 bp, Artificial Sequence
  Description of Artificial Sequence: Synthetic oligonucleotide
  Description of Combined DNA/RNA Molecule: Synthetic oligonucleotide
gauuuccaugt

SEQ ID NO: 135877 - DNA, 21 bp, Artificial Sequence
  Description of Artificial Sequence: Synthetic oligonucleotide
  Description of Combined DNA/RNA Molecule: Synthetic oligonucleotide
ggaucuuauuucuucggagtt

SEQ ID NO: 135878 - DNA, 21 bp, Artificial Sequence
  Description of Artificial Sequence: Synthetic oligonucleotide
  Description of Combined DNA/RNA Molecule: Synthetic oligonucleotide
cuccgaagaaauaagaucctt

SEQ ID NO: 135879 - RNA, 11 nt, Artificial Sequence
  Description of Artificial Sequence: Synthetic oligonucleotide
ggaucuuauuu

SEQ ID NO: 135880 - DNA, 10 bp, Artificial Sequence
  Description of Artificial Sequence: Synthetic oligonucleotide
  Description of Combined DNA/RNA Molecule: Synthetic oligonucleotide
cuucggagtt

SEQ ID NO: 135881 - RNA, 27 nt, Artificial Sequence
  Description of Artificial Sequence: Synthetic oligonucleotide
cauugucuccgaagaaauaagauccuu

SEQ ID NO: 135882 - RNA, 8 nt, Artificial Sequence
  Description of Artificial Sequence: Synthetic oligonucleotide
  modified_base (2): LNA-G
ggaucuua

SEQ ID NO: 135883 - DNA, 17 bp, Artificial Sequence
  Description of Artificial Sequence: Synthetic oligonucleotide
  Description of Combined DNA/RNA Molecule: Synthetic oligonucleotide
uuucuucggagacaatg

SEQ ID NO: 135884 - DNA, 16 bp, Artificial Sequence
  Description of Artificial Sequence: Synthetic oligonucleotide
  Description of Combined DNA/RNA Molecule: Synthetic oligonucleotide
uucuucggagacaatg

SEQ ID NO: 135885 - DNA, 15 bp, Artificial Sequence
  Description of Artificial Sequence: Synthetic oligonucleotide
  Description of Combined DNA/RNA Molecule: Synthetic oligonucleotide
ucuucggagacaatg

SEQ ID NO: 135886 - DNA, 14 bp, Artificial Sequence
  Description of Artificial Sequence: Synthetic oligonucleotide
  Description of Combined DNA/RNA Molecule: Synthetic oligonucleotide
cuucggagacaatg

SEQ ID NO: 135887 - DNA, 13 bp, Artificial Sequence
  Description of Artificial Sequence: Synthetic oligonucleotide
  Description of Combined DNA/RNA Molecule: Synthetic oligonucleotide
uucggagacaatg

SEQ ID NO: 135888 - DNA, 12 bp, Artificial Sequence
  Description of Artificial Sequence: Synthetic oligonucleotide
  Description of Combined DNA/RNA Molecule: Synthetic oligonucleotide
ucggagacaatg

SEQ ID NO: 135889 - DNA, 11 bp, Artificial Sequence
  Description of Artificial Sequence: Synthetic oligonucleotide
  Description of Combined DNA/RNA Molecule: Synthetic oligonucleotide
cggagacaatg

SEQ ID NO: 135890 - RNA, 9 nt, Artificial Sequence
  Description of Artificial Sequence: Synthetic oligonucleotide
  modified_base (2): LNA-G
ggaucuuau

SEQ ID NO: 135891 - RNA, 10 nt, Artificial Sequence
  Description of Artificial Sequence: Synthetic oligonucleotide
  modified_base (2): LNA-G
ggaucuuauu

SEQ ID NO: 135892 - RNA, 11 nt, Artificial Sequence
  Description of Artificial Sequence: Synthetic oligonucleotide
  modified_base (2): LNA-G
ggaucuuauuu

SEQ ID NO: 135893 - RNA, 12 nt, Artificial Sequence
  Description of Artificial Sequence: Synthetic oligonucleotide
  modified_base (2): LNA-G
ggaucuuauuuc

SEQ ID NO: 135894 - RNA, 8 nt, Artificial Sequence
  Description of Artificial Sequence: Synthetic oligonucleotide
  modified_base (3): LNA-A
cuacacaa

SEQ ID NO: 135895 - DNA, 13 bp, Artificial Sequence
  Description of Artificial Sequence: Synthetic oligonucleotide
  Description of Combined DNA/RNA Molecule: Synthetic oligonucleotide
  modified_base (8): LNA-A
aucagcgauuutt

SEQ ID NO: 135896 - DNA, 12 bp, Artificial Sequence
  Description of Artificial Sequence: Synthetic oligonucleotide
  Description of Combined DNA/RNA Molecule: Synthetic oligonucleotide
  modified_base (7): LNA-A
ucagcgauuutt

SEQ ID NO: 135897 - DNA, 11 bp, Artificial Sequence
  Description of Artificial Sequence: Synthetic oligonucleotide
  Description of Combined DNA/RNA Molecule: Synthetic oligonucleotide
  modified_base (6): LNA-A
cagcgauuutt

SEQ ID NO: 135898 - DNA, 10 bp, Artificial Sequence
  Description of Artificial Sequence: Synthetic oligonucleotide
  Description of Combined DNA/RNA Molecule: Synthetic oligonucleotide
  modified_base (5): LNA-A
agcgauuutt

SEQ ID NO: 135899 - DNA, 9 bp, Artificial Sequence
  Description of Artificial Sequence: Synthetic oligonucleotide
  Description of Combined DNA/RNA Molecule: Synthetic oligonucleotide
  modified_base (4): LNA-A
gcgauuutt

SEQ ID NO: 135900 - DNA, 8 bp, Artificial Sequence
  Description of Artificial Sequence: Synthetic oligonucleotide
  Description of Combined DNA/RNA Molecule: Synthetic oligonucleotide
  modified_base (3): LNA-A
cgauuutt

SEQ ID NO: 135901 - DNA, 7 bp, Artificial Sequence
  Description of Artificial Sequence: Synthetic oligonucleotide
  Description of Combined DNA/RNA Molecule: Synthetic oligonucleotide
  modified_base (2): LNA-A
gauuutt

SEQ ID NO: 135902 - RNA, 9 nt, Artificial Sequence
  Description of Artificial Sequence: Synthetic oligonucleotide
  modified_base (3): LNA-A
cuacacaaa

SEQ ID NO: 135903 - RNA, 10 nt, Artificial Sequence
  Description of Artificial Sequence: Synthetic oligonucleotide
  modified_base (3): LNA-A
cuacacaaau

SEQ ID NO: 135904 - RNA, 11 nt, Artificial Sequence
  Description of Artificial Sequence: Synthetic oligonucleotide
  modified_base (3): LNA-A
cuacacaaauc

SEQ ID NO: 135905 - RNA, 12 nt, Artificial Sequence
  Description of Artificial Sequence: Synthetic oligonucleotide
  modified_base (3): LNA-A
cuacacaaauca

SEQ ID NO: 135906 - RNA, 13 nt, Artificial Sequence
  Description of Artificial Sequence: Synthetic oligonucleotide
  modified_base (3): LNA-A
cuacacaaaucag

SEQ ID NO: 135907 - RNA, 14 nt, Artificial Sequence
  Description of Artificial Sequence: Synthetic oligonucleotide
  modified_base (3): LNA-A
cuacacaaaucagc

SEQ ID NO: 135908 - RNA, 13 nt, Artificial Sequence
  Description of Artificial Sequence: Synthetic oligonucleotide
  modified_base (2): LNA-G
ggaucuuauuucu

SEQ ID NO: 135909 - RNA, 14 nt, Artificial Sequence
  Description of Artificial Sequence: Synthetic oligonucleotide
  modified_base (2): LNA-G
ggaucuuauuucuu

SEQ ID NO: 135910 - RNA, 8 nt, Artificial Sequence
  Description of Artificial Sequence: Synthetic oligonucleotide
  modified_base (2): LNA-G
  modified_base (8): LNA-A
ggaucuua

SEQ ID NO: 135911 - RNA, 9 nt, Artificial Sequence
  Description of Artificial Sequence: Synthetic oligonucleotide
  modified_base (2): LNA-G
  modified_base (9): LNA-U
ggaucuuau

SEQ ID NO: 135912 - RNA, 10 nt, Artificial Sequence
  Description of Artificial Sequence: Synthetic oligonucleotide
  modified_base (2): LNA-G
  modified_base (10): LNA-U
ggaucuuauu

SEQ ID NO: 135913 - RNA, 11 nt, Artificial Sequence
  Description of Artificial Sequence: Synthetic oligonucleotide
  modified_base (2): LNA-G
  modified_base (11): LNA-U
ggaucuuauuu

SEQ ID NO: 135914 - RNA, 12 nt, Artificial Sequence
  Description of Artificial Sequence: Synthetic oligonucleotide
  modified_base (2): LNA-G
  modified_base (12): LNA-C
ggaucuuauuuc

SEQ ID NO: 135915 - RNA, 13 nt, Artificial Sequence
  Description of Artificial Sequence: Synthetic oligonucleotide
  modified_base (2): LNA-G
  modified_base (13): LNA-U
ggaucuuauuucu

SEQ ID NO: 135916 - RNA, 14 nt, Artificial Sequence
  Description of Artificial Sequence: Synthetic oligonucleotide
  modified_base (2): LNA-G
  modified_base (14): LNA-U
ggaucuuauuucuu

SEQ ID NO: 135917 - DNA, 13 bp, Artificial Sequence
  Description of Artificial Sequence: Synthetic oligonucleotide
  Description of Combined DNA/RNA Molecule: Synthetic oligonucleotide
  modified_base (8): LNA-G
uuucuucggagtt

SEQ ID NO: 135918 - DNA, 12 bp, Artificial Sequence
  Description of Artificial Sequence: Synthetic oligonucleotide
  Description of Combined DNA/RNA Molecule: Synthetic oligonucleotide
  modified_base (7): LNA-G
uucuucggagtt

SEQ ID NO: 135919 - DNA, 11 bp, Artificial Sequence
  Description of Artificial Sequence: Synthetic oligonucleotide
  Description of Combined DNA/RNA Molecule: Synthetic oligonucleotide
  modified_base (6): LNA-G
ucuucggagtt

SEQ ID NO: 135920 - DNA, 10 bp, Artificial Sequence
  Description of Artificial Sequence: Synthetic oligonucleotide
  Description of Combined DNA/RNA Molecule: Synthetic oligonucleotide
  modified_base (5): LNA-G
cuucggagtt

SEQ ID NO: 135921 - DNA, 9 bp, Artificial Sequence
  Description of Artificial Sequence: Synthetic oligonucleotide
  Description of Combined DNA/RNA Molecule: Synthetic oligonucleotide
  modified_base (4): LNA-G
uucggagtt

SEQ ID NO: 135922 - DNA, 8 bp, Artificial Sequence
  Description of Artificial Sequence: Synthetic oligonucleotide
  Description of Combined DNA/RNA Molecule: Synthetic oligonucleotide
  modified_base (3): LNA-G
ucggagtt

SEQ ID NO: 135923 - DNA, 7 bp, Artificial Sequence
  Description of Artificial Sequence: Synthetic oligonucleotide
  Description of Combined DNA/RNA Molecule: Synthetic oligonucleotide
  modified_base (2): LNA-G
cggagtt

SEQ ID NO: 135924 - DNA, 13 bp, Artificial Sequence
  Description of Artificial Sequence: Synthetic oligonucleotide
  Description of Combined DNA/RNA Molecule: Synthetic oligonucleotide
  modified_base (1): LNA-U
  modified_base (8): LNA-G
uuucuucggagtt

SEQ ID NO: 135925 - DNA, 12 bp, Artificial Sequence
  Description of Artificial Sequence: Synthetic oligonucleotide
  Description of Combined DNA/RNA Molecule: Synthetic oligonucleotide
  modified_base (1): LNA-U
  modified_base (7): LNA-G
uucuucggagtt

SEQ ID NO: 135926 - DNA, 11 bp, Artificial Sequence
  Description of Artificial Sequence: Synthetic oligonucleotide
  Description of Combined DNA/RNA Molecule: Synthetic oligonucleotide
  modified_base (1): LNA-U
  modified_base (6): LNA-G
ucuucggagtt

SEQ ID NO: 135927 - DNA, 10 bp, Artificial Sequence
  Description of Artificial Sequence: Synthetic oligonucleotide
  Description of Combined DNA/RNA Molecule: Synthetic oligonucleotide
  modified_base (1): LNA-C
  modified_base (5): LNA-G
cuucggagtt

SEQ ID NO: 135928 - DNA, 9 bp, Artificial Sequence
  Description of Artificial Sequence: Synthetic oligonucleotide
  Description of Combined DNA/RNA Molecule: Synthetic oligonucleotide
  modified_base (1): LNA-U
  modified_base (4): LNA-G
uucggagtt

SEQ ID NO: 135929 - DNA, 8 bp, Artificial Sequence
  Description of Artificial Sequence: Synthetic oligonucleotide
  Description of Combined DNA/RNA Molecule: Synthetic oligonucleotide
  modified_base (1): LNA-U
  modified_base (3): LNA-G
ucggagtt

SEQ ID NO: 135930 - DNA, 7 bp, Artificial Sequence
  Description of Artificial Sequence: Synthetic oligonucleotide
  Description of Combined DNA/RNA Molecule: Synthetic oligonucleotide
  modified_base (1): LNA-C
  modified_base (2): LNA-G
cggagtt

SEQ ID NO: 135931 - DNA, 21 bp, Artificial Sequence
  Description of Artificial Sequence: Synthetic oligonucleotide
  Description of Combined DNA/RNA Molecule: Synthetic oligonucleotide
  modified_base (2): LNA-G
  modified_base (16): LNA-G
ggaucuuauuucuucggagtt

SEQ ID NO: 135932 - DNA, 25 bp, Artificial Sequence
  Description of Artificial Sequence: Synthetic oligonucleotide
  Description of Combined DNA/RNA Molecule: Synthetic oligonucleotide
ggaucuuauuucuucggagacaatg

SEQ ID NO: 135933 - RNA, 25 nt, Artificial Sequence
  Description of Artificial Sequence: Synthetic oligonucleotide
guauuuugaugaggaguucacggcc

SEQ ID NO: 135934 - RNA, 25 nt, Artificial Sequence
  Description of Artificial Sequence: Synthetic oligonucleotide
ggcccagaugaucaccaucacacca

SEQ ID NO: 135935 - RNA, 25 nt, Artificial Sequence
  Description of Artificial Sequence: Synthetic oligonucleotide
gggaagaaaacuauccugcggguuu

SEQ ID NO: 135936 - RNA, 25 nt, Artificial Sequence
  Description of Artificial Sequence: Synthetic oligonucleotide
guuuuaauuuauuucauccaguuug

SEQ ID NO: 135937 - RNA, 25 nt, Artificial Sequence
  Description of Artificial Sequence: Synthetic oligonucleotide
acguagggaaauguuaaggacuucu

SEQ ID NO: 135938 - RNA, 25 nt, Artificial Sequence
  Description of Artificial Sequence: Synthetic oligonucleotide
ccaggguuuacccagugggacagag

SEQ ID NO: 135939 - RNA, 25 nt, Artificial Sequence
  Description of Artificial Sequence: Synthetic oligonucleotide
agcaagguuuaaauuuguuauugug

SEQ ID NO: 135940 - RNA, 25 nt, Artificial Sequence
  Description of Artificial Sequence: Synthetic oligonucleotide
uguauuauguuguucaaaugcauuu

SEQ ID NO: 135941 - RNA, 25 nt, Artificial Sequence
  Description of Artificial Sequence: Synthetic oligonucleotide
uuuuaaucuuugugacaggaaagcc

SEQ ID NO: 135942 - RNA, 25 nt, Artificial Sequence
  Description of Artificial Sequence: Synthetic oligonucleotide
uuaaucuuugugacaggaaagcccu

SEQ ID NO: 135943 - RNA, 25 nt, Artificial Sequence
  Description of Artificial Sequence: Synthetic oligonucleotide
gcugcuuaugucucccagcauggcc

SEQ ID NO: 135944 - RNA, 25 nt, Artificial Sequence
  Description of Artificial Sequence: Synthetic oligonucleotide
aaguguuucagaagcuucucccuga

SEQ ID NO: 135945 - RNA, 25 nt, Artificial Sequence
  Description of Artificial Sequence: Synthetic oligonucleotide
gaccaucaauaaggaagaagcccuu

SEQ ID NO: 135946 - RNA, 25 nt, Artificial Sequence
  Description of Artificial Sequence: Synthetic oligonucleotide
ccaucaauaaggaagaagcccuuca

SEQ ID NO: 135947 - RNA, 25 nt, Artificial Sequence
  Description of Artificial Sequence: Synthetic oligonucleotide
ucaauaaggaagaagcccuucagcg

SEQ ID NO: 135948 - RNA, 25 nt, Artificial Sequence
  Description of Artificial Sequence: Synthetic oligonucleotide
aauaaggaagaagcccuucagcggc

SEQ ID NO: 135949 - RNA, 25 nt, Artificial Sequence
  Description of Artificial Sequence: Synthetic oligonucleotide
aggaagaagcccuucagcggccagu

SEQ ID NO: 135950 - RNA, 25 nt, Artificial Sequence
  Description of Artificial Sequence: Synthetic oligonucleotide
gcauaacuaaaggugaaaagcuccg

SEQ ID NO: 135951 - RNA, 25 nt, Artificial Sequence
  Description of Artificial Sequence: Synthetic oligonucleotide
cauaacuaaaggugaaaagcuccgg

SEQ ID NO: 135952 - RNA, 25 nt, Artificial Sequence
  Description of Artificial Sequence: Synthetic oligonucleotide
cuacaucacgccagucaacagucug

SEQ ID NO: 135953 - RNA, 25 nt, Artificial Sequence
  Description of Artificial Sequence: Synthetic oligonucleotide
acuggauuuaagcagaguucaaaag

SEQ ID NO: 135954 - RNA, 25 nt, Artificial Sequence
  Description of Artificial Sequence: Synthetic oligonucleotide
cuggauuuaagcagaguucaaaagc

SEQ ID NO: 135955 - RNA, 25 nt, Artificial Sequence
  Description of Artificial Sequence: Synthetic oligonucleotide
gauuuaagcagaguucaaaagcccu

SEQ ID NO: 135956 - RNA, 25 nt, Artificial Sequence
  Description of Artificial Sequence: Synthetic oligonucleotide
auuuaagcagaguucaaaagcccuu

SEQ ID NO: 135957 - RNA, 25 nt, Artificial Sequence
  Description of Artificial Sequence: Synthetic oligonucleotide
uuaagcagaguucaaaagcccuuca

SEQ ID NO: 135958 - RNA, 25 nt, Artificial Sequence
  Description of Artificial Sequence: Synthetic oligonucleotide
uaagcagaguucaaaagcccuucag

SEQ ID NO: 135959 - RNA, 25 nt, Artificial Sequence
  Description of Artificial Sequence: Synthetic oligonucleotide
agcagaguucaaaagcccuucagcg

SEQ ID NO: 135960 - RNA, 25 nt, Artificial Sequence
  Description of Artificial Sequence: Synthetic oligonucleotide
cucagggucugagugaagccgcucg

SEQ ID NO: 135961 - RNA, 25 nt, Artificial Sequence
  Description of Artificial Sequence: Synthetic oligonucleotide
caagcaacuacaucacgccagucaa

SEQ ID NO: 135962 - RNA, 25 nt, Artificial Sequence
  Description of Artificial Sequence: Synthetic oligonucleotide
aucaauggcagcuucuuggugcgug

SEQ ID NO: 135963 - RNA, 25 nt, Artificial Sequence
  Description of Artificial Sequence: Synthetic oligonucleotide
uuccagcccacauuggauucaucag

SEQ ID NO: 135964 - RNA, 25 nt, Artificial Sequence
  Description of Artificial Sequence: Synthetic oligonucleotide
cagcugagaauguggaauaccuaag

SEQ ID NO: 135965 - RNA, 25 nt, Artificial Sequence
  Description of Artificial Sequence: Synthetic oligonucleotide
aacguaucuccuaauuugaggcuca

SEQ ID NO: 135966 - RNA, 25 nt, Artificial Sequence
  Description of Artificial Sequence: Synthetic oligonucleotide
ccuaaaauaauuucucuacaauugg

SEQ ID NO: 135967 - RNA, 25 nt, Artificial Sequence
  Description of Artificial Sequence: Synthetic oligonucleotide
uggaagauucagcuaguuaggagcc

SEQ ID NO: 135968 - RNA, 25 nt, Artificial Sequence
  Description of Artificial Sequence: Synthetic oligonucleotide
uuaaacucuccuagucaauauccac

SEQ ID NO: 135969 - RNA, 25 nt, Artificial Sequence
  Description of Artificial Sequence: Synthetic oligonucleotide
cagccuacaguuauguucagucaca

SEQ ID NO: 135970 - RNA, 25 nt, Artificial Sequence
  Description of Artificial Sequence: Synthetic oligonucleotide
guuauguucagucacacacacauac

SEQ ID NO: 135971 - RNA, 25 nt, Artificial Sequence
  Description of Artificial Sequence: Synthetic oligonucleotide
cacauacaaaauguuccuuuugcuu

SEQ ID NO: 135972 - RNA, 25 nt, Artificial Sequence
  Description of Artificial Sequence: Synthetic oligonucleotide
uccuuuugcuuuuaaaguaauuuuu

SEQ ID NO: 135973 - RNA, 25 nt, Artificial Sequence
  Description of Artificial Sequence: Synthetic oligonucleotide
ugaccugugaagcaacagucaaugg

SEQ ID NO: 135974 - RNA, 25 nt, Artificial Sequence
  Description of Artificial Sequence: Synthetic oligonucleotide
cuaucucacacaucgacaaaccaau

SEQ ID NO: 135975 - RNA, 25 nt, Artificial Sequence
  Description of Artificial Sequence: Synthetic oligonucleotide
uguccucaauuguacugcuaccacu

SEQ ID NO: 135976 - RNA, 25 nt, Artificial Sequence
  Description of Artificial Sequence: Synthetic oligonucleotide
aaaccguagcuggcaagcggucuua

SEQ ID NO: 135977 - RNA, 25 nt, Artificial Sequence
  Description of Artificial Sequence: Synthetic oligonucleotide
uagcuggcaagcggucuuaccggcu

SEQ ID NO: 135978 - RNA, 25 nt, Artificial Sequence
  Description of Artificial Sequence: Synthetic oligonucleotide
uuguaugguuaaaagauggguuacc

SEQ ID NO: 135979 - RNA, 25 nt, Artificial Sequence
  Description of Artificial Sequence: Synthetic oligonucleotide
ugguuaaaagauggguuaccugcga

SEQ ID NO: 135980 - RNA, 25 nt, Artificial Sequence
  Description of Artificial Sequence: Synthetic oligonucleotide
cagggaauuauacaaucuugcugag

SEQ ID NO: 135981 - RNA, 25 nt, Artificial Sequence
  Description of Artificial Sequence: Synthetic oligonucleotide
acaaucuugcugagcauaaaacagu

SEQ ID NO: 135982 - RNA, 25 nt, Artificial Sequence
  Description of Artificial Sequence: Synthetic oligonucleotide
ccaauaaugaagaguccuuuauccu

SEQ ID NO: 135983 - RNA, 25 nt, Artificial Sequence
  Description of Artificial Sequence: Synthetic oligonucleotide
acuuuggauguuccaacgcaaguug

SEQ ID NO: 135984 - RNA, 25 nt, Artificial Sequence
  Description of Artificial Sequence: Synthetic oligonucleotide
aaugcuuccacuaaacugaaaccau

SEQ ID NO: 135985 - RNA, 25 nt, Artificial Sequence
  Description of Artificial Sequence: Synthetic oligonucleotide
gagaaaguuugacuuuguuaaauau

SEQ ID NO: 135986 - RNA, 25 nt, Artificial Sequence
  Description of Artificial Sequence: Synthetic oligonucleotide
aaagaacuacuguauauuaaaaguu

SEQ ID NO: 135987 - RNA, 25 nt, Artificial Sequence
  Description of Artificial Sequence: Synthetic oligonucleotide
uuagaaauacggguuuugacuuaac

SEQ ID NO: 135988 - RNA, 25 nt, Artificial Sequence
  Description of Artificial Sequence: Synthetic oligonucleotide
aacauggguacagcaaacucagcac

SEQ ID NO: 135989 - RNA, 25 nt, Artificial Sequence
  Description of Artificial Sequence: Synthetic oligonucleotide
aaagacacagaagaugcugaccuca

SEQ ID NO: 135990 - RNA, 25 nt, Artificial Sequence
  Description of Artificial Sequence: Synthetic oligonucleotide
uaguagggagguuuauucagaucgc

SEQ ID NO: 135991 - RNA, 25 nt, Artificial Sequence
  Description of Artificial Sequence: Synthetic oligonucleotide
gccuucugcagcaggguucugggau

SEQ ID NO: 135992 - RNA, 25 nt, Artificial Sequence
  Description of Artificial Sequence: Synthetic oligonucleotide
ggucugguacauauuggaaauuaug

SEQ ID NO: 135993 - RNA, 25 nt, Artificial Sequence
  Description of Artificial Sequence: Synthetic oligonucleotide
cuaguccuuccgauggaagcacuag

SEQ ID NO: 135994 - RNA, 25 nt, Artificial Sequence
  Description of Artificial Sequence: Synthetic oligonucleotide
ccagugaauauuguuuuuaugugga

SEQ ID NO: 135995 - RNA, 25 nt, Artificial Sequence
  Description of Artificial Sequence: Synthetic oligonucleotide
augaauucaaguuggaauugguaga

SEQ ID NO: 135996 - RNA, 25 nt, Artificial Sequence
  Description of Artificial Sequence: Synthetic oligonucleotide
caggacacagauuuagacuuggaga

SEQ ID NO: 135997 - RNA, 25 nt, Artificial Sequence
  Description of Artificial Sequence: Synthetic oligonucleotide
cucaaagcacaguuacaguauucca

SEQ ID NO: 135998 - RNA, 25 nt, Artificial Sequence
  Description of Artificial Sequence: Synthetic oligonucleotide
accacugccaccacugaugaauuaa

SEQ ID NO: 135999 - RNA, 25 nt, Artificial Sequence
  Description of Artificial Sequence: Synthetic oligonucleotide
gaaacuacuagugccacaucaucac

SEQ ID NO: 136000 - RNA, 25 nt, Artificial Sequence
  Description of Artificial Sequence: Synthetic oligonucleotide
aagucggacagccucaccaaacaga

SEQ ID NO: 136001 - RNA, 25 nt, Artificial Sequence
  Description of Artificial Sequence: Synthetic oligonucleotide
gaaagcgaaaaauggaacaugaugg

SEQ ID NO: 136002 - RNA, 25 nt, Artificial Sequence
  Description of Artificial Sequence: Synthetic oligonucleotide
cccucugauuuagcauguagacugc

SEQ ID NO: 136003 - RNA, 25 nt, Artificial Sequence
  Description of Artificial Sequence: Synthetic oligonucleotide
ugagcuauuuaaggaucuauuuaug

SEQ ID NO: 136004 - RNA, 25 nt, Artificial Sequence
  Description of Artificial Sequence: Synthetic oligonucleotide
aaaaggugaaaaagcacuauuauca

SEQ ID NO: 136005 - RNA, 25 nt, Artificial Sequence
  Description of Artificial Sequence: Synthetic oligonucleotide
gaaaaagcacuauuaucaguucugc

SEQ ID NO: 136006 - RNA, 25 nt, Artificial Sequence
  Description of Artificial Sequence: Synthetic oligonucleotide
ggcugaaaagaaagauuaaaccuac

SEQ ID NO: 136007 - RNA, 25 nt, Artificial Sequence
  Description of Artificial Sequence: Synthetic oligonucleotide
uaaacccuuauaauaaaauccuucu

SEQ ID NO: 136008 - RNA, 25 nt, Artificial Sequence
  Description of Artificial Sequence: Synthetic oligonucleotide
cauacuauuagccaaugcuguagac

SEQ ID NO: 136009 - RNA, 25 nt, Artificial Sequence
  Description of Artificial Sequence: Synthetic oligonucleotide
gacagaagcauuuugauaggaauag

SEQ ID NO: 136010 - RNA, 25 nt, Artificial Sequence
  Description of Artificial Sequence: Synthetic oligonucleotide
agagcaaauaagauaauggcccuga

SEQ ID NO: 136011 - RNA, 25 nt, Artificial Sequence
  Description of Artificial Sequence: Synthetic oligonucleotide
ccaacauuuuucucuuccucaagca

SEQ ID NO: 136012 - RNA, 25 nt, Artificial Sequence
  Description of Artificial Sequence: Synthetic oligonucleotide
uuaaguaugagaaaaguucagccca

SEQ ID NO: 136013 - RNA, 25 nt, Artificial Sequence
  Description of Artificial Sequence: Synthetic oligonucleotide
caggaauaaagauggcugcugaacc

SEQ ID NO: 136014 - RNA, 25 nt, Artificial Sequence
  Description of Artificial Sequence: Synthetic oligonucleotide
aauuugaaugaccaaguucucuuca

SEQ ID NO: 136015 - RNA, 25 nt, Artificial Sequence
  Description of Artificial Sequence: Synthetic oligonucleotide
auguauaaagauagccagccuagag

SEQ ID NO: 136016 - RNA, 25 nt, Artificial Sequence
  Description of Artificial Sequence: Synthetic oligonucleotide
ggcuguaacuaucucugugaagugu

SEQ ID NO: 136017 - RNA, 25 nt, Artificial Sequence
  Description of Artificial Sequence: Synthetic oligonucleotide
ucugugaagugugagaaaauuucaa

SEQ ID NO: 136018 - RNA, 25 nt, Artificial Sequence
  Description of Artificial Sequence: Synthetic oligonucleotide
ccuuuaaggaaaugaauccuccuga

SEQ ID NO: 136019 - RNA, 25 nt, Artificial Sequence
  Description of Artificial Sequence: Synthetic oligonucleotide
aaggauacaaaaagugacaucauau

SEQ ID NO: 136020 - RNA, 25 nt, Artificial Sequence
  Description of Artificial Sequence: Synthetic oligonucleotide
agaugcaauuugaaucuucaucaua

SEQ ID NO: 136021 - RNA, 25 nt, Artificial Sequence
  Description of Artificial Sequence: Synthetic oligonucleotide
guucaaaacgaagacuagcuauuaa

SEQ ID NO: 136022 - RNA, 25 nt, Artificial Sequence
  Description of Artificial Sequence: Synthetic oligonucleotide
gugaaaccucaucucuacuaaaaau

SEQ ID NO: 136023 - RNA, 25 nt, Artificial Sequence
  Description of Artificial Sequence: Synthetic oligonucleotide
acgaaagagaagcucuaucucgccu

SEQ ID NO: 136024 - RNA, 25 nt, Artificial Sequence
  Description of Artificial Sequence: Synthetic oligonucleotide
cuccacaagcgccuucgguccaguu

SEQ ID NO: 136025 - RNA, 25 nt, Artificial Sequence
  Description of Artificial Sequence: Synthetic oligonucleotide
gagaagauuccaaagauguagccgc

SEQ ID NO: 136026 - RNA, 25 nt, Artificial Sequence
  Description of Artificial Sequence: Synthetic oligonucleotide
aaucuggauucaaugaggagacuug

SEQ ID NO: 136027 - RNA, 25 nt, Artificial Sequence
  Description of Artificial Sequence: Synthetic oligonucleotide
agaacagauuugagaguagugagga

SEQ ID NO: 136028 - RNA, 25 nt, Artificial Sequence
  Description of Artificial Sequence: Synthetic oligonucleotide
ccagagcugugcagaugaguacaaa

SEQ ID NO: 136029 - RNA, 25 nt, Artificial Sequence
  Description of Artificial Sequence: Synthetic oligonucleotide
ccucagauuguuguuguuaaugggc

SEQ ID NO: 136030 - RNA, 25 nt, Artificial Sequence
  Description of Artificial Sequence: Synthetic oligonucleotide
cuauuuuaauuauuuuuaauuuauu

SEQ ID NO: 136031 - RNA, 25 nt, Artificial Sequence
  Description of Artificial Sequence: Synthetic oligonucleotide
uuuaauuuauuaauauuuaaauaug

SEQ ID NO: 136032 - RNA, 25 nt, Artificial Sequence
  Description of Artificial Sequence: Synthetic oligonucleotide
augcaguuugaauauccuuuguuuc

SEQ ID NO: 136033 - RNA, 25 nt, Artificial Sequence
  Description of Artificial Sequence: Synthetic oligonucleotide
caugcugcuggcgucuaaguguuug

SEQ ID NO: 136034 - RNA, 25 nt, Artificial Sequence
  Description of Artificial Sequence: Synthetic oligonucleotide
agaugugcauuucaccugugacaaa

SEQ ID NO: 136035 - RNA, 25 nt, Artificial Sequence
  Description of Artificial Sequence: Synthetic oligonucleotide
ucaaaaccugugccaggcugaauua

SEQ ID NO: 136036 - RNA, 25 nt, Artificial Sequence
  Description of Artificial Sequence: Synthetic oligonucleotide
gaauguggguagucauucuuacaau

SEQ ID NO: 136037 - RNA, 25 nt, Artificial Sequence
  Description of Artificial Sequence: Synthetic oligonucleotide
auguggguagucauucuuacaauug

SEQ ID NO: 136038 - RNA, 25 nt, Artificial Sequence
  Description of Artificial Sequence: Synthetic oligonucleotide
ugaaaaugagcaucagagaguguac

SEQ ID NO: 136039 - RNA, 25 nt, Artificial Sequence
  Description of Artificial Sequence: Synthetic oligonucleotide
uugcuuuucauguagaacucagcag

SEQ ID NO: 136040 - RNA, 25 nt, Artificial Sequence
  Description of Artificial Sequence: Synthetic oligonucleotide
uguauuucuauauuuauuuucagua

SEQ ID NO: 136041 - RNA, 25 nt, Artificial Sequence
  Description of Artificial Sequence: Synthetic oligonucleotide
uuugauuaauguuucuuaaauggaa

SEQ ID NO: 136042 - RNA, 25 nt, Artificial Sequence
  Description of Artificial Sequence: Synthetic oligonucleotide
caacguguauagugccuaaaauugu

SEQ ID NO: 136043 - RNA, 25 nt, Artificial Sequence
  Description of Artificial Sequence: Synthetic oligonucleotide
cauauccuuggcuacuaacaucugg

SEQ ID NO: 136044 - RNA, 25 nt, Artificial Sequence
  Description of Artificial Sequence: Synthetic oligonucleotide
uacuaacaucuggagacugugagcu

SEQ ID NO: 136045 - RNA, 25 nt, Artificial Sequence
  Description of Artificial Sequence: Synthetic oligonucleotide
cauaaguugugugcuuuuuauuaau

SEQ ID NO: 136046 - RNA, 25 nt, Artificial Sequence
  Description of Artificial Sequence: Synthetic oligonucleotide
gcaucauuuuggcucuucuuacauu

SEQ ID NO: 136047 - RNA, 25 nt, Artificial Sequence
  Description of Artificial Sequence: Synthetic oligonucleotide
gcucuucuuacauuuguaaaaaugu

SEQ ID NO: 136048 - RNA, 25 nt, Artificial Sequence
  Description of Artificial Sequence: Synthetic oligonucleotide
agauuaggucaucuuaauucauauu

SEQ ID NO: 136049 - RNA, 25 nt, Artificial Sequence
  Description of Artificial Sequence: Synthetic oligonucleotide
auggaauugaaagaacuaaucauga

SEQ ID NO: 136050 - RNA, 25 nt, Artificial Sequence
  Description of Artificial Sequence: Synthetic oligonucleotide
cacacucauuccuucugcucuuggg

SEQ ID NO: 136051 - RNA, 25 nt, Artificial Sequence
  Description of Artificial Sequence: Synthetic oligonucleotide
uguagagguaaccaguagcuuugag

SEQ ID NO: 136052 - RNA, 25 nt, Artificial Sequence
  Description of Artificial Sequence: Synthetic oligonucleotide
caaccacaugccacguaauauuuca

SEQ ID NO: 136053 - RNA, 25 nt, Artificial Sequence
  Description of Artificial Sequence: Synthetic oligonucleotide
ucggaaacaaguuauucucuucacu

SEQ ID NO: 136054 - RNA, 25 nt, Artificial Sequence
  Description of Artificial Sequence: Synthetic oligonucleotide
acucccaauaacuaaugcuaagaaa

SEQ ID NO: 136055 - RNA, 25 nt, Artificial Sequence
  Description of Artificial Sequence: Synthetic oligonucleotide
aaugcuaagaaaugcugaaaaucaa

SEQ ID NO: 136056 - RNA, 25 nt, Artificial Sequence
  Description of Artificial Sequence: Synthetic oligonucleotide
gucuuucucuaaauaugauuacuuu

SEQ ID NO: 136057 - RNA, 25 nt, Artificial Sequence
  Description of Artificial Sequence: Synthetic oligonucleotide
ugaauuucaggcauuuuguucuaca

SEQ ID NO: 136058 - RNA, 25 nt, Artificial Sequence
  Description of Artificial Sequence: Synthetic oligonucleotide
cgauucccucucacccgggacucuc

SEQ ID NO: 136059 - RNA, 25 nt, Artificial Sequence
  Description of Artificial Sequence: Synthetic oligonucleotide
aggaaagugaaccuuuaaaguaaag

SEQ ID NO: 136060 - RNA, 25 nt, Artificial Sequence
  Description of Artificial Sequence: Synthetic oligonucleotide
gaggcugcaugcucuggaagccugg

SEQ ID NO: 136061 - RNA, 25 nt, Artificial Sequence
  Description of Artificial Sequence: Synthetic oligonucleotide
ucucugaacagaaaacaaaagagag

SEQ ID NO: 136062 - RNA, 25 nt, Artificial Sequence
  Description of Artificial Sequence: Synthetic oligonucleotide
aacuuggcuguaaucaguuaugccg

SEQ ID NO: 136063 - RNA, 25 nt, Artificial Sequence
  Description of Artificial Sequence: Synthetic oligonucleotide
agaagccaaaauuaaaagaagucca

SEQ ID NO: 136064 - RNA, 25 nt, Artificial Sequence
  Description of Artificial Sequence: Synthetic oligonucleotide
auuaaaagaaguccaggugagguua

SEQ ID NO: 136065 - RNA, 25 nt, Artificial Sequence
  Description of Artificial Sequence: Synthetic oligonucleotide
gaauccggauuaucgggaagaggac

SEQ ID NO: 136066 - RNA, 25 nt, Artificial Sequence
  Description of Artificial Sequence: Synthetic oligonucleotide
aaugugacaucaaagcaaguauugu

SEQ ID NO: 136067 - RNA, 25 nt, Artificial Sequence
  Description of Artificial Sequence: Synthetic oligonucleotide
caucaaagcaaguauuguagcacuc

SEQ ID NO: 136068 - RNA, 25 nt, Artificial Sequence
  Description of Artificial Sequence: Synthetic oligonucleotide
agagagagaaaacaaaaccacaaau

SEQ ID NO: 136069 - RNA, 25 nt, Artificial Sequence
  Description of Artificial Sequence: Synthetic oligonucleotide
ucgcuguaguauuuaagcccauaca

SEQ ID NO: 136070 - RNA, 25 nt, Artificial Sequence
  Description of Artificial Sequence: Synthetic oligonucleotide
cgcuguaguauuuaagcccauacag

SEQ ID NO: 136071 - RNA, 25 nt, Artificial Sequence
  Description of Artificial Sequence: Synthetic oligonucleotide
auuuaagcccauacagaaaccuucc

SEQ ID NO: 136072 - RNA, 25 nt, Artificial Sequence
  Description of Artificial Sequence: Synthetic oligonucleotide
auuaaaauaaacaugguauaccuac

SEQ ID NO: 136073 - RNA, 25 nt, Artificial Sequence
  Description of Artificial Sequence: Synthetic oligonucleotide
cuguucugaucggccaguuuucgga

SEQ ID NO: 136074 - RNA, 25 nt, Artificial Sequence
  Description of Artificial Sequence: Synthetic oligonucleotide
aaauaauuugaacuuuggaacaggg

SEQ ID NO: 136075 - RNA, 25 nt, Artificial Sequence
  Description of Artificial Sequence: Synthetic oligonucleotide
ugcgaccuuaauuuaacuuuccagu

SEQ ID NO: 136076 - RNA, 25 nt, Artificial Sequence
  Description of Artificial Sequence: Synthetic oligonucleotide
cugagaaagcuaaaguuugguuuug

SEQ ID NO: 136077 - RNA, 25 nt, Artificial Sequence
  Description of Artificial Sequence: Synthetic oligonucleotide
aguaaagaugcuacuucccacugua

SEQ ID NO: 136078 - RNA, 25 nt, Artificial Sequence
  Description of Artificial Sequence: Synthetic oligonucleotide
cugcuuaauugcugauaccauauga

SEQ ID NO: 136079 - RNA, 25 nt, Artificial Sequence
  Description of Artificial Sequence: Synthetic oligonucleotide
uaccauaugaaugaaacaugggcug

SEQ ID NO: 136080 - RNA, 25 nt, Artificial Sequence
  Description of Artificial Sequence: Synthetic oligonucleotide
aacuuucuuauccaacuuuuucaua

SEQ ID NO: 136081 - RNA, 25 nt, Artificial Sequence
  Description of Artificial Sequence: Synthetic oligonucleotide
ccuugcaugacaucaugaggccgga

SEQ ID NO: 136082 - RNA, 25 nt, Artificial Sequence
  Description of Artificial Sequence: Synthetic oligonucleotide
ugaauuuguauaugacugcauuugu

SEQ ID NO: 136083 - RNA, 25 nt, Artificial Sequence
  Description of Artificial Sequence: Synthetic oligonucleotide
gaauccuaguagaauguuuacuacc

SEQ ID NO: 136084 - RNA, 25 nt, Artificial Sequence
  Description of Artificial Sequence: Synthetic oligonucleotide
gaaagggaagaauuuuuugaugaaa

SEQ ID NO: 136085 - RNA, 25 nt, Artificial Sequence
  Description of Artificial Sequence: Synthetic oligonucleotide
uaucggcaugccagugugugaauuu

SEQ ID NO: 136086 - RNA, 25 nt, Artificial Sequence
  Description of Artificial Sequence: Synthetic oligonucleotide
caccucauaguagagcaauguaugu

SEQ ID NO: 136087 - RNA, 25 nt, Artificial Sequence
  Description of Artificial Sequence: Synthetic oligonucleotide
ccagaauugccaaagcacauauaua

SEQ ID NO: 136088 - RNA, 25 nt, Artificial Sequence
  Description of Artificial Sequence: Synthetic oligonucleotide
uggugaucuggguaauaguuucucc

SEQ ID NO: 136089 - RNA, 25 nt, Artificial Sequence
  Description of Artificial Sequence: Synthetic oligonucleotide
gaucuggguaauaguuucuccaaau

SEQ ID NO: 136090 - RNA, 25 nt, Artificial Sequence
  Description of Artificial Sequence: Synthetic oligonucleotide
ggaugugaugaauacuuccuagaaa

SEQ ID NO: 136091 - RNA, 25 nt, Artificial Sequence
  Description of Artificial Sequence: Synthetic oligonucleotide
cauuuccacagcuacaccauauaug

SEQ ID NO: 136092 - RNA, 25 nt, Artificial Sequence
  Description of Artificial Sequence: Synthetic oligonucleotide
acagcuacaccauauaugaauggag

SEQ ID NO: 136093 - RNA, 25 nt, Artificial Sequence
  Description of Artificial Sequence: Synthetic oligonucleotide
ugcaguucuuacacgagaagaagau

SEQ ID NO: 136094 - RNA, 25 nt, Artificial Sequence
  Description of Artificial Sequence: Synthetic oligonucleotide
acgagaagaagaucauuuacaggga

SEQ ID NO: 136095 - RNA, 25 nt, Artificial Sequence
  Description of Artificial Sequence: Synthetic oligonucleotide
cgagaagaagaucauuuacagggac

SEQ ID NO: 136096 - RNA, 25 nt, Artificial Sequence
  Description of Artificial Sequence: Synthetic oligonucleotide
aagaagaucauuuacagggaccuga

SEQ ID NO: 136097 - RNA, 25 nt, Artificial Sequence
  Description of Artificial Sequence: Synthetic oligonucleotide
agaggaagagguguuugacugcauc

SEQ ID NO: 136098 - RNA, 25 nt, Artificial Sequence
  Description of Artificial Sequence: Synthetic oligonucleotide
gaggaagagguguuugacugcaucg

SEQ ID NO: 136099 - RNA, 25 nt, Artificial Sequence
  Description of Artificial Sequence: Synthetic oligonucleotide
cuacuuugagggcgaguucacaggg

SEQ ID NO: 136100 - RNA, 25 nt, Artificial Sequence
  Description of Artificial Sequence: Synthetic oligonucleotide
agggcaucuccuggcaccucugucc

SEQ ID NO: 136101 - RNA, 25 nt, Artificial Sequence
  Description of Artificial Sequence: Synthetic oligonucleotide
ggagugauaugguuugucuuuuuaa

SEQ ID NO: 136102 - RNA, 25 nt, Artificial Sequence
  Description of Artificial Sequence: Synthetic oligonucleotide
gagugauaugguuugucuuuuuaag

SEQ ID NO: 136103 - RNA, 25 nt, Artificial Sequence
  Description of Artificial Sequence: Synthetic oligonucleotide
ugcaguaaagauccuaaagguuguc

SEQ ID NO: 136104 - RNA, 25 nt, Artificial Sequence
  Description of Artificial Sequence: Synthetic oligonucleotide
aguaaagauccuaaagguugucgac

SEQ ID NO: 136105 - RNA, 25 nt, Artificial Sequence
  Description of Artificial Sequence: Synthetic oligonucleotide
ugacaaaggacaaccuggcaauugu

SEQ ID NO: 136106 - RNA, 25 nt, Artificial Sequence
  Description of Artificial Sequence: Synthetic oligonucleotide
gcaauugugacccaguggugcgagg

SEQ ID NO: 136107 - RNA, 25 nt, Artificial Sequence
  Description of Artificial Sequence: Synthetic oligonucleotide
aacaucauccauagagacaugaaau

SEQ ID NO: 136108 - RNA, 25 nt, Artificial Sequence
  Description of Artificial Sequence: Synthetic oligonucleotide
ugaaauccaacaauauauuucucca

SEQ ID NO: 136109 - RNA, 25 nt, Artificial Sequence
  Description of Artificial Sequence: Synthetic oligonucleotide
aacaauauauuucuccaugaaggcu

SEQ ID NO: 136110 - RNA, 25 nt, Artificial Sequence
  Description of Artificial Sequence: Synthetic oligonucleotide
aacaguaaagucacgcuggaguggu

SEQ ID NO: 136111 - RNA, 25 nt, Artificial Sequence
  Description of Artificial Sequence: Synthetic oligonucleotide
ugugaagaaaguaaaggaagagagg

SEQ ID NO: 136112 - RNA, 25 nt, Artificial Sequence
  Description of Artificial Sequence: Synthetic oligonucleotide
cuuccgagccauccuugcaucgggc

SEQ ID NO: 136113 - RNA, 25 nt, Artificial Sequence
  Description of Artificial Sequence: Synthetic oligonucleotide
aauggagguugaauauccuacugug

SEQ ID NO: 136114 - RNA, 25 nt, Artificial Sequence
  Description of Artificial Sequence: Synthetic oligonucleotide
ggagguugaauauccuacuguguaa

SEQ ID NO: 136115 - RNA, 25 nt, Artificial Sequence
  Description of Artificial Sequence: Synthetic oligonucleotide
auuuugaguuuucccuuguagugua

SEQ ID NO: 136116 - RNA, 25 nt, Artificial Sequence
  Description of Artificial Sequence: Synthetic oligonucleotide
uauccuguuuguucuuuguugauug

SEQ ID NO: 136117 - RNA, 25 nt, Artificial Sequence
  Description of Artificial Sequence: Synthetic oligonucleotide
ccuguuuguucuuuguugauugaaa

SEQ ID NO: 136118 - RNA, 25 nt, Artificial Sequence
  Description of Artificial Sequence: Synthetic oligonucleotide
cucuacagccuucuuuuucuuccau

SEQ ID NO: 136119 - RNA, 25 nt, Artificial Sequence
  Description of Artificial Sequence: Synthetic oligonucleotide
ucuuccauagcuaaucuuccuucua

SEQ ID NO: 136120 - RNA, 25 nt, Artificial Sequence
  Description of Artificial Sequence: Synthetic oligonucleotide
auaaucuuccuguugaaugcuucau

SEQ ID NO: 136121 - RNA, 25 nt, Artificial Sequence
  Description of Artificial Sequence: Synthetic oligonucleotide
uaaucuuccuguugaaugcuucaug

SEQ ID NO: 136122 - RNA, 25 nt, Artificial Sequence
  Description of Artificial Sequence: Synthetic oligonucleotide
cuucaugacuugaauucuacuuuga

SEQ ID NO: 136123 - RNA, 25 nt, Artificial Sequence
  Description of Artificial Sequence: Synthetic oligonucleotide
aagagggagagaagcaacuacagac

SEQ ID NO: 136124 - RNA, 25 nt, Artificial Sequence
  Description of Artificial Sequence: Synthetic oligonucleotide
cgucuccuaccagaccaaggucaac

SEQ ID NO: 136125 - RNA, 25 nt, Artificial Sequence
  Description of Artificial Sequence: Synthetic oligonucleotide
gaucaaucggcccgacuaucucgac

SEQ ID NO: 136126 - RNA, 25 nt, Artificial Sequence
  Description of Artificial Sequence: Synthetic oligonucleotide
ggacgaacauccaaccuucccaaac

SEQ ID NO: 136127 - RNA, 25 nt, Artificial Sequence
  Description of Artificial Sequence: Synthetic oligonucleotide
agggucggaacccaagcuuagaacu

SEQ ID NO: 136128 - RNA, 25 nt, Artificial Sequence
  Description of Artificial Sequence: Synthetic oligonucleotide
ucggaacccaagcuuagaacuuuaa

SEQ ID NO: 136129 - RNA, 25 nt, Artificial Sequence
  Description of Artificial Sequence: Synthetic oligonucleotide
acccaagcuuagaacuuuaagcaac

SEQ ID NO: 136130 - RNA, 25 nt, Artificial Sequence
  Description of Artificial Sequence: Synthetic oligonucleotide
gaacuuuaagcaacaagaccaccac

SEQ ID NO: 136131 - RNA, 25 nt, Artificial Sequence
  Description of Artificial Sequence: Synthetic oligonucleotide
acuauucaguggcgagaaauaaagu

SEQ ID NO: 136132 - RNA, 25 nt, Artificial Sequence
  Description of Artificial Sequence: Synthetic oligonucleotide
cuauucaguggcgagaaauaaaguu

SEQ ID NO: 136133 - RNA, 25 nt, Artificial Sequence
  Description of Artificial Sequence: Synthetic oligonucleotide
aaacacagauaacaggaaaugaucc

SEQ ID NO: 136134 - RNA, 25 nt, Artificial Sequence
  Description of Artificial Sequence: Synthetic oligonucleotide
cuuaagaaaagagaagaaaugaaac

SEQ ID NO: 136135 - RNA, 25 nt, Artificial Sequence
  Description of Artificial Sequence: Synthetic oligonucleotide
cugaaggaguguguuuccauccucc

SEQ ID NO: 136136 - RNA, 25 nt, Artificial Sequence
  Description of Artificial Sequence: Synthetic oligonucleotide
ucaccgcgggacugaaaaucuuuga

SEQ ID NO: 136137 - RNA, 25 nt, Artificial Sequence
  Description of Artificial Sequence: Synthetic oligonucleotide
agcagaaauaagcgugccguucagg

SEQ ID NO: 136138 - RNA, 25 nt, Artificial Sequence
  Description of Artificial Sequence: Synthetic oligonucleotide
aagcgugccguucaggguccagaag

SEQ ID NO: 136139 - RNA, 25 nt, Artificial Sequence
  Description of Artificial Sequence: Synthetic oligonucleotide
agaaacagucacucaagacugcuug

SEQ ID NO: 136140 - RNA, 25 nt, Artificial Sequence
  Description of Artificial Sequence: Synthetic oligonucleotide
agaggaagaagguccaugucuuugg

SEQ ID NO: 136141 - RNA, 25 nt, Artificial Sequence
  Description of Artificial Sequence: Synthetic oligonucleotide
uguauucaaaauaugccugaaacac

SEQ ID NO: 136142 - RNA, 25 nt, Artificial Sequence
  Description of Artificial Sequence: Synthetic oligonucleotide
auuuuccucccuuucucuguaccuc

SEQ ID NO: 136143 - RNA, 25 nt, Artificial Sequence
  Description of Artificial Sequence: Synthetic oligonucleotide
caaagaaagauagagcaagacaaga

SEQ ID NO: 136144 - RNA, 25 nt, Artificial Sequence
  Description of Artificial Sequence: Synthetic oligonucleotide
aagaaagauagagcaagacaagaaa

SEQ ID NO: 136145 - RNA, 25 nt, Artificial Sequence
  Description of Artificial Sequence: Synthetic oligonucleotide
gaaagcauuuguuuguacaagaucc

SEQ ID NO: 136146 - RNA, 25 nt, Artificial Sequence
  Description of Artificial Sequence: Synthetic oligonucleotide
ugaguuaaacgaacguacuugcaga

SEQ ID NO: 136147 - RNA, 25 nt, Artificial Sequence
  Description of Artificial Sequence: Synthetic oligonucleotide
acugauacagaacgaucgauacaga

SEQ ID NO: 136148 - RNA, 25 nt, Artificial Sequence
  Description of Artificial Sequence: Synthetic oligonucleotide
auauuauauauauauaaaaauaaau

SEQ ID NO: 136149 - RNA, 25 nt, Artificial Sequence
  Description of Artificial Sequence: Synthetic oligonucleotide
auuauauauauauaaaaauaaauau

SEQ ID NO: 136150 - RNA, 25 nt, Artificial Sequence
  Description of Artificial Sequence: Synthetic oligonucleotide
ucacuggauguauuugacugcugug

SEQ ID NO: 136151 - RNA, 25 nt, Artificial Sequence
  Description of Artificial Sequence: Synthetic oligonucleotide
cagggaagaggaggagaugagagac

SEQ ID NO: 136152 - RNA, 25 nt, Artificial Sequence
  Description of Artificial Sequence: Synthetic oligonucleotide
augaucuuuuuuuugucccacuugg

SEQ ID NO: 136153 - RNA, 27 nt, Artificial Sequence
  Description of Artificial Sequence: Synthetic oligonucleotide
ggccgugaacuccucaucaaaauaccu

SEQ ID NO: 136154 - RNA, 27 nt, Artificial Sequence
  Description of Artificial Sequence: Synthetic oligonucleotide
uggugugauggugaucaucugggccgu

SEQ ID NO: 136155 - RNA, 27 nt, Artificial Sequence
  Description of Artificial Sequence: Synthetic oligonucleotide
aaacccgcaggauaguuuucuucccua

SEQ ID NO: 136156 - RNA, 27 nt, Artificial Sequence
  Description of Artificial Sequence: Synthetic oligonucleotide
caaacuggaugaaauaaauuaaaaccc

SEQ ID NO: 136157 - RNA, 27 nt, Artificial Sequence
  Description of Artificial Sequence: Synthetic oligonucleotide
agaaguccuuaacauuucccuacguga

SEQ ID NO: 136158 - RNA, 27 nt, Artificial Sequence
  Description of Artificial Sequence: Synthetic oligonucleotide
cucugucccacuggguaaacccuggcc

SEQ ID NO: 136159 - RNA, 27 nt, Artificial Sequence
  Description of Artificial Sequence: Synthetic oligonucleotide
cacaauaacaaauuuaaaccuugcucc

SEQ ID NO: 136160 - RNA, 27 nt, Artificial Sequence
  Description of Artificial Sequence: Synthetic oligonucleotide
aaaugcauuugaacaacauaauacaca

SEQ ID NO: 136161 - RNA, 27 nt, Artificial Sequence
  Description of Artificial Sequence: Synthetic oligonucleotide
ggcuuuccugucacaaagauuaaaaac

SEQ ID NO: 136162 - RNA, 27 nt, Artificial Sequence
  Description of Artificial Sequence: Synthetic oligonucleotide
agggcuuuccugucacaaagauuaaaa

SEQ ID NO: 136163 - RNA, 27 nt, Artificial Sequence
  Description of Artificial Sequence: Synthetic oligonucleotide
ggccaugcugggagacauaagcagcag

SEQ ID NO: 136164 - RNA, 27 nt, Artificial Sequence
  Description of Artificial Sequence: Synthetic oligonucleotide
ucagggagaagcuucugaaacacuucu

SEQ ID NO: 136165 - RNA, 27 nt, Artificial Sequence
  Description of Artificial Sequence: Synthetic oligonucleotide
aagggcuucuuccuuauugauggucag

SEQ ID NO: 136166 - RNA, 27 nt, Artificial Sequence
  Description of Artificial Sequence: Synthetic oligonucleotide
ugaagggcuucuuccuuauugaugguc

SEQ ID NO: 136167 - RNA, 27 nt, Artificial Sequence
  Description of Artificial Sequence: Synthetic oligonucleotide
cgcugaagggcuucuuccuuauugaug

SEQ ID NO: 136168 - RNA, 27 nt, Artificial Sequence
  Description of Artificial Sequence: Synthetic oligonucleotide
gccgcugaagggcuucuuccuuauuga

SEQ ID NO: 136169 - RNA, 27 nt, Artificial Sequence
  Description of Artificial Sequence: Synthetic oligonucleotide
acuggccgcugaagggcuucuuccuua

SEQ ID NO: 136170 - RNA, 27 nt, Artificial Sequence
  Description of Artificial Sequence: Synthetic oligonucleotide
cggagcuuuucaccuuuaguuaugcuu

SEQ ID NO: 136171 - RNA, 27 nt, Artificial Sequence
  Description of Artificial Sequence: Synthetic oligonucleotide
ccggagcuuuucaccuuuaguuaugcu

SEQ ID NO: 136172 - RNA, 27 nt, Artificial Sequence
  Description of Artificial Sequence: Synthetic oligonucleotide
cagacuguugacuggcgugauguaguu

SEQ ID NO: 136173 - RNA, 27 nt, Artificial Sequence
  Description of Artificial Sequence: Synthetic oligonucleotide
cuuuugaacucugcuuaaauccagugg

SEQ ID NO: 136174 - RNA, 27 nt, Artificial Sequence
  Description of Artificial Sequence: Synthetic oligonucleotide
gcuuuugaacucugcuuaaauccagug

SEQ ID NO: 136175 - RNA, 27 nt, Artificial Sequence
  Description of Artificial Sequence: Synthetic oligonucleotide
agggcuuuugaacucugcuuaaaucca

SEQ ID NO: 136176 - RNA, 27 nt, Artificial Sequence
  Description of Artificial Sequence: Synthetic oligonucleotide
aagggcuuuugaacucugcuuaaaucc

SEQ ID NO: 136177 - RNA, 27 nt, Artificial Sequence
  Description of Artificial Sequence: Synthetic oligonucleotide
ugaagggcuuuugaacucugcuuaaau

SEQ ID NO: 136178 - RNA, 27 nt, Artificial Sequence
  Description of Artificial Sequence: Synthetic oligonucleotide
cugaagggcuuuugaacucugcuuaaa

SEQ ID NO: 136179 - RNA, 27 nt, Artificial Sequence
  Description of Artificial Sequence: Synthetic oligonucleotide
cgcugaagggcuuuugaacucugcuua

SEQ ID NO: 136180 - RNA, 27 nt, Artificial Sequence
  Description of Artificial Sequence: Synthetic oligonucleotide
cgagcggcuucacucagacccugaggc

SEQ ID NO: 136181 - RNA, 27 nt, Artificial Sequence
  Description of Artificial Sequence: Synthetic oligonucleotide
uugacuggcgugauguaguugcuuggg

SEQ ID NO: 136182 - RNA, 27 nt, Artificial Sequence
  Description of Artificial Sequence: Synthetic oligonucleotide
cacgcaccaagaagcugccauugaucc

SEQ ID NO: 136183 - RNA, 27 nt, Artificial Sequence
  Description of Artificial Sequence: Synthetic oligonucleotide
cugaugaauccaaugugggcuggaauc

SEQ ID NO: 136184 - RNA, 27 nt, Artificial Sequence
  Description of Artificial Sequence: Synthetic oligonucleotide
cuuagguauuccacauucucagcugug

SEQ ID NO: 136185 - RNA, 27 nt, Artificial Sequence
  Description of Artificial Sequence: Synthetic oligonucleotide
ugagccucaaauuaggagauacguuuu

SEQ ID NO: 136186 - RNA, 27 nt, Artificial Sequence
  Description of Artificial Sequence: Synthetic oligonucleotide
ccaauuguagagaaauuauuuuaggaa

SEQ ID NO: 136187 - RNA, 27 nt, Artificial Sequence
  Description of Artificial Sequence: Synthetic oligonucleotide
ggcuccuaacuagcugaaucuuccaau

SEQ ID NO: 136188 - RNA, 27 nt, Artificial Sequence
  Description of Artificial Sequence: Synthetic oligonucleotide
guggauauugacuaggagaguuuaaaa

SEQ ID NO: 136189 - RNA, 27 nt, Artificial Sequence
  Description of Artificial Sequence: Synthetic oligonucleotide
ugugacugaacauaacuguaggcugaa

SEQ ID NO: 136190 - RNA, 27 nt, Artificial Sequence
  Description of Artificial Sequence: Synthetic oligonucleotide
guaugugugugugacugaacauaacug

SEQ ID NO: 136191 - RNA, 27 nt, Artificial Sequence
  Description of Artificial Sequence: Synthetic oligonucleotide
aagcaaaaggaacauuuuguaugugug

SEQ ID NO: 136192 - RNA, 27 nt, Artificial Sequence
  Description of Artificial Sequence: Synthetic oligonucleotide
aaaaauuacuuuaaaagcaaaaggaac

SEQ ID NO: 136193 - RNA, 27 nt, Artificial Sequence
  Description of Artificial Sequence: Synthetic oligonucleotide
ccauugacuguugcuucacaggucaga

SEQ ID NO: 136194 - RNA, 27 nt, Artificial Sequence
  Description of Artificial Sequence: Synthetic oligonucleotide
auugguuugucgaugugugagauaguu

SEQ ID NO: 136195 - RNA, 27 nt, Artificial Sequence
  Description of Artificial Sequence: Synthetic oligonucleotide
agugguagcaguacaauugaggacaag

SEQ ID NO: 136196 - RNA, 27 nt, Artificial Sequence
  Description of Artificial Sequence: Synthetic oligonucleotide
uaagaccgcuugccagcuacgguuuca

SEQ ID NO: 136197 - RNA, 27 nt, Artificial Sequence
  Description of Artificial Sequence: Synthetic oligonucleotide
agccgguaagaccgcuugccagcuacg

SEQ ID NO: 136198 - RNA, 27 nt, Artificial Sequence
  Description of Artificial Sequence: Synthetic oligonucleotide
gguaacccaucuuuuaaccauacaacu

SEQ ID NO: 136199 - RNA, 27 nt, Artificial Sequence
  Description of Artificial Sequence: Synthetic oligonucleotide
ucgcagguaacccaucuuuuaaccaua

SEQ ID NO: 136200 - RNA, 27 nt, Artificial Sequence
  Description of Artificial Sequence: Synthetic oligonucleotide
cucagcaagauuguauaauucccugca

SEQ ID NO: 136201 - RNA, 27 nt, Artificial Sequence
  Description of Artificial Sequence: Synthetic oligonucleotide
acuguuuuaugcucagcaagauuguau

SEQ ID NO: 136202 - RNA, 27 nt, Artificial Sequence
  Description of Artificial Sequence: Synthetic oligonucleotide
aggauaaaggacucuucauuauuggaa

SEQ ID NO: 136203 - RNA, 27 nt, Artificial Sequence
  Description of Artificial Sequence: Synthetic oligonucleotide
caacuugcguuggaacauccaaagugu

SEQ ID NO: 136204 - RNA, 27 nt, Artificial Sequence
  Description of Artificial Sequence: Synthetic oligonucleotide
augguuucaguuuaguggaagcauuua

SEQ ID NO: 136205 - RNA, 27 nt, Artificial Sequence
  Description of Artificial Sequence: Synthetic oligonucleotide
auauuuaacaaagucaaacuuucucac

SEQ ID NO: 136206 - RNA, 27 nt, Artificial Sequence
  Description of Artificial Sequence: Synthetic oligonucleotide
aacuuuuaauauacaguaguucuuuuc

SEQ ID NO: 136207 - RNA, 27 nt, Artificial Sequence
  Description of Artificial Sequence: Synthetic oligonucleotide
guuaagucaaaacccguauuucuaaag

SEQ ID NO: 136208 - RNA, 27 nt, Artificial Sequence
  Description of Artificial Sequence: Synthetic oligonucleotide
gugcugaguuugcuguacccauguuga

SEQ ID NO: 136209 - RNA, 27 nt, Artificial Sequence
  Description of Artificial Sequence: Synthetic oligonucleotide
ugaggucagcaucuucugugucuuuac

SEQ ID NO: 136210 - RNA, 27 nt, Artificial Sequence
  Description of Artificial Sequence: Synthetic oligonucleotide
gcgaucugaauaaaccucccuacuagc

SEQ ID NO: 136211 - RNA, 27 nt, Artificial Sequence
  Description of Artificial Sequence: Synthetic oligonucleotide
aucccagaacccugcugcagaaggcca

SEQ ID NO: 136212 - RNA, 27 nt, Artificial Sequence
  Description of Artificial Sequence: Synthetic oligonucleotide
cauaauuuccaauauguaccagaccuu

SEQ ID NO: 136213 - RNA, 27 nt, Artificial Sequence
  Description of Artificial Sequence: Synthetic oligonucleotide
cuagugcuuccaucggaaggacuaggu

SEQ ID NO: 136214 - RNA, 27 nt, Artificial Sequence
  Description of Artificial Sequence: Synthetic oligonucleotide
uccacauaaaaacaauauucacuggga

SEQ ID NO: 136215 - RNA, 27 nt, Artificial Sequence
  Description of Artificial Sequence: Synthetic oligonucleotide
ucuaccaauuccaacuugaauucauug

SEQ ID NO: 136216 - RNA, 27 nt, Artificial Sequence
  Description of Artificial Sequence: Synthetic oligonucleotide
ucuccaagucuaaaucuguguccugag

SEQ ID NO: 136217 - RNA, 27 nt, Artificial Sequence
  Description of Artificial Sequence: Synthetic oligonucleotide
uggaauacuguaacugugcuuugagga

SEQ ID NO: 136218 - RNA, 27 nt, Artificial Sequence
  Description of Artificial Sequence: Synthetic oligonucleotide
uuaauucaucagugguggcagugguag

SEQ ID NO: 136219 - RNA, 27 nt, Artificial Sequence
  Description of Artificial Sequence: Synthetic oligonucleotide
gugaugauguggcacuaguaguuucuu

SEQ ID NO: 136220 - RNA, 27 nt, Artificial Sequence
  Description of Artificial Sequence: Synthetic oligonucleotide
ucuguuuggugaggcuguccgacuuug

SEQ ID NO: 136221 - RNA, 27 nt, Artificial Sequence
  Description of Artificial Sequence: Synthetic oligonucleotide
ccaucauguuccauuuuucgcuuucuc

SEQ ID NO: 136222 - RNA, 27 nt, Artificial Sequence
  Description of Artificial Sequence: Synthetic oligonucleotide
gcagucuacaugcuaaaucagagggua

SEQ ID NO: 136223 - RNA, 27 nt, Artificial Sequence
  Description of Artificial Sequence: Synthetic oligonucleotide
cauaaauagauccuuaaauagcucaaa

SEQ ID NO: 136224 - RNA, 27 nt, Artificial Sequence
  Description of Artificial Sequence: Synthetic oligonucleotide
ugauaauagugcuuuuucaccuuuuuc

SEQ ID NO: 136225 - RNA, 27 nt, Artificial Sequence
  Description of Artificial Sequence: Synthetic oligonucleotide
gcagaacugauaauagugcuuuuucac

SEQ ID NO: 136226 - RNA, 27 nt, Artificial Sequence
  Description of Artificial Sequence: Synthetic oligonucleotide
guagguuuaaucuuucuuuucagccau

SEQ ID NO: 136227 - RNA, 27 nt, Artificial Sequence
  Description of Artificial Sequence: Synthetic oligonucleotide
agaaggauuuuauuauaaggguuuaau

SEQ ID NO: 136228 - RNA, 27 nt, Artificial Sequence
  Description of Artificial Sequence: Synthetic oligonucleotide
gucuacagcauuggcuaauaguaugaa

SEQ ID NO: 136229 - RNA, 27 nt, Artificial Sequence
  Description of Artificial Sequence: Synthetic oligonucleotide
cuauuccuaucaaaaugcuucugucua

SEQ ID NO: 136230 - RNA, 27 nt, Artificial Sequence
  Description of Artificial Sequence: Synthetic oligonucleotide
ucagggccauuaucuuauuugcucuau

SEQ ID NO: 136231 - RNA, 27 nt, Artificial Sequence
  Description of Artificial Sequence: Synthetic oligonucleotide
ugcuugaggaagagaaaaauguugguc

SEQ ID NO: 136232 - RNA, 27 nt, Artificial Sequence
  Description of Artificial Sequence: Synthetic oligonucleotide
ugggcugaacuuuucucauacuuaaag

SEQ ID NO: 136233 - RNA, 27 nt, Artificial Sequence
  Description of Artificial Sequence: Synthetic oligonucleotide
gguucagcagccaucuuuauuccugcg

SEQ ID NO: 136234 - RNA, 27 nt, Artificial Sequence
  Description of Artificial Sequence: Synthetic oligonucleotide
ugaagagaacuuggucauucaaauuuc

SEQ ID NO: 136235 - RNA, 27 nt, Artificial Sequence
  Description of Artificial Sequence: Synthetic oligonucleotide
cucuaggcuggcuaucuuuauacauac

SEQ ID NO: 136236 - RNA, 27 nt, Artificial Sequence
  Description of Artificial Sequence: Synthetic oligonucleotide
acacuucacagagauaguuacagccau

SEQ ID NO: 136237 - RNA, 27 nt, Artificial Sequence
  Description of Artificial Sequence: Synthetic oligonucleotide
uugaaauuuucucacacuucacagaga

SEQ ID NO: 136238 - RNA, 27 nt, Artificial Sequence
  Description of Artificial Sequence: Synthetic oligonucleotide
ucaggaggauucauuuccuuaaaggaa

SEQ ID NO: 136239 - RNA, 27 nt, Artificial Sequence
  Description of Artificial Sequence: Synthetic oligonucleotide
auaugaugucacuuuuuguauccuuga

SEQ ID NO: 136240 - RNA, 27 nt, Artificial Sequence
  Description of Artificial Sequence: Synthetic oligonucleotide
uaugaugaagauucaaauugcaucuua

SEQ ID NO: 136241 - RNA, 27 nt, Artificial Sequence
  Description of Artificial Sequence: Synthetic oligonucleotide
uuaauagcuagucuucguuuugaacag

SEQ ID NO: 136242 - RNA, 27 nt, Artificial Sequence
  Description of Artificial Sequence: Synthetic oligonucleotide
auuuuuaguagagaugagguuucacca

SEQ ID NO: 136243 - RNA, 27 nt, Artificial Sequence
  Description of Artificial Sequence: Synthetic oligonucleotide
aggcgagauagagcuucucuuucguuc

SEQ ID NO: 136244 - RNA, 27 nt, Artificial Sequence
  Description of Artificial Sequence: Synthetic oligonucleotide
aacuggaccgaaggcgcuuguggagaa

SEQ ID NO: 136245 - RNA, 27 nt, Artificial Sequence
  Description of Artificial Sequence: Synthetic oligonucleotide
gcggcuacaucuuuggaaucuucuccu

SEQ ID NO: 136246 - RNA, 27 nt, Artificial Sequence
  Description of Artificial Sequence: Synthetic oligonucleotide
caagucuccucauugaauccagauugg

SEQ ID NO: 136247 - RNA, 27 nt, Artificial Sequence
  Description of Artificial Sequence: Synthetic oligonucleotide
uccucacuacucucaaaucuguucugg

SEQ ID NO: 136248 - RNA, 27 nt, Artificial Sequence
  Description of Artificial Sequence: Synthetic oligonucleotide
uuuguacucaucugcacagcucuggcu

SEQ ID NO: 136249 - RNA, 27 nt, Artificial Sequence
  Description of Artificial Sequence: Synthetic oligonucleotide
gcccauuaacaacaacaaucugaggug

SEQ ID NO: 136250 - RNA, 27 nt, Artificial Sequence
  Description of Artificial Sequence: Synthetic oligonucleotide
aauaaauuaaaaauaauuaaaauagug

SEQ ID NO: 136251 - RNA, 27 nt, Artificial Sequence
  Description of Artificial Sequence: Synthetic oligonucleotide
cauauuuaaauauuaauaaauuaaaaa

SEQ ID NO: 136252 - RNA, 27 nt, Artificial Sequence
  Description of Artificial Sequence: Synthetic oligonucleotide
gaaacaaaggauauucaaacugcauag

SEQ ID NO: 136253 - RNA, 27 nt, Artificial Sequence
  Description of Artificial Sequence: Synthetic oligonucleotide
caaacacuuagacgccagcagcauggg

SEQ ID NO: 136254 - RNA, 27 nt, Artificial Sequence
  Description of Artificial Sequence: Synthetic oligonucleotide
uuugucacaggugaaaugcacaucuga

SEQ ID NO: 136255 - RNA, 27 nt, Artificial Sequence
  Description of Artificial Sequence: Synthetic oligonucleotide
uaauucagccuggcacagguuuugauc

SEQ ID NO: 136256 - RNA, 27 nt, Artificial Sequence
  Description of Artificial Sequence: Synthetic oligonucleotide
auuguaagaaugacuacccacauucac

SEQ ID NO: 136257 - RNA, 27 nt, Artificial Sequence
  Description of Artificial Sequence: Synthetic oligonucleotide
caauuguaagaaugacuacccacauuc

SEQ ID NO: 136258 - RNA, 27 nt, Artificial Sequence
  Description of Artificial Sequence: Synthetic oligonucleotide
guacacucucugaugcucauuuucaua

SEQ ID NO: 136259 - RNA, 27 nt, Artificial Sequence
  Description of Artificial Sequence: Synthetic oligonucleotide
cugcugaguucuacaugaaaagcaaau

SEQ ID NO: 136260 - RNA, 27 nt, Artificial Sequence
  Description of Artificial Sequence: Synthetic oligonucleotide
uacugaaaauaaauauagaaauacaac

SEQ ID NO: 136261 - RNA, 27 nt, Artificial Sequence
  Description of Artificial Sequence: Synthetic oligonucleotide
uuccauuuaagaaacauuaaucaaaac

SEQ ID NO: 136262 - RNA, 27 nt, Artificial Sequence
  Description of Artificial Sequence: Synthetic oligonucleotide
acaauuuuaggcacuauacacguuguu

SEQ ID NO: 136263 - RNA, 27 nt, Artificial Sequence
  Description of Artificial Sequence: Synthetic oligonucleotide
ccagauguuaguagccaaggauauggu

SEQ ID NO: 136264 - RNA, 27 nt, Artificial Sequence
  Description of Artificial Sequence: Synthetic oligonucleotide
agcucacagucuccagauguuaguagc

SEQ ID NO: 136265 - RNA, 27 nt, Artificial Sequence
  Description of Artificial Sequence: Synthetic oligonucleotide
auuaauaaaaagcacacaacuuauggc

SEQ ID NO: 136266 - RNA, 27 nt, Artificial Sequence
  Description of Artificial Sequence: Synthetic oligonucleotide
aauguaagaagagccaaaaugaugcau

SEQ ID NO: 136267 - RNA, 27 nt, Artificial Sequence
  Description of Artificial Sequence: Synthetic oligonucleotide
acauuuuuacaaauguaagaagagcca

SEQ ID NO: 136268 - RNA, 27 nt, Artificial Sequence
  Description of Artificial Sequence: Synthetic oligonucleotide
aauaugaauuaagaugaccuaaucugu

SEQ ID NO: 136269 - RNA, 27 nt, Artificial Sequence
  Description of Artificial Sequence: Synthetic oligonucleotide
ucaugauuaguucuuucaauuccaucc

SEQ ID NO: 136270 - RNA, 27 nt, Artificial Sequence
  Description of Artificial Sequence: Synthetic oligonucleotide
cccaagagcagaaggaaugagugugca

SEQ ID NO: 136271 - RNA, 27 nt, Artificial Sequence
  Description of Artificial Sequence: Synthetic oligonucleotide
cucaaagcuacugguuaccucuacacc

SEQ ID NO: 136272 - RNA, 27 nt, Artificial Sequence
  Description of Artificial Sequence: Synthetic oligonucleotide
ugaaauauuacguggcaugugguuggg

SEQ ID NO: 136273 - RNA, 27 nt, Artificial Sequence
  Description of Artificial Sequence: Synthetic oligonucleotide
agugaagagaauaacuuguuuccgaag

SEQ ID NO: 136274 - RNA, 27 nt, Artificial Sequence
  Description of Artificial Sequence: Synthetic oligonucleotide
uuucuuagcauuaguuauugggaguga

SEQ ID NO: 136275 - RNA, 27 nt, Artificial Sequence
  Description of Artificial Sequence: Synthetic oligonucleotide
uugauuuucagcauuucuuagcauuag

SEQ ID NO: 136276 - RNA, 27 nt, Artificial Sequence
  Description of Artificial Sequence: Synthetic oligonucleotide
aaaguaaucauauuuagagaaagacag

SEQ ID NO: 136277 - RNA, 27 nt, Artificial Sequence
  Description of Artificial Sequence: Synthetic oligonucleotide
uguagaacaaaaugccugaaauucagc

SEQ ID NO: 136278 - RNA, 27 nt, Artificial Sequence
  Description of Artificial Sequence: Synthetic oligonucleotide
gagagucccgggugagagggaaucgcc

SEQ ID NO: 136279 - RNA, 27 nt, Artificial Sequence
  Description of Artificial Sequence: Synthetic oligonucleotide
cuuuacuuuaaagguucacuuuccuug

SEQ ID NO: 136280 - RNA, 27 nt, Artificial Sequence
  Description of Artificial Sequence: Synthetic oligonucleotide
ccaggcuuccagagcaugcagccuccu

SEQ ID NO: 136281 - RNA, 27 nt, Artificial Sequence
  Description of Artificial Sequence: Synthetic oligonucleotide
cucucuuuuguuuucuguucagagaaa

SEQ ID NO: 136282 - RNA, 27 nt, Artificial Sequence
  Description of Artificial Sequence: Synthetic oligonucleotide
cggcauaacugauuacagccaaguuca

SEQ ID NO: 136283 - RNA, 27 nt, Artificial Sequence
  Description of Artificial Sequence: Synthetic oligonucleotide
uggacuucuuuuaauuuuggcuucuuc

SEQ ID NO: 136284 - RNA, 27 nt, Artificial Sequence
  Description of Artificial Sequence: Synthetic oligonucleotide
uaaccucaccuggacuucuuuuaauuu

SEQ ID NO: 136285 - RNA, 27 nt, Artificial Sequence
  Description of Artificial Sequence: Synthetic oligonucleotide
guccucuucccgauaauccggauucag

SEQ ID NO: 136286 - RNA, 27 nt, Artificial Sequence
  Description of Artificial Sequence: Synthetic oligonucleotide
acaauacuugcuuugaugucacauuaa

SEQ ID NO: 136287 - RNA, 27 nt, Artificial Sequence
  Description of Artificial Sequence: Synthetic oligonucleotide
gagugcuacaauacuugcuuugauguc

SEQ ID NO: 136288 - RNA, 27 nt, Artificial Sequence
  Description of Artificial Sequence: Synthetic oligonucleotide
auuugugguuuuguuuucucucucucu

SEQ ID NO: 136289 - RNA, 27 nt, Artificial Sequence
  Description of Artificial Sequence: Synthetic oligonucleotide
uguaugggcuuaaauacuacagcgagg

SEQ ID NO: 136290 - RNA, 27 nt, Artificial Sequence
  Description of Artificial Sequence: Synthetic oligonucleotide
cuguaugggcuuaaauacuacagcgag

SEQ ID NO: 136291 - RNA, 27 nt, Artificial Sequence
  Description of Artificial Sequence: Synthetic oligonucleotide
ggaagguuucuguaugggcuuaaauac

SEQ ID NO: 136292 - RNA, 27 nt, Artificial Sequence
  Description of Artificial Sequence: Synthetic oligonucleotide
guagguauaccauguuuauuuuaauac

SEQ ID NO: 136293 - RNA, 27 nt, Artificial Sequence
  Description of Artificial Sequence: Synthetic oligonucleotide
uccgaaaacuggccgaucagaacagcc

SEQ ID NO: 136294 - RNA, 27 nt, Artificial Sequence
  Description of Artificial Sequence: Synthetic oligonucleotide
cccuguuccaaaguucaaauuauuugu

SEQ ID NO: 136295 - RNA, 27 nt, Artificial Sequence
  Description of Artificial Sequence: Synthetic oligonucleotide
acuggaaaguuaaauuaaggucgcaau

SEQ ID NO: 136296 - RNA, 27 nt, Artificial Sequence
  Description of Artificial Sequence: Synthetic oligonucleotide
caaaaccaaacuuuagcuuucucagcc

SEQ ID NO: 136297 - RNA, 27 nt, Artificial Sequence
  Description of Artificial Sequence: Synthetic oligonucleotide
uacagugggaaguagcaucuuuacuuu

SEQ ID NO: 136298 - RNA, 27 nt, Artificial Sequence
  Description of Artificial Sequence: Synthetic oligonucleotide
ucauaugguaucagcaauuaagcagua

SEQ ID NO: 136299 - RNA, 27 nt, Artificial Sequence
  Description of Artificial Sequence: Synthetic oligonucleotide
cagcccauguuucauucauaugguauc

SEQ ID NO: 136300 - RNA, 27 nt, Artificial Sequence
  Description of Artificial Sequence: Synthetic oligonucleotide
uaugaaaaaguuggauaagaaaguugg

SEQ ID NO: 136301 - RNA, 27 nt, Artificial Sequence
  Description of Artificial Sequence: Synthetic oligonucleotide
uccggccucaugaugucaugcaaggcu

SEQ ID NO: 136302 - RNA, 27 nt, Artificial Sequence
  Description of Artificial Sequence: Synthetic oligonucleotide
acaaaugcagucauauacaaauucagg

SEQ ID NO: 136303 - RNA, 27 nt, Artificial Sequence
  Description of Artificial Sequence: Synthetic oligonucleotide
gguaguaaacauucuacuaggauucuu

SEQ ID NO: 136304 - RNA, 27 nt, Artificial Sequence
  Description of Artificial Sequence: Synthetic oligonucleotide
uuucaucaaaaaauucuucccuuucug

SEQ ID NO: 136305 - RNA, 27 nt, Artificial Sequence
  Description of Artificial Sequence: Synthetic oligonucleotide
aaauucacacacuggcaugccgauagc

SEQ ID NO: 136306 - RNA, 27 nt, Artificial Sequence
  Description of Artificial Sequence: Synthetic oligonucleotide
acauacauugcucuacuaugaggugaa

SEQ ID NO: 136307 - RNA, 27 nt, Artificial Sequence
  Description of Artificial Sequence: Synthetic oligonucleotide
uauauaugugcuuuggcaauucuggug

SEQ ID NO: 136308 - RNA, 27 nt, Artificial Sequence
  Description of Artificial Sequence: Synthetic oligonucleotide
ggagaaacuauuacccagaucaccacu

SEQ ID NO: 136309 - RNA, 27 nt, Artificial Sequence
  Description of Artificial Sequence: Synthetic oligonucleotide
auuuggagaaacuauuacccagaucac

SEQ ID NO: 136310 - RNA, 27 nt, Artificial Sequence
  Description of Artificial Sequence: Synthetic oligonucleotide
uuucuaggaaguauucaucacauccac

SEQ ID NO: 136311 - RNA, 27 nt, Artificial Sequence
  Description of Artificial Sequence: Synthetic oligonucleotide
cauauaugguguagcuguggaaaugcg

SEQ ID NO: 136312 - RNA, 27 nt, Artificial Sequence
  Description of Artificial Sequence: Synthetic oligonucleotide
cuccauucauauaugguguagcugugg

SEQ ID NO: 136313 - RNA, 27 nt, Artificial Sequence
  Description of Artificial Sequence: Synthetic oligonucleotide
aucuucuucucguguaagaacugcagc

SEQ ID NO: 136314 - RNA, 27 nt, Artificial Sequence
  Description of Artificial Sequence: Synthetic oligonucleotide
ucccuguaaaugaucuucuucucgugu

SEQ ID NO: 136315 - RNA, 27 nt, Artificial Sequence
  Description of Artificial Sequence: Synthetic oligonucleotide
gucccuguaaaugaucuucuucucgug

SEQ ID NO: 136316 - RNA, 27 nt, Artificial Sequence
  Description of Artificial Sequence: Synthetic oligonucleotide
ucaggucccuguaaaugaucuucuucu

SEQ ID NO: 136317 - RNA, 27 nt, Artificial Sequence
  Description of Artificial Sequence: Synthetic oligonucleotide
gaugcagucaaacaccucuuccucugu

SEQ ID NO: 136318 - RNA, 27 nt, Artificial Sequence
  Description of Artificial Sequence: Synthetic oligonucleotide
cgaugcagucaaacaccucuuccucug

SEQ ID NO: 136319 - RNA, 27 nt, Artificial Sequence
  Description of Artificial Sequence: Synthetic oligonucleotide
cccugugaacucgcccucaaaguagcg

SEQ ID NO: 136320 - RNA, 27 nt, Artificial Sequence
  Description of Artificial Sequence: Synthetic oligonucleotide
ggacagaggugccaggagaugcccuca

SEQ ID NO: 136321 - RNA, 27 nt, Artificial Sequence
  Description of Artificial Sequence: Synthetic oligonucleotide
uuaaaaagacaaaccauaucacuccuu

SEQ ID NO: 136322 - RNA, 27 nt, Artificial Sequence
  Description of Artificial Sequence: Synthetic oligonucleotide
cuuaaaaagacaaaccauaucacuccu

SEQ ID NO: 136323 - RNA, 27 nt, Artificial Sequence
  Description of Artificial Sequence: Synthetic oligonucleotide
gacaaccuuuaggaucuuuacugcaac

SEQ ID NO: 136324 - RNA, 27 nt, Artificial Sequence
  Description of Artificial Sequence: Synthetic oligonucleotide
gucgacaaccuuuaggaucuuuacugc

SEQ ID NO: 136325 - RNA, 27 nt, Artificial Sequence
  Description of Artificial Sequence: Synthetic oligonucleotide
acaauugccagguuguccuuugucaug

SEQ ID NO: 136326 - RNA, 27 nt, Artificial Sequence
  Description of Artificial Sequence: Synthetic oligonucleotide
ccucgcaccacugggucacaauugcca

SEQ ID NO: 136327 - RNA, 27 nt, Artificial Sequence
  Description of Artificial Sequence: Synthetic oligonucleotide
auuucaugucucuauggaugauguucu

SEQ ID NO: 136328 - RNA, 27 nt, Artificial Sequence
  Description of Artificial Sequence: Synthetic oligonucleotide
uggagaaauauauuguuggauuucaug

SEQ ID NO: 136329 - RNA, 27 nt, Artificial Sequence
  Description of Artificial Sequence: Synthetic oligonucleotide
agccuucauggagaaauauauuguugg

SEQ ID NO: 136330 - RNA, 27 nt, Artificial Sequence
  Description of Artificial Sequence: Synthetic oligonucleotide
accacuccagcgugacuuuacuguugc

SEQ ID NO: 136331 - RNA, 27 nt, Artificial Sequence
  Description of Artificial Sequence: Synthetic oligonucleotide
ccucucuuccuuuacuuucuucacaca

SEQ ID NO: 136332 - RNA, 27 nt, Artificial Sequence
  Description of Artificial Sequence: Synthetic oligonucleotide
gcccgaugcaaggauggcucggaagcg

SEQ ID NO: 136333 - RNA, 27 nt, Artificial Sequence
  Description of Artificial Sequence: Synthetic oligonucleotide
cacaguaggauauucaaccuccauuuc

SEQ ID NO: 136334 - RNA, 27 nt, Artificial Sequence
  Description of Artificial Sequence: Synthetic oligonucleotide
uuacacaguaggauauucaaccuccau

SEQ ID NO: 136335 - RNA, 27 nt, Artificial Sequence
  Description of Artificial Sequence: Synthetic oligonucleotide
uacacuacaagggaaaacucaaaaucu

SEQ ID NO: 136336 - RNA, 27 nt, Artificial Sequence
  Description of Artificial Sequence: Synthetic oligonucleotide
caaucaacaaagaacaaacaggauaaa

SEQ ID NO: 136337 - RNA, 27 nt, Artificial Sequence
  Description of Artificial Sequence: Synthetic oligonucleotide
uuucaaucaacaaagaacaaacaggau

SEQ ID NO: 136338 - RNA, 27 nt, Artificial Sequence
  Description of Artificial Sequence: Synthetic oligonucleotide
auggaagaaaaagaaggcuguagagaa

SEQ ID NO: 136339 - RNA, 27 nt, Artificial Sequence
  Description of Artificial Sequence: Synthetic oligonucleotide
uagaaggaagauuagcuauggaagaaa

SEQ ID NO: 136340 - RNA, 27 nt, Artificial Sequence
  Description of Artificial Sequence: Synthetic oligonucleotide
augaagcauucaacaggaagauuauuu

SEQ ID NO: 136341 - RNA, 27 nt, Artificial Sequence
  Description of Artificial Sequence: Synthetic oligonucleotide
caugaagcauucaacaggaagauuauu

SEQ ID NO: 136342 - RNA, 27 nt, Artificial Sequence
  Description of Artificial Sequence: Synthetic oligonucleotide
ucaaaguagaauucaagucaugaagca

SEQ ID NO: 136343 - RNA, 27 nt, Artificial Sequence
  Description of Artificial Sequence: Synthetic oligonucleotide
gucuguaguugcuucucucccucuuag

SEQ ID NO: 136344 - RNA, 27 nt, Artificial Sequence
  Description of Artificial Sequence: Synthetic oligonucleotide
guugaccuuggucugguaggagacggc

SEQ ID NO: 136345 - RNA, 27 nt, Artificial Sequence
  Description of Artificial Sequence: Synthetic oligonucleotide
gucgagauagucgggccgauugaucuc

SEQ ID NO: 136346 - RNA, 27 nt, Artificial Sequence
  Description of Artificial Sequence: Synthetic oligonucleotide
guuugggaagguuggauguucguccuc

SEQ ID NO: 136347 - RNA, 27 nt, Artificial Sequence
  Description of Artificial Sequence: Synthetic oligonucleotide
aguucuaagcuuggguuccgacccuaa

SEQ ID NO: 136348 - RNA, 27 nt, Artificial Sequence
  Description of Artificial Sequence: Synthetic oligonucleotide
uuaaaguucuaagcuuggguuccgacc

SEQ ID NO: 136349 - RNA, 27 nt, Artificial Sequence
  Description of Artificial Sequence: Synthetic oligonucleotide
guugcuuaaaguucuaagcuuggguuc

SEQ ID NO: 136350 - RNA, 27 nt, Artificial Sequence
  Description of Artificial Sequence: Synthetic oligonucleotide
gugguggucuuguugcuuaaaguucua

SEQ ID NO: 136351 - RNA, 27 nt, Artificial Sequence
  Description of Artificial Sequence: Synthetic oligonucleotide
acuuuauuucucgccacugaauaguag

SEQ ID NO: 136352 - RNA, 27 nt, Artificial Sequence
  Description of Artificial Sequence: Synthetic oligonucleotide
aacuuuauuucucgccacugaauagua

SEQ ID NO: 136353 - RNA, 27 nt, Artificial Sequence
  Description of Artificial Sequence: Synthetic oligonucleotide
ggaucauuuccuguuaucuguguuugu

SEQ ID NO: 136354 - RNA, 27 nt, Artificial Sequence
  Description of Artificial Sequence: Synthetic oligonucleotide
guuucauuucuucucuuuucuuaaggc

SEQ ID NO: 136355 - RNA, 27 nt, Artificial Sequence
  Description of Artificial Sequence: Synthetic oligonucleotide
ggaggauggaaacacacuccuucaguu

SEQ ID NO: 136356 - RNA, 27 nt, Artificial Sequence
  Description of Artificial Sequence: Synthetic oligonucleotide
ucaaagauuuucagucccgcggugaca

SEQ ID NO: 136357 - RNA, 27 nt, Artificial Sequence
  Description of Artificial Sequence: Synthetic oligonucleotide
ccugaacggcacgcuuauuucugcugu

SEQ ID NO: 136358 - RNA, 27 nt, Artificial Sequence
  Description of Artificial Sequence: Synthetic oligonucleotide
cuucuggacccugaacggcacgcuuau

SEQ ID NO: 136359 - RNA, 27 nt, Artificial Sequence
  Description of Artificial Sequence: Synthetic oligonucleotide
caagcagucuugagugacuguuucuuc

SEQ ID NO: 136360 - RNA, 27 nt, Artificial Sequence
  Description of Artificial Sequence: Synthetic oligonucleotide
ccaaagacauggaccuucuuccucuga

SEQ ID NO: 136361 - RNA, 27 nt, Artificial Sequence
  Description of Artificial Sequence: Synthetic oligonucleotide
guguuucaggcauauuuugaauacauc

SEQ ID NO: 136362 - RNA, 27 nt, Artificial Sequence
  Description of Artificial Sequence: Synthetic oligonucleotide
gagguacagagaaagggaggaaaauag

SEQ ID NO: 136363 - RNA, 27 nt, Artificial Sequence
  Description of Artificial Sequence: Synthetic oligonucleotide
ucuugucuugcucuaucuuucuuuggu

SEQ ID NO: 136364 - RNA, 27 nt, Artificial Sequence
  Description of Artificial Sequence: Synthetic oligonucleotide
uuucuugucuugcucuaucuuucuuug

SEQ ID NO: 136365 - RNA, 27 nt, Artificial Sequence
  Description of Artificial Sequence: Synthetic oligonucleotide
ggaucuuguacaaacaaaugcuuucuc

SEQ ID NO: 136366 - RNA, 27 nt, Artificial Sequence
  Description of Artificial Sequence: Synthetic oligonucleotide
ucugcaaguacguucguuuaacucaag

SEQ ID NO: 136367 - RNA, 27 nt, Artificial Sequence
  Description of Artificial Sequence: Synthetic oligonucleotide
ucuguaucgaucguucuguaucagucu

SEQ ID NO: 136368 - RNA, 27 nt, Artificial Sequence
  Description of Artificial Sequence: Synthetic oligonucleotide
auuuauuuuuauauauauauaauauau

SEQ ID NO: 136369 - RNA, 27 nt, Artificial Sequence
  Description of Artificial Sequence: Synthetic oligonucleotide
auauuuauuuuuauauauauauaauau

SEQ ID NO: 136370 - RNA, 27 nt, Artificial Sequence
  Description of Artificial Sequence: Synthetic oligonucleotide
cacagcagucaaauacauccagugaag

SEQ ID NO: 136371 - RNA, 27 nt, Artificial Sequence
  Description of Artificial Sequence: Synthetic oligonucleotide
gucucucaucuccuccucuucccuguc

SEQ ID NO: 136372 - RNA, 27 nt, Artificial Sequence
  Description of Artificial Sequence: Synthetic oligonucleotide
ccaagugggacaaaaaaaagaucaugc

SEQ ID NO: 136373 - RNA, 14 nt, Artificial Sequence
  Description of Artificial Sequence: Synthetic oligonucleotide
guauuuugaugagg

SEQ ID NO: 136374 - RNA, 12 nt, Artificial Sequence
  Description of Artificial Sequence: Synthetic oligonucleotide
ggcccagaugau

SEQ ID NO: 136375 - RNA, 14 nt, Artificial Sequence
  Description of Artificial Sequence: Synthetic oligonucleotide
gggaagaaaacuau

SEQ ID NO: 136376 - RNA, 15 nt, Artificial Sequence
  Description of Artificial Sequence: Synthetic oligonucleotide
guuuuaauuuauuuc

SEQ ID NO: 136377 - RNA, 12 nt, Artificial Sequence
  Description of Artificial Sequence: Synthetic oligonucleotide
acguagggaaau

SEQ ID NO: 136378 - RNA, 12 nt, Artificial Sequence
  Description of Artificial Sequence: Synthetic oligonucleotide
ccaggguuuacc

SEQ ID NO: 136379 - RNA, 11 nt, Artificial Sequence
  Description of Artificial Sequence: Synthetic oligonucleotide
agcaagguuua

SEQ ID NO: 136380 - RNA, 12 nt, Artificial Sequence
  Description of Artificial Sequence: Synthetic oligonucleotide
uguauuauguug

SEQ ID NO: 136381 - RNA, 15 nt, Artificial Sequence
  Description of Artificial Sequence: Synthetic oligonucleotide
uuuuaaucuuuguga

SEQ ID NO: 136382 - RNA, 14 nt, Artificial Sequence
  Description of Artificial Sequence: Synthetic oligonucleotide
uuaaucuuugugac

SEQ ID NO: 136383 - RNA, 13 nt, Artificial Sequence
  Description of Artificial Sequence: Synthetic oligonucleotide
gcugcuuaugucu

SEQ ID NO: 136384 - RNA, 14 nt, Artificial Sequence
  Description of Artificial Sequence: Synthetic oligonucleotide
aaguguuucagaag

SEQ ID NO: 136385 - RNA, 13 nt, Artificial Sequence
  Description of Artificial Sequence: Synthetic oligonucleotide
gaccaucaauaag

SEQ ID NO: 136386 - RNA, 13 nt, Artificial Sequence
  Description of Artificial Sequence: Synthetic oligonucleotide
ccaucaauaagga

SEQ ID NO: 136387 - RNA, 14 nt, Artificial Sequence
  Description of Artificial Sequence: Synthetic oligonucleotide
ucaauaaggaagaa

SEQ ID NO: 136388 - RNA, 14 nt, Artificial Sequence
  Description of Artificial Sequence: Synthetic oligonucleotide
aauaaggaagaagc

SEQ ID NO: 136389 - RNA, 13 nt, Artificial Sequence
  Description of Artificial Sequence: Synthetic oligonucleotide
aggaagaagcccu

SEQ ID NO: 136390 - RNA, 13 nt, Artificial Sequence
  Description of Artificial Sequence: Synthetic oligonucleotide
gcauaacuaaagg

SEQ ID NO: 136391 - RNA, 14 nt, Artificial Sequence
  Description of Artificial Sequence: Synthetic oligonucleotide
cauaacuaaaggug

SEQ ID NO: 136392 - RNA, 12 nt, Artificial Sequence
  Description of Artificial Sequence: Synthetic oligonucleotide
cuacaucacgcc

SEQ ID NO: 136393 - RNA, 12 nt, Artificial Sequence
  Description of Artificial Sequence: Synthetic oligonucleotide
acuggauuuaag

SEQ ID NO: 136394 - RNA, 12 nt, Artificial Sequence
  Description of Artificial Sequence: Synthetic oligonucleotide
cuggauuuaagc

SEQ ID NO: 136395 - RNA, 13 nt, Artificial Sequence
  Description of Artificial Sequence: Synthetic oligonucleotide
gauuuaagcagag

SEQ ID NO: 136396 - RNA, 13 nt, Artificial Sequence
  Description of Artificial Sequence: Synthetic oligonucleotide
auuuaagcagagu

SEQ ID NO: 136397 - RNA, 13 nt, Artificial Sequence
  Description of Artificial Sequence: Synthetic oligonucleotide
uuaagcagaguuc

SEQ ID NO: 136398 - RNA, 13 nt, Artificial Sequence
  Description of Artificial Sequence: Synthetic oligonucleotide
uaagcagaguuca

SEQ ID NO: 136399 - RNA, 14 nt, Artificial Sequence
  Description of Artificial Sequence: Synthetic oligonucleotide
agcagaguucaaaa

SEQ ID NO: 136400 - RNA, 12 nt, Artificial Sequence
  Description of Artificial Sequence: Synthetic oligonucleotide
cucagggucuga

SEQ ID NO: 136401 - RNA, 13 nt, Artificial Sequence
  Description of Artificial Sequence: Synthetic oligonucleotide
caagcaacuacau

SEQ ID NO: 136402 - RNA, 12 nt, Artificial Sequence
  Description of Artificial Sequence: Synthetic oligonucleotide
aucaauggcagc

SEQ ID NO: 136403 - RNA, 11 nt, Artificial Sequence
  Description of Artificial Sequence: Synthetic oligonucleotide
uuccagcccac

SEQ ID NO: 136404 - RNA, 12 nt, Artificial Sequence
  Description of Artificial Sequence: Synthetic oligonucleotide
cagcugagaaug

SEQ ID NO: 136405 - RNA, 13 nt, Artificial Sequence
  Description of Artificial Sequence: Synthetic oligonucleotide
aacguaucuccua

SEQ ID NO: 136406 - RNA, 14 nt, Artificial Sequence
  Description of Artificial Sequence: Synthetic oligonucleotide
ccuaaaauaauuuc

SEQ ID NO: 136407 - RNA, 13 nt, Artificial Sequence
  Description of Artificial Sequence: Synthetic oligonucleotide
uggaagauucagc

SEQ ID NO: 136408 - RNA, 12 nt, Artificial Sequence
  Description of Artificial Sequence: Synthetic oligonucleotide
uuaaacucuccu

SEQ ID NO: 136409 - RNA, 12 nt, Artificial Sequence
  Description of Artificial Sequence: Synthetic oligonucleotide
cagccuacaguu

SEQ ID NO: 136410 - RNA, 13 nt, Artificial Sequence
  Description of Artificial Sequence: Synthetic oligonucleotide
guuauguucaguc

SEQ ID NO: 136411 - RNA, 13 nt, Artificial Sequence
  Description of Artificial Sequence: Synthetic oligonucleotide
cacauacaaaaug

SEQ ID NO: 136412 - RNA, 9 nt, Artificial Sequence
  Description of Artificial Sequence: Synthetic oligonucleotide
uccuuuugc

SEQ ID NO: 136413 - RNA, 12 nt, Artificial Sequence
  Description of Artificial Sequence: Synthetic oligonucleotide
ugaccugugaag

SEQ ID NO: 136414 - RNA, 12 nt, Artificial Sequence
  Description of Artificial Sequence: Synthetic oligonucleotide
cuaucucacaca

SEQ ID NO: 136415 - RNA, 13 nt, Artificial Sequence
  Description of Artificial Sequence: Synthetic oligonucleotide
uguccucaauugu

SEQ ID NO: 136416 - RNA, 12 nt, Artificial Sequence
  Description of Artificial Sequence: Synthetic oligonucleotide
aaaccguagcug

SEQ ID NO: 136417 - RNA, 12 nt, Artificial Sequence
  Description of Artificial Sequence: Synthetic oligonucleotide
uagcuggcaagc

SEQ ID NO: 136418 - RNA, 14 nt, Artificial Sequence
  Description of Artificial Sequence: Synthetic oligonucleotide
uuguaugguuaaaa

SEQ ID NO: 136419 - RNA, 14 nt, Artificial Sequence
  Description of Artificial Sequence: Synthetic oligonucleotide
ugguuaaaagaugg

SEQ ID NO: 136420 - RNA, 13 nt, Artificial Sequence
  Description of Artificial Sequence: Synthetic oligonucleotide
cagggaauuauac

SEQ ID NO: 136421 - RNA, 12 nt, Artificial Sequence
  Description of Artificial Sequence: Synthetic oligonucleotide
acaaucuugcug

SEQ ID NO: 136422 - RNA, 13 nt, Artificial Sequence
  Description of Artificial Sequence: Synthetic oligonucleotide
ccaauaaugaaga

SEQ ID NO: 136423 - RNA, 13 nt, Artificial Sequence
  Description of Artificial Sequence: Synthetic oligonucleotide
acuuuggauguuc

SEQ ID NO: 136424 - RNA, 12 nt, Artificial Sequence
  Description of Artificial Sequence: Synthetic oligonucleotide
aaugcuuccacu

SEQ ID NO: 136425 - RNA, 11 nt, Artificial Sequence
  Description of Artificial Sequence: Synthetic oligonucleotide
gagaaaguuug

SEQ ID NO: 136426 - RNA, 11 nt, Artificial Sequence
  Description of Artificial Sequence: Synthetic oligonucleotide
aaagaacuacu

SEQ ID NO: 136427 - RNA, 12 nt, Artificial Sequence
  Description of Artificial Sequence: Synthetic oligonucleotide
uuagaaauacgg

SEQ ID NO: 136428 - RNA, 12 nt, Artificial Sequence
  Description of Artificial Sequence: Synthetic oligonucleotide
aacauggguaca

SEQ ID NO: 136429 - RNA, 14 nt, Artificial Sequence
  Description of Artificial Sequence: Synthetic oligonucleotide
aaagacacagaaga

SEQ ID NO: 136430 - RNA, 11 nt, Artificial Sequence
  Description of Artificial Sequence: Synthetic oligonucleotide
uaguagggagg

SEQ ID NO: 136431 - RNA, 12 nt, Artificial Sequence
  Description of Artificial Sequence: Synthetic oligonucleotide
gccuucugcagc

SEQ ID NO: 136432 - RNA, 10 nt, Artificial Sequence
  Description of Artificial Sequence: Synthetic oligonucleotide
ggucugguac

SEQ ID NO: 136433 - RNA, 12 nt, Artificial Sequence
  Description of Artificial Sequence: Synthetic oligonucleotide
cuaguccuuccg

SEQ ID NO: 136434 - RNA, 12 nt, Artificial Sequence
  Description of Artificial Sequence: Synthetic oligonucleotide
ccagugaauauu

SEQ ID NO: 136435 - RNA, 13 nt, Artificial Sequence
  Description of Artificial Sequence: Synthetic oligonucleotide
augaauucaaguu

SEQ ID NO: 136436 - RNA, 12 nt, Artificial Sequence
  Description of Artificial Sequence: Synthetic oligonucleotide
caggacacagau

SEQ ID NO: 136437 - RNA, 12 nt, Artificial Sequence
  Description of Artificial Sequence: Synthetic oligonucleotide
cucaaagcacag

SEQ ID NO: 136438 - RNA, 10 nt, Artificial Sequence
  Description of Artificial Sequence: Synthetic oligonucleotide
accacugcca

SEQ ID NO: 136439 - RNA, 13 nt, Artificial Sequence
  Description of Artificial Sequence: Synthetic oligonucleotide
gaaacuacuagug

SEQ ID NO: 136440 - RNA, 12 nt, Artificial Sequence
  Description of Artificial Sequence: Synthetic oligonucleotide
aagucggacagc

SEQ ID NO: 136441 - RNA, 13 nt, Artificial Sequence
  Description of Artificial Sequence: Synthetic oligonucleotide
gaaagcgaaaaau

SEQ ID NO: 136442 - RNA, 13 nt, Artificial Sequence
  Description of Artificial Sequence: Synthetic oligonucleotide
cccucugauuuag

SEQ ID NO: 136443 - RNA, 12 nt, Artificial Sequence
  Description of Artificial Sequence: Synthetic oligonucleotide
ugagcuauuuaa

SEQ ID NO: 136444 - RNA, 13 nt, Artificial Sequence
  Description of Artificial Sequence: Synthetic oligonucleotide
aaaaggugaaaaa

SEQ ID NO: 136445 - RNA, 14 nt, Artificial Sequence
  Description of Artificial Sequence: Synthetic oligonucleotide
gaaaaagcacuauu

SEQ ID NO: 136446 - RNA, 12 nt, Artificial Sequence
  Description of Artificial Sequence: Synthetic oligonucleotide
ggcugaaaagaa

SEQ ID NO: 136447 - RNA, 12 nt, Artificial Sequence
  Description of Artificial Sequence: Synthetic oligonucleotide
uaaacccuuaua

SEQ ID NO: 136448 - RNA, 13 nt, Artificial Sequence
  Description of Artificial Sequence: Synthetic oligonucleotide
cauacuauuagcc

SEQ ID NO: 136449 - RNA, 12 nt, Artificial Sequence
  Description of Artificial Sequence: Synthetic oligonucleotide
gacagaagcauu

SEQ ID NO: 136450 - RNA, 14 nt, Artificial Sequence
  Description of Artificial Sequence: Synthetic oligonucleotide
agagcaaauaagau

SEQ ID NO: 136451 - RNA, 14 nt, Artificial Sequence
  Description of Artificial Sequence: Synthetic oligonucleotide
ccaacauuuuucuc

SEQ ID NO: 136452 - RNA, 15 nt, Artificial Sequence
  Description of Artificial Sequence: Synthetic oligonucleotide
uuaaguaugagaaaa

SEQ ID NO: 136453 - RNA, 14 nt, Artificial Sequence
  Description of Artificial Sequence: Synthetic oligonucleotide
caggaauaaagaug

SEQ ID NO: 136454 - RNA, 13 nt, Artificial Sequence
  Description of Artificial Sequence: Synthetic oligonucleotide
aauuugaaugacc

SEQ ID NO: 136455 - RNA, 14 nt, Artificial Sequence
  Description of Artificial Sequence: Synthetic oligonucleotide
auguauaaagauag

SEQ ID NO: 136456 - RNA, 12 nt, Artificial Sequence
  Description of Artificial Sequence: Synthetic oligonucleotide
ggcuguaacuau

SEQ ID NO: 136457 - RNA, 11 nt, Artificial Sequence
  Description of Artificial Sequence: Synthetic oligonucleotide
ucugugaagug

SEQ ID NO: 136458 - RNA, 14 nt, Artificial Sequence
  Description of Artificial Sequence: Synthetic oligonucleotide
ccuuuaaggaaaug

SEQ ID NO: 136459 - RNA, 13 nt, Artificial Sequence
  Description of Artificial Sequence: Synthetic oligonucleotide
aaggauacaaaaa

SEQ ID NO: 136460 - RNA, 12 nt, Artificial Sequence
  Description of Artificial Sequence: Synthetic oligonucleotide
agaugcaauuug

SEQ ID NO: 136461 - RNA, 12 nt, Artificial Sequence
  Description of Artificial Sequence: Synthetic oligonucleotide
guucaaaacgaa

SEQ ID NO: 136462 - RNA, 11 nt, Artificial Sequence
  Description of Artificial Sequence: Synthetic oligonucleotide
gugaaaccuca

SEQ ID NO: 136463 - RNA, 13 nt, Artificial Sequence
  Description of Artificial Sequence: Synthetic oligonucleotide
acgaaagagaagc

SEQ ID NO: 136464 - RNA, 12 nt, Artificial Sequence
  Description of Artificial Sequence: Synthetic oligonucleotide
cuccacaagcgc

SEQ ID NO: 136465 - RNA, 14 nt, Artificial Sequence
  Description of Artificial Sequence: Synthetic oligonucleotide
gagaagauuccaaa

SEQ ID NO: 136466 - RNA, 13 nt, Artificial Sequence
  Description of Artificial Sequence: Synthetic oligonucleotide
aaucuggauucaa

SEQ ID NO: 136467 - RNA, 13 nt, Artificial Sequence
  Description of Artificial Sequence: Synthetic oligonucleotide
agaacagauuuga

SEQ ID NO: 136468 - RNA, 11 nt, Artificial Sequence
  Description of Artificial Sequence: Synthetic oligonucleotide
ccagagcugug

SEQ ID NO: 136469 - RNA, 12 nt, Artificial Sequence
  Description of Artificial Sequence: Synthetic oligonucleotide
ccucagauuguu

SEQ ID NO: 136470 - RNA, 12 nt, Artificial Sequence
  Description of Artificial Sequence: Synthetic oligonucleotide
cuauuuuaauua

SEQ ID NO: 136471 - RNA, 13 nt, Artificial Sequence
  Description of Artificial Sequence: Synthetic oligonucleotide
uuuaauuuauuaa

SEQ ID NO: 136472 - RNA, 12 nt, Artificial Sequence
  Description of Artificial Sequence: Synthetic oligonucleotide
augcaguuugaa

SEQ ID NO: 136473 - RNA, 11 nt, Artificial Sequence
  Description of Artificial Sequence: Synthetic oligonucleotide
caugcugcugg

SEQ ID NO: 136474 - RNA, 13 nt, Artificial Sequence
  Description of Artificial Sequence: Synthetic oligonucleotide
agaugugcauuuc

SEQ ID NO: 136475 - RNA, 12 nt, Artificial Sequence
  Description of Artificial Sequence: Synthetic oligonucleotide
ucaaaaccugug

SEQ ID NO: 136476 - RNA, 11 nt, Artificial Sequence
  Description of Artificial Sequence: Synthetic oligonucleotide
gaaugugggua

SEQ ID NO: 136477 - RNA, 10 nt, Artificial Sequence
  Description of Artificial Sequence: Synthetic oligonucleotide
auguggguag

SEQ ID NO: 136478 - RNA, 13 nt, Artificial Sequence
  Description of Artificial Sequence: Synthetic oligonucleotide
ugaaaaugagcau

SEQ ID NO: 136479 - RNA, 13 nt, Artificial Sequence
  Description of Artificial Sequence: Synthetic oligonucleotide
uugcuuuucaugu

SEQ ID NO: 136480 - RNA, 12 nt, Artificial Sequence
  Description of Artificial Sequence: Synthetic oligonucleotide
uguauuucuaua

SEQ ID NO: 136481 - RNA, 13 nt, Artificial Sequence
  Description of Artificial Sequence: Synthetic oligonucleotide
uuugauuaauguu

SEQ ID NO: 136482 - RNA, 12 nt, Artificial Sequence
  Description of Artificial Sequence: Synthetic oligonucleotide
caacguguauag

SEQ ID NO: 136483 - RNA, 12 nt, Artificial Sequence
  Description of Artificial Sequence: Synthetic oligonucleotide
cauauccuuggc

SEQ ID NO: 136484 - RNA, 13 nt, Artificial Sequence
  Description of Artificial Sequence: Synthetic oligonucleotide
uacuaacaucugg

SEQ ID NO: 136485 - RNA, 11 nt, Artificial Sequence
  Description of Artificial Sequence: Synthetic oligonucleotide
cauaaguugug

SEQ ID NO: 136486 - RNA, 12 nt, Artificial Sequence
  Description of Artificial Sequence: Synthetic oligonucleotide
gcaucauuuugg

SEQ ID NO: 136487 - RNA, 10 nt, Artificial Sequence
  Description of Artificial Sequence: Synthetic oligonucleotide
gcucuucuua

SEQ ID NO: 136488 - RNA, 10 nt, Artificial Sequence
  Description of Artificial Sequence: Synthetic oligonucleotide
agauuagguc

SEQ ID NO: 136489 - RNA, 12 nt, Artificial Sequence
  Description of Artificial Sequence: Synthetic oligonucleotide
auggaauugaaa

SEQ ID NO: 136490 - RNA, 13 nt, Artificial Sequence
  Description of Artificial Sequence: Synthetic oligonucleotide
cacacucauuccu

SEQ ID NO: 136491 - RNA, 12 nt, Artificial Sequence
  Description of Artificial Sequence: Synthetic oligonucleotide
uguagagguaac

SEQ ID NO: 136492 - RNA, 11 nt, Artificial Sequence
  Description of Artificial Sequence: Synthetic oligonucleotide
caaccacaugc

SEQ ID NO: 136493 - RNA, 12 nt, Artificial Sequence
  Description of Artificial Sequence: Synthetic oligonucleotide
ucggaaacaagu

SEQ ID NO: 136494 - RNA, 11 nt, Artificial Sequence
  Description of Artificial Sequence: Synthetic oligonucleotide
acucccaauaa

SEQ ID NO: 136495 - RNA, 13 nt, Artificial Sequence
  Description of Artificial Sequence: Synthetic oligonucleotide
aaugcuaagaaau

SEQ ID NO: 136496 - RNA, 11 nt, Artificial Sequence
  Description of Artificial Sequence: Synthetic oligonucleotide
gucuuucucua

SEQ ID NO: 136497 - RNA, 11 nt, Artificial Sequence
  Description of Artificial Sequence: Synthetic oligonucleotide
ugaauuucagg

SEQ ID NO: 136498 - RNA, 13 nt, Artificial Sequence
  Description of Artificial Sequence: Synthetic oligonucleotide
cgauucccucuca

SEQ ID NO: 136499 - RNA, 11 nt, Artificial Sequence
  Description of Artificial Sequence: Synthetic oligonucleotide
aggaaagugaa

SEQ ID NO: 136500 - RNA, 12 nt, Artificial Sequence
  Description of Artificial Sequence: Synthetic oligonucleotide
gaggcugcaugc

SEQ ID NO: 136501 - RNA, 11 nt, Artificial Sequence
  Description of Artificial Sequence: Synthetic oligonucleotide
ucucugaacag

SEQ ID NO: 136502 - RNA, 12 nt, Artificial Sequence
  Description of Artificial Sequence: Synthetic oligonucleotide
aacuuggcugua

SEQ ID NO: 136503 - RNA, 12 nt, Artificial Sequence
  Description of Artificial Sequence: Synthetic oligonucleotide
agaagccaaaau

SEQ ID NO: 136504 - RNA, 14 nt, Artificial Sequence
  Description of Artificial Sequence: Synthetic oligonucleotide
auuaaaagaagucc

SEQ ID NO: 136505 - RNA, 14 nt, Artificial Sequence
  Description of Artificial Sequence: Synthetic oligonucleotide
gaauccggauuauc

SEQ ID NO: 136506 - RNA, 12 nt, Artificial Sequence
  Description of Artificial Sequence: Synthetic oligonucleotide
aaugugacauca

SEQ ID NO: 136507 - RNA, 13 nt, Artificial Sequence
  Description of Artificial Sequence: Synthetic oligonucleotide
caucaaagcaagu

SEQ ID NO: 136508 - RNA, 11 nt, Artificial Sequence
  Description of Artificial Sequence: Synthetic oligonucleotide
agagagagaaa

SEQ ID NO: 136509 - RNA, 13 nt, Artificial Sequence
  Description of Artificial Sequence: Synthetic oligonucleotide
ucgcuguaguauu

SEQ ID NO: 136510 - RNA, 14 nt, Artificial Sequence
  Description of Artificial Sequence: Synthetic oligonucleotide
cgcuguaguauuua

SEQ ID NO: 136511 - RNA, 13 nt, Artificial Sequence
  Description of Artificial Sequence: Synthetic oligonucleotide
auuuaagcccaua

SEQ ID NO: 136512 - RNA, 15 nt, Artificial Sequence
  Description of Artificial Sequence: Synthetic oligonucleotide
auuaaaauaaacaug

SEQ ID NO: 136513 - RNA, 12 nt, Artificial Sequence
  Description of Artificial Sequence: Synthetic oligonucleotide
cuguucugaucg

SEQ ID NO: 136514 - RNA, 16 nt, Artificial Sequence
  Description of Artificial Sequence: Synthetic oligonucleotide
aaauaauuugaacuuu

SEQ ID NO: 136515 - RNA, 12 nt, Artificial Sequence
  Description of Artificial Sequence: Synthetic oligonucleotide
ugcgaccuuaau

SEQ ID NO: 136516 - RNA, 11 nt, Artificial Sequence
  Description of Artificial Sequence: Synthetic oligonucleotide
cugagaaagcu

SEQ ID NO: 136517 - RNA, 13 nt, Artificial Sequence
  Description of Artificial Sequence: Synthetic oligonucleotide
aguaaagaugcua

SEQ ID NO: 136518 - RNA, 12 nt, Artificial Sequence
  Description of Artificial Sequence: Synthetic oligonucleotide
cugcuuaauugc

SEQ ID NO: 136519 - RNA, 14 nt, Artificial Sequence
  Description of Artificial Sequence: Synthetic oligonucleotide
uaccauaugaauga

SEQ ID NO: 136520 - RNA, 12 nt, Artificial Sequence
  Description of Artificial Sequence: Synthetic oligonucleotide
aacuuucuuauc

SEQ ID NO: 136521 - RNA, 13 nt, Artificial Sequence
  Description of Artificial Sequence: Synthetic oligonucleotide
ccuugcaugacau

SEQ ID NO: 136522 - RNA, 14 nt, Artificial Sequence
  Description of Artificial Sequence: Synthetic oligonucleotide
ugaauuuguauaug

SEQ ID NO: 136523 - RNA, 12 nt, Artificial Sequence
  Description of Artificial Sequence: Synthetic oligonucleotide
gaauccuaguag

SEQ ID NO: 136524 - RNA, 10 nt, Artificial Sequence
  Description of Artificial Sequence: Synthetic oligonucleotide
gaaagggaag

SEQ ID NO: 136525 - RNA, 11 nt, Artificial Sequence
  Description of Artificial Sequence: Synthetic oligonucleotide
uaucggcaugc

SEQ ID NO: 136526 - RNA, 12 nt, Artificial Sequence
  Description of Artificial Sequence: Synthetic oligonucleotide
caccucauagua

SEQ ID NO: 136527 - RNA, 11 nt, Artificial Sequence
  Description of Artificial Sequence: Synthetic oligonucleotide
ccagaauugcc

SEQ ID NO: 136528 - RNA, 11 nt, Artificial Sequence
  Description of Artificial Sequence: Synthetic oligonucleotide
uggugaucugg

SEQ ID NO: 136529 - RNA, 12 nt, Artificial Sequence
  Description of Artificial Sequence: Synthetic oligonucleotide
gaucuggguaau

SEQ ID NO: 136530 - RNA, 12 nt, Artificial Sequence
  Description of Artificial Sequence: Synthetic oligonucleotide
ggaugugaugaa

SEQ ID NO: 136531 - RNA, 12 nt, Artificial Sequence
  Description of Artificial Sequence: Synthetic oligonucleotide
cauuuccacagc

SEQ ID NO: 136532 - RNA, 11 nt, Artificial Sequence
  Description of Artificial Sequence: Synthetic oligonucleotide
acagcuacacc

SEQ ID NO: 136533 - RNA, 12 nt, Artificial Sequence
  Description of Artificial Sequence: Synthetic oligonucleotide
ugcaguucuuac

SEQ ID NO: 136534 - RNA, 12 nt, Artificial Sequence
  Description of Artificial Sequence: Synthetic oligonucleotide
acgagaagaaga

SEQ ID NO: 136535 - RNA, 12 nt, Artificial Sequence
  Description of Artificial Sequence: Synthetic oligonucleotide
cgagaagaagau

SEQ ID NO: 136536 - RNA, 15 nt, Artificial Sequence
  Description of Artificial Sequence: Synthetic oligonucleotide
aagaagaucauuuac

SEQ ID NO: 136537 - RNA, 11 nt, Artificial Sequence
  Description of Artificial Sequence: Synthetic oligonucleotide
agaggaagagg

SEQ ID NO: 136538 - RNA, 12 nt, Artificial Sequence
  Description of Artificial Sequence: Synthetic oligonucleotide
gaggaagaggug

SEQ ID NO: 136539 - RNA, 13 nt, Artificial Sequence
  Description of Artificial Sequence: Synthetic oligonucleotide
cuacuuugagggc

SEQ ID NO: 136540 - RNA, 12 nt, Artificial Sequence
  Description of Artificial Sequence: Synthetic oligonucleotide
agggcaucuccu

SEQ ID NO: 136541 - RNA, 10 nt, Artificial Sequence
  Description of Artificial Sequence: Synthetic oligonucleotide
ggagugauau

SEQ ID NO: 136542 - RNA, 11 nt, Artificial Sequence
  Description of Artificial Sequence: Synthetic oligonucleotide
gagugauaugg

SEQ ID NO: 136543 - RNA, 12 nt, Artificial Sequence
  Description of Artificial Sequence: Synthetic oligonucleotide
ugcaguaaagau

SEQ ID NO: 136544 - RNA, 13 nt, Artificial Sequence
  Description of Artificial Sequence: Synthetic oligonucleotide
aguaaagauccua

SEQ ID NO: 136545 - RNA, 12 nt, Artificial Sequence
  Description of Artificial Sequence: Synthetic oligonucleotide
ugacaaaggaca

SEQ ID NO: 136546 - RNA, 13 nt, Artificial Sequence
  Description of Artificial Sequence: Synthetic oligonucleotide
gcaauugugaccc

SEQ ID NO: 136547 - RNA, 12 nt, Artificial Sequence
  Description of Artificial Sequence: Synthetic oligonucleotide
aacaucauccau

SEQ ID NO: 136548 - RNA, 12 nt, Artificial Sequence
  Description of Artificial Sequence: Synthetic oligonucleotide
ugaaauccaaca

SEQ ID NO: 136549 - RNA, 15 nt, Artificial Sequence
  Description of Artificial Sequence: Synthetic oligonucleotide
aacaauauauuucuc

SEQ ID NO: 136550 - RNA, 14 nt, Artificial Sequence
  Description of Artificial Sequence: Synthetic oligonucleotide
aacaguaaagucac

SEQ ID NO: 136551 - RNA, 14 nt, Artificial Sequence
  Description of Artificial Sequence: Synthetic oligonucleotide
ugugaagaaaguaa

SEQ ID NO: 136552 - RNA, 13 nt, Artificial Sequence
  Description of Artificial Sequence: Synthetic oligonucleotide
cuuccgagccauc

SEQ ID NO: 136553 - RNA, 12 nt, Artificial Sequence
  Description of Artificial Sequence: Synthetic oligonucleotide
aauggagguuga

SEQ ID NO: 136554 - RNA, 12 nt, Artificial Sequence
  Description of Artificial Sequence: Synthetic oligonucleotide
ggagguugaaua

SEQ ID NO: 136555 - RNA, 13 nt, Artificial Sequence
  Description of Artificial Sequence: Synthetic oligonucleotide
auuuugaguuuuc

SEQ ID NO: 136556 - RNA, 12 nt, Artificial Sequence
  Description of Artificial Sequence: Synthetic oligonucleotide
uauccuguuugu

SEQ ID NO: 136557 - RNA, 11 nt, Artificial Sequence
  Description of Artificial Sequence: Synthetic oligonucleotide
ccuguuuguuc

SEQ ID NO: 136558 - RNA, 10 nt, Artificial Sequence
  Description of Artificial Sequence: Synthetic oligonucleotide
cucuacagcc

SEQ ID NO: 136559 - RNA, 12 nt, Artificial Sequence
  Description of Artificial Sequence: Synthetic oligonucleotide
ucuuccauagcu

SEQ ID NO: 136560 - RNA, 12 nt, Artificial Sequence
  Description of Artificial Sequence: Synthetic oligonucleotide
auaaucuuccug

SEQ ID NO: 136561 - RNA, 12 nt, Artificial Sequence
  Description of Artificial Sequence: Synthetic oligonucleotide
uaaucuuccugu

SEQ ID NO: 136562 - RNA, 12 nt, Artificial Sequence
  Description of Artificial Sequence: Synthetic oligonucleotide
cuucaugacuug

SEQ ID NO: 136563 - RNA, 12 nt, Artificial Sequence
  Description of Artificial Sequence: Synthetic oligonucleotide
aagagggagaga

SEQ ID NO: 136564 - RNA, 12 nt, Artificial Sequence
  Description of Artificial Sequence: Synthetic oligonucleotide
cgucuccuacca

SEQ ID NO: 136565 - RNA, 12 nt, Artificial Sequence
  Description of Artificial Sequence: Synthetic oligonucleotide
gaucaaucggcc

SEQ ID NO: 136566 - RNA, 12 nt, Artificial Sequence
  Description of Artificial Sequence: Synthetic oligonucleotide
ggacgaacaucc

SEQ ID NO: 136567 - RNA, 11 nt, Artificial Sequence
  Description of Artificial Sequence: Synthetic oligonucleotide
agggucggaac

SEQ ID NO: 136568 - RNA, 10 nt, Artificial Sequence
  Description of Artificial Sequence: Synthetic oligonucleotide
ucggaaccca

SEQ ID NO: 136569 - RNA, 11 nt, Artificial Sequence
  Description of Artificial Sequence: Synthetic oligonucleotide
acccaagcuua

SEQ ID NO: 136570 - RNA, 14 nt, Artificial Sequence
  Description of Artificial Sequence: Synthetic oligonucleotide
gaacuuuaagcaac

SEQ ID NO: 136571 - RNA, 11 nt, Artificial Sequence
  Description of Artificial Sequence: Synthetic oligonucleotide
acuauucagug

SEQ ID NO: 136572 - RNA, 11 nt, Artificial Sequence
  Description of Artificial Sequence: Synthetic oligonucleotide
cuauucagugg

SEQ ID NO: 136573 - RNA, 13 nt, Artificial Sequence
  Description of Artificial Sequence: Synthetic oligonucleotide
aaacacagauaac

SEQ ID NO: 136574 - RNA, 12 nt, Artificial Sequence
  Description of Artificial Sequence: Synthetic oligonucleotide
cuuaagaaaaga

SEQ ID NO: 136575 - RNA, 12 nt, Artificial Sequence
  Description of Artificial Sequence: Synthetic oligonucleotide
cugaaggagugu

SEQ ID NO: 136576 - RNA, 10 nt, Artificial Sequence
  Description of Artificial Sequence: Synthetic oligonucleotide
ucaccgcggg

SEQ ID NO: 136577 - RNA, 14 nt, Artificial Sequence
  Description of Artificial Sequence: Synthetic oligonucleotide
agcagaaauaagcg

SEQ ID NO: 136578 - RNA, 12 nt, Artificial Sequence
  Description of Artificial Sequence: Synthetic oligonucleotide
aagcgugccguu

SEQ ID NO: 136579 - RNA, 12 nt, Artificial Sequence
  Description of Artificial Sequence: Synthetic oligonucleotide
agaaacagucac

SEQ ID NO: 136580 - RNA, 12 nt, Artificial Sequence
  Description of Artificial Sequence: Synthetic oligonucleotide
agaggaagaagg

SEQ ID NO: 136581 - RNA, 14 nt, Artificial Sequence
  Description of Artificial Sequence: Synthetic oligonucleotide
uguauucaaaauau

SEQ ID NO: 136582 - RNA, 13 nt, Artificial Sequence
  Description of Artificial Sequence: Synthetic oligonucleotide
auuuuccucccuu

SEQ ID NO: 136583 - RNA, 13 nt, Artificial Sequence
  Description of Artificial Sequence: Synthetic oligonucleotide
caaagaaagauag

SEQ ID NO: 136584 - RNA, 12 nt, Artificial Sequence
  Description of Artificial Sequence: Synthetic oligonucleotide
aagaaagauaga

SEQ ID NO: 136585 - RNA, 13 nt, Artificial Sequence
  Description of Artificial Sequence: Synthetic oligonucleotide
gaaagcauuuguu

SEQ ID NO: 136586 - RNA, 13 nt, Artificial Sequence
  Description of Artificial Sequence: Synthetic oligonucleotide
ugaguuaaacgaa

SEQ ID NO: 136587 - RNA, 12 nt, Artificial Sequence
  Description of Artificial Sequence: Synthetic oligonucleotide
acugauacagaa

SEQ ID NO: 136588 - RNA, 12 nt, Artificial Sequence
  Description of Artificial Sequence: Synthetic oligonucleotide
auauuauauaua

SEQ ID NO: 136589 - RNA, 12 nt, Artificial Sequence
  Description of Artificial Sequence: Synthetic oligonucleotide
auuauauauaua

SEQ ID NO: 136590 - RNA, 12 nt, Artificial Sequence
  Description of Artificial Sequence: Synthetic oligonucleotide
ucacuggaugua

SEQ ID NO: 136591 - RNA, 12 nt, Artificial Sequence
  Description of Artificial Sequence: Synthetic oligonucleotide
cagggaagagga

SEQ ID NO: 136592 - RNA, 15 nt, Artificial Sequence
  Description of Artificial Sequence: Synthetic oligonucleotide
augaucuuuuuuuug

SEQ ID NO: 136593 - RNA, 11 nt, Artificial Sequence
  Description of Artificial Sequence: Synthetic oligonucleotide
aguucacggcc

SEQ ID NO: 136594 - RNA, 13 nt, Artificial Sequence
  Description of Artificial Sequence: Synthetic oligonucleotide
caccaucacacca

SEQ ID NO: 136595 - RNA, 11 nt, Artificial Sequence
  Description of Artificial Sequence: Synthetic oligonucleotide
ccugcggguuu

SEQ ID NO: 136596 - RNA, 10 nt, Artificial Sequence
  Description of Artificial Sequence: Synthetic oligonucleotide
auccaguuug

SEQ ID NO: 136597 - RNA, 13 nt, Artificial Sequence
  Description of Artificial Sequence: Synthetic oligonucleotide
guuaaggacuucu

SEQ ID NO: 136598 - RNA, 13 nt, Artificial Sequence
  Description of Artificial Sequence: Synthetic oligonucleotide
cagugggacagag

SEQ ID NO: 136599 - RNA, 14 nt, Artificial Sequence
  Description of Artificial Sequence: Synthetic oligonucleotide
aauuuguuauugug

SEQ ID NO: 136600 - RNA, 13 nt, Artificial Sequence
  Description of Artificial Sequence: Synthetic oligonucleotide
uucaaaugcauuu

SEQ ID NO: 136601 - RNA, 10 nt, Artificial Sequence
  Description of Artificial Sequence: Synthetic oligonucleotide
caggaaagcc

SEQ ID NO: 136602 - RNA, 11 nt, Artificial Sequence
  Description of Artificial Sequence: Synthetic oligonucleotide
aggaaagcccu

SEQ ID NO: 136603 - RNA, 12 nt, Artificial Sequence
  Description of Artificial Sequence: Synthetic oligonucleotide
cccagcauggcc

SEQ ID NO: 136604 - RNA, 11 nt, Artificial Sequence
  Description of Artificial Sequence: Synthetic oligonucleotide
cuucucccuga

SEQ ID NO: 136605 - RNA, 12 nt, Artificial Sequence
  Description of Artificial Sequence: Synthetic oligonucleotide
gaagaagcccuu

SEQ ID NO: 136606 - RNA, 12 nt, Artificial Sequence
  Description of Artificial Sequence: Synthetic oligonucleotide
agaagcccuuca

SEQ ID NO: 136607 - RNA, 11 nt, Artificial Sequence
  Description of Artificial Sequence: Synthetic oligonucleotide
gcccuucagcg

SEQ ID NO: 136608 - RNA, 11 nt, Artificial Sequence
  Description of Artificial Sequence: Synthetic oligonucleotide
ccuucagcggc

SEQ ID NO: 136609 - RNA, 12 nt, Artificial Sequence
  Description of Artificial Sequence: Synthetic oligonucleotide
ucagcggccagu

SEQ ID NO: 136610 - RNA, 12 nt, Artificial Sequence
  Description of Artificial Sequence: Synthetic oligonucleotide
ugaaaagcuccg

SEQ ID NO: 136611 - RNA, 11 nt, Artificial Sequence
  Description of Artificial Sequence: Synthetic oligonucleotide
aaaagcuccgg

SEQ ID NO: 136612 - RNA, 13 nt, Artificial Sequence
  Description of Artificial Sequence: Synthetic oligonucleotide
agucaacagucug

SEQ ID NO: 136613 - RNA, 13 nt, Artificial Sequence
  Description of Artificial Sequence: Synthetic oligonucleotide
cagaguucaaaag

SEQ ID NO: 136614 - RNA, 13 nt, Artificial Sequence
  Description of Artificial Sequence: Synthetic oligonucleotide
agaguucaaaagc

SEQ ID NO: 136615 - RNA, 12 nt, Artificial Sequence
  Description of Artificial Sequence: Synthetic oligonucleotide
uucaaaagcccu

SEQ ID NO: 136616 - RNA, 12 nt, Artificial Sequence
  Description of Artificial Sequence: Synthetic oligonucleotide
ucaaaagcccuu

SEQ ID NO: 136617 - RNA, 12 nt, Artificial Sequence
  Description of Artificial Sequence: Synthetic oligonucleotide
aaaagcccuuca

SEQ ID NO: 136618 - RNA, 12 nt, Artificial Sequence
  Description of Artificial Sequence: Synthetic oligonucleotide
aaagcccuucag

SEQ ID NO: 136619 - RNA, 13 nt, Artificial Sequence
  Description of Artificial Sequence: Synthetic oligonucleotide
gugaagccgcucg

SEQ ID NO: 136620 - RNA, 12 nt, Artificial Sequence
  Description of Artificial Sequence: Synthetic oligonucleotide
cacgccagucaa

SEQ ID NO: 136621 - RNA, 13 nt, Artificial Sequence
  Description of Artificial Sequence: Synthetic oligonucleotide
uucuuggugcgug

SEQ ID NO: 136622 - RNA, 14 nt, Artificial Sequence
  Description of Artificial Sequence: Synthetic oligonucleotide
auuggauucaucag

SEQ ID NO: 136623 - RNA, 13 nt, Artificial Sequence
  Description of Artificial Sequence: Synthetic oligonucleotide
uggaauaccuaag

SEQ ID NO: 136624 - RNA, 12 nt, Artificial Sequence
  Description of Artificial Sequence: Synthetic oligonucleotide
auuugaggcuca

SEQ ID NO: 136625 - RNA, 11 nt, Artificial Sequence
  Description of Artificial Sequence: Synthetic oligonucleotide
ucuacaauugg

SEQ ID NO: 136626 - RNA, 12 nt, Artificial Sequence
  Description of Artificial Sequence: Synthetic oligonucleotide
uaguuaggagcc

SEQ ID NO: 136627 - RNA, 13 nt, Artificial Sequence
  Description of Artificial Sequence: Synthetic oligonucleotide
agucaauauccac

SEQ ID NO: 136628 - RNA, 13 nt, Artificial Sequence
  Description of Artificial Sequence: Synthetic oligonucleotide
auguucagucaca

SEQ ID NO: 136629 - RNA, 12 nt, Artificial Sequence
  Description of Artificial Sequence: Synthetic oligonucleotide
acacacacauac

SEQ ID NO: 136630 - RNA, 12 nt, Artificial Sequence
  Description of Artificial Sequence: Synthetic oligonucleotide
uuccuuuugcuu

SEQ ID NO: 136631 - RNA, 16 nt, Artificial Sequence
  Description of Artificial Sequence: Synthetic oligonucleotide
uuuuaaaguaauuuuu

SEQ ID NO: 136632 - RNA, 13 nt, Artificial Sequence
  Description of Artificial Sequence: Synthetic oligonucleotide
caacagucaaugg

SEQ ID NO: 136633 - RNA, 13 nt, Artificial Sequence
  Description of Artificial Sequence: Synthetic oligonucleotide
ucgacaaaccaau

SEQ ID NO: 136634 - RNA, 12 nt, Artificial Sequence
  Description of Artificial Sequence: Synthetic oligonucleotide
acugcuaccacu

SEQ ID NO: 136635 - RNA, 13 nt, Artificial Sequence
  Description of Artificial Sequence: Synthetic oligonucleotide
gcaagcggucuua

SEQ ID NO: 136636 - RNA, 13 nt, Artificial Sequence
  Description of Artificial Sequence: Synthetic oligonucleotide
ggucuuaccggcu

SEQ ID NO: 136637 - RNA, 11 nt, Artificial Sequence
  Description of Artificial Sequence: Synthetic oligonucleotide
gauggguuacc

SEQ ID NO: 136638 - RNA, 11 nt, Artificial Sequence
  Description of Artificial Sequence: Synthetic oligonucleotide
guuaccugcga

SEQ ID NO: 136639 - RNA, 12 nt, Artificial Sequence
  Description of Artificial Sequence: Synthetic oligonucleotide
aaucuugcugag

SEQ ID NO: 136640 - RNA, 13 nt, Artificial Sequence
  Description of Artificial Sequence: Synthetic oligonucleotide
agcauaaaacagu

SEQ ID NO: 136641 - RNA, 12 nt, Artificial Sequence
  Description of Artificial Sequence: Synthetic oligonucleotide
guccuuuauccu

SEQ ID NO: 136642 - RNA, 12 nt, Artificial Sequence
  Description of Artificial Sequence: Synthetic oligonucleotide
caacgcaaguug

SEQ ID NO: 136643 - RNA, 13 nt, Artificial Sequence
  Description of Artificial Sequence: Synthetic oligonucleotide
aaacugaaaccau

SEQ ID NO: 136644 - RNA, 14 nt, Artificial Sequence
  Description of Artificial Sequence: Synthetic oligonucleotide
acuuuguuaaauau

SEQ ID NO: 136645 - RNA, 14 nt, Artificial Sequence
  Description of Artificial Sequence: Synthetic oligonucleotide
guauauuaaaaguu

SEQ ID NO: 136646 - RNA, 13 nt, Artificial Sequence
  Description of Artificial Sequence: Synthetic oligonucleotide
guuuugacuuaac

SEQ ID NO: 136647 - RNA, 13 nt, Artificial Sequence
  Description of Artificial Sequence: Synthetic oligonucleotide
gcaaacucagcac

SEQ ID NO: 136648 - RNA, 11 nt, Artificial Sequence
  Description of Artificial Sequence: Synthetic oligonucleotide
ugcugaccuca

SEQ ID NO: 136649 - RNA, 14 nt, Artificial Sequence
  Description of Artificial Sequence: Synthetic oligonucleotide
uuuauucagaucgc

SEQ ID NO: 136650 - RNA, 13 nt, Artificial Sequence
  Description of Artificial Sequence: Synthetic oligonucleotide
aggguucugggau

SEQ ID NO: 136651 - RNA, 15 nt, Artificial Sequence
  Description of Artificial Sequence: Synthetic oligonucleotide
auauuggaaauuaug

SEQ ID NO: 136652 - RNA, 13 nt, Artificial Sequence
  Description of Artificial Sequence: Synthetic oligonucleotide
auggaagcacuag

SEQ ID NO: 136653 - RNA, 13 nt, Artificial Sequence
  Description of Artificial Sequence: Synthetic oligonucleotide
guuuuuaugugga

SEQ ID NO: 136654 - RNA, 12 nt, Artificial Sequence
  Description of Artificial Sequence: Synthetic oligonucleotide
ggaauugguaga

SEQ ID NO: 136655 - RNA, 13 nt, Artificial Sequence
  Description of Artificial Sequence: Synthetic oligonucleotide
uuagacuuggaga

SEQ ID NO: 136656 - RNA, 13 nt, Artificial Sequence
  Description of Artificial Sequence: Synthetic oligonucleotide
uuacaguauucca

SEQ ID NO: 136657 - RNA, 15 nt, Artificial Sequence
  Description of Artificial Sequence: Synthetic oligonucleotide
ccacugaugaauuaa

SEQ ID NO: 136658 - RNA, 12 nt, Artificial Sequence
  Description of Artificial Sequence: Synthetic oligonucleotide
ccacaucaucac

SEQ ID NO: 136659 - RNA, 13 nt, Artificial Sequence
  Description of Artificial Sequence: Synthetic oligonucleotide
cucaccaaacaga

SEQ ID NO: 136660 - RNA, 12 nt, Artificial Sequence
  Description of Artificial Sequence: Synthetic oligonucleotide
ggaacaugaugg

SEQ ID NO: 136661 - RNA, 12 nt, Artificial Sequence
  Description of Artificial Sequence: Synthetic oligonucleotide
cauguagacugc

SEQ ID NO: 136662 - RNA, 13 nt, Artificial Sequence
  Description of Artificial Sequence: Synthetic oligonucleotide
ggaucuauuuaug

SEQ ID NO: 136663 - RNA, 12 nt, Artificial Sequence
  Description of Artificial Sequence: Synthetic oligonucleotide
gcacuauuauca

SEQ ID NO: 136664 - RNA, 11 nt, Artificial Sequence
  Description of Artificial Sequence: Synthetic oligonucleotide
aucaguucugc

SEQ ID NO: 136665 - RNA, 13 nt, Artificial Sequence
  Description of Artificial Sequence: Synthetic oligonucleotide
agauuaaaccuac

SEQ ID NO: 136666 - RNA, 13 nt, Artificial Sequence
  Description of Artificial Sequence: Synthetic oligonucleotide
auaaaauccuucu

SEQ ID NO: 136667 - RNA, 12 nt, Artificial Sequence
  Description of Artificial Sequence: Synthetic oligonucleotide
aaugcuguagac

SEQ ID NO: 136668 - RNA, 13 nt, Artificial Sequence
  Description of Artificial Sequence: Synthetic oligonucleotide
uugauaggaauag

SEQ ID NO: 136669 - RNA, 11 nt, Artificial Sequence
  Description of Artificial Sequence: Synthetic oligonucleotide
aauggcccuga

SEQ ID NO: 136670 - RNA, 11 nt, Artificial Sequence
  Description of Artificial Sequence: Synthetic oligonucleotide
uuccucaagca

SEQ ID NO: 136671 - RNA, 10 nt, Artificial Sequence
  Description of Artificial Sequence: Synthetic oligonucleotide
guucagccca

SEQ ID NO: 136672 - RNA, 11 nt, Artificial Sequence
  Description of Artificial Sequence: Synthetic oligonucleotide
gcugcugaacc

SEQ ID NO: 136673 - RNA, 12 nt, Artificial Sequence
  Description of Artificial Sequence: Synthetic oligonucleotide
aaguucucuuca

SEQ ID NO: 136674 - RNA, 11 nt, Artificial Sequence
  Description of Artificial Sequence: Synthetic oligonucleotide
ccagccuagag

SEQ ID NO: 136675 - RNA, 13 nt, Artificial Sequence
  Description of Artificial Sequence: Synthetic oligonucleotide
cucugugaagugu

SEQ ID NO: 136676 - RNA, 14 nt, Artificial Sequence
  Description of Artificial Sequence: Synthetic oligonucleotide
ugagaaaauuucaa

SEQ ID NO: 136677 - RNA, 11 nt, Artificial Sequence
  Description of Artificial Sequence: Synthetic oligonucleotide
aauccuccuga

SEQ ID NO: 136678 - RNA, 12 nt, Artificial Sequence
  Description of Artificial Sequence: Synthetic oligonucleotide
gugacaucauau

SEQ ID NO: 136679 - RNA, 13 nt, Artificial Sequence
  Description of Artificial Sequence: Synthetic oligonucleotide
aaucuucaucaua

SEQ ID NO: 136680 - RNA, 13 nt, Artificial Sequence
  Description of Artificial Sequence: Synthetic oligonucleotide
gacuagcuauuaa

SEQ ID NO: 136681 - RNA, 14 nt, Artificial Sequence
  Description of Artificial Sequence: Synthetic oligonucleotide
ucucuacuaaaaau

SEQ ID NO: 136682 - RNA, 12 nt, Artificial Sequence
  Description of Artificial Sequence: Synthetic oligonucleotide
ucuaucucgccu

SEQ ID NO: 136683 - RNA, 13 nt, Artificial Sequence
  Description of Artificial Sequence: Synthetic oligonucleotide
cuucgguccaguu

SEQ ID NO: 136684 - RNA, 11 nt, Artificial Sequence
  Description of Artificial Sequence: Synthetic oligonucleotide
gauguagccgc

SEQ ID NO: 136685 - RNA, 12 nt, Artificial Sequence
  Description of Artificial Sequence: Synthetic oligonucleotide
ugaggagacuug

SEQ ID NO: 136686 - RNA, 12 nt, Artificial Sequence
  Description of Artificial Sequence: Synthetic oligonucleotide
gaguagugagga

SEQ ID NO: 136687 - RNA, 14 nt, Artificial Sequence
  Description of Artificial Sequence: Synthetic oligonucleotide
cagaugaguacaaa

SEQ ID NO: 136688 - RNA, 13 nt, Artificial Sequence
  Description of Artificial Sequence: Synthetic oligonucleotide
guuguuaaugggc

SEQ ID NO: 136689 - RNA, 13 nt, Artificial Sequence
  Description of Artificial Sequence: Synthetic oligonucleotide
uuuuuaauuuauu

SEQ ID NO: 136690 - RNA, 12 nt, Artificial Sequence
  Description of Artificial Sequence: Synthetic oligonucleotide
uauuuaaauaug

SEQ ID NO: 136691 - RNA, 13 nt, Artificial Sequence
  Description of Artificial Sequence: Synthetic oligonucleotide
uauccuuuguuuc

SEQ ID NO: 136692 - RNA, 14 nt, Artificial Sequence
  Description of Artificial Sequence: Synthetic oligonucleotide
cgucuaaguguuug

SEQ ID NO: 136693 - RNA, 12 nt, Artificial Sequence
  Description of Artificial Sequence: Synthetic oligonucleotide
accugugacaaa

SEQ ID NO: 136694 - RNA, 13 nt, Artificial Sequence
  Description of Artificial Sequence: Synthetic oligonucleotide
ccaggcugaauua

SEQ ID NO: 136695 - RNA, 14 nt, Artificial Sequence
  Description of Artificial Sequence: Synthetic oligonucleotide
gucauucuuacaau

SEQ ID NO: 136696 - RNA, 15 nt, Artificial Sequence
  Description of Artificial Sequence: Synthetic oligonucleotide
ucauucuuacaauug

SEQ ID NO: 136697 - RNA, 12 nt, Artificial Sequence
  Description of Artificial Sequence: Synthetic oligonucleotide
cagagaguguac

SEQ ID NO: 136698 - RNA, 12 nt, Artificial Sequence
  Description of Artificial Sequence: Synthetic oligonucleotide
agaacucagcag

SEQ ID NO: 136699 - RNA, 13 nt, Artificial Sequence
  Description of Artificial Sequence: Synthetic oligonucleotide
uuuauuuucagua

SEQ ID NO: 136700 - RNA, 12 nt, Artificial Sequence
  Description of Artificial Sequence: Synthetic oligonucleotide
ucuuaaauggaa

SEQ ID NO: 136701 - RNA, 13 nt, Artificial Sequence
  Description of Artificial Sequence: Synthetic oligonucleotide
ugccuaaaauugu

SEQ ID NO: 136702 - RNA, 12 nt, Artificial Sequence
  Description of Artificial Sequence: Synthetic oligonucleotide
agacugugagcu

SEQ ID NO: 136703 - RNA, 14 nt, Artificial Sequence
  Description of Artificial Sequence: Synthetic oligonucleotide
ugcuuuuuauuaau

SEQ ID NO: 136704 - RNA, 13 nt, Artificial Sequence
  Description of Artificial Sequence: Synthetic oligonucleotide
cucuucuuacauu

SEQ ID NO: 136705 - RNA, 15 nt, Artificial Sequence
  Description of Artificial Sequence: Synthetic oligonucleotide
cauuuguaaaaaugu

SEQ ID NO: 136706 - RNA, 15 nt, Artificial Sequence
  Description of Artificial Sequence: Synthetic oligonucleotide
aucuuaauucauauu

SEQ ID NO: 136707 - RNA, 13 nt, Artificial Sequence
  Description of Artificial Sequence: Synthetic oligonucleotide
gaacuaaucauga

SEQ ID NO: 136708 - RNA, 12 nt, Artificial Sequence
  Description of Artificial Sequence: Synthetic oligonucleotide
ucugcucuuggg

SEQ ID NO: 136709 - RNA, 13 nt, Artificial Sequence
  Description of Artificial Sequence: Synthetic oligonucleotide
caguagcuuugag

SEQ ID NO: 136710 - RNA, 14 nt, Artificial Sequence
  Description of Artificial Sequence: Synthetic oligonucleotide
cacguaauauuuca

SEQ ID NO: 136711 - RNA, 13 nt, Artificial Sequence
  Description of Artificial Sequence: Synthetic oligonucleotide
uauucucuucacu

SEQ ID NO: 136712 - RNA, 14 nt, Artificial Sequence
  Description of Artificial Sequence: Synthetic oligonucleotide
cuaaugcuaagaaa

SEQ ID NO: 136713 - RNA, 12 nt, Artificial Sequence
  Description of Artificial Sequence: Synthetic oligonucleotide
gcugaaaaucaa

SEQ ID NO: 136714 - RNA, 14 nt, Artificial Sequence
  Description of Artificial Sequence: Synthetic oligonucleotide
aauaugauuacuuu

SEQ ID NO: 136715 - RNA, 14 nt, Artificial Sequence
  Description of Artificial Sequence: Synthetic oligonucleotide
cauuuuguucuaca

SEQ ID NO: 136716 - RNA, 12 nt, Artificial Sequence
  Description of Artificial Sequence: Synthetic oligonucleotide
cccgggacucuc

SEQ ID NO: 136717 - RNA, 14 nt, Artificial Sequence
  Description of Artificial Sequence: Synthetic oligonucleotide
ccuuuaaaguaaag

SEQ ID NO: 136718 - RNA, 13 nt, Artificial Sequence
  Description of Artificial Sequence: Synthetic oligonucleotide
ucuggaagccugg

SEQ ID NO: 136719 - RNA, 14 nt, Artificial Sequence
  Description of Artificial Sequence: Synthetic oligonucleotide
aaaacaaaagagag

SEQ ID NO: 136720 - RNA, 13 nt, Artificial Sequence
  Description of Artificial Sequence: Synthetic oligonucleotide
aucaguuaugccg

SEQ ID NO: 136721 - RNA, 13 nt, Artificial Sequence
  Description of Artificial Sequence: Synthetic oligonucleotide
uaaaagaagucca

SEQ ID NO: 136722 - RNA, 11 nt, Artificial Sequence
  Description of Artificial Sequence: Synthetic oligonucleotide
aggugagguua

SEQ ID NO: 136723 - RNA, 11 nt, Artificial Sequence
  Description of Artificial Sequence: Synthetic oligonucleotide
gggaagaggac

SEQ ID NO: 136724 - RNA, 13 nt, Artificial Sequence
  Description of Artificial Sequence: Synthetic oligonucleotide
aagcaaguauugu

SEQ ID NO: 136725 - RNA, 12 nt, Artificial Sequence
  Description of Artificial Sequence: Synthetic oligonucleotide
auuguagcacuc

SEQ ID NO: 136726 - RNA, 14 nt, Artificial Sequence
  Description of Artificial Sequence: Synthetic oligonucleotide
acaaaaccacaaau

SEQ ID NO: 136727 - RNA, 12 nt, Artificial Sequence
  Description of Artificial Sequence: Synthetic oligonucleotide
uaagcccauaca

SEQ ID NO: 136728 - RNA, 11 nt, Artificial Sequence
  Description of Artificial Sequence: Synthetic oligonucleotide
agcccauacag

SEQ ID NO: 136729 - RNA, 12 nt, Artificial Sequence
  Description of Artificial Sequence: Synthetic oligonucleotide
cagaaaccuucc

SEQ ID NO: 136730 - RNA, 10 nt, Artificial Sequence
  Description of Artificial Sequence: Synthetic oligonucleotide
guauaccuac

SEQ ID NO: 136731 - RNA, 13 nt, Artificial Sequence
  Description of Artificial Sequence: Synthetic oligonucleotide
gccaguuuucgga

SEQ ID NO: 136732 - RNA, 9 nt, Artificial Sequence
  Description of Artificial Sequence: Synthetic oligonucleotide
ggaacaggg

SEQ ID NO: 136733 - RNA, 13 nt, Artificial Sequence
  Description of Artificial Sequence: Synthetic oligonucleotide
uuaacuuuccagu

SEQ ID NO: 136734 - RNA, 14 nt, Artificial Sequence
  Description of Artificial Sequence: Synthetic oligonucleotide
aaaguuugguuuug

SEQ ID NO: 136735 - RNA, 12 nt, Artificial Sequence
  Description of Artificial Sequence: Synthetic oligonucleotide
cuucccacugua

SEQ ID NO: 136736 - RNA, 13 nt, Artificial Sequence
  Description of Artificial Sequence: Synthetic oligonucleotide
ugauaccauauga

SEQ ID NO: 136737 - RNA, 11 nt, Artificial Sequence
  Description of Artificial Sequence: Synthetic oligonucleotide
aacaugggcug

SEQ ID NO: 136738 - RNA, 13 nt, Artificial Sequence
  Description of Artificial Sequence: Synthetic oligonucleotide
caacuuuuucaua

SEQ ID NO: 136739 - RNA, 12 nt, Artificial Sequence
  Description of Artificial Sequence: Synthetic oligonucleotide
caugaggccgga

SEQ ID NO: 136740 - RNA, 11 nt, Artificial Sequence
  Description of Artificial Sequence: Synthetic oligonucleotide
acugcauuugu

SEQ ID NO: 136741 - RNA, 13 nt, Artificial Sequence
  Description of Artificial Sequence: Synthetic oligonucleotide
aauguuuacuacc

SEQ ID NO: 136742 - RNA, 15 nt, Artificial Sequence
  Description of Artificial Sequence: Synthetic oligonucleotide
aauuuuuugaugaaa

SEQ ID NO: 136743 - RNA, 14 nt, Artificial Sequence
  Description of Artificial Sequence: Synthetic oligonucleotide
cagugugugaauuu

SEQ ID NO: 136744 - RNA, 13 nt, Artificial Sequence
  Description of Artificial Sequence: Synthetic oligonucleotide
gagcaauguaugu

SEQ ID NO: 136745 - RNA, 14 nt, Artificial Sequence
  Description of Artificial Sequence: Synthetic oligonucleotide
aaagcacauauaua

SEQ ID NO: 136746 - RNA, 14 nt, Artificial Sequence
  Description of Artificial Sequence: Synthetic oligonucleotide
guaauaguuucucc

SEQ ID NO: 136747 - RNA, 13 nt, Artificial Sequence
  Description of Artificial Sequence: Synthetic oligonucleotide
aguuucuccaaau

SEQ ID NO: 136748 - RNA, 13 nt, Artificial Sequence
  Description of Artificial Sequence: Synthetic oligonucleotide
uacuuccuagaaa

SEQ ID NO: 136749 - RNA, 13 nt, Artificial Sequence
  Description of Artificial Sequence: Synthetic oligonucleotide
uacaccauauaug

SEQ ID NO: 136750 - RNA, 14 nt, Artificial Sequence
  Description of Artificial Sequence: Synthetic oligonucleotide
auauaugaauggag

SEQ ID NO: 136751 - RNA, 13 nt, Artificial Sequence
  Description of Artificial Sequence: Synthetic oligonucleotide
acgagaagaagau

SEQ ID NO: 136752 - RNA, 13 nt, Artificial Sequence
  Description of Artificial Sequence: Synthetic oligonucleotide
ucauuuacaggga

SEQ ID NO: 136753 - RNA, 13 nt, Artificial Sequence
  Description of Artificial Sequence: Synthetic oligonucleotide
cauuuacagggac

SEQ ID NO: 136754 - RNA, 10 nt, Artificial Sequence
  Description of Artificial Sequence: Synthetic oligonucleotide
agggaccuga

SEQ ID NO: 136755 - RNA, 14 nt, Artificial Sequence
  Description of Artificial Sequence: Synthetic oligonucleotide
uguuugacugcauc

SEQ ID NO: 136756 - RNA, 13 nt, Artificial Sequence
  Description of Artificial Sequence: Synthetic oligonucleotide
uuugacugcaucg

SEQ ID NO: 136757 - RNA, 12 nt, Artificial Sequence
  Description of Artificial Sequence: Synthetic oligonucleotide
gaguucacaggg

SEQ ID NO: 136758 - RNA, 13 nt, Artificial Sequence
  Description of Artificial Sequence: Synthetic oligonucleotide
ggcaccucugucc

SEQ ID NO: 136759 - RNA, 15 nt, Artificial Sequence
  Description of Artificial Sequence: Synthetic oligonucleotide
gguuugucuuuuuaa

SEQ ID NO: 136760 - RNA, 14 nt, Artificial Sequence
  Description of Artificial Sequence: Synthetic oligonucleotide
uuugucuuuuuaag

SEQ ID NO: 136761 - RNA, 13 nt, Artificial Sequence
  Description of Artificial Sequence: Synthetic oligonucleotide
ccuaaagguuguc

SEQ ID NO: 136762 - RNA, 12 nt, Artificial Sequence
  Description of Artificial Sequence: Synthetic oligonucleotide
aagguugucgac

SEQ ID NO: 136763 - RNA, 13 nt, Artificial Sequence
  Description of Artificial Sequence: Synthetic oligonucleotide
accuggcaauugu

SEQ ID NO: 136764 - RNA, 12 nt, Artificial Sequence
  Description of Artificial Sequence: Synthetic oligonucleotide
aguggugcgagg

SEQ ID NO: 136765 - RNA, 13 nt, Artificial Sequence
  Description of Artificial Sequence: Synthetic oligonucleotide
agagacaugaaau

SEQ ID NO: 136766 - RNA, 13 nt, Artificial Sequence
  Description of Artificial Sequence: Synthetic oligonucleotide
auauauuucucca

SEQ ID NO: 136767 - RNA, 10 nt, Artificial Sequence
  Description of Artificial Sequence: Synthetic oligonucleotide
caugaaggcu

SEQ ID NO: 136768 - RNA, 11 nt, Artificial Sequence
  Description of Artificial Sequence: Synthetic oligonucleotide
gcuggaguggu

SEQ ID NO: 136769 - RNA, 11 nt, Artificial Sequence
  Description of Artificial Sequence: Synthetic oligonucleotide
aggaagagagg

SEQ ID NO: 136770 - RNA, 12 nt, Artificial Sequence
  Description of Artificial Sequence: Synthetic oligonucleotide
cuugcaucgggc

SEQ ID NO: 136771 - RNA, 13 nt, Artificial Sequence
  Description of Artificial Sequence: Synthetic oligonucleotide
auauccuacugug

SEQ ID NO: 136772 - RNA, 13 nt, Artificial Sequence
  Description of Artificial Sequence: Synthetic oligonucleotide
uccuacuguguaa

SEQ ID NO: 136773 - RNA, 12 nt, Artificial Sequence
  Description of Artificial Sequence: Synthetic oligonucleotide
ccuuguagugua

SEQ ID NO: 136774 - RNA, 13 nt, Artificial Sequence
  Description of Artificial Sequence: Synthetic oligonucleotide
ucuuuguugauug

SEQ ID NO: 136775 - RNA, 14 nt, Artificial Sequence
  Description of Artificial Sequence: Synthetic oligonucleotide
uuuguugauugaaa

SEQ ID NO: 136776 - RNA, 15 nt, Artificial Sequence
  Description of Artificial Sequence: Synthetic oligonucleotide
uucuuuuucuuccau

SEQ ID NO: 136777 - RNA, 13 nt, Artificial Sequence
  Description of Artificial Sequence: Synthetic oligonucleotide
aaucuuccuucua

SEQ ID NO: 136778 - RNA, 13 nt, Artificial Sequence
  Description of Artificial Sequence: Synthetic oligonucleotide
uugaaugcuucau

SEQ ID NO: 136779 - RNA, 13 nt, Artificial Sequence
  Description of Artificial Sequence: Synthetic oligonucleotide
ugaaugcuucaug

SEQ ID NO: 136780 - RNA, 13 nt, Artificial Sequence
  Description of Artificial Sequence: Synthetic oligonucleotide
aauucuacuuuga

SEQ ID NO: 136781 - RNA, 13 nt, Artificial Sequence
  Description of Artificial Sequence: Synthetic oligonucleotide
agcaacuacagac

SEQ ID NO: 136782 - RNA, 13 nt, Artificial Sequence
  Description of Artificial Sequence: Synthetic oligonucleotide
gaccaaggucaac

SEQ ID NO: 136783 - RNA, 13 nt, Artificial Sequence
  Description of Artificial Sequence: Synthetic oligonucleotide
cgacuaucucgac

SEQ ID NO: 136784 - RNA, 13 nt, Artificial Sequence
  Description of Artificial Sequence: Synthetic oligonucleotide
aaccuucccaaac

SEQ ID NO: 136785 - RNA, 14 nt, Artificial Sequence
  Description of Artificial Sequence: Synthetic oligonucleotide
ccaagcuuagaacu

SEQ ID NO: 136786 - RNA, 15 nt, Artificial Sequence
  Description of Artificial Sequence: Synthetic oligonucleotide
agcuuagaacuuuaa

SEQ ID NO: 136787 - RNA, 11 nt, Artificial Sequence
  Description of Artificial Sequence: Synthetic oligonucleotide
aagaccaccac

SEQ ID NO: 136788 - RNA, 14 nt, Artificial Sequence
  Description of Artificial Sequence: Synthetic oligonucleotide
gcgagaaauaaagu

SEQ ID NO: 136789 - RNA, 14 nt, Artificial Sequence
  Description of Artificial Sequence: Synthetic oligonucleotide
cgagaaauaaaguu

SEQ ID NO: 136790 - RNA, 12 nt, Artificial Sequence
  Description of Artificial Sequence: Synthetic oligonucleotide
aggaaaugaucc

SEQ ID NO: 136791 - RNA, 13 nt, Artificial Sequence
  Description of Artificial Sequence: Synthetic oligonucleotide
gaagaaaugaaac

SEQ ID NO: 136792 - RNA, 13 nt, Artificial Sequence
  Description of Artificial Sequence: Synthetic oligonucleotide
guuuccauccucc

SEQ ID NO: 136793 - RNA, 15 nt, Artificial Sequence
  Description of Artificial Sequence: Synthetic oligonucleotide
acugaaaaucuuuga

SEQ ID NO: 136794 - RNA, 11 nt, Artificial Sequence
  Description of Artificial Sequence: Synthetic oligonucleotide
ugccguucagg

SEQ ID NO: 136795 - RNA, 13 nt, Artificial Sequence
  Description of Artificial Sequence: Synthetic oligonucleotide
caggguccagaag

SEQ ID NO: 136796 - RNA, 13 nt, Artificial Sequence
  Description of Artificial Sequence: Synthetic oligonucleotide
ucaagacugcuug

SEQ ID NO: 136797 - RNA, 13 nt, Artificial Sequence
  Description of Artificial Sequence: Synthetic oligonucleotide
uccaugucuuugg

SEQ ID NO: 136798 - RNA, 11 nt, Artificial Sequence
  Description of Artificial Sequence: Synthetic oligonucleotide
gccugaaacac

SEQ ID NO: 136799 - RNA, 12 nt, Artificial Sequence
  Description of Artificial Sequence: Synthetic oligonucleotide
ucucuguaccuc

SEQ ID NO: 136800 - RNA, 12 nt, Artificial Sequence
  Description of Artificial Sequence: Synthetic oligonucleotide
agcaagacaaga

SEQ ID NO: 136801 - RNA, 13 nt, Artificial Sequence
  Description of Artificial Sequence: Synthetic oligonucleotide
gcaagacaagaaa

SEQ ID NO: 136802 - RNA, 12 nt, Artificial Sequence
  Description of Artificial Sequence: Synthetic oligonucleotide
uguacaagaucc

SEQ ID NO: 136803 - RNA, 12 nt, Artificial Sequence
  Description of Artificial Sequence: Synthetic oligonucleotide
cguacuugcaga

SEQ ID NO: 136804 - RNA, 13 nt, Artificial Sequence
  Description of Artificial Sequence: Synthetic oligonucleotide
cgaucgauacaga

SEQ ID NO: 136805 - RNA, 13 nt, Artificial Sequence
  Description of Artificial Sequence: Synthetic oligonucleotide
uauaaaaauaaau

SEQ ID NO: 136806 - RNA, 13 nt, Artificial Sequence
  Description of Artificial Sequence: Synthetic oligonucleotide
uaaaaauaaauau

SEQ ID NO: 136807 - RNA, 13 nt, Artificial Sequence
  Description of Artificial Sequence: Synthetic oligonucleotide
uuugacugcugug

SEQ ID NO: 136808 - RNA, 13 nt, Artificial Sequence
  Description of Artificial Sequence: Synthetic oligonucleotide
ggagaugagagac

SEQ ID NO: 136809 - RNA, 10 nt, Artificial Sequence
  Description of Artificial Sequence: Synthetic oligonucleotide
ucccacuugg

SEQ ID NO: 136810 - RNA, 10 nt, Artificial Sequence
  Description of Artificial Sequence: Synthetic oligonucleotide
guucacggcc

SEQ ID NO: 136811 - RNA, 12 nt, Artificial Sequence
  Description of Artificial Sequence: Synthetic oligonucleotide
accaucacacca

SEQ ID NO: 136812 - RNA, 10 nt, Artificial Sequence
  Description of Artificial Sequence: Synthetic oligonucleotide
cugcggguuu

SEQ ID NO: 136813 - RNA, 9 nt, Artificial Sequence
  Description of Artificial Sequence: Synthetic oligonucleotide
uccaguuug

SEQ ID NO: 136814 - RNA, 12 nt, Artificial Sequence
  Description of Artificial Sequence: Synthetic oligonucleotide
uuaaggacuucu

SEQ ID NO: 136815 - RNA, 12 nt, Artificial Sequence
  Description of Artificial Sequence: Synthetic oligonucleotide
agugggacagag

SEQ ID NO: 136816 - RNA, 13 nt, Artificial Sequence
  Description of Artificial Sequence: Synthetic oligonucleotide
auuuguuauugug

SEQ ID NO: 136817 - RNA, 12 nt, Artificial Sequence
  Description of Artificial Sequence: Synthetic oligonucleotide
ucaaaugcauuu

SEQ ID NO: 136818 - RNA, 9 nt, Artificial Sequence
  Description of Artificial Sequence: Synthetic oligonucleotide
aggaaagcc

SEQ ID NO: 136819 - RNA, 10 nt, Artificial Sequence
  Description of Artificial Sequence: Synthetic oligonucleotide
ggaaagcccu

SEQ ID NO: 136820 - RNA, 11 nt, Artificial Sequence
  Description of Artificial Sequence: Synthetic oligonucleotide
ccagcauggcc

SEQ ID NO: 136821 - RNA, 10 nt, Artificial Sequence
  Description of Artificial Sequence: Synthetic oligonucleotide
uucucccuga

SEQ ID NO: 136822 - RNA, 11 nt, Artificial Sequence
  Description of Artificial Sequence: Synthetic oligonucleotide
aagaagcccuu

SEQ ID NO: 136823 - RNA, 11 nt, Artificial Sequence
  Description of Artificial Sequence: Synthetic oligonucleotide
gaagcccuuca

SEQ ID NO: 136824 - RNA, 10 nt, Artificial Sequence
  Description of Artificial Sequence: Synthetic oligonucleotide
cccuucagcg

SEQ ID NO: 136825 - RNA, 10 nt, Artificial Sequence
  Description of Artificial Sequence: Synthetic oligonucleotide
cuucagcggc

SEQ ID NO: 136826 - RNA, 11 nt, Artificial Sequence
  Description of Artificial Sequence: Synthetic oligonucleotide
cagcggccagu

SEQ ID NO: 136827 - RNA, 11 nt, Artificial Sequence
  Description of Artificial Sequence: Synthetic oligonucleotide
gaaaagcuccg

SEQ ID NO: 136828 - RNA, 10 nt, Artificial Sequence
  Description of Artificial Sequence: Synthetic oligonucleotide
aaagcuccgg

SEQ ID NO: 136829 - RNA, 12 nt, Artificial Sequence
  Description of Artificial Sequence: Synthetic oligonucleotide
gucaacagucug

SEQ ID NO: 136830 - RNA, 12 nt, Artificial Sequence
  Description of Artificial Sequence: Synthetic oligonucleotide
agaguucaaaag

SEQ ID NO: 136831 - RNA, 12 nt, Artificial Sequence
  Description of Artificial Sequence: Synthetic oligonucleotide
gaguucaaaagc

SEQ ID NO: 136832 - RNA, 11 nt, Artificial Sequence
  Description of Artificial Sequence: Synthetic oligonucleotide
ucaaaagcccu

SEQ ID NO: 136833 - RNA, 11 nt, Artificial Sequence
  Description of Artificial Sequence: Synthetic oligonucleotide
caaaagcccuu

SEQ ID NO: 136834 - RNA, 11 nt, Artificial Sequence
  Description of Artificial Sequence: Synthetic oligonucleotide
aaagcccuuca

SEQ ID NO: 136835 - RNA, 11 nt, Artificial Sequence
  Description of Artificial Sequence: Synthetic oligonucleotide
aagcccuucag

SEQ ID NO: 136836 - RNA, 12 nt, Artificial Sequence
  Description of Artificial Sequence: Synthetic oligonucleotide
ugaagccgcucg

SEQ ID NO: 136837 - RNA, 11 nt, Artificial Sequence
  Description of Artificial Sequence: Synthetic oligonucleotide
acgccagucaa

SEQ ID NO: 136838 - RNA, 12 nt, Artificial Sequence
  Description of Artificial Sequence: Synthetic oligonucleotide
ucuuggugcgug

SEQ ID NO: 136839 - RNA, 13 nt, Artificial Sequence
  Description of Artificial Sequence: Synthetic oligonucleotide
uuggauucaucag

SEQ ID NO: 136840 - RNA, 12 nt, Artificial Sequence
  Description of Artificial Sequence: Synthetic oligonucleotide
ggaauaccuaag

SEQ ID NO: 136841 - RNA, 11 nt, Artificial Sequence
  Description of Artificial Sequence: Synthetic oligonucleotide
uuugaggcuca

SEQ ID NO: 136842 - RNA, 10 nt, Artificial Sequence
  Description of Artificial Sequence: Synthetic oligonucleotide
cuacaauugg

SEQ ID NO: 136843 - RNA, 11 nt, Artificial Sequence
  Description of Artificial Sequence: Synthetic oligonucleotide
aguuaggagcc

SEQ ID NO: 136844 - RNA, 12 nt, Artificial Sequence
  Description of Artificial Sequence: Synthetic oligonucleotide
gucaauauccac

SEQ ID NO: 136845 - RNA, 12 nt, Artificial Sequence
  Description of Artificial Sequence: Synthetic oligonucleotide
uguucagucaca

SEQ ID NO: 136846 - RNA, 11 nt, Artificial Sequence
  Description of Artificial Sequence: Synthetic oligonucleotide
cacacacauac

SEQ ID NO: 136847 - RNA, 11 nt, Artificial Sequence
  Description of Artificial Sequence: Synthetic oligonucleotide
uccuuuugcuu

SEQ ID NO: 136848 - RNA, 15 nt, Artificial Sequence
  Description of Artificial Sequence: Synthetic oligonucleotide
uuuaaaguaauuuuu

SEQ ID NO: 136849 - RNA, 12 nt, Artificial Sequence
  Description of Artificial Sequence: Synthetic oligonucleotide
aacagucaaugg

SEQ ID NO: 136850 - RNA, 12 nt, Artificial Sequence
  Description of Artificial Sequence: Synthetic oligonucleotide
cgacaaaccaau

SEQ ID NO: 136851 - RNA, 11 nt, Artificial Sequence
  Description of Artificial Sequence: Synthetic oligonucleotide
cugcuaccacu

SEQ ID NO: 136852 - RNA, 12 nt, Artificial Sequence
  Description of Artificial Sequence: Synthetic oligonucleotide
caagcggucuua

SEQ ID NO: 136853 - RNA, 12 nt, Artificial Sequence
  Description of Artificial Sequence: Synthetic oligonucleotide
gucuuaccggcu

SEQ ID NO: 136854 - RNA, 10 nt, Artificial Sequence
  Description of Artificial Sequence: Synthetic oligonucleotide
auggguuacc

SEQ ID NO: 136855 - RNA, 10 nt, Artificial Sequence
  Description of Artificial Sequence: Synthetic oligonucleotide
uuaccugcga

SEQ ID NO: 136856 - RNA, 11 nt, Artificial Sequence
  Description of Artificial Sequence: Synthetic oligonucleotide
aucuugcugag

SEQ ID NO: 136857 - RNA, 12 nt, Artificial Sequence
  Description of Artificial Sequence: Synthetic oligonucleotide
gcauaaaacagu

SEQ ID NO: 136858 - RNA, 11 nt, Artificial Sequence
  Description of Artificial Sequence: Synthetic oligonucleotide
uccuuuauccu

SEQ ID NO: 136859 - RNA, 11 nt, Artificial Sequence
  Description of Artificial Sequence: Synthetic oligonucleotide
aacgcaaguug

SEQ ID NO: 136860 - RNA, 12 nt, Artificial Sequence
  Description of Artificial Sequence: Synthetic oligonucleotide
aacugaaaccau

SEQ ID NO: 136861 - RNA, 13 nt, Artificial Sequence
  Description of Artificial Sequence: Synthetic oligonucleotide
cuuuguuaaauau

SEQ ID NO: 136862 - RNA, 13 nt, Artificial Sequence
  Description of Artificial Sequence: Synthetic oligonucleotide
uauauuaaaaguu

SEQ ID NO: 136863 - RNA, 12 nt, Artificial Sequence
  Description of Artificial Sequence: Synthetic oligonucleotide
uuuugacuuaac

SEQ ID NO: 136864 - RNA, 12 nt, Artificial Sequence
  Description of Artificial Sequence: Synthetic oligonucleotide
caaacucagcac

SEQ ID NO: 136865 - RNA, 10 nt, Artificial Sequence
  Description of Artificial Sequence: Synthetic oligonucleotide
gcugaccuca

SEQ ID NO: 136866 - RNA, 13 nt, Artificial Sequence
  Description of Artificial Sequence: Synthetic oligonucleotide
uuauucagaucgc

SEQ ID NO: 136867 - RNA, 12 nt, Artificial Sequence
  Description of Artificial Sequence: Synthetic oligonucleotide
ggguucugggau

SEQ ID NO: 136868 - RNA, 14 nt, Artificial Sequence
  Description of Artificial Sequence: Synthetic oligonucleotide
uauuggaaauuaug

SEQ ID NO: 136869 - RNA, 12 nt, Artificial Sequence
  Description of Artificial Sequence: Synthetic oligonucleotide
uggaagcacuag

SEQ ID NO: 136870 - RNA, 12 nt, Artificial Sequence
  Description of Artificial Sequence: Synthetic oligonucleotide
uuuuuaugugga

SEQ ID NO: 136871 - RNA, 11 nt, Artificial Sequence
  Description of Artificial Sequence: Synthetic oligonucleotide
gaauugguaga

SEQ ID NO: 136872 - RNA, 12 nt, Artificial Sequence
  Description of Artificial Sequence: Synthetic oligonucleotide
uagacuuggaga

SEQ ID NO: 136873 - RNA, 12 nt, Artificial Sequence
  Description of Artificial Sequence: Synthetic oligonucleotide
uacaguauucca

SEQ ID NO: 136874 - RNA, 14 nt, Artificial Sequence
  Description of Artificial Sequence: Synthetic oligonucleotide
cacugaugaauuaa

SEQ ID NO: 136875 - RNA, 11 nt, Artificial Sequence
  Description of Artificial Sequence: Synthetic oligonucleotide
cacaucaucac

SEQ ID NO: 136876 - RNA, 12 nt, Artificial Sequence
  Description of Artificial Sequence: Synthetic oligonucleotide
ucaccaaacaga

SEQ ID NO: 136877 - RNA, 11 nt, Artificial Sequence
  Description of Artificial Sequence: Synthetic oligonucleotide
gaacaugaugg

SEQ ID NO: 136878 - RNA, 11 nt, Artificial Sequence
  Description of Artificial Sequence: Synthetic oligonucleotide
auguagacugc

SEQ ID NO: 136879 - RNA, 12 nt, Artificial Sequence
  Description of Artificial Sequence: Synthetic oligonucleotide
gaucuauuuaug

SEQ ID NO: 136880 - RNA, 11 nt, Artificial Sequence
  Description of Artificial Sequence: Synthetic oligonucleotide
cacuauuauca

SEQ ID NO: 136881 - RNA, 10 nt, Artificial Sequence
  Description of Artificial Sequence: Synthetic oligonucleotide
ucaguucugc

SEQ ID NO: 136882 - RNA, 12 nt, Artificial Sequence
  Description of Artificial Sequence: Synthetic oligonucleotide
gauuaaaccuac

SEQ ID NO: 136883 - RNA, 12 nt, Artificial Sequence
  Description of Artificial Sequence: Synthetic oligonucleotide
uaaaauccuucu

SEQ ID NO: 136884 - RNA, 11 nt, Artificial Sequence
  Description of Artificial Sequence: Synthetic oligonucleotide
augcuguagac

SEQ ID NO: 136885 - RNA, 12 nt, Artificial Sequence
  Description of Artificial Sequence: Synthetic oligonucleotide
ugauaggaauag

SEQ ID NO: 136886 - RNA, 10 nt, Artificial Sequence
  Description of Artificial Sequence: Synthetic oligonucleotide
auggcccuga

SEQ ID NO: 136887 - RNA, 10 nt, Artificial Sequence
  Description of Artificial Sequence: Synthetic oligonucleotide
uccucaagca

SEQ ID NO: 136888 - RNA, 9 nt, Artificial Sequence
  Description of Artificial Sequence: Synthetic oligonucleotide
uucagccca

SEQ ID NO: 136889 - RNA, 10 nt, Artificial Sequence
  Description of Artificial Sequence: Synthetic oligonucleotide
cugcugaacc

SEQ ID NO: 136890 - RNA, 11 nt, Artificial Sequence
  Description of Artificial Sequence: Synthetic oligonucleotide
aguucucuuca

SEQ ID NO: 136891 - RNA, 10 nt, Artificial Sequence
  Description of Artificial Sequence: Synthetic oligonucleotide
cagccuagag

SEQ ID NO: 136892 - RNA, 12 nt, Artificial Sequence
  Description of Artificial Sequence: Synthetic oligonucleotide
ucugugaagugu

SEQ ID NO: 136893 - RNA, 13 nt, Artificial Sequence
  Description of Artificial Sequence: Synthetic oligonucleotide
gagaaaauuucaa

SEQ ID NO: 136894 - RNA, 10 nt, Artificial Sequence
  Description of Artificial Sequence: Synthetic oligonucleotide
auccuccuga

SEQ ID NO: 136895 - RNA, 11 nt, Artificial Sequence
  Description of Artificial Sequence: Synthetic oligonucleotide
ugacaucauau

SEQ ID NO: 136896 - RNA, 12 nt, Artificial Sequence
  Description of Artificial Sequence: Synthetic oligonucleotide
aucuucaucaua

SEQ ID NO: 136897 - RNA, 12 nt, Artificial Sequence
  Description of Artificial Sequence: Synthetic oligonucleotide
acuagcuauuaa

SEQ ID NO: 136898 - RNA, 13 nt, Artificial Sequence
  Description of Artificial Sequence: Synthetic oligonucleotide
cucuacuaaaaau

SEQ ID NO: 136899 - RNA, 11 nt, Artificial Sequence
  Description of Artificial Sequence: Synthetic oligonucleotide
cuaucucgccu

SEQ ID NO: 136900 - RNA, 12 nt, Artificial Sequence
  Description of Artificial Sequence: Synthetic oligonucleotide
uucgguccaguu

SEQ ID NO: 136901 - RNA, 10 nt, Artificial Sequence
  Description of Artificial Sequence: Synthetic oligonucleotide
auguagccgc

SEQ ID NO: 136902 - RNA, 11 nt, Artificial Sequence
  Description of Artificial Sequence: Synthetic oligonucleotide
gaggagacuug

SEQ ID NO: 136903 - RNA, 11 nt, Artificial Sequence
  Description of Artificial Sequence: Synthetic oligonucleotide
aguagugagga

SEQ ID NO: 136904 - RNA, 13 nt, Artificial Sequence
  Description of Artificial Sequence: Synthetic oligonucleotide
agaugaguacaaa

SEQ ID NO: 136905 - RNA, 12 nt, Artificial Sequence
  Description of Artificial Sequence: Synthetic oligonucleotide
uuguuaaugggc

SEQ ID NO: 136906 - RNA, 12 nt, Artificial Sequence
  Description of Artificial Sequence: Synthetic oligonucleotide
uuuuaauuuauu

SEQ ID NO: 136907 - RNA, 11 nt, Artificial Sequence
  Description of Artificial Sequence: Synthetic oligonucleotide
auuuaaauaug

SEQ ID NO: 136908 - RNA, 12 nt, Artificial Sequence
  Description of Artificial Sequence: Synthetic oligonucleotide
auccuuuguuuc

SEQ ID NO: 136909 - RNA, 13 nt, Artificial Sequence
  Description of Artificial Sequence: Synthetic oligonucleotide
gucuaaguguuug

SEQ ID NO: 136910 - RNA, 11 nt, Artificial Sequence
  Description of Artificial Sequence: Synthetic oligonucleotide
ccugugacaaa

SEQ ID NO: 136911 - RNA, 12 nt, Artificial Sequence
  Description of Artificial Sequence: Synthetic oligonucleotide
caggcugaauua

SEQ ID NO: 136912 - RNA, 13 nt, Artificial Sequence
  Description of Artificial Sequence: Synthetic oligonucleotide
ucauucuuacaau

SEQ ID NO: 136913 - RNA, 14 nt, Artificial Sequence
  Description of Artificial Sequence: Synthetic oligonucleotide
cauucuuacaauug

SEQ ID NO: 136914 - RNA, 11 nt, Artificial Sequence
  Description of Artificial Sequence: Synthetic oligonucleotide
agagaguguac

SEQ ID NO: 136915 - RNA, 11 nt, Artificial Sequence
  Description of Artificial Sequence: Synthetic oligonucleotide
gaacucagcag

SEQ ID NO: 136916 - RNA, 12 nt, Artificial Sequence
  Description of Artificial Sequence: Synthetic oligonucleotide
uuauuuucagua

SEQ ID NO: 136917 - RNA, 11 nt, Artificial Sequence
  Description of Artificial Sequence: Synthetic oligonucleotide
cuuaaauggaa

SEQ ID NO: 136918 - RNA, 12 nt, Artificial Sequence
  Description of Artificial Sequence: Synthetic oligonucleotide
gccuaaaauugu

SEQ ID NO: 136919 - RNA, 12 nt, Artificial Sequence
  Description of Artificial Sequence: Synthetic oligonucleotide
acuaacaucugg

SEQ ID NO: 136920 - RNA, 11 nt, Artificial Sequence
  Description of Artificial Sequence: Synthetic oligonucleotide
gacugugagcu

SEQ ID NO: 136921 - RNA, 13 nt, Artificial Sequence
  Description of Artificial Sequence: Synthetic oligonucleotide
gcuuuuuauuaau

SEQ ID NO: 136922 - RNA, 12 nt, Artificial Sequence
  Description of Artificial Sequence: Synthetic oligonucleotide
ucuucuuacauu

SEQ ID NO: 136923 - RNA, 14 nt, Artificial Sequence
  Description of Artificial Sequence: Synthetic oligonucleotide
auuuguaaaaaugu

SEQ ID NO: 136924 - RNA, 14 nt, Artificial Sequence
  Description of Artificial Sequence: Synthetic oligonucleotide
ucuuaauucauauu

SEQ ID NO: 136925 - RNA, 12 nt, Artificial Sequence
  Description of Artificial Sequence: Synthetic oligonucleotide
aacuaaucauga

SEQ ID NO: 136926 - RNA, 11 nt, Artificial Sequence
  Description of Artificial Sequence: Synthetic oligonucleotide
cugcucuuggg

SEQ ID NO: 136927 - RNA, 12 nt, Artificial Sequence
  Description of Artificial Sequence: Synthetic oligonucleotide
aguagcuuugag

SEQ ID NO: 136928 - RNA, 13 nt, Artificial Sequence
  Description of Artificial Sequence: Synthetic oligonucleotide
acguaauauuuca

SEQ ID NO: 136929 - RNA, 12 nt, Artificial Sequence
  Description of Artificial Sequence: Synthetic oligonucleotide
auucucuucacu

SEQ ID NO: 136930 - RNA, 13 nt, Artificial Sequence
  Description of Artificial Sequence: Synthetic oligonucleotide
uaaugcuaagaaa

SEQ ID NO: 136931 - RNA, 11 nt, Artificial Sequence
  Description of Artificial Sequence: Synthetic oligonucleotide
cugaaaaucaa

SEQ ID NO: 136932 - RNA, 13 nt, Artificial Sequence
  Description of Artificial Sequence: Synthetic oligonucleotide
auaugauuacuuu

SEQ ID NO: 136933 - RNA, 13 nt, Artificial Sequence
  Description of Artificial Sequence: Synthetic oligonucleotide
auuuuguucuaca

SEQ ID NO: 136934 - RNA, 11 nt, Artificial Sequence
  Description of Artificial Sequence: Synthetic oligonucleotide
ccgggacucuc

SEQ ID NO: 136935 - RNA, 13 nt, Artificial Sequence
  Description of Artificial Sequence: Synthetic oligonucleotide
cuuuaaaguaaag

SEQ ID NO: 136936 - RNA, 12 nt, Artificial Sequence
  Description of Artificial Sequence: Synthetic oligonucleotide
cuggaagccugg

SEQ ID NO: 136937 - RNA, 13 nt, Artificial Sequence
  Description of Artificial Sequence: Synthetic oligonucleotide
aaacaaaagagag

SEQ ID NO: 136938 - RNA, 12 nt, Artificial Sequence
  Description of Artificial Sequence: Synthetic oligonucleotide
ucaguuaugccg

SEQ ID NO: 136939 - RNA, 12 nt, Artificial Sequence
  Description of Artificial Sequence: Synthetic oligonucleotide
aaaagaagucca

SEQ ID NO: 136940 - RNA, 10 nt, Artificial Sequence
  Description of Artificial Sequence: Synthetic oligonucleotide
ggugagguua

SEQ ID NO: 136941 - RNA, 10 nt, Artificial Sequence
  Description of Artificial Sequence: Synthetic oligonucleotide
ggaagaggac

SEQ ID NO: 136942 - RNA, 12 nt, Artificial Sequence
  Description of Artificial Sequence: Synthetic oligonucleotide
agcaaguauugu

SEQ ID NO: 136943 - RNA, 11 nt, Artificial Sequence
  Description of Artificial Sequence: Synthetic oligonucleotide
uuguagcacuc

SEQ ID NO: 136944 - RNA, 13 nt, Artificial Sequence
  Description of Artificial Sequence: Synthetic oligonucleotide
caaaaccacaaau

SEQ ID NO: 136945 - RNA, 11 nt, Artificial Sequence
  Description of Artificial Sequence: Synthetic oligonucleotide
aagcccauaca

SEQ ID NO: 136946 - RNA, 10 nt, Artificial Sequence
  Description of Artificial Sequence: Synthetic oligonucleotide
gcccauacag

SEQ ID NO: 136947 - RNA, 11 nt, Artificial Sequence
  Description of Artificial Sequence: Synthetic oligonucleotide
agaaaccuucc

SEQ ID NO: 136948 - RNA, 9 nt, Artificial Sequence
  Description of Artificial Sequence: Synthetic oligonucleotide
uauaccuac

SEQ ID NO: 136949 - RNA, 12 nt, Artificial Sequence
  Description of Artificial Sequence: Synthetic oligonucleotide
ccaguuuucgga

SEQ ID NO: 136950 - RNA, 8 nt, Artificial Sequence
  Description of Artificial Sequence: Synthetic oligonucleotide
gaacaggg

SEQ ID NO: 136951 - RNA, 12 nt, Artificial Sequence
  Description of Artificial Sequence: Synthetic oligonucleotide
uaacuuuccagu

SEQ ID NO: 136952 - RNA, 13 nt, Artificial Sequence
  Description of Artificial Sequence: Synthetic oligonucleotide
aaguuugguuuug

SEQ ID NO: 136953 - RNA, 11 nt, Artificial Sequence
  Description of Artificial Sequence: Synthetic oligonucleotide
uucccacugua

SEQ ID NO: 136954 - RNA, 12 nt, Artificial Sequence
  Description of Artificial Sequence: Synthetic oligonucleotide
gauaccauauga

SEQ ID NO: 136955 - RNA, 10 nt, Artificial Sequence
  Description of Artificial Sequence: Synthetic oligonucleotide
acaugggcug

SEQ ID NO: 136956 - RNA, 12 nt, Artificial Sequence
  Description of Artificial Sequence: Synthetic oligonucleotide
aacuuuuucaua

SEQ ID NO: 136957 - RNA, 11 nt, Artificial Sequence
  Description of Artificial Sequence: Synthetic oligonucleotide
augaggccgga

SEQ ID NO: 136958 - RNA, 10 nt, Artificial Sequence
  Description of Artificial Sequence: Synthetic oligonucleotide
cugcauuugu

SEQ ID NO: 136959 - RNA, 12 nt, Artificial Sequence
  Description of Artificial Sequence: Synthetic oligonucleotide
auguuuacuacc

SEQ ID NO: 136960 - RNA, 14 nt, Artificial Sequence
  Description of Artificial Sequence: Synthetic oligonucleotide
auuuuuugaugaaa

SEQ ID NO: 136961 - RNA, 13 nt, Artificial Sequence
  Description of Artificial Sequence: Synthetic oligonucleotide
agugugugaauuu

SEQ ID NO: 136962 - RNA, 12 nt, Artificial Sequence
  Description of Artificial Sequence: Synthetic oligonucleotide
agcaauguaugu

SEQ ID NO: 136963 - RNA, 13 nt, Artificial Sequence
  Description of Artificial Sequence: Synthetic oligonucleotide
aagcacauauaua

SEQ ID NO: 136964 - RNA, 13 nt, Artificial Sequence
  Description of Artificial Sequence: Synthetic oligonucleotide
uaauaguuucucc

SEQ ID NO: 136965 - RNA, 12 nt, Artificial Sequence
  Description of Artificial Sequence: Synthetic oligonucleotide
guuucuccaaau

SEQ ID NO: 136966 - RNA, 12 nt, Artificial Sequence
  Description of Artificial Sequence: Synthetic oligonucleotide
acuuccuagaaa

SEQ ID NO: 136967 - RNA, 12 nt, Artificial Sequence
  Description of Artificial Sequence: Synthetic oligonucleotide
acaccauauaug

SEQ ID NO: 136968 - RNA, 13 nt, Artificial Sequence
  Description of Artificial Sequence: Synthetic oligonucleotide
uauaugaauggag

SEQ ID NO: 136969 - RNA, 12 nt, Artificial Sequence
  Description of Artificial Sequence: Synthetic oligonucleotide
cauuuacaggga

SEQ ID NO: 136970 - RNA, 12 nt, Artificial Sequence
  Description of Artificial Sequence: Synthetic oligonucleotide
auuuacagggac

SEQ ID NO: 136971 - RNA, 9 nt, Artificial Sequence
  Description of Artificial Sequence: Synthetic oligonucleotide
gggaccuga

SEQ ID NO: 136972 - RNA, 13 nt, Artificial Sequence
  Description of Artificial Sequence: Synthetic oligonucleotide
guuugacugcauc

SEQ ID NO: 136973 - RNA, 12 nt, Artificial Sequence
  Description of Artificial Sequence: Synthetic oligonucleotide
uugacugcaucg

SEQ ID NO: 136974 - RNA, 11 nt, Artificial Sequence
  Description of Artificial Sequence: Synthetic oligonucleotide
aguucacaggg

SEQ ID NO: 136975 - RNA, 12 nt, Artificial Sequence
  Description of Artificial Sequence: Synthetic oligonucleotide
gcaccucugucc

SEQ ID NO: 136976 - RNA, 14 nt, Artificial Sequence
  Description of Artificial Sequence: Synthetic oligonucleotide
guuugucuuuuuaa

SEQ ID NO: 136977 - RNA, 13 nt, Artificial Sequence
  Description of Artificial Sequence: Synthetic oligonucleotide
uugucuuuuuaag

SEQ ID NO: 136978 - RNA, 12 nt, Artificial Sequence
  Description of Artificial Sequence: Synthetic oligonucleotide
cuaaagguuguc

SEQ ID NO: 136979 - RNA, 11 nt, Artificial Sequence
  Description of Artificial Sequence: Synthetic oligonucleotide
agguugucgac

SEQ ID NO: 136980 - RNA, 12 nt, Artificial Sequence
  Description of Artificial Sequence: Synthetic oligonucleotide
ccuggcaauugu

SEQ ID NO: 136981 - RNA, 11 nt, Artificial Sequence
  Description of Artificial Sequence: Synthetic oligonucleotide
guggugcgagg

SEQ ID NO: 136982 - RNA, 12 nt, Artificial Sequence
  Description of Artificial Sequence: Synthetic oligonucleotide
gagacaugaaau

SEQ ID NO: 136983 - RNA, 12 nt, Artificial Sequence
  Description of Artificial Sequence: Synthetic oligonucleotide
uauauuucucca

SEQ ID NO: 136984 - RNA, 9 nt, Artificial Sequence
  Description of Artificial Sequence: Synthetic oligonucleotide
augaaggcu

SEQ ID NO: 136985 - RNA, 10 nt, Artificial Sequence
  Description of Artificial Sequence: Synthetic oligonucleotide
cuggaguggu

SEQ ID NO: 136986 - RNA, 10 nt, Artificial Sequence
  Description of Artificial Sequence: Synthetic oligonucleotide
ggaagagagg

SEQ ID NO: 136987 - RNA, 11 nt, Artificial Sequence
  Description of Artificial Sequence: Synthetic oligonucleotide
uugcaucgggc

SEQ ID NO: 136988 - RNA, 12 nt, Artificial Sequence
  Description of Artificial Sequence: Synthetic oligonucleotide
uauccuacugug

SEQ ID NO: 136989 - RNA, 12 nt, Artificial Sequence
  Description of Artificial Sequence: Synthetic oligonucleotide
ccuacuguguaa

SEQ ID NO: 136990 - RNA, 11 nt, Artificial Sequence
  Description of Artificial Sequence: Synthetic oligonucleotide
cuuguagugua

SEQ ID NO: 136991 - RNA, 12 nt, Artificial Sequence
  Description of Artificial Sequence: Synthetic oligonucleotide
cuuuguugauug

SEQ ID NO: 136992 - RNA, 13 nt, Artificial Sequence
  Description of Artificial Sequence: Synthetic oligonucleotide
uuguugauugaaa

SEQ ID NO: 136993 - RNA, 14 nt, Artificial Sequence
  Description of Artificial Sequence: Synthetic oligonucleotide
ucuuuuucuuccau

SEQ ID NO: 136994 - RNA, 12 nt, Artificial Sequence
  Description of Artificial Sequence: Synthetic oligonucleotide
aucuuccuucua

SEQ ID NO: 136995 - RNA, 12 nt, Artificial Sequence
  Description of Artificial Sequence: Synthetic oligonucleotide
ugaaugcuucau

SEQ ID NO: 136996 - RNA, 12 nt, Artificial Sequence
  Description of Artificial Sequence: Synthetic oligonucleotide
gaaugcuucaug

SEQ ID NO: 136997 - RNA, 12 nt, Artificial Sequence
  Description of Artificial Sequence: Synthetic oligonucleotide
auucuacuuuga

SEQ ID NO: 136998 - RNA, 12 nt, Artificial Sequence
  Description of Artificial Sequence: Synthetic oligonucleotide
gcaacuacagac

SEQ ID NO: 136999 - RNA, 12 nt, Artificial Sequence
  Description of Artificial Sequence: Synthetic oligonucleotide
accaaggucaac

SEQ ID NO: 137000 - RNA, 12 nt, Artificial Sequence
  Description of Artificial Sequence: Synthetic oligonucleotide
gacuaucucgac

SEQ ID NO: 137001 - RNA, 12 nt, Artificial Sequence
  Description of Artificial Sequence: Synthetic oligonucleotide
accuucccaaac

SEQ ID NO: 137002 - RNA, 13 nt, Artificial Sequence
  Description of Artificial Sequence: Synthetic oligonucleotide
caagcuuagaacu

SEQ ID NO: 137003 - RNA, 14 nt, Artificial Sequence
  Description of Artificial Sequence: Synthetic oligonucleotide
gcuuagaacuuuaa

SEQ ID NO: 137004 - RNA, 13 nt, Artificial Sequence
  Description of Artificial Sequence: Synthetic oligonucleotide
aacuuuaagcaac

SEQ ID NO: 137005 - RNA, 10 nt, Artificial Sequence
  Description of Artificial Sequence: Synthetic oligonucleotide
agaccaccac

SEQ ID NO: 137006 - RNA, 13 nt, Artificial Sequence
  Description of Artificial Sequence: Synthetic oligonucleotide
cgagaaauaaagu

SEQ ID NO: 137007 - RNA, 13 nt, Artificial Sequence
  Description of Artificial Sequence: Synthetic oligonucleotide
gagaaauaaaguu

SEQ ID NO: 137008 - RNA, 11 nt, Artificial Sequence
  Description of Artificial Sequence: Synthetic oligonucleotide
ggaaaugaucc

SEQ ID NO: 137009 - RNA, 12 nt, Artificial Sequence
  Description of Artificial Sequence: Synthetic oligonucleotide
aagaaaugaaac

SEQ ID NO: 137010 - RNA, 12 nt, Artificial Sequence
  Description of Artificial Sequence: Synthetic oligonucleotide
uuuccauccucc

SEQ ID NO: 137011 - RNA, 14 nt, Artificial Sequence
  Description of Artificial Sequence: Synthetic oligonucleotide
cugaaaaucuuuga

SEQ ID NO: 137012 - RNA, 10 nt, Artificial Sequence
  Description of Artificial Sequence: Synthetic oligonucleotide
gccguucagg

SEQ ID NO: 137013 - RNA, 12 nt, Artificial Sequence
  Description of Artificial Sequence: Synthetic oligonucleotide
aggguccagaag

SEQ ID NO: 137014 - RNA, 12 nt, Artificial Sequence
  Description of Artificial Sequence: Synthetic oligonucleotide
caagacugcuug

SEQ ID NO: 137015 - RNA, 12 nt, Artificial Sequence
  Description of Artificial Sequence: Synthetic oligonucleotide
ccaugucuuugg

SEQ ID NO: 137016 - RNA, 10 nt, Artificial Sequence
  Description of Artificial Sequence: Synthetic oligonucleotide
ccugaaacac

SEQ ID NO: 137017 - RNA, 11 nt, Artificial Sequence
  Description of Artificial Sequence: Synthetic oligonucleotide
cucuguaccuc

SEQ ID NO: 137018 - RNA, 11 nt, Artificial Sequence
  Description of Artificial Sequence: Synthetic oligonucleotide
gcaagacaaga

SEQ ID NO: 137019 - RNA, 12 nt, Artificial Sequence
  Description of Artificial Sequence: Synthetic oligonucleotide
caagacaagaaa

SEQ ID NO: 137020 - RNA, 11 nt, Artificial Sequence
  Description of Artificial Sequence: Synthetic oligonucleotide
guacaagaucc

SEQ ID NO: 137021 - RNA, 11 nt, Artificial Sequence
  Description of Artificial Sequence: Synthetic oligonucleotide
guacuugcaga

SEQ ID NO: 137022 - RNA, 12 nt, Artificial Sequence
  Description of Artificial Sequence: Synthetic oligonucleotide
gaucgauacaga

SEQ ID NO: 137023 - RNA, 12 nt, Artificial Sequence
  Description of Artificial Sequence: Synthetic oligonucleotide
auaaaaauaaau

SEQ ID NO: 137024 - RNA, 12 nt, Artificial Sequence
  Description of Artificial Sequence: Synthetic oligonucleotide
aaaaauaaauau

SEQ ID NO: 137025 - RNA, 12 nt, Artificial Sequence
  Description of Artificial Sequence: Synthetic oligonucleotide
uugacugcugug

SEQ ID NO: 137026 - RNA, 12 nt, Artificial Sequence
  Description of Artificial Sequence: Synthetic oligonucleotide
gagaugagagac

SEQ ID NO: 137027 - RNA, 9 nt, Artificial Sequence
  Description of Artificial Sequence: Synthetic oligonucleotide
cccacuugg

SEQ ID NO: 137028 - RNA, 2091 nt, Homo sapiens
gagcggagccgcgggcgggagggcggacggaccgacugacgguagggacgggaggcgagcaagauggcgcagacgcagggcacccggaggaaagucuguuacuacuacgacggggauguuggaaauuacuauuauggacaaggccacccaaugaagccucaccgaauccgcaugacucauaauuugcugcucaacuauggucucuaccgaaaaauggaaaucuaucgcccucacaaagccaaugcugaggagaugaccaaguaccacagcgaugacuacauuaaauucuugcgcuccauccguccagauaacaugucggaguacagcaagcagaugcagagauucaacguuggugaggacuguccaguauucgauggccuguuugaguucugucaguugucuacuggugguucuguggcaagugcugugaaacuuaauaagcagcagacggacaucgcugugaauugggcugggggccugcaccaugcaaagaaguccgaggcaucuggcuucuguuacgucaaugauaucgucuuggccauccuggaacugcuaaaguaucaccagagggugcuguacauugacauugauauucaccauggugacggcguggaagaggccuucuacaccacggaccgggucaugacuguguccuuucauaaguauggagaguacuucccaggaacuggggaccuacgggauaucggggcuggcaaaggcaaguauuaugcuguuaacuacccgcuccgagacgggauugaugacgaguccuaugaggccauuuucaagccggucauguccaaaguaauggagauguuccagccuagugcgguggucuuacaguguggcucagacucccuaucuggggaucgguuagguugcuucaaucuaacuaucaaaggacacgccaaguguguggaauuugucaagagcuuuaaccugccuaugcugaugcugggaggcggugguuacaccauucguaacguugcccggugcuggacauaugagacagcuguggcccuggauacggagaucccuaaugagcuuccauacaaugacuacuuugaauacuuuggaccagauuucaagcuccacaucaguccuuccaauaugacuaaccagaacacgaaugaguaccuggagaagaucaaacagcgacuguuugagaaccuuagaaugcugccgcacgcaccugggguccaaaugcaggcgauuccugaggacgccaucccugaggagaguggcgaugaggacgaagacgacccugacaagcgcaucucgaucugcuccucugacaaacgaauugccugugaggaagaguucuccgauucugaagaggagggagaggggggccgcaagaacucuuccaacuucaaaaaagccaagagagucaaaacagaggaugaaaaagagaaagacccagaggagaagaaagaagucaccgaagaggagaaaaccaaggaggagaagccagaagccaaaggggucaaggaggaggucaaguuggccugaauggaccucuccagcucuggcuuccugcugagucccucacguuucuuccccaaccccucagauuuuauauuuucuauuucucuguguauuuauauaaaaauuuauuaaauauaaauauccccagggacagaaaccaaggccccgagcucagggcagcugugcugggugagcucuuccaggagccaccuugccacccauucuucccguucuuaacuuugaaccauaaagggugccaggucugggugaaagggauacuuuuaugcaaccauaagacaaacuccugaaaugccaagugccugcuuaguagcuuuggaaaggugcccuuauugaacauucuagaagggguggcugggucuucaaggaucuccuguuuuuuucaggcuccuaaaguaacaucagccauuuuuagauugguucuguuuucguaccuucccacuggccucaagugagccaagaaacacugccugcccucugucugucuucuccuaauucugcagguggagguugcuagucuaguuuccuuuuugagauacuauuuucauuuuugugagccucuuuguaauaaaaugguacauuucu

SEQ ID NO: 137029 - RNA, 19 nt, Artificial Sequence
  Description of Artificial Sequence: Synthetic oligonucleotide
gagcggagccgcgggcggg

SEQ ID NO: 137030 - RNA, 19 nt, Artificial Sequence
  Description of Artificial Sequence: Synthetic oligonucleotide
gagggcggacggaccgacu

SEQ ID NO: 137031 - RNA, 19 nt, Artificial Sequence
  Description of Artificial Sequence: Synthetic oligonucleotide
ugacgguagggacgggagg

SEQ ID NO: 137032 - RNA, 19 nt, Artificial Sequence
  Description of Artificial Sequence: Synthetic oligonucleotide
gcgagcaagauggcgcaga

SEQ ID NO: 137033 - RNA, 19 nt, Artificial Sequence
  Description of Artificial Sequence: Synthetic oligonucleotide
acgcagggcacccggagga

SEQ ID NO: 137034 - RNA, 19 nt, Artificial Sequence
  Description of Artificial Sequence: Synthetic oligonucleotide
aaagucuguuacuacuacg

SEQ ID NO: 137035 - RNA, 19 nt, Artificial Sequence
  Description of Artificial Sequence: Synthetic oligonucleotide
gacggggauguuggaaauu

SEQ ID NO: 137036 - RNA, 19 nt, Artificial Sequence
  Description of Artificial Sequence: Synthetic oligonucleotide
uacuauuauggacaaggcc

SEQ ID NO: 137037 - RNA, 19 nt, Artificial Sequence
  Description of Artificial Sequence: Synthetic oligonucleotide
cacccaaugaagccucacc

SEQ ID NO: 137038 - RNA, 19 nt, Artificial Sequence
  Description of Artificial Sequence: Synthetic oligonucleotide
cgaauccgcaugacucaua

SEQ ID NO: 137039 - RNA, 19 nt, Artificial Sequence
  Description of Artificial Sequence: Synthetic oligonucleotide
aauuugcugcucaacuaug

SEQ ID NO: 137040 - RNA, 19 nt, Artificial Sequence
  Description of Artificial Sequence: Synthetic oligonucleotide
ggucucuaccgaaaaaugg

SEQ ID NO: 137041 - RNA, 19 nt, Artificial Sequence
  Description of Artificial Sequence: Synthetic oligonucleotide
gaaaucuaucgcccucaca

SEQ ID NO: 137042 - RNA, 19 nt, Artificial Sequence
  Description of Artificial Sequence: Synthetic oligonucleotide
aaagccaaugcugaggaga

SEQ ID NO: 137043 - RNA, 19 nt, Artificial Sequence
  Description of Artificial Sequence: Synthetic oligonucleotide
augaccaaguaccacagcg

SEQ ID NO: 137044 - RNA, 19 nt, Artificial Sequence
  Description of Artificial Sequence: Synthetic oligonucleotide
gaugacuacauuaaauucu

SEQ ID NO: 137045 - RNA, 19 nt, Artificial Sequence
  Description of Artificial Sequence: Synthetic oligonucleotide
uugcgcuccauccguccag

SEQ ID NO: 137046 - RNA, 19 nt, Artificial Sequence
  Description of Artificial Sequence: Synthetic oligonucleotide
gauaacaugucggaguaca

SEQ ID NO: 137047 - RNA, 19 nt, Artificial Sequence
  Description of Artificial Sequence: Synthetic oligonucleotide
agcaagcagaugcagagau

SEQ ID NO: 137048 - RNA, 19 nt, Artificial Sequence
  Description of Artificial Sequence: Synthetic oligonucleotide
uucaacguuggugaggacu

SEQ ID NO: 137049 - RNA, 19 nt, Artificial Sequence
  Description of Artificial Sequence: Synthetic oligonucleotide
uguccaguauucgauggcc

SEQ ID NO: 137050 - RNA, 19 nt, Artificial Sequence
  Description of Artificial Sequence: Synthetic oligonucleotide
cuguuugaguucugucagu

SEQ ID NO: 137051 - RNA, 19 nt, Artificial Sequence
  Description of Artificial Sequence: Synthetic oligonucleotide
uugucuacuggugguucug

SEQ ID NO: 137052 - RNA, 19 nt, Artificial Sequence
  Description of Artificial Sequence: Synthetic oligonucleotide
guggcaagugcugugaaac

SEQ ID NO: 137053 - RNA, 19 nt, Artificial Sequence
  Description of Artificial Sequence: Synthetic oligonucleotide
cuuaauaagcagcagacgg

SEQ ID NO: 137054 - RNA, 19 nt, Artificial Sequence
  Description of Artificial Sequence: Synthetic oligonucleotide
gacaucgcugugaauuggg

SEQ ID NO: 137055 - RNA, 19 nt, Artificial Sequence
  Description of Artificial Sequence: Synthetic oligonucleotide
gcugggggccugcaccaug

SEQ ID NO: 137056 - RNA, 19 nt, Artificial Sequence
  Description of Artificial Sequence: Synthetic oligonucleotide
gcaaagaaguccgaggcau

SEQ ID NO: 137057 - RNA, 19 nt, Artificial Sequence
  Description of Artificial Sequence: Synthetic oligonucleotide
ucuggcuucuguuacguca

SEQ ID NO: 137058 - RNA, 19 nt, Artificial Sequence
  Description of Artificial Sequence: Synthetic oligonucleotide
aaugauaucgucuuggcca

SEQ ID NO: 137059 - RNA, 19 nt, Artificial Sequence
  Description of Artificial Sequence: Synthetic oligonucleotide
auccuggaacugcuaaagu

SEQ ID NO: 137060 - RNA, 19 nt, Artificial Sequence
  Description of Artificial Sequence: Synthetic oligonucleotide
uaucaccagagggugcugu

SEQ ID NO: 137061 - RNA, 19 nt, Artificial Sequence
  Description of Artificial Sequence: Synthetic oligonucleotide
uacauugacauugauauuc

SEQ ID NO: 137062 - RNA, 19 nt, Artificial Sequence
  Description of Artificial Sequence: Synthetic oligonucleotide
caccauggugacggcgugg

SEQ ID NO: 137063 - RNA, 19 nt, Artificial Sequence
  Description of Artificial Sequence: Synthetic oligonucleotide
gaagaggccuucuacacca

SEQ ID NO: 137064 - RNA, 19 nt, Artificial Sequence
  Description of Artificial Sequence: Synthetic oligonucleotide
acggaccgggucaugacug

SEQ ID NO: 137065 - RNA, 19 nt, Artificial Sequence
  Description of Artificial Sequence: Synthetic oligonucleotide
guguccuuucauaaguaug

SEQ ID NO: 137066 - RNA, 19 nt, Artificial Sequence
  Description of Artificial Sequence: Synthetic oligonucleotide
ggagaguacuucccaggaa

SEQ ID NO: 137067 - RNA, 19 nt, Artificial Sequence
  Description of Artificial Sequence: Synthetic oligonucleotide
acuggggaccuacgggaua

SEQ ID NO: 137068 - RNA, 19 nt, Artificial Sequence
  Description of Artificial Sequence: Synthetic oligonucleotide
aucggggcuggcaaaggca

SEQ ID NO: 137069 - RNA, 19 nt, Artificial Sequence
  Description of Artificial Sequence: Synthetic oligonucleotide
aaguauuaugcuguuaacu

SEQ ID NO: 137070 - RNA, 19 nt, Artificial Sequence
  Description of Artificial Sequence: Synthetic oligonucleotide
uacccgcuccgagacggga

SEQ ID NO: 137071 - RNA, 19 nt, Artificial Sequence
  Description of Artificial Sequence: Synthetic oligonucleotide
auugaugacgaguccuaug

SEQ ID NO: 137072 - RNA, 19 nt, Artificial Sequence
  Description of Artificial Sequence: Synthetic oligonucleotide
gaggccauuuucaagccgg

SEQ ID NO: 137073 - RNA, 19 nt, Artificial Sequence
  Description of Artificial Sequence: Synthetic oligonucleotide
gucauguccaaaguaaugg

SEQ ID NO: 137074 - RNA, 19 nt, Artificial Sequence
  Description of Artificial Sequence: Synthetic oligonucleotide
gagauguuccagccuagug

SEQ ID NO: 137075 - RNA, 19 nt, Artificial Sequence
  Description of Artificial Sequence: Synthetic oligonucleotide
gcgguggucuuacagugug

SEQ ID NO: 137076 - RNA, 19 nt, Artificial Sequence
  Description of Artificial Sequence: Synthetic oligonucleotide
ggcucagacucccuaucug

SEQ ID NO: 137077 - RNA, 19 nt, Artificial Sequence
  Description of Artificial Sequence: Synthetic oligonucleotide
ggggaucgguuagguugcu

SEQ ID NO: 137078 - RNA, 19 nt, Artificial Sequence
  Description of Artificial Sequence: Synthetic oligonucleotide
uucaaucuaacuaucaaag

SEQ ID NO: 137079 - RNA, 19 nt, Artificial Sequence
  Description of Artificial Sequence: Synthetic oligonucleotide
ggacacgccaagugugugg

SEQ ID NO: 137080 - RNA, 19 nt, Artificial Sequence
  Description of Artificial Sequence: Synthetic oligonucleotide
gaauuugucaagagcuuua

SEQ ID NO: 137081 - RNA, 19 nt, Artificial Sequence
  Description of Artificial Sequence: Synthetic oligonucleotide
aaccugccuaugcugaugc

SEQ ID NO: 137082 - RNA, 19 nt, Artificial Sequence
  Description of Artificial Sequence: Synthetic oligonucleotide
cugggaggcggugguuaca

SEQ ID NO: 137083 - RNA, 19 nt, Artificial Sequence
  Description of Artificial Sequence: Synthetic oligonucleotide
accauucguaacguugccc

SEQ ID NO: 137084 - RNA, 19 nt, Artificial Sequence
  Description of Artificial Sequence: Synthetic oligonucleotide
cggugcuggacauaugaga

SEQ ID NO: 137085 - RNA, 19 nt, Artificial Sequence
  Description of Artificial Sequence: Synthetic oligonucleotide
acagcuguggcccuggaua

SEQ ID NO: 137086 - RNA, 19 nt, Artificial Sequence
  Description of Artificial Sequence: Synthetic oligonucleotide
acggagaucccuaaugagc

SEQ ID NO: 137087 - RNA, 19 nt, Artificial Sequence
  Description of Artificial Sequence: Synthetic oligonucleotide
cuuccauacaaugacuacu

SEQ ID NO: 137088 - RNA, 19 nt, Artificial Sequence
  Description of Artificial Sequence: Synthetic oligonucleotide
uuugaauacuuuggaccag

SEQ ID NO: 137089 - RNA, 19 nt, Artificial Sequence
  Description of Artificial Sequence: Synthetic oligonucleotide
gauuucaagcuccacauca

SEQ ID NO: 137090 - RNA, 19 nt, Artificial Sequence
  Description of Artificial Sequence: Synthetic oligonucleotide
aguccuuccaauaugacua

SEQ ID NO: 137091 - RNA, 19 nt, Artificial Sequence
  Description of Artificial Sequence: Synthetic oligonucleotide
aaccagaacacgaaugagu

SEQ ID NO: 137092 - RNA, 19 nt, Artificial Sequence
  Description of Artificial Sequence: Synthetic oligonucleotide
uaccuggagaagaucaaac

SEQ ID NO: 137093 - RNA, 19 nt, Artificial Sequence
  Description of Artificial Sequence: Synthetic oligonucleotide
cagcgacuguuugagaacc

SEQ ID NO: 137094 - RNA, 19 nt, Artificial Sequence
  Description of Artificial Sequence: Synthetic oligonucleotide
cuuagaaugcugccgcacg

SEQ ID NO: 137095 - RNA, 19 nt, Artificial Sequence
  Description of Artificial Sequence: Synthetic oligonucleotide
gcaccugggguccaaaugc

SEQ ID NO: 137096 - RNA, 19 nt, Artificial Sequence
  Description of Artificial Sequence: Synthetic oligonucleotide
caggcgauuccugaggacg

SEQ ID NO: 137097 - RNA, 19 nt, Artificial Sequence
  Description of Artificial Sequence: Synthetic oligonucleotide
gccaucccugaggagagug

SEQ ID NO: 137098 - RNA, 19 nt, Artificial Sequence
  Description of Artificial Sequence: Synthetic oligonucleotide
ggcgaugaggacgaagacg

SEQ ID NO: 137099 - RNA, 19 nt, Artificial Sequence
  Description of Artificial Sequence: Synthetic oligonucleotide
gacccugacaagcgcaucu

SEQ ID NO: 137100 - RNA, 19 nt, Artificial Sequence
  Description of Artificial Sequence: Synthetic oligonucleotide
ucgaucugcuccucugaca

SEQ ID NO: 137101 - RNA, 19 nt, Artificial Sequence
  Description of Artificial Sequence: Synthetic oligonucleotide
aaacgaauugccugugagg

SEQ ID NO: 137102 - RNA, 19 nt, Artificial Sequence
  Description of Artificial Sequence: Synthetic oligonucleotide
gaagaguucuccgauucug

SEQ ID NO: 137103 - RNA, 19 nt, Artificial Sequence
  Description of Artificial Sequence: Synthetic oligonucleotide
gaagaggagggagaggggg

SEQ ID NO: 137104 - RNA, 19 nt, Artificial Sequence
  Description of Artificial Sequence: Synthetic oligonucleotide
ggccgcaagaacucuucca

SEQ ID NO: 137105 - RNA, 19 nt, Artificial Sequence
  Description of Artificial Sequence: Synthetic oligonucleotide
aacuucaaaaaagccaaga

SEQ ID NO: 137106 - RNA, 19 nt, Artificial Sequence
  Description of Artificial Sequence: Synthetic oligonucleotide
agagucaaaacagaggaug

SEQ ID NO: 137107 - RNA, 19 nt, Artificial Sequence
  Description of Artificial Sequence: Synthetic oligonucleotide
gaaaaagagaaagacccag

SEQ ID NO: 137108 - RNA, 19 nt, Artificial Sequence
  Description of Artificial Sequence: Synthetic oligonucleotide
gaggagaagaaagaaguca

SEQ ID NO: 137109 - RNA, 19 nt, Artificial Sequence
  Description of Artificial Sequence: Synthetic oligonucleotide
accgaagaggagaaaacca

SEQ ID NO: 137110 - RNA, 19 nt, Artificial Sequence
  Description of Artificial Sequence: Synthetic oligonucleotide
aaggaggagaagccagaag

SEQ ID NO: 137111 - RNA, 19 nt, Artificial Sequence
  Description of Artificial Sequence: Synthetic oligonucleotide
gccaaaggggucaaggagg

SEQ ID NO: 137112 - RNA, 19 nt, Artificial Sequence
  Description of Artificial Sequence: Synthetic oligonucleotide
gaggucaaguuggccugaa

SEQ ID NO: 137113 - RNA, 19 nt, Artificial Sequence
  Description of Artificial Sequence: Synthetic oligonucleotide
auggaccucuccagcucug

SEQ ID NO: 137114 - RNA, 19 nt, Artificial Sequence
  Description of Artificial Sequence: Synthetic oligonucleotide
ggcuuccugcugagucccu

SEQ ID NO: 137115 - RNA, 19 nt, Artificial Sequence
  Description of Artificial Sequence: Synthetic oligonucleotide
ucacguuucuuccccaacc

SEQ ID NO: 137116 - RNA, 19 nt, Artificial Sequence
  Description of Artificial Sequence: Synthetic oligonucleotide
cccucagauuuuauauuuu

SEQ ID NO: 137117 - RNA, 19 nt, Artificial Sequence
  Description of Artificial Sequence: Synthetic oligonucleotide
ucuauuucucuguguauuu

SEQ ID NO: 137118 - RNA, 19 nt, Artificial Sequence
  Description of Artificial Sequence: Synthetic oligonucleotide
uauauaaaaauuuauuaaa

SEQ ID NO: 137119 - RNA, 19 nt, Artificial Sequence
  Description of Artificial Sequence: Synthetic oligonucleotide
auauaaauauccccaggga

SEQ ID NO: 137120 - RNA, 19 nt, Artificial Sequence
  Description of Artificial Sequence: Synthetic oligonucleotide
acagaaaccaaggccccga

SEQ ID NO: 137121 - RNA, 19 nt, Artificial Sequence
  Description of Artificial Sequence: Synthetic oligonucleotide
agcucagggcagcugugcu

SEQ ID NO: 137122 - RNA, 19 nt, Artificial Sequence
  Description of Artificial Sequence: Synthetic oligonucleotide
ugggugagcucuuccagga

SEQ ID NO: 137123 - RNA, 19 nt, Artificial Sequence
  Description of Artificial Sequence: Synthetic oligonucleotide
agccaccuugccacccauu

SEQ ID NO: 137124 - RNA, 19 nt, Artificial Sequence
  Description of Artificial Sequence: Synthetic oligonucleotide
ucuucccguucuuaacuuu

SEQ ID NO: 137125 - RNA, 19 nt, Artificial Sequence
  Description of Artificial Sequence: Synthetic oligonucleotide
ugaaccauaaagggugcca

SEQ ID NO: 137126 - RNA, 19 nt, Artificial Sequence
  Description of Artificial Sequence: Synthetic oligonucleotide
aggucugggugaaagggau

SEQ ID NO: 137127 - RNA, 19 nt, Artificial Sequence
  Description of Artificial Sequence: Synthetic oligonucleotide
uacuuuuaugcaaccauaa

SEQ ID NO: 137128 - RNA, 19 nt, Artificial Sequence
  Description of Artificial Sequence: Synthetic oligonucleotide
agacaaacuccugaaaugc

SEQ ID NO: 137129 - RNA, 19 nt, Artificial Sequence
  Description of Artificial Sequence: Synthetic oligonucleotide
ccaagugccugcuuaguag

SEQ ID NO: 137130 - RNA, 19 nt, Artificial Sequence
  Description of Artificial Sequence: Synthetic oligonucleotide
gcuuuggaaaggugcccuu

SEQ ID NO: 137131 - RNA, 19 nt, Artificial Sequence
  Description of Artificial Sequence: Synthetic oligonucleotide
uauugaacauucuagaagg

SEQ ID NO: 137132 - RNA, 19 nt, Artificial Sequence
  Description of Artificial Sequence: Synthetic oligonucleotide
ggguggcugggucuucaag

SEQ ID NO: 137133 - RNA, 19 nt, Artificial Sequence
  Description of Artificial Sequence: Synthetic oligonucleotide
ggaucuccuguuuuuuuca

SEQ ID NO: 137134 - RNA, 19 nt, Artificial Sequence
  Description of Artificial Sequence: Synthetic oligonucleotide
aggcuccuaaaguaacauc

SEQ ID NO: 137135 - RNA, 19 nt, Artificial Sequence
  Description of Artificial Sequence: Synthetic oligonucleotide
cagccauuuuuagauuggu

SEQ ID NO: 137136 - RNA, 19 nt, Artificial Sequence
  Description of Artificial Sequence: Synthetic oligonucleotide
uucuguuuucguaccuucc

SEQ ID NO: 137137 - RNA, 19 nt, Artificial Sequence
  Description of Artificial Sequence: Synthetic oligonucleotide
ccacuggccucaagugagc

SEQ ID NO: 137138 - RNA, 19 nt, Artificial Sequence
  Description of Artificial Sequence: Synthetic oligonucleotide
ccaagaaacacugccugcc

SEQ ID NO: 137139 - RNA, 19 nt, Artificial Sequence
  Description of Artificial Sequence: Synthetic oligonucleotide
ccucugucugucuucuccu

SEQ ID NO: 137140 - RNA, 19 nt, Artificial Sequence
  Description of Artificial Sequence: Synthetic oligonucleotide
uaauucugcagguggaggu

SEQ ID NO: 137141 - RNA, 19 nt, Artificial Sequence
  Description of Artificial Sequence: Synthetic oligonucleotide
uugcuagucuaguuuccuu

SEQ ID NO: 137142 - RNA, 19 nt, Artificial Sequence
  Description of Artificial Sequence: Synthetic oligonucleotide
uuuugagauacuauuuuca

SEQ ID NO: 137143 - RNA, 19 nt, Artificial Sequence
  Description of Artificial Sequence: Synthetic oligonucleotide
auuuuugugagccucuuug

SEQ ID NO: 137144 - RNA, 19 nt, Artificial Sequence
  Description of Artificial Sequence: Synthetic oligonucleotide
guaauaaaaugguacauuu

SEQ ID NO: 137145 - RNA, 19 nt, Artificial Sequence
  Description of Artificial Sequence: Synthetic oligonucleotide
aauaaaaugguacauuucu

SEQ ID NO: 137146 - RNA, 25 nt, Artificial Sequence
  Description of Artificial Sequence: Synthetic oligonucleotide
gagcggagccgcgggcgggagggcg

SEQ ID NO: 137147 - RNA, 25 nt, Artificial Sequence
  Description of Artificial Sequence: Synthetic oligonucleotide
ggacggaccgacugacgguagggac

SEQ ID NO: 137148 - RNA, 25 nt, Artificial Sequence
  Description of Artificial Sequence: Synthetic oligonucleotide
cgggaggcgagcaagauggcgcaga

SEQ ID NO: 137149 - RNA, 25 nt, Artificial Sequence
  Description of Artificial Sequence: Synthetic oligonucleotide
acgcagggcacccggaggaaagucu

SEQ ID NO: 137150 - RNA, 25 nt, Artificial Sequence
  Description of Artificial Sequence: Synthetic oligonucleotide
uguuacuacuacgacggggauguug

SEQ ID NO: 137151 - RNA, 25 nt, Artificial Sequence
  Description of Artificial Sequence: Synthetic oligonucleotide
ggaaauuacuauuauggacaaggcc

SEQ ID NO: 137152 - RNA, 25 nt, Artificial Sequence
  Description of Artificial Sequence: Synthetic oligonucleotide
cacccaaugaagccucaccgaaucc

SEQ ID NO: 137153 - RNA, 25 nt, Artificial Sequence
  Description of Artificial Sequence: Synthetic oligonucleotide
cgcaugacucauaauuugcugcuca

SEQ ID NO: 137154 - RNA, 25 nt, Artificial Sequence
  Description of Artificial Sequence: Synthetic oligonucleotide
aacuauggucucuaccgaaaaaugg

SEQ ID NO: 137155 - RNA, 25 nt, Artificial Sequence
  Description of Artificial Sequence: Synthetic oligonucleotide
gaaaucuaucgcccucacaaagcca

SEQ ID NO: 137156 - RNA, 25 nt, Artificial Sequence
  Description of Artificial Sequence: Synthetic oligonucleotide
aaugcugaggagaugaccaaguacc

SEQ ID NO: 137157 - RNA, 25 nt, Artificial Sequence
  Description of Artificial Sequence: Synthetic oligonucleotide
cacagcgaugacuacauuaaauucu

SEQ ID NO: 137158 - RNA, 25 nt, Artificial Sequence
  Description of Artificial Sequence: Synthetic oligonucleotide
uugcgcuccauccguccagauaaca

SEQ ID NO: 137159 - RNA, 25 nt, Artificial Sequence
  Description of Artificial Sequence: Synthetic oligonucleotide
augucggaguacagcaagcagaugc

SEQ ID NO: 137160 - RNA, 25 nt, Artificial Sequence
  Description of Artificial Sequence: Synthetic oligonucleotide
cagagauucaacguuggugaggacu

SEQ ID NO: 137161 - RNA, 25 nt, Artificial Sequence
  Description of Artificial Sequence: Synthetic oligonucleotide
uguccaguauucgauggccuguuug

SEQ ID NO: 137162 - RNA, 25 nt, Artificial Sequence
  Description of Artificial Sequence: Synthetic oligonucleotide
gaguucugucaguugucuacuggug

SEQ ID NO: 137163 - RNA, 25 nt, Artificial Sequence
  Description of Artificial Sequence: Synthetic oligonucleotide
gguucuguggcaagugcugugaaac

SEQ ID NO: 137164 - RNA, 25 nt, Artificial Sequence
  Description of Artificial Sequence: Synthetic oligonucleotide
cuuaauaagcagcagacggacaucg

SEQ ID NO: 137165 - RNA, 25 nt, Artificial Sequence
  Description of Artificial Sequence: Synthetic oligonucleotide
gcugugaauugggcugggggccugc

SEQ ID NO: 137166 - RNA, 25 nt, Artificial Sequence
  Description of Artificial Sequence: Synthetic oligonucleotide
caccaugcaaagaaguccgaggcau

SEQ ID NO: 137167 - RNA, 25 nt, Artificial Sequence
  Description of Artificial Sequence: Synthetic oligonucleotide
ucuggcuucuguuacgucaaugaua

SEQ ID NO: 137168 - RNA, 25 nt, Artificial Sequence
  Description of Artificial Sequence: Synthetic oligonucleotide
aucgucuuggccauccuggaacugc

SEQ ID NO: 137169 - RNA, 25 nt, Artificial Sequence
  Description of Artificial Sequence: Synthetic oligonucleotide
cuaaaguaucaccagagggugcugu

SEQ ID NO: 137170 - RNA, 25 nt, Artificial Sequence
  Description of Artificial Sequence: Synthetic oligonucleotide
uacauugacauugauauucaccaug

SEQ ID NO: 137171 - RNA, 25 nt, Artificial Sequence
  Description of Artificial Sequence: Synthetic oligonucleotide
ggugacggcguggaagaggccuucu

SEQ ID NO: 137172 - RNA, 25 nt, Artificial Sequence
  Description of Artificial Sequence: Synthetic oligonucleotide
uacaccacggaccgggucaugacug

SEQ ID NO: 137173 - RNA, 25 nt, Artificial Sequence
  Description of Artificial Sequence: Synthetic oligonucleotide
guguccuuucauaaguauggagagu

SEQ ID NO: 137174 - RNA, 25 nt, Artificial Sequence
  Description of Artificial Sequence: Synthetic oligonucleotide
uacuucccaggaacuggggaccuac

SEQ ID NO: 137175 - RNA, 25 nt, Artificial Sequence
  Description of Artificial Sequence: Synthetic oligonucleotide
cgggauaucggggcuggcaaaggca

SEQ ID NO: 137176 - RNA, 25 nt, Artificial Sequence
  Description of Artificial Sequence: Synthetic oligonucleotide
aaguauuaugcuguuaacuacccgc

SEQ ID NO: 137177 - RNA, 25 nt, Artificial Sequence
  Description of Artificial Sequence: Synthetic oligonucleotide
cuccgagacgggauugaugacgagu

SEQ ID NO: 137178 - RNA, 25 nt, Artificial Sequence
  Description of Artificial Sequence: Synthetic oligonucleotide
uccuaugaggccauuuucaagccgg

SEQ ID NO: 137179 - RNA, 25 nt, Artificial Sequence
  Description of Artificial Sequence: Synthetic oligonucleotide
gucauguccaaaguaauggagaugu

SEQ ID NO: 137180 - RNA, 25 nt, Artificial Sequence
  Description of Artificial Sequence: Synthetic oligonucleotide
uuccagccuagugcgguggucuuac

SEQ ID NO: 137181 - RNA, 25 nt, Artificial Sequence
  Description of Artificial Sequence: Synthetic oligonucleotide
caguguggcucagacucccuaucug

SEQ ID NO: 137182 - RNA, 25 nt, Artificial Sequence
  Description of Artificial Sequence: Synthetic oligonucleotide
ggggaucgguuagguugcuucaauc

SEQ ID NO: 137183 - RNA, 25 nt, Artificial Sequence
  Description of Artificial Sequence: Synthetic oligonucleotide
cuaacuaucaaaggacacgccaagu

SEQ ID NO: 137184 - RNA, 25 nt, Artificial Sequence
  Description of Artificial Sequence: Synthetic oligonucleotide
uguguggaauuugucaagagcuuua

SEQ ID NO: 137185 - RNA, 25 nt, Artificial Sequence
  Description of Artificial Sequence: Synthetic oligonucleotide
aaccugccuaugcugaugcugggag

SEQ ID NO: 137186 - RNA, 25 nt, Artificial Sequence
  Description of Artificial Sequence: Synthetic oligonucleotide
ggcggugguuacaccauucguaacg

SEQ ID NO: 137187 - RNA, 25 nt, Artificial Sequence
  Description of Artificial Sequence: Synthetic oligonucleotide
guugcccggugcuggacauaugaga

SEQ ID NO: 137188 - RNA, 25 nt, Artificial Sequence
  Description of Artificial Sequence: Synthetic oligonucleotide
acagcuguggcccuggauacggaga

SEQ ID NO: 137189 - RNA, 25 nt, Artificial Sequence
  Description of Artificial Sequence: Synthetic oligonucleotide
aucccuaaugagcuuccauacaaug

SEQ ID NO: 137190 - RNA, 25 nt, Artificial Sequence
  Description of Artificial Sequence: Synthetic oligonucleotide
gacuacuuugaauacuuuggaccag

SEQ ID NO: 137191 - RNA, 25 nt, Artificial Sequence
  Description of Artificial Sequence: Synthetic oligonucleotide
gauuucaagcuccacaucaguccuu

SEQ ID NO: 137192 - RNA, 25 nt, Artificial Sequence
  Description of Artificial Sequence: Synthetic oligonucleotide
uccaauaugacuaaccagaacacga

SEQ ID NO: 137193 - RNA, 25 nt, Artificial Sequence
  Description of Artificial Sequence: Synthetic oligonucleotide
aaugaguaccuggagaagaucaaac

SEQ ID NO: 137194 - RNA, 25 nt, Artificial Sequence
  Description of Artificial Sequence: Synthetic oligonucleotide
cagcgacuguuugagaaccuuagaa

SEQ ID NO: 137195 - RNA, 25 nt, Artificial Sequence
  Description of Artificial Sequence: Synthetic oligonucleotide
augcugccgcacgcaccuggggucc

SEQ ID NO: 137196 - RNA, 25 nt, Artificial Sequence
  Description of Artificial Sequence: Synthetic oligonucleotide
caaaugcaggcgauuccugaggacg

SEQ ID NO: 137197 - RNA, 25 nt, Artificial Sequence
  Description of Artificial Sequence: Synthetic oligonucleotide
gccaucccugaggagaguggcgaug

SEQ ID NO: 137198 - RNA, 25 nt, Artificial Sequence
  Description of Artificial Sequence: Synthetic oligonucleotide
gaggacgaagacgacccugacaagc

SEQ ID NO: 137199 - RNA, 25 nt, Artificial Sequence
  Description of Artificial Sequence: Synthetic oligonucleotide
cgcaucucgaucugcuccucugaca

SEQ ID NO: 137200 - RNA, 25 nt, Artificial Sequence
  Description of Artificial Sequence: Synthetic oligonucleotide
aaacgaauugccugugaggaagagu

SEQ ID NO: 137201 - RNA, 25 nt, Artificial Sequence
  Description of Artificial Sequence: Synthetic oligonucleotide
uucuccgauucugaagaggagggag

SEQ ID NO: 137202 - RNA, 25 nt, Artificial Sequence
  Description of Artificial Sequence: Synthetic oligonucleotide
gaggggggccgcaagaacucuucca

SEQ ID NO: 137203 - RNA, 25 nt, Artificial Sequence
  Description of Artificial Sequence: Synthetic oligonucleotide
aacuucaaaaaagccaagagaguca

SEQ ID NO: 137204 - RNA, 25 nt, Artificial Sequence
  Description of Artificial Sequence: Synthetic oligonucleotide
aaaacagaggaugaaaaagagaaag

SEQ ID NO: 137205 - RNA, 25 nt, Artificial Sequence
  Description of Artificial Sequence: Synthetic oligonucleotide
gacccagaggagaagaaagaaguca

SEQ ID NO: 137206 - RNA, 25 nt, Artificial Sequence
  Description of Artificial Sequence: Synthetic oligonucleotide
accgaagaggagaaaaccaaggagg

SEQ ID NO: 137207 - RNA, 25 nt, Artificial Sequence
  Description of Artificial Sequence: Synthetic oligonucleotide
gagaagccagaagccaaagggguca

SEQ ID NO: 137208 - RNA, 25 nt, Artificial Sequence
  Description of Artificial Sequence: Synthetic oligonucleotide
aaggaggaggucaaguuggccugaa

SEQ ID NO: 137209 - RNA, 25 nt, Artificial Sequence
  Description of Artificial Sequence: Synthetic oligonucleotide
auggaccucuccagcucuggcuucc

SEQ ID NO: 137210 - RNA, 25 nt, Artificial Sequence
  Description of Artificial Sequence: Synthetic oligonucleotide
cugcugagucccucacguuucuucc

SEQ ID NO: 137211 - RNA, 25 nt, Artificial Sequence
  Description of Artificial Sequence: Synthetic oligonucleotide
cccaaccccucagauuuuauauuuu

SEQ ID NO: 137212 - RNA, 25 nt, Artificial Sequence
  Description of Artificial Sequence: Synthetic oligonucleotide
ucuauuucucuguguauuuauauaa

SEQ ID NO: 137213 - RNA, 25 nt, Artificial Sequence
  Description of Artificial Sequence: Synthetic oligonucleotide
aaaauuuauuaaauauaaauauccc

SEQ ID NO: 137214 - RNA, 25 nt, Artificial Sequence
  Description of Artificial Sequence: Synthetic oligonucleotide
ccagggacagaaaccaaggccccga

SEQ ID NO: 137215 - RNA, 25 nt, Artificial Sequence
  Description of Artificial Sequence: Synthetic oligonucleotide
agcucagggcagcugugcuggguga

SEQ ID NO: 137216 - RNA, 25 nt, Artificial Sequence
  Description of Artificial Sequence: Synthetic oligonucleotide
agcucuuccaggagccaccuugcca

SEQ ID NO: 137217 - RNA, 25 nt, Artificial Sequence
  Description of Artificial Sequence: Synthetic oligonucleotide
acccauucuucccguucuuaacuuu

SEQ ID NO: 137218 - RNA, 25 nt, Artificial Sequence
  Description of Artificial Sequence: Synthetic oligonucleotide
ugaaccauaaagggugccaggucug

SEQ ID NO: 137219 - RNA, 25 nt, Artificial Sequence
  Description of Artificial Sequence: Synthetic oligonucleotide
gggugaaagggauacuuuuaugcaa

SEQ ID NO: 137220 - RNA, 25 nt, Artificial Sequence
  Description of Artificial Sequence: Synthetic oligonucleotide
accauaagacaaacuccugaaaugc

SEQ ID NO: 137221 - RNA, 25 nt, Artificial Sequence
  Description of Artificial Sequence: Synthetic oligonucleotide
ccaagugccugcuuaguagcuuugg

SEQ ID NO: 137222 - RNA, 25 nt, Artificial Sequence
  Description of Artificial Sequence: Synthetic oligonucleotide
gaaaggugcccuuauugaacauucu

SEQ ID NO: 137223 - RNA, 25 nt, Artificial Sequence
  Description of Artificial Sequence: Synthetic oligonucleotide
uagaagggguggcugggucuucaag

SEQ ID NO: 137224 - RNA, 25 nt, Artificial Sequence
  Description of Artificial Sequence: Synthetic oligonucleotide
ggaucuccuguuuuuuucaggcucc

SEQ ID NO: 137225 - RNA, 25 nt, Artificial Sequence
  Description of Artificial Sequence: Synthetic oligonucleotide
cuaaaguaacaucagccauuuuuag

SEQ ID NO: 137226 - RNA, 25 nt, Artificial Sequence
  Description of Artificial Sequence: Synthetic oligonucleotide
gauugguucuguuuucguaccuucc

SEQ ID NO: 137227 - RNA, 25 nt, Artificial Sequence
  Description of Artificial Sequence: Synthetic oligonucleotide
ccacuggccucaagugagccaagaa

SEQ ID NO: 137228 - RNA, 25 nt, Artificial Sequence
  Description of Artificial Sequence: Synthetic oligonucleotide
aacacugccugcccucugucugucu

SEQ ID NO: 137229 - RNA, 25 nt, Artificial Sequence
  Description of Artificial Sequence: Synthetic oligonucleotide
uucuccuaauucugcagguggaggu

SEQ ID NO: 137230 - RNA, 25 nt, Artificial Sequence
  Description of Artificial Sequence: Synthetic oligonucleotide
uugcuagucuaguuuccuuuuugag

SEQ ID NO: 137231 - RNA, 25 nt, Artificial Sequence
  Description of Artificial Sequence: Synthetic oligonucleotide
gauacuauuuucauuuuugugagcc

SEQ ID NO: 137232 - RNA, 25 nt, Artificial Sequence
  Description of Artificial Sequence: Synthetic oligonucleotide
cucuuuguaauaaaaugguacauuu

SEQ ID NO: 137233 - RNA, 25 nt, Artificial Sequence
  Description of Artificial Sequence: Synthetic oligonucleotide
cuuuguaauaaaaugguacauuucu

SEQ ID NO: 137234 - RNA, 6659 nt, Homo sapiens
augcgcucaccucccugcggccuccugaggugguuugguggcccccuccucgcgaguuggugccgcugccaccuccgauuccgagcuuucggcaccucugccgggugguaccgagccuucccggcgcccccuccucuccucccaccggccugcccuuccccgcgggacuaucgcccccacguuucccucagcccuuuucucucccggccgagccgcggcggcagcagcagcagcagcagcagcaggaggaggagcccgguggcggcgguggccggggagcccauggcguacagucaaggaggcggcaaaaaaaaagucugcuacuacuacgacggugauauuggaaauuauuauuauggacagggucaucccaugaagccucauagaauccgcaugacccauaacuugcuguuaaauuauggcuuauacagaaaaauggaaauauauaggccccauaaagccacugccgaagaaaugacaaaauaucacagugaugaguauaucaaauuucuacggucaauaagaccagauaacaugucugaguauaguaagcagaugcagagauuuaauguuggagaagauuguccaguguuugauggacucuuugaguuuugucagcucucaacuggcgguucaguugcuggagcugugaaguuaaaccgacaacagacugauauggcuguuaauugggcuggaggauuacaucaugcuaagaaaucagaagcaucaggauucuguuacguuaaugauauugugcuugccauccuugaauuacuaaaguaucaucagagagucuuauauauugauauagauauucaucauggugaugguguugaagaagcuuuuuauacaacagaucguguaaugacgguaucauuccauaaauauggggaauacuuuccuggcacaggagacuugagggauauuggugcuggaaaaggcaaauacuaugcugucaauuuuccaaugagagaugguauagaugaugagucauaugggcagauauuuaagccuauuaucucaaaggugauggagauguaucaaccuagugcugugguauuacaguguggugcagacucauuaucuggugauagacuggguuguuucaaucuaacagucaaaggucaugcuaaauguguagaaguuguaaaaacuuuuaacuuaccauuacugaugcuuggaggagguggcuacacaauccguaauguugcucgauguuggacauaugagacugcaguugcccuugauugugagauucccaaugaguugccauauaaugauuacuuugaguauuuuggaccagacuucaaacugcauauuaguccuucaaacaugacaaaccagaacacuccagaauauauggaaaagauaaaacagcguuuguuugaaaauuugcgcauguuaccucaugcaccugguguccagaugcaagcuauuccagaagaugcuguucaugaagacaguggagaugaagauggagaagauccagacaagagaauuucuauucgagcaucagacaagcggauagcuugugaugaagaauucucagauucugaggaugaaggagaaggaggucgaagaaauguggcugaucauaagaaaggagcaaagaaagcuagaauugaagaagauaagaaagaaacagaggacaaaaaaacagacguuaaggaagaagauaaauccaaggacaacaguggugaaaaaacagauaccaaaggaaccaaaucagaacagcucagcaaccccugaauuugacagucucaccaauuucagaaaaucauuaaaaagaaaauauugaaaggaaaauguuuucuuuuugaagacuucuggcuucauuuuauacuacuuuggcauggacuguauuuauuuucaaauggcuuuuucguuuuuguuuuucuuggcaaguuuuauugugaguuuuucuaauuaugaagcaaaauuucuuuucuccaccaugcuuuaugugauaguauuuaaaauugaugugaguuauuaugucaaaaaaacugaucuauuaaagaaguaauuggccuuucugagcugauuuuuccaucuuuuguaauuaucuuuauuaaaaaauuguacuuggauuaucuuuugucuguuuauuacuacaauaugaagucuuguuucaguggcuaaugacaucauuucuguagacuuacaauacacucuaggugaaagauaaugauuacagcuugaaagauaacuauuugcuguuucuuugggaagaguauuuauaguaauuauuacuuaucuuugcaauagaaauucuaccaccuugcccucuauagcuuagccaguuaguaucagugaagauuaacaucccauuacaauuuaugaaauaauacagacucugcaauugagauguaggaguucuuugaguugacccaaagauucucaaaauugaaauggaaauucugaauugaaagaagaaacugaccagaacuuguauugaccagacuugccuauaguauauugcugguuuaaaauggaaccugcagacaaaaccuguuucuuuuacugcauuuacauggcauccagguuccauuauuauuuacgugacauccagguuucuaacucaaggaaauaaacacaacugauuuaucauucagcaacuacuuauugugugucugcccauuuuaagacuguaggaguguaacugaauauaauggaaaaaugcuuucacucagagcuuacacucagagcuuacauucuaguagcaggaagcagacaaauggggguaacuccugcuacuaagaugugcaaagaagacaaaacauuuuaggaacuugccaaaaucagugaaaucucccuuuuugucaggcccacauugauucuuuugagauuaaaaauuacagaaugccagaagauaauucagucaaaaguauuucucuucagugcaguaaaauauuaaaagaaaaaauauuucucuacaagccucuuaaauguuucagacauucacaauagcaccuagacuuuuguaaugaacagcugugcacccaccccgacuuaacaaauauuuuacuuuugcuauauuugcuucgguguuuuuuucuuaaaauacaccgaaauugaagcucucuuuguguacuuugucguuuguaauccucccucccucccagccuuaagaaguaaucaccauugugauuauuuuauccauguuuuugugaauauuuuacccauguuuuuguacuuuugcuacauauuuguuaucaaucuguaaaccuuuaugacauuaggaacuaagaaacuuagucccuucguuagggggauaaugaaauguauuuaguguuugugaaacauagaugguauguauuuggacaauucuguaacuuugcuuuuuuuauuuuuauuuuuccauagcuuauuggggaacaggugguguuugguuacaugauuaaguucuuuaguggugauuugugggauuuugguggacccaucacccaagcaguguacacugcacccuauuuguaaucuuuuaucccucgccccccucccaccaugccucccgucuaccaugaugauccuguuuuaaauaagaaaauaccauuucgcaggcuccagauguucuggcauccucccuguggauuucccagugccugcagcucacaggacaacaggggcugugguagagucaccuaugagauccuggaguaguggauggaggagauggaacagugaagacggaaacugagcucaguauccgggugccaggagacaaaggcccuuugcuuuuuuucauuuaauauucugaucuaccccuguugacacauguuaaguauaguucauuuugacugcuauguauuauguuccauugugugaacauacugaaauuguacacuucaauacuauacuggaucuccuuggguguauuuaagagguuuuguuuuucuaaguaguugguuauauacaacuaaaaccucaagagaacuaucuaaagcaauuucagcaaggugauuugguacagcauuaauaaacagaaaucaguaacacuuagugaccaagucuguuggaagaacaaagacccccauuuguaauaacaaaauuuuuagaaauaauauguaaagaagcuaugguucuugugucuaguaaggucaauguaacauaguaagaugucagaauacccuaauacuuuaaaaaauucauauaggauaaaaaugauauuugaaauuggcaaggaaagacauuauuuuguaaguggaauugggacaacaacugguaaccaaauggaaaacccaguuuucugcccuccacuagaagauuuaaauaggaaaagauaaaacuaccaaaaaccuaaacucuuaaagcaaauggauugaagaaggccuaagugugacaccaaacucaacuauaaaagauauauuugauaacaaaaaaaaaauuaguucaguggaccaacaaaaacuuagaagacaagucaagaaaaaugacaaaagacagagugggaggcagauuuguaacucauccaggucaaaaggcucauaucuaaagauaguagaggaacaaaauguauaaggaugugaacugggaaacaaauacauauaaauaguuuguaaauaugaaaagaucuuuaaccucaguaaauaaaaagcuauagagagacuuauuuuuuaacuuaguuuuuuaaaccuauuauguuuauuuauuuuuucuuuuuuugagacggagucucgcuguugcccaggcuggugugcaauggcgcaaucucggcucacugcaaccuccgccucccagguugaagccauucuccugccucagccuccugaguagcugggauuacaggcgccugucaccacgcccagcuaauuguucgcauuuuuaguagagacgggguuucacuauguuggccaggcuggccucgaacuccugaccucaugauccacccaccuuggccuuccaaagugcugggauuacaggugugagcugccgcaccuggcuguuuaucucuuuuuuuuagagaaaggaucucggucacccaggauggagugugguagccugaucauaucucacuacaucuuagaacuucuaggcuuaggguauucucccaccucagccucccaaguagcugggacuacaagugugcaccaucacaccuagcugauuuuuacauuuuuauuuuggagagauggugucucccuguguugcccaggcuggucacaaacuccuaggcucaagcgauucuccugacucaggcaugagccaccguacccggccuaaaccuaucauguuacagacuuagaaagcaacuauugucaaguguuugaggaaacucaggucagguuugguaaacuaagauauuaacucaaguaaagcucuuuaauucauuuaaugaaggugccacauugucucaguucucuauggcaugggugaaugcuguucuaagucagcauugguacucuaagcuaguuacaucauaucuaagcuuugcccuucuaccagagcugcuagcauucugucaaugggcaauuauuugaaguucuuacauugaaguuagucaccuacaucuucuguuuuuuaugguuuugauguaguaauacugcugaaguuuuuuugauaacugcgauucauaauauuuguuauucauauugugauauaaaugauaagggcuuuugaaaacaaguaguaaucauuucaauagcuuaggaucuccaccauaaucuuaggaaaauuacuaaccucugugccucaguugcuucaucauuuaaaaugaggaaaauaauagucccuacuuaauagguuuguugugaggauugaguuaauaacauaguuaaugcucaguaaggguuagcugcuauuuuuuuuucuuuuuuuuuugaaagagucucacucuguugcccagguuggagugcaguggcaugaucuuggcucacugcauccucugcuuccuagguucaggugauucucaugcuucagccucccaagcagcugggaguacaggugugcaccaccacaccuggcuaauuuuuguauauuuaguagagacggguucucaccauauuguccaggcuggucuugaacuccuuaccucaaaugauccacccgccugggccucccaaagugcugggauuacaagcaugagccaccgcgccuggcuugcuauuguuaugagguaaagguagauagaugggugagaguggugccaggggaaguguuaaauuuuugaguguuccuuuagaugccagauggguuguaucugagccuuuuauugcaguuugaugccuacuagugugaagacuacuaggucauaguggauagagaagcaaucuuuuggagaccugauuuuagcaaggauacgaauaauauuugacaacuuuggggggaucuugaugccucuguaauuuacucaaggauaaucucaagaaaaauggcauuaaguagauuacagaaaaaauagaacuaucauauuguuauuauuggcuauuuacaugagcaaugcggagaaauguuuaggauuacagcauuuagaagcuucucaauugcugcauuuccucacuguaccacaagauggcagauacugcauuuaaaauuuuuuuuucuguguguuuucucuuauagucacuugguggccauguaacaagcagagcaacauguauuaacagauucuuuuugaaugcaauauuggauuaaaaacuuugaauuaaaaaaaaaaaaaaaaa

SEQ ID NO: 137235 - RNA, 19 nt, Artificial Sequence
  Description of Artificial Sequence: Synthetic oligonucleotide
augcgcucaccucccugcg

SEQ ID NO: 137236 - RNA, 19 nt, Artificial Sequence
  Description of Artificial Sequence: Synthetic oligonucleotide
ggccuccugaggugguuug

SEQ ID NO: 137237 - RNA, 19 nt, Artificial Sequence
  Description of Artificial Sequence: Synthetic oligonucleotide
gguggcccccuccucgcga

SEQ ID NO: 137238 - RNA, 19 nt, Artificial Sequence
  Description of Artificial Sequence: Synthetic oligonucleotide
aguuggugccgcugccacc

SEQ ID NO: 137239 - RNA, 19 nt, Artificial Sequence
  Description of Artificial Sequence: Synthetic oligonucleotide
cuccgauuccgagcuuucg

SEQ ID NO: 137240 - RNA, 19 nt, Artificial Sequence
  Description of Artificial Sequence: Synthetic oligonucleotide
ggcaccucugccggguggu

SEQ ID NO: 137241 - RNA, 19 nt, Artificial Sequence
  Description of Artificial Sequence: Synthetic oligonucleotide
uaccgagccuucccggcgc

SEQ ID NO: 137242 - RNA, 19 nt, Artificial Sequence
  Description of Artificial Sequence: Synthetic oligonucleotide
cccccuccucuccucccac

SEQ ID NO: 137243 - RNA, 19 nt, Artificial Sequence
  Description of Artificial Sequence: Synthetic oligonucleotide
ccggccugcccuuccccgc

SEQ ID NO: 137244 - RNA, 19 nt, Artificial Sequence
  Description of Artificial Sequence: Synthetic oligonucleotide
cgggacuaucgcccccacg

SEQ ID NO: 137245 - RNA, 19 nt, Artificial Sequence
  Description of Artificial Sequence: Synthetic oligonucleotide
guuucccucagcccuuuuc

SEQ ID NO: 137246 - RNA, 19 nt, Artificial Sequence
  Description of Artificial Sequence: Synthetic oligonucleotide
cucucccggccgagccgcg

SEQ ID NO: 137247 - RNA, 19 nt, Artificial Sequence
  Description of Artificial Sequence: Synthetic oligonucleotide
ggcggcagcagcagcagca

SEQ ID NO: 137248 - RNA, 19 nt, Artificial Sequence
  Description of Artificial Sequence: Synthetic oligonucleotide
agcagcagcaggaggagga

SEQ ID NO: 137249 - RNA, 19 nt, Artificial Sequence
  Description of Artificial Sequence: Synthetic oligonucleotide
agcccgguggcggcggugg

SEQ ID NO: 137250 - RNA, 19 nt, Artificial Sequence
  Description of Artificial Sequence: Synthetic oligonucleotide
gccggggagcccauggcgu

SEQ ID NO: 137251 - RNA, 19 nt, Artificial Sequence
  Description of Artificial Sequence: Synthetic oligonucleotide
uacagucaaggaggcggca

SEQ ID NO: 137252 - RNA, 19 nt, Artificial Sequence
  Description of Artificial Sequence: Synthetic oligonucleotide
aaaaaaaaagucugcuacu

SEQ ID NO: 137253 - RNA, 19 nt, Artificial Sequence
  Description of Artificial Sequence: Synthetic oligonucleotide
uacuacgacggugauauug

SEQ ID NO: 137254 - RNA, 19 nt, Artificial Sequence
  Description of Artificial Sequence: Synthetic oligonucleotide
ggaaauuauuauuauggac

SEQ ID NO: 137255 - RNA, 19 nt, Artificial Sequence
  Description of Artificial Sequence: Synthetic oligonucleotide
cagggucaucccaugaagc

SEQ ID NO: 137256 - RNA, 19 nt, Artificial Sequence
  Description of Artificial Sequence: Synthetic oligonucleotide
ccucauagaauccgcauga

SEQ ID NO: 137257 - RNA, 19 nt, Artificial Sequence
  Description of Artificial Sequence: Synthetic oligonucleotide
acccauaacuugcuguuaa

SEQ ID NO: 137258 - RNA, 19 nt, Artificial Sequence
  Description of Artificial Sequence: Synthetic oligonucleotide
aauuauggcuuauacagaa

SEQ ID NO: 137259 - RNA, 19 nt, Artificial Sequence
  Description of Artificial Sequence: Synthetic oligonucleotide
aaaauggaaauauauaggc

SEQ ID NO: 137260 - RNA, 19 nt, Artificial Sequence
  Description of Artificial Sequence: Synthetic oligonucleotide
ccccauaaagccacugccg

SEQ ID NO: 137261 - RNA, 19 nt, Artificial Sequence
  Description of Artificial Sequence: Synthetic oligonucleotide
gaagaaaugacaaaauauc

SEQ ID NO: 137262 - RNA, 19 nt, Artificial Sequence
  Description of Artificial Sequence: Synthetic oligonucleotide
cacagugaugaguauauca

SEQ ID NO: 137263 - RNA, 19 nt, Artificial Sequence
  Description of Artificial Sequence: Synthetic oligonucleotide
aaauuucuacggucaauaa

SEQ ID NO: 137264 - RNA, 19 nt, Artificial Sequence
  Description of Artificial Sequence: Synthetic oligonucleotide
agaccagauaacaugucug

SEQ ID NO: 137265 - RNA, 19 nt, Artificial Sequence
  Description of Artificial Sequence: Synthetic oligonucleotide
gaguauaguaagcagaugc

SEQ ID NO: 137266 - RNA, 19 nt, Artificial Sequence
  Description of Artificial Sequence: Synthetic oligonucleotide
cagagauuuaauguuggag

SEQ ID NO: 137267 - RNA, 19 nt, Artificial Sequence
  Description of Artificial Sequence: Synthetic oligonucleotide
gaagauuguccaguguuug

SEQ ID NO: 137268 - RNA, 19 nt, Artificial Sequence
  Description of Artificial Sequence: Synthetic oligonucleotide
gauggacucuuugaguuuu

SEQ ID NO: 137269 - RNA, 19 nt, Artificial Sequence
  Description of Artificial Sequence: Synthetic oligonucleotide
ugucagcucucaacuggcg

SEQ ID NO: 137270 - RNA, 19 nt, Artificial Sequence
  Description of Artificial Sequence: Synthetic oligonucleotide
gguucaguugcuggagcug

SEQ ID NO: 137271 - RNA, 19 nt, Artificial Sequence
  Description of Artificial Sequence: Synthetic oligonucleotide
gugaaguuaaaccgacaac

SEQ ID NO: 137272 - RNA, 19 nt, Artificial Sequence
  Description of Artificial Sequence: Synthetic oligonucleotide
cagacugauauggcuguua

SEQ ID NO: 137273 - RNA, 19 nt, Artificial Sequence
  Description of Artificial Sequence: Synthetic oligonucleotide
aauugggcuggaggauuac

SEQ ID NO: 137274 - RNA, 19 nt, Artificial Sequence
  Description of Artificial Sequence: Synthetic oligonucleotide
caucaugcuaagaaaucag

SEQ ID NO: 137275 - RNA, 19 nt, Artificial Sequence
  Description of Artificial Sequence: Synthetic oligonucleotide
gaagcaucaggauucuguu

SEQ ID NO: 137276 - RNA, 19 nt, Artificial Sequence
  Description of Artificial Sequence: Synthetic oligonucleotide
uacguuaaugauauugugc

SEQ ID NO: 137277 - RNA, 19 nt, Artificial Sequence
  Description of Artificial Sequence: Synthetic oligonucleotide
cuugccauccuugaauuac

SEQ ID NO: 137278 - RNA, 19 nt, Artificial Sequence
  Description of Artificial Sequence: Synthetic oligonucleotide
cuaaaguaucaucagagag

SEQ ID NO: 137279 - RNA, 19 nt, Artificial Sequence
  Description of Artificial Sequence: Synthetic oligonucleotide
gucuuauauauugauauag

SEQ ID NO: 137280 - RNA, 19 nt, Artificial Sequence
  Description of Artificial Sequence: Synthetic oligonucleotide
gauauucaucauggugaug

SEQ ID NO: 137281 - RNA, 19 nt, Artificial Sequence
  Description of Artificial Sequence: Synthetic oligonucleotide
gguguugaagaagcuuuuu

SEQ ID NO: 137282 - RNA, 19 nt, Artificial Sequence
  Description of Artificial Sequence: Synthetic oligonucleotide
uauacaacagaucguguaa

SEQ ID NO: 137283 - RNA, 19 nt, Artificial Sequence
  Description of Artificial Sequence: Synthetic oligonucleotide
augacgguaucauuccaua

SEQ ID NO: 137284 - RNA, 19 nt, Artificial Sequence
  Description of Artificial Sequence: Synthetic oligonucleotide
aaauauggggaauacuuuc

SEQ ID NO: 137285 - RNA, 19 nt, Artificial Sequence
  Description of Artificial Sequence: Synthetic oligonucleotide
ccuggcacaggagacuuga

SEQ ID NO: 137286 - RNA, 19 nt, Artificial Sequence
  Description of Artificial Sequence: Synthetic oligonucleotide
agggauauuggugcuggaa

SEQ ID NO: 137287 - RNA, 19 nt, Artificial Sequence
  Description of Artificial Sequence: Synthetic oligonucleotide
aaaggcaaauacuaugcug

SEQ ID NO: 137288 - RNA, 19 nt, Artificial Sequence
  Description of Artificial Sequence: Synthetic oligonucleotide
gucaauuuuccaaugagag

SEQ ID NO: 137289 - RNA, 19 nt, Artificial Sequence
  Description of Artificial Sequence: Synthetic oligonucleotide
gaugguauagaugaugagu

SEQ ID NO: 137290 - RNA, 19 nt, Artificial Sequence
  Description of Artificial Sequence: Synthetic oligonucleotide
ucauaugggcagauauuua

SEQ ID NO: 137291 - RNA, 19 nt, Artificial Sequence
  Description of Artificial Sequence: Synthetic oligonucleotide
aagccuauuaucucaaagg

SEQ ID NO: 137292 - RNA, 19 nt, Artificial Sequence
  Description of Artificial Sequence: Synthetic oligonucleotide
gugauggagauguaucaac

SEQ ID NO: 137293 - RNA, 19 nt, Artificial Sequence
  Description of Artificial Sequence: Synthetic oligonucleotide
ccuagugcugugguauuac

SEQ ID NO: 137294 - RNA, 19 nt, Artificial Sequence
  Description of Artificial Sequence: Synthetic oligonucleotide
caguguggugcagacucau

SEQ ID NO: 137295 - RNA, 19 nt, Artificial Sequence
  Description of Artificial Sequence: Synthetic oligonucleotide
uuaucuggugauagacugg

SEQ ID NO: 137296 - RNA, 19 nt, Artificial Sequence
  Description of Artificial Sequence: Synthetic oligonucleotide
gguuguuucaaucuaacag

SEQ ID NO: 137297 - RNA, 19 nt, Artificial Sequence
  Description of Artificial Sequence: Synthetic oligonucleotide
gucaaaggucaugcuaaau

SEQ ID NO: 137298 - RNA, 19 nt, Artificial Sequence
  Description of Artificial Sequence: Synthetic oligonucleotide
uguguagaaguuguaaaaa

SEQ ID NO: 137299 - RNA, 19 nt, Artificial Sequence
  Description of Artificial Sequence: Synthetic oligonucleotide
acuuuuaacuuaccauuac

SEQ ID NO: 137300 - RNA, 19 nt, Artificial Sequence
  Description of Artificial Sequence: Synthetic oligonucleotide
cugaugcuuggaggaggug

SEQ ID NO: 137301 - RNA, 19 nt, Artificial Sequence
  Description of Artificial Sequence: Synthetic oligonucleotide
ggcuacacaauccguaaug

SEQ ID NO: 137302 - RNA, 19 nt, Artificial Sequence
  Description of Artificial Sequence: Synthetic oligonucleotide
guugcucgauguuggacau

SEQ ID NO: 137303 - RNA, 19 nt, Artificial Sequence
  Description of Artificial Sequence: Synthetic oligonucleotide
uaugagacugcaguugccc

SEQ ID NO: 137304 - RNA, 19 nt, Artificial Sequence
  Description of Artificial Sequence: Synthetic oligonucleotide
cuugauugugagauuccca

SEQ ID NO: 137305 - RNA, 19 nt, Artificial Sequence
  Description of Artificial Sequence: Synthetic oligonucleotide
aaugaguugccauauaaug

SEQ ID NO: 137306 - RNA, 19 nt, Artificial Sequence
  Description of Artificial Sequence: Synthetic oligonucleotide
gauuacuuugaguauuuug

SEQ ID NO: 137307 - RNA, 19 nt, Artificial Sequence
  Description of Artificial Sequence: Synthetic oligonucleotide
ggaccagacuucaaacugc

SEQ ID NO: 137308 - RNA, 19 nt, Artificial Sequence
  Description of Artificial Sequence: Synthetic oligonucleotide
cauauuaguccuucaaaca

SEQ ID NO: 137309 - RNA, 19 nt, Artificial Sequence
  Description of Artificial Sequence: Synthetic oligonucleotide
augacaaaccagaacacuc

SEQ ID NO: 137310 - RNA, 19 nt, Artificial Sequence
  Description of Artificial Sequence: Synthetic oligonucleotide
ccagaauauauggaaaaga

SEQ ID NO: 137311 - RNA, 19 nt, Artificial Sequence
  Description of Artificial Sequence: Synthetic oligonucleotide
auaaaacagcguuuguuug

SEQ ID NO: 137312 - RNA, 19 nt, Artificial Sequence
  Description of Artificial Sequence: Synthetic oligonucleotide
gaaaauuugcgcauguuac

SEQ ID NO: 137313 - RNA, 19 nt, Artificial Sequence
  Description of Artificial Sequence: Synthetic oligonucleotide
ccucaugcaccuggugucc

SEQ ID NO: 137314 - RNA, 19 nt, Artificial Sequence
  Description of Artificial Sequence: Synthetic oligonucleotide
cagaugcaagcuauuccag

SEQ ID NO: 137315 - RNA, 19 nt, Artificial Sequence
  Description of Artificial Sequence: Synthetic oligonucleotide
gaagaugcuguucaugaag

SEQ ID NO: 137316 - RNA, 19 nt, Artificial Sequence
  Description of Artificial Sequence: Synthetic oligonucleotide
gacaguggagaugaagaug

SEQ ID NO: 137317 - RNA, 19 nt, Artificial Sequence
  Description of Artificial Sequence: Synthetic oligonucleotide
ggagaagauccagacaaga

SEQ ID NO: 137318 - RNA, 19 nt, Artificial Sequence
  Description of Artificial Sequence: Synthetic oligonucleotide
agaauuucuauucgagcau

SEQ ID NO: 137319 - RNA, 19 nt, Artificial Sequence
  Description of Artificial Sequence: Synthetic oligonucleotide
ucagacaagcggauagcuu

SEQ ID NO: 137320 - RNA, 19 nt, Artificial Sequence
  Description of Artificial Sequence: Synthetic oligonucleotide
ugugaugaagaauucucag

SEQ ID NO: 137321 - RNA, 19 nt, Artificial Sequence
  Description of Artificial Sequence: Synthetic oligonucleotide
gauucugaggaugaaggag

SEQ ID NO: 137322 - RNA, 19 nt, Artificial Sequence
  Description of Artificial Sequence: Synthetic oligonucleotide
gaaggaggucgaagaaaug

SEQ ID NO: 137323 - RNA, 19 nt, Artificial Sequence
  Description of Artificial Sequence: Synthetic oligonucleotide
guggcugaucauaagaaag

SEQ ID NO: 137324 - RNA, 19 nt, Artificial Sequence
  Description of Artificial Sequence: Synthetic oligonucleotide
ggagcaaagaaagcuagaa

SEQ ID NO: 137325 - RNA, 19 nt, Artificial Sequence
  Description of Artificial Sequence: Synthetic oligonucleotide
auugaagaagauaagaaag

SEQ ID NO: 137326 - RNA, 19 nt, Artificial Sequence
  Description of Artificial Sequence: Synthetic oligonucleotide
gaaacagaggacaaaaaaa

SEQ ID NO: 137327 - RNA, 19 nt, Artificial Sequence
  Description of Artificial Sequence: Synthetic oligonucleotide
acagacguuaaggaagaag

SEQ ID NO: 137328 - RNA, 19 nt, Artificial Sequence
  Description of Artificial Sequence: Synthetic oligonucleotide
gauaaauccaaggacaaca

SEQ ID NO: 137329 - RNA, 19 nt, Artificial Sequence
  Description of Artificial Sequence: Synthetic oligonucleotide
aguggugaaaaaacagaua

SEQ ID NO: 137330 - RNA, 19 nt, Artificial Sequence
  Description of Artificial Sequence: Synthetic oligonucleotide
accaaaggaaccaaaucag

SEQ ID NO: 137331 - RNA, 19 nt, Artificial Sequence
  Description of Artificial Sequence: Synthetic oligonucleotide
gaacagcucagcaaccccu

SEQ ID NO: 137332 - RNA, 19 nt, Artificial Sequence
  Description of Artificial Sequence: Synthetic oligonucleotide
ugaauuugacagucucacc

SEQ ID NO: 137333 - RNA, 19 nt, Artificial Sequence
  Description of Artificial Sequence: Synthetic oligonucleotide
caauuucagaaaaucauua

SEQ ID NO: 137334 - RNA, 19 nt, Artificial Sequence
  Description of Artificial Sequence: Synthetic oligonucleotide
aaaaagaaaauauugaaag

SEQ ID NO: 137335 - RNA, 19 nt, Artificial Sequence
  Description of Artificial Sequence: Synthetic oligonucleotide
ggaaaauguuuucuuuuug

SEQ ID NO: 137336 - RNA, 19 nt, Artificial Sequence
  Description of Artificial Sequence: Synthetic oligonucleotide
gaagacuucuggcuucauu

SEQ ID NO: 137337 - RNA, 19 nt, Artificial Sequence
  Description of Artificial Sequence: Synthetic oligonucleotide
uuuauacuacuuuggcaug

SEQ ID NO: 137338 - RNA, 19 nt, Artificial Sequence
  Description of Artificial Sequence: Synthetic oligonucleotide
ggacuguauuuauuuucaa

SEQ ID NO: 137339 - RNA, 19 nt, Artificial Sequence
  Description of Artificial Sequence: Synthetic oligonucleotide
aauggcuuuuucguuuuug

SEQ ID NO: 137340 - RNA, 19 nt, Artificial Sequence
  Description of Artificial Sequence: Synthetic oligonucleotide
guuuuucuuggcaaguuuu

SEQ ID NO: 137341 - RNA, 19 nt, Artificial Sequence
  Description of Artificial Sequence: Synthetic oligonucleotide
uauugugaguuuuucuaau

SEQ ID NO: 137342 - RNA, 19 nt, Artificial Sequence
  Description of Artificial Sequence: Synthetic oligonucleotide
uuaugaagcaaaauuucuu

SEQ ID NO: 137343 - RNA, 19 nt, Artificial Sequence
  Description of Artificial Sequence: Synthetic oligonucleotide
uuucuccaccaugcuuuau

SEQ ID NO: 137344 - RNA, 19 nt, Artificial Sequence
  Description of Artificial Sequence: Synthetic oligonucleotide
ugugauaguauuuaaaauu

SEQ ID NO: 137345 - RNA, 19 nt, Artificial Sequence
  Description of Artificial Sequence: Synthetic oligonucleotide
ugaugugaguuauuauguc

SEQ ID NO: 137346 - RNA, 19 nt, Artificial Sequence
  Description of Artificial Sequence: Synthetic oligonucleotide
caaaaaaacugaucuauua

SEQ ID NO: 137347 - RNA, 19 nt, Artificial Sequence
  Description of Artificial Sequence: Synthetic oligonucleotide
aaagaaguaauuggccuuu

SEQ ID NO: 137348 - RNA, 19 nt, Artificial Sequence
  Description of Artificial Sequence: Synthetic oligonucleotide
ucugagcugauuuuuccau

SEQ ID NO: 137349 - RNA, 19 nt, Artificial Sequence
  Description of Artificial Sequence: Synthetic oligonucleotide
ucuuuuguaauuaucuuua

SEQ ID NO: 137350 - RNA, 19 nt, Artificial Sequence
  Description of Artificial Sequence: Synthetic oligonucleotide
auuaaaaaauuguacuugg

SEQ ID NO: 137351 - RNA, 19 nt, Artificial Sequence
  Description of Artificial Sequence: Synthetic oligonucleotide
gauuaucuuuugucuguuu

SEQ ID NO: 137352 - RNA, 19 nt, Artificial Sequence
  Description of Artificial Sequence: Synthetic oligonucleotide
uauuacuacaauaugaagu

SEQ ID NO: 137353 - RNA, 19 nt, Artificial Sequence
  Description of Artificial Sequence: Synthetic oligonucleotide
ucuuguuucaguggcuaau

SEQ ID NO: 137354 - RNA, 19 nt, Artificial Sequence
  Description of Artificial Sequence: Synthetic oligonucleotide
ugacaucauuucuguagac

SEQ ID NO: 137355 - RNA, 19 nt, Artificial Sequence
  Description of Artificial Sequence: Synthetic oligonucleotide
cuuacaauacacucuaggu

SEQ ID NO: 137356 - RNA, 19 nt, Artificial Sequence
  Description of Artificial Sequence: Synthetic oligonucleotide
ugaaagauaaugauuacag

SEQ ID NO: 137357 - RNA, 19 nt, Artificial Sequence
  Description of Artificial Sequence: Synthetic oligonucleotide
gcuugaaagauaacuauuu

SEQ ID NO: 137358 - RNA, 19 nt, Artificial Sequence
  Description of Artificial Sequence: Synthetic oligonucleotide
ugcuguuucuuugggaaga

SEQ ID NO: 137359 - RNA, 19 nt, Artificial Sequence
  Description of Artificial Sequence: Synthetic oligonucleotide
aguauuuauaguaauuauu

SEQ ID NO: 137360 - RNA, 19 nt, Artificial Sequence
  Description of Artificial Sequence: Synthetic oligonucleotide
uacuuaucuuugcaauaga

SEQ ID NO: 137361 - RNA, 19 nt, Artificial Sequence
  Description of Artificial Sequence: Synthetic oligonucleotide
aaauucuaccaccuugccc

SEQ ID NO: 137362 - RNA, 19 nt, Artificial Sequence
  Description of Artificial Sequence: Synthetic oligonucleotide
cucuauagcuuagccaguu

SEQ ID NO: 137363 - RNA, 19 nt, Artificial Sequence
  Description of Artificial Sequence: Synthetic oligonucleotide
uaguaucagugaagauuaa

SEQ ID NO: 137364 - RNA, 19 nt, Artificial Sequence
  Description of Artificial Sequence: Synthetic oligonucleotide
acaucccauuacaauuuau

SEQ ID NO: 137365 - RNA, 19 nt, Artificial Sequence
  Description of Artificial Sequence: Synthetic oligonucleotide
ugaaauaauacagacucug

SEQ ID NO: 137366 - RNA, 19 nt, Artificial Sequence
  Description of Artificial Sequence: Synthetic oligonucleotide
gcaauugagauguaggagu

SEQ ID NO: 137367 - RNA, 19 nt, Artificial Sequence
  Description of Artificial Sequence: Synthetic oligonucleotide
uucuuugaguugacccaaa

SEQ ID NO: 137368 - RNA, 19 nt, Artificial Sequence
  Description of Artificial Sequence: Synthetic oligonucleotide
agauucucaaaauugaaau

SEQ ID NO: 137369 - RNA, 19 nt, Artificial Sequence
  Description of Artificial Sequence: Synthetic oligonucleotide
uggaaauucugaauugaaa

SEQ ID NO: 137370 - RNA, 19 nt, Artificial Sequence
  Description of Artificial Sequence: Synthetic oligonucleotide
agaagaaacugaccagaac

SEQ ID NO: 137371 - RNA, 19 nt, Artificial Sequence
  Description of Artificial Sequence: Synthetic oligonucleotide
cuuguauugaccagacuug

SEQ ID NO: 137372 - RNA, 19 nt, Artificial Sequence
  Description of Artificial Sequence: Synthetic oligonucleotide
gccuauaguauauugcugg

SEQ ID NO: 137373 - RNA, 19 nt, Artificial Sequence
  Description of Artificial Sequence: Synthetic oligonucleotide
guuuaaaauggaaccugca

SEQ ID NO: 137374 - RNA, 19 nt, Artificial Sequence
  Description of Artificial Sequence: Synthetic oligonucleotide
agacaaaaccuguuucuuu

SEQ ID NO: 137375 - RNA, 19 nt, Artificial Sequence
  Description of Artificial Sequence: Synthetic oligonucleotide
uuacugcauuuacauggca

SEQ ID NO: 137376 - RNA, 19 nt, Artificial Sequence
  Description of Artificial Sequence: Synthetic oligonucleotide
auccagguuccauuauuau

SEQ ID NO: 137377 - RNA, 19 nt, Artificial Sequence
  Description of Artificial Sequence: Synthetic oligonucleotide
uuuacgugacauccagguu

SEQ ID NO: 137378 - RNA, 19 nt, Artificial Sequence
  Description of Artificial Sequence: Synthetic oligonucleotide
uucuaacucaaggaaauaa

SEQ ID NO: 137379 - RNA, 19 nt, Artificial Sequence
  Description of Artificial Sequence: Synthetic oligonucleotide
aacacaacugauuuaucau

SEQ ID NO: 137380 - RNA, 19 nt, Artificial Sequence
  Description of Artificial Sequence: Synthetic oligonucleotide
uucagcaacuacuuauugu

SEQ ID NO: 137381 - RNA, 19 nt, Artificial Sequence
  Description of Artificial Sequence: Synthetic oligonucleotide
ugugucugcccauuuuaag

SEQ ID NO: 137382 - RNA, 19 nt, Artificial Sequence
  Description of Artificial Sequence: Synthetic oligonucleotide
gacuguaggaguguaacug

SEQ ID NO: 137383 - RNA, 19 nt, Artificial Sequence
  Description of Artificial Sequence: Synthetic oligonucleotide
gaauauaauggaaaaaugc

SEQ ID NO: 137384 - RNA, 19 nt, Artificial Sequence
  Description of Artificial Sequence: Synthetic oligonucleotide
cuuucacucagagcuuaca

SEQ ID NO: 137385 - RNA, 19 nt, Artificial Sequence
  Description of Artificial Sequence: Synthetic oligonucleotide
acucagagcuuacauucua

SEQ ID NO: 137386 - RNA, 19 nt, Artificial Sequence
  Description of Artificial Sequence: Synthetic oligonucleotide
aguagcaggaagcagacaa

SEQ ID NO: 137387 - RNA, 19 nt, Artificial Sequence
  Description of Artificial Sequence: Synthetic oligonucleotide
aauggggguaacuccugcu

SEQ ID NO: 137388 - RNA, 19 nt, Artificial Sequence
  Description of Artificial Sequence: Synthetic oligonucleotide
uacuaagaugugcaaagaa

SEQ ID NO: 137389 - RNA, 19 nt, Artificial Sequence
  Description of Artificial Sequence: Synthetic oligonucleotide
agacaaaacauuuuaggaa

SEQ ID NO: 137390 - RNA, 19 nt, Artificial Sequence
  Description of Artificial Sequence: Synthetic oligonucleotide
acuugccaaaaucagugaa

SEQ ID NO: 137391 - RNA, 19 nt, Artificial Sequence
  Description of Artificial Sequence: Synthetic oligonucleotide
aaucucccuuuuugucagg

SEQ ID NO: 137392 - RNA, 19 nt, Artificial Sequence
  Description of Artificial Sequence: Synthetic oligonucleotide
gcccacauugauucuuuug

SEQ ID NO: 137393 - RNA, 19 nt, Artificial Sequence
  Description of Artificial Sequence: Synthetic oligonucleotide
gagauuaaaaauuacagaa

SEQ ID NO: 137394 - RNA, 19 nt, Artificial Sequence
  Description of Artificial Sequence: Synthetic oligonucleotide
augccagaagauaauucag

SEQ ID NO: 137395 - RNA, 19 nt, Artificial Sequence
  Description of Artificial Sequence: Synthetic oligonucleotide
gucaaaaguauuucucuuc

SEQ ID NO: 137396 - RNA, 19 nt, Artificial Sequence
  Description of Artificial Sequence: Synthetic oligonucleotide
cagugcaguaaaauauuaa

SEQ ID NO: 137397 - RNA, 19 nt, Artificial Sequence
  Description of Artificial Sequence: Synthetic oligonucleotide
aaagaaaaaauauuucucu

SEQ ID NO: 137398 - RNA, 19 nt, Artificial Sequence
  Description of Artificial Sequence: Synthetic oligonucleotide
uacaagccucuuaaauguu

SEQ ID NO: 137399 - RNA, 19 nt, Artificial Sequence
  Description of Artificial Sequence: Synthetic oligonucleotide
uucagacauucacaauagc

SEQ ID NO: 137400 - RNA, 19 nt, Artificial Sequence
  Description of Artificial Sequence: Synthetic oligonucleotide
caccuagacuuuuguaaug

SEQ ID NO: 137401 - RNA, 19 nt, Artificial Sequence
  Description of Artificial Sequence: Synthetic oligonucleotide
gaacagcugugcacccacc

SEQ ID NO: 137402 - RNA, 19 nt, Artificial Sequence
  Description of Artificial Sequence: Synthetic oligonucleotide
cccgacuuaacaaauauuu

SEQ ID NO: 137403 - RNA, 19 nt, Artificial Sequence
  Description of Artificial Sequence: Synthetic oligonucleotide
uuacuuuugcuauauuugc

SEQ ID NO: 137404 - RNA, 19 nt, Artificial Sequence
  Description of Artificial Sequence: Synthetic oligonucleotide
cuucgguguuuuuuucuua

SEQ ID NO: 137405 - RNA, 19 nt, Artificial Sequence
  Description of Artificial Sequence: Synthetic oligonucleotide
aaaauacaccgaaauugaa

SEQ ID NO: 137406 - RNA, 19 nt, Artificial Sequence
  Description of Artificial Sequence: Synthetic oligonucleotide
agcucucuuuguguacuuu

SEQ ID NO: 137407 - RNA, 19 nt, Artificial Sequence
  Description of Artificial Sequence: Synthetic oligonucleotide
ugucguuuguaauccuccc

SEQ ID NO: 137408 - RNA, 19 nt, Artificial Sequence
  Description of Artificial Sequence: Synthetic oligonucleotide
cucccucccagccuuaaga

SEQ ID NO: 137409 - RNA, 19 nt, Artificial Sequence
  Description of Artificial Sequence: Synthetic oligonucleotide
aaguaaucaccauugugau

SEQ ID NO: 137410 - RNA, 19 nt, Artificial Sequence
  Description of Artificial Sequence: Synthetic oligonucleotide
uuauuuuauccauguuuuu

SEQ ID NO: 137411 - RNA, 19 nt, Artificial Sequence
  Description of Artificial Sequence: Synthetic oligonucleotide
ugugaauauuuuacccaug

SEQ ID NO: 137412 - RNA, 19 nt, Artificial Sequence
  Description of Artificial Sequence: Synthetic oligonucleotide
guuuuuguacuuuugcuac

SEQ ID NO: 137413 - RNA, 19 nt, Artificial Sequence
  Description of Artificial Sequence: Synthetic oligonucleotide
cauauuuguuaucaaucug

SEQ ID NO: 137414 - RNA, 19 nt, Artificial Sequence
  Description of Artificial Sequence: Synthetic oligonucleotide
guaaaccuuuaugacauua

SEQ ID NO: 137415 - RNA, 19 nt, Artificial Sequence
  Description of Artificial Sequence: Synthetic oligonucleotide
aggaacuaagaaacuuagu

SEQ ID NO: 137416 - RNA, 19 nt, Artificial Sequence
  Description of Artificial Sequence: Synthetic oligonucleotide
ucccuucguuagggggaua

SEQ ID NO: 137417 - RNA, 19 nt, Artificial Sequence
  Description of Artificial Sequence: Synthetic oligonucleotide
aaugaaauguauuuagugu

SEQ ID NO: 137418 - RNA, 19 nt, Artificial Sequence
  Description of Artificial Sequence: Synthetic oligonucleotide
uuugugaaacauagauggu

SEQ ID NO: 137419 - RNA, 19 nt, Artificial Sequence
  Description of Artificial Sequence: Synthetic oligonucleotide
uauguauuuggacaauucu

SEQ ID NO: 137420 - RNA, 19 nt, Artificial Sequence
  Description of Artificial Sequence: Synthetic oligonucleotide
uguaacuuugcuuuuuuua

SEQ ID NO: 137421 - RNA, 19 nt, Artificial Sequence
  Description of Artificial Sequence: Synthetic oligonucleotide
auuuuuauuuuuccauagc

SEQ ID NO: 137422 - RNA, 19 nt, Artificial Sequence
  Description of Artificial Sequence: Synthetic oligonucleotide
cuuauuggggaacaggugg

SEQ ID NO: 137423 - RNA, 19 nt, Artificial Sequence
  Description of Artificial Sequence: Synthetic oligonucleotide
guguuugguuacaugauua

SEQ ID NO: 137424 - RNA, 19 nt, Artificial Sequence
  Description of Artificial Sequence: Synthetic oligonucleotide
aaguucuuuaguggugauu

SEQ ID NO: 137425 - RNA, 19 nt, Artificial Sequence
  Description of Artificial Sequence: Synthetic oligonucleotide
uugugggauuuugguggac

SEQ ID NO: 137426 - RNA, 19 nt, Artificial Sequence
  Description of Artificial Sequence: Synthetic oligonucleotide
cccaucacccaagcagugu

SEQ ID NO: 137427 - RNA, 19 nt, Artificial Sequence
  Description of Artificial Sequence: Synthetic oligonucleotide
uacacugcacccuauuugu

SEQ ID NO: 137428 - RNA, 19 nt, Artificial Sequence
  Description of Artificial Sequence: Synthetic oligonucleotide
uaaucuuuuaucccucgcc

SEQ ID NO: 137429 - RNA, 19 nt, Artificial Sequence
  Description of Artificial Sequence: Synthetic oligonucleotide
cccccucccaccaugccuc

SEQ ID NO: 137430 - RNA, 19 nt, Artificial Sequence
  Description of Artificial Sequence: Synthetic oligonucleotide
cccgucuaccaugaugauc

SEQ ID NO: 137431 - RNA, 19 nt, Artificial Sequence
  Description of Artificial Sequence: Synthetic oligonucleotide
ccuguuuuaaauaagaaaa

SEQ ID NO: 137432 - RNA, 19 nt, Artificial Sequence
  Description of Artificial Sequence: Synthetic oligonucleotide
auaccauuucgcaggcucc

SEQ ID NO: 137433 - RNA, 19 nt, Artificial Sequence
  Description of Artificial Sequence: Synthetic oligonucleotide
cagauguucuggcauccuc

SEQ ID NO: 137434 - RNA, 19 nt, Artificial Sequence
  Description of Artificial Sequence: Synthetic oligonucleotide
cccuguggauuucccagug

SEQ ID NO: 137435 - RNA, 19 nt, Artificial Sequence
  Description of Artificial Sequence: Synthetic oligonucleotide
gccugcagcucacaggaca

SEQ ID NO: 137436 - RNA, 19 nt, Artificial Sequence
  Description of Artificial Sequence: Synthetic oligonucleotide
aacaggggcugugguagag

SEQ ID NO: 137437 - RNA, 19 nt, Artificial Sequence
  Description of Artificial Sequence: Synthetic oligonucleotide
gucaccuaugagauccugg

SEQ ID NO: 137438 - RNA, 19 nt, Artificial Sequence
  Description of Artificial Sequence: Synthetic oligonucleotide
gaguaguggauggaggaga

SEQ ID NO: 137439 - RNA, 19 nt, Artificial Sequence
  Description of Artificial Sequence: Synthetic oligonucleotide
auggaacagugaagacgga

SEQ ID NO: 137440 - RNA, 19 nt, Artificial Sequence
  Description of Artificial Sequence: Synthetic oligonucleotide
aaacugagcucaguauccg

SEQ ID NO: 137441 - RNA, 19 nt, Artificial Sequence
  Description of Artificial Sequence: Synthetic oligonucleotide
gggugccaggagacaaagg

SEQ ID NO: 137442 - RNA, 19 nt, Artificial Sequence
  Description of Artificial Sequence: Synthetic oligonucleotide
gcccuuugcuuuuuuucau

SEQ ID NO: 137443 - RNA, 19 nt, Artificial Sequence
  Description of Artificial Sequence: Synthetic oligonucleotide
uuuaauauucugaucuacc

SEQ ID NO: 137444 - RNA, 19 nt, Artificial Sequence
  Description of Artificial Sequence: Synthetic oligonucleotide
cccuguugacacauguuaa

SEQ ID NO: 137445 - RNA, 19 nt, Artificial Sequence
  Description of Artificial Sequence: Synthetic oligonucleotide
aguauaguucauuuugacu

SEQ ID NO: 137446 - RNA, 19 nt, Artificial Sequence
  Description of Artificial Sequence: Synthetic oligonucleotide
ugcuauguauuauguucca

SEQ ID NO: 137447 - RNA, 19 nt, Artificial Sequence
  Description of Artificial Sequence: Synthetic oligonucleotide
auugugugaacauacugaa

SEQ ID NO: 137448 - RNA, 19 nt, Artificial Sequence
  Description of Artificial Sequence: Synthetic oligonucleotide
aauuguacacuucaauacu

SEQ ID NO: 137449 - RNA, 19 nt, Artificial Sequence
  Description of Artificial Sequence: Synthetic oligonucleotide
uauacuggaucuccuuggg

SEQ ID NO: 137450 - RNA, 19 nt, Artificial Sequence
  Description of Artificial Sequence: Synthetic oligonucleotide
guguauuuaagagguuuug

SEQ ID NO: 137451 - RNA, 19 nt, Artificial Sequence
  Description of Artificial Sequence: Synthetic oligonucleotide
guuuuucuaaguaguuggu

SEQ ID NO: 137452 - RNA, 19 nt, Artificial Sequence
  Description of Artificial Sequence: Synthetic oligonucleotide
uuauauacaacuaaaaccu

SEQ ID NO: 137453 - RNA, 19 nt, Artificial Sequence
  Description of Artificial Sequence: Synthetic oligonucleotide
ucaagagaacuaucuaaag

SEQ ID NO: 137454 - RNA, 19 nt, Artificial Sequence
  Description of Artificial Sequence: Synthetic oligonucleotide
gcaauuucagcaaggugau

SEQ ID NO: 137455 - RNA, 19 nt, Artificial Sequence
  Description of Artificial Sequence: Synthetic oligonucleotide
uuugguacagcauuaauaa

SEQ ID NO: 137456 - RNA, 19 nt, Artificial Sequence
  Description of Artificial Sequence: Synthetic oligonucleotide
aacagaaaucaguaacacu

SEQ ID NO: 137457 - RNA, 19 nt, Artificial Sequence
  Description of Artificial Sequence: Synthetic oligonucleotide
uuagugaccaagucuguug

SEQ ID NO: 137458 - RNA, 19 nt, Artificial Sequence
  Description of Artificial Sequence: Synthetic oligonucleotide
ggaagaacaaagaccccca

SEQ ID NO: 137459 - RNA, 19 nt, Artificial Sequence
  Description of Artificial Sequence: Synthetic oligonucleotide
auuuguaauaacaaaauuu

SEQ ID NO: 137460 - RNA, 19 nt, Artificial Sequence
  Description of Artificial Sequence: Synthetic oligonucleotide
uuuagaaauaauauguaaa

SEQ ID NO: 137461 - RNA, 19 nt, Artificial Sequence
  Description of Artificial Sequence: Synthetic oligonucleotide
agaagcuaugguucuugug

SEQ ID NO: 137462 - RNA, 19 nt, Artificial Sequence
  Description of Artificial Sequence: Synthetic oligonucleotide
gucuaguaaggucaaugua

SEQ ID NO: 137463 - RNA, 19 nt, Artificial Sequence
  Description of Artificial Sequence: Synthetic oligonucleotide
aacauaguaagaugucaga

SEQ ID NO: 137464 - RNA, 19 nt, Artificial Sequence
  Description of Artificial Sequence: Synthetic oligonucleotide
aauacccuaauacuuuaaa

SEQ ID NO: 137465 - RNA, 19 nt, Artificial Sequence
  Description of Artificial Sequence: Synthetic oligonucleotide
aaaauucauauaggauaaa

SEQ ID NO: 137466 - RNA, 19 nt, Artificial Sequence
  Description of Artificial Sequence: Synthetic oligonucleotide
aaaugauauuugaaauugg

SEQ ID NO: 137467 - RNA, 19 nt, Artificial Sequence
  Description of Artificial Sequence: Synthetic oligonucleotide
gcaaggaaagacauuauuu

SEQ ID NO: 137468 - RNA, 19 nt, Artificial Sequence
  Description of Artificial Sequence: Synthetic oligonucleotide
uuguaaguggaauugggac

SEQ ID NO: 137469 - RNA, 19 nt, Artificial Sequence
  Description of Artificial Sequence: Synthetic oligonucleotide
caacaacugguaaccaaau

SEQ ID NO: 137470 - RNA, 19 nt, Artificial Sequence
  Description of Artificial Sequence: Synthetic oligonucleotide
uggaaaacccaguuuucug

SEQ ID NO: 137471 - RNA, 19 nt, Artificial Sequence
  Description of Artificial Sequence: Synthetic oligonucleotide
gcccuccacuagaagauuu

SEQ ID NO: 137472 - RNA, 19 nt, Artificial Sequence
  Description of Artificial Sequence: Synthetic oligonucleotide
uaaauaggaaaagauaaaa

SEQ ID NO: 137473 - RNA, 19 nt, Artificial Sequence
  Description of Artificial Sequence: Synthetic oligonucleotide
acuaccaaaaaccuaaacu

SEQ ID NO: 137474 - RNA, 19 nt, Artificial Sequence
  Description of Artificial Sequence: Synthetic oligonucleotide
ucuuaaagcaaauggauug

SEQ ID NO: 137475 - RNA, 19 nt, Artificial Sequence
  Description of Artificial Sequence: Synthetic oligonucleotide
gaagaaggccuaaguguga

SEQ ID NO: 137476 - RNA, 19 nt, Artificial Sequence
  Description of Artificial Sequence: Synthetic oligonucleotide
acaccaaacucaacuauaa

SEQ ID NO: 137477 - RNA, 19 nt, Artificial Sequence
  Description of Artificial Sequence: Synthetic oligonucleotide
aaagauauauuugauaaca

SEQ ID NO: 137478 - RNA, 19 nt, Artificial Sequence
  Description of Artificial Sequence: Synthetic oligonucleotide
guggaccaacaaaaacuua

SEQ ID NO: 137479 - RNA, 19 nt, Artificial Sequence
  Description of Artificial Sequence: Synthetic oligonucleotide
agaagacaagucaagaaaa

SEQ ID NO: 137480 - RNA, 19 nt, Artificial Sequence
  Description of Artificial Sequence: Synthetic oligonucleotide
aaugacaaaagacagagug

SEQ ID NO: 137481 - RNA, 19 nt, Artificial Sequence
  Description of Artificial Sequence: Synthetic oligonucleotide
gggaggcagauuuguaacu

SEQ ID NO: 137482 - RNA, 19 nt, Artificial Sequence
  Description of Artificial Sequence: Synthetic oligonucleotide
ucauccaggucaaaaggcu

SEQ ID NO: 137483 - RNA, 19 nt, Artificial Sequence
  Description of Artificial Sequence: Synthetic oligonucleotide
ucauaucuaaagauaguag

SEQ ID NO: 137484 - RNA, 19 nt, Artificial Sequence
  Description of Artificial Sequence: Synthetic oligonucleotide
gaggaacaaaauguauaag

SEQ ID NO: 137485 - RNA, 19 nt, Artificial Sequence
  Description of Artificial Sequence: Synthetic oligonucleotide
ggaugugaacugggaaaca

SEQ ID NO: 137486 - RNA, 19 nt, Artificial Sequence
  Description of Artificial Sequence: Synthetic oligonucleotide
aaauacauauaaauaguuu

SEQ ID NO: 137487 - RNA, 19 nt, Artificial Sequence
  Description of Artificial Sequence: Synthetic oligonucleotide
uguaaauaugaaaagaucu

SEQ ID NO: 137488 - RNA, 19 nt, Artificial Sequence
  Description of Artificial Sequence: Synthetic oligonucleotide
uuuaaccucaguaaauaaa

SEQ ID NO: 137489 - RNA, 19 nt, Artificial Sequence
  Description of Artificial Sequence: Synthetic oligonucleotide
aaagcuauagagagacuua

SEQ ID NO: 137490 - RNA, 19 nt, Artificial Sequence
  Description of Artificial Sequence: Synthetic oligonucleotide
auuuuuuaacuuaguuuuu

SEQ ID NO: 137491 - RNA, 19 nt, Artificial Sequence
  Description of Artificial Sequence: Synthetic oligonucleotide
uuaaaccuauuauguuuau

SEQ ID NO: 137492 - RNA, 19 nt, Artificial Sequence
  Description of Artificial Sequence: Synthetic oligonucleotide
uuuauuuuuucuuuuuuug

SEQ ID NO: 137493 - RNA, 19 nt, Artificial Sequence
  Description of Artificial Sequence: Synthetic oligonucleotide
gagacggagucucgcuguu

SEQ ID NO: 137494 - RNA, 19 nt, Artificial Sequence
  Description of Artificial Sequence: Synthetic oligonucleotide
ugcccaggcuggugugcaa

SEQ ID NO: 137495 - RNA, 19 nt, Artificial Sequence
  Description of Artificial Sequence: Synthetic oligonucleotide
auggcgcaaucucggcuca

SEQ ID NO: 137496 - RNA, 19 nt, Artificial Sequence
  Description of Artificial Sequence: Synthetic oligonucleotide
acugcaaccuccgccuccc

SEQ ID NO: 137497 - RNA, 19 nt, Artificial Sequence
  Description of Artificial Sequence: Synthetic oligonucleotide
cagguugaagccauucucc

SEQ ID NO: 137498 - RNA, 19 nt, Artificial Sequence
  Description of Artificial Sequence: Synthetic oligonucleotide
cugccucagccuccugagu

SEQ ID NO: 137499 - RNA, 19 nt, Artificial Sequence
  Description of Artificial Sequence: Synthetic oligonucleotide
uagcugggauuacaggcgc

SEQ ID NO: 137500 - RNA, 19 nt, Artificial Sequence
  Description of Artificial Sequence: Synthetic oligonucleotide
ccugucaccacgcccagcu

SEQ ID NO: 137501 - RNA, 19 nt, Artificial Sequence
  Description of Artificial Sequence: Synthetic oligonucleotide
uaauuguucgcauuuuuag

SEQ ID NO: 137502 - RNA, 19 nt, Artificial Sequence
  Description of Artificial Sequence: Synthetic oligonucleotide
guagagacgggguuucacu

SEQ ID NO: 137503 - RNA, 19 nt, Artificial Sequence
  Description of Artificial Sequence: Synthetic oligonucleotide
uauguuggccaggcuggcc

SEQ ID NO: 137504 - RNA, 19 nt, Artificial Sequence
  Description of Artificial Sequence: Synthetic oligonucleotide
cucgaacuccugaccucau

SEQ ID NO: 137505 - RNA, 19 nt, Artificial Sequence
  Description of Artificial Sequence: Synthetic oligonucleotide
ugauccacccaccuuggcc

SEQ ID NO: 137506 - RNA, 19 nt, Artificial Sequence
  Description of Artificial Sequence: Synthetic oligonucleotide
cuuccaaagugcugggauu

SEQ ID NO: 137507 - RNA, 19 nt, Artificial Sequence
  Description of Artificial Sequence: Synthetic oligonucleotide
uacaggugugagcugccgc

SEQ ID NO: 137508 - RNA, 19 nt, Artificial Sequence
  Description of Artificial Sequence: Synthetic oligonucleotide
caccuggcuguuuaucucu

SEQ ID NO: 137509 - RNA, 19 nt, Artificial Sequence
  Description of Artificial Sequence: Synthetic oligonucleotide
uuuuuuuuagagaaaggau

SEQ ID NO: 137510 - RNA, 19 nt, Artificial Sequence
  Description of Artificial Sequence: Synthetic oligonucleotide
ucucggucacccaggaugg

SEQ ID NO: 137511 - RNA, 19 nt, Artificial Sequence
  Description of Artificial Sequence: Synthetic oligonucleotide
gagugugguagccugauca

SEQ ID NO: 137512 - RNA, 19 nt, Artificial Sequence
  Description of Artificial Sequence: Synthetic oligonucleotide
auaucucacuacaucuuag

SEQ ID NO: 137513 - RNA, 19 nt, Artificial Sequence
  Description of Artificial Sequence: Synthetic oligonucleotide
gaacuucuaggcuuagggu

SEQ ID NO: 137514 - RNA, 19 nt, Artificial Sequence
  Description of Artificial Sequence: Synthetic oligonucleotide
uauucucccaccucagccu

SEQ ID NO: 137515 - RNA, 19 nt, Artificial Sequence
  Description of Artificial Sequence: Synthetic oligonucleotide
ucccaaguagcugggacua

SEQ ID NO: 137516 - RNA, 19 nt, Artificial Sequence
  Description of Artificial Sequence: Synthetic oligonucleotide
acaagugugcaccaucaca

SEQ ID NO: 137517 - RNA, 19 nt, Artificial Sequence
  Description of Artificial Sequence: Synthetic oligonucleotide
accuagcugauuuuuacau

SEQ ID NO: 137518 - RNA, 19 nt, Artificial Sequence
  Description of Artificial Sequence: Synthetic oligonucleotide
uuuuuauuuuggagagaug

SEQ ID NO: 137519 - RNA, 19 nt, Artificial Sequence
  Description of Artificial Sequence: Synthetic oligonucleotide
ggugucucccuguguugcc

SEQ ID NO: 137520 - RNA, 19 nt, Artificial Sequence
  Description of Artificial Sequence: Synthetic oligonucleotide
ccaggcuggucacaaacuc

SEQ ID NO: 137521 - RNA, 19 nt, Artificial Sequence
  Description of Artificial Sequence: Synthetic oligonucleotide
ccuaggcucaagcgauucu

SEQ ID NO: 137522 - RNA, 19 nt, Artificial Sequence
  Description of Artificial Sequence: Synthetic oligonucleotide
uccugacucaggcaugagc

SEQ ID NO: 137523 - RNA, 19 nt, Artificial Sequence
  Description of Artificial Sequence: Synthetic oligonucleotide
ccaccguacccggccuaaa

SEQ ID NO: 137524 - RNA, 19 nt, Artificial Sequence
  Description of Artificial Sequence: Synthetic oligonucleotide
accuaucauguuacagacu

SEQ ID NO: 137525 - RNA, 19 nt, Artificial Sequence
  Description of Artificial Sequence: Synthetic oligonucleotide
uuagaaagcaacuauuguc

SEQ ID NO: 137526 - RNA, 19 nt, Artificial Sequence
  Description of Artificial Sequence: Synthetic oligonucleotide
caaguguuugaggaaacuc

SEQ ID NO: 137527 - RNA, 19 nt, Artificial Sequence
  Description of Artificial Sequence: Synthetic oligonucleotide
caggucagguuugguaaac

SEQ ID NO: 137528 - RNA, 19 nt, Artificial Sequence
  Description of Artificial Sequence: Synthetic oligonucleotide
cuaagauauuaacucaagu

SEQ ID NO: 137529 - RNA, 19 nt, Artificial Sequence
  Description of Artificial Sequence: Synthetic oligonucleotide
uaaagcucuuuaauucauu

SEQ ID NO: 137530 - RNA, 19 nt, Artificial Sequence
  Description of Artificial Sequence: Synthetic oligonucleotide
uuaaugaaggugccacauu

SEQ ID NO: 137531 - RNA, 19 nt, Artificial Sequence
  Description of Artificial Sequence: Synthetic oligonucleotide
ugucucaguucucuauggc

SEQ ID NO: 137532 - RNA, 19 nt, Artificial Sequence
  Description of Artificial Sequence: Synthetic oligonucleotide
caugggugaaugcuguucu

SEQ ID NO: 137533 - RNA, 19 nt, Artificial Sequence
  Description of Artificial Sequence: Synthetic oligonucleotide
uaagucagcauugguacuc

SEQ ID NO: 137534 - RNA, 19 nt, Artificial Sequence
  Description of Artificial Sequence: Synthetic oligonucleotide
cuaagcuaguuacaucaua

SEQ ID NO: 137535 - RNA, 19 nt, Artificial Sequence
  Description of Artificial Sequence: Synthetic oligonucleotide
aucuaagcuuugcccuucu

SEQ ID NO: 137536 - RNA, 19 nt, Artificial Sequence
  Description of Artificial Sequence: Synthetic oligonucleotide
uaccagagcugcuagcauu

SEQ ID NO: 137537 - RNA, 19 nt, Artificial Sequence
  Description of Artificial Sequence: Synthetic oligonucleotide
ucugucaaugggcaauuau

SEQ ID NO: 137538 - RNA, 19 nt, Artificial Sequence
  Description of Artificial Sequence: Synthetic oligonucleotide
uuugaaguucuuacauuga

SEQ ID NO: 137539 - RNA, 19 nt, Artificial Sequence
  Description of Artificial Sequence: Synthetic oligonucleotide
aaguuagucaccuacaucu

SEQ ID NO: 137540 - RNA, 19 nt, Artificial Sequence
  Description of Artificial Sequence: Synthetic oligonucleotide
uucuguuuuuuaugguuuu

SEQ ID NO: 137541 - RNA, 19 nt, Artificial Sequence
  Description of Artificial Sequence: Synthetic oligonucleotide
ugauguaguaauacugcug

SEQ ID NO: 137542 - RNA, 19 nt, Artificial Sequence
  Description of Artificial Sequence: Synthetic oligonucleotide
gaaguuuuuuugauaacug

SEQ ID NO: 137543 - RNA, 19 nt, Artificial Sequence
  Description of Artificial Sequence: Synthetic oligonucleotide
gcgauucauaauauuuguu

SEQ ID NO: 137544 - RNA, 19 nt, Artificial Sequence
  Description of Artificial Sequence: Synthetic oligonucleotide
uauucauauugugauauaa

SEQ ID NO: 137545 - RNA, 19 nt, Artificial Sequence
  Description of Artificial Sequence: Synthetic oligonucleotide
aaugauaagggcuuuugaa

SEQ ID NO: 137546 - RNA, 19 nt, Artificial Sequence
  Description of Artificial Sequence: Synthetic oligonucleotide
aaacaaguaguaaucauuu

SEQ ID NO: 137547 - RNA, 19 nt, Artificial Sequence
  Description of Artificial Sequence: Synthetic oligonucleotide
ucaauagcuuaggaucucc

SEQ ID NO: 137548 - RNA, 19 nt, Artificial Sequence
  Description of Artificial Sequence: Synthetic oligonucleotide
caccauaaucuuaggaaaa

SEQ ID NO: 137549 - RNA, 19 nt, Artificial Sequence
  Description of Artificial Sequence: Synthetic oligonucleotide
auuacuaaccucugugccu

SEQ ID NO: 137550 - RNA, 19 nt, Artificial Sequence
  Description of Artificial Sequence: Synthetic oligonucleotide
ucaguugcuucaucauuua

SEQ ID NO: 137551 - RNA, 19 nt, Artificial Sequence
  Description of Artificial Sequence: Synthetic oligonucleotide
aaaaugaggaaaauaauag

SEQ ID NO: 137552 - RNA, 19 nt, Artificial Sequence
  Description of Artificial Sequence: Synthetic oligonucleotide
gucccuacuuaauagguuu

SEQ ID NO: 137553 - RNA, 19 nt, Artificial Sequence
  Description of Artificial Sequence: Synthetic oligonucleotide
uguugugaggauugaguua

SEQ ID NO: 137554 - RNA, 19 nt, Artificial Sequence
  Description of Artificial Sequence: Synthetic oligonucleotide
aauaacauaguuaaugcuc

SEQ ID NO: 137555 - RNA, 19 nt, Artificial Sequence
  Description of Artificial Sequence: Synthetic oligonucleotide
caguaaggguuagcugcua

SEQ ID NO: 137556 - RNA, 19 nt, Artificial Sequence
  Description of Artificial Sequence: Synthetic oligonucleotide
auuuuuuuuucuuuuuuuu

SEQ ID NO: 137557 - RNA, 19 nt, Artificial Sequence
  Description of Artificial Sequence: Synthetic oligonucleotide
uuugaaagagucucacucu

SEQ ID NO: 137558 - RNA, 19 nt, Artificial Sequence
  Description of Artificial Sequence: Synthetic oligonucleotide
uguugcccagguuggagug

SEQ ID NO: 137559 - RNA, 19 nt, Artificial Sequence
  Description of Artificial Sequence: Synthetic oligonucleotide
gcaguggcaugaucuuggc

SEQ ID NO: 137560 - RNA, 19 nt, Artificial Sequence
  Description of Artificial Sequence: Synthetic oligonucleotide
cucacugcauccucugcuu

SEQ ID NO: 137561 - RNA, 19 nt, Artificial Sequence
  Description of Artificial Sequence: Synthetic oligonucleotide
uccuagguucaggugauuc

SEQ ID NO: 137562 - RNA, 19 nt, Artificial Sequence
  Description of Artificial Sequence: Synthetic oligonucleotide
cucaugcuucagccuccca

SEQ ID NO: 137563 - RNA, 19 nt, Artificial Sequence
  Description of Artificial Sequence: Synthetic oligonucleotide
aagcagcugggaguacagg

SEQ ID NO: 137564 - RNA, 19 nt, Artificial Sequence
  Description of Artificial Sequence: Synthetic oligonucleotide
gugugcaccaccacaccug

SEQ ID NO: 137565 - RNA, 19 nt, Artificial Sequence
  Description of Artificial Sequence: Synthetic oligonucleotide
ggcuaauuuuuguauauuu

SEQ ID NO: 137566 - RNA, 19 nt, Artificial Sequence
  Description of Artificial Sequence: Synthetic oligonucleotide
uaguagagacggguucuca

SEQ ID NO: 137567 - RNA, 19 nt, Artificial Sequence
  Description of Artificial Sequence: Synthetic oligonucleotide
accauauuguccaggcugg

SEQ ID NO: 137568 - RNA, 19 nt, Artificial Sequence
  Description of Artificial Sequence: Synthetic oligonucleotide
gucuugaacuccuuaccuc

SEQ ID NO: 137569 - RNA, 19 nt, Artificial Sequence
  Description of Artificial Sequence: Synthetic oligonucleotide
caaaugauccacccgccug

SEQ ID NO: 137570 - RNA, 19 nt, Artificial Sequence
  Description of Artificial Sequence: Synthetic oligonucleotide
gggccucccaaagugcugg

SEQ ID NO: 137571 - RNA, 19 nt, Artificial Sequence
  Description of Artificial Sequence: Synthetic oligonucleotide
ggauuacaagcaugagcca

SEQ ID NO: 137572 - RNA, 19 nt, Artificial Sequence
  Description of Artificial Sequence: Synthetic oligonucleotide
accgcgccuggcuugcuau

SEQ ID NO: 137573 - RNA, 19 nt, Artificial Sequence
  Description of Artificial Sequence: Synthetic oligonucleotide
uuguuaugagguaaaggua

SEQ ID NO: 137574 - RNA, 19 nt, Artificial Sequence
  Description of Artificial Sequence: Synthetic oligonucleotide
agauagaugggugagagug

SEQ ID NO: 137575 - RNA, 19 nt, Artificial Sequence
  Description of Artificial Sequence: Synthetic oligonucleotide
ggugccaggggaaguguua

SEQ ID NO: 137576 - RNA, 19 nt, Artificial Sequence
  Description of Artificial Sequence: Synthetic oligonucleotide
aaauuuuugaguguuccuu

SEQ ID NO: 137577 - RNA, 19 nt, Artificial Sequence
  Description of Artificial Sequence: Synthetic oligonucleotide
uuagaugccagauggguug

SEQ ID NO: 137578 - RNA, 19 nt, Artificial Sequence
  Description of Artificial Sequence: Synthetic oligonucleotide
guaucugagccuuuuauug

SEQ ID NO: 137579 - RNA, 19 nt, Artificial Sequence
  Description of Artificial Sequence: Synthetic oligonucleotide
gcaguuugaugccuacuag

SEQ ID NO: 137580 - RNA, 19 nt, Artificial Sequence
  Description of Artificial Sequence: Synthetic oligonucleotide
gugugaagacuacuagguc

SEQ ID NO: 137581 - RNA, 19 nt, Artificial Sequence
  Description of Artificial Sequence: Synthetic oligonucleotide
cauaguggauagagaagca

SEQ ID NO: 137582 - RNA, 19 nt, Artificial Sequence
  Description of Artificial Sequence: Synthetic oligonucleotide
aaucuuuuggagaccugau

SEQ ID NO: 137583 - RNA, 19 nt, Artificial Sequence
  Description of Artificial Sequence: Synthetic oligonucleotide
uuuuagcaaggauacgaau

SEQ ID NO: 137584 - RNA, 19 nt, Artificial Sequence
  Description of Artificial Sequence: Synthetic oligonucleotide
uaauauuugacaacuuugg

SEQ ID NO: 137585 - RNA, 19 nt, Artificial Sequence
  Description of Artificial Sequence: Synthetic oligonucleotide
gggggaucuugaugccucu

SEQ ID NO: 137586 - RNA, 19 nt, Artificial Sequence
  Description of Artificial Sequence: Synthetic oligonucleotide
uguaauuuacucaaggaua

SEQ ID NO: 137587 - RNA, 19 nt, Artificial Sequence
  Description of Artificial Sequence: Synthetic oligonucleotide
aaucucaagaaaaauggca

SEQ ID NO: 137588 - RNA, 19 nt, Artificial Sequence
  Description of Artificial Sequence: Synthetic oligonucleotide
auuaaguagauuacagaaa

SEQ ID NO: 137589 - RNA, 19 nt, Artificial Sequence
  Description of Artificial Sequence: Synthetic oligonucleotide
aaaauagaacuaucauauu

SEQ ID NO: 137590 - RNA, 19 nt, Artificial Sequence
  Description of Artificial Sequence: Synthetic oligonucleotide
uguuauuauuggcuauuua

SEQ ID NO: 137591 - RNA, 19 nt, Artificial Sequence
  Description of Artificial Sequence: Synthetic oligonucleotide
acaugagcaaugcggagaa

SEQ ID NO: 137592 - RNA, 19 nt, Artificial Sequence
  Description of Artificial Sequence: Synthetic oligonucleotide
aauguuuaggauuacagca

SEQ ID NO: 137593 - RNA, 19 nt, Artificial Sequence
  Description of Artificial Sequence: Synthetic oligonucleotide
auuuagaagcuucucaauu

SEQ ID NO: 137594 - RNA, 19 nt, Artificial Sequence
  Description of Artificial Sequence: Synthetic oligonucleotide
ugcugcauuuccucacugu

SEQ ID NO: 137595 - RNA, 19 nt, Artificial Sequence
  Description of Artificial Sequence: Synthetic oligonucleotide
uaccacaagauggcagaua

SEQ ID NO: 137596 - RNA, 19 nt, Artificial Sequence
  Description of Artificial Sequence: Synthetic oligonucleotide
acugcauuuaaaauuuuuu

SEQ ID NO: 137597 - RNA, 19 nt, Artificial Sequence
  Description of Artificial Sequence: Synthetic oligonucleotide
uuuucuguguguuuucucu

SEQ ID NO: 137598 - RNA, 19 nt, Artificial Sequence
  Description of Artificial Sequence: Synthetic oligonucleotide
uuauagucacuugguggcc

SEQ ID NO: 137599 - RNA, 19 nt, Artificial Sequence
  Description of Artificial Sequence: Synthetic oligonucleotide
cauguaacaagcagagcaa

SEQ ID NO: 137600 - RNA, 19 nt, Artificial Sequence
  Description of Artificial Sequence: Synthetic oligonucleotide
acauguauuaacagauucu

SEQ ID NO: 137601 - RNA, 19 nt, Artificial Sequence
  Description of Artificial Sequence: Synthetic oligonucleotide
uuuuugaaugcaauauugg

SEQ ID NO: 137602 - RNA, 19 nt, Artificial Sequence
  Description of Artificial Sequence: Synthetic oligonucleotide
gauuaaaaacuuugaauua

SEQ ID NO: 137603 - RNA, 25 nt, Artificial Sequence
  Description of Artificial Sequence: Synthetic oligonucleotide
augcgcucaccucccugcggccucc

SEQ ID NO: 137604 - RNA, 25 nt, Artificial Sequence
  Description of Artificial Sequence: Synthetic oligonucleotide
cugaggugguuugguggcccccucc

SEQ ID NO: 137605 - RNA, 25 nt, Artificial Sequence
  Description of Artificial Sequence: Synthetic oligonucleotide
cucgcgaguuggugccgcugccacc

SEQ ID NO: 137606 - RNA, 25 nt, Artificial Sequence
  Description of Artificial Sequence: Synthetic oligonucleotide
cuccgauuccgagcuuucggcaccu

SEQ ID NO: 137607 - RNA, 25 nt, Artificial Sequence
  Description of Artificial Sequence: Synthetic oligonucleotide
ucugccgggugguaccgagccuucc

SEQ ID NO: 137608 - RNA, 25 nt, Artificial Sequence
  Description of Artificial Sequence: Synthetic oligonucleotide
ccggcgcccccuccucuccucccac

SEQ ID NO: 137609 - RNA, 25 nt, Artificial Sequence
  Description of Artificial Sequence: Synthetic oligonucleotide
ccggccugcccuuccccgcgggacu

SEQ ID NO: 137610 - RNA, 25 nt, Artificial Sequence
  Description of Artificial Sequence: Synthetic oligonucleotide
uaucgcccccacguuucccucagcc

SEQ ID NO: 137611 - RNA, 25 nt, Artificial Sequence
  Description of Artificial Sequence: Synthetic oligonucleotide
ccuuuucucucccggccgagccgcg

SEQ ID NO: 137612 - RNA, 25 nt, Artificial Sequence
  Description of Artificial Sequence: Synthetic oligonucleotide
ggcggcagcagcagcagcagcagca

SEQ ID NO: 137613 - RNA, 25 nt, Artificial Sequence
  Description of Artificial Sequence: Synthetic oligonucleotide
agcaggaggaggagcccgguggcgg

SEQ ID NO: 137614 - RNA, 25 nt, Artificial Sequence
  Description of Artificial Sequence: Synthetic oligonucleotide
gcgguggccggggagcccauggcgu

SEQ ID NO: 137615 - RNA, 25 nt, Artificial Sequence
  Description of Artificial Sequence: Synthetic oligonucleotide
uacagucaaggaggcggcaaaaaaa

SEQ ID NO: 137616 - RNA, 25 nt, Artificial Sequence
  Description of Artificial Sequence: Synthetic oligonucleotide
aaagucugcuacuacuacgacggug

SEQ ID NO: 137617 - RNA, 25 nt, Artificial Sequence
  Description of Artificial Sequence: Synthetic oligonucleotide
gauauuggaaauuauuauuauggac

SEQ ID NO: 137618 - RNA, 25 nt, Artificial Sequence
  Description of Artificial Sequence: Synthetic oligonucleotide
cagggucaucccaugaagccucaua

SEQ ID NO: 137619 - RNA, 25 nt, Artificial Sequence
  Description of Artificial Sequence: Synthetic oligonucleotide
agaauccgcaugacccauaacuugc

SEQ ID NO: 137620 - RNA, 25 nt, Artificial Sequence
  Description of Artificial Sequence: Synthetic oligonucleotide
cuguuaaauuauggcuuauacagaa

SEQ ID NO: 137621 - RNA, 25 nt, Artificial Sequence
  Description of Artificial Sequence: Synthetic oligonucleotide
aaaauggaaauauauaggccccaua

SEQ ID NO: 137622 - RNA, 25 nt, Artificial Sequence
  Description of Artificial Sequence: Synthetic oligonucleotide
aaagccacugccgaagaaaugacaa

SEQ ID NO: 137623 - RNA, 25 nt, Artificial Sequence
  Description of Artificial Sequence: Synthetic oligonucleotide
aaauaucacagugaugaguauauca

SEQ ID NO: 137624 - RNA, 25 nt, Artificial Sequence
  Description of Artificial Sequence: Synthetic oligonucleotide
aaauuucuacggucaauaagaccag

SEQ ID NO: 137625 - RNA, 25 nt, Artificial Sequence
  Description of Artificial Sequence: Synthetic oligonucleotide
gauaacaugucugaguauaguaagc

SEQ ID NO: 137626 - RNA, 25 nt, Artificial Sequence
  Description of Artificial Sequence: Synthetic oligonucleotide
cagaugcagagauuuaauguuggag

SEQ ID NO: 137627 - RNA, 25 nt, Artificial Sequence
  Description of Artificial Sequence: Synthetic oligonucleotide
gaagauuguccaguguuugauggac

SEQ ID NO: 137628 - RNA, 25 nt, Artificial Sequence
  Description of Artificial Sequence: Synthetic oligonucleotide
cucuuugaguuuugucagcucucaa

SEQ ID NO: 137629 - RNA, 25 nt, Artificial Sequence
  Description of Artificial Sequence: Synthetic oligonucleotide
acuggcgguucaguugcuggagcug

SEQ ID NO: 137630 - RNA, 25 nt, Artificial Sequence
  Description of Artificial Sequence: Synthetic oligonucleotide
gugaaguuaaaccgacaacagacug

SEQ ID NO: 137631 - RNA, 25 nt, Artificial Sequence
  Description of Artificial Sequence: Synthetic oligonucleotide
gauauggcuguuaauugggcuggag

SEQ ID NO: 137632 - RNA, 25 nt, Artificial Sequence
  Description of Artificial Sequence: Synthetic oligonucleotide
ggauuacaucaugcuaagaaaucag

SEQ ID NO: 137633 - RNA, 25 nt, Artificial Sequence
  Description of Artificial Sequence: Synthetic oligonucleotide
gaagcaucaggauucuguuacguua

SEQ ID NO: 137634 - RNA, 25 nt, Artificial Sequence
  Description of Artificial Sequence: Synthetic oligonucleotide
aaugauauugugcuugccauccuug

SEQ ID NO: 137635 - RNA, 25 nt, Artificial Sequence
  Description of Artificial Sequence: Synthetic oligonucleotide
gaauuacuaaaguaucaucagagag

SEQ ID NO: 137636 - RNA, 25 nt, Artificial Sequence
  Description of Artificial Sequence: Synthetic oligonucleotide
gucuuauauauugauauagauauuc

SEQ ID NO: 137637 - RNA, 25 nt, Artificial Sequence
  Description of Artificial Sequence: Synthetic oligonucleotide
caucauggugaugguguugaagaag

SEQ ID NO: 137638 - RNA, 25 nt, Artificial Sequence
  Description of Artificial Sequence: Synthetic oligonucleotide
gcuuuuuauacaacagaucguguaa

SEQ ID NO: 137639 - RNA, 25 nt, Artificial Sequence
  Description of Artificial Sequence: Synthetic oligonucleotide
augacgguaucauuccauaaauaug

SEQ ID NO: 137640 - RNA, 25 nt, Artificial Sequence
  Description of Artificial Sequence: Synthetic oligonucleotide
ggggaauacuuuccuggcacaggag

SEQ ID NO: 137641 - RNA, 25 nt, Artificial Sequence
  Description of Artificial Sequence: Synthetic oligonucleotide
gacuugagggauauuggugcuggaa

SEQ ID NO: 137642 - RNA, 25 nt, Artificial Sequence
  Description of Artificial Sequence: Synthetic oligonucleotide
aaaggcaaauacuaugcugucaauu

SEQ ID NO: 137643 - RNA, 25 nt, Artificial Sequence
  Description of Artificial Sequence: Synthetic oligonucleotide
uuuccaaugagagaugguauagaug

SEQ ID NO: 137644 - RNA, 25 nt, Artificial Sequence
  Description of Artificial Sequence: Synthetic oligonucleotide
gaugagucauaugggcagauauuua

SEQ ID NO: 137645 - RNA, 25 nt, Artificial Sequence
  Description of Artificial Sequence: Synthetic oligonucleotide
aagccuauuaucucaaaggugaugg

SEQ ID NO: 137646 - RNA, 25 nt, Artificial Sequence
  Description of Artificial Sequence: Synthetic oligonucleotide
gagauguaucaaccuagugcugugg

SEQ ID NO: 137647 - RNA, 25 nt, Artificial Sequence
  Description of Artificial Sequence: Synthetic oligonucleotide
guauuacaguguggugcagacucau

SEQ ID NO: 137648 - RNA, 25 nt, Artificial Sequence
  Description of Artificial Sequence: Synthetic oligonucleotide
uuaucuggugauagacuggguuguu

SEQ ID NO: 137649 - RNA, 25 nt, Artificial Sequence
  Description of Artificial Sequence: Synthetic oligonucleotide
uucaaucuaacagucaaaggucaug

SEQ ID NO: 137650 - RNA, 25 nt, Artificial Sequence
  Description of Artificial Sequence: Synthetic oligonucleotide
gcuaaauguguagaaguuguaaaaa

SEQ ID NO: 137651 - RNA, 25 nt, Artificial Sequence
  Description of Artificial Sequence: Synthetic oligonucleotide
acuuuuaacuuaccauuacugaugc

SEQ ID NO: 137652 - RNA, 25 nt, Artificial Sequence
  Description of Artificial Sequence: Synthetic oligonucleotide
cuuggaggagguggcuacacaaucc

SEQ ID NO: 137653 - RNA, 25 nt, Artificial Sequence
  Description of Artificial Sequence: Synthetic oligonucleotide
cguaauguugcucgauguuggacau

SEQ ID NO: 137654 - RNA, 25 nt, Artificial Sequence
  Description of Artificial Sequence: Synthetic oligonucleotide
uaugagacugcaguugcccuugauu

SEQ ID NO: 137655 - RNA, 25 nt, Artificial Sequence
  Description of Artificial Sequence: Synthetic oligonucleotide
ugugagauucccaaugaguugccau

SEQ ID NO: 137656 - RNA, 25 nt, Artificial Sequence
  Description of Artificial Sequence: Synthetic oligonucleotide
uauaaugauuacuuugaguauuuug

SEQ ID NO: 137657 - RNA, 25 nt, Artificial Sequence
  Description of Artificial Sequence: Synthetic oligonucleotide
ggaccagacuucaaacugcauauua

SEQ ID NO: 137658 - RNA, 25 nt, Artificial Sequence
  Description of Artificial Sequence: Synthetic oligonucleotide
aguccuucaaacaugacaaaccaga

SEQ ID NO: 137659 - RNA, 25 nt, Artificial Sequence
  Description of Artificial Sequence: Synthetic oligonucleotide
aacacuccagaauauauggaaaaga

SEQ ID NO: 137660 - RNA, 25 nt, Artificial Sequence
  Description of Artificial Sequence: Synthetic oligonucleotide
auaaaacagcguuuguuugaaaauu

SEQ ID NO: 137661 - RNA, 25 nt, Artificial Sequence
  Description of Artificial Sequence: Synthetic oligonucleotide
uugcgcauguuaccucaugcaccug

SEQ ID NO: 137662 - RNA, 25 nt, Artificial Sequence
  Description of Artificial Sequence: Synthetic oligonucleotide
gguguccagaugcaagcuauuccag

SEQ ID NO: 137663 - RNA, 25 nt, Artificial Sequence
  Description of Artificial Sequence: Synthetic oligonucleotide
gaagaugcuguucaugaagacagug

SEQ ID NO: 137664 - RNA, 25 nt, Artificial Sequence
  Description of Artificial Sequence: Synthetic oligonucleotide
ggagaugaagauggagaagauccag

SEQ ID NO: 137665 - RNA, 25 nt, Artificial Sequence
  Description of Artificial Sequence: Synthetic oligonucleotide
gacaagagaauuucuauucgagcau

SEQ ID NO: 137666 - RNA, 25 nt, Artificial Sequence
  Description of Artificial Sequence: Synthetic oligonucleotide
ucagacaagcggauagcuugugaug

SEQ ID NO: 137667 - RNA, 25 nt, Artificial Sequence
  Description of Artificial Sequence: Synthetic oligonucleotide
gaagaauucucagauucugaggaug

SEQ ID NO: 137668 - RNA, 25 nt, Artificial Sequence
  Description of Artificial Sequence: Synthetic oligonucleotide
gaaggagaaggaggucgaagaaaug

SEQ ID NO: 137669 - RNA, 25 nt, Artificial Sequence
  Description of Artificial Sequence: Synthetic oligonucleotide
guggcugaucauaagaaaggagcaa

SEQ ID NO: 137670 - RNA, 25 nt, Artificial Sequence
  Description of Artificial Sequence: Synthetic oligonucleotide
aagaaagcuagaauugaagaagaua

SEQ ID NO: 137671 - RNA, 25 nt, Artificial Sequence
  Description of Artificial Sequence: Synthetic oligonucleotide
aagaaagaaacagaggacaaaaaaa

SEQ ID NO: 137672 - RNA, 25 nt, Artificial Sequence
  Description of Artificial Sequence: Synthetic oligonucleotide
acagacguuaaggaagaagauaaau

SEQ ID NO: 137673 - RNA, 25 nt, Artificial Sequence
  Description of Artificial Sequence: Synthetic oligonucleotide
uccaaggacaacaguggugaaaaaa

SEQ ID NO: 137674 - RNA, 25 nt, Artificial Sequence
  Description of Artificial Sequence: Synthetic oligonucleotide
acagauaccaaaggaaccaaaucag

SEQ ID NO: 137675 - RNA, 25 nt, Artificial Sequence
  Description of Artificial Sequence: Synthetic oligonucleotide
gaacagcucagcaaccccugaauuu

SEQ ID NO: 137676 - RNA, 25 nt, Artificial Sequence
  Description of Artificial Sequence: Synthetic oligonucleotide
ugacagucucaccaauuucagaaaa

SEQ ID NO: 137677 - RNA, 25 nt, Artificial Sequence
  Description of Artificial Sequence: Synthetic oligonucleotide
aucauuaaaaagaaaauauugaaag

SEQ ID NO: 137678 - RNA, 25 nt, Artificial Sequence
  Description of Artificial Sequence: Synthetic oligonucleotide
ggaaaauguuuucuuuuugaagacu

SEQ ID NO: 137679 - RNA, 25 nt, Artificial Sequence
  Description of Artificial Sequence: Synthetic oligonucleotide
uucuggcuucauuuuauacuacuuu

SEQ ID NO: 137680 - RNA, 25 nt, Artificial Sequence
  Description of Artificial Sequence: Synthetic oligonucleotide
uggcauggacuguauuuauuuucaa

SEQ ID NO: 137681 - RNA, 25 nt, Artificial Sequence
  Description of Artificial Sequence: Synthetic oligonucleotide
aauggcuuuuucguuuuuguuuuuc

SEQ ID NO: 137682 - RNA, 25 nt, Artificial Sequence
  Description of Artificial Sequence: Synthetic oligonucleotide
cuuggcaaguuuuauugugaguuuu

SEQ ID NO: 137683 - RNA, 25 nt, Artificial Sequence
  Description of Artificial Sequence: Synthetic oligonucleotide
uucuaauuaugaagcaaaauuucuu

SEQ ID NO: 137684 - RNA, 25 nt, Artificial Sequence
  Description of Artificial Sequence: Synthetic oligonucleotide
uuucuccaccaugcuuuaugugaua

SEQ ID NO: 137685 - RNA, 25 nt, Artificial Sequence
  Description of Artificial Sequence: Synthetic oligonucleotide
aguauuuaaaauugaugugaguuau

SEQ ID NO: 137686 - RNA, 25 nt, Artificial Sequence
  Description of Artificial Sequence: Synthetic oligonucleotide
uuaugucaaaaaaacugaucuauua

SEQ ID NO: 137687 - RNA, 25 nt, Artificial Sequence
  Description of Artificial Sequence: Synthetic oligonucleotide
aaagaaguaauuggccuuucugagc

SEQ ID NO: 137688 - RNA, 25 nt, Artificial Sequence
  Description of Artificial Sequence: Synthetic oligonucleotide
cugauuuuuccaucuuuuguaauua

SEQ ID NO: 137689 - RNA, 25 nt, Artificial Sequence
  Description of Artificial Sequence: Synthetic oligonucleotide
aucuuuauuaaaaaauuguacuugg

SEQ ID NO: 137690 - RNA, 25 nt, Artificial Sequence
  Description of Artificial Sequence: Synthetic oligonucleotide
gauuaucuuuugucuguuuauuacu

SEQ ID NO: 137691 - RNA, 25 nt, Artificial Sequence
  Description of Artificial Sequence: Synthetic oligonucleotide
uacaauaugaagucuuguuucagug

SEQ ID NO: 137692 - RNA, 25 nt, Artificial Sequence
  Description of Artificial Sequence: Synthetic oligonucleotide
ggcuaaugacaucauuucuguagac

SEQ ID NO: 137693 - RNA, 25 nt, Artificial Sequence
  Description of Artificial Sequence: Synthetic oligonucleotide
cuuacaauacacucuaggugaaaga

SEQ ID NO: 137694 - RNA, 25 nt, Artificial Sequence
  Description of Artificial Sequence: Synthetic oligonucleotide
auaaugauuacagcuugaaagauaa

SEQ ID NO: 137695 - RNA, 25 nt, Artificial Sequence
  Description of Artificial Sequence: Synthetic oligonucleotide
acuauuugcuguuucuuugggaaga

SEQ ID NO: 137696 - RNA, 25 nt, Artificial Sequence
  Description of Artificial Sequence: Synthetic oligonucleotide
aguauuuauaguaauuauuacuuau

SEQ ID NO: 137697 - RNA, 25 nt, Artificial Sequence
  Description of Artificial Sequence: Synthetic oligonucleotide
ucuuugcaauagaaauucuaccacc

SEQ ID NO: 137698 - RNA, 25 nt, Artificial Sequence
  Description of Artificial Sequence: Synthetic oligonucleotide
cuugcccucuauagcuuagccaguu

SEQ ID NO: 137699 - RNA, 25 nt, Artificial Sequence
  Description of Artificial Sequence: Synthetic oligonucleotide
uaguaucagugaagauuaacauccc

SEQ ID NO: 137700 - RNA, 25 nt, Artificial Sequence
  Description of Artificial Sequence: Synthetic oligonucleotide
cauuacaauuuaugaaauaauacag

SEQ ID NO: 137701 - RNA, 25 nt, Artificial Sequence
  Description of Artificial Sequence: Synthetic oligonucleotide
gacucugcaauugagauguaggagu

SEQ ID NO: 137702 - RNA, 25 nt, Artificial Sequence
  Description of Artificial Sequence: Synthetic oligonucleotide
uucuuugaguugacccaaagauucu

SEQ ID NO: 137703 - RNA, 25 nt, Artificial Sequence
  Description of Artificial Sequence: Synthetic oligonucleotide
ucaaaauugaaauggaaauucugaa

SEQ ID NO: 137704 - RNA, 25 nt, Artificial Sequence
  Description of Artificial Sequence: Synthetic oligonucleotide
auugaaagaagaaacugaccagaac

SEQ ID NO: 137705 - RNA, 25 nt, Artificial Sequence
  Description of Artificial Sequence: Synthetic oligonucleotide
cuuguauugaccagacuugccuaua

SEQ ID NO: 137706 - RNA, 25 nt, Artificial Sequence
  Description of Artificial Sequence: Synthetic oligonucleotide
aguauauugcugguuuaaaauggaa

SEQ ID NO: 137707 - RNA, 25 nt, Artificial Sequence
  Description of Artificial Sequence: Synthetic oligonucleotide
accugcagacaaaaccuguuucuuu

SEQ ID NO: 137708 - RNA, 25 nt, Artificial Sequence
  Description of Artificial Sequence: Synthetic oligonucleotide
uuacugcauuuacauggcauccagg

SEQ ID NO: 137709 - RNA, 25 nt, Artificial Sequence
  Description of Artificial Sequence: Synthetic oligonucleotide
guuccauuauuauuuacgugacauc

SEQ ID NO: 137710 - RNA, 25 nt, Artificial Sequence
  Description of Artificial Sequence: Synthetic oligonucleotide
ccagguuucuaacucaaggaaauaa

SEQ ID NO: 137711 - RNA, 25 nt, Artificial Sequence
  Description of Artificial Sequence: Synthetic oligonucleotide
aacacaacugauuuaucauucagca

SEQ ID NO: 137712 - RNA, 25 nt, Artificial Sequence
  Description of Artificial Sequence: Synthetic oligonucleotide
aacuacuuauugugugucugcccau

SEQ ID NO: 137713 - RNA, 25 nt, Artificial Sequence
  Description of Artificial Sequence: Synthetic oligonucleotide
uuuuaagacuguaggaguguaacug

SEQ ID NO: 137714 - RNA, 25 nt, Artificial Sequence
  Description of Artificial Sequence: Synthetic oligonucleotide
gaauauaauggaaaaaugcuuucac

SEQ ID NO: 137715 - RNA, 25 nt, Artificial Sequence
  Description of Artificial Sequence: Synthetic oligonucleotide
cucagagcuuacacucagagcuuac

SEQ ID NO: 137716 - RNA, 25 nt, Artificial Sequence
  Description of Artificial Sequence: Synthetic oligonucleotide
cauucuaguagcaggaagcagacaa

SEQ ID NO: 137717 - RNA, 25 nt, Artificial Sequence
  Description of Artificial Sequence: Synthetic oligonucleotide
aauggggguaacuccugcuacuaag

SEQ ID NO: 137718 - RNA, 25 nt, Artificial Sequence
  Description of Artificial Sequence: Synthetic oligonucleotide
gaugugcaaagaagacaaaacauuu

SEQ ID NO: 137719 - RNA, 25 nt, Artificial Sequence
  Description of Artificial Sequence: Synthetic oligonucleotide
uuaggaacuugccaaaaucagugaa

SEQ ID NO: 137720 - RNA, 25 nt, Artificial Sequence
  Description of Artificial Sequence: Synthetic oligonucleotide
aaucucccuuuuugucaggcccaca

SEQ ID NO: 137721 - RNA, 25 nt, Artificial Sequence
  Description of Artificial Sequence: Synthetic oligonucleotide
auugauucuuuugagauuaaaaauu

SEQ ID NO: 137722 - RNA, 25 nt, Artificial Sequence
  Description of Artificial Sequence: Synthetic oligonucleotide
uacagaaugccagaagauaauucag

SEQ ID NO: 137723 - RNA, 25 nt, Artificial Sequence
  Description of Artificial Sequence: Synthetic oligonucleotide
gucaaaaguauuucucuucagugca

SEQ ID NO: 137724 - RNA, 25 nt, Artificial Sequence
  Description of Artificial Sequence: Synthetic oligonucleotide
aguaaaauauuaaaagaaaaaauau

SEQ ID NO: 137725 - RNA, 25 nt, Artificial Sequence
  Description of Artificial Sequence: Synthetic oligonucleotide
uuucucuacaagccucuuaaauguu

SEQ ID NO: 137726 - RNA, 25 nt, Artificial Sequence
  Description of Artificial Sequence: Synthetic oligonucleotide
uucagacauucacaauagcaccuag

SEQ ID NO: 137727 - RNA, 25 nt, Artificial Sequence
  Description of Artificial Sequence: Synthetic oligonucleotide
gacuuuuguaaugaacagcugugca

SEQ ID NO: 137728 - RNA, 25 nt, Artificial Sequence
  Description of Artificial Sequence: Synthetic oligonucleotide
acccaccccgacuuaacaaauauuu

SEQ ID NO: 137729 - RNA, 25 nt, Artificial Sequence
  Description of Artificial Sequence: Synthetic oligonucleotide
uuacuuuugcuauauuugcuucggu

SEQ ID NO: 137730 - RNA, 25 nt, Artificial Sequence
  Description of Artificial Sequence: Synthetic oligonucleotide
uguuuuuuucuuaaaauacaccgaa

SEQ ID NO: 137731 - RNA, 25 nt, Artificial Sequence
  Description of Artificial Sequence: Synthetic oligonucleotide
aauugaagcucucuuuguguacuuu

SEQ ID NO: 137732 - RNA, 25 nt, Artificial Sequence
  Description of Artificial Sequence: Synthetic oligonucleotide
ugucguuuguaauccucccucccuc

SEQ ID NO: 137733 - RNA, 25 nt, Artificial Sequence
  Description of Artificial Sequence: Synthetic oligonucleotide
cccagccuuaagaaguaaucaccau

SEQ ID NO: 137734 - RNA, 25 nt, Artificial Sequence
  Description of Artificial Sequence: Synthetic oligonucleotide
uugugauuauuuuauccauguuuuu

SEQ ID NO: 137735 - RNA, 25 nt, Artificial Sequence
  Description of Artificial Sequence: Synthetic oligonucleotide
ugugaauauuuuacccauguuuuug

SEQ ID NO: 137736 - RNA, 25 nt, Artificial Sequence
  Description of Artificial Sequence: Synthetic oligonucleotide
guacuuuugcuacauauuuguuauc

SEQ ID NO: 137737 - RNA, 25 nt, Artificial Sequence
  Description of Artificial Sequence: Synthetic oligonucleotide
caaucuguaaaccuuuaugacauua

SEQ ID NO: 137738 - RNA, 25 nt, Artificial Sequence
  Description of Artificial Sequence: Synthetic oligonucleotide
aggaacuaagaaacuuagucccuuc

SEQ ID NO: 137739 - RNA, 25 nt, Artificial Sequence
  Description of Artificial Sequence: Synthetic oligonucleotide
cguuagggggauaaugaaauguauu

SEQ ID NO: 137740 - RNA, 25 nt, Artificial Sequence
  Description of Artificial Sequence: Synthetic oligonucleotide
uuaguguuugugaaacauagauggu

SEQ ID NO: 137741 - RNA, 25 nt, Artificial Sequence
  Description of Artificial Sequence: Synthetic oligonucleotide
uauguauuuggacaauucuguaacu

SEQ ID NO: 137742 - RNA, 25 nt, Artificial Sequence
  Description of Artificial Sequence: Synthetic oligonucleotide
uuugcuuuuuuuauuuuuauuuuuc

SEQ ID NO: 137743 - RNA, 25 nt, Artificial Sequence
  Description of Artificial Sequence: Synthetic oligonucleotide
ccauagcuuauuggggaacaggugg

SEQ ID NO: 137744 - RNA, 25 nt, Artificial Sequence
  Description of Artificial Sequence: Synthetic oligonucleotide
guguuugguuacaugauuaaguucu

SEQ ID NO: 137745 - RNA, 25 nt, Artificial Sequence
  Description of Artificial Sequence: Synthetic oligonucleotide
uuuaguggugauuugugggauuuug

SEQ ID NO: 137746 - RNA, 25 nt, Artificial Sequence
  Description of Artificial Sequence: Synthetic oligonucleotide
gguggacccaucacccaagcagugu

SEQ ID NO: 137747 - RNA, 25 nt, Artificial Sequence
  Description of Artificial Sequence: Synthetic oligonucleotide
uacacugcacccuauuuguaaucuu

SEQ ID NO: 137748 - RNA, 25 nt, Artificial Sequence
  Description of Artificial Sequence: Synthetic oligonucleotide
uuuaucccucgccccccucccacca

SEQ ID NO: 137749 - RNA, 25 nt, Artificial Sequence
  Description of Artificial Sequence: Synthetic oligonucleotide
augccucccgucuaccaugaugauc

SEQ ID NO: 137750 - RNA, 25 nt, Artificial Sequence
  Description of Artificial Sequence: Synthetic oligonucleotide
ccuguuuuaaauaagaaaauaccau

SEQ ID NO: 137751 - RNA, 25 nt, Artificial Sequence
  Description of Artificial Sequence: Synthetic oligonucleotide
uuucgcaggcuccagauguucuggc

SEQ ID NO: 137752 - RNA, 25 nt, Artificial Sequence
  Description of Artificial Sequence: Synthetic oligonucleotide
cauccucccuguggauuucccagug

SEQ ID NO: 137753 - RNA, 25 nt, Artificial Sequence
  Description of Artificial Sequence: Synthetic oligonucleotide
gccugcagcucacaggacaacaggg

SEQ ID NO: 137754 - RNA, 25 nt, Artificial Sequence
  Description of Artificial Sequence: Synthetic oligonucleotide
ggcugugguagagucaccuaugaga

SEQ ID NO: 137755 - RNA, 25 nt, Artificial Sequence
  Description of Artificial Sequence: Synthetic oligonucleotide
auccuggaguaguggauggaggaga

SEQ ID NO: 137756 - RNA, 25 nt, Artificial Sequence
  Description of Artificial Sequence: Synthetic oligonucleotide
auggaacagugaagacggaaacuga

SEQ ID NO: 137757 - RNA, 25 nt, Artificial Sequence
  Description of Artificial Sequence: Synthetic oligonucleotide
agcucaguauccgggugccaggaga

SEQ ID NO: 137758 - RNA, 25 nt, Artificial Sequence
  Description of Artificial Sequence: Synthetic oligonucleotide
acaaaggcccuuugcuuuuuuucau

SEQ ID NO: 137759 - RNA, 25 nt, Artificial Sequence
  Description of Artificial Sequence: Synthetic oligonucleotide
uuuaauauucugaucuaccccuguu

SEQ ID NO: 137760 - RNA, 25 nt, Artificial Sequence
  Description of Artificial Sequence: Synthetic oligonucleotide
ugacacauguuaaguauaguucauu

SEQ ID NO: 137761 - RNA, 25 nt, Artificial Sequence
  Description of Artificial Sequence: Synthetic oligonucleotide
uuugacugcuauguauuauguucca

SEQ ID NO: 137762 - RNA, 25 nt, Artificial Sequence
  Description of Artificial Sequence: Synthetic oligonucleotide
auugugugaacauacugaaauugua

SEQ ID NO: 137763 - RNA, 25 nt, Artificial Sequence
  Description of Artificial Sequence: Synthetic oligonucleotide
acacuucaauacuauacuggaucuc

SEQ ID NO: 137764 - RNA, 25 nt, Artificial Sequence
  Description of Artificial Sequence: Synthetic oligonucleotide
ccuuggguguauuuaagagguuuug

SEQ ID NO: 137765 - RNA, 25 nt, Artificial Sequence
  Description of Artificial Sequence: Synthetic oligonucleotide
guuuuucuaaguaguugguuauaua

SEQ ID NO: 137766 - RNA, 25 nt, Artificial Sequence
  Description of Artificial Sequence: Synthetic oligonucleotide
acaacuaaaaccucaagagaacuau

SEQ ID NO: 137767 - RNA, 25 nt, Artificial Sequence
  Description of Artificial Sequence: Synthetic oligonucleotide
ucuaaagcaauuucagcaaggugau

SEQ ID NO: 137768 - RNA, 25 nt, Artificial Sequence
  Description of Artificial Sequence: Synthetic oligonucleotide
uuugguacagcauuaauaaacagaa

SEQ ID NO: 137769 - RNA, 25 nt, Artificial Sequence
  Description of Artificial Sequence: Synthetic oligonucleotide
aaucaguaacacuuagugaccaagu

SEQ ID NO: 137770 - RNA, 25 nt, Artificial Sequence
  Description of Artificial Sequence: Synthetic oligonucleotide
ucuguuggaagaacaaagaccccca

SEQ ID NO: 137771 - RNA, 25 nt, Artificial Sequence
  Description of Artificial Sequence: Synthetic oligonucleotide
auuuguaauaacaaaauuuuuagaa

SEQ ID NO: 137772 - RNA, 25 nt, Artificial Sequence
  Description of Artificial Sequence: Synthetic oligonucleotide
aauaauauguaaagaagcuaugguu

SEQ ID NO: 137773 - RNA, 25 nt, Artificial Sequence
  Description of Artificial Sequence: Synthetic oligonucleotide
ucuugugucuaguaaggucaaugua

SEQ ID NO: 137774 - RNA, 25 nt, Artificial Sequence
  Description of Artificial Sequence: Synthetic oligonucleotide
aacauaguaagaugucagaauaccc

SEQ ID NO: 137775 - RNA, 25 nt, Artificial Sequence
  Description of Artificial Sequence: Synthetic oligonucleotide
cuaauacuuuaaaaaauucauauag

SEQ ID NO: 137776 - RNA, 25 nt, Artificial Sequence
  Description of Artificial Sequence: Synthetic oligonucleotide
ggauaaaaaugauauuugaaauugg

SEQ ID NO: 137777 - RNA, 25 nt, Artificial Sequence
  Description of Artificial Sequence: Synthetic oligonucleotide
gcaaggaaagacauuauuuuguaag

SEQ ID NO: 137778 - RNA, 25 nt, Artificial Sequence
  Description of Artificial Sequence: Synthetic oligonucleotide
guggaauugggacaacaacugguaa

SEQ ID NO: 137779 - RNA, 25 nt, Artificial Sequence
  Description of Artificial Sequence: Synthetic oligonucleotide
accaaauggaaaacccaguuuucug

SEQ ID NO: 137780 - RNA, 25 nt, Artificial Sequence
  Description of Artificial Sequence: Synthetic oligonucleotide
gcccuccacuagaagauuuaaauag

SEQ ID NO: 137781 - RNA, 25 nt, Artificial Sequence
  Description of Artificial Sequence: Synthetic oligonucleotide
ggaaaagauaaaacuaccaaaaacc

SEQ ID NO: 137782 - RNA, 25 nt, Artificial Sequence
  Description of Artificial Sequence: Synthetic oligonucleotide
cuaaacucuuaaagcaaauggauug

SEQ ID NO: 137783 - RNA, 25 nt, Artificial Sequence
  Description of Artificial Sequence: Synthetic oligonucleotide
gaagaaggccuaagugugacaccaa

SEQ ID NO: 137784 - RNA, 25 nt, Artificial Sequence
  Description of Artificial Sequence: Synthetic oligonucleotide
aacucaacuauaaaagauauauuug

SEQ ID NO: 137785 - RNA, 25 nt, Artificial Sequence
  Description of Artificial Sequence: Synthetic oligonucleotide
guggaccaacaaaaacuuagaagac

SEQ ID NO: 137786 - RNA, 25 nt, Artificial Sequence
  Description of Artificial Sequence: Synthetic oligonucleotide
caagucaagaaaaaugacaaaagac

SEQ ID NO: 137787 - RNA, 25 nt, Artificial Sequence
  Description of Artificial Sequence: Synthetic oligonucleotide
cagagugggaggcagauuuguaacu

SEQ ID NO: 137788 - RNA, 25 nt, Artificial Sequence
  Description of Artificial Sequence: Synthetic oligonucleotide
ucauccaggucaaaaggcucauauc

SEQ ID NO: 137789 - RNA, 25 nt, Artificial Sequence
  Description of Artificial Sequence: Synthetic oligonucleotide
cuaaagauaguagaggaacaaaaug

SEQ ID NO: 137790 - RNA, 25 nt, Artificial Sequence
  Description of Artificial Sequence: Synthetic oligonucleotide
guauaaggaugugaacugggaaaca

SEQ ID NO: 137791 - RNA, 25 nt, Artificial Sequence
  Description of Artificial Sequence: Synthetic oligonucleotide
aaauacauauaaauaguuuguaaau

SEQ ID NO: 137792 - RNA, 25 nt, Artificial Sequence
  Description of Artificial Sequence: Synthetic oligonucleotide
uaugaaaagaucuuuaaccucagua

SEQ ID NO: 137793 - RNA, 25 nt, Artificial Sequence
  Description of Artificial Sequence: Synthetic oligonucleotide
aaauaaaaagcuauagagagacuua

SEQ ID NO: 137794 - RNA, 25 nt, Artificial Sequence
  Description of Artificial Sequence: Synthetic oligonucleotide
auuuuuuaacuuaguuuuuuaaacc

SEQ ID NO: 137795 - RNA, 25 nt, Artificial Sequence
  Description of Artificial Sequence: Synthetic oligonucleotide
cuauuauguuuauuuauuuuuucuu

SEQ ID NO: 137796 - RNA, 25 nt, Artificial Sequence
  Description of Artificial Sequence: Synthetic oligonucleotide
uuuuuugagacggagucucgcuguu

SEQ ID NO: 137797 - RNA, 25 nt, Artificial Sequence
  Description of Artificial Sequence: Synthetic oligonucleotide
ugcccaggcuggugugcaauggcgc

SEQ ID NO: 137798 - RNA, 25 nt, Artificial Sequence
  Description of Artificial Sequence: Synthetic oligonucleotide
caaucucggcucacugcaaccuccg

SEQ ID NO: 137799 - RNA, 25 nt, Artificial Sequence
  Description of Artificial Sequence: Synthetic oligonucleotide
gccucccagguugaagccauucucc

SEQ ID NO: 137800 - RNA, 25 nt, Artificial Sequence
  Description of Artificial Sequence: Synthetic oligonucleotide
cugccucagccuccugaguagcugg

SEQ ID NO: 137801 - RNA, 25 nt, Artificial Sequence
  Description of Artificial Sequence: Synthetic oligonucleotide
ggauuacaggcgccugucaccacgc

SEQ ID NO: 137802 - RNA, 25 nt, Artificial Sequence
  Description of Artificial Sequence: Synthetic oligonucleotide
cccagcuaauuguucgcauuuuuag

SEQ ID NO: 137803 - RNA, 25 nt, Artificial Sequence
  Description of Artificial Sequence: Synthetic oligonucleotide
guagagacgggguuucacuauguug

SEQ ID NO: 137804 - RNA, 25 nt, Artificial Sequence
  Description of Artificial Sequence: Synthetic oligonucleotide
ggccaggcuggccucgaacuccuga

SEQ ID NO: 137805 - RNA, 25 nt, Artificial Sequence
  Description of Artificial Sequence: Synthetic oligonucleotide
accucaugauccacccaccuuggcc

SEQ ID NO: 137806 - RNA, 25 nt, Artificial Sequence
  Description of Artificial Sequence: Synthetic oligonucleotide
cuuccaaagugcugggauuacaggu

SEQ ID NO: 137807 - RNA, 25 nt, Artificial Sequence
  Description of Artificial Sequence: Synthetic oligonucleotide
ugugagcugccgcaccuggcuguuu

SEQ ID NO: 137808 - RNA, 25 nt, Artificial Sequence
  Description of Artificial Sequence: Synthetic oligonucleotide
uaucucuuuuuuuuagagaaaggau

SEQ ID NO: 137809 - RNA, 25 nt, Artificial Sequence
  Description of Artificial Sequence: Synthetic oligonucleotide
ucucggucacccaggauggagugug

SEQ ID NO: 137810 - RNA, 25 nt, Artificial Sequence
  Description of Artificial Sequence: Synthetic oligonucleotide
gguagccugaucauaucucacuaca

SEQ ID NO: 137811 - RNA, 25 nt, Artificial Sequence
  Description of Artificial Sequence: Synthetic oligonucleotide
aucuuagaacuucuaggcuuagggu

SEQ ID NO: 137812 - RNA, 25 nt, Artificial Sequence
  Description of Artificial Sequence: Synthetic oligonucleotide
uauucucccaccucagccucccaag

SEQ ID NO: 137813 - RNA, 25 nt, Artificial Sequence
  Description of Artificial Sequence: Synthetic oligonucleotide
guagcugggacuacaagugugcacc

SEQ ID NO: 137814 - RNA, 25 nt, Artificial Sequence
  Description of Artificial Sequence: Synthetic oligonucleotide
caucacaccuagcugauuuuuacau

SEQ ID NO: 137815 - RNA, 25 nt, Artificial Sequence
  Description of Artificial Sequence: Synthetic oligonucleotide
uuuuuauuuuggagagauggugucu

SEQ ID NO: 137816 - RNA, 25 nt, Artificial Sequence
  Description of Artificial Sequence: Synthetic oligonucleotide
ucccuguguugcccaggcuggucac

SEQ ID NO: 137817 - RNA, 25 nt, Artificial Sequence
  Description of Artificial Sequence: Synthetic oligonucleotide
caaacuccuaggcucaagcgauucu

SEQ ID NO: 137818 - RNA, 25 nt, Artificial Sequence
  Description of Artificial Sequence: Synthetic oligonucleotide
uccugacucaggcaugagccaccgu

SEQ ID NO: 137819 - RNA, 25 nt, Artificial Sequence
  Description of Artificial Sequence: Synthetic oligonucleotide
uacccggccuaaaccuaucauguua

SEQ ID NO: 137820 - RNA, 25 nt, Artificial Sequence
  Description of Artificial Sequence: Synthetic oligonucleotide
acagacuuagaaagcaacuauuguc

SEQ ID NO: 137821 - RNA, 25 nt, Artificial Sequence
  Description of Artificial Sequence: Synthetic oligonucleotide
caaguguuugaggaaacucagguca

SEQ ID NO: 137822 - RNA, 25 nt, Artificial Sequence
  Description of Artificial Sequence: Synthetic oligonucleotide
agguuugguaaacuaagauauuaac

SEQ ID NO: 137823 - RNA, 25 nt, Artificial Sequence
  Description of Artificial Sequence: Synthetic oligonucleotide
cucaaguaaagcucuuuaauucauu

SEQ ID NO: 137824 - RNA, 25 nt, Artificial Sequence
  Description of Artificial Sequence: Synthetic oligonucleotide
uuaaugaaggugccacauugucuca

SEQ ID NO: 137825 - RNA, 25 nt, Artificial Sequence
  Description of Artificial Sequence: Synthetic oligonucleotide
aguucucuauggcaugggugaaugc

SEQ ID NO: 137826 - RNA, 25 nt, Artificial Sequence
  Description of Artificial Sequence: Synthetic oligonucleotide
cuguucuaagucagcauugguacuc

SEQ ID NO: 137827 - RNA, 25 nt, Artificial Sequence
  Description of Artificial Sequence: Synthetic oligonucleotide
cuaagcuaguuacaucauaucuaag

SEQ ID NO: 137828 - RNA, 25 nt, Artificial Sequence
  Description of Artificial Sequence: Synthetic oligonucleotide
gcuuugcccuucuaccagagcugcu

SEQ ID NO: 137829 - RNA, 25 nt, Artificial Sequence
  Description of Artificial Sequence: Synthetic oligonucleotide
uagcauucugucaaugggcaauuau

SEQ ID NO: 137830 - RNA, 25 nt, Artificial Sequence
  Description of Artificial Sequence: Synthetic oligonucleotide
uuugaaguucuuacauugaaguuag

SEQ ID NO: 137831 - RNA, 25 nt, Artificial Sequence
  Description of Artificial Sequence: Synthetic oligonucleotide
gucaccuacaucuucuguuuuuuau

SEQ ID NO: 137832 - RNA, 25 nt, Artificial Sequence
  Description of Artificial Sequence: Synthetic oligonucleotide
ugguuuugauguaguaauacugcug

SEQ ID NO: 137833 - RNA, 25 nt, Artificial Sequence
  Description of Artificial Sequence: Synthetic oligonucleotide
gaaguuuuuuugauaacugcgauuc

SEQ ID NO: 137834 - RNA, 25 nt, Artificial Sequence
  Description of Artificial Sequence: Synthetic oligonucleotide
cauaauauuuguuauucauauugug

SEQ ID NO: 137835 - RNA, 25 nt, Artificial Sequence
  Description of Artificial Sequence: Synthetic oligonucleotide
gauauaaaugauaagggcuuuugaa

SEQ ID NO: 137836 - RNA, 25 nt, Artificial Sequence
  Description of Artificial Sequence: Synthetic oligonucleotide
aaacaaguaguaaucauuucaauag

SEQ ID NO: 137837 - RNA, 25 nt, Artificial Sequence
  Description of Artificial Sequence: Synthetic oligonucleotide
gcuuaggaucuccaccauaaucuua

SEQ ID NO: 137838 - RNA, 25 nt, Artificial Sequence
  Description of Artificial Sequence: Synthetic oligonucleotide
aggaaaauuacuaaccucugugccu

SEQ ID NO: 137839 - RNA, 25 nt, Artificial Sequence
  Description of Artificial Sequence: Synthetic oligonucleotide
ucaguugcuucaucauuuaaaauga

SEQ ID NO: 137840 - RNA, 25 nt, Artificial Sequence
  Description of Artificial Sequence: Synthetic oligonucleotide
aggaaaauaauagucccuacuuaau

SEQ ID NO: 137841 - RNA, 25 nt, Artificial Sequence
  Description of Artificial Sequence: Synthetic oligonucleotide
uagguuuguugugaggauugaguua

SEQ ID NO: 137842 - RNA, 25 nt, Artificial Sequence
  Description of Artificial Sequence: Synthetic oligonucleotide
aauaacauaguuaaugcucaguaag

SEQ ID NO: 137843 - RNA, 25 nt, Artificial Sequence
  Description of Artificial Sequence: Synthetic oligonucleotide
ggguuagcugcuauuuuuuuuucuu

SEQ ID NO: 137844 - RNA, 25 nt, Artificial Sequence
  Description of Artificial Sequence: Synthetic oligonucleotide
uuuuuuuuugaaagagucucacucu

SEQ ID NO: 137845 - RNA, 25 nt, Artificial Sequence
  Description of Artificial Sequence: Synthetic oligonucleotide
uguugcccagguuggagugcagugg

SEQ ID NO: 137846 - RNA, 25 nt, Artificial Sequence
  Description of Artificial Sequence: Synthetic oligonucleotide
gcaugaucuuggcucacugcauccu

SEQ ID NO: 137847 - RNA, 25 nt, Artificial Sequence
  Description of Artificial Sequence: Synthetic oligonucleotide
ucugcuuccuagguucaggugauuc

SEQ ID NO: 137848 - RNA, 25 nt, Artificial Sequence
  Description of Artificial Sequence: Synthetic oligonucleotide
cucaugcuucagccucccaagcagc

SEQ ID NO: 137849 - RNA, 25 nt, Artificial Sequence
  Description of Artificial Sequence: Synthetic oligonucleotide
cugggaguacaggugugcaccacca

SEQ ID NO: 137850 - RNA, 25 nt, Artificial Sequence
  Description of Artificial Sequence: Synthetic oligonucleotide
acaccuggcuaauuuuuguauauuu

SEQ ID NO: 137851 - RNA, 25 nt, Artificial Sequence
  Description of Artificial Sequence: Synthetic oligonucleotide
uaguagagacggguucucaccauau

SEQ ID NO: 137852 - RNA, 25 nt, Artificial Sequence
  Description of Artificial Sequence: Synthetic oligonucleotide
uuguccaggcuggucuugaacuccu

SEQ ID NO: 137853 - RNA, 25 nt, Artificial Sequence
  Description of Artificial Sequence: Synthetic oligonucleotide
uuaccucaaaugauccacccgccug

SEQ ID NO: 137854 - RNA, 25 nt, Artificial Sequence
  Description of Artificial Sequence: Synthetic oligonucleotide
gggccucccaaagugcugggauuac

SEQ ID NO: 137855 - RNA, 25 nt, Artificial Sequence
  Description of Artificial Sequence: Synthetic oligonucleotide
caagcaugagccaccgcgccuggcu

SEQ ID NO: 137856 - RNA, 25 nt, Artificial Sequence
  Description of Artificial Sequence: Synthetic oligonucleotide
uugcuauuguuaugagguaaaggua

SEQ ID NO: 137857 - RNA, 25 nt, Artificial Sequence
  Description of Artificial Sequence: Synthetic oligonucleotide
agauagaugggugagaguggugcca

SEQ ID NO: 137858 - RNA, 25 nt, Artificial Sequence
  Description of Artificial Sequence: Synthetic oligonucleotide
aggggaaguguuaaauuuuugagug

SEQ ID NO: 137859 - RNA, 25 nt, Artificial Sequence
  Description of Artificial Sequence: Synthetic oligonucleotide
guuccuuuagaugccagauggguug

SEQ ID NO: 137860 - RNA, 25 nt, Artificial Sequence
  Description of Artificial Sequence: Synthetic oligonucleotide
guaucugagccuuuuauugcaguuu

SEQ ID NO: 137861 - RNA, 25 nt, Artificial Sequence
  Description of Artificial Sequence: Synthetic oligonucleotide
ugaugccuacuagugugaagacuac

SEQ ID NO: 137862 - RNA, 25 nt, Artificial Sequence
  Description of Artificial Sequence: Synthetic oligonucleotide
cuaggucauaguggauagagaagca

SEQ ID NO: 137863 - RNA, 25 nt, Artificial Sequence
  Description of Artificial Sequence: Synthetic oligonucleotide
aaucuuuuggagaccugauuuuagc

SEQ ID NO: 137864 - RNA, 25 nt, Artificial Sequence
  Description of Artificial Sequence: Synthetic oligonucleotide
caaggauacgaauaauauuugacaa

SEQ ID NO: 137865 - RNA, 25 nt, Artificial Sequence
  Description of Artificial Sequence: Synthetic oligonucleotide
acuuuggggggaucuugaugccucu

SEQ ID NO: 137866 - RNA, 25 nt, Artificial Sequence
  Description of Artificial Sequence: Synthetic oligonucleotide
uguaauuuacucaaggauaaucuca

SEQ ID NO: 137867 - RNA, 25 nt, Artificial Sequence
  Description of Artificial Sequence: Synthetic oligonucleotide
aagaaaaauggcauuaaguagauua

SEQ ID NO: 137868 - RNA, 25 nt, Artificial Sequence
  Description of Artificial Sequence: Synthetic oligonucleotide
acagaaaaaauagaacuaucauauu

SEQ ID NO: 137869 - RNA, 25 nt, Artificial Sequence
  Description of Artificial Sequence: Synthetic oligonucleotide
uguuauuauuggcuauuuacaugag

SEQ ID NO: 137870 - RNA, 25 nt, Artificial Sequence
  Description of Artificial Sequence: Synthetic oligonucleotide
gcaaugcggagaaauguuuaggauu

SEQ ID NO: 137871 - RNA, 25 nt, Artificial Sequence
  Description of Artificial Sequence: Synthetic oligonucleotide
uacagcauuuagaagcuucucaauu

SEQ ID NO: 137872 - RNA, 25 nt, Artificial Sequence
  Description of Artificial Sequence: Synthetic oligonucleotide
ugcugcauuuccucacuguaccaca

SEQ ID NO: 137873 - RNA, 25 nt, Artificial Sequence
  Description of Artificial Sequence: Synthetic oligonucleotide
aagauggcagauacugcauuuaaaa

SEQ ID NO: 137874 - RNA, 25 nt, Artificial Sequence
  Description of Artificial Sequence: Synthetic oligonucleotide
auuuuuuuuucuguguguuuucucu

SEQ ID NO: 137875 - RNA, 25 nt, Artificial Sequence
  Description of Artificial Sequence: Synthetic oligonucleotide
uuauagucacuugguggccauguaa

SEQ ID NO: 137876 - RNA, 25 nt, Artificial Sequence
  Description of Artificial Sequence: Synthetic oligonucleotide
acaagcagagcaacauguauuaaca

SEQ ID NO: 137877 - RNA, 25 nt, Artificial Sequence
  Description of Artificial Sequence: Synthetic oligonucleotide
agauucuuuuugaaugcaauauugg

SEQ ID NO: 137878 - RNA, 25 nt, Artificial Sequence
  Description of Artificial Sequence: Synthetic oligonucleotide
gauuaaaaacuuugaauuaaaaaaa

SEQ ID NO: 137879 - RNA, 1965 nt, Homo sapiens
gggaggggcuggcggcggccgcgggcggcgggcggcggaggugcggggccugcucccgccggcaccauggccaagaccguggccuauuucuacgaccccgacgugggcaacuuccacuacggagcuggacacccuaugaagccccaucgccuggcauugacccauagccugguccugcauuacggucucuauaagaagaugaucgucuucaagccauaccaggccucccaacaugacaugugccgcuuccacuccgaggacuacauugacuuccugcagagagucagccccaccaauaugcaaggcuucaccaagagucuuaaugccuucaacguaggcgaugacugcccaguguuucccgggcucuuugaguucugcucgcguuacacaggcgcaucucugcaaggagcaacccagcugaacaacaagaucugugauauugccauuaacugggcugguggucugcaccaugccaagaaguuugaggccucuggcuucugcuaugucaacgacauugugauuggcauccuggagcugcucaaguaccacccucgggugcucuacauugacauugacauccaccauggugacgggguucaagaagcuuucuaccucacugaccgggucaugacgguguccuuccacaaauacggaaauuacuucuucccuggcacaggugacauguaugaagucggggcagagaguggccgcuacuacugucugaacgugccccugcgggauggcauugaugaccagaguuacaagcaccuuuuccagccgguuaucaaccagguaguggacuucuaccaacccacgugcauugugcuccaguguggagcugacucucugggcugugaucgauugggcugcuuuaaccucagcauccgagggcauggggaaugcguugaauaugucaagagcuucaauaucccucuacucgugcugggugguggugguuauacuguccgaaauguugcccgcugcuggacauaugagacaucgcugcugguagaagaggccauuagugaggagcuucccuauagugaauacuucgaguacuuugccccagacuucacacuucauccagaugucagcacccgcaucgagaaucagaacucacgccaguaucuggaccagauccgccagacaaucuuugaaaaccugaagaugcugaaccaugcaccuaguguccagauucaugacgugccugcagaccuccugaccuaugacaggacugaugaggcugaugcagaggagagggguccugaggagaacuauagcaggccagaggcacccaaugaguucuaugauggagaccaugacaaugacaaggaaagcgauguggagauuuaagaguggcuugggaugcugugucccaaggaauuucuuuucaccucuugguugggcuggagggaaaaggaguggcuccuagaguccugggggucaccccagggcuuuugcugacucugggaaagagucuggagaccacauuugguucucgaaccaucuaccugcuuuuccucucucucccaaggccugacaaugguaccuauuagggaugagauacagacaaggauagcuaucugggacauuauuggcagugggcccuggaggccagucccuagccccccuugccccuuauuucuucccugcuucccucgaacccagagauuuuugagggaugaacggguagacaaggacugagauugccucugacuuccuccuccccuggguucugacuucuuccuccccuugcuuccagggaagaugaagagagagagauuuggaaggggcucuggcucccuaacaccugaaucccagaugaugggaaguauguuuucaaguguggggaggauaugaaaauguucuguucucacuuuuggcuuuauguccauuuuaccacuguuuuuauccaauaaacuaagucgguauuuuuuguaccuuuaaaaaaaaaaaaaaaaaaaa

SEQ ID NO: 137880 - RNA, 19 nt, Artificial Sequence
  Description of Artificial Sequence: Synthetic oligonucleotide
gggaggggcuggcggcggc

SEQ ID NO: 137881 - RNA, 19 nt, Artificial Sequence
  Description of Artificial Sequence: Synthetic oligonucleotide
ccgcgggcggcgggcggcg

SEQ ID NO: 137882 - RNA, 19 nt, Artificial Sequence
  Description of Artificial Sequence: Synthetic oligonucleotide
ggaggugcggggccugcuc

SEQ ID NO: 137883 - RNA, 19 nt, Artificial Sequence
  Description of Artificial Sequence: Synthetic oligonucleotide
cccgccggcaccauggcca

SEQ ID NO: 137884 - RNA, 19 nt, Artificial Sequence
  Description of Artificial Sequence: Synthetic oligonucleotide
aagaccguggccuauuucu

SEQ ID NO: 137885 - RNA, 19 nt, Artificial Sequence
  Description of Artificial Sequence: Synthetic oligonucleotide
uacgaccccgacgugggca

SEQ ID NO: 137886 - RNA, 19 nt, Artificial Sequence
  Description of Artificial Sequence: Synthetic oligonucleotide
aacuuccacuacggagcug

SEQ ID NO: 137887 - RNA, 19 nt, Artificial Sequence
  Description of Artificial Sequence: Synthetic oligonucleotide
ggacacccuaugaagcccc

SEQ ID NO: 137888 - RNA, 19 nt, Artificial Sequence
  Description of Artificial Sequence: Synthetic oligonucleotide
caucgccuggcauugaccc

SEQ ID NO: 137889 - RNA, 19 nt, Artificial Sequence
  Description of Artificial Sequence: Synthetic oligonucleotide
cauagccugguccugcauu

SEQ ID NO: 137890 - RNA, 19 nt, Artificial Sequence
  Description of Artificial Sequence: Synthetic oligonucleotide
uacggucucuauaagaaga

SEQ ID NO: 137891 - RNA, 19 nt, Artificial Sequence
  Description of Artificial Sequence: Synthetic oligonucleotide
augaucgucuucaagccau

SEQ ID NO: 137892 - RNA, 19 nt, Artificial Sequence
  Description of Artificial Sequence: Synthetic oligonucleotide
uaccaggccucccaacaug

SEQ ID NO: 137893 - RNA, 19 nt, Artificial Sequence
  Description of Artificial Sequence: Synthetic oligonucleotide
gacaugugccgcuuccacu

SEQ ID NO: 137894 - RNA, 19 nt, Artificial Sequence
  Description of Artificial Sequence: Synthetic oligonucleotide
uccgaggacuacauugacu

SEQ ID NO: 137895 - RNA, 19 nt, Artificial Sequence
  Description of Artificial Sequence: Synthetic oligonucleotide
uuccugcagagagucagcc

SEQ ID NO: 137896 - RNA, 19 nt, Artificial Sequence
  Description of Artificial Sequence: Synthetic oligonucleotide
cccaccaauaugcaaggcu

SEQ ID NO: 137897 - RNA, 19 nt, Artificial Sequence
  Description of Artificial Sequence: Synthetic oligonucleotide
uucaccaagagucuuaaug

SEQ ID NO: 137898 - RNA, 19 nt, Artificial Sequence
  Description of Artificial Sequence: Synthetic oligonucleotide
gccuucaacguaggcgaug

SEQ ID NO: 137899 - RNA, 19 nt, Artificial Sequence
  Description of Artificial Sequence: Synthetic oligonucleotide
gacugcccaguguuucccg

SEQ ID NO: 137900 - RNA, 19 nt, Artificial Sequence
  Description of Artificial Sequence: Synthetic oligonucleotide
gggcucuuugaguucugcu

SEQ ID NO: 137901 - RNA, 19 nt, Artificial Sequence
  Description of Artificial Sequence: Synthetic oligonucleotide
ucgcguuacacaggcgcau

SEQ ID NO: 137902 - RNA, 19 nt, Artificial Sequence
  Description of Artificial Sequence: Synthetic oligonucleotide
ucucugcaaggagcaaccc

SEQ ID NO: 137903 - RNA, 19 nt, Artificial Sequence
  Description of Artificial Sequence: Synthetic oligonucleotide
cagcugaacaacaagaucu

SEQ ID NO: 137904 - RNA, 19 nt, Artificial Sequence
  Description of Artificial Sequence: Synthetic oligonucleotide
ugugauauugccauuaacu

SEQ ID NO: 137905 - RNA, 19 nt, Artificial Sequence
  Description of Artificial Sequence: Synthetic oligonucleotide
ugggcugguggucugcacc

SEQ ID NO: 137906 - RNA, 19 nt, Artificial Sequence
  Description of Artificial Sequence: Synthetic oligonucleotide
caugccaagaaguuugagg

SEQ ID NO: 137907 - RNA, 19 nt, Artificial Sequence
  Description of Artificial Sequence: Synthetic oligonucleotide
gccucuggcuucugcuaug

SEQ ID NO: 137908 - RNA, 19 nt, Artificial Sequence
  Description of Artificial Sequence: Synthetic oligonucleotide
gucaacgacauugugauug

SEQ ID NO: 137909 - RNA, 19 nt, Artificial Sequence
  Description of Artificial Sequence: Synthetic oligonucleotide
ggcauccuggagcugcuca

SEQ ID NO: 137910 - RNA, 19 nt, Artificial Sequence
  Description of Artificial Sequence: Synthetic oligonucleotide
aaguaccacccucgggugc

SEQ ID NO: 137911 - RNA, 19 nt, Artificial Sequence
  Description of Artificial Sequence: Synthetic oligonucleotide
cucuacauugacauugaca

SEQ ID NO: 137912 - RNA, 19 nt, Artificial Sequence
  Description of Artificial Sequence: Synthetic oligonucleotide
auccaccauggugacgggg

SEQ ID NO: 137913 - RNA, 19 nt, Artificial Sequence
  Description of Artificial Sequence: Synthetic oligonucleotide
guucaagaagcuuucuacc

SEQ ID NO: 137914 - RNA, 19 nt, Artificial Sequence
  Description of Artificial Sequence: Synthetic oligonucleotide
cucacugaccgggucauga

SEQ ID NO: 137915 - RNA, 19 nt, Artificial Sequence
  Description of Artificial Sequence: Synthetic oligonucleotide
acgguguccuuccacaaau

SEQ ID NO: 137916 - RNA, 19 nt, Artificial Sequence
  Description of Artificial Sequence: Synthetic oligonucleotide
uacggaaauuacuucuucc

SEQ ID NO: 137917 - RNA, 19 nt, Artificial Sequence
  Description of Artificial Sequence: Synthetic oligonucleotide
ccuggcacaggugacaugu

SEQ ID NO: 137918 - RNA, 19 nt, Artificial Sequence
  Description of Artificial Sequence: Synthetic oligonucleotide
uaugaagucggggcagaga

SEQ ID NO: 137919 - RNA, 19 nt, Artificial Sequence
  Description of Artificial Sequence: Synthetic oligonucleotide
aguggccgcuacuacuguc

SEQ ID NO: 137920 - RNA, 19 nt, Artificial Sequence
  Description of Artificial Sequence: Synthetic oligonucleotide
cugaacgugccccugcggg

SEQ ID NO: 137921 - RNA, 19 nt, Artificial Sequence
  Description of Artificial Sequence: Synthetic oligonucleotide
gauggcauugaugaccaga

SEQ ID NO: 137922 - RNA, 19 nt, Artificial Sequence
  Description of Artificial Sequence: Synthetic oligonucleotide
aguuacaagcaccuuuucc

SEQ ID NO: 137923 - RNA, 19 nt, Artificial Sequence
  Description of Artificial Sequence: Synthetic oligonucleotide
cagccgguuaucaaccagg

SEQ ID NO: 137924 - RNA, 19 nt, Artificial Sequence
  Description of Artificial Sequence: Synthetic oligonucleotide
guaguggacuucuaccaac

SEQ ID NO: 137925 - RNA, 19 nt, Artificial Sequence
  Description of Artificial Sequence: Synthetic oligonucleotide
cccacgugcauugugcucc

SEQ ID NO: 137926 - RNA, 19 nt, Artificial Sequence
  Description of Artificial Sequence: Synthetic oligonucleotide
caguguggagcugacucuc

SEQ ID NO: 137927 - RNA, 19 nt, Artificial Sequence
  Description of Artificial Sequence: Synthetic oligonucleotide
cugggcugugaucgauugg

SEQ ID NO: 137928 - RNA, 19 nt, Artificial Sequence
  Description of Artificial Sequence: Synthetic oligonucleotide
ggcugcuuuaaccucagca

SEQ ID NO: 137929 - RNA, 19 nt, Artificial Sequence
  Description of Artificial Sequence: Synthetic oligonucleotide
auccgagggcauggggaau

SEQ ID NO: 137930 - RNA, 19 nt, Artificial Sequence
  Description of Artificial Sequence: Synthetic oligonucleotide
ugcguugaauaugucaaga

SEQ ID NO: 137931 - RNA, 19 nt, Artificial Sequence
  Description of Artificial Sequence: Synthetic oligonucleotide
agcuucaauaucccucuac

SEQ ID NO: 137932 - RNA, 19 nt, Artificial Sequence
  Description of Artificial Sequence: Synthetic oligonucleotide
cucgugcugggugguggug

SEQ ID NO: 137933 - RNA, 19 nt, Artificial Sequence
  Description of Artificial Sequence: Synthetic oligonucleotide
gguuauacuguccgaaaug

SEQ ID NO: 137934 - RNA, 19 nt, Artificial Sequence
  Description of Artificial Sequence: Synthetic oligonucleotide
guugcccgcugcuggacau

SEQ ID NO: 137935 - RNA, 19 nt, Artificial Sequence
  Description of Artificial Sequence: Synthetic oligonucleotide
uaugagacaucgcugcugg

SEQ ID NO: 137936 - RNA, 19 nt, Artificial Sequence
  Description of Artificial Sequence: Synthetic oligonucleotide
guagaagaggccauuagug

SEQ ID NO: 137937 - RNA, 19 nt, Artificial Sequence
  Description of Artificial Sequence: Synthetic oligonucleotide
gaggagcuucccuauagug

SEQ ID NO: 137938 - RNA, 19 nt, Artificial Sequence
  Description of Artificial Sequence: Synthetic oligonucleotide
gaauacuucgaguacuuug

SEQ ID NO: 137939 - RNA, 19 nt, Artificial Sequence
  Description of Artificial Sequence: Synthetic oligonucleotide
gccccagacuucacacuuc

SEQ ID NO: 137940 - RNA, 19 nt, Artificial Sequence
  Description of Artificial Sequence: Synthetic oligonucleotide
cauccagaugucagcaccc

SEQ ID NO: 137941 - RNA, 19 nt, Artificial Sequence
  Description of Artificial Sequence: Synthetic oligonucleotide
cgcaucgagaaucagaacu

SEQ ID NO: 137942 - RNA, 19 nt, Artificial Sequence
  Description of Artificial Sequence: Synthetic oligonucleotide
ucacgccaguaucuggacc

SEQ ID NO: 137943 - RNA, 19 nt, Artificial Sequence
  Description of Artificial Sequence: Synthetic oligonucleotide
cagauccgccagacaaucu

SEQ ID NO: 137944 - RNA, 19 nt, Artificial Sequence
  Description of Artificial Sequence: Synthetic oligonucleotide
uuugaaaaccugaagaugc

SEQ ID NO: 137945 - RNA, 19 nt, Artificial Sequence
  Description of Artificial Sequence: Synthetic oligonucleotide
cugaaccaugcaccuagug

SEQ ID NO: 137946 - RNA, 19 nt, Artificial Sequence
  Description of Artificial Sequence: Synthetic oligonucleotide
guccagauucaugacgugc

SEQ ID NO: 137947 - RNA, 19 nt, Artificial Sequence
  Description of Artificial Sequence: Synthetic oligonucleotide
ccugcagaccuccugaccu

SEQ ID NO: 137948 - RNA, 19 nt, Artificial Sequence
  Description of Artificial Sequence: Synthetic oligonucleotide
uaugacaggacugaugagg

SEQ ID NO: 137949 - RNA, 19 nt, Artificial Sequence
  Description of Artificial Sequence: Synthetic oligonucleotide
gcugaugcagaggagaggg

SEQ ID NO: 137950 - RNA, 19 nt, Artificial Sequence
  Description of Artificial Sequence: Synthetic oligonucleotide
gguccugaggagaacuaua

SEQ ID NO: 137951 - RNA, 19 nt, Artificial Sequence
  Description of Artificial Sequence: Synthetic oligonucleotide
agcaggccagaggcaccca

SEQ ID NO: 137952 - RNA, 19 nt, Artificial Sequence
  Description of Artificial Sequence: Synthetic oligonucleotide
aaugaguucuaugauggag

SEQ ID NO: 137953 - RNA, 19 nt, Artificial Sequence
  Description of Artificial Sequence: Synthetic oligonucleotide
gaccaugacaaugacaagg

SEQ ID NO: 137954 - RNA, 19 nt, Artificial Sequence
  Description of Artificial Sequence: Synthetic oligonucleotide
gaaagcgauguggagauuu

SEQ ID NO: 137955 - RNA, 19 nt, Artificial Sequence
  Description of Artificial Sequence: Synthetic oligonucleotide
uaagaguggcuugggaugc

SEQ ID NO: 137956 - RNA, 19 nt, Artificial Sequence
  Description of Artificial Sequence: Synthetic oligonucleotide
cugugucccaaggaauuuc

SEQ ID NO: 137957 - RNA, 19 nt, Artificial Sequence
  Description of Artificial Sequence: Synthetic oligonucleotide
cuuuucaccucuugguugg

SEQ ID NO: 137958 - RNA, 19 nt, Artificial Sequence
  Description of Artificial Sequence: Synthetic oligonucleotide
ggcuggagggaaaaggagu

SEQ ID NO: 137959 - RNA, 19 nt, Artificial Sequence
  Description of Artificial Sequence: Synthetic oligonucleotide
uggcuccuagaguccuggg

SEQ ID NO: 137960 - RNA, 19 nt, Artificial Sequence
  Description of Artificial Sequence: Synthetic oligonucleotide
gggucaccccagggcuuuu

SEQ ID NO: 137961 - RNA, 19 nt, Artificial Sequence
  Description of Artificial Sequence: Synthetic oligonucleotide
ugcugacucugggaaagag

SEQ ID NO: 137962 - RNA, 19 nt, Artificial Sequence
  Description of Artificial Sequence: Synthetic oligonucleotide
gucuggagaccacauuugg

SEQ ID NO: 137963 - RNA, 19 nt, Artificial Sequence
  Description of Artificial Sequence: Synthetic oligonucleotide
guucucgaaccaucuaccu

SEQ ID NO: 137964 - RNA, 19 nt, Artificial Sequence
  Description of Artificial Sequence: Synthetic oligonucleotide
ugcuuuuccucucucuccc

SEQ ID NO: 137965 - RNA, 19 nt, Artificial Sequence
  Description of Artificial Sequence: Synthetic oligonucleotide
caaggccugacaaugguac

SEQ ID NO: 137966 - RNA, 19 nt, Artificial Sequence
  Description of Artificial Sequence: Synthetic oligonucleotide
ccuauuagggaugagauac

SEQ ID NO: 137967 - RNA, 19 nt, Artificial Sequence
  Description of Artificial Sequence: Synthetic oligonucleotide
cagacaaggauagcuaucu

SEQ ID NO: 137968 - RNA, 19 nt, Artificial Sequence
  Description of Artificial Sequence: Synthetic oligonucleotide
ugggacauuauuggcagug

SEQ ID NO: 137969 - RNA, 19 nt, Artificial Sequence
  Description of Artificial Sequence: Synthetic oligonucleotide
gggcccuggaggccagucc

SEQ ID NO: 137970 - RNA, 19 nt, Artificial Sequence
  Description of Artificial Sequence: Synthetic oligonucleotide
ccuagccccccuugccccu

SEQ ID NO: 137971 - RNA, 19 nt, Artificial Sequence
  Description of Artificial Sequence: Synthetic oligonucleotide
uuauuucuucccugcuucc

SEQ ID NO: 137972 - RNA, 19 nt, Artificial Sequence
  Description of Artificial Sequence: Synthetic oligonucleotide
ccucgaacccagagauuuu

SEQ ID NO: 137973 - RNA, 19 nt, Artificial Sequence
  Description of Artificial Sequence: Synthetic oligonucleotide
uugagggaugaacggguag

SEQ ID NO: 137974 - RNA, 19 nt, Artificial Sequence
  Description of Artificial Sequence: Synthetic oligonucleotide
gacaaggacugagauugcc

SEQ ID NO: 137975 - RNA, 19 nt, Artificial Sequence
  Description of Artificial Sequence: Synthetic oligonucleotide
cucugacuuccuccucccc

SEQ ID NO: 137976 - RNA, 19 nt, Artificial Sequence
  Description of Artificial Sequence: Synthetic oligonucleotide
cuggguucugacuucuucc

SEQ ID NO: 137977 - RNA, 19 nt, Artificial Sequence
  Description of Artificial Sequence: Synthetic oligonucleotide
cuccccuugcuuccaggga

SEQ ID NO: 137978 - RNA, 19 nt, Artificial Sequence
  Description of Artificial Sequence: Synthetic oligonucleotide
aagaugaagagagagagau

SEQ ID NO: 137979 - RNA, 19 nt, Artificial Sequence
  Description of Artificial Sequence: Synthetic oligonucleotide
uuuggaaggggcucuggcu

SEQ ID NO: 137980 - RNA, 19 nt, Artificial Sequence
  Description of Artificial Sequence: Synthetic oligonucleotide
ucccuaacaccugaauccc

SEQ ID NO: 137981 - RNA, 19 nt, Artificial Sequence
  Description of Artificial Sequence: Synthetic oligonucleotide
cagaugaugggaaguaugu

SEQ ID NO: 137982 - RNA, 19 nt, Artificial Sequence
  Description of Artificial Sequence: Synthetic oligonucleotide
uuuucaaguguggggagga

SEQ ID NO: 137983 - RNA, 19 nt, Artificial Sequence
  Description of Artificial Sequence: Synthetic oligonucleotide
auaugaaaauguucuguuc

SEQ ID NO: 137984 - RNA, 19 nt, Artificial Sequence
  Description of Artificial Sequence: Synthetic oligonucleotide
cucacuuuuggcuuuaugu

SEQ ID NO: 137985 - RNA, 19 nt, Artificial Sequence
  Description of Artificial Sequence: Synthetic oligonucleotide
uccauuuuaccacuguuuu

SEQ ID NO: 137986 - RNA, 19 nt, Artificial Sequence
  Description of Artificial Sequence: Synthetic oligonucleotide
uuauccaauaaacuaaguc

SEQ ID NO: 137987 - RNA, 19 nt, Artificial Sequence
  Description of Artificial Sequence: Synthetic oligonucleotide
cgguauuuuuuguaccuuu

SEQ ID NO: 137988 - RNA, 25 nt, Artificial Sequence
  Description of Artificial Sequence: Synthetic oligonucleotide
gggaggggcuggcggcggccgcggg

SEQ ID NO: 137989 - RNA, 25 nt, Artificial Sequence
  Description of Artificial Sequence: Synthetic oligonucleotide
gcggcgggcggcggaggugcggggc

SEQ ID NO: 137990 - RNA, 25 nt, Artificial Sequence
  Description of Artificial Sequence: Synthetic oligonucleotide
ccugcucccgccggcaccauggcca

SEQ ID NO: 137991 - RNA, 25 nt, Artificial Sequence
  Description of Artificial Sequence: Synthetic oligonucleotide
aagaccguggccuauuucuacgacc

SEQ ID NO: 137992 - RNA, 25 nt, Artificial Sequence
  Description of Artificial Sequence: Synthetic oligonucleotide
cccgacgugggcaacuuccacuacg

SEQ ID NO: 137993 - RNA, 25 nt, Artificial Sequence
  Description of Artificial Sequence: Synthetic oligonucleotide
ggagcuggacacccuaugaagcccc

SEQ ID NO: 137994 - RNA, 25 nt, Artificial Sequence
  Description of Artificial Sequence: Synthetic oligonucleotide
caucgccuggcauugacccauagcc

SEQ ID NO: 137995 - RNA, 25 nt, Artificial Sequence
  Description of Artificial Sequence: Synthetic oligonucleotide
cugguccugcauuacggucucuaua

SEQ ID NO: 137996 - RNA, 25 nt, Artificial Sequence
  Description of Artificial Sequence: Synthetic oligonucleotide
aagaagaugaucgucuucaagccau

SEQ ID NO: 137997 - RNA, 25 nt, Artificial Sequence
  Description of Artificial Sequence: Synthetic oligonucleotide
uaccaggccucccaacaugacaugu

SEQ ID NO: 137998 - RNA, 25 nt, Artificial Sequence
  Description of Artificial Sequence: Synthetic oligonucleotide
ugccgcuuccacuccgaggacuaca

SEQ ID NO: 137999 - RNA, 25 nt, Artificial Sequence
  Description of Artificial Sequence: Synthetic oligonucleotide
auugacuuccugcagagagucagcc

SEQ ID NO: 138000 - RNA, 25 nt, Artificial Sequence
  Description of Artificial Sequence: Synthetic oligonucleotide
cccaccaauaugcaaggcuucacca

SEQ ID NO: 138001 - RNA, 25 nt, Artificial Sequence
  Description of Artificial Sequence: Synthetic oligonucleotide
aagagucuuaaugccuucaacguag

SEQ ID NO: 138002 - RNA, 25 nt, Artificial Sequence
  Description of Artificial Sequence: Synthetic oligonucleotide
ggcgaugacugcccaguguuucccg

SEQ ID NO: 138003 - RNA, 25 nt, Artificial Sequence
  Description of Artificial Sequence: Synthetic oligonucleotide
gggcucuuugaguucugcucgcguu

SEQ ID NO: 138004 - RNA, 25 nt, Artificial Sequence
  Description of Artificial Sequence: Synthetic oligonucleotide
uacacaggcgcaucucugcaaggag

SEQ ID NO: 138005 - RNA, 25 nt, Artificial Sequence
  Description of Artificial Sequence: Synthetic oligonucleotide
gcaacccagcugaacaacaagaucu

SEQ ID NO: 138006 - RNA, 25 nt, Artificial Sequence
  Description of Artificial Sequence: Synthetic oligonucleotide
ugugauauugccauuaacugggcug

SEQ ID NO: 138007 - RNA, 25 nt, Artificial Sequence
  Description of Artificial Sequence: Synthetic oligonucleotide
gguggucugcaccaugccaagaagu

SEQ ID NO: 138008 - RNA, 25 nt, Artificial Sequence
  Description of Artificial Sequence: Synthetic oligonucleotide
uuugaggccucuggcuucugcuaug

SEQ ID NO: 138009 - RNA, 25 nt, Artificial Sequence
  Description of Artificial Sequence: Synthetic oligonucleotide
gucaacgacauugugauuggcaucc

SEQ ID NO: 138010 - RNA, 25 nt, Artificial Sequence
  Description of Artificial Sequence: Synthetic oligonucleotide
cuggagcugcucaaguaccacccuc

SEQ ID NO: 138011 - RNA, 25 nt, Artificial Sequence
  Description of Artificial Sequence: Synthetic oligonucleotide
cgggugcucuacauugacauugaca

SEQ ID NO: 138012 - RNA, 25 nt, Artificial Sequence
  Description of Artificial Sequence: Synthetic oligonucleotide
auccaccauggugacgggguucaag

SEQ ID NO: 138013 - RNA, 25 nt, Artificial Sequence
  Description of Artificial Sequence: Synthetic oligonucleotide
gaagcuuucuaccucacugaccggg

SEQ ID NO: 138014 - RNA, 25 nt, Artificial Sequence
  Description of Artificial Sequence: Synthetic oligonucleotide
gucaugacgguguccuuccacaaau

SEQ ID NO: 138015 - RNA, 25 nt, Artificial Sequence
  Description of Artificial Sequence: Synthetic oligonucleotide
uacggaaauuacuucuucccuggca

SEQ ID NO: 138016 - RNA, 25 nt, Artificial Sequence
  Description of Artificial Sequence: Synthetic oligonucleotide
acaggugacauguaugaagucgggg

SEQ ID NO: 138017 - RNA, 25 nt, Artificial Sequence
  Description of Artificial Sequence: Synthetic oligonucleotide
gcagagaguggccgcuacuacuguc

SEQ ID NO: 138018 - RNA, 25 nt, Artificial Sequence
  Description of Artificial Sequence: Synthetic oligonucleotide
cugaacgugccccugcgggauggca

SEQ ID NO: 138019 - RNA, 25 nt, Artificial Sequence
  Description of Artificial Sequence: Synthetic oligonucleotide
auugaugaccagaguuacaagcacc

SEQ ID NO: 138020 - RNA, 25 nt, Artificial Sequence
  Description of Artificial Sequence: Synthetic oligonucleotide
cuuuuccagccgguuaucaaccagg

SEQ ID NO: 138021 - RNA, 25 nt, Artificial Sequence
  Description of Artificial Sequence: Synthetic oligonucleotide
guaguggacuucuaccaacccacgu

SEQ ID NO: 138022 - RNA, 25 nt, Artificial Sequence
  Description of Artificial Sequence: Synthetic oligonucleotide
ugcauugugcuccaguguggagcug

SEQ ID NO: 138023 - RNA, 25 nt, Artificial Sequence
  Description of Artificial Sequence: Synthetic oligonucleotide
gacucucugggcugugaucgauugg

SEQ ID NO: 138024 - RNA, 25 nt, Artificial Sequence
  Description of Artificial Sequence: Synthetic oligonucleotide
ggcugcuuuaaccucagcauccgag

SEQ ID NO: 138025 - RNA, 25 nt, Artificial Sequence
  Description of Artificial Sequence: Synthetic oligonucleotide
gggcauggggaaugcguugaauaug

SEQ ID NO: 138026 - RNA, 25 nt, Artificial Sequence
  Description of Artificial Sequence: Synthetic oligonucleotide
gucaagagcuucaauaucccucuac

SEQ ID NO: 138027 - RNA, 25 nt, Artificial Sequence
  Description of Artificial Sequence: Synthetic oligonucleotide
cucgugcugggugguggugguuaua

SEQ ID NO: 138028 - RNA, 25 nt, Artificial Sequence
  Description of Artificial Sequence: Synthetic oligonucleotide
acuguccgaaauguugcccgcugcu

SEQ ID NO: 138029 - RNA, 25 nt, Artificial Sequence
  Description of Artificial Sequence: Synthetic oligonucleotide
uggacauaugagacaucgcugcugg

SEQ ID NO: 138030 - RNA, 25 nt, Artificial Sequence
  Description of Artificial Sequence: Synthetic oligonucleotide
guagaagaggccauuagugaggagc

SEQ ID NO: 138031 - RNA, 25 nt, Artificial Sequence
  Description of Artificial Sequence: Synthetic oligonucleotide
cuucccuauagugaauacuucgagu

SEQ ID NO: 138032 - RNA, 25 nt, Artificial Sequence
  Description of Artificial Sequence: Synthetic oligonucleotide
uacuuugccccagacuucacacuuc

SEQ ID NO: 138033 - RNA, 25 nt, Artificial Sequence
  Description of Artificial Sequence: Synthetic oligonucleotide
cauccagaugucagcacccgcaucg

SEQ ID NO: 138034 - RNA, 25 nt, Artificial Sequence
  Description of Artificial Sequence: Synthetic oligonucleotide
gagaaucagaacucacgccaguauc

SEQ ID NO: 138035 - RNA, 25 nt, Artificial Sequence
  Description of Artificial Sequence: Synthetic oligonucleotide
cuggaccagauccgccagacaaucu

SEQ ID NO: 138036 - RNA, 25 nt, Artificial Sequence
  Description of Artificial Sequence: Synthetic oligonucleotide
uuugaaaaccugaagaugcugaacc

SEQ ID NO: 138037 - RNA, 25 nt, Artificial Sequence
  Description of Artificial Sequence: Synthetic oligonucleotide
caugcaccuaguguccagauucaug

SEQ ID NO: 138038 - RNA, 25 nt, Artificial Sequence
  Description of Artificial Sequence: Synthetic oligonucleotide
gacgugccugcagaccuccugaccu

SEQ ID NO: 138039 - RNA, 25 nt, Artificial Sequence
  Description of Artificial Sequence: Synthetic oligonucleotide
uaugacaggacugaugaggcugaug

SEQ ID NO: 138040 - RNA, 25 nt, Artificial Sequence
  Description of Artificial Sequence: Synthetic oligonucleotide
gcagaggagagggguccugaggaga

SEQ ID NO: 138041 - RNA, 25 nt, Artificial Sequence
  Description of Artificial Sequence: Synthetic oligonucleotide
aacuauagcaggccagaggcaccca

SEQ ID NO: 138042 - RNA, 25 nt, Artificial Sequence
  Description of Artificial Sequence: Synthetic oligonucleotide
aaugaguucuaugauggagaccaug

SEQ ID NO: 138043 - RNA, 25 nt, Artificial Sequence
  Description of Artificial Sequence: Synthetic oligonucleotide
gacaaugacaaggaaagcgaugugg

SEQ ID NO: 138044 - RNA, 25 nt, Artificial Sequence
  Description of Artificial Sequence: Synthetic oligonucleotide
gagauuuaagaguggcuugggaugc

SEQ ID NO: 138045 - RNA, 25 nt, Artificial Sequence
  Description of Artificial Sequence: Synthetic oligonucleotide
cugugucccaaggaauuucuuuuca

SEQ ID NO: 138046 - RNA, 25 nt, Artificial Sequence
  Description of Artificial Sequence: Synthetic oligonucleotide
accucuugguugggcuggagggaaa

SEQ ID NO: 138047 - RNA, 25 nt, Artificial Sequence
  Description of Artificial Sequence: Synthetic oligonucleotide
aaggaguggcuccuagaguccuggg

SEQ ID NO: 138048 - RNA, 25 nt, Artificial Sequence
  Description of Artificial Sequence: Synthetic oligonucleotide
gggucaccccagggcuuuugcugac

SEQ ID NO: 138049 - RNA, 25 nt, Artificial Sequence
  Description of Artificial Sequence: Synthetic oligonucleotide
cucugggaaagagucuggagaccac

SEQ ID NO: 138050 - RNA, 25 nt, Artificial Sequence
  Description of Artificial Sequence: Synthetic oligonucleotide
cauuugguucucgaaccaucuaccu

SEQ ID NO: 138051 - RNA, 25 nt, Artificial Sequence
  Description of Artificial Sequence: Synthetic oligonucleotide
ugcuuuuccucucucucccaaggcc

SEQ ID NO: 138052 - RNA, 25 nt, Artificial Sequence
  Description of Artificial Sequence: Synthetic oligonucleotide
cugacaaugguaccuauuagggaug

SEQ ID NO: 138053 - RNA, 25 nt, Artificial Sequence
  Description of Artificial Sequence: Synthetic oligonucleotide
gagauacagacaaggauagcuaucu

SEQ ID NO: 138054 - RNA, 25 nt, Artificial Sequence
  Description of Artificial Sequence: Synthetic oligonucleotide
ugggacauuauuggcagugggcccu

SEQ ID NO: 138055 - RNA, 25 nt, Artificial Sequence
  Description of Artificial Sequence: Synthetic oligonucleotide
uggaggccagucccuagccccccuu

SEQ ID NO: 138056 - RNA, 25 nt, Artificial Sequence
  Description of Artificial Sequence: Synthetic oligonucleotide
ugccccuuauuucuucccugcuucc

SEQ ID NO: 138057 - RNA, 25 nt, Artificial Sequence
  Description of Artificial Sequence: Synthetic oligonucleotide
ccucgaacccagagauuuuugaggg

SEQ ID NO: 138058 - RNA, 25 nt, Artificial Sequence
  Description of Artificial Sequence: Synthetic oligonucleotide
gaugaacggguagacaaggacugag

SEQ ID NO: 138059 - RNA, 25 nt, Artificial Sequence
  Description of Artificial Sequence: Synthetic oligonucleotide
gauugccucugacuuccuccucccc

SEQ ID NO: 138060 - RNA, 25 nt, Artificial Sequence
  Description of Artificial Sequence: Synthetic oligonucleotide
cuggguucugacuucuuccuccccu

SEQ ID NO: 138061 - RNA, 25 nt, Artificial Sequence
  Description of Artificial Sequence: Synthetic oligonucleotide
uugcuuccagggaagaugaagagag

SEQ ID NO: 138062 - RNA, 25 nt, Artificial Sequence
  Description of Artificial Sequence: Synthetic oligonucleotide
gagagauuuggaaggggcucuggcu

SEQ ID NO: 138063 - RNA, 25 nt, Artificial Sequence
  Description of Artificial Sequence: Synthetic oligonucleotide
ucccuaacaccugaaucccagauga

SEQ ID NO: 138064 - RNA, 25 nt, Artificial Sequence
  Description of Artificial Sequence: Synthetic oligonucleotide
augggaaguauguuuucaagugugg

SEQ ID NO: 138065 - RNA, 25 nt, Artificial Sequence
  Description of Artificial Sequence: Synthetic oligonucleotide
gggaggauaugaaaauguucuguuc

SEQ ID NO: 138066 - RNA, 25 nt, Artificial Sequence
  Description of Artificial Sequence: Synthetic oligonucleotide
cucacuuuuggcuuuauguccauuu

SEQ ID NO: 138067 - RNA, 25 nt, Artificial Sequence
  Description of Artificial Sequence: Synthetic oligonucleotide
uuaccacuguuuuuauccaauaaac

SEQ ID NO: 138068 - RNA, 25 nt, Artificial Sequence
  Description of Artificial Sequence: Synthetic oligonucleotide
cuaagucgguauuuuuuguaccuuu

SEQ ID NO: 138069 - RNA, 8980 nt, Homo sapiens
ggagguuguggggccgccgccgcggagcaccguccccgccgccgcccgagcccgagcccgagcccgcgcacccgcccgcgccgccgccgccgccgcccgaacagccucccagccugggcccccggcggcgccguggccgcgucccggcugucgccgcccgagcccgagcccgcgcgccggcggguggcggcgcaggcugaggagaugcggcgcggagcgccggagcagggcuagagccggccgccgccgcccgccgcgguaagcgcagccccggcccggcgcccgcgggccauuguccgccgcccgccccgcgccccgcgcagccugcaggccuuggagcccgcggcagguggacgccgccgguccacacccgccccgcgcgcggccgugggaggcgggggccagcgcuggccgcgcgccgugggacccgccgguccccagggccgcccggccccuucuggaccuuuccacccgcgccgcgaggcggcuucgcccgccggggcgggggcgcgggggugggcacggcaggcagcggcgccgucucccggugcggggcccgcgccccccgagcagguucaucugcagaagccagcggacgccucuguucaacuuguggguuaccuggcucaugagaccuugccggcgaggcucggcgcuugaacgucugugacccagcccucaccgucccgguacuuguauguguuggugggaguuuggagcucguuggagcuaucguuuccguggaaauuuugagccauuucgaaucacuuaaaggaguggacauugcuagcaaugagcucccaaagccauccagauggacuuucuggccgagaccagccaguggagcugcugaauccugcccgcgugaaccacaugcccagcacgguggauguggccacggcgcugccucugcaaguggcccccucggcagugcccauggaccugcgccuggaccaccaguucucacugccuguggcagagccggcccugcgggagcagcagcugcagcaggagcuccuggcgcucaagcagaagcagcagauccagaggcagauccucaucgcugaguuccagaggcagcacgagcagcucucccggcagcacgaggcgcagcuccacgagcacaucaagcaacaacaggagaugcuggccaugaagcaccagcaggagcugcuggaacaccagcggaagcuggagaggcaccgccaggagcaggagcuggagaagcagcaccgggagcagaagcugcagcagcucaagaacaaggagaagggcaaagagagugccguggccagcacagaagugaagaugaaguuacaagaauuuguccucaauaaaaagaaggcgcuggcccaccggaaucugaaccacugcauuuccagcgacccucgcuacugguacgggaaaacgcagcacaguucccuugaccagaguucuccaccccagagcggagugucgaccuccuauaaccacccgguccugggaauguacgacgccaaagaugacuucccucuuaggaaaacagcuucugaaccgaaucugaaauuacgguccaggcuaaagcagaaaguggccgaaagacggagcagcccccuguuacgcaggaaagacgggccaguggucacugcucuaaaaaagcguccguuggaugucacagacuccgcgugcagcagcgccccaggcuccggacccagcucacccaacaacagcuccgggagcgucagcgcggagaacgguaucgcgcccgccguccccagcaucccggcggagacgaguuuggcgcacagacuuguggcacgagaaggcucggccgcuccacuuccccucuacacaucgccauccuugcccaacaucacgcugggccugccugccaccggccccucugcgggcacggcgggccagcaggacgccgagagacucacccuucccgcccuccagcagaggcucucccuuuuccccggcacccaccucacucccuaccugagcaccucgcccuuggagcgggacggaggggcagcgcacagcccucuucugcagcacauggucuuacuggagcagccgccggcacaagcaccccucgucacaggccugggagcacugccccuccacgcacaguccuugguuggugcagaccgggugucccccuccauccacaagcugcggcagcaccgcccacuggggcggacccagucggccccgcugccccagaacgcccaggcucugcagcaccuggucauccagcagcagcaucagcaguuucuggagaaacacaagcagcaguuccagcagcagcaacugcagaugaacaagaucauccccaagccaagcgagccagcccggcagccggagagccacccggaggagacggaggaggagcuccgugagcaccaggcucugcuggacgagcccuaccuggaccggcugccggggcagaaggaggcgcacgcacaggccggcgugcaggugaagcaggagcccauugagagcgaugaggaagaggcagagcccccacgggagguggagccgggccagcgccagcccagugagcaggagcugcucuucagacagcaagcccuccugcuggagcagcagcggauccaccagcugaggaacuaccaggcguccauggaggccgccggcauccccguguccuucggcggccacaggccucugucccgggcgcaguccucacccgcgucugccaccuuccccgugucugugcaggagccccccaccaagccgagguucacgacaggccucguguaugacacgcugaugcugaagcaccagugcaccugcgggaguagcagcagccaccccgagcacgccgggaggauccagagcaucuggucccgccugcaggagacgggccuccggggcaaaugcgagugcauccgcggacgcaaggccacccuggaggagcuacagacggugcacucggaagcccacacccuccuguauggcacgaacccccucaaccggcagaaacuggacaguaagaaacuucuaggcucgcucgccuccguguucguccggcucccuugcggugguguugggguggacagugacaccauauggaacgaggugcacucggcgggggcagcccgccuggcugugggcugcgugguagagcuggucuucaagguggccacaggggagcugaagaauggcuuugcugugguccgccccccuggacaccaugcggaggagagcacgcccaugggcuuuugcuacuucaacuccguggccguggcagccaagcuucugcagcagagguugagcgugagcaagauccucaucguggacugggacgugcaccauggaaacgggacccagcaggcuuucuacagcgaccccagcguccuguacaugucccuccaccgcuacgacgaugggaacuucuucccaggcagcggggcuccugaugaggugggcacagggcccggcguggguuucaacgucaacauggcuuucaccggcggccuggacccccccaugggagacgcugaguacuuggcggccuucagaacgguggucaugccgaucgccagcgaguuugccccggauguggugcuggugucaucaggcuucgaugccguggagggccaccccaccccucuugggggcuacaaccucuccgccagaugcuucggguaccugacgaagcagcugaugggccuggcuggcggccggauuguccuggcccucgagggaggccacgaccugaccgccauuugcgacgccucggaagcauguguuucugccuugcugggaaacgagcuugauccucucccagaaaagguuuuacagcaaagacccaaugcaaacgcuguccguuccauggagaaagucauggagauccacagcaaguacuggcgcugccugcagcgcacaaccuccacagcggggcguucucugaucgaggcucagacuugcgagaacgaagaagccgagacggucaccgccauggccucgcuguccgugggcgugaagcccgccgaaaagagaccagaugaggagcccauggaagaggagccgccccuguagcacucccucgaagcugcuguucucuugucugucugucucugucuugaagcucagccaagaaacuuucccgugucacgccugcgucccaccguggggcucucuuggagcacccagggacacccagcgugcaacagccacgggaagccuuucugccgcccaggcccacaggucucgagacgcacaugcacgccugggcguggcagccucacagggaacacgggacagacgccggcgacgcgcagacacacggacacgcggaagccaagcacacucuggcgggucccgcaagggacgccguggaagaaaggagccuguggcaacaggcggccgagcugccgaauucaguugacacgaggcacagaaaacaaauaucaaagaucuaauaauacaaaacaaacuugauuaaaacuggugcuuaaaguuuauuacccacaacuccacagucucuguguaaaccacucgacucaucuuguagcuuauuuuuuuuuaaagaggacguuuucuacggcuguggcccgccucugugaaccauagcggugugcggcggggggucugcacccgggugggggacagagggaccuuuaaagaaaacaaaacuggacagaaacaggaaugugagcugggggagcuggcuugaguuucucaaaagccaucggaagaugcgaguuugugccuuuuuuuuuauugcucugguggauuuuuguggcuggguuuucugaagucugaggaacaaugccuuaagaaaaaacaaacagcaggaaucggugggacaguuuccuguggccagccgagccuggcagugcuggcaccgcgagcuggccugacgccucaagcacgggcaccagccgucaucuccggggccaggggcugcagcccggcggucccuguuuugcuuuauugcuguuuaagaaaaauggagguaguuccaaaaaaguggcaaaucccguuggagguuuugaaguccaacaaauuuuaaacgaauccaaaguguucucacacgucacauacgauugagcaucuccaucuggucgugaagcaugugguaggcacacuugcaguguuacgaucggaaugcuuuuuauuaaaagcaaguagcaugaaguauugcuuaaauuuuagguauaaauaaauauauauauguauaauauauauuccaauguauuccaagcuaagaaacuuacuugauucuuaugaaaucuugauaaaauauuuauaaugcauuuauagaaaaaguauauauauauauauaaaaugaaugcagauugcgaaggucccugcaaauggauggcuugugaauuugcucucaaggugcuuauggaaagggauccugauugauugaaauucauguuuucucaagcuccagauuggcuagauuucagaucgccaacacauucgccacugggcaacuacccuacaaguuuguacuuucauuuuaauuauuuucuaacagaaccgcucccgucuccaagccuucaugcacauauguaccuaaugaguuuuuauagcaaagaauauaaauuugcuguugauuuuuguaugaauuuuuucacaaaaagauccugaauaagcauuguuuuaugaauuuuacauuuuuccucaccauuuagcaauuuucugaaugguaauaaugucuaaaucuuuuuccuuucugaauucuugcuuguacauuuuuuuuuaccuuucaaagguuuuuaauuauuuuuguuuuuauuuuuguacgaugaguuuucugcagcguacagaauuguugcugucagauucuauuuucagaaagugagaggagggaccguaggucuuuucggagugacaccaacgauugugucuuuccuggucuguccuaggagcuguauaaagaagcccaggggcucuuuuuaacuuucaacacuaguaguauuacgaggggugguguguuuuuccccuccguggcaagggcagggaggguugcuuaggaugcccggccacccugggaggcuugccagaugccgggggcagucagcauuaaugaaacucauguuuaaacuucucugaccacaucgucaggauagaauucuaacuugaguuuuccaaagaccuuuugagcaugucagcaaugcauggggcacacguggggcucuuuacccacuuggguuuuuccacugcagccacguggccagcccuggauuuuggagccuguggcugcaaggaacccagggacccuuguugccuggugaaccugcagggaggguaugauugccugaccaggacagccagucuuuacucuuuuucucuucaacaguaacugacagucacguuuuacugguaacuuauuuuccagcacaugaagccaccaguuucauuccaaaguguauauuggguucagacuugggggcagaaguucagacacaccgugcucaggagggacccagagccgaguuucggaguuugguaaaguuuacaggguagcuucugaaauuaacucaaacuuuugaccaaaugagugcagauucuuggauucacuuggucacugggcugcugauggucagcucugagacagugguuugagagcaggcagaacggucuugggacuuguuugacuuuccccucccugguggccacucuuugcucugaagcccagauuggcaagaggagcugguccauuccccauucauggcacagagcaguggcagggcccagcuagcaggcucuucuggccuccuuggccucauucucugcauagcccucuggggauccugccaccugcccucuuaccccgccguggcuuauggggaggaaugcaucaucucacuuuuuuuuuuuaagcagaugaugggauaacauggacugcucaguggccagguuaucaguggggggacuuaauucuaaucucauucaaauggagacgcccucugcaaaggccuggcagggggaggcacguuucaucugucagcucacuccagcuucacaaaugugcugagagcauuacuguguagccuuuucuuugaagacacacucggcucuucuccacagcaagcguccagggcagauggcagaggaucugccucggcgucugcaggcgggaccacgucagggaggguuccuucauguguucucccuguggguccuuggaccuuuagccuuuuucuuccuuugcaaaggccuugggggcacuggcugggagucagcaagcgagcacuuuauaucccuuugagggaaacccugaugacgccacugggccucuuggcgucugcccugcccucgcggcuucccgccgugccgcagcgugcccacgugcccacgccccaccagcaggcggcugucccggaggccguggcccgcugggacuggccgccccuccccagcgucccagggcucugguucuggagggccacuuugucaagguguuucaguuuuucuuuacuucuuuugaaaaucuguuugcaaggggaaggaccauuucguaauggucugacacaaaagcaaguuugauuuuugcagcacuagcaauggacuuuguuguuuuucuuuuugaucagaacauuccuucuuuacuggucacagccacgugcucauuccauucuucuuuuuguagacuuugggcccacguguuuuaugggcauugauacauauauaaauauauagauauaaauauauaugaauauauuuuuuuaaguuuccuacaccuggagguugcauggacuguacgaccggcaugacuuuauauuguauacagauuuugcacgccaaacucggcagcuuuggggaagaagaaaaaugccuuucuguuccccucucaugacauuugcagauacaaaagauggaaauuuuucuguaaaacaaaaccuugaaggagaggagggcggggaaguuugcgucuuauugaacuuauucuuaagaaauuguacuuuuuauuguaagaaaaauaaaaaggacuacuuaaacauuugucauauuaagaaaaaaaguuuaucuagcacuugugacauaccaauaauagaguuuauuguauuuauguggaaacaguguuuuagggaaacuacucagaauucacagugaacugccugucucucucgaguugauuuggaggaauuuuguuuuguuuuguuuuguuuguuuccuuuuaucuccuuccacgggccaggcgagcgccgcccgcccucacuggccuugugacgguuuauucugauugagaacugggcggacucgaaagaguccccuuuuccgcacagcuguguugacuuuuuaauuacuuuuaggugauguauggcuaagauuucacuuuaagcagucgugaacugugcgagcacugugguuuacaauuauacuuugcaucgaaaggaaaccauuucuucauuguaacgaagcugagcguguucuuagcucggccucacuuugucucuggcauugauuaaaagucugcuauugaaagaaaaagaaagcgaacaguuuuuguuuguuuuuuuugccgugugugcuccauaguggaggcgcuauuuuccaauugaugagaaugacaaacauauauaaucuaucuaucuaucuaucuaucuaucuaucuauacagggggcuugaaccuuacucacccaagagcuucuuacggaaugugguagaaaaccaaguuguaacgacacuguaaccuaccugaugccuguucgcgcccgccgugagcugcgcacuggccguggccaccauucaccucuguaauuuaauccguuucucuuggauugucuggacgugcccgaugguucuuucuuuugcucaguggaguuggagguuuuguguuugguuuucucauucuugucuuguuuuguguggguggauuuucaccgaccaaugauauccucuucugacggucaccuucuuuccacuucacuggaguccaguauucuguaccacaucacgcaacguguuaucuugugguguaaauaaagacugcguuacuugcccucccaaaaa

SEQ ID NO: 138070 - RNA, 19 nt, Artificial Sequence
  Description of Artificial Sequence: Synthetic oligonucleotide
ggagguuguggggccgccg

SEQ ID NO: 138071 - RNA, 19 nt, Artificial Sequence
  Description of Artificial Sequence: Synthetic oligonucleotide
gccgcggagcaccgucccc

SEQ ID NO: 138072 - RNA, 19 nt, Artificial Sequence
  Description of Artificial Sequence: Synthetic oligonucleotide
cgccgccgcccgagcccga

SEQ ID NO: 138073 - RNA, 19 nt, Artificial Sequence
  Description of Artificial Sequence: Synthetic oligonucleotide
agcccgagcccgcgcaccc

SEQ ID NO: 138074 - RNA, 19 nt, Artificial Sequence
  Description of Artificial Sequence: Synthetic oligonucleotide
cgcccgcgccgccgccgcc

SEQ ID NO: 138075 - RNA, 19 nt, Artificial Sequence
  Description of Artificial Sequence: Synthetic oligonucleotide
cgccgcccgaacagccucc

SEQ ID NO: 138076 - RNA, 19 nt, Artificial Sequence
  Description of Artificial Sequence: Synthetic oligonucleotide
ccagccugggcccccggcg

SEQ ID NO: 138077 - RNA, 19 nt, Artificial Sequence
  Description of Artificial Sequence: Synthetic oligonucleotide
ggcgccguggccgcguccc

SEQ ID NO: 138078 - RNA, 19 nt, Artificial Sequence
  Description of Artificial Sequence: Synthetic oligonucleotide
cggcugucgccgcccgagc

SEQ ID NO: 138079 - RNA, 19 nt, Artificial Sequence
  Description of Artificial Sequence: Synthetic oligonucleotide
cccgagcccgcgcgccggc

SEQ ID NO: 138080 - RNA, 19 nt, Artificial Sequence
  Description of Artificial Sequence: Synthetic oligonucleotide
cggguggcggcgcaggcug

SEQ ID NO: 138081 - RNA, 19 nt, Artificial Sequence
  Description of Artificial Sequence: Synthetic oligonucleotide
gaggagaugcggcgcggag

SEQ ID NO: 138082 - RNA, 19 nt, Artificial Sequence
  Description of Artificial Sequence: Synthetic oligonucleotide
gcgccggagcagggcuaga

SEQ ID NO: 138083 - RNA, 19 nt, Artificial Sequence
  Description of Artificial Sequence: Synthetic oligonucleotide
agccggccgccgccgcccg

SEQ ID NO: 138084 - RNA, 19 nt, Artificial Sequence
  Description of Artificial Sequence: Synthetic oligonucleotide
gccgcgguaagcgcagccc

SEQ ID NO: 138085 - RNA, 19 nt, Artificial Sequence
  Description of Artificial Sequence: Synthetic oligonucleotide
ccggcccggcgcccgcggg

SEQ ID NO: 138086 - RNA, 19 nt, Artificial Sequence
  Description of Artificial Sequence: Synthetic oligonucleotide
gccauuguccgccgcccgc

SEQ ID NO: 138087 - RNA, 19 nt, Artificial Sequence
  Description of Artificial Sequence: Synthetic oligonucleotide
ccccgcgccccgcgcagcc

SEQ ID NO: 138088 - RNA, 19 nt, Artificial Sequence
  Description of Artificial Sequence: Synthetic oligonucleotide
cugcaggccuuggagcccg

SEQ ID NO: 138089 - RNA, 19 nt, Artificial Sequence
  Description of Artificial Sequence: Synthetic oligonucleotide
gcggcagguggacgccgcc

SEQ ID NO: 138090 - RNA, 19 nt, Artificial Sequence
  Description of Artificial Sequence: Synthetic oligonucleotide
cgguccacacccgccccgc

SEQ ID NO: 138091 - RNA, 19 nt, Artificial Sequence
  Description of Artificial Sequence: Synthetic oligonucleotide
cgcgcggccgugggaggcg

SEQ ID NO: 138092 - RNA, 19 nt, Artificial Sequence
  Description of Artificial Sequence: Synthetic oligonucleotide
gggggccagcgcuggccgc

SEQ ID NO: 138093 - RNA, 19 nt, Artificial Sequence
  Description of Artificial Sequence: Synthetic oligonucleotide
cgcgccgugggacccgccg

SEQ ID NO: 138094 - RNA, 19 nt, Artificial Sequence
  Description of Artificial Sequence: Synthetic oligonucleotide
gguccccagggccgcccgg

SEQ ID NO: 138095 - RNA, 19 nt, Artificial Sequence
  Description of Artificial Sequence: Synthetic oligonucleotide
gccccuucuggaccuuucc

SEQ ID NO: 138096 - RNA, 19 nt, Artificial Sequence
  Description of Artificial Sequence: Synthetic oligonucleotide
cacccgcgccgcgaggcgg

SEQ ID NO: 138097 - RNA, 19 nt, Artificial Sequence
  Description of Artificial Sequence: Synthetic oligonucleotide
gcuucgcccgccggggcgg

SEQ ID NO: 138098 - RNA, 19 nt, Artificial Sequence
  Description of Artificial Sequence: Synthetic oligonucleotide
ggggcgcgggggugggcac

SEQ ID NO: 138099 - RNA, 19 nt, Artificial Sequence
  Description of Artificial Sequence: Synthetic oligonucleotide
cggcaggcagcggcgccgu

SEQ ID NO: 138100 - RNA, 19 nt, Artificial Sequence
  Description of Artificial Sequence: Synthetic oligonucleotide
ucucccggugcggggcccg

SEQ ID NO: 138101 - RNA, 19 nt, Artificial Sequence
  Description of Artificial Sequence: Synthetic oligonucleotide
gcgccccccgagcagguuc

SEQ ID NO: 138102 - RNA, 19 nt, Artificial Sequence
  Description of Artificial Sequence: Synthetic oligonucleotide
caucugcagaagccagcgg

SEQ ID NO: 138103 - RNA, 19 nt, Artificial Sequence
  Description of Artificial Sequence: Synthetic oligonucleotide
gacgccucuguucaacuug

SEQ ID NO: 138104 - RNA, 19 nt, Artificial Sequence
  Description of Artificial Sequence: Synthetic oligonucleotide
guggguuaccuggcucaug

SEQ ID NO: 138105 - RNA, 19 nt, Artificial Sequence
  Description of Artificial Sequence: Synthetic oligonucleotide
gagaccuugccggcgaggc

SEQ ID NO: 138106 - RNA, 19 nt, Artificial Sequence
  Description of Artificial Sequence: Synthetic oligonucleotide
cucggcgcuugaacgucug

SEQ ID NO: 138107 - RNA, 19 nt, Artificial Sequence
  Description of Artificial Sequence: Synthetic oligonucleotide
gugacccagcccucaccgu

SEQ ID NO: 138108 - RNA, 19 nt, Artificial Sequence
  Description of Artificial Sequence: Synthetic oligonucleotide
ucccgguacuuguaugugu

SEQ ID NO: 138109 - RNA, 19 nt, Artificial Sequence
  Description of Artificial Sequence: Synthetic oligonucleotide
uuggugggaguuuggagcu

SEQ ID NO: 138110 - RNA, 19 nt, Artificial Sequence
  Description of Artificial Sequence: Synthetic oligonucleotide
ucguuggagcuaucguuuc

SEQ ID NO: 138111 - RNA, 19 nt, Artificial Sequence
  Description of Artificial Sequence: Synthetic oligonucleotide
ccguggaaauuuugagcca

SEQ ID NO: 138112 - RNA, 19 nt, Artificial Sequence
  Description of Artificial Sequence: Synthetic oligonucleotide
auuucgaaucacuuaaagg

SEQ ID NO: 138113 - RNA, 19 nt, Artificial Sequence
  Description of Artificial Sequence: Synthetic oligonucleotide
gaguggacauugcuagcaa

SEQ ID NO: 138114 - RNA, 19 nt, Artificial Sequence
  Description of Artificial Sequence: Synthetic oligonucleotide
augagcucccaaagccauc

SEQ ID NO: 138115 - RNA, 19 nt, Artificial Sequence
  Description of Artificial Sequence: Synthetic oligonucleotide
ccagauggacuuucuggcc

SEQ ID NO: 138116 - RNA, 19 nt, Artificial Sequence
  Description of Artificial Sequence: Synthetic oligonucleotide
cgagaccagccaguggagc

SEQ ID NO: 138117 - RNA, 19 nt, Artificial Sequence
  Description of Artificial Sequence: Synthetic oligonucleotide
cugcugaauccugcccgcg

SEQ ID NO: 138118 - RNA, 19 nt, Artificial Sequence
  Description of Artificial Sequence: Synthetic oligonucleotide
gugaaccacaugcccagca

SEQ ID NO: 138119 - RNA, 19 nt, Artificial Sequence
  Description of Artificial Sequence: Synthetic oligonucleotide
acgguggauguggccacgg

SEQ ID NO: 138120 - RNA, 19 nt, Artificial Sequence
  Description of Artificial Sequence: Synthetic oligonucleotide
gcgcugccucugcaagugg

SEQ ID NO: 138121 - RNA, 19 nt, Artificial Sequence
  Description of Artificial Sequence: Synthetic oligonucleotide
gcccccucggcagugccca

SEQ ID NO: 138122 - RNA, 19 nt, Artificial Sequence
  Description of Artificial Sequence: Synthetic oligonucleotide
auggaccugcgccuggacc

SEQ ID NO: 138123 - RNA, 19 nt, Artificial Sequence
  Description of Artificial Sequence: Synthetic oligonucleotide
caccaguucucacugccug

SEQ ID NO: 138124 - RNA, 19 nt, Artificial Sequence
  Description of Artificial Sequence: Synthetic oligonucleotide
guggcagagccggcccugc

SEQ ID NO: 138125 - RNA, 19 nt, Artificial Sequence
  Description of Artificial Sequence: Synthetic oligonucleotide
cgggagcagcagcugcagc

SEQ ID NO: 138126 - RNA, 19 nt, Artificial Sequence
  Description of Artificial Sequence: Synthetic oligonucleotide
caggagcuccuggcgcuca

SEQ ID NO: 138127 - RNA, 19 nt, Artificial Sequence
  Description of Artificial Sequence: Synthetic oligonucleotide
aagcagaagcagcagaucc

SEQ ID NO: 138128 - RNA, 19 nt, Artificial Sequence
  Description of Artificial Sequence: Synthetic oligonucleotide
cagaggcagauccucaucg

SEQ ID NO: 138129 - RNA, 19 nt, Artificial Sequence
  Description of Artificial Sequence: Synthetic oligonucleotide
gcugaguuccagaggcagc

SEQ ID NO: 138130 - RNA, 19 nt, Artificial Sequence
  Description of Artificial Sequence: Synthetic oligonucleotide
cacgagcagcucucccggc

SEQ ID NO: 138131 - RNA, 19 nt, Artificial Sequence
  Description of Artificial Sequence: Synthetic oligonucleotide
cagcacgaggcgcagcucc

SEQ ID NO: 138132 - RNA, 19 nt, Artificial Sequence
  Description of Artificial Sequence: Synthetic oligonucleotide
cacgagcacaucaagcaac

SEQ ID NO: 138133 - RNA, 19 nt, Artificial Sequence
  Description of Artificial Sequence: Synthetic oligonucleotide
caacaggagaugcuggcca

SEQ ID NO: 138134 - RNA, 19 nt, Artificial Sequence
  Description of Artificial Sequence: Synthetic oligonucleotide
augaagcaccagcaggagc

SEQ ID NO: 138135 - RNA, 19 nt, Artificial Sequence
  Description of Artificial Sequence: Synthetic oligonucleotide
cugcuggaacaccagcgga

SEQ ID NO: 138136 - RNA, 19 nt, Artificial Sequence
  Description of Artificial Sequence: Synthetic oligonucleotide
aagcuggagaggcaccgcc

SEQ ID NO: 138137 - RNA, 19 nt, Artificial Sequence
  Description of Artificial Sequence: Synthetic oligonucleotide
caggagcaggagcuggaga

SEQ ID NO: 138138 - RNA, 19 nt, Artificial Sequence
  Description of Artificial Sequence: Synthetic oligonucleotide
aagcagcaccgggagcaga

SEQ ID NO: 138139 - RNA, 19 nt, Artificial Sequence
  Description of Artificial Sequence: Synthetic oligonucleotide
aagcugcagcagcucaaga

SEQ ID NO: 138140 - RNA, 19 nt, Artificial Sequence
  Description of Artificial Sequence: Synthetic oligonucleotide
aacaaggagaagggcaaag

SEQ ID NO: 138141 - RNA, 19 nt, Artificial Sequence
  Description of Artificial Sequence: Synthetic oligonucleotide
gagagugccguggccagca

SEQ ID NO: 138142 - RNA, 19 nt, Artificial Sequence
  Description of Artificial Sequence: Synthetic oligonucleotide
acagaagugaagaugaagu

SEQ ID NO: 138143 - RNA, 19 nt, Artificial Sequence
  Description of Artificial Sequence: Synthetic oligonucleotide
uuacaagaauuuguccuca

SEQ ID NO: 138144 - RNA, 19 nt, Artificial Sequence
  Description of Artificial Sequence: Synthetic oligonucleotide
aauaaaaagaaggcgcugg

SEQ ID NO: 138145 - RNA, 19 nt, Artificial Sequence
  Description of Artificial Sequence: Synthetic oligonucleotide
gcccaccggaaucugaacc

SEQ ID NO: 138146 - RNA, 19 nt, Artificial Sequence
  Description of Artificial Sequence: Synthetic oligonucleotide
cacugcauuuccagcgacc

SEQ ID NO: 138147 - RNA, 19 nt, Artificial Sequence
  Description of Artificial Sequence: Synthetic oligonucleotide
ccucgcuacugguacggga

SEQ ID NO: 138148 - RNA, 19 nt, Artificial Sequence
  Description of Artificial Sequence: Synthetic oligonucleotide
aaaacgcagcacaguuccc

SEQ ID NO: 138149 - RNA, 19 nt, Artificial Sequence
  Description of Artificial Sequence: Synthetic oligonucleotide
cuugaccagaguucuccac

SEQ ID NO: 138150 - RNA, 19 nt, Artificial Sequence
  Description of Artificial Sequence: Synthetic oligonucleotide
ccccagagcggagugucga

SEQ ID NO: 138151 - RNA, 19 nt, Artificial Sequence
  Description of Artificial Sequence: Synthetic oligonucleotide
accuccuauaaccacccgg

SEQ ID NO: 138152 - RNA, 19 nt, Artificial Sequence
  Description of Artificial Sequence: Synthetic oligonucleotide
guccugggaauguacgacg

SEQ ID NO: 138153 - RNA, 19 nt, Artificial Sequence
  Description of Artificial Sequence: Synthetic oligonucleotide
gccaaagaugacuucccuc

SEQ ID NO: 138154 - RNA, 19 nt, Artificial Sequence
  Description of Artificial Sequence: Synthetic oligonucleotide
cuuaggaaaacagcuucug

SEQ ID NO: 138155 - RNA, 19 nt, Artificial Sequence
  Description of Artificial Sequence: Synthetic oligonucleotide
gaaccgaaucugaaauuac

SEQ ID NO: 138156 - RNA, 19 nt, Artificial Sequence
  Description of Artificial Sequence: Synthetic oligonucleotide
cgguccaggcuaaagcaga

SEQ ID NO: 138157 - RNA, 19 nt, Artificial Sequence
  Description of Artificial Sequence: Synthetic oligonucleotide
aaaguggccgaaagacgga

SEQ ID NO: 138158 - RNA, 19 nt, Artificial Sequence
  Description of Artificial Sequence: Synthetic oligonucleotide
agcagcccccuguuacgca

SEQ ID NO: 138159 - RNA, 19 nt, Artificial Sequence
  Description of Artificial Sequence: Synthetic oligonucleotide
aggaaagacgggccagugg

SEQ ID NO: 138160 - RNA, 19 nt, Artificial Sequence
  Description of Artificial Sequence: Synthetic oligonucleotide
gucacugcucuaaaaaagc

SEQ ID NO: 138161 - RNA, 19 nt, Artificial Sequence
  Description of Artificial Sequence: Synthetic oligonucleotide
cguccguuggaugucacag

SEQ ID NO: 138162 - RNA, 19 nt, Artificial Sequence
  Description of Artificial Sequence: Synthetic oligonucleotide
gacuccgcgugcagcagcg

SEQ ID NO: 138163 - RNA, 19 nt, Artificial Sequence
  Description of Artificial Sequence: Synthetic oligonucleotide
gccccaggcuccggaccca

SEQ ID NO: 138164 - RNA, 19 nt, Artificial Sequence
  Description of Artificial Sequence: Synthetic oligonucleotide
agcucacccaacaacagcu

SEQ ID NO: 138165 - RNA, 19 nt, Artificial Sequence
  Description of Artificial Sequence: Synthetic oligonucleotide
uccgggagcgucagcgcgg

SEQ ID NO: 138166 - RNA, 19 nt, Artificial Sequence
  Description of Artificial Sequence: Synthetic oligonucleotide
gagaacgguaucgcgcccg

SEQ ID NO: 138167 - RNA, 19 nt, Artificial Sequence
  Description of Artificial Sequence: Synthetic oligonucleotide
gccguccccagcaucccgg

SEQ ID NO: 138168 - RNA, 19 nt, Artificial Sequence
  Description of Artificial Sequence: Synthetic oligonucleotide
gcggagacgaguuuggcgc

SEQ ID NO: 138169 - RNA, 19 nt, Artificial Sequence
  Description of Artificial Sequence: Synthetic oligonucleotide
cacagacuuguggcacgag

SEQ ID NO: 138170 - RNA, 19 nt, Artificial Sequence
  Description of Artificial Sequence: Synthetic oligonucleotide
gaaggcucggccgcuccac

SEQ ID NO: 138171 - RNA, 19 nt, Artificial Sequence
  Description of Artificial Sequence: Synthetic oligonucleotide
cuuccccucuacacaucgc

SEQ ID NO: 138172 - RNA, 19 nt, Artificial Sequence
  Description of Artificial Sequence: Synthetic oligonucleotide
ccauccuugcccaacauca

SEQ ID NO: 138173 - RNA, 19 nt, Artificial Sequence
  Description of Artificial Sequence: Synthetic oligonucleotide
acgcugggccugccugcca

SEQ ID NO: 138174 - RNA, 19 nt, Artificial Sequence
  Description of Artificial Sequence: Synthetic oligonucleotide
accggccccucugcgggca

SEQ ID NO: 138175 - RNA, 19 nt, Artificial Sequence
  Description of Artificial Sequence: Synthetic oligonucleotide
acggcgggccagcaggacg

SEQ ID NO: 138176 - RNA, 19 nt, Artificial Sequence
  Description of Artificial Sequence: Synthetic oligonucleotide
gccgagagacucacccuuc

SEQ ID NO: 138177 - RNA, 19 nt, Artificial Sequence
  Description of Artificial Sequence: Synthetic oligonucleotide
cccgcccuccagcagaggc

SEQ ID NO: 138178 - RNA, 19 nt, Artificial Sequence
  Description of Artificial Sequence: Synthetic oligonucleotide
cucucccuuuuccccggca

SEQ ID NO: 138179 - RNA, 19 nt, Artificial Sequence
  Description of Artificial Sequence: Synthetic oligonucleotide
acccaccucacucccuacc

SEQ ID NO: 138180 - RNA, 19 nt, Artificial Sequence
  Description of Artificial Sequence: Synthetic oligonucleotide
cugagcaccucgcccuugg

SEQ ID NO: 138181 - RNA, 19 nt, Artificial Sequence
  Description of Artificial Sequence: Synthetic oligonucleotide
gagcgggacggaggggcag

SEQ ID NO: 138182 - RNA, 19 nt, Artificial Sequence
  Description of Artificial Sequence: Synthetic oligonucleotide
gcgcacagcccucuucugc

SEQ ID NO: 138183 - RNA, 19 nt, Artificial Sequence
  Description of Artificial Sequence: Synthetic oligonucleotide
cagcacauggucuuacugg

SEQ ID NO: 138184 - RNA, 19 nt, Artificial Sequence
  Description of Artificial Sequence: Synthetic oligonucleotide
gagcagccgccggcacaag

SEQ ID NO: 138185 - RNA, 19 nt, Artificial Sequence
  Description of Artificial Sequence: Synthetic oligonucleotide
gcaccccucgucacaggcc

SEQ ID NO: 138186 - RNA, 19 nt, Artificial Sequence
  Description of Artificial Sequence: Synthetic oligonucleotide
cugggagcacugccccucc

SEQ ID NO: 138187 - RNA, 19 nt, Artificial Sequence
  Description of Artificial Sequence: Synthetic oligonucleotide
cacgcacaguccuugguug

SEQ ID NO: 138188 - RNA, 19 nt, Artificial Sequence
  Description of Artificial Sequence: Synthetic oligonucleotide
ggugcagaccggguguccc

SEQ ID NO: 138189 - RNA, 19 nt, Artificial Sequence
  Description of Artificial Sequence: Synthetic oligonucleotide
cccuccauccacaagcugc

SEQ ID NO: 138190 - RNA, 19 nt, Artificial Sequence
  Description of Artificial Sequence: Synthetic oligonucleotide
cggcagcaccgcccacugg

SEQ ID NO: 138191 - RNA, 19 nt, Artificial Sequence
  Description of Artificial Sequence: Synthetic oligonucleotide
gggcggacccagucggccc

SEQ ID NO: 138192 - RNA, 19 nt, Artificial Sequence
  Description of Artificial Sequence: Synthetic oligonucleotide
ccgcugccccagaacgccc

SEQ ID NO: 138193 - RNA, 19 nt, Artificial Sequence
  Description of Artificial Sequence: Synthetic oligonucleotide
caggcucugcagcaccugg

SEQ ID NO: 138194 - RNA, 19 nt, Artificial Sequence
  Description of Artificial Sequence: Synthetic oligonucleotide
gucauccagcagcagcauc

SEQ ID NO: 138195 - RNA, 19 nt, Artificial Sequence
  Description of Artificial Sequence: Synthetic oligonucleotide
cagcaguuucuggagaaac

SEQ ID NO: 138196 - RNA, 19 nt, Artificial Sequence
  Description of Artificial Sequence: Synthetic oligonucleotide
cacaagcagcaguuccagc

SEQ ID NO: 138197 - RNA, 19 nt, Artificial Sequence
  Description of Artificial Sequence: Synthetic oligonucleotide
cagcagcaacugcagauga

SEQ ID NO: 138198 - RNA, 19 nt, Artificial Sequence
  Description of Artificial Sequence: Synthetic oligonucleotide
aacaagaucauccccaagc

SEQ ID NO: 138199 - RNA, 19 nt, Artificial Sequence
  Description of Artificial Sequence: Synthetic oligonucleotide
ccaagcgagccagcccggc

SEQ ID NO: 138200 - RNA, 19 nt, Artificial Sequence
  Description of Artificial Sequence: Synthetic oligonucleotide
cagccggagagccacccgg

SEQ ID NO: 138201 - RNA, 19 nt, Artificial Sequence
  Description of Artificial Sequence: Synthetic oligonucleotide
gaggagacggaggaggagc

SEQ ID NO: 138202 - RNA, 19 nt, Artificial Sequence
  Description of Artificial Sequence: Synthetic oligonucleotide
cuccgugagcaccaggcuc

SEQ ID NO: 138203 - RNA, 19 nt, Artificial Sequence
  Description of Artificial Sequence: Synthetic oligonucleotide
cugcuggacgagcccuacc

SEQ ID NO: 138204 - RNA, 19 nt, Artificial Sequence
  Description of Artificial Sequence: Synthetic oligonucleotide
cuggaccggcugccggggc

SEQ ID NO: 138205 - RNA, 19 nt, Artificial Sequence
  Description of Artificial Sequence: Synthetic oligonucleotide
cagaaggaggcgcacgcac

SEQ ID NO: 138206 - RNA, 19 nt, Artificial Sequence
  Description of Artificial Sequence: Synthetic oligonucleotide
caggccggcgugcagguga

SEQ ID NO: 138207 - RNA, 19 nt, Artificial Sequence
  Description of Artificial Sequence: Synthetic oligonucleotide
aagcaggagcccauugaga

SEQ ID NO: 138208 - RNA, 19 nt, Artificial Sequence
  Description of Artificial Sequence: Synthetic oligonucleotide
agcgaugaggaagaggcag

SEQ ID NO: 138209 - RNA, 19 nt, Artificial Sequence
  Description of Artificial Sequence: Synthetic oligonucleotide
gagcccccacgggaggugg

SEQ ID NO: 138210 - RNA, 19 nt, Artificial Sequence
  Description of Artificial Sequence: Synthetic oligonucleotide
gagccgggccagcgccagc

SEQ ID NO: 138211 - RNA, 19 nt, Artificial Sequence
  Description of Artificial Sequence: Synthetic oligonucleotide
cccagugagcaggagcugc

SEQ ID NO: 138212 - RNA, 19 nt, Artificial Sequence
  Description of Artificial Sequence: Synthetic oligonucleotide
cucuucagacagcaagccc

SEQ ID NO: 138213 - RNA, 19 nt, Artificial Sequence
  Description of Artificial Sequence: Synthetic oligonucleotide
cuccugcuggagcagcagc

SEQ ID NO: 138214 - RNA, 19 nt, Artificial Sequence
  Description of Artificial Sequence: Synthetic oligonucleotide
cggauccaccagcugagga

SEQ ID NO: 138215 - RNA, 19 nt, Artificial Sequence
  Description of Artificial Sequence: Synthetic oligonucleotide
aacuaccaggcguccaugg

SEQ ID NO: 138216 - RNA, 19 nt, Artificial Sequence
  Description of Artificial Sequence: Synthetic oligonucleotide
gaggccgccggcauccccg

SEQ ID NO: 138217 - RNA, 19 nt, Artificial Sequence
  Description of Artificial Sequence: Synthetic oligonucleotide
guguccuucggcggccaca

SEQ ID NO: 138218 - RNA, 19 nt, Artificial Sequence
  Description of Artificial Sequence: Synthetic oligonucleotide
aggccucugucccgggcgc

SEQ ID NO: 138219 - RNA, 19 nt, Artificial Sequence
  Description of Artificial Sequence: Synthetic oligonucleotide
caguccucacccgcgucug

SEQ ID NO: 138220 - RNA, 19 nt, Artificial Sequence
  Description of Artificial Sequence: Synthetic oligonucleotide
gccaccuuccccgugucug

SEQ ID NO: 138221 - RNA, 19 nt, Artificial Sequence
  Description of Artificial Sequence: Synthetic oligonucleotide
gugcaggagccccccacca

SEQ ID NO: 138222 - RNA, 19 nt, Artificial Sequence
  Description of Artificial Sequence: Synthetic oligonucleotide
aagccgagguucacgacag

SEQ ID NO: 138223 - RNA, 19 nt, Artificial Sequence
  Description of Artificial Sequence: Synthetic oligonucleotide
ggccucguguaugacacgc

SEQ ID NO: 138224 - RNA, 19 nt, Artificial Sequence
  Description of Artificial Sequence: Synthetic oligonucleotide
cugaugcugaagcaccagu

SEQ ID NO: 138225 - RNA, 19 nt, Artificial Sequence
  Description of Artificial Sequence: Synthetic oligonucleotide
ugcaccugcgggaguagca

SEQ ID NO: 138226 - RNA, 19 nt, Artificial Sequence
  Description of Artificial Sequence: Synthetic oligonucleotide
agcagccaccccgagcacg

SEQ ID NO: 138227 - RNA, 19 nt, Artificial Sequence
  Description of Artificial Sequence: Synthetic oligonucleotide
gccgggaggauccagagca

SEQ ID NO: 138228 - RNA, 19 nt, Artificial Sequence
  Description of Artificial Sequence: Synthetic oligonucleotide
aucuggucccgccugcagg

SEQ ID NO: 138229 - RNA, 19 nt, Artificial Sequence
  Description of Artificial Sequence: Synthetic oligonucleotide
gagacgggccuccggggca

SEQ ID NO: 138230 - RNA, 19 nt, Artificial Sequence
  Description of Artificial Sequence: Synthetic oligonucleotide
aaaugcgagugcauccgcg

SEQ ID NO: 138231 - RNA, 19 nt, Artificial Sequence
  Description of Artificial Sequence: Synthetic oligonucleotide
ggacgcaaggccacccugg

SEQ ID NO: 138232 - RNA, 19 nt, Artificial Sequence
  Description of Artificial Sequence: Synthetic oligonucleotide
gaggagcuacagacggugc

SEQ ID NO: 138233 - RNA, 19 nt, Artificial Sequence
  Description of Artificial Sequence: Synthetic oligonucleotide
cacucggaagcccacaccc

SEQ ID NO: 138234 - RNA, 19 nt, Artificial Sequence
  Description of Artificial Sequence: Synthetic oligonucleotide
cuccuguauggcacgaacc

SEQ ID NO: 138235 - RNA, 19 nt, Artificial Sequence
  Description of Artificial Sequence: Synthetic oligonucleotide
ccccucaaccggcagaaac

SEQ ID NO: 138236 - RNA, 19 nt, Artificial Sequence
  Description of Artificial Sequence: Synthetic oligonucleotide
cuggacaguaagaaacuuc

SEQ ID NO: 138237 - RNA, 19 nt, Artificial Sequence
  Description of Artificial Sequence: Synthetic oligonucleotide
cuaggcucgcucgccuccg

SEQ ID NO: 138238 - RNA, 19 nt, Artificial Sequence
  Description of Artificial Sequence: Synthetic oligonucleotide
guguucguccggcucccuu

SEQ ID NO: 138239 - RNA, 19 nt, Artificial Sequence
  Description of Artificial Sequence: Synthetic oligonucleotide
ugcggugguguuggggugg

SEQ ID NO: 138240 - RNA, 19 nt, Artificial Sequence
  Description of Artificial Sequence: Synthetic oligonucleotide
gacagugacaccauaugga

SEQ ID NO: 138241 - RNA, 19 nt, Artificial Sequence
  Description of Artificial Sequence: Synthetic oligonucleotide
aacgaggugcacucggcgg

SEQ ID NO: 138242 - RNA, 19 nt, Artificial Sequence
  Description of Artificial Sequence: Synthetic oligonucleotide
ggggcagcccgccuggcug

SEQ ID NO: 138243 - RNA, 19 nt, Artificial Sequence
  Description of Artificial Sequence: Synthetic oligonucleotide
gugggcugcgugguagagc

SEQ ID NO: 138244 - RNA, 19 nt, Artificial Sequence
  Description of Artificial Sequence: Synthetic oligonucleotide
cuggucuucaagguggcca

SEQ ID NO: 138245 - RNA, 19 nt, Artificial Sequence
  Description of Artificial Sequence: Synthetic oligonucleotide
acaggggagcugaagaaug

SEQ ID NO: 138246 - RNA, 19 nt, Artificial Sequence
  Description of Artificial Sequence: Synthetic oligonucleotide
ggcuuugcugugguccgcc

SEQ ID NO: 138247 - RNA, 19 nt, Artificial Sequence
  Description of Artificial Sequence: Synthetic oligonucleotide
cccccuggacaccaugcgg

SEQ ID NO: 138248 - RNA, 19 nt, Artificial Sequence
  Description of Artificial Sequence: Synthetic oligonucleotide
gaggagagcacgcccaugg

SEQ ID NO: 138249 - RNA, 19 nt, Artificial Sequence
  Description of Artificial Sequence: Synthetic oligonucleotide
ggcuuuugcuacuucaacu

SEQ ID NO: 138250 - RNA, 19 nt, Artificial Sequence
  Description of Artificial Sequence: Synthetic oligonucleotide
uccguggccguggcagcca

SEQ ID NO: 138251 - RNA, 19 nt, Artificial Sequence
  Description of Artificial Sequence: Synthetic oligonucleotide
aagcuucugcagcagaggu

SEQ ID NO: 138252 - RNA, 19 nt, Artificial Sequence
  Description of Artificial Sequence: Synthetic oligonucleotide
uugagcgugagcaagaucc

SEQ ID NO: 138253 - RNA, 19 nt, Artificial Sequence
  Description of Artificial Sequence: Synthetic oligonucleotide
cucaucguggacugggacg

SEQ ID NO: 138254 - RNA, 19 nt, Artificial Sequence
  Description of Artificial Sequence: Synthetic oligonucleotide
gugcaccauggaaacggga

SEQ ID NO: 138255 - RNA, 19 nt, Artificial Sequence
  Description of Artificial Sequence: Synthetic oligonucleotide
acccagcaggcuuucuaca

SEQ ID NO: 138256 - RNA, 19 nt, Artificial Sequence
  Description of Artificial Sequence: Synthetic oligonucleotide
agcgaccccagcguccugu

SEQ ID NO: 138257 - RNA, 19 nt, Artificial Sequence
  Description of Artificial Sequence: Synthetic oligonucleotide
uacaugucccuccaccgcu

SEQ ID NO: 138258 - RNA, 19 nt, Artificial Sequence
  Description of Artificial Sequence: Synthetic oligonucleotide
uacgacgaugggaacuucu

SEQ ID NO: 138259 - RNA, 19 nt, Artificial Sequence
  Description of Artificial Sequence: Synthetic oligonucleotide
uucccaggcagcggggcuc

SEQ ID NO: 138260 - RNA, 19 nt, Artificial Sequence
  Description of Artificial Sequence: Synthetic oligonucleotide
ccugaugaggugggcacag

SEQ ID NO: 138261 - RNA, 19 nt, Artificial Sequence
  Description of Artificial Sequence: Synthetic oligonucleotide
gggcccggcguggguuuca

SEQ ID NO: 138262 - RNA, 19 nt, Artificial Sequence
  Description of Artificial Sequence: Synthetic oligonucleotide
aacgucaacauggcuuuca

SEQ ID NO: 138263 - RNA, 19 nt, Artificial Sequence
  Description of Artificial Sequence: Synthetic oligonucleotide
accggcggccuggaccccc

SEQ ID NO: 138264 - RNA, 19 nt, Artificial Sequence
  Description of Artificial Sequence: Synthetic oligonucleotide
cccaugggagacgcugagu

SEQ ID NO: 138265 - RNA, 19 nt, Artificial Sequence
  Description of Artificial Sequence: Synthetic oligonucleotide
uacuuggcggccuucagaa

SEQ ID NO: 138266 - RNA, 19 nt, Artificial Sequence
  Description of Artificial Sequence: Synthetic oligonucleotide
acgguggucaugccgaucg

SEQ ID NO: 138267 - RNA, 19 nt, Artificial Sequence
  Description of Artificial Sequence: Synthetic oligonucleotide
gccagcgaguuugccccgg

SEQ ID NO: 138268 - RNA, 19 nt, Artificial Sequence
  Description of Artificial Sequence: Synthetic oligonucleotide
gauguggugcuggugucau

SEQ ID NO: 138269 - RNA, 19 nt, Artificial Sequence
  Description of Artificial Sequence: Synthetic oligonucleotide
ucaggcuucgaugccgugg

SEQ ID NO: 138270 - RNA, 19 nt, Artificial Sequence
  Description of Artificial Sequence: Synthetic oligonucleotide
gagggccaccccaccccuc

SEQ ID NO: 138271 - RNA, 19 nt, Artificial Sequence
  Description of Artificial Sequence: Synthetic oligonucleotide
cuugggggcuacaaccucu

SEQ ID NO: 138272 - RNA, 19 nt, Artificial Sequence
  Description of Artificial Sequence: Synthetic oligonucleotide
uccgccagaugcuucgggu

SEQ ID NO: 138273 - RNA, 19 nt, Artificial Sequence
  Description of Artificial Sequence: Synthetic oligonucleotide
uaccugacgaagcagcuga

SEQ ID NO: 138274 - RNA, 19 nt, Artificial Sequence
  Description of Artificial Sequence: Synthetic oligonucleotide
augggccuggcuggcggcc

SEQ ID NO: 138275 - RNA, 19 nt, Artificial Sequence
  Description of Artificial Sequence: Synthetic oligonucleotide
cggauuguccuggcccucg

SEQ ID NO: 138276 - RNA, 19 nt, Artificial Sequence
  Description of Artificial Sequence: Synthetic oligonucleotide
gagggaggccacgaccuga

SEQ ID NO: 138277 - RNA, 19 nt, Artificial Sequence
  Description of Artificial Sequence: Synthetic oligonucleotide
accgccauuugcgacgccu

SEQ ID NO: 138278 - RNA, 19 nt, Artificial Sequence
  Description of Artificial Sequence: Synthetic oligonucleotide
ucggaagcauguguuucug

SEQ ID NO: 138279 - RNA, 19 nt, Artificial Sequence
  Description of Artificial Sequence: Synthetic oligonucleotide
gccuugcugggaaacgagc

SEQ ID NO: 138280 - RNA, 19 nt, Artificial Sequence
  Description of Artificial Sequence: Synthetic oligonucleotide
cuugauccucucccagaaa

SEQ ID NO: 138281 - RNA, 19 nt, Artificial Sequence
  Description of Artificial Sequence: Synthetic oligonucleotide
aagguuuuacagcaaagac

SEQ ID NO: 138282 - RNA, 19 nt, Artificial Sequence
  Description of Artificial Sequence: Synthetic oligonucleotide
cccaaugcaaacgcugucc

SEQ ID NO: 138283 - RNA, 19 nt, Artificial Sequence
  Description of Artificial Sequence: Synthetic oligonucleotide
cguuccauggagaaaguca

SEQ ID NO: 138284 - RNA, 19 nt, Artificial Sequence
  Description of Artificial Sequence: Synthetic oligonucleotide
auggagauccacagcaagu

SEQ ID NO: 138285 - RNA, 19 nt, Artificial Sequence
  Description of Artificial Sequence: Synthetic oligonucleotide
uacuggcgcugccugcagc

SEQ ID NO: 138286 - RNA, 19 nt, Artificial Sequence
  Description of Artificial Sequence: Synthetic oligonucleotide
cgcacaaccuccacagcgg

SEQ ID NO: 138287 - RNA, 19 nt, Artificial Sequence
  Description of Artificial Sequence: Synthetic oligonucleotide
gggcguucucugaucgagg

SEQ ID NO: 138288 - RNA, 19 nt, Artificial Sequence
  Description of Artificial Sequence: Synthetic oligonucleotide
gcucagacuugcgagaacg

SEQ ID NO: 138289 - RNA, 19 nt, Artificial Sequence
  Description of Artificial Sequence: Synthetic oligonucleotide
gaagaagccgagacgguca

SEQ ID NO: 138290 - RNA, 19 nt, Artificial Sequence
  Description of Artificial Sequence: Synthetic oligonucleotide
accgccauggccucgcugu

SEQ ID NO: 138291 - RNA, 19 nt, Artificial Sequence
  Description of Artificial Sequence: Synthetic oligonucleotide
uccgugggcgugaagcccg

SEQ ID NO: 138292 - RNA, 19 nt, Artificial Sequence
  Description of Artificial Sequence: Synthetic oligonucleotide
gccgaaaagagaccagaug

SEQ ID NO: 138293 - RNA, 19 nt, Artificial Sequence
  Description of Artificial Sequence: Synthetic oligonucleotide
gaggagcccauggaagagg

SEQ ID NO: 138294 - RNA, 19 nt, Artificial Sequence
  Description of Artificial Sequence: Synthetic oligonucleotide
gagccgccccuguagcacu

SEQ ID NO: 138295 - RNA, 19 nt, Artificial Sequence
  Description of Artificial Sequence: Synthetic oligonucleotide
ucccucgaagcugcuguuc

SEQ ID NO: 138296 - RNA, 19 nt, Artificial Sequence
  Description of Artificial Sequence: Synthetic oligonucleotide
cucuugucugucugucucu

SEQ ID NO: 138297 - RNA, 19 nt, Artificial Sequence
  Description of Artificial Sequence: Synthetic oligonucleotide
ugucuugaagcucagccaa

SEQ ID NO: 138298 - RNA, 19 nt, Artificial Sequence
  Description of Artificial Sequence: Synthetic oligonucleotide
agaaacuuucccgugucac

SEQ ID NO: 138299 - RNA, 19 nt, Artificial Sequence
  Description of Artificial Sequence: Synthetic oligonucleotide
cgccugcgucccaccgugg

SEQ ID NO: 138300 - RNA, 19 nt, Artificial Sequence
  Description of Artificial Sequence: Synthetic oligonucleotide
gggcucucuuggagcaccc

SEQ ID NO: 138301 - RNA, 19 nt, Artificial Sequence
  Description of Artificial Sequence: Synthetic oligonucleotide
cagggacacccagcgugca

SEQ ID NO: 138302 - RNA, 19 nt, Artificial Sequence
  Description of Artificial Sequence: Synthetic oligonucleotide
aacagccacgggaagccuu

SEQ ID NO: 138303 - RNA, 19 nt, Artificial Sequence
  Description of Artificial Sequence: Synthetic oligonucleotide
uucugccgcccaggcccac

SEQ ID NO: 138304 - RNA, 19 nt, Artificial Sequence
  Description of Artificial Sequence: Synthetic oligonucleotide
caggucucgagacgcacau

SEQ ID NO: 138305 - RNA, 19 nt, Artificial Sequence
  Description of Artificial Sequence: Synthetic oligonucleotide
ugcacgccugggcguggca

SEQ ID NO: 138306 - RNA, 19 nt, Artificial Sequence
  Description of Artificial Sequence: Synthetic oligonucleotide
agccucacagggaacacgg

SEQ ID NO: 138307 - RNA, 19 nt, Artificial Sequence
  Description of Artificial Sequence: Synthetic oligonucleotide
ggacagacgccggcgacgc

SEQ ID NO: 138308 - RNA, 19 nt, Artificial Sequence
  Description of Artificial Sequence: Synthetic oligonucleotide
cgcagacacacggacacgc

SEQ ID NO: 138309 - RNA, 19 nt, Artificial Sequence
  Description of Artificial Sequence: Synthetic oligonucleotide
cggaagccaagcacacucu

SEQ ID NO: 138310 - RNA, 19 nt, Artificial Sequence
  Description of Artificial Sequence: Synthetic oligonucleotide
uggcgggucccgcaaggga

SEQ ID NO: 138311 - RNA, 19 nt, Artificial Sequence
  Description of Artificial Sequence: Synthetic oligonucleotide
acgccguggaagaaaggag

SEQ ID NO: 138312 - RNA, 19 nt, Artificial Sequence
  Description of Artificial Sequence: Synthetic oligonucleotide
gccuguggcaacaggcggc

SEQ ID NO: 138313 - RNA, 19 nt, Artificial Sequence
  Description of Artificial Sequence: Synthetic oligonucleotide
ccgagcugccgaauucagu

SEQ ID NO: 138314 - RNA, 19 nt, Artificial Sequence
  Description of Artificial Sequence: Synthetic oligonucleotide
uugacacgaggcacagaaa

SEQ ID NO: 138315 - RNA, 19 nt, Artificial Sequence
  Description of Artificial Sequence: Synthetic oligonucleotide
aacaaauaucaaagaucua

SEQ ID NO: 138316 - RNA, 19 nt, Artificial Sequence
  Description of Artificial Sequence: Synthetic oligonucleotide
aauaauacaaaacaaacuu

SEQ ID NO: 138317 - RNA, 19 nt, Artificial Sequence
  Description of Artificial Sequence: Synthetic oligonucleotide
ugauuaaaacuggugcuua

SEQ ID NO: 138318 - RNA, 19 nt, Artificial Sequence
  Description of Artificial Sequence: Synthetic oligonucleotide
aaaguuuauuacccacaac

SEQ ID NO: 138319 - RNA, 19 nt, Artificial Sequence
  Description of Artificial Sequence: Synthetic oligonucleotide
cuccacagucucuguguaa

SEQ ID NO: 138320 - RNA, 19 nt, Artificial Sequence
  Description of Artificial Sequence: Synthetic oligonucleotide
aaccacucgacucaucuug

SEQ ID NO: 138321 - RNA, 19 nt, Artificial Sequence
  Description of Artificial Sequence: Synthetic oligonucleotide
guagcuuauuuuuuuuuaa

SEQ ID NO: 138322 - RNA, 19 nt, Artificial Sequence
  Description of Artificial Sequence: Synthetic oligonucleotide
aagaggacguuuucuacgg

SEQ ID NO: 138323 - RNA, 19 nt, Artificial Sequence
  Description of Artificial Sequence: Synthetic oligonucleotide
gcuguggcccgccucugug

SEQ ID NO: 138324 - RNA, 19 nt, Artificial Sequence
  Description of Artificial Sequence: Synthetic oligonucleotide
gaaccauagcggugugcgg

SEQ ID NO: 138325 - RNA, 19 nt, Artificial Sequence
  Description of Artificial Sequence: Synthetic oligonucleotide
gcggggggucugcacccgg

SEQ ID NO: 138326 - RNA, 19 nt, Artificial Sequence
  Description of Artificial Sequence: Synthetic oligonucleotide
ggugggggacagagggacc

SEQ ID NO: 138327 - RNA, 19 nt, Artificial Sequence
  Description of Artificial Sequence: Synthetic oligonucleotide
cuuuaaagaaaacaaaacu

SEQ ID NO: 138328 - RNA, 19 nt, Artificial Sequence
  Description of Artificial Sequence: Synthetic oligonucleotide
uggacagaaacaggaaugu

SEQ ID NO: 138329 - RNA, 19 nt, Artificial Sequence
  Description of Artificial Sequence: Synthetic oligonucleotide
ugagcugggggagcuggcu

SEQ ID NO: 138330 - RNA, 19 nt, Artificial Sequence
  Description of Artificial Sequence: Synthetic oligonucleotide
uugaguuucucaaaagcca

SEQ ID NO: 138331 - RNA, 19 nt, Artificial Sequence
  Description of Artificial Sequence: Synthetic oligonucleotide
aucggaagaugcgaguuug

SEQ ID NO: 138332 - RNA, 19 nt, Artificial Sequence
  Description of Artificial Sequence: Synthetic oligonucleotide
gugccuuuuuuuuuauugc

SEQ ID NO: 138333 - RNA, 19 nt, Artificial Sequence
  Description of Artificial Sequence: Synthetic oligonucleotide
cucugguggauuuuugugg

SEQ ID NO: 138334 - RNA, 19 nt, Artificial Sequence
  Description of Artificial Sequence: Synthetic oligonucleotide
gcuggguuuucugaagucu

SEQ ID NO: 138335 - RNA, 19 nt, Artificial Sequence
  Description of Artificial Sequence: Synthetic oligonucleotide
ugaggaacaaugccuuaag

SEQ ID NO: 138336 - RNA, 19 nt, Artificial Sequence
  Description of Artificial Sequence: Synthetic oligonucleotide
gaaaaaacaaacagcagga

SEQ ID NO: 138337 - RNA, 19 nt, Artificial Sequence
  Description of Artificial Sequence: Synthetic oligonucleotide
aaucggugggacaguuucc

SEQ ID NO: 138338 - RNA, 19 nt, Artificial Sequence
  Description of Artificial Sequence: Synthetic oligonucleotide
cuguggccagccgagccug

SEQ ID NO: 138339 - RNA, 19 nt, Artificial Sequence
  Description of Artificial Sequence: Synthetic oligonucleotide
ggcagugcuggcaccgcga

SEQ ID NO: 138340 - RNA, 19 nt, Artificial Sequence
  Description of Artificial Sequence: Synthetic oligonucleotide
agcuggccugacgccucaa

SEQ ID NO: 138341 - RNA, 19 nt, Artificial Sequence
  Description of Artificial Sequence: Synthetic oligonucleotide
agcacgggcaccagccguc

SEQ ID NO: 138342 - RNA, 19 nt, Artificial Sequence
  Description of Artificial Sequence: Synthetic oligonucleotide
caucuccggggccaggggc

SEQ ID NO: 138343 - RNA, 19 nt, Artificial Sequence
  Description of Artificial Sequence: Synthetic oligonucleotide
cugcagcccggcggucccu

SEQ ID NO: 138344 - RNA, 19 nt, Artificial Sequence
  Description of Artificial Sequence: Synthetic oligonucleotide
uguuuugcuuuauugcugu

SEQ ID NO: 138345 - RNA, 19 nt, Artificial Sequence
  Description of Artificial Sequence: Synthetic oligonucleotide
uuuaagaaaaauggaggua

SEQ ID NO: 138346 - RNA, 19 nt, Artificial Sequence
  Description of Artificial Sequence: Synthetic oligonucleotide
aguuccaaaaaaguggcaa

SEQ ID NO: 138347 - RNA, 19 nt, Artificial Sequence
  Description of Artificial Sequence: Synthetic oligonucleotide
aaucccguuggagguuuug

SEQ ID NO: 138348 - RNA, 19 nt, Artificial Sequence
  Description of Artificial Sequence: Synthetic oligonucleotide
gaaguccaacaaauuuuaa

SEQ ID NO: 138349 - RNA, 19 nt, Artificial Sequence
  Description of Artificial Sequence: Synthetic oligonucleotide
aacgaauccaaaguguucu

SEQ ID NO: 138350 - RNA, 19 nt, Artificial Sequence
  Description of Artificial Sequence: Synthetic oligonucleotide
ucacacgucacauacgauu

SEQ ID NO: 138351 - RNA, 19 nt, Artificial Sequence
  Description of Artificial Sequence: Synthetic oligonucleotide
ugagcaucuccaucugguc

SEQ ID NO: 138352 - RNA, 19 nt, Artificial Sequence
  Description of Artificial Sequence: Synthetic oligonucleotide
cgugaagcaugugguaggc

SEQ ID NO: 138353 - RNA, 19 nt, Artificial Sequence
  Description of Artificial Sequence: Synthetic oligonucleotide
cacacuugcaguguuacga

SEQ ID NO: 138354 - RNA, 19 nt, Artificial Sequence
  Description of Artificial Sequence: Synthetic oligonucleotide
aucggaaugcuuuuuauua

SEQ ID NO: 138355 - RNA, 19 nt, Artificial Sequence
  Description of Artificial Sequence: Synthetic oligonucleotide
aaaagcaaguagcaugaag

SEQ ID NO: 138356 - RNA, 19 nt, Artificial Sequence
  Description of Artificial Sequence: Synthetic oligonucleotide
guauugcuuaaauuuuagg

SEQ ID NO: 138357 - RNA, 19 nt, Artificial Sequence
  Description of Artificial Sequence: Synthetic oligonucleotide
guauaaauaaauauauaua

SEQ ID NO: 138358 - RNA, 19 nt, Artificial Sequence
  Description of Artificial Sequence: Synthetic oligonucleotide
auguauaauauauauucca

SEQ ID NO: 138359 - RNA, 19 nt, Artificial Sequence
  Description of Artificial Sequence: Synthetic oligonucleotide
aauguauuccaagcuaaga

SEQ ID NO: 138360 - RNA, 19 nt, Artificial Sequence
  Description of Artificial Sequence: Synthetic oligonucleotide
aaacuuacuugauucuuau

SEQ ID NO: 138361 - RNA, 19 nt, Artificial Sequence
  Description of Artificial Sequence: Synthetic oligonucleotide
ugaaaucuugauaaaauau

SEQ ID NO: 138362 - RNA, 19 nt, Artificial Sequence
  Description of Artificial Sequence: Synthetic oligonucleotide
uuuauaaugcauuuauaga

SEQ ID NO: 138363 - RNA, 19 nt, Artificial Sequence
  Description of Artificial Sequence: Synthetic oligonucleotide
aaaaaguauauauauauau

SEQ ID NO: 138364 - RNA, 19 nt, Artificial Sequence
  Description of Artificial Sequence: Synthetic oligonucleotide
uauaaaaugaaugcagauu

SEQ ID NO: 138365 - RNA, 19 nt, Artificial Sequence
  Description of Artificial Sequence: Synthetic oligonucleotide
ugcgaaggucccugcaaau

SEQ ID NO: 138366 - RNA, 19 nt, Artificial Sequence
  Description of Artificial Sequence: Synthetic oligonucleotide
uggauggcuugugaauuug

SEQ ID NO: 138367 - RNA, 19 nt, Artificial Sequence
  Description of Artificial Sequence: Synthetic oligonucleotide
gcucucaaggugcuuaugg

SEQ ID NO: 138368 - RNA, 19 nt, Artificial Sequence
  Description of Artificial Sequence: Synthetic oligonucleotide
gaaagggauccugauugau

SEQ ID NO: 138369 - RNA, 19 nt, Artificial Sequence
  Description of Artificial Sequence: Synthetic oligonucleotide
uugaaauucauguuuucuc

SEQ ID NO: 138370 - RNA, 19 nt, Artificial Sequence
  Description of Artificial Sequence: Synthetic oligonucleotide
caagcuccagauuggcuag

SEQ ID NO: 138371 - RNA, 19 nt, Artificial Sequence
  Description of Artificial Sequence: Synthetic oligonucleotide
gauuucagaucgccaacac

SEQ ID NO: 138372 - RNA, 19 nt, Artificial Sequence
  Description of Artificial Sequence: Synthetic oligonucleotide
cauucgccacugggcaacu

SEQ ID NO: 138373 - RNA, 19 nt, Artificial Sequence
  Description of Artificial Sequence: Synthetic oligonucleotide
uacccuacaaguuuguacu

SEQ ID NO: 138374 - RNA, 19 nt, Artificial Sequence
  Description of Artificial Sequence: Synthetic oligonucleotide
uuucauuuuaauuauuuuc

SEQ ID NO: 138375 - RNA, 19 nt, Artificial Sequence
  Description of Artificial Sequence: Synthetic oligonucleotide
cuaacagaaccgcucccgu

SEQ ID NO: 138376 - RNA, 19 nt, Artificial Sequence
  Description of Artificial Sequence: Synthetic oligonucleotide
ucuccaagccuucaugcac

SEQ ID NO: 138377 - RNA, 19 nt, Artificial Sequence
  Description of Artificial Sequence: Synthetic oligonucleotide
cauauguaccuaaugaguu

SEQ ID NO: 138378 - RNA, 19 nt, Artificial Sequence
  Description of Artificial Sequence: Synthetic oligonucleotide
uuuuauagcaaagaauaua

SEQ ID NO: 138379 - RNA, 19 nt, Artificial Sequence
  Description of Artificial Sequence: Synthetic oligonucleotide
aaauuugcuguugauuuuu

SEQ ID NO: 138380 - RNA, 19 nt, Artificial Sequence
  Description of Artificial Sequence: Synthetic oligonucleotide
uguaugaauuuuuucacaa

SEQ ID NO: 138381 - RNA, 19 nt, Artificial Sequence
  Description of Artificial Sequence: Synthetic oligonucleotide
aaaagauccugaauaagca

SEQ ID NO: 138382 - RNA, 19 nt, Artificial Sequence
  Description of Artificial Sequence: Synthetic oligonucleotide
auuguuuuaugaauuuuac

SEQ ID NO: 138383 - RNA, 19 nt, Artificial Sequence
  Description of Artificial Sequence: Synthetic oligonucleotide
cauuuuuccucaccauuua

SEQ ID NO: 138384 - RNA, 19 nt, Artificial Sequence
  Description of Artificial Sequence: Synthetic oligonucleotide
agcaauuuucugaauggua

SEQ ID NO: 138385 - RNA, 19 nt, Artificial Sequence
  Description of Artificial Sequence: Synthetic oligonucleotide
aauaaugucuaaaucuuuu

SEQ ID NO: 138386 - RNA, 19 nt, Artificial Sequence
  Description of Artificial Sequence: Synthetic oligonucleotide
uuccuuucugaauucuugc

SEQ ID NO: 138387 - RNA, 19 nt, Artificial Sequence
  Description of Artificial Sequence: Synthetic oligonucleotide
cuuguacauuuuuuuuuac

SEQ ID NO: 138388 - RNA, 19 nt, Artificial Sequence
  Description of Artificial Sequence: Synthetic oligonucleotide
ccuuucaaagguuuuuaau

SEQ ID NO: 138389 - RNA, 19 nt, Artificial Sequence
  Description of Artificial Sequence: Synthetic oligonucleotide
uuauuuuuguuuuuauuuu

SEQ ID NO: 138390 - RNA, 19 nt, Artificial Sequence
  Description of Artificial Sequence: Synthetic oligonucleotide
uuguacgaugaguuuucug

SEQ ID NO: 138391 - RNA, 19 nt, Artificial Sequence
  Description of Artificial Sequence: Synthetic oligonucleotide
gcagcguacagaauuguug

SEQ ID NO: 138392 - RNA, 19 nt, Artificial Sequence
  Description of Artificial Sequence: Synthetic oligonucleotide
gcugucagauucuauuuuc

SEQ ID NO: 138393 - RNA, 19 nt, Artificial Sequence
  Description of Artificial Sequence: Synthetic oligonucleotide
cagaaagugagaggaggga

SEQ ID NO: 138394 - RNA, 19 nt, Artificial Sequence
  Description of Artificial Sequence: Synthetic oligonucleotide
accguaggucuuuucggag

SEQ ID NO: 138395 - RNA, 19 nt, Artificial Sequence
  Description of Artificial Sequence: Synthetic oligonucleotide
gugacaccaacgauugugu

SEQ ID NO: 138396 - RNA, 19 nt, Artificial Sequence
  Description of Artificial Sequence: Synthetic oligonucleotide
ucuuuccuggucuguccua

SEQ ID NO: 138397 - RNA, 19 nt, Artificial Sequence
  Description of Artificial Sequence: Synthetic oligonucleotide
aggagcuguauaaagaagc

SEQ ID NO: 138398 - RNA, 19 nt, Artificial Sequence
  Description of Artificial Sequence: Synthetic oligonucleotide
cccaggggcucuuuuuaac

SEQ ID NO: 138399 - RNA, 19 nt, Artificial Sequence
  Description of Artificial Sequence: Synthetic oligonucleotide
cuuucaacacuaguaguau

SEQ ID NO: 138400 - RNA, 19 nt, Artificial Sequence
  Description of Artificial Sequence: Synthetic oligonucleotide
uuacgaggggugguguguu

SEQ ID NO: 138401 - RNA, 19 nt, Artificial Sequence
  Description of Artificial Sequence: Synthetic oligonucleotide
uuuuccccuccguggcaag

SEQ ID NO: 138402 - RNA, 19 nt, Artificial Sequence
  Description of Artificial Sequence: Synthetic oligonucleotide
gggcagggaggguugcuua

SEQ ID NO: 138403 - RNA, 19 nt, Artificial Sequence
  Description of Artificial Sequence: Synthetic oligonucleotide
aggaugcccggccacccug

SEQ ID NO: 138404 - RNA, 19 nt, Artificial Sequence
  Description of Artificial Sequence: Synthetic oligonucleotide
gggaggcuugccagaugcc

SEQ ID NO: 138405 - RNA, 19 nt, Artificial Sequence
  Description of Artificial Sequence: Synthetic oligonucleotide
cgggggcagucagcauuaa

SEQ ID NO: 138406 - RNA, 19 nt, Artificial Sequence
  Description of Artificial Sequence: Synthetic oligonucleotide
augaaacucauguuuaaac

SEQ ID NO: 138407 - RNA, 19 nt, Artificial Sequence
  Description of Artificial Sequence: Synthetic oligonucleotide
cuucucugaccacaucguc

SEQ ID NO: 138408 - RNA, 19 nt, Artificial Sequence
  Description of Artificial Sequence: Synthetic oligonucleotide
caggauagaauucuaacuu

SEQ ID NO: 138409 - RNA, 19 nt, Artificial Sequence
  Description of Artificial Sequence: Synthetic oligonucleotide
ugaguuuuccaaagaccuu

SEQ ID NO: 138410 - RNA, 19 nt, Artificial Sequence
  Description of Artificial Sequence: Synthetic oligonucleotide
uuugagcaugucagcaaug

SEQ ID NO: 138411 - RNA, 19 nt, Artificial Sequence
  Description of Artificial Sequence: Synthetic oligonucleotide
gcauggggcacacgugggg

SEQ ID NO: 138412 - RNA, 19 nt, Artificial Sequence
  Description of Artificial Sequence: Synthetic oligonucleotide
gcucuuuacccacuugggu

SEQ ID NO: 138413 - RNA, 19 nt, Artificial Sequence
  Description of Artificial Sequence: Synthetic oligonucleotide
uuuuuccacugcagccacg

SEQ ID NO: 138414 - RNA, 19 nt, Artificial Sequence
  Description of Artificial Sequence: Synthetic oligonucleotide
guggccagcccuggauuuu

SEQ ID NO: 138415 - RNA, 19 nt, Artificial Sequence
  Description of Artificial Sequence: Synthetic oligonucleotide
uggagccuguggcugcaag

SEQ ID NO: 138416 - RNA, 19 nt, Artificial Sequence
  Description of Artificial Sequence: Synthetic oligonucleotide
ggaacccagggacccuugu

SEQ ID NO: 138417 - RNA, 19 nt, Artificial Sequence
  Description of Artificial Sequence: Synthetic oligonucleotide
uugccuggugaaccugcag

SEQ ID NO: 138418 - RNA, 19 nt, Artificial Sequence
  Description of Artificial Sequence: Synthetic oligonucleotide
gggaggguaugauugccug

SEQ ID NO: 138419 - RNA, 19 nt, Artificial Sequence
  Description of Artificial Sequence: Synthetic oligonucleotide
gaccaggacagccagucuu

SEQ ID NO: 138420 - RNA, 19 nt, Artificial Sequence
  Description of Artificial Sequence: Synthetic oligonucleotide
uuacucuuuuucucuucaa

SEQ ID NO: 138421 - RNA, 19 nt, Artificial Sequence
  Description of Artificial Sequence: Synthetic oligonucleotide
acaguaacugacagucacg

SEQ ID NO: 138422 - RNA, 19 nt, Artificial Sequence
  Description of Artificial Sequence: Synthetic oligonucleotide
guuuuacugguaacuuauu

SEQ ID NO: 138423 - RNA, 19 nt, Artificial Sequence
  Description of Artificial Sequence: Synthetic oligonucleotide
uuuccagcacaugaagcca

SEQ ID NO: 138424 - RNA, 19 nt, Artificial Sequence
  Description of Artificial Sequence: Synthetic oligonucleotide
accaguuucauuccaaagu

SEQ ID NO: 138425 - RNA, 19 nt, Artificial Sequence
  Description of Artificial Sequence: Synthetic oligonucleotide
uguauauuggguucagacu

SEQ ID NO: 138426 - RNA, 19 nt, Artificial Sequence
  Description of Artificial Sequence: Synthetic oligonucleotide
uugggggcagaaguucaga

SEQ ID NO: 138427 - RNA, 19 nt, Artificial Sequence
  Description of Artificial Sequence: Synthetic oligonucleotide
acacaccgugcucaggagg

SEQ ID NO: 138428 - RNA, 19 nt, Artificial Sequence
  Description of Artificial Sequence: Synthetic oligonucleotide
ggacccagagccgaguuuc

SEQ ID NO: 138429 - RNA, 19 nt, Artificial Sequence
  Description of Artificial Sequence: Synthetic oligonucleotide
cggaguuugguaaaguuua

SEQ ID NO: 138430 - RNA, 19 nt, Artificial Sequence
  Description of Artificial Sequence: Synthetic oligonucleotide
acaggguagcuucugaaau

SEQ ID NO: 138431 - RNA, 19 nt, Artificial Sequence
  Description of Artificial Sequence: Synthetic oligonucleotide
uuaacucaaacuuuugacc

SEQ ID NO: 138432 - RNA, 19 nt, Artificial Sequence
  Description of Artificial Sequence: Synthetic oligonucleotide
caaaugagugcagauucuu

SEQ ID NO: 138433 - RNA, 19 nt, Artificial Sequence
  Description of Artificial Sequence: Synthetic oligonucleotide
uggauucacuuggucacug

SEQ ID NO: 138434 - RNA, 19 nt, Artificial Sequence
  Description of Artificial Sequence: Synthetic oligonucleotide
gggcugcugauggucagcu

SEQ ID NO: 138435 - RNA, 19 nt, Artificial Sequence
  Description of Artificial Sequence: Synthetic oligonucleotide
ucugagacagugguuugag

SEQ ID NO: 138436 - RNA, 19 nt, Artificial Sequence
  Description of Artificial Sequence: Synthetic oligonucleotide
gagcaggcagaacggucuu

SEQ ID NO: 138437 - RNA, 19 nt, Artificial Sequence
  Description of Artificial Sequence: Synthetic oligonucleotide
ugggacuuguuugacuuuc

SEQ ID NO: 138438 - RNA, 19 nt, Artificial Sequence
  Description of Artificial Sequence: Synthetic oligonucleotide
ccccucccugguggccacu

SEQ ID NO: 138439 - RNA, 19 nt, Artificial Sequence
  Description of Artificial Sequence: Synthetic oligonucleotide
ucuuugcucugaagcccag

SEQ ID NO: 138440 - RNA, 19 nt, Artificial Sequence
  Description of Artificial Sequence: Synthetic oligonucleotide
gauuggcaagaggagcugg

SEQ ID NO: 138441 - RNA, 19 nt, Artificial Sequence
  Description of Artificial Sequence: Synthetic oligonucleotide
guccauuccccauucaugg

SEQ ID NO: 138442 - RNA, 19 nt, Artificial Sequence
  Description of Artificial Sequence: Synthetic oligonucleotide
gcacagagcaguggcaggg

SEQ ID NO: 138443 - RNA, 19 nt, Artificial Sequence
  Description of Artificial Sequence: Synthetic oligonucleotide
gcccagcuagcaggcucuu

SEQ ID NO: 138444 - RNA, 19 nt, Artificial Sequence
  Description of Artificial Sequence: Synthetic oligonucleotide
ucuggccuccuuggccuca

SEQ ID NO: 138445 - RNA, 19 nt, Artificial Sequence
  Description of Artificial Sequence: Synthetic oligonucleotide
auucucugcauagcccucu

SEQ ID NO: 138446 - RNA, 19 nt, Artificial Sequence
  Description of Artificial Sequence: Synthetic oligonucleotide
uggggauccugccaccugc

SEQ ID NO: 138447 - RNA, 19 nt, Artificial Sequence
  Description of Artificial Sequence: Synthetic oligonucleotide
cccucuuaccccgccgugg

SEQ ID NO: 138448 - RNA, 19 nt, Artificial Sequence
  Description of Artificial Sequence: Synthetic oligonucleotide
gcuuauggggaggaaugca

SEQ ID NO: 138449 - RNA, 19 nt, Artificial Sequence
  Description of Artificial Sequence: Synthetic oligonucleotide
aucaucucacuuuuuuuuu

SEQ ID NO: 138450 - RNA, 19 nt, Artificial Sequence
  Description of Artificial Sequence: Synthetic oligonucleotide
uuuaagcagaugaugggau

SEQ ID NO: 138451 - RNA, 19 nt, Artificial Sequence
  Description of Artificial Sequence: Synthetic oligonucleotide
uaacauggacugcucagug

SEQ ID NO: 138452 - RNA, 19 nt, Artificial Sequence
  Description of Artificial Sequence: Synthetic oligonucleotide
ggccagguuaucagugggg

SEQ ID NO: 138453 - RNA, 19 nt, Artificial Sequence
  Description of Artificial Sequence: Synthetic oligonucleotide
gggacuuaauucuaaucuc

SEQ ID NO: 138454 - RNA, 19 nt, Artificial Sequence
  Description of Artificial Sequence: Synthetic oligonucleotide
cauucaaauggagacgccc

SEQ ID NO: 138455 - RNA, 19 nt, Artificial Sequence
  Description of Artificial Sequence: Synthetic oligonucleotide
cucugcaaaggccuggcag

SEQ ID NO: 138456 - RNA, 19 nt, Artificial Sequence
  Description of Artificial Sequence: Synthetic oligonucleotide
gggggaggcacguuucauc

SEQ ID NO: 138457 - RNA, 19 nt, Artificial Sequence
  Description of Artificial Sequence: Synthetic oligonucleotide
cugucagcucacuccagcu

SEQ ID NO: 138458 - RNA, 19 nt, Artificial Sequence
  Description of Artificial Sequence: Synthetic oligonucleotide
uucacaaaugugcugagag

SEQ ID NO: 138459 - RNA, 19 nt, Artificial Sequence
  Description of Artificial Sequence: Synthetic oligonucleotide
gcauuacuguguagccuuu

SEQ ID NO: 138460 - RNA, 19 nt, Artificial Sequence
  Description of Artificial Sequence: Synthetic oligonucleotide
uucuuugaagacacacucg

SEQ ID NO: 138461 - RNA, 19 nt, Artificial Sequence
  Description of Artificial Sequence: Synthetic oligonucleotide
ggcucuucuccacagcaag

SEQ ID NO: 138462 - RNA, 19 nt, Artificial Sequence
  Description of Artificial Sequence: Synthetic oligonucleotide
gcguccagggcagauggca

SEQ ID NO: 138463 - RNA, 19 nt, Artificial Sequence
  Description of Artificial Sequence: Synthetic oligonucleotide
agaggaucugccucggcgu

SEQ ID NO: 138464 - RNA, 19 nt, Artificial Sequence
  Description of Artificial Sequence: Synthetic oligonucleotide
ucugcaggcgggaccacgu

SEQ ID NO: 138465 - RNA, 19 nt, Artificial Sequence
  Description of Artificial Sequence: Synthetic oligonucleotide
ucagggaggguuccuucau

SEQ ID NO: 138466 - RNA, 19 nt, Artificial Sequence
  Description of Artificial Sequence: Synthetic oligonucleotide
uguguucucccuguggguc

SEQ ID NO: 138467 - RNA, 19 nt, Artificial Sequence
  Description of Artificial Sequence: Synthetic oligonucleotide
ccuuggaccuuuagccuuu

SEQ ID NO: 138468 - RNA, 19 nt, Artificial Sequence
  Description of Artificial Sequence: Synthetic oligonucleotide
uuucuuccuuugcaaaggc

SEQ ID NO: 138469 - RNA, 19 nt, Artificial Sequence
  Description of Artificial Sequence: Synthetic oligonucleotide
ccuugggggcacuggcugg

SEQ ID NO: 138470 - RNA, 19 nt, Artificial Sequence
  Description of Artificial Sequence: Synthetic oligonucleotide
ggagucagcaagcgagcac

SEQ ID NO: 138471 - RNA, 19 nt, Artificial Sequence
  Description of Artificial Sequence: Synthetic oligonucleotide
cuuuauaucccuuugaggg

SEQ ID NO: 138472 - RNA, 19 nt, Artificial Sequence
  Description of Artificial Sequence: Synthetic oligonucleotide
gaaacccugaugacgccac

SEQ ID NO: 138473 - RNA, 19 nt, Artificial Sequence
  Description of Artificial Sequence: Synthetic oligonucleotide
cugggccucuuggcgucug

SEQ ID NO: 138474 - RNA, 19 nt, Artificial Sequence
  Description of Artificial Sequence: Synthetic oligonucleotide
gcccugcccucgcggcuuc

SEQ ID NO: 138475 - RNA, 19 nt, Artificial Sequence
  Description of Artificial Sequence: Synthetic oligonucleotide
cccgccgugccgcagcgug

SEQ ID NO: 138476 - RNA, 19 nt, Artificial Sequence
  Description of Artificial Sequence: Synthetic oligonucleotide
gcccacgugcccacgcccc

SEQ ID NO: 138477 - RNA, 19 nt, Artificial Sequence
  Description of Artificial Sequence: Synthetic oligonucleotide
caccagcaggcggcugucc

SEQ ID NO: 138478 - RNA, 19 nt, Artificial Sequence
  Description of Artificial Sequence: Synthetic oligonucleotide
ccggaggccguggcccgcu

SEQ ID NO: 138479 - RNA, 19 nt, Artificial Sequence
  Description of Artificial Sequence: Synthetic oligonucleotide
ugggacuggccgccccucc

SEQ ID NO: 138480 - RNA, 19 nt, Artificial Sequence
  Description of Artificial Sequence: Synthetic oligonucleotide
cccagcgucccagggcucu

SEQ ID NO: 138481 - RNA, 19 nt, Artificial Sequence
  Description of Artificial Sequence: Synthetic oligonucleotide
ugguucuggagggccacuu

SEQ ID NO: 138482 - RNA, 19 nt, Artificial Sequence
  Description of Artificial Sequence: Synthetic oligonucleotide
uugucaagguguuucaguu

SEQ ID NO: 138483 - RNA, 19 nt, Artificial Sequence
  Description of Artificial Sequence: Synthetic oligonucleotide
uuuucuuuacuucuuuuga

SEQ ID NO: 138484 - RNA, 19 nt, Artificial Sequence
  Description of Artificial Sequence: Synthetic oligonucleotide
aaaaucuguuugcaagggg

SEQ ID NO: 138485 - RNA, 19 nt, Artificial Sequence
  Description of Artificial Sequence: Synthetic oligonucleotide
gaaggaccauuucguaaug

SEQ ID NO: 138486 - RNA, 19 nt, Artificial Sequence
  Description of Artificial Sequence: Synthetic oligonucleotide
ggucugacacaaaagcaag

SEQ ID NO: 138487 - RNA, 19 nt, Artificial Sequence
  Description of Artificial Sequence: Synthetic oligonucleotide
guuugauuuuugcagcacu

SEQ ID NO: 138488 - RNA, 19 nt, Artificial Sequence
  Description of Artificial Sequence: Synthetic oligonucleotide
uagcaauggacuuuguugu

SEQ ID NO: 138489 - RNA, 19 nt, Artificial Sequence
  Description of Artificial Sequence: Synthetic oligonucleotide
uuuuucuuuuugaucagaa

SEQ ID NO: 138490 - RNA, 19 nt, Artificial Sequence
  Description of Artificial Sequence: Synthetic oligonucleotide
acauuccuucuuuacuggu

SEQ ID NO: 138491 - RNA, 19 nt, Artificial Sequence
  Description of Artificial Sequence: Synthetic oligonucleotide
ucacagccacgugcucauu

SEQ ID NO: 138492 - RNA, 19 nt, Artificial Sequence
  Description of Artificial Sequence: Synthetic oligonucleotide
uccauucuucuuuuuguag

SEQ ID NO: 138493 - RNA, 19 nt, Artificial Sequence
  Description of Artificial Sequence: Synthetic oligonucleotide
gacuuugggcccacguguu

SEQ ID NO: 138494 - RNA, 19 nt, Artificial Sequence
  Description of Artificial Sequence: Synthetic oligonucleotide
uuuaugggcauugauacau

SEQ ID NO: 138495 - RNA, 19 nt, Artificial Sequence
  Description of Artificial Sequence: Synthetic oligonucleotide
uauauaaauauauagauau

SEQ ID NO: 138496 - RNA, 19 nt, Artificial Sequence
  Description of Artificial Sequence: Synthetic oligonucleotide
uaaauauauaugaauauau

SEQ ID NO: 138497 - RNA, 19 nt, Artificial Sequence
  Description of Artificial Sequence: Synthetic oligonucleotide
uuuuuuuaaguuuccuaca

SEQ ID NO: 138498 - RNA, 19 nt, Artificial Sequence
  Description of Artificial Sequence: Synthetic oligonucleotide
accuggagguugcauggac

SEQ ID NO: 138499 - RNA, 19 nt, Artificial Sequence
  Description of Artificial Sequence: Synthetic oligonucleotide
cuguacgaccggcaugacu

SEQ ID NO: 138500 - RNA, 19 nt, Artificial Sequence
  Description of Artificial Sequence: Synthetic oligonucleotide
uuuauauuguauacagauu

SEQ ID NO: 138501 - RNA, 19 nt, Artificial Sequence
  Description of Artificial Sequence: Synthetic oligonucleotide
uuugcacgccaaacucggc

SEQ ID NO: 138502 - RNA, 19 nt, Artificial Sequence
  Description of Artificial Sequence: Synthetic oligonucleotide
cagcuuuggggaagaagaa

SEQ ID NO: 138503 - RNA, 19 nt, Artificial Sequence
  Description of Artificial Sequence: Synthetic oligonucleotide
aaaaugccuuucuguuccc

SEQ ID NO: 138504 - RNA, 19 nt, Artificial Sequence
  Description of Artificial Sequence: Synthetic oligonucleotide
ccucucaugacauuugcag

SEQ ID NO: 138505 - RNA, 19 nt, Artificial Sequence
  Description of Artificial Sequence: Synthetic oligonucleotide
gauacaaaagauggaaauu

SEQ ID NO: 138506 - RNA, 19 nt, Artificial Sequence
  Description of Artificial Sequence: Synthetic oligonucleotide
uuuucuguaaaacaaaacc

SEQ ID NO: 138507 - RNA, 19 nt, Artificial Sequence
  Description of Artificial Sequence: Synthetic oligonucleotide
cuugaaggagaggagggcg

SEQ ID NO: 138508 - RNA, 19 nt, Artificial Sequence
  Description of Artificial Sequence: Synthetic oligonucleotide
ggggaaguuugcgucuuau

SEQ ID NO: 138509 - RNA, 19 nt, Artificial Sequence
  Description of Artificial Sequence: Synthetic oligonucleotide
uugaacuuauucuuaagaa

SEQ ID NO: 138510 - RNA, 19 nt, Artificial Sequence
  Description of Artificial Sequence: Synthetic oligonucleotide
aauuguacuuuuuauugua

SEQ ID NO: 138511 - RNA, 19 nt, Artificial Sequence
  Description of Artificial Sequence: Synthetic oligonucleotide
aagaaaaauaaaaaggacu

SEQ ID NO: 138512 - RNA, 19 nt, Artificial Sequence
  Description of Artificial Sequence: Synthetic oligonucleotide
uacuuaaacauuugucaua

SEQ ID NO: 138513 - RNA, 19 nt, Artificial Sequence
  Description of Artificial Sequence: Synthetic oligonucleotide
auuaagaaaaaaaguuuau

SEQ ID NO: 138514 - RNA, 19 nt, Artificial Sequence
  Description of Artificial Sequence: Synthetic oligonucleotide
ucuagcacuugugacauac

SEQ ID NO: 138515 - RNA, 19 nt, Artificial Sequence
  Description of Artificial Sequence: Synthetic oligonucleotide
ccaauaauagaguuuauug

SEQ ID NO: 138516 - RNA, 19 nt, Artificial Sequence
  Description of Artificial Sequence: Synthetic oligonucleotide
guauuuauguggaaacagu

SEQ ID NO: 138517 - RNA, 19 nt, Artificial Sequence
  Description of Artificial Sequence: Synthetic oligonucleotide
uguuuuagggaaacuacuc

SEQ ID NO: 138518 - RNA, 19 nt, Artificial Sequence
  Description of Artificial Sequence: Synthetic oligonucleotide
cagaauucacagugaacug

SEQ ID NO: 138519 - RNA, 19 nt, Artificial Sequence
  Description of Artificial Sequence: Synthetic oligonucleotide
gccugucucucucgaguug

SEQ ID NO: 138520 - RNA, 19 nt, Artificial Sequence
  Description of Artificial Sequence: Synthetic oligonucleotide
gauuuggaggaauuuuguu

SEQ ID NO: 138521 - RNA, 19 nt, Artificial Sequence
  Description of Artificial Sequence: Synthetic oligonucleotide
uuuguuuuguuuuguuugu

SEQ ID NO: 138522 - RNA, 19 nt, Artificial Sequence
  Description of Artificial Sequence: Synthetic oligonucleotide
uuuccuuuuaucuccuucc

SEQ ID NO: 138523 - RNA, 19 nt, Artificial Sequence
  Description of Artificial Sequence: Synthetic oligonucleotide
cacgggccaggcgagcgcc

SEQ ID NO: 138524 - RNA, 19 nt, Artificial Sequence
  Description of Artificial Sequence: Synthetic oligonucleotide
cgcccgcccucacuggccu

SEQ ID NO: 138525 - RNA, 19 nt, Artificial Sequence
  Description of Artificial Sequence: Synthetic oligonucleotide
uugugacgguuuauucuga

SEQ ID NO: 138526 - RNA, 19 nt, Artificial Sequence
  Description of Artificial Sequence: Synthetic oligonucleotide
auugagaacugggcggacu

SEQ ID NO: 138527 - RNA, 19 nt, Artificial Sequence
  Description of Artificial Sequence: Synthetic oligonucleotide
ucgaaagaguccccuuuuc

SEQ ID NO: 138528 - RNA, 19 nt, Artificial Sequence
  Description of Artificial Sequence: Synthetic oligonucleotide
ccgcacagcuguguugacu

SEQ ID NO: 138529 - RNA, 19 nt, Artificial Sequence
  Description of Artificial Sequence: Synthetic oligonucleotide
uuuuuaauuacuuuuaggu

SEQ ID NO: 138530 - RNA, 19 nt, Artificial Sequence
  Description of Artificial Sequence: Synthetic oligonucleotide
ugauguauggcuaagauuu

SEQ ID NO: 138531 - RNA, 19 nt, Artificial Sequence
  Description of Artificial Sequence: Synthetic oligonucleotide
ucacuuuaagcagucguga

SEQ ID NO: 138532 - RNA, 19 nt, Artificial Sequence
  Description of Artificial Sequence: Synthetic oligonucleotide
aacugugcgagcacugugg

SEQ ID NO: 138533 - RNA, 19 nt, Artificial Sequence
  Description of Artificial Sequence: Synthetic oligonucleotide
guuuacaauuauacuuugc

SEQ ID NO: 138534 - RNA, 19 nt, Artificial Sequence
  Description of Artificial Sequence: Synthetic oligonucleotide
caucgaaaggaaaccauuu

SEQ ID NO: 138535 - RNA, 19 nt, Artificial Sequence
  Description of Artificial Sequence: Synthetic oligonucleotide
ucuucauuguaacgaagcu

SEQ ID NO: 138536 - RNA, 19 nt, Artificial Sequence
  Description of Artificial Sequence: Synthetic oligonucleotide
ugagcguguucuuagcucg

SEQ ID NO: 138537 - RNA, 19 nt, Artificial Sequence
  Description of Artificial Sequence: Synthetic oligonucleotide
ggccucacuuugucucugg

SEQ ID NO: 138538 - RNA, 19 nt, Artificial Sequence
  Description of Artificial Sequence: Synthetic oligonucleotide
gcauugauuaaaagucugc

SEQ ID NO: 138539 - RNA, 19 nt, Artificial Sequence
  Description of Artificial Sequence: Synthetic oligonucleotide
cuauugaaagaaaaagaaa

SEQ ID NO: 138540 - RNA, 19 nt, Artificial Sequence
  Description of Artificial Sequence: Synthetic oligonucleotide
agcgaacaguuuuuguuug

SEQ ID NO: 138541 - RNA, 19 nt, Artificial Sequence
  Description of Artificial Sequence: Synthetic oligonucleotide
guuuuuuuugccgugugug

SEQ ID NO: 138542 - RNA, 19 nt, Artificial Sequence
  Description of Artificial Sequence: Synthetic oligonucleotide
gcuccauaguggaggcgcu

SEQ ID NO: 138543 - RNA, 19 nt, Artificial Sequence
  Description of Artificial Sequence: Synthetic oligonucleotide
uauuuuccaauugaugaga

SEQ ID NO: 138544 - RNA, 19 nt, Artificial Sequence
  Description of Artificial Sequence: Synthetic oligonucleotide
aaugacaaacauauauaau

SEQ ID NO: 138545 - RNA, 19 nt, Artificial Sequence
  Description of Artificial Sequence: Synthetic oligonucleotide
ucuaucuaucuaucuaucu

SEQ ID NO: 138546 - RNA, 19 nt, Artificial Sequence
  Description of Artificial Sequence: Synthetic oligonucleotide
uaucuaucuaucuauacag

SEQ ID NO: 138547 - RNA, 19 nt, Artificial Sequence
  Description of Artificial Sequence: Synthetic oligonucleotide
gggggcuugaaccuuacuc

SEQ ID NO: 138548 - RNA, 19 nt, Artificial Sequence
  Description of Artificial Sequence: Synthetic oligonucleotide
cacccaagagcuucuuacg

SEQ ID NO: 138549 - RNA, 19 nt, Artificial Sequence
  Description of Artificial Sequence: Synthetic oligonucleotide
ggaaugugguagaaaacca

SEQ ID NO: 138550 - RNA, 19 nt, Artificial Sequence
  Description of Artificial Sequence: Synthetic oligonucleotide
aaguuguaacgacacugua

SEQ ID NO: 138551 - RNA, 19 nt, Artificial Sequence
  Description of Artificial Sequence: Synthetic oligonucleotide
aaccuaccugaugccuguu

SEQ ID NO: 138552 - RNA, 19 nt, Artificial Sequence
  Description of Artificial Sequence: Synthetic oligonucleotide
ucgcgcccgccgugagcug

SEQ ID NO: 138553 - RNA, 19 nt, Artificial Sequence
  Description of Artificial Sequence: Synthetic oligonucleotide
gcgcacuggccguggccac

SEQ ID NO: 138554 - RNA, 19 nt, Artificial Sequence
  Description of Artificial Sequence: Synthetic oligonucleotide
ccauucaccucuguaauuu

SEQ ID NO: 138555 - RNA, 19 nt, Artificial Sequence
  Description of Artificial Sequence: Synthetic oligonucleotide
uaauccguuucucuuggau

SEQ ID NO: 138556 - RNA, 19 nt, Artificial Sequence
  Description of Artificial Sequence: Synthetic oligonucleotide
uugucuggacgugcccgau

SEQ ID NO: 138557 - RNA, 19 nt, Artificial Sequence
  Description of Artificial Sequence: Synthetic oligonucleotide
ugguucuuucuuuugcuca

SEQ ID NO: 138558 - RNA, 19 nt, Artificial Sequence
  Description of Artificial Sequence: Synthetic oligonucleotide
aguggaguuggagguuuug

SEQ ID NO: 138559 - RNA, 19 nt, Artificial Sequence
  Description of Artificial Sequence: Synthetic oligonucleotide
guguuugguuuucucauuc

SEQ ID NO: 138560 - RNA, 19 nt, Artificial Sequence
  Description of Artificial Sequence: Synthetic oligonucleotide
cuugucuuguuuugugugg

SEQ ID NO: 138561 - RNA, 19 nt, Artificial Sequence
  Description of Artificial Sequence: Synthetic oligonucleotide
gguggauuuucaccgacca

SEQ ID NO: 138562 - RNA, 19 nt, Artificial Sequence
  Description of Artificial Sequence: Synthetic oligonucleotide
aaugauauccucuucugac

SEQ ID NO: 138563 - RNA, 19 nt, Artificial Sequence
  Description of Artificial Sequence: Synthetic oligonucleotide
cggucaccuucuuuccacu

SEQ ID NO: 138564 - RNA, 19 nt, Artificial Sequence
  Description of Artificial Sequence: Synthetic oligonucleotide
uucacuggaguccaguauu

SEQ ID NO: 138565 - RNA, 19 nt, Artificial Sequence
  Description of Artificial Sequence: Synthetic oligonucleotide
ucuguaccacaucacgcaa

SEQ ID NO: 138566 - RNA, 19 nt, Artificial Sequence
  Description of Artificial Sequence: Synthetic oligonucleotide
acguguuaucuuguggugu

SEQ ID NO: 138567 - RNA, 19 nt, Artificial Sequence
  Description of Artificial Sequence: Synthetic oligonucleotide
uaaauaaagacugcguuac

SEQ ID NO: 138568 - RNA, 19 nt, Artificial Sequence
  Description of Artificial Sequence: Synthetic oligonucleotide
uuacuugcccucccaaaaa

SEQ ID NO: 138569 - RNA, 25 nt, Artificial Sequence
  Description of Artificial Sequence: Synthetic oligonucleotide
ggagguuguggggccgccgccgcgg

SEQ ID NO: 138570 - RNA, 25 nt, Artificial Sequence
  Description of Artificial Sequence: Synthetic oligonucleotide
gagcaccguccccgccgccgcccga

SEQ ID NO: 138571 - RNA, 25 nt, Artificial Sequence
  Description of Artificial Sequence: Synthetic oligonucleotide
agcccgagcccgagcccgcgcaccc

SEQ ID NO: 138572 - RNA, 25 nt, Artificial Sequence
  Description of Artificial Sequence: Synthetic oligonucleotide
cgcccgcgccgccgccgccgccgcc

SEQ ID NO: 138573 - RNA, 25 nt, Artificial Sequence
  Description of Artificial Sequence: Synthetic oligonucleotide
ccgaacagccucccagccugggccc

SEQ ID NO: 138574 - RNA, 25 nt, Artificial Sequence
  Description of Artificial Sequence: Synthetic oligonucleotide
cccggcggcgccguggccgcguccc

SEQ ID NO: 138575 - RNA, 25 nt, Artificial Sequence
  Description of Artificial Sequence: Synthetic oligonucleotide
cggcugucgccgcccgagcccgagc

SEQ ID NO: 138576 - RNA, 25 nt, Artificial Sequence
  Description of Artificial Sequence: Synthetic oligonucleotide
cccgcgcgccggcggguggcggcgc

SEQ ID NO: 138577 - RNA, 25 nt, Artificial Sequence
  Description of Artificial Sequence: Synthetic oligonucleotide
caggcugaggagaugcggcgcggag

SEQ ID NO: 138578 - RNA, 25 nt, Artificial Sequence
  Description of Artificial Sequence: Synthetic oligonucleotide
gcgccggagcagggcuagagccggc

SEQ ID NO: 138579 - RNA, 25 nt, Artificial Sequence
  Description of Artificial Sequence: Synthetic oligonucleotide
ccgccgccgcccgccgcgguaagcg

SEQ ID NO: 138580 - RNA, 25 nt, Artificial Sequence
  Description of Artificial Sequence: Synthetic oligonucleotide
gcagccccggcccggcgcccgcggg

SEQ ID NO: 138581 - RNA, 25 nt, Artificial Sequence
  Description of Artificial Sequence: Synthetic oligonucleotide
gccauuguccgccgcccgccccgcg

SEQ ID NO: 138582 - RNA, 25 nt, Artificial Sequence
  Description of Artificial Sequence: Synthetic oligonucleotide
gccccgcgcagccugcaggccuugg

SEQ ID NO: 138583 - RNA, 25 nt, Artificial Sequence
  Description of Artificial Sequence: Synthetic oligonucleotide
gagcccgcggcagguggacgccgcc

SEQ ID NO: 138584 - RNA, 25 nt, Artificial Sequence
  Description of Artificial Sequence: Synthetic oligonucleotide
cgguccacacccgccccgcgcgcgg

SEQ ID NO: 138585 - RNA, 25 nt, Artificial Sequence
  Description of Artificial Sequence: Synthetic oligonucleotide
gccgugggaggcgggggccagcgcu

SEQ ID NO: 138586 - RNA, 25 nt, Artificial Sequence
  Description of Artificial Sequence: Synthetic oligonucleotide
uggccgcgcgccgugggacccgccg

SEQ ID NO: 138587 - RNA, 25 nt, Artificial Sequence
  Description of Artificial Sequence: Synthetic oligonucleotide
gguccccagggccgcccggccccuu

SEQ ID NO: 138588 - RNA, 25 nt, Artificial Sequence
  Description of Artificial Sequence: Synthetic oligonucleotide
ucuggaccuuuccacccgcgccgcg

SEQ ID NO: 138589 - RNA, 25 nt, Artificial Sequence
  Description of Artificial Sequence: Synthetic oligonucleotide
gaggcggcuucgcccgccggggcgg

SEQ ID NO: 138590 - RNA, 25 nt, Artificial Sequence
  Description of Artificial Sequence: Synthetic oligonucleotide
ggggcgcgggggugggcacggcagg

SEQ ID NO: 138591 - RNA, 25 nt, Artificial Sequence
  Description of Artificial Sequence: Synthetic oligonucleotide
gcagcggcgccgucucccggugcgg

SEQ ID NO: 138592 - RNA, 25 nt, Artificial Sequence
  Description of Artificial Sequence: Synthetic oligonucleotide
gggcccgcgccccccgagcagguuc

SEQ ID NO: 138593 - RNA, 25 nt, Artificial Sequence
  Description of Artificial Sequence: Synthetic oligonucleotide
caucugcagaagccagcggacgccu

SEQ ID NO: 138594 - RNA, 25 nt, Artificial Sequence
  Description of Artificial Sequence: Synthetic oligonucleotide
ucuguucaacuuguggguuaccugg

SEQ ID NO: 138595 - RNA, 25 nt, Artificial Sequence
  Description of Artificial Sequence: Synthetic oligonucleotide
gcucaugagaccuugccggcgaggc

SEQ ID NO: 138596 - RNA, 25 nt, Artificial Sequence
  Description of Artificial Sequence: Synthetic oligonucleotide
cucggcgcuugaacgucugugaccc

SEQ ID NO: 138597 - RNA, 25 nt, Artificial Sequence
  Description of Artificial Sequence: Synthetic oligonucleotide
cagcccucaccgucccgguacuugu

SEQ ID NO: 138598 - RNA, 25 nt, Artificial Sequence
  Description of Artificial Sequence: Synthetic oligonucleotide
uauguguuggugggaguuuggagcu

SEQ ID NO: 138599 - RNA, 25 nt, Artificial Sequence
  Description of Artificial Sequence: Synthetic oligonucleotide
ucguuggagcuaucguuuccgugga

SEQ ID NO: 138600 - RNA, 25 nt, Artificial Sequence
  Description of Artificial Sequence: Synthetic oligonucleotide
aaauuuugagccauuucgaaucacu

SEQ ID NO: 138601 - RNA, 25 nt, Artificial Sequence
  Description of Artificial Sequence: Synthetic oligonucleotide
uuaaaggaguggacauugcuagcaa

SEQ ID NO: 138602 - RNA, 25 nt, Artificial Sequence
  Description of Artificial Sequence: Synthetic oligonucleotide
augagcucccaaagccauccagaug

SEQ ID NO: 138603 - RNA, 25 nt, Artificial Sequence
  Description of Artificial Sequence: Synthetic oligonucleotide
ggacuuucuggccgagaccagccag

SEQ ID NO: 138604 - RNA, 25 nt, Artificial Sequence
  Description of Artificial Sequence: Synthetic oligonucleotide
guggagcugcugaauccugcccgcg

SEQ ID NO: 138605 - RNA, 25 nt, Artificial Sequence
  Description of Artificial Sequence: Synthetic oligonucleotide
gugaaccacaugcccagcacggugg

SEQ ID NO: 138606 - RNA, 25 nt, Artificial Sequence
  Description of Artificial Sequence: Synthetic oligonucleotide
gauguggccacggcgcugccucugc

SEQ ID NO: 138607 - RNA, 25 nt, Artificial Sequence
  Description of Artificial Sequence: Synthetic oligonucleotide
caaguggcccccucggcagugccca

SEQ ID NO: 138608 - RNA, 25 nt, Artificial Sequence
  Description of Artificial Sequence: Synthetic oligonucleotide
auggaccugcgccuggaccaccagu

SEQ ID NO: 138609 - RNA, 25 nt, Artificial Sequence
  Description of Artificial Sequence: Synthetic oligonucleotide
uucucacugccuguggcagagccgg

SEQ ID NO: 138610 - RNA, 25 nt, Artificial Sequence
  Description of Artificial Sequence: Synthetic oligonucleotide
gcccugcgggagcagcagcugcagc

SEQ ID NO: 138611 - RNA, 25 nt, Artificial Sequence
  Description of Artificial Sequence: Synthetic oligonucleotide
caggagcuccuggcgcucaagcaga

SEQ ID NO: 138612 - RNA, 25 nt, Artificial Sequence
  Description of Artificial Sequence: Synthetic oligonucleotide
aagcagcagauccagaggcagaucc

SEQ ID NO: 138613 - RNA, 25 nt, Artificial Sequence
  Description of Artificial Sequence: Synthetic oligonucleotide
cucaucgcugaguuccagaggcagc

SEQ ID NO: 138614 - RNA, 25 nt, Artificial Sequence
  Description of Artificial Sequence: Synthetic oligonucleotide
cacgagcagcucucccggcagcacg

SEQ ID NO: 138615 - RNA, 25 nt, Artificial Sequence
  Description of Artificial Sequence: Synthetic oligonucleotide
gaggcgcagcuccacgagcacauca

SEQ ID NO: 138616 - RNA, 25 nt, Artificial Sequence
  Description of Artificial Sequence: Synthetic oligonucleotide
aagcaacaacaggagaugcuggcca

SEQ ID NO: 138617 - RNA, 25 nt, Artificial Sequence
  Description of Artificial Sequence: Synthetic oligonucleotide
augaagcaccagcaggagcugcugg

SEQ ID NO: 138618 - RNA, 25 nt, Artificial Sequence
  Description of Artificial Sequence: Synthetic oligonucleotide
gaacaccagcggaagcuggagaggc

SEQ ID NO: 138619 - RNA, 25 nt, Artificial Sequence
  Description of Artificial Sequence: Synthetic oligonucleotide
caccgccaggagcaggagcuggaga

SEQ ID NO: 138620 - RNA, 25 nt, Artificial Sequence
  Description of Artificial Sequence: Synthetic oligonucleotide
aagcagcaccgggagcagaagcugc

SEQ ID NO: 138621 - RNA, 25 nt, Artificial Sequence
  Description of Artificial Sequence: Synthetic oligonucleotide
cagcagcucaagaacaaggagaagg

SEQ ID NO: 138622 - RNA, 25 nt, Artificial Sequence
  Description of Artificial Sequence: Synthetic oligonucleotide
ggcaaagagagugccguggccagca

SEQ ID NO: 138623 - RNA, 25 nt, Artificial Sequence
  Description of Artificial Sequence: Synthetic oligonucleotide
acagaagugaagaugaaguuacaag

SEQ ID NO: 138624 - RNA, 25 nt, Artificial Sequence
  Description of Artificial Sequence: Synthetic oligonucleotide
gaauuuguccucaauaaaaagaagg

SEQ ID NO: 138625 - RNA, 25 nt, Artificial Sequence
  Description of Artificial Sequence: Synthetic oligonucleotide
gcgcuggcccaccggaaucugaacc

SEQ ID NO: 138626 - RNA, 25 nt, Artificial Sequence
  Description of Artificial Sequence: Synthetic oligonucleotide
cacugcauuuccagcgacccucgcu

SEQ ID NO: 138627 - RNA, 25 nt, Artificial Sequence
  Description of Artificial Sequence: Synthetic oligonucleotide
uacugguacgggaaaacgcagcaca

SEQ ID NO: 138628 - RNA, 25 nt, Artificial Sequence
  Description of Artificial Sequence: Synthetic oligonucleotide
aguucccuugaccagaguucuccac

SEQ ID NO: 138629 - RNA, 25 nt, Artificial Sequence
  Description of Artificial Sequence: Synthetic oligonucleotide
ccccagagcggagugucgaccuccu

SEQ ID NO: 138630 - RNA, 25 nt, Artificial Sequence
  Description of Artificial Sequence: Synthetic oligonucleotide
uauaaccacccgguccugggaaugu

SEQ ID NO: 138631 - RNA, 25 nt, Artificial Sequence
  Description of Artificial Sequence: Synthetic oligonucleotide
uacgacgccaaagaugacuucccuc

SEQ ID NO: 138632 - RNA, 25 nt, Artificial Sequence
  Description of Artificial Sequence: Synthetic oligonucleotide
cuuaggaaaacagcuucugaaccga

SEQ ID NO: 138633 - RNA, 25 nt, Artificial Sequence
  Description of Artificial Sequence: Synthetic oligonucleotide
aaucugaaauuacgguccaggcuaa

SEQ ID NO: 138634 - RNA, 25 nt, Artificial Sequence
  Description of Artificial Sequence: Synthetic oligonucleotide
aagcagaaaguggccgaaagacgga

SEQ ID NO: 138635 - RNA, 25 nt, Artificial Sequence
  Description of Artificial Sequence: Synthetic oligonucleotide
agcagcccccuguuacgcaggaaag

SEQ ID NO: 138636 - RNA, 25 nt, Artificial Sequence
  Description of Artificial Sequence: Synthetic oligonucleotide
gacgggccaguggucacugcucuaa

SEQ ID NO: 138637 - RNA, 25 nt, Artificial Sequence
  Description of Artificial Sequence: Synthetic oligonucleotide
aaaaagcguccguuggaugucacag

SEQ ID NO: 138638 - RNA, 25 nt, Artificial Sequence
  Description of Artificial Sequence: Synthetic oligonucleotide
gacuccgcgugcagcagcgccccag

SEQ ID NO: 138639 - RNA, 25 nt, Artificial Sequence
  Description of Artificial Sequence: Synthetic oligonucleotide
ggcuccggacccagcucacccaaca

SEQ ID NO: 138640 - RNA, 25 nt, Artificial Sequence
  Description of Artificial Sequence: Synthetic oligonucleotide
aacagcuccgggagcgucagcgcgg

SEQ ID NO: 138641 - RNA, 25 nt, Artificial Sequence
  Description of Artificial Sequence: Synthetic oligonucleotide
gagaacgguaucgcgcccgccgucc

SEQ ID NO: 138642 - RNA, 25 nt, Artificial Sequence
  Description of Artificial Sequence: Synthetic oligonucleotide
cccagcaucccggcggagacgaguu

SEQ ID NO: 138643 - RNA, 25 nt, Artificial Sequence
  Description of Artificial Sequence: Synthetic oligonucleotide
uuggcgcacagacuuguggcacgag

SEQ ID NO: 138644 - RNA, 25 nt, Artificial Sequence
  Description of Artificial Sequence: Synthetic oligonucleotide
gaaggcucggccgcuccacuucccc

SEQ ID NO: 138645 - RNA, 25 nt, Artificial Sequence
  Description of Artificial Sequence: Synthetic oligonucleotide
cucuacacaucgccauccuugccca

SEQ ID NO: 138646 - RNA, 25 nt, Artificial Sequence
  Description of Artificial Sequence: Synthetic oligonucleotide
aacaucacgcugggccugccugcca

SEQ ID NO: 138647 - RNA, 25 nt, Artificial Sequence
  Description of Artificial Sequence: Synthetic oligonucleotide
accggccccucugcgggcacggcgg

SEQ ID NO: 138648 - RNA, 25 nt, Artificial Sequence
  Description of Artificial Sequence: Synthetic oligonucleotide
ggccagcaggacgccgagagacuca

SEQ ID NO: 138649 - RNA, 25 nt, Artificial Sequence
  Description of Artificial Sequence: Synthetic oligonucleotide
acccuucccgcccuccagcagaggc

SEQ ID NO: 138650 - RNA, 25 nt, Artificial Sequence
  Description of Artificial Sequence: Synthetic oligonucleotide
cucucccuuuuccccggcacccacc

SEQ ID NO: 138651 - RNA, 25 nt, Artificial Sequence
  Description of Artificial Sequence: Synthetic oligonucleotide
cucacucccuaccugagcaccucgc

SEQ ID NO: 138652 - RNA, 25 nt, Artificial Sequence
  Description of Artificial Sequence: Synthetic oligonucleotide
cccuuggagcgggacggaggggcag

SEQ ID NO: 138653 - RNA, 25 nt, Artificial Sequence
  Description of Artificial Sequence: Synthetic oligonucleotide
gcgcacagcccucuucugcagcaca

SEQ ID NO: 138654 - RNA, 25 nt, Artificial Sequence
  Description of Artificial Sequence: Synthetic oligonucleotide
auggucuuacuggagcagccgccgg

SEQ ID NO: 138655 - RNA, 25 nt, Artificial Sequence
  Description of Artificial Sequence: Synthetic oligonucleotide
gcacaagcaccccucgucacaggcc

SEQ ID NO: 138656 - RNA, 25 nt, Artificial Sequence
  Description of Artificial Sequence: Synthetic oligonucleotide
cugggagcacugccccuccacgcac

SEQ ID NO: 138657 - RNA, 25 nt, Artificial Sequence
  Description of Artificial Sequence: Synthetic oligonucleotide
caguccuugguuggugcagaccggg

SEQ ID NO: 138658 - RNA, 25 nt, Artificial Sequence
  Description of Artificial Sequence: Synthetic oligonucleotide
gugucccccuccauccacaagcugc

SEQ ID NO: 138659 - RNA, 25 nt, Artificial Sequence
  Description of Artificial Sequence: Synthetic oligonucleotide
cggcagcaccgcccacuggggcgga

SEQ ID NO: 138660 - RNA, 25 nt, Artificial Sequence
  Description of Artificial Sequence: Synthetic oligonucleotide
acccagucggccccgcugccccaga

SEQ ID NO: 138661 - RNA, 25 nt, Artificial Sequence
  Description of Artificial Sequence: Synthetic oligonucleotide
aacgcccaggcucugcagcaccugg

SEQ ID NO: 138662 - RNA, 25 nt, Artificial Sequence
  Description of Artificial Sequence: Synthetic oligonucleotide
gucauccagcagcagcaucagcagu

SEQ ID NO: 138663 - RNA, 25 nt, Artificial Sequence
  Description of Artificial Sequence: Synthetic oligonucleotide
uuucuggagaaacacaagcagcagu

SEQ ID NO: 138664 - RNA, 25 nt, Artificial Sequence
  Description of Artificial Sequence: Synthetic oligonucleotide
uuccagcagcagcaacugcagauga

SEQ ID NO: 138665 - RNA, 25 nt, Artificial Sequence
  Description of Artificial Sequence: Synthetic oligonucleotide
aacaagaucauccccaagccaagcg

SEQ ID NO: 138666 - RNA, 25 nt, Artificial Sequence
  Description of Artificial Sequence: Synthetic oligonucleotide
gagccagcccggcagccggagagcc

SEQ ID NO: 138667 - RNA, 25 nt, Artificial Sequence
  Description of Artificial Sequence: Synthetic oligonucleotide
cacccggaggagacggaggaggagc

SEQ ID NO: 138668 - RNA, 25 nt, Artificial Sequence
  Description of Artificial Sequence: Synthetic oligonucleotide
cuccgugagcaccaggcucugcugg

SEQ ID NO: 138669 - RNA, 25 nt, Artificial Sequence
  Description of Artificial Sequence: Synthetic oligonucleotide
gacgagcccuaccuggaccggcugc

SEQ ID NO: 138670 - RNA, 25 nt, Artificial Sequence
  Description of Artificial Sequence: Synthetic oligonucleotide
ccggggcagaaggaggcgcacgcac

SEQ ID NO: 138671 - RNA, 25 nt, Artificial Sequence
  Description of Artificial Sequence: Synthetic oligonucleotide
caggccggcgugcaggugaagcagg

SEQ ID NO: 138672 - RNA, 25 nt, Artificial Sequence
  Description of Artificial Sequence: Synthetic oligonucleotide
gagcccauugagagcgaugaggaag

SEQ ID NO: 138673 - RNA, 25 nt, Artificial Sequence
  Description of Artificial Sequence: Synthetic oligonucleotide
gaggcagagcccccacgggaggugg

SEQ ID NO: 138674 - RNA, 25 nt, Artificial Sequence
  Description of Artificial Sequence: Synthetic oligonucleotide
gagccgggccagcgccagcccagug

SEQ ID NO: 138675 - RNA, 25 nt, Artificial Sequence
  Description of Artificial Sequence: Synthetic oligonucleotide
gagcaggagcugcucuucagacagc

SEQ ID NO: 138676 - RNA, 25 nt, Artificial Sequence
  Description of Artificial Sequence: Synthetic oligonucleotide
caagcccuccugcuggagcagcagc

SEQ ID NO: 138677 - RNA, 25 nt, Artificial Sequence
  Description of Artificial Sequence: Synthetic oligonucleotide
cggauccaccagcugaggaacuacc

SEQ ID NO: 138678 - RNA, 25 nt, Artificial Sequence
  Description of Artificial Sequence: Synthetic oligonucleotide
caggcguccauggaggccgccggca

SEQ ID NO: 138679 - RNA, 25 nt, Artificial Sequence
  Description of Artificial Sequence: Synthetic oligonucleotide
auccccguguccuucggcggccaca

SEQ ID NO: 138680 - RNA, 25 nt, Artificial Sequence
  Description of Artificial Sequence: Synthetic oligonucleotide
aggccucugucccgggcgcaguccu

SEQ ID NO: 138681 - RNA, 25 nt, Artificial Sequence
  Description of Artificial Sequence: Synthetic oligonucleotide
ucacccgcgucugccaccuuccccg

SEQ ID NO: 138682 - RNA, 25 nt, Artificial Sequence
  Description of Artificial Sequence: Synthetic oligonucleotide
gugucugugcaggagccccccacca

SEQ ID NO: 138683 - RNA, 25 nt, Artificial Sequence
  Description of Artificial Sequence: Synthetic oligonucleotide
aagccgagguucacgacaggccucg

SEQ ID NO: 138684 - RNA, 25 nt, Artificial Sequence
  Description of Artificial Sequence: Synthetic oligonucleotide
guguaugacacgcugaugcugaagc

SEQ ID NO: 138685 - RNA, 25 nt, Artificial Sequence
  Description of Artificial Sequence: Synthetic oligonucleotide
caccagugcaccugcgggaguagca

SEQ ID NO: 138686 - RNA, 25 nt, Artificial Sequence
  Description of Artificial Sequence: Synthetic oligonucleotide
agcagccaccccgagcacgccggga

SEQ ID NO: 138687 - RNA, 25 nt, Artificial Sequence
  Description of Artificial Sequence: Synthetic oligonucleotide
aggauccagagcaucuggucccgcc

SEQ ID NO: 138688 - RNA, 25 nt, Artificial Sequence
  Description of Artificial Sequence: Synthetic oligonucleotide
cugcaggagacgggccuccggggca

SEQ ID NO: 138689 - RNA, 25 nt, Artificial Sequence
  Description of Artificial Sequence: Synthetic oligonucleotide
aaaugcgagugcauccgcggacgca

SEQ ID NO: 138690 - RNA, 25 nt, Artificial Sequence
  Description of Artificial Sequence: Synthetic oligonucleotide
aaggccacccuggaggagcuacaga

SEQ ID NO: 138691 - RNA, 25 nt, Artificial Sequence
  Description of Artificial Sequence: Synthetic oligonucleotide
acggugcacucggaagcccacaccc

SEQ ID NO: 138692 - RNA, 25 nt, Artificial Sequence
  Description of Artificial Sequence: Synthetic oligonucleotide
cuccuguauggcacgaacccccuca

SEQ ID NO: 138693 - RNA, 25 nt, Artificial Sequence
  Description of Artificial Sequence: Synthetic oligonucleotide
aaccggcagaaacuggacaguaaga

SEQ ID NO: 138694 - RNA, 25 nt, Artificial Sequence
  Description of Artificial Sequence: Synthetic oligonucleotide
aaacuucuaggcucgcucgccuccg

SEQ ID NO: 138695 - RNA, 25 nt, Artificial Sequence
  Description of Artificial Sequence: Synthetic oligonucleotide
guguucguccggcucccuugcggug

SEQ ID NO: 138696 - RNA, 25 nt, Artificial Sequence
  Description of Artificial Sequence: Synthetic oligonucleotide
gguguugggguggacagugacacca

SEQ ID NO: 138697 - RNA, 25 nt, Artificial Sequence
  Description of Artificial Sequence: Synthetic oligonucleotide
auauggaacgaggugcacucggcgg

SEQ ID NO: 138698 - RNA, 25 nt, Artificial Sequence
  Description of Artificial Sequence: Synthetic oligonucleotide
ggggcagcccgccuggcugugggcu

SEQ ID NO: 138699 - RNA, 25 nt, Artificial Sequence
  Description of Artificial Sequence: Synthetic oligonucleotide
ugcgugguagagcuggucuucaagg

SEQ ID NO: 138700 - RNA, 25 nt, Artificial Sequence
  Description of Artificial Sequence: Synthetic oligonucleotide
guggccacaggggagcugaagaaug

SEQ ID NO: 138701 - RNA, 25 nt, Artificial Sequence
  Description of Artificial Sequence: Synthetic oligonucleotide
ggcuuugcugugguccgccccccug

SEQ ID NO: 138702 - RNA, 25 nt, Artificial Sequence
  Description of Artificial Sequence: Synthetic oligonucleotide
ggacaccaugcggaggagagcacgc

SEQ ID NO: 138703 - RNA, 25 nt, Artificial Sequence
  Description of Artificial Sequence: Synthetic oligonucleotide
cccaugggcuuuugcuacuucaacu

SEQ ID NO: 138704 - RNA, 25 nt, Artificial Sequence
  Description of Artificial Sequence: Synthetic oligonucleotide
uccguggccguggcagccaagcuuc

SEQ ID NO: 138705 - RNA, 25 nt, Artificial Sequence
  Description of Artificial Sequence: Synthetic oligonucleotide
cugcagcagagguugagcgugagca

SEQ ID NO: 138706 - RNA, 25 nt, Artificial Sequence
  Description of Artificial Sequence: Synthetic oligonucleotide
aagauccucaucguggacugggacg

SEQ ID NO: 138707 - RNA, 25 nt, Artificial Sequence
  Description of Artificial Sequence: Synthetic oligonucleotide
gugcaccauggaaacgggacccagc

SEQ ID NO: 138708 - RNA, 25 nt, Artificial Sequence
  Description of Artificial Sequence: Synthetic oligonucleotide
caggcuuucuacagcgaccccagcg

SEQ ID NO: 138709 - RNA, 25 nt, Artificial Sequence
  Description of Artificial Sequence: Synthetic oligonucleotide
guccuguacaugucccuccaccgcu

SEQ ID NO: 138710 - RNA, 25 nt, Artificial Sequence
  Description of Artificial Sequence: Synthetic oligonucleotide
uacgacgaugggaacuucuucccag

SEQ ID NO: 138711 - RNA, 25 nt, Artificial Sequence
  Description of Artificial Sequence: Synthetic oligonucleotide
ggcagcggggcuccugaugaggugg

SEQ ID NO: 138712 - RNA, 25 nt, Artificial Sequence
  Description of Artificial Sequence: Synthetic oligonucleotide
ggcacagggcccggcguggguuuca

SEQ ID NO: 138713 - RNA, 25 nt, Artificial Sequence
  Description of Artificial Sequence: Synthetic oligonucleotide
aacgucaacauggcuuucaccggcg

SEQ ID NO: 138714 - RNA, 25 nt, Artificial Sequence
  Description of Artificial Sequence: Synthetic oligonucleotide
ggccuggacccccccaugggagacg

SEQ ID NO: 138715 - RNA, 25 nt, Artificial Sequence
  Description of Artificial Sequence: Synthetic oligonucleotide
gcugaguacuuggcggccuucagaa

SEQ ID NO: 138716 - RNA, 25 nt, Artificial Sequence
  Description of Artificial Sequence: Synthetic oligonucleotide
acgguggucaugccgaucgccagcg

SEQ ID NO: 138717 - RNA, 25 nt, Artificial Sequence
  Description of Artificial Sequence: Synthetic oligonucleotide
gaguuugccccggauguggugcugg

SEQ ID NO: 138718 - RNA, 25 nt, Artificial Sequence
  Description of Artificial Sequence: Synthetic oligonucleotide
gugucaucaggcuucgaugccgugg

SEQ ID NO: 138719 - RNA, 25 nt, Artificial Sequence
  Description of Artificial Sequence: Synthetic oligonucleotide
gagggccaccccaccccucuugggg

SEQ ID NO: 138720 - RNA, 25 nt, Artificial Sequence
  Description of Artificial Sequence: Synthetic oligonucleotide
ggcuacaaccucuccgccagaugcu

SEQ ID NO: 138721 - RNA, 25 nt, Artificial Sequence
  Description of Artificial Sequence: Synthetic oligonucleotide
uucggguaccugacgaagcagcuga

SEQ ID NO: 138722 - RNA, 25 nt, Artificial Sequence
  Description of Artificial Sequence: Synthetic oligonucleotide
augggccuggcuggcggccggauug

SEQ ID NO: 138723 - RNA, 25 nt, Artificial Sequence
  Description of Artificial Sequence: Synthetic oligonucleotide
guccuggcccucgagggaggccacg

SEQ ID NO: 138724 - RNA, 25 nt, Artificial Sequence
  Description of Artificial Sequence: Synthetic oligonucleotide
gaccugaccgccauuugcgacgccu

SEQ ID NO: 138725 - RNA, 25 nt, Artificial Sequence
  Description of Artificial Sequence: Synthetic oligonucleotide
ucggaagcauguguuucugccuugc

SEQ ID NO: 138726 - RNA, 25 nt, Artificial Sequence
  Description of Artificial Sequence: Synthetic oligonucleotide
cugggaaacgagcuugauccucucc

SEQ ID NO: 138727 - RNA, 25 nt, Artificial Sequence
  Description of Artificial Sequence: Synthetic oligonucleotide
ccagaaaagguuuuacagcaaagac

SEQ ID NO: 138728 - RNA, 25 nt, Artificial Sequence
  Description of Artificial Sequence: Synthetic oligonucleotide
cccaaugcaaacgcuguccguucca

SEQ ID NO: 138729 - RNA, 25 nt, Artificial Sequence
  Description of Artificial Sequence: Synthetic oligonucleotide
auggagaaagucauggagauccaca

SEQ ID NO: 138730 - RNA, 25 nt, Artificial Sequence
  Description of Artificial Sequence: Synthetic oligonucleotide
agcaaguacuggcgcugccugcagc

SEQ ID NO: 138731 - RNA, 25 nt, Artificial Sequence
  Description of Artificial Sequence: Synthetic oligonucleotide
cgcacaaccuccacagcggggcguu

SEQ ID NO: 138732 - RNA, 25 nt, Artificial Sequence
  Description of Artificial Sequence: Synthetic oligonucleotide
ucucugaucgaggcucagacuugcg

SEQ ID NO: 138733 - RNA, 25 nt, Artificial Sequence
  Description of Artificial Sequence: Synthetic oligonucleotide
gagaacgaagaagccgagacgguca

SEQ ID NO: 138734 - RNA, 25 nt, Artificial Sequence
  Description of Artificial Sequence: Synthetic oligonucleotide
accgccauggccucgcuguccgugg

SEQ ID NO: 138735 - RNA, 25 nt, Artificial Sequence
  Description of Artificial Sequence: Synthetic oligonucleotide
ggcgugaagcccgccgaaaagagac

SEQ ID NO: 138736 - RNA, 25 nt, Artificial Sequence
  Description of Artificial Sequence: Synthetic oligonucleotide
ccagaugaggagcccauggaagagg

SEQ ID NO: 138737 - RNA, 25 nt, Artificial Sequence
  Description of Artificial Sequence: Synthetic oligonucleotide
gagccgccccuguagcacucccucg

SEQ ID NO: 138738 - RNA, 25 nt, Artificial Sequence
  Description of Artificial Sequence: Synthetic oligonucleotide
gaagcugcuguucucuugucugucu

SEQ ID NO: 138739 - RNA, 25 nt, Artificial Sequence
  Description of Artificial Sequence: Synthetic oligonucleotide
ugucucugucuugaagcucagccaa

SEQ ID NO: 138740 - RNA, 25 nt, Artificial Sequence
  Description of Artificial Sequence: Synthetic oligonucleotide
agaaacuuucccgugucacgccugc

SEQ ID NO: 138741 - RNA, 25 nt, Artificial Sequence
  Description of Artificial Sequence: Synthetic oligonucleotide
cgucccaccguggggcucucuugga

SEQ ID NO: 138742 - RNA, 25 nt, Artificial Sequence
  Description of Artificial Sequence: Synthetic oligonucleotide
agcacccagggacacccagcgugca

SEQ ID NO: 138743 - RNA, 25 nt, Artificial Sequence
  Description of Artificial Sequence: Synthetic oligonucleotide
aacagccacgggaagccuuucugcc

SEQ ID NO: 138744 - RNA, 25 nt, Artificial Sequence
  Description of Artificial Sequence: Synthetic oligonucleotide
cgcccaggcccacaggucucgagac

SEQ ID NO: 138745 - RNA, 25 nt, Artificial Sequence
  Description of Artificial Sequence: Synthetic oligonucleotide
cgcacaugcacgccugggcguggca

SEQ ID NO: 138746 - RNA, 25 nt, Artificial Sequence
  Description of Artificial Sequence: Synthetic oligonucleotide
agccucacagggaacacgggacaga

SEQ ID NO: 138747 - RNA, 25 nt, Artificial Sequence
  Description of Artificial Sequence: Synthetic oligonucleotide
acgccggcgacgcgcagacacacgg

SEQ ID NO: 138748 - RNA, 25 nt, Artificial Sequence
  Description of Artificial Sequence: Synthetic oligonucleotide
gacacgcggaagccaagcacacucu

SEQ ID NO: 138749 - RNA, 25 nt, Artificial Sequence
  Description of Artificial Sequence: Synthetic oligonucleotide
uggcgggucccgcaagggacgccgu

SEQ ID NO: 138750 - RNA, 25 nt, Artificial Sequence
  Description of Artificial Sequence: Synthetic oligonucleotide
uggaagaaaggagccuguggcaaca

SEQ ID NO: 138751 - RNA, 25 nt, Artificial Sequence
  Description of Artificial Sequence: Synthetic oligonucleotide
aggcggccgagcugccgaauucagu

SEQ ID NO: 138752 - RNA, 25 nt, Artificial Sequence
  Description of Artificial Sequence: Synthetic oligonucleotide
uugacacgaggcacagaaaacaaau

SEQ ID NO: 138753 - RNA, 25 nt, Artificial Sequence
  Description of Artificial Sequence: Synthetic oligonucleotide
uaucaaagaucuaauaauacaaaac

SEQ ID NO: 138754 - RNA, 25 nt, Artificial Sequence
  Description of Artificial Sequence: Synthetic oligonucleotide
caaacuugauuaaaacuggugcuua

SEQ ID NO: 138755 - RNA, 25 nt, Artificial Sequence
  Description of Artificial Sequence: Synthetic oligonucleotide
aaaguuuauuacccacaacuccaca

SEQ ID NO: 138756 - RNA, 25 nt, Artificial Sequence
  Description of Artificial Sequence: Synthetic oligonucleotide
agucucuguguaaaccacucgacuc

SEQ ID NO: 138757 - RNA, 25 nt, Artificial Sequence
  Description of Artificial Sequence: Synthetic oligonucleotide
caucuuguagcuuauuuuuuuuuaa

SEQ ID NO: 138758 - RNA, 25 nt, Artificial Sequence
  Description of Artificial Sequence: Synthetic oligonucleotide
aagaggacguuuucuacggcugugg

SEQ ID NO: 138759 - RNA, 25 nt, Artificial Sequence
  Description of Artificial Sequence: Synthetic oligonucleotide
gcccgccucugugaaccauagcggu

SEQ ID NO: 138760 - RNA, 25 nt, Artificial Sequence
  Description of Artificial Sequence: Synthetic oligonucleotide
ugugcggcggggggucugcacccgg

SEQ ID NO: 138761 - RNA, 25 nt, Artificial Sequence
  Description of Artificial Sequence: Synthetic oligonucleotide
ggugggggacagagggaccuuuaaa

SEQ ID NO: 138762 - RNA, 25 nt, Artificial Sequence
  Description of Artificial Sequence: Synthetic oligonucleotide
agaaaacaaaacuggacagaaacag

SEQ ID NO: 138763 - RNA, 25 nt, Artificial Sequence
  Description of Artificial Sequence: Synthetic oligonucleotide
ggaaugugagcugggggagcuggcu

SEQ ID NO: 138764 - RNA, 25 nt, Artificial Sequence
  Description of Artificial Sequence: Synthetic oligonucleotide
uugaguuucucaaaagccaucggaa

SEQ ID NO: 138765 - RNA, 25 nt, Artificial Sequence
  Description of Artificial Sequence: Synthetic oligonucleotide
agaugcgaguuugugccuuuuuuuu

SEQ ID NO: 138766 - RNA, 25 nt, Artificial Sequence
  Description of Artificial Sequence: Synthetic oligonucleotide
uuauugcucugguggauuuuugugg

SEQ ID NO: 138767 - RNA, 25 nt, Artificial Sequence
  Description of Artificial Sequence: Synthetic oligonucleotide
gcuggguuuucugaagucugaggaa

SEQ ID NO: 138768 - RNA, 25 nt, Artificial Sequence
  Description of Artificial Sequence: Synthetic oligonucleotide
acaaugccuuaagaaaaaacaaaca

SEQ ID NO: 138769 - RNA, 25 nt, Artificial Sequence
  Description of Artificial Sequence: Synthetic oligonucleotide
agcaggaaucggugggacaguuucc

SEQ ID NO: 138770 - RNA, 25 nt, Artificial Sequence
  Description of Artificial Sequence: Synthetic oligonucleotide
cuguggccagccgagccuggcagug

SEQ ID NO: 138771 - RNA, 25 nt, Artificial Sequence
  Description of Artificial Sequence: Synthetic oligonucleotide
gcuggcaccgcgagcuggccugacg

SEQ ID NO: 138772 - RNA, 25 nt, Artificial Sequence
  Description of Artificial Sequence: Synthetic oligonucleotide
gccucaagcacgggcaccagccguc

SEQ ID NO: 138773 - RNA, 25 nt, Artificial Sequence
  Description of Artificial Sequence: Synthetic oligonucleotide
caucuccggggccaggggcugcagc

SEQ ID NO: 138774 - RNA, 25 nt, Artificial Sequence
  Description of Artificial Sequence: Synthetic oligonucleotide
cccggcggucccuguuuugcuuuau

SEQ ID NO: 138775 - RNA, 25 nt, Artificial Sequence
  Description of Artificial Sequence: Synthetic oligonucleotide
uugcuguuuaagaaaaauggaggua

SEQ ID NO: 138776 - RNA, 25 nt, Artificial Sequence
  Description of Artificial Sequence: Synthetic oligonucleotide
aguuccaaaaaaguggcaaaucccg

SEQ ID NO: 138777 - RNA, 25 nt, Artificial Sequence
  Description of Artificial Sequence: Synthetic oligonucleotide
guuggagguuuugaaguccaacaaa

SEQ ID NO: 138778 - RNA, 25 nt, Artificial Sequence
  Description of Artificial Sequence: Synthetic oligonucleotide
auuuuaaacgaauccaaaguguucu

SEQ ID NO: 138779 - RNA, 25 nt, Artificial Sequence
  Description of Artificial Sequence: Synthetic oligonucleotide
ucacacgucacauacgauugagcau

SEQ ID NO: 138780 - RNA, 25 nt, Artificial Sequence
  Description of Artificial Sequence: Synthetic oligonucleotide
ucuccaucuggucgugaagcaugug

SEQ ID NO: 138781 - RNA, 25 nt, Artificial Sequence
  Description of Artificial Sequence: Synthetic oligonucleotide
gguaggcacacuugcaguguuacga

SEQ ID NO: 138782 - RNA, 25 nt, Artificial Sequence
  Description of Artificial Sequence: Synthetic oligonucleotide
aucggaaugcuuuuuauuaaaagca

SEQ ID NO: 138783 - RNA, 25 nt, Artificial Sequence
  Description of Artificial Sequence: Synthetic oligonucleotide
aaguagcaugaaguauugcuuaaau

SEQ ID NO: 138784 - RNA, 25 nt, Artificial Sequence
  Description of Artificial Sequence: Synthetic oligonucleotide
uuuuagguauaaauaaauauauaua

SEQ ID NO: 138785 - RNA, 25 nt, Artificial Sequence
  Description of Artificial Sequence: Synthetic oligonucleotide
auguauaauauauauuccaauguau

SEQ ID NO: 138786 - RNA, 25 nt, Artificial Sequence
  Description of Artificial Sequence: Synthetic oligonucleotide
uuccaagcuaagaaacuuacuugau

SEQ ID NO: 138787 - RNA, 25 nt, Artificial Sequence
  Description of Artificial Sequence: Synthetic oligonucleotide
uucuuaugaaaucuugauaaaauau

SEQ ID NO: 138788 - RNA, 25 nt, Artificial Sequence
  Description of Artificial Sequence: Synthetic oligonucleotide
uuuauaaugcauuuauagaaaaagu

SEQ ID NO: 138789 - RNA, 25 nt, Artificial Sequence
  Description of Artificial Sequence: Synthetic oligonucleotide
uauauauauauauauaaaaugaaug

SEQ ID NO: 138790 - RNA, 25 nt, Artificial Sequence
  Description of Artificial Sequence: Synthetic oligonucleotide
gcagauugcgaaggucccugcaaau

SEQ ID NO: 138791 - RNA, 25 nt, Artificial Sequence
  Description of Artificial Sequence: Synthetic oligonucleotide
uggauggcuugugaauuugcucuca

SEQ ID NO: 138792 - RNA, 25 nt, Artificial Sequence
  Description of Artificial Sequence: Synthetic oligonucleotide
aaggugcuuauggaaagggauccug

SEQ ID NO: 138793 - RNA, 25 nt, Artificial Sequence
  Description of Artificial Sequence: Synthetic oligonucleotide
gauugauugaaauucauguuuucuc

SEQ ID NO: 138794 - RNA, 25 nt, Artificial Sequence
  Description of Artificial Sequence: Synthetic oligonucleotide
caagcuccagauuggcuagauuuca

SEQ ID NO: 138795 - RNA, 25 nt, Artificial Sequence
  Description of Artificial Sequence: Synthetic oligonucleotide
agaucgccaacacauucgccacugg

SEQ ID NO: 138796 - RNA, 25 nt, Artificial Sequence
  Description of Artificial Sequence: Synthetic oligonucleotide
ggcaacuacccuacaaguuuguacu

SEQ ID NO: 138797 - RNA, 25 nt, Artificial Sequence
  Description of Artificial Sequence: Synthetic oligonucleotide
uuucauuuuaauuauuuucuaacag

SEQ ID NO: 138798 - RNA, 25 nt, Artificial Sequence
  Description of Artificial Sequence: Synthetic oligonucleotide
gaaccgcucccgucuccaagccuuc

SEQ ID NO: 138799 - RNA, 25 nt, Artificial Sequence
  Description of Artificial Sequence: Synthetic oligonucleotide
caugcacauauguaccuaaugaguu

SEQ ID NO: 138800 - RNA, 25 nt, Artificial Sequence
  Description of Artificial Sequence: Synthetic oligonucleotide
uuuuauagcaaagaauauaaauuug

SEQ ID NO: 138801 - RNA, 25 nt, Artificial Sequence
  Description of Artificial Sequence: Synthetic oligonucleotide
gcuguugauuuuuguaugaauuuuu

SEQ ID NO: 138802 - RNA, 25 nt, Artificial Sequence
  Description of Artificial Sequence: Synthetic oligonucleotide
uucacaaaaagauccugaauaagca

SEQ ID NO: 138803 - RNA, 25 nt, Artificial Sequence
  Description of Artificial Sequence: Synthetic oligonucleotide
auuguuuuaugaauuuuacauuuuu

SEQ ID NO: 138804 - RNA, 25 nt, Artificial Sequence
  Description of Artificial Sequence: Synthetic oligonucleotide
uccucaccauuuagcaauuuucuga

SEQ ID NO: 138805 - RNA, 25 nt, Artificial Sequence
  Description of Artificial Sequence: Synthetic oligonucleotide
aaugguaauaaugucuaaaucuuuu

SEQ ID NO: 138806 - RNA, 25 nt, Artificial Sequence
  Description of Artificial Sequence: Synthetic oligonucleotide
uuccuuucugaauucuugcuuguac

SEQ ID NO: 138807 - RNA, 25 nt, Artificial Sequence
  Description of Artificial Sequence: Synthetic oligonucleotide
cauuuuuuuuuaccuuucaaagguu

SEQ ID NO: 138808 - RNA, 25 nt, Artificial Sequence
  Description of Artificial Sequence: Synthetic oligonucleotide
uuuuaauuauuuuuguuuuuauuuu

SEQ ID NO: 138809 - RNA, 25 nt, Artificial Sequence
  Description of Artificial Sequence: Synthetic oligonucleotide
uuguacgaugaguuuucugcagcgu

SEQ ID NO: 138810 - RNA, 25 nt, Artificial Sequence
  Description of Artificial Sequence: Synthetic oligonucleotide
uacagaauuguugcugucagauucu

SEQ ID NO: 138811 - RNA, 25 nt, Artificial Sequence
  Description of Artificial Sequence: Synthetic oligonucleotide
uauuuucagaaagugagaggaggga

SEQ ID NO: 138812 - RNA, 25 nt, Artificial Sequence
  Description of Artificial Sequence: Synthetic oligonucleotide
accguaggucuuuucggagugacac

SEQ ID NO: 138813 - RNA, 25 nt, Artificial Sequence
  Description of Artificial Sequence: Synthetic oligonucleotide
ccaacgauugugucuuuccuggucu

SEQ ID NO: 138814 - RNA, 25 nt, Artificial Sequence
  Description of Artificial Sequence: Synthetic oligonucleotide
uguccuaggagcuguauaaagaagc

SEQ ID NO: 138815 - RNA, 25 nt, Artificial Sequence
  Description of Artificial Sequence: Synthetic oligonucleotide
cccaggggcucuuuuuaacuuucaa

SEQ ID NO: 138816 - RNA, 25 nt, Artificial Sequence
  Description of Artificial Sequence: Synthetic oligonucleotide
acacuaguaguauuacgaggggugg

SEQ ID NO: 138817 - RNA, 25 nt, Artificial Sequence
  Description of Artificial Sequence: Synthetic oligonucleotide
guguguuuuuccccuccguggcaag

SEQ ID NO: 138818 - RNA, 25 nt, Artificial Sequence
  Description of Artificial Sequence: Synthetic oligonucleotide
gggcagggaggguugcuuaggaugc

SEQ ID NO: 138819 - RNA, 25 nt, Artificial Sequence
  Description of Artificial Sequence: Synthetic oligonucleotide
cccggccacccugggaggcuugcca

SEQ ID NO: 138820 - RNA, 25 nt, Artificial Sequence
  Description of Artificial Sequence: Synthetic oligonucleotide
agaugccgggggcagucagcauuaa

SEQ ID NO: 138821 - RNA, 25 nt, Artificial Sequence
  Description of Artificial Sequence: Synthetic oligonucleotide
augaaacucauguuuaaacuucucu

SEQ ID NO: 138822 - RNA, 25 nt, Artificial Sequence
  Description of Artificial Sequence: Synthetic oligonucleotide
ugaccacaucgucaggauagaauuc

SEQ ID NO: 138823 - RNA, 25 nt, Artificial Sequence
  Description of Artificial Sequence: Synthetic oligonucleotide
cuaacuugaguuuuccaaagaccuu

SEQ ID NO: 138824 - RNA, 25 nt, Artificial Sequence
  Description of Artificial Sequence: Synthetic oligonucleotide
uuugagcaugucagcaaugcauggg

SEQ ID NO: 138825 - RNA, 25 nt, Artificial Sequence
  Description of Artificial Sequence: Synthetic oligonucleotide
ggcacacguggggcucuuuacccac

SEQ ID NO: 138826 - RNA, 25 nt, Artificial Sequence
  Description of Artificial Sequence: Synthetic oligonucleotide
cuuggguuuuuccacugcagccacg

SEQ ID NO: 138827 - RNA, 25 nt, Artificial Sequence
  Description of Artificial Sequence: Synthetic oligonucleotide
guggccagcccuggauuuuggagcc

SEQ ID NO: 138828 - RNA, 25 nt, Artificial Sequence
  Description of Artificial Sequence: Synthetic oligonucleotide
cuguggcugcaaggaacccagggac

SEQ ID NO: 138829 - RNA, 25 nt, Artificial Sequence
  Description of Artificial Sequence: Synthetic oligonucleotide
cccuuguugccuggugaaccugcag

SEQ ID NO: 138830 - RNA, 25 nt, Artificial Sequence
  Description of Artificial Sequence: Synthetic oligonucleotide
gggaggguaugauugccugaccagg

SEQ ID NO: 138831 - RNA, 25 nt, Artificial Sequence
  Description of Artificial Sequence: Synthetic oligonucleotide
gacagccagucuuuacucuuuuucu

SEQ ID NO: 138832 - RNA, 25 nt, Artificial Sequence
  Description of Artificial Sequence: Synthetic oligonucleotide
ucuucaacaguaacugacagucacg

SEQ ID NO: 138833 - RNA, 25 nt, Artificial Sequence
  Description of Artificial Sequence: Synthetic oligonucleotide
guuuuacugguaacuuauuuuccag

SEQ ID NO: 138834 - RNA, 25 nt, Artificial Sequence
  Description of Artificial Sequence: Synthetic oligonucleotide
gcacaugaagccaccaguuucauuc

SEQ ID NO: 138835 - RNA, 25 nt, Artificial Sequence
  Description of Artificial Sequence: Synthetic oligonucleotide
ccaaaguguauauuggguucagacu

SEQ ID NO: 138836 - RNA, 25 nt, Artificial Sequence
  Description of Artificial Sequence: Synthetic oligonucleotide
uugggggcagaaguucagacacacc

SEQ ID NO: 138837 - RNA, 25 nt, Artificial Sequence
  Description of Artificial Sequence: Synthetic oligonucleotide
cgugcucaggagggacccagagccg

SEQ ID NO: 138838 - RNA, 25 nt, Artificial Sequence
  Description of Artificial Sequence: Synthetic oligonucleotide
gaguuucggaguuugguaaaguuua

SEQ ID NO: 138839 - RNA, 25 nt, Artificial Sequence
  Description of Artificial Sequence: Synthetic oligonucleotide
acaggguagcuucugaaauuaacuc

SEQ ID NO: 138840 - RNA, 25 nt, Artificial Sequence
  Description of Artificial Sequence: Synthetic oligonucleotide
caaacuuuugaccaaaugagugcag

SEQ ID NO: 138841 - RNA, 25 nt, Artificial Sequence
  Description of Artificial Sequence: Synthetic oligonucleotide
gauucuuggauucacuuggucacug

SEQ ID NO: 138842 - RNA, 25 nt, Artificial Sequence
  Description of Artificial Sequence: Synthetic oligonucleotide
gggcugcugauggucagcucugaga

SEQ ID NO: 138843 - RNA, 25 nt, Artificial Sequence
  Description of Artificial Sequence: Synthetic oligonucleotide
acagugguuugagagcaggcagaac

SEQ ID NO: 138844 - RNA, 25 nt, Artificial Sequence
  Description of Artificial Sequence: Synthetic oligonucleotide
cggucuugggacuuguuugacuuuc

SEQ ID NO: 138845 - RNA, 25 nt, Artificial Sequence
  Description of Artificial Sequence: Synthetic oligonucleotide
ccccucccugguggccacucuuugc

SEQ ID NO: 138846 - RNA, 25 nt, Artificial Sequence
  Description of Artificial Sequence: Synthetic oligonucleotide
cucugaagcccagauuggcaagagg

SEQ ID NO: 138847 - RNA, 25 nt, Artificial Sequence
  Description of Artificial Sequence: Synthetic oligonucleotide
gagcugguccauuccccauucaugg

SEQ ID NO: 138848 - RNA, 25 nt, Artificial Sequence
  Description of Artificial Sequence: Synthetic oligonucleotide
gcacagagcaguggcagggcccagc

SEQ ID NO: 138849 - RNA, 25 nt, Artificial Sequence
  Description of Artificial Sequence: Synthetic oligonucleotide
cuagcaggcucuucuggccuccuug

SEQ ID NO: 138850 - RNA, 25 nt, Artificial Sequence
  Description of Artificial Sequence: Synthetic oligonucleotide
ggccucauucucugcauagcccucu

SEQ ID NO: 138851 - RNA, 25 nt, Artificial Sequence
  Description of Artificial Sequence: Synthetic oligonucleotide
uggggauccugccaccugcccucuu

SEQ ID NO: 138852 - RNA, 25 nt, Artificial Sequence
  Description of Artificial Sequence: Synthetic oligonucleotide
uaccccgccguggcuuauggggagg

SEQ ID NO: 138853 - RNA, 25 nt, Artificial Sequence
  Description of Artificial Sequence: Synthetic oligonucleotide
gaaugcaucaucucacuuuuuuuuu

SEQ ID NO: 138854 - RNA, 25 nt, Artificial Sequence
  Description of Artificial Sequence: Synthetic oligonucleotide
uuuaagcagaugaugggauaacaug

SEQ ID NO: 138855 - RNA, 25 nt, Artificial Sequence
  Description of Artificial Sequence: Synthetic oligonucleotide
ggacugcucaguggccagguuauca

SEQ ID NO: 138856 - RNA, 25 nt, Artificial Sequence
  Description of Artificial Sequence: Synthetic oligonucleotide
aguggggggacuuaauucuaaucuc

SEQ ID NO: 138857 - RNA, 25 nt, Artificial Sequence
  Description of Artificial Sequence: Synthetic oligonucleotide
cauucaaauggagacgcccucugca

SEQ ID NO: 138858 - RNA, 25 nt, Artificial Sequence
  Description of Artificial Sequence: Synthetic oligonucleotide
aaaggccuggcagggggaggcacgu

SEQ ID NO: 138859 - RNA, 25 nt, Artificial Sequence
  Description of Artificial Sequence: Synthetic oligonucleotide
uuucaucugucagcucacuccagcu

SEQ ID NO: 138860 - RNA, 25 nt, Artificial Sequence
  Description of Artificial Sequence: Synthetic oligonucleotide
uucacaaaugugcugagagcauuac

SEQ ID NO: 138861 - RNA, 25 nt, Artificial Sequence
  Description of Artificial Sequence: Synthetic oligonucleotide
cuguguagccuuuucuuugaagaca

SEQ ID NO: 138862 - RNA, 25 nt, Artificial Sequence
  Description of Artificial Sequence: Synthetic oligonucleotide
acacucggcucuucuccacagcaag

SEQ ID NO: 138863 - RNA, 25 nt, Artificial Sequence
  Description of Artificial Sequence: Synthetic oligonucleotide
gcguccagggcagauggcagaggau

SEQ ID NO: 138864 - RNA, 25 nt, Artificial Sequence
  Description of Artificial Sequence: Synthetic oligonucleotide
ucugccucggcgucugcaggcggga

SEQ ID NO: 138865 - RNA, 25 nt, Artificial Sequence
  Description of Artificial Sequence: Synthetic oligonucleotide
accacgucagggaggguuccuucau

SEQ ID NO: 138866 - RNA, 25 nt, Artificial Sequence
  Description of Artificial Sequence: Synthetic oligonucleotide
uguguucucccuguggguccuugga

SEQ ID NO: 138867 - RNA, 25 nt, Artificial Sequence
  Description of Artificial Sequence: Synthetic oligonucleotide
accuuuagccuuuuucuuccuuugc

SEQ ID NO: 138868 - RNA, 25 nt, Artificial Sequence
  Description of Artificial Sequence: Synthetic oligonucleotide
caaaggccuugggggcacuggcugg

SEQ ID NO: 138869 - RNA, 25 nt, Artificial Sequence
  Description of Artificial Sequence: Synthetic oligonucleotide
ggagucagcaagcgagcacuuuaua

SEQ ID NO: 138870 - RNA, 25 nt, Artificial Sequence
  Description of Artificial Sequence: Synthetic oligonucleotide
aucccuuugagggaaacccugauga

SEQ ID NO: 138871 - RNA, 25 nt, Artificial Sequence
  Description of Artificial Sequence: Synthetic oligonucleotide
acgccacugggccucuuggcgucug

SEQ ID NO: 138872 - RNA, 25 nt, Artificial Sequence
  Description of Artificial Sequence: Synthetic oligonucleotide
gcccugcccucgcggcuucccgccg

SEQ ID NO: 138873 - RNA, 25 nt, Artificial Sequence
  Description of Artificial Sequence: Synthetic oligonucleotide
gugccgcagcgugcccacgugccca

SEQ ID NO: 138874 - RNA, 25 nt, Artificial Sequence
  Description of Artificial Sequence: Synthetic oligonucleotide
acgccccaccagcaggcggcugucc

SEQ ID NO: 138875 - RNA, 25 nt, Artificial Sequence
  Description of Artificial Sequence: Synthetic oligonucleotide
ccggaggccguggcccgcugggacu

SEQ ID NO: 138876 - RNA, 25 nt, Artificial Sequence
  Description of Artificial Sequence: Synthetic oligonucleotide
uggccgccccuccccagcgucccag

SEQ ID NO: 138877 - RNA, 25 nt, Artificial Sequence
  Description of Artificial Sequence: Synthetic oligonucleotide
gggcucugguucuggagggccacuu

SEQ ID NO: 138878 - RNA, 25 nt, Artificial Sequence
  Description of Artificial Sequence: Synthetic oligonucleotide
uugucaagguguuucaguuuuucuu

SEQ ID NO: 138879 - RNA, 25 nt, Artificial Sequence
  Description of Artificial Sequence: Synthetic oligonucleotide
uuacuucuuuugaaaaucuguuugc

SEQ ID NO: 138880 - RNA, 25 nt, Artificial Sequence
  Description of Artificial Sequence: Synthetic oligonucleotide
caaggggaaggaccauuucguaaug

SEQ ID NO: 138881 - RNA, 25 nt, Artificial Sequence
  Description of Artificial Sequence: Synthetic oligonucleotide
ggucugacacaaaagcaaguuugau

SEQ ID NO: 138882 - RNA, 25 nt, Artificial Sequence
  Description of Artificial Sequence: Synthetic oligonucleotide
uuuuugcagcacuagcaauggacuu

SEQ ID NO: 138883 - RNA, 25 nt, Artificial Sequence
  Description of Artificial Sequence: Synthetic oligonucleotide
uuguuguuuuucuuuuugaucagaa

SEQ ID NO: 138884 - RNA, 25 nt, Artificial Sequence
  Description of Artificial Sequence: Synthetic oligonucleotide
acauuccuucuuuacuggucacagc

SEQ ID NO: 138885 - RNA, 25 nt, Artificial Sequence
  Description of Artificial Sequence: Synthetic oligonucleotide
ccacgugcucauuccauucuucuuu

SEQ ID NO: 138886 - RNA, 25 nt, Artificial Sequence
  Description of Artificial Sequence: Synthetic oligonucleotide
uuuguagacuuugggcccacguguu

SEQ ID NO: 138887 - RNA, 25 nt, Artificial Sequence
  Description of Artificial Sequence: Synthetic oligonucleotide
uuuaugggcauugauacauauauaa

SEQ ID NO: 138888 - RNA, 25 nt, Artificial Sequence
  Description of Artificial Sequence: Synthetic oligonucleotide
aauauauagauauaaauauauauga

SEQ ID NO: 138889 - RNA, 25 nt, Artificial Sequence
  Description of Artificial Sequence: Synthetic oligonucleotide
aauauauuuuuuuaaguuuccuaca

SEQ ID NO: 138890 - RNA, 25 nt, Artificial Sequence
  Description of Artificial Sequence: Synthetic oligonucleotide
accuggagguugcauggacuguacg

SEQ ID NO: 138891 - RNA, 25 nt, Artificial Sequence
  Description of Artificial Sequence: Synthetic oligonucleotide
gaccggcaugacuuuauauuguaua

SEQ ID NO: 138892 - RNA, 25 nt, Artificial Sequence
  Description of Artificial Sequence: Synthetic oligonucleotide
acagauuuugcacgccaaacucggc

SEQ ID NO: 138893 - RNA, 25 nt, Artificial Sequence
  Description of Artificial Sequence: Synthetic oligonucleotide
cagcuuuggggaagaagaaaaaugc

SEQ ID NO: 138894 - RNA, 25 nt, Artificial Sequence
  Description of Artificial Sequence: Synthetic oligonucleotide
ccuuucuguuccccucucaugacau

SEQ ID NO: 138895 - RNA, 25 nt, Artificial Sequence
  Description of Artificial Sequence: Synthetic oligonucleotide
uuugcagauacaaaagauggaaauu

SEQ ID NO: 138896 - RNA, 25 nt, Artificial Sequence
  Description of Artificial Sequence: Synthetic oligonucleotide
uuuucuguaaaacaaaaccuugaag

SEQ ID NO: 138897 - RNA, 25 nt, Artificial Sequence
  Description of Artificial Sequence: Synthetic oligonucleotide
ggagaggagggcggggaaguuugcg

SEQ ID NO: 138898 - RNA, 25 nt, Artificial Sequence
  Description of Artificial Sequence: Synthetic oligonucleotide
gucuuauugaacuuauucuuaagaa

SEQ ID NO: 138899 - RNA, 25 nt, Artificial Sequence
  Description of Artificial Sequence: Synthetic oligonucleotide
aauuguacuuuuuauuguaagaaaa

SEQ ID NO: 138900 - RNA, 25 nt, Artificial Sequence
  Description of Artificial Sequence: Synthetic oligonucleotide
aauaaaaaggacuacuuaaacauuu

SEQ ID NO: 138901 - RNA, 25 nt, Artificial Sequence
  Description of Artificial Sequence: Synthetic oligonucleotide
ugucauauuaagaaaaaaaguuuau

SEQ ID NO: 138902 - RNA, 25 nt, Artificial Sequence
  Description of Artificial Sequence: Synthetic oligonucleotide
ucuagcacuugugacauaccaauaa

SEQ ID NO: 138903 - RNA, 25 nt, Artificial Sequence
  Description of Artificial Sequence: Synthetic oligonucleotide
auagaguuuauuguauuuaugugga

SEQ ID NO: 138904 - RNA, 25 nt, Artificial Sequence
  Description of Artificial Sequence: Synthetic oligonucleotide
aaacaguguuuuagggaaacuacuc

SEQ ID NO: 138905 - RNA, 25 nt, Artificial Sequence
  Description of Artificial Sequence: Synthetic oligonucleotide
cagaauucacagugaacugccuguc

SEQ ID NO: 138906 - RNA, 25 nt, Artificial Sequence
  Description of Artificial Sequence: Synthetic oligonucleotide
cucucucgaguugauuuggaggaau

SEQ ID NO: 138907 - RNA, 25 nt, Artificial Sequence
  Description of Artificial Sequence: Synthetic oligonucleotide
uuuuguuuuguuuuguuuuguuugu

SEQ ID NO: 138908 - RNA, 25 nt, Artificial Sequence
  Description of Artificial Sequence: Synthetic oligonucleotide
uuuccuuuuaucuccuuccacgggc

SEQ ID NO: 138909 - RNA, 25 nt, Artificial Sequence
  Description of Artificial Sequence: Synthetic oligonucleotide
ccaggcgagcgccgcccgcccucac

SEQ ID NO: 138910 - RNA, 25 nt, Artificial Sequence
  Description of Artificial Sequence: Synthetic oligonucleotide
cuggccuugugacgguuuauucuga

SEQ ID NO: 138911 - RNA, 25 nt, Artificial Sequence
  Description of Artificial Sequence: Synthetic oligonucleotide
auugagaacugggcggacucgaaag

SEQ ID NO: 138912 - RNA, 25 nt, Artificial Sequence
  Description of Artificial Sequence: Synthetic oligonucleotide
gaguccccuuuuccgcacagcugug

SEQ ID NO: 138913 - RNA, 25 nt, Artificial Sequence
  Description of Artificial Sequence: Synthetic oligonucleotide
guugacuuuuuaauuacuuuuaggu

SEQ ID NO: 138914 - RNA, 25 nt, Artificial Sequence
  Description of Artificial Sequence: Synthetic oligonucleotide
ugauguauggcuaagauuucacuuu

SEQ ID NO: 138915 - RNA, 25 nt, Artificial Sequence
  Description of Artificial Sequence: Synthetic oligonucleotide
uaagcagucgugaacugugcgagca

SEQ ID NO: 138916 - RNA, 25 nt, Artificial Sequence
  Description of Artificial Sequence: Synthetic oligonucleotide
acugugguuuacaauuauacuuugc

SEQ ID NO: 138917 - RNA, 25 nt, Artificial Sequence
  Description of Artificial Sequence: Synthetic oligonucleotide
caucgaaaggaaaccauuucuucau

SEQ ID NO: 138918 - RNA, 25 nt, Artificial Sequence
  Description of Artificial Sequence: Synthetic oligonucleotide
uuguaacgaagcugagcguguucuu

SEQ ID NO: 138919 - RNA, 25 nt, Artificial Sequence
  Description of Artificial Sequence: Synthetic oligonucleotide
uagcucggccucacuuugucucugg

SEQ ID NO: 138920 - RNA, 25 nt, Artificial Sequence
  Description of Artificial Sequence: Synthetic oligonucleotide
gcauugauuaaaagucugcuauuga

SEQ ID NO: 138921 - RNA, 25 nt, Artificial Sequence
  Description of Artificial Sequence: Synthetic oligonucleotide
aaagaaaaagaaagcgaacaguuuu

SEQ ID NO: 138922 - RNA, 25 nt, Artificial Sequence
  Description of Artificial Sequence: Synthetic oligonucleotide
uuguuuguuuuuuuugccgugugug

SEQ ID NO: 138923 - RNA, 25 nt, Artificial Sequence
  Description of Artificial Sequence: Synthetic oligonucleotide
gcuccauaguggaggcgcuauuuuc

SEQ ID NO: 138924 - RNA, 25 nt, Artificial Sequence
  Description of Artificial Sequence: Synthetic oligonucleotide
ccaauugaugagaaugacaaacaua

SEQ ID NO: 138925 - RNA, 25 nt, Artificial Sequence
  Description of Artificial Sequence: Synthetic oligonucleotide
auauaaucuaucuaucuaucuaucu

SEQ ID NO: 138926 - RNA, 25 nt, Artificial Sequence
  Description of Artificial Sequence: Synthetic oligonucleotide
uaucuaucuaucuauacagggggcu

SEQ ID NO: 138927 - RNA, 25 nt, Artificial Sequence
  Description of Artificial Sequence: Synthetic oligonucleotide
uugaaccuuacucacccaagagcuu

SEQ ID NO: 138928 - RNA, 25 nt, Artificial Sequence
  Description of Artificial Sequence: Synthetic oligonucleotide
ucuuacggaaugugguagaaaacca

SEQ ID NO: 138929 - RNA, 25 nt, Artificial Sequence
  Description of Artificial Sequence: Synthetic oligonucleotide
aaguuguaacgacacuguaaccuac

SEQ ID NO: 138930 - RNA, 25 nt, Artificial Sequence
  Description of Artificial Sequence: Synthetic oligonucleotide
ccugaugccuguucgcgcccgccgu

SEQ ID NO: 138931 - RNA, 25 nt, Artificial Sequence
  Description of Artificial Sequence: Synthetic oligonucleotide
ugagcugcgcacuggccguggccac

SEQ ID NO: 138932 - RNA, 25 nt, Artificial Sequence
  Description of Artificial Sequence: Synthetic oligonucleotide
ccauucaccucuguaauuuaauccg

SEQ ID NO: 138933 - RNA, 25 nt, Artificial Sequence
  Description of Artificial Sequence: Synthetic oligonucleotide
guuucucuuggauugucuggacgug

SEQ ID NO: 138934 - RNA, 25 nt, Artificial Sequence
  Description of Artificial Sequence: Synthetic oligonucleotide
gcccgaugguucuuucuuuugcuca

SEQ ID NO: 138935 - RNA, 25 nt, Artificial Sequence
  Description of Artificial Sequence: Synthetic oligonucleotide
aguggaguuggagguuuuguguuug

SEQ ID NO: 138936 - RNA, 25 nt, Artificial Sequence
  Description of Artificial Sequence: Synthetic oligonucleotide
gguuuucucauucuugucuuguuuu

SEQ ID NO: 138937 - RNA, 25 nt, Artificial Sequence
  Description of Artificial Sequence: Synthetic oligonucleotide
uguguggguggauuuucaccgacca

SEQ ID NO: 138938 - RNA, 25 nt, Artificial Sequence
  Description of Artificial Sequence: Synthetic oligonucleotide
aaugauauccucuucugacggucac

SEQ ID NO: 138939 - RNA, 25 nt, Artificial Sequence
  Description of Artificial Sequence: Synthetic oligonucleotide
ccuucuuuccacuucacuggagucc

SEQ ID NO: 138940 - RNA, 25 nt, Artificial Sequence
  Description of Artificial Sequence: Synthetic oligonucleotide
caguauucuguaccacaucacgcaa

SEQ ID NO: 138941 - RNA, 25 nt, Artificial Sequence
  Description of Artificial Sequence: Synthetic oligonucleotide
acguguuaucuugugguguaaauaa

SEQ ID NO: 138942 - RNA, 25 nt, Artificial Sequence
  Description of Artificial Sequence: Synthetic oligonucleotide
aagacugcguuacuugcccucccaa

SEQ ID NO: 138943 - RNA, 25 nt, Artificial Sequence
  Description of Artificial Sequence: Synthetic oligonucleotide
acugcguuacuugcccucccaaaaa

SEQ ID NO: 138944 - RNA, 5324 nt, Homo sapiens
cgaauguuguuguugguggcggcggcgagcggagccggaggagccgccgcaaagauggaggagccgucgaggaggugcugccgccgcugccgccgccgcugcugccgccgccgcccgcgaagccggagcucgagccgcagcggggaugccguucugagugccugacugccucgccccgaaggauggccucggaugggcauuagaggcacggcggccccgggcucccgucccguccgucugucuguuaucgucugucucucuugacaucaccgcagcuccacccccucccgucccagcccccaacgccagcuuccugcaggcccagagccggcaugaacucucccaacgagucggaugggaugucaggucgggaaccauccuuggaaauccugccgcggacuucucugcacagcaucccugugacaguggaggugaagccggugcugccaagagccaugcccaguuccaugggggguggggguggaggcagccccagcccuguggagcuacggggggcucuggugggcucuguggaccccacacugcgggagcagcaacugcagcaggagcuccuggcgcucaagcagcagcagcagcugcagaagcagcuccuguucgcugaguuccagaaacagcaugaccaccugacaaggcagcaugagguccagcugcagaagcaccucaagcagcagcaggagaugcuggcagccaagcagcagcaggagaugcuggcagccaagcggcagcaggagcuggagcagcagcggcagcgggagcagcagcggcaggaagagcuggagaagcagcggcuggagcagcagcugcucauccugcggaacaaggagaagagcaaagagagugccauugccagcacugagguaaagcugaggcuccaggaauuccucuugucgaagucaaaggagcccacaccaggcggccucaaccauucccucccacagcaccccaaaugcuggggagcccaccaugcuucuuuggaccagaguuccccuccccagagcggccccccugggacgccucccuccuacaaacugccuuugccugggcccuacgacagucgagacgacuucccccuccgcaaaacagccucugaacccaacuugaaagugcguucaaggcuaaaacagaagguggcugagcggagaagcaguccccuccugcgucgcaaggaugggacuguuauuagcaccuuuaagaagagagcuguugagaucacaggugccgggccuggggcgucguccguguguaacagcgcacccggcuccggccccagcucucccaacagcucccacagcaccaucgcugagaauggcuuuacuggcucaguccccaacauccccacugagaugcucccucagcaccgagcccucccucuggacagcucccccaaccaguucagccucuacacgucuccuucucugcccaacaucucccuagggcugcaggccacggucacugucaccaacucacaccucacugccuccccgaagcugucgacacagcaggaggccgagaggcaggcccuccagucccugcggcaggguggcacgcugaccggcaaguucaugagcacauccucuauuccuggcugccugcugggcguggcacuggagggcgacgggagcccccacgggcaugccucccugcugcagcaugugcuguugcuggagcaggcccggcagcagagcacccucauugcugugccacuccacgggcaguccccacuagugacgggugaacguguggccaccagcaugcggacgguaggcaagcucccgcggcaucggccccugagccgcacucaguccucaccgcugccgcagaguccccaggcccugcagcagcuggucaugcaacaacagcaccagcaguuccuggagaagcagaagcagcagcagcuacagcugggcaagauccucaccaagacaggggagcugcccaggcagcccaccacccacccugaggagacagaggaggagcugacggagcagcaggaggucuugcugggggagggagcccugaccaugccccgggagggcuccacagagagugagagcacacaggaagaccuggaggaggaggacgaggaagacgauggggaggaggaggaggauugcauccagguuaaggacgaggagggcgagaguggugcugaggaggggcccgacuuggaggagccuggugcuggauacaaaaaacuguucucagaugcccagccgcugcagccuuugcagguguaccaggcgccccucagccuggccacugugccccaccaggcccugggccguacccaguccuccccugcugccccugggggcaugaagagccccccagaccagcccgucaagcaccucuucaccacagguguggucuacgacacguucaugcuaaagcaccagugcaugugcgggaacacacacgugcacccugagcaugcuggccggauccagagcaucuggucccggcugcaggagacaggccugcuuagcaagugcgagcggauccgaggucgcaaagccacgcuagaugagauccagacagugcacucugaauaccacacccugcucuaugggaccaguccccucaaccggcagaagcuagacagcaagaaguugcucggccccaucagccagaagauguaugcugugcugccuugugggggcaucgggguggacagugacaccguguggaaugagaugcacuccuccagugcugugcgcauggcagugggcugccugcuggagcuggccuucaagguggcugcaggagagcucaagaauggauuugccaucauccggcccccaggacaccacgccgaggaauccacagccaugggauucugcuucuucaacucuguagccaucaccgcaaaacuccuacagcagaaguugaacgugggcaagguccucaucguggacugggacauucaccauggcaauggcacccagcaggcguucuacaaugaccccucugugcucuacaucucucugcaucgcuaugacaacgggaacuucuuuccaggcucuggggcuccugaagagguugguggaggaccaggcgugggguacaaugugaacguggcauggacaggagguguggacccccccauuggagacguggaguaccuuacagccuucaggacaguggugaugcccauugcccacgaguucucaccugaugugguccuagucuccgccggguuugaugcuguugaaggacaucugucuccucuggguggcuacucugucaccgccagauguuuuggccacuugaccaggcagcugaugacccuggcagggggccggguggugcuggcccuggagggaggccaugacuugaccgccaucugugaugccucugaggcuugugucucggcucugcucaguguagagcugcagcccuuggaugaggcagucuugcagcaaaagcccaacaucaacgcaguggccacgcuagagaaagucaucgagauccagagcaaacacuggagcugugugcagaaguucgccgcuggucugggccggucccugcgagaggcccaagcaggugagaccgaggaggccgagacugugagcgccauggccuugcugucggugggggccgagcaggcccaggcugcggcagcccgggaacacagccccaggccggcagaggagcccauggagcaggagccugcccugugacgccccggcccccaucccucugggcuucaccauugugauuuuguuuauuuuuucuauuaaaaacaaaaagucacacauucaacaaggugugccgugugggucucucagccuugccccuccugcuccucuacgcugccucaggcccccagcccuguggcuuccaccucagcucuagaagccugcucccucugcagggggugguggugucuucccagcccugucccaugugucccuccccccauuuuccugcauucugucuguccuuuuccuccuuggagccugggccagcucaaggugggcacgggggcccagacaguacucuccaguucuggggccccccgagugaggagggaacgggaagucggugccuugguuucagcugauuuggggggaaaugccuuaauuucacucuccucccuucuccagccucaggggaggaucuggaggauccacuacugucuuuaagaugcagaguggaggggaggugggcacccacccugcgauucuccacccuuuccccuucuuucguccucaccaucucugcagaccccucuccuccuccuuccucuuggucucagcacugaugggaggcuggugcccaagcuguggccugcagucugugaggagggcugucuugccucacacuccucacagccuacuuccccuuccccggggcugagagggugaaaguguguggggaaggagaggacugguuuccuggguucucaggggccaggaggaguaacagaaccaggucugcuccccaccuuacucggauggccucccugccccucugcuggcacagccugggcaaggggagaagguggucccugcagaggggcuccaggcuggugagagccccccugcugucaggaccagauuuucccagccauccagcaugcugcggggagaaggggcagaggcucaccucccuccuggggccuuuuguuuuggauccuggggauggugagaauggagguucuagaagggguaaggccagaacccagggauccaggagucggcucucagcuggagcuuccauaccuucugggcucccuuugcugaccaccagcccaagggagcuaagaccaggagggggcugggcgcugucccuucucuuucccaggagcccugccaggggcugugggccuacaaggcuuccaggggaugccauccagccuguaggaaaccaaagaugggaaguggcuccuagggggcugacucuuccuuccuccuccuccccaguaccacauauacuuucucuccuucuaucuccagggccccaccaaucuguuuacauauuuauuauccuaugggggccugagcaggauugagggagccaggggaggggcaggagucccagcaccaucgguucauagugugcuuguguguuuguuuuagauccuccugggggauggggauggggccaggcucaguguacuaggccucucugugcugagccccaggcucccggccccuuacccacucucucccuguggcuggucugguucucauguaaacccacuccuugcuuugucucccuggauauggauuucaguuaaguauuuuguaacccguuacacuguguguccuuguguaaauaaacuuguuucuggcagugcc

SEQ ID NO: 138945 - RNA, 5327 nt, Homo sapiens
cgaauguuguuguugguggcggcggcgagcggagccggaggagccgccgcaaagauggaggagccgucgaggaggugcugccgccgcugccgccgccgcugcugccgccgccgcccgcgaagccggagcucgagccgcagcggggaugccguucugagugccugacugccucgccccgaaggauggccucggaugggcauuagaggcacggcggccccgggcucccgucccguccgucugucuguuaucgucugucucucuugacaucaccgcagcuccacccccucccgucccagcccccaacgccagcuuccugcaggcccagagccggcaugaacucucccaacgagucggcagaugggaugucaggucgggaaccauccuuggaaauccugccgcggacuucucugcacagcaucccugugacaguggaggugaagccggugcugccaagagccaugcccaguuccaugggggguggggguggaggcagccccagcccuguggagcuacggggggcucuggugggcucuguggaccccacacugcgggagcagcaacugcagcaggagcuccuggcgcucaagcagcagcagcagcugcagaagcagcuccuguucgcugaguuccagaaacagcaugaccaccugacaaggcagcaugagguccagcugcagaagcaccucaagcagcagcaggagaugcuggcagccaagcagcagcaggagaugcuggcagccaagcggcagcaggagcuggagcagcagcggcagcgggagcagcagcggcaggaagagcuggagaagcagcggcuggagcagcagcugcucauccugcggaacaaggagaagagcaaagagagugccauugccagcacugagguaaagcugaggcuccaggaauuccucuugucgaagucaaaggagcccacaccaggcggccucaaccauucccucccacagcaccccaaaugcuggggagcccaccaugcuucuuuggaccagaguuccccuccccagagcggccccccugggacgccucccuccuacaaacugccuuugccugggcccuacgacagucgagacgacuucccccuccgcaaaacagccucugaacccaacuugaaagugcguucaaggcuaaaacagaagguggcugagcggagaagcaguccccuccugcgucgcaaggaugggacuguuauuagcaccuuuaagaagagagcuguugagaucacaggugccgggccuggggcgucguccguguguaacagcgcacccggcuccggccccagcucucccaacagcucccacagcaccaucgcugagaauggcuuuacuggcucaguccccaacauccccacugagaugcucccucagcaccgagcccucccucuggacagcucccccaaccaguucagccucuacacgucuccuucucugcccaacaucucccuagggcugcaggccacggucacugucaccaacucacaccucacugccuccccgaagcugucgacacagcaggaggccgagaggcaggcccuccagucccugcggcaggguggcacgcugaccggcaaguucaugagcacauccucuauuccuggcugccugcugggcguggcacuggagggcgacgggagcccccacgggcaugccucccugcugcagcaugugcuguugcuggagcaggcccggcagcagagcacccucauugcugugccacuccacgggcaguccccacuagugacgggugaacguguggccaccagcaugcggacgguaggcaagcucccgcggcaucggccccugagccgcacucaguccucaccgcugccgcagaguccccaggcccugcagcagcuggucaugcaacaacagcaccagcaguuccuggagaagcagaagcagcagcagcuacagcugggcaagauccucaccaagacaggggagcugcccaggcagcccaccacccacccugaggagacagaggaggagcugacggagcagcaggaggucuugcugggggagggagcccugaccaugccccgggagggcuccacagagagugagagcacacaggaagaccuggaggaggaggacgaggaagacgauggggaggaggaggaggauugcauccagguuaaggacgaggagggcgagaguggugcugaggaggggcccgacuuggaggagccuggugcuggauacaaaaaacuguucucagaugcccagccgcugcagccuuugcagguguaccaggcgccccucagccuggccacugugccccaccaggcccugggccguacccaguccuccccugcugccccugggggcaugaagagccccccagaccagcccgucaagcaccucuucaccacagguguggucuacgacacguucaugcuaaagcaccagugcaugugcgggaacacacacgugcacccugagcaugcuggccggauccagagcaucuggucccggcugcaggagacaggccugcuuagcaagugcgagcggauccgaggucgcaaagccacgcuagaugagauccagacagugcacucugaauaccacacccugcucuaugggaccaguccccucaaccggcagaagcuagacagcaagaaguugcucggccccaucagccagaagauguaugcugugcugccuugugggggcaucgggguggacagugacaccguguggaaugagaugcacuccuccagugcugugcgcauggcagugggcugccugcuggagcuggccuucaagguggcugcaggagagcucaagaauggauuugccaucauccggcccccaggacaccacgccgaggaauccacagccaugggauucugcuucuucaacucuguagccaucaccgcaaaacuccuacagcagaaguugaacgugggcaagguccucaucguggacugggacauucaccauggcaauggcacccagcaggcguucuacaaugaccccucugugcucuacaucucucugcaucgcuaugacaacgggaacuucuuuccaggcucuggggcuccugaagagguugguggaggaccaggcgugggguacaaugugaacguggcauggacaggagguguggacccccccauuggagacguggaguaccuuacagccuucaggacaguggugaugcccauugcccacgaguucucaccugaugugguccuagucuccgccggguuugaugcuguugaaggacaucugucuccucuggguggcuacucugucaccgccagauguuuuggccacuugaccaggcagcugaugacccuggcagggggccggguggugcuggcccuggagggaggccaugacuugaccgccaucugugaugccucugaggcuugugucucggcucugcucaguguagagcugcagcccuuggaugaggcagucuugcagcaaaagcccaacaucaacgcaguggccacgcuagagaaagucaucgagauccagagcaaacacuggagcugugugcagaaguucgccgcuggucugggccggucccugcgagaggcccaagcaggugagaccgaggaggccgagacugugagcgccauggccuugcugucggugggggccgagcaggcccaggcugcggcagcccgggaacacagccccaggccggcagaggagcccauggagcaggagccugcccugugacgccccggcccccaucccucugggcuucaccauugugauuuuguuuauuuuuucuauuaaaaacaaaaagucacacauucaacaaggugugccgugugggucucucagccuugccccuccugcuccucuacgcugccucaggcccccagcccuguggcuuccaccucagcucuagaagccugcucccucugcagggggugguggugucuucccagcccugucccaugugucccuccccccauuuuccugcauucugucuguccuuuuccuccuuggagccugggccagcucaaggugggcacgggggcccagacaguacucuccaguucuggggccccccgagugaggagggaacgggaagucggugccuugguuucagcugauuuggggggaaaugccuuaauuucacucuccucccuucuccagccucaggggaggaucuggaggauccacuacugucuuuaagaugcagaguggaggggaggugggcacccacccugcgauucuccacccuuuccccuucuuucguccucaccaucucugcagaccccucuccuccuccuuccucuuggucucagcacugaugggaggcuggugcccaagcuguggccugcagucugugaggagggcugucuugccucacacuccucacagccuacuuccccuuccccggggcugagagggugaaaguguguggggaaggagaggacugguuuccuggguucucaggggccaggaggaguaacagaaccaggucugcuccccaccuuacucggauggccucccugccccucugcuggcacagccugggcaaggggagaagguggucccugcagaggggcuccaggcuggugagagccccccugcugucaggaccagauuuucccagccauccagcaugcugcggggagaaggggcagaggcucaccucccuccuggggccuuuuguuuuggauccuggggauggugagaauggagguucuagaagggguaaggccagaacccagggauccaggagucggcucucagcuggagcuuccauaccuucugggcucccuuugcugaccaccagcccaagggagcuaagaccaggagggggcugggcgcugucccuucucuuucccaggagcccugccaggggcugugggccuacaaggcuuccaggggaugccauccagccuguaggaaaccaaagaugggaaguggcuccuagggggcugacucuuccuuccuccuccuccccaguaccacauauacuuucucuccuucuaucuccagggccccaccaaucuguuuacauauuuauuauccuaugggggccugagcaggauugagggagccaggggaggggcaggagucccagcaccaucgguucauagugugcuuguguguuuguuuuagauccuccugggggauggggauggggccaggcucaguguacuaggccucucugugcugagccccaggcucccggccccuuacccacucucucccuguggcuggucugguucucauguaaacccacuccuugcuuugucucccuggauauggauuucaguuaaguauuuuguaacccguuacacuguguguccuuguguaaauaaacuuguuucuggcagugcc

SEQ ID NO: 138946 - RNA, 19 nt, Artificial Sequence
  Description of Artificial Sequence: Synthetic oligonucleotide
cgaauguuguuguuggugg

SEQ ID NO: 138947 - RNA, 19 nt, Artificial Sequence
  Description of Artificial Sequence: Synthetic oligonucleotide
gcggcggcgagcggagccg

SEQ ID NO: 138948 - RNA, 19 nt, Artificial Sequence
  Description of Artificial Sequence: Synthetic oligonucleotide
ggaggagccgccgcaaaga

SEQ ID NO: 138949 - RNA, 19 nt, Artificial Sequence
  Description of Artificial Sequence: Synthetic oligonucleotide
auggaggagccgucgagga

SEQ ID NO: 138950 - RNA, 19 nt, Artificial Sequence
  Description of Artificial Sequence: Synthetic oligonucleotide
aggugcugccgccgcugcc

SEQ ID NO: 138951 - RNA, 19 nt, Artificial Sequence
  Description of Artificial Sequence: Synthetic oligonucleotide
cgccgccgcugcugccgcc

SEQ ID NO: 138952 - RNA, 19 nt, Artificial Sequence
  Description of Artificial Sequence: Synthetic oligonucleotide
cgccgcccgcgaagccgga

SEQ ID NO: 138953 - RNA, 19 nt, Artificial Sequence
  Description of Artificial Sequence: Synthetic oligonucleotide
agcucgagccgcagcgggg

SEQ ID NO: 138954 - RNA, 19 nt, Artificial Sequence
  Description of Artificial Sequence: Synthetic oligonucleotide
gaugccguucugagugccu

SEQ ID NO: 138955 - RNA, 19 nt, Artificial Sequence
  Description of Artificial Sequence: Synthetic oligonucleotide
ugacugccucgccccgaag

SEQ ID NO: 138956 - RNA, 19 nt, Artificial Sequence
  Description of Artificial Sequence: Synthetic oligonucleotide
ggauggccucggaugggca

SEQ ID NO: 138957 - RNA, 19 nt, Artificial Sequence
  Description of Artificial Sequence: Synthetic oligonucleotide
auuagaggcacggcggccc

SEQ ID NO: 138958 - RNA, 19 nt, Artificial Sequence
  Description of Artificial Sequence: Synthetic oligonucleotide
ccgggcucccgucccgucc

SEQ ID NO: 138959 - RNA, 19 nt, Artificial Sequence
  Description of Artificial Sequence: Synthetic oligonucleotide
cgucugucuguuaucgucu

SEQ ID NO: 138960 - RNA, 19 nt, Artificial Sequence
  Description of Artificial Sequence: Synthetic oligonucleotide
ugucucucuugacaucacc

SEQ ID NO: 138961 - RNA, 19 nt, Artificial Sequence
  Description of Artificial Sequence: Synthetic oligonucleotide
cgcagcuccacccccuccc

SEQ ID NO: 138962 - RNA, 19 nt, Artificial Sequence
  Description of Artificial Sequence: Synthetic oligonucleotide
cgucccagcccccaacgcc

SEQ ID NO: 138963 - RNA, 19 nt, Artificial Sequence
  Description of Artificial Sequence: Synthetic oligonucleotide
cagcuuccugcaggcccag

SEQ ID NO: 138964 - RNA, 19 nt, Artificial Sequence
  Description of Artificial Sequence: Synthetic oligonucleotide
gagccggcaugaacucucc

SEQ ID NO: 138965 - RNA, 19 nt, Artificial Sequence
  Description of Artificial Sequence: Synthetic oligonucleotide
ccaacgagucggaugggau

SEQ ID NO: 138966 - RNA, 19 nt, Artificial Sequence
  Description of Artificial Sequence: Synthetic oligonucleotide
ugucaggucgggaaccauc

SEQ ID NO: 138967 - RNA, 19 nt, Artificial Sequence
  Description of Artificial Sequence: Synthetic oligonucleotide
ccuuggaaauccugccgcg

SEQ ID NO: 138968 - RNA, 19 nt, Artificial Sequence
  Description of Artificial Sequence: Synthetic oligonucleotide
ggacuucucugcacagcau

SEQ ID NO: 138969 - RNA, 19 nt, Artificial Sequence
  Description of Artificial Sequence: Synthetic oligonucleotide
ucccugugacaguggaggu

SEQ ID NO: 138970 - RNA, 19 nt, Artificial Sequence
  Description of Artificial Sequence: Synthetic oligonucleotide
ugaagccggugcugccaag

SEQ ID NO: 138971 - RNA, 19 nt, Artificial Sequence
  Description of Artificial Sequence: Synthetic oligonucleotide
gagccaugcccaguuccau

SEQ ID NO: 138972 - RNA, 19 nt, Artificial Sequence
  Description of Artificial Sequence: Synthetic oligonucleotide
ugggggguggggguggagg

SEQ ID NO: 138973 - RNA, 19 nt, Artificial Sequence
  Description of Artificial Sequence: Synthetic oligonucleotide
gcagccccagcccugugga

SEQ ID NO: 138974 - RNA, 19 nt, Artificial Sequence
  Description of Artificial Sequence: Synthetic oligonucleotide
agcuacggggggcucuggu

SEQ ID NO: 138975 - RNA, 19 nt, Artificial Sequence
  Description of Artificial Sequence: Synthetic oligonucleotide
ugggcucuguggaccccac

SEQ ID NO: 138976 - RNA, 19 nt, Artificial Sequence
  Description of Artificial Sequence: Synthetic oligonucleotide
cacugcgggagcagcaacu

SEQ ID NO: 138977 - RNA, 19 nt, Artificial Sequence
  Description of Artificial Sequence: Synthetic oligonucleotide
ugcagcaggagcuccuggc

SEQ ID NO: 138978 - RNA, 19 nt, Artificial Sequence
  Description of Artificial Sequence: Synthetic oligonucleotide
cgcucaagcagcagcagca

SEQ ID NO: 138979 - RNA, 19 nt, Artificial Sequence
  Description of Artificial Sequence: Synthetic oligonucleotide
agcugcagaagcagcuccu

SEQ ID NO: 138980 - RNA, 19 nt, Artificial Sequence
  Description of Artificial Sequence: Synthetic oligonucleotide
uguucgcugaguuccagaa

SEQ ID NO: 138981 - RNA, 19 nt, Artificial Sequence
  Description of Artificial Sequence: Synthetic oligonucleotide
aacagcaugaccaccugac

SEQ ID NO: 138982 - RNA, 19 nt, Artificial Sequence
  Description of Artificial Sequence: Synthetic oligonucleotide
caaggcagcaugaggucca

SEQ ID NO: 138983 - RNA, 19 nt, Artificial Sequence
  Description of Artificial Sequence: Synthetic oligonucleotide
agcugcagaagcaccucaa

SEQ ID NO: 138984 - RNA, 19 nt, Artificial Sequence
  Description of Artificial Sequence: Synthetic oligonucleotide
agcagcagcaggagaugcu

SEQ ID NO: 138985 - RNA, 19 nt, Artificial Sequence
  Description of Artificial Sequence: Synthetic oligonucleotide
uggcagccaagcagcagca

SEQ ID NO: 138986 - RNA, 19 nt, Artificial Sequence
  Description of Artificial Sequence: Synthetic oligonucleotide
aggagaugcuggcagccaa

SEQ ID NO: 138987 - RNA, 19 nt, Artificial Sequence
  Description of Artificial Sequence: Synthetic oligonucleotide
agcggcagcaggagcugga

SEQ ID NO: 138988 - RNA, 19 nt, Artificial Sequence
  Description of Artificial Sequence: Synthetic oligonucleotide
agcagcagcggcagcggga

SEQ ID NO: 138989 - RNA, 19 nt, Artificial Sequence
  Description of Artificial Sequence: Synthetic oligonucleotide
agcagcagcggcaggaaga

SEQ ID NO: 138990 - RNA, 19 nt, Artificial Sequence
  Description of Artificial Sequence: Synthetic oligonucleotide
agcuggagaagcagcggcu

SEQ ID NO: 138991 - RNA, 19 nt, Artificial Sequence
  Description of Artificial Sequence: Synthetic oligonucleotide
uggagcagcagcugcucau

SEQ ID NO: 138992 - RNA, 19 nt, Artificial Sequence
  Description of Artificial Sequence: Synthetic oligonucleotide
uccugcggaacaaggagaa

SEQ ID NO: 138993 - RNA, 19 nt, Artificial Sequence
  Description of Artificial Sequence: Synthetic oligonucleotide
agagcaaagagagugccau

SEQ ID NO: 138994 - RNA, 19 nt, Artificial Sequence
  Description of Artificial Sequence: Synthetic oligonucleotide
uugccagcacugagguaaa

SEQ ID NO: 138995 - RNA, 19 nt, Artificial Sequence
  Description of Artificial Sequence: Synthetic oligonucleotide
agcugaggcuccaggaauu

SEQ ID NO: 138996 - RNA, 19 nt, Artificial Sequence
  Description of Artificial Sequence: Synthetic oligonucleotide
uccucuugucgaagucaaa

SEQ ID NO: 138997 - RNA, 19 nt, Artificial Sequence
  Description of Artificial Sequence: Synthetic oligonucleotide
aggagcccacaccaggcgg

SEQ ID NO: 138998 - RNA, 19 nt, Artificial Sequence
  Description of Artificial Sequence: Synthetic oligonucleotide
gccucaaccauucccuccc

SEQ ID NO: 138999 - RNA, 19 nt, Artificial Sequence
  Description of Artificial Sequence: Synthetic oligonucleotide
cacagcaccccaaaugcug

SEQ ID NO: 139000 - RNA, 19 nt, Artificial Sequence
  Description of Artificial Sequence: Synthetic oligonucleotide
ggggagcccaccaugcuuc

SEQ ID NO: 139001 - RNA, 19 nt, Artificial Sequence
  Description of Artificial Sequence: Synthetic oligonucleotide
cuuuggaccagaguucccc

SEQ ID NO: 139002 - RNA, 19 nt, Artificial Sequence
  Description of Artificial Sequence: Synthetic oligonucleotide
cuccccagagcggcccccc

SEQ ID NO: 139003 - RNA, 19 nt, Artificial Sequence
  Description of Artificial Sequence: Synthetic oligonucleotide
cugggacgccucccuccua

SEQ ID NO: 139004 - RNA, 19 nt, Artificial Sequence
  Description of Artificial Sequence: Synthetic oligonucleotide
acaaacugccuuugccugg

SEQ ID NO: 139005 - RNA, 19 nt, Artificial Sequence
  Description of Artificial Sequence: Synthetic oligonucleotide
ggcccuacgacagucgaga

SEQ ID NO: 139006 - RNA, 19 nt, Artificial Sequence
  Description of Artificial Sequence: Synthetic oligonucleotide
acgacuucccccuccgcaa

SEQ ID NO: 139007 - RNA, 19 nt, Artificial Sequence
  Description of Artificial Sequence: Synthetic oligonucleotide
aaacagccucugaacccaa

SEQ ID NO: 139008 - RNA, 19 nt, Artificial Sequence
  Description of Artificial Sequence: Synthetic oligonucleotide
acuugaaagugcguucaag

SEQ ID NO: 139009 - RNA, 19 nt, Artificial Sequence
  Description of Artificial Sequence: Synthetic oligonucleotide
ggcuaaaacagaagguggc

SEQ ID NO: 139010 - RNA, 19 nt, Artificial Sequence
  Description of Artificial Sequence: Synthetic oligonucleotide
cugagcggagaagcagucc

SEQ ID NO: 139011 - RNA, 19 nt, Artificial Sequence
  Description of Artificial Sequence: Synthetic oligonucleotide
cccuccugcgucgcaagga

SEQ ID NO: 139012 - RNA, 19 nt, Artificial Sequence
  Description of Artificial Sequence: Synthetic oligonucleotide
augggacuguuauuagcac

SEQ ID NO: 139013 - RNA, 19 nt, Artificial Sequence
  Description of Artificial Sequence: Synthetic oligonucleotide
ccuuuaagaagagagcugu

SEQ ID NO: 139014 - RNA, 19 nt, Artificial Sequence
  Description of Artificial Sequence: Synthetic oligonucleotide
uugagaucacaggugccgg

SEQ ID NO: 139015 - RNA, 19 nt, Artificial Sequence
  Description of Artificial Sequence: Synthetic oligonucleotide
ggccuggggcgucguccgu

SEQ ID NO: 139016 - RNA, 19 nt, Artificial Sequence
  Description of Artificial Sequence: Synthetic oligonucleotide
uguguaacagcgcacccgg

SEQ ID NO: 139017 - RNA, 19 nt, Artificial Sequence
  Description of Artificial Sequence: Synthetic oligonucleotide
gcuccggccccagcucucc

SEQ ID NO: 139018 - RNA, 19 nt, Artificial Sequence
  Description of Artificial Sequence: Synthetic oligonucleotide
ccaacagcucccacagcac

SEQ ID NO: 139019 - RNA, 19 nt, Artificial Sequence
  Description of Artificial Sequence: Synthetic oligonucleotide
ccaucgcugagaauggcuu

SEQ ID NO: 139020 - RNA, 19 nt, Artificial Sequence
  Description of Artificial Sequence: Synthetic oligonucleotide
uuacuggcucaguccccaa

SEQ ID NO: 139021 - RNA, 19 nt, Artificial Sequence
  Description of Artificial Sequence: Synthetic oligonucleotide
acauccccacugagaugcu

SEQ ID NO: 139022 - RNA, 19 nt, Artificial Sequence
  Description of Artificial Sequence: Synthetic oligonucleotide
ucccucagcaccgagcccu

SEQ ID NO: 139023 - RNA, 19 nt, Artificial Sequence
  Description of Artificial Sequence: Synthetic oligonucleotide
ucccucuggacagcucccc

SEQ ID NO: 139024 - RNA, 19 nt, Artificial Sequence
  Description of Artificial Sequence: Synthetic oligonucleotide
ccaaccaguucagccucua

SEQ ID NO: 139025 - RNA, 19 nt, Artificial Sequence
  Description of Artificial Sequence: Synthetic oligonucleotide
acacgucuccuucucugcc

SEQ ID NO: 139026 - RNA, 19 nt, Artificial Sequence
  Description of Artificial Sequence: Synthetic oligonucleotide
ccaacaucucccuagggcu

SEQ ID NO: 139027 - RNA, 19 nt, Artificial Sequence
  Description of Artificial Sequence: Synthetic oligonucleotide
ugcaggccacggucacugu

SEQ ID NO: 139028 - RNA, 19 nt, Artificial Sequence
  Description of Artificial Sequence: Synthetic oligonucleotide
ucaccaacucacaccucac

SEQ ID NO: 139029 - RNA, 19 nt, Artificial Sequence
  Description of Artificial Sequence: Synthetic oligonucleotide
cugccuccccgaagcuguc

SEQ ID NO: 139030 - RNA, 19 nt, Artificial Sequence
  Description of Artificial Sequence: Synthetic oligonucleotide
cgacacagcaggaggccga

SEQ ID NO: 139031 - RNA, 19 nt, Artificial Sequence
  Description of Artificial Sequence: Synthetic oligonucleotide
agaggcaggcccuccaguc

SEQ ID NO: 139032 - RNA, 19 nt, Artificial Sequence
  Description of Artificial Sequence: Synthetic oligonucleotide
cccugcggcaggguggcac

SEQ ID NO: 139033 - RNA, 19 nt, Artificial Sequence
  Description of Artificial Sequence: Synthetic oligonucleotide
cgcugaccggcaaguucau

SEQ ID NO: 139034 - RNA, 19 nt, Artificial Sequence
  Description of Artificial Sequence: Synthetic oligonucleotide
ugagcacauccucuauucc

SEQ ID NO: 139035 - RNA, 19 nt, Artificial Sequence
  Description of Artificial Sequence: Synthetic oligonucleotide
cuggcugccugcugggcgu

SEQ ID NO: 139036 - RNA, 19 nt, Artificial Sequence
  Description of Artificial Sequence: Synthetic oligonucleotide
uggcacuggagggcgacgg

SEQ ID NO: 139037 - RNA, 19 nt, Artificial Sequence
  Description of Artificial Sequence: Synthetic oligonucleotide
ggagcccccacgggcaugc

SEQ ID NO: 139038 - RNA, 19 nt, Artificial Sequence
  Description of Artificial Sequence: Synthetic oligonucleotide
ccucccugcugcagcaugu

SEQ ID NO: 139039 - RNA, 19 nt, Artificial Sequence
  Description of Artificial Sequence: Synthetic oligonucleotide
ugcuguugcuggagcaggc

SEQ ID NO: 139040 - RNA, 19 nt, Artificial Sequence
  Description of Artificial Sequence: Synthetic oligonucleotide
cccggcagcagagcacccu

SEQ ID NO: 139041 - RNA, 19 nt, Artificial Sequence
  Description of Artificial Sequence: Synthetic oligonucleotide
ucauugcugugccacucca

SEQ ID NO: 139042 - RNA, 19 nt, Artificial Sequence
  Description of Artificial Sequence: Synthetic oligonucleotide
acgggcaguccccacuagu

SEQ ID NO: 139043 - RNA, 19 nt, Artificial Sequence
  Description of Artificial Sequence: Synthetic oligonucleotide
ugacgggugaacguguggc

SEQ ID NO: 139044 - RNA, 19 nt, Artificial Sequence
  Description of Artificial Sequence: Synthetic oligonucleotide
ccaccagcaugcggacggu

SEQ ID NO: 139045 - RNA, 19 nt, Artificial Sequence
  Description of Artificial Sequence: Synthetic oligonucleotide
uaggcaagcucccgcggca

SEQ ID NO: 139046 - RNA, 19 nt, Artificial Sequence
  Description of Artificial Sequence: Synthetic oligonucleotide
aucggccccugagccgcac

SEQ ID NO: 139047 - RNA, 19 nt, Artificial Sequence
  Description of Artificial Sequence: Synthetic oligonucleotide
cucaguccucaccgcugcc

SEQ ID NO: 139048 - RNA, 19 nt, Artificial Sequence
  Description of Artificial Sequence: Synthetic oligonucleotide
cgcagaguccccaggcccu

SEQ ID NO: 139049 - RNA, 19 nt, Artificial Sequence
  Description of Artificial Sequence: Synthetic oligonucleotide
ugcagcagcuggucaugca

SEQ ID NO: 139050 - RNA, 19 nt, Artificial Sequence
  Description of Artificial Sequence: Synthetic oligonucleotide
aacaacagcaccagcaguu

SEQ ID NO: 139051 - RNA, 19 nt, Artificial Sequence
  Description of Artificial Sequence: Synthetic oligonucleotide
uccuggagaagcagaagca

SEQ ID NO: 139052 - RNA, 19 nt, Artificial Sequence
  Description of Artificial Sequence: Synthetic oligonucleotide
agcagcagcuacagcuggg

SEQ ID NO: 139053 - RNA, 19 nt, Artificial Sequence
  Description of Artificial Sequence: Synthetic oligonucleotide
gcaagauccucaccaagac

SEQ ID NO: 139054 - RNA, 19 nt, Artificial Sequence
  Description of Artificial Sequence: Synthetic oligonucleotide
caggggagcugcccaggca

SEQ ID NO: 139055 - RNA, 19 nt, Artificial Sequence
  Description of Artificial Sequence: Synthetic oligonucleotide
agcccaccacccacccuga

SEQ ID NO: 139056 - RNA, 19 nt, Artificial Sequence
  Description of Artificial Sequence: Synthetic oligonucleotide
aggagacagaggaggagcu

SEQ ID NO: 139057 - RNA, 19 nt, Artificial Sequence
  Description of Artificial Sequence: Synthetic oligonucleotide
ugacggagcagcaggaggu

SEQ ID NO: 139058 - RNA, 19 nt, Artificial Sequence
  Description of Artificial Sequence: Synthetic oligonucleotide
ucuugcugggggagggagc

SEQ ID NO: 139059 - RNA, 19 nt, Artificial Sequence
  Description of Artificial Sequence: Synthetic oligonucleotide
cccugaccaugccccggga

SEQ ID NO: 139060 - RNA, 19 nt, Artificial Sequence
  Description of Artificial Sequence: Synthetic oligonucleotide
agggcuccacagagaguga

SEQ ID NO: 139061 - RNA, 19 nt, Artificial Sequence
  Description of Artificial Sequence: Synthetic oligonucleotide
agagcacacaggaagaccu

SEQ ID NO: 139062 - RNA, 19 nt, Artificial Sequence
  Description of Artificial Sequence: Synthetic oligonucleotide
uggaggaggaggacgagga

SEQ ID NO: 139063 - RNA, 19 nt, Artificial Sequence
  Description of Artificial Sequence: Synthetic oligonucleotide
aagacgauggggaggagga

SEQ ID NO: 139064 - RNA, 19 nt, Artificial Sequence
  Description of Artificial Sequence: Synthetic oligonucleotide
aggaggauugcauccaggu

SEQ ID NO: 139065 - RNA, 19 nt, Artificial Sequence
  Description of Artificial Sequence: Synthetic oligonucleotide
uuaaggacgaggagggcga

SEQ ID NO: 139066 - RNA, 19 nt, Artificial Sequence
  Description of Artificial Sequence: Synthetic oligonucleotide
agaguggugcugaggaggg

SEQ ID NO: 139067 - RNA, 19 nt, Artificial Sequence
  Description of Artificial Sequence: Synthetic oligonucleotide
ggcccgacuuggaggagcc

SEQ ID NO: 139068 - RNA, 19 nt, Artificial Sequence
  Description of Artificial Sequence: Synthetic oligonucleotide
cuggugcuggauacaaaaa

SEQ ID NO: 139069 - RNA, 19 nt, Artificial Sequence
  Description of Artificial Sequence: Synthetic oligonucleotide
aacuguucucagaugccca

SEQ ID NO: 139070 - RNA, 19 nt, Artificial Sequence
  Description of Artificial Sequence: Synthetic oligonucleotide
agccgcugcagccuuugca

SEQ ID NO: 139071 - RNA, 19 nt, Artificial Sequence
  Description of Artificial Sequence: Synthetic oligonucleotide
agguguaccaggcgccccu

SEQ ID NO: 139072 - RNA, 19 nt, Artificial Sequence
  Description of Artificial Sequence: Synthetic oligonucleotide
ucagccuggccacugugcc

SEQ ID NO: 139073 - RNA, 19 nt, Artificial Sequence
  Description of Artificial Sequence: Synthetic oligonucleotide
cccaccaggcccugggccg

SEQ ID NO: 139074 - RNA, 19 nt, Artificial Sequence
  Description of Artificial Sequence: Synthetic oligonucleotide
guacccaguccuccccugc

SEQ ID NO: 139075 - RNA, 19 nt, Artificial Sequence
  Description of Artificial Sequence: Synthetic oligonucleotide
cugccccugggggcaugaa

SEQ ID NO: 139076 - RNA, 19 nt, Artificial Sequence
  Description of Artificial Sequence: Synthetic oligonucleotide
agagccccccagaccagcc

SEQ ID NO: 139077 - RNA, 19 nt, Artificial Sequence
  Description of Artificial Sequence: Synthetic oligonucleotide
ccgucaagcaccucuucac

SEQ ID NO: 139078 - RNA, 19 nt, Artificial Sequence
  Description of Artificial Sequence: Synthetic oligonucleotide
ccacagguguggucuacga

SEQ ID NO: 139079 - RNA, 19 nt, Artificial Sequence
  Description of Artificial Sequence: Synthetic oligonucleotide
acacguucaugcuaaagca

SEQ ID NO: 139080 - RNA, 19 nt, Artificial Sequence
  Description of Artificial Sequence: Synthetic oligonucleotide
accagugcaugugcgggaa

SEQ ID NO: 139081 - RNA, 19 nt, Artificial Sequence
  Description of Artificial Sequence: Synthetic oligonucleotide
acacacacgugcacccuga

SEQ ID NO: 139082 - RNA, 19 nt, Artificial Sequence
  Description of Artificial Sequence: Synthetic oligonucleotide
agcaugcuggccggaucca

SEQ ID NO: 139083 - RNA, 19 nt, Artificial Sequence
  Description of Artificial Sequence: Synthetic oligonucleotide
agagcaucuggucccggcu

SEQ ID NO: 139084 - RNA, 19 nt, Artificial Sequence
  Description of Artificial Sequence: Synthetic oligonucleotide
ugcaggagacaggccugcu

SEQ ID NO: 139085 - RNA, 19 nt, Artificial Sequence
  Description of Artificial Sequence: Synthetic oligonucleotide
uuagcaagugcgagcggau

SEQ ID NO: 139086 - RNA, 19 nt, Artificial Sequence
  Description of Artificial Sequence: Synthetic oligonucleotide
uccgaggucgcaaagccac

SEQ ID NO: 139087 - RNA, 19 nt, Artificial Sequence
  Description of Artificial Sequence: Synthetic oligonucleotide
cgcuagaugagauccagac

SEQ ID NO: 139088 - RNA, 19 nt, Artificial Sequence
  Description of Artificial Sequence: Synthetic oligonucleotide
cagugcacucugaauacca

SEQ ID NO: 139089 - RNA, 19 nt, Artificial Sequence
  Description of Artificial Sequence: Synthetic oligonucleotide
acacccugcucuaugggac

SEQ ID NO: 139090 - RNA, 19 nt, Artificial Sequence
  Description of Artificial Sequence: Synthetic oligonucleotide
ccaguccccucaaccggca

SEQ ID NO: 139091 - RNA, 19 nt, Artificial Sequence
  Description of Artificial Sequence: Synthetic oligonucleotide
agaagcuagacagcaagaa

SEQ ID NO: 139092 - RNA, 19 nt, Artificial Sequence
  Description of Artificial Sequence: Synthetic oligonucleotide
aguugcucggccccaucag

SEQ ID NO: 139093 - RNA, 19 nt, Artificial Sequence
  Description of Artificial Sequence: Synthetic oligonucleotide
gccagaagauguaugcugu

SEQ ID NO: 139094 - RNA, 19 nt, Artificial Sequence
  Description of Artificial Sequence: Synthetic oligonucleotide
ugcugccuugugggggcau

SEQ ID NO: 139095 - RNA, 19 nt, Artificial Sequence
  Description of Artificial Sequence: Synthetic oligonucleotide
ucgggguggacagugacac

SEQ ID NO: 139096 - RNA, 19 nt, Artificial Sequence
  Description of Artificial Sequence: Synthetic oligonucleotide
ccguguggaaugagaugca

SEQ ID NO: 139097 - RNA, 19 nt, Artificial Sequence
  Description of Artificial Sequence: Synthetic oligonucleotide
acuccuccagugcugugcg

SEQ ID NO: 139098 - RNA, 19 nt, Artificial Sequence
  Description of Artificial Sequence: Synthetic oligonucleotide
gcauggcagugggcugccu

SEQ ID NO: 139099 - RNA, 19 nt, Artificial Sequence
  Description of Artificial Sequence: Synthetic oligonucleotide
ugcuggagcuggccuucaa

SEQ ID NO: 139100 - RNA, 19 nt, Artificial Sequence
  Description of Artificial Sequence: Synthetic oligonucleotide
agguggcugcaggagagcu

SEQ ID NO: 139101 - RNA, 19 nt, Artificial Sequence
  Description of Artificial Sequence: Synthetic oligonucleotide
ucaagaauggauuugccau

SEQ ID NO: 139102 - RNA, 19 nt, Artificial Sequence
  Description of Artificial Sequence: Synthetic oligonucleotide
ucauccggcccccaggaca

SEQ ID NO: 139103 - RNA, 19 nt, Artificial Sequence
  Description of Artificial Sequence: Synthetic oligonucleotide
accacgccgaggaauccac

SEQ ID NO: 139104 - RNA, 19 nt, Artificial Sequence
  Description of Artificial Sequence: Synthetic oligonucleotide
cagccaugggauucugcuu

SEQ ID NO: 139105 - RNA, 19 nt, Artificial Sequence
  Description of Artificial Sequence: Synthetic oligonucleotide
ucuucaacucuguagccau

SEQ ID NO: 139106 - RNA, 19 nt, Artificial Sequence
  Description of Artificial Sequence: Synthetic oligonucleotide
ucaccgcaaaacuccuaca

SEQ ID NO: 139107 - RNA, 19 nt, Artificial Sequence
  Description of Artificial Sequence: Synthetic oligonucleotide
agcagaaguugaacguggg

SEQ ID NO: 139108 - RNA, 19 nt, Artificial Sequence
  Description of Artificial Sequence: Synthetic oligonucleotide
gcaagguccucaucgugga

SEQ ID NO: 139109 - RNA, 19 nt, Artificial Sequence
  Description of Artificial Sequence: Synthetic oligonucleotide
acugggacauucaccaugg

SEQ ID NO: 139110 - RNA, 19 nt, Artificial Sequence
  Description of Artificial Sequence: Synthetic oligonucleotide
gcaauggcacccagcaggc

SEQ ID NO: 139111 - RNA, 19 nt, Artificial Sequence
  Description of Artificial Sequence: Synthetic oligonucleotide
cguucuacaaugaccccuc

SEQ ID NO: 139112 - RNA, 19 nt, Artificial Sequence
  Description of Artificial Sequence: Synthetic oligonucleotide
cugugcucuacaucucucu

SEQ ID NO: 139113 - RNA, 19 nt, Artificial Sequence
  Description of Artificial Sequence: Synthetic oligonucleotide
ugcaucgcuaugacaacgg

SEQ ID NO: 139114 - RNA, 19 nt, Artificial Sequence
  Description of Artificial Sequence: Synthetic oligonucleotide
ggaacuucuuuccaggcuc

SEQ ID NO: 139115 - RNA, 19 nt, Artificial Sequence
  Description of Artificial Sequence: Synthetic oligonucleotide
cuggggcuccugaagaggu

SEQ ID NO: 139116 - RNA, 19 nt, Artificial Sequence
  Description of Artificial Sequence: Synthetic oligonucleotide
uugguggaggaccaggcgu

SEQ ID NO: 139117 - RNA, 19 nt, Artificial Sequence
  Description of Artificial Sequence: Synthetic oligonucleotide
ugggguacaaugugaacgu

SEQ ID NO: 139118 - RNA, 19 nt, Artificial Sequence
  Description of Artificial Sequence: Synthetic oligonucleotide
uggcauggacaggaggugu

SEQ ID NO: 139119 - RNA, 19 nt, Artificial Sequence
  Description of Artificial Sequence: Synthetic oligonucleotide
uggacccccccauuggaga

SEQ ID NO: 139120 - RNA, 19 nt, Artificial Sequence
  Description of Artificial Sequence: Synthetic oligonucleotide
acguggaguaccuuacagc

SEQ ID NO: 139121 - RNA, 19 nt, Artificial Sequence
  Description of Artificial Sequence: Synthetic oligonucleotide
ccuucaggacaguggugau

SEQ ID NO: 139122 - RNA, 19 nt, Artificial Sequence
  Description of Artificial Sequence: Synthetic oligonucleotide
ugcccauugcccacgaguu

SEQ ID NO: 139123 - RNA, 19 nt, Artificial Sequence
  Description of Artificial Sequence: Synthetic oligonucleotide
ucucaccugaugugguccu

SEQ ID NO: 139124 - RNA, 19 nt, Artificial Sequence
  Description of Artificial Sequence: Synthetic oligonucleotide
uagucuccgccggguuuga

SEQ ID NO: 139125 - RNA, 19 nt, Artificial Sequence
  Description of Artificial Sequence: Synthetic oligonucleotide
augcuguugaaggacaucu

SEQ ID NO: 139126 - RNA, 19 nt, Artificial Sequence
  Description of Artificial Sequence: Synthetic oligonucleotide
ugucuccucuggguggcua

SEQ ID NO: 139127 - RNA, 19 nt, Artificial Sequence
  Description of Artificial Sequence: Synthetic oligonucleotide
acucugucaccgccagaug

SEQ ID NO: 139128 - RNA, 19 nt, Artificial Sequence
  Description of Artificial Sequence: Synthetic oligonucleotide
guuuuggccacuugaccag

SEQ ID NO: 139129 - RNA, 19 nt, Artificial Sequence
  Description of Artificial Sequence: Synthetic oligonucleotide
ggcagcugaugacccuggc

SEQ ID NO: 139130 - RNA, 19 nt, Artificial Sequence
  Description of Artificial Sequence: Synthetic oligonucleotide
cagggggccggguggugcu

SEQ ID NO: 139131 - RNA, 19 nt, Artificial Sequence
  Description of Artificial Sequence: Synthetic oligonucleotide
uggcccuggagggaggcca

SEQ ID NO: 139132 - RNA, 19 nt, Artificial Sequence
  Description of Artificial Sequence: Synthetic oligonucleotide
augacuugaccgccaucug

SEQ ID NO: 139133 - RNA, 19 nt, Artificial Sequence
  Description of Artificial Sequence: Synthetic oligonucleotide
gugaugccucugaggcuug

SEQ ID NO: 139134 - RNA, 19 nt, Artificial Sequence
  Description of Artificial Sequence: Synthetic oligonucleotide
gugucucggcucugcucag

SEQ ID NO: 139135 - RNA, 19 nt, Artificial Sequence
  Description of Artificial Sequence: Synthetic oligonucleotide
guguagagcugcagcccuu

SEQ ID NO: 139136 - RNA, 19 nt, Artificial Sequence
  Description of Artificial Sequence: Synthetic oligonucleotide
uggaugaggcagucuugca

SEQ ID NO: 139137 - RNA, 19 nt, Artificial Sequence
  Description of Artificial Sequence: Synthetic oligonucleotide
agcaaaagcccaacaucaa

SEQ ID NO: 139138 - RNA, 19 nt, Artificial Sequence
  Description of Artificial Sequence: Synthetic oligonucleotide
acgcaguggccacgcuaga

SEQ ID NO: 139139 - RNA, 19 nt, Artificial Sequence
  Description of Artificial Sequence: Synthetic oligonucleotide
agaaagucaucgagaucca

SEQ ID NO: 139140 - RNA, 19 nt, Artificial Sequence
  Description of Artificial Sequence: Synthetic oligonucleotide
agagcaaacacuggagcug

SEQ ID NO: 139141 - RNA, 19 nt, Artificial Sequence
  Description of Artificial Sequence: Synthetic oligonucleotide
gugugcagaaguucgccgc

SEQ ID NO: 139142 - RNA, 19 nt, Artificial Sequence
  Description of Artificial Sequence: Synthetic oligonucleotide
cuggucugggccggucccu

SEQ ID NO: 139143 - RNA, 19 nt, Artificial Sequence
  Description of Artificial Sequence: Synthetic oligonucleotide
ugcgagaggcccaagcagg

SEQ ID NO: 139144 - RNA, 19 nt, Artificial Sequence
  Description of Artificial Sequence: Synthetic oligonucleotide
gugagaccgaggaggccga

SEQ ID NO: 139145 - RNA, 19 nt, Artificial Sequence
  Description of Artificial Sequence: Synthetic oligonucleotide
agacugugagcgccauggc

SEQ ID NO: 139146 - RNA, 19 nt, Artificial Sequence
  Description of Artificial Sequence: Synthetic oligonucleotide
ccuugcugucggugggggc

SEQ ID NO: 139147 - RNA, 19 nt, Artificial Sequence
  Description of Artificial Sequence: Synthetic oligonucleotide
ccgagcaggcccaggcugc

SEQ ID NO: 139148 - RNA, 19 nt, Artificial Sequence
  Description of Artificial Sequence: Synthetic oligonucleotide
cggcagcccgggaacacag

SEQ ID NO: 139149 - RNA, 19 nt, Artificial Sequence
  Description of Artificial Sequence: Synthetic oligonucleotide
gccccaggccggcagagga

SEQ ID NO: 139150 - RNA, 19 nt, Artificial Sequence
  Description of Artificial Sequence: Synthetic oligonucleotide
agcccauggagcaggagcc

SEQ ID NO: 139151 - RNA, 19 nt, Artificial Sequence
  Description of Artificial Sequence: Synthetic oligonucleotide
cugcccugugacgccccgg

SEQ ID NO: 139152 - RNA, 19 nt, Artificial Sequence
  Description of Artificial Sequence: Synthetic oligonucleotide
gcccccaucccucugggcu

SEQ ID NO: 139153 - RNA, 19 nt, Artificial Sequence
  Description of Artificial Sequence: Synthetic oligonucleotide
uucaccauugugauuuugu

SEQ ID NO: 139154 - RNA, 19 nt, Artificial Sequence
  Description of Artificial Sequence: Synthetic oligonucleotide
uuuauuuuuucuauuaaaa

SEQ ID NO: 139155 - RNA, 19 nt, Artificial Sequence
  Description of Artificial Sequence: Synthetic oligonucleotide
aacaaaaagucacacauuc

SEQ ID NO: 139156 - RNA, 19 nt, Artificial Sequence
  Description of Artificial Sequence: Synthetic oligonucleotide
caacaaggugugccgugug

SEQ ID NO: 139157 - RNA, 19 nt, Artificial Sequence
  Description of Artificial Sequence: Synthetic oligonucleotide
gggucucucagccuugccc

SEQ ID NO: 139158 - RNA, 19 nt, Artificial Sequence
  Description of Artificial Sequence: Synthetic oligonucleotide
ccuccugcuccucuacgcu

SEQ ID NO: 139159 - RNA, 19 nt, Artificial Sequence
  Description of Artificial Sequence: Synthetic oligonucleotide
ugccucaggcccccagccc

SEQ ID NO: 139160 - RNA, 19 nt, Artificial Sequence
  Description of Artificial Sequence: Synthetic oligonucleotide
cuguggcuuccaccucagc

SEQ ID NO: 139161 - RNA, 19 nt, Artificial Sequence
  Description of Artificial Sequence: Synthetic oligonucleotide
cucuagaagccugcucccu

SEQ ID NO: 139162 - RNA, 19 nt, Artificial Sequence
  Description of Artificial Sequence: Synthetic oligonucleotide
ucugcagggggugguggug

SEQ ID NO: 139163 - RNA, 19 nt, Artificial Sequence
  Description of Artificial Sequence: Synthetic oligonucleotide
gucuucccagcccuguccc

SEQ ID NO: 139164 - RNA, 19 nt, Artificial Sequence
  Description of Artificial Sequence: Synthetic oligonucleotide
caugugucccuccccccau

SEQ ID NO: 139165 - RNA, 19 nt, Artificial Sequence
  Description of Artificial Sequence: Synthetic oligonucleotide
uuuuccugcauucugucug

SEQ ID NO: 139166 - RNA, 19 nt, Artificial Sequence
  Description of Artificial Sequence: Synthetic oligonucleotide
guccuuuuccuccuuggag

SEQ ID NO: 139167 - RNA, 19 nt, Artificial Sequence
  Description of Artificial Sequence: Synthetic oligonucleotide
gccugggccagcucaaggu

SEQ ID NO: 139168 - RNA, 19 nt, Artificial Sequence
  Description of Artificial Sequence: Synthetic oligonucleotide
ugggcacgggggcccagac

SEQ ID NO: 139169 - RNA, 19 nt, Artificial Sequence
  Description of Artificial Sequence: Synthetic oligonucleotide
caguacucuccaguucugg

SEQ ID NO: 139170 - RNA, 19 nt, Artificial Sequence
  Description of Artificial Sequence: Synthetic oligonucleotide
gggccccccgagugaggag

SEQ ID NO: 139171 - RNA, 19 nt, Artificial Sequence
  Description of Artificial Sequence: Synthetic oligonucleotide
gggaacgggaagucggugc

SEQ ID NO: 139172 - RNA, 19 nt, Artificial Sequence
  Description of Artificial Sequence: Synthetic oligonucleotide
ccuugguuucagcugauuu

SEQ ID NO: 139173 - RNA, 19 nt, Artificial Sequence
  Description of Artificial Sequence: Synthetic oligonucleotide
uggggggaaaugccuuaau

SEQ ID NO: 139174 - RNA, 19 nt, Artificial Sequence
  Description of Artificial Sequence: Synthetic oligonucleotide
uuucacucuccucccuucu

SEQ ID NO: 139175 - RNA, 19 nt, Artificial Sequence
  Description of Artificial Sequence: Synthetic oligonucleotide
uccagccucaggggaggau

SEQ ID NO: 139176 - RNA, 19 nt, Artificial Sequence
  Description of Artificial Sequence: Synthetic oligonucleotide
ucuggaggauccacuacug

SEQ ID NO: 139177 - RNA, 19 nt, Artificial Sequence
  Description of Artificial Sequence: Synthetic oligonucleotide
gucuuuaagaugcagagug

SEQ ID NO: 139178 - RNA, 19 nt, Artificial Sequence
  Description of Artificial Sequence: Synthetic oligonucleotide
ggaggggaggugggcaccc

SEQ ID NO: 139179 - RNA, 19 nt, Artificial Sequence
  Description of Artificial Sequence: Synthetic oligonucleotide
cacccugcgauucuccacc

SEQ ID NO: 139180 - RNA, 19 nt, Artificial Sequence
  Description of Artificial Sequence: Synthetic oligonucleotide
ccuuuccccuucuuucguc

SEQ ID NO: 139181 - RNA, 19 nt, Artificial Sequence
  Description of Artificial Sequence: Synthetic oligonucleotide
ccucaccaucucugcagac

SEQ ID NO: 139182 - RNA, 19 nt, Artificial Sequence
  Description of Artificial Sequence: Synthetic oligonucleotide
ccccucuccuccuccuucc

SEQ ID NO: 139183 - RNA, 19 nt, Artificial Sequence
  Description of Artificial Sequence: Synthetic oligonucleotide
cucuuggucucagcacuga

SEQ ID NO: 139184 - RNA, 19 nt, Artificial Sequence
  Description of Artificial Sequence: Synthetic oligonucleotide
augggaggcuggugcccaa

SEQ ID NO: 139185 - RNA, 19 nt, Artificial Sequence
  Description of Artificial Sequence: Synthetic oligonucleotide
agcuguggccugcagucug

SEQ ID NO: 139186 - RNA, 19 nt, Artificial Sequence
  Description of Artificial Sequence: Synthetic oligonucleotide
gugaggagggcugucuugc

SEQ ID NO: 139187 - RNA, 19 nt, Artificial Sequence
  Description of Artificial Sequence: Synthetic oligonucleotide
ccucacacuccucacagcc

SEQ ID NO: 139188 - RNA, 19 nt, Artificial Sequence
  Description of Artificial Sequence: Synthetic oligonucleotide
cuacuuccccuuccccggg

SEQ ID NO: 139189 - RNA, 19 nt, Artificial Sequence
  Description of Artificial Sequence: Synthetic oligonucleotide
ggcugagagggugaaagug

SEQ ID NO: 139190 - RNA, 19 nt, Artificial Sequence
  Description of Artificial Sequence: Synthetic oligonucleotide
guguggggaaggagaggac

SEQ ID NO: 139191 - RNA, 19 nt, Artificial Sequence
  Description of Artificial Sequence: Synthetic oligonucleotide
cugguuuccuggguucuca

SEQ ID NO: 139192 - RNA, 19 nt, Artificial Sequence
  Description of Artificial Sequence: Synthetic oligonucleotide
aggggccaggaggaguaac

SEQ ID NO: 139193 - RNA, 19 nt, Artificial Sequence
  Description of Artificial Sequence: Synthetic oligonucleotide
cagaaccaggucugcuccc

SEQ ID NO: 139194 - RNA, 19 nt, Artificial Sequence
  Description of Artificial Sequence: Synthetic oligonucleotide
ccaccuuacucggauggcc

SEQ ID NO: 139195 - RNA, 19 nt, Artificial Sequence
  Description of Artificial Sequence: Synthetic oligonucleotide
cucccugccccucugcugg

SEQ ID NO: 139196 - RNA, 19 nt, Artificial Sequence
  Description of Artificial Sequence: Synthetic oligonucleotide
gcacagccugggcaagggg

SEQ ID NO: 139197 - RNA, 19 nt, Artificial Sequence
  Description of Artificial Sequence: Synthetic oligonucleotide
gagaagguggucccugcag

SEQ ID NO: 139198 - RNA, 19 nt, Artificial Sequence
  Description of Artificial Sequence: Synthetic oligonucleotide
gaggggcuccaggcuggug

SEQ ID NO: 139199 - RNA, 19 nt, Artificial Sequence
  Description of Artificial Sequence: Synthetic oligonucleotide
gagagccccccugcuguca

SEQ ID NO: 139200 - RNA, 19 nt, Artificial Sequence
  Description of Artificial Sequence: Synthetic oligonucleotide
aggaccagauuuucccagc

SEQ ID NO: 139201 - RNA, 19 nt, Artificial Sequence
  Description of Artificial Sequence: Synthetic oligonucleotide
ccauccagcaugcugcggg

SEQ ID NO: 139202 - RNA, 19 nt, Artificial Sequence
  Description of Artificial Sequence: Synthetic oligonucleotide
ggagaaggggcagaggcuc

SEQ ID NO: 139203 - RNA, 19 nt, Artificial Sequence
  Description of Artificial Sequence: Synthetic oligonucleotide
caccucccuccuggggccu

SEQ ID NO: 139204 - RNA, 19 nt, Artificial Sequence
  Description of Artificial Sequence: Synthetic oligonucleotide
uuuuguuuuggauccuggg

SEQ ID NO: 139205 - RNA, 19 nt, Artificial Sequence
  Description of Artificial Sequence: Synthetic oligonucleotide
ggauggugagaauggaggu

SEQ ID NO: 139206 - RNA, 19 nt, Artificial Sequence
  Description of Artificial Sequence: Synthetic oligonucleotide
uucuagaagggguaaggcc

SEQ ID NO: 139207 - RNA, 19 nt, Artificial Sequence
  Description of Artificial Sequence: Synthetic oligonucleotide
cagaacccagggauccagg

SEQ ID NO: 139208 - RNA, 19 nt, Artificial Sequence
  Description of Artificial Sequence: Synthetic oligonucleotide
gagucggcucucagcugga

SEQ ID NO: 139209 - RNA, 19 nt, Artificial Sequence
  Description of Artificial Sequence: Synthetic oligonucleotide
agcuuccauaccuucuggg

SEQ ID NO: 139210 - RNA, 19 nt, Artificial Sequence
  Description of Artificial Sequence: Synthetic oligonucleotide
gcucccuuugcugaccacc

SEQ ID NO: 139211 - RNA, 19 nt, Artificial Sequence
  Description of Artificial Sequence: Synthetic oligonucleotide
cagcccaagggagcuaaga

SEQ ID NO: 139212 - RNA, 19 nt, Artificial Sequence
  Description of Artificial Sequence: Synthetic oligonucleotide
accaggagggggcugggcg

SEQ ID NO: 139213 - RNA, 19 nt, Artificial Sequence
  Description of Artificial Sequence: Synthetic oligonucleotide
gcugucccuucucuuuccc

SEQ ID NO: 139214 - RNA, 19 nt, Artificial Sequence
  Description of Artificial Sequence: Synthetic oligonucleotide
caggagcccugccaggggc

SEQ ID NO: 139215 - RNA, 19 nt, Artificial Sequence
  Description of Artificial Sequence: Synthetic oligonucleotide
cugugggccuacaaggcuu

SEQ ID NO: 139216 - RNA, 19 nt, Artificial Sequence
  Description of Artificial Sequence: Synthetic oligonucleotide
uccaggggaugccauccag

SEQ ID NO: 139217 - RNA, 19 nt, Artificial Sequence
  Description of Artificial Sequence: Synthetic oligonucleotide
gccuguaggaaaccaaaga

SEQ ID NO: 139218 - RNA, 19 nt, Artificial Sequence
  Description of Artificial Sequence: Synthetic oligonucleotide
augggaaguggcuccuagg

SEQ ID NO: 139219 - RNA, 19 nt, Artificial Sequence
  Description of Artificial Sequence: Synthetic oligonucleotide
ggggcugacucuuccuucc

SEQ ID NO: 139220 - RNA, 19 nt, Artificial Sequence
  Description of Artificial Sequence: Synthetic oligonucleotide
cuccuccuccccaguacca

SEQ ID NO: 139221 - RNA, 19 nt, Artificial Sequence
  Description of Artificial Sequence: Synthetic oligonucleotide
acauauacuuucucuccuu

SEQ ID NO: 139222 - RNA, 19 nt, Artificial Sequence
  Description of Artificial Sequence: Synthetic oligonucleotide
ucuaucuccagggccccac

SEQ ID NO: 139223 - RNA, 19 nt, Artificial Sequence
  Description of Artificial Sequence: Synthetic oligonucleotide
ccaaucuguuuacauauuu

SEQ ID NO: 139224 - RNA, 19 nt, Artificial Sequence
  Description of Artificial Sequence: Synthetic oligonucleotide
uauuauccuaugggggccu

SEQ ID NO: 139225 - RNA, 19 nt, Artificial Sequence
  Description of Artificial Sequence: Synthetic oligonucleotide
ugagcaggauugagggagc

SEQ ID NO: 139226 - RNA, 19 nt, Artificial Sequence
  Description of Artificial Sequence: Synthetic oligonucleotide
ccaggggaggggcaggagu

SEQ ID NO: 139227 - RNA, 19 nt, Artificial Sequence
  Description of Artificial Sequence: Synthetic oligonucleotide
ucccagcaccaucgguuca

SEQ ID NO: 139228 - RNA, 19 nt, Artificial Sequence
  Description of Artificial Sequence: Synthetic oligonucleotide
auagugugcuuguguguuu

SEQ ID NO: 139229 - RNA, 19 nt, Artificial Sequence
  Description of Artificial Sequence: Synthetic oligonucleotide
uguuuuagauccuccuggg

SEQ ID NO: 139230 - RNA, 19 nt, Artificial Sequence
  Description of Artificial Sequence: Synthetic oligonucleotide
gggauggggauggggccag

SEQ ID NO: 139231 - RNA, 19 nt, Artificial Sequence
  Description of Artificial Sequence: Synthetic oligonucleotide
ggcucaguguacuaggccu

SEQ ID NO: 139232 - RNA, 19 nt, Artificial Sequence
  Description of Artificial Sequence: Synthetic oligonucleotide
ucucugugcugagccccag

SEQ ID NO: 139233 - RNA, 19 nt, Artificial Sequence
  Description of Artificial Sequence: Synthetic oligonucleotide
ggcucccggccccuuaccc

SEQ ID NO: 139234 - RNA, 19 nt, Artificial Sequence
  Description of Artificial Sequence: Synthetic oligonucleotide
cacucucucccuguggcug

SEQ ID NO: 139235 - RNA, 19 nt, Artificial Sequence
  Description of Artificial Sequence: Synthetic oligonucleotide
ggucugguucucauguaaa

SEQ ID NO: 139236 - RNA, 19 nt, Artificial Sequence
  Description of Artificial Sequence: Synthetic oligonucleotide
acccacuccuugcuuuguc

SEQ ID NO: 139237 - RNA, 19 nt, Artificial Sequence
  Description of Artificial Sequence: Synthetic oligonucleotide
cucccuggauauggauuuc

SEQ ID NO: 139238 - RNA, 19 nt, Artificial Sequence
  Description of Artificial Sequence: Synthetic oligonucleotide
caguuaaguauuuuguaac

SEQ ID NO: 139239 - RNA, 19 nt, Artificial Sequence
  Description of Artificial Sequence: Synthetic oligonucleotide
cccguuacacugugugucc

SEQ ID NO: 139240 - RNA, 19 nt, Artificial Sequence
  Description of Artificial Sequence: Synthetic oligonucleotide
cuuguguaaauaaacuugu

SEQ ID NO: 139241 - RNA, 19 nt, Artificial Sequence
  Description of Artificial Sequence: Synthetic oligonucleotide
acuuguuucuggcagugcc

SEQ ID NO: 139242 - RNA, 19 nt, Artificial Sequence
  Description of Artificial Sequence: Synthetic oligonucleotide
ccaacgagucggcagaugg

SEQ ID NO: 139243 - RNA, 19 nt, Artificial Sequence
  Description of Artificial Sequence: Synthetic oligonucleotide
ggaugucaggucgggaacc

SEQ ID NO: 139244 - RNA, 19 nt, Artificial Sequence
  Description of Artificial Sequence: Synthetic oligonucleotide
cauccuuggaaauccugcc

SEQ ID NO: 139245 - RNA, 19 nt, Artificial Sequence
  Description of Artificial Sequence: Synthetic oligonucleotide
cgcggacuucucugcacag

SEQ ID NO: 139246 - RNA, 19 nt, Artificial Sequence
  Description of Artificial Sequence: Synthetic oligonucleotide
gcaucccugugacagugga

SEQ ID NO: 139247 - RNA, 19 nt, Artificial Sequence
  Description of Artificial Sequence: Synthetic oligonucleotide
aggugaagccggugcugcc

SEQ ID NO: 139248 - RNA, 19 nt, Artificial Sequence
  Description of Artificial Sequence: Synthetic oligonucleotide
caagagccaugcccaguuc

SEQ ID NO: 139249 - RNA, 19 nt, Artificial Sequence
  Description of Artificial Sequence: Synthetic oligonucleotide
ccauggggggugggggugg

SEQ ID NO: 139250 - RNA, 19 nt, Artificial Sequence
  Description of Artificial Sequence: Synthetic oligonucleotide
gaggcagccccagcccugu

SEQ ID NO: 139251 - RNA, 19 nt, Artificial Sequence
  Description of Artificial Sequence: Synthetic oligonucleotide
uggagcuacggggggcucu

SEQ ID NO: 139252 - RNA, 19 nt, Artificial Sequence
  Description of Artificial Sequence: Synthetic oligonucleotide
uggugggcucuguggaccc

SEQ ID NO: 139253 - RNA, 19 nt, Artificial Sequence
  Description of Artificial Sequence: Synthetic oligonucleotide
ccacacugcgggagcagca

SEQ ID NO: 139254 - RNA, 19 nt, Artificial Sequence
  Description of Artificial Sequence: Synthetic oligonucleotide
aacugcagcaggagcuccu

SEQ ID NO: 139255 - RNA, 19 nt, Artificial Sequence
  Description of Artificial Sequence: Synthetic oligonucleotide
uggcgcucaagcagcagca

SEQ ID NO: 139256 - RNA, 19 nt, Artificial Sequence
  Description of Artificial Sequence: Synthetic oligonucleotide
agcagcugcagaagcagcu

SEQ ID NO: 139257 - RNA, 19 nt, Artificial Sequence
  Description of Artificial Sequence: Synthetic oligonucleotide
uccuguucgcugaguucca

SEQ ID NO: 139258 - RNA, 19 nt, Artificial Sequence
  Description of Artificial Sequence: Synthetic oligonucleotide
agaaacagcaugaccaccu

SEQ ID NO: 139259 - RNA, 19 nt, Artificial Sequence
  Description of Artificial Sequence: Synthetic oligonucleotide
ugacaaggcagcaugaggu

SEQ ID NO: 139260 - RNA, 19 nt, Artificial Sequence
  Description of Artificial Sequence: Synthetic oligonucleotide
uccagcugcagaagcaccu

SEQ ID NO: 139261 - RNA, 19 nt, Artificial Sequence
  Description of Artificial Sequence: Synthetic oligonucleotide
ucaagcagcagcaggagau

SEQ ID NO: 139262 - RNA, 19 nt, Artificial Sequence
  Description of Artificial Sequence: Synthetic oligonucleotide
ugcuggcagccaagcagca

SEQ ID NO: 139263 - RNA, 19 nt, Artificial Sequence
  Description of Artificial Sequence: Synthetic oligonucleotide
agcaggagaugcuggcagc

SEQ ID NO: 139264 - RNA, 19 nt, Artificial Sequence
  Description of Artificial Sequence: Synthetic oligonucleotide
ccaagcggcagcaggagcu

SEQ ID NO: 139265 - RNA, 19 nt, Artificial Sequence
  Description of Artificial Sequence: Synthetic oligonucleotide
uggagcagcagcggcagcg

SEQ ID NO: 139266 - RNA, 19 nt, Artificial Sequence
  Description of Artificial Sequence: Synthetic oligonucleotide
gggagcagcagcggcagga

SEQ ID NO: 139267 - RNA, 19 nt, Artificial Sequence
  Description of Artificial Sequence: Synthetic oligonucleotide
aagagcuggagaagcagcg

SEQ ID NO: 139268 - RNA, 19 nt, Artificial Sequence
  Description of Artificial Sequence: Synthetic oligonucleotide
ggcuggagcagcagcugcu

SEQ ID NO: 139269 - RNA, 19 nt, Artificial Sequence
  Description of Artificial Sequence: Synthetic oligonucleotide
ucauccugcggaacaagga

SEQ ID NO: 139270 - RNA, 19 nt, Artificial Sequence
  Description of Artificial Sequence: Synthetic oligonucleotide
agaagagcaaagagagugc

SEQ ID NO: 139271 - RNA, 19 nt, Artificial Sequence
  Description of Artificial Sequence: Synthetic oligonucleotide
ccauugccagcacugaggu

SEQ ID NO: 139272 - RNA, 19 nt, Artificial Sequence
  Description of Artificial Sequence: Synthetic oligonucleotide
uaaagcugaggcuccagga

SEQ ID NO: 139273 - RNA, 19 nt, Artificial Sequence
  Description of Artificial Sequence: Synthetic oligonucleotide
aauuccucuugucgaaguc

SEQ ID NO: 139274 - RNA, 19 nt, Artificial Sequence
  Description of Artificial Sequence: Synthetic oligonucleotide
caaaggagcccacaccagg

SEQ ID NO: 139275 - RNA, 19 nt, Artificial Sequence
  Description of Artificial Sequence: Synthetic oligonucleotide
gcggccucaaccauucccu

SEQ ID NO: 139276 - RNA, 19 nt, Artificial Sequence
  Description of Artificial Sequence: Synthetic oligonucleotide
ucccacagcaccccaaaug

SEQ ID NO: 139277 - RNA, 19 nt, Artificial Sequence
  Description of Artificial Sequence: Synthetic oligonucleotide
gcuggggagcccaccaugc

SEQ ID NO: 139278 - RNA, 19 nt, Artificial Sequence
  Description of Artificial Sequence: Synthetic oligonucleotide
cuucuuuggaccagaguuc

SEQ ID NO: 139279 - RNA, 19 nt, Artificial Sequence
  Description of Artificial Sequence: Synthetic oligonucleotide
ccccuccccagagcggccc

SEQ ID NO: 139280 - RNA, 19 nt, Artificial Sequence
  Description of Artificial Sequence: Synthetic oligonucleotide
ccccugggacgccucccuc

SEQ ID NO: 139281 - RNA, 19 nt, Artificial Sequence
  Description of Artificial Sequence: Synthetic oligonucleotide
ccuacaaacugccuuugcc

SEQ ID NO: 139282 - RNA, 19 nt, Artificial Sequence
  Description of Artificial Sequence: Synthetic oligonucleotide
cugggcccuacgacagucg

SEQ ID NO: 139283 - RNA, 19 nt, Artificial Sequence
  Description of Artificial Sequence: Synthetic oligonucleotide
gagacgacuucccccuccg

SEQ ID NO: 139284 - RNA, 19 nt, Artificial Sequence
  Description of Artificial Sequence: Synthetic oligonucleotide
gcaaaacagccucugaacc

SEQ ID NO: 139285 - RNA, 19 nt, Artificial Sequence
  Description of Artificial Sequence: Synthetic oligonucleotide
ccaacuugaaagugcguuc

SEQ ID NO: 139286 - RNA, 19 nt, Artificial Sequence
  Description of Artificial Sequence: Synthetic oligonucleotide
caaggcuaaaacagaaggu

SEQ ID NO: 139287 - RNA, 19 nt, Artificial Sequence
  Description of Artificial Sequence: Synthetic oligonucleotide
uggcugagcggagaagcag

SEQ ID NO: 139288 - RNA, 19 nt, Artificial Sequence
  Description of Artificial Sequence: Synthetic oligonucleotide
guccccuccugcgucgcaa

SEQ ID NO: 139289 - RNA, 19 nt, Artificial Sequence
  Description of Artificial Sequence: Synthetic oligonucleotide
aggaugggacuguuauuag

SEQ ID NO: 139290 - RNA, 19 nt, Artificial Sequence
  Description of Artificial Sequence: Synthetic oligonucleotide
gcaccuuuaagaagagagc

SEQ ID NO: 139291 - RNA, 19 nt, Artificial Sequence
  Description of Artificial Sequence: Synthetic oligonucleotide
cuguugagaucacaggugc

SEQ ID NO: 139292 - RNA, 19 nt, Artificial Sequence
  Description of Artificial Sequence: Synthetic oligonucleotide
ccgggccuggggcgucguc

SEQ ID NO: 139293 - RNA, 19 nt, Artificial Sequence
  Description of Artificial Sequence: Synthetic oligonucleotide
ccguguguaacagcgcacc

SEQ ID NO: 139294 - RNA, 19 nt, Artificial Sequence
  Description of Artificial Sequence: Synthetic oligonucleotide
ccggcuccggccccagcuc

SEQ ID NO: 139295 - RNA, 19 nt, Artificial Sequence
  Description of Artificial Sequence: Synthetic oligonucleotide
cucccaacagcucccacag

SEQ ID NO: 139296 - RNA, 19 nt, Artificial Sequence
  Description of Artificial Sequence: Synthetic oligonucleotide
gcaccaucgcugagaaugg

SEQ ID NO: 139297 - RNA, 19 nt, Artificial Sequence
  Description of Artificial Sequence: Synthetic oligonucleotide
gcuuuacuggcucaguccc

SEQ ID NO: 139298 - RNA, 19 nt, Artificial Sequence
  Description of Artificial Sequence: Synthetic oligonucleotide
ccaacauccccacugagau

SEQ ID NO: 139299 - RNA, 19 nt, Artificial Sequence
  Description of Artificial Sequence: Synthetic oligonucleotide
ugcucccucagcaccgagc

SEQ ID NO: 139300 - RNA, 19 nt, Artificial Sequence
  Description of Artificial Sequence: Synthetic oligonucleotide
cccucccucuggacagcuc

SEQ ID NO: 139301 - RNA, 19 nt, Artificial Sequence
  Description of Artificial Sequence: Synthetic oligonucleotide
cccccaaccaguucagccu

SEQ ID NO: 139302 - RNA, 19 nt, Artificial Sequence
  Description of Artificial Sequence: Synthetic oligonucleotide
ucuacacgucuccuucucu

SEQ ID NO: 139303 - RNA, 19 nt, Artificial Sequence
  Description of Artificial Sequence: Synthetic oligonucleotide
ugcccaacaucucccuagg

SEQ ID NO: 139304 - RNA, 19 nt, Artificial Sequence
  Description of Artificial Sequence: Synthetic oligonucleotide
ggcugcaggccacggucac

SEQ ID NO: 139305 - RNA, 19 nt, Artificial Sequence
  Description of Artificial Sequence: Synthetic oligonucleotide
cugucaccaacucacaccu

SEQ ID NO: 139306 - RNA, 19 nt, Artificial Sequence
  Description of Artificial Sequence: Synthetic oligonucleotide
ucacugccuccccgaagcu

SEQ ID NO: 139307 - RNA, 19 nt, Artificial Sequence
  Description of Artificial Sequence: Synthetic oligonucleotide
ugucgacacagcaggaggc

SEQ ID NO: 139308 - RNA, 19 nt, Artificial Sequence
  Description of Artificial Sequence: Synthetic oligonucleotide
ccgagaggcaggcccucca

SEQ ID NO: 139309 - RNA, 19 nt, Artificial Sequence
  Description of Artificial Sequence: Synthetic oligonucleotide
agucccugcggcagggugg

SEQ ID NO: 139310 - RNA, 19 nt, Artificial Sequence
  Description of Artificial Sequence: Synthetic oligonucleotide
gcacgcugaccggcaaguu

SEQ ID NO: 139311 - RNA, 19 nt, Artificial Sequence
  Description of Artificial Sequence: Synthetic oligonucleotide
ucaugagcacauccucuau

SEQ ID NO: 139312 - RNA, 19 nt, Artificial Sequence
  Description of Artificial Sequence: Synthetic oligonucleotide
uuccuggcugccugcuggg

SEQ ID NO: 139313 - RNA, 19 nt, Artificial Sequence
  Description of Artificial Sequence: Synthetic oligonucleotide
gcguggcacuggagggcga

SEQ ID NO: 139314 - RNA, 19 nt, Artificial Sequence
  Description of Artificial Sequence: Synthetic oligonucleotide
acgggagcccccacgggca

SEQ ID NO: 139315 - RNA, 19 nt, Artificial Sequence
  Description of Artificial Sequence: Synthetic oligonucleotide
augccucccugcugcagca

SEQ ID NO: 139316 - RNA, 19 nt, Artificial Sequence
  Description of Artificial Sequence: Synthetic oligonucleotide
augugcuguugcuggagca

SEQ ID NO: 139317 - RNA, 19 nt, Artificial Sequence
  Description of Artificial Sequence: Synthetic oligonucleotide
aggcccggcagcagagcac

SEQ ID NO: 139318 - RNA, 19 nt, Artificial Sequence
  Description of Artificial Sequence: Synthetic oligonucleotide
cccucauugcugugccacu

SEQ ID NO: 139319 - RNA, 19 nt, Artificial Sequence
  Description of Artificial Sequence: Synthetic oligonucleotide
uccacgggcaguccccacu

SEQ ID NO: 139320 - RNA, 19 nt, Artificial Sequence
  Description of Artificial Sequence: Synthetic oligonucleotide
uagugacgggugaacgugu

SEQ ID NO: 139321 - RNA, 19 nt, Artificial Sequence
  Description of Artificial Sequence: Synthetic oligonucleotide
uggccaccagcaugcggac

SEQ ID NO: 139322 - RNA, 19 nt, Artificial Sequence
  Description of Artificial Sequence: Synthetic oligonucleotide
cgguaggcaagcucccgcg

SEQ ID NO: 139323 - RNA, 19 nt, Artificial Sequence
  Description of Artificial Sequence: Synthetic oligonucleotide
ggcaucggccccugagccg

SEQ ID NO: 139324 - RNA, 19 nt, Artificial Sequence
  Description of Artificial Sequence: Synthetic oligonucleotide
gcacucaguccucaccgcu

SEQ ID NO: 139325 - RNA, 19 nt, Artificial Sequence
  Description of Artificial Sequence: Synthetic oligonucleotide
ugccgcagaguccccaggc

SEQ ID NO: 139326 - RNA, 19 nt, Artificial Sequence
  Description of Artificial Sequence: Synthetic oligonucleotide
cccugcagcagcuggucau

SEQ ID NO: 139327 - RNA, 19 nt, Artificial Sequence
  Description of Artificial Sequence: Synthetic oligonucleotide
ugcaacaacagcaccagca

SEQ ID NO: 139328 - RNA, 19 nt, Artificial Sequence
  Description of Artificial Sequence: Synthetic oligonucleotide
aguuccuggagaagcagaa

SEQ ID NO: 139329 - RNA, 19 nt, Artificial Sequence
  Description of Artificial Sequence: Synthetic oligonucleotide
agcagcagcagcuacagcu

SEQ ID NO: 139330 - RNA, 19 nt, Artificial Sequence
  Description of Artificial Sequence: Synthetic oligonucleotide
ugggcaagauccucaccaa

SEQ ID NO: 139331 - RNA, 19 nt, Artificial Sequence
  Description of Artificial Sequence: Synthetic oligonucleotide
agacaggggagcugcccag

SEQ ID NO: 139332 - RNA, 19 nt, Artificial Sequence
  Description of Artificial Sequence: Synthetic oligonucleotide
ggcagcccaccacccaccc

SEQ ID NO: 139333 - RNA, 19 nt, Artificial Sequence
  Description of Artificial Sequence: Synthetic oligonucleotide
cugaggagacagaggagga

SEQ ID NO: 139334 - RNA, 19 nt, Artificial Sequence
  Description of Artificial Sequence: Synthetic oligonucleotide
agcugacggagcagcagga

SEQ ID NO: 139335 - RNA, 19 nt, Artificial Sequence
  Description of Artificial Sequence: Synthetic oligonucleotide
aggucuugcugggggaggg

SEQ ID NO: 139336 - RNA, 19 nt, Artificial Sequence
  Description of Artificial Sequence: Synthetic oligonucleotide
gagcccugaccaugccccg

SEQ ID NO: 139337 - RNA, 19 nt, Artificial Sequence
  Description of Artificial Sequence: Synthetic oligonucleotide
gggagggcuccacagagag

SEQ ID NO: 139338 - RNA, 19 nt, Artificial Sequence
  Description of Artificial Sequence: Synthetic oligonucleotide
gugagagcacacaggaaga

SEQ ID NO: 139339 - RNA, 19 nt, Artificial Sequence
  Description of Artificial Sequence: Synthetic oligonucleotide
accuggaggaggaggacga

SEQ ID NO: 139340 - RNA, 19 nt, Artificial Sequence
  Description of Artificial Sequence: Synthetic oligonucleotide
aggaagacgauggggagga

SEQ ID NO: 139341 - RNA, 19 nt, Artificial Sequence
  Description of Artificial Sequence: Synthetic oligonucleotide
aggaggaggauugcaucca

SEQ ID NO: 139342 - RNA, 19 nt, Artificial Sequence
  Description of Artificial Sequence: Synthetic oligonucleotide
agguuaaggacgaggaggg

SEQ ID NO: 139343 - RNA, 19 nt, Artificial Sequence
  Description of Artificial Sequence: Synthetic oligonucleotide
gcgagaguggugcugagga

SEQ ID NO: 139344 - RNA, 19 nt, Artificial Sequence
  Description of Artificial Sequence: Synthetic oligonucleotide
aggggcccgacuuggagga

SEQ ID NO: 139345 - RNA, 19 nt, Artificial Sequence
  Description of Artificial Sequence: Synthetic oligonucleotide
agccuggugcuggauacaa

SEQ ID NO: 139346 - RNA, 19 nt, Artificial Sequence
  Description of Artificial Sequence: Synthetic oligonucleotide
aaaaacuguucucagaugc

SEQ ID NO: 139347 - RNA, 19 nt, Artificial Sequence
  Description of Artificial Sequence: Synthetic oligonucleotide
cccagccgcugcagccuuu

SEQ ID NO: 139348 - RNA, 19 nt, Artificial Sequence
  Description of Artificial Sequence: Synthetic oligonucleotide
ugcagguguaccaggcgcc

SEQ ID NO: 139349 - RNA, 19 nt, Artificial Sequence
  Description of Artificial Sequence: Synthetic oligonucleotide
cccucagccuggccacugu

SEQ ID NO: 139350 - RNA, 19 nt, Artificial Sequence
  Description of Artificial Sequence: Synthetic oligonucleotide
ugccccaccaggcccuggg

SEQ ID NO: 139351 - RNA, 19 nt, Artificial Sequence
  Description of Artificial Sequence: Synthetic oligonucleotide
gccguacccaguccucccc

SEQ ID NO: 139352 - RNA, 19 nt, Artificial Sequence
  Description of Artificial Sequence: Synthetic oligonucleotide
cugcugccccugggggcau

SEQ ID NO: 139353 - RNA, 19 nt, Artificial Sequence
  Description of Artificial Sequence: Synthetic oligonucleotide
ugaagagccccccagacca

SEQ ID NO: 139354 - RNA, 19 nt, Artificial Sequence
  Description of Artificial Sequence: Synthetic oligonucleotide
agcccgucaagcaccucuu

SEQ ID NO: 139355 - RNA, 19 nt, Artificial Sequence
  Description of Artificial Sequence: Synthetic oligonucleotide
ucaccacagguguggucua

SEQ ID NO: 139356 - RNA, 19 nt, Artificial Sequence
  Description of Artificial Sequence: Synthetic oligonucleotide
acgacacguucaugcuaaa

SEQ ID NO: 139357 - RNA, 19 nt, Artificial Sequence
  Description of Artificial Sequence: Synthetic oligonucleotide
agcaccagugcaugugcgg

SEQ ID NO: 139358 - RNA, 19 nt, Artificial Sequence
  Description of Artificial Sequence: Synthetic oligonucleotide
ggaacacacacgugcaccc

SEQ ID NO: 139359 - RNA, 19 nt, Artificial Sequence
  Description of Artificial Sequence: Synthetic oligonucleotide
cugagcaugcuggccggau

SEQ ID NO: 139360 - RNA, 19 nt, Artificial Sequence
  Description of Artificial Sequence: Synthetic oligonucleotide
uccagagcaucuggucccg

SEQ ID NO: 139361 - RNA, 19 nt, Artificial Sequence
  Description of Artificial Sequence: Synthetic oligonucleotide
ggcugcaggagacaggccu

SEQ ID NO: 139362 - RNA, 19 nt, Artificial Sequence
  Description of Artificial Sequence: Synthetic oligonucleotide
ugcuuagcaagugcgagcg

SEQ ID NO: 139363 - RNA, 19 nt, Artificial Sequence
  Description of Artificial Sequence: Synthetic oligonucleotide
ggauccgaggucgcaaagc

SEQ ID NO: 139364 - RNA, 19 nt, Artificial Sequence
  Description of Artificial Sequence: Synthetic oligonucleotide
ccacgcuagaugagaucca

SEQ ID NO: 139365 - RNA, 19 nt, Artificial Sequence
  Description of Artificial Sequence: Synthetic oligonucleotide
agacagugcacucugaaua

SEQ ID NO: 139366 - RNA, 19 nt, Artificial Sequence
  Description of Artificial Sequence: Synthetic oligonucleotide
accacacccugcucuaugg

SEQ ID NO: 139367 - RNA, 19 nt, Artificial Sequence
  Description of Artificial Sequence: Synthetic oligonucleotide
ggaccaguccccucaaccg

SEQ ID NO: 139368 - RNA, 19 nt, Artificial Sequence
  Description of Artificial Sequence: Synthetic oligonucleotide
ggcagaagcuagacagcaa

SEQ ID NO: 139369 - RNA, 19 nt, Artificial Sequence
  Description of Artificial Sequence: Synthetic oligonucleotide
agaaguugcucggccccau

SEQ ID NO: 139370 - RNA, 19 nt, Artificial Sequence
  Description of Artificial Sequence: Synthetic oligonucleotide
ucagccagaagauguaugc

SEQ ID NO: 139371 - RNA, 19 nt, Artificial Sequence
  Description of Artificial Sequence: Synthetic oligonucleotide
cugugcugccuuguggggg

SEQ ID NO: 139372 - RNA, 19 nt, Artificial Sequence
  Description of Artificial Sequence: Synthetic oligonucleotide
gcaucgggguggacaguga

SEQ ID NO: 139373 - RNA, 19 nt, Artificial Sequence
  Description of Artificial Sequence: Synthetic oligonucleotide
acaccguguggaaugagau

SEQ ID NO: 139374 - RNA, 19 nt, Artificial Sequence
  Description of Artificial Sequence: Synthetic oligonucleotide
ugcacuccuccagugcugu

SEQ ID NO: 139375 - RNA, 19 nt, Artificial Sequence
  Description of Artificial Sequence: Synthetic oligonucleotide
ugcgcauggcagugggcug

SEQ ID NO: 139376 - RNA, 19 nt, Artificial Sequence
  Description of Artificial Sequence: Synthetic oligonucleotide
gccugcuggagcuggccuu

SEQ ID NO: 139377 - RNA, 19 nt, Artificial Sequence
  Description of Artificial Sequence: Synthetic oligonucleotide
ucaagguggcugcaggaga

SEQ ID NO: 139378 - RNA, 19 nt, Artificial Sequence
  Description of Artificial Sequence: Synthetic oligonucleotide
agcucaagaauggauuugc

SEQ ID NO: 139379 - RNA, 19 nt, Artificial Sequence
  Description of Artificial Sequence: Synthetic oligonucleotide
ccaucauccggcccccagg

SEQ ID NO: 139380 - RNA, 19 nt, Artificial Sequence
  Description of Artificial Sequence: Synthetic oligonucleotide
gacaccacgccgaggaauc

SEQ ID NO: 139381 - RNA, 19 nt, Artificial Sequence
  Description of Artificial Sequence: Synthetic oligonucleotide
ccacagccaugggauucug

SEQ ID NO: 139382 - RNA, 19 nt, Artificial Sequence
  Description of Artificial Sequence: Synthetic oligonucleotide
gcuucuucaacucuguagc

SEQ ID NO: 139383 - RNA, 19 nt, Artificial Sequence
  Description of Artificial Sequence: Synthetic oligonucleotide
ccaucaccgcaaaacuccu

SEQ ID NO: 139384 - RNA, 19 nt, Artificial Sequence
  Description of Artificial Sequence: Synthetic oligonucleotide
uacagcagaaguugaacgu

SEQ ID NO: 139385 - RNA, 19 nt, Artificial Sequence
  Description of Artificial Sequence: Synthetic oligonucleotide
ugggcaagguccucaucgu

SEQ ID NO: 139386 - RNA, 19 nt, Artificial Sequence
  Description of Artificial Sequence: Synthetic oligonucleotide
uggacugggacauucacca

SEQ ID NO: 139387 - RNA, 19 nt, Artificial Sequence
  Description of Artificial Sequence: Synthetic oligonucleotide
auggcaauggcacccagca

SEQ ID NO: 139388 - RNA, 19 nt, Artificial Sequence
  Description of Artificial Sequence: Synthetic oligonucleotide
aggcguucuacaaugaccc

SEQ ID NO: 139389 - RNA, 19 nt, Artificial Sequence
  Description of Artificial Sequence: Synthetic oligonucleotide
ccucugugcucuacaucuc

SEQ ID NO: 139390 - RNA, 19 nt, Artificial Sequence
  Description of Artificial Sequence: Synthetic oligonucleotide
cucugcaucgcuaugacaa

SEQ ID NO: 139391 - RNA, 19 nt, Artificial Sequence
  Description of Artificial Sequence: Synthetic oligonucleotide
acgggaacuucuuuccagg

SEQ ID NO: 139392 - RNA, 19 nt, Artificial Sequence
  Description of Artificial Sequence: Synthetic oligonucleotide
gcucuggggcuccugaaga

SEQ ID NO: 139393 - RNA, 19 nt, Artificial Sequence
  Description of Artificial Sequence: Synthetic oligonucleotide
agguugguggaggaccagg

SEQ ID NO: 139394 - RNA, 19 nt, Artificial Sequence
  Description of Artificial Sequence: Synthetic oligonucleotide
gcgugggguacaaugugaa

SEQ ID NO: 139395 - RNA, 19 nt, Artificial Sequence
  Description of Artificial Sequence: Synthetic oligonucleotide
acguggcauggacaggagg

SEQ ID NO: 139396 - RNA, 19 nt, Artificial Sequence
  Description of Artificial Sequence: Synthetic oligonucleotide
guguggacccccccauugg

SEQ ID NO: 139397 - RNA, 19 nt, Artificial Sequence
  Description of Artificial Sequence: Synthetic oligonucleotide
gagacguggaguaccuuac

SEQ ID NO: 139398 - RNA, 19 nt, Artificial Sequence
  Description of Artificial Sequence: Synthetic oligonucleotide
cagccuucaggacaguggu

SEQ ID NO: 139399 - RNA, 19 nt, Artificial Sequence
  Description of Artificial Sequence: Synthetic oligonucleotide
ugaugcccauugcccacga

SEQ ID NO: 139400 - RNA, 19 nt, Artificial Sequence
  Description of Artificial Sequence: Synthetic oligonucleotide
aguucucaccugauguggu

SEQ ID NO: 139401 - RNA, 19 nt, Artificial Sequence
  Description of Artificial Sequence: Synthetic oligonucleotide
uccuagucuccgccggguu

SEQ ID NO: 139402 - RNA, 19 nt, Artificial Sequence
  Description of Artificial Sequence: Synthetic oligonucleotide
uugaugcuguugaaggaca

SEQ ID NO: 139403 - RNA, 19 nt, Artificial Sequence
  Description of Artificial Sequence: Synthetic oligonucleotide
aucugucuccucugggugg

SEQ ID NO: 139404 - RNA, 19 nt, Artificial Sequence
  Description of Artificial Sequence: Synthetic oligonucleotide
gcuacucugucaccgccag

SEQ ID NO: 139405 - RNA, 19 nt, Artificial Sequence
  Description of Artificial Sequence: Synthetic oligonucleotide
gauguuuuggccacuugac

SEQ ID NO: 139406 - RNA, 19 nt, Artificial Sequence
  Description of Artificial Sequence: Synthetic oligonucleotide
ccaggcagcugaugacccu

SEQ ID NO: 139407 - RNA, 19 nt, Artificial Sequence
  Description of Artificial Sequence: Synthetic oligonucleotide
uggcagggggccggguggu

SEQ ID NO: 139408 - RNA, 19 nt, Artificial Sequence
  Description of Artificial Sequence: Synthetic oligonucleotide
ugcuggcccuggagggagg

SEQ ID NO: 139409 - RNA, 19 nt, Artificial Sequence
  Description of Artificial Sequence: Synthetic oligonucleotide
gccaugacuugaccgccau

SEQ ID NO: 139410 - RNA, 19 nt, Artificial Sequence
  Description of Artificial Sequence: Synthetic oligonucleotide
ucugugaugccucugaggc

SEQ ID NO: 139411 - RNA, 19 nt, Artificial Sequence
  Description of Artificial Sequence: Synthetic oligonucleotide
cuugugucucggcucugcu

SEQ ID NO: 139412 - RNA, 19 nt, Artificial Sequence
  Description of Artificial Sequence: Synthetic oligonucleotide
ucaguguagagcugcagcc

SEQ ID NO: 139413 - RNA, 19 nt, Artificial Sequence
  Description of Artificial Sequence: Synthetic oligonucleotide
ccuuggaugaggcagucuu

SEQ ID NO: 139414 - RNA, 19 nt, Artificial Sequence
  Description of Artificial Sequence: Synthetic oligonucleotide
ugcagcaaaagcccaacau

SEQ ID NO: 139415 - RNA, 19 nt, Artificial Sequence
  Description of Artificial Sequence: Synthetic oligonucleotide
ucaacgcaguggccacgcu

SEQ ID NO: 139416 - RNA, 19 nt, Artificial Sequence
  Description of Artificial Sequence: Synthetic oligonucleotide
uagagaaagucaucgagau

SEQ ID NO: 139417 - RNA, 19 nt, Artificial Sequence
  Description of Artificial Sequence: Synthetic oligonucleotide
uccagagcaaacacuggag

SEQ ID NO: 139418 - RNA, 19 nt, Artificial Sequence
  Description of Artificial Sequence: Synthetic oligonucleotide
gcugugugcagaaguucgc

SEQ ID NO: 139419 - RNA, 19 nt, Artificial Sequence
  Description of Artificial Sequence: Synthetic oligonucleotide
ccgcuggucugggccgguc

SEQ ID NO: 139420 - RNA, 19 nt, Artificial Sequence
  Description of Artificial Sequence: Synthetic oligonucleotide
cccugcgagaggcccaagc

SEQ ID NO: 139421 - RNA, 19 nt, Artificial Sequence
  Description of Artificial Sequence: Synthetic oligonucleotide
caggugagaccgaggaggc

SEQ ID NO: 139422 - RNA, 19 nt, Artificial Sequence
  Description of Artificial Sequence: Synthetic oligonucleotide
ccgagacugugagcgccau

SEQ ID NO: 139423 - RNA, 19 nt, Artificial Sequence
  Description of Artificial Sequence: Synthetic oligonucleotide
uggccuugcugucgguggg

SEQ ID NO: 139424 - RNA, 19 nt, Artificial Sequence
  Description of Artificial Sequence: Synthetic oligonucleotide
gggccgagcaggcccaggc

SEQ ID NO: 139425 - RNA, 19 nt, Artificial Sequence
  Description of Artificial Sequence: Synthetic oligonucleotide
cugcggcagcccgggaaca

SEQ ID NO: 139426 - RNA, 19 nt, Artificial Sequence
  Description of Artificial Sequence: Synthetic oligonucleotide
acagccccaggccggcaga

SEQ ID NO: 139427 - RNA, 19 nt, Artificial Sequence
  Description of Artificial Sequence: Synthetic oligonucleotide
aggagcccauggagcagga

SEQ ID NO: 139428 - RNA, 19 nt, Artificial Sequence
  Description of Artificial Sequence: Synthetic oligonucleotide
agccugcccugugacgccc

SEQ ID NO: 139429 - RNA, 19 nt, Artificial Sequence
  Description of Artificial Sequence: Synthetic oligonucleotide
ccggcccccaucccucugg

SEQ ID NO: 139430 - RNA, 19 nt, Artificial Sequence
  Description of Artificial Sequence: Synthetic oligonucleotide
ggcuucaccauugugauuu

SEQ ID NO: 139431 - RNA, 19 nt, Artificial Sequence
  Description of Artificial Sequence: Synthetic oligonucleotide
uuguuuauuuuuucuauua

SEQ ID NO: 139432 - RNA, 19 nt, Artificial Sequence
  Description of Artificial Sequence: Synthetic oligonucleotide
aaaaacaaaaagucacaca

SEQ ID NO: 139433 - RNA, 19 nt, Artificial Sequence
  Description of Artificial Sequence: Synthetic oligonucleotide
auucaacaaggugugccgu

SEQ ID NO: 139434 - RNA, 19 nt, Artificial Sequence
  Description of Artificial Sequence: Synthetic oligonucleotide
ugugggucucucagccuug

SEQ ID NO: 139435 - RNA, 19 nt, Artificial Sequence
  Description of Artificial Sequence: Synthetic oligonucleotide
gccccuccugcuccucuac

SEQ ID NO: 139436 - RNA, 19 nt, Artificial Sequence
  Description of Artificial Sequence: Synthetic oligonucleotide
cgcugccucaggcccccag

SEQ ID NO: 139437 - RNA, 19 nt, Artificial Sequence
  Description of Artificial Sequence: Synthetic oligonucleotide
gcccuguggcuuccaccuc

SEQ ID NO: 139438 - RNA, 19 nt, Artificial Sequence
  Description of Artificial Sequence: Synthetic oligonucleotide
cagcucuagaagccugcuc

SEQ ID NO: 139439 - RNA, 19 nt, Artificial Sequence
  Description of Artificial Sequence: Synthetic oligonucleotide
cccucugcaggggguggug

SEQ ID NO: 139440 - RNA, 19 nt, Artificial Sequence
  Description of Artificial Sequence: Synthetic oligonucleotide
ggugucuucccagcccugu

SEQ ID NO: 139441 - RNA, 19 nt, Artificial Sequence
  Description of Artificial Sequence: Synthetic oligonucleotide
ucccaugugucccuccccc

SEQ ID NO: 139442 - RNA, 19 nt, Artificial Sequence
  Description of Artificial Sequence: Synthetic oligonucleotide
ccauuuuccugcauucugu

SEQ ID NO: 139443 - RNA, 19 nt, Artificial Sequence
  Description of Artificial Sequence: Synthetic oligonucleotide
ucuguccuuuuccuccuug

SEQ ID NO: 139444 - RNA, 19 nt, Artificial Sequence
  Description of Artificial Sequence: Synthetic oligonucleotide
ggagccugggccagcucaa

SEQ ID NO: 139445 - RNA, 19 nt, Artificial Sequence
  Description of Artificial Sequence: Synthetic oligonucleotide
aggugggcacgggggccca

SEQ ID NO: 139446 - RNA, 19 nt, Artificial Sequence
  Description of Artificial Sequence: Synthetic oligonucleotide
agacaguacucuccaguuc

SEQ ID NO: 139447 - RNA, 19 nt, Artificial Sequence
  Description of Artificial Sequence: Synthetic oligonucleotide
cuggggccccccgagugag

SEQ ID NO: 139448 - RNA, 19 nt, Artificial Sequence
  Description of Artificial Sequence: Synthetic oligonucleotide
ggagggaacgggaagucgg

SEQ ID NO: 139449 - RNA, 19 nt, Artificial Sequence
  Description of Artificial Sequence: Synthetic oligonucleotide
gugccuugguuucagcuga

SEQ ID NO: 139450 - RNA, 19 nt, Artificial Sequence
  Description of Artificial Sequence: Synthetic oligonucleotide
auuuggggggaaaugccuu

SEQ ID NO: 139451 - RNA, 19 nt, Artificial Sequence
  Description of Artificial Sequence: Synthetic oligonucleotide
uaauuucacucuccucccu

SEQ ID NO: 139452 - RNA, 19 nt, Artificial Sequence
  Description of Artificial Sequence: Synthetic oligonucleotide
uucuccagccucaggggag

SEQ ID NO: 139453 - RNA, 19 nt, Artificial Sequence
  Description of Artificial Sequence: Synthetic oligonucleotide
ggaucuggaggauccacua

SEQ ID NO: 139454 - RNA, 19 nt, Artificial Sequence
  Description of Artificial Sequence: Synthetic oligonucleotide
acugucuuuaagaugcaga

SEQ ID NO: 139455 - RNA, 19 nt, Artificial Sequence
  Description of Artificial Sequence: Synthetic oligonucleotide
aguggaggggaggugggca

SEQ ID NO: 139456 - RNA, 19 nt, Artificial Sequence
  Description of Artificial Sequence: Synthetic oligonucleotide
acccacccugcgauucucc

SEQ ID NO: 139457 - RNA, 19 nt, Artificial Sequence
  Description of Artificial Sequence: Synthetic oligonucleotide
cacccuuuccccuucuuuc

SEQ ID NO: 139458 - RNA, 19 nt, Artificial Sequence
  Description of Artificial Sequence: Synthetic oligonucleotide
cguccucaccaucucugca

SEQ ID NO: 139459 - RNA, 19 nt, Artificial Sequence
  Description of Artificial Sequence: Synthetic oligonucleotide
agaccccucuccuccuccu

SEQ ID NO: 139460 - RNA, 19 nt, Artificial Sequence
  Description of Artificial Sequence: Synthetic oligonucleotide
uuccucuuggucucagcac

SEQ ID NO: 139461 - RNA, 19 nt, Artificial Sequence
  Description of Artificial Sequence: Synthetic oligonucleotide
cugaugggaggcuggugcc

SEQ ID NO: 139462 - RNA, 19 nt, Artificial Sequence
  Description of Artificial Sequence: Synthetic oligonucleotide
ccaagcuguggccugcagu

SEQ ID NO: 139463 - RNA, 19 nt, Artificial Sequence
  Description of Artificial Sequence: Synthetic oligonucleotide
ucugugaggagggcugucu

SEQ ID NO: 139464 - RNA, 19 nt, Artificial Sequence
  Description of Artificial Sequence: Synthetic oligonucleotide
uugccucacacuccucaca

SEQ ID NO: 139465 - RNA, 19 nt, Artificial Sequence
  Description of Artificial Sequence: Synthetic oligonucleotide
agccuacuuccccuucccc

SEQ ID NO: 139466 - RNA, 19 nt, Artificial Sequence
  Description of Artificial Sequence: Synthetic oligonucleotide
cggggcugagagggugaaa

SEQ ID NO: 139467 - RNA, 19 nt, Artificial Sequence
  Description of Artificial Sequence: Synthetic oligonucleotide
aguguguggggaaggagag

SEQ ID NO: 139468 - RNA, 19 nt, Artificial Sequence
  Description of Artificial Sequence: Synthetic oligonucleotide
ggacugguuuccuggguuc

SEQ ID NO: 139469 - RNA, 19 nt, Artificial Sequence
  Description of Artificial Sequence: Synthetic oligonucleotide
cucaggggccaggaggagu

SEQ ID NO: 139470 - RNA, 19 nt, Artificial Sequence
  Description of Artificial Sequence: Synthetic oligonucleotide
uaacagaaccaggucugcu

SEQ ID NO: 139471 - RNA, 19 nt, Artificial Sequence
  Description of Artificial Sequence: Synthetic oligonucleotide
uccccaccuuacucggaug

SEQ ID NO: 139472 - RNA, 19 nt, Artificial Sequence
  Description of Artificial Sequence: Synthetic oligonucleotide
ggccucccugccccucugc

SEQ ID NO: 139473 - RNA, 19 nt, Artificial Sequence
  Description of Artificial Sequence: Synthetic oligonucleotide
cuggcacagccugggcaag

SEQ ID NO: 139474 - RNA, 19 nt, Artificial Sequence
  Description of Artificial Sequence: Synthetic oligonucleotide
ggggagaagguggucccug

SEQ ID NO: 139475 - RNA, 19 nt, Artificial Sequence
  Description of Artificial Sequence: Synthetic oligonucleotide
gcagaggggcuccaggcug

SEQ ID NO: 139476 - RNA, 19 nt, Artificial Sequence
  Description of Artificial Sequence: Synthetic oligonucleotide
ggugagagccccccugcug

SEQ ID NO: 139477 - RNA, 19 nt, Artificial Sequence
  Description of Artificial Sequence: Synthetic oligonucleotide
gucaggaccagauuuuccc

SEQ ID NO: 139478 - RNA, 19 nt, Artificial Sequence
  Description of Artificial Sequence: Synthetic oligonucleotide
cagccauccagcaugcugc

SEQ ID NO: 139479 - RNA, 19 nt, Artificial Sequence
  Description of Artificial Sequence: Synthetic oligonucleotide
cggggagaaggggcagagg

SEQ ID NO: 139480 - RNA, 19 nt, Artificial Sequence
  Description of Artificial Sequence: Synthetic oligonucleotide
gcucaccucccuccugggg

SEQ ID NO: 139481 - RNA, 19 nt, Artificial Sequence
  Description of Artificial Sequence: Synthetic oligonucleotide
gccuuuuguuuuggauccu

SEQ ID NO: 139482 - RNA, 19 nt, Artificial Sequence
  Description of Artificial Sequence: Synthetic oligonucleotide
uggggauggugagaaugga

SEQ ID NO: 139483 - RNA, 19 nt, Artificial Sequence
  Description of Artificial Sequence: Synthetic oligonucleotide
agguucuagaagggguaag

SEQ ID NO: 139484 - RNA, 19 nt, Artificial Sequence
  Description of Artificial Sequence: Synthetic oligonucleotide
ggccagaacccagggaucc

SEQ ID NO: 139485 - RNA, 19 nt, Artificial Sequence
  Description of Artificial Sequence: Synthetic oligonucleotide
caggagucggcucucagcu

SEQ ID NO: 139486 - RNA, 19 nt, Artificial Sequence
  Description of Artificial Sequence: Synthetic oligonucleotide
uggagcuuccauaccuucu

SEQ ID NO: 139487 - RNA, 19 nt, Artificial Sequence
  Description of Artificial Sequence: Synthetic oligonucleotide
ugggcucccuuugcugacc

SEQ ID NO: 139488 - RNA, 19 nt, Artificial Sequence
  Description of Artificial Sequence: Synthetic oligonucleotide
caccagcccaagggagcua

SEQ ID NO: 139489 - RNA, 19 nt, Artificial Sequence
  Description of Artificial Sequence: Synthetic oligonucleotide
aagaccaggagggggcugg

SEQ ID NO: 139490 - RNA, 19 nt, Artificial Sequence
  Description of Artificial Sequence: Synthetic oligonucleotide
ggcgcugucccuucucuuu

SEQ ID NO: 139491 - RNA, 19 nt, Artificial Sequence
  Description of Artificial Sequence: Synthetic oligonucleotide
ucccaggagcccugccagg

SEQ ID NO: 139492 - RNA, 19 nt, Artificial Sequence
  Description of Artificial Sequence: Synthetic oligonucleotide
gggcugugggccuacaagg

SEQ ID NO: 139493 - RNA, 19 nt, Artificial Sequence
  Description of Artificial Sequence: Synthetic oligonucleotide
gcuuccaggggaugccauc

SEQ ID NO: 139494 - RNA, 19 nt, Artificial Sequence
  Description of Artificial Sequence: Synthetic oligonucleotide
ccagccuguaggaaaccaa

SEQ ID NO: 139495 - RNA, 19 nt, Artificial Sequence
  Description of Artificial Sequence: Synthetic oligonucleotide
aagaugggaaguggcuccu

SEQ ID NO: 139496 - RNA, 19 nt, Artificial Sequence
  Description of Artificial Sequence: Synthetic oligonucleotide
uagggggcugacucuuccu

SEQ ID NO: 139497 - RNA, 19 nt, Artificial Sequence
  Description of Artificial Sequence: Synthetic oligonucleotide
uuccuccuccuccccagua

SEQ ID NO: 139498 - RNA, 19 nt, Artificial Sequence
  Description of Artificial Sequence: Synthetic oligonucleotide
accacauauacuuucucuc

SEQ ID NO: 139499 - RNA, 19 nt, Artificial Sequence
  Description of Artificial Sequence: Synthetic oligonucleotide
ccuucuaucuccagggccc

SEQ ID NO: 139500 - RNA, 19 nt, Artificial Sequence
  Description of Artificial Sequence: Synthetic oligonucleotide
ccaccaaucuguuuacaua

SEQ ID NO: 139501 - RNA, 19 nt, Artificial Sequence
  Description of Artificial Sequence: Synthetic oligonucleotide
auuuauuauccuauggggg

SEQ ID NO: 139502 - RNA, 19 nt, Artificial Sequence
  Description of Artificial Sequence: Synthetic oligonucleotide
gccugagcaggauugaggg

SEQ ID NO: 139503 - RNA, 19 nt, Artificial Sequence
  Description of Artificial Sequence: Synthetic oligonucleotide
gagccaggggaggggcagg

SEQ ID NO: 139504 - RNA, 19 nt, Artificial Sequence
  Description of Artificial Sequence: Synthetic oligonucleotide
gagucccagcaccaucggu

SEQ ID NO: 139505 - RNA, 19 nt, Artificial Sequence
  Description of Artificial Sequence: Synthetic oligonucleotide
uucauagugugcuugugug

SEQ ID NO: 139506 - RNA, 19 nt, Artificial Sequence
  Description of Artificial Sequence: Synthetic oligonucleotide
guuuguuuuagauccuccu

SEQ ID NO: 139507 - RNA, 19 nt, Artificial Sequence
  Description of Artificial Sequence: Synthetic oligonucleotide
ugggggauggggauggggc

SEQ ID NO: 139508 - RNA, 19 nt, Artificial Sequence
  Description of Artificial Sequence: Synthetic oligonucleotide
ccaggcucaguguacuagg

SEQ ID NO: 139509 - RNA, 19 nt, Artificial Sequence
  Description of Artificial Sequence: Synthetic oligonucleotide
gccucucugugcugagccc

SEQ ID NO: 139510 - RNA, 19 nt, Artificial Sequence
  Description of Artificial Sequence: Synthetic oligonucleotide
ccaggcucccggccccuua

SEQ ID NO: 139511 - RNA, 19 nt, Artificial Sequence
  Description of Artificial Sequence: Synthetic oligonucleotide
acccacucucucccugugg

SEQ ID NO: 139512 - RNA, 19 nt, Artificial Sequence
  Description of Artificial Sequence: Synthetic oligonucleotide
gcuggucugguucucaugu

SEQ ID NO: 139513 - RNA, 19 nt, Artificial Sequence
  Description of Artificial Sequence: Synthetic oligonucleotide
uaaacccacuccuugcuuu

SEQ ID NO: 139514 - RNA, 19 nt, Artificial Sequence
  Description of Artificial Sequence: Synthetic oligonucleotide
ugucucccuggauauggau

SEQ ID NO: 139515 - RNA, 19 nt, Artificial Sequence
  Description of Artificial Sequence: Synthetic oligonucleotide
uuucaguuaaguauuuugu

SEQ ID NO: 139516 - RNA, 19 nt, Artificial Sequence
  Description of Artificial Sequence: Synthetic oligonucleotide
uaacccguuacacugugug

SEQ ID NO: 139517 - RNA, 19 nt, Artificial Sequence
  Description of Artificial Sequence: Synthetic oligonucleotide
guccuuguguaaauaaacu

SEQ ID NO: 139518 - RNA, 25 nt, Artificial Sequence
  Description of Artificial Sequence: Synthetic oligonucleotide
cgaauguuguuguugguggcggcgg

SEQ ID NO: 139519 - RNA, 25 nt, Artificial Sequence
  Description of Artificial Sequence: Synthetic oligonucleotide
gcgagcggagccggaggagccgccg

SEQ ID NO: 139520 - RNA, 25 nt, Artificial Sequence
  Description of Artificial Sequence: Synthetic oligonucleotide
gcaaagauggaggagccgucgagga

SEQ ID NO: 139521 - RNA, 25 nt, Artificial Sequence
  Description of Artificial Sequence: Synthetic oligonucleotide
aggugcugccgccgcugccgccgcc

SEQ ID NO: 139522 - RNA, 25 nt, Artificial Sequence
  Description of Artificial Sequence: Synthetic oligonucleotide
cgcugcugccgccgccgcccgcgaa

SEQ ID NO: 139523 - RNA, 25 nt, Artificial Sequence
  Description of Artificial Sequence: Synthetic oligonucleotide
agccggagcucgagccgcagcgggg

SEQ ID NO: 139524 - RNA, 25 nt, Artificial Sequence
  Description of Artificial Sequence: Synthetic oligonucleotide
gaugccguucugagugccugacugc

SEQ ID NO: 139525 - RNA, 25 nt, Artificial Sequence
  Description of Artificial Sequence: Synthetic oligonucleotide
ccucgccccgaaggauggccucgga

SEQ ID NO: 139526 - RNA, 25 nt, Artificial Sequence
  Description of Artificial Sequence: Synthetic oligonucleotide
augggcauuagaggcacggcggccc

SEQ ID NO: 139527 - RNA, 25 nt, Artificial Sequence
  Description of Artificial Sequence: Synthetic oligonucleotide
ccgggcucccgucccguccgucugu

SEQ ID NO: 139528 - RNA, 25 nt, Artificial Sequence
  Description of Artificial Sequence: Synthetic oligonucleotide
ucuguuaucgucugucucucuugac

SEQ ID NO: 139529 - RNA, 25 nt, Artificial Sequence
  Description of Artificial Sequence: Synthetic oligonucleotide
caucaccgcagcuccacccccuccc

SEQ ID NO: 139530 - RNA, 25 nt, Artificial Sequence
  Description of Artificial Sequence: Synthetic oligonucleotide
cgucccagcccccaacgccagcuuc

SEQ ID NO: 139531 - RNA, 25 nt, Artificial Sequence
  Description of Artificial Sequence: Synthetic oligonucleotide
ccugcaggcccagagccggcaugaa

SEQ ID NO: 139532 - RNA, 25 nt, Artificial Sequence
  Description of Artificial Sequence: Synthetic oligonucleotide
acucucccaacgagucggaugggau

SEQ ID NO: 139533 - RNA, 25 nt, Artificial Sequence
  Description of Artificial Sequence: Synthetic oligonucleotide
ugucaggucgggaaccauccuugga

SEQ ID NO: 139534 - RNA, 25 nt, Artificial Sequence
  Description of Artificial Sequence: Synthetic oligonucleotide
aaauccugccgcggacuucucugca

SEQ ID NO: 139535 - RNA, 25 nt, Artificial Sequence
  Description of Artificial Sequence: Synthetic oligonucleotide
acagcaucccugugacaguggaggu

SEQ ID NO: 139536 - RNA, 25 nt, Artificial Sequence
  Description of Artificial Sequence: Synthetic oligonucleotide
ugaagccggugcugccaagagccau

SEQ ID NO: 139537 - RNA, 25 nt, Artificial Sequence
  Description of Artificial Sequence: Synthetic oligonucleotide
ugcccaguuccaugggggguggggg

SEQ ID NO: 139538 - RNA, 25 nt, Artificial Sequence
  Description of Artificial Sequence: Synthetic oligonucleotide
guggaggcagccccagcccugugga

SEQ ID NO: 139539 - RNA, 25 nt, Artificial Sequence
  Description of Artificial Sequence: Synthetic oligonucleotide
agcuacggggggcucuggugggcuc

SEQ ID NO: 139540 - RNA, 25 nt, Artificial Sequence
  Description of Artificial Sequence: Synthetic oligonucleotide
cuguggaccccacacugcgggagca

SEQ ID NO: 139541 - RNA, 25 nt, Artificial Sequence
  Description of Artificial Sequence: Synthetic oligonucleotide
agcaacugcagcaggagcuccuggc

SEQ ID NO: 139542 - RNA, 25 nt, Artificial Sequence
  Description of Artificial Sequence: Synthetic oligonucleotide
cgcucaagcagcagcagcagcugca

SEQ ID NO: 139543 - RNA, 25 nt, Artificial Sequence
  Description of Artificial Sequence: Synthetic oligonucleotide
agaagcagcuccuguucgcugaguu

SEQ ID NO: 139544 - RNA, 25 nt, Artificial Sequence
  Description of Artificial Sequence: Synthetic oligonucleotide
uccagaaacagcaugaccaccugac

SEQ ID NO: 139545 - RNA, 25 nt, Artificial Sequence
  Description of Artificial Sequence: Synthetic oligonucleotide
caaggcagcaugagguccagcugca

SEQ ID NO: 139546 - RNA, 25 nt, Artificial Sequence
  Description of Artificial Sequence: Synthetic oligonucleotide
agaagcaccucaagcagcagcagga

SEQ ID NO: 139547 - RNA, 25 nt, Artificial Sequence
  Description of Artificial Sequence: Synthetic oligonucleotide
agaugcuggcagccaagcagcagca

SEQ ID NO: 139548 - RNA, 25 nt, Artificial Sequence
  Description of Artificial Sequence: Synthetic oligonucleotide
aggagaugcuggcagccaagcggca

SEQ ID NO: 139549 - RNA, 25 nt, Artificial Sequence
  Description of Artificial Sequence: Synthetic oligonucleotide
agcaggagcuggagcagcagcggca

SEQ ID NO: 139550 - RNA, 25 nt, Artificial Sequence
  Description of Artificial Sequence: Synthetic oligonucleotide
agcgggagcagcagcggcaggaaga

SEQ ID NO: 139551 - RNA, 25 nt, Artificial Sequence
  Description of Artificial Sequence: Synthetic oligonucleotide
agcuggagaagcagcggcuggagca

SEQ ID NO: 139552 - RNA, 25 nt, Artificial Sequence
  Description of Artificial Sequence: Synthetic oligonucleotide
agcagcugcucauccugcggaacaa

SEQ ID NO: 139553 - RNA, 25 nt, Artificial Sequence
  Description of Artificial Sequence: Synthetic oligonucleotide
aggagaagagcaaagagagugccau

SEQ ID NO: 139554 - RNA, 25 nt, Artificial Sequence
  Description of Artificial Sequence: Synthetic oligonucleotide
uugccagcacugagguaaagcugag

SEQ ID NO: 139555 - RNA, 25 nt, Artificial Sequence
  Description of Artificial Sequence: Synthetic oligonucleotide
ggcuccaggaauuccucuugucgaa

SEQ ID NO: 139556 - RNA, 25 nt, Artificial Sequence
  Description of Artificial Sequence: Synthetic oligonucleotide
agucaaaggagcccacaccaggcgg

SEQ ID NO: 139557 - RNA, 25 nt, Artificial Sequence
  Description of Artificial Sequence: Synthetic oligonucleotide
gccucaaccauucccucccacagca

SEQ ID NO: 139558 - RNA, 25 nt, Artificial Sequence
  Description of Artificial Sequence: Synthetic oligonucleotide
accccaaaugcuggggagcccacca

SEQ ID NO: 139559 - RNA, 25 nt, Artificial Sequence
  Description of Artificial Sequence: Synthetic oligonucleotide
augcuucuuuggaccagaguucccc

SEQ ID NO: 139560 - RNA, 25 nt, Artificial Sequence
  Description of Artificial Sequence: Synthetic oligonucleotide
cuccccagagcggccccccugggac

SEQ ID NO: 139561 - RNA, 25 nt, Artificial Sequence
  Description of Artificial Sequence: Synthetic oligonucleotide
cgccucccuccuacaaacugccuuu

SEQ ID NO: 139562 - RNA, 25 nt, Artificial Sequence
  Description of Artificial Sequence: Synthetic oligonucleotide
ugccugggcccuacgacagucgaga

SEQ ID NO: 139563 - RNA, 25 nt, Artificial Sequence
  Description of Artificial Sequence: Synthetic oligonucleotide
acgacuucccccuccgcaaaacagc

SEQ ID NO: 139564 - RNA, 25 nt, Artificial Sequence
  Description of Artificial Sequence: Synthetic oligonucleotide
ccucugaacccaacuugaaagugcg

SEQ ID NO: 139565 - RNA, 25 nt, Artificial Sequence
  Description of Artificial Sequence: Synthetic oligonucleotide
guucaaggcuaaaacagaagguggc

SEQ ID NO: 139566 - RNA, 25 nt, Artificial Sequence
  Description of Artificial Sequence: Synthetic oligonucleotide
cugagcggagaagcaguccccuccu

SEQ ID NO: 139567 - RNA, 25 nt, Artificial Sequence
  Description of Artificial Sequence: Synthetic oligonucleotide
ugcgucgcaaggaugggacuguuau

SEQ ID NO: 139568 - RNA, 25 nt, Artificial Sequence
  Description of Artificial Sequence: Synthetic oligonucleotide
uuagcaccuuuaagaagagagcugu

SEQ ID NO: 139569 - RNA, 25 nt, Artificial Sequence
  Description of Artificial Sequence: Synthetic oligonucleotide
uugagaucacaggugccgggccugg

SEQ ID NO: 139570 - RNA, 25 nt, Artificial Sequence
  Description of Artificial Sequence: Synthetic oligonucleotide
gggcgucguccguguguaacagcgc

SEQ ID NO: 139571 - RNA, 25 nt, Artificial Sequence
  Description of Artificial Sequence: Synthetic oligonucleotide
cacccggcuccggccccagcucucc

SEQ ID NO: 139572 - RNA, 25 nt, Artificial Sequence
  Description of Artificial Sequence: Synthetic oligonucleotide
ccaacagcucccacagcaccaucgc

SEQ ID NO: 139573 - RNA, 25 nt, Artificial Sequence
  Description of Artificial Sequence: Synthetic oligonucleotide
cugagaauggcuuuacuggcucagu

SEQ ID NO: 139574 - RNA, 25 nt, Artificial Sequence
  Description of Artificial Sequence: Synthetic oligonucleotide
uccccaacauccccacugagaugcu

SEQ ID NO: 139575 - RNA, 25 nt, Artificial Sequence
  Description of Artificial Sequence: Synthetic oligonucleotide
ucccucagcaccgagcccucccucu

SEQ ID NO: 139576 - RNA, 25 nt, Artificial Sequence
  Description of Artificial Sequence: Synthetic oligonucleotide
uggacagcucccccaaccaguucag

SEQ ID NO: 139577 - RNA, 25 nt, Artificial Sequence
  Description of Artificial Sequence: Synthetic oligonucleotide
gccucuacacgucuccuucucugcc

SEQ ID NO: 139578 - RNA, 25 nt, Artificial Sequence
  Description of Artificial Sequence: Synthetic oligonucleotide
ccaacaucucccuagggcugcaggc

SEQ ID NO: 139579 - RNA, 25 nt, Artificial Sequence
  Description of Artificial Sequence: Synthetic oligonucleotide
ccacggucacugucaccaacucaca

SEQ ID NO: 139580 - RNA, 25 nt, Artificial Sequence
  Description of Artificial Sequence: Synthetic oligonucleotide
accucacugccuccccgaagcuguc

SEQ ID NO: 139581 - RNA, 25 nt, Artificial Sequence
  Description of Artificial Sequence: Synthetic oligonucleotide
cgacacagcaggaggccgagaggca

SEQ ID NO: 139582 - RNA, 25 nt, Artificial Sequence
  Description of Artificial Sequence: Synthetic oligonucleotide
aggcccuccagucccugcggcaggg

SEQ ID NO: 139583 - RNA, 25 nt, Artificial Sequence
  Description of Artificial Sequence: Synthetic oligonucleotide
guggcacgcugaccggcaaguucau

SEQ ID NO: 139584 - RNA, 25 nt, Artificial Sequence
  Description of Artificial Sequence: Synthetic oligonucleotide
ugagcacauccucuauuccuggcug

SEQ ID NO: 139585 - RNA, 25 nt, Artificial Sequence
  Description of Artificial Sequence: Synthetic oligonucleotide
gccugcugggcguggcacuggaggg

SEQ ID NO: 139586 - RNA, 25 nt, Artificial Sequence
  Description of Artificial Sequence: Synthetic oligonucleotide
gcgacgggagcccccacgggcaugc

SEQ ID NO: 139587 - RNA, 25 nt, Artificial Sequence
  Description of Artificial Sequence: Synthetic oligonucleotide
ccucccugcugcagcaugugcuguu

SEQ ID NO: 139588 - RNA, 25 nt, Artificial Sequence
  Description of Artificial Sequence: Synthetic oligonucleotide
ugcuggagcaggcccggcagcagag

SEQ ID NO: 139589 - RNA, 25 nt, Artificial Sequence
  Description of Artificial Sequence: Synthetic oligonucleotide
gcacccucauugcugugccacucca

SEQ ID NO: 139590 - RNA, 25 nt, Artificial Sequence
  Description of Artificial Sequence: Synthetic oligonucleotide
acgggcaguccccacuagugacggg

SEQ ID NO: 139591 - RNA, 25 nt, Artificial Sequence
  Description of Artificial Sequence: Synthetic oligonucleotide
gugaacguguggccaccagcaugcg

SEQ ID NO: 139592 - RNA, 25 nt, Artificial Sequence
  Description of Artificial Sequence: Synthetic oligonucleotide
ggacgguaggcaagcucccgcggca

SEQ ID NO: 139593 - RNA, 25 nt, Artificial Sequence
  Description of Artificial Sequence: Synthetic oligonucleotide
aucggccccugagccgcacucaguc

SEQ ID NO: 139594 - RNA, 25 nt, Artificial Sequence
  Description of Artificial Sequence: Synthetic oligonucleotide
ccucaccgcugccgcagagucccca

SEQ ID NO: 139595 - RNA, 25 nt, Artificial Sequence
  Description of Artificial Sequence: Synthetic oligonucleotide
aggcccugcagcagcuggucaugca

SEQ ID NO: 139596 - RNA, 25 nt, Artificial Sequence
  Description of Artificial Sequence: Synthetic oligonucleotide
aacaacagcaccagcaguuccugga

SEQ ID NO: 139597 - RNA, 25 nt, Artificial Sequence
  Description of Artificial Sequence: Synthetic oligonucleotide
agaagcagaagcagcagcagcuaca

SEQ ID NO: 139598 - RNA, 25 nt, Artificial Sequence
  Description of Artificial Sequence: Synthetic oligonucleotide
agcugggcaagauccucaccaagac

SEQ ID NO: 139599 - RNA, 25 nt, Artificial Sequence
  Description of Artificial Sequence: Synthetic oligonucleotide
caggggagcugcccaggcagcccac

SEQ ID NO: 139600 - RNA, 25 nt, Artificial Sequence
  Description of Artificial Sequence: Synthetic oligonucleotide
ccacccacccugaggagacagagga

SEQ ID NO: 139601 - RNA, 25 nt, Artificial Sequence
  Description of Artificial Sequence: Synthetic oligonucleotide
aggagcugacggagcagcaggaggu

SEQ ID NO: 139602 - RNA, 25 nt, Artificial Sequence
  Description of Artificial Sequence: Synthetic oligonucleotide
ucuugcugggggagggagcccugac

SEQ ID NO: 139603 - RNA, 25 nt, Artificial Sequence
  Description of Artificial Sequence: Synthetic oligonucleotide
ccaugccccgggagggcuccacaga

SEQ ID NO: 139604 - RNA, 25 nt, Artificial Sequence
  Description of Artificial Sequence: Synthetic oligonucleotide
agagugagagcacacaggaagaccu

SEQ ID NO: 139605 - RNA, 25 nt, Artificial Sequence
  Description of Artificial Sequence: Synthetic oligonucleotide
uggaggaggaggacgaggaagacga

SEQ ID NO: 139606 - RNA, 25 nt, Artificial Sequence
  Description of Artificial Sequence: Synthetic oligonucleotide
auggggaggaggaggaggauugcau

SEQ ID NO: 139607 - RNA, 25 nt, Artificial Sequence
  Description of Artificial Sequence: Synthetic oligonucleotide
uccagguuaaggacgaggagggcga

SEQ ID NO: 139608 - RNA, 25 nt, Artificial Sequence
  Description of Artificial Sequence: Synthetic oligonucleotide
agaguggugcugaggaggggcccga

SEQ ID NO: 139609 - RNA, 25 nt, Artificial Sequence
  Description of Artificial Sequence: Synthetic oligonucleotide
acuuggaggagccuggugcuggaua

SEQ ID NO: 139610 - RNA, 25 nt, Artificial Sequence
  Description of Artificial Sequence: Synthetic oligonucleotide
acaaaaaacuguucucagaugccca

SEQ ID NO: 139611 - RNA, 25 nt, Artificial Sequence
  Description of Artificial Sequence: Synthetic oligonucleotide
agccgcugcagccuuugcaggugua

SEQ ID NO: 139612 - RNA, 25 nt, Artificial Sequence
  Description of Artificial Sequence: Synthetic oligonucleotide
accaggcgccccucagccuggccac

SEQ ID NO: 139613 - RNA, 25 nt, Artificial Sequence
  Description of Artificial Sequence: Synthetic oligonucleotide
cugugccccaccaggcccugggccg

SEQ ID NO: 139614 - RNA, 25 nt, Artificial Sequence
  Description of Artificial Sequence: Synthetic oligonucleotide
guacccaguccuccccugcugcccc

SEQ ID NO: 139615 - RNA, 25 nt, Artificial Sequence
  Description of Artificial Sequence: Synthetic oligonucleotide
cugggggcaugaagagccccccaga

SEQ ID NO: 139616 - RNA, 25 nt, Artificial Sequence
  Description of Artificial Sequence: Synthetic oligonucleotide
accagcccgucaagcaccucuucac

SEQ ID NO: 139617 - RNA, 25 nt, Artificial Sequence
  Description of Artificial Sequence: Synthetic oligonucleotide
ccacagguguggucuacgacacguu

SEQ ID NO: 139618 - RNA, 25 nt, Artificial Sequence
  Description of Artificial Sequence: Synthetic oligonucleotide
ucaugcuaaagcaccagugcaugug

SEQ ID NO: 139619 - RNA, 25 nt, Artificial Sequence
  Description of Artificial Sequence: Synthetic oligonucleotide
gcgggaacacacacgugcacccuga

SEQ ID NO: 139620 - RNA, 25 nt, Artificial Sequence
  Description of Artificial Sequence: Synthetic oligonucleotide
agcaugcuggccggauccagagcau

SEQ ID NO: 139621 - RNA, 25 nt, Artificial Sequence
  Description of Artificial Sequence: Synthetic oligonucleotide
ucuggucccggcugcaggagacagg

SEQ ID NO: 139622 - RNA, 25 nt, Artificial Sequence
  Description of Artificial Sequence: Synthetic oligonucleotide
gccugcuuagcaagugcgagcggau

SEQ ID NO: 139623 - RNA, 25 nt, Artificial Sequence
  Description of Artificial Sequence: Synthetic oligonucleotide
uccgaggucgcaaagccacgcuaga

SEQ ID NO: 139624 - RNA, 25 nt, Artificial Sequence
  Description of Artificial Sequence: Synthetic oligonucleotide
augagauccagacagugcacucuga

SEQ ID NO: 139625 - RNA, 25 nt, Artificial Sequence
  Description of Artificial Sequence: Synthetic oligonucleotide
aauaccacacccugcucuaugggac

SEQ ID NO: 139626 - RNA, 25 nt, Artificial Sequence
  Description of Artificial Sequence: Synthetic oligonucleotide
ccaguccccucaaccggcagaagcu

SEQ ID NO: 139627 - RNA, 25 nt, Artificial Sequence
  Description of Artificial Sequence: Synthetic oligonucleotide
uagacagcaagaaguugcucggccc

SEQ ID NO: 139628 - RNA, 25 nt, Artificial Sequence
  Description of Artificial Sequence: Synthetic oligonucleotide
ccaucagccagaagauguaugcugu

SEQ ID NO: 139629 - RNA, 25 nt, Artificial Sequence
  Description of Artificial Sequence: Synthetic oligonucleotide
ugcugccuugugggggcaucggggu

SEQ ID NO: 139630 - RNA, 25 nt, Artificial Sequence
  Description of Artificial Sequence: Synthetic oligonucleotide
uggacagugacaccguguggaauga

SEQ ID NO: 139631 - RNA, 25 nt, Artificial Sequence
  Description of Artificial Sequence: Synthetic oligonucleotide
agaugcacuccuccagugcugugcg

SEQ ID NO: 139632 - RNA, 25 nt, Artificial Sequence
  Description of Artificial Sequence: Synthetic oligonucleotide
gcauggcagugggcugccugcugga

SEQ ID NO: 139633 - RNA, 25 nt, Artificial Sequence
  Description of Artificial Sequence: Synthetic oligonucleotide
agcuggccuucaagguggcugcagg

SEQ ID NO: 139634 - RNA, 25 nt, Artificial Sequence
  Description of Artificial Sequence: Synthetic oligonucleotide
gagagcucaagaauggauuugccau

SEQ ID NO: 139635 - RNA, 25 nt, Artificial Sequence
  Description of Artificial Sequence: Synthetic oligonucleotide
ucauccggcccccaggacaccacgc

SEQ ID NO: 139636 - RNA, 25 nt, Artificial Sequence
  Description of Artificial Sequence: Synthetic oligonucleotide
ccgaggaauccacagccaugggauu

SEQ ID NO: 139637 - RNA, 25 nt, Artificial Sequence
  Description of Artificial Sequence: Synthetic oligonucleotide
ucugcuucuucaacucuguagccau

SEQ ID NO: 139638 - RNA, 25 nt, Artificial Sequence
  Description of Artificial Sequence: Synthetic oligonucleotide
ucaccgcaaaacuccuacagcagaa

SEQ ID NO: 139639 - RNA, 25 nt, Artificial Sequence
  Description of Artificial Sequence: Synthetic oligonucleotide
aguugaacgugggcaagguccucau

SEQ ID NO: 139640 - RNA, 25 nt, Artificial Sequence
  Description of Artificial Sequence: Synthetic oligonucleotide
ucguggacugggacauucaccaugg

SEQ ID NO: 139641 - RNA, 25 nt, Artificial Sequence
  Description of Artificial Sequence: Synthetic oligonucleotide
gcaauggcacccagcaggcguucua

SEQ ID NO: 139642 - RNA, 25 nt, Artificial Sequence
  Description of Artificial Sequence: Synthetic oligonucleotide
acaaugaccccucugugcucuacau

SEQ ID NO: 139643 - RNA, 25 nt, Artificial Sequence
  Description of Artificial Sequence: Synthetic oligonucleotide
ucucucugcaucgcuaugacaacgg

SEQ ID NO: 139644 - RNA, 25 nt, Artificial Sequence
  Description of Artificial Sequence: Synthetic oligonucleotide
ggaacuucuuuccaggcucuggggc

SEQ ID NO: 139645 - RNA, 25 nt, Artificial Sequence
  Description of Artificial Sequence: Synthetic oligonucleotide
cuccugaagagguugguggaggacc

SEQ ID NO: 139646 - RNA, 25 nt, Artificial Sequence
  Description of Artificial Sequence: Synthetic oligonucleotide
caggcgugggguacaaugugaacgu

SEQ ID NO: 139647 - RNA, 25 nt, Artificial Sequence
  Description of Artificial Sequence: Synthetic oligonucleotide
uggcauggacaggagguguggaccc

SEQ ID NO: 139648 - RNA, 25 nt, Artificial Sequence
  Description of Artificial Sequence: Synthetic oligonucleotide
cccccauuggagacguggaguaccu

SEQ ID NO: 139649 - RNA, 25 nt, Artificial Sequence
  Description of Artificial Sequence: Synthetic oligonucleotide
uuacagccuucaggacaguggugau

SEQ ID NO: 139650 - RNA, 25 nt, Artificial Sequence
  Description of Artificial Sequence: Synthetic oligonucleotide
ugcccauugcccacgaguucucacc

SEQ ID NO: 139651 - RNA, 25 nt, Artificial Sequence
  Description of Artificial Sequence: Synthetic oligonucleotide
cugaugugguccuagucuccgccgg

SEQ ID NO: 139652 - RNA, 25 nt, Artificial Sequence
  Description of Artificial Sequence: Synthetic oligonucleotide
gguuugaugcuguugaaggacaucu

SEQ ID NO: 139653 - RNA, 25 nt, Artificial Sequence
  Description of Artificial Sequence: Synthetic oligonucleotide
ugucuccucuggguggcuacucugu

SEQ ID NO: 139654 - RNA, 25 nt, Artificial Sequence
  Description of Artificial Sequence: Synthetic oligonucleotide
ucaccgccagauguuuuggccacuu

SEQ ID NO: 139655 - RNA, 25 nt, Artificial Sequence
  Description of Artificial Sequence: Synthetic oligonucleotide
ugaccaggcagcugaugacccuggc

SEQ ID NO: 139656 - RNA, 25 nt, Artificial Sequence
  Description of Artificial Sequence: Synthetic oligonucleotide
cagggggccggguggugcuggcccu

SEQ ID NO: 139657 - RNA, 25 nt, Artificial Sequence
  Description of Artificial Sequence: Synthetic oligonucleotide
uggagggaggccaugacuugaccgc

SEQ ID NO: 139658 - RNA, 25 nt, Artificial Sequence
  Description of Artificial Sequence: Synthetic oligonucleotide
ccaucugugaugccucugaggcuug

SEQ ID NO: 139659 - RNA, 25 nt, Artificial Sequence
  Description of Artificial Sequence: Synthetic oligonucleotide
gugucucggcucugcucaguguaga

SEQ ID NO: 139660 - RNA, 25 nt, Artificial Sequence
  Description of Artificial Sequence: Synthetic oligonucleotide
agcugcagcccuuggaugaggcagu

SEQ ID NO: 139661 - RNA, 25 nt, Artificial Sequence
  Description of Artificial Sequence: Synthetic oligonucleotide
ucuugcagcaaaagcccaacaucaa

SEQ ID NO: 139662 - RNA, 25 nt, Artificial Sequence
  Description of Artificial Sequence: Synthetic oligonucleotide
acgcaguggccacgcuagagaaagu

SEQ ID NO: 139663 - RNA, 25 nt, Artificial Sequence
  Description of Artificial Sequence: Synthetic oligonucleotide
ucaucgagauccagagcaaacacug

SEQ ID NO: 139664 - RNA, 25 nt, Artificial Sequence
  Description of Artificial Sequence: Synthetic oligonucleotide
ggagcugugugcagaaguucgccgc

SEQ ID NO: 139665 - RNA, 25 nt, Artificial Sequence
  Description of Artificial Sequence: Synthetic oligonucleotide
cuggucugggccggucccugcgaga

SEQ ID NO: 139666 - RNA, 25 nt, Artificial Sequence
  Description of Artificial Sequence: Synthetic oligonucleotide
aggcccaagcaggugagaccgagga

SEQ ID NO: 139667 - RNA, 25 nt, Artificial Sequence
  Description of Artificial Sequence: Synthetic oligonucleotide
aggccgagacugugagcgccauggc

SEQ ID NO: 139668 - RNA, 25 nt, Artificial Sequence
  Description of Artificial Sequence: Synthetic oligonucleotide
ccuugcugucggugggggccgagca

SEQ ID NO: 139669 - RNA, 25 nt, Artificial Sequence
  Description of Artificial Sequence: Synthetic oligonucleotide
aggcccaggcugcggcagcccggga

SEQ ID NO: 139670 - RNA, 25 nt, Artificial Sequence
  Description of Artificial Sequence: Synthetic oligonucleotide
aacacagccccaggccggcagagga

SEQ ID NO: 139671 - RNA, 25 nt, Artificial Sequence
  Description of Artificial Sequence: Synthetic oligonucleotide
agcccauggagcaggagccugcccu

SEQ ID NO: 139672 - RNA, 25 nt, Artificial Sequence
  Description of Artificial Sequence: Synthetic oligonucleotide
ugugacgccccggcccccaucccuc

SEQ ID NO: 139673 - RNA, 25 nt, Artificial Sequence
  Description of Artificial Sequence: Synthetic oligonucleotide
cugggcuucaccauugugauuuugu

SEQ ID NO: 139674 - RNA, 25 nt, Artificial Sequence
  Description of Artificial Sequence: Synthetic oligonucleotide
uuuauuuuuucuauuaaaaacaaaa

SEQ ID NO: 139675 - RNA, 25 nt, Artificial Sequence
  Description of Artificial Sequence: Synthetic oligonucleotide
aagucacacauucaacaaggugugc

SEQ ID NO: 139676 - RNA, 25 nt, Artificial Sequence
  Description of Artificial Sequence: Synthetic oligonucleotide
ccgugugggucucucagccuugccc

SEQ ID NO: 139677 - RNA, 25 nt, Artificial Sequence
  Description of Artificial Sequence: Synthetic oligonucleotide
ccuccugcuccucuacgcugccuca

SEQ ID NO: 139678 - RNA, 25 nt, Artificial Sequence
  Description of Artificial Sequence: Synthetic oligonucleotide
aggcccccagcccuguggcuuccac

SEQ ID NO: 139679 - RNA, 25 nt, Artificial Sequence
  Description of Artificial Sequence: Synthetic oligonucleotide
ccucagcucuagaagccugcucccu

SEQ ID NO: 139680 - RNA, 25 nt, Artificial Sequence
  Description of Artificial Sequence: Synthetic oligonucleotide
ucugcagggggugguggugucuucc

SEQ ID NO: 139681 - RNA, 25 nt, Artificial Sequence
  Description of Artificial Sequence: Synthetic oligonucleotide
ccagcccugucccaugugucccucc

SEQ ID NO: 139682 - RNA, 25 nt, Artificial Sequence
  Description of Artificial Sequence: Synthetic oligonucleotide
cccccauuuuccugcauucugucug

SEQ ID NO: 139683 - RNA, 25 nt, Artificial Sequence
  Description of Artificial Sequence: Synthetic oligonucleotide
guccuuuuccuccuuggagccuggg

SEQ ID NO: 139684 - RNA, 25 nt, Artificial Sequence
  Description of Artificial Sequence: Synthetic oligonucleotide
gccagcucaaggugggcacgggggc

SEQ ID NO: 139685 - RNA, 25 nt, Artificial Sequence
  Description of Artificial Sequence: Synthetic oligonucleotide
cccagacaguacucuccaguucugg

SEQ ID NO: 139686 - RNA, 25 nt, Artificial Sequence
  Description of Artificial Sequence: Synthetic oligonucleotide
gggccccccgagugaggagggaacg

SEQ ID NO: 139687 - RNA, 25 nt, Artificial Sequence
  Description of Artificial Sequence: Synthetic oligonucleotide
gggaagucggugccuugguuucagc

SEQ ID NO: 139688 - RNA, 25 nt, Artificial Sequence
  Description of Artificial Sequence: Synthetic oligonucleotide
cugauuuggggggaaaugccuuaau

SEQ ID NO: 139689 - RNA, 25 nt, Artificial Sequence
  Description of Artificial Sequence: Synthetic oligonucleotide
uuucacucuccucccuucuccagcc

SEQ ID NO: 139690 - RNA, 25 nt, Artificial Sequence
  Description of Artificial Sequence: Synthetic oligonucleotide
cucaggggaggaucuggaggaucca

SEQ ID NO: 139691 - RNA, 25 nt, Artificial Sequence
  Description of Artificial Sequence: Synthetic oligonucleotide
acuacugucuuuaagaugcagagug

SEQ ID NO: 139692 - RNA, 25 nt, Artificial Sequence
  Description of Artificial Sequence: Synthetic oligonucleotide
ggaggggaggugggcacccacccug

SEQ ID NO: 139693 - RNA, 25 nt, Artificial Sequence
  Description of Artificial Sequence: Synthetic oligonucleotide
gcgauucuccacccuuuccccuucu

SEQ ID NO: 139694 - RNA, 25 nt, Artificial Sequence
  Description of Artificial Sequence: Synthetic oligonucleotide
uuucguccucaccaucucugcagac

SEQ ID NO: 139695 - RNA, 25 nt, Artificial Sequence
  Description of Artificial Sequence: Synthetic oligonucleotide
ccccucuccuccuccuuccucuugg

SEQ ID NO: 139696 - RNA, 25 nt, Artificial Sequence
  Description of Artificial Sequence: Synthetic oligonucleotide
gucucagcacugaugggaggcuggu

SEQ ID NO: 139697 - RNA, 25 nt, Artificial Sequence
  Description of Artificial Sequence: Synthetic oligonucleotide
ugcccaagcuguggccugcagucug

SEQ ID NO: 139698 - RNA, 25 nt, Artificial Sequence
  Description of Artificial Sequence: Synthetic oligonucleotide
gugaggagggcugucuugccucaca

SEQ ID NO: 139699 - RNA, 25 nt, Artificial Sequence
  Description of Artificial Sequence: Synthetic oligonucleotide
acuccucacagccuacuuccccuuc

SEQ ID NO: 139700 - RNA, 25 nt, Artificial Sequence
  Description of Artificial Sequence: Synthetic oligonucleotide
ccccggggcugagagggugaaagug

SEQ ID NO: 139701 - RNA, 25 nt, Artificial Sequence
  Description of Artificial Sequence: Synthetic oligonucleotide
guguggggaaggagaggacugguuu

SEQ ID NO: 139702 - RNA, 25 nt, Artificial Sequence
  Description of Artificial Sequence: Synthetic oligonucleotide
uccuggguucucaggggccaggagg

SEQ ID NO: 139703 - RNA, 25 nt, Artificial Sequence
  Description of Artificial Sequence: Synthetic oligonucleotide
gaguaacagaaccaggucugcuccc

SEQ ID NO: 139704 - RNA, 25 nt, Artificial Sequence
  Description of Artificial Sequence: Synthetic oligonucleotide
ccaccuuacucggauggccucccug

SEQ ID NO: 139705 - RNA, 25 nt, Artificial Sequence
  Description of Artificial Sequence: Synthetic oligonucleotide
gccccucugcuggcacagccugggc

SEQ ID NO: 139706 - RNA, 25 nt, Artificial Sequence
  Description of Artificial Sequence: Synthetic oligonucleotide
caaggggagaagguggucccugcag

SEQ ID NO: 139707 - RNA, 25 nt, Artificial Sequence
  Description of Artificial Sequence: Synthetic oligonucleotide
gaggggcuccaggcuggugagagcc

SEQ ID NO: 139708 - RNA, 25 nt, Artificial Sequence
  Description of Artificial Sequence: Synthetic oligonucleotide
cccccugcugucaggaccagauuuu

SEQ ID NO: 139709 - RNA, 25 nt, Artificial Sequence
  Description of Artificial Sequence: Synthetic oligonucleotide
ucccagccauccagcaugcugcggg

SEQ ID NO: 139710 - RNA, 25 nt, Artificial Sequence
  Description of Artificial Sequence: Synthetic oligonucleotide
ggagaaggggcagaggcucaccucc

SEQ ID NO: 139711 - RNA, 25 nt, Artificial Sequence
  Description of Artificial Sequence: Synthetic oligonucleotide
ccuccuggggccuuuuguuuuggau

SEQ ID NO: 139712 - RNA, 25 nt, Artificial Sequence
  Description of Artificial Sequence: Synthetic oligonucleotide
uccuggggauggugagaauggaggu

SEQ ID NO: 139713 - RNA, 25 nt, Artificial Sequence
  Description of Artificial Sequence: Synthetic oligonucleotide
uucuagaagggguaaggccagaacc

SEQ ID NO: 139714 - RNA, 25 nt, Artificial Sequence
  Description of Artificial Sequence: Synthetic oligonucleotide
ccagggauccaggagucggcucuca

SEQ ID NO: 139715 - RNA, 25 nt, Artificial Sequence
  Description of Artificial Sequence: Synthetic oligonucleotide
agcuggagcuuccauaccuucuggg

SEQ ID NO: 139716 - RNA, 25 nt, Artificial Sequence
  Description of Artificial Sequence: Synthetic oligonucleotide
gcucccuuugcugaccaccagccca

SEQ ID NO: 139717 - RNA, 25 nt, Artificial Sequence
  Description of Artificial Sequence: Synthetic oligonucleotide
aagggagcuaagaccaggagggggc

SEQ ID NO: 139718 - RNA, 25 nt, Artificial Sequence
  Description of Artificial Sequence: Synthetic oligonucleotide
cugggcgcugucccuucucuuuccc

SEQ ID NO: 139719 - RNA, 25 nt, Artificial Sequence
  Description of Artificial Sequence: Synthetic oligonucleotide
caggagcccugccaggggcuguggg

SEQ ID NO: 139720 - RNA, 25 nt, Artificial Sequence
  Description of Artificial Sequence: Synthetic oligonucleotide
gccuacaaggcuuccaggggaugcc

SEQ ID NO: 139721 - RNA, 25 nt, Artificial Sequence
  Description of Artificial Sequence: Synthetic oligonucleotide
cauccagccuguaggaaaccaaaga

SEQ ID NO: 139722 - RNA, 25 nt, Artificial Sequence
  Description of Artificial Sequence: Synthetic oligonucleotide
augggaaguggcuccuagggggcug

SEQ ID NO: 139723 - RNA, 25 nt, Artificial Sequence
  Description of Artificial Sequence: Synthetic oligonucleotide
gacucuuccuuccuccuccucccca

SEQ ID NO: 139724 - RNA, 25 nt, Artificial Sequence
  Description of Artificial Sequence: Synthetic oligonucleotide
aguaccacauauacuuucucuccuu

SEQ ID NO: 139725 - RNA, 25 nt, Artificial Sequence
  Description of Artificial Sequence: Synthetic oligonucleotide
ucuaucuccagggccccaccaaucu

SEQ ID NO: 139726 - RNA, 25 nt, Artificial Sequence
  Description of Artificial Sequence: Synthetic oligonucleotide
uguuuacauauuuauuauccuaugg

SEQ ID NO: 139727 - RNA, 25 nt, Artificial Sequence
  Description of Artificial Sequence: Synthetic oligonucleotide
ggggccugagcaggauugagggagc

SEQ ID NO: 139728 - RNA, 25 nt, Artificial Sequence
  Description of Artificial Sequence: Synthetic oligonucleotide
ccaggggaggggcaggagucccagc

SEQ ID NO: 139729 - RNA, 25 nt, Artificial Sequence
  Description of Artificial Sequence: Synthetic oligonucleotide
caccaucgguucauagugugcuugu

SEQ ID NO: 139730 - RNA, 25 nt, Artificial Sequence
  Description of Artificial Sequence: Synthetic oligonucleotide
uguguuuguuuuagauccuccuggg

SEQ ID NO: 139731 - RNA, 25 nt, Artificial Sequence
  Description of Artificial Sequence: Synthetic oligonucleotide
gggauggggauggggccaggcucag

SEQ ID NO: 139732 - RNA, 25 nt, Artificial Sequence
  Description of Artificial Sequence: Synthetic oligonucleotide
guguacuaggccucucugugcugag

SEQ ID NO: 139733 - RNA, 25 nt, Artificial Sequence
  Description of Artificial Sequence: Synthetic oligonucleotide
gccccaggcucccggccccuuaccc

SEQ ID NO: 139734 - RNA, 25 nt, Artificial Sequence
  Description of Artificial Sequence: Synthetic oligonucleotide
cacucucucccuguggcuggucugg

SEQ ID NO: 139735 - RNA, 25 nt, Artificial Sequence
  Description of Artificial Sequence: Synthetic oligonucleotide
guucucauguaaacccacuccuugc

SEQ ID NO: 139736 - RNA, 25 nt, Artificial Sequence
  Description of Artificial Sequence: Synthetic oligonucleotide
cuuugucucccuggauauggauuuc

SEQ ID NO: 139737 - RNA, 25 nt, Artificial Sequence
  Description of Artificial Sequence: Synthetic oligonucleotide
caguuaaguauuuuguaacccguua

SEQ ID NO: 139738 - RNA, 25 nt, Artificial Sequence
  Description of Artificial Sequence: Synthetic oligonucleotide
acacuguguguccuuguguaaauaa

SEQ ID NO: 139739 - RNA, 25 nt, Artificial Sequence
  Description of Artificial Sequence: Synthetic oligonucleotide
aaauaaacuuguuucuggcagugcc

SEQ ID NO: 139740 - RNA, 25 nt, Artificial Sequence
  Description of Artificial Sequence: Synthetic oligonucleotide
acucucccaacgagucggcagaugg

SEQ ID NO: 139741 - RNA, 25 nt, Artificial Sequence
  Description of Artificial Sequence: Synthetic oligonucleotide
ggaugucaggucgggaaccauccuu

SEQ ID NO: 139742 - RNA, 25 nt, Artificial Sequence
  Description of Artificial Sequence: Synthetic oligonucleotide
uggaaauccugccgcggacuucucu

SEQ ID NO: 139743 - RNA, 25 nt, Artificial Sequence
  Description of Artificial Sequence: Synthetic oligonucleotide
ugcacagcaucccugugacagugga

SEQ ID NO: 139744 - RNA, 25 nt, Artificial Sequence
  Description of Artificial Sequence: Synthetic oligonucleotide
aggugaagccggugcugccaagagc

SEQ ID NO: 139745 - RNA, 25 nt, Artificial Sequence
  Description of Artificial Sequence: Synthetic oligonucleotide
ccaugcccaguuccauggggggugg

SEQ ID NO: 139746 - RNA, 25 nt, Artificial Sequence
  Description of Artificial Sequence: Synthetic oligonucleotide
gggguggaggcagccccagcccugu

SEQ ID NO: 139747 - RNA, 25 nt, Artificial Sequence
  Description of Artificial Sequence: Synthetic oligonucleotide
uggagcuacggggggcucugguggg

SEQ ID NO: 139748 - RNA, 25 nt, Artificial Sequence
  Description of Artificial Sequence: Synthetic oligonucleotide
gcucuguggaccccacacugcggga

SEQ ID NO: 139749 - RNA, 25 nt, Artificial Sequence
  Description of Artificial Sequence: Synthetic oligonucleotide
agcagcaacugcagcaggagcuccu

SEQ ID NO: 139750 - RNA, 25 nt, Artificial Sequence
  Description of Artificial Sequence: Synthetic oligonucleotide
uggcgcucaagcagcagcagcagcu

SEQ ID NO: 139751 - RNA, 25 nt, Artificial Sequence
  Description of Artificial Sequence: Synthetic oligonucleotide
ugcagaagcagcuccuguucgcuga

SEQ ID NO: 139752 - RNA, 25 nt, Artificial Sequence
  Description of Artificial Sequence: Synthetic oligonucleotide
aguuccagaaacagcaugaccaccu

SEQ ID NO: 139753 - RNA, 25 nt, Artificial Sequence
  Description of Artificial Sequence: Synthetic oligonucleotide
ugacaaggcagcaugagguccagcu

SEQ ID NO: 139754 - RNA, 25 nt, Artificial Sequence
  Description of Artificial Sequence: Synthetic oligonucleotide
ugcagaagcaccucaagcagcagca

SEQ ID NO: 139755 - RNA, 25 nt, Artificial Sequence
  Description of Artificial Sequence: Synthetic oligonucleotide
aggagaugcuggcagccaagcagca

SEQ ID NO: 139756 - RNA, 25 nt, Artificial Sequence
  Description of Artificial Sequence: Synthetic oligonucleotide
agcaggagaugcuggcagccaagcg

SEQ ID NO: 139757 - RNA, 25 nt, Artificial Sequence
  Description of Artificial Sequence: Synthetic oligonucleotide
ggcagcaggagcuggagcagcagcg

SEQ ID NO: 139758 - RNA, 25 nt, Artificial Sequence
  Description of Artificial Sequence: Synthetic oligonucleotide
ggcagcgggagcagcagcggcagga

SEQ ID NO: 139759 - RNA, 25 nt, Artificial Sequence
  Description of Artificial Sequence: Synthetic oligonucleotide
aagagcuggagaagcagcggcugga

SEQ ID NO: 139760 - RNA, 25 nt, Artificial Sequence
  Description of Artificial Sequence: Synthetic oligonucleotide
agcagcagcugcucauccugcggaa

SEQ ID NO: 139761 - RNA, 25 nt, Artificial Sequence
  Description of Artificial Sequence: Synthetic oligonucleotide
acaaggagaagagcaaagagagugc

SEQ ID NO: 139762 - RNA, 25 nt, Artificial Sequence
  Description of Artificial Sequence: Synthetic oligonucleotide
ccauugccagcacugagguaaagcu

SEQ ID NO: 139763 - RNA, 25 nt, Artificial Sequence
  Description of Artificial Sequence: Synthetic oligonucleotide
ugaggcuccaggaauuccucuuguc

SEQ ID NO: 139764 - RNA, 25 nt, Artificial Sequence
  Description of Artificial Sequence: Synthetic oligonucleotide
cgaagucaaaggagcccacaccagg

SEQ ID NO: 139765 - RNA, 25 nt, Artificial Sequence
  Description of Artificial Sequence: Synthetic oligonucleotide
gcggccucaaccauucccucccaca

SEQ ID NO: 139766 - RNA, 25 nt, Artificial Sequence
  Description of Artificial Sequence: Synthetic oligonucleotide
agcaccccaaaugcuggggagccca

SEQ ID NO: 139767 - RNA, 25 nt, Artificial Sequence
  Description of Artificial Sequence: Synthetic oligonucleotide
accaugcuucuuuggaccagaguuc

SEQ ID NO: 139768 - RNA, 25 nt, Artificial Sequence
  Description of Artificial Sequence: Synthetic oligonucleotide
ccccuccccagagcggccccccugg

SEQ ID NO: 139769 - RNA, 25 nt, Artificial Sequence
  Description of Artificial Sequence: Synthetic oligonucleotide
ggacgccucccuccuacaaacugcc

SEQ ID NO: 139770 - RNA, 25 nt, Artificial Sequence
  Description of Artificial Sequence: Synthetic oligonucleotide
cuuugccugggcccuacgacagucg

SEQ ID NO: 139771 - RNA, 25 nt, Artificial Sequence
  Description of Artificial Sequence: Synthetic oligonucleotide
gagacgacuucccccuccgcaaaac

SEQ ID NO: 139772 - RNA, 25 nt, Artificial Sequence
  Description of Artificial Sequence: Synthetic oligonucleotide
cagccucugaacccaacuugaaagu

SEQ ID NO: 139773 - RNA, 25 nt, Artificial Sequence
  Description of Artificial Sequence: Synthetic oligonucleotide
ugcguucaaggcuaaaacagaaggu

SEQ ID NO: 139774 - RNA, 25 nt, Artificial Sequence
  Description of Artificial Sequence: Synthetic oligonucleotide
uggcugagcggagaagcaguccccu

SEQ ID NO: 139775 - RNA, 25 nt, Artificial Sequence
  Description of Artificial Sequence: Synthetic oligonucleotide
uccugcgucgcaaggaugggacugu

SEQ ID NO: 139776 - RNA, 25 nt, Artificial Sequence
  Description of Artificial Sequence: Synthetic oligonucleotide
uuauuagcaccuuuaagaagagagc

SEQ ID NO: 139777 - RNA, 25 nt, Artificial Sequence
  Description of Artificial Sequence: Synthetic oligonucleotide
cuguugagaucacaggugccgggcc

SEQ ID NO: 139778 - RNA, 25 nt, Artificial Sequence
  Description of Artificial Sequence: Synthetic oligonucleotide
cuggggcgucguccguguguaacag

SEQ ID NO: 139779 - RNA, 25 nt, Artificial Sequence
  Description of Artificial Sequence: Synthetic oligonucleotide
gcgcacccggcuccggccccagcuc

SEQ ID NO: 139780 - RNA, 25 nt, Artificial Sequence
  Description of Artificial Sequence: Synthetic oligonucleotide
cucccaacagcucccacagcaccau

SEQ ID NO: 139781 - RNA, 25 nt, Artificial Sequence
  Description of Artificial Sequence: Synthetic oligonucleotide
ucgcugagaauggcuuuacuggcuc

SEQ ID NO: 139782 - RNA, 25 nt, Artificial Sequence
  Description of Artificial Sequence: Synthetic oligonucleotide
caguccccaacauccccacugagau

SEQ ID NO: 139783 - RNA, 25 nt, Artificial Sequence
  Description of Artificial Sequence: Synthetic oligonucleotide
ugcucccucagcaccgagcccuccc

SEQ ID NO: 139784 - RNA, 25 nt, Artificial Sequence
  Description of Artificial Sequence: Synthetic oligonucleotide
cucuggacagcucccccaaccaguu

SEQ ID NO: 139785 - RNA, 25 nt, Artificial Sequence
  Description of Artificial Sequence: Synthetic oligonucleotide
ucagccucuacacgucuccuucucu

SEQ ID NO: 139786 - RNA, 25 nt, Artificial Sequence
  Description of Artificial Sequence: Synthetic oligonucleotide
ugcccaacaucucccuagggcugca

SEQ ID NO: 139787 - RNA, 25 nt, Artificial Sequence
  Description of Artificial Sequence: Synthetic oligonucleotide
aggccacggucacugucaccaacuc

SEQ ID NO: 139788 - RNA, 25 nt, Artificial Sequence
  Description of Artificial Sequence: Synthetic oligonucleotide
cacaccucacugccuccccgaagcu

SEQ ID NO: 139789 - RNA, 25 nt, Artificial Sequence
  Description of Artificial Sequence: Synthetic oligonucleotide
ugucgacacagcaggaggccgagag

SEQ ID NO: 139790 - RNA, 25 nt, Artificial Sequence
  Description of Artificial Sequence: Synthetic oligonucleotide
ggcaggcccuccagucccugcggca

SEQ ID NO: 139791 - RNA, 25 nt, Artificial Sequence
  Description of Artificial Sequence: Synthetic oligonucleotide
aggguggcacgcugaccggcaaguu

SEQ ID NO: 139792 - RNA, 25 nt, Artificial Sequence
  Description of Artificial Sequence: Synthetic oligonucleotide
ucaugagcacauccucuauuccugg

SEQ ID NO: 139793 - RNA, 25 nt, Artificial Sequence
  Description of Artificial Sequence: Synthetic oligonucleotide
gcugccugcugggcguggcacugga

SEQ ID NO: 139794 - RNA, 25 nt, Artificial Sequence
  Description of Artificial Sequence: Synthetic oligonucleotide
agggcgacgggagcccccacgggca

SEQ ID NO: 139795 - RNA, 25 nt, Artificial Sequence
  Description of Artificial Sequence: Synthetic oligonucleotide
augccucccugcugcagcaugugcu

SEQ ID NO: 139796 - RNA, 25 nt, Artificial Sequence
  Description of Artificial Sequence: Synthetic oligonucleotide
uguugcuggagcaggcccggcagca

SEQ ID NO: 139797 - RNA, 25 nt, Artificial Sequence
  Description of Artificial Sequence: Synthetic oligonucleotide
agagcacccucauugcugugccacu

SEQ ID NO: 139798 - RNA, 25 nt, Artificial Sequence
  Description of Artificial Sequence: Synthetic oligonucleotide
uccacgggcaguccccacuagugac

SEQ ID NO: 139799 - RNA, 25 nt, Artificial Sequence
  Description of Artificial Sequence: Synthetic oligonucleotide
cgggugaacguguggccaccagcau

SEQ ID NO: 139800 - RNA, 25 nt, Artificial Sequence
  Description of Artificial Sequence: Synthetic oligonucleotide
ugcggacgguaggcaagcucccgcg

SEQ ID NO: 139801 - RNA, 25 nt, Artificial Sequence
  Description of Artificial Sequence: Synthetic oligonucleotide
ggcaucggccccugagccgcacuca

SEQ ID NO: 139802 - RNA, 25 nt, Artificial Sequence
  Description of Artificial Sequence: Synthetic oligonucleotide
aguccucaccgcugccgcagagucc

SEQ ID NO: 139803 - RNA, 25 nt, Artificial Sequence
  Description of Artificial Sequence: Synthetic oligonucleotide
cccaggcccugcagcagcuggucau

SEQ ID NO: 139804 - RNA, 25 nt, Artificial Sequence
  Description of Artificial Sequence: Synthetic oligonucleotide
ugcaacaacagcaccagcaguuccu

SEQ ID NO: 139805 - RNA, 25 nt, Artificial Sequence
  Description of Artificial Sequence: Synthetic oligonucleotide
uggagaagcagaagcagcagcagcu

SEQ ID NO: 139806 - RNA, 25 nt, Artificial Sequence
  Description of Artificial Sequence: Synthetic oligonucleotide
uacagcugggcaagauccucaccaa

SEQ ID NO: 139807 - RNA, 25 nt, Artificial Sequence
  Description of Artificial Sequence: Synthetic oligonucleotide
agacaggggagcugcccaggcagcc

SEQ ID NO: 139808 - RNA, 25 nt, Artificial Sequence
  Description of Artificial Sequence: Synthetic oligonucleotide
ccaccacccacccugaggagacaga

SEQ ID NO: 139809 - RNA, 25 nt, Artificial Sequence
  Description of Artificial Sequence: Synthetic oligonucleotide
aggaggagcugacggagcagcagga

SEQ ID NO: 139810 - RNA, 25 nt, Artificial Sequence
  Description of Artificial Sequence: Synthetic oligonucleotide
aggucuugcugggggagggagcccu

SEQ ID NO: 139811 - RNA, 25 nt, Artificial Sequence
  Description of Artificial Sequence: Synthetic oligonucleotide
ugaccaugccccgggagggcuccac

SEQ ID NO: 139812 - RNA, 25 nt, Artificial Sequence
  Description of Artificial Sequence: Synthetic oligonucleotide
cagagagugagagcacacaggaaga

SEQ ID NO: 139813 - RNA, 25 nt, Artificial Sequence
  Description of Artificial Sequence: Synthetic oligonucleotide
accuggaggaggaggacgaggaaga

SEQ ID NO: 139814 - RNA, 25 nt, Artificial Sequence
  Description of Artificial Sequence: Synthetic oligonucleotide
acgauggggaggaggaggaggauug

SEQ ID NO: 139815 - RNA, 25 nt, Artificial Sequence
  Description of Artificial Sequence: Synthetic oligonucleotide
gcauccagguuaaggacgaggaggg

SEQ ID NO: 139816 - RNA, 25 nt, Artificial Sequence
  Description of Artificial Sequence: Synthetic oligonucleotide
gcgagaguggugcugaggaggggcc

SEQ ID NO: 139817 - RNA, 25 nt, Artificial Sequence
  Description of Artificial Sequence: Synthetic oligonucleotide
ccgacuuggaggagccuggugcugg

SEQ ID NO: 139818 - RNA, 25 nt, Artificial Sequence
  Description of Artificial Sequence: Synthetic oligonucleotide
gauacaaaaaacuguucucagaugc

SEQ ID NO: 139819 - RNA, 25 nt, Artificial Sequence
  Description of Artificial Sequence: Synthetic oligonucleotide
cccagccgcugcagccuuugcaggu

SEQ ID NO: 139820 - RNA, 25 nt, Artificial Sequence
  Description of Artificial Sequence: Synthetic oligonucleotide
uguaccaggcgccccucagccuggc

SEQ ID NO: 139821 - RNA, 25 nt, Artificial Sequence
  Description of Artificial Sequence: Synthetic oligonucleotide
ccacugugccccaccaggcccuggg

SEQ ID NO: 139822 - RNA, 25 nt, Artificial Sequence
  Description of Artificial Sequence: Synthetic oligonucleotide
gccguacccaguccuccccugcugc

SEQ ID NO: 139823 - RNA, 25 nt, Artificial Sequence
  Description of Artificial Sequence: Synthetic oligonucleotide
ccccugggggcaugaagagcccccc

SEQ ID NO: 139824 - RNA, 25 nt, Artificial Sequence
  Description of Artificial Sequence: Synthetic oligonucleotide
cagaccagcccgucaagcaccucuu

SEQ ID NO: 139825 - RNA, 25 nt, Artificial Sequence
  Description of Artificial Sequence: Synthetic oligonucleotide
ucaccacagguguggucuacgacac

SEQ ID NO: 139826 - RNA, 25 nt, Artificial Sequence
  Description of Artificial Sequence: Synthetic oligonucleotide
cguucaugcuaaagcaccagugcau

SEQ ID NO: 139827 - RNA, 25 nt, Artificial Sequence
  Description of Artificial Sequence: Synthetic oligonucleotide
ugugcgggaacacacacgugcaccc

SEQ ID NO: 139828 - RNA, 25 nt, Artificial Sequence
  Description of Artificial Sequence: Synthetic oligonucleotide
cugagcaugcuggccggauccagag

SEQ ID NO: 139829 - RNA, 25 nt, Artificial Sequence
  Description of Artificial Sequence: Synthetic oligonucleotide
gcaucuggucccggcugcaggagac

SEQ ID NO: 139830 - RNA, 25 nt, Artificial Sequence
  Description of Artificial Sequence: Synthetic oligonucleotide
caggccugcuuagcaagugcgagcg

SEQ ID NO: 139831 - RNA, 25 nt, Artificial Sequence
  Description of Artificial Sequence: Synthetic oligonucleotide
ggauccgaggucgcaaagccacgcu

SEQ ID NO: 139832 - RNA, 25 nt, Artificial Sequence
  Description of Artificial Sequence: Synthetic oligonucleotide
uagaugagauccagacagugcacuc

SEQ ID NO: 139833 - RNA, 25 nt, Artificial Sequence
  Description of Artificial Sequence: Synthetic oligonucleotide
cugaauaccacacccugcucuaugg

SEQ ID NO: 139834 - RNA, 25 nt, Artificial Sequence
  Description of Artificial Sequence: Synthetic oligonucleotide
ggaccaguccccucaaccggcagaa

SEQ ID NO: 139835 - RNA, 25 nt, Artificial Sequence
  Description of Artificial Sequence: Synthetic oligonucleotide
agcuagacagcaagaaguugcucgg

SEQ ID NO: 139836 - RNA, 25 nt, Artificial Sequence
  Description of Artificial Sequence: Synthetic oligonucleotide
gccccaucagccagaagauguaugc

SEQ ID NO: 139837 - RNA, 25 nt, Artificial Sequence
  Description of Artificial Sequence: Synthetic oligonucleotide
cugugcugccuugugggggcaucgg

SEQ ID NO: 139838 - RNA, 25 nt, Artificial Sequence
  Description of Artificial Sequence: Synthetic oligonucleotide
ggguggacagugacaccguguggaa

SEQ ID NO: 139839 - RNA, 25 nt, Artificial Sequence
  Description of Artificial Sequence: Synthetic oligonucleotide
augagaugcacuccuccagugcugu

SEQ ID NO: 139840 - RNA, 25 nt, Artificial Sequence
  Description of Artificial Sequence: Synthetic oligonucleotide
ugcgcauggcagugggcugccugcu

SEQ ID NO: 139841 - RNA, 25 nt, Artificial Sequence
  Description of Artificial Sequence: Synthetic oligonucleotide
uggagcuggccuucaagguggcugc

SEQ ID NO: 139842 - RNA, 25 nt, Artificial Sequence
  Description of Artificial Sequence: Synthetic oligonucleotide
caggagagcucaagaauggauuugc

SEQ ID NO: 139843 - RNA, 25 nt, Artificial Sequence
  Description of Artificial Sequence: Synthetic oligonucleotide
ccaucauccggcccccaggacacca

SEQ ID NO: 139844 - RNA, 25 nt, Artificial Sequence
  Description of Artificial Sequence: Synthetic oligonucleotide
acgccgaggaauccacagccauggg

SEQ ID NO: 139845 - RNA, 25 nt, Artificial Sequence
  Description of Artificial Sequence: Synthetic oligonucleotide
gauucugcuucuucaacucuguagc

SEQ ID NO: 139846 - RNA, 25 nt, Artificial Sequence
  Description of Artificial Sequence: Synthetic oligonucleotide
ccaucaccgcaaaacuccuacagca

SEQ ID NO: 139847 - RNA, 25 nt, Artificial Sequence
  Description of Artificial Sequence: Synthetic oligonucleotide
agaaguugaacgugggcaagguccu

SEQ ID NO: 139848 - RNA, 25 nt, Artificial Sequence
  Description of Artificial Sequence: Synthetic oligonucleotide
ucaucguggacugggacauucacca

SEQ ID NO: 139849 - RNA, 25 nt, Artificial Sequence
  Description of Artificial Sequence: Synthetic oligonucleotide
auggcaauggcacccagcaggcguu

SEQ ID NO: 139850 - RNA, 25 nt, Artificial Sequence
  Description of Artificial Sequence: Synthetic oligonucleotide
ucuacaaugaccccucugugcucua

SEQ ID NO: 139851 - RNA, 25 nt, Artificial Sequence
  Description of Artificial Sequence: Synthetic oligonucleotide
acaucucucugcaucgcuaugacaa

SEQ ID NO: 139852 - RNA, 25 nt, Artificial Sequence
  Description of Artificial Sequence: Synthetic oligonucleotide
acgggaacuucuuuccaggcucugg

SEQ ID NO: 139853 - RNA, 25 nt, Artificial Sequence
  Description of Artificial Sequence: Synthetic oligonucleotide
gggcuccugaagagguugguggagg

SEQ ID NO: 139854 - RNA, 25 nt, Artificial Sequence
  Description of Artificial Sequence: Synthetic oligonucleotide
gaccaggcgugggguacaaugugaa

SEQ ID NO: 139855 - RNA, 25 nt, Artificial Sequence
  Description of Artificial Sequence: Synthetic oligonucleotide
acguggcauggacaggaggugugga

SEQ ID NO: 139856 - RNA, 25 nt, Artificial Sequence
  Description of Artificial Sequence: Synthetic oligonucleotide
acccccccauuggagacguggagua

SEQ ID NO: 139857 - RNA, 25 nt, Artificial Sequence
  Description of Artificial Sequence: Synthetic oligonucleotide
accuuacagccuucaggacaguggu

SEQ ID NO: 139858 - RNA, 25 nt, Artificial Sequence
  Description of Artificial Sequence: Synthetic oligonucleotide
ugaugcccauugcccacgaguucuc

SEQ ID NO: 139859 - RNA, 25 nt, Artificial Sequence
  Description of Artificial Sequence: Synthetic oligonucleotide
caccugaugugguccuagucuccgc

SEQ ID NO: 139860 - RNA, 25 nt, Artificial Sequence
  Description of Artificial Sequence: Synthetic oligonucleotide
ccggguuugaugcuguugaaggaca

SEQ ID NO: 139861 - RNA, 25 nt, Artificial Sequence
  Description of Artificial Sequence: Synthetic oligonucleotide
aucugucuccucuggguggcuacuc

SEQ ID NO: 139862 - RNA, 25 nt, Artificial Sequence
  Description of Artificial Sequence: Synthetic oligonucleotide
cugucaccgccagauguuuuggcca

SEQ ID NO: 139863 - RNA, 25 nt, Artificial Sequence
  Description of Artificial Sequence: Synthetic oligonucleotide
acuugaccaggcagcugaugacccu

SEQ ID NO: 139864 - RNA, 25 nt, Artificial Sequence
  Description of Artificial Sequence: Synthetic oligonucleotide
uggcagggggccggguggugcuggc

SEQ ID NO: 139865 - RNA, 25 nt, Artificial Sequence
  Description of Artificial Sequence: Synthetic oligonucleotide
cccuggagggaggccaugacuugac

SEQ ID NO: 139866 - RNA, 25 nt, Artificial Sequence
  Description of Artificial Sequence: Synthetic oligonucleotide
ccgccaucugugaugccucugaggc

SEQ ID NO: 139867 - RNA, 25 nt, Artificial Sequence
  Description of Artificial Sequence: Synthetic oligonucleotide
cuugugucucggcucugcucagugu

SEQ ID NO: 139868 - RNA, 25 nt, Artificial Sequence
  Description of Artificial Sequence: Synthetic oligonucleotide
uagagcugcagcccuuggaugaggc

SEQ ID NO: 139869 - RNA, 25 nt, Artificial Sequence
  Description of Artificial Sequence: Synthetic oligonucleotide
cagucuugcagcaaaagcccaacau

SEQ ID NO: 139870 - RNA, 25 nt, Artificial Sequence
  Description of Artificial Sequence: Synthetic oligonucleotide
ucaacgcaguggccacgcuagagaa

SEQ ID NO: 139871 - RNA, 25 nt, Artificial Sequence
  Description of Artificial Sequence: Synthetic oligonucleotide
aagucaucgagauccagagcaaaca

SEQ ID NO: 139872 - RNA, 25 nt, Artificial Sequence
  Description of Artificial Sequence: Synthetic oligonucleotide
acuggagcugugugcagaaguucgc

SEQ ID NO: 139873 - RNA, 25 nt, Artificial Sequence
  Description of Artificial Sequence: Synthetic oligonucleotide
ccgcuggucugggccggucccugcg

SEQ ID NO: 139874 - RNA, 25 nt, Artificial Sequence
  Description of Artificial Sequence: Synthetic oligonucleotide
gagaggcccaagcaggugagaccga

SEQ ID NO: 139875 - RNA, 25 nt, Artificial Sequence
  Description of Artificial Sequence: Synthetic oligonucleotide
aggaggccgagacugugagcgccau

SEQ ID NO: 139876 - RNA, 25 nt, Artificial Sequence
  Description of Artificial Sequence: Synthetic oligonucleotide
uggccuugcugucggugggggccga

SEQ ID NO: 139877 - RNA, 25 nt, Artificial Sequence
  Description of Artificial Sequence: Synthetic oligonucleotide
agcaggcccaggcugcggcagcccg

SEQ ID NO: 139878 - RNA, 25 nt, Artificial Sequence
  Description of Artificial Sequence: Synthetic oligonucleotide
gggaacacagccccaggccggcaga

SEQ ID NO: 139879 - RNA, 25 nt, Artificial Sequence
  Description of Artificial Sequence: Synthetic oligonucleotide
aggagcccauggagcaggagccugc

SEQ ID NO: 139880 - RNA, 25 nt, Artificial Sequence
  Description of Artificial Sequence: Synthetic oligonucleotide
cccugugacgccccggcccccaucc

SEQ ID NO: 139881 - RNA, 25 nt, Artificial Sequence
  Description of Artificial Sequence: Synthetic oligonucleotide
ccucugggcuucaccauugugauuu

SEQ ID NO: 139882 - RNA, 25 nt, Artificial Sequence
  Description of Artificial Sequence: Synthetic oligonucleotide
uuguuuauuuuuucuauuaaaaaca

SEQ ID NO: 139883 - RNA, 25 nt, Artificial Sequence
  Description of Artificial Sequence: Synthetic oligonucleotide
aaaaagucacacauucaacaaggug

SEQ ID NO: 139884 - RNA, 25 nt, Artificial Sequence
  Description of Artificial Sequence: Synthetic oligonucleotide
gugccgugugggucucucagccuug

SEQ ID NO: 139885 - RNA, 25 nt, Artificial Sequence
  Description of Artificial Sequence: Synthetic oligonucleotide
gccccuccugcuccucuacgcugcc

SEQ ID NO: 139886 - RNA, 25 nt, Artificial Sequence
  Description of Artificial Sequence: Synthetic oligonucleotide
cucaggcccccagcccuguggcuuc

SEQ ID NO: 139887 - RNA, 25 nt, Artificial Sequence
  Description of Artificial Sequence: Synthetic oligonucleotide
ccaccucagcucuagaagccugcuc

SEQ ID NO: 139888 - RNA, 25 nt, Artificial Sequence
  Description of Artificial Sequence: Synthetic oligonucleotide
cccucugcagggggugguggugucu

SEQ ID NO: 139889 - RNA, 25 nt, Artificial Sequence
  Description of Artificial Sequence: Synthetic oligonucleotide
uucccagcccugucccauguguccc

SEQ ID NO: 139890 - RNA, 25 nt, Artificial Sequence
  Description of Artificial Sequence: Synthetic oligonucleotide
cuccccccauuuuccugcauucugu

SEQ ID NO: 139891 - RNA, 25 nt, Artificial Sequence
  Description of Artificial Sequence: Synthetic oligonucleotide
ucuguccuuuuccuccuuggagccu

SEQ ID NO: 139892 - RNA, 25 nt, Artificial Sequence
  Description of Artificial Sequence: Synthetic oligonucleotide
ugggccagcucaaggugggcacggg

SEQ ID NO: 139893 - RNA, 25 nt, Artificial Sequence
  Description of Artificial Sequence: Synthetic oligonucleotide
gggcccagacaguacucuccaguuc

SEQ ID NO: 139894 - RNA, 25 nt, Artificial Sequence
  Description of Artificial Sequence: Synthetic oligonucleotide
cuggggccccccgagugaggaggga

SEQ ID NO: 139895 - RNA, 25 nt, Artificial Sequence
  Description of Artificial Sequence: Synthetic oligonucleotide
aacgggaagucggugccuugguuuc

SEQ ID NO: 139896 - RNA, 25 nt, Artificial Sequence
  Description of Artificial Sequence: Synthetic oligonucleotide
cagcugauuuggggggaaaugccuu

SEQ ID NO: 139897 - RNA, 25 nt, Artificial Sequence
  Description of Artificial Sequence: Synthetic oligonucleotide
uaauuucacucuccucccuucucca

SEQ ID NO: 139898 - RNA, 25 nt, Artificial Sequence
  Description of Artificial Sequence: Synthetic oligonucleotide
agccucaggggaggaucuggaggau

SEQ ID NO: 139899 - RNA, 25 nt, Artificial Sequence
  Description of Artificial Sequence: Synthetic oligonucleotide
uccacuacugucuuuaagaugcaga

SEQ ID NO: 139900 - RNA, 25 nt, Artificial Sequence
  Description of Artificial Sequence: Synthetic oligonucleotide
aguggaggggaggugggcacccacc

SEQ ID NO: 139901 - RNA, 25 nt, Artificial Sequence
  Description of Artificial Sequence: Synthetic oligonucleotide
ccugcgauucuccacccuuuccccu

SEQ ID NO: 139902 - RNA, 25 nt, Artificial Sequence
  Description of Artificial Sequence: Synthetic oligonucleotide
uucuuucguccucaccaucucugca

SEQ ID NO: 139903 - RNA, 25 nt, Artificial Sequence
  Description of Artificial Sequence: Synthetic oligonucleotide
agaccccucuccuccuccuuccucu

SEQ ID NO: 139904 - RNA, 25 nt, Artificial Sequence
  Description of Artificial Sequence: Synthetic oligonucleotide
uuggucucagcacugaugggaggcu

SEQ ID NO: 139905 - RNA, 25 nt, Artificial Sequence
  Description of Artificial Sequence: Synthetic oligonucleotide
uggugcccaagcuguggccugcagu

SEQ ID NO: 139906 - RNA, 25 nt, Artificial Sequence
  Description of Artificial Sequence: Synthetic oligonucleotide
ucugugaggagggcugucuugccuc

SEQ ID NO: 139907 - RNA, 25 nt, Artificial Sequence
  Description of Artificial Sequence: Synthetic oligonucleotide
cacacuccucacagccuacuucccc

SEQ ID NO: 139908 - RNA, 25 nt, Artificial Sequence
  Description of Artificial Sequence: Synthetic oligonucleotide
cuuccccggggcugagagggugaaa

SEQ ID NO: 139909 - RNA, 25 nt, Artificial Sequence
  Description of Artificial Sequence: Synthetic oligonucleotide
aguguguggggaaggagaggacugg

SEQ ID NO: 139910 - RNA, 25 nt, Artificial Sequence
  Description of Artificial Sequence: Synthetic oligonucleotide
guuuccuggguucucaggggccagg

SEQ ID NO: 139911 - RNA, 25 nt, Artificial Sequence
  Description of Artificial Sequence: Synthetic oligonucleotide
gaggaguaacagaaccaggucugcu

SEQ ID NO: 139912 - RNA, 25 nt, Artificial Sequence
  Description of Artificial Sequence: Synthetic oligonucleotide
uccccaccuuacucggauggccucc

SEQ ID NO: 139913 - RNA, 25 nt, Artificial Sequence
  Description of Artificial Sequence: Synthetic oligonucleotide
ccugccccucugcuggcacagccug

SEQ ID NO: 139914 - RNA, 25 nt, Artificial Sequence
  Description of Artificial Sequence: Synthetic oligonucleotide
gggcaaggggagaagguggucccug

SEQ ID NO: 139915 - RNA, 25 nt, Artificial Sequence
  Description of Artificial Sequence: Synthetic oligonucleotide
gcagaggggcuccaggcuggugaga

SEQ ID NO: 139916 - RNA, 25 nt, Artificial Sequence
  Description of Artificial Sequence: Synthetic oligonucleotide
agccccccugcugucaggaccagau

SEQ ID NO: 139917 - RNA, 25 nt, Artificial Sequence
  Description of Artificial Sequence: Synthetic oligonucleotide
uuuucccagccauccagcaugcugc

SEQ ID NO: 139918 - RNA, 25 nt, Artificial Sequence
  Description of Artificial Sequence: Synthetic oligonucleotide
cggggagaaggggcagaggcucacc

SEQ ID NO: 139919 - RNA, 25 nt, Artificial Sequence
  Description of Artificial Sequence: Synthetic oligonucleotide
cucccuccuggggccuuuuguuuug

SEQ ID NO: 139920 - RNA, 25 nt, Artificial Sequence
  Description of Artificial Sequence: Synthetic oligonucleotide
ggauccuggggauggugagaaugga

SEQ ID NO: 139921 - RNA, 25 nt, Artificial Sequence
  Description of Artificial Sequence: Synthetic oligonucleotide
agguucuagaagggguaaggccaga

SEQ ID NO: 139922 - RNA, 25 nt, Artificial Sequence
  Description of Artificial Sequence: Synthetic oligonucleotide
aacccagggauccaggagucggcuc

SEQ ID NO: 139923 - RNA, 25 nt, Artificial Sequence
  Description of Artificial Sequence: Synthetic oligonucleotide
cucagcuggagcuuccauaccuucu

SEQ ID NO: 139924 - RNA, 25 nt, Artificial Sequence
  Description of Artificial Sequence: Synthetic oligonucleotide
ugggcucccuuugcugaccaccagc

SEQ ID NO: 139925 - RNA, 25 nt, Artificial Sequence
  Description of Artificial Sequence: Synthetic oligonucleotide
cccaagggagcuaagaccaggaggg

SEQ ID NO: 139926 - RNA, 25 nt, Artificial Sequence
  Description of Artificial Sequence: Synthetic oligonucleotide
gggcugggcgcugucccuucucuuu

SEQ ID NO: 139927 - RNA, 25 nt, Artificial Sequence
  Description of Artificial Sequence: Synthetic oligonucleotide
ucccaggagcccugccaggggcugu

SEQ ID NO: 139928 - RNA, 25 nt, Artificial Sequence
  Description of Artificial Sequence: Synthetic oligonucleotide
ugggccuacaaggcuuccaggggau

SEQ ID NO: 139929 - RNA, 25 nt, Artificial Sequence
  Description of Artificial Sequence: Synthetic oligonucleotide
ugccauccagccuguaggaaaccaa

SEQ ID NO: 139930 - RNA, 25 nt, Artificial Sequence
  Description of Artificial Sequence: Synthetic oligonucleotide
aagaugggaaguggcuccuaggggg

SEQ ID NO: 139931 - RNA, 25 nt, Artificial Sequence
  Description of Artificial Sequence: Synthetic oligonucleotide
gcugacucuuccuuccuccuccucc

SEQ ID NO: 139932 - RNA, 25 nt, Artificial Sequence
  Description of Artificial Sequence: Synthetic oligonucleotide
cccaguaccacauauacuuucucuc

SEQ ID NO: 139933 - RNA, 25 nt, Artificial Sequence
  Description of Artificial Sequence: Synthetic oligonucleotide
ccuucuaucuccagggccccaccaa

SEQ ID NO: 139934 - RNA, 25 nt, Artificial Sequence
  Description of Artificial Sequence: Synthetic oligonucleotide
aucuguuuacauauuuauuauccua

SEQ ID NO: 139935 - RNA, 25 nt, Artificial Sequence
  Description of Artificial Sequence: Synthetic oligonucleotide
augggggccugagcaggauugaggg

SEQ ID NO: 139936 - RNA, 25 nt, Artificial Sequence
  Description of Artificial Sequence: Synthetic oligonucleotide
gagccaggggaggggcaggaguccc

SEQ ID NO: 139937 - RNA, 25 nt, Artificial Sequence
  Description of Artificial Sequence: Synthetic oligonucleotide
cagcaccaucgguucauagugugcu

SEQ ID NO: 139938 - RNA, 25 nt, Artificial Sequence
  Description of Artificial Sequence: Synthetic oligonucleotide
uuguguguuuguuuuagauccuccu

SEQ ID NO: 139939 - RNA, 25 nt, Artificial Sequence
  Description of Artificial Sequence: Synthetic oligonucleotide
ugggggauggggauggggccaggcu

SEQ ID NO: 139940 - RNA, 25 nt, Artificial Sequence
  Description of Artificial Sequence: Synthetic oligonucleotide
ucaguguacuaggccucucugugcu

SEQ ID NO: 139941 - RNA, 25 nt, Artificial Sequence
  Description of Artificial Sequence: Synthetic oligonucleotide
ugagccccaggcucccggccccuua

SEQ ID NO: 139942 - RNA, 25 nt, Artificial Sequence
  Description of Artificial Sequence: Synthetic oligonucleotide
acccacucucucccuguggcugguc

SEQ ID NO: 139943 - RNA, 25 nt, Artificial Sequence
  Description of Artificial Sequence: Synthetic oligonucleotide
cugguucucauguaaacccacuccu

SEQ ID NO: 139944 - RNA, 25 nt, Artificial Sequence
  Description of Artificial Sequence: Synthetic oligonucleotide
uugcuuugucucccuggauauggau

SEQ ID NO: 139945 - RNA, 25 nt, Artificial Sequence
  Description of Artificial Sequence: Synthetic oligonucleotide
uuucaguuaaguauuuuguaacccg

SEQ ID NO: 139946 - RNA, 25 nt, Artificial Sequence
  Description of Artificial Sequence: Synthetic oligonucleotide
guuacacuguguguccuuguguaaa

SEQ ID NO: 139947 - RNA, 4099 nt, Homo sapiens
gggcaguccccugaggagcggggcugguugaaacgcuaggggcgggaucuggcggaguggaagaaccgcggcaggggccaagccuccucaacuaugaccucaaccggccaggauuccaccacaaccaggcagcgaagaaguaggcagaacccccagucgcccccucaggacuccagugucacuucgaagcgaaauauuaaaaagggagccguuccccgcucuauccccaaucuagcggagguaaagaagaaaggcaaaaugaagaagcucggccaagcaauggaagaagaccuaaucgugggacugcaagggauggaucugaaccuugaggcugaagcacuggcuggcacuggcuugguguuggaugagcaguuaaaugaauuccauugccucugggaugacagcuucccggaaggcccugagcggcuccaugccaucaaggagcaacugauccaggagggccuccuagaucgcugcguguccuuucaggcccgguuugcugaaaaggaagagcugauguugguucacagccuagaauauauugaucugauggaaacaacccaguacaugaaugagggagaacuccguguccuagcagacaccuacgacucaguuuaucugcauccgaacucauacuccugugccugccuggccucaggcucuguccucaggcugguggaugcgguccugggggcugagauccggaauggcauggccaucauuaggccuccuggacaucacgcccagcacagucuuauggauggcuauugcauguucaaccacguggcuguggcagcccgcuaugcucaacagaaacaccgcauccggaggguccuuaucguagauugggaugugcaccacggucaaggaacacaguucaccuucgaccaggaccccaguguccucuauuucuccauccaccgcuacgagcaggguagguucuggccccaccugaaggccucuaacugguccaccacagguuucggccaaggccaaggauauaccaucaaugugccuuggaaccagguggggaugcgggaugcugacuacauugcugcuuuccugcacguccugcugccagucgcccucgaguuccagccucagcugguccugguggcugcuggauuugaugcccugcaaggggaccccaagggugagauggccgccacuccggcaggguucgcccagcuaacccaccugcucaugggucuggcaggaggcaagcugauccugucucuggaggguggcuacaaccuccgcgcccuggcugaaggcgucagugcuucgcuccacacccuucugggagacccuugccccaugcuggagucaccuggugcccccugccggagugcccaggcuucaguuuccugugcucuggaagcccuugagcccuucugggagguucuugugagaucaacugagaccguggagagggacaacauggaggaggacaauguagaggagagcgaggaggaaggacccugggagcccccugugcucccaauccugacauggccagugcuacagucucgcacagggcuggucuaugaccaaaauaugaugaaucacugcaacuugugggacagccaccacccugagguaccccagcgcaucuugcggaucaugugccgucuggaggagcugggccuugccgggcgcugccucacccugacaccgcgcccugccacagaggcugagcugcucaccugucacagugcugaguacgugggucaucuccgggccacagagaaaaugaaaacccgggagcugcaccgugagaguuccaacuuugacuccaucuauaucugccccaguaccuucgccugugcacagcuugccacuggcgcugccugccgccugguggaggcugugcucucaggagagguucugaauggugcugcuguggugcgucccccaggacaccacgcagagcaggaugcagcuugcgguuuuugcuuuuucaacucuguggcuguggcugcucgccaugcccagacuaucagugggcaugcccuacggauccugauuguggauugggauguccaccacgguaauggaacucagcacauguuugaggaugaccccagugugcuauaugugucccugcaccgcuaugaucauggcaccuucuuccccaugggggaugagggugccagcagccagaucggccgggcugcgggcacaggcuucaccgucaacguggcauggaacgggccccgcaugggugaugcugacuaccuagcugccuggcaucgccuggugcuucccauugccuacgaguuuaacccagaacuggugcuggucucagcuggcuuugaugcugcacggggggauccgcuggggggcugccaggugucaccugaggguuaugcccaccucacccaccugcugaugggccuugccaguggccgcauuauccuuauccuagaggguggcuauaaccugacauccaucucagaguccauggcugccugcacucgcucccuccuuggagacccaccaccccugcugacccugccacggcccccacuaucaggggcccuggccucaaucacugagaccauccaaguccaucgcagauacuggcgcagcuuacgggucaugaagguagaagacagagaaggacccuccaguucuaaguuggucaccaagaaggcaccccaaccagccaaaccuagguuagcugagcggaugaccacacgagaaaagaagguucuggaagcaggcauggggaaagucaccucggcaucauuuggggaagaguccacuccaggccagacuaacucagagacagcugugguggcccucacucaggaccagcccucagaggcagccacagggggagccacucuggcccagaccauuucugaggcagccauugggggagccaugcugggccagaccaccucagaggaggcugucgggggagccacuccggaccagaccaccucagaggagacugugggaggagccauucuggaccagaccaccucagaggaugcuguugggggagccacgcugggccagacuaccucagaggaggcuguaggaggagcuacacuggcccagaccaccucggaggcagccauggagggagccacacuggaccagacuacgucagaggaggcuccagggggcaccgagcugauccaaacuccucuagccucgagcacagaccaccagacccccccaaccucaccugugcagggaacuacaccccagauaucucccaguacacugauugggagucucaggaccuuggagcuaggcagcgaaucucagggggccucagaaucucaggccccaggagaggagaaccuacuaggagaggcagcuggaggucaggacauggcugauucgaugcugaugcagggaucuaggggccucacugaucaggccauauuuuaugcugugacaccacugcccugguguccccauuugguggcaguaugccccauaccugcagcaggccuagacgugacccaaccuuguggggacuguggaacaauccaagagaauugggugugucucucuugcuaucaggucuacuguggucguuacaucaauggccacaugcuccaacaccauggaaauucuggacacccgcugguccucagcuacaucgaccugucagccugguguuacuacugucaggccuauguccaccaccaggcucuccuagaugugaagaacaucgcccaccagaacaaguuuggggaggauaugccccacccacacuaagccccagaauacggucccucuucaccuucugaggcccacgauagaccagcuguagcucauuccagccuguaccuuggaugagggguagccucccacugcaucccauccugaauauccuuugcaacuccccaagagugcuuauuuaaguguuaauacuuuuaagagaacugcgacgauuaauuguggaucucccccugcccauugccugcuugaggggcaccacuacuccagcccagaaggaaaggggggcagcucaguggccccaagagggagcugauaucaugaggauaacauuggcgggaggggaguuaacuggcaggcauggcaagguugcauauguaauaaaguacaagcuguu

SEQ ID NO: 139948 - RNA, 19 nt, Artificial Sequence
  Description of Artificial Sequence: Synthetic oligonucleotide
gggcaguccccugaggagc

SEQ ID NO: 139949 - RNA, 19 nt, Artificial Sequence
  Description of Artificial Sequence: Synthetic oligonucleotide
cggggcugguugaaacgcu

SEQ ID NO: 139950 - RNA, 19 nt, Artificial Sequence
  Description of Artificial Sequence: Synthetic oligonucleotide
uaggggcgggaucuggcgg

SEQ ID NO: 139951 - RNA, 19 nt, Artificial Sequence
  Description of Artificial Sequence: Synthetic oligonucleotide
gaguggaagaaccgcggca

SEQ ID NO: 139952 - RNA, 19 nt, Artificial Sequence
  Description of Artificial Sequence: Synthetic oligonucleotide
aggggccaagccuccucaa

SEQ ID NO: 139953 - RNA, 19 nt, Artificial Sequence
  Description of Artificial Sequence: Synthetic oligonucleotide
acuaugaccucaaccggcc

SEQ ID NO: 139954 - RNA, 19 nt, Artificial Sequence
  Description of Artificial Sequence: Synthetic oligonucleotide
caggauuccaccacaacca

SEQ ID NO: 139955 - RNA, 19 nt, Artificial Sequence
  Description of Artificial Sequence: Synthetic oligonucleotide
aggcagcgaagaaguaggc

SEQ ID NO: 139956 - RNA, 19 nt, Artificial Sequence
  Description of Artificial Sequence: Synthetic oligonucleotide
cagaacccccagucgcccc

SEQ ID NO: 139957 - RNA, 19 nt, Artificial Sequence
  Description of Artificial Sequence: Synthetic oligonucleotide
ccucaggacuccaguguca

SEQ ID NO: 139958 - RNA, 19 nt, Artificial Sequence
  Description of Artificial Sequence: Synthetic oligonucleotide
acuucgaagcgaaauauua

SEQ ID NO: 139959 - RNA, 19 nt, Artificial Sequence
  Description of Artificial Sequence: Synthetic oligonucleotide
aaaaagggagccguucccc

SEQ ID NO: 139960 - RNA, 19 nt, Artificial Sequence
  Description of Artificial Sequence: Synthetic oligonucleotide
cgcucuauccccaaucuag

SEQ ID NO: 139961 - RNA, 19 nt, Artificial Sequence
  Description of Artificial Sequence: Synthetic oligonucleotide
gcggagguaaagaagaaag

SEQ ID NO: 139962 - RNA, 19 nt, Artificial Sequence
  Description of Artificial Sequence: Synthetic oligonucleotide
ggcaaaaugaagaagcucg

SEQ ID NO: 139963 - RNA, 19 nt, Artificial Sequence
  Description of Artificial Sequence: Synthetic oligonucleotide
ggccaagcaauggaagaag

SEQ ID NO: 139964 - RNA, 19 nt, Artificial Sequence
  Description of Artificial Sequence: Synthetic oligonucleotide
gaccuaaucgugggacugc

SEQ ID NO: 139965 - RNA, 19 nt, Artificial Sequence
  Description of Artificial Sequence: Synthetic oligonucleotide
caagggauggaucugaacc

SEQ ID NO: 139966 - RNA, 19 nt, Artificial Sequence
  Description of Artificial Sequence: Synthetic oligonucleotide
cuugaggcugaagcacugg

SEQ ID NO: 139967 - RNA, 19 nt, Artificial Sequence
  Description of Artificial Sequence: Synthetic oligonucleotide
gcuggcacuggcuuggugu

SEQ ID NO: 139968 - RNA, 19 nt, Artificial Sequence
  Description of Artificial Sequence: Synthetic oligonucleotide
uuggaugagcaguuaaaug

SEQ ID NO: 139969 - RNA, 19 nt, Artificial Sequence
  Description of Artificial Sequence: Synthetic oligonucleotide
gaauuccauugccucuggg

SEQ ID NO: 139970 - RNA, 19 nt, Artificial Sequence
  Description of Artificial Sequence: Synthetic oligonucleotide
gaugacagcuucccggaag

SEQ ID NO: 139971 - RNA, 19 nt, Artificial Sequence
  Description of Artificial Sequence: Synthetic oligonucleotide
ggcccugagcggcuccaug

SEQ ID NO: 139972 - RNA, 19 nt, Artificial Sequence
  Description of Artificial Sequence: Synthetic oligonucleotide
gccaucaaggagcaacuga

SEQ ID NO: 139973 - RNA, 19 nt, Artificial Sequence
  Description of Artificial Sequence: Synthetic oligonucleotide
auccaggagggccuccuag

SEQ ID NO: 139974 - RNA, 19 nt, Artificial Sequence
  Description of Artificial Sequence: Synthetic oligonucleotide
gaucgcugcguguccuuuc

SEQ ID NO: 139975 - RNA, 19 nt, Artificial Sequence
  Description of Artificial Sequence: Synthetic oligonucleotide
caggcccgguuugcugaaa

SEQ ID NO: 139976 - RNA, 19 nt, Artificial Sequence
  Description of Artificial Sequence: Synthetic oligonucleotide
aaggaagagcugauguugg

SEQ ID NO: 139977 - RNA, 19 nt, Artificial Sequence
  Description of Artificial Sequence: Synthetic oligonucleotide
guucacagccuagaauaua

SEQ ID NO: 139978 - RNA, 19 nt, Artificial Sequence
  Description of Artificial Sequence: Synthetic oligonucleotide
auugaucugauggaaacaa

SEQ ID NO: 139979 - RNA, 19 nt, Artificial Sequence
  Description of Artificial Sequence: Synthetic oligonucleotide
acccaguacaugaaugagg

SEQ ID NO: 139980 - RNA, 19 nt, Artificial Sequence
  Description of Artificial Sequence: Synthetic oligonucleotide
ggagaacuccguguccuag

SEQ ID NO: 139981 - RNA, 19 nt, Artificial Sequence
  Description of Artificial Sequence: Synthetic oligonucleotide
gcagacaccuacgacucag

SEQ ID NO: 139982 - RNA, 19 nt, Artificial Sequence
  Description of Artificial Sequence: Synthetic oligonucleotide
guuuaucugcauccgaacu

SEQ ID NO: 139983 - RNA, 19 nt, Artificial Sequence
  Description of Artificial Sequence: Synthetic oligonucleotide
ucauacuccugugccugcc

SEQ ID NO: 139984 - RNA, 19 nt, Artificial Sequence
  Description of Artificial Sequence: Synthetic oligonucleotide
cuggccucaggcucugucc

SEQ ID NO: 139985 - RNA, 19 nt, Artificial Sequence
  Description of Artificial Sequence: Synthetic oligonucleotide
cucaggcugguggaugcgg

SEQ ID NO: 139986 - RNA, 19 nt, Artificial Sequence
  Description of Artificial Sequence: Synthetic oligonucleotide
guccugggggcugagaucc

SEQ ID NO: 139987 - RNA, 19 nt, Artificial Sequence
  Description of Artificial Sequence: Synthetic oligonucleotide
cggaauggcauggccauca

SEQ ID NO: 139988 - RNA, 19 nt, Artificial Sequence
  Description of Artificial Sequence: Synthetic oligonucleotide
auuaggccuccuggacauc

SEQ ID NO: 139989 - RNA, 19 nt, Artificial Sequence
  Description of Artificial Sequence: Synthetic oligonucleotide
cacgcccagcacagucuua

SEQ ID NO: 139990 - RNA, 19 nt, Artificial Sequence
  Description of Artificial Sequence: Synthetic oligonucleotide
auggauggcuauugcaugu

SEQ ID NO: 139991 - RNA, 19 nt, Artificial Sequence
  Description of Artificial Sequence: Synthetic oligonucleotide
uucaaccacguggcugugg

SEQ ID NO: 139992 - RNA, 19 nt, Artificial Sequence
  Description of Artificial Sequence: Synthetic oligonucleotide
gcagcccgcuaugcucaac

SEQ ID NO: 139993 - RNA, 19 nt, Artificial Sequence
  Description of Artificial Sequence: Synthetic oligonucleotide
cagaaacaccgcauccgga

SEQ ID NO: 139994 - RNA, 19 nt, Artificial Sequence
  Description of Artificial Sequence: Synthetic oligonucleotide
aggguccuuaucguagauu

SEQ ID NO: 139995 - RNA, 19 nt, Artificial Sequence
  Description of Artificial Sequence: Synthetic oligonucleotide
ugggaugugcaccacgguc

SEQ ID NO: 139996 - RNA, 19 nt, Artificial Sequence
  Description of Artificial Sequence: Synthetic oligonucleotide
caaggaacacaguucaccu

SEQ ID NO: 139997 - RNA, 19 nt, Artificial Sequence
  Description of Artificial Sequence: Synthetic oligonucleotide
uucgaccaggaccccagug

SEQ ID NO: 139998 - RNA, 19 nt, Artificial Sequence
  Description of Artificial Sequence: Synthetic oligonucleotide
guccucuauuucuccaucc

SEQ ID NO: 139999 - RNA, 19 nt, Artificial Sequence
  Description of Artificial Sequence: Synthetic oligonucleotide
caccgcuacgagcagggua

SEQ ID NO: 140000 - RNA, 19 nt, Artificial Sequence
  Description of Artificial Sequence: Synthetic oligonucleotide
agguucuggccccaccuga

SEQ ID NO: 140001 - RNA, 19 nt, Artificial Sequence
  Description of Artificial Sequence: Synthetic oligonucleotide
aaggccucuaacuggucca

SEQ ID NO: 140002 - RNA, 19 nt, Artificial Sequence
  Description of Artificial Sequence: Synthetic oligonucleotide
accacagguuucggccaag

SEQ ID NO: 140003 - RNA, 19 nt, Artificial Sequence
  Description of Artificial Sequence: Synthetic oligonucleotide
ggccaaggauauaccauca

SEQ ID NO: 140004 - RNA, 19 nt, Artificial Sequence
  Description of Artificial Sequence: Synthetic oligonucleotide
aaugugccuuggaaccagg

SEQ ID NO: 140005 - RNA, 19 nt, Artificial Sequence
  Description of Artificial Sequence: Synthetic oligonucleotide
guggggaugcgggaugcug

SEQ ID NO: 140006 - RNA, 19 nt, Artificial Sequence
  Description of Artificial Sequence: Synthetic oligonucleotide
gacuacauugcugcuuucc

SEQ ID NO: 140007 - RNA, 19 nt, Artificial Sequence
  Description of Artificial Sequence: Synthetic oligonucleotide
cugcacguccugcugccag

SEQ ID NO: 140008 - RNA, 19 nt, Artificial Sequence
  Description of Artificial Sequence: Synthetic oligonucleotide
gucgcccucgaguuccagc

SEQ ID NO: 140009 - RNA, 19 nt, Artificial Sequence
  Description of Artificial Sequence: Synthetic oligonucleotide
ccucagcugguccuggugg

SEQ ID NO: 140010 - RNA, 19 nt, Artificial Sequence
  Description of Artificial Sequence: Synthetic oligonucleotide
gcugcuggauuugaugccc

SEQ ID NO: 140011 - RNA, 19 nt, Artificial Sequence
  Description of Artificial Sequence: Synthetic oligonucleotide
cugcaaggggaccccaagg

SEQ ID NO: 140012 - RNA, 19 nt, Artificial Sequence
  Description of Artificial Sequence: Synthetic oligonucleotide
ggugagauggccgccacuc

SEQ ID NO: 140013 - RNA, 19 nt, Artificial Sequence
  Description of Artificial Sequence: Synthetic oligonucleotide
ccggcaggguucgcccagc

SEQ ID NO: 140014 - RNA, 19 nt, Artificial Sequence
  Description of Artificial Sequence: Synthetic oligonucleotide
cuaacccaccugcucaugg

SEQ ID NO: 140015 - RNA, 19 nt, Artificial Sequence
  Description of Artificial Sequence: Synthetic oligonucleotide
ggucuggcaggaggcaagc

SEQ ID NO: 140016 - RNA, 19 nt, Artificial Sequence
  Description of Artificial Sequence: Synthetic oligonucleotide
cugauccugucucuggagg

SEQ ID NO: 140017 - RNA, 19 nt, Artificial Sequence
  Description of Artificial Sequence: Synthetic oligonucleotide
gguggcuacaaccuccgcg

SEQ ID NO: 140018 - RNA, 19 nt, Artificial Sequence
  Description of Artificial Sequence: Synthetic oligonucleotide
gcccuggcugaaggcguca

SEQ ID NO: 140019 - RNA, 19 nt, Artificial Sequence
  Description of Artificial Sequence: Synthetic oligonucleotide
agugcuucgcuccacaccc

SEQ ID NO: 140020 - RNA, 19 nt, Artificial Sequence
  Description of Artificial Sequence: Synthetic oligonucleotide
cuucugggagacccuugcc

SEQ ID NO: 140021 - RNA, 19 nt, Artificial Sequence
  Description of Artificial Sequence: Synthetic oligonucleotide
cccaugcuggagucaccug

SEQ ID NO: 140022 - RNA, 19 nt, Artificial Sequence
  Description of Artificial Sequence: Synthetic oligonucleotide
ggugcccccugccggagug

SEQ ID NO: 140023 - RNA, 19 nt, Artificial Sequence
  Description of Artificial Sequence: Synthetic oligonucleotide
gcccaggcuucaguuuccu

SEQ ID NO: 140024 - RNA, 19 nt, Artificial Sequence
  Description of Artificial Sequence: Synthetic oligonucleotide
ugugcucuggaagcccuug

SEQ ID NO: 140025 - RNA, 19 nt, Artificial Sequence
  Description of Artificial Sequence: Synthetic oligonucleotide
gagcccuucugggagguuc

SEQ ID NO: 140026 - RNA, 19 nt, Artificial Sequence
  Description of Artificial Sequence: Synthetic oligonucleotide
cuugugagaucaacugaga

SEQ ID NO: 140027 - RNA, 19 nt, Artificial Sequence
  Description of Artificial Sequence: Synthetic oligonucleotide
accguggagagggacaaca

SEQ ID NO: 140028 - RNA, 19 nt, Artificial Sequence
  Description of Artificial Sequence: Synthetic oligonucleotide
auggaggaggacaauguag

SEQ ID NO: 140029 - RNA, 19 nt, Artificial Sequence
  Description of Artificial Sequence: Synthetic oligonucleotide
gaggagagcgaggaggaag

SEQ ID NO: 140030 - RNA, 19 nt, Artificial Sequence
  Description of Artificial Sequence: Synthetic oligonucleotide
ggacccugggagcccccug

SEQ ID NO: 140031 - RNA, 19 nt, Artificial Sequence
  Description of Artificial Sequence: Synthetic oligonucleotide
gugcucccaauccugacau

SEQ ID NO: 140032 - RNA, 19 nt, Artificial Sequence
  Description of Artificial Sequence: Synthetic oligonucleotide
uggccagugcuacagucuc

SEQ ID NO: 140033 - RNA, 19 nt, Artificial Sequence
  Description of Artificial Sequence: Synthetic oligonucleotide
cgcacagggcuggucuaug

SEQ ID NO: 140034 - RNA, 19 nt, Artificial Sequence
  Description of Artificial Sequence: Synthetic oligonucleotide
gaccaaaauaugaugaauc

SEQ ID NO: 140035 - RNA, 19 nt, Artificial Sequence
  Description of Artificial Sequence: Synthetic oligonucleotide
cacugcaacuugugggaca

SEQ ID NO: 140036 - RNA, 19 nt, Artificial Sequence
  Description of Artificial Sequence: Synthetic oligonucleotide
agccaccacccugagguac

SEQ ID NO: 140037 - RNA, 19 nt, Artificial Sequence
  Description of Artificial Sequence: Synthetic oligonucleotide
ccccagcgcaucuugcgga

SEQ ID NO: 140038 - RNA, 19 nt, Artificial Sequence
  Description of Artificial Sequence: Synthetic oligonucleotide
aucaugugccgucuggagg

SEQ ID NO: 140039 - RNA, 19 nt, Artificial Sequence
  Description of Artificial Sequence: Synthetic oligonucleotide
gagcugggccuugccgggc

SEQ ID NO: 140040 - RNA, 19 nt, Artificial Sequence
  Description of Artificial Sequence: Synthetic oligonucleotide
cgcugccucacccugacac

SEQ ID NO: 140041 - RNA, 19 nt, Artificial Sequence
  Description of Artificial Sequence: Synthetic oligonucleotide
ccgcgcccugccacagagg

SEQ ID NO: 140042 - RNA, 19 nt, Artificial Sequence
  Description of Artificial Sequence: Synthetic oligonucleotide
gcugagcugcucaccuguc

SEQ ID NO: 140043 - RNA, 19 nt, Artificial Sequence
  Description of Artificial Sequence: Synthetic oligonucleotide
cacagugcugaguacgugg

SEQ ID NO: 140044 - RNA, 19 nt, Artificial Sequence
  Description of Artificial Sequence: Synthetic oligonucleotide
ggucaucuccgggccacag

SEQ ID NO: 140045 - RNA, 19 nt, Artificial Sequence
  Description of Artificial Sequence: Synthetic oligonucleotide
gagaaaaugaaaacccggg

SEQ ID NO: 140046 - RNA, 19 nt, Artificial Sequence
  Description of Artificial Sequence: Synthetic oligonucleotide
gagcugcaccgugagaguu

SEQ ID NO: 140047 - RNA, 19 nt, Artificial Sequence
  Description of Artificial Sequence: Synthetic oligonucleotide
uccaacuuugacuccaucu

SEQ ID NO: 140048 - RNA, 19 nt, Artificial Sequence
  Description of Artificial Sequence: Synthetic oligonucleotide
uauaucugccccaguaccu

SEQ ID NO: 140049 - RNA, 19 nt, Artificial Sequence
  Description of Artificial Sequence: Synthetic oligonucleotide
uucgccugugcacagcuug

SEQ ID NO: 140050 - RNA, 19 nt, Artificial Sequence
  Description of Artificial Sequence: Synthetic oligonucleotide
gccacuggcgcugccugcc

SEQ ID NO: 140051 - RNA, 19 nt, Artificial Sequence
  Description of Artificial Sequence: Synthetic oligonucleotide
cgccugguggaggcugugc

SEQ ID NO: 140052 - RNA, 19 nt, Artificial Sequence
  Description of Artificial Sequence: Synthetic oligonucleotide
cucucaggagagguucuga

SEQ ID NO: 140053 - RNA, 19 nt, Artificial Sequence
  Description of Artificial Sequence: Synthetic oligonucleotide
aauggugcugcuguggugc

SEQ ID NO: 140054 - RNA, 19 nt, Artificial Sequence
  Description of Artificial Sequence: Synthetic oligonucleotide
cgucccccaggacaccacg

SEQ ID NO: 140055 - RNA, 19 nt, Artificial Sequence
  Description of Artificial Sequence: Synthetic oligonucleotide
gcagagcaggaugcagcuu

SEQ ID NO: 140056 - RNA, 19 nt, Artificial Sequence
  Description of Artificial Sequence: Synthetic oligonucleotide
ugcgguuuuugcuuuuuca

SEQ ID NO: 140057 - RNA, 19 nt, Artificial Sequence
  Description of Artificial Sequence: Synthetic oligonucleotide
aacucuguggcuguggcug

SEQ ID NO: 140058 - RNA, 19 nt, Artificial Sequence
  Description of Artificial Sequence: Synthetic oligonucleotide
gcucgccaugcccagacua

SEQ ID NO: 140059 - RNA, 19 nt, Artificial Sequence
  Description of Artificial Sequence: Synthetic oligonucleotide
aucagugggcaugcccuac

SEQ ID NO: 140060 - RNA, 19 nt, Artificial Sequence
  Description of Artificial Sequence: Synthetic oligonucleotide
cggauccugauuguggauu

SEQ ID NO: 140061 - RNA, 19 nt, Artificial Sequence
  Description of Artificial Sequence: Synthetic oligonucleotide
ugggauguccaccacggua

SEQ ID NO: 140062 - RNA, 19 nt, Artificial Sequence
  Description of Artificial Sequence: Synthetic oligonucleotide
aauggaacucagcacaugu

SEQ ID NO: 140063 - RNA, 19 nt, Artificial Sequence
  Description of Artificial Sequence: Synthetic oligonucleotide
uuugaggaugaccccagug

SEQ ID NO: 140064 - RNA, 19 nt, Artificial Sequence
  Description of Artificial Sequence: Synthetic oligonucleotide
gugcuauaugugucccugc

SEQ ID NO: 140065 - RNA, 19 nt, Artificial Sequence
  Description of Artificial Sequence: Synthetic oligonucleotide
caccgcuaugaucauggca

SEQ ID NO: 140066 - RNA, 19 nt, Artificial Sequence
  Description of Artificial Sequence: Synthetic oligonucleotide
accuucuuccccauggggg

SEQ ID NO: 140067 - RNA, 19 nt, Artificial Sequence
  Description of Artificial Sequence: Synthetic oligonucleotide
gaugagggugccagcagcc

SEQ ID NO: 140068 - RNA, 19 nt, Artificial Sequence
  Description of Artificial Sequence: Synthetic oligonucleotide
cagaucggccgggcugcgg

SEQ ID NO: 140069 - RNA, 19 nt, Artificial Sequence
  Description of Artificial Sequence: Synthetic oligonucleotide
ggcacaggcuucaccguca

SEQ ID NO: 140070 - RNA, 19 nt, Artificial Sequence
  Description of Artificial Sequence: Synthetic oligonucleotide
aacguggcauggaacgggc

SEQ ID NO: 140071 - RNA, 19 nt, Artificial Sequence
  Description of Artificial Sequence: Synthetic oligonucleotide
ccccgcaugggugaugcug

SEQ ID NO: 140072 - RNA, 19 nt, Artificial Sequence
  Description of Artificial Sequence: Synthetic oligonucleotide
gacuaccuagcugccuggc

SEQ ID NO: 140073 - RNA, 19 nt, Artificial Sequence
  Description of Artificial Sequence: Synthetic oligonucleotide
caucgccuggugcuuccca

SEQ ID NO: 140074 - RNA, 19 nt, Artificial Sequence
  Description of Artificial Sequence: Synthetic oligonucleotide
auugccuacgaguuuaacc

SEQ ID NO: 140075 - RNA, 19 nt, Artificial Sequence
  Description of Artificial Sequence: Synthetic oligonucleotide
ccagaacuggugcuggucu

SEQ ID NO: 140076 - RNA, 19 nt, Artificial Sequence
  Description of Artificial Sequence: Synthetic oligonucleotide
ucagcuggcuuugaugcug

SEQ ID NO: 140077 - RNA, 19 nt, Artificial Sequence
  Description of Artificial Sequence: Synthetic oligonucleotide
gcacggggggauccgcugg

SEQ ID NO: 140078 - RNA, 19 nt, Artificial Sequence
  Description of Artificial Sequence: Synthetic oligonucleotide
gggggcugccaggugucac

SEQ ID NO: 140079 - RNA, 19 nt, Artificial Sequence
  Description of Artificial Sequence: Synthetic oligonucleotide
ccugaggguuaugcccacc

SEQ ID NO: 140080 - RNA, 19 nt, Artificial Sequence
  Description of Artificial Sequence: Synthetic oligonucleotide
cucacccaccugcugaugg

SEQ ID NO: 140081 - RNA, 19 nt, Artificial Sequence
  Description of Artificial Sequence: Synthetic oligonucleotide
ggccuugccaguggccgca

SEQ ID NO: 140082 - RNA, 19 nt, Artificial Sequence
  Description of Artificial Sequence: Synthetic oligonucleotide
auuauccuuauccuagagg

SEQ ID NO: 140083 - RNA, 19 nt, Artificial Sequence
  Description of Artificial Sequence: Synthetic oligonucleotide
gguggcuauaaccugacau

SEQ ID NO: 140084 - RNA, 19 nt, Artificial Sequence
  Description of Artificial Sequence: Synthetic oligonucleotide
uccaucucagaguccaugg

SEQ ID NO: 140085 - RNA, 19 nt, Artificial Sequence
  Description of Artificial Sequence: Synthetic oligonucleotide
gcugccugcacucgcuccc

SEQ ID NO: 140086 - RNA, 19 nt, Artificial Sequence
  Description of Artificial Sequence: Synthetic oligonucleotide
cuccuuggagacccaccac

SEQ ID NO: 140087 - RNA, 19 nt, Artificial Sequence
  Description of Artificial Sequence: Synthetic oligonucleotide
ccccugcugacccugccac

SEQ ID NO: 140088 - RNA, 19 nt, Artificial Sequence
  Description of Artificial Sequence: Synthetic oligonucleotide
cggcccccacuaucagggg

SEQ ID NO: 140089 - RNA, 19 nt, Artificial Sequence
  Description of Artificial Sequence: Synthetic oligonucleotide
gcccuggccucaaucacug

SEQ ID NO: 140090 - RNA, 19 nt, Artificial Sequence
  Description of Artificial Sequence: Synthetic oligonucleotide
gagaccauccaaguccauc

SEQ ID NO: 140091 - RNA, 19 nt, Artificial Sequence
  Description of Artificial Sequence: Synthetic oligonucleotide
cgcagauacuggcgcagcu

SEQ ID NO: 140092 - RNA, 19 nt, Artificial Sequence
  Description of Artificial Sequence: Synthetic oligonucleotide
uuacgggucaugaagguag

SEQ ID NO: 140093 - RNA, 19 nt, Artificial Sequence
  Description of Artificial Sequence: Synthetic oligonucleotide
gaagacagagaaggacccu

SEQ ID NO: 140094 - RNA, 19 nt, Artificial Sequence
  Description of Artificial Sequence: Synthetic oligonucleotide
uccaguucuaaguugguca

SEQ ID NO: 140095 - RNA, 19 nt, Artificial Sequence
  Description of Artificial Sequence: Synthetic oligonucleotide
accaagaaggcaccccaac

SEQ ID NO: 140096 - RNA, 19 nt, Artificial Sequence
  Description of Artificial Sequence: Synthetic oligonucleotide
ccagccaaaccuagguuag

SEQ ID NO: 140097 - RNA, 19 nt, Artificial Sequence
  Description of Artificial Sequence: Synthetic oligonucleotide
gcugagcggaugaccacac

SEQ ID NO: 140098 - RNA, 19 nt, Artificial Sequence
  Description of Artificial Sequence: Synthetic oligonucleotide
cgagaaaagaagguucugg

SEQ ID NO: 140099 - RNA, 19 nt, Artificial Sequence
  Description of Artificial Sequence: Synthetic oligonucleotide
gaagcaggcauggggaaag

SEQ ID NO: 140100 - RNA, 19 nt, Artificial Sequence
  Description of Artificial Sequence: Synthetic oligonucleotide
gucaccucggcaucauuug

SEQ ID NO: 140101 - RNA, 19 nt, Artificial Sequence
  Description of Artificial Sequence: Synthetic oligonucleotide
ggggaagaguccacuccag

SEQ ID NO: 140102 - RNA, 19 nt, Artificial Sequence
  Description of Artificial Sequence: Synthetic oligonucleotide
ggccagacuaacucagaga

SEQ ID NO: 140103 - RNA, 19 nt, Artificial Sequence
  Description of Artificial Sequence: Synthetic oligonucleotide
acagcugugguggcccuca

SEQ ID NO: 140104 - RNA, 19 nt, Artificial Sequence
  Description of Artificial Sequence: Synthetic oligonucleotide
acucaggaccagcccucag

SEQ ID NO: 140105 - RNA, 19 nt, Artificial Sequence
  Description of Artificial Sequence: Synthetic oligonucleotide
gaggcagccacagggggag

SEQ ID NO: 140106 - RNA, 19 nt, Artificial Sequence
  Description of Artificial Sequence: Synthetic oligonucleotide
gccacucuggcccagacca

SEQ ID NO: 140107 - RNA, 19 nt, Artificial Sequence
  Description of Artificial Sequence: Synthetic oligonucleotide
auuucugaggcagccauug

SEQ ID NO: 140108 - RNA, 19 nt, Artificial Sequence
  Description of Artificial Sequence: Synthetic oligonucleotide
gggggagccaugcugggcc

SEQ ID NO: 140109 - RNA, 19 nt, Artificial Sequence
  Description of Artificial Sequence: Synthetic oligonucleotide
cagaccaccucagaggagg

SEQ ID NO: 140110 - RNA, 19 nt, Artificial Sequence
  Description of Artificial Sequence: Synthetic oligonucleotide
gcugucgggggagccacuc

SEQ ID NO: 140111 - RNA, 19 nt, Artificial Sequence
  Description of Artificial Sequence: Synthetic oligonucleotide
ccggaccagaccaccucag

SEQ ID NO: 140112 - RNA, 19 nt, Artificial Sequence
  Description of Artificial Sequence: Synthetic oligonucleotide
gaggagacugugggaggag

SEQ ID NO: 140113 - RNA, 19 nt, Artificial Sequence
  Description of Artificial Sequence: Synthetic oligonucleotide
gccauucuggaccagacca

SEQ ID NO: 140114 - RNA, 19 nt, Artificial Sequence
  Description of Artificial Sequence: Synthetic oligonucleotide
accucagaggaugcuguug

SEQ ID NO: 140115 - RNA, 19 nt, Artificial Sequence
  Description of Artificial Sequence: Synthetic oligonucleotide
gggggagccacgcugggcc

SEQ ID NO: 140116 - RNA, 19 nt, Artificial Sequence
  Description of Artificial Sequence: Synthetic oligonucleotide
cagacuaccucagaggagg

SEQ ID NO: 140117 - RNA, 19 nt, Artificial Sequence
  Description of Artificial Sequence: Synthetic oligonucleotide
gcuguaggaggagcuacac

SEQ ID NO: 140118 - RNA, 19 nt, Artificial Sequence
  Description of Artificial Sequence: Synthetic oligonucleotide
cuggcccagaccaccucgg

SEQ ID NO: 140119 - RNA, 19 nt, Artificial Sequence
  Description of Artificial Sequence: Synthetic oligonucleotide
gaggcagccauggagggag

SEQ ID NO: 140120 - RNA, 19 nt, Artificial Sequence
  Description of Artificial Sequence: Synthetic oligonucleotide
gccacacuggaccagacua

SEQ ID NO: 140121 - RNA, 19 nt, Artificial Sequence
  Description of Artificial Sequence: Synthetic oligonucleotide
acgucagaggaggcuccag

SEQ ID NO: 140122 - RNA, 19 nt, Artificial Sequence
  Description of Artificial Sequence: Synthetic oligonucleotide
gggggcaccgagcugaucc

SEQ ID NO: 140123 - RNA, 19 nt, Artificial Sequence
  Description of Artificial Sequence: Synthetic oligonucleotide
caaacuccucuagccucga

SEQ ID NO: 140124 - RNA, 19 nt, Artificial Sequence
  Description of Artificial Sequence: Synthetic oligonucleotide
agcacagaccaccagaccc

SEQ ID NO: 140125 - RNA, 19 nt, Artificial Sequence
  Description of Artificial Sequence: Synthetic oligonucleotide
cccccaaccucaccugugc

SEQ ID NO: 140126 - RNA, 19 nt, Artificial Sequence
  Description of Artificial Sequence: Synthetic oligonucleotide
cagggaacuacaccccaga

SEQ ID NO: 140127 - RNA, 19 nt, Artificial Sequence
  Description of Artificial Sequence: Synthetic oligonucleotide
auaucucccaguacacuga

SEQ ID NO: 140128 - RNA, 19 nt, Artificial Sequence
  Description of Artificial Sequence: Synthetic oligonucleotide
auugggagucucaggaccu

SEQ ID NO: 140129 - RNA, 19 nt, Artificial Sequence
  Description of Artificial Sequence: Synthetic oligonucleotide
uuggagcuaggcagcgaau

SEQ ID NO: 140130 - RNA, 19 nt, Artificial Sequence
  Description of Artificial Sequence: Synthetic oligonucleotide
ucucagggggccucagaau

SEQ ID NO: 140131 - RNA, 19 nt, Artificial Sequence
  Description of Artificial Sequence: Synthetic oligonucleotide
ucucaggccccaggagagg

SEQ ID NO: 140132 - RNA, 19 nt, Artificial Sequence
  Description of Artificial Sequence: Synthetic oligonucleotide
gagaaccuacuaggagagg

SEQ ID NO: 140133 - RNA, 19 nt, Artificial Sequence
  Description of Artificial Sequence: Synthetic oligonucleotide
gcagcuggaggucaggaca

SEQ ID NO: 140134 - RNA, 19 nt, Artificial Sequence
  Description of Artificial Sequence: Synthetic oligonucleotide
auggcugauucgaugcuga

SEQ ID NO: 140135 - RNA, 19 nt, Artificial Sequence
  Description of Artificial Sequence: Synthetic oligonucleotide
augcagggaucuaggggcc

SEQ ID NO: 140136 - RNA, 19 nt, Artificial Sequence
  Description of Artificial Sequence: Synthetic oligonucleotide
cucacugaucaggccauau

SEQ ID NO: 140137 - RNA, 19 nt, Artificial Sequence
  Description of Artificial Sequence: Synthetic oligonucleotide
uuuuaugcugugacaccac

SEQ ID NO: 140138 - RNA, 19 nt, Artificial Sequence
  Description of Artificial Sequence: Synthetic oligonucleotide
cugcccugguguccccauu

SEQ ID NO: 140139 - RNA, 19 nt, Artificial Sequence
  Description of Artificial Sequence: Synthetic oligonucleotide
uugguggcaguaugcccca

SEQ ID NO: 140140 - RNA, 19 nt, Artificial Sequence
  Description of Artificial Sequence: Synthetic oligonucleotide
auaccugcagcaggccuag

SEQ ID NO: 140141 - RNA, 19 nt, Artificial Sequence
  Description of Artificial Sequence: Synthetic oligonucleotide
gacgugacccaaccuugug

SEQ ID NO: 140142 - RNA, 19 nt, Artificial Sequence
  Description of Artificial Sequence: Synthetic oligonucleotide
ggggacuguggaacaaucc

SEQ ID NO: 140143 - RNA, 19 nt, Artificial Sequence
  Description of Artificial Sequence: Synthetic oligonucleotide
caagagaauuggguguguc

SEQ ID NO: 140144 - RNA, 19 nt, Artificial Sequence
  Description of Artificial Sequence: Synthetic oligonucleotide
cucucuugcuaucaggucu

SEQ ID NO: 140145 - RNA, 19 nt, Artificial Sequence
  Description of Artificial Sequence: Synthetic oligonucleotide
uacuguggucguuacauca

SEQ ID NO: 140146 - RNA, 19 nt, Artificial Sequence
  Description of Artificial Sequence: Synthetic oligonucleotide
aauggccacaugcuccaac

SEQ ID NO: 140147 - RNA, 19 nt, Artificial Sequence
  Description of Artificial Sequence: Synthetic oligonucleotide
caccauggaaauucuggac

SEQ ID NO: 140148 - RNA, 19 nt, Artificial Sequence
  Description of Artificial Sequence: Synthetic oligonucleotide
cacccgcugguccucagcu

SEQ ID NO: 140149 - RNA, 19 nt, Artificial Sequence
  Description of Artificial Sequence: Synthetic oligonucleotide
uacaucgaccugucagccu

SEQ ID NO: 140150 - RNA, 19 nt, Artificial Sequence
  Description of Artificial Sequence: Synthetic oligonucleotide
ugguguuacuacugucagg

SEQ ID NO: 140151 - RNA, 19 nt, Artificial Sequence
  Description of Artificial Sequence: Synthetic oligonucleotide
gccuauguccaccaccagg

SEQ ID NO: 140152 - RNA, 19 nt, Artificial Sequence
  Description of Artificial Sequence: Synthetic oligonucleotide
gcucuccuagaugugaaga

SEQ ID NO: 140153 - RNA, 19 nt, Artificial Sequence
  Description of Artificial Sequence: Synthetic oligonucleotide
aacaucgcccaccagaaca

SEQ ID NO: 140154 - RNA, 19 nt, Artificial Sequence
  Description of Artificial Sequence: Synthetic oligonucleotide
aaguuuggggaggauaugc

SEQ ID NO: 140155 - RNA, 19 nt, Artificial Sequence
  Description of Artificial Sequence: Synthetic oligonucleotide
ccccacccacacuaagccc

SEQ ID NO: 140156 - RNA, 19 nt, Artificial Sequence
  Description of Artificial Sequence: Synthetic oligonucleotide
ccagaauacggucccucuu

SEQ ID NO: 140157 - RNA, 19 nt, Artificial Sequence
  Description of Artificial Sequence: Synthetic oligonucleotide
ucaccuucugaggcccacg

SEQ ID NO: 140158 - RNA, 19 nt, Artificial Sequence
  Description of Artificial Sequence: Synthetic oligonucleotide
gauagaccagcuguagcuc

SEQ ID NO: 140159 - RNA, 19 nt, Artificial Sequence
  Description of Artificial Sequence: Synthetic oligonucleotide
cauuccagccuguaccuug

SEQ ID NO: 140160 - RNA, 19 nt, Artificial Sequence
  Description of Artificial Sequence: Synthetic oligonucleotide
ggaugagggguagccuccc

SEQ ID NO: 140161 - RNA, 19 nt, Artificial Sequence
  Description of Artificial Sequence: Synthetic oligonucleotide
cacugcaucccauccugaa

SEQ ID NO: 140162 - RNA, 19 nt, Artificial Sequence
  Description of Artificial Sequence: Synthetic oligonucleotide
auauccuuugcaacucccc

SEQ ID NO: 140163 - RNA, 19 nt, Artificial Sequence
  Description of Artificial Sequence: Synthetic oligonucleotide
caagagugcuuauuuaagu

SEQ ID NO: 140164 - RNA, 19 nt, Artificial Sequence
  Description of Artificial Sequence: Synthetic oligonucleotide
uguuaauacuuuuaagaga

SEQ ID NO: 140165 - RNA, 19 nt, Artificial Sequence
  Description of Artificial Sequence: Synthetic oligonucleotide
aacugcgacgauuaauugu

SEQ ID NO: 140166 - RNA, 19 nt, Artificial Sequence
  Description of Artificial Sequence: Synthetic oligonucleotide
uggaucucccccugcccau

SEQ ID NO: 140167 - RNA, 19 nt, Artificial Sequence
  Description of Artificial Sequence: Synthetic oligonucleotide
uugccugcuugaggggcac

SEQ ID NO: 140168 - RNA, 19 nt, Artificial Sequence
  Description of Artificial Sequence: Synthetic oligonucleotide
ccacuacuccagcccagaa

SEQ ID NO: 140169 - RNA, 19 nt, Artificial Sequence
  Description of Artificial Sequence: Synthetic oligonucleotide
aggaaaggggggcagcuca

SEQ ID NO: 140170 - RNA, 19 nt, Artificial Sequence
  Description of Artificial Sequence: Synthetic oligonucleotide
aguggccccaagagggagc

SEQ ID NO: 140171 - RNA, 19 nt, Artificial Sequence
  Description of Artificial Sequence: Synthetic oligonucleotide
cugauaucaugaggauaac

SEQ ID NO: 140172 - RNA, 19 nt, Artificial Sequence
  Description of Artificial Sequence: Synthetic oligonucleotide
cauuggcgggaggggaguu

SEQ ID NO: 140173 - RNA, 19 nt, Artificial Sequence
  Description of Artificial Sequence: Synthetic oligonucleotide
uaacuggcaggcauggcaa

SEQ ID NO: 140174 - RNA, 19 nt, Artificial Sequence
  Description of Artificial Sequence: Synthetic oligonucleotide
agguugcauauguaauaaa

SEQ ID NO: 140175 - RNA, 19 nt, Artificial Sequence
  Description of Artificial Sequence: Synthetic oligonucleotide
uaauaaaguacaagcuguu

SEQ ID NO: 140176 - RNA, 25 nt, Artificial Sequence
  Description of Artificial Sequence: Synthetic oligonucleotide
gggcaguccccugaggagcggggcu

SEQ ID NO: 140177 - RNA, 25 nt, Artificial Sequence
  Description of Artificial Sequence: Synthetic oligonucleotide
ugguugaaacgcuaggggcgggauc

SEQ ID NO: 140178 - RNA, 25 nt, Artificial Sequence
  Description of Artificial Sequence: Synthetic oligonucleotide
cuggcggaguggaagaaccgcggca

SEQ ID NO: 140179 - RNA, 25 nt, Artificial Sequence
  Description of Artificial Sequence: Synthetic oligonucleotide
aggggccaagccuccucaacuauga

SEQ ID NO: 140180 - RNA, 25 nt, Artificial Sequence
  Description of Artificial Sequence: Synthetic oligonucleotide
accucaaccggccaggauuccacca

SEQ ID NO: 140181 - RNA, 25 nt, Artificial Sequence
  Description of Artificial Sequence: Synthetic oligonucleotide
acaaccaggcagcgaagaaguaggc

SEQ ID NO: 140182 - RNA, 25 nt, Artificial Sequence
  Description of Artificial Sequence: Synthetic oligonucleotide
cagaacccccagucgcccccucagg

SEQ ID NO: 140183 - RNA, 25 nt, Artificial Sequence
  Description of Artificial Sequence: Synthetic oligonucleotide
gacuccagugucacuucgaagcgaa

SEQ ID NO: 140184 - RNA, 25 nt, Artificial Sequence
  Description of Artificial Sequence: Synthetic oligonucleotide
aauauuaaaaagggagccguucccc

SEQ ID NO: 140185 - RNA, 25 nt, Artificial Sequence
  Description of Artificial Sequence: Synthetic oligonucleotide
cgcucuauccccaaucuagcggagg

SEQ ID NO: 140186 - RNA, 25 nt, Artificial Sequence
  Description of Artificial Sequence: Synthetic oligonucleotide
guaaagaagaaaggcaaaaugaaga

SEQ ID NO: 140187 - RNA, 25 nt, Artificial Sequence
  Description of Artificial Sequence: Synthetic oligonucleotide
aagcucggccaagcaauggaagaag

SEQ ID NO: 140188 - RNA, 25 nt, Artificial Sequence
  Description of Artificial Sequence: Synthetic oligonucleotide
gaccuaaucgugggacugcaaggga

SEQ ID NO: 140189 - RNA, 25 nt, Artificial Sequence
  Description of Artificial Sequence: Synthetic oligonucleotide
auggaucugaaccuugaggcugaag

SEQ ID NO: 140190 - RNA, 25 nt, Artificial Sequence
  Description of Artificial Sequence: Synthetic oligonucleotide
gcacuggcuggcacuggcuuggugu

SEQ ID NO: 140191 - RNA, 25 nt, Artificial Sequence
  Description of Artificial Sequence: Synthetic oligonucleotide
uuggaugagcaguuaaaugaauucc

SEQ ID NO: 140192 - RNA, 25 nt, Artificial Sequence
  Description of Artificial Sequence: Synthetic oligonucleotide
cauugccucugggaugacagcuucc

SEQ ID NO: 140193 - RNA, 25 nt, Artificial Sequence
  Description of Artificial Sequence: Synthetic oligonucleotide
ccggaaggcccugagcggcuccaug

SEQ ID NO: 140194 - RNA, 25 nt, Artificial Sequence
  Description of Artificial Sequence: Synthetic oligonucleotide
gccaucaaggagcaacugauccagg

SEQ ID NO: 140195 - RNA, 25 nt, Artificial Sequence
  Description of Artificial Sequence: Synthetic oligonucleotide
gagggccuccuagaucgcugcgugu

SEQ ID NO: 140196 - RNA, 25 nt, Artificial Sequence
  Description of Artificial Sequence: Synthetic oligonucleotide
uccuuucaggcccgguuugcugaaa

SEQ ID NO: 140197 - RNA, 25 nt, Artificial Sequence
  Description of Artificial Sequence: Synthetic oligonucleotide
aaggaagagcugauguugguucaca

SEQ ID NO: 140198 - RNA, 25 nt, Artificial Sequence
  Description of Artificial Sequence: Synthetic oligonucleotide
agccuagaauauauugaucugaugg

SEQ ID NO: 140199 - RNA, 25 nt, Artificial Sequence
  Description of Artificial Sequence: Synthetic oligonucleotide
gaaacaacccaguacaugaaugagg

SEQ ID NO: 140200 - RNA, 25 nt, Artificial Sequence
  Description of Artificial Sequence: Synthetic oligonucleotide
ggagaacuccguguccuagcagaca

SEQ ID NO: 140201 - RNA, 25 nt, Artificial Sequence
  Description of Artificial Sequence: Synthetic oligonucleotide
accuacgacucaguuuaucugcauc

SEQ ID NO: 140202 - RNA, 25 nt, Artificial Sequence
  Description of Artificial Sequence: Synthetic oligonucleotide
ccgaacucauacuccugugccugcc

SEQ ID NO: 140203 - RNA, 25 nt, Artificial Sequence
  Description of Artificial Sequence: Synthetic oligonucleotide
cuggccucaggcucuguccucaggc

SEQ ID NO: 140204 - RNA, 25 nt, Artificial Sequence
  Description of Artificial Sequence: Synthetic oligonucleotide
cugguggaugcgguccugggggcug

SEQ ID NO: 140205 - RNA, 25 nt, Artificial Sequence
  Description of Artificial Sequence: Synthetic oligonucleotide
gagauccggaauggcauggccauca

SEQ ID NO: 140206 - RNA, 25 nt, Artificial Sequence
  Description of Artificial Sequence: Synthetic oligonucleotide
auuaggccuccuggacaucacgccc

SEQ ID NO: 140207 - RNA, 25 nt, Artificial Sequence
  Description of Artificial Sequence: Synthetic oligonucleotide
cagcacagucuuauggauggcuauu

SEQ ID NO: 140208 - RNA, 25 nt, Artificial Sequence
  Description of Artificial Sequence: Synthetic oligonucleotide
ugcauguucaaccacguggcugugg

SEQ ID NO: 140209 - RNA, 25 nt, Artificial Sequence
  Description of Artificial Sequence: Synthetic oligonucleotide
gcagcccgcuaugcucaacagaaac

SEQ ID NO: 140210 - RNA, 25 nt, Artificial Sequence
  Description of Artificial Sequence: Synthetic oligonucleotide
caccgcauccggaggguccuuaucg

SEQ ID NO: 140211 - RNA, 25 nt, Artificial Sequence
  Description of Artificial Sequence: Synthetic oligonucleotide
guagauugggaugugcaccacgguc

SEQ ID NO: 140212 - RNA, 25 nt, Artificial Sequence
  Description of Artificial Sequence: Synthetic oligonucleotide
caaggaacacaguucaccuucgacc

SEQ ID NO: 140213 - RNA, 25 nt, Artificial Sequence
  Description of Artificial Sequence: Synthetic oligonucleotide
caggaccccaguguccucuauuucu

SEQ ID NO: 140214 - RNA, 25 nt, Artificial Sequence
  Description of Artificial Sequence: Synthetic oligonucleotide
uccauccaccgcuacgagcagggua

SEQ ID NO: 140215 - RNA, 25 nt, Artificial Sequence
  Description of Artificial Sequence: Synthetic oligonucleotide
agguucuggccccaccugaaggccu

SEQ ID NO: 140216 - RNA, 25 nt, Artificial Sequence
  Description of Artificial Sequence: Synthetic oligonucleotide
ucuaacugguccaccacagguuucg

SEQ ID NO: 140217 - RNA, 25 nt, Artificial Sequence
  Description of Artificial Sequence: Synthetic oligonucleotide
ggccaaggccaaggauauaccauca

SEQ ID NO: 140218 - RNA, 25 nt, Artificial Sequence
  Description of Artificial Sequence: Synthetic oligonucleotide
aaugugccuuggaaccaggugggga

SEQ ID NO: 140219 - RNA, 25 nt, Artificial Sequence
  Description of Artificial Sequence: Synthetic oligonucleotide
augcgggaugcugacuacauugcug

SEQ ID NO: 140220 - RNA, 25 nt, Artificial Sequence
  Description of Artificial Sequence: Synthetic oligonucleotide
gcuuuccugcacguccugcugccag

SEQ ID NO: 140221 - RNA, 25 nt, Artificial Sequence
  Description of Artificial Sequence: Synthetic oligonucleotide
gucgcccucgaguuccagccucagc

SEQ ID NO: 140222 - RNA, 25 nt, Artificial Sequence
  Description of Artificial Sequence: Synthetic oligonucleotide
cugguccugguggcugcuggauuug

SEQ ID NO: 140223 - RNA, 25 nt, Artificial Sequence
  Description of Artificial Sequence: Synthetic oligonucleotide
gaugcccugcaaggggaccccaagg

SEQ ID NO: 140224 - RNA, 25 nt, Artificial Sequence
  Description of Artificial Sequence: Synthetic oligonucleotide
ggugagauggccgccacuccggcag

SEQ ID NO: 140225 - RNA, 25 nt, Artificial Sequence
  Description of Artificial Sequence: Synthetic oligonucleotide
ggguucgcccagcuaacccaccugc

SEQ ID NO: 140226 - RNA, 25 nt, Artificial Sequence
  Description of Artificial Sequence: Synthetic oligonucleotide
cucaugggucuggcaggaggcaagc

SEQ ID NO: 140227 - RNA, 25 nt, Artificial Sequence
  Description of Artificial Sequence: Synthetic oligonucleotide
cugauccugucucuggaggguggcu

SEQ ID NO: 140228 - RNA, 25 nt, Artificial Sequence
  Description of Artificial Sequence: Synthetic oligonucleotide
uacaaccuccgcgcccuggcugaag

SEQ ID NO: 140229 - RNA, 25 nt, Artificial Sequence
  Description of Artificial Sequence: Synthetic oligonucleotide
ggcgucagugcuucgcuccacaccc

SEQ ID NO: 140230 - RNA, 25 nt, Artificial Sequence
  Description of Artificial Sequence: Synthetic oligonucleotide
cuucugggagacccuugccccaugc

SEQ ID NO: 140231 - RNA, 25 nt, Artificial Sequence
  Description of Artificial Sequence: Synthetic oligonucleotide
cuggagucaccuggugcccccugcc

SEQ ID NO: 140232 - RNA, 25 nt, Artificial Sequence
  Description of Artificial Sequence: Synthetic oligonucleotide
cggagugcccaggcuucaguuuccu

SEQ ID NO: 140233 - RNA, 25 nt, Artificial Sequence
  Description of Artificial Sequence: Synthetic oligonucleotide
ugugcucuggaagcccuugagcccu

SEQ ID NO: 140234 - RNA, 25 nt, Artificial Sequence
  Description of Artificial Sequence: Synthetic oligonucleotide
uucugggagguucuugugagaucaa

SEQ ID NO: 140235 - RNA, 25 nt, Artificial Sequence
  Description of Artificial Sequence: Synthetic oligonucleotide
acugagaccguggagagggacaaca

SEQ ID NO: 140236 - RNA, 25 nt, Artificial Sequence
  Description of Artificial Sequence: Synthetic oligonucleotide
auggaggaggacaauguagaggaga

SEQ ID NO: 140237 - RNA, 25 nt, Artificial Sequence
  Description of Artificial Sequence: Synthetic oligonucleotide
agcgaggaggaaggacccugggagc

SEQ ID NO: 140238 - RNA, 25 nt, Artificial Sequence
  Description of Artificial Sequence: Synthetic oligonucleotide
cccccugugcucccaauccugacau

SEQ ID NO: 140239 - RNA, 25 nt, Artificial Sequence
  Description of Artificial Sequence: Synthetic oligonucleotide
uggccagugcuacagucucgcacag

SEQ ID NO: 140240 - RNA, 25 nt, Artificial Sequence
  Description of Artificial Sequence: Synthetic oligonucleotide
gggcuggucuaugaccaaaauauga

SEQ ID NO: 140241 - RNA, 25 nt, Artificial Sequence
  Description of Artificial Sequence: Synthetic oligonucleotide
augaaucacugcaacuugugggaca

SEQ ID NO: 140242 - RNA, 25 nt, Artificial Sequence
  Description of Artificial Sequence: Synthetic oligonucleotide
agccaccacccugagguaccccagc

SEQ ID NO: 140243 - RNA, 25 nt, Artificial Sequence
  Description of Artificial Sequence: Synthetic oligonucleotide
cgcaucuugcggaucaugugccguc

SEQ ID NO: 140244 - RNA, 25 nt, Artificial Sequence
  Description of Artificial Sequence: Synthetic oligonucleotide
cuggaggagcugggccuugccgggc

SEQ ID NO: 140245 - RNA, 25 nt, Artificial Sequence
  Description of Artificial Sequence: Synthetic oligonucleotide
cgcugccucacccugacaccgcgcc

SEQ ID NO: 140246 - RNA, 25 nt, Artificial Sequence
  Description of Artificial Sequence: Synthetic oligonucleotide
ccugccacagaggcugagcugcuca

SEQ ID NO: 140247 - RNA, 25 nt, Artificial Sequence
  Description of Artificial Sequence: Synthetic oligonucleotide
accugucacagugcugaguacgugg

SEQ ID NO: 140248 - RNA, 25 nt, Artificial Sequence
  Description of Artificial Sequence: Synthetic oligonucleotide
ggucaucuccgggccacagagaaaa

SEQ ID NO: 140249 - RNA, 25 nt, Artificial Sequence
  Description of Artificial Sequence: Synthetic oligonucleotide
augaaaacccgggagcugcaccgug

SEQ ID NO: 140250 - RNA, 25 nt, Artificial Sequence
  Description of Artificial Sequence: Synthetic oligonucleotide
gagaguuccaacuuugacuccaucu

SEQ ID NO: 140251 - RNA, 25 nt, Artificial Sequence
  Description of Artificial Sequence: Synthetic oligonucleotide
uauaucugccccaguaccuucgccu

SEQ ID NO: 140252 - RNA, 25 nt, Artificial Sequence
  Description of Artificial Sequence: Synthetic oligonucleotide
ugugcacagcuugccacuggcgcug

SEQ ID NO: 140253 - RNA, 25 nt, Artificial Sequence
  Description of Artificial Sequence: Synthetic oligonucleotide
gccugccgccugguggaggcugugc

SEQ ID NO: 140254 - RNA, 25 nt, Artificial Sequence
  Description of Artificial Sequence: Synthetic oligonucleotide
cucucaggagagguucugaauggug

SEQ ID NO: 140255 - RNA, 25 nt, Artificial Sequence
  Description of Artificial Sequence: Synthetic oligonucleotide
gcugcuguggugcgucccccaggac

SEQ ID NO: 140256 - RNA, 25 nt, Artificial Sequence
  Description of Artificial Sequence: Synthetic oligonucleotide
caccacgcagagcaggaugcagcuu

SEQ ID NO: 140257 - RNA, 25 nt, Artificial Sequence
  Description of Artificial Sequence: Synthetic oligonucleotide
ugcgguuuuugcuuuuucaacucug

SEQ ID NO: 140258 - RNA, 25 nt, Artificial Sequence
  Description of Artificial Sequence: Synthetic oligonucleotide
guggcuguggcugcucgccaugccc

SEQ ID NO: 140259 - RNA, 25 nt, Artificial Sequence
  Description of Artificial Sequence: Synthetic oligonucleotide
cagacuaucagugggcaugcccuac

SEQ ID NO: 140260 - RNA, 25 nt, Artificial Sequence
  Description of Artificial Sequence: Synthetic oligonucleotide
cggauccugauuguggauugggaug

SEQ ID NO: 140261 - RNA, 25 nt, Artificial Sequence
  Description of Artificial Sequence: Synthetic oligonucleotide
guccaccacgguaauggaacucagc

SEQ ID NO: 140262 - RNA, 25 nt, Artificial Sequence
  Description of Artificial Sequence: Synthetic oligonucleotide
cacauguuugaggaugaccccagug

SEQ ID NO: 140263 - RNA, 25 nt, Artificial Sequence
  Description of Artificial Sequence: Synthetic oligonucleotide
gugcuauaugugucccugcaccgcu

SEQ ID NO: 140264 - RNA, 25 nt, Artificial Sequence
  Description of Artificial Sequence: Synthetic oligonucleotide
uaugaucauggcaccuucuucccca

SEQ ID NO: 140265 - RNA, 25 nt, Artificial Sequence
  Description of Artificial Sequence: Synthetic oligonucleotide
augggggaugagggugccagcagcc

SEQ ID NO: 140266 - RNA, 25 nt, Artificial Sequence
  Description of Artificial Sequence: Synthetic oligonucleotide
cagaucggccgggcugcgggcacag

SEQ ID NO: 140267 - RNA, 25 nt, Artificial Sequence
  Description of Artificial Sequence: Synthetic oligonucleotide
ggcuucaccgucaacguggcaugga

SEQ ID NO: 140268 - RNA, 25 nt, Artificial Sequence
  Description of Artificial Sequence: Synthetic oligonucleotide
aacgggccccgcaugggugaugcug

SEQ ID NO: 140269 - RNA, 25 nt, Artificial Sequence
  Description of Artificial Sequence: Synthetic oligonucleotide
gacuaccuagcugccuggcaucgcc

SEQ ID NO: 140270 - RNA, 25 nt, Artificial Sequence
  Description of Artificial Sequence: Synthetic oligonucleotide
cuggugcuucccauugccuacgagu

SEQ ID NO: 140271 - RNA, 25 nt, Artificial Sequence
  Description of Artificial Sequence: Synthetic oligonucleotide
uuuaacccagaacuggugcuggucu

SEQ ID NO: 140272 - RNA, 25 nt, Artificial Sequence
  Description of Artificial Sequence: Synthetic oligonucleotide
ucagcuggcuuugaugcugcacggg

SEQ ID NO: 140273 - RNA, 25 nt, Artificial Sequence
  Description of Artificial Sequence: Synthetic oligonucleotide
ggggauccgcuggggggcugccagg

SEQ ID NO: 140274 - RNA, 25 nt, Artificial Sequence
  Description of Artificial Sequence: Synthetic oligonucleotide
gugucaccugaggguuaugcccacc

SEQ ID NO: 140275 - RNA, 25 nt, Artificial Sequence
  Description of Artificial Sequence: Synthetic oligonucleotide
cucacccaccugcugaugggccuug

SEQ ID NO: 140276 - RNA, 25 nt, Artificial Sequence
  Description of Artificial Sequence: Synthetic oligonucleotide
gccaguggccgcauuauccuuaucc

SEQ ID NO: 140277 - RNA, 25 nt, Artificial Sequence
  Description of Artificial Sequence: Synthetic oligonucleotide
cuagaggguggcuauaaccugacau

SEQ ID NO: 140278 - RNA, 25 nt, Artificial Sequence
  Description of Artificial Sequence: Synthetic oligonucleotide
uccaucucagaguccauggcugccu

SEQ ID NO: 140279 - RNA, 25 nt, Artificial Sequence
  Description of Artificial Sequence: Synthetic oligonucleotide
ugcacucgcucccuccuuggagacc

SEQ ID NO: 140280 - RNA, 25 nt, Artificial Sequence
  Description of Artificial Sequence: Synthetic oligonucleotide
ccaccaccccugcugacccugccac

SEQ ID NO: 140281 - RNA, 25 nt, Artificial Sequence
  Description of Artificial Sequence: Synthetic oligonucleotide
cggcccccacuaucaggggcccugg

SEQ ID NO: 140282 - RNA, 25 nt, Artificial Sequence
  Description of Artificial Sequence: Synthetic oligonucleotide
gccucaaucacugagaccauccaag

SEQ ID NO: 140283 - RNA, 25 nt, Artificial Sequence
  Description of Artificial Sequence: Synthetic oligonucleotide
guccaucgcagauacuggcgcagcu

SEQ ID NO: 140284 - RNA, 25 nt, Artificial Sequence
  Description of Artificial Sequence: Synthetic oligonucleotide
uuacgggucaugaagguagaagaca

SEQ ID NO: 140285 - RNA, 25 nt, Artificial Sequence
  Description of Artificial Sequence: Synthetic oligonucleotide
agagaaggacccuccaguucuaagu

SEQ ID NO: 140286 - RNA, 25 nt, Artificial Sequence
  Description of Artificial Sequence: Synthetic oligonucleotide
uuggucaccaagaaggcaccccaac

SEQ ID NO: 140287 - RNA, 25 nt, Artificial Sequence
  Description of Artificial Sequence: Synthetic oligonucleotide
ccagccaaaccuagguuagcugagc

SEQ ID NO: 140288 - RNA, 25 nt, Artificial Sequence
  Description of Artificial Sequence: Synthetic oligonucleotide
cggaugaccacacgagaaaagaagg

SEQ ID NO: 140289 - RNA, 25 nt, Artificial Sequence
  Description of Artificial Sequence: Synthetic oligonucleotide
guucuggaagcaggcauggggaaag

SEQ ID NO: 140290 - RNA, 25 nt, Artificial Sequence
  Description of Artificial Sequence: Synthetic oligonucleotide
gucaccucggcaucauuuggggaag

SEQ ID NO: 140291 - RNA, 25 nt, Artificial Sequence
  Description of Artificial Sequence: Synthetic oligonucleotide
gaguccacuccaggccagacuaacu

SEQ ID NO: 140292 - RNA, 25 nt, Artificial Sequence
  Description of Artificial Sequence: Synthetic oligonucleotide
ucagagacagcugugguggcccuca

SEQ ID NO: 140293 - RNA, 25 nt, Artificial Sequence
  Description of Artificial Sequence: Synthetic oligonucleotide
acucaggaccagcccucagaggcag

SEQ ID NO: 140294 - RNA, 25 nt, Artificial Sequence
  Description of Artificial Sequence: Synthetic oligonucleotide
gccacagggggagccacucuggccc

SEQ ID NO: 140295 - RNA, 25 nt, Artificial Sequence
  Description of Artificial Sequence: Synthetic oligonucleotide
cagaccauuucugaggcagccauug

SEQ ID NO: 140296 - RNA, 25 nt, Artificial Sequence
  Description of Artificial Sequence: Synthetic oligonucleotide
gggggagccaugcugggccagacca

SEQ ID NO: 140297 - RNA, 25 nt, Artificial Sequence
  Description of Artificial Sequence: Synthetic oligonucleotide
accucagaggaggcugucgggggag

SEQ ID NO: 140298 - RNA, 25 nt, Artificial Sequence
  Description of Artificial Sequence: Synthetic oligonucleotide
gccacuccggaccagaccaccucag

SEQ ID NO: 140299 - RNA, 25 nt, Artificial Sequence
  Description of Artificial Sequence: Synthetic oligonucleotide
gaggagacugugggaggagccauuc

SEQ ID NO: 140300 - RNA, 25 nt, Artificial Sequence
  Description of Artificial Sequence: Synthetic oligonucleotide
cuggaccagaccaccucagaggaug

SEQ ID NO: 140301 - RNA, 25 nt, Artificial Sequence
  Description of Artificial Sequence: Synthetic oligonucleotide
gcuguugggggagccacgcugggcc

SEQ ID NO: 140302 - RNA, 25 nt, Artificial Sequence
  Description of Artificial Sequence: Synthetic oligonucleotide
cagacuaccucagaggaggcuguag

SEQ ID NO: 140303 - RNA, 25 nt, Artificial Sequence
  Description of Artificial Sequence: Synthetic oligonucleotide
ggaggagcuacacuggcccagacca

SEQ ID NO: 140304 - RNA, 25 nt, Artificial Sequence
  Description of Artificial Sequence: Synthetic oligonucleotide
accucggaggcagccauggagggag

SEQ ID NO: 140305 - RNA, 25 nt, Artificial Sequence
  Description of Artificial Sequence: Synthetic oligonucleotide
gccacacuggaccagacuacgucag

SEQ ID NO: 140306 - RNA, 25 nt, Artificial Sequence
  Description of Artificial Sequence: Synthetic oligonucleotide
gaggaggcuccagggggcaccgagc

SEQ ID NO: 140307 - RNA, 25 nt, Artificial Sequence
  Description of Artificial Sequence: Synthetic oligonucleotide
cugauccaaacuccucuagccucga

SEQ ID NO: 140308 - RNA, 25 nt, Artificial Sequence
  Description of Artificial Sequence: Synthetic oligonucleotide
agcacagaccaccagacccccccaa

SEQ ID NO: 140309 - RNA, 25 nt, Artificial Sequence
  Description of Artificial Sequence: Synthetic oligonucleotide
accucaccugugcagggaacuacac

SEQ ID NO: 140310 - RNA, 25 nt, Artificial Sequence
  Description of Artificial Sequence: Synthetic oligonucleotide
ccccagauaucucccaguacacuga

SEQ ID NO: 140311 - RNA, 25 nt, Artificial Sequence
  Description of Artificial Sequence: Synthetic oligonucleotide
auugggagucucaggaccuuggagc

SEQ ID NO: 140312 - RNA, 25 nt, Artificial Sequence
  Description of Artificial Sequence: Synthetic oligonucleotide
cuaggcagcgaaucucagggggccu

SEQ ID NO: 140313 - RNA, 25 nt, Artificial Sequence
  Description of Artificial Sequence: Synthetic oligonucleotide
ucagaaucucaggccccaggagagg

SEQ ID NO: 140314 - RNA, 25 nt, Artificial Sequence
  Description of Artificial Sequence: Synthetic oligonucleotide
gagaaccuacuaggagaggcagcug

SEQ ID NO: 140315 - RNA, 25 nt, Artificial Sequence
  Description of Artificial Sequence: Synthetic oligonucleotide
ggaggucaggacauggcugauucga

SEQ ID NO: 140316 - RNA, 25 nt, Artificial Sequence
  Description of Artificial Sequence: Synthetic oligonucleotide
augcugaugcagggaucuaggggcc

SEQ ID NO: 140317 - RNA, 25 nt, Artificial Sequence
  Description of Artificial Sequence: Synthetic oligonucleotide
cucacugaucaggccauauuuuaug

SEQ ID NO: 140318 - RNA, 25 nt, Artificial Sequence
  Description of Artificial Sequence: Synthetic oligonucleotide
gcugugacaccacugcccugguguc

SEQ ID NO: 140319 - RNA, 25 nt, Artificial Sequence
  Description of Artificial Sequence: Synthetic oligonucleotide
ccccauuugguggcaguaugcccca

SEQ ID NO: 140320 - RNA, 25 nt, Artificial Sequence
  Description of Artificial Sequence: Synthetic oligonucleotide
auaccugcagcaggccuagacguga

SEQ ID NO: 140321 - RNA, 25 nt, Artificial Sequence
  Description of Artificial Sequence: Synthetic oligonucleotide
acccaaccuuguggggacuguggaa

SEQ ID NO: 140322 - RNA, 25 nt, Artificial Sequence
  Description of Artificial Sequence: Synthetic oligonucleotide
acaauccaagagaauuggguguguc

SEQ ID NO: 140323 - RNA, 25 nt, Artificial Sequence
  Description of Artificial Sequence: Synthetic oligonucleotide
cucucuugcuaucaggucuacugug

SEQ ID NO: 140324 - RNA, 25 nt, Artificial Sequence
  Description of Artificial Sequence: Synthetic oligonucleotide
ggucguuacaucaauggccacaugc

SEQ ID NO: 140325 - RNA, 25 nt, Artificial Sequence
  Description of Artificial Sequence: Synthetic oligonucleotide
cuccaacaccauggaaauucuggac

SEQ ID NO: 140326 - RNA, 25 nt, Artificial Sequence
  Description of Artificial Sequence: Synthetic oligonucleotide
cacccgcugguccucagcuacaucg

SEQ ID NO: 140327 - RNA, 25 nt, Artificial Sequence
  Description of Artificial Sequence: Synthetic oligonucleotide
gaccugucagccugguguuacuacu

SEQ ID NO: 140328 - RNA, 25 nt, Artificial Sequence
  Description of Artificial Sequence: Synthetic oligonucleotide
ugucaggccuauguccaccaccagg

SEQ ID NO: 140329 - RNA, 25 nt, Artificial Sequence
  Description of Artificial Sequence: Synthetic oligonucleotide
gcucuccuagaugugaagaacaucg

SEQ ID NO: 140330 - RNA, 25 nt, Artificial Sequence
  Description of Artificial Sequence: Synthetic oligonucleotide
gcccaccagaacaaguuuggggagg

SEQ ID NO: 140331 - RNA, 25 nt, Artificial Sequence
  Description of Artificial Sequence: Synthetic oligonucleotide
gauaugccccacccacacuaagccc

SEQ ID NO: 140332 - RNA, 25 nt, Artificial Sequence
  Description of Artificial Sequence: Synthetic oligonucleotide
ccagaauacggucccucuucaccuu

SEQ ID NO: 140333 - RNA, 25 nt, Artificial Sequence
  Description of Artificial Sequence: Synthetic oligonucleotide
ucugaggcccacgauagaccagcug

SEQ ID NO: 140334 - RNA, 25 nt, Artificial Sequence
  Description of Artificial Sequence: Synthetic oligonucleotide
guagcucauuccagccuguaccuug

SEQ ID NO: 140335 - RNA, 25 nt, Artificial Sequence
  Description of Artificial Sequence: Synthetic oligonucleotide
ggaugagggguagccucccacugca

SEQ ID NO: 140336 - RNA, 25 nt, Artificial Sequence
  Description of Artificial Sequence: Synthetic oligonucleotide
aucccauccugaauauccuuugcaa

SEQ ID NO: 140337 - RNA, 25 nt, Artificial Sequence
  Description of Artificial Sequence: Synthetic oligonucleotide
acuccccaagagugcuuauuuaagu

SEQ ID NO: 140338 - RNA, 25 nt, Artificial Sequence
  Description of Artificial Sequence: Synthetic oligonucleotide
uguuaauacuuuuaagagaacugcg

SEQ ID NO: 140339 - RNA, 25 nt, Artificial Sequence
  Description of Artificial Sequence: Synthetic oligonucleotide
gacgauuaauuguggaucucccccu

SEQ ID NO: 140340 - RNA, 25 nt, Artificial Sequence
  Description of Artificial Sequence: Synthetic oligonucleotide
ugcccauugccugcuugaggggcac

SEQ ID NO: 140341 - RNA, 25 nt, Artificial Sequence
  Description of Artificial Sequence: Synthetic oligonucleotide
ccacuacuccagcccagaaggaaag

SEQ ID NO: 140342 - RNA, 25 nt, Artificial Sequence
  Description of Artificial Sequence: Synthetic oligonucleotide
ggggggcagcucaguggccccaaga

SEQ ID NO: 140343 - RNA, 25 nt, Artificial Sequence
  Description of Artificial Sequence: Synthetic oligonucleotide
agggagcugauaucaugaggauaac

SEQ ID NO: 140344 - RNA, 25 nt, Artificial Sequence
  Description of Artificial Sequence: Synthetic oligonucleotide
cauuggcgggaggggaguuaacugg

SEQ ID NO: 140345 - RNA, 25 nt, Artificial Sequence
  Description of Artificial Sequence: Synthetic oligonucleotide
gcaggcauggcaagguugcauaugu

SEQ ID NO: 140346 - RNA, 25 nt, Artificial Sequence
  Description of Artificial Sequence: Synthetic oligonucleotide
cauauguaauaaaguacaagcuguu

SEQ ID NO: 140347 - RNA, 4204 nt, Homo sapiens
auaauaccuaccuugcaggaccacgacaggauuaagugaggaaaaacccccaugagaguguuuugccauugucaagugagccugagggaggcugaggggggaucaggcuguaucaugcccccgaggacaaacuuuccaguuuacccugcucccucucucugucccuaggcugccccaggcccugugcagacacaccaggcccucagccgcagcccauggaccugcgggugggccagcggcccccaguggagcccccaccagagcccacauugcuggcccugcagcguccccagcgccugcaccaccaccucuuccuagcaggccugcagcagcagcgcucgguggagcccaugaggcucuccauggacacgccgaugcccgaguugcaggugggaccccaggaacaagagcugcggcagcuucuccacaaggacaagagcaagcgaagugcuguagccagcagcguggucaagcagaagcuagcggaggugauucugaaaaaacagcaggcggcccuagaaagaacaguccaucccaacagccccggcauucccuacagaacccuggagccccuggagacggaaggagccacccgcuccaugcucagcagcuuuuugccuccuguucccagccugcccagugaccccccagagcacuucccucugcgcaagacagucucugagcccaaccugaagcugcgcuauaagcccaagaagucccuggagcggaggaagaauccacugcuccgaaaggagagugcgccccccagccuccggcggcggcccgcagagacccucggagacuccuccccaaguaguagcagcacgcccgcaucagggugcagcucccccaaugacagcgagcacggccccaaucccauccugggcucggaggcgcucuugggccagcggcugcggcugcaggagacuucuguggccccguucgccuugccgacaguguccuugcugcccgcaaucacucuggggcugcccgccccugccagggcugacagugaccgcaggacccauccgacucugggcccucgggggccaauccuggggagcccccacacuccccucuuccugccccauggcuuggagcccgaggcugggggcaccuugcccucucgccugcagcccauucuccuccuggaccccucaggcucucaugccccgcugcugacugugcccgggcuugggcccuugcccuuccacuuugcccaguccuuaaugaccaccgagcggcucucugggucaggccuccacuggccacugagccggacucgcucagagccccugccccccagugccaccgcucccccaccgccgggccccaugcagccccgccuggagcagcucaaaacucacguccaggugaucaagaggucagccaagccgagugagaagccccggcugcggcagauacccucggcugaagaccuggagacagauggcgggggaccgggccaggugguggacgauggccuggagcacagggagcugggccaugggcagccugaggccagaggccccgcuccucuccagcagcacccucagguguugcucugggaacagcagcgacuggcugggcggcucccccggggcagcaccggggacacugugcugcuuccucuggcccagggugggcaccggccucugucccgggcucagucuuccccagccgcaccugccucacugucagccccagagccugccagccaggcccgaguccucuccagcucagagaccccugccaggacccugcccuucaccacagggcugaucuaugacucggucaugcugaagcaccagugcuccugcggugacaacagcaggcacccggagcacgccggccgcauccagagcaucuggucccggcugcaggagcgggggcuccggagccagugugagugucuccgaggccggaaggccucccuggaagagcugcagucgguccacucugagcggcacgugcuccucuacggcaccaacccgcucagccgccucaaacuggacaacgggaagcuggcagggcuccuggcacagcggauguuugugaugcugcccuguggugggguugggguggacacugacaccaucuggaaugagcuucauuccuccaaugcagcccgcugggccgcuggcagugucacugaccucgccuucaaaguggcuucucgugagcuaaagaaugguuucgcuguggugcggcccccaggacaccaugcagaucauucaacagccaugggcuucugcuucuucaacucaguggccaucgccugccggcagcugcaacagcagagcaaggccagcaagauccucauuguagacugggacgugcaccauggcaacggcacccagcaaaccuucuaccaagaccccagugugcucuacaucucccugcaucgccaugacgacggcaacuucuucccggggaguggggcuguggaugagguaggggcuggcagcggugagggcuucaaugucaauguggccugggcuggaggucuggacccccccaugggggauccugaguaccuggcugcuuucaggauagucgugaugcccaucgcccgagaguucucuccagaccuaguccuggugucugcuggauuugaugcugcugagggucacccggccccacuggguggcuaccauguuucugccaaauguuuuggauacaugacgcagcaacugaugaaccuggcaggaggcgcaguggugcuggccuuggaggguggccaugaccucacagccaucugugacgccucugaggccuguguggcugcucuucuggguaacaggguggauccccuuucagaagaaggcuggaaacagaaacccaaccucaaugccauccgcucucuggaggccgugauccgggugcacaguaaauacuggggcugcaugcagcgccuggccuccuguccagacuccugggugccuagagugccaggggcugacaaagaagaaguggaggcagugaccgcacuggcgucccucucugugggcauccuggcugaagauaggcccucggagcagcugguggaggaggaagaaccuaugaaucucuaaggcucuggaaccaucugcccgcccaccaugcccuugggaccugguucucuucuaaccccuggcaauagcccccauuccugggucuuuagagauccugugggcaaguaguuggaaccagagaacagccugccugcuuugacaguuaucccagggagcgugagaaaaucccugggucuagaaugggaacuggagaggacccugagaggagacgggcugggcggcgacccccacagggcucucgagaacagauucuccccuccaguaugggcccuggcuguggcccccauuccucaggacugcacagaggaggacuggcuccggcuccgucgggcucacccuuaaccacuauuccuggcucugcaaaccccagacuuugcacacagccucaggcuccacacagaaaugugaacuuggccucagacaggcuggcccuuccuaggcucuaggggcuaggggggaguggggagccaagaggucccauauuccugagugcagggguagucccucucaccugcuuccucagacgacucuggaagcuucccucuaccacugggcacugagacgaagcucccugacagccgagacuggcagcccuccaucugguccguacccucgccagaggccccccuacaucaaccuccuggcgaugcccugguggagcagaugggugcucugggaguccugugcuuccugauccaauggugccaaacccuucaucuccccaagaagcgcagcauaccccugggaccccucggccacugcccacucggggagccuucucuguuucuggggccucccccaccauagcucugauucccaccccacauaggaguagccugacugagggggaaggggugggagagaagauacagacauggaggaggggaggcugcucuggcaaagucuucaaggcuuuuggggguccaggccuggggucaagaaggaaaaugugugugagcaugugugugagugaggcgugugugugagcgugugugugagugaggcgugugugugugucuuuccuaggacccaccauacccuguguauguaugcauguuuuuguaaaaaggaagaaaauggaaaaaaaucugaacaauaaauguuuuauuugcuuuaaaaaaaaaaaaaaa

SEQ ID NO: 140348 - RNA, 4093 nt, Homo sapiens
auaauaccuaccuugcaggaccacgacaggauuaagugaggaaaaacccccaugagaguguuuugccauugucaagugagccugagggaggcugaggggggaucaggcuguaucaugcccccgaggacaaacuuuccaguuuacccugcucccucucucugucccuaggcugccccaggcccugugcagacacaccaggcccucagccgcagcccauggaccugcgggugggccagcggcccccaguggagcccccaccagagcccacauugcuggcccugcagcguccccagcgccugcaccaccaccucuuccuagcaggccugcagcagcagcgcucgguggagcccaugaggcucuccauggacacgccgaugcccgaguugcaggugggaccccaggaacaagagcugcggcagcuucuccacaaggacaagagcaagcgaagugcuguagccagcagcguggucaagcagaagcuagcggaggugauucugaaaaaacagcaggcggcccuagaaagaacaguccaucccaacagccccggcauucccuacagaacccuggagccccuggagacggaaggagccacccgcuccaugcucagcagcuuuuugccuccuguucccagccugcccagugaccccccagagcacuucccucugcgcaagacagucucugagcccaaccugaagcugcgcuauaagcccaagaagucccuggagcggaggaagaauccacugcuccgaaaggagagugcgccccccagccuccggcggcggcccgcagagacccucggagacuccuccccaaguaguagcagcacgcccgcaucagggugcagcucccccaaugacagcgagcacggccccaaucccauccugggcucggaggcugacagugaccgcaggacccauccgacucugggcccucgggggccaauccuggggagcccccacacuccccucuuccugccccauggcuuggagcccgaggcugggggcaccuugcccucucgccugcagcccauucuccuccuggaccccucaggcucucaugccccgcugcugacugugcccgggcuugggcccuugcccuuccacuuugcccaguccuuaaugaccaccgagcggcucucugggucaggccuccacuggccacugagccggacucgcucagagccccugccccccagugccaccgcucccccaccgccgggccccaugcagccccgccuggagcagcucaaaacucacguccaggugaucaagaggucagccaagccgagugagaagccccggcugcggcagauacccucggcugaagaccuggagacagauggcgggggaccgggccaggugguggacgauggccuggagcacagggagcugggccaugggcagccugaggccagaggccccgcuccucuccagcagcacccucagguguugcucugggaacagcagcgacuggcugggcggcucccccggggcagcaccggggacacugugcugcuuccucuggcccagggugggcaccggccucugucccgggcucagucuuccccagccgcaccugccucacugucagccccagagccugccagccaggcccgaguccucuccagcucagagaccccugccaggacccugcccuucaccacagggcugaucuaugacucggucaugcugaagcaccagugcuccugcggugacaacagcaggcacccggagcacgccggccgcauccagagcaucuggucccggcugcaggagcgggggcuccggagccagugugagugucuccgaggccggaaggccucccuggaagagcugcagucgguccacucugagcggcacgugcuccucuacggcaccaacccgcucagccgccucaaacuggacaacgggaagcuggcagggcuccuggcacagcggauguuugugaugcugcccuguggugggguugggguggacacugacaccaucuggaaugagcuucauuccuccaaugcagcccgcugggccgcuggcagugucacugaccucgccuucaaaguggcuucucgugagcuaaagaaugguuucgcuguggugcggcccccaggacaccaugcagaucauucaacagccaugggcuucugcuucuucaacucaguggccaucgccugccggcagcugcaacagcagagcaaggccagcaagauccucauuguagacugggacgugcaccauggcaacggcacccagcaaaccuucuaccaagaccccagugugcucuacaucucccugcaucgccaugacgacggcaacuucuucccggggaguggggcuguggaugagguaggggcuggcagcggugagggcuucaaugucaauguggccugggcuggaggucuggacccccccaugggggauccugaguaccuggcugcuuucaggauagucgugaugcccaucgcccgagaguucucuccagaccuaguccuggugucugcuggauuugaugcugcugagggucacccggccccacuggguggcuaccauguuucugccaaauguuuuggauacaugacgcagcaacugaugaaccuggcaggaggcgcaguggugcuggccuuggaggguggccaugaccucacagccaucugugacgccucugaggccuguguggcugcucuucuggguaacaggguggauccccuuucagaagaaggcuggaaacagaaacccaaccucaaugccauccgcucucuggaggccgugauccgggugcacaguaaauacuggggcugcaugcagcgccuggccuccuguccagacuccugggugccuagagugccaggggcugacaaagaagaaguggaggcagugaccgcacuggcgucccucucugugggcauccuggcugaagauaggcccucggagcagcugguggaggaggaagaaccuaugaaucucuaaggcucuggaaccaucugcccgcccaccaugcccuugggaccugguucucuucuaaccccuggcaauagcccccauuccugggucuuuagagauccugugggcaaguaguuggaaccagagaacagccugccugcuuugacaguuaucccagggagcgugagaaaaucccugggucuagaaugggaacuggagaggacccugagaggagacgggcugggcggcgacccccacagggcucucgagaacagauucuccccuccaguaugggcccuggcuguggcccccauuccucaggacugcacagaggaggacuggcuccggcuccgucgggcucacccuuaaccacuauuccuggcucugcaaaccccagacuuugcacacagccucaggcuccacacagaaaugugaacuuggccucagacaggcuggcccuuccuaggcucuaggggcuaggggggaguggggagccaagaggucccauauuccugagugcagggguagucccucucaccugcuuccucagacgacucuggaagcuucccucuaccacugggcacugagacgaagcucccugacagccgagacuggcagcccuccaucugguccguacccucgccagaggccccccuacaucaaccuccuggcgaugcccugguggagcagaugggugcucugggaguccugugcuuccugauccaauggugccaaacccuucaucuccccaagaagcgcagcauaccccugggaccccucggccacugcccacucggggagccuucucuguuucuggggccucccccaccauagcucugauucccaccccacauaggaguagccugacugagggggaaggggugggagagaagauacagacauggaggaggggaggcugcucuggcaaagucuucaaggcuuuuggggguccaggccuggggucaagaaggaaaaugugugugagcaugugugugagugaggcgugugugugagcgugugugugagugaggcgugugugugugucuuuccuaggacccaccauacccuguguauguaugcauguuuuuguaaaaaggaagaaaauggaaaaaaaucugaacaauaaauguuuuauuugcuuuaaaaaaaaaaaaaaa

SEQ ID NO: 140349 - RNA, 4195 nt, Homo sapiens
cagccuccggcgacuggggggaugugaggccggcgccccagccccccgccccgccaugagccccccgcucugagggccccggccccuggaugcacagccccggcgcugaugggacccaggugagcccgggugcccacuacugcagccccacuggcgcaggcugccccaggcccugugcagacacaccaggcccucagccgcagcccauggaccugcgggugggccagcggcccccaguggagcccccaccagagcccacauugcuggcccugcagcguccccagcgccugcaccaccaccucuuccuagcaggccugcagcagcagcgcucgguggagcccaugaggcucuccauggacacgccgaugcccgaguugcaggugggaccccaggaacaagagcugcggcagcuucuccacaaggacaagagcaagcgaagugcuguagccagcagcguggucaagcagaagcuagcggaggugauucugaaaaaacagcaggcggcccuagaaagaacaguccaucccaacagccccggcauucccuacagaacccuggagccccuggagacggaaggagccacccgcuccaugcucagcagcuuuuugccuccuguucccagccugcccagugaccccccagagcacuucccucugcgcaagacagucucugagcccaaccugaagcugcgcuauaagcccaagaagucccuggagcggaggaagaauccacugcuccgaaaggagagugcgccccccagccuccggcggcggcccgcagagacccucggagacuccuccccaaguaguagcagcacgcccgcaucagggugcagcucccccaaugacagcgagcacggccccaaucccauccugggcucggaggcgcucuugggccagcggcugcggcugcaggagacuucuguggccccguucgccuugccgacaguguccuugcugcccgcaaucacucuggggcugcccgccccugccagggcugacagugaccgcaggacccauccgacucugggcccucgggggccaauccuggggagcccccacacuccccucuuccugccccauggcuuggagcccgaggcugggggcaccuugcccucucgccugcagcccauucuccuccuggaccccucaggcucucaugccccgcugcugacugugcccgggcuugggcccuugcccuuccacuuugcccaguccuuaaugaccaccgagcggcucucugggucaggccuccacuggccacugagccggacucgcucagagccccugccccccagugccaccgcucccccaccgccgggccccaugcagccccgccuggagcagcucaaaacucacguccaggugaucaagaggucagccaagccgagugagaagccccggcugcggcagauacccucggcugaagaccuggagacagauggcgggggaccgggccaggugguggacgauggccuggagcacagggagcugggccaugggcagccugaggccagaggccccgcuccucuccagcagcacccucagguguugcucugggaacagcagcgacuggcugggcggcucccccggggcagcaccggggacacugugcugcuuccucuggcccagggugggcaccggccucugucccgggcucagucuuccccagccgcaccugccucacugucagccccagagccugccagccaggcccgaguccucuccagcucagagaccccugccaggacccugcccuucaccacagggcugaucuaugacucggucaugcugaagcaccagugcuccugcggugacaacagcaggcacccggagcacgccggccgcauccagagcaucuggucccggcugcaggagcgggggcuccggagccagugugagugucuccgaggccggaaggccucccuggaagagcugcagucgguccacucugagcggcacgugcuccucuacggcaccaacccgcucagccgccucaaacuggacaacgggaagcuggcagggcuccuggcacagcggauguuugugaugcugcccuguggugggguugggguggacacugacaccaucuggaaugagcuucauuccuccaaugcagcccgcugggccgcuggcagugucacugaccucgccuucaaaguggcuucucgugagcuaaagaaugguuucgcuguggugcggcccccaggacaccaugcagaucauucaacagccaugggcuucugcuucuucaacucaguggccaucgccugccggcagcugcaacagcagagcaaggccagcaagauccucauuguagacugggacgugcaccauggcaacggcacccagcaaaccuucuaccaagaccccagugugcucuacaucucccugcaucgccaugacgacggcaacuucuucccggggaguggggcuguggaugagguaggggcuggcagcggugagggcuucaaugucaauguggccugggcuggaggucuggacccccccaugggggauccugaguaccuggcugcuuucaggauagucgugaugcccaucgcccgagaguucucuccagaccuaguccuggugucugcuggauuugaugcugcugagggucacccggccccacuggguggcuaccauguuucugccaaauguuuuggauacaugacgcagcaacugaugaaccuggcaggaggcgcaguggugcuggccuuggaggguggccaugaccucacagccaucugugacgccucugaggccuguguggcugcucuucuggguaacaggguggauccccuuucagaagaaggcuggaaacagaaacccaaccucaaugccauccgcucucuggaggccgugauccgggugcacaguaaauacuggggcugcaugcagcgccuggccuccuguccagacuccugggugccuagagugccaggggcugacaaagaagaaguggaggcagugaccgcacuggcgucccucucugugggcauccuggcugaagauaggcccucggagcagcugguggaggaggaagaaccuaugaaucucuaaggcucuggaaccaucugcccgcccaccaugcccuugggaccugguucucuucuaaccccuggcaauagcccccauuccugggucuuuagagauccugugggcaaguaguuggaaccagagaacagccugccugcuuugacaguuaucccagggagcgugagaaaaucccugggucuagaaugggaacuggagaggacccugagaggagacgggcugggcggcgacccccacagggcucucgagaacagauucuccccuccaguaugggcccuggcuguggcccccauuccucaggacugcacagaggaggacuggcuccggcuccgucgggcucacccuuaaccacuauuccuggcucugcaaaccccagacuuugcacacagccucaggcuccacacagaaaugugaacuuggccucagacaggcuggcccuuccuaggcucuaggggcuaggggggaguggggagccaagaggucccauauuccugagugcagggguagucccucucaccugcuuccucagacgacucuggaagcuucccucuaccacugggcacugagacgaagcucccugacagccgagacuggcagcccuccaucugguccguacccucgccagaggccccccuacaucaaccuccuggcgaugcccugguggagcagaugggugcucugggaguccugugcuuccugauccaauggugccaaacccuucaucuccccaagaagcgcagcauaccccugggaccccucggccacugcccacucggggagccuucucuguuucuggggccucccccaccauagcucugauucccaccccacauaggaguagccugacugagggggaaggggugggagagaagauacagacauggaggaggggaggcugcucuggcaaagucuucaaggcuuuuggggguccaggccuggggucaagaaggaaaaugugugugagcaugugugugagugaggcgugugugugagcgugugugugagugaggcgugugugugugucuuuccuaggacccaccauacccuguguauguaugcauguuuuuguaaaaaggaagaaaauggaaaaaaaucugaacaauaaauguuuuauuugcuuuaaaaaaaaaaaaaaa

SEQ ID NO: 140350 - RNA, 4084 nt, Homo sapiens
cagccuccggcgacuggggggaugugaggccggcgccccagccccccgccccgccaugagccccccgcucugagggccccggccccuggaugcacagccccggcgcugaugggacccaggugagcccgggugcccacuacugcagccccacuggcgcaggcugccccaggcccugugcagacacaccaggcccucagccgcagcccauggaccugcgggugggccagcggcccccaguggagcccccaccagagcccacauugcuggcccugcagcguccccagcgccugcaccaccaccucuuccuagcaggccugcagcagcagcgcucgguggagcccaugaggcucuccauggacacgccgaugcccgaguugcaggugggaccccaggaacaagagcugcggcagcuucuccacaaggacaagagcaagcgaagugcuguagccagcagcguggucaagcagaagcuagcggaggugauucugaaaaaacagcaggcggcccuagaaagaacaguccaucccaacagccccggcauucccuacagaacccuggagccccuggagacggaaggagccacccgcuccaugcucagcagcuuuuugccuccuguucccagccugcccagugaccccccagagcacuucccucugcgcaagacagucucugagcccaaccugaagcugcgcuauaagcccaagaagucccuggagcggaggaagaauccacugcuccgaaaggagagugcgccccccagccuccggcggcggcccgcagagacccucggagacuccuccccaaguaguagcagcacgcccgcaucagggugcagcucccccaaugacagcgagcacggccccaaucccauccugggcucggaggcugacagugaccgcaggacccauccgacucugggcccucgggggccaauccuggggagcccccacacuccccucuuccugccccauggcuuggagcccgaggcugggggcaccuugcccucucgccugcagcccauucuccuccuggaccccucaggcucucaugccccgcugcugacugugcccgggcuugggcccuugcccuuccacuuugcccaguccuuaaugaccaccgagcggcucucugggucaggccuccacuggccacugagccggacucgcucagagccccugccccccagugccaccgcucccccaccgccgggccccaugcagccccgccuggagcagcucaaaacucacguccaggugaucaagaggucagccaagccgagugagaagccccggcugcggcagauacccucggcugaagaccuggagacagauggcgggggaccgggccaggugguggacgauggccuggagcacagggagcugggccaugggcagccugaggccagaggccccgcuccucuccagcagcacccucagguguugcucugggaacagcagcgacuggcugggcggcucccccggggcagcaccggggacacugugcugcuuccucuggcccagggugggcaccggccucugucccgggcucagucuuccccagccgcaccugccucacugucagccccagagccugccagccaggcccgaguccucuccagcucagagaccccugccaggacccugcccuucaccacagggcugaucuaugacucggucaugcugaagcaccagugcuccugcggugacaacagcaggcacccggagcacgccggccgcauccagagcaucuggucccggcugcaggagcgggggcuccggagccagugugagugucuccgaggccggaaggccucccuggaagagcugcagucgguccacucugagcggcacgugcuccucuacggcaccaacccgcucagccgccucaaacuggacaacgggaagcuggcagggcuccuggcacagcggauguuugugaugcugcccuguggugggguugggguggacacugacaccaucuggaaugagcuucauuccuccaaugcagcccgcugggccgcuggcagugucacugaccucgccuucaaaguggcuucucgugagcuaaagaaugguuucgcuguggugcggcccccaggacaccaugcagaucauucaacagccaugggcuucugcuucuucaacucaguggccaucgccugccggcagcugcaacagcagagcaaggccagcaagauccucauuguagacugggacgugcaccauggcaacggcacccagcaaaccuucuaccaagaccccagugugcucuacaucucccugcaucgccaugacgacggcaacuucuucccggggaguggggcuguggaugagguaggggcuggcagcggugagggcuucaaugucaauguggccugggcuggaggucuggacccccccaugggggauccugaguaccuggcugcuuucaggauagucgugaugcccaucgcccgagaguucucuccagaccuaguccuggugucugcuggauuugaugcugcugagggucacccggccccacuggguggcuaccauguuucugccaaauguuuuggauacaugacgcagcaacugaugaaccuggcaggaggcgcaguggugcuggccuuggaggguggccaugaccucacagccaucugugacgccucugaggccuguguggcugcucuucuggguaacaggguggauccccuuucagaagaaggcuggaaacagaaacccaaccucaaugccauccgcucucuggaggccgugauccgggugcacaguaaauacuggggcugcaugcagcgccuggccuccuguccagacuccugggugccuagagugccaggggcugacaaagaagaaguggaggcagugaccgcacuggcgucccucucugugggcauccuggcugaagauaggcccucggagcagcugguggaggaggaagaaccuaugaaucucuaaggcucuggaaccaucugcccgcccaccaugcccuugggaccugguucucuucuaaccccuggcaauagcccccauuccugggucuuuagagauccugugggcaaguaguuggaaccagagaacagccugccugcuuugacaguuaucccagggagcgugagaaaaucccugggucuagaaugggaacuggagaggacccugagaggagacgggcugggcggcgacccccacagggcucucgagaacagauucuccccuccaguaugggcccuggcuguggcccccauuccucaggacugcacagaggaggacuggcuccggcuccgucgggcucacccuuaaccacuauuccuggcucugcaaaccccagacuuugcacacagccucaggcuccacacagaaaugugaacuuggccucagacaggcuggcccuuccuaggcucuaggggcuaggggggaguggggagccaagaggucccauauuccugagugcagggguagucccucucaccugcuuccucagacgacucuggaagcuucccucuaccacugggcacugagacgaagcucccugacagccgagacuggcagcccuccaucugguccguacccucgccagaggccccccuacaucaaccuccuggcgaugcccugguggagcagaugggugcucugggaguccugugcuuccugauccaauggugccaaacccuucaucuccccaagaagcgcagcauaccccugggaccccucggccacugcccacucggggagccuucucuguuucuggggccucccccaccauagcucugauucccaccccacauaggaguagccugacugagggggaaggggugggagagaagauacagacauggaggaggggaggcugcucuggcaaagucuucaaggcuuuuggggguccaggccuggggucaagaaggaaaaugugugugagcaugugugugagugaggcgugugugugagcgugugugugagugaggcgugugugugugucuuuccuaggacccaccauacccuguguauguaugcauguuuuuguaaaaaggaagaaaauggaaaaaaaucugaacaauaaauguuuuauuugcuuuaaaaaaaaaaaaaaa

SEQ ID NO: 140351 - RNA, 19 nt, Artificial Sequence
  Description of Artificial Sequence: Synthetic oligonucleotide
cagccuccggcgacugggg

SEQ ID NO: 140352 - RNA, 19 nt, Artificial Sequence
  Description of Artificial Sequence: Synthetic oligonucleotide
gggaugugaggccggcgcc

SEQ ID NO: 140353 - RNA, 19 nt, Artificial Sequence
  Description of Artificial Sequence: Synthetic oligonucleotide
cccagccccccgccccgcc

SEQ ID NO: 140354 - RNA, 19 nt, Artificial Sequence
  Description of Artificial Sequence: Synthetic oligonucleotide
caugagccccccgcucuga

SEQ ID NO: 140355 - RNA, 19 nt, Artificial Sequence
  Description of Artificial Sequence: Synthetic oligonucleotide
agggccccggccccuggau

SEQ ID NO: 140356 - RNA, 19 nt, Artificial Sequence
  Description of Artificial Sequence: Synthetic oligonucleotide
ugcacagccccggcgcuga

SEQ ID NO: 140357 - RNA, 19 nt, Artificial Sequence
  Description of Artificial Sequence: Synthetic oligonucleotide
augggacccaggugagccc

SEQ ID NO: 140358 - RNA, 19 nt, Artificial Sequence
  Description of Artificial Sequence: Synthetic oligonucleotide
cgggugcccacuacugcag

SEQ ID NO: 140359 - RNA, 19 nt, Artificial Sequence
  Description of Artificial Sequence: Synthetic oligonucleotide
gccccacuggcgcaggcug

SEQ ID NO: 140360 - RNA, 19 nt, Artificial Sequence
  Description of Artificial Sequence: Synthetic oligonucleotide
gccccaggcccugugcaga

SEQ ID NO: 140361 - RNA, 19 nt, Artificial Sequence
  Description of Artificial Sequence: Synthetic oligonucleotide
acacaccaggcccucagcc

SEQ ID NO: 140362 - RNA, 19 nt, Artificial Sequence
  Description of Artificial Sequence: Synthetic oligonucleotide
cgcagcccauggaccugcg

SEQ ID NO: 140363 - RNA, 19 nt, Artificial Sequence
  Description of Artificial Sequence: Synthetic oligonucleotide
gggugggccagcggccccc

SEQ ID NO: 140364 - RNA, 19 nt, Artificial Sequence
  Description of Artificial Sequence: Synthetic oligonucleotide
caguggagcccccaccaga

SEQ ID NO: 140365 - RNA, 19 nt, Artificial Sequence
  Description of Artificial Sequence: Synthetic oligonucleotide
agcccacauugcuggcccu

SEQ ID NO: 140366 - RNA, 19 nt, Artificial Sequence
  Description of Artificial Sequence: Synthetic oligonucleotide
ugcagcguccccagcgccu

SEQ ID NO: 140367 - RNA, 19 nt, Artificial Sequence
  Description of Artificial Sequence: Synthetic oligonucleotide
ugcaccaccaccucuuccu

SEQ ID NO: 140368 - RNA, 19 nt, Artificial Sequence
  Description of Artificial Sequence: Synthetic oligonucleotide
uagcaggccugcagcagca

SEQ ID NO: 140369 - RNA, 19 nt, Artificial Sequence
  Description of Artificial Sequence: Synthetic oligonucleotide
agcgcucgguggagcccau

SEQ ID NO: 140370 - RNA, 19 nt, Artificial Sequence
  Description of Artificial Sequence: Synthetic oligonucleotide
ugaggcucuccauggacac

SEQ ID NO: 140371 - RNA, 19 nt, Artificial Sequence
  Description of Artificial Sequence: Synthetic oligonucleotide
cgccgaugcccgaguugca

SEQ ID NO: 140372 - RNA, 19 nt, Artificial Sequence
  Description of Artificial Sequence: Synthetic oligonucleotide
aggugggaccccaggaaca

SEQ ID NO: 140373 - RNA, 19 nt, Artificial Sequence
  Description of Artificial Sequence: Synthetic oligonucleotide
aagagcugcggcagcuucu

SEQ ID NO: 140374 - RNA, 19 nt, Artificial Sequence
  Description of Artificial Sequence: Synthetic oligonucleotide
uccacaaggacaagagcaa

SEQ ID NO: 140375 - RNA, 19 nt, Artificial Sequence
  Description of Artificial Sequence: Synthetic oligonucleotide
agcgaagugcuguagccag

SEQ ID NO: 140376 - RNA, 19 nt, Artificial Sequence
  Description of Artificial Sequence: Synthetic oligonucleotide
gcagcguggucaagcagaa

SEQ ID NO: 140377 - RNA, 19 nt, Artificial Sequence
  Description of Artificial Sequence: Synthetic oligonucleotide
agcuagcggaggugauucu

SEQ ID NO: 140378 - RNA, 19 nt, Artificial Sequence
  Description of Artificial Sequence: Synthetic oligonucleotide
ugaaaaaacagcaggcggc

SEQ ID NO: 140379 - RNA, 19 nt, Artificial Sequence
  Description of Artificial Sequence: Synthetic oligonucleotide
cccuagaaagaacagucca

SEQ ID NO: 140380 - RNA, 19 nt, Artificial Sequence
  Description of Artificial Sequence: Synthetic oligonucleotide
aucccaacagccccggcau

SEQ ID NO: 140381 - RNA, 19 nt, Artificial Sequence
  Description of Artificial Sequence: Synthetic oligonucleotide
uucccuacagaacccugga

SEQ ID NO: 140382 - RNA, 19 nt, Artificial Sequence
  Description of Artificial Sequence: Synthetic oligonucleotide
agccccuggagacggaagg

SEQ ID NO: 140383 - RNA, 19 nt, Artificial Sequence
  Description of Artificial Sequence: Synthetic oligonucleotide
gagccacccgcuccaugcu

SEQ ID NO: 140384 - RNA, 19 nt, Artificial Sequence
  Description of Artificial Sequence: Synthetic oligonucleotide
ucagcagcuuuuugccucc

SEQ ID NO: 140385 - RNA, 19 nt, Artificial Sequence
  Description of Artificial Sequence: Synthetic oligonucleotide
cuguucccagccugcccag

SEQ ID NO: 140386 - RNA, 19 nt, Artificial Sequence
  Description of Artificial Sequence: Synthetic oligonucleotide
gugaccccccagagcacuu

SEQ ID NO: 140387 - RNA, 19 nt, Artificial Sequence
  Description of Artificial Sequence: Synthetic oligonucleotide
ucccucugcgcaagacagu

SEQ ID NO: 140388 - RNA, 19 nt, Artificial Sequence
  Description of Artificial Sequence: Synthetic oligonucleotide
ucucugagcccaaccugaa

SEQ ID NO: 140389 - RNA, 19 nt, Artificial Sequence
  Description of Artificial Sequence: Synthetic oligonucleotide
agcugcgcuauaagcccaa

SEQ ID NO: 140390 - RNA, 19 nt, Artificial Sequence
  Description of Artificial Sequence: Synthetic oligonucleotide
agaagucccuggagcggag

SEQ ID NO: 140391 - RNA, 19 nt, Artificial Sequence
  Description of Artificial Sequence: Synthetic oligonucleotide
ggaagaauccacugcuccg

SEQ ID NO: 140392 - RNA, 19 nt, Artificial Sequence
  Description of Artificial Sequence: Synthetic oligonucleotide
gaaaggagagugcgccccc

SEQ ID NO: 140393 - RNA, 19 nt, Artificial Sequence
  Description of Artificial Sequence: Synthetic oligonucleotide
ccagccuccggcggcggcc

SEQ ID NO: 140394 - RNA, 19 nt, Artificial Sequence
  Description of Artificial Sequence: Synthetic oligonucleotide
ccgcagagacccucggaga

SEQ ID NO: 140395 - RNA, 19 nt, Artificial Sequence
  Description of Artificial Sequence: Synthetic oligonucleotide
acuccuccccaaguaguag

SEQ ID NO: 140396 - RNA, 19 nt, Artificial Sequence
  Description of Artificial Sequence: Synthetic oligonucleotide
gcagcacgcccgcaucagg

SEQ ID NO: 140397 - RNA, 19 nt, Artificial Sequence
  Description of Artificial Sequence: Synthetic oligonucleotide
ggugcagcucccccaauga

SEQ ID NO: 140398 - RNA, 19 nt, Artificial Sequence
  Description of Artificial Sequence: Synthetic oligonucleotide
acagcgagcacggccccaa

SEQ ID NO: 140399 - RNA, 19 nt, Artificial Sequence
  Description of Artificial Sequence: Synthetic oligonucleotide
aucccauccugggcucgga

SEQ ID NO: 140400 - RNA, 19 nt, Artificial Sequence
  Description of Artificial Sequence: Synthetic oligonucleotide
aggcgcucuugggccagcg

SEQ ID NO: 140401 - RNA, 19 nt, Artificial Sequence
  Description of Artificial Sequence: Synthetic oligonucleotide
ggcugcggcugcaggagac

SEQ ID NO: 140402 - RNA, 19 nt, Artificial Sequence
  Description of Artificial Sequence: Synthetic oligonucleotide
cuucuguggccccguucgc

SEQ ID NO: 140403 - RNA, 19 nt, Artificial Sequence
  Description of Artificial Sequence: Synthetic oligonucleotide
ccuugccgacaguguccuu

SEQ ID NO: 140404 - RNA, 19 nt, Artificial Sequence
  Description of Artificial Sequence: Synthetic oligonucleotide
ugcugcccgcaaucacucu

SEQ ID NO: 140405 - RNA, 19 nt, Artificial Sequence
  Description of Artificial Sequence: Synthetic oligonucleotide
uggggcugcccgccccugc

SEQ ID NO: 140406 - RNA, 19 nt, Artificial Sequence
  Description of Artificial Sequence: Synthetic oligonucleotide
ccagggcugacagugaccg

SEQ ID NO: 140407 - RNA, 19 nt, Artificial Sequence
  Description of Artificial Sequence: Synthetic oligonucleotide
gcaggacccauccgacucu

SEQ ID NO: 140408 - RNA, 19 nt, Artificial Sequence
  Description of Artificial Sequence: Synthetic oligonucleotide
ugggcccucgggggccaau

SEQ ID NO: 140409 - RNA, 19 nt, Artificial Sequence
  Description of Artificial Sequence: Synthetic oligonucleotide
uccuggggagcccccacac

SEQ ID NO: 140410 - RNA, 19 nt, Artificial Sequence
  Description of Artificial Sequence: Synthetic oligonucleotide
cuccccucuuccugcccca

SEQ ID NO: 140411 - RNA, 19 nt, Artificial Sequence
  Description of Artificial Sequence: Synthetic oligonucleotide
auggcuuggagcccgaggc

SEQ ID NO: 140412 - RNA, 19 nt, Artificial Sequence
  Description of Artificial Sequence: Synthetic oligonucleotide
cugggggcaccuugcccuc

SEQ ID NO: 140413 - RNA, 19 nt, Artificial Sequence
  Description of Artificial Sequence: Synthetic oligonucleotide
cucgccugcagcccauucu

SEQ ID NO: 140414 - RNA, 19 nt, Artificial Sequence
  Description of Artificial Sequence: Synthetic oligonucleotide
uccuccuggaccccucagg

SEQ ID NO: 140415 - RNA, 19 nt, Artificial Sequence
  Description of Artificial Sequence: Synthetic oligonucleotide
gcucucaugccccgcugcu

SEQ ID NO: 140416 - RNA, 19 nt, Artificial Sequence
  Description of Artificial Sequence: Synthetic oligonucleotide
ugacugugcccgggcuugg

SEQ ID NO: 140417 - RNA, 19 nt, Artificial Sequence
  Description of Artificial Sequence: Synthetic oligonucleotide
ggcccuugcccuuccacuu

SEQ ID NO: 140418 - RNA, 19 nt, Artificial Sequence
  Description of Artificial Sequence: Synthetic oligonucleotide
uugcccaguccuuaaugac

SEQ ID NO: 140419 - RNA, 19 nt, Artificial Sequence
  Description of Artificial Sequence: Synthetic oligonucleotide
ccaccgagcggcucucugg

SEQ ID NO: 140420 - RNA, 19 nt, Artificial Sequence
  Description of Artificial Sequence: Synthetic oligonucleotide
ggucaggccuccacuggcc

SEQ ID NO: 140421 - RNA, 19 nt, Artificial Sequence
  Description of Artificial Sequence: Synthetic oligonucleotide
cacugagccggacucgcuc

SEQ ID NO: 140422 - RNA, 19 nt, Artificial Sequence
  Description of Artificial Sequence: Synthetic oligonucleotide
cagagccccugccccccag

SEQ ID NO: 140423 - RNA, 19 nt, Artificial Sequence
  Description of Artificial Sequence: Synthetic oligonucleotide
gugccaccgcucccccacc

SEQ ID NO: 140424 - RNA, 19 nt, Artificial Sequence
  Description of Artificial Sequence: Synthetic oligonucleotide
cgccgggccccaugcagcc

SEQ ID NO: 140425 - RNA, 19 nt, Artificial Sequence
  Description of Artificial Sequence: Synthetic oligonucleotide
cccgccuggagcagcucaa

SEQ ID NO: 140426 - RNA, 19 nt, Artificial Sequence
  Description of Artificial Sequence: Synthetic oligonucleotide
aaacucacguccaggugau

SEQ ID NO: 140427 - RNA, 19 nt, Artificial Sequence
  Description of Artificial Sequence: Synthetic oligonucleotide
ucaagaggucagccaagcc

SEQ ID NO: 140428 - RNA, 19 nt, Artificial Sequence
  Description of Artificial Sequence: Synthetic oligonucleotide
cgagugagaagccccggcu

SEQ ID NO: 140429 - RNA, 19 nt, Artificial Sequence
  Description of Artificial Sequence: Synthetic oligonucleotide
ugcggcagauacccucggc

SEQ ID NO: 140430 - RNA, 19 nt, Artificial Sequence
  Description of Artificial Sequence: Synthetic oligonucleotide
cugaagaccuggagacaga

SEQ ID NO: 140431 - RNA, 19 nt, Artificial Sequence
  Description of Artificial Sequence: Synthetic oligonucleotide
auggcgggggaccgggcca

SEQ ID NO: 140432 - RNA, 19 nt, Artificial Sequence
  Description of Artificial Sequence: Synthetic oligonucleotide
aggugguggacgauggccu

SEQ ID NO: 140433 - RNA, 19 nt, Artificial Sequence
  Description of Artificial Sequence: Synthetic oligonucleotide
uggagcacagggagcuggg

SEQ ID NO: 140434 - RNA, 19 nt, Artificial Sequence
  Description of Artificial Sequence: Synthetic oligonucleotide
gccaugggcagccugaggc

SEQ ID NO: 140435 - RNA, 19 nt, Artificial Sequence
  Description of Artificial Sequence: Synthetic oligonucleotide
ccagaggccccgcuccucu

SEQ ID NO: 140436 - RNA, 19 nt, Artificial Sequence
  Description of Artificial Sequence: Synthetic oligonucleotide
uccagcagcacccucaggu

SEQ ID NO: 140437 - RNA, 19 nt, Artificial Sequence
  Description of Artificial Sequence: Synthetic oligonucleotide
uguugcucugggaacagca

SEQ ID NO: 140438 - RNA, 19 nt, Artificial Sequence
  Description of Artificial Sequence: Synthetic oligonucleotide
agcgacuggcugggcggcu

SEQ ID NO: 140439 - RNA, 19 nt, Artificial Sequence
  Description of Artificial Sequence: Synthetic oligonucleotide
ucccccggggcagcaccgg

SEQ ID NO: 140440 - RNA, 19 nt, Artificial Sequence
  Description of Artificial Sequence: Synthetic oligonucleotide
gggacacugugcugcuucc

SEQ ID NO: 140441 - RNA, 19 nt, Artificial Sequence
  Description of Artificial Sequence: Synthetic oligonucleotide
cucuggcccagggugggca

SEQ ID NO: 140442 - RNA, 19 nt, Artificial Sequence
  Description of Artificial Sequence: Synthetic oligonucleotide
accggccucugucccgggc

SEQ ID NO: 140443 - RNA, 19 nt, Artificial Sequence
  Description of Artificial Sequence: Synthetic oligonucleotide
cucagucuuccccagccgc

SEQ ID NO: 140444 - RNA, 19 nt, Artificial Sequence
  Description of Artificial Sequence: Synthetic oligonucleotide
caccugccucacugucagc

SEQ ID NO: 140445 - RNA, 19 nt, Artificial Sequence
  Description of Artificial Sequence: Synthetic oligonucleotide
ccccagagccugccagcca

SEQ ID NO: 140446 - RNA, 19 nt, Artificial Sequence
  Description of Artificial Sequence: Synthetic oligonucleotide
aggcccgaguccucuccag

SEQ ID NO: 140447 - RNA, 19 nt, Artificial Sequence
  Description of Artificial Sequence: Synthetic oligonucleotide
gcucagagaccccugccag

SEQ ID NO: 140448 - RNA, 19 nt, Artificial Sequence
  Description of Artificial Sequence: Synthetic oligonucleotide
ggacccugcccuucaccac

SEQ ID NO: 140449 - RNA, 19 nt, Artificial Sequence
  Description of Artificial Sequence: Synthetic oligonucleotide
cagggcugaucuaugacuc

SEQ ID NO: 140450 - RNA, 19 nt, Artificial Sequence
  Description of Artificial Sequence: Synthetic oligonucleotide
cggucaugcugaagcacca

SEQ ID NO: 140451 - RNA, 19 nt, Artificial Sequence
  Description of Artificial Sequence: Synthetic oligonucleotide
agugcuccugcggugacaa

SEQ ID NO: 140452 - RNA, 19 nt, Artificial Sequence
  Description of Artificial Sequence: Synthetic oligonucleotide
acagcaggcacccggagca

SEQ ID NO: 140453 - RNA, 19 nt, Artificial Sequence
  Description of Artificial Sequence: Synthetic oligonucleotide
acgccggccgcauccagag

SEQ ID NO: 140454 - RNA, 19 nt, Artificial Sequence
  Description of Artificial Sequence: Synthetic oligonucleotide
gcaucuggucccggcugca

SEQ ID NO: 140455 - RNA, 19 nt, Artificial Sequence
  Description of Artificial Sequence: Synthetic oligonucleotide
aggagcgggggcuccggag

SEQ ID NO: 140456 - RNA, 19 nt, Artificial Sequence
  Description of Artificial Sequence: Synthetic oligonucleotide
gccagugugagugucuccg

SEQ ID NO: 140457 - RNA, 19 nt, Artificial Sequence
  Description of Artificial Sequence: Synthetic oligonucleotide
gaggccggaaggccucccu

SEQ ID NO: 140458 - RNA, 19 nt, Artificial Sequence
  Description of Artificial Sequence: Synthetic oligonucleotide
uggaagagcugcagucggu

SEQ ID NO: 140459 - RNA, 19 nt, Artificial Sequence
  Description of Artificial Sequence: Synthetic oligonucleotide
uccacucugagcggcacgu

SEQ ID NO: 140460 - RNA, 19 nt, Artificial Sequence
  Description of Artificial Sequence: Synthetic oligonucleotide
ugcuccucuacggcaccaa

SEQ ID NO: 140461 - RNA, 19 nt, Artificial Sequence
  Description of Artificial Sequence: Synthetic oligonucleotide
acccgcucagccgccucaa

SEQ ID NO: 140462 - RNA, 19 nt, Artificial Sequence
  Description of Artificial Sequence: Synthetic oligonucleotide
aacuggacaacgggaagcu

SEQ ID NO: 140463 - RNA, 19 nt, Artificial Sequence
  Description of Artificial Sequence: Synthetic oligonucleotide
uggcagggcuccuggcaca

SEQ ID NO: 140464 - RNA, 19 nt, Artificial Sequence
  Description of Artificial Sequence: Synthetic oligonucleotide
agcggauguuugugaugcu

SEQ ID NO: 140465 - RNA, 19 nt, Artificial Sequence
  Description of Artificial Sequence: Synthetic oligonucleotide
ugcccuguggugggguugg

SEQ ID NO: 140466 - RNA, 19 nt, Artificial Sequence
  Description of Artificial Sequence: Synthetic oligonucleotide
ggguggacacugacaccau

SEQ ID NO: 140467 - RNA, 19 nt, Artificial Sequence
  Description of Artificial Sequence: Synthetic oligonucleotide
ucuggaaugagcuucauuc

SEQ ID NO: 140468 - RNA, 19 nt, Artificial Sequence
  Description of Artificial Sequence: Synthetic oligonucleotide
ccuccaaugcagcccgcug

SEQ ID NO: 140469 - RNA, 19 nt, Artificial Sequence
  Description of Artificial Sequence: Synthetic oligonucleotide
gggccgcuggcagugucac

SEQ ID NO: 140470 - RNA, 19 nt, Artificial Sequence
  Description of Artificial Sequence: Synthetic oligonucleotide
cugaccucgccuucaaagu

SEQ ID NO: 140471 - RNA, 19 nt, Artificial Sequence
  Description of Artificial Sequence: Synthetic oligonucleotide
uggcuucucgugagcuaaa

SEQ ID NO: 140472 - RNA, 19 nt, Artificial Sequence
  Description of Artificial Sequence: Synthetic oligonucleotide
agaaugguuucgcuguggu

SEQ ID NO: 140473 - RNA, 19 nt, Artificial Sequence
  Description of Artificial Sequence: Synthetic oligonucleotide
ugcggcccccaggacacca

SEQ ID NO: 140474 - RNA, 19 nt, Artificial Sequence
  Description of Artificial Sequence: Synthetic oligonucleotide
augcagaucauucaacagc

SEQ ID NO: 140475 - RNA, 19 nt, Artificial Sequence
  Description of Artificial Sequence: Synthetic oligonucleotide
ccaugggcuucugcuucuu

SEQ ID NO: 140476 - RNA, 19 nt, Artificial Sequence
  Description of Artificial Sequence: Synthetic oligonucleotide
ucaacucaguggccaucgc

SEQ ID NO: 140477 - RNA, 19 nt, Artificial Sequence
  Description of Artificial Sequence: Synthetic oligonucleotide
ccugccggcagcugcaaca

SEQ ID NO: 140478 - RNA, 19 nt, Artificial Sequence
  Description of Artificial Sequence: Synthetic oligonucleotide
agcagagcaaggccagcaa

SEQ ID NO: 140479 - RNA, 19 nt, Artificial Sequence
  Description of Artificial Sequence: Synthetic oligonucleotide
agauccucauuguagacug

SEQ ID NO: 140480 - RNA, 19 nt, Artificial Sequence
  Description of Artificial Sequence: Synthetic oligonucleotide
gggacgugcaccauggcaa

SEQ ID NO: 140481 - RNA, 19 nt, Artificial Sequence
  Description of Artificial Sequence: Synthetic oligonucleotide
acggcacccagcaaaccuu

SEQ ID NO: 140482 - RNA, 19 nt, Artificial Sequence
  Description of Artificial Sequence: Synthetic oligonucleotide
ucuaccaagaccccagugu

SEQ ID NO: 140483 - RNA, 19 nt, Artificial Sequence
  Description of Artificial Sequence: Synthetic oligonucleotide
ugcucuacaucucccugca

SEQ ID NO: 140484 - RNA, 19 nt, Artificial Sequence
  Description of Artificial Sequence: Synthetic oligonucleotide
aucgccaugacgacggcaa

SEQ ID NO: 140485 - RNA, 19 nt, Artificial Sequence
  Description of Artificial Sequence: Synthetic oligonucleotide
acuucuucccggggagugg

SEQ ID NO: 140486 - RNA, 19 nt, Artificial Sequence
  Description of Artificial Sequence: Synthetic oligonucleotide
gggcuguggaugagguagg

SEQ ID NO: 140487 - RNA, 19 nt, Artificial Sequence
  Description of Artificial Sequence: Synthetic oligonucleotide
gggcuggcagcggugaggg

SEQ ID NO: 140488 - RNA, 19 nt, Artificial Sequence
  Description of Artificial Sequence: Synthetic oligonucleotide
gcuucaaugucaauguggc

SEQ ID NO: 140489 - RNA, 19 nt, Artificial Sequence
  Description of Artificial Sequence: Synthetic oligonucleotide
ccugggcuggaggucugga

SEQ ID NO: 140490 - RNA, 19 nt, Artificial Sequence
  Description of Artificial Sequence: Synthetic oligonucleotide
acccccccaugggggaucc

SEQ ID NO: 140491 - RNA, 19 nt, Artificial Sequence
  Description of Artificial Sequence: Synthetic oligonucleotide
cugaguaccuggcugcuuu

SEQ ID NO: 140492 - RNA, 19 nt, Artificial Sequence
  Description of Artificial Sequence: Synthetic oligonucleotide
ucaggauagucgugaugcc

SEQ ID NO: 140493 - RNA, 19 nt, Artificial Sequence
  Description of Artificial Sequence: Synthetic oligonucleotide
ccaucgcccgagaguucuc

SEQ ID NO: 140494 - RNA, 19 nt, Artificial Sequence
  Description of Artificial Sequence: Synthetic oligonucleotide
cuccagaccuaguccuggu

SEQ ID NO: 140495 - RNA, 19 nt, Artificial Sequence
  Description of Artificial Sequence: Synthetic oligonucleotide
ugucugcuggauuugaugc

SEQ ID NO: 140496 - RNA, 19 nt, Artificial Sequence
  Description of Artificial Sequence: Synthetic oligonucleotide
cugcugagggucacccggc

SEQ ID NO: 140497 - RNA, 19 nt, Artificial Sequence
  Description of Artificial Sequence: Synthetic oligonucleotide
ccccacuggguggcuacca

SEQ ID NO: 140498 - RNA, 19 nt, Artificial Sequence
  Description of Artificial Sequence: Synthetic oligonucleotide
auguuucugccaaauguuu

SEQ ID NO: 140499 - RNA, 19 nt, Artificial Sequence
  Description of Artificial Sequence: Synthetic oligonucleotide
uuggauacaugacgcagca

SEQ ID NO: 140500 - RNA, 19 nt, Artificial Sequence
  Description of Artificial Sequence: Synthetic oligonucleotide
aacugaugaaccuggcagg

SEQ ID NO: 140501 - RNA, 19 nt, Artificial Sequence
  Description of Artificial Sequence: Synthetic oligonucleotide
gaggcgcaguggugcuggc

SEQ ID NO: 140502 - RNA, 19 nt, Artificial Sequence
  Description of Artificial Sequence: Synthetic oligonucleotide
ccuuggaggguggccauga

SEQ ID NO: 140503 - RNA, 19 nt, Artificial Sequence
  Description of Artificial Sequence: Synthetic oligonucleotide
accucacagccaucuguga

SEQ ID NO: 140504 - RNA, 19 nt, Artificial Sequence
  Description of Artificial Sequence: Synthetic oligonucleotide
acgccucugaggccugugu

SEQ ID NO: 140505 - RNA, 19 nt, Artificial Sequence
  Description of Artificial Sequence: Synthetic oligonucleotide
uggcugcucuucuggguaa

SEQ ID NO: 140506 - RNA, 19 nt, Artificial Sequence
  Description of Artificial Sequence: Synthetic oligonucleotide
acaggguggauccccuuuc

SEQ ID NO: 140507 - RNA, 19 nt, Artificial Sequence
  Description of Artificial Sequence: Synthetic oligonucleotide
cagaagaaggcuggaaaca

SEQ ID NO: 140508 - RNA, 19 nt, Artificial Sequence
  Description of Artificial Sequence: Synthetic oligonucleotide
agaaacccaaccucaaugc

SEQ ID NO: 140509 - RNA, 19 nt, Artificial Sequence
  Description of Artificial Sequence: Synthetic oligonucleotide
ccauccgcucucuggaggc

SEQ ID NO: 140510 - RNA, 19 nt, Artificial Sequence
  Description of Artificial Sequence: Synthetic oligonucleotide
ccgugauccgggugcacag

SEQ ID NO: 140511 - RNA, 19 nt, Artificial Sequence
  Description of Artificial Sequence: Synthetic oligonucleotide
guaaauacuggggcugcau

SEQ ID NO: 140512 - RNA, 19 nt, Artificial Sequence
  Description of Artificial Sequence: Synthetic oligonucleotide
ugcagcgccuggccuccug

SEQ ID NO: 140513 - RNA, 19 nt, Artificial Sequence
  Description of Artificial Sequence: Synthetic oligonucleotide
guccagacuccugggugcc

SEQ ID NO: 140514 - RNA, 19 nt, Artificial Sequence
  Description of Artificial Sequence: Synthetic oligonucleotide
cuagagugccaggggcuga

SEQ ID NO: 140515 - RNA, 19 nt, Artificial Sequence
  Description of Artificial Sequence: Synthetic oligonucleotide
acaaagaagaaguggaggc

SEQ ID NO: 140516 - RNA, 19 nt, Artificial Sequence
  Description of Artificial Sequence: Synthetic oligonucleotide
cagugaccgcacuggcguc

SEQ ID NO: 140517 - RNA, 19 nt, Artificial Sequence
  Description of Artificial Sequence: Synthetic oligonucleotide
cccucucugugggcauccu

SEQ ID NO: 140518 - RNA, 19 nt, Artificial Sequence
  Description of Artificial Sequence: Synthetic oligonucleotide
uggcugaagauaggcccuc

SEQ ID NO: 140519 - RNA, 19 nt, Artificial Sequence
  Description of Artificial Sequence: Synthetic oligonucleotide
cggagcagcugguggagga

SEQ ID NO: 140520 - RNA, 19 nt, Artificial Sequence
  Description of Artificial Sequence: Synthetic oligonucleotide
aggaagaaccuaugaaucu

SEQ ID NO: 140521 - RNA, 19 nt, Artificial Sequence
  Description of Artificial Sequence: Synthetic oligonucleotide
ucuaaggcucuggaaccau

SEQ ID NO: 140522 - RNA, 19 nt, Artificial Sequence
  Description of Artificial Sequence: Synthetic oligonucleotide
ucugcccgcccaccaugcc

SEQ ID NO: 140523 - RNA, 19 nt, Artificial Sequence
  Description of Artificial Sequence: Synthetic oligonucleotide
ccuugggaccugguucucu

SEQ ID NO: 140524 - RNA, 19 nt, Artificial Sequence
  Description of Artificial Sequence: Synthetic oligonucleotide
uucuaaccccuggcaauag

SEQ ID NO: 140525 - RNA, 19 nt, Artificial Sequence
  Description of Artificial Sequence: Synthetic oligonucleotide
gcccccauuccugggucuu

SEQ ID NO: 140526 - RNA, 19 nt, Artificial Sequence
  Description of Artificial Sequence: Synthetic oligonucleotide
uuagagauccugugggcaa

SEQ ID NO: 140527 - RNA, 19 nt, Artificial Sequence
  Description of Artificial Sequence: Synthetic oligonucleotide
aguaguuggaaccagagaa

SEQ ID NO: 140528 - RNA, 19 nt, Artificial Sequence
  Description of Artificial Sequence: Synthetic oligonucleotide
acagccugccugcuuugac

SEQ ID NO: 140529 - RNA, 19 nt, Artificial Sequence
  Description of Artificial Sequence: Synthetic oligonucleotide
caguuaucccagggagcgu

SEQ ID NO: 140530 - RNA, 19 nt, Artificial Sequence
  Description of Artificial Sequence: Synthetic oligonucleotide
ugagaaaaucccugggucu

SEQ ID NO: 140531 - RNA, 19 nt, Artificial Sequence
  Description of Artificial Sequence: Synthetic oligonucleotide
uagaaugggaacuggagag

SEQ ID NO: 140532 - RNA, 19 nt, Artificial Sequence
  Description of Artificial Sequence: Synthetic oligonucleotide
ggacccugagaggagacgg

SEQ ID NO: 140533 - RNA, 19 nt, Artificial Sequence
  Description of Artificial Sequence: Synthetic oligonucleotide
ggcugggcggcgaccccca

SEQ ID NO: 140534 - RNA, 19 nt, Artificial Sequence
  Description of Artificial Sequence: Synthetic oligonucleotide
acagggcucucgagaacag

SEQ ID NO: 140535 - RNA, 19 nt, Artificial Sequence
  Description of Artificial Sequence: Synthetic oligonucleotide
gauucuccccuccaguaug

SEQ ID NO: 140536 - RNA, 19 nt, Artificial Sequence
  Description of Artificial Sequence: Synthetic oligonucleotide
gggcccuggcuguggcccc

SEQ ID NO: 140537 - RNA, 19 nt, Artificial Sequence
  Description of Artificial Sequence: Synthetic oligonucleotide
ccauuccucaggacugcac

SEQ ID NO: 140538 - RNA, 19 nt, Artificial Sequence
  Description of Artificial Sequence: Synthetic oligonucleotide
cagaggaggacuggcuccg

SEQ ID NO: 140539 - RNA, 19 nt, Artificial Sequence
  Description of Artificial Sequence: Synthetic oligonucleotide
ggcuccgucgggcucaccc

SEQ ID NO: 140540 - RNA, 19 nt, Artificial Sequence
  Description of Artificial Sequence: Synthetic oligonucleotide
cuuaaccacuauuccuggc

SEQ ID NO: 140541 - RNA, 19 nt, Artificial Sequence
  Description of Artificial Sequence: Synthetic oligonucleotide
cucugcaaaccccagacuu

SEQ ID NO: 140542 - RNA, 19 nt, Artificial Sequence
  Description of Artificial Sequence: Synthetic oligonucleotide
uugcacacagccucaggcu

SEQ ID NO: 140543 - RNA, 19 nt, Artificial Sequence
  Description of Artificial Sequence: Synthetic oligonucleotide
uccacacagaaaugugaac

SEQ ID NO: 140544 - RNA, 19 nt, Artificial Sequence
  Description of Artificial Sequence: Synthetic oligonucleotide
cuuggccucagacaggcug

SEQ ID NO: 140545 - RNA, 19 nt, Artificial Sequence
  Description of Artificial Sequence: Synthetic oligonucleotide
ggcccuuccuaggcucuag

SEQ ID NO: 140546 - RNA, 19 nt, Artificial Sequence
  Description of Artificial Sequence: Synthetic oligonucleotide
ggggcuaggggggaguggg

SEQ ID NO: 140547 - RNA, 19 nt, Artificial Sequence
  Description of Artificial Sequence: Synthetic oligonucleotide
ggagccaagaggucccaua

SEQ ID NO: 140548 - RNA, 19 nt, Artificial Sequence
  Description of Artificial Sequence: Synthetic oligonucleotide
auuccugagugcaggggua

SEQ ID NO: 140549 - RNA, 19 nt, Artificial Sequence
  Description of Artificial Sequence: Synthetic oligonucleotide
agucccucucaccugcuuc

SEQ ID NO: 140550 - RNA, 19 nt, Artificial Sequence
  Description of Artificial Sequence: Synthetic oligonucleotide
ccucagacgacucuggaag

SEQ ID NO: 140551 - RNA, 19 nt, Artificial Sequence
  Description of Artificial Sequence: Synthetic oligonucleotide
gcuucccucuaccacuggg

SEQ ID NO: 140552 - RNA, 19 nt, Artificial Sequence
  Description of Artificial Sequence: Synthetic oligonucleotide
gcacugagacgaagcuccc

SEQ ID NO: 140553 - RNA, 19 nt, Artificial Sequence
  Description of Artificial Sequence: Synthetic oligonucleotide
cugacagccgagacuggca

SEQ ID NO: 140554 - RNA, 19 nt, Artificial Sequence
  Description of Artificial Sequence: Synthetic oligonucleotide
agcccuccaucugguccgu

SEQ ID NO: 140555 - RNA, 19 nt, Artificial Sequence
  Description of Artificial Sequence: Synthetic oligonucleotide
uacccucgccagaggcccc

SEQ ID NO: 140556 - RNA, 19 nt, Artificial Sequence
  Description of Artificial Sequence: Synthetic oligonucleotide
cccuacaucaaccuccugg

SEQ ID NO: 140557 - RNA, 19 nt, Artificial Sequence
  Description of Artificial Sequence: Synthetic oligonucleotide
gcgaugcccugguggagca

SEQ ID NO: 140558 - RNA, 19 nt, Artificial Sequence
  Description of Artificial Sequence: Synthetic oligonucleotide
agaugggugcucugggagu

SEQ ID NO: 140559 - RNA, 19 nt, Artificial Sequence
  Description of Artificial Sequence: Synthetic oligonucleotide
uccugugcuuccugaucca

SEQ ID NO: 140560 - RNA, 19 nt, Artificial Sequence
  Description of Artificial Sequence: Synthetic oligonucleotide
aauggugccaaacccuuca

SEQ ID NO: 140561 - RNA, 19 nt, Artificial Sequence
  Description of Artificial Sequence: Synthetic oligonucleotide
aucuccccaagaagcgcag

SEQ ID NO: 140562 - RNA, 19 nt, Artificial Sequence
  Description of Artificial Sequence: Synthetic oligonucleotide
gcauaccccugggaccccu

SEQ ID NO: 140563 - RNA, 19 nt, Artificial Sequence
  Description of Artificial Sequence: Synthetic oligonucleotide
ucggccacugcccacucgg

SEQ ID NO: 140564 - RNA, 19 nt, Artificial Sequence
  Description of Artificial Sequence: Synthetic oligonucleotide
gggagccuucucuguuucu

SEQ ID NO: 140565 - RNA, 19 nt, Artificial Sequence
  Description of Artificial Sequence: Synthetic oligonucleotide
uggggccucccccaccaua

SEQ ID NO: 140566 - RNA, 19 nt, Artificial Sequence
  Description of Artificial Sequence: Synthetic oligonucleotide
agcucugauucccacccca

SEQ ID NO: 140567 - RNA, 19 nt, Artificial Sequence
  Description of Artificial Sequence: Synthetic oligonucleotide
acauaggaguagccugacu

SEQ ID NO: 140568 - RNA, 19 nt, Artificial Sequence
  Description of Artificial Sequence: Synthetic oligonucleotide
ugagggggaagggguggga

SEQ ID NO: 140569 - RNA, 19 nt, Artificial Sequence
  Description of Artificial Sequence: Synthetic oligonucleotide
agagaagauacagacaugg

SEQ ID NO: 140570 - RNA, 19 nt, Artificial Sequence
  Description of Artificial Sequence: Synthetic oligonucleotide
gaggaggggaggcugcucu

SEQ ID NO: 140571 - RNA, 19 nt, Artificial Sequence
  Description of Artificial Sequence: Synthetic oligonucleotide
uggcaaagucuucaaggcu

SEQ ID NO: 140572 - RNA, 19 nt, Artificial Sequence
  Description of Artificial Sequence: Synthetic oligonucleotide
uuuuggggguccaggccug

SEQ ID NO: 140573 - RNA, 19 nt, Artificial Sequence
  Description of Artificial Sequence: Synthetic oligonucleotide
ggggucaagaaggaaaaug

SEQ ID NO: 140574 - RNA, 19 nt, Artificial Sequence
  Description of Artificial Sequence: Synthetic oligonucleotide
gugugugagcaugugugug

SEQ ID NO: 140575 - RNA, 19 nt, Artificial Sequence
  Description of Artificial Sequence: Synthetic oligonucleotide
gagugaggcguguguguga

SEQ ID NO: 140576 - RNA, 19 nt, Artificial Sequence
  Description of Artificial Sequence: Synthetic oligonucleotide
agcgugugugugagugagg

SEQ ID NO: 140577 - RNA, 19 nt, Artificial Sequence
  Description of Artificial Sequence: Synthetic oligonucleotide
gcgugugugugugucuuuc

SEQ ID NO: 140578 - RNA, 19 nt, Artificial Sequence
  Description of Artificial Sequence: Synthetic oligonucleotide
ccuaggacccaccauaccc

SEQ ID NO: 140579 - RNA, 19 nt, Artificial Sequence
  Description of Artificial Sequence: Synthetic oligonucleotide
cuguguauguaugcauguu

SEQ ID NO: 140580 - RNA, 19 nt, Artificial Sequence
  Description of Artificial Sequence: Synthetic oligonucleotide
uuuuguaaaaaggaagaaa

SEQ ID NO: 140581 - RNA, 19 nt, Artificial Sequence
  Description of Artificial Sequence: Synthetic oligonucleotide
aauggaaaaaaaucugaac

SEQ ID NO: 140582 - RNA, 19 nt, Artificial Sequence
  Description of Artificial Sequence: Synthetic oligonucleotide
caauaaauguuuuauuugc

SEQ ID NO: 140583 - RNA, 19 nt, Artificial Sequence
  Description of Artificial Sequence: Synthetic oligonucleotide
aggcugacagugaccgcag

SEQ ID NO: 140584 - RNA, 19 nt, Artificial Sequence
  Description of Artificial Sequence: Synthetic oligonucleotide
ggacccauccgacucuggg

SEQ ID NO: 140585 - RNA, 19 nt, Artificial Sequence
  Description of Artificial Sequence: Synthetic oligonucleotide
gcccucgggggccaauccu

SEQ ID NO: 140586 - RNA, 19 nt, Artificial Sequence
  Description of Artificial Sequence: Synthetic oligonucleotide
uggggagcccccacacucc

SEQ ID NO: 140587 - RNA, 19 nt, Artificial Sequence
  Description of Artificial Sequence: Synthetic oligonucleotide
cccucuuccugccccaugg

SEQ ID NO: 140588 - RNA, 19 nt, Artificial Sequence
  Description of Artificial Sequence: Synthetic oligonucleotide
gcuuggagcccgaggcugg

SEQ ID NO: 140589 - RNA, 19 nt, Artificial Sequence
  Description of Artificial Sequence: Synthetic oligonucleotide
ggggcaccuugcccucucg

SEQ ID NO: 140590 - RNA, 19 nt, Artificial Sequence
  Description of Artificial Sequence: Synthetic oligonucleotide
gccugcagcccauucuccu

SEQ ID NO: 140591 - RNA, 19 nt, Artificial Sequence
  Description of Artificial Sequence: Synthetic oligonucleotide
uccuggaccccucaggcuc

SEQ ID NO: 140592 - RNA, 19 nt, Artificial Sequence
  Description of Artificial Sequence: Synthetic oligonucleotide
cucaugccccgcugcugac

SEQ ID NO: 140593 - RNA, 19 nt, Artificial Sequence
  Description of Artificial Sequence: Synthetic oligonucleotide
cugugcccgggcuugggcc

SEQ ID NO: 140594 - RNA, 19 nt, Artificial Sequence
  Description of Artificial Sequence: Synthetic oligonucleotide
ccuugcccuuccacuuugc

SEQ ID NO: 140595 - RNA, 19 nt, Artificial Sequence
  Description of Artificial Sequence: Synthetic oligonucleotide
cccaguccuuaaugaccac

SEQ ID NO: 140596 - RNA, 19 nt, Artificial Sequence
  Description of Artificial Sequence: Synthetic oligonucleotide
ccgagcggcucucuggguc

SEQ ID NO: 140597 - RNA, 19 nt, Artificial Sequence
  Description of Artificial Sequence: Synthetic oligonucleotide
caggccuccacuggccacu

SEQ ID NO: 140598 - RNA, 19 nt, Artificial Sequence
  Description of Artificial Sequence: Synthetic oligonucleotide
ugagccggacucgcucaga

SEQ ID NO: 140599 - RNA, 19 nt, Artificial Sequence
  Description of Artificial Sequence: Synthetic oligonucleotide
agccccugccccccagugc

SEQ ID NO: 140600 - RNA, 19 nt, Artificial Sequence
  Description of Artificial Sequence: Synthetic oligonucleotide
ccaccgcucccccaccgcc

SEQ ID NO: 140601 - RNA, 19 nt, Artificial Sequence
  Description of Artificial Sequence: Synthetic oligonucleotide
cgggccccaugcagccccg

SEQ ID NO: 140602 - RNA, 19 nt, Artificial Sequence
  Description of Artificial Sequence: Synthetic oligonucleotide
gccuggagcagcucaaaac

SEQ ID NO: 140603 - RNA, 19 nt, Artificial Sequence
  Description of Artificial Sequence: Synthetic oligonucleotide
cucacguccaggugaucaa

SEQ ID NO: 140604 - RNA, 19 nt, Artificial Sequence
  Description of Artificial Sequence: Synthetic oligonucleotide
agaggucagccaagccgag

SEQ ID NO: 140605 - RNA, 19 nt, Artificial Sequence
  Description of Artificial Sequence: Synthetic oligonucleotide
gugagaagccccggcugcg

SEQ ID NO: 140606 - RNA, 19 nt, Artificial Sequence
  Description of Artificial Sequence: Synthetic oligonucleotide
ggcagauacccucggcuga

SEQ ID NO: 140607 - RNA, 19 nt, Artificial Sequence
  Description of Artificial Sequence: Synthetic oligonucleotide
aagaccuggagacagaugg

SEQ ID NO: 140608 - RNA, 19 nt, Artificial Sequence
  Description of Artificial Sequence: Synthetic oligonucleotide
gcgggggaccgggccaggu

SEQ ID NO: 140609 - RNA, 19 nt, Artificial Sequence
  Description of Artificial Sequence: Synthetic oligonucleotide
ugguggacgauggccugga

SEQ ID NO: 140610 - RNA, 19 nt, Artificial Sequence
  Description of Artificial Sequence: Synthetic oligonucleotide
agcacagggagcugggcca

SEQ ID NO: 140611 - RNA, 19 nt, Artificial Sequence
  Description of Artificial Sequence: Synthetic oligonucleotide
augggcagccugaggccag

SEQ ID NO: 140612 - RNA, 19 nt, Artificial Sequence
  Description of Artificial Sequence: Synthetic oligonucleotide
gaggccccgcuccucucca

SEQ ID NO: 140613 - RNA, 19 nt, Artificial Sequence
  Description of Artificial Sequence: Synthetic oligonucleotide
agcagcacccucagguguu

SEQ ID NO: 140614 - RNA, 19 nt, Artificial Sequence
  Description of Artificial Sequence: Synthetic oligonucleotide
ugcucugggaacagcagcg

SEQ ID NO: 140615 - RNA, 19 nt, Artificial Sequence
  Description of Artificial Sequence: Synthetic oligonucleotide
gacuggcugggcggcuccc

SEQ ID NO: 140616 - RNA, 19 nt, Artificial Sequence
  Description of Artificial Sequence: Synthetic oligonucleotide
cccggggcagcaccgggga

SEQ ID NO: 140617 - RNA, 19 nt, Artificial Sequence
  Description of Artificial Sequence: Synthetic oligonucleotide
acacugugcugcuuccucu

SEQ ID NO: 140618 - RNA, 19 nt, Artificial Sequence
  Description of Artificial Sequence: Synthetic oligonucleotide
uggcccagggugggcaccg

SEQ ID NO: 140619 - RNA, 19 nt, Artificial Sequence
  Description of Artificial Sequence: Synthetic oligonucleotide
ggccucugucccgggcuca

SEQ ID NO: 140620 - RNA, 19 nt, Artificial Sequence
  Description of Artificial Sequence: Synthetic oligonucleotide
agucuuccccagccgcacc

SEQ ID NO: 140621 - RNA, 19 nt, Artificial Sequence
  Description of Artificial Sequence: Synthetic oligonucleotide
cugccucacugucagcccc

SEQ ID NO: 140622 - RNA, 19 nt, Artificial Sequence
  Description of Artificial Sequence: Synthetic oligonucleotide
cagagccugccagccaggc

SEQ ID NO: 140623 - RNA, 19 nt, Artificial Sequence
  Description of Artificial Sequence: Synthetic oligonucleotide
cccgaguccucuccagcuc

SEQ ID NO: 140624 - RNA, 19 nt, Artificial Sequence
  Description of Artificial Sequence: Synthetic oligonucleotide
cagagaccccugccaggac

SEQ ID NO: 140625 - RNA, 19 nt, Artificial Sequence
  Description of Artificial Sequence: Synthetic oligonucleotide
cccugcccuucaccacagg

SEQ ID NO: 140626 - RNA, 19 nt, Artificial Sequence
  Description of Artificial Sequence: Synthetic oligonucleotide
ggcugaucuaugacucggu

SEQ ID NO: 140627 - RNA, 19 nt, Artificial Sequence
  Description of Artificial Sequence: Synthetic oligonucleotide
ucaugcugaagcaccagug

SEQ ID NO: 140628 - RNA, 19 nt, Artificial Sequence
  Description of Artificial Sequence: Synthetic oligonucleotide
gcuccugcggugacaacag

SEQ ID NO: 140629 - RNA, 19 nt, Artificial Sequence
  Description of Artificial Sequence: Synthetic oligonucleotide
gcaggcacccggagcacgc

SEQ ID NO: 140630 - RNA, 19 nt, Artificial Sequence
  Description of Artificial Sequence: Synthetic oligonucleotide
ccggccgcauccagagcau

SEQ ID NO: 140631 - RNA, 19 nt, Artificial Sequence
  Description of Artificial Sequence: Synthetic oligonucleotide
ucuggucccggcugcagga

SEQ ID NO: 140632 - RNA, 19 nt, Artificial Sequence
  Description of Artificial Sequence: Synthetic oligonucleotide
agcgggggcuccggagcca

SEQ ID NO: 140633 - RNA, 19 nt, Artificial Sequence
  Description of Artificial Sequence: Synthetic oligonucleotide
agugugagugucuccgagg

SEQ ID NO: 140634 - RNA, 19 nt, Artificial Sequence
  Description of Artificial Sequence: Synthetic oligonucleotide
gccggaaggccucccugga

SEQ ID NO: 140635 - RNA, 19 nt, Artificial Sequence
  Description of Artificial Sequence: Synthetic oligonucleotide
aagagcugcagucggucca

SEQ ID NO: 140636 - RNA, 19 nt, Artificial Sequence
  Description of Artificial Sequence: Synthetic oligonucleotide
acucugagcggcacgugcu

SEQ ID NO: 140637 - RNA, 19 nt, Artificial Sequence
  Description of Artificial Sequence: Synthetic oligonucleotide
uccucuacggcaccaaccc

SEQ ID NO: 140638 - RNA, 19 nt, Artificial Sequence
  Description of Artificial Sequence: Synthetic oligonucleotide
cgcucagccgccucaaacu

SEQ ID NO: 140639 - RNA, 19 nt, Artificial Sequence
  Description of Artificial Sequence: Synthetic oligonucleotide
uggacaacgggaagcuggc

SEQ ID NO: 140640 - RNA, 19 nt, Artificial Sequence
  Description of Artificial Sequence: Synthetic oligonucleotide
cagggcuccuggcacagcg

SEQ ID NO: 140641 - RNA, 19 nt, Artificial Sequence
  Description of Artificial Sequence: Synthetic oligonucleotide
ggauguuugugaugcugcc

SEQ ID NO: 140642 - RNA, 19 nt, Artificial Sequence
  Description of Artificial Sequence: Synthetic oligonucleotide
ccuguggugggguuggggu

SEQ ID NO: 140643 - RNA, 19 nt, Artificial Sequence
  Description of Artificial Sequence: Synthetic oligonucleotide
uggacacugacaccaucug

SEQ ID NO: 140644 - RNA, 19 nt, Artificial Sequence
  Description of Artificial Sequence: Synthetic oligonucleotide
ggaaugagcuucauuccuc

SEQ ID NO: 140645 - RNA, 19 nt, Artificial Sequence
  Description of Artificial Sequence: Synthetic oligonucleotide
ccaaugcagcccgcugggc

SEQ ID NO: 140646 - RNA, 19 nt, Artificial Sequence
  Description of Artificial Sequence: Synthetic oligonucleotide
ccgcuggcagugucacuga

SEQ ID NO: 140647 - RNA, 19 nt, Artificial Sequence
  Description of Artificial Sequence: Synthetic oligonucleotide
accucgccuucaaaguggc

SEQ ID NO: 140648 - RNA, 19 nt, Artificial Sequence
  Description of Artificial Sequence: Synthetic oligonucleotide
cuucucgugagcuaaagaa

SEQ ID NO: 140649 - RNA, 19 nt, Artificial Sequence
  Description of Artificial Sequence: Synthetic oligonucleotide
augguuucgcuguggugcg

SEQ ID NO: 140650 - RNA, 19 nt, Artificial Sequence
  Description of Artificial Sequence: Synthetic oligonucleotide
ggcccccaggacaccaugc

SEQ ID NO: 140651 - RNA, 19 nt, Artificial Sequence
  Description of Artificial Sequence: Synthetic oligonucleotide
cagaucauucaacagccau

SEQ ID NO: 140652 - RNA, 19 nt, Artificial Sequence
  Description of Artificial Sequence: Synthetic oligonucleotide
ugggcuucugcuucuucaa

SEQ ID NO: 140653 - RNA, 19 nt, Artificial Sequence
  Description of Artificial Sequence: Synthetic oligonucleotide
acucaguggccaucgccug

SEQ ID NO: 140654 - RNA, 19 nt, Artificial Sequence
  Description of Artificial Sequence: Synthetic oligonucleotide
gccggcagcugcaacagca

SEQ ID NO: 140655 - RNA, 19 nt, Artificial Sequence
  Description of Artificial Sequence: Synthetic oligonucleotide
agagcaaggccagcaagau

SEQ ID NO: 140656 - RNA, 19 nt, Artificial Sequence
  Description of Artificial Sequence: Synthetic oligonucleotide
uccucauuguagacuggga

SEQ ID NO: 140657 - RNA, 19 nt, Artificial Sequence
  Description of Artificial Sequence: Synthetic oligonucleotide
acgugcaccauggcaacgg

SEQ ID NO: 140658 - RNA, 19 nt, Artificial Sequence
  Description of Artificial Sequence: Synthetic oligonucleotide
gcacccagcaaaccuucua

SEQ ID NO: 140659 - RNA, 19 nt, Artificial Sequence
  Description of Artificial Sequence: Synthetic oligonucleotide
accaagaccccagugugcu

SEQ ID NO: 140660 - RNA, 19 nt, Artificial Sequence
  Description of Artificial Sequence: Synthetic oligonucleotide
ucuacaucucccugcaucg

SEQ ID NO: 140661 - RNA, 19 nt, Artificial Sequence
  Description of Artificial Sequence: Synthetic oligonucleotide
gccaugacgacggcaacuu

SEQ ID NO: 140662 - RNA, 19 nt, Artificial Sequence
  Description of Artificial Sequence: Synthetic oligonucleotide
ucuucccggggaguggggc

SEQ ID NO: 140663 - RNA, 19 nt, Artificial Sequence
  Description of Artificial Sequence: Synthetic oligonucleotide
cuguggaugagguaggggc

SEQ ID NO: 140664 - RNA, 19 nt, Artificial Sequence
  Description of Artificial Sequence: Synthetic oligonucleotide
cuggcagcggugagggcuu

SEQ ID NO: 140665 - RNA, 19 nt, Artificial Sequence
  Description of Artificial Sequence: Synthetic oligonucleotide
ucaaugucaauguggccug

SEQ ID NO: 140666 - RNA, 19 nt, Artificial Sequence
  Description of Artificial Sequence: Synthetic oligonucleotide
gggcuggaggucuggaccc

SEQ ID NO: 140667 - RNA, 19 nt, Artificial Sequence
  Description of Artificial Sequence: Synthetic oligonucleotide
cccccaugggggauccuga

SEQ ID NO: 140668 - RNA, 19 nt, Artificial Sequence
  Description of Artificial Sequence: Synthetic oligonucleotide
aguaccuggcugcuuucag

SEQ ID NO: 140669 - RNA, 19 nt, Artificial Sequence
  Description of Artificial Sequence: Synthetic oligonucleotide
ggauagucgugaugcccau

SEQ ID NO: 140670 - RNA, 19 nt, Artificial Sequence
  Description of Artificial Sequence: Synthetic oligonucleotide
ucgcccgagaguucucucc

SEQ ID NO: 140671 - RNA, 19 nt, Artificial Sequence
  Description of Artificial Sequence: Synthetic oligonucleotide
cagaccuaguccugguguc

SEQ ID NO: 140672 - RNA, 19 nt, Artificial Sequence
  Description of Artificial Sequence: Synthetic oligonucleotide
cugcuggauuugaugcugc

SEQ ID NO: 140673 - RNA, 19 nt, Artificial Sequence
  Description of Artificial Sequence: Synthetic oligonucleotide
cugagggucacccggcccc

SEQ ID NO: 140674 - RNA, 19 nt, Artificial Sequence
  Description of Artificial Sequence: Synthetic oligonucleotide
cacuggguggcuaccaugu

SEQ ID NO: 140675 - RNA, 19 nt, Artificial Sequence
  Description of Artificial Sequence: Synthetic oligonucleotide
uuucugccaaauguuuugg

SEQ ID NO: 140676 - RNA, 19 nt, Artificial Sequence
  Description of Artificial Sequence: Synthetic oligonucleotide
gauacaugacgcagcaacu

SEQ ID NO: 140677 - RNA, 19 nt, Artificial Sequence
  Description of Artificial Sequence: Synthetic oligonucleotide
ugaugaaccuggcaggagg

SEQ ID NO: 140678 - RNA, 19 nt, Artificial Sequence
  Description of Artificial Sequence: Synthetic oligonucleotide
gcgcaguggugcuggccuu

SEQ ID NO: 140679 - RNA, 19 nt, Artificial Sequence
  Description of Artificial Sequence: Synthetic oligonucleotide
uggaggguggccaugaccu

SEQ ID NO: 140680 - RNA, 19 nt, Artificial Sequence
  Description of Artificial Sequence: Synthetic oligonucleotide
ucacagccaucugugacgc

SEQ ID NO: 140681 - RNA, 19 nt, Artificial Sequence
  Description of Artificial Sequence: Synthetic oligonucleotide
ccucugaggccuguguggc

SEQ ID NO: 140682 - RNA, 19 nt, Artificial Sequence
  Description of Artificial Sequence: Synthetic oligonucleotide
cugcucuucuggguaacag

SEQ ID NO: 140683 - RNA, 19 nt, Artificial Sequence
  Description of Artificial Sequence: Synthetic oligonucleotide
ggguggauccccuuucaga

SEQ ID NO: 140684 - RNA, 19 nt, Artificial Sequence
  Description of Artificial Sequence: Synthetic oligonucleotide
aagaaggcuggaaacagaa

SEQ ID NO: 140685 - RNA, 19 nt, Artificial Sequence
  Description of Artificial Sequence: Synthetic oligonucleotide
aacccaaccucaaugccau

SEQ ID NO: 140686 - RNA, 19 nt, Artificial Sequence
  Description of Artificial Sequence: Synthetic oligonucleotide
uccgcucucuggaggccgu

SEQ ID NO: 140687 - RNA, 19 nt, Artificial Sequence
  Description of Artificial Sequence: Synthetic oligonucleotide
ugauccgggugcacaguaa

SEQ ID NO: 140688 - RNA, 19 nt, Artificial Sequence
  Description of Artificial Sequence: Synthetic oligonucleotide
aauacuggggcugcaugca

SEQ ID NO: 140689 - RNA, 19 nt, Artificial Sequence
  Description of Artificial Sequence: Synthetic oligonucleotide
agcgccuggccuccugucc

SEQ ID NO: 140690 - RNA, 19 nt, Artificial Sequence
  Description of Artificial Sequence: Synthetic oligonucleotide
cagacuccugggugccuag

SEQ ID NO: 140691 - RNA, 19 nt, Artificial Sequence
  Description of Artificial Sequence: Synthetic oligonucleotide
gagugccaggggcugacaa

SEQ ID NO: 140692 - RNA, 19 nt, Artificial Sequence
  Description of Artificial Sequence: Synthetic oligonucleotide
aagaagaaguggaggcagu

SEQ ID NO: 140693 - RNA, 19 nt, Artificial Sequence
  Description of Artificial Sequence: Synthetic oligonucleotide
ugaccgcacuggcgucccu

SEQ ID NO: 140694 - RNA, 19 nt, Artificial Sequence
  Description of Artificial Sequence: Synthetic oligonucleotide
ucucugugggcauccuggc

SEQ ID NO: 140695 - RNA, 19 nt, Artificial Sequence
  Description of Artificial Sequence: Synthetic oligonucleotide
cugaagauaggcccucgga

SEQ ID NO: 140696 - RNA, 19 nt, Artificial Sequence
  Description of Artificial Sequence: Synthetic oligonucleotide
agcagcugguggaggagga

SEQ ID NO: 140697 - RNA, 19 nt, Artificial Sequence
  Description of Artificial Sequence: Synthetic oligonucleotide
aagaaccuaugaaucucua

SEQ ID NO: 140698 - RNA, 19 nt, Artificial Sequence
  Description of Artificial Sequence: Synthetic oligonucleotide
aaggcucuggaaccaucug

SEQ ID NO: 140699 - RNA, 19 nt, Artificial Sequence
  Description of Artificial Sequence: Synthetic oligonucleotide
gcccgcccaccaugcccuu

SEQ ID NO: 140700 - RNA, 19 nt, Artificial Sequence
  Description of Artificial Sequence: Synthetic oligonucleotide
ugggaccugguucucuucu

SEQ ID NO: 140701 - RNA, 19 nt, Artificial Sequence
  Description of Artificial Sequence: Synthetic oligonucleotide
uaaccccuggcaauagccc

SEQ ID NO: 140702 - RNA, 19 nt, Artificial Sequence
  Description of Artificial Sequence: Synthetic oligonucleotide
cccauuccugggucuuuag

SEQ ID NO: 140703 - RNA, 19 nt, Artificial Sequence
  Description of Artificial Sequence: Synthetic oligonucleotide
gagauccugugggcaagua

SEQ ID NO: 140704 - RNA, 19 nt, Artificial Sequence
  Description of Artificial Sequence: Synthetic oligonucleotide
aguuggaaccagagaacag

SEQ ID NO: 140705 - RNA, 19 nt, Artificial Sequence
  Description of Artificial Sequence: Synthetic oligonucleotide
gccugccugcuuugacagu

SEQ ID NO: 140706 - RNA, 19 nt, Artificial Sequence
  Description of Artificial Sequence: Synthetic oligonucleotide
uuaucccagggagcgugag

SEQ ID NO: 140707 - RNA, 19 nt, Artificial Sequence
  Description of Artificial Sequence: Synthetic oligonucleotide
gaaaaucccugggucuaga

SEQ ID NO: 140708 - RNA, 19 nt, Artificial Sequence
  Description of Artificial Sequence: Synthetic oligonucleotide
aaugggaacuggagaggac

SEQ ID NO: 140709 - RNA, 19 nt, Artificial Sequence
  Description of Artificial Sequence: Synthetic oligonucleotide
cccugagaggagacgggcu

SEQ ID NO: 140710 - RNA, 19 nt, Artificial Sequence
  Description of Artificial Sequence: Synthetic oligonucleotide
ugggcggcgacccccacag

SEQ ID NO: 140711 - RNA, 19 nt, Artificial Sequence
  Description of Artificial Sequence: Synthetic oligonucleotide
gggcucucgagaacagauu

SEQ ID NO: 140712 - RNA, 19 nt, Artificial Sequence
  Description of Artificial Sequence: Synthetic oligonucleotide
ucuccccuccaguaugggc

SEQ ID NO: 140713 - RNA, 19 nt, Artificial Sequence
  Description of Artificial Sequence: Synthetic oligonucleotide
cccuggcuguggcccccau

SEQ ID NO: 140714 - RNA, 19 nt, Artificial Sequence
  Description of Artificial Sequence: Synthetic oligonucleotide
uuccucaggacugcacaga

SEQ ID NO: 140715 - RNA, 19 nt, Artificial Sequence
  Description of Artificial Sequence: Synthetic oligonucleotide
aggaggacuggcuccggcu

SEQ ID NO: 140716 - RNA, 19 nt, Artificial Sequence
  Description of Artificial Sequence: Synthetic oligonucleotide
uccgucgggcucacccuua

SEQ ID NO: 140717 - RNA, 19 nt, Artificial Sequence
  Description of Artificial Sequence: Synthetic oligonucleotide
aaccacuauuccuggcucu

SEQ ID NO: 140718 - RNA, 19 nt, Artificial Sequence
  Description of Artificial Sequence: Synthetic oligonucleotide
ugcaaaccccagacuuugc

SEQ ID NO: 140719 - RNA, 19 nt, Artificial Sequence
  Description of Artificial Sequence: Synthetic oligonucleotide
cacacagccucaggcucca

SEQ ID NO: 140720 - RNA, 19 nt, Artificial Sequence
  Description of Artificial Sequence: Synthetic oligonucleotide
acacagaaaugugaacuug

SEQ ID NO: 140721 - RNA, 19 nt, Artificial Sequence
  Description of Artificial Sequence: Synthetic oligonucleotide
ggccucagacaggcuggcc

SEQ ID NO: 140722 - RNA, 19 nt, Artificial Sequence
  Description of Artificial Sequence: Synthetic oligonucleotide
ccuuccuaggcucuagggg

SEQ ID NO: 140723 - RNA, 19 nt, Artificial Sequence
  Description of Artificial Sequence: Synthetic oligonucleotide
gcuaggggggaguggggag

SEQ ID NO: 140724 - RNA, 19 nt, Artificial Sequence
  Description of Artificial Sequence: Synthetic oligonucleotide
gccaagaggucccauauuc

SEQ ID NO: 140725 - RNA, 19 nt, Artificial Sequence
  Description of Artificial Sequence: Synthetic oligonucleotide
ccugagugcagggguaguc

SEQ ID NO: 140726 - RNA, 19 nt, Artificial Sequence
  Description of Artificial Sequence: Synthetic oligonucleotide
cccucucaccugcuuccuc

SEQ ID NO: 140727 - RNA, 19 nt, Artificial Sequence
  Description of Artificial Sequence: Synthetic oligonucleotide
cagacgacucuggaagcuu

SEQ ID NO: 140728 - RNA, 19 nt, Artificial Sequence
  Description of Artificial Sequence: Synthetic oligonucleotide
ucccucuaccacugggcac

SEQ ID NO: 140729 - RNA, 19 nt, Artificial Sequence
  Description of Artificial Sequence: Synthetic oligonucleotide
cugagacgaagcucccuga

SEQ ID NO: 140730 - RNA, 19 nt, Artificial Sequence
  Description of Artificial Sequence: Synthetic oligonucleotide
acagccgagacuggcagcc

SEQ ID NO: 140731 - RNA, 19 nt, Artificial Sequence
  Description of Artificial Sequence: Synthetic oligonucleotide
ccuccaucugguccguacc

SEQ ID NO: 140732 - RNA, 19 nt, Artificial Sequence
  Description of Artificial Sequence: Synthetic oligonucleotide
ccucgccagaggccccccu

SEQ ID NO: 140733 - RNA, 19 nt, Artificial Sequence
  Description of Artificial Sequence: Synthetic oligonucleotide
uacaucaaccuccuggcga

SEQ ID NO: 140734 - RNA, 19 nt, Artificial Sequence
  Description of Artificial Sequence: Synthetic oligonucleotide
augcccugguggagcagau

SEQ ID NO: 140735 - RNA, 19 nt, Artificial Sequence
  Description of Artificial Sequence: Synthetic oligonucleotide
ugggugcucugggaguccu

SEQ ID NO: 140736 - RNA, 19 nt, Artificial Sequence
  Description of Artificial Sequence: Synthetic oligonucleotide
ugugcuuccugauccaaug

SEQ ID NO: 140737 - RNA, 19 nt, Artificial Sequence
  Description of Artificial Sequence: Synthetic oligonucleotide
ggugccaaacccuucaucu

SEQ ID NO: 140738 - RNA, 19 nt, Artificial Sequence
  Description of Artificial Sequence: Synthetic oligonucleotide
uccccaagaagcgcagcau

SEQ ID NO: 140739 - RNA, 19 nt, Artificial Sequence
  Description of Artificial Sequence: Synthetic oligonucleotide
uaccccugggaccccucgg

SEQ ID NO: 140740 - RNA, 19 nt, Artificial Sequence
  Description of Artificial Sequence: Synthetic oligonucleotide
gccacugcccacucgggga

SEQ ID NO: 140741 - RNA, 19 nt, Artificial Sequence
  Description of Artificial Sequence: Synthetic oligonucleotide
agccuucucuguuucuggg

SEQ ID NO: 140742 - RNA, 19 nt, Artificial Sequence
  Description of Artificial Sequence: Synthetic oligonucleotide
ggccucccccaccauagcu

SEQ ID NO: 140743 - RNA, 19 nt, Artificial Sequence
  Description of Artificial Sequence: Synthetic oligonucleotide
ucugauucccaccccacau

SEQ ID NO: 140744 - RNA, 19 nt, Artificial Sequence
  Description of Artificial Sequence: Synthetic oligonucleotide
uaggaguagccugacugag

SEQ ID NO: 140745 - RNA, 19 nt, Artificial Sequence
  Description of Artificial Sequence: Synthetic oligonucleotide
gggggaaggggugggagag

SEQ ID NO: 140746 - RNA, 19 nt, Artificial Sequence
  Description of Artificial Sequence: Synthetic oligonucleotide
gaagauacagacauggagg

SEQ ID NO: 140747 - RNA, 19 nt, Artificial Sequence
  Description of Artificial Sequence: Synthetic oligonucleotide
gaggggaggcugcucuggc

SEQ ID NO: 140748 - RNA, 19 nt, Artificial Sequence
  Description of Artificial Sequence: Synthetic oligonucleotide
caaagucuucaaggcuuuu

SEQ ID NO: 140749 - RNA, 19 nt, Artificial Sequence
  Description of Artificial Sequence: Synthetic oligonucleotide
uggggguccaggccugggg

SEQ ID NO: 140750 - RNA, 19 nt, Artificial Sequence
  Description of Artificial Sequence: Synthetic oligonucleotide
gucaagaaggaaaaugugu

SEQ ID NO: 140751 - RNA, 19 nt, Artificial Sequence
  Description of Artificial Sequence: Synthetic oligonucleotide
ugugagcaugugugugagu

SEQ ID NO: 140752 - RNA, 19 nt, Artificial Sequence
  Description of Artificial Sequence: Synthetic oligonucleotide
ugaggcgugugugugagcg

SEQ ID NO: 140753 - RNA, 19 nt, Artificial Sequence
  Description of Artificial Sequence: Synthetic oligonucleotide
gugugugugagugaggcgu

SEQ ID NO: 140754 - RNA, 19 nt, Artificial Sequence
  Description of Artificial Sequence: Synthetic oligonucleotide
ugugugugugucuuuccua

SEQ ID NO: 140755 - RNA, 19 nt, Artificial Sequence
  Description of Artificial Sequence: Synthetic oligonucleotide
aggacccaccauacccugu

SEQ ID NO: 140756 - RNA, 19 nt, Artificial Sequence
  Description of Artificial Sequence: Synthetic oligonucleotide
uguauguaugcauguuuuu

SEQ ID NO: 140757 - RNA, 19 nt, Artificial Sequence
  Description of Artificial Sequence: Synthetic oligonucleotide
uguaaaaaggaagaaaaug

SEQ ID NO: 140758 - RNA, 19 nt, Artificial Sequence
  Description of Artificial Sequence: Synthetic oligonucleotide
ggaaaaaaaucugaacaau

SEQ ID NO: 140759 - RNA, 19 nt, Artificial Sequence
  Description of Artificial Sequence: Synthetic oligonucleotide
uaaauguuuuauuugcuuu

SEQ ID NO: 140760 - RNA, 19 nt, Artificial Sequence
  Description of Artificial Sequence: Synthetic oligonucleotide
auaauaccuaccuugcagg

SEQ ID NO: 140761 - RNA, 19 nt, Artificial Sequence
  Description of Artificial Sequence: Synthetic oligonucleotide
gaccacgacaggauuaagu

SEQ ID NO: 140762 - RNA, 19 nt, Artificial Sequence
  Description of Artificial Sequence: Synthetic oligonucleotide
ugaggaaaaacccccauga

SEQ ID NO: 140763 - RNA, 19 nt, Artificial Sequence
  Description of Artificial Sequence: Synthetic oligonucleotide
agaguguuuugccauuguc

SEQ ID NO: 140764 - RNA, 19 nt, Artificial Sequence
  Description of Artificial Sequence: Synthetic oligonucleotide
caagugagccugagggagg

SEQ ID NO: 140765 - RNA, 19 nt, Artificial Sequence
  Description of Artificial Sequence: Synthetic oligonucleotide
gcugaggggggaucaggcu

SEQ ID NO: 140766 - RNA, 19 nt, Artificial Sequence
  Description of Artificial Sequence: Synthetic oligonucleotide
uguaucaugcccccgagga

SEQ ID NO: 140767 - RNA, 19 nt, Artificial Sequence
  Description of Artificial Sequence: Synthetic oligonucleotide
acaaacuuuccaguuuacc

SEQ ID NO: 140768 - RNA, 19 nt, Artificial Sequence
  Description of Artificial Sequence: Synthetic oligonucleotide
ccugcucccucucucuguc

SEQ ID NO: 140769 - RNA, 19 nt, Artificial Sequence
  Description of Artificial Sequence: Synthetic oligonucleotide
cccuaggcugccccaggcc

SEQ ID NO: 140770 - RNA, 19 nt, Artificial Sequence
  Description of Artificial Sequence: Synthetic oligonucleotide
ccugugcagacacaccagg

SEQ ID NO: 140771 - RNA, 19 nt, Artificial Sequence
  Description of Artificial Sequence: Synthetic oligonucleotide
gcccucagccgcagcccau

SEQ ID NO: 140772 - RNA, 19 nt, Artificial Sequence
  Description of Artificial Sequence: Synthetic oligonucleotide
uggaccugcgggugggcca

SEQ ID NO: 140773 - RNA, 19 nt, Artificial Sequence
  Description of Artificial Sequence: Synthetic oligonucleotide
agcggcccccaguggagcc

SEQ ID NO: 140774 - RNA, 19 nt, Artificial Sequence
  Description of Artificial Sequence: Synthetic oligonucleotide
ccccaccagagcccacauu

SEQ ID NO: 140775 - RNA, 19 nt, Artificial Sequence
  Description of Artificial Sequence: Synthetic oligonucleotide
ugcuggcccugcagcgucc

SEQ ID NO: 140776 - RNA, 19 nt, Artificial Sequence
  Description of Artificial Sequence: Synthetic oligonucleotide
cccagcgccugcaccacca

SEQ ID NO: 140777 - RNA, 19 nt, Artificial Sequence
  Description of Artificial Sequence: Synthetic oligonucleotide
accucuuccuagcaggccu

SEQ ID NO: 140778 - RNA, 19 nt, Artificial Sequence
  Description of Artificial Sequence: Synthetic oligonucleotide
ugcagcagcagcgcucggu

SEQ ID NO: 140779 - RNA, 19 nt, Artificial Sequence
  Description of Artificial Sequence: Synthetic oligonucleotide
uggagcccaugaggcucuc

SEQ ID NO: 140780 - RNA, 19 nt, Artificial Sequence
  Description of Artificial Sequence: Synthetic oligonucleotide
ccauggacacgccgaugcc

SEQ ID NO: 140781 - RNA, 19 nt, Artificial Sequence
  Description of Artificial Sequence: Synthetic oligonucleotide
ccgaguugcaggugggacc

SEQ ID NO: 140782 - RNA, 19 nt, Artificial Sequence
  Description of Artificial Sequence: Synthetic oligonucleotide
cccaggaacaagagcugcg

SEQ ID NO: 140783 - RNA, 19 nt, Artificial Sequence
  Description of Artificial Sequence: Synthetic oligonucleotide
ggcagcuucuccacaagga

SEQ ID NO: 140784 - RNA, 19 nt, Artificial Sequence
  Description of Artificial Sequence: Synthetic oligonucleotide
acaagagcaagcgaagugc

SEQ ID NO: 140785 - RNA, 19 nt, Artificial Sequence
  Description of Artificial Sequence: Synthetic oligonucleotide
cuguagccagcagcguggu

SEQ ID NO: 140786 - RNA, 19 nt, Artificial Sequence
  Description of Artificial Sequence: Synthetic oligonucleotide
ucaagcagaagcuagcgga

SEQ ID NO: 140787 - RNA, 19 nt, Artificial Sequence
  Description of Artificial Sequence: Synthetic oligonucleotide
aggugauucugaaaaaaca

SEQ ID NO: 140788 - RNA, 19 nt, Artificial Sequence
  Description of Artificial Sequence: Synthetic oligonucleotide
agcaggcggcccuagaaag

SEQ ID NO: 140789 - RNA, 19 nt, Artificial Sequence
  Description of Artificial Sequence: Synthetic oligonucleotide
gaacaguccaucccaacag

SEQ ID NO: 140790 - RNA, 19 nt, Artificial Sequence
  Description of Artificial Sequence: Synthetic oligonucleotide
gccccggcauucccuacag

SEQ ID NO: 140791 - RNA, 19 nt, Artificial Sequence
  Description of Artificial Sequence: Synthetic oligonucleotide
gaacccuggagccccugga

SEQ ID NO: 140792 - RNA, 19 nt, Artificial Sequence
  Description of Artificial Sequence: Synthetic oligonucleotide
agacggaaggagccacccg

SEQ ID NO: 140793 - RNA, 19 nt, Artificial Sequence
  Description of Artificial Sequence: Synthetic oligonucleotide
gcuccaugcucagcagcuu

SEQ ID NO: 140794 - RNA, 19 nt, Artificial Sequence
  Description of Artificial Sequence: Synthetic oligonucleotide
uuuugccuccuguucccag

SEQ ID NO: 140795 - RNA, 19 nt, Artificial Sequence
  Description of Artificial Sequence: Synthetic oligonucleotide
gccugcccagugacccccc

SEQ ID NO: 140796 - RNA, 19 nt, Artificial Sequence
  Description of Artificial Sequence: Synthetic oligonucleotide
cagagcacuucccucugcg

SEQ ID NO: 140797 - RNA, 19 nt, Artificial Sequence
  Description of Artificial Sequence: Synthetic oligonucleotide
gcaagacagucucugagcc

SEQ ID NO: 140798 - RNA, 19 nt, Artificial Sequence
  Description of Artificial Sequence: Synthetic oligonucleotide
ccaaccugaagcugcgcua

SEQ ID NO: 140799 - RNA, 19 nt, Artificial Sequence
  Description of Artificial Sequence: Synthetic oligonucleotide
auaagcccaagaagucccu

SEQ ID NO: 140800 - RNA, 19 nt, Artificial Sequence
  Description of Artificial Sequence: Synthetic oligonucleotide
uggagcggaggaagaaucc

SEQ ID NO: 140801 - RNA, 19 nt, Artificial Sequence
  Description of Artificial Sequence: Synthetic oligonucleotide
cacugcuccgaaaggagag

SEQ ID NO: 140802 - RNA, 19 nt, Artificial Sequence
  Description of Artificial Sequence: Synthetic oligonucleotide
gugcgccccccagccuccg

SEQ ID NO: 140803 - RNA, 19 nt, Artificial Sequence
  Description of Artificial Sequence: Synthetic oligonucleotide
ggcggcggcccgcagagac

SEQ ID NO: 140804 - RNA, 19 nt, Artificial Sequence
  Description of Artificial Sequence: Synthetic oligonucleotide
cccucggagacuccucccc

SEQ ID NO: 140805 - RNA, 19 nt, Artificial Sequence
  Description of Artificial Sequence: Synthetic oligonucleotide
caaguaguagcagcacgcc

SEQ ID NO: 140806 - RNA, 19 nt, Artificial Sequence
  Description of Artificial Sequence: Synthetic oligonucleotide
ccgcaucagggugcagcuc

SEQ ID NO: 140807 - RNA, 19 nt, Artificial Sequence
  Description of Artificial Sequence: Synthetic oligonucleotide
cccccaaugacagcgagca

SEQ ID NO: 140808 - RNA, 19 nt, Artificial Sequence
  Description of Artificial Sequence: Synthetic oligonucleotide
acggccccaaucccauccu

SEQ ID NO: 140809 - RNA, 19 nt, Artificial Sequence
  Description of Artificial Sequence: Synthetic oligonucleotide
ugggcucggaggcgcucuu

SEQ ID NO: 140810 - RNA, 19 nt, Artificial Sequence
  Description of Artificial Sequence: Synthetic oligonucleotide
ugggccagcggcugcggcu

SEQ ID NO: 140811 - RNA, 19 nt, Artificial Sequence
  Description of Artificial Sequence: Synthetic oligonucleotide
ugcaggagacuucuguggc

SEQ ID NO: 140812 - RNA, 19 nt, Artificial Sequence
  Description of Artificial Sequence: Synthetic oligonucleotide
ccccguucgccuugccgac

SEQ ID NO: 140813 - RNA, 19 nt, Artificial Sequence
  Description of Artificial Sequence: Synthetic oligonucleotide
caguguccuugcugcccgc

SEQ ID NO: 140814 - RNA, 19 nt, Artificial Sequence
  Description of Artificial Sequence: Synthetic oligonucleotide
caaucacucuggggcugcc

SEQ ID NO: 140815 - RNA, 19 nt, Artificial Sequence
  Description of Artificial Sequence: Synthetic oligonucleotide
ccgccccugccagggcuga

SEQ ID NO: 140816 - RNA, 19 nt, Artificial Sequence
  Description of Artificial Sequence: Synthetic oligonucleotide
acagugaccgcaggaccca

SEQ ID NO: 140817 - RNA, 19 nt, Artificial Sequence
  Description of Artificial Sequence: Synthetic oligonucleotide
auccgacucugggcccucg

SEQ ID NO: 140818 - RNA, 19 nt, Artificial Sequence
  Description of Artificial Sequence: Synthetic oligonucleotide
gggggccaauccuggggag

SEQ ID NO: 140819 - RNA, 19 nt, Artificial Sequence
  Description of Artificial Sequence: Synthetic oligonucleotide
gcccccacacuccccucuu

SEQ ID NO: 140820 - RNA, 19 nt, Artificial Sequence
  Description of Artificial Sequence: Synthetic oligonucleotide
uccugccccauggcuugga

SEQ ID NO: 140821 - RNA, 19 nt, Artificial Sequence
  Description of Artificial Sequence: Synthetic oligonucleotide
agcccgaggcugggggcac

SEQ ID NO: 140822 - RNA, 19 nt, Artificial Sequence
  Description of Artificial Sequence: Synthetic oligonucleotide
ccuugcccucucgccugca

SEQ ID NO: 140823 - RNA, 19 nt, Artificial Sequence
  Description of Artificial Sequence: Synthetic oligonucleotide
agcccauucuccuccugga

SEQ ID NO: 140824 - RNA, 19 nt, Artificial Sequence
  Description of Artificial Sequence: Synthetic oligonucleotide
accccucaggcucucaugc

SEQ ID NO: 140825 - RNA, 19 nt, Artificial Sequence
  Description of Artificial Sequence: Synthetic oligonucleotide
ccccgcugcugacugugcc

SEQ ID NO: 140826 - RNA, 19 nt, Artificial Sequence
  Description of Artificial Sequence: Synthetic oligonucleotide
ccgggcuugggcccuugcc

SEQ ID NO: 140827 - RNA, 19 nt, Artificial Sequence
  Description of Artificial Sequence: Synthetic oligonucleotide
ccuuccacuuugcccaguc

SEQ ID NO: 140828 - RNA, 19 nt, Artificial Sequence
  Description of Artificial Sequence: Synthetic oligonucleotide
ccuuaaugaccaccgagcg

SEQ ID NO: 140829 - RNA, 19 nt, Artificial Sequence
  Description of Artificial Sequence: Synthetic oligonucleotide
ggcucucugggucaggccu

SEQ ID NO: 140830 - RNA, 19 nt, Artificial Sequence
  Description of Artificial Sequence: Synthetic oligonucleotide
uccacuggccacugagccg

SEQ ID NO: 140831 - RNA, 19 nt, Artificial Sequence
  Description of Artificial Sequence: Synthetic oligonucleotide
ggacucgcucagagccccu

SEQ ID NO: 140832 - RNA, 19 nt, Artificial Sequence
  Description of Artificial Sequence: Synthetic oligonucleotide
ugccccccagugccaccgc

SEQ ID NO: 140833 - RNA, 19 nt, Artificial Sequence
  Description of Artificial Sequence: Synthetic oligonucleotide
cucccccaccgccgggccc

SEQ ID NO: 140834 - RNA, 19 nt, Artificial Sequence
  Description of Artificial Sequence: Synthetic oligonucleotide
ccaugcagccccgccugga

SEQ ID NO: 140835 - RNA, 19 nt, Artificial Sequence
  Description of Artificial Sequence: Synthetic oligonucleotide
agcagcucaaaacucacgu

SEQ ID NO: 140836 - RNA, 19 nt, Artificial Sequence
  Description of Artificial Sequence: Synthetic oligonucleotide
uccaggugaucaagagguc

SEQ ID NO: 140837 - RNA, 19 nt, Artificial Sequence
  Description of Artificial Sequence: Synthetic oligonucleotide
cagccaagccgagugagaa

SEQ ID NO: 140838 - RNA, 19 nt, Artificial Sequence
  Description of Artificial Sequence: Synthetic oligonucleotide
agccccggcugcggcagau

SEQ ID NO: 140839 - RNA, 19 nt, Artificial Sequence
  Description of Artificial Sequence: Synthetic oligonucleotide
uacccucggcugaagaccu

SEQ ID NO: 140840 - RNA, 19 nt, Artificial Sequence
  Description of Artificial Sequence: Synthetic oligonucleotide
uggagacagauggcggggg

SEQ ID NO: 140841 - RNA, 19 nt, Artificial Sequence
  Description of Artificial Sequence: Synthetic oligonucleotide
gaccgggccagguggugga

SEQ ID NO: 140842 - RNA, 19 nt, Artificial Sequence
  Description of Artificial Sequence: Synthetic oligonucleotide
acgauggccuggagcacag

SEQ ID NO: 140843 - RNA, 19 nt, Artificial Sequence
  Description of Artificial Sequence: Synthetic oligonucleotide
gggagcugggccaugggca

SEQ ID NO: 140844 - RNA, 19 nt, Artificial Sequence
  Description of Artificial Sequence: Synthetic oligonucleotide
agccugaggccagaggccc

SEQ ID NO: 140845 - RNA, 19 nt, Artificial Sequence
  Description of Artificial Sequence: Synthetic oligonucleotide
ccgcuccucuccagcagca

SEQ ID NO: 140846 - RNA, 19 nt, Artificial Sequence
  Description of Artificial Sequence: Synthetic oligonucleotide
acccucagguguugcucug

SEQ ID NO: 140847 - RNA, 19 nt, Artificial Sequence
  Description of Artificial Sequence: Synthetic oligonucleotide
gggaacagcagcgacuggc

SEQ ID NO: 140848 - RNA, 19 nt, Artificial Sequence
  Description of Artificial Sequence: Synthetic oligonucleotide
cugggcggcucccccgggg

SEQ ID NO: 140849 - RNA, 19 nt, Artificial Sequence
  Description of Artificial Sequence: Synthetic oligonucleotide
gcagcaccggggacacugu

SEQ ID NO: 140850 - RNA, 19 nt, Artificial Sequence
  Description of Artificial Sequence: Synthetic oligonucleotide
ugcugcuuccucuggccca

SEQ ID NO: 140851 - RNA, 19 nt, Artificial Sequence
  Description of Artificial Sequence: Synthetic oligonucleotide
agggugggcaccggccucu

SEQ ID NO: 140852 - RNA, 19 nt, Artificial Sequence
  Description of Artificial Sequence: Synthetic oligonucleotide
ugucccgggcucagucuuc

SEQ ID NO: 140853 - RNA, 19 nt, Artificial Sequence
  Description of Artificial Sequence: Synthetic oligonucleotide
ccccagccgcaccugccuc

SEQ ID NO: 140854 - RNA, 19 nt, Artificial Sequence
  Description of Artificial Sequence: Synthetic oligonucleotide
cacugucagccccagagcc

SEQ ID NO: 140855 - RNA, 19 nt, Artificial Sequence
  Description of Artificial Sequence: Synthetic oligonucleotide
cugccagccaggcccgagu

SEQ ID NO: 140856 - RNA, 19 nt, Artificial Sequence
  Description of Artificial Sequence: Synthetic oligonucleotide
uccucuccagcucagagac

SEQ ID NO: 140857 - RNA, 19 nt, Artificial Sequence
  Description of Artificial Sequence: Synthetic oligonucleotide
ccccugccaggacccugcc

SEQ ID NO: 140858 - RNA, 19 nt, Artificial Sequence
  Description of Artificial Sequence: Synthetic oligonucleotide
ccuucaccacagggcugau

SEQ ID NO: 140859 - RNA, 19 nt, Artificial Sequence
  Description of Artificial Sequence: Synthetic oligonucleotide
ucuaugacucggucaugcu

SEQ ID NO: 140860 - RNA, 19 nt, Artificial Sequence
  Description of Artificial Sequence: Synthetic oligonucleotide
ugaagcaccagugcuccug

SEQ ID NO: 140861 - RNA, 19 nt, Artificial Sequence
  Description of Artificial Sequence: Synthetic oligonucleotide
gcggugacaacagcaggca

SEQ ID NO: 140862 - RNA, 19 nt, Artificial Sequence
  Description of Artificial Sequence: Synthetic oligonucleotide
acccggagcacgccggccg

SEQ ID NO: 140863 - RNA, 19 nt, Artificial Sequence
  Description of Artificial Sequence: Synthetic oligonucleotide
gcauccagagcaucugguc

SEQ ID NO: 140864 - RNA, 19 nt, Artificial Sequence
  Description of Artificial Sequence: Synthetic oligonucleotide
cccggcugcaggagcgggg

SEQ ID NO: 140865 - RNA, 19 nt, Artificial Sequence
  Description of Artificial Sequence: Synthetic oligonucleotide
ggcuccggagccaguguga

SEQ ID NO: 140866 - RNA, 19 nt, Artificial Sequence
  Description of Artificial Sequence: Synthetic oligonucleotide
agugucuccgaggccggaa

SEQ ID NO: 140867 - RNA, 19 nt, Artificial Sequence
  Description of Artificial Sequence: Synthetic oligonucleotide
aggccucccuggaagagcu

SEQ ID NO: 140868 - RNA, 19 nt, Artificial Sequence
  Description of Artificial Sequence: Synthetic oligonucleotide
ugcagucgguccacucuga

SEQ ID NO: 140869 - RNA, 19 nt, Artificial Sequence
  Description of Artificial Sequence: Synthetic oligonucleotide
agcggcacgugcuccucua

SEQ ID NO: 140870 - RNA, 19 nt, Artificial Sequence
  Description of Artificial Sequence: Synthetic oligonucleotide
acggcaccaacccgcucag

SEQ ID NO: 140871 - RNA, 19 nt, Artificial Sequence
  Description of Artificial Sequence: Synthetic oligonucleotide
gccgccucaaacuggacaa

SEQ ID NO: 140872 - RNA, 19 nt, Artificial Sequence
  Description of Artificial Sequence: Synthetic oligonucleotide
acgggaagcuggcagggcu

SEQ ID NO: 140873 - RNA, 19 nt, Artificial Sequence
  Description of Artificial Sequence: Synthetic oligonucleotide
uccuggcacagcggauguu

SEQ ID NO: 140874 - RNA, 19 nt, Artificial Sequence
  Description of Artificial Sequence: Synthetic oligonucleotide
uugugaugcugcccugugg

SEQ ID NO: 140875 - RNA, 19 nt, Artificial Sequence
  Description of Artificial Sequence: Synthetic oligonucleotide
gugggguugggguggacac

SEQ ID NO: 140876 - RNA, 19 nt, Artificial Sequence
  Description of Artificial Sequence: Synthetic oligonucleotide
cugacaccaucuggaauga

SEQ ID NO: 140877 - RNA, 19 nt, Artificial Sequence
  Description of Artificial Sequence: Synthetic oligonucleotide
agcuucauuccuccaaugc

SEQ ID NO: 140878 - RNA, 19 nt, Artificial Sequence
  Description of Artificial Sequence: Synthetic oligonucleotide
cagcccgcugggccgcugg

SEQ ID NO: 140879 - RNA, 19 nt, Artificial Sequence
  Description of Artificial Sequence: Synthetic oligonucleotide
gcagugucacugaccucgc

SEQ ID NO: 140880 - RNA, 19 nt, Artificial Sequence
  Description of Artificial Sequence: Synthetic oligonucleotide
ccuucaaaguggcuucucg

SEQ ID NO: 140881 - RNA, 19 nt, Artificial Sequence
  Description of Artificial Sequence: Synthetic oligonucleotide
gugagcuaaagaaugguuu

SEQ ID NO: 140882 - RNA, 19 nt, Artificial Sequence
  Description of Artificial Sequence: Synthetic oligonucleotide
ucgcuguggugcggccccc

SEQ ID NO: 140883 - RNA, 19 nt, Artificial Sequence
  Description of Artificial Sequence: Synthetic oligonucleotide
caggacaccaugcagauca

SEQ ID NO: 140884 - RNA, 19 nt, Artificial Sequence
  Description of Artificial Sequence: Synthetic oligonucleotide
auucaacagccaugggcuu

SEQ ID NO: 140885 - RNA, 19 nt, Artificial Sequence
  Description of Artificial Sequence: Synthetic oligonucleotide
ucugcuucuucaacucagu

SEQ ID NO: 140886 - RNA, 19 nt, Artificial Sequence
  Description of Artificial Sequence: Synthetic oligonucleotide
uggccaucgccugccggca

SEQ ID NO: 140887 - RNA, 19 nt, Artificial Sequence
  Description of Artificial Sequence: Synthetic oligonucleotide
agcugcaacagcagagcaa

SEQ ID NO: 140888 - RNA, 19 nt, Artificial Sequence
  Description of Artificial Sequence: Synthetic oligonucleotide
aggccagcaagauccucau

SEQ ID NO: 140889 - RNA, 19 nt, Artificial Sequence
  Description of Artificial Sequence: Synthetic oligonucleotide
uuguagacugggacgugca

SEQ ID NO: 140890 - RNA, 19 nt, Artificial Sequence
  Description of Artificial Sequence: Synthetic oligonucleotide
accauggcaacggcaccca

SEQ ID NO: 140891 - RNA, 19 nt, Artificial Sequence
  Description of Artificial Sequence: Synthetic oligonucleotide
agcaaaccuucuaccaaga

SEQ ID NO: 140892 - RNA, 19 nt, Artificial Sequence
  Description of Artificial Sequence: Synthetic oligonucleotide
accccagugugcucuacau

SEQ ID NO: 140893 - RNA, 19 nt, Artificial Sequence
  Description of Artificial Sequence: Synthetic oligonucleotide
ucucccugcaucgccauga

SEQ ID NO: 140894 - RNA, 19 nt, Artificial Sequence
  Description of Artificial Sequence: Synthetic oligonucleotide
acgacggcaacuucuuccc

SEQ ID NO: 140895 - RNA, 19 nt, Artificial Sequence
  Description of Artificial Sequence: Synthetic oligonucleotide
cggggaguggggcugugga

SEQ ID NO: 140896 - RNA, 19 nt, Artificial Sequence
  Description of Artificial Sequence: Synthetic oligonucleotide
augagguaggggcuggcag

SEQ ID NO: 140897 - RNA, 19 nt, Artificial Sequence
  Description of Artificial Sequence: Synthetic oligonucleotide
gcggugagggcuucaaugu

SEQ ID NO: 140898 - RNA, 19 nt, Artificial Sequence
  Description of Artificial Sequence: Synthetic oligonucleotide
ucaauguggccugggcugg

SEQ ID NO: 140899 - RNA, 19 nt, Artificial Sequence
  Description of Artificial Sequence: Synthetic oligonucleotide
gaggucuggacccccccau

SEQ ID NO: 140900 - RNA, 19 nt, Artificial Sequence
  Description of Artificial Sequence: Synthetic oligonucleotide
ugggggauccugaguaccu

SEQ ID NO: 140901 - RNA, 19 nt, Artificial Sequence
  Description of Artificial Sequence: Synthetic oligonucleotide
uggcugcuuucaggauagu

SEQ ID NO: 140902 - RNA, 19 nt, Artificial Sequence
  Description of Artificial Sequence: Synthetic oligonucleotide
ucgugaugcccaucgcccg

SEQ ID NO: 140903 - RNA, 19 nt, Artificial Sequence
  Description of Artificial Sequence: Synthetic oligonucleotide
gagaguucucuccagaccu

SEQ ID NO: 140904 - RNA, 19 nt, Artificial Sequence
  Description of Artificial Sequence: Synthetic oligonucleotide
uaguccuggugucugcugg

SEQ ID NO: 140905 - RNA, 19 nt, Artificial Sequence
  Description of Artificial Sequence: Synthetic oligonucleotide
gauuugaugcugcugaggg

SEQ ID NO: 140906 - RNA, 19 nt, Artificial Sequence
  Description of Artificial Sequence: Synthetic oligonucleotide
gucacccggccccacuggg

SEQ ID NO: 140907 - RNA, 19 nt, Artificial Sequence
  Description of Artificial Sequence: Synthetic oligonucleotide
guggcuaccauguuucugc

SEQ ID NO: 140908 - RNA, 19 nt, Artificial Sequence
  Description of Artificial Sequence: Synthetic oligonucleotide
ccaaauguuuuggauacau

SEQ ID NO: 140909 - RNA, 19 nt, Artificial Sequence
  Description of Artificial Sequence: Synthetic oligonucleotide
ugacgcagcaacugaugaa

SEQ ID NO: 140910 - RNA, 19 nt, Artificial Sequence
  Description of Artificial Sequence: Synthetic oligonucleotide
accuggcaggaggcgcagu

SEQ ID NO: 140911 - RNA, 19 nt, Artificial Sequence
  Description of Artificial Sequence: Synthetic oligonucleotide
uggugcuggccuuggaggg

SEQ ID NO: 140912 - RNA, 19 nt, Artificial Sequence
  Description of Artificial Sequence: Synthetic oligonucleotide
guggccaugaccucacagc

SEQ ID NO: 140913 - RNA, 19 nt, Artificial Sequence
  Description of Artificial Sequence: Synthetic oligonucleotide
ccaucugugacgccucuga

SEQ ID NO: 140914 - RNA, 19 nt, Artificial Sequence
  Description of Artificial Sequence: Synthetic oligonucleotide
aggccuguguggcugcucu

SEQ ID NO: 140915 - RNA, 19 nt, Artificial Sequence
  Description of Artificial Sequence: Synthetic oligonucleotide
uucuggguaacagggugga

SEQ ID NO: 140916 - RNA, 19 nt, Artificial Sequence
  Description of Artificial Sequence: Synthetic oligonucleotide
auccccuuucagaagaagg

SEQ ID NO: 140917 - RNA, 19 nt, Artificial Sequence
  Description of Artificial Sequence: Synthetic oligonucleotide
gcuggaaacagaaacccaa

SEQ ID NO: 140918 - RNA, 19 nt, Artificial Sequence
  Description of Artificial Sequence: Synthetic oligonucleotide
accucaaugccauccgcuc

SEQ ID NO: 140919 - RNA, 19 nt, Artificial Sequence
  Description of Artificial Sequence: Synthetic oligonucleotide
cucuggaggccgugauccg

SEQ ID NO: 140920 - RNA, 19 nt, Artificial Sequence
  Description of Artificial Sequence: Synthetic oligonucleotide
gggugcacaguaaauacug

SEQ ID NO: 140921 - RNA, 19 nt, Artificial Sequence
  Description of Artificial Sequence: Synthetic oligonucleotide
ggggcugcaugcagcgccu

SEQ ID NO: 140922 - RNA, 19 nt, Artificial Sequence
  Description of Artificial Sequence: Synthetic oligonucleotide
uggccuccuguccagacuc

SEQ ID NO: 140923 - RNA, 19 nt, Artificial Sequence
  Description of Artificial Sequence: Synthetic oligonucleotide
ccugggugccuagagugcc

SEQ ID NO: 140924 - RNA, 19 nt, Artificial Sequence
  Description of Artificial Sequence: Synthetic oligonucleotide
caggggcugacaaagaaga

SEQ ID NO: 140925 - RNA, 19 nt, Artificial Sequence
  Description of Artificial Sequence: Synthetic oligonucleotide
aaguggaggcagugaccgc

SEQ ID NO: 140926 - RNA, 19 nt, Artificial Sequence
  Description of Artificial Sequence: Synthetic oligonucleotide
cacuggcgucccucucugu

SEQ ID NO: 140927 - RNA, 19 nt, Artificial Sequence
  Description of Artificial Sequence: Synthetic oligonucleotide
ugggcauccuggcugaaga

SEQ ID NO: 140928 - RNA, 19 nt, Artificial Sequence
  Description of Artificial Sequence: Synthetic oligonucleotide
auaggcccucggagcagcu

SEQ ID NO: 140929 - RNA, 19 nt, Artificial Sequence
  Description of Artificial Sequence: Synthetic oligonucleotide
ugguggaggaggaagaacc

SEQ ID NO: 140930 - RNA, 19 nt, Artificial Sequence
  Description of Artificial Sequence: Synthetic oligonucleotide
cuaugaaucucuaaggcuc

SEQ ID NO: 140931 - RNA, 19 nt, Artificial Sequence
  Description of Artificial Sequence: Synthetic oligonucleotide
cuggaaccaucugcccgcc

SEQ ID NO: 140932 - RNA, 19 nt, Artificial Sequence
  Description of Artificial Sequence: Synthetic oligonucleotide
ccaccaugcccuugggacc

SEQ ID NO: 140933 - RNA, 19 nt, Artificial Sequence
  Description of Artificial Sequence: Synthetic oligonucleotide
cugguucucuucuaacccc

SEQ ID NO: 140934 - RNA, 19 nt, Artificial Sequence
  Description of Artificial Sequence: Synthetic oligonucleotide
cuggcaauagcccccauuc

SEQ ID NO: 140935 - RNA, 19 nt, Artificial Sequence
  Description of Artificial Sequence: Synthetic oligonucleotide
ccugggucuuuagagaucc

SEQ ID NO: 140936 - RNA, 19 nt, Artificial Sequence
  Description of Artificial Sequence: Synthetic oligonucleotide
cugugggcaaguaguugga

SEQ ID NO: 140937 - RNA, 19 nt, Artificial Sequence
  Description of Artificial Sequence: Synthetic oligonucleotide
aaccagagaacagccugcc

SEQ ID NO: 140938 - RNA, 19 nt, Artificial Sequence
  Description of Artificial Sequence: Synthetic oligonucleotide
cugcuuugacaguuauccc

SEQ ID NO: 140939 - RNA, 19 nt, Artificial Sequence
  Description of Artificial Sequence: Synthetic oligonucleotide
cagggagcgugagaaaauc

SEQ ID NO: 140940 - RNA, 19 nt, Artificial Sequence
  Description of Artificial Sequence: Synthetic oligonucleotide
cccugggucuagaauggga

SEQ ID NO: 140941 - RNA, 19 nt, Artificial Sequence
  Description of Artificial Sequence: Synthetic oligonucleotide
aacuggagaggacccugag

SEQ ID NO: 140942 - RNA, 19 nt, Artificial Sequence
  Description of Artificial Sequence: Synthetic oligonucleotide
gaggagacgggcugggcgg

SEQ ID NO: 140943 - RNA, 19 nt, Artificial Sequence
  Description of Artificial Sequence: Synthetic oligonucleotide
gcgacccccacagggcucu

SEQ ID NO: 140944 - RNA, 19 nt, Artificial Sequence
  Description of Artificial Sequence: Synthetic oligonucleotide
ucgagaacagauucucccc

SEQ ID NO: 140945 - RNA, 19 nt, Artificial Sequence
  Description of Artificial Sequence: Synthetic oligonucleotide
cuccaguaugggcccuggc

SEQ ID NO: 140946 - RNA, 19 nt, Artificial Sequence
  Description of Artificial Sequence: Synthetic oligonucleotide
cuguggcccccauuccuca

SEQ ID NO: 140947 - RNA, 19 nt, Artificial Sequence
  Description of Artificial Sequence: Synthetic oligonucleotide
aggacugcacagaggagga

SEQ ID NO: 140948 - RNA, 19 nt, Artificial Sequence
  Description of Artificial Sequence: Synthetic oligonucleotide
acuggcuccggcuccgucg

SEQ ID NO: 140949 - RNA, 19 nt, Artificial Sequence
  Description of Artificial Sequence: Synthetic oligonucleotide
gggcucacccuuaaccacu

SEQ ID NO: 140950 - RNA, 19 nt, Artificial Sequence
  Description of Artificial Sequence: Synthetic oligonucleotide
uauuccuggcucugcaaac

SEQ ID NO: 140951 - RNA, 19 nt, Artificial Sequence
  Description of Artificial Sequence: Synthetic oligonucleotide
ccccagacuuugcacacag

SEQ ID NO: 140952 - RNA, 19 nt, Artificial Sequence
  Description of Artificial Sequence: Synthetic oligonucleotide
gccucaggcuccacacaga

SEQ ID NO: 140953 - RNA, 19 nt, Artificial Sequence
  Description of Artificial Sequence: Synthetic oligonucleotide
aaaugugaacuuggccuca

SEQ ID NO: 140954 - RNA, 19 nt, Artificial Sequence
  Description of Artificial Sequence: Synthetic oligonucleotide
agacaggcuggcccuuccu

SEQ ID NO: 140955 - RNA, 19 nt, Artificial Sequence
  Description of Artificial Sequence: Synthetic oligonucleotide
uaggcucuaggggcuaggg

SEQ ID NO: 140956 - RNA, 19 nt, Artificial Sequence
  Description of Artificial Sequence: Synthetic oligonucleotide
ggggaguggggagccaaga

SEQ ID NO: 140957 - RNA, 19 nt, Artificial Sequence
  Description of Artificial Sequence: Synthetic oligonucleotide
aggucccauauuccugagu

SEQ ID NO: 140958 - RNA, 19 nt, Artificial Sequence
  Description of Artificial Sequence: Synthetic oligonucleotide
ugcagggguagucccucuc

SEQ ID NO: 140959 - RNA, 19 nt, Artificial Sequence
  Description of Artificial Sequence: Synthetic oligonucleotide
caccugcuuccucagacga

SEQ ID NO: 140960 - RNA, 19 nt, Artificial Sequence
  Description of Artificial Sequence: Synthetic oligonucleotide
acucuggaagcuucccucu

SEQ ID NO: 140961 - RNA, 19 nt, Artificial Sequence
  Description of Artificial Sequence: Synthetic oligonucleotide
uaccacugggcacugagac

SEQ ID NO: 140962 - RNA, 19 nt, Artificial Sequence
  Description of Artificial Sequence: Synthetic oligonucleotide
cgaagcucccugacagccg

SEQ ID NO: 140963 - RNA, 19 nt, Artificial Sequence
  Description of Artificial Sequence: Synthetic oligonucleotide
gagacuggcagcccuccau

SEQ ID NO: 140964 - RNA, 19 nt, Artificial Sequence
  Description of Artificial Sequence: Synthetic oligonucleotide
ucugguccguacccucgcc

SEQ ID NO: 140965 - RNA, 19 nt, Artificial Sequence
  Description of Artificial Sequence: Synthetic oligonucleotide
cagaggccccccuacauca

SEQ ID NO: 140966 - RNA, 19 nt, Artificial Sequence
  Description of Artificial Sequence: Synthetic oligonucleotide
aaccuccuggcgaugcccu

SEQ ID NO: 140967 - RNA, 19 nt, Artificial Sequence
  Description of Artificial Sequence: Synthetic oligonucleotide
ugguggagcagaugggugc

SEQ ID NO: 140968 - RNA, 19 nt, Artificial Sequence
  Description of Artificial Sequence: Synthetic oligonucleotide
cucugggaguccugugcuu

SEQ ID NO: 140969 - RNA, 19 nt, Artificial Sequence
  Description of Artificial Sequence: Synthetic oligonucleotide
uccugauccaauggugcca

SEQ ID NO: 140970 - RNA, 19 nt, Artificial Sequence
  Description of Artificial Sequence: Synthetic oligonucleotide
aaacccuucaucuccccaa

SEQ ID NO: 140971 - RNA, 19 nt, Artificial Sequence
  Description of Artificial Sequence: Synthetic oligonucleotide
agaagcgcagcauaccccu

SEQ ID NO: 140972 - RNA, 19 nt, Artificial Sequence
  Description of Artificial Sequence: Synthetic oligonucleotide
ugggaccccucggccacug

SEQ ID NO: 140973 - RNA, 19 nt, Artificial Sequence
  Description of Artificial Sequence: Synthetic oligonucleotide
gcccacucggggagccuuc

SEQ ID NO: 140974 - RNA, 19 nt, Artificial Sequence
  Description of Artificial Sequence: Synthetic oligonucleotide
cucuguuucuggggccucc

SEQ ID NO: 140975 - RNA, 19 nt, Artificial Sequence
  Description of Artificial Sequence: Synthetic oligonucleotide
ccccaccauagcucugauu

SEQ ID NO: 140976 - RNA, 19 nt, Artificial Sequence
  Description of Artificial Sequence: Synthetic oligonucleotide
ucccaccccacauaggagu

SEQ ID NO: 140977 - RNA, 19 nt, Artificial Sequence
  Description of Artificial Sequence: Synthetic oligonucleotide
uagccugacugagggggaa

SEQ ID NO: 140978 - RNA, 19 nt, Artificial Sequence
  Description of Artificial Sequence: Synthetic oligonucleotide
aggggugggagagaagaua

SEQ ID NO: 140979 - RNA, 19 nt, Artificial Sequence
  Description of Artificial Sequence: Synthetic oligonucleotide
acagacauggaggagggga

SEQ ID NO: 140980 - RNA, 19 nt, Artificial Sequence
  Description of Artificial Sequence: Synthetic oligonucleotide
aggcugcucuggcaaaguc

SEQ ID NO: 140981 - RNA, 19 nt, Artificial Sequence
  Description of Artificial Sequence: Synthetic oligonucleotide
cuucaaggcuuuugggggu

SEQ ID NO: 140982 - RNA, 19 nt, Artificial Sequence
  Description of Artificial Sequence: Synthetic oligonucleotide
uccaggccuggggucaaga

SEQ ID NO: 140983 - RNA, 19 nt, Artificial Sequence
  Description of Artificial Sequence: Synthetic oligonucleotide
aaggaaaaugugugugagc

SEQ ID NO: 140984 - RNA, 19 nt, Artificial Sequence
  Description of Artificial Sequence: Synthetic oligonucleotide
caugugugugagugaggcg

SEQ ID NO: 140985 - RNA, 19 nt, Artificial Sequence
  Description of Artificial Sequence: Synthetic oligonucleotide
gugugugugagcgugugug

SEQ ID NO: 140986 - RNA, 19 nt, Artificial Sequence
  Description of Artificial Sequence: Synthetic oligonucleotide
gugagugaggcgugugugu

SEQ ID NO: 140987 - RNA, 19 nt, Artificial Sequence
  Description of Artificial Sequence: Synthetic oligonucleotide
ugugucuuuccuaggaccc

SEQ ID NO: 140988 - RNA, 19 nt, Artificial Sequence
  Description of Artificial Sequence: Synthetic oligonucleotide
caccauacccuguguaugu

SEQ ID NO: 140989 - RNA, 19 nt, Artificial Sequence
  Description of Artificial Sequence: Synthetic oligonucleotide
uaugcauguuuuuguaaaa

SEQ ID NO: 140990 - RNA, 19 nt, Artificial Sequence
  Description of Artificial Sequence: Synthetic oligonucleotide
aaggaagaaaauggaaaaa

SEQ ID NO: 140991 - RNA, 19 nt, Artificial Sequence
  Description of Artificial Sequence: Synthetic oligonucleotide
aaaucugaacaauaaaugu

SEQ ID NO: 140992 - RNA, 19 nt, Artificial Sequence
  Description of Artificial Sequence: Synthetic oligonucleotide
uuuuauuugcuuuaaaaaa

SEQ ID NO: 140993 - RNA, 19 nt, Artificial Sequence
  Description of Artificial Sequence: Synthetic oligonucleotide
ugggcucggaggcugacag

SEQ ID NO: 140994 - RNA, 19 nt, Artificial Sequence
  Description of Artificial Sequence: Synthetic oligonucleotide
gugaccgcaggacccaucc

SEQ ID NO: 140995 - RNA, 19 nt, Artificial Sequence
  Description of Artificial Sequence: Synthetic oligonucleotide
cgacucugggcccucgggg

SEQ ID NO: 140996 - RNA, 19 nt, Artificial Sequence
  Description of Artificial Sequence: Synthetic oligonucleotide
ggccaauccuggggagccc

SEQ ID NO: 140997 - RNA, 19 nt, Artificial Sequence
  Description of Artificial Sequence: Synthetic oligonucleotide
cccacacuccccucuuccu

SEQ ID NO: 140998 - RNA, 19 nt, Artificial Sequence
  Description of Artificial Sequence: Synthetic oligonucleotide
ugccccauggcuuggagcc

SEQ ID NO: 140999 - RNA, 19 nt, Artificial Sequence
  Description of Artificial Sequence: Synthetic oligonucleotide
ccgaggcugggggcaccuu

SEQ ID NO: 141000 - RNA, 19 nt, Artificial Sequence
  Description of Artificial Sequence: Synthetic oligonucleotide
ugcccucucgccugcagcc

SEQ ID NO: 141001 - RNA, 19 nt, Artificial Sequence
  Description of Artificial Sequence: Synthetic oligonucleotide
ccauucuccuccuggaccc

SEQ ID NO: 141002 - RNA, 19 nt, Artificial Sequence
  Description of Artificial Sequence: Synthetic oligonucleotide
ccucaggcucucaugcccc

SEQ ID NO: 141003 - RNA, 19 nt, Artificial Sequence
  Description of Artificial Sequence: Synthetic oligonucleotide
cgcugcugacugugcccgg

SEQ ID NO: 141004 - RNA, 19 nt, Artificial Sequence
  Description of Artificial Sequence: Synthetic oligonucleotide
ggcuugggcccuugcccuu

SEQ ID NO: 141005 - RNA, 19 nt, Artificial Sequence
  Description of Artificial Sequence: Synthetic oligonucleotide
uccacuuugcccaguccuu

SEQ ID NO: 141006 - RNA, 19 nt, Artificial Sequence
  Description of Artificial Sequence: Synthetic oligonucleotide
uaaugaccaccgagcggcu

SEQ ID NO: 141007 - RNA, 19 nt, Artificial Sequence
  Description of Artificial Sequence: Synthetic oligonucleotide
ucucugggucaggccucca

SEQ ID NO: 141008 - RNA, 19 nt, Artificial Sequence
  Description of Artificial Sequence: Synthetic oligonucleotide
acuggccacugagccggac

SEQ ID NO: 141009 - RNA, 19 nt, Artificial Sequence
  Description of Artificial Sequence: Synthetic oligonucleotide
cucgcucagagccccugcc

SEQ ID NO: 141010 - RNA, 19 nt, Artificial Sequence
  Description of Artificial Sequence: Synthetic oligonucleotide
cccccagugccaccgcucc

SEQ ID NO: 141011 - RNA, 19 nt, Artificial Sequence
  Description of Artificial Sequence: Synthetic oligonucleotide
ccccaccgccgggccccau

SEQ ID NO: 141012 - RNA, 19 nt, Artificial Sequence
  Description of Artificial Sequence: Synthetic oligonucleotide
ugcagccccgccuggagca

SEQ ID NO: 141013 - RNA, 19 nt, Artificial Sequence
  Description of Artificial Sequence: Synthetic oligonucleotide
agcucaaaacucacgucca

SEQ ID NO: 141014 - RNA, 19 nt, Artificial Sequence
  Description of Artificial Sequence: Synthetic oligonucleotide
aggugaucaagaggucagc

SEQ ID NO: 141015 - RNA, 19 nt, Artificial Sequence
  Description of Artificial Sequence: Synthetic oligonucleotide
ccaagccgagugagaagcc

SEQ ID NO: 141016 - RNA, 19 nt, Artificial Sequence
  Description of Artificial Sequence: Synthetic oligonucleotide
cccggcugcggcagauacc

SEQ ID NO: 141017 - RNA, 19 nt, Artificial Sequence
  Description of Artificial Sequence: Synthetic oligonucleotide
ccucggcugaagaccugga

SEQ ID NO: 141018 - RNA, 19 nt, Artificial Sequence
  Description of Artificial Sequence: Synthetic oligonucleotide
agacagauggcgggggacc

SEQ ID NO: 141019 - RNA, 19 nt, Artificial Sequence
  Description of Artificial Sequence: Synthetic oligonucleotide
cgggccaggugguggacga

SEQ ID NO: 141020 - RNA, 19 nt, Artificial Sequence
  Description of Artificial Sequence: Synthetic oligonucleotide
auggccuggagcacaggga

SEQ ID NO: 141021 - RNA, 19 nt, Artificial Sequence
  Description of Artificial Sequence: Synthetic oligonucleotide
agcugggccaugggcagcc

SEQ ID NO: 141022 - RNA, 19 nt, Artificial Sequence
  Description of Artificial Sequence: Synthetic oligonucleotide
cugaggccagaggccccgc

SEQ ID NO: 141023 - RNA, 19 nt, Artificial Sequence
  Description of Artificial Sequence: Synthetic oligonucleotide
cuccucuccagcagcaccc

SEQ ID NO: 141024 - RNA, 19 nt, Artificial Sequence
  Description of Artificial Sequence: Synthetic oligonucleotide
cucagguguugcucuggga

SEQ ID NO: 141025 - RNA, 19 nt, Artificial Sequence
  Description of Artificial Sequence: Synthetic oligonucleotide
aacagcagcgacuggcugg

SEQ ID NO: 141026 - RNA, 19 nt, Artificial Sequence
  Description of Artificial Sequence: Synthetic oligonucleotide
ggcggcucccccggggcag

SEQ ID NO: 141027 - RNA, 19 nt, Artificial Sequence
  Description of Artificial Sequence: Synthetic oligonucleotide
gcaccggggacacugugcu

SEQ ID NO: 141028 - RNA, 19 nt, Artificial Sequence
  Description of Artificial Sequence: Synthetic oligonucleotide
ugcuuccucuggcccaggg

SEQ ID NO: 141029 - RNA, 19 nt, Artificial Sequence
  Description of Artificial Sequence: Synthetic oligonucleotide
gugggcaccggccucuguc

SEQ ID NO: 141030 - RNA, 19 nt, Artificial Sequence
  Description of Artificial Sequence: Synthetic oligonucleotide
cccgggcucagucuucccc

SEQ ID NO: 141031 - RNA, 19 nt, Artificial Sequence
  Description of Artificial Sequence: Synthetic oligonucleotide
cagccgcaccugccucacu

SEQ ID NO: 141032 - RNA, 19 nt, Artificial Sequence
  Description of Artificial Sequence: Synthetic oligonucleotide
ugucagccccagagccugc

SEQ ID NO: 141033 - RNA, 19 nt, Artificial Sequence
  Description of Artificial Sequence: Synthetic oligonucleotide
ccagccaggcccgaguccu

SEQ ID NO: 141034 - RNA, 19 nt, Artificial Sequence
  Description of Artificial Sequence: Synthetic oligonucleotide
ucuccagcucagagacccc

SEQ ID NO: 141035 - RNA, 19 nt, Artificial Sequence
  Description of Artificial Sequence: Synthetic oligonucleotide
cugccaggacccugcccuu

SEQ ID NO: 141036 - RNA, 19 nt, Artificial Sequence
  Description of Artificial Sequence: Synthetic oligonucleotide
ucaccacagggcugaucua

SEQ ID NO: 141037 - RNA, 19 nt, Artificial Sequence
  Description of Artificial Sequence: Synthetic oligonucleotide
augacucggucaugcugaa

SEQ ID NO: 141038 - RNA, 19 nt, Artificial Sequence
  Description of Artificial Sequence: Synthetic oligonucleotide
agcaccagugcuccugcgg

SEQ ID NO: 141039 - RNA, 19 nt, Artificial Sequence
  Description of Artificial Sequence: Synthetic oligonucleotide
gugacaacagcaggcaccc

SEQ ID NO: 141040 - RNA, 19 nt, Artificial Sequence
  Description of Artificial Sequence: Synthetic oligonucleotide
cggagcacgccggccgcau

SEQ ID NO: 141041 - RNA, 19 nt, Artificial Sequence
  Description of Artificial Sequence: Synthetic oligonucleotide
ggcugcaggagcgggggcu

SEQ ID NO: 141042 - RNA, 19 nt, Artificial Sequence
  Description of Artificial Sequence: Synthetic oligonucleotide
uccggagccagugugagug

SEQ ID NO: 141043 - RNA, 19 nt, Artificial Sequence
  Description of Artificial Sequence: Synthetic oligonucleotide
gucuccgaggccggaaggc

SEQ ID NO: 141044 - RNA, 19 nt, Artificial Sequence
  Description of Artificial Sequence: Synthetic oligonucleotide
ccucccuggaagagcugca

SEQ ID NO: 141045 - RNA, 19 nt, Artificial Sequence
  Description of Artificial Sequence: Synthetic oligonucleotide
agucgguccacucugagcg

SEQ ID NO: 141046 - RNA, 19 nt, Artificial Sequence
  Description of Artificial Sequence: Synthetic oligonucleotide
ggcacgugcuccucuacgg

SEQ ID NO: 141047 - RNA, 19 nt, Artificial Sequence
  Description of Artificial Sequence: Synthetic oligonucleotide
gcaccaacccgcucagccg

SEQ ID NO: 141048 - RNA, 19 nt, Artificial Sequence
  Description of Artificial Sequence: Synthetic oligonucleotide
gccucaaacuggacaacgg

SEQ ID NO: 141049 - RNA, 19 nt, Artificial Sequence
  Description of Artificial Sequence: Synthetic oligonucleotide
ggaagcuggcagggcuccu

SEQ ID NO: 141050 - RNA, 19 nt, Artificial Sequence
  Description of Artificial Sequence: Synthetic oligonucleotide
uggcacagcggauguuugu

SEQ ID NO: 141051 - RNA, 19 nt, Artificial Sequence
  Description of Artificial Sequence: Synthetic oligonucleotide
ugaugcugcccuguggugg

SEQ ID NO: 141052 - RNA, 19 nt, Artificial Sequence
  Description of Artificial Sequence: Synthetic oligonucleotide
ggguugggguggacacuga

SEQ ID NO: 141053 - RNA, 19 nt, Artificial Sequence
  Description of Artificial Sequence: Synthetic oligonucleotide
acaccaucuggaaugagcu

SEQ ID NO: 141054 - RNA, 19 nt, Artificial Sequence
  Description of Artificial Sequence: Synthetic oligonucleotide
uucauuccuccaaugcagc

SEQ ID NO: 141055 - RNA, 19 nt, Artificial Sequence
  Description of Artificial Sequence: Synthetic oligonucleotide
cccgcugggccgcuggcag

SEQ ID NO: 141056 - RNA, 19 nt, Artificial Sequence
  Description of Artificial Sequence: Synthetic oligonucleotide
gugucacugaccucgccuu

SEQ ID NO: 141057 - RNA, 19 nt, Artificial Sequence
  Description of Artificial Sequence: Synthetic oligonucleotide
ucaaaguggcuucucguga

SEQ ID NO: 141058 - RNA, 19 nt, Artificial Sequence
  Description of Artificial Sequence: Synthetic oligonucleotide
agcuaaagaaugguuucgc

SEQ ID NO: 141059 - RNA, 19 nt, Artificial Sequence
  Description of Artificial Sequence: Synthetic oligonucleotide
cuguggugcggcccccagg

SEQ ID NO: 141060 - RNA, 19 nt, Artificial Sequence
  Description of Artificial Sequence: Synthetic oligonucleotide
gacaccaugcagaucauuc

SEQ ID NO: 141061 - RNA, 19 nt, Artificial Sequence
  Description of Artificial Sequence: Synthetic oligonucleotide
caacagccaugggcuucug

SEQ ID NO: 141062 - RNA, 19 nt, Artificial Sequence
  Description of Artificial Sequence: Synthetic oligonucleotide
gcuucuucaacucaguggc

SEQ ID NO: 141063 - RNA, 19 nt, Artificial Sequence
  Description of Artificial Sequence: Synthetic oligonucleotide
ccaucgccugccggcagcu

SEQ ID NO: 141064 - RNA, 19 nt, Artificial Sequence
  Description of Artificial Sequence: Synthetic oligonucleotide
ugcaacagcagagcaaggc

SEQ ID NO: 141065 - RNA, 19 nt, Artificial Sequence
  Description of Artificial Sequence: Synthetic oligonucleotide
ccagcaagauccucauugu

SEQ ID NO: 141066 - RNA, 19 nt, Artificial Sequence
  Description of Artificial Sequence: Synthetic oligonucleotide
uagacugggacgugcacca

SEQ ID NO: 141067 - RNA, 19 nt, Artificial Sequence
  Description of Artificial Sequence: Synthetic oligonucleotide
auggcaacggcacccagca

SEQ ID NO: 141068 - RNA, 19 nt, Artificial Sequence
  Description of Artificial Sequence: Synthetic oligonucleotide
aaaccuucuaccaagaccc

SEQ ID NO: 141069 - RNA, 19 nt, Artificial Sequence
  Description of Artificial Sequence: Synthetic oligonucleotide
ccagugugcucuacaucuc

SEQ ID NO: 141070 - RNA, 19 nt, Artificial Sequence
  Description of Artificial Sequence: Synthetic oligonucleotide
cccugcaucgccaugacga

SEQ ID NO: 141071 - RNA, 19 nt, Artificial Sequence
  Description of Artificial Sequence: Synthetic oligonucleotide
acggcaacuucuucccggg

SEQ ID NO: 141072 - RNA, 19 nt, Artificial Sequence
  Description of Artificial Sequence: Synthetic oligonucleotide
ggaguggggcuguggauga

SEQ ID NO: 141073 - RNA, 19 nt, Artificial Sequence
  Description of Artificial Sequence: Synthetic oligonucleotide
agguaggggcuggcagcgg

SEQ ID NO: 141074 - RNA, 19 nt, Artificial Sequence
  Description of Artificial Sequence: Synthetic oligonucleotide
gugagggcuucaaugucaa

SEQ ID NO: 141075 - RNA, 19 nt, Artificial Sequence
  Description of Artificial Sequence: Synthetic oligonucleotide
auguggccugggcuggagg

SEQ ID NO: 141076 - RNA, 19 nt, Artificial Sequence
  Description of Artificial Sequence: Synthetic oligonucleotide
gucuggacccccccauggg

SEQ ID NO: 141077 - RNA, 19 nt, Artificial Sequence
  Description of Artificial Sequence: Synthetic oligonucleotide
gggauccugaguaccuggc

SEQ ID NO: 141078 - RNA, 19 nt, Artificial Sequence
  Description of Artificial Sequence: Synthetic oligonucleotide
cugcuuucaggauagucgu

SEQ ID NO: 141079 - RNA, 19 nt, Artificial Sequence
  Description of Artificial Sequence: Synthetic oligonucleotide
ugaugcccaucgcccgaga

SEQ ID NO: 141080 - RNA, 19 nt, Artificial Sequence
  Description of Artificial Sequence: Synthetic oligonucleotide
aguucucuccagaccuagu

SEQ ID NO: 141081 - RNA, 19 nt, Artificial Sequence
  Description of Artificial Sequence: Synthetic oligonucleotide
uccuggugucugcuggauu

SEQ ID NO: 141082 - RNA, 19 nt, Artificial Sequence
  Description of Artificial Sequence: Synthetic oligonucleotide
uugaugcugcugaggguca

SEQ ID NO: 141083 - RNA, 19 nt, Artificial Sequence
  Description of Artificial Sequence: Synthetic oligonucleotide
acccggccccacugggugg

SEQ ID NO: 141084 - RNA, 19 nt, Artificial Sequence
  Description of Artificial Sequence: Synthetic oligonucleotide
gcuaccauguuucugccaa

SEQ ID NO: 141085 - RNA, 19 nt, Artificial Sequence
  Description of Artificial Sequence: Synthetic oligonucleotide
aauguuuuggauacaugac

SEQ ID NO: 141086 - RNA, 19 nt, Artificial Sequence
  Description of Artificial Sequence: Synthetic oligonucleotide
cgcagcaacugaugaaccu

SEQ ID NO: 141087 - RNA, 19 nt, Artificial Sequence
  Description of Artificial Sequence: Synthetic oligonucleotide
uggcaggaggcgcaguggu

SEQ ID NO: 141088 - RNA, 19 nt, Artificial Sequence
  Description of Artificial Sequence: Synthetic oligonucleotide
ugcuggccuuggagggugg

SEQ ID NO: 141089 - RNA, 19 nt, Artificial Sequence
  Description of Artificial Sequence: Synthetic oligonucleotide
gccaugaccucacagccau

SEQ ID NO: 141090 - RNA, 19 nt, Artificial Sequence
  Description of Artificial Sequence: Synthetic oligonucleotide
ucugugacgccucugaggc

SEQ ID NO: 141091 - RNA, 19 nt, Artificial Sequence
  Description of Artificial Sequence: Synthetic oligonucleotide
ccuguguggcugcucuucu

SEQ ID NO: 141092 - RNA, 19 nt, Artificial Sequence
  Description of Artificial Sequence: Synthetic oligonucleotide
uggguaacaggguggaucc

SEQ ID NO: 141093 - RNA, 19 nt, Artificial Sequence
  Description of Artificial Sequence: Synthetic oligonucleotide
cccuuucagaagaaggcug

SEQ ID NO: 141094 - RNA, 19 nt, Artificial Sequence
  Description of Artificial Sequence: Synthetic oligonucleotide
ggaaacagaaacccaaccu

SEQ ID NO: 141095 - RNA, 19 nt, Artificial Sequence
  Description of Artificial Sequence: Synthetic oligonucleotide
ucaaugccauccgcucucu

SEQ ID NO: 141096 - RNA, 19 nt, Artificial Sequence
  Description of Artificial Sequence: Synthetic oligonucleotide
uggaggccgugauccgggu

SEQ ID NO: 141097 - RNA, 19 nt, Artificial Sequence
  Description of Artificial Sequence: Synthetic oligonucleotide
ugcacaguaaauacugggg

SEQ ID NO: 141098 - RNA, 19 nt, Artificial Sequence
  Description of Artificial Sequence: Synthetic oligonucleotide
gcugcaugcagcgccuggc

SEQ ID NO: 141099 - RNA, 19 nt, Artificial Sequence
  Description of Artificial Sequence: Synthetic oligonucleotide
ccuccuguccagacuccug

SEQ ID NO: 141100 - RNA, 19 nt, Artificial Sequence
  Description of Artificial Sequence: Synthetic oligonucleotide
gggugccuagagugccagg

SEQ ID NO: 141101 - RNA, 19 nt, Artificial Sequence
  Description of Artificial Sequence: Synthetic oligonucleotide
gggcugacaaagaagaagu

SEQ ID NO: 141102 - RNA, 19 nt, Artificial Sequence
  Description of Artificial Sequence: Synthetic oligonucleotide
uggaggcagugaccgcacu

SEQ ID NO: 141103 - RNA, 19 nt, Artificial Sequence
  Description of Artificial Sequence: Synthetic oligonucleotide
uggcgucccucucuguggg

SEQ ID NO: 141104 - RNA, 19 nt, Artificial Sequence
  Description of Artificial Sequence: Synthetic oligonucleotide
gcauccuggcugaagauag

SEQ ID NO: 141105 - RNA, 19 nt, Artificial Sequence
  Description of Artificial Sequence: Synthetic oligonucleotide
ggcccucggagcagcuggu

SEQ ID NO: 141106 - RNA, 19 nt, Artificial Sequence
  Description of Artificial Sequence: Synthetic oligonucleotide
uggaggaggaagaaccuau

SEQ ID NO: 141107 - RNA, 19 nt, Artificial Sequence
  Description of Artificial Sequence: Synthetic oligonucleotide
ugaaucucuaaggcucugg

SEQ ID NO: 141108 - RNA, 19 nt, Artificial Sequence
  Description of Artificial Sequence: Synthetic oligonucleotide
gaaccaucugcccgcccac

SEQ ID NO: 141109 - RNA, 19 nt, Artificial Sequence
  Description of Artificial Sequence: Synthetic oligonucleotide
ccaugcccuugggaccugg

SEQ ID NO: 141110 - RNA, 19 nt, Artificial Sequence
  Description of Artificial Sequence: Synthetic oligonucleotide
guucucuucuaaccccugg

SEQ ID NO: 141111 - RNA, 19 nt, Artificial Sequence
  Description of Artificial Sequence: Synthetic oligonucleotide
gcaauagcccccauuccug

SEQ ID NO: 141112 - RNA, 19 nt, Artificial Sequence
  Description of Artificial Sequence: Synthetic oligonucleotide
gggucuuuagagauccugu

SEQ ID NO: 141113 - RNA, 19 nt, Artificial Sequence
  Description of Artificial Sequence: Synthetic oligonucleotide
ugggcaaguaguuggaacc

SEQ ID NO: 141114 - RNA, 19 nt, Artificial Sequence
  Description of Artificial Sequence: Synthetic oligonucleotide
cagagaacagccugccugc

SEQ ID NO: 141115 - RNA, 19 nt, Artificial Sequence
  Description of Artificial Sequence: Synthetic oligonucleotide
cuuugacaguuaucccagg

SEQ ID NO: 141116 - RNA, 19 nt, Artificial Sequence
  Description of Artificial Sequence: Synthetic oligonucleotide
ggagcgugagaaaaucccu

SEQ ID NO: 141117 - RNA, 19 nt, Artificial Sequence
  Description of Artificial Sequence: Synthetic oligonucleotide
ugggucuagaaugggaacu

SEQ ID NO: 141118 - RNA, 19 nt, Artificial Sequence
  Description of Artificial Sequence: Synthetic oligonucleotide
uggagaggacccugagagg

SEQ ID NO: 141119 - RNA, 19 nt, Artificial Sequence
  Description of Artificial Sequence: Synthetic oligonucleotide
gagacgggcugggcggcga

SEQ ID NO: 141120 - RNA, 19 nt, Artificial Sequence
  Description of Artificial Sequence: Synthetic oligonucleotide
acccccacagggcucucga

SEQ ID NO: 141121 - RNA, 19 nt, Artificial Sequence
  Description of Artificial Sequence: Synthetic oligonucleotide
agaacagauucuccccucc

SEQ ID NO: 141122 - RNA, 19 nt, Artificial Sequence
  Description of Artificial Sequence: Synthetic oligonucleotide
caguaugggcccuggcugu

SEQ ID NO: 141123 - RNA, 19 nt, Artificial Sequence
  Description of Artificial Sequence: Synthetic oligonucleotide
uggcccccauuccucagga

SEQ ID NO: 141124 - RNA, 19 nt, Artificial Sequence
  Description of Artificial Sequence: Synthetic oligonucleotide
acugcacagaggaggacug

SEQ ID NO: 141125 - RNA, 19 nt, Artificial Sequence
  Description of Artificial Sequence: Synthetic oligonucleotide
ggcuccggcuccgucgggc

SEQ ID NO: 141126 - RNA, 19 nt, Artificial Sequence
  Description of Artificial Sequence: Synthetic oligonucleotide
cucacccuuaaccacuauu

SEQ ID NO: 141127 - RNA, 19 nt, Artificial Sequence
  Description of Artificial Sequence: Synthetic oligonucleotide
uccuggcucugcaaacccc

SEQ ID NO: 141128 - RNA, 19 nt, Artificial Sequence
  Description of Artificial Sequence: Synthetic oligonucleotide
cagacuuugcacacagccu

SEQ ID NO: 141129 - RNA, 19 nt, Artificial Sequence
  Description of Artificial Sequence: Synthetic oligonucleotide
ucaggcuccacacagaaau

SEQ ID NO: 141130 - RNA, 19 nt, Artificial Sequence
  Description of Artificial Sequence: Synthetic oligonucleotide
ugugaacuuggccucagac

SEQ ID NO: 141131 - RNA, 19 nt, Artificial Sequence
  Description of Artificial Sequence: Synthetic oligonucleotide
caggcuggcccuuccuagg

SEQ ID NO: 141132 - RNA, 19 nt, Artificial Sequence
  Description of Artificial Sequence: Synthetic oligonucleotide
gcucuaggggcuagggggg

SEQ ID NO: 141133 - RNA, 19 nt, Artificial Sequence
  Description of Artificial Sequence: Synthetic oligonucleotide
gaguggggagccaagaggu

SEQ ID NO: 141134 - RNA, 19 nt, Artificial Sequence
  Description of Artificial Sequence: Synthetic oligonucleotide
ucccauauuccugagugca

SEQ ID NO: 141135 - RNA, 19 nt, Artificial Sequence
  Description of Artificial Sequence: Synthetic oligonucleotide
agggguagucccucucacc

SEQ ID NO: 141136 - RNA, 19 nt, Artificial Sequence
  Description of Artificial Sequence: Synthetic oligonucleotide
cugcuuccucagacgacuc

SEQ ID NO: 141137 - RNA, 19 nt, Artificial Sequence
  Description of Artificial Sequence: Synthetic oligonucleotide
cuggaagcuucccucuacc

SEQ ID NO: 141138 - RNA, 19 nt, Artificial Sequence
  Description of Artificial Sequence: Synthetic oligonucleotide
cacugggcacugagacgaa

SEQ ID NO: 141139 - RNA, 19 nt, Artificial Sequence
  Description of Artificial Sequence: Synthetic oligonucleotide
agcucccugacagccgaga

SEQ ID NO: 141140 - RNA, 19 nt, Artificial Sequence
  Description of Artificial Sequence: Synthetic oligonucleotide
acuggcagcccuccaucug

SEQ ID NO: 141141 - RNA, 19 nt, Artificial Sequence
  Description of Artificial Sequence: Synthetic oligonucleotide
gguccguacccucgccaga

SEQ ID NO: 141142 - RNA, 19 nt, Artificial Sequence
  Description of Artificial Sequence: Synthetic oligonucleotide
aggccccccuacaucaacc

SEQ ID NO: 141143 - RNA, 19 nt, Artificial Sequence
  Description of Artificial Sequence: Synthetic oligonucleotide
cuccuggcgaugcccuggu

SEQ ID NO: 141144 - RNA, 19 nt, Artificial Sequence
  Description of Artificial Sequence: Synthetic oligonucleotide
uggagcagaugggugcucu

SEQ ID NO: 141145 - RNA, 19 nt, Artificial Sequence
  Description of Artificial Sequence: Synthetic oligonucleotide
ugggaguccugugcuuccu

SEQ ID NO: 141146 - RNA, 19 nt, Artificial Sequence
  Description of Artificial Sequence: Synthetic oligonucleotide
ugauccaauggugccaaac

SEQ ID NO: 141147 - RNA, 19 nt, Artificial Sequence
  Description of Artificial Sequence: Synthetic oligonucleotide
cccuucaucuccccaagaa

SEQ ID NO: 141148 - RNA, 19 nt, Artificial Sequence
  Description of Artificial Sequence: Synthetic oligonucleotide
agcgcagcauaccccuggg

SEQ ID NO: 141149 - RNA, 19 nt, Artificial Sequence
  Description of Artificial Sequence: Synthetic oligonucleotide
gaccccucggccacugccc

SEQ ID NO: 141150 - RNA, 19 nt, Artificial Sequence
  Description of Artificial Sequence: Synthetic oligonucleotide
cacucggggagccuucucu

SEQ ID NO: 141151 - RNA, 19 nt, Artificial Sequence
  Description of Artificial Sequence: Synthetic oligonucleotide
uguuucuggggccuccccc

SEQ ID NO: 141152 - RNA, 19 nt, Artificial Sequence
  Description of Artificial Sequence: Synthetic oligonucleotide
caccauagcucugauuccc

SEQ ID NO: 141153 - RNA, 19 nt, Artificial Sequence
  Description of Artificial Sequence: Synthetic oligonucleotide
caccccacauaggaguagc

SEQ ID NO: 141154 - RNA, 19 nt, Artificial Sequence
  Description of Artificial Sequence: Synthetic oligonucleotide
ccugacugagggggaaggg

SEQ ID NO: 141155 - RNA, 19 nt, Artificial Sequence
  Description of Artificial Sequence: Synthetic oligonucleotide
ggugggagagaagauacag

SEQ ID NO: 141156 - RNA, 19 nt, Artificial Sequence
  Description of Artificial Sequence: Synthetic oligonucleotide
gacauggaggaggggaggc

SEQ ID NO: 141157 - RNA, 19 nt, Artificial Sequence
  Description of Artificial Sequence: Synthetic oligonucleotide
cugcucuggcaaagucuuc

SEQ ID NO: 141158 - RNA, 19 nt, Artificial Sequence
  Description of Artificial Sequence: Synthetic oligonucleotide
caaggcuuuugggggucca

SEQ ID NO: 141159 - RNA, 19 nt, Artificial Sequence
  Description of Artificial Sequence: Synthetic oligonucleotide
aggccuggggucaagaagg

SEQ ID NO: 141160 - RNA, 19 nt, Artificial Sequence
  Description of Artificial Sequence: Synthetic oligonucleotide
gaaaaugugugugagcaug

SEQ ID NO: 141161 - RNA, 19 nt, Artificial Sequence
  Description of Artificial Sequence: Synthetic oligonucleotide
gugugugagugaggcgugu

SEQ ID NO: 141162 - RNA, 19 nt, Artificial Sequence
  Description of Artificial Sequence: Synthetic oligonucleotide
ugugugagcguguguguga

SEQ ID NO: 141163 - RNA, 19 nt, Artificial Sequence
  Description of Artificial Sequence: Synthetic oligonucleotide
agugaggcgugugugugug

SEQ ID NO: 141164 - RNA, 19 nt, Artificial Sequence
  Description of Artificial Sequence: Synthetic oligonucleotide
gucuuuccuaggacccacc

SEQ ID NO: 141165 - RNA, 19 nt, Artificial Sequence
  Description of Artificial Sequence: Synthetic oligonucleotide
cauacccuguguauguaug

SEQ ID NO: 141166 - RNA, 19 nt, Artificial Sequence
  Description of Artificial Sequence: Synthetic oligonucleotide
gcauguuuuuguaaaaagg

SEQ ID NO: 141167 - RNA, 19 nt, Artificial Sequence
  Description of Artificial Sequence: Synthetic oligonucleotide
gaagaaaauggaaaaaaau

SEQ ID NO: 141168 - RNA, 19 nt, Artificial Sequence
  Description of Artificial Sequence: Synthetic oligonucleotide
ucugaacaauaaauguuuu

SEQ ID NO: 141169 - RNA, 19 nt, Artificial Sequence
  Description of Artificial Sequence: Synthetic oligonucleotide
uauuugcuuuaaaaaaaaa

SEQ ID NO: 141170 - RNA, 25 nt, Artificial Sequence
  Description of Artificial Sequence: Synthetic oligonucleotide
cagccuccggcgacuggggggaugu

SEQ ID NO: 141171 - RNA, 25 nt, Artificial Sequence
  Description of Artificial Sequence: Synthetic oligonucleotide
ugaggccggcgccccagccccccgc

SEQ ID NO: 141172 - RNA, 25 nt, Artificial Sequence
  Description of Artificial Sequence: Synthetic oligonucleotide
ccccgccaugagccccccgcucuga

SEQ ID NO: 141173 - RNA, 25 nt, Artificial Sequence
  Description of Artificial Sequence: Synthetic oligonucleotide
agggccccggccccuggaugcacag

SEQ ID NO: 141174 - RNA, 25 nt, Artificial Sequence
  Description of Artificial Sequence: Synthetic oligonucleotide
gccccggcgcugaugggacccaggu

SEQ ID NO: 141175 - RNA, 25 nt, Artificial Sequence
  Description of Artificial Sequence: Synthetic oligonucleotide
ugagcccgggugcccacuacugcag

SEQ ID NO: 141176 - RNA, 25 nt, Artificial Sequence
  Description of Artificial Sequence: Synthetic oligonucleotide
gccccacuggcgcaggcugccccag

SEQ ID NO: 141177 - RNA, 25 nt, Artificial Sequence
  Description of Artificial Sequence: Synthetic oligonucleotide
ggcccugugcagacacaccaggccc

SEQ ID NO: 141178 - RNA, 25 nt, Artificial Sequence
  Description of Artificial Sequence: Synthetic oligonucleotide
cucagccgcagcccauggaccugcg

SEQ ID NO: 141179 - RNA, 25 nt, Artificial Sequence
  Description of Artificial Sequence: Synthetic oligonucleotide
gggugggccagcggcccccagugga

SEQ ID NO: 141180 - RNA, 25 nt, Artificial Sequence
  Description of Artificial Sequence: Synthetic oligonucleotide
agcccccaccagagcccacauugcu

SEQ ID NO: 141181 - RNA, 25 nt, Artificial Sequence
  Description of Artificial Sequence: Synthetic oligonucleotide
uggcccugcagcguccccagcgccu

SEQ ID NO: 141182 - RNA, 25 nt, Artificial Sequence
  Description of Artificial Sequence: Synthetic oligonucleotide
ugcaccaccaccucuuccuagcagg

SEQ ID NO: 141183 - RNA, 25 nt, Artificial Sequence
  Description of Artificial Sequence: Synthetic oligonucleotide
gccugcagcagcagcgcucggugga

SEQ ID NO: 141184 - RNA, 25 nt, Artificial Sequence
  Description of Artificial Sequence: Synthetic oligonucleotide
agcccaugaggcucuccauggacac

SEQ ID NO: 141185 - RNA, 25 nt, Artificial Sequence
  Description of Artificial Sequence: Synthetic oligonucleotide
cgccgaugcccgaguugcagguggg

SEQ ID NO: 141186 - RNA, 25 nt, Artificial Sequence
  Description of Artificial Sequence: Synthetic oligonucleotide
gaccccaggaacaagagcugcggca

SEQ ID NO: 141187 - RNA, 25 nt, Artificial Sequence
  Description of Artificial Sequence: Synthetic oligonucleotide
agcuucuccacaaggacaagagcaa

SEQ ID NO: 141188 - RNA, 25 nt, Artificial Sequence
  Description of Artificial Sequence: Synthetic oligonucleotide
agcgaagugcuguagccagcagcgu

SEQ ID NO: 141189 - RNA, 25 nt, Artificial Sequence
  Description of Artificial Sequence: Synthetic oligonucleotide
uggucaagcagaagcuagcggaggu

SEQ ID NO: 141190 - RNA, 25 nt, Artificial Sequence
  Description of Artificial Sequence: Synthetic oligonucleotide
ugauucugaaaaaacagcaggcggc

SEQ ID NO: 141191 - RNA, 25 nt, Artificial Sequence
  Description of Artificial Sequence: Synthetic oligonucleotide
cccuagaaagaacaguccaucccaa

SEQ ID NO: 141192 - RNA, 25 nt, Artificial Sequence
  Description of Artificial Sequence: Synthetic oligonucleotide
acagccccggcauucccuacagaac

SEQ ID NO: 141193 - RNA, 25 nt, Artificial Sequence
  Description of Artificial Sequence: Synthetic oligonucleotide
cccuggagccccuggagacggaagg

SEQ ID NO: 141194 - RNA, 25 nt, Artificial Sequence
  Description of Artificial Sequence: Synthetic oligonucleotide
gagccacccgcuccaugcucagcag

SEQ ID NO: 141195 - RNA, 25 nt, Artificial Sequence
  Description of Artificial Sequence: Synthetic oligonucleotide
gcuuuuugccuccuguucccagccu

SEQ ID NO: 141196 - RNA, 25 nt, Artificial Sequence
  Description of Artificial Sequence: Synthetic oligonucleotide
ugcccagugaccccccagagcacuu

SEQ ID NO: 141197 - RNA, 25 nt, Artificial Sequence
  Description of Artificial Sequence: Synthetic oligonucleotide
ucccucugcgcaagacagucucuga

SEQ ID NO: 141198 - RNA, 25 nt, Artificial Sequence
  Description of Artificial Sequence: Synthetic oligonucleotide
agcccaaccugaagcugcgcuauaa

SEQ ID NO: 141199 - RNA, 25 nt, Artificial Sequence
  Description of Artificial Sequence: Synthetic oligonucleotide
agcccaagaagucccuggagcggag

SEQ ID NO: 141200 - RNA, 25 nt, Artificial Sequence
  Description of Artificial Sequence: Synthetic oligonucleotide
ggaagaauccacugcuccgaaagga

SEQ ID NO: 141201 - RNA, 25 nt, Artificial Sequence
  Description of Artificial Sequence: Synthetic oligonucleotide
agagugcgccccccagccuccggcg

SEQ ID NO: 141202 - RNA, 25 nt, Artificial Sequence
  Description of Artificial Sequence: Synthetic oligonucleotide
ggcggcccgcagagacccucggaga

SEQ ID NO: 141203 - RNA, 25 nt, Artificial Sequence
  Description of Artificial Sequence: Synthetic oligonucleotide
acuccuccccaaguaguagcagcac

SEQ ID NO: 141204 - RNA, 25 nt, Artificial Sequence
  Description of Artificial Sequence: Synthetic oligonucleotide
cgcccgcaucagggugcagcucccc

SEQ ID NO: 141205 - RNA, 25 nt, Artificial Sequence
  Description of Artificial Sequence: Synthetic oligonucleotide
ccaaugacagcgagcacggccccaa

SEQ ID NO: 141206 - RNA, 25 nt, Artificial Sequence
  Description of Artificial Sequence: Synthetic oligonucleotide
aucccauccugggcucggaggcgcu

SEQ ID NO: 141207 - RNA, 25 nt, Artificial Sequence
  Description of Artificial Sequence: Synthetic oligonucleotide
ucuugggccagcggcugcggcugca

SEQ ID NO: 141208 - RNA, 25 nt, Artificial Sequence
  Description of Artificial Sequence: Synthetic oligonucleotide
aggagacuucuguggccccguucgc

SEQ ID NO: 141209 - RNA, 25 nt, Artificial Sequence
  Description of Artificial Sequence: Synthetic oligonucleotide
ccuugccgacaguguccuugcugcc

SEQ ID NO: 141210 - RNA, 25 nt, Artificial Sequence
  Description of Artificial Sequence: Synthetic oligonucleotide
ccgcaaucacucuggggcugcccgc

SEQ ID NO: 141211 - RNA, 25 nt, Artificial Sequence
  Description of Artificial Sequence: Synthetic oligonucleotide
ccccugccagggcugacagugaccg

SEQ ID NO: 141212 - RNA, 25 nt, Artificial Sequence
  Description of Artificial Sequence: Synthetic oligonucleotide
gcaggacccauccgacucugggccc

SEQ ID NO: 141213 - RNA, 25 nt, Artificial Sequence
  Description of Artificial Sequence: Synthetic oligonucleotide
cucgggggccaauccuggggagccc

SEQ ID NO: 141214 - RNA, 25 nt, Artificial Sequence
  Description of Artificial Sequence: Synthetic oligonucleotide
cccacacuccccucuuccugcccca

SEQ ID NO: 141215 - RNA, 25 nt, Artificial Sequence
  Description of Artificial Sequence: Synthetic oligonucleotide
auggcuuggagcccgaggcuggggg

SEQ ID NO: 141216 - RNA, 25 nt, Artificial Sequence
  Description of Artificial Sequence: Synthetic oligonucleotide
gcaccuugcccucucgccugcagcc

SEQ ID NO: 141217 - RNA, 25 nt, Artificial Sequence
  Description of Artificial Sequence: Synthetic oligonucleotide
ccauucuccuccuggaccccucagg

SEQ ID NO: 141218 - RNA, 25 nt, Artificial Sequence
  Description of Artificial Sequence: Synthetic oligonucleotide
gcucucaugccccgcugcugacugu

SEQ ID NO: 141219 - RNA, 25 nt, Artificial Sequence
  Description of Artificial Sequence: Synthetic oligonucleotide
ugcccgggcuugggcccuugcccuu

SEQ ID NO: 141220 - RNA, 25 nt, Artificial Sequence
  Description of Artificial Sequence: Synthetic oligonucleotide
uccacuuugcccaguccuuaaugac

SEQ ID NO: 141221 - RNA, 25 nt, Artificial Sequence
  Description of Artificial Sequence: Synthetic oligonucleotide
ccaccgagcggcucucugggucagg

SEQ ID NO: 141222 - RNA, 25 nt, Artificial Sequence
  Description of Artificial Sequence: Synthetic oligonucleotide
gccuccacuggccacugagccggac

SEQ ID NO: 141223 - RNA, 25 nt, Artificial Sequence
  Description of Artificial Sequence: Synthetic oligonucleotide
cucgcucagagccccugccccccag

SEQ ID NO: 141224 - RNA, 25 nt, Artificial Sequence
  Description of Artificial Sequence: Synthetic oligonucleotide
gugccaccgcucccccaccgccggg

SEQ ID NO: 141225 - RNA, 25 nt, Artificial Sequence
  Description of Artificial Sequence: Synthetic oligonucleotide
gccccaugcagccccgccuggagca

SEQ ID NO: 141226 - RNA, 25 nt, Artificial Sequence
  Description of Artificial Sequence: Synthetic oligonucleotide
agcucaaaacucacguccaggugau

SEQ ID NO: 141227 - RNA, 25 nt, Artificial Sequence
  Description of Artificial Sequence: Synthetic oligonucleotide
ucaagaggucagccaagccgaguga

SEQ ID NO: 141228 - RNA, 25 nt, Artificial Sequence
  Description of Artificial Sequence: Synthetic oligonucleotide
agaagccccggcugcggcagauacc

SEQ ID NO: 141229 - RNA, 25 nt, Artificial Sequence
  Description of Artificial Sequence: Synthetic oligonucleotide
ccucggcugaagaccuggagacaga

SEQ ID NO: 141230 - RNA, 25 nt, Artificial Sequence
  Description of Artificial Sequence: Synthetic oligonucleotide
auggcgggggaccgggccagguggu

SEQ ID NO: 141231 - RNA, 25 nt, Artificial Sequence
  Description of Artificial Sequence: Synthetic oligonucleotide
uggacgauggccuggagcacaggga

SEQ ID NO: 141232 - RNA, 25 nt, Artificial Sequence
  Description of Artificial Sequence: Synthetic oligonucleotide
agcugggccaugggcagccugaggc

SEQ ID NO: 141233 - RNA, 25 nt, Artificial Sequence
  Description of Artificial Sequence: Synthetic oligonucleotide
ccagaggccccgcuccucuccagca

SEQ ID NO: 141234 - RNA, 25 nt, Artificial Sequence
  Description of Artificial Sequence: Synthetic oligonucleotide
agcacccucagguguugcucuggga

SEQ ID NO: 141235 - RNA, 25 nt, Artificial Sequence
  Description of Artificial Sequence: Synthetic oligonucleotide
aacagcagcgacuggcugggcggcu

SEQ ID NO: 141236 - RNA, 25 nt, Artificial Sequence
  Description of Artificial Sequence: Synthetic oligonucleotide
ucccccggggcagcaccggggacac

SEQ ID NO: 141237 - RNA, 25 nt, Artificial Sequence
  Description of Artificial Sequence: Synthetic oligonucleotide
cugugcugcuuccucuggcccaggg

SEQ ID NO: 141238 - RNA, 25 nt, Artificial Sequence
  Description of Artificial Sequence: Synthetic oligonucleotide
gugggcaccggccucugucccgggc

SEQ ID NO: 141239 - RNA, 25 nt, Artificial Sequence
  Description of Artificial Sequence: Synthetic oligonucleotide
cucagucuuccccagccgcaccugc

SEQ ID NO: 141240 - RNA, 25 nt, Artificial Sequence
  Description of Artificial Sequence: Synthetic oligonucleotide
ccucacugucagccccagagccugc

SEQ ID NO: 141241 - RNA, 25 nt, Artificial Sequence
  Description of Artificial Sequence: Synthetic oligonucleotide
ccagccaggcccgaguccucuccag

SEQ ID NO: 141242 - RNA, 25 nt, Artificial Sequence
  Description of Artificial Sequence: Synthetic oligonucleotide
gcucagagaccccugccaggacccu

SEQ ID NO: 141243 - RNA, 25 nt, Artificial Sequence
  Description of Artificial Sequence: Synthetic oligonucleotide
ugcccuucaccacagggcugaucua

SEQ ID NO: 141244 - RNA, 25 nt, Artificial Sequence
  Description of Artificial Sequence: Synthetic oligonucleotide
augacucggucaugcugaagcacca

SEQ ID NO: 141245 - RNA, 25 nt, Artificial Sequence
  Description of Artificial Sequence: Synthetic oligonucleotide
agugcuccugcggugacaacagcag

SEQ ID NO: 141246 - RNA, 25 nt, Artificial Sequence
  Description of Artificial Sequence: Synthetic oligonucleotide
ggcacccggagcacgccggccgcau

SEQ ID NO: 141247 - RNA, 25 nt, Artificial Sequence
  Description of Artificial Sequence: Synthetic oligonucleotide
uccagagcaucuggucccggcugca

SEQ ID NO: 141248 - RNA, 25 nt, Artificial Sequence
  Description of Artificial Sequence: Synthetic oligonucleotide
aggagcgggggcuccggagccagug

SEQ ID NO: 141249 - RNA, 25 nt, Artificial Sequence
  Description of Artificial Sequence: Synthetic oligonucleotide
gugagugucuccgaggccggaaggc

SEQ ID NO: 141250 - RNA, 25 nt, Artificial Sequence
  Description of Artificial Sequence: Synthetic oligonucleotide
ccucccuggaagagcugcagucggu

SEQ ID NO: 141251 - RNA, 25 nt, Artificial Sequence
  Description of Artificial Sequence: Synthetic oligonucleotide
uccacucugagcggcacgugcuccu

SEQ ID NO: 141252 - RNA, 25 nt, Artificial Sequence
  Description of Artificial Sequence: Synthetic oligonucleotide
ucuacggcaccaacccgcucagccg

SEQ ID NO: 141253 - RNA, 25 nt, Artificial Sequence
  Description of Artificial Sequence: Synthetic oligonucleotide
gccucaaacuggacaacgggaagcu

SEQ ID NO: 141254 - RNA, 25 nt, Artificial Sequence
  Description of Artificial Sequence: Synthetic oligonucleotide
uggcagggcuccuggcacagcggau

SEQ ID NO: 141255 - RNA, 25 nt, Artificial Sequence
  Description of Artificial Sequence: Synthetic oligonucleotide
uguuugugaugcugcccuguggugg

SEQ ID NO: 141256 - RNA, 25 nt, Artificial Sequence
  Description of Artificial Sequence: Synthetic oligonucleotide
ggguugggguggacacugacaccau

SEQ ID NO: 141257 - RNA, 25 nt, Artificial Sequence
  Description of Artificial Sequence: Synthetic oligonucleotide
ucuggaaugagcuucauuccuccaa

SEQ ID NO: 141258 - RNA, 25 nt, Artificial Sequence
  Description of Artificial Sequence: Synthetic oligonucleotide
augcagcccgcugggccgcuggcag

SEQ ID NO: 141259 - RNA, 25 nt, Artificial Sequence
  Description of Artificial Sequence: Synthetic oligonucleotide
gugucacugaccucgccuucaaagu

SEQ ID NO: 141260 - RNA, 25 nt, Artificial Sequence
  Description of Artificial Sequence: Synthetic oligonucleotide
uggcuucucgugagcuaaagaaugg

SEQ ID NO: 141261 - RNA, 25 nt, Artificial Sequence
  Description of Artificial Sequence: Synthetic oligonucleotide
guuucgcuguggugcggcccccagg

SEQ ID NO: 141262 - RNA, 25 nt, Artificial Sequence
  Description of Artificial Sequence: Synthetic oligonucleotide
gacaccaugcagaucauucaacagc

SEQ ID NO: 141263 - RNA, 25 nt, Artificial Sequence
  Description of Artificial Sequence: Synthetic oligonucleotide
ccaugggcuucugcuucuucaacuc

SEQ ID NO: 141264 - RNA, 25 nt, Artificial Sequence
  Description of Artificial Sequence: Synthetic oligonucleotide
caguggccaucgccugccggcagcu

SEQ ID NO: 141265 - RNA, 25 nt, Artificial Sequence
  Description of Artificial Sequence: Synthetic oligonucleotide
ugcaacagcagagcaaggccagcaa

SEQ ID NO: 141266 - RNA, 25 nt, Artificial Sequence
  Description of Artificial Sequence: Synthetic oligonucleotide
agauccucauuguagacugggacgu

SEQ ID NO: 141267 - RNA, 25 nt, Artificial Sequence
  Description of Artificial Sequence: Synthetic oligonucleotide
ugcaccauggcaacggcacccagca

SEQ ID NO: 141268 - RNA, 25 nt, Artificial Sequence
  Description of Artificial Sequence: Synthetic oligonucleotide
aaaccuucuaccaagaccccagugu

SEQ ID NO: 141269 - RNA, 25 nt, Artificial Sequence
  Description of Artificial Sequence: Synthetic oligonucleotide
ugcucuacaucucccugcaucgcca

SEQ ID NO: 141270 - RNA, 25 nt, Artificial Sequence
  Description of Artificial Sequence: Synthetic oligonucleotide
augacgacggcaacuucuucccggg

SEQ ID NO: 141271 - RNA, 25 nt, Artificial Sequence
  Description of Artificial Sequence: Synthetic oligonucleotide
ggaguggggcuguggaugagguagg

SEQ ID NO: 141272 - RNA, 25 nt, Artificial Sequence
  Description of Artificial Sequence: Synthetic oligonucleotide
gggcuggcagcggugagggcuucaa

SEQ ID NO: 141273 - RNA, 25 nt, Artificial Sequence
  Description of Artificial Sequence: Synthetic oligonucleotide
augucaauguggccugggcuggagg

SEQ ID NO: 141274 - RNA, 25 nt, Artificial Sequence
  Description of Artificial Sequence: Synthetic oligonucleotide
gucuggacccccccaugggggaucc

SEQ ID NO: 141275 - RNA, 25 nt, Artificial Sequence
  Description of Artificial Sequence: Synthetic oligonucleotide
cugaguaccuggcugcuuucaggau

SEQ ID NO: 141276 - RNA, 25 nt, Artificial Sequence
  Description of Artificial Sequence: Synthetic oligonucleotide
uagucgugaugcccaucgcccgaga

SEQ ID NO: 141277 - RNA, 25 nt, Artificial Sequence
  Description of Artificial Sequence: Synthetic oligonucleotide
aguucucuccagaccuaguccuggu

SEQ ID NO: 141278 - RNA, 25 nt, Artificial Sequence
  Description of Artificial Sequence: Synthetic oligonucleotide
ugucugcuggauuugaugcugcuga

SEQ ID NO: 141279 - RNA, 25 nt, Artificial Sequence
  Description of Artificial Sequence: Synthetic oligonucleotide
agggucacccggccccacugggugg

SEQ ID NO: 141280 - RNA, 25 nt, Artificial Sequence
  Description of Artificial Sequence: Synthetic oligonucleotide
gcuaccauguuucugccaaauguuu

SEQ ID NO: 141281 - RNA, 25 nt, Artificial Sequence
  Description of Artificial Sequence: Synthetic oligonucleotide
uuggauacaugacgcagcaacugau

SEQ ID NO: 141282 - RNA, 25 nt, Artificial Sequence
  Description of Artificial Sequence: Synthetic oligonucleotide
ugaaccuggcaggaggcgcaguggu

SEQ ID NO: 141283 - RNA, 25 nt, Artificial Sequence
  Description of Artificial Sequence: Synthetic oligonucleotide
ugcuggccuuggaggguggccauga

SEQ ID NO: 141284 - RNA, 25 nt, Artificial Sequence
  Description of Artificial Sequence: Synthetic oligonucleotide
accucacagccaucugugacgccuc

SEQ ID NO: 141285 - RNA, 25 nt, Artificial Sequence
  Description of Artificial Sequence: Synthetic oligonucleotide
cugaggccuguguggcugcucuucu

SEQ ID NO: 141286 - RNA, 25 nt, Artificial Sequence
  Description of Artificial Sequence: Synthetic oligonucleotide
uggguaacaggguggauccccuuuc

SEQ ID NO: 141287 - RNA, 25 nt, Artificial Sequence
  Description of Artificial Sequence: Synthetic oligonucleotide
cagaagaaggcuggaaacagaaacc

SEQ ID NO: 141288 - RNA, 25 nt, Artificial Sequence
  Description of Artificial Sequence: Synthetic oligonucleotide
ccaaccucaaugccauccgcucucu

SEQ ID NO: 141289 - RNA, 25 nt, Artificial Sequence
  Description of Artificial Sequence: Synthetic oligonucleotide
uggaggccgugauccgggugcacag

SEQ ID NO: 141290 - RNA, 25 nt, Artificial Sequence
  Description of Artificial Sequence: Synthetic oligonucleotide
guaaauacuggggcugcaugcagcg

SEQ ID NO: 141291 - RNA, 25 nt, Artificial Sequence
  Description of Artificial Sequence: Synthetic oligonucleotide
gccuggccuccuguccagacuccug

SEQ ID NO: 141292 - RNA, 25 nt, Artificial Sequence
  Description of Artificial Sequence: Synthetic oligonucleotide
gggugccuagagugccaggggcuga

SEQ ID NO: 141293 - RNA, 25 nt, Artificial Sequence
  Description of Artificial Sequence: Synthetic oligonucleotide
acaaagaagaaguggaggcagugac

SEQ ID NO: 141294 - RNA, 25 nt, Artificial Sequence
  Description of Artificial Sequence: Synthetic oligonucleotide
ccgcacuggcgucccucucuguggg

SEQ ID NO: 141295 - RNA, 25 nt, Artificial Sequence
  Description of Artificial Sequence: Synthetic oligonucleotide
gcauccuggcugaagauaggcccuc

SEQ ID NO: 141296 - RNA, 25 nt, Artificial Sequence
  Description of Artificial Sequence: Synthetic oligonucleotide
cggagcagcugguggaggaggaaga

SEQ ID NO: 141297 - RNA, 25 nt, Artificial Sequence
  Description of Artificial Sequence: Synthetic oligonucleotide
aaccuaugaaucucuaaggcucugg

SEQ ID NO: 141298 - RNA, 25 nt, Artificial Sequence
  Description of Artificial Sequence: Synthetic oligonucleotide
gaaccaucugcccgcccaccaugcc

SEQ ID NO: 141299 - RNA, 25 nt, Artificial Sequence
  Description of Artificial Sequence: Synthetic oligonucleotide
ccuugggaccugguucucuucuaac

SEQ ID NO: 141300 - RNA, 25 nt, Artificial Sequence
  Description of Artificial Sequence: Synthetic oligonucleotide
ccccuggcaauagcccccauuccug

SEQ ID NO: 141301 - RNA, 25 nt, Artificial Sequence
  Description of Artificial Sequence: Synthetic oligonucleotide
gggucuuuagagauccugugggcaa

SEQ ID NO: 141302 - RNA, 25 nt, Artificial Sequence
  Description of Artificial Sequence: Synthetic oligonucleotide
aguaguuggaaccagagaacagccu

SEQ ID NO: 141303 - RNA, 25 nt, Artificial Sequence
  Description of Artificial Sequence: Synthetic oligonucleotide
ugccugcuuugacaguuaucccagg

SEQ ID NO: 141304 - RNA, 25 nt, Artificial Sequence
  Description of Artificial Sequence: Synthetic oligonucleotide
ggagcgugagaaaaucccugggucu

SEQ ID NO: 141305 - RNA, 25 nt, Artificial Sequence
  Description of Artificial Sequence: Synthetic oligonucleotide
uagaaugggaacuggagaggacccu

SEQ ID NO: 141306 - RNA, 25 nt, Artificial Sequence
  Description of Artificial Sequence: Synthetic oligonucleotide
ugagaggagacgggcugggcggcga

SEQ ID NO: 141307 - RNA, 25 nt, Artificial Sequence
  Description of Artificial Sequence: Synthetic oligonucleotide
acccccacagggcucucgagaacag

SEQ ID NO: 141308 - RNA, 25 nt, Artificial Sequence
  Description of Artificial Sequence: Synthetic oligonucleotide
gauucuccccuccaguaugggcccu

SEQ ID NO: 141309 - RNA, 25 nt, Artificial Sequence
  Description of Artificial Sequence: Synthetic oligonucleotide
uggcuguggcccccauuccucagga

SEQ ID NO: 141310 - RNA, 25 nt, Artificial Sequence
  Description of Artificial Sequence: Synthetic oligonucleotide
acugcacagaggaggacuggcuccg

SEQ ID NO: 141311 - RNA, 25 nt, Artificial Sequence
  Description of Artificial Sequence: Synthetic oligonucleotide
ggcuccgucgggcucacccuuaacc

SEQ ID NO: 141312 - RNA, 25 nt, Artificial Sequence
  Description of Artificial Sequence: Synthetic oligonucleotide
cacuauuccuggcucugcaaacccc

SEQ ID NO: 141313 - RNA, 25 nt, Artificial Sequence
  Description of Artificial Sequence: Synthetic oligonucleotide
cagacuuugcacacagccucaggcu

SEQ ID NO: 141314 - RNA, 25 nt, Artificial Sequence
  Description of Artificial Sequence: Synthetic oligonucleotide
uccacacagaaaugugaacuuggcc

SEQ ID NO: 141315 - RNA, 25 nt, Artificial Sequence
  Description of Artificial Sequence: Synthetic oligonucleotide
cucagacaggcuggcccuuccuagg

SEQ ID NO: 141316 - RNA, 25 nt, Artificial Sequence
  Description of Artificial Sequence: Synthetic oligonucleotide
gcucuaggggcuaggggggaguggg

SEQ ID NO: 141317 - RNA, 25 nt, Artificial Sequence
  Description of Artificial Sequence: Synthetic oligonucleotide
ggagccaagaggucccauauuccug

SEQ ID NO: 141318 - RNA, 25 nt, Artificial Sequence
  Description of Artificial Sequence: Synthetic oligonucleotide
gagugcagggguagucccucucacc

SEQ ID NO: 141319 - RNA, 25 nt, Artificial Sequence
  Description of Artificial Sequence: Synthetic oligonucleotide
cugcuuccucagacgacucuggaag

SEQ ID NO: 141320 - RNA, 25 nt, Artificial Sequence
  Description of Artificial Sequence: Synthetic oligonucleotide
gcuucccucuaccacugggcacuga

SEQ ID NO: 141321 - RNA, 25 nt, Artificial Sequence
  Description of Artificial Sequence: Synthetic oligonucleotide
agacgaagcucccugacagccgaga

SEQ ID NO: 141322 - RNA, 25 nt, Artificial Sequence
  Description of Artificial Sequence: Synthetic oligonucleotide
acuggcagcccuccaucugguccgu

SEQ ID NO: 141323 - RNA, 25 nt, Artificial Sequence
  Description of Artificial Sequence: Synthetic oligonucleotide
uacccucgccagaggccccccuaca

SEQ ID NO: 141324 - RNA, 25 nt, Artificial Sequence
  Description of Artificial Sequence: Synthetic oligonucleotide
aucaaccuccuggcgaugcccuggu

SEQ ID NO: 141325 - RNA, 25 nt, Artificial Sequence
  Description of Artificial Sequence: Synthetic oligonucleotide
uggagcagaugggugcucugggagu

SEQ ID NO: 141326 - RNA, 25 nt, Artificial Sequence
  Description of Artificial Sequence: Synthetic oligonucleotide
uccugugcuuccugauccaauggug

SEQ ID NO: 141327 - RNA, 25 nt, Artificial Sequence
  Description of Artificial Sequence: Synthetic oligonucleotide
gccaaacccuucaucuccccaagaa

SEQ ID NO: 141328 - RNA, 25 nt, Artificial Sequence
  Description of Artificial Sequence: Synthetic oligonucleotide
agcgcagcauaccccugggaccccu

SEQ ID NO: 141329 - RNA, 25 nt, Artificial Sequence
  Description of Artificial Sequence: Synthetic oligonucleotide
ucggccacugcccacucggggagcc

SEQ ID NO: 141330 - RNA, 25 nt, Artificial Sequence
  Description of Artificial Sequence: Synthetic oligonucleotide
cuucucuguuucuggggccuccccc

SEQ ID NO: 141331 - RNA, 25 nt, Artificial Sequence
  Description of Artificial Sequence: Synthetic oligonucleotide
caccauagcucugauucccacccca

SEQ ID NO: 141332 - RNA, 25 nt, Artificial Sequence
  Description of Artificial Sequence: Synthetic oligonucleotide
acauaggaguagccugacugagggg

SEQ ID NO: 141333 - RNA, 25 nt, Artificial Sequence
  Description of Artificial Sequence: Synthetic oligonucleotide
ggaaggggugggagagaagauacag

SEQ ID NO: 141334 - RNA, 25 nt, Artificial Sequence
  Description of Artificial Sequence: Synthetic oligonucleotide
gacauggaggaggggaggcugcucu

SEQ ID NO: 141335 - RNA, 25 nt, Artificial Sequence
  Description of Artificial Sequence: Synthetic oligonucleotide
uggcaaagucuucaaggcuuuuggg

SEQ ID NO: 141336 - RNA, 25 nt, Artificial Sequence
  Description of Artificial Sequence: Synthetic oligonucleotide
ggguccaggccuggggucaagaagg

SEQ ID NO: 141337 - RNA, 25 nt, Artificial Sequence
  Description of Artificial Sequence: Synthetic oligonucleotide
gaaaaugugugugagcaugugugug

SEQ ID NO: 141338 - RNA, 25 nt, Artificial Sequence
  Description of Artificial Sequence: Synthetic oligonucleotide
gagugaggcgugugugugagcgugu

SEQ ID NO: 141339 - RNA, 25 nt, Artificial Sequence
  Description of Artificial Sequence: Synthetic oligonucleotide
ugugugagugaggcgugugugugug

SEQ ID NO: 141340 - RNA, 25 nt, Artificial Sequence
  Description of Artificial Sequence: Synthetic oligonucleotide
gucuuuccuaggacccaccauaccc

SEQ ID NO: 141341 - RNA, 25 nt, Artificial Sequence
  Description of Artificial Sequence: Synthetic oligonucleotide
cuguguauguaugcauguuuuugua

SEQ ID NO: 141342 - RNA, 25 nt, Artificial Sequence
  Description of Artificial Sequence: Synthetic oligonucleotide
aaaaaggaagaaaauggaaaaaaau

SEQ ID NO: 141343 - RNA, 25 nt, Artificial Sequence
  Description of Artificial Sequence: Synthetic oligonucleotide
ucugaacaauaaauguuuuauuugc

SEQ ID NO: 141344 - RNA, 25 nt, Artificial Sequence
  Description of Artificial Sequence: Synthetic oligonucleotide
aucccauccugggcucggaggcuga

SEQ ID NO: 141345 - RNA, 25 nt, Artificial Sequence
  Description of Artificial Sequence: Synthetic oligonucleotide
acagugaccgcaggacccauccgac

SEQ ID NO: 141346 - RNA, 25 nt, Artificial Sequence
  Description of Artificial Sequence: Synthetic oligonucleotide
cucugggcccucgggggccaauccu

SEQ ID NO: 141347 - RNA, 25 nt, Artificial Sequence
  Description of Artificial Sequence: Synthetic oligonucleotide
uggggagcccccacacuccccucuu

SEQ ID NO: 141348 - RNA, 25 nt, Artificial Sequence
  Description of Artificial Sequence: Synthetic oligonucleotide
uccugccccauggcuuggagcccga

SEQ ID NO: 141349 - RNA, 25 nt, Artificial Sequence
  Description of Artificial Sequence: Synthetic oligonucleotide
aggcugggggcaccuugcccucucg

SEQ ID NO: 141350 - RNA, 25 nt, Artificial Sequence
  Description of Artificial Sequence: Synthetic oligonucleotide
gccugcagcccauucuccuccugga

SEQ ID NO: 141351 - RNA, 25 nt, Artificial Sequence
  Description of Artificial Sequence: Synthetic oligonucleotide
accccucaggcucucaugccccgcu

SEQ ID NO: 141352 - RNA, 25 nt, Artificial Sequence
  Description of Artificial Sequence: Synthetic oligonucleotide
ugcugacugugcccgggcuugggcc

SEQ ID NO: 141353 - RNA, 25 nt, Artificial Sequence
  Description of Artificial Sequence: Synthetic oligonucleotide
ccuugcccuuccacuuugcccaguc

SEQ ID NO: 141354 - RNA, 25 nt, Artificial Sequence
  Description of Artificial Sequence: Synthetic oligonucleotide
ccuuaaugaccaccgagcggcucuc

SEQ ID NO: 141355 - RNA, 25 nt, Artificial Sequence
  Description of Artificial Sequence: Synthetic oligonucleotide
cugggucaggccuccacuggccacu

SEQ ID NO: 141356 - RNA, 25 nt, Artificial Sequence
  Description of Artificial Sequence: Synthetic oligonucleotide
ugagccggacucgcucagagccccu

SEQ ID NO: 141357 - RNA, 25 nt, Artificial Sequence
  Description of Artificial Sequence: Synthetic oligonucleotide
ugccccccagugccaccgcuccccc

SEQ ID NO: 141358 - RNA, 25 nt, Artificial Sequence
  Description of Artificial Sequence: Synthetic oligonucleotide
caccgccgggccccaugcagccccg

SEQ ID NO: 141359 - RNA, 25 nt, Artificial Sequence
  Description of Artificial Sequence: Synthetic oligonucleotide
gccuggagcagcucaaaacucacgu

SEQ ID NO: 141360 - RNA, 25 nt, Artificial Sequence
  Description of Artificial Sequence: Synthetic oligonucleotide
uccaggugaucaagaggucagccaa

SEQ ID NO: 141361 - RNA, 25 nt, Artificial Sequence
  Description of Artificial Sequence: Synthetic oligonucleotide
agccgagugagaagccccggcugcg

SEQ ID NO: 141362 - RNA, 25 nt, Artificial Sequence
  Description of Artificial Sequence: Synthetic oligonucleotide
ggcagauacccucggcugaagaccu

SEQ ID NO: 141363 - RNA, 25 nt, Artificial Sequence
  Description of Artificial Sequence: Synthetic oligonucleotide
uggagacagauggcgggggaccggg

SEQ ID NO: 141364 - RNA, 25 nt, Artificial Sequence
  Description of Artificial Sequence: Synthetic oligonucleotide
gccaggugguggacgauggccugga

SEQ ID NO: 141365 - RNA, 25 nt, Artificial Sequence
  Description of Artificial Sequence: Synthetic oligonucleotide
agcacagggagcugggccaugggca

SEQ ID NO: 141366 - RNA, 25 nt, Artificial Sequence
  Description of Artificial Sequence: Synthetic oligonucleotide
agccugaggccagaggccccgcucc

SEQ ID NO: 141367 - RNA, 25 nt, Artificial Sequence
  Description of Artificial Sequence: Synthetic oligonucleotide
cucuccagcagcacccucagguguu

SEQ ID NO: 141368 - RNA, 25 nt, Artificial Sequence
  Description of Artificial Sequence: Synthetic oligonucleotide
ugcucugggaacagcagcgacuggc

SEQ ID NO: 141369 - RNA, 25 nt, Artificial Sequence
  Description of Artificial Sequence: Synthetic oligonucleotide
cugggcggcucccccggggcagcac

SEQ ID NO: 141370 - RNA, 25 nt, Artificial Sequence
  Description of Artificial Sequence: Synthetic oligonucleotide
ccggggacacugugcugcuuccucu

SEQ ID NO: 141371 - RNA, 25 nt, Artificial Sequence
  Description of Artificial Sequence: Synthetic oligonucleotide
uggcccagggugggcaccggccucu

SEQ ID NO: 141372 - RNA, 25 nt, Artificial Sequence
  Description of Artificial Sequence: Synthetic oligonucleotide
ugucccgggcucagucuuccccagc

SEQ ID NO: 141373 - RNA, 25 nt, Artificial Sequence
  Description of Artificial Sequence: Synthetic oligonucleotide
ccgcaccugccucacugucagcccc

SEQ ID NO: 141374 - RNA, 25 nt, Artificial Sequence
  Description of Artificial Sequence: Synthetic oligonucleotide
cagagccugccagccaggcccgagu

SEQ ID NO: 141375 - RNA, 25 nt, Artificial Sequence
  Description of Artificial Sequence: Synthetic oligonucleotide
uccucuccagcucagagaccccugc

SEQ ID NO: 141376 - RNA, 25 nt, Artificial Sequence
  Description of Artificial Sequence: Synthetic oligonucleotide
ccaggacccugcccuucaccacagg

SEQ ID NO: 141377 - RNA, 25 nt, Artificial Sequence
  Description of Artificial Sequence: Synthetic oligonucleotide
ggcugaucuaugacucggucaugcu

SEQ ID NO: 141378 - RNA, 25 nt, Artificial Sequence
  Description of Artificial Sequence: Synthetic oligonucleotide
ugaagcaccagugcuccugcgguga

SEQ ID NO: 141379 - RNA, 25 nt, Artificial Sequence
  Description of Artificial Sequence: Synthetic oligonucleotide
acaacagcaggcacccggagcacgc

SEQ ID NO: 141380 - RNA, 25 nt, Artificial Sequence
  Description of Artificial Sequence: Synthetic oligonucleotide
ccggccgcauccagagcaucugguc

SEQ ID NO: 141381 - RNA, 25 nt, Artificial Sequence
  Description of Artificial Sequence: Synthetic oligonucleotide
cccggcugcaggagcgggggcuccg

SEQ ID NO: 141382 - RNA, 25 nt, Artificial Sequence
  Description of Artificial Sequence: Synthetic oligonucleotide
ggagccagugugagugucuccgagg

SEQ ID NO: 141383 - RNA, 25 nt, Artificial Sequence
  Description of Artificial Sequence: Synthetic oligonucleotide
gccggaaggccucccuggaagagcu

SEQ ID NO: 141384 - RNA, 25 nt, Artificial Sequence
  Description of Artificial Sequence: Synthetic oligonucleotide
ugcagucgguccacucugagcggca

SEQ ID NO: 141385 - RNA, 25 nt, Artificial Sequence
  Description of Artificial Sequence: Synthetic oligonucleotide
acgugcuccucuacggcaccaaccc

SEQ ID NO: 141386 - RNA, 25 nt, Artificial Sequence
  Description of Artificial Sequence: Synthetic oligonucleotide
cgcucagccgccucaaacuggacaa

SEQ ID NO: 141387 - RNA, 25 nt, Artificial Sequence
  Description of Artificial Sequence: Synthetic oligonucleotide
acgggaagcuggcagggcuccuggc

SEQ ID NO: 141388 - RNA, 25 nt, Artificial Sequence
  Description of Artificial Sequence: Synthetic oligonucleotide
cacagcggauguuugugaugcugcc

SEQ ID NO: 141389 - RNA, 25 nt, Artificial Sequence
  Description of Artificial Sequence: Synthetic oligonucleotide
ccuguggugggguugggguggacac

SEQ ID NO: 141390 - RNA, 25 nt, Artificial Sequence
  Description of Artificial Sequence: Synthetic oligonucleotide
cugacaccaucuggaaugagcuuca

SEQ ID NO: 141391 - RNA, 25 nt, Artificial Sequence
  Description of Artificial Sequence: Synthetic oligonucleotide
auuccuccaaugcagcccgcugggc

SEQ ID NO: 141392 - RNA, 25 nt, Artificial Sequence
  Description of Artificial Sequence: Synthetic oligonucleotide
ccgcuggcagugucacugaccucgc

SEQ ID NO: 141393 - RNA, 25 nt, Artificial Sequence
  Description of Artificial Sequence: Synthetic oligonucleotide
ccuucaaaguggcuucucgugagcu

SEQ ID NO: 141394 - RNA, 25 nt, Artificial Sequence
  Description of Artificial Sequence: Synthetic oligonucleotide
uaaagaaugguuucgcuguggugcg

SEQ ID NO: 141395 - RNA, 25 nt, Artificial Sequence
  Description of Artificial Sequence: Synthetic oligonucleotide
ggcccccaggacaccaugcagauca

SEQ ID NO: 141396 - RNA, 25 nt, Artificial Sequence
  Description of Artificial Sequence: Synthetic oligonucleotide
auucaacagccaugggcuucugcuu

SEQ ID NO: 141397 - RNA, 25 nt, Artificial Sequence
  Description of Artificial Sequence: Synthetic oligonucleotide
ucuucaacucaguggccaucgccug

SEQ ID NO: 141398 - RNA, 25 nt, Artificial Sequence
  Description of Artificial Sequence: Synthetic oligonucleotide
gccggcagcugcaacagcagagcaa

SEQ ID NO: 141399 - RNA, 25 nt, Artificial Sequence
  Description of Artificial Sequence: Synthetic oligonucleotide
aggccagcaagauccucauuguaga

SEQ ID NO: 141400 - RNA, 25 nt, Artificial Sequence
  Description of Artificial Sequence: Synthetic oligonucleotide
acugggacgugcaccauggcaacgg

SEQ ID NO: 141401 - RNA, 25 nt, Artificial Sequence
  Description of Artificial Sequence: Synthetic oligonucleotide
gcacccagcaaaccuucuaccaaga

SEQ ID NO: 141402 - RNA, 25 nt, Artificial Sequence
  Description of Artificial Sequence: Synthetic oligonucleotide
accccagugugcucuacaucucccu

SEQ ID NO: 141403 - RNA, 25 nt, Artificial Sequence
  Description of Artificial Sequence: Synthetic oligonucleotide
ugcaucgccaugacgacggcaacuu

SEQ ID NO: 141404 - RNA, 25 nt, Artificial Sequence
  Description of Artificial Sequence: Synthetic oligonucleotide
ucuucccggggaguggggcugugga

SEQ ID NO: 141405 - RNA, 25 nt, Artificial Sequence
  Description of Artificial Sequence: Synthetic oligonucleotide
augagguaggggcuggcagcgguga

SEQ ID NO: 141406 - RNA, 25 nt, Artificial Sequence
  Description of Artificial Sequence: Synthetic oligonucleotide
agggcuucaaugucaauguggccug

SEQ ID NO: 141407 - RNA, 25 nt, Artificial Sequence
  Description of Artificial Sequence: Synthetic oligonucleotide
gggcuggaggucuggacccccccau

SEQ ID NO: 141408 - RNA, 25 nt, Artificial Sequence
  Description of Artificial Sequence: Synthetic oligonucleotide
ugggggauccugaguaccuggcugc

SEQ ID NO: 141409 - RNA, 25 nt, Artificial Sequence
  Description of Artificial Sequence: Synthetic oligonucleotide
cuuucaggauagucgugaugcccau

SEQ ID NO: 141410 - RNA, 25 nt, Artificial Sequence
  Description of Artificial Sequence: Synthetic oligonucleotide
ucgcccgagaguucucuccagaccu

SEQ ID NO: 141411 - RNA, 25 nt, Artificial Sequence
  Description of Artificial Sequence: Synthetic oligonucleotide
uaguccuggugucugcuggauuuga

SEQ ID NO: 141412 - RNA, 25 nt, Artificial Sequence
  Description of Artificial Sequence: Synthetic oligonucleotide
augcugcugagggucacccggcccc

SEQ ID NO: 141413 - RNA, 25 nt, Artificial Sequence
  Description of Artificial Sequence: Synthetic oligonucleotide
cacuggguggcuaccauguuucugc

SEQ ID NO: 141414 - RNA, 25 nt, Artificial Sequence
  Description of Artificial Sequence: Synthetic oligonucleotide
ccaaauguuuuggauacaugacgca

SEQ ID NO: 141415 - RNA, 25 nt, Artificial Sequence
  Description of Artificial Sequence: Synthetic oligonucleotide
agcaacugaugaaccuggcaggagg

SEQ ID NO: 141416 - RNA, 25 nt, Artificial Sequence
  Description of Artificial Sequence: Synthetic oligonucleotide
gcgcaguggugcuggccuuggaggg

SEQ ID NO: 141417 - RNA, 25 nt, Artificial Sequence
  Description of Artificial Sequence: Synthetic oligonucleotide
guggccaugaccucacagccaucug

SEQ ID NO: 141418 - RNA, 25 nt, Artificial Sequence
  Description of Artificial Sequence: Synthetic oligonucleotide
gugacgccucugaggccuguguggc

SEQ ID NO: 141419 - RNA, 25 nt, Artificial Sequence
  Description of Artificial Sequence: Synthetic oligonucleotide
cugcucuucuggguaacagggugga

SEQ ID NO: 141420 - RNA, 25 nt, Artificial Sequence
  Description of Artificial Sequence: Synthetic oligonucleotide
auccccuuucagaagaaggcuggaa

SEQ ID NO: 141421 - RNA, 25 nt, Artificial Sequence
  Description of Artificial Sequence: Synthetic oligonucleotide
aacagaaacccaaccucaaugccau

SEQ ID NO: 141422 - RNA, 25 nt, Artificial Sequence
  Description of Artificial Sequence: Synthetic oligonucleotide
uccgcucucuggaggccgugauccg

SEQ ID NO: 141423 - RNA, 25 nt, Artificial Sequence
  Description of Artificial Sequence: Synthetic oligonucleotide
gggugcacaguaaauacuggggcug

SEQ ID NO: 141424 - RNA, 25 nt, Artificial Sequence
  Description of Artificial Sequence: Synthetic oligonucleotide
gcaugcagcgccuggccuccugucc

SEQ ID NO: 141425 - RNA, 25 nt, Artificial Sequence
  Description of Artificial Sequence: Synthetic oligonucleotide
cagacuccugggugccuagagugcc

SEQ ID NO: 141426 - RNA, 25 nt, Artificial Sequence
  Description of Artificial Sequence: Synthetic oligonucleotide
caggggcugacaaagaagaagugga

SEQ ID NO: 141427 - RNA, 25 nt, Artificial Sequence
  Description of Artificial Sequence: Synthetic oligonucleotide
aggcagugaccgcacuggcgucccu

SEQ ID NO: 141428 - RNA, 25 nt, Artificial Sequence
  Description of Artificial Sequence: Synthetic oligonucleotide
ucucugugggcauccuggcugaaga

SEQ ID NO: 141429 - RNA, 25 nt, Artificial Sequence
  Description of Artificial Sequence: Synthetic oligonucleotide
auaggcccucggagcagcuggugga

SEQ ID NO: 141430 - RNA, 25 nt, Artificial Sequence
  Description of Artificial Sequence: Synthetic oligonucleotide
aggaggaagaaccuaugaaucucua

SEQ ID NO: 141431 - RNA, 25 nt, Artificial Sequence
  Description of Artificial Sequence: Synthetic oligonucleotide
aaggcucuggaaccaucugcccgcc

SEQ ID NO: 141432 - RNA, 25 nt, Artificial Sequence
  Description of Artificial Sequence: Synthetic oligonucleotide
ccaccaugcccuugggaccugguuc

SEQ ID NO: 141433 - RNA, 25 nt, Artificial Sequence
  Description of Artificial Sequence: Synthetic oligonucleotide
cucuucuaaccccuggcaauagccc

SEQ ID NO: 141434 - RNA, 25 nt, Artificial Sequence
  Description of Artificial Sequence: Synthetic oligonucleotide
cccauuccugggucuuuagagaucc

SEQ ID NO: 141435 - RNA, 25 nt, Artificial Sequence
  Description of Artificial Sequence: Synthetic oligonucleotide
cugugggcaaguaguuggaaccaga

SEQ ID NO: 141436 - RNA, 25 nt, Artificial Sequence
  Description of Artificial Sequence: Synthetic oligonucleotide
agaacagccugccugcuuugacagu

SEQ ID NO: 141437 - RNA, 25 nt, Artificial Sequence
  Description of Artificial Sequence: Synthetic oligonucleotide
uuaucccagggagcgugagaaaauc

SEQ ID NO: 141438 - RNA, 25 nt, Artificial Sequence
  Description of Artificial Sequence: Synthetic oligonucleotide
cccugggucuagaaugggaacugga

SEQ ID NO: 141439 - RNA, 25 nt, Artificial Sequence
  Description of Artificial Sequence: Synthetic oligonucleotide
agaggacccugagaggagacgggcu

SEQ ID NO: 141440 - RNA, 25 nt, Artificial Sequence
  Description of Artificial Sequence: Synthetic oligonucleotide
ugggcggcgacccccacagggcucu

SEQ ID NO: 141441 - RNA, 25 nt, Artificial Sequence
  Description of Artificial Sequence: Synthetic oligonucleotide
ucgagaacagauucuccccuccagu

SEQ ID NO: 141442 - RNA, 25 nt, Artificial Sequence
  Description of Artificial Sequence: Synthetic oligonucleotide
uaugggcccuggcuguggcccccau

SEQ ID NO: 141443 - RNA, 25 nt, Artificial Sequence
  Description of Artificial Sequence: Synthetic oligonucleotide
uuccucaggacugcacagaggagga

SEQ ID NO: 141444 - RNA, 25 nt, Artificial Sequence
  Description of Artificial Sequence: Synthetic oligonucleotide
acuggcuccggcuccgucgggcuca

SEQ ID NO: 141445 - RNA, 25 nt, Artificial Sequence
  Description of Artificial Sequence: Synthetic oligonucleotide
acccuuaaccacuauuccuggcucu

SEQ ID NO: 141446 - RNA, 25 nt, Artificial Sequence
  Description of Artificial Sequence: Synthetic oligonucleotide
ugcaaaccccagacuuugcacacag

SEQ ID NO: 141447 - RNA, 25 nt, Artificial Sequence
  Description of Artificial Sequence: Synthetic oligonucleotide
gccucaggcuccacacagaaaugug

SEQ ID NO: 141448 - RNA, 25 nt, Artificial Sequence
  Description of Artificial Sequence: Synthetic oligonucleotide
gaacuuggccucagacaggcuggcc

SEQ ID NO: 141449 - RNA, 25 nt, Artificial Sequence
  Description of Artificial Sequence: Synthetic oligonucleotide
ccuuccuaggcucuaggggcuaggg

SEQ ID NO: 141450 - RNA, 25 nt, Artificial Sequence
  Description of Artificial Sequence: Synthetic oligonucleotide
ggggaguggggagccaagagguccc

SEQ ID NO: 141451 - RNA, 25 nt, Artificial Sequence
  Description of Artificial Sequence: Synthetic oligonucleotide
cauauuccugagugcagggguaguc

SEQ ID NO: 141452 - RNA, 25 nt, Artificial Sequence
  Description of Artificial Sequence: Synthetic oligonucleotide
cccucucaccugcuuccucagacga

SEQ ID NO: 141453 - RNA, 25 nt, Artificial Sequence
  Description of Artificial Sequence: Synthetic oligonucleotide
acucuggaagcuucccucuaccacu

SEQ ID NO: 141454 - RNA, 25 nt, Artificial Sequence
  Description of Artificial Sequence: Synthetic oligonucleotide
ugggcacugagacgaagcucccuga

SEQ ID NO: 141455 - RNA, 25 nt, Artificial Sequence
  Description of Artificial Sequence: Synthetic oligonucleotide
acagccgagacuggcagcccuccau

SEQ ID NO: 141456 - RNA, 25 nt, Artificial Sequence
  Description of Artificial Sequence: Synthetic oligonucleotide
ucugguccguacccucgccagaggc

SEQ ID NO: 141457 - RNA, 25 nt, Artificial Sequence
  Description of Artificial Sequence: Synthetic oligonucleotide
ccccccuacaucaaccuccuggcga

SEQ ID NO: 141458 - RNA, 25 nt, Artificial Sequence
  Description of Artificial Sequence: Synthetic oligonucleotide
augcccugguggagcagaugggugc

SEQ ID NO: 141459 - RNA, 25 nt, Artificial Sequence
  Description of Artificial Sequence: Synthetic oligonucleotide
cucugggaguccugugcuuccugau

SEQ ID NO: 141460 - RNA, 25 nt, Artificial Sequence
  Description of Artificial Sequence: Synthetic oligonucleotide
uccaauggugccaaacccuucaucu

SEQ ID NO: 141461 - RNA, 25 nt, Artificial Sequence
  Description of Artificial Sequence: Synthetic oligonucleotide
uccccaagaagcgcagcauaccccu

SEQ ID NO: 141462 - RNA, 25 nt, Artificial Sequence
  Description of Artificial Sequence: Synthetic oligonucleotide
ugggaccccucggccacugcccacu

SEQ ID NO: 141463 - RNA, 25 nt, Artificial Sequence
  Description of Artificial Sequence: Synthetic oligonucleotide
ucggggagccuucucuguuucuggg

SEQ ID NO: 141464 - RNA, 25 nt, Artificial Sequence
  Description of Artificial Sequence: Synthetic oligonucleotide
ggccucccccaccauagcucugauu

SEQ ID NO: 141465 - RNA, 25 nt, Artificial Sequence
  Description of Artificial Sequence: Synthetic oligonucleotide
ucccaccccacauaggaguagccug

SEQ ID NO: 141466 - RNA, 25 nt, Artificial Sequence
  Description of Artificial Sequence: Synthetic oligonucleotide
gacugagggggaaggggugggagag

SEQ ID NO: 141467 - RNA, 25 nt, Artificial Sequence
  Description of Artificial Sequence: Synthetic oligonucleotide
gaagauacagacauggaggagggga

SEQ ID NO: 141468 - RNA, 25 nt, Artificial Sequence
  Description of Artificial Sequence: Synthetic oligonucleotide
aggcugcucuggcaaagucuucaag

SEQ ID NO: 141469 - RNA, 25 nt, Artificial Sequence
  Description of Artificial Sequence: Synthetic oligonucleotide
ggcuuuuggggguccaggccugggg

SEQ ID NO: 141470 - RNA, 25 nt, Artificial Sequence
  Description of Artificial Sequence: Synthetic oligonucleotide
gucaagaaggaaaaugugugugagc

SEQ ID NO: 141471 - RNA, 25 nt, Artificial Sequence
  Description of Artificial Sequence: Synthetic oligonucleotide
caugugugugagugaggcgugugug

SEQ ID NO: 141472 - RNA, 25 nt, Artificial Sequence
  Description of Artificial Sequence: Synthetic oligonucleotide
gugagcgugugugugagugaggcgu

SEQ ID NO: 141473 - RNA, 25 nt, Artificial Sequence
  Description of Artificial Sequence: Synthetic oligonucleotide
ugugugugugucuuuccuaggaccc

SEQ ID NO: 141474 - RNA, 25 nt, Artificial Sequence
  Description of Artificial Sequence: Synthetic oligonucleotide
caccauacccuguguauguaugcau

SEQ ID NO: 141475 - RNA, 25 nt, Artificial Sequence
  Description of Artificial Sequence: Synthetic oligonucleotide
uguuuuuguaaaaaggaagaaaaug

SEQ ID NO: 141476 - RNA, 25 nt, Artificial Sequence
  Description of Artificial Sequence: Synthetic oligonucleotide
ggaaaaaaaucugaacaauaaaugu

SEQ ID NO: 141477 - RNA, 25 nt, Artificial Sequence
  Description of Artificial Sequence: Synthetic oligonucleotide
auaauaccuaccuugcaggaccacg

SEQ ID NO: 141478 - RNA, 25 nt, Artificial Sequence
  Description of Artificial Sequence: Synthetic oligonucleotide
gacaggauuaagugaggaaaaaccc

SEQ ID NO: 141479 - RNA, 25 nt, Artificial Sequence
  Description of Artificial Sequence: Synthetic oligonucleotide
cccaugagaguguuuugccauuguc

SEQ ID NO: 141480 - RNA, 25 nt, Artificial Sequence
  Description of Artificial Sequence: Synthetic oligonucleotide
caagugagccugagggaggcugagg

SEQ ID NO: 141481 - RNA, 25 nt, Artificial Sequence
  Description of Artificial Sequence: Synthetic oligonucleotide
gggggaucaggcuguaucaugcccc

SEQ ID NO: 141482 - RNA, 25 nt, Artificial Sequence
  Description of Artificial Sequence: Synthetic oligonucleotide
ccgaggacaaacuuuccaguuuacc

SEQ ID NO: 141483 - RNA, 25 nt, Artificial Sequence
  Description of Artificial Sequence: Synthetic oligonucleotide
ccugcucccucucucugucccuagg

SEQ ID NO: 141484 - RNA, 25 nt, Artificial Sequence
  Description of Artificial Sequence: Synthetic oligonucleotide
gcugccccaggcccugugcagacac

SEQ ID NO: 141485 - RNA, 25 nt, Artificial Sequence
  Description of Artificial Sequence: Synthetic oligonucleotide
caccaggcccucagccgcagcccau

SEQ ID NO: 141486 - RNA, 25 nt, Artificial Sequence
  Description of Artificial Sequence: Synthetic oligonucleotide
uggaccugcgggugggccagcggcc

SEQ ID NO: 141487 - RNA, 25 nt, Artificial Sequence
  Description of Artificial Sequence: Synthetic oligonucleotide
ccccaguggagcccccaccagagcc

SEQ ID NO: 141488 - RNA, 25 nt, Artificial Sequence
  Description of Artificial Sequence: Synthetic oligonucleotide
ccacauugcuggcccugcagcgucc

SEQ ID NO: 141489 - RNA, 25 nt, Artificial Sequence
  Description of Artificial Sequence: Synthetic oligonucleotide
cccagcgccugcaccaccaccucuu

SEQ ID NO: 141490 - RNA, 25 nt, Artificial Sequence
  Description of Artificial Sequence: Synthetic oligonucleotide
uccuagcaggccugcagcagcagcg

SEQ ID NO: 141491 - RNA, 25 nt, Artificial Sequence
  Description of Artificial Sequence: Synthetic oligonucleotide
gcucgguggagcccaugaggcucuc

SEQ ID NO: 141492 - RNA, 25 nt, Artificial Sequence
  Description of Artificial Sequence: Synthetic oligonucleotide
ccauggacacgccgaugcccgaguu

SEQ ID NO: 141493 - RNA, 25 nt, Artificial Sequence
  Description of Artificial Sequence: Synthetic oligonucleotide
ugcaggugggaccccaggaacaaga

SEQ ID NO: 141494 - RNA, 25 nt, Artificial Sequence
  Description of Artificial Sequence: Synthetic oligonucleotide
agcugcggcagcuucuccacaagga

SEQ ID NO: 141495 - RNA, 25 nt, Artificial Sequence
  Description of Artificial Sequence: Synthetic oligonucleotide
acaagagcaagcgaagugcuguagc

SEQ ID NO: 141496 - RNA, 25 nt, Artificial Sequence
  Description of Artificial Sequence: Synthetic oligonucleotide
ccagcagcguggucaagcagaagcu

SEQ ID NO: 141497 - RNA, 25 nt, Artificial Sequence
  Description of Artificial Sequence: Synthetic oligonucleotide
uagcggaggugauucugaaaaaaca

SEQ ID NO: 141498 - RNA, 25 nt, Artificial Sequence
  Description of Artificial Sequence: Synthetic oligonucleotide
agcaggcggcccuagaaagaacagu

SEQ ID NO: 141499 - RNA, 25 nt, Artificial Sequence
  Description of Artificial Sequence: Synthetic oligonucleotide
uccaucccaacagccccggcauucc

SEQ ID NO: 141500 - RNA, 25 nt, Artificial Sequence
  Description of Artificial Sequence: Synthetic oligonucleotide
ccuacagaacccuggagccccugga

SEQ ID NO: 141501 - RNA, 25 nt, Artificial Sequence
  Description of Artificial Sequence: Synthetic oligonucleotide
agacggaaggagccacccgcuccau

SEQ ID NO: 141502 - RNA, 25 nt, Artificial Sequence
  Description of Artificial Sequence: Synthetic oligonucleotide
ugcucagcagcuuuuugccuccugu

SEQ ID NO: 141503 - RNA, 25 nt, Artificial Sequence
  Description of Artificial Sequence: Synthetic oligonucleotide
uucccagccugcccagugacccccc

SEQ ID NO: 141504 - RNA, 25 nt, Artificial Sequence
  Description of Artificial Sequence: Synthetic oligonucleotide
cagagcacuucccucugcgcaagac

SEQ ID NO: 141505 - RNA, 25 nt, Artificial Sequence
  Description of Artificial Sequence: Synthetic oligonucleotide
cagucucugagcccaaccugaagcu

SEQ ID NO: 141506 - RNA, 25 nt, Artificial Sequence
  Description of Artificial Sequence: Synthetic oligonucleotide
ugcgcuauaagcccaagaagucccu

SEQ ID NO: 141507 - RNA, 25 nt, Artificial Sequence
  Description of Artificial Sequence: Synthetic oligonucleotide
uggagcggaggaagaauccacugcu

SEQ ID NO: 141508 - RNA, 25 nt, Artificial Sequence
  Description of Artificial Sequence: Synthetic oligonucleotide
uccgaaaggagagugcgccccccag

SEQ ID NO: 141509 - RNA, 25 nt, Artificial Sequence
  Description of Artificial Sequence: Synthetic oligonucleotide
gccuccggcggcggcccgcagagac

SEQ ID NO: 141510 - RNA, 25 nt, Artificial Sequence
  Description of Artificial Sequence: Synthetic oligonucleotide
cccucggagacuccuccccaaguag

SEQ ID NO: 141511 - RNA, 25 nt, Artificial Sequence
  Description of Artificial Sequence: Synthetic oligonucleotide
guagcagcacgcccgcaucagggug

SEQ ID NO: 141512 - RNA, 25 nt, Artificial Sequence
  Description of Artificial Sequence: Synthetic oligonucleotide
gcagcucccccaaugacagcgagca

SEQ ID NO: 141513 - RNA, 25 nt, Artificial Sequence
  Description of Artificial Sequence: Synthetic oligonucleotide
acggccccaaucccauccugggcuc

SEQ ID NO: 141514 - RNA, 25 nt, Artificial Sequence
  Description of Artificial Sequence: Synthetic oligonucleotide
cggaggcgcucuugggccagcggcu

SEQ ID NO: 141515 - RNA, 25 nt, Artificial Sequence
  Description of Artificial Sequence: Synthetic oligonucleotide
ugcggcugcaggagacuucuguggc

SEQ ID NO: 141516 - RNA, 25 nt, Artificial Sequence
  Description of Artificial Sequence: Synthetic oligonucleotide
ccccguucgccuugccgacaguguc

SEQ ID NO: 141517 - RNA, 25 nt, Artificial Sequence
  Description of Artificial Sequence: Synthetic oligonucleotide
ccuugcugcccgcaaucacucuggg

SEQ ID NO: 141518 - RNA, 25 nt, Artificial Sequence
  Description of Artificial Sequence: Synthetic oligonucleotide
ggcugcccgccccugccagggcuga

SEQ ID NO: 141519 - RNA, 25 nt, Artificial Sequence
  Description of Artificial Sequence: Synthetic oligonucleotide
cggaggcugacagugaccgcaggac

SEQ ID NO: 141520 - RNA, 25 nt, Artificial Sequence
  Description of Artificial Sequence: Synthetic oligonucleotide
cccauccgacucugggcccucgggg

SEQ ID NO: 141521 - RNA, 25 nt, Artificial Sequence
  Description of Artificial Sequence: Synthetic oligonucleotide
ggccaauccuggggagcccccacac

SEQ ID NO: 141522 - RNA, 25 nt, Artificial Sequence
  Description of Artificial Sequence: Synthetic oligonucleotide
cuccccucuuccugccccauggcuu

SEQ ID NO: 141523 - RNA, 25 nt, Artificial Sequence
  Description of Artificial Sequence: Synthetic oligonucleotide
uggagcccgaggcugggggcaccuu

SEQ ID NO: 141524 - RNA, 25 nt, Artificial Sequence
  Description of Artificial Sequence: Synthetic oligonucleotide
ugcccucucgccugcagcccauucu

SEQ ID NO: 141525 - RNA, 25 nt, Artificial Sequence
  Description of Artificial Sequence: Synthetic oligonucleotide
uccuccuggaccccucaggcucuca

SEQ ID NO: 141526 - RNA, 25 nt, Artificial Sequence
  Description of Artificial Sequence: Synthetic oligonucleotide
augccccgcugcugacugugcccgg

SEQ ID NO: 141527 - RNA, 25 nt, Artificial Sequence
  Description of Artificial Sequence: Synthetic oligonucleotide
ggcuugggcccuugcccuuccacuu

SEQ ID NO: 141528 - RNA, 25 nt, Artificial Sequence
  Description of Artificial Sequence: Synthetic oligonucleotide
uugcccaguccuuaaugaccaccga

SEQ ID NO: 141529 - RNA, 25 nt, Artificial Sequence
  Description of Artificial Sequence: Synthetic oligonucleotide
agcggcucucugggucaggccucca

SEQ ID NO: 141530 - RNA, 25 nt, Artificial Sequence
  Description of Artificial Sequence: Synthetic oligonucleotide
acuggccacugagccggacucgcuc

SEQ ID NO: 141531 - RNA, 25 nt, Artificial Sequence
  Description of Artificial Sequence: Synthetic oligonucleotide
cagagccccugccccccagugccac

SEQ ID NO: 141532 - RNA, 25 nt, Artificial Sequence
  Description of Artificial Sequence: Synthetic oligonucleotide
ccgcucccccaccgccgggccccau

SEQ ID NO: 141533 - RNA, 25 nt, Artificial Sequence
  Description of Artificial Sequence: Synthetic oligonucleotide
ugcagccccgccuggagcagcucaa

SEQ ID NO: 141534 - RNA, 25 nt, Artificial Sequence
  Description of Artificial Sequence: Synthetic oligonucleotide
aaacucacguccaggugaucaagag

SEQ ID NO: 141535 - RNA, 25 nt, Artificial Sequence
  Description of Artificial Sequence: Synthetic oligonucleotide
ggucagccaagccgagugagaagcc

SEQ ID NO: 141536 - RNA, 25 nt, Artificial Sequence
  Description of Artificial Sequence: Synthetic oligonucleotide
cccggcugcggcagauacccucggc

SEQ ID NO: 141537 - RNA, 25 nt, Artificial Sequence
  Description of Artificial Sequence: Synthetic oligonucleotide
cugaagaccuggagacagauggcgg

SEQ ID NO: 141538 - RNA, 25 nt, Artificial Sequence
  Description of Artificial Sequence: Synthetic oligonucleotide
ggggaccgggccaggugguggacga

SEQ ID NO: 141539 - RNA, 25 nt, Artificial Sequence
  Description of Artificial Sequence: Synthetic oligonucleotide
auggccuggagcacagggagcuggg

SEQ ID NO: 141540 - RNA, 25 nt, Artificial Sequence
  Description of Artificial Sequence: Synthetic oligonucleotide
gccaugggcagccugaggccagagg

SEQ ID NO: 141541 - RNA, 25 nt, Artificial Sequence
  Description of Artificial Sequence: Synthetic oligonucleotide
gccccgcuccucuccagcagcaccc

SEQ ID NO: 141542 - RNA, 25 nt, Artificial Sequence
  Description of Artificial Sequence: Synthetic oligonucleotide
cucagguguugcucugggaacagca

SEQ ID NO: 141543 - RNA, 25 nt, Artificial Sequence
  Description of Artificial Sequence: Synthetic oligonucleotide
agcgacuggcugggcggcucccccg

SEQ ID NO: 141544 - RNA, 25 nt, Artificial Sequence
  Description of Artificial Sequence: Synthetic oligonucleotide
ggggcagcaccggggacacugugcu

SEQ ID NO: 141545 - RNA, 25 nt, Artificial Sequence
  Description of Artificial Sequence: Synthetic oligonucleotide
ugcuuccucuggcccagggugggca

SEQ ID NO: 141546 - RNA, 25 nt, Artificial Sequence
  Description of Artificial Sequence: Synthetic oligonucleotide
accggccucugucccgggcucaguc

SEQ ID NO: 141547 - RNA, 25 nt, Artificial Sequence
  Description of Artificial Sequence: Synthetic oligonucleotide
cuuccccagccgcaccugccucacu

SEQ ID NO: 141548 - RNA, 25 nt, Artificial Sequence
  Description of Artificial Sequence: Synthetic oligonucleotide
ugucagccccagagccugccagcca

SEQ ID NO: 141549 - RNA, 25 nt, Artificial Sequence
  Description of Artificial Sequence: Synthetic oligonucleotide
aggcccgaguccucuccagcucaga

SEQ ID NO: 141550 - RNA, 25 nt, Artificial Sequence
  Description of Artificial Sequence: Synthetic oligonucleotide
agaccccugccaggacccugcccuu

SEQ ID NO: 141551 - RNA, 25 nt, Artificial Sequence
  Description of Artificial Sequence: Synthetic oligonucleotide
ucaccacagggcugaucuaugacuc

SEQ ID NO: 141552 - RNA, 25 nt, Artificial Sequence
  Description of Artificial Sequence: Synthetic oligonucleotide
cggucaugcugaagcaccagugcuc

SEQ ID NO: 141553 - RNA, 25 nt, Artificial Sequence
  Description of Artificial Sequence: Synthetic oligonucleotide
ccugcggugacaacagcaggcaccc

SEQ ID NO: 141554 - RNA, 25 nt, Artificial Sequence
  Description of Artificial Sequence: Synthetic oligonucleotide
cggagcacgccggccgcauccagag

SEQ ID NO: 141555 - RNA, 25 nt, Artificial Sequence
  Description of Artificial Sequence: Synthetic oligonucleotide
gcaucuggucccggcugcaggagcg

SEQ ID NO: 141556 - RNA, 25 nt, Artificial Sequence
  Description of Artificial Sequence: Synthetic oligonucleotide
gggggcuccggagccagugugagug

SEQ ID NO: 141557 - RNA, 25 nt, Artificial Sequence
  Description of Artificial Sequence: Synthetic oligonucleotide
gucuccgaggccggaaggccucccu

SEQ ID NO: 141558 - RNA, 25 nt, Artificial Sequence
  Description of Artificial Sequence: Synthetic oligonucleotide
uggaagagcugcagucgguccacuc

SEQ ID NO: 141559 - RNA, 25 nt, Artificial Sequence
  Description of Artificial Sequence: Synthetic oligonucleotide
cugagcggcacgugcuccucuacgg

SEQ ID NO: 141560 - RNA, 25 nt, Artificial Sequence
  Description of Artificial Sequence: Synthetic oligonucleotide
gcaccaacccgcucagccgccucaa

SEQ ID NO: 141561 - RNA, 25 nt, Artificial Sequence
  Description of Artificial Sequence: Synthetic oligonucleotide
aacuggacaacgggaagcuggcagg

SEQ ID NO: 141562 - RNA, 25 nt, Artificial Sequence
  Description of Artificial Sequence: Synthetic oligonucleotide
ggcuccuggcacagcggauguuugu

SEQ ID NO: 141563 - RNA, 25 nt, Artificial Sequence
  Description of Artificial Sequence: Synthetic oligonucleotide
ugaugcugcccuguggugggguugg

SEQ ID NO: 141564 - RNA, 25 nt, Artificial Sequence
  Description of Artificial Sequence: Synthetic oligonucleotide
ggguggacacugacaccaucuggaa

SEQ ID NO: 141565 - RNA, 25 nt, Artificial Sequence
  Description of Artificial Sequence: Synthetic oligonucleotide
augagcuucauuccuccaaugcagc

SEQ ID NO: 141566 - RNA, 25 nt, Artificial Sequence
  Description of Artificial Sequence: Synthetic oligonucleotide
cccgcugggccgcuggcagugucac

SEQ ID NO: 141567 - RNA, 25 nt, Artificial Sequence
  Description of Artificial Sequence: Synthetic oligonucleotide
cugaccucgccuucaaaguggcuuc

SEQ ID NO: 141568 - RNA, 25 nt, Artificial Sequence
  Description of Artificial Sequence: Synthetic oligonucleotide
cucgugagcuaaagaaugguuucgc

SEQ ID NO: 141569 - RNA, 25 nt, Artificial Sequence
  Description of Artificial Sequence: Synthetic oligonucleotide
cuguggugcggcccccaggacacca

SEQ ID NO: 141570 - RNA, 25 nt, Artificial Sequence
  Description of Artificial Sequence: Synthetic oligonucleotide
augcagaucauucaacagccauggg

SEQ ID NO: 141571 - RNA, 25 nt, Artificial Sequence
  Description of Artificial Sequence: Synthetic oligonucleotide
gcuucugcuucuucaacucaguggc

SEQ ID NO: 141572 - RNA, 25 nt, Artificial Sequence
  Description of Artificial Sequence: Synthetic oligonucleotide
ccaucgccugccggcagcugcaaca

SEQ ID NO: 141573 - RNA, 25 nt, Artificial Sequence
  Description of Artificial Sequence: Synthetic oligonucleotide
agcagagcaaggccagcaagauccu

SEQ ID NO: 141574 - RNA, 25 nt, Artificial Sequence
  Description of Artificial Sequence: Synthetic oligonucleotide
ucauuguagacugggacgugcacca

SEQ ID NO: 141575 - RNA, 25 nt, Artificial Sequence
  Description of Artificial Sequence: Synthetic oligonucleotide
auggcaacggcacccagcaaaccuu

SEQ ID NO: 141576 - RNA, 25 nt, Artificial Sequence
  Description of Artificial Sequence: Synthetic oligonucleotide
ucuaccaagaccccagugugcucua

SEQ ID NO: 141577 - RNA, 25 nt, Artificial Sequence
  Description of Artificial Sequence: Synthetic oligonucleotide
acaucucccugcaucgccaugacga

SEQ ID NO: 141578 - RNA, 25 nt, Artificial Sequence
  Description of Artificial Sequence: Synthetic oligonucleotide
acggcaacuucuucccggggagugg

SEQ ID NO: 141579 - RNA, 25 nt, Artificial Sequence
  Description of Artificial Sequence: Synthetic oligonucleotide
gggcuguggaugagguaggggcugg

SEQ ID NO: 141580 - RNA, 25 nt, Artificial Sequence
  Description of Artificial Sequence: Synthetic oligonucleotide
gcagcggugagggcuucaaugucaa

SEQ ID NO: 141581 - RNA, 25 nt, Artificial Sequence
  Description of Artificial Sequence: Synthetic oligonucleotide
auguggccugggcuggaggucugga

SEQ ID NO: 141582 - RNA, 25 nt, Artificial Sequence
  Description of Artificial Sequence: Synthetic oligonucleotide
acccccccaugggggauccugagua

SEQ ID NO: 141583 - RNA, 25 nt, Artificial Sequence
  Description of Artificial Sequence: Synthetic oligonucleotide
accuggcugcuuucaggauagucgu

SEQ ID NO: 141584 - RNA, 25 nt, Artificial Sequence
  Description of Artificial Sequence: Synthetic oligonucleotide
ugaugcccaucgcccgagaguucuc

SEQ ID NO: 141585 - RNA, 25 nt, Artificial Sequence
  Description of Artificial Sequence: Synthetic oligonucleotide
cuccagaccuaguccuggugucugc

SEQ ID NO: 141586 - RNA, 25 nt, Artificial Sequence
  Description of Artificial Sequence: Synthetic oligonucleotide
cuggauuugaugcugcugaggguca

SEQ ID NO: 141587 - RNA, 25 nt, Artificial Sequence
  Description of Artificial Sequence: Synthetic oligonucleotide
acccggccccacuggguggcuacca

SEQ ID NO: 141588 - RNA, 25 nt, Artificial Sequence
  Description of Artificial Sequence: Synthetic oligonucleotide
auguuucugccaaauguuuuggaua

SEQ ID NO: 141589 - RNA, 25 nt, Artificial Sequence
  Description of Artificial Sequence: Synthetic oligonucleotide
acaugacgcagcaacugaugaaccu

SEQ ID NO: 141590 - RNA, 25 nt, Artificial Sequence
  Description of Artificial Sequence: Synthetic oligonucleotide
uggcaggaggcgcaguggugcuggc

SEQ ID NO: 141591 - RNA, 25 nt, Artificial Sequence
  Description of Artificial Sequence: Synthetic oligonucleotide
ccuuggaggguggccaugaccucac

SEQ ID NO: 141592 - RNA, 25 nt, Artificial Sequence
  Description of Artificial Sequence: Synthetic oligonucleotide
cagccaucugugacgccucugaggc

SEQ ID NO: 141593 - RNA, 25 nt, Artificial Sequence
  Description of Artificial Sequence: Synthetic oligonucleotide
ccuguguggcugcucuucuggguaa

SEQ ID NO: 141594 - RNA, 25 nt, Artificial Sequence
  Description of Artificial Sequence: Synthetic oligonucleotide
acaggguggauccccuuucagaaga

SEQ ID NO: 141595 - RNA, 25 nt, Artificial Sequence
  Description of Artificial Sequence: Synthetic oligonucleotide
aaggcuggaaacagaaacccaaccu

SEQ ID NO: 141596 - RNA, 25 nt, Artificial Sequence
  Description of Artificial Sequence: Synthetic oligonucleotide
ucaaugccauccgcucucuggaggc

SEQ ID NO: 141597 - RNA, 25 nt, Artificial Sequence
  Description of Artificial Sequence: Synthetic oligonucleotide
ccgugauccgggugcacaguaaaua

SEQ ID NO: 141598 - RNA, 25 nt, Artificial Sequence
  Description of Artificial Sequence: Synthetic oligonucleotide
acuggggcugcaugcagcgccuggc

SEQ ID NO: 141599 - RNA, 25 nt, Artificial Sequence
  Description of Artificial Sequence: Synthetic oligonucleotide
ccuccuguccagacuccugggugcc

SEQ ID NO: 141600 - RNA, 25 nt, Artificial Sequence
  Description of Artificial Sequence: Synthetic oligonucleotide
cuagagugccaggggcugacaaaga

SEQ ID NO: 141601 - RNA, 25 nt, Artificial Sequence
  Description of Artificial Sequence: Synthetic oligonucleotide
aagaaguggaggcagugaccgcacu

SEQ ID NO: 141602 - RNA, 25 nt, Artificial Sequence
  Description of Artificial Sequence: Synthetic oligonucleotide
uggcgucccucucugugggcauccu

SEQ ID NO: 141603 - RNA, 25 nt, Artificial Sequence
  Description of Artificial Sequence: Synthetic oligonucleotide
uggcugaagauaggcccucggagca

SEQ ID NO: 141604 - RNA, 25 nt, Artificial Sequence
  Description of Artificial Sequence: Synthetic oligonucleotide
agcugguggaggaggaagaaccuau

SEQ ID NO: 141605 - RNA, 25 nt, Artificial Sequence
  Description of Artificial Sequence: Synthetic oligonucleotide
ugaaucucuaaggcucuggaaccau

SEQ ID NO: 141606 - RNA, 25 nt, Artificial Sequence
  Description of Artificial Sequence: Synthetic oligonucleotide
ucugcccgcccaccaugcccuuggg

SEQ ID NO: 141607 - RNA, 25 nt, Artificial Sequence
  Description of Artificial Sequence: Synthetic oligonucleotide
gaccugguucucuucuaaccccugg

SEQ ID NO: 141608 - RNA, 25 nt, Artificial Sequence
  Description of Artificial Sequence: Synthetic oligonucleotide
gcaauagcccccauuccugggucuu

SEQ ID NO: 141609 - RNA, 25 nt, Artificial Sequence
  Description of Artificial Sequence: Synthetic oligonucleotide
uuagagauccugugggcaaguaguu

SEQ ID NO: 141610 - RNA, 25 nt, Artificial Sequence
  Description of Artificial Sequence: Synthetic oligonucleotide
uggaaccagagaacagccugccugc

SEQ ID NO: 141611 - RNA, 25 nt, Artificial Sequence
  Description of Artificial Sequence: Synthetic oligonucleotide
cuuugacaguuaucccagggagcgu

SEQ ID NO: 141612 - RNA, 25 nt, Artificial Sequence
  Description of Artificial Sequence: Synthetic oligonucleotide
ugagaaaaucccugggucuagaaug

SEQ ID NO: 141613 - RNA, 25 nt, Artificial Sequence
  Description of Artificial Sequence: Synthetic oligonucleotide
gggaacuggagaggacccugagagg

SEQ ID NO: 141614 - RNA, 25 nt, Artificial Sequence
  Description of Artificial Sequence: Synthetic oligonucleotide
gagacgggcugggcggcgaccccca

SEQ ID NO: 141615 - RNA, 25 nt, Artificial Sequence
  Description of Artificial Sequence: Synthetic oligonucleotide
acagggcucucgagaacagauucuc

SEQ ID NO: 141616 - RNA, 25 nt, Artificial Sequence
  Description of Artificial Sequence: Synthetic oligonucleotide
ccccuccaguaugggcccuggcugu

SEQ ID NO: 141617 - RNA, 25 nt, Artificial Sequence
  Description of Artificial Sequence: Synthetic oligonucleotide
uggcccccauuccucaggacugcac

SEQ ID NO: 141618 - RNA, 25 nt, Artificial Sequence
  Description of Artificial Sequence: Synthetic oligonucleotide
cagaggaggacuggcuccggcuccg

SEQ ID NO: 141619 - RNA, 25 nt, Artificial Sequence
  Description of Artificial Sequence: Synthetic oligonucleotide
gucgggcucacccuuaaccacuauu

SEQ ID NO: 141620 - RNA, 25 nt, Artificial Sequence
  Description of Artificial Sequence: Synthetic oligonucleotide
uccuggcucugcaaaccccagacuu

SEQ ID NO: 141621 - RNA, 25 nt, Artificial Sequence
  Description of Artificial Sequence: Synthetic oligonucleotide
uugcacacagccucaggcuccacac

SEQ ID NO: 141622 - RNA, 25 nt, Artificial Sequence
  Description of Artificial Sequence: Synthetic oligonucleotide
cagaaaugugaacuuggccucagac

SEQ ID NO: 141623 - RNA, 25 nt, Artificial Sequence
  Description of Artificial Sequence: Synthetic oligonucleotide
caggcuggcccuuccuaggcucuag

SEQ ID NO: 141624 - RNA, 25 nt, Artificial Sequence
  Description of Artificial Sequence: Synthetic oligonucleotide
ggggcuaggggggaguggggagcca

SEQ ID NO: 141625 - RNA, 25 nt, Artificial Sequence
  Description of Artificial Sequence: Synthetic oligonucleotide
aagaggucccauauuccugagugca

SEQ ID NO: 141626 - RNA, 25 nt, Artificial Sequence
  Description of Artificial Sequence: Synthetic oligonucleotide
agggguagucccucucaccugcuuc

SEQ ID NO: 141627 - RNA, 25 nt, Artificial Sequence
  Description of Artificial Sequence: Synthetic oligonucleotide
ccucagacgacucuggaagcuuccc

SEQ ID NO: 141628 - RNA, 25 nt, Artificial Sequence
  Description of Artificial Sequence: Synthetic oligonucleotide
cucuaccacugggcacugagacgaa

SEQ ID NO: 141629 - RNA, 25 nt, Artificial Sequence
  Description of Artificial Sequence: Synthetic oligonucleotide
agcucccugacagccgagacuggca

SEQ ID NO: 141630 - RNA, 25 nt, Artificial Sequence
  Description of Artificial Sequence: Synthetic oligonucleotide
agcccuccaucugguccguacccuc

SEQ ID NO: 141631 - RNA, 25 nt, Artificial Sequence
  Description of Artificial Sequence: Synthetic oligonucleotide
cgccagaggccccccuacaucaacc

SEQ ID NO: 141632 - RNA, 25 nt, Artificial Sequence
  Description of Artificial Sequence: Synthetic oligonucleotide
cuccuggcgaugcccugguggagca

SEQ ID NO: 141633 - RNA, 25 nt, Artificial Sequence
  Description of Artificial Sequence: Synthetic oligonucleotide
agaugggugcucugggaguccugug

SEQ ID NO: 141634 - RNA, 25 nt, Artificial Sequence
  Description of Artificial Sequence: Synthetic oligonucleotide
gcuuccugauccaauggugccaaac

SEQ ID NO: 141635 - RNA, 25 nt, Artificial Sequence
  Description of Artificial Sequence: Synthetic oligonucleotide
cccuucaucuccccaagaagcgcag

SEQ ID NO: 141636 - RNA, 25 nt, Artificial Sequence
  Description of Artificial Sequence: Synthetic oligonucleotide
gcauaccccugggaccccucggcca

SEQ ID NO: 141637 - RNA, 25 nt, Artificial Sequence
  Description of Artificial Sequence: Synthetic oligonucleotide
acugcccacucggggagccuucucu

SEQ ID NO: 141638 - RNA, 25 nt, Artificial Sequence
  Description of Artificial Sequence: Synthetic oligonucleotide
uguuucuggggccucccccaccaua

SEQ ID NO: 141639 - RNA, 25 nt, Artificial Sequence
  Description of Artificial Sequence: Synthetic oligonucleotide
agcucugauucccaccccacauagg

SEQ ID NO: 141640 - RNA, 25 nt, Artificial Sequence
  Description of Artificial Sequence: Synthetic oligonucleotide
gaguagccugacugagggggaaggg

SEQ ID NO: 141641 - RNA, 25 nt, Artificial Sequence
  Description of Artificial Sequence: Synthetic oligonucleotide
ggugggagagaagauacagacaugg

SEQ ID NO: 141642 - RNA, 25 nt, Artificial Sequence
  Description of Artificial Sequence: Synthetic oligonucleotide
gaggaggggaggcugcucuggcaaa

SEQ ID NO: 141643 - RNA, 25 nt, Artificial Sequence
  Description of Artificial Sequence: Synthetic oligonucleotide
agucuucaaggcuuuugggggucca

SEQ ID NO: 141644 - RNA, 25 nt, Artificial Sequence
  Description of Artificial Sequence: Synthetic oligonucleotide
aggccuggggucaagaaggaaaaug

SEQ ID NO: 141645 - RNA, 25 nt, Artificial Sequence
  Description of Artificial Sequence: Synthetic oligonucleotide
gugugugagcaugugugugagugag

SEQ ID NO: 141646 - RNA, 25 nt, Artificial Sequence
  Description of Artificial Sequence: Synthetic oligonucleotide
ggcgugugugugagcguguguguga

SEQ ID NO: 141647 - RNA, 25 nt, Artificial Sequence
  Description of Artificial Sequence: Synthetic oligonucleotide
agugaggcgugugugugugucuuuc

SEQ ID NO: 141648 - RNA, 25 nt, Artificial Sequence
  Description of Artificial Sequence: Synthetic oligonucleotide
ccuaggacccaccauacccugugua

SEQ ID NO: 141649 - RNA, 25 nt, Artificial Sequence
  Description of Artificial Sequence: Synthetic oligonucleotide
auguaugcauguuuuuguaaaaagg

SEQ ID NO: 141650 - RNA, 25 nt, Artificial Sequence
  Description of Artificial Sequence: Synthetic oligonucleotide
gaagaaaauggaaaaaaaucugaac

SEQ ID NO: 141651 - RNA, 25 nt, Artificial Sequence
  Description of Artificial Sequence: Synthetic oligonucleotide
caauaaauguuuuauuugcuuuaaa

SEQ ID NO: 141652 - RNA, 1743 nt, Homo sapiens
gccagaucuggaagguggcugcggaacgguuuuaagcggaagauggaggagccggaggaaccggcggacagugggcagucgcuggucccgguuuauaucuauagucccgaguaugucaguaugugugacucccuggccaagauccccaaacgggccaguauggugcauucuuugauugaagcauaugcacugcauaagcagaugaggauaguuaagccuaaaguggccuccauggaggagauggccaccuuccacacugaugcuuaucugcagcaucuccagaaggucagccaagagggcgaugaugaucauccggacuccauagaauaugggcuagguuaugacugcccagccacugaagggauauuugacuaugcagcagcuauaggaggggcuacgaucacagcugcccaaugccugauugacggaaugugcaaaguagcaauuaacuggucuggaggguggcaucaugcaaagaaagaugaagcaucugguuuuuguuaucucaaugaugcuguccugggaauauuacgauugcgacggaaauuugagcguauucucuacguggauuuggaucugcaccauggagaugguguagaagacgcauucaguuucaccuccaaagucaugaccgugucccugcacaaauucuccccaggauuuuucccaggaacaggugacgugucugauguuggccuagggaagggacgguacuacaguguaaaugugcccauucaggauggcauacaagaugaaaaauauuaccagaucugugaaaguguacuaaaggaaguauaccaagccuuuaaucccaaagcaguggucuuacagcugggagcugacacaauagcuggggaucccaugugcuccuuuaacaugacuccagugggaauuggcaagugucuuaaguacauccuucaauggcaguuggcaacacucauuuugggaggaggaggcuauaaccuugccaacacggcucgaugcuggacauacuugaccggggucauccuagggaaaacacuauccucugagaucccagaucaugaguuuuucacagcauaugguccugauuaugugcuggaaaucacgccaagcugccggccagaccgcaaugagccccaccgaauccaacaaauccucaacuacaucaaagggaaucugaagcauguggucuaguugacagaaagagaucagguuuccagagcugaggaguggugccuauaaugaagacagcguguuuaugcaagcaguuuguggaauuugugacugcagggaaaauuugaaagaaauuacuuccugaaaauuuccaaggggcaucaaguggcagcuggcuuccuggggugaagaggcaggcaccccagaguccucaacuggaccuaggggaagaaggagauaucccacauuuaaaguucuuauuuaaaaaaacacacacacacaaaugaaauuuuuaaucuuugaaaauuauuuuuaagcgaauuggggaggggaguauuuuaaucaucuuaaaugaaacagaucagaagcuggaugagagcagucaccaguuuguagggcaggaggcagcugagaggcaggguuugggccucaggaccauccagguggagcccugggagagaggguacugaucagcagacugggagguggggagaaguccgcugguguuguuuuaguguuauauaucuuugguuuuuuuaauaaaaucuuugaaaaccuaaaaaaaaaaaaaaaaaaaaaaaaaaaaaa

SEQ ID NO: 141653 - RNA, 19 nt, Artificial Sequence
  Description of Artificial Sequence: Synthetic oligonucleotide
gccagaucuggaagguggc

SEQ ID NO: 141654 - RNA, 19 nt, Artificial Sequence
  Description of Artificial Sequence: Synthetic oligonucleotide
cugcggaacgguuuuaagc

SEQ ID NO: 141655 - RNA, 19 nt, Artificial Sequence
  Description of Artificial Sequence: Synthetic oligonucleotide
cggaagauggaggagccgg

SEQ ID NO: 141656 - RNA, 19 nt, Artificial Sequence
  Description of Artificial Sequence: Synthetic oligonucleotide
gaggaaccggcggacagug

SEQ ID NO: 141657 - RNA, 19 nt, Artificial Sequence
  Description of Artificial Sequence: Synthetic oligonucleotide
gggcagucgcuggucccgg

SEQ ID NO: 141658 - RNA, 19 nt, Artificial Sequence
  Description of Artificial Sequence: Synthetic oligonucleotide
guuuauaucuauagucccg

SEQ ID NO: 141659 - RNA, 19 nt, Artificial Sequence
  Description of Artificial Sequence: Synthetic oligonucleotide
gaguaugucaguaugugug

SEQ ID NO: 141660 - RNA, 19 nt, Artificial Sequence
  Description of Artificial Sequence: Synthetic oligonucleotide
gacucccuggccaagaucc

SEQ ID NO: 141661 - RNA, 19 nt, Artificial Sequence
  Description of Artificial Sequence: Synthetic oligonucleotide
cccaaacgggccaguaugg

SEQ ID NO: 141662 - RNA, 19 nt, Artificial Sequence
  Description of Artificial Sequence: Synthetic oligonucleotide
gugcauucuuugauugaag

SEQ ID NO: 141663 - RNA, 19 nt, Artificial Sequence
  Description of Artificial Sequence: Synthetic oligonucleotide
gcauaugcacugcauaagc

SEQ ID NO: 141664 - RNA, 19 nt, Artificial Sequence
  Description of Artificial Sequence: Synthetic oligonucleotide
cagaugaggauaguuaagc

SEQ ID NO: 141665 - RNA, 19 nt, Artificial Sequence
  Description of Artificial Sequence: Synthetic oligonucleotide
ccuaaaguggccuccaugg

SEQ ID NO: 141666 - RNA, 19 nt, Artificial Sequence
  Description of Artificial Sequence: Synthetic oligonucleotide
gaggagauggccaccuucc

SEQ ID NO: 141667 - RNA, 19 nt, Artificial Sequence
  Description of Artificial Sequence: Synthetic oligonucleotide
cacacugaugcuuaucugc

SEQ ID NO: 141668 - RNA, 19 nt, Artificial Sequence
  Description of Artificial Sequence: Synthetic oligonucleotide
cagcaucuccagaagguca

SEQ ID NO: 141669 - RNA, 19 nt, Artificial Sequence
  Description of Artificial Sequence: Synthetic oligonucleotide
agccaagagggcgaugaug

SEQ ID NO: 141670 - RNA, 19 nt, Artificial Sequence
  Description of Artificial Sequence: Synthetic oligonucleotide
gaucauccggacuccauag

SEQ ID NO: 141671 - RNA, 19 nt, Artificial Sequence
  Description of Artificial Sequence: Synthetic oligonucleotide
gaauaugggcuagguuaug

SEQ ID NO: 141672 - RNA, 19 nt, Artificial Sequence
  Description of Artificial Sequence: Synthetic oligonucleotide
gacugcccagccacugaag

SEQ ID NO: 141673 - RNA, 19 nt, Artificial Sequence
  Description of Artificial Sequence: Synthetic oligonucleotide
gggauauuugacuaugcag

SEQ ID NO: 141674 - RNA, 19 nt, Artificial Sequence
  Description of Artificial Sequence: Synthetic oligonucleotide
gcagcuauaggaggggcua

SEQ ID NO: 141675 - RNA, 19 nt, Artificial Sequence
  Description of Artificial Sequence: Synthetic oligonucleotide
acgaucacagcugcccaau

SEQ ID NO: 141676 - RNA, 19 nt, Artificial Sequence
  Description of Artificial Sequence: Synthetic oligonucleotide
ugccugauugacggaaugu

SEQ ID NO: 141677 - RNA, 19 nt, Artificial Sequence
  Description of Artificial Sequence: Synthetic oligonucleotide
ugcaaaguagcaauuaacu

SEQ ID NO: 141678 - RNA, 19 nt, Artificial Sequence
  Description of Artificial Sequence: Synthetic oligonucleotide
uggucuggaggguggcauc

SEQ ID NO: 141679 - RNA, 19 nt, Artificial Sequence
  Description of Artificial Sequence: Synthetic oligonucleotide
caugcaaagaaagaugaag

SEQ ID NO: 141680 - RNA, 19 nt, Artificial Sequence
  Description of Artificial Sequence: Synthetic oligonucleotide
gcaucugguuuuuguuauc

SEQ ID NO: 141681 - RNA, 19 nt, Artificial Sequence
  Description of Artificial Sequence: Synthetic oligonucleotide
cucaaugaugcuguccugg

SEQ ID NO: 141682 - RNA, 19 nt, Artificial Sequence
  Description of Artificial Sequence: Synthetic oligonucleotide
ggaauauuacgauugcgac

SEQ ID NO: 141683 - RNA, 19 nt, Artificial Sequence
  Description of Artificial Sequence: Synthetic oligonucleotide
cggaaauuugagcguauuc

SEQ ID NO: 141684 - RNA, 19 nt, Artificial Sequence
  Description of Artificial Sequence: Synthetic oligonucleotide
cucuacguggauuuggauc

SEQ ID NO: 141685 - RNA, 19 nt, Artificial Sequence
  Description of Artificial Sequence: Synthetic oligonucleotide
cugcaccauggagauggug

SEQ ID NO: 141686 - RNA, 19 nt, Artificial Sequence
  Description of Artificial Sequence: Synthetic oligonucleotide
guagaagacgcauucaguu

SEQ ID NO: 141687 - RNA, 19 nt, Artificial Sequence
  Description of Artificial Sequence: Synthetic oligonucleotide
uucaccuccaaagucauga

SEQ ID NO: 141688 - RNA, 19 nt, Artificial Sequence
  Description of Artificial Sequence: Synthetic oligonucleotide
accgugucccugcacaaau

SEQ ID NO: 141689 - RNA, 19 nt, Artificial Sequence
  Description of Artificial Sequence: Synthetic oligonucleotide
uucuccccaggauuuuucc

SEQ ID NO: 141690 - RNA, 19 nt, Artificial Sequence
  Description of Artificial Sequence: Synthetic oligonucleotide
ccaggaacaggugacgugu

SEQ ID NO: 141691 - RNA, 19 nt, Artificial Sequence
  Description of Artificial Sequence: Synthetic oligonucleotide
ucugauguuggccuaggga

SEQ ID NO: 141692 - RNA, 19 nt, Artificial Sequence
  Description of Artificial Sequence: Synthetic oligonucleotide
aagggacgguacuacagug

SEQ ID NO: 141693 - RNA, 19 nt, Artificial Sequence
  Description of Artificial Sequence: Synthetic oligonucleotide
guaaaugugcccauucagg

SEQ ID NO: 141694 - RNA, 19 nt, Artificial Sequence
  Description of Artificial Sequence: Synthetic oligonucleotide
gauggcauacaagaugaaa

SEQ ID NO: 141695 - RNA, 19 nt, Artificial Sequence
  Description of Artificial Sequence: Synthetic oligonucleotide
aaauauuaccagaucugug

SEQ ID NO: 141696 - RNA, 19 nt, Artificial Sequence
  Description of Artificial Sequence: Synthetic oligonucleotide
gaaaguguacuaaaggaag

SEQ ID NO: 141697 - RNA, 19 nt, Artificial Sequence
  Description of Artificial Sequence: Synthetic oligonucleotide
guauaccaagccuuuaauc

SEQ ID NO: 141698 - RNA, 19 nt, Artificial Sequence
  Description of Artificial Sequence: Synthetic oligonucleotide
cccaaagcaguggucuuac

SEQ ID NO: 141699 - RNA, 19 nt, Artificial Sequence
  Description of Artificial Sequence: Synthetic oligonucleotide
cagcugggagcugacacaa

SEQ ID NO: 141700 - RNA, 19 nt, Artificial Sequence
  Description of Artificial Sequence: Synthetic oligonucleotide
auagcuggggaucccaugu

SEQ ID NO: 141701 - RNA, 19 nt, Artificial Sequence
  Description of Artificial Sequence: Synthetic oligonucleotide
ugcuccuuuaacaugacuc

SEQ ID NO: 141702 - RNA, 19 nt, Artificial Sequence
  Description of Artificial Sequence: Synthetic oligonucleotide
ccagugggaauuggcaagu

SEQ ID NO: 141703 - RNA, 19 nt, Artificial Sequence
  Description of Artificial Sequence: Synthetic oligonucleotide
ugucuuaaguacauccuuc

SEQ ID NO: 141704 - RNA, 19 nt, Artificial Sequence
  Description of Artificial Sequence: Synthetic oligonucleotide
caauggcaguuggcaacac

SEQ ID NO: 141705 - RNA, 19 nt, Artificial Sequence
  Description of Artificial Sequence: Synthetic oligonucleotide
cucauuuugggaggaggag

SEQ ID NO: 141706 - RNA, 19 nt, Artificial Sequence
  Description of Artificial Sequence: Synthetic oligonucleotide
ggcuauaaccuugccaaca

SEQ ID NO: 141707 - RNA, 19 nt, Artificial Sequence
  Description of Artificial Sequence: Synthetic oligonucleotide
acggcucgaugcuggacau

SEQ ID NO: 141708 - RNA, 19 nt, Artificial Sequence
  Description of Artificial Sequence: Synthetic oligonucleotide
uacuugaccggggucaucc

SEQ ID NO: 141709 - RNA, 19 nt, Artificial Sequence
  Description of Artificial Sequence: Synthetic oligonucleotide
cuagggaaaacacuauccu

SEQ ID NO: 141710 - RNA, 19 nt, Artificial Sequence
  Description of Artificial Sequence: Synthetic oligonucleotide
ucugagaucccagaucaug

SEQ ID NO: 141711 - RNA, 19 nt, Artificial Sequence
  Description of Artificial Sequence: Synthetic oligonucleotide
gaguuuuucacagcauaug

SEQ ID NO: 141712 - RNA, 19 nt, Artificial Sequence
  Description of Artificial Sequence: Synthetic oligonucleotide
gguccugauuaugugcugg

SEQ ID NO: 141713 - RNA, 19 nt, Artificial Sequence
  Description of Artificial Sequence: Synthetic oligonucleotide
gaaaucacgccaagcugcc

SEQ ID NO: 141714 - RNA, 19 nt, Artificial Sequence
  Description of Artificial Sequence: Synthetic oligonucleotide
cggccagaccgcaaugagc

SEQ ID NO: 141715 - RNA, 19 nt, Artificial Sequence
  Description of Artificial Sequence: Synthetic oligonucleotide
ccccaccgaauccaacaaa

SEQ ID NO: 141716 - RNA, 19 nt, Artificial Sequence
  Description of Artificial Sequence: Synthetic oligonucleotide
auccucaacuacaucaaag

SEQ ID NO: 141717 - RNA, 19 nt, Artificial Sequence
  Description of Artificial Sequence: Synthetic oligonucleotide
gggaaucugaagcaugugg

SEQ ID NO: 141718 - RNA, 19 nt, Artificial Sequence
  Description of Artificial Sequence: Synthetic oligonucleotide
gucuaguugacagaaagag

SEQ ID NO: 141719 - RNA, 19 nt, Artificial Sequence
  Description of Artificial Sequence: Synthetic oligonucleotide
gaucagguuuccagagcug

SEQ ID NO: 141720 - RNA, 19 nt, Artificial Sequence
  Description of Artificial Sequence: Synthetic oligonucleotide
gaggaguggugccuauaau

SEQ ID NO: 141721 - RNA, 19 nt, Artificial Sequence
  Description of Artificial Sequence: Synthetic oligonucleotide
ugaagacagcguguuuaug

SEQ ID NO: 141722 - RNA, 19 nt, Artificial Sequence
  Description of Artificial Sequence: Synthetic oligonucleotide
gcaagcaguuuguggaauu

SEQ ID NO: 141723 - RNA, 19 nt, Artificial Sequence
  Description of Artificial Sequence: Synthetic oligonucleotide
uugugacugcagggaaaau

SEQ ID NO: 141724 - RNA, 19 nt, Artificial Sequence
  Description of Artificial Sequence: Synthetic oligonucleotide
uuugaaagaaauuacuucc

SEQ ID NO: 141725 - RNA, 19 nt, Artificial Sequence
  Description of Artificial Sequence: Synthetic oligonucleotide
cugaaaauuuccaaggggc

SEQ ID NO: 141726 - RNA, 19 nt, Artificial Sequence
  Description of Artificial Sequence: Synthetic oligonucleotide
caucaaguggcagcuggcu

SEQ ID NO: 141727 - RNA, 19 nt, Artificial Sequence
  Description of Artificial Sequence: Synthetic oligonucleotide
uuccuggggugaagaggca

SEQ ID NO: 141728 - RNA, 19 nt, Artificial Sequence
  Description of Artificial Sequence: Synthetic oligonucleotide
aggcaccccagaguccuca

SEQ ID NO: 141729 - RNA, 19 nt, Artificial Sequence
  Description of Artificial Sequence: Synthetic oligonucleotide
aacuggaccuaggggaaga

SEQ ID NO: 141730 - RNA, 19 nt, Artificial Sequence
  Description of Artificial Sequence: Synthetic oligonucleotide
aaggagauaucccacauuu

SEQ ID NO: 141731 - RNA, 19 nt, Artificial Sequence
  Description of Artificial Sequence: Synthetic oligonucleotide
uaaaguucuuauuuaaaaa

SEQ ID NO: 141732 - RNA, 19 nt, Artificial Sequence
  Description of Artificial Sequence: Synthetic oligonucleotide
aaacacacacacacaaaug

SEQ ID NO: 141733 - RNA, 19 nt, Artificial Sequence
  Description of Artificial Sequence: Synthetic oligonucleotide
gaaauuuuuaaucuuugaa

SEQ ID NO: 141734 - RNA, 19 nt, Artificial Sequence
  Description of Artificial Sequence: Synthetic oligonucleotide
aaauuauuuuuaagcgaau

SEQ ID NO: 141735 - RNA, 19 nt, Artificial Sequence
  Description of Artificial Sequence: Synthetic oligonucleotide
uuggggaggggaguauuuu

SEQ ID NO: 141736 - RNA, 19 nt, Artificial Sequence
  Description of Artificial Sequence: Synthetic oligonucleotide
uaaucaucuuaaaugaaac

SEQ ID NO: 141737 - RNA, 19 nt, Artificial Sequence
  Description of Artificial Sequence: Synthetic oligonucleotide
cagaucagaagcuggauga

SEQ ID NO: 141738 - RNA, 19 nt, Artificial Sequence
  Description of Artificial Sequence: Synthetic oligonucleotide
agagcagucaccaguuugu

SEQ ID NO: 141739 - RNA, 19 nt, Artificial Sequence
  Description of Artificial Sequence: Synthetic oligonucleotide
uagggcaggaggcagcuga

SEQ ID NO: 141740 - RNA, 19 nt, Artificial Sequence
  Description of Artificial Sequence: Synthetic oligonucleotide
agaggcaggguuugggccu

SEQ ID NO: 141741 - RNA, 19 nt, Artificial Sequence
  Description of Artificial Sequence: Synthetic oligonucleotide
ucaggaccauccaggugga

SEQ ID NO: 141742 - RNA, 19 nt, Artificial Sequence
  Description of Artificial Sequence: Synthetic oligonucleotide
agcccugggagagagggua

SEQ ID NO: 141743 - RNA, 19 nt, Artificial Sequence
  Description of Artificial Sequence: Synthetic oligonucleotide
acugaucagcagacuggga

SEQ ID NO: 141744 - RNA, 19 nt, Artificial Sequence
  Description of Artificial Sequence: Synthetic oligonucleotide
agguggggagaaguccgcu

SEQ ID NO: 141745 - RNA, 19 nt, Artificial Sequence
  Description of Artificial Sequence: Synthetic oligonucleotide
ugguguuguuuuaguguua

SEQ ID NO: 141746 - RNA, 19 nt, Artificial Sequence
  Description of Artificial Sequence: Synthetic oligonucleotide
auauaucuuugguuuuuuu

SEQ ID NO: 141747 - RNA, 19 nt, Artificial Sequence
  Description of Artificial Sequence: Synthetic oligonucleotide
uaauaaaaucuuugaaaac

SEQ ID NO: 141748 - RNA, 25 nt, Artificial Sequence
  Description of Artificial Sequence: Synthetic oligonucleotide
gccagaucuggaagguggcugcgga

SEQ ID NO: 141749 - RNA, 25 nt, Artificial Sequence
  Description of Artificial Sequence: Synthetic oligonucleotide
aacgguuuuaagcggaagauggagg

SEQ ID NO: 141750 - RNA, 25 nt, Artificial Sequence
  Description of Artificial Sequence: Synthetic oligonucleotide
gagccggaggaaccggcggacagug

SEQ ID NO: 141751 - RNA, 25 nt, Artificial Sequence
  Description of Artificial Sequence: Synthetic oligonucleotide
gggcagucgcuggucccgguuuaua

SEQ ID NO: 141752 - RNA, 25 nt, Artificial Sequence
  Description of Artificial Sequence: Synthetic oligonucleotide
aucuauagucccgaguaugucagua

SEQ ID NO: 141753 - RNA, 25 nt, Artificial Sequence
  Description of Artificial Sequence: Synthetic oligonucleotide
augugugacucccuggccaagaucc

SEQ ID NO: 141754 - RNA, 25 nt, Artificial Sequence
  Description of Artificial Sequence: Synthetic oligonucleotide
cccaaacgggccaguauggugcauu

SEQ ID NO: 141755 - RNA, 25 nt, Artificial Sequence
  Description of Artificial Sequence: Synthetic oligonucleotide
ucuuugauugaagcauaugcacugc

SEQ ID NO: 141756 - RNA, 25 nt, Artificial Sequence
  Description of Artificial Sequence: Synthetic oligonucleotide
cauaagcagaugaggauaguuaagc

SEQ ID NO: 141757 - RNA, 25 nt, Artificial Sequence
  Description of Artificial Sequence: Synthetic oligonucleotide
ccuaaaguggccuccauggaggaga

SEQ ID NO: 141758 - RNA, 25 nt, Artificial Sequence
  Description of Artificial Sequence: Synthetic oligonucleotide
auggccaccuuccacacugaugcuu

SEQ ID NO: 141759 - RNA, 25 nt, Artificial Sequence
  Description of Artificial Sequence: Synthetic oligonucleotide
uaucugcagcaucuccagaagguca

SEQ ID NO: 141760 - RNA, 25 nt, Artificial Sequence
  Description of Artificial Sequence: Synthetic oligonucleotide
agccaagagggcgaugaugaucauc

SEQ ID NO: 141761 - RNA, 25 nt, Artificial Sequence
  Description of Artificial Sequence: Synthetic oligonucleotide
ccggacuccauagaauaugggcuag

SEQ ID NO: 141762 - RNA, 25 nt, Artificial Sequence
  Description of Artificial Sequence: Synthetic oligonucleotide
gguuaugacugcccagccacugaag

SEQ ID NO: 141763 - RNA, 25 nt, Artificial Sequence
  Description of Artificial Sequence: Synthetic oligonucleotide
gggauauuugacuaugcagcagcua

SEQ ID NO: 141764 - RNA, 25 nt, Artificial Sequence
  Description of Artificial Sequence: Synthetic oligonucleotide
auaggaggggcuacgaucacagcug

SEQ ID NO: 141765 - RNA, 25 nt, Artificial Sequence
  Description of Artificial Sequence: Synthetic oligonucleotide
gcccaaugccugauugacggaaugu

SEQ ID NO: 141766 - RNA, 25 nt, Artificial Sequence
  Description of Artificial Sequence: Synthetic oligonucleotide
ugcaaaguagcaauuaacuggucug

SEQ ID NO: 141767 - RNA, 25 nt, Artificial Sequence
  Description of Artificial Sequence: Synthetic oligonucleotide
ggaggguggcaucaugcaaagaaag

SEQ ID NO: 141768 - RNA, 25 nt, Artificial Sequence
  Description of Artificial Sequence: Synthetic oligonucleotide
gaugaagcaucugguuuuuguuauc

SEQ ID NO: 141769 - RNA, 25 nt, Artificial Sequence
  Description of Artificial Sequence: Synthetic oligonucleotide
cucaaugaugcuguccugggaauau

SEQ ID NO: 141770 - RNA, 25 nt, Artificial Sequence
  Description of Artificial Sequence: Synthetic oligonucleotide
uuacgauugcgacggaaauuugagc

SEQ ID NO: 141771 - RNA, 25 nt, Artificial Sequence
  Description of Artificial Sequence: Synthetic oligonucleotide
cguauucucuacguggauuuggauc

SEQ ID NO: 141772 - RNA, 25 nt, Artificial Sequence
  Description of Artificial Sequence: Synthetic oligonucleotide
cugcaccauggagaugguguagaag

SEQ ID NO: 141773 - RNA, 25 nt, Artificial Sequence
  Description of Artificial Sequence: Synthetic oligonucleotide
gacgcauucaguuucaccuccaaag

SEQ ID NO: 141774 - RNA, 25 nt, Artificial Sequence
  Description of Artificial Sequence: Synthetic oligonucleotide
gucaugaccgugucccugcacaaau

SEQ ID NO: 141775 - RNA, 25 nt, Artificial Sequence
  Description of Artificial Sequence: Synthetic oligonucleotide
uucuccccaggauuuuucccaggaa

SEQ ID NO: 141776 - RNA, 25 nt, Artificial Sequence
  Description of Artificial Sequence: Synthetic oligonucleotide
acaggugacgugucugauguuggcc

SEQ ID NO: 141777 - RNA, 25 nt, Artificial Sequence
  Description of Artificial Sequence: Synthetic oligonucleotide
cuagggaagggacgguacuacagug

SEQ ID NO: 141778 - RNA, 25 nt, Artificial Sequence
  Description of Artificial Sequence: Synthetic oligonucleotide
guaaaugugcccauucaggauggca

SEQ ID NO: 141779 - RNA, 25 nt, Artificial Sequence
  Description of Artificial Sequence: Synthetic oligonucleotide
auacaagaugaaaaauauuaccaga

SEQ ID NO: 141780 - RNA, 25 nt, Artificial Sequence
  Description of Artificial Sequence: Synthetic oligonucleotide
aucugugaaaguguacuaaaggaag

SEQ ID NO: 141781 - RNA, 25 nt, Artificial Sequence
  Description of Artificial Sequence: Synthetic oligonucleotide
guauaccaagccuuuaaucccaaag

SEQ ID NO: 141782 - RNA, 25 nt, Artificial Sequence
  Description of Artificial Sequence: Synthetic oligonucleotide
gcaguggucuuacagcugggagcug

SEQ ID NO: 141783 - RNA, 25 nt, Artificial Sequence
  Description of Artificial Sequence: Synthetic oligonucleotide
gacacaauagcuggggaucccaugu

SEQ ID NO: 141784 - RNA, 25 nt, Artificial Sequence
  Description of Artificial Sequence: Synthetic oligonucleotide
ugcuccuuuaacaugacuccagugg

SEQ ID NO: 141785 - RNA, 25 nt, Artificial Sequence
  Description of Artificial Sequence: Synthetic oligonucleotide
ggaauuggcaagugucuuaaguaca

SEQ ID NO: 141786 - RNA, 25 nt, Artificial Sequence
  Description of Artificial Sequence: Synthetic oligonucleotide
auccuucaauggcaguuggcaacac

SEQ ID NO: 141787 - RNA, 25 nt, Artificial Sequence
  Description of Artificial Sequence: Synthetic oligonucleotide
cucauuuugggaggaggaggcuaua

SEQ ID NO: 141788 - RNA, 25 nt, Artificial Sequence
  Description of Artificial Sequence: Synthetic oligonucleotide
aaccuugccaacacggcucgaugcu

SEQ ID NO: 141789 - RNA, 25 nt, Artificial Sequence
  Description of Artificial Sequence: Synthetic oligonucleotide
uggacauacuugaccggggucaucc

SEQ ID NO: 141790 - RNA, 25 nt, Artificial Sequence
  Description of Artificial Sequence: Synthetic oligonucleotide
cuagggaaaacacuauccucugaga

SEQ ID NO: 141791 - RNA, 25 nt, Artificial Sequence
  Description of Artificial Sequence: Synthetic oligonucleotide
aucccagaucaugaguuuuucacag

SEQ ID NO: 141792 - RNA, 25 nt, Artificial Sequence
  Description of Artificial Sequence: Synthetic oligonucleotide
gcauaugguccugauuaugugcugg

SEQ ID NO: 141793 - RNA, 25 nt, Artificial Sequence
  Description of Artificial Sequence: Synthetic oligonucleotide
gaaaucacgccaagcugccggccag

SEQ ID NO: 141794 - RNA, 25 nt, Artificial Sequence
  Description of Artificial Sequence: Synthetic oligonucleotide
gaccgcaaugagccccaccgaaucc

SEQ ID NO: 141795 - RNA, 25 nt, Artificial Sequence
  Description of Artificial Sequence: Synthetic oligonucleotide
caacaaauccucaacuacaucaaag

SEQ ID NO: 141796 - RNA, 25 nt, Artificial Sequence
  Description of Artificial Sequence: Synthetic oligonucleotide
gggaaucugaagcauguggucuagu

SEQ ID NO: 141797 - RNA, 25 nt, Artificial Sequence
  Description of Artificial Sequence: Synthetic oligonucleotide
uugacagaaagagaucagguuucca

SEQ ID NO: 141798 - RNA, 25 nt, Artificial Sequence
  Description of Artificial Sequence: Synthetic oligonucleotide
agagcugaggaguggugccuauaau

SEQ ID NO: 141799 - RNA, 25 nt, Artificial Sequence
  Description of Artificial Sequence: Synthetic oligonucleotide
ugaagacagcguguuuaugcaagca

SEQ ID NO: 141800 - RNA, 25 nt, Artificial Sequence
  Description of Artificial Sequence: Synthetic oligonucleotide
aguuuguggaauuugugacugcagg

SEQ ID NO: 141801 - RNA, 25 nt, Artificial Sequence
  Description of Artificial Sequence: Synthetic oligonucleotide
ggaaaauuugaaagaaauuacuucc

SEQ ID NO: 141802 - RNA, 25 nt, Artificial Sequence
  Description of Artificial Sequence: Synthetic oligonucleotide
cugaaaauuuccaaggggcaucaag

SEQ ID NO: 141803 - RNA, 25 nt, Artificial Sequence
  Description of Artificial Sequence: Synthetic oligonucleotide
guggcagcuggcuuccuggggugaa

SEQ ID NO: 141804 - RNA, 25 nt, Artificial Sequence
  Description of Artificial Sequence: Synthetic oligonucleotide
agaggcaggcaccccagaguccuca

SEQ ID NO: 141805 - RNA, 25 nt, Artificial Sequence
  Description of Artificial Sequence: Synthetic oligonucleotide
aacuggaccuaggggaagaaggaga

SEQ ID NO: 141806 - RNA, 25 nt, Artificial Sequence
  Description of Artificial Sequence: Synthetic oligonucleotide
auaucccacauuuaaaguucuuauu

SEQ ID NO: 141807 - RNA, 25 nt, Artificial Sequence
  Description of Artificial Sequence: Synthetic oligonucleotide
uuaaaaaaacacacacacacaaaug

SEQ ID NO: 141808 - RNA, 25 nt, Artificial Sequence
  Description of Artificial Sequence: Synthetic oligonucleotide
gaaauuuuuaaucuuugaaaauuau

SEQ ID NO: 141809 - RNA, 25 nt, Artificial Sequence
  Description of Artificial Sequence: Synthetic oligonucleotide
uuuuuaagcgaauuggggaggggag

SEQ ID NO: 141810 - RNA, 25 nt, Artificial Sequence
  Description of Artificial Sequence: Synthetic oligonucleotide
guauuuuaaucaucuuaaaugaaac

SEQ ID NO: 141811 - RNA, 25 nt, Artificial Sequence
  Description of Artificial Sequence: Synthetic oligonucleotide
cagaucagaagcuggaugagagcag

SEQ ID NO: 141812 - RNA, 25 nt, Artificial Sequence
  Description of Artificial Sequence: Synthetic oligonucleotide
gucaccaguuuguagggcaggaggc

SEQ ID NO: 141813 - RNA, 25 nt, Artificial Sequence
  Description of Artificial Sequence: Synthetic oligonucleotide
cagcugagaggcaggguuugggccu

SEQ ID NO: 141814 - RNA, 25 nt, Artificial Sequence
  Description of Artificial Sequence: Synthetic oligonucleotide
ucaggaccauccagguggagcccug

SEQ ID NO: 141815 - RNA, 25 nt, Artificial Sequence
  Description of Artificial Sequence: Synthetic oligonucleotide
gggagagaggguacugaucagcaga

SEQ ID NO: 141816 - RNA, 25 nt, Artificial Sequence
  Description of Artificial Sequence: Synthetic oligonucleotide
acugggagguggggagaaguccgcu

SEQ ID NO: 141817 - RNA, 25 nt, Artificial Sequence
  Description of Artificial Sequence: Synthetic oligonucleotide
ugguguuguuuuaguguuauauauc

SEQ ID NO: 141818 - RNA, 25 nt, Artificial Sequence
  Description of Artificial Sequence: Synthetic oligonucleotide
cuuugguuuuuuuaauaaaaucuuu

SEQ ID NO: 141819 - RNA, 3149 nt, Homo sapiens
augggguggcuggacgagagcagcucuuggcucagcaaagaaugcacaguaugaucagcucaguggaugugaagucagaaguuccugugggccuggagcccaucucaccuuuagaccuaaggacagaccucaggaugaugaugcccgugguggacccuguuguccgugagaagcaauugcagcaggaauuacuucuuauccagcagcagcaacaaauccagaagcagcuucugauagcagaguuucagaaacagcaugagaacuugacacggcagcaccaggcucagcuucaggagcauaucaaggaacuucuagccauaaaacagcaacaagaacuccuagaaaaggagcagaaacuggagcagcagaggcaagaacaggaaguagagaggcaucgcagagaacagcagcuuccuccucucagaggcaaagauagaggacgagaaagggcaguggcaaguacagaaguaaagcagaagcuucaagaguuccuacugaguaaaucagcaacgaaagacacuccaacuaauggaaaaaaucauuccgugagccgccaucccaagcucugguacacggcugcccaccacacaucauuggaucaaagcucuccaccccuuaguggaacaucuccauccuacaaguacacauuaccaggagcacaagaugcaaaggaugauuucccccuucgaaaaacugccucugagcccaacuugaaggugcgguccagguuaaaacagaaaguggcagagaggagaagcagccccuuacucaggcggaaggauggaaauguugucacuucauucaagaagcgaauguuugaggugacagaauccucagucaguagcaguucuccaggcucuggucccaguucaccaaacaaugggccaacuggaaguguuacugaaaaugagacuucgguuuugcccccuaccccucaugccgagcaaaugguuucacagcaacgcauucuaauucaugaagauuccaugaaccugcuaagucuuuauaccucuccuucuuugcccaacauuaccuuggggcuucccgcagugccaucccagcucaaugcuucgaauucacucaaagaaaagcagaagugugagacgcagacgcuuaggcaagguguuccucugccugggcaguauggaggcagcaucccggcaucuuccagccacccucauguuacuuuagagggaaagccacccaacagcagccaccaggcucuccugcagcauuuauuauugaaagaacaaaugcgacagcaaaagcuucuuguagcugguggaguucccuuacauccucagucucccuuggcaacaaaagagagaauuucaccuggcauuagagguacccacaaauugccccgucacagaccccugaaccgaacccagucugcaccuuugccucagagcacguuggcucagcuggucauucaacagcaacaccagcaauucuuggagaagcagaagcaauaccagcagcagauccacaugaacaaacugcuuucgaaaucuauugaacaacugaagcaaccaggcagucaccuugaggaagcagaggaagagcuucagggggaccaggcgaugcaggaagacagagcgcccucuaguggcaacagcacuaggagcgacagcagugcuuguguggaugacacacugggacaaguuggggcugugaaggucaaggaggaaccaguggacagugaugaagaugcucagauccaggaaauggaaucuggggagcaggcugcuuuuaugcaacagccuuuccuggaacccacgcacacacgugcgcucucugugcgccaagcuccgcuggcugcgguuggcauggauggauuagagaaacaccgucucgucuccaggacucacucuuccccugcugccucuguuuuaccucacccagcaauggaccgcccccuccagccuggcucugcaacuggaauugccuaugaccccuugaugcugaaacaccagugcguuuguggcaauuccaccacccacccugagcaugcuggacgaauacagaguaucuggucacgacugcaagaaacugggcugcuaaauaaaugugagcgaauucaaggucgaaaagccagccuggaggaaauacagcuuguucauucugaacaucacucacuguuguauggcaccaacccccuggacggacagaagcuggaccccaggauacuccuaggugaugacucucaaaaguuuuuuuccucauuaccuugugguggacuugggguggacagugacaccauuuggaaugagcuacacucguccggugcugcacgcauggcuguuggcugugucaucgagcuggcuuccaaaguggccucaggagagcugaagaauggguuugcuguugugaggcccccuggccaucacgcugaagaauccacagccaugggguucugcuuuuuuaauucaguugcaauuaccgccaaauacuugagagaccaacuaaauauaagcaagauauugauuguagaucuggauguucaccauggaaacgguacccagcaggccuuuuaugcugaccccagcauccuguacauuucacuccaucgcuaugaugaagggaacuuuuucccuggcaguggagccccaaaugagguuggaacaggccuuggagaaggguacaauauaaauauugccuggacagguggccuugauccucccaugggagauguugaguaccuugaagcauucaggaccaucgugaagccuguggccaaagaguuugauccagacauggucuuaguaucugcuggauuugaugcauuggaaggccacaccccuccucuaggaggguacaaagugacggcaaaauguuuuggucauuugacgaagcaauugaugacauuggcugauggacgugugguguuggcucuagaaggaggacaugaucucacagccaucugugaugcaucagaagccuguguaaaugcccuucuaggaaaugagcuggagccacuugcagaagauauucuccaccaaagcccgaauaugaaugcuguuauuucuuuacagaagaucauugaaauucaaaguaugucuuuaaaguucucuuaaaaauucuaagcagguaaaacuaacuaaaauuauauugaaaauuauaguacaaagaaacauuuaaaaaaaaaa

SEQ ID NO: 141820 - RNA, 2681 nt, Homo sapiens
augggguggcuggacgagagcagcucuuggcucagcaaagaaugcacaguaugaucagcucaguggaugugaagucagaaguuccugugggccuggagcccaucucaccuuuagaccuaaggacagaccucaggaugaugaugcccgugguggacccuguuguccgugagaagcaauugcagcaggaauuacuucuuauccagcagcagcaacaaauccagaagcagcuucugauagcagaguuucagaaacagcaugagaacuugacacggcagcaccaggcucagcuucaggagcauaucaaggaacuucuagccauaaaacagcaacaagaacuccuagaaaaggagcagaaacuggagcagcagaggcaagaacaggaaguagagaggcaucgcagagaacagcagcuuccuccucucagaggcaaagauagaggacgagaaagggcaguggcaaguacagaaguaaagcagaagcuucaagaguuccuacugaguaaaucagcaacgaaagacacuccaacuaauggaaaaaaucauuccgugagccgccaucccaagcucugguacacggcugcccaccacacaucauuggaucaaagcucuccaccccuuaguggaacaucuccauccuacaaguacacauuaccaggagcacaagaugcaaaggaugauuucccccuucgaaaaacugccucugagcccaacuugaaggugcgguccagguuaaaacagaaaguggcagagaggagaagcagccccuuacucaggcggaaggauggaaauguugucacuucauucaagaagcgaauguuugaggugacagaauccucagucaguagcaguucuccaggcucuggucccaguucaccaaacaaugggccaacuggaaguguuacugaaaaugagacuucgguuuugcccccuaccccucaugccgagcaaaugguuucacagcaacgcauucuaauucaugaagauuccaugaaccugcuaagucuuuauaccucuccuucuuugcccaacauuaccuuggggcuucccgcagugccaucccagcucaaugcuucgaauucacucaaagaaaagcagaagugugagacgcagacgcuuaggcaagguguuccucugccugggcaguauggaggcagcaucccggcaucuuccagccacccucauguuacuuuagagggaaagccacccaacagcagccaccaggcucuccugcagcauuuauuauugaaagaacaaaugcgacagcaaaagcuucuuguagcugguggaguucccuuacauccucagucucccuuggcaacaaaagagagaauuucaccuggcauuagagguacccacaaauugccccgucacagaccccugaaccgaacccagucugcaccuuugccucagagcacguuggcucagcuggucauucaacagcaacaccagcaauucuuggagaagcagaagcaauaccagcagcagauccacaugaacaaacugcuuucgaaaucuauugaacaacugaagcaaccaggcagucaccuugaggaagcagaggaagagcuucagggggaccaggcgaugcaggaagacagagcgcccucuaguggcaacagcacuaggagcgacagcagugcuuguguggaugacacacugggacaaguuggggcugugaaggucaaggaggaaccaguggacagugaugaagaugcucagauccaggaaauggaaucuggggagcaggcugcuuuuaugcaacagccuuuccuggaacccacgcacacacgugcgcucucugugcgccaagcuccgcuggcugcgguuggcauggauggauuagagaaacaccgucucgucuccaggacucacucuuccccugcugccucuguuuuaccucacccagcaauggaccgcccccuccagccuggcucugcaacuggaauugccuaugaccccuugaugcugaaacaccagugcguuuguggcaauuccaccacccacccugagcaugcuggacgaauacagaguaucuggucacgacugcaagaaacugggcugcuaaauaaaugugagcgaauucaaggucgaaaagccagccuggaggaaauacagcuuguucauucugaacaucacucacuguuguauggcaccaacccccuggacggacagaagcuggaccccaggauacuccuaggugaugacucucaaaaguuuuuuuccucauuaccuugugguggacuugggguggacagugacaccauuuggaaugagcuacacucguccggugcugcacgcauggcuguuggcugugucaucgagcuggcuuccaaaguggccucaggagagcugaagaauggguuugcuguugugaggcccccuggccaucacgcugaagaauccacagccaugggguucugcuuuuuuaauucaguugcaauuaccgccaaauacuugagagaccaacuaaauauaagcaagauauugauuguagaucuggauguucaccauggaaacgguacccagcaggccuuuuaugcugaccccagcauccuguacauuucacuccaucgcuaugaugaagggaacuuuuucccuggcaguggagccccaaaugagguucgguuuauuucuuuagagccccacuuuuauuuguaucuuucagguaauugcauugcauga

SEQ ID NO: 141821 - RNA, 4238 nt, Homo sapiens
ggggaagagaggcacagacacagauaggagaagggcaccggcuggagccacuugcaggacugaggguuuuugcaacaaaacccuagcagccugaagaacucuaagccagaugggguggcuggacgagagcagcucuuggcucagcaaagaaugcacaguaugaucagcucaguggaugugaagucagaaguuccugugggccuggagcccaucucaccuuuagaccuaaggacagaccucaggaugaugaugcccgugguggacccuguuguccgugagaagcaauugcagcaggaauuacuucuuauccagcagcagcaacaaauccagaagcagcuucugauagcagaguuucagaaacagcaugagaacuugacacggcagcaccaggcucagcuucaggagcauaucaaggaacuucuagccauaaaacagcaacaagaacuccuagaaaaggagcagaaacuggagcagcagaggcaagaacaggaaguagagaggcaucgcagagaacagcagcuuccuccucucagaggcaaagauagaggacgagaaagggcaguggcaaguacagaaguaaagcagaagcuucaagaguuccuacugaguaaaucagcaacgaaagacacuccaacuaauggaaaaaaucauuccgugagccgccaucccaagcucugguacacggcugcccaccacacaucauuggaucaaagcucuccaccccuuaguggaacaucuccauccuacaaguacacauuaccaggagcacaagaugcaaaggaugauuucccccuucgaaaaacugccucugagcccaacuugaaggugcgguccagguuaaaacagaaaguggcagagaggagaagcagccccuuacucaggcggaaggauggaaauguugucacuucauucaagaagcgaauguuugaggugacagaauccucagucaguagcaguucuccaggcucuggucccaguucaccaaacaaugggccaacuggaaguguuacugaaaaugagacuucgguuuugcccccuaccccucaugccgagcaaaugguuucacagcaacgcauucuaauucaugaagauuccaugaaccugcuaagucuuuauaccucuccuucuuugcccaacauuaccuuggggcuucccgcagugccaucccagcucaaugcuucgaauucacucaaagaaaagcagaagugugagacgcagacgcuuaggcaagguguuccucugccugggcaguauggaggcagcaucccggcaucuuccagccacccucauguuacuuuagagggaaagccacccaacagcagccaccaggcucuccugcagcauuuauuauugaaagaacaaaugcgacagcaaaagcuucuuguagcugguggaguucccuuacauccucagucucccuuggcaacaaaagagagaauuucaccuggcauuagagguacccacaaauugccccgucacagaccccugaaccgaacccagucugcaccuuugccucagagcacguuggcucagcuggucauucaacagcaacaccagcaauucuuggagaagcagaagcaauaccagcagcagauccacaugaacaaacugcuuucgaaaucuauugaacaacugaagcaaccaggcagucaccuugaggaagcagaggaagagcuucagggggaccaggcgaugcaggaagacagagcgcccucuaguggcaacagcacuaggagcgacagcagugcuuguguggaugacacacugggacaaguuggggcugugaaggucaaggaggaaccaguggacagugaugaagaugcucagauccaggaaauggaaucuggggagcaggcugcuuuuaugcaacagguaauaggcaaagauuuagcuccaggauuuguaauuaaagucauuaucugaacaugaaaugcauugcagguuugguaaauggauaugauuuccuaucaguuuauauuucucuaugauuugaguucaguguuuaaggauucuaccuaaugcagauauauguauauaucuauauagaggucuuucuauauacugaucucuauauagauaucaauguuucauugaaaauccacugguaaggaaauaccuguuauacuaaaauuaugauacauaauaucugagcaguuaauaggcuuuaaauuuaucccaaagccugcuacaccaauuacuucuaaagaaaacaaauucacuguuauuuugaguuuauguguugagaucagugacugcuggauagucucccagucugaucaaugaagcauucgauuaguuuuugauuuuuugcaacaucuagaauuuaauuuucacaucacuguacauaauguaucauacuauagucuugaacacuguuaaagguagucugccccuuccuuccucucucuuuuuuuaguuaaguagaaauguucuggucaccaugccaguaguccuagguuauuguguagguugcaauugaacauauuaggaauacaggugguuuuaaauauauagaugcaaauugcagcacuacuuuaaauauuagauuaugucucacauagcacugcucauuuuacuuuuauuuuguguaauuugaugacacugucuaucaaaaaagagcaaaugaagcagaugcaaauguuagugagaaguaaugugcagcauuaugguccaaucagauacaauauugugucuacaauugcaaaaaacacaguaacaggaugaauauuaucugauaucaagucaaaaucaguuugaaaagaagguguaucauauuuuauauugucacuagaaucucuuaaguauaauuccauaaugacaugggcauauaccguaacauucuggcaaauaacaauuagaaaagauagguuuaacaaaaaaauuuacuuguauauaaugcaccuucaggaggacuauguccuuugaugcuauaaaauacaaacaacuuugaaggcaacagaagacacuguuuauucaagucaguucuuugucagguuccugcuguucuccuacagaaaagugauucugugagggugaacaggaaaugccuuguggaaacaggaaguccaagugauucauguacugaggaauguaggaaaaaaaaucugaggauagugcuuuacucuuucuguuuuuaaagggcacucuaugaauugauuuauugucuaagaaaauaacaccacaaguagggaaauuguuacggaagcuuuucacuggaacauuuccuucauauucccuuuugauauguuuaccuuguuuuauagguuuacuuuuguuaagcuaguuaaagguucguuguauuaagaccccuuuaauauggauaauccaaauugaccuagaaucuuugugagguuuuuucuauuaaaauauuuauauuucuaaauccgagguauuucaagguguaguauccuauuucaaaggagauauagcaguuuugccaaauguagacauuguucaacuguauguuauuggcacguguuguuuacauuuugcugugacauuuaaaaauauuucuuuaaaaauguuacugcuaaagauacauuauccuuuuuuaaaaagucuccauucaaauuaaauuaacauaacuagaaguuagaaaguuuaaaaguuuuccacauaaugaaaguccuucugauaauuugacaaauagcuauaauaggaacacucccuaucaccaacauauuuugguuaguauauuccuucauauuaaaaugacuuuuugucaguuguuuugcauuaaaaauauggcaugccuaagauaaaauuguauauuuuuuccaucucauaaauauucauuuucuucaaagucuuuuuucaaucucauaaaaaagggauagugcaucuuuuaaaauacauuuuauuuggggaggaacauguggcugagcagacuuuuguauaauauuacuucaaagauauguaaucacaaacaaaaaaaacuauuuuuuauaaugucauuugagagaguuucaucaguacaguugguggacguuaauuguuugaauuugauagucuuugaauuuaaucaagaaacuaccuggaaccagugaaaaggaaagcuggacuuaaauaaucuuagaauuaauugauaaaugucucuuuuaaaaucuacuguauuuauuauaauuuacacccuugaaggugaucucuuguuuuguguuguaaauauauuguuuguauguuucccuucuugccuucuguuauaagucucuuccuuucucaaauaaaguuuuuuuuaaaag

SEQ ID NO: 141822 - RNA, 4659 nt, Homo sapiens
ggggaagagaggcacagacacagauaggagaagggcaccggcuggagccacuugcaggacugaggguuuuugcaacaaaacccuagcagccugaagaacucuaagccagaugggguggcuggacgagagcagcucuuggcucagcaaagaaugcacaguaugaucagcucaguggaugugaagucagaaguuccugugggccuggagcccaucucaccuuuagaccuaaggacagaccucaggaugaugaugcccgugguggacccuguuguccgugagaagcaauugcagcaggaauuacuucuuauccagcagcagcaacaaauccagaagcagcuucugauagcagaguuucagaaacagcaugagaacuugacacggcagcaccaggcucagcuucaggagcauaucaaggaacuucuagccauaaaacagcaacaagaacuccuagaaaaggagcagaaacuggagcagcagaggcaagaacaggaaguagagaggcaucgcagagaacagcagcuuccuccucucagaggcaaagauagaggacgagaaagggcaguggcaaguacagaaguaaagcagaagcuucaagaguuccuacugaguaaaucagcaacgaaagacacuccaacuaauggaaaaaaucauuccgugagccgccaucccaagcucugguacacggcugcccaccacacaucauuggaucaaagcucuccaccccuuaguggaacaucuccauccuacaaguacacauuaccaggagcacaagaugcaaaggaugauuucccccuucgaaaaacugccucugagcccaacuugaaggugcgguccagguuaaaacagaaaguggcagagaggagaagcagccccuuacucaggcggaaggauggaaauguugucacuucauucaagaagcgaauguuugaggugacagaauccucagucaguagcaguucuccaggcucuggucccaguucaccaaacaaugggccaacuggaaguguuacugaaaaugagacuucgguuuugcccccuaccccucaugccgagcaaaugguuucacagcaacgcauucuaauucaugaagauuccaugaaccugcuaagucuuuauaccucuccuucuuugcccaacauuaccuuggggcuucccgcagugccaucccagcucaaugcuucgaauucacucaaagaaaagcagaagugugagacgcagacgcuuaggcaagguguuccucugccugggcaguauggaggcagcaucccggcaucuuccagccacccucauguuacuuuagagggaaagccacccaacagcagccaccaggcucuccugcagcauuuauuauugaaagaacaaaugcgacagcaaaagcuucuuguagcugguggaguucccuuacauccucagucucccuuggcaacaaaagagagaauuucaccuggcauuagagguacccacaaauugccccgucacagaccccugaaccgaacccagucugcaccuuugccucagagcacguuggcucagcuggucauucaacagcaacaccagcaauucuuggagaagcagaagcaauaccagcagcagauccacaugaacaaacugcuuucgaaaucuauugaacaacugaagcaaccaggcagucaccuugaggaagcagaggaagagcuucagggggaccaggcgaugcaggaagacagagcgcccucuaguggcaacagcacuaggagcgacagcagugcuuguguggaugacacacugggacaaguuggggcugugaaggucaaggaggaaccaguggacagugaugaagaugcucagauccaggaaauggaaucuggggagcaggcugcuuuuaugcaacagccuuuccuggaacccacgcacacacgugcgcucucugugcgccaagcuccgcuggcugcgguuggcauggauggauuagagaaacaccgucucgucuccaggacucacucuuccccugcugccucuguuuuaccucacccagcaauggaccgcccccuccagccuggcucugcaacuggaauugccuaugaccccuugaugcugaaacaccagugcguuuguggcaauuccaccacccacccugagcaugcuggacgaauacagaguaucuggucacgacugcaagaaacugggcugcuaaauaaaugugagcgaauucaaggucgaaaagccagccuggaggaaauacagcuuguucauucugaacaucacucacuguuguauggcaccaacccccuggacggacagaagcuggaccccaggauacuccuaggugaugacucucaaaaguuuuuuuccucauuaccuugugguggacuugggguggacagugacaccauuuggaaugagcuacacucguccggugcugcacgcauggcuguuggcugugucaucgagcuggcuuccaaaguggccucaggagagcugaagaauggguuugcuguugugaggcccccuggccaucacgcugaagaauccacagccaugggguucugcuuuuuuaauucaguugcaauuaccgccaaauacuugagagaccaacuaaauauaagcaagauauugauuguagaucuggauguucaccauggaaacgguacccagcaggccuuuuaugcugaccccagcauccuguacauuucacuccaucgcuaugaugaagggaacuuuuucccuggcaguggagccccaaaugagguuggaacaggccuuggagaaggguacaauauaaauauugccuggacagguggccuugauccucccaugggagauguugaguaccuugaagcauucaggaccaucgugaagccuguggccaaagaguuugauccagacauggucuuaguaucugcuggauuugaugcauuggaaggccacaccccuccucuaggaggguacaaagugacggcaaaauguuuuggucauuugacgaagcaauugaugacauuggcugauggacgugugguguuggcucuagaaggaggacaugaucucacagccaucugugaugcaucagaagccuguguaaaugcccuucuaggaaaugagcuggagccacuugcagaagauauucuccaccaaagcccgaauaugaaugcuguuauuucuuuacagaagaucauugaaauucaaagcaaguauuggaagucaguaaggaugguggcugugccaaggggcugugcucuggcuggugcucaguugcaagaggagacagagaccguuucugcccuggccucccuaacaguggauguggaacagcccuuugcucaggaagacagcagaacugcuggugagccuauggaagaggagccagccuugugaagugccaagucccccucugauauuuccugugugugacaucauuguguauccccccaccccaguacccucagacaugucuugucugcugccuggguggcacagauucaauggaacauaaacacugggcacaaaauucugaacagcagcuucacuuguucuuuggauggacuugaaagggcauuaaagauuccuuaaacguaaccgcugugauucuagaguuacaguaaaccacgauuggaagaaacugcuuccagcaugcuuuuaauaugcugggugacccacuccuagacaccaaguuugaacuagaaacauucaguacagcacuagauauuguuaauuucagaagcuaugacagccagugaaauuuugggcaaaaccugagacauagucauuccugacauucugaucagcuuuuuuugggguaauuuguuuuucaaacagucuuaacuuguuuacaagauuugcuuuuagcuaugaacggaucguaauuccacccagaauguaauguuucuuguuuguuuguuuuguuuuguuaggguuuuuuucucaacuuuaacacacaguucaacuguuccuaguaaaaguucaagauggaggaacuagcaugaggcuuuuuucaguaucucgaaguccaaaugccaaaggaaccucacacacuguuuguaauggugcaauauuuuauaucacuuuuuuuuaaacauccccaacaucuuuguguucucacacacaggcaauuugcaauguugcaauuguguuggagaaugaaguccccccaccucccagccacacacacauccuuuguucucaugacaguaggucugagcaaauguuccaccaagcauuuucagugucuuugaaaagcacguaacuuuucaaagguggucuuaauuuguugcauaucuaucaaggacuuauucacucaccuuuccuuuucugcccucuaucaauugauuucuucuuaccuuucaucauucauuccuuccuuuagaaaaacugaagauuacccauaaucuccucuuauuacuugagggccuugacuauuuaguuuauuuuguuuacuuuacagguuaacacaguuguuuugucugauugcauuuuauuaacugugaagccguugaaaugaauaucacuuaagcaacguugcuaaauuucuauguguuugaaauguguuaaugaaggcacugcuuauuuguagucaccuugaacugacuuaaccuagaagcugugccuucuugugaaaaaaaaaaaaaacaaaaacaaaaaacagccuuuaaacaaguuuccuuagugucaaaaguuaaaaauaaa

SEQ ID NO: 141823 - RNA, 4559 nt, Homo sapiens
augggguggcuggacgagagcagcucuuggcucagcaaagaaugcacaguaugaucagcucaguggaugugaagucagaaguuccugugggccuggagcccaucucaccuuuagaccuaaggacagaccucaggaugaugaugcccgugguggacccuguuguccgugagaagcaauugcagcaggaauuacuucuuauccagcagcagcaacaaauccagaagcagcuucugauagcagaguuucagaaacagcaugagaacuugacacggcagcaccaggcucagcuucaggagcauaucaaguugcaacaggaacuucuagccauaaaacagcaacaagaacuccuagaaaaggagcagaaacuggagcagcagaggcaagaacaggaaguagagaggcaucgcagagaacagcagcuuccuccucucagaggcaaagauagaggacgagaaagggcaguggcaaguacagaaguaaagcagaagcuucaagaguuccuacugaguaaaucagcaacgaaagacacuccaacuaauggaaaaaaucauuccgugagccgccaucccaagcucugguacacggcugcccaccacacaucauuggaucaaagcucuccaccccuuaguggaacaucuccauccuacaaguacacauuaccaggagcacaagaugcaaaggaugauuucccccuucgaaaaacugccucugagcccaacuugaaggugcgguccagguuaaaacagaaaguggcagagaggagaagcagccccuuacucaggcggaaggauggaaauguugucacuucauucaagaagcgaauguuugaggugacagaauccucagucaguagcaguucuccaggcucuggucccaguucaccaaacaaugggccaacuggaaguguuacugaaaaugagacuucgguuuugcccccuaccccucaugccgagcaaaugguuucacagcaacgcauucuaauucaugaagauuccaugaaccugcuaagucuuuauaccucuccuucuuugcccaacauuaccuuggggcuucccgcagugccaucccagcucaaugcuucgaauucacucaaagaaaagcagaagugugagacgcagacgcuuaggcaagguguuccucugccugggcaguauggaggcagcaucccggcaucuuccagccacccucauguuacuuuagagggaaagccacccaacagcagccaccaggcucuccugcagcauuuauuauugaaagaacaaaugcgacagcaaaagcuucuuguagcugguggaguucccuuacauccucagucucccuuggcaacaaaagagagaauuucaccuggcauuagagguacccacaaauugccccgucacagaccccugaaccgaacccagucugcaccuuugccucagagcacguuggcucagcuggucauucaacagcaacaccagcaauucuuggagaagcagaagcaauaccagcagcagauccacaugaacaaacugcuuucgaaaucuauugaacaacugaagcaaccaggcagucaccuugaggaagcagaggaagagcuucagggggaccaggcgaugcaggaagacagagcgcccucuaguggcaacagcacuaggagcgacagcagugcuuguguggaugacacacugggacaaguuggggcugugaaggucaaggaggaaccaguggacagugaugaagaugcucagauccaggaaauggaaucuggggagcaggcugcuuuuaugcaacagccuuuccuggaacccacgcacacacgugcgcucucugugcgccaagcuccgcuggcugcgguuggcauggauggauuagagaaacaccgucucgucuccaggacucacucuuccccugcugccucuguuuuaccucacccagcaauggaccgcccccuccagccuggcucugcaacuggaauugccuaugaccccuugaugcugaaacaccagugcguuuguggcaauuccaccacccacccugagcaugcuggacgaauacagaguaucuggucacgacugcaagaaacugggcugcuaaauaaaugugagcgaauucaaggucgaaaagccagccuggaggaaauacagcuuguucauucugaacaucacucacuguuguauggcaccaacccccuggacggacagaagcuggaccccaggauacuccuaggugaugacucucaaaaguuuuuuuccucauuaccuugugguggacuugggguggacagugacaccauuuggaaugagcuacacucguccggugcugcacgcauggcuguuggcugugucaucgagcuggcuuccaaaguggccucaggagagcugaagaauggguuugcuguugugaggcccccuggccaucacgcugaagaauccacagccaugggguucugcuuuuuuaauucaguugcaauuaccgccaaauacuugagagaccaacuaaauauaagcaagauauugauuguagaucuggauguucaccauggaaacgguacccagcaggccuuuuaugcugaccccagcauccuguacauuucacuccaucgcuaugaugaagggaacuuuuucccuggcaguggagccccaaaugagguuggaacaggccuuggagaaggguacaauauaaauauugccuggacagguggccuugauccucccaugggagauguugaguaccuugaagcauucaggaccaucgugaagccuguggccaaagaguuugauccagacauggucuuaguaucugcuggauuugaugcauuggaaggccacaccccuccucuaggaggguacaaagugacggcaaaauguuuuggucauuugacgaagcaauugaugacauuggcugauggacgugugguguuggcucuagaaggaggacaugaucucacagccaucugugaugcaucagaagccuguguaaaugcccuucuaggaaaugagcuggagccacuugcagaagauauucuccaccaaagcccgaauaugaaugcuguuauuucuuuacagaagaucauugaaauucaaagcaaguauuggaagucaguaaggaugguggcugugccaaggggcugugcucuggcuggugcucaguugcaagaggagacagagaccguuucugcccuggccucccuaacaguggauguggaacagcccuuugcucaggaagacagcagaacugcuggugagccuauggaagaggagccagccuugugaagugccaagucccccucugauauuuccugugugugacaucauuguguauccccccaccccaguacccucagacaugucuugucugcugccuggguggcacagauucaauggaacauaaacacugggcacaaaauucugaacagcagcuucacuuguucuuuggauggacuugaaagggcauuaaagauuccuuaaacguaaccgcugugauucuagaguuacaguaaaccacgauuggaagaaacugcuuccagcaugcuuuuaauaugcugggugacccacuccuagacaccaaguuugaacuagaaacauucaguacagcacuagauauuguuaauuucagaagcuaugacagccagugaaauuuugggcaaaaccugagacauagucauuccugacauucugaucagcuuuuuuugggguaauuuguuuuucaaacagucuuaacuuguuuacaagauuugcuuuuagcuaugaacggaucguaauuccacccagaauguaauguuucuuguuuguuuguuuuguuuuguuaggguuuuuuucucaacuuuaacacacaguucaacuguuccuaguaaaaguucaagauggaggaacuagcaugaggcuuuuuucaguaucucgaaguccaaaugccaaaggaaccucacacacuguuuguaauggugcaauauuuuauaucacuuuuuuuuaaacauccccaacaucuuuguguucucacacacaggcaauuugcaauguugcaauuguguuggagaaugaaguccccccaccucccagccacacacacauccuuuguucucaugacaguaggucugagcaaauguuccaccaagcauuuucagugucuuugaaaagcacguaacuuuucaaagguggucuuaauuuguugcauaucuaucaaggacuuauucacucaccuuuccuuuucugcccucuaucaauugauuucuucuuaccuuucaucauucauuccuuccuuuagaaaaacugaagauuacccauaaucuccucuuauuacuugagggccuugacuauuuaguuuauuuuguuuacuuuacagguuaacacaguuguuuugucugauugcauuuuauuaacugugaagccguugaaaugaauaucacuuaagcaacguugcuaaauuucuauguguuugaaauguguuaaugaaggcacugcuuauuuguagucaccuugaacugacuuaaccuagaagcugugccuucuugugaaaaaaaaaaaaaacaaaaacaaaaaacagccuuuaaacaaguuuccuuagugucaaaaguuaaaaauaaa

SEQ ID NO: 141824 - RNA, 19 nt, Artificial Sequence
  Description of Artificial Sequence: Synthetic oligonucleotide
ggggaagagaggcacagac

SEQ ID NO: 141825 - RNA, 19 nt, Artificial Sequence
  Description of Artificial Sequence: Synthetic oligonucleotide
cacagauaggagaagggca

SEQ ID NO: 141826 - RNA, 19 nt, Artificial Sequence
  Description of Artificial Sequence: Synthetic oligonucleotide
accggcuggagccacuugc

SEQ ID NO: 141827 - RNA, 19 nt, Artificial Sequence
  Description of Artificial Sequence: Synthetic oligonucleotide
caggacugaggguuuuugc

SEQ ID NO: 141828 - RNA, 19 nt, Artificial Sequence
  Description of Artificial Sequence: Synthetic oligonucleotide
caacaaaacccuagcagcc

SEQ ID NO: 141829 - RNA, 19 nt, Artificial Sequence
  Description of Artificial Sequence: Synthetic oligonucleotide
cugaagaacucuaagccag

SEQ ID NO: 141830 - RNA, 19 nt, Artificial Sequence
  Description of Artificial Sequence: Synthetic oligonucleotide
gaugggguggcuggacgag

SEQ ID NO: 141831 - RNA, 19 nt, Artificial Sequence
  Description of Artificial Sequence: Synthetic oligonucleotide
gagcagcucuuggcucagc

SEQ ID NO: 141832 - RNA, 19 nt, Artificial Sequence
  Description of Artificial Sequence: Synthetic oligonucleotide
caaagaaugcacaguauga

SEQ ID NO: 141833 - RNA, 19 nt, Artificial Sequence
  Description of Artificial Sequence: Synthetic oligonucleotide
aucagcucaguggauguga

SEQ ID NO: 141834 - RNA, 19 nt, Artificial Sequence
  Description of Artificial Sequence: Synthetic oligonucleotide
aagucagaaguuccugugg

SEQ ID NO: 141835 - RNA, 19 nt, Artificial Sequence
  Description of Artificial Sequence: Synthetic oligonucleotide
ggccuggagcccaucucac

SEQ ID NO: 141836 - RNA, 19 nt, Artificial Sequence
  Description of Artificial Sequence: Synthetic oligonucleotide
ccuuuagaccuaaggacag

SEQ ID NO: 141837 - RNA, 19 nt, Artificial Sequence
  Description of Artificial Sequence: Synthetic oligonucleotide
gaccucaggaugaugaugc

SEQ ID NO: 141838 - RNA, 19 nt, Artificial Sequence
  Description of Artificial Sequence: Synthetic oligonucleotide
cccgugguggacccuguug

SEQ ID NO: 141839 - RNA, 19 nt, Artificial Sequence
  Description of Artificial Sequence: Synthetic oligonucleotide
guccgugagaagcaauugc

SEQ ID NO: 141840 - RNA, 19 nt, Artificial Sequence
  Description of Artificial Sequence: Synthetic oligonucleotide
cagcaggaauuacuucuua

SEQ ID NO: 141841 - RNA, 19 nt, Artificial Sequence
  Description of Artificial Sequence: Synthetic oligonucleotide
auccagcagcagcaacaaa

SEQ ID NO: 141842 - RNA, 19 nt, Artificial Sequence
  Description of Artificial Sequence: Synthetic oligonucleotide
auccagaagcagcuucuga

SEQ ID NO: 141843 - RNA, 19 nt, Artificial Sequence
  Description of Artificial Sequence: Synthetic oligonucleotide
auagcagaguuucagaaac

SEQ ID NO: 141844 - RNA, 19 nt, Artificial Sequence
  Description of Artificial Sequence: Synthetic oligonucleotide
cagcaugagaacuugacac

SEQ ID NO: 141845 - RNA, 19 nt, Artificial Sequence
  Description of Artificial Sequence: Synthetic oligonucleotide
cggcagcaccaggcucagc

SEQ ID NO: 141846 - RNA, 19 nt, Artificial Sequence
  Description of Artificial Sequence: Synthetic oligonucleotide
cuucaggagcauaucaagg

SEQ ID NO: 141847 - RNA, 19 nt, Artificial Sequence
  Description of Artificial Sequence: Synthetic oligonucleotide
gaacuucuagccauaaaac

SEQ ID NO: 141848 - RNA, 19 nt, Artificial Sequence
  Description of Artificial Sequence: Synthetic oligonucleotide
cagcaacaagaacuccuag

SEQ ID NO: 141849 - RNA, 19 nt, Artificial Sequence
  Description of Artificial Sequence: Synthetic oligonucleotide
gaaaaggagcagaaacugg

SEQ ID NO: 141850 - RNA, 19 nt, Artificial Sequence
  Description of Artificial Sequence: Synthetic oligonucleotide
gagcagcagaggcaagaac

SEQ ID NO: 141851 - RNA, 19 nt, Artificial Sequence
  Description of Artificial Sequence: Synthetic oligonucleotide
caggaaguagagaggcauc

SEQ ID NO: 141852 - RNA, 19 nt, Artificial Sequence
  Description of Artificial Sequence: Synthetic oligonucleotide
cgcagagaacagcagcuuc

SEQ ID NO: 141853 - RNA, 19 nt, Artificial Sequence
  Description of Artificial Sequence: Synthetic oligonucleotide
ccuccucucagaggcaaag

SEQ ID NO: 141854 - RNA, 19 nt, Artificial Sequence
  Description of Artificial Sequence: Synthetic oligonucleotide
gauagaggacgagaaaggg

SEQ ID NO: 141855 - RNA, 19 nt, Artificial Sequence
  Description of Artificial Sequence: Synthetic oligonucleotide
gcaguggcaaguacagaag

SEQ ID NO: 141856 - RNA, 19 nt, Artificial Sequence
  Description of Artificial Sequence: Synthetic oligonucleotide
guaaagcagaagcuucaag

SEQ ID NO: 141857 - RNA, 19 nt, Artificial Sequence
  Description of Artificial Sequence: Synthetic oligonucleotide
gaguuccuacugaguaaau

SEQ ID NO: 141858 - RNA, 19 nt, Artificial Sequence
  Description of Artificial Sequence: Synthetic oligonucleotide
ucagcaacgaaagacacuc

SEQ ID NO: 141859 - RNA, 19 nt, Artificial Sequence
  Description of Artificial Sequence: Synthetic oligonucleotide
ccaacuaauggaaaaaauc

SEQ ID NO: 141860 - RNA, 19 nt, Artificial Sequence
  Description of Artificial Sequence: Synthetic oligonucleotide
cauuccgugagccgccauc

SEQ ID NO: 141861 - RNA, 19 nt, Artificial Sequence
  Description of Artificial Sequence: Synthetic oligonucleotide
cccaagcucugguacacgg

SEQ ID NO: 141862 - RNA, 19 nt, Artificial Sequence
  Description of Artificial Sequence: Synthetic oligonucleotide
gcugcccaccacacaucau

SEQ ID NO: 141863 - RNA, 19 nt, Artificial Sequence
  Description of Artificial Sequence: Synthetic oligonucleotide
uuggaucaaagcucuccac

SEQ ID NO: 141864 - RNA, 19 nt, Artificial Sequence
  Description of Artificial Sequence: Synthetic oligonucleotide
ccccuuaguggaacaucuc

SEQ ID NO: 141865 - RNA, 19 nt, Artificial Sequence
  Description of Artificial Sequence: Synthetic oligonucleotide
ccauccuacaaguacacau

SEQ ID NO: 141866 - RNA, 19 nt, Artificial Sequence
  Description of Artificial Sequence: Synthetic oligonucleotide
uuaccaggagcacaagaug

SEQ ID NO: 141867 - RNA, 19 nt, Artificial Sequence
  Description of Artificial Sequence: Synthetic oligonucleotide
gcaaaggaugauuuccccc

SEQ ID NO: 141868 - RNA, 19 nt, Artificial Sequence
  Description of Artificial Sequence: Synthetic oligonucleotide
cuucgaaaaacugccucug

SEQ ID NO: 141869 - RNA, 19 nt, Artificial Sequence
  Description of Artificial Sequence: Synthetic oligonucleotide
gagcccaacuugaaggugc

SEQ ID NO: 141870 - RNA, 19 nt, Artificial Sequence
  Description of Artificial Sequence: Synthetic oligonucleotide
cgguccagguuaaaacaga

SEQ ID NO: 141871 - RNA, 19 nt, Artificial Sequence
  Description of Artificial Sequence: Synthetic oligonucleotide
aaaguggcagagaggagaa

SEQ ID NO: 141872 - RNA, 19 nt, Artificial Sequence
  Description of Artificial Sequence: Synthetic oligonucleotide
agcagccccuuacucaggc

SEQ ID NO: 141873 - RNA, 19 nt, Artificial Sequence
  Description of Artificial Sequence: Synthetic oligonucleotide
cggaaggauggaaauguug

SEQ ID NO: 141874 - RNA, 19 nt, Artificial Sequence
  Description of Artificial Sequence: Synthetic oligonucleotide
gucacuucauucaagaagc

SEQ ID NO: 141875 - RNA, 19 nt, Artificial Sequence
  Description of Artificial Sequence: Synthetic oligonucleotide
cgaauguuugaggugacag

SEQ ID NO: 141876 - RNA, 19 nt, Artificial Sequence
  Description of Artificial Sequence: Synthetic oligonucleotide
gaauccucagucaguagca

SEQ ID NO: 141877 - RNA, 19 nt, Artificial Sequence
  Description of Artificial Sequence: Synthetic oligonucleotide
aguucuccaggcucugguc

SEQ ID NO: 141878 - RNA, 19 nt, Artificial Sequence
  Description of Artificial Sequence: Synthetic oligonucleotide
cccaguucaccaaacaaug

SEQ ID NO: 141879 - RNA, 19 nt, Artificial Sequence
  Description of Artificial Sequence: Synthetic oligonucleotide
gggccaacuggaaguguua

SEQ ID NO: 141880 - RNA, 19 nt, Artificial Sequence
  Description of Artificial Sequence: Synthetic oligonucleotide
acugaaaaugagacuucgg

SEQ ID NO: 141881 - RNA, 19 nt, Artificial Sequence
  Description of Artificial Sequence: Synthetic oligonucleotide
guuuugcccccuaccccuc

SEQ ID NO: 141882 - RNA, 19 nt, Artificial Sequence
  Description of Artificial Sequence: Synthetic oligonucleotide
caugccgagcaaaugguuu

SEQ ID NO: 141883 - RNA, 19 nt, Artificial Sequence
  Description of Artificial Sequence: Synthetic oligonucleotide
ucacagcaacgcauucuaa

SEQ ID NO: 141884 - RNA, 19 nt, Artificial Sequence
  Description of Artificial Sequence: Synthetic oligonucleotide
auucaugaagauuccauga

SEQ ID NO: 141885 - RNA, 19 nt, Artificial Sequence
  Description of Artificial Sequence: Synthetic oligonucleotide
aaccugcuaagucuuuaua

SEQ ID NO: 141886 - RNA, 19 nt, Artificial Sequence
  Description of Artificial Sequence: Synthetic oligonucleotide
accucuccuucuuugccca

SEQ ID NO: 141887 - RNA, 19 nt, Artificial Sequence
  Description of Artificial Sequence: Synthetic oligonucleotide
aacauuaccuuggggcuuc

SEQ ID NO: 141888 - RNA, 19 nt, Artificial Sequence
  Description of Artificial Sequence: Synthetic oligonucleotide
cccgcagugccaucccagc

SEQ ID NO: 141889 - RNA, 19 nt, Artificial Sequence
  Description of Artificial Sequence: Synthetic oligonucleotide
cucaaugcuucgaauucac

SEQ ID NO: 141890 - RNA, 19 nt, Artificial Sequence
  Description of Artificial Sequence: Synthetic oligonucleotide
cucaaagaaaagcagaagu

SEQ ID NO: 141891 - RNA, 19 nt, Artificial Sequence
  Description of Artificial Sequence: Synthetic oligonucleotide
ugugagacgcagacgcuua

SEQ ID NO: 141892 - RNA, 19 nt, Artificial Sequence
  Description of Artificial Sequence: Synthetic oligonucleotide
aggcaagguguuccucugc

SEQ ID NO: 141893 - RNA, 19 nt, Artificial Sequence
  Description of Artificial Sequence: Synthetic oligonucleotide
ccugggcaguauggaggca

SEQ ID NO: 141894 - RNA, 19 nt, Artificial Sequence
  Description of Artificial Sequence: Synthetic oligonucleotide
agcaucccggcaucuucca

SEQ ID NO: 141895 - RNA, 19 nt, Artificial Sequence
  Description of Artificial Sequence: Synthetic oligonucleotide
agccacccucauguuacuu

SEQ ID NO: 141896 - RNA, 19 nt, Artificial Sequence
  Description of Artificial Sequence: Synthetic oligonucleotide
uuagagggaaagccaccca

SEQ ID NO: 141897 - RNA, 19 nt, Artificial Sequence
  Description of Artificial Sequence: Synthetic oligonucleotide
aacagcagccaccaggcuc

SEQ ID NO: 141898 - RNA, 19 nt, Artificial Sequence
  Description of Artificial Sequence: Synthetic oligonucleotide
cuccugcagcauuuauuau

SEQ ID NO: 141899 - RNA, 19 nt, Artificial Sequence
  Description of Artificial Sequence: Synthetic oligonucleotide
uugaaagaacaaaugcgac

SEQ ID NO: 141900 - RNA, 19 nt, Artificial Sequence
  Description of Artificial Sequence: Synthetic oligonucleotide
cagcaaaagcuucuuguag

SEQ ID NO: 141901 - RNA, 19 nt, Artificial Sequence
  Description of Artificial Sequence: Synthetic oligonucleotide
gcugguggaguucccuuac

SEQ ID NO: 141902 - RNA, 19 nt, Artificial Sequence
  Description of Artificial Sequence: Synthetic oligonucleotide
cauccucagucucccuugg

SEQ ID NO: 141903 - RNA, 19 nt, Artificial Sequence
  Description of Artificial Sequence: Synthetic oligonucleotide
gcaacaaaagagagaauuu

SEQ ID NO: 141904 - RNA, 19 nt, Artificial Sequence
  Description of Artificial Sequence: Synthetic oligonucleotide
ucaccuggcauuagaggua

SEQ ID NO: 141905 - RNA, 19 nt, Artificial Sequence
  Description of Artificial Sequence: Synthetic oligonucleotide
acccacaaauugccccguc

SEQ ID NO: 141906 - RNA, 19 nt, Artificial Sequence
  Description of Artificial Sequence: Synthetic oligonucleotide
cacagaccccugaaccgaa

SEQ ID NO: 141907 - RNA, 19 nt, Artificial Sequence
  Description of Artificial Sequence: Synthetic oligonucleotide
acccagucugcaccuuugc

SEQ ID NO: 141908 - RNA, 19 nt, Artificial Sequence
  Description of Artificial Sequence: Synthetic oligonucleotide
ccucagagcacguuggcuc

SEQ ID NO: 141909 - RNA, 19 nt, Artificial Sequence
  Description of Artificial Sequence: Synthetic oligonucleotide
cagcuggucauucaacagc

SEQ ID NO: 141910 - RNA, 19 nt, Artificial Sequence
  Description of Artificial Sequence: Synthetic oligonucleotide
caacaccagcaauucuugg

SEQ ID NO: 141911 - RNA, 19 nt, Artificial Sequence
  Description of Artificial Sequence: Synthetic oligonucleotide
gagaagcagaagcaauacc

SEQ ID NO: 141912 - RNA, 19 nt, Artificial Sequence
  Description of Artificial Sequence: Synthetic oligonucleotide
cagcagcagauccacauga

SEQ ID NO: 141913 - RNA, 19 nt, Artificial Sequence
  Description of Artificial Sequence: Synthetic oligonucleotide
aacaaacugcuuucgaaau

SEQ ID NO: 141914 - RNA, 19 nt, Artificial Sequence
  Description of Artificial Sequence: Synthetic oligonucleotide
ucuauugaacaacugaagc

SEQ ID NO: 141915 - RNA, 19 nt, Artificial Sequence
  Description of Artificial Sequence: Synthetic oligonucleotide
caaccaggcagucaccuug

SEQ ID NO: 141916 - RNA, 19 nt, Artificial Sequence
  Description of Artificial Sequence: Synthetic oligonucleotide
gaggaagcagaggaagagc

SEQ ID NO: 141917 - RNA, 19 nt, Artificial Sequence
  Description of Artificial Sequence: Synthetic oligonucleotide
cuucagggggaccaggcga

SEQ ID NO: 141918 - RNA, 19 nt, Artificial Sequence
  Description of Artificial Sequence: Synthetic oligonucleotide
augcaggaagacagagcgc

SEQ ID NO: 141919 - RNA, 19 nt, Artificial Sequence
  Description of Artificial Sequence: Synthetic oligonucleotide
cccucuaguggcaacagca

SEQ ID NO: 141920 - RNA, 19 nt, Artificial Sequence
  Description of Artificial Sequence: Synthetic oligonucleotide
acuaggagcgacagcagug

SEQ ID NO: 141921 - RNA, 19 nt, Artificial Sequence
  Description of Artificial Sequence: Synthetic oligonucleotide
gcuuguguggaugacacac

SEQ ID NO: 141922 - RNA, 19 nt, Artificial Sequence
  Description of Artificial Sequence: Synthetic oligonucleotide
cugggacaaguuggggcug

SEQ ID NO: 141923 - RNA, 19 nt, Artificial Sequence
  Description of Artificial Sequence: Synthetic oligonucleotide
gugaaggucaaggaggaac

SEQ ID NO: 141924 - RNA, 19 nt, Artificial Sequence
  Description of Artificial Sequence: Synthetic oligonucleotide
ccaguggacagugaugaag

SEQ ID NO: 141925 - RNA, 19 nt, Artificial Sequence
  Description of Artificial Sequence: Synthetic oligonucleotide
gaugcucagauccaggaaa

SEQ ID NO: 141926 - RNA, 19 nt, Artificial Sequence
  Description of Artificial Sequence: Synthetic oligonucleotide
auggaaucuggggagcagg

SEQ ID NO: 141927 - RNA, 19 nt, Artificial Sequence
  Description of Artificial Sequence: Synthetic oligonucleotide
gcugcuuuuaugcaacagc

SEQ ID NO: 141928 - RNA, 19 nt, Artificial Sequence
  Description of Artificial Sequence: Synthetic oligonucleotide
ccuuuccuggaacccacgc

SEQ ID NO: 141929 - RNA, 19 nt, Artificial Sequence
  Description of Artificial Sequence: Synthetic oligonucleotide
cacacacgugcgcucucug

SEQ ID NO: 141930 - RNA, 19 nt, Artificial Sequence
  Description of Artificial Sequence: Synthetic oligonucleotide
gugcgccaagcuccgcugg

SEQ ID NO: 141931 - RNA, 19 nt, Artificial Sequence
  Description of Artificial Sequence: Synthetic oligonucleotide
gcugcgguuggcauggaug

SEQ ID NO: 141932 - RNA, 19 nt, Artificial Sequence
  Description of Artificial Sequence: Synthetic oligonucleotide
ggauuagagaaacaccguc

SEQ ID NO: 141933 - RNA, 19 nt, Artificial Sequence
  Description of Artificial Sequence: Synthetic oligonucleotide
cucgucuccaggacucacu

SEQ ID NO: 141934 - RNA, 19 nt, Artificial Sequence
  Description of Artificial Sequence: Synthetic oligonucleotide
ucuuccccugcugccucug

SEQ ID NO: 141935 - RNA, 19 nt, Artificial Sequence
  Description of Artificial Sequence: Synthetic oligonucleotide
guuuuaccucacccagcaa

SEQ ID NO: 141936 - RNA, 19 nt, Artificial Sequence
  Description of Artificial Sequence: Synthetic oligonucleotide
auggaccgcccccuccagc

SEQ ID NO: 141937 - RNA, 19 nt, Artificial Sequence
  Description of Artificial Sequence: Synthetic oligonucleotide
ccuggcucugcaacuggaa

SEQ ID NO: 141938 - RNA, 19 nt, Artificial Sequence
  Description of Artificial Sequence: Synthetic oligonucleotide
auugccuaugaccccuuga

SEQ ID NO: 141939 - RNA, 19 nt, Artificial Sequence
  Description of Artificial Sequence: Synthetic oligonucleotide
augcugaaacaccagugcg

SEQ ID NO: 141940 - RNA, 19 nt, Artificial Sequence
  Description of Artificial Sequence: Synthetic oligonucleotide
guuuguggcaauuccacca

SEQ ID NO: 141941 - RNA, 19 nt, Artificial Sequence
  Description of Artificial Sequence: Synthetic oligonucleotide
acccacccugagcaugcug

SEQ ID NO: 141942 - RNA, 19 nt, Artificial Sequence
  Description of Artificial Sequence: Synthetic oligonucleotide
ggacgaauacagaguaucu

SEQ ID NO: 141943 - RNA, 19 nt, Artificial Sequence
  Description of Artificial Sequence: Synthetic oligonucleotide
uggucacgacugcaagaaa

SEQ ID NO: 141944 - RNA, 19 nt, Artificial Sequence
  Description of Artificial Sequence: Synthetic oligonucleotide
acugggcugcuaaauaaau

SEQ ID NO: 141945 - RNA, 19 nt, Artificial Sequence
  Description of Artificial Sequence: Synthetic oligonucleotide
ugugagcgaauucaagguc

SEQ ID NO: 141946 - RNA, 19 nt, Artificial Sequence
  Description of Artificial Sequence: Synthetic oligonucleotide
cgaaaagccagccuggagg

SEQ ID NO: 141947 - RNA, 19 nt, Artificial Sequence
  Description of Artificial Sequence: Synthetic oligonucleotide
gaaauacagcuuguucauu

SEQ ID NO: 141948 - RNA, 19 nt, Artificial Sequence
  Description of Artificial Sequence: Synthetic oligonucleotide
ucugaacaucacucacugu

SEQ ID NO: 141949 - RNA, 19 nt, Artificial Sequence
  Description of Artificial Sequence: Synthetic oligonucleotide
uuguauggcaccaaccccc

SEQ ID NO: 141950 - RNA, 19 nt, Artificial Sequence
  Description of Artificial Sequence: Synthetic oligonucleotide
cuggacggacagaagcugg

SEQ ID NO: 141951 - RNA, 19 nt, Artificial Sequence
  Description of Artificial Sequence: Synthetic oligonucleotide
gaccccaggauacuccuag

SEQ ID NO: 141952 - RNA, 19 nt, Artificial Sequence
  Description of Artificial Sequence: Synthetic oligonucleotide
ggugaugacucucaaaagu

SEQ ID NO: 141953 - RNA, 19 nt, Artificial Sequence
  Description of Artificial Sequence: Synthetic oligonucleotide
uuuuuuuccucauuaccuu

SEQ ID NO: 141954 - RNA, 19 nt, Artificial Sequence
  Description of Artificial Sequence: Synthetic oligonucleotide
ugugguggacuuggggugg

SEQ ID NO: 141955 - RNA, 19 nt, Artificial Sequence
  Description of Artificial Sequence: Synthetic oligonucleotide
gacagugacaccauuugga

SEQ ID NO: 141956 - RNA, 19 nt, Artificial Sequence
  Description of Artificial Sequence: Synthetic oligonucleotide
aaugagcuacacucguccg

SEQ ID NO: 141957 - RNA, 19 nt, Artificial Sequence
  Description of Artificial Sequence: Synthetic oligonucleotide
ggugcugcacgcauggcug

SEQ ID NO: 141958 - RNA, 19 nt, Artificial Sequence
  Description of Artificial Sequence: Synthetic oligonucleotide
guuggcugugucaucgagc

SEQ ID NO: 141959 - RNA, 19 nt, Artificial Sequence
  Description of Artificial Sequence: Synthetic oligonucleotide
cuggcuuccaaaguggccu

SEQ ID NO: 141960 - RNA, 19 nt, Artificial Sequence
  Description of Artificial Sequence: Synthetic oligonucleotide
ucaggagagcugaagaaug

SEQ ID NO: 141961 - RNA, 19 nt, Artificial Sequence
  Description of Artificial Sequence: Synthetic oligonucleotide
ggguuugcuguugugaggc

SEQ ID NO: 141962 - RNA, 19 nt, Artificial Sequence
  Description of Artificial Sequence: Synthetic oligonucleotide
cccccuggccaucacgcug

SEQ ID NO: 141963 - RNA, 19 nt, Artificial Sequence
  Description of Artificial Sequence: Synthetic oligonucleotide
gaagaauccacagccaugg

SEQ ID NO: 141964 - RNA, 19 nt, Artificial Sequence
  Description of Artificial Sequence: Synthetic oligonucleotide
ggguucugcuuuuuuaauu

SEQ ID NO: 141965 - RNA, 19 nt, Artificial Sequence
  Description of Artificial Sequence: Synthetic oligonucleotide
ucaguugcaauuaccgcca

SEQ ID NO: 141966 - RNA, 19 nt, Artificial Sequence
  Description of Artificial Sequence: Synthetic oligonucleotide
aaauacuugagagaccaac

SEQ ID NO: 141967 - RNA, 19 nt, Artificial Sequence
  Description of Artificial Sequence: Synthetic oligonucleotide
cuaaauauaagcaagauau

SEQ ID NO: 141968 - RNA, 19 nt, Artificial Sequence
  Description of Artificial Sequence: Synthetic oligonucleotide
uugauuguagaucuggaug

SEQ ID NO: 141969 - RNA, 19 nt, Artificial Sequence
  Description of Artificial Sequence: Synthetic oligonucleotide
guucaccauggaaacggua

SEQ ID NO: 141970 - RNA, 19 nt, Artificial Sequence
  Description of Artificial Sequence: Synthetic oligonucleotide
acccagcaggccuuuuaug

SEQ ID NO: 141971 - RNA, 19 nt, Artificial Sequence
  Description of Artificial Sequence: Synthetic oligonucleotide
gcugaccccagcauccugu

SEQ ID NO: 141972 - RNA, 19 nt, Artificial Sequence
  Description of Artificial Sequence: Synthetic oligonucleotide
uacauuucacuccaucgcu

SEQ ID NO: 141973 - RNA, 19 nt, Artificial Sequence
  Description of Artificial Sequence: Synthetic oligonucleotide
uaugaugaagggaacuuuu

SEQ ID NO: 141974 - RNA, 19 nt, Artificial Sequence
  Description of Artificial Sequence: Synthetic oligonucleotide
uucccuggcaguggagccc

SEQ ID NO: 141975 - RNA, 19 nt, Artificial Sequence
  Description of Artificial Sequence: Synthetic oligonucleotide
ccaaaugagguuggaacag

SEQ ID NO: 141976 - RNA, 19 nt, Artificial Sequence
  Description of Artificial Sequence: Synthetic oligonucleotide
ggccuuggagaaggguaca

SEQ ID NO: 141977 - RNA, 19 nt, Artificial Sequence
  Description of Artificial Sequence: Synthetic oligonucleotide
aauauaaauauugccugga

SEQ ID NO: 141978 - RNA, 19 nt, Artificial Sequence
  Description of Artificial Sequence: Synthetic oligonucleotide
acagguggccuugauccuc

SEQ ID NO: 141979 - RNA, 19 nt, Artificial Sequence
  Description of Artificial Sequence: Synthetic oligonucleotide
cccaugggagauguugagu

SEQ ID NO: 141980 - RNA, 19 nt, Artificial Sequence
  Description of Artificial Sequence: Synthetic oligonucleotide
uaccuugaagcauucagga

SEQ ID NO: 141981 - RNA, 19 nt, Artificial Sequence
  Description of Artificial Sequence: Synthetic oligonucleotide
accaucgugaagccugugg

SEQ ID NO: 141982 - RNA, 19 nt, Artificial Sequence
  Description of Artificial Sequence: Synthetic oligonucleotide
gccaaagaguuugauccag

SEQ ID NO: 141983 - RNA, 19 nt, Artificial Sequence
  Description of Artificial Sequence: Synthetic oligonucleotide
gacauggucuuaguaucug

SEQ ID NO: 141984 - RNA, 19 nt, Artificial Sequence
  Description of Artificial Sequence: Synthetic oligonucleotide
gcuggauuugaugcauugg

SEQ ID NO: 141985 - RNA, 19 nt, Artificial Sequence
  Description of Artificial Sequence: Synthetic oligonucleotide
gaaggccacaccccuccuc

SEQ ID NO: 141986 - RNA, 19 nt, Artificial Sequence
  Description of Artificial Sequence: Synthetic oligonucleotide
cuaggaggguacaaaguga

SEQ ID NO: 141987 - RNA, 19 nt, Artificial Sequence
  Description of Artificial Sequence: Synthetic oligonucleotide
acggcaaaauguuuugguc

SEQ ID NO: 141988 - RNA, 19 nt, Artificial Sequence
  Description of Artificial Sequence: Synthetic oligonucleotide
cauuugacgaagcaauuga

SEQ ID NO: 141989 - RNA, 19 nt, Artificial Sequence
  Description of Artificial Sequence: Synthetic oligonucleotide
augacauuggcugauggac

SEQ ID NO: 141990 - RNA, 19 nt, Artificial Sequence
  Description of Artificial Sequence: Synthetic oligonucleotide
cgugugguguuggcucuag

SEQ ID NO: 141991 - RNA, 19 nt, Artificial Sequence
  Description of Artificial Sequence: Synthetic oligonucleotide
gaaggaggacaugaucuca

SEQ ID NO: 141992 - RNA, 19 nt, Artificial Sequence
  Description of Artificial Sequence: Synthetic oligonucleotide
acagccaucugugaugcau

SEQ ID NO: 141993 - RNA, 19 nt, Artificial Sequence
  Description of Artificial Sequence: Synthetic oligonucleotide
ucagaagccuguguaaaug

SEQ ID NO: 141994 - RNA, 19 nt, Artificial Sequence
  Description of Artificial Sequence: Synthetic oligonucleotide
gcccuucuaggaaaugagc

SEQ ID NO: 141995 - RNA, 19 nt, Artificial Sequence
  Description of Artificial Sequence: Synthetic oligonucleotide
cuggagccacuugcagaag

SEQ ID NO: 141996 - RNA, 19 nt, Artificial Sequence
  Description of Artificial Sequence: Synthetic oligonucleotide
gauauucuccaccaaagcc

SEQ ID NO: 141997 - RNA, 19 nt, Artificial Sequence
  Description of Artificial Sequence: Synthetic oligonucleotide
ccgaauaugaaugcuguua

SEQ ID NO: 141998 - RNA, 19 nt, Artificial Sequence
  Description of Artificial Sequence: Synthetic oligonucleotide
auuucuuuacagaagauca

SEQ ID NO: 141999 - RNA, 19 nt, Artificial Sequence
  Description of Artificial Sequence: Synthetic oligonucleotide
auugaaauucaaagcaagu

SEQ ID NO: 142000 - RNA, 19 nt, Artificial Sequence
  Description of Artificial Sequence: Synthetic oligonucleotide
uauuggaagucaguaagga

SEQ ID NO: 142001 - RNA, 19 nt, Artificial Sequence
  Description of Artificial Sequence: Synthetic oligonucleotide
augguggcugugccaaggg

SEQ ID NO: 142002 - RNA, 19 nt, Artificial Sequence
  Description of Artificial Sequence: Synthetic oligonucleotide
ggcugugcucuggcuggug

SEQ ID NO: 142003 - RNA, 19 nt, Artificial Sequence
  Description of Artificial Sequence: Synthetic oligonucleotide
gcucaguugcaagaggaga

SEQ ID NO: 142004 - RNA, 19 nt, Artificial Sequence
  Description of Artificial Sequence: Synthetic oligonucleotide
acagagaccguuucugccc

SEQ ID NO: 142005 - RNA, 19 nt, Artificial Sequence
  Description of Artificial Sequence: Synthetic oligonucleotide
cuggccucccuaacagugg

SEQ ID NO: 142006 - RNA, 19 nt, Artificial Sequence
  Description of Artificial Sequence: Synthetic oligonucleotide
gauguggaacagcccuuug

SEQ ID NO: 142007 - RNA, 19 nt, Artificial Sequence
  Description of Artificial Sequence: Synthetic oligonucleotide
gcucaggaagacagcagaa

SEQ ID NO: 142008 - RNA, 19 nt, Artificial Sequence
  Description of Artificial Sequence: Synthetic oligonucleotide
acugcuggugagccuaugg

SEQ ID NO: 142009 - RNA, 19 nt, Artificial Sequence
  Description of Artificial Sequence: Synthetic oligonucleotide
gaagaggagccagccuugu

SEQ ID NO: 142010 - RNA, 19 nt, Artificial Sequence
  Description of Artificial Sequence: Synthetic oligonucleotide
ugaagugccaagucccccu

SEQ ID NO: 142011 - RNA, 19 nt, Artificial Sequence
  Description of Artificial Sequence: Synthetic oligonucleotide
ucugauauuuccugugugu

SEQ ID NO: 142012 - RNA, 19 nt, Artificial Sequence
  Description of Artificial Sequence: Synthetic oligonucleotide
ugacaucauuguguauccc

SEQ ID NO: 142013 - RNA, 19 nt, Artificial Sequence
  Description of Artificial Sequence: Synthetic oligonucleotide
ccccaccccaguacccuca

SEQ ID NO: 142014 - RNA, 19 nt, Artificial Sequence
  Description of Artificial Sequence: Synthetic oligonucleotide
agacaugucuugucugcug

SEQ ID NO: 142015 - RNA, 19 nt, Artificial Sequence
  Description of Artificial Sequence: Synthetic oligonucleotide
gccuggguggcacagauuc

SEQ ID NO: 142016 - RNA, 19 nt, Artificial Sequence
  Description of Artificial Sequence: Synthetic oligonucleotide
caauggaacauaaacacug

SEQ ID NO: 142017 - RNA, 19 nt, Artificial Sequence
  Description of Artificial Sequence: Synthetic oligonucleotide
gggcacaaaauucugaaca

SEQ ID NO: 142018 - RNA, 19 nt, Artificial Sequence
  Description of Artificial Sequence: Synthetic oligonucleotide
agcagcuucacuuguucuu

SEQ ID NO: 142019 - RNA, 19 nt, Artificial Sequence
  Description of Artificial Sequence: Synthetic oligonucleotide
uuggauggacuugaaaggg

SEQ ID NO: 142020 - RNA, 19 nt, Artificial Sequence
  Description of Artificial Sequence: Synthetic oligonucleotide
gcauuaaagauuccuuaaa

SEQ ID NO: 142021 - RNA, 19 nt, Artificial Sequence
  Description of Artificial Sequence: Synthetic oligonucleotide
acguaaccgcugugauucu

SEQ ID NO: 142022 - RNA, 19 nt, Artificial Sequence
  Description of Artificial Sequence: Synthetic oligonucleotide
uagaguuacaguaaaccac

SEQ ID NO: 142023 - RNA, 19 nt, Artificial Sequence
  Description of Artificial Sequence: Synthetic oligonucleotide
cgauuggaagaaacugcuu

SEQ ID NO: 142024 - RNA, 19 nt, Artificial Sequence
  Description of Artificial Sequence: Synthetic oligonucleotide
uccagcaugcuuuuaauau

SEQ ID NO: 142025 - RNA, 19 nt, Artificial Sequence
  Description of Artificial Sequence: Synthetic oligonucleotide
ugcugggugacccacuccu

SEQ ID NO: 142026 - RNA, 19 nt, Artificial Sequence
  Description of Artificial Sequence: Synthetic oligonucleotide
uagacaccaaguuugaacu

SEQ ID NO: 142027 - RNA, 19 nt, Artificial Sequence
  Description of Artificial Sequence: Synthetic oligonucleotide
uagaaacauucaguacagc

SEQ ID NO: 142028 - RNA, 19 nt, Artificial Sequence
  Description of Artificial Sequence: Synthetic oligonucleotide
cacuagauauuguuaauuu

SEQ ID NO: 142029 - RNA, 19 nt, Artificial Sequence
  Description of Artificial Sequence: Synthetic oligonucleotide
ucagaagcuaugacagcca

SEQ ID NO: 142030 - RNA, 19 nt, Artificial Sequence
  Description of Artificial Sequence: Synthetic oligonucleotide
agugaaauuuugggcaaaa

SEQ ID NO: 142031 - RNA, 19 nt, Artificial Sequence
  Description of Artificial Sequence: Synthetic oligonucleotide
accugagacauagucauuc

SEQ ID NO: 142032 - RNA, 19 nt, Artificial Sequence
  Description of Artificial Sequence: Synthetic oligonucleotide
ccugacauucugaucagcu

SEQ ID NO: 142033 - RNA, 19 nt, Artificial Sequence
  Description of Artificial Sequence: Synthetic oligonucleotide
uuuuuuugggguaauuugu

SEQ ID NO: 142034 - RNA, 19 nt, Artificial Sequence
  Description of Artificial Sequence: Synthetic oligonucleotide
uuuuucaaacagucuuaac

SEQ ID NO: 142035 - RNA, 19 nt, Artificial Sequence
  Description of Artificial Sequence: Synthetic oligonucleotide
cuuguuuacaagauuugcu

SEQ ID NO: 142036 - RNA, 19 nt, Artificial Sequence
  Description of Artificial Sequence: Synthetic oligonucleotide
uuuuagcuaugaacggauc

SEQ ID NO: 142037 - RNA, 19 nt, Artificial Sequence
  Description of Artificial Sequence: Synthetic oligonucleotide
cguaauuccacccagaaug

SEQ ID NO: 142038 - RNA, 19 nt, Artificial Sequence
  Description of Artificial Sequence: Synthetic oligonucleotide
guaauguuucuuguuuguu

SEQ ID NO: 142039 - RNA, 19 nt, Artificial Sequence
  Description of Artificial Sequence: Synthetic oligonucleotide
uuguuuuguuuuguuaggg

SEQ ID NO: 142040 - RNA, 19 nt, Artificial Sequence
  Description of Artificial Sequence: Synthetic oligonucleotide
guuuuuuucucaacuuuaa

SEQ ID NO: 142041 - RNA, 19 nt, Artificial Sequence
  Description of Artificial Sequence: Synthetic oligonucleotide
acacacaguucaacuguuc

SEQ ID NO: 142042 - RNA, 19 nt, Artificial Sequence
  Description of Artificial Sequence: Synthetic oligonucleotide
ccuaguaaaaguucaagau

SEQ ID NO: 142043 - RNA, 19 nt, Artificial Sequence
  Description of Artificial Sequence: Synthetic oligonucleotide
uggaggaacuagcaugagg

SEQ ID NO: 142044 - RNA, 19 nt, Artificial Sequence
  Description of Artificial Sequence: Synthetic oligonucleotide
gcuuuuuucaguaucucga

SEQ ID NO: 142045 - RNA, 19 nt, Artificial Sequence
  Description of Artificial Sequence: Synthetic oligonucleotide
aaguccaaaugccaaagga

SEQ ID NO: 142046 - RNA, 19 nt, Artificial Sequence
  Description of Artificial Sequence: Synthetic oligonucleotide
aaccucacacacuguuugu

SEQ ID NO: 142047 - RNA, 19 nt, Artificial Sequence
  Description of Artificial Sequence: Synthetic oligonucleotide
uaauggugcaauauuuuau

SEQ ID NO: 142048 - RNA, 19 nt, Artificial Sequence
  Description of Artificial Sequence: Synthetic oligonucleotide
uaucacuuuuuuuuaaaca

SEQ ID NO: 142049 - RNA, 19 nt, Artificial Sequence
  Description of Artificial Sequence: Synthetic oligonucleotide
auccccaacaucuuugugu

SEQ ID NO: 142050 - RNA, 19 nt, Artificial Sequence
  Description of Artificial Sequence: Synthetic oligonucleotide
uucucacacacaggcaauu

SEQ ID NO: 142051 - RNA, 19 nt, Artificial Sequence
  Description of Artificial Sequence: Synthetic oligonucleotide
uugcaauguugcaauugug

SEQ ID NO: 142052 - RNA, 19 nt, Artificial Sequence
  Description of Artificial Sequence: Synthetic oligonucleotide
guuggagaaugaagucccc

SEQ ID NO: 142053 - RNA, 19 nt, Artificial Sequence
  Description of Artificial Sequence: Synthetic oligonucleotide
cccaccucccagccacaca

SEQ ID NO: 142054 - RNA, 19 nt, Artificial Sequence
  Description of Artificial Sequence: Synthetic oligonucleotide
acacauccuuuguucucau

SEQ ID NO: 142055 - RNA, 19 nt, Artificial Sequence
  Description of Artificial Sequence: Synthetic oligonucleotide
ugacaguaggucugagcaa

SEQ ID NO: 142056 - RNA, 19 nt, Artificial Sequence
  Description of Artificial Sequence: Synthetic oligonucleotide
aauguuccaccaagcauuu

SEQ ID NO: 142057 - RNA, 19 nt, Artificial Sequence
  Description of Artificial Sequence: Synthetic oligonucleotide
uucagugucuuugaaaagc

SEQ ID NO: 142058 - RNA, 19 nt, Artificial Sequence
  Description of Artificial Sequence: Synthetic oligonucleotide
cacguaacuuuucaaaggu

SEQ ID NO: 142059 - RNA, 19 nt, Artificial Sequence
  Description of Artificial Sequence: Synthetic oligonucleotide
uggucuuaauuuguugcau

SEQ ID NO: 142060 - RNA, 19 nt, Artificial Sequence
  Description of Artificial Sequence: Synthetic oligonucleotide
uaucuaucaaggacuuauu

SEQ ID NO: 142061 - RNA, 19 nt, Artificial Sequence
  Description of Artificial Sequence: Synthetic oligonucleotide
ucacucaccuuuccuuuuc

SEQ ID NO: 142062 - RNA, 19 nt, Artificial Sequence
  Description of Artificial Sequence: Synthetic oligonucleotide
cugcccucuaucaauugau

SEQ ID NO: 142063 - RNA, 19 nt, Artificial Sequence
  Description of Artificial Sequence: Synthetic oligonucleotide
uuucuucuuaccuuucauc

SEQ ID NO: 142064 - RNA, 19 nt, Artificial Sequence
  Description of Artificial Sequence: Synthetic oligonucleotide
cauucauuccuuccuuuag

SEQ ID NO: 142065 - RNA, 19 nt, Artificial Sequence
  Description of Artificial Sequence: Synthetic oligonucleotide
gaaaaacugaagauuaccc

SEQ ID NO: 142066 - RNA, 19 nt, Artificial Sequence
  Description of Artificial Sequence: Synthetic oligonucleotide
cauaaucuccucuuauuac

SEQ ID NO: 142067 - RNA, 19 nt, Artificial Sequence
  Description of Artificial Sequence: Synthetic oligonucleotide
cuugagggccuugacuauu

SEQ ID NO: 142068 - RNA, 19 nt, Artificial Sequence
  Description of Artificial Sequence: Synthetic oligonucleotide
uuaguuuauuuuguuuacu

SEQ ID NO: 142069 - RNA, 19 nt, Artificial Sequence
  Description of Artificial Sequence: Synthetic oligonucleotide
uuuacagguuaacacaguu

SEQ ID NO: 142070 - RNA, 19 nt, Artificial Sequence
  Description of Artificial Sequence: Synthetic oligonucleotide
uguuuugucugauugcauu

SEQ ID NO: 142071 - RNA, 19 nt, Artificial Sequence
  Description of Artificial Sequence: Synthetic oligonucleotide
uuuauuaacugugaagccg

SEQ ID NO: 142072 - RNA, 19 nt, Artificial Sequence
  Description of Artificial Sequence: Synthetic oligonucleotide
guugaaaugaauaucacuu

SEQ ID NO: 142073 - RNA, 19 nt, Artificial Sequence
  Description of Artificial Sequence: Synthetic oligonucleotide
uaagcaacguugcuaaauu

SEQ ID NO: 142074 - RNA, 19 nt, Artificial Sequence
  Description of Artificial Sequence: Synthetic oligonucleotide
uucuauguguuugaaaugu

SEQ ID NO: 142075 - RNA, 19 nt, Artificial Sequence
  Description of Artificial Sequence: Synthetic oligonucleotide
uguuaaugaaggcacugcu

SEQ ID NO: 142076 - RNA, 19 nt, Artificial Sequence
  Description of Artificial Sequence: Synthetic oligonucleotide
uuauuuguagucaccuuga

SEQ ID NO: 142077 - RNA, 19 nt, Artificial Sequence
  Description of Artificial Sequence: Synthetic oligonucleotide
aacugacuuaaccuagaag

SEQ ID NO: 142078 - RNA, 19 nt, Artificial Sequence
  Description of Artificial Sequence: Synthetic oligonucleotide
gcugugccuucuugugaaa

SEQ ID NO: 142079 - RNA, 19 nt, Artificial Sequence
  Description of Artificial Sequence: Synthetic oligonucleotide
caaaaaacagccuuuaaac

SEQ ID NO: 142080 - RNA, 19 nt, Artificial Sequence
  Description of Artificial Sequence: Synthetic oligonucleotide
caaguuuccuuagugucaa

SEQ ID NO: 142081 - RNA, 19 nt, Artificial Sequence
  Description of Artificial Sequence: Synthetic oligonucleotide
gucaaaaguuaaaaauaaa

SEQ ID NO: 142082 - RNA, 19 nt, Artificial Sequence
  Description of Artificial Sequence: Synthetic oligonucleotide
gcugcuuuuaugcaacagg

SEQ ID NO: 142083 - RNA, 19 nt, Artificial Sequence
  Description of Artificial Sequence: Synthetic oligonucleotide
guaauaggcaaagauuuag

SEQ ID NO: 142084 - RNA, 19 nt, Artificial Sequence
  Description of Artificial Sequence: Synthetic oligonucleotide
gcuccaggauuuguaauua

SEQ ID NO: 142085 - RNA, 19 nt, Artificial Sequence
  Description of Artificial Sequence: Synthetic oligonucleotide
aaagucauuaucugaacau

SEQ ID NO: 142086 - RNA, 19 nt, Artificial Sequence
  Description of Artificial Sequence: Synthetic oligonucleotide
ugaaaugcauugcagguuu

SEQ ID NO: 142087 - RNA, 19 nt, Artificial Sequence
  Description of Artificial Sequence: Synthetic oligonucleotide
ugguaaauggauaugauuu

SEQ ID NO: 142088 - RNA, 19 nt, Artificial Sequence
  Description of Artificial Sequence: Synthetic oligonucleotide
uccuaucaguuuauauuuc

SEQ ID NO: 142089 - RNA, 19 nt, Artificial Sequence
  Description of Artificial Sequence: Synthetic oligonucleotide
cucuaugauuugaguucag

SEQ ID NO: 142090 - RNA, 19 nt, Artificial Sequence
  Description of Artificial Sequence: Synthetic oligonucleotide
guguuuaaggauucuaccu

SEQ ID NO: 142091 - RNA, 19 nt, Artificial Sequence
  Description of Artificial Sequence: Synthetic oligonucleotide
uaaugcagauauauguaua

SEQ ID NO: 142092 - RNA, 19 nt, Artificial Sequence
  Description of Artificial Sequence: Synthetic oligonucleotide
auaucuauauagaggucuu

SEQ ID NO: 142093 - RNA, 19 nt, Artificial Sequence
  Description of Artificial Sequence: Synthetic oligonucleotide
uucuauauacugaucucua

SEQ ID NO: 142094 - RNA, 19 nt, Artificial Sequence
  Description of Artificial Sequence: Synthetic oligonucleotide
auauagauaucaauguuuc

SEQ ID NO: 142095 - RNA, 19 nt, Artificial Sequence
  Description of Artificial Sequence: Synthetic oligonucleotide
cauugaaaauccacuggua

SEQ ID NO: 142096 - RNA, 19 nt, Artificial Sequence
  Description of Artificial Sequence: Synthetic oligonucleotide
aaggaaauaccuguuauac

SEQ ID NO: 142097 - RNA, 19 nt, Artificial Sequence
  Description of Artificial Sequence: Synthetic oligonucleotide
cuaaaauuaugauacauaa

SEQ ID NO: 142098 - RNA, 19 nt, Artificial Sequence
  Description of Artificial Sequence: Synthetic oligonucleotide
auaucugagcaguuaauag

SEQ ID NO: 142099 - RNA, 19 nt, Artificial Sequence
  Description of Artificial Sequence: Synthetic oligonucleotide
ggcuuuaaauuuaucccaa

SEQ ID NO: 142100 - RNA, 19 nt, Artificial Sequence
  Description of Artificial Sequence: Synthetic oligonucleotide
aagccugcuacaccaauua

SEQ ID NO: 142101 - RNA, 19 nt, Artificial Sequence
  Description of Artificial Sequence: Synthetic oligonucleotide
acuucuaaagaaaacaaau

SEQ ID NO: 142102 - RNA, 19 nt, Artificial Sequence
  Description of Artificial Sequence: Synthetic oligonucleotide
uucacuguuauuuugaguu

SEQ ID NO: 142103 - RNA, 19 nt, Artificial Sequence
  Description of Artificial Sequence: Synthetic oligonucleotide
uuauguguugagaucagug

SEQ ID NO: 142104 - RNA, 19 nt, Artificial Sequence
  Description of Artificial Sequence: Synthetic oligonucleotide
gacugcuggauagucuccc

SEQ ID NO: 142105 - RNA, 19 nt, Artificial Sequence
  Description of Artificial Sequence: Synthetic oligonucleotide
cagucugaucaaugaagca

SEQ ID NO: 142106 - RNA, 19 nt, Artificial Sequence
  Description of Artificial Sequence: Synthetic oligonucleotide
auucgauuaguuuuugauu

SEQ ID NO: 142107 - RNA, 19 nt, Artificial Sequence
  Description of Artificial Sequence: Synthetic oligonucleotide
uuuuugcaacaucuagaau

SEQ ID NO: 142108 - RNA, 19 nt, Artificial Sequence
  Description of Artificial Sequence: Synthetic oligonucleotide
uuuaauuuucacaucacug

SEQ ID NO: 142109 - RNA, 19 nt, Artificial Sequence
  Description of Artificial Sequence: Synthetic oligonucleotide
guacauaauguaucauacu

SEQ ID NO: 142110 - RNA, 19 nt, Artificial Sequence
  Description of Artificial Sequence: Synthetic oligonucleotide
uauagucuugaacacuguu

SEQ ID NO: 142111 - RNA, 19 nt, Artificial Sequence
  Description of Artificial Sequence: Synthetic oligonucleotide
uaaagguagucugccccuu

SEQ ID NO: 142112 - RNA, 19 nt, Artificial Sequence
  Description of Artificial Sequence: Synthetic oligonucleotide
uccuuccucucucuuuuuu

SEQ ID NO: 142113 - RNA, 19 nt, Artificial Sequence
  Description of Artificial Sequence: Synthetic oligonucleotide
uuaguuaaguagaaauguu

SEQ ID NO: 142114 - RNA, 19 nt, Artificial Sequence
  Description of Artificial Sequence: Synthetic oligonucleotide
ucuggucaccaugccagua

SEQ ID NO: 142115 - RNA, 19 nt, Artificial Sequence
  Description of Artificial Sequence: Synthetic oligonucleotide
aguccuagguuauugugua

SEQ ID NO: 142116 - RNA, 19 nt, Artificial Sequence
  Description of Artificial Sequence: Synthetic oligonucleotide
agguugcaauugaacauau

SEQ ID NO: 142117 - RNA, 19 nt, Artificial Sequence
  Description of Artificial Sequence: Synthetic oligonucleotide
uuaggaauacaggugguuu

SEQ ID NO: 142118 - RNA, 19 nt, Artificial Sequence
  Description of Artificial Sequence: Synthetic oligonucleotide
uuaaauauauagaugcaaa

SEQ ID NO: 142119 - RNA, 19 nt, Artificial Sequence
  Description of Artificial Sequence: Synthetic oligonucleotide
auugcagcacuacuuuaaa

SEQ ID NO: 142120 - RNA, 19 nt, Artificial Sequence
  Description of Artificial Sequence: Synthetic oligonucleotide
auauuagauuaugucucac

SEQ ID NO: 142121 - RNA, 19 nt, Artificial Sequence
  Description of Artificial Sequence: Synthetic oligonucleotide
cauagcacugcucauuuua

SEQ ID NO: 142122 - RNA, 19 nt, Artificial Sequence
  Description of Artificial Sequence: Synthetic oligonucleotide
acuuuuauuuuguguaauu

SEQ ID NO: 142123 - RNA, 19 nt, Artificial Sequence
  Description of Artificial Sequence: Synthetic oligonucleotide
uugaugacacugucuauca

SEQ ID NO: 142124 - RNA, 19 nt, Artificial Sequence
  Description of Artificial Sequence: Synthetic oligonucleotide
aaaaaagagcaaaugaagc

SEQ ID NO: 142125 - RNA, 19 nt, Artificial Sequence
  Description of Artificial Sequence: Synthetic oligonucleotide
cagaugcaaauguuaguga

SEQ ID NO: 142126 - RNA, 19 nt, Artificial Sequence
  Description of Artificial Sequence: Synthetic oligonucleotide
agaaguaaugugcagcauu

SEQ ID NO: 142127 - RNA, 19 nt, Artificial Sequence
  Description of Artificial Sequence: Synthetic oligonucleotide
uaugguccaaucagauaca

SEQ ID NO: 142128 - RNA, 19 nt, Artificial Sequence
  Description of Artificial Sequence: Synthetic oligonucleotide
aauauugugucuacaauug

SEQ ID NO: 142129 - RNA, 19 nt, Artificial Sequence
  Description of Artificial Sequence: Synthetic oligonucleotide
gcaaaaaacacaguaacag

SEQ ID NO: 142130 - RNA, 19 nt, Artificial Sequence
  Description of Artificial Sequence: Synthetic oligonucleotide
ggaugaauauuaucugaua

SEQ ID NO: 142131 - RNA, 19 nt, Artificial Sequence
  Description of Artificial Sequence: Synthetic oligonucleotide
aucaagucaaaaucaguuu

SEQ ID NO: 142132 - RNA, 19 nt, Artificial Sequence
  Description of Artificial Sequence: Synthetic oligonucleotide
ugaaaagaagguguaucau

SEQ ID NO: 142133 - RNA, 19 nt, Artificial Sequence
  Description of Artificial Sequence: Synthetic oligonucleotide
uauuuuauauugucacuag

SEQ ID NO: 142134 - RNA, 19 nt, Artificial Sequence
  Description of Artificial Sequence: Synthetic oligonucleotide
gaaucucuuaaguauaauu

SEQ ID NO: 142135 - RNA, 19 nt, Artificial Sequence
  Description of Artificial Sequence: Synthetic oligonucleotide
uccauaaugacaugggcau

SEQ ID NO: 142136 - RNA, 19 nt, Artificial Sequence
  Description of Artificial Sequence: Synthetic oligonucleotide
uauaccguaacauucuggc

SEQ ID NO: 142137 - RNA, 19 nt, Artificial Sequence
  Description of Artificial Sequence: Synthetic oligonucleotide
caaauaacaauuagaaaag

SEQ ID NO: 142138 - RNA, 19 nt, Artificial Sequence
  Description of Artificial Sequence: Synthetic oligonucleotide
gauagguuuaacaaaaaaa

SEQ ID NO: 142139 - RNA, 19 nt, Artificial Sequence
  Description of Artificial Sequence: Synthetic oligonucleotide
auuuacuuguauauaaugc

SEQ ID NO: 142140 - RNA, 19 nt, Artificial Sequence
  Description of Artificial Sequence: Synthetic oligonucleotide
caccuucaggaggacuaug

SEQ ID NO: 142141 - RNA, 19 nt, Artificial Sequence
  Description of Artificial Sequence: Synthetic oligonucleotide
guccuuugaugcuauaaaa

SEQ ID NO: 142142 - RNA, 19 nt, Artificial Sequence
  Description of Artificial Sequence: Synthetic oligonucleotide
auacaaacaacuuugaagg

SEQ ID NO: 142143 - RNA, 19 nt, Artificial Sequence
  Description of Artificial Sequence: Synthetic oligonucleotide
gcaacagaagacacuguuu

SEQ ID NO: 142144 - RNA, 19 nt, Artificial Sequence
  Description of Artificial Sequence: Synthetic oligonucleotide
uauucaagucaguucuuug

SEQ ID NO: 142145 - RNA, 19 nt, Artificial Sequence
  Description of Artificial Sequence: Synthetic oligonucleotide
gucagguuccugcuguucu

SEQ ID NO: 142146 - RNA, 19 nt, Artificial Sequence
  Description of Artificial Sequence: Synthetic oligonucleotide
uccuacagaaaagugauuc

SEQ ID NO: 142147 - RNA, 19 nt, Artificial Sequence
  Description of Artificial Sequence: Synthetic oligonucleotide
cugugagggugaacaggaa

SEQ ID NO: 142148 - RNA, 19 nt, Artificial Sequence
  Description of Artificial Sequence: Synthetic oligonucleotide
aaugccuuguggaaacagg

SEQ ID NO: 142149 - RNA, 19 nt, Artificial Sequence
  Description of Artificial Sequence: Synthetic oligonucleotide
gaaguccaagugauucaug

SEQ ID NO: 142150 - RNA, 19 nt, Artificial Sequence
  Description of Artificial Sequence: Synthetic oligonucleotide
guacugaggaauguaggaa

SEQ ID NO: 142151 - RNA, 19 nt, Artificial Sequence
  Description of Artificial Sequence: Synthetic oligonucleotide
aaaaaaaucugaggauagu

SEQ ID NO: 142152 - RNA, 19 nt, Artificial Sequence
  Description of Artificial Sequence: Synthetic oligonucleotide
ugcuuuacucuuucuguuu

SEQ ID NO: 142153 - RNA, 19 nt, Artificial Sequence
  Description of Artificial Sequence: Synthetic oligonucleotide
uuuaaagggcacucuauga

SEQ ID NO: 142154 - RNA, 19 nt, Artificial Sequence
  Description of Artificial Sequence: Synthetic oligonucleotide
aauugauuuauugucuaag

SEQ ID NO: 142155 - RNA, 19 nt, Artificial Sequence
  Description of Artificial Sequence: Synthetic oligonucleotide
gaaaauaacaccacaagua

SEQ ID NO: 142156 - RNA, 19 nt, Artificial Sequence
  Description of Artificial Sequence: Synthetic oligonucleotide
agggaaauuguuacggaag

SEQ ID NO: 142157 - RNA, 19 nt, Artificial Sequence
  Description of Artificial Sequence: Synthetic oligonucleotide
gcuuuucacuggaacauuu

SEQ ID NO: 142158 - RNA, 19 nt, Artificial Sequence
  Description of Artificial Sequence: Synthetic oligonucleotide
uccuucauauucccuuuug

SEQ ID NO: 142159 - RNA, 19 nt, Artificial Sequence
  Description of Artificial Sequence: Synthetic oligonucleotide
gauauguuuaccuuguuuu

SEQ ID NO: 142160 - RNA, 19 nt, Artificial Sequence
  Description of Artificial Sequence: Synthetic oligonucleotide
uauagguuuacuuuuguua

SEQ ID NO: 142161 - RNA, 19 nt, Artificial Sequence
  Description of Artificial Sequence: Synthetic oligonucleotide
aagcuaguuaaagguucgu

SEQ ID NO: 142162 - RNA, 19 nt, Artificial Sequence
  Description of Artificial Sequence: Synthetic oligonucleotide
uuguauuaagaccccuuua

SEQ ID NO: 142163 - RNA, 19 nt, Artificial Sequence
  Description of Artificial Sequence: Synthetic oligonucleotide
aauauggauaauccaaauu

SEQ ID NO: 142164 - RNA, 19 nt, Artificial Sequence
  Description of Artificial Sequence: Synthetic oligonucleotide
ugaccuagaaucuuuguga

SEQ ID NO: 142165 - RNA, 19 nt, Artificial Sequence
  Description of Artificial Sequence: Synthetic oligonucleotide
agguuuuuucuauuaaaau

SEQ ID NO: 142166 - RNA, 19 nt, Artificial Sequence
  Description of Artificial Sequence: Synthetic oligonucleotide
uauuuauauuucuaaaucc

SEQ ID NO: 142167 - RNA, 19 nt, Artificial Sequence
  Description of Artificial Sequence: Synthetic oligonucleotide
cgagguauuucaaggugua

SEQ ID NO: 142168 - RNA, 19 nt, Artificial Sequence
  Description of Artificial Sequence: Synthetic oligonucleotide
aguauccuauuucaaagga

SEQ ID NO: 142169 - RNA, 19 nt, Artificial Sequence
  Description of Artificial Sequence: Synthetic oligonucleotide
agauauagcaguuuugcca

SEQ ID NO: 142170 - RNA, 19 nt, Artificial Sequence
  Description of Artificial Sequence: Synthetic oligonucleotide
aaauguagacauuguucaa

SEQ ID NO: 142171 - RNA, 19 nt, Artificial Sequence
  Description of Artificial Sequence: Synthetic oligonucleotide
acuguauguuauuggcacg

SEQ ID NO: 142172 - RNA, 19 nt, Artificial Sequence
  Description of Artificial Sequence: Synthetic oligonucleotide
guguuguuuacauuuugcu

SEQ ID NO: 142173 - RNA, 19 nt, Artificial Sequence
  Description of Artificial Sequence: Synthetic oligonucleotide
ugugacauuuaaaaauauu

SEQ ID NO: 142174 - RNA, 19 nt, Artificial Sequence
  Description of Artificial Sequence: Synthetic oligonucleotide
uucuuuaaaaauguuacug

SEQ ID NO: 142175 - RNA, 19 nt, Artificial Sequence
  Description of Artificial Sequence: Synthetic oligonucleotide
gcuaaagauacauuauccu

SEQ ID NO: 142176 - RNA, 19 nt, Artificial Sequence
  Description of Artificial Sequence: Synthetic oligonucleotide
uuuuuuaaaaagucuccau

SEQ ID NO: 142177 - RNA, 19 nt, Artificial Sequence
  Description of Artificial Sequence: Synthetic oligonucleotide
uucaaauuaaauuaacaua

SEQ ID NO: 142178 - RNA, 19 nt, Artificial Sequence
  Description of Artificial Sequence: Synthetic oligonucleotide
aacuagaaguuagaaaguu

SEQ ID NO: 142179 - RNA, 19 nt, Artificial Sequence
  Description of Artificial Sequence: Synthetic oligonucleotide
uuaaaaguuuuccacauaa

SEQ ID NO: 142180 - RNA, 19 nt, Artificial Sequence
  Description of Artificial Sequence: Synthetic oligonucleotide
augaaaguccuucugauaa

SEQ ID NO: 142181 - RNA, 19 nt, Artificial Sequence
  Description of Artificial Sequence: Synthetic oligonucleotide
auuugacaaauagcuauaa

SEQ ID NO: 142182 - RNA, 19 nt, Artificial Sequence
  Description of Artificial Sequence: Synthetic oligonucleotide
auaggaacacucccuauca

SEQ ID NO: 142183 - RNA, 19 nt, Artificial Sequence
  Description of Artificial Sequence: Synthetic oligonucleotide
accaacauauuuugguuag

SEQ ID NO: 142184 - RNA, 19 nt, Artificial Sequence
  Description of Artificial Sequence: Synthetic oligonucleotide
guauauuccuucauauuaa

SEQ ID NO: 142185 - RNA, 19 nt, Artificial Sequence
  Description of Artificial Sequence: Synthetic oligonucleotide
aaaugacuuuuugucaguu

SEQ ID NO: 142186 - RNA, 19 nt, Artificial Sequence
  Description of Artificial Sequence: Synthetic oligonucleotide
uguuuugcauuaaaaauau

SEQ ID NO: 142187 - RNA, 19 nt, Artificial Sequence
  Description of Artificial Sequence: Synthetic oligonucleotide
uggcaugccuaagauaaaa

SEQ ID NO: 142188 - RNA, 19 nt, Artificial Sequence
  Description of Artificial Sequence: Synthetic oligonucleotide
auuguauauuuuuuccauc

SEQ ID NO: 142189 - RNA, 19 nt, Artificial Sequence
  Description of Artificial Sequence: Synthetic oligonucleotide
cucauaaauauucauuuuc

SEQ ID NO: 142190 - RNA, 19 nt, Artificial Sequence
  Description of Artificial Sequence: Synthetic oligonucleotide
cuucaaagucuuuuuucaa

SEQ ID NO: 142191 - RNA, 19 nt, Artificial Sequence
  Description of Artificial Sequence: Synthetic oligonucleotide
aucucauaaaaaagggaua

SEQ ID NO: 142192 - RNA, 19 nt, Artificial Sequence
  Description of Artificial Sequence: Synthetic oligonucleotide
agugcaucuuuuaaaauac

SEQ ID NO: 142193 - RNA, 19 nt, Artificial Sequence
  Description of Artificial Sequence: Synthetic oligonucleotide
cauuuuauuuggggaggaa

SEQ ID NO: 142194 - RNA, 19 nt, Artificial Sequence
  Description of Artificial Sequence: Synthetic oligonucleotide
acauguggcugagcagacu

SEQ ID NO: 142195 - RNA, 19 nt, Artificial Sequence
  Description of Artificial Sequence: Synthetic oligonucleotide
uuuuguauaauauuacuuc

SEQ ID NO: 142196 - RNA, 19 nt, Artificial Sequence
  Description of Artificial Sequence: Synthetic oligonucleotide
caaagauauguaaucacaa

SEQ ID NO: 142197 - RNA, 19 nt, Artificial Sequence
  Description of Artificial Sequence: Synthetic oligonucleotide
aacaaaaaaaacuauuuuu

SEQ ID NO: 142198 - RNA, 19 nt, Artificial Sequence
  Description of Artificial Sequence: Synthetic oligonucleotide
uuauaaugucauuugagag

SEQ ID NO: 142199 - RNA, 19 nt, Artificial Sequence
  Description of Artificial Sequence: Synthetic oligonucleotide
gaguuucaucaguacaguu

SEQ ID NO: 142200 - RNA, 19 nt, Artificial Sequence
  Description of Artificial Sequence: Synthetic oligonucleotide
ugguggacguuaauuguuu

SEQ ID NO: 142201 - RNA, 19 nt, Artificial Sequence
  Description of Artificial Sequence: Synthetic oligonucleotide
ugaauuugauagucuuuga

SEQ ID NO: 142202 - RNA, 19 nt, Artificial Sequence
  Description of Artificial Sequence: Synthetic oligonucleotide
aauuuaaucaagaaacuac

SEQ ID NO: 142203 - RNA, 19 nt, Artificial Sequence
  Description of Artificial Sequence: Synthetic oligonucleotide
ccuggaaccagugaaaagg

SEQ ID NO: 142204 - RNA, 19 nt, Artificial Sequence
  Description of Artificial Sequence: Synthetic oligonucleotide
gaaagcuggacuuaaauaa

SEQ ID NO: 142205 - RNA, 19 nt, Artificial Sequence
  Description of Artificial Sequence: Synthetic oligonucleotide
aucuuagaauuaauugaua

SEQ ID NO: 142206 - RNA, 19 nt, Artificial Sequence
  Description of Artificial Sequence: Synthetic oligonucleotide
aaaugucucuuuuaaaauc

SEQ ID NO: 142207 - RNA, 19 nt, Artificial Sequence
  Description of Artificial Sequence: Synthetic oligonucleotide
cuacuguauuuauuauaau

SEQ ID NO: 142208 - RNA, 19 nt, Artificial Sequence
  Description of Artificial Sequence: Synthetic oligonucleotide
uuuacacccuugaagguga

SEQ ID NO: 142209 - RNA, 19 nt, Artificial Sequence
  Description of Artificial Sequence: Synthetic oligonucleotide
aucucuuguuuuguguugu

SEQ ID NO: 142210 - RNA, 19 nt, Artificial Sequence
  Description of Artificial Sequence: Synthetic oligonucleotide
uaaauauauuguuuguaug

SEQ ID NO: 142211 - RNA, 19 nt, Artificial Sequence
  Description of Artificial Sequence: Synthetic oligonucleotide
guuucccuucuugccuucu

SEQ ID NO: 142212 - RNA, 19 nt, Artificial Sequence
  Description of Artificial Sequence: Synthetic oligonucleotide
uguuauaagucucuuccuu

SEQ ID NO: 142213 - RNA, 19 nt, Artificial Sequence
  Description of Artificial Sequence: Synthetic oligonucleotide
uucucaaauaaaguuuuuu

SEQ ID NO: 142214 - RNA, 19 nt, Artificial Sequence
  Description of Artificial Sequence: Synthetic oligonucleotide
auaaaguuuuuuuuaaaag

SEQ ID NO: 142215 - RNA, 19 nt, Artificial Sequence
  Description of Artificial Sequence: Synthetic oligonucleotide
augggguggcuggacgaga

SEQ ID NO: 142216 - RNA, 19 nt, Artificial Sequence
  Description of Artificial Sequence: Synthetic oligonucleotide
agcagcucuuggcucagca

SEQ ID NO: 142217 - RNA, 19 nt, Artificial Sequence
  Description of Artificial Sequence: Synthetic oligonucleotide
aaagaaugcacaguaugau

SEQ ID NO: 142218 - RNA, 19 nt, Artificial Sequence
  Description of Artificial Sequence: Synthetic oligonucleotide
ucagcucaguggaugugaa

SEQ ID NO: 142219 - RNA, 19 nt, Artificial Sequence
  Description of Artificial Sequence: Synthetic oligonucleotide
agucagaaguuccuguggg

SEQ ID NO: 142220 - RNA, 19 nt, Artificial Sequence
  Description of Artificial Sequence: Synthetic oligonucleotide
gccuggagcccaucucacc

SEQ ID NO: 142221 - RNA, 19 nt, Artificial Sequence
  Description of Artificial Sequence: Synthetic oligonucleotide
cuuuagaccuaaggacaga

SEQ ID NO: 142222 - RNA, 19 nt, Artificial Sequence
  Description of Artificial Sequence: Synthetic oligonucleotide
accucaggaugaugaugcc

SEQ ID NO: 142223 - RNA, 19 nt, Artificial Sequence
  Description of Artificial Sequence: Synthetic oligonucleotide
ccgugguggacccuguugu

SEQ ID NO: 142224 - RNA, 19 nt, Artificial Sequence
  Description of Artificial Sequence: Synthetic oligonucleotide
uccgugagaagcaauugca

SEQ ID NO: 142225 - RNA, 19 nt, Artificial Sequence
  Description of Artificial Sequence: Synthetic oligonucleotide
agcaggaauuacuucuuau

SEQ ID NO: 142226 - RNA, 19 nt, Artificial Sequence
  Description of Artificial Sequence: Synthetic oligonucleotide
uccagcagcagcaacaaau

SEQ ID NO: 142227 - RNA, 19 nt, Artificial Sequence
  Description of Artificial Sequence: Synthetic oligonucleotide
uccagaagcagcuucugau

SEQ ID NO: 142228 - RNA, 19 nt, Artificial Sequence
  Description of Artificial Sequence: Synthetic oligonucleotide
uagcagaguuucagaaaca

SEQ ID NO: 142229 - RNA, 19 nt, Artificial Sequence
  Description of Artificial Sequence: Synthetic oligonucleotide
agcaugagaacuugacacg

SEQ ID NO: 142230 - RNA, 19 nt, Artificial Sequence
  Description of Artificial Sequence: Synthetic oligonucleotide
ggcagcaccaggcucagcu

SEQ ID NO: 142231 - RNA, 19 nt, Artificial Sequence
  Description of Artificial Sequence: Synthetic oligonucleotide
uucaggagcauaucaaguu

SEQ ID NO: 142232 - RNA, 19 nt, Artificial Sequence
  Description of Artificial Sequence: Synthetic oligonucleotide
ugcaacaggaacuucuagc

SEQ ID NO: 142233 - RNA, 19 nt, Artificial Sequence
  Description of Artificial Sequence: Synthetic oligonucleotide
ccauaaaacagcaacaaga

SEQ ID NO: 142234 - RNA, 19 nt, Artificial Sequence
  Description of Artificial Sequence: Synthetic oligonucleotide
aacuccuagaaaaggagca

SEQ ID NO: 142235 - RNA, 19 nt, Artificial Sequence
  Description of Artificial Sequence: Synthetic oligonucleotide
agaaacuggagcagcagag

SEQ ID NO: 142236 - RNA, 19 nt, Artificial Sequence
  Description of Artificial Sequence: Synthetic oligonucleotide
ggcaagaacaggaaguaga

SEQ ID NO: 142237 - RNA, 19 nt, Artificial Sequence
  Description of Artificial Sequence: Synthetic oligonucleotide
agaggcaucgcagagaaca

SEQ ID NO: 142238 - RNA, 19 nt, Artificial Sequence
  Description of Artificial Sequence: Synthetic oligonucleotide
agcagcuuccuccucucag

SEQ ID NO: 142239 - RNA, 19 nt, Artificial Sequence
  Description of Artificial Sequence: Synthetic oligonucleotide
gaggcaaagauagaggacg

SEQ ID NO: 142240 - RNA, 19 nt, Artificial Sequence
  Description of Artificial Sequence: Synthetic oligonucleotide
gagaaagggcaguggcaag

SEQ ID NO: 142241 - RNA, 19 nt, Artificial Sequence
  Description of Artificial Sequence: Synthetic oligonucleotide
guacagaaguaaagcagaa

SEQ ID NO: 142242 - RNA, 19 nt, Artificial Sequence
  Description of Artificial Sequence: Synthetic oligonucleotide
agcuucaagaguuccuacu

SEQ ID NO: 142243 - RNA, 19 nt, Artificial Sequence
  Description of Artificial Sequence: Synthetic oligonucleotide
ugaguaaaucagcaacgaa

SEQ ID NO: 142244 - RNA, 19 nt, Artificial Sequence
  Description of Artificial Sequence: Synthetic oligonucleotide
aagacacuccaacuaaugg

SEQ ID NO: 142245 - RNA, 19 nt, Artificial Sequence
  Description of Artificial Sequence: Synthetic oligonucleotide
gaaaaaaucauuccgugag

SEQ ID NO: 142246 - RNA, 19 nt, Artificial Sequence
  Description of Artificial Sequence: Synthetic oligonucleotide
gccgccaucccaagcucug

SEQ ID NO: 142247 - RNA, 19 nt, Artificial Sequence
  Description of Artificial Sequence: Synthetic oligonucleotide
gguacacggcugcccacca

SEQ ID NO: 142248 - RNA, 19 nt, Artificial Sequence
  Description of Artificial Sequence: Synthetic oligonucleotide
acacaucauuggaucaaag

SEQ ID NO: 142249 - RNA, 19 nt, Artificial Sequence
  Description of Artificial Sequence: Synthetic oligonucleotide
gcucuccaccccuuagugg

SEQ ID NO: 142250 - RNA, 19 nt, Artificial Sequence
  Description of Artificial Sequence: Synthetic oligonucleotide
gaacaucuccauccuacaa

SEQ ID NO: 142251 - RNA, 19 nt, Artificial Sequence
  Description of Artificial Sequence: Synthetic oligonucleotide
aguacacauuaccaggagc

SEQ ID NO: 142252 - RNA, 19 nt, Artificial Sequence
  Description of Artificial Sequence: Synthetic oligonucleotide
cacaagaugcaaaggauga

SEQ ID NO: 142253 - RNA, 19 nt, Artificial Sequence
  Description of Artificial Sequence: Synthetic oligonucleotide
auuucccccuucgaaaaac

SEQ ID NO: 142254 - RNA, 19 nt, Artificial Sequence
  Description of Artificial Sequence: Synthetic oligonucleotide
cugccucugagcccaacuu

SEQ ID NO: 142255 - RNA, 19 nt, Artificial Sequence
  Description of Artificial Sequence: Synthetic oligonucleotide
ugaaggugcgguccagguu

SEQ ID NO: 142256 - RNA, 19 nt, Artificial Sequence
  Description of Artificial Sequence: Synthetic oligonucleotide
uaaaacagaaaguggcaga

SEQ ID NO: 142257 - RNA, 19 nt, Artificial Sequence
  Description of Artificial Sequence: Synthetic oligonucleotide
agaggagaagcagccccuu

SEQ ID NO: 142258 - RNA, 19 nt, Artificial Sequence
  Description of Artificial Sequence: Synthetic oligonucleotide
uacucaggcggaaggaugg

SEQ ID NO: 142259 - RNA, 19 nt, Artificial Sequence
  Description of Artificial Sequence: Synthetic oligonucleotide
gaaauguugucacuucauu

SEQ ID NO: 142260 - RNA, 19 nt, Artificial Sequence
  Description of Artificial Sequence: Synthetic oligonucleotide
ucaagaagcgaauguuuga

SEQ ID NO: 142261 - RNA, 19 nt, Artificial Sequence
  Description of Artificial Sequence: Synthetic oligonucleotide
aggugacagaauccucagu

SEQ ID NO: 142262 - RNA, 19 nt, Artificial Sequence
  Description of Artificial Sequence: Synthetic oligonucleotide
ucaguagcaguucuccagg

SEQ ID NO: 142263 - RNA, 19 nt, Artificial Sequence
  Description of Artificial Sequence: Synthetic oligonucleotide
gcucuggucccaguucacc

SEQ ID NO: 142264 - RNA, 19 nt, Artificial Sequence
  Description of Artificial Sequence: Synthetic oligonucleotide
caaacaaugggccaacugg

SEQ ID NO: 142265 - RNA, 19 nt, Artificial Sequence
  Description of Artificial Sequence: Synthetic oligonucleotide
gaaguguuacugaaaauga

SEQ ID NO: 142266 - RNA, 19 nt, Artificial Sequence
  Description of Artificial Sequence: Synthetic oligonucleotide
agacuucgguuuugccccc

SEQ ID NO: 142267 - RNA, 19 nt, Artificial Sequence
  Description of Artificial Sequence: Synthetic oligonucleotide
cuaccccucaugccgagca

SEQ ID NO: 142268 - RNA, 19 nt, Artificial Sequence
  Description of Artificial Sequence: Synthetic oligonucleotide
aaaugguuucacagcaacg

SEQ ID NO: 142269 - RNA, 19 nt, Artificial Sequence
  Description of Artificial Sequence: Synthetic oligonucleotide
gcauucuaauucaugaaga

SEQ ID NO: 142270 - RNA, 19 nt, Artificial Sequence
  Description of Artificial Sequence: Synthetic oligonucleotide
auuccaugaaccugcuaag

SEQ ID NO: 142271 - RNA, 19 nt, Artificial Sequence
  Description of Artificial Sequence: Synthetic oligonucleotide
gucuuuauaccucuccuuc

SEQ ID NO: 142272 - RNA, 19 nt, Artificial Sequence
  Description of Artificial Sequence: Synthetic oligonucleotide
cuuugcccaacauuaccuu

SEQ ID NO: 142273 - RNA, 19 nt, Artificial Sequence
  Description of Artificial Sequence: Synthetic oligonucleotide
uggggcuucccgcagugcc

SEQ ID NO: 142274 - RNA, 19 nt, Artificial Sequence
  Description of Artificial Sequence: Synthetic oligonucleotide
caucccagcucaaugcuuc

SEQ ID NO: 142275 - RNA, 19 nt, Artificial Sequence
  Description of Artificial Sequence: Synthetic oligonucleotide
cgaauucacucaaagaaaa

SEQ ID NO: 142276 - RNA, 19 nt, Artificial Sequence
  Description of Artificial Sequence: Synthetic oligonucleotide
agcagaagugugagacgca

SEQ ID NO: 142277 - RNA, 19 nt, Artificial Sequence
  Description of Artificial Sequence: Synthetic oligonucleotide
agacgcuuaggcaaggugu

SEQ ID NO: 142278 - RNA, 19 nt, Artificial Sequence
  Description of Artificial Sequence: Synthetic oligonucleotide
uuccucugccugggcagua

SEQ ID NO: 142279 - RNA, 19 nt, Artificial Sequence
  Description of Artificial Sequence: Synthetic oligonucleotide
auggaggcagcaucccggc

SEQ ID NO: 142280 - RNA, 19 nt, Artificial Sequence
  Description of Artificial Sequence: Synthetic oligonucleotide
caucuuccagccacccuca

SEQ ID NO: 142281 - RNA, 19 nt, Artificial Sequence
  Description of Artificial Sequence: Synthetic oligonucleotide
auguuacuuuagagggaaa

SEQ ID NO: 142282 - RNA, 19 nt, Artificial Sequence
  Description of Artificial Sequence: Synthetic oligonucleotide
agccacccaacagcagcca

SEQ ID NO: 142283 - RNA, 19 nt, Artificial Sequence
  Description of Artificial Sequence: Synthetic oligonucleotide
accaggcucuccugcagca

SEQ ID NO: 142284 - RNA, 19 nt, Artificial Sequence
  Description of Artificial Sequence: Synthetic oligonucleotide
auuuauuauugaaagaaca

SEQ ID NO: 142285 - RNA, 19 nt, Artificial Sequence
  Description of Artificial Sequence: Synthetic oligonucleotide
aaaugcgacagcaaaagcu

SEQ ID NO: 142286 - RNA, 19 nt, Artificial Sequence
  Description of Artificial Sequence: Synthetic oligonucleotide
uucuuguagcugguggagu

SEQ ID NO: 142287 - RNA, 19 nt, Artificial Sequence
  Description of Artificial Sequence: Synthetic oligonucleotide
uucccuuacauccucaguc

SEQ ID NO: 142288 - RNA, 19 nt, Artificial Sequence
  Description of Artificial Sequence: Synthetic oligonucleotide
cucccuuggcaacaaaaga

SEQ ID NO: 142289 - RNA, 19 nt, Artificial Sequence
  Description of Artificial Sequence: Synthetic oligonucleotide
agagaauuucaccuggcau

SEQ ID NO: 142290 - RNA, 19 nt, Artificial Sequence
  Description of Artificial Sequence: Synthetic oligonucleotide
uuagagguacccacaaauu

SEQ ID NO: 142291 - RNA, 19 nt, Artificial Sequence
  Description of Artificial Sequence: Synthetic oligonucleotide
ugccccgucacagaccccu

SEQ ID NO: 142292 - RNA, 19 nt, Artificial Sequence
  Description of Artificial Sequence: Synthetic oligonucleotide
ugaaccgaacccagucugc

SEQ ID NO: 142293 - RNA, 19 nt, Artificial Sequence
  Description of Artificial Sequence: Synthetic oligonucleotide
caccuuugccucagagcac

SEQ ID NO: 142294 - RNA, 19 nt, Artificial Sequence
  Description of Artificial Sequence: Synthetic oligonucleotide
cguuggcucagcuggucau

SEQ ID NO: 142295 - RNA, 19 nt, Artificial Sequence
  Description of Artificial Sequence: Synthetic oligonucleotide
uucaacagcaacaccagca

SEQ ID NO: 142296 - RNA, 19 nt, Artificial Sequence
  Description of Artificial Sequence: Synthetic oligonucleotide
aauucuuggagaagcagaa

SEQ ID NO: 142297 - RNA, 19 nt, Artificial Sequence
  Description of Artificial Sequence: Synthetic oligonucleotide
agcaauaccagcagcagau

SEQ ID NO: 142298 - RNA, 19 nt, Artificial Sequence
  Description of Artificial Sequence: Synthetic oligonucleotide
uccacaugaacaaacugcu

SEQ ID NO: 142299 - RNA, 19 nt, Artificial Sequence
  Description of Artificial Sequence: Synthetic oligonucleotide
uuucgaaaucuauugaaca

SEQ ID NO: 142300 - RNA, 19 nt, Artificial Sequence
  Description of Artificial Sequence: Synthetic oligonucleotide
aacugaagcaaccaggcag

SEQ ID NO: 142301 - RNA, 19 nt, Artificial Sequence
  Description of Artificial Sequence: Synthetic oligonucleotide
gucaccuugaggaagcaga

SEQ ID NO: 142302 - RNA, 19 nt, Artificial Sequence
  Description of Artificial Sequence: Synthetic oligonucleotide
aggaagagcuucaggggga

SEQ ID NO: 142303 - RNA, 19 nt, Artificial Sequence
  Description of Artificial Sequence: Synthetic oligonucleotide
accaggcgaugcaggaaga

SEQ ID NO: 142304 - RNA, 19 nt, Artificial Sequence
  Description of Artificial Sequence: Synthetic oligonucleotide
acagagcgcccucuagugg

SEQ ID NO: 142305 - RNA, 19 nt, Artificial Sequence
  Description of Artificial Sequence: Synthetic oligonucleotide
gcaacagcacuaggagcga

SEQ ID NO: 142306 - RNA, 19 nt, Artificial Sequence
  Description of Artificial Sequence: Synthetic oligonucleotide
acagcagugcuugugugga

SEQ ID NO: 142307 - RNA, 19 nt, Artificial Sequence
  Description of Artificial Sequence: Synthetic oligonucleotide
augacacacugggacaagu

SEQ ID NO: 142308 - RNA, 19 nt, Artificial Sequence
  Description of Artificial Sequence: Synthetic oligonucleotide
uuggggcugugaaggucaa

SEQ ID NO: 142309 - RNA, 19 nt, Artificial Sequence
  Description of Artificial Sequence: Synthetic oligonucleotide
aggaggaaccaguggacag

SEQ ID NO: 142310 - RNA, 19 nt, Artificial Sequence
  Description of Artificial Sequence: Synthetic oligonucleotide
gugaugaagaugcucagau

SEQ ID NO: 142311 - RNA, 19 nt, Artificial Sequence
  Description of Artificial Sequence: Synthetic oligonucleotide
uccaggaaauggaaucugg

SEQ ID NO: 142312 - RNA, 19 nt, Artificial Sequence
  Description of Artificial Sequence: Synthetic oligonucleotide
gggagcaggcugcuuuuau

SEQ ID NO: 142313 - RNA, 19 nt, Artificial Sequence
  Description of Artificial Sequence: Synthetic oligonucleotide
ugcaacagccuuuccugga

SEQ ID NO: 142314 - RNA, 19 nt, Artificial Sequence
  Description of Artificial Sequence: Synthetic oligonucleotide
aacccacgcacacacgugc

SEQ ID NO: 142315 - RNA, 19 nt, Artificial Sequence
  Description of Artificial Sequence: Synthetic oligonucleotide
cgcucucugugcgccaagc

SEQ ID NO: 142316 - RNA, 19 nt, Artificial Sequence
  Description of Artificial Sequence: Synthetic oligonucleotide
cuccgcuggcugcgguugg

SEQ ID NO: 142317 - RNA, 19 nt, Artificial Sequence
  Description of Artificial Sequence: Synthetic oligonucleotide
gcauggauggauuagagaa

SEQ ID NO: 142318 - RNA, 19 nt, Artificial Sequence
  Description of Artificial Sequence: Synthetic oligonucleotide
aacaccgucucgucuccag

SEQ ID NO: 142319 - RNA, 19 nt, Artificial Sequence
  Description of Artificial Sequence: Synthetic oligonucleotide
ggacucacucuuccccugc

SEQ ID NO: 142320 - RNA, 19 nt, Artificial Sequence
  Description of Artificial Sequence: Synthetic oligonucleotide
cugccucuguuuuaccuca

SEQ ID NO: 142321 - RNA, 19 nt, Artificial Sequence
  Description of Artificial Sequence: Synthetic oligonucleotide
acccagcaauggaccgccc

SEQ ID NO: 142322 - RNA, 19 nt, Artificial Sequence
  Description of Artificial Sequence: Synthetic oligonucleotide
cccuccagccuggcucugc

SEQ ID NO: 142323 - RNA, 19 nt, Artificial Sequence
  Description of Artificial Sequence: Synthetic oligonucleotide
caacuggaauugccuauga

SEQ ID NO: 142324 - RNA, 19 nt, Artificial Sequence
  Description of Artificial Sequence: Synthetic oligonucleotide
accccuugaugcugaaaca

SEQ ID NO: 142325 - RNA, 19 nt, Artificial Sequence
  Description of Artificial Sequence: Synthetic oligonucleotide
accagugcguuuguggcaa

SEQ ID NO: 142326 - RNA, 19 nt, Artificial Sequence
  Description of Artificial Sequence: Synthetic oligonucleotide
auuccaccacccacccuga

SEQ ID NO: 142327 - RNA, 19 nt, Artificial Sequence
  Description of Artificial Sequence: Synthetic oligonucleotide
agcaugcuggacgaauaca

SEQ ID NO: 142328 - RNA, 19 nt, Artificial Sequence
  Description of Artificial Sequence: Synthetic oligonucleotide
agaguaucuggucacgacu

SEQ ID NO: 142329 - RNA, 19 nt, Artificial Sequence
  Description of Artificial Sequence: Synthetic oligonucleotide
ugcaagaaacugggcugcu

SEQ ID NO: 142330 - RNA, 19 nt, Artificial Sequence
  Description of Artificial Sequence: Synthetic oligonucleotide
uaaauaaaugugagcgaau

SEQ ID NO: 142331 - RNA, 19 nt, Artificial Sequence
  Description of Artificial Sequence: Synthetic oligonucleotide
uucaaggucgaaaagccag

SEQ ID NO: 142332 - RNA, 19 nt, Artificial Sequence
  Description of Artificial Sequence: Synthetic oligonucleotide
gccuggaggaaauacagcu

SEQ ID NO: 142333 - RNA, 19 nt, Artificial Sequence
  Description of Artificial Sequence: Synthetic oligonucleotide
uuguucauucugaacauca

SEQ ID NO: 142334 - RNA, 19 nt, Artificial Sequence
  Description of Artificial Sequence: Synthetic oligonucleotide
acucacuguuguauggcac

SEQ ID NO: 142335 - RNA, 19 nt, Artificial Sequence
  Description of Artificial Sequence: Synthetic oligonucleotide
ccaacccccuggacggaca

SEQ ID NO: 142336 - RNA, 19 nt, Artificial Sequence
  Description of Artificial Sequence: Synthetic oligonucleotide
agaagcuggaccccaggau

SEQ ID NO: 142337 - RNA, 19 nt, Artificial Sequence
  Description of Artificial Sequence: Synthetic oligonucleotide
uacuccuaggugaugacuc

SEQ ID NO: 142338 - RNA, 19 nt, Artificial Sequence
  Description of Artificial Sequence: Synthetic oligonucleotide
cucaaaaguuuuuuuccuc

SEQ ID NO: 142339 - RNA, 19 nt, Artificial Sequence
  Description of Artificial Sequence: Synthetic oligonucleotide
cauuaccuugugguggacu

SEQ ID NO: 142340 - RNA, 19 nt, Artificial Sequence
  Description of Artificial Sequence: Synthetic oligonucleotide
uugggguggacagugacac

SEQ ID NO: 142341 - RNA, 19 nt, Artificial Sequence
  Description of Artificial Sequence: Synthetic oligonucleotide
ccauuuggaaugagcuaca

SEQ ID NO: 142342 - RNA, 19 nt, Artificial Sequence
  Description of Artificial Sequence: Synthetic oligonucleotide
acucguccggugcugcacg

SEQ ID NO: 142343 - RNA, 19 nt, Artificial Sequence
  Description of Artificial Sequence: Synthetic oligonucleotide
gcauggcuguuggcugugu

SEQ ID NO: 142344 - RNA, 19 nt, Artificial Sequence
  Description of Artificial Sequence: Synthetic oligonucleotide
ucaucgagcuggcuuccaa

SEQ ID NO: 142345 - RNA, 19 nt, Artificial Sequence
  Description of Artificial Sequence: Synthetic oligonucleotide
aaguggccucaggagagcu

SEQ ID NO: 142346 - RNA, 19 nt, Artificial Sequence
  Description of Artificial Sequence: Synthetic oligonucleotide
ugaagaauggguuugcugu

SEQ ID NO: 142347 - RNA, 19 nt, Artificial Sequence
  Description of Artificial Sequence: Synthetic oligonucleotide
uugugaggcccccuggcca

SEQ ID NO: 142348 - RNA, 19 nt, Artificial Sequence
  Description of Artificial Sequence: Synthetic oligonucleotide
aucacgcugaagaauccac

SEQ ID NO: 142349 - RNA, 19 nt, Artificial Sequence
  Description of Artificial Sequence: Synthetic oligonucleotide
cagccaugggguucugcuu

SEQ ID NO: 142350 - RNA, 19 nt, Artificial Sequence
  Description of Artificial Sequence: Synthetic oligonucleotide
uuuuuaauucaguugcaau

SEQ ID NO: 142351 - RNA, 19 nt, Artificial Sequence
  Description of Artificial Sequence: Synthetic oligonucleotide
uuaccgccaaauacuugag

SEQ ID NO: 142352 - RNA, 19 nt, Artificial Sequence
  Description of Artificial Sequence: Synthetic oligonucleotide
gagaccaacuaaauauaag

SEQ ID NO: 142353 - RNA, 19 nt, Artificial Sequence
  Description of Artificial Sequence: Synthetic oligonucleotide
gcaagauauugauuguaga

SEQ ID NO: 142354 - RNA, 19 nt, Artificial Sequence
  Description of Artificial Sequence: Synthetic oligonucleotide
aucuggauguucaccaugg

SEQ ID NO: 142355 - RNA, 19 nt, Artificial Sequence
  Description of Artificial Sequence: Synthetic oligonucleotide
gaaacgguacccagcaggc

SEQ ID NO: 142356 - RNA, 19 nt, Artificial Sequence
  Description of Artificial Sequence: Synthetic oligonucleotide
ccuuuuaugcugaccccag

SEQ ID NO: 142357 - RNA, 19 nt, Artificial Sequence
  Description of Artificial Sequence: Synthetic oligonucleotide
gcauccuguacauuucacu

SEQ ID NO: 142358 - RNA, 19 nt, Artificial Sequence
  Description of Artificial Sequence: Synthetic oligonucleotide
uccaucgcuaugaugaagg

SEQ ID NO: 142359 - RNA, 19 nt, Artificial Sequence
  Description of Artificial Sequence: Synthetic oligonucleotide
ggaacuuuuucccuggcag

SEQ ID NO: 142360 - RNA, 19 nt, Artificial Sequence
  Description of Artificial Sequence: Synthetic oligonucleotide
guggagccccaaaugaggu

SEQ ID NO: 142361 - RNA, 19 nt, Artificial Sequence
  Description of Artificial Sequence: Synthetic oligonucleotide
uuggaacaggccuuggaga

SEQ ID NO: 142362 - RNA, 19 nt, Artificial Sequence
  Description of Artificial Sequence: Synthetic oligonucleotide
aaggguacaauauaaauau

SEQ ID NO: 142363 - RNA, 19 nt, Artificial Sequence
  Description of Artificial Sequence: Synthetic oligonucleotide
uugccuggacagguggccu

SEQ ID NO: 142364 - RNA, 19 nt, Artificial Sequence
  Description of Artificial Sequence: Synthetic oligonucleotide
uugauccucccaugggaga

SEQ ID NO: 142365 - RNA, 19 nt, Artificial Sequence
  Description of Artificial Sequence: Synthetic oligonucleotide
auguugaguaccuugaagc

SEQ ID NO: 142366 - RNA, 19 nt, Artificial Sequence
  Description of Artificial Sequence: Synthetic oligonucleotide
cauucaggaccaucgugaa

SEQ ID NO: 142367 - RNA, 19 nt, Artificial Sequence
  Description of Artificial Sequence: Synthetic oligonucleotide
agccuguggccaaagaguu

SEQ ID NO: 142368 - RNA, 19 nt, Artificial Sequence
  Description of Artificial Sequence: Synthetic oligonucleotide
uugauccagacauggucuu

SEQ ID NO: 142369 - RNA, 19 nt, Artificial Sequence
  Description of Artificial Sequence: Synthetic oligonucleotide
uaguaucugcuggauuuga

SEQ ID NO: 142370 - RNA, 19 nt, Artificial Sequence
  Description of Artificial Sequence: Synthetic oligonucleotide
augcauuggaaggccacac

SEQ ID NO: 142371 - RNA, 19 nt, Artificial Sequence
  Description of Artificial Sequence: Synthetic oligonucleotide
ccccuccucuaggagggua

SEQ ID NO: 142372 - RNA, 19 nt, Artificial Sequence
  Description of Artificial Sequence: Synthetic oligonucleotide
acaaagugacggcaaaaug

SEQ ID NO: 142373 - RNA, 19 nt, Artificial Sequence
  Description of Artificial Sequence: Synthetic oligonucleotide
guuuuggucauuugacgaa

SEQ ID NO: 142374 - RNA, 19 nt, Artificial Sequence
  Description of Artificial Sequence: Synthetic oligonucleotide
agcaauugaugacauuggc

SEQ ID NO: 142375 - RNA, 19 nt, Artificial Sequence
  Description of Artificial Sequence: Synthetic oligonucleotide
cugauggacgugugguguu

SEQ ID NO: 142376 - RNA, 19 nt, Artificial Sequence
  Description of Artificial Sequence: Synthetic oligonucleotide
uggcucuagaaggaggaca

SEQ ID NO: 142377 - RNA, 19 nt, Artificial Sequence
  Description of Artificial Sequence: Synthetic oligonucleotide
augaucucacagccaucug

SEQ ID NO: 142378 - RNA, 19 nt, Artificial Sequence
  Description of Artificial Sequence: Synthetic oligonucleotide
gugaugcaucagaagccug

SEQ ID NO: 142379 - RNA, 19 nt, Artificial Sequence
  Description of Artificial Sequence: Synthetic oligonucleotide
guguaaaugcccuucuagg

SEQ ID NO: 142380 - RNA, 19 nt, Artificial Sequence
  Description of Artificial Sequence: Synthetic oligonucleotide
gaaaugagcuggagccacu

SEQ ID NO: 142381 - RNA, 19 nt, Artificial Sequence
  Description of Artificial Sequence: Synthetic oligonucleotide
uugcagaagauauucucca

SEQ ID NO: 142382 - RNA, 19 nt, Artificial Sequence
  Description of Artificial Sequence: Synthetic oligonucleotide
accaaagcccgaauaugaa

SEQ ID NO: 142383 - RNA, 19 nt, Artificial Sequence
  Description of Artificial Sequence: Synthetic oligonucleotide
augcuguuauuucuuuaca

SEQ ID NO: 142384 - RNA, 19 nt, Artificial Sequence
  Description of Artificial Sequence: Synthetic oligonucleotide
agaagaucauugaaauuca

SEQ ID NO: 142385 - RNA, 19 nt, Artificial Sequence
  Description of Artificial Sequence: Synthetic oligonucleotide
aaagcaaguauuggaaguc

SEQ ID NO: 142386 - RNA, 19 nt, Artificial Sequence
  Description of Artificial Sequence: Synthetic oligonucleotide
caguaaggaugguggcugu

SEQ ID NO: 142387 - RNA, 19 nt, Artificial Sequence
  Description of Artificial Sequence: Synthetic oligonucleotide
ugccaaggggcugugcucu

SEQ ID NO: 142388 - RNA, 19 nt, Artificial Sequence
  Description of Artificial Sequence: Synthetic oligonucleotide
uggcuggugcucaguugca

SEQ ID NO: 142389 - RNA, 19 nt, Artificial Sequence
  Description of Artificial Sequence: Synthetic oligonucleotide
aagaggagacagagaccgu

SEQ ID NO: 142390 - RNA, 19 nt, Artificial Sequence
  Description of Artificial Sequence: Synthetic oligonucleotide
uuucugcccuggccucccu

SEQ ID NO: 142391 - RNA, 19 nt, Artificial Sequence
  Description of Artificial Sequence: Synthetic oligonucleotide
uaacaguggauguggaaca

SEQ ID NO: 142392 - RNA, 19 nt, Artificial Sequence
  Description of Artificial Sequence: Synthetic oligonucleotide
agcccuuugcucaggaaga

SEQ ID NO: 142393 - RNA, 19 nt, Artificial Sequence
  Description of Artificial Sequence: Synthetic oligonucleotide
acagcagaacugcugguga

SEQ ID NO: 142394 - RNA, 19 nt, Artificial Sequence
  Description of Artificial Sequence: Synthetic oligonucleotide
agccuauggaagaggagcc

SEQ ID NO: 142395 - RNA, 19 nt, Artificial Sequence
  Description of Artificial Sequence: Synthetic oligonucleotide
cagccuugugaagugccaa

SEQ ID NO: 142396 - RNA, 19 nt, Artificial Sequence
  Description of Artificial Sequence: Synthetic oligonucleotide
agucccccucugauauuuc

SEQ ID NO: 142397 - RNA, 19 nt, Artificial Sequence
  Description of Artificial Sequence: Synthetic oligonucleotide
ccugugugugacaucauug

SEQ ID NO: 142398 - RNA, 19 nt, Artificial Sequence
  Description of Artificial Sequence: Synthetic oligonucleotide
guguauccccccaccccag

SEQ ID NO: 142399 - RNA, 19 nt, Artificial Sequence
  Description of Artificial Sequence: Synthetic oligonucleotide
guacccucagacaugucuu

SEQ ID NO: 142400 - RNA, 19 nt, Artificial Sequence
  Description of Artificial Sequence: Synthetic oligonucleotide
ugucugcugccuggguggc

SEQ ID NO: 142401 - RNA, 19 nt, Artificial Sequence
  Description of Artificial Sequence: Synthetic oligonucleotide
cacagauucaauggaacau

SEQ ID NO: 142402 - RNA, 19 nt, Artificial Sequence
  Description of Artificial Sequence: Synthetic oligonucleotide
uaaacacugggcacaaaau

SEQ ID NO: 142403 - RNA, 19 nt, Artificial Sequence
  Description of Artificial Sequence: Synthetic oligonucleotide
uucugaacagcagcuucac

SEQ ID NO: 142404 - RNA, 19 nt, Artificial Sequence
  Description of Artificial Sequence: Synthetic oligonucleotide
cuuguucuuuggauggacu

SEQ ID NO: 142405 - RNA, 19 nt, Artificial Sequence
  Description of Artificial Sequence: Synthetic oligonucleotide
uugaaagggcauuaaagau

SEQ ID NO: 142406 - RNA, 19 nt, Artificial Sequence
  Description of Artificial Sequence: Synthetic oligonucleotide
uuccuuaaacguaaccgcu

SEQ ID NO: 142407 - RNA, 19 nt, Artificial Sequence
  Description of Artificial Sequence: Synthetic oligonucleotide
ugugauucuagaguuacag

SEQ ID NO: 142408 - RNA, 19 nt, Artificial Sequence
  Description of Artificial Sequence: Synthetic oligonucleotide
guaaaccacgauuggaaga

SEQ ID NO: 142409 - RNA, 19 nt, Artificial Sequence
  Description of Artificial Sequence: Synthetic oligonucleotide
aaacugcuuccagcaugcu

SEQ ID NO: 142410 - RNA, 19 nt, Artificial Sequence
  Description of Artificial Sequence: Synthetic oligonucleotide
uuuuaauaugcugggugac

SEQ ID NO: 142411 - RNA, 19 nt, Artificial Sequence
  Description of Artificial Sequence: Synthetic oligonucleotide
cccacuccuagacaccaag

SEQ ID NO: 142412 - RNA, 19 nt, Artificial Sequence
  Description of Artificial Sequence: Synthetic oligonucleotide
guuugaacuagaaacauuc

SEQ ID NO: 142413 - RNA, 19 nt, Artificial Sequence
  Description of Artificial Sequence: Synthetic oligonucleotide
caguacagcacuagauauu

SEQ ID NO: 142414 - RNA, 19 nt, Artificial Sequence
  Description of Artificial Sequence: Synthetic oligonucleotide
uguuaauuucagaagcuau

SEQ ID NO: 142415 - RNA, 19 nt, Artificial Sequence
  Description of Artificial Sequence: Synthetic oligonucleotide
ugacagccagugaaauuuu

SEQ ID NO: 142416 - RNA, 19 nt, Artificial Sequence
  Description of Artificial Sequence: Synthetic oligonucleotide
ugggcaaaaccugagacau

SEQ ID NO: 142417 - RNA, 19 nt, Artificial Sequence
  Description of Artificial Sequence: Synthetic oligonucleotide
uagucauuccugacauucu

SEQ ID NO: 142418 - RNA, 19 nt, Artificial Sequence
  Description of Artificial Sequence: Synthetic oligonucleotide
ugaucagcuuuuuuugggg

SEQ ID NO: 142419 - RNA, 19 nt, Artificial Sequence
  Description of Artificial Sequence: Synthetic oligonucleotide
guaauuuguuuuucaaaca

SEQ ID NO: 142420 - RNA, 19 nt, Artificial Sequence
  Description of Artificial Sequence: Synthetic oligonucleotide
agucuuaacuuguuuacaa

SEQ ID NO: 142421 - RNA, 19 nt, Artificial Sequence
  Description of Artificial Sequence: Synthetic oligonucleotide
agauuugcuuuuagcuaug

SEQ ID NO: 142422 - RNA, 19 nt, Artificial Sequence
  Description of Artificial Sequence: Synthetic oligonucleotide
gaacggaucguaauuccac

SEQ ID NO: 142423 - RNA, 19 nt, Artificial Sequence
  Description of Artificial Sequence: Synthetic oligonucleotide
cccagaauguaauguuucu

SEQ ID NO: 142424 - RNA, 19 nt, Artificial Sequence
  Description of Artificial Sequence: Synthetic oligonucleotide
uuguuuguuuguuuuguuu

SEQ ID NO: 142425 - RNA, 19 nt, Artificial Sequence
  Description of Artificial Sequence: Synthetic oligonucleotide
uuguuaggguuuuuuucuc

SEQ ID NO: 142426 - RNA, 19 nt, Artificial Sequence
  Description of Artificial Sequence: Synthetic oligonucleotide
caacuuuaacacacaguuc

SEQ ID NO: 142427 - RNA, 19 nt, Artificial Sequence
  Description of Artificial Sequence: Synthetic oligonucleotide
caacuguuccuaguaaaag

SEQ ID NO: 142428 - RNA, 19 nt, Artificial Sequence
  Description of Artificial Sequence: Synthetic oligonucleotide
guucaagauggaggaacua

SEQ ID NO: 142429 - RNA, 19 nt, Artificial Sequence
  Description of Artificial Sequence: Synthetic oligonucleotide
agcaugaggcuuuuuucag

SEQ ID NO: 142430 - RNA, 19 nt, Artificial Sequence
  Description of Artificial Sequence: Synthetic oligonucleotide
guaucucgaaguccaaaug

SEQ ID NO: 142431 - RNA, 19 nt, Artificial Sequence
  Description of Artificial Sequence: Synthetic oligonucleotide
gccaaaggaaccucacaca

SEQ ID NO: 142432 - RNA, 19 nt, Artificial Sequence
  Description of Artificial Sequence: Synthetic oligonucleotide
acuguuuguaauggugcaa

SEQ ID NO: 142433 - RNA, 19 nt, Artificial Sequence
  Description of Artificial Sequence: Synthetic oligonucleotide
auauuuuauaucacuuuuu

SEQ ID NO: 142434 - RNA, 19 nt, Artificial Sequence
  Description of Artificial Sequence: Synthetic oligonucleotide
uuuuaaacauccccaacau

SEQ ID NO: 142435 - RNA, 19 nt, Artificial Sequence
  Description of Artificial Sequence: Synthetic oligonucleotide
ucuuuguguucucacacac

SEQ ID NO: 142436 - RNA, 19 nt, Artificial Sequence
  Description of Artificial Sequence: Synthetic oligonucleotide
caggcaauuugcaauguug

SEQ ID NO: 142437 - RNA, 19 nt, Artificial Sequence
  Description of Artificial Sequence: Synthetic oligonucleotide
gcaauuguguuggagaaug

SEQ ID NO: 142438 - RNA, 19 nt, Artificial Sequence
  Description of Artificial Sequence: Synthetic oligonucleotide
gaaguccccccaccuccca

SEQ ID NO: 142439 - RNA, 19 nt, Artificial Sequence
  Description of Artificial Sequence: Synthetic oligonucleotide
agccacacacacauccuuu

SEQ ID NO: 142440 - RNA, 19 nt, Artificial Sequence
  Description of Artificial Sequence: Synthetic oligonucleotide
uguucucaugacaguaggu

SEQ ID NO: 142441 - RNA, 19 nt, Artificial Sequence
  Description of Artificial Sequence: Synthetic oligonucleotide
ucugagcaaauguuccacc

SEQ ID NO: 142442 - RNA, 19 nt, Artificial Sequence
  Description of Artificial Sequence: Synthetic oligonucleotide
caagcauuuucagugucuu

SEQ ID NO: 142443 - RNA, 19 nt, Artificial Sequence
  Description of Artificial Sequence: Synthetic oligonucleotide
uugaaaagcacguaacuuu

SEQ ID NO: 142444 - RNA, 19 nt, Artificial Sequence
  Description of Artificial Sequence: Synthetic oligonucleotide
uucaaagguggucuuaauu

SEQ ID NO: 142445 - RNA, 19 nt, Artificial Sequence
  Description of Artificial Sequence: Synthetic oligonucleotide
uuguugcauaucuaucaag

SEQ ID NO: 142446 - RNA, 19 nt, Artificial Sequence
  Description of Artificial Sequence: Synthetic oligonucleotide
ggacuuauucacucaccuu

SEQ ID NO: 142447 - RNA, 19 nt, Artificial Sequence
  Description of Artificial Sequence: Synthetic oligonucleotide
uuccuuuucugcccucuau

SEQ ID NO: 142448 - RNA, 19 nt, Artificial Sequence
  Description of Artificial Sequence: Synthetic oligonucleotide
ucaauugauuucuucuuac

SEQ ID NO: 142449 - RNA, 19 nt, Artificial Sequence
  Description of Artificial Sequence: Synthetic oligonucleotide
ccuuucaucauucauuccu

SEQ ID NO: 142450 - RNA, 19 nt, Artificial Sequence
  Description of Artificial Sequence: Synthetic oligonucleotide
uuccuuuagaaaaacugaa

SEQ ID NO: 142451 - RNA, 19 nt, Artificial Sequence
  Description of Artificial Sequence: Synthetic oligonucleotide
agauuacccauaaucuccu

SEQ ID NO: 142452 - RNA, 19 nt, Artificial Sequence
  Description of Artificial Sequence: Synthetic oligonucleotide
ucuuauuacuugagggccu

SEQ ID NO: 142453 - RNA, 19 nt, Artificial Sequence
  Description of Artificial Sequence: Synthetic oligonucleotide
uugacuauuuaguuuauuu

SEQ ID NO: 142454 - RNA, 19 nt, Artificial Sequence
  Description of Artificial Sequence: Synthetic oligonucleotide
uuguuuacuuuacagguua

SEQ ID NO: 142455 - RNA, 19 nt, Artificial Sequence
  Description of Artificial Sequence: Synthetic oligonucleotide
aacacaguuguuuugucug

SEQ ID NO: 142456 - RNA, 19 nt, Artificial Sequence
  Description of Artificial Sequence: Synthetic oligonucleotide
gauugcauuuuauuaacug

SEQ ID NO: 142457 - RNA, 19 nt, Artificial Sequence
  Description of Artificial Sequence: Synthetic oligonucleotide
gugaagccguugaaaugaa

SEQ ID NO: 142458 - RNA, 19 nt, Artificial Sequence
  Description of Artificial Sequence: Synthetic oligonucleotide
auaucacuuaagcaacguu

SEQ ID NO: 142459 - RNA, 19 nt, Artificial Sequence
  Description of Artificial Sequence: Synthetic oligonucleotide
ugcuaaauuucuauguguu

SEQ ID NO: 142460 - RNA, 19 nt, Artificial Sequence
  Description of Artificial Sequence: Synthetic oligonucleotide
uugaaauguguuaaugaag

SEQ ID NO: 142461 - RNA, 19 nt, Artificial Sequence
  Description of Artificial Sequence: Synthetic oligonucleotide
ggcacugcuuauuuguagu

SEQ ID NO: 142462 - RNA, 19 nt, Artificial Sequence
  Description of Artificial Sequence: Synthetic oligonucleotide
ucaccuugaacugacuuaa

SEQ ID NO: 142463 - RNA, 19 nt, Artificial Sequence
  Description of Artificial Sequence: Synthetic oligonucleotide
accuagaagcugugccuuc

SEQ ID NO: 142464 - RNA, 19 nt, Artificial Sequence
  Description of Artificial Sequence: Synthetic oligonucleotide
aacaaaaacaaaaaacagc

SEQ ID NO: 142465 - RNA, 19 nt, Artificial Sequence
  Description of Artificial Sequence: Synthetic oligonucleotide
ccuuuaaacaaguuuccuu

SEQ ID NO: 142466 - RNA, 19 nt, Artificial Sequence
  Description of Artificial Sequence: Synthetic oligonucleotide
uagugucaaaaguuaaaaa

SEQ ID NO: 142467 - RNA, 19 nt, Artificial Sequence
  Description of Artificial Sequence: Synthetic oligonucleotide
uucaggagcauaucaagga

SEQ ID NO: 142468 - RNA, 19 nt, Artificial Sequence
  Description of Artificial Sequence: Synthetic oligonucleotide
aacuucuagccauaaaaca

SEQ ID NO: 142469 - RNA, 19 nt, Artificial Sequence
  Description of Artificial Sequence: Synthetic oligonucleotide
agcaacaagaacuccuaga

SEQ ID NO: 142470 - RNA, 19 nt, Artificial Sequence
  Description of Artificial Sequence: Synthetic oligonucleotide
aaaaggagcagaaacugga

SEQ ID NO: 142471 - RNA, 19 nt, Artificial Sequence
  Description of Artificial Sequence: Synthetic oligonucleotide
agcagcagaggcaagaaca

SEQ ID NO: 142472 - RNA, 19 nt, Artificial Sequence
  Description of Artificial Sequence: Synthetic oligonucleotide
aggaaguagagaggcaucg

SEQ ID NO: 142473 - RNA, 19 nt, Artificial Sequence
  Description of Artificial Sequence: Synthetic oligonucleotide
gcagagaacagcagcuucc

SEQ ID NO: 142474 - RNA, 19 nt, Artificial Sequence
  Description of Artificial Sequence: Synthetic oligonucleotide
cuccucucagaggcaaaga

SEQ ID NO: 142475 - RNA, 19 nt, Artificial Sequence
  Description of Artificial Sequence: Synthetic oligonucleotide
auagaggacgagaaagggc

SEQ ID NO: 142476 - RNA, 19 nt, Artificial Sequence
  Description of Artificial Sequence: Synthetic oligonucleotide
caguggcaaguacagaagu

SEQ ID NO: 142477 - RNA, 19 nt, Artificial Sequence
  Description of Artificial Sequence: Synthetic oligonucleotide
uaaagcagaagcuucaaga

SEQ ID NO: 142478 - RNA, 19 nt, Artificial Sequence
  Description of Artificial Sequence: Synthetic oligonucleotide
aguuccuacugaguaaauc

SEQ ID NO: 142479 - RNA, 19 nt, Artificial Sequence
  Description of Artificial Sequence: Synthetic oligonucleotide
cagcaacgaaagacacucc

SEQ ID NO: 142480 - RNA, 19 nt, Artificial Sequence
  Description of Artificial Sequence: Synthetic oligonucleotide
caacuaauggaaaaaauca

SEQ ID NO: 142481 - RNA, 19 nt, Artificial Sequence
  Description of Artificial Sequence: Synthetic oligonucleotide
auuccgugagccgccaucc

SEQ ID NO: 142482 - RNA, 19 nt, Artificial Sequence
  Description of Artificial Sequence: Synthetic oligonucleotide
ccaagcucugguacacggc

SEQ ID NO: 142483 - RNA, 19 nt, Artificial Sequence
  Description of Artificial Sequence: Synthetic oligonucleotide
cugcccaccacacaucauu

SEQ ID NO: 142484 - RNA, 19 nt, Artificial Sequence
  Description of Artificial Sequence: Synthetic oligonucleotide
uggaucaaagcucuccacc

SEQ ID NO: 142485 - RNA, 19 nt, Artificial Sequence
  Description of Artificial Sequence: Synthetic oligonucleotide
cccuuaguggaacaucucc

SEQ ID NO: 142486 - RNA, 19 nt, Artificial Sequence
  Description of Artificial Sequence: Synthetic oligonucleotide
cauccuacaaguacacauu

SEQ ID NO: 142487 - RNA, 19 nt, Artificial Sequence
  Description of Artificial Sequence: Synthetic oligonucleotide
uaccaggagcacaagaugc

SEQ ID NO: 142488 - RNA, 19 nt, Artificial Sequence
  Description of Artificial Sequence: Synthetic oligonucleotide
caaaggaugauuucccccu

SEQ ID NO: 142489 - RNA, 19 nt, Artificial Sequence
  Description of Artificial Sequence: Synthetic oligonucleotide
uucgaaaaacugccucuga

SEQ ID NO: 142490 - RNA, 19 nt, Artificial Sequence
  Description of Artificial Sequence: Synthetic oligonucleotide
agcccaacuugaaggugcg

SEQ ID NO: 142491 - RNA, 19 nt, Artificial Sequence
  Description of Artificial Sequence: Synthetic oligonucleotide
gguccagguuaaaacagaa

SEQ ID NO: 142492 - RNA, 19 nt, Artificial Sequence
  Description of Artificial Sequence: Synthetic oligonucleotide
aaguggcagagaggagaag

SEQ ID NO: 142493 - RNA, 19 nt, Artificial Sequence
  Description of Artificial Sequence: Synthetic oligonucleotide
gcagccccuuacucaggcg

SEQ ID NO: 142494 - RNA, 19 nt, Artificial Sequence
  Description of Artificial Sequence: Synthetic oligonucleotide
ggaaggauggaaauguugu

SEQ ID NO: 142495 - RNA, 19 nt, Artificial Sequence
  Description of Artificial Sequence: Synthetic oligonucleotide
ucacuucauucaagaagcg

SEQ ID NO: 142496 - RNA, 19 nt, Artificial Sequence
  Description of Artificial Sequence: Synthetic oligonucleotide
gaauguuugaggugacaga

SEQ ID NO: 142497 - RNA, 19 nt, Artificial Sequence
  Description of Artificial Sequence: Synthetic oligonucleotide
aauccucagucaguagcag

SEQ ID NO: 142498 - RNA, 19 nt, Artificial Sequence
  Description of Artificial Sequence: Synthetic oligonucleotide
guucuccaggcucuggucc

SEQ ID NO: 142499 - RNA, 19 nt, Artificial Sequence
  Description of Artificial Sequence: Synthetic oligonucleotide
ccaguucaccaaacaaugg

SEQ ID NO: 142500 - RNA, 19 nt, Artificial Sequence
  Description of Artificial Sequence: Synthetic oligonucleotide
ggccaacuggaaguguuac

SEQ ID NO: 142501 - RNA, 19 nt, Artificial Sequence
  Description of Artificial Sequence: Synthetic oligonucleotide
cugaaaaugagacuucggu

SEQ ID NO: 142502 - RNA, 19 nt, Artificial Sequence
  Description of Artificial Sequence: Synthetic oligonucleotide
uuuugcccccuaccccuca

SEQ ID NO: 142503 - RNA, 19 nt, Artificial Sequence
  Description of Artificial Sequence: Synthetic oligonucleotide
augccgagcaaaugguuuc

SEQ ID NO: 142504 - RNA, 19 nt, Artificial Sequence
  Description of Artificial Sequence: Synthetic oligonucleotide
cacagcaacgcauucuaau

SEQ ID NO: 142505 - RNA, 19 nt, Artificial Sequence
  Description of Artificial Sequence: Synthetic oligonucleotide
uucaugaagauuccaugaa

SEQ ID NO: 142506 - RNA, 19 nt, Artificial Sequence
  Description of Artificial Sequence: Synthetic oligonucleotide
accugcuaagucuuuauac

SEQ ID NO: 142507 - RNA, 19 nt, Artificial Sequence
  Description of Artificial Sequence: Synthetic oligonucleotide
ccucuccuucuuugcccaa

SEQ ID NO: 142508 - RNA, 19 nt, Artificial Sequence
  Description of Artificial Sequence: Synthetic oligonucleotide
acauuaccuuggggcuucc

SEQ ID NO: 142509 - RNA, 19 nt, Artificial Sequence
  Description of Artificial Sequence: Synthetic oligonucleotide
ccgcagugccaucccagcu

SEQ ID NO: 142510 - RNA, 19 nt, Artificial Sequence
  Description of Artificial Sequence: Synthetic oligonucleotide
ucaaugcuucgaauucacu

SEQ ID NO: 142511 - RNA, 19 nt, Artificial Sequence
  Description of Artificial Sequence: Synthetic oligonucleotide
ucaaagaaaagcagaagug

SEQ ID NO: 142512 - RNA, 19 nt, Artificial Sequence
  Description of Artificial Sequence: Synthetic oligonucleotide
gugagacgcagacgcuuag

SEQ ID NO: 142513 - RNA, 19 nt, Artificial Sequence
  Description of Artificial Sequence: Synthetic oligonucleotide
ggcaagguguuccucugcc

SEQ ID NO: 142514 - RNA, 19 nt, Artificial Sequence
  Description of Artificial Sequence: Synthetic oligonucleotide
cugggcaguauggaggcag

SEQ ID NO: 142515 - RNA, 19 nt, Artificial Sequence
  Description of Artificial Sequence: Synthetic oligonucleotide
gcaucccggcaucuuccag

SEQ ID NO: 142516 - RNA, 19 nt, Artificial Sequence
  Description of Artificial Sequence: Synthetic oligonucleotide
gccacccucauguuacuuu

SEQ ID NO: 142517 - RNA, 19 nt, Artificial Sequence
  Description of Artificial Sequence: Synthetic oligonucleotide
uagagggaaagccacccaa

SEQ ID NO: 142518 - RNA, 19 nt, Artificial Sequence
  Description of Artificial Sequence: Synthetic oligonucleotide
acagcagccaccaggcucu

SEQ ID NO: 142519 - RNA, 19 nt, Artificial Sequence
  Description of Artificial Sequence: Synthetic oligonucleotide
uccugcagcauuuauuauu

SEQ ID NO: 142520 - RNA, 19 nt, Artificial Sequence
  Description of Artificial Sequence: Synthetic oligonucleotide
ugaaagaacaaaugcgaca

SEQ ID NO: 142521 - RNA, 19 nt, Artificial Sequence
  Description of Artificial Sequence: Synthetic oligonucleotide
agcaaaagcuucuuguagc

SEQ ID NO: 142522 - RNA, 19 nt, Artificial Sequence
  Description of Artificial Sequence: Synthetic oligonucleotide
cugguggaguucccuuaca

SEQ ID NO: 142523 - RNA, 19 nt, Artificial Sequence
  Description of Artificial Sequence: Synthetic oligonucleotide
auccucagucucccuuggc

SEQ ID NO: 142524 - RNA, 19 nt, Artificial Sequence
  Description of Artificial Sequence: Synthetic oligonucleotide
caacaaaagagagaauuuc

SEQ ID NO: 142525 - RNA, 19 nt, Artificial Sequence
  Description of Artificial Sequence: Synthetic oligonucleotide
caccuggcauuagagguac

SEQ ID NO: 142526 - RNA, 19 nt, Artificial Sequence
  Description of Artificial Sequence: Synthetic oligonucleotide
cccacaaauugccccguca

SEQ ID NO: 142527 - RNA, 19 nt, Artificial Sequence
  Description of Artificial Sequence: Synthetic oligonucleotide
acagaccccugaaccgaac

SEQ ID NO: 142528 - RNA, 19 nt, Artificial Sequence
  Description of Artificial Sequence: Synthetic oligonucleotide
cccagucugcaccuuugcc

SEQ ID NO: 142529 - RNA, 19 nt, Artificial Sequence
  Description of Artificial Sequence: Synthetic oligonucleotide
cucagagcacguuggcuca

SEQ ID NO: 142530 - RNA, 19 nt, Artificial Sequence
  Description of Artificial Sequence: Synthetic oligonucleotide
agcuggucauucaacagca

SEQ ID NO: 142531 - RNA, 19 nt, Artificial Sequence
  Description of Artificial Sequence: Synthetic oligonucleotide
aacaccagcaauucuugga

SEQ ID NO: 142532 - RNA, 19 nt, Artificial Sequence
  Description of Artificial Sequence: Synthetic oligonucleotide
agaagcagaagcaauacca

SEQ ID NO: 142533 - RNA, 19 nt, Artificial Sequence
  Description of Artificial Sequence: Synthetic oligonucleotide
agcagcagauccacaugaa

SEQ ID NO: 142534 - RNA, 19 nt, Artificial Sequence
  Description of Artificial Sequence: Synthetic oligonucleotide
acaaacugcuuucgaaauc

SEQ ID NO: 142535 - RNA, 19 nt, Artificial Sequence
  Description of Artificial Sequence: Synthetic oligonucleotide
cuauugaacaacugaagca

SEQ ID NO: 142536 - RNA, 19 nt, Artificial Sequence
  Description of Artificial Sequence: Synthetic oligonucleotide
aaccaggcagucaccuuga

SEQ ID NO: 142537 - RNA, 19 nt, Artificial Sequence
  Description of Artificial Sequence: Synthetic oligonucleotide
aggaagcagaggaagagcu

SEQ ID NO: 142538 - RNA, 19 nt, Artificial Sequence
  Description of Artificial Sequence: Synthetic oligonucleotide
uucagggggaccaggcgau

SEQ ID NO: 142539 - RNA, 19 nt, Artificial Sequence
  Description of Artificial Sequence: Synthetic oligonucleotide
ugcaggaagacagagcgcc

SEQ ID NO: 142540 - RNA, 19 nt, Artificial Sequence
  Description of Artificial Sequence: Synthetic oligonucleotide
ccucuaguggcaacagcac

SEQ ID NO: 142541 - RNA, 19 nt, Artificial Sequence
  Description of Artificial Sequence: Synthetic oligonucleotide
cuaggagcgacagcagugc

SEQ ID NO: 142542 - RNA, 19 nt, Artificial Sequence
  Description of Artificial Sequence: Synthetic oligonucleotide
cuuguguggaugacacacu

SEQ ID NO: 142543 - RNA, 19 nt, Artificial Sequence
  Description of Artificial Sequence: Synthetic oligonucleotide
ugggacaaguuggggcugu

SEQ ID NO: 142544 - RNA, 19 nt, Artificial Sequence
  Description of Artificial Sequence: Synthetic oligonucleotide
ugaaggucaaggaggaacc

SEQ ID NO: 142545 - RNA, 19 nt, Artificial Sequence
  Description of Artificial Sequence: Synthetic oligonucleotide
caguggacagugaugaaga

SEQ ID NO: 142546 - RNA, 19 nt, Artificial Sequence
  Description of Artificial Sequence: Synthetic oligonucleotide
augcucagauccaggaaau

SEQ ID NO: 142547 - RNA, 19 nt, Artificial Sequence
  Description of Artificial Sequence: Synthetic oligonucleotide
uggaaucuggggagcaggc

SEQ ID NO: 142548 - RNA, 19 nt, Artificial Sequence
  Description of Artificial Sequence: Synthetic oligonucleotide
cugcuuuuaugcaacagcc

SEQ ID NO: 142549 - RNA, 19 nt, Artificial Sequence
  Description of Artificial Sequence: Synthetic oligonucleotide
cuuuccuggaacccacgca

SEQ ID NO: 142550 - RNA, 19 nt, Artificial Sequence
  Description of Artificial Sequence: Synthetic oligonucleotide
acacacgugcgcucucugu

SEQ ID NO: 142551 - RNA, 19 nt, Artificial Sequence
  Description of Artificial Sequence: Synthetic oligonucleotide
ugcgccaagcuccgcuggc

SEQ ID NO: 142552 - RNA, 19 nt, Artificial Sequence
  Description of Artificial Sequence: Synthetic oligonucleotide
cugcgguuggcauggaugg

SEQ ID NO: 142553 - RNA, 19 nt, Artificial Sequence
  Description of Artificial Sequence: Synthetic oligonucleotide
gauuagagaaacaccgucu

SEQ ID NO: 142554 - RNA, 19 nt, Artificial Sequence
  Description of Artificial Sequence: Synthetic oligonucleotide
ucgucuccaggacucacuc

SEQ ID NO: 142555 - RNA, 19 nt, Artificial Sequence
  Description of Artificial Sequence: Synthetic oligonucleotide
cuuccccugcugccucugu

SEQ ID NO: 142556 - RNA, 19 nt, Artificial Sequence
  Description of Artificial Sequence: Synthetic oligonucleotide
uuuuaccucacccagcaau

SEQ ID NO: 142557 - RNA, 19 nt, Artificial Sequence
  Description of Artificial Sequence: Synthetic oligonucleotide
uggaccgcccccuccagcc

SEQ ID NO: 142558 - RNA, 19 nt, Artificial Sequence
  Description of Artificial Sequence: Synthetic oligonucleotide
cuggcucugcaacuggaau

SEQ ID NO: 142559 - RNA, 19 nt, Artificial Sequence
  Description of Artificial Sequence: Synthetic oligonucleotide
uugccuaugaccccuugau

SEQ ID NO: 142560 - RNA, 19 nt, Artificial Sequence
  Description of Artificial Sequence: Synthetic oligonucleotide
ugcugaaacaccagugcgu

SEQ ID NO: 142561 - RNA, 19 nt, Artificial Sequence
  Description of Artificial Sequence: Synthetic oligonucleotide
uuuguggcaauuccaccac

SEQ ID NO: 142562 - RNA, 19 nt, Artificial Sequence
  Description of Artificial Sequence: Synthetic oligonucleotide
cccacccugagcaugcugg

SEQ ID NO: 142563 - RNA, 19 nt, Artificial Sequence
  Description of Artificial Sequence: Synthetic oligonucleotide
gacgaauacagaguaucug

SEQ ID NO: 142564 - RNA, 19 nt, Artificial Sequence
  Description of Artificial Sequence: Synthetic oligonucleotide
ggucacgacugcaagaaac

SEQ ID NO: 142565 - RNA, 19 nt, Artificial Sequence
  Description of Artificial Sequence: Synthetic oligonucleotide
cugggcugcuaaauaaaug

SEQ ID NO: 142566 - RNA, 19 nt, Artificial Sequence
  Description of Artificial Sequence: Synthetic oligonucleotide
gugagcgaauucaaggucg

SEQ ID NO: 142567 - RNA, 19 nt, Artificial Sequence
  Description of Artificial Sequence: Synthetic oligonucleotide
gaaaagccagccuggagga

SEQ ID NO: 142568 - RNA, 19 nt, Artificial Sequence
  Description of Artificial Sequence: Synthetic oligonucleotide
aaauacagcuuguucauuc

SEQ ID NO: 142569 - RNA, 19 nt, Artificial Sequence
  Description of Artificial Sequence: Synthetic oligonucleotide
cugaacaucacucacuguu

SEQ ID NO: 142570 - RNA, 19 nt, Artificial Sequence
  Description of Artificial Sequence: Synthetic oligonucleotide
uguauggcaccaacccccu

SEQ ID NO: 142571 - RNA, 19 nt, Artificial Sequence
  Description of Artificial Sequence: Synthetic oligonucleotide
uggacggacagaagcugga

SEQ ID NO: 142572 - RNA, 19 nt, Artificial Sequence
  Description of Artificial Sequence: Synthetic oligonucleotide
accccaggauacuccuagg

SEQ ID NO: 142573 - RNA, 19 nt, Artificial Sequence
  Description of Artificial Sequence: Synthetic oligonucleotide
gugaugacucucaaaaguu

SEQ ID NO: 142574 - RNA, 19 nt, Artificial Sequence
  Description of Artificial Sequence: Synthetic oligonucleotide
uuuuuuccucauuaccuug

SEQ ID NO: 142575 - RNA, 19 nt, Artificial Sequence
  Description of Artificial Sequence: Synthetic oligonucleotide
gugguggacuuggggugga

SEQ ID NO: 142576 - RNA, 19 nt, Artificial Sequence
  Description of Artificial Sequence: Synthetic oligonucleotide
acagugacaccauuuggaa

SEQ ID NO: 142577 - RNA, 19 nt, Artificial Sequence
  Description of Artificial Sequence: Synthetic oligonucleotide
augagcuacacucguccgg

SEQ ID NO: 142578 - RNA, 19 nt, Artificial Sequence
  Description of Artificial Sequence: Synthetic oligonucleotide
gugcugcacgcauggcugu

SEQ ID NO: 142579 - RNA, 19 nt, Artificial Sequence
  Description of Artificial Sequence: Synthetic oligonucleotide
uuggcugugucaucgagcu

SEQ ID NO: 142580 - RNA, 19 nt, Artificial Sequence
  Description of Artificial Sequence: Synthetic oligonucleotide
uggcuuccaaaguggccuc

SEQ ID NO: 142581 - RNA, 19 nt, Artificial Sequence
  Description of Artificial Sequence: Synthetic oligonucleotide
caggagagcugaagaaugg

SEQ ID NO: 142582 - RNA, 19 nt, Artificial Sequence
  Description of Artificial Sequence: Synthetic oligonucleotide
gguuugcuguugugaggcc

SEQ ID NO: 142583 - RNA, 19 nt, Artificial Sequence
  Description of Artificial Sequence: Synthetic oligonucleotide
ccccuggccaucacgcuga

SEQ ID NO: 142584 - RNA, 19 nt, Artificial Sequence
  Description of Artificial Sequence: Synthetic oligonucleotide
aagaauccacagccauggg

SEQ ID NO: 142585 - RNA, 19 nt, Artificial Sequence
  Description of Artificial Sequence: Synthetic oligonucleotide
gguucugcuuuuuuaauuc

SEQ ID NO: 142586 - RNA, 19 nt, Artificial Sequence
  Description of Artificial Sequence: Synthetic oligonucleotide
caguugcaauuaccgccaa

SEQ ID NO: 142587 - RNA, 19 nt, Artificial Sequence
  Description of Artificial Sequence: Synthetic oligonucleotide
aauacuugagagaccaacu

SEQ ID NO: 142588 - RNA, 19 nt, Artificial Sequence
  Description of Artificial Sequence: Synthetic oligonucleotide
uaaauauaagcaagauauu

SEQ ID NO: 142589 - RNA, 19 nt, Artificial Sequence
  Description of Artificial Sequence: Synthetic oligonucleotide
ugauuguagaucuggaugu

SEQ ID NO: 142590 - RNA, 19 nt, Artificial Sequence
  Description of Artificial Sequence: Synthetic oligonucleotide
uucaccauggaaacgguac

SEQ ID NO: 142591 - RNA, 19 nt, Artificial Sequence
  Description of Artificial Sequence: Synthetic oligonucleotide
cccagcaggccuuuuaugc

SEQ ID NO: 142592 - RNA, 19 nt, Artificial Sequence
  Description of Artificial Sequence: Synthetic oligonucleotide
cugaccccagcauccugua

SEQ ID NO: 142593 - RNA, 19 nt, Artificial Sequence
  Description of Artificial Sequence: Synthetic oligonucleotide
acauuucacuccaucgcua

SEQ ID NO: 142594 - RNA, 19 nt, Artificial Sequence
  Description of Artificial Sequence: Synthetic oligonucleotide
augaugaagggaacuuuuu

SEQ ID NO: 142595 - RNA, 19 nt, Artificial Sequence
  Description of Artificial Sequence: Synthetic oligonucleotide
ucccuggcaguggagcccc

SEQ ID NO: 142596 - RNA, 19 nt, Artificial Sequence
  Description of Artificial Sequence: Synthetic oligonucleotide
caaaugagguucgguuuau

SEQ ID NO: 142597 - RNA, 19 nt, Artificial Sequence
  Description of Artificial Sequence: Synthetic oligonucleotide
uuucuuuagagccccacuu

SEQ ID NO: 142598 - RNA, 19 nt, Artificial Sequence
  Description of Artificial Sequence: Synthetic oligonucleotide
uuuauuuguaucuuucagg

SEQ ID NO: 142599 - RNA, 19 nt, Artificial Sequence
  Description of Artificial Sequence: Synthetic oligonucleotide
agguaauugcauugcauga

SEQ ID NO: 142600 - RNA, 19 nt, Artificial Sequence
  Description of Artificial Sequence: Synthetic oligonucleotide
caaaugagguuggaacagg

SEQ ID NO: 142601 - RNA, 19 nt, Artificial Sequence
  Description of Artificial Sequence: Synthetic oligonucleotide
gccuuggagaaggguacaa

SEQ ID NO: 142602 - RNA, 19 nt, Artificial Sequence
  Description of Artificial Sequence: Synthetic oligonucleotide
auauaaauauugccuggac

SEQ ID NO: 142603 - RNA, 19 nt, Artificial Sequence
  Description of Artificial Sequence: Synthetic oligonucleotide
cagguggccuugauccucc

SEQ ID NO: 142604 - RNA, 19 nt, Artificial Sequence
  Description of Artificial Sequence: Synthetic oligonucleotide
ccaugggagauguugagua

SEQ ID NO: 142605 - RNA, 19 nt, Artificial Sequence
  Description of Artificial Sequence: Synthetic oligonucleotide
accuugaagcauucaggac

SEQ ID NO: 142606 - RNA, 19 nt, Artificial Sequence
  Description of Artificial Sequence: Synthetic oligonucleotide
ccaucgugaagccuguggc

SEQ ID NO: 142607 - RNA, 19 nt, Artificial Sequence
  Description of Artificial Sequence: Synthetic oligonucleotide
ccaaagaguuugauccaga

SEQ ID NO: 142608 - RNA, 19 nt, Artificial Sequence
  Description of Artificial Sequence: Synthetic oligonucleotide
acauggucuuaguaucugc

SEQ ID NO: 142609 - RNA, 19 nt, Artificial Sequence
  Description of Artificial Sequence: Synthetic oligonucleotide
cuggauuugaugcauugga

SEQ ID NO: 142610 - RNA, 19 nt, Artificial Sequence
  Description of Artificial Sequence: Synthetic oligonucleotide
aaggccacaccccuccucu

SEQ ID NO: 142611 - RNA, 19 nt, Artificial Sequence
  Description of Artificial Sequence: Synthetic oligonucleotide
uaggaggguacaaagugac

SEQ ID NO: 142612 - RNA, 19 nt, Artificial Sequence
  Description of Artificial Sequence: Synthetic oligonucleotide
cggcaaaauguuuugguca

SEQ ID NO: 142613 - RNA, 19 nt, Artificial Sequence
  Description of Artificial Sequence: Synthetic oligonucleotide
auuugacgaagcaauugau

SEQ ID NO: 142614 - RNA, 19 nt, Artificial Sequence
  Description of Artificial Sequence: Synthetic oligonucleotide
ugacauuggcugauggacg

SEQ ID NO: 142615 - RNA, 19 nt, Artificial Sequence
  Description of Artificial Sequence: Synthetic oligonucleotide
gugugguguuggcucuaga

SEQ ID NO: 142616 - RNA, 19 nt, Artificial Sequence
  Description of Artificial Sequence: Synthetic oligonucleotide
aaggaggacaugaucucac

SEQ ID NO: 142617 - RNA, 19 nt, Artificial Sequence
  Description of Artificial Sequence: Synthetic oligonucleotide
cagccaucugugaugcauc

SEQ ID NO: 142618 - RNA, 19 nt, Artificial Sequence
  Description of Artificial Sequence: Synthetic oligonucleotide
cagaagccuguguaaaugc

SEQ ID NO: 142619 - RNA, 19 nt, Artificial Sequence
  Description of Artificial Sequence: Synthetic oligonucleotide
cccuucuaggaaaugagcu

SEQ ID NO: 142620 - RNA, 19 nt, Artificial Sequence
  Description of Artificial Sequence: Synthetic oligonucleotide
uggagccacuugcagaaga

SEQ ID NO: 142621 - RNA, 19 nt, Artificial Sequence
  Description of Artificial Sequence: Synthetic oligonucleotide
auauucuccaccaaagccc

SEQ ID NO: 142622 - RNA, 19 nt, Artificial Sequence
  Description of Artificial Sequence: Synthetic oligonucleotide
cgaauaugaaugcuguuau

SEQ ID NO: 142623 - RNA, 19 nt, Artificial Sequence
  Description of Artificial Sequence: Synthetic oligonucleotide
uuucuuuacagaagaucau

SEQ ID NO: 142624 - RNA, 19 nt, Artificial Sequence
  Description of Artificial Sequence: Synthetic oligonucleotide
uugaaauucaaaguauguc

SEQ ID NO: 142625 - RNA, 19 nt, Artificial Sequence
  Description of Artificial Sequence: Synthetic oligonucleotide
cuuuaaaguucucuuaaaa

SEQ ID NO: 142626 - RNA, 19 nt, Artificial Sequence
  Description of Artificial Sequence: Synthetic oligonucleotide
aauucuaagcagguaaaac

SEQ ID NO: 142627 - RNA, 19 nt, Artificial Sequence
  Description of Artificial Sequence: Synthetic oligonucleotide
cuaacuaaaauuauauuga

SEQ ID NO: 142628 - RNA, 19 nt, Artificial Sequence
  Description of Artificial Sequence: Synthetic oligonucleotide
aaaauuauaguacaaagaa

SEQ ID NO: 142629 - RNA, 25 nt, Artificial Sequence
  Description of Artificial Sequence: Synthetic oligonucleotide
ggggaagagaggcacagacacagau

SEQ ID NO: 142630 - RNA, 25 nt, Artificial Sequence
  Description of Artificial Sequence: Synthetic oligonucleotide
uaggagaagggcaccggcuggagcc

SEQ ID NO: 142631 - RNA, 25 nt, Artificial Sequence
  Description of Artificial Sequence: Synthetic oligonucleotide
cacuugcaggacugaggguuuuugc

SEQ ID NO: 142632 - RNA, 25 nt, Artificial Sequence
  Description of Artificial Sequence: Synthetic oligonucleotide
caacaaaacccuagcagccugaaga

SEQ ID NO: 142633 - RNA, 25 nt, Artificial Sequence
  Description of Artificial Sequence: Synthetic oligonucleotide
aacucuaagccagaugggguggcug

SEQ ID NO: 142634 - RNA, 25 nt, Artificial Sequence
  Description of Artificial Sequence: Synthetic oligonucleotide
ggacgagagcagcucuuggcucagc

SEQ ID NO: 142635 - RNA, 25 nt, Artificial Sequence
  Description of Artificial Sequence: Synthetic oligonucleotide
caaagaaugcacaguaugaucagcu

SEQ ID NO: 142636 - RNA, 25 nt, Artificial Sequence
  Description of Artificial Sequence: Synthetic oligonucleotide
ucaguggaugugaagucagaaguuc

SEQ ID NO: 142637 - RNA, 25 nt, Artificial Sequence
  Description of Artificial Sequence: Synthetic oligonucleotide
ccugugggccuggagcccaucucac

SEQ ID NO: 142638 - RNA, 25 nt, Artificial Sequence
  Description of Artificial Sequence: Synthetic oligonucleotide
ccuuuagaccuaaggacagaccuca

SEQ ID NO: 142639 - RNA, 25 nt, Artificial Sequence
  Description of Artificial Sequence: Synthetic oligonucleotide
aggaugaugaugcccgugguggacc

SEQ ID NO: 142640 - RNA, 25 nt, Artificial Sequence
  Description of Artificial Sequence: Synthetic oligonucleotide
ccuguuguccgugagaagcaauugc

SEQ ID NO: 142641 - RNA, 25 nt, Artificial Sequence
  Description of Artificial Sequence: Synthetic oligonucleotide
cagcaggaauuacuucuuauccagc

SEQ ID NO: 142642 - RNA, 25 nt, Artificial Sequence
  Description of Artificial Sequence: Synthetic oligonucleotide
cagcagcaacaaauccagaagcagc

SEQ ID NO: 142643 - RNA, 25 nt, Artificial Sequence
  Description of Artificial Sequence: Synthetic oligonucleotide
cuucugauagcagaguuucagaaac

SEQ ID NO: 142644 - RNA, 25 nt, Artificial Sequence
  Description of Artificial Sequence: Synthetic oligonucleotide
cagcaugagaacuugacacggcagc

SEQ ID NO: 142645 - RNA, 25 nt, Artificial Sequence
  Description of Artificial Sequence: Synthetic oligonucleotide
caccaggcucagcuucaggagcaua

SEQ ID NO: 142646 - RNA, 25 nt, Artificial Sequence
  Description of Artificial Sequence: Synthetic oligonucleotide
aucaaggaacuucuagccauaaaac

SEQ ID NO: 142647 - RNA, 25 nt, Artificial Sequence
  Description of Artificial Sequence: Synthetic oligonucleotide
cagcaacaagaacuccuagaaaagg

SEQ ID NO: 142648 - RNA, 25 nt, Artificial Sequence
  Description of Artificial Sequence: Synthetic oligonucleotide
gagcagaaacuggagcagcagaggc

SEQ ID NO: 142649 - RNA, 25 nt, Artificial Sequence
  Description of Artificial Sequence: Synthetic oligonucleotide
caagaacaggaaguagagaggcauc

SEQ ID NO: 142650 - RNA, 25 nt, Artificial Sequence
  Description of Artificial Sequence: Synthetic oligonucleotide
cgcagagaacagcagcuuccuccuc

SEQ ID NO: 142651 - RNA, 25 nt, Artificial Sequence
  Description of Artificial Sequence: Synthetic oligonucleotide
cucagaggcaaagauagaggacgag

SEQ ID NO: 142652 - RNA, 25 nt, Artificial Sequence
  Description of Artificial Sequence: Synthetic oligonucleotide
gaaagggcaguggcaaguacagaag

SEQ ID NO: 142653 - RNA, 25 nt, Artificial Sequence
  Description of Artificial Sequence: Synthetic oligonucleotide
guaaagcagaagcuucaagaguucc

SEQ ID NO: 142654 - RNA, 25 nt, Artificial Sequence
  Description of Artificial Sequence: Synthetic oligonucleotide
cuacugaguaaaucagcaacgaaag

SEQ ID NO: 142655 - RNA, 25 nt, Artificial Sequence
  Description of Artificial Sequence: Synthetic oligonucleotide
gacacuccaacuaauggaaaaaauc

SEQ ID NO: 142656 - RNA, 25 nt, Artificial Sequence
  Description of Artificial Sequence: Synthetic oligonucleotide
cauuccgugagccgccaucccaagc

SEQ ID NO: 142657 - RNA, 25 nt, Artificial Sequence
  Description of Artificial Sequence: Synthetic oligonucleotide
cucugguacacggcugcccaccaca

SEQ ID NO: 142658 - RNA, 25 nt, Artificial Sequence
  Description of Artificial Sequence: Synthetic oligonucleotide
acaucauuggaucaaagcucuccac

SEQ ID NO: 142659 - RNA, 25 nt, Artificial Sequence
  Description of Artificial Sequence: Synthetic oligonucleotide
ccccuuaguggaacaucuccauccu

SEQ ID NO: 142660 - RNA, 25 nt, Artificial Sequence
  Description of Artificial Sequence: Synthetic oligonucleotide
uacaaguacacauuaccaggagcac

SEQ ID NO: 142661 - RNA, 25 nt, Artificial Sequence
  Description of Artificial Sequence: Synthetic oligonucleotide
caagaugcaaaggaugauuuccccc

SEQ ID NO: 142662 - RNA, 25 nt, Artificial Sequence
  Description of Artificial Sequence: Synthetic oligonucleotide
cuucgaaaaacugccucugagccca

SEQ ID NO: 142663 - RNA, 25 nt, Artificial Sequence
  Description of Artificial Sequence: Synthetic oligonucleotide
aacuugaaggugcgguccagguuaa

SEQ ID NO: 142664 - RNA, 25 nt, Artificial Sequence
  Description of Artificial Sequence: Synthetic oligonucleotide
aaacagaaaguggcagagaggagaa

SEQ ID NO: 142665 - RNA, 25 nt, Artificial Sequence
  Description of Artificial Sequence: Synthetic oligonucleotide
agcagccccuuacucaggcggaagg

SEQ ID NO: 142666 - RNA, 25 nt, Artificial Sequence
  Description of Artificial Sequence: Synthetic oligonucleotide
gauggaaauguugucacuucauuca

SEQ ID NO: 142667 - RNA, 25 nt, Artificial Sequence
  Description of Artificial Sequence: Synthetic oligonucleotide
aagaagcgaauguuugaggugacag

SEQ ID NO: 142668 - RNA, 25 nt, Artificial Sequence
  Description of Artificial Sequence: Synthetic oligonucleotide
gaauccucagucaguagcaguucuc

SEQ ID NO: 142669 - RNA, 25 nt, Artificial Sequence
  Description of Artificial Sequence: Synthetic oligonucleotide
ccaggcucuggucccaguucaccaa

SEQ ID NO: 142670 - RNA, 25 nt, Artificial Sequence
  Description of Artificial Sequence: Synthetic oligonucleotide
aacaaugggccaacuggaaguguua

SEQ ID NO: 142671 - RNA, 25 nt, Artificial Sequence
  Description of Artificial Sequence: Synthetic oligonucleotide
acugaaaaugagacuucgguuuugc

SEQ ID NO: 142672 - RNA, 25 nt, Artificial Sequence
  Description of Artificial Sequence: Synthetic oligonucleotide
cccccuaccccucaugccgagcaaa

SEQ ID NO: 142673 - RNA, 25 nt, Artificial Sequence
  Description of Artificial Sequence: Synthetic oligonucleotide
augguuucacagcaacgcauucuaa

SEQ ID NO: 142674 - RNA, 25 nt, Artificial Sequence
  Description of Artificial Sequence: Synthetic oligonucleotide
auucaugaagauuccaugaaccugc

SEQ ID NO: 142675 - RNA, 25 nt, Artificial Sequence
  Description of Artificial Sequence: Synthetic oligonucleotide
cuaagucuuuauaccucuccuucuu

SEQ ID NO: 142676 - RNA, 25 nt, Artificial Sequence
  Description of Artificial Sequence: Synthetic oligonucleotide
uugcccaacauuaccuuggggcuuc

SEQ ID NO: 142677 - RNA, 25 nt, Artificial Sequence
  Description of Artificial Sequence: Synthetic oligonucleotide
cccgcagugccaucccagcucaaug

SEQ ID NO: 142678 - RNA, 25 nt, Artificial Sequence
  Description of Artificial Sequence: Synthetic oligonucleotide
gcuucgaauucacucaaagaaaagc

SEQ ID NO: 142679 - RNA, 25 nt, Artificial Sequence
  Description of Artificial Sequence: Synthetic oligonucleotide
cagaagugugagacgcagacgcuua

SEQ ID NO: 142680 - RNA, 25 nt, Artificial Sequence
  Description of Artificial Sequence: Synthetic oligonucleotide
aggcaagguguuccucugccugggc

SEQ ID NO: 142681 - RNA, 25 nt, Artificial Sequence
  Description of Artificial Sequence: Synthetic oligonucleotide
caguauggaggcagcaucccggcau

SEQ ID NO: 142682 - RNA, 25 nt, Artificial Sequence
  Description of Artificial Sequence: Synthetic oligonucleotide
ucuuccagccacccucauguuacuu

SEQ ID NO: 142683 - RNA, 25 nt, Artificial Sequence
  Description of Artificial Sequence: Synthetic oligonucleotide
uuagagggaaagccacccaacagca

SEQ ID NO: 142684 - RNA, 25 nt, Artificial Sequence
  Description of Artificial Sequence: Synthetic oligonucleotide
agccaccaggcucuccugcagcauu

SEQ ID NO: 142685 - RNA, 25 nt, Artificial Sequence
  Description of Artificial Sequence: Synthetic oligonucleotide
uuauuauugaaagaacaaaugcgac

SEQ ID NO: 142686 - RNA, 25 nt, Artificial Sequence
  Description of Artificial Sequence: Synthetic oligonucleotide
cagcaaaagcuucuuguagcuggug

SEQ ID NO: 142687 - RNA, 25 nt, Artificial Sequence
  Description of Artificial Sequence: Synthetic oligonucleotide
ggaguucccuuacauccucagucuc

SEQ ID NO: 142688 - RNA, 25 nt, Artificial Sequence
  Description of Artificial Sequence: Synthetic oligonucleotide
cccuuggcaacaaaagagagaauuu

SEQ ID NO: 142689 - RNA, 25 nt, Artificial Sequence
  Description of Artificial Sequence: Synthetic oligonucleotide
ucaccuggcauuagagguacccaca

SEQ ID NO: 142690 - RNA, 25 nt, Artificial Sequence
  Description of Artificial Sequence: Synthetic oligonucleotide
aaauugccccgucacagaccccuga

SEQ ID NO: 142691 - RNA, 25 nt, Artificial Sequence
  Description of Artificial Sequence: Synthetic oligonucleotide
aaccgaacccagucugcaccuuugc

SEQ ID NO: 142692 - RNA, 25 nt, Artificial Sequence
  Description of Artificial Sequence: Synthetic oligonucleotide
ccucagagcacguuggcucagcugg

SEQ ID NO: 142693 - RNA, 25 nt, Artificial Sequence
  Description of Artificial Sequence: Synthetic oligonucleotide
gucauucaacagcaacaccagcaau

SEQ ID NO: 142694 - RNA, 25 nt, Artificial Sequence
  Description of Artificial Sequence: Synthetic oligonucleotide
uucuuggagaagcagaagcaauacc

SEQ ID NO: 142695 - RNA, 25 nt, Artificial Sequence
  Description of Artificial Sequence: Synthetic oligonucleotide
cagcagcagauccacaugaacaaac

SEQ ID NO: 142696 - RNA, 25 nt, Artificial Sequence
  Description of Artificial Sequence: Synthetic oligonucleotide
cugcuuucgaaaucuauugaacaac

SEQ ID NO: 142697 - RNA, 25 nt, Artificial Sequence
  Description of Artificial Sequence: Synthetic oligonucleotide
cugaagcaaccaggcagucaccuug

SEQ ID NO: 142698 - RNA, 25 nt, Artificial Sequence
  Description of Artificial Sequence: Synthetic oligonucleotide
gaggaagcagaggaagagcuucagg

SEQ ID NO: 142699 - RNA, 25 nt, Artificial Sequence
  Description of Artificial Sequence: Synthetic oligonucleotide
ggggaccaggcgaugcaggaagaca

SEQ ID NO: 142700 - RNA, 25 nt, Artificial Sequence
  Description of Artificial Sequence: Synthetic oligonucleotide
agagcgcccucuaguggcaacagca

SEQ ID NO: 142701 - RNA, 25 nt, Artificial Sequence
  Description of Artificial Sequence: Synthetic oligonucleotide
acuaggagcgacagcagugcuugug

SEQ ID NO: 142702 - RNA, 25 nt, Artificial Sequence
  Description of Artificial Sequence: Synthetic oligonucleotide
guggaugacacacugggacaaguug

SEQ ID NO: 142703 - RNA, 25 nt, Artificial Sequence
  Description of Artificial Sequence: Synthetic oligonucleotide
ggggcugugaaggucaaggaggaac

SEQ ID NO: 142704 - RNA, 25 nt, Artificial Sequence
  Description of Artificial Sequence: Synthetic oligonucleotide
ccaguggacagugaugaagaugcuc

SEQ ID NO: 142705 - RNA, 25 nt, Artificial Sequence
  Description of Artificial Sequence: Synthetic oligonucleotide
cagauccaggaaauggaaucugggg

SEQ ID NO: 142706 - RNA, 25 nt, Artificial Sequence
  Description of Artificial Sequence: Synthetic oligonucleotide
gagcaggcugcuuuuaugcaacagc

SEQ ID NO: 142707 - RNA, 25 nt, Artificial Sequence
  Description of Artificial Sequence: Synthetic oligonucleotide
ccuuuccuggaacccacgcacacac

SEQ ID NO: 142708 - RNA, 25 nt, Artificial Sequence
  Description of Artificial Sequence: Synthetic oligonucleotide
cgugcgcucucugugcgccaagcuc

SEQ ID NO: 142709 - RNA, 25 nt, Artificial Sequence
  Description of Artificial Sequence: Synthetic oligonucleotide
ccgcuggcugcgguuggcauggaug

SEQ ID NO: 142710 - RNA, 25 nt, Artificial Sequence
  Description of Artificial Sequence: Synthetic oligonucleotide
ggauuagagaaacaccgucucgucu

SEQ ID NO: 142711 - RNA, 25 nt, Artificial Sequence
  Description of Artificial Sequence: Synthetic oligonucleotide
uccaggacucacucuuccccugcug

SEQ ID NO: 142712 - RNA, 25 nt, Artificial Sequence
  Description of Artificial Sequence: Synthetic oligonucleotide
gccucuguuuuaccucacccagcaa

SEQ ID NO: 142713 - RNA, 25 nt, Artificial Sequence
  Description of Artificial Sequence: Synthetic oligonucleotide
auggaccgcccccuccagccuggcu

SEQ ID NO: 142714 - RNA, 25 nt, Artificial Sequence
  Description of Artificial Sequence: Synthetic oligonucleotide
ucugcaacuggaauugccuaugacc

SEQ ID NO: 142715 - RNA, 25 nt, Artificial Sequence
  Description of Artificial Sequence: Synthetic oligonucleotide
cccuugaugcugaaacaccagugcg

SEQ ID NO: 142716 - RNA, 25 nt, Artificial Sequence
  Description of Artificial Sequence: Synthetic oligonucleotide
guuuguggcaauuccaccacccacc

SEQ ID NO: 142717 - RNA, 25 nt, Artificial Sequence
  Description of Artificial Sequence: Synthetic oligonucleotide
ccugagcaugcuggacgaauacaga

SEQ ID NO: 142718 - RNA, 25 nt, Artificial Sequence
  Description of Artificial Sequence: Synthetic oligonucleotide
aguaucuggucacgacugcaagaaa

SEQ ID NO: 142719 - RNA, 25 nt, Artificial Sequence
  Description of Artificial Sequence: Synthetic oligonucleotide
acugggcugcuaaauaaaugugagc

SEQ ID NO: 142720 - RNA, 25 nt, Artificial Sequence
  Description of Artificial Sequence: Synthetic oligonucleotide
cgaauucaaggucgaaaagccagcc

SEQ ID NO: 142721 - RNA, 25 nt, Artificial Sequence
  Description of Artificial Sequence: Synthetic oligonucleotide
cuggaggaaauacagcuuguucauu

SEQ ID NO: 142722 - RNA, 25 nt, Artificial Sequence
  Description of Artificial Sequence: Synthetic oligonucleotide
ucugaacaucacucacuguuguaug

SEQ ID NO: 142723 - RNA, 25 nt, Artificial Sequence
  Description of Artificial Sequence: Synthetic oligonucleotide
ggcaccaacccccuggacggacaga

SEQ ID NO: 142724 - RNA, 25 nt, Artificial Sequence
  Description of Artificial Sequence: Synthetic oligonucleotide
aagcuggaccccaggauacuccuag

SEQ ID NO: 142725 - RNA, 25 nt, Artificial Sequence
  Description of Artificial Sequence: Synthetic oligonucleotide
ggugaugacucucaaaaguuuuuuu

SEQ ID NO: 142726 - RNA, 25 nt, Artificial Sequence
  Description of Artificial Sequence: Synthetic oligonucleotide
uccucauuaccuugugguggacuug

SEQ ID NO: 142727 - RNA, 25 nt, Artificial Sequence
  Description of Artificial Sequence: Synthetic oligonucleotide
gggguggacagugacaccauuugga

SEQ ID NO: 142728 - RNA, 25 nt, Artificial Sequence
  Description of Artificial Sequence: Synthetic oligonucleotide
aaugagcuacacucguccggugcug

SEQ ID NO: 142729 - RNA, 25 nt, Artificial Sequence
  Description of Artificial Sequence: Synthetic oligonucleotide
gcacgcauggcuguuggcuguguca

SEQ ID NO: 142730 - RNA, 25 nt, Artificial Sequence
  Description of Artificial Sequence: Synthetic oligonucleotide
aucgagcuggcuuccaaaguggccu

SEQ ID NO: 142731 - RNA, 25 nt, Artificial Sequence
  Description of Artificial Sequence: Synthetic oligonucleotide
ucaggagagcugaagaauggguuug

SEQ ID NO: 142732 - RNA, 25 nt, Artificial Sequence
  Description of Artificial Sequence: Synthetic oligonucleotide
gcuguugugaggcccccuggccauc

SEQ ID NO: 142733 - RNA, 25 nt, Artificial Sequence
  Description of Artificial Sequence: Synthetic oligonucleotide
cacgcugaagaauccacagccaugg

SEQ ID NO: 142734 - RNA, 25 nt, Artificial Sequence
  Description of Artificial Sequence: Synthetic oligonucleotide
ggguucugcuuuuuuaauucaguug

SEQ ID NO: 142735 - RNA, 25 nt, Artificial Sequence
  Description of Artificial Sequence: Synthetic oligonucleotide
gcaauuaccgccaaauacuugagag

SEQ ID NO: 142736 - RNA, 25 nt, Artificial Sequence
  Description of Artificial Sequence: Synthetic oligonucleotide
gaccaacuaaauauaagcaagauau

SEQ ID NO: 142737 - RNA, 25 nt, Artificial Sequence
  Description of Artificial Sequence: Synthetic oligonucleotide
uugauuguagaucuggauguucacc

SEQ ID NO: 142738 - RNA, 25 nt, Artificial Sequence
  Description of Artificial Sequence: Synthetic oligonucleotide
cauggaaacgguacccagcaggccu

SEQ ID NO: 142739 - RNA, 25 nt, Artificial Sequence
  Description of Artificial Sequence: Synthetic oligonucleotide
uuuuaugcugaccccagcauccugu

SEQ ID NO: 142740 - RNA, 25 nt, Artificial Sequence
  Description of Artificial Sequence: Synthetic oligonucleotide
uacauuucacuccaucgcuaugaug

SEQ ID NO: 142741 - RNA, 25 nt, Artificial Sequence
  Description of Artificial Sequence: Synthetic oligonucleotide
gaagggaacuuuuucccuggcagug

SEQ ID NO: 142742 - RNA, 25 nt, Artificial Sequence
  Description of Artificial Sequence: Synthetic oligonucleotide
ggagccccaaaugagguuggaacag

SEQ ID NO: 142743 - RNA, 25 nt, Artificial Sequence
  Description of Artificial Sequence: Synthetic oligonucleotide
ggccuuggagaaggguacaauauaa

SEQ ID NO: 142744 - RNA, 25 nt, Artificial Sequence
  Description of Artificial Sequence: Synthetic oligonucleotide
aauauugccuggacagguggccuug

SEQ ID NO: 142745 - RNA, 25 nt, Artificial Sequence
  Description of Artificial Sequence: Synthetic oligonucleotide
gauccucccaugggagauguugagu

SEQ ID NO: 142746 - RNA, 25 nt, Artificial Sequence
  Description of Artificial Sequence: Synthetic oligonucleotide
uaccuugaagcauucaggaccaucg

SEQ ID NO: 142747 - RNA, 25 nt, Artificial Sequence
  Description of Artificial Sequence: Synthetic oligonucleotide
gugaagccuguggccaaagaguuug

SEQ ID NO: 142748 - RNA, 25 nt, Artificial Sequence
  Description of Artificial Sequence: Synthetic oligonucleotide
gauccagacauggucuuaguaucug

SEQ ID NO: 142749 - RNA, 25 nt, Artificial Sequence
  Description of Artificial Sequence: Synthetic oligonucleotide
gcuggauuugaugcauuggaaggcc

SEQ ID NO: 142750 - RNA, 25 nt, Artificial Sequence
  Description of Artificial Sequence: Synthetic oligonucleotide
cacaccccuccucuaggaggguaca

SEQ ID NO: 142751 - RNA, 25 nt, Artificial Sequence
  Description of Artificial Sequence: Synthetic oligonucleotide
aaagugacggcaaaauguuuugguc

SEQ ID NO: 142752 - RNA, 25 nt, Artificial Sequence
  Description of Artificial Sequence: Synthetic oligonucleotide
cauuugacgaagcaauugaugacau

SEQ ID NO: 142753 - RNA, 25 nt, Artificial Sequence
  Description of Artificial Sequence: Synthetic oligonucleotide
uuggcugauggacgugugguguugg

SEQ ID NO: 142754 - RNA, 25 nt, Artificial Sequence
  Description of Artificial Sequence: Synthetic oligonucleotide
gcucuagaaggaggacaugaucuca

SEQ ID NO: 142755 - RNA, 25 nt, Artificial Sequence
  Description of Artificial Sequence: Synthetic oligonucleotide
acagccaucugugaugcaucagaag

SEQ ID NO: 142756 - RNA, 25 nt, Artificial Sequence
  Description of Artificial Sequence: Synthetic oligonucleotide
gccuguguaaaugcccuucuaggaa

SEQ ID NO: 142757 - RNA, 25 nt, Artificial Sequence
  Description of Artificial Sequence: Synthetic oligonucleotide
aaugagcuggagccacuugcagaag

SEQ ID NO: 142758 - RNA, 25 nt, Artificial Sequence
  Description of Artificial Sequence: Synthetic oligonucleotide
gauauucuccaccaaagcccgaaua

SEQ ID NO: 142759 - RNA, 25 nt, Artificial Sequence
  Description of Artificial Sequence: Synthetic oligonucleotide
augaaugcuguuauuucuuuacaga

SEQ ID NO: 142760 - RNA, 25 nt, Artificial Sequence
  Description of Artificial Sequence: Synthetic oligonucleotide
aagaucauugaaauucaaagcaagu

SEQ ID NO: 142761 - RNA, 25 nt, Artificial Sequence
  Description of Artificial Sequence: Synthetic oligonucleotide
uauuggaagucaguaaggauggugg

SEQ ID NO: 142762 - RNA, 25 nt, Artificial Sequence
  Description of Artificial Sequence: Synthetic oligonucleotide
gcugugccaaggggcugugcucugg

SEQ ID NO: 142763 - RNA, 25 nt, Artificial Sequence
  Description of Artificial Sequence: Synthetic oligonucleotide
gcuggugcucaguugcaagaggaga

SEQ ID NO: 142764 - RNA, 25 nt, Artificial Sequence
  Description of Artificial Sequence: Synthetic oligonucleotide
acagagaccguuucugcccuggccu

SEQ ID NO: 142765 - RNA, 25 nt, Artificial Sequence
  Description of Artificial Sequence: Synthetic oligonucleotide
ucccuaacaguggauguggaacagc

SEQ ID NO: 142766 - RNA, 25 nt, Artificial Sequence
  Description of Artificial Sequence: Synthetic oligonucleotide
cccuuugcucaggaagacagcagaa

SEQ ID NO: 142767 - RNA, 25 nt, Artificial Sequence
  Description of Artificial Sequence: Synthetic oligonucleotide
acugcuggugagccuauggaagagg

SEQ ID NO: 142768 - RNA, 25 nt, Artificial Sequence
  Description of Artificial Sequence: Synthetic oligonucleotide
gagccagccuugugaagugccaagu

SEQ ID NO: 142769 - RNA, 25 nt, Artificial Sequence
  Description of Artificial Sequence: Synthetic oligonucleotide
ucccccucugauauuuccugugugu

SEQ ID NO: 142770 - RNA, 25 nt, Artificial Sequence
  Description of Artificial Sequence: Synthetic oligonucleotide
ugacaucauuguguauccccccacc

SEQ ID NO: 142771 - RNA, 25 nt, Artificial Sequence
  Description of Artificial Sequence: Synthetic oligonucleotide
cccaguacccucagacaugucuugu

SEQ ID NO: 142772 - RNA, 25 nt, Artificial Sequence
  Description of Artificial Sequence: Synthetic oligonucleotide
ucugcugccuggguggcacagauuc

SEQ ID NO: 142773 - RNA, 25 nt, Artificial Sequence
  Description of Artificial Sequence: Synthetic oligonucleotide
caauggaacauaaacacugggcaca

SEQ ID NO: 142774 - RNA, 25 nt, Artificial Sequence
  Description of Artificial Sequence: Synthetic oligonucleotide
aaaauucugaacagcagcuucacuu

SEQ ID NO: 142775 - RNA, 25 nt, Artificial Sequence
  Description of Artificial Sequence: Synthetic oligonucleotide
uguucuuuggauggacuugaaaggg

SEQ ID NO: 142776 - RNA, 25 nt, Artificial Sequence
  Description of Artificial Sequence: Synthetic oligonucleotide
gcauuaaagauuccuuaaacguaac

SEQ ID NO: 142777 - RNA, 25 nt, Artificial Sequence
  Description of Artificial Sequence: Synthetic oligonucleotide
ccgcugugauucuagaguuacagua

SEQ ID NO: 142778 - RNA, 25 nt, Artificial Sequence
  Description of Artificial Sequence: Synthetic oligonucleotide
aaaccacgauuggaagaaacugcuu

SEQ ID NO: 142779 - RNA, 25 nt, Artificial Sequence
  Description of Artificial Sequence: Synthetic oligonucleotide
uccagcaugcuuuuaauaugcuggg

SEQ ID NO: 142780 - RNA, 25 nt, Artificial Sequence
  Description of Artificial Sequence: Synthetic oligonucleotide
gugacccacuccuagacaccaaguu

SEQ ID NO: 142781 - RNA, 25 nt, Artificial Sequence
  Description of Artificial Sequence: Synthetic oligonucleotide
uugaacuagaaacauucaguacagc

SEQ ID NO: 142782 - RNA, 25 nt, Artificial Sequence
  Description of Artificial Sequence: Synthetic oligonucleotide
cacuagauauuguuaauuucagaag

SEQ ID NO: 142783 - RNA, 25 nt, Artificial Sequence
  Description of Artificial Sequence: Synthetic oligonucleotide
gcuaugacagccagugaaauuuugg

SEQ ID NO: 142784 - RNA, 25 nt, Artificial Sequence
  Description of Artificial Sequence: Synthetic oligonucleotide
ggcaaaaccugagacauagucauuc

SEQ ID NO: 142785 - RNA, 25 nt, Artificial Sequence
  Description of Artificial Sequence: Synthetic oligonucleotide
ccugacauucugaucagcuuuuuuu

SEQ ID NO: 142786 - RNA, 25 nt, Artificial Sequence
  Description of Artificial Sequence: Synthetic oligonucleotide
ugggguaauuuguuuuucaaacagu

SEQ ID NO: 142787 - RNA, 25 nt, Artificial Sequence
  Description of Artificial Sequence: Synthetic oligonucleotide
ucuuaacuuguuuacaagauuugcu

SEQ ID NO: 142788 - RNA, 25 nt, Artificial Sequence
  Description of Artificial Sequence: Synthetic oligonucleotide
uuuuagcuaugaacggaucguaauu

SEQ ID NO: 142789 - RNA, 25 nt, Artificial Sequence
  Description of Artificial Sequence: Synthetic oligonucleotide
uccacccagaauguaauguuucuug

SEQ ID NO: 142790 - RNA, 25 nt, Artificial Sequence
  Description of Artificial Sequence: Synthetic oligonucleotide
guuuguuuguuuuguuuuguuaggg

SEQ ID NO: 142791 - RNA, 25 nt, Artificial Sequence
  Description of Artificial Sequence: Synthetic oligonucleotide
guuuuuuucucaacuuuaacacaca

SEQ ID NO: 142792 - RNA, 25 nt, Artificial Sequence
  Description of Artificial Sequence: Synthetic oligonucleotide
aguucaacuguuccuaguaaaaguu

SEQ ID NO: 142793 - RNA, 25 nt, Artificial Sequence
  Description of Artificial Sequence: Synthetic oligonucleotide
ucaagauggaggaacuagcaugagg

SEQ ID NO: 142794 - RNA, 25 nt, Artificial Sequence
  Description of Artificial Sequence: Synthetic oligonucleotide
gcuuuuuucaguaucucgaagucca

SEQ ID NO: 142795 - RNA, 25 nt, Artificial Sequence
  Description of Artificial Sequence: Synthetic oligonucleotide
aaaugccaaaggaaccucacacacu

SEQ ID NO: 142796 - RNA, 25 nt, Artificial Sequence
  Description of Artificial Sequence: Synthetic oligonucleotide
uguuuguaauggugcaauauuuuau

SEQ ID NO: 142797 - RNA, 25 nt, Artificial Sequence
  Description of Artificial Sequence: Synthetic oligonucleotide
uaucacuuuuuuuuaaacaucccca

SEQ ID NO: 142798 - RNA, 25 nt, Artificial Sequence
  Description of Artificial Sequence: Synthetic oligonucleotide
aacaucuuuguguucucacacacag

SEQ ID NO: 142799 - RNA, 25 nt, Artificial Sequence
  Description of Artificial Sequence: Synthetic oligonucleotide
ggcaauuugcaauguugcaauugug

SEQ ID NO: 142800 - RNA, 25 nt, Artificial Sequence
  Description of Artificial Sequence: Synthetic oligonucleotide
guuggagaaugaaguccccccaccu

SEQ ID NO: 142801 - RNA, 25 nt, Artificial Sequence
  Description of Artificial Sequence: Synthetic oligonucleotide
ucccagccacacacacauccuuugu

SEQ ID NO: 142802 - RNA, 25 nt, Artificial Sequence
  Description of Artificial Sequence: Synthetic oligonucleotide
uucucaugacaguaggucugagcaa

SEQ ID NO: 142803 - RNA, 25 nt, Artificial Sequence
  Description of Artificial Sequence: Synthetic oligonucleotide
aauguuccaccaagcauuuucagug

SEQ ID NO: 142804 - RNA, 25 nt, Artificial Sequence
  Description of Artificial Sequence: Synthetic oligonucleotide
gucuuugaaaagcacguaacuuuuc

SEQ ID NO: 142805 - RNA, 25 nt, Artificial Sequence
  Description of Artificial Sequence: Synthetic oligonucleotide
caaagguggucuuaauuuguugcau

SEQ ID NO: 142806 - RNA, 25 nt, Artificial Sequence
  Description of Artificial Sequence: Synthetic oligonucleotide
uaucuaucaaggacuuauucacuca

SEQ ID NO: 142807 - RNA, 25 nt, Artificial Sequence
  Description of Artificial Sequence: Synthetic oligonucleotide
accuuuccuuuucugcccucuauca

SEQ ID NO: 142808 - RNA, 25 nt, Artificial Sequence
  Description of Artificial Sequence: Synthetic oligonucleotide
aauugauuucuucuuaccuuucauc

SEQ ID NO: 142809 - RNA, 25 nt, Artificial Sequence
  Description of Artificial Sequence: Synthetic oligonucleotide
cauucauuccuuccuuuagaaaaac

SEQ ID NO: 142810 - RNA, 25 nt, Artificial Sequence
  Description of Artificial Sequence: Synthetic oligonucleotide
cugaagauuacccauaaucuccucu

SEQ ID NO: 142811 - RNA, 25 nt, Artificial Sequence
  Description of Artificial Sequence: Synthetic oligonucleotide
uuauuacuugagggccuugacuauu

SEQ ID NO: 142812 - RNA, 25 nt, Artificial Sequence
  Description of Artificial Sequence: Synthetic oligonucleotide
uuaguuuauuuuguuuacuuuacag

SEQ ID NO: 142813 - RNA, 25 nt, Artificial Sequence
  Description of Artificial Sequence: Synthetic oligonucleotide
gguuaacacaguuguuuugucugau

SEQ ID NO: 142814 - RNA, 25 nt, Artificial Sequence
  Description of Artificial Sequence: Synthetic oligonucleotide
uugcauuuuauuaacugugaagccg

SEQ ID NO: 142815 - RNA, 25 nt, Artificial Sequence
  Description of Artificial Sequence: Synthetic oligonucleotide
guugaaaugaauaucacuuaagcaa

SEQ ID NO: 142816 - RNA, 25 nt, Artificial Sequence
  Description of Artificial Sequence: Synthetic oligonucleotide
acguugcuaaauuucuauguguuug

SEQ ID NO: 142817 - RNA, 25 nt, Artificial Sequence
  Description of Artificial Sequence: Synthetic oligonucleotide
gaaauguguuaaugaaggcacugcu

SEQ ID NO: 142818 - RNA, 25 nt, Artificial Sequence
  Description of Artificial Sequence: Synthetic oligonucleotide
uuauuuguagucaccuugaacugac

SEQ ID NO: 142819 - RNA, 25 nt, Artificial Sequence
  Description of Artificial Sequence: Synthetic oligonucleotide
cuuaaccuagaagcugugccuucuu

SEQ ID NO: 142820 - RNA, 25 nt, Artificial Sequence
  Description of Artificial Sequence: Synthetic oligonucleotide
caaaaaacagccuuuaaacaaguuu

SEQ ID NO: 142821 - RNA, 25 nt, Artificial Sequence
  Description of Artificial Sequence: Synthetic oligonucleotide
uccuuagugucaaaaguuaaaaaua

SEQ ID NO: 142822 - RNA, 25 nt, Artificial Sequence
  Description of Artificial Sequence: Synthetic oligonucleotide
cuuagugucaaaaguuaaaaauaaa

SEQ ID NO: 142823 - RNA, 25 nt, Artificial Sequence
  Description of Artificial Sequence: Synthetic oligonucleotide
gagcaggcugcuuuuaugcaacagg

SEQ ID NO: 142824 - RNA, 25 nt, Artificial Sequence
  Description of Artificial Sequence: Synthetic oligonucleotide
guaauaggcaaagauuuagcuccag

SEQ ID NO: 142825 - RNA, 25 nt, Artificial Sequence
  Description of Artificial Sequence: Synthetic oligonucleotide
ggauuuguaauuaaagucauuaucu

SEQ ID NO: 142826 - RNA, 25 nt, Artificial Sequence
  Description of Artificial Sequence: Synthetic oligonucleotide
ugaacaugaaaugcauugcagguuu

SEQ ID NO: 142827 - RNA, 25 nt, Artificial Sequence
  Description of Artificial Sequence: Synthetic oligonucleotide
ugguaaauggauaugauuuccuauc

SEQ ID NO: 142828 - RNA, 25 nt, Artificial Sequence
  Description of Artificial Sequence: Synthetic oligonucleotide
caguuuauauuucucuaugauuuga

SEQ ID NO: 142829 - RNA, 25 nt, Artificial Sequence
  Description of Artificial Sequence: Synthetic oligonucleotide
aguucaguguuuaaggauucuaccu

SEQ ID NO: 142830 - RNA, 25 nt, Artificial Sequence
  Description of Artificial Sequence: Synthetic oligonucleotide
uaaugcagauauauguauauaucua

SEQ ID NO: 142831 - RNA, 25 nt, Artificial Sequence
  Description of Artificial Sequence: Synthetic oligonucleotide
auauagaggucuuucuauauacuga

SEQ ID NO: 142832 - RNA, 25 nt, Artificial Sequence
  Description of Artificial Sequence: Synthetic oligonucleotide
aucucuauauagauaucaauguuuc

SEQ ID NO: 142833 - RNA, 25 nt, Artificial Sequence
  Description of Artificial Sequence: Synthetic oligonucleotide
cauugaaaauccacugguaaggaaa

SEQ ID NO: 142834 - RNA, 25 nt, Artificial Sequence
  Description of Artificial Sequence: Synthetic oligonucleotide
auaccuguuauacuaaaauuaugau

SEQ ID NO: 142835 - RNA, 25 nt, Artificial Sequence
  Description of Artificial Sequence: Synthetic oligonucleotide
uacauaauaucugagcaguuaauag

SEQ ID NO: 142836 - RNA, 25 nt, Artificial Sequence
  Description of Artificial Sequence: Synthetic oligonucleotide
ggcuuuaaauuuaucccaaagccug

SEQ ID NO: 142837 - RNA, 25 nt, Artificial Sequence
  Description of Artificial Sequence: Synthetic oligonucleotide
gcuacaccaauuacuucuaaagaaa

SEQ ID NO: 142838 - RNA, 25 nt, Artificial Sequence
  Description of Artificial Sequence: Synthetic oligonucleotide
aacaaauucacuguuauuuugaguu

SEQ ID NO: 142839 - RNA, 25 nt, Artificial Sequence
  Description of Artificial Sequence: Synthetic oligonucleotide
uuauguguugagaucagugacugcu

SEQ ID NO: 142840 - RNA, 25 nt, Artificial Sequence
  Description of Artificial Sequence: Synthetic oligonucleotide
uggauagucucccagucugaucaau

SEQ ID NO: 142841 - RNA, 25 nt, Artificial Sequence
  Description of Artificial Sequence: Synthetic oligonucleotide
ugaagcauucgauuaguuuuugauu

SEQ ID NO: 142842 - RNA, 25 nt, Artificial Sequence
  Description of Artificial Sequence: Synthetic oligonucleotide
uuuuugcaacaucuagaauuuaauu

SEQ ID NO: 142843 - RNA, 25 nt, Artificial Sequence
  Description of Artificial Sequence: Synthetic oligonucleotide
uuucacaucacuguacauaauguau

SEQ ID NO: 142844 - RNA, 25 nt, Artificial Sequence
  Description of Artificial Sequence: Synthetic oligonucleotide
ucauacuauagucuugaacacuguu

SEQ ID NO: 142845 - RNA, 25 nt, Artificial Sequence
  Description of Artificial Sequence: Synthetic oligonucleotide
uaaagguagucugccccuuccuucc

SEQ ID NO: 142846 - RNA, 25 nt, Artificial Sequence
  Description of Artificial Sequence: Synthetic oligonucleotide
cucucucuuuuuuuaguuaaguaga

SEQ ID NO: 142847 - RNA, 25 nt, Artificial Sequence
  Description of Artificial Sequence: Synthetic oligonucleotide
aaauguucuggucaccaugccagua

SEQ ID NO: 142848 - RNA, 25 nt, Artificial Sequence
  Description of Artificial Sequence: Synthetic oligonucleotide
aguccuagguuauuguguagguugc

SEQ ID NO: 142849 - RNA, 25 nt, Artificial Sequence
  Description of Artificial Sequence: Synthetic oligonucleotide
caauugaacauauuaggaauacagg

SEQ ID NO: 142850 - RNA, 25 nt, Artificial Sequence
  Description of Artificial Sequence: Synthetic oligonucleotide
gugguuuuaaauauauagaugcaaa

SEQ ID NO: 142851 - RNA, 25 nt, Artificial Sequence
  Description of Artificial Sequence: Synthetic oligonucleotide
auugcagcacuacuuuaaauauuag

SEQ ID NO: 142852 - RNA, 25 nt, Artificial Sequence
  Description of Artificial Sequence: Synthetic oligonucleotide
gauuaugucucacauagcacugcuc

SEQ ID NO: 142853 - RNA, 25 nt, Artificial Sequence
  Description of Artificial Sequence: Synthetic oligonucleotide
cauuuuacuuuuauuuuguguaauu

SEQ ID NO: 142854 - RNA, 25 nt, Artificial Sequence
  Description of Artificial Sequence: Synthetic oligonucleotide
uugaugacacugucuaucaaaaaag

SEQ ID NO: 142855 - RNA, 25 nt, Artificial Sequence
  Description of Artificial Sequence: Synthetic oligonucleotide
gagcaaaugaagcagaugcaaaugu

SEQ ID NO: 142856 - RNA, 25 nt, Artificial Sequence
  Description of Artificial Sequence: Synthetic oligonucleotide
uuagugagaaguaaugugcagcauu

SEQ ID NO: 142857 - RNA, 25 nt, Artificial Sequence
  Description of Artificial Sequence: Synthetic oligonucleotide
uaugguccaaucagauacaauauug

SEQ ID NO: 142858 - RNA, 25 nt, Artificial Sequence
  Description of Artificial Sequence: Synthetic oligonucleotide
gugucuacaauugcaaaaaacacag

SEQ ID NO: 142859 - RNA, 25 nt, Artificial Sequence
  Description of Artificial Sequence: Synthetic oligonucleotide
guaacaggaugaauauuaucugaua

SEQ ID NO: 142860 - RNA, 25 nt, Artificial Sequence
  Description of Artificial Sequence: Synthetic oligonucleotide
aucaagucaaaaucaguuugaaaag

SEQ ID NO: 142861 - RNA, 25 nt, Artificial Sequence
  Description of Artificial Sequence: Synthetic oligonucleotide
gaagguguaucauauuuuauauugu

SEQ ID NO: 142862 - RNA, 25 nt, Artificial Sequence
  Description of Artificial Sequence: Synthetic oligonucleotide
ucacuagaaucucuuaaguauaauu

SEQ ID NO: 142863 - RNA, 25 nt, Artificial Sequence
  Description of Artificial Sequence: Synthetic oligonucleotide
uccauaaugacaugggcauauaccg

SEQ ID NO: 142864 - RNA, 25 nt, Artificial Sequence
  Description of Artificial Sequence: Synthetic oligonucleotide
guaacauucuggcaaauaacaauua

SEQ ID NO: 142865 - RNA, 25 nt, Artificial Sequence
  Description of Artificial Sequence: Synthetic oligonucleotide
agaaaagauagguuuaacaaaaaaa

SEQ ID NO: 142866 - RNA, 25 nt, Artificial Sequence
  Description of Artificial Sequence: Synthetic oligonucleotide
auuuacuuguauauaaugcaccuuc

SEQ ID NO: 142867 - RNA, 25 nt, Artificial Sequence
  Description of Artificial Sequence: Synthetic oligonucleotide
caggaggacuauguccuuugaugcu

SEQ ID NO: 142868 - RNA, 25 nt, Artificial Sequence
  Description of Artificial Sequence: Synthetic oligonucleotide
uauaaaauacaaacaacuuugaagg

SEQ ID NO: 142869 - RNA, 25 nt, Artificial Sequence
  Description of Artificial Sequence: Synthetic oligonucleotide
gcaacagaagacacuguuuauucaa

SEQ ID NO: 142870 - RNA, 25 nt, Artificial Sequence
  Description of Artificial Sequence: Synthetic oligonucleotide
agucaguucuuugucagguuccugc

SEQ ID NO: 142871 - RNA, 25 nt, Artificial Sequence
  Description of Artificial Sequence: Synthetic oligonucleotide
cuguucuccuacagaaaagugauuc

SEQ ID NO: 142872 - RNA, 25 nt, Artificial Sequence
  Description of Artificial Sequence: Synthetic oligonucleotide
cugugagggugaacaggaaaugccu

SEQ ID NO: 142873 - RNA, 25 nt, Artificial Sequence
  Description of Artificial Sequence: Synthetic oligonucleotide
uuguggaaacaggaaguccaaguga

SEQ ID NO: 142874 - RNA, 25 nt, Artificial Sequence
  Description of Artificial Sequence: Synthetic oligonucleotide
auucauguacugaggaauguaggaa

SEQ ID NO: 142875 - RNA, 25 nt, Artificial Sequence
  Description of Artificial Sequence: Synthetic oligonucleotide
aaaaaaaucugaggauagugcuuua

SEQ ID NO: 142876 - RNA, 25 nt, Artificial Sequence
  Description of Artificial Sequence: Synthetic oligonucleotide
acucuuucuguuuuuaaagggcacu

SEQ ID NO: 142877 - RNA, 25 nt, Artificial Sequence
  Description of Artificial Sequence: Synthetic oligonucleotide
ucuaugaauugauuuauugucuaag

SEQ ID NO: 142878 - RNA, 25 nt, Artificial Sequence
  Description of Artificial Sequence: Synthetic oligonucleotide
gaaaauaacaccacaaguagggaaa

SEQ ID NO: 142879 - RNA, 25 nt, Artificial Sequence
  Description of Artificial Sequence: Synthetic oligonucleotide
auuguuacggaagcuuuucacugga

SEQ ID NO: 142880 - RNA, 25 nt, Artificial Sequence
  Description of Artificial Sequence: Synthetic oligonucleotide
aacauuuccuucauauucccuuuug

SEQ ID NO: 142881 - RNA, 25 nt, Artificial Sequence
  Description of Artificial Sequence: Synthetic oligonucleotide
gauauguuuaccuuguuuuauaggu

SEQ ID NO: 142882 - RNA, 25 nt, Artificial Sequence
  Description of Artificial Sequence: Synthetic oligonucleotide
uuuacuuuuguuaagcuaguuaaag

SEQ ID NO: 142883 - RNA, 25 nt, Artificial Sequence
  Description of Artificial Sequence: Synthetic oligonucleotide
gguucguuguauuaagaccccuuua

SEQ ID NO: 142884 - RNA, 25 nt, Artificial Sequence
  Description of Artificial Sequence: Synthetic oligonucleotide
aauauggauaauccaaauugaccua

SEQ ID NO: 142885 - RNA, 25 nt, Artificial Sequence
  Description of Artificial Sequence: Synthetic oligonucleotide
agaaucuuugugagguuuuuucuau

SEQ ID NO: 142886 - RNA, 25 nt, Artificial Sequence
  Description of Artificial Sequence: Synthetic oligonucleotide
uuaaaauauuuauauuucuaaaucc

SEQ ID NO: 142887 - RNA, 25 nt, Artificial Sequence
  Description of Artificial Sequence: Synthetic oligonucleotide
cgagguauuucaagguguaguaucc

SEQ ID NO: 142888 - RNA, 25 nt, Artificial Sequence
  Description of Artificial Sequence: Synthetic oligonucleotide
cuauuucaaaggagauauagcaguu

SEQ ID NO: 142889 - RNA, 25 nt, Artificial Sequence
  Description of Artificial Sequence: Synthetic oligonucleotide
uuugccaaauguagacauuguucaa

SEQ ID NO: 142890 - RNA, 25 nt, Artificial Sequence
  Description of Artificial Sequence: Synthetic oligonucleotide
acuguauguuauuggcacguguugu

SEQ ID NO: 142891 - RNA, 25 nt, Artificial Sequence
  Description of Artificial Sequence: Synthetic oligonucleotide
uuuacauuuugcugugacauuuaaa

SEQ ID NO: 142892 - RNA, 25 nt, Artificial Sequence
  Description of Artificial Sequence: Synthetic oligonucleotide
aaauauuucuuuaaaaauguuacug

SEQ ID NO: 142893 - RNA, 25 nt, Artificial Sequence
  Description of Artificial Sequence: Synthetic oligonucleotide
gcuaaagauacauuauccuuuuuua

SEQ ID NO: 142894 - RNA, 25 nt, Artificial Sequence
  Description of Artificial Sequence: Synthetic oligonucleotide
aaaaagucuccauucaaauuaaauu

SEQ ID NO: 142895 - RNA, 25 nt, Artificial Sequence
  Description of Artificial Sequence: Synthetic oligonucleotide
uaacauaacuagaaguuagaaaguu

SEQ ID NO: 142896 - RNA, 25 nt, Artificial Sequence
  Description of Artificial Sequence: Synthetic oligonucleotide
uuaaaaguuuuccacauaaugaaag

SEQ ID NO: 142897 - RNA, 25 nt, Artificial Sequence
  Description of Artificial Sequence: Synthetic oligonucleotide
guccuucugauaauuugacaaauag

SEQ ID NO: 142898 - RNA, 25 nt, Artificial Sequence
  Description of Artificial Sequence: Synthetic oligonucleotide
gcuauaauaggaacacucccuauca

SEQ ID NO: 142899 - RNA, 25 nt, Artificial Sequence
  Description of Artificial Sequence: Synthetic oligonucleotide
accaacauauuuugguuaguauauu

SEQ ID NO: 142900 - RNA, 25 nt, Artificial Sequence
  Description of Artificial Sequence: Synthetic oligonucleotide
uccuucauauuaaaaugacuuuuug

SEQ ID NO: 142901 - RNA, 25 nt, Artificial Sequence
  Description of Artificial Sequence: Synthetic oligonucleotide
gucaguuguuuugcauuaaaaauau

SEQ ID NO: 142902 - RNA, 25 nt, Artificial Sequence
  Description of Artificial Sequence: Synthetic oligonucleotide
uggcaugccuaagauaaaauuguau

SEQ ID NO: 142903 - RNA, 25 nt, Artificial Sequence
  Description of Artificial Sequence: Synthetic oligonucleotide
uauuuuuuccaucucauaaauauuc

SEQ ID NO: 142904 - RNA, 25 nt, Artificial Sequence
  Description of Artificial Sequence: Synthetic oligonucleotide
cauuuucuucaaagucuuuuuucaa

SEQ ID NO: 142905 - RNA, 25 nt, Artificial Sequence
  Description of Artificial Sequence: Synthetic oligonucleotide
aucucauaaaaaagggauagugcau

SEQ ID NO: 142906 - RNA, 25 nt, Artificial Sequence
  Description of Artificial Sequence: Synthetic oligonucleotide
ucuuuuaaaauacauuuuauuuggg

SEQ ID NO: 142907 - RNA, 25 nt, Artificial Sequence
  Description of Artificial Sequence: Synthetic oligonucleotide
ggaggaacauguggcugagcagacu

SEQ ID NO: 142908 - RNA, 25 nt, Artificial Sequence
  Description of Artificial Sequence: Synthetic oligonucleotide
uuuuguauaauauuacuucaaagau

SEQ ID NO: 142909 - RNA, 25 nt, Artificial Sequence
  Description of Artificial Sequence: Synthetic oligonucleotide
uauguaaucacaaacaaaaaaaacu

SEQ ID NO: 142910 - RNA, 25 nt, Artificial Sequence
  Description of Artificial Sequence: Synthetic oligonucleotide
uauuuuuuauaaugucauuugagag

SEQ ID NO: 142911 - RNA, 25 nt, Artificial Sequence
  Description of Artificial Sequence: Synthetic oligonucleotide
gaguuucaucaguacaguuggugga

SEQ ID NO: 142912 - RNA, 25 nt, Artificial Sequence
  Description of Artificial Sequence: Synthetic oligonucleotide
acguuaauuguuugaauuugauagu

SEQ ID NO: 142913 - RNA, 25 nt, Artificial Sequence
  Description of Artificial Sequence: Synthetic oligonucleotide
ucuuugaauuuaaucaagaaacuac

SEQ ID NO: 142914 - RNA, 25 nt, Artificial Sequence
  Description of Artificial Sequence: Synthetic oligonucleotide
ccuggaaccagugaaaaggaaagcu

SEQ ID NO: 142915 - RNA, 25 nt, Artificial Sequence
  Description of Artificial Sequence: Synthetic oligonucleotide
uggacuuaaauaaucuuagaauuaa

SEQ ID NO: 142916 - RNA, 25 nt, Artificial Sequence
  Description of Artificial Sequence: Synthetic oligonucleotide
auugauaaaugucucuuuuaaaauc

SEQ ID NO: 142917 - RNA, 25 nt, Artificial Sequence
  Description of Artificial Sequence: Synthetic oligonucleotide
cuacuguauuuauuauaauuuacac

SEQ ID NO: 142918 - RNA, 25 nt, Artificial Sequence
  Description of Artificial Sequence: Synthetic oligonucleotide
cccuugaaggugaucucuuguuuug

SEQ ID NO: 142919 - RNA, 25 nt, Artificial Sequence
  Description of Artificial Sequence: Synthetic oligonucleotide
guguuguaaauauauuguuuguaug

SEQ ID NO: 142920 - RNA, 25 nt, Artificial Sequence
  Description of Artificial Sequence: Synthetic oligonucleotide
guuucccuucuugccuucuguuaua

SEQ ID NO: 142921 - RNA, 25 nt, Artificial Sequence
  Description of Artificial Sequence: Synthetic oligonucleotide
aagucucuuccuuucucaaauaaag

SEQ ID NO: 142922 - RNA, 25 nt, Artificial Sequence
  Description of Artificial Sequence: Synthetic oligonucleotide
ucucaaauaaaguuuuuuuuaaaag

SEQ ID NO: 142923 - RNA, 25 nt, Artificial Sequence
  Description of Artificial Sequence: Synthetic oligonucleotide
augggguggcuggacgagagcagcu

SEQ ID NO: 142924 - RNA, 25 nt, Artificial Sequence
  Description of Artificial Sequence: Synthetic oligonucleotide
ucuuggcucagcaaagaaugcacag

SEQ ID NO: 142925 - RNA, 25 nt, Artificial Sequence
  Description of Artificial Sequence: Synthetic oligonucleotide
guaugaucagcucaguggaugugaa

SEQ ID NO: 142926 - RNA, 25 nt, Artificial Sequence
  Description of Artificial Sequence: Synthetic oligonucleotide
agucagaaguuccugugggccugga

SEQ ID NO: 142927 - RNA, 25 nt, Artificial Sequence
  Description of Artificial Sequence: Synthetic oligonucleotide
agcccaucucaccuuuagaccuaag

SEQ ID NO: 142928 - RNA, 25 nt, Artificial Sequence
  Description of Artificial Sequence: Synthetic oligonucleotide
ggacagaccucaggaugaugaugcc

SEQ ID NO: 142929 - RNA, 25 nt, Artificial Sequence
  Description of Artificial Sequence: Synthetic oligonucleotide
ccgugguggacccuguuguccguga

SEQ ID NO: 142930 - RNA, 25 nt, Artificial Sequence
  Description of Artificial Sequence: Synthetic oligonucleotide
agaagcaauugcagcaggaauuacu

SEQ ID NO: 142931 - RNA, 25 nt, Artificial Sequence
  Description of Artificial Sequence: Synthetic oligonucleotide
uucuuauccagcagcagcaacaaau

SEQ ID NO: 142932 - RNA, 25 nt, Artificial Sequence
  Description of Artificial Sequence: Synthetic oligonucleotide
uccagaagcagcuucugauagcaga

SEQ ID NO: 142933 - RNA, 25 nt, Artificial Sequence
  Description of Artificial Sequence: Synthetic oligonucleotide
aguuucagaaacagcaugagaacuu

SEQ ID NO: 142934 - RNA, 25 nt, Artificial Sequence
  Description of Artificial Sequence: Synthetic oligonucleotide
ugacacggcagcaccaggcucagcu

SEQ ID NO: 142935 - RNA, 25 nt, Artificial Sequence
  Description of Artificial Sequence: Synthetic oligonucleotide
uucaggagcauaucaaguugcaaca

SEQ ID NO: 142936 - RNA, 25 nt, Artificial Sequence
  Description of Artificial Sequence: Synthetic oligonucleotide
aggaacuucuagccauaaaacagca

SEQ ID NO: 142937 - RNA, 25 nt, Artificial Sequence
  Description of Artificial Sequence: Synthetic oligonucleotide
aacaagaacuccuagaaaaggagca

SEQ ID NO: 142938 - RNA, 25 nt, Artificial Sequence
  Description of Artificial Sequence: Synthetic oligonucleotide
agaaacuggagcagcagaggcaaga

SEQ ID NO: 142939 - RNA, 25 nt, Artificial Sequence
  Description of Artificial Sequence: Synthetic oligonucleotide
aacaggaaguagagaggcaucgcag

SEQ ID NO: 142940 - RNA, 25 nt, Artificial Sequence
  Description of Artificial Sequence: Synthetic oligonucleotide
gagaacagcagcuuccuccucucag

SEQ ID NO: 142941 - RNA, 25 nt, Artificial Sequence
  Description of Artificial Sequence: Synthetic oligonucleotide
gaggcaaagauagaggacgagaaag

SEQ ID NO: 142942 - RNA, 25 nt, Artificial Sequence
  Description of Artificial Sequence: Synthetic oligonucleotide
gggcaguggcaaguacagaaguaaa

SEQ ID NO: 142943 - RNA, 25 nt, Artificial Sequence
  Description of Artificial Sequence: Synthetic oligonucleotide
agcagaagcuucaagaguuccuacu

SEQ ID NO: 142944 - RNA, 25 nt, Artificial Sequence
  Description of Artificial Sequence: Synthetic oligonucleotide
ugaguaaaucagcaacgaaagacac

SEQ ID NO: 142945 - RNA, 25 nt, Artificial Sequence
  Description of Artificial Sequence: Synthetic oligonucleotide
cuccaacuaauggaaaaaaucauuc

SEQ ID NO: 142946 - RNA, 25 nt, Artificial Sequence
  Description of Artificial Sequence: Synthetic oligonucleotide
ccgugagccgccaucccaagcucug

SEQ ID NO: 142947 - RNA, 25 nt, Artificial Sequence
  Description of Artificial Sequence: Synthetic oligonucleotide
gguacacggcugcccaccacacauc

SEQ ID NO: 142948 - RNA, 25 nt, Artificial Sequence
  Description of Artificial Sequence: Synthetic oligonucleotide
cauuggaucaaagcucuccaccccu

SEQ ID NO: 142949 - RNA, 25 nt, Artificial Sequence
  Description of Artificial Sequence: Synthetic oligonucleotide
uuaguggaacaucuccauccuacaa

SEQ ID NO: 142950 - RNA, 25 nt, Artificial Sequence
  Description of Artificial Sequence: Synthetic oligonucleotide
aguacacauuaccaggagcacaaga

SEQ ID NO: 142951 - RNA, 25 nt, Artificial Sequence
  Description of Artificial Sequence: Synthetic oligonucleotide
augcaaaggaugauuucccccuucg

SEQ ID NO: 142952 - RNA, 25 nt, Artificial Sequence
  Description of Artificial Sequence: Synthetic oligonucleotide
gaaaaacugccucugagcccaacuu

SEQ ID NO: 142953 - RNA, 25 nt, Artificial Sequence
  Description of Artificial Sequence: Synthetic oligonucleotide
ugaaggugcgguccagguuaaaaca

SEQ ID NO: 142954 - RNA, 25 nt, Artificial Sequence
  Description of Artificial Sequence: Synthetic oligonucleotide
agaaaguggcagagaggagaagcag

SEQ ID NO: 142955 - RNA, 25 nt, Artificial Sequence
  Description of Artificial Sequence: Synthetic oligonucleotide
gccccuuacucaggcggaaggaugg

SEQ ID NO: 142956 - RNA, 25 nt, Artificial Sequence
  Description of Artificial Sequence: Synthetic oligonucleotide
gaaauguugucacuucauucaagaa

SEQ ID NO: 142957 - RNA, 25 nt, Artificial Sequence
  Description of Artificial Sequence: Synthetic oligonucleotide
agcgaauguuugaggugacagaauc

SEQ ID NO: 142958 - RNA, 25 nt, Artificial Sequence
  Description of Artificial Sequence: Synthetic oligonucleotide
ccucagucaguagcaguucuccagg

SEQ ID NO: 142959 - RNA, 25 nt, Artificial Sequence
  Description of Artificial Sequence: Synthetic oligonucleotide
gcucuggucccaguucaccaaacaa

SEQ ID NO: 142960 - RNA, 25 nt, Artificial Sequence
  Description of Artificial Sequence: Synthetic oligonucleotide
augggccaacuggaaguguuacuga

SEQ ID NO: 142961 - RNA, 25 nt, Artificial Sequence
  Description of Artificial Sequence: Synthetic oligonucleotide
aaaaugagacuucgguuuugccccc

SEQ ID NO: 142962 - RNA, 25 nt, Artificial Sequence
  Description of Artificial Sequence: Synthetic oligonucleotide
cuaccccucaugccgagcaaauggu

SEQ ID NO: 142963 - RNA, 25 nt, Artificial Sequence
  Description of Artificial Sequence: Synthetic oligonucleotide
uuucacagcaacgcauucuaauuca

SEQ ID NO: 142964 - RNA, 25 nt, Artificial Sequence
  Description of Artificial Sequence: Synthetic oligonucleotide
augaagauuccaugaaccugcuaag

SEQ ID NO: 142965 - RNA, 25 nt, Artificial Sequence
  Description of Artificial Sequence: Synthetic oligonucleotide
gucuuuauaccucuccuucuuugcc

SEQ ID NO: 142966 - RNA, 25 nt, Artificial Sequence
  Description of Artificial Sequence: Synthetic oligonucleotide
ccaacauuaccuuggggcuucccgc

SEQ ID NO: 142967 - RNA, 25 nt, Artificial Sequence
  Description of Artificial Sequence: Synthetic oligonucleotide
cagugccaucccagcucaaugcuuc

SEQ ID NO: 142968 - RNA, 25 nt, Artificial Sequence
  Description of Artificial Sequence: Synthetic oligonucleotide
cgaauucacucaaagaaaagcagaa

SEQ ID NO: 142969 - RNA, 25 nt, Artificial Sequence
  Description of Artificial Sequence: Synthetic oligonucleotide
agugugagacgcagacgcuuaggca

SEQ ID NO: 142970 - RNA, 25 nt, Artificial Sequence
  Description of Artificial Sequence: Synthetic oligonucleotide
aagguguuccucugccugggcagua

SEQ ID NO: 142971 - RNA, 25 nt, Artificial Sequence
  Description of Artificial Sequence: Synthetic oligonucleotide
auggaggcagcaucccggcaucuuc

SEQ ID NO: 142972 - RNA, 25 nt, Artificial Sequence
  Description of Artificial Sequence: Synthetic oligonucleotide
ccagccacccucauguuacuuuaga

SEQ ID NO: 142973 - RNA, 25 nt, Artificial Sequence
  Description of Artificial Sequence: Synthetic oligonucleotide
agggaaagccacccaacagcagcca

SEQ ID NO: 142974 - RNA, 25 nt, Artificial Sequence
  Description of Artificial Sequence: Synthetic oligonucleotide
accaggcucuccugcagcauuuauu

SEQ ID NO: 142975 - RNA, 25 nt, Artificial Sequence
  Description of Artificial Sequence: Synthetic oligonucleotide
uauugaaagaacaaaugcgacagca

SEQ ID NO: 142976 - RNA, 25 nt, Artificial Sequence
  Description of Artificial Sequence: Synthetic oligonucleotide
aaaagcuucuuguagcugguggagu

SEQ ID NO: 142977 - RNA, 25 nt, Artificial Sequence
  Description of Artificial Sequence: Synthetic oligonucleotide
uucccuuacauccucagucucccuu

SEQ ID NO: 142978 - RNA, 25 nt, Artificial Sequence
  Description of Artificial Sequence: Synthetic oligonucleotide
uggcaacaaaagagagaauuucacc

SEQ ID NO: 142979 - RNA, 25 nt, Artificial Sequence
  Description of Artificial Sequence: Synthetic oligonucleotide
cuggcauuagagguacccacaaauu

SEQ ID NO: 142980 - RNA, 25 nt, Artificial Sequence
  Description of Artificial Sequence: Synthetic oligonucleotide
ugccccgucacagaccccugaaccg

SEQ ID NO: 142981 - RNA, 25 nt, Artificial Sequence
  Description of Artificial Sequence: Synthetic oligonucleotide
gaacccagucugcaccuuugccuca

SEQ ID NO: 142982 - RNA, 25 nt, Artificial Sequence
  Description of Artificial Sequence: Synthetic oligonucleotide
agagcacguuggcucagcuggucau

SEQ ID NO: 142983 - RNA, 25 nt, Artificial Sequence
  Description of Artificial Sequence: Synthetic oligonucleotide
uucaacagcaacaccagcaauucuu

SEQ ID NO: 142984 - RNA, 25 nt, Artificial Sequence
  Description of Artificial Sequence: Synthetic oligonucleotide
uggagaagcagaagcaauaccagca

SEQ ID NO: 142985 - RNA, 25 nt, Artificial Sequence
  Description of Artificial Sequence: Synthetic oligonucleotide
agcagauccacaugaacaaacugcu

SEQ ID NO: 142986 - RNA, 25 nt, Artificial Sequence
  Description of Artificial Sequence: Synthetic oligonucleotide
uuucgaaaucuauugaacaacugaa

SEQ ID NO: 142987 - RNA, 25 nt, Artificial Sequence
  Description of Artificial Sequence: Synthetic oligonucleotide
agcaaccaggcagucaccuugagga

SEQ ID NO: 142988 - RNA, 25 nt, Artificial Sequence
  Description of Artificial Sequence: Synthetic oligonucleotide
aagcagaggaagagcuucaggggga

SEQ ID NO: 142989 - RNA, 25 nt, Artificial Sequence
  Description of Artificial Sequence: Synthetic oligonucleotide
accaggcgaugcaggaagacagagc

SEQ ID NO: 142990 - RNA, 25 nt, Artificial Sequence
  Description of Artificial Sequence: Synthetic oligonucleotide
cgcccucuaguggcaacagcacuag

SEQ ID NO: 142991 - RNA, 25 nt, Artificial Sequence
  Description of Artificial Sequence: Synthetic oligonucleotide
ggagcgacagcagugcuugugugga

SEQ ID NO: 142992 - RNA, 25 nt, Artificial Sequence
  Description of Artificial Sequence: Synthetic oligonucleotide
augacacacugggacaaguuggggc

SEQ ID NO: 142993 - RNA, 25 nt, Artificial Sequence
  Description of Artificial Sequence: Synthetic oligonucleotide
cugugaaggucaaggaggaaccagu

SEQ ID NO: 142994 - RNA, 25 nt, Artificial Sequence
  Description of Artificial Sequence: Synthetic oligonucleotide
uggacagugaugaagaugcucagau

SEQ ID NO: 142995 - RNA, 25 nt, Artificial Sequence
  Description of Artificial Sequence: Synthetic oligonucleotide
uccaggaaauggaaucuggggagca

SEQ ID NO: 142996 - RNA, 25 nt, Artificial Sequence
  Description of Artificial Sequence: Synthetic oligonucleotide
aggcugcuuuuaugcaacagccuuu

SEQ ID NO: 142997 - RNA, 25 nt, Artificial Sequence
  Description of Artificial Sequence: Synthetic oligonucleotide
uccuggaacccacgcacacacgugc

SEQ ID NO: 142998 - RNA, 25 nt, Artificial Sequence
  Description of Artificial Sequence: Synthetic oligonucleotide
cgcucucugugcgccaagcuccgcu

SEQ ID NO: 142999 - RNA, 25 nt, Artificial Sequence
  Description of Artificial Sequence: Synthetic oligonucleotide
uggcugcgguuggcauggauggauu

SEQ ID NO: 143000 - RNA, 25 nt, Artificial Sequence
  Description of Artificial Sequence: Synthetic oligonucleotide
uagagaaacaccgucucgucuccag

SEQ ID NO: 143001 - RNA, 25 nt, Artificial Sequence
  Description of Artificial Sequence: Synthetic oligonucleotide
ggacucacucuuccccugcugccuc

SEQ ID NO: 143002 - RNA, 25 nt, Artificial Sequence
  Description of Artificial Sequence: Synthetic oligonucleotide
cuguuuuaccucacccagcaaugga

SEQ ID NO: 143003 - RNA, 25 nt, Artificial Sequence
  Description of Artificial Sequence: Synthetic oligonucleotide
accgcccccuccagccuggcucugc

SEQ ID NO: 143004 - RNA, 25 nt, Artificial Sequence
  Description of Artificial Sequence: Synthetic oligonucleotide
caacuggaauugccuaugaccccuu

SEQ ID NO: 143005 - RNA, 25 nt, Artificial Sequence
  Description of Artificial Sequence: Synthetic oligonucleotide
ugaugcugaaacaccagugcguuug

SEQ ID NO: 143006 - RNA, 25 nt, Artificial Sequence
  Description of Artificial Sequence: Synthetic oligonucleotide
guggcaauuccaccacccacccuga

SEQ ID NO: 143007 - RNA, 25 nt, Artificial Sequence
  Description of Artificial Sequence: Synthetic oligonucleotide
agcaugcuggacgaauacagaguau

SEQ ID NO: 143008 - RNA, 25 nt, Artificial Sequence
  Description of Artificial Sequence: Synthetic oligonucleotide
ucuggucacgacugcaagaaacugg

SEQ ID NO: 143009 - RNA, 25 nt, Artificial Sequence
  Description of Artificial Sequence: Synthetic oligonucleotide
ggcugcuaaauaaaugugagcgaau

SEQ ID NO: 143010 - RNA, 25 nt, Artificial Sequence
  Description of Artificial Sequence: Synthetic oligonucleotide
uucaaggucgaaaagccagccugga

SEQ ID NO: 143011 - RNA, 25 nt, Artificial Sequence
  Description of Artificial Sequence: Synthetic oligonucleotide
aggaaauacagcuuguucauucuga

SEQ ID NO: 143012 - RNA, 25 nt, Artificial Sequence
  Description of Artificial Sequence: Synthetic oligonucleotide
aacaucacucacuguuguauggcac

SEQ ID NO: 143013 - RNA, 25 nt, Artificial Sequence
  Description of Artificial Sequence: Synthetic oligonucleotide
ccaacccccuggacggacagaagcu

SEQ ID NO: 143014 - RNA, 25 nt, Artificial Sequence
  Description of Artificial Sequence: Synthetic oligonucleotide
uggaccccaggauacuccuagguga

SEQ ID NO: 143015 - RNA, 25 nt, Artificial Sequence
  Description of Artificial Sequence: Synthetic oligonucleotide
augacucucaaaaguuuuuuuccuc

SEQ ID NO: 143016 - RNA, 25 nt, Artificial Sequence
  Description of Artificial Sequence: Synthetic oligonucleotide
cauuaccuugugguggacuuggggu

SEQ ID NO: 143017 - RNA, 25 nt, Artificial Sequence
  Description of Artificial Sequence: Synthetic oligonucleotide
uggacagugacaccauuuggaauga

SEQ ID NO: 143018 - RNA, 25 nt, Artificial Sequence
  Description of Artificial Sequence: Synthetic oligonucleotide
agcuacacucguccggugcugcacg

SEQ ID NO: 143019 - RNA, 25 nt, Artificial Sequence
  Description of Artificial Sequence: Synthetic oligonucleotide
gcauggcuguuggcugugucaucga

SEQ ID NO: 143020 - RNA, 25 nt, Artificial Sequence
  Description of Artificial Sequence: Synthetic oligonucleotide
agcuggcuuccaaaguggccucagg

SEQ ID NO: 143021 - RNA, 25 nt, Artificial Sequence
  Description of Artificial Sequence: Synthetic oligonucleotide
gagagcugaagaauggguuugcugu

SEQ ID NO: 143022 - RNA, 25 nt, Artificial Sequence
  Description of Artificial Sequence: Synthetic oligonucleotide
uugugaggcccccuggccaucacgc

SEQ ID NO: 143023 - RNA, 25 nt, Artificial Sequence
  Description of Artificial Sequence: Synthetic oligonucleotide
cugaagaauccacagccaugggguu

SEQ ID NO: 143024 - RNA, 25 nt, Artificial Sequence
  Description of Artificial Sequence: Synthetic oligonucleotide
ucugcuuuuuuaauucaguugcaau

SEQ ID NO: 143025 - RNA, 25 nt, Artificial Sequence
  Description of Artificial Sequence: Synthetic oligonucleotide
uuaccgccaaauacuugagagacca

SEQ ID NO: 143026 - RNA, 25 nt, Artificial Sequence
  Description of Artificial Sequence: Synthetic oligonucleotide
aacuaaauauaagcaagauauugau

SEQ ID NO: 143027 - RNA, 25 nt, Artificial Sequence
  Description of Artificial Sequence: Synthetic oligonucleotide
uuguagaucuggauguucaccaugg

SEQ ID NO: 143028 - RNA, 25 nt, Artificial Sequence
  Description of Artificial Sequence: Synthetic oligonucleotide
gaaacgguacccagcaggccuuuua

SEQ ID NO: 143029 - RNA, 25 nt, Artificial Sequence
  Description of Artificial Sequence: Synthetic oligonucleotide
augcugaccccagcauccuguacau

SEQ ID NO: 143030 - RNA, 25 nt, Artificial Sequence
  Description of Artificial Sequence: Synthetic oligonucleotide
uuucacuccaucgcuaugaugaagg

SEQ ID NO: 143031 - RNA, 25 nt, Artificial Sequence
  Description of Artificial Sequence: Synthetic oligonucleotide
ggaacuuuuucccuggcaguggagc

SEQ ID NO: 143032 - RNA, 25 nt, Artificial Sequence
  Description of Artificial Sequence: Synthetic oligonucleotide
ccccaaaugagguuggaacaggccu

SEQ ID NO: 143033 - RNA, 25 nt, Artificial Sequence
  Description of Artificial Sequence: Synthetic oligonucleotide
uuggagaaggguacaauauaaauau

SEQ ID NO: 143034 - RNA, 25 nt, Artificial Sequence
  Description of Artificial Sequence: Synthetic oligonucleotide
uugccuggacagguggccuugaucc

SEQ ID NO: 143035 - RNA, 25 nt, Artificial Sequence
  Description of Artificial Sequence: Synthetic oligonucleotide
cucccaugggagauguugaguaccu

SEQ ID NO: 143036 - RNA, 25 nt, Artificial Sequence
  Description of Artificial Sequence: Synthetic oligonucleotide
uugaagcauucaggaccaucgugaa

SEQ ID NO: 143037 - RNA, 25 nt, Artificial Sequence
  Description of Artificial Sequence: Synthetic oligonucleotide
agccuguggccaaagaguuugaucc

SEQ ID NO: 143038 - RNA, 25 nt, Artificial Sequence
  Description of Artificial Sequence: Synthetic oligonucleotide
cagacauggucuuaguaucugcugg

SEQ ID NO: 143039 - RNA, 25 nt, Artificial Sequence
  Description of Artificial Sequence: Synthetic oligonucleotide
gauuugaugcauuggaaggccacac

SEQ ID NO: 143040 - RNA, 25 nt, Artificial Sequence
  Description of Artificial Sequence: Synthetic oligonucleotide
ccccuccucuaggaggguacaaagu

SEQ ID NO: 143041 - RNA, 25 nt, Artificial Sequence
  Description of Artificial Sequence: Synthetic oligonucleotide
ugacggcaaaauguuuuggucauuu

SEQ ID NO: 143042 - RNA, 25 nt, Artificial Sequence
  Description of Artificial Sequence: Synthetic oligonucleotide
ugacgaagcaauugaugacauuggc

SEQ ID NO: 143043 - RNA, 25 nt, Artificial Sequence
  Description of Artificial Sequence: Synthetic oligonucleotide
cugauggacgugugguguuggcucu

SEQ ID NO: 143044 - RNA, 25 nt, Artificial Sequence
  Description of Artificial Sequence: Synthetic oligonucleotide
uagaaggaggacaugaucucacagc

SEQ ID NO: 143045 - RNA, 25 nt, Artificial Sequence
  Description of Artificial Sequence: Synthetic oligonucleotide
ccaucugugaugcaucagaagccug

SEQ ID NO: 143046 - RNA, 25 nt, Artificial Sequence
  Description of Artificial Sequence: Synthetic oligonucleotide
guguaaaugcccuucuaggaaauga

SEQ ID NO: 143047 - RNA, 25 nt, Artificial Sequence
  Description of Artificial Sequence: Synthetic oligonucleotide
agcuggagccacuugcagaagauau

SEQ ID NO: 143048 - RNA, 25 nt, Artificial Sequence
  Description of Artificial Sequence: Synthetic oligonucleotide
uucuccaccaaagcccgaauaugaa

SEQ ID NO: 143049 - RNA, 25 nt, Artificial Sequence
  Description of Artificial Sequence: Synthetic oligonucleotide
augcuguuauuucuuuacagaagau

SEQ ID NO: 143050 - RNA, 25 nt, Artificial Sequence
  Description of Artificial Sequence: Synthetic oligonucleotide
ucauugaaauucaaagcaaguauug

SEQ ID NO: 143051 - RNA, 25 nt, Artificial Sequence
  Description of Artificial Sequence: Synthetic oligonucleotide
ggaagucaguaaggaugguggcugu

SEQ ID NO: 143052 - RNA, 25 nt, Artificial Sequence
  Description of Artificial Sequence: Synthetic oligonucleotide
ugccaaggggcugugcucuggcugg

SEQ ID NO: 143053 - RNA, 25 nt, Artificial Sequence
  Description of Artificial Sequence: Synthetic oligonucleotide
gugcucaguugcaagaggagacaga

SEQ ID NO: 143054 - RNA, 25 nt, Artificial Sequence
  Description of Artificial Sequence: Synthetic oligonucleotide
agaccguuucugcccuggccucccu

SEQ ID NO: 143055 - RNA, 25 nt, Artificial Sequence
  Description of Artificial Sequence: Synthetic oligonucleotide
uaacaguggauguggaacagcccuu

SEQ ID NO: 143056 - RNA, 25 nt, Artificial Sequence
  Description of Artificial Sequence: Synthetic oligonucleotide
uugcucaggaagacagcagaacugc

SEQ ID NO: 143057 - RNA, 25 nt, Artificial Sequence
  Description of Artificial Sequence: Synthetic oligonucleotide
cuggugagccuauggaagaggagcc

SEQ ID NO: 143058 - RNA, 25 nt, Artificial Sequence
  Description of Artificial Sequence: Synthetic oligonucleotide
cagccuugugaagugccaagucccc

SEQ ID NO: 143059 - RNA, 25 nt, Artificial Sequence
  Description of Artificial Sequence: Synthetic oligonucleotide
ccucugauauuuccugugugugaca

SEQ ID NO: 143060 - RNA, 25 nt, Artificial Sequence
  Description of Artificial Sequence: Synthetic oligonucleotide
aucauuguguauccccccaccccag

SEQ ID NO: 143061 - RNA, 25 nt, Artificial Sequence
  Description of Artificial Sequence: Synthetic oligonucleotide
guacccucagacaugucuugucugc

SEQ ID NO: 143062 - RNA, 25 nt, Artificial Sequence
  Description of Artificial Sequence: Synthetic oligonucleotide
cugccuggguggcacagauucaaug

SEQ ID NO: 143063 - RNA, 25 nt, Artificial Sequence
  Description of Artificial Sequence: Synthetic oligonucleotide
ggaacauaaacacugggcacaaaau

SEQ ID NO: 143064 - RNA, 25 nt, Artificial Sequence
  Description of Artificial Sequence: Synthetic oligonucleotide
uucugaacagcagcuucacuuguuc

SEQ ID NO: 143065 - RNA, 25 nt, Artificial Sequence
  Description of Artificial Sequence: Synthetic oligonucleotide
cuuuggauggacuugaaagggcauu

SEQ ID NO: 143066 - RNA, 25 nt, Artificial Sequence
  Description of Artificial Sequence: Synthetic oligonucleotide
uaaagauuccuuaaacguaaccgcu

SEQ ID NO: 143067 - RNA, 25 nt, Artificial Sequence
  Description of Artificial Sequence: Synthetic oligonucleotide
ugugauucuagaguuacaguaaacc

SEQ ID NO: 143068 - RNA, 25 nt, Artificial Sequence
  Description of Artificial Sequence: Synthetic oligonucleotide
cacgauuggaagaaacugcuuccag

SEQ ID NO: 143069 - RNA, 25 nt, Artificial Sequence
  Description of Artificial Sequence: Synthetic oligonucleotide
gcaugcuuuuaauaugcugggugac

SEQ ID NO: 143070 - RNA, 25 nt, Artificial Sequence
  Description of Artificial Sequence: Synthetic oligonucleotide
cccacuccuagacaccaaguuugaa

SEQ ID NO: 143071 - RNA, 25 nt, Artificial Sequence
  Description of Artificial Sequence: Synthetic oligonucleotide
acuagaaacauucaguacagcacua

SEQ ID NO: 143072 - RNA, 25 nt, Artificial Sequence
  Description of Artificial Sequence: Synthetic oligonucleotide
agauauuguuaauuucagaagcuau

SEQ ID NO: 143073 - RNA, 25 nt, Artificial Sequence
  Description of Artificial Sequence: Synthetic oligonucleotide
ugacagccagugaaauuuugggcaa

SEQ ID NO: 143074 - RNA, 25 nt, Artificial Sequence
  Description of Artificial Sequence: Synthetic oligonucleotide
aaaccugagacauagucauuccuga

SEQ ID NO: 143075 - RNA, 25 nt, Artificial Sequence
  Description of Artificial Sequence: Synthetic oligonucleotide
acauucugaucagcuuuuuuugggg

SEQ ID NO: 143076 - RNA, 25 nt, Artificial Sequence
  Description of Artificial Sequence: Synthetic oligonucleotide
guaauuuguuuuucaaacagucuua

SEQ ID NO: 143077 - RNA, 25 nt, Artificial Sequence
  Description of Artificial Sequence: Synthetic oligonucleotide
aacuuguuuacaagauuugcuuuua

SEQ ID NO: 143078 - RNA, 25 nt, Artificial Sequence
  Description of Artificial Sequence: Synthetic oligonucleotide
agcuaugaacggaucguaauuccac

SEQ ID NO: 143079 - RNA, 25 nt, Artificial Sequence
  Description of Artificial Sequence: Synthetic oligonucleotide
cccagaauguaauguuucuuguuug

SEQ ID NO: 143080 - RNA, 25 nt, Artificial Sequence
  Description of Artificial Sequence: Synthetic oligonucleotide
guuuguuuuguuuuguuaggguuuu

SEQ ID NO: 143081 - RNA, 25 nt, Artificial Sequence
  Description of Artificial Sequence: Synthetic oligonucleotide
uuuucucaacuuuaacacacaguuc

SEQ ID NO: 143082 - RNA, 25 nt, Artificial Sequence
  Description of Artificial Sequence: Synthetic oligonucleotide
caacuguuccuaguaaaaguucaag

SEQ ID NO: 143083 - RNA, 25 nt, Artificial Sequence
  Description of Artificial Sequence: Synthetic oligonucleotide
gauggaggaacuagcaugaggcuuu

SEQ ID NO: 143084 - RNA, 25 nt, Artificial Sequence
  Description of Artificial Sequence: Synthetic oligonucleotide
uuuucaguaucucgaaguccaaaug

SEQ ID NO: 143085 - RNA, 25 nt, Artificial Sequence
  Description of Artificial Sequence: Synthetic oligonucleotide
gccaaaggaaccucacacacuguuu

SEQ ID NO: 143086 - RNA, 25 nt, Artificial Sequence
  Description of Artificial Sequence: Synthetic oligonucleotide
uguaauggugcaauauuuuauauca

SEQ ID NO: 143087 - RNA, 25 nt, Artificial Sequence
  Description of Artificial Sequence: Synthetic oligonucleotide
acuuuuuuuuaaacauccccaacau

SEQ ID NO: 143088 - RNA, 25 nt, Artificial Sequence
  Description of Artificial Sequence: Synthetic oligonucleotide
ucuuuguguucucacacacaggcaa

SEQ ID NO: 143089 - RNA, 25 nt, Artificial Sequence
  Description of Artificial Sequence: Synthetic oligonucleotide
auuugcaauguugcaauuguguugg

SEQ ID NO: 143090 - RNA, 25 nt, Artificial Sequence
  Description of Artificial Sequence: Synthetic oligonucleotide
gagaaugaaguccccccaccuccca

SEQ ID NO: 143091 - RNA, 25 nt, Artificial Sequence
  Description of Artificial Sequence: Synthetic oligonucleotide
agccacacacacauccuuuguucuc

SEQ ID NO: 143092 - RNA, 25 nt, Artificial Sequence
  Description of Artificial Sequence: Synthetic oligonucleotide
caugacaguaggucugagcaaaugu

SEQ ID NO: 143093 - RNA, 25 nt, Artificial Sequence
  Description of Artificial Sequence: Synthetic oligonucleotide
uuccaccaagcauuuucagugucuu

SEQ ID NO: 143094 - RNA, 25 nt, Artificial Sequence
  Description of Artificial Sequence: Synthetic oligonucleotide
uugaaaagcacguaacuuuucaaag

SEQ ID NO: 143095 - RNA, 25 nt, Artificial Sequence
  Description of Artificial Sequence: Synthetic oligonucleotide
gguggucuuaauuuguugcauaucu

SEQ ID NO: 143096 - RNA, 25 nt, Artificial Sequence
  Description of Artificial Sequence: Synthetic oligonucleotide
uaucaaggacuuauucacucaccuu

SEQ ID NO: 143097 - RNA, 25 nt, Artificial Sequence
  Description of Artificial Sequence: Synthetic oligonucleotide
uuccuuuucugcccucuaucaauug

SEQ ID NO: 143098 - RNA, 25 nt, Artificial Sequence
  Description of Artificial Sequence: Synthetic oligonucleotide
gauuucuucuuaccuuucaucauuc

SEQ ID NO: 143099 - RNA, 25 nt, Artificial Sequence
  Description of Artificial Sequence: Synthetic oligonucleotide
cauuccuuccuuuagaaaaacugaa

SEQ ID NO: 143100 - RNA, 25 nt, Artificial Sequence
  Description of Artificial Sequence: Synthetic oligonucleotide
agauuacccauaaucuccucuuauu

SEQ ID NO: 143101 - RNA, 25 nt, Artificial Sequence
  Description of Artificial Sequence: Synthetic oligonucleotide
uacuugagggccuugacuauuuagu

SEQ ID NO: 143102 - RNA, 25 nt, Artificial Sequence
  Description of Artificial Sequence: Synthetic oligonucleotide
uuuauuuuguuuacuuuacagguua

SEQ ID NO: 143103 - RNA, 25 nt, Artificial Sequence
  Description of Artificial Sequence: Synthetic oligonucleotide
aacacaguuguuuugucugauugca

SEQ ID NO: 143104 - RNA, 25 nt, Artificial Sequence
  Description of Artificial Sequence: Synthetic oligonucleotide
auuuuauuaacugugaagccguuga

SEQ ID NO: 143105 - RNA, 25 nt, Artificial Sequence
  Description of Artificial Sequence: Synthetic oligonucleotide
aaaugaauaucacuuaagcaacguu

SEQ ID NO: 143106 - RNA, 25 nt, Artificial Sequence
  Description of Artificial Sequence: Synthetic oligonucleotide
ugcuaaauuucuauguguuugaaau

SEQ ID NO: 143107 - RNA, 25 nt, Artificial Sequence
  Description of Artificial Sequence: Synthetic oligonucleotide
uguguuaaugaaggcacugcuuauu

SEQ ID NO: 143108 - RNA, 25 nt, Artificial Sequence
  Description of Artificial Sequence: Synthetic oligonucleotide
uuguagucaccuugaacugacuuaa

SEQ ID NO: 143109 - RNA, 25 nt, Artificial Sequence
  Description of Artificial Sequence: Synthetic oligonucleotide
accuagaagcugugccuucuuguga

SEQ ID NO: 143110 - RNA, 25 nt, Artificial Sequence
  Description of Artificial Sequence: Synthetic oligonucleotide
aaacagccuuuaaacaaguuuccuu

SEQ ID NO: 143111 - RNA, 25 nt, Artificial Sequence
  Description of Artificial Sequence: Synthetic oligonucleotide
uucaggagcauaucaaggaacuucu

SEQ ID NO: 143112 - RNA, 25 nt, Artificial Sequence
  Description of Artificial Sequence: Synthetic oligonucleotide
uagccauaaaacagcaacaagaacu

SEQ ID NO: 143113 - RNA, 25 nt, Artificial Sequence
  Description of Artificial Sequence: Synthetic oligonucleotide
uccuagaaaaggagcagaaacugga

SEQ ID NO: 143114 - RNA, 25 nt, Artificial Sequence
  Description of Artificial Sequence: Synthetic oligonucleotide
agcagcagaggcaagaacaggaagu

SEQ ID NO: 143115 - RNA, 25 nt, Artificial Sequence
  Description of Artificial Sequence: Synthetic oligonucleotide
uagagaggcaucgcagagaacagca

SEQ ID NO: 143116 - RNA, 25 nt, Artificial Sequence
  Description of Artificial Sequence: Synthetic oligonucleotide
agcuuccuccucucagaggcaaaga

SEQ ID NO: 143117 - RNA, 25 nt, Artificial Sequence
  Description of Artificial Sequence: Synthetic oligonucleotide
auagaggacgagaaagggcaguggc

SEQ ID NO: 143118 - RNA, 25 nt, Artificial Sequence
  Description of Artificial Sequence: Synthetic oligonucleotide
caaguacagaaguaaagcagaagcu

SEQ ID NO: 143119 - RNA, 25 nt, Artificial Sequence
  Description of Artificial Sequence: Synthetic oligonucleotide
uucaagaguuccuacugaguaaauc

SEQ ID NO: 143120 - RNA, 25 nt, Artificial Sequence
  Description of Artificial Sequence: Synthetic oligonucleotide
cagcaacgaaagacacuccaacuaa

SEQ ID NO: 143121 - RNA, 25 nt, Artificial Sequence
  Description of Artificial Sequence: Synthetic oligonucleotide
auggaaaaaaucauuccgugagccg

SEQ ID NO: 143122 - RNA, 25 nt, Artificial Sequence
  Description of Artificial Sequence: Synthetic oligonucleotide
gccaucccaagcucugguacacggc

SEQ ID NO: 143123 - RNA, 25 nt, Artificial Sequence
  Description of Artificial Sequence: Synthetic oligonucleotide
cugcccaccacacaucauuggauca

SEQ ID NO: 143124 - RNA, 25 nt, Artificial Sequence
  Description of Artificial Sequence: Synthetic oligonucleotide
aaagcucuccaccccuuaguggaac

SEQ ID NO: 143125 - RNA, 25 nt, Artificial Sequence
  Description of Artificial Sequence: Synthetic oligonucleotide
caucuccauccuacaaguacacauu

SEQ ID NO: 143126 - RNA, 25 nt, Artificial Sequence
  Description of Artificial Sequence: Synthetic oligonucleotide
uaccaggagcacaagaugcaaagga

SEQ ID NO: 143127 - RNA, 25 nt, Artificial Sequence
  Description of Artificial Sequence: Synthetic oligonucleotide
augauuucccccuucgaaaaacugc

SEQ ID NO: 143128 - RNA, 25 nt, Artificial Sequence
  Description of Artificial Sequence: Synthetic oligonucleotide
ccucugagcccaacuugaaggugcg

SEQ ID NO: 143129 - RNA, 25 nt, Artificial Sequence
  Description of Artificial Sequence: Synthetic oligonucleotide
gguccagguuaaaacagaaaguggc

SEQ ID NO: 143130 - RNA, 25 nt, Artificial Sequence
  Description of Artificial Sequence: Synthetic oligonucleotide
cagagaggagaagcagccccuuacu

SEQ ID NO: 143131 - RNA, 25 nt, Artificial Sequence
  Description of Artificial Sequence: Synthetic oligonucleotide
ucaggcggaaggauggaaauguugu

SEQ ID NO: 143132 - RNA, 25 nt, Artificial Sequence
  Description of Artificial Sequence: Synthetic oligonucleotide
ucacuucauucaagaagcgaauguu

SEQ ID NO: 143133 - RNA, 25 nt, Artificial Sequence
  Description of Artificial Sequence: Synthetic oligonucleotide
uugaggugacagaauccucagucag

SEQ ID NO: 143134 - RNA, 25 nt, Artificial Sequence
  Description of Artificial Sequence: Synthetic oligonucleotide
guagcaguucuccaggcucuggucc

SEQ ID NO: 143135 - RNA, 25 nt, Artificial Sequence
  Description of Artificial Sequence: Synthetic oligonucleotide
ccaguucaccaaacaaugggccaac

SEQ ID NO: 143136 - RNA, 25 nt, Artificial Sequence
  Description of Artificial Sequence: Synthetic oligonucleotide
cuggaaguguuacugaaaaugagac

SEQ ID NO: 143137 - RNA, 25 nt, Artificial Sequence
  Description of Artificial Sequence: Synthetic oligonucleotide
cuucgguuuugcccccuaccccuca

SEQ ID NO: 143138 - RNA, 25 nt, Artificial Sequence
  Description of Artificial Sequence: Synthetic oligonucleotide
augccgagcaaaugguuucacagca

SEQ ID NO: 143139 - RNA, 25 nt, Artificial Sequence
  Description of Artificial Sequence: Synthetic oligonucleotide
aacgcauucuaauucaugaagauuc

SEQ ID NO: 143140 - RNA, 25 nt, Artificial Sequence
  Description of Artificial Sequence: Synthetic oligonucleotide
ccaugaaccugcuaagucuuuauac

SEQ ID NO: 143141 - RNA, 25 nt, Artificial Sequence
  Description of Artificial Sequence: Synthetic oligonucleotide
ccucuccuucuuugcccaacauuac

SEQ ID NO: 143142 - RNA, 25 nt, Artificial Sequence
  Description of Artificial Sequence: Synthetic oligonucleotide
ccuuggggcuucccgcagugccauc

SEQ ID NO: 143143 - RNA, 25 nt, Artificial Sequence
  Description of Artificial Sequence: Synthetic oligonucleotide
cccagcucaaugcuucgaauucacu

SEQ ID NO: 143144 - RNA, 25 nt, Artificial Sequence
  Description of Artificial Sequence: Synthetic oligonucleotide
ucaaagaaaagcagaagugugagac

SEQ ID NO: 143145 - RNA, 25 nt, Artificial Sequence
  Description of Artificial Sequence: Synthetic oligonucleotide
cgcagacgcuuaggcaagguguucc

SEQ ID NO: 143146 - RNA, 25 nt, Artificial Sequence
  Description of Artificial Sequence: Synthetic oligonucleotide
cucugccugggcaguauggaggcag

SEQ ID NO: 143147 - RNA, 25 nt, Artificial Sequence
  Description of Artificial Sequence: Synthetic oligonucleotide
gcaucccggcaucuuccagccaccc

SEQ ID NO: 143148 - RNA, 25 nt, Artificial Sequence
  Description of Artificial Sequence: Synthetic oligonucleotide
cucauguuacuuuagagggaaagcc

SEQ ID NO: 143149 - RNA, 25 nt, Artificial Sequence
  Description of Artificial Sequence: Synthetic oligonucleotide
cacccaacagcagccaccaggcucu

SEQ ID NO: 143150 - RNA, 25 nt, Artificial Sequence
  Description of Artificial Sequence: Synthetic oligonucleotide
uccugcagcauuuauuauugaaaga

SEQ ID NO: 143151 - RNA, 25 nt, Artificial Sequence
  Description of Artificial Sequence: Synthetic oligonucleotide
aacaaaugcgacagcaaaagcuucu

SEQ ID NO: 143152 - RNA, 25 nt, Artificial Sequence
  Description of Artificial Sequence: Synthetic oligonucleotide
uuguagcugguggaguucccuuaca

SEQ ID NO: 143153 - RNA, 25 nt, Artificial Sequence
  Description of Artificial Sequence: Synthetic oligonucleotide
auccucagucucccuuggcaacaaa

SEQ ID NO: 143154 - RNA, 25 nt, Artificial Sequence
  Description of Artificial Sequence: Synthetic oligonucleotide
aagagagaauuucaccuggcauuag

SEQ ID NO: 143155 - RNA, 25 nt, Artificial Sequence
  Description of Artificial Sequence: Synthetic oligonucleotide
gagguacccacaaauugccccguca

SEQ ID NO: 143156 - RNA, 25 nt, Artificial Sequence
  Description of Artificial Sequence: Synthetic oligonucleotide
acagaccccugaaccgaacccaguc

SEQ ID NO: 143157 - RNA, 25 nt, Artificial Sequence
  Description of Artificial Sequence: Synthetic oligonucleotide
cugcaccuuugccucagagcacguu

SEQ ID NO: 143158 - RNA, 25 nt, Artificial Sequence
  Description of Artificial Sequence: Synthetic oligonucleotide
uggcucagcuggucauucaacagca

SEQ ID NO: 143159 - RNA, 25 nt, Artificial Sequence
  Description of Artificial Sequence: Synthetic oligonucleotide
aacaccagcaauucuuggagaagca

SEQ ID NO: 143160 - RNA, 25 nt, Artificial Sequence
  Description of Artificial Sequence: Synthetic oligonucleotide
agaagcaauaccagcagcagaucca

SEQ ID NO: 143161 - RNA, 25 nt, Artificial Sequence
  Description of Artificial Sequence: Synthetic oligonucleotide
acaugaacaaacugcuuucgaaauc

SEQ ID NO: 143162 - RNA, 25 nt, Artificial Sequence
  Description of Artificial Sequence: Synthetic oligonucleotide
cuauugaacaacugaagcaaccagg

SEQ ID NO: 143163 - RNA, 25 nt, Artificial Sequence
  Description of Artificial Sequence: Synthetic oligonucleotide
gcagucaccuugaggaagcagagga

SEQ ID NO: 143164 - RNA, 25 nt, Artificial Sequence
  Description of Artificial Sequence: Synthetic oligonucleotide
aagagcuucagggggaccaggcgau

SEQ ID NO: 143165 - RNA, 25 nt, Artificial Sequence
  Description of Artificial Sequence: Synthetic oligonucleotide
ugcaggaagacagagcgcccucuag

SEQ ID NO: 143166 - RNA, 25 nt, Artificial Sequence
  Description of Artificial Sequence: Synthetic oligonucleotide
guggcaacagcacuaggagcgacag

SEQ ID NO: 143167 - RNA, 25 nt, Artificial Sequence
  Description of Artificial Sequence: Synthetic oligonucleotide
gcagugcuuguguggaugacacacu

SEQ ID NO: 143168 - RNA, 25 nt, Artificial Sequence
  Description of Artificial Sequence: Synthetic oligonucleotide
ugggacaaguuggggcugugaaggu

SEQ ID NO: 143169 - RNA, 25 nt, Artificial Sequence
  Description of Artificial Sequence: Synthetic oligonucleotide
ucaaggaggaaccaguggacaguga

SEQ ID NO: 143170 - RNA, 25 nt, Artificial Sequence
  Description of Artificial Sequence: Synthetic oligonucleotide
augaagaugcucagauccaggaaau

SEQ ID NO: 143171 - RNA, 25 nt, Artificial Sequence
  Description of Artificial Sequence: Synthetic oligonucleotide
uggaaucuggggagcaggcugcuuu

SEQ ID NO: 143172 - RNA, 25 nt, Artificial Sequence
  Description of Artificial Sequence: Synthetic oligonucleotide
uuaugcaacagccuuuccuggaacc

SEQ ID NO: 143173 - RNA, 25 nt, Artificial Sequence
  Description of Artificial Sequence: Synthetic oligonucleotide
ccacgcacacacgugcgcucucugu

SEQ ID NO: 143174 - RNA, 25 nt, Artificial Sequence
  Description of Artificial Sequence: Synthetic oligonucleotide
ugcgccaagcuccgcuggcugcggu

SEQ ID NO: 143175 - RNA, 25 nt, Artificial Sequence
  Description of Artificial Sequence: Synthetic oligonucleotide
uuggcauggauggauuagagaaaca

SEQ ID NO: 143176 - RNA, 25 nt, Artificial Sequence
  Description of Artificial Sequence: Synthetic oligonucleotide
accgucucgucuccaggacucacuc

SEQ ID NO: 143177 - RNA, 25 nt, Artificial Sequence
  Description of Artificial Sequence: Synthetic oligonucleotide
cuuccccugcugccucuguuuuacc

SEQ ID NO: 143178 - RNA, 25 nt, Artificial Sequence
  Description of Artificial Sequence: Synthetic oligonucleotide
cucacccagcaauggaccgcccccu

SEQ ID NO: 143179 - RNA, 25 nt, Artificial Sequence
  Description of Artificial Sequence: Synthetic oligonucleotide
uccagccuggcucugcaacuggaau

SEQ ID NO: 143180 - RNA, 25 nt, Artificial Sequence
  Description of Artificial Sequence: Synthetic oligonucleotide
uugccuaugaccccuugaugcugaa

SEQ ID NO: 143181 - RNA, 25 nt, Artificial Sequence
  Description of Artificial Sequence: Synthetic oligonucleotide
aacaccagugcguuuguggcaauuc

SEQ ID NO: 143182 - RNA, 25 nt, Artificial Sequence
  Description of Artificial Sequence: Synthetic oligonucleotide
ccaccacccacccugagcaugcugg

SEQ ID NO: 143183 - RNA, 25 nt, Artificial Sequence
  Description of Artificial Sequence: Synthetic oligonucleotide
gacgaauacagaguaucuggucacg

SEQ ID NO: 143184 - RNA, 25 nt, Artificial Sequence
  Description of Artificial Sequence: Synthetic oligonucleotide
gacugcaagaaacugggcugcuaaa

SEQ ID NO: 143185 - RNA, 25 nt, Artificial Sequence
  Description of Artificial Sequence: Synthetic oligonucleotide
auaaaugugagcgaauucaaggucg

SEQ ID NO: 143186 - RNA, 25 nt, Artificial Sequence
  Description of Artificial Sequence: Synthetic oligonucleotide
gaaaagccagccuggaggaaauaca

SEQ ID NO: 143187 - RNA, 25 nt, Artificial Sequence
  Description of Artificial Sequence: Synthetic oligonucleotide
agcuuguucauucugaacaucacuc

SEQ ID NO: 143188 - RNA, 25 nt, Artificial Sequence
  Description of Artificial Sequence: Synthetic oligonucleotide
cacuguuguauggcaccaacccccu

SEQ ID NO: 143189 - RNA, 25 nt, Artificial Sequence
  Description of Artificial Sequence: Synthetic oligonucleotide
uggacggacagaagcuggaccccag

SEQ ID NO: 143190 - RNA, 25 nt, Artificial Sequence
  Description of Artificial Sequence: Synthetic oligonucleotide
ggauacuccuaggugaugacucuca

SEQ ID NO: 143191 - RNA, 25 nt, Artificial Sequence
  Description of Artificial Sequence: Synthetic oligonucleotide
aaaaguuuuuuuccucauuaccuug

SEQ ID NO: 143192 - RNA, 25 nt, Artificial Sequence
  Description of Artificial Sequence: Synthetic oligonucleotide
gugguggacuugggguggacaguga

SEQ ID NO: 143193 - RNA, 25 nt, Artificial Sequence
  Description of Artificial Sequence: Synthetic oligonucleotide
acaccauuuggaaugagcuacacuc

SEQ ID NO: 143194 - RNA, 25 nt, Artificial Sequence
  Description of Artificial Sequence: Synthetic oligonucleotide
cguccggugcugcacgcauggcugu

SEQ ID NO: 143195 - RNA, 25 nt, Artificial Sequence
  Description of Artificial Sequence: Synthetic oligonucleotide
uuggcugugucaucgagcuggcuuc

SEQ ID NO: 143196 - RNA, 25 nt, Artificial Sequence
  Description of Artificial Sequence: Synthetic oligonucleotide
ccaaaguggccucaggagagcugaa

SEQ ID NO: 143197 - RNA, 25 nt, Artificial Sequence
  Description of Artificial Sequence: Synthetic oligonucleotide
agaauggguuugcuguugugaggcc

SEQ ID NO: 143198 - RNA, 25 nt, Artificial Sequence
  Description of Artificial Sequence: Synthetic oligonucleotide
ccccuggccaucacgcugaagaauc

SEQ ID NO: 143199 - RNA, 25 nt, Artificial Sequence
  Description of Artificial Sequence: Synthetic oligonucleotide
ccacagccaugggguucugcuuuuu

SEQ ID NO: 143200 - RNA, 25 nt, Artificial Sequence
  Description of Artificial Sequence: Synthetic oligonucleotide
uuaauucaguugcaauuaccgccaa

SEQ ID NO: 143201 - RNA, 25 nt, Artificial Sequence
  Description of Artificial Sequence: Synthetic oligonucleotide
aauacuugagagaccaacuaaauau

SEQ ID NO: 143202 - RNA, 25 nt, Artificial Sequence
  Description of Artificial Sequence: Synthetic oligonucleotide
uaagcaagauauugauuguagaucu

SEQ ID NO: 143203 - RNA, 25 nt, Artificial Sequence
  Description of Artificial Sequence: Synthetic oligonucleotide
uggauguucaccauggaaacgguac

SEQ ID NO: 143204 - RNA, 25 nt, Artificial Sequence
  Description of Artificial Sequence: Synthetic oligonucleotide
cccagcaggccuuuuaugcugaccc

SEQ ID NO: 143205 - RNA, 25 nt, Artificial Sequence
  Description of Artificial Sequence: Synthetic oligonucleotide
ccagcauccuguacauuucacucca

SEQ ID NO: 143206 - RNA, 25 nt, Artificial Sequence
  Description of Artificial Sequence: Synthetic oligonucleotide
aucgcuaugaugaagggaacuuuuu

SEQ ID NO: 143207 - RNA, 25 nt, Artificial Sequence
  Description of Artificial Sequence: Synthetic oligonucleotide
ucccuggcaguggagccccaaauga

SEQ ID NO: 143208 - RNA, 25 nt, Artificial Sequence
  Description of Artificial Sequence: Synthetic oligonucleotide
agguucgguuuauuucuuuagagcc

SEQ ID NO: 143209 - RNA, 25 nt, Artificial Sequence
  Description of Artificial Sequence: Synthetic oligonucleotide
cccacuuuuauuuguaucuuucagg

SEQ ID NO: 143210 - RNA, 25 nt, Artificial Sequence
  Description of Artificial Sequence: Synthetic oligonucleotide
ucuuucagguaauugcauugcauga

SEQ ID NO: 143211 - RNA, 25 nt, Artificial Sequence
  Description of Artificial Sequence: Synthetic oligonucleotide
agguuggaacaggccuuggagaagg

SEQ ID NO: 143212 - RNA, 25 nt, Artificial Sequence
  Description of Artificial Sequence: Synthetic oligonucleotide
gguacaauauaaauauugccuggac

SEQ ID NO: 143213 - RNA, 25 nt, Artificial Sequence
  Description of Artificial Sequence: Synthetic oligonucleotide
cagguggccuugauccucccauggg

SEQ ID NO: 143214 - RNA, 25 nt, Artificial Sequence
  Description of Artificial Sequence: Synthetic oligonucleotide
gagauguugaguaccuugaagcauu

SEQ ID NO: 143215 - RNA, 25 nt, Artificial Sequence
  Description of Artificial Sequence: Synthetic oligonucleotide
ucaggaccaucgugaagccuguggc

SEQ ID NO: 143216 - RNA, 25 nt, Artificial Sequence
  Description of Artificial Sequence: Synthetic oligonucleotide
ccaaagaguuugauccagacauggu

SEQ ID NO: 143217 - RNA, 25 nt, Artificial Sequence
  Description of Artificial Sequence: Synthetic oligonucleotide
ucuuaguaucugcuggauuugaugc

SEQ ID NO: 143218 - RNA, 25 nt, Artificial Sequence
  Description of Artificial Sequence: Synthetic oligonucleotide
cauuggaaggccacaccccuccucu

SEQ ID NO: 143219 - RNA, 25 nt, Artificial Sequence
  Description of Artificial Sequence: Synthetic oligonucleotide
uaggaggguacaaagugacggcaaa

SEQ ID NO: 143220 - RNA, 25 nt, Artificial Sequence
  Description of Artificial Sequence: Synthetic oligonucleotide
aauguuuuggucauuugacgaagca

SEQ ID NO: 143221 - RNA, 25 nt, Artificial Sequence
  Description of Artificial Sequence: Synthetic oligonucleotide
aauugaugacauuggcugauggacg

SEQ ID NO: 143222 - RNA, 25 nt, Artificial Sequence
  Description of Artificial Sequence: Synthetic oligonucleotide
gugugguguuggcucuagaaggagg

SEQ ID NO: 143223 - RNA, 25 nt, Artificial Sequence
  Description of Artificial Sequence: Synthetic oligonucleotide
gacaugaucucacagccaucuguga

SEQ ID NO: 143224 - RNA, 25 nt, Artificial Sequence
  Description of Artificial Sequence: Synthetic oligonucleotide
augcaucagaagccuguguaaaugc

SEQ ID NO: 143225 - RNA, 25 nt, Artificial Sequence
  Description of Artificial Sequence: Synthetic oligonucleotide
cccuucuaggaaaugagcuggagcc

SEQ ID NO: 143226 - RNA, 25 nt, Artificial Sequence
  Description of Artificial Sequence: Synthetic oligonucleotide
cacuugcagaagauauucuccacca

SEQ ID NO: 143227 - RNA, 25 nt, Artificial Sequence
  Description of Artificial Sequence: Synthetic oligonucleotide
aaagcccgaauaugaaugcuguuau

SEQ ID NO: 143228 - RNA, 25 nt, Artificial Sequence
  Description of Artificial Sequence: Synthetic oligonucleotide
uuucuuuacagaagaucauugaaau

SEQ ID NO: 143229 - RNA, 25 nt, Artificial Sequence
  Description of Artificial Sequence: Synthetic oligonucleotide
uucaaaguaugucuuuaaaguucuc

SEQ ID NO: 143230 - RNA, 25 nt, Artificial Sequence
  Description of Artificial Sequence: Synthetic oligonucleotide
cuuaaaaauucuaagcagguaaaac

SEQ ID NO: 143231 - RNA, 25 nt, Artificial Sequence
  Description of Artificial Sequence: Synthetic oligonucleotide
cuaacuaaaauuauauugaaaauua

SEQ ID NO: 143232 - RNA, 25 nt, Artificial Sequence
  Description of Artificial Sequence: Synthetic oligonucleotide
auaguacaaagaaacauuuaaaaaa

SEQ ID NO: 143233 - RNA, 2702 nt, Homo sapiens
ggcucggggcgccgaggcuuccgcgcccgcugguuccucgcuccggggcggagcucgcgauagcgaccgggagcagggcgcggggcgggacccagguccgaggcgaggaagccggaagccaggcgcggggagccucccccuucgacugcagccucgcuccgugccuucugcgcgccugggaucccggagccugccuagguucugugcgcucccgcccaggccggugcccgccgcccgccugcgccccaggcaggucccaggccuccggcugcucccggccgaagguggggacaggcaguggcaggcaccacuagcgagggcguuugggaacccagggugaccacggcgcagccauggggaccgcgcuuguguaccaugaggacaugacggccacccggcugcucugggacgaccccgagugcgagaucgagcguccugagcgccugaccgcagcccuggaucgccugcggcagcgcggccuggaacagaggugucugcgguugucagcccgcgaggccucggaagaggagcugggccuggugcacagcccagaguauguaucccuggucagggagacccagguccuaggcaaggaggagcugcaggcgcuguccggacaguucgacgccaucuacuuccacccgaguaccuuucacugcgcgcggcuggccgcaggggcuggacugcagcugguggacgcugugcucacuggagcugugcaaaaugggcuugcccuggugaggccucccgggcaccauggccagagggcggcugccaacggguucuguguguucaacaacguggccauagcagcugcacaugccaagcagaaacacgggcuacacaggauccucgucguggacugggaugugcaccauggccaggggauccaguaucucuuugaggaugaccccagcguccuuuacuucuccuggcaccgcuaugagcaugggcgcuucuggccuuuccugcgagagucagaugcagacgcaguggggcggggacagggccucggcuucacugucaaccugcccuggaaccagguugggaugggaaacgcugacuacguggcugccuuccugcaccugcugcucccacuggccuuugaguuugacccugagcuggugcuggucucggcaggauuugacucagccaucggggacccugaggggcaaaugcaggccacgccagagugcuucgcccaccucacacagcugcugcaggugcuggccggcggccgggucugugccgugcuggagggcggcuaccaccuggagucacuggcggagucagugugcaugacaguacagacgcugcugggugacccggccccaccccugucagggccaauggcgccaugucagagugcccuagaguccauccagagugcccgugcugcccaggccccgcacuggaagagccuccagcagcaagaugugaccgcugugccgaugagccccagcagccacuccccagaggggaggccuccaccucugcugccuggggguccaguguguaaggcagcugcaucugcaccgagcucccuccuggaccagccgugccucugccccgcacccucuguccgcaccgcuguugcccugacaacgccggauaucacauugguucugcccccugacgucauccaacaggaagcgucagcccugagggaggagacagaagccugggccaggccacacgagucccuggcccgggaggaggcccucacugcacuugggaagcuccuguaccucuuagaugggaugcuggaugggcaggugaacagugguauagcagccacuccagccucugcugcagcagccacccuggauguggcuguucggagaggccugucccacggagcccagaggcugcugugcguggcccugggacagcuggaccggccuccagaccucgcccaugacgggaggagucuguggcugaacaucaggggcaaggaggcggcugcccuauccauguuccaugucuccacgccacugccagugaugaccggugguuuccugagcugcaucuugggcuuggugcugccccuggccuauggcuuccagccugaccuggugcugguggcgcuggggccuggccauggccugcagggcccccacgcugcacuccuggcugcaaugcuucgggggcuggcagggggccgaguccuggcccuccuggaggagaacuccacaccccagcuagcagggauccuggcccgggugcugaauggagaggcaccuccuagccuaggcccuuccucuguggccuccccagaggacguccaggcccugauguaccugagagggcagcuggagccucaguggaagauguugcagugccauccucaccugguggcuugaaaucggccaaggugggagcauuuacaccgcagaaaugacaccgcacgccagcgccccgcggccgcgauccggaccccaagcccacggcucccucgacucuggggcacggaaccccgcccacucccaauccccgcgccccgcccucucccacccgugcuucccccgcuccaccccucaccucaccucgcccccgccccacccaucgcgccccggcccgucccaucgaggcccaugcaacccacgcucggucccguuccggccccugcgccccgcugcgcuucgcuccccgcccuugcgccguuaguaaacaucgcucaaacgaaaaaaaaaaaaaaaaaa

SEQ ID NO: 143234 - RNA, 19 nt, Artificial Sequence
  Description of Artificial Sequence: Synthetic oligonucleotide
ggcucggggcgccgaggcu

SEQ ID NO: 143235 - RNA, 19 nt, Artificial Sequence
  Description of Artificial Sequence: Synthetic oligonucleotide
uuccgcgcccgcugguucc

SEQ ID NO: 143236 - RNA, 19 nt, Artificial Sequence
  Description of Artificial Sequence: Synthetic oligonucleotide
cucgcuccggggcggagcu

SEQ ID NO: 143237 - RNA, 19 nt, Artificial Sequence
  Description of Artificial Sequence: Synthetic oligonucleotide
ucgcgauagcgaccgggag

SEQ ID NO: 143238 - RNA, 19 nt, Artificial Sequence
  Description of Artificial Sequence: Synthetic oligonucleotide
gcagggcgcggggcgggac

SEQ ID NO: 143239 - RNA, 19 nt, Artificial Sequence
  Description of Artificial Sequence: Synthetic oligonucleotide
cccagguccgaggcgagga

SEQ ID NO: 143240 - RNA, 19 nt, Artificial Sequence
  Description of Artificial Sequence: Synthetic oligonucleotide
aagccggaagccaggcgcg

SEQ ID NO: 143241 - RNA, 19 nt, Artificial Sequence
  Description of Artificial Sequence: Synthetic oligonucleotide
ggggagccucccccuucga

SEQ ID NO: 143242 - RNA, 19 nt, Artificial Sequence
  Description of Artificial Sequence: Synthetic oligonucleotide
acugcagccucgcuccgug

SEQ ID NO: 143243 - RNA, 19 nt, Artificial Sequence
  Description of Artificial Sequence: Synthetic oligonucleotide
gccuucugcgcgccuggga

SEQ ID NO: 143244 - RNA, 19 nt, Artificial Sequence
  Description of Artificial Sequence: Synthetic oligonucleotide
aucccggagccugccuagg

SEQ ID NO: 143245 - RNA, 19 nt, Artificial Sequence
  Description of Artificial Sequence: Synthetic oligonucleotide
guucugugcgcucccgccc

SEQ ID NO: 143246 - RNA, 19 nt, Artificial Sequence
  Description of Artificial Sequence: Synthetic oligonucleotide
caggccggugcccgccgcc

SEQ ID NO: 143247 - RNA, 19 nt, Artificial Sequence
  Description of Artificial Sequence: Synthetic oligonucleotide
ccgccugcgccccaggcag

SEQ ID NO: 143248 - RNA, 19 nt, Artificial Sequence
  Description of Artificial Sequence: Synthetic oligonucleotide
ggucccaggccuccggcug

SEQ ID NO: 143249 - RNA, 19 nt, Artificial Sequence
  Description of Artificial Sequence: Synthetic oligonucleotide
gcucccggccgaagguggg

SEQ ID NO: 143250 - RNA, 19 nt, Artificial Sequence
  Description of Artificial Sequence: Synthetic oligonucleotide
ggacaggcaguggcaggca

SEQ ID NO: 143251 - RNA, 19 nt, Artificial Sequence
  Description of Artificial Sequence: Synthetic oligonucleotide
accacuagcgagggcguuu

SEQ ID NO: 143252 - RNA, 19 nt, Artificial Sequence
  Description of Artificial Sequence: Synthetic oligonucleotide
ugggaacccagggugacca

SEQ ID NO: 143253 - RNA, 19 nt, Artificial Sequence
  Description of Artificial Sequence: Synthetic oligonucleotide
acggcgcagccauggggac

SEQ ID NO: 143254 - RNA, 19 nt, Artificial Sequence
  Description of Artificial Sequence: Synthetic oligonucleotide
ccgcgcuuguguaccauga

SEQ ID NO: 143255 - RNA, 19 nt, Artificial Sequence
  Description of Artificial Sequence: Synthetic oligonucleotide
aggacaugacggccacccg

SEQ ID NO: 143256 - RNA, 19 nt, Artificial Sequence
  Description of Artificial Sequence: Synthetic oligonucleotide
ggcugcucugggacgaccc

SEQ ID NO: 143257 - RNA, 19 nt, Artificial Sequence
  Description of Artificial Sequence: Synthetic oligonucleotide
ccgagugcgagaucgagcg

SEQ ID NO: 143258 - RNA, 19 nt, Artificial Sequence
  Description of Artificial Sequence: Synthetic oligonucleotide
guccugagcgccugaccgc

SEQ ID NO: 143259 - RNA, 19 nt, Artificial Sequence
  Description of Artificial Sequence: Synthetic oligonucleotide
cagcccuggaucgccugcg

SEQ ID NO: 143260 - RNA, 19 nt, Artificial Sequence
  Description of Artificial Sequence: Synthetic oligonucleotide
ggcagcgcggccuggaaca

SEQ ID NO: 143261 - RNA, 19 nt, Artificial Sequence
  Description of Artificial Sequence: Synthetic oligonucleotide
agaggugucugcgguuguc

SEQ ID NO: 143262 - RNA, 19 nt, Artificial Sequence
  Description of Artificial Sequence: Synthetic oligonucleotide
cagcccgcgaggccucgga

SEQ ID NO: 143263 - RNA, 19 nt, Artificial Sequence
  Description of Artificial Sequence: Synthetic oligonucleotide
aagaggagcugggccuggu

SEQ ID NO: 143264 - RNA, 19 nt, Artificial Sequence
  Description of Artificial Sequence: Synthetic oligonucleotide
ugcacagcccagaguaugu

SEQ ID NO: 143265 - RNA, 19 nt, Artificial Sequence
  Description of Artificial Sequence: Synthetic oligonucleotide
uaucccuggucagggagac

SEQ ID NO: 143266 - RNA, 19 nt, Artificial Sequence
  Description of Artificial Sequence: Synthetic oligonucleotide
cccagguccuaggcaagga

SEQ ID NO: 143267 - RNA, 19 nt, Artificial Sequence
  Description of Artificial Sequence: Synthetic oligonucleotide
aggagcugcaggcgcuguc

SEQ ID NO: 143268 - RNA, 19 nt, Artificial Sequence
  Description of Artificial Sequence: Synthetic oligonucleotide
ccggacaguucgacgccau

SEQ ID NO: 143269 - RNA, 19 nt, Artificial Sequence
  Description of Artificial Sequence: Synthetic oligonucleotide
ucuacuuccacccgaguac

SEQ ID NO: 143270 - RNA, 19 nt, Artificial Sequence
  Description of Artificial Sequence: Synthetic oligonucleotide
ccuuucacugcgcgcggcu

SEQ ID NO: 143271 - RNA, 19 nt, Artificial Sequence
  Description of Artificial Sequence: Synthetic oligonucleotide
uggccgcaggggcuggacu

SEQ ID NO: 143272 - RNA, 19 nt, Artificial Sequence
  Description of Artificial Sequence: Synthetic oligonucleotide
ugcagcugguggacgcugu

SEQ ID NO: 143273 - RNA, 19 nt, Artificial Sequence
  Description of Artificial Sequence: Synthetic oligonucleotide
ugcucacuggagcugugca

SEQ ID NO: 143274 - RNA, 19 nt, Artificial Sequence
  Description of Artificial Sequence: Synthetic oligonucleotide
aaaaugggcuugcccuggu

SEQ ID NO: 143275 - RNA, 19 nt, Artificial Sequence
  Description of Artificial Sequence: Synthetic oligonucleotide
ugaggccucccgggcacca

SEQ ID NO: 143276 - RNA, 19 nt, Artificial Sequence
  Description of Artificial Sequence: Synthetic oligonucleotide
auggccagagggcggcugc

SEQ ID NO: 143277 - RNA, 19 nt, Artificial Sequence
  Description of Artificial Sequence: Synthetic oligonucleotide
ccaacggguucuguguguu

SEQ ID NO: 143278 - RNA, 19 nt, Artificial Sequence
  Description of Artificial Sequence: Synthetic oligonucleotide
ucaacaacguggccauagc

SEQ ID NO: 143279 - RNA, 19 nt, Artificial Sequence
  Description of Artificial Sequence: Synthetic oligonucleotide
cagcugcacaugccaagca

SEQ ID NO: 143280 - RNA, 19 nt, Artificial Sequence
  Description of Artificial Sequence: Synthetic oligonucleotide
agaaacacgggcuacacag

SEQ ID NO: 143281 - RNA, 19 nt, Artificial Sequence
  Description of Artificial Sequence: Synthetic oligonucleotide
ggauccucgucguggacug

SEQ ID NO: 143282 - RNA, 19 nt, Artificial Sequence
  Description of Artificial Sequence: Synthetic oligonucleotide
gggaugugcaccauggcca

SEQ ID NO: 143283 - RNA, 19 nt, Artificial Sequence
  Description of Artificial Sequence: Synthetic oligonucleotide
aggggauccaguaucucuu

SEQ ID NO: 143284 - RNA, 19 nt, Artificial Sequence
  Description of Artificial Sequence: Synthetic oligonucleotide
uugaggaugaccccagcgu

SEQ ID NO: 143285 - RNA, 19 nt, Artificial Sequence
  Description of Artificial Sequence: Synthetic oligonucleotide
uccuuuacuucuccuggca

SEQ ID NO: 143286 - RNA, 19 nt, Artificial Sequence
  Description of Artificial Sequence: Synthetic oligonucleotide
accgcuaugagcaugggcg

SEQ ID NO: 143287 - RNA, 19 nt, Artificial Sequence
  Description of Artificial Sequence: Synthetic oligonucleotide
gcuucuggccuuuccugcg

SEQ ID NO: 143288 - RNA, 19 nt, Artificial Sequence
  Description of Artificial Sequence: Synthetic oligonucleotide
gagagucagaugcagacgc

SEQ ID NO: 143289 - RNA, 19 nt, Artificial Sequence
  Description of Artificial Sequence: Synthetic oligonucleotide
caguggggcggggacaggg

SEQ ID NO: 143290 - RNA, 19 nt, Artificial Sequence
  Description of Artificial Sequence: Synthetic oligonucleotide
gccucggcuucacugucaa

SEQ ID NO: 143291 - RNA, 19 nt, Artificial Sequence
  Description of Artificial Sequence: Synthetic oligonucleotide
accugcccuggaaccaggu

SEQ ID NO: 143292 - RNA, 19 nt, Artificial Sequence
  Description of Artificial Sequence: Synthetic oligonucleotide
uugggaugggaaacgcuga

SEQ ID NO: 143293 - RNA, 19 nt, Artificial Sequence
  Description of Artificial Sequence: Synthetic oligonucleotide
acuacguggcugccuuccu

SEQ ID NO: 143294 - RNA, 19 nt, Artificial Sequence
  Description of Artificial Sequence: Synthetic oligonucleotide
ugcaccugcugcucccacu

SEQ ID NO: 143295 - RNA, 19 nt, Artificial Sequence
  Description of Artificial Sequence: Synthetic oligonucleotide
uggccuuugaguuugaccc

SEQ ID NO: 143296 - RNA, 19 nt, Artificial Sequence
  Description of Artificial Sequence: Synthetic oligonucleotide
cugagcuggugcuggucuc

SEQ ID NO: 143297 - RNA, 19 nt, Artificial Sequence
  Description of Artificial Sequence: Synthetic oligonucleotide
cggcaggauuugacucagc

SEQ ID NO: 143298 - RNA, 19 nt, Artificial Sequence
  Description of Artificial Sequence: Synthetic oligonucleotide
ccaucggggacccugaggg

SEQ ID NO: 143299 - RNA, 19 nt, Artificial Sequence
  Description of Artificial Sequence: Synthetic oligonucleotide
ggcaaaugcaggccacgcc

SEQ ID NO: 143300 - RNA, 19 nt, Artificial Sequence
  Description of Artificial Sequence: Synthetic oligonucleotide
cagagugcuucgcccaccu

SEQ ID NO: 143301 - RNA, 19 nt, Artificial Sequence
  Description of Artificial Sequence: Synthetic oligonucleotide
ucacacagcugcugcaggu

SEQ ID NO: 143302 - RNA, 19 nt, Artificial Sequence
  Description of Artificial Sequence: Synthetic oligonucleotide
ugcuggccggcggccgggu

SEQ ID NO: 143303 - RNA, 19 nt, Artificial Sequence
  Description of Artificial Sequence: Synthetic oligonucleotide
ucugugccgugcuggaggg

SEQ ID NO: 143304 - RNA, 19 nt, Artificial Sequence
  Description of Artificial Sequence: Synthetic oligonucleotide
gcggcuaccaccuggaguc

SEQ ID NO: 143305 - RNA, 19 nt, Artificial Sequence
  Description of Artificial Sequence: Synthetic oligonucleotide
cacuggcggagucagugug

SEQ ID NO: 143306 - RNA, 19 nt, Artificial Sequence
  Description of Artificial Sequence: Synthetic oligonucleotide
gcaugacaguacagacgcu

SEQ ID NO: 143307 - RNA, 19 nt, Artificial Sequence
  Description of Artificial Sequence: Synthetic oligonucleotide
ugcugggugacccggcccc

SEQ ID NO: 143308 - RNA, 19 nt, Artificial Sequence
  Description of Artificial Sequence: Synthetic oligonucleotide
caccccugucagggccaau

SEQ ID NO: 143309 - RNA, 19 nt, Artificial Sequence
  Description of Artificial Sequence: Synthetic oligonucleotide
uggcgccaugucagagugc

SEQ ID NO: 143310 - RNA, 19 nt, Artificial Sequence
  Description of Artificial Sequence: Synthetic oligonucleotide
cccuagaguccauccagag

SEQ ID NO: 143311 - RNA, 19 nt, Artificial Sequence
  Description of Artificial Sequence: Synthetic oligonucleotide
gugcccgugcugcccaggc

SEQ ID NO: 143312 - RNA, 19 nt, Artificial Sequence
  Description of Artificial Sequence: Synthetic oligonucleotide
ccccgcacuggaagagccu

SEQ ID NO: 143313 - RNA, 19 nt, Artificial Sequence
  Description of Artificial Sequence: Synthetic oligonucleotide
uccagcagcaagaugugac

SEQ ID NO: 143314 - RNA, 19 nt, Artificial Sequence
  Description of Artificial Sequence: Synthetic oligonucleotide
ccgcugugccgaugagccc

SEQ ID NO: 143315 - RNA, 19 nt, Artificial Sequence
  Description of Artificial Sequence: Synthetic oligonucleotide
ccagcagccacuccccaga

SEQ ID NO: 143316 - RNA, 19 nt, Artificial Sequence
  Description of Artificial Sequence: Synthetic oligonucleotide
aggggaggccuccaccucu

SEQ ID NO: 143317 - RNA, 19 nt, Artificial Sequence
  Description of Artificial Sequence: Synthetic oligonucleotide
ugcugccuggggguccagu

SEQ ID NO: 143318 - RNA, 19 nt, Artificial Sequence
  Description of Artificial Sequence: Synthetic oligonucleotide
uguguaaggcagcugcauc

SEQ ID NO: 143319 - RNA, 19 nt, Artificial Sequence
  Description of Artificial Sequence: Synthetic oligonucleotide
cugcaccgagcucccuccu

SEQ ID NO: 143320 - RNA, 19 nt, Artificial Sequence
  Description of Artificial Sequence: Synthetic oligonucleotide
uggaccagccgugccucug

SEQ ID NO: 143321 - RNA, 19 nt, Artificial Sequence
  Description of Artificial Sequence: Synthetic oligonucleotide
gccccgcacccucuguccg

SEQ ID NO: 143322 - RNA, 19 nt, Artificial Sequence
  Description of Artificial Sequence: Synthetic oligonucleotide
gcaccgcuguugcccugac

SEQ ID NO: 143323 - RNA, 19 nt, Artificial Sequence
  Description of Artificial Sequence: Synthetic oligonucleotide
caacgccggauaucacauu

SEQ ID NO: 143324 - RNA, 19 nt, Artificial Sequence
  Description of Artificial Sequence: Synthetic oligonucleotide
ugguucugcccccugacgu

SEQ ID NO: 143325 - RNA, 19 nt, Artificial Sequence
  Description of Artificial Sequence: Synthetic oligonucleotide
ucauccaacaggaagcguc

SEQ ID NO: 143326 - RNA, 19 nt, Artificial Sequence
  Description of Artificial Sequence: Synthetic oligonucleotide
cagcccugagggaggagac

SEQ ID NO: 143327 - RNA, 19 nt, Artificial Sequence
  Description of Artificial Sequence: Synthetic oligonucleotide
cagaagccugggccaggcc

SEQ ID NO: 143328 - RNA, 19 nt, Artificial Sequence
  Description of Artificial Sequence: Synthetic oligonucleotide
cacacgagucccuggcccg

SEQ ID NO: 143329 - RNA, 19 nt, Artificial Sequence
  Description of Artificial Sequence: Synthetic oligonucleotide
gggaggaggcccucacugc

SEQ ID NO: 143330 - RNA, 19 nt, Artificial Sequence
  Description of Artificial Sequence: Synthetic oligonucleotide
cacuugggaagcuccugua

SEQ ID NO: 143331 - RNA, 19 nt, Artificial Sequence
  Description of Artificial Sequence: Synthetic oligonucleotide
accucuuagaugggaugcu

SEQ ID NO: 143332 - RNA, 19 nt, Artificial Sequence
  Description of Artificial Sequence: Synthetic oligonucleotide
uggaugggcaggugaacag

SEQ ID NO: 143333 - RNA, 19 nt, Artificial Sequence
  Description of Artificial Sequence: Synthetic oligonucleotide
gugguauagcagccacucc

SEQ ID NO: 143334 - RNA, 19 nt, Artificial Sequence
  Description of Artificial Sequence: Synthetic oligonucleotide
cagccucugcugcagcagc

SEQ ID NO: 143335 - RNA, 19 nt, Artificial Sequence
  Description of Artificial Sequence: Synthetic oligonucleotide
ccacccuggauguggcugu

SEQ ID NO: 143336 - RNA, 19 nt, Artificial Sequence
  Description of Artificial Sequence: Synthetic oligonucleotide
uucggagaggccuguccca

SEQ ID NO: 143337 - RNA, 19 nt, Artificial Sequence
  Description of Artificial Sequence: Synthetic oligonucleotide
acggagcccagaggcugcu

SEQ ID NO: 143338 - RNA, 19 nt, Artificial Sequence
  Description of Artificial Sequence: Synthetic oligonucleotide
ugugcguggcccugggaca

SEQ ID NO: 143339 - RNA, 19 nt, Artificial Sequence
  Description of Artificial Sequence: Synthetic oligonucleotide
agcuggaccggccuccaga

SEQ ID NO: 143340 - RNA, 19 nt, Artificial Sequence
  Description of Artificial Sequence: Synthetic oligonucleotide
accucgcccaugacgggag

SEQ ID NO: 143341 - RNA, 19 nt, Artificial Sequence
  Description of Artificial Sequence: Synthetic oligonucleotide
ggagucuguggcugaacau

SEQ ID NO: 143342 - RNA, 19 nt, Artificial Sequence
  Description of Artificial Sequence: Synthetic oligonucleotide
ucaggggcaaggaggcggc

SEQ ID NO: 143343 - RNA, 19 nt, Artificial Sequence
  Description of Artificial Sequence: Synthetic oligonucleotide
cugcccuauccauguucca

SEQ ID NO: 143344 - RNA, 19 nt, Artificial Sequence
  Description of Artificial Sequence: Synthetic oligonucleotide
augucuccacgccacugcc

SEQ ID NO: 143345 - RNA, 19 nt, Artificial Sequence
  Description of Artificial Sequence: Synthetic oligonucleotide
cagugaugaccggugguuu

SEQ ID NO: 143346 - RNA, 19 nt, Artificial Sequence
  Description of Artificial Sequence: Synthetic oligonucleotide
uccugagcugcaucuuggg

SEQ ID NO: 143347 - RNA, 19 nt, Artificial Sequence
  Description of Artificial Sequence: Synthetic oligonucleotide
gcuuggugcugccccuggc

SEQ ID NO: 143348 - RNA, 19 nt, Artificial Sequence
  Description of Artificial Sequence: Synthetic oligonucleotide
ccuauggcuuccagccuga

SEQ ID NO: 143349 - RNA, 19 nt, Artificial Sequence
  Description of Artificial Sequence: Synthetic oligonucleotide
accuggugcugguggcgcu

SEQ ID NO: 143350 - RNA, 19 nt, Artificial Sequence
  Description of Artificial Sequence: Synthetic oligonucleotide
uggggccuggccauggccu

SEQ ID NO: 143351 - RNA, 19 nt, Artificial Sequence
  Description of Artificial Sequence: Synthetic oligonucleotide
ugcagggcccccacgcugc

SEQ ID NO: 143352 - RNA, 19 nt, Artificial Sequence
  Description of Artificial Sequence: Synthetic oligonucleotide
cacuccuggcugcaaugcu

SEQ ID NO: 143353 - RNA, 19 nt, Artificial Sequence
  Description of Artificial Sequence: Synthetic oligonucleotide
uucgggggcuggcaggggg

SEQ ID NO: 143354 - RNA, 19 nt, Artificial Sequence
  Description of Artificial Sequence: Synthetic oligonucleotide
gccgaguccuggcccuccu

SEQ ID NO: 143355 - RNA, 19 nt, Artificial Sequence
  Description of Artificial Sequence: Synthetic oligonucleotide
uggaggagaacuccacacc

SEQ ID NO: 143356 - RNA, 19 nt, Artificial Sequence
  Description of Artificial Sequence: Synthetic oligonucleotide
cccagcuagcagggauccu

SEQ ID NO: 143357 - RNA, 19 nt, Artificial Sequence
  Description of Artificial Sequence: Synthetic oligonucleotide
uggcccgggugcugaaugg

SEQ ID NO: 143358 - RNA, 19 nt, Artificial Sequence
  Description of Artificial Sequence: Synthetic oligonucleotide
gagaggcaccuccuagccu

SEQ ID NO: 143359 - RNA, 19 nt, Artificial Sequence
  Description of Artificial Sequence: Synthetic oligonucleotide
uaggcccuuccucuguggc

SEQ ID NO: 143360 - RNA, 19 nt, Artificial Sequence
  Description of Artificial Sequence: Synthetic oligonucleotide
ccuccccagaggacgucca

SEQ ID NO: 143361 - RNA, 19 nt, Artificial Sequence
  Description of Artificial Sequence: Synthetic oligonucleotide
aggcccugauguaccugag

SEQ ID NO: 143362 - RNA, 19 nt, Artificial Sequence
  Description of Artificial Sequence: Synthetic oligonucleotide
gagggcagcuggagccuca

SEQ ID NO: 143363 - RNA, 19 nt, Artificial Sequence
  Description of Artificial Sequence: Synthetic oligonucleotide
aguggaagauguugcagug

SEQ ID NO: 143364 - RNA, 19 nt, Artificial Sequence
  Description of Artificial Sequence: Synthetic oligonucleotide
gccauccucaccugguggc

SEQ ID NO: 143365 - RNA, 19 nt, Artificial Sequence
  Description of Artificial Sequence: Synthetic oligonucleotide
cuugaaaucggccaaggug

SEQ ID NO: 143366 - RNA, 19 nt, Artificial Sequence
  Description of Artificial Sequence: Synthetic oligonucleotide
gggagcauuuacaccgcag

SEQ ID NO: 143367 - RNA, 19 nt, Artificial Sequence
  Description of Artificial Sequence: Synthetic oligonucleotide
gaaaugacaccgcacgcca

SEQ ID NO: 143368 - RNA, 19 nt, Artificial Sequence
  Description of Artificial Sequence: Synthetic oligonucleotide
agcgccccgcggccgcgau

SEQ ID NO: 143369 - RNA, 19 nt, Artificial Sequence
  Description of Artificial Sequence: Synthetic oligonucleotide
uccggaccccaagcccacg

SEQ ID NO: 143370 - RNA, 19 nt, Artificial Sequence
  Description of Artificial Sequence: Synthetic oligonucleotide
ggcucccucgacucugggg

SEQ ID NO: 143371 - RNA, 19 nt, Artificial Sequence
  Description of Artificial Sequence: Synthetic oligonucleotide
gcacggaaccccgcccacu

SEQ ID NO: 143372 - RNA, 19 nt, Artificial Sequence
  Description of Artificial Sequence: Synthetic oligonucleotide
ucccaauccccgcgccccg

SEQ ID NO: 143373 - RNA, 19 nt, Artificial Sequence
  Description of Artificial Sequence: Synthetic oligonucleotide
gcccucucccacccgugcu

SEQ ID NO: 143374 - RNA, 19 nt, Artificial Sequence
  Description of Artificial Sequence: Synthetic oligonucleotide
uucccccgcuccaccccuc

SEQ ID NO: 143375 - RNA, 19 nt, Artificial Sequence
  Description of Artificial Sequence: Synthetic oligonucleotide
caccucaccucgcccccgc

SEQ ID NO: 143376 - RNA, 19 nt, Artificial Sequence
  Description of Artificial Sequence: Synthetic oligonucleotide
ccccacccaucgcgccccg

SEQ ID NO: 143377 - RNA, 19 nt, Artificial Sequence
  Description of Artificial Sequence: Synthetic oligonucleotide
ggcccgucccaucgaggcc

SEQ ID NO: 143378 - RNA, 19 nt, Artificial Sequence
  Description of Artificial Sequence: Synthetic oligonucleotide
ccaugcaacccacgcucgg

SEQ ID NO: 143379 - RNA, 19 nt, Artificial Sequence
  Description of Artificial Sequence: Synthetic oligonucleotide
gucccguuccggccccugc

SEQ ID NO: 143380 - RNA, 19 nt, Artificial Sequence
  Description of Artificial Sequence: Synthetic oligonucleotide
cgccccgcugcgcuucgcu

SEQ ID NO: 143381 - RNA, 19 nt, Artificial Sequence
  Description of Artificial Sequence: Synthetic oligonucleotide
uccccgcccuugcgccguu

SEQ ID NO: 143382 - RNA, 19 nt, Artificial Sequence
  Description of Artificial Sequence: Synthetic oligonucleotide
uaguaaacaucgcucaaac

SEQ ID NO: 143383 - RNA, 25 nt, Artificial Sequence
  Description of Artificial Sequence: Synthetic oligonucleotide
ggcucggggcgccgaggcuuccgcg

SEQ ID NO: 143384 - RNA, 25 nt, Artificial Sequence
  Description of Artificial Sequence: Synthetic oligonucleotide
gcccgcugguuccucgcuccggggc

SEQ ID NO: 143385 - RNA, 25 nt, Artificial Sequence
  Description of Artificial Sequence: Synthetic oligonucleotide
cggagcucgcgauagcgaccgggag

SEQ ID NO: 143386 - RNA, 25 nt, Artificial Sequence
  Description of Artificial Sequence: Synthetic oligonucleotide
gcagggcgcggggcgggacccaggu

SEQ ID NO: 143387 - RNA, 25 nt, Artificial Sequence
  Description of Artificial Sequence: Synthetic oligonucleotide
uccgaggcgaggaagccggaagcca

SEQ ID NO: 143388 - RNA, 25 nt, Artificial Sequence
  Description of Artificial Sequence: Synthetic oligonucleotide
aggcgcggggagccucccccuucga

SEQ ID NO: 143389 - RNA, 25 nt, Artificial Sequence
  Description of Artificial Sequence: Synthetic oligonucleotide
acugcagccucgcuccgugccuucu

SEQ ID NO: 143390 - RNA, 25 nt, Artificial Sequence
  Description of Artificial Sequence: Synthetic oligonucleotide
ugcgcgccugggaucccggagccug

SEQ ID NO: 143391 - RNA, 25 nt, Artificial Sequence
  Description of Artificial Sequence: Synthetic oligonucleotide
gccuagguucugugcgcucccgccc

SEQ ID NO: 143392 - RNA, 25 nt, Artificial Sequence
  Description of Artificial Sequence: Synthetic oligonucleotide
caggccggugcccgccgcccgccug

SEQ ID NO: 143393 - RNA, 25 nt, Artificial Sequence
  Description of Artificial Sequence: Synthetic oligonucleotide
gcgccccaggcaggucccaggccuc

SEQ ID NO: 143394 - RNA, 25 nt, Artificial Sequence
  Description of Artificial Sequence: Synthetic oligonucleotide
ccggcugcucccggccgaagguggg

SEQ ID NO: 143395 - RNA, 25 nt, Artificial Sequence
  Description of Artificial Sequence: Synthetic oligonucleotide
ggacaggcaguggcaggcaccacua

SEQ ID NO: 143396 - RNA, 25 nt, Artificial Sequence
  Description of Artificial Sequence: Synthetic oligonucleotide
agcgagggcguuugggaacccaggg

SEQ ID NO: 143397 - RNA, 25 nt, Artificial Sequence
  Description of Artificial Sequence: Synthetic oligonucleotide
gugaccacggcgcagccauggggac

SEQ ID NO: 143398 - RNA, 25 nt, Artificial Sequence
  Description of Artificial Sequence: Synthetic oligonucleotide
ccgcgcuuguguaccaugaggacau

SEQ ID NO: 143399 - RNA, 25 nt, Artificial Sequence
  Description of Artificial Sequence: Synthetic oligonucleotide
ugacggccacccggcugcucuggga

SEQ ID NO: 143400 - RNA, 25 nt, Artificial Sequence
  Description of Artificial Sequence: Synthetic oligonucleotide
acgaccccgagugcgagaucgagcg

SEQ ID NO: 143401 - RNA, 25 nt, Artificial Sequence
  Description of Artificial Sequence: Synthetic oligonucleotide
guccugagcgccugaccgcagcccu

SEQ ID NO: 143402 - RNA, 25 nt, Artificial Sequence
  Description of Artificial Sequence: Synthetic oligonucleotide
uggaucgccugcggcagcgcggccu

SEQ ID NO: 143403 - RNA, 25 nt, Artificial Sequence
  Description of Artificial Sequence: Synthetic oligonucleotide
uggaacagaggugucugcgguuguc

SEQ ID NO: 143404 - RNA, 25 nt, Artificial Sequence
  Description of Artificial Sequence: Synthetic oligonucleotide
cagcccgcgaggccucggaagagga

SEQ ID NO: 143405 - RNA, 25 nt, Artificial Sequence
  Description of Artificial Sequence: Synthetic oligonucleotide
agcugggccuggugcacagcccaga

SEQ ID NO: 143406 - RNA, 25 nt, Artificial Sequence
  Description of Artificial Sequence: Synthetic oligonucleotide
aguauguaucccuggucagggagac

SEQ ID NO: 143407 - RNA, 25 nt, Artificial Sequence
  Description of Artificial Sequence: Synthetic oligonucleotide
cccagguccuaggcaaggaggagcu

SEQ ID NO: 143408 - RNA, 25 nt, Artificial Sequence
  Description of Artificial Sequence: Synthetic oligonucleotide
ugcaggcgcuguccggacaguucga

SEQ ID NO: 143409 - RNA, 25 nt, Artificial Sequence
  Description of Artificial Sequence: Synthetic oligonucleotide
acgccaucuacuuccacccgaguac

SEQ ID NO: 143410 - RNA, 25 nt, Artificial Sequence
  Description of Artificial Sequence: Synthetic oligonucleotide
ccuuucacugcgcgcggcuggccgc

SEQ ID NO: 143411 - RNA, 25 nt, Artificial Sequence
  Description of Artificial Sequence: Synthetic oligonucleotide
caggggcuggacugcagcuggugga

SEQ ID NO: 143412 - RNA, 25 nt, Artificial Sequence
  Description of Artificial Sequence: Synthetic oligonucleotide
acgcugugcucacuggagcugugca

SEQ ID NO: 143413 - RNA, 25 nt, Artificial Sequence
  Description of Artificial Sequence: Synthetic oligonucleotide
aaaaugggcuugcccuggugaggcc

SEQ ID NO: 143414 - RNA, 25 nt, Artificial Sequence
  Description of Artificial Sequence: Synthetic oligonucleotide
cucccgggcaccauggccagagggc

SEQ ID NO: 143415 - RNA, 25 nt, Artificial Sequence
  Description of Artificial Sequence: Synthetic oligonucleotide
cggcugccaacggguucuguguguu

SEQ ID NO: 143416 - RNA, 25 nt, Artificial Sequence
  Description of Artificial Sequence: Synthetic oligonucleotide
ucaacaacguggccauagcagcugc

SEQ ID NO: 143417 - RNA, 25 nt, Artificial Sequence
  Description of Artificial Sequence: Synthetic oligonucleotide
cacaugccaagcagaaacacgggcu

SEQ ID NO: 143418 - RNA, 25 nt, Artificial Sequence
  Description of Artificial Sequence: Synthetic oligonucleotide
uacacaggauccucgucguggacug

SEQ ID NO: 143419 - RNA, 25 nt, Artificial Sequence
  Description of Artificial Sequence: Synthetic oligonucleotide
gggaugugcaccauggccaggggau

SEQ ID NO: 143420 - RNA, 25 nt, Artificial Sequence
  Description of Artificial Sequence: Synthetic oligonucleotide
uccaguaucucuuugaggaugaccc

SEQ ID NO: 143421 - RNA, 25 nt, Artificial Sequence
  Description of Artificial Sequence: Synthetic oligonucleotide
ccagcguccuuuacuucuccuggca

SEQ ID NO: 143422 - RNA, 25 nt, Artificial Sequence
  Description of Artificial Sequence: Synthetic oligonucleotide
accgcuaugagcaugggcgcuucug

SEQ ID NO: 143423 - RNA, 25 nt, Artificial Sequence
  Description of Artificial Sequence: Synthetic oligonucleotide
ggccuuuccugcgagagucagaugc

SEQ ID NO: 143424 - RNA, 25 nt, Artificial Sequence
  Description of Artificial Sequence: Synthetic oligonucleotide
cagacgcaguggggcggggacaggg

SEQ ID NO: 143425 - RNA, 25 nt, Artificial Sequence
  Description of Artificial Sequence: Synthetic oligonucleotide
gccucggcuucacugucaaccugcc

SEQ ID NO: 143426 - RNA, 25 nt, Artificial Sequence
  Description of Artificial Sequence: Synthetic oligonucleotide
ccuggaaccagguugggaugggaaa

SEQ ID NO: 143427 - RNA, 25 nt, Artificial Sequence
  Description of Artificial Sequence: Synthetic oligonucleotide
acgcugacuacguggcugccuuccu

SEQ ID NO: 143428 - RNA, 25 nt, Artificial Sequence
  Description of Artificial Sequence: Synthetic oligonucleotide
ugcaccugcugcucccacuggccuu

SEQ ID NO: 143429 - RNA, 25 nt, Artificial Sequence
  Description of Artificial Sequence: Synthetic oligonucleotide
uugaguuugacccugagcuggugcu

SEQ ID NO: 143430 - RNA, 25 nt, Artificial Sequence
  Description of Artificial Sequence: Synthetic oligonucleotide
uggucucggcaggauuugacucagc

SEQ ID NO: 143431 - RNA, 25 nt, Artificial Sequence
  Description of Artificial Sequence: Synthetic oligonucleotide
ccaucggggacccugaggggcaaau

SEQ ID NO: 143432 - RNA, 25 nt, Artificial Sequence
  Description of Artificial Sequence: Synthetic oligonucleotide
ugcaggccacgccagagugcuucgc

SEQ ID NO: 143433 - RNA, 25 nt, Artificial Sequence
  Description of Artificial Sequence: Synthetic oligonucleotide
cccaccucacacagcugcugcaggu

SEQ ID NO: 143434 - RNA, 25 nt, Artificial Sequence
  Description of Artificial Sequence: Synthetic oligonucleotide
ugcuggccggcggccgggucugugc

SEQ ID NO: 143435 - RNA, 25 nt, Artificial Sequence
  Description of Artificial Sequence: Synthetic oligonucleotide
ccgugcuggagggcggcuaccaccu

SEQ ID NO: 143436 - RNA, 25 nt, Artificial Sequence
  Description of Artificial Sequence: Synthetic oligonucleotide
uggagucacuggcggagucagugug

SEQ ID NO: 143437 - RNA, 25 nt, Artificial Sequence
  Description of Artificial Sequence: Synthetic oligonucleotide
gcaugacaguacagacgcugcuggg

SEQ ID NO: 143438 - RNA, 25 nt, Artificial Sequence
  Description of Artificial Sequence: Synthetic oligonucleotide
gugacccggccccaccccugucagg

SEQ ID NO: 143439 - RNA, 25 nt, Artificial Sequence
  Description of Artificial Sequence: Synthetic oligonucleotide
ggccaauggcgccaugucagagugc

SEQ ID NO: 143440 - RNA, 25 nt, Artificial Sequence
  Description of Artificial Sequence: Synthetic oligonucleotide
cccuagaguccauccagagugcccg

SEQ ID NO: 143441 - RNA, 25 nt, Artificial Sequence
  Description of Artificial Sequence: Synthetic oligonucleotide
gugcugcccaggccccgcacuggaa

SEQ ID NO: 143442 - RNA, 25 nt, Artificial Sequence
  Description of Artificial Sequence: Synthetic oligonucleotide
agagccuccagcagcaagaugugac

SEQ ID NO: 143443 - RNA, 25 nt, Artificial Sequence
  Description of Artificial Sequence: Synthetic oligonucleotide
ccgcugugccgaugagccccagcag

SEQ ID NO: 143444 - RNA, 25 nt, Artificial Sequence
  Description of Artificial Sequence: Synthetic oligonucleotide
gccacuccccagaggggaggccucc

SEQ ID NO: 143445 - RNA, 25 nt, Artificial Sequence
  Description of Artificial Sequence: Synthetic oligonucleotide
caccucugcugccuggggguccagu

SEQ ID NO: 143446 - RNA, 25 nt, Artificial Sequence
  Description of Artificial Sequence: Synthetic oligonucleotide
uguguaaggcagcugcaucugcacc

SEQ ID NO: 143447 - RNA, 25 nt, Artificial Sequence
  Description of Artificial Sequence: Synthetic oligonucleotide
cgagcucccuccuggaccagccgug

SEQ ID NO: 143448 - RNA, 25 nt, Artificial Sequence
  Description of Artificial Sequence: Synthetic oligonucleotide
gccucugccccgcacccucuguccg

SEQ ID NO: 143449 - RNA, 25 nt, Artificial Sequence
  Description of Artificial Sequence: Synthetic oligonucleotide
gcaccgcuguugcccugacaacgcc

SEQ ID NO: 143450 - RNA, 25 nt, Artificial Sequence
  Description of Artificial Sequence: Synthetic oligonucleotide
cggauaucacauugguucugccccc

SEQ ID NO: 143451 - RNA, 25 nt, Artificial Sequence
  Description of Artificial Sequence: Synthetic oligonucleotide
cugacgucauccaacaggaagcguc

SEQ ID NO: 143452 - RNA, 25 nt, Artificial Sequence
  Description of Artificial Sequence: Synthetic oligonucleotide
cagcccugagggaggagacagaagc

SEQ ID NO: 143453 - RNA, 25 nt, Artificial Sequence
  Description of Artificial Sequence: Synthetic oligonucleotide
ccugggccaggccacacgagucccu

SEQ ID NO: 143454 - RNA, 25 nt, Artificial Sequence
  Description of Artificial Sequence: Synthetic oligonucleotide
uggcccgggaggaggcccucacugc

SEQ ID NO: 143455 - RNA, 25 nt, Artificial Sequence
  Description of Artificial Sequence: Synthetic oligonucleotide
cacuugggaagcuccuguaccucuu

SEQ ID NO: 143456 - RNA, 25 nt, Artificial Sequence
  Description of Artificial Sequence: Synthetic oligonucleotide
uagaugggaugcuggaugggcaggu

SEQ ID NO: 143457 - RNA, 25 nt, Artificial Sequence
  Description of Artificial Sequence: Synthetic oligonucleotide
ugaacagugguauagcagccacucc

SEQ ID NO: 143458 - RNA, 25 nt, Artificial Sequence
  Description of Artificial Sequence: Synthetic oligonucleotide
cagccucugcugcagcagccacccu

SEQ ID NO: 143459 - RNA, 25 nt, Artificial Sequence
  Description of Artificial Sequence: Synthetic oligonucleotide
uggauguggcuguucggagaggccu

SEQ ID NO: 143460 - RNA, 25 nt, Artificial Sequence
  Description of Artificial Sequence: Synthetic oligonucleotide
ugucccacggagcccagaggcugcu

SEQ ID NO: 143461 - RNA, 25 nt, Artificial Sequence
  Description of Artificial Sequence: Synthetic oligonucleotide
ugugcguggcccugggacagcugga

SEQ ID NO: 143462 - RNA, 25 nt, Artificial Sequence
  Description of Artificial Sequence: Synthetic oligonucleotide
accggccuccagaccucgcccauga

SEQ ID NO: 143463 - RNA, 25 nt, Artificial Sequence
  Description of Artificial Sequence: Synthetic oligonucleotide
acgggaggagucuguggcugaacau

SEQ ID NO: 143464 - RNA, 25 nt, Artificial Sequence
  Description of Artificial Sequence: Synthetic oligonucleotide
ucaggggcaaggaggcggcugcccu

SEQ ID NO: 143465 - RNA, 25 nt, Artificial Sequence
  Description of Artificial Sequence: Synthetic oligonucleotide
uauccauguuccaugucuccacgcc

SEQ ID NO: 143466 - RNA, 25 nt, Artificial Sequence
  Description of Artificial Sequence: Synthetic oligonucleotide
cacugccagugaugaccggugguuu

SEQ ID NO: 143467 - RNA, 25 nt, Artificial Sequence
  Description of Artificial Sequence: Synthetic oligonucleotide
uccugagcugcaucuugggcuuggu

SEQ ID NO: 143468 - RNA, 25 nt, Artificial Sequence
  Description of Artificial Sequence: Synthetic oligonucleotide
ugcugccccuggccuauggcuucca

SEQ ID NO: 143469 - RNA, 25 nt, Artificial Sequence
  Description of Artificial Sequence: Synthetic oligonucleotide
agccugaccuggugcugguggcgcu

SEQ ID NO: 143470 - RNA, 25 nt, Artificial Sequence
  Description of Artificial Sequence: Synthetic oligonucleotide
uggggccuggccauggccugcaggg

SEQ ID NO: 143471 - RNA, 25 nt, Artificial Sequence
  Description of Artificial Sequence: Synthetic oligonucleotide
gcccccacgcugcacuccuggcugc

SEQ ID NO: 143472 - RNA, 25 nt, Artificial Sequence
  Description of Artificial Sequence: Synthetic oligonucleotide
caaugcuucgggggcuggcaggggg

SEQ ID NO: 143473 - RNA, 25 nt, Artificial Sequence
  Description of Artificial Sequence: Synthetic oligonucleotide
gccgaguccuggcccuccuggagga

SEQ ID NO: 143474 - RNA, 25 nt, Artificial Sequence
  Description of Artificial Sequence: Synthetic oligonucleotide
agaacuccacaccccagcuagcagg

SEQ ID NO: 143475 - RNA, 25 nt, Artificial Sequence
  Description of Artificial Sequence: Synthetic oligonucleotide
ggauccuggcccgggugcugaaugg

SEQ ID NO: 143476 - RNA, 25 nt, Artificial Sequence
  Description of Artificial Sequence: Synthetic oligonucleotide
gagaggcaccuccuagccuaggccc

SEQ ID NO: 143477 - RNA, 25 nt, Artificial Sequence
  Description of Artificial Sequence: Synthetic oligonucleotide
cuuccucuguggccuccccagagga

SEQ ID NO: 143478 - RNA, 25 nt, Artificial Sequence
  Description of Artificial Sequence: Synthetic oligonucleotide
acguccaggcccugauguaccugag

SEQ ID NO: 143479 - RNA, 25 nt, Artificial Sequence
  Description of Artificial Sequence: Synthetic oligonucleotide
gagggcagcuggagccucaguggaa

SEQ ID NO: 143480 - RNA, 25 nt, Artificial Sequence
  Description of Artificial Sequence: Synthetic oligonucleotide
agauguugcagugccauccucaccu

SEQ ID NO: 143481 - RNA, 25 nt, Artificial Sequence
  Description of Artificial Sequence: Synthetic oligonucleotide
ugguggcuugaaaucggccaaggug

SEQ ID NO: 143482 - RNA, 25 nt, Artificial Sequence
  Description of Artificial Sequence: Synthetic oligonucleotide
gggagcauuuacaccgcagaaauga

SEQ ID NO: 143483 - RNA, 25 nt, Artificial Sequence
  Description of Artificial Sequence: Synthetic oligonucleotide
acaccgcacgccagcgccccgcggc

SEQ ID NO: 143484 - RNA, 25 nt, Artificial Sequence
  Description of Artificial Sequence: Synthetic oligonucleotide
ccgcgauccggaccccaagcccacg

SEQ ID NO: 143485 - RNA, 25 nt, Artificial Sequence
  Description of Artificial Sequence: Synthetic oligonucleotide
ggcucccucgacucuggggcacgga

SEQ ID NO: 143486 - RNA, 25 nt, Artificial Sequence
  Description of Artificial Sequence: Synthetic oligonucleotide
aaccccgcccacucccaauccccgc

SEQ ID NO: 143487 - RNA, 25 nt, Artificial Sequence
  Description of Artificial Sequence: Synthetic oligonucleotide
cgccccgcccucucccacccgugcu

SEQ ID NO: 143488 - RNA, 25 nt, Artificial Sequence
  Description of Artificial Sequence: Synthetic oligonucleotide
uucccccgcuccaccccucaccuca

SEQ ID NO: 143489 - RNA, 25 nt, Artificial Sequence
  Description of Artificial Sequence: Synthetic oligonucleotide
accucgcccccgccccacccaucgc

SEQ ID NO: 143490 - RNA, 25 nt, Artificial Sequence
  Description of Artificial Sequence: Synthetic oligonucleotide
cgccccggcccgucccaucgaggcc

SEQ ID NO: 143491 - RNA, 25 nt, Artificial Sequence
  Description of Artificial Sequence: Synthetic oligonucleotide
ccaugcaacccacgcucggucccgu

SEQ ID NO: 143492 - RNA, 25 nt, Artificial Sequence
  Description of Artificial Sequence: Synthetic oligonucleotide
uuccggccccugcgccccgcugcgc

SEQ ID NO: 143493 - RNA, 25 nt, Artificial Sequence
  Description of Artificial Sequence: Synthetic oligonucleotide
cuucgcuccccgcccuugcgccguu

SEQ ID NO: 143494 - RNA, 25 nt, Artificial Sequence
  Description of Artificial Sequence: Synthetic oligonucleotide
uaguaaacaucgcucaaacgaaaaa

SEQ ID NO: 143495 - RNA, 1755 nt, Homo sapiens
agcuuugggagggccggccccgggaugcuacacacaacccagcuguaccagcaugugccagagacacccuggccaaucguguacucgccgcgcuacaacaucaccuucaugggccuggagaagcugcaucccuuugaugccggaaaauggggcaaagugaucaauuuccuaaaagaagagaagcuucugucugacagcaugcugguggaggcgcgggaggccucggaggaggaccugcugguggugcacacgaggcgcuaucuuaaugagcucaagugguccuuugcuguugcuaccaucacagaaaucccccccguuaucuuccuccccaacuuccuugugcagaggaaggugcugaggccccuucggacccagacaggaggaaccauaauggcggggaagcuggcuguggagcgaggcugggccaucaacgugggggguggcuuccaccacugcuccagcgaccguggcgggggcuucugugccuaugcggacaucacgcucgccaucaaguuucuguuugagcguguggagggcaucuccagggcuaccaucauugaucuugaugcccaucagggcaaugggcaugagcgagacuucauggacgacaagcguguguacaucauggaugucuacaaccgccacaucuacccaggggaccgcuuugccaagcaggccaucaggcggaagguggagcuggaguggggcacagaggaugaugaguaccuggauaagguggagaggaacaucaagaaaucccuccaggagcaccugcccgacguggugguauacaaugcaggcaccgacauccucgagggggaccgccuuggggggcuguccaucagcccagcgggcaucgugaagcgggaugagcugguguuccggaugguccguggccgccgggugcccauccuuauggugaccucaggcggguaccagaagcgcacagcccgcaucauugcugacuccauacuuaaucuguuuggccuggggcucauugggccugagucacccagcgucuccgcacagaacucagacacaccgcugcuucccccugcagugcccugacccuugcugcccugccugucacguggcccugccuauccgccccuuagugcuuuuuguuuucuaaccucauggggugguggaggcagccuucagugagcauggaggggcagggccaucccuggcuggggccuggagcuggcccuuccucuacuuuucccugcuggaagccagaagggcuugaggccucuaugggugggggcagaaggcagagccugugucccagggggacccacacgaagucaccagcccauagguccagggaggcaggcaguuaacugagaauuggagaggacaggcuaggucccaggcacagcgagggcccugggcuugggguguucugguuuugagaacggcagacccaggucggagugaggaagcuuccaccuccauccugacuaggccugcauccuaacugggccucccucccuccccuuggucaugggauuugcugcccucuuugccccagagcugaagagcuauaggcacugguguggauggcccaggaggugcuggagcuaggucuccaggugggccugguucccaggcagcaggugggaacccugggccuggaugugaggggcggucaggaagggguacagguggguucccucaucuggaguucccccucaauaaagcaaggucuggaccugcaaaaaaaaaaaaaaaaaaaaaaaaaaaaaaaaaaaa

SEQ ID NO: 143496 - RNA, 19 nt, Artificial Sequence
  Description of Artificial Sequence: Synthetic oligonucleotide
agcuuugggagggccggcc

SEQ ID NO: 143497 - RNA, 19 nt, Artificial Sequence
  Description of Artificial Sequence: Synthetic oligonucleotide
cccgggaugcuacacacaa

SEQ ID NO: 143498 - RNA, 19 nt, Artificial Sequence
  Description of Artificial Sequence: Synthetic oligonucleotide
acccagcuguaccagcaug

SEQ ID NO: 143499 - RNA, 19 nt, Artificial Sequence
  Description of Artificial Sequence: Synthetic oligonucleotide
gugccagagacacccuggc

SEQ ID NO: 143500 - RNA, 19 nt, Artificial Sequence
  Description of Artificial Sequence: Synthetic oligonucleotide
ccaaucguguacucgccgc

SEQ ID NO: 143501 - RNA, 19 nt, Artificial Sequence
  Description of Artificial Sequence: Synthetic oligonucleotide
cgcuacaacaucaccuuca

SEQ ID NO: 143502 - RNA, 19 nt, Artificial Sequence
  Description of Artificial Sequence: Synthetic oligonucleotide
augggccuggagaagcugc

SEQ ID NO: 143503 - RNA, 19 nt, Artificial Sequence
  Description of Artificial Sequence: Synthetic oligonucleotide
caucccuuugaugccggaa

SEQ ID NO: 143504 - RNA, 19 nt, Artificial Sequence
  Description of Artificial Sequence: Synthetic oligonucleotide
aaauggggcaaagugauca

SEQ ID NO: 143505 - RNA, 19 nt, Artificial Sequence
  Description of Artificial Sequence: Synthetic oligonucleotide
aauuuccuaaaagaagaga

SEQ ID NO: 143506 - RNA, 19 nt, Artificial Sequence
  Description of Artificial Sequence: Synthetic oligonucleotide
aagcuucugucugacagca

SEQ ID NO: 143507 - RNA, 19 nt, Artificial Sequence
  Description of Artificial Sequence: Synthetic oligonucleotide
augcugguggaggcgcggg

SEQ ID NO: 143508 - RNA, 19 nt, Artificial Sequence
  Description of Artificial Sequence: Synthetic oligonucleotide
gaggccucggaggaggacc

SEQ ID NO: 143509 - RNA, 19 nt, Artificial Sequence
  Description of Artificial Sequence: Synthetic oligonucleotide
cugcugguggugcacacga

SEQ ID NO: 143510 - RNA, 19 nt, Artificial Sequence
  Description of Artificial Sequence: Synthetic oligonucleotide
aggcgcuaucuuaaugagc

SEQ ID NO: 143511 - RNA, 19 nt, Artificial Sequence
  Description of Artificial Sequence: Synthetic oligonucleotide
cucaagugguccuuugcug

SEQ ID NO: 143512 - RNA, 19 nt, Artificial Sequence
  Description of Artificial Sequence: Synthetic oligonucleotide
guugcuaccaucacagaaa

SEQ ID NO: 143513 - RNA, 19 nt, Artificial Sequence
  Description of Artificial Sequence: Synthetic oligonucleotide
aucccccccguuaucuucc

SEQ ID NO: 143514 - RNA, 19 nt, Artificial Sequence
  Description of Artificial Sequence: Synthetic oligonucleotide
cuccccaacuuccuugugc

SEQ ID NO: 143515 - RNA, 19 nt, Artificial Sequence
  Description of Artificial Sequence: Synthetic oligonucleotide
cagaggaaggugcugaggc

SEQ ID NO: 143516 - RNA, 19 nt, Artificial Sequence
  Description of Artificial Sequence: Synthetic oligonucleotide
ccccuucggacccagacag

SEQ ID NO: 143517 - RNA, 19 nt, Artificial Sequence
  Description of Artificial Sequence: Synthetic oligonucleotide
ggaggaaccauaauggcgg

SEQ ID NO: 143518 - RNA, 19 nt, Artificial Sequence
  Description of Artificial Sequence: Synthetic oligonucleotide
gggaagcuggcuguggagc

SEQ ID NO: 143519 - RNA, 19 nt, Artificial Sequence
  Description of Artificial Sequence: Synthetic oligonucleotide
cgaggcugggccaucaacg

SEQ ID NO: 143520 - RNA, 19 nt, Artificial Sequence
  Description of Artificial Sequence: Synthetic oligonucleotide
gugggggguggcuuccacc

SEQ ID NO: 143521 - RNA, 19 nt, Artificial Sequence
  Description of Artificial Sequence: Synthetic oligonucleotide
cacugcuccagcgaccgug

SEQ ID NO: 143522 - RNA, 19 nt, Artificial Sequence
  Description of Artificial Sequence: Synthetic oligonucleotide
ggcgggggcuucugugccu

SEQ ID NO: 143523 - RNA, 19 nt, Artificial Sequence
  Description of Artificial Sequence: Synthetic oligonucleotide
uaugcggacaucacgcucg

SEQ ID NO: 143524 - RNA, 19 nt, Artificial Sequence
  Description of Artificial Sequence: Synthetic oligonucleotide
gccaucaaguuucuguuug

SEQ ID NO: 143525 - RNA, 19 nt, Artificial Sequence
  Description of Artificial Sequence: Synthetic oligonucleotide
gagcguguggagggcaucu

SEQ ID NO: 143526 - RNA, 19 nt, Artificial Sequence
  Description of Artificial Sequence: Synthetic oligonucleotide
uccagggcuaccaucauug

SEQ ID NO: 143527 - RNA, 19 nt, Artificial Sequence
  Description of Artificial Sequence: Synthetic oligonucleotide
gaucuugaugcccaucagg

SEQ ID NO: 143528 - RNA, 19 nt, Artificial Sequence
  Description of Artificial Sequence: Synthetic oligonucleotide
ggcaaugggcaugagcgag

SEQ ID NO: 143529 - RNA, 19 nt, Artificial Sequence
  Description of Artificial Sequence: Synthetic oligonucleotide
gacuucauggacgacaagc

SEQ ID NO: 143530 - RNA, 19 nt, Artificial Sequence
  Description of Artificial Sequence: Synthetic oligonucleotide
cguguguacaucauggaug

SEQ ID NO: 143531 - RNA, 19 nt, Artificial Sequence
  Description of Artificial Sequence: Synthetic oligonucleotide
gucuacaaccgccacaucu

SEQ ID NO: 143532 - RNA, 19 nt, Artificial Sequence
  Description of Artificial Sequence: Synthetic oligonucleotide
uacccaggggaccgcuuug

SEQ ID NO: 143533 - RNA, 19 nt, Artificial Sequence
  Description of Artificial Sequence: Synthetic oligonucleotide
gccaagcaggccaucaggc

SEQ ID NO: 143534 - RNA, 19 nt, Artificial Sequence
  Description of Artificial Sequence: Synthetic oligonucleotide
cggaagguggagcuggagu

SEQ ID NO: 143535 - RNA, 19 nt, Artificial Sequence
  Description of Artificial Sequence: Synthetic oligonucleotide
uggggcacagaggaugaug

SEQ ID NO: 143536 - RNA, 19 nt, Artificial Sequence
  Description of Artificial Sequence: Synthetic oligonucleotide
gaguaccuggauaaggugg

SEQ ID NO: 143537 - RNA, 19 nt, Artificial Sequence
  Description of Artificial Sequence: Synthetic oligonucleotide
gagaggaacaucaagaaau

SEQ ID NO: 143538 - RNA, 19 nt, Artificial Sequence
  Description of Artificial Sequence: Synthetic oligonucleotide
ucccuccaggagcaccugc

SEQ ID NO: 143539 - RNA, 19 nt, Artificial Sequence
  Description of Artificial Sequence: Synthetic oligonucleotide
cccgacguggugguauaca

SEQ ID NO: 143540 - RNA, 19 nt, Artificial Sequence
  Description of Artificial Sequence: Synthetic oligonucleotide
aaugcaggcaccgacaucc

SEQ ID NO: 143541 - RNA, 19 nt, Artificial Sequence
  Description of Artificial Sequence: Synthetic oligonucleotide
cucgagggggaccgccuug

SEQ ID NO: 143542 - RNA, 19 nt, Artificial Sequence
  Description of Artificial Sequence: Synthetic oligonucleotide
ggggggcuguccaucagcc

SEQ ID NO: 143543 - RNA, 19 nt, Artificial Sequence
  Description of Artificial Sequence: Synthetic oligonucleotide
ccagcgggcaucgugaagc

SEQ ID NO: 143544 - RNA, 19 nt, Artificial Sequence
  Description of Artificial Sequence: Synthetic oligonucleotide
cgggaugagcugguguucc

SEQ ID NO: 143545 - RNA, 19 nt, Artificial Sequence
  Description of Artificial Sequence: Synthetic oligonucleotide
cggaugguccguggccgcc

SEQ ID NO: 143546 - RNA, 19 nt, Artificial Sequence
  Description of Artificial Sequence: Synthetic oligonucleotide
cgggugcccauccuuaugg

SEQ ID NO: 143547 - RNA, 19 nt, Artificial Sequence
  Description of Artificial Sequence: Synthetic oligonucleotide
gugaccucaggcggguacc

SEQ ID NO: 143548 - RNA, 19 nt, Artificial Sequence
  Description of Artificial Sequence: Synthetic oligonucleotide
cagaagcgcacagcccgca

SEQ ID NO: 143549 - RNA, 19 nt, Artificial Sequence
  Description of Artificial Sequence: Synthetic oligonucleotide
aucauugcugacuccauac

SEQ ID NO: 143550 - RNA, 19 nt, Artificial Sequence
  Description of Artificial Sequence: Synthetic oligonucleotide
cuuaaucuguuuggccugg

SEQ ID NO: 143551 - RNA, 19 nt, Artificial Sequence
  Description of Artificial Sequence: Synthetic oligonucleotide
gggcucauugggccugagu

SEQ ID NO: 143552 - RNA, 19 nt, Artificial Sequence
  Description of Artificial Sequence: Synthetic oligonucleotide
ucacccagcgucuccgcac

SEQ ID NO: 143553 - RNA, 19 nt, Artificial Sequence
  Description of Artificial Sequence: Synthetic oligonucleotide
cagaacucagacacaccgc

SEQ ID NO: 143554 - RNA, 19 nt, Artificial Sequence
  Description of Artificial Sequence: Synthetic oligonucleotide
cugcuucccccugcagugc

SEQ ID NO: 143555 - RNA, 19 nt, Artificial Sequence
  Description of Artificial Sequence: Synthetic oligonucleotide
cccugacccuugcugcccu

SEQ ID NO: 143556 - RNA, 19 nt, Artificial Sequence
  Description of Artificial Sequence: Synthetic oligonucleotide
ugccugucacguggcccug

SEQ ID NO: 143557 - RNA, 19 nt, Artificial Sequence
  Description of Artificial Sequence: Synthetic oligonucleotide
gccuauccgccccuuagug

SEQ ID NO: 143558 - RNA, 19 nt, Artificial Sequence
  Description of Artificial Sequence: Synthetic oligonucleotide
gcuuuuuguuuucuaaccu

SEQ ID NO: 143559 - RNA, 19 nt, Artificial Sequence
  Description of Artificial Sequence: Synthetic oligonucleotide
ucauggggugguggaggca

SEQ ID NO: 143560 - RNA, 19 nt, Artificial Sequence
  Description of Artificial Sequence: Synthetic oligonucleotide
agccuucagugagcaugga

SEQ ID NO: 143561 - RNA, 19 nt, Artificial Sequence
  Description of Artificial Sequence: Synthetic oligonucleotide
aggggcagggccaucccug

SEQ ID NO: 143562 - RNA, 19 nt, Artificial Sequence
  Description of Artificial Sequence: Synthetic oligonucleotide
ggcuggggccuggagcugg

SEQ ID NO: 143563 - RNA, 19 nt, Artificial Sequence
  Description of Artificial Sequence: Synthetic oligonucleotide
gcccuuccucuacuuuucc

SEQ ID NO: 143564 - RNA, 19 nt, Artificial Sequence
  Description of Artificial Sequence: Synthetic oligonucleotide
ccugcuggaagccagaagg

SEQ ID NO: 143565 - RNA, 19 nt, Artificial Sequence
  Description of Artificial Sequence: Synthetic oligonucleotide
ggcuugaggccucuauggg

SEQ ID NO: 143566 - RNA, 19 nt, Artificial Sequence
  Description of Artificial Sequence: Synthetic oligonucleotide
gugggggcagaaggcagag

SEQ ID NO: 143567 - RNA, 19 nt, Artificial Sequence
  Description of Artificial Sequence: Synthetic oligonucleotide
gccugugucccagggggac

SEQ ID NO: 143568 - RNA, 19 nt, Artificial Sequence
  Description of Artificial Sequence: Synthetic oligonucleotide
cccacacgaagucaccagc

SEQ ID NO: 143569 - RNA, 19 nt, Artificial Sequence
  Description of Artificial Sequence: Synthetic oligonucleotide
cccauagguccagggaggc

SEQ ID NO: 143570 - RNA, 19 nt, Artificial Sequence
  Description of Artificial Sequence: Synthetic oligonucleotide
caggcaguuaacugagaau

SEQ ID NO: 143571 - RNA, 19 nt, Artificial Sequence
  Description of Artificial Sequence: Synthetic oligonucleotide
uuggagaggacaggcuagg

SEQ ID NO: 143572 - RNA, 19 nt, Artificial Sequence
  Description of Artificial Sequence: Synthetic oligonucleotide
gucccaggcacagcgaggg

SEQ ID NO: 143573 - RNA, 19 nt, Artificial Sequence
  Description of Artificial Sequence: Synthetic oligonucleotide
gcccugggcuugggguguu

SEQ ID NO: 143574 - RNA, 19 nt, Artificial Sequence
  Description of Artificial Sequence: Synthetic oligonucleotide
ucugguuuugagaacggca

SEQ ID NO: 143575 - RNA, 19 nt, Artificial Sequence
  Description of Artificial Sequence: Synthetic oligonucleotide
agacccaggucggagugag

SEQ ID NO: 143576 - RNA, 19 nt, Artificial Sequence
  Description of Artificial Sequence: Synthetic oligonucleotide
ggaagcuuccaccuccauc

SEQ ID NO: 143577 - RNA, 19 nt, Artificial Sequence
  Description of Artificial Sequence: Synthetic oligonucleotide
ccugacuaggccugcaucc

SEQ ID NO: 143578 - RNA, 19 nt, Artificial Sequence
  Description of Artificial Sequence: Synthetic oligonucleotide
cuaacugggccucccuccc

SEQ ID NO: 143579 - RNA, 19 nt, Artificial Sequence
  Description of Artificial Sequence: Synthetic oligonucleotide
cuccccuuggucaugggau

SEQ ID NO: 143580 - RNA, 19 nt, Artificial Sequence
  Description of Artificial Sequence: Synthetic oligonucleotide
uuugcugcccucuuugccc

SEQ ID NO: 143581 - RNA, 19 nt, Artificial Sequence
  Description of Artificial Sequence: Synthetic oligonucleotide
ccagagcugaagagcuaua

SEQ ID NO: 143582 - RNA, 19 nt, Artificial Sequence
  Description of Artificial Sequence: Synthetic oligonucleotide
aggcacugguguggauggc

SEQ ID NO: 143583 - RNA, 19 nt, Artificial Sequence
  Description of Artificial Sequence: Synthetic oligonucleotide
cccaggaggugcuggagcu

SEQ ID NO: 143584 - RNA, 19 nt, Artificial Sequence
  Description of Artificial Sequence: Synthetic oligonucleotide
uaggucuccaggugggccu

SEQ ID NO: 143585 - RNA, 19 nt, Artificial Sequence
  Description of Artificial Sequence: Synthetic oligonucleotide
ugguucccaggcagcaggu

SEQ ID NO: 143586 - RNA, 19 nt, Artificial Sequence
  Description of Artificial Sequence: Synthetic oligonucleotide
ugggaacccugggccugga

SEQ ID NO: 143587 - RNA, 19 nt, Artificial Sequence
  Description of Artificial Sequence: Synthetic oligonucleotide
augugaggggcggucagga

SEQ ID NO: 143588 - RNA, 19 nt, Artificial Sequence
  Description of Artificial Sequence: Synthetic oligonucleotide
aagggguacagguggguuc

SEQ ID NO: 143589 - RNA, 19 nt, Artificial Sequence
  Description of Artificial Sequence: Synthetic oligonucleotide
cccucaucuggaguucccc

SEQ ID NO: 143590 - RNA, 19 nt, Artificial Sequence
  Description of Artificial Sequence: Synthetic oligonucleotide
ccucaauaaagcaaggucu

SEQ ID NO: 143591 - RNA, 25 nt, Artificial Sequence
  Description of Artificial Sequence: Synthetic oligonucleotide
agcuuugggagggccggccccggga

SEQ ID NO: 143592 - RNA, 25 nt, Artificial Sequence
  Description of Artificial Sequence: Synthetic oligonucleotide
augcuacacacaacccagcuguacc

SEQ ID NO: 143593 - RNA, 25 nt, Artificial Sequence
  Description of Artificial Sequence: Synthetic oligonucleotide
cagcaugugccagagacacccuggc

SEQ ID NO: 143594 - RNA, 25 nt, Artificial Sequence
  Description of Artificial Sequence: Synthetic oligonucleotide
ccaaucguguacucgccgcgcuaca

SEQ ID NO: 143595 - RNA, 25 nt, Artificial Sequence
  Description of Artificial Sequence: Synthetic oligonucleotide
aacaucaccuucaugggccuggaga

SEQ ID NO: 143596 - RNA, 25 nt, Artificial Sequence
  Description of Artificial Sequence: Synthetic oligonucleotide
aagcugcaucccuuugaugccggaa

SEQ ID NO: 143597 - RNA, 25 nt, Artificial Sequence
  Description of Artificial Sequence: Synthetic oligonucleotide
aaauggggcaaagugaucaauuucc

SEQ ID NO: 143598 - RNA, 25 nt, Artificial Sequence
  Description of Artificial Sequence: Synthetic oligonucleotide
cuaaaagaagagaagcuucugucug

SEQ ID NO: 143599 - RNA, 25 nt, Artificial Sequence
  Description of Artificial Sequence: Synthetic oligonucleotide
gacagcaugcugguggaggcgcggg

SEQ ID NO: 143600 - RNA, 25 nt, Artificial Sequence
  Description of Artificial Sequence: Synthetic oligonucleotide
gaggccucggaggaggaccugcugg

SEQ ID NO: 143601 - RNA, 25 nt, Artificial Sequence
  Description of Artificial Sequence: Synthetic oligonucleotide
guggugcacacgaggcgcuaucuua

SEQ ID NO: 143602 - RNA, 25 nt, Artificial Sequence
  Description of Artificial Sequence: Synthetic oligonucleotide
aaugagcucaagugguccuuugcug

SEQ ID NO: 143603 - RNA, 25 nt, Artificial Sequence
  Description of Artificial Sequence: Synthetic oligonucleotide
guugcuaccaucacagaaauccccc

SEQ ID NO: 143604 - RNA, 25 nt, Artificial Sequence
  Description of Artificial Sequence: Synthetic oligonucleotide
cccguuaucuuccuccccaacuucc

SEQ ID NO: 143605 - RNA, 25 nt, Artificial Sequence
  Description of Artificial Sequence: Synthetic oligonucleotide
cuugugcagaggaaggugcugaggc

SEQ ID NO: 143606 - RNA, 25 nt, Artificial Sequence
  Description of Artificial Sequence: Synthetic oligonucleotide
ccccuucggacccagacaggaggaa

SEQ ID NO: 143607 - RNA, 25 nt, Artificial Sequence
  Description of Artificial Sequence: Synthetic oligonucleotide
accauaauggcggggaagcuggcug

SEQ ID NO: 143608 - RNA, 25 nt, Artificial Sequence
  Description of Artificial Sequence: Synthetic oligonucleotide
guggagcgaggcugggccaucaacg

SEQ ID NO: 143609 - RNA, 25 nt, Artificial Sequence
  Description of Artificial Sequence: Synthetic oligonucleotide
gugggggguggcuuccaccacugcu

SEQ ID NO: 143610 - RNA, 25 nt, Artificial Sequence
  Description of Artificial Sequence: Synthetic oligonucleotide
uccagcgaccguggcgggggcuucu

SEQ ID NO: 143611 - RNA, 25 nt, Artificial Sequence
  Description of Artificial Sequence: Synthetic oligonucleotide
ugugccuaugcggacaucacgcucg

SEQ ID NO: 143612 - RNA, 25 nt, Artificial Sequence
  Description of Artificial Sequence: Synthetic oligonucleotide
gccaucaaguuucuguuugagcgug

SEQ ID NO: 143613 - RNA, 25 nt, Artificial Sequence
  Description of Artificial Sequence: Synthetic oligonucleotide
guggagggcaucuccagggcuacca

SEQ ID NO: 143614 - RNA, 25 nt, Artificial Sequence
  Description of Artificial Sequence: Synthetic oligonucleotide
aucauugaucuugaugcccaucagg

SEQ ID NO: 143615 - RNA, 25 nt, Artificial Sequence
  Description of Artificial Sequence: Synthetic oligonucleotide
ggcaaugggcaugagcgagacuuca

SEQ ID NO: 143616 - RNA, 25 nt, Artificial Sequence
  Description of Artificial Sequence: Synthetic oligonucleotide
auggacgacaagcguguguacauca

SEQ ID NO: 143617 - RNA, 25 nt, Artificial Sequence
  Description of Artificial Sequence: Synthetic oligonucleotide
auggaugucuacaaccgccacaucu

SEQ ID NO: 143618 - RNA, 25 nt, Artificial Sequence
  Description of Artificial Sequence: Synthetic oligonucleotide
uacccaggggaccgcuuugccaagc

SEQ ID NO: 143619 - RNA, 25 nt, Artificial Sequence
  Description of Artificial Sequence: Synthetic oligonucleotide
caggccaucaggcggaagguggagc

SEQ ID NO: 143620 - RNA, 25 nt, Artificial Sequence
  Description of Artificial Sequence: Synthetic oligonucleotide
cuggaguggggcacagaggaugaug

SEQ ID NO: 143621 - RNA, 25 nt, Artificial Sequence
  Description of Artificial Sequence: Synthetic oligonucleotide
gaguaccuggauaagguggagagga

SEQ ID NO: 143622 - RNA, 25 nt, Artificial Sequence
  Description of Artificial Sequence: Synthetic oligonucleotide
aacaucaagaaaucccuccaggagc

SEQ ID NO: 143623 - RNA, 25 nt, Artificial Sequence
  Description of Artificial Sequence: Synthetic oligonucleotide
caccugcccgacguggugguauaca

SEQ ID NO: 143624 - RNA, 25 nt, Artificial Sequence
  Description of Artificial Sequence: Synthetic oligonucleotide
aaugcaggcaccgacauccucgagg

SEQ ID NO: 143625 - RNA, 25 nt, Artificial Sequence
  Description of Artificial Sequence: Synthetic oligonucleotide
ggggaccgccuuggggggcugucca

SEQ ID NO: 143626 - RNA, 25 nt, Artificial Sequence
  Description of Artificial Sequence: Synthetic oligonucleotide
aucagcccagcgggcaucgugaagc

SEQ ID NO: 143627 - RNA, 25 nt, Artificial Sequence
  Description of Artificial Sequence: Synthetic oligonucleotide
cgggaugagcugguguuccggaugg

SEQ ID NO: 143628 - RNA, 25 nt, Artificial Sequence
  Description of Artificial Sequence: Synthetic oligonucleotide
guccguggccgccgggugcccaucc

SEQ ID NO: 143629 - RNA, 25 nt, Artificial Sequence
  Description of Artificial Sequence: Synthetic oligonucleotide
cuuauggugaccucaggcggguacc

SEQ ID NO: 143630 - RNA, 25 nt, Artificial Sequence
  Description of Artificial Sequence: Synthetic oligonucleotide
cagaagcgcacagcccgcaucauug

SEQ ID NO: 143631 - RNA, 25 nt, Artificial Sequence
  Description of Artificial Sequence: Synthetic oligonucleotide
gcugacuccauacuuaaucuguuug

SEQ ID NO: 143632 - RNA, 25 nt, Artificial Sequence
  Description of Artificial Sequence: Synthetic oligonucleotide
ggccuggggcucauugggccugagu

SEQ ID NO: 143633 - RNA, 25 nt, Artificial Sequence
  Description of Artificial Sequence: Synthetic oligonucleotide
ucacccagcgucuccgcacagaacu

SEQ ID NO: 143634 - RNA, 25 nt, Artificial Sequence
  Description of Artificial Sequence: Synthetic oligonucleotide
ucagacacaccgcugcuucccccug

SEQ ID NO: 143635 - RNA, 25 nt, Artificial Sequence
  Description of Artificial Sequence: Synthetic oligonucleotide
gcagugcccugacccuugcugcccu

SEQ ID NO: 143636 - RNA, 25 nt, Artificial Sequence
  Description of Artificial Sequence: Synthetic oligonucleotide
ugccugucacguggcccugccuauc

SEQ ID NO: 143637 - RNA, 25 nt, Artificial Sequence
  Description of Artificial Sequence: Synthetic oligonucleotide
ccgccccuuagugcuuuuuguuuuc

SEQ ID NO: 143638 - RNA, 25 nt, Artificial Sequence
  Description of Artificial Sequence: Synthetic oligonucleotide
cuaaccucauggggugguggaggca

SEQ ID NO: 143639 - RNA, 25 nt, Artificial Sequence
  Description of Artificial Sequence: Synthetic oligonucleotide
agccuucagugagcauggaggggca

SEQ ID NO: 143640 - RNA, 25 nt, Artificial Sequence
  Description of Artificial Sequence: Synthetic oligonucleotide
agggccaucccuggcuggggccugg

SEQ ID NO: 143641 - RNA, 25 nt, Artificial Sequence
  Description of Artificial Sequence: Synthetic oligonucleotide
gagcuggcccuuccucuacuuuucc

SEQ ID NO: 143642 - RNA, 25 nt, Artificial Sequence
  Description of Artificial Sequence: Synthetic oligonucleotide
ccugcuggaagccagaagggcuuga

SEQ ID NO: 143643 - RNA, 25 nt, Artificial Sequence
  Description of Artificial Sequence: Synthetic oligonucleotide
aggccucuaugggugggggcagaag

SEQ ID NO: 143644 - RNA, 25 nt, Artificial Sequence
  Description of Artificial Sequence: Synthetic oligonucleotide
ggcagagccugugucccagggggac

SEQ ID NO: 143645 - RNA, 25 nt, Artificial Sequence
  Description of Artificial Sequence: Synthetic oligonucleotide
cccacacgaagucaccagcccauag

SEQ ID NO: 143646 - RNA, 25 nt, Artificial Sequence
  Description of Artificial Sequence: Synthetic oligonucleotide
gguccagggaggcaggcaguuaacu

SEQ ID NO: 143647 - RNA, 25 nt, Artificial Sequence
  Description of Artificial Sequence: Synthetic oligonucleotide
ugagaauuggagaggacaggcuagg

SEQ ID NO: 143648 - RNA, 25 nt, Artificial Sequence
  Description of Artificial Sequence: Synthetic oligonucleotide
gucccaggcacagcgagggcccugg

SEQ ID NO: 143649 - RNA, 25 nt, Artificial Sequence
  Description of Artificial Sequence: Synthetic oligonucleotide
ggcuugggguguucugguuuugaga

SEQ ID NO: 143650 - RNA, 25 nt, Artificial Sequence
  Description of Artificial Sequence: Synthetic oligonucleotide
aacggcagacccaggucggagugag

SEQ ID NO: 143651 - RNA, 25 nt, Artificial Sequence
  Description of Artificial Sequence: Synthetic oligonucleotide
ggaagcuuccaccuccauccugacu

SEQ ID NO: 143652 - RNA, 25 nt, Artificial Sequence
  Description of Artificial Sequence: Synthetic oligonucleotide
uaggccugcauccuaacugggccuc

SEQ ID NO: 143653 - RNA, 25 nt, Artificial Sequence
  Description of Artificial Sequence: Synthetic oligonucleotide
cccucccuccccuuggucaugggau

SEQ ID NO: 143654 - RNA, 25 nt, Artificial Sequence
  Description of Artificial Sequence: Synthetic oligonucleotide
uuugcugcccucuuugccccagagc

SEQ ID NO: 143655 - RNA, 25 nt, Artificial Sequence
  Description of Artificial Sequence: Synthetic oligonucleotide
cugaagagcuauaggcacuggugug

SEQ ID NO: 143656 - RNA, 25 nt, Artificial Sequence
  Description of Artificial Sequence: Synthetic oligonucleotide
ggauggcccaggaggugcuggagcu

SEQ ID NO: 143657 - RNA, 25 nt, Artificial Sequence
  Description of Artificial Sequence: Synthetic oligonucleotide
uaggucuccaggugggccugguucc

SEQ ID NO: 143658 - RNA, 25 nt, Artificial Sequence
  Description of Artificial Sequence: Synthetic oligonucleotide
ccaggcagcaggugggaacccuggg

SEQ ID NO: 143659 - RNA, 25 nt, Artificial Sequence
  Description of Artificial Sequence: Synthetic oligonucleotide
gccuggaugugaggggcggucagga

SEQ ID NO: 143660 - RNA, 25 nt, Artificial Sequence
  Description of Artificial Sequence: Synthetic oligonucleotide
aagggguacagguggguucccucau

SEQ ID NO: 143661 - RNA, 25 nt, Artificial Sequence
  Description of Artificial Sequence: Synthetic oligonucleotide
ucuggaguucccccucaauaaagca

SEQ ID NO: 143662 - DNA, 21 bp, Artificial Sequence
  Description of Artificial Sequence: Synthetic oligonucleotide
  Description of Combined DNA/RNA Molecule: Synthetic oligonucleotide
cuacacaaaucagcgauuutt

SEQ ID NO: 143663 - DNA, 21 bp, Artificial Sequence
  Description of Artificial Sequence: Synthetic oligonucleotide
  Description of Combined DNA/RNA Molecule: Synthetic oligonucleotide
aaaucgcugauuuguguagtt

SEQ ID NO: 143664 - DNA, 25 bp, Artificial Sequence
  Description of Artificial Sequence: Synthetic oligonucleotide
  Description of Combined DNA/RNA Molecule: Synthetic oligonucleotide
cuacacaaaucagcgauuuccaugt

SEQ ID NO: 143665 - RNA, 27 nt, Artificial Sequence
  Description of Artificial Sequence: Synthetic oligonucleotide
acauggaaaucgcugauuuguguaguc

SEQ ID NO: 143666 - RNA, 13 nt, Artificial Sequence
  Description of Artificial Sequence: Synthetic oligonucleotide
cuacacaaaucag

SEQ ID NO: 143667 - DNA, 11 bp, Artificial Sequence
  Description of Artificial Sequence: Synthetic oligonucleotide
  Description of Combined DNA/RNA Molecule: Synthetic oligonucleotide
gauuuccaugt

SEQ ID NO: 143668 - DNA, 21 bp, Artificial Sequence
  Description of Artificial Sequence: Synthetic oligonucleotide
  Description of Combined DNA/RNA Molecule: Synthetic oligonucleotide
ggaucuuauuucuucggagtt

SEQ ID NO: 143669 - DNA, 21 bp, Artificial Sequence
  Description of Artificial Sequence: Synthetic oligonucleotide
  Description of Combined DNA/RNA Molecule: Synthetic oligonucleotide
cuccgaagaaauaagaucctt

SEQ ID NO: 143670 - RNA, 11 nt, Artificial Sequence
  Description of Artificial Sequence: Synthetic oligonucleotide
ggaucuuauuu

SEQ ID NO: 143671 - DNA, 10 bp, Artificial Sequence
  Description of Artificial Sequence: Synthetic oligonucleotide
  Description of Combined DNA/RNA Molecule: Synthetic oligonucleotide
cuucggagtt

SEQ ID NO: 143672 - RNA, 27 nt, Artificial Sequence
  Description of Artificial Sequence: Synthetic oligonucleotide
cauugucuccgaagaaauaagauccuu

SEQ ID NO: 143673 - RNA, 8 nt, Artificial Sequence
  Description of Artificial Sequence: Synthetic oligonucleotide
  modified_base (2): LNA-G
ggaucuua

SEQ ID NO: 143674 - DNA, 17 bp, Artificial Sequence
  Description of Artificial Sequence: Synthetic oligonucleotide
  Description of Combined DNA/RNA Molecule: Synthetic oligonucleotide
uuucuucggagacaatg

SEQ ID NO: 143675 - DNA, 16 bp, Artificial Sequence
  Description of Artificial Sequence: Synthetic oligonucleotide
  Description of Combined DNA/RNA Molecule: Synthetic oligonucleotide
uucuucggagacaatg

SEQ ID NO: 143676 - DNA, 15 bp, Artificial Sequence
  Description of Artificial Sequence: Synthetic oligonucleotide
  Description of Combined DNA/RNA Molecule: Synthetic oligonucleotide
ucuucggagacaatg

SEQ ID NO: 143677 - DNA, 14 bp, Artificial Sequence
  Description of Artificial Sequence: Synthetic oligonucleotide
  Description of Combined DNA/RNA Molecule: Synthetic oligonucleotide
cuucggagacaatg

SEQ ID NO: 143678 - DNA, 13 bp, Artificial Sequence
  Description of Artificial Sequence: Synthetic oligonucleotide
  Description of Combined DNA/RNA Molecule: Synthetic oligonucleotide
uucggagacaatg

SEQ ID NO: 143679 - DNA, 12 bp, Artificial Sequence
  Description of Artificial Sequence: Synthetic oligonucleotide
  Description of Combined DNA/RNA Molecule: Synthetic oligonucleotide
ucggagacaatg

SEQ ID NO: 143680 - DNA, 11 bp, Artificial Sequence
  Description of Artificial Sequence: Synthetic oligonucleotide
  Description of Combined DNA/RNA Molecule: Synthetic oligonucleotide
cggagacaatg

SEQ ID NO: 143681 - RNA, 9 nt, Artificial Sequence
  Description of Artificial Sequence: Synthetic oligonucleotide
  modified_base (2): LNA-G
ggaucuuau

SEQ ID NO: 143682 - RNA, 10 nt, Artificial Sequence
  Description of Artificial Sequence: Synthetic oligonucleotide
  modified_base (2): LNA-G
ggaucuuauu

SEQ ID NO: 143683 - RNA, 11 nt, Artificial Sequence
  Description of Artificial Sequence: Synthetic oligonucleotide
  modified_base (2): LNA-G
ggaucuuauuu

SEQ ID NO: 143684 - RNA, 12 nt, Artificial Sequence
  Description of Artificial Sequence: Synthetic oligonucleotide
  modified_base (2): LNA-G
ggaucuuauuuc

SEQ ID NO: 143685 - RNA, 8 nt, Artificial Sequence
  Description of Artificial Sequence: Synthetic oligonucleotide
  modified_base (3): LNA-A
cuacacaa

SEQ ID NO: 143686 - DNA, 13 bp, Artificial Sequence
  Description of Artificial Sequence: Synthetic oligonucleotide
  Description of Combined DNA/RNA Molecule: Synthetic oligonucleotide
  modified_base (8): LNA-A
aucagcgauuutt

SEQ ID NO: 143687 - DNA, 12 bp, Artificial Sequence
  Description of Artificial Sequence: Synthetic oligonucleotide
  Description of Combined DNA/RNA Molecule: Synthetic oligonucleotide
  modified_base (7): LNA-A
ucagcgauuutt

SEQ ID NO: 143688 - DNA, 11 bp, Artificial Sequence
  Description of Artificial Sequence: Synthetic oligonucleotide
  Description of Combined DNA/RNA Molecule: Synthetic oligonucleotide
  modified_base (6): LNA-A
cagcgauuutt

SEQ ID NO: 143689 - DNA, 10 bp, Artificial Sequence
  Description of Artificial Sequence: Synthetic oligonucleotide
  Description of Combined DNA/RNA Molecule: Synthetic oligonucleotide
  modified_base (5): LNA-A
agcgauuutt

SEQ ID NO: 143690 - DNA, 9 bp, Artificial Sequence
  Description of Artificial Sequence: Synthetic oligonucleotide
  Description of Combined DNA/RNA Molecule: Synthetic oligonucleotide
  modified_base (4): LNA-A
gcgauuutt

SEQ ID NO: 143691 - DNA, 8 bp, Artificial Sequence
  Description of Artificial Sequence: Synthetic oligonucleotide
  Description of Combined DNA/RNA Molecule: Synthetic oligonucleotide
  modified_base (3): LNA-A
cgauuutt

SEQ ID NO: 143692 - DNA, 7 bp, Artificial Sequence
  Description of Artificial Sequence: Synthetic oligonucleotide
  Description of Combined DNA/RNA Molecule: Synthetic oligonucleotide
  modified_base (2): LNA-A
gauuutt

SEQ ID NO: 143693 - RNA, 9 nt, Artificial Sequence
  Description of Artificial Sequence: Synthetic oligonucleotide
  modified_base (3): LNA-A
cuacacaaa

SEQ ID NO: 143694 - RNA, 10 nt, Artificial Sequence
  Description of Artificial Sequence: Synthetic oligonucleotide
  modified_base (3): LNA-A
cuacacaaau

SEQ ID NO: 143695 - RNA, 11 nt, Artificial Sequence
  Description of Artificial Sequence: Synthetic oligonucleotide
  modified_base (3): LNA-A
cuacacaaauc

SEQ ID NO: 143696 - RNA, 12 nt, Artificial Sequence
  Description of Artificial Sequence: Synthetic oligonucleotide
  modified_base (3): LNA-A
cuacacaaauca

SEQ ID NO: 143697 - RNA, 13 nt, Artificial Sequence
  Description of Artificial Sequence: Synthetic oligonucleotide
  modified_base (3): LNA-A
cuacacaaaucag

SEQ ID NO: 143698 - RNA, 14 nt, Artificial Sequence
  Description of Artificial Sequence: Synthetic oligonucleotide
  modified_base (3): LNA-A
cuacacaaaucagc

SEQ ID NO: 143699 - RNA, 13 nt, Artificial Sequence
  Description of Artificial Sequence: Synthetic oligonucleotide
  modified_base (2): LNA-G
ggaucuuauuucu

SEQ ID NO: 143700 - RNA, 14 nt, Artificial Sequence
  Description of Artificial Sequence: Synthetic oligonucleotide
  modified_base (2): LNA-G
ggaucuuauuucuu

SEQ ID NO: 143701 - RNA, 8 nt, Artificial Sequence
  Description of Artificial Sequence: Synthetic oligonucleotide
  modified_base (2): LNA-G
  modified_base (8): LNA-A
ggaucuua

SEQ ID NO: 143702 - RNA, 9 nt, Artificial Sequence
  Description of Artificial Sequence: Synthetic oligonucleotide
  modified_base (2): LNA-G
  modified_base (9): LNA-U
ggaucuuau

SEQ ID NO: 143703 - RNA, 10 nt, Artificial Sequence
  Description of Artificial Sequence: Synthetic oligonucleotide
  modified_base (2): LNA-G
  modified_base (10): LNA-U
ggaucuuauu

SEQ ID NO: 143704 - RNA, 11 nt, Artificial Sequence
  Description of Artificial Sequence: Synthetic oligonucleotide
  modified_base (2): LNA-G
  modified_base (11): LNA-U
ggaucuuauuu

SEQ ID NO: 143705 - RNA, 12 nt, Artificial Sequence
  Description of Artificial Sequence: Synthetic oligonucleotide
  modified_base (2): LNA-G
  modified_base (12): LNA-C
ggaucuuauuuc

SEQ ID NO: 143706 - RNA, 13 nt, Artificial Sequence
  Description of Artificial Sequence: Synthetic oligonucleotide
  modified_base (2): LNA-G
  modified_base (13): LNA-U
ggaucuuauuucu

SEQ ID NO: 143707 - RNA, 14 nt, Artificial Sequence
  Description of Artificial Sequence: Synthetic oligonucleotide
  modified_base (2): LNA-G
  modified_base (14): LNA-U
ggaucuuauuucuu

SEQ ID NO: 143708 - DNA, 13 bp, Artificial Sequence
  Description of Artificial Sequence: Synthetic oligonucleotide
  Description of Combined DNA/RNA Molecule: Synthetic oligonucleotide
  modified_base (8): LNA-G
uuucuucggagtt

SEQ ID NO: 143709 - DNA, 12 bp, Artificial Sequence
  Description of Artificial Sequence: Synthetic oligonucleotide
  Description of Combined DNA/RNA Molecule: Synthetic oligonucleotide
  modified_base (7): LNA-G
uucuucggagtt

SEQ ID NO: 143710 - DNA, 11 bp, Artificial Sequence
  Description of Artificial Sequence: Synthetic oligonucleotide
  Description of Combined DNA/RNA Molecule: Synthetic oligonucleotide
  modified_base (6): LNA-G
ucuucggagtt

SEQ ID NO: 143711 - DNA, 10 bp, Artificial Sequence
  Description of Artificial Sequence: Synthetic oligonucleotide
  Description of Combined DNA/RNA Molecule: Synthetic oligonucleotide
  modified_base (5): LNA-G
cuucggagtt

SEQ ID NO: 143712 - DNA, 9 bp, Artificial Sequence
  Description of Artificial Sequence: Synthetic oligonucleotide
  Description of Combined DNA/RNA Molecule: Synthetic oligonucleotide
  modified_base (4): LNA-G
uucggagtt

SEQ ID NO: 143713 - DNA, 8 bp, Artificial Sequence
  Description of Artificial Sequence: Synthetic oligonucleotide
  Description of Combined DNA/RNA Molecule: Synthetic oligonucleotide
  modified_base (3): LNA-G
ucggagtt

SEQ ID NO: 143714 - DNA, 7 bp, Artificial Sequence
  Description of Artificial Sequence: Synthetic oligonucleotide
  Description of Combined DNA/RNA Molecule: Synthetic oligonucleotide
  modified_base (2): LNA-G
cggagtt

SEQ ID NO: 143715 - DNA, 13 bp, Artificial Sequence
  Description of Artificial Sequence: Synthetic oligonucleotide
  Description of Combined DNA/RNA Molecule: Synthetic oligonucleotide
  modified_base (1): LNA-U
  modified_base (8): LNA-G
uuucuucggagtt

SEQ ID NO: 143716 - DNA, 12 bp, Artificial Sequence
  Description of Artificial Sequence: Synthetic oligonucleotide
  Description of Combined DNA/RNA Molecule: Synthetic oligonucleotide
  modified_base (1): LNA-U
  modified_base (7): LNA-G
uucuucggagtt

SEQ ID NO: 143717 - DNA, 11 bp, Artificial Sequence
  Description of Artificial Sequence: Synthetic oligonucleotide
  Description of Combined DNA/RNA Molecule: Synthetic oligonucleotide
  modified_base (1): LNA-U
  modified_base (6): LNA-G
ucuucggagtt

SEQ ID NO: 143718 - DNA, 10 bp, Artificial Sequence
  Description of Artificial Sequence: Synthetic oligonucleotide
  Description of Combined DNA/RNA Molecule: Synthetic oligonucleotide
  modified_base (1): LNA-C
  modified_base (5): LNA-G
cuucggagtt

SEQ ID NO: 143719 - DNA, 9 bp, Artificial Sequence
  Description of Artificial Sequence: Synthetic oligonucleotide
  Description of Combined DNA/RNA Molecule: Synthetic oligonucleotide
  modified_base (1): LNA-U
  modified_base (4): LNA-G
uucggagtt

SEQ ID NO: 143720 - DNA, 8 bp, Artificial Sequence
  Description of Artificial Sequence: Synthetic oligonucleotide
  Description of Combined DNA/RNA Molecule: Synthetic oligonucleotide
  modified_base (1): LNA-U
  modified_base (3): LNA-G
ucggagtt

SEQ ID NO: 143721 - DNA, 7 bp, Artificial Sequence
  Description of Artificial Sequence: Synthetic oligonucleotide
  Description of Combined DNA/RNA Molecule: Synthetic oligonucleotide
  modified_base (1): LNA-C
  modified_base (2): LNA-G
cggagtt

SEQ ID NO: 143722 - DNA, 21 bp, Artificial Sequence
  Description of Artificial Sequence: Synthetic oligonucleotide
  Description of Combined DNA/RNA Molecule: Synthetic oligonucleotide
  modified_base (2): LNA-G
  modified_base (16): LNA-G
ggaucuuauuucuucggagtt

SEQ ID NO: 143723 - DNA, 25 bp, Artificial Sequence
  Description of Artificial Sequence: Synthetic oligonucleotide
  Description of Combined DNA/RNA Molecule: Synthetic oligonucleotide
ggaucuuauuucuucggagacaatg

SEQ ID NO: 143724 - RNA, 25 nt, Artificial Sequence
  Description of Artificial Sequence: Synthetic oligonucleotide
guauuuugaugaggaguucacggcc

SEQ ID NO: 143725 - RNA, 25 nt, Artificial Sequence
  Description of Artificial Sequence: Synthetic oligonucleotide
ggcccagaugaucaccaucacacca

SEQ ID NO: 143726 - RNA, 25 nt, Artificial Sequence
  Description of Artificial Sequence: Synthetic oligonucleotide
gggaagaaaacuauccugcggguuu

SEQ ID NO: 143727 - RNA, 25 nt, Artificial Sequence
  Description of Artificial Sequence: Synthetic oligonucleotide
guuuuaauuuauuucauccaguuug

SEQ ID NO: 143728 - RNA, 25 nt, Artificial Sequence
  Description of Artificial Sequence: Synthetic oligonucleotide
acguagggaaauguuaaggacuucu

SEQ ID NO: 143729 - RNA, 25 nt, Artificial Sequence
  Description of Artificial Sequence: Synthetic oligonucleotide
ccaggguuuacccagugggacagag

SEQ ID NO: 143730 - RNA, 25 nt, Artificial Sequence
  Description of Artificial Sequence: Synthetic oligonucleotide
agcaagguuuaaauuuguuauugug

SEQ ID NO: 143731 - RNA, 25 nt, Artificial Sequence
  Description of Artificial Sequence: Synthetic oligonucleotide
uguauuauguuguucaaaugcauuu

SEQ ID NO: 143732 - RNA, 25 nt, Artificial Sequence
  Description of Artificial Sequence: Synthetic oligonucleotide
uuuuaaucuuugugacaggaaagcc

SEQ ID NO: 143733 - RNA, 25 nt, Artificial Sequence
  Description of Artificial Sequence: Synthetic oligonucleotide
uuaaucuuugugacaggaaagcccu

SEQ ID NO: 143734 - RNA, 25 nt, Artificial Sequence
  Description of Artificial Sequence: Synthetic oligonucleotide
gcugcuuaugucucccagcauggcc

SEQ ID NO: 143735 - RNA, 25 nt, Artificial Sequence
  Description of Artificial Sequence: Synthetic oligonucleotide
aaguguuucagaagcuucucccuga

SEQ ID NO: 143736 - RNA, 25 nt, Artificial Sequence
  Description of Artificial Sequence: Synthetic oligonucleotide
gaccaucaauaaggaagaagcccuu

SEQ ID NO: 143737 - RNA, 25 nt, Artificial Sequence
  Description of Artificial Sequence: Synthetic oligonucleotide
ccaucaauaaggaagaagcccuuca

SEQ ID NO: 143738 - RNA, 25 nt, Artificial Sequence
  Description of Artificial Sequence: Synthetic oligonucleotide
ucaauaaggaagaagcccuucagcg

SEQ ID NO: 143739 - RNA, 25 nt, Artificial Sequence
  Description of Artificial Sequence: Synthetic oligonucleotide
aauaaggaagaagcccuucagcggc

SEQ ID NO: 143740 - RNA, 25 nt, Artificial Sequence
  Description of Artificial Sequence: Synthetic oligonucleotide
aggaagaagcccuucagcggccagu

SEQ ID NO: 143741 - RNA, 25 nt, Artificial Sequence
  Description of Artificial Sequence: Synthetic oligonucleotide
gcauaacuaaaggugaaaagcuccg

SEQ ID NO: 143742 - RNA, 25 nt, Artificial Sequence
  Description of Artificial Sequence: Synthetic oligonucleotide
cauaacuaaaggugaaaagcuccgg

SEQ ID NO: 143743 - RNA, 25 nt, Artificial Sequence
  Description of Artificial Sequence: Synthetic oligonucleotide
cuacaucacgccagucaacagucug

SEQ ID NO: 143744 - RNA, 25 nt, Artificial Sequence
  Description of Artificial Sequence: Synthetic oligonucleotide
acuggauuuaagcagaguucaaaag

SEQ ID NO: 143745 - RNA, 25 nt, Artificial Sequence
  Description of Artificial Sequence: Synthetic oligonucleotide
cuggauuuaagcagaguucaaaagc

SEQ ID NO: 143746 - RNA, 25 nt, Artificial Sequence
  Description of Artificial Sequence: Synthetic oligonucleotide
gauuuaagcagaguucaaaagcccu

SEQ ID NO: 143747 - RNA, 25 nt, Artificial Sequence
  Description of Artificial Sequence: Synthetic oligonucleotide
auuuaagcagaguucaaaagcccuu

SEQ ID NO: 143748 - RNA, 25 nt, Artificial Sequence
  Description of Artificial Sequence: Synthetic oligonucleotide
uuaagcagaguucaaaagcccuuca

SEQ ID NO: 143749 - RNA, 25 nt, Artificial Sequence
  Description of Artificial Sequence: Synthetic oligonucleotide
uaagcagaguucaaaagcccuucag

SEQ ID NO: 143750 - RNA, 25 nt, Artificial Sequence
  Description of Artificial Sequence: Synthetic oligonucleotide
agcagaguucaaaagcccuucagcg

SEQ ID NO: 143751 - RNA, 25 nt, Artificial Sequence
  Description of Artificial Sequence: Synthetic oligonucleotide
cucagggucugagugaagccgcucg

SEQ ID NO: 143752 - RNA, 25 nt, Artificial Sequence
  Description of Artificial Sequence: Synthetic oligonucleotide
caagcaacuacaucacgccagucaa

SEQ ID NO: 143753 - RNA, 25 nt, Artificial Sequence
  Description of Artificial Sequence: Synthetic oligonucleotide
aucaauggcagcuucuuggugcgug

SEQ ID NO: 143754 - RNA, 25 nt, Artificial Sequence
  Description of Artificial Sequence: Synthetic oligonucleotide
uuccagcccacauuggauucaucag

SEQ ID NO: 143755 - RNA, 25 nt, Artificial Sequence
  Description of Artificial Sequence: Synthetic oligonucleotide
cagcugagaauguggaauaccuaag

SEQ ID NO: 143756 - RNA, 25 nt, Artificial Sequence
  Description of Artificial Sequence: Synthetic oligonucleotide
aacguaucuccuaauuugaggcuca

SEQ ID NO: 143757 - RNA, 25 nt, Artificial Sequence
  Description of Artificial Sequence: Synthetic oligonucleotide
ccuaaaauaauuucucuacaauugg

SEQ ID NO: 143758 - RNA, 25 nt, Artificial Sequence
  Description of Artificial Sequence: Synthetic oligonucleotide
uggaagauucagcuaguuaggagcc

SEQ ID NO: 143759 - RNA, 25 nt, Artificial Sequence
  Description of Artificial Sequence: Synthetic oligonucleotide
uuaaacucuccuagucaauauccac

SEQ ID NO: 143760 - RNA, 25 nt, Artificial Sequence
  Description of Artificial Sequence: Synthetic oligonucleotide
cagccuacaguuauguucagucaca

SEQ ID NO: 143761 - RNA, 25 nt, Artificial Sequence
  Description of Artificial Sequence: Synthetic oligonucleotide
guuauguucagucacacacacauac

SEQ ID NO: 143762 - RNA, 25 nt, Artificial Sequence
  Description of Artificial Sequence: Synthetic oligonucleotide
cacauacaaaauguuccuuuugcuu

SEQ ID NO: 143763 - RNA, 25 nt, Artificial Sequence
  Description of Artificial Sequence: Synthetic oligonucleotide
uccuuuugcuuuuaaaguaauuuuu

SEQ ID NO: 143764 - RNA, 25 nt, Artificial Sequence
  Description of Artificial Sequence: Synthetic oligonucleotide
ugaccugugaagcaacagucaaugg

SEQ ID NO: 143765 - RNA, 25 nt, Artificial Sequence
  Description of Artificial Sequence: Synthetic oligonucleotide
cuaucucacacaucgacaaaccaau

SEQ ID NO: 143766 - RNA, 25 nt, Artificial Sequence
  Description of Artificial Sequence: Synthetic oligonucleotide
uguccucaauuguacugcuaccacu

SEQ ID NO: 143767 - RNA, 25 nt, Artificial Sequence
  Description of Artificial Sequence: Synthetic oligonucleotide
aaaccguagcuggcaagcggucuua

SEQ ID NO: 143768 - RNA, 25 nt, Artificial Sequence
  Description of Artificial Sequence: Synthetic oligonucleotide
uagcuggcaagcggucuuaccggcu

SEQ ID NO: 143769 - RNA, 25 nt, Artificial Sequence
  Description of Artificial Sequence: Synthetic oligonucleotide
uuguaugguuaaaagauggguuacc

SEQ ID NO: 143770 - RNA, 25 nt, Artificial Sequence
  Description of Artificial Sequence: Synthetic oligonucleotide
ugguuaaaagauggguuaccugcga

SEQ ID NO: 143771 - RNA, 25 nt, Artificial Sequence
  Description of Artificial Sequence: Synthetic oligonucleotide
cagggaauuauacaaucuugcugag

SEQ ID NO: 143772 - RNA, 25 nt, Artificial Sequence
  Description of Artificial Sequence: Synthetic oligonucleotide
acaaucuugcugagcauaaaacagu

SEQ ID NO: 143773 - RNA, 25 nt, Artificial Sequence
  Description of Artificial Sequence: Synthetic oligonucleotide
ccaauaaugaagaguccuuuauccu

SEQ ID NO: 143774 - RNA, 25 nt, Artificial Sequence
  Description of Artificial Sequence: Synthetic oligonucleotide
acuuuggauguuccaacgcaaguug

SEQ ID NO: 143775 - RNA, 25 nt, Artificial Sequence
  Description of Artificial Sequence: Synthetic oligonucleotide
aaugcuuccacuaaacugaaaccau

SEQ ID NO: 143776 - RNA, 25 nt, Artificial Sequence
  Description of Artificial Sequence: Synthetic oligonucleotide
gagaaaguuugacuuuguuaaauau

SEQ ID NO: 143777 - RNA, 25 nt, Artificial Sequence
  Description of Artificial Sequence: Synthetic oligonucleotide
aaagaacuacuguauauuaaaaguu

SEQ ID NO: 143778 - RNA, 25 nt, Artificial Sequence
  Description of Artificial Sequence: Synthetic oligonucleotide
uuagaaauacggguuuugacuuaac

SEQ ID NO: 143779 - RNA, 25 nt, Artificial Sequence
  Description of Artificial Sequence: Synthetic oligonucleotide
aacauggguacagcaaacucagcac

SEQ ID NO: 143780 - RNA, 25 nt, Artificial Sequence
  Description of Artificial Sequence: Synthetic oligonucleotide
aaagacacagaagaugcugaccuca

SEQ ID NO: 143781 - RNA, 25 nt, Artificial Sequence
  Description of Artificial Sequence: Synthetic oligonucleotide
uaguagggagguuuauucagaucgc

SEQ ID NO: 143782 - RNA, 25 nt, Artificial Sequence
  Description of Artificial Sequence: Synthetic oligonucleotide
gccuucugcagcaggguucugggau

SEQ ID NO: 143783 - RNA, 25 nt, Artificial Sequence
  Description of Artificial Sequence: Synthetic oligonucleotide
ggucugguacauauuggaaauuaug

SEQ ID NO: 143784 - RNA, 25 nt, Artificial Sequence
  Description of Artificial Sequence: Synthetic oligonucleotide
cuaguccuuccgauggaagcacuag

SEQ ID NO: 143785 - RNA, 25 nt, Artificial Sequence
  Description of Artificial Sequence: Synthetic oligonucleotide
ccagugaauauuguuuuuaugugga

SEQ ID NO: 143786 - RNA, 25 nt, Artificial Sequence
  Description of Artificial Sequence: Synthetic oligonucleotide
augaauucaaguuggaauugguaga

SEQ ID NO: 143787 - RNA, 25 nt, Artificial Sequence
  Description of Artificial Sequence: Synthetic oligonucleotide
caggacacagauuuagacuuggaga

SEQ ID NO: 143788 - RNA, 25 nt, Artificial Sequence
  Description of Artificial Sequence: Synthetic oligonucleotide
cucaaagcacaguuacaguauucca

SEQ ID NO: 143789 - RNA, 25 nt, Artificial Sequence
  Description of Artificial Sequence: Synthetic oligonucleotide
accacugccaccacugaugaauuaa

SEQ ID NO: 143790 - RNA, 25 nt, Artificial Sequence
  Description of Artificial Sequence: Synthetic oligonucleotide
gaaacuacuagugccacaucaucac

SEQ ID NO: 143791 - RNA, 25 nt, Artificial Sequence
  Description of Artificial Sequence: Synthetic oligonucleotide
aagucggacagccucaccaaacaga

SEQ ID NO: 143792 - RNA, 25 nt, Artificial Sequence
  Description of Artificial Sequence: Synthetic oligonucleotide
gaaagcgaaaaauggaacaugaugg

SEQ ID NO: 143793 - RNA, 25 nt, Artificial Sequence
  Description of Artificial Sequence: Synthetic oligonucleotide
cccucugauuuagcauguagacugc

SEQ ID NO: 143794 - RNA, 25 nt, Artificial Sequence
  Description of Artificial Sequence: Synthetic oligonucleotide
ugagcuauuuaaggaucuauuuaug

SEQ ID NO: 143795 - RNA, 25 nt, Artificial Sequence
  Description of Artificial Sequence: Synthetic oligonucleotide
aaaaggugaaaaagcacuauuauca

SEQ ID NO: 143796 - RNA, 25 nt, Artificial Sequence
  Description of Artificial Sequence: Synthetic oligonucleotide
gaaaaagcacuauuaucaguucugc

SEQ ID NO: 143797 - RNA, 25 nt, Artificial Sequence
  Description of Artificial Sequence: Synthetic oligonucleotide
ggcugaaaagaaagauuaaaccuac

SEQ ID NO: 143798 - RNA, 25 nt, Artificial Sequence
  Description of Artificial Sequence: Synthetic oligonucleotide
uaaacccuuauaauaaaauccuucu

SEQ ID NO: 143799 - RNA, 25 nt, Artificial Sequence
  Description of Artificial Sequence: Synthetic oligonucleotide
cauacuauuagccaaugcuguagac

SEQ ID NO: 143800 - RNA, 25 nt, Artificial Sequence
  Description of Artificial Sequence: Synthetic oligonucleotide
gacagaagcauuuugauaggaauag

SEQ ID NO: 143801 - RNA, 25 nt, Artificial Sequence
  Description of Artificial Sequence: Synthetic oligonucleotide
agagcaaauaagauaauggcccuga

SEQ ID NO: 143802 - RNA, 25 nt, Artificial Sequence
  Description of Artificial Sequence: Synthetic oligonucleotide
ccaacauuuuucucuuccucaagca

SEQ ID NO: 143803 - RNA, 25 nt, Artificial Sequence
  Description of Artificial Sequence: Synthetic oligonucleotide
uuaaguaugagaaaaguucagccca

SEQ ID NO: 143804 - RNA, 25 nt, Artificial Sequence
  Description of Artificial Sequence: Synthetic oligonucleotide
caggaauaaagauggcugcugaacc

SEQ ID NO: 143805 - RNA, 25 nt, Artificial Sequence
  Description of Artificial Sequence: Synthetic oligonucleotide
aauuugaaugaccaaguucucuuca

SEQ ID NO: 143806 - RNA, 25 nt, Artificial Sequence
  Description of Artificial Sequence: Synthetic oligonucleotide
auguauaaagauagccagccuagag

SEQ ID NO: 143807 - RNA, 25 nt, Artificial Sequence
  Description of Artificial Sequence: Synthetic oligonucleotide
ggcuguaacuaucucugugaagugu

SEQ ID NO: 143808 - RNA, 25 nt, Artificial Sequence
  Description of Artificial Sequence: Synthetic oligonucleotide
ucugugaagugugagaaaauuucaa

SEQ ID NO: 143809 - RNA, 25 nt, Artificial Sequence
  Description of Artificial Sequence: Synthetic oligonucleotide
ccuuuaaggaaaugaauccuccuga

SEQ ID NO: 143810 - RNA, 25 nt, Artificial Sequence
  Description of Artificial Sequence: Synthetic oligonucleotide
aaggauacaaaaagugacaucauau

SEQ ID NO: 143811 - RNA, 25 nt, Artificial Sequence
  Description of Artificial Sequence: Synthetic oligonucleotide
agaugcaauuugaaucuucaucaua

SEQ ID NO: 143812 - RNA, 25 nt, Artificial Sequence
  Description of Artificial Sequence: Synthetic oligonucleotide
guucaaaacgaagacuagcuauuaa

SEQ ID NO: 143813 - RNA, 25 nt, Artificial Sequence
  Description of Artificial Sequence: Synthetic oligonucleotide
gugaaaccucaucucuacuaaaaau

SEQ ID NO: 143814 - RNA, 25 nt, Artificial Sequence
  Description of Artificial Sequence: Synthetic oligonucleotide
acgaaagagaagcucuaucucgccu

SEQ ID NO: 143815 - RNA, 25 nt, Artificial Sequence
  Description of Artificial Sequence: Synthetic oligonucleotide
cuccacaagcgccuucgguccaguu

SEQ ID NO: 143816 - RNA, 25 nt, Artificial Sequence
  Description of Artificial Sequence: Synthetic oligonucleotide
gagaagauuccaaagauguagccgc

SEQ ID NO: 143817 - RNA, 25 nt, Artificial Sequence
  Description of Artificial Sequence: Synthetic oligonucleotide
aaucuggauucaaugaggagacuug

SEQ ID NO: 143818 - RNA, 25 nt, Artificial Sequence
  Description of Artificial Sequence: Synthetic oligonucleotide
agaacagauuugagaguagugagga

SEQ ID NO: 143819 - RNA, 25 nt, Artificial Sequence
  Description of Artificial Sequence: Synthetic oligonucleotide
ccagagcugugcagaugaguacaaa

SEQ ID NO: 143820 - RNA, 25 nt, Artificial Sequence
  Description of Artificial Sequence: Synthetic oligonucleotide
ccucagauuguuguuguuaaugggc

SEQ ID NO: 143821 - RNA, 25 nt, Artificial Sequence
  Description of Artificial Sequence: Synthetic oligonucleotide
cuauuuuaauuauuuuuaauuuauu

SEQ ID NO: 143822 - RNA, 25 nt, Artificial Sequence
  Description of Artificial Sequence: Synthetic oligonucleotide
uuuaauuuauuaauauuuaaauaug

SEQ ID NO: 143823 - RNA, 25 nt, Artificial Sequence
  Description of Artificial Sequence: Synthetic oligonucleotide
augcaguuugaauauccuuuguuuc

SEQ ID NO: 143824 - RNA, 25 nt, Artificial Sequence
  Description of Artificial Sequence: Synthetic oligonucleotide
caugcugcuggcgucuaaguguuug

SEQ ID NO: 143825 - RNA, 25 nt, Artificial Sequence
  Description of Artificial Sequence: Synthetic oligonucleotide
agaugugcauuucaccugugacaaa

SEQ ID NO: 143826 - RNA, 25 nt, Artificial Sequence
  Description of Artificial Sequence: Synthetic oligonucleotide
ucaaaaccugugccaggcugaauua

SEQ ID NO: 143827 - RNA, 25 nt, Artificial Sequence
  Description of Artificial Sequence: Synthetic oligonucleotide
gaauguggguagucauucuuacaau

SEQ ID NO: 143828 - RNA, 25 nt, Artificial Sequence
  Description of Artificial Sequence: Synthetic oligonucleotide
auguggguagucauucuuacaauug

SEQ ID NO: 143829 - RNA, 25 nt, Artificial Sequence
  Description of Artificial Sequence: Synthetic oligonucleotide
ugaaaaugagcaucagagaguguac

SEQ ID NO: 143830 - RNA, 25 nt, Artificial Sequence
  Description of Artificial Sequence: Synthetic oligonucleotide
uugcuuuucauguagaacucagcag

SEQ ID NO: 143831 - RNA, 25 nt, Artificial Sequence
  Description of Artificial Sequence: Synthetic oligonucleotide
uguauuucuauauuuauuuucagua

SEQ ID NO: 143832 - RNA, 25 nt, Artificial Sequence
  Description of Artificial Sequence: Synthetic oligonucleotide
uuugauuaauguuucuuaaauggaa

SEQ ID NO: 143833 - RNA, 25 nt, Artificial Sequence
  Description of Artificial Sequence: Synthetic oligonucleotide
caacguguauagugccuaaaauugu

SEQ ID NO: 143834 - RNA, 25 nt, Artificial Sequence
  Description of Artificial Sequence: Synthetic oligonucleotide
cauauccuuggcuacuaacaucugg

SEQ ID NO: 143835 - RNA, 25 nt, Artificial Sequence
  Description of Artificial Sequence: Synthetic oligonucleotide
uacuaacaucuggagacugugagcu

SEQ ID NO: 143836 - RNA, 25 nt, Artificial Sequence
  Description of Artificial Sequence: Synthetic oligonucleotide
cauaaguugugugcuuuuuauuaau

SEQ ID NO: 143837 - RNA, 25 nt, Artificial Sequence
  Description of Artificial Sequence: Synthetic oligonucleotide
gcaucauuuuggcucuucuuacauu

SEQ ID NO: 143838 - RNA, 25 nt, Artificial Sequence
  Description of Artificial Sequence: Synthetic oligonucleotide
gcucuucuuacauuuguaaaaaugu

SEQ ID NO: 143839 - RNA, 25 nt, Artificial Sequence
  Description of Artificial Sequence: Synthetic oligonucleotide
agauuaggucaucuuaauucauauu

SEQ ID NO: 143840 - RNA, 25 nt, Artificial Sequence
  Description of Artificial Sequence: Synthetic oligonucleotide
auggaauugaaagaacuaaucauga

SEQ ID NO: 143841 - RNA, 25 nt, Artificial Sequence
  Description of Artificial Sequence: Synthetic oligonucleotide
cacacucauuccuucugcucuuggg

SEQ ID NO: 143842 - RNA, 25 nt, Artificial Sequence
  Description of Artificial Sequence: Synthetic oligonucleotide
uguagagguaaccaguagcuuugag

SEQ ID NO: 143843 - RNA, 25 nt, Artificial Sequence
  Description of Artificial Sequence: Synthetic oligonucleotide
caaccacaugccacguaauauuuca

SEQ ID NO: 143844 - RNA, 25 nt, Artificial Sequence
  Description of Artificial Sequence: Synthetic oligonucleotide
ucggaaacaaguuauucucuucacu

SEQ ID NO: 143845 - RNA, 25 nt, Artificial Sequence
  Description of Artificial Sequence: Synthetic oligonucleotide
acucccaauaacuaaugcuaagaaa

SEQ ID NO: 143846 - RNA, 25 nt, Artificial Sequence
  Description of Artificial Sequence: Synthetic oligonucleotide
aaugcuaagaaaugcugaaaaucaa

SEQ ID NO: 143847 - RNA, 25 nt, Artificial Sequence
  Description of Artificial Sequence: Synthetic oligonucleotide
gucuuucucuaaauaugauuacuuu

SEQ ID NO: 143848 - RNA, 25 nt, Artificial Sequence
  Description of Artificial Sequence: Synthetic oligonucleotide
ugaauuucaggcauuuuguucuaca

SEQ ID NO: 143849 - RNA, 25 nt, Artificial Sequence
  Description of Artificial Sequence: Synthetic oligonucleotide
cgauucccucucacccgggacucuc

SEQ ID NO: 143850 - RNA, 25 nt, Artificial Sequence
  Description of Artificial Sequence: Synthetic oligonucleotide
aggaaagugaaccuuuaaaguaaag

SEQ ID NO: 143851 - RNA, 25 nt, Artificial Sequence
  Description of Artificial Sequence: Synthetic oligonucleotide
gaggcugcaugcucuggaagccugg

SEQ ID NO: 143852 - RNA, 25 nt, Artificial Sequence
  Description of Artificial Sequence: Synthetic oligonucleotide
ucucugaacagaaaacaaaagagag

SEQ ID NO: 143853 - RNA, 25 nt, Artificial Sequence
  Description of Artificial Sequence: Synthetic oligonucleotide
aacuuggcuguaaucaguuaugccg

SEQ ID NO: 143854 - RNA, 25 nt, Artificial Sequence
  Description of Artificial Sequence: Synthetic oligonucleotide
agaagccaaaauuaaaagaagucca

SEQ ID NO: 143855 - RNA, 25 nt, Artificial Sequence
  Description of Artificial Sequence: Synthetic oligonucleotide
auuaaaagaaguccaggugagguua

SEQ ID NO: 143856 - RNA, 25 nt, Artificial Sequence
  Description of Artificial Sequence: Synthetic oligonucleotide
gaauccggauuaucgggaagaggac

SEQ ID NO: 143857 - RNA, 25 nt, Artificial Sequence
  Description of Artificial Sequence: Synthetic oligonucleotide
aaugugacaucaaagcaaguauugu

SEQ ID NO: 143858 - RNA, 25 nt, Artificial Sequence
  Description of Artificial Sequence: Synthetic oligonucleotide
caucaaagcaaguauuguagcacuc

SEQ ID NO: 143859 - RNA, 25 nt, Artificial Sequence
  Description of Artificial Sequence: Synthetic oligonucleotide
agagagagaaaacaaaaccacaaau

SEQ ID NO: 143860 - RNA, 25 nt, Artificial Sequence
  Description of Artificial Sequence: Synthetic oligonucleotide
ucgcuguaguauuuaagcccauaca

SEQ ID NO: 143861 - RNA, 25 nt, Artificial Sequence
  Description of Artificial Sequence: Synthetic oligonucleotide
cgcuguaguauuuaagcccauacag

SEQ ID NO: 143862 - RNA, 25 nt, Artificial Sequence
  Description of Artificial Sequence: Synthetic oligonucleotide
auuuaagcccauacagaaaccuucc

SEQ ID NO: 143863 - RNA, 25 nt, Artificial Sequence
  Description of Artificial Sequence: Synthetic oligonucleotide
auuaaaauaaacaugguauaccuac

SEQ ID NO: 143864 - RNA, 25 nt, Artificial Sequence
  Description of Artificial Sequence: Synthetic oligonucleotide
cuguucugaucggccaguuuucgga

SEQ ID NO: 143865 - RNA, 25 nt, Artificial Sequence
  Description of Artificial Sequence: Synthetic oligonucleotide
aaauaauuugaacuuuggaacaggg

SEQ ID NO: 143866 - RNA, 25 nt, Artificial Sequence
  Description of Artificial Sequence: Synthetic oligonucleotide
ugcgaccuuaauuuaacuuuccagu

SEQ ID NO: 143867 - RNA, 25 nt, Artificial Sequence
  Description of Artificial Sequence: Synthetic oligonucleotide
cugagaaagcuaaaguuugguuuug

SEQ ID NO: 143868 - RNA, 25 nt, Artificial Sequence
  Description of Artificial Sequence: Synthetic oligonucleotide
aguaaagaugcuacuucccacugua

SEQ ID NO: 143869 - RNA, 25 nt, Artificial Sequence
  Description of Artificial Sequence: Synthetic oligonucleotide
cugcuuaauugcugauaccauauga

SEQ ID NO: 143870 - RNA, 25 nt, Artificial Sequence
  Description of Artificial Sequence: Synthetic oligonucleotide
uaccauaugaaugaaacaugggcug

SEQ ID NO: 143871 - RNA, 25 nt, Artificial Sequence
  Description of Artificial Sequence: Synthetic oligonucleotide
aacuuucuuauccaacuuuuucaua

SEQ ID NO: 143872 - RNA, 25 nt, Artificial Sequence
  Description of Artificial Sequence: Synthetic oligonucleotide
ccuugcaugacaucaugaggccgga

SEQ ID NO: 143873 - RNA, 25 nt, Artificial Sequence
  Description of Artificial Sequence: Synthetic oligonucleotide
ugaauuuguauaugacugcauuugu

SEQ ID NO: 143874 - RNA, 25 nt, Artificial Sequence
  Description of Artificial Sequence: Synthetic oligonucleotide
gaauccuaguagaauguuuacuacc

SEQ ID NO: 143875 - RNA, 25 nt, Artificial Sequence
  Description of Artificial Sequence: Synthetic oligonucleotide
gaaagggaagaauuuuuugaugaaa

SEQ ID NO: 143876 - RNA, 25 nt, Artificial Sequence
  Description of Artificial Sequence: Synthetic oligonucleotide
uaucggcaugccagugugugaauuu

SEQ ID NO: 143877 - RNA, 25 nt, Artificial Sequence
  Description of Artificial Sequence: Synthetic oligonucleotide
caccucauaguagagcaauguaugu

SEQ ID NO: 143878 - RNA, 25 nt, Artificial Sequence
  Description of Artificial Sequence: Synthetic oligonucleotide
ccagaauugccaaagcacauauaua

SEQ ID NO: 143879 - RNA, 25 nt, Artificial Sequence
  Description of Artificial Sequence: Synthetic oligonucleotide
uggugaucuggguaauaguuucucc

SEQ ID NO: 143880 - RNA, 25 nt, Artificial Sequence
  Description of Artificial Sequence: Synthetic oligonucleotide
gaucuggguaauaguuucuccaaau

SEQ ID NO: 143881 - RNA, 25 nt, Artificial Sequence
  Description of Artificial Sequence: Synthetic oligonucleotide
ggaugugaugaauacuuccuagaaa

SEQ ID NO: 143882 - RNA, 25 nt, Artificial Sequence
  Description of Artificial Sequence: Synthetic oligonucleotide
cauuuccacagcuacaccauauaug

SEQ ID NO: 143883 - RNA, 25 nt, Artificial Sequence
  Description of Artificial Sequence: Synthetic oligonucleotide
acagcuacaccauauaugaauggag

SEQ ID NO: 143884 - RNA, 25 nt, Artificial Sequence
  Description of Artificial Sequence: Synthetic oligonucleotide
ugcaguucuuacacgagaagaagau

SEQ ID NO: 143885 - RNA, 25 nt, Artificial Sequence
  Description of Artificial Sequence: Synthetic oligonucleotide
acgagaagaagaucauuuacaggga

SEQ ID NO: 143886 - RNA, 25 nt, Artificial Sequence
  Description of Artificial Sequence: Synthetic oligonucleotide
cgagaagaagaucauuuacagggac

SEQ ID NO: 143887 - RNA, 25 nt, Artificial Sequence
  Description of Artificial Sequence: Synthetic oligonucleotide
aagaagaucauuuacagggaccuga

SEQ ID NO: 143888 - RNA, 25 nt, Artificial Sequence
  Description of Artificial Sequence: Synthetic oligonucleotide
agaggaagagguguuugacugcauc

SEQ ID NO: 143889 - RNA, 25 nt, Artificial Sequence
  Description of Artificial Sequence: Synthetic oligonucleotide
gaggaagagguguuugacugcaucg

SEQ ID NO: 143890 - RNA, 25 nt, Artificial Sequence
  Description of Artificial Sequence: Synthetic oligonucleotide
cuacuuugagggcgaguucacaggg

SEQ ID NO: 143891 - RNA, 25 nt, Artificial Sequence
  Description of Artificial Sequence: Synthetic oligonucleotide
agggcaucuccuggcaccucugucc

SEQ ID NO: 143892 - RNA, 25 nt, Artificial Sequence
  Description of Artificial Sequence: Synthetic oligonucleotide
ggagugauaugguuugucuuuuuaa

SEQ ID NO: 143893 - RNA, 25 nt, Artificial Sequence
  Description of Artificial Sequence: Synthetic oligonucleotide
gagugauaugguuugucuuuuuaag

SEQ ID NO: 143894 - RNA, 25 nt, Artificial Sequence
  Description of Artificial Sequence: Synthetic oligonucleotide
ugcaguaaagauccuaaagguuguc

SEQ ID NO: 143895 - RNA, 25 nt, Artificial Sequence
  Description of Artificial Sequence: Synthetic oligonucleotide
aguaaagauccuaaagguugucgac

SEQ ID NO: 143896 - RNA, 25 nt, Artificial Sequence
  Description of Artificial Sequence: Synthetic oligonucleotide
ugacaaaggacaaccuggcaauugu

SEQ ID NO: 143897 - RNA, 25 nt, Artificial Sequence
  Description of Artificial Sequence: Synthetic oligonucleotide
gcaauugugacccaguggugcgagg

SEQ ID NO: 143898 - RNA, 25 nt, Artificial Sequence
  Description of Artificial Sequence: Synthetic oligonucleotide
aacaucauccauagagacaugaaau

SEQ ID NO: 143899 - RNA, 25 nt, Artificial Sequence
  Description of Artificial Sequence: Synthetic oligonucleotide
ugaaauccaacaauauauuucucca

SEQ ID NO: 143900 - RNA, 25 nt, Artificial Sequence
  Description of Artificial Sequence: Synthetic oligonucleotide
aacaauauauuucuccaugaaggcu

SEQ ID NO: 143901 - RNA, 25 nt, Artificial Sequence
  Description of Artificial Sequence: Synthetic oligonucleotide
aacaguaaagucacgcuggaguggu

SEQ ID NO: 143902 - RNA, 25 nt, Artificial Sequence
  Description of Artificial Sequence: Synthetic oligonucleotide
ugugaagaaaguaaaggaagagagg

SEQ ID NO: 143903 - RNA, 25 nt, Artificial Sequence
  Description of Artificial Sequence: Synthetic oligonucleotide
cuuccgagccauccuugcaucgggc

SEQ ID NO: 143904 - RNA, 25 nt, Artificial Sequence
  Description of Artificial Sequence: Synthetic oligonucleotide
aauggagguugaauauccuacugug

SEQ ID NO: 143905 - RNA, 25 nt, Artificial Sequence
  Description of Artificial Sequence: Synthetic oligonucleotide
ggagguugaauauccuacuguguaa

SEQ ID NO: 143906 - RNA, 25 nt, Artificial Sequence
  Description of Artificial Sequence: Synthetic oligonucleotide
auuuugaguuuucccuuguagugua

SEQ ID NO: 143907 - RNA, 25 nt, Artificial Sequence
  Description of Artificial Sequence: Synthetic oligonucleotide
uauccuguuuguucuuuguugauug

SEQ ID NO: 143908 - RNA, 25 nt, Artificial Sequence
  Description of Artificial Sequence: Synthetic oligonucleotide
ccuguuuguucuuuguugauugaaa

SEQ ID NO: 143909 - RNA, 25 nt, Artificial Sequence
  Description of Artificial Sequence: Synthetic oligonucleotide
cucuacagccuucuuuuucuuccau

SEQ ID NO: 143910 - RNA, 25 nt, Artificial Sequence
  Description of Artificial Sequence: Synthetic oligonucleotide
ucuuccauagcuaaucuuccuucua

SEQ ID NO: 143911 - RNA, 25 nt, Artificial Sequence
  Description of Artificial Sequence: Synthetic oligonucleotide
auaaucuuccuguugaaugcuucau

SEQ ID NO: 143912 - RNA, 25 nt, Artificial Sequence
  Description of Artificial Sequence: Synthetic oligonucleotide
uaaucuuccuguugaaugcuucaug

SEQ ID NO: 143913 - RNA, 25 nt, Artificial Sequence
  Description of Artificial Sequence: Synthetic oligonucleotide
cuucaugacuugaauucuacuuuga

SEQ ID NO: 143914 - RNA, 25 nt, Artificial Sequence
  Description of Artificial Sequence: Synthetic oligonucleotide
aagagggagagaagcaacuacagac

SEQ ID NO: 143915 - RNA, 25 nt, Artificial Sequence
  Description of Artificial Sequence: Synthetic oligonucleotide
cgucuccuaccagaccaaggucaac

SEQ ID NO: 143916 - RNA, 25 nt, Artificial Sequence
  Description of Artificial Sequence: Synthetic oligonucleotide
gaucaaucggcccgacuaucucgac

SEQ ID NO: 143917 - RNA, 25 nt, Artificial Sequence
  Description of Artificial Sequence: Synthetic oligonucleotide
ggacgaacauccaaccuucccaaac

SEQ ID NO: 143918 - RNA, 25 nt, Artificial Sequence
  Description of Artificial Sequence: Synthetic oligonucleotide
agggucggaacccaagcuuagaacu

SEQ ID NO: 143919 - RNA, 25 nt, Artificial Sequence
  Description of Artificial Sequence: Synthetic oligonucleotide
ucggaacccaagcuuagaacuuuaa

SEQ ID NO: 143920 - RNA, 25 nt, Artificial Sequence
  Description of Artificial Sequence: Synthetic oligonucleotide
acccaagcuuagaacuuuaagcaac

SEQ ID NO: 143921 - RNA, 25 nt, Artificial Sequence
  Description of Artificial Sequence: Synthetic oligonucleotide
gaacuuuaagcaacaagaccaccac

SEQ ID NO: 143922 - RNA, 25 nt, Artificial Sequence
  Description of Artificial Sequence: Synthetic oligonucleotide
acuauucaguggcgagaaauaaagu

SEQ ID NO: 143923 - RNA, 25 nt, Artificial Sequence
  Description of Artificial Sequence: Synthetic oligonucleotide
cuauucaguggcgagaaauaaaguu

SEQ ID NO: 143924 - RNA, 25 nt, Artificial Sequence
  Description of Artificial Sequence: Synthetic oligonucleotide
aaacacagauaacaggaaaugaucc

SEQ ID NO: 143925 - RNA, 25 nt, Artificial Sequence
  Description of Artificial Sequence: Synthetic oligonucleotide
cuuaagaaaagagaagaaaugaaac

SEQ ID NO: 143926 - RNA, 25 nt, Artificial Sequence
  Description of Artificial Sequence: Synthetic oligonucleotide
cugaaggaguguguuuccauccucc

SEQ ID NO: 143927 - RNA, 25 nt, Artificial Sequence
  Description of Artificial Sequence: Synthetic oligonucleotide
ucaccgcgggacugaaaaucuuuga

SEQ ID NO: 143928 - RNA, 25 nt, Artificial Sequence
  Description of Artificial Sequence: Synthetic oligonucleotide
agcagaaauaagcgugccguucagg

SEQ ID NO: 143929 - RNA, 25 nt, Artificial Sequence
  Description of Artificial Sequence: Synthetic oligonucleotide
aagcgugccguucaggguccagaag

SEQ ID NO: 143930 - RNA, 25 nt, Artificial Sequence
  Description of Artificial Sequence: Synthetic oligonucleotide
agaaacagucacucaagacugcuug

SEQ ID NO: 143931 - RNA, 25 nt, Artificial Sequence
  Description of Artificial Sequence: Synthetic oligonucleotide
agaggaagaagguccaugucuuugg

SEQ ID NO: 143932 - RNA, 25 nt, Artificial Sequence
  Description of Artificial Sequence: Synthetic oligonucleotide
uguauucaaaauaugccugaaacac

SEQ ID NO: 143933 - RNA, 25 nt, Artificial Sequence
  Description of Artificial Sequence: Synthetic oligonucleotide
auuuuccucccuuucucuguaccuc

SEQ ID NO: 143934 - RNA, 25 nt, Artificial Sequence
  Description of Artificial Sequence: Synthetic oligonucleotide
caaagaaagauagagcaagacaaga

SEQ ID NO: 143935 - RNA, 25 nt, Artificial Sequence
  Description of Artificial Sequence: Synthetic oligonucleotide
aagaaagauagagcaagacaagaaa

SEQ ID NO: 143936 - RNA, 25 nt, Artificial Sequence
  Description of Artificial Sequence: Synthetic oligonucleotide
gaaagcauuuguuuguacaagaucc

SEQ ID NO: 143937 - RNA, 25 nt, Artificial Sequence
  Description of Artificial Sequence: Synthetic oligonucleotide
ugaguuaaacgaacguacuugcaga

SEQ ID NO: 143938 - RNA, 25 nt, Artificial Sequence
  Description of Artificial Sequence: Synthetic oligonucleotide
acugauacagaacgaucgauacaga

SEQ ID NO: 143939 - RNA, 25 nt, Artificial Sequence
  Description of Artificial Sequence: Synthetic oligonucleotide
auauuauauauauauaaaaauaaau

SEQ ID NO: 143940 - RNA, 25 nt, Artificial Sequence
  Description of Artificial Sequence: Synthetic oligonucleotide
auuauauauauauaaaaauaaauau

SEQ ID NO: 143941 - RNA, 25 nt, Artificial Sequence
  Description of Artificial Sequence: Synthetic oligonucleotide
ucacuggauguauuugacugcugug

SEQ ID NO: 143942 - RNA, 25 nt, Artificial Sequence
  Description of Artificial Sequence: Synthetic oligonucleotide
cagggaagaggaggagaugagagac

SEQ ID NO: 143943 - RNA, 25 nt, Artificial Sequence
  Description of Artificial Sequence: Synthetic oligonucleotide
augaucuuuuuuuugucccacuugg

SEQ ID NO: 143944 - RNA, 27 nt, Artificial Sequence
  Description of Artificial Sequence: Synthetic oligonucleotide
ggccgugaacuccucaucaaaauaccu

SEQ ID NO: 143945 - RNA, 27 nt, Artificial Sequence
  Description of Artificial Sequence: Synthetic oligonucleotide
uggugugauggugaucaucugggccgu

SEQ ID NO: 143946 - RNA, 27 nt, Artificial Sequence
  Description of Artificial Sequence: Synthetic oligonucleotide
aaacccgcaggauaguuuucuucccua

SEQ ID NO: 143947 - RNA, 27 nt, Artificial Sequence
  Description of Artificial Sequence: Synthetic oligonucleotide
caaacuggaugaaauaaauuaaaaccc

SEQ ID NO: 143948 - RNA, 27 nt, Artificial Sequence
  Description of Artificial Sequence: Synthetic oligonucleotide
agaaguccuuaacauuucccuacguga

SEQ ID NO: 143949 - RNA, 27 nt, Artificial Sequence
  Description of Artificial Sequence: Synthetic oligonucleotide
cucugucccacuggguaaacccuggcc

SEQ ID NO: 143950 - RNA, 27 nt, Artificial Sequence
  Description of Artificial Sequence: Synthetic oligonucleotide
cacaauaacaaauuuaaaccuugcucc

SEQ ID NO: 143951 - RNA, 27 nt, Artificial Sequence
  Description of Artificial Sequence: Synthetic oligonucleotide
aaaugcauuugaacaacauaauacaca

SEQ ID NO: 143952 - RNA, 27 nt, Artificial Sequence
  Description of Artificial Sequence: Synthetic oligonucleotide
ggcuuuccugucacaaagauuaaaaac

SEQ ID NO: 143953 - RNA, 27 nt, Artificial Sequence
  Description of Artificial Sequence: Synthetic oligonucleotide
agggcuuuccugucacaaagauuaaaa

SEQ ID NO: 143954 - RNA, 27 nt, Artificial Sequence
  Description of Artificial Sequence: Synthetic oligonucleotide
ggccaugcugggagacauaagcagcag

SEQ ID NO: 143955 - RNA, 27 nt, Artificial Sequence
  Description of Artificial Sequence: Synthetic oligonucleotide
ucagggagaagcuucugaaacacuucu

SEQ ID NO: 143956 - RNA, 27 nt, Artificial Sequence
  Description of Artificial Sequence: Synthetic oligonucleotide
aagggcuucuuccuuauugauggucag

SEQ ID NO: 143957 - RNA, 27 nt, Artificial Sequence
  Description of Artificial Sequence: Synthetic oligonucleotide
ugaagggcuucuuccuuauugaugguc

SEQ ID NO: 143958 - RNA, 27 nt, Artificial Sequence
  Description of Artificial Sequence: Synthetic oligonucleotide
cgcugaagggcuucuuccuuauugaug

SEQ ID NO: 143959 - RNA, 27 nt, Artificial Sequence
  Description of Artificial Sequence: Synthetic oligonucleotide
gccgcugaagggcuucuuccuuauuga

SEQ ID NO: 143960 - RNA, 27 nt, Artificial Sequence
  Description of Artificial Sequence: Synthetic oligonucleotide
acuggccgcugaagggcuucuuccuua

SEQ ID NO: 143961 - RNA, 27 nt, Artificial Sequence
  Description of Artificial Sequence: Synthetic oligonucleotide
cggagcuuuucaccuuuaguuaugcuu

SEQ ID NO: 143962 - RNA, 27 nt, Artificial Sequence
  Description of Artificial Sequence: Synthetic oligonucleotide
ccggagcuuuucaccuuuaguuaugcu

SEQ ID NO: 143963 - RNA, 27 nt, Artificial Sequence
  Description of Artificial Sequence: Synthetic oligonucleotide
cagacuguugacuggcgugauguaguu

SEQ ID NO: 143964 - RNA, 27 nt, Artificial Sequence
  Description of Artificial Sequence: Synthetic oligonucleotide
cuuuugaacucugcuuaaauccagugg

SEQ ID NO: 143965 - RNA, 27 nt, Artificial Sequence
  Description of Artificial Sequence: Synthetic oligonucleotide
gcuuuugaacucugcuuaaauccagug

SEQ ID NO: 143966 - RNA, 27 nt, Artificial Sequence
  Description of Artificial Sequence: Synthetic oligonucleotide
agggcuuuugaacucugcuuaaaucca

SEQ ID NO: 143967 - RNA, 27 nt, Artificial Sequence
  Description of Artificial Sequence: Synthetic oligonucleotide
aagggcuuuugaacucugcuuaaaucc

SEQ ID NO: 143968 - RNA, 27 nt, Artificial Sequence
  Description of Artificial Sequence: Synthetic oligonucleotide
ugaagggcuuuugaacucugcuuaaau

SEQ ID NO: 143969 - RNA, 27 nt, Artificial Sequence
  Description of Artificial Sequence: Synthetic oligonucleotide
cugaagggcuuuugaacucugcuuaaa

SEQ ID NO: 143970 - RNA, 27 nt, Artificial Sequence
  Description of Artificial Sequence: Synthetic oligonucleotide
cgcugaagggcuuuugaacucugcuua

SEQ ID NO: 143971 - RNA, 27 nt, Artificial Sequence
  Description of Artificial Sequence: Synthetic oligonucleotide
cgagcggcuucacucagacccugaggc

SEQ ID NO: 143972 - RNA, 27 nt, Artificial Sequence
  Description of Artificial Sequence: Synthetic oligonucleotide
uugacuggcgugauguaguugcuuggg

SEQ ID NO: 143973 - RNA, 27 nt, Artificial Sequence
  Description of Artificial Sequence: Synthetic oligonucleotide
cacgcaccaagaagcugccauugaucc

SEQ ID NO: 143974 - RNA, 27 nt, Artificial Sequence
  Description of Artificial Sequence: Synthetic oligonucleotide
cugaugaauccaaugugggcuggaauc

SEQ ID NO: 143975 - RNA, 27 nt, Artificial Sequence
  Description of Artificial Sequence: Synthetic oligonucleotide
cuuagguauuccacauucucagcugug

SEQ ID NO: 143976 - RNA, 27 nt, Artificial Sequence
  Description of Artificial Sequence: Synthetic oligonucleotide
ugagccucaaauuaggagauacguuuu

SEQ ID NO: 143977 - RNA, 27 nt, Artificial Sequence
  Description of Artificial Sequence: Synthetic oligonucleotide
ccaauuguagagaaauuauuuuaggaa

SEQ ID NO: 143978 - RNA, 27 nt, Artificial Sequence
  Description of Artificial Sequence: Synthetic oligonucleotide
ggcuccuaacuagcugaaucuuccaau

SEQ ID NO: 143979 - RNA, 27 nt, Artificial Sequence
  Description of Artificial Sequence: Synthetic oligonucleotide
guggauauugacuaggagaguuuaaaa

SEQ ID NO: 143980 - RNA, 27 nt, Artificial Sequence
  Description of Artificial Sequence: Synthetic oligonucleotide
ugugacugaacauaacuguaggcugaa

SEQ ID NO: 143981 - RNA, 27 nt, Artificial Sequence
  Description of Artificial Sequence: Synthetic oligonucleotide
guaugugugugugacugaacauaacug

SEQ ID NO: 143982 - RNA, 27 nt, Artificial Sequence
  Description of Artificial Sequence: Synthetic oligonucleotide
aagcaaaaggaacauuuuguaugugug

SEQ ID NO: 143983 - RNA, 27 nt, Artificial Sequence
  Description of Artificial Sequence: Synthetic oligonucleotide
aaaaauuacuuuaaaagcaaaaggaac

SEQ ID NO: 143984 - RNA, 27 nt, Artificial Sequence
  Description of Artificial Sequence: Synthetic oligonucleotide
ccauugacuguugcuucacaggucaga

SEQ ID NO: 143985 - RNA, 27 nt, Artificial Sequence
  Description of Artificial Sequence: Synthetic oligonucleotide
auugguuugucgaugugugagauaguu

SEQ ID NO: 143986 - RNA, 27 nt, Artificial Sequence
  Description of Artificial Sequence: Synthetic oligonucleotide
agugguagcaguacaauugaggacaag

SEQ ID NO: 143987 - RNA, 27 nt, Artificial Sequence
  Description of Artificial Sequence: Synthetic oligonucleotide
uaagaccgcuugccagcuacgguuuca

SEQ ID NO: 143988 - RNA, 27 nt, Artificial Sequence
  Description of Artificial Sequence: Synthetic oligonucleotide
agccgguaagaccgcuugccagcuacg

SEQ ID NO: 143989 - RNA, 27 nt, Artificial Sequence
  Description of Artificial Sequence: Synthetic oligonucleotide
gguaacccaucuuuuaaccauacaacu

SEQ ID NO: 143990 - RNA, 27 nt, Artificial Sequence
  Description of Artificial Sequence: Synthetic oligonucleotide
ucgcagguaacccaucuuuuaaccaua

SEQ ID NO: 143991 - RNA, 27 nt, Artificial Sequence
  Description of Artificial Sequence: Synthetic oligonucleotide
cucagcaagauuguauaauucccugca

SEQ ID NO: 143992 - RNA, 27 nt, Artificial Sequence
  Description of Artificial Sequence: Synthetic oligonucleotide
acuguuuuaugcucagcaagauuguau

SEQ ID NO: 143993 - RNA, 27 nt, Artificial Sequence
  Description of Artificial Sequence: Synthetic oligonucleotide
aggauaaaggacucuucauuauuggaa

SEQ ID NO: 143994 - RNA, 27 nt, Artificial Sequence
  Description of Artificial Sequence: Synthetic oligonucleotide
caacuugcguuggaacauccaaagugu

SEQ ID NO: 143995 - RNA, 27 nt, Artificial Sequence
  Description of Artificial Sequence: Synthetic oligonucleotide
augguuucaguuuaguggaagcauuua

SEQ ID NO: 143996 - RNA, 27 nt, Artificial Sequence
  Description of Artificial Sequence: Synthetic oligonucleotide
auauuuaacaaagucaaacuuucucac

SEQ ID NO: 143997 - RNA, 27 nt, Artificial Sequence
  Description of Artificial Sequence: Synthetic oligonucleotide
aacuuuuaauauacaguaguucuuuuc

SEQ ID NO: 143998 - RNA, 27 nt, Artificial Sequence
  Description of Artificial Sequence: Synthetic oligonucleotide
guuaagucaaaacccguauuucuaaag

SEQ ID NO: 143999 - RNA, 27 nt, Artificial Sequence
  Description of Artificial Sequence: Synthetic oligonucleotide
gugcugaguuugcuguacccauguuga

SEQ ID NO: 144000 - RNA, 27 nt, Artificial Sequence
  Description of Artificial Sequence: Synthetic oligonucleotide
ugaggucagcaucuucugugucuuuac

SEQ ID NO: 144001 - RNA, 27 nt, Artificial Sequence
  Description of Artificial Sequence: Synthetic oligonucleotide
gcgaucugaauaaaccucccuacuagc

SEQ ID NO: 144002 - RNA, 27 nt, Artificial Sequence
  Description of Artificial Sequence: Synthetic oligonucleotide
aucccagaacccugcugcagaaggcca

SEQ ID NO: 144003 - RNA, 27 nt, Artificial Sequence
  Description of Artificial Sequence: Synthetic oligonucleotide
cauaauuuccaauauguaccagaccuu

SEQ ID NO: 144004 - RNA, 27 nt, Artificial Sequence
  Description of Artificial Sequence: Synthetic oligonucleotide
cuagugcuuccaucggaaggacuaggu

SEQ ID NO: 144005 - RNA, 27 nt, Artificial Sequence
  Description of Artificial Sequence: Synthetic oligonucleotide
uccacauaaaaacaauauucacuggga

SEQ ID NO: 144006 - RNA, 27 nt, Artificial Sequence
  Description of Artificial Sequence: Synthetic oligonucleotide
ucuaccaauuccaacuugaauucauug

SEQ ID NO: 144007 - RNA, 27 nt, Artificial Sequence
  Description of Artificial Sequence: Synthetic oligonucleotide
ucuccaagucuaaaucuguguccugag

SEQ ID NO: 144008 - RNA, 27 nt, Artificial Sequence
  Description of Artificial Sequence: Synthetic oligonucleotide
uggaauacuguaacugugcuuugagga

SEQ ID NO: 144009 - RNA, 27 nt, Artificial Sequence
  Description of Artificial Sequence: Synthetic oligonucleotide
uuaauucaucagugguggcagugguag

SEQ ID NO: 144010 - RNA, 27 nt, Artificial Sequence
  Description of Artificial Sequence: Synthetic oligonucleotide
gugaugauguggcacuaguaguuucuu

SEQ ID NO: 144011 - RNA, 27 nt, Artificial Sequence
  Description of Artificial Sequence: Synthetic oligonucleotide
ucuguuuggugaggcuguccgacuuug

SEQ ID NO: 144012 - RNA, 27 nt, Artificial Sequence
  Description of Artificial Sequence: Synthetic oligonucleotide
ccaucauguuccauuuuucgcuuucuc

SEQ ID NO: 144013 - RNA, 27 nt, Artificial Sequence
  Description of Artificial Sequence: Synthetic oligonucleotide
gcagucuacaugcuaaaucagagggua

SEQ ID NO: 144014 - RNA, 27 nt, Artificial Sequence
  Description of Artificial Sequence: Synthetic oligonucleotide
cauaaauagauccuuaaauagcucaaa

SEQ ID NO: 144015 - RNA, 27 nt, Artificial Sequence
  Description of Artificial Sequence: Synthetic oligonucleotide
ugauaauagugcuuuuucaccuuuuuc

SEQ ID NO: 144016 - RNA, 27 nt, Artificial Sequence
  Description of Artificial Sequence: Synthetic oligonucleotide
gcagaacugauaauagugcuuuuucac

SEQ ID NO: 144017 - RNA, 27 nt, Artificial Sequence
  Description of Artificial Sequence: Synthetic oligonucleotide
guagguuuaaucuuucuuuucagccau

SEQ ID NO: 144018 - RNA, 27 nt, Artificial Sequence
  Description of Artificial Sequence: Synthetic oligonucleotide
agaaggauuuuauuauaaggguuuaau

SEQ ID NO: 144019 - RNA, 27 nt, Artificial Sequence
  Description of Artificial Sequence: Synthetic oligonucleotide
gucuacagcauuggcuaauaguaugaa

SEQ ID NO: 144020 - RNA, 27 nt, Artificial Sequence
  Description of Artificial Sequence: Synthetic oligonucleotide
cuauuccuaucaaaaugcuucugucua

SEQ ID NO: 144021 - RNA, 27 nt, Artificial Sequence
  Description of Artificial Sequence: Synthetic oligonucleotide
ucagggccauuaucuuauuugcucuau

SEQ ID NO: 144022 - RNA, 27 nt, Artificial Sequence
  Description of Artificial Sequence: Synthetic oligonucleotide
ugcuugaggaagagaaaaauguugguc

SEQ ID NO: 144023 - RNA, 27 nt, Artificial Sequence
  Description of Artificial Sequence: Synthetic oligonucleotide
ugggcugaacuuuucucauacuuaaag

SEQ ID NO: 144024 - RNA, 27 nt, Artificial Sequence
  Description of Artificial Sequence: Synthetic oligonucleotide
gguucagcagccaucuuuauuccugcg

SEQ ID NO: 144025 - RNA, 27 nt, Artificial Sequence
  Description of Artificial Sequence: Synthetic oligonucleotide
ugaagagaacuuggucauucaaauuuc

SEQ ID NO: 144026 - RNA, 27 nt, Artificial Sequence
  Description of Artificial Sequence: Synthetic oligonucleotide
cucuaggcuggcuaucuuuauacauac

SEQ ID NO: 144027 - RNA, 27 nt, Artificial Sequence
  Description of Artificial Sequence: Synthetic oligonucleotide
acacuucacagagauaguuacagccau

SEQ ID NO: 144028 - RNA, 27 nt, Artificial Sequence
  Description of Artificial Sequence: Synthetic oligonucleotide
uugaaauuuucucacacuucacagaga

SEQ ID NO: 144029 - RNA, 27 nt, Artificial Sequence
  Description of Artificial Sequence: Synthetic oligonucleotide
ucaggaggauucauuuccuuaaaggaa

SEQ ID NO: 144030 - RNA, 27 nt, Artificial Sequence
  Description of Artificial Sequence: Synthetic oligonucleotide
auaugaugucacuuuuuguauccuuga

SEQ ID NO: 144031 - RNA, 27 nt, Artificial Sequence
  Description of Artificial Sequence: Synthetic oligonucleotide
uaugaugaagauucaaauugcaucuua

SEQ ID NO: 144032 - RNA, 27 nt, Artificial Sequence
  Description of Artificial Sequence: Synthetic oligonucleotide
uuaauagcuagucuucguuuugaacag

SEQ ID NO: 144033 - RNA, 27 nt, Artificial Sequence
  Description of Artificial Sequence: Synthetic oligonucleotide
auuuuuaguagagaugagguuucacca

SEQ ID NO: 144034 - RNA, 27 nt, Artificial Sequence
  Description of Artificial Sequence: Synthetic oligonucleotide
aggcgagauagagcuucucuuucguuc

SEQ ID NO: 144035 - RNA, 27 nt, Artificial Sequence
  Description of Artificial Sequence: Synthetic oligonucleotide
aacuggaccgaaggcgcuuguggagaa

SEQ ID NO: 144036 - RNA, 27 nt, Artificial Sequence
  Description of Artificial Sequence: Synthetic oligonucleotide
gcggcuacaucuuuggaaucuucuccu

SEQ ID NO: 144037 - RNA, 27 nt, Artificial Sequence
  Description of Artificial Sequence: Synthetic oligonucleotide
caagucuccucauugaauccagauugg

SEQ ID NO: 144038 - RNA, 27 nt, Artificial Sequence
  Description of Artificial Sequence: Synthetic oligonucleotide
uccucacuacucucaaaucuguucugg

SEQ ID NO: 144039 - RNA, 27 nt, Artificial Sequence
  Description of Artificial Sequence: Synthetic oligonucleotide
uuuguacucaucugcacagcucuggcu

SEQ ID NO: 144040 - RNA, 27 nt, Artificial Sequence
  Description of Artificial Sequence: Synthetic oligonucleotide
gcccauuaacaacaacaaucugaggug

SEQ ID NO: 144041 - RNA, 27 nt, Artificial Sequence
  Description of Artificial Sequence: Synthetic oligonucleotide
aauaaauuaaaaauaauuaaaauagug

SEQ ID NO: 144042 - RNA, 27 nt, Artificial Sequence
  Description of Artificial Sequence: Synthetic oligonucleotide
cauauuuaaauauuaauaaauuaaaaa

SEQ ID NO: 144043 - RNA, 27 nt, Artificial Sequence
  Description of Artificial Sequence: Synthetic oligonucleotide
gaaacaaaggauauucaaacugcauag

SEQ ID NO: 144044 - RNA, 27 nt, Artificial Sequence
  Description of Artificial Sequence: Synthetic oligonucleotide
caaacacuuagacgccagcagcauggg

SEQ ID NO: 144045 - RNA, 27 nt, Artificial Sequence
  Description of Artificial Sequence: Synthetic oligonucleotide
uuugucacaggugaaaugcacaucuga

SEQ ID NO: 144046 - RNA, 27 nt, Artificial Sequence
  Description of Artificial Sequence: Synthetic oligonucleotide
uaauucagccuggcacagguuuugauc

SEQ ID NO: 144047 - RNA, 27 nt, Artificial Sequence
  Description of Artificial Sequence: Synthetic oligonucleotide
auuguaagaaugacuacccacauucac

SEQ ID NO: 144048 - RNA, 27 nt, Artificial Sequence
  Description of Artificial Sequence: Synthetic oligonucleotide
caauuguaagaaugacuacccacauuc

SEQ ID NO: 144049 - RNA, 27 nt, Artificial Sequence
  Description of Artificial Sequence: Synthetic oligonucleotide
guacacucucugaugcucauuuucaua

SEQ ID NO: 144050 - RNA, 27 nt, Artificial Sequence
  Description of Artificial Sequence: Synthetic oligonucleotide
cugcugaguucuacaugaaaagcaaau

SEQ ID NO: 144051 - RNA, 27 nt, Artificial Sequence
  Description of Artificial Sequence: Synthetic oligonucleotide
uacugaaaauaaauauagaaauacaac

SEQ ID NO: 144052 - RNA, 27 nt, Artificial Sequence
  Description of Artificial Sequence: Synthetic oligonucleotide
uuccauuuaagaaacauuaaucaaaac

SEQ ID NO: 144053 - RNA, 27 nt, Artificial Sequence
  Description of Artificial Sequence: Synthetic oligonucleotide
acaauuuuaggcacuauacacguuguu

SEQ ID NO: 144054 - RNA, 27 nt, Artificial Sequence
  Description of Artificial Sequence: Synthetic oligonucleotide
ccagauguuaguagccaaggauauggu

SEQ ID NO: 144055 - RNA, 27 nt, Artificial Sequence
  Description of Artificial Sequence: Synthetic oligonucleotide
agcucacagucuccagauguuaguagc

SEQ ID NO: 144056 - RNA, 27 nt, Artificial Sequence
  Description of Artificial Sequence: Synthetic oligonucleotide
auuaauaaaaagcacacaacuuauggc

SEQ ID NO: 144057 - RNA, 27 nt, Artificial Sequence
  Description of Artificial Sequence: Synthetic oligonucleotide
aauguaagaagagccaaaaugaugcau

SEQ ID NO: 144058 - RNA, 27 nt, Artificial Sequence
  Description of Artificial Sequence: Synthetic oligonucleotide
acauuuuuacaaauguaagaagagcca

SEQ ID NO: 144059 - RNA, 27 nt, Artificial Sequence
  Description of Artificial Sequence: Synthetic oligonucleotide
aauaugaauuaagaugaccuaaucugu

SEQ ID NO: 144060 - RNA, 27 nt, Artificial Sequence
  Description of Artificial Sequence: Synthetic oligonucleotide
ucaugauuaguucuuucaauuccaucc

SEQ ID NO: 144061 - RNA, 27 nt, Artificial Sequence
  Description of Artificial Sequence: Synthetic oligonucleotide
cccaagagcagaaggaaugagugugca

SEQ ID NO: 144062 - RNA, 27 nt, Artificial Sequence
  Description of Artificial Sequence: Synthetic oligonucleotide
cucaaagcuacugguuaccucuacacc

SEQ ID NO: 144063 - RNA, 27 nt, Artificial Sequence
  Description of Artificial Sequence: Synthetic oligonucleotide
ugaaauauuacguggcaugugguuggg

SEQ ID NO: 144064 - RNA, 27 nt, Artificial Sequence
  Description of Artificial Sequence: Synthetic oligonucleotide
agugaagagaauaacuuguuuccgaag

SEQ ID NO: 144065 - RNA, 27 nt, Artificial Sequence
  Description of Artificial Sequence: Synthetic oligonucleotide
uuucuuagcauuaguuauugggaguga

SEQ ID NO: 144066 - RNA, 27 nt, Artificial Sequence
  Description of Artificial Sequence: Synthetic oligonucleotide
uugauuuucagcauuucuuagcauuag

SEQ ID NO: 144067 - RNA, 27 nt, Artificial Sequence
  Description of Artificial Sequence: Synthetic oligonucleotide
aaaguaaucauauuuagagaaagacag

SEQ ID NO: 144068 - RNA, 27 nt, Artificial Sequence
  Description of Artificial Sequence: Synthetic oligonucleotide
uguagaacaaaaugccugaaauucagc

SEQ ID NO: 144069 - RNA, 27 nt, Artificial Sequence
  Description of Artificial Sequence: Synthetic oligonucleotide
gagagucccgggugagagggaaucgcc

SEQ ID NO: 144070 - RNA, 27 nt, Artificial Sequence
  Description of Artificial Sequence: Synthetic oligonucleotide
cuuuacuuuaaagguucacuuuccuug

SEQ ID NO: 144071 - RNA, 27 nt, Artificial Sequence
  Description of Artificial Sequence: Synthetic oligonucleotide
ccaggcuuccagagcaugcagccuccu

SEQ ID NO: 144072 - RNA, 27 nt, Artificial Sequence
  Description of Artificial Sequence: Synthetic oligonucleotide
cucucuuuuguuuucuguucagagaaa

SEQ ID NO: 144073 - RNA, 27 nt, Artificial Sequence
  Description of Artificial Sequence: Synthetic oligonucleotide
cggcauaacugauuacagccaaguuca

SEQ ID NO: 144074 - RNA, 27 nt, Artificial Sequence
  Description of Artificial Sequence: Synthetic oligonucleotide
uggacuucuuuuaauuuuggcuucuuc

SEQ ID NO: 144075 - RNA, 27 nt, Artificial Sequence
  Description of Artificial Sequence: Synthetic oligonucleotide
uaaccucaccuggacuucuuuuaauuu

SEQ ID NO: 144076 - RNA, 27 nt, Artificial Sequence
  Description of Artificial Sequence: Synthetic oligonucleotide
guccucuucccgauaauccggauucag

SEQ ID NO: 144077 - RNA, 27 nt, Artificial Sequence
  Description of Artificial Sequence: Synthetic oligonucleotide
acaauacuugcuuugaugucacauuaa

SEQ ID NO: 144078 - RNA, 27 nt, Artificial Sequence
  Description of Artificial Sequence: Synthetic oligonucleotide
gagugcuacaauacuugcuuugauguc

SEQ ID NO: 144079 - RNA, 27 nt, Artificial Sequence
  Description of Artificial Sequence: Synthetic oligonucleotide
auuugugguuuuguuuucucucucucu

SEQ ID NO: 144080 - RNA, 27 nt, Artificial Sequence
  Description of Artificial Sequence: Synthetic oligonucleotide
uguaugggcuuaaauacuacagcgagg

SEQ ID NO: 144081 - RNA, 27 nt, Artificial Sequence
  Description of Artificial Sequence: Synthetic oligonucleotide
cuguaugggcuuaaauacuacagcgag

SEQ ID NO: 144082 - RNA, 27 nt, Artificial Sequence
  Description of Artificial Sequence: Synthetic oligonucleotide
ggaagguuucuguaugggcuuaaauac

SEQ ID NO: 144083 - RNA, 27 nt, Artificial Sequence
  Description of Artificial Sequence: Synthetic oligonucleotide
guagguauaccauguuuauuuuaauac

SEQ ID NO: 144084 - RNA, 27 nt, Artificial Sequence
  Description of Artificial Sequence: Synthetic oligonucleotide
uccgaaaacuggccgaucagaacagcc

SEQ ID NO: 144085 - RNA, 27 nt, Artificial Sequence
  Description of Artificial Sequence: Synthetic oligonucleotide
cccuguuccaaaguucaaauuauuugu

SEQ ID NO: 144086 - RNA, 27 nt, Artificial Sequence
  Description of Artificial Sequence: Synthetic oligonucleotide
acuggaaaguuaaauuaaggucgcaau

SEQ ID NO: 144087 - RNA, 27 nt, Artificial Sequence
  Description of Artificial Sequence: Synthetic oligonucleotide
caaaaccaaacuuuagcuuucucagcc

SEQ ID NO: 144088 - RNA, 27 nt, Artificial Sequence
  Description of Artificial Sequence: Synthetic oligonucleotide
uacagugggaaguagcaucuuuacuuu

SEQ ID NO: 144089 - RNA, 27 nt, Artificial Sequence
  Description of Artificial Sequence: Synthetic oligonucleotide
ucauaugguaucagcaauuaagcagua

SEQ ID NO: 144090 - RNA, 27 nt, Artificial Sequence
  Description of Artificial Sequence: Synthetic oligonucleotide
cagcccauguuucauucauaugguauc

SEQ ID NO: 144091 - RNA, 27 nt, Artificial Sequence
  Description of Artificial Sequence: Synthetic oligonucleotide
uaugaaaaaguuggauaagaaaguugg

SEQ ID NO: 144092 - RNA, 27 nt, Artificial Sequence
  Description of Artificial Sequence: Synthetic oligonucleotide
uccggccucaugaugucaugcaaggcu

SEQ ID NO: 144093 - RNA, 27 nt, Artificial Sequence
  Description of Artificial Sequence: Synthetic oligonucleotide
acaaaugcagucauauacaaauucagg

SEQ ID NO: 144094 - RNA, 27 nt, Artificial Sequence
  Description of Artificial Sequence: Synthetic oligonucleotide
gguaguaaacauucuacuaggauucuu

SEQ ID NO: 144095 - RNA, 27 nt, Artificial Sequence
  Description of Artificial Sequence: Synthetic oligonucleotide
uuucaucaaaaaauucuucccuuucug

SEQ ID NO: 144096 - RNA, 27 nt, Artificial Sequence
  Description of Artificial Sequence: Synthetic oligonucleotide
aaauucacacacuggcaugccgauagc

SEQ ID NO: 144097 - RNA, 27 nt, Artificial Sequence
  Description of Artificial Sequence: Synthetic oligonucleotide
acauacauugcucuacuaugaggugaa

SEQ ID NO: 144098 - RNA, 27 nt, Artificial Sequence
  Description of Artificial Sequence: Synthetic oligonucleotide
uauauaugugcuuuggcaauucuggug

SEQ ID NO: 144099 - RNA, 27 nt, Artificial Sequence
  Description of Artificial Sequence: Synthetic oligonucleotide
ggagaaacuauuacccagaucaccacu

SEQ ID NO: 144100 - RNA, 27 nt, Artificial Sequence
  Description of Artificial Sequence: Synthetic oligonucleotide
auuuggagaaacuauuacccagaucac

SEQ ID NO: 144101 - RNA, 27 nt, Artificial Sequence
  Description of Artificial Sequence: Synthetic oligonucleotide
uuucuaggaaguauucaucacauccac

SEQ ID NO: 144102 - RNA, 27 nt, Artificial Sequence
  Description of Artificial Sequence: Synthetic oligonucleotide
cauauaugguguagcuguggaaaugcg

SEQ ID NO: 144103 - RNA, 27 nt, Artificial Sequence
  Description of Artificial Sequence: Synthetic oligonucleotide
cuccauucauauaugguguagcugugg

SEQ ID NO: 144104 - RNA, 27 nt, Artificial Sequence
  Description of Artificial Sequence: Synthetic oligonucleotide
aucuucuucucguguaagaacugcagc

SEQ ID NO: 144105 - RNA, 27 nt, Artificial Sequence
  Description of Artificial Sequence: Synthetic oligonucleotide
ucccuguaaaugaucuucuucucgugu

SEQ ID NO: 144106 - RNA, 27 nt, Artificial Sequence
  Description of Artificial Sequence: Synthetic oligonucleotide
gucccuguaaaugaucuucuucucgug

SEQ ID NO: 144107 - RNA, 27 nt, Artificial Sequence
  Description of Artificial Sequence: Synthetic oligonucleotide
ucaggucccuguaaaugaucuucuucu

SEQ ID NO: 144108 - RNA, 27 nt, Artificial Sequence
  Description of Artificial Sequence: Synthetic oligonucleotide
gaugcagucaaacaccucuuccucugu

SEQ ID NO: 144109 - RNA, 27 nt, Artificial Sequence
  Description of Artificial Sequence: Synthetic oligonucleotide
cgaugcagucaaacaccucuuccucug

SEQ ID NO: 144110 - RNA, 27 nt, Artificial Sequence
  Description of Artificial Sequence: Synthetic oligonucleotide
cccugugaacucgcccucaaaguagcg

SEQ ID NO: 144111 - RNA, 27 nt, Artificial Sequence
  Description of Artificial Sequence: Synthetic oligonucleotide
ggacagaggugccaggagaugcccuca

SEQ ID NO: 144112 - RNA, 27 nt, Artificial Sequence
  Description of Artificial Sequence: Synthetic oligonucleotide
uuaaaaagacaaaccauaucacuccuu

SEQ ID NO: 144113 - RNA, 27 nt, Artificial Sequence
  Description of Artificial Sequence: Synthetic oligonucleotide
cuuaaaaagacaaaccauaucacuccu

SEQ ID NO: 144114 - RNA, 27 nt, Artificial Sequence
  Description of Artificial Sequence: Synthetic oligonucleotide
gacaaccuuuaggaucuuuacugcaac

SEQ ID NO: 144115 - RNA, 27 nt, Artificial Sequence
  Description of Artificial Sequence: Synthetic oligonucleotide
gucgacaaccuuuaggaucuuuacugc

SEQ ID NO: 144116 - RNA, 27 nt, Artificial Sequence
  Description of Artificial Sequence: Synthetic oligonucleotide
acaauugccagguuguccuuugucaug

SEQ ID NO: 144117 - RNA, 27 nt, Artificial Sequence
  Description of Artificial Sequence: Synthetic oligonucleotide
ccucgcaccacugggucacaauugcca

SEQ ID NO: 144118 - RNA, 27 nt, Artificial Sequence
  Description of Artificial Sequence: Synthetic oligonucleotide
auuucaugucucuauggaugauguucu

SEQ ID NO: 144119 - RNA, 27 nt, Artificial Sequence
  Description of Artificial Sequence: Synthetic oligonucleotide
uggagaaauauauuguuggauuucaug

SEQ ID NO: 144120 - RNA, 27 nt, Artificial Sequence
  Description of Artificial Sequence: Synthetic oligonucleotide
agccuucauggagaaauauauuguugg

SEQ ID NO: 144121 - RNA, 27 nt, Artificial Sequence
  Description of Artificial Sequence: Synthetic oligonucleotide
accacuccagcgugacuuuacuguugc

SEQ ID NO: 144122 - RNA, 27 nt, Artificial Sequence
  Description of Artificial Sequence: Synthetic oligonucleotide
ccucucuuccuuuacuuucuucacaca

SEQ ID NO: 144123 - RNA, 27 nt, Artificial Sequence
  Description of Artificial Sequence: Synthetic oligonucleotide
gcccgaugcaaggauggcucggaagcg

SEQ ID NO: 144124 - RNA, 27 nt, Artificial Sequence
  Description of Artificial Sequence: Synthetic oligonucleotide
cacaguaggauauucaaccuccauuuc

SEQ ID NO: 144125 - RNA, 27 nt, Artificial Sequence
  Description of Artificial Sequence: Synthetic oligonucleotide
uuacacaguaggauauucaaccuccau

SEQ ID NO: 144126 - RNA, 27 nt, Artificial Sequence
  Description of Artificial Sequence: Synthetic oligonucleotide
uacacuacaagggaaaacucaaaaucu

SEQ ID NO: 144127 - RNA, 27 nt, Artificial Sequence
  Description of Artificial Sequence: Synthetic oligonucleotide
caaucaacaaagaacaaacaggauaaa

SEQ ID NO: 144128 - RNA, 27 nt, Artificial Sequence
  Description of Artificial Sequence: Synthetic oligonucleotide
uuucaaucaacaaagaacaaacaggau

SEQ ID NO: 144129 - RNA, 27 nt, Artificial Sequence
  Description of Artificial Sequence: Synthetic oligonucleotide
auggaagaaaaagaaggcuguagagaa

SEQ ID NO: 144130 - RNA, 27 nt, Artificial Sequence
  Description of Artificial Sequence: Synthetic oligonucleotide
uagaaggaagauuagcuauggaagaaa

SEQ ID NO: 144131 - RNA, 27 nt, Artificial Sequence
  Description of Artificial Sequence: Synthetic oligonucleotide
augaagcauucaacaggaagauuauuu

SEQ ID NO: 144132 - RNA, 27 nt, Artificial Sequence
  Description of Artificial Sequence: Synthetic oligonucleotide
caugaagcauucaacaggaagauuauu

SEQ ID NO: 144133 - RNA, 27 nt, Artificial Sequence
  Description of Artificial Sequence: Synthetic oligonucleotide
ucaaaguagaauucaagucaugaagca

SEQ ID NO: 144134 - RNA, 27 nt, Artificial Sequence
  Description of Artificial Sequence: Synthetic oligonucleotide
gucuguaguugcuucucucccucuuag

SEQ ID NO: 144135 - RNA, 27 nt, Artificial Sequence
  Description of Artificial Sequence: Synthetic oligonucleotide
guugaccuuggucugguaggagacggc

SEQ ID NO: 144136 - RNA, 27 nt, Artificial Sequence
  Description of Artificial Sequence: Synthetic oligonucleotide
gucgagauagucgggccgauugaucuc

SEQ ID NO: 144137 - RNA, 27 nt, Artificial Sequence
  Description of Artificial Sequence: Synthetic oligonucleotide
guuugggaagguuggauguucguccuc

SEQ ID NO: 144138 - RNA, 27 nt, Artificial Sequence
  Description of Artificial Sequence: Synthetic oligonucleotide
aguucuaagcuuggguuccgacccuaa

SEQ ID NO: 144139 - RNA, 27 nt, Artificial Sequence
  Description of Artificial Sequence: Synthetic oligonucleotide
uuaaaguucuaagcuuggguuccgacc

SEQ ID NO: 144140 - RNA, 27 nt, Artificial Sequence
  Description of Artificial Sequence: Synthetic oligonucleotide
guugcuuaaaguucuaagcuuggguuc

SEQ ID NO: 144141 - RNA, 27 nt, Artificial Sequence
  Description of Artificial Sequence: Synthetic oligonucleotide
gugguggucuuguugcuuaaaguucua

SEQ ID NO: 144142 - RNA, 27 nt, Artificial Sequence
  Description of Artificial Sequence: Synthetic oligonucleotide
acuuuauuucucgccacugaauaguag

SEQ ID NO: 144143 - RNA, 27 nt, Artificial Sequence
  Description of Artificial Sequence: Synthetic oligonucleotide
aacuuuauuucucgccacugaauagua

SEQ ID NO: 144144 - RNA, 27 nt, Artificial Sequence
  Description of Artificial Sequence: Synthetic oligonucleotide
ggaucauuuccuguuaucuguguuugu

SEQ ID NO: 144145 - RNA, 27 nt, Artificial Sequence
  Description of Artificial Sequence: Synthetic oligonucleotide
guuucauuucuucucuuuucuuaaggc

SEQ ID NO: 144146 - RNA, 27 nt, Artificial Sequence
  Description of Artificial Sequence: Synthetic oligonucleotide
ggaggauggaaacacacuccuucaguu

SEQ ID NO: 144147 - RNA, 27 nt, Artificial Sequence
  Description of Artificial Sequence: Synthetic oligonucleotide
ucaaagauuuucagucccgcggugaca

SEQ ID NO: 144148 - RNA, 27 nt, Artificial Sequence
  Description of Artificial Sequence: Synthetic oligonucleotide
ccugaacggcacgcuuauuucugcugu

SEQ ID NO: 144149 - RNA, 27 nt, Artificial Sequence
  Description of Artificial Sequence: Synthetic oligonucleotide
cuucuggacccugaacggcacgcuuau

SEQ ID NO: 144150 - RNA, 27 nt, Artificial Sequence
  Description of Artificial Sequence: Synthetic oligonucleotide
caagcagucuugagugacuguuucuuc

SEQ ID NO: 144151 - RNA, 27 nt, Artificial Sequence
  Description of Artificial Sequence: Synthetic oligonucleotide
ccaaagacauggaccuucuuccucuga

SEQ ID NO: 144152 - RNA, 27 nt, Artificial Sequence
  Description of Artificial Sequence: Synthetic oligonucleotide
guguuucaggcauauuuugaauacauc

SEQ ID NO: 144153 - RNA, 27 nt, Artificial Sequence
  Description of Artificial Sequence: Synthetic oligonucleotide
gagguacagagaaagggaggaaaauag

SEQ ID NO: 144154 - RNA, 27 nt, Artificial Sequence
  Description of Artificial Sequence: Synthetic oligonucleotide
ucuugucuugcucuaucuuucuuuggu

SEQ ID NO: 144155 - RNA, 27 nt, Artificial Sequence
  Description of Artificial Sequence: Synthetic oligonucleotide
uuucuugucuugcucuaucuuucuuug

SEQ ID NO: 144156 - RNA, 27 nt, Artificial Sequence
  Description of Artificial Sequence: Synthetic oligonucleotide
ggaucuuguacaaacaaaugcuuucuc

SEQ ID NO: 144157 - RNA, 27 nt, Artificial Sequence
  Description of Artificial Sequence: Synthetic oligonucleotide
ucugcaaguacguucguuuaacucaag

SEQ ID NO: 144158 - RNA, 27 nt, Artificial Sequence
  Description of Artificial Sequence: Synthetic oligonucleotide
ucuguaucgaucguucuguaucagucu

SEQ ID NO: 144159 - RNA, 27 nt, Artificial Sequence
  Description of Artificial Sequence: Synthetic oligonucleotide
auuuauuuuuauauauauauaauauau

SEQ ID NO: 144160 - RNA, 27 nt, Artificial Sequence
  Description of Artificial Sequence: Synthetic oligonucleotide
auauuuauuuuuauauauauauaauau

SEQ ID NO: 144161 - RNA, 27 nt, Artificial Sequence
  Description of Artificial Sequence: Synthetic oligonucleotide
cacagcagucaaauacauccagugaag

SEQ ID NO: 144162 - RNA, 27 nt, Artificial Sequence
  Description of Artificial Sequence: Synthetic oligonucleotide
gucucucaucuccuccucuucccuguc

SEQ ID NO: 144163 - RNA, 27 nt, Artificial Sequence
  Description of Artificial Sequence: Synthetic oligonucleotide
ccaagugggacaaaaaaaagaucaugc

SEQ ID NO: 144164 - RNA, 14 nt, Artificial Sequence
  Description of Artificial Sequence: Synthetic oligonucleotide
guauuuugaugagg

SEQ ID NO: 144165 - RNA, 12 nt, Artificial Sequence
  Description of Artificial Sequence: Synthetic oligonucleotide
ggcccagaugau

SEQ ID NO: 144166 - RNA, 14 nt, Artificial Sequence
  Description of Artificial Sequence: Synthetic oligonucleotide
gggaagaaaacuau

SEQ ID NO: 144167 - RNA, 15 nt, Artificial Sequence
  Description of Artificial Sequence: Synthetic oligonucleotide
guuuuaauuuauuuc

SEQ ID NO: 144168 - RNA, 12 nt, Artificial Sequence
  Description of Artificial Sequence: Synthetic oligonucleotide
acguagggaaau

SEQ ID NO: 144169 - RNA, 12 nt, Artificial Sequence
  Description of Artificial Sequence: Synthetic oligonucleotide
ccaggguuuacc

SEQ ID NO: 144170 - RNA, 11 nt, Artificial Sequence
  Description of Artificial Sequence: Synthetic oligonucleotide
agcaagguuua

SEQ ID NO: 144171 - RNA, 12 nt, Artificial Sequence
  Description of Artificial Sequence: Synthetic oligonucleotide
uguauuauguug

SEQ ID NO: 144172 - RNA, 15 nt, Artificial Sequence
  Description of Artificial Sequence: Synthetic oligonucleotide
uuuuaaucuuuguga

SEQ ID NO: 144173 - RNA, 14 nt, Artificial Sequence
  Description of Artificial Sequence: Synthetic oligonucleotide
uuaaucuuugugac

SEQ ID NO: 144174 - RNA, 13 nt, Artificial Sequence
  Description of Artificial Sequence: Synthetic oligonucleotide
gcugcuuaugucu

SEQ ID NO: 144175 - RNA, 14 nt, Artificial Sequence
  Description of Artificial Sequence: Synthetic oligonucleotide
aaguguuucagaag

SEQ ID NO: 144176 - RNA, 13 nt, Artificial Sequence
  Description of Artificial Sequence: Synthetic oligonucleotide
gaccaucaauaag

SEQ ID NO: 144177 - RNA, 13 nt, Artificial Sequence
  Description of Artificial Sequence: Synthetic oligonucleotide
ccaucaauaagga

SEQ ID NO: 144178 - RNA, 14 nt, Artificial Sequence
  Description of Artificial Sequence: Synthetic oligonucleotide
ucaauaaggaagaa

SEQ ID NO: 144179 - RNA, 14 nt, Artificial Sequence
  Description of Artificial Sequence: Synthetic oligonucleotide
aauaaggaagaagc

SEQ ID NO: 144180 - RNA, 13 nt, Artificial Sequence
  Description of Artificial Sequence: Synthetic oligonucleotide
aggaagaagcccu

SEQ ID NO: 144181 - RNA, 13 nt, Artificial Sequence
  Description of Artificial Sequence: Synthetic oligonucleotide
gcauaacuaaagg

SEQ ID NO: 144182 - RNA, 14 nt, Artificial Sequence
  Description of Artificial Sequence: Synthetic oligonucleotide
cauaacuaaaggug

SEQ ID NO: 144183 - RNA, 12 nt, Artificial Sequence
  Description of Artificial Sequence: Synthetic oligonucleotide
cuacaucacgcc

SEQ ID NO: 144184 - RNA, 12 nt, Artificial Sequence
  Description of Artificial Sequence: Synthetic oligonucleotide
acuggauuuaag

SEQ ID NO: 144185 - RNA, 12 nt, Artificial Sequence
  Description of Artificial Sequence: Synthetic oligonucleotide
cuggauuuaagc

SEQ ID NO: 144186 - RNA, 13 nt, Artificial Sequence
  Description of Artificial Sequence: Synthetic oligonucleotide
gauuuaagcagag

SEQ ID NO: 144187 - RNA, 13 nt, Artificial Sequence
  Description of Artificial Sequence: Synthetic oligonucleotide
auuuaagcagagu

SEQ ID NO: 144188 - RNA, 13 nt, Artificial Sequence
  Description of Artificial Sequence: Synthetic oligonucleotide
uuaagcagaguuc

SEQ ID NO: 144189 - RNA, 13 nt, Artificial Sequence
  Description of Artificial Sequence: Synthetic oligonucleotide
uaagcagaguuca

SEQ ID NO: 144190 - RNA, 14 nt, Artificial Sequence
  Description of Artificial Sequence: Synthetic oligonucleotide
agcagaguucaaaa

SEQ ID NO: 144191 - RNA, 12 nt, Artificial Sequence
  Description of Artificial Sequence: Synthetic oligonucleotide
cucagggucuga

SEQ ID NO: 144192 - RNA, 13 nt, Artificial Sequence
  Description of Artificial Sequence: Synthetic oligonucleotide
caagcaacuacau

SEQ ID NO: 144193 - RNA, 12 nt, Artificial Sequence
  Description of Artificial Sequence: Synthetic oligonucleotide
aucaauggcagc

SEQ ID NO: 144194 - RNA, 11 nt, Artificial Sequence
  Description of Artificial Sequence: Synthetic oligonucleotide
uuccagcccac

SEQ ID NO: 144195 - RNA, 12 nt, Artificial Sequence
  Description of Artificial Sequence: Synthetic oligonucleotide
cagcugagaaug

SEQ ID NO: 144196 - RNA, 13 nt, Artificial Sequence
  Description of Artificial Sequence: Synthetic oligonucleotide
aacguaucuccua

SEQ ID NO: 144197 - RNA, 14 nt, Artificial Sequence
  Description of Artificial Sequence: Synthetic oligonucleotide
ccuaaaauaauuuc

SEQ ID NO: 144198 - RNA, 13 nt, Artificial Sequence
  Description of Artificial Sequence: Synthetic oligonucleotide
uggaagauucagc

SEQ ID NO: 144199 - RNA, 12 nt, Artificial Sequence
  Description of Artificial Sequence: Synthetic oligonucleotide
uuaaacucuccu

SEQ ID NO: 144200 - RNA, 12 nt, Artificial Sequence
  Description of Artificial Sequence: Synthetic oligonucleotide
cagccuacaguu

SEQ ID NO: 144201 - RNA, 13 nt, Artificial Sequence
  Description of Artificial Sequence: Synthetic oligonucleotide
guuauguucaguc

SEQ ID NO: 144202 - RNA, 13 nt, Artificial Sequence
  Description of Artificial Sequence: Synthetic oligonucleotide
cacauacaaaaug

SEQ ID NO: 144203 - RNA, 9 nt, Artificial Sequence
  Description of Artificial Sequence: Synthetic oligonucleotide
uccuuuugc

SEQ ID NO: 144204 - RNA, 12 nt, Artificial Sequence
  Description of Artificial Sequence: Synthetic oligonucleotide
ugaccugugaag

SEQ ID NO: 144205 - RNA, 12 nt, Artificial Sequence
  Description of Artificial Sequence: Synthetic oligonucleotide
cuaucucacaca

SEQ ID NO: 144206 - RNA, 13 nt, Artificial Sequence
  Description of Artificial Sequence: Synthetic oligonucleotide
uguccucaauugu

SEQ ID NO: 144207 - RNA, 12 nt, Artificial Sequence
  Description of Artificial Sequence: Synthetic oligonucleotide
aaaccguagcug

SEQ ID NO: 144208 - RNA, 12 nt, Artificial Sequence
  Description of Artificial Sequence: Synthetic oligonucleotide
uagcuggcaagc

SEQ ID NO: 144209 - RNA, 14 nt, Artificial Sequence
  Description of Artificial Sequence: Synthetic oligonucleotide
uuguaugguuaaaa

SEQ ID NO: 144210 - RNA, 14 nt, Artificial Sequence
  Description of Artificial Sequence: Synthetic oligonucleotide
ugguuaaaagaugg

SEQ ID NO: 144211 - RNA, 13 nt, Artificial Sequence
  Description of Artificial Sequence: Synthetic oligonucleotide
cagggaauuauac

SEQ ID NO: 144212 - RNA, 12 nt, Artificial Sequence
  Description of Artificial Sequence: Synthetic oligonucleotide
acaaucuugcug

SEQ ID NO: 144213 - RNA, 13 nt, Artificial Sequence
  Description of Artificial Sequence: Synthetic oligonucleotide
ccaauaaugaaga

SEQ ID NO: 144214 - RNA, 13 nt, Artificial Sequence
  Description of Artificial Sequence: Synthetic oligonucleotide
acuuuggauguuc

SEQ ID NO: 144215 - RNA, 12 nt, Artificial Sequence
  Description of Artificial Sequence: Synthetic oligonucleotide
aaugcuuccacu

SEQ ID NO: 144216 - RNA, 11 nt, Artificial Sequence
  Description of Artificial Sequence: Synthetic oligonucleotide
gagaaaguuug

SEQ ID NO: 144217 - RNA, 11 nt, Artificial Sequence
  Description of Artificial Sequence: Synthetic oligonucleotide
aaagaacuacu

SEQ ID NO: 144218 - RNA, 12 nt, Artificial Sequence
  Description of Artificial Sequence: Synthetic oligonucleotide
uuagaaauacgg

SEQ ID NO: 144219 - RNA, 12 nt, Artificial Sequence
  Description of Artificial Sequence: Synthetic oligonucleotide
aacauggguaca

SEQ ID NO: 144220 - RNA, 14 nt, Artificial Sequence
  Description of Artificial Sequence: Synthetic oligonucleotide
aaagacacagaaga

SEQ ID NO: 144221 - RNA, 11 nt, Artificial Sequence
  Description of Artificial Sequence: Synthetic oligonucleotide
uaguagggagg

SEQ ID NO: 144222 - RNA, 12 nt, Artificial Sequence
  Description of Artificial Sequence: Synthetic oligonucleotide
gccuucugcagc

SEQ ID NO: 144223 - RNA, 10 nt, Artificial Sequence
  Description of Artificial Sequence: Synthetic oligonucleotide
ggucugguac

SEQ ID NO: 144224 - RNA, 12 nt, Artificial Sequence
  Description of Artificial Sequence: Synthetic oligonucleotide
cuaguccuuccg

SEQ ID NO: 144225 - RNA, 12 nt, Artificial Sequence
  Description of Artificial Sequence: Synthetic oligonucleotide
ccagugaauauu

SEQ ID NO: 144226 - RNA, 13 nt, Artificial Sequence
  Description of Artificial Sequence: Synthetic oligonucleotide
augaauucaaguu

SEQ ID NO: 144227 - RNA, 12 nt, Artificial Sequence
  Description of Artificial Sequence: Synthetic oligonucleotide
caggacacagau

SEQ ID NO: 144228 - RNA, 12 nt, Artificial Sequence
  Description of Artificial Sequence: Synthetic oligonucleotide
cucaaagcacag

SEQ ID NO: 144229 - RNA, 10 nt, Artificial Sequence
  Description of Artificial Sequence: Synthetic oligonucleotide
accacugcca

SEQ ID NO: 144230 - RNA, 13 nt, Artificial Sequence
  Description of Artificial Sequence: Synthetic oligonucleotide
gaaacuacuagug

SEQ ID NO: 144231 - RNA, 12 nt, Artificial Sequence
  Description of Artificial Sequence: Synthetic oligonucleotide
aagucggacagc

SEQ ID NO: 144232 - RNA, 13 nt, Artificial Sequence
  Description of Artificial Sequence: Synthetic oligonucleotide
gaaagcgaaaaau

SEQ ID NO: 144233 - RNA, 13 nt, Artificial Sequence
  Description of Artificial Sequence: Synthetic oligonucleotide
cccucugauuuag

SEQ ID NO: 144234 - RNA, 12 nt, Artificial Sequence
  Description of Artificial Sequence: Synthetic oligonucleotide
ugagcuauuuaa

SEQ ID NO: 144235 - RNA, 13 nt, Artificial Sequence
  Description of Artificial Sequence: Synthetic oligonucleotide
aaaaggugaaaaa

SEQ ID NO: 144236 - RNA, 14 nt, Artificial Sequence
  Description of Artificial Sequence: Synthetic oligonucleotide
gaaaaagcacuauu

SEQ ID NO: 144237 - RNA, 12 nt, Artificial Sequence
  Description of Artificial Sequence: Synthetic oligonucleotide
ggcugaaaagaa

SEQ ID NO: 144238 - RNA, 12 nt, Artificial Sequence
  Description of Artificial Sequence: Synthetic oligonucleotide
uaaacccuuaua

SEQ ID NO: 144239 - RNA, 13 nt, Artificial Sequence
  Description of Artificial Sequence: Synthetic oligonucleotide
cauacuauuagcc

SEQ ID NO: 144240 - RNA, 12 nt, Artificial Sequence
  Description of Artificial Sequence: Synthetic oligonucleotide
gacagaagcauu

SEQ ID NO: 144241 - RNA, 14 nt, Artificial Sequence
  Description of Artificial Sequence: Synthetic oligonucleotide
agagcaaauaagau

SEQ ID NO: 144242 - RNA, 14 nt, Artificial Sequence
  Description of Artificial Sequence: Synthetic oligonucleotide
ccaacauuuuucuc

SEQ ID NO: 144243 - RNA, 15 nt, Artificial Sequence
  Description of Artificial Sequence: Synthetic oligonucleotide
uuaaguaugagaaaa

SEQ ID NO: 144244 - RNA, 14 nt, Artificial Sequence
  Description of Artificial Sequence: Synthetic oligonucleotide
caggaauaaagaug

SEQ ID NO: 144245 - RNA, 13 nt, Artificial Sequence
  Description of Artificial Sequence: Synthetic oligonucleotide
aauuugaaugacc

SEQ ID NO: 144246 - RNA, 14 nt, Artificial Sequence
  Description of Artificial Sequence: Synthetic oligonucleotide
auguauaaagauag

SEQ ID NO: 144247 - RNA, 12 nt, Artificial Sequence
  Description of Artificial Sequence: Synthetic oligonucleotide
ggcuguaacuau

SEQ ID NO: 144248 - RNA, 11 nt, Artificial Sequence
  Description of Artificial Sequence: Synthetic oligonucleotide
ucugugaagug

SEQ ID NO: 144249 - RNA, 14 nt, Artificial Sequence
  Description of Artificial Sequence: Synthetic oligonucleotide
ccuuuaaggaaaug

SEQ ID NO: 144250 - RNA, 13 nt, Artificial Sequence
  Description of Artificial Sequence: Synthetic oligonucleotide
aaggauacaaaaa

SEQ ID NO: 144251 - RNA, 12 nt, Artificial Sequence
  Description of Artificial Sequence: Synthetic oligonucleotide
agaugcaauuug

SEQ ID NO: 144252 - RNA, 12 nt, Artificial Sequence
  Description of Artificial Sequence: Synthetic oligonucleotide
guucaaaacgaa

SEQ ID NO: 144253 - RNA, 11 nt, Artificial Sequence
  Description of Artificial Sequence: Synthetic oligonucleotide
gugaaaccuca

SEQ ID NO: 144254 - RNA, 13 nt, Artificial Sequence
  Description of Artificial Sequence: Synthetic oligonucleotide
acgaaagagaagc

SEQ ID NO: 144255 - RNA, 12 nt, Artificial Sequence
  Description of Artificial Sequence: Synthetic oligonucleotide
cuccacaagcgc

SEQ ID NO: 144256 - RNA, 14 nt, Artificial Sequence
  Description of Artificial Sequence: Synthetic oligonucleotide
gagaagauuccaaa

SEQ ID NO: 144257 - RNA, 13 nt, Artificial Sequence
  Description of Artificial Sequence: Synthetic oligonucleotide
aaucuggauucaa

SEQ ID NO: 144258 - RNA, 13 nt, Artificial Sequence
  Description of Artificial Sequence: Synthetic oligonucleotide
agaacagauuuga

SEQ ID NO: 144259 - RNA, 11 nt, Artificial Sequence
  Description of Artificial Sequence: Synthetic oligonucleotide
ccagagcugug

SEQ ID NO: 144260 - RNA, 12 nt, Artificial Sequence
  Description of Artificial Sequence: Synthetic oligonucleotide
ccucagauuguu

SEQ ID NO: 144261 - RNA, 12 nt, Artificial Sequence
  Description of Artificial Sequence: Synthetic oligonucleotide
cuauuuuaauua

SEQ ID NO: 144262 - RNA, 13 nt, Artificial Sequence
  Description of Artificial Sequence: Synthetic oligonucleotide
uuuaauuuauuaa

SEQ ID NO: 144263 - RNA, 12 nt, Artificial Sequence
  Description of Artificial Sequence: Synthetic oligonucleotide
augcaguuugaa

SEQ ID NO: 144264 - RNA, 11 nt, Artificial Sequence
  Description of Artificial Sequence: Synthetic oligonucleotide
caugcugcugg

SEQ ID NO: 144265 - RNA, 13 nt, Artificial Sequence
  Description of Artificial Sequence: Synthetic oligonucleotide
agaugugcauuuc

SEQ ID NO: 144266 - RNA, 12 nt, Artificial Sequence
  Description of Artificial Sequence: Synthetic oligonucleotide
ucaaaaccugug

SEQ ID NO: 144267 - RNA, 11 nt, Artificial Sequence
  Description of Artificial Sequence: Synthetic oligonucleotide
gaaugugggua

SEQ ID NO: 144268 - RNA, 10 nt, Artificial Sequence
  Description of Artificial Sequence: Synthetic oligonucleotide
auguggguag

SEQ ID NO: 144269 - RNA, 13 nt, Artificial Sequence
  Description of Artificial Sequence: Synthetic oligonucleotide
ugaaaaugagcau

SEQ ID NO: 144270 - RNA, 13 nt, Artificial Sequence
  Description of Artificial Sequence: Synthetic oligonucleotide
uugcuuuucaugu

SEQ ID NO: 144271 - RNA, 12 nt, Artificial Sequence
  Description of Artificial Sequence: Synthetic oligonucleotide
uguauuucuaua

SEQ ID NO: 144272 - RNA, 13 nt, Artificial Sequence
  Description of Artificial Sequence: Synthetic oligonucleotide
uuugauuaauguu

SEQ ID NO: 144273 - RNA, 12 nt, Artificial Sequence
  Description of Artificial Sequence: Synthetic oligonucleotide
caacguguauag

SEQ ID NO: 144274 - RNA, 12 nt, Artificial Sequence
  Description of Artificial Sequence: Synthetic oligonucleotide
cauauccuuggc

SEQ ID NO: 144275 - RNA, 13 nt, Artificial Sequence
  Description of Artificial Sequence: Synthetic oligonucleotide
uacuaacaucugg

SEQ ID NO: 144276 - RNA, 11 nt, Artificial Sequence
  Description of Artificial Sequence: Synthetic oligonucleotide
cauaaguugug

SEQ ID NO: 144277 - RNA, 12 nt, Artificial Sequence
  Description of Artificial Sequence: Synthetic oligonucleotide
gcaucauuuugg

SEQ ID NO: 144278 - RNA, 10 nt, Artificial Sequence
  Description of Artificial Sequence: Synthetic oligonucleotide
gcucuucuua

SEQ ID NO: 144279 - RNA, 10 nt, Artificial Sequence
  Description of Artificial Sequence: Synthetic oligonucleotide
agauuagguc

SEQ ID NO: 144280 - RNA, 12 nt, Artificial Sequence
  Description of Artificial Sequence: Synthetic oligonucleotide
auggaauugaaa

SEQ ID NO: 144281 - RNA, 13 nt, Artificial Sequence
  Description of Artificial Sequence: Synthetic oligonucleotide
cacacucauuccu

SEQ ID NO: 144282 - RNA, 12 nt, Artificial Sequence
  Description of Artificial Sequence: Synthetic oligonucleotide
uguagagguaac

SEQ ID NO: 144283 - RNA, 11 nt, Artificial Sequence
  Description of Artificial Sequence: Synthetic oligonucleotide
caaccacaugc

SEQ ID NO: 144284 - RNA, 12 nt, Artificial Sequence
  Description of Artificial Sequence: Synthetic oligonucleotide
ucggaaacaagu

SEQ ID NO: 144285 - RNA, 11 nt, Artificial Sequence
  Description of Artificial Sequence: Synthetic oligonucleotide
acucccaauaa

SEQ ID NO: 144286 - RNA, 13 nt, Artificial Sequence
  Description of Artificial Sequence: Synthetic oligonucleotide
aaugcuaagaaau

SEQ ID NO: 144287 - RNA, 11 nt, Artificial Sequence
  Description of Artificial Sequence: Synthetic oligonucleotide
gucuuucucua

SEQ ID NO: 144288 - RNA, 11 nt, Artificial Sequence
  Description of Artificial Sequence: Synthetic oligonucleotide
ugaauuucagg

SEQ ID NO: 144289 - RNA, 13 nt, Artificial Sequence
  Description of Artificial Sequence: Synthetic oligonucleotide
cgauucccucuca

SEQ ID NO: 144290 - RNA, 11 nt, Artificial Sequence
  Description of Artificial Sequence: Synthetic oligonucleotide
aggaaagugaa

SEQ ID NO: 144291 - RNA, 12 nt, Artificial Sequence
  Description of Artificial Sequence: Synthetic oligonucleotide
gaggcugcaugc

SEQ ID NO: 144292 - RNA, 11 nt, Artificial Sequence
  Description of Artificial Sequence: Synthetic oligonucleotide
ucucugaacag

SEQ ID NO: 144293 - RNA, 12 nt, Artificial Sequence
  Description of Artificial Sequence: Synthetic oligonucleotide
aacuuggcugua

SEQ ID NO: 144294 - RNA, 12 nt, Artificial Sequence
  Description of Artificial Sequence: Synthetic oligonucleotide
agaagccaaaau

SEQ ID NO: 144295 - RNA, 14 nt, Artificial Sequence
  Description of Artificial Sequence: Synthetic oligonucleotide
auuaaaagaagucc

SEQ ID NO: 144296 - RNA, 14 nt, Artificial Sequence
  Description of Artificial Sequence: Synthetic oligonucleotide
gaauccggauuauc

SEQ ID NO: 144297 - RNA, 12 nt, Artificial Sequence
  Description of Artificial Sequence: Synthetic oligonucleotide
aaugugacauca

SEQ ID NO: 144298 - RNA, 13 nt, Artificial Sequence
  Description of Artificial Sequence: Synthetic oligonucleotide
caucaaagcaagu

SEQ ID NO: 144299 - RNA, 11 nt, Artificial Sequence
  Description of Artificial Sequence: Synthetic oligonucleotide
agagagagaaa

SEQ ID NO: 144300 - RNA, 13 nt, Artificial Sequence
  Description of Artificial Sequence: Synthetic oligonucleotide
ucgcuguaguauu

SEQ ID NO: 144301 - RNA, 14 nt, Artificial Sequence
  Description of Artificial Sequence: Synthetic oligonucleotide
cgcuguaguauuua

SEQ ID NO: 144302 - RNA, 13 nt, Artificial Sequence
  Description of Artificial Sequence: Synthetic oligonucleotide
auuuaagcccaua

SEQ ID NO: 144303 - RNA, 15 nt, Artificial Sequence
  Description of Artificial Sequence: Synthetic oligonucleotide
auuaaaauaaacaug

SEQ ID NO: 144304 - RNA, 12 nt, Artificial Sequence
  Description of Artificial Sequence: Synthetic oligonucleotide
cuguucugaucg

SEQ ID NO: 144305 - RNA, 16 nt, Artificial Sequence
  Description of Artificial Sequence: Synthetic oligonucleotide
aaauaauuugaacuuu

SEQ ID NO: 144306 - RNA, 12 nt, Artificial Sequence
  Description of Artificial Sequence: Synthetic oligonucleotide
ugcgaccuuaau

SEQ ID NO: 144307 - RNA, 11 nt, Artificial Sequence
  Description of Artificial Sequence: Synthetic oligonucleotide
cugagaaagcu

SEQ ID NO: 144308 - RNA, 13 nt, Artificial Sequence
  Description of Artificial Sequence: Synthetic oligonucleotide
aguaaagaugcua

SEQ ID NO: 144309 - RNA, 12 nt, Artificial Sequence
  Description of Artificial Sequence: Synthetic oligonucleotide
cugcuuaauugc

SEQ ID NO: 144310 - RNA, 14 nt, Artificial Sequence
  Description of Artificial Sequence: Synthetic oligonucleotide
uaccauaugaauga

SEQ ID NO: 144311 - RNA, 12 nt, Artificial Sequence
  Description of Artificial Sequence: Synthetic oligonucleotide
aacuuucuuauc

SEQ ID NO: 144312 - RNA, 13 nt, Artificial Sequence
  Description of Artificial Sequence: Synthetic oligonucleotide
ccuugcaugacau

SEQ ID NO: 144313 - RNA, 14 nt, Artificial Sequence
  Description of Artificial Sequence: Synthetic oligonucleotide
ugaauuuguauaug

SEQ ID NO: 144314 - RNA, 12 nt, Artificial Sequence
  Description of Artificial Sequence: Synthetic oligonucleotide
gaauccuaguag

SEQ ID NO: 144315 - RNA, 10 nt, Artificial Sequence
  Description of Artificial Sequence: Synthetic oligonucleotide
gaaagggaag

SEQ ID NO: 144316 - RNA, 11 nt, Artificial Sequence
  Description of Artificial Sequence: Synthetic oligonucleotide
uaucggcaugc

SEQ ID NO: 144317 - RNA, 12 nt, Artificial Sequence
  Description of Artificial Sequence: Synthetic oligonucleotide
caccucauagua

SEQ ID NO: 144318 - RNA, 11 nt, Artificial Sequence
  Description of Artificial Sequence: Synthetic oligonucleotide
ccagaauugcc

SEQ ID NO: 144319 - RNA, 11 nt, Artificial Sequence
  Description of Artificial Sequence: Synthetic oligonucleotide
uggugaucugg

SEQ ID NO: 144320 - RNA, 12 nt, Artificial Sequence
  Description of Artificial Sequence: Synthetic oligonucleotide
gaucuggguaau

SEQ ID NO: 144321 - RNA, 12 nt, Artificial Sequence
  Description of Artificial Sequence: Synthetic oligonucleotide
ggaugugaugaa

SEQ ID NO: 144322 - RNA, 12 nt, Artificial Sequence
  Description of Artificial Sequence: Synthetic oligonucleotide
cauuuccacagc

SEQ ID NO: 144323 - RNA, 11 nt, Artificial Sequence
  Description of Artificial Sequence: Synthetic oligonucleotide
acagcuacacc

SEQ ID NO: 144324 - RNA, 12 nt, Artificial Sequence
  Description of Artificial Sequence: Synthetic oligonucleotide
ugcaguucuuac

SEQ ID NO: 144325 - RNA, 12 nt, Artificial Sequence
  Description of Artificial Sequence: Synthetic oligonucleotide
acgagaagaaga

SEQ ID NO: 144326 - RNA, 12 nt, Artificial Sequence
  Description of Artificial Sequence: Synthetic oligonucleotide
cgagaagaagau

SEQ ID NO: 144327 - RNA, 15 nt, Artificial Sequence
  Description of Artificial Sequence: Synthetic oligonucleotide
aagaagaucauuuac

SEQ ID NO: 144328 - RNA, 11 nt, Artificial Sequence
  Description of Artificial Sequence: Synthetic oligonucleotide
agaggaagagg

SEQ ID NO: 144329 - RNA, 12 nt, Artificial Sequence
  Description of Artificial Sequence: Synthetic oligonucleotide
gaggaagaggug

SEQ ID NO: 144330 - RNA, 13 nt, Artificial Sequence
  Description of Artificial Sequence: Synthetic oligonucleotide
cuacuuugagggc

SEQ ID NO: 144331 - RNA, 12 nt, Artificial Sequence
  Description of Artificial Sequence: Synthetic oligonucleotide
agggcaucuccu

SEQ ID NO: 144332 - RNA, 10 nt, Artificial Sequence
  Description of Artificial Sequence: Synthetic oligonucleotide
ggagugauau

SEQ ID NO: 144333 - RNA, 11 nt, Artificial Sequence
  Description of Artificial Sequence: Synthetic oligonucleotide
gagugauaugg

SEQ ID NO: 144334 - RNA, 12 nt, Artificial Sequence
  Description of Artificial Sequence: Synthetic oligonucleotide
ugcaguaaagau

SEQ ID NO: 144335 - RNA, 13 nt, Artificial Sequence
  Description of Artificial Sequence: Synthetic oligonucleotide
aguaaagauccua

SEQ ID NO: 144336 - RNA, 12 nt, Artificial Sequence
  Description of Artificial Sequence: Synthetic oligonucleotide
ugacaaaggaca

SEQ ID NO: 144337 - RNA, 13 nt, Artificial Sequence
  Description of Artificial Sequence: Synthetic oligonucleotide
gcaauugugaccc

SEQ ID NO: 144338 - RNA, 12 nt, Artificial Sequence
  Description of Artificial Sequence: Synthetic oligonucleotide
aacaucauccau

SEQ ID NO: 144339 - RNA, 12 nt, Artificial Sequence
  Description of Artificial Sequence: Synthetic oligonucleotide
ugaaauccaaca

SEQ ID NO: 144340 - RNA, 15 nt, Artificial Sequence
  Description of Artificial Sequence: Synthetic oligonucleotide
aacaauauauuucuc

SEQ ID NO: 144341 - RNA, 14 nt, Artificial Sequence
  Description of Artificial Sequence: Synthetic oligonucleotide
aacaguaaagucac

SEQ ID NO: 144342 - RNA, 14 nt, Artificial Sequence
  Description of Artificial Sequence: Synthetic oligonucleotide
ugugaagaaaguaa

SEQ ID NO: 144343 - RNA, 13 nt, Artificial Sequence
  Description of Artificial Sequence: Synthetic oligonucleotide
cuuccgagccauc

SEQ ID NO: 144344 - RNA, 12 nt, Artificial Sequence
  Description of Artificial Sequence: Synthetic oligonucleotide
aauggagguuga

SEQ ID NO: 144345 - RNA, 12 nt, Artificial Sequence
  Description of Artificial Sequence: Synthetic oligonucleotide
ggagguugaaua

SEQ ID NO: 144346 - RNA, 13 nt, Artificial Sequence
  Description of Artificial Sequence: Synthetic oligonucleotide
auuuugaguuuuc

SEQ ID NO: 144347 - RNA, 12 nt, Artificial Sequence
  Description of Artificial Sequence: Synthetic oligonucleotide
uauccuguuugu

SEQ ID NO: 144348 - RNA, 11 nt, Artificial Sequence
  Description of Artificial Sequence: Synthetic oligonucleotide
ccuguuuguuc

SEQ ID NO: 144349 - RNA, 10 nt, Artificial Sequence
  Description of Artificial Sequence: Synthetic oligonucleotide
cucuacagcc

SEQ ID NO: 144350 - RNA, 12 nt, Artificial Sequence
  Description of Artificial Sequence: Synthetic oligonucleotide
ucuuccauagcu

SEQ ID NO: 144351 - RNA, 12 nt, Artificial Sequence
  Description of Artificial Sequence: Synthetic oligonucleotide
auaaucuuccug

SEQ ID NO: 144352 - RNA, 12 nt, Artificial Sequence
  Description of Artificial Sequence: Synthetic oligonucleotide
uaaucuuccugu

SEQ ID NO: 144353 - RNA, 12 nt, Artificial Sequence
  Description of Artificial Sequence: Synthetic oligonucleotide
cuucaugacuug

SEQ ID NO: 144354 - RNA, 12 nt, Artificial Sequence
  Description of Artificial Sequence: Synthetic oligonucleotide
aagagggagaga

SEQ ID NO: 144355 - RNA, 12 nt, Artificial Sequence
  Description of Artificial Sequence: Synthetic oligonucleotide
cgucuccuacca

SEQ ID NO: 144356 - RNA, 12 nt, Artificial Sequence
  Description of Artificial Sequence: Synthetic oligonucleotide
gaucaaucggcc

SEQ ID NO: 144357 - RNA, 12 nt, Artificial Sequence
  Description of Artificial Sequence: Synthetic oligonucleotide
ggacgaacaucc

SEQ ID NO: 144358 - RNA, 11 nt, Artificial Sequence
  Description of Artificial Sequence: Synthetic oligonucleotide
agggucggaac

SEQ ID NO: 144359 - RNA, 10 nt, Artificial Sequence
  Description of Artificial Sequence: Synthetic oligonucleotide
ucggaaccca

SEQ ID NO: 144360 - RNA, 11 nt, Artificial Sequence
  Description of Artificial Sequence: Synthetic oligonucleotide
acccaagcuua

SEQ ID NO: 144361 - RNA, 14 nt, Artificial Sequence
  Description of Artificial Sequence: Synthetic oligonucleotide
gaacuuuaagcaac

SEQ ID NO: 144362 - RNA, 11 nt, Artificial Sequence
  Description of Artificial Sequence: Synthetic oligonucleotide
acuauucagug

SEQ ID NO: 144363 - RNA, 11 nt, Artificial Sequence
  Description of Artificial Sequence: Synthetic oligonucleotide
cuauucagugg

SEQ ID NO: 144364 - RNA, 13 nt, Artificial Sequence
  Description of Artificial Sequence: Synthetic oligonucleotide
aaacacagauaac

SEQ ID NO: 144365 - RNA, 12 nt, Artificial Sequence
  Description of Artificial Sequence: Synthetic oligonucleotide
cuuaagaaaaga

SEQ ID NO: 144366 - RNA, 12 nt, Artificial Sequence
  Description of Artificial Sequence: Synthetic oligonucleotide
cugaaggagugu

SEQ ID NO: 144367 - RNA, 10 nt, Artificial Sequence
  Description of Artificial Sequence: Synthetic oligonucleotide
ucaccgcggg

SEQ ID NO: 144368 - RNA, 14 nt, Artificial Sequence
  Description of Artificial Sequence: Synthetic oligonucleotide
agcagaaauaagcg

SEQ ID NO: 144369 - RNA, 12 nt, Artificial Sequence
  Description of Artificial Sequence: Synthetic oligonucleotide
aagcgugccguu

SEQ ID NO: 144370 - RNA, 12 nt, Artificial Sequence
  Description of Artificial Sequence: Synthetic oligonucleotide
agaaacagucac

SEQ ID NO: 144371 - RNA, 12 nt, Artificial Sequence
  Description of Artificial Sequence: Synthetic oligonucleotide
agaggaagaagg

SEQ ID NO: 144372 - RNA, 14 nt, Artificial Sequence
  Description of Artificial Sequence: Synthetic oligonucleotide
uguauucaaaauau

SEQ ID NO: 144373 - RNA, 13 nt, Artificial Sequence
  Description of Artificial Sequence: Synthetic oligonucleotide
auuuuccucccuu

SEQ ID NO: 144374 - RNA, 13 nt, Artificial Sequence
  Description of Artificial Sequence: Synthetic oligonucleotide
caaagaaagauag

SEQ ID NO: 144375 - RNA, 12 nt, Artificial Sequence
  Description of Artificial Sequence: Synthetic oligonucleotide
aagaaagauaga

SEQ ID NO: 144376 - RNA, 13 nt, Artificial Sequence
  Description of Artificial Sequence: Synthetic oligonucleotide
gaaagcauuuguu

SEQ ID NO: 144377 - RNA, 13 nt, Artificial Sequence
  Description of Artificial Sequence: Synthetic oligonucleotide
ugaguuaaacgaa

SEQ ID NO: 144378 - RNA, 12 nt, Artificial Sequence
  Description of Artificial Sequence: Synthetic oligonucleotide
acugauacagaa

SEQ ID NO: 144379 - RNA, 12 nt, Artificial Sequence
  Description of Artificial Sequence: Synthetic oligonucleotide
auauuauauaua

SEQ ID NO: 144380 - RNA, 12 nt, Artificial Sequence
  Description of Artificial Sequence: Synthetic oligonucleotide
auuauauauaua

SEQ ID NO: 144381 - RNA, 12 nt, Artificial Sequence
  Description of Artificial Sequence: Synthetic oligonucleotide
ucacuggaugua

SEQ ID NO: 144382 - RNA, 12 nt, Artificial Sequence
  Description of Artificial Sequence: Synthetic oligonucleotide
cagggaagagga

SEQ ID NO: 144383 - RNA, 15 nt, Artificial Sequence
  Description of Artificial Sequence: Synthetic oligonucleotide
augaucuuuuuuuug

SEQ ID NO: 144384 - RNA, 11 nt, Artificial Sequence
  Description of Artificial Sequence: Synthetic oligonucleotide
aguucacggcc

SEQ ID NO: 144385 - RNA, 13 nt, Artificial Sequence
  Description of Artificial Sequence: Synthetic oligonucleotide
caccaucacacca

SEQ ID NO: 144386 - RNA, 11 nt, Artificial Sequence
  Description of Artificial Sequence: Synthetic oligonucleotide
ccugcggguuu

SEQ ID NO: 144387 - RNA, 10 nt, Artificial Sequence
  Description of Artificial Sequence: Synthetic oligonucleotide
auccaguuug

SEQ ID NO: 144388 - RNA, 13 nt, Artificial Sequence
  Description of Artificial Sequence: Synthetic oligonucleotide
guuaaggacuucu

SEQ ID NO: 144389 - RNA, 13 nt, Artificial Sequence
  Description of Artificial Sequence: Synthetic oligonucleotide
cagugggacagag

SEQ ID NO: 144390 - RNA, 14 nt, Artificial Sequence
  Description of Artificial Sequence: Synthetic oligonucleotide
aauuuguuauugug

SEQ ID NO: 144391 - RNA, 13 nt, Artificial Sequence
  Description of Artificial Sequence: Synthetic oligonucleotide
uucaaaugcauuu

SEQ ID NO: 144392 - RNA, 10 nt, Artificial Sequence
  Description of Artificial Sequence: Synthetic oligonucleotide
caggaaagcc

SEQ ID NO: 144393 - RNA, 11 nt, Artificial Sequence
  Description of Artificial Sequence: Synthetic oligonucleotide
aggaaagcccu

SEQ ID NO: 144394 - RNA, 12 nt, Artificial Sequence
  Description of Artificial Sequence: Synthetic oligonucleotide
cccagcauggcc

SEQ ID NO: 144395 - RNA, 11 nt, Artificial Sequence
  Description of Artificial Sequence: Synthetic oligonucleotide
cuucucccuga

SEQ ID NO: 144396 - RNA, 12 nt, Artificial Sequence
  Description of Artificial Sequence: Synthetic oligonucleotide
gaagaagcccuu

SEQ ID NO: 144397 - RNA, 12 nt, Artificial Sequence
  Description of Artificial Sequence: Synthetic oligonucleotide
agaagcccuuca

SEQ ID NO: 144398 - RNA, 11 nt, Artificial Sequence
  Description of Artificial Sequence: Synthetic oligonucleotide
gcccuucagcg

SEQ ID NO: 144399 - RNA, 11 nt, Artificial Sequence
  Description of Artificial Sequence: Synthetic oligonucleotide
ccuucagcggc

SEQ ID NO: 144400 - RNA, 12 nt, Artificial Sequence
  Description of Artificial Sequence: Synthetic oligonucleotide
ucagcggccagu

SEQ ID NO: 144401 - RNA, 12 nt, Artificial Sequence
  Description of Artificial Sequence: Synthetic oligonucleotide
ugaaaagcuccg

SEQ ID NO: 144402 - RNA, 11 nt, Artificial Sequence
  Description of Artificial Sequence: Synthetic oligonucleotide
aaaagcuccgg

SEQ ID NO: 144403 - RNA, 13 nt, Artificial Sequence
  Description of Artificial Sequence: Synthetic oligonucleotide
agucaacagucug

SEQ ID NO: 144404 - RNA, 13 nt, Artificial Sequence
  Description of Artificial Sequence: Synthetic oligonucleotide
cagaguucaaaag

SEQ ID NO: 144405 - RNA, 13 nt, Artificial Sequence
  Description of Artificial Sequence: Synthetic oligonucleotide
agaguucaaaagc

SEQ ID NO: 144406 - RNA, 12 nt, Artificial Sequence
  Description of Artificial Sequence: Synthetic oligonucleotide
uucaaaagcccu

SEQ ID NO: 144407 - RNA, 12 nt, Artificial Sequence
  Description of Artificial Sequence: Synthetic oligonucleotide
ucaaaagcccuu

SEQ ID NO: 144408 - RNA, 12 nt, Artificial Sequence
  Description of Artificial Sequence: Synthetic oligonucleotide
aaaagcccuuca

SEQ ID NO: 144409 - RNA, 12 nt, Artificial Sequence
  Description of Artificial Sequence: Synthetic oligonucleotide
aaagcccuucag

SEQ ID NO: 144410 - RNA, 13 nt, Artificial Sequence
  Description of Artificial Sequence: Synthetic oligonucleotide
gugaagccgcucg

SEQ ID NO: 144411 - RNA, 12 nt, Artificial Sequence
  Description of Artificial Sequence: Synthetic oligonucleotide
cacgccagucaa

SEQ ID NO: 144412 - RNA, 13 nt, Artificial Sequence
  Description of Artificial Sequence: Synthetic oligonucleotide
uucuuggugcgug

SEQ ID NO: 144413 - RNA, 14 nt, Artificial Sequence
  Description of Artificial Sequence: Synthetic oligonucleotide
auuggauucaucag

SEQ ID NO: 144414 - RNA, 13 nt, Artificial Sequence
  Description of Artificial Sequence: Synthetic oligonucleotide
uggaauaccuaag

SEQ ID NO: 144415 - RNA, 12 nt, Artificial Sequence
  Description of Artificial Sequence: Synthetic oligonucleotide
auuugaggcuca

SEQ ID NO: 144416 - RNA, 11 nt, Artificial Sequence
  Description of Artificial Sequence: Synthetic oligonucleotide
ucuacaauugg

SEQ ID NO: 144417 - RNA, 12 nt, Artificial Sequence
  Description of Artificial Sequence: Synthetic oligonucleotide
uaguuaggagcc

SEQ ID NO: 144418 - RNA, 13 nt, Artificial Sequence
  Description of Artificial Sequence: Synthetic oligonucleotide
agucaauauccac

SEQ ID NO: 144419 - RNA, 13 nt, Artificial Sequence
  Description of Artificial Sequence: Synthetic oligonucleotide
auguucagucaca

SEQ ID NO: 144420 - RNA, 12 nt, Artificial Sequence
  Description of Artificial Sequence: Synthetic oligonucleotide
acacacacauac

SEQ ID NO: 144421 - RNA, 12 nt, Artificial Sequence
  Description of Artificial Sequence: Synthetic oligonucleotide
uuccuuuugcuu

SEQ ID NO: 144422 - RNA, 16 nt, Artificial Sequence
  Description of Artificial Sequence: Synthetic oligonucleotide
uuuuaaaguaauuuuu

SEQ ID NO: 144423 - RNA, 13 nt, Artificial Sequence
  Description of Artificial Sequence: Synthetic oligonucleotide
caacagucaaugg

SEQ ID NO: 144424 - RNA, 13 nt, Artificial Sequence
  Description of Artificial Sequence: Synthetic oligonucleotide
ucgacaaaccaau

SEQ ID NO: 144425 - RNA, 12 nt, Artificial Sequence
  Description of Artificial Sequence: Synthetic oligonucleotide
acugcuaccacu

SEQ ID NO: 144426 - RNA, 13 nt, Artificial Sequence
  Description of Artificial Sequence: Synthetic oligonucleotide
gcaagcggucuua

SEQ ID NO: 144427 - RNA, 13 nt, Artificial Sequence
  Description of Artificial Sequence: Synthetic oligonucleotide
ggucuuaccggcu

SEQ ID NO: 144428 - RNA, 11 nt, Artificial Sequence
  Description of Artificial Sequence: Synthetic oligonucleotide
gauggguuacc

SEQ ID NO: 144429 - RNA, 11 nt, Artificial Sequence
  Description of Artificial Sequence: Synthetic oligonucleotide
guuaccugcga

SEQ ID NO: 144430 - RNA, 12 nt, Artificial Sequence
  Description of Artificial Sequence: Synthetic oligonucleotide
aaucuugcugag

SEQ ID NO: 144431 - RNA, 13 nt, Artificial Sequence
  Description of Artificial Sequence: Synthetic oligonucleotide
agcauaaaacagu

SEQ ID NO: 144432 - RNA, 12 nt, Artificial Sequence
  Description of Artificial Sequence: Synthetic oligonucleotide
guccuuuauccu

SEQ ID NO: 144433 - RNA, 12 nt, Artificial Sequence
  Description of Artificial Sequence: Synthetic oligonucleotide
caacgcaaguug

SEQ ID NO: 144434 - RNA, 13 nt, Artificial Sequence
  Description of Artificial Sequence: Synthetic oligonucleotide
aaacugaaaccau

SEQ ID NO: 144435 - RNA, 14 nt, Artificial Sequence
  Description of Artificial Sequence: Synthetic oligonucleotide
acuuuguuaaauau

SEQ ID NO: 144436 - RNA, 14 nt, Artificial Sequence
  Description of Artificial Sequence: Synthetic oligonucleotide
guauauuaaaaguu

SEQ ID NO: 144437 - RNA, 13 nt, Artificial Sequence
  Description of Artificial Sequence: Synthetic oligonucleotide
guuuugacuuaac

SEQ ID NO: 144438 - RNA, 13 nt, Artificial Sequence
  Description of Artificial Sequence: Synthetic oligonucleotide
gcaaacucagcac

SEQ ID NO: 144439 - RNA, 11 nt, Artificial Sequence
  Description of Artificial Sequence: Synthetic oligonucleotide
ugcugaccuca

SEQ ID NO: 144440 - RNA, 14 nt, Artificial Sequence
  Description of Artificial Sequence: Synthetic oligonucleotide
uuuauucagaucgc

SEQ ID NO: 144441 - RNA, 13 nt, Artificial Sequence
  Description of Artificial Sequence: Synthetic oligonucleotide
aggguucugggau

SEQ ID NO: 144442 - RNA, 15 nt, Artificial Sequence
  Description of Artificial Sequence: Synthetic oligonucleotide
auauuggaaauuaug

SEQ ID NO: 144443 - RNA, 13 nt, Artificial Sequence
  Description of Artificial Sequence: Synthetic oligonucleotide
auggaagcacuag

SEQ ID NO: 144444 - RNA, 13 nt, Artificial Sequence
  Description of Artificial Sequence: Synthetic oligonucleotide
guuuuuaugugga

SEQ ID NO: 144445 - RNA, 12 nt, Artificial Sequence
  Description of Artificial Sequence: Synthetic oligonucleotide
ggaauugguaga

SEQ ID NO: 144446 - RNA, 13 nt, Artificial Sequence
  Description of Artificial Sequence: Synthetic oligonucleotide
uuagacuuggaga

SEQ ID NO: 144447 - RNA, 13 nt, Artificial Sequence
  Description of Artificial Sequence: Synthetic oligonucleotide
uuacaguauucca

SEQ ID NO: 144448 - RNA, 15 nt, Artificial Sequence
  Description of Artificial Sequence: Synthetic oligonucleotide
ccacugaugaauuaa

SEQ ID NO: 144449 - RNA, 12 nt, Artificial Sequence
  Description of Artificial Sequence: Synthetic oligonucleotide
ccacaucaucac

SEQ ID NO: 144450 - RNA, 13 nt, Artificial Sequence
  Description of Artificial Sequence: Synthetic oligonucleotide
cucaccaaacaga

SEQ ID NO: 144451 - RNA, 12 nt, Artificial Sequence
  Description of Artificial Sequence: Synthetic oligonucleotide
ggaacaugaugg

SEQ ID NO: 144452 - RNA, 12 nt, Artificial Sequence
  Description of Artificial Sequence: Synthetic oligonucleotide
cauguagacugc

SEQ ID NO: 144453 - RNA, 13 nt, Artificial Sequence
  Description of Artificial Sequence: Synthetic oligonucleotide
ggaucuauuuaug

SEQ ID NO: 144454 - RNA, 12 nt, Artificial Sequence
  Description of Artificial Sequence: Synthetic oligonucleotide
gcacuauuauca

SEQ ID NO: 144455 - RNA, 11 nt, Artificial Sequence
  Description of Artificial Sequence: Synthetic oligonucleotide
aucaguucugc

SEQ ID NO: 144456 - RNA, 13 nt, Artificial Sequence
  Description of Artificial Sequence: Synthetic oligonucleotide
agauuaaaccuac

SEQ ID NO: 144457 - RNA, 13 nt, Artificial Sequence
  Description of Artificial Sequence: Synthetic oligonucleotide
auaaaauccuucu

SEQ ID NO: 144458 - RNA, 12 nt, Artificial Sequence
  Description of Artificial Sequence: Synthetic oligonucleotide
aaugcuguagac

SEQ ID NO: 144459 - RNA, 13 nt, Artificial Sequence
  Description of Artificial Sequence: Synthetic oligonucleotide
uugauaggaauag

SEQ ID NO: 144460 - RNA, 11 nt, Artificial Sequence
  Description of Artificial Sequence: Synthetic oligonucleotide
aauggcccuga

SEQ ID NO: 144461 - RNA, 11 nt, Artificial Sequence
  Description of Artificial Sequence: Synthetic oligonucleotide
uuccucaagca

SEQ ID NO: 144462 - RNA, 10 nt, Artificial Sequence
  Description of Artificial Sequence: Synthetic oligonucleotide
guucagccca

SEQ ID NO: 144463 - RNA, 11 nt, Artificial Sequence
  Description of Artificial Sequence: Synthetic oligonucleotide
gcugcugaacc

SEQ ID NO: 144464 - RNA, 12 nt, Artificial Sequence
  Description of Artificial Sequence: Synthetic oligonucleotide
aaguucucuuca

SEQ ID NO: 144465 - RNA, 11 nt, Artificial Sequence
  Description of Artificial Sequence: Synthetic oligonucleotide
ccagccuagag

SEQ ID NO: 144466 - RNA, 13 nt, Artificial Sequence
  Description of Artificial Sequence: Synthetic oligonucleotide
cucugugaagugu

SEQ ID NO: 144467 - RNA, 14 nt, Artificial Sequence
  Description of Artificial Sequence: Synthetic oligonucleotide
ugagaaaauuucaa

SEQ ID NO: 144468 - RNA, 11 nt, Artificial Sequence
  Description of Artificial Sequence: Synthetic oligonucleotide
aauccuccuga

SEQ ID NO: 144469 - RNA, 12 nt, Artificial Sequence
  Description of Artificial Sequence: Synthetic oligonucleotide
gugacaucauau

SEQ ID NO: 144470 - RNA, 13 nt, Artificial Sequence
  Description of Artificial Sequence: Synthetic oligonucleotide
aaucuucaucaua

SEQ ID NO: 144471 - RNA, 13 nt, Artificial Sequence
  Description of Artificial Sequence: Synthetic oligonucleotide
gacuagcuauuaa

SEQ ID NO: 144472 - RNA, 14 nt, Artificial Sequence
  Description of Artificial Sequence: Synthetic oligonucleotide
ucucuacuaaaaau

SEQ ID NO: 144473 - RNA, 12 nt, Artificial Sequence
  Description of Artificial Sequence: Synthetic oligonucleotide
ucuaucucgccu

SEQ ID NO: 144474 - RNA, 13 nt, Artificial Sequence
  Description of Artificial Sequence: Synthetic oligonucleotide
cuucgguccaguu

SEQ ID NO: 144475 - RNA, 11 nt, Artificial Sequence
  Description of Artificial Sequence: Synthetic oligonucleotide
gauguagccgc

SEQ ID NO: 144476 - RNA, 12 nt, Artificial Sequence
  Description of Artificial Sequence: Synthetic oligonucleotide
ugaggagacuug

SEQ ID NO: 144477 - RNA, 12 nt, Artificial Sequence
  Description of Artificial Sequence: Synthetic oligonucleotide
gaguagugagga

SEQ ID NO: 144478 - RNA, 14 nt, Artificial Sequence
  Description of Artificial Sequence: Synthetic oligonucleotide
cagaugaguacaaa

SEQ ID NO: 144479 - RNA, 13 nt, Artificial Sequence
  Description of Artificial Sequence: Synthetic oligonucleotide
guuguuaaugggc

SEQ ID NO: 144480 - RNA, 13 nt, Artificial Sequence
  Description of Artificial Sequence: Synthetic oligonucleotide
uuuuuaauuuauu

SEQ ID NO: 144481 - RNA, 12 nt, Artificial Sequence
  Description of Artificial Sequence: Synthetic oligonucleotide
uauuuaaauaug

SEQ ID NO: 144482 - RNA, 13 nt, Artificial Sequence
  Description of Artificial Sequence: Synthetic oligonucleotide
uauccuuuguuuc

SEQ ID NO: 144483 - RNA, 14 nt, Artificial Sequence
  Description of Artificial Sequence: Synthetic oligonucleotide
cgucuaaguguuug

SEQ ID NO: 144484 - RNA, 12 nt, Artificial Sequence
  Description of Artificial Sequence: Synthetic oligonucleotide
accugugacaaa

SEQ ID NO: 144485 - RNA, 13 nt, Artificial Sequence
  Description of Artificial Sequence: Synthetic oligonucleotide
ccaggcugaauua

SEQ ID NO: 144486 - RNA, 14 nt, Artificial Sequence
  Description of Artificial Sequence: Synthetic oligonucleotide
gucauucuuacaau

SEQ ID NO: 144487 - RNA, 15 nt, Artificial Sequence
  Description of Artificial Sequence: Synthetic oligonucleotide
ucauucuuacaauug

SEQ ID NO: 144488 - RNA, 12 nt, Artificial Sequence
  Description of Artificial Sequence: Synthetic oligonucleotide
cagagaguguac

SEQ ID NO: 144489 - RNA, 12 nt, Artificial Sequence
  Description of Artificial Sequence: Synthetic oligonucleotide
agaacucagcag

SEQ ID NO: 144490 - RNA, 13 nt, Artificial Sequence
  Description of Artificial Sequence: Synthetic oligonucleotide
uuuauuuucagua

SEQ ID NO: 144491 - RNA, 12 nt, Artificial Sequence
  Description of Artificial Sequence: Synthetic oligonucleotide
ucuuaaauggaa

SEQ ID NO: 144492 - RNA, 13 nt, Artificial Sequence
  Description of Artificial Sequence: Synthetic oligonucleotide
ugccuaaaauugu

SEQ ID NO: 144493 - RNA, 12 nt, Artificial Sequence
  Description of Artificial Sequence: Synthetic oligonucleotide
agacugugagcu

SEQ ID NO: 144494 - RNA, 14 nt, Artificial Sequence
  Description of Artificial Sequence: Synthetic oligonucleotide
ugcuuuuuauuaau

SEQ ID NO: 144495 - RNA, 13 nt, Artificial Sequence
  Description of Artificial Sequence: Synthetic oligonucleotide
cucuucuuacauu

SEQ ID NO: 144496 - RNA, 15 nt, Artificial Sequence
  Description of Artificial Sequence: Synthetic oligonucleotide
cauuuguaaaaaugu

SEQ ID NO: 144497 - RNA, 15 nt, Artificial Sequence
  Description of Artificial Sequence: Synthetic oligonucleotide
aucuuaauucauauu

SEQ ID NO: 144498 - RNA, 13 nt, Artificial Sequence
  Description of Artificial Sequence: Synthetic oligonucleotide
gaacuaaucauga

SEQ ID NO: 144499 - RNA, 12 nt, Artificial Sequence
  Description of Artificial Sequence: Synthetic oligonucleotide
ucugcucuuggg

SEQ ID NO: 144500 - RNA, 13 nt, Artificial Sequence
  Description of Artificial Sequence: Synthetic oligonucleotide
caguagcuuugag

SEQ ID NO: 144501 - RNA, 14 nt, Artificial Sequence
  Description of Artificial Sequence: Synthetic oligonucleotide
cacguaauauuuca

SEQ ID NO: 144502 - RNA, 13 nt, Artificial Sequence
  Description of Artificial Sequence: Synthetic oligonucleotide
uauucucuucacu

SEQ ID NO: 144503 - RNA, 14 nt, Artificial Sequence
  Description of Artificial Sequence: Synthetic oligonucleotide
cuaaugcuaagaaa

SEQ ID NO: 144504 - RNA, 12 nt, Artificial Sequence
  Description of Artificial Sequence: Synthetic oligonucleotide
gcugaaaaucaa

SEQ ID NO: 144505 - RNA, 14 nt, Artificial Sequence
  Description of Artificial Sequence: Synthetic oligonucleotide
aauaugauuacuuu

SEQ ID NO: 144506 - RNA, 14 nt, Artificial Sequence
  Description of Artificial Sequence: Synthetic oligonucleotide
cauuuuguucuaca

SEQ ID NO: 144507 - RNA, 12 nt, Artificial Sequence
  Description of Artificial Sequence: Synthetic oligonucleotide
cccgggacucuc

SEQ ID NO: 144508 - RNA, 14 nt, Artificial Sequence
  Description of Artificial Sequence: Synthetic oligonucleotide
ccuuuaaaguaaag

SEQ ID NO: 144509 - RNA, 13 nt, Artificial Sequence
  Description of Artificial Sequence: Synthetic oligonucleotide
ucuggaagccugg

SEQ ID NO: 144510 - RNA, 14 nt, Artificial Sequence
  Description of Artificial Sequence: Synthetic oligonucleotide
aaaacaaaagagag

SEQ ID NO: 144511 - RNA, 13 nt, Artificial Sequence
  Description of Artificial Sequence: Synthetic oligonucleotide
aucaguuaugccg

SEQ ID NO: 144512 - RNA, 13 nt, Artificial Sequence
  Description of Artificial Sequence: Synthetic oligonucleotide
uaaaagaagucca

SEQ ID NO: 144513 - RNA, 11 nt, Artificial Sequence
  Description of Artificial Sequence: Synthetic oligonucleotide
aggugagguua

SEQ ID NO: 144514 - RNA, 11 nt, Artificial Sequence
  Description of Artificial Sequence: Synthetic oligonucleotide
gggaagaggac

SEQ ID NO: 144515 - RNA, 13 nt, Artificial Sequence
  Description of Artificial Sequence: Synthetic oligonucleotide
aagcaaguauugu

SEQ ID NO: 144516 - RNA, 12 nt, Artificial Sequence
  Description of Artificial Sequence: Synthetic oligonucleotide
auuguagcacuc

SEQ ID NO: 144517 - RNA, 14 nt, Artificial Sequence
  Description of Artificial Sequence: Synthetic oligonucleotide
acaaaaccacaaau

SEQ ID NO: 144518 - RNA, 12 nt, Artificial Sequence
  Description of Artificial Sequence: Synthetic oligonucleotide
uaagcccauaca

SEQ ID NO: 144519 - RNA, 11 nt, Artificial Sequence
  Description of Artificial Sequence: Synthetic oligonucleotide
agcccauacag

SEQ ID NO: 144520 - RNA, 12 nt, Artificial Sequence
  Description of Artificial Sequence: Synthetic oligonucleotide
cagaaaccuucc

SEQ ID NO: 144521 - RNA, 10 nt, Artificial Sequence
  Description of Artificial Sequence: Synthetic oligonucleotide
guauaccuac

SEQ ID NO: 144522 - RNA, 13 nt, Artificial Sequence
  Description of Artificial Sequence: Synthetic oligonucleotide
gccaguuuucgga

SEQ ID NO: 144523 - RNA, 9 nt, Artificial Sequence
  Description of Artificial Sequence: Synthetic oligonucleotide
ggaacaggg

SEQ ID NO: 144524 - RNA, 13 nt, Artificial Sequence
  Description of Artificial Sequence: Synthetic oligonucleotide
uuaacuuuccagu

SEQ ID NO: 144525 - RNA, 14 nt, Artificial Sequence
  Description of Artificial Sequence: Synthetic oligonucleotide
aaaguuugguuuug

SEQ ID NO: 144526 - RNA, 12 nt, Artificial Sequence
  Description of Artificial Sequence: Synthetic oligonucleotide
cuucccacugua

SEQ ID NO: 144527 - RNA, 13 nt, Artificial Sequence
  Description of Artificial Sequence: Synthetic oligonucleotide
ugauaccauauga

SEQ ID NO: 144528 - RNA, 11 nt, Artificial Sequence
  Description of Artificial Sequence: Synthetic oligonucleotide
aacaugggcug

SEQ ID NO: 144529 - RNA, 13 nt, Artificial Sequence
  Description of Artificial Sequence: Synthetic oligonucleotide
caacuuuuucaua

SEQ ID NO: 144530 - RNA, 12 nt, Artificial Sequence
  Description of Artificial Sequence: Synthetic oligonucleotide
caugaggccgga

SEQ ID NO: 144531 - RNA, 11 nt, Artificial Sequence
  Description of Artificial Sequence: Synthetic oligonucleotide
acugcauuugu

SEQ ID NO: 144532 - RNA, 13 nt, Artificial Sequence
  Description of Artificial Sequence: Synthetic oligonucleotide
aauguuuacuacc

SEQ ID NO: 144533 - RNA, 15 nt, Artificial Sequence
  Description of Artificial Sequence: Synthetic oligonucleotide
aauuuuuugaugaaa

SEQ ID NO: 144534 - RNA, 14 nt, Artificial Sequence
  Description of Artificial Sequence: Synthetic oligonucleotide
cagugugugaauuu

SEQ ID NO: 144535 - RNA, 13 nt, Artificial Sequence
  Description of Artificial Sequence: Synthetic oligonucleotide
gagcaauguaugu

SEQ ID NO: 144536 - RNA, 14 nt, Artificial Sequence
  Description of Artificial Sequence: Synthetic oligonucleotide
aaagcacauauaua

SEQ ID NO: 144537 - RNA, 14 nt, Artificial Sequence
  Description of Artificial Sequence: Synthetic oligonucleotide
guaauaguuucucc

SEQ ID NO: 144538 - RNA, 13 nt, Artificial Sequence
  Description of Artificial Sequence: Synthetic oligonucleotide
aguuucuccaaau

SEQ ID NO: 144539 - RNA, 13 nt, Artificial Sequence
  Description of Artificial Sequence: Synthetic oligonucleotide
uacuuccuagaaa

SEQ ID NO: 144540 - RNA, 13 nt, Artificial Sequence
  Description of Artificial Sequence: Synthetic oligonucleotide
uacaccauauaug

SEQ ID NO: 144541 - RNA, 14 nt, Artificial Sequence
  Description of Artificial Sequence: Synthetic oligonucleotide
auauaugaauggag

SEQ ID NO: 144542 - RNA, 13 nt, Artificial Sequence
  Description of Artificial Sequence: Synthetic oligonucleotide
acgagaagaagau

SEQ ID NO: 144543 - RNA, 13 nt, Artificial Sequence
  Description of Artificial Sequence: Synthetic oligonucleotide
ucauuuacaggga

SEQ ID NO: 144544 - RNA, 13 nt, Artificial Sequence
  Description of Artificial Sequence: Synthetic oligonucleotide
cauuuacagggac

SEQ ID NO: 144545 - RNA, 10 nt, Artificial Sequence
  Description of Artificial Sequence: Synthetic oligonucleotide
agggaccuga

SEQ ID NO: 144546 - RNA, 14 nt, Artificial Sequence
  Description of Artificial Sequence: Synthetic oligonucleotide
uguuugacugcauc

SEQ ID NO: 144547 - RNA, 13 nt, Artificial Sequence
  Description of Artificial Sequence: Synthetic oligonucleotide
uuugacugcaucg

SEQ ID NO: 144548 - RNA, 12 nt, Artificial Sequence
  Description of Artificial Sequence: Synthetic oligonucleotide
gaguucacaggg

SEQ ID NO: 144549 - RNA, 13 nt, Artificial Sequence
  Description of Artificial Sequence: Synthetic oligonucleotide
ggcaccucugucc

SEQ ID NO: 144550 - RNA, 15 nt, Artificial Sequence
  Description of Artificial Sequence: Synthetic oligonucleotide
gguuugucuuuuuaa

SEQ ID NO: 144551 - RNA, 14 nt, Artificial Sequence
  Description of Artificial Sequence: Synthetic oligonucleotide
uuugucuuuuuaag

SEQ ID NO: 144552 - RNA, 13 nt, Artificial Sequence
  Description of Artificial Sequence: Synthetic oligonucleotide
ccuaaagguuguc

SEQ ID NO: 144553 - RNA, 12 nt, Artificial Sequence
  Description of Artificial Sequence: Synthetic oligonucleotide
aagguugucgac

SEQ ID NO: 144554 - RNA, 13 nt, Artificial Sequence
  Description of Artificial Sequence: Synthetic oligonucleotide
accuggcaauugu

SEQ ID NO: 144555 - RNA, 12 nt, Artificial Sequence
  Description of Artificial Sequence: Synthetic oligonucleotide
aguggugcgagg

SEQ ID NO: 144556 - RNA, 13 nt, Artificial Sequence
  Description of Artificial Sequence: Synthetic oligonucleotide
agagacaugaaau

SEQ ID NO: 144557 - RNA, 13 nt, Artificial Sequence
  Description of Artificial Sequence: Synthetic oligonucleotide
auauauuucucca

SEQ ID NO: 144558 - RNA, 10 nt, Artificial Sequence
  Description of Artificial Sequence: Synthetic oligonucleotide
caugaaggcu

SEQ ID NO: 144559 - RNA, 11 nt, Artificial Sequence
  Description of Artificial Sequence: Synthetic oligonucleotide
gcuggaguggu

SEQ ID NO: 144560 - RNA, 11 nt, Artificial Sequence
  Description of Artificial Sequence: Synthetic oligonucleotide
aggaagagagg

SEQ ID NO: 144561 - RNA, 12 nt, Artificial Sequence
  Description of Artificial Sequence: Synthetic oligonucleotide
cuugcaucgggc

SEQ ID NO: 144562 - RNA, 13 nt, Artificial Sequence
  Description of Artificial Sequence: Synthetic oligonucleotide
auauccuacugug

SEQ ID NO: 144563 - RNA, 13 nt, Artificial Sequence
  Description of Artificial Sequence: Synthetic oligonucleotide
uccuacuguguaa

SEQ ID NO: 144564 - RNA, 12 nt, Artificial Sequence
  Description of Artificial Sequence: Synthetic oligonucleotide
ccuuguagugua

SEQ ID NO: 144565 - RNA, 13 nt, Artificial Sequence
  Description of Artificial Sequence: Synthetic oligonucleotide
ucuuuguugauug

SEQ ID NO: 144566 - RNA, 14 nt, Artificial Sequence
  Description of Artificial Sequence: Synthetic oligonucleotide
uuuguugauugaaa

SEQ ID NO: 144567 - RNA, 15 nt, Artificial Sequence
  Description of Artificial Sequence: Synthetic oligonucleotide
uucuuuuucuuccau

SEQ ID NO: 144568 - RNA, 13 nt, Artificial Sequence
  Description of Artificial Sequence: Synthetic oligonucleotide
aaucuuccuucua

SEQ ID NO: 144569 - RNA, 13 nt, Artificial Sequence
  Description of Artificial Sequence: Synthetic oligonucleotide
uugaaugcuucau

SEQ ID NO: 144570 - RNA, 13 nt, Artificial Sequence
  Description of Artificial Sequence: Synthetic oligonucleotide
ugaaugcuucaug

SEQ ID NO: 144571 - RNA, 13 nt, Artificial Sequence
  Description of Artificial Sequence: Synthetic oligonucleotide
aauucuacuuuga

SEQ ID NO: 144572 - RNA, 13 nt, Artificial Sequence
  Description of Artificial Sequence: Synthetic oligonucleotide
agcaacuacagac

SEQ ID NO: 144573 - RNA, 13 nt, Artificial Sequence
  Description of Artificial Sequence: Synthetic oligonucleotide
gaccaaggucaac

SEQ ID NO: 144574 - RNA, 13 nt, Artificial Sequence
  Description of Artificial Sequence: Synthetic oligonucleotide
cgacuaucucgac

SEQ ID NO: 144575 - RNA, 13 nt, Artificial Sequence
  Description of Artificial Sequence: Synthetic oligonucleotide
aaccuucccaaac

SEQ ID NO: 144576 - RNA, 14 nt, Artificial Sequence
  Description of Artificial Sequence: Synthetic oligonucleotide
ccaagcuuagaacu

SEQ ID NO: 144577 - RNA, 15 nt, Artificial Sequence
  Description of Artificial Sequence: Synthetic oligonucleotide
agcuuagaacuuuaa

SEQ ID NO: 144578 - RNA, 11 nt, Artificial Sequence
  Description of Artificial Sequence: Synthetic oligonucleotide
aagaccaccac

SEQ ID NO: 144579 - RNA, 14 nt, Artificial Sequence
  Description of Artificial Sequence: Synthetic oligonucleotide
gcgagaaauaaagu

SEQ ID NO: 144580 - RNA, 14 nt, Artificial Sequence
  Description of Artificial Sequence: Synthetic oligonucleotide
cgagaaauaaaguu

SEQ ID NO: 144581 - RNA, 12 nt, Artificial Sequence
  Description of Artificial Sequence: Synthetic oligonucleotide
aggaaaugaucc

SEQ ID NO: 144582 - RNA, 13 nt, Artificial Sequence
  Description of Artificial Sequence: Synthetic oligonucleotide
gaagaaaugaaac

SEQ ID NO: 144583 - RNA, 13 nt, Artificial Sequence
  Description of Artificial Sequence: Synthetic oligonucleotide
guuuccauccucc

SEQ ID NO: 144584 - RNA, 15 nt, Artificial Sequence
  Description of Artificial Sequence: Synthetic oligonucleotide
acugaaaaucuuuga

SEQ ID NO: 144585 - RNA, 11 nt, Artificial Sequence
  Description of Artificial Sequence: Synthetic oligonucleotide
ugccguucagg

SEQ ID NO: 144586 - RNA, 13 nt, Artificial Sequence
  Description of Artificial Sequence: Synthetic oligonucleotide
caggguccagaag

SEQ ID NO: 144587 - RNA, 13 nt, Artificial Sequence
  Description of Artificial Sequence: Synthetic oligonucleotide
ucaagacugcuug

SEQ ID NO: 144588 - RNA, 13 nt, Artificial Sequence
  Description of Artificial Sequence: Synthetic oligonucleotide
uccaugucuuugg

SEQ ID NO: 144589 - RNA, 11 nt, Artificial Sequence
  Description of Artificial Sequence: Synthetic oligonucleotide
gccugaaacac

SEQ ID NO: 144590 - RNA, 12 nt, Artificial Sequence
  Description of Artificial Sequence: Synthetic oligonucleotide
ucucuguaccuc

SEQ ID NO: 144591 - RNA, 12 nt, Artificial Sequence
  Description of Artificial Sequence: Synthetic oligonucleotide
agcaagacaaga

SEQ ID NO: 144592 - RNA, 13 nt, Artificial Sequence
  Description of Artificial Sequence: Synthetic oligonucleotide
gcaagacaagaaa

SEQ ID NO: 144593 - RNA, 12 nt, Artificial Sequence
  Description of Artificial Sequence: Synthetic oligonucleotide
uguacaagaucc

SEQ ID NO: 144594 - RNA, 12 nt, Artificial Sequence
  Description of Artificial Sequence: Synthetic oligonucleotide
cguacuugcaga

SEQ ID NO: 144595 - RNA, 13 nt, Artificial Sequence
  Description of Artificial Sequence: Synthetic oligonucleotide
cgaucgauacaga

SEQ ID NO: 144596 - RNA, 13 nt, Artificial Sequence
  Description of Artificial Sequence: Synthetic oligonucleotide
uauaaaaauaaau

SEQ ID NO: 144597 - RNA, 13 nt, Artificial Sequence
  Description of Artificial Sequence: Synthetic oligonucleotide
uaaaaauaaauau

SEQ ID NO: 144598 - RNA, 13 nt, Artificial Sequence
  Description of Artificial Sequence: Synthetic oligonucleotide
uuugacugcugug

SEQ ID NO: 144599 - RNA, 13 nt, Artificial Sequence
  Description of Artificial Sequence: Synthetic oligonucleotide
ggagaugagagac

SEQ ID NO: 144600 - RNA, 10 nt, Artificial Sequence
  Description of Artificial Sequence: Synthetic oligonucleotide
ucccacuugg

SEQ ID NO: 144601 - RNA, 10 nt, Artificial Sequence
  Description of Artificial Sequence: Synthetic oligonucleotide
guucacggcc

SEQ ID NO: 144602 - RNA, 12 nt, Artificial Sequence
  Description of Artificial Sequence: Synthetic oligonucleotide
accaucacacca

SEQ ID NO: 144603 - RNA, 10 nt, Artificial Sequence
  Description of Artificial Sequence: Synthetic oligonucleotide
cugcggguuu

SEQ ID NO: 144604 - RNA, 9 nt, Artificial Sequence
  Description of Artificial Sequence: Synthetic oligonucleotide
uccaguuug

SEQ ID NO: 144605 - RNA, 12 nt, Artificial Sequence
  Description of Artificial Sequence: Synthetic oligonucleotide
uuaaggacuucu

SEQ ID NO: 144606 - RNA, 12 nt, Artificial Sequence
  Description of Artificial Sequence: Synthetic oligonucleotide
agugggacagag

SEQ ID NO: 144607 - RNA, 13 nt, Artificial Sequence
  Description of Artificial Sequence: Synthetic oligonucleotide
auuuguuauugug

SEQ ID NO: 144608 - RNA, 12 nt, Artificial Sequence
  Description of Artificial Sequence: Synthetic oligonucleotide
ucaaaugcauuu

SEQ ID NO: 144609 - RNA, 9 nt, Artificial Sequence
  Description of Artificial Sequence: Synthetic oligonucleotide
aggaaagcc

SEQ ID NO: 144610 - RNA, 10 nt, Artificial Sequence
  Description of Artificial Sequence: Synthetic oligonucleotide
ggaaagcccu

SEQ ID NO: 144611 - RNA, 11 nt, Artificial Sequence
  Description of Artificial Sequence: Synthetic oligonucleotide
ccagcauggcc

SEQ ID NO: 144612 - RNA, 10 nt, Artificial Sequence
  Description of Artificial Sequence: Synthetic oligonucleotide
uucucccuga

SEQ ID NO: 144613 - RNA, 11 nt, Artificial Sequence
  Description of Artificial Sequence: Synthetic oligonucleotide
aagaagcccuu

SEQ ID NO: 144614 - RNA, 11 nt, Artificial Sequence
  Description of Artificial Sequence: Synthetic oligonucleotide
gaagcccuuca

SEQ ID NO: 144615 - RNA, 10 nt, Artificial Sequence
  Description of Artificial Sequence: Synthetic oligonucleotide
cccuucagcg

SEQ ID NO: 144616 - RNA, 10 nt, Artificial Sequence
  Description of Artificial Sequence: Synthetic oligonucleotide
cuucagcggc

SEQ ID NO: 144617 - RNA, 11 nt, Artificial Sequence
  Description of Artificial Sequence: Synthetic oligonucleotide
cagcggccagu

SEQ ID NO: 144618 - RNA, 11 nt, Artificial Sequence
  Description of Artificial Sequence: Synthetic oligonucleotide
gaaaagcuccg

SEQ ID NO: 144619 - RNA, 10 nt, Artificial Sequence
  Description of Artificial Sequence: Synthetic oligonucleotide
aaagcuccgg

SEQ ID NO: 144620 - RNA, 12 nt, Artificial Sequence
  Description of Artificial Sequence: Synthetic oligonucleotide
gucaacagucug

SEQ ID NO: 144621 - RNA, 12 nt, Artificial Sequence
  Description of Artificial Sequence: Synthetic oligonucleotide
agaguucaaaag

SEQ ID NO: 144622 - RNA, 12 nt, Artificial Sequence
  Description of Artificial Sequence: Synthetic oligonucleotide
gaguucaaaagc

SEQ ID NO: 144623 - RNA, 11 nt, Artificial Sequence
  Description of Artificial Sequence: Synthetic oligonucleotide
ucaaaagcccu

SEQ ID NO: 144624 - RNA, 11 nt, Artificial Sequence
  Description of Artificial Sequence: Synthetic oligonucleotide
caaaagcccuu

SEQ ID NO: 144625 - RNA, 11 nt, Artificial Sequence
  Description of Artificial Sequence: Synthetic oligonucleotide
aaagcccuuca

SEQ ID NO: 144626 - RNA, 11 nt, Artificial Sequence
  Description of Artificial Sequence: Synthetic oligonucleotide
aagcccuucag

SEQ ID NO: 144627 - RNA, 12 nt, Artificial Sequence
  Description of Artificial Sequence: Synthetic oligonucleotide
ugaagccgcucg

SEQ ID NO: 144628 - RNA, 11 nt, Artificial Sequence
  Description of Artificial Sequence: Synthetic oligonucleotide
acgccagucaa

SEQ ID NO: 144629 - RNA, 12 nt, Artificial Sequence
  Description of Artificial Sequence: Synthetic oligonucleotide
ucuuggugcgug

SEQ ID NO: 144630 - RNA, 13 nt, Artificial Sequence
  Description of Artificial Sequence: Synthetic oligonucleotide
uuggauucaucag

SEQ ID NO: 144631 - RNA, 12 nt, Artificial Sequence
  Description of Artificial Sequence: Synthetic oligonucleotide
ggaauaccuaag

SEQ ID NO: 144632 - RNA, 11 nt, Artificial Sequence
  Description of Artificial Sequence: Synthetic oligonucleotide
uuugaggcuca

SEQ ID NO: 144633 - RNA, 10 nt, Artificial Sequence
  Description of Artificial Sequence: Synthetic oligonucleotide
cuacaauugg

SEQ ID NO: 144634 - RNA, 11 nt, Artificial Sequence
  Description of Artificial Sequence: Synthetic oligonucleotide
aguuaggagcc

SEQ ID NO: 144635 - RNA, 12 nt, Artificial Sequence
  Description of Artificial Sequence: Synthetic oligonucleotide
gucaauauccac

SEQ ID NO: 144636 - RNA, 12 nt, Artificial Sequence
  Description of Artificial Sequence: Synthetic oligonucleotide
uguucagucaca

SEQ ID NO: 144637 - RNA, 11 nt, Artificial Sequence
  Description of Artificial Sequence: Synthetic oligonucleotide
cacacacauac

SEQ ID NO: 144638 - RNA, 11 nt, Artificial Sequence
  Description of Artificial Sequence: Synthetic oligonucleotide
uccuuuugcuu

SEQ ID NO: 144639 - RNA, 15 nt, Artificial Sequence
  Description of Artificial Sequence: Synthetic oligonucleotide
uuuaaaguaauuuuu

SEQ ID NO: 144640 - RNA, 12 nt, Artificial Sequence
  Description of Artificial Sequence: Synthetic oligonucleotide
aacagucaaugg

SEQ ID NO: 144641 - RNA, 12 nt, Artificial Sequence
  Description of Artificial Sequence: Synthetic oligonucleotide
cgacaaaccaau

SEQ ID NO: 144642 - RNA, 11 nt, Artificial Sequence
  Description of Artificial Sequence: Synthetic oligonucleotide
cugcuaccacu

SEQ ID NO: 144643 - RNA, 12 nt, Artificial Sequence
  Description of Artificial Sequence: Synthetic oligonucleotide
caagcggucuua

SEQ ID NO: 144644 - RNA, 12 nt, Artificial Sequence
  Description of Artificial Sequence: Synthetic oligonucleotide
gucuuaccggcu

SEQ ID NO: 144645 - RNA, 10 nt, Artificial Sequence
  Description of Artificial Sequence: Synthetic oligonucleotide
auggguuacc

SEQ ID NO: 144646 - RNA, 10 nt, Artificial Sequence
  Description of Artificial Sequence: Synthetic oligonucleotide
uuaccugcga

SEQ ID NO: 144647 - RNA, 11 nt, Artificial Sequence
  Description of Artificial Sequence: Synthetic oligonucleotide
aucuugcugag

SEQ ID NO: 144648 - RNA, 12 nt, Artificial Sequence
  Description of Artificial Sequence: Synthetic oligonucleotide
gcauaaaacagu

SEQ ID NO: 144649 - RNA, 11 nt, Artificial Sequence
  Description of Artificial Sequence: Synthetic oligonucleotide
uccuuuauccu

SEQ ID NO: 144650 - RNA, 11 nt, Artificial Sequence
  Description of Artificial Sequence: Synthetic oligonucleotide
aacgcaaguug

SEQ ID NO: 144651 - RNA, 12 nt, Artificial Sequence
  Description of Artificial Sequence: Synthetic oligonucleotide
aacugaaaccau

SEQ ID NO: 144652 - RNA, 13 nt, Artificial Sequence
  Description of Artificial Sequence: Synthetic oligonucleotide
cuuuguuaaauau

SEQ ID NO: 144653 - RNA, 13 nt, Artificial Sequence
  Description of Artificial Sequence: Synthetic oligonucleotide
uauauuaaaaguu

SEQ ID NO: 144654 - RNA, 12 nt, Artificial Sequence
  Description of Artificial Sequence: Synthetic oligonucleotide
uuuugacuuaac

SEQ ID NO: 144655 - RNA, 12 nt, Artificial Sequence
  Description of Artificial Sequence: Synthetic oligonucleotide
caaacucagcac

SEQ ID NO: 144656 - RNA, 10 nt, Artificial Sequence
  Description of Artificial Sequence: Synthetic oligonucleotide
gcugaccuca

SEQ ID NO: 144657 - RNA, 13 nt, Artificial Sequence
  Description of Artificial Sequence: Synthetic oligonucleotide
uuauucagaucgc

SEQ ID NO: 144658 - RNA, 12 nt, Artificial Sequence
  Description of Artificial Sequence: Synthetic oligonucleotide
ggguucugggau

SEQ ID NO: 144659 - RNA, 14 nt, Artificial Sequence
  Description of Artificial Sequence: Synthetic oligonucleotide
uauuggaaauuaug

SEQ ID NO: 144660 - RNA, 12 nt, Artificial Sequence
  Description of Artificial Sequence: Synthetic oligonucleotide
uggaagcacuag

SEQ ID NO: 144661 - RNA, 12 nt, Artificial Sequence
  Description of Artificial Sequence: Synthetic oligonucleotide
uuuuuaugugga

SEQ ID NO: 144662 - RNA, 11 nt, Artificial Sequence
  Description of Artificial Sequence: Synthetic oligonucleotide
gaauugguaga

SEQ ID NO: 144663 - RNA, 12 nt, Artificial Sequence
  Description of Artificial Sequence: Synthetic oligonucleotide
uagacuuggaga

SEQ ID NO: 144664 - RNA, 12 nt, Artificial Sequence
  Description of Artificial Sequence: Synthetic oligonucleotide
uacaguauucca

SEQ ID NO: 144665 - RNA, 14 nt, Artificial Sequence
  Description of Artificial Sequence: Synthetic oligonucleotide
cacugaugaauuaa

SEQ ID NO: 144666 - RNA, 11 nt, Artificial Sequence
  Description of Artificial Sequence: Synthetic oligonucleotide
cacaucaucac

SEQ ID NO: 144667 - RNA, 12 nt, Artificial Sequence
  Description of Artificial Sequence: Synthetic oligonucleotide
ucaccaaacaga

SEQ ID NO: 144668 - RNA, 11 nt, Artificial Sequence
  Description of Artificial Sequence: Synthetic oligonucleotide
gaacaugaugg

SEQ ID NO: 144669 - RNA, 11 nt, Artificial Sequence
  Description of Artificial Sequence: Synthetic oligonucleotide
auguagacugc

SEQ ID NO: 144670 - RNA, 12 nt, Artificial Sequence
  Description of Artificial Sequence: Synthetic oligonucleotide
gaucuauuuaug

SEQ ID NO: 144671 - RNA, 11 nt, Artificial Sequence
  Description of Artificial Sequence: Synthetic oligonucleotide
cacuauuauca

SEQ ID NO: 144672 - RNA, 10 nt, Artificial Sequence
  Description of Artificial Sequence: Synthetic oligonucleotide
ucaguucugc

SEQ ID NO: 144673 - RNA, 12 nt, Artificial Sequence
  Description of Artificial Sequence: Synthetic oligonucleotide
gauuaaaccuac

SEQ ID NO: 144674 - RNA, 12 nt, Artificial Sequence
  Description of Artificial Sequence: Synthetic oligonucleotide
uaaaauccuucu

SEQ ID NO: 144675 - RNA, 11 nt, Artificial Sequence
  Description of Artificial Sequence: Synthetic oligonucleotide
augcuguagac

SEQ ID NO: 144676 - RNA, 12 nt, Artificial Sequence
  Description of Artificial Sequence: Synthetic oligonucleotide
ugauaggaauag

SEQ ID NO: 144677 - RNA, 10 nt, Artificial Sequence
  Description of Artificial Sequence: Synthetic oligonucleotide
auggcccuga

SEQ ID NO: 144678 - RNA, 10 nt, Artificial Sequence
  Description of Artificial Sequence: Synthetic oligonucleotide
uccucaagca

SEQ ID NO: 144679 - RNA, 9 nt, Artificial Sequence
  Description of Artificial Sequence: Synthetic oligonucleotide
uucagccca

SEQ ID NO: 144680 - RNA, 10 nt, Artificial Sequence
  Description of Artificial Sequence: Synthetic oligonucleotide
cugcugaacc

SEQ ID NO: 144681 - RNA, 11 nt, Artificial Sequence
  Description of Artificial Sequence: Synthetic oligonucleotide
aguucucuuca

SEQ ID NO: 144682 - RNA, 10 nt, Artificial Sequence
  Description of Artificial Sequence: Synthetic oligonucleotide
cagccuagag

SEQ ID NO: 144683 - RNA, 12 nt, Artificial Sequence
  Description of Artificial Sequence: Synthetic oligonucleotide
ucugugaagugu

SEQ ID NO: 144684 - RNA, 13 nt, Artificial Sequence
  Description of Artificial Sequence: Synthetic oligonucleotide
gagaaaauuucaa

SEQ ID NO: 144685 - RNA, 10 nt, Artificial Sequence
  Description of Artificial Sequence: Synthetic oligonucleotide
auccuccuga

SEQ ID NO: 144686 - RNA, 11 nt, Artificial Sequence
  Description of Artificial Sequence: Synthetic oligonucleotide
ugacaucauau

SEQ ID NO: 144687 - RNA, 12 nt, Artificial Sequence
  Description of Artificial Sequence: Synthetic oligonucleotide
aucuucaucaua

SEQ ID NO: 144688 - RNA, 12 nt, Artificial Sequence
  Description of Artificial Sequence: Synthetic oligonucleotide
acuagcuauuaa

SEQ ID NO: 144689 - RNA, 13 nt, Artificial Sequence
  Description of Artificial Sequence: Synthetic oligonucleotide
cucuacuaaaaau

SEQ ID NO: 144690 - RNA, 11 nt, Artificial Sequence
  Description of Artificial Sequence: Synthetic oligonucleotide
cuaucucgccu

SEQ ID NO: 144691 - RNA, 12 nt, Artificial Sequence
  Description of Artificial Sequence: Synthetic oligonucleotide
uucgguccaguu

SEQ ID NO: 144692 - RNA, 10 nt, Artificial Sequence
  Description of Artificial Sequence: Synthetic oligonucleotide
auguagccgc

SEQ ID NO: 144693 - RNA, 11 nt, Artificial Sequence
  Description of Artificial Sequence: Synthetic oligonucleotide
gaggagacuug

SEQ ID NO: 144694 - RNA, 11 nt, Artificial Sequence
  Description of Artificial Sequence: Synthetic oligonucleotide
aguagugagga

SEQ ID NO: 144695 - RNA, 13 nt, Artificial Sequence
  Description of Artificial Sequence: Synthetic oligonucleotide
agaugaguacaaa

SEQ ID NO: 144696 - RNA, 12 nt, Artificial Sequence
  Description of Artificial Sequence: Synthetic oligonucleotide
uuguuaaugggc

SEQ ID NO: 144697 - RNA, 12 nt, Artificial Sequence
  Description of Artificial Sequence: Synthetic oligonucleotide
uuuuaauuuauu

SEQ ID NO: 144698 - RNA, 11 nt, Artificial Sequence
  Description of Artificial Sequence: Synthetic oligonucleotide
auuuaaauaug

SEQ ID NO: 144699 - RNA, 12 nt, Artificial Sequence
  Description of Artificial Sequence: Synthetic oligonucleotide
auccuuuguuuc

SEQ ID NO: 144700 - RNA, 13 nt, Artificial Sequence
  Description of Artificial Sequence: Synthetic oligonucleotide
gucuaaguguuug

SEQ ID NO: 144701 - RNA, 11 nt, Artificial Sequence
  Description of Artificial Sequence: Synthetic oligonucleotide
ccugugacaaa

SEQ ID NO: 144702 - RNA, 12 nt, Artificial Sequence
  Description of Artificial Sequence: Synthetic oligonucleotide
caggcugaauua

SEQ ID NO: 144703 - RNA, 13 nt, Artificial Sequence
  Description of Artificial Sequence: Synthetic oligonucleotide
ucauucuuacaau

SEQ ID NO: 144704 - RNA, 14 nt, Artificial Sequence
  Description of Artificial Sequence: Synthetic oligonucleotide
cauucuuacaauug

SEQ ID NO: 144705 - RNA, 11 nt, Artificial Sequence
  Description of Artificial Sequence: Synthetic oligonucleotide
agagaguguac

SEQ ID NO: 144706 - RNA, 11 nt, Artificial Sequence
  Description of Artificial Sequence: Synthetic oligonucleotide
gaacucagcag

SEQ ID NO: 144707 - RNA, 12 nt, Artificial Sequence
  Description of Artificial Sequence: Synthetic oligonucleotide
uuauuuucagua

SEQ ID NO: 144708 - RNA, 11 nt, Artificial Sequence
  Description of Artificial Sequence: Synthetic oligonucleotide
cuuaaauggaa

SEQ ID NO: 144709 - RNA, 12 nt, Artificial Sequence
  Description of Artificial Sequence: Synthetic oligonucleotide
gccuaaaauugu

SEQ ID NO: 144710 - RNA, 12 nt, Artificial Sequence
  Description of Artificial Sequence: Synthetic oligonucleotide
acuaacaucugg

SEQ ID NO: 144711 - RNA, 11 nt, Artificial Sequence
  Description of Artificial Sequence: Synthetic oligonucleotide
gacugugagcu

SEQ ID NO: 144712 - RNA, 13 nt, Artificial Sequence
  Description of Artificial Sequence: Synthetic oligonucleotide
gcuuuuuauuaau

SEQ ID NO: 144713 - RNA, 12 nt, Artificial Sequence
  Description of Artificial Sequence: Synthetic oligonucleotide
ucuucuuacauu

SEQ ID NO: 144714 - RNA, 14 nt, Artificial Sequence
  Description of Artificial Sequence: Synthetic oligonucleotide
auuuguaaaaaugu

SEQ ID NO: 144715 - RNA, 14 nt, Artificial Sequence
  Description of Artificial Sequence: Synthetic oligonucleotide
ucuuaauucauauu

SEQ ID NO: 144716 - RNA, 12 nt, Artificial Sequence
  Description of Artificial Sequence: Synthetic oligonucleotide
aacuaaucauga

SEQ ID NO: 144717 - RNA, 11 nt, Artificial Sequence
  Description of Artificial Sequence: Synthetic oligonucleotide
cugcucuuggg

SEQ ID NO: 144718 - RNA, 12 nt, Artificial Sequence
  Description of Artificial Sequence: Synthetic oligonucleotide
aguagcuuugag

SEQ ID NO: 144719 - RNA, 13 nt, Artificial Sequence
  Description of Artificial Sequence: Synthetic oligonucleotide
acguaauauuuca

SEQ ID NO: 144720 - RNA, 12 nt, Artificial Sequence
  Description of Artificial Sequence: Synthetic oligonucleotide
auucucuucacu

SEQ ID NO: 144721 - RNA, 13 nt, Artificial Sequence
  Description of Artificial Sequence: Synthetic oligonucleotide
uaaugcuaagaaa

SEQ ID NO: 144722 - RNA, 11 nt, Artificial Sequence
  Description of Artificial Sequence: Synthetic oligonucleotide
cugaaaaucaa

SEQ ID NO: 144723 - RNA, 13 nt, Artificial Sequence
  Description of Artificial Sequence: Synthetic oligonucleotide
auaugauuacuuu

SEQ ID NO: 144724 - RNA, 13 nt, Artificial Sequence
  Description of Artificial Sequence: Synthetic oligonucleotide
auuuuguucuaca

SEQ ID NO: 144725 - RNA, 11 nt, Artificial Sequence
  Description of Artificial Sequence: Synthetic oligonucleotide
ccgggacucuc

SEQ ID NO: 144726 - RNA, 13 nt, Artificial Sequence
  Description of Artificial Sequence: Synthetic oligonucleotide
cuuuaaaguaaag

SEQ ID NO: 144727 - RNA, 12 nt, Artificial Sequence
  Description of Artificial Sequence: Synthetic oligonucleotide
cuggaagccugg

SEQ ID NO: 144728 - RNA, 13 nt, Artificial Sequence
  Description of Artificial Sequence: Synthetic oligonucleotide
aaacaaaagagag

SEQ ID NO: 144729 - RNA, 12 nt, Artificial Sequence
  Description of Artificial Sequence: Synthetic oligonucleotide
ucaguuaugccg

SEQ ID NO: 144730 - RNA, 12 nt, Artificial Sequence
  Description of Artificial Sequence: Synthetic oligonucleotide
aaaagaagucca

SEQ ID NO: 144731 - RNA, 10 nt, Artificial Sequence
  Description of Artificial Sequence: Synthetic oligonucleotide
ggugagguua

SEQ ID NO: 144732 - RNA, 10 nt, Artificial Sequence
  Description of Artificial Sequence: Synthetic oligonucleotide
ggaagaggac

SEQ ID NO: 144733 - RNA, 12 nt, Artificial Sequence
  Description of Artificial Sequence: Synthetic oligonucleotide
agcaaguauugu

SEQ ID NO: 144734 - RNA, 11 nt, Artificial Sequence
  Description of Artificial Sequence: Synthetic oligonucleotide
uuguagcacuc

SEQ ID NO: 144735 - RNA, 13 nt, Artificial Sequence
  Description of Artificial Sequence: Synthetic oligonucleotide
caaaaccacaaau

SEQ ID NO: 144736 - RNA, 11 nt, Artificial Sequence
  Description of Artificial Sequence: Synthetic oligonucleotide
aagcccauaca

SEQ ID NO: 144737 - RNA, 10 nt, Artificial Sequence
  Description of Artificial Sequence: Synthetic oligonucleotide
gcccauacag

SEQ ID NO: 144738 - RNA, 11 nt, Artificial Sequence
  Description of Artificial Sequence: Synthetic oligonucleotide
agaaaccuucc

SEQ ID NO: 144739 - RNA, 9 nt, Artificial Sequence
  Description of Artificial Sequence: Synthetic oligonucleotide
uauaccuac

SEQ ID NO: 144740 - RNA, 12 nt, Artificial Sequence
  Description of Artificial Sequence: Synthetic oligonucleotide
ccaguuuucgga

SEQ ID NO: 144741 - RNA, 8 nt, Artificial Sequence
  Description of Artificial Sequence: Synthetic oligonucleotide
gaacaggg

SEQ ID NO: 144742 - RNA, 12 nt, Artificial Sequence
  Description of Artificial Sequence: Synthetic oligonucleotide
uaacuuuccagu

SEQ ID NO: 144743 - RNA, 13 nt, Artificial Sequence
  Description of Artificial Sequence: Synthetic oligonucleotide
aaguuugguuuug

SEQ ID NO: 144744 - RNA, 11 nt, Artificial Sequence
  Description of Artificial Sequence: Synthetic oligonucleotide
uucccacugua

SEQ ID NO: 144745 - RNA, 12 nt, Artificial Sequence
  Description of Artificial Sequence: Synthetic oligonucleotide
gauaccauauga

SEQ ID NO: 144746 - RNA, 10 nt, Artificial Sequence
  Description of Artificial Sequence: Synthetic oligonucleotide
acaugggcug

SEQ ID NO: 144747 - RNA, 12 nt, Artificial Sequence
  Description of Artificial Sequence: Synthetic oligonucleotide
aacuuuuucaua

SEQ ID NO: 144748 - RNA, 11 nt, Artificial Sequence
  Description of Artificial Sequence: Synthetic oligonucleotide
augaggccgga

SEQ ID NO: 144749 - RNA, 10 nt, Artificial Sequence
  Description of Artificial Sequence: Synthetic oligonucleotide
cugcauuugu

SEQ ID NO: 144750 - RNA, 12 nt, Artificial Sequence
  Description of Artificial Sequence: Synthetic oligonucleotide
auguuuacuacc

SEQ ID NO: 144751 - RNA, 14 nt, Artificial Sequence
  Description of Artificial Sequence: Synthetic oligonucleotide
auuuuuugaugaaa

SEQ ID NO: 144752 - RNA, 13 nt, Artificial Sequence
  Description of Artificial Sequence: Synthetic oligonucleotide
agugugugaauuu

SEQ ID NO: 144753 - RNA, 12 nt, Artificial Sequence
  Description of Artificial Sequence: Synthetic oligonucleotide
agcaauguaugu

SEQ ID NO: 144754 - RNA, 13 nt, Artificial Sequence
  Description of Artificial Sequence: Synthetic oligonucleotide
aagcacauauaua

SEQ ID NO: 144755 - RNA, 13 nt, Artificial Sequence
  Description of Artificial Sequence: Synthetic oligonucleotide
uaauaguuucucc

SEQ ID NO: 144756 - RNA, 12 nt, Artificial Sequence
  Description of Artificial Sequence: Synthetic oligonucleotide
guuucuccaaau

SEQ ID NO: 144757 - RNA, 12 nt, Artificial Sequence
  Description of Artificial Sequence: Synthetic oligonucleotide
acuuccuagaaa

SEQ ID NO: 144758 - RNA, 12 nt, Artificial Sequence
  Description of Artificial Sequence: Synthetic oligonucleotide
acaccauauaug

SEQ ID NO: 144759 - RNA, 13 nt, Artificial Sequence
  Description of Artificial Sequence: Synthetic oligonucleotide
uauaugaauggag

SEQ ID NO: 144760 - RNA, 12 nt, Artificial Sequence
  Description of Artificial Sequence: Synthetic oligonucleotide
cauuuacaggga

SEQ ID NO: 144761 - RNA, 12 nt, Artificial Sequence
  Description of Artificial Sequence: Synthetic oligonucleotide
auuuacagggac

SEQ ID NO: 144762 - RNA, 9 nt, Artificial Sequence
  Description of Artificial Sequence: Synthetic oligonucleotide
gggaccuga

SEQ ID NO: 144763 - RNA, 13 nt, Artificial Sequence
  Description of Artificial Sequence: Synthetic oligonucleotide
guuugacugcauc

SEQ ID NO: 144764 - RNA, 12 nt, Artificial Sequence
  Description of Artificial Sequence: Synthetic oligonucleotide
uugacugcaucg

SEQ ID NO: 144765 - RNA, 11 nt, Artificial Sequence
  Description of Artificial Sequence: Synthetic oligonucleotide
aguucacaggg

SEQ ID NO: 144766 - RNA, 12 nt, Artificial Sequence
  Description of Artificial Sequence: Synthetic oligonucleotide
gcaccucugucc

SEQ ID NO: 144767 - RNA, 14 nt, Artificial Sequence
  Description of Artificial Sequence: Synthetic oligonucleotide
guuugucuuuuuaa

SEQ ID NO: 144768 - RNA, 13 nt, Artificial Sequence
  Description of Artificial Sequence: Synthetic oligonucleotide
uugucuuuuuaag

SEQ ID NO: 144769 - RNA, 12 nt, Artificial Sequence
  Description of Artificial Sequence: Synthetic oligonucleotide
cuaaagguuguc

SEQ ID NO: 144770 - RNA, 11 nt, Artificial Sequence
  Description of Artificial Sequence: Synthetic oligonucleotide
agguugucgac

SEQ ID NO: 144771 - RNA, 12 nt, Artificial Sequence
  Description of Artificial Sequence: Synthetic oligonucleotide
ccuggcaauugu

SEQ ID NO: 144772 - RNA, 11 nt, Artificial Sequence
  Description of Artificial Sequence: Synthetic oligonucleotide
guggugcgagg

SEQ ID NO: 144773 - RNA, 12 nt, Artificial Sequence
  Description of Artificial Sequence: Synthetic oligonucleotide
gagacaugaaau

SEQ ID NO: 144774 - RNA, 12 nt, Artificial Sequence
  Description of Artificial Sequence: Synthetic oligonucleotide
uauauuucucca

SEQ ID NO: 144775 - RNA, 9 nt, Artificial Sequence
  Description of Artificial Sequence: Synthetic oligonucleotide
augaaggcu

SEQ ID NO: 144776 - RNA, 10 nt, Artificial Sequence
  Description of Artificial Sequence: Synthetic oligonucleotide
cuggaguggu

SEQ ID NO: 144777 - RNA, 10 nt, Artificial Sequence
  Description of Artificial Sequence: Synthetic oligonucleotide
ggaagagagg

SEQ ID NO: 144778 - RNA, 11 nt, Artificial Sequence
  Description of Artificial Sequence: Synthetic oligonucleotide
uugcaucgggc

SEQ ID NO: 144779 - RNA, 12 nt, Artificial Sequence
  Description of Artificial Sequence: Synthetic oligonucleotide
uauccuacugug

SEQ ID NO: 144780 - RNA, 12 nt, Artificial Sequence
  Description of Artificial Sequence: Synthetic oligonucleotide
ccuacuguguaa

SEQ ID NO: 144781 - RNA, 11 nt, Artificial Sequence
  Description of Artificial Sequence: Synthetic oligonucleotide
cuuguagugua

SEQ ID NO: 144782 - RNA, 12 nt, Artificial Sequence
  Description of Artificial Sequence: Synthetic oligonucleotide
cuuuguugauug

SEQ ID NO: 144783 - RNA, 13 nt, Artificial Sequence
  Description of Artificial Sequence: Synthetic oligonucleotide
uuguugauugaaa

SEQ ID NO: 144784 - RNA, 14 nt, Artificial Sequence
  Description of Artificial Sequence: Synthetic oligonucleotide
ucuuuuucuuccau

SEQ ID NO: 144785 - RNA, 12 nt, Artificial Sequence
  Description of Artificial Sequence: Synthetic oligonucleotide
aucuuccuucua

SEQ ID NO: 144786 - RNA, 12 nt, Artificial Sequence
  Description of Artificial Sequence: Synthetic oligonucleotide
ugaaugcuucau

SEQ ID NO: 144787 - RNA, 12 nt, Artificial Sequence
  Description of Artificial Sequence: Synthetic oligonucleotide
gaaugcuucaug

SEQ ID NO: 144788 - RNA, 12 nt, Artificial Sequence
  Description of Artificial Sequence: Synthetic oligonucleotide
auucuacuuuga

SEQ ID NO: 144789 - RNA, 12 nt, Artificial Sequence
  Description of Artificial Sequence: Synthetic oligonucleotide
gcaacuacagac

SEQ ID NO: 144790 - RNA, 12 nt, Artificial Sequence
  Description of Artificial Sequence: Synthetic oligonucleotide
accaaggucaac

SEQ ID NO: 144791 - RNA, 12 nt, Artificial Sequence
  Description of Artificial Sequence: Synthetic oligonucleotide
gacuaucucgac

SEQ ID NO: 144792 - RNA, 12 nt, Artificial Sequence
  Description of Artificial Sequence: Synthetic oligonucleotide
accuucccaaac

SEQ ID NO: 144793 - RNA, 13 nt, Artificial Sequence
  Description of Artificial Sequence: Synthetic oligonucleotide
caagcuuagaacu

SEQ ID NO: 144794 - RNA, 14 nt, Artificial Sequence
  Description of Artificial Sequence: Synthetic oligonucleotide
gcuuagaacuuuaa

SEQ ID NO: 144795 - RNA, 13 nt, Artificial Sequence
  Description of Artificial Sequence: Synthetic oligonucleotide
aacuuuaagcaac

SEQ ID NO: 144796 - RNA, 10 nt, Artificial Sequence
  Description of Artificial Sequence: Synthetic oligonucleotide
agaccaccac

SEQ ID NO: 144797 - RNA, 13 nt, Artificial Sequence
  Description of Artificial Sequence: Synthetic oligonucleotide
cgagaaauaaagu

SEQ ID NO: 144798 - RNA, 13 nt, Artificial Sequence
  Description of Artificial Sequence: Synthetic oligonucleotide
gagaaauaaaguu

SEQ ID NO: 144799 - RNA, 11 nt, Artificial Sequence
  Description of Artificial Sequence: Synthetic oligonucleotide
ggaaaugaucc

SEQ ID NO: 144800 - RNA, 12 nt, Artificial Sequence
  Description of Artificial Sequence: Synthetic oligonucleotide
aagaaaugaaac

SEQ ID NO: 144801 - RNA, 12 nt, Artificial Sequence
  Description of Artificial Sequence: Synthetic oligonucleotide
uuuccauccucc

SEQ ID NO: 144802 - RNA, 14 nt, Artificial Sequence
  Description of Artificial Sequence: Synthetic oligonucleotide
cugaaaaucuuuga

SEQ ID NO: 144803 - RNA, 10 nt, Artificial Sequence
  Description of Artificial Sequence: Synthetic oligonucleotide
gccguucagg

SEQ ID NO: 144804 - RNA, 12 nt, Artificial Sequence
  Description of Artificial Sequence: Synthetic oligonucleotide
aggguccagaag

SEQ ID NO: 144805 - RNA, 12 nt, Artificial Sequence
  Description of Artificial Sequence: Synthetic oligonucleotide
caagacugcuug

SEQ ID NO: 144806 - RNA, 12 nt, Artificial Sequence
  Description of Artificial Sequence: Synthetic oligonucleotide
ccaugucuuugg

SEQ ID NO: 144807 - RNA, 10 nt, Artificial Sequence
  Description of Artificial Sequence: Synthetic oligonucleotide
ccugaaacac

SEQ ID NO: 144808 - RNA, 11 nt, Artificial Sequence
  Description of Artificial Sequence: Synthetic oligonucleotide
cucuguaccuc

SEQ ID NO: 144809 - RNA, 11 nt, Artificial Sequence
  Description of Artificial Sequence: Synthetic oligonucleotide
gcaagacaaga

SEQ ID NO: 144810 - RNA, 12 nt, Artificial Sequence
  Description of Artificial Sequence: Synthetic oligonucleotide
caagacaagaaa

SEQ ID NO: 144811 - RNA, 11 nt, Artificial Sequence
  Description of Artificial Sequence: Synthetic oligonucleotide
guacaagaucc

SEQ ID NO: 144812 - RNA, 11 nt, Artificial Sequence
  Description of Artificial Sequence: Synthetic oligonucleotide
guacuugcaga

SEQ ID NO: 144813 - RNA, 12 nt, Artificial Sequence
  Description of Artificial Sequence: Synthetic oligonucleotide
gaucgauacaga

SEQ ID NO: 144814 - RNA, 12 nt, Artificial Sequence
  Description of Artificial Sequence: Synthetic oligonucleotide
auaaaaauaaau

SEQ ID NO: 144815 - RNA, 12 nt, Artificial Sequence
  Description of Artificial Sequence: Synthetic oligonucleotide
aaaaauaaauau

SEQ ID NO: 144816 - RNA, 12 nt, Artificial Sequence
  Description of Artificial Sequence: Synthetic oligonucleotide
uugacugcugug

SEQ ID NO: 144817 - RNA, 12 nt, Artificial Sequence
  Description of Artificial Sequence: Synthetic oligonucleotide
gagaugagagac

SEQ ID NO: 144818 - RNA, 9 nt, Artificial Sequence
  Description of Artificial Sequence: Synthetic oligonucleotide
cccacuugg

SEQ ID NO: 144819 - RNA, 3594 nt, Homo sapiens
gucuaucagcgauuucaucuucaggccuggacuacaccacucacccucccagugugcuugagaaacaaacugcacccacugaacuccgcagcuagcauccaaaucagcccuugagauuugaggccuuggagacucagauccugaacaagagagaacaaaaucucuacuuugauggaacuuccauucuguggggaagagacugacaauaagcaauuaaauaaauaagaacucagcaguaggccuugccucagauccaaggucacucggaagaggccaugucuacccucaaugacacucauggaggaaaugcugagagaagcauucagaugcaugacacaagguaagacugccaaaaaucuuguucuugcucuccucauuuuguuauuuguuuuauuuuuaggaguuuugagagcaaaaugacaacacccagaaauucaguaaaugggacuuucccggcagagccaaugaaaggcccuauugcuaugcaaucugguccaaaaccacucuucaggaggaugucuucacuggugggccccacgcaaagcuucuucaugagggaaucuaagacuuugggggcuguccagauuaugaaugggcucuuccacauugcccuggggggucuucugaugaucccagcagggaucuaugcacccaucugugugacugugugguacccucucuggggaggcauuauguauauuauuuccggaucacuccuggcagcaacggagaaaaacuccaggaaguguuuggucaaaggaaaaaugauaaugaauucauugagccucuuugcugccauuucuggaaugauucuuucaaucauggacauacuuaauauuaaaauuucccauuuuuuaaaaauggagagucugaauuuuauuagagcucacacaccauauauuaacauauacaacugugaaccagcuaaucccucugagaaaaacuccccaucuacccaauacuguuacagcauacaaucucuguucuugggcauuuugucagugaugcugaucuuugccuucuuccaggaacuuguaauagcuggcaucguugagaaugaauggaaaagaacgugcuccagacccaaaucuaacauaguucuccugucagcagaagaaaaaaaagaacagacuauugaaauaaaagaagaagugguugggcuaacugaaacaucuucccaaccaaagaaugaagaagacauugaaauuauuccaauccaagaagaggaagaagaagaaacagagacgaacuuuccagaaccuccccaagaucaggaauccucaccaauagaaaaugacagcucuccuuaagugauuucuucuguuuucuguuuccuuuuuuaaacauuaguguucauagcuuccaagagacaugcugacuuucauuucuugagguacucugcacauacgcaccacaucucuaucuggccuuugcauggagugaccauagcuccuucucucuuacauugaauguagagaauguagccauuguagcagcuuguguugucacgcuucuucuuuugagcaacuuucuuacacugaagaaaggcagaaugagugcuucagaaugugauuuccuacuaaccuguuccuuggauaggcuuuuuaguauaguauuuuuuuuugucauuuucuccaucaacaaccagggagacugcaccugauggaaaagauauaugacugcuucaugacauuccuaaacuaucuuuuuuuuauuccacaucuacguuuuugguggagucccuuuugcaucauuguuuuaaggaugauaaaaaaaaauaacaacuagggacaauacagaacccauuccauuuaucuuucuacagggcugacauuguggcacauucuuagaguuaccacaccccaugagggaagcucuaaauagccaacacccaucuguuuuuuguaaaaacagcauagcuuauacauggacaugucucugccuuaacuuuuccuaacucccacucuaggcuauuguuugcaugucuaccuacuuuuagccauuaugcgagaaaagaaaaaaaugaccauagaaaaugccaccaugaggugcccaaauuucaaauaauaauuaacauuuaguuauauuuauaauuuccagaugacaaaguauuucaucaaauaacuucauuugauguuccaugaucaagaaagaaucccuaucucuauuuuacaaguaauucaaagaggccaaauaacuuguaaacaagaaaagguaacuugucaacagucauaacuaguaauuaugagagccuuguuucauaaccaggucuucuuacucaaauccugugauguuugaaauaaccaaauugucucuccaaugucugcauaaacugugagagccaagucaacagcuuuuaucaagaauuuacucucugaccagcaauaaacaagcacugagagacacagagagccagauucagauuuuacccauggggauaaaaagacucagacuuucaccacauuuggaaaacuacuugcaucauaaauauauaauaacugguaguuuauaugaagcagacacuaagugcuauagacacucucagaauaucauacuuggaaacaauguaauuaaaaugccgaaucugagucaacagcugcccuacuuuucaauucagauauacuaguaccuuaccuagaaauaauguuaaccuagggugaagucacuauaaucuguagucuauuauuugggcauuugcuacaugaugagugcugccagauuguggcagguaaagagacaauguaauuugcacucccuaugauauuucuacauuuuuagcgaccacuaguggaagacauuccccaaaauuagaaaaaaaggagauagaagauuucugucuauguaaaguucucaaaauuuguucuaaauuaauaaaacuaucuuuguguucuuuucugcaacagaugauuccaacauggguguuugucuauucuucuuuacucuugaaacauuagaccaugggaggcucuuacagccuugaguugauauuuauacaacccaaaucuagguuugaacggugaggugucaggucaucaaauauucaugucuauauagucuuacacagguucucaaaaaaaauguucaugggauaggucauugauaauggauuccuuauucugagaacuccagacgacugaaauauaugagagaaggaaaaggacauaguaggagcaggccugagaaaaaaaugaaagucagaaaucuuuaaaaaaauacaagaucuuauuucuaucuuauuuuuucuccucuucugaaauauauaugaggauuccucuccaaacccaugguuucucuaagaauuuugagucauuuguaugaccucaaauaauuaguuuuagcugaccucacauaacuccuuauaauaggagacaucuuuaaugucugcuauuaaagaaggaugaaaauuccuaugaccuucuccccgauuaucccuuuggcaauauagagucaaauaauaacauugaccaauaguaaacaugcuuugccaagaaguagaagauauauucucuagccuuaguuuuuccucccaauuugcauuuuuguaaaaauaauguuguauccacaaaggaaauaaacuuuaaaaacccaagugca

SEQ ID NO: 144820 - RNA, 3331 nt, Homo sapiens
gucuaucagcgauuucaucuucaggccuggacuacaccacucacccucccagugugcuugagaaacaaacugcacccacugaacuccgcagcuagcauccaaaucagcccuugagauuugaggccuuggagacucaggaguuuugagagcaaaaugacaacacccagaaauucaguaaaugggacuuucccggcagagccaaugaaaggcccuauugcuaugcaaucugguccaaaaccacucuucaggaggaugucuucacuggugggccccacgcaaagcuucuucaugagggaaucuaagacuuugggggcuguccagauuaugaaugggcucuuccacauugcccuggggggucuucugaugaucccagcagggaucuaugcacccaucugugugacugugugguacccucucuggggaggcauuauguauauuauuuccggaucacuccuggcagcaacggagaaaaacuccaggaaguguuuggucaaaggaaaaaugauaaugaauucauugagccucuuugcugccauuucuggaaugauucuuucaaucauggacauacuuaauauuaaaauuucccauuuuuuaaaaauggagagucugaauuuuauuagagcucacacaccauauauuaacauauacaacugugaaccagcuaaucccucugagaaaaacuccccaucuacccaauacuguuacagcauacaaucucuguucuugggcauuuugucagugaugcugaucuuugccuucuuccaggaacuuguaauagcuggcaucguugagaaugaauggaaaagaacgugcuccagacccaaaucuaacauaguucuccugucagcagaagaaaaaaaagaacagacuauugaaauaaaagaagaagugguugggcuaacugaaacaucuucccaaccaaagaaugaagaagacauugaaauuauuccaauccaagaagaggaagaagaagaaacagagacgaacuuuccagaaccuccccaagaucaggaauccucaccaauagaaaaugacagcucuccuuaagugauuucuucuguuuucuguuuccuuuuuuaaacauuaguguucauagcuuccaagagacaugcugacuuucauuucuugagguacucugcacauacgcaccacaucucuaucuggccuuugcauggagugaccauagcuccuucucucuuacauugaauguagagaauguagccauuguagcagcuuguguugucacgcuucuucuuuugagcaacuuucuuacacugaagaaaggcagaaugagugcuucagaaugugauuuccuacuaaccuguuccuuggauaggcuuuuuaguauaguauuuuuuuuugucauuuucuccaucaacaaccagggagacugcaccugauggaaaagauauaugacugcuucaugacauuccuaaacuaucuuuuuuuuauuccacaucuacguuuuugguggagucccuuuugcaucauuguuuuaaggaugauaaaaaaaaauaacaacuagggacaauacagaacccauuccauuuaucuuucuacagggcugacauuguggcacauucuuagaguuaccacaccccaugagggaagcucuaaauagccaacacccaucuguuuuuuguaaaaacagcauagcuuauacauggacaugucucugccuuaacuuuuccuaacucccacucuaggcuauuguuugcaugucuaccuacuuuuagccauuaugcgagaaaagaaaaaaaugaccauagaaaaugccaccaugaggugcccaaauuucaaauaauaauuaacauuuaguuauauuuauaauuuccagaugacaaaguauuucaucaaauaacuucauuugauguuccaugaucaagaaagaaucccuaucucuauuuuacaaguaauucaaagaggccaaauaacuuguaaacaagaaaagguaacuugucaacagucauaacuaguaauuaugagagccuuguuucauaaccaggucuucuuacucaaauccugugauguuugaaauaaccaaauugucucuccaaugucugcauaaacugugagagccaagucaacagcuuuuaucaagaauuuacucucugaccagcaauaaacaagcacugagagacacagagagccagauucagauuuuacccauggggauaaaaagacucagacuuucaccacauuuggaaaacuacuugcaucauaaauauauaauaacugguaguuuauaugaagcagacacuaagugcuauagacacucucagaauaucauacuuggaaacaauguaauuaaaaugccgaaucugagucaacagcugcccuacuuuucaauucagauauacuaguaccuuaccuagaaauaauguuaaccuagggugaagucacuauaaucuguagucuauuauuugggcauuugcuacaugaugagugcugccagauuguggcagguaaagagacaauguaauuugcacucccuaugauauuucuacauuuuuagcgaccacuaguggaagacauuccccaaaauuagaaaaaaaggagauagaagauuucugucuauguaaaguucucaaaauuuguucuaaauuaauaaaacuaucuuuguguucuuuucugcaacagaugauuccaacauggguguuugucuauucuucuuuacucuugaaacauuagaccaugggaggcucuuacagccuugaguugauauuuauacaacccaaaucuagguuugaacggugaggugucaggucaucaaauauucaugucuauauagucuuacacagguucucaaaaaaaauguucaugggauaggucauugauaauggauuccuuauucugagaacuccagacgacugaaauauaugagagaaggaaaaggacauaguaggagcaggccugagaaaaaaaugaaagucagaaaucuuuaaaaaaauacaagaucuuauuucuaucuuauuuuuucuccucuucugaaauauauaugaggauuccucuccaaacccaugguuucucuaagaauuuugagucauuuguaugaccucaaauaauuaguuuuagcugaccucacauaacuccuuauaauaggagacaucuuuaaugucugcuauuaaagaaggaugaaaauuccuaugaccuucuccccgauuaucccuuuggcaauauagagucaaauaauaacauugaccaauaguaaacaugcuuugccaagaaguagaagauauauucucuagccuuaguuuuuccucccaauuugcauuuuuguaaaaauaauguuguauccacaaaggaaauaaacuuuaaaaacccaagugca

SEQ ID NO: 144821 - RNA, 19 nt, Artificial Sequence
  Description of Artificial Sequence: Synthetic oligonucleotide
gucuaucagcgauuucauc

SEQ ID NO: 144822 - RNA, 19 nt, Artificial Sequence
  Description of Artificial Sequence: Synthetic oligonucleotide
cuucaggccuggacuacac

SEQ ID NO: 144823 - RNA, 19 nt, Artificial Sequence
  Description of Artificial Sequence: Synthetic oligonucleotide
ccacucacccucccagugu

SEQ ID NO: 144824 - RNA, 19 nt, Artificial Sequence
  Description of Artificial Sequence: Synthetic oligonucleotide
ugcuugagaaacaaacugc

SEQ ID NO: 144825 - RNA, 19 nt, Artificial Sequence
  Description of Artificial Sequence: Synthetic oligonucleotide
cacccacugaacuccgcag

SEQ ID NO: 144826 - RNA, 19 nt, Artificial Sequence
  Description of Artificial Sequence: Synthetic oligonucleotide
gcuagcauccaaaucagcc

SEQ ID NO: 144827 - RNA, 19 nt, Artificial Sequence
  Description of Artificial Sequence: Synthetic oligonucleotide
ccuugagauuugaggccuu

SEQ ID NO: 144828 - RNA, 19 nt, Artificial Sequence
  Description of Artificial Sequence: Synthetic oligonucleotide
uggagacucagauccugaa

SEQ ID NO: 144829 - RNA, 19 nt, Artificial Sequence
  Description of Artificial Sequence: Synthetic oligonucleotide
acaagagagaacaaaaucu

SEQ ID NO: 144830 - RNA, 19 nt, Artificial Sequence
  Description of Artificial Sequence: Synthetic oligonucleotide
ucuacuuugauggaacuuc

SEQ ID NO: 144831 - RNA, 19 nt, Artificial Sequence
  Description of Artificial Sequence: Synthetic oligonucleotide
ccauucuguggggaagaga

SEQ ID NO: 144832 - RNA, 19 nt, Artificial Sequence
  Description of Artificial Sequence: Synthetic oligonucleotide
acugacaauaagcaauuaa

SEQ ID NO: 144833 - RNA, 19 nt, Artificial Sequence
  Description of Artificial Sequence: Synthetic oligonucleotide
aauaaauaagaacucagca

SEQ ID NO: 144834 - RNA, 19 nt, Artificial Sequence
  Description of Artificial Sequence: Synthetic oligonucleotide
aguaggccuugccucagau

SEQ ID NO: 144835 - RNA, 19 nt, Artificial Sequence
  Description of Artificial Sequence: Synthetic oligonucleotide
uccaaggucacucggaaga

SEQ ID NO: 144836 - RNA, 19 nt, Artificial Sequence
  Description of Artificial Sequence: Synthetic oligonucleotide
aggccaugucuacccucaa

SEQ ID NO: 144837 - RNA, 19 nt, Artificial Sequence
  Description of Artificial Sequence: Synthetic oligonucleotide
augacacucauggaggaaa

SEQ ID NO: 144838 - RNA, 19 nt, Artificial Sequence
  Description of Artificial Sequence: Synthetic oligonucleotide
augcugagagaagcauuca

SEQ ID NO: 144839 - RNA, 19 nt, Artificial Sequence
  Description of Artificial Sequence: Synthetic oligonucleotide
agaugcaugacacaaggua

SEQ ID NO: 144840 - RNA, 19 nt, Artificial Sequence
  Description of Artificial Sequence: Synthetic oligonucleotide
aagacugccaaaaaucuug

SEQ ID NO: 144841 - RNA, 19 nt, Artificial Sequence
  Description of Artificial Sequence: Synthetic oligonucleotide
guucuugcucuccucauuu

SEQ ID NO: 144842 - RNA, 19 nt, Artificial Sequence
  Description of Artificial Sequence: Synthetic oligonucleotide
uuguuauuuguuuuauuuu

SEQ ID NO: 144843 - RNA, 19 nt, Artificial Sequence
  Description of Artificial Sequence: Synthetic oligonucleotide
uuaggaguuuugagagcaa

SEQ ID NO: 144844 - RNA, 19 nt, Artificial Sequence
  Description of Artificial Sequence: Synthetic oligonucleotide
aaaugacaacacccagaaa

SEQ ID NO: 144845 - RNA, 19 nt, Artificial Sequence
  Description of Artificial Sequence: Synthetic oligonucleotide
auucaguaaaugggacuuu

SEQ ID NO: 144846 - RNA, 19 nt, Artificial Sequence
  Description of Artificial Sequence: Synthetic oligonucleotide
ucccggcagagccaaugaa

SEQ ID NO: 144847 - RNA, 19 nt, Artificial Sequence
  Description of Artificial Sequence: Synthetic oligonucleotide
aaggcccuauugcuaugca

SEQ ID NO: 144848 - RNA, 19 nt, Artificial Sequence
  Description of Artificial Sequence: Synthetic oligonucleotide
aaucugguccaaaaccacu

SEQ ID NO: 144849 - RNA, 19 nt, Artificial Sequence
  Description of Artificial Sequence: Synthetic oligonucleotide
ucuucaggaggaugucuuc

SEQ ID NO: 144850 - RNA, 19 nt, Artificial Sequence
  Description of Artificial Sequence: Synthetic oligonucleotide
cacuggugggccccacgca

SEQ ID NO: 144851 - RNA, 19 nt, Artificial Sequence
  Description of Artificial Sequence: Synthetic oligonucleotide
aaagcuucuucaugaggga

SEQ ID NO: 144852 - RNA, 19 nt, Artificial Sequence
  Description of Artificial Sequence: Synthetic oligonucleotide
aaucuaagacuuugggggc

SEQ ID NO: 144853 - RNA, 19 nt, Artificial Sequence
  Description of Artificial Sequence: Synthetic oligonucleotide
cuguccagauuaugaaugg

SEQ ID NO: 144854 - RNA, 19 nt, Artificial Sequence
  Description of Artificial Sequence: Synthetic oligonucleotide
ggcucuuccacauugcccu

SEQ ID NO: 144855 - RNA, 19 nt, Artificial Sequence
  Description of Artificial Sequence: Synthetic oligonucleotide
uggggggucuucugaugau

SEQ ID NO: 144856 - RNA, 19 nt, Artificial Sequence
  Description of Artificial Sequence: Synthetic oligonucleotide
ucccagcagggaucuaugc

SEQ ID NO: 144857 - RNA, 19 nt, Artificial Sequence
  Description of Artificial Sequence: Synthetic oligonucleotide
cacccaucugugugacugu

SEQ ID NO: 144858 - RNA, 19 nt, Artificial Sequence
  Description of Artificial Sequence: Synthetic oligonucleotide
ugugguacccucucugggg

SEQ ID NO: 144859 - RNA, 19 nt, Artificial Sequence
  Description of Artificial Sequence: Synthetic oligonucleotide
gaggcauuauguauauuau

SEQ ID NO: 144860 - RNA, 19 nt, Artificial Sequence
  Description of Artificial Sequence: Synthetic oligonucleotide
uuuccggaucacuccuggc

SEQ ID NO: 144861 - RNA, 19 nt, Artificial Sequence
  Description of Artificial Sequence: Synthetic oligonucleotide
cagcaacggagaaaaacuc

SEQ ID NO: 144862 - RNA, 19 nt, Artificial Sequence
  Description of Artificial Sequence: Synthetic oligonucleotide
ccaggaaguguuuggucaa

SEQ ID NO: 144863 - RNA, 19 nt, Artificial Sequence
  Description of Artificial Sequence: Synthetic oligonucleotide
aaggaaaaaugauaaugaa

SEQ ID NO: 144864 - RNA, 19 nt, Artificial Sequence
  Description of Artificial Sequence: Synthetic oligonucleotide
auucauugagccucuuugc

SEQ ID NO: 144865 - RNA, 19 nt, Artificial Sequence
  Description of Artificial Sequence: Synthetic oligonucleotide
cugccauuucuggaaugau

SEQ ID NO: 144866 - RNA, 19 nt, Artificial Sequence
  Description of Artificial Sequence: Synthetic oligonucleotide
uucuuucaaucauggacau

SEQ ID NO: 144867 - RNA, 19 nt, Artificial Sequence
  Description of Artificial Sequence: Synthetic oligonucleotide
uacuuaauauuaaaauuuc

SEQ ID NO: 144868 - RNA, 19 nt, Artificial Sequence
  Description of Artificial Sequence: Synthetic oligonucleotide
cccauuuuuuaaaaaugga

SEQ ID NO: 144869 - RNA, 19 nt, Artificial Sequence
  Description of Artificial Sequence: Synthetic oligonucleotide
agagucugaauuuuauuag

SEQ ID NO: 144870 - RNA, 19 nt, Artificial Sequence
  Description of Artificial Sequence: Synthetic oligonucleotide
gagcucacacaccauauau

SEQ ID NO: 144871 - RNA, 19 nt, Artificial Sequence
  Description of Artificial Sequence: Synthetic oligonucleotide
uuaacauauacaacuguga

SEQ ID NO: 144872 - RNA, 19 nt, Artificial Sequence
  Description of Artificial Sequence: Synthetic oligonucleotide
aaccagcuaaucccucuga

SEQ ID NO: 144873 - RNA, 19 nt, Artificial Sequence
  Description of Artificial Sequence: Synthetic oligonucleotide
agaaaaacuccccaucuac

SEQ ID NO: 144874 - RNA, 19 nt, Artificial Sequence
  Description of Artificial Sequence: Synthetic oligonucleotide
cccaauacuguuacagcau

SEQ ID NO: 144875 - RNA, 19 nt, Artificial Sequence
  Description of Artificial Sequence: Synthetic oligonucleotide
uacaaucucuguucuuggg

SEQ ID NO: 144876 - RNA, 19 nt, Artificial Sequence
  Description of Artificial Sequence: Synthetic oligonucleotide
gcauuuugucagugaugcu

SEQ ID NO: 144877 - RNA, 19 nt, Artificial Sequence
  Description of Artificial Sequence: Synthetic oligonucleotide
ugaucuuugccuucuucca

SEQ ID NO: 144878 - RNA, 19 nt, Artificial Sequence
  Description of Artificial Sequence: Synthetic oligonucleotide
aggaacuuguaauagcugg

SEQ ID NO: 144879 - RNA, 19 nt, Artificial Sequence
  Description of Artificial Sequence: Synthetic oligonucleotide
gcaucguugagaaugaaug

SEQ ID NO: 144880 - RNA, 19 nt, Artificial Sequence
  Description of Artificial Sequence: Synthetic oligonucleotide
ggaaaagaacgugcuccag

SEQ ID NO: 144881 - RNA, 19 nt, Artificial Sequence
  Description of Artificial Sequence: Synthetic oligonucleotide
gacccaaaucuaacauagu

SEQ ID NO: 144882 - RNA, 19 nt, Artificial Sequence
  Description of Artificial Sequence: Synthetic oligonucleotide
uucuccugucagcagaaga

SEQ ID NO: 144883 - RNA, 19 nt, Artificial Sequence
  Description of Artificial Sequence: Synthetic oligonucleotide
aaaaaaaagaacagacuau

SEQ ID NO: 144884 - RNA, 19 nt, Artificial Sequence
  Description of Artificial Sequence: Synthetic oligonucleotide
uugaaauaaaagaagaagu

SEQ ID NO: 144885 - RNA, 19 nt, Artificial Sequence
  Description of Artificial Sequence: Synthetic oligonucleotide
ugguugggcuaacugaaac

SEQ ID NO: 144886 - RNA, 19 nt, Artificial Sequence
  Description of Artificial Sequence: Synthetic oligonucleotide
caucuucccaaccaaagaa

SEQ ID NO: 144887 - RNA, 19 nt, Artificial Sequence
  Description of Artificial Sequence: Synthetic oligonucleotide
augaagaagacauugaaau

SEQ ID NO: 144888 - RNA, 19 nt, Artificial Sequence
  Description of Artificial Sequence: Synthetic oligonucleotide
uuauuccaauccaagaaga

SEQ ID NO: 144889 - RNA, 19 nt, Artificial Sequence
  Description of Artificial Sequence: Synthetic oligonucleotide
aggaagaagaagaaacaga

SEQ ID NO: 144890 - RNA, 19 nt, Artificial Sequence
  Description of Artificial Sequence: Synthetic oligonucleotide
agacgaacuuuccagaacc

SEQ ID NO: 144891 - RNA, 19 nt, Artificial Sequence
  Description of Artificial Sequence: Synthetic oligonucleotide
cuccccaagaucaggaauc

SEQ ID NO: 144892 - RNA, 19 nt, Artificial Sequence
  Description of Artificial Sequence: Synthetic oligonucleotide
ccucaccaauagaaaauga

SEQ ID NO: 144893 - RNA, 19 nt, Artificial Sequence
  Description of Artificial Sequence: Synthetic oligonucleotide
acagcucuccuuaagugau

SEQ ID NO: 144894 - RNA, 19 nt, Artificial Sequence
  Description of Artificial Sequence: Synthetic oligonucleotide
uuucuucuguuuucuguuu

SEQ ID NO: 144895 - RNA, 19 nt, Artificial Sequence
  Description of Artificial Sequence: Synthetic oligonucleotide
uccuuuuuuaaacauuagu

SEQ ID NO: 144896 - RNA, 19 nt, Artificial Sequence
  Description of Artificial Sequence: Synthetic oligonucleotide
uguucauagcuuccaagag

SEQ ID NO: 144897 - RNA, 19 nt, Artificial Sequence
  Description of Artificial Sequence: Synthetic oligonucleotide
gacaugcugacuuucauuu

SEQ ID NO: 144898 - RNA, 19 nt, Artificial Sequence
  Description of Artificial Sequence: Synthetic oligonucleotide
ucuugagguacucugcaca

SEQ ID NO: 144899 - RNA, 19 nt, Artificial Sequence
  Description of Artificial Sequence: Synthetic oligonucleotide
auacgcaccacaucucuau

SEQ ID NO: 144900 - RNA, 19 nt, Artificial Sequence
  Description of Artificial Sequence: Synthetic oligonucleotide
ucuggccuuugcauggagu

SEQ ID NO: 144901 - RNA, 19 nt, Artificial Sequence
  Description of Artificial Sequence: Synthetic oligonucleotide
ugaccauagcuccuucucu

SEQ ID NO: 144902 - RNA, 19 nt, Artificial Sequence
  Description of Artificial Sequence: Synthetic oligonucleotide
ucuuacauugaauguagag

SEQ ID NO: 144903 - RNA, 19 nt, Artificial Sequence
  Description of Artificial Sequence: Synthetic oligonucleotide
gaauguagccauuguagca

SEQ ID NO: 144904 - RNA, 19 nt, Artificial Sequence
  Description of Artificial Sequence: Synthetic oligonucleotide
agcuuguguugucacgcuu

SEQ ID NO: 144905 - RNA, 19 nt, Artificial Sequence
  Description of Artificial Sequence: Synthetic oligonucleotide
ucuucuuuugagcaacuuu

SEQ ID NO: 144906 - RNA, 19 nt, Artificial Sequence
  Description of Artificial Sequence: Synthetic oligonucleotide
ucuuacacugaagaaaggc

SEQ ID NO: 144907 - RNA, 19 nt, Artificial Sequence
  Description of Artificial Sequence: Synthetic oligonucleotide
cagaaugagugcuucagaa

SEQ ID NO: 144908 - RNA, 19 nt, Artificial Sequence
  Description of Artificial Sequence: Synthetic oligonucleotide
augugauuuccuacuaacc

SEQ ID NO: 144909 - RNA, 19 nt, Artificial Sequence
  Description of Artificial Sequence: Synthetic oligonucleotide
cuguuccuuggauaggcuu

SEQ ID NO: 144910 - RNA, 19 nt, Artificial Sequence
  Description of Artificial Sequence: Synthetic oligonucleotide
uuuuaguauaguauuuuuu

SEQ ID NO: 144911 - RNA, 19 nt, Artificial Sequence
  Description of Artificial Sequence: Synthetic oligonucleotide
uuuugucauuuucuccauc

SEQ ID NO: 144912 - RNA, 19 nt, Artificial Sequence
  Description of Artificial Sequence: Synthetic oligonucleotide
caacaaccagggagacugc

SEQ ID NO: 144913 - RNA, 19 nt, Artificial Sequence
  Description of Artificial Sequence: Synthetic oligonucleotide
caccugauggaaaagauau

SEQ ID NO: 144914 - RNA, 19 nt, Artificial Sequence
  Description of Artificial Sequence: Synthetic oligonucleotide
uaugacugcuucaugacau

SEQ ID NO: 144915 - RNA, 19 nt, Artificial Sequence
  Description of Artificial Sequence: Synthetic oligonucleotide
uuccuaaacuaucuuuuuu

SEQ ID NO: 144916 - RNA, 19 nt, Artificial Sequence
  Description of Artificial Sequence: Synthetic oligonucleotide
uuuauuccacaucuacguu

SEQ ID NO: 144917 - RNA, 19 nt, Artificial Sequence
  Description of Artificial Sequence: Synthetic oligonucleotide
uuuugguggagucccuuuu

SEQ ID NO: 144918 - RNA, 19 nt, Artificial Sequence
  Description of Artificial Sequence: Synthetic oligonucleotide
ugcaucauuguuuuaagga

SEQ ID NO: 144919 - RNA, 19 nt, Artificial Sequence
  Description of Artificial Sequence: Synthetic oligonucleotide
augauaaaaaaaaauaaca

SEQ ID NO: 144920 - RNA, 19 nt, Artificial Sequence
  Description of Artificial Sequence: Synthetic oligonucleotide
aacuagggacaauacagaa

SEQ ID NO: 144921 - RNA, 19 nt, Artificial Sequence
  Description of Artificial Sequence: Synthetic oligonucleotide
acccauuccauuuaucuuu

SEQ ID NO: 144922 - RNA, 19 nt, Artificial Sequence
  Description of Artificial Sequence: Synthetic oligonucleotide
ucuacagggcugacauugu

SEQ ID NO: 144923 - RNA, 19 nt, Artificial Sequence
  Description of Artificial Sequence: Synthetic oligonucleotide
uggcacauucuuagaguua

SEQ ID NO: 144924 - RNA, 19 nt, Artificial Sequence
  Description of Artificial Sequence: Synthetic oligonucleotide
accacaccccaugagggaa

SEQ ID NO: 144925 - RNA, 19 nt, Artificial Sequence
  Description of Artificial Sequence: Synthetic oligonucleotide
agcucuaaauagccaacac

SEQ ID NO: 144926 - RNA, 19 nt, Artificial Sequence
  Description of Artificial Sequence: Synthetic oligonucleotide
cccaucuguuuuuuguaaa

SEQ ID NO: 144927 - RNA, 19 nt, Artificial Sequence
  Description of Artificial Sequence: Synthetic oligonucleotide
aaacagcauagcuuauaca

SEQ ID NO: 144928 - RNA, 19 nt, Artificial Sequence
  Description of Artificial Sequence: Synthetic oligonucleotide
auggacaugucucugccuu

SEQ ID NO: 144929 - RNA, 19 nt, Artificial Sequence
  Description of Artificial Sequence: Synthetic oligonucleotide
uaacuuuuccuaacuccca

SEQ ID NO: 144930 - RNA, 19 nt, Artificial Sequence
  Description of Artificial Sequence: Synthetic oligonucleotide
acucuaggcuauuguuugc

SEQ ID NO: 144931 - RNA, 19 nt, Artificial Sequence
  Description of Artificial Sequence: Synthetic oligonucleotide
caugucuaccuacuuuuag

SEQ ID NO: 144932 - RNA, 19 nt, Artificial Sequence
  Description of Artificial Sequence: Synthetic oligonucleotide
gccauuaugcgagaaaaga

SEQ ID NO: 144933 - RNA, 19 nt, Artificial Sequence
  Description of Artificial Sequence: Synthetic oligonucleotide
aaaaaaaugaccauagaaa

SEQ ID NO: 144934 - RNA, 19 nt, Artificial Sequence
  Description of Artificial Sequence: Synthetic oligonucleotide
aaugccaccaugaggugcc

SEQ ID NO: 144935 - RNA, 19 nt, Artificial Sequence
  Description of Artificial Sequence: Synthetic oligonucleotide
ccaaauuucaaauaauaau

SEQ ID NO: 144936 - RNA, 19 nt, Artificial Sequence
  Description of Artificial Sequence: Synthetic oligonucleotide
uuaacauuuaguuauauuu

SEQ ID NO: 144937 - RNA, 19 nt, Artificial Sequence
  Description of Artificial Sequence: Synthetic oligonucleotide
uauaauuuccagaugacaa

SEQ ID NO: 144938 - RNA, 19 nt, Artificial Sequence
  Description of Artificial Sequence: Synthetic oligonucleotide
aaguauuucaucaaauaac

SEQ ID NO: 144939 - RNA, 19 nt, Artificial Sequence
  Description of Artificial Sequence: Synthetic oligonucleotide
cuucauuugauguuccaug

SEQ ID NO: 144940 - RNA, 19 nt, Artificial Sequence
  Description of Artificial Sequence: Synthetic oligonucleotide
gaucaagaaagaaucccua

SEQ ID NO: 144941 - RNA, 19 nt, Artificial Sequence
  Description of Artificial Sequence: Synthetic oligonucleotide
aucucuauuuuacaaguaa

SEQ ID NO: 144942 - RNA, 19 nt, Artificial Sequence
  Description of Artificial Sequence: Synthetic oligonucleotide
auucaaagaggccaaauaa

SEQ ID NO: 144943 - RNA, 19 nt, Artificial Sequence
  Description of Artificial Sequence: Synthetic oligonucleotide
acuuguaaacaagaaaagg

SEQ ID NO: 144944 - RNA, 19 nt, Artificial Sequence
  Description of Artificial Sequence: Synthetic oligonucleotide
guaacuugucaacagucau

SEQ ID NO: 144945 - RNA, 19 nt, Artificial Sequence
  Description of Artificial Sequence: Synthetic oligonucleotide
uaacuaguaauuaugagag

SEQ ID NO: 144946 - RNA, 19 nt, Artificial Sequence
  Description of Artificial Sequence: Synthetic oligonucleotide
gccuuguuucauaaccagg

SEQ ID NO: 144947 - RNA, 19 nt, Artificial Sequence
  Description of Artificial Sequence: Synthetic oligonucleotide
gucuucuuacucaaauccu

SEQ ID NO: 144948 - RNA, 19 nt, Artificial Sequence
  Description of Artificial Sequence: Synthetic oligonucleotide
ugugauguuugaaauaacc

SEQ ID NO: 144949 - RNA, 19 nt, Artificial Sequence
  Description of Artificial Sequence: Synthetic oligonucleotide
caaauugucucuccaaugu

SEQ ID NO: 144950 - RNA, 19 nt, Artificial Sequence
  Description of Artificial Sequence: Synthetic oligonucleotide
ucugcauaaacugugagag

SEQ ID NO: 144951 - RNA, 19 nt, Artificial Sequence
  Description of Artificial Sequence: Synthetic oligonucleotide
gccaagucaacagcuuuua

SEQ ID NO: 144952 - RNA, 19 nt, Artificial Sequence
  Description of Artificial Sequence: Synthetic oligonucleotide
aucaagaauuuacucucug

SEQ ID NO: 144953 - RNA, 19 nt, Artificial Sequence
  Description of Artificial Sequence: Synthetic oligonucleotide
gaccagcaauaaacaagca

SEQ ID NO: 144954 - RNA, 19 nt, Artificial Sequence
  Description of Artificial Sequence: Synthetic oligonucleotide
acugagagacacagagagc

SEQ ID NO: 144955 - RNA, 19 nt, Artificial Sequence
  Description of Artificial Sequence: Synthetic oligonucleotide
ccagauucagauuuuaccc

SEQ ID NO: 144956 - RNA, 19 nt, Artificial Sequence
  Description of Artificial Sequence: Synthetic oligonucleotide
cauggggauaaaaagacuc

SEQ ID NO: 144957 - RNA, 19 nt, Artificial Sequence
  Description of Artificial Sequence: Synthetic oligonucleotide
cagacuuucaccacauuug

SEQ ID NO: 144958 - RNA, 19 nt, Artificial Sequence
  Description of Artificial Sequence: Synthetic oligonucleotide
ggaaaacuacuugcaucau

SEQ ID NO: 144959 - RNA, 19 nt, Artificial Sequence
  Description of Artificial Sequence: Synthetic oligonucleotide
uaaauauauaauaacuggu

SEQ ID NO: 144960 - RNA, 19 nt, Artificial Sequence
  Description of Artificial Sequence: Synthetic oligonucleotide
uaguuuauaugaagcagac

SEQ ID NO: 144961 - RNA, 19 nt, Artificial Sequence
  Description of Artificial Sequence: Synthetic oligonucleotide
cacuaagugcuauagacac

SEQ ID NO: 144962 - RNA, 19 nt, Artificial Sequence
  Description of Artificial Sequence: Synthetic oligonucleotide
cucucagaauaucauacuu

SEQ ID NO: 144963 - RNA, 19 nt, Artificial Sequence
  Description of Artificial Sequence: Synthetic oligonucleotide
uggaaacaauguaauuaaa

SEQ ID NO: 144964 - RNA, 19 nt, Artificial Sequence
  Description of Artificial Sequence: Synthetic oligonucleotide
aaugccgaaucugagucaa

SEQ ID NO: 144965 - RNA, 19 nt, Artificial Sequence
  Description of Artificial Sequence: Synthetic oligonucleotide
acagcugcccuacuuuuca

SEQ ID NO: 144966 - RNA, 19 nt, Artificial Sequence
  Description of Artificial Sequence: Synthetic oligonucleotide
aauucagauauacuaguac

SEQ ID NO: 144967 - RNA, 19 nt, Artificial Sequence
  Description of Artificial Sequence: Synthetic oligonucleotide
ccuuaccuagaaauaaugu

SEQ ID NO: 144968 - RNA, 19 nt, Artificial Sequence
  Description of Artificial Sequence: Synthetic oligonucleotide
uuaaccuagggugaaguca

SEQ ID NO: 144969 - RNA, 19 nt, Artificial Sequence
  Description of Artificial Sequence: Synthetic oligonucleotide
acuauaaucuguagucuau

SEQ ID NO: 144970 - RNA, 19 nt, Artificial Sequence
  Description of Artificial Sequence: Synthetic oligonucleotide
uuauuugggcauuugcuac

SEQ ID NO: 144971 - RNA, 19 nt, Artificial Sequence
  Description of Artificial Sequence: Synthetic oligonucleotide
caugaugagugcugccaga

SEQ ID NO: 144972 - RNA, 19 nt, Artificial Sequence
  Description of Artificial Sequence: Synthetic oligonucleotide
auuguggcagguaaagaga

SEQ ID NO: 144973 - RNA, 19 nt, Artificial Sequence
  Description of Artificial Sequence: Synthetic oligonucleotide
acaauguaauuugcacucc

SEQ ID NO: 144974 - RNA, 19 nt, Artificial Sequence
  Description of Artificial Sequence: Synthetic oligonucleotide
ccuaugauauuucuacauu

SEQ ID NO: 144975 - RNA, 19 nt, Artificial Sequence
  Description of Artificial Sequence: Synthetic oligonucleotide
uuuuagcgaccacuagugg

SEQ ID NO: 144976 - RNA, 19 nt, Artificial Sequence
  Description of Artificial Sequence: Synthetic oligonucleotide
gaagacauuccccaaaauu

SEQ ID NO: 144977 - RNA, 19 nt, Artificial Sequence
  Description of Artificial Sequence: Synthetic oligonucleotide
uagaaaaaaaggagauaga

SEQ ID NO: 144978 - RNA, 19 nt, Artificial Sequence
  Description of Artificial Sequence: Synthetic oligonucleotide
aagauuucugucuauguaa

SEQ ID NO: 144979 - RNA, 19 nt, Artificial Sequence
  Description of Artificial Sequence: Synthetic oligonucleotide
aaguucucaaaauuuguuc

SEQ ID NO: 144980 - RNA, 19 nt, Artificial Sequence
  Description of Artificial Sequence: Synthetic oligonucleotide
cuaaauuaauaaaacuauc

SEQ ID NO: 144981 - RNA, 19 nt, Artificial Sequence
  Description of Artificial Sequence: Synthetic oligonucleotide
cuuuguguucuuuucugca

SEQ ID NO: 144982 - RNA, 19 nt, Artificial Sequence
  Description of Artificial Sequence: Synthetic oligonucleotide
aacagaugauuccaacaug

SEQ ID NO: 144983 - RNA, 19 nt, Artificial Sequence
  Description of Artificial Sequence: Synthetic oligonucleotide
ggguguuugucuauucuuc

SEQ ID NO: 144984 - RNA, 19 nt, Artificial Sequence
  Description of Artificial Sequence: Synthetic oligonucleotide
cuuuacucuugaaacauua

SEQ ID NO: 144985 - RNA, 19 nt, Artificial Sequence
  Description of Artificial Sequence: Synthetic oligonucleotide
agaccaugggaggcucuua

SEQ ID NO: 144986 - RNA, 19 nt, Artificial Sequence
  Description of Artificial Sequence: Synthetic oligonucleotide
acagccuugaguugauauu

SEQ ID NO: 144987 - RNA, 19 nt, Artificial Sequence
  Description of Artificial Sequence: Synthetic oligonucleotide
uuauacaacccaaaucuag

SEQ ID NO: 144988 - RNA, 19 nt, Artificial Sequence
  Description of Artificial Sequence: Synthetic oligonucleotide
gguuugaacggugaggugu

SEQ ID NO: 144989 - RNA, 19 nt, Artificial Sequence
  Description of Artificial Sequence: Synthetic oligonucleotide
ucaggucaucaaauauuca

SEQ ID NO: 144990 - RNA, 19 nt, Artificial Sequence
  Description of Artificial Sequence: Synthetic oligonucleotide
augucuauauagucuuaca

SEQ ID NO: 144991 - RNA, 19 nt, Artificial Sequence
  Description of Artificial Sequence: Synthetic oligonucleotide
acagguucucaaaaaaaau

SEQ ID NO: 144992 - RNA, 19 nt, Artificial Sequence
  Description of Artificial Sequence: Synthetic oligonucleotide
uguucaugggauaggucau

SEQ ID NO: 144993 - RNA, 19 nt, Artificial Sequence
  Description of Artificial Sequence: Synthetic oligonucleotide
uugauaauggauuccuuau

SEQ ID NO: 144994 - RNA, 19 nt, Artificial Sequence
  Description of Artificial Sequence: Synthetic oligonucleotide
uucugagaacuccagacga

SEQ ID NO: 144995 - RNA, 19 nt, Artificial Sequence
  Description of Artificial Sequence: Synthetic oligonucleotide
acugaaauauaugagagaa

SEQ ID NO: 144996 - RNA, 19 nt, Artificial Sequence
  Description of Artificial Sequence: Synthetic oligonucleotide
aggaaaaggacauaguagg

SEQ ID NO: 144997 - RNA, 19 nt, Artificial Sequence
  Description of Artificial Sequence: Synthetic oligonucleotide
gagcaggccugagaaaaaa

SEQ ID NO: 144998 - RNA, 19 nt, Artificial Sequence
  Description of Artificial Sequence: Synthetic oligonucleotide
aaugaaagucagaaaucuu

SEQ ID NO: 144999 - RNA, 19 nt, Artificial Sequence
  Description of Artificial Sequence: Synthetic oligonucleotide
uuaaaaaaauacaagaucu

SEQ ID NO: 145000 - RNA, 19 nt, Artificial Sequence
  Description of Artificial Sequence: Synthetic oligonucleotide
uuauuucuaucuuauuuuu

SEQ ID NO: 145001 - RNA, 19 nt, Artificial Sequence
  Description of Artificial Sequence: Synthetic oligonucleotide
uucuccucuucugaaauau

SEQ ID NO: 145002 - RNA, 19 nt, Artificial Sequence
  Description of Artificial Sequence: Synthetic oligonucleotide
uauaugaggauuccucucc

SEQ ID NO: 145003 - RNA, 19 nt, Artificial Sequence
  Description of Artificial Sequence: Synthetic oligonucleotide
caaacccaugguuucucua

SEQ ID NO: 145004 - RNA, 19 nt, Artificial Sequence
  Description of Artificial Sequence: Synthetic oligonucleotide
aagaauuuugagucauuug

SEQ ID NO: 145005 - RNA, 19 nt, Artificial Sequence
  Description of Artificial Sequence: Synthetic oligonucleotide
guaugaccucaaauaauua

SEQ ID NO: 145006 - RNA, 19 nt, Artificial Sequence
  Description of Artificial Sequence: Synthetic oligonucleotide
aguuuuagcugaccucaca

SEQ ID NO: 145007 - RNA, 19 nt, Artificial Sequence
  Description of Artificial Sequence: Synthetic oligonucleotide
auaacuccuuauaauagga

SEQ ID NO: 145008 - RNA, 19 nt, Artificial Sequence
  Description of Artificial Sequence: Synthetic oligonucleotide
agacaucuuuaaugucugc

SEQ ID NO: 145009 - RNA, 19 nt, Artificial Sequence
  Description of Artificial Sequence: Synthetic oligonucleotide
cuauuaaagaaggaugaaa

SEQ ID NO: 145010 - RNA, 19 nt, Artificial Sequence
  Description of Artificial Sequence: Synthetic oligonucleotide
aauuccuaugaccuucucc

SEQ ID NO: 145011 - RNA, 19 nt, Artificial Sequence
  Description of Artificial Sequence: Synthetic oligonucleotide
cccgauuaucccuuuggca

SEQ ID NO: 145012 - RNA, 19 nt, Artificial Sequence
  Description of Artificial Sequence: Synthetic oligonucleotide
aauauagagucaaauaaua

SEQ ID NO: 145013 - RNA, 19 nt, Artificial Sequence
  Description of Artificial Sequence: Synthetic oligonucleotide
aacauugaccaauaguaaa

SEQ ID NO: 145014 - RNA, 19 nt, Artificial Sequence
  Description of Artificial Sequence: Synthetic oligonucleotide
acaugcuuugccaagaagu

SEQ ID NO: 145015 - RNA, 19 nt, Artificial Sequence
  Description of Artificial Sequence: Synthetic oligonucleotide
uagaagauauauucucuag

SEQ ID NO: 145016 - RNA, 19 nt, Artificial Sequence
  Description of Artificial Sequence: Synthetic oligonucleotide
gccuuaguuuuuccuccca

SEQ ID NO: 145017 - RNA, 19 nt, Artificial Sequence
  Description of Artificial Sequence: Synthetic oligonucleotide
aauuugcauuuuuguaaaa

SEQ ID NO: 145018 - RNA, 19 nt, Artificial Sequence
  Description of Artificial Sequence: Synthetic oligonucleotide
aauaauguuguauccacaa

SEQ ID NO: 145019 - RNA, 19 nt, Artificial Sequence
  Description of Artificial Sequence: Synthetic oligonucleotide
aaggaaauaaacuuuaaaa

SEQ ID NO: 145020 - RNA, 19 nt, Artificial Sequence
  Description of Artificial Sequence: Synthetic oligonucleotide
cuuuaaaaacccaagugca

SEQ ID NO: 145021 - RNA, 19 nt, Artificial Sequence
  Description of Artificial Sequence: Synthetic oligonucleotide
uggagacucaggaguuuug

SEQ ID NO: 145022 - RNA, 19 nt, Artificial Sequence
  Description of Artificial Sequence: Synthetic oligonucleotide
gagagcaaaaugacaacac

SEQ ID NO: 145023 - RNA, 19 nt, Artificial Sequence
  Description of Artificial Sequence: Synthetic oligonucleotide
cccagaaauucaguaaaug

SEQ ID NO: 145024 - RNA, 19 nt, Artificial Sequence
  Description of Artificial Sequence: Synthetic oligonucleotide
gggacuuucccggcagagc

SEQ ID NO: 145025 - RNA, 19 nt, Artificial Sequence
  Description of Artificial Sequence: Synthetic oligonucleotide
ccaaugaaaggcccuauug

SEQ ID NO: 145026 - RNA, 19 nt, Artificial Sequence
  Description of Artificial Sequence: Synthetic oligonucleotide
gcuaugcaaucugguccaa

SEQ ID NO: 145027 - RNA, 19 nt, Artificial Sequence
  Description of Artificial Sequence: Synthetic oligonucleotide
aaaccacucuucaggagga

SEQ ID NO: 145028 - RNA, 19 nt, Artificial Sequence
  Description of Artificial Sequence: Synthetic oligonucleotide
augucuucacuggugggcc

SEQ ID NO: 145029 - RNA, 19 nt, Artificial Sequence
  Description of Artificial Sequence: Synthetic oligonucleotide
cccacgcaaagcuucuuca

SEQ ID NO: 145030 - RNA, 19 nt, Artificial Sequence
  Description of Artificial Sequence: Synthetic oligonucleotide
augagggaaucuaagacuu

SEQ ID NO: 145031 - RNA, 19 nt, Artificial Sequence
  Description of Artificial Sequence: Synthetic oligonucleotide
uugggggcuguccagauua

SEQ ID NO: 145032 - RNA, 19 nt, Artificial Sequence
  Description of Artificial Sequence: Synthetic oligonucleotide
augaaugggcucuuccaca

SEQ ID NO: 145033 - RNA, 19 nt, Artificial Sequence
  Description of Artificial Sequence: Synthetic oligonucleotide
auugcccuggggggucuuc

SEQ ID NO: 145034 - RNA, 19 nt, Artificial Sequence
  Description of Artificial Sequence: Synthetic oligonucleotide
cugaugaucccagcaggga

SEQ ID NO: 145035 - RNA, 19 nt, Artificial Sequence
  Description of Artificial Sequence: Synthetic oligonucleotide
aucuaugcacccaucugug

SEQ ID NO: 145036 - RNA, 19 nt, Artificial Sequence
  Description of Artificial Sequence: Synthetic oligonucleotide
gugacugugugguacccuc

SEQ ID NO: 145037 - RNA, 19 nt, Artificial Sequence
  Description of Artificial Sequence: Synthetic oligonucleotide
cucuggggaggcauuaugu

SEQ ID NO: 145038 - RNA, 19 nt, Artificial Sequence
  Description of Artificial Sequence: Synthetic oligonucleotide
uauauuauuuccggaucac

SEQ ID NO: 145039 - RNA, 19 nt, Artificial Sequence
  Description of Artificial Sequence: Synthetic oligonucleotide
cuccuggcagcaacggaga

SEQ ID NO: 145040 - RNA, 19 nt, Artificial Sequence
  Description of Artificial Sequence: Synthetic oligonucleotide
aaaaacuccaggaaguguu

SEQ ID NO: 145041 - RNA, 19 nt, Artificial Sequence
  Description of Artificial Sequence: Synthetic oligonucleotide
uuggucaaaggaaaaauga

SEQ ID NO: 145042 - RNA, 19 nt, Artificial Sequence
  Description of Artificial Sequence: Synthetic oligonucleotide
auaaugaauucauugagcc

SEQ ID NO: 145043 - RNA, 19 nt, Artificial Sequence
  Description of Artificial Sequence: Synthetic oligonucleotide
cucuuugcugccauuucug

SEQ ID NO: 145044 - RNA, 19 nt, Artificial Sequence
  Description of Artificial Sequence: Synthetic oligonucleotide
ggaaugauucuuucaauca

SEQ ID NO: 145045 - RNA, 19 nt, Artificial Sequence
  Description of Artificial Sequence: Synthetic oligonucleotide
auggacauacuuaauauua

SEQ ID NO: 145046 - RNA, 19 nt, Artificial Sequence
  Description of Artificial Sequence: Synthetic oligonucleotide
aaaauuucccauuuuuuaa

SEQ ID NO: 145047 - RNA, 19 nt, Artificial Sequence
  Description of Artificial Sequence: Synthetic oligonucleotide
aaaauggagagucugaauu

SEQ ID NO: 145048 - RNA, 19 nt, Artificial Sequence
  Description of Artificial Sequence: Synthetic oligonucleotide
uuuauuagagcucacacac

SEQ ID NO: 145049 - RNA, 19 nt, Artificial Sequence
  Description of Artificial Sequence: Synthetic oligonucleotide
ccauauauuaacauauaca

SEQ ID NO: 145050 - RNA, 19 nt, Artificial Sequence
  Description of Artificial Sequence: Synthetic oligonucleotide
aacugugaaccagcuaauc

SEQ ID NO: 145051 - RNA, 19 nt, Artificial Sequence
  Description of Artificial Sequence: Synthetic oligonucleotide
cccucugagaaaaacuccc

SEQ ID NO: 145052 - RNA, 19 nt, Artificial Sequence
  Description of Artificial Sequence: Synthetic oligonucleotide
ccaucuacccaauacuguu

SEQ ID NO: 145053 - RNA, 19 nt, Artificial Sequence
  Description of Artificial Sequence: Synthetic oligonucleotide
uacagcauacaaucucugu

SEQ ID NO: 145054 - RNA, 19 nt, Artificial Sequence
  Description of Artificial Sequence: Synthetic oligonucleotide
uucuugggcauuuugucag

SEQ ID NO: 145055 - RNA, 19 nt, Artificial Sequence
  Description of Artificial Sequence: Synthetic oligonucleotide
gugaugcugaucuuugccu

SEQ ID NO: 145056 - RNA, 19 nt, Artificial Sequence
  Description of Artificial Sequence: Synthetic oligonucleotide
uucuuccaggaacuuguaa

SEQ ID NO: 145057 - RNA, 19 nt, Artificial Sequence
  Description of Artificial Sequence: Synthetic oligonucleotide
auagcuggcaucguugaga

SEQ ID NO: 145058 - RNA, 19 nt, Artificial Sequence
  Description of Artificial Sequence: Synthetic oligonucleotide
aaugaauggaaaagaacgu

SEQ ID NO: 145059 - RNA, 19 nt, Artificial Sequence
  Description of Artificial Sequence: Synthetic oligonucleotide
ugcuccagacccaaaucua

SEQ ID NO: 145060 - RNA, 19 nt, Artificial Sequence
  Description of Artificial Sequence: Synthetic oligonucleotide
aacauaguucuccugucag

SEQ ID NO: 145061 - RNA, 19 nt, Artificial Sequence
  Description of Artificial Sequence: Synthetic oligonucleotide
gcagaagaaaaaaaagaac

SEQ ID NO: 145062 - RNA, 19 nt, Artificial Sequence
  Description of Artificial Sequence: Synthetic oligonucleotide
cagacuauugaaauaaaag

SEQ ID NO: 145063 - RNA, 19 nt, Artificial Sequence
  Description of Artificial Sequence: Synthetic oligonucleotide
gaagaagugguugggcuaa

SEQ ID NO: 145064 - RNA, 19 nt, Artificial Sequence
  Description of Artificial Sequence: Synthetic oligonucleotide
acugaaacaucuucccaac

SEQ ID NO: 145065 - RNA, 19 nt, Artificial Sequence
  Description of Artificial Sequence: Synthetic oligonucleotide
ccaaagaaugaagaagaca

SEQ ID NO: 145066 - RNA, 19 nt, Artificial Sequence
  Description of Artificial Sequence: Synthetic oligonucleotide
auugaaauuauuccaaucc

SEQ ID NO: 145067 - RNA, 19 nt, Artificial Sequence
  Description of Artificial Sequence: Synthetic oligonucleotide
caagaagaggaagaagaag

SEQ ID NO: 145068 - RNA, 19 nt, Artificial Sequence
  Description of Artificial Sequence: Synthetic oligonucleotide
gaaacagagacgaacuuuc

SEQ ID NO: 145069 - RNA, 19 nt, Artificial Sequence
  Description of Artificial Sequence: Synthetic oligonucleotide
ccagaaccuccccaagauc

SEQ ID NO: 145070 - RNA, 19 nt, Artificial Sequence
  Description of Artificial Sequence: Synthetic oligonucleotide
caggaauccucaccaauag

SEQ ID NO: 145071 - RNA, 19 nt, Artificial Sequence
  Description of Artificial Sequence: Synthetic oligonucleotide
gaaaaugacagcucuccuu

SEQ ID NO: 145072 - RNA, 19 nt, Artificial Sequence
  Description of Artificial Sequence: Synthetic oligonucleotide
uaagugauuucuucuguuu

SEQ ID NO: 145073 - RNA, 19 nt, Artificial Sequence
  Description of Artificial Sequence: Synthetic oligonucleotide
uucuguuuccuuuuuuaaa

SEQ ID NO: 145074 - RNA, 19 nt, Artificial Sequence
  Description of Artificial Sequence: Synthetic oligonucleotide
acauuaguguucauagcuu

SEQ ID NO: 145075 - RNA, 19 nt, Artificial Sequence
  Description of Artificial Sequence: Synthetic oligonucleotide
uccaagagacaugcugacu

SEQ ID NO: 145076 - RNA, 19 nt, Artificial Sequence
  Description of Artificial Sequence: Synthetic oligonucleotide
uuucauuucuugagguacu

SEQ ID NO: 145077 - RNA, 19 nt, Artificial Sequence
  Description of Artificial Sequence: Synthetic oligonucleotide
ucugcacauacgcaccaca

SEQ ID NO: 145078 - RNA, 19 nt, Artificial Sequence
  Description of Artificial Sequence: Synthetic oligonucleotide
aucucuaucuggccuuugc

SEQ ID NO: 145079 - RNA, 19 nt, Artificial Sequence
  Description of Artificial Sequence: Synthetic oligonucleotide
cauggagugaccauagcuc

SEQ ID NO: 145080 - RNA, 19 nt, Artificial Sequence
  Description of Artificial Sequence: Synthetic oligonucleotide
ccuucucucuuacauugaa

SEQ ID NO: 145081 - RNA, 19 nt, Artificial Sequence
  Description of Artificial Sequence: Synthetic oligonucleotide
auguagagaauguagccau

SEQ ID NO: 145082 - RNA, 19 nt, Artificial Sequence
  Description of Artificial Sequence: Synthetic oligonucleotide
uuguagcagcuuguguugu

SEQ ID NO: 145083 - RNA, 19 nt, Artificial Sequence
  Description of Artificial Sequence: Synthetic oligonucleotide
ucacgcuucuucuuuugag

SEQ ID NO: 145084 - RNA, 19 nt, Artificial Sequence
  Description of Artificial Sequence: Synthetic oligonucleotide
gcaacuuucuuacacugaa

SEQ ID NO: 145085 - RNA, 19 nt, Artificial Sequence
  Description of Artificial Sequence: Synthetic oligonucleotide
agaaaggcagaaugagugc

SEQ ID NO: 145086 - RNA, 19 nt, Artificial Sequence
  Description of Artificial Sequence: Synthetic oligonucleotide
cuucagaaugugauuuccu

SEQ ID NO: 145087 - RNA, 19 nt, Artificial Sequence
  Description of Artificial Sequence: Synthetic oligonucleotide
uacuaaccuguuccuugga

SEQ ID NO: 145088 - RNA, 19 nt, Artificial Sequence
  Description of Artificial Sequence: Synthetic oligonucleotide
auaggcuuuuuaguauagu

SEQ ID NO: 145089 - RNA, 19 nt, Artificial Sequence
  Description of Artificial Sequence: Synthetic oligonucleotide
uauuuuuuuuugucauuuu

SEQ ID NO: 145090 - RNA, 19 nt, Artificial Sequence
  Description of Artificial Sequence: Synthetic oligonucleotide
ucuccaucaacaaccaggg

SEQ ID NO: 145091 - RNA, 19 nt, Artificial Sequence
  Description of Artificial Sequence: Synthetic oligonucleotide
gagacugcaccugauggaa

SEQ ID NO: 145092 - RNA, 19 nt, Artificial Sequence
  Description of Artificial Sequence: Synthetic oligonucleotide
aaagauauaugacugcuuc

SEQ ID NO: 145093 - RNA, 19 nt, Artificial Sequence
  Description of Artificial Sequence: Synthetic oligonucleotide
caugacauuccuaaacuau

SEQ ID NO: 145094 - RNA, 19 nt, Artificial Sequence
  Description of Artificial Sequence: Synthetic oligonucleotide
ucuuuuuuuuauuccacau

SEQ ID NO: 145095 - RNA, 19 nt, Artificial Sequence
  Description of Artificial Sequence: Synthetic oligonucleotide
ucuacguuuuugguggagu

SEQ ID NO: 145096 - RNA, 19 nt, Artificial Sequence
  Description of Artificial Sequence: Synthetic oligonucleotide
ucccuuuugcaucauuguu

SEQ ID NO: 145097 - RNA, 19 nt, Artificial Sequence
  Description of Artificial Sequence: Synthetic oligonucleotide
uuuaaggaugauaaaaaaa

SEQ ID NO: 145098 - RNA, 19 nt, Artificial Sequence
  Description of Artificial Sequence: Synthetic oligonucleotide
aaauaacaacuagggacaa

SEQ ID NO: 145099 - RNA, 19 nt, Artificial Sequence
  Description of Artificial Sequence: Synthetic oligonucleotide
auacagaacccauuccauu

SEQ ID NO: 145100 - RNA, 19 nt, Artificial Sequence
  Description of Artificial Sequence: Synthetic oligonucleotide
uuaucuuucuacagggcug

SEQ ID NO: 145101 - RNA, 19 nt, Artificial Sequence
  Description of Artificial Sequence: Synthetic oligonucleotide
gacauuguggcacauucuu

SEQ ID NO: 145102 - RNA, 19 nt, Artificial Sequence
  Description of Artificial Sequence: Synthetic oligonucleotide
uagaguuaccacaccccau

SEQ ID NO: 145103 - RNA, 19 nt, Artificial Sequence
  Description of Artificial Sequence: Synthetic oligonucleotide
ugagggaagcucuaaauag

SEQ ID NO: 145104 - RNA, 19 nt, Artificial Sequence
  Description of Artificial Sequence: Synthetic oligonucleotide
gccaacacccaucuguuuu

SEQ ID NO: 145105 - RNA, 19 nt, Artificial Sequence
  Description of Artificial Sequence: Synthetic oligonucleotide
uuuguaaaaacagcauagc

SEQ ID NO: 145106 - RNA, 19 nt, Artificial Sequence
  Description of Artificial Sequence: Synthetic oligonucleotide
cuuauacauggacaugucu

SEQ ID NO: 145107 - RNA, 19 nt, Artificial Sequence
  Description of Artificial Sequence: Synthetic oligonucleotide
ucugccuuaacuuuuccua

SEQ ID NO: 145108 - RNA, 19 nt, Artificial Sequence
  Description of Artificial Sequence: Synthetic oligonucleotide
aacucccacucuaggcuau

SEQ ID NO: 145109 - RNA, 19 nt, Artificial Sequence
  Description of Artificial Sequence: Synthetic oligonucleotide
uuguuugcaugucuaccua

SEQ ID NO: 145110 - RNA, 19 nt, Artificial Sequence
  Description of Artificial Sequence: Synthetic oligonucleotide
acuuuuagccauuaugcga

SEQ ID NO: 145111 - RNA, 19 nt, Artificial Sequence
  Description of Artificial Sequence: Synthetic oligonucleotide
agaaaagaaaaaaaugacc

SEQ ID NO: 145112 - RNA, 19 nt, Artificial Sequence
  Description of Artificial Sequence: Synthetic oligonucleotide
cauagaaaaugccaccaug

SEQ ID NO: 145113 - RNA, 19 nt, Artificial Sequence
  Description of Artificial Sequence: Synthetic oligonucleotide
gaggugcccaaauuucaaa

SEQ ID NO: 145114 - RNA, 19 nt, Artificial Sequence
  Description of Artificial Sequence: Synthetic oligonucleotide
auaauaauuaacauuuagu

SEQ ID NO: 145115 - RNA, 19 nt, Artificial Sequence
  Description of Artificial Sequence: Synthetic oligonucleotide
uuauauuuauaauuuccag

SEQ ID NO: 145116 - RNA, 19 nt, Artificial Sequence
  Description of Artificial Sequence: Synthetic oligonucleotide
gaugacaaaguauuucauc

SEQ ID NO: 145117 - RNA, 19 nt, Artificial Sequence
  Description of Artificial Sequence: Synthetic oligonucleotide
caaauaacuucauuugaug

SEQ ID NO: 145118 - RNA, 19 nt, Artificial Sequence
  Description of Artificial Sequence: Synthetic oligonucleotide
guuccaugaucaagaaaga

SEQ ID NO: 145119 - RNA, 19 nt, Artificial Sequence
  Description of Artificial Sequence: Synthetic oligonucleotide
aaucccuaucucuauuuua

SEQ ID NO: 145120 - RNA, 19 nt, Artificial Sequence
  Description of Artificial Sequence: Synthetic oligonucleotide
acaaguaauucaaagaggc

SEQ ID NO: 145121 - RNA, 19 nt, Artificial Sequence
  Description of Artificial Sequence: Synthetic oligonucleotide
ccaaauaacuuguaaacaa

SEQ ID NO: 145122 - RNA, 19 nt, Artificial Sequence
  Description of Artificial Sequence: Synthetic oligonucleotide
agaaaagguaacuugucaa

SEQ ID NO: 145123 - RNA, 19 nt, Artificial Sequence
  Description of Artificial Sequence: Synthetic oligonucleotide
acagucauaacuaguaauu

SEQ ID NO: 145124 - RNA, 19 nt, Artificial Sequence
  Description of Artificial Sequence: Synthetic oligonucleotide
uaugagagccuuguuucau

SEQ ID NO: 145125 - RNA, 19 nt, Artificial Sequence
  Description of Artificial Sequence: Synthetic oligonucleotide
uaaccaggucuucuuacuc

SEQ ID NO: 145126 - RNA, 19 nt, Artificial Sequence
  Description of Artificial Sequence: Synthetic oligonucleotide
caaauccugugauguuuga

SEQ ID NO: 145127 - RNA, 19 nt, Artificial Sequence
  Description of Artificial Sequence: Synthetic oligonucleotide
aaauaaccaaauugucucu

SEQ ID NO: 145128 - RNA, 19 nt, Artificial Sequence
  Description of Artificial Sequence: Synthetic oligonucleotide
uccaaugucugcauaaacu

SEQ ID NO: 145129 - RNA, 19 nt, Artificial Sequence
  Description of Artificial Sequence: Synthetic oligonucleotide
ugugagagccaagucaaca

SEQ ID NO: 145130 - RNA, 19 nt, Artificial Sequence
  Description of Artificial Sequence: Synthetic oligonucleotide
agcuuuuaucaagaauuua

SEQ ID NO: 145131 - RNA, 19 nt, Artificial Sequence
  Description of Artificial Sequence: Synthetic oligonucleotide
acucucugaccagcaauaa

SEQ ID NO: 145132 - RNA, 19 nt, Artificial Sequence
  Description of Artificial Sequence: Synthetic oligonucleotide
aacaagcacugagagacac

SEQ ID NO: 145133 - RNA, 19 nt, Artificial Sequence
  Description of Artificial Sequence: Synthetic oligonucleotide
cagagagccagauucagau

SEQ ID NO: 145134 - RNA, 19 nt, Artificial Sequence
  Description of Artificial Sequence: Synthetic oligonucleotide
uuuuacccauggggauaaa

SEQ ID NO: 145135 - RNA, 19 nt, Artificial Sequence
  Description of Artificial Sequence: Synthetic oligonucleotide
aaagacucagacuuucacc

SEQ ID NO: 145136 - RNA, 19 nt, Artificial Sequence
  Description of Artificial Sequence: Synthetic oligonucleotide
cacauuuggaaaacuacuu

SEQ ID NO: 145137 - RNA, 19 nt, Artificial Sequence
  Description of Artificial Sequence: Synthetic oligonucleotide
ugcaucauaaauauauaau

SEQ ID NO: 145138 - RNA, 19 nt, Artificial Sequence
  Description of Artificial Sequence: Synthetic oligonucleotide
uaacugguaguuuauauga

SEQ ID NO: 145139 - RNA, 19 nt, Artificial Sequence
  Description of Artificial Sequence: Synthetic oligonucleotide
aagcagacacuaagugcua

SEQ ID NO: 145140 - RNA, 19 nt, Artificial Sequence
  Description of Artificial Sequence: Synthetic oligonucleotide
auagacacucucagaauau

SEQ ID NO: 145141 - RNA, 19 nt, Artificial Sequence
  Description of Artificial Sequence: Synthetic oligonucleotide
ucauacuuggaaacaaugu

SEQ ID NO: 145142 - RNA, 19 nt, Artificial Sequence
  Description of Artificial Sequence: Synthetic oligonucleotide
uaauuaaaaugccgaaucu

SEQ ID NO: 145143 - RNA, 19 nt, Artificial Sequence
  Description of Artificial Sequence: Synthetic oligonucleotide
ugagucaacagcugcccua

SEQ ID NO: 145144 - RNA, 19 nt, Artificial Sequence
  Description of Artificial Sequence: Synthetic oligonucleotide
acuuuucaauucagauaua

SEQ ID NO: 145145 - RNA, 19 nt, Artificial Sequence
  Description of Artificial Sequence: Synthetic oligonucleotide
acuaguaccuuaccuagaa

SEQ ID NO: 145146 - RNA, 19 nt, Artificial Sequence
  Description of Artificial Sequence: Synthetic oligonucleotide
aauaauguuaaccuagggu

SEQ ID NO: 145147 - RNA, 19 nt, Artificial Sequence
  Description of Artificial Sequence: Synthetic oligonucleotide
ugaagucacuauaaucugu

SEQ ID NO: 145148 - RNA, 19 nt, Artificial Sequence
  Description of Artificial Sequence: Synthetic oligonucleotide
uagucuauuauuugggcau

SEQ ID NO: 145149 - RNA, 19 nt, Artificial Sequence
  Description of Artificial Sequence: Synthetic oligonucleotide
uuugcuacaugaugagugc

SEQ ID NO: 145150 - RNA, 19 nt, Artificial Sequence
  Description of Artificial Sequence: Synthetic oligonucleotide
cugccagauuguggcaggu

SEQ ID NO: 145151 - RNA, 19 nt, Artificial Sequence
  Description of Artificial Sequence: Synthetic oligonucleotide
uaaagagacaauguaauuu

SEQ ID NO: 145152 - RNA, 19 nt, Artificial Sequence
  Description of Artificial Sequence: Synthetic oligonucleotide
ugcacucccuaugauauuu

SEQ ID NO: 145153 - RNA, 19 nt, Artificial Sequence
  Description of Artificial Sequence: Synthetic oligonucleotide
ucuacauuuuuagcgacca

SEQ ID NO: 145154 - RNA, 19 nt, Artificial Sequence
  Description of Artificial Sequence: Synthetic oligonucleotide
acuaguggaagacauuccc

SEQ ID NO: 145155 - RNA, 19 nt, Artificial Sequence
  Description of Artificial Sequence: Synthetic oligonucleotide
ccaaaauuagaaaaaaagg

SEQ ID NO: 145156 - RNA, 19 nt, Artificial Sequence
  Description of Artificial Sequence: Synthetic oligonucleotide
gagauagaagauuucuguc

SEQ ID NO: 145157 - RNA, 19 nt, Artificial Sequence
  Description of Artificial Sequence: Synthetic oligonucleotide
cuauguaaaguucucaaaa

SEQ ID NO: 145158 - RNA, 19 nt, Artificial Sequence
  Description of Artificial Sequence: Synthetic oligonucleotide
auuuguucuaaauuaauaa

SEQ ID NO: 145159 - RNA, 19 nt, Artificial Sequence
  Description of Artificial Sequence: Synthetic oligonucleotide
aaacuaucuuuguguucuu

SEQ ID NO: 145160 - RNA, 19 nt, Artificial Sequence
  Description of Artificial Sequence: Synthetic oligonucleotide
uuucugcaacagaugauuc

SEQ ID NO: 145161 - RNA, 19 nt, Artificial Sequence
  Description of Artificial Sequence: Synthetic oligonucleotide
ccaacauggguguuugucu

SEQ ID NO: 145162 - RNA, 19 nt, Artificial Sequence
  Description of Artificial Sequence: Synthetic oligonucleotide
uauucuucuuuacucuuga

SEQ ID NO: 145163 - RNA, 19 nt, Artificial Sequence
  Description of Artificial Sequence: Synthetic oligonucleotide
aaacauuagaccaugggag

SEQ ID NO: 145164 - RNA, 19 nt, Artificial Sequence
  Description of Artificial Sequence: Synthetic oligonucleotide
ggcucuuacagccuugagu

SEQ ID NO: 145165 - RNA, 19 nt, Artificial Sequence
  Description of Artificial Sequence: Synthetic oligonucleotide
uugauauuuauacaaccca

SEQ ID NO: 145166 - RNA, 19 nt, Artificial Sequence
  Description of Artificial Sequence: Synthetic oligonucleotide
aaaucuagguuugaacggu

SEQ ID NO: 145167 - RNA, 19 nt, Artificial Sequence
  Description of Artificial Sequence: Synthetic oligonucleotide
ugaggugucaggucaucaa

SEQ ID NO: 145168 - RNA, 19 nt, Artificial Sequence
  Description of Artificial Sequence: Synthetic oligonucleotide
aauauucaugucuauauag

SEQ ID NO: 145169 - RNA, 19 nt, Artificial Sequence
  Description of Artificial Sequence: Synthetic oligonucleotide
gucuuacacagguucucaa

SEQ ID NO: 145170 - RNA, 19 nt, Artificial Sequence
  Description of Artificial Sequence: Synthetic oligonucleotide
aaaaaaauguucaugggau

SEQ ID NO: 145171 - RNA, 19 nt, Artificial Sequence
  Description of Artificial Sequence: Synthetic oligonucleotide
uaggucauugauaauggau

SEQ ID NO: 145172 - RNA, 19 nt, Artificial Sequence
  Description of Artificial Sequence: Synthetic oligonucleotide
uuccuuauucugagaacuc

SEQ ID NO: 145173 - RNA, 19 nt, Artificial Sequence
  Description of Artificial Sequence: Synthetic oligonucleotide
ccagacgacugaaauauau

SEQ ID NO: 145174 - RNA, 19 nt, Artificial Sequence
  Description of Artificial Sequence: Synthetic oligonucleotide
ugagagaaggaaaaggaca

SEQ ID NO: 145175 - RNA, 19 nt, Artificial Sequence
  Description of Artificial Sequence: Synthetic oligonucleotide
auaguaggagcaggccuga

SEQ ID NO: 145176 - RNA, 19 nt, Artificial Sequence
  Description of Artificial Sequence: Synthetic oligonucleotide
agaaaaaaaugaaagucag

SEQ ID NO: 145177 - RNA, 19 nt, Artificial Sequence
  Description of Artificial Sequence: Synthetic oligonucleotide
gaaaucuuuaaaaaaauac

SEQ ID NO: 145178 - RNA, 19 nt, Artificial Sequence
  Description of Artificial Sequence: Synthetic oligonucleotide
caagaucuuauuucuaucu

SEQ ID NO: 145179 - RNA, 19 nt, Artificial Sequence
  Description of Artificial Sequence: Synthetic oligonucleotide
uuauuuuuucuccucuucu

SEQ ID NO: 145180 - RNA, 19 nt, Artificial Sequence
  Description of Artificial Sequence: Synthetic oligonucleotide
ugaaauauauaugaggauu

SEQ ID NO: 145181 - RNA, 19 nt, Artificial Sequence
  Description of Artificial Sequence: Synthetic oligonucleotide
uccucuccaaacccauggu

SEQ ID NO: 145182 - RNA, 19 nt, Artificial Sequence
  Description of Artificial Sequence: Synthetic oligonucleotide
uuucucuaagaauuuugag

SEQ ID NO: 145183 - RNA, 19 nt, Artificial Sequence
  Description of Artificial Sequence: Synthetic oligonucleotide
gucauuuguaugaccucaa

SEQ ID NO: 145184 - RNA, 19 nt, Artificial Sequence
  Description of Artificial Sequence: Synthetic oligonucleotide
aauaauuaguuuuagcuga

SEQ ID NO: 145185 - RNA, 19 nt, Artificial Sequence
  Description of Artificial Sequence: Synthetic oligonucleotide
accucacauaacuccuuau

SEQ ID NO: 145186 - RNA, 19 nt, Artificial Sequence
  Description of Artificial Sequence: Synthetic oligonucleotide
uaauaggagacaucuuuaa

SEQ ID NO: 145187 - RNA, 19 nt, Artificial Sequence
  Description of Artificial Sequence: Synthetic oligonucleotide
augucugcuauuaaagaag

SEQ ID NO: 145188 - RNA, 19 nt, Artificial Sequence
  Description of Artificial Sequence: Synthetic oligonucleotide
ggaugaaaauuccuaugac

SEQ ID NO: 145189 - RNA, 19 nt, Artificial Sequence
  Description of Artificial Sequence: Synthetic oligonucleotide
ccuucuccccgauuauccc

SEQ ID NO: 145190 - RNA, 19 nt, Artificial Sequence
  Description of Artificial Sequence: Synthetic oligonucleotide
cuuuggcaauauagaguca

SEQ ID NO: 145191 - RNA, 19 nt, Artificial Sequence
  Description of Artificial Sequence: Synthetic oligonucleotide
aaauaauaacauugaccaa

SEQ ID NO: 145192 - RNA, 19 nt, Artificial Sequence
  Description of Artificial Sequence: Synthetic oligonucleotide
auaguaaacaugcuuugcc

SEQ ID NO: 145193 - RNA, 19 nt, Artificial Sequence
  Description of Artificial Sequence: Synthetic oligonucleotide
caagaaguagaagauauau

SEQ ID NO: 145194 - RNA, 19 nt, Artificial Sequence
  Description of Artificial Sequence: Synthetic oligonucleotide
uucucuagccuuaguuuuu

SEQ ID NO: 145195 - RNA, 19 nt, Artificial Sequence
  Description of Artificial Sequence: Synthetic oligonucleotide
uccucccaauuugcauuuu

SEQ ID NO: 145196 - RNA, 19 nt, Artificial Sequence
  Description of Artificial Sequence: Synthetic oligonucleotide
uuguaaaaauaauguugua

SEQ ID NO: 145197 - RNA, 19 nt, Artificial Sequence
  Description of Artificial Sequence: Synthetic oligonucleotide
auccacaaaggaaauaaac

SEQ ID NO: 145198 - RNA, 25 nt, Artificial Sequence
  Description of Artificial Sequence: Synthetic oligonucleotide
gucuaucagcgauuucaucuucagg

SEQ ID NO: 145199 - RNA, 25 nt, Artificial Sequence
  Description of Artificial Sequence: Synthetic oligonucleotide
gccuggacuacaccacucacccucc

SEQ ID NO: 145200 - RNA, 25 nt, Artificial Sequence
  Description of Artificial Sequence: Synthetic oligonucleotide
ccagugugcuugagaaacaaacugc

SEQ ID NO: 145201 - RNA, 25 nt, Artificial Sequence
  Description of Artificial Sequence: Synthetic oligonucleotide
cacccacugaacuccgcagcuagca

SEQ ID NO: 145202 - RNA, 25 nt, Artificial Sequence
  Description of Artificial Sequence: Synthetic oligonucleotide
auccaaaucagcccuugagauuuga

SEQ ID NO: 145203 - RNA, 25 nt, Artificial Sequence
  Description of Artificial Sequence: Synthetic oligonucleotide
aggccuuggagacucagauccugaa

SEQ ID NO: 145204 - RNA, 25 nt, Artificial Sequence
  Description of Artificial Sequence: Synthetic oligonucleotide
acaagagagaacaaaaucucuacuu

SEQ ID NO: 145205 - RNA, 25 nt, Artificial Sequence
  Description of Artificial Sequence: Synthetic oligonucleotide
uugauggaacuuccauucugugggg

SEQ ID NO: 145206 - RNA, 25 nt, Artificial Sequence
  Description of Artificial Sequence: Synthetic oligonucleotide
gaagagacugacaauaagcaauuaa

SEQ ID NO: 145207 - RNA, 25 nt, Artificial Sequence
  Description of Artificial Sequence: Synthetic oligonucleotide
aauaaauaagaacucagcaguaggc

SEQ ID NO: 145208 - RNA, 25 nt, Artificial Sequence
  Description of Artificial Sequence: Synthetic oligonucleotide
ccuugccucagauccaaggucacuc

SEQ ID NO: 145209 - RNA, 25 nt, Artificial Sequence
  Description of Artificial Sequence: Synthetic oligonucleotide
cggaagaggccaugucuacccucaa

SEQ ID NO: 145210 - RNA, 25 nt, Artificial Sequence
  Description of Artificial Sequence: Synthetic oligonucleotide
augacacucauggaggaaaugcuga

SEQ ID NO: 145211 - RNA, 25 nt, Artificial Sequence
  Description of Artificial Sequence: Synthetic oligonucleotide
agagaagcauucagaugcaugacac

SEQ ID NO: 145212 - RNA, 25 nt, Artificial Sequence
  Description of Artificial Sequence: Synthetic oligonucleotide
caagguaagacugccaaaaaucuug

SEQ ID NO: 145213 - RNA, 25 nt, Artificial Sequence
  Description of Artificial Sequence: Synthetic oligonucleotide
guucuugcucuccucauuuuguuau

SEQ ID NO: 145214 - RNA, 25 nt, Artificial Sequence
  Description of Artificial Sequence: Synthetic oligonucleotide
uuuguuuuauuuuuaggaguuuuga

SEQ ID NO: 145215 - RNA, 25 nt, Artificial Sequence
  Description of Artificial Sequence: Synthetic oligonucleotide
agagcaaaaugacaacacccagaaa

SEQ ID NO: 145216 - RNA, 25 nt, Artificial Sequence
  Description of Artificial Sequence: Synthetic oligonucleotide
auucaguaaaugggacuuucccggc

SEQ ID NO: 145217 - RNA, 25 nt, Artificial Sequence
  Description of Artificial Sequence: Synthetic oligonucleotide
cagagccaaugaaaggcccuauugc

SEQ ID NO: 145218 - RNA, 25 nt, Artificial Sequence
  Description of Artificial Sequence: Synthetic oligonucleotide
cuaugcaaucugguccaaaaccacu

SEQ ID NO: 145219 - RNA, 25 nt, Artificial Sequence
  Description of Artificial Sequence: Synthetic oligonucleotide
ucuucaggaggaugucuucacuggu

SEQ ID NO: 145220 - RNA, 25 nt, Artificial Sequence
  Description of Artificial Sequence: Synthetic oligonucleotide
ugggccccacgcaaagcuucuucau

SEQ ID NO: 145221 - RNA, 25 nt, Artificial Sequence
  Description of Artificial Sequence: Synthetic oligonucleotide
ugagggaaucuaagacuuugggggc

SEQ ID NO: 145222 - RNA, 25 nt, Artificial Sequence
  Description of Artificial Sequence: Synthetic oligonucleotide
cuguccagauuaugaaugggcucuu

SEQ ID NO: 145223 - RNA, 25 nt, Artificial Sequence
  Description of Artificial Sequence: Synthetic oligonucleotide
uccacauugcccuggggggucuucu

SEQ ID NO: 145224 - RNA, 25 nt, Artificial Sequence
  Description of Artificial Sequence: Synthetic oligonucleotide
ugaugaucccagcagggaucuaugc

SEQ ID NO: 145225 - RNA, 25 nt, Artificial Sequence
  Description of Artificial Sequence: Synthetic oligonucleotide
cacccaucugugugacuguguggua

SEQ ID NO: 145226 - RNA, 25 nt, Artificial Sequence
  Description of Artificial Sequence: Synthetic oligonucleotide
acccucucuggggaggcauuaugua

SEQ ID NO: 145227 - RNA, 25 nt, Artificial Sequence
  Description of Artificial Sequence: Synthetic oligonucleotide
auauuauuuccggaucacuccuggc

SEQ ID NO: 145228 - RNA, 25 nt, Artificial Sequence
  Description of Artificial Sequence: Synthetic oligonucleotide
cagcaacggagaaaaacuccaggaa

SEQ ID NO: 145229 - RNA, 25 nt, Artificial Sequence
  Description of Artificial Sequence: Synthetic oligonucleotide
aguguuuggucaaaggaaaaaugau

SEQ ID NO: 145230 - RNA, 25 nt, Artificial Sequence
  Description of Artificial Sequence: Synthetic oligonucleotide
uaaugaauucauugagccucuuugc

SEQ ID NO: 145231 - RNA, 25 nt, Artificial Sequence
  Description of Artificial Sequence: Synthetic oligonucleotide
cugccauuucuggaaugauucuuuc

SEQ ID NO: 145232 - RNA, 25 nt, Artificial Sequence
  Description of Artificial Sequence: Synthetic oligonucleotide
caaucauggacauacuuaauauuaa

SEQ ID NO: 145233 - RNA, 25 nt, Artificial Sequence
  Description of Artificial Sequence: Synthetic oligonucleotide
aaauuucccauuuuuuaaaaaugga

SEQ ID NO: 145234 - RNA, 25 nt, Artificial Sequence
  Description of Artificial Sequence: Synthetic oligonucleotide
agagucugaauuuuauuagagcuca

SEQ ID NO: 145235 - RNA, 25 nt, Artificial Sequence
  Description of Artificial Sequence: Synthetic oligonucleotide
acacaccauauauuaacauauacaa

SEQ ID NO: 145236 - RNA, 25 nt, Artificial Sequence
  Description of Artificial Sequence: Synthetic oligonucleotide
acugugaaccagcuaaucccucuga

SEQ ID NO: 145237 - RNA, 25 nt, Artificial Sequence
  Description of Artificial Sequence: Synthetic oligonucleotide
agaaaaacuccccaucuacccaaua

SEQ ID NO: 145238 - RNA, 25 nt, Artificial Sequence
  Description of Artificial Sequence: Synthetic oligonucleotide
acuguuacagcauacaaucucuguu

SEQ ID NO: 145239 - RNA, 25 nt, Artificial Sequence
  Description of Artificial Sequence: Synthetic oligonucleotide
ucuugggcauuuugucagugaugcu

SEQ ID NO: 145240 - RNA, 25 nt, Artificial Sequence
  Description of Artificial Sequence: Synthetic oligonucleotide
ugaucuuugccuucuuccaggaacu

SEQ ID NO: 145241 - RNA, 25 nt, Artificial Sequence
  Description of Artificial Sequence: Synthetic oligonucleotide
uuguaauagcuggcaucguugagaa

SEQ ID NO: 145242 - RNA, 25 nt, Artificial Sequence
  Description of Artificial Sequence: Synthetic oligonucleotide
augaauggaaaagaacgugcuccag

SEQ ID NO: 145243 - RNA, 25 nt, Artificial Sequence
  Description of Artificial Sequence: Synthetic oligonucleotide
gacccaaaucuaacauaguucuccu

SEQ ID NO: 145244 - RNA, 25 nt, Artificial Sequence
  Description of Artificial Sequence: Synthetic oligonucleotide
ugucagcagaagaaaaaaaagaaca

SEQ ID NO: 145245 - RNA, 25 nt, Artificial Sequence
  Description of Artificial Sequence: Synthetic oligonucleotide
agacuauugaaauaaaagaagaagu

SEQ ID NO: 145246 - RNA, 25 nt, Artificial Sequence
  Description of Artificial Sequence: Synthetic oligonucleotide
ugguugggcuaacugaaacaucuuc

SEQ ID NO: 145247 - RNA, 25 nt, Artificial Sequence
  Description of Artificial Sequence: Synthetic oligonucleotide
cccaaccaaagaaugaagaagacau

SEQ ID NO: 145248 - RNA, 25 nt, Artificial Sequence
  Description of Artificial Sequence: Synthetic oligonucleotide
uugaaauuauuccaauccaagaaga

SEQ ID NO: 145249 - RNA, 25 nt, Artificial Sequence
  Description of Artificial Sequence: Synthetic oligonucleotide
aggaagaagaagaaacagagacgaa

SEQ ID NO: 145250 - RNA, 25 nt, Artificial Sequence
  Description of Artificial Sequence: Synthetic oligonucleotide
acuuuccagaaccuccccaagauca

SEQ ID NO: 145251 - RNA, 25 nt, Artificial Sequence
  Description of Artificial Sequence: Synthetic oligonucleotide
aggaauccucaccaauagaaaauga

SEQ ID NO: 145252 - RNA, 25 nt, Artificial Sequence
  Description of Artificial Sequence: Synthetic oligonucleotide
acagcucuccuuaagugauuucuuc

SEQ ID NO: 145253 - RNA, 25 nt, Artificial Sequence
  Description of Artificial Sequence: Synthetic oligonucleotide
cuguuuucuguuuccuuuuuuaaac

SEQ ID NO: 145254 - RNA, 25 nt, Artificial Sequence
  Description of Artificial Sequence: Synthetic oligonucleotide
cauuaguguucauagcuuccaagag

SEQ ID NO: 145255 - RNA, 25 nt, Artificial Sequence
  Description of Artificial Sequence: Synthetic oligonucleotide
gacaugcugacuuucauuucuugag

SEQ ID NO: 145256 - RNA, 25 nt, Artificial Sequence
  Description of Artificial Sequence: Synthetic oligonucleotide
gguacucugcacauacgcaccacau

SEQ ID NO: 145257 - RNA, 25 nt, Artificial Sequence
  Description of Artificial Sequence: Synthetic oligonucleotide
ucucuaucuggccuuugcauggagu

SEQ ID NO: 145258 - RNA, 25 nt, Artificial Sequence
  Description of Artificial Sequence: Synthetic oligonucleotide
ugaccauagcuccuucucucuuaca

SEQ ID NO: 145259 - RNA, 25 nt, Artificial Sequence
  Description of Artificial Sequence: Synthetic oligonucleotide
auugaauguagagaauguagccauu

SEQ ID NO: 145260 - RNA, 25 nt, Artificial Sequence
  Description of Artificial Sequence: Synthetic oligonucleotide
uguagcagcuuguguugucacgcuu

SEQ ID NO: 145261 - RNA, 25 nt, Artificial Sequence
  Description of Artificial Sequence: Synthetic oligonucleotide
ucuucuuuugagcaacuuucuuaca

SEQ ID NO: 145262 - RNA, 25 nt, Artificial Sequence
  Description of Artificial Sequence: Synthetic oligonucleotide
acugaagaaaggcagaaugagugcu

SEQ ID NO: 145263 - RNA, 25 nt, Artificial Sequence
  Description of Artificial Sequence: Synthetic oligonucleotide
uucagaaugugauuuccuacuaacc

SEQ ID NO: 145264 - RNA, 25 nt, Artificial Sequence
  Description of Artificial Sequence: Synthetic oligonucleotide
cuguuccuuggauaggcuuuuuagu

SEQ ID NO: 145265 - RNA, 25 nt, Artificial Sequence
  Description of Artificial Sequence: Synthetic oligonucleotide
uauaguauuuuuuuuugucauuuuc

SEQ ID NO: 145266 - RNA, 25 nt, Artificial Sequence
  Description of Artificial Sequence: Synthetic oligonucleotide
cuccaucaacaaccagggagacugc

SEQ ID NO: 145267 - RNA, 25 nt, Artificial Sequence
  Description of Artificial Sequence: Synthetic oligonucleotide
caccugauggaaaagauauaugacu

SEQ ID NO: 145268 - RNA, 25 nt, Artificial Sequence
  Description of Artificial Sequence: Synthetic oligonucleotide
ugcuucaugacauuccuaaacuauc

SEQ ID NO: 145269 - RNA, 25 nt, Artificial Sequence
  Description of Artificial Sequence: Synthetic oligonucleotide
cuuuuuuuuauuccacaucuacguu

SEQ ID NO: 145270 - RNA, 25 nt, Artificial Sequence
  Description of Artificial Sequence: Synthetic oligonucleotide
uuuugguggagucccuuuugcauca

SEQ ID NO: 145271 - RNA, 25 nt, Artificial Sequence
  Description of Artificial Sequence: Synthetic oligonucleotide
auuguuuuaaggaugauaaaaaaaa

SEQ ID NO: 145272 - RNA, 25 nt, Artificial Sequence
  Description of Artificial Sequence: Synthetic oligonucleotide
aauaacaacuagggacaauacagaa

SEQ ID NO: 145273 - RNA, 25 nt, Artificial Sequence
  Description of Artificial Sequence: Synthetic oligonucleotide
acccauuccauuuaucuuucuacag

SEQ ID NO: 145274 - RNA, 25 nt, Artificial Sequence
  Description of Artificial Sequence: Synthetic oligonucleotide
gggcugacauuguggcacauucuua

SEQ ID NO: 145275 - RNA, 25 nt, Artificial Sequence
  Description of Artificial Sequence: Synthetic oligonucleotide
agaguuaccacaccccaugagggaa

SEQ ID NO: 145276 - RNA, 25 nt, Artificial Sequence
  Description of Artificial Sequence: Synthetic oligonucleotide
agcucuaaauagccaacacccaucu

SEQ ID NO: 145277 - RNA, 25 nt, Artificial Sequence
  Description of Artificial Sequence: Synthetic oligonucleotide
uguuuuuuguaaaaacagcauagcu

SEQ ID NO: 145278 - RNA, 25 nt, Artificial Sequence
  Description of Artificial Sequence: Synthetic oligonucleotide
uuauacauggacaugucucugccuu

SEQ ID NO: 145279 - RNA, 25 nt, Artificial Sequence
  Description of Artificial Sequence: Synthetic oligonucleotide
uaacuuuuccuaacucccacucuag

SEQ ID NO: 145280 - RNA, 25 nt, Artificial Sequence
  Description of Artificial Sequence: Synthetic oligonucleotide
ggcuauuguuugcaugucuaccuac

SEQ ID NO: 145281 - RNA, 25 nt, Artificial Sequence
  Description of Artificial Sequence: Synthetic oligonucleotide
cuuuuagccauuaugcgagaaaaga

SEQ ID NO: 145282 - RNA, 25 nt, Artificial Sequence
  Description of Artificial Sequence: Synthetic oligonucleotide
aaaaaaaugaccauagaaaaugcca

SEQ ID NO: 145283 - RNA, 25 nt, Artificial Sequence
  Description of Artificial Sequence: Synthetic oligonucleotide
accaugaggugcccaaauuucaaau

SEQ ID NO: 145284 - RNA, 25 nt, Artificial Sequence
  Description of Artificial Sequence: Synthetic oligonucleotide
uaauaauuaacauuuaguuauauuu

SEQ ID NO: 145285 - RNA, 25 nt, Artificial Sequence
  Description of Artificial Sequence: Synthetic oligonucleotide
uauaauuuccagaugacaaaguauu

SEQ ID NO: 145286 - RNA, 25 nt, Artificial Sequence
  Description of Artificial Sequence: Synthetic oligonucleotide
uucaucaaauaacuucauuugaugu

SEQ ID NO: 145287 - RNA, 25 nt, Artificial Sequence
  Description of Artificial Sequence: Synthetic oligonucleotide
uuccaugaucaagaaagaaucccua

SEQ ID NO: 145288 - RNA, 25 nt, Artificial Sequence
  Description of Artificial Sequence: Synthetic oligonucleotide
aucucuauuuuacaaguaauucaaa

SEQ ID NO: 145289 - RNA, 25 nt, Artificial Sequence
  Description of Artificial Sequence: Synthetic oligonucleotide
agaggccaaauaacuuguaaacaag

SEQ ID NO: 145290 - RNA, 25 nt, Artificial Sequence
  Description of Artificial Sequence: Synthetic oligonucleotide
gaaaagguaacuugucaacagucau

SEQ ID NO: 145291 - RNA, 25 nt, Artificial Sequence
  Description of Artificial Sequence: Synthetic oligonucleotide
uaacuaguaauuaugagagccuugu

SEQ ID NO: 145292 - RNA, 25 nt, Artificial Sequence
  Description of Artificial Sequence: Synthetic oligonucleotide
uuucauaaccaggucuucuuacuca

SEQ ID NO: 145293 - RNA, 25 nt, Artificial Sequence
  Description of Artificial Sequence: Synthetic oligonucleotide
aaauccugugauguuugaaauaacc

SEQ ID NO: 145294 - RNA, 25 nt, Artificial Sequence
  Description of Artificial Sequence: Synthetic oligonucleotide
caaauugucucuccaaugucugcau

SEQ ID NO: 145295 - RNA, 25 nt, Artificial Sequence
  Description of Artificial Sequence: Synthetic oligonucleotide
uaaacugugagagccaagucaacag

SEQ ID NO: 145296 - RNA, 25 nt, Artificial Sequence
  Description of Artificial Sequence: Synthetic oligonucleotide
gcuuuuaucaagaauuuacucucug

SEQ ID NO: 145297 - RNA, 25 nt, Artificial Sequence
  Description of Artificial Sequence: Synthetic oligonucleotide
gaccagcaauaaacaagcacugaga

SEQ ID NO: 145298 - RNA, 25 nt, Artificial Sequence
  Description of Artificial Sequence: Synthetic oligonucleotide
agacacagagagccagauucagauu

SEQ ID NO: 145299 - RNA, 25 nt, Artificial Sequence
  Description of Artificial Sequence: Synthetic oligonucleotide
uuuacccauggggauaaaaagacuc

SEQ ID NO: 145300 - RNA, 25 nt, Artificial Sequence
  Description of Artificial Sequence: Synthetic oligonucleotide
cagacuuucaccacauuuggaaaac

SEQ ID NO: 145301 - RNA, 25 nt, Artificial Sequence
  Description of Artificial Sequence: Synthetic oligonucleotide
cuacuugcaucauaaauauauaaua

SEQ ID NO: 145302 - RNA, 25 nt, Artificial Sequence
  Description of Artificial Sequence: Synthetic oligonucleotide
aacugguaguuuauaugaagcagac

SEQ ID NO: 145303 - RNA, 25 nt, Artificial Sequence
  Description of Artificial Sequence: Synthetic oligonucleotide
cacuaagugcuauagacacucucag

SEQ ID NO: 145304 - RNA, 25 nt, Artificial Sequence
  Description of Artificial Sequence: Synthetic oligonucleotide
gaauaucauacuuggaaacaaugua

SEQ ID NO: 145305 - RNA, 25 nt, Artificial Sequence
  Description of Artificial Sequence: Synthetic oligonucleotide
aauuaaaaugccgaaucugagucaa

SEQ ID NO: 145306 - RNA, 25 nt, Artificial Sequence
  Description of Artificial Sequence: Synthetic oligonucleotide
acagcugcccuacuuuucaauucag

SEQ ID NO: 145307 - RNA, 25 nt, Artificial Sequence
  Description of Artificial Sequence: Synthetic oligonucleotide
gauauacuaguaccuuaccuagaaa

SEQ ID NO: 145308 - RNA, 25 nt, Artificial Sequence
  Description of Artificial Sequence: Synthetic oligonucleotide
auaauguuaaccuagggugaaguca

SEQ ID NO: 145309 - RNA, 25 nt, Artificial Sequence
  Description of Artificial Sequence: Synthetic oligonucleotide
acuauaaucuguagucuauuauuug

SEQ ID NO: 145310 - RNA, 25 nt, Artificial Sequence
  Description of Artificial Sequence: Synthetic oligonucleotide
gggcauuugcuacaugaugagugcu

SEQ ID NO: 145311 - RNA, 25 nt, Artificial Sequence
  Description of Artificial Sequence: Synthetic oligonucleotide
ugccagauuguggcagguaaagaga

SEQ ID NO: 145312 - RNA, 25 nt, Artificial Sequence
  Description of Artificial Sequence: Synthetic oligonucleotide
acaauguaauuugcacucccuauga

SEQ ID NO: 145313 - RNA, 25 nt, Artificial Sequence
  Description of Artificial Sequence: Synthetic oligonucleotide
auauuucuacauuuuuagcgaccac

SEQ ID NO: 145314 - RNA, 25 nt, Artificial Sequence
  Description of Artificial Sequence: Synthetic oligonucleotide
cuaguggaagacauuccccaaaauu

SEQ ID NO: 145315 - RNA, 25 nt, Artificial Sequence
  Description of Artificial Sequence: Synthetic oligonucleotide
uagaaaaaaaggagauagaagauuu

SEQ ID NO: 145316 - RNA, 25 nt, Artificial Sequence
  Description of Artificial Sequence: Synthetic oligonucleotide
ucugucuauguaaaguucucaaaau

SEQ ID NO: 145317 - RNA, 25 nt, Artificial Sequence
  Description of Artificial Sequence: Synthetic oligonucleotide
uuuguucuaaauuaauaaaacuauc

SEQ ID NO: 145318 - RNA, 25 nt, Artificial Sequence
  Description of Artificial Sequence: Synthetic oligonucleotide
cuuuguguucuuuucugcaacagau

SEQ ID NO: 145319 - RNA, 25 nt, Artificial Sequence
  Description of Artificial Sequence: Synthetic oligonucleotide
ugauuccaacauggguguuugucua

SEQ ID NO: 145320 - RNA, 25 nt, Artificial Sequence
  Description of Artificial Sequence: Synthetic oligonucleotide
auucuucuuuacucuugaaacauua

SEQ ID NO: 145321 - RNA, 25 nt, Artificial Sequence
  Description of Artificial Sequence: Synthetic oligonucleotide
agaccaugggaggcucuuacagccu

SEQ ID NO: 145322 - RNA, 25 nt, Artificial Sequence
  Description of Artificial Sequence: Synthetic oligonucleotide
uugaguugauauuuauacaacccaa

SEQ ID NO: 145323 - RNA, 25 nt, Artificial Sequence
  Description of Artificial Sequence: Synthetic oligonucleotide
aaucuagguuugaacggugaggugu

SEQ ID NO: 145324 - RNA, 25 nt, Artificial Sequence
  Description of Artificial Sequence: Synthetic oligonucleotide
ucaggucaucaaauauucaugucua

SEQ ID NO: 145325 - RNA, 25 nt, Artificial Sequence
  Description of Artificial Sequence: Synthetic oligonucleotide
auauagucuuacacagguucucaaa

SEQ ID NO: 145326 - RNA, 25 nt, Artificial Sequence
  Description of Artificial Sequence: Synthetic oligonucleotide
aaaaaauguucaugggauaggucau

SEQ ID NO: 145327 - RNA, 25 nt, Artificial Sequence
  Description of Artificial Sequence: Synthetic oligonucleotide
uugauaauggauuccuuauucugag

SEQ ID NO: 145328 - RNA, 25 nt, Artificial Sequence
  Description of Artificial Sequence: Synthetic oligonucleotide
gaacuccagacgacugaaauauaug

SEQ ID NO: 145329 - RNA, 25 nt, Artificial Sequence
  Description of Artificial Sequence: Synthetic oligonucleotide
gagagaaggaaaaggacauaguagg

SEQ ID NO: 145330 - RNA, 25 nt, Artificial Sequence
  Description of Artificial Sequence: Synthetic oligonucleotide
gagcaggccugagaaaaaaaugaaa

SEQ ID NO: 145331 - RNA, 25 nt, Artificial Sequence
  Description of Artificial Sequence: Synthetic oligonucleotide
agucagaaaucuuuaaaaaaauaca

SEQ ID NO: 145332 - RNA, 25 nt, Artificial Sequence
  Description of Artificial Sequence: Synthetic oligonucleotide
aagaucuuauuucuaucuuauuuuu

SEQ ID NO: 145333 - RNA, 25 nt, Artificial Sequence
  Description of Artificial Sequence: Synthetic oligonucleotide
uucuccucuucugaaauauauauga

SEQ ID NO: 145334 - RNA, 25 nt, Artificial Sequence
  Description of Artificial Sequence: Synthetic oligonucleotide
aggauuccucuccaaacccaugguu

SEQ ID NO: 145335 - RNA, 25 nt, Artificial Sequence
  Description of Artificial Sequence: Synthetic oligonucleotide
uucucuaagaauuuugagucauuug

SEQ ID NO: 145336 - RNA, 25 nt, Artificial Sequence
  Description of Artificial Sequence: Synthetic oligonucleotide
guaugaccucaaauaauuaguuuua

SEQ ID NO: 145337 - RNA, 25 nt, Artificial Sequence
  Description of Artificial Sequence: Synthetic oligonucleotide
agcugaccucacauaacuccuuaua

SEQ ID NO: 145338 - RNA, 25 nt, Artificial Sequence
  Description of Artificial Sequence: Synthetic oligonucleotide
aauaggagacaucuuuaaugucugc

SEQ ID NO: 145339 - RNA, 25 nt, Artificial Sequence
  Description of Artificial Sequence: Synthetic oligonucleotide
cuauuaaagaaggaugaaaauuccu

SEQ ID NO: 145340 - RNA, 25 nt, Artificial Sequence
  Description of Artificial Sequence: Synthetic oligonucleotide
uaugaccuucuccccgauuaucccu

SEQ ID NO: 145341 - RNA, 25 nt, Artificial Sequence
  Description of Artificial Sequence: Synthetic oligonucleotide
uuuggcaauauagagucaaauaaua

SEQ ID NO: 145342 - RNA, 25 nt, Artificial Sequence
  Description of Artificial Sequence: Synthetic oligonucleotide
aacauugaccaauaguaaacaugcu

SEQ ID NO: 145343 - RNA, 25 nt, Artificial Sequence
  Description of Artificial Sequence: Synthetic oligonucleotide
uuugccaagaaguagaagauauauu

SEQ ID NO: 145344 - RNA, 25 nt, Artificial Sequence
  Description of Artificial Sequence: Synthetic oligonucleotide
ucucuagccuuaguuuuuccuccca

SEQ ID NO: 145345 - RNA, 25 nt, Artificial Sequence
  Description of Artificial Sequence: Synthetic oligonucleotide
aauuugcauuuuuguaaaaauaaug

SEQ ID NO: 145346 - RNA, 25 nt, Artificial Sequence
  Description of Artificial Sequence: Synthetic oligonucleotide
guuguauccacaaaggaaauaaacu

SEQ ID NO: 145347 - RNA, 25 nt, Artificial Sequence
  Description of Artificial Sequence: Synthetic oligonucleotide
aauaaacuuuaaaaacccaagugca

SEQ ID NO: 145348 - RNA, 25 nt, Artificial Sequence
  Description of Artificial Sequence: Synthetic oligonucleotide
aggccuuggagacucaggaguuuug

SEQ ID NO: 145349 - RNA, 25 nt, Artificial Sequence
  Description of Artificial Sequence: Synthetic oligonucleotide
gagagcaaaaugacaacacccagaa

SEQ ID NO: 145350 - RNA, 25 nt, Artificial Sequence
  Description of Artificial Sequence: Synthetic oligonucleotide
aauucaguaaaugggacuuucccgg

SEQ ID NO: 145351 - RNA, 25 nt, Artificial Sequence
  Description of Artificial Sequence: Synthetic oligonucleotide
gcagagccaaugaaaggcccuauug

SEQ ID NO: 145352 - RNA, 25 nt, Artificial Sequence
  Description of Artificial Sequence: Synthetic oligonucleotide
gcuaugcaaucugguccaaaaccac

SEQ ID NO: 145353 - RNA, 25 nt, Artificial Sequence
  Description of Artificial Sequence: Synthetic oligonucleotide
cucuucaggaggaugucuucacugg

SEQ ID NO: 145354 - RNA, 25 nt, Artificial Sequence
  Description of Artificial Sequence: Synthetic oligonucleotide
gugggccccacgcaaagcuucuuca

SEQ ID NO: 145355 - RNA, 25 nt, Artificial Sequence
  Description of Artificial Sequence: Synthetic oligonucleotide
augagggaaucuaagacuuuggggg

SEQ ID NO: 145356 - RNA, 25 nt, Artificial Sequence
  Description of Artificial Sequence: Synthetic oligonucleotide
gcuguccagauuaugaaugggcucu

SEQ ID NO: 145357 - RNA, 25 nt, Artificial Sequence
  Description of Artificial Sequence: Synthetic oligonucleotide
uuccacauugcccuggggggucuuc

SEQ ID NO: 145358 - RNA, 25 nt, Artificial Sequence
  Description of Artificial Sequence: Synthetic oligonucleotide
cugaugaucccagcagggaucuaug

SEQ ID NO: 145359 - RNA, 25 nt, Artificial Sequence
  Description of Artificial Sequence: Synthetic oligonucleotide
gcacccaucugugugacuguguggu

SEQ ID NO: 145360 - RNA, 25 nt, Artificial Sequence
  Description of Artificial Sequence: Synthetic oligonucleotide
uacccucucuggggaggcauuaugu

SEQ ID NO: 145361 - RNA, 25 nt, Artificial Sequence
  Description of Artificial Sequence: Synthetic oligonucleotide
uauauuauuuccggaucacuccugg

SEQ ID NO: 145362 - RNA, 25 nt, Artificial Sequence
  Description of Artificial Sequence: Synthetic oligonucleotide
gcagcaacggagaaaaacuccagga

SEQ ID NO: 145363 - RNA, 25 nt, Artificial Sequence
  Description of Artificial Sequence: Synthetic oligonucleotide
aaguguuuggucaaaggaaaaauga

SEQ ID NO: 145364 - RNA, 25 nt, Artificial Sequence
  Description of Artificial Sequence: Synthetic oligonucleotide
auaaugaauucauugagccucuuug

SEQ ID NO: 145365 - RNA, 25 nt, Artificial Sequence
  Description of Artificial Sequence: Synthetic oligonucleotide
gcugccauuucuggaaugauucuuu

SEQ ID NO: 145366 - RNA, 25 nt, Artificial Sequence
  Description of Artificial Sequence: Synthetic oligonucleotide
ucaaucauggacauacuuaauauua

SEQ ID NO: 145367 - RNA, 25 nt, Artificial Sequence
  Description of Artificial Sequence: Synthetic oligonucleotide
aaaauuucccauuuuuuaaaaaugg

SEQ ID NO: 145368 - RNA, 25 nt, Artificial Sequence
  Description of Artificial Sequence: Synthetic oligonucleotide
gagagucugaauuuuauuagagcuc

SEQ ID NO: 145369 - RNA, 25 nt, Artificial Sequence
  Description of Artificial Sequence: Synthetic oligonucleotide
cacacaccauauauuaacauauaca

SEQ ID NO: 145370 - RNA, 25 nt, Artificial Sequence
  Description of Artificial Sequence: Synthetic oligonucleotide
aacugugaaccagcuaaucccucug

SEQ ID NO: 145371 - RNA, 25 nt, Artificial Sequence
  Description of Artificial Sequence: Synthetic oligonucleotide
gagaaaaacuccccaucuacccaau

SEQ ID NO: 145372 - RNA, 25 nt, Artificial Sequence
  Description of Artificial Sequence: Synthetic oligonucleotide
uacuguuacagcauacaaucucugu

SEQ ID NO: 145373 - RNA, 25 nt, Artificial Sequence
  Description of Artificial Sequence: Synthetic oligonucleotide
uucuugggcauuuugucagugaugc

SEQ ID NO: 145374 - RNA, 25 nt, Artificial Sequence
  Description of Artificial Sequence: Synthetic oligonucleotide
cugaucuuugccuucuuccaggaac

SEQ ID NO: 145375 - RNA, 25 nt, Artificial Sequence
  Description of Artificial Sequence: Synthetic oligonucleotide
cuuguaauagcuggcaucguugaga

SEQ ID NO: 145376 - RNA, 25 nt, Artificial Sequence
  Description of Artificial Sequence: Synthetic oligonucleotide
aaugaauggaaaagaacgugcucca

SEQ ID NO: 145377 - RNA, 25 nt, Artificial Sequence
  Description of Artificial Sequence: Synthetic oligonucleotide
agacccaaaucuaacauaguucucc

SEQ ID NO: 145378 - RNA, 25 nt, Artificial Sequence
  Description of Artificial Sequence: Synthetic oligonucleotide
cugucagcagaagaaaaaaaagaac

SEQ ID NO: 145379 - RNA, 25 nt, Artificial Sequence
  Description of Artificial Sequence: Synthetic oligonucleotide
cagacuauugaaauaaaagaagaag

SEQ ID NO: 145380 - RNA, 25 nt, Artificial Sequence
  Description of Artificial Sequence: Synthetic oligonucleotide
gugguugggcuaacugaaacaucuu

SEQ ID NO: 145381 - RNA, 25 nt, Artificial Sequence
  Description of Artificial Sequence: Synthetic oligonucleotide
ucccaaccaaagaaugaagaagaca

SEQ ID NO: 145382 - RNA, 25 nt, Artificial Sequence
  Description of Artificial Sequence: Synthetic oligonucleotide
auugaaauuauuccaauccaagaag

SEQ ID NO: 145383 - RNA, 25 nt, Artificial Sequence
  Description of Artificial Sequence: Synthetic oligonucleotide
gaggaagaagaagaaacagagacga

SEQ ID NO: 145384 - RNA, 25 nt, Artificial Sequence
  Description of Artificial Sequence: Synthetic oligonucleotide
aacuuuccagaaccuccccaagauc

SEQ ID NO: 145385 - RNA, 25 nt, Artificial Sequence
  Description of Artificial Sequence: Synthetic oligonucleotide
caggaauccucaccaauagaaaaug

SEQ ID NO: 145386 - RNA, 25 nt, Artificial Sequence
  Description of Artificial Sequence: Synthetic oligonucleotide
gacagcucuccuuaagugauuucuu

SEQ ID NO: 145387 - RNA, 25 nt, Artificial Sequence
  Description of Artificial Sequence: Synthetic oligonucleotide
ucuguuuucuguuuccuuuuuuaaa

SEQ ID NO: 145388 - RNA, 25 nt, Artificial Sequence
  Description of Artificial Sequence: Synthetic oligonucleotide
acauuaguguucauagcuuccaaga

SEQ ID NO: 145389 - RNA, 25 nt, Artificial Sequence
  Description of Artificial Sequence: Synthetic oligonucleotide
agacaugcugacuuucauuucuuga

SEQ ID NO: 145390 - RNA, 25 nt, Artificial Sequence
  Description of Artificial Sequence: Synthetic oligonucleotide
agguacucugcacauacgcaccaca

SEQ ID NO: 145391 - RNA, 25 nt, Artificial Sequence
  Description of Artificial Sequence: Synthetic oligonucleotide
aucucuaucuggccuuugcauggag

SEQ ID NO: 145392 - RNA, 25 nt, Artificial Sequence
  Description of Artificial Sequence: Synthetic oligonucleotide
gugaccauagcuccuucucucuuac

SEQ ID NO: 145393 - RNA, 25 nt, Artificial Sequence
  Description of Artificial Sequence: Synthetic oligonucleotide
cauugaauguagagaauguagccau

SEQ ID NO: 145394 - RNA, 25 nt, Artificial Sequence
  Description of Artificial Sequence: Synthetic oligonucleotide
uuguagcagcuuguguugucacgcu

SEQ ID NO: 145395 - RNA, 25 nt, Artificial Sequence
  Description of Artificial Sequence: Synthetic oligonucleotide
uucuucuuuugagcaacuuucuuac

SEQ ID NO: 145396 - RNA, 25 nt, Artificial Sequence
  Description of Artificial Sequence: Synthetic oligonucleotide
cacugaagaaaggcagaaugagugc

SEQ ID NO: 145397 - RNA, 25 nt, Artificial Sequence
  Description of Artificial Sequence: Synthetic oligonucleotide
cuucagaaugugauuuccuacuaac

SEQ ID NO: 145398 - RNA, 25 nt, Artificial Sequence
  Description of Artificial Sequence: Synthetic oligonucleotide
ccuguuccuuggauaggcuuuuuag

SEQ ID NO: 145399 - RNA, 25 nt, Artificial Sequence
  Description of Artificial Sequence: Synthetic oligonucleotide
guauaguauuuuuuuuugucauuuu

SEQ ID NO: 145400 - RNA, 25 nt, Artificial Sequence
  Description of Artificial Sequence: Synthetic oligonucleotide
ucuccaucaacaaccagggagacug

SEQ ID NO: 145401 - RNA, 25 nt, Artificial Sequence
  Description of Artificial Sequence: Synthetic oligonucleotide
gcaccugauggaaaagauauaugac

SEQ ID NO: 145402 - RNA, 25 nt, Artificial Sequence
  Description of Artificial Sequence: Synthetic oligonucleotide
cugcuucaugacauuccuaaacuau

SEQ ID NO: 145403 - RNA, 25 nt, Artificial Sequence
  Description of Artificial Sequence: Synthetic oligonucleotide
ucuuuuuuuuauuccacaucuacgu

SEQ ID NO: 145404 - RNA, 25 nt, Artificial Sequence
  Description of Artificial Sequence: Synthetic oligonucleotide
uuuuugguggagucccuuuugcauc

SEQ ID NO: 145405 - RNA, 25 nt, Artificial Sequence
  Description of Artificial Sequence: Synthetic oligonucleotide
cauuguuuuaaggaugauaaaaaaa

SEQ ID NO: 145406 - RNA, 25 nt, Artificial Sequence
  Description of Artificial Sequence: Synthetic oligonucleotide
aaauaacaacuagggacaauacaga

SEQ ID NO: 145407 - RNA, 25 nt, Artificial Sequence
  Description of Artificial Sequence: Synthetic oligonucleotide
aacccauuccauuuaucuuucuaca

SEQ ID NO: 145408 - RNA, 25 nt, Artificial Sequence
  Description of Artificial Sequence: Synthetic oligonucleotide
agggcugacauuguggcacauucuu

SEQ ID NO: 145409 - RNA, 25 nt, Artificial Sequence
  Description of Artificial Sequence: Synthetic oligonucleotide
uagaguuaccacaccccaugaggga

SEQ ID NO: 145410 - RNA, 25 nt, Artificial Sequence
  Description of Artificial Sequence: Synthetic oligonucleotide
aagcucuaaauagccaacacccauc

SEQ ID NO: 145411 - RNA, 25 nt, Artificial Sequence
  Description of Artificial Sequence: Synthetic oligonucleotide
cuguuuuuuguaaaaacagcauagc

SEQ ID NO: 145412 - RNA, 25 nt, Artificial Sequence
  Description of Artificial Sequence: Synthetic oligonucleotide
cuuauacauggacaugucucugccu

SEQ ID NO: 145413 - RNA, 25 nt, Artificial Sequence
  Description of Artificial Sequence: Synthetic oligonucleotide
uuaacuuuuccuaacucccacucua

SEQ ID NO: 145414 - RNA, 25 nt, Artificial Sequence
  Description of Artificial Sequence: Synthetic oligonucleotide
aggcuauuguuugcaugucuaccua

SEQ ID NO: 145415 - RNA, 25 nt, Artificial Sequence
  Description of Artificial Sequence: Synthetic oligonucleotide
acuuuuagccauuaugcgagaaaag

SEQ ID NO: 145416 - RNA, 25 nt, Artificial Sequence
  Description of Artificial Sequence: Synthetic oligonucleotide
gaaaaaaaugaccauagaaaaugcc

SEQ ID NO: 145417 - RNA, 25 nt, Artificial Sequence
  Description of Artificial Sequence: Synthetic oligonucleotide
caccaugaggugcccaaauuucaaa

SEQ ID NO: 145418 - RNA, 25 nt, Artificial Sequence
  Description of Artificial Sequence: Synthetic oligonucleotide
auaauaauuaacauuuaguuauauu

SEQ ID NO: 145419 - RNA, 25 nt, Artificial Sequence
  Description of Artificial Sequence: Synthetic oligonucleotide
uuauaauuuccagaugacaaaguau

SEQ ID NO: 145420 - RNA, 25 nt, Artificial Sequence
  Description of Artificial Sequence: Synthetic oligonucleotide
uuucaucaaauaacuucauuugaug

SEQ ID NO: 145421 - RNA, 25 nt, Artificial Sequence
  Description of Artificial Sequence: Synthetic oligonucleotide
guuccaugaucaagaaagaaucccu

SEQ ID NO: 145422 - RNA, 25 nt, Artificial Sequence
  Description of Artificial Sequence: Synthetic oligonucleotide
uaucucuauuuuacaaguaauucaa

SEQ ID NO: 145423 - RNA, 25 nt, Artificial Sequence
  Description of Artificial Sequence: Synthetic oligonucleotide
aagaggccaaauaacuuguaaacaa

SEQ ID NO: 145424 - RNA, 25 nt, Artificial Sequence
  Description of Artificial Sequence: Synthetic oligonucleotide
agaaaagguaacuugucaacaguca

SEQ ID NO: 145425 - RNA, 25 nt, Artificial Sequence
  Description of Artificial Sequence: Synthetic oligonucleotide
auaacuaguaauuaugagagccuug

SEQ ID NO: 145426 - RNA, 25 nt, Artificial Sequence
  Description of Artificial Sequence: Synthetic oligonucleotide
guuucauaaccaggucuucuuacuc

SEQ ID NO: 145427 - RNA, 25 nt, Artificial Sequence
  Description of Artificial Sequence: Synthetic oligonucleotide
caaauccugugauguuugaaauaac

SEQ ID NO: 145428 - RNA, 25 nt, Artificial Sequence
  Description of Artificial Sequence: Synthetic oligonucleotide
ccaaauugucucuccaaugucugca

SEQ ID NO: 145429 - RNA, 25 nt, Artificial Sequence
  Description of Artificial Sequence: Synthetic oligonucleotide
auaaacugugagagccaagucaaca

SEQ ID NO: 145430 - RNA, 25 nt, Artificial Sequence
  Description of Artificial Sequence: Synthetic oligonucleotide
agcuuuuaucaagaauuuacucucu

SEQ ID NO: 145431 - RNA, 25 nt, Artificial Sequence
  Description of Artificial Sequence: Synthetic oligonucleotide
ugaccagcaauaaacaagcacugag

SEQ ID NO: 145432 - RNA, 25 nt, Artificial Sequence
  Description of Artificial Sequence: Synthetic oligonucleotide
gagacacagagagccagauucagau

SEQ ID NO: 145433 - RNA, 25 nt, Artificial Sequence
  Description of Artificial Sequence: Synthetic oligonucleotide
uuuuacccauggggauaaaaagacu

SEQ ID NO: 145434 - RNA, 25 nt, Artificial Sequence
  Description of Artificial Sequence: Synthetic oligonucleotide
ucagacuuucaccacauuuggaaaa

SEQ ID NO: 145435 - RNA, 25 nt, Artificial Sequence
  Description of Artificial Sequence: Synthetic oligonucleotide
acuacuugcaucauaaauauauaau

SEQ ID NO: 145436 - RNA, 25 nt, Artificial Sequence
  Description of Artificial Sequence: Synthetic oligonucleotide
uaacugguaguuuauaugaagcaga

SEQ ID NO: 145437 - RNA, 25 nt, Artificial Sequence
  Description of Artificial Sequence: Synthetic oligonucleotide
acacuaagugcuauagacacucuca

SEQ ID NO: 145438 - RNA, 25 nt, Artificial Sequence
  Description of Artificial Sequence: Synthetic oligonucleotide
agaauaucauacuuggaaacaaugu

SEQ ID NO: 145439 - RNA, 25 nt, Artificial Sequence
  Description of Artificial Sequence: Synthetic oligonucleotide
uaauuaaaaugccgaaucugaguca

SEQ ID NO: 145440 - RNA, 25 nt, Artificial Sequence
  Description of Artificial Sequence: Synthetic oligonucleotide
aacagcugcccuacuuuucaauuca

SEQ ID NO: 145441 - RNA, 25 nt, Artificial Sequence
  Description of Artificial Sequence: Synthetic oligonucleotide
agauauacuaguaccuuaccuagaa

SEQ ID NO: 145442 - RNA, 25 nt, Artificial Sequence
  Description of Artificial Sequence: Synthetic oligonucleotide
aauaauguuaaccuagggugaaguc

SEQ ID NO: 145443 - RNA, 25 nt, Artificial Sequence
  Description of Artificial Sequence: Synthetic oligonucleotide
cacuauaaucuguagucuauuauuu

SEQ ID NO: 145444 - RNA, 25 nt, Artificial Sequence
  Description of Artificial Sequence: Synthetic oligonucleotide
ugggcauuugcuacaugaugagugc

SEQ ID NO: 145445 - RNA, 25 nt, Artificial Sequence
  Description of Artificial Sequence: Synthetic oligonucleotide
cugccagauuguggcagguaaagag

SEQ ID NO: 145446 - RNA, 25 nt, Artificial Sequence
  Description of Artificial Sequence: Synthetic oligonucleotide
gacaauguaauuugcacucccuaug

SEQ ID NO: 145447 - RNA, 25 nt, Artificial Sequence
  Description of Artificial Sequence: Synthetic oligonucleotide
gauauuucuacauuuuuagcgacca

SEQ ID NO: 145448 - RNA, 25 nt, Artificial Sequence
  Description of Artificial Sequence: Synthetic oligonucleotide
acuaguggaagacauuccccaaaau

SEQ ID NO: 145449 - RNA, 25 nt, Artificial Sequence
  Description of Artificial Sequence: Synthetic oligonucleotide
uuagaaaaaaaggagauagaagauu

SEQ ID NO: 145450 - RNA, 25 nt, Artificial Sequence
  Description of Artificial Sequence: Synthetic oligonucleotide
uucugucuauguaaaguucucaaaa

SEQ ID NO: 145451 - RNA, 25 nt, Artificial Sequence
  Description of Artificial Sequence: Synthetic oligonucleotide
auuuguucuaaauuaauaaaacuau

SEQ ID NO: 145452 - RNA, 25 nt, Artificial Sequence
  Description of Artificial Sequence: Synthetic oligonucleotide
ucuuuguguucuuuucugcaacaga

SEQ ID NO: 145453 - RNA, 25 nt, Artificial Sequence
  Description of Artificial Sequence: Synthetic oligonucleotide
augauuccaacauggguguuugucu

SEQ ID NO: 145454 - RNA, 25 nt, Artificial Sequence
  Description of Artificial Sequence: Synthetic oligonucleotide
uauucuucuuuacucuugaaacauu

SEQ ID NO: 145455 - RNA, 25 nt, Artificial Sequence
  Description of Artificial Sequence: Synthetic oligonucleotide
uagaccaugggaggcucuuacagcc

SEQ ID NO: 145456 - RNA, 25 nt, Artificial Sequence
  Description of Artificial Sequence: Synthetic oligonucleotide
cuugaguugauauuuauacaaccca

SEQ ID NO: 145457 - RNA, 25 nt, Artificial Sequence
  Description of Artificial Sequence: Synthetic oligonucleotide
aaaucuagguuugaacggugaggug

SEQ ID NO: 145458 - RNA, 25 nt, Artificial Sequence
  Description of Artificial Sequence: Synthetic oligonucleotide
gucaggucaucaaauauucaugucu

SEQ ID NO: 145459 - RNA, 25 nt, Artificial Sequence
  Description of Artificial Sequence: Synthetic oligonucleotide
uauauagucuuacacagguucucaa

SEQ ID NO: 145460 - RNA, 25 nt, Artificial Sequence
  Description of Artificial Sequence: Synthetic oligonucleotide
aaaaaaauguucaugggauagguca

SEQ ID NO: 145461 - RNA, 25 nt, Artificial Sequence
  Description of Artificial Sequence: Synthetic oligonucleotide
auugauaauggauuccuuauucuga

SEQ ID NO: 145462 - RNA, 25 nt, Artificial Sequence
  Description of Artificial Sequence: Synthetic oligonucleotide
agaacuccagacgacugaaauauau

SEQ ID NO: 145463 - RNA, 25 nt, Artificial Sequence
  Description of Artificial Sequence: Synthetic oligonucleotide
ugagagaaggaaaaggacauaguag

SEQ ID NO: 145464 - RNA, 25 nt, Artificial Sequence
  Description of Artificial Sequence: Synthetic oligonucleotide
ggagcaggccugagaaaaaaaugaa

SEQ ID NO: 145465 - RNA, 25 nt, Artificial Sequence
  Description of Artificial Sequence: Synthetic oligonucleotide
aagucagaaaucuuuaaaaaaauac

SEQ ID NO: 145466 - RNA, 25 nt, Artificial Sequence
  Description of Artificial Sequence: Synthetic oligonucleotide
caagaucuuauuucuaucuuauuuu

SEQ ID NO: 145467 - RNA, 25 nt, Artificial Sequence
  Description of Artificial Sequence: Synthetic oligonucleotide
uuucuccucuucugaaauauauaug

SEQ ID NO: 145468 - RNA, 25 nt, Artificial Sequence
  Description of Artificial Sequence: Synthetic oligonucleotide
gaggauuccucuccaaacccauggu

SEQ ID NO: 145469 - RNA, 25 nt, Artificial Sequence
  Description of Artificial Sequence: Synthetic oligonucleotide
uuucucuaagaauuuugagucauuu

SEQ ID NO: 145470 - RNA, 25 nt, Artificial Sequence
  Description of Artificial Sequence: Synthetic oligonucleotide
uguaugaccucaaauaauuaguuuu

SEQ ID NO: 145471 - RNA, 25 nt, Artificial Sequence
  Description of Artificial Sequence: Synthetic oligonucleotide
uagcugaccucacauaacuccuuau

SEQ ID NO: 145472 - RNA, 25 nt, Artificial Sequence
  Description of Artificial Sequence: Synthetic oligonucleotide
uaauaggagacaucuuuaaugucug

SEQ ID NO: 145473 - RNA, 25 nt, Artificial Sequence
  Description of Artificial Sequence: Synthetic oligonucleotide
gcuauuaaagaaggaugaaaauucc

SEQ ID NO: 145474 - RNA, 25 nt, Artificial Sequence
  Description of Artificial Sequence: Synthetic oligonucleotide
cuaugaccuucuccccgauuauccc

SEQ ID NO: 145475 - RNA, 25 nt, Artificial Sequence
  Description of Artificial Sequence: Synthetic oligonucleotide
cuuuggcaauauagagucaaauaau

SEQ ID NO: 145476 - RNA, 25 nt, Artificial Sequence
  Description of Artificial Sequence: Synthetic oligonucleotide
uaacauugaccaauaguaaacaugc

SEQ ID NO: 145477 - RNA, 25 nt, Artificial Sequence
  Description of Artificial Sequence: Synthetic oligonucleotide
cuuugccaagaaguagaagauauau

SEQ ID NO: 145478 - RNA, 25 nt, Artificial Sequence
  Description of Artificial Sequence: Synthetic oligonucleotide
uucucuagccuuaguuuuuccuccc

SEQ ID NO: 145479 - RNA, 25 nt, Artificial Sequence
  Description of Artificial Sequence: Synthetic oligonucleotide
caauuugcauuuuuguaaaaauaau

SEQ ID NO: 145480 - RNA, 25 nt, Artificial Sequence
  Description of Artificial Sequence: Synthetic oligonucleotide
uguuguauccacaaaggaaauaaac

SEQ ID NO: 145481 - DNA, 21 bp, Artificial Sequence
  Description of Artificial Sequence: Synthetic oligonucleotide
  Description of Combined DNA/RNA Molecule: Synthetic oligonucleotide
cuacacaaaucagcgauuutt

SEQ ID NO: 145482 - DNA, 21 bp, Artificial Sequence
  Description of Artificial Sequence: Synthetic oligonucleotide
  Description of Combined DNA/RNA Molecule: Synthetic oligonucleotide
aaaucgcugauuuguguagtt

SEQ ID NO: 145483 - DNA, 25 bp, Artificial Sequence
  Description of Artificial Sequence: Synthetic oligonucleotide
  Description of Combined DNA/RNA Molecule: Synthetic oligonucleotide
cuacacaaaucagcgauuuccaugt

SEQ ID NO: 145484 - RNA, 27 nt, Artificial Sequence
  Description of Artificial Sequence: Synthetic oligonucleotide
acauggaaaucgcugauuuguguaguc

SEQ ID NO: 145485 - RNA, 13 nt, Artificial Sequence
  Description of Artificial Sequence: Synthetic oligonucleotide
cuacacaaaucag

SEQ ID NO: 145486 - DNA, 11 bp, Artificial Sequence
  Description of Artificial Sequence: Synthetic oligonucleotide
  Description of Combined DNA/RNA Molecule: Synthetic oligonucleotide
gauuuccaugt

SEQ ID NO: 145487 - DNA, 21 bp, Artificial Sequence
  Description of Artificial Sequence: Synthetic oligonucleotide
  Description of Combined DNA/RNA Molecule: Synthetic oligonucleotide
ggaucuuauuucuucggagtt

SEQ ID NO: 145488 - DNA, 21 bp, Artificial Sequence
  Description of Artificial Sequence: Synthetic oligonucleotide
  Description of Combined DNA/RNA Molecule: Synthetic oligonucleotide
cuccgaagaaauaagaucctt

SEQ ID NO: 145489 - RNA, 11 nt, Artificial Sequence
  Description of Artificial Sequence: Synthetic oligonucleotide
ggaucuuauuu

SEQ ID NO: 145490 - DNA, 10 bp, Artificial Sequence
  Description of Artificial Sequence: Synthetic oligonucleotide
  Description of Combined DNA/RNA Molecule: Synthetic oligonucleotide
cuucggagtt

SEQ ID NO: 145491 - RNA, 27 nt, Artificial Sequence
  Description of Artificial Sequence: Synthetic oligonucleotide
cauugucuccgaagaaauaagauccuu

SEQ ID NO: 145492 - RNA, 8 nt, Artificial Sequence
  Description of Artificial Sequence: Synthetic oligonucleotide
  modified_base (2): LNA-G
ggaucuua

SEQ ID NO: 145493 - DNA, 17 bp, Artificial Sequence
  Description of Artificial Sequence: Synthetic oligonucleotide
  Description of Combined DNA/RNA Molecule: Synthetic oligonucleotide
uuucuucggagacaatg

SEQ ID NO: 145494 - DNA, 16 bp, Artificial Sequence
  Description of Artificial Sequence: Synthetic oligonucleotide
  Description of Combined DNA/RNA Molecule: Synthetic oligonucleotide
uucuucggagacaatg

SEQ ID NO: 145495 - DNA, 15 bp, Artificial Sequence
  Description of Artificial Sequence: Synthetic oligonucleotide
  Description of Combined DNA/RNA Molecule: Synthetic oligonucleotide
ucuucggagacaatg

SEQ ID NO: 145496 - DNA, 14 bp, Artificial Sequence
  Description of Artificial Sequence: Synthetic oligonucleotide
  Description of Combined DNA/RNA Molecule: Synthetic oligonucleotide
cuucggagacaatg

SEQ ID NO: 145497 - DNA, 13 bp, Artificial Sequence
  Description of Artificial Sequence: Synthetic oligonucleotide
  Description of Combined DNA/RNA Molecule: Synthetic oligonucleotide
uucggagacaatg

SEQ ID NO: 145498 - DNA, 12 bp, Artificial Sequence
  Description of Artificial Sequence: Synthetic oligonucleotide
  Description of Combined DNA/RNA Molecule: Synthetic oligonucleotide
ucggagacaatg

SEQ ID NO: 145499 - DNA, 11 bp, Artificial Sequence
  Description of Artificial Sequence: Synthetic oligonucleotide
  Description of Combined DNA/RNA Molecule: Synthetic oligonucleotide
cggagacaatg

SEQ ID NO: 145500 - RNA, 9 nt, Artificial Sequence
  Description of Artificial Sequence: Synthetic oligonucleotide
  modified_base (2): LNA-G
ggaucuuau

SEQ ID NO: 145501 - RNA, 10 nt, Artificial Sequence
  Description of Artificial Sequence: Synthetic oligonucleotide
  modified_base (2): LNA-G
ggaucuuauu

SEQ ID NO: 145502 - RNA, 11 nt, Artificial Sequence
  Description of Artificial Sequence: Synthetic oligonucleotide
  modified_base (2): LNA-G
ggaucuuauuu

SEQ ID NO: 145503 - RNA, 12 nt, Artificial Sequence
  Description of Artificial Sequence: Synthetic oligonucleotide
  modified_base (2): LNA-G
ggaucuuauuuc

SEQ ID NO: 145504 - RNA, 8 nt, Artificial Sequence
  Description of Artificial Sequence: Synthetic oligonucleotide
  modified_base (3): LNA-A
cuacacaa

SEQ ID NO: 145505 - DNA, 13 bp, Artificial Sequence
  Description of Artificial Sequence: Synthetic oligonucleotide
  Description of Combined DNA/RNA Molecule: Synthetic oligonucleotide
  modified_base (8): LNA-A
aucagcgauuutt

SEQ ID NO: 145506 - DNA, 12 bp, Artificial Sequence
  Description of Artificial Sequence: Synthetic oligonucleotide
  Description of Combined DNA/RNA Molecule: Synthetic oligonucleotide
  modified_base (7): LNA-A
ucagcgauuutt

SEQ ID NO: 145507 - DNA, 11 bp, Artificial Sequence
  Description of Artificial Sequence: Synthetic oligonucleotide
  Description of Combined DNA/RNA Molecule: Synthetic oligonucleotide
  modified_base (6): LNA-A
cagcgauuutt

SEQ ID NO: 145508 - DNA, 10 bp, Artificial Sequence
  Description of Artificial Sequence: Synthetic oligonucleotide
  Description of Combined DNA/RNA Molecule: Synthetic oligonucleotide
  modified_base (5): LNA-A
agcgauuutt

SEQ ID NO: 145509 - DNA, 9 bp, Artificial Sequence
  Description of Artificial Sequence: Synthetic oligonucleotide
  Description of Combined DNA/RNA Molecule: Synthetic oligonucleotide
  modified_base (4): LNA-A
gcgauuutt

SEQ ID NO: 145510 - DNA, 8 bp, Artificial Sequence
  Description of Artificial Sequence: Synthetic oligonucleotide
  Description of Combined DNA/RNA Molecule: Synthetic oligonucleotide
  modified_base (3): LNA-A
cgauuutt

SEQ ID NO: 145511 - DNA, 7 bp, Artificial Sequence
  Description of Artificial Sequence: Synthetic oligonucleotide
  Description of Combined DNA/RNA Molecule: Synthetic oligonucleotide
  modified_base (2): LNA-A
gauuutt

SEQ ID NO: 145512 - RNA, 9 nt, Artificial Sequence
  Description of Artificial Sequence: Synthetic oligonucleotide
  modified_base (3): LNA-A
cuacacaaa

SEQ ID NO: 145513 - RNA, 10 nt, Artificial Sequence
  Description of Artificial Sequence: Synthetic oligonucleotide
  modified_base (3): LNA-A
cuacacaaau

SEQ ID NO: 145514 - RNA, 11 nt, Artificial Sequence
  Description of Artificial Sequence: Synthetic oligonucleotide
  modified_base (3): LNA-A
cuacacaaauc

SEQ ID NO: 145515 - RNA, 12 nt, Artificial Sequence
  Description of Artificial Sequence: Synthetic oligonucleotide
  modified_base (3): LNA-A
cuacacaaauca

SEQ ID NO: 145516 - RNA, 13 nt, Artificial Sequence
  Description of Artificial Sequence: Synthetic oligonucleotide
  modified_base (3): LNA-A
cuacacaaaucag

SEQ ID NO: 145517 - RNA, 14 nt, Artificial Sequence
  Description of Artificial Sequence: Synthetic oligonucleotide
  modified_base (3): LNA-A
cuacacaaaucagc

SEQ ID NO: 145518 - RNA, 13 nt, Artificial Sequence
  Description of Artificial Sequence: Synthetic oligonucleotide
  modified_base (2): LNA-G
ggaucuuauuucu

SEQ ID NO: 145519 - RNA, 14 nt, Artificial Sequence
  Description of Artificial Sequence: Synthetic oligonucleotide
  modified_base (2): LNA-G
ggaucuuauuucuu

SEQ ID NO: 145520 - RNA, 8 nt, Artificial Sequence
  Description of Artificial Sequence: Synthetic oligonucleotide
  modified_base (2): LNA-G
  modified_base (8): LNA-A
ggaucuua

SEQ ID NO: 145521 - RNA, 9 nt, Artificial Sequence
  Description of Artificial Sequence: Synthetic oligonucleotide
  modified_base (2): LNA-G
  modified_base (9): LNA-U
ggaucuuau

SEQ ID NO: 145522 - RNA, 10 nt, Artificial Sequence
  Description of Artificial Sequence: Synthetic oligonucleotide
  modified_base (2): LNA-G
  modified_base (10): LNA-U
ggaucuuauu

SEQ ID NO: 145523 - RNA, 11 nt, Artificial Sequence
  Description of Artificial Sequence: Synthetic oligonucleotide
  modified_base (2): LNA-G
  modified_base (11): LNA-U
ggaucuuauuu

SEQ ID NO: 145524 - RNA, 12 nt, Artificial Sequence
  Description of Artificial Sequence: Synthetic oligonucleotide
  modified_base (2): LNA-G
  modified_base (12): LNA-C
ggaucuuauuuc

SEQ ID NO: 145525 - RNA, 13 nt, Artificial Sequence
  Description of Artificial Sequence: Synthetic oligonucleotide
  modified_base (2): LNA-G
  modified_base (13): LNA-U
ggaucuuauuucu

SEQ ID NO: 145526 - RNA, 14 nt, Artificial Sequence
  Description of Artificial Sequence: Synthetic oligonucleotide
  modified_base (2): LNA-G
  modified_base (14): LNA-U
ggaucuuauuucuu

SEQ ID NO: 145527 - DNA, 13 bp, Artificial Sequence
  Description of Artificial Sequence: Synthetic oligonucleotide
  Description of Combined DNA/RNA Molecule: Synthetic oligonucleotide
  modified_base (8): LNA-G
uuucuucggagtt

SEQ ID NO: 145528 - DNA, 12 bp, Artificial Sequence
  Description of Artificial Sequence: Synthetic oligonucleotide
  Description of Combined DNA/RNA Molecule: Synthetic oligonucleotide
  modified_base (7): LNA-G
uucuucggagtt

SEQ ID NO: 145529 - DNA, 11 bp, Artificial Sequence
  Description of Artificial Sequence: Synthetic oligonucleotide
  Description of Combined DNA/RNA Molecule: Synthetic oligonucleotide
  modified_base (6): LNA-G
ucuucggagtt

SEQ ID NO: 145530 - DNA, 10 bp, Artificial Sequence
  Description of Artificial Sequence: Synthetic oligonucleotide
  Description of Combined DNA/RNA Molecule: Synthetic oligonucleotide
  modified_base (5): LNA-G
cuucggagtt

SEQ ID NO: 145531 - DNA, 9 bp, Artificial Sequence
  Description of Artificial Sequence: Synthetic oligonucleotide
  Description of Combined DNA/RNA Molecule: Synthetic oligonucleotide
  modified_base (4): LNA-G
uucggagtt

SEQ ID NO: 145532 - DNA, 8 bp, Artificial Sequence
  Description of Artificial Sequence: Synthetic oligonucleotide
  Description of Combined DNA/RNA Molecule: Synthetic oligonucleotide
  modified_base (3): LNA-G
ucggagtt

SEQ ID NO: 145533 - DNA, 7 bp, Artificial Sequence
  Description of Artificial Sequence: Synthetic oligonucleotide
  Description of Combined DNA/RNA Molecule: Synthetic oligonucleotide
  modified_base (2): LNA-G
cggagtt

SEQ ID NO: 145534 - DNA, 13 bp, Artificial Sequence
  Description of Artificial Sequence: Synthetic oligonucleotide
  Description of Combined DNA/RNA Molecule: Synthetic oligonucleotide
  modified_base (1): LNA-U
  modified_base (8): LNA-G
uuucuucggagtt

SEQ ID NO: 145535 - DNA, 12 bp, Artificial Sequence
  Description of Artificial Sequence: Synthetic oligonucleotide
  Description of Combined DNA/RNA Molecule: Synthetic oligonucleotide
  modified_base (1): LNA-U
  modified_base (7): LNA-G
uucuucggagtt

SEQ ID NO: 145536 - DNA, 11 bp, Artificial Sequence
  Description of Artificial Sequence: Synthetic oligonucleotide
  Description of Combined DNA/RNA Molecule: Synthetic oligonucleotide
  modified_base (1): LNA-U
  modified_base (6): LNA-G
ucuucggagtt

SEQ ID NO: 145537 - DNA, 10 bp, Artificial Sequence
  Description of Artificial Sequence: Synthetic oligonucleotide
  Description of Combined DNA/RNA Molecule: Synthetic oligonucleotide
  modified_base (1): LNA-C
  modified_base (5): LNA-G
cuucggagtt

SEQ ID NO: 145538 - DNA, 9 bp, Artificial Sequence
  Description of Artificial Sequence: Synthetic oligonucleotide
  Description of Combined DNA/RNA Molecule: Synthetic oligonucleotide
  modified_base (1): LNA-U
  modified_base (4): LNA-G
uucggagtt

SEQ ID NO: 145539 - DNA, 8 bp, Artificial Sequence
  Description of Artificial Sequence: Synthetic oligonucleotide
  Description of Combined DNA/RNA Molecule: Synthetic oligonucleotide
  modified_base (1): LNA-U
  modified_base (3): LNA-G
ucggagtt

SEQ ID NO: 145540 - DNA, 7 bp, Artificial Sequence
  Description of Artificial Sequence: Synthetic oligonucleotide
  Description of Combined DNA/RNA Molecule: Synthetic oligonucleotide
  modified_base (1): LNA-C
  modified_base (2): LNA-G
cggagtt

SEQ ID NO: 145541 - DNA, 21 bp, Artificial Sequence
  Description of Artificial Sequence: Synthetic oligonucleotide
  Description of Combined DNA/RNA Molecule: Synthetic oligonucleotide
  modified_base (2): LNA-G
  modified_base (16): LNA-G
ggaucuuauuucuucggagtt

SEQ ID NO: 145542 - DNA, 25 bp, Artificial Sequence
  Description of Artificial Sequence: Synthetic oligonucleotide
  Description of Combined DNA/RNA Molecule: Synthetic oligonucleotide
ggaucuuauuucuucggagacaatg

SEQ ID NO: 145543 - RNA, 25 nt, Artificial Sequence
  Description of Artificial Sequence: Synthetic oligonucleotide
guauuuugaugaggaguucacggcc

SEQ ID NO: 145544 - RNA, 25 nt, Artificial Sequence
  Description of Artificial Sequence: Synthetic oligonucleotide
ggcccagaugaucaccaucacacca

SEQ ID NO: 145545 - RNA, 25 nt, Artificial Sequence
  Description of Artificial Sequence: Synthetic oligonucleotide
gggaagaaaacuauccugcggguuu

SEQ ID NO: 145546 - RNA, 25 nt, Artificial Sequence
  Description of Artificial Sequence: Synthetic oligonucleotide
guuuuaauuuauuucauccaguuug

SEQ ID NO: 145547 - RNA, 25 nt, Artificial Sequence
  Description of Artificial Sequence: Synthetic oligonucleotide
acguagggaaauguuaaggacuucu

SEQ ID NO: 145548 - RNA, 25 nt, Artificial Sequence
  Description of Artificial Sequence: Synthetic oligonucleotide
ccaggguuuacccagugggacagag

SEQ ID NO: 145549 - RNA, 25 nt, Artificial Sequence
  Description of Artificial Sequence: Synthetic oligonucleotide
agcaagguuuaaauuuguuauugug

SEQ ID NO: 145550 - RNA, 25 nt, Artificial Sequence
  Description of Artificial Sequence: Synthetic oligonucleotide
uguauuauguuguucaaaugcauuu

SEQ ID NO: 145551 - RNA, 25 nt, Artificial Sequence
  Description of Artificial Sequence: Synthetic oligonucleotide
uuuuaaucuuugugacaggaaagcc

SEQ ID NO: 145552 - RNA, 25 nt, Artificial Sequence
  Description of Artificial Sequence: Synthetic oligonucleotide
uuaaucuuugugacaggaaagcccu

SEQ ID NO: 145553 - RNA, 25 nt, Artificial Sequence
  Description of Artificial Sequence: Synthetic oligonucleotide
gcugcuuaugucucccagcauggcc

SEQ ID NO: 145554 - RNA, 25 nt, Artificial Sequence
  Description of Artificial Sequence: Synthetic oligonucleotide
aaguguuucagaagcuucucccuga

SEQ ID NO: 145555 - RNA, 25 nt, Artificial Sequence
  Description of Artificial Sequence: Synthetic oligonucleotide
gaccaucaauaaggaagaagcccuu

SEQ ID NO: 145556 - RNA, 25 nt, Artificial Sequence
  Description of Artificial Sequence: Synthetic oligonucleotide
ccaucaauaaggaagaagcccuuca

SEQ ID NO: 145557 - RNA, 25 nt, Artificial Sequence
  Description of Artificial Sequence: Synthetic oligonucleotide
ucaauaaggaagaagcccuucagcg

SEQ ID NO: 145558 - RNA, 25 nt, Artificial Sequence
  Description of Artificial Sequence: Synthetic oligonucleotide
aauaaggaagaagcccuucagcggc

SEQ ID NO: 145559 - RNA, 25 nt, Artificial Sequence
  Description of Artificial Sequence: Synthetic oligonucleotide
aggaagaagcccuucagcggccagu

SEQ ID NO: 145560 - RNA, 25 nt, Artificial Sequence
  Description of Artificial Sequence: Synthetic oligonucleotide
gcauaacuaaaggugaaaagcuccg

SEQ ID NO: 145561 - RNA, 25 nt, Artificial Sequence
  Description of Artificial Sequence: Synthetic oligonucleotide
cauaacuaaaggugaaaagcuccgg

SEQ ID NO: 145562 - RNA, 25 nt, Artificial Sequence
  Description of Artificial Sequence: Synthetic oligonucleotide
cuacaucacgccagucaacagucug

SEQ ID NO: 145563 - RNA, 25 nt, Artificial Sequence
  Description of Artificial Sequence: Synthetic oligonucleotide
acuggauuuaagcagaguucaaaag

SEQ ID NO: 145564 - RNA, 25 nt, Artificial Sequence
  Description of Artificial Sequence: Synthetic oligonucleotide
cuggauuuaagcagaguucaaaagc

SEQ ID NO: 145565 - RNA, 25 nt, Artificial Sequence
  Description of Artificial Sequence: Synthetic oligonucleotide
gauuuaagcagaguucaaaagcccu

SEQ ID NO: 145566 - RNA, 25 nt, Artificial Sequence
  Description of Artificial Sequence: Synthetic oligonucleotide
auuuaagcagaguucaaaagcccuu

SEQ ID NO: 145567 - RNA, 25 nt, Artificial Sequence
  Description of Artificial Sequence: Synthetic oligonucleotide
uuaagcagaguucaaaagcccuuca

SEQ ID NO: 145568 - RNA, 25 nt, Artificial Sequence
  Description of Artificial Sequence: Synthetic oligonucleotide
uaagcagaguucaaaagcccuucag

SEQ ID NO: 145569 - RNA, 25 nt, Artificial Sequence
  Description of Artificial Sequence: Synthetic oligonucleotide
agcagaguucaaaagcccuucagcg

SEQ ID NO: 145570 - RNA, 25 nt, Artificial Sequence
  Description of Artificial Sequence: Synthetic oligonucleotide
cucagggucugagugaagccgcucg

SEQ ID NO: 145571 - RNA, 25 nt, Artificial Sequence
  Description of Artificial Sequence: Synthetic oligonucleotide
caagcaacuacaucacgccagucaa

SEQ ID NO: 145572 - RNA, 25 nt, Artificial Sequence
  Description of Artificial Sequence: Synthetic oligonucleotide
aucaauggcagcuucuuggugcgug

SEQ ID NO: 145573 - RNA, 25 nt, Artificial Sequence
  Description of Artificial Sequence: Synthetic oligonucleotide
uuccagcccacauuggauucaucag

SEQ ID NO: 145574 - RNA, 25 nt, Artificial Sequence
  Description of Artificial Sequence: Synthetic oligonucleotide
cagcugagaauguggaauaccuaag

SEQ ID NO: 145575 - RNA, 25 nt, Artificial Sequence
  Description of Artificial Sequence: Synthetic oligonucleotide
aacguaucuccuaauuugaggcuca

SEQ ID NO: 145576 - RNA, 25 nt, Artificial Sequence
  Description of Artificial Sequence: Synthetic oligonucleotide
ccuaaaauaauuucucuacaauugg

SEQ ID NO: 145577 - RNA, 25 nt, Artificial Sequence
  Description of Artificial Sequence: Synthetic oligonucleotide
uggaagauucagcuaguuaggagcc

SEQ ID NO: 145578 - RNA, 25 nt, Artificial Sequence
  Description of Artificial Sequence: Synthetic oligonucleotide
uuaaacucuccuagucaauauccac

SEQ ID NO: 145579 - RNA, 25 nt, Artificial Sequence
  Description of Artificial Sequence: Synthetic oligonucleotide
cagccuacaguuauguucagucaca

SEQ ID NO: 145580 - RNA, 25 nt, Artificial Sequence
  Description of Artificial Sequence: Synthetic oligonucleotide
guuauguucagucacacacacauac

SEQ ID NO: 145581 - RNA, 25 nt, Artificial Sequence
  Description of Artificial Sequence: Synthetic oligonucleotide
cacauacaaaauguuccuuuugcuu

SEQ ID NO: 145582 - RNA, 25 nt, Artificial Sequence
  Description of Artificial Sequence: Synthetic oligonucleotide
uccuuuugcuuuuaaaguaauuuuu

SEQ ID NO: 145583 - RNA, 25 nt, Artificial Sequence
  Description of Artificial Sequence: Synthetic oligonucleotide
ugaccugugaagcaacagucaaugg

SEQ ID NO: 145584 - RNA, 25 nt, Artificial Sequence
  Description of Artificial Sequence: Synthetic oligonucleotide
cuaucucacacaucgacaaaccaau

SEQ ID NO: 145585 - RNA, 25 nt, Artificial Sequence
  Description of Artificial Sequence: Synthetic oligonucleotide
uguccucaauuguacugcuaccacu

SEQ ID NO: 145586 - RNA, 25 nt, Artificial Sequence
  Description of Artificial Sequence: Synthetic oligonucleotide
aaaccguagcuggcaagcggucuua

SEQ ID NO: 145587 - RNA, 25 nt, Artificial Sequence
  Description of Artificial Sequence: Synthetic oligonucleotide
uagcuggcaagcggucuuaccggcu

SEQ ID NO: 145588 - RNA, 25 nt, Artificial Sequence
  Description of Artificial Sequence: Synthetic oligonucleotide
uuguaugguuaaaagauggguuacc

SEQ ID NO: 145589 - RNA, 25 nt, Artificial Sequence
  Description of Artificial Sequence: Synthetic oligonucleotide
ugguuaaaagauggguuaccugcga

SEQ ID NO: 145590 - RNA, 25 nt, Artificial Sequence
  Description of Artificial Sequence: Synthetic oligonucleotide
cagggaauuauacaaucuugcugag

SEQ ID NO: 145591 - RNA, 25 nt, Artificial Sequence
  Description of Artificial Sequence: Synthetic oligonucleotide
acaaucuugcugagcauaaaacagu

SEQ ID NO: 145592 - RNA, 25 nt, Artificial Sequence
  Description of Artificial Sequence: Synthetic oligonucleotide
ccaauaaugaagaguccuuuauccu

SEQ ID NO: 145593 - RNA, 25 nt, Artificial Sequence
  Description of Artificial Sequence: Synthetic oligonucleotide
acuuuggauguuccaacgcaaguug

SEQ ID NO: 145594 - RNA, 25 nt, Artificial Sequence
  Description of Artificial Sequence: Synthetic oligonucleotide
aaugcuuccacuaaacugaaaccau

SEQ ID NO: 145595 - RNA, 25 nt, Artificial Sequence
  Description of Artificial Sequence: Synthetic oligonucleotide
gagaaaguuugacuuuguuaaauau

SEQ ID NO: 145596 - RNA, 25 nt, Artificial Sequence
  Description of Artificial Sequence: Synthetic oligonucleotide
aaagaacuacuguauauuaaaaguu

SEQ ID NO: 145597 - RNA, 25 nt, Artificial Sequence
  Description of Artificial Sequence: Synthetic oligonucleotide
uuagaaauacggguuuugacuuaac

SEQ ID NO: 145598 - RNA, 25 nt, Artificial Sequence
  Description of Artificial Sequence: Synthetic oligonucleotide
aacauggguacagcaaacucagcac

SEQ ID NO: 145599 - RNA, 25 nt, Artificial Sequence
  Description of Artificial Sequence: Synthetic oligonucleotide
aaagacacagaagaugcugaccuca

SEQ ID NO: 145600 - RNA, 25 nt, Artificial Sequence
  Description of Artificial Sequence: Synthetic oligonucleotide
uaguagggagguuuauucagaucgc

SEQ ID NO: 145601 - RNA, 25 nt, Artificial Sequence
  Description of Artificial Sequence: Synthetic oligonucleotide
gccuucugcagcaggguucugggau

SEQ ID NO: 145602 - RNA, 25 nt, Artificial Sequence
  Description of Artificial Sequence: Synthetic oligonucleotide
ggucugguacauauuggaaauuaug

SEQ ID NO: 145603 - RNA, 25 nt, Artificial Sequence
  Description of Artificial Sequence: Synthetic oligonucleotide
cuaguccuuccgauggaagcacuag

SEQ ID NO: 145604 - RNA, 25 nt, Artificial Sequence
  Description of Artificial Sequence: Synthetic oligonucleotide
ccagugaauauuguuuuuaugugga

SEQ ID NO: 145605 - RNA, 25 nt, Artificial Sequence
  Description of Artificial Sequence: Synthetic oligonucleotide
augaauucaaguuggaauugguaga

SEQ ID NO: 145606 - RNA, 25 nt, Artificial Sequence
  Description of Artificial Sequence: Synthetic oligonucleotide
caggacacagauuuagacuuggaga

SEQ ID NO: 145607 - RNA, 25 nt, Artificial Sequence
  Description of Artificial Sequence: Synthetic oligonucleotide
cucaaagcacaguuacaguauucca

SEQ ID NO: 145608 - RNA, 25 nt, Artificial Sequence
  Description of Artificial Sequence: Synthetic oligonucleotide
accacugccaccacugaugaauuaa

SEQ ID NO: 145609 - RNA, 25 nt, Artificial Sequence
  Description of Artificial Sequence: Synthetic oligonucleotide
gaaacuacuagugccacaucaucac

SEQ ID NO: 145610 - RNA, 25 nt, Artificial Sequence
  Description of Artificial Sequence: Synthetic oligonucleotide
aagucggacagccucaccaaacaga

SEQ ID NO: 145611 - RNA, 25 nt, Artificial Sequence
  Description of Artificial Sequence: Synthetic oligonucleotide
gaaagcgaaaaauggaacaugaugg

SEQ ID NO: 145612 - RNA, 25 nt, Artificial Sequence
  Description of Artificial Sequence: Synthetic oligonucleotide
cccucugauuuagcauguagacugc

SEQ ID NO: 145613 - RNA, 25 nt, Artificial Sequence
  Description of Artificial Sequence: Synthetic oligonucleotide
ugagcuauuuaaggaucuauuuaug

SEQ ID NO: 145614 - RNA, 25 nt, Artificial Sequence
  Description of Artificial Sequence: Synthetic oligonucleotide
aaaaggugaaaaagcacuauuauca

SEQ ID NO: 145615 - RNA, 25 nt, Artificial Sequence
  Description of Artificial Sequence: Synthetic oligonucleotide
gaaaaagcacuauuaucaguucugc

SEQ ID NO: 145616 - RNA, 25 nt, Artificial Sequence
  Description of Artificial Sequence: Synthetic oligonucleotide
ggcugaaaagaaagauuaaaccuac

SEQ ID NO: 145617 - RNA, 25 nt, Artificial Sequence
  Description of Artificial Sequence: Synthetic oligonucleotide
uaaacccuuauaauaaaauccuucu

SEQ ID NO: 145618 - RNA, 25 nt, Artificial Sequence
  Description of Artificial Sequence: Synthetic oligonucleotide
cauacuauuagccaaugcuguagac

SEQ ID NO: 145619 - RNA, 25 nt, Artificial Sequence
  Description of Artificial Sequence: Synthetic oligonucleotide
gacagaagcauuuugauaggaauag

SEQ ID NO: 145620 - RNA, 25 nt, Artificial Sequence
  Description of Artificial Sequence: Synthetic oligonucleotide
agagcaaauaagauaauggcccuga

SEQ ID NO: 145621 - RNA, 25 nt, Artificial Sequence
  Description of Artificial Sequence: Synthetic oligonucleotide
ccaacauuuuucucuuccucaagca

SEQ ID NO: 145622 - RNA, 25 nt, Artificial Sequence
  Description of Artificial Sequence: Synthetic oligonucleotide
uuaaguaugagaaaaguucagccca

SEQ ID NO: 145623 - RNA, 25 nt, Artificial Sequence
  Description of Artificial Sequence: Synthetic oligonucleotide
caggaauaaagauggcugcugaacc

SEQ ID NO: 145624 - RNA, 25 nt, Artificial Sequence
  Description of Artificial Sequence: Synthetic oligonucleotide
aauuugaaugaccaaguucucuuca

SEQ ID NO: 145625 - RNA, 25 nt, Artificial Sequence
  Description of Artificial Sequence: Synthetic oligonucleotide
auguauaaagauagccagccuagag

SEQ ID NO: 145626 - RNA, 25 nt, Artificial Sequence
  Description of Artificial Sequence: Synthetic oligonucleotide
ggcuguaacuaucucugugaagugu

SEQ ID NO: 145627 - RNA, 25 nt, Artificial Sequence
  Description of Artificial Sequence: Synthetic oligonucleotide
ucugugaagugugagaaaauuucaa

SEQ ID NO: 145628 - RNA, 25 nt, Artificial Sequence
  Description of Artificial Sequence: Synthetic oligonucleotide
ccuuuaaggaaaugaauccuccuga

SEQ ID NO: 145629 - RNA, 25 nt, Artificial Sequence
  Description of Artificial Sequence: Synthetic oligonucleotide
aaggauacaaaaagugacaucauau

SEQ ID NO: 145630 - RNA, 25 nt, Artificial Sequence
  Description of Artificial Sequence: Synthetic oligonucleotide
agaugcaauuugaaucuucaucaua

SEQ ID NO: 145631 - RNA, 25 nt, Artificial Sequence
  Description of Artificial Sequence: Synthetic oligonucleotide
guucaaaacgaagacuagcuauuaa

SEQ ID NO: 145632 - RNA, 25 nt, Artificial Sequence
  Description of Artificial Sequence: Synthetic oligonucleotide
gugaaaccucaucucuacuaaaaau

SEQ ID NO: 145633 - RNA, 25 nt, Artificial Sequence
  Description of Artificial Sequence: Synthetic oligonucleotide
acgaaagagaagcucuaucucgccu

SEQ ID NO: 145634 - RNA, 25 nt, Artificial Sequence
  Description of Artificial Sequence: Synthetic oligonucleotide
cuccacaagcgccuucgguccaguu

SEQ ID NO: 145635 - RNA, 25 nt, Artificial Sequence
  Description of Artificial Sequence: Synthetic oligonucleotide
gagaagauuccaaagauguagccgc

SEQ ID NO: 145636 - RNA, 25 nt, Artificial Sequence
  Description of Artificial Sequence: Synthetic oligonucleotide
aaucuggauucaaugaggagacuug

SEQ ID NO: 145637 - RNA, 25 nt, Artificial Sequence
  Description of Artificial Sequence: Synthetic oligonucleotide
agaacagauuugagaguagugagga

SEQ ID NO: 145638 - RNA, 25 nt, Artificial Sequence
  Description of Artificial Sequence: Synthetic oligonucleotide
ccagagcugugcagaugaguacaaa

SEQ ID NO: 145639 - RNA, 25 nt, Artificial Sequence
  Description of Artificial Sequence: Synthetic oligonucleotide
ccucagauuguuguuguuaaugggc

SEQ ID NO: 145640 - RNA, 25 nt, Artificial Sequence
  Description of Artificial Sequence: Synthetic oligonucleotide
cuauuuuaauuauuuuuaauuuauu

SEQ ID NO: 145641 - RNA, 25 nt, Artificial Sequence
  Description of Artificial Sequence: Synthetic oligonucleotide
uuuaauuuauuaauauuuaaauaug

SEQ ID NO: 145642 - RNA, 25 nt, Artificial Sequence
  Description of Artificial Sequence: Synthetic oligonucleotide
augcaguuugaauauccuuuguuuc

SEQ ID NO: 145643 - RNA, 25 nt, Artificial Sequence
  Description of Artificial Sequence: Synthetic oligonucleotide
caugcugcuggcgucuaaguguuug

SEQ ID NO: 145644 - RNA, 25 nt, Artificial Sequence
  Description of Artificial Sequence: Synthetic oligonucleotide
agaugugcauuucaccugugacaaa

SEQ ID NO: 145645 - RNA, 25 nt, Artificial Sequence
  Description of Artificial Sequence: Synthetic oligonucleotide
ucaaaaccugugccaggcugaauua

SEQ ID NO: 145646 - RNA, 25 nt, Artificial Sequence
  Description of Artificial Sequence: Synthetic oligonucleotide
gaauguggguagucauucuuacaau

SEQ ID NO: 145647 - RNA, 25 nt, Artificial Sequence
  Description of Artificial Sequence: Synthetic oligonucleotide
auguggguagucauucuuacaauug

SEQ ID NO: 145648 - RNA, 25 nt, Artificial Sequence
  Description of Artificial Sequence: Synthetic oligonucleotide
ugaaaaugagcaucagagaguguac

SEQ ID NO: 145649 - RNA, 25 nt, Artificial Sequence
  Description of Artificial Sequence: Synthetic oligonucleotide
uugcuuuucauguagaacucagcag

SEQ ID NO: 145650 - RNA, 25 nt, Artificial Sequence
  Description of Artificial Sequence: Synthetic oligonucleotide
uguauuucuauauuuauuuucagua

SEQ ID NO: 145651 - RNA, 25 nt, Artificial Sequence
  Description of Artificial Sequence: Synthetic oligonucleotide
uuugauuaauguuucuuaaauggaa

SEQ ID NO: 145652 - RNA, 25 nt, Artificial Sequence
  Description of Artificial Sequence: Synthetic oligonucleotide
caacguguauagugccuaaaauugu

SEQ ID NO: 145653 - RNA, 25 nt, Artificial Sequence
  Description of Artificial Sequence: Synthetic oligonucleotide
cauauccuuggcuacuaacaucugg

SEQ ID NO: 145654 - RNA, 25 nt, Artificial Sequence
  Description of Artificial Sequence: Synthetic oligonucleotide
uacuaacaucuggagacugugagcu

SEQ ID NO: 145655 - RNA, 25 nt, Artificial Sequence
  Description of Artificial Sequence: Synthetic oligonucleotide
cauaaguugugugcuuuuuauuaau

SEQ ID NO: 145656 - RNA, 25 nt, Artificial Sequence
  Description of Artificial Sequence: Synthetic oligonucleotide
gcaucauuuuggcucuucuuacauu

SEQ ID NO: 145657 - RNA, 25 nt, Artificial Sequence
  Description of Artificial Sequence: Synthetic oligonucleotide
gcucuucuuacauuuguaaaaaugu

SEQ ID NO: 145658 - RNA, 25 nt, Artificial Sequence
  Description of Artificial Sequence: Synthetic oligonucleotide
agauuaggucaucuuaauucauauu

SEQ ID NO: 145659 - RNA, 25 nt, Artificial Sequence
  Description of Artificial Sequence: Synthetic oligonucleotide
auggaauugaaagaacuaaucauga

SEQ ID NO: 145660 - RNA, 25 nt, Artificial Sequence
  Description of Artificial Sequence: Synthetic oligonucleotide
cacacucauuccuucugcucuuggg

SEQ ID NO: 145661 - RNA, 25 nt, Artificial Sequence
  Description of Artificial Sequence: Synthetic oligonucleotide
uguagagguaaccaguagcuuugag

SEQ ID NO: 145662 - RNA, 25 nt, Artificial Sequence
  Description of Artificial Sequence: Synthetic oligonucleotide
caaccacaugccacguaauauuuca

SEQ ID NO: 145663 - RNA, 25 nt, Artificial Sequence
  Description of Artificial Sequence: Synthetic oligonucleotide
ucggaaacaaguuauucucuucacu

SEQ ID NO: 145664 - RNA, 25 nt, Artificial Sequence
  Description of Artificial Sequence: Synthetic oligonucleotide
acucccaauaacuaaugcuaagaaa

SEQ ID NO: 145665 - RNA, 25 nt, Artificial Sequence
  Description of Artificial Sequence: Synthetic oligonucleotide
aaugcuaagaaaugcugaaaaucaa

SEQ ID NO: 145666 - RNA, 25 nt, Artificial Sequence
  Description of Artificial Sequence: Synthetic oligonucleotide
gucuuucucuaaauaugauuacuuu

SEQ ID NO: 145667 - RNA, 25 nt, Artificial Sequence
  Description of Artificial Sequence: Synthetic oligonucleotide
ugaauuucaggcauuuuguucuaca

SEQ ID NO: 145668 - RNA, 25 nt, Artificial Sequence
  Description of Artificial Sequence: Synthetic oligonucleotide
cgauucccucucacccgggacucuc

SEQ ID NO: 145669 - RNA, 25 nt, Artificial Sequence
  Description of Artificial Sequence: Synthetic oligonucleotide
aggaaagugaaccuuuaaaguaaag

SEQ ID NO: 145670 - RNA, 25 nt, Artificial Sequence
  Description of Artificial Sequence: Synthetic oligonucleotide
gaggcugcaugcucuggaagccugg

SEQ ID NO: 145671 - RNA, 25 nt, Artificial Sequence
  Description of Artificial Sequence: Synthetic oligonucleotide
ucucugaacagaaaacaaaagagag

SEQ ID NO: 145672 - RNA, 25 nt, Artificial Sequence
  Description of Artificial Sequence: Synthetic oligonucleotide
aacuuggcuguaaucaguuaugccg

SEQ ID NO: 145673 - RNA, 25 nt, Artificial Sequence
  Description of Artificial Sequence: Synthetic oligonucleotide
agaagccaaaauuaaaagaagucca

SEQ ID NO: 145674 - RNA, 25 nt, Artificial Sequence
  Description of Artificial Sequence: Synthetic oligonucleotide
auuaaaagaaguccaggugagguua

SEQ ID NO: 145675 - RNA, 25 nt, Artificial Sequence
  Description of Artificial Sequence: Synthetic oligonucleotide
gaauccggauuaucgggaagaggac

SEQ ID NO: 145676 - RNA, 25 nt, Artificial Sequence
  Description of Artificial Sequence: Synthetic oligonucleotide
aaugugacaucaaagcaaguauugu

SEQ ID NO: 145677 - RNA, 25 nt, Artificial Sequence
  Description of Artificial Sequence: Synthetic oligonucleotide
caucaaagcaaguauuguagcacuc

SEQ ID NO: 145678 - RNA, 25 nt, Artificial Sequence
  Description of Artificial Sequence: Synthetic oligonucleotide
agagagagaaaacaaaaccacaaau

SEQ ID NO: 145679 - RNA, 25 nt, Artificial Sequence
  Description of Artificial Sequence: Synthetic oligonucleotide
ucgcuguaguauuuaagcccauaca

SEQ ID NO: 145680 - RNA, 25 nt, Artificial Sequence
  Description of Artificial Sequence: Synthetic oligonucleotide
cgcuguaguauuuaagcccauacag

SEQ ID NO: 145681 - RNA, 25 nt, Artificial Sequence
  Description of Artificial Sequence: Synthetic oligonucleotide
auuuaagcccauacagaaaccuucc

SEQ ID NO: 145682 - RNA, 25 nt, Artificial Sequence
  Description of Artificial Sequence: Synthetic oligonucleotide
auuaaaauaaacaugguauaccuac

SEQ ID NO: 145683 - RNA, 25 nt, Artificial Sequence
  Description of Artificial Sequence: Synthetic oligonucleotide
cuguucugaucggccaguuuucgga

SEQ ID NO: 145684 - RNA, 25 nt, Artificial Sequence
  Description of Artificial Sequence: Synthetic oligonucleotide
aaauaauuugaacuuuggaacaggg

SEQ ID NO: 145685 - RNA, 25 nt, Artificial Sequence
  Description of Artificial Sequence: Synthetic oligonucleotide
ugcgaccuuaauuuaacuuuccagu

SEQ ID NO: 145686 - RNA, 25 nt, Artificial Sequence
  Description of Artificial Sequence: Synthetic oligonucleotide
cugagaaagcuaaaguuugguuuug

SEQ ID NO: 145687 - RNA, 25 nt, Artificial Sequence
  Description of Artificial Sequence: Synthetic oligonucleotide
aguaaagaugcuacuucccacugua

SEQ ID NO: 145688 - RNA, 25 nt, Artificial Sequence
  Description of Artificial Sequence: Synthetic oligonucleotide
cugcuuaauugcugauaccauauga

SEQ ID NO: 145689 - RNA, 25 nt, Artificial Sequence
  Description of Artificial Sequence: Synthetic oligonucleotide
uaccauaugaaugaaacaugggcug

SEQ ID NO: 145690 - RNA, 25 nt, Artificial Sequence
  Description of Artificial Sequence: Synthetic oligonucleotide
aacuuucuuauccaacuuuuucaua

SEQ ID NO: 145691 - RNA, 25 nt, Artificial Sequence
  Description of Artificial Sequence: Synthetic oligonucleotide
ccuugcaugacaucaugaggccgga

SEQ ID NO: 145692 - RNA, 25 nt, Artificial Sequence
  Description of Artificial Sequence: Synthetic oligonucleotide
ugaauuuguauaugacugcauuugu

SEQ ID NO: 145693 - RNA, 25 nt, Artificial Sequence
  Description of Artificial Sequence: Synthetic oligonucleotide
gaauccuaguagaauguuuacuacc

SEQ ID NO: 145694 - RNA, 25 nt, Artificial Sequence
  Description of Artificial Sequence: Synthetic oligonucleotide
gaaagggaagaauuuuuugaugaaa

SEQ ID NO: 145695 - RNA, 25 nt, Artificial Sequence
  Description of Artificial Sequence: Synthetic oligonucleotide
uaucggcaugccagugugugaauuu

SEQ ID NO: 145696 - RNA, 25 nt, Artificial Sequence
  Description of Artificial Sequence: Synthetic oligonucleotide
caccucauaguagagcaauguaugu

SEQ ID NO: 145697 - RNA, 25 nt, Artificial Sequence
  Description of Artificial Sequence: Synthetic oligonucleotide
ccagaauugccaaagcacauauaua

SEQ ID NO: 145698 - RNA, 25 nt, Artificial Sequence
  Description of Artificial Sequence: Synthetic oligonucleotide
uggugaucuggguaauaguuucucc

SEQ ID NO: 145699 - RNA, 25 nt, Artificial Sequence
  Description of Artificial Sequence: Synthetic oligonucleotide
gaucuggguaauaguuucuccaaau

SEQ ID NO: 145700 - RNA, 25 nt, Artificial Sequence
  Description of Artificial Sequence: Synthetic oligonucleotide
ggaugugaugaauacuuccuagaaa

SEQ ID NO: 145701 - RNA, 25 nt, Artificial Sequence
  Description of Artificial Sequence: Synthetic oligonucleotide
cauuuccacagcuacaccauauaug

SEQ ID NO: 145702 - RNA, 25 nt, Artificial Sequence
  Description of Artificial Sequence: Synthetic oligonucleotide
acagcuacaccauauaugaauggag

SEQ ID NO: 145703 - RNA, 25 nt, Artificial Sequence
  Description of Artificial Sequence: Synthetic oligonucleotide
ugcaguucuuacacgagaagaagau

SEQ ID NO: 145704 - RNA, 25 nt, Artificial Sequence
  Description of Artificial Sequence: Synthetic oligonucleotide
acgagaagaagaucauuuacaggga

SEQ ID NO: 145705 - RNA, 25 nt, Artificial Sequence
  Description of Artificial Sequence: Synthetic oligonucleotide
cgagaagaagaucauuuacagggac

SEQ ID NO: 145706 - RNA, 25 nt, Artificial Sequence
  Description of Artificial Sequence: Synthetic oligonucleotide
aagaagaucauuuacagggaccuga

SEQ ID NO: 145707 - RNA, 25 nt, Artificial Sequence
  Description of Artificial Sequence: Synthetic oligonucleotide
agaggaagagguguuugacugcauc

SEQ ID NO: 145708 - RNA, 25 nt, Artificial Sequence
  Description of Artificial Sequence: Synthetic oligonucleotide
gaggaagagguguuugacugcaucg

SEQ ID NO: 145709 - RNA, 25 nt, Artificial Sequence
  Description of Artificial Sequence: Synthetic oligonucleotide
cuacuuugagggcgaguucacaggg

SEQ ID NO: 145710 - RNA, 25 nt, Artificial Sequence
  Description of Artificial Sequence: Synthetic oligonucleotide
agggcaucuccuggcaccucugucc

SEQ ID NO: 145711 - RNA, 25 nt, Artificial Sequence
  Description of Artificial Sequence: Synthetic oligonucleotide
ggagugauaugguuugucuuuuuaa

SEQ ID NO: 145712 - RNA, 25 nt, Artificial Sequence
  Description of Artificial Sequence: Synthetic oligonucleotide
gagugauaugguuugucuuuuuaag

SEQ ID NO: 145713 - RNA, 25 nt, Artificial Sequence
  Description of Artificial Sequence: Synthetic oligonucleotide
ugcaguaaagauccuaaagguuguc

SEQ ID NO: 145714 - RNA, 25 nt, Artificial Sequence
  Description of Artificial Sequence: Synthetic oligonucleotide
aguaaagauccuaaagguugucgac

SEQ ID NO: 145715 - RNA, 25 nt, Artificial Sequence
  Description of Artificial Sequence: Synthetic oligonucleotide
ugacaaaggacaaccuggcaauugu

SEQ ID NO: 145716 - RNA, 25 nt, Artificial Sequence
  Description of Artificial Sequence: Synthetic oligonucleotide
gcaauugugacccaguggugcgagg

SEQ ID NO: 145717 - RNA, 25 nt, Artificial Sequence
  Description of Artificial Sequence: Synthetic oligonucleotide
aacaucauccauagagacaugaaau

SEQ ID NO: 145718 - RNA, 25 nt, Artificial Sequence
  Description of Artificial Sequence: Synthetic oligonucleotide
ugaaauccaacaauauauuucucca

SEQ ID NO: 145719 - RNA, 25 nt, Artificial Sequence
  Description of Artificial Sequence: Synthetic oligonucleotide
aacaauauauuucuccaugaaggcu

SEQ ID NO: 145720 - RNA, 25 nt, Artificial Sequence
  Description of Artificial Sequence: Synthetic oligonucleotide
aacaguaaagucacgcuggaguggu

SEQ ID NO: 145721 - RNA, 25 nt, Artificial Sequence
  Description of Artificial Sequence: Synthetic oligonucleotide
ugugaagaaaguaaaggaagagagg

SEQ ID NO: 145722 - RNA, 25 nt, Artificial Sequence
  Description of Artificial Sequence: Synthetic oligonucleotide
cuuccgagccauccuugcaucgggc

SEQ ID NO: 145723 - RNA, 25 nt, Artificial Sequence
  Description of Artificial Sequence: Synthetic oligonucleotide
aauggagguugaauauccuacugug

SEQ ID NO: 145724 - RNA, 25 nt, Artificial Sequence
  Description of Artificial Sequence: Synthetic oligonucleotide
ggagguugaauauccuacuguguaa

SEQ ID NO: 145725 - RNA, 25 nt, Artificial Sequence
  Description of Artificial Sequence: Synthetic oligonucleotide
auuuugaguuuucccuuguagugua

SEQ ID NO: 145726 - RNA, 25 nt, Artificial Sequence
  Description of Artificial Sequence: Synthetic oligonucleotide
uauccuguuuguucuuuguugauug

SEQ ID NO: 145727 - RNA, 25 nt, Artificial Sequence
  Description of Artificial Sequence: Synthetic oligonucleotide
ccuguuuguucuuuguugauugaaa

SEQ ID NO: 145728 - RNA, 25 nt, Artificial Sequence
  Description of Artificial Sequence: Synthetic oligonucleotide
cucuacagccuucuuuuucuuccau

SEQ ID NO: 145729 - RNA, 25 nt, Artificial Sequence
  Description of Artificial Sequence: Synthetic oligonucleotide
ucuuccauagcuaaucuuccuucua

SEQ ID NO: 145730 - RNA, 25 nt, Artificial Sequence
  Description of Artificial Sequence: Synthetic oligonucleotide
auaaucuuccuguugaaugcuucau

SEQ ID NO: 145731 - RNA, 25 nt, Artificial Sequence
  Description of Artificial Sequence: Synthetic oligonucleotide
uaaucuuccuguugaaugcuucaug

SEQ ID NO: 145732 - RNA, 25 nt, Artificial Sequence
  Description of Artificial Sequence: Synthetic oligonucleotide
cuucaugacuugaauucuacuuuga

SEQ ID NO: 145733 - RNA, 25 nt, Artificial Sequence
  Description of Artificial Sequence: Synthetic oligonucleotide
aagagggagagaagcaacuacagac

SEQ ID NO: 145734 - RNA, 25 nt, Artificial Sequence
  Description of Artificial Sequence: Synthetic oligonucleotide
cgucuccuaccagaccaaggucaac

SEQ ID NO: 145735 - RNA, 25 nt, Artificial Sequence
  Description of Artificial Sequence: Synthetic oligonucleotide
gaucaaucggcccgacuaucucgac

SEQ ID NO: 145736 - RNA, 25 nt, Artificial Sequence
  Description of Artificial Sequence: Synthetic oligonucleotide
ggacgaacauccaaccuucccaaac

SEQ ID NO: 145737 - RNA, 25 nt, Artificial Sequence
  Description of Artificial Sequence: Synthetic oligonucleotide
agggucggaacccaagcuuagaacu

SEQ ID NO: 145738 - RNA, 25 nt, Artificial Sequence
  Description of Artificial Sequence: Synthetic oligonucleotide
ucggaacccaagcuuagaacuuuaa

SEQ ID NO: 145739 - RNA, 25 nt, Artificial Sequence
  Description of Artificial Sequence: Synthetic oligonucleotide
acccaagcuuagaacuuuaagcaac

SEQ ID NO: 145740 - RNA, 25 nt, Artificial Sequence
  Description of Artificial Sequence: Synthetic oligonucleotide
gaacuuuaagcaacaagaccaccac

SEQ ID NO: 145741 - RNA, 25 nt, Artificial Sequence
  Description of Artificial Sequence: Synthetic oligonucleotide
acuauucaguggcgagaaauaaagu

SEQ ID NO: 145742 - RNA, 25 nt, Artificial Sequence
  Description of Artificial Sequence: Synthetic oligonucleotide
cuauucaguggcgagaaauaaaguu

SEQ ID NO: 145743 - RNA, 25 nt, Artificial Sequence
  Description of Artificial Sequence: Synthetic oligonucleotide
aaacacagauaacaggaaaugaucc

SEQ ID NO: 145744 - RNA, 25 nt, Artificial Sequence
  Description of Artificial Sequence: Synthetic oligonucleotide
cuuaagaaaagagaagaaaugaaac

SEQ ID NO: 145745 - RNA, 25 nt, Artificial Sequence
  Description of Artificial Sequence: Synthetic oligonucleotide
cugaaggaguguguuuccauccucc

SEQ ID NO: 145746 - RNA, 25 nt, Artificial Sequence
  Description of Artificial Sequence: Synthetic oligonucleotide
ucaccgcgggacugaaaaucuuuga

SEQ ID NO: 145747 - RNA, 25 nt, Artificial Sequence
  Description of Artificial Sequence: Synthetic oligonucleotide
agcagaaauaagcgugccguucagg

SEQ ID NO: 145748 - RNA, 25 nt, Artificial Sequence
  Description of Artificial Sequence: Synthetic oligonucleotide
aagcgugccguucaggguccagaag

SEQ ID NO: 145749 - RNA, 25 nt, Artificial Sequence
  Description of Artificial Sequence: Synthetic oligonucleotide
agaaacagucacucaagacugcuug

SEQ ID NO: 145750 - RNA, 25 nt, Artificial Sequence
  Description of Artificial Sequence: Synthetic oligonucleotide
agaggaagaagguccaugucuuugg

SEQ ID NO: 145751 - RNA, 25 nt, Artificial Sequence
  Description of Artificial Sequence: Synthetic oligonucleotide
uguauucaaaauaugccugaaacac

SEQ ID NO: 145752 - RNA, 25 nt, Artificial Sequence
  Description of Artificial Sequence: Synthetic oligonucleotide
auuuuccucccuuucucuguaccuc

SEQ ID NO: 145753 - RNA, 25 nt, Artificial Sequence
  Description of Artificial Sequence: Synthetic oligonucleotide
caaagaaagauagagcaagacaaga

SEQ ID NO: 145754 - RNA, 25 nt, Artificial Sequence
  Description of Artificial Sequence: Synthetic oligonucleotide
aagaaagauagagcaagacaagaaa

SEQ ID NO: 145755 - RNA, 25 nt, Artificial Sequence
  Description of Artificial Sequence: Synthetic oligonucleotide
gaaagcauuuguuuguacaagaucc

SEQ ID NO: 145756 - RNA, 25 nt, Artificial Sequence
  Description of Artificial Sequence: Synthetic oligonucleotide
ugaguuaaacgaacguacuugcaga

SEQ ID NO: 145757 - RNA, 25 nt, Artificial Sequence
  Description of Artificial Sequence: Synthetic oligonucleotide
acugauacagaacgaucgauacaga

SEQ ID NO: 145758 - RNA, 25 nt, Artificial Sequence
  Description of Artificial Sequence: Synthetic oligonucleotide
auauuauauauauauaaaaauaaau

SEQ ID NO: 145759 - RNA, 25 nt, Artificial Sequence
  Description of Artificial Sequence: Synthetic oligonucleotide
auuauauauauauaaaaauaaauau

SEQ ID NO: 145760 - RNA, 25 nt, Artificial Sequence
  Description of Artificial Sequence: Synthetic oligonucleotide
ucacuggauguauuugacugcugug

SEQ ID NO: 145761 - RNA, 25 nt, Artificial Sequence
  Description of Artificial Sequence: Synthetic oligonucleotide
cagggaagaggaggagaugagagac

SEQ ID NO: 145762 - RNA, 25 nt, Artificial Sequence
  Description of Artificial Sequence: Synthetic oligonucleotide
augaucuuuuuuuugucccacuugg

SEQ ID NO: 145763 - RNA, 27 nt, Artificial Sequence
  Description of Artificial Sequence: Synthetic oligonucleotide
ggccgugaacuccucaucaaaauaccu

SEQ ID NO: 145764 - RNA, 27 nt, Artificial Sequence
  Description of Artificial Sequence: Synthetic oligonucleotide
uggugugauggugaucaucugggccgu

SEQ ID NO: 145765 - RNA, 27 nt, Artificial Sequence
  Description of Artificial Sequence: Synthetic oligonucleotide
aaacccgcaggauaguuuucuucccua

SEQ ID NO: 145766 - RNA, 27 nt, Artificial Sequence
  Description of Artificial Sequence: Synthetic oligonucleotide
caaacuggaugaaauaaauuaaaaccc

SEQ ID NO: 145767 - RNA, 27 nt, Artificial Sequence
  Description of Artificial Sequence: Synthetic oligonucleotide
agaaguccuuaacauuucccuacguga

SEQ ID NO: 145768 - RNA, 27 nt, Artificial Sequence
  Description of Artificial Sequence: Synthetic oligonucleotide
cucugucccacuggguaaacccuggcc

SEQ ID NO: 145769 - RNA, 27 nt, Artificial Sequence
  Description of Artificial Sequence: Synthetic oligonucleotide
cacaauaacaaauuuaaaccuugcucc

SEQ ID NO: 145770 - RNA, 27 nt, Artificial Sequence
  Description of Artificial Sequence: Synthetic oligonucleotide
aaaugcauuugaacaacauaauacaca

SEQ ID NO: 145771 - RNA, 27 nt, Artificial Sequence
  Description of Artificial Sequence: Synthetic oligonucleotide
ggcuuuccugucacaaagauuaaaaac

SEQ ID NO: 145772 - RNA, 27 nt, Artificial Sequence
  Description of Artificial Sequence: Synthetic oligonucleotide
agggcuuuccugucacaaagauuaaaa

SEQ ID NO: 145773 - RNA, 27 nt, Artificial Sequence
  Description of Artificial Sequence: Synthetic oligonucleotide
ggccaugcugggagacauaagcagcag

SEQ ID NO: 145774 - RNA, 27 nt, Artificial Sequence
  Description of Artificial Sequence: Synthetic oligonucleotide
ucagggagaagcuucugaaacacuucu

SEQ ID NO: 145775 - RNA, 27 nt, Artificial Sequence
  Description of Artificial Sequence: Synthetic oligonucleotide
aagggcuucuuccuuauugauggucag

SEQ ID NO: 145776 - RNA, 27 nt, Artificial Sequence
  Description of Artificial Sequence: Synthetic oligonucleotide
ugaagggcuucuuccuuauugaugguc

SEQ ID NO: 145777 - RNA, 27 nt, Artificial Sequence
  Description of Artificial Sequence: Synthetic oligonucleotide
cgcugaagggcuucuuccuuauugaug

SEQ ID NO: 145778 - RNA, 27 nt, Artificial Sequence
  Description of Artificial Sequence: Synthetic oligonucleotide
gccgcugaagggcuucuuccuuauuga

SEQ ID NO: 145779 - RNA, 27 nt, Artificial Sequence
  Description of Artificial Sequence: Synthetic oligonucleotide
acuggccgcugaagggcuucuuccuua

SEQ ID NO: 145780 - RNA, 27 nt, Artificial Sequence
  Description of Artificial Sequence: Synthetic oligonucleotide
cggagcuuuucaccuuuaguuaugcuu

SEQ ID NO: 145781 - RNA, 27 nt, Artificial Sequence
  Description of Artificial Sequence: Synthetic oligonucleotide
ccggagcuuuucaccuuuaguuaugcu

SEQ ID NO: 145782 - RNA, 27 nt, Artificial Sequence
  Description of Artificial Sequence: Synthetic oligonucleotide
cagacuguugacuggcgugauguaguu

SEQ ID NO: 145783 - RNA, 27 nt, Artificial Sequence
  Description of Artificial Sequence: Synthetic oligonucleotide
cuuuugaacucugcuuaaauccagugg

SEQ ID NO: 145784 - RNA, 27 nt, Artificial Sequence
  Description of Artificial Sequence: Synthetic oligonucleotide
gcuuuugaacucugcuuaaauccagug

SEQ ID NO: 145785 - RNA, 27 nt, Artificial Sequence
  Description of Artificial Sequence: Synthetic oligonucleotide
agggcuuuugaacucugcuuaaaucca

SEQ ID NO: 145786 - RNA, 27 nt, Artificial Sequence
  Description of Artificial Sequence: Synthetic oligonucleotide
aagggcuuuugaacucugcuuaaaucc

SEQ ID NO: 145787 - RNA, 27 nt, Artificial Sequence
  Description of Artificial Sequence: Synthetic oligonucleotide
ugaagggcuuuugaacucugcuuaaau

SEQ ID NO: 145788 - RNA, 27 nt, Artificial Sequence
  Description of Artificial Sequence: Synthetic oligonucleotide
cugaagggcuuuugaacucugcuuaaa

SEQ ID NO: 145789 - RNA, 27 nt, Artificial Sequence
  Description of Artificial Sequence: Synthetic oligonucleotide
cgcugaagggcuuuugaacucugcuua

SEQ ID NO: 145790 - RNA, 27 nt, Artificial Sequence
  Description of Artificial Sequence: Synthetic oligonucleotide
cgagcggcuucacucagacccugaggc

SEQ ID NO: 145791 - RNA, 27 nt, Artificial Sequence
  Description of Artificial Sequence: Synthetic oligonucleotide
uugacuggcgugauguaguugcuuggg

SEQ ID NO: 145792 - RNA, 27 nt, Artificial Sequence
  Description of Artificial Sequence: Synthetic oligonucleotide
cacgcaccaagaagcugccauugaucc

SEQ ID NO: 145793 - RNA, 27 nt, Artificial Sequence
  Description of Artificial Sequence: Synthetic oligonucleotide
cugaugaauccaaugugggcuggaauc

SEQ ID NO: 145794 - RNA, 27 nt, Artificial Sequence
  Description of Artificial Sequence: Synthetic oligonucleotide
cuuagguauuccacauucucagcugug

SEQ ID NO: 145795 - RNA, 27 nt, Artificial Sequence
  Description of Artificial Sequence: Synthetic oligonucleotide
ugagccucaaauuaggagauacguuuu

SEQ ID NO: 145796 - RNA, 27 nt, Artificial Sequence
  Description of Artificial Sequence: Synthetic oligonucleotide
ccaauuguagagaaauuauuuuaggaa

SEQ ID NO: 145797 - RNA, 27 nt, Artificial Sequence
  Description of Artificial Sequence: Synthetic oligonucleotide
ggcuccuaacuagcugaaucuuccaau

SEQ ID NO: 145798 - RNA, 27 nt, Artificial Sequence
  Description of Artificial Sequence: Synthetic oligonucleotide
guggauauugacuaggagaguuuaaaa

SEQ ID NO: 145799 - RNA, 27 nt, Artificial Sequence
  Description of Artificial Sequence: Synthetic oligonucleotide
ugugacugaacauaacuguaggcugaa

SEQ ID NO: 145800 - RNA, 27 nt, Artificial Sequence
  Description of Artificial Sequence: Synthetic oligonucleotide
guaugugugugugacugaacauaacug

SEQ ID NO: 145801 - RNA, 27 nt, Artificial Sequence
  Description of Artificial Sequence: Synthetic oligonucleotide
aagcaaaaggaacauuuuguaugugug

SEQ ID NO: 145802 - RNA, 27 nt, Artificial Sequence
  Description of Artificial Sequence: Synthetic oligonucleotide
aaaaauuacuuuaaaagcaaaaggaac

SEQ ID NO: 145803 - RNA, 27 nt, Artificial Sequence
  Description of Artificial Sequence: Synthetic oligonucleotide
ccauugacuguugcuucacaggucaga

SEQ ID NO: 145804 - RNA, 27 nt, Artificial Sequence
  Description of Artificial Sequence: Synthetic oligonucleotide
auugguuugucgaugugugagauaguu

SEQ ID NO: 145805 - RNA, 27 nt, Artificial Sequence
  Description of Artificial Sequence: Synthetic oligonucleotide
agugguagcaguacaauugaggacaag

SEQ ID NO: 145806 - RNA, 27 nt, Artificial Sequence
  Description of Artificial Sequence: Synthetic oligonucleotide
uaagaccgcuugccagcuacgguuuca

SEQ ID NO: 145807 - RNA, 27 nt, Artificial Sequence
  Description of Artificial Sequence: Synthetic oligonucleotide
agccgguaagaccgcuugccagcuacg

SEQ ID NO: 145808 - RNA, 27 nt, Artificial Sequence
  Description of Artificial Sequence: Synthetic oligonucleotide
gguaacccaucuuuuaaccauacaacu

SEQ ID NO: 145809 - RNA, 27 nt, Artificial Sequence
  Description of Artificial Sequence: Synthetic oligonucleotide
ucgcagguaacccaucuuuuaaccaua

SEQ ID NO: 145810 - RNA, 27 nt, Artificial Sequence
  Description of Artificial Sequence: Synthetic oligonucleotide
cucagcaagauuguauaauucccugca

SEQ ID NO: 145811 - RNA, 27 nt, Artificial Sequence
  Description of Artificial Sequence: Synthetic oligonucleotide
acuguuuuaugcucagcaagauuguau

SEQ ID NO: 145812 - RNA, 27 nt, Artificial Sequence
  Description of Artificial Sequence: Synthetic oligonucleotide
aggauaaaggacucuucauuauuggaa

SEQ ID NO: 145813 - RNA, 27 nt, Artificial Sequence
  Description of Artificial Sequence: Synthetic oligonucleotide
caacuugcguuggaacauccaaagugu

SEQ ID NO: 145814 - RNA, 27 nt, Artificial Sequence
  Description of Artificial Sequence: Synthetic oligonucleotide
augguuucaguuuaguggaagcauuua

SEQ ID NO: 145815 - RNA, 27 nt, Artificial Sequence
  Description of Artificial Sequence: Synthetic oligonucleotide
auauuuaacaaagucaaacuuucucac

SEQ ID NO: 145816 - RNA, 27 nt, Artificial Sequence
  Description of Artificial Sequence: Synthetic oligonucleotide
aacuuuuaauauacaguaguucuuuuc

SEQ ID NO: 145817 - RNA, 27 nt, Artificial Sequence
  Description of Artificial Sequence: Synthetic oligonucleotide
guuaagucaaaacccguauuucuaaag

SEQ ID NO: 145818 - RNA, 27 nt, Artificial Sequence
  Description of Artificial Sequence: Synthetic oligonucleotide
gugcugaguuugcuguacccauguuga

SEQ ID NO: 145819 - RNA, 27 nt, Artificial Sequence
  Description of Artificial Sequence: Synthetic oligonucleotide
ugaggucagcaucuucugugucuuuac

SEQ ID NO: 145820 - RNA, 27 nt, Artificial Sequence
  Description of Artificial Sequence: Synthetic oligonucleotide
gcgaucugaauaaaccucccuacuagc

SEQ ID NO: 145821 - RNA, 27 nt, Artificial Sequence
  Description of Artificial Sequence: Synthetic oligonucleotide
aucccagaacccugcugcagaaggcca

SEQ ID NO: 145822 - RNA, 27 nt, Artificial Sequence
  Description of Artificial Sequence: Synthetic oligonucleotide
cauaauuuccaauauguaccagaccuu

SEQ ID NO: 145823 - RNA, 27 nt, Artificial Sequence
  Description of Artificial Sequence: Synthetic oligonucleotide
cuagugcuuccaucggaaggacuaggu

SEQ ID NO: 145824 - RNA, 27 nt, Artificial Sequence
  Description of Artificial Sequence: Synthetic oligonucleotide
uccacauaaaaacaauauucacuggga

SEQ ID NO: 145825 - RNA, 27 nt, Artificial Sequence
  Description of Artificial Sequence: Synthetic oligonucleotide
ucuaccaauuccaacuugaauucauug

SEQ ID NO: 145826 - RNA, 27 nt, Artificial Sequence
  Description of Artificial Sequence: Synthetic oligonucleotide
ucuccaagucuaaaucuguguccugag

SEQ ID NO: 145827 - RNA, 27 nt, Artificial Sequence
  Description of Artificial Sequence: Synthetic oligonucleotide
uggaauacuguaacugugcuuugagga

SEQ ID NO: 145828 - RNA, 27 nt, Artificial Sequence
  Description of Artificial Sequence: Synthetic oligonucleotide
uuaauucaucagugguggcagugguag

SEQ ID NO: 145829 - RNA, 27 nt, Artificial Sequence
  Description of Artificial Sequence: Synthetic oligonucleotide
gugaugauguggcacuaguaguuucuu

SEQ ID NO: 145830 - RNA, 27 nt, Artificial Sequence
  Description of Artificial Sequence: Synthetic oligonucleotide
ucuguuuggugaggcuguccgacuuug

SEQ ID NO: 145831 - RNA, 27 nt, Artificial Sequence
  Description of Artificial Sequence: Synthetic oligonucleotide
ccaucauguuccauuuuucgcuuucuc

SEQ ID NO: 145832 - RNA, 27 nt, Artificial Sequence
  Description of Artificial Sequence: Synthetic oligonucleotide
gcagucuacaugcuaaaucagagggua

SEQ ID NO: 145833 - RNA, 27 nt, Artificial Sequence
  Description of Artificial Sequence: Synthetic oligonucleotide
cauaaauagauccuuaaauagcucaaa

SEQ ID NO: 145834 - RNA, 27 nt, Artificial Sequence
  Description of Artificial Sequence: Synthetic oligonucleotide
ugauaauagugcuuuuucaccuuuuuc

SEQ ID NO: 145835 - RNA, 27 nt, Artificial Sequence
  Description of Artificial Sequence: Synthetic oligonucleotide
gcagaacugauaauagugcuuuuucac

SEQ ID NO: 145836 - RNA, 27 nt, Artificial Sequence
  Description of Artificial Sequence: Synthetic oligonucleotide
guagguuuaaucuuucuuuucagccau

SEQ ID NO: 145837 - RNA, 27 nt, Artificial Sequence
  Description of Artificial Sequence: Synthetic oligonucleotide
agaaggauuuuauuauaaggguuuaau

SEQ ID NO: 145838 - RNA, 27 nt, Artificial Sequence
  Description of Artificial Sequence: Synthetic oligonucleotide
gucuacagcauuggcuaauaguaugaa

SEQ ID NO: 145839 - RNA, 27 nt, Artificial Sequence
  Description of Artificial Sequence: Synthetic oligonucleotide
cuauuccuaucaaaaugcuucugucua

SEQ ID NO: 145840 - RNA, 27 nt, Artificial Sequence
  Description of Artificial Sequence: Synthetic oligonucleotide
ucagggccauuaucuuauuugcucuau

SEQ ID NO: 145841 - RNA, 27 nt, Artificial Sequence
  Description of Artificial Sequence: Synthetic oligonucleotide
ugcuugaggaagagaaaaauguugguc

SEQ ID NO: 145842 - RNA, 27 nt, Artificial Sequence
  Description of Artificial Sequence: Synthetic oligonucleotide
ugggcugaacuuuucucauacuuaaag

SEQ ID NO: 145843 - RNA, 27 nt, Artificial Sequence
  Description of Artificial Sequence: Synthetic oligonucleotide
gguucagcagccaucuuuauuccugcg

SEQ ID NO: 145844 - RNA, 27 nt, Artificial Sequence
  Description of Artificial Sequence: Synthetic oligonucleotide
ugaagagaacuuggucauucaaauuuc

SEQ ID NO: 145845 - RNA, 27 nt, Artificial Sequence
  Description of Artificial Sequence: Synthetic oligonucleotide
cucuaggcuggcuaucuuuauacauac

SEQ ID NO: 145846 - RNA, 27 nt, Artificial Sequence
  Description of Artificial Sequence: Synthetic oligonucleotide
acacuucacagagauaguuacagccau

SEQ ID NO: 145847 - RNA, 27 nt, Artificial Sequence
  Description of Artificial Sequence: Synthetic oligonucleotide
uugaaauuuucucacacuucacagaga

SEQ ID NO: 145848 - RNA, 27 nt, Artificial Sequence
  Description of Artificial Sequence: Synthetic oligonucleotide
ucaggaggauucauuuccuuaaaggaa

SEQ ID NO: 145849 - RNA, 27 nt, Artificial Sequence
  Description of Artificial Sequence: Synthetic oligonucleotide
auaugaugucacuuuuuguauccuuga

SEQ ID NO: 145850 - RNA, 27 nt, Artificial Sequence
  Description of Artificial Sequence: Synthetic oligonucleotide
uaugaugaagauucaaauugcaucuua

SEQ ID NO: 145851 - RNA, 27 nt, Artificial Sequence
  Description of Artificial Sequence: Synthetic oligonucleotide
uuaauagcuagucuucguuuugaacag

SEQ ID NO: 145852 - RNA, 27 nt, Artificial Sequence
  Description of Artificial Sequence: Synthetic oligonucleotide
auuuuuaguagagaugagguuucacca

SEQ ID NO: 145853 - RNA, 27 nt, Artificial Sequence
  Description of Artificial Sequence: Synthetic oligonucleotide
aggcgagauagagcuucucuuucguuc

SEQ ID NO: 145854 - RNA, 27 nt, Artificial Sequence
  Description of Artificial Sequence: Synthetic oligonucleotide
aacuggaccgaaggcgcuuguggagaa

SEQ ID NO: 145855 - RNA, 27 nt, Artificial Sequence
  Description of Artificial Sequence: Synthetic oligonucleotide
gcggcuacaucuuuggaaucuucuccu

SEQ ID NO: 145856 - RNA, 27 nt, Artificial Sequence
  Description of Artificial Sequence: Synthetic oligonucleotide
caagucuccucauugaauccagauugg

SEQ ID NO: 145857 - RNA, 27 nt, Artificial Sequence
  Description of Artificial Sequence: Synthetic oligonucleotide
uccucacuacucucaaaucuguucugg

SEQ ID NO: 145858 - RNA, 27 nt, Artificial Sequence
  Description of Artificial Sequence: Synthetic oligonucleotide
uuuguacucaucugcacagcucuggcu

SEQ ID NO: 145859 - RNA, 27 nt, Artificial Sequence
  Description of Artificial Sequence: Synthetic oligonucleotide
gcccauuaacaacaacaaucugaggug

SEQ ID NO: 145860 - RNA, 27 nt, Artificial Sequence
  Description of Artificial Sequence: Synthetic oligonucleotide
aauaaauuaaaaauaauuaaaauagug

SEQ ID NO: 145861 - RNA, 27 nt, Artificial Sequence
  Description of Artificial Sequence: Synthetic oligonucleotide
cauauuuaaauauuaauaaauuaaaaa

SEQ ID NO: 145862 - RNA, 27 nt, Artificial Sequence
  Description of Artificial Sequence: Synthetic oligonucleotide
gaaacaaaggauauucaaacugcauag

SEQ ID NO: 145863 - RNA, 27 nt, Artificial Sequence
  Description of Artificial Sequence: Synthetic oligonucleotide
caaacacuuagacgccagcagcauggg

SEQ ID NO: 145864 - RNA, 27 nt, Artificial Sequence
  Description of Artificial Sequence: Synthetic oligonucleotide
uuugucacaggugaaaugcacaucuga

SEQ ID NO: 145865 - RNA, 27 nt, Artificial Sequence
  Description of Artificial Sequence: Synthetic oligonucleotide
uaauucagccuggcacagguuuugauc

SEQ ID NO: 145866 - RNA, 27 nt, Artificial Sequence
  Description of Artificial Sequence: Synthetic oligonucleotide
auuguaagaaugacuacccacauucac

SEQ ID NO: 145867 - RNA, 27 nt, Artificial Sequence
  Description of Artificial Sequence: Synthetic oligonucleotide
caauuguaagaaugacuacccacauuc

SEQ ID NO: 145868 - RNA, 27 nt, Artificial Sequence
  Description of Artificial Sequence: Synthetic oligonucleotide
guacacucucugaugcucauuuucaua

SEQ ID NO: 145869 - RNA, 27 nt, Artificial Sequence
  Description of Artificial Sequence: Synthetic oligonucleotide
cugcugaguucuacaugaaaagcaaau

SEQ ID NO: 145870 - RNA, 27 nt, Artificial Sequence
  Description of Artificial Sequence: Synthetic oligonucleotide
uacugaaaauaaauauagaaauacaac

SEQ ID NO: 145871 - RNA, 27 nt, Artificial Sequence
  Description of Artificial Sequence: Synthetic oligonucleotide
uuccauuuaagaaacauuaaucaaaac

SEQ ID NO: 145872 - RNA, 27 nt, Artificial Sequence
  Description of Artificial Sequence: Synthetic oligonucleotide
acaauuuuaggcacuauacacguuguu

SEQ ID NO: 145873 - RNA, 27 nt, Artificial Sequence
  Description of Artificial Sequence: Synthetic oligonucleotide
ccagauguuaguagccaaggauauggu

SEQ ID NO: 145874 - RNA, 27 nt, Artificial Sequence
  Description of Artificial Sequence: Synthetic oligonucleotide
agcucacagucuccagauguuaguagc

SEQ ID NO: 145875 - RNA, 27 nt, Artificial Sequence
  Description of Artificial Sequence: Synthetic oligonucleotide
auuaauaaaaagcacacaacuuauggc

SEQ ID NO: 145876 - RNA, 27 nt, Artificial Sequence
  Description of Artificial Sequence: Synthetic oligonucleotide
aauguaagaagagccaaaaugaugcau

SEQ ID NO: 145877 - RNA, 27 nt, Artificial Sequence
  Description of Artificial Sequence: Synthetic oligonucleotide
acauuuuuacaaauguaagaagagcca

SEQ ID NO: 145878 - RNA, 27 nt, Artificial Sequence
  Description of Artificial Sequence: Synthetic oligonucleotide
aauaugaauuaagaugaccuaaucugu

SEQ ID NO: 145879 - RNA, 27 nt, Artificial Sequence
  Description of Artificial Sequence: Synthetic oligonucleotide
ucaugauuaguucuuucaauuccaucc

SEQ ID NO: 145880 - RNA, 27 nt, Artificial Sequence
  Description of Artificial Sequence: Synthetic oligonucleotide
cccaagagcagaaggaaugagugugca

SEQ ID NO: 145881 - RNA, 27 nt, Artificial Sequence
  Description of Artificial Sequence: Synthetic oligonucleotide
cucaaagcuacugguuaccucuacacc

SEQ ID NO: 145882 - RNA, 27 nt, Artificial Sequence
  Description of Artificial Sequence: Synthetic oligonucleotide
ugaaauauuacguggcaugugguuggg

SEQ ID NO: 145883 - RNA, 27 nt, Artificial Sequence
  Description of Artificial Sequence: Synthetic oligonucleotide
agugaagagaauaacuuguuuccgaag

SEQ ID NO: 145884 - RNA, 27 nt, Artificial Sequence
  Description of Artificial Sequence: Synthetic oligonucleotide
uuucuuagcauuaguuauugggaguga

SEQ ID NO: 145885 - RNA, 27 nt, Artificial Sequence
  Description of Artificial Sequence: Synthetic oligonucleotide
uugauuuucagcauuucuuagcauuag

SEQ ID NO: 145886 - RNA, 27 nt, Artificial Sequence
  Description of Artificial Sequence: Synthetic oligonucleotide
aaaguaaucauauuuagagaaagacag

SEQ ID NO: 145887 - RNA, 27 nt, Artificial Sequence
  Description of Artificial Sequence: Synthetic oligonucleotide
uguagaacaaaaugccugaaauucagc

SEQ ID NO: 145888 - RNA, 27 nt, Artificial Sequence
  Description of Artificial Sequence: Synthetic oligonucleotide
gagagucccgggugagagggaaucgcc

SEQ ID NO: 145889 - RNA, 27 nt, Artificial Sequence
  Description of Artificial Sequence: Synthetic oligonucleotide
cuuuacuuuaaagguucacuuuccuug

SEQ ID NO: 145890 - RNA, 27 nt, Artificial Sequence
  Description of Artificial Sequence: Synthetic oligonucleotide
ccaggcuuccagagcaugcagccuccu

SEQ ID NO: 145891 - RNA, 27 nt, Artificial Sequence
  Description of Artificial Sequence: Synthetic oligonucleotide
cucucuuuuguuuucuguucagagaaa

SEQ ID NO: 145892 - RNA, 27 nt, Artificial Sequence
  Description of Artificial Sequence: Synthetic oligonucleotide
cggcauaacugauuacagccaaguuca

SEQ ID NO: 145893 - RNA, 27 nt, Artificial Sequence
  Description of Artificial Sequence: Synthetic oligonucleotide
uggacuucuuuuaauuuuggcuucuuc

SEQ ID NO: 145894 - RNA, 27 nt, Artificial Sequence
  Description of Artificial Sequence: Synthetic oligonucleotide
uaaccucaccuggacuucuuuuaauuu

SEQ ID NO: 145895 - RNA, 27 nt, Artificial Sequence
  Description of Artificial Sequence: Synthetic oligonucleotide
guccucuucccgauaauccggauucag

SEQ ID NO: 145896 - RNA, 27 nt, Artificial Sequence
  Description of Artificial Sequence: Synthetic oligonucleotide
acaauacuugcuuugaugucacauuaa

SEQ ID NO: 145897 - RNA, 27 nt, Artificial Sequence
  Description of Artificial Sequence: Synthetic oligonucleotide
gagugcuacaauacuugcuuugauguc

SEQ ID NO: 145898 - RNA, 27 nt, Artificial Sequence
  Description of Artificial Sequence: Synthetic oligonucleotide
auuugugguuuuguuuucucucucucu

SEQ ID NO: 145899 - RNA, 27 nt, Artificial Sequence
  Description of Artificial Sequence: Synthetic oligonucleotide
uguaugggcuuaaauacuacagcgagg

SEQ ID NO: 145900 - RNA, 27 nt, Artificial Sequence
  Description of Artificial Sequence: Synthetic oligonucleotide
cuguaugggcuuaaauacuacagcgag

SEQ ID NO: 145901 - RNA, 27 nt, Artificial Sequence
  Description of Artificial Sequence: Synthetic oligonucleotide
ggaagguuucuguaugggcuuaaauac

SEQ ID NO: 145902 - RNA, 27 nt, Artificial Sequence
  Description of Artificial Sequence: Synthetic oligonucleotide
guagguauaccauguuuauuuuaauac

SEQ ID NO: 145903 - RNA, 27 nt, Artificial Sequence
  Description of Artificial Sequence: Synthetic oligonucleotide
uccgaaaacuggccgaucagaacagcc

SEQ ID NO: 145904 - RNA, 27 nt, Artificial Sequence
  Description of Artificial Sequence: Synthetic oligonucleotide
cccuguuccaaaguucaaauuauuugu

SEQ ID NO: 145905 - RNA, 27 nt, Artificial Sequence
  Description of Artificial Sequence: Synthetic oligonucleotide
acuggaaaguuaaauuaaggucgcaau

SEQ ID NO: 145906 - RNA, 27 nt, Artificial Sequence
  Description of Artificial Sequence: Synthetic oligonucleotide
caaaaccaaacuuuagcuuucucagcc

SEQ ID NO: 145907 - RNA, 27 nt, Artificial Sequence
  Description of Artificial Sequence: Synthetic oligonucleotide
uacagugggaaguagcaucuuuacuuu

SEQ ID NO: 145908 - RNA, 27 nt, Artificial Sequence
  Description of Artificial Sequence: Synthetic oligonucleotide
ucauaugguaucagcaauuaagcagua

SEQ ID NO: 145909 - RNA, 27 nt, Artificial Sequence
  Description of Artificial Sequence: Synthetic oligonucleotide
cagcccauguuucauucauaugguauc

SEQ ID NO: 145910 - RNA, 27 nt, Artificial Sequence
  Description of Artificial Sequence: Synthetic oligonucleotide
uaugaaaaaguuggauaagaaaguugg

SEQ ID NO: 145911 - RNA, 27 nt, Artificial Sequence
  Description of Artificial Sequence: Synthetic oligonucleotide
uccggccucaugaugucaugcaaggcu

SEQ ID NO: 145912 - RNA, 27 nt, Artificial Sequence
  Description of Artificial Sequence: Synthetic oligonucleotide
acaaaugcagucauauacaaauucagg

SEQ ID NO: 145913 - RNA, 27 nt, Artificial Sequence
  Description of Artificial Sequence: Synthetic oligonucleotide
gguaguaaacauucuacuaggauucuu

SEQ ID NO: 145914 - RNA, 27 nt, Artificial Sequence
  Description of Artificial Sequence: Synthetic oligonucleotide
uuucaucaaaaaauucuucccuuucug

SEQ ID NO: 145915 - RNA, 27 nt, Artificial Sequence
  Description of Artificial Sequence: Synthetic oligonucleotide
aaauucacacacuggcaugccgauagc

SEQ ID NO: 145916 - RNA, 27 nt, Artificial Sequence
  Description of Artificial Sequence: Synthetic oligonucleotide
acauacauugcucuacuaugaggugaa

SEQ ID NO: 145917 - RNA, 27 nt, Artificial Sequence
  Description of Artificial Sequence: Synthetic oligonucleotide
uauauaugugcuuuggcaauucuggug

SEQ ID NO: 145918 - RNA, 27 nt, Artificial Sequence
  Description of Artificial Sequence: Synthetic oligonucleotide
ggagaaacuauuacccagaucaccacu

SEQ ID NO: 145919 - RNA, 27 nt, Artificial Sequence
  Description of Artificial Sequence: Synthetic oligonucleotide
auuuggagaaacuauuacccagaucac

SEQ ID NO: 145920 - RNA, 27 nt, Artificial Sequence
  Description of Artificial Sequence: Synthetic oligonucleotide
uuucuaggaaguauucaucacauccac

SEQ ID NO: 145921 - RNA, 27 nt, Artificial Sequence
  Description of Artificial Sequence: Synthetic oligonucleotide
cauauaugguguagcuguggaaaugcg

SEQ ID NO: 145922 - RNA, 27 nt, Artificial Sequence
  Description of Artificial Sequence: Synthetic oligonucleotide
cuccauucauauaugguguagcugugg

SEQ ID NO: 145923 - RNA, 27 nt, Artificial Sequence
  Description of Artificial Sequence: Synthetic oligonucleotide
aucuucuucucguguaagaacugcagc

SEQ ID NO: 145924 - RNA, 27 nt, Artificial Sequence
  Description of Artificial Sequence: Synthetic oligonucleotide
ucccuguaaaugaucuucuucucgugu

SEQ ID NO: 145925 - RNA, 27 nt, Artificial Sequence
  Description of Artificial Sequence: Synthetic oligonucleotide
gucccuguaaaugaucuucuucucgug

SEQ ID NO: 145926 - RNA, 27 nt, Artificial Sequence
  Description of Artificial Sequence: Synthetic oligonucleotide
ucaggucccuguaaaugaucuucuucu

SEQ ID NO: 145927 - RNA, 27 nt, Artificial Sequence
  Description of Artificial Sequence: Synthetic oligonucleotide
gaugcagucaaacaccucuuccucugu

SEQ ID NO: 145928 - RNA, 27 nt, Artificial Sequence
  Description of Artificial Sequence: Synthetic oligonucleotide
cgaugcagucaaacaccucuuccucug

SEQ ID NO: 145929 - RNA, 27 nt, Artificial Sequence
  Description of Artificial Sequence: Synthetic oligonucleotide
cccugugaacucgcccucaaaguagcg

SEQ ID NO: 145930 - RNA, 27 nt, Artificial Sequence
  Description of Artificial Sequence: Synthetic oligonucleotide
ggacagaggugccaggagaugcccuca

SEQ ID NO: 145931 - RNA, 27 nt, Artificial Sequence
  Description of Artificial Sequence: Synthetic oligonucleotide
uuaaaaagacaaaccauaucacuccuu

SEQ ID NO: 145932 - RNA, 27 nt, Artificial Sequence
  Description of Artificial Sequence: Synthetic oligonucleotide
cuuaaaaagacaaaccauaucacuccu

SEQ ID NO: 145933 - RNA, 27 nt, Artificial Sequence
  Description of Artificial Sequence: Synthetic oligonucleotide
gacaaccuuuaggaucuuuacugcaac

SEQ ID NO: 145934 - RNA, 27 nt, Artificial Sequence
  Description of Artificial Sequence: Synthetic oligonucleotide
gucgacaaccuuuaggaucuuuacugc

SEQ ID NO: 145935 - RNA, 27 nt, Artificial Sequence
  Description of Artificial Sequence: Synthetic oligonucleotide
acaauugccagguuguccuuugucaug

SEQ ID NO: 145936 - RNA, 27 nt, Artificial Sequence
  Description of Artificial Sequence: Synthetic oligonucleotide
ccucgcaccacugggucacaauugcca

SEQ ID NO: 145937 - RNA, 27 nt, Artificial Sequence
  Description of Artificial Sequence: Synthetic oligonucleotide
auuucaugucucuauggaugauguucu

SEQ ID NO: 145938 - RNA, 27 nt, Artificial Sequence
  Description of Artificial Sequence: Synthetic oligonucleotide
uggagaaauauauuguuggauuucaug

SEQ ID NO: 145939 - RNA, 27 nt, Artificial Sequence
  Description of Artificial Sequence: Synthetic oligonucleotide
agccuucauggagaaauauauuguugg

SEQ ID NO: 145940 - RNA, 27 nt, Artificial Sequence
  Description of Artificial Sequence: Synthetic oligonucleotide
accacuccagcgugacuuuacuguugc

SEQ ID NO: 145941 - RNA, 27 nt, Artificial Sequence
  Description of Artificial Sequence: Synthetic oligonucleotide
ccucucuuccuuuacuuucuucacaca

SEQ ID NO: 145942 - RNA, 27 nt, Artificial Sequence
  Description of Artificial Sequence: Synthetic oligonucleotide
gcccgaugcaaggauggcucggaagcg

SEQ ID NO: 145943 - RNA, 27 nt, Artificial Sequence
  Description of Artificial Sequence: Synthetic oligonucleotide
cacaguaggauauucaaccuccauuuc

SEQ ID NO: 145944 - RNA, 27 nt, Artificial Sequence
  Description of Artificial Sequence: Synthetic oligonucleotide
uuacacaguaggauauucaaccuccau

SEQ ID NO: 145945 - RNA, 27 nt, Artificial Sequence
  Description of Artificial Sequence: Synthetic oligonucleotide
uacacuacaagggaaaacucaaaaucu

SEQ ID NO: 145946 - RNA, 27 nt, Artificial Sequence
  Description of Artificial Sequence: Synthetic oligonucleotide
caaucaacaaagaacaaacaggauaaa

SEQ ID NO: 145947 - RNA, 27 nt, Artificial Sequence
  Description of Artificial Sequence: Synthetic oligonucleotide
uuucaaucaacaaagaacaaacaggau

SEQ ID NO: 145948 - RNA, 27 nt, Artificial Sequence
  Description of Artificial Sequence: Synthetic oligonucleotide
auggaagaaaaagaaggcuguagagaa

SEQ ID NO: 145949 - RNA, 27 nt, Artificial Sequence
  Description of Artificial Sequence: Synthetic oligonucleotide
uagaaggaagauuagcuauggaagaaa

SEQ ID NO: 145950 - RNA, 27 nt, Artificial Sequence
  Description of Artificial Sequence: Synthetic oligonucleotide
augaagcauucaacaggaagauuauuu

SEQ ID NO: 145951 - RNA, 27 nt, Artificial Sequence
  Description of Artificial Sequence: Synthetic oligonucleotide
caugaagcauucaacaggaagauuauu

SEQ ID NO: 145952 - RNA, 27 nt, Artificial Sequence
  Description of Artificial Sequence: Synthetic oligonucleotide
ucaaaguagaauucaagucaugaagca

SEQ ID NO: 145953 - RNA, 27 nt, Artificial Sequence
  Description of Artificial Sequence: Synthetic oligonucleotide
gucuguaguugcuucucucccucuuag

SEQ ID NO: 145954 - RNA, 27 nt, Artificial Sequence
  Description of Artificial Sequence: Synthetic oligonucleotide
guugaccuuggucugguaggagacggc

SEQ ID NO: 145955 - RNA, 27 nt, Artificial Sequence
  Description of Artificial Sequence: Synthetic oligonucleotide
gucgagauagucgggccgauugaucuc

SEQ ID NO: 145956 - RNA, 27 nt, Artificial Sequence
  Description of Artificial Sequence: Synthetic oligonucleotide
guuugggaagguuggauguucguccuc

SEQ ID NO: 145957 - RNA, 27 nt, Artificial Sequence
  Description of Artificial Sequence: Synthetic oligonucleotide
aguucuaagcuuggguuccgacccuaa

SEQ ID NO: 145958 - RNA, 27 nt, Artificial Sequence
  Description of Artificial Sequence: Synthetic oligonucleotide
uuaaaguucuaagcuuggguuccgacc

SEQ ID NO: 145959 - RNA, 27 nt, Artificial Sequence
  Description of Artificial Sequence: Synthetic oligonucleotide
guugcuuaaaguucuaagcuuggguuc

SEQ ID NO: 145960 - RNA, 27 nt, Artificial Sequence
  Description of Artificial Sequence: Synthetic oligonucleotide
gugguggucuuguugcuuaaaguucua

SEQ ID NO: 145961 - RNA, 27 nt, Artificial Sequence
  Description of Artificial Sequence: Synthetic oligonucleotide
acuuuauuucucgccacugaauaguag

SEQ ID NO: 145962 - RNA, 27 nt, Artificial Sequence
  Description of Artificial Sequence: Synthetic oligonucleotide
aacuuuauuucucgccacugaauagua

SEQ ID NO: 145963 - RNA, 27 nt, Artificial Sequence
  Description of Artificial Sequence: Synthetic oligonucleotide
ggaucauuuccuguuaucuguguuugu

SEQ ID NO: 145964 - RNA, 27 nt, Artificial Sequence
  Description of Artificial Sequence: Synthetic oligonucleotide
guuucauuucuucucuuuucuuaaggc

SEQ ID NO: 145965 - RNA, 27 nt, Artificial Sequence
  Description of Artificial Sequence: Synthetic oligonucleotide
ggaggauggaaacacacuccuucaguu

SEQ ID NO: 145966 - RNA, 27 nt, Artificial Sequence
  Description of Artificial Sequence: Synthetic oligonucleotide
ucaaagauuuucagucccgcggugaca

SEQ ID NO: 145967 - RNA, 27 nt, Artificial Sequence
  Description of Artificial Sequence: Synthetic oligonucleotide
ccugaacggcacgcuuauuucugcugu

SEQ ID NO: 145968 - RNA, 27 nt, Artificial Sequence
  Description of Artificial Sequence: Synthetic oligonucleotide
cuucuggacccugaacggcacgcuuau

SEQ ID NO: 145969 - RNA, 27 nt, Artificial Sequence
  Description of Artificial Sequence: Synthetic oligonucleotide
caagcagucuugagugacuguuucuuc

SEQ ID NO: 145970 - RNA, 27 nt, Artificial Sequence
  Description of Artificial Sequence: Synthetic oligonucleotide
ccaaagacauggaccuucuuccucuga

SEQ ID NO: 145971 - RNA, 27 nt, Artificial Sequence
  Description of Artificial Sequence: Synthetic oligonucleotide
guguuucaggcauauuuugaauacauc

SEQ ID NO: 145972 - RNA, 27 nt, Artificial Sequence
  Description of Artificial Sequence: Synthetic oligonucleotide
gagguacagagaaagggaggaaaauag

SEQ ID NO: 145973 - RNA, 27 nt, Artificial Sequence
  Description of Artificial Sequence: Synthetic oligonucleotide
ucuugucuugcucuaucuuucuuuggu

SEQ ID NO: 145974 - RNA, 27 nt, Artificial Sequence
  Description of Artificial Sequence: Synthetic oligonucleotide
uuucuugucuugcucuaucuuucuuug

SEQ ID NO: 145975 - RNA, 27 nt, Artificial Sequence
  Description of Artificial Sequence: Synthetic oligonucleotide
ggaucuuguacaaacaaaugcuuucuc

SEQ ID NO: 145976 - RNA, 27 nt, Artificial Sequence
  Description of Artificial Sequence: Synthetic oligonucleotide
ucugcaaguacguucguuuaacucaag

SEQ ID NO: 145977 - RNA, 27 nt, Artificial Sequence
  Description of Artificial Sequence: Synthetic oligonucleotide
ucuguaucgaucguucuguaucagucu

SEQ ID NO: 145978 - RNA, 27 nt, Artificial Sequence
  Description of Artificial Sequence: Synthetic oligonucleotide
auuuauuuuuauauauauauaauauau

SEQ ID NO: 145979 - RNA, 27 nt, Artificial Sequence
  Description of Artificial Sequence: Synthetic oligonucleotide
auauuuauuuuuauauauauauaauau

SEQ ID NO: 145980 - RNA, 27 nt, Artificial Sequence
  Description of Artificial Sequence: Synthetic oligonucleotide
cacagcagucaaauacauccagugaag

SEQ ID NO: 145981 - RNA, 27 nt, Artificial Sequence
  Description of Artificial Sequence: Synthetic oligonucleotide
gucucucaucuccuccucuucccuguc

SEQ ID NO: 145982 - RNA, 27 nt, Artificial Sequence
  Description of Artificial Sequence: Synthetic oligonucleotide
ccaagugggacaaaaaaaagaucaugc

SEQ ID NO: 145983 - RNA, 14 nt, Artificial Sequence
  Description of Artificial Sequence: Synthetic oligonucleotide
guauuuugaugagg

SEQ ID NO: 145984 - RNA, 12 nt, Artificial Sequence
  Description of Artificial Sequence: Synthetic oligonucleotide
ggcccagaugau

SEQ ID NO: 145985 - RNA, 14 nt, Artificial Sequence
  Description of Artificial Sequence: Synthetic oligonucleotide
gggaagaaaacuau

SEQ ID NO: 145986 - RNA, 15 nt, Artificial Sequence
  Description of Artificial Sequence: Synthetic oligonucleotide
guuuuaauuuauuuc

SEQ ID NO: 145987 - RNA, 12 nt, Artificial Sequence
  Description of Artificial Sequence: Synthetic oligonucleotide
acguagggaaau

SEQ ID NO: 145988 - RNA, 12 nt, Artificial Sequence
  Description of Artificial Sequence: Synthetic oligonucleotide
ccaggguuuacc

SEQ ID NO: 145989 - RNA, 11 nt, Artificial Sequence
  Description of Artificial Sequence: Synthetic oligonucleotide
agcaagguuua

SEQ ID NO: 145990 - RNA, 12 nt, Artificial Sequence
  Description of Artificial Sequence: Synthetic oligonucleotide
uguauuauguug

SEQ ID NO: 145991 - RNA, 15 nt, Artificial Sequence
  Description of Artificial Sequence: Synthetic oligonucleotide
uuuuaaucuuuguga

SEQ ID NO: 145992 - RNA, 14 nt, Artificial Sequence
  Description of Artificial Sequence: Synthetic oligonucleotide
uuaaucuuugugac

SEQ ID NO: 145993 - RNA, 13 nt, Artificial Sequence
  Description of Artificial Sequence: Synthetic oligonucleotide
gcugcuuaugucu

SEQ ID NO: 145994 - RNA, 14 nt, Artificial Sequence
  Description of Artificial Sequence: Synthetic oligonucleotide
aaguguuucagaag

SEQ ID NO: 145995 - RNA, 13 nt, Artificial Sequence
  Description of Artificial Sequence: Synthetic oligonucleotide
gaccaucaauaag

SEQ ID NO: 145996 - RNA, 13 nt, Artificial Sequence
  Description of Artificial Sequence: Synthetic oligonucleotide
ccaucaauaagga

SEQ ID NO: 145997 - RNA, 14 nt, Artificial Sequence
  Description of Artificial Sequence: Synthetic oligonucleotide
ucaauaaggaagaa

SEQ ID NO: 145998 - RNA, 14 nt, Artificial Sequence
  Description of Artificial Sequence: Synthetic oligonucleotide
aauaaggaagaagc

SEQ ID NO: 145999 - RNA, 13 nt, Artificial Sequence
  Description of Artificial Sequence: Synthetic oligonucleotide
aggaagaagcccu

SEQ ID NO: 146000 - RNA, 13 nt, Artificial Sequence
  Description of Artificial Sequence: Synthetic oligonucleotide
gcauaacuaaagg

SEQ ID NO: 146001 - RNA, 14 nt, Artificial Sequence
  Description of Artificial Sequence: Synthetic oligonucleotide
cauaacuaaaggug

SEQ ID NO: 146002 - RNA, 12 nt, Artificial Sequence
  Description of Artificial Sequence: Synthetic oligonucleotide
cuacaucacgcc

SEQ ID NO: 146003 - RNA, 12 nt, Artificial Sequence
  Description of Artificial Sequence: Synthetic oligonucleotide
acuggauuuaag

SEQ ID NO: 146004 - RNA, 12 nt, Artificial Sequence
  Description of Artificial Sequence: Synthetic oligonucleotide
cuggauuuaagc

SEQ ID NO: 146005 - RNA, 13 nt, Artificial Sequence
  Description of Artificial Sequence: Synthetic oligonucleotide
gauuuaagcagag

SEQ ID NO: 146006 - RNA, 13 nt, Artificial Sequence
  Description of Artificial Sequence: Synthetic oligonucleotide
auuuaagcagagu

SEQ ID NO: 146007 - RNA, 13 nt, Artificial Sequence
  Description of Artificial Sequence: Synthetic oligonucleotide
uuaagcagaguuc

SEQ ID NO: 146008 - RNA, 13 nt, Artificial Sequence
  Description of Artificial Sequence: Synthetic oligonucleotide
uaagcagaguuca

SEQ ID NO: 146009 - RNA, 14 nt, Artificial Sequence
  Description of Artificial Sequence: Synthetic oligonucleotide
agcagaguucaaaa

SEQ ID NO: 146010 - RNA, 12 nt, Artificial Sequence
  Description of Artificial Sequence: Synthetic oligonucleotide
cucagggucuga

SEQ ID NO: 146011 - RNA, 13 nt, Artificial Sequence
  Description of Artificial Sequence: Synthetic oligonucleotide
caagcaacuacau

SEQ ID NO: 146012 - RNA, 12 nt, Artificial Sequence
  Description of Artificial Sequence: Synthetic oligonucleotide
aucaauggcagc

SEQ ID NO: 146013 - RNA, 11 nt, Artificial Sequence
  Description of Artificial Sequence: Synthetic oligonucleotide
uuccagcccac

SEQ ID NO: 146014 - RNA, 12 nt, Artificial Sequence
  Description of Artificial Sequence: Synthetic oligonucleotide
cagcugagaaug

SEQ ID NO: 146015 - RNA, 13 nt, Artificial Sequence
  Description of Artificial Sequence: Synthetic oligonucleotide
aacguaucuccua

SEQ ID NO: 146016 - RNA, 14 nt, Artificial Sequence
  Description of Artificial Sequence: Synthetic oligonucleotide
ccuaaaauaauuuc

SEQ ID NO: 146017 - RNA, 13 nt, Artificial Sequence
  Description of Artificial Sequence: Synthetic oligonucleotide
uggaagauucagc

SEQ ID NO: 146018 - RNA, 12 nt, Artificial Sequence
  Description of Artificial Sequence: Synthetic oligonucleotide
uuaaacucuccu

SEQ ID NO: 146019 - RNA, 12 nt, Artificial Sequence
  Description of Artificial Sequence: Synthetic oligonucleotide
cagccuacaguu

SEQ ID NO: 146020 - RNA, 13 nt, Artificial Sequence
  Description of Artificial Sequence: Synthetic oligonucleotide
guuauguucaguc

SEQ ID NO: 146021 - RNA, 13 nt, Artificial Sequence
  Description of Artificial Sequence: Synthetic oligonucleotide
cacauacaaaaug

SEQ ID NO: 146022 - RNA, 9 nt, Artificial Sequence
  Description of Artificial Sequence: Synthetic oligonucleotide
uccuuuugc

SEQ ID NO: 146023 - RNA, 12 nt, Artificial Sequence
  Description of Artificial Sequence: Synthetic oligonucleotide
ugaccugugaag

SEQ ID NO: 146024 - RNA, 12 nt, Artificial Sequence
  Description of Artificial Sequence: Synthetic oligonucleotide
cuaucucacaca

SEQ ID NO: 146025 - RNA, 13 nt, Artificial Sequence
  Description of Artificial Sequence: Synthetic oligonucleotide
uguccucaauugu

SEQ ID NO: 146026 - RNA, 12 nt, Artificial Sequence
  Description of Artificial Sequence: Synthetic oligonucleotide
aaaccguagcug

SEQ ID NO: 146027 - RNA, 12 nt, Artificial Sequence
  Description of Artificial Sequence: Synthetic oligonucleotide
uagcuggcaagc

SEQ ID NO: 146028 - RNA, 14 nt, Artificial Sequence
  Description of Artificial Sequence: Synthetic oligonucleotide
uuguaugguuaaaa

SEQ ID NO: 146029 - RNA, 14 nt, Artificial Sequence
  Description of Artificial Sequence: Synthetic oligonucleotide
ugguuaaaagaugg

SEQ ID NO: 146030 - RNA, 13 nt, Artificial Sequence
  Description of Artificial Sequence: Synthetic oligonucleotide
cagggaauuauac

SEQ ID NO: 146031 - RNA, 12 nt, Artificial Sequence
  Description of Artificial Sequence: Synthetic oligonucleotide
acaaucuugcug

SEQ ID NO: 146032 - RNA, 13 nt, Artificial Sequence
  Description of Artificial Sequence: Synthetic oligonucleotide
ccaauaaugaaga

SEQ ID NO: 146033 - RNA, 13 nt, Artificial Sequence
  Description of Artificial Sequence: Synthetic oligonucleotide
acuuuggauguuc

SEQ ID NO: 146034 - RNA, 12 nt, Artificial Sequence
  Description of Artificial Sequence: Synthetic oligonucleotide
aaugcuuccacu

SEQ ID NO: 146035 - RNA, 11 nt, Artificial Sequence
  Description of Artificial Sequence: Synthetic oligonucleotide
gagaaaguuug

SEQ ID NO: 146036 - RNA, 11 nt, Artificial Sequence
  Description of Artificial Sequence: Synthetic oligonucleotide
aaagaacuacu

SEQ ID NO: 146037 - RNA, 12 nt, Artificial Sequence
  Description of Artificial Sequence: Synthetic oligonucleotide
uuagaaauacgg

SEQ ID NO: 146038 - RNA, 12 nt, Artificial Sequence
  Description of Artificial Sequence: Synthetic oligonucleotide
aacauggguaca

SEQ ID NO: 146039 - RNA, 14 nt, Artificial Sequence
  Description of Artificial Sequence: Synthetic oligonucleotide
aaagacacagaaga

SEQ ID NO: 146040 - RNA, 11 nt, Artificial Sequence
  Description of Artificial Sequence: Synthetic oligonucleotide
uaguagggagg

SEQ ID NO: 146041 - RNA, 12 nt, Artificial Sequence
  Description of Artificial Sequence: Synthetic oligonucleotide
gccuucugcagc

SEQ ID NO: 146042 - RNA, 10 nt, Artificial Sequence
  Description of Artificial Sequence: Synthetic oligonucleotide
ggucugguac

SEQ ID NO: 146043 - RNA, 12 nt, Artificial Sequence
  Description of Artificial Sequence: Synthetic oligonucleotide
cuaguccuuccg

SEQ ID NO: 146044 - RNA, 12 nt, Artificial Sequence
  Description of Artificial Sequence: Synthetic oligonucleotide
ccagugaauauu

SEQ ID NO: 146045 - RNA, 13 nt, Artificial Sequence
  Description of Artificial Sequence: Synthetic oligonucleotide
augaauucaaguu

SEQ ID NO: 146046 - RNA, 12 nt, Artificial Sequence
  Description of Artificial Sequence: Synthetic oligonucleotide
caggacacagau

SEQ ID NO: 146047 - RNA, 12 nt, Artificial Sequence
  Description of Artificial Sequence: Synthetic oligonucleotide
cucaaagcacag

SEQ ID NO: 146048 - RNA, 10 nt, Artificial Sequence
  Description of Artificial Sequence: Synthetic oligonucleotide
accacugcca

SEQ ID NO: 146049 - RNA, 13 nt, Artificial Sequence
  Description of Artificial Sequence: Synthetic oligonucleotide
gaaacuacuagug

SEQ ID NO: 146050 - RNA, 12 nt, Artificial Sequence
  Description of Artificial Sequence: Synthetic oligonucleotide
aagucggacagc

SEQ ID NO: 146051 - RNA, 13 nt, Artificial Sequence
  Description of Artificial Sequence: Synthetic oligonucleotide
gaaagcgaaaaau

SEQ ID NO: 146052 - RNA, 13 nt, Artificial Sequence
  Description of Artificial Sequence: Synthetic oligonucleotide
cccucugauuuag

SEQ ID NO: 146053 - RNA, 12 nt, Artificial Sequence
  Description of Artificial Sequence: Synthetic oligonucleotide
ugagcuauuuaa

SEQ ID NO: 146054 - RNA, 13 nt, Artificial Sequence
  Description of Artificial Sequence: Synthetic oligonucleotide
aaaaggugaaaaa

SEQ ID NO: 146055 - RNA, 14 nt, Artificial Sequence
  Description of Artificial Sequence: Synthetic oligonucleotide
gaaaaagcacuauu

SEQ ID NO: 146056 - RNA, 12 nt, Artificial Sequence
  Description of Artificial Sequence: Synthetic oligonucleotide
ggcugaaaagaa

SEQ ID NO: 146057 - RNA, 12 nt, Artificial Sequence
  Description of Artificial Sequence: Synthetic oligonucleotide
uaaacccuuaua

SEQ ID NO: 146058 - RNA, 13 nt, Artificial Sequence
  Description of Artificial Sequence: Synthetic oligonucleotide
cauacuauuagcc

SEQ ID NO: 146059 - RNA, 12 nt, Artificial Sequence
  Description of Artificial Sequence: Synthetic oligonucleotide
gacagaagcauu

SEQ ID NO: 146060 - RNA, 14 nt, Artificial Sequence
  Description of Artificial Sequence: Synthetic oligonucleotide
agagcaaauaagau

SEQ ID NO: 146061 - RNA, 14 nt, Artificial Sequence
  Description of Artificial Sequence: Synthetic oligonucleotide
ccaacauuuuucuc

SEQ ID NO: 146062 - RNA, 15 nt, Artificial Sequence
  Description of Artificial Sequence: Synthetic oligonucleotide
uuaaguaugagaaaa

SEQ ID NO: 146063 - RNA, 14 nt, Artificial Sequence
  Description of Artificial Sequence: Synthetic oligonucleotide
caggaauaaagaug

SEQ ID NO: 146064 - RNA, 13 nt, Artificial Sequence
  Description of Artificial Sequence: Synthetic oligonucleotide
aauuugaaugacc

SEQ ID NO: 146065 - RNA, 14 nt, Artificial Sequence
  Description of Artificial Sequence: Synthetic oligonucleotide
auguauaaagauag

SEQ ID NO: 146066 - RNA, 12 nt, Artificial Sequence
  Description of Artificial Sequence: Synthetic oligonucleotide
ggcuguaacuau

SEQ ID NO: 146067 - RNA, 11 nt, Artificial Sequence
  Description of Artificial Sequence: Synthetic oligonucleotide
ucugugaagug

SEQ ID NO: 146068 - RNA, 14 nt, Artificial Sequence
  Description of Artificial Sequence: Synthetic oligonucleotide
ccuuuaaggaaaug

SEQ ID NO: 146069 - RNA, 13 nt, Artificial Sequence
  Description of Artificial Sequence: Synthetic oligonucleotide
aaggauacaaaaa

SEQ ID NO: 146070 - RNA, 12 nt, Artificial Sequence
  Description of Artificial Sequence: Synthetic oligonucleotide
agaugcaauuug

SEQ ID NO: 146071 - RNA, 12 nt, Artificial Sequence
  Description of Artificial Sequence: Synthetic oligonucleotide
guucaaaacgaa

SEQ ID NO: 146072 - RNA, 11 nt, Artificial Sequence
  Description of Artificial Sequence: Synthetic oligonucleotide
gugaaaccuca

SEQ ID NO: 146073 - RNA, 13 nt, Artificial Sequence
  Description of Artificial Sequence: Synthetic oligonucleotide
acgaaagagaagc

SEQ ID NO: 146074 - RNA, 12 nt, Artificial Sequence
  Description of Artificial Sequence: Synthetic oligonucleotide
cuccacaagcgc

SEQ ID NO: 146075 - RNA, 14 nt, Artificial Sequence
  Description of Artificial Sequence: Synthetic oligonucleotide
gagaagauuccaaa

SEQ ID NO: 146076 - RNA, 13 nt, Artificial Sequence
  Description of Artificial Sequence: Synthetic oligonucleotide
aaucuggauucaa

SEQ ID NO: 146077 - RNA, 13 nt, Artificial Sequence
  Description of Artificial Sequence: Synthetic oligonucleotide
agaacagauuuga

SEQ ID NO: 146078 - RNA, 11 nt, Artificial Sequence
  Description of Artificial Sequence: Synthetic oligonucleotide
ccagagcugug

SEQ ID NO: 146079 - RNA, 12 nt, Artificial Sequence
  Description of Artificial Sequence: Synthetic oligonucleotide
ccucagauuguu

SEQ ID NO: 146080 - RNA, 12 nt, Artificial Sequence
  Description of Artificial Sequence: Synthetic oligonucleotide
cuauuuuaauua

SEQ ID NO: 146081 - RNA, 13 nt, Artificial Sequence
  Description of Artificial Sequence: Synthetic oligonucleotide
uuuaauuuauuaa

SEQ ID NO: 146082 - RNA, 12 nt, Artificial Sequence
  Description of Artificial Sequence: Synthetic oligonucleotide
augcaguuugaa

SEQ ID NO: 146083 - RNA, 11 nt, Artificial Sequence
  Description of Artificial Sequence: Synthetic oligonucleotide
caugcugcugg

SEQ ID NO: 146084 - RNA, 13 nt, Artificial Sequence
  Description of Artificial Sequence: Synthetic oligonucleotide
agaugugcauuuc

SEQ ID NO: 146085 - RNA, 12 nt, Artificial Sequence
  Description of Artificial Sequence: Synthetic oligonucleotide
ucaaaaccugug

SEQ ID NO: 146086 - RNA, 11 nt, Artificial Sequence
  Description of Artificial Sequence: Synthetic oligonucleotide
gaaugugggua

SEQ ID NO: 146087 - RNA, 10 nt, Artificial Sequence
  Description of Artificial Sequence: Synthetic oligonucleotide
auguggguag

SEQ ID NO: 146088 - RNA, 13 nt, Artificial Sequence
  Description of Artificial Sequence: Synthetic oligonucleotide
ugaaaaugagcau

SEQ ID NO: 146089 - RNA, 13 nt, Artificial Sequence
  Description of Artificial Sequence: Synthetic oligonucleotide
uugcuuuucaugu

SEQ ID NO: 146090 - RNA, 12 nt, Artificial Sequence
  Description of Artificial Sequence: Synthetic oligonucleotide
uguauuucuaua

SEQ ID NO: 146091 - RNA, 13 nt, Artificial Sequence
  Description of Artificial Sequence: Synthetic oligonucleotide
uuugauuaauguu

SEQ ID NO: 146092 - RNA, 12 nt, Artificial Sequence
  Description of Artificial Sequence: Synthetic oligonucleotide
caacguguauag

SEQ ID NO: 146093 - RNA, 12 nt, Artificial Sequence
  Description of Artificial Sequence: Synthetic oligonucleotide
cauauccuuggc

SEQ ID NO: 146094 - RNA, 13 nt, Artificial Sequence
  Description of Artificial Sequence: Synthetic oligonucleotide
uacuaacaucugg

SEQ ID NO: 146095 - RNA, 11 nt, Artificial Sequence
  Description of Artificial Sequence: Synthetic oligonucleotide
cauaaguugug

SEQ ID NO: 146096 - RNA, 12 nt, Artificial Sequence
  Description of Artificial Sequence: Synthetic oligonucleotide
gcaucauuuugg

SEQ ID NO: 146097 - RNA, 10 nt, Artificial Sequence
  Description of Artificial Sequence: Synthetic oligonucleotide
gcucuucuua

SEQ ID NO: 146098 - RNA, 10 nt, Artificial Sequence
  Description of Artificial Sequence: Synthetic oligonucleotide
agauuagguc

SEQ ID NO: 146099 - RNA, 12 nt, Artificial Sequence
  Description of Artificial Sequence: Synthetic oligonucleotide
auggaauugaaa

SEQ ID NO: 146100 - RNA, 13 nt, Artificial Sequence
  Description of Artificial Sequence: Synthetic oligonucleotide
cacacucauuccu

SEQ ID NO: 146101 - RNA, 12 nt, Artificial Sequence
  Description of Artificial Sequence: Synthetic oligonucleotide
uguagagguaac

SEQ ID NO: 146102 - RNA, 11 nt, Artificial Sequence
  Description of Artificial Sequence: Synthetic oligonucleotide
caaccacaugc

SEQ ID NO: 146103 - RNA, 12 nt, Artificial Sequence
  Description of Artificial Sequence: Synthetic oligonucleotide
ucggaaacaagu

SEQ ID NO: 146104 - RNA, 11 nt, Artificial Sequence
  Description of Artificial Sequence: Synthetic oligonucleotide
acucccaauaa

SEQ ID NO: 146105 - RNA, 13 nt, Artificial Sequence
  Description of Artificial Sequence: Synthetic oligonucleotide
aaugcuaagaaau

SEQ ID NO: 146106 - RNA, 11 nt, Artificial Sequence
  Description of Artificial Sequence: Synthetic oligonucleotide
gucuuucucua

SEQ ID NO: 146107 - RNA, 11 nt, Artificial Sequence
  Description of Artificial Sequence: Synthetic oligonucleotide
ugaauuucagg

SEQ ID NO: 146108 - RNA, 13 nt, Artificial Sequence
  Description of Artificial Sequence: Synthetic oligonucleotide
cgauucccucuca

SEQ ID NO: 146109 - RNA, 11 nt, Artificial Sequence
  Description of Artificial Sequence: Synthetic oligonucleotide
aggaaagugaa

SEQ ID NO: 146110 - RNA, 12 nt, Artificial Sequence
  Description of Artificial Sequence: Synthetic oligonucleotide
gaggcugcaugc

SEQ ID NO: 146111 - RNA, 11 nt, Artificial Sequence
  Description of Artificial Sequence: Synthetic oligonucleotide
ucucugaacag

SEQ ID NO: 146112 - RNA, 12 nt, Artificial Sequence
  Description of Artificial Sequence: Synthetic oligonucleotide
aacuuggcugua

SEQ ID NO: 146113 - RNA, 12 nt, Artificial Sequence
  Description of Artificial Sequence: Synthetic oligonucleotide
agaagccaaaau

SEQ ID NO: 146114 - RNA, 14 nt, Artificial Sequence
  Description of Artificial Sequence: Synthetic oligonucleotide
auuaaaagaagucc

SEQ ID NO: 146115 - RNA, 14 nt, Artificial Sequence
  Description of Artificial Sequence: Synthetic oligonucleotide
gaauccggauuauc

SEQ ID NO: 146116 - RNA, 12 nt, Artificial Sequence
  Description of Artificial Sequence: Synthetic oligonucleotide
aaugugacauca

SEQ ID NO: 146117 - RNA, 13 nt, Artificial Sequence
  Description of Artificial Sequence: Synthetic oligonucleotide
caucaaagcaagu

SEQ ID NO: 146118 - RNA, 11 nt, Artificial Sequence
  Description of Artificial Sequence: Synthetic oligonucleotide
agagagagaaa

SEQ ID NO: 146119 - RNA, 13 nt, Artificial Sequence
  Description of Artificial Sequence: Synthetic oligonucleotide
ucgcuguaguauu

SEQ ID NO: 146120 - RNA, 14 nt, Artificial Sequence
  Description of Artificial Sequence: Synthetic oligonucleotide
cgcuguaguauuua

SEQ ID NO: 146121 - RNA, 13 nt, Artificial Sequence
  Description of Artificial Sequence: Synthetic oligonucleotide
auuuaagcccaua

SEQ ID NO: 146122 - RNA, 15 nt, Artificial Sequence
  Description of Artificial Sequence: Synthetic oligonucleotide
auuaaaauaaacaug

SEQ ID NO: 146123 - RNA, 12 nt, Artificial Sequence
  Description of Artificial Sequence: Synthetic oligonucleotide
cuguucugaucg

SEQ ID NO: 146124 - RNA, 16 nt, Artificial Sequence
  Description of Artificial Sequence: Synthetic oligonucleotide
aaauaauuugaacuuu

SEQ ID NO: 146125 - RNA, 12 nt, Artificial Sequence
  Description of Artificial Sequence: Synthetic oligonucleotide
ugcgaccuuaau

SEQ ID NO: 146126 - RNA, 11 nt, Artificial Sequence
  Description of Artificial Sequence: Synthetic oligonucleotide
cugagaaagcu

SEQ ID NO: 146127 - RNA, 13 nt, Artificial Sequence
  Description of Artificial Sequence: Synthetic oligonucleotide
aguaaagaugcua

SEQ ID NO: 146128 - RNA, 12 nt, Artificial Sequence
  Description of Artificial Sequence: Synthetic oligonucleotide
cugcuuaauugc

SEQ ID NO: 146129 - RNA, 14 nt, Artificial Sequence
  Description of Artificial Sequence: Synthetic oligonucleotide
uaccauaugaauga

SEQ ID NO: 146130 - RNA, 12 nt, Artificial Sequence
  Description of Artificial Sequence: Synthetic oligonucleotide
aacuuucuuauc

SEQ ID NO: 146131 - RNA, 13 nt, Artificial Sequence
  Description of Artificial Sequence: Synthetic oligonucleotide
ccuugcaugacau

SEQ ID NO: 146132 - RNA, 14 nt, Artificial Sequence
  Description of Artificial Sequence: Synthetic oligonucleotide
ugaauuuguauaug

SEQ ID NO: 146133 - RNA, 12 nt, Artificial Sequence
  Description of Artificial Sequence: Synthetic oligonucleotide
gaauccuaguag

SEQ ID NO: 146134 - RNA, 10 nt, Artificial Sequence
  Description of Artificial Sequence: Synthetic oligonucleotide
gaaagggaag

SEQ ID NO: 146135 - RNA, 11 nt, Artificial Sequence
  Description of Artificial Sequence: Synthetic oligonucleotide
uaucggcaugc

SEQ ID NO: 146136 - RNA, 12 nt, Artificial Sequence
  Description of Artificial Sequence: Synthetic oligonucleotide
caccucauagua

SEQ ID NO: 146137 - RNA, 11 nt, Artificial Sequence
  Description of Artificial Sequence: Synthetic oligonucleotide
ccagaauugcc

SEQ ID NO: 146138 - RNA, 11 nt, Artificial Sequence
  Description of Artificial Sequence: Synthetic oligonucleotide
uggugaucugg

SEQ ID NO: 146139 - RNA, 12 nt, Artificial Sequence
  Description of Artificial Sequence: Synthetic oligonucleotide
gaucuggguaau

SEQ ID NO: 146140 - RNA, 12 nt, Artificial Sequence
  Description of Artificial Sequence: Synthetic oligonucleotide
ggaugugaugaa

SEQ ID NO: 146141 - RNA, 12 nt, Artificial Sequence
  Description of Artificial Sequence: Synthetic oligonucleotide
cauuuccacagc

SEQ ID NO: 146142 - RNA, 11 nt, Artificial Sequence
  Description of Artificial Sequence: Synthetic oligonucleotide
acagcuacacc

SEQ ID NO: 146143 - RNA, 12 nt, Artificial Sequence
  Description of Artificial Sequence: Synthetic oligonucleotide
ugcaguucuuac

SEQ ID NO: 146144 - RNA, 12 nt, Artificial Sequence
  Description of Artificial Sequence: Synthetic oligonucleotide
acgagaagaaga

SEQ ID NO: 146145 - RNA, 12 nt, Artificial Sequence
  Description of Artificial Sequence: Synthetic oligonucleotide
cgagaagaagau

SEQ ID NO: 146146 - RNA, 15 nt, Artificial Sequence
  Description of Artificial Sequence: Synthetic oligonucleotide
aagaagaucauuuac

SEQ ID NO: 146147 - RNA, 11 nt, Artificial Sequence
  Description of Artificial Sequence: Synthetic oligonucleotide
agaggaagagg

SEQ ID NO: 146148 - RNA, 12 nt, Artificial Sequence
  Description of Artificial Sequence: Synthetic oligonucleotide
gaggaagaggug

SEQ ID NO: 146149 - RNA, 13 nt, Artificial Sequence
  Description of Artificial Sequence: Synthetic oligonucleotide
cuacuuugagggc

SEQ ID NO: 146150 - RNA, 12 nt, Artificial Sequence
  Description of Artificial Sequence: Synthetic oligonucleotide
agggcaucuccu

SEQ ID NO: 146151 - RNA, 10 nt, Artificial Sequence
  Description of Artificial Sequence: Synthetic oligonucleotide
ggagugauau

SEQ ID NO: 146152 - RNA, 11 nt, Artificial Sequence
  Description of Artificial Sequence: Synthetic oligonucleotide
gagugauaugg

SEQ ID NO: 146153 - RNA, 12 nt, Artificial Sequence
  Description of Artificial Sequence: Synthetic oligonucleotide
ugcaguaaagau

SEQ ID NO: 146154 - RNA, 13 nt, Artificial Sequence
  Description of Artificial Sequence: Synthetic oligonucleotide
aguaaagauccua

SEQ ID NO: 146155 - RNA, 12 nt, Artificial Sequence
  Description of Artificial Sequence: Synthetic oligonucleotide
ugacaaaggaca

SEQ ID NO: 146156 - RNA, 13 nt, Artificial Sequence
  Description of Artificial Sequence: Synthetic oligonucleotide
gcaauugugaccc

SEQ ID NO: 146157 - RNA, 12 nt, Artificial Sequence
  Description of Artificial Sequence: Synthetic oligonucleotide
aacaucauccau

SEQ ID NO: 146158 - RNA, 12 nt, Artificial Sequence
  Description of Artificial Sequence: Synthetic oligonucleotide
ugaaauccaaca

SEQ ID NO: 146159 - RNA, 15 nt, Artificial Sequence
  Description of Artificial Sequence: Synthetic oligonucleotide
aacaauauauuucuc

SEQ ID NO: 146160 - RNA, 14 nt, Artificial Sequence
  Description of Artificial Sequence: Synthetic oligonucleotide
aacaguaaagucac

SEQ ID NO: 146161 - RNA, 14 nt, Artificial Sequence
  Description of Artificial Sequence: Synthetic oligonucleotide
ugugaagaaaguaa

SEQ ID NO: 146162 - RNA, 13 nt, Artificial Sequence
  Description of Artificial Sequence: Synthetic oligonucleotide
cuuccgagccauc

SEQ ID NO: 146163 - RNA, 12 nt, Artificial Sequence
  Description of Artificial Sequence: Synthetic oligonucleotide
aauggagguuga

SEQ ID NO: 146164 - RNA, 12 nt, Artificial Sequence
  Description of Artificial Sequence: Synthetic oligonucleotide
ggagguugaaua

SEQ ID NO: 146165 - RNA, 13 nt, Artificial Sequence
  Description of Artificial Sequence: Synthetic oligonucleotide
auuuugaguuuuc

SEQ ID NO: 146166 - RNA, 12 nt, Artificial Sequence
  Description of Artificial Sequence: Synthetic oligonucleotide
uauccuguuugu

SEQ ID NO: 146167 - RNA, 11 nt, Artificial Sequence
  Description of Artificial Sequence: Synthetic oligonucleotide
ccuguuuguuc

SEQ ID NO: 146168 - RNA, 10 nt, Artificial Sequence
  Description of Artificial Sequence: Synthetic oligonucleotide
cucuacagcc

SEQ ID NO: 146169 - RNA, 12 nt, Artificial Sequence
  Description of Artificial Sequence: Synthetic oligonucleotide
ucuuccauagcu

SEQ ID NO: 146170 - RNA, 12 nt, Artificial Sequence
  Description of Artificial Sequence: Synthetic oligonucleotide
auaaucuuccug

SEQ ID NO: 146171 - RNA, 12 nt, Artificial Sequence
  Description of Artificial Sequence: Synthetic oligonucleotide
uaaucuuccugu

SEQ ID NO: 146172 - RNA, 12 nt, Artificial Sequence
  Description of Artificial Sequence: Synthetic oligonucleotide
cuucaugacuug

SEQ ID NO: 146173 - RNA, 12 nt, Artificial Sequence
  Description of Artificial Sequence: Synthetic oligonucleotide
aagagggagaga

SEQ ID NO: 146174 - RNA, 12 nt, Artificial Sequence
  Description of Artificial Sequence: Synthetic oligonucleotide
cgucuccuacca

SEQ ID NO: 146175 - RNA, 12 nt, Artificial Sequence
  Description of Artificial Sequence: Synthetic oligonucleotide
gaucaaucggcc

SEQ ID NO: 146176 - RNA, 12 nt, Artificial Sequence
  Description of Artificial Sequence: Synthetic oligonucleotide
ggacgaacaucc

SEQ ID NO: 146177 - RNA, 11 nt, Artificial Sequence
  Description of Artificial Sequence: Synthetic oligonucleotide
agggucggaac

SEQ ID NO: 146178 - RNA, 10 nt, Artificial Sequence
  Description of Artificial Sequence: Synthetic oligonucleotide
ucggaaccca

SEQ ID NO: 146179 - RNA, 11 nt, Artificial Sequence
  Description of Artificial Sequence: Synthetic oligonucleotide
acccaagcuua

SEQ ID NO: 146180 - RNA, 14 nt, Artificial Sequence
  Description of Artificial Sequence: Synthetic oligonucleotide
gaacuuuaagcaac

SEQ ID NO: 146181 - RNA, 11 nt, Artificial Sequence
  Description of Artificial Sequence: Synthetic oligonucleotide
acuauucagug

SEQ ID NO: 146182 - RNA, 11 nt, Artificial Sequence
  Description of Artificial Sequence: Synthetic oligonucleotide
cuauucagugg

SEQ ID NO: 146183 - RNA, 13 nt, Artificial Sequence
  Description of Artificial Sequence: Synthetic oligonucleotide
aaacacagauaac

SEQ ID NO: 146184 - RNA, 12 nt, Artificial Sequence
  Description of Artificial Sequence: Synthetic oligonucleotide
cuuaagaaaaga

SEQ ID NO: 146185 - RNA, 12 nt, Artificial Sequence
  Description of Artificial Sequence: Synthetic oligonucleotide
cugaaggagugu

SEQ ID NO: 146186 - RNA, 10 nt, Artificial Sequence
  Description of Artificial Sequence: Synthetic oligonucleotide
ucaccgcggg

SEQ ID NO: 146187 - RNA, 14 nt, Artificial Sequence
  Description of Artificial Sequence: Synthetic oligonucleotide
agcagaaauaagcg

SEQ ID NO: 146188 - RNA, 12 nt, Artificial Sequence
  Description of Artificial Sequence: Synthetic oligonucleotide
aagcgugccguu

SEQ ID NO: 146189 - RNA, 12 nt, Artificial Sequence
  Description of Artificial Sequence: Synthetic oligonucleotide
agaaacagucac

SEQ ID NO: 146190 - RNA, 12 nt, Artificial Sequence
  Description of Artificial Sequence: Synthetic oligonucleotide
agaggaagaagg

SEQ ID NO: 146191 - RNA, 14 nt, Artificial Sequence
  Description of Artificial Sequence: Synthetic oligonucleotide
uguauucaaaauau

SEQ ID NO: 146192 - RNA, 13 nt, Artificial Sequence
  Description of Artificial Sequence: Synthetic oligonucleotide
auuuuccucccuu

SEQ ID NO: 146193 - RNA, 13 nt, Artificial Sequence
  Description of Artificial Sequence: Synthetic oligonucleotide
caaagaaagauag

SEQ ID NO: 146194 - RNA, 12 nt, Artificial Sequence
  Description of Artificial Sequence: Synthetic oligonucleotide
aagaaagauaga

SEQ ID NO: 146195 - RNA, 13 nt, Artificial Sequence
  Description of Artificial Sequence: Synthetic oligonucleotide
gaaagcauuuguu

SEQ ID NO: 146196 - RNA, 13 nt, Artificial Sequence
  Description of Artificial Sequence: Synthetic oligonucleotide
ugaguuaaacgaa

SEQ ID NO: 146197 - RNA, 12 nt, Artificial Sequence
  Description of Artificial Sequence: Synthetic oligonucleotide
acugauacagaa

SEQ ID NO: 146198 - RNA, 12 nt, Artificial Sequence
  Description of Artificial Sequence: Synthetic oligonucleotide
auauuauauaua

SEQ ID NO: 146199 - RNA, 12 nt, Artificial Sequence
  Description of Artificial Sequence: Synthetic oligonucleotide
auuauauauaua

SEQ ID NO: 146200 - RNA, 12 nt, Artificial Sequence
  Description of Artificial Sequence: Synthetic oligonucleotide
ucacuggaugua

SEQ ID NO: 146201 - RNA, 12 nt, Artificial Sequence
  Description of Artificial Sequence: Synthetic oligonucleotide
cagggaagagga

SEQ ID NO: 146202 - RNA, 15 nt, Artificial Sequence
  Description of Artificial Sequence: Synthetic oligonucleotide
augaucuuuuuuuug

SEQ ID NO: 146203 - RNA, 11 nt, Artificial Sequence
  Description of Artificial Sequence: Synthetic oligonucleotide
aguucacggcc

SEQ ID NO: 146204 - RNA, 13 nt, Artificial Sequence
  Description of Artificial Sequence: Synthetic oligonucleotide
caccaucacacca

SEQ ID NO: 146205 - RNA, 11 nt, Artificial Sequence
  Description of Artificial Sequence: Synthetic oligonucleotide
ccugcggguuu

SEQ ID NO: 146206 - RNA, 10 nt, Artificial Sequence
  Description of Artificial Sequence: Synthetic oligonucleotide
auccaguuug

SEQ ID NO: 146207 - RNA, 13 nt, Artificial Sequence
  Description of Artificial Sequence: Synthetic oligonucleotide
guuaaggacuucu

SEQ ID NO: 146208 - RNA, 13 nt, Artificial Sequence
  Description of Artificial Sequence: Synthetic oligonucleotide
cagugggacagag

SEQ ID NO: 146209 - RNA, 14 nt, Artificial Sequence
  Description of Artificial Sequence: Synthetic oligonucleotide
aauuuguuauugug

SEQ ID NO: 146210 - RNA, 13 nt, Artificial Sequence
  Description of Artificial Sequence: Synthetic oligonucleotide
uucaaaugcauuu

SEQ ID NO: 146211 - RNA, 10 nt, Artificial Sequence
  Description of Artificial Sequence: Synthetic oligonucleotide
caggaaagcc

SEQ ID NO: 146212 - RNA, 11 nt, Artificial Sequence
  Description of Artificial Sequence: Synthetic oligonucleotide
aggaaagcccu

SEQ ID NO: 146213 - RNA, 12 nt, Artificial Sequence
  Description of Artificial Sequence: Synthetic oligonucleotide
cccagcauggcc

SEQ ID NO: 146214 - RNA, 11 nt, Artificial Sequence
  Description of Artificial Sequence: Synthetic oligonucleotide
cuucucccuga

SEQ ID NO: 146215 - RNA, 12 nt, Artificial Sequence
  Description of Artificial Sequence: Synthetic oligonucleotide
gaagaagcccuu

SEQ ID NO: 146216 - RNA, 12 nt, Artificial Sequence
  Description of Artificial Sequence: Synthetic oligonucleotide
agaagcccuuca

SEQ ID NO: 146217 - RNA, 11 nt, Artificial Sequence
  Description of Artificial Sequence: Synthetic oligonucleotide
gcccuucagcg

SEQ ID NO: 146218 - RNA, 11 nt, Artificial Sequence
  Description of Artificial Sequence: Synthetic oligonucleotide
ccuucagcggc

SEQ ID NO: 146219 - RNA, 12 nt, Artificial Sequence
  Description of Artificial Sequence: Synthetic oligonucleotide
ucagcggccagu

SEQ ID NO: 146220 - RNA, 12 nt, Artificial Sequence
  Description of Artificial Sequence: Synthetic oligonucleotide
ugaaaagcuccg

SEQ ID NO: 146221 - RNA, 11 nt, Artificial Sequence
  Description of Artificial Sequence: Synthetic oligonucleotide
aaaagcuccgg

SEQ ID NO: 146222 - RNA, 13 nt, Artificial Sequence
  Description of Artificial Sequence: Synthetic oligonucleotide
agucaacagucug

SEQ ID NO: 146223 - RNA, 13 nt, Artificial Sequence
  Description of Artificial Sequence: Synthetic oligonucleotide
cagaguucaaaag

SEQ ID NO: 146224 - RNA, 13 nt, Artificial Sequence
  Description of Artificial Sequence: Synthetic oligonucleotide
agaguucaaaagc

SEQ ID NO: 146225 - RNA, 12 nt, Artificial Sequence
  Description of Artificial Sequence: Synthetic oligonucleotide
uucaaaagcccu

SEQ ID NO: 146226 - RNA, 12 nt, Artificial Sequence
  Description of Artificial Sequence: Synthetic oligonucleotide
ucaaaagcccuu

SEQ ID NO: 146227 - RNA, 12 nt, Artificial Sequence
  Description of Artificial Sequence: Synthetic oligonucleotide
aaaagcccuuca

SEQ ID NO: 146228 - RNA, 12 nt, Artificial Sequence
  Description of Artificial Sequence: Synthetic oligonucleotide
aaagcccuucag

SEQ ID NO: 146229 - RNA, 13 nt, Artificial Sequence
  Description of Artificial Sequence: Synthetic oligonucleotide
gugaagccgcucg

SEQ ID NO: 146230 - RNA, 12 nt, Artificial Sequence
  Description of Artificial Sequence: Synthetic oligonucleotide
cacgccagucaa

SEQ ID NO: 146231 - RNA, 13 nt, Artificial Sequence
  Description of Artificial Sequence: Synthetic oligonucleotide
uucuuggugcgug

SEQ ID NO: 146232 - RNA, 14 nt, Artificial Sequence
  Description of Artificial Sequence: Synthetic oligonucleotide
auuggauucaucag

SEQ ID NO: 146233 - RNA, 13 nt, Artificial Sequence
  Description of Artificial Sequence: Synthetic oligonucleotide
uggaauaccuaag

SEQ ID NO: 146234 - RNA, 12 nt, Artificial Sequence
  Description of Artificial Sequence: Synthetic oligonucleotide
auuugaggcuca

SEQ ID NO: 146235 - RNA, 11 nt, Artificial Sequence
  Description of Artificial Sequence: Synthetic oligonucleotide
ucuacaauugg

SEQ ID NO: 146236 - RNA, 12 nt, Artificial Sequence
  Description of Artificial Sequence: Synthetic oligonucleotide
uaguuaggagcc

SEQ ID NO: 146237 - RNA, 13 nt, Artificial Sequence
  Description of Artificial Sequence: Synthetic oligonucleotide
agucaauauccac

SEQ ID NO: 146238 - RNA, 13 nt, Artificial Sequence
  Description of Artificial Sequence: Synthetic oligonucleotide
auguucagucaca

SEQ ID NO: 146239 - RNA, 12 nt, Artificial Sequence
  Description of Artificial Sequence: Synthetic oligonucleotide
acacacacauac

SEQ ID NO: 146240 - RNA, 12 nt, Artificial Sequence
  Description of Artificial Sequence: Synthetic oligonucleotide
uuccuuuugcuu

SEQ ID NO: 146241 - RNA, 16 nt, Artificial Sequence
  Description of Artificial Sequence: Synthetic oligonucleotide
uuuuaaaguaauuuuu

SEQ ID NO: 146242 - RNA, 13 nt, Artificial Sequence
  Description of Artificial Sequence: Synthetic oligonucleotide
caacagucaaugg

SEQ ID NO: 146243 - RNA, 13 nt, Artificial Sequence
  Description of Artificial Sequence: Synthetic oligonucleotide
ucgacaaaccaau

SEQ ID NO: 146244 - RNA, 12 nt, Artificial Sequence
  Description of Artificial Sequence: Synthetic oligonucleotide
acugcuaccacu

SEQ ID NO: 146245 - RNA, 13 nt, Artificial Sequence
  Description of Artificial Sequence: Synthetic oligonucleotide
gcaagcggucuua

SEQ ID NO: 146246 - RNA, 13 nt, Artificial Sequence
  Description of Artificial Sequence: Synthetic oligonucleotide
ggucuuaccggcu

SEQ ID NO: 146247 - RNA, 11 nt, Artificial Sequence
  Description of Artificial Sequence: Synthetic oligonucleotide
gauggguuacc

SEQ ID NO: 146248 - RNA, 11 nt, Artificial Sequence
  Description of Artificial Sequence: Synthetic oligonucleotide
guuaccugcga

SEQ ID NO: 146249 - RNA, 12 nt, Artificial Sequence
  Description of Artificial Sequence: Synthetic oligonucleotide
aaucuugcugag

SEQ ID NO: 146250 - RNA, 13 nt, Artificial Sequence
  Description of Artificial Sequence: Synthetic oligonucleotide
agcauaaaacagu

SEQ ID NO: 146251 - RNA, 12 nt, Artificial Sequence
  Description of Artificial Sequence: Synthetic oligonucleotide
guccuuuauccu

SEQ ID NO: 146252 - RNA, 12 nt, Artificial Sequence
  Description of Artificial Sequence: Synthetic oligonucleotide
caacgcaaguug

SEQ ID NO: 146253 - RNA, 13 nt, Artificial Sequence
  Description of Artificial Sequence: Synthetic oligonucleotide
aaacugaaaccau

SEQ ID NO: 146254 - RNA, 14 nt, Artificial Sequence
  Description of Artificial Sequence: Synthetic oligonucleotide
acuuuguuaaauau

SEQ ID NO: 146255 - RNA, 14 nt, Artificial Sequence
  Description of Artificial Sequence: Synthetic oligonucleotide
guauauuaaaaguu

SEQ ID NO: 146256 - RNA, 13 nt, Artificial Sequence
  Description of Artificial Sequence: Synthetic oligonucleotide
guuuugacuuaac

SEQ ID NO: 146257 - RNA, 13 nt, Artificial Sequence
  Description of Artificial Sequence: Synthetic oligonucleotide
gcaaacucagcac

SEQ ID NO: 146258 - RNA, 11 nt, Artificial Sequence
  Description of Artificial Sequence: Synthetic oligonucleotide
ugcugaccuca

SEQ ID NO: 146259 - RNA, 14 nt, Artificial Sequence
  Description of Artificial Sequence: Synthetic oligonucleotide
uuuauucagaucgc

SEQ ID NO: 146260 - RNA, 13 nt, Artificial Sequence
  Description of Artificial Sequence: Synthetic oligonucleotide
aggguucugggau

SEQ ID NO: 146261 - RNA, 15 nt, Artificial Sequence
  Description of Artificial Sequence: Synthetic oligonucleotide
auauuggaaauuaug

SEQ ID NO: 146262 - RNA, 13 nt, Artificial Sequence
  Description of Artificial Sequence: Synthetic oligonucleotide
auggaagcacuag

SEQ ID NO: 146263 - RNA, 13 nt, Artificial Sequence
  Description of Artificial Sequence: Synthetic oligonucleotide
guuuuuaugugga

SEQ ID NO: 146264 - RNA, 12 nt, Artificial Sequence
  Description of Artificial Sequence: Synthetic oligonucleotide
ggaauugguaga

SEQ ID NO: 146265 - RNA, 13 nt, Artificial Sequence
  Description of Artificial Sequence: Synthetic oligonucleotide
uuagacuuggaga

SEQ ID NO: 146266 - RNA, 13 nt, Artificial Sequence
  Description of Artificial Sequence: Synthetic oligonucleotide
uuacaguauucca

SEQ ID NO: 146267 - RNA, 15 nt, Artificial Sequence
  Description of Artificial Sequence: Synthetic oligonucleotide
ccacugaugaauuaa

SEQ ID NO: 146268 - RNA, 12 nt, Artificial Sequence
  Description of Artificial Sequence: Synthetic oligonucleotide
ccacaucaucac

SEQ ID NO: 146269 - RNA, 13 nt, Artificial Sequence
  Description of Artificial Sequence: Synthetic oligonucleotide
cucaccaaacaga

SEQ ID NO: 146270 - RNA, 12 nt, Artificial Sequence
  Description of Artificial Sequence: Synthetic oligonucleotide
ggaacaugaugg

SEQ ID NO: 146271 - RNA, 12 nt, Artificial Sequence
  Description of Artificial Sequence: Synthetic oligonucleotide
cauguagacugc

SEQ ID NO: 146272 - RNA, 13 nt, Artificial Sequence
  Description of Artificial Sequence: Synthetic oligonucleotide
ggaucuauuuaug

SEQ ID NO: 146273 - RNA, 12 nt, Artificial Sequence
  Description of Artificial Sequence: Synthetic oligonucleotide
gcacuauuauca

SEQ ID NO: 146274 - RNA, 11 nt, Artificial Sequence
  Description of Artificial Sequence: Synthetic oligonucleotide
aucaguucugc

SEQ ID NO: 146275 - RNA, 13 nt, Artificial Sequence
  Description of Artificial Sequence: Synthetic oligonucleotide
agauuaaaccuac

SEQ ID NO: 146276 - RNA, 13 nt, Artificial Sequence
  Description of Artificial Sequence: Synthetic oligonucleotide
auaaaauccuucu

SEQ ID NO: 146277 - RNA, 12 nt, Artificial Sequence
  Description of Artificial Sequence: Synthetic oligonucleotide
aaugcuguagac

SEQ ID NO: 146278 - RNA, 13 nt, Artificial Sequence
  Description of Artificial Sequence: Synthetic oligonucleotide
uugauaggaauag

SEQ ID NO: 146279 - RNA, 11 nt, Artificial Sequence
  Description of Artificial Sequence: Synthetic oligonucleotide
aauggcccuga

SEQ ID NO: 146280 - RNA, 11 nt, Artificial Sequence
  Description of Artificial Sequence: Synthetic oligonucleotide
uuccucaagca

SEQ ID NO: 146281 - RNA, 10 nt, Artificial Sequence
  Description of Artificial Sequence: Synthetic oligonucleotide
guucagccca

SEQ ID NO: 146282 - RNA, 11 nt, Artificial Sequence
  Description of Artificial Sequence: Synthetic oligonucleotide
gcugcugaacc

SEQ ID NO: 146283 - RNA, 12 nt, Artificial Sequence
  Description of Artificial Sequence: Synthetic oligonucleotide
aaguucucuuca

SEQ ID NO: 146284 - RNA, 11 nt, Artificial Sequence
  Description of Artificial Sequence: Synthetic oligonucleotide
ccagccuagag

SEQ ID NO: 146285 - RNA, 13 nt, Artificial Sequence
  Description of Artificial Sequence: Synthetic oligonucleotide
cucugugaagugu

SEQ ID NO: 146286 - RNA, 14 nt, Artificial Sequence
  Description of Artificial Sequence: Synthetic oligonucleotide
ugagaaaauuucaa

SEQ ID NO: 146287 - RNA, 11 nt, Artificial Sequence
  Description of Artificial Sequence: Synthetic oligonucleotide
aauccuccuga

SEQ ID NO: 146288 - RNA, 12 nt, Artificial Sequence
  Description of Artificial Sequence: Synthetic oligonucleotide
gugacaucauau

SEQ ID NO: 146289 - RNA, 13 nt, Artificial Sequence
  Description of Artificial Sequence: Synthetic oligonucleotide
aaucuucaucaua

SEQ ID NO: 146290 - RNA, 13 nt, Artificial Sequence
  Description of Artificial Sequence: Synthetic oligonucleotide
gacuagcuauuaa

SEQ ID NO: 146291 - RNA, 14 nt, Artificial Sequence
  Description of Artificial Sequence: Synthetic oligonucleotide
ucucuacuaaaaau

SEQ ID NO: 146292 - RNA, 12 nt, Artificial Sequence
  Description of Artificial Sequence: Synthetic oligonucleotide
ucuaucucgccu

SEQ ID NO: 146293 - RNA, 13 nt, Artificial Sequence
  Description of Artificial Sequence: Synthetic oligonucleotide
cuucgguccaguu

SEQ ID NO: 146294 - RNA, 11 nt, Artificial Sequence
  Description of Artificial Sequence: Synthetic oligonucleotide
gauguagccgc

SEQ ID NO: 146295 - RNA, 12 nt, Artificial Sequence
  Description of Artificial Sequence: Synthetic oligonucleotide
ugaggagacuug

SEQ ID NO: 146296 - RNA, 12 nt, Artificial Sequence
  Description of Artificial Sequence: Synthetic oligonucleotide
gaguagugagga

SEQ ID NO: 146297 - RNA, 14 nt, Artificial Sequence
  Description of Artificial Sequence: Synthetic oligonucleotide
cagaugaguacaaa

SEQ ID NO: 146298 - RNA, 13 nt, Artificial Sequence
  Description of Artificial Sequence: Synthetic oligonucleotide
guuguuaaugggc

SEQ ID NO: 146299 - RNA, 13 nt, Artificial Sequence
  Description of Artificial Sequence: Synthetic oligonucleotide
uuuuuaauuuauu

SEQ ID NO: 146300 - RNA, 12 nt, Artificial Sequence
  Description of Artificial Sequence: Synthetic oligonucleotide
uauuuaaauaug

SEQ ID NO: 146301 - RNA, 13 nt, Artificial Sequence
  Description of Artificial Sequence: Synthetic oligonucleotide
uauccuuuguuuc

SEQ ID NO: 146302 - RNA, 14 nt, Artificial Sequence
  Description of Artificial Sequence: Synthetic oligonucleotide
cgucuaaguguuug

SEQ ID NO: 146303 - RNA, 12 nt, Artificial Sequence
  Description of Artificial Sequence: Synthetic oligonucleotide
accugugacaaa

SEQ ID NO: 146304 - RNA, 13 nt, Artificial Sequence
  Description of Artificial Sequence: Synthetic oligonucleotide
ccaggcugaauua

SEQ ID NO: 146305 - RNA, 14 nt, Artificial Sequence
  Description of Artificial Sequence: Synthetic oligonucleotide
gucauucuuacaau

SEQ ID NO: 146306 - RNA, 15 nt, Artificial Sequence
  Description of Artificial Sequence: Synthetic oligonucleotide
ucauucuuacaauug

SEQ ID NO: 146307 - RNA, 12 nt, Artificial Sequence
  Description of Artificial Sequence: Synthetic oligonucleotide
cagagaguguac

SEQ ID NO: 146308 - RNA, 12 nt, Artificial Sequence
  Description of Artificial Sequence: Synthetic oligonucleotide
agaacucagcag

SEQ ID NO: 146309 - RNA, 13 nt, Artificial Sequence
  Description of Artificial Sequence: Synthetic oligonucleotide
uuuauuuucagua

SEQ ID NO: 146310 - RNA, 12 nt, Artificial Sequence
  Description of Artificial Sequence: Synthetic oligonucleotide
ucuuaaauggaa

SEQ ID NO: 146311 - RNA, 13 nt, Artificial Sequence
  Description of Artificial Sequence: Synthetic oligonucleotide
ugccuaaaauugu

SEQ ID NO: 146312 - RNA, 12 nt, Artificial Sequence
  Description of Artificial Sequence: Synthetic oligonucleotide
agacugugagcu

SEQ ID NO: 146313 - RNA, 14 nt, Artificial Sequence
  Description of Artificial Sequence: Synthetic oligonucleotide
ugcuuuuuauuaau

SEQ ID NO: 146314 - RNA, 13 nt, Artificial Sequence
  Description of Artificial Sequence: Synthetic oligonucleotide
cucuucuuacauu

SEQ ID NO: 146315 - RNA, 15 nt, Artificial Sequence
  Description of Artificial Sequence: Synthetic oligonucleotide
cauuuguaaaaaugu

SEQ ID NO: 146316 - RNA, 15 nt, Artificial Sequence
  Description of Artificial Sequence: Synthetic oligonucleotide
aucuuaauucauauu

SEQ ID NO: 146317 - RNA, 13 nt, Artificial Sequence
  Description of Artificial Sequence: Synthetic oligonucleotide
gaacuaaucauga

SEQ ID NO: 146318 - RNA, 12 nt, Artificial Sequence
  Description of Artificial Sequence: Synthetic oligonucleotide
ucugcucuuggg

SEQ ID NO: 146319 - RNA, 13 nt, Artificial Sequence
  Description of Artificial Sequence: Synthetic oligonucleotide
caguagcuuugag

SEQ ID NO: 146320 - RNA, 14 nt, Artificial Sequence
  Description of Artificial Sequence: Synthetic oligonucleotide
cacguaauauuuca

SEQ ID NO: 146321 - RNA, 13 nt, Artificial Sequence
  Description of Artificial Sequence: Synthetic oligonucleotide
uauucucuucacu

SEQ ID NO: 146322 - RNA, 14 nt, Artificial Sequence
  Description of Artificial Sequence: Synthetic oligonucleotide
cuaaugcuaagaaa

SEQ ID NO: 146323 - RNA, 12 nt, Artificial Sequence
  Description of Artificial Sequence: Synthetic oligonucleotide
gcugaaaaucaa

SEQ ID NO: 146324 - RNA, 14 nt, Artificial Sequence
  Description of Artificial Sequence: Synthetic oligonucleotide
aauaugauuacuuu

SEQ ID NO: 146325 - RNA, 14 nt, Artificial Sequence
  Description of Artificial Sequence: Synthetic oligonucleotide
cauuuuguucuaca

SEQ ID NO: 146326 - RNA, 12 nt, Artificial Sequence
  Description of Artificial Sequence: Synthetic oligonucleotide
cccgggacucuc

SEQ ID NO: 146327 - RNA, 14 nt, Artificial Sequence
  Description of Artificial Sequence: Synthetic oligonucleotide
ccuuuaaaguaaag

SEQ ID NO: 146328 - RNA, 13 nt, Artificial Sequence
  Description of Artificial Sequence: Synthetic oligonucleotide
ucuggaagccugg

SEQ ID NO: 146329 - RNA, 14 nt, Artificial Sequence
  Description of Artificial Sequence: Synthetic oligonucleotide
aaaacaaaagagag

SEQ ID NO: 146330 - RNA, 13 nt, Artificial Sequence
  Description of Artificial Sequence: Synthetic oligonucleotide
aucaguuaugccg

SEQ ID NO: 146331 - RNA, 13 nt, Artificial Sequence
  Description of Artificial Sequence: Synthetic oligonucleotide
uaaaagaagucca

SEQ ID NO: 146332 - RNA, 11 nt, Artificial Sequence
  Description of Artificial Sequence: Synthetic oligonucleotide
aggugagguua

SEQ ID NO: 146333 - RNA, 11 nt, Artificial Sequence
  Description of Artificial Sequence: Synthetic oligonucleotide
gggaagaggac

SEQ ID NO: 146334 - RNA, 13 nt, Artificial Sequence
  Description of Artificial Sequence: Synthetic oligonucleotide
aagcaaguauugu

SEQ ID NO: 146335 - RNA, 12 nt, Artificial Sequence
  Description of Artificial Sequence: Synthetic oligonucleotide
auuguagcacuc

SEQ ID NO: 146336 - RNA, 14 nt, Artificial Sequence
  Description of Artificial Sequence: Synthetic oligonucleotide
acaaaaccacaaau

SEQ ID NO: 146337 - RNA, 12 nt, Artificial Sequence
  Description of Artificial Sequence: Synthetic oligonucleotide
uaagcccauaca

SEQ ID NO: 146338 - RNA, 11 nt, Artificial Sequence
  Description of Artificial Sequence: Synthetic oligonucleotide
agcccauacag

SEQ ID NO: 146339 - RNA, 12 nt, Artificial Sequence
  Description of Artificial Sequence: Synthetic oligonucleotide
cagaaaccuucc

SEQ ID NO: 146340 - RNA, 10 nt, Artificial Sequence
  Description of Artificial Sequence: Synthetic oligonucleotide
guauaccuac

SEQ ID NO: 146341 - RNA, 13 nt, Artificial Sequence
  Description of Artificial Sequence: Synthetic oligonucleotide
gccaguuuucgga

SEQ ID NO: 146342 - RNA, 9 nt, Artificial Sequence
  Description of Artificial Sequence: Synthetic oligonucleotide
ggaacaggg

SEQ ID NO: 146343 - RNA, 13 nt, Artificial Sequence
  Description of Artificial Sequence: Synthetic oligonucleotide
uuaacuuuccagu

SEQ ID NO: 146344 - RNA, 14 nt, Artificial Sequence
  Description of Artificial Sequence: Synthetic oligonucleotide
aaaguuugguuuug

SEQ ID NO: 146345 - RNA, 12 nt, Artificial Sequence
  Description of Artificial Sequence: Synthetic oligonucleotide
cuucccacugua

SEQ ID NO: 146346 - RNA, 13 nt, Artificial Sequence
  Description of Artificial Sequence: Synthetic oligonucleotide
ugauaccauauga

SEQ ID NO: 146347 - RNA, 11 nt, Artificial Sequence
  Description of Artificial Sequence: Synthetic oligonucleotide
aacaugggcug

SEQ ID NO: 146348 - RNA, 13 nt, Artificial Sequence
  Description of Artificial Sequence: Synthetic oligonucleotide
caacuuuuucaua

SEQ ID NO: 146349 - RNA, 12 nt, Artificial Sequence
  Description of Artificial Sequence: Synthetic oligonucleotide
caugaggccgga

SEQ ID NO: 146350 - RNA, 11 nt, Artificial Sequence
  Description of Artificial Sequence: Synthetic oligonucleotide
acugcauuugu

SEQ ID NO: 146351 - RNA, 13 nt, Artificial Sequence
  Description of Artificial Sequence: Synthetic oligonucleotide
aauguuuacuacc

SEQ ID NO: 146352 - RNA, 15 nt, Artificial Sequence
  Description of Artificial Sequence: Synthetic oligonucleotide
aauuuuuugaugaaa

SEQ ID NO: 146353 - RNA, 14 nt, Artificial Sequence
  Description of Artificial Sequence: Synthetic oligonucleotide
cagugugugaauuu

SEQ ID NO: 146354 - RNA, 13 nt, Artificial Sequence
  Description of Artificial Sequence: Synthetic oligonucleotide
gagcaauguaugu

SEQ ID NO: 146355 - RNA, 14 nt, Artificial Sequence
  Description of Artificial Sequence: Synthetic oligonucleotide
aaagcacauauaua

SEQ ID NO: 146356 - RNA, 14 nt, Artificial Sequence
  Description of Artificial Sequence: Synthetic oligonucleotide
guaauaguuucucc

SEQ ID NO: 146357 - RNA, 13 nt, Artificial Sequence
  Description of Artificial Sequence: Synthetic oligonucleotide
aguuucuccaaau

SEQ ID NO: 146358 - RNA, 13 nt, Artificial Sequence
  Description of Artificial Sequence: Synthetic oligonucleotide
uacuuccuagaaa

SEQ ID NO: 146359 - RNA, 13 nt, Artificial Sequence
  Description of Artificial Sequence: Synthetic oligonucleotide
uacaccauauaug

SEQ ID NO: 146360 - RNA, 14 nt, Artificial Sequence
  Description of Artificial Sequence: Synthetic oligonucleotide
auauaugaauggag

SEQ ID NO: 146361 - RNA, 13 nt, Artificial Sequence
  Description of Artificial Sequence: Synthetic oligonucleotide
acgagaagaagau

SEQ ID NO: 146362 - RNA, 13 nt, Artificial Sequence
  Description of Artificial Sequence: Synthetic oligonucleotide
ucauuuacaggga

SEQ ID NO: 146363 - RNA, 13 nt, Artificial Sequence
  Description of Artificial Sequence: Synthetic oligonucleotide
cauuuacagggac

SEQ ID NO: 146364 - RNA, 10 nt, Artificial Sequence
  Description of Artificial Sequence: Synthetic oligonucleotide
agggaccuga

SEQ ID NO: 146365 - RNA, 14 nt, Artificial Sequence
  Description of Artificial Sequence: Synthetic oligonucleotide
uguuugacugcauc

SEQ ID NO: 146366 - RNA, 13 nt, Artificial Sequence
  Description of Artificial Sequence: Synthetic oligonucleotide
uuugacugcaucg

SEQ ID NO: 146367 - RNA, 12 nt, Artificial Sequence
  Description of Artificial Sequence: Synthetic oligonucleotide
gaguucacaggg

SEQ ID NO: 146368 - RNA, 13 nt, Artificial Sequence
  Description of Artificial Sequence: Synthetic oligonucleotide
ggcaccucugucc

SEQ ID NO: 146369 - RNA, 15 nt, Artificial Sequence
  Description of Artificial Sequence: Synthetic oligonucleotide
gguuugucuuuuuaa

SEQ ID NO: 146370 - RNA, 14 nt, Artificial Sequence
  Description of Artificial Sequence: Synthetic oligonucleotide
uuugucuuuuuaag

SEQ ID NO: 146371 - RNA, 13 nt, Artificial Sequence
  Description of Artificial Sequence: Synthetic oligonucleotide
ccuaaagguuguc

SEQ ID NO: 146372 - RNA, 12 nt, Artificial Sequence
  Description of Artificial Sequence: Synthetic oligonucleotide
aagguugucgac

SEQ ID NO: 146373 - RNA, 13 nt, Artificial Sequence
  Description of Artificial Sequence: Synthetic oligonucleotide
accuggcaauugu

SEQ ID NO: 146374 - RNA, 12 nt, Artificial Sequence
  Description of Artificial Sequence: Synthetic oligonucleotide
aguggugcgagg

SEQ ID NO: 146375 - RNA, 13 nt, Artificial Sequence
  Description of Artificial Sequence: Synthetic oligonucleotide
agagacaugaaau

SEQ ID NO: 146376 - RNA, 13 nt, Artificial Sequence
  Description of Artificial Sequence: Synthetic oligonucleotide
auauauuucucca

SEQ ID NO: 146377 - RNA, 10 nt, Artificial Sequence
  Description of Artificial Sequence: Synthetic oligonucleotide
caugaaggcu

SEQ ID NO: 146378 - RNA, 11 nt, Artificial Sequence
  Description of Artificial Sequence: Synthetic oligonucleotide
gcuggaguggu

SEQ ID NO: 146379 - RNA, 11 nt, Artificial Sequence
  Description of Artificial Sequence: Synthetic oligonucleotide
aggaagagagg

SEQ ID NO: 146380 - RNA, 12 nt, Artificial Sequence
  Description of Artificial Sequence: Synthetic oligonucleotide
cuugcaucgggc

SEQ ID NO: 146381 - RNA, 13 nt, Artificial Sequence
  Description of Artificial Sequence: Synthetic oligonucleotide
auauccuacugug

SEQ ID NO: 146382 - RNA, 13 nt, Artificial Sequence
  Description of Artificial Sequence: Synthetic oligonucleotide
uccuacuguguaa

SEQ ID NO: 146383 - RNA, 12 nt, Artificial Sequence
  Description of Artificial Sequence: Synthetic oligonucleotide
ccuuguagugua

SEQ ID NO: 146384 - RNA, 13 nt, Artificial Sequence
  Description of Artificial Sequence: Synthetic oligonucleotide
ucuuuguugauug

SEQ ID NO: 146385 - RNA, 14 nt, Artificial Sequence
  Description of Artificial Sequence: Synthetic oligonucleotide
uuuguugauugaaa

SEQ ID NO: 146386 - RNA, 15 nt, Artificial Sequence
  Description of Artificial Sequence: Synthetic oligonucleotide
uucuuuuucuuccau

SEQ ID NO: 146387 - RNA, 13 nt, Artificial Sequence
  Description of Artificial Sequence: Synthetic oligonucleotide
aaucuuccuucua

SEQ ID NO: 146388 - RNA, 13 nt, Artificial Sequence
  Description of Artificial Sequence: Synthetic oligonucleotide
uugaaugcuucau

SEQ ID NO: 146389 - RNA, 13 nt, Artificial Sequence
  Description of Artificial Sequence: Synthetic oligonucleotide
ugaaugcuucaug

SEQ ID NO: 146390 - RNA, 13 nt, Artificial Sequence
  Description of Artificial Sequence: Synthetic oligonucleotide
aauucuacuuuga

SEQ ID NO: 146391 - RNA, 13 nt, Artificial Sequence
  Description of Artificial Sequence: Synthetic oligonucleotide
agcaacuacagac

SEQ ID NO: 146392 - RNA, 13 nt, Artificial Sequence
  Description of Artificial Sequence: Synthetic oligonucleotide
gaccaaggucaac

SEQ ID NO: 146393 - RNA, 13 nt, Artificial Sequence
  Description of Artificial Sequence: Synthetic oligonucleotide
cgacuaucucgac

SEQ ID NO: 146394 - RNA, 13 nt, Artificial Sequence
  Description of Artificial Sequence: Synthetic oligonucleotide
aaccuucccaaac

SEQ ID NO: 146395 - RNA, 14 nt, Artificial Sequence
  Description of Artificial Sequence: Synthetic oligonucleotide
ccaagcuuagaacu

SEQ ID NO: 146396 - RNA, 15 nt, Artificial Sequence
  Description of Artificial Sequence: Synthetic oligonucleotide
agcuuagaacuuuaa

SEQ ID NO: 146397 - RNA, 11 nt, Artificial Sequence
  Description of Artificial Sequence: Synthetic oligonucleotide
aagaccaccac

SEQ ID NO: 146398 - RNA, 14 nt, Artificial Sequence
  Description of Artificial Sequence: Synthetic oligonucleotide
gcgagaaauaaagu

SEQ ID NO: 146399 - RNA, 14 nt, Artificial Sequence
  Description of Artificial Sequence: Synthetic oligonucleotide
cgagaaauaaaguu

SEQ ID NO: 146400 - RNA, 12 nt, Artificial Sequence
  Description of Artificial Sequence: Synthetic oligonucleotide
aggaaaugaucc

SEQ ID NO: 146401 - RNA, 13 nt, Artificial Sequence
  Description of Artificial Sequence: Synthetic oligonucleotide
gaagaaaugaaac

SEQ ID NO: 146402 - RNA, 13 nt, Artificial Sequence
  Description of Artificial Sequence: Synthetic oligonucleotide
guuuccauccucc

SEQ ID NO: 146403 - RNA, 15 nt, Artificial Sequence
  Description of Artificial Sequence: Synthetic oligonucleotide
acugaaaaucuuuga

SEQ ID NO: 146404 - RNA, 11 nt, Artificial Sequence
  Description of Artificial Sequence: Synthetic oligonucleotide
ugccguucagg

SEQ ID NO: 146405 - RNA, 13 nt, Artificial Sequence
  Description of Artificial Sequence: Synthetic oligonucleotide
caggguccagaag

SEQ ID NO: 146406 - RNA, 13 nt, Artificial Sequence
  Description of Artificial Sequence: Synthetic oligonucleotide
ucaagacugcuug

SEQ ID NO: 146407 - RNA, 13 nt, Artificial Sequence
  Description of Artificial Sequence: Synthetic oligonucleotide
uccaugucuuugg

SEQ ID NO: 146408 - RNA, 11 nt, Artificial Sequence
  Description of Artificial Sequence: Synthetic oligonucleotide
gccugaaacac

SEQ ID NO: 146409 - RNA, 12 nt, Artificial Sequence
  Description of Artificial Sequence: Synthetic oligonucleotide
ucucuguaccuc

SEQ ID NO: 146410 - RNA, 12 nt, Artificial Sequence
  Description of Artificial Sequence: Synthetic oligonucleotide
agcaagacaaga

SEQ ID NO: 146411 - RNA, 13 nt, Artificial Sequence
  Description of Artificial Sequence: Synthetic oligonucleotide
gcaagacaagaaa

SEQ ID NO: 146412 - RNA, 12 nt, Artificial Sequence
  Description of Artificial Sequence: Synthetic oligonucleotide
uguacaagaucc

SEQ ID NO: 146413 - RNA, 12 nt, Artificial Sequence
  Description of Artificial Sequence: Synthetic oligonucleotide
cguacuugcaga

SEQ ID NO: 146414 - RNA, 13 nt, Artificial Sequence
  Description of Artificial Sequence: Synthetic oligonucleotide
cgaucgauacaga

SEQ ID NO: 146415 - RNA, 13 nt, Artificial Sequence
  Description of Artificial Sequence: Synthetic oligonucleotide
uauaaaaauaaau

SEQ ID NO: 146416 - RNA, 13 nt, Artificial Sequence
  Description of Artificial Sequence: Synthetic oligonucleotide
uaaaaauaaauau

SEQ ID NO: 146417 - RNA, 13 nt, Artificial Sequence
  Description of Artificial Sequence: Synthetic oligonucleotide
uuugacugcugug

SEQ ID NO: 146418 - RNA, 13 nt, Artificial Sequence
  Description of Artificial Sequence: Synthetic oligonucleotide
ggagaugagagac

SEQ ID NO: 146419 - RNA, 10 nt, Artificial Sequence
  Description of Artificial Sequence: Synthetic oligonucleotide
ucccacuugg

SEQ ID NO: 146420 - RNA, 10 nt, Artificial Sequence
  Description of Artificial Sequence: Synthetic oligonucleotide
guucacggcc

SEQ ID NO: 146421 - RNA, 12 nt, Artificial Sequence
  Description of Artificial Sequence: Synthetic oligonucleotide
accaucacacca

SEQ ID NO: 146422 - RNA, 10 nt, Artificial Sequence
  Description of Artificial Sequence: Synthetic oligonucleotide
cugcggguuu

SEQ ID NO: 146423 - RNA, 9 nt, Artificial Sequence
  Description of Artificial Sequence: Synthetic oligonucleotide
uccaguuug

SEQ ID NO: 146424 - RNA, 12 nt, Artificial Sequence
  Description of Artificial Sequence: Synthetic oligonucleotide
uuaaggacuucu

SEQ ID NO: 146425 - RNA, 12 nt, Artificial Sequence
  Description of Artificial Sequence: Synthetic oligonucleotide
agugggacagag

SEQ ID NO: 146426 - RNA, 13 nt, Artificial Sequence
  Description of Artificial Sequence: Synthetic oligonucleotide
auuuguuauugug

SEQ ID NO: 146427 - RNA, 12 nt, Artificial Sequence
  Description of Artificial Sequence: Synthetic oligonucleotide
ucaaaugcauuu

SEQ ID NO: 146428 - RNA, 9 nt, Artificial Sequence
  Description of Artificial Sequence: Synthetic oligonucleotide
aggaaagcc

SEQ ID NO: 146429 - RNA, 10 nt, Artificial Sequence
  Description of Artificial Sequence: Synthetic oligonucleotide
ggaaagcccu

SEQ ID NO: 146430 - RNA, 11 nt, Artificial Sequence
  Description of Artificial Sequence: Synthetic oligonucleotide
ccagcauggcc

SEQ ID NO: 146431 - RNA, 10 nt, Artificial Sequence
  Description of Artificial Sequence: Synthetic oligonucleotide
uucucccuga

SEQ ID NO: 146432 - RNA, 11 nt, Artificial Sequence
  Description of Artificial Sequence: Synthetic oligonucleotide
aagaagcccuu

SEQ ID NO: 146433 - RNA, 11 nt, Artificial Sequence
  Description of Artificial Sequence: Synthetic oligonucleotide
gaagcccuuca

SEQ ID NO: 146434 - RNA, 10 nt, Artificial Sequence
  Description of Artificial Sequence: Synthetic oligonucleotide
cccuucagcg

SEQ ID NO: 146435 - RNA, 10 nt, Artificial Sequence
  Description of Artificial Sequence: Synthetic oligonucleotide
cuucagcggc

SEQ ID NO: 146436 - RNA, 11 nt, Artificial Sequence
  Description of Artificial Sequence: Synthetic oligonucleotide
cagcggccagu

SEQ ID NO: 146437 - RNA, 11 nt, Artificial Sequence
  Description of Artificial Sequence: Synthetic oligonucleotide
gaaaagcuccg

SEQ ID NO: 146438 - RNA, 10 nt, Artificial Sequence
  Description of Artificial Sequence: Synthetic oligonucleotide
aaagcuccgg

SEQ ID NO: 146439 - RNA, 12 nt, Artificial Sequence
  Description of Artificial Sequence: Synthetic oligonucleotide
gucaacagucug

SEQ ID NO: 146440 - RNA, 12 nt, Artificial Sequence
  Description of Artificial Sequence: Synthetic oligonucleotide
agaguucaaaag

SEQ ID NO: 146441 - RNA, 12 nt, Artificial Sequence
  Description of Artificial Sequence: Synthetic oligonucleotide
gaguucaaaagc

SEQ ID NO: 146442 - RNA, 11 nt, Artificial Sequence
  Description of Artificial Sequence: Synthetic oligonucleotide
ucaaaagcccu

SEQ ID NO: 146443 - RNA, 11 nt, Artificial Sequence
  Description of Artificial Sequence: Synthetic oligonucleotide
caaaagcccuu

SEQ ID NO: 146444 - RNA, 11 nt, Artificial Sequence
  Description of Artificial Sequence: Synthetic oligonucleotide
aaagcccuuca

SEQ ID NO: 146445 - RNA, 11 nt, Artificial Sequence
  Description of Artificial Sequence: Synthetic oligonucleotide
aagcccuucag

SEQ ID NO: 146446 - RNA, 12 nt, Artificial Sequence
  Description of Artificial Sequence: Synthetic oligonucleotide
ugaagccgcucg

SEQ ID NO: 146447 - RNA, 11 nt, Artificial Sequence
  Description of Artificial Sequence: Synthetic oligonucleotide
acgccagucaa

SEQ ID NO: 146448 - RNA, 12 nt, Artificial Sequence
  Description of Artificial Sequence: Synthetic oligonucleotide
ucuuggugcgug

SEQ ID NO: 146449 - RNA, 13 nt, Artificial Sequence
  Description of Artificial Sequence: Synthetic oligonucleotide
uuggauucaucag

SEQ ID NO: 146450 - RNA, 12 nt, Artificial Sequence
  Description of Artificial Sequence: Synthetic oligonucleotide
ggaauaccuaag

SEQ ID NO: 146451 - RNA, 11 nt, Artificial Sequence
  Description of Artificial Sequence: Synthetic oligonucleotide
uuugaggcuca

SEQ ID NO: 146452 - RNA, 10 nt, Artificial Sequence
  Description of Artificial Sequence: Synthetic oligonucleotide
cuacaauugg

SEQ ID NO: 146453 - RNA, 11 nt, Artificial Sequence
  Description of Artificial Sequence: Synthetic oligonucleotide
aguuaggagcc

SEQ ID NO: 146454 - RNA, 12 nt, Artificial Sequence
  Description of Artificial Sequence: Synthetic oligonucleotide
gucaauauccac

SEQ ID NO: 146455 - RNA, 12 nt, Artificial Sequence
  Description of Artificial Sequence: Synthetic oligonucleotide
uguucagucaca

SEQ ID NO: 146456 - RNA, 11 nt, Artificial Sequence
  Description of Artificial Sequence: Synthetic oligonucleotide
cacacacauac

SEQ ID NO: 146457 - RNA, 11 nt, Artificial Sequence
  Description of Artificial Sequence: Synthetic oligonucleotide
uccuuuugcuu

SEQ ID NO: 146458 - RNA, 15 nt, Artificial Sequence
  Description of Artificial Sequence: Synthetic oligonucleotide
uuuaaaguaauuuuu

SEQ ID NO: 146459 - RNA, 12 nt, Artificial Sequence
  Description of Artificial Sequence: Synthetic oligonucleotide
aacagucaaugg

SEQ ID NO: 146460 - RNA, 12 nt, Artificial Sequence
  Description of Artificial Sequence: Synthetic oligonucleotide
cgacaaaccaau

SEQ ID NO: 146461 - RNA, 11 nt, Artificial Sequence
  Description of Artificial Sequence: Synthetic oligonucleotide
cugcuaccacu

SEQ ID NO: 146462 - RNA, 12 nt, Artificial Sequence
  Description of Artificial Sequence: Synthetic oligonucleotide
caagcggucuua

SEQ ID NO: 146463 - RNA, 12 nt, Artificial Sequence
  Description of Artificial Sequence: Synthetic oligonucleotide
gucuuaccggcu

SEQ ID NO: 146464 - RNA, 10 nt, Artificial Sequence
  Description of Artificial Sequence: Synthetic oligonucleotide
auggguuacc

SEQ ID NO: 146465 - RNA, 10 nt, Artificial Sequence
  Description of Artificial Sequence: Synthetic oligonucleotide
uuaccugcga

SEQ ID NO: 146466 - RNA, 11 nt, Artificial Sequence
  Description of Artificial Sequence: Synthetic oligonucleotide
aucuugcugag

SEQ ID NO: 146467 - RNA, 12 nt, Artificial Sequence
  Description of Artificial Sequence: Synthetic oligonucleotide
gcauaaaacagu

SEQ ID NO: 146468 - RNA, 11 nt, Artificial Sequence
  Description of Artificial Sequence: Synthetic oligonucleotide
uccuuuauccu

SEQ ID NO: 146469 - RNA, 11 nt, Artificial Sequence
  Description of Artificial Sequence: Synthetic oligonucleotide
aacgcaaguug

SEQ ID NO: 146470 - RNA, 12 nt, Artificial Sequence
  Description of Artificial Sequence: Synthetic oligonucleotide
aacugaaaccau

SEQ ID NO: 146471 - RNA, 13 nt, Artificial Sequence
  Description of Artificial Sequence: Synthetic oligonucleotide
cuuuguuaaauau

SEQ ID NO: 146472 - RNA, 13 nt, Artificial Sequence
  Description of Artificial Sequence: Synthetic oligonucleotide
uauauuaaaaguu

SEQ ID NO: 146473 - RNA, 12 nt, Artificial Sequence
  Description of Artificial Sequence: Synthetic oligonucleotide
uuuugacuuaac

SEQ ID NO: 146474 - RNA, 12 nt, Artificial Sequence
  Description of Artificial Sequence: Synthetic oligonucleotide
caaacucagcac

SEQ ID NO: 146475 - RNA, 10 nt, Artificial Sequence
  Description of Artificial Sequence: Synthetic oligonucleotide
gcugaccuca

SEQ ID NO: 146476 - RNA, 13 nt, Artificial Sequence
  Description of Artificial Sequence: Synthetic oligonucleotide
uuauucagaucgc

SEQ ID NO: 146477 - RNA, 12 nt, Artificial Sequence
  Description of Artificial Sequence: Synthetic oligonucleotide
ggguucugggau

SEQ ID NO: 146478 - RNA, 14 nt, Artificial Sequence
  Description of Artificial Sequence: Synthetic oligonucleotide
uauuggaaauuaug

SEQ ID NO: 146479 - RNA, 12 nt, Artificial Sequence
  Description of Artificial Sequence: Synthetic oligonucleotide
uggaagcacuag

SEQ ID NO: 146480 - RNA, 12 nt, Artificial Sequence
  Description of Artificial Sequence: Synthetic oligonucleotide
uuuuuaugugga

SEQ ID NO: 146481 - RNA, 11 nt, Artificial Sequence
  Description of Artificial Sequence: Synthetic oligonucleotide
gaauugguaga

SEQ ID NO: 146482 - RNA, 12 nt, Artificial Sequence
  Description of Artificial Sequence: Synthetic oligonucleotide
uagacuuggaga

SEQ ID NO: 146483 - RNA, 12 nt, Artificial Sequence
  Description of Artificial Sequence: Synthetic oligonucleotide
uacaguauucca

SEQ ID NO: 146484 - RNA, 14 nt, Artificial Sequence
  Description of Artificial Sequence: Synthetic oligonucleotide
cacugaugaauuaa

SEQ ID NO: 146485 - RNA, 11 nt, Artificial Sequence
  Description of Artificial Sequence: Synthetic oligonucleotide
cacaucaucac

SEQ ID NO: 146486 - RNA, 12 nt, Artificial Sequence
  Description of Artificial Sequence: Synthetic oligonucleotide
ucaccaaacaga

SEQ ID NO: 146487 - RNA, 11 nt, Artificial Sequence
  Description of Artificial Sequence: Synthetic oligonucleotide
gaacaugaugg

SEQ ID NO: 146488 - RNA, 11 nt, Artificial Sequence
  Description of Artificial Sequence: Synthetic oligonucleotide
auguagacugc

SEQ ID NO: 146489 - RNA, 12 nt, Artificial Sequence
  Description of Artificial Sequence: Synthetic oligonucleotide
gaucuauuuaug

SEQ ID NO: 146490 - RNA, 11 nt, Artificial Sequence
  Description of Artificial Sequence: Synthetic oligonucleotide
cacuauuauca

SEQ ID NO: 146491 - RNA, 10 nt, Artificial Sequence
  Description of Artificial Sequence: Synthetic oligonucleotide
ucaguucugc

SEQ ID NO: 146492 - RNA, 12 nt, Artificial Sequence
  Description of Artificial Sequence: Synthetic oligonucleotide
gauuaaaccuac

SEQ ID NO: 146493 - RNA, 12 nt, Artificial Sequence
  Description of Artificial Sequence: Synthetic oligonucleotide
uaaaauccuucu

SEQ ID NO: 146494 - RNA, 11 nt, Artificial Sequence
  Description of Artificial Sequence: Synthetic oligonucleotide
augcuguagac

SEQ ID NO: 146495 - RNA, 12 nt, Artificial Sequence
  Description of Artificial Sequence: Synthetic oligonucleotide
ugauaggaauag

SEQ ID NO: 146496 - RNA, 10 nt, Artificial Sequence
  Description of Artificial Sequence: Synthetic oligonucleotide
auggcccuga

SEQ ID NO: 146497 - RNA, 10 nt, Artificial Sequence
  Description of Artificial Sequence: Synthetic oligonucleotide
uccucaagca

SEQ ID NO: 146498 - RNA, 9 nt, Artificial Sequence
  Description of Artificial Sequence: Synthetic oligonucleotide
uucagccca

SEQ ID NO: 146499 - RNA, 10 nt, Artificial Sequence
  Description of Artificial Sequence: Synthetic oligonucleotide
cugcugaacc

SEQ ID NO: 146500 - RNA, 11 nt, Artificial Sequence
  Description of Artificial Sequence: Synthetic oligonucleotide
aguucucuuca

SEQ ID NO: 146501 - RNA, 10 nt, Artificial Sequence
  Description of Artificial Sequence: Synthetic oligonucleotide
cagccuagag

SEQ ID NO: 146502 - RNA, 12 nt, Artificial Sequence
  Description of Artificial Sequence: Synthetic oligonucleotide
ucugugaagugu

SEQ ID NO: 146503 - RNA, 13 nt, Artificial Sequence
  Description of Artificial Sequence: Synthetic oligonucleotide
gagaaaauuucaa

SEQ ID NO: 146504 - RNA, 10 nt, Artificial Sequence
  Description of Artificial Sequence: Synthetic oligonucleotide
auccuccuga

SEQ ID NO: 146505 - RNA, 11 nt, Artificial Sequence
  Description of Artificial Sequence: Synthetic oligonucleotide
ugacaucauau

SEQ ID NO: 146506 - RNA, 12 nt, Artificial Sequence
  Description of Artificial Sequence: Synthetic oligonucleotide
aucuucaucaua

SEQ ID NO: 146507 - RNA, 12 nt, Artificial Sequence
  Description of Artificial Sequence: Synthetic oligonucleotide
acuagcuauuaa

SEQ ID NO: 146508 - RNA, 13 nt, Artificial Sequence
  Description of Artificial Sequence: Synthetic oligonucleotide
cucuacuaaaaau

SEQ ID NO: 146509 - RNA, 11 nt, Artificial Sequence
  Description of Artificial Sequence: Synthetic oligonucleotide
cuaucucgccu

SEQ ID NO: 146510 - RNA, 12 nt, Artificial Sequence
  Description of Artificial Sequence: Synthetic oligonucleotide
uucgguccaguu

SEQ ID NO: 146511 - RNA, 10 nt, Artificial Sequence
  Description of Artificial Sequence: Synthetic oligonucleotide
auguagccgc

SEQ ID NO: 146512 - RNA, 11 nt, Artificial Sequence
  Description of Artificial Sequence: Synthetic oligonucleotide
gaggagacuug

SEQ ID NO: 146513 - RNA, 11 nt, Artificial Sequence
  Description of Artificial Sequence: Synthetic oligonucleotide
aguagugagga

SEQ ID NO: 146514 - RNA, 13 nt, Artificial Sequence
  Description of Artificial Sequence: Synthetic oligonucleotide
agaugaguacaaa

SEQ ID NO: 146515 - RNA, 12 nt, Artificial Sequence
  Description of Artificial Sequence: Synthetic oligonucleotide
uuguuaaugggc

SEQ ID NO: 146516 - RNA, 12 nt, Artificial Sequence
  Description of Artificial Sequence: Synthetic oligonucleotide
uuuuaauuuauu

SEQ ID NO: 146517 - RNA, 11 nt, Artificial Sequence
  Description of Artificial Sequence: Synthetic oligonucleotide
auuuaaauaug

SEQ ID NO: 146518 - RNA, 12 nt, Artificial Sequence
  Description of Artificial Sequence: Synthetic oligonucleotide
auccuuuguuuc

SEQ ID NO: 146519 - RNA, 13 nt, Artificial Sequence
  Description of Artificial Sequence: Synthetic oligonucleotide
gucuaaguguuug

SEQ ID NO: 146520 - RNA, 11 nt, Artificial Sequence
  Description of Artificial Sequence: Synthetic oligonucleotide
ccugugacaaa

SEQ ID NO: 146521 - RNA, 12 nt, Artificial Sequence
  Description of Artificial Sequence: Synthetic oligonucleotide
caggcugaauua

SEQ ID NO: 146522 - RNA, 13 nt, Artificial Sequence
  Description of Artificial Sequence: Synthetic oligonucleotide
ucauucuuacaau

SEQ ID NO: 146523 - RNA, 14 nt, Artificial Sequence
  Description of Artificial Sequence: Synthetic oligonucleotide
cauucuuacaauug

SEQ ID NO: 146524 - RNA, 11 nt, Artificial Sequence
  Description of Artificial Sequence: Synthetic oligonucleotide
agagaguguac

SEQ ID NO: 146525 - RNA, 11 nt, Artificial Sequence
  Description of Artificial Sequence: Synthetic oligonucleotide
gaacucagcag

SEQ ID NO: 146526 - RNA, 12 nt, Artificial Sequence
  Description of Artificial Sequence: Synthetic oligonucleotide
uuauuuucagua

SEQ ID NO: 146527 - RNA, 11 nt, Artificial Sequence
  Description of Artificial Sequence: Synthetic oligonucleotide
cuuaaauggaa

SEQ ID NO: 146528 - RNA, 12 nt, Artificial Sequence
  Description of Artificial Sequence: Synthetic oligonucleotide
gccuaaaauugu

SEQ ID NO: 146529 - RNA, 12 nt, Artificial Sequence
  Description of Artificial Sequence: Synthetic oligonucleotide
acuaacaucugg

SEQ ID NO: 146530 - RNA, 11 nt, Artificial Sequence
  Description of Artificial Sequence: Synthetic oligonucleotide
gacugugagcu

SEQ ID NO: 146531 - RNA, 13 nt, Artificial Sequence
  Description of Artificial Sequence: Synthetic oligonucleotide
gcuuuuuauuaau

SEQ ID NO: 146532 - RNA, 12 nt, Artificial Sequence
  Description of Artificial Sequence: Synthetic oligonucleotide
ucuucuuacauu

SEQ ID NO: 146533 - RNA, 14 nt, Artificial Sequence
  Description of Artificial Sequence: Synthetic oligonucleotide
auuuguaaaaaugu

SEQ ID NO: 146534 - RNA, 14 nt, Artificial Sequence
  Description of Artificial Sequence: Synthetic oligonucleotide
ucuuaauucauauu

SEQ ID NO: 146535 - RNA, 12 nt, Artificial Sequence
  Description of Artificial Sequence: Synthetic oligonucleotide
aacuaaucauga

SEQ ID NO: 146536 - RNA, 11 nt, Artificial Sequence
  Description of Artificial Sequence: Synthetic oligonucleotide
cugcucuuggg

SEQ ID NO: 146537 - RNA, 12 nt, Artificial Sequence
  Description of Artificial Sequence: Synthetic oligonucleotide
aguagcuuugag

SEQ ID NO: 146538 - RNA, 13 nt, Artificial Sequence
  Description of Artificial Sequence: Synthetic oligonucleotide
acguaauauuuca

SEQ ID NO: 146539 - RNA, 12 nt, Artificial Sequence
  Description of Artificial Sequence: Synthetic oligonucleotide
auucucuucacu

SEQ ID NO: 146540 - RNA, 13 nt, Artificial Sequence
  Description of Artificial Sequence: Synthetic oligonucleotide
uaaugcuaagaaa

SEQ ID NO: 146541 - RNA, 11 nt, Artificial Sequence
  Description of Artificial Sequence: Synthetic oligonucleotide
cugaaaaucaa

SEQ ID NO: 146542 - RNA, 13 nt, Artificial Sequence
  Description of Artificial Sequence: Synthetic oligonucleotide
auaugauuacuuu

SEQ ID NO: 146543 - RNA, 13 nt, Artificial Sequence
  Description of Artificial Sequence: Synthetic oligonucleotide
auuuuguucuaca

SEQ ID NO: 146544 - RNA, 11 nt, Artificial Sequence
  Description of Artificial Sequence: Synthetic oligonucleotide
ccgggacucuc

SEQ ID NO: 146545 - RNA, 13 nt, Artificial Sequence
  Description of Artificial Sequence: Synthetic oligonucleotide
cuuuaaaguaaag

SEQ ID NO: 146546 - RNA, 12 nt, Artificial Sequence
  Description of Artificial Sequence: Synthetic oligonucleotide
cuggaagccugg

SEQ ID NO: 146547 - RNA, 13 nt, Artificial Sequence
  Description of Artificial Sequence: Synthetic oligonucleotide
aaacaaaagagag

SEQ ID NO: 146548 - RNA, 12 nt, Artificial Sequence
  Description of Artificial Sequence: Synthetic oligonucleotide
ucaguuaugccg

SEQ ID NO: 146549 - RNA, 12 nt, Artificial Sequence
  Description of Artificial Sequence: Synthetic oligonucleotide
aaaagaagucca

SEQ ID NO: 146550 - RNA, 10 nt, Artificial Sequence
  Description of Artificial Sequence: Synthetic oligonucleotide
ggugagguua

SEQ ID NO: 146551 - RNA, 10 nt, Artificial Sequence
  Description of Artificial Sequence: Synthetic oligonucleotide
ggaagaggac

SEQ ID NO: 146552 - RNA, 12 nt, Artificial Sequence
  Description of Artificial Sequence: Synthetic oligonucleotide
agcaaguauugu

SEQ ID NO: 146553 - RNA, 11 nt, Artificial Sequence
  Description of Artificial Sequence: Synthetic oligonucleotide
uuguagcacuc

SEQ ID NO: 146554 - RNA, 13 nt, Artificial Sequence
  Description of Artificial Sequence: Synthetic oligonucleotide
caaaaccacaaau

SEQ ID NO: 146555 - RNA, 11 nt, Artificial Sequence
  Description of Artificial Sequence: Synthetic oligonucleotide
aagcccauaca

SEQ ID NO: 146556 - RNA, 10 nt, Artificial Sequence
  Description of Artificial Sequence: Synthetic oligonucleotide
gcccauacag

SEQ ID NO: 146557 - RNA, 11 nt, Artificial Sequence
  Description of Artificial Sequence: Synthetic oligonucleotide
agaaaccuucc

SEQ ID NO: 146558 - RNA, 9 nt, Artificial Sequence
  Description of Artificial Sequence: Synthetic oligonucleotide
uauaccuac

SEQ ID NO: 146559 - RNA, 12 nt, Artificial Sequence
  Description of Artificial Sequence: Synthetic oligonucleotide
ccaguuuucgga

SEQ ID NO: 146560 - RNA, 8 nt, Artificial Sequence
  Description of Artificial Sequence: Synthetic oligonucleotide
gaacaggg

SEQ ID NO: 146561 - RNA, 12 nt, Artificial Sequence
  Description of Artificial Sequence: Synthetic oligonucleotide
uaacuuuccagu

SEQ ID NO: 146562 - RNA, 13 nt, Artificial Sequence
  Description of Artificial Sequence: Synthetic oligonucleotide
aaguuugguuuug

SEQ ID NO: 146563 - RNA, 11 nt, Artificial Sequence
  Description of Artificial Sequence: Synthetic oligonucleotide
uucccacugua

SEQ ID NO: 146564 - RNA, 12 nt, Artificial Sequence
  Description of Artificial Sequence: Synthetic oligonucleotide
gauaccauauga

SEQ ID NO: 146565 - RNA, 10 nt, Artificial Sequence
  Description of Artificial Sequence: Synthetic oligonucleotide
acaugggcug

SEQ ID NO: 146566 - RNA, 12 nt, Artificial Sequence
  Description of Artificial Sequence: Synthetic oligonucleotide
aacuuuuucaua

SEQ ID NO: 146567 - RNA, 11 nt, Artificial Sequence
  Description of Artificial Sequence: Synthetic oligonucleotide
augaggccgga

SEQ ID NO: 146568 - RNA, 10 nt, Artificial Sequence
  Description of Artificial Sequence: Synthetic oligonucleotide
cugcauuugu

SEQ ID NO: 146569 - RNA, 12 nt, Artificial Sequence
  Description of Artificial Sequence: Synthetic oligonucleotide
auguuuacuacc

SEQ ID NO: 146570 - RNA, 14 nt, Artificial Sequence
  Description of Artificial Sequence: Synthetic oligonucleotide
auuuuuugaugaaa

SEQ ID NO: 146571 - RNA, 13 nt, Artificial Sequence
  Description of Artificial Sequence: Synthetic oligonucleotide
agugugugaauuu

SEQ ID NO: 146572 - RNA, 12 nt, Artificial Sequence
  Description of Artificial Sequence: Synthetic oligonucleotide
agcaauguaugu

SEQ ID NO: 146573 - RNA, 13 nt, Artificial Sequence
  Description of Artificial Sequence: Synthetic oligonucleotide
aagcacauauaua

SEQ ID NO: 146574 - RNA, 13 nt, Artificial Sequence
  Description of Artificial Sequence: Synthetic oligonucleotide
uaauaguuucucc

SEQ ID NO: 146575 - RNA, 12 nt, Artificial Sequence
  Description of Artificial Sequence: Synthetic oligonucleotide
guuucuccaaau

SEQ ID NO: 146576 - RNA, 12 nt, Artificial Sequence
  Description of Artificial Sequence: Synthetic oligonucleotide
acuuccuagaaa

SEQ ID NO: 146577 - RNA, 12 nt, Artificial Sequence
  Description of Artificial Sequence: Synthetic oligonucleotide
acaccauauaug

SEQ ID NO: 146578 - RNA, 13 nt, Artificial Sequence
  Description of Artificial Sequence: Synthetic oligonucleotide
uauaugaauggag

SEQ ID NO: 146579 - RNA, 12 nt, Artificial Sequence
  Description of Artificial Sequence: Synthetic oligonucleotide
cauuuacaggga

SEQ ID NO: 146580 - RNA, 12 nt, Artificial Sequence
  Description of Artificial Sequence: Synthetic oligonucleotide
auuuacagggac

SEQ ID NO: 146581 - RNA, 9 nt, Artificial Sequence
  Description of Artificial Sequence: Synthetic oligonucleotide
gggaccuga

SEQ ID NO: 146582 - RNA, 13 nt, Artificial Sequence
  Description of Artificial Sequence: Synthetic oligonucleotide
guuugacugcauc

SEQ ID NO: 146583 - RNA, 12 nt, Artificial Sequence
  Description of Artificial Sequence: Synthetic oligonucleotide
uugacugcaucg

SEQ ID NO: 146584 - RNA, 11 nt, Artificial Sequence
  Description of Artificial Sequence: Synthetic oligonucleotide
aguucacaggg

SEQ ID NO: 146585 - RNA, 12 nt, Artificial Sequence
  Description of Artificial Sequence: Synthetic oligonucleotide
gcaccucugucc

SEQ ID NO: 146586 - RNA, 14 nt, Artificial Sequence
  Description of Artificial Sequence: Synthetic oligonucleotide
guuugucuuuuuaa

SEQ ID NO: 146587 - RNA, 13 nt, Artificial Sequence
  Description of Artificial Sequence: Synthetic oligonucleotide
uugucuuuuuaag

SEQ ID NO: 146588 - RNA, 12 nt, Artificial Sequence
  Description of Artificial Sequence: Synthetic oligonucleotide
cuaaagguuguc

SEQ ID NO: 146589 - RNA, 11 nt, Artificial Sequence
  Description of Artificial Sequence: Synthetic oligonucleotide
agguugucgac

SEQ ID NO: 146590 - RNA, 12 nt, Artificial Sequence
  Description of Artificial Sequence: Synthetic oligonucleotide
ccuggcaauugu

SEQ ID NO: 146591 - RNA, 11 nt, Artificial Sequence
  Description of Artificial Sequence: Synthetic oligonucleotide
guggugcgagg

SEQ ID NO: 146592 - RNA, 12 nt, Artificial Sequence
  Description of Artificial Sequence: Synthetic oligonucleotide
gagacaugaaau

SEQ ID NO: 146593 - RNA, 12 nt, Artificial Sequence
  Description of Artificial Sequence: Synthetic oligonucleotide
uauauuucucca

SEQ ID NO: 146594 - RNA, 9 nt, Artificial Sequence
  Description of Artificial Sequence: Synthetic oligonucleotide
augaaggcu

SEQ ID NO: 146595 - RNA, 10 nt, Artificial Sequence
  Description of Artificial Sequence: Synthetic oligonucleotide
cuggaguggu

SEQ ID NO: 146596 - RNA, 10 nt, Artificial Sequence
  Description of Artificial Sequence: Synthetic oligonucleotide
ggaagagagg

SEQ ID NO: 146597 - RNA, 11 nt, Artificial Sequence
  Description of Artificial Sequence: Synthetic oligonucleotide
uugcaucgggc

SEQ ID NO: 146598 - RNA, 12 nt, Artificial Sequence
  Description of Artificial Sequence: Synthetic oligonucleotide
uauccuacugug

SEQ ID NO: 146599 - RNA, 12 nt, Artificial Sequence
  Description of Artificial Sequence: Synthetic oligonucleotide
ccuacuguguaa

SEQ ID NO: 146600 - RNA, 11 nt, Artificial Sequence
  Description of Artificial Sequence: Synthetic oligonucleotide
cuuguagugua

SEQ ID NO: 146601 - RNA, 12 nt, Artificial Sequence
  Description of Artificial Sequence: Synthetic oligonucleotide
cuuuguugauug

SEQ ID NO: 146602 - RNA, 13 nt, Artificial Sequence
  Description of Artificial Sequence: Synthetic oligonucleotide
uuguugauugaaa

SEQ ID NO: 146603 - RNA, 14 nt, Artificial Sequence
  Description of Artificial Sequence: Synthetic oligonucleotide
ucuuuuucuuccau

SEQ ID NO: 146604 - RNA, 12 nt, Artificial Sequence
  Description of Artificial Sequence: Synthetic oligonucleotide
aucuuccuucua

SEQ ID NO: 146605 - RNA, 12 nt, Artificial Sequence
  Description of Artificial Sequence: Synthetic oligonucleotide
ugaaugcuucau

SEQ ID NO: 146606 - RNA, 12 nt, Artificial Sequence
  Description of Artificial Sequence: Synthetic oligonucleotide
gaaugcuucaug

SEQ ID NO: 146607 - RNA, 12 nt, Artificial Sequence
  Description of Artificial Sequence: Synthetic oligonucleotide
auucuacuuuga

SEQ ID NO: 146608 - RNA, 12 nt, Artificial Sequence
  Description of Artificial Sequence: Synthetic oligonucleotide
gcaacuacagac

SEQ ID NO: 146609 - RNA, 12 nt, Artificial Sequence
  Description of Artificial Sequence: Synthetic oligonucleotide
accaaggucaac

SEQ ID NO: 146610 - RNA, 12 nt, Artificial Sequence
  Description of Artificial Sequence: Synthetic oligonucleotide
gacuaucucgac

SEQ ID NO: 146611 - RNA, 12 nt, Artificial Sequence
  Description of Artificial Sequence: Synthetic oligonucleotide
accuucccaaac

SEQ ID NO: 146612 - RNA, 13 nt, Artificial Sequence
  Description of Artificial Sequence: Synthetic oligonucleotide
caagcuuagaacu

SEQ ID NO: 146613 - RNA, 14 nt, Artificial Sequence
  Description of Artificial Sequence: Synthetic oligonucleotide
gcuuagaacuuuaa

SEQ ID NO: 146614 - RNA, 13 nt, Artificial Sequence
  Description of Artificial Sequence: Synthetic oligonucleotide
aacuuuaagcaac

SEQ ID NO: 146615 - RNA, 10 nt, Artificial Sequence
  Description of Artificial Sequence: Synthetic oligonucleotide
agaccaccac

SEQ ID NO: 146616 - RNA, 13 nt, Artificial Sequence
  Description of Artificial Sequence: Synthetic oligonucleotide
cgagaaauaaagu

SEQ ID NO: 146617 - RNA, 13 nt, Artificial Sequence
  Description of Artificial Sequence: Synthetic oligonucleotide
gagaaauaaaguu

SEQ ID NO: 146618 - RNA, 11 nt, Artificial Sequence
  Description of Artificial Sequence: Synthetic oligonucleotide
ggaaaugaucc

SEQ ID NO: 146619 - RNA, 12 nt, Artificial Sequence
  Description of Artificial Sequence: Synthetic oligonucleotide
aagaaaugaaac

SEQ ID NO: 146620 - RNA, 12 nt, Artificial Sequence
  Description of Artificial Sequence: Synthetic oligonucleotide
uuuccauccucc

SEQ ID NO: 146621 - RNA, 14 nt, Artificial Sequence
  Description of Artificial Sequence: Synthetic oligonucleotide
cugaaaaucuuuga

SEQ ID NO: 146622 - RNA, 10 nt, Artificial Sequence
  Description of Artificial Sequence: Synthetic oligonucleotide
gccguucagg

SEQ ID NO: 146623 - RNA, 12 nt, Artificial Sequence
  Description of Artificial Sequence: Synthetic oligonucleotide
aggguccagaag

SEQ ID NO: 146624 - RNA, 12 nt, Artificial Sequence
  Description of Artificial Sequence: Synthetic oligonucleotide
caagacugcuug

SEQ ID NO: 146625 - RNA, 12 nt, Artificial Sequence
  Description of Artificial Sequence: Synthetic oligonucleotide
ccaugucuuugg

SEQ ID NO: 146626 - RNA, 10 nt, Artificial Sequence
  Description of Artificial Sequence: Synthetic oligonucleotide
ccugaaacac

SEQ ID NO: 146627 - RNA, 11 nt, Artificial Sequence
  Description of Artificial Sequence: Synthetic oligonucleotide
cucuguaccuc

SEQ ID NO: 146628 - RNA, 11 nt, Artificial Sequence
  Description of Artificial Sequence: Synthetic oligonucleotide
gcaagacaaga

SEQ ID NO: 146629 - RNA, 12 nt, Artificial Sequence
  Description of Artificial Sequence: Synthetic oligonucleotide
caagacaagaaa

SEQ ID NO: 146630 - RNA, 11 nt, Artificial Sequence
  Description of Artificial Sequence: Synthetic oligonucleotide
guacaagaucc

SEQ ID NO: 146631 - RNA, 11 nt, Artificial Sequence
  Description of Artificial Sequence: Synthetic oligonucleotide
guacuugcaga

SEQ ID NO: 146632 - RNA, 12 nt, Artificial Sequence
  Description of Artificial Sequence: Synthetic oligonucleotide
gaucgauacaga

SEQ ID NO: 146633 - RNA, 12 nt, Artificial Sequence
  Description of Artificial Sequence: Synthetic oligonucleotide
auaaaaauaaau

SEQ ID NO: 146634 - RNA, 12 nt, Artificial Sequence
  Description of Artificial Sequence: Synthetic oligonucleotide
aaaaauaaauau

SEQ ID NO: 146635 - RNA, 12 nt, Artificial Sequence
  Description of Artificial Sequence: Synthetic oligonucleotide
uugacugcugug

SEQ ID NO: 146636 - RNA, 12 nt, Artificial Sequence
  Description of Artificial Sequence: Synthetic oligonucleotide
gagaugagagac

SEQ ID NO: 146637 - RNA, 9 nt, Artificial Sequence
  Description of Artificial Sequence: Synthetic oligonucleotide
cccacuugg

SEQ ID NO: 146638 - RNA, 3293 nt, Homo sapiens
cuuuugcucucagaugcugccagggucccugaagagggaagacacgcggaaacaggcuugcacccagacacgacaccaugcaucuccucggccccuggcuccugcuccugguucuagaauacuuggcuuucucugacucaaguaaauggguuuuugagcacccugaaacccucuacgccugggagggggccugcgucuggauccccugcaccuacagagcccuagauggugaccuggaaagcuucauccuguuccacaauccugaguauaacaagaacaccucgaaguuugaugggacaagacucuaugaaagcacaaaggaugggaagguuccuucugagcagaaaagggugcaauuccugggagacaagaauaagaacugcacacugaguauccacccggugcaccucaaugacaguggucagcuggggcugaggauggaguccaagacugagaaauggauggaacgaauacaccucaaugucucugaaaggccuuuuccaccucauauccagcucccuccagaaauucaagagucccaggaagucacucugaccugcuugcugaauuucuccugcuauggguauccgauccaauugcaguggcuccuagaggggguuccaaugaggcaggcugcugucaccucgaccuccuugaccaucaagucugucuucacccggagcgagcucaaguucuccccacaguggagucaccaugggaagauugugaccugccagcuucaggaugcagaugggaaguuccucuccaaugacacggugcagcugaacgugaagcacaccccgaaguuggagaucaaggucacucccagugaugccauagugagggagggggacucugugaccaugaccugcgaggucagcagcagcaacccggaguacacgacgguauccuggcucaaggaugggaccucgcugaagaagcagaauacauucacgcuaaaccugcgcgaagugaccaaggaccagagugggaaguacugcugucaggucuccaaugacgugggcccgggaaggucggaagaaguguuccugcaagugcaguaugccccggaaccuuccacgguucagauccuccacucaccggcuguggagggaagucaagucgaguuucuuugcaugucacuggccaauccucuuccaacaaauuacacgugguaccacaaugggaaagaaaugcagggaaggacagaggagaaaguccacaucccaaagauccuccccuggcacgcugggacuuauuccuguguggcagaaaacauucuugguacuggacagaggggcccgggagcugagcuggauguccaguauccucccaagaaggugaccacagugauucaaaaccccaugccgauucgagaaggagacacagugacccuuuccuguaacuacaauuccaguaaccccaguguuacccgguaugaauggaaaccccauggcgccugggaggagccaucgcuuggggugcugaagauccaaaacguuggcugggacaacacaaccaucgccugcgcagcuuguaauaguuggugcucgugggccuccccugucgcccugaauguccaguaugccccccgagacgugaggguccggaaaaucaagccccuuuccgagauucacucuggaaacucggucagccuccaaugugacuucucaagcagccaccccaaagaaguccaguucuucugggagaaaaauggcaggcuucuggggaaagaaagccagcugaauuuugacuccaucuccccagaagaugcugggaguuacagcugcugggugaacaacuccauaggacagacagcguccaaggccuggacacuugaagugcuguaugcacccaggaggcugcguguguccaugagcccgggggaccaagugauggaggggaagagugcaacccugaccugugagagcgacgccaacccucccgucucccacuacaccugguuugacuggaauaaccaaagccuccccuaccacagccagaagcugagauuggagccggugaagguccagcacucgggugccuacuggugccaggggaccaacagugugggcaagggccguucgccucucagcacccucaccgucuacuauagcccggagaccaucggcaggcgaguggcugugggacucggguccugccucgccauccucauccuggcaaucugugggcucaagcuccagcgacguuggaagaggacacagagccagcaggggcuucaggagaauuccagcggccagagcuucuuugugaggaauaaaaagguuagaagggccccccucucugaaggcccccacucccugggaugcuacaauccaaugauggaagauggcauuagcuacaccacccugcgcuuucccgagaugaacauaccacgaacuggagaugcagaguccucagagaugcagagaccucccccggacugcgaugacacggucacuuauucagcauugcacaagcgccaagugggcgacuaugagaacgucauuccagauuuuccagaagaugaggggauucauuacucagagcugauccaguuuggggucggggagcggccucaggcacaagaaaauguggacuaugugauccucaaacauugacacuggaugggcugcagcagaggcacugggggcagcgggggccagggaaguccccgaguuuccccagacaccgccacauggcuuccuccugcgcgcaugugcgcacacacacacacacacgcacacacacacacacacacucacugcggagaaccuugugccuggcucagagccagucuuuuuggugaggguaaccccaaaccuccaaaacuccugccccuguucucuuccacucuccuugcuacccagaaauccaucuaaauaccugcccugacaugcacaccucccccugcccccaccacggccacuggccaucuccacccccagcugcuugugucccuccugggaucugcucgucaucauuuuuccuucccuucuccaucucucuggcccucuaccccugaucugacauccccacucacgaauauuaugcccaguuucugccucugagggaaagcccagaaaaggacagaaacgaaguagaaaggggcccaguccuggccuggcuucuccuuuggaagugaggcauugcacggggagacguacguaucagcggccccuugacucuggggacuccggguuugagauggacacacugguguggauuaaccugccagggagacagagcucacaauaaaaauggcucagaugccacuucaaagaaaaaaaaaa

SEQ ID NO: 146639 - RNA, 19 nt, Artificial Sequence
  Description of Artificial Sequence: Synthetic oligonucleotide
cuuuugcucucagaugcug

SEQ ID NO: 146640 - RNA, 19 nt, Artificial Sequence
  Description of Artificial Sequence: Synthetic oligonucleotide
gccagggucccugaagagg

SEQ ID NO: 146641 - RNA, 19 nt, Artificial Sequence
  Description of Artificial Sequence: Synthetic oligonucleotide
ggaagacacgcggaaacag

SEQ ID NO: 146642 - RNA, 19 nt, Artificial Sequence
  Description of Artificial Sequence: Synthetic oligonucleotide
ggcuugcacccagacacga

SEQ ID NO: 146643 - RNA, 19 nt, Artificial Sequence
  Description of Artificial Sequence: Synthetic oligonucleotide
acaccaugcaucuccucgg

SEQ ID NO: 146644 - RNA, 19 nt, Artificial Sequence
  Description of Artificial Sequence: Synthetic oligonucleotide
gccccuggcuccugcuccu

SEQ ID NO: 146645 - RNA, 19 nt, Artificial Sequence
  Description of Artificial Sequence: Synthetic oligonucleotide
ugguucuagaauacuuggc

SEQ ID NO: 146646 - RNA, 19 nt, Artificial Sequence
  Description of Artificial Sequence: Synthetic oligonucleotide
cuuucucugacucaaguaa

SEQ ID NO: 146647 - RNA, 19 nt, Artificial Sequence
  Description of Artificial Sequence: Synthetic oligonucleotide
aauggguuuuugagcaccc

SEQ ID NO: 146648 - RNA, 19 nt, Artificial Sequence
  Description of Artificial Sequence: Synthetic oligonucleotide
cugaaacccucuacgccug

SEQ ID NO: 146649 - RNA, 19 nt, Artificial Sequence
  Description of Artificial Sequence: Synthetic oligonucleotide
gggagggggccugcgucug

SEQ ID NO: 146650 - RNA, 19 nt, Artificial Sequence
  Description of Artificial Sequence: Synthetic oligonucleotide
ggauccccugcaccuacag

SEQ ID NO: 146651 - RNA, 19 nt, Artificial Sequence
  Description of Artificial Sequence: Synthetic oligonucleotide
gagcccuagauggugaccu

SEQ ID NO: 146652 - RNA, 19 nt, Artificial Sequence
  Description of Artificial Sequence: Synthetic oligonucleotide
uggaaagcuucauccuguu

SEQ ID NO: 146653 - RNA, 19 nt, Artificial Sequence
  Description of Artificial Sequence: Synthetic oligonucleotide
uccacaauccugaguauaa

SEQ ID NO: 146654 - RNA, 19 nt, Artificial Sequence
  Description of Artificial Sequence: Synthetic oligonucleotide
acaagaacaccucgaaguu

SEQ ID NO: 146655 - RNA, 19 nt, Artificial Sequence
  Description of Artificial Sequence: Synthetic oligonucleotide
uugaugggacaagacucua

SEQ ID NO: 146656 - RNA, 19 nt, Artificial Sequence
  Description of Artificial Sequence: Synthetic oligonucleotide
augaaagcacaaaggaugg

SEQ ID NO: 146657 - RNA, 19 nt, Artificial Sequence
  Description of Artificial Sequence: Synthetic oligonucleotide
ggaagguuccuucugagca

SEQ ID NO: 146658 - RNA, 19 nt, Artificial Sequence
  Description of Artificial Sequence: Synthetic oligonucleotide
agaaaagggugcaauuccu

SEQ ID NO: 146659 - RNA, 19 nt, Artificial Sequence
  Description of Artificial Sequence: Synthetic oligonucleotide
ugggagacaagaauaagaa

SEQ ID NO: 146660 - RNA, 19 nt, Artificial Sequence
  Description of Artificial Sequence: Synthetic oligonucleotide
acugcacacugaguaucca

SEQ ID NO: 146661 - RNA, 19 nt, Artificial Sequence
  Description of Artificial Sequence: Synthetic oligonucleotide
acccggugcaccucaauga

SEQ ID NO: 146662 - RNA, 19 nt, Artificial Sequence
  Description of Artificial Sequence: Synthetic oligonucleotide
acaguggucagcuggggcu

SEQ ID NO: 146663 - RNA, 19 nt, Artificial Sequence
  Description of Artificial Sequence: Synthetic oligonucleotide
ugaggauggaguccaagac

SEQ ID NO: 146664 - RNA, 19 nt, Artificial Sequence
  Description of Artificial Sequence: Synthetic oligonucleotide
cugagaaauggauggaacg

SEQ ID NO: 146665 - RNA, 19 nt, Artificial Sequence
  Description of Artificial Sequence: Synthetic oligonucleotide
gaauacaccucaaugucuc

SEQ ID NO: 146666 - RNA, 19 nt, Artificial Sequence
  Description of Artificial Sequence: Synthetic oligonucleotide
cugaaaggccuuuuccacc

SEQ ID NO: 146667 - RNA, 19 nt, Artificial Sequence
  Description of Artificial Sequence: Synthetic oligonucleotide
cucauauccagcucccucc

SEQ ID NO: 146668 - RNA, 19 nt, Artificial Sequence
  Description of Artificial Sequence: Synthetic oligonucleotide
cagaaauucaagaguccca

SEQ ID NO: 146669 - RNA, 19 nt, Artificial Sequence
  Description of Artificial Sequence: Synthetic oligonucleotide
aggaagucacucugaccug

SEQ ID NO: 146670 - RNA, 19 nt, Artificial Sequence
  Description of Artificial Sequence: Synthetic oligonucleotide
gcuugcugaauuucuccug

SEQ ID NO: 146671 - RNA, 19 nt, Artificial Sequence
  Description of Artificial Sequence: Synthetic oligonucleotide
gcuauggguauccgaucca

SEQ ID NO: 146672 - RNA, 19 nt, Artificial Sequence
  Description of Artificial Sequence: Synthetic oligonucleotide
aauugcaguggcuccuaga

SEQ ID NO: 146673 - RNA, 19 nt, Artificial Sequence
  Description of Artificial Sequence: Synthetic oligonucleotide
aggggguuccaaugaggca

SEQ ID NO: 146674 - RNA, 19 nt, Artificial Sequence
  Description of Artificial Sequence: Synthetic oligonucleotide
aggcugcugucaccucgac

SEQ ID NO: 146675 - RNA, 19 nt, Artificial Sequence
  Description of Artificial Sequence: Synthetic oligonucleotide
ccuccuugaccaucaaguc

SEQ ID NO: 146676 - RNA, 19 nt, Artificial Sequence
  Description of Artificial Sequence: Synthetic oligonucleotide
cugucuucacccggagcga

SEQ ID NO: 146677 - RNA, 19 nt, Artificial Sequence
  Description of Artificial Sequence: Synthetic oligonucleotide
agcucaaguucuccccaca

SEQ ID NO: 146678 - RNA, 19 nt, Artificial Sequence
  Description of Artificial Sequence: Synthetic oligonucleotide
aguggagucaccaugggaa

SEQ ID NO: 146679 - RNA, 19 nt, Artificial Sequence
  Description of Artificial Sequence: Synthetic oligonucleotide
agauugugaccugccagcu

SEQ ID NO: 146680 - RNA, 19 nt, Artificial Sequence
  Description of Artificial Sequence: Synthetic oligonucleotide
uucaggaugcagaugggaa

SEQ ID NO: 146681 - RNA, 19 nt, Artificial Sequence
  Description of Artificial Sequence: Synthetic oligonucleotide
aguuccucuccaaugacac

SEQ ID NO: 146682 - RNA, 19 nt, Artificial Sequence
  Description of Artificial Sequence: Synthetic oligonucleotide
cggugcagcugaacgugaa

SEQ ID NO: 146683 - RNA, 19 nt, Artificial Sequence
  Description of Artificial Sequence: Synthetic oligonucleotide
agcacaccccgaaguugga

SEQ ID NO: 146684 - RNA, 19 nt, Artificial Sequence
  Description of Artificial Sequence: Synthetic oligonucleotide
agaucaaggucacucccag

SEQ ID NO: 146685 - RNA, 19 nt, Artificial Sequence
  Description of Artificial Sequence: Synthetic oligonucleotide
gugaugccauagugaggga

SEQ ID NO: 146686 - RNA, 19 nt, Artificial Sequence
  Description of Artificial Sequence: Synthetic oligonucleotide
agggggacucugugaccau

SEQ ID NO: 146687 - RNA, 19 nt, Artificial Sequence
  Description of Artificial Sequence: Synthetic oligonucleotide
ugaccugcgaggucagcag

SEQ ID NO: 146688 - RNA, 19 nt, Artificial Sequence
  Description of Artificial Sequence: Synthetic oligonucleotide
gcagcaacccggaguacac

SEQ ID NO: 146689 - RNA, 19 nt, Artificial Sequence
  Description of Artificial Sequence: Synthetic oligonucleotide
cgacgguauccuggcucaa

SEQ ID NO: 146690 - RNA, 19 nt, Artificial Sequence
  Description of Artificial Sequence: Synthetic oligonucleotide
aggaugggaccucgcugaa

SEQ ID NO: 146691 - RNA, 19 nt, Artificial Sequence
  Description of Artificial Sequence: Synthetic oligonucleotide
agaagcagaauacauucac

SEQ ID NO: 146692 - RNA, 19 nt, Artificial Sequence
  Description of Artificial Sequence: Synthetic oligonucleotide
cgcuaaaccugcgcgaagu

SEQ ID NO: 146693 - RNA, 19 nt, Artificial Sequence
  Description of Artificial Sequence: Synthetic oligonucleotide
ugaccaaggaccagagugg

SEQ ID NO: 146694 - RNA, 19 nt, Artificial Sequence
  Description of Artificial Sequence: Synthetic oligonucleotide
ggaaguacugcugucaggu

SEQ ID NO: 146695 - RNA, 19 nt, Artificial Sequence
  Description of Artificial Sequence: Synthetic oligonucleotide
ucuccaaugacgugggccc

SEQ ID NO: 146696 - RNA, 19 nt, Artificial Sequence
  Description of Artificial Sequence: Synthetic oligonucleotide
cgggaaggucggaagaagu

SEQ ID NO: 146697 - RNA, 19 nt, Artificial Sequence
  Description of Artificial Sequence: Synthetic oligonucleotide
uguuccugcaagugcagua

SEQ ID NO: 146698 - RNA, 19 nt, Artificial Sequence
  Description of Artificial Sequence: Synthetic oligonucleotide
augccccggaaccuuccac

SEQ ID NO: 146699 - RNA, 19 nt, Artificial Sequence
  Description of Artificial Sequence: Synthetic oligonucleotide
cgguucagauccuccacuc

SEQ ID NO: 146700 - RNA, 19 nt, Artificial Sequence
  Description of Artificial Sequence: Synthetic oligonucleotide
caccggcuguggagggaag

SEQ ID NO: 146701 - RNA, 19 nt, Artificial Sequence
  Description of Artificial Sequence: Synthetic oligonucleotide
gucaagucgaguuucuuug

SEQ ID NO: 146702 - RNA, 19 nt, Artificial Sequence
  Description of Artificial Sequence: Synthetic oligonucleotide
gcaugucacuggccaaucc

SEQ ID NO: 146703 - RNA, 19 nt, Artificial Sequence
  Description of Artificial Sequence: Synthetic oligonucleotide
cucuuccaacaaauuacac

SEQ ID NO: 146704 - RNA, 19 nt, Artificial Sequence
  Description of Artificial Sequence: Synthetic oligonucleotide
cgugguaccacaaugggaa

SEQ ID NO: 146705 - RNA, 19 nt, Artificial Sequence
  Description of Artificial Sequence: Synthetic oligonucleotide
aagaaaugcagggaaggac

SEQ ID NO: 146706 - RNA, 19 nt, Artificial Sequence
  Description of Artificial Sequence: Synthetic oligonucleotide
cagaggagaaaguccacau

SEQ ID NO: 146707 - RNA, 19 nt, Artificial Sequence
  Description of Artificial Sequence: Synthetic oligonucleotide
ucccaaagauccuccccug

SEQ ID NO: 146708 - RNA, 19 nt, Artificial Sequence
  Description of Artificial Sequence: Synthetic oligonucleotide
ggcacgcugggacuuauuc

SEQ ID NO: 146709 - RNA, 19 nt, Artificial Sequence
  Description of Artificial Sequence: Synthetic oligonucleotide
ccuguguggcagaaaacau

SEQ ID NO: 146710 - RNA, 19 nt, Artificial Sequence
  Description of Artificial Sequence: Synthetic oligonucleotide
uucuugguacuggacagag

SEQ ID NO: 146711 - RNA, 19 nt, Artificial Sequence
  Description of Artificial Sequence: Synthetic oligonucleotide
ggggcccgggagcugagcu

SEQ ID NO: 146712 - RNA, 19 nt, Artificial Sequence
  Description of Artificial Sequence: Synthetic oligonucleotide
uggauguccaguauccucc

SEQ ID NO: 146713 - RNA, 19 nt, Artificial Sequence
  Description of Artificial Sequence: Synthetic oligonucleotide
ccaagaaggugaccacagu

SEQ ID NO: 146714 - RNA, 19 nt, Artificial Sequence
  Description of Artificial Sequence: Synthetic oligonucleotide
ugauucaaaaccccaugcc

SEQ ID NO: 146715 - RNA, 19 nt, Artificial Sequence
  Description of Artificial Sequence: Synthetic oligonucleotide
cgauucgagaaggagacac

SEQ ID NO: 146716 - RNA, 19 nt, Artificial Sequence
  Description of Artificial Sequence: Synthetic oligonucleotide
cagugacccuuuccuguaa

SEQ ID NO: 146717 - RNA, 19 nt, Artificial Sequence
  Description of Artificial Sequence: Synthetic oligonucleotide
acuacaauuccaguaaccc

SEQ ID NO: 146718 - RNA, 19 nt, Artificial Sequence
  Description of Artificial Sequence: Synthetic oligonucleotide
ccaguguuacccgguauga

SEQ ID NO: 146719 - RNA, 19 nt, Artificial Sequence
  Description of Artificial Sequence: Synthetic oligonucleotide
aauggaaaccccauggcgc

SEQ ID NO: 146720 - RNA, 19 nt, Artificial Sequence
  Description of Artificial Sequence: Synthetic oligonucleotide
ccugggaggagccaucgcu

SEQ ID NO: 146721 - RNA, 19 nt, Artificial Sequence
  Description of Artificial Sequence: Synthetic oligonucleotide
uuggggugcugaagaucca

SEQ ID NO: 146722 - RNA, 19 nt, Artificial Sequence
  Description of Artificial Sequence: Synthetic oligonucleotide
aaaacguuggcugggacaa

SEQ ID NO: 146723 - RNA, 19 nt, Artificial Sequence
  Description of Artificial Sequence: Synthetic oligonucleotide
acacaaccaucgccugcgc

SEQ ID NO: 146724 - RNA, 19 nt, Artificial Sequence
  Description of Artificial Sequence: Synthetic oligonucleotide
cagcuuguaauaguuggug

SEQ ID NO: 146725 - RNA, 19 nt, Artificial Sequence
  Description of Artificial Sequence: Synthetic oligonucleotide
gcucgugggccuccccugu

SEQ ID NO: 146726 - RNA, 19 nt, Artificial Sequence
  Description of Artificial Sequence: Synthetic oligonucleotide
ucgcccugaauguccagua

SEQ ID NO: 146727 - RNA, 19 nt, Artificial Sequence
  Description of Artificial Sequence: Synthetic oligonucleotide
augccccccgagacgugag

SEQ ID NO: 146728 - RNA, 19 nt, Artificial Sequence
  Description of Artificial Sequence: Synthetic oligonucleotide
ggguccggaaaaucaagcc

SEQ ID NO: 146729 - RNA, 19 nt, Artificial Sequence
  Description of Artificial Sequence: Synthetic oligonucleotide
cccuuuccgagauucacuc

SEQ ID NO: 146730 - RNA, 19 nt, Artificial Sequence
  Description of Artificial Sequence: Synthetic oligonucleotide
cuggaaacucggucagccu

SEQ ID NO: 146731 - RNA, 19 nt, Artificial Sequence
  Description of Artificial Sequence: Synthetic oligonucleotide
uccaaugugacuucucaag

SEQ ID NO: 146732 - RNA, 19 nt, Artificial Sequence
  Description of Artificial Sequence: Synthetic oligonucleotide
gcagccaccccaaagaagu

SEQ ID NO: 146733 - RNA, 19 nt, Artificial Sequence
  Description of Artificial Sequence: Synthetic oligonucleotide
uccaguucuucugggagaa

SEQ ID NO: 146734 - RNA, 19 nt, Artificial Sequence
  Description of Artificial Sequence: Synthetic oligonucleotide
aaaauggcaggcuucuggg

SEQ ID NO: 146735 - RNA, 19 nt, Artificial Sequence
  Description of Artificial Sequence: Synthetic oligonucleotide
ggaaagaaagccagcugaa

SEQ ID NO: 146736 - RNA, 19 nt, Artificial Sequence
  Description of Artificial Sequence: Synthetic oligonucleotide
auuuugacuccaucucccc

SEQ ID NO: 146737 - RNA, 19 nt, Artificial Sequence
  Description of Artificial Sequence: Synthetic oligonucleotide
cagaagaugcugggaguua

SEQ ID NO: 146738 - RNA, 19 nt, Artificial Sequence
  Description of Artificial Sequence: Synthetic oligonucleotide
acagcugcugggugaacaa

SEQ ID NO: 146739 - RNA, 19 nt, Artificial Sequence
  Description of Artificial Sequence: Synthetic oligonucleotide
acuccauaggacagacagc

SEQ ID NO: 146740 - RNA, 19 nt, Artificial Sequence
  Description of Artificial Sequence: Synthetic oligonucleotide
cguccaaggccuggacacu

SEQ ID NO: 146741 - RNA, 19 nt, Artificial Sequence
  Description of Artificial Sequence: Synthetic oligonucleotide
uugaagugcuguaugcacc

SEQ ID NO: 146742 - RNA, 19 nt, Artificial Sequence
  Description of Artificial Sequence: Synthetic oligonucleotide
ccaggaggcugcguguguc

SEQ ID NO: 146743 - RNA, 19 nt, Artificial Sequence
  Description of Artificial Sequence: Synthetic oligonucleotide
ccaugagcccgggggacca

SEQ ID NO: 146744 - RNA, 19 nt, Artificial Sequence
  Description of Artificial Sequence: Synthetic oligonucleotide
aagugauggaggggaagag

SEQ ID NO: 146745 - RNA, 19 nt, Artificial Sequence
  Description of Artificial Sequence: Synthetic oligonucleotide
gugcaacccugaccuguga

SEQ ID NO: 146746 - RNA, 19 nt, Artificial Sequence
  Description of Artificial Sequence: Synthetic oligonucleotide
agagcgacgccaacccucc

SEQ ID NO: 146747 - RNA, 19 nt, Artificial Sequence
  Description of Artificial Sequence: Synthetic oligonucleotide
ccgucucccacuacaccug

SEQ ID NO: 146748 - RNA, 19 nt, Artificial Sequence
  Description of Artificial Sequence: Synthetic oligonucleotide
gguuugacuggaauaacca

SEQ ID NO: 146749 - RNA, 19 nt, Artificial Sequence
  Description of Artificial Sequence: Synthetic oligonucleotide
aaagccuccccuaccacag

SEQ ID NO: 146750 - RNA, 19 nt, Artificial Sequence
  Description of Artificial Sequence: Synthetic oligonucleotide
gccagaagcugagauugga

SEQ ID NO: 146751 - RNA, 19 nt, Artificial Sequence
  Description of Artificial Sequence: Synthetic oligonucleotide
agccggugaagguccagca

SEQ ID NO: 146752 - RNA, 19 nt, Artificial Sequence
  Description of Artificial Sequence: Synthetic oligonucleotide
acucgggugccuacuggug

SEQ ID NO: 146753 - RNA, 19 nt, Artificial Sequence
  Description of Artificial Sequence: Synthetic oligonucleotide
gccaggggaccaacagugu

SEQ ID NO: 146754 - RNA, 19 nt, Artificial Sequence
  Description of Artificial Sequence: Synthetic oligonucleotide
ugggcaagggccguucgcc

SEQ ID NO: 146755 - RNA, 19 nt, Artificial Sequence
  Description of Artificial Sequence: Synthetic oligonucleotide
cucucagcacccucaccgu

SEQ ID NO: 146756 - RNA, 19 nt, Artificial Sequence
  Description of Artificial Sequence: Synthetic oligonucleotide
ucuacuauagcccggagac

SEQ ID NO: 146757 - RNA, 19 nt, Artificial Sequence
  Description of Artificial Sequence: Synthetic oligonucleotide
ccaucggcaggcgaguggc

SEQ ID NO: 146758 - RNA, 19 nt, Artificial Sequence
  Description of Artificial Sequence: Synthetic oligonucleotide
cugugggacucggguccug

SEQ ID NO: 146759 - RNA, 19 nt, Artificial Sequence
  Description of Artificial Sequence: Synthetic oligonucleotide
gccucgccauccucauccu

SEQ ID NO: 146760 - RNA, 19 nt, Artificial Sequence
  Description of Artificial Sequence: Synthetic oligonucleotide
uggcaaucugugggcucaa

SEQ ID NO: 146761 - RNA, 19 nt, Artificial Sequence
  Description of Artificial Sequence: Synthetic oligonucleotide
agcuccagcgacguuggaa

SEQ ID NO: 146762 - RNA, 19 nt, Artificial Sequence
  Description of Artificial Sequence: Synthetic oligonucleotide
agaggacacagagccagca

SEQ ID NO: 146763 - RNA, 19 nt, Artificial Sequence
  Description of Artificial Sequence: Synthetic oligonucleotide
aggggcuucaggagaauuc

SEQ ID NO: 146764 - RNA, 19 nt, Artificial Sequence
  Description of Artificial Sequence: Synthetic oligonucleotide
ccagcggccagagcuucuu

SEQ ID NO: 146765 - RNA, 19 nt, Artificial Sequence
  Description of Artificial Sequence: Synthetic oligonucleotide
uugugaggaauaaaaaggu

SEQ ID NO: 146766 - RNA, 19 nt, Artificial Sequence
  Description of Artificial Sequence: Synthetic oligonucleotide
uuagaagggccccccucuc

SEQ ID NO: 146767 - RNA, 19 nt, Artificial Sequence
  Description of Artificial Sequence: Synthetic oligonucleotide
cugaaggcccccacucccu

SEQ ID NO: 146768 - RNA, 19 nt, Artificial Sequence
  Description of Artificial Sequence: Synthetic oligonucleotide
ugggaugcuacaauccaau

SEQ ID NO: 146769 - RNA, 19 nt, Artificial Sequence
  Description of Artificial Sequence: Synthetic oligonucleotide
ugauggaagauggcauuag

SEQ ID NO: 146770 - RNA, 19 nt, Artificial Sequence
  Description of Artificial Sequence: Synthetic oligonucleotide
gcuacaccacccugcgcuu

SEQ ID NO: 146771 - RNA, 19 nt, Artificial Sequence
  Description of Artificial Sequence: Synthetic oligonucleotide
uucccgagaugaacauacc

SEQ ID NO: 146772 - RNA, 19 nt, Artificial Sequence
  Description of Artificial Sequence: Synthetic oligonucleotide
cacgaacuggagaugcaga

SEQ ID NO: 146773 - RNA, 19 nt, Artificial Sequence
  Description of Artificial Sequence: Synthetic oligonucleotide
aguccucagagaugcagag

SEQ ID NO: 146774 - RNA, 19 nt, Artificial Sequence
  Description of Artificial Sequence: Synthetic oligonucleotide
gaccucccccggacugcga

SEQ ID NO: 146775 - RNA, 19 nt, Artificial Sequence
  Description of Artificial Sequence: Synthetic oligonucleotide
augacacggucacuuauuc

SEQ ID NO: 146776 - RNA, 19 nt, Artificial Sequence
  Description of Artificial Sequence: Synthetic oligonucleotide
cagcauugcacaagcgcca

SEQ ID NO: 146777 - RNA, 19 nt, Artificial Sequence
  Description of Artificial Sequence: Synthetic oligonucleotide
aagugggcgacuaugagaa

SEQ ID NO: 146778 - RNA, 19 nt, Artificial Sequence
  Description of Artificial Sequence: Synthetic oligonucleotide
acgucauuccagauuuucc

SEQ ID NO: 146779 - RNA, 19 nt, Artificial Sequence
  Description of Artificial Sequence: Synthetic oligonucleotide
cagaagaugaggggauuca

SEQ ID NO: 146780 - RNA, 19 nt, Artificial Sequence
  Description of Artificial Sequence: Synthetic oligonucleotide
auuacucagagcugaucca

SEQ ID NO: 146781 - RNA, 19 nt, Artificial Sequence
  Description of Artificial Sequence: Synthetic oligonucleotide
aguuuggggucggggagcg

SEQ ID NO: 146782 - RNA, 19 nt, Artificial Sequence
  Description of Artificial Sequence: Synthetic oligonucleotide
ggccucaggcacaagaaaa

SEQ ID NO: 146783 - RNA, 19 nt, Artificial Sequence
  Description of Artificial Sequence: Synthetic oligonucleotide
auguggacuaugugauccu

SEQ ID NO: 146784 - RNA, 19 nt, Artificial Sequence
  Description of Artificial Sequence: Synthetic oligonucleotide
ucaaacauugacacuggau

SEQ ID NO: 146785 - RNA, 19 nt, Artificial Sequence
  Description of Artificial Sequence: Synthetic oligonucleotide
ugggcugcagcagaggcac

SEQ ID NO: 146786 - RNA, 19 nt, Artificial Sequence
  Description of Artificial Sequence: Synthetic oligonucleotide
cugggggcagcgggggcca

SEQ ID NO: 146787 - RNA, 19 nt, Artificial Sequence
  Description of Artificial Sequence: Synthetic oligonucleotide
agggaaguccccgaguuuc

SEQ ID NO: 146788 - RNA, 19 nt, Artificial Sequence
  Description of Artificial Sequence: Synthetic oligonucleotide
ccccagacaccgccacaug

SEQ ID NO: 146789 - RNA, 19 nt, Artificial Sequence
  Description of Artificial Sequence: Synthetic oligonucleotide
ggcuuccuccugcgcgcau

SEQ ID NO: 146790 - RNA, 19 nt, Artificial Sequence
  Description of Artificial Sequence: Synthetic oligonucleotide
ugugcgcacacacacacac

SEQ ID NO: 146791 - RNA, 19 nt, Artificial Sequence
  Description of Artificial Sequence: Synthetic oligonucleotide
cacacgcacacacacacac

SEQ ID NO: 146792 - RNA, 19 nt, Artificial Sequence
  Description of Artificial Sequence: Synthetic oligonucleotide
cacacacucacugcggaga

SEQ ID NO: 146793 - RNA, 19 nt, Artificial Sequence
  Description of Artificial Sequence: Synthetic oligonucleotide
aaccuugugccuggcucag

SEQ ID NO: 146794 - RNA, 19 nt, Artificial Sequence
  Description of Artificial Sequence: Synthetic oligonucleotide
gagccagucuuuuugguga

SEQ ID NO: 146795 - RNA, 19 nt, Artificial Sequence
  Description of Artificial Sequence: Synthetic oligonucleotide
aggguaaccccaaaccucc

SEQ ID NO: 146796 - RNA, 19 nt, Artificial Sequence
  Description of Artificial Sequence: Synthetic oligonucleotide
caaaacuccugccccuguu

SEQ ID NO: 146797 - RNA, 19 nt, Artificial Sequence
  Description of Artificial Sequence: Synthetic oligonucleotide
ucucuuccacucuccuugc

SEQ ID NO: 146798 - RNA, 19 nt, Artificial Sequence
  Description of Artificial Sequence: Synthetic oligonucleotide
cuacccagaaauccaucua

SEQ ID NO: 146799 - RNA, 19 nt, Artificial Sequence
  Description of Artificial Sequence: Synthetic oligonucleotide
aaauaccugcccugacaug

SEQ ID NO: 146800 - RNA, 19 nt, Artificial Sequence
  Description of Artificial Sequence: Synthetic oligonucleotide
gcacaccucccccugcccc

SEQ ID NO: 146801 - RNA, 19 nt, Artificial Sequence
  Description of Artificial Sequence: Synthetic oligonucleotide
ccaccacggccacuggcca

SEQ ID NO: 146802 - RNA, 19 nt, Artificial Sequence
  Description of Artificial Sequence: Synthetic oligonucleotide
aucuccacccccagcugcu

SEQ ID NO: 146803 - RNA, 19 nt, Artificial Sequence
  Description of Artificial Sequence: Synthetic oligonucleotide
uugugucccuccugggauc

SEQ ID NO: 146804 - RNA, 19 nt, Artificial Sequence
  Description of Artificial Sequence: Synthetic oligonucleotide
cugcucgucaucauuuuuc

SEQ ID NO: 146805 - RNA, 19 nt, Artificial Sequence
  Description of Artificial Sequence: Synthetic oligonucleotide
ccuucccuucuccaucucu

SEQ ID NO: 146806 - RNA, 19 nt, Artificial Sequence
  Description of Artificial Sequence: Synthetic oligonucleotide
ucuggcccucuaccccuga

SEQ ID NO: 146807 - RNA, 19 nt, Artificial Sequence
  Description of Artificial Sequence: Synthetic oligonucleotide
aucugacauccccacucac

SEQ ID NO: 146808 - RNA, 19 nt, Artificial Sequence
  Description of Artificial Sequence: Synthetic oligonucleotide
cgaauauuaugcccaguuu

SEQ ID NO: 146809 - RNA, 19 nt, Artificial Sequence
  Description of Artificial Sequence: Synthetic oligonucleotide
ucugccucugagggaaagc

SEQ ID NO: 146810 - RNA, 19 nt, Artificial Sequence
  Description of Artificial Sequence: Synthetic oligonucleotide
cccagaaaaggacagaaac

SEQ ID NO: 146811 - RNA, 19 nt, Artificial Sequence
  Description of Artificial Sequence: Synthetic oligonucleotide
cgaaguagaaaggggccca

SEQ ID NO: 146812 - RNA, 19 nt, Artificial Sequence
  Description of Artificial Sequence: Synthetic oligonucleotide
aguccuggccuggcuucuc

SEQ ID NO: 146813 - RNA, 19 nt, Artificial Sequence
  Description of Artificial Sequence: Synthetic oligonucleotide
ccuuuggaagugaggcauu

SEQ ID NO: 146814 - RNA, 19 nt, Artificial Sequence
  Description of Artificial Sequence: Synthetic oligonucleotide
ugcacggggagacguacgu

SEQ ID NO: 146815 - RNA, 19 nt, Artificial Sequence
  Description of Artificial Sequence: Synthetic oligonucleotide
uaucagcggccccuugacu

SEQ ID NO: 146816 - RNA, 19 nt, Artificial Sequence
  Description of Artificial Sequence: Synthetic oligonucleotide
ucuggggacuccggguuug

SEQ ID NO: 146817 - RNA, 19 nt, Artificial Sequence
  Description of Artificial Sequence: Synthetic oligonucleotide
gagauggacacacuggugu

SEQ ID NO: 146818 - RNA, 19 nt, Artificial Sequence
  Description of Artificial Sequence: Synthetic oligonucleotide
uggauuaaccugccaggga

SEQ ID NO: 146819 - RNA, 19 nt, Artificial Sequence
  Description of Artificial Sequence: Synthetic oligonucleotide
agacagagcucacaauaaa

SEQ ID NO: 146820 - RNA, 19 nt, Artificial Sequence
  Description of Artificial Sequence: Synthetic oligonucleotide
aaauggcucagaugccacu

SEQ ID NO: 146821 - RNA, 25 nt, Artificial Sequence
  Description of Artificial Sequence: Synthetic oligonucleotide
cuuuugcucucagaugcugccaggg

SEQ ID NO: 146822 - RNA, 25 nt, Artificial Sequence
  Description of Artificial Sequence: Synthetic oligonucleotide
gucccugaagagggaagacacgcgg

SEQ ID NO: 146823 - RNA, 25 nt, Artificial Sequence
  Description of Artificial Sequence: Synthetic oligonucleotide
gaaacaggcuugcacccagacacga

SEQ ID NO: 146824 - RNA, 25 nt, Artificial Sequence
  Description of Artificial Sequence: Synthetic oligonucleotide
acaccaugcaucuccucggccccug

SEQ ID NO: 146825 - RNA, 25 nt, Artificial Sequence
  Description of Artificial Sequence: Synthetic oligonucleotide
ggcuccugcuccugguucuagaaua

SEQ ID NO: 146826 - RNA, 25 nt, Artificial Sequence
  Description of Artificial Sequence: Synthetic oligonucleotide
acuuggcuuucucugacucaaguaa

SEQ ID NO: 146827 - RNA, 25 nt, Artificial Sequence
  Description of Artificial Sequence: Synthetic oligonucleotide
aauggguuuuugagcacccugaaac

SEQ ID NO: 146828 - RNA, 25 nt, Artificial Sequence
  Description of Artificial Sequence: Synthetic oligonucleotide
cccucuacgccugggagggggccug

SEQ ID NO: 146829 - RNA, 25 nt, Artificial Sequence
  Description of Artificial Sequence: Synthetic oligonucleotide
gcgucuggauccccugcaccuacag

SEQ ID NO: 146830 - RNA, 25 nt, Artificial Sequence
  Description of Artificial Sequence: Synthetic oligonucleotide
gagcccuagauggugaccuggaaag

SEQ ID NO: 146831 - RNA, 25 nt, Artificial Sequence
  Description of Artificial Sequence: Synthetic oligonucleotide
gcuucauccuguuccacaauccuga

SEQ ID NO: 146832 - RNA, 25 nt, Artificial Sequence
  Description of Artificial Sequence: Synthetic oligonucleotide
aguauaacaagaacaccucgaaguu

SEQ ID NO: 146833 - RNA, 25 nt, Artificial Sequence
  Description of Artificial Sequence: Synthetic oligonucleotide
uugaugggacaagacucuaugaaag

SEQ ID NO: 146834 - RNA, 25 nt, Artificial Sequence
  Description of Artificial Sequence: Synthetic oligonucleotide
gcacaaaggaugggaagguuccuuc

SEQ ID NO: 146835 - RNA, 25 nt, Artificial Sequence
  Description of Artificial Sequence: Synthetic oligonucleotide
cugagcagaaaagggugcaauuccu

SEQ ID NO: 146836 - RNA, 25 nt, Artificial Sequence
  Description of Artificial Sequence: Synthetic oligonucleotide
ugggagacaagaauaagaacugcac

SEQ ID NO: 146837 - RNA, 25 nt, Artificial Sequence
  Description of Artificial Sequence: Synthetic oligonucleotide
cacugaguauccacccggugcaccu

SEQ ID NO: 146838 - RNA, 25 nt, Artificial Sequence
  Description of Artificial Sequence: Synthetic oligonucleotide
ucaaugacaguggucagcuggggcu

SEQ ID NO: 146839 - RNA, 25 nt, Artificial Sequence
  Description of Artificial Sequence: Synthetic oligonucleotide
ugaggauggaguccaagacugagaa

SEQ ID NO: 146840 - RNA, 25 nt, Artificial Sequence
  Description of Artificial Sequence: Synthetic oligonucleotide
aauggauggaacgaauacaccucaa

SEQ ID NO: 146841 - RNA, 25 nt, Artificial Sequence
  Description of Artificial Sequence: Synthetic oligonucleotide
augucucugaaaggccuuuuccacc

SEQ ID NO: 146842 - RNA, 25 nt, Artificial Sequence
  Description of Artificial Sequence: Synthetic oligonucleotide
cucauauccagcucccuccagaaau

SEQ ID NO: 146843 - RNA, 25 nt, Artificial Sequence
  Description of Artificial Sequence: Synthetic oligonucleotide
uucaagagucccaggaagucacucu

SEQ ID NO: 146844 - RNA, 25 nt, Artificial Sequence
  Description of Artificial Sequence: Synthetic oligonucleotide
ugaccugcuugcugaauuucuccug

SEQ ID NO: 146845 - RNA, 25 nt, Artificial Sequence
  Description of Artificial Sequence: Synthetic oligonucleotide
gcuauggguauccgauccaauugca

SEQ ID NO: 146846 - RNA, 25 nt, Artificial Sequence
  Description of Artificial Sequence: Synthetic oligonucleotide
aguggcuccuagaggggguuccaau

SEQ ID NO: 146847 - RNA, 25 nt, Artificial Sequence
  Description of Artificial Sequence: Synthetic oligonucleotide
ugaggcaggcugcugucaccucgac

SEQ ID NO: 146848 - RNA, 25 nt, Artificial Sequence
  Description of Artificial Sequence: Synthetic oligonucleotide
ccuccuugaccaucaagucugucuu

SEQ ID NO: 146849 - RNA, 25 nt, Artificial Sequence
  Description of Artificial Sequence: Synthetic oligonucleotide
ucacccggagcgagcucaaguucuc

SEQ ID NO: 146850 - RNA, 25 nt, Artificial Sequence
  Description of Artificial Sequence: Synthetic oligonucleotide
ccccacaguggagucaccaugggaa

SEQ ID NO: 146851 - RNA, 25 nt, Artificial Sequence
  Description of Artificial Sequence: Synthetic oligonucleotide
agauugugaccugccagcuucagga

SEQ ID NO: 146852 - RNA, 25 nt, Artificial Sequence
  Description of Artificial Sequence: Synthetic oligonucleotide
augcagaugggaaguuccucuccaa

SEQ ID NO: 146853 - RNA, 25 nt, Artificial Sequence
  Description of Artificial Sequence: Synthetic oligonucleotide
augacacggugcagcugaacgugaa

SEQ ID NO: 146854 - RNA, 25 nt, Artificial Sequence
  Description of Artificial Sequence: Synthetic oligonucleotide
agcacaccccgaaguuggagaucaa

SEQ ID NO: 146855 - RNA, 25 nt, Artificial Sequence
  Description of Artificial Sequence: Synthetic oligonucleotide
aggucacucccagugaugccauagu

SEQ ID NO: 146856 - RNA, 25 nt, Artificial Sequence
  Description of Artificial Sequence: Synthetic oligonucleotide
ugagggagggggacucugugaccau

SEQ ID NO: 146857 - RNA, 25 nt, Artificial Sequence
  Description of Artificial Sequence: Synthetic oligonucleotide
ugaccugcgaggucagcagcagcaa

SEQ ID NO: 146858 - RNA, 25 nt, Artificial Sequence
  Description of Artificial Sequence: Synthetic oligonucleotide
acccggaguacacgacgguauccug

SEQ ID NO: 146859 - RNA, 25 nt, Artificial Sequence
  Description of Artificial Sequence: Synthetic oligonucleotide
ggcucaaggaugggaccucgcugaa

SEQ ID NO: 146860 - RNA, 25 nt, Artificial Sequence
  Description of Artificial Sequence: Synthetic oligonucleotide
agaagcagaauacauucacgcuaaa

SEQ ID NO: 146861 - RNA, 25 nt, Artificial Sequence
  Description of Artificial Sequence: Synthetic oligonucleotide
accugcgcgaagugaccaaggacca

SEQ ID NO: 146862 - RNA, 25 nt, Artificial Sequence
  Description of Artificial Sequence: Synthetic oligonucleotide
agagugggaaguacugcugucaggu

SEQ ID NO: 146863 - RNA, 25 nt, Artificial Sequence
  Description of Artificial Sequence: Synthetic oligonucleotide
ucuccaaugacgugggcccgggaag

SEQ ID NO: 146864 - RNA, 25 nt, Artificial Sequence
  Description of Artificial Sequence: Synthetic oligonucleotide
ggucggaagaaguguuccugcaagu

SEQ ID NO: 146865 - RNA, 25 nt, Artificial Sequence
  Description of Artificial Sequence: Synthetic oligonucleotide
ugcaguaugccccggaaccuuccac

SEQ ID NO: 146866 - RNA, 25 nt, Artificial Sequence
  Description of Artificial Sequence: Synthetic oligonucleotide
cgguucagauccuccacucaccggc

SEQ ID NO: 146867 - RNA, 25 nt, Artificial Sequence
  Description of Artificial Sequence: Synthetic oligonucleotide
cuguggagggaagucaagucgaguu

SEQ ID NO: 146868 - RNA, 25 nt, Artificial Sequence
  Description of Artificial Sequence: Synthetic oligonucleotide
uucuuugcaugucacuggccaaucc

SEQ ID NO: 146869 - RNA, 25 nt, Artificial Sequence
  Description of Artificial Sequence: Synthetic oligonucleotide
cucuuccaacaaauuacacguggua

SEQ ID NO: 146870 - RNA, 25 nt, Artificial Sequence
  Description of Artificial Sequence: Synthetic oligonucleotide
accacaaugggaaagaaaugcaggg

SEQ ID NO: 146871 - RNA, 25 nt, Artificial Sequence
  Description of Artificial Sequence: Synthetic oligonucleotide
gaaggacagaggagaaaguccacau

SEQ ID NO: 146872 - RNA, 25 nt, Artificial Sequence
  Description of Artificial Sequence: Synthetic oligonucleotide
ucccaaagauccuccccuggcacgc

SEQ ID NO: 146873 - RNA, 25 nt, Artificial Sequence
  Description of Artificial Sequence: Synthetic oligonucleotide
cugggacuuauuccuguguggcaga

SEQ ID NO: 146874 - RNA, 25 nt, Artificial Sequence
  Description of Artificial Sequence: Synthetic oligonucleotide
aaaacauucuugguacuggacagag

SEQ ID NO: 146875 - RNA, 25 nt, Artificial Sequence
  Description of Artificial Sequence: Synthetic oligonucleotide
ggggcccgggagcugagcuggaugu

SEQ ID NO: 146876 - RNA, 25 nt, Artificial Sequence
  Description of Artificial Sequence: Synthetic oligonucleotide
uccaguauccucccaagaaggugac

SEQ ID NO: 146877 - RNA, 25 nt, Artificial Sequence
  Description of Artificial Sequence: Synthetic oligonucleotide
ccacagugauucaaaaccccaugcc

SEQ ID NO: 146878 - RNA, 25 nt, Artificial Sequence
  Description of Artificial Sequence: Synthetic oligonucleotide
cgauucgagaaggagacacagugac

SEQ ID NO: 146879 - RNA, 25 nt, Artificial Sequence
  Description of Artificial Sequence: Synthetic oligonucleotide
cccuuuccuguaacuacaauuccag

SEQ ID NO: 146880 - RNA, 25 nt, Artificial Sequence
  Description of Artificial Sequence: Synthetic oligonucleotide
guaaccccaguguuacccgguauga

SEQ ID NO: 146881 - RNA, 25 nt, Artificial Sequence
  Description of Artificial Sequence: Synthetic oligonucleotide
aauggaaaccccauggcgccuggga

SEQ ID NO: 146882 - RNA, 25 nt, Artificial Sequence
  Description of Artificial Sequence: Synthetic oligonucleotide
aggagccaucgcuuggggugcugaa

SEQ ID NO: 146883 - RNA, 25 nt, Artificial Sequence
  Description of Artificial Sequence: Synthetic oligonucleotide
agauccaaaacguuggcugggacaa

SEQ ID NO: 146884 - RNA, 25 nt, Artificial Sequence
  Description of Artificial Sequence: Synthetic oligonucleotide
acacaaccaucgccugcgcagcuug

SEQ ID NO: 146885 - RNA, 25 nt, Artificial Sequence
  Description of Artificial Sequence: Synthetic oligonucleotide
guaauaguuggugcucgugggccuc

SEQ ID NO: 146886 - RNA, 25 nt, Artificial Sequence
  Description of Artificial Sequence: Synthetic oligonucleotide
ccccugucgcccugaauguccagua

SEQ ID NO: 146887 - RNA, 25 nt, Artificial Sequence
  Description of Artificial Sequence: Synthetic oligonucleotide
augccccccgagacgugaggguccg

SEQ ID NO: 146888 - RNA, 25 nt, Artificial Sequence
  Description of Artificial Sequence: Synthetic oligonucleotide
ggaaaaucaagccccuuuccgagau

SEQ ID NO: 146889 - RNA, 25 nt, Artificial Sequence
  Description of Artificial Sequence: Synthetic oligonucleotide
uucacucuggaaacucggucagccu

SEQ ID NO: 146890 - RNA, 25 nt, Artificial Sequence
  Description of Artificial Sequence: Synthetic oligonucleotide
uccaaugugacuucucaagcagcca

SEQ ID NO: 146891 - RNA, 25 nt, Artificial Sequence
  Description of Artificial Sequence: Synthetic oligonucleotide
accccaaagaaguccaguucuucug

SEQ ID NO: 146892 - RNA, 25 nt, Artificial Sequence
  Description of Artificial Sequence: Synthetic oligonucleotide
gggagaaaaauggcaggcuucuggg

SEQ ID NO: 146893 - RNA, 25 nt, Artificial Sequence
  Description of Artificial Sequence: Synthetic oligonucleotide
ggaaagaaagccagcugaauuuuga

SEQ ID NO: 146894 - RNA, 25 nt, Artificial Sequence
  Description of Artificial Sequence: Synthetic oligonucleotide
acuccaucuccccagaagaugcugg

SEQ ID NO: 146895 - RNA, 25 nt, Artificial Sequence
  Description of Artificial Sequence: Synthetic oligonucleotide
ggaguuacagcugcugggugaacaa

SEQ ID NO: 146896 - RNA, 25 nt, Artificial Sequence
  Description of Artificial Sequence: Synthetic oligonucleotide
acuccauaggacagacagcguccaa

SEQ ID NO: 146897 - RNA, 25 nt, Artificial Sequence
  Description of Artificial Sequence: Synthetic oligonucleotide
aggccuggacacuugaagugcugua

SEQ ID NO: 146898 - RNA, 25 nt, Artificial Sequence
  Description of Artificial Sequence: Synthetic oligonucleotide
augcacccaggaggcugcguguguc

SEQ ID NO: 146899 - RNA, 25 nt, Artificial Sequence
  Description of Artificial Sequence: Synthetic oligonucleotide
ccaugagcccgggggaccaagugau

SEQ ID NO: 146900 - RNA, 25 nt, Artificial Sequence
  Description of Artificial Sequence: Synthetic oligonucleotide
uggaggggaagagugcaacccugac

SEQ ID NO: 146901 - RNA, 25 nt, Artificial Sequence
  Description of Artificial Sequence: Synthetic oligonucleotide
ccugugagagcgacgccaacccucc

SEQ ID NO: 146902 - RNA, 25 nt, Artificial Sequence
  Description of Artificial Sequence: Synthetic oligonucleotide
ccgucucccacuacaccugguuuga

SEQ ID NO: 146903 - RNA, 25 nt, Artificial Sequence
  Description of Artificial Sequence: Synthetic oligonucleotide
acuggaauaaccaaagccuccccua

SEQ ID NO: 146904 - RNA, 25 nt, Artificial Sequence
  Description of Artificial Sequence: Synthetic oligonucleotide
accacagccagaagcugagauugga

SEQ ID NO: 146905 - RNA, 25 nt, Artificial Sequence
  Description of Artificial Sequence: Synthetic oligonucleotide
agccggugaagguccagcacucggg

SEQ ID NO: 146906 - RNA, 25 nt, Artificial Sequence
  Description of Artificial Sequence: Synthetic oligonucleotide
gugccuacuggugccaggggaccaa

SEQ ID NO: 146907 - RNA, 25 nt, Artificial Sequence
  Description of Artificial Sequence: Synthetic oligonucleotide
acagugugggcaagggccguucgcc

SEQ ID NO: 146908 - RNA, 25 nt, Artificial Sequence
  Description of Artificial Sequence: Synthetic oligonucleotide
cucucagcacccucaccgucuacua

SEQ ID NO: 146909 - RNA, 25 nt, Artificial Sequence
  Description of Artificial Sequence: Synthetic oligonucleotide
auagcccggagaccaucggcaggcg

SEQ ID NO: 146910 - RNA, 25 nt, Artificial Sequence
  Description of Artificial Sequence: Synthetic oligonucleotide
gaguggcugugggacucggguccug

SEQ ID NO: 146911 - RNA, 25 nt, Artificial Sequence
  Description of Artificial Sequence: Synthetic oligonucleotide
gccucgccauccucauccuggcaau

SEQ ID NO: 146912 - RNA, 25 nt, Artificial Sequence
  Description of Artificial Sequence: Synthetic oligonucleotide
ucugugggcucaagcuccagcgacg

SEQ ID NO: 146913 - RNA, 25 nt, Artificial Sequence
  Description of Artificial Sequence: Synthetic oligonucleotide
guuggaagaggacacagagccagca

SEQ ID NO: 146914 - RNA, 25 nt, Artificial Sequence
  Description of Artificial Sequence: Synthetic oligonucleotide
aggggcuucaggagaauuccagcgg

SEQ ID NO: 146915 - RNA, 25 nt, Artificial Sequence
  Description of Artificial Sequence: Synthetic oligonucleotide
gccagagcuucuuugugaggaauaa

SEQ ID NO: 146916 - RNA, 25 nt, Artificial Sequence
  Description of Artificial Sequence: Synthetic oligonucleotide
aaaagguuagaagggccccccucuc

SEQ ID NO: 146917 - RNA, 25 nt, Artificial Sequence
  Description of Artificial Sequence: Synthetic oligonucleotide
cugaaggcccccacucccugggaug

SEQ ID NO: 146918 - RNA, 25 nt, Artificial Sequence
  Description of Artificial Sequence: Synthetic oligonucleotide
gcuacaauccaaugauggaagaugg

SEQ ID NO: 146919 - RNA, 25 nt, Artificial Sequence
  Description of Artificial Sequence: Synthetic oligonucleotide
gcauuagcuacaccacccugcgcuu

SEQ ID NO: 146920 - RNA, 25 nt, Artificial Sequence
  Description of Artificial Sequence: Synthetic oligonucleotide
uucccgagaugaacauaccacgaac

SEQ ID NO: 146921 - RNA, 25 nt, Artificial Sequence
  Description of Artificial Sequence: Synthetic oligonucleotide
cuggagaugcagaguccucagagau

SEQ ID NO: 146922 - RNA, 25 nt, Artificial Sequence
  Description of Artificial Sequence: Synthetic oligonucleotide
ugcagagaccucccccggacugcga

SEQ ID NO: 146923 - RNA, 25 nt, Artificial Sequence
  Description of Artificial Sequence: Synthetic oligonucleotide
augacacggucacuuauucagcauu

SEQ ID NO: 146924 - RNA, 25 nt, Artificial Sequence
  Description of Artificial Sequence: Synthetic oligonucleotide
ugcacaagcgccaagugggcgacua

SEQ ID NO: 146925 - RNA, 25 nt, Artificial Sequence
  Description of Artificial Sequence: Synthetic oligonucleotide
augagaacgucauuccagauuuucc

SEQ ID NO: 146926 - RNA, 25 nt, Artificial Sequence
  Description of Artificial Sequence: Synthetic oligonucleotide
cagaagaugaggggauucauuacuc

SEQ ID NO: 146927 - RNA, 25 nt, Artificial Sequence
  Description of Artificial Sequence: Synthetic oligonucleotide
cagagcugauccaguuuggggucgg

SEQ ID NO: 146928 - RNA, 25 nt, Artificial Sequence
  Description of Artificial Sequence: Synthetic oligonucleotide
gggagcggccucaggcacaagaaaa

SEQ ID NO: 146929 - RNA, 25 nt, Artificial Sequence
  Description of Artificial Sequence: Synthetic oligonucleotide
auguggacuaugugauccucaaaca

SEQ ID NO: 146930 - RNA, 25 nt, Artificial Sequence
  Description of Artificial Sequence: Synthetic oligonucleotide
auugacacuggaugggcugcagcag

SEQ ID NO: 146931 - RNA, 25 nt, Artificial Sequence
  Description of Artificial Sequence: Synthetic oligonucleotide
gaggcacugggggcagcgggggcca

SEQ ID NO: 146932 - RNA, 25 nt, Artificial Sequence
  Description of Artificial Sequence: Synthetic oligonucleotide
agggaaguccccgaguuuccccaga

SEQ ID NO: 146933 - RNA, 25 nt, Artificial Sequence
  Description of Artificial Sequence: Synthetic oligonucleotide
acaccgccacauggcuuccuccugc

SEQ ID NO: 146934 - RNA, 25 nt, Artificial Sequence
  Description of Artificial Sequence: Synthetic oligonucleotide
cgcgcaugugcgcacacacacacac

SEQ ID NO: 146935 - RNA, 25 nt, Artificial Sequence
  Description of Artificial Sequence: Synthetic oligonucleotide
cacacgcacacacacacacacacac

SEQ ID NO: 146936 - RNA, 25 nt, Artificial Sequence
  Description of Artificial Sequence: Synthetic oligonucleotide
cucacugcggagaaccuugugccug

SEQ ID NO: 146937 - RNA, 25 nt, Artificial Sequence
  Description of Artificial Sequence: Synthetic oligonucleotide
ggcucagagccagucuuuuugguga

SEQ ID NO: 146938 - RNA, 25 nt, Artificial Sequence
  Description of Artificial Sequence: Synthetic oligonucleotide
aggguaaccccaaaccuccaaaacu

SEQ ID NO: 146939 - RNA, 25 nt, Artificial Sequence
  Description of Artificial Sequence: Synthetic oligonucleotide
uccugccccuguucucuuccacucu

SEQ ID NO: 146940 - RNA, 25 nt, Artificial Sequence
  Description of Artificial Sequence: Synthetic oligonucleotide
uccuugcuacccagaaauccaucua

SEQ ID NO: 146941 - RNA, 25 nt, Artificial Sequence
  Description of Artificial Sequence: Synthetic oligonucleotide
aaauaccugcccugacaugcacacc

SEQ ID NO: 146942 - RNA, 25 nt, Artificial Sequence
  Description of Artificial Sequence: Synthetic oligonucleotide
cucccccugcccccaccacggccac

SEQ ID NO: 146943 - RNA, 25 nt, Artificial Sequence
  Description of Artificial Sequence: Synthetic oligonucleotide
cuggccaucuccacccccagcugcu

SEQ ID NO: 146944 - RNA, 25 nt, Artificial Sequence
  Description of Artificial Sequence: Synthetic oligonucleotide
uugugucccuccugggaucugcucg

SEQ ID NO: 146945 - RNA, 25 nt, Artificial Sequence
  Description of Artificial Sequence: Synthetic oligonucleotide
gucaucauuuuuccuucccuucucc

SEQ ID NO: 146946 - RNA, 25 nt, Artificial Sequence
  Description of Artificial Sequence: Synthetic oligonucleotide
caucucucuggcccucuaccccuga

SEQ ID NO: 146947 - RNA, 25 nt, Artificial Sequence
  Description of Artificial Sequence: Synthetic oligonucleotide
aucugacauccccacucacgaauau

SEQ ID NO: 146948 - RNA, 25 nt, Artificial Sequence
  Description of Artificial Sequence: Synthetic oligonucleotide
uuaugcccaguuucugccucugagg

SEQ ID NO: 146949 - RNA, 25 nt, Artificial Sequence
  Description of Artificial Sequence: Synthetic oligonucleotide
ggaaagcccagaaaaggacagaaac

SEQ ID NO: 146950 - RNA, 25 nt, Artificial Sequence
  Description of Artificial Sequence: Synthetic oligonucleotide
cgaaguagaaaggggcccaguccug

SEQ ID NO: 146951 - RNA, 25 nt, Artificial Sequence
  Description of Artificial Sequence: Synthetic oligonucleotide
ggccuggcuucuccuuuggaaguga

SEQ ID NO: 146952 - RNA, 25 nt, Artificial Sequence
  Description of Artificial Sequence: Synthetic oligonucleotide
aggcauugcacggggagacguacgu

SEQ ID NO: 146953 - RNA, 25 nt, Artificial Sequence
  Description of Artificial Sequence: Synthetic oligonucleotide
uaucagcggccccuugacucugggg

SEQ ID NO: 146954 - RNA, 25 nt, Artificial Sequence
  Description of Artificial Sequence: Synthetic oligonucleotide
gacuccggguuugagauggacacac

SEQ ID NO: 146955 - RNA, 25 nt, Artificial Sequence
  Description of Artificial Sequence: Synthetic oligonucleotide
cugguguggauuaaccugccaggga

SEQ ID NO: 146956 - RNA, 25 nt, Artificial Sequence
  Description of Artificial Sequence: Synthetic oligonucleotide
agacagagcucacaauaaaaauggc

SEQ ID NO: 146957 - RNA, 25 nt, Artificial Sequence
  Description of Artificial Sequence: Synthetic oligonucleotide
cucagaugccacuucaaagaaaaaa

SEQ ID NO: 146958 - DNA, 21 bp, Artificial Sequence
  Description of Artificial Sequence: Synthetic oligonucleotide
  Description of Combined DNA/RNA Molecule: Synthetic oligonucleotide
cuacacaaaucagcgauuutt

SEQ ID NO: 146959 - DNA, 21 bp, Artificial Sequence
  Description of Artificial Sequence: Synthetic oligonucleotide
  Description of Combined DNA/RNA Molecule: Synthetic oligonucleotide
aaaucgcugauuuguguagtt

SEQ ID NO: 146960 - DNA, 25 bp, Artificial Sequence
  Description of Artificial Sequence: Synthetic oligonucleotide
  Description of Combined DNA/RNA Molecule: Synthetic oligonucleotide
cuacacaaaucagcgauuuccaugt

SEQ ID NO: 146961 - RNA, 27 nt, Artificial Sequence
  Description of Artificial Sequence: Synthetic oligonucleotide
acauggaaaucgcugauuuguguaguc

SEQ ID NO: 146962 - RNA, 13 nt, Artificial Sequence
  Description of Artificial Sequence: Synthetic oligonucleotide
cuacacaaaucag

SEQ ID NO: 146963 - DNA, 11 bp, Artificial Sequence
  Description of Artificial Sequence: Synthetic oligonucleotide
  Description of Combined DNA/RNA Molecule: Synthetic oligonucleotide
gauuuccaugt

SEQ ID NO: 146964 - DNA, 21 bp, Artificial Sequence
  Description of Artificial Sequence: Synthetic oligonucleotide
  Description of Combined DNA/RNA Molecule: Synthetic oligonucleotide
ggaucuuauuucuucggagtt

SEQ ID NO: 146965 - DNA, 21 bp, Artificial Sequence
  Description of Artificial Sequence: Synthetic oligonucleotide
  Description of Combined DNA/RNA Molecule: Synthetic oligonucleotide
cuccgaagaaauaagaucctt

SEQ ID NO: 146966 - RNA, 11 nt, Artificial Sequence
  Description of Artificial Sequence: Synthetic oligonucleotide
ggaucuuauuu

SEQ ID NO: 146967 - DNA, 10 bp, Artificial Sequence
  Description of Artificial Sequence: Synthetic oligonucleotide
  Description of Combined DNA/RNA Molecule: Synthetic oligonucleotide
cuucggagtt

SEQ ID NO: 146968 - RNA, 27 nt, Artificial Sequence
  Description of Artificial Sequence: Synthetic oligonucleotide
cauugucuccgaagaaauaagauccuu

SEQ ID NO: 146969 - RNA, 8 nt, Artificial Sequence
  Description of Artificial Sequence: Synthetic oligonucleotide
  modified_base (2): LNA-G
ggaucuua

SEQ ID NO: 146970 - DNA, 17 bp, Artificial Sequence
  Description of Artificial Sequence: Synthetic oligonucleotide
  Description of Combined DNA/RNA Molecule: Synthetic oligonucleotide
uuucuucggagacaatg

SEQ ID NO: 146971 - DNA, 16 bp, Artificial Sequence
  Description of Artificial Sequence: Synthetic oligonucleotide
  Description of Combined DNA/RNA Molecule: Synthetic oligonucleotide
uucuucggagacaatg

SEQ ID NO: 146972 - DNA, 15 bp, Artificial Sequence
  Description of Artificial Sequence: Synthetic oligonucleotide
  Description of Combined DNA/RNA Molecule: Synthetic oligonucleotide
ucuucggagacaatg

SEQ ID NO: 146973 - DNA, 14 bp, Artificial Sequence
  Description of Artificial Sequence: Synthetic oligonucleotide
  Description of Combined DNA/RNA Molecule: Synthetic oligonucleotide
cuucggagacaatg

SEQ ID NO: 146974 - DNA, 13 bp, Artificial Sequence
  Description of Artificial Sequence: Synthetic oligonucleotide
  Description of Combined DNA/RNA Molecule: Synthetic oligonucleotide
uucggagacaatg

SEQ ID NO: 146975 - DNA, 12 bp, Artificial Sequence
  Description of Artificial Sequence: Synthetic oligonucleotide
  Description of Combined DNA/RNA Molecule: Synthetic oligonucleotide
ucggagacaatg

SEQ ID NO: 146976 - DNA, 11 bp, Artificial Sequence
  Description of Artificial Sequence: Synthetic oligonucleotide
  Description of Combined DNA/RNA Molecule: Synthetic oligonucleotide
cggagacaatg

SEQ ID NO: 146977 - RNA, 9 nt, Artificial Sequence
  Description of Artificial Sequence: Synthetic oligonucleotide
  modified_base (2): LNA-G
ggaucuuau

SEQ ID NO: 146978 - RNA, 10 nt, Artificial Sequence
  Description of Artificial Sequence: Synthetic oligonucleotide
  modified_base (2): LNA-G
ggaucuuauu

SEQ ID NO: 146979 - RNA, 11 nt, Artificial Sequence
  Description of Artificial Sequence: Synthetic oligonucleotide
  modified_base (2): LNA-G
ggaucuuauuu

SEQ ID NO: 146980 - RNA, 12 nt, Artificial Sequence
  Description of Artificial Sequence: Synthetic oligonucleotide
  modified_base (2): LNA-G
ggaucuuauuuc

SEQ ID NO: 146981 - RNA, 8 nt, Artificial Sequence
  Description of Artificial Sequence: Synthetic oligonucleotide
  modified_base (3): LNA-A
cuacacaa

SEQ ID NO: 146982 - DNA, 13 bp, Artificial Sequence
  Description of Artificial Sequence: Synthetic oligonucleotide
  Description of Combined DNA/RNA Molecule: Synthetic oligonucleotide
  modified_base (8): LNA-A
aucagcgauuutt

SEQ ID NO: 146983 - DNA, 12 bp, Artificial Sequence
  Description of Artificial Sequence: Synthetic oligonucleotide
  Description of Combined DNA/RNA Molecule: Synthetic oligonucleotide
  modified_base (7): LNA-A
ucagcgauuutt

SEQ ID NO: 146984 - DNA, 11 bp, Artificial Sequence
  Description of Artificial Sequence: Synthetic oligonucleotide
  Description of Combined DNA/RNA Molecule: Synthetic oligonucleotide
  modified_base (6): LNA-A
cagcgauuutt

SEQ ID NO: 146985 - DNA, 10 bp, Artificial Sequence
  Description of Artificial Sequence: Synthetic oligonucleotide
  Description of Combined DNA/RNA Molecule: Synthetic oligonucleotide
  modified_base (5): LNA-A
agcgauuutt

SEQ ID NO: 146986 - DNA, 9 bp, Artificial Sequence
  Description of Artificial Sequence: Synthetic oligonucleotide
  Description of Combined DNA/RNA Molecule: Synthetic oligonucleotide
  modified_base (4): LNA-A
gcgauuutt

SEQ ID NO: 146987 - DNA, 8 bp, Artificial Sequence
  Description of Artificial Sequence: Synthetic oligonucleotide
  Description of Combined DNA/RNA Molecule: Synthetic oligonucleotide
  modified_base (3): LNA-A
cgauuutt

SEQ ID NO: 146988 - DNA, 7 bp, Artificial Sequence
  Description of Artificial Sequence: Synthetic oligonucleotide
  Description of Combined DNA/RNA Molecule: Synthetic oligonucleotide
  modified_base (2): LNA-A
gauuutt

SEQ ID NO: 146989 - RNA, 9 nt, Artificial Sequence
  Description of Artificial Sequence: Synthetic oligonucleotide
  modified_base (3): LNA-A
cuacacaaa

SEQ ID NO: 146990 - RNA, 10 nt, Artificial Sequence
  Description of Artificial Sequence: Synthetic oligonucleotide
  modified_base (3): LNA-A
cuacacaaau

SEQ ID NO: 146991 - RNA, 11 nt, Artificial Sequence
  Description of Artificial Sequence: Synthetic oligonucleotide
  modified_base (3): LNA-A
cuacacaaauc

SEQ ID NO: 146992 - RNA, 12 nt, Artificial Sequence
  Description of Artificial Sequence: Synthetic oligonucleotide
  modified_base (3): LNA-A
cuacacaaauca

SEQ ID NO: 146993 - RNA, 13 nt, Artificial Sequence
  Description of Artificial Sequence: Synthetic oligonucleotide
  modified_base (3): LNA-A
cuacacaaaucag

SEQ ID NO: 146994 - RNA, 14 nt, Artificial Sequence
  Description of Artificial Sequence: Synthetic oligonucleotide
  modified_base (3): LNA-A
cuacacaaaucagc

SEQ ID NO: 146995 - RNA, 13 nt, Artificial Sequence
  Description of Artificial Sequence: Synthetic oligonucleotide
  modified_base (2): LNA-G
ggaucuuauuucu

SEQ ID NO: 146996 - RNA, 14 nt, Artificial Sequence
  Description of Artificial Sequence: Synthetic oligonucleotide
  modified_base (2): LNA-G
ggaucuuauuucuu

SEQ ID NO: 146997 - RNA, 8 nt, Artificial Sequence
  Description of Artificial Sequence: Synthetic oligonucleotide
  modified_base (2): LNA-G
  modified_base (8): LNA-A
ggaucuua

SEQ ID NO: 146998 - RNA, 9 nt, Artificial Sequence
  Description of Artificial Sequence: Synthetic oligonucleotide
  modified_base (2): LNA-G
  modified_base (9): LNA-U
ggaucuuau

SEQ ID NO: 146999 - RNA, 10 nt, Artificial Sequence
  Description of Artificial Sequence: Synthetic oligonucleotide
  modified_base (2): LNA-G
  modified_base (10): LNA-U
ggaucuuauu

SEQ ID NO: 147000 - RNA, 11 nt, Artificial Sequence
  Description of Artificial Sequence: Synthetic oligonucleotide
  modified_base (2): LNA-G
  modified_base (11): LNA-U
ggaucuuauuu

SEQ ID NO: 147001 - RNA, 12 nt, Artificial Sequence
  Description of Artificial Sequence: Synthetic oligonucleotide
  modified_base (2): LNA-G
  modified_base (12): LNA-C
ggaucuuauuuc

SEQ ID NO: 147002 - RNA, 13 nt, Artificial Sequence
  Description of Artificial Sequence: Synthetic oligonucleotide
  modified_base (2): LNA-G
  modified_base (13): LNA-U
ggaucuuauuucu

SEQ ID NO: 147003 - RNA, 14 nt, Artificial Sequence
  Description of Artificial Sequence: Synthetic oligonucleotide
  modified_base (2): LNA-G
  modified_base (14): LNA-U
ggaucuuauuucuu

SEQ ID NO: 147004 - DNA, 13 bp, Artificial Sequence
  Description of Artificial Sequence: Synthetic oligonucleotide
  Description of Combined DNA/RNA Molecule: Synthetic oligonucleotide
  modified_base (8): LNA-G
uuucuucggagtt

SEQ ID NO: 147005 - DNA, 12 bp, Artificial Sequence
  Description of Artificial Sequence: Synthetic oligonucleotide
  Description of Combined DNA/RNA Molecule: Synthetic oligonucleotide
  modified_base (7): LNA-G
uucuucggagtt

SEQ ID NO: 147006 - DNA, 11 bp, Artificial Sequence
  Description of Artificial Sequence: Synthetic oligonucleotide
  Description of Combined DNA/RNA Molecule: Synthetic oligonucleotide
  modified_base (6): LNA-G
ucuucggagtt

SEQ ID NO: 147007 - DNA, 10 bp, Artificial Sequence
  Description of Artificial Sequence: Synthetic oligonucleotide
  Description of Combined DNA/RNA Molecule: Synthetic oligonucleotide
  modified_base (5): LNA-G
cuucggagtt

SEQ ID NO: 147008 - DNA, 9 bp, Artificial Sequence
  Description of Artificial Sequence: Synthetic oligonucleotide
  Description of Combined DNA/RNA Molecule: Synthetic oligonucleotide
  modified_base (4): LNA-G
uucggagtt

SEQ ID NO: 147009 - DNA, 8 bp, Artificial Sequence
  Description of Artificial Sequence: Synthetic oligonucleotide
  Description of Combined DNA/RNA Molecule: Synthetic oligonucleotide
  modified_base (3): LNA-G
ucggagtt

SEQ ID NO: 147010 - DNA, 7 bp, Artificial Sequence
  Description of Artificial Sequence: Synthetic oligonucleotide
  Description of Combined DNA/RNA Molecule: Synthetic oligonucleotide
  modified_base (2): LNA-G
cggagtt

SEQ ID NO: 147011 - DNA, 13 bp, Artificial Sequence
  Description of Artificial Sequence: Synthetic oligonucleotide
  Description of Combined DNA/RNA Molecule: Synthetic oligonucleotide
  modified_base (1): LNA-U
  modified_base (8): LNA-G
uuucuucggagtt

SEQ ID NO: 147012 - DNA, 12 bp, Artificial Sequence
  Description of Artificial Sequence: Synthetic oligonucleotide
  Description of Combined DNA/RNA Molecule: Synthetic oligonucleotide
  modified_base (1): LNA-U
  modified_base (7): LNA-G
uucuucggagtt

SEQ ID NO: 147013 - DNA, 11 bp, Artificial Sequence
  Description of Artificial Sequence: Synthetic oligonucleotide
  Description of Combined DNA/RNA Molecule: Synthetic oligonucleotide
  modified_base (1): LNA-U
  modified_base (6): LNA-G
ucuucggagtt

SEQ ID NO: 147014 - DNA, 10 bp, Artificial Sequence
  Description of Artificial Sequence: Synthetic oligonucleotide
  Description of Combined DNA/RNA Molecule: Synthetic oligonucleotide
  modified_base (1): LNA-C
  modified_base (5): LNA-G
cuucggagtt

SEQ ID NO: 147015 - DNA, 9 bp, Artificial Sequence
  Description of Artificial Sequence: Synthetic oligonucleotide
  Description of Combined DNA/RNA Molecule: Synthetic oligonucleotide
  modified_base (1): LNA-U
  modified_base (4): LNA-G
uucggagtt

SEQ ID NO: 147016 - DNA, 8 bp, Artificial Sequence
  Description of Artificial Sequence: Synthetic oligonucleotide
  Description of Combined DNA/RNA Molecule: Synthetic oligonucleotide
  modified_base (1): LNA-U
  modified_base (3): LNA-G
ucggagtt

SEQ ID NO: 147017 - DNA, 7 bp, Artificial Sequence
  Description of Artificial Sequence: Synthetic oligonucleotide
  Description of Combined DNA/RNA Molecule: Synthetic oligonucleotide
  modified_base (1): LNA-C
  modified_base (2): LNA-G
cggagtt

SEQ ID NO: 147018 - DNA, 21 bp, Artificial Sequence
  Description of Artificial Sequence: Synthetic oligonucleotide
  Description of Combined DNA/RNA Molecule: Synthetic oligonucleotide
  modified_base (2): LNA-G
  modified_base (16): LNA-G
ggaucuuauuucuucggagtt

SEQ ID NO: 147019 - DNA, 25 bp, Artificial Sequence
  Description of Artificial Sequence: Synthetic oligonucleotide
  Description of Combined DNA/RNA Molecule: Synthetic oligonucleotide
ggaucuuauuucuucggagacaatg

SEQ ID NO: 147020 - RNA, 25 nt, Artificial Sequence
  Description of Artificial Sequence: Synthetic oligonucleotide
guauuuugaugaggaguucacggcc

SEQ ID NO: 147021 - RNA, 25 nt, Artificial Sequence
  Description of Artificial Sequence: Synthetic oligonucleotide
ggcccagaugaucaccaucacacca

SEQ ID NO: 147022 - RNA, 25 nt, Artificial Sequence
  Description of Artificial Sequence: Synthetic oligonucleotide
gggaagaaaacuauccugcggguuu

SEQ ID NO: 147023 - RNA, 25 nt, Artificial Sequence
  Description of Artificial Sequence: Synthetic oligonucleotide
guuuuaauuuauuucauccaguuug

SEQ ID NO: 147024 - RNA, 25 nt, Artificial Sequence
  Description of Artificial Sequence: Synthetic oligonucleotide
acguagggaaauguuaaggacuucu

SEQ ID NO: 147025 - RNA, 25 nt, Artificial Sequence
  Description of Artificial Sequence: Synthetic oligonucleotide
ccaggguuuacccagugggacagag

SEQ ID NO: 147026 - RNA, 25 nt, Artificial Sequence
  Description of Artificial Sequence: Synthetic oligonucleotide
agcaagguuuaaauuuguuauugug

SEQ ID NO: 147027 - RNA, 25 nt, Artificial Sequence
  Description of Artificial Sequence: Synthetic oligonucleotide
uguauuauguuguucaaaugcauuu

SEQ ID NO: 147028 - RNA, 25 nt, Artificial Sequence
  Description of Artificial Sequence: Synthetic oligonucleotide
uuuuaaucuuugugacaggaaagcc

SEQ ID NO: 147029 - RNA, 25 nt, Artificial Sequence
  Description of Artificial Sequence: Synthetic oligonucleotide
uuaaucuuugugacaggaaagcccu

SEQ ID NO: 147030 - RNA, 25 nt, Artificial Sequence
  Description of Artificial Sequence: Synthetic oligonucleotide
gcugcuuaugucucccagcauggcc

SEQ ID NO: 147031 - RNA, 25 nt, Artificial Sequence
  Description of Artificial Sequence: Synthetic oligonucleotide
aaguguuucagaagcuucucccuga

SEQ ID NO: 147032 - RNA, 25 nt, Artificial Sequence
  Description of Artificial Sequence: Synthetic oligonucleotide
gaccaucaauaaggaagaagcccuu

SEQ ID NO: 147033 - RNA, 25 nt, Artificial Sequence
  Description of Artificial Sequence: Synthetic oligonucleotide
ccaucaauaaggaagaagcccuuca

SEQ ID NO: 147034 - RNA, 25 nt, Artificial Sequence
  Description of Artificial Sequence: Synthetic oligonucleotide
ucaauaaggaagaagcccuucagcg

SEQ ID NO: 147035 - RNA, 25 nt, Artificial Sequence
  Description of Artificial Sequence: Synthetic oligonucleotide
aauaaggaagaagcccuucagcggc

SEQ ID NO: 147036 - RNA, 25 nt, Artificial Sequence
  Description of Artificial Sequence: Synthetic oligonucleotide
aggaagaagcccuucagcggccagu

SEQ ID NO: 147037 - RNA, 25 nt, Artificial Sequence
  Description of Artificial Sequence: Synthetic oligonucleotide
gcauaacuaaaggugaaaagcuccg

SEQ ID NO: 147038 - RNA, 25 nt, Artificial Sequence
  Description of Artificial Sequence: Synthetic oligonucleotide
cauaacuaaaggugaaaagcuccgg

SEQ ID NO: 147039 - RNA, 25 nt, Artificial Sequence
  Description of Artificial Sequence: Synthetic oligonucleotide
cuacaucacgccagucaacagucug

SEQ ID NO: 147040 - RNA, 25 nt, Artificial Sequence
  Description of Artificial Sequence: Synthetic oligonucleotide
acuggauuuaagcagaguucaaaag

SEQ ID NO: 147041 - RNA, 25 nt, Artificial Sequence
  Description of Artificial Sequence: Synthetic oligonucleotide
cuggauuuaagcagaguucaaaagc

SEQ ID NO: 147042 - RNA, 25 nt, Artificial Sequence
  Description of Artificial Sequence: Synthetic oligonucleotide
gauuuaagcagaguucaaaagcccu

SEQ ID NO: 147043 - RNA, 25 nt, Artificial Sequence
  Description of Artificial Sequence: Synthetic oligonucleotide
auuuaagcagaguucaaaagcccuu

SEQ ID NO: 147044 - RNA, 25 nt, Artificial Sequence
  Description of Artificial Sequence: Synthetic oligonucleotide
uuaagcagaguucaaaagcccuuca

SEQ ID NO: 147045 - RNA, 25 nt, Artificial Sequence
  Description of Artificial Sequence: Synthetic oligonucleotide
uaagcagaguucaaaagcccuucag

SEQ ID NO: 147046 - RNA, 25 nt, Artificial Sequence
  Description of Artificial Sequence: Synthetic oligonucleotide
agcagaguucaaaagcccuucagcg

SEQ ID NO: 147047 - RNA, 25 nt, Artificial Sequence
  Description of Artificial Sequence: Synthetic oligonucleotide
cucagggucugagugaagccgcucg

SEQ ID NO: 147048 - RNA, 25 nt, Artificial Sequence
  Description of Artificial Sequence: Synthetic oligonucleotide
caagcaacuacaucacgccagucaa

SEQ ID NO: 147049 - RNA, 25 nt, Artificial Sequence
  Description of Artificial Sequence: Synthetic oligonucleotide
aucaauggcagcuucuuggugcgug

SEQ ID NO: 147050 - RNA, 25 nt, Artificial Sequence
  Description of Artificial Sequence: Synthetic oligonucleotide
uuccagcccacauuggauucaucag

SEQ ID NO: 147051 - RNA, 25 nt, Artificial Sequence
  Description of Artificial Sequence: Synthetic oligonucleotide
cagcugagaauguggaauaccuaag

SEQ ID NO: 147052 - RNA, 25 nt, Artificial Sequence
  Description of Artificial Sequence: Synthetic oligonucleotide
aacguaucuccuaauuugaggcuca

SEQ ID NO: 147053 - RNA, 25 nt, Artificial Sequence
  Description of Artificial Sequence: Synthetic oligonucleotide
ccuaaaauaauuucucuacaauugg

SEQ ID NO: 147054 - RNA, 25 nt, Artificial Sequence
  Description of Artificial Sequence: Synthetic oligonucleotide
uggaagauucagcuaguuaggagcc

SEQ ID NO: 147055 - RNA, 25 nt, Artificial Sequence
  Description of Artificial Sequence: Synthetic oligonucleotide
uuaaacucuccuagucaauauccac

SEQ ID NO: 147056 - RNA, 25 nt, Artificial Sequence
  Description of Artificial Sequence: Synthetic oligonucleotide
cagccuacaguuauguucagucaca

SEQ ID NO: 147057 - RNA, 25 nt, Artificial Sequence
  Description of Artificial Sequence: Synthetic oligonucleotide
guuauguucagucacacacacauac

SEQ ID NO: 147058 - RNA, 25 nt, Artificial Sequence
  Description of Artificial Sequence: Synthetic oligonucleotide
cacauacaaaauguuccuuuugcuu

SEQ ID NO: 147059 - RNA, 25 nt, Artificial Sequence
  Description of Artificial Sequence: Synthetic oligonucleotide
uccuuuugcuuuuaaaguaauuuuu

SEQ ID NO: 147060 - RNA, 25 nt, Artificial Sequence
  Description of Artificial Sequence: Synthetic oligonucleotide
ugaccugugaagcaacagucaaugg

SEQ ID NO: 147061 - RNA, 25 nt, Artificial Sequence
  Description of Artificial Sequence: Synthetic oligonucleotide
cuaucucacacaucgacaaaccaau

SEQ ID NO: 147062 - RNA, 25 nt, Artificial Sequence
  Description of Artificial Sequence: Synthetic oligonucleotide
uguccucaauuguacugcuaccacu

SEQ ID NO: 147063 - RNA, 25 nt, Artificial Sequence
  Description of Artificial Sequence: Synthetic oligonucleotide
aaaccguagcuggcaagcggucuua

SEQ ID NO: 147064 - RNA, 25 nt, Artificial Sequence
  Description of Artificial Sequence: Synthetic oligonucleotide
uagcuggcaagcggucuuaccggcu

SEQ ID NO: 147065 - RNA, 25 nt, Artificial Sequence
  Description of Artificial Sequence: Synthetic oligonucleotide
uuguaugguuaaaagauggguuacc

SEQ ID NO: 147066 - RNA, 25 nt, Artificial Sequence
  Description of Artificial Sequence: Synthetic oligonucleotide
ugguuaaaagauggguuaccugcga

SEQ ID NO: 147067 - RNA, 25 nt, Artificial Sequence
  Description of Artificial Sequence: Synthetic oligonucleotide
cagggaauuauacaaucuugcugag

SEQ ID NO: 147068 - RNA, 25 nt, Artificial Sequence
  Description of Artificial Sequence: Synthetic oligonucleotide
acaaucuugcugagcauaaaacagu

SEQ ID NO: 147069 - RNA, 25 nt, Artificial Sequence
  Description of Artificial Sequence: Synthetic oligonucleotide
ccaauaaugaagaguccuuuauccu

SEQ ID NO: 147070 - RNA, 25 nt, Artificial Sequence
  Description of Artificial Sequence: Synthetic oligonucleotide
acuuuggauguuccaacgcaaguug

SEQ ID NO: 147071 - RNA, 25 nt, Artificial Sequence
  Description of Artificial Sequence: Synthetic oligonucleotide
aaugcuuccacuaaacugaaaccau

SEQ ID NO: 147072 - RNA, 25 nt, Artificial Sequence
  Description of Artificial Sequence: Synthetic oligonucleotide
gagaaaguuugacuuuguuaaauau

SEQ ID NO: 147073 - RNA, 25 nt, Artificial Sequence
  Description of Artificial Sequence: Synthetic oligonucleotide
aaagaacuacuguauauuaaaaguu

SEQ ID NO: 147074 - RNA, 25 nt, Artificial Sequence
  Description of Artificial Sequence: Synthetic oligonucleotide
uuagaaauacggguuuugacuuaac

SEQ ID NO: 147075 - RNA, 25 nt, Artificial Sequence
  Description of Artificial Sequence: Synthetic oligonucleotide
aacauggguacagcaaacucagcac

SEQ ID NO: 147076 - RNA, 25 nt, Artificial Sequence
  Description of Artificial Sequence: Synthetic oligonucleotide
aaagacacagaagaugcugaccuca

SEQ ID NO: 147077 - RNA, 25 nt, Artificial Sequence
  Description of Artificial Sequence: Synthetic oligonucleotide
uaguagggagguuuauucagaucgc

SEQ ID NO: 147078 - RNA, 25 nt, Artificial Sequence
  Description of Artificial Sequence: Synthetic oligonucleotide
gccuucugcagcaggguucugggau

SEQ ID NO: 147079 - RNA, 25 nt, Artificial Sequence
  Description of Artificial Sequence: Synthetic oligonucleotide
ggucugguacauauuggaaauuaug

SEQ ID NO: 147080 - RNA, 25 nt, Artificial Sequence
  Description of Artificial Sequence: Synthetic oligonucleotide
cuaguccuuccgauggaagcacuag

SEQ ID NO: 147081 - RNA, 25 nt, Artificial Sequence
  Description of Artificial Sequence: Synthetic oligonucleotide
ccagugaauauuguuuuuaugugga

SEQ ID NO: 147082 - RNA, 25 nt, Artificial Sequence
  Description of Artificial Sequence: Synthetic oligonucleotide
augaauucaaguuggaauugguaga

SEQ ID NO: 147083 - RNA, 25 nt, Artificial Sequence
  Description of Artificial Sequence: Synthetic oligonucleotide
caggacacagauuuagacuuggaga

SEQ ID NO: 147084 - RNA, 25 nt, Artificial Sequence
  Description of Artificial Sequence: Synthetic oligonucleotide
cucaaagcacaguuacaguauucca

SEQ ID NO: 147085 - RNA, 25 nt, Artificial Sequence
  Description of Artificial Sequence: Synthetic oligonucleotide
accacugccaccacugaugaauuaa

SEQ ID NO: 147086 - RNA, 25 nt, Artificial Sequence
  Description of Artificial Sequence: Synthetic oligonucleotide
gaaacuacuagugccacaucaucac

SEQ ID NO: 147087 - RNA, 25 nt, Artificial Sequence
  Description of Artificial Sequence: Synthetic oligonucleotide
aagucggacagccucaccaaacaga

SEQ ID NO: 147088 - RNA, 25 nt, Artificial Sequence
  Description of Artificial Sequence: Synthetic oligonucleotide
gaaagcgaaaaauggaacaugaugg

SEQ ID NO: 147089 - RNA, 25 nt, Artificial Sequence
  Description of Artificial Sequence: Synthetic oligonucleotide
cccucugauuuagcauguagacugc

SEQ ID NO: 147090 - RNA, 25 nt, Artificial Sequence
  Description of Artificial Sequence: Synthetic oligonucleotide
ugagcuauuuaaggaucuauuuaug

SEQ ID NO: 147091 - RNA, 25 nt, Artificial Sequence
  Description of Artificial Sequence: Synthetic oligonucleotide
aaaaggugaaaaagcacuauuauca

SEQ ID NO: 147092 - RNA, 25 nt, Artificial Sequence
  Description of Artificial Sequence: Synthetic oligonucleotide
gaaaaagcacuauuaucaguucugc

SEQ ID NO: 147093 - RNA, 25 nt, Artificial Sequence
  Description of Artificial Sequence: Synthetic oligonucleotide
ggcugaaaagaaagauuaaaccuac

SEQ ID NO: 147094 - RNA, 25 nt, Artificial Sequence
  Description of Artificial Sequence: Synthetic oligonucleotide
uaaacccuuauaauaaaauccuucu

SEQ ID NO: 147095 - RNA, 25 nt, Artificial Sequence
  Description of Artificial Sequence: Synthetic oligonucleotide
cauacuauuagccaaugcuguagac

SEQ ID NO: 147096 - RNA, 25 nt, Artificial Sequence
  Description of Artificial Sequence: Synthetic oligonucleotide
gacagaagcauuuugauaggaauag

SEQ ID NO: 147097 - RNA, 25 nt, Artificial Sequence
  Description of Artificial Sequence: Synthetic oligonucleotide
agagcaaauaagauaauggcccuga

SEQ ID NO: 147098 - RNA, 25 nt, Artificial Sequence
  Description of Artificial Sequence: Synthetic oligonucleotide
ccaacauuuuucucuuccucaagca

SEQ ID NO: 147099 - RNA, 25 nt, Artificial Sequence
  Description of Artificial Sequence: Synthetic oligonucleotide
uuaaguaugagaaaaguucagccca

SEQ ID NO: 147100 - RNA, 25 nt, Artificial Sequence
  Description of Artificial Sequence: Synthetic oligonucleotide
caggaauaaagauggcugcugaacc

SEQ ID NO: 147101 - RNA, 25 nt, Artificial Sequence
  Description of Artificial Sequence: Synthetic oligonucleotide
aauuugaaugaccaaguucucuuca

SEQ ID NO: 147102 - RNA, 25 nt, Artificial Sequence
  Description of Artificial Sequence: Synthetic oligonucleotide
auguauaaagauagccagccuagag

SEQ ID NO: 147103 - RNA, 25 nt, Artificial Sequence
  Description of Artificial Sequence: Synthetic oligonucleotide
ggcuguaacuaucucugugaagugu

SEQ ID NO: 147104 - RNA, 25 nt, Artificial Sequence
  Description of Artificial Sequence: Synthetic oligonucleotide
ucugugaagugugagaaaauuucaa

SEQ ID NO: 147105 - RNA, 25 nt, Artificial Sequence
  Description of Artificial Sequence: Synthetic oligonucleotide
ccuuuaaggaaaugaauccuccuga

SEQ ID NO: 147106 - RNA, 25 nt, Artificial Sequence
  Description of Artificial Sequence: Synthetic oligonucleotide
aaggauacaaaaagugacaucauau

SEQ ID NO: 147107 - RNA, 25 nt, Artificial Sequence
  Description of Artificial Sequence: Synthetic oligonucleotide
agaugcaauuugaaucuucaucaua

SEQ ID NO: 147108 - RNA, 25 nt, Artificial Sequence
  Description of Artificial Sequence: Synthetic oligonucleotide
guucaaaacgaagacuagcuauuaa

SEQ ID NO: 147109 - RNA, 25 nt, Artificial Sequence
  Description of Artificial Sequence: Synthetic oligonucleotide
gugaaaccucaucucuacuaaaaau

SEQ ID NO: 147110 - RNA, 25 nt, Artificial Sequence
  Description of Artificial Sequence: Synthetic oligonucleotide
acgaaagagaagcucuaucucgccu

SEQ ID NO: 147111 - RNA, 25 nt, Artificial Sequence
  Description of Artificial Sequence: Synthetic oligonucleotide
cuccacaagcgccuucgguccaguu

SEQ ID NO: 147112 - RNA, 25 nt, Artificial Sequence
  Description of Artificial Sequence: Synthetic oligonucleotide
gagaagauuccaaagauguagccgc

SEQ ID NO: 147113 - RNA, 25 nt, Artificial Sequence
  Description of Artificial Sequence: Synthetic oligonucleotide
aaucuggauucaaugaggagacuug

SEQ ID NO: 147114 - RNA, 25 nt, Artificial Sequence
  Description of Artificial Sequence: Synthetic oligonucleotide
agaacagauuugagaguagugagga

SEQ ID NO: 147115 - RNA, 25 nt, Artificial Sequence
  Description of Artificial Sequence: Synthetic oligonucleotide
ccagagcugugcagaugaguacaaa

SEQ ID NO: 147116 - RNA, 25 nt, Artificial Sequence
  Description of Artificial Sequence: Synthetic oligonucleotide
ccucagauuguuguuguuaaugggc

SEQ ID NO: 147117 - RNA, 25 nt, Artificial Sequence
  Description of Artificial Sequence: Synthetic oligonucleotide
cuauuuuaauuauuuuuaauuuauu

SEQ ID NO: 147118 - RNA, 25 nt, Artificial Sequence
  Description of Artificial Sequence: Synthetic oligonucleotide
uuuaauuuauuaauauuuaaauaug

SEQ ID NO: 147119 - RNA, 25 nt, Artificial Sequence
  Description of Artificial Sequence: Synthetic oligonucleotide
augcaguuugaauauccuuuguuuc

SEQ ID NO: 147120 - RNA, 25 nt, Artificial Sequence
  Description of Artificial Sequence: Synthetic oligonucleotide
caugcugcuggcgucuaaguguuug

SEQ ID NO: 147121 - RNA, 25 nt, Artificial Sequence
  Description of Artificial Sequence: Synthetic oligonucleotide
agaugugcauuucaccugugacaaa

SEQ ID NO: 147122 - RNA, 25 nt, Artificial Sequence
  Description of Artificial Sequence: Synthetic oligonucleotide
ucaaaaccugugccaggcugaauua

SEQ ID NO: 147123 - RNA, 25 nt, Artificial Sequence
  Description of Artificial Sequence: Synthetic oligonucleotide
gaauguggguagucauucuuacaau

SEQ ID NO: 147124 - RNA, 25 nt, Artificial Sequence
  Description of Artificial Sequence: Synthetic oligonucleotide
auguggguagucauucuuacaauug

SEQ ID NO: 147125 - RNA, 25 nt, Artificial Sequence
  Description of Artificial Sequence: Synthetic oligonucleotide
ugaaaaugagcaucagagaguguac

SEQ ID NO: 147126 - RNA, 25 nt, Artificial Sequence
  Description of Artificial Sequence: Synthetic oligonucleotide
uugcuuuucauguagaacucagcag

SEQ ID NO: 147127 - RNA, 25 nt, Artificial Sequence
  Description of Artificial Sequence: Synthetic oligonucleotide
uguauuucuauauuuauuuucagua

SEQ ID NO: 147128 - RNA, 25 nt, Artificial Sequence
  Description of Artificial Sequence: Synthetic oligonucleotide
uuugauuaauguuucuuaaauggaa

SEQ ID NO: 147129 - RNA, 25 nt, Artificial Sequence
  Description of Artificial Sequence: Synthetic oligonucleotide
caacguguauagugccuaaaauugu

SEQ ID NO: 147130 - RNA, 25 nt, Artificial Sequence
  Description of Artificial Sequence: Synthetic oligonucleotide
cauauccuuggcuacuaacaucugg

SEQ ID NO: 147131 - RNA, 25 nt, Artificial Sequence
  Description of Artificial Sequence: Synthetic oligonucleotide
uacuaacaucuggagacugugagcu

SEQ ID NO: 147132 - RNA, 25 nt, Artificial Sequence
  Description of Artificial Sequence: Synthetic oligonucleotide
cauaaguugugugcuuuuuauuaau

SEQ ID NO: 147133 - RNA, 25 nt, Artificial Sequence
  Description of Artificial Sequence: Synthetic oligonucleotide
gcaucauuuuggcucuucuuacauu

SEQ ID NO: 147134 - RNA, 25 nt, Artificial Sequence
  Description of Artificial Sequence: Synthetic oligonucleotide
gcucuucuuacauuuguaaaaaugu

SEQ ID NO: 147135 - RNA, 25 nt, Artificial Sequence
  Description of Artificial Sequence: Synthetic oligonucleotide
agauuaggucaucuuaauucauauu

SEQ ID NO: 147136 - RNA, 25 nt, Artificial Sequence
  Description of Artificial Sequence: Synthetic oligonucleotide
auggaauugaaagaacuaaucauga

SEQ ID NO: 147137 - RNA, 25 nt, Artificial Sequence
  Description of Artificial Sequence: Synthetic oligonucleotide
cacacucauuccuucugcucuuggg

SEQ ID NO: 147138 - RNA, 25 nt, Artificial Sequence
  Description of Artificial Sequence: Synthetic oligonucleotide
uguagagguaaccaguagcuuugag

SEQ ID NO: 147139 - RNA, 25 nt, Artificial Sequence
  Description of Artificial Sequence: Synthetic oligonucleotide
caaccacaugccacguaauauuuca

SEQ ID NO: 147140 - RNA, 25 nt, Artificial Sequence
  Description of Artificial Sequence: Synthetic oligonucleotide
ucggaaacaaguuauucucuucacu

SEQ ID NO: 147141 - RNA, 25 nt, Artificial Sequence
  Description of Artificial Sequence: Synthetic oligonucleotide
acucccaauaacuaaugcuaagaaa

SEQ ID NO: 147142 - RNA, 25 nt, Artificial Sequence
  Description of Artificial Sequence: Synthetic oligonucleotide
aaugcuaagaaaugcugaaaaucaa

SEQ ID NO: 147143 - RNA, 25 nt, Artificial Sequence
  Description of Artificial Sequence: Synthetic oligonucleotide
gucuuucucuaaauaugauuacuuu

SEQ ID NO: 147144 - RNA, 25 nt, Artificial Sequence
  Description of Artificial Sequence: Synthetic oligonucleotide
ugaauuucaggcauuuuguucuaca

SEQ ID NO: 147145 - RNA, 25 nt, Artificial Sequence
  Description of Artificial Sequence: Synthetic oligonucleotide
cgauucccucucacccgggacucuc

SEQ ID NO: 147146 - RNA, 25 nt, Artificial Sequence
  Description of Artificial Sequence: Synthetic oligonucleotide
aggaaagugaaccuuuaaaguaaag

SEQ ID NO: 147147 - RNA, 25 nt, Artificial Sequence
  Description of Artificial Sequence: Synthetic oligonucleotide
gaggcugcaugcucuggaagccugg

SEQ ID NO: 147148 - RNA, 25 nt, Artificial Sequence
  Description of Artificial Sequence: Synthetic oligonucleotide
ucucugaacagaaaacaaaagagag

SEQ ID NO: 147149 - RNA, 25 nt, Artificial Sequence
  Description of Artificial Sequence: Synthetic oligonucleotide
aacuuggcuguaaucaguuaugccg

SEQ ID NO: 147150 - RNA, 25 nt, Artificial Sequence
  Description of Artificial Sequence: Synthetic oligonucleotide
agaagccaaaauuaaaagaagucca

SEQ ID NO: 147151 - RNA, 25 nt, Artificial Sequence
  Description of Artificial Sequence: Synthetic oligonucleotide
auuaaaagaaguccaggugagguua

SEQ ID NO: 147152 - RNA, 25 nt, Artificial Sequence
  Description of Artificial Sequence: Synthetic oligonucleotide
gaauccggauuaucgggaagaggac

SEQ ID NO: 147153 - RNA, 25 nt, Artificial Sequence
  Description of Artificial Sequence: Synthetic oligonucleotide
aaugugacaucaaagcaaguauugu

SEQ ID NO: 147154 - RNA, 25 nt, Artificial Sequence
  Description of Artificial Sequence: Synthetic oligonucleotide
caucaaagcaaguauuguagcacuc

SEQ ID NO: 147155 - RNA, 25 nt, Artificial Sequence
  Description of Artificial Sequence: Synthetic oligonucleotide
agagagagaaaacaaaaccacaaau

SEQ ID NO: 147156 - RNA, 25 nt, Artificial Sequence
  Description of Artificial Sequence: Synthetic oligonucleotide
ucgcuguaguauuuaagcccauaca

SEQ ID NO: 147157 - RNA, 25 nt, Artificial Sequence
  Description of Artificial Sequence: Synthetic oligonucleotide
cgcuguaguauuuaagcccauacag

SEQ ID NO: 147158 - RNA, 25 nt, Artificial Sequence
  Description of Artificial Sequence: Synthetic oligonucleotide
auuuaagcccauacagaaaccuucc

SEQ ID NO: 147159 - RNA, 25 nt, Artificial Sequence
  Description of Artificial Sequence: Synthetic oligonucleotide
auuaaaauaaacaugguauaccuac

SEQ ID NO: 147160 - RNA, 25 nt, Artificial Sequence
  Description of Artificial Sequence: Synthetic oligonucleotide
cuguucugaucggccaguuuucgga

SEQ ID NO: 147161 - RNA, 25 nt, Artificial Sequence
  Description of Artificial Sequence: Synthetic oligonucleotide
aaauaauuugaacuuuggaacaggg

SEQ ID NO: 147162 - RNA, 25 nt, Artificial Sequence
  Description of Artificial Sequence: Synthetic oligonucleotide
ugcgaccuuaauuuaacuuuccagu

SEQ ID NO: 147163 - RNA, 25 nt, Artificial Sequence
  Description of Artificial Sequence: Synthetic oligonucleotide
cugagaaagcuaaaguuugguuuug

SEQ ID NO: 147164 - RNA, 25 nt, Artificial Sequence
  Description of Artificial Sequence: Synthetic oligonucleotide
aguaaagaugcuacuucccacugua

SEQ ID NO: 147165 - RNA, 25 nt, Artificial Sequence
  Description of Artificial Sequence: Synthetic oligonucleotide
cugcuuaauugcugauaccauauga

SEQ ID NO: 147166 - RNA, 25 nt, Artificial Sequence
  Description of Artificial Sequence: Synthetic oligonucleotide
uaccauaugaaugaaacaugggcug

SEQ ID NO: 147167 - RNA, 25 nt, Artificial Sequence
  Description of Artificial Sequence: Synthetic oligonucleotide
aacuuucuuauccaacuuuuucaua

SEQ ID NO: 147168 - RNA, 25 nt, Artificial Sequence
  Description of Artificial Sequence: Synthetic oligonucleotide
ccuugcaugacaucaugaggccgga

SEQ ID NO: 147169 - RNA, 25 nt, Artificial Sequence
  Description of Artificial Sequence: Synthetic oligonucleotide
ugaauuuguauaugacugcauuugu

SEQ ID NO: 147170 - RNA, 25 nt, Artificial Sequence
  Description of Artificial Sequence: Synthetic oligonucleotide
gaauccuaguagaauguuuacuacc

SEQ ID NO: 147171 - RNA, 25 nt, Artificial Sequence
  Description of Artificial Sequence: Synthetic oligonucleotide
gaaagggaagaauuuuuugaugaaa

SEQ ID NO: 147172 - RNA, 25 nt, Artificial Sequence
  Description of Artificial Sequence: Synthetic oligonucleotide
uaucggcaugccagugugugaauuu

SEQ ID NO: 147173 - RNA, 25 nt, Artificial Sequence
  Description of Artificial Sequence: Synthetic oligonucleotide
caccucauaguagagcaauguaugu

SEQ ID NO: 147174 - RNA, 25 nt, Artificial Sequence
  Description of Artificial Sequence: Synthetic oligonucleotide
ccagaauugccaaagcacauauaua

SEQ ID NO: 147175 - RNA, 25 nt, Artificial Sequence
  Description of Artificial Sequence: Synthetic oligonucleotide
uggugaucuggguaauaguuucucc

SEQ ID NO: 147176 - RNA, 25 nt, Artificial Sequence
  Description of Artificial Sequence: Synthetic oligonucleotide
gaucuggguaauaguuucuccaaau

SEQ ID NO: 147177 - RNA, 25 nt, Artificial Sequence
  Description of Artificial Sequence: Synthetic oligonucleotide
ggaugugaugaauacuuccuagaaa

SEQ ID NO: 147178 - RNA, 25 nt, Artificial Sequence
  Description of Artificial Sequence: Synthetic oligonucleotide
cauuuccacagcuacaccauauaug

SEQ ID NO: 147179 - RNA, 25 nt, Artificial Sequence
  Description of Artificial Sequence: Synthetic oligonucleotide
acagcuacaccauauaugaauggag

SEQ ID NO: 147180 - RNA, 25 nt, Artificial Sequence
  Description of Artificial Sequence: Synthetic oligonucleotide
ugcaguucuuacacgagaagaagau

SEQ ID NO: 147181 - RNA, 25 nt, Artificial Sequence
  Description of Artificial Sequence: Synthetic oligonucleotide
acgagaagaagaucauuuacaggga

SEQ ID NO: 147182 - RNA, 25 nt, Artificial Sequence
  Description of Artificial Sequence: Synthetic oligonucleotide
cgagaagaagaucauuuacagggac

SEQ ID NO: 147183 - RNA, 25 nt, Artificial Sequence
  Description of Artificial Sequence: Synthetic oligonucleotide
aagaagaucauuuacagggaccuga

SEQ ID NO: 147184 - RNA, 25 nt, Artificial Sequence
  Description of Artificial Sequence: Synthetic oligonucleotide
agaggaagagguguuugacugcauc

SEQ ID NO: 147185 - RNA, 25 nt, Artificial Sequence
  Description of Artificial Sequence: Synthetic oligonucleotide
gaggaagagguguuugacugcaucg

SEQ ID NO: 147186 - RNA, 25 nt, Artificial Sequence
  Description of Artificial Sequence: Synthetic oligonucleotide
cuacuuugagggcgaguucacaggg

SEQ ID NO: 147187 - RNA, 25 nt, Artificial Sequence
  Description of Artificial Sequence: Synthetic oligonucleotide
agggcaucuccuggcaccucugucc

SEQ ID NO: 147188 - RNA, 25 nt, Artificial Sequence
  Description of Artificial Sequence: Synthetic oligonucleotide
ggagugauaugguuugucuuuuuaa

SEQ ID NO: 147189 - RNA, 25 nt, Artificial Sequence
  Description of Artificial Sequence: Synthetic oligonucleotide
gagugauaugguuugucuuuuuaag

SEQ ID NO: 147190 - RNA, 25 nt, Artificial Sequence
  Description of Artificial Sequence: Synthetic oligonucleotide
ugcaguaaagauccuaaagguuguc

SEQ ID NO: 147191 - RNA, 25 nt, Artificial Sequence
  Description of Artificial Sequence: Synthetic oligonucleotide
aguaaagauccuaaagguugucgac

SEQ ID NO: 147192 - RNA, 25 nt, Artificial Sequence
  Description of Artificial Sequence: Synthetic oligonucleotide
ugacaaaggacaaccuggcaauugu

SEQ ID NO: 147193 - RNA, 25 nt, Artificial Sequence
  Description of Artificial Sequence: Synthetic oligonucleotide
gcaauugugacccaguggugcgagg

SEQ ID NO: 147194 - RNA, 25 nt, Artificial Sequence
  Description of Artificial Sequence: Synthetic oligonucleotide
aacaucauccauagagacaugaaau

SEQ ID NO: 147195 - RNA, 25 nt, Artificial Sequence
  Description of Artificial Sequence: Synthetic oligonucleotide
ugaaauccaacaauauauuucucca

SEQ ID NO: 147196 - RNA, 25 nt, Artificial Sequence
  Description of Artificial Sequence: Synthetic oligonucleotide
aacaauauauuucuccaugaaggcu

SEQ ID NO: 147197 - RNA, 25 nt, Artificial Sequence
  Description of Artificial Sequence: Synthetic oligonucleotide
aacaguaaagucacgcuggaguggu

SEQ ID NO: 147198 - RNA, 25 nt, Artificial Sequence
  Description of Artificial Sequence: Synthetic oligonucleotide
ugugaagaaaguaaaggaagagagg

SEQ ID NO: 147199 - RNA, 25 nt, Artificial Sequence
  Description of Artificial Sequence: Synthetic oligonucleotide
cuuccgagccauccuugcaucgggc

SEQ ID NO: 147200 - RNA, 25 nt, Artificial Sequence
  Description of Artificial Sequence: Synthetic oligonucleotide
aauggagguugaauauccuacugug

SEQ ID NO: 147201 - RNA, 25 nt, Artificial Sequence
  Description of Artificial Sequence: Synthetic oligonucleotide
ggagguugaauauccuacuguguaa

SEQ ID NO: 147202 - RNA, 25 nt, Artificial Sequence
  Description of Artificial Sequence: Synthetic oligonucleotide
auuuugaguuuucccuuguagugua

SEQ ID NO: 147203 - RNA, 25 nt, Artificial Sequence
  Description of Artificial Sequence: Synthetic oligonucleotide
uauccuguuuguucuuuguugauug

SEQ ID NO: 147204 - RNA, 25 nt, Artificial Sequence
  Description of Artificial Sequence: Synthetic oligonucleotide
ccuguuuguucuuuguugauugaaa

SEQ ID NO: 147205 - RNA, 25 nt, Artificial Sequence
  Description of Artificial Sequence: Synthetic oligonucleotide
cucuacagccuucuuuuucuuccau

SEQ ID NO: 147206 - RNA, 25 nt, Artificial Sequence
  Description of Artificial Sequence: Synthetic oligonucleotide
ucuuccauagcuaaucuuccuucua

SEQ ID NO: 147207 - RNA, 25 nt, Artificial Sequence
  Description of Artificial Sequence: Synthetic oligonucleotide
auaaucuuccuguugaaugcuucau

SEQ ID NO: 147208 - RNA, 25 nt, Artificial Sequence
  Description of Artificial Sequence: Synthetic oligonucleotide
uaaucuuccuguugaaugcuucaug

SEQ ID NO: 147209 - RNA, 25 nt, Artificial Sequence
  Description of Artificial Sequence: Synthetic oligonucleotide
cuucaugacuugaauucuacuuuga

SEQ ID NO: 147210 - RNA, 25 nt, Artificial Sequence
  Description of Artificial Sequence: Synthetic oligonucleotide
aagagggagagaagcaacuacagac

SEQ ID NO: 147211 - RNA, 25 nt, Artificial Sequence
  Description of Artificial Sequence: Synthetic oligonucleotide
cgucuccuaccagaccaaggucaac

SEQ ID NO: 147212 - RNA, 25 nt, Artificial Sequence
  Description of Artificial Sequence: Synthetic oligonucleotide
gaucaaucggcccgacuaucucgac

SEQ ID NO: 147213 - RNA, 25 nt, Artificial Sequence
  Description of Artificial Sequence: Synthetic oligonucleotide
ggacgaacauccaaccuucccaaac

SEQ ID NO: 147214 - RNA, 25 nt, Artificial Sequence
  Description of Artificial Sequence: Synthetic oligonucleotide
agggucggaacccaagcuuagaacu

SEQ ID NO: 147215 - RNA, 25 nt, Artificial Sequence
  Description of Artificial Sequence: Synthetic oligonucleotide
ucggaacccaagcuuagaacuuuaa

SEQ ID NO: 147216 - RNA, 25 nt, Artificial Sequence
  Description of Artificial Sequence: Synthetic oligonucleotide
acccaagcuuagaacuuuaagcaac

SEQ ID NO: 147217 - RNA, 25 nt, Artificial Sequence
  Description of Artificial Sequence: Synthetic oligonucleotide
gaacuuuaagcaacaagaccaccac

SEQ ID NO: 147218 - RNA, 25 nt, Artificial Sequence
  Description of Artificial Sequence: Synthetic oligonucleotide
acuauucaguggcgagaaauaaagu

SEQ ID NO: 147219 - RNA, 25 nt, Artificial Sequence
  Description of Artificial Sequence: Synthetic oligonucleotide
cuauucaguggcgagaaauaaaguu

SEQ ID NO: 147220 - RNA, 25 nt, Artificial Sequence
  Description of Artificial Sequence: Synthetic oligonucleotide
aaacacagauaacaggaaaugaucc

SEQ ID NO: 147221 - RNA, 25 nt, Artificial Sequence
  Description of Artificial Sequence: Synthetic oligonucleotide
cuuaagaaaagagaagaaaugaaac

SEQ ID NO: 147222 - RNA, 25 nt, Artificial Sequence
  Description of Artificial Sequence: Synthetic oligonucleotide
cugaaggaguguguuuccauccucc

SEQ ID NO: 147223 - RNA, 25 nt, Artificial Sequence
  Description of Artificial Sequence: Synthetic oligonucleotide
ucaccgcgggacugaaaaucuuuga

SEQ ID NO: 147224 - RNA, 25 nt, Artificial Sequence
  Description of Artificial Sequence: Synthetic oligonucleotide
agcagaaauaagcgugccguucagg

SEQ ID NO: 147225 - RNA, 25 nt, Artificial Sequence
  Description of Artificial Sequence: Synthetic oligonucleotide
aagcgugccguucaggguccagaag

SEQ ID NO: 147226 - RNA, 25 nt, Artificial Sequence
  Description of Artificial Sequence: Synthetic oligonucleotide
agaaacagucacucaagacugcuug

SEQ ID NO: 147227 - RNA, 25 nt, Artificial Sequence
  Description of Artificial Sequence: Synthetic oligonucleotide
agaggaagaagguccaugucuuugg

SEQ ID NO: 147228 - RNA, 25 nt, Artificial Sequence
  Description of Artificial Sequence: Synthetic oligonucleotide
uguauucaaaauaugccugaaacac

SEQ ID NO: 147229 - RNA, 25 nt, Artificial Sequence
  Description of Artificial Sequence: Synthetic oligonucleotide
auuuuccucccuuucucuguaccuc

SEQ ID NO: 147230 - RNA, 25 nt, Artificial Sequence
  Description of Artificial Sequence: Synthetic oligonucleotide
caaagaaagauagagcaagacaaga

SEQ ID NO: 147231 - RNA, 25 nt, Artificial Sequence
  Description of Artificial Sequence: Synthetic oligonucleotide
aagaaagauagagcaagacaagaaa

SEQ ID NO: 147232 - RNA, 25 nt, Artificial Sequence
  Description of Artificial Sequence: Synthetic oligonucleotide
gaaagcauuuguuuguacaagaucc

SEQ ID NO: 147233 - RNA, 25 nt, Artificial Sequence
  Description of Artificial Sequence: Synthetic oligonucleotide
ugaguuaaacgaacguacuugcaga

SEQ ID NO: 147234 - RNA, 25 nt, Artificial Sequence
  Description of Artificial Sequence: Synthetic oligonucleotide
acugauacagaacgaucgauacaga

SEQ ID NO: 147235 - RNA, 25 nt, Artificial Sequence
  Description of Artificial Sequence: Synthetic oligonucleotide
auauuauauauauauaaaaauaaau

SEQ ID NO: 147236 - RNA, 25 nt, Artificial Sequence
  Description of Artificial Sequence: Synthetic oligonucleotide
auuauauauauauaaaaauaaauau

SEQ ID NO: 147237 - RNA, 25 nt, Artificial Sequence
  Description of Artificial Sequence: Synthetic oligonucleotide
ucacuggauguauuugacugcugug

SEQ ID NO: 147238 - RNA, 25 nt, Artificial Sequence
  Description of Artificial Sequence: Synthetic oligonucleotide
cagggaagaggaggagaugagagac

SEQ ID NO: 147239 - RNA, 25 nt, Artificial Sequence
  Description of Artificial Sequence: Synthetic oligonucleotide
augaucuuuuuuuugucccacuugg

SEQ ID NO: 147240 - RNA, 27 nt, Artificial Sequence
  Description of Artificial Sequence: Synthetic oligonucleotide
ggccgugaacuccucaucaaaauaccu

SEQ ID NO: 147241 - RNA, 27 nt, Artificial Sequence
  Description of Artificial Sequence: Synthetic oligonucleotide
uggugugauggugaucaucugggccgu

SEQ ID NO: 147242 - RNA, 27 nt, Artificial Sequence
  Description of Artificial Sequence: Synthetic oligonucleotide
aaacccgcaggauaguuuucuucccua

SEQ ID NO: 147243 - RNA, 27 nt, Artificial Sequence
  Description of Artificial Sequence: Synthetic oligonucleotide
caaacuggaugaaauaaauuaaaaccc

SEQ ID NO: 147244 - RNA, 27 nt, Artificial Sequence
  Description of Artificial Sequence: Synthetic oligonucleotide
agaaguccuuaacauuucccuacguga

SEQ ID NO: 147245 - RNA, 27 nt, Artificial Sequence
  Description of Artificial Sequence: Synthetic oligonucleotide
cucugucccacuggguaaacccuggcc

SEQ ID NO: 147246 - RNA, 27 nt, Artificial Sequence
  Description of Artificial Sequence: Synthetic oligonucleotide
cacaauaacaaauuuaaaccuugcucc

SEQ ID NO: 147247 - RNA, 27 nt, Artificial Sequence
  Description of Artificial Sequence: Synthetic oligonucleotide
aaaugcauuugaacaacauaauacaca

SEQ ID NO: 147248 - RNA, 27 nt, Artificial Sequence
  Description of Artificial Sequence: Synthetic oligonucleotide
ggcuuuccugucacaaagauuaaaaac

SEQ ID NO: 147249 - RNA, 27 nt, Artificial Sequence
  Description of Artificial Sequence: Synthetic oligonucleotide
agggcuuuccugucacaaagauuaaaa

SEQ ID NO: 147250 - RNA, 27 nt, Artificial Sequence
  Description of Artificial Sequence: Synthetic oligonucleotide
ggccaugcugggagacauaagcagcag

SEQ ID NO: 147251 - RNA, 27 nt, Artificial Sequence
  Description of Artificial Sequence: Synthetic oligonucleotide
ucagggagaagcuucugaaacacuucu

SEQ ID NO: 147252 - RNA, 27 nt, Artificial Sequence
  Description of Artificial Sequence: Synthetic oligonucleotide
aagggcuucuuccuuauugauggucag

SEQ ID NO: 147253 - RNA, 27 nt, Artificial Sequence
  Description of Artificial Sequence: Synthetic oligonucleotide
ugaagggcuucuuccuuauugaugguc

SEQ ID NO: 147254 - RNA, 27 nt, Artificial Sequence
  Description of Artificial Sequence: Synthetic oligonucleotide
cgcugaagggcuucuuccuuauugaug

SEQ ID NO: 147255 - RNA, 27 nt, Artificial Sequence
  Description of Artificial Sequence: Synthetic oligonucleotide
gccgcugaagggcuucuuccuuauuga

SEQ ID NO: 147256 - RNA, 27 nt, Artificial Sequence
  Description of Artificial Sequence: Synthetic oligonucleotide
acuggccgcugaagggcuucuuccuua

SEQ ID NO: 147257 - RNA, 27 nt, Artificial Sequence
  Description of Artificial Sequence: Synthetic oligonucleotide
cggagcuuuucaccuuuaguuaugcuu

SEQ ID NO: 147258 - RNA, 27 nt, Artificial Sequence
  Description of Artificial Sequence: Synthetic oligonucleotide
ccggagcuuuucaccuuuaguuaugcu

SEQ ID NO: 147259 - RNA, 27 nt, Artificial Sequence
  Description of Artificial Sequence: Synthetic oligonucleotide
cagacuguugacuggcgugauguaguu

SEQ ID NO: 147260 - RNA, 27 nt, Artificial Sequence
  Description of Artificial Sequence: Synthetic oligonucleotide
cuuuugaacucugcuuaaauccagugg

SEQ ID NO: 147261 - RNA, 27 nt, Artificial Sequence
  Description of Artificial Sequence: Synthetic oligonucleotide
gcuuuugaacucugcuuaaauccagug

SEQ ID NO: 147262 - RNA, 27 nt, Artificial Sequence
  Description of Artificial Sequence: Synthetic oligonucleotide
agggcuuuugaacucugcuuaaaucca

SEQ ID NO: 147263 - RNA, 27 nt, Artificial Sequence
  Description of Artificial Sequence: Synthetic oligonucleotide
aagggcuuuugaacucugcuuaaaucc

SEQ ID NO: 147264 - RNA, 27 nt, Artificial Sequence
  Description of Artificial Sequence: Synthetic oligonucleotide
ugaagggcuuuugaacucugcuuaaau

SEQ ID NO: 147265 - RNA, 27 nt, Artificial Sequence
  Description of Artificial Sequence: Synthetic oligonucleotide
cugaagggcuuuugaacucugcuuaaa

SEQ ID NO: 147266 - RNA, 27 nt, Artificial Sequence
  Description of Artificial Sequence: Synthetic oligonucleotide
cgcugaagggcuuuugaacucugcuua

SEQ ID NO: 147267 - RNA, 27 nt, Artificial Sequence
  Description of Artificial Sequence: Synthetic oligonucleotide
cgagcggcuucacucagacccugaggc

SEQ ID NO: 147268 - RNA, 27 nt, Artificial Sequence
  Description of Artificial Sequence: Synthetic oligonucleotide
uugacuggcgugauguaguugcuuggg

SEQ ID NO: 147269 - RNA, 27 nt, Artificial Sequence
  Description of Artificial Sequence: Synthetic oligonucleotide
cacgcaccaagaagcugccauugaucc

SEQ ID NO: 147270 - RNA, 27 nt, Artificial Sequence
  Description of Artificial Sequence: Synthetic oligonucleotide
cugaugaauccaaugugggcuggaauc

SEQ ID NO: 147271 - RNA, 27 nt, Artificial Sequence
  Description of Artificial Sequence: Synthetic oligonucleotide
cuuagguauuccacauucucagcugug

SEQ ID NO: 147272 - RNA, 27 nt, Artificial Sequence
  Description of Artificial Sequence: Synthetic oligonucleotide
ugagccucaaauuaggagauacguuuu

SEQ ID NO: 147273 - RNA, 27 nt, Artificial Sequence
  Description of Artificial Sequence: Synthetic oligonucleotide
ccaauuguagagaaauuauuuuaggaa

SEQ ID NO: 147274 - RNA, 27 nt, Artificial Sequence
  Description of Artificial Sequence: Synthetic oligonucleotide
ggcuccuaacuagcugaaucuuccaau

SEQ ID NO: 147275 - RNA, 27 nt, Artificial Sequence
  Description of Artificial Sequence: Synthetic oligonucleotide
guggauauugacuaggagaguuuaaaa

SEQ ID NO: 147276 - RNA, 27 nt, Artificial Sequence
  Description of Artificial Sequence: Synthetic oligonucleotide
ugugacugaacauaacuguaggcugaa

SEQ ID NO: 147277 - RNA, 27 nt, Artificial Sequence
  Description of Artificial Sequence: Synthetic oligonucleotide
guaugugugugugacugaacauaacug

SEQ ID NO: 147278 - RNA, 27 nt, Artificial Sequence
  Description of Artificial Sequence: Synthetic oligonucleotide
aagcaaaaggaacauuuuguaugugug

SEQ ID NO: 147279 - RNA, 27 nt, Artificial Sequence
  Description of Artificial Sequence: Synthetic oligonucleotide
aaaaauuacuuuaaaagcaaaaggaac

SEQ ID NO: 147280 - RNA, 27 nt, Artificial Sequence
  Description of Artificial Sequence: Synthetic oligonucleotide
ccauugacuguugcuucacaggucaga

SEQ ID NO: 147281 - RNA, 27 nt, Artificial Sequence
  Description of Artificial Sequence: Synthetic oligonucleotide
auugguuugucgaugugugagauaguu

SEQ ID NO: 147282 - RNA, 27 nt, Artificial Sequence
  Description of Artificial Sequence: Synthetic oligonucleotide
agugguagcaguacaauugaggacaag

SEQ ID NO: 147283 - RNA, 27 nt, Artificial Sequence
  Description of Artificial Sequence: Synthetic oligonucleotide
uaagaccgcuugccagcuacgguuuca

SEQ ID NO: 147284 - RNA, 27 nt, Artificial Sequence
  Description of Artificial Sequence: Synthetic oligonucleotide
agccgguaagaccgcuugccagcuacg

SEQ ID NO: 147285 - RNA, 27 nt, Artificial Sequence
  Description of Artificial Sequence: Synthetic oligonucleotide
gguaacccaucuuuuaaccauacaacu

SEQ ID NO: 147286 - RNA, 27 nt, Artificial Sequence
  Description of Artificial Sequence: Synthetic oligonucleotide
ucgcagguaacccaucuuuuaaccaua

SEQ ID NO: 147287 - RNA, 27 nt, Artificial Sequence
  Description of Artificial Sequence: Synthetic oligonucleotide
cucagcaagauuguauaauucccugca

SEQ ID NO: 147288 - RNA, 27 nt, Artificial Sequence
  Description of Artificial Sequence: Synthetic oligonucleotide
acuguuuuaugcucagcaagauuguau

SEQ ID NO: 147289 - RNA, 27 nt, Artificial Sequence
  Description of Artificial Sequence: Synthetic oligonucleotide
aggauaaaggacucuucauuauuggaa

SEQ ID NO: 147290 - RNA, 27 nt, Artificial Sequence
  Description of Artificial Sequence: Synthetic oligonucleotide
caacuugcguuggaacauccaaagugu

SEQ ID NO: 147291 - RNA, 27 nt, Artificial Sequence
  Description of Artificial Sequence: Synthetic oligonucleotide
augguuucaguuuaguggaagcauuua

SEQ ID NO: 147292 - RNA, 27 nt, Artificial Sequence
  Description of Artificial Sequence: Synthetic oligonucleotide
auauuuaacaaagucaaacuuucucac

SEQ ID NO: 147293 - RNA, 27 nt, Artificial Sequence
  Description of Artificial Sequence: Synthetic oligonucleotide
aacuuuuaauauacaguaguucuuuuc

SEQ ID NO: 147294 - RNA, 27 nt, Artificial Sequence
  Description of Artificial Sequence: Synthetic oligonucleotide
guuaagucaaaacccguauuucuaaag

SEQ ID NO: 147295 - RNA, 27 nt, Artificial Sequence
  Description of Artificial Sequence: Synthetic oligonucleotide
gugcugaguuugcuguacccauguuga

SEQ ID NO: 147296 - RNA, 27 nt, Artificial Sequence
  Description of Artificial Sequence: Synthetic oligonucleotide
ugaggucagcaucuucugugucuuuac

SEQ ID NO: 147297 - RNA, 27 nt, Artificial Sequence
  Description of Artificial Sequence: Synthetic oligonucleotide
gcgaucugaauaaaccucccuacuagc

SEQ ID NO: 147298 - RNA, 27 nt, Artificial Sequence
  Description of Artificial Sequence: Synthetic oligonucleotide
aucccagaacccugcugcagaaggcca

SEQ ID NO: 147299 - RNA, 27 nt, Artificial Sequence
  Description of Artificial Sequence: Synthetic oligonucleotide
cauaauuuccaauauguaccagaccuu

SEQ ID NO: 147300 - RNA, 27 nt, Artificial Sequence
  Description of Artificial Sequence: Synthetic oligonucleotide
cuagugcuuccaucggaaggacuaggu

SEQ ID NO: 147301 - RNA, 27 nt, Artificial Sequence
  Description of Artificial Sequence: Synthetic oligonucleotide
uccacauaaaaacaauauucacuggga

SEQ ID NO: 147302 - RNA, 27 nt, Artificial Sequence
  Description of Artificial Sequence: Synthetic oligonucleotide
ucuaccaauuccaacuugaauucauug

SEQ ID NO: 147303 - RNA, 27 nt, Artificial Sequence
  Description of Artificial Sequence: Synthetic oligonucleotide
ucuccaagucuaaaucuguguccugag

SEQ ID NO: 147304 - RNA, 27 nt, Artificial Sequence
  Description of Artificial Sequence: Synthetic oligonucleotide
uggaauacuguaacugugcuuugagga

SEQ ID NO: 147305 - RNA, 27 nt, Artificial Sequence
  Description of Artificial Sequence: Synthetic oligonucleotide
uuaauucaucagugguggcagugguag

SEQ ID NO: 147306 - RNA, 27 nt, Artificial Sequence
  Description of Artificial Sequence: Synthetic oligonucleotide
gugaugauguggcacuaguaguuucuu

SEQ ID NO: 147307 - RNA, 27 nt, Artificial Sequence
  Description of Artificial Sequence: Synthetic oligonucleotide
ucuguuuggugaggcuguccgacuuug

SEQ ID NO: 147308 - RNA, 27 nt, Artificial Sequence
  Description of Artificial Sequence: Synthetic oligonucleotide
ccaucauguuccauuuuucgcuuucuc

SEQ ID NO: 147309 - RNA, 27 nt, Artificial Sequence
  Description of Artificial Sequence: Synthetic oligonucleotide
gcagucuacaugcuaaaucagagggua

SEQ ID NO: 147310 - RNA, 27 nt, Artificial Sequence
  Description of Artificial Sequence: Synthetic oligonucleotide
cauaaauagauccuuaaauagcucaaa

SEQ ID NO: 147311 - RNA, 27 nt, Artificial Sequence
  Description of Artificial Sequence: Synthetic oligonucleotide
ugauaauagugcuuuuucaccuuuuuc

SEQ ID NO: 147312 - RNA, 27 nt, Artificial Sequence
  Description of Artificial Sequence: Synthetic oligonucleotide
gcagaacugauaauagugcuuuuucac

SEQ ID NO: 147313 - RNA, 27 nt, Artificial Sequence
  Description of Artificial Sequence: Synthetic oligonucleotide
guagguuuaaucuuucuuuucagccau

SEQ ID NO: 147314 - RNA, 27 nt, Artificial Sequence
  Description of Artificial Sequence: Synthetic oligonucleotide
agaaggauuuuauuauaaggguuuaau

SEQ ID NO: 147315 - RNA, 27 nt, Artificial Sequence
  Description of Artificial Sequence: Synthetic oligonucleotide
gucuacagcauuggcuaauaguaugaa

SEQ ID NO: 147316 - RNA, 27 nt, Artificial Sequence
  Description of Artificial Sequence: Synthetic oligonucleotide
cuauuccuaucaaaaugcuucugucua

SEQ ID NO: 147317 - RNA, 27 nt, Artificial Sequence
  Description of Artificial Sequence: Synthetic oligonucleotide
ucagggccauuaucuuauuugcucuau

SEQ ID NO: 147318 - RNA, 27 nt, Artificial Sequence
  Description of Artificial Sequence: Synthetic oligonucleotide
ugcuugaggaagagaaaaauguugguc

SEQ ID NO: 147319 - RNA, 27 nt, Artificial Sequence
  Description of Artificial Sequence: Synthetic oligonucleotide
ugggcugaacuuuucucauacuuaaag

SEQ ID NO: 147320 - RNA, 27 nt, Artificial Sequence
  Description of Artificial Sequence: Synthetic oligonucleotide
gguucagcagccaucuuuauuccugcg

SEQ ID NO: 147321 - RNA, 27 nt, Artificial Sequence
  Description of Artificial Sequence: Synthetic oligonucleotide
ugaagagaacuuggucauucaaauuuc

SEQ ID NO: 147322 - RNA, 27 nt, Artificial Sequence
  Description of Artificial Sequence: Synthetic oligonucleotide
cucuaggcuggcuaucuuuauacauac

SEQ ID NO: 147323 - RNA, 27 nt, Artificial Sequence
  Description of Artificial Sequence: Synthetic oligonucleotide
acacuucacagagauaguuacagccau

SEQ ID NO: 147324 - RNA, 27 nt, Artificial Sequence
  Description of Artificial Sequence: Synthetic oligonucleotide
uugaaauuuucucacacuucacagaga

SEQ ID NO: 147325 - RNA, 27 nt, Artificial Sequence
  Description of Artificial Sequence: Synthetic oligonucleotide
ucaggaggauucauuuccuuaaaggaa

SEQ ID NO: 147326 - RNA, 27 nt, Artificial Sequence
  Description of Artificial Sequence: Synthetic oligonucleotide
auaugaugucacuuuuuguauccuuga

SEQ ID NO: 147327 - RNA, 27 nt, Artificial Sequence
  Description of Artificial Sequence: Synthetic oligonucleotide
uaugaugaagauucaaauugcaucuua

SEQ ID NO: 147328 - RNA, 27 nt, Artificial Sequence
  Description of Artificial Sequence: Synthetic oligonucleotide
uuaauagcuagucuucguuuugaacag

SEQ ID NO: 147329 - RNA, 27 nt, Artificial Sequence
  Description of Artificial Sequence: Synthetic oligonucleotide
auuuuuaguagagaugagguuucacca

SEQ ID NO: 147330 - RNA, 27 nt, Artificial Sequence
  Description of Artificial Sequence: Synthetic oligonucleotide
aggcgagauagagcuucucuuucguuc

SEQ ID NO: 147331 - RNA, 27 nt, Artificial Sequence
  Description of Artificial Sequence: Synthetic oligonucleotide
aacuggaccgaaggcgcuuguggagaa

SEQ ID NO: 147332 - RNA, 27 nt, Artificial Sequence
  Description of Artificial Sequence: Synthetic oligonucleotide
gcggcuacaucuuuggaaucuucuccu

SEQ ID NO: 147333 - RNA, 27 nt, Artificial Sequence
  Description of Artificial Sequence: Synthetic oligonucleotide
caagucuccucauugaauccagauugg

SEQ ID NO: 147334 - RNA, 27 nt, Artificial Sequence
  Description of Artificial Sequence: Synthetic oligonucleotide
uccucacuacucucaaaucuguucugg

SEQ ID NO: 147335 - RNA, 27 nt, Artificial Sequence
  Description of Artificial Sequence: Synthetic oligonucleotide
uuuguacucaucugcacagcucuggcu

SEQ ID NO: 147336 - RNA, 27 nt, Artificial Sequence
  Description of Artificial Sequence: Synthetic oligonucleotide
gcccauuaacaacaacaaucugaggug

SEQ ID NO: 147337 - RNA, 27 nt, Artificial Sequence
  Description of Artificial Sequence: Synthetic oligonucleotide
aauaaauuaaaaauaauuaaaauagug

SEQ ID NO: 147338 - RNA, 27 nt, Artificial Sequence
  Description of Artificial Sequence: Synthetic oligonucleotide
cauauuuaaauauuaauaaauuaaaaa

SEQ ID NO: 147339 - RNA, 27 nt, Artificial Sequence
  Description of Artificial Sequence: Synthetic oligonucleotide
gaaacaaaggauauucaaacugcauag

SEQ ID NO: 147340 - RNA, 27 nt, Artificial Sequence
  Description of Artificial Sequence: Synthetic oligonucleotide
caaacacuuagacgccagcagcauggg

SEQ ID NO: 147341 - RNA, 27 nt, Artificial Sequence
  Description of Artificial Sequence: Synthetic oligonucleotide
uuugucacaggugaaaugcacaucuga

SEQ ID NO: 147342 - RNA, 27 nt, Artificial Sequence
  Description of Artificial Sequence: Synthetic oligonucleotide
uaauucagccuggcacagguuuugauc

SEQ ID NO: 147343 - RNA, 27 nt, Artificial Sequence
  Description of Artificial Sequence: Synthetic oligonucleotide
auuguaagaaugacuacccacauucac

SEQ ID NO: 147344 - RNA, 27 nt, Artificial Sequence
  Description of Artificial Sequence: Synthetic oligonucleotide
caauuguaagaaugacuacccacauuc

SEQ ID NO: 147345 - RNA, 27 nt, Artificial Sequence
  Description of Artificial Sequence: Synthetic oligonucleotide
guacacucucugaugcucauuuucaua

SEQ ID NO: 147346 - RNA, 27 nt, Artificial Sequence
  Description of Artificial Sequence: Synthetic oligonucleotide
cugcugaguucuacaugaaaagcaaau

SEQ ID NO: 147347 - RNA, 27 nt, Artificial Sequence
  Description of Artificial Sequence: Synthetic oligonucleotide
uacugaaaauaaauauagaaauacaac

SEQ ID NO: 147348 - RNA, 27 nt, Artificial Sequence
  Description of Artificial Sequence: Synthetic oligonucleotide
uuccauuuaagaaacauuaaucaaaac

SEQ ID NO: 147349 - RNA, 27 nt, Artificial Sequence
  Description of Artificial Sequence: Synthetic oligonucleotide
acaauuuuaggcacuauacacguuguu

SEQ ID NO: 147350 - RNA, 27 nt, Artificial Sequence
  Description of Artificial Sequence: Synthetic oligonucleotide
ccagauguuaguagccaaggauauggu

SEQ ID NO: 147351 - RNA, 27 nt, Artificial Sequence
  Description of Artificial Sequence: Synthetic oligonucleotide
agcucacagucuccagauguuaguagc

SEQ ID NO: 147352 - RNA, 27 nt, Artificial Sequence
  Description of Artificial Sequence: Synthetic oligonucleotide
auuaauaaaaagcacacaacuuauggc

SEQ ID NO: 147353 - RNA, 27 nt, Artificial Sequence
  Description of Artificial Sequence: Synthetic oligonucleotide
aauguaagaagagccaaaaugaugcau

SEQ ID NO: 147354 - RNA, 27 nt, Artificial Sequence
  Description of Artificial Sequence: Synthetic oligonucleotide
acauuuuuacaaauguaagaagagcca

SEQ ID NO: 147355 - RNA, 27 nt, Artificial Sequence
  Description of Artificial Sequence: Synthetic oligonucleotide
aauaugaauuaagaugaccuaaucugu

SEQ ID NO: 147356 - RNA, 27 nt, Artificial Sequence
  Description of Artificial Sequence: Synthetic oligonucleotide
ucaugauuaguucuuucaauuccaucc

SEQ ID NO: 147357 - RNA, 27 nt, Artificial Sequence
  Description of Artificial Sequence: Synthetic oligonucleotide
cccaagagcagaaggaaugagugugca

SEQ ID NO: 147358 - RNA, 27 nt, Artificial Sequence
  Description of Artificial Sequence: Synthetic oligonucleotide
cucaaagcuacugguuaccucuacacc

SEQ ID NO: 147359 - RNA, 27 nt, Artificial Sequence
  Description of Artificial Sequence: Synthetic oligonucleotide
ugaaauauuacguggcaugugguuggg

SEQ ID NO: 147360 - RNA, 27 nt, Artificial Sequence
  Description of Artificial Sequence: Synthetic oligonucleotide
agugaagagaauaacuuguuuccgaag

SEQ ID NO: 147361 - RNA, 27 nt, Artificial Sequence
  Description of Artificial Sequence: Synthetic oligonucleotide
uuucuuagcauuaguuauugggaguga

SEQ ID NO: 147362 - RNA, 27 nt, Artificial Sequence
  Description of Artificial Sequence: Synthetic oligonucleotide
uugauuuucagcauuucuuagcauuag

SEQ ID NO: 147363 - RNA, 27 nt, Artificial Sequence
  Description of Artificial Sequence: Synthetic oligonucleotide
aaaguaaucauauuuagagaaagacag

SEQ ID NO: 147364 - RNA, 27 nt, Artificial Sequence
  Description of Artificial Sequence: Synthetic oligonucleotide
uguagaacaaaaugccugaaauucagc

SEQ ID NO: 147365 - RNA, 27 nt, Artificial Sequence
  Description of Artificial Sequence: Synthetic oligonucleotide
gagagucccgggugagagggaaucgcc

SEQ ID NO: 147366 - RNA, 27 nt, Artificial Sequence
  Description of Artificial Sequence: Synthetic oligonucleotide
cuuuacuuuaaagguucacuuuccuug

SEQ ID NO: 147367 - RNA, 27 nt, Artificial Sequence
  Description of Artificial Sequence: Synthetic oligonucleotide
ccaggcuuccagagcaugcagccuccu

SEQ ID NO: 147368 - RNA, 27 nt, Artificial Sequence
  Description of Artificial Sequence: Synthetic oligonucleotide
cucucuuuuguuuucuguucagagaaa

SEQ ID NO: 147369 - RNA, 27 nt, Artificial Sequence
  Description of Artificial Sequence: Synthetic oligonucleotide
cggcauaacugauuacagccaaguuca

SEQ ID NO: 147370 - RNA, 27 nt, Artificial Sequence
  Description of Artificial Sequence: Synthetic oligonucleotide
uggacuucuuuuaauuuuggcuucuuc

SEQ ID NO: 147371 - RNA, 27 nt, Artificial Sequence
  Description of Artificial Sequence: Synthetic oligonucleotide
uaaccucaccuggacuucuuuuaauuu

SEQ ID NO: 147372 - RNA, 27 nt, Artificial Sequence
  Description of Artificial Sequence: Synthetic oligonucleotide
guccucuucccgauaauccggauucag

SEQ ID NO: 147373 - RNA, 27 nt, Artificial Sequence
  Description of Artificial Sequence: Synthetic oligonucleotide
acaauacuugcuuugaugucacauuaa

SEQ ID NO: 147374 - RNA, 27 nt, Artificial Sequence
  Description of Artificial Sequence: Synthetic oligonucleotide
gagugcuacaauacuugcuuugauguc

SEQ ID NO: 147375 - RNA, 27 nt, Artificial Sequence
  Description of Artificial Sequence: Synthetic oligonucleotide
auuugugguuuuguuuucucucucucu

SEQ ID NO: 147376 - RNA, 27 nt, Artificial Sequence
  Description of Artificial Sequence: Synthetic oligonucleotide
uguaugggcuuaaauacuacagcgagg

SEQ ID NO: 147377 - RNA, 27 nt, Artificial Sequence
  Description of Artificial Sequence: Synthetic oligonucleotide
cuguaugggcuuaaauacuacagcgag

SEQ ID NO: 147378 - RNA, 27 nt, Artificial Sequence
  Description of Artificial Sequence: Synthetic oligonucleotide
ggaagguuucuguaugggcuuaaauac

SEQ ID NO: 147379 - RNA, 27 nt, Artificial Sequence
  Description of Artificial Sequence: Synthetic oligonucleotide
guagguauaccauguuuauuuuaauac

SEQ ID NO: 147380 - RNA, 27 nt, Artificial Sequence
  Description of Artificial Sequence: Synthetic oligonucleotide
uccgaaaacuggccgaucagaacagcc

SEQ ID NO: 147381 - RNA, 27 nt, Artificial Sequence
  Description of Artificial Sequence: Synthetic oligonucleotide
cccuguuccaaaguucaaauuauuugu

SEQ ID NO: 147382 - RNA, 27 nt, Artificial Sequence
  Description of Artificial Sequence: Synthetic oligonucleotide
acuggaaaguuaaauuaaggucgcaau

SEQ ID NO: 147383 - RNA, 27 nt, Artificial Sequence
  Description of Artificial Sequence: Synthetic oligonucleotide
caaaaccaaacuuuagcuuucucagcc

SEQ ID NO: 147384 - RNA, 27 nt, Artificial Sequence
  Description of Artificial Sequence: Synthetic oligonucleotide
uacagugggaaguagcaucuuuacuuu

SEQ ID NO: 147385 - RNA, 27 nt, Artificial Sequence
  Description of Artificial Sequence: Synthetic oligonucleotide
ucauaugguaucagcaauuaagcagua

SEQ ID NO: 147386 - RNA, 27 nt, Artificial Sequence
  Description of Artificial Sequence: Synthetic oligonucleotide
cagcccauguuucauucauaugguauc

SEQ ID NO: 147387 - RNA, 27 nt, Artificial Sequence
  Description of Artificial Sequence: Synthetic oligonucleotide
uaugaaaaaguuggauaagaaaguugg

SEQ ID NO: 147388 - RNA, 27 nt, Artificial Sequence
  Description of Artificial Sequence: Synthetic oligonucleotide
uccggccucaugaugucaugcaaggcu

SEQ ID NO: 147389 - RNA, 27 nt, Artificial Sequence
  Description of Artificial Sequence: Synthetic oligonucleotide
acaaaugcagucauauacaaauucagg

SEQ ID NO: 147390 - RNA, 27 nt, Artificial Sequence
  Description of Artificial Sequence: Synthetic oligonucleotide
gguaguaaacauucuacuaggauucuu

SEQ ID NO: 147391 - RNA, 27 nt, Artificial Sequence
  Description of Artificial Sequence: Synthetic oligonucleotide
uuucaucaaaaaauucuucccuuucug

SEQ ID NO: 147392 - RNA, 27 nt, Artificial Sequence
  Description of Artificial Sequence: Synthetic oligonucleotide
aaauucacacacuggcaugccgauagc

SEQ ID NO: 147393 - RNA, 27 nt, Artificial Sequence
  Description of Artificial Sequence: Synthetic oligonucleotide
acauacauugcucuacuaugaggugaa

SEQ ID NO: 147394 - RNA, 27 nt, Artificial Sequence
  Description of Artificial Sequence: Synthetic oligonucleotide
uauauaugugcuuuggcaauucuggug

SEQ ID NO: 147395 - RNA, 27 nt, Artificial Sequence
  Description of Artificial Sequence: Synthetic oligonucleotide
ggagaaacuauuacccagaucaccacu

SEQ ID NO: 147396 - RNA, 27 nt, Artificial Sequence
  Description of Artificial Sequence: Synthetic oligonucleotide
auuuggagaaacuauuacccagaucac

SEQ ID NO: 147397 - RNA, 27 nt, Artificial Sequence
  Description of Artificial Sequence: Synthetic oligonucleotide
uuucuaggaaguauucaucacauccac

SEQ ID NO: 147398 - RNA, 27 nt, Artificial Sequence
  Description of Artificial Sequence: Synthetic oligonucleotide
cauauaugguguagcuguggaaaugcg

SEQ ID NO: 147399 - RNA, 27 nt, Artificial Sequence
  Description of Artificial Sequence: Synthetic oligonucleotide
cuccauucauauaugguguagcugugg

SEQ ID NO: 147400 - RNA, 27 nt, Artificial Sequence
  Description of Artificial Sequence: Synthetic oligonucleotide
aucuucuucucguguaagaacugcagc

SEQ ID NO: 147401 - RNA, 27 nt, Artificial Sequence
  Description of Artificial Sequence: Synthetic oligonucleotide
ucccuguaaaugaucuucuucucgugu

SEQ ID NO: 147402 - RNA, 27 nt, Artificial Sequence
  Description of Artificial Sequence: Synthetic oligonucleotide
gucccuguaaaugaucuucuucucgug

SEQ ID NO: 147403 - RNA, 27 nt, Artificial Sequence
  Description of Artificial Sequence: Synthetic oligonucleotide
ucaggucccuguaaaugaucuucuucu

SEQ ID NO: 147404 - RNA, 27 nt, Artificial Sequence
  Description of Artificial Sequence: Synthetic oligonucleotide
gaugcagucaaacaccucuuccucugu

SEQ ID NO: 147405 - RNA, 27 nt, Artificial Sequence
  Description of Artificial Sequence: Synthetic oligonucleotide
cgaugcagucaaacaccucuuccucug

SEQ ID NO: 147406 - RNA, 27 nt, Artificial Sequence
  Description of Artificial Sequence: Synthetic oligonucleotide
cccugugaacucgcccucaaaguagcg

SEQ ID NO: 147407 - RNA, 27 nt, Artificial Sequence
  Description of Artificial Sequence: Synthetic oligonucleotide
ggacagaggugccaggagaugcccuca

SEQ ID NO: 147408 - RNA, 27 nt, Artificial Sequence
  Description of Artificial Sequence: Synthetic oligonucleotide
uuaaaaagacaaaccauaucacuccuu

SEQ ID NO: 147409 - RNA, 27 nt, Artificial Sequence
  Description of Artificial Sequence: Synthetic oligonucleotide
cuuaaaaagacaaaccauaucacuccu

SEQ ID NO: 147410 - RNA, 27 nt, Artificial Sequence
  Description of Artificial Sequence: Synthetic oligonucleotide
gacaaccuuuaggaucuuuacugcaac

SEQ ID NO: 147411 - RNA, 27 nt, Artificial Sequence
  Description of Artificial Sequence: Synthetic oligonucleotide
gucgacaaccuuuaggaucuuuacugc

SEQ ID NO: 147412 - RNA, 27 nt, Artificial Sequence
  Description of Artificial Sequence: Synthetic oligonucleotide
acaauugccagguuguccuuugucaug

SEQ ID NO: 147413 - RNA, 27 nt, Artificial Sequence
  Description of Artificial Sequence: Synthetic oligonucleotide
ccucgcaccacugggucacaauugcca

SEQ ID NO: 147414 - RNA, 27 nt, Artificial Sequence
  Description of Artificial Sequence: Synthetic oligonucleotide
auuucaugucucuauggaugauguucu

SEQ ID NO: 147415 - RNA, 27 nt, Artificial Sequence
  Description of Artificial Sequence: Synthetic oligonucleotide
uggagaaauauauuguuggauuucaug

SEQ ID NO: 147416 - RNA, 27 nt, Artificial Sequence
  Description of Artificial Sequence: Synthetic oligonucleotide
agccuucauggagaaauauauuguugg

SEQ ID NO: 147417 - RNA, 27 nt, Artificial Sequence
  Description of Artificial Sequence: Synthetic oligonucleotide
accacuccagcgugacuuuacuguugc

SEQ ID NO: 147418 - RNA, 27 nt, Artificial Sequence
  Description of Artificial Sequence: Synthetic oligonucleotide
ccucucuuccuuuacuuucuucacaca

SEQ ID NO: 147419 - RNA, 27 nt, Artificial Sequence
  Description of Artificial Sequence: Synthetic oligonucleotide
gcccgaugcaaggauggcucggaagcg

SEQ ID NO: 147420 - RNA, 27 nt, Artificial Sequence
  Description of Artificial Sequence: Synthetic oligonucleotide
cacaguaggauauucaaccuccauuuc

SEQ ID NO: 147421 - RNA, 27 nt, Artificial Sequence
  Description of Artificial Sequence: Synthetic oligonucleotide
uuacacaguaggauauucaaccuccau

SEQ ID NO: 147422 - RNA, 27 nt, Artificial Sequence
  Description of Artificial Sequence: Synthetic oligonucleotide
uacacuacaagggaaaacucaaaaucu

SEQ ID NO: 147423 - RNA, 27 nt, Artificial Sequence
  Description of Artificial Sequence: Synthetic oligonucleotide
caaucaacaaagaacaaacaggauaaa

SEQ ID NO: 147424 - RNA, 27 nt, Artificial Sequence
  Description of Artificial Sequence: Synthetic oligonucleotide
uuucaaucaacaaagaacaaacaggau

SEQ ID NO: 147425 - RNA, 27 nt, Artificial Sequence
  Description of Artificial Sequence: Synthetic oligonucleotide
auggaagaaaaagaaggcuguagagaa

SEQ ID NO: 147426 - RNA, 27 nt, Artificial Sequence
  Description of Artificial Sequence: Synthetic oligonucleotide
uagaaggaagauuagcuauggaagaaa

SEQ ID NO: 147427 - RNA, 27 nt, Artificial Sequence
  Description of Artificial Sequence: Synthetic oligonucleotide
augaagcauucaacaggaagauuauuu

SEQ ID NO: 147428 - RNA, 27 nt, Artificial Sequence
  Description of Artificial Sequence: Synthetic oligonucleotide
caugaagcauucaacaggaagauuauu

SEQ ID NO: 147429 - RNA, 27 nt, Artificial Sequence
  Description of Artificial Sequence: Synthetic oligonucleotide
ucaaaguagaauucaagucaugaagca

SEQ ID NO: 147430 - RNA, 27 nt, Artificial Sequence
  Description of Artificial Sequence: Synthetic oligonucleotide
gucuguaguugcuucucucccucuuag

SEQ ID NO: 147431 - RNA, 27 nt, Artificial Sequence
  Description of Artificial Sequence: Synthetic oligonucleotide
guugaccuuggucugguaggagacggc

SEQ ID NO: 147432 - RNA, 27 nt, Artificial Sequence
  Description of Artificial Sequence: Synthetic oligonucleotide
gucgagauagucgggccgauugaucuc

SEQ ID NO: 147433 - RNA, 27 nt, Artificial Sequence
  Description of Artificial Sequence: Synthetic oligonucleotide
guuugggaagguuggauguucguccuc

SEQ ID NO: 147434 - RNA, 27 nt, Artificial Sequence
  Description of Artificial Sequence: Synthetic oligonucleotide
aguucuaagcuuggguuccgacccuaa

SEQ ID NO: 147435 - RNA, 27 nt, Artificial Sequence
  Description of Artificial Sequence: Synthetic oligonucleotide
uuaaaguucuaagcuuggguuccgacc

SEQ ID NO: 147436 - RNA, 27 nt, Artificial Sequence
  Description of Artificial Sequence: Synthetic oligonucleotide
guugcuuaaaguucuaagcuuggguuc

SEQ ID NO: 147437 - RNA, 27 nt, Artificial Sequence
  Description of Artificial Sequence: Synthetic oligonucleotide
gugguggucuuguugcuuaaaguucua

SEQ ID NO: 147438 - RNA, 27 nt, Artificial Sequence
  Description of Artificial Sequence: Synthetic oligonucleotide
acuuuauuucucgccacugaauaguag

SEQ ID NO: 147439 - RNA, 27 nt, Artificial Sequence
  Description of Artificial Sequence: Synthetic oligonucleotide
aacuuuauuucucgccacugaauagua

SEQ ID NO: 147440 - RNA, 27 nt, Artificial Sequence
  Description of Artificial Sequence: Synthetic oligonucleotide
ggaucauuuccuguuaucuguguuugu

SEQ ID NO: 147441 - RNA, 27 nt, Artificial Sequence
  Description of Artificial Sequence: Synthetic oligonucleotide
guuucauuucuucucuuuucuuaaggc

SEQ ID NO: 147442 - RNA, 27 nt, Artificial Sequence
  Description of Artificial Sequence: Synthetic oligonucleotide
ggaggauggaaacacacuccuucaguu

SEQ ID NO: 147443 - RNA, 27 nt, Artificial Sequence
  Description of Artificial Sequence: Synthetic oligonucleotide
ucaaagauuuucagucccgcggugaca

SEQ ID NO: 147444 - RNA, 27 nt, Artificial Sequence
  Description of Artificial Sequence: Synthetic oligonucleotide
ccugaacggcacgcuuauuucugcugu

SEQ ID NO: 147445 - RNA, 27 nt, Artificial Sequence
  Description of Artificial Sequence: Synthetic oligonucleotide
cuucuggacccugaacggcacgcuuau

SEQ ID NO: 147446 - RNA, 27 nt, Artificial Sequence
  Description of Artificial Sequence: Synthetic oligonucleotide
caagcagucuugagugacuguuucuuc

SEQ ID NO: 147447 - RNA, 27 nt, Artificial Sequence
  Description of Artificial Sequence: Synthetic oligonucleotide
ccaaagacauggaccuucuuccucuga

SEQ ID NO: 147448 - RNA, 27 nt, Artificial Sequence
  Description of Artificial Sequence: Synthetic oligonucleotide
guguuucaggcauauuuugaauacauc

SEQ ID NO: 147449 - RNA, 27 nt, Artificial Sequence
  Description of Artificial Sequence: Synthetic oligonucleotide
gagguacagagaaagggaggaaaauag

SEQ ID NO: 147450 - RNA, 27 nt, Artificial Sequence
  Description of Artificial Sequence: Synthetic oligonucleotide
ucuugucuugcucuaucuuucuuuggu

SEQ ID NO: 147451 - RNA, 27 nt, Artificial Sequence
  Description of Artificial Sequence: Synthetic oligonucleotide
uuucuugucuugcucuaucuuucuuug

SEQ ID NO: 147452 - RNA, 27 nt, Artificial Sequence
  Description of Artificial Sequence: Synthetic oligonucleotide
ggaucuuguacaaacaaaugcuuucuc

SEQ ID NO: 147453 - RNA, 27 nt, Artificial Sequence
  Description of Artificial Sequence: Synthetic oligonucleotide
ucugcaaguacguucguuuaacucaag

SEQ ID NO: 147454 - RNA, 27 nt, Artificial Sequence
  Description of Artificial Sequence: Synthetic oligonucleotide
ucuguaucgaucguucuguaucagucu

SEQ ID NO: 147455 - RNA, 27 nt, Artificial Sequence
  Description of Artificial Sequence: Synthetic oligonucleotide
auuuauuuuuauauauauauaauauau

SEQ ID NO: 147456 - RNA, 27 nt, Artificial Sequence
  Description of Artificial Sequence: Synthetic oligonucleotide
auauuuauuuuuauauauauauaauau

SEQ ID NO: 147457 - RNA, 27 nt, Artificial Sequence
  Description of Artificial Sequence: Synthetic oligonucleotide
cacagcagucaaauacauccagugaag

SEQ ID NO: 147458 - RNA, 27 nt, Artificial Sequence
  Description of Artificial Sequence: Synthetic oligonucleotide
gucucucaucuccuccucuucccuguc

SEQ ID NO: 147459 - RNA, 27 nt, Artificial Sequence
  Description of Artificial Sequence: Synthetic oligonucleotide
ccaagugggacaaaaaaaagaucaugc

SEQ ID NO: 147460 - RNA, 14 nt, Artificial Sequence
  Description of Artificial Sequence: Synthetic oligonucleotide
guauuuugaugagg

SEQ ID NO: 147461 - RNA, 12 nt, Artificial Sequence
  Description of Artificial Sequence: Synthetic oligonucleotide
ggcccagaugau

SEQ ID NO: 147462 - RNA, 14 nt, Artificial Sequence
  Description of Artificial Sequence: Synthetic oligonucleotide
gggaagaaaacuau

SEQ ID NO: 147463 - RNA, 15 nt, Artificial Sequence
  Description of Artificial Sequence: Synthetic oligonucleotide
guuuuaauuuauuuc

SEQ ID NO: 147464 - RNA, 12 nt, Artificial Sequence
  Description of Artificial Sequence: Synthetic oligonucleotide
acguagggaaau

SEQ ID NO: 147465 - RNA, 12 nt, Artificial Sequence
  Description of Artificial Sequence: Synthetic oligonucleotide
ccaggguuuacc

SEQ ID NO: 147466 - RNA, 11 nt, Artificial Sequence
  Description of Artificial Sequence: Synthetic oligonucleotide
agcaagguuua

SEQ ID NO: 147467 - RNA, 12 nt, Artificial Sequence
  Description of Artificial Sequence: Synthetic oligonucleotide
uguauuauguug

SEQ ID NO: 147468 - RNA, 15 nt, Artificial Sequence
  Description of Artificial Sequence: Synthetic oligonucleotide
uuuuaaucuuuguga

SEQ ID NO: 147469 - RNA, 14 nt, Artificial Sequence
  Description of Artificial Sequence: Synthetic oligonucleotide
uuaaucuuugugac

SEQ ID NO: 147470 - RNA, 13 nt, Artificial Sequence
  Description of Artificial Sequence: Synthetic oligonucleotide
gcugcuuaugucu

SEQ ID NO: 147471 - RNA, 14 nt, Artificial Sequence
  Description of Artificial Sequence: Synthetic oligonucleotide
aaguguuucagaag

SEQ ID NO: 147472 - RNA, 13 nt, Artificial Sequence
  Description of Artificial Sequence: Synthetic oligonucleotide
gaccaucaauaag

SEQ ID NO: 147473 - RNA, 13 nt, Artificial Sequence
  Description of Artificial Sequence: Synthetic oligonucleotide
ccaucaauaagga

SEQ ID NO: 147474 - RNA, 14 nt, Artificial Sequence
  Description of Artificial Sequence: Synthetic oligonucleotide
ucaauaaggaagaa

SEQ ID NO: 147475 - RNA, 14 nt, Artificial Sequence
  Description of Artificial Sequence: Synthetic oligonucleotide
aauaaggaagaagc

SEQ ID NO: 147476 - RNA, 13 nt, Artificial Sequence
  Description of Artificial Sequence: Synthetic oligonucleotide
aggaagaagcccu

SEQ ID NO: 147477 - RNA, 13 nt, Artificial Sequence
  Description of Artificial Sequence: Synthetic oligonucleotide
gcauaacuaaagg

SEQ ID NO: 147478 - RNA, 14 nt, Artificial Sequence
  Description of Artificial Sequence: Synthetic oligonucleotide
cauaacuaaaggug

SEQ ID NO: 147479 - RNA, 12 nt, Artificial Sequence
  Description of Artificial Sequence: Synthetic oligonucleotide
cuacaucacgcc

SEQ ID NO: 147480 - RNA, 12 nt, Artificial Sequence
  Description of Artificial Sequence: Synthetic oligonucleotide
acuggauuuaag

SEQ ID NO: 147481 - RNA, 12 nt, Artificial Sequence
  Description of Artificial Sequence: Synthetic oligonucleotide
cuggauuuaagc

SEQ ID NO: 147482 - RNA, 13 nt, Artificial Sequence
  Description of Artificial Sequence: Synthetic oligonucleotide
gauuuaagcagag

SEQ ID NO: 147483 - RNA, 13 nt, Artificial Sequence
  Description of Artificial Sequence: Synthetic oligonucleotide
auuuaagcagagu

SEQ ID NO: 147484 - RNA, 13 nt, Artificial Sequence
  Description of Artificial Sequence: Synthetic oligonucleotide
uuaagcagaguuc

SEQ ID NO: 147485 - RNA, 13 nt, Artificial Sequence
  Description of Artificial Sequence: Synthetic oligonucleotide
uaagcagaguuca

SEQ ID NO: 147486 - RNA, 14 nt, Artificial Sequence
  Description of Artificial Sequence: Synthetic oligonucleotide
agcagaguucaaaa

SEQ ID NO: 147487 - RNA, 12 nt, Artificial Sequence
  Description of Artificial Sequence: Synthetic oligonucleotide
cucagggucuga

SEQ ID NO: 147488 - RNA, 13 nt, Artificial Sequence
  Description of Artificial Sequence: Synthetic oligonucleotide
caagcaacuacau

SEQ ID NO: 147489 - RNA, 12 nt, Artificial Sequence
  Description of Artificial Sequence: Synthetic oligonucleotide
aucaauggcagc

SEQ ID NO: 147490 - RNA, 11 nt, Artificial Sequence
  Description of Artificial Sequence: Synthetic oligonucleotide
uuccagcccac

SEQ ID NO: 147491 - RNA, 12 nt, Artificial Sequence
  Description of Artificial Sequence: Synthetic oligonucleotide
cagcugagaaug

SEQ ID NO: 147492 - RNA, 13 nt, Artificial Sequence
  Description of Artificial Sequence: Synthetic oligonucleotide
aacguaucuccua

SEQ ID NO: 147493 - RNA, 14 nt, Artificial Sequence
  Description of Artificial Sequence: Synthetic oligonucleotide
ccuaaaauaauuuc

SEQ ID NO: 147494 - RNA, 13 nt, Artificial Sequence
  Description of Artificial Sequence: Synthetic oligonucleotide
uggaagauucagc

SEQ ID NO: 147495 - RNA, 12 nt, Artificial Sequence
  Description of Artificial Sequence: Synthetic oligonucleotide
uuaaacucuccu

SEQ ID NO: 147496 - RNA, 12 nt, Artificial Sequence
  Description of Artificial Sequence: Synthetic oligonucleotide
cagccuacaguu

SEQ ID NO: 147497 - RNA, 13 nt, Artificial Sequence
  Description of Artificial Sequence: Synthetic oligonucleotide
guuauguucaguc

SEQ ID NO: 147498 - RNA, 13 nt, Artificial Sequence
  Description of Artificial Sequence: Synthetic oligonucleotide
cacauacaaaaug

SEQ ID NO: 147499 - RNA, 9 nt, Artificial Sequence
  Description of Artificial Sequence: Synthetic oligonucleotide
uccuuuugc

SEQ ID NO: 147500 - RNA, 12 nt, Artificial Sequence
  Description of Artificial Sequence: Synthetic oligonucleotide
ugaccugugaag

SEQ ID NO: 147501 - RNA, 12 nt, Artificial Sequence
  Description of Artificial Sequence: Synthetic oligonucleotide
cuaucucacaca

SEQ ID NO: 147502 - RNA, 13 nt, Artificial Sequence
  Description of Artificial Sequence: Synthetic oligonucleotide
uguccucaauugu

SEQ ID NO: 147503 - RNA, 12 nt, Artificial Sequence
  Description of Artificial Sequence: Synthetic oligonucleotide
aaaccguagcug

SEQ ID NO: 147504 - RNA, 12 nt, Artificial Sequence
  Description of Artificial Sequence: Synthetic oligonucleotide
uagcuggcaagc

SEQ ID NO: 147505 - RNA, 14 nt, Artificial Sequence
  Description of Artificial Sequence: Synthetic oligonucleotide
uuguaugguuaaaa

SEQ ID NO: 147506 - RNA, 14 nt, Artificial Sequence
  Description of Artificial Sequence: Synthetic oligonucleotide
ugguuaaaagaugg

SEQ ID NO: 147507 - RNA, 13 nt, Artificial Sequence
  Description of Artificial Sequence: Synthetic oligonucleotide
cagggaauuauac

SEQ ID NO: 147508 - RNA, 12 nt, Artificial Sequence
  Description of Artificial Sequence: Synthetic oligonucleotide
acaaucuugcug

SEQ ID NO: 147509 - RNA, 13 nt, Artificial Sequence
  Description of Artificial Sequence: Synthetic oligonucleotide
ccaauaaugaaga

SEQ ID NO: 147510 - RNA, 13 nt, Artificial Sequence
  Description of Artificial Sequence: Synthetic oligonucleotide
acuuuggauguuc

SEQ ID NO: 147511 - RNA, 12 nt, Artificial Sequence
  Description of Artificial Sequence: Synthetic oligonucleotide
aaugcuuccacu

SEQ ID NO: 147512 - RNA, 11 nt, Artificial Sequence
  Description of Artificial Sequence: Synthetic oligonucleotide
gagaaaguuug

SEQ ID NO: 147513 - RNA, 11 nt, Artificial Sequence
  Description of Artificial Sequence: Synthetic oligonucleotide
aaagaacuacu

SEQ ID NO: 147514 - RNA, 12 nt, Artificial Sequence
  Description of Artificial Sequence: Synthetic oligonucleotide
uuagaaauacgg

SEQ ID NO: 147515 - RNA, 12 nt, Artificial Sequence
  Description of Artificial Sequence: Synthetic oligonucleotide
aacauggguaca

SEQ ID NO: 147516 - RNA, 14 nt, Artificial Sequence
  Description of Artificial Sequence: Synthetic oligonucleotide
aaagacacagaaga

SEQ ID NO: 147517 - RNA, 11 nt, Artificial Sequence
  Description of Artificial Sequence: Synthetic oligonucleotide
uaguagggagg

SEQ ID NO: 147518 - RNA, 12 nt, Artificial Sequence
  Description of Artificial Sequence: Synthetic oligonucleotide
gccuucugcagc

SEQ ID NO: 147519 - RNA, 10 nt, Artificial Sequence
  Description of Artificial Sequence: Synthetic oligonucleotide
ggucugguac

SEQ ID NO: 147520 - RNA, 12 nt, Artificial Sequence
  Description of Artificial Sequence: Synthetic oligonucleotide
cuaguccuuccg

SEQ ID NO: 147521 - RNA, 12 nt, Artificial Sequence
  Description of Artificial Sequence: Synthetic oligonucleotide
ccagugaauauu

SEQ ID NO: 147522 - RNA, 13 nt, Artificial Sequence
  Description of Artificial Sequence: Synthetic oligonucleotide
augaauucaaguu

SEQ ID NO: 147523 - RNA, 12 nt, Artificial Sequence
  Description of Artificial Sequence: Synthetic oligonucleotide
caggacacagau

SEQ ID NO: 147524 - RNA, 12 nt, Artificial Sequence
  Description of Artificial Sequence: Synthetic oligonucleotide
cucaaagcacag

SEQ ID NO: 147525 - RNA, 10 nt, Artificial Sequence
  Description of Artificial Sequence: Synthetic oligonucleotide
accacugcca

SEQ ID NO: 147526 - RNA, 13 nt, Artificial Sequence
  Description of Artificial Sequence: Synthetic oligonucleotide
gaaacuacuagug

SEQ ID NO: 147527 - RNA, 12 nt, Artificial Sequence
  Description of Artificial Sequence: Synthetic oligonucleotide
aagucggacagc

SEQ ID NO: 147528 - RNA, 13 nt, Artificial Sequence
  Description of Artificial Sequence: Synthetic oligonucleotide
gaaagcgaaaaau

SEQ ID NO: 147529 - RNA, 13 nt, Artificial Sequence
  Description of Artificial Sequence: Synthetic oligonucleotide
cccucugauuuag

SEQ ID NO: 147530 - RNA, 12 nt, Artificial Sequence
  Description of Artificial Sequence: Synthetic oligonucleotide
ugagcuauuuaa

SEQ ID NO: 147531 - RNA, 13 nt, Artificial Sequence
  Description of Artificial Sequence: Synthetic oligonucleotide
aaaaggugaaaaa

SEQ ID NO: 147532 - RNA, 14 nt, Artificial Sequence
  Description of Artificial Sequence: Synthetic oligonucleotide
gaaaaagcacuauu

SEQ ID NO: 147533 - RNA, 12 nt, Artificial Sequence
  Description of Artificial Sequence: Synthetic oligonucleotide
ggcugaaaagaa

SEQ ID NO: 147534 - RNA, 12 nt, Artificial Sequence
  Description of Artificial Sequence: Synthetic oligonucleotide
uaaacccuuaua

SEQ ID NO: 147535 - RNA, 13 nt, Artificial Sequence
  Description of Artificial Sequence: Synthetic oligonucleotide
cauacuauuagcc

SEQ ID NO: 147536 - RNA, 12 nt, Artificial Sequence
  Description of Artificial Sequence: Synthetic oligonucleotide
gacagaagcauu

SEQ ID NO: 147537 - RNA, 14 nt, Artificial Sequence
  Description of Artificial Sequence: Synthetic oligonucleotide
agagcaaauaagau

SEQ ID NO: 147538 - RNA, 14 nt, Artificial Sequence
  Description of Artificial Sequence: Synthetic oligonucleotide
ccaacauuuuucuc

SEQ ID NO: 147539 - RNA, 15 nt, Artificial Sequence
  Description of Artificial Sequence: Synthetic oligonucleotide
uuaaguaugagaaaa

SEQ ID NO: 147540 - RNA, 14 nt, Artificial Sequence
  Description of Artificial Sequence: Synthetic oligonucleotide
caggaauaaagaug

SEQ ID NO: 147541 - RNA, 13 nt, Artificial Sequence
  Description of Artificial Sequence: Synthetic oligonucleotide
aauuugaaugacc

SEQ ID NO: 147542 - RNA, 14 nt, Artificial Sequence
  Description of Artificial Sequence: Synthetic oligonucleotide
auguauaaagauag

SEQ ID NO: 147543 - RNA, 12 nt, Artificial Sequence
  Description of Artificial Sequence: Synthetic oligonucleotide
ggcuguaacuau

SEQ ID NO: 147544 - RNA, 11 nt, Artificial Sequence
  Description of Artificial Sequence: Synthetic oligonucleotide
ucugugaagug

SEQ ID NO: 147545 - RNA, 14 nt, Artificial Sequence
  Description of Artificial Sequence: Synthetic oligonucleotide
ccuuuaaggaaaug

SEQ ID NO: 147546 - RNA, 13 nt, Artificial Sequence
  Description of Artificial Sequence: Synthetic oligonucleotide
aaggauacaaaaa

SEQ ID NO: 147547 - RNA, 12 nt, Artificial Sequence
  Description of Artificial Sequence: Synthetic oligonucleotide
agaugcaauuug

SEQ ID NO: 147548 - RNA, 12 nt, Artificial Sequence
  Description of Artificial Sequence: Synthetic oligonucleotide
guucaaaacgaa

SEQ ID NO: 147549 - RNA, 11 nt, Artificial Sequence
  Description of Artificial Sequence: Synthetic oligonucleotide
gugaaaccuca

SEQ ID NO: 147550 - RNA, 13 nt, Artificial Sequence
  Description of Artificial Sequence: Synthetic oligonucleotide
acgaaagagaagc

SEQ ID NO: 147551 - RNA, 12 nt, Artificial Sequence
  Description of Artificial Sequence: Synthetic oligonucleotide
cuccacaagcgc

SEQ ID NO: 147552 - RNA, 14 nt, Artificial Sequence
  Description of Artificial Sequence: Synthetic oligonucleotide
gagaagauuccaaa

SEQ ID NO: 147553 - RNA, 13 nt, Artificial Sequence
  Description of Artificial Sequence: Synthetic oligonucleotide
aaucuggauucaa

SEQ ID NO: 147554 - RNA, 13 nt, Artificial Sequence
  Description of Artificial Sequence: Synthetic oligonucleotide
agaacagauuuga

SEQ ID NO: 147555 - RNA, 11 nt, Artificial Sequence
  Description of Artificial Sequence: Synthetic oligonucleotide
ccagagcugug

SEQ ID NO: 147556 - RNA, 12 nt, Artificial Sequence
  Description of Artificial Sequence: Synthetic oligonucleotide
ccucagauuguu

SEQ ID NO: 147557 - RNA, 12 nt, Artificial Sequence
  Description of Artificial Sequence: Synthetic oligonucleotide
cuauuuuaauua

SEQ ID NO: 147558 - RNA, 13 nt, Artificial Sequence
  Description of Artificial Sequence: Synthetic oligonucleotide
uuuaauuuauuaa

SEQ ID NO: 147559 - RNA, 12 nt, Artificial Sequence
  Description of Artificial Sequence: Synthetic oligonucleotide
augcaguuugaa

SEQ ID NO: 147560 - RNA, 11 nt, Artificial Sequence
  Description of Artificial Sequence: Synthetic oligonucleotide
caugcugcugg

SEQ ID NO: 147561 - RNA, 13 nt, Artificial Sequence
  Description of Artificial Sequence: Synthetic oligonucleotide
agaugugcauuuc

SEQ ID NO: 147562 - RNA, 12 nt, Artificial Sequence
  Description of Artificial Sequence: Synthetic oligonucleotide
ucaaaaccugug

SEQ ID NO: 147563 - RNA, 11 nt, Artificial Sequence
  Description of Artificial Sequence: Synthetic oligonucleotide
gaaugugggua

SEQ ID NO: 147564 - RNA, 10 nt, Artificial Sequence
  Description of Artificial Sequence: Synthetic oligonucleotide
auguggguag

SEQ ID NO: 147565 - RNA, 13 nt, Artificial Sequence
  Description of Artificial Sequence: Synthetic oligonucleotide
ugaaaaugagcau

SEQ ID NO: 147566 - RNA, 13 nt, Artificial Sequence
  Description of Artificial Sequence: Synthetic oligonucleotide
uugcuuuucaugu

SEQ ID NO: 147567 - RNA, 12 nt, Artificial Sequence
  Description of Artificial Sequence: Synthetic oligonucleotide
uguauuucuaua

SEQ ID NO: 147568 - RNA, 13 nt, Artificial Sequence
  Description of Artificial Sequence: Synthetic oligonucleotide
uuugauuaauguu

SEQ ID NO: 147569 - RNA, 12 nt, Artificial Sequence
  Description of Artificial Sequence: Synthetic oligonucleotide
caacguguauag

SEQ ID NO: 147570 - RNA, 12 nt, Artificial Sequence
  Description of Artificial Sequence: Synthetic oligonucleotide
cauauccuuggc

SEQ ID NO: 147571 - RNA, 13 nt, Artificial Sequence
  Description of Artificial Sequence: Synthetic oligonucleotide
uacuaacaucugg

SEQ ID NO: 147572 - RNA, 11 nt, Artificial Sequence
  Description of Artificial Sequence: Synthetic oligonucleotide
cauaaguugug

SEQ ID NO: 147573 - RNA, 12 nt, Artificial Sequence
  Description of Artificial Sequence: Synthetic oligonucleotide
gcaucauuuugg

SEQ ID NO: 147574 - RNA, 10 nt, Artificial Sequence
  Description of Artificial Sequence: Synthetic oligonucleotide
gcucuucuua

SEQ ID NO: 147575 - RNA, 10 nt, Artificial Sequence
  Description of Artificial Sequence: Synthetic oligonucleotide
agauuagguc

SEQ ID NO: 147576 - RNA, 12 nt, Artificial Sequence
  Description of Artificial Sequence: Synthetic oligonucleotide
auggaauugaaa

SEQ ID NO: 147577 - RNA, 13 nt, Artificial Sequence
  Description of Artificial Sequence: Synthetic oligonucleotide
cacacucauuccu

SEQ ID NO: 147578 - RNA, 12 nt, Artificial Sequence
  Description of Artificial Sequence: Synthetic oligonucleotide
uguagagguaac

SEQ ID NO: 147579 - RNA, 11 nt, Artificial Sequence
  Description of Artificial Sequence: Synthetic oligonucleotide
caaccacaugc

SEQ ID NO: 147580 - RNA, 12 nt, Artificial Sequence
  Description of Artificial Sequence: Synthetic oligonucleotide
ucggaaacaagu

SEQ ID NO: 147581 - RNA, 11 nt, Artificial Sequence
  Description of Artificial Sequence: Synthetic oligonucleotide
acucccaauaa

SEQ ID NO: 147582 - RNA, 13 nt, Artificial Sequence
  Description of Artificial Sequence: Synthetic oligonucleotide
aaugcuaagaaau

SEQ ID NO: 147583 - RNA, 11 nt, Artificial Sequence
  Description of Artificial Sequence: Synthetic oligonucleotide
gucuuucucua

SEQ ID NO: 147584 - RNA, 11 nt, Artificial Sequence
  Description of Artificial Sequence: Synthetic oligonucleotide
ugaauuucagg

SEQ ID NO: 147585 - RNA, 13 nt, Artificial Sequence
  Description of Artificial Sequence: Synthetic oligonucleotide
cgauucccucuca

SEQ ID NO: 147586 - RNA, 11 nt, Artificial Sequence
  Description of Artificial Sequence: Synthetic oligonucleotide
aggaaagugaa

SEQ ID NO: 147587 - RNA, 12 nt, Artificial Sequence
  Description of Artificial Sequence: Synthetic oligonucleotide
gaggcugcaugc

SEQ ID NO: 147588 - RNA, 11 nt, Artificial Sequence
  Description of Artificial Sequence: Synthetic oligonucleotide
ucucugaacag

SEQ ID NO: 147589 - RNA, 12 nt, Artificial Sequence
  Description of Artificial Sequence: Synthetic oligonucleotide
aacuuggcugua

SEQ ID NO: 147590 - RNA, 12 nt, Artificial Sequence
  Description of Artificial Sequence: Synthetic oligonucleotide
agaagccaaaau

SEQ ID NO: 147591 - RNA, 14 nt, Artificial Sequence
  Description of Artificial Sequence: Synthetic oligonucleotide
auuaaaagaagucc

SEQ ID NO: 147592 - RNA, 14 nt, Artificial Sequence
  Description of Artificial Sequence: Synthetic oligonucleotide
gaauccggauuauc

SEQ ID NO: 147593 - RNA, 12 nt, Artificial Sequence
  Description of Artificial Sequence: Synthetic oligonucleotide
aaugugacauca

SEQ ID NO: 147594 - RNA, 13 nt, Artificial Sequence
  Description of Artificial Sequence: Synthetic oligonucleotide
caucaaagcaagu

SEQ ID NO: 147595 - RNA, 11 nt, Artificial Sequence
  Description of Artificial Sequence: Synthetic oligonucleotide
agagagagaaa

SEQ ID NO: 147596 - RNA, 13 nt, Artificial Sequence
  Description of Artificial Sequence: Synthetic oligonucleotide
ucgcuguaguauu

SEQ ID NO: 147597 - RNA, 14 nt, Artificial Sequence
  Description of Artificial Sequence: Synthetic oligonucleotide
cgcuguaguauuua

SEQ ID NO: 147598 - RNA, 13 nt, Artificial Sequence
  Description of Artificial Sequence: Synthetic oligonucleotide
auuuaagcccaua

SEQ ID NO: 147599 - RNA, 15 nt, Artificial Sequence
  Description of Artificial Sequence: Synthetic oligonucleotide
auuaaaauaaacaug

SEQ ID NO: 147600 - RNA, 12 nt, Artificial Sequence
  Description of Artificial Sequence: Synthetic oligonucleotide
cuguucugaucg

SEQ ID NO: 147601 - RNA, 16 nt, Artificial Sequence
  Description of Artificial Sequence: Synthetic oligonucleotide
aaauaauuugaacuuu

SEQ ID NO: 147602 - RNA, 12 nt, Artificial Sequence
  Description of Artificial Sequence: Synthetic oligonucleotide
ugcgaccuuaau

SEQ ID NO: 147603 - RNA, 11 nt, Artificial Sequence
  Description of Artificial Sequence: Synthetic oligonucleotide
cugagaaagcu

SEQ ID NO: 147604 - RNA, 13 nt, Artificial Sequence
  Description of Artificial Sequence: Synthetic oligonucleotide
aguaaagaugcua

SEQ ID NO: 147605 - RNA, 12 nt, Artificial Sequence
  Description of Artificial Sequence: Synthetic oligonucleotide
cugcuuaauugc

SEQ ID NO: 147606 - RNA, 14 nt, Artificial Sequence
  Description of Artificial Sequence: Synthetic oligonucleotide
uaccauaugaauga

SEQ ID NO: 147607 - RNA, 12 nt, Artificial Sequence
  Description of Artificial Sequence: Synthetic oligonucleotide
aacuuucuuauc

SEQ ID NO: 147608 - RNA, 13 nt, Artificial Sequence
  Description of Artificial Sequence: Synthetic oligonucleotide
ccuugcaugacau

SEQ ID NO: 147609 - RNA, 14 nt, Artificial Sequence
  Description of Artificial Sequence: Synthetic oligonucleotide
ugaauuuguauaug

SEQ ID NO: 147610 - RNA, 12 nt, Artificial Sequence
  Description of Artificial Sequence: Synthetic oligonucleotide
gaauccuaguag

SEQ ID NO: 147611 - RNA, 10 nt, Artificial Sequence
  Description of Artificial Sequence: Synthetic oligonucleotide
gaaagggaag

SEQ ID NO: 147612 - RNA, 11 nt, Artificial Sequence
  Description of Artificial Sequence: Synthetic oligonucleotide
uaucggcaugc

SEQ ID NO: 147613 - RNA, 12 nt, Artificial Sequence
  Description of Artificial Sequence: Synthetic oligonucleotide
caccucauagua

SEQ ID NO: 147614 - RNA, 11 nt, Artificial Sequence
  Description of Artificial Sequence: Synthetic oligonucleotide
ccagaauugcc

SEQ ID NO: 147615 - RNA, 11 nt, Artificial Sequence
  Description of Artificial Sequence: Synthetic oligonucleotide
uggugaucugg

SEQ ID NO: 147616 - RNA, 12 nt, Artificial Sequence
  Description of Artificial Sequence: Synthetic oligonucleotide
gaucuggguaau

SEQ ID NO: 147617 - RNA, 12 nt, Artificial Sequence
  Description of Artificial Sequence: Synthetic oligonucleotide
ggaugugaugaa

SEQ ID NO: 147618 - RNA, 12 nt, Artificial Sequence
  Description of Artificial Sequence: Synthetic oligonucleotide
cauuuccacagc

SEQ ID NO: 147619 - RNA, 11 nt, Artificial Sequence
  Description of Artificial Sequence: Synthetic oligonucleotide
acagcuacacc

SEQ ID NO: 147620 - RNA, 12 nt, Artificial Sequence
  Description of Artificial Sequence: Synthetic oligonucleotide
ugcaguucuuac

SEQ ID NO: 147621 - RNA, 12 nt, Artificial Sequence
  Description of Artificial Sequence: Synthetic oligonucleotide
acgagaagaaga

SEQ ID NO: 147622 - RNA, 12 nt, Artificial Sequence
  Description of Artificial Sequence: Synthetic oligonucleotide
cgagaagaagau

SEQ ID NO: 147623 - RNA, 15 nt, Artificial Sequence
  Description of Artificial Sequence: Synthetic oligonucleotide
aagaagaucauuuac

SEQ ID NO: 147624 - RNA, 11 nt, Artificial Sequence
  Description of Artificial Sequence: Synthetic oligonucleotide
agaggaagagg

SEQ ID NO: 147625 - RNA, 12 nt, Artificial Sequence
  Description of Artificial Sequence: Synthetic oligonucleotide
gaggaagaggug

SEQ ID NO: 147626 - RNA, 13 nt, Artificial Sequence
  Description of Artificial Sequence: Synthetic oligonucleotide
cuacuuugagggc

SEQ ID NO: 147627 - RNA, 12 nt, Artificial Sequence
  Description of Artificial Sequence: Synthetic oligonucleotide
agggcaucuccu

SEQ ID NO: 147628 - RNA, 10 nt, Artificial Sequence
  Description of Artificial Sequence: Synthetic oligonucleotide
ggagugauau

SEQ ID NO: 147629 - RNA, 11 nt, Artificial Sequence
  Description of Artificial Sequence: Synthetic oligonucleotide
gagugauaugg

SEQ ID NO: 147630 - RNA, 12 nt, Artificial Sequence
  Description of Artificial Sequence: Synthetic oligonucleotide
ugcaguaaagau

SEQ ID NO: 147631 - RNA, 13 nt, Artificial Sequence
  Description of Artificial Sequence: Synthetic oligonucleotide
aguaaagauccua

SEQ ID NO: 147632 - RNA, 12 nt, Artificial Sequence
  Description of Artificial Sequence: Synthetic oligonucleotide
ugacaaaggaca

SEQ ID NO: 147633 - RNA, 13 nt, Artificial Sequence
  Description of Artificial Sequence: Synthetic oligonucleotide
gcaauugugaccc

SEQ ID NO: 147634 - RNA, 12 nt, Artificial Sequence
  Description of Artificial Sequence: Synthetic oligonucleotide
aacaucauccau

SEQ ID NO: 147635 - RNA, 12 nt, Artificial Sequence
  Description of Artificial Sequence: Synthetic oligonucleotide
ugaaauccaaca

SEQ ID NO: 147636 - RNA, 15 nt, Artificial Sequence
  Description of Artificial Sequence: Synthetic oligonucleotide
aacaauauauuucuc

SEQ ID NO: 147637 - RNA, 14 nt, Artificial Sequence
  Description of Artificial Sequence: Synthetic oligonucleotide
aacaguaaagucac

SEQ ID NO: 147638 - RNA, 14 nt, Artificial Sequence
  Description of Artificial Sequence: Synthetic oligonucleotide
ugugaagaaaguaa

SEQ ID NO: 147639 - RNA, 13 nt, Artificial Sequence
  Description of Artificial Sequence: Synthetic oligonucleotide
cuuccgagccauc

SEQ ID NO: 147640 - RNA, 12 nt, Artificial Sequence
  Description of Artificial Sequence: Synthetic oligonucleotide
aauggagguuga

SEQ ID NO: 147641 - RNA, 12 nt, Artificial Sequence
  Description of Artificial Sequence: Synthetic oligonucleotide
ggagguugaaua

SEQ ID NO: 147642 - RNA, 13 nt, Artificial Sequence
  Description of Artificial Sequence: Synthetic oligonucleotide
auuuugaguuuuc

SEQ ID NO: 147643 - RNA, 12 nt, Artificial Sequence
  Description of Artificial Sequence: Synthetic oligonucleotide
uauccuguuugu

SEQ ID NO: 147644 - RNA, 11 nt, Artificial Sequence
  Description of Artificial Sequence: Synthetic oligonucleotide
ccuguuuguuc

SEQ ID NO: 147645 - RNA, 10 nt, Artificial Sequence
  Description of Artificial Sequence: Synthetic oligonucleotide
cucuacagcc

SEQ ID NO: 147646 - RNA, 12 nt, Artificial Sequence
  Description of Artificial Sequence: Synthetic oligonucleotide
ucuuccauagcu

SEQ ID NO: 147647 - RNA, 12 nt, Artificial Sequence
  Description of Artificial Sequence: Synthetic oligonucleotide
auaaucuuccug

SEQ ID NO: 147648 - RNA, 12 nt, Artificial Sequence
  Description of Artificial Sequence: Synthetic oligonucleotide
uaaucuuccugu

SEQ ID NO: 147649 - RNA, 12 nt, Artificial Sequence
  Description of Artificial Sequence: Synthetic oligonucleotide
cuucaugacuug

SEQ ID NO: 147650 - RNA, 12 nt, Artificial Sequence
  Description of Artificial Sequence: Synthetic oligonucleotide
aagagggagaga

SEQ ID NO: 147651 - RNA, 12 nt, Artificial Sequence
  Description of Artificial Sequence: Synthetic oligonucleotide
cgucuccuacca

SEQ ID NO: 147652 - RNA, 12 nt, Artificial Sequence
  Description of Artificial Sequence: Synthetic oligonucleotide
gaucaaucggcc

SEQ ID NO: 147653 - RNA, 12 nt, Artificial Sequence
  Description of Artificial Sequence: Synthetic oligonucleotide
ggacgaacaucc

SEQ ID NO: 147654 - RNA, 11 nt, Artificial Sequence
  Description of Artificial Sequence: Synthetic oligonucleotide
agggucggaac

SEQ ID NO: 147655 - RNA, 10 nt, Artificial Sequence
  Description of Artificial Sequence: Synthetic oligonucleotide
ucggaaccca

SEQ ID NO: 147656 - RNA, 11 nt, Artificial Sequence
  Description of Artificial Sequence: Synthetic oligonucleotide
acccaagcuua

SEQ ID NO: 147657 - RNA, 14 nt, Artificial Sequence
  Description of Artificial Sequence: Synthetic oligonucleotide
gaacuuuaagcaac

SEQ ID NO: 147658 - RNA, 11 nt, Artificial Sequence
  Description of Artificial Sequence: Synthetic oligonucleotide
acuauucagug

SEQ ID NO: 147659 - RNA, 11 nt, Artificial Sequence
  Description of Artificial Sequence: Synthetic oligonucleotide
cuauucagugg

SEQ ID NO: 147660 - RNA, 13 nt, Artificial Sequence
  Description of Artificial Sequence: Synthetic oligonucleotide
aaacacagauaac

SEQ ID NO: 147661 - RNA, 12 nt, Artificial Sequence
  Description of Artificial Sequence: Synthetic oligonucleotide
cuuaagaaaaga

SEQ ID NO: 147662 - RNA, 12 nt, Artificial Sequence
  Description of Artificial Sequence: Synthetic oligonucleotide
cugaaggagugu

SEQ ID NO: 147663 - RNA, 10 nt, Artificial Sequence
  Description of Artificial Sequence: Synthetic oligonucleotide
ucaccgcggg

SEQ ID NO: 147664 - RNA, 14 nt, Artificial Sequence
  Description of Artificial Sequence: Synthetic oligonucleotide
agcagaaauaagcg

SEQ ID NO: 147665 - RNA, 12 nt, Artificial Sequence
  Description of Artificial Sequence: Synthetic oligonucleotide
aagcgugccguu

SEQ ID NO: 147666 - RNA, 12 nt, Artificial Sequence
  Description of Artificial Sequence: Synthetic oligonucleotide
agaaacagucac

SEQ ID NO: 147667 - RNA, 12 nt, Artificial Sequence
  Description of Artificial Sequence: Synthetic oligonucleotide
agaggaagaagg

SEQ ID NO: 147668 - RNA, 14 nt, Artificial Sequence
  Description of Artificial Sequence: Synthetic oligonucleotide
uguauucaaaauau

SEQ ID NO: 147669 - RNA, 13 nt, Artificial Sequence
  Description of Artificial Sequence: Synthetic oligonucleotide
auuuuccucccuu

SEQ ID NO: 147670 - RNA, 13 nt, Artificial Sequence
  Description of Artificial Sequence: Synthetic oligonucleotide
caaagaaagauag

SEQ ID NO: 147671 - RNA, 12 nt, Artificial Sequence
  Description of Artificial Sequence: Synthetic oligonucleotide
aagaaagauaga

SEQ ID NO: 147672 - RNA, 13 nt, Artificial Sequence
  Description of Artificial Sequence: Synthetic oligonucleotide
gaaagcauuuguu

SEQ ID NO: 147673 - RNA, 13 nt, Artificial Sequence
  Description of Artificial Sequence: Synthetic oligonucleotide
ugaguuaaacgaa

SEQ ID NO: 147674 - RNA, 12 nt, Artificial Sequence
  Description of Artificial Sequence: Synthetic oligonucleotide
acugauacagaa

SEQ ID NO: 147675 - RNA, 12 nt, Artificial Sequence
  Description of Artificial Sequence: Synthetic oligonucleotide
auauuauauaua

SEQ ID NO: 147676 - RNA, 12 nt, Artificial Sequence
  Description of Artificial Sequence: Synthetic oligonucleotide
auuauauauaua

SEQ ID NO: 147677 - RNA, 12 nt, Artificial Sequence
  Description of Artificial Sequence: Synthetic oligonucleotide
ucacuggaugua

SEQ ID NO: 147678 - RNA, 12 nt, Artificial Sequence
  Description of Artificial Sequence: Synthetic oligonucleotide
cagggaagagga

SEQ ID NO: 147679 - RNA, 15 nt, Artificial Sequence
  Description of Artificial Sequence: Synthetic oligonucleotide
augaucuuuuuuuug

SEQ ID NO: 147680 - RNA, 11 nt, Artificial Sequence
  Description of Artificial Sequence: Synthetic oligonucleotide
aguucacggcc

SEQ ID NO: 147681 - RNA, 13 nt, Artificial Sequence
  Description of Artificial Sequence: Synthetic oligonucleotide
caccaucacacca

SEQ ID NO: 147682 - RNA, 11 nt, Artificial Sequence
  Description of Artificial Sequence: Synthetic oligonucleotide
ccugcggguuu

SEQ ID NO: 147683 - RNA, 10 nt, Artificial Sequence
  Description of Artificial Sequence: Synthetic oligonucleotide
auccaguuug

SEQ ID NO: 147684 - RNA, 13 nt, Artificial Sequence
  Description of Artificial Sequence: Synthetic oligonucleotide
guuaaggacuucu

SEQ ID NO: 147685 - RNA, 13 nt, Artificial Sequence
  Description of Artificial Sequence: Synthetic oligonucleotide
cagugggacagag

SEQ ID NO: 147686 - RNA, 14 nt, Artificial Sequence
  Description of Artificial Sequence: Synthetic oligonucleotide
aauuuguuauugug

SEQ ID NO: 147687 - RNA, 13 nt, Artificial Sequence
  Description of Artificial Sequence: Synthetic oligonucleotide
uucaaaugcauuu

SEQ ID NO: 147688 - RNA, 10 nt, Artificial Sequence
  Description of Artificial Sequence: Synthetic oligonucleotide
caggaaagcc

SEQ ID NO: 147689 - RNA, 11 nt, Artificial Sequence
  Description of Artificial Sequence: Synthetic oligonucleotide
aggaaagcccu

SEQ ID NO: 147690 - RNA, 12 nt, Artificial Sequence
  Description of Artificial Sequence: Synthetic oligonucleotide
cccagcauggcc

SEQ ID NO: 147691 - RNA, 11 nt, Artificial Sequence
  Description of Artificial Sequence: Synthetic oligonucleotide
cuucucccuga

SEQ ID NO: 147692 - RNA, 12 nt, Artificial Sequence
  Description of Artificial Sequence: Synthetic oligonucleotide
gaagaagcccuu

SEQ ID NO: 147693 - RNA, 12 nt, Artificial Sequence
  Description of Artificial Sequence: Synthetic oligonucleotide
agaagcccuuca

SEQ ID NO: 147694 - RNA, 11 nt, Artificial Sequence
  Description of Artificial Sequence: Synthetic oligonucleotide
gcccuucagcg

SEQ ID NO: 147695 - RNA, 11 nt, Artificial Sequence
  Description of Artificial Sequence: Synthetic oligonucleotide
ccuucagcggc

SEQ ID NO: 147696 - RNA, 12 nt, Artificial Sequence
  Description of Artificial Sequence: Synthetic oligonucleotide
ucagcggccagu

SEQ ID NO: 147697 - RNA, 12 nt, Artificial Sequence
  Description of Artificial Sequence: Synthetic oligonucleotide
ugaaaagcuccg

SEQ ID NO: 147698 - RNA, 11 nt, Artificial Sequence
  Description of Artificial Sequence: Synthetic oligonucleotide
aaaagcuccgg

SEQ ID NO: 147699 - RNA, 13 nt, Artificial Sequence
  Description of Artificial Sequence: Synthetic oligonucleotide
agucaacagucug

SEQ ID NO: 147700 - RNA, 13 nt, Artificial Sequence
  Description of Artificial Sequence: Synthetic oligonucleotide
cagaguucaaaag

SEQ ID NO: 147701 - RNA, 13 nt, Artificial Sequence
  Description of Artificial Sequence: Synthetic oligonucleotide
agaguucaaaagc

SEQ ID NO: 147702 - RNA, 12 nt, Artificial Sequence
  Description of Artificial Sequence: Synthetic oligonucleotide
uucaaaagcccu

SEQ ID NO: 147703 - RNA, 12 nt, Artificial Sequence
  Description of Artificial Sequence: Synthetic oligonucleotide
ucaaaagcccuu

SEQ ID NO: 147704 - RNA, 12 nt, Artificial Sequence
  Description of Artificial Sequence: Synthetic oligonucleotide
aaaagcccuuca

SEQ ID NO: 147705 - RNA, 12 nt, Artificial Sequence
  Description of Artificial Sequence: Synthetic oligonucleotide
aaagcccuucag

SEQ ID NO: 147706 - RNA, 13 nt, Artificial Sequence
  Description of Artificial Sequence: Synthetic oligonucleotide
gugaagccgcucg

SEQ ID NO: 147707 - RNA, 12 nt, Artificial Sequence
  Description of Artificial Sequence: Synthetic oligonucleotide
cacgccagucaa

SEQ ID NO: 147708 - RNA, 13 nt, Artificial Sequence
  Description of Artificial Sequence: Synthetic oligonucleotide
uucuuggugcgug

SEQ ID NO: 147709 - RNA, 14 nt, Artificial Sequence
  Description of Artificial Sequence: Synthetic oligonucleotide
auuggauucaucag

SEQ ID NO: 147710 - RNA, 13 nt, Artificial Sequence
  Description of Artificial Sequence: Synthetic oligonucleotide
uggaauaccuaag

SEQ ID NO: 147711 - RNA, 12 nt, Artificial Sequence
  Description of Artificial Sequence: Synthetic oligonucleotide
auuugaggcuca

SEQ ID NO: 147712 - RNA, 11 nt, Artificial Sequence
  Description of Artificial Sequence: Synthetic oligonucleotide
ucuacaauugg

SEQ ID NO: 147713 - RNA, 12 nt, Artificial Sequence
  Description of Artificial Sequence: Synthetic oligonucleotide
uaguuaggagcc

SEQ ID NO: 147714 - RNA, 13 nt, Artificial Sequence
  Description of Artificial Sequence: Synthetic oligonucleotide
agucaauauccac

SEQ ID NO: 147715 - RNA, 13 nt, Artificial Sequence
  Description of Artificial Sequence: Synthetic oligonucleotide
auguucagucaca

SEQ ID NO: 147716 - RNA, 12 nt, Artificial Sequence
  Description of Artificial Sequence: Synthetic oligonucleotide
acacacacauac

SEQ ID NO: 147717 - RNA, 12 nt, Artificial Sequence
  Description of Artificial Sequence: Synthetic oligonucleotide
uuccuuuugcuu

SEQ ID NO: 147718 - RNA, 16 nt, Artificial Sequence
  Description of Artificial Sequence: Synthetic oligonucleotide
uuuuaaaguaauuuuu

SEQ ID NO: 147719 - RNA, 13 nt, Artificial Sequence
  Description of Artificial Sequence: Synthetic oligonucleotide
caacagucaaugg

SEQ ID NO: 147720 - RNA, 13 nt, Artificial Sequence
  Description of Artificial Sequence: Synthetic oligonucleotide
ucgacaaaccaau

SEQ ID NO: 147721 - RNA, 12 nt, Artificial Sequence
  Description of Artificial Sequence: Synthetic oligonucleotide
acugcuaccacu

SEQ ID NO: 147722 - RNA, 13 nt, Artificial Sequence
  Description of Artificial Sequence: Synthetic oligonucleotide
gcaagcggucuua

SEQ ID NO: 147723 - RNA, 13 nt, Artificial Sequence
  Description of Artificial Sequence: Synthetic oligonucleotide
ggucuuaccggcu

SEQ ID NO: 147724 - RNA, 11 nt, Artificial Sequence
  Description of Artificial Sequence: Synthetic oligonucleotide
gauggguuacc

SEQ ID NO: 147725 - RNA, 11 nt, Artificial Sequence
  Description of Artificial Sequence: Synthetic oligonucleotide
guuaccugcga

SEQ ID NO: 147726 - RNA, 12 nt, Artificial Sequence
  Description of Artificial Sequence: Synthetic oligonucleotide
aaucuugcugag

SEQ ID NO: 147727 - RNA, 13 nt, Artificial Sequence
  Description of Artificial Sequence: Synthetic oligonucleotide
agcauaaaacagu

SEQ ID NO: 147728 - RNA, 12 nt, Artificial Sequence
  Description of Artificial Sequence: Synthetic oligonucleotide
guccuuuauccu

SEQ ID NO: 147729 - RNA, 12 nt, Artificial Sequence
  Description of Artificial Sequence: Synthetic oligonucleotide
caacgcaaguug

SEQ ID NO: 147730 - RNA, 13 nt, Artificial Sequence
  Description of Artificial Sequence: Synthetic oligonucleotide
aaacugaaaccau

SEQ ID NO: 147731 - RNA, 14 nt, Artificial Sequence
  Description of Artificial Sequence: Synthetic oligonucleotide
acuuuguuaaauau

SEQ ID NO: 147732 - RNA, 14 nt, Artificial Sequence
  Description of Artificial Sequence: Synthetic oligonucleotide
guauauuaaaaguu

SEQ ID NO: 147733 - RNA, 13 nt, Artificial Sequence
  Description of Artificial Sequence: Synthetic oligonucleotide
guuuugacuuaac

SEQ ID NO: 147734 - RNA, 13 nt, Artificial Sequence
  Description of Artificial Sequence: Synthetic oligonucleotide
gcaaacucagcac

SEQ ID NO: 147735 - RNA, 11 nt, Artificial Sequence
  Description of Artificial Sequence: Synthetic oligonucleotide
ugcugaccuca

SEQ ID NO: 147736 - RNA, 14 nt, Artificial Sequence
  Description of Artificial Sequence: Synthetic oligonucleotide
uuuauucagaucgc

SEQ ID NO: 147737 - RNA, 13 nt, Artificial Sequence
  Description of Artificial Sequence: Synthetic oligonucleotide
aggguucugggau

SEQ ID NO: 147738 - RNA, 15 nt, Artificial Sequence
  Description of Artificial Sequence: Synthetic oligonucleotide
auauuggaaauuaug

SEQ ID NO: 147739 - RNA, 13 nt, Artificial Sequence
  Description of Artificial Sequence: Synthetic oligonucleotide
auggaagcacuag

SEQ ID NO: 147740 - RNA, 13 nt, Artificial Sequence
  Description of Artificial Sequence: Synthetic oligonucleotide
guuuuuaugugga

SEQ ID NO: 147741 - RNA, 12 nt, Artificial Sequence
  Description of Artificial Sequence: Synthetic oligonucleotide
ggaauugguaga

SEQ ID NO: 147742 - RNA, 13 nt, Artificial Sequence
  Description of Artificial Sequence: Synthetic oligonucleotide
uuagacuuggaga

SEQ ID NO: 147743 - RNA, 13 nt, Artificial Sequence
  Description of Artificial Sequence: Synthetic oligonucleotide
uuacaguauucca

SEQ ID NO: 147744 - RNA, 15 nt, Artificial Sequence
  Description of Artificial Sequence: Synthetic oligonucleotide
ccacugaugaauuaa

SEQ ID NO: 147745 - RNA, 12 nt, Artificial Sequence
  Description of Artificial Sequence: Synthetic oligonucleotide
ccacaucaucac

SEQ ID NO: 147746 - RNA, 13 nt, Artificial Sequence
  Description of Artificial Sequence: Synthetic oligonucleotide
cucaccaaacaga

SEQ ID NO: 147747 - RNA, 12 nt, Artificial Sequence
  Description of Artificial Sequence: Synthetic oligonucleotide
ggaacaugaugg

SEQ ID NO: 147748 - RNA, 12 nt, Artificial Sequence
  Description of Artificial Sequence: Synthetic oligonucleotide
cauguagacugc

SEQ ID NO: 147749 - RNA, 13 nt, Artificial Sequence
  Description of Artificial Sequence: Synthetic oligonucleotide
ggaucuauuuaug

SEQ ID NO: 147750 - RNA, 12 nt, Artificial Sequence
  Description of Artificial Sequence: Synthetic oligonucleotide
gcacuauuauca

SEQ ID NO: 147751 - RNA, 11 nt, Artificial Sequence
  Description of Artificial Sequence: Synthetic oligonucleotide
aucaguucugc

SEQ ID NO: 147752 - RNA, 13 nt, Artificial Sequence
  Description of Artificial Sequence: Synthetic oligonucleotide
agauuaaaccuac

SEQ ID NO: 147753 - RNA, 13 nt, Artificial Sequence
  Description of Artificial Sequence: Synthetic oligonucleotide
auaaaauccuucu

SEQ ID NO: 147754 - RNA, 12 nt, Artificial Sequence
  Description of Artificial Sequence: Synthetic oligonucleotide
aaugcuguagac

SEQ ID NO: 147755 - RNA, 13 nt, Artificial Sequence
  Description of Artificial Sequence: Synthetic oligonucleotide
uugauaggaauag

SEQ ID NO: 147756 - RNA, 11 nt, Artificial Sequence
  Description of Artificial Sequence: Synthetic oligonucleotide
aauggcccuga

SEQ ID NO: 147757 - RNA, 11 nt, Artificial Sequence
  Description of Artificial Sequence: Synthetic oligonucleotide
uuccucaagca

SEQ ID NO: 147758 - RNA, 10 nt, Artificial Sequence
  Description of Artificial Sequence: Synthetic oligonucleotide
guucagccca

SEQ ID NO: 147759 - RNA, 11 nt, Artificial Sequence
  Description of Artificial Sequence: Synthetic oligonucleotide
gcugcugaacc

SEQ ID NO: 147760 - RNA, 12 nt, Artificial Sequence
  Description of Artificial Sequence: Synthetic oligonucleotide
aaguucucuuca

SEQ ID NO: 147761 - RNA, 11 nt, Artificial Sequence
  Description of Artificial Sequence: Synthetic oligonucleotide
ccagccuagag

SEQ ID NO: 147762 - RNA, 13 nt, Artificial Sequence
  Description of Artificial Sequence: Synthetic oligonucleotide
cucugugaagugu

SEQ ID NO: 147763 - RNA, 14 nt, Artificial Sequence
  Description of Artificial Sequence: Synthetic oligonucleotide
ugagaaaauuucaa

SEQ ID NO: 147764 - RNA, 11 nt, Artificial Sequence
  Description of Artificial Sequence: Synthetic oligonucleotide
aauccuccuga

SEQ ID NO: 147765 - RNA, 12 nt, Artificial Sequence
  Description of Artificial Sequence: Synthetic oligonucleotide
gugacaucauau

SEQ ID NO: 147766 - RNA, 13 nt, Artificial Sequence
  Description of Artificial Sequence: Synthetic oligonucleotide
aaucuucaucaua

SEQ ID NO: 147767 - RNA, 13 nt, Artificial Sequence
  Description of Artificial Sequence: Synthetic oligonucleotide
gacuagcuauuaa

SEQ ID NO: 147768 - RNA, 14 nt, Artificial Sequence
  Description of Artificial Sequence: Synthetic oligonucleotide
ucucuacuaaaaau

SEQ ID NO: 147769 - RNA, 12 nt, Artificial Sequence
  Description of Artificial Sequence: Synthetic oligonucleotide
ucuaucucgccu

SEQ ID NO: 147770 - RNA, 13 nt, Artificial Sequence
  Description of Artificial Sequence: Synthetic oligonucleotide
cuucgguccaguu

SEQ ID NO: 147771 - RNA, 11 nt, Artificial Sequence
  Description of Artificial Sequence: Synthetic oligonucleotide
gauguagccgc

SEQ ID NO: 147772 - RNA, 12 nt, Artificial Sequence
  Description of Artificial Sequence: Synthetic oligonucleotide
ugaggagacuug

SEQ ID NO: 147773 - RNA, 12 nt, Artificial Sequence
  Description of Artificial Sequence: Synthetic oligonucleotide
gaguagugagga

SEQ ID NO: 147774 - RNA, 14 nt, Artificial Sequence
  Description of Artificial Sequence: Synthetic oligonucleotide
cagaugaguacaaa

SEQ ID NO: 147775 - RNA, 13 nt, Artificial Sequence
  Description of Artificial Sequence: Synthetic oligonucleotide
guuguuaaugggc

SEQ ID NO: 147776 - RNA, 13 nt, Artificial Sequence
  Description of Artificial Sequence: Synthetic oligonucleotide
uuuuuaauuuauu

SEQ ID NO: 147777 - RNA, 12 nt, Artificial Sequence
  Description of Artificial Sequence: Synthetic oligonucleotide
uauuuaaauaug

SEQ ID NO: 147778 - RNA, 13 nt, Artificial Sequence
  Description of Artificial Sequence: Synthetic oligonucleotide
uauccuuuguuuc

SEQ ID NO: 147779 - RNA, 14 nt, Artificial Sequence
  Description of Artificial Sequence: Synthetic oligonucleotide
cgucuaaguguuug

SEQ ID NO: 147780 - RNA, 12 nt, Artificial Sequence
  Description of Artificial Sequence: Synthetic oligonucleotide
accugugacaaa

SEQ ID NO: 147781 - RNA, 13 nt, Artificial Sequence
  Description of Artificial Sequence: Synthetic oligonucleotide
ccaggcugaauua

SEQ ID NO: 147782 - RNA, 14 nt, Artificial Sequence
  Description of Artificial Sequence: Synthetic oligonucleotide
gucauucuuacaau

SEQ ID NO: 147783 - RNA, 15 nt, Artificial Sequence
  Description of Artificial Sequence: Synthetic oligonucleotide
ucauucuuacaauug

SEQ ID NO: 147784 - RNA, 12 nt, Artificial Sequence
  Description of Artificial Sequence: Synthetic oligonucleotide
cagagaguguac

SEQ ID NO: 147785 - RNA, 12 nt, Artificial Sequence
  Description of Artificial Sequence: Synthetic oligonucleotide
agaacucagcag

SEQ ID NO: 147786 - RNA, 13 nt, Artificial Sequence
  Description of Artificial Sequence: Synthetic oligonucleotide
uuuauuuucagua

SEQ ID NO: 147787 - RNA, 12 nt, Artificial Sequence
  Description of Artificial Sequence: Synthetic oligonucleotide
ucuuaaauggaa

SEQ ID NO: 147788 - RNA, 13 nt, Artificial Sequence
  Description of Artificial Sequence: Synthetic oligonucleotide
ugccuaaaauugu

SEQ ID NO: 147789 - RNA, 12 nt, Artificial Sequence
  Description of Artificial Sequence: Synthetic oligonucleotide
agacugugagcu

SEQ ID NO: 147790 - RNA, 14 nt, Artificial Sequence
  Description of Artificial Sequence: Synthetic oligonucleotide
ugcuuuuuauuaau

SEQ ID NO: 147791 - RNA, 13 nt, Artificial Sequence
  Description of Artificial Sequence: Synthetic oligonucleotide
cucuucuuacauu

SEQ ID NO: 147792 - RNA, 15 nt, Artificial Sequence
  Description of Artificial Sequence: Synthetic oligonucleotide
cauuuguaaaaaugu

SEQ ID NO: 147793 - RNA, 15 nt, Artificial Sequence
  Description of Artificial Sequence: Synthetic oligonucleotide
aucuuaauucauauu

SEQ ID NO: 147794 - RNA, 13 nt, Artificial Sequence
  Description of Artificial Sequence: Synthetic oligonucleotide
gaacuaaucauga

SEQ ID NO: 147795 - RNA, 12 nt, Artificial Sequence
  Description of Artificial Sequence: Synthetic oligonucleotide
ucugcucuuggg

SEQ ID NO: 147796 - RNA, 13 nt, Artificial Sequence
  Description of Artificial Sequence: Synthetic oligonucleotide
caguagcuuugag

SEQ ID NO: 147797 - RNA, 14 nt, Artificial Sequence
  Description of Artificial Sequence: Synthetic oligonucleotide
cacguaauauuuca

SEQ ID NO: 147798 - RNA, 13 nt, Artificial Sequence
  Description of Artificial Sequence: Synthetic oligonucleotide
uauucucuucacu

SEQ ID NO: 147799 - RNA, 14 nt, Artificial Sequence
  Description of Artificial Sequence: Synthetic oligonucleotide
cuaaugcuaagaaa

SEQ ID NO: 147800 - RNA, 12 nt, Artificial Sequence
  Description of Artificial Sequence: Synthetic oligonucleotide
gcugaaaaucaa

SEQ ID NO: 147801 - RNA, 14 nt, Artificial Sequence
  Description of Artificial Sequence: Synthetic oligonucleotide
aauaugauuacuuu

SEQ ID NO: 147802 - RNA, 14 nt, Artificial Sequence
  Description of Artificial Sequence: Synthetic oligonucleotide
cauuuuguucuaca

SEQ ID NO: 147803 - RNA, 12 nt, Artificial Sequence
  Description of Artificial Sequence: Synthetic oligonucleotide
cccgggacucuc

SEQ ID NO: 147804 - RNA, 14 nt, Artificial Sequence
  Description of Artificial Sequence: Synthetic oligonucleotide
ccuuuaaaguaaag

SEQ ID NO: 147805 - RNA, 13 nt, Artificial Sequence
  Description of Artificial Sequence: Synthetic oligonucleotide
ucuggaagccugg

SEQ ID NO: 147806 - RNA, 14 nt, Artificial Sequence
  Description of Artificial Sequence: Synthetic oligonucleotide
aaaacaaaagagag

SEQ ID NO: 147807 - RNA, 13 nt, Artificial Sequence
  Description of Artificial Sequence: Synthetic oligonucleotide
aucaguuaugccg

SEQ ID NO: 147808 - RNA, 13 nt, Artificial Sequence
  Description of Artificial Sequence: Synthetic oligonucleotide
uaaaagaagucca

SEQ ID NO: 147809 - RNA, 11 nt, Artificial Sequence
  Description of Artificial Sequence: Synthetic oligonucleotide
aggugagguua

SEQ ID NO: 147810 - RNA, 11 nt, Artificial Sequence
  Description of Artificial Sequence: Synthetic oligonucleotide
gggaagaggac

SEQ ID NO: 147811 - RNA, 13 nt, Artificial Sequence
  Description of Artificial Sequence: Synthetic oligonucleotide
aagcaaguauugu

SEQ ID NO: 147812 - RNA, 12 nt, Artificial Sequence
  Description of Artificial Sequence: Synthetic oligonucleotide
auuguagcacuc

SEQ ID NO: 147813 - RNA, 14 nt, Artificial Sequence
  Description of Artificial Sequence: Synthetic oligonucleotide
acaaaaccacaaau

SEQ ID NO: 147814 - RNA, 12 nt, Artificial Sequence
  Description of Artificial Sequence: Synthetic oligonucleotide
uaagcccauaca

SEQ ID NO: 147815 - RNA, 11 nt, Artificial Sequence
  Description of Artificial Sequence: Synthetic oligonucleotide
agcccauacag

SEQ ID NO: 147816 - RNA, 12 nt, Artificial Sequence
  Description of Artificial Sequence: Synthetic oligonucleotide
cagaaaccuucc

SEQ ID NO: 147817 - RNA, 10 nt, Artificial Sequence
  Description of Artificial Sequence: Synthetic oligonucleotide
guauaccuac

SEQ ID NO: 147818 - RNA, 13 nt, Artificial Sequence
  Description of Artificial Sequence: Synthetic oligonucleotide
gccaguuuucgga

SEQ ID NO: 147819 - RNA, 9 nt, Artificial Sequence
  Description of Artificial Sequence: Synthetic oligonucleotide
ggaacaggg

SEQ ID NO: 147820 - RNA, 13 nt, Artificial Sequence
  Description of Artificial Sequence: Synthetic oligonucleotide
uuaacuuuccagu

SEQ ID NO: 147821 - RNA, 14 nt, Artificial Sequence
  Description of Artificial Sequence: Synthetic oligonucleotide
aaaguuugguuuug

SEQ ID NO: 147822 - RNA, 12 nt, Artificial Sequence
  Description of Artificial Sequence: Synthetic oligonucleotide
cuucccacugua

SEQ ID NO: 147823 - RNA, 13 nt, Artificial Sequence
  Description of Artificial Sequence: Synthetic oligonucleotide
ugauaccauauga

SEQ ID NO: 147824 - RNA, 11 nt, Artificial Sequence
  Description of Artificial Sequence: Synthetic oligonucleotide
aacaugggcug

SEQ ID NO: 147825 - RNA, 13 nt, Artificial Sequence
  Description of Artificial Sequence: Synthetic oligonucleotide
caacuuuuucaua

SEQ ID NO: 147826 - RNA, 12 nt, Artificial Sequence
  Description of Artificial Sequence: Synthetic oligonucleotide
caugaggccgga

SEQ ID NO: 147827 - RNA, 11 nt, Artificial Sequence
  Description of Artificial Sequence: Synthetic oligonucleotide
acugcauuugu

SEQ ID NO: 147828 - RNA, 13 nt, Artificial Sequence
  Description of Artificial Sequence: Synthetic oligonucleotide
aauguuuacuacc

SEQ ID NO: 147829 - RNA, 15 nt, Artificial Sequence
  Description of Artificial Sequence: Synthetic oligonucleotide
aauuuuuugaugaaa

SEQ ID NO: 147830 - RNA, 14 nt, Artificial Sequence
  Description of Artificial Sequence: Synthetic oligonucleotide
cagugugugaauuu

SEQ ID NO: 147831 - RNA, 13 nt, Artificial Sequence
  Description of Artificial Sequence: Synthetic oligonucleotide
gagcaauguaugu

SEQ ID NO: 147832 - RNA, 14 nt, Artificial Sequence
  Description of Artificial Sequence: Synthetic oligonucleotide
aaagcacauauaua

SEQ ID NO: 147833 - RNA, 14 nt, Artificial Sequence
  Description of Artificial Sequence: Synthetic oligonucleotide
guaauaguuucucc

SEQ ID NO: 147834 - RNA, 13 nt, Artificial Sequence
  Description of Artificial Sequence: Synthetic oligonucleotide
aguuucuccaaau

SEQ ID NO: 147835 - RNA, 13 nt, Artificial Sequence
  Description of Artificial Sequence: Synthetic oligonucleotide
uacuuccuagaaa

SEQ ID NO: 147836 - RNA, 13 nt, Artificial Sequence
  Description of Artificial Sequence: Synthetic oligonucleotide
uacaccauauaug

SEQ ID NO: 147837 - RNA, 14 nt, Artificial Sequence
  Description of Artificial Sequence: Synthetic oligonucleotide
auauaugaauggag

SEQ ID NO: 147838 - RNA, 13 nt, Artificial Sequence
  Description of Artificial Sequence: Synthetic oligonucleotide
acgagaagaagau

SEQ ID NO: 147839 - RNA, 13 nt, Artificial Sequence
  Description of Artificial Sequence: Synthetic oligonucleotide
ucauuuacaggga

SEQ ID NO: 147840 - RNA, 13 nt, Artificial Sequence
  Description of Artificial Sequence: Synthetic oligonucleotide
cauuuacagggac

SEQ ID NO: 147841 - RNA, 10 nt, Artificial Sequence
  Description of Artificial Sequence: Synthetic oligonucleotide
agggaccuga

SEQ ID NO: 147842 - RNA, 14 nt, Artificial Sequence
  Description of Artificial Sequence: Synthetic oligonucleotide
uguuugacugcauc

SEQ ID NO: 147843 - RNA, 13 nt, Artificial Sequence
  Description of Artificial Sequence: Synthetic oligonucleotide
uuugacugcaucg

SEQ ID NO: 147844 - RNA, 12 nt, Artificial Sequence
  Description of Artificial Sequence: Synthetic oligonucleotide
gaguucacaggg

SEQ ID NO: 147845 - RNA, 13 nt, Artificial Sequence
  Description of Artificial Sequence: Synthetic oligonucleotide
ggcaccucugucc

SEQ ID NO: 147846 - RNA, 15 nt, Artificial Sequence
  Description of Artificial Sequence: Synthetic oligonucleotide
gguuugucuuuuuaa

SEQ ID NO: 147847 - RNA, 14 nt, Artificial Sequence
  Description of Artificial Sequence: Synthetic oligonucleotide
uuugucuuuuuaag

SEQ ID NO: 147848 - RNA, 13 nt, Artificial Sequence
  Description of Artificial Sequence: Synthetic oligonucleotide
ccuaaagguuguc

SEQ ID NO: 147849 - RNA, 12 nt, Artificial Sequence
  Description of Artificial Sequence: Synthetic oligonucleotide
aagguugucgac

SEQ ID NO: 147850 - RNA, 13 nt, Artificial Sequence
  Description of Artificial Sequence: Synthetic oligonucleotide
accuggcaauugu

SEQ ID NO: 147851 - RNA, 12 nt, Artificial Sequence
  Description of Artificial Sequence: Synthetic oligonucleotide
aguggugcgagg

SEQ ID NO: 147852 - RNA, 13 nt, Artificial Sequence
  Description of Artificial Sequence: Synthetic oligonucleotide
agagacaugaaau

SEQ ID NO: 147853 - RNA, 13 nt, Artificial Sequence
  Description of Artificial Sequence: Synthetic oligonucleotide
auauauuucucca

SEQ ID NO: 147854 - RNA, 10 nt, Artificial Sequence
  Description of Artificial Sequence: Synthetic oligonucleotide
caugaaggcu

SEQ ID NO: 147855 - RNA, 11 nt, Artificial Sequence
  Description of Artificial Sequence: Synthetic oligonucleotide
gcuggaguggu

SEQ ID NO: 147856 - RNA, 11 nt, Artificial Sequence
  Description of Artificial Sequence: Synthetic oligonucleotide
aggaagagagg

SEQ ID NO: 147857 - RNA, 12 nt, Artificial Sequence
  Description of Artificial Sequence: Synthetic oligonucleotide
cuugcaucgggc

SEQ ID NO: 147858 - RNA, 13 nt, Artificial Sequence
  Description of Artificial Sequence: Synthetic oligonucleotide
auauccuacugug

SEQ ID NO: 147859 - RNA, 13 nt, Artificial Sequence
  Description of Artificial Sequence: Synthetic oligonucleotide
uccuacuguguaa

SEQ ID NO: 147860 - RNA, 12 nt, Artificial Sequence
  Description of Artificial Sequence: Synthetic oligonucleotide
ccuuguagugua

SEQ ID NO: 147861 - RNA, 13 nt, Artificial Sequence
  Description of Artificial Sequence: Synthetic oligonucleotide
ucuuuguugauug

SEQ ID NO: 147862 - RNA, 14 nt, Artificial Sequence
  Description of Artificial Sequence: Synthetic oligonucleotide
uuuguugauugaaa

SEQ ID NO: 147863 - RNA, 15 nt, Artificial Sequence
  Description of Artificial Sequence: Synthetic oligonucleotide
uucuuuuucuuccau

SEQ ID NO: 147864 - RNA, 13 nt, Artificial Sequence
  Description of Artificial Sequence: Synthetic oligonucleotide
aaucuuccuucua

SEQ ID NO: 147865 - RNA, 13 nt, Artificial Sequence
  Description of Artificial Sequence: Synthetic oligonucleotide
uugaaugcuucau

SEQ ID NO: 147866 - RNA, 13 nt, Artificial Sequence
  Description of Artificial Sequence: Synthetic oligonucleotide
ugaaugcuucaug

SEQ ID NO: 147867 - RNA, 13 nt, Artificial Sequence
  Description of Artificial Sequence: Synthetic oligonucleotide
aauucuacuuuga

SEQ ID NO: 147868 - RNA, 13 nt, Artificial Sequence
  Description of Artificial Sequence: Synthetic oligonucleotide
agcaacuacagac

SEQ ID NO: 147869 - RNA, 13 nt, Artificial Sequence
  Description of Artificial Sequence: Synthetic oligonucleotide
gaccaaggucaac

SEQ ID NO: 147870 - RNA, 13 nt, Artificial Sequence
  Description of Artificial Sequence: Synthetic oligonucleotide
cgacuaucucgac

SEQ ID NO: 147871 - RNA, 13 nt, Artificial Sequence
  Description of Artificial Sequence: Synthetic oligonucleotide
aaccuucccaaac

SEQ ID NO: 147872 - RNA, 14 nt, Artificial Sequence
  Description of Artificial Sequence: Synthetic oligonucleotide
ccaagcuuagaacu

SEQ ID NO: 147873 - RNA, 15 nt, Artificial Sequence
  Description of Artificial Sequence: Synthetic oligonucleotide
agcuuagaacuuuaa

SEQ ID NO: 147874 - RNA, 11 nt, Artificial Sequence
  Description of Artificial Sequence: Synthetic oligonucleotide
aagaccaccac

SEQ ID NO: 147875 - RNA, 14 nt, Artificial Sequence
  Description of Artificial Sequence: Synthetic oligonucleotide
gcgagaaauaaagu

SEQ ID NO: 147876 - RNA, 14 nt, Artificial Sequence
  Description of Artificial Sequence: Synthetic oligonucleotide
cgagaaauaaaguu

SEQ ID NO: 147877 - RNA, 12 nt, Artificial Sequence
  Description of Artificial Sequence: Synthetic oligonucleotide
aggaaaugaucc

SEQ ID NO: 147878 - RNA, 13 nt, Artificial Sequence
  Description of Artificial Sequence: Synthetic oligonucleotide
gaagaaaugaaac

SEQ ID NO: 147879 - RNA, 13 nt, Artificial Sequence
  Description of Artificial Sequence: Synthetic oligonucleotide
guuuccauccucc

SEQ ID NO: 147880 - RNA, 15 nt, Artificial Sequence
  Description of Artificial Sequence: Synthetic oligonucleotide
acugaaaaucuuuga

SEQ ID NO: 147881 - RNA, 11 nt, Artificial Sequence
  Description of Artificial Sequence: Synthetic oligonucleotide
ugccguucagg

SEQ ID NO: 147882 - RNA, 13 nt, Artificial Sequence
  Description of Artificial Sequence: Synthetic oligonucleotide
caggguccagaag

SEQ ID NO: 147883 - RNA, 13 nt, Artificial Sequence
  Description of Artificial Sequence: Synthetic oligonucleotide
ucaagacugcuug

SEQ ID NO: 147884 - RNA, 13 nt, Artificial Sequence
  Description of Artificial Sequence: Synthetic oligonucleotide
uccaugucuuugg

SEQ ID NO: 147885 - RNA, 11 nt, Artificial Sequence
  Description of Artificial Sequence: Synthetic oligonucleotide
gccugaaacac

SEQ ID NO: 147886 - RNA, 12 nt, Artificial Sequence
  Description of Artificial Sequence: Synthetic oligonucleotide
ucucuguaccuc

SEQ ID NO: 147887 - RNA, 12 nt, Artificial Sequence
  Description of Artificial Sequence: Synthetic oligonucleotide
agcaagacaaga

SEQ ID NO: 147888 - RNA, 13 nt, Artificial Sequence
  Description of Artificial Sequence: Synthetic oligonucleotide
gcaagacaagaaa

SEQ ID NO: 147889 - RNA, 12 nt, Artificial Sequence
  Description of Artificial Sequence: Synthetic oligonucleotide
uguacaagaucc

SEQ ID NO: 147890 - RNA, 12 nt, Artificial Sequence
  Description of Artificial Sequence: Synthetic oligonucleotide
cguacuugcaga

SEQ ID NO: 147891 - RNA, 13 nt, Artificial Sequence
  Description of Artificial Sequence: Synthetic oligonucleotide
cgaucgauacaga

SEQ ID NO: 147892 - RNA, 13 nt, Artificial Sequence
  Description of Artificial Sequence: Synthetic oligonucleotide
uauaaaaauaaau

SEQ ID NO: 147893 - RNA, 13 nt, Artificial Sequence
  Description of Artificial Sequence: Synthetic oligonucleotide
uaaaaauaaauau

SEQ ID NO: 147894 - RNA, 13 nt, Artificial Sequence
  Description of Artificial Sequence: Synthetic oligonucleotide
uuugacugcugug

SEQ ID NO: 147895 - RNA, 13 nt, Artificial Sequence
  Description of Artificial Sequence: Synthetic oligonucleotide
ggagaugagagac

SEQ ID NO: 147896 - RNA, 10 nt, Artificial Sequence
  Description of Artificial Sequence: Synthetic oligonucleotide
ucccacuugg

SEQ ID NO: 147897 - RNA, 10 nt, Artificial Sequence
  Description of Artificial Sequence: Synthetic oligonucleotide
guucacggcc

SEQ ID NO: 147898 - RNA, 12 nt, Artificial Sequence
  Description of Artificial Sequence: Synthetic oligonucleotide
accaucacacca
